United States Patent Application Publication US 2017/0009304 A1 - sequence listing, part 24

SEQ ID NO: 496316 - DNA, 98 bp, Homo sapiens
agaagctctgtgcgaagggctccgatgtacaggtggatcatctgaatctcctgaaacagtttgaacacctggaccctcagaaccagcatacattcgag

SEQ ID NO: 496317 - DNA, 75 bp, Homo sapiens
ctggaatatgaagcaacatgagatggtggatgaacccacaggccatggtaggggaggagtgtgtaggtgccatcg

SEQ ID NO: 496318 - DNA, 138 bp, Homo sapiens
gggagtctccgcgtcccgctcgctgggagagaggtacctctccttttccctctccctttccctaagcagaaaaagtcctacctggagcgaagcgttaaggaagctgaggacaacatccgggagatgctgatggcacga

SEQ ID NO: 496319 - DNA, 76 bp, Homo sapiens
gctcctgcttgagctggagaagaaccagctaccaaagactagatcatacgacaatctgaccacagcctgtgacaac

SEQ ID NO: 496320 - DNA, 100 bp, Homo sapiens
cgccgcccagagactgctgagcccgtccgtccgccgccaccacccactccggacacagtcaccttcaggccattcagaggaggaaagagaggggaatatg

SEQ ID NO: 496321 - DNA, 100 bp, Homo sapiens
cggctggcgaagctggcgagcgggggtcatccgagccgtgtcacacagggacagccgcaatccggacctggcggtatggcacagtcacaagggtgggtga

SEQ ID NO: 496322 - DNA, 75 bp, Homo sapiens
ccccaaaagagccaaactcagctcgcccggtttctcggcgaatgacagcacagaacccttaggagaaatcttgag

SEQ ID NO: 496323 - DNA, 100 bp, Homo sapiens
gcgtgtcataaaataccagtggaggccgacttcttgtatgcatactccacagcacctgatagttggttgccactttaggtctattccagtgaatgaaaaa

SEQ ID NO: 496324 - DNA, 88 bp, Homo sapiens
tccagaagagcatccagcggcacctggacgacctgtcgaaactgatgaccgagtgggagacagcagcaccagcggtggcagagacccc

SEQ ID NO: 496325 - DNA, 101 bp, Homo sapiens
caggactacagtaaggctgaaatcattgaagtgcttggagtgcagaactgaaagagacactttttcaaaaatggcaatggtatcagaattcctcaagcagg

SEQ ID NO: 496326 - DNA, 87 bp, Homo sapiens
attccttacttctccgccaacgcggtcatctcgcagaacgccatcaaccagctaatgagatgctggaggaaggacatgagtatgcgg

SEQ ID NO: 496327 - DNA, 112 bp, Homo sapiens
gctttggatcacctgcggaatggggtagatattaacacctgtaaccagggggaaatttgcagtggtgagaaaatgtataaagaaagattctgggaaagaatttgctgcaaag

SEQ ID NO: 496328 - DNA, 75 bp, Homo sapiens
cccctgcgttgtaccatccgcctgtgggacacctaccagttggactaaatgctcttccttcagaggattatccgg

SEQ ID NO: 496329 - DNA, 100 bp, Homo sapiens
ctacccacagatccttaccaacaaggaggcggaaaaggtggatattcagagtcaaagaaggatgatgctcgagcacagcttatgaaagaggatccggaac

SEQ ID NO: 496330 - DNA, 75 bp, Homo sapiens
aggatatcgtgtctggagcagtggagcccaaagacccctggagacatgaacccttaggagaaatcttgagagtgg

SEQ ID NO: 496331 - DNA, 101 bp, Homo sapiens
ctcgtccagagggtcggcagcggcacctacggggacgtctataagagggagaaccgaagattacaggaggccagcatgaggttggaacaagagaatgatga

SEQ ID NO: 496332 - DNA, 99 bp, Homo sapiens
ctacaatctaagaaggatttcagcaaatttggagcagggcaaagaaggggaactacgccttcctgtgggatgtggccgtggtggaatacgcagccctga

SEQ ID NO: 496333 - DNA, 100 bp, Homo sapiens
cgttggctggaagtgctgcgcacctacttggagctggtgctttgcgtgctggtcagcatccggaacaacaggtgtgatcccctgggcccgtttgttgtcg

SEQ ID NO: 496334 - DNA, 100 bp, Homo sapiens
catttttctgaagttgttcattaagacttcccagcattcctacagatataaataggatctatctggttcaatagatgacctccccatggggacagaagga

SEQ ID NO: 496335 - DNA, 100 bp, Homo sapiens
catgtaggtcatcttcttgaagaagtgctgaaaagtgaattaaatctcaaggatctaaatttacttgatcgctgtataaaagaaacattaagacttagac

SEQ ID NO: 496336 - DNA, 99 bp, Homo sapiens
cgaagagcttttgaagctggatggggttttgccctcaccaaaactttctctcttgataaggcatccaaagcctctgggatgtgttctgactgtaaaaac

SEQ ID NO: 496337 - DNA, 75 bp, Homo sapiens
accacaacatcagccctactattgggactcgctcagcagcagcctgaaaacttgctacaagtatctcaatcagac

SEQ ID NO: 496338 - DNA, 90 bp, Homo sapiens
tggccggctcccctctcggggcaacccagacgtgcaacaaagtgcgatgatgcgtctgttactagagtggagagtctaccttcgtctcac

SEQ ID NO: 496339 - DNA, 100 bp, Homo sapiens
aggctctggatgctcagcacagaaaggctgtgtcagagcccgggtactatgaagatggggcttttggaattcgcattgagaatgttgtccttgtggttcc

SEQ ID NO: 496340 - DNA, 101 bp, Homo sapiens
tcctatccaatccctgccttttgagtccaggtgggagaagcagaatttgcccgcatcatgagcattgtggaccccaaccgcctgggggtagtgacattcca

SEQ ID NO: 496341 - DNA, 74 bp, Homo sapiens
tacgtgataatgtgaagcgtcagaggtccctgtttgataggatgaaaactttcggaagagaaagttgcctgtgg

SEQ ID NO: 496342 - DNA, 100 bp, Homo sapiens
gaaaaaggacgaagaggagaaacaagctatgtactctagcactgacacgtttacccacttgaaacagggtggttgagtttgcctcttatggtgacttaaa

SEQ ID NO: 496343 - DNA, 110 bp, Homo sapiens
ctcagcaaggccagcaggccatgtcactggccatcctccgtgtcatccggttgcccgtggaacacagagcattcctaatgacagtcctgcccggggtgagggcacccatt

SEQ ID NO: 496344 - DNA, 113 bp, Homo sapiens
cggtgggtttatctcaaggcctgagtagccggtaacaaacgagggttcccgggattggaccgacgcagccatgaccattaaaaatctcaagtgacgactttgggaaactctgg

SEQ ID NO: 496345 - DNA, 75 bp, Homo sapiens
acggccctcacgccagcctggatggagaacccctacatcaaggttaaggaaacatcatttttgcgaaacaccata

SEQ ID NO: 496346 - DNA, 101 bp, Homo sapiens
gacggtcatgaggagctgaaggccatcgtatgggccacggcagagacaacgtgtgtaccccaagtgcacatggctgaccacccctaaaagcacctggcccc

SEQ ID NO: 496347 - DNA, 90 bp, Homo sapiens
cggaggcgctggcggcccacaagtacctgctggtggacattgaagtggacctaattcggttttccttttaaaagccccgcaaacaaaagt

SEQ ID NO: 496348 - DNA, 101 bp, Homo sapiens
tgttgatacaggggagtgcaagcagcttccaagccctcaaagtttgaaaggcaaaattctagtgaagagttcaaagaggccttttcattgtttgaccggac

SEQ ID NO: 496349 - DNA, 75 bp, Homo sapiens
gaaattgcaccacagatatatgggttgaagctgcacaagccttaatttatgctgagatggcaggatcaagcctag

SEQ ID NO: 496350 - DNA, 75 bp, Homo sapiens
gaggatgatttcggaacctggagaaaatggctgttgataatcaggtgtatgtggccacagcctctcctgcccggg

SEQ ID NO: 496351 - DNA, 101 bp, Homo sapiens
ggcggacgggaaggcgggagacgagaagcctgaaaagtcgcagcgagctggagccgccggaggacttgaaagaggagattgatattcgactctccagggtt

SEQ ID NO: 496352 - DNA, 87 bp, Homo sapiens
gagagtttaatggaaaccaaaaattctggctctgattcaccttataaagcaaaggggcagctggcattttatgctatgtgggagcct

SEQ ID NO: 496353 - DNA, 100 bp, Homo sapiens
atccgcgccatcgagaccctctcggcccgacggccatggaggctgaagagacgatggaatgccttcaggagttccctgaacatcataaaatgatcctcga

SEQ ID NO: 496354 - DNA, 96 bp, Homo sapiens
ccttggaatgcgaggagacagaagacagtagccaaacacccagtgctttctcctgctcaagacagccacacgaacacggatctccccccagtgtca

SEQ ID NO: 496355 - DNA, 82 bp, Homo sapiens
atcgagaggaccttccacgtggattctccagacgagaggggtattccctcagcggatactacacccatccatttcaaggcta

SEQ ID NO: 496356 - DNA, 82 bp, Homo sapiens
gcgctcacggccacggcgctggtcaccggggtctgcctgggcgtccgagctgggccacagcctgaacgagaacgtcctcaag

SEQ ID NO: 496357 - DNA, 51 bp, Homo sapiens
cctcccgggtagctgggactacaggtttgtctacagattttgagcgttcga

SEQ ID NO: 496358 - DNA, 75 bp, Homo sapiens
atcaacatttaccgaaagccacccatctacaaacagcatggatgaaaactttcggaagagaaagttgcctgtggt

SEQ ID NO: 496359 - DNA, 100 bp, Homo sapiens
cggcgcccgcctgccgcctccggagcgcctgtgtggtgccggtggtggtgtgcacattgagccccggtatagacagttcccccagctgaccagatcccag

SEQ ID NO: 496360 - DNA, 75 bp, Homo sapiens
attcaccctgtgtgtctgcccgacagggagacggcagccagaggtgctgatactcaaagaaggtttaagttgtct

SEQ ID NO: 496361 - DNA, 100 bp, Homo sapiens
tcgcctgccccgagccgcgggcttcccagggtctaaaattcccaggactccacagctttgcaccagataagcctggaggaatactaatgatggatctaaa

SEQ ID NO: 496362 - DNA, 100 bp, Homo sapiens
gttcaagttaatccaggtgagactttcacaataagagcagaggatggaacacttcagtgcattcaagatgaagttggagcccttgtttttgacattggat

SEQ ID NO: 496363 - DNA, 100 bp, Homo sapiens
ctggatatctcatgttctaacacgggataaattcaagttagaaaaagacaaaatattgaaatgcttctctaggaagatgagaatgtgcctactgctcctg

SEQ ID NO: 496364 - DNA, 50 bp, Homo sapiens
aaagaaacgaggaccaaagccttcagacccagatgatgtggtaccagttg

SEQ ID NO: 496365 - DNA, 100 bp, Homo sapiens
tgggattgcccaccacgataatgcagttcttattactagggctgatcccttatccaacatggttctaaccttcagtactaaagaagatgcagtttccttt

SEQ ID NO: 496366 - DNA, 100 bp, Homo sapiens
gccagatgggcagtacgagaacagcgaggggggctggatggaggactatgactacgtccacctacaggccatccggctgtccttagagcaagccctgcct

SEQ ID NO: 496367 - DNA, 75 bp, Homo sapiens
tagctgtttgtattttggctgctgcaggagccattttagacctgcctagagctggaacgttacctccagagcgag

SEQ ID NO: 496368 - DNA, 82 bp, Homo sapiens
tcgggggccgaactggccctggactacctctgcaggatgatcggctgaatgtaacagaggaactaacgtccaacgacaagac

SEQ ID NO: 496369 - DNA, 101 bp, Homo sapiens
cttactttgttttaatttcaagcaacacaactcagaacatgcgcgactgcaagttcctacatcacaagtaagttgcagaatgaagaagagtctggagaacc

SEQ ID NO: 496370 - DNA, 100 bp, Homo sapiens
tcctgtggaaagatggcagcccccacccggaacacctgcactactggcatcacagtacgtggcatgcctggatgtccctgccctggctgtggcatggcgg

SEQ ID NO: 496371 - DNA, 75 bp, Homo sapiens
agaggacaacgcagatatagaacatttcttttatcacaatcaaatttttggctctcatctgcacaaagtgtgtga

SEQ ID NO: 496372 - DNA, 100 bp, Homo sapiens
tttgaccttcatcacgaggccacccagtcccacttcaaacattcgtctcggaaaccccgcctcttacagtcacgaggtgtttcccatgatgaattgcttg

SEQ ID NO: 496373 - DNA, 87 bp, Homo sapiens
tttctttaggcctgattctatttgaattgctgtatccattcagcactcagatggagagagtcaggggtctcactctgtcactcaggc

SEQ ID NO: 496374 - DNA, 100 bp, Homo sapiens
cttgattgttctttcagatgtagaagctgagcgtgagattgtccgggacatcaaggagaaactgtgttatgtagctctggactttgaaaatgagatggcc

SEQ ID NO: 496375 - DNA, 98 bp, Homo sapiens
tggaaggctctggataaggaccagtacctgcccaggaaactgatgaagtgggaagccccttgcagacaggtggtggacactgtgagtgcaaggccggt

SEQ ID NO: 496376 - DNA, 100 bp, Homo sapiens
gctatccaaatgcgattagttgatgtggcctgcaagattgcattcatggcttctctggcaacccacttcagcaatcagaacagtgggattatcttcagca

SEQ ID NO: 496377 - DNA, 89 bp, Homo sapiens
ctcttgttgaaatccgaaatttcttgggtgaaaaatatatccgcagggttcggatgagaccaggagccatccgcaagcagttggcggct

SEQ ID NO: 496378 - DNA, 83 bp, Homo sapiens
tactgtcttgttttttccctgcaacagtggaagtatgcgagacttaagagctcaagtgactagtggtctcctgccatttccag

SEQ ID NO: 496379 - DNA, 83 bp, Homo sapiens
gagcgcagccagcaggactgggaaaggcagggcgatgatggcagtgaagggtgtggatgaggtcaccattgtcaacattttga

SEQ ID NO: 496380 - DNA, 75 bp, Homo sapiens
tgaagagacacagtatggtagccacacccccaggaattacatgaacgacagccttcgcaccgacgtcttcgtgcg

SEQ ID NO: 496381 - DNA, 50 bp, Homo sapiens
gtgtccagcgacagcttctgggagcatccgcacttccactaatagccaag

SEQ ID NO: 496382 - DNA, 74 bp, Homo sapiens
gggccgctccgacggcggtccatcctggaccctgatgctcccataagacagaaaatgccccttgatgatctgga

SEQ ID NO: 496383 - DNA, 100 bp, Homo sapiens
tttttttttttttctgttcagtgacatctggtgtgcatcctcgagtgtgaagagaaggtcttccccagccccctctggactccatgcaccaaggtcatgg

SEQ ID NO: 496384 - DNA, 90 bp, Homo sapiens
ttgcctaaatgaggaatgtctttcctaccatctaaaatacgaaggtttctggctggctgatccatatgaattcctcttattaagaaaaat

SEQ ID NO: 496385 - DNA, 98 bp, Homo sapiens
cgggcccaaagcgcgccggctcccgctcgggcggccgcggacatgtgcaggatgtccttcaaggtgctgctcaaagcaaagagatcatcttcctgccg

SEQ ID NO: 496386 - DNA, 118 bp, Homo sapiens
tggacaagagacgatcattctgcaagcaggcaacctgaatacaggttagggaaagtttctcctgaagatgtagaatatttcaattgccaacaggagctggcttcagagttgaataaac

SEQ ID NO: 496387 - DNA, 100 bp, Homo sapiens
ctgggttcaggctgacatctgcacttaacagggaggaaatccttcaacaatctttgtgggaaagagtatcaactcatgtgattgaaaacatctaccttcc

SEQ ID NO: 496388 - DNA, 100 bp, Homo sapiens
ccgcggcggggaagatgttcagcgtagagtcgctggagcgggcggagctgtgcgagagcctcctcacttggagactgacttgcataccaaatgtgtggtg

SEQ ID NO: 496389 - DNA, 90 bp, Homo sapiens
cagcaggaaggtctcacctgaggtgaaccttcgaccttggacttctcagcctccagaatgagagaagaggtactcccttatagggactcg

SEQ ID NO: 496390 - DNA, 83 bp, Homo sapiens
gtctagatgtaattaatcaaacttggacagctctctatgcctgctcttgaggttcacagatgatacctttgatccagaacttg

SEQ ID NO: 496391 - DNA, 74 bp, Homo sapiens
gcggggactgttggtctcggccctgcggaaggtaaatttggaaggcaaagccagccctctgtcacttctacaaa

SEQ ID NO: 496392 - DNA, 90 bp, Homo sapiens
cagacaatgaattcacaacctcaaacccgttctccgaaggtagaagatagcaccatgccgattcgtcgaactgtgaattctacccgggaa

SEQ ID NO: 496393 - DNA, 80 bp, Homo sapiens
gcctcgaactaaacaaattcatcccagaaatctaagagagccagccccagtgcctgctgagccgtttgacaacactacct

SEQ ID NO: 496394 - DNA, 75 bp, Homo sapiens
ctccactggcccctcatgtaacctcagagatctgggcaggtcctcattcccacgacccgatgcaactcccacaag

SEQ ID NO: 496395 - DNA, 80 bp, Homo sapiens
tacatagacatttcaacacatcactttgttcctctgaacaacagggagaatatctctgatcccacctcaccattgagaac

SEQ ID NO: 496396 - DNA, 100 bp, Homo sapiens
cttatagtggaggctgctaggagccggtcagagggaagtggagccgtcagttcctgctttcattctggtgtactgtatgttctgcccatcaaggaaccat

SEQ ID NO: 496397 - DNA, 82 bp, Homo sapiens
ggggatagtgtcatcggttcgatgcgagccacccctctggctgctcctgcgggttccctgtccaggaagaagcggttggagt

SEQ ID NO: 496398 - DNA, 90 bp, Homo sapiens
acttctccctggagaagctcgaggaagcaggaatgctggagatgagagcccggctggacaaggacctggaaggcgctggggacgctgccg

SEQ ID NO: 496399 - DNA, 100 bp, Homo sapiens
ctttaatcggttagacttctcaagtgcaattcaagatatccgaaggttcaattatgtggtcaaagctgctgatactttggctgtgaggcaaaaaaggaga

SEQ ID NO: 496400 - DNA, 75 bp, Homo sapiens
tcgattattcacaagaaagggtaaactgtttttgtggaactgggcaaactattaaaatgcaaacagaaaacttgg

SEQ ID NO: 496401 - DNA, 100 bp, Homo sapiens
gtcgggggctttcgcccgggtcctcctagaaattccccccgaagaagactcccccacatctggggaatgcagagagcaaccaatgtcacctaccaagccc

SEQ ID NO: 496402 - DNA, 96 bp, Homo sapiens
taaagcttctcctttgggttgtactcatagattgtgtaggcgttggtcttctgatagcaactttaatgtgcagcctcgtcttacagcgtgactgca

SEQ ID NO: 496403 - DNA, 97 bp, Homo sapiens
tcctccggcagctggagatgtccgagcccaaggcaattgatcccaagttgtcgacgaccgacagggtggtgaaaggaatactcccccagttgcaaga

SEQ ID NO: 496404 - DNA, 90 bp, Homo sapiens
ccacctccaggatcaggatgcagaggatctggccatgcactgattgagcagtggaatcccgtaggcctggttggaatcatcacggcattc

SEQ ID NO: 496405 - DNA, 87 bp, Homo sapiens
tcttaatcccatatctggacatctggaacatccatgagttttgattcatcatggataatctgtcatcagaagaaattcaacagagag

SEQ ID NO: 496406 - DNA, 83 bp, Homo sapiens
ggagacggcggccttcgaggaggtcatgaaggacctgagcctgacgcgggccgcgcggctgtcgcctggttgggcccggaaat

SEQ ID NO: 496407 - DNA, 75 bp, Homo sapiens
gttctgcacctcaggagggaattcagcctcagtgatgtccatgaggtgtggaatatcaaacaaatgattaagttg

SEQ ID NO: 496408 - DNA, 100 bp, Homo sapiens
gtgtcaacccatggctcaactggaagcactgtggaagaagatggagggtgtggagtggagtcaacatatcaatggagcaagtcacagtcgtcgatgccag

SEQ ID NO: 496409 - DNA, 75 bp, Homo sapiens
ggacgagctccgggatgctgtactccttgtctttgcaaacaaacagctcaagccaggacagaacagctgcaggga

SEQ ID NO: 496410 - DNA, 80 bp, Homo sapiens
cgctgcagggggctgcgcctgcctgctccgccccagacctgtcggcgaaagggaaaacatttaaagttgatgatatgtta

SEQ ID NO: 496411 - DNA, 138 bp, Homo sapiens
cagcagccgccgccagagaggcccgcccaccagttcgcccgtccccctgccccgttcacaatataacaacgaacttgatgcaagtgataggtttgccaaggtcagacctctcatcatccggatgaactgcaatttcca

SEQ ID NO: 496412 - DNA, 50 bp, Homo sapiens
gcatattgtagggggtgaactggtgtgcagtcaaagccctctttgactac

SEQ ID NO: 496413 - DNA, 101 bp, Homo sapiens
gctgctgtggtcatacagttttcaacacaaaacttgttctccctctagtgttccacttgcacaggggcttgcttccggcgtcatggctcaaagggccttcc

SEQ ID NO: 496414 - DNA, 75 bp, Homo sapiens
tgaggagggctctgatccccccctgccggggagggcccagcgcatccgacagcagcccctgtcaaagggaacagg

SEQ ID NO: 496415 - DNA, 74 bp, Homo sapiens
ataaacaaactaacagcagaagctattcagacacccctgaaatctgccaaaaaatttctacaagtgtgaaagaa

SEQ ID NO: 496416 - DNA, 75 bp, Homo sapiens
ttcactgtgtcttcagaaagatccttccaaaaggttgtctgcattcaaaagagcattctattaaagctaccttaa

SEQ ID NO: 496417 - DNA, 74 bp, Homo sapiens
tagagaacgggaccggcaccactgagaaaggcagcctggcatcctcgctacaacctcattgttgtgggccgata

SEQ ID NO: 496418 - DNA, 85 bp, Homo sapiens
ggacatgcacaccaaaccctgggttagagcaagcatgaatacaactttgtctgagagccccttcaagtgtgatcctgatgctgcc

SEQ ID NO: 496419 - DNA, 74 bp, Homo sapiens
tccctctgtgctccaggactccctcaataatgttggatggcaagcatgtggtgtttggcaaagtgaaagaaggc

SEQ ID NO: 496420 - DNA, 75 bp, Homo sapiens
atccgtccttccttagaaagctgaaagctgataaggcacaattcagattcagaagcgtcaacagttagtcagaaa

SEQ ID NO: 496421 - DNA, 99 bp, Homo sapiens
attttaaaaagattggatagaatgttcaacaaaattcataagatgcctactttgagtgcatctgggggaggtgttgtagccattgacaacaaaatagaa

SEQ ID NO: 496422 - DNA, 98 bp, Homo sapiens
gcagcagcagcagcaatctcttcccgaacacgagcaccacaggcgcccgaaggccggaacagttcactgagacttttttgacggagagggacaaacaa

SEQ ID NO: 496423 - DNA, 50 bp, Homo sapiens
agaagctgcagccgcacctggccaaggatgttcggcaaggtggctcttca

SEQ ID NO: 496424 - DNA, 90 bp, Homo sapiens
cgcctttcagaaagtggctgacatggccaccaacacacgtggaggcaggtggaagtcatcataaagtttctgtttcacccgtcgtccatg

SEQ ID NO: 496425 - DNA, 75 bp, Homo sapiens
ttctttgtggatggacttgattctgatgagaggcatgaacaaccgggaggtgctggagcaggtggagcgaggcta

SEQ ID NO: 496426 - DNA, 89 bp, Homo sapiens
tgggcattaatctgactgcagcagatacagttatcatttatgatagtgattggactaagaaaaatggctttgtcagcccaacagatacc

SEQ ID NO: 496427 - DNA, 75 bp, Homo sapiens
gcaaccacagggatttcttctgttcaggtgctggagaatctggtaaaagcaccattgtgaagcagatgaggatcc

SEQ ID NO: 496428 - DNA, 88 bp, Homo sapiens
ttccgggagcctagatcctgtgctttactctgaagactccttgcctacatgtagcctgtgttgtacagcagaaagatgccaggcaatg

SEQ ID NO: 496429 - DNA, 132 bp, Homo sapiens
gactgcgttaactggagccaggctgagcgtcggcgccggggttcggtggcctctagtgagatctggaggaaccattggcactggcaagtggggctctgccagactggtgtgaacaattaaccagcaaatgtc

SEQ ID NO: 496430 - DNA, 71 bp, Homo sapiens
acgaggtgcgccggctgatcgatttgacaagatcaaagctgcaggaaaatggacagtgaggttcagagaga

SEQ ID NO: 496431 - DNA, 90 bp, Homo sapiens
taattaaagagtaaagttgtgctcaacgcatccgcagtgtcatgcagaagtacctggaggaccggggcgaggtgacctttgagaagatct

SEQ ID NO: 496432 - DNA, 132 bp, Homo sapiens
aaagggagtagaattgggtggagctaccctgcgtatctggacacctttaaggattctcgcctcaggttggtaaaaactcaaagctaacaccattcagaacttacctaatgatgtttgaaaaagaggcggtag

SEQ ID NO: 496433 - DNA, 82 bp, Homo sapiens
cgcgagcacagagcctcgcctttgccgatccgccgcccgtccacacccgccgccaggtattagaaaactactcggatgctcc

SEQ ID NO: 496434 - DNA, 74 bp, Homo sapiens
cggacgcagtgatttgctccccctcgtgcagcaacccccacacccagcaccagtgcctatggaaactggttccc

SEQ ID NO: 496435 - DNA, 98 bp, Homo sapiens
agcgccgcggacgcgtcatcgagtgtgacgtggtgaaagatggcccactgcgtgaccttggttcagctgtccatttcctgtgaccatctcattgacaa

SEQ ID NO: 496436 - DNA, 87 bp, Homo sapiens
tggatgtgggaggattgcattcagtctagttcctggttgccggctgaaataacctgtgtcttctgggactctcctactcattgcttg

SEQ ID NO: 496437 - DNA, 74 bp, Homo sapiens
gttattttacctactgttcatgaggtggatattttcagatcccctgtttttggagcacagctttcaactttgaa

SEQ ID NO: 496438 - DNA, 75 bp, Homo sapiens
cattgaacaggatgatgataataatagtgcagttcctaatgtggatctaccacccctgtgttcatcgagattccg

SEQ ID NO: 496439 - DNA, 83 bp, Homo sapiens
gcgcagggcctgcagcgggagctggacggcgagcgcgagcggcgcgagaaagtggatctaggatccggcttccaacatgtggc

SEQ ID NO: 496440 - DNA, 90 bp, Homo sapiens
accaaacaccgcatattctcactcataggatgttaccccacaaaatttccttgctgtgttgagaggcgatgcagaagcagtgaagggcat

SEQ ID NO: 496441 - DNA, 100 bp, Homo sapiens
ccgagctgccgctgtcgccagaagactctttgtccccgccagccacgtccccttctgactccgcagacaccaatgggaatcccaatggggaagtcgatgc

SEQ ID NO: 496442 - DNA, 90 bp, Homo sapiens
ggagccactatgaggagggccctgggaaggccctggccaacgtcaacattgggagcctcatctgcaatgtaggggccggtggacctgctc

SEQ ID NO: 496443 - DNA, 75 bp, Homo sapiens
gttcttacaacatggcagacattgacaactctggacttattggacaaaatgttgacattcaacccacacaagagg

SEQ ID NO: 496444 - DNA, 113 bp, Homo sapiens
ctgctccacgagtgggaatttgctccagcacttcacggactgcaagcgaggcacttgctaactcttggtgccggatggagtgctgtgatgtgccagccgagacactctacgac

SEQ ID NO: 496445 - DNA, 100 bp, Homo sapiens
cttcgatatgaggacggcattgaggtcaatcaggagattgtggttatcaccaccaaaggagaagcaatctgcatgggagtgtcaccttctggaccaggtg

SEQ ID NO: 496446 - DNA, 75 bp, Homo sapiens
aattatgggagggctggccaacttctgctacagacgactcagatatgctgcaggctgctagtcattatcgccaaa

SEQ ID NO: 496447 - DNA, 51 bp, Homo sapiens
atcctggcgatctacttcctctggcagagtcagcgaccacatggacctggg

SEQ ID NO: 496448 - DNA, 74 bp, Homo sapiens
cgatcggtgctgattcggcgcgatttgaggagctgctgctgcagatcattgagaagcagccaggccacattcgg

SEQ ID NO: 496449 - DNA, 50 bp, Homo sapiens
agaattgaacatcagaccatcacacctctgcataagagcctagatccaag

SEQ ID NO: 496450 - DNA, 75 bp, Homo sapiens
atcctgtgtgtctaacatagaaaggaatctgcagaaagaagctgatcttctcactcagatatggcaacaagcagc

SEQ ID NO: 496451 - DNA, 100 bp, Homo sapiens
ctgagtttggtgattcagcttgctttactctttcattgttgggacatgtatattgtgcatactccttccacgttactgcagacggtcagatgcagcctgt

SEQ ID NO: 496452 - DNA, 117 bp, Homo sapiens
cgctgatccggagccccagcttggccaagcagagctgggggggcggtggccggcaccgcattccgccacgctgccgctgatgatgaagtgcgtggaggagaataatggcgtggccaa

SEQ ID NO: 496453 - DNA, 82 bp, Homo sapiens
tttcaacgtgcgtgtcacccacgcagacatcttcagccgctgccagagacaagaggagcagcagcggcaccgcccctcaccc

SEQ ID NO: 496454 - DNA, 100 bp, Homo sapiens
aaagagacctctacttagctcagcaattcttaccttagacgggatctcgctttgttgcccaggctggtctcgaactggcttcaagtgatcctcccacttt

SEQ ID NO: 496455 - DNA, 87 bp, Homo sapiens
gtgttgttactgatgcagagatacagcaaaagagtctacataggaagaggatcacctagcccgggtagaagaggcaatcacccgtat

SEQ ID NO: 496456 - DNA, 90 bp, Homo sapiens
ctgaaaccgatttctaacagagagccccatggctgggggttatggagtgatgggtgacgatggttctattgattatactgttcacgaagc

SEQ ID NO: 496457 - DNA, 75 bp, Homo sapiens
caaaattatcaacaccaaaaagctttctgctaggggggctatctgatgggttagagtgcctttgagaagaaatca

SEQ ID NO: 496458 - DNA, 113 bp, Homo sapiens
agggacattgccactgactgtccagaaggtgttggcatcccaagcctgccatggaaaatggcagacaatttttcggtaagtgttttatgcctgtttcttccccttgatcagct

SEQ ID NO: 496459 - DNA, 75 bp, Homo sapiens
cgagaatgggaattctcttcactagaatatggagactgttcaatcaccagggaagtgtttggattgtgagctatt

SEQ ID NO: 496460 - DNA, 100 bp, Homo sapiens
caggggcccagatgccctgacactgcttgaatacactgagacccggaatcagttccttgatgagctcatggaggctggggcggaaggtcgagagggcgag

SEQ ID NO: 496461 - DNA, 87 bp, Homo sapiens
tgcgggagctcaaacgcacgctggacgccaaggcccggaggctgtttgatgtcctgcacgagcccttcttgaaagtaccctgatgac

SEQ ID NO: 496462 - DNA, 100 bp, Homo sapiens
ttctggatgtccttgagttcaaccagttccagtctcatcagattttccatgtcctggtggtggcagcagcctttgtccacttctatggagtctccaacct

SEQ ID NO: 496463 - DNA, 83 bp, Homo sapiens
taatgtccaaagtggaccaagatctcattatgactcagaaaaagttggatgaaaaatctgacaaacagtatgctgaaaattat

SEQ ID NO: 496464 - DNA, 100 bp, Homo sapiens
ggactgattcttattccctgctggtgttctctagtttgcctaagtagaatttacatgggaatgcactctattctgggtctccttctgttgcccaggctgg

SEQ ID NO: 496465 - DNA, 101 bp, Homo sapiens
atcatcttcaagacgatggtacccagacagtcagatatattcgactttatgggagaaaatttagcaaagaagatcatgttctttttattaagttattgtat

SEQ ID NO: 496466 - DNA, 96 bp, Homo sapiens
ggtgcgccgaggctgctcacaaaaatgctagtgatcaaagagaagatgtttatattggaaaccacatgccttgccctgaaaacctcaatggttact

SEQ ID NO: 496467 - DNA, 95 bp, Homo sapiens
cttggccagcgacagatcctttgctgctctgtctgccggttcttgaggctgcctctaagaatcaaacttcactcttgggagaaccaccaaaagaa

SEQ ID NO: 496468 - DNA, 108 bp, Homo sapiens
aaagtgaccaagaacgtgagcaagcccaggcacagccgacgccgcgggcttccccgggcgctgcctggacaggcctgcctgcgtgctgggacatgtctggcctccaag

SEQ ID NO: 496469 - DNA, 74 bp, Homo sapiens
aggacacacccaggaaaagactcaggacggacaagcacagtcttcggaagggtgccatctatggcatggcccag

SEQ ID NO: 496470 - DNA, 100 bp, Homo sapiens
tcttgcctcaggccagtcgcctccaggccaagagggatccttcacccgtgtctggtaagtaaggaggtctctgtaccatggctcgtacaaagcagactgc

SEQ ID NO: 496471 - DNA, 83 bp, Homo sapiens
ctgaacattgacacaaaggagataccttatggtgccaggtgtggatgaggtcaccattgtcaacattttgaccaaccgcagca

SEQ ID NO: 496472 - DNA, 87 bp, Homo sapiens
cggaggtggggtcggccaggccggtgcgggctccttgcggcaggtcccaagagggaggagccccagccccgcgacgaggaggaagcg

SEQ ID NO: 496473 - DNA, 82 bp, Homo sapiens
gaccgtgagagcatcaagctcgtgtccatcggtgaaatgacaatggatgctctgttggctcgattgaaacttctgaatccag

SEQ ID NO: 496474 - DNA, 98 bp, Homo sapiens
atgccagtggatccatacaactgctccgcctggtggaatctgagttgttcagcacatcaagcgacataacattgttctgaaaagggagctaggcgaag

SEQ ID NO: 496475 - DNA, 85 bp, Homo sapiens
acatgtcatgcctgggtgcagcttctctagctggccttgctgttgacctggccataagggacacctttgtgaatgcctctcggac

SEQ ID NO: 496476 - DNA, 75 bp, Homo sapiens
caggcctctggtatttctttctcttctgcttgcgcattaaagttttaacagctccataatgggagaagtaaagaa

SEQ ID NO: 496477 - DNA, 82 bp, Homo sapiens
tgaattcagccagtggtcacagctggatgtttgcgacatcccagagagcttccagagtggataatattaatgcagctgtgat

SEQ ID NO: 496478 - DNA, 98 bp, Homo sapiens
ggaaagcggcgttatgacaggaagcagagtggctatggtgggcaaactaagccgattttccggaaaaaggagatcaaagacgctggccttcagacctg

SEQ ID NO: 496479 - DNA, 75 bp, Homo sapiens
gtccgagttgccgccggagaggagtggcctcgcccgcttggacagatgggagttttgtggttcatgatatacctt

SEQ ID NO: 496480 - DNA, 72 bp, Homo sapiens
gactcaaagctgcacggcagtctgtttatgaggatggcaatggctatattagtgctgcagaacttcgccatg

SEQ ID NO: 496481 - DNA, 128 bp, Homo sapiens
gccgccggttttctccccgcttgccggggtggtcctcttccctttgtcgtgctgggattacaagcgtgagctaccacacccagcgaggaagccaagtttaacgtgtgtgctccactcctccaacctgg

SEQ ID NO: 496482 - DNA, 74 bp, Homo sapiens
cggcagtctgaagtgctcatcaacagcaaccttcacagttgttgatcacatagcatggtcatccactcacagct

SEQ ID NO: 496483 - DNA, 95 bp, Homo sapiens
tcaccaaataagctatatactttggttacctatgtacctgttaccactttcaaaagaacacctgctgaaggaagggttggcgtggctggacttac

SEQ ID NO: 496484 - DNA, 100 bp, Homo sapiens
ccacgtccaagcaaaccgggaaaggagaggatcccggagccgaaccgagacaactacattcgttcctgcaagttgctgccggatggccggagtctgatcg

SEQ ID NO: 496485 - DNA, 100 bp, Homo sapiens
gggattttcagggctttgaatgcatcagaaccatgcacggctccttctcctgaaaaagccgaggaggagagtgagaggcttctgagggaactctatttgt

SEQ ID NO: 496486 - DNA, 83 bp, Homo sapiens
ggtcagtccgccgctcaccccgcggccgcaccttcccgccttctcagagcaaatttttcagaacataaaacaagaatatagtc

SEQ ID NO: 496487 - DNA, 75 bp, Homo sapiens
tctctcttgagccgctgccttgttaccagctggagcttgacgcaggatggctggctgtggtgaaattgatcattc

SEQ ID NO: 496488 - DNA, 75 bp, Homo sapiens
gggagatgtagtctggagctcataacgtctgcgctcctcagaccaccggcaggtgaacagcctgatgcagaccga

SEQ ID NO: 496489 - DNA, 75 bp, Homo sapiens
gaatctgtggccagagaggtttgcaaatctactataacagagagtcaatggttgcaggaaagtttgaagaaagtg

SEQ ID NO: 496490 - DNA, 80 bp, Homo sapiens
agccgatccagcctgcggagcctgtggggcaggtcccagagaaaaacctccatgctgggttgatagcagcagctaggatc

SEQ ID NO: 496491 - DNA, 100 bp, Homo sapiens
gtttcggcggccgggagggagttgtcggcgccgcggccgctgcggacggacgctcgcctgccggctgaggattcagtggtcccaatttaaaggctatttt

SEQ ID NO: 496492 - DNA, 88 bp, Homo sapiens
cggtgccctctccttttcgtttccggaaacatggctaactcaggtgagatggagccgctatagtcctgaattcaaggatcccttgatt

SEQ ID NO: 496493 - DNA, 100 bp, Homo sapiens
gagttgttgctcccgcctgagcccagcccccagaaaggattgtgacatatcgttggacccagaattgaggtctcggcgcggaagatggccggcggcgtgg

SEQ ID NO: 496494 - DNA, 75 bp, Homo sapiens
tttggcctggcttgtttgcaaagtgactgtgaagtgctgaccacactcaccccagacactggccgtatcctgtcc

SEQ ID NO: 496495 - DNA, 101 bp, Homo sapiens
aggccgaggcgggcggatcacaagggattggagtttggaatcctgccttcgatgtcaccccccacgacctcatcactggtggcatcatcacagaactgggg

SEQ ID NO: 496496 - DNA, 83 bp, Homo sapiens
cagtactcgggcaagaccaccttcgtcaatgtcatcgcgacaatgcagatcttcgtgaagactctgactggtaagaccatcac

SEQ ID NO: 496497 - DNA, 75 bp, Homo sapiens
gagccatccacactttccccagcctcctccaaaacagcacactttccggtacaatgactcttcttgcttttcacc

SEQ ID NO: 496498 - DNA, 75 bp, Homo sapiens
tcgccatgagcatcaaggcaggcacggtggatgaggactcgtcaggctccgaaggcggggtttcaccatgttgcc

SEQ ID NO: 496499 - DNA, 50 bp, Homo sapiens
cggcaagttcaagatccacatcccagaagtcacccagagactacagtaac

SEQ ID NO: 496500 - DNA, 100 bp, Homo sapiens
atttgtggaaccttagacaaaaaaggccagccatactccattctcttaaatttaaccgggaacgctatatgttctcctttcagccaagacctttcaccag

SEQ ID NO: 496501 - DNA, 50 bp, Homo sapiens
ctcatgttggacatgctttaaataaggaccagttacagaagtggatccgc

SEQ ID NO: 496502 - DNA, 75 bp, Homo sapiens
catcccagtaagctccaaccagggtggttctcttcccaaagtggaagccaaattcatcaattatgtgaagaattg

SEQ ID NO: 496503 - DNA, 100 bp, Homo sapiens
caaagaactaatcctatatgttcaatgacctggggatttgacagtataagtagtgttaaatttaacccaattgagggagcgaagaatggtcaagaaagtg

SEQ ID NO: 496504 - DNA, 100 bp, Homo sapiens
tttggattctcaaaacttaaattcaagaaggagccctgtcccagcaagaagtctatgtgccccaggatcctggattacctgaggaagaagagatcaagga

SEQ ID NO: 496505 - DNA, 99 bp, Homo sapiens
cttcgctcgtggatcgatacttcactcgctggtacaaaccggcactggcagcagcgacccctactgcatcgtgaaggtggacaatgagcccatcatcag

SEQ ID NO: 496506 - DNA, 82 bp, Homo sapiens
gaccttacgacgggttggggatggcgtgcagcgcaaccacgagacggccttccaagaacccagcttagactagaaagtctag

SEQ ID NO: 496507 - DNA, 75 bp, Homo sapiens
cctttgagaccgtgaagagaaagatgcagtagagactgggtttcacgatgttggccgggctggtctggaagtctt

SEQ ID NO: 496508 - DNA, 98 bp, Homo sapiens
acggagccagcggctgaggaggggccccagcagcccccgaaggccctatcaggacatggagtatgaaagacgagggtcctccgcggaagggcagctga

SEQ ID NO: 496509 - DNA, 100 bp, Homo sapiens
cattgagctccctgtcaaagaggaagaaccccctgaaaaaactgttgatgttgatggaatggggagaagatattaaagcagtttcaaaagatgaagcagt

SEQ ID NO: 496510 - DNA, 50 bp, Homo sapiens
ctcatccagctgatgcccttcttcgttggtcccaggctgcacccatggca

SEQ ID NO: 496511 - DNA, 88 bp, Homo sapiens
aagagatgacagccgaattttatgcactgaagggaatgttcttggctcagatcaacaatgccggtggtggtgtgcacattgagccccg

SEQ ID NO: 496512 - DNA, 100 bp, Homo sapiens
gggaattcagcctcagtgatgtccatgaggtgctggagaatctggtaaaagcaccattgtgaagcagatgaggatcctgcatgttaatgggtttaatgga

SEQ ID NO: 496513 - DNA, 137 bp, Homo sapiens
cgcggccatgtgaaccgcttgtaccccggggagagacgagccccgagcccggctggacgccgctgcctcagtggaactgtcaccgctgttcccagacacacttattctgggtctggagatccgggtgaaggtctcag

SEQ ID NO: 496514 - DNA, 88 bp, Homo sapiens
tcagctccccacccaggcctgagcgaagcccacaaccccgccgggcacatgtgaaaggaagccctcaatctagaagagtagaggtcca

SEQ ID NO: 496515 - DNA, 101 bp, Homo sapiens
cccggcgagcagggagcggagtaccagcacttcatccagcagtgcacagtcataccctaatgatcccagcaagataatgtcctgtcttctaagatgtgcat

SEQ ID NO: 496516 - DNA, 100 bp, Homo sapiens
agcgcagcgtggcgatgggcgggggtagagccccgccggagaggctgggcggctgccggtgacaggtcaaaatgcagatcttcgtgaaaacccttaccgg

SEQ ID NO: 496517 - DNA, 99 bp, Homo sapiens
ctgcgcggcgggaagcggcggcggcggctccagcgtcctaagaggatgaacgtgaagccagagaaaatgtgaagagagagcaagatgaggcctatcgcc

SEQ ID NO: 496518 - DNA, 51 bp, Homo sapiens
ctcgtactcgtgcgcctcgcttcggtgagaagccctaccactgcaactggg

SEQ ID NO: 496519 - DNA, 100 bp, Homo sapiens
aggtggcagtggcggtaccagaatgcgaggtactggtgtggcatactcggacagagaagcccaagatgaagcaggaggagcagctgcagcggcagggccg

SEQ ID NO: 496520 - DNA, 83 bp, Homo sapiens
cgggaagcgggcggccccggccgcctccgcgagggcaccatggaggtgaatgcaggcggctatgagaggttttcctccgagta

SEQ ID NO: 496521 - DNA, 98 bp, Homo sapiens
tgctcagccccgagggcacctgcaaggccttcgacacagcggcgttcgctgagcggcgcgagcggagcttcagccggtcctggagcgaccccaccccc

SEQ ID NO: 496522 - DNA, 92 bp, Homo sapiens
tgacctgcttttcggttccgggtcttggccccgtccttacctcacaggcccagcttcccgatcagtggagacgttgaaggagatgattaagt

SEQ ID NO: 496523 - DNA, 130 bp, Homo sapiens
cgaagagttcatatgactttagaattaccttggagcgctgatagagcaattcaacagttcgccaaaatgaagtttaatccctttgtgacttccgaccgaagcaagaatcgcaaaaggcatttcaatgcac

SEQ ID NO: 496524 - DNA, 75 bp, Homo sapiens
tgggcgccgtccgtacgctgcgcactggacccgctctgctctcggatgctggcaagtcaaccattggaggacaaa

SEQ ID NO: 496525 - DNA, 96 bp, Homo sapiens
ccaagatcttcccccgtttcacaattagaaggcggctgtctagaggggtcgggccccggctcagtggtcccaggcagctcgggtgtcggaaccccc

SEQ ID NO: 496526 - DNA, 125 bp, Homo sapiens
agcttttagagcaggtgtatgatcttttggaggaggaggatgaatttgatagagagattctctcgggcctagccgtccttggaacccgatattcgggctgggcggttccgcggcctgggcctagg

SEQ ID NO: 496527 - DNA, 116 bp, Homo sapiens
ttaacacagtggctgaacacccagaaggaactggcatttggagtctggacatctgtaacttgccattgatcagccgcaactacaagggcgatgtggccatgagcaagattgagcac

SEQ ID NO: 496528 - DNA, 50 bp, Homo sapiens
gaaacccagcttgatatgttggtaacttgggtttttactcctgtaacaac

SEQ ID NO: 496529 - DNA, 82 bp, Homo sapiens
agggacagtgggcagtgctcccggaacacaagctgtgaaacactagtacgagctcaactggaggcagtcctgtgcggaaatc

SEQ ID NO: 496530 - DNA, 99 bp, Homo sapiens
gtaaaaaatgcgggagacttgagaagaaaggccatggaaggcaccatcgatggatcactgataaatcctacagtgttccgccatggagtcatagttgca

SEQ ID NO: 496531 - DNA, 95 bp, Homo sapiens
gaaaccacagaagaaagtttgaggaactactacgaacaatggggaaagcttacagactgtgtgcttcagctttagctgcagctgcctctgttcag

SEQ ID NO: 496532 - DNA, 76 bp, Homo sapiens
accatcatcaccgtgcccgtggttctgctgaacaaaggcagtctagatgttgatggaatatatcgagttagtggca

SEQ ID NO: 496533 - DNA, 95 bp, Homo sapiens
ggaaccatttctttgtggagtatcatctcaaaagttaggattgaagcctgcatgtggggcggcgactggcggcgcgatggacctgaccgggctcc

SEQ ID NO: 496534 - DNA, 96 bp, Homo sapiens
aaatcatttttgaggatgaccggaatatgcttataggcgtggaattgcagaggctgttggtcttccaagtattcctgttcatccaattggatacta

SEQ ID NO: 496535 - DNA, 118 bp, Homo sapiens
cggacactttgttattggagaaacatgcagattatatcgcatcctatggctcaaagaaagatgattatgaattcgatgtcttctttccgtcctgggagaggacataatgatagtcgga

SEQ ID NO: 496536 - DNA, 100 bp, Homo sapiens
gttgaggattcagcaaatgaagattcagtggatgctaagccagaccggtcctcgtttgtaccgtccctcttcagaatgacctggatgaccctgaaagagg

SEQ ID NO: 496537 - DNA, 90 bp, Homo sapiens
tccactccccacaacatactcaaaggaacggagagaaccgggacccccctgcggggacccggaactgtttgcctgagaatacagatcaac

SEQ ID NO: 496538 - DNA, 83 bp, Homo sapiens
ctaggactctatgacacggccggacaggttgaaatcacaaagattagacacctttttagataggtgttcttcagcaccactga

SEQ ID NO: 496539 - DNA, 82 bp, Homo sapiens
cgcgcgcagggcctgcagcgggagctggacggcgagcgcgagcggcgcgagaaactggccagctcagcgtccctggaaggga

SEQ ID NO: 496540 - DNA, 76 bp, Homo sapiens
atccaatgagtttactaatgactggggtcccccccaaagacccaaactgaatctaaagcctcggagtactcctaag

SEQ ID NO: 496541 - DNA, 83 bp, Homo sapiens
ccgccatcagctcggcagtcgcgaagcagcaaccatggaatgggtaccacagaccatgtcatcgtcctggcgtccacgaaccg

SEQ ID NO: 496542 - DNA, 75 bp, Homo sapiens
gaggcggaggcggctttggcggtggtagtggtctgtctctcctgccagagtgtatacaccagttggacaaggacg

SEQ ID NO: 496543 - DNA, 50 bp, Homo sapiens
cccacagcaggttggacagttcacagctgcacagttggggatcttcaaac

SEQ ID NO: 496544 - DNA, 82 bp, Homo sapiens
aaatgttccaccaggacttgatgaatataatccattctcggattctagaacaacaaaattgcttacccagtacatattaaat

SEQ ID NO: 496545 - DNA, 80 bp, Homo sapiens
atctcggagacacatgaaggtggcattttttggcagacagagtttcactcctgttacccaggctggaggacaatgatgtg

SEQ ID NO: 496546 - DNA, 75 bp, Homo sapiens
gacgcagtgatttgctccccctcgtgcagcaacccccacacccagcaccagatattgatgatgttaagaagttca

SEQ ID NO: 496547 - DNA, 98 bp, Homo sapiens
gccgggatggaggacgttaactctaacgtgaacgcggaccaggagacttccaggactctgaagaaacagttacaagcaggatgcttttcccaacctct

SEQ ID NO: 496548 - DNA, 76 bp, Homo sapiens
gcgcgtgcgcggacatggcctcaaacgaataccacttgggtcgctcgaggaggaagagtgtcccaggggggaagca

SEQ ID NO: 496549 - DNA, 50 bp, Homo sapiens
ccatcgtgatggcctttttaggagttcagaataacaagcctttgtattca

SEQ ID NO: 496550 - DNA, 101 bp, Homo sapiens
aaattggtcattctcgctaacaactgcccagctttgaggtgaatgaaaactttgccattgatttgatagcagagcagcccgtgagcgaggtggagactcgg

SEQ ID NO: 496551 - DNA, 72 bp, Homo sapiens
aactgattggattgatgaacaatgaagcagctcagattcaaccctatgaaaagataaaggccaggggcttgc

SEQ ID NO: 496552 - DNA, 100 bp, Homo sapiens
agaaggcgtcagcagaggggccactgctgggccctgaggctgcaccaagtggcgaaggagccggctccaagggagaaacaaaggcagcgctgccctcggg

SEQ ID NO: 496553 - DNA, 130 bp, Homo sapiens
caatccaccagctagtaaggaaagcattgatggtcttccagagacccttgttcttgaagatcacactggtggaagatggatgcctgaagtgtagactgctgctagctgaataccatctgggagcataaag

SEQ ID NO: 496554 - DNA, 75 bp, Homo sapiens
caggagcccagctcacagccaccggtaccttcttccagctgcacatcattgactcctgggcccaactgtgaccga

SEQ ID NO: 496555 - DNA, 82 bp, Homo sapiens
ccgccacagaacttacctgcctcttcatgcagttctccatcgtgccaagcggaaacgcttgggcattggccagtctcaggag

SEQ ID NO: 496556 - DNA, 80 bp, Homo sapiens
cggaggaatctcagtagggacaacaggcaggagaattatgggagcgcatttccccaggggctttttggtggtgctggagt

SEQ ID NO: 496557 - DNA, 90 bp, Homo sapiens
atcttgttggcaaatcagatgcagctgttttaactatccctgcctgtgactttcaagagtgtgatgtgaaggattatggggacctgccct

SEQ ID NO: 496558 - DNA, 90 bp, Homo sapiens
cggcggatcatattccttcatctaccatggctcagccgggaactctgaacctcaataacgagttattggagggtggtgaagagaggatgg

SEQ ID NO: 496559 - DNA, 75 bp, Homo sapiens
gtatctgagggagactgcaaatgctattgtcagtcagcaaactccacaaaggtaattaatgatcctatccatggc

SEQ ID NO: 496560 - DNA, 100 bp, Homo sapiens
aatggaaacatctatattctgagaagaacctcaagaaggcatgaagccagcccctgcagtgccgtccacccgcccctctgggcctgcctgtggctctgtt

SEQ ID NO: 496561 - DNA, 100 bp, Homo sapiens
cagcagatggggaattcatggctgttggagcaatagaaccccagttctacgagctgctgatcaaagctggcaatcctttggtccagcaaggtggacagcc

SEQ ID NO: 496562 - DNA, 100 bp, Homo sapiens
gaagctgaacaaagtgagtgacaagcaccccgagtactgggacactgccatcctcttcaccaggcagatggtggtgagtgccattgtggacaccttgaag

SEQ ID NO: 496563 - DNA, 75 bp, Homo sapiens
tgccagcaacagagctgggtccgggtgtacggttggactccatgaaagaattgcacaaaacaaatcgacagcagc

SEQ ID NO: 496564 - DNA, 51 bp, Homo sapiens
aaacaaaggcgcagttccttgggtgaaagaaaggatgtcttaagagaagct

SEQ ID NO: 496565 - DNA, 100 bp, Homo sapiens
acagagagaaccaccagcattgccaccaccaccaccaccaccacagagtctgtggaagaggtggttcgagatggggcgcctacccttcttcagcaagatg

SEQ ID NO: 496566 - DNA, 74 bp, Homo sapiens
aaacaaagcaaaaccagttaccactaatcttaagaagcaggtacgaaaggactatggataacatgacttcatca

SEQ ID NO: 496567 - DNA, 75 bp, Homo sapiens
tggccgccggttgcaagcagatactggtgccttatgctcaggcttcagaagaggctcgcctctagtgtcctccgc

SEQ ID NO: 496568 - DNA, 75 bp, Homo sapiens
ttacatgtgggaaccccaggagcttgcaaagtggaagatgctttctacaaaggtgaactcaggctgaatgaggaa

SEQ ID NO: 496569 - DNA, 75 bp, Homo sapiens
tggtgctgtaaccacctcacagattccagcttcggaacaagagaccctgtttctcaagcaagacctcccccaaat

SEQ ID NO: 496570 - DNA, 101 bp, Homo sapiens
ccgccacagaacttacctgcctcttcatgcagttctccatcgtgccaatcattgagaagcagccaggccacattcggagcagggttttcagggaggtggag

SEQ ID NO: 496571 - DNA, 75 bp, Homo sapiens
tggcgggcgcagtttctcacgacgggccgagcctgccactgctcttgtcaggatggtgaagctgttcatcggaaa

SEQ ID NO: 496572 - DNA, 98 bp, Homo sapiens
gactgcgccgcgtcttcctcaaggtatgtgaggagcagcgctgtgaggaggaagtcttccccctggccatgaactacctggatcgctacctgtcttgc

SEQ ID NO: 496573 - DNA, 98 bp, Homo sapiens
ggccgttggaggtggctgcggcagctggcaccagttagaagacaaatgaaagctaagcaactcagtgcacaatcttacggtgtgaccagttcaacagc

SEQ ID NO: 496574 - DNA, 50 bp, Homo sapiens
agcaggattcttcccgagtccctggatgaggataggaattcactcaggct

SEQ ID NO: 496575 - DNA, 75 bp, Homo sapiens
agcagggccaccgggcggcaaggttctgtggatggagttataaaggaagtgaatgtgagcccatgccccacccaa

SEQ ID NO: 496576 - DNA, 98 bp, Homo sapiens
gtgcgctctcgggccactcggccgcaggaaggaaaatcacctcggcagtgtttgaaggaaggatactgcaactctttgaagtacgcattttttgagtg

SEQ ID NO: 496577 - DNA, 80 bp, Homo sapiens
ccccggagccgggccggcgtggcccgagttccggtgagcggacggcggcgcgcgcaggtgaatctggattgggaaagtcg

SEQ ID NO: 496578 - DNA, 100 bp, Homo sapiens
ttcctcggcgtggggcggaagcacgatctccggcagcggcctgggaactcttagctgagcaggcgagaggaccggccagccttgcagctgtatgatccag

SEQ ID NO: 496579 - DNA, 101 bp, Homo sapiens
ccaggaaaagccgttgagaggaccatcacaacctgagcagcacaggtgctggagaatctggtaaaagcaccattgtgaagcagatgaggatcctgcatgtt

SEQ ID NO: 496580 - DNA, 98 bp, Homo sapiens
ttcgactggcgaactggaaggccacgcctcctcccgcctgccccctcagccctgtggctgggggcagagctcagtactatactggcaattgctggaga

SEQ ID NO: 496581 - DNA, 98 bp, Homo sapiens
cccccggcctatgcccccactaacggggacttcacctttgtctcctcagcagacgcggaaggcataatcaccagcaacacccgggacaataatacggg

SEQ ID NO: 496582 - DNA, 75 bp, Homo sapiens
gcggacgctcggtcccgcgctgcgcatccccgcggacgccacagcgctgctgcagagactgcaagtctggaagaa

SEQ ID NO: 496583 - DNA, 100 bp, Homo sapiens
ctatataaagtcaagtgtccattttctttcaactatatttgagcatacccagacccggatgcagagtctacagcctgacccagctgcccgctatcgcaat

SEQ ID NO: 496584 - DNA, 90 bp, Homo sapiens
ctgactgacagaagttcttgcccccggggagctggtgtggacagaggagggcggacaaggcaaaatctcagcaagttcggacctctagta

SEQ ID NO: 496585 - DNA, 90 bp, Homo sapiens
gccggctatggcgaacaggaactggatgccaactctgcccttatggaattggacaaaggatgtccatgaggagccccatctctgcccagc

SEQ ID NO: 496586 - DNA, 88 bp, Homo sapiens
tattttcttcctgcccctcgttgatgagagcattcgaagtgacctcagcagggcatccagcttcctgcctgacacagctcacttcaag

SEQ ID NO: 496587 - DNA, 75 bp, Homo sapiens
caaaagaccaacccttgagggaagagaattatctctaaggacagagcgggatgccaccagcttgtccaaagggaa

SEQ ID NO: 496588 - DNA, 83 bp, Homo sapiens
tttggaatacaaggattgtaccgattttgcgtgaattagaaaaggatctattccagaggggagcttcaccacttcattgacgg

SEQ ID NO: 496589 - DNA, 106 bp, Homo sapiens
ccggcggcgcgggcccggcggcggcggcagcggggtccgggtccggagcgccacaccaccccacgtcatgctgcagcgccgcagagatcatggctgtcctcttttt

SEQ ID NO: 496590 - DNA, 100 bp, Homo sapiens
ctgctggtcatgatggaaacgtgatagtgtgggatctggcaagaggagtcaaaatacgatcttatttcaatatgtttcttgcctgtatccataatttgaa

SEQ ID NO: 496591 - DNA, 113 bp, Homo sapiens
ttcattgccaggagctggtgatttcctaagcagaggtcgctaactacaagaaatgttacactcgggtggtgacttcacacgccataatggcactggtggcaagtccatctatg

SEQ ID NO: 496592 - DNA, 75 bp, Homo sapiens
tgaagcgctgcccaccaggcatctggccatcccacaaaaggtcctaggcctacttacaagcctccagtctcaaat

SEQ ID NO: 496593 - DNA, 75 bp, Homo sapiens
agttggaagcagccgatccagcctgcggagcctgtggggcaggagcgagaacccgagcagcgccatgagcaacac

SEQ ID NO: 496594 - DNA, 74 bp, Homo sapiens
gcagccccctcaggcgccccgagacctcatcttccggaggctgggaagctggaggaggtgatgcaggagctgcg

SEQ ID NO: 496595 - DNA, 98 bp, Homo sapiens
tttgtatacccatgttgatgactgcagtctcaatgaaccaggcggccctgttctgtcattagctattagttctaatggagaacagtgttttagtggtg

SEQ ID NO: 496596 - DNA, 89 bp, Homo sapiens
atttacagaaagagtcaacagcagtggcaacaggggacggcaaaacagaacagaaaggcggagataaaaagaggggtgttaaaagacca

SEQ ID NO: 496597 - DNA, 100 bp, Homo sapiens
ttgcttaaatacccgaccttgctgcaccagagaaagaagcagcgattcctcagtaaacacatctctcaccgcggaggattttttatcaagcagaaatgca

SEQ ID NO: 496598 - DNA, 100 bp, Homo sapiens
tttcaagggagctgataaagaacttcttcccaaaatggatcttacagactctttcagcacctacgaaaaatttagaacagcaggtgaatcacagccagca

SEQ ID NO: 496599 - DNA, 100 bp, Homo sapiens
caaatgcaagtccaagaggaggaggaggcggaggtccaagcggaaaggcatgtaatgaatttactacacatgtgatgaaccttctccgagaacagagtag

SEQ ID NO: 496600 - DNA, 74 bp, Homo sapiens
tgagactcctgctcagtgtagcattaaggagaggagaggcagcagcatggcgagtgtcctgtcccgacgccttg

SEQ ID NO: 496601 - DNA, 100 bp, Homo sapiens
cggaagccttcgtctcccagattgcagccaccattggttcaggcaatcttcagcggtgatccagaggagatccggatgctcatccataaaactgaagatg

SEQ ID NO: 496602 - DNA, 131 bp, Homo sapiens
aaggacaactgcaagggggaagtagagagataacaaaagctgctcagagtctcaatgaacttgagttgctggaattgtggccgtaaagcgagtgaaacctgcagtggctgtaacacagcccgatactgtgg

SEQ ID NO: 496603 - DNA, 74 bp, Homo sapiens
aaacgggcttttaggaagaaggaatggaggctttgaaaatcagcatgattcttcagaggctcttcaggttctcc

SEQ ID NO: 496604 - DNA, 90 bp, Homo sapiens
tctctggagtctcgagcccgggaagtgcgttttgcggatctgaaaagaacaattgctgtccttctggatgacattttgcaacgattggtg

SEQ ID NO: 496605 - DNA, 90 bp, Homo sapiens
cttcgggcctctggaatttagcgctcgcccagctagccgcagaattaaatgtgagggagtctgacgtaagagtttgtgatgagtcatcat

SEQ ID NO: 496606 - DNA, 100 bp, Homo sapiens
gtaaagttccagggaggccgcgaaggttgaagaagcctcagcggaggcgatacggcctcctcgccaacactgaggaccccacggagatggcctcgctgga

SEQ ID NO: 496607 - DNA, 100 bp, Homo sapiens
aagctttctaccctttactccctgcaaagaaacaagagtgcttatcccagctaagctccaggggccgttgctccagggagaactgcaaatatcttcatcc

SEQ ID NO: 496608 - DNA, 100 bp, Homo sapiens
tagctttggggcttctgactgcagttcttctgagtgtgctgctataccagtggatcctgtgccaggggttgcttttgtaatgaagaagcacttaaatact

SEQ ID NO: 496609 - DNA, 73 bp, Homo sapiens
agcgtaggctacatggcttaccagagagatctggaagaagatccattatttactgacatttcaccagaaaaca

SEQ ID NO: 496610 - DNA, 98 bp, Homo sapiens
aaggagtgggaagtgtacaacttccccgcaggcggcgtgggcatgggcatgtacaacaccgacgagtatgacgaggaagcgatggtggaggctgtggc

SEQ ID NO: 496611 - DNA, 75 bp, Homo sapiens
ttgcatcgttccgagtcctgtactggactgcatcaggccgcgtctcctcaggaatacagatgctgccctgctccc

SEQ ID NO: 496612 - DNA, 90 bp, Homo sapiens
agctgaataaagctgttttggaactgtcaggtacctcaaagcgtacccattcctggcccagtgggtaacaagagaatggttcatttttcc

SEQ ID NO: 496613 - DNA, 75 bp, Homo sapiens
ggagattctgatgaagaagttattcaagatggacagcggggattttcagtttgattgacaccctgtggcccccag

SEQ ID NO: 496614 - DNA, 98 bp, Homo sapiens
gcgggcagcaggatggtggtggatgcggccaactccaatgggcctttccagcccgtggtccttctccatattcgagtgtgacccagccttactccctg

SEQ ID NO: 496615 - DNA, 100 bp, Homo sapiens
tttggagcactgcttgcaggtcccttggccatcacgctgggaagggagaaaactggttgtcctggatgtttgaaaagttggtcgttgtcatggtgtgtta

SEQ ID NO: 496616 - DNA, 100 bp, Homo sapiens
ccttcagttgtgtactctacacgatgagatgcttcattggtttcgtgcagtagaatgttgtgtgagatatgaatatcgtgtagagatggttcaccagtcc

SEQ ID NO: 496617 - DNA, 50 bp, Homo sapiens
cagatatcttgaaaagctgccagaaagaacacagatatgtagaactcttc

SEQ ID NO: 496618 - DNA, 101 bp, Homo sapiens
cggcctgaaagcagtgaggaggcagcggccctggtggaagacttgacccagacccttcaggacagtggtcgagtctatgctgtcttgtcaaagagagaagg

SEQ ID NO: 496619 - DNA, 75 bp, Homo sapiens
ccgggaatggagcctgctgcgctgcgctgcgcttatcaagactggtgccccttgccgatctgagcgcttggccaa

SEQ ID NO: 496620 - DNA, 75 bp, Homo sapiens
cctgttccccgcgctgcggcctggcggcttccaggcgcactaccgcggctgaccccgcactacatctacccacca

SEQ ID NO: 496621 - DNA, 74 bp, Homo sapiens
aaggattccaagtaactcttatttgattgggaatcaagatgggaaaacaaggaattatcaacaaagaaggatat

SEQ ID NO: 496622 - DNA, 75 bp, Homo sapiens
ggaggctccaagacctcatcaacaattaagcttattcagctgattctgaatcatcttacactaccagacctgtgt

SEQ ID NO: 496623 - DNA, 74 bp, Homo sapiens
ggctgaggcgcctgtcggactaccccgagtacatgtggggagagtggtgaatatcagtagtttgcagtgtttaa

SEQ ID NO: 496624 - DNA, 87 bp, Homo sapiens
agggttctgtggaggacataagggagatagtgcagagactgaaggactcagtggcctctgaggatgtggctgtgaacttcacacttg

SEQ ID NO: 496625 - DNA, 99 bp, Homo sapiens
attcgcagtggtcgcttcttctccttgaaaactgtcgctgaaaagcaggagaagagaaatcaggatcgcttgaggaggagagaggagagggaacgggag

SEQ ID NO: 496626 - DNA, 87 bp, Homo sapiens
cggtcgggcggggcggcggcgctgacagttagagatgtttatgattacttccgagctgtcctgcagcgtgatgaaagaagtgaacga

SEQ ID NO: 496627 - DNA, 98 bp, Homo sapiens
tgtgatggaaactacttgctgtgtggcacttcctggtctaaagctctgctagacaattgcgacatatctgaagagatggattaagaatgctttggatt

SEQ ID NO: 496628 - DNA, 82 bp, Homo sapiens
ggcctcccgggctccgggaaaactacactggccagcttccccgggcgctgcctggacaggcctgcctgcgtgctgggacatg

SEQ ID NO: 496629 - DNA, 95 bp, Homo sapiens
tgccgctcctaagcctgcacagccgcggcggcagcagcagtgagagcccagctcaacattggcaatgtgctccctgtgggcaccatgcctgaggg

SEQ ID NO: 496630 - DNA, 75 bp, Homo sapiens
gaatgttctccctgcagcagtcagcccaaaggaagatgtatttccactacacaaaattttccacctctgggatac

SEQ ID NO: 496631 - DNA, 75 bp, Homo sapiens
agcggtgagactatcacctatcgccaagtgaaaacctggaatcagattactttggcaagcttgaatctaaattat

SEQ ID NO: 496632 - DNA, 88 bp, Homo sapiens
ctcacctacaaaaagatgaatccttctgatgtctcttttacaggaatctccgccacctccctactctcggctgtctcctcgcgacgag

SEQ ID NO: 496633 - DNA, 88 bp, Homo sapiens
gctgcgtaggccccgcccggccaggcccagccgggccctggacaggggcaaaaaggccccgagtcacttcaggtggtgtgtcagagtc

SEQ ID NO: 496634 - DNA, 102 bp, Homo sapiens
gcgaacgcggagagcacgccatgaaggcctcgggcacggacctgaaggagaagaaggagaaggtggaggagaaggcaagccggaaagagcgaaagaaagaag

SEQ ID NO: 496635 - DNA, 76 bp, Homo sapiens
ctagttactatctctaagcactgaagtcggtgtttggagaaaaggactcagggctagtgactatgagagaacacgg

SEQ ID NO: 496636 - DNA, 83 bp, Homo sapiens
ggagcgcccagaggcgagccctggtggaggaagaggacatttcattaccatccagaagtgtctcccactgaaggcatccgtgg

SEQ ID NO: 496637 - DNA, 75 bp, Homo sapiens
gtccccggcgagcagggagcggagtaccagcacttcatccagcagtgcacaggtggcctccatgaaccagcgccg

SEQ ID NO: 496638 - DNA, 146 bp, Homo sapiens
actttggcagaattgaaaacacgagtggaaaagattgaatgtaacaagaggcataaaacagttctcactgaactacagccctgtatgatgagattcgtcagtttcgcaaggcctgtggggaggctcatcttaaaactatattagcg

SEQ ID NO: 496639 - DNA, 75 bp, Homo sapiens
accagtccatttggggaaatccttcggatggtgaactcattagaaagtgaagtcaccctgctgagaaatgaagtg

SEQ ID NO: 496640 - DNA, 90 bp, Homo sapiens
gcagctgttgattcacgagatgattctaaagctgaaagtggataaaaacaaaatggtagccacatccggtgtaaaaaaagctatatttga

SEQ ID NO: 496641 - DNA, 83 bp, Homo sapiens
gggtgacagctccgggaccggccgaaaggcgaggaaccggtgctggagaatctggtaaaagcaccattgtgaagcagatgagg

SEQ ID NO: 496642 - DNA, 74 bp, Homo sapiens
ctcacaactccaaaaacaaaagggagatactccagcttcagcaacaggtgtccctggccagtgtccttccacct

SEQ ID NO: 496643 - DNA, 100 bp, Homo sapiens
cggaaggcgcgggcaggagcctggcgaggatgcaccttcccctgccttggaaagtactatactggcaattgctggagaagattttgcaattgttgcttct

SEQ ID NO: 496644 - DNA, 101 bp, Homo sapiens
tatgcatcacctacacgccaacatttgatctgaatgggagtgccgtgctgaagatcgcggagttaatacactgttaaatgtgaaattaagtgagacagaaa

SEQ ID NO: 496645 - DNA, 50 bp, Homo sapiens
gcattttgctgtctcctcctaatacggctgctttgtaccgcctcagtgga

SEQ ID NO: 496646 - DNA, 87 bp, Homo sapiens
ggcaggcgaagtcttcattcataaggataaaggatttggctttatccgcttgatcgccacatcacagaatcgtatctatctcacagc

SEQ ID NO: 496647 - DNA, 51 bp, Homo sapiens
tggttttcaggccacaaatgctttcacagggactggtgattgcagctggaa

SEQ ID NO: 496648 - DNA, 75 bp, Homo sapiens
tggcccaggtggggccaggctgactgaagtgagtagtgggggtgccagaccaggattctgaacacgaccctcttt

SEQ ID NO: 496649 - DNA, 100 bp, Homo sapiens
ggagaaagggtgaccaagaactccacggggcatatgatattttcctgaatgcaaaagagcaaaacattgtgtttaatgctgaaacctacagcaatctcat

SEQ ID NO: 496650 - DNA, 100 bp, Homo sapiens
gcctcagcctcctaagtagctgggattacagacccagctcatccagatggtggtgtggatgctgcagcgccggcttctcatccagctgcacacctatgtc

SEQ ID NO: 496651 - DNA, 100 bp, Homo sapiens
cagtcaccagtacagctggcgctctcacaaatccccacaggcactgtgctgtgttgcgggaagtcagggaccccaaacggagggaccagctgaagccatg

SEQ ID NO: 496652 - DNA, 100 bp, Homo sapiens
tgtgcctccattcccgggaggggggagcggcgttggaggccaccgtttccaggtagagcgggaaaaggccattcttttggccaacctacaggagtcacag

SEQ ID NO: 496653 - DNA, 101 bp, Homo sapiens
atcctgctcggaccttagcttccctgacctctccctgcccggggagcggtgaaaatcctatttataagagtgccgtaacaactgtggtcaatccgaagtat

SEQ ID NO: 496654 - DNA, 83 bp, Homo sapiens
cgccaacttcaaccaggacaacacaaaaagcttgtggtgaaggggggcaaaaaaaagaagcaagttctgaagttcactcttga

SEQ ID NO: 496655 - DNA, 75 bp, Homo sapiens
aacttacctgagatttcgtcacagcaaaaaagggagacgctgtccccgctgtgcctcatccccatggtgacatct

SEQ ID NO: 496656 - DNA, 82 bp, Homo sapiens
gggcagaggaggcggccaaggacctggccgacatcgcggccttcttccgatccgcaaacggggattcagcgtccgatccttt

SEQ ID NO: 496657 - DNA, 82 bp, Homo sapiens
cgcgggaggtgttcgagaacgaccccgagacggaggctactcacagtcgaactacaactccccggggtccggccagaactac

SEQ ID NO: 496658 - DNA, 75 bp, Homo sapiens
gccaagctccactgttcagatgcaaagcatgaatacaactttgtctgagagccccttcaagtgtgatcctgatgc

SEQ ID NO: 496659 - DNA, 100 bp, Homo sapiens
ggaaaatggcggacgggaaggcgggagacgagaagcctgaaaagtcgcagcgagctggagccgccggagacagattatgagggacaagccaagaaactcc

SEQ ID NO: 496660 - DNA, 106 bp, Homo sapiens
ctggacagccagtggcgccagatagaaaacggcgagagtgggcgagaacgtccactgcgggccggcgaaagctggttaatttggagtggcccctggagtcagtttc

SEQ ID NO: 496661 - DNA, 97 bp, Homo sapiens
ccaggacctccactaatcaccagaacaaaatgtgcagggtgcttcaaggatgaccgcatcgtcttctggacttggatgttctccacctacttcatgg

SEQ ID NO: 496662 - DNA, 130 bp, Homo sapiens
ccgagagtttggagccccggagtggggtgtcggcgcctcattcgggtggagctgagccggagacaggttgaaggtcgaggagctggaaggcgagcggagtcggctggaggaggaaaagaggatgctggag

SEQ ID NO: 496663 - DNA, 100 bp, Homo sapiens
aggtgtgattgaaccagacactgatgctcctcaagaaatgggagatgaaaatgcggagcctttgacgacccctatgccctggtggtgctggctgaggagg

SEQ ID NO: 496664 - DNA, 50 bp, Homo sapiens
cacgggcttcctcatgtcgtcctacagaaccagagcctgaaacagaagca

SEQ ID NO: 496665 - DNA, 98 bp, Homo sapiens
tgtttacaaaggagttgacagcacttttcaaaaacctggaggcaggtggaagtcatcataaagtttctgtttcacccgtcgtccatgttcgaggactc

SEQ ID NO: 496666 - DNA, 102 bp, Homo sapiens
gcctcccggctctcgtcagcctcccgccggccgtctccttaacaccgaacaccgtttggtgcacctcgatttggaggaagtagggcagggcccttatctgga

SEQ ID NO: 496667 - DNA, 100 bp, Homo sapiens
tccgacccgcgaacccctctgggatccccgccgctctgtctacaacccgagatggacgggacagaaggcagtgccgggcagcccggccccgctgagcgat

SEQ ID NO: 496668 - DNA, 97 bp, Homo sapiens
ttggtctttaaagaacatataaacaggcctgccgatgttatccaggtggtggtgaagtttattaagaaggagaaggtcttggaggattgttggattg

SEQ ID NO: 496669 - DNA, 100 bp, Homo sapiens
ttcagccactgtgggccctgcctctgcctgttcttctggaatgtcttgggggttttgatcctgtcactgtgaaacaggtgggtgagatgaaattacaact

SEQ ID NO: 496670 - DNA, 98 bp, Homo sapiens
ggggagatggcgtcctacgtagataacagcttccgccaggcggtgatgaagaatccccccgaaaggaccccccaggtaatgcaggtggtgaaggagca

SEQ ID NO: 496671 - DNA, 97 bp, Homo sapiens
ctgagggcagctgttcccactggctctgctgaccttgtgccttggtttctgacgtagaagagcttacccctccagagcatctttctgatcttccacc

SEQ ID NO: 496672 - DNA, 90 bp, Homo sapiens
cctcaaggccatgatcaaaacgttaacatggtggtcttaggcaagtacctgggcatccccaagccctacgggcccatcatcaatggccgc

SEQ ID NO: 496673 - DNA, 110 bp, Homo sapiens
tcagtgaaaactgcctcgaattctttcttgcaccgatgggcagatgggcagtgtcggaggatcgtgtcatctgtcccgtggcgctggggagtacagaagtaggtttacga

SEQ ID NO: 496674 - DNA, 100 bp, Homo sapiens
ccctccctaattctcgattcggtccctaccttcaggtcggggagcacgatctgcacttcgtctcaaagatgctgttgatggagtaatgaatggtgaatac

SEQ ID NO: 496675 - DNA, 94 bp, Homo sapiens
tcaatatctgtcttcggtggactccttcggcagtccacccaccgccgccgcctcccaggtttacccaaggtccagcctagcccctaggcaccat

SEQ ID NO: 496676 - DNA, 50 bp, Homo sapiens
gttcctgtggaccccagtccagggaaatcctcattgacgattcaatttgt

SEQ ID NO: 496677 - DNA, 50 bp, Homo sapiens
gaaagctcgagccaggctgtggctgaccaactgactgaagagcagattgc

SEQ ID NO: 496678 - DNA, 74 bp, Homo sapiens
atgtctctctatccatctctcgaagacttgaaggtgtctcgtgcctctgctggaccctgactctgggctcctgg

SEQ ID NO: 496679 - DNA, 90 bp, Homo sapiens
cggcagtccacccaccgccgccgcctcccagacccaacatgagtgaagtttcctgcaagaaacgggacgactatttggaatggccagagt

SEQ ID NO: 496680 - DNA, 75 bp, Homo sapiens
ccgggcggcattgccagggttggatgtgacaatgcagatcttcgtgaagactctgactggtaagaccatcaccct

SEQ ID NO: 496681 - DNA, 100 bp, Homo sapiens
agcctacatggacatgtcctgtgtgtgacaagaaggctccctatgaatctcttatcattgatggttccagctttacatgtggtttggctggggctctggc

SEQ ID NO: 496682 - DNA, 100 bp, Homo sapiens
ctgatctccaggatgacatgcgaagatgccaaatcatccgagacatgattggaccggaaaagactttggcgggcaaaactgttccgatttgcctctgaga

SEQ ID NO: 496683 - DNA, 50 bp, Homo sapiens
actattaagaccatgttggaagaaatggcacctcgaaaggggaaggaaaa

SEQ ID NO: 496684 - DNA, 82 bp, Homo sapiens
aaaaaggaagaggagaaggaaattgtcccgaatccctgcaggtgagaagccctaccactgcaactgggacggctgcggctgg

SEQ ID NO: 496685 - DNA, 100 bp, Homo sapiens
cgaggagtacgagacgaggttcctgtgcaactcttcacagtgcacacttcttcctggagatagaagggtttgaacccaaccccacagttgccaagacctc

SEQ ID NO: 496686 - DNA, 82 bp, Homo sapiens
gttcattgtttgtcaccacaaaaaggacaggaattgaatgatctggcacgggaccctccagcacagtgttcagcaggtcctg

SEQ ID NO: 496687 - DNA, 98 bp, Homo sapiens
ccaattctgtttactctgaattaccatcagctgaagggaaaatgaaggagaaactcccatgtatggaatcccactgtatgatttataaacagacaata

SEQ ID NO: 496688 - DNA, 116 bp, Homo sapiens
cccttctgaagaacagaaaaagcagttggcacaagacacgggactcaccatccttcaagtgaacaattggaagaatccccagcacaagatagaatatagacataatacgcttccag

SEQ ID NO: 496689 - DNA, 80 bp, Homo sapiens
gcagaccttaaaagatttcgcaaggaatatgtccaaccagtacaacttagaacaactctgctcatggtgattacatgcaa

SEQ ID NO: 496690 - DNA, 83 bp, Homo sapiens
gcggacatcactttagaccctccacctaattgcagaccaagcggagcagccagctggcagtagcgccctgtaggacccccagg

SEQ ID NO: 496691 - DNA, 100 bp, Homo sapiens
gacctcggaggaaccggctccttgcgtcccgcctccctgggagctccgcacgggtagacgttacatccaagaggaaataatccaggcaaggaagcacaag

SEQ ID NO: 496692 - DNA, 74 bp, Homo sapiens
gcatacttggaatgaatccttctagagacgtccacgagtgaagacatttccacctggacacctgaccatgtgcc

SEQ ID NO: 496693 - DNA, 98 bp, Homo sapiens
acgtcaactattacaatcgcttgtacaaaggagagtttaaacagccaaaacagttcattcatattcagcgtgcgagtattcgtcaaccagttatatca

SEQ ID NO: 496694 - DNA, 75 bp, Homo sapiens
ataatccagtgatgtcattgcaagatcaggtatctccaaattatccaaggccatgccagccatgtcattgcgatc

SEQ ID NO: 496695 - DNA, 80 bp, Homo sapiens
ctggcgatcagcaccaagaacccactgcagtccttgctggtgcagacgaagcggcgggctctggagaagattgaccttaa

SEQ ID NO: 496696 - DNA, 100 bp, Homo sapiens
catgcccctcaggctggaacttgccctgtctcctcgcagatgagatgaagatgaggagagtgaggaatcaagtgaagaagaatctagcttggagagtgat

SEQ ID NO: 496697 - DNA, 83 bp, Homo sapiens
gccatctgggcttggcttccggctccccccatctggctggaacacacatcagtcacgttcagcttgttggtttagatgaggag

SEQ ID NO: 496698 - DNA, 100 bp, Homo sapiens
agtcagtgatgtgaaaagacttgaaatggtcttgctggtggatgccctccttactccccaatatatacgtcttggatagactgttggtgcatgctacaaa

SEQ ID NO: 496699 - DNA, 120 bp, Homo sapiens
cagctcccgtagggagccgtgggcgctcggtgcccgggccgggcaggctctgtgtgctccgggatggagcaggtgtgcagagggtgagaacccagctctgggaccaagtcacttgcttcc

SEQ ID NO: 496700 - DNA, 100 bp, Homo sapiens
atttcttcgaggtggagtcggagctgggacggctgaccggttccctgatgtgttacctgcttctgctactgatccaaactgcagaacttctcattcatcc

SEQ ID NO: 496701 - DNA, 100 bp, Homo sapiens
ccttggcctcccgaagtgctgggattacagatccgctttatcctcatccagaaccgggcaggcaagacgcgcctggccaagtggtacatgcagtttgatg

SEQ ID NO: 496702 - DNA, 85 bp, Homo sapiens
actccagctgttggaaggtcttgtgagcaatacctccttaactacgtgttttgctcaagaaacttttgggaaacagtacaaacaa

SEQ ID NO: 496703 - DNA, 100 bp, Homo sapiens
cttcttgcggcgcctcggctcctcccaggtggcctcccgcgtgctggccatgaagctgaatgccaagggaacagaagcacccgcagtagtgacagaggag

SEQ ID NO: 496704 - DNA, 90 bp, Homo sapiens
cccatagctgtgagtggcgatcacgagaacaataaggatccaaactactggatacaggtgcatcgcttggaacatggagatggaggaata

SEQ ID NO: 496705 - DNA, 98 bp, Homo sapiens
gcgcgccaaaaccgggacggacaagaccctggtgaaggaggtcgtacagcaagaaaagcctaggcttctcgagcctttggattatgagactgtcattg

SEQ ID NO: 496706 - DNA, 100 bp, Homo sapiens
ttgtcgtttcccagcgctgcgcaggacttctcctggcggcgctgcggatccagggggtcggctgccaggtacagaacctaaaggcagacccagaagagct

SEQ ID NO: 496707 - DNA, 133 bp, Homo sapiens
cacctggtcaatgcagacggacagtacctcttctgcaggtactggaaacccacaggcacacccaaatttctcacattggcaaactgagagattttcttctggaacacaggaaagattatattaatgcttatag

SEQ ID NO: 496708 - DNA, 100 bp, Homo sapiens
actgggataattatccaaataaattgcaagcattctatccaaatggtggatttcattgactgggtagacaacatgtggccaaggcacttgaaggaaagcc

SEQ ID NO: 496709 - DNA, 96 bp, Homo sapiens
ctttctgcgagtacgagccaaccggcagacccgactgaatggctcccaggccagtgccagtacttgggcttgccagtggcggattacttcaagcag

SEQ ID NO: 496710 - DNA, 74 bp, Homo sapiens
cggcgcaggcaccggcccggggagaggcaccatgagcgaaagcgtggatacccatcaacgaagttttgatattg

SEQ ID NO: 496711 - DNA, 50 bp, Homo sapiens
gcagcccacccagcctgcctcggagccacccccctttgaatgtattggaa

SEQ ID NO: 496712 - DNA, 50 bp, Homo sapiens
gttcttctgggacctggtggagggctgtggtgtcagtgctgggctcctgg

SEQ ID NO: 496713 - DNA, 50 bp, Homo sapiens
aaagcagcgtgcgttcagccctggggagatgcctacatagaagagtgaca

SEQ ID NO: 496714 - DNA, 97 bp, Homo sapiens
cctggctcaccttctacgacatcgccatgaccgcgggaattcctagaggacctgtgcaacaacctcttgaggatcgaatcttcactcccgctgtctc

SEQ ID NO: 496715 - DNA, 75 bp, Homo sapiens
caccgaaaagagcctgtacaaccagcgcctgcgcctacagaacgagcaccgagtaaggaagagcccaacactgct

SEQ ID NO: 496716 - DNA, 83 bp, Homo sapiens
tttatctttctgtggatccttacatggaatgttacgttcataacttactaaggattagtgtatattttccaaccttgaggcat

SEQ ID NO: 496717 - DNA, 100 bp, Homo sapiens
caggactcactgaaggagtttgtgcagtttgtgtgctcggatggctcgggccaggccaccggacaggtaattaataaaatgtctccaacatctctaaaga

SEQ ID NO: 496718 - DNA, 74 bp, Homo sapiens
gaagaggcggcagacagcggggtgccctacgagacgctgaacaaacgctttcgcgccgctcagaagaacattga

SEQ ID NO: 496719 - DNA, 98 bp, Homo sapiens
tcagcgatggcctgctagactctgtccccggcgtgaagaggaggcggctgatccccgaggtttctgcggcactgaaacaaggccaaattacaccaaca

SEQ ID NO: 496720 - DNA, 74 bp, Homo sapiens
ctttcaagataacccgtggaattgaagcagttggtggcaaattaaggtaccgaggagaaggcattgtatatggg

SEQ ID NO: 496721 - DNA, 74 bp, Homo sapiens
ctcctgagtagccgggactacaggtattatagctgcaaatgtccttgtattctgtttatggagagtaccttctc

SEQ ID NO: 496722 - DNA, 101 bp, Homo sapiens
agaaggcagcagctgctggaccaggtgaatccaaagggtgtgcctcaccatgcgcaggccaggatctagtgaaaagccatttgatgtatgcggtcagagaa

SEQ ID NO: 496723 - DNA, 101 bp, Homo sapiens
gattccggttgagtaccaaacagtccagagactcatccccgccctgtgggagaagcacagtccacagtggccaactttgacccaggcaccttcagcctgat

SEQ ID NO: 496724 - DNA, 75 bp, Homo sapiens
cgcagtggtcgcttcttctccttggtgctggacatcaaccaggccgacgcagggaccctgcccctggactcctcc

SEQ ID NO: 496725 - DNA, 96 bp, Homo sapiens
gtacggcttagaggacttccctttggatgtagcaaggaagaaattgttcagttcttctcaggagctcagtctgaatattcttggagaaagatgctg

SEQ ID NO: 496726 - DNA, 100 bp, Homo sapiens
gtgctcctcattaagtgctgtctcccccagcgaatcggtggccatgatctctagggaaatgtttcaacgtgcgcaagcgttgcggcggcgggcagaggac

SEQ ID NO: 496727 - DNA, 87 bp, Homo sapiens
acttgacgttcctgacgaagcaggagatcctcctgtactgagtttgagggtgcagtcatagctctgttccatttgttggccaccagg

SEQ ID NO: 496728 - DNA, 76 bp, Homo sapiens
tcacggcgtacgccctcatggggaaaatctccccggtgactttcaggacccacgcagccacccagcctcagcactc

SEQ ID NO: 496729 - DNA, 80 bp, Homo sapiens
ccagaggcagcgggaacgggagatccgcgaaacggagaggcggcgatcatgtttgagaccttcaacaccccagccatgta

SEQ ID NO: 496730 - DNA, 75 bp, Homo sapiens
agaggtgtgctgacgacctgctacaacagaaaattcagaaggagctggcggacatcactttagaccctccaccta

SEQ ID NO: 496731 - DNA, 82 bp, Homo sapiens
tttcacgaaggcaccgacgtcatcatgctgaccaccaatcagatccgtaagggaaagcaggcaggatgggagagtcgccgat

SEQ ID NO: 496732 - DNA, 82 bp, Homo sapiens
gcgtgatcaccgaccagaactcggacggctactgattccagttcttcagacaaacaatggtccaagtctaacaggattgact

SEQ ID NO: 496733 - DNA, 83 bp, Homo sapiens
gggggctgcaggctgagtatgagacgcaagtcaaaggtccgcgggagagctgtggggcttggtgagtgtttcgtggcctctcg

SEQ ID NO: 496734 - DNA, 98 bp, Homo sapiens
tgaagtattaattcttccactgatatctcaaaaggtgatctggacaaaggaacaggtatctcaggtaggtagccatccaagcttcctgaaggaggttc

SEQ ID NO: 496735 - DNA, 100 bp, Homo sapiens
gcttctgagacggcggcagcagcggcattcagagaccaagaagcgggacgttcaccatgggaagaaaatcgctgtaccttctgattgtggggatcctcat

SEQ ID NO: 496736 - DNA, 90 bp, Homo sapiens
agggtcaaatcagtcaacctagaccaatggacagcagaacagatacaggctcttgggaaagctggtgctgctgctgcctgattcccgccg

SEQ ID NO: 496737 - DNA, 100 bp, Homo sapiens
agaaagcaaagcgcagaaatgttggatttgaaccctccaggggacccctctctcagccaccctctctctggtgatgtcacagtgctgccggaagatcaaa

SEQ ID NO: 496738 - DNA, 90 bp, Homo sapiens
attctcacagtgacttaaatagaccactggaagatgactgtcaagttttagaagaggctaaaagagatgctaagagaatgcctgcaaaag

SEQ ID NO: 496739 - DNA, 50 bp, Homo sapiens
tttaagtgtggcatacaagaaaggcaatttcttgcaaccaccaccgaggc

SEQ ID NO: 496740 - DNA, 100 bp, Homo sapiens
gatgaggaagaggatgaggtgcagctcaggtcaaccagggctctgatacttgtgctcaatgtgcccattttcgagatgggccccactgtgtgagcagctg

SEQ ID NO: 496741 - DNA, 98 bp, Homo sapiens
aggacaactgcaagggggaagtagagagataacaaaagctgctcagagtctcaatgaacttgaattctgcttggtcagaatcgtgatggcattgtgtt

SEQ ID NO: 496742 - DNA, 83 bp, Homo sapiens
ttagtgcgttctacctttttgcctgtgtttggggcacattcattctcatctctatttgtgccaatgtaatggaatattgccag

SEQ ID NO: 496743 - DNA, 100 bp, Homo sapiens
aaagattgggcagtcactggggagaacagcttggggcttccttggtcgcacccaccacctgcctgcccactggtcagccttcagggaccctgagcaccgc

SEQ ID NO: 496744 - DNA, 88 bp, Homo sapiens
cccccaccgtgtcgccggccttggtccctgcggcgcggacgtccggcgcgggagagaaaggtcactgacattgctgatgccatgattc

SEQ ID NO: 496745 - DNA, 75 bp, Homo sapiens
ccttgcctgcccgacggctctcctctgactgcagcgtcactcaggtgaactcaaggttagtcataagcattttga

SEQ ID NO: 496746 - DNA, 73 bp, Homo sapiens
ggagcagcttctttatcccttcatctgtggataagcagccagatgaaaactcgctggatttttcctcctgtat

SEQ ID NO: 496747 - DNA, 90 bp, Homo sapiens
tgatggaccagaaattatgggttgtacagggactctccagaatccgatgctgagcgagagaaggataaaaaagaaaaagatcgggaaagt

SEQ ID NO: 496748 - DNA, 78 bp, Homo sapiens
aaatgtgagtggaagccatgaggccaaaggcagttgtattgatagtcgtgcaagcactgcagtgttcccattattcga

SEQ ID NO: 496749 - DNA, 83 bp, Homo sapiens
gcaccaagagcagccccggtctctcggacaccattttctgccgctggacgcaagggtgaaaatcctatttataagagtgccgt

SEQ ID NO: 496750 - DNA, 88 bp, Homo sapiens
gacgcctccgccgccgcctgaggaggcgagctagccgggagttacaccgccaccgccaggatgctataaaatcaccacggtctttagc

SEQ ID NO: 496751 - DNA, 82 bp, Homo sapiens
accgcggctgggcaagaagctgatcgagcccctcaccaatctcatccacaggcatttgaccaagccgtgaccaaggacacct

SEQ ID NO: 496752 - DNA, 74 bp, Homo sapiens
acacatcaagttaaatttggtcaacaaaatccacgtcaggtatctccctgggataaaaaagaagaagctaacca

SEQ ID NO: 496753 - DNA, 100 bp, Homo sapiens
taaagcatgaacaggcatctaatgttcttagtgacattagtgcataatcaccagcaacacccgggacaataatacgggggccacctacccccacctgaac

SEQ ID NO: 496754 - DNA, 50 bp, Homo sapiens
taaggacattccaggcagaggcaagttgagtcagcagatactggagttat

SEQ ID NO: 496755 - DNA, 96 bp, Homo sapiens
aagttctgcctggcagccgagggacttgggaatcgcctgtgcttcttggaacccacttcagaagccaagtcttaggaaaagtcctcagtgctgtgg

SEQ ID NO: 496756 - DNA, 96 bp, Homo sapiens
ctgagtagacagccatgtggccatcgcagctactaattttcatgatgctcttagctccaataattcatgtcgacagaggtacgttcttggagacac

SEQ ID NO: 496757 - DNA, 100 bp, Homo sapiens
cctggggtagaaccacgtgaaatggcagctatgtgtcttggattggctcacagctccataatgggagaagtaaagaacaaagacttaaggaacagcttgg

SEQ ID NO: 496758 - DNA, 74 bp, Homo sapiens
tttgttaaggattccaagtaactcttatttggaatcccactgtaagatggggttatgtcgctatgaagtttgca

SEQ ID NO: 496759 - DNA, 98 bp, Homo sapiens
tttgtgtctggagctcttgaagcaatgaccatggccaacctggagcgcaccttcatcgccatcaagccggacggcgtgcagcgcggcctggtgggcga

SEQ ID NO: 496760 - DNA, 50 bp, Homo sapiens
cctcagaggacaacgaagtgttcgggatgttctgttcttgaaggactgtg

SEQ ID NO: 496761 - DNA, 75 bp, Homo sapiens
ctggctgtcagcctggtgctcctctatcttgtgtaatgctgtgtcatggagctaaaatcggatttttccaaggag

SEQ ID NO: 496762 - DNA, 82 bp, Homo sapiens
cccggagcacccgacccctgagtccgcgggagagctgtggggcttggtgagtgtttcgtggcctctcgggttggtcagcacc

SEQ ID NO: 496763 - DNA, 74 bp, Homo sapiens
aagctcatcaaagagatggtgcaggaggttctgtccatgagacctaggattcatgggagtgcagcccgggaaga

SEQ ID NO: 496764 - DNA, 74 bp, Homo sapiens
gcatgaaaaatcaaaaggagttcatgcttatgaatgctcgacttcagaaacagatatgcagtatgcagcaaaag

SEQ ID NO: 496765 - DNA, 82 bp, Homo sapiens
tctttctgttcaggccagaccctctgggagcttctcagccattttccacagatcaggtgctggagaatctggtaaaagcacc

SEQ ID NO: 496766 - DNA, 74 bp, Homo sapiens
aggcgaagctggccgagcaggctgagcgatacgacggcatcagaacacaccatgatggctgtgacctaagaccc

SEQ ID NO: 496767 - DNA, 82 bp, Homo sapiens
cgctctgccacggtctgcccacccaacgcgaagacggtaacccgtgtgactttgactgggaaacaggagggcgttagtggat

SEQ ID NO: 496768 - DNA, 98 bp, Homo sapiens
ccaggaacccctggagcaaaaggacaaccaggccttcctggattcccaggactcatggggaccttgtaagtggcctctatcagcatatcctgctatcc

SEQ ID NO: 496769 - DNA, 100 bp, Homo sapiens
gagagccaggccggcggccagcaccgcactcgcctccggcagatcctggactggtgtggggaggccttcgagggcgtccaagaagaacggccaatccgac

SEQ ID NO: 496770 - DNA, 100 bp, Homo sapiens
gaagttcagtgcccagctctactgagaagaatgctatgcagctgactttgcctgtagcctcatagaacccatcccatggctgcagtggaagcttgcggtg

SEQ ID NO: 496771 - DNA, 76 bp, Homo sapiens
ccgagttcaacatcctcctggccaccgactcctacaaggacttaaccaccaccatgtcgagcaaaagaacaaagac

SEQ ID NO: 496772 - DNA, 75 bp, Homo sapiens
ggcgtgcaggtgaggccccacggcgcccggcctctccagcaggtcatcatcagatttgaaatatttaaagtggat

SEQ ID NO: 496773 - DNA, 100 bp, Homo sapiens
ctcaggatcacagccttctctaaagaagtattcctctccaaagagctgcaggccttcaacagccttattagcacatcatgtctgaacctgaagaaatcac

SEQ ID NO: 496774 - DNA, 100 bp, Homo sapiens
ccccagagagtacccctattccagccaacttgtctcagaatttggaggcagcagcagccactcaagccgtttccctggggagatggtaaccatactctat

SEQ ID NO: 496775 - DNA, 50 bp, Homo sapiens
caaacctcacagccagagccagagggaactctaatgatccaggacaaaga

SEQ ID NO: 496776 - DNA, 89 bp, Homo sapiens
gcagtagccgccgtgggagggagccatgaagcattacgaggatcaggagcgtctgggcaagcagctcaagttacgtgcagaaagggaag

SEQ ID NO: 496777 - DNA, 50 bp, Homo sapiens
ctgaggcttatttgggaaagaagagctgtgttgccgctttccttgatgtt

SEQ ID NO: 496778 - DNA, 100 bp, Homo sapiens
tttaaagctgagaacgcatctttagctaaacttcgcattgaacgagaaagtgccttggaaaaactcaggttgtaaagctctctgaaatagtgaccttagc

SEQ ID NO: 496779 - DNA, 97 bp, Homo sapiens
cagaagggcaagagaggtggatctgtgagggaaaagacccaataggataactcaagttactggtcactgatatgatgcttcaggacaaaccctatcc

SEQ ID NO: 496780 - DNA, 73 bp, Homo sapiens
ttaattctacccagcaaaatgaaactgagcctaatcagcaaaatggagaaggtagaggagatgccacataaac

SEQ ID NO: 496781 - DNA, 75 bp, Homo sapiens
ctaagatgccaggaccacctggaagcctagaaatggtgtatgcaacagcgttattgcaacaggctaacgaaaaca

SEQ ID NO: 496782 - DNA, 82 bp, Homo sapiens
caccgccgccccctccggcgtgttcatgcccccggggttcgtgctggccgtgggcagcgccgtctttgatgccatgttcaac

SEQ ID NO: 496783 - DNA, 97 bp, Homo sapiens
ttcttatttagccggagtgagaagcaagaaggccctggacacagcaatatctctgggctttcacagaactttttaacaacagtggctattcttttgg

SEQ ID NO: 496784 - DNA, 75 bp, Homo sapiens
cgaaggcctcggcctttcacattcgggaagcgtcgggattaggtgaaagttctaagctggtctatgtccatcacc

SEQ ID NO: 496785 - DNA, 95 bp, Homo sapiens
ggaaatgcatctttatgtcagaaacacaaagcagcccaaccaaaggtaactctcaggagccttctccgcagttggcttcctcggtagcttccaca

SEQ ID NO: 496786 - DNA, 100 bp, Homo sapiens
cccggggcaagagcaggagcccggcaccccccgccgacaaggagggtgaccctggcaaagatgagagtgcacatttcgtcctgcctgaaggtccaggagc

SEQ ID NO: 496787 - DNA, 51 bp, Homo sapiens
ggaggttcagctttagcttgaggtttcagctgccacagaagtgtccttttc

SEQ ID NO: 496788 - DNA, 75 bp, Homo sapiens
gttcgtgcgctgtggagacgcggagggtcgaggcggcgcggcctgagcaattaccagctctggctgggtcgccac

SEQ ID NO: 496789 - DNA, 100 bp, Homo sapiens
cagccgtggtcatcttcaacgtgggctccaacaccaacgagaccatcaccatgccccacgcgggtccttccatagtgacgccccccaaggacatctggaa

SEQ ID NO: 496790 - DNA, 95 bp, Homo sapiens
cattgctggagtgatctatcaggcaccagacttgggatcagttataaactctagagtgtattctgacaagtccctgtacacccagctgtgctttt

SEQ ID NO: 496791 - DNA, 100 bp, Homo sapiens
atagccgtcttcagcttgagccccatcactagatacgtaggtaacctttccagagatgtgacagaagtccttatacttcagttgttcagtcagattggac

SEQ ID NO: 496792 - DNA, 100 bp, Homo sapiens
gggaaaaatggagttgtggaactgatgtttaaaatcattggaccatttagtaagaagaattccagtcttataaacacaaacgtgcagatatctgatagcc

SEQ ID NO: 496793 - DNA, 49 bp, Homo sapiens
aacgccaacctcaggcgagatgactctttttgatcagaacaatgctgca

SEQ ID NO: 496794 - DNA, 98 bp, Homo sapiens
ggacccggcgtccgcgcctaacggcgctgggctagtgctaggccacttcatagcttcggggatggtcaatcaggttgaagatgacagcgatgcagaga

SEQ ID NO: 496795 - DNA, 143 bp, Homo sapiens
gagactccagatgctgccttgacatgcctgaaggagagaagagagcaacttcctccccaggaggattctaaggtgagggtggtgagatcatctccaccaagttcgcagttcaaagccacacttctggagtcttaccaggtcta

SEQ ID NO: 496796 - DNA, 83 bp, Homo sapiens
caggaacatggactgaagtatccagcgctcattgggaatttagttaagggcaagtgtccagagaatggctgggatgaaagtac

SEQ ID NO: 496797 - DNA, 100 bp, Homo sapiens
agaaactggctgcagcagagcgagtacttcgttccaacatggacatcctgaagccaatcctgcagcagcagttgcaagctcagcatctttctcatggcca

SEQ ID NO: 496798 - DNA, 74 bp, Homo sapiens
gagcttcagccatcacgaggatgatttcggaacctggagaaaatgtgagcgagtgctgtgctttcatgggcctc

SEQ ID NO: 496799 - DNA, 83 bp, Homo sapiens
cgcaactccgccgcccaccatggcttccgaggagctgtacgagagcggttctggtgaggttggaaggatgcagccacccggtt

SEQ ID NO: 496800 - DNA, 100 bp, Homo sapiens
atcgaagtacaggcagaggatgaggcccaggaagctgtggtgaaggtggtggagattgtgaagaagctggagtctcgccagcggggctgggaggaggatg

SEQ ID NO: 496801 - DNA, 88 bp, Homo sapiens
tcctgcctccaggccgctccccacggtggtgttagcacctcagcccatcccaggcagtatttggcagtcgtattcagagataaacccc

SEQ ID NO: 496802 - DNA, 83 bp, Homo sapiens
gggaagcagcacccccgcgccgtgccagggccggccagcgtccgcagacaatgcagatcttcgtgaagactctgactggtaag

SEQ ID NO: 496803 - DNA, 81 bp, Homo sapiens
cgtagacaccagctccgaaatcaccaccaaggaatttatgcaaatattctcatgaggttctctcagaagagaacttcaaag

SEQ ID NO: 496804 - DNA, 101 bp, Homo sapiens
aggctcttccctgaccattttctactgtccctgcgcgaggttatgaagacagtatggagtttccagaccatagtagacatttgctacagtgtctgagcgag

SEQ ID NO: 496805 - DNA, 75 bp, Homo sapiens
gcacagtcatgtgcctacgtcctgcctcgcaatgagggagcatgtaccccagggatcgcttacacctgagacgaa

SEQ ID NO: 496806 - DNA, 100 bp, Homo sapiens
gtgcacttcccccaaagatgaagaagatggagtctcgccctgtcacccaggctggagtgcaatggcgtgatctcggcgcacttcaacctcgcctcccagg

SEQ ID NO: 496807 - DNA, 100 bp, Homo sapiens
aaacagtggatataagtgatttggccaccaaactcctggacagttggaaagacctaaagggaactctaatgatccaggacaaagaagttaccctggagta

SEQ ID NO: 496808 - DNA, 83 bp, Homo sapiens
ggtcccgcggctcccgcggcttccggcccactcagcgcctccagaggcctcaggtgaggtttatacatggggcgacaatgatg

SEQ ID NO: 496809 - DNA, 98 bp, Homo sapiens
aatgcacagccaatttcatgctccactatagagatgagcatcaggattttatggatgagcaaaaacgactaaagaagcttcgtggaaaggagaaacca

SEQ ID NO: 496810 - DNA, 50 bp, Homo sapiens
gagcattttagatgatgttgccatggttgcagaggcagtgttaacatccc

SEQ ID NO: 496811 - DNA, 83 bp, Homo sapiens
gtctgcgagccaggattcccggatattagaaatggctactccccagtcaattttcatctttgcaatctgcattttaatgataa

SEQ ID NO: 496812 - DNA, 50 bp, Homo sapiens
ggtgctctgaagtgaggctcttagtgaatgttgtaccatctttgggtagg

SEQ ID NO: 496813 - DNA, 100 bp, Homo sapiens
ccgagcaattgtgatgagatattctgctgagtggaaggtttatgtgagattaagaccatttttcagggaattcctggaacgaatgtctcagatgtatgag

SEQ ID NO: 496814 - DNA, 82 bp, Homo sapiens
cccgaccacttgcggcctgagtatgaacaccttccaccatgaccacctcagcaagttcccacttaaataaaggcatcaagca

SEQ ID NO: 496815 - DNA, 50 bp, Homo sapiens
tctttacaagcttgtaaaatctcagatggcagaaacggtggacacaagcg

SEQ ID NO: 496816 - DNA, 82 bp, Homo sapiens
tggtacttctctttgaaattcttcgaatggcagaggaaattggggataaagttttaagctatgaagaaggacatccctcaca

SEQ ID NO: 496817 - DNA, 83 bp, Homo sapiens
gaaactatgtatctttaactagaatcctgaaatgttcagagcagaggcccaagctcgttgccacagaattggtcagaacaaag

SEQ ID NO: 496818 - DNA, 87 bp, Homo sapiens
tgcttcatgaggaagatgctcgccgccgtctcccgcgtgctgtctggcgcttctcagaagccggtttaagggaaaccacaggctccg

SEQ ID NO: 496819 - DNA, 75 bp, Homo sapiens
cgggagaacaccttcctgctcaagtttcaaaccagtccagctacgggggcccagccagccagcagctgagtgggg

SEQ ID NO: 496820 - DNA, 90 bp, Homo sapiens
ggaagatcctggcagagaagcgggcagcagcacctgtggtgtcagtgccctgcatcccaccacacagatcagtggaccatcccctgcccg

SEQ ID NO: 496821 - DNA, 76 bp, Homo sapiens
ccgcatttccagaaggctgcgactcagctgcgaggccacgccattgaaaactgtaactatgcagtggaacttggga

SEQ ID NO: 496822 - DNA, 99 bp, Homo sapiens
cttccatgattttttgaatctagactgggctgttctctgtgttaaaccaatcagttgcgaccttctcttaacagtgatgtaaattggagtcaaccaggt

SEQ ID NO: 496823 - DNA, 100 bp, Homo sapiens
ggcagctggatgaagttgtgtcagagcattctcctggtgtgcagcctgcagatgtgaaggaagttgttgagaagggtgtacagactcttgtgattggccg

SEQ ID NO: 496824 - DNA, 75 bp, Homo sapiens
gggcaagctgtgcgacgtgaccctcaaggtgaaaattatctcagtgaacgaggatgtcactcttagatcagccct

SEQ ID NO: 496825 - DNA, 100 bp, Homo sapiens
ctcaagatggcggccaatgtgggatcgatgtttcaatattggaagcgctttgatttacagcagctgcaggtgtccctggccagtgtccttccacctgtcc

SEQ ID NO: 496826 - DNA, 95 bp, Homo sapiens
gagccgacaacgccttcatgctgctcacgcagagtctgtagaagaggcgacaccagggcttccaaatgaacaaccgaaaggaagatatggaaatc

SEQ ID NO: 496827 - DNA, 75 bp, Homo sapiens
gaacactgcagcgcctgcccaaggtcatcgggaaccagagctttgctatcaacttcaaggtgggctcctcagggg

SEQ ID NO: 496828 - DNA, 83 bp, Homo sapiens
tgccaaggaaaaactggagagcttcatcaaaaatagtgatagctttgataatcttgaatccagataatagttttgaaatactg

SEQ ID NO: 496829 - DNA, 97 bp, Homo sapiens
ctcacctgtgcgggatggaacaaaagagaaaaaatgatccctatgctcttgcatccctggtgtcctttgaagttaagaagatgccttatacagatca

SEQ ID NO: 496830 - DNA, 98 bp, Homo sapiens
cttttccgttgccggtgccggcctagcgtcctggaattacttcaatcaaacccagaacgctggacaaacattcctttgctggtcaagatcctaaagct

SEQ ID NO: 496831 - DNA, 100 bp, Homo sapiens
aaagcgggcagcaggatggtggtggatgcggccaactccaatgggcctttccagcccgtggtccttctccatattcgagaacctgtctccagagaagatt

SEQ ID NO: 496832 - DNA, 100 bp, Homo sapiens
cattgatggatttgccatgaccagctttgtcacttttgaagcgctggagatacatgttataaagccagttttaccaaagctaaacaatctgtttgaatat

SEQ ID NO: 496833 - DNA, 97 bp, Homo sapiens
agggcaaagcccaacaccttcccccactgaaagctcctgctgcttctgtaccccgcctgtccctcccagctgcgcagggccccttcgtgggatcatc

SEQ ID NO: 496834 - DNA, 82 bp, Homo sapiens
attggggggctcggctgcagacttggccaaatggacgggactattaagtgtactaatggtcacttgatgtgcgctggctgtt

SEQ ID NO: 496835 - DNA, 100 bp, Homo sapiens
agccacgcagaggacgccggaacaccctggaagccgagaaatgggctggtgaattaccatatctccgtcaagtgcagtaaccagttcaagttggaagtgt

SEQ ID NO: 496836 - DNA, 100 bp, Homo sapiens
agggaatgccacagcatcctccagcacctcaggttggtttcagtgctgatgaaacttgggactctgcaatagatacatggagcccatcagaatggcagat

SEQ ID NO: 496837 - DNA, 74 bp, Homo sapiens
cataagtgcggccagcccacagccgggctcgggcttcggccacggcatagcttttctcccgtacatcccagtcc

SEQ ID NO: 496838 - DNA, 83 bp, Homo sapiens
gagctacagaatatgctccaaagaagagcactgccagtgaaagatgtagaagataaacctgaacaacaaaccagaacaagaga

SEQ ID NO: 496839 - DNA, 100 bp, Homo sapiens
ctcggaggaatggcgccgccgggtaccaaccaagaagctgaagaaatatgagaaagaatatcagacaatgcgagagagtcagctgcaacaggaagaccca

SEQ ID NO: 496840 - DNA, 110 bp, Homo sapiens
gtccacccagaaggtgctagacaccaagaaggacgcactgactcgcctcaagcacctgcgcatcgtcatcggtttggttgggatgttccagtaattctgagaaattcaga

SEQ ID NO: 496841 - DNA, 97 bp, Homo sapiens
aagctgccggcagccctgcggctacggagacagactatcttgctaatcatggccggttaaatgagtctgaagccaggcgaaaattctggcaaatcct

SEQ ID NO: 496842 - DNA, 82 bp, Homo sapiens
gtgggtccttcaatagtgctgaaggctttgccgacttcagccagatgtccaaggcgtccgagctgggccacagcctgaacga

SEQ ID NO: 496843 - DNA, 75 bp, Homo sapiens
gtcccgaagccccctgcaggaactctacaacccaatccaggcctatgaaaggaggttccctacatgtcctttgat

SEQ ID NO: 496844 - DNA, 50 bp, Homo sapiens
cttgggacaaactgtcagccttgatgtttcaggattcagtggcctttgag

SEQ ID NO: 496845 - DNA, 111 bp, Homo sapiens
tcatcattgtcatcgtcatcattatgttgcttttagctcactggagcctcacagaaccctgtgaggaggaggcgtctccctattccttacttgatatctgcttgaatttct

SEQ ID NO: 496846 - DNA, 98 bp, Homo sapiens
gccgccacctcggtcgcgatgggggcgcaggaccggccgcagtgccacttcgacatcgagatcaaccgggagccggccacaatggtgcgcatgaatgt

SEQ ID NO: 496847 - DNA, 72 bp, Homo sapiens
gggaacccgttcagcacaccagtggggcagtgcctcggtatcatgatattagctggtttgacatcaagtcat

SEQ ID NO: 496848 - DNA, 75 bp, Homo sapiens
tccggagtagctgggattacagcttgaagctcaactagagaaaaaggaccaacaatttaaagaacaagaaaagac

SEQ ID NO: 496849 - DNA, 90 bp, Homo sapiens
atcctgatgacatccttctttttagagatcgttttgatggatatatcttccttgacagcaaaggaatggcggcgctagatagtaaggcat

SEQ ID NO: 496850 - DNA, 100 bp, Homo sapiens
cagccggggagctgcaggaaccagactgggggcgagctgagcacctgtagtcaatcacacgcagaaagctgtatacctgcacaagtggtggctgccattg

SEQ ID NO: 496851 - DNA, 89 bp, Homo sapiens
cccattggagcttcggagatccctgcggtcccgcgggacggcgcggcagcagctgacctcgcagaaatctccgagaagcaagggataat

SEQ ID NO: 496852 - DNA, 83 bp, Homo sapiens
gggaggtgttcgagaacgaccccgagacgggctcattgtcatccccaagccaggccagttctccaggtggaactgtagtgtag

SEQ ID NO: 496853 - DNA, 100 bp, Homo sapiens
tgcatcaagtgccacatcaacgtgtatccacacaagcagttgcacctggacttgatatgaaagtaaccatcagaaaatcaacagagatcttaaacttgcc

SEQ ID NO: 496854 - DNA, 90 bp, Homo sapiens
ggcctctggaatttagcgctcgcccagctagccgcaggcatttggctttatgtcccgagttgccctacaagcagagaagatgaatcatca

SEQ ID NO: 496855 - DNA, 82 bp, Homo sapiens
gcgaccccggggtcttcaccgagctcattaaaggattcggaggatacgaagcgttttcggcttcctgcccggagctgtgcag

SEQ ID NO: 496856 - DNA, 75 bp, Homo sapiens
gagccgcgagcgctgagggtgagtgccgggagctctgagggatcatcctgaacatggggtcctgtttcttgttcg

SEQ ID NO: 496857 - DNA, 83 bp, Homo sapiens
cacgggacggagccggaatgaccaggagctagagttaatgccaaagacagcaaatggttgacacctttacacagagcagttgc

SEQ ID NO: 496858 - DNA, 98 bp, Homo sapiens
acctgtgtcagcatgtgggacctggttctctccatcgccttgtctgtggggtgcactggtaccagcagatcctgcaccggaacctggtatacctggcc

SEQ ID NO: 496859 - DNA, 82 bp, Homo sapiens
agagggtcccacggtggaagcgagagaggaggttgagacgggagaagattgaccttgaaaatacattggaacaagaacaaga

SEQ ID NO: 496860 - DNA, 98 bp, Homo sapiens
aacaatgatgtgaaccttcgcattcagaatttgaccatcttggtgagaaacattaagacctactaccagtgtgagccactgccccatgttgtgttgat

SEQ ID NO: 496861 - DNA, 97 bp, Homo sapiens
ctgcgggtggtgcagcaggaggagggctggttccggctgcagcccgaccagtccaagagccggcggcatgacgatagagacgggggttcaccatgtt

SEQ ID NO: 496862 - DNA, 110 bp, Homo sapiens
gggaatcgcaaggctcttccctgaccattttctactgtccctgcgcgaggggtggaccaagctttgccgcaagaacgccgggctcctgtcactccttcctccgcctctcg

SEQ ID NO: 496863 - DNA, 75 bp, Homo sapiens
tcaaaaagtttcttaaacttgtggcctcagaacagttgcgtggaggtcctgaataaccatggtggctgctgtttg

SEQ ID NO: 496864 - DNA, 83 bp, Homo sapiens
tctcgccacagcggcctcggcctccccttggattcagacgccgattcgcccagatctattccagaggggagcttcaccacttc

SEQ ID NO: 496865 - DNA, 100 bp, Homo sapiens
aaacactatctcttctatgacggagaatccgtttcaggaaaggttgtaggtcataaagaaggtctggatgttatggagagagctgatcctttattccttt

SEQ ID NO: 496866 - DNA, 97 bp, Homo sapiens
gataagtcgaaggggaaggcgcctgaagaggacgaaggttgcagcgagccaaggtgtttcaacgggggcacctgccagcaggccctgtacttctcag

SEQ ID NO: 496867 - DNA, 100 bp, Homo sapiens
gtggtggaattccagttcatgctgcccacatctcatccaaacagaggggtgtttgatgcttccctcaaaatggctggcttctatggattgtatacctggc

SEQ ID NO: 496868 - DNA, 101 bp, Homo sapiens
ctgctgtcgccgctgctgggagatgggcctactcgcccgccaccctgcgctgccgccgctctgaggagttaaaggcacttctgtctcctgctgccatgtga

SEQ ID NO: 496869 - DNA, 75 bp, Homo sapiens
gcagtgaactctttaaaacacagtggacatttgggagcaataaaaataagaagaaaggaaaagccagaaaaatag

SEQ ID NO: 496870 - DNA, 100 bp, Homo sapiens
ctcagtggtcctacctggggatattatcaaatctactactgttcatggcagatggattaattgcctctgaaggagccataagtcccgatttcttcaatga

SEQ ID NO: 496871 - DNA, 75 bp, Homo sapiens
tcttaccaaaactctgtagcctgttggattctgaagattataatacctgtgagtccccatgtgagagcagcagag

SEQ ID NO: 496872 - DNA, 76 bp, Homo sapiens
cgagaagccccaacagcacggcgtggcctctcagcctcgacccaacatgagtgaagtttcctgcaagaaacgggac

SEQ ID NO: 496873 - DNA, 90 bp, Homo sapiens
agaggagagttctccaaacatgatcgtttactgcaaatgatcctggtggagggattgaaatgtctgagttcatccgagaggccacacccc

SEQ ID NO: 496874 - DNA, 75 bp, Homo sapiens
atgtgtgaggaccgaaatttgccctatgtctatatcccctctaagacggcaaagaacagagcagttcaccatttg

SEQ ID NO: 496875 - DNA, 98 bp, Homo sapiens
atttagaacgatgtgaacatcgaatcatggaatcccttgcatggctctcagttcaaaccttgtactactcagctgatcacaagctgcttgatgggaac

SEQ ID NO: 496876 - DNA, 96 bp, Homo sapiens
ccctgcttggagccatgatgctgctggaatctcctatagatccacagcctctcagctgtgattgggttattatacccctgcattgacagacatcta

SEQ ID NO: 496877 - DNA, 51 bp, Homo sapiens
ctatctaacgtttaccctagcaaaccagtttttagaacttcagccataaaa

SEQ ID NO: 496878 - DNA, 98 bp, Homo sapiens
aaaatcaccagttactttaatgaaaccaccgggaggaactgggccattctaacacccgttgctaccatgctggccacccgcctctccagacccctgtc

SEQ ID NO: 496879 - DNA, 74 bp, Homo sapiens
ggacatcgacatccaggcgaactcggcctatcgctaccctccgaagtccggacagtcattttgtttactcattc

SEQ ID NO: 496880 - DNA, 100 bp, Homo sapiens
cttcggagagtgttgccaaaagtcagaagacctgaggggcggaagccgagcgaagtggcgcacaagagcatcgaggcagtggtggctcggctagagaagc

SEQ ID NO: 496881 - DNA, 129 bp, Homo sapiens
tttttgtagaccaaagtgaaggagtttggaattgaccctcaaaacatgttcgagttctgggatctgcccgaaaccatgttaatagaatgtgcctggcagctgatgttcctcttattgaaagtggaacag

SEQ ID NO: 496882 - DNA, 88 bp, Homo sapiens
acccacaccggaatttccaggaagaaatagagtttcttaatgcaattttcccaagttgctgttgaagaaatctggttgcagaacacca

SEQ ID NO: 496883 - DNA, 100 bp, Homo sapiens
caagggttcggccgtgccctccgacagccaggcccgcgagaatgaagatagtgatccggggagacaggaacacgggcaagacagcgctgtggcaccgcct

SEQ ID NO: 496884 - DNA, 90 bp, Homo sapiens
tgggatccagcgatcctcccgcttcagcctctagagtagccgagaccacaggctgtgtttgatgtggacaagaagaaagggttgactctg

SEQ ID NO: 496885 - DNA, 51 bp, Homo sapiens
ctgtagcattcaagacttcaaactgggagttctgggaaatcgttcattcat

SEQ ID NO: 496886 - DNA, 100 bp, Homo sapiens
gcgtctcggaaaccggtagcgcttgcagcatggacatccaggcctgctcggccgcctggaaggctgacggcgtgtgctccaccgtggccggcagtcggcc

SEQ ID NO: 496887 - DNA, 99 bp, Homo sapiens
cggccatggcgctggacttcttggctggatgcgcggggggtcgcaatggaagaagagatcgccgcgctggtcattgacaatggctccggcatgtgcaaa

SEQ ID NO: 496888 - DNA, 75 bp, Homo sapiens
ttagcattgatgggaagatggtagctgtaaacctggccactggaaaacgaaggtcgccatgggctactcacactc

SEQ ID NO: 496889 - DNA, 100 bp, Homo sapiens
cggaagtgggaaacctgtagggtatggtccagctgtgccgcaccgaggcgagcaggagcagggaacaggatcccctcaacaaggatggaactgaaggccg

SEQ ID NO: 496890 - DNA, 100 bp, Homo sapiens
gcccacacgactagaaggacgactgcctggcgcgatacaaaaatgctatgtcttgcccagccacgtgactgaggagatgctatgggagtgcaagcagctt

SEQ ID NO: 496891 - DNA, 100 bp, Homo sapiens
gtcaaagaagatgcctcgaactaaacaaattcatcccagaaatctaagaggcatctgaaaaccagcagtaatcctgcctctgaagtttatcaggaaagga

SEQ ID NO: 496892 - DNA, 100 bp, Homo sapiens
cgcacccatcccaccttcccgcaccctgggaccggggaggtcatcaaggcttgggacattgccatagccaccatgaaggtgggggaggtgtgccacatca

SEQ ID NO: 496893 - DNA, 100 bp, Homo sapiens
cccagcctgcagagccagctcctggtggaagaggaaatgaggcatgctccattcattcggaggtgggatgcagatcttcgtgaagaccctgactggtaag

SEQ ID NO: 496894 - DNA, 98 bp, Homo sapiens
cttgcttatgtttgttaggaccaaacctcaaagcatggctaagagtgttcagtagaaatgggtccaggggcaagttcatcctactctcgagtctaatg

SEQ ID NO: 496895 - DNA, 100 bp, Homo sapiens
ttgggacagggggatttggaaatgtcatccgatggcacaatcaggttctgaagaaagtctccaaatacattcaagagcagaatgagaagatctatgctcc

SEQ ID NO: 496896 - DNA, 90 bp, Homo sapiens
tccatctttcagcagttggcacacatggttaaggaacaggaggaaaccattcagaggggctatcaacagcaggacgcccatgaattcatg

SEQ ID NO: 496897 - DNA, 75 bp, Homo sapiens
cacaaaagactatttccagatccatactccatgtgatgaagaaggaaagctatgacttcacacctatggattctt

SEQ ID NO: 496898 - DNA, 75 bp, Homo sapiens
cgggacttcggcctgacccagcccccatggcttcagaagaggtgtcgtgaaaactacccctaaaagccaaaatgg

SEQ ID NO: 496899 - DNA, 50 bp, Homo sapiens
gccagcgccccatcctgagccggagaagatggtataaactggtccatcag

SEQ ID NO: 496900 - DNA, 114 bp, Homo sapiens
aagacagtatgcaaggccacgacccacgagatcatggggcccaagaaaaagcacctggactatatccaagaattttatgaggtgacattgctaaattctcaaaaaagttgtgag

SEQ ID NO: 496901 - DNA, 100 bp, Homo sapiens
gccaaggaaggcttcgagaagattagcaaaggtgctaatccagtggaaatcaggagagattcagaatctgataattcagataacaacacaatctttgtgc

SEQ ID NO: 496902 - DNA, 98 bp, Homo sapiens
gcctcctacacctacctctctctggtggtgttcccactgatgaagagcaggcgactgggttggagagggagatcatgctggctgcaaagaagggactg

SEQ ID NO: 496903 - DNA, 90 bp, Homo sapiens
tgcacatccacactccgctgctcgacagagagaagaggtactcccttatagggactcgtaaagacatagagcatctggaaattaactgcc

SEQ ID NO: 496904 - DNA, 100 bp, Homo sapiens
gagaaagcgggacagaggagcgggcagcaagcggaaacgctggcaaaggaggaggtgagccggcaggagctgaggcagcgggtgcgcatggctgacaacg

SEQ ID NO: 496905 - DNA, 48 bp, Homo sapiens
ccattggacacagaatccgagtggaatgtatcctgtcaggtataatgt

SEQ ID NO: 496906 - DNA, 100 bp, Homo sapiens
cacacctgcggcccggatatcagccctcaacattgtgggagacctactgcggaaagtcggggaccccaaacgtcatttggaggaacatgtggatgtactt

SEQ ID NO: 496907 - DNA, 101 bp, Homo sapiens
tccccgaccacttgcggcctgagtatgatgtcacacaccaagccctacatcaggaagaaggctgtgctgatcatgtacaaggtgttcctgaagtaccccga

SEQ ID NO: 496908 - DNA, 100 bp, Homo sapiens
ggccccccagtccagggggaacgcagtgcgccccgcttcggtgttacttccctcaggatttgacgggatctgaactatacacccaggcggccagcctcct

SEQ ID NO: 496909 - DNA, 82 bp, Homo sapiens
cttggaaccacctggagaaccaggaccttccaccaatattcctgaaaatgacttaattcagtgcacaaatgagatgaatgtg

SEQ ID NO: 496910 - DNA, 112 bp, Homo sapiens
cgggccctcggcagggaggatgacggagctgcagtcggcactgctactgcgaagacagctggcaggcacattcaggaccccgcgagccagcggctgacgtggaacaagtccc

SEQ ID NO: 496911 - DNA, 100 bp, Homo sapiens
ggacacataacaagcagcagtgaggacaccaaaggttttgaagggagcacctgtgagaggaatattgatgactgccctaaccacaggtgtcagaatggag

SEQ ID NO: 496912 - DNA, 100 bp, Homo sapiens
tcagcttcggagaatggagtcttccatcaatcatatctcacagtataaatcaaagccattctgtgaaaaactgctttcctgggtgaaaagcagtggctgt

SEQ ID NO: 496913 - DNA, 144 bp, Homo sapiens
cttctgcgtcgctcgcgctgggagctgtagaccggagctgttcctattcggccatcttggctcctccacaagttgtttgatgtgtgcacagtgtcacgaacagacagagaaaccaaactaactttagtgtttgaacatgtcgat

SEQ ID NO: 496914 - DNA, 82 bp, Homo sapiens
aagatacctctcgcatgtccacctcacagtaagactttgaccccgacgcaggcttcagtgattgccgcggatcagaagcctg

SEQ ID NO: 496915 - DNA, 99 bp, Homo sapiens
aatagctggcaaatttctgttccatcagcgtttgtttggaatcaaacattttaagtccagtgcaggatggaacaaagaaacctcagattgacagcaaca

SEQ ID NO: 496916 - DNA, 51 bp, Homo sapiens
attccaagtaactcttatttgccaatgttttcagttgcaccaagcttagcc

SEQ ID NO: 496917 - DNA, 75 bp, Homo sapiens
cggttggggtgtgagaggttttctcgctctaggccatccagctgagccgagatgggcagtacctgctcacaggag

SEQ ID NO: 496918 - DNA, 103 bp, Homo sapiens
ttttctcagatgttggatatttgcttggaaaaacgtgtgggtacgaccttgggtgaaaatgggatggaggattgtgtcatggccctagaaaccttgtttagtg

SEQ ID NO: 496919 - DNA, 75 bp, Homo sapiens
gcgcaactgagaggaactgagacccaagcagctcagtaaaatgtctttggtggacttgggaaagaggttgctaga

SEQ ID NO: 496920 - DNA, 90 bp, Homo sapiens
atacaaagaagtgatgctggagaattacaggaatcttctctcattgggtgtcatggagaaactccagctgggcccagagattctgcagcg

SEQ ID NO: 496921 - DNA, 75 bp, Homo sapiens
gaatgtcatccagcgagtgattaggtttaacctgccatcccagtcgccccttcactatggcctcttgctcccgtg

SEQ ID NO: 496922 - DNA, 75 bp, Homo sapiens
ctaacccggaggccaactggggtccccggcctcgtgcccggccaggcaagggggccaggccaaccaccccacagc

SEQ ID NO: 496923 - DNA, 75 bp, Homo sapiens
atgcaaaagtttcttcgtcttatctttgggaccctagttcaaagagtccctgtgaagcaggaagagtgagggcag

SEQ ID NO: 496924 - DNA, 100 bp, Homo sapiens
ttcagtgtgctgggatgaggttacgagtagccatgtgccatatgatttatcggaaggatcagctcagctactatttaataaaacaaaatctgtagaattc

SEQ ID NO: 496925 - DNA, 85 bp, Homo sapiens
gagtggatggggacctgcctgctggcagaatccagagaccacatttgaagtatatgttgaagtggcctatcccaggacaggtggc

SEQ ID NO: 496926 - DNA, 100 bp, Homo sapiens
aacaccccgcagaaagtgcctgtgcatcaggttcaacatgcactgaaaaaatcagagaaggctttggataccctaaacaaagccattgtcattgatccca

SEQ ID NO: 496927 - DNA, 83 bp, Homo sapiens
cagactccagcagccaagatggtgaagcagatcgagagcaagggtatttgaagtataccatacaactgttttgaaaatccagc

SEQ ID NO: 496928 - DNA, 87 bp, Homo sapiens
ctttttcgtttttcggatgatgccttcaatactacctttatttccaccatagggtaagcttgatgattaccaggaacgaatgaacaa

SEQ ID NO: 496929 - DNA, 101 bp, Homo sapiens
cgctgctgaagcacccgccagctcccgcggagccctcctcggagctgcgggaacgggtactgaggggaaaataccgtattccattctacatgtccacggac

SEQ ID NO: 496930 - DNA, 90 bp, Homo sapiens
gggctccgggtcgctggcggcgtggacacctgagtcccggggtaggggtctcccgcgagggatgatccaccaacacattctcagccagac

SEQ ID NO: 496931 - DNA, 129 bp, Homo sapiens
acacaatcccgggcatgggcggcaactctttgatgtactactataatgggaaagcgcttttctgggagaagaggctacaaggacttagtgcatcagatgtaacagaacaaattataaaaaccatggaac

SEQ ID NO: 496932 - DNA, 50 bp, Homo sapiens
ttttctcagaagagaattccacaagattcaaccctatgaaaagataaagg

SEQ ID NO: 496933 - DNA, 100 bp, Homo sapiens
actctttggatgattctgccaaaaaggttcaattcccatgaaagtgcagcacatgcaattgtttctgttaatggtactaccattgaaggtcatgttgtga

SEQ ID NO: 496934 - DNA, 75 bp, Homo sapiens
accccagatgcaagcgtggattgggcttcttggacacttaatgattgttggcaagaaatgtgctgctgatctggg

SEQ ID NO: 496935 - DNA, 80 bp, Homo sapiens
tgaaccttgggtgatttgttctgtatcagaagacaatatcatgcaagtgtggcaaatggaaccactcgttttgactatta

SEQ ID NO: 496936 - DNA, 50 bp, Homo sapiens
gccaagtcagccacctggacgcattctcccagatggtgatcagcttctac

SEQ ID NO: 496937 - DNA, 98 bp, Homo sapiens
tgtatgatagtgttagttccacagatggggaggacagtctagagagaaagatcactttgggaagcagtgacatccaacctgtatcaagtcttctaatc

SEQ ID NO: 496938 - DNA, 82 bp, Homo sapiens
ggctgtctcctctctccgccatgcgagtgatagacagccaagcagagaaactgaaggagcttgacaaggagatccggccctt

SEQ ID NO: 496939 - DNA, 74 bp, Homo sapiens
acccagaacggatagctccctcctggaaaagaaattccatgagtgaaaccgtcagactggtcagtggaatgcag

SEQ ID NO: 496940 - DNA, 100 bp, Homo sapiens
attggagcaggtgacaggctcaggagccagtatcaagctctcagtcaagatccaaacagtctttcaaacctagatcagaataactgaagtgaagtgatgg

SEQ ID NO: 496941 - DNA, 51 bp, Homo sapiens
atttggcagaataaatgaaccaggtcaaaatgcagatcttcgtgaaaaccc

SEQ ID NO: 496942 - DNA, 75 bp, Homo sapiens
attgatcccaagttgtcgacgaccgacagggtggtgaaaggtgtcgtgaaaactacccctaaaagccaaaatggg

SEQ ID NO: 496943 - DNA, 74 bp, Homo sapiens
gaatttgcagcaccatcaacagatgcccctgataaaggatacgttggacagtcattttgtttactcattcagcc

SEQ ID NO: 496944 - DNA, 75 bp, Homo sapiens
aagggaccacggtcaccgtctcctcagggaggagtctgctactagtcttatcagctcttaaaaacagaaactcat

SEQ ID NO: 496945 - DNA, 75 bp, Homo sapiens
cggagggggctttgctggtctttcttggactattccagagagacgcaaacatgcagatctttgtgaagaccctca

SEQ ID NO: 496946 - DNA, 96 bp, Homo sapiens
gatatttggagttcttacaacatggcagacattgacaagagaatccaaatcctcatatggcattccagaaagttccacggccaacagaaggatccc

SEQ ID NO: 496947 - DNA, 89 bp, Homo sapiens
cttcaattttggggctccctcgggcacctccggtaccgctgcagccaccgcggcccccgcggatcagtcgcatcgaatacattcattca

SEQ ID NO: 496948 - DNA, 98 bp, Homo sapiens
ctgagtgaccgctctcgagaacgcaaggtgcctgcctcccgcatcagccgcttggccaactttgggggagtcaaattgactttatcagctttaatcga

SEQ ID NO: 496949 - DNA, 82 bp, Homo sapiens
ccagatgtacacgtttgacaagaccaccaactgcaaagcctgcaaaatgttcctcagagctccacgcaggagatcggtgagg

SEQ ID NO: 496950 - DNA, 100 bp, Homo sapiens
ggccagagctgcctgcagcctgggaagcaggttgtgcccacgtgcctcagggccttggtagaaatggcccgggtagggggtgcctcctccctggagaata

SEQ ID NO: 496951 - DNA, 74 bp, Homo sapiens
cccggcgcggcccagcgccctcaggttttcaaatggaacattttgatgcatcacttagtacctatttcaaggca

SEQ ID NO: 496952 - DNA, 100 bp, Homo sapiens
gtaaaaacgagtttgcccagagatcagaacaatggcctacaatctggagtgccgttagctaaaggaactttgattacccactgctacaaagatcttggat

SEQ ID NO: 496953 - DNA, 100 bp, Homo sapiens
ggctgcgtgagaaagaggacagtctggcccaggctggcgaggtactccaaagattcaggtttactcacgtcatccagcagagaatggaaagtcaaatttc

SEQ ID NO: 496954 - DNA, 74 bp, Homo sapiens
ctcatctcctggtctgacatccaaagagtcactctttgttcgaatgttcgagaacttgtcttggacaattgcaa

SEQ ID NO: 496955 - DNA, 90 bp, Homo sapiens
atgtgcggcggatgaacaagcggcaggtagaatcactgtggactgagacccacctttctagacctgaagcccaggaggaggaagaggagg

SEQ ID NO: 496956 - DNA, 75 bp, Homo sapiens
ctgttatttgtctcaacaaaagaatgatgggaaatattgcagcagttgcagcttcctgtgccaataatgttccag

SEQ ID NO: 496957 - DNA, 100 bp, Homo sapiens
gctggttcctgcggacggaatcctatatgcagccagagatgtgacagccaccgtggacagcctgccactcatcacaggatgcctgccatattagatggag

SEQ ID NO: 496958 - DNA, 75 bp, Homo sapiens
ctaagatggcgactgtcgaaccggttgaaatcacaaagattagacacctttttagataggtgttcttcagcacca

SEQ ID NO: 496959 - DNA, 96 bp, Homo sapiens
tctcttacgtctgcggaagtgcagctgcctcagttcttagcgcaggagagacaatagaagatgctgttaggagagaagtagaagaggaaagtggag

SEQ ID NO: 496960 - DNA, 95 bp, Homo sapiens
caatgtgctgaaagagataaaaattcttaacatctttggagttattaaaggctttgtagaaccagccattaacaggccagatatcacagacacgg

SEQ ID NO: 496961 - DNA, 75 bp, Homo sapiens
acatgagtgatgtggaggaaaacaacttcgagggcagaatcagcttgaacgggtctttttacgacttggccatgc

SEQ ID NO: 496962 - DNA, 75 bp, Homo sapiens
aagtcaggccttgtgaaaccagtattgcctaagtgtaatcttgaacatgggcggtgctgtgagtgctggtgaaga

SEQ ID NO: 496963 - DNA, 50 bp, Homo sapiens
actgactggcacaggtgttggggctatttgctttctagaagagaaggcca

SEQ ID NO: 496964 - DNA, 100 bp, Homo sapiens
ggagagaccccgcggctgggcgttcatctaccacgctttcgtgtactcatgagaagcaagagatgaaaaagaagaaagttgaaaaaggagtgcttaatgt

SEQ ID NO: 496965 - DNA, 75 bp, Homo sapiens
tcgcggcacagctgcagggcattgagggcttcgtgctgtgtcactccatcgctgggggtacgggttctggcctgg

SEQ ID NO: 496966 - DNA, 100 bp, Homo sapiens
cggctctcggtccgggacgtgcgcttccccacgtcgcttgggggccacggcgcggacgccatgcaatgcaggcggggaccttataactaagacggctctt

SEQ ID NO: 496967 - DNA, 74 bp, Homo sapiens
actttcaaagattatggagtaattgtgctagtgggaaggaatcggatataacatcatccgggtacccatggcca

SEQ ID NO: 496968 - DNA, 98 bp, Homo sapiens
ggctatctatccaccatgtgggaggaggaaaatcatcttatcagacgaaggcaaaatgtatgagctcatctcctgtcctgggtgtgaacgagtatatc

SEQ ID NO: 496969 - DNA, 115 bp, Homo sapiens
cgggctgggagcgtgctttccacgacggtgacacgcttccctggattggcatggcctgtatgagaagaaaaagacctcaagaaagcaacgaaaggaacgcaagaacagaatgaag

SEQ ID NO: 496970 - DNA, 99 bp, Homo sapiens
gtgaaaaaggaagaattgacccttgaaggaatcaaacagttttatattaatgttgagagagagcaggaagaaccggacccggcgaacctggaagtggac

SEQ ID NO: 496971 - DNA, 55 bp, Homo sapiens
agtttgagaccagcctgggcaacacgatggagtctcactttgtcacccaggctgg

SEQ ID NO: 496972 - DNA, 100 bp, Homo sapiens
gacaaaagaaccattgaaaaatttgagaaggaggctgctgagttccggcatgttcagaacaacctgatgagaaattctacaacagaaaaaatcgaaccaa

SEQ ID NO: 496973 - DNA, 75 bp, Homo sapiens
atggtcggcggcgcccggatgggcagctgagccagtgaaactgaaattgcattcttctgtgaagaagattataag

SEQ ID NO: 496974 - DNA, 100 bp, Homo sapiens
tcgaatctgagcaaaggcacgggcagccggaaggacaccaagatgcggatccgggcctttccgatcattataaacctgcaatttcccatcgagatttaaa

SEQ ID NO: 496975 - DNA, 98 bp, Homo sapiens
ggctcaggaaggcagctgtcactgagcccctggaacagagcgagagtatcgccatgggtgccttcttctccggcatcttttggagcagctttgtcggt

SEQ ID NO: 496976 - DNA, 99 bp, Homo sapiens
tagaggacttgaagcagaaagcaagtgaatacgagtcagaagcgtcaccagtggctacctctacgtgaccatcatctacaacatctccgtcagcctggc

SEQ ID NO: 496977 - DNA, 75 bp, Homo sapiens
ctgcgaggagattgagccccttcaggtgaggaagaggatggagatgaagatgaggaagctgagtcagctacgggc

SEQ ID NO: 496978 - DNA, 75 bp, Homo sapiens
gcaacctcactgagttagaatcagaggacagattgattcactttggagctgtaagtactgatgtattagggtgca

SEQ ID NO: 496979 - DNA, 100 bp, Homo sapiens
ggaagaattgcatagcctggacccacgacggcaggaattattggaggccaggtttactggagtaggtgttagtaaggcttttatacagaaaaacctaaga

SEQ ID NO: 496980 - DNA, 90 bp, Homo sapiens
aggatgtggggcagatgctgatgggcaaactagtggcggcctggtcctcctgaaggtgaaggcaaaggtgcgacagtgcctgcaggagcg

SEQ ID NO: 496981 - DNA, 100 bp, Homo sapiens
aggacgtgcttcctgcttcatagataagaggaagtggagagactgattttggacctcagctcaagaacctcaataagaagctcttcacggtggtcgcctg

SEQ ID NO: 496982 - DNA, 50 bp, Homo sapiens
ccttcatcctcaacgccctcacctggaggatacgaagcgttttcggcttc

SEQ ID NO: 496983 - DNA, 99 bp, Homo sapiens
gaactattcaaggatgaagccactgatggaggaggaagtgcctcatgctgaagagtttttggatgactcaactgtatggggtattcgctgcaacaaaac

SEQ ID NO: 496984 - DNA, 98 bp, Homo sapiens
gatgaaaccccaggcagagacgggggaagcagcacgggatcccagcctcaggcctgcacggacggtgttggttgggttactccacaggatccgctgaa

SEQ ID NO: 496985 - DNA, 83 bp, Homo sapiens
gtggagactggctgaggcaggggtctgccagtgagattgaggctgctctttggcgtaaattgcaatcgattagggatcgtttc

SEQ ID NO: 496986 - DNA, 100 bp, Homo sapiens
cagtggcaaccccgggggcagcagcaactgccggacgccctatcgcaagcagacctgtcatttactccatcctttatagtgatgctacaggacgaagagg

SEQ ID NO: 496987 - DNA, 101 bp, Homo sapiens
agcttcttcctatttgccatggctggaaacaacgtggaggtagatgagtctttgttccaagaaatggatgacttggagctggaggatgatgaagatgatcc

SEQ ID NO: 496988 - DNA, 98 bp, Homo sapiens
ttcagcccggcgatattgtcattattgatcagttcattgacagattcaaacaggatctaccccctctgcagcccttcaagaagaggtatgattgctac

SEQ ID NO: 496989 - DNA, 98 bp, Homo sapiens
actgagctgctggctaagatcaccaacacagacgtgctctacaagtttcacgctgtttaagtcatgaacctacaaaagcctgtgaaaaaatctttgaa

SEQ ID NO: 496990 - DNA, 50 bp, Homo sapiens
tccgcaccgaccccgaggccaaggttcgggaggccttgaggaaagcagag

SEQ ID NO: 496991 - DNA, 82 bp, Homo sapiens
tgtggtcttctcttcgactacccagtgactacgcgtttgttcacatggagaaggaagcagatgccaaagccgcaatcgcgca

SEQ ID NO: 496992 - DNA, 75 bp, Homo sapiens
cccagtccgtgttgtccgaagtgccctcggtgccaaccaacgggtctcgggaacagcttgcgattgcagagtttg

SEQ ID NO: 496993 - DNA, 75 bp, Homo sapiens
gctgagttctgcatcatgttgctttccactgacaggacagaaggtgaagaacctgatgaagatgatgcatatcag

SEQ ID NO: 496994 - DNA, 90 bp, Homo sapiens
cgatcttcctgtttgtggataagacagtcccacagtccaggagcagcatttctttctattactactatctatgctgagactggttcaggt

SEQ ID NO: 496995 - DNA, 90 bp, Homo sapiens
gcaggcattgagctccagcattgaggaggggctacgcatgcaggccatgcacagccccaggatgggtgagttcaacgagaagaagacaac

SEQ ID NO: 496996 - DNA, 51 bp, Homo sapiens
gtggaattgcaagaatctatgagctgagatgagtgaactgagtgtggcaca

SEQ ID NO: 496997 - DNA, 75 bp, Homo sapiens
cagaccactatcacctcgatcaggtaatgtttgaaacttaccagttttccggtgtatatgtagccatccaggcag

SEQ ID NO: 496998 - DNA, 98 bp, Homo sapiens
caaggaataaacatgcaatgaacccaaaaggcatgctgatcccattttcaatgaagaattgcttccagttactttgtaactgccaggtcccagcagct

SEQ ID NO: 496999 - DNA, 100 bp, Homo sapiens
cagtcactggtttgcagagtccagaattctttgctgaactggataaagtaatgggccctctcatctttaatgcaagcatcatgacagatctagttcgtta

SEQ ID NO: 497000 - DNA, 100 bp, Homo sapiens
gcaagctggccagggacctcaaggaagcttatgacaggacatgtcatccagtgacagtgactcggactgggatggaggcagccgtctttcaccatttcta

SEQ ID NO: 497001 - DNA, 87 bp, Homo sapiens
aaagaattttttcagctggttgtggaggaaatcttcaatccagatattggtaacaaatatgtacctcgggccatcctggtggatctg

SEQ ID NO: 497002 - DNA, 100 bp, Homo sapiens
caacgctctctcagcagcttccaagagaaccaatggaatggagaagcagagcatcctggccagaacaagccaaggagccaagacgagagggacacacgga

SEQ ID NO: 497003 - DNA, 98 bp, Homo sapiens
gctttgtttggactaagaattcagatcacagtgggtgaaaatatgttgatgggcttagcggcaaggagatgagacaccatctacaaataatggaagtg

SEQ ID NO: 497004 - DNA, 100 bp, Homo sapiens
gcagccaagctcgtggcctgcctctgcgtgcattgctcatttagaaagtggatgtgtgggataacatgtccaatgtgtccgaggagagaagaaaaaggca

SEQ ID NO: 497005 - DNA, 80 bp, Homo sapiens
gtggacgtgcacccagaggaccaggcggcggctgaggctgaggtggcctccttgaaccgtaggatccagctggttgaaga

SEQ ID NO: 497006 - DNA, 100 bp, Homo sapiens
cccgccgccatgggctcctcgcaaagcgtcgagatcccgggcgggggcaccgagggctaccacgttctgcgggtttcccaacagtgatgtcacaagattg

SEQ ID NO: 497007 - DNA, 90 bp, Homo sapiens
ttcaagggagctgataaagaacttcttcccaaaatggatcttagcaaagcaatgtctcaagatggtgcttctcagttccaagaagtcatt

SEQ ID NO: 497008 - DNA, 73 bp, Homo sapiens
gagatccaagagattcagtatcactcgctcccttgatgatcttgagacacgagacgacttcctgggccaggtg

SEQ ID NO: 497009 - DNA, 83 bp, Homo sapiens
aaaggtgtactgcaaggaacaaaatgtttgtaaattctccttttaccaaggtaactcaactggacccaaataaatcattattg

SEQ ID NO: 497010 - DNA, 100 bp, Homo sapiens
cccgaaagaggcgcagcgcttccagtggtagcagcagtaccaggaatgggtaccacagaccatgtcatcgtcctggcgtccacgaaccgagctgacattt

SEQ ID NO: 497011 - DNA, 101 bp, Homo sapiens
aacgcgcaggcgcgcggcgcccggctcggaccgtagctaggcgctgggcggccaccggctggccaggcaggatgctgaaaacgccattcaacagatgggtg

SEQ ID NO: 497012 - DNA, 100 bp, Homo sapiens
cgctttaagctctggttcactctggatcatcccccaaaagggaaatcctcattgacgattcaatttgttgaaggccaatttgtggactcctacgatccaa

SEQ ID NO: 497013 - DNA, 74 bp, Homo sapiens
ccaacgatttggatttctccacttccagtctttcaagaagtaaggaatccagaaccctggctgaaattgcaaaa

SEQ ID NO: 497014 - DNA, 100 bp, Homo sapiens
caataaaaacatccccgtcatcgagtatgagcagttcatcgcagggcttgtcaatgaggcagatcagattcaggttcgacgggcagccaatcaatgaaac

SEQ ID NO: 497015 - DNA, 98 bp, Homo sapiens
gaggatccagtgttcaccatcctggccccggaagtctatgcatggaacattgaaaagtattgaagggcctccaaacttgggtataaacttgcctttga

SEQ ID NO: 497016 - DNA, 51 bp, Homo sapiens
atctaccacccgagatgccccaagcaacttgtagagacagtttcatgtgga

SEQ ID NO: 497017 - DNA, 100 bp, Homo sapiens
gggagttcaaggaggtgctgaagagcgaggaggcacattgcaagcaacccgtgccttgatggtggttggcatcctcctgggagtgatagcaatctttgtg

SEQ ID NO: 497018 - DNA, 100 bp, Homo sapiens
aggctgtccaatcttcctggctggtccctgaaggatggaaatgctttcttggacaagacatcttcatgcccgttagttcatcgtttgcctagcatgtccc

SEQ ID NO: 497019 - DNA, 83 bp, Homo sapiens
gtgagacaagagcatcttggatgtaggacaatggaagagttaggctggctgaaggcggtgcaggtcctcatggtgctctccct

SEQ ID NO: 497020 - DNA, 90 bp, Homo sapiens
cttgaatgtgtaaccaatagtactcttgccgctatcatacgccagctgagcagtctgagcttaccaagagactaaagagtgaatccttga

SEQ ID NO: 497021 - DNA, 74 bp, Homo sapiens
agcaacctgcagtcattcttccgggcctccaaggaacttaagcaaaggcatatatggtgctggttgtctcatta

SEQ ID NO: 497022 - DNA, 98 bp, Homo sapiens
ggatcaatactggaacagcacaggcttcttggcctggttatataatgaaagtcctcctccatcaaagaaaatgaagttatttggatttaaagaagatc

SEQ ID NO: 497023 - DNA, 97 bp, Homo sapiens
ccctgctatccccaacaagaggaaagacacacctaccaagaagccagtcaagcggccaggatgaatttgacaagctgaggcctctctgctacaccaa

SEQ ID NO: 497024 - DNA, 100 bp, Homo sapiens
tggaggcttcaaagagacaatcaagataggatccgaggttcaggcagcacagcattctcagaagcagtctactgagctcttccagtgcatgtacttcaaa

SEQ ID NO: 497025 - DNA, 85 bp, Homo sapiens
ggcagtcatggtcccagaaacgtcactatcaagaaggcactgcctccttacctgtgaggaatgcaaaataaagcatggattaagt

SEQ ID NO: 497026 - DNA, 75 bp, Homo sapiens
ccctggagacgctctgccagccaggtttggtgcacctcgatttggaggaagtagggcagggcccttatctggaaa

SEQ ID NO: 497027 - DNA, 102 bp, Homo sapiens
gggagatccacagctaagatgccaggaccccctgggaagcctagaaaaatgtcaccaggagactaaagtccatcaaaaacatccagaaaattaccaagtcta

SEQ ID NO: 497028 - DNA, 100 bp, Homo sapiens
aatgggtccaggccgtggtcagccgcttcgacgagcagcttgcattcacaagagatgggctctgtggtctgtggaatgaaatggttaaagatggagaaat

SEQ ID NO: 497029 - DNA, 89 bp, Homo sapiens
gactcggtggaaacagtcacgtccatagaacagaacctggagctggttgaaaaaggcttcagtaacttgaagaaacaaattgaaaatgc

SEQ ID NO: 497030 - DNA, 100 bp, Homo sapiens
cttctactgacgaagcttggaagttgcagaagccgattacacctcaacaagaaggcaactgacaaacagccttatagcaagctcccaggtgtctctcttc

SEQ ID NO: 497031 - DNA, 75 bp, Homo sapiens
tccaggacagcatccaggcctcattggacagcattcgagtgcctccggagccagcgtggtggccatagacaacaa

SEQ ID NO: 497032 - DNA, 99 bp, Homo sapiens
cgagaagatgagctcagaggtggtggattcgaatccctacaggatgagctcatggcggaattagaagaactagaacaggaggaactagacaagaatttg

SEQ ID NO: 497033 - DNA, 98 bp, Homo sapiens
aactggcattggactcatggtgctgcatgcagagatgctgtggttcggggggtgctcggtatgggttcgaaggggtcatcctctccatctatggctta

SEQ ID NO: 497034 - DNA, 95 bp, Homo sapiens
agaattgtggctcagttttcttggaaactacttgcccagcagcaaagaaacctggataacatcgtcttgcaacaacccagaataggtagcaagag

SEQ ID NO: 497035 - DNA, 75 bp, Homo sapiens
ctacccgtggccgctgccggtctaccttcctgcctgacacagctcacttcaagaagtgcacaatgtcagaacgtg

SEQ ID NO: 497036 - DNA, 75 bp, Homo sapiens
taagagatatctgcaatgatgtactggtacatcaggaacgtctctatcaagaatacaatttcagcaaggctgagg

SEQ ID NO: 497037 - DNA, 100 bp, Homo sapiens
caagaagtggagcatcactgacggctatgtccccattctcggcaacaaggtgctatgacaagcgtctgtggcctcgaatggacctgagccggcggaagtc

SEQ ID NO: 497038 - DNA, 50 bp, Homo sapiens
agctgaggactgcctgtttgcagatatggctcgtggacagcagaaaattc

SEQ ID NO: 497039 - DNA, 75 bp, Homo sapiens
ctcccgtctcacaggggataagaagtttcagggagatacttcaggggattaccggaagattctgctgaagatctg

SEQ ID NO: 497040 - DNA, 75 bp, Homo sapiens
cttcaggattgagacccggaaggcttcaaaggctgtcgcaaggaggaaggttgtcggggccaaagtggtaacgaa

SEQ ID NO: 497041 - DNA, 75 bp, Homo sapiens
atgatatccttctcaaccttgtgggatgtgaaaactctgttactgaagcatttcttctgaggccctgaagaagta

SEQ ID NO: 497042 - DNA, 90 bp, Homo sapiens
cagaatccaagcggagagagtcagcctctggttcagactgcagtaaccatgagaaagatcagtctaaagaaaaggagaagaaagtgaaaa

SEQ ID NO: 497043 - DNA, 90 bp, Homo sapiens
tgggacttcttgctggatttgcattccttacagacatagggcctgattacattccaacagaggaagaaaggagagtcttcgcagaatgca

SEQ ID NO: 497044 - DNA, 76 bp, Homo sapiens
aaccccacagaggactttaggagaaagttgctgaaggcaggaggggttcaacctaatttcctttcaatgaaagagt

SEQ ID NO: 497045 - DNA, 51 bp, Homo sapiens
tgttgatcagcttcgtgatatcaaagacacagatttgcgttccaattatct

SEQ ID NO: 497046 - DNA, 75 bp, Homo sapiens
ggggccaccggctggagcggatcccacacctccggaccgagggacgcggcaatgcagcaagtcttggaaaacctt

SEQ ID NO: 497047 - DNA, 75 bp, Homo sapiens
ccacatcaaagggagaatcatagacactgtagcccagctctgaacagcaacatggggtgcaaagtcctgctcaac

SEQ ID NO: 497048 - DNA, 90 bp, Homo sapiens
acatatcgttggacccagaattgaggaatgggctccagagagaagacatttatattatgaaatatgtacctttgttcctgaagtaaccgc

SEQ ID NO: 497049 - DNA, 97 bp, Homo sapiens
ggatgatgagacgttatttccatcaaaaattggactgaatatagttgacattacttttgtgatggactatagagggaggcgaaaaacaggggaagcc

SEQ ID NO: 497050 - DNA, 98 bp, Homo sapiens
cttgataaagcccagtcgagttgttgccattttggcagcagcttgtttgctgcagttggaatcagtttagacttgaaattcagtttttcctgaaactg

SEQ ID NO: 497051 - DNA, 75 bp, Homo sapiens
caaaaagctgaaggtggaggcgccgcaagcgctgagccctgtatgatgagattcgtcagtttcgcaaggcctgtg

SEQ ID NO: 497052 - DNA, 83 bp, Homo sapiens
ccccgccagcagcactgtggaggccgtcctcgcctcccgcgacgatgcccctcaacgttagcttcaccaacaggaactatgac

SEQ ID NO: 497053 - DNA, 104 bp, Homo sapiens
tggggcagaggctgcggagccccaggagggggccagtgtcattcaaagatgtggctgtggatttcacccaggaggagtggcggcaactggaccctgatgagaag

SEQ ID NO: 497054 - DNA, 100 bp, Homo sapiens
actccaaaaacaaaagggagatactccagcttcagcaacaggagaccctttaaagagatcatccttcatcatttatgatataatgaatgaattaatggga

SEQ ID NO: 497055 - DNA, 131 bp, Homo sapiens
gccttcagcagaggcggcagcctggagagtcgaagcagcagctctcgctccagaagcttcactttggatcccctaacaacagtgagagagcaatgcgagcagttggagaaatgtgtaaaggcccgggagcg

SEQ ID NO: 497056 - DNA, 96 bp, Homo sapiens
aggttcttcgaaaactgaagcagatgttgaacaacaaggaacgaatgcaggaatttgggaactgagctgtgcaagtgctgaagaaggagatttgtt

SEQ ID NO: 497057 - DNA, 75 bp, Homo sapiens
cgtttgtgtgcaatgccccgggctgtggacaggagtggagtcaacatatcaatggagcaagtcacagtcgtcgat

SEQ ID NO: 497058 - DNA, 49 bp, Homo sapiens
ctattgtggaagaagcatccattaagatgcctaccttaatgcctctgaa

SEQ ID NO: 497059 - DNA, 101 bp, Homo sapiens
ccctgcagtacctgcagaaggtctctggagacatcttcagcagtctgtaagtacactgttcacgaccagtgtgccatgaaagccctgccttgtgaagtcag

SEQ ID NO: 497060 - DNA, 101 bp, Homo sapiens
gatgctcttcttggaaaaccagatccagaaactggaggagtcccgctcgaagctagccctgtatgatgagattcgtcagtttcgcaaggcctgtggggagg

SEQ ID NO: 497061 - DNA, 98 bp, Homo sapiens
cgcgcgcaggagctcatgtggcctgcggctcctgtcgcctgtaagcaggacaggctgctttggtttgtgacctccaggcaggacggccatcctctcca

SEQ ID NO: 497062 - DNA, 83 bp, Homo sapiens
cgaggagcctcgcgcggcgctggagagagacaagatgtccgccagagctgcggccgccaagctcggggtgtggttttctctcg

SEQ ID NO: 497063 - DNA, 75 bp, Homo sapiens
cagcaaaagccatataataatcattctgaaatgtctgaccttttaaaaggaaagttgctctaggtcgtaaccagc

SEQ ID NO: 497064 - DNA, 100 bp, Homo sapiens
cttgggccgccgagctggacccggaccggttttggccaaagaaactctccctgatttggtttccatcattcctgacacagtcccgagtactgaccttctc

SEQ ID NO: 497065 - DNA, 87 bp, Homo sapiens
ggcccgggctgcggcgtgtgcgcgcccgccagctgctccggagatacgaatggagatgtatgcatttcgattcttcatccgcctgta

SEQ ID NO: 497066 - DNA, 75 bp, Homo sapiens
ggtgaatgtcggaatccattatctttcgggaaagctctctggggcaggttttggttgatggagaattgttaccac

SEQ ID NO: 497067 - DNA, 100 bp, Homo sapiens
caatcatggtgcagaaataccagtccccagtgagggtgtacaaatacccctttgaattaattatggctatatgaagagaaggctactaaagacttggaac

SEQ ID NO: 497068 - DNA, 75 bp, Homo sapiens
cattgttggagatgagatccttaaggtagatgatgagctggagatcaaggcctactatgcaggccacgtgctggg

SEQ ID NO: 497069 - DNA, 50 bp, Homo sapiens
aggaagtgaaccctcagaacttataaaggctcgattccttttgtccaaag

SEQ ID NO: 497070 - DNA, 51 bp, Homo sapiens
cctcgcaatgggaagtcatctgtgttgttaaaaacaacttgaatcctgttt

SEQ ID NO: 497071 - DNA, 100 bp, Homo sapiens
tcggcagtggctgaaggaagaatatggagagagccctttgcaggatgcagaagaagccaaaaacattctggcggacaaggcaaaatctcagcaagttcgg

SEQ ID NO: 497072 - DNA, 90 bp, Homo sapiens
cttgtttgtggatcgctgtgatcgtcacttggaattgaatgatctggcacgggaccctccagcacagtgttcagcaggtcctgttggaga

SEQ ID NO: 497073 - DNA, 100 bp, Homo sapiens
ctgagagcattgaatgtgcaggttctttcagatgaagaagatgactttatgtgtaagaaggcggcctctaaatcaaaagagaatggaagatctacaaata

SEQ ID NO: 497074 - DNA, 83 bp, Homo sapiens
ccggcaccacgagagcccggcccgcctgtgtggacgacctggaatggccaaatatcaaggtgaagttcaaagtttgaaactgg

SEQ ID NO: 497075 - DNA, 90 bp, Homo sapiens
cctttttgtcagattatcaggatgagggaccgtataatagacgctggccccaaaggaaactactctcgatttatgaatcacagctgccag

SEQ ID NO: 497076 - DNA, 90 bp, Homo sapiens
gtcacagtggacgaggtgttggcggaagatattgcggtggtggagatgagcgatgccttccggcagccgtccttgttttaccaccttggg

SEQ ID NO: 497077 - DNA, 75 bp, Homo sapiens
acgaaaaacagatctttttaagacctgcctagagctggaacgttacctccagagcgagccctgctatgtttcagc

SEQ ID NO: 497078 - DNA, 73 bp, Homo sapiens
gaaagcaaaggagtcagggatggctcttcctcagtttcggagcaacatcccctgtcacctggttgatatctct

SEQ ID NO: 497079 - DNA, 89 bp, Homo sapiens
gcaacacctgcggcctcactgggacccccaggaggtgaccctgcagagtccctgtgaagcaggaagagtgagggcaggttcactgcagc

SEQ ID NO: 497080 - DNA, 127 bp, Homo sapiens
tattgattctagtcatccctggcttcatgagtgtatgattcgtctctttaatactgcggcaacctttggcactgcatccatgagcatgcccacaggattcggcactcctgctccctacagtcttccc

SEQ ID NO: 497081 - DNA, 74 bp, Homo sapiens
gccacagcggcagctccagcccggcccggcagcgacatggaagggatgatggcgccacttcctcagtttcggca

SEQ ID NO: 497082 - DNA, 97 bp, Homo sapiens
gctttgaagaaaaggatttccaaaaactacaatcataaagaaatccaacttaccttgtcagtctctgtcttcaacgctggagtgcagtggcgcaatt

SEQ ID NO: 497083 - DNA, 83 bp, Homo sapiens
tgctgttctcgggagccgtggccctgatccagacctgggcaggtttgtccagaggggttgcgtttatccggtttgacaaacgg

SEQ ID NO: 497084 - DNA, 96 bp, Homo sapiens
cggactcgtggagttgtgaacgccgcggactccggagccgcacaaaccagggctcgccatgaagccaggttcccgtgtggccggtggttagggaag

SEQ ID NO: 497085 - DNA, 82 bp, Homo sapiens
tcgcttgcagttcagcgaccacggtggctattatcatggaaaactaatttttcccagagaatttcctttcaaacctcccagt

SEQ ID NO: 497086 - DNA, 100 bp, Homo sapiens
gcagcatctgcgatgtgaggaaaggcacctccaccagtaatggaggggaaagttccagtcgcagcgctgagaagcgatcagctgaagaagaagctgccga

SEQ ID NO: 497087 - DNA, 100 bp, Homo sapiens
cggggtccgcggtccaggctgctgccgcgacggggccggcggcggggcagctgccaggaacgagggtagcaggccatttcataattctgaatcatgtctg

SEQ ID NO: 497088 - DNA, 98 bp, Homo sapiens
cggcggagtagagcggagcctggcgggcgtgggaacccaggccccgccgaggcggccagattccaactccacagagtgaccagagagaggacgtggct

SEQ ID NO: 497089 - DNA, 100 bp, Homo sapiens
tggaatttgattaactcattcaaggttacccagttggtagtaagcattaataatgtctttcatctttgagtggatctacaatggcttcagcagtgtgctc

SEQ ID NO: 497090 - DNA, 100 bp, Homo sapiens
gaagcaagcagttcagaagagccaaggaataaacatgcaatgaacccaaaaggtctagacaggtaaaccggaacaataagcaggaagttcgagaagccaa

SEQ ID NO: 497091 - DNA, 97 bp, Homo sapiens
aatcaaaagaaaatctctaaatgcagattccagaaaaattacagcacatctcagtgaatttgcaagtggtgctgtcagggacactgctcgcagatgc

SEQ ID NO: 497092 - DNA, 88 bp, Homo sapiens
cattagcctcagaacgatatgataaagacgatgaagccccctctgatgatacagatccacgggttttagaaaaacaagaattacagca

SEQ ID NO: 497093 - DNA, 100 bp, Homo sapiens
cttccctcggtctgggcttctctgaggcggcgagagatggtcaggtctggagctcgaccgggccaggatgtaattaaaaccattgtgcagagtggtggca

SEQ ID NO: 497094 - DNA, 100 bp, Homo sapiens
atgtactacaagtttagtggcttcacgcagaagttggcaggagcatgggcttcggaggcctatagcccgcagattcaaccctatgaaaagataaaggcca

SEQ ID NO: 497095 - DNA, 90 bp, Homo sapiens
ggcctggagctggcttccatgatccccgccctgcgggagctgggcagaatagcctaacatggcagaccagagacagcgctcactgtctac

SEQ ID NO: 497096 - DNA, 50 bp, Homo sapiens
gaagatttctcgtttcgaaagggctatttttatgattcccacaaatccac

SEQ ID NO: 497097 - DNA, 75 bp, Homo sapiens
caggaggggcgagagggagccgcagctgatgtcagacaatgcagatcttcgtgaagactctgactggtaagacca

SEQ ID NO: 497098 - DNA, 100 bp, Homo sapiens
cctgaagacacacctgcccctggctctgctcccccagactctgttggatcagaaggtcaagtaattgacctgctgactgtgggcgagtctcggcagatgg

SEQ ID NO: 497099 - DNA, 75 bp, Homo sapiens
aaagagttgattgaaattatctctggtgctgcagctctagccaaacttggaatgccacagtttttgagtcctgaa

SEQ ID NO: 497100 - DNA, 83 bp, Homo sapiens
gccagcccggacctctggagtgcccccagcccagagcccgcaaattgtggctactaatttgccccctgaagatcaagatggct

SEQ ID NO: 497101 - DNA, 75 bp, Homo sapiens
gccggttgcaagcagatactggtgcctgttaatttggagtggcccctggagtcagtttcctacaccatccgaggc

SEQ ID NO: 497102 - DNA, 75 bp, Homo sapiens
catttctggaagcattctactgatcagtgaggaggaggacctgcacctggggacatcgttttctgcagaaaccaa

SEQ ID NO: 497103 - DNA, 83 bp, Homo sapiens
cttggactgagtcctgcaggacacaggaccgtagcatcctgagacattttgaattgacacttctcaagatttgactggatcag

SEQ ID NO: 497104 - DNA, 90 bp, Homo sapiens
tatttagttctggggagcgcctcgtcgacatgagtgatgtggaggaaaacaacttcgagggcagagggaagatggtgaaaggaatgggag

SEQ ID NO: 497105 - DNA, 76 bp, Homo sapiens
ctctgctccacactgccaaccggccagaggacgagtgtgtgtctcgactgcattgtgagagtgaatctttcaagat

SEQ ID NO: 497106 - DNA, 74 bp, Homo sapiens
tctgggccttttgggcagcttttccggcctgacaacttcatctttgttattaccccattcaagttgacaactga

SEQ ID NO: 497107 - DNA, 90 bp, Homo sapiens
ggagagcccggagctgctgaaccctgagcccaggagactgagcccagatggcatccacagcgtcacggccttctgcaccctgcgtgtcac

SEQ ID NO: 497108 - DNA, 102 bp, Homo sapiens
caaagctacaagggatttgttgacataacggtcctttctgaaatggtatctatgattcagctattcaaaacctaatgaagttggtgactatgacaatgtgga

SEQ ID NO: 497109 - DNA, 75 bp, Homo sapiens
aacgcaggagacacaagaagcggatccagacccagccgatgcccaatcctgtggcgtactacctgcaccactcac

SEQ ID NO: 497110 - DNA, 80 bp, Homo sapiens
cagaaacgtgaggatcaagaagccggactacaaggtcgcctacgtgcagctggctgatcagctgaccgaagaacagattg

SEQ ID NO: 497111 - DNA, 90 bp, Homo sapiens
cccaggctttcaatcaacccaaggtgatgcttttgctacgacctcattttctgctggaactggttattctggtacaagttaacccaggag

SEQ ID NO: 497112 - DNA, 82 bp, Homo sapiens
caagaaggcaacgacgttccatctgtggaaggacctaccaaccagagctggaagtcgagtgtgctactcaactcaggagatt

SEQ ID NO: 497113 - DNA, 50 bp, Homo sapiens
agaggctgagctgctccaggacttggggttctcctgaaaagaaagctgaa

SEQ ID NO: 497114 - DNA, 101 bp, Homo sapiens
aaaaaaacccttcactgtgaagagacatgagatgattgccaaatccccaggccaggagtggtggctcacacctgtaatcccagctctgggaggccaaggcc

SEQ ID NO: 497115 - DNA, 100 bp, Homo sapiens
gggcaacttcgcggtggtcaagcgggccacgcacctcgtcaccaaggccaagtaagactttgaccccgacgcaggcttcagtgattgccgcggatcagaa

SEQ ID NO: 497116 - DNA, 75 bp, Homo sapiens
caattacaaacatgttttatcaatgcagctaagacttttcttcacaggaattagagattttcatttgctcctttt

SEQ ID NO: 497117 - DNA, 101 bp, Homo sapiens
gttcgctgcaaatgtgggcgccaattttggtacggggctgatgttgacgtcaaccaccacctgactcctgatgtccagcctcgattctcccggcggctcac

SEQ ID NO: 497118 - DNA, 80 bp, Homo sapiens
gtttgcgggactcagtcccatcactccaaggagagaagcggagcgggcactggacacaatgaactttgagatgctcaaag

SEQ ID NO: 497119 - DNA, 80 bp, Homo sapiens
atgtttgcaggcctgggactgtcctgggccggcatgcttctggactatttccagctatttgcatgcaaagaacatcatcc

SEQ ID NO: 497120 - DNA, 107 bp, Homo sapiens
cgcgagcacagagcctcgcctttgccgatccgccgcccgtccacacccgccgccagcccgtggaccgggagcccgtggaccgggagccggtggtgtgccaccccgac

SEQ ID NO: 497121 - DNA, 74 bp, Homo sapiens
cgagtcgctatgcatgaactgttactgcaatgatatgggccctcacattttccaaacctgtccatctgctaact

SEQ ID NO: 497122 - DNA, 101 bp, Homo sapiens
tgctcctctctccttggcctctcctgggatcggcccaaggccagttctccgcaggtttgtgtgctggagaggcaaatatttgacttccttggatatcagtg

SEQ ID NO: 497123 - DNA, 75 bp, Homo sapiens
cggaagtgcagctgcctcagttcttagcgcagccaaaccactgagcatattgttaaactagtggaacaacacggc

SEQ ID NO: 497124 - DNA, 87 bp, Homo sapiens
tggaggcgccgcaagcgctgaggtgccactgattaatgaacttgaatcagcaatacatcagctgtacaaacagcgagcttcccgcct

SEQ ID NO: 497125 - DNA, 74 bp, Homo sapiens
cgctactttgtaatccggatccaggatggtactggatgaatctggttatagatggacaagagacgatcattctg

SEQ ID NO: 497126 - DNA, 83 bp, Homo sapiens
ctgggatgtgccttagaggattatggataatttttatggtgggacgaggatacctgtctccagatctcagtaaggtacggagt

SEQ ID NO: 497127 - DNA, 99 bp, Homo sapiens
gctgttcctaaacagcgcaaaggcagcaagctgtgggtcagtcttgcactcccatcaacataccagtagaggtttgctgcaatttgccccgttaattat

SEQ ID NO: 497128 - DNA, 129 bp, Homo sapiens
ggaggacggtctgcatactcgctgcccgccggctccctcccccgcgtccctgcgaccgccgcggcgaagatgacctgcctagagctggaacgttacctccagagcgagccctgctatgtttcagcctca

SEQ ID NO: 497129 - DNA, 82 bp, Homo sapiens
aaatgaccaatcttcaagatggtcttcagagagcaactatcctccccagccatcactggtgcaagctatatttaacggagat

SEQ ID NO: 497130 - DNA, 90 bp, Homo sapiens
cgagcttcggagaagcagtggtgggttccatgtgatggtggagtaggaggcaggtctccgcggtacgtagagaatacaggaaattcttca

SEQ ID NO: 497131 - DNA, 98 bp, Homo sapiens
gacagcggggagtacacgtgccagactggccagaccagcctcagcgaccctgtgcatctgactgtgctttccgtgcccatgacgcttccggagacaac

SEQ ID NO: 497132 - DNA, 75 bp, Homo sapiens
gatgccctgcagtacctgcagaaggtctctggagacatcttcagcagagaaatcaaacccatgccatctacaaaa

SEQ ID NO: 497133 - DNA, 100 bp, Homo sapiens
ggaggaagaggaggaggaagaagaaggtgatggccccagtcaaaactggaaccagggatatagtaactattggaatcaaggctatggcaactatggatat

SEQ ID NO: 497134 - DNA, 99 bp, Homo sapiens
aagtaccacctggaacgccacaagcgtgtgcacagtggtgaaaagccttaccagtgtgaacggtgtcatcaggaacaggcctttgagagcagccagaag

SEQ ID NO: 497135 - DNA, 82 bp, Homo sapiens
cagaacccatagaactcgtggaaactgtcaggactggtggagtcaacacagtcaatcaatagccaacctcaacctgagacag

SEQ ID NO: 497136 - DNA, 50 bp, Homo sapiens
tagcacaccatccccagccagagcttactccacgggaacagcctctagat

SEQ ID NO: 497137 - DNA, 76 bp, Homo sapiens
gccttcaatactacctttatttccaccatagatgttcctcctgctgatcaagagaagctttttatccagaagttac

SEQ ID NO: 497138 - DNA, 50 bp, Homo sapiens
agaaacaaaatgtcaacaaattgatggacatggcagctactgcatcttca

SEQ ID NO: 497139 - DNA, 83 bp, Homo sapiens
gtcgatgaagaggatgatgtttttggtgaagacccaacatgagtgaagtttcctgcaagaaacgggacgactatttggaatgg

SEQ ID NO: 497140 - DNA, 50 bp, Homo sapiens
gttcgacattaccaagcagtggtactggcacacggatgaggagtcgtaga

SEQ ID NO: 497141 - DNA, 98 bp, Homo sapiens
tagtacctacagcagcactccagactgcctctttaagctatgtcccatgaaccgctactctgcccaaaagcagttctggaaagccgctaagcctgggg

SEQ ID NO: 497142 - DNA, 73 bp, Homo sapiens
ccgccgtcagtcaagtatgcctggtgctttctctcagaactcatcaaaaagagtctcactgtgttgcccaggc

SEQ ID NO: 497143 - DNA, 100 bp, Homo sapiens
ggctgcgaggcgctgggcacagaatggagatgtatgcatttcgattcttcatccgcctgtagatgacccacagagtggagaactgccttctgaaaggtgg

SEQ ID NO: 497144 - DNA, 100 bp, Homo sapiens
aggtggagatccggagggcctcgggcaaagaagccctgcagaacatcaacgaccagataagactgatccaagaggtggaactcaaagcttcagctgccga

SEQ ID NO: 497145 - DNA, 151 bp, Homo sapiens
gccatggggcggctggtggctgtgggcttgctggggatcgcgctggcgctcctgggcgagaggcttctggcactcaggtgcttcgaatccagaacattctaacagaagaacctaaagtgacacaggtttatgcagaaaatggcacagtgtt

SEQ ID NO: 497146 - DNA, 74 bp, Homo sapiens
tctctcatccgcacgcacaatatcgggcagaaagataatcacggcttctctctgggctccacggtgcagtctca

SEQ ID NO: 497147 - DNA, 90 bp, Homo sapiens
gcgaaacaagttgcagagctacgtggacgcaggaactccacagcgatggattttgggtggggaagtcctccttgcggagttggcgccagc

SEQ ID NO: 497148 - DNA, 80 bp, Homo sapiens
tacgctatcatcgtggagatatctttgaaaatgtggactatgttcagcgacagggtctcactgtattgcccaggttggtc

SEQ ID NO: 497149 - DNA, 75 bp, Homo sapiens
ctgagtcacaaacagcaggatacctcacagtttatagaaggatcatttgaagaatatttaaagcgtttggaaaat

SEQ ID NO: 497150 - DNA, 83 bp, Homo sapiens
cttcacccgtgatgttggcctttaaataatttgcaccatcctgggattgtaaacctggaatgtatgtttgaaaccccagaacg

SEQ ID NO: 497151 - DNA, 75 bp, Homo sapiens
caggcagcgggctttgccagcaaaaccgaaacaggtgaggcaggcgactaatcagattgtgatgaattgtgctga

SEQ ID NO: 497152 - DNA, 84 bp, Homo sapiens
gcggaagtgcagctgcctcagttcttagcgcaggtggatccataaagaacccagccaacccgcagagggaggggaggggctgag

SEQ ID NO: 497153 - DNA, 100 bp, Homo sapiens
cccagtaataggccttctggagaaacttctgttccacctcctcctgcaggaaatgctgacttttaacccacacaagcgaatctctgcctttcgagctctg

SEQ ID NO: 497154 - DNA, 100 bp, Homo sapiens
cgccgcgcagctacctcatgactattgcaccacgcccggggggacgctcttctccaccacaccgggagagtgtgaacatggctacgcctcttcattcccg

SEQ ID NO: 497155 - DNA, 98 bp, Homo sapiens
tgataaagactacaggagaattcggtttgtaggtcgtcagaaagaggttggatttggtctagggagtcccagaaagaagtagaaaaagagagagaagc

SEQ ID NO: 497156 - DNA, 100 bp, Homo sapiens
ctccgagtgtgtgcagcgctgcacccgcaccctgcaggccgagggacgtgccaagaagcgcaaggtggagagactgcaggccctgtatacgatccgggtg

SEQ ID NO: 497157 - DNA, 74 bp, Homo sapiens
cagcgatattgtcagtgcaataatggcgtgttccagtccacgggacgagattgaggagctgcgggccgagatgc

SEQ ID NO: 497158 - DNA, 75 bp, Homo sapiens; identical to SEQ ID NO: 37263

SEQ ID NO: 497159 - DNA, 90 bp, Homo sapiens
cctggggctgacaggaatcttctggtgtactctttttatgaaaaggcactgacacccacttagtctttcgtcctctcatggagaaggtgg

SEQ ID NO: 497160 - DNA, 100 bp, Homo sapiens
tttaaagagctgggcttgaacttcgtgagtttcgctctaaactgcccttgaaatgaagctggacttggaggttttaaatgcacagagagcaggatacaag

SEQ ID NO: 497161 - DNA, 125 bp, Homo sapiens
cagctgaagagcgacaagccgctggcagccgcggatctcaccgccgctcaggcaaattgtggctactaatttgccccctgaagatcaagatggctctggggatgactctgacaacttctccggct

SEQ ID NO: 497162 - DNA, 75 bp, Homo sapiens
gtggtgggggatgaggaggtgtggacgtcggacgtgcagtaccaagtgtcgttattgccttgtctgtcaagatcc

SEQ ID NO: 497163 - DNA, 50 bp, Homo sapiens
gctgaatgtgccatcgtcaccctggctgcagaagatgtcaatgttacttt

SEQ ID NO: 497164 - DNA, 102 bp, Homo sapiens
aaaaacgtcaacaacagttttacgcctgtggacatctctacagcaatgagtgaacgggcacttgctcagaaaagactcagtgagaatgcatttgatcttgaa

SEQ ID NO: 497165 - DNA, 50 bp, Homo sapiens
tcctgagtagctgggaccacaggtatgtgccaccacacctggctaatttt

SEQ ID NO: 497166 - DNA, 108 bp, Homo sapiens
cgggaggaaggaacgaggcaaggagctaaagcagcgtgcgttcagccctgggccctcccaggcccaatacttcaaagcatcctacctctgctcaatatatattacttg

SEQ ID NO: 497167 - DNA, 100 bp, Homo sapiens
gcaccagtggcaggcagacgaggacgcggtgcggaagggcacgtgcagcttcccggtcaggaggtgctgatactcaaagaaggtttaagttgtctgatct

SEQ ID NO: 497168 - DNA, 100 bp, Homo sapiens
gggaatgatccttactaaccacgaccatcaaatccgtgtcggagtccttacaggttaaacccatccagagtaatggctgcggccttacccaggaccctgg

SEQ ID NO: 497169 - DNA, 98 bp, Homo sapiens
tgggaagaggcatatgacccacaggttggagattacttcatagaccacaacaccagcccgccagctcatcctgcagtatggcttgaccctcagtgatc

SEQ ID NO: 497170 - DNA, 82 bp, Homo sapiens
ccagatgttcctgtggaccccagtccaggtgtctactgcagatatttcatcaaataaggatgatgaagaaaactctatgcac

SEQ ID NO: 497171 - DNA, 100 bp, Homo sapiens
aaggaagcgagactcatacgcaacctcaatgcatacacaagctgagggagaatgtctttcaagagcatcagacccttaaggagaaggaacttgaaacagg

SEQ ID NO: 497172 - DNA, 50 bp, Homo sapiens
ggaatgtggaaatggagtcatccaggagattgagaatttatcacaagttg

SEQ ID NO: 497173 - DNA, 100 bp, Homo sapiens
cccggaccgtgtcgccgacgccaaaggggacagcgagtcggaggaggacgaggacttggaaggtcacagtgctgtcgatatcaccaaggtggctagaaga

SEQ ID NO: 497174 - DNA, 98 bp, Homo sapiens
cggcattagcgaggaggaggcggcacagtatgaccggcagatccgcctgtggggactggaggcccagaaacgggttttggatattattgcaaccataa

SEQ ID NO: 497175 - DNA, 101 bp, Homo sapiens
ttggaacaaggattttggatgaagaagtttttgagcatctgcataccaaaggacttattctatgaaatactttaaaaattcctcatcagcaaaggacaatt

SEQ ID NO: 497176 - DNA, 139 bp, Homo sapiens
agcttggctgaagaggaaataaaaacagaacaggaggtggtagagggcatggatatctctactcgctccaaagtgtaaacaggaacatcgataagtagtgtaaaaacttgcacaatgaaatccgaagccaaggatggag

SEQ ID NO: 497177 - DNA, 50 bp, Homo sapiens
gggccagtgggaactctaatattggtctctcaggcagctgcagagcttca

SEQ ID NO: 497178 - DNA, 98 bp, Homo sapiens
ggaaacaggatgctgatagtctccagcgggcctggactgtgggctggtgtgtggaactgtggtagacggaggagaagtccatccccaccacccaccag

SEQ ID NO: 497179 - DNA, 100 bp, Homo sapiens
cagatcccagccagtctctactcagcctggagcaaggtgagcactgtgaggtgagtgctcgctcaggccgttgcaccccgggtgtctgcaagaatggggg

SEQ ID NO: 497180 - DNA, 98 bp, Homo sapiens
tgaagctaataaagtgaaattatggggcctcaacacagaatatgaaaatgtggacacagacttgccaggcagcctggggcagagtgaagagaagcccg

SEQ ID NO: 497181 - DNA, 100 bp, Homo sapiens
acctgcaggcagcaccggaggcccaggtctccgtgcagcccaacttccagcaggacaagggaacggcaggagcagctgatgggatatcggaagagagggc

SEQ ID NO: 497182 - DNA, 82 bp, Homo sapiens
ggcgaatgcaacccgacgagggagtgggaaaataatgttgagtttccatgaagaacaggaagtactgccagaaactttcctt

SEQ ID NO: 497183 - DNA, 95 bp, Homo sapiens
ggaagcagccgatccagcctgcggagcctgtggggcagcaaacggggattcagcgtccgatcctttggaacagggactcacgtgaagcttccagg

SEQ ID NO: 497184 - DNA, 50 bp, Homo sapiens
gaagcagggattccagtgccaagatgcatcatcccattcagatgaaacct

SEQ ID NO: 497185 - DNA, 75 bp, Homo sapiens
ccgacagcagatccaggctcggagctccagacgctgggacagatggtgggcagtggtggtgctggctgcgttccc

SEQ ID NO: 497186 - DNA, 101 bp, Homo sapiens
gcaggggacaggaggcccctcccagaatggggaagggtatccctggcagagtctcccggagcagttccagtctcatcagattttccatgtcctggtggtgg

SEQ ID NO: 497187 - DNA, 75 bp, Homo sapiens
gacgttaacacatcaggcacccccacccccacaacaggtatcctgtaattctgatgctgttgcatgaaaaagcag

SEQ ID NO: 497188 - DNA, 98 bp, Homo sapiens
tgtgacagtaactgaacattggtctaaagtctttccaaaaggtcaaggttcacaagcagtgactcttcgagaagacagtgccaagaggttggagagga

SEQ ID NO: 497189 - DNA, 78 bp, Homo sapiens
gacggcgtgatcacggccagcgaggacaggtccctgtgcgttttattgcgacctgccggtgggaactttgtctccgag

SEQ ID NO: 497190 - DNA, 100 bp, Homo sapiens
gagcactgcactggaggccagcctcttcgctgtggtgcccaagtacttctttcagtggtggacttgctttgtgaagagacagttcatgaacaagagtctt

SEQ ID NO: 497191 - DNA, 100 bp, Homo sapiens
tcctgcctcaggtttatttgtacaaatagcacaggaggaagatccagaaattgtgaacaatgtttgatttagtagcgtgacttgcctttccctttaaaaa

SEQ ID NO: 497192 - DNA, 90 bp, Homo sapiens
gacgctctgaactgactgccccgcatcaccggagcgtcccagctgcgaggagccgcggcccatggagcccgccggcccggcccccggccg

SEQ ID NO: 497193 - DNA, 100 bp, Homo sapiens
caccccctgcatcaccaggcatctttgccgaggcctgcaacaacgccacctatgtggaggagtggacagtgcaatgaaggaagaagtgcagaggctgcag

SEQ ID NO: 497194 - DNA, 89 bp, Homo sapiens
tcagaccctaaaggatcaaccctctgcatacagtaaacccctggggtagatcccagccccccgcataggtccttttgctggaaaaggaa

SEQ ID NO: 497195 - DNA, 83 bp, Homo sapiens
gggggcccgaggaggtgaaccggctcacggagagcacctaccggggtgttcctgaaaagccccatagtgattgagtcttcaaa

SEQ ID NO: 497196 - DNA, 98 bp, Homo sapiens
aagctgagctggactctctgccacatcgttcggttcccacaacagcctggtgccttggaatttgtgtcgctgagtcagcaagcctttcagatttgccc

SEQ ID NO: 497197 - DNA, 82 bp, Homo sapiens
aaattaaagttttacaagatttaacctgtcatcaagacctgggattttggtggatatccgacatgaagccagtgacttccca

SEQ ID NO: 497198 - DNA, 75 bp, Homo sapiens
gagaattctcacaggcttatcactggggatggactatttgggttctcggcaatacgttcaccgggacttggcagc

SEQ ID NO: 497199 - DNA, 74 bp, Homo sapiens
aaagactggatggtatgggctgtctggagtttgatgaggagcgagcccagctctatcgtccgagctttgtgcac

SEQ ID NO: 497200 - DNA, 74 bp, Homo sapiens
ttaagtcccccaaagatgagatttacctgtgagatgtttcatcccaacatttctggcccccaaagacaaaccaa

SEQ ID NO: 497201 - DNA, 90 bp, Homo sapiens
ggagaagggctgcgggttagggggccggcgcccgcggttcagaggctgtggccctgagaaagatcacgtctacctgcagctgcaccacct

SEQ ID NO: 497202 - DNA, 82 bp, Homo sapiens
cggcgagcgcgtcgccaccatgatcattgagaagcagccaggccacattcggagcagggttttcagggaggtggagatgctg

SEQ ID NO: 497203 - DNA, 100 bp, Homo sapiens
ctttctgggcacgtgaggttgggccttggccgcctgagcccttgagttggtcacttgaaccttgggaatattgaggacatggatttgattgacatacttt

SEQ ID NO: 497204 - DNA, 152 bp, Homo sapiens
ctacctgtatgctgtgagggaccgtgaaatgtttggatatatgaaattacatccagaggattttcctgaagaagctgccaatgtcttgctctcagaacaaggagatgttaaacttgctgattttggagttgctggtcagctgacagatacac

SEQ ID NO: 497205 - DNA, 100 bp, Homo sapiens
attaacaatggcgaaatgcaggcgaaatgtggaaaatttcctagaagcttgcagaaaaattggtgtacctcagtgattcgcctttgccagtctcatctcg

SEQ ID NO: 497206 - DNA, 82 bp, Homo sapiens
cagtcagaaggggaacggatctgtgtgcccacagctcctggagccccacaggtgaaggacttaactaagtacttggatccca

SEQ ID NO: 497207 - DNA, 51 bp, Homo sapiens
cgtggagtgaaggtcacgccgcggcgcgagtctgtgaccttcgaggatgtg

SEQ ID NO: 497208 - DNA, 101 bp, Homo sapiens
tggaagaccacgtgaaaaactttaggctgcagttcatggagctcgtttcaaagggcaagatctaaaactggcatggaataaaccagtaactaatatttcag

SEQ ID NO: 497209 - DNA, 75 bp, Homo sapiens
agcgtcagccctgggatctgagggaacgaccgatttccaggcctaaatgaaaatttgagatggaagaaagagcag

SEQ ID NO: 497210 - DNA, 98 bp, Homo sapiens
aagcctgtaaaaatggcatgcctaccatctcccggctcttacagatgcctggtggtgctagagaatgaattgatgtatggggttccttttgaatttcc

SEQ ID NO: 497211 - DNA, 82 bp, Homo sapiens
gcgacgttccctcagcctctgcccaaagaaagaaggagaatatggtcaagcagaaagccttgcgagttttaaagcaaaagag

SEQ ID NO: 497212 - DNA, 114 bp, Homo sapiens
cggcaacagcagcagcagcggctccggcagcggtagcacgagtgcgggcagcagcagccccggggcccggagagaaggacagaataacgggctcccagattcacaagccccacc

SEQ ID NO: 497213 - DNA, 75 bp, Homo sapiens
gtcccgaccctggccgccccgagcggagcctggaggtgtccccaggtgtcattgccaacccctttgcggcaggca

SEQ ID NO: 497214 - DNA, 100 bp, Homo sapiens
ggcgagctcgcgatgagtggtctcggcaggctcttcgggaaggggttgaaaaataccggccacagaccctgaatgatctcatttctcatcaggacattct

SEQ ID NO: 497215 - DNA, 97 bp, Homo sapiens
taaccagagccatccttcgggagaggatatgtagcgaggaggaacgcgctaaggcaaagcacctgattgtagaaggcatgaaacaaaaaatgtggag

SEQ ID NO: 497216 - DNA, 73 bp, Homo sapiens
gccgtggaggcagaggtggcatggggagcttcaggatggttcgtactaagacatggaccctgaagaagcactt

SEQ ID NO: 497217 - DNA, 82 bp, Homo sapiens
tgcttttgtaacttttgatgatcatgatacagttgataaaattgttggtcgagtttgagtggctgaggcagttttggtttca

SEQ ID NO: 497218 - DNA, 82 bp, Homo sapiens
ggatgtcatggctgggatcccctgggagctgaagtgccccaaggctgagatcttccgggccttcacggagctgttccaggtg

SEQ ID NO: 497219 - DNA, 100 bp, Homo sapiens
acgtaccacctggatgttgtggaaaaccatgagctgttttccaagagcttcatctccatggaagtgcctgtcatggtagtaaatggcaaggatgatatgc

SEQ ID NO: 497220 - DNA, 90 bp, Homo sapiens
ggaagatggcgctggccggatggaaatcctaatgacagtctccaaattcgcctccatctgtaccatggtttcagaaaacaaaaggcgata

SEQ ID NO: 497221 - DNA, 100 bp, Homo sapiens
ccggtgtggtggcggcggcggagactgcgggcccgtagctgggctctgcgaggaaaatgtttataggaggccttagctgggacactacaaagaaagatct

SEQ ID NO: 497222 - DNA, 110 bp, Homo sapiens
atagagtggccaagtttccagaaaacagaaatcgaaacagatacagagatgtaagcccatgccccttcacagatgtagtcactacaaatcttaaattgcgaaatccatcg

SEQ ID NO: 497223 - DNA, 100 bp, Homo sapiens
cttcagaagctggtcgccgccggcagggttaaagcacgaattgggagctctcagcgacatcaccagtcagcagccaaagacctaactcagtcccctgagg

SEQ ID NO: 497224 - DNA, 83 bp, Homo sapiens
gcagcccgtatcggggcctttatttctcgtcggcggcgccctgcaccgcgcctcgcaaagtcatcatcagatttgaaatattt

SEQ ID NO: 497225 - DNA, 75 bp, Homo sapiens
gaagagatcatccctaagcaggagagaagctactaaaggtgcagtgtggtgactttcctcatctgttagtgtacg

SEQ ID NO: 497226 - DNA, 82 bp, Homo sapiens
cccctcatcgagctcttcgtcaaggtggatccataaagaacccagccaacccgcagagggaggggaggggctgagctgtgag

SEQ ID NO: 497227 - DNA, 75 bp, Homo sapiens
caagatcaaaacagttgaattacaaggaaagaagatcaagctacagatatggtgaaatcttgtgctgagtgggtg

SEQ ID NO: 497228 - DNA, 100 bp, Homo sapiens
gcagtggagaggaggatagtgacctctcacctgaagaacgaggacctgctgaagttcccatgatgtcacccaatggatccattcctcccattcatgtgcc

SEQ ID NO: 497229 - DNA, 100 bp, Homo sapiens
atttgtgtggagcacacattgaatgggccaaggaaaaatcgagcagaaagaatgtctttcagtttgctaatccagactttacacaacctatctcagaagt

SEQ ID NO: 497230 - DNA, 83 bp, Homo sapiens
cactgaggcagggcccctccgcaagagctccctcaagaagggagggaggctggtggagaagctgctccctgcatgaggaggac

SEQ ID NO: 497231 - DNA, 75 bp, Homo sapiens
ttcccaggacagcggaggtggaacttcgtcgcgctgcaacccccggctcggccagagactgctgctactttgaaa

SEQ ID NO: 497232 - DNA, 90 bp, Homo sapiens
tggacggactagcgaagatccggactgctcgggaagctccatccgaatgtgtctgccccccaggttcgaagtcaacaataccattcttca

SEQ ID NO: 497233 - DNA, 89 bp, Homo sapiens
gcgagttacatgttgagccatttcagatctcttccgttccctgctggcagttcatcagctggatcagccacatggtggccttactggac

SEQ ID NO: 497234 - DNA, 73 bp, Homo sapiens
gaacatgatcaagggtgttacactgtccatgctgctcctggccccaaagctgaacgaggccaacctcaatgtg

SEQ ID NO: 497235 - DNA, 76 bp, Homo sapiens
cactgtggccttctgcgacgcgcagtccacgcaggagatccatgagaaggtgagcgagtgctgtgctttcatgggc

SEQ ID NO: 497236 - DNA, 100 bp, Homo sapiens
acttgaaaaaaactttgctgccaatactctgggttctttggcatggacacaagttcagtgggaggattagaattgactgatcagactcctgttttattag

SEQ ID NO: 497237 - DNA, 82 bp, Homo sapiens
ctagacgacaaaatgcaaaaaaggaggccaaagactttgttggacaattaaagatactgctgaaatcagtgcttgaccaatg

SEQ ID NO: 497238 - DNA, 124 bp, Homo sapiens
tgaagcagaccccttaaagaaggaacttttggaacttctgggctttaaaaagacttgcttgaaagcctgtgctgaatgatgagccctcctcttcagctaggaaaatgacggtgttcagaaagtt

SEQ ID NO: 497239 - DNA, 96 bp, Homo sapiens
acatgcacttgaacagactagaaattgcaccacagatatatgggttattttaccaaatgttgcaagaactctggagttcttatggtagtaaaatgc

SEQ ID NO: 497240 - DNA, 100 bp, Homo sapiens
tccatcttcattcatgactccagacagggaggtggggaagacagggctccagctaccacaggacgggctctgggtatagccgttccagtcagggacagcc

SEQ ID NO: 497241 - DNA, 75 bp, Homo sapiens
agaagggggttcatcatggcggatgccagtccctgagacgaataggaccttgtccctggatgaggtgtaccttat

SEQ ID NO: 497242 - DNA, 83 bp, Homo sapiens
ggggccaagggacaatggtcaccgtctcttcaggtcgcgtggggcaggcagtggcgctgcgggccaaggccttcggcttcaac

SEQ ID NO: 497243 - DNA, 100 bp, Homo sapiens
gggagatccttgttgccgtcccttcgcctccttcaccgccgcagaccccttcaagttctagtcatgattagtgatgatgaaccaggttatgaccttgatt

SEQ ID NO: 497244 - DNA, 121 bp, Homo sapiens
tccataggtgccatcgtggttgagacaagtgcaaaaaatgctattaatatcgaagagctctttcaaggaatcagtactccaaagattcaggtttactcacgtcatccagcagagaatggaa

SEQ ID NO: 497245 - DNA, 75 bp, Homo sapiens
aaaacttcggacatagaggccaaccaacctttggagaagatgcagatgcctccagctattacgagtcccatggca

SEQ ID NO: 497246 - DNA, 98 bp, Homo sapiens
attgaagtttcttgcaaaccacactaacatattactggcatcttcaatctgtgccggtggtggtgtgcacattgagccccggtatagacagttccccc

SEQ ID NO: 497247 - DNA, 100 bp, Homo sapiens
agaagcaaaaaagggactgctaagaagataccaccaggtgaagctttgttctaagaatatttgtttcatctagtttatgagtccaaatgatatagactgt

SEQ ID NO: 497248 - DNA, 100 bp, Homo sapiens
tgccctccgctcagctcgagcttccctcgtggccgacggaacaatgaagttgtatcacggactgattcaccgagcccaaccgtactcaactcacatattt

SEQ ID NO: 497249 - DNA, 75 bp, Homo sapiens
ccagaagacactccccagggcagaaatagcgaccatggcgagttttagaaagagcgttttcgctacgtaaagcac

SEQ ID NO: 497250 - DNA, 100 bp, Homo sapiens
cgcttgaatgtgttcaagaatgatcaggatacttgggactacacaaaccccaatctcagtggacaagttcattcaatgtgtcatgagtgtttaaatcaag

SEQ ID NO: 497251 - DNA, 78 bp, Homo sapiens
atttgaagatacatgagacagcagccaaacccccagggtcatcatcaaatccacagcaaatttccagttttgacttca

SEQ ID NO: 497252 - DNA, 100 bp, Homo sapiens
gaagacttccagtagctccaaggaggttaaggatgaaaactttcggaagagaaagttgcctgtggtaagttcagttgttaaagtaaaaaaattcaatcat

SEQ ID NO: 497253 - DNA, 89 bp, Homo sapiens
gagagcgcgcggcggacgcgcccgggacgcgcggcggcaccgggaggccgggccgagcgggaaatcctcattgacgattcaatttgttg

SEQ ID NO: 497254 - DNA, 83 bp, Homo sapiens
ccttgtgggcatgatccataatcggtttcaagctgttgttggcctactgtacccctgtatcgacagtcacctcggagaacccc

SEQ ID NO: 497255 - DNA, 76 bp, Homo sapiens
tggatatccacaccatccttctcgctgcaggaaatacccgcagcccaaagggcagaagaagaagaagatcgtcaag

SEQ ID NO: 497256 - DNA, 83 bp, Homo sapiens
ctgcagttaacgggaccagctctgcggaggactttgaacatgtcggggatcgccctcagcagactcgcccaggagaggaaagc

SEQ ID NO: 497257 - DNA, 90 bp, Homo sapiens
atattgactgtatttgggctgcagcacagggaaatcctcattgacgattcaatttgttgaaggccaatttgtggactcctacgatccaac

SEQ ID NO: 497258 - DNA, 75 bp, Homo sapiens
cagctgccacgcctggaacaaggaccgcacccgtctggattactaatggaggactggccaatatttttactgtgt

SEQ ID NO: 497259 - DNA, 74 bp, Homo sapiens
agggatggagccctctggcggaagccatcagctatggagataggcagatgagtgtcatggagaaactccagctg

SEQ ID NO: 497260 - DNA, 100 bp, Homo sapiens
aggggcagagggaccactctgacaggacatggtctgctatacagctcagactctcgtccgaatcctctcacatggtggctttaggaagatccttggccag

SEQ ID NO: 497261 - DNA, 83 bp, Homo sapiens
ccaacagccaccaccaccaccagatggactctggtgctgaggaagagaaggcgggagcagccaccgtgaagaagccgtctccc

SEQ ID NO: 497262 - DNA, 87 bp, Homo sapiens
cagcccgccgggagctctgaccgaggcgcctcgctggggcggggaccttgccttgcccgggattgtcctgggtcacataatgccagc

SEQ ID NO: 497263 - DNA, 100 bp, Homo sapiens
gaagatgaatacaaaaagcataggcggaccatgataatttccccagagcgtcttgatccttttgcagatgggggccgaaggccagagaccaggatttggc

SEQ ID NO: 497264 - DNA, 76 bp, Homo sapiens
ataatggcaaataacttttccttggagagtcataacatatcactgactggctgctgatgtgctgttgcaacatgga

SEQ ID NO: 497265 - DNA, 100 bp, Homo sapiens
gcgcggcgtgagaagccatgaggtggcggccaaagccctggagatgggcgtgtttggcgcatatttcaacgtgctcatcaacctgagggacatcacagac

SEQ ID NO: 497266 - DNA, 98 bp, Homo sapiens
gggcgggggcgatggcggcggcggcggccggagcttctctcagccgggacattccagctacatcacacaccttgactggtccccagacaacaagtata

SEQ ID NO: 497267 - DNA, 100 bp, Homo sapiens
gtgtttgtattgtgagaaggttggagaacagcccacattgcagctaaaacattgaaaattgacacacctcagcaggggagcattcaggatatcaatcatc

SEQ ID NO: 497268 - DNA, 98 bp, Homo sapiens
tgaatatggccgtgatcgtgcccaaagaggagggcgtcatcagcgtctccgaggacagaacccagacctggactcagaggcgctgctagccctgcccc

SEQ ID NO: 497269 - DNA, 100 bp, Homo sapiens
agctatcggcgccgcggcaagagccaggtcatcatcagatttgaaatatttaaagtggatacaaaactatttcagcaatgcagacaattaagtgtgttgt

SEQ ID NO: 497270 - DNA, 122 bp, Homo sapiens
aacctctctgaaatctgacacctgctctcccggcaaggaaacttcgcaggctggtgctggagaatctggtaaaagcaccattgtgaagcagatgaggatcctgcatgttaatgggtttaatg

SEQ ID NO: 497271 - DNA, 75 bp, Homo sapiens
gcccgggcatggtggtctggggcaacgcggaagctccacagcacctgttgccttcattagcagcttttcctcctc

SEQ ID NO: 497272 - DNA, 90 bp, Homo sapiens
gattattttaacaggaacaccacttcaaaataacctaattgagtttcgagcatcagacaagcggatagcttgtgatgaagaattctcaga

SEQ ID NO: 497273 - DNA, 75 bp, Homo sapiens
caaaagcacaaggattctcgctgtgacagagacaacaccgagtatgagaaggctctcgaaatatcggccagctag

SEQ ID NO: 497274 - DNA, 87 bp, Homo sapiens
aaagctgagctgcgaggaaaatggcggcgggaggatccggcgctaagaaacagggcgaggacttagcggataatgacggggatgaag

SEQ ID NO: 497275 - DNA, 75 bp, Homo sapiens
aagatggcgactgtcgaaccgtactatactggcaattgctggagaagattttgcaattgttgcttctgatactcg

SEQ ID NO: 497276 - DNA, 98 bp, Homo sapiens
ttcccgcgtccgccgattcctcctccttggtcgccgcgtccttggctggcgtgtgtggccgacgacgatgccctcgctgaggagcgcatgcggagagg

SEQ ID NO: 497277 - DNA, 75 bp, Homo sapiens
gaactatctcctactactctttcccctgttaatcatagcttgggaggccagcaagcgcatctccagccacatccc

SEQ ID NO: 497278 - DNA, 75 bp, Homo sapiens
agaagccgagttcaacatcctcctggccaccgactcctacaagcagaaaaatatggctcaggagactaaccagac

SEQ ID NO: 497279 - DNA, 100 bp, Homo sapiens
ggaaatctcagactgtgcttcttgtgcaagtaatcagtctttgacaagtgatgagaagctgtcggagcttcccaaggttgtctgcattcaaaagagcatt

SEQ ID NO: 497280 - DNA, 82 bp, Homo sapiens
gtcaagacgtggcacgtgtcagagaatttgacgcttctaaccgaaaatcttcagttggcgtaaaaaagaatagcaagagcag

SEQ ID NO: 497281 - DNA, 90 bp, Homo sapiens
cccacggagcctccggggctgagatcccgctgtgcgctggctgtgaccagcacatcctggaccgcttcatcctcaaggctctggaccgcc

SEQ ID NO: 497282 - DNA, 75 bp, Homo sapiens
aaagatgacggatgaaaagaatgaacactgtccttcaaaacgatttttcagaagaagtgaagtcaagatgaagaa

SEQ ID NO: 497283 - DNA, 75 bp, Homo sapiens
ccaatgtcaaagttgtgtccaattttatggattttgatgaaactaatgccagaggacttggatctgagctaaagg

SEQ ID NO: 497284 - DNA, 97 bp, Homo sapiens
caaggagaagatccatggttattagagaaagagaaaggatttctaagcaggaactccccagatgtcatggcacccccagtaccggagctccaagttc

SEQ ID NO: 497285 - DNA, 82 bp, Homo sapiens
tgccatgaaactacttcgtgtcctggcctcagctgggaggaatattgctgcccggctgaggccagctccaccagggcaaggg

SEQ ID NO: 497286 - DNA, 100 bp, Homo sapiens
gagtggctggaggaggatgaacactatgattaccaccaggagattgcaaggtagatgatgagctggagatcaaggcctactatgcaggccacgtgctggg

SEQ ID NO: 497287 - DNA, 90 bp, Homo sapiens
actgaggccttcctggcagagatggagaagaatgagtcggatgtcttcagctgggtgatccgccgcgagttccaggagctgcaccacctg

SEQ ID NO: 497288 - DNA, 75 bp, Homo sapiens
gatcaacaccggggagtctgcggtgttgttaataacagtactggtagtggaagggattgccgtggcccaaaaaac

SEQ ID NO: 497289 - DNA, 87 bp, Homo sapiens
ctacaccctcacagtttgctctgctcttccaacaccagtggaagatgatcacatcccaggtgctgactgggttacttttttaaacac

SEQ ID NO: 497290 - DNA, 98 bp, Homo sapiens
caaaactggaaaagacaattgatgacctggaaggagctgatccgcaagggcatcccccaccacttccgggccatcgtgtggcagcttctgtgcagcgc

SEQ ID NO: 497291 - DNA, 90 bp, Homo sapiens
ctcagttcttcctcccagagctgcagcggcgcctggacgactgggttattttggagctgttggagcactccttgagctgttgaagatccc

SEQ ID NO: 497292 - DNA, 98 bp, Homo sapiens
cccgctgctcttccccactcagtgaagctgtggtctaccaatctagacaactcagtggcaagcattgaggcaaaggctaatgtgtgctgtgttaaatt

SEQ ID NO: 497293 - DNA, 75 bp, Homo sapiens
agatgatctctatttttacattgccacatacctaggttactataacaacagtaccaaggtggctgtgaaaaccct

SEQ ID NO: 497294 - DNA, 100 bp, Homo sapiens
acgactttggttcgagtttgtgatgctacatatgataaagctccagttgaaaaagaaggaatccacgttctaactcacaaggcaatgtcaattggaagac

SEQ ID NO: 497295 - DNA, 108 bp, Homo sapiens
gaagtgatgcacaccaccaacattcttggcattacgcaggccagcaactcccagctcaatgcaatgatactgggtcgtcaggatggagttttgcaagactgggtcatt

SEQ ID NO: 497296 - DNA, 100 bp, Homo sapiens
cgaattggtggaaaggttgaagttcaagagctcagaccctaaaccaatggagatcttcgtggatgatgagacgaagttgacgctgcatgggttgcagcag

SEQ ID NO: 497297 - DNA, 100 bp, Homo sapiens
gccgccgctcttcagtttgcccgaagcgcggacgcggtttacgaagtcacagcttggaggaaaccagtttgcactatttgatgaggaatttggccaccaa

SEQ ID NO: 497298 - DNA, 75 bp, Homo sapiens
gcttgcgcatctcagatggagtggtccttttcattgatgctgctgagggggccagaggcattgatgtgcagcagg

SEQ ID NO: 497299 - DNA, 58 bp, Homo sapiens
tccaggaaagacatggagattctcttaaaaagagcaacctgcaagcaatcaaggccag

SEQ ID NO: 497300 - DNA, 89 bp, Homo sapiens
ctggagctgggtcagtccgccgctcaccccgcggccgcaccttcccgccttctcaggtttggtgcacctcgatttggaggaagtagggc

SEQ ID NO: 497301 - DNA, 96 bp, Homo sapiens
gcagcatgtcggtggcggggctgaagaagcagttctacaaggcgagccagccgagccacatcgctcagacaccatggggaaggtgaaggtcggagt

SEQ ID NO: 497302 - DNA, 100 bp, Homo sapiens
gtgggagcaccaggatctcgggctcggaacgagactgcacgggtttggaaatcccttgtctccaggttgctgggattgacttcttgctcaattgaaacac

SEQ ID NO: 497303 - DNA, 75 bp, Homo sapiens
ctcagttggaagcagccgatccagcctgcggagcctgtggggcaggtgctgtccctggacaccaacatcacaaac

SEQ ID NO: 497304 - DNA, 75 bp, Homo sapiens
acacaggcgcgggaatcagcacggacccagattcaagaacatggcatcattatgtataccagcccaaatatctgg

SEQ ID NO: 497305 - DNA, 131 bp, Homo sapiens
cacagaagtggtctgtgaatggagatacccgtgtaggcctttttgcactaagtgacattaaagcagtgctggaggtgagctctgccatccccatcatcatgggctccaacatcggcacctctgtcaccaac

SEQ ID NO: 497306 - DNA, 100 bp, Homo sapiens
aaggtcctaaagaagaagattaaacgggtaaagaaaaaagaagttgaaggagatgctgagtgcctggaagagctgggatgtctggttgagtcctatggca

SEQ ID NO: 497307 - DNA, 100 bp, Homo sapiens
caagtgccatgatgcatgccttagaagtgttaaattcacaggaaacagacattcaatccacgtcaaggaagagccagtgattgcagaggatgaagactgc

SEQ ID NO: 497308 - DNA, 100 bp, Homo sapiens
ctcggcctcggagcaacgagcgcagcgccggtgctgaatgtggagtaaatgcagatgttgagaaacatcttgaattgggcaagaaattacttgcagctgg

SEQ ID NO: 497309 - DNA, 51 bp, Homo sapiens
tctgaccctccgccaggcaaaaggaaggatttttttcccaggaagccatcc

SEQ ID NO: 497310 - DNA, 75 bp, Homo sapiens
cagaggaacgagctgagctggcagagtcagtttatatcccctgtatctatgtgttaaataagattgaccaaatct

SEQ ID NO: 497311 - DNA, 98 bp, Homo sapiens
tggtgatggtgaaggataaccatgtggtggccctaggggatgttccagatggcactctggtcactgtgatggctggcaatgatgaaaactactcggct

SEQ ID NO: 497312 - DNA, 80 bp, Homo sapiens
cgggcagtcgcaccaagcagaggcttccaggagctgaggacagggactggcggcaacagcggaatattccgattcattcc

SEQ ID NO: 497313 - DNA, 98 bp, Homo sapiens
aacctatgcttgtgaaaatggacatacggatgttgcagatgttttacttcaagcaggggctgatttagtacaacagaatagctcgggaatggactcag

SEQ ID NO: 497314 - DNA, 100 bp, Homo sapiens
cttctacattttcgatagagacgttttccggagggattccatcatagatctcctgggaggcccccgtggagaagaagactgagtgtatccagaaagggaa

SEQ ID NO: 497315 - DNA, 100 bp, Homo sapiens
tggcagctttacaggagcgacttgacaatgtccctcacaccccttccagctacatcgaaacctgtcggaaaaggtaacagaagatggaactcgaaatccc

SEQ ID NO: 497316 - DNA, 75 bp, Homo sapiens
gcctgcctcctggggctctgcgcgctcctgccccggctcgcaggttttaaatgcacagagagcaggatacaaggc

SEQ ID NO: 497317 - DNA, 101 bp, Homo sapiens
aagaaaaggtgtacttgcaagaaacctcaggacttgagtaacagcaacatgcaacatggccaacgccctggccagcgccacttgcgagcgctgcaagggcg

SEQ ID NO: 497318 - DNA, 100 bp, Homo sapiens
acaacaggaaaacctaacttcatctctcgctaccgaattcaggtcggcaagaatgaacctgcaagaaactatattcagtctttgactcagatgccgaaga

SEQ ID NO: 497319 - DNA, 99 bp, Homo sapiens
ccatcctgagggcagccctgaagctggaaccttccaacaaggtgtctgctttttcaacgtgggagaaggagttgcacaagatagtttttgatccccggt

SEQ ID NO: 497320 - DNA, 82 bp, Homo sapiens
ataggagccccgttctcacaagggcagggactcggagatcatgcagcagaagcagaaaaaggcaaacgagaagaaggaggaa

SEQ ID NO: 497321 - DNA, 100 bp, Homo sapiens
cttggattcagacgccgattcgcccaggctgtaacagaggaggaaatgattttgaatagcctctctctgtgttaccataataagctaatcctggccccaa

SEQ ID NO: 497322 - DNA, 100 bp, Homo sapiens
ggcctcaatatgtgccgccagtgtttccgtcagtacgcgaaggatatcggtttcattaaggcgaggcggctttgcacaaggtggacattcccagggccac

SEQ ID NO: 497323 - DNA, 100 bp, Homo sapiens
gcggaggagggcaaggactacccctttgccaggttcaataagctccgggagtgtgagctgagccctggtgtgaacagggacctgacccggcgcgttcgca

SEQ ID NO: 497324 - DNA, 97 bp, Homo sapiens
agaggactcaggagcaaatcagtaatattatgtttgagaccttcaacaccccggccatgtacgtggccatccaggccgtgctgtccctctacgcctc

SEQ ID NO: 497325 - DNA, 100 bp, Homo sapiens
gtgaagtggtagctattcttcagtctccagatttagcatgtagactgctggggcaatcaatggatgaaagtggattaccacagctgaccagttatgattg

SEQ ID NO: 497326 - DNA, 100 bp, Homo sapiens
agatgggcaaagagtaccgtgagaagatagaggcagaactgcaggacatctgcaatgatgttctggaagatgataagatcagatgggcgtctagatggga

SEQ ID NO: 497327 - DNA, 100 bp, Homo sapiens
gccaaggaagctgtacatgcagctcatcccgcagcagctgctgttcaggcttcagagagcccctgacgcctgcaggaacatggcagaggagacaccgtct

SEQ ID NO: 497328 - DNA, 75 bp, Homo sapiens
gaaaaacagccaccttcagtatctcagtcctccagtgtttggatattcagtataatggaatgtgcttacaagggc

SEQ ID NO: 497329 - DNA, 75 bp, Homo sapiens
tctgactctcggactgagaaacgcaaggctcacagaacatttcctgcctgttgctcacactctgttgtccacagc

SEQ ID NO: 497330 - DNA, 100 bp, Homo sapiens
gcggactgcgagggaaagggggccttgttgagtccgccagtgtgtcccggcatggatatccggaacaacctcactaggttgcatgagctggagaattgct

SEQ ID NO: 497331 - DNA, 82 bp, Homo sapiens
atttcaacgtgcgtgtcacccacgcagacatcttcagccgctgccagatcctgaacccgccgccctccccggccacggaccc

SEQ ID NO: 497332 - DNA, 96 bp, Homo sapiens
gagtttcatggcacctattgaccatactacaatgaatgatgatgccaggagcctctgaagctcccaccaggccagctctcctcccacaacagcttc

SEQ ID NO: 497333 - DNA, 97 bp, Homo sapiens
cggaggcggaagcaggactcggggcacttggggacgtccagatcggtgacatcgtcacagtgggcgagtgccggcctctgagcaagacagtgcgctt

SEQ ID NO: 497334 - DNA, 100 bp, Homo sapiens
acagaaagaagtctcatcttcctttgaccacgttatcaaggagctggtggaggccattgtcttgccaatgaaccacaaggagaagtttgagaacttgggg

SEQ ID NO: 497335 - DNA, 117 bp, Homo sapiens
gttcactaccctaataagacctcagcttccctcgggaggggagatgagtatgatgtatgtgccatttgtttggatgagtatgaagatggagacaaactcagaatccttccctgttcc

SEQ ID NO: 497336 - DNA, 75 bp, Homo sapiens
ggcatagtgtcctgggatacattttcggtggcgttcattaagaagattccaactccacagagtgaccagagagag

SEQ ID NO: 497337 - DNA, 100 bp, Homo sapiens
tatggaacgtgaagtagcagagtgaattctctggatctttgtcaggtcaagagcaatctgaatccaaatgcaaaggagtttgttcctggggtgaagtacg

SEQ ID NO: 497338 - DNA, 97 bp, Homo sapiens
tgatctctttgatgagtttgacaaggagttctgggaaatcgttcattcatttacagatgaacagaaaagactcttcttgcagtttacaacgggcaca

SEQ ID NO: 497339 - DNA, 106 bp, Homo sapiens
ccgcgcgcagggcctgcagcgggagctggacggcgagcgcgagcggcgcgagaaagtattagaaaactactcggatgctccaatgacaccaaaacagattctgcag

SEQ ID NO: 497340 - DNA, 75 bp, Homo sapiens
cacagtcgggggtgtaggttatggggattgactttgaagatgtgattgcagaaccagaagggacacacagttttg

SEQ ID NO: 497341 - DNA, 80 bp, Homo sapiens
gcgggtgcctttgaaaatcaacgacaacttgagcacagaaagcatcacagtgcagactatgatgaacaccttacgggaca

SEQ ID NO: 497342 - DNA, 51 bp, Homo sapiens
gagctgcagtctttgtgggacaagacgttggacctctcgaacaaccagctg

SEQ ID NO: 497343 - DNA, 100 bp, Homo sapiens
gatgatgacatttatgatgggattgaagaggaagatgctgatgatggcaaactgaaaccgtgtcagttcagtcttcggtattggggaagggtgtaaaaca

SEQ ID NO: 497344 - DNA, 97 bp, Homo sapiens
acgttcttgttctgtggagaataacggctgcacctggagattgacgcagagtgggcggcggtggtggtttggtgcacctcgatttggaggaagtagg

SEQ ID NO: 497345 - DNA, 75 bp, Homo sapiens
atgaagaagttattcaagatgatatacatcagtcaagtatgtgaggatgtcttctctggtcctctgaactctgct

SEQ ID NO: 497346 - DNA, 51 bp, Homo sapiens
cgcccgtccacacccgccgccagaattcgacaccaaattttggaacttaaa

SEQ ID NO: 497347 - DNA, 100 bp, Homo sapiens
tggaccagttcagcctattccttgttgagcatttcctccctctgctatttatacacggaaagacttactacagcgatctacccatattgccaccaagact

SEQ ID NO: 497348 - DNA, 51 bp, Homo sapiens
gagcccatcgtgcgggtcttgcaaaggttgaatgcctttgagaacttgatg

SEQ ID NO: 497349 - DNA, 74 bp, Homo sapiens
caaggccaagtattgaaattggaggctaagagacgagttgtactgctgtcacaggaaatggacgctggattaca

SEQ ID NO: 497350 - DNA, 76 bp, Homo sapiens
cacacagctgcttccattggccagtatgaagtggtgaaggagtgtgtgcagcgaactctgtttaaggagagcagac

SEQ ID NO: 497351 - DNA, 83 bp, Homo sapiens
cgcagctgcagccgcctgaccacggcgactggacttacgaggagcagtttaagcaggaatgtgggtgccggcaggacaggcga

SEQ ID NO: 497352 - DNA, 82 bp, Homo sapiens
cgacctgacgagcccctacctccccaacggatcgctctcgcccaccgcccgaaccatgagattgtggggaacctgggtgaag

SEQ ID NO: 497353 - DNA, 50 bp, Homo sapiens
taaaacattccaaggacatacgtatttttccagaacagatcgtgtattga

SEQ ID NO: 497354 - DNA, 74 bp, Homo sapiens
ctttccttacctgtttttccagctcacccactgccagcagagaactgccattggatgtccagaatcccctgtag

SEQ ID NO: 497355 - DNA, 100 bp, Homo sapiens
ggccatggtcagcgtgaacgcgcccctcggggctccagtggagagttcttacgattctgcttctcagaagatgcactattatagatactctaacgccaag

SEQ ID NO: 497356 - DNA, 89 bp, Homo sapiens
actcttcgagatggttcttggtcctgcagcttataatgttccattgccaaagaaatcggaattacatgaacgacagccttcgcaccgac

SEQ ID NO: 497357 - DNA, 50 bp, Homo sapiens
gcctggactgcattgtcgaatggtccaagacctgcaggctgggacaatga

SEQ ID NO: 497358 - DNA, 75 bp, Homo sapiens
ctcagaactactatattcagtggctaaatggctccctgattcatggtatacatccccagatttcctctatattcg

SEQ ID NO: 497359 - DNA, 100 bp, Homo sapiens
cttttccaacatcaagatcttcctggtgtccgagtgcgccctgatgctggcgcagggcacggtgggcgcctacctgtcttcaggaaccagtattactgtg

SEQ ID NO: 497360 - DNA, 75 bp, Homo sapiens
cgcaactacaacagccagacagccttccagtctgcgctcctcagaccaccggcaggtgaacagcctgatgcagac

SEQ ID NO: 497361 - DNA, 75 bp, Homo sapiens
gagttctttgtggatggacttgattctgatgagagcttcagaggatgattccgaagaagacggagaccataacag

SEQ ID NO: 497362 - DNA, 99 bp, Homo sapiens
cgcgggggctgtggctccgggactgcgaataccctctaccatctgctttggtcagggtgccgctcgaggatttaaaagcaacaagaagaaaaccaaaca

SEQ ID NO: 497363 - DNA, 75 bp, Homo sapiens
gaaagtctcatgaatggaccagtgcagaaaacatatgaccgctgccccctggagctggtccgctgcatccggcac

SEQ ID NO: 497364 - DNA, 87 bp, Homo sapiens
agtttctgagcatccctgcaatgaagagaacccagggaagttcctttttgaagtagttccaggaattgcattttgtgaaaaaagaac

SEQ ID NO: 497365 - DNA, 100 bp, Homo sapiens
gcagagaccatggagcttcttgggacagagcagaatgggctgatatagatccggtgccgcagaatgatggccccaatcccgtggtccagatcatttatag

SEQ ID NO: 497366 - DNA, 90 bp, Homo sapiens
gttcgcttttcagcacctccaaattctttggtttctttttttgatgcatctctacctggaactttgccgacaatgattgaagctcacgtt

SEQ ID NO: 497367 - DNA, 100 bp, Homo sapiens
cctgcttttcggttccgggtcttggccccgtccttacctcacagttattttaccaagaaaatggtttgcacgactttgaacatatactatccatgctgat

SEQ ID NO: 497368 - DNA, 100 bp, Homo sapiens
ctgacacaaacttcaggaaaggattttgcacttgtgcagaccgggcgagcagagtaagaagcagagtgcagacatcctcagcaccatcggctatgacaac

SEQ ID NO: 497369 - DNA, 101 bp, Homo sapiens
cacaacatggcctcctccgcctcctcctctcccgcgggcaccgaggactccgctcctgcccaggcactactgcagtcttcagttaagcaacaagtagaagc

SEQ ID NO: 497370 - DNA, 90 bp, Homo sapiens
gcggaacgaggctttctgtcgttaatagggcagaggtggaggagacactgaagcgactgcagagccagaagggagtgcagggaatcatcg

SEQ ID NO: 497371 - DNA, 128 bp, Homo sapiens
agagttcacgatcctgtaactgccaaacccaagttggttggagatgtggattttgaaggatctagtgaaaagccatttgatgtatgcggtcagagaagaagtggaggtcctcaaagagcaaatcaaag

SEQ ID NO: 497372 - DNA, 82 bp, Homo sapiens
gcccctcgtacgggctgtcggccgaggtcaagaaccggacggagtctggctctgtcaccctgtctggagtgcggtaacacga

SEQ ID NO: 497373 - DNA, 100 bp, Homo sapiens
gggcctgctggttttgggggggagaaggagagaggggactctggacgtgccagggtcagatctcgcctccgaggaaggtgctggctgctgtctacaaggc

SEQ ID NO: 497374 - DNA, 100 bp, Homo sapiens
ggaccccaggagccggcgcccccgccctgtaggtacaacttggccaagtagaaatcaaatgccccatcacagagtgttttgaattcttggaagaaacaac

SEQ ID NO: 497375 - DNA, 75 bp, Homo sapiens
ggtgctgagccaggagcagcagcctttctagacacctatggctgccgatgaaggctcagcagagaaacaggcagg

SEQ ID NO: 497376 - DNA, 74 bp, Homo sapiens
ttttagatgagccccgaaaggccgggcaggagtgagctgagtcgacagaaacttcatacccaagagctgctttc

SEQ ID NO: 497377 - DNA, 75 bp, Homo sapiens
ttcagtgagcaatgctttaaactggagagaattcagttttattcagtttttggctttcacccccaaccagtgacc

SEQ ID NO: 497378 - DNA, 97 bp, Homo sapiens
ggacacttttcttcagaagctggtcgccgccggcagacatgtcatgctgcccaaggacatagccaagctggtccctaaaacccatctgatgtctgaa

SEQ ID NO: 497379 - DNA, 51 bp, Homo sapiens
gttaatggagccaaatttaataaagccttctgtggacgattacatggggat

SEQ ID NO: 497380 - DNA, 83 bp, Homo sapiens
ctgacaggggggcctggccgcgcagccgatgagcagcaccagcagtaagagggctccgaccacggcaacccagaggctgaagc

SEQ ID NO: 497381 - DNA, 89 bp, Homo sapiens
cattcagtctacggctggggccgtcccagttcgcaatgagaaagagccaactgggagccgggatgggaaactactaaagtttgatgcac

SEQ ID NO: 497382 - DNA, 76 bp, Homo sapiens
atgaaatctgccatcgtctttctttgactagaccttcaatggagaaaccatctctcttatttagtgcaacttttcg

SEQ ID NO: 497383 - DNA, 83 bp, Homo sapiens
gctgcttgcattcttatttagaggatcaccggcgtaatcaacccagcgttggacaaatactttccgtcagactctggagtgag

SEQ ID NO: 497384 - DNA, 82 bp, Homo sapiens
tctgctggaggcagcgccatatcctggaggtgaagattggcggcagtaagcacacaatgaatgatcacctgcatgtcggcag

SEQ ID NO: 497385 - DNA, 100 bp, Homo sapiens
ggagaggggcgccacgccgccgtggccgcaggaacaagactgccaatggagactgccgcagagacccccgggagcggagccgcagccccatcgagcgcgc

SEQ ID NO: 497386 - DNA, 129 bp, Homo sapiens
ccatcaaccgccagatcaacctggagctctacgcctcctacgtttacctgtccatggctcttactctctgtcagtccgcctcagccgccctgcatcctgggaccggatcagacactacaggatccactg

SEQ ID NO: 497387 - DNA, 97 bp, Homo sapiens
ctcaaacaggtcgcttctcgggagttcttggtgttggaatattttacagcaaagcagtccactattcctgatcagagaactccagttgcttcaacac

SEQ ID NO: 497388 - DNA, 90 bp, Homo sapiens
aggatatcatgcccctgtggcattgcttaatgatataccacagtcaacagaacaggaagagagaagggcacagttacctaagtatcaacg

SEQ ID NO: 497389 - DNA, 115 bp, Homo sapiens
aaataacgggagggaggacctggtccagcttcccttcctcaaataaggaaattgacacctggcgtggagatctataaggacaggcagaaattctcagaacaggttttcaaagtgg

SEQ ID NO: 497390 - DNA, 76 bp, Homo sapiens
cacgcgcagccccggcctctcggcctctgccggagaaacagtgtcacccagctctggatgggcagcgtggcaagtg

SEQ ID NO: 497391 - DNA, 83 bp, Homo sapiens
ctggtcgacttcgccggagactgccagatgcaatggatcaactagaacaaagagtcagtgaattctttatgaatgcaaagaaa

SEQ ID NO: 497392 - DNA, 100 bp, Homo sapiens
gtgtctgctcctgtcgccttcgcctcctaatccctagccactatggacctcagcagccatgtcgaagccccatagtgaagccgggactgccttcattcag

SEQ ID NO: 497393 - DNA, 73 bp, Homo sapiens
agcgaagacgcggagaaaaaagttctcggtcattcctgcacaggacagtccaccatggcctcagatcaccaga

SEQ ID NO: 497394 - DNA, 82 bp, Homo sapiens
tggccacttgcttgggatcctttatcctggtcatcttctatttccaaaaactgccattggatgtccagaatcccctgtagtt

SEQ ID NO: 497395 - DNA, 101 bp, Homo sapiens
aggagcaaaagaaaaaagaatgggtcaaccaagaacgtcaaacactccaacgattgagagcatttaaagatactctgatgccagtatggactggagatgat

SEQ ID NO: 497396 - DNA, 98 bp, Homo sapiens
ctggaggttattggagaaaatggcaagcccagctcattgctatggacagtgctatcaccctgtggcagttccttcttcagctcctgcagaagcctcag

SEQ ID NO: 497397 - DNA, 100 bp, Homo sapiens
ctggagtgaggaggaccgggagctggctctggaggctgcggaggcgacgccggagagaacgaagcctcggctgggagcgtgataatatgcagcatgcata

SEQ ID NO: 497398 - DNA, 90 bp, Homo sapiens
acttgggttcaggaccagttggatgatgagacgttatttccatcaaaaattggtgtggatgaggtcaccattgtcaacattttgaccaac

SEQ ID NO: 497399 - DNA, 75 bp, Homo sapiens
ggaaaggctctcagtgaaaaagcgttgtccattaggaagcacgatcttgaaagtgaaattacttgacatgggtga

SEQ ID NO: 497400 - DNA, 115 bp, Homo sapiens
cgaccctcccgcagcctgcctttccttccccctcggaaaatggttcccactgccgggcgaggacccagatgatgtggtaccagttggccaaagaagagcctggtgttggtgcatg

SEQ ID NO: 497401 - DNA, 100 bp, Homo sapiens
tgcatcctgatcctgggcctggacaatgctgggaagacggctgttttggagtcagcggaagatcaccaaggccagggagtggttccaccgcactgtgaag

SEQ ID NO: 497402 - DNA, 90 bp, Homo sapiens
ggatcatggccgcagccgctctggggcaggacaaattgatggccaggagatcactgccaccgccgtgctggccccctggcctaggccacc

SEQ ID NO: 497403 - DNA, 82 bp, Homo sapiens
ctttgaggtgcttgtcggtctggactgatgaaaatccatatgatacttggtgttagatgaagctgatcggatgttggatatg

SEQ ID NO: 497404 - DNA, 90 bp, Homo sapiens
cctatcacctgccagctcatcacaaagagagaaatatgagttggagggaaggaaaagtggttctactaatgttccaaaatcctcatcaga

SEQ ID NO: 497405 - DNA, 83 bp, Homo sapiens
aggcccagactggtccatccccatcttggactttgtggaacagaaatgtgaagcagaaaaatatggctcaggagactaaccag

SEQ ID NO: 497406 - DNA, 100 bp, Homo sapiens
gcatgtctcccgaggagtgcaggcgcttcaccacagacgttgttgacctcctgtactggagagacattaagaagactggagtggtgtttggtgccagcct

SEQ ID NO: 497407 - DNA, 100 bp, Homo sapiens
ggggtccctgttgctcaccccgcaggagaacgagtccctcttcactttcctcggcaagaaatgtgtggtgaatctggattgggaaagtcgacattaatca

SEQ ID NO: 497408 - DNA, 50 bp, Homo sapiens
ggaagatgtggctgtcatctgctcagagaaagcttcttgctatctacctc

SEQ ID NO: 497409 - DNA, 90 bp, Homo sapiens
gtgttaaatctccttggtgtgatgtttttgacatagatgatgcaaaggctgttgtacagtggcctgattatagctcactgtagcctcgaa

SEQ ID NO: 497410 - DNA, 98 bp, Homo sapiens
tgtggccgagttgctgttgccgggtgatagttggagcggagactatgaagttggagcccttgtttttgacattggatcctatactgtgagagctggtt

SEQ ID NO: 497411 - DNA, 50 bp, Homo sapiens
attttatctgccacgacccagaaggacatcaacctggagaaagactggaa

SEQ ID NO: 497412 - DNA, 90 bp, Homo sapiens
ggccgcaggcgggacccggcggggcgcaccacagagaccggcttcaatatcttcacccagcatggtgaaaatggcattacggacatcagg

SEQ ID NO: 497413 - DNA, 100 bp, Homo sapiens
cggagtccataccggagcgcaatggcgtccaaccccgaacggggggagattctgctcacggaactgcaggaggctctgtcggtggtgagcgacgaccagt

SEQ ID NO: 497414 - DNA, 100 bp, Homo sapiens
gaatagctggggctacaggcgtgtgtcactgcgcccagttggattggatgctgctggcaagacaaccattctgtataaactgaagttaggggagatagtc

SEQ ID NO: 497415 - DNA, 75 bp, Homo sapiens
ggattggtgggatgtttcggaatgggcattgtcgccaattttcaggccttttcagatattaatggcaaagttcag

SEQ ID NO: 497416 - DNA, 80 bp, Homo sapiens
gatggtcttgaaacacaaatggtttttgattactcttgtctctgctgctcctgggaaagtgatttgtgaaatgaaagtag

SEQ ID NO: 497417 - DNA, 95 bp, Homo sapiens
tgcggctgcgtggggctcggccgcgcggactgaaggagactgaagacgaagttatacggaagcgtctcctcattgatggagatggtgctggagat

SEQ ID NO: 497418 - DNA, 98 bp, Homo sapiens
tgaaaccaccgtggaagtcgcctggtgtgaactgcagattgaaaatcttcaagagcagcttagagacaaggaaaagcagatgagcagcttgaaagaac

SEQ ID NO: 497419 - DNA, 83 bp, Homo sapiens
ctgatgtgaaaaataccacgacaaaaccaccctagtagttaacctgcagtacagtgaagttcaagatcgggtcatgctcactg

SEQ ID NO: 497420 - DNA, 82 bp, Homo sapiens
gattacccgttaagtcccccaaagatgagatttacctgtgagatgtttcatcccaacaatatgagagatagcacagatggac

SEQ ID NO: 497421 - DNA, 98 bp, Homo sapiens
tttctttaaggatggtttagaaatggaaaaatgtgctaaagaacgtgccaatggaatggagcttgatgggcgtaggatcagagttgatttctctataa

SEQ ID NO: 497422 - DNA, 75 bp, Homo sapiens
gtgatgttggagaactacagaaacctggtctccctagtcatcttatcccatgcgtgtgaacagatgcaaggaaat

SEQ ID NO: 497423 - DNA, 82 bp, Homo sapiens
tgggtggacgctgaggaatgccaccgctgcagggtgcagttcggggtgatgacccgtaagcttgctgagcgagagcgagaag

SEQ ID NO: 497424 - DNA, 80 bp, Homo sapiens
cggcctagtgcgccagggcctcaagtgcgatgatccgtgggcgtgagcgcttcgagatgttccgagagctgaatgaggcc

SEQ ID NO: 497425 - DNA, 100 bp, Homo sapiens
cggctactacctggagatgctgatcgggacccccccgcagaagaatcatgtcaaccctgccatggacttcacgcagactccacctgggatgttggctctg

SEQ ID NO: 497426 - DNA, 100 bp, Homo sapiens
gatttacgtggagatcaagcgcagcgatgctgatcttgcatctttaatggataaaacatttgagagaaagttgcctgttagttctttaacaatatcacgg

SEQ ID NO: 497427 - DNA, 74 bp, Homo sapiens
agaatgctaaggaagctgtggcaatatggcatgcagctgtaccagaattatatgcatccatatcaaggtagaag

SEQ ID NO: 497428 - DNA, 100 bp, Homo sapiens
tggagactacaatatggatggctatccagacgctctggtcatactaaagaacacatctggaagcctagatgatgaactggattctttccatgatttgaag

SEQ ID NO: 497429 - DNA, 51 bp, Homo sapiens
attgaagctgactactaaggagaataagttaagttgcttttacagagttaa

SEQ ID NO: 497430 - DNA, 51 bp, Homo sapiens
ggctgaggagagagtcgcgacgagccaaggattgtcaccagtgaagaggtc

SEQ ID NO: 497431 - DNA, 75 bp, Homo sapiens
atatccatgtcggcttgtagagagattgcattgtcgccgtgatcctgaaggcgctgacctacgacgagaagcggg

SEQ ID NO: 497432 - DNA, 74 bp, Homo sapiens
ctcattttcagtggtgccaagttcatatcctgctggtttaacagtaacaacatgctgtaccccaaggaagacaa

SEQ ID NO: 497433 - DNA, 90 bp, Homo sapiens
cctggctgctggagagttgaatgccagccaccagccatgggtttggccggaagaatgtgctgttcgtgaccatgggcatgcagacaggct

SEQ ID NO: 497434 - DNA, 90 bp, Homo sapiens
ctgattttgaggtgttcgatgctttaaagttagattctatggaaagttctgagacatcttgtagagagccagcccctgggcaacaaagtg

SEQ ID NO: 497435 - DNA, 98 bp, Homo sapiens
tcaagactggtccacggagtgtatgaccacaaacagccatcaagtatgagaataatgttatcactattgatctggttcaaaattcttctcaaaaaact

SEQ ID NO: 497436 - DNA, 71 bp, Homo sapiens
tatatttggcatactttgtgcatgcagcagagtcacctgatatgaaaaaggagcaagacccccctgccaag

SEQ ID NO: 497437 - DNA, 100 bp, Homo sapiens
gagaaacaagaaaatggactccctggctgctggagagttgaatgccagccaccagccatgggttcagcagactgtacaggatctttttggcagagcccca

SEQ ID NO: 497438 - DNA, 83 bp, Homo sapiens
tatatgatgctgaattgttcaacatgcagccactattttcaggtataatgggtctctcccaaatggcgatagaggaaggagga

SEQ ID NO: 497439 - DNA, 109 bp, Homo sapiens
ccacccacgacgaggcggtgcaggcgttgaagcgcgcgggcaaggaagtgctgctggaaggaactgcaagcacatgttgaccagataactgaaatggcagcagtaatga

SEQ ID NO: 497440 - DNA, 98 bp, Homo sapiens
cggagcaccgagctcgcggcacggtaggaggattgtcagtggcttcgccccgaggagagctgactgccctgggctgctgcctccggcagagctgagcc

SEQ ID NO: 497441 - DNA, 90 bp, Homo sapiens
tggaaatttgacacagagtgctataaaaagtatggaaaaatgtggggggacctccaggtgcatggattggtgctgcccctcatgctgccc

SEQ ID NO: 497442 - DNA, 75 bp, Homo sapiens
gtgtgtttctgagagcaaatgttacttgttccacgtttcttccatgtcagatgatgtgaagaaaggaggccctgg

SEQ ID NO: 497443 - DNA, 97 bp, Homo sapiens
atctgcagttccaatttcccaaaaagaacagcaaggccatcgtggacgggaacctgaagctgatcctgggcctcatctggaccctgatcctgcacta

SEQ ID NO: 497444 - DNA, 100 bp, Homo sapiens
acgggccggcccagagctcccgggtcgtctttcgtgtggccgcgaggtgattgatatgcccgagcacaaccctggcaatttgggaggaacaatgagactg

SEQ ID NO: 497445 - DNA, 100 bp, Homo sapiens
ggcctccccagccatgcagaactgggcataaggaaatggtggcaggcacttcctcctaacaagaaggaagtagttaaagaaaatataaggaagaataaat

SEQ ID NO: 497446 - DNA, 75 bp, Homo sapiens
ctcttctgggagtgctgttctgctttaataagcgagacctagagaagaagaaggaggttcctgctgtgccagaaa

SEQ ID NO: 497447 - DNA, 90 bp, Homo sapiens
ctgtcctgaatgtggcttggttgtaggtctcctctgagcctccggcctccataagacccaaaacagatgacacctcttcccagtcccccg

SEQ ID NO: 497448 - DNA, 75 bp, Homo sapiens
agtaacggcacagcctctcagtcaacatctccttcgcagccgcgcaaaaaaagctggtacaaccgtctgtacatt

SEQ ID NO: 497449 - DNA, 90 bp, Homo sapiens
catcggcaagggcaacttcgcggtggtcaagcgggccacgcacctcgtcaccaaggccaaggcctggaagaaacgctggtttatcctgcg

SEQ ID NO: 497450 - DNA, 87 bp, Homo sapiens
agagagaggacggcagcgccaagcaggagctgaaggacttcaggccctgggaggagcggggacactgaggacctctctccaaattgg

SEQ ID NO: 497451 - DNA, 73 bp, Homo sapiens
tcgtggattgttgggaattggagcagcttttcatgcaacacccaacacttataagcggaagaacacagaaaca

SEQ ID NO: 497452 - DNA, 101 bp, Homo sapiens
gttgaatgagaaccctacttgcctaaatgaggaatgtctttcctaccatctaaaatacgaaggtttctggctgggttcctgattatgtcactgtaataaag

SEQ ID NO: 497453 - DNA, 82 bp, Homo sapiens
ctgggtgaatgaggctcaggaggcagcatccagtgataacatcatggtccaggccggctgcgtgcacttttcctacaaagca

SEQ ID NO: 497454 - DNA, 100 bp, Homo sapiens
gctgtgtttgatgtccggctgagtgggaagaccaagacagtgcctggataccttcgaataggcacgttcggaacgttaccgccatctgggctccgaggac

SEQ ID NO: 497455 - DNA, 100 bp, Homo sapiens
gcggattcctcggggcgaggcgctgggtccggcgccagctgccagtcgaggaaccgaacccagccaaaaggcttctctttctgctgctcaccatcgtctt

SEQ ID NO: 497456 - DNA, 96 bp, Homo sapiens
catgggattttttaccaaggaagaatggttaaagggaatgacttcattacaaccttcttcaggaacaatttttaatgatgctttctggctggattt

SEQ ID NO: 497457 - DNA, 90 bp, Homo sapiens
atctccttggccattggaccatttgaaatactggtagatccatacatgcatgaggtgatcacgaacaaaggtattggcagaagattttgg

SEQ ID NO: 497458 - DNA, 100 bp, Homo sapiens
tgaccgaagccatgctgggtgtgccccagctttaccgcaaccaccgccaccagtccacggagggcatgagaacactatggctatgcatcctccaacgtca

SEQ ID NO: 497459 - DNA, 100 bp, Homo sapiens
cagaagtccttcaaccctgcagactgaacctccattgaatactccagaaaacagggaatatactgctgaaataatgtttgagtccttcaatgttccaggc

SEQ ID NO: 497460 - DNA, 98 bp, Homo sapiens
ctgggcgaaaattggatgtgaaaatgaagccagaccgaggtctctaattaacagaagatggcaaagcccagccacagcagctatgtccttcagcagct

SEQ ID NO: 497461 - DNA, 100 bp, Homo sapiens
tcctgggaaggtggagccaccagcctctccttgaaattggcgtgttagccaaggctttcattgaccaagggaaactcatcccagatgatgtcatgactcg

SEQ ID NO: 497462 - DNA, 92 bp, Homo sapiens
ggcgcggcctgatctaacccagccaggcaggtggaatggctgaaaaatgaagagcccattgactctgaacaagacgagaacattgacaccag

SEQ ID NO: 497463 - DNA, 96 bp, Homo sapiens
cctatgtacctgttaccactttcaaaatggtagcaactgcccttgctaatcaccgtaacctcggctgagaaagaagaggaagcgaaatccaagatg

SEQ ID NO: 497464 - DNA, 100 bp, Homo sapiens
caaaggctactttgacgccctggtgaagatgggggagctggccagcgagagccagggctccaaagaactcgtcgtgccaagcggacctcgtgaaggacaa

SEQ ID NO: 497465 - DNA, 100 bp, Homo sapiens
caagctccatgttttcacatcttccctttgactgtgtcctgctgctgctgctgctactacttacaaacctagaggatcaagacataatgggagcattttt

SEQ ID NO: 497466 - DNA, 100 bp, Homo sapiens
aagaaattggagaacttcttgagtcgaaagaggcgacgaaatgcaggacttgtttacactgggcatgtaaacgaaaccatggtcaggtggtctcttacct

SEQ ID NO: 497467 - DNA, 83 bp, Homo sapiens
agattcttcaaggtggggttggcatcccccacatacgttggatgaaaaatctgacaaacagtatgctgaaaattatacaagag

SEQ ID NO: 497468 - DNA, 75 bp, Homo sapiens
tcgtcaaactccaagaaggcaagcattttggccagacttcagatagtgctgcaagagggaaattcccaaaagaag

SEQ ID NO: 497469 - DNA, 83 bp, Homo sapiens
ggaaatcgggctgaagcgactgagtccgcgatggagatatgggacacagcaggacaggaacggttccagtctctcggtgtggc

SEQ ID NO: 497470 - DNA, 83 bp, Homo sapiens
cagacggggtgatgactcaagacctggtccttggagaccattagtcaagccaggttctgccattactgcaatagccacatctg

SEQ ID NO: 497471 - DNA, 90 bp, Homo sapiens
aaaagagccctggaatatgaagcaacatgagatggtggatgaacccacagataaggagggttcctgcccccaggtgaacattaactttcc

SEQ ID NO: 497472 - DNA, 73 bp, Homo sapiens
tgggatgaacatgggcaggataaatggccttaaattccacaacctcatcatctaccacctttggtgctttcag

SEQ ID NO: 497473 - DNA, 83 bp, Homo sapiens
cctgctcctgtgcctgctgcaggccgctccaggaaatctggcattttttaaagtttgcgccccacaaagaggaaatattccaa

SEQ ID NO: 497474 - DNA, 74 bp, Homo sapiens
gcctccgcctgaaaaaacgccagccaagaagcatgtgcgactgcaggagagggcatgaccctggattgtgtgga

SEQ ID NO: 497475 - DNA, 73 bp, Homo sapiens
ggaagaggaggaagaaaaatctgaggttatcaatgacgagcgaccgtggcagccatgtattacagctactaca

SEQ ID NO: 497476 - DNA, 100 bp, Homo sapiens
tggctgtgcgacctgcagggactggcagacccgtagctaagacgccaggatttcctggaagcagagaaatggttatacattggctcttcaaagacgttca

SEQ ID NO: 497477 - DNA, 90 bp, Homo sapiens
ccgcgatgagccttcagcctgccgggcaggggacgtgaacatggatgaccctaagaaggaagcttttcgctgtggcctgcagtttttagg

SEQ ID NO: 497478 - DNA, 78 bp, Homo sapiens
aagagcaagcctaactcaagccattggcacacagagccatccaaaactctgtttgtcaaaggcctgtctgaggatacc

SEQ ID NO: 497479 - DNA, 82 bp, Homo sapiens
catggacatgagggtccccgctcagctcctggggctcctgctgctctggctcccagctcccaagtggtttgacgggcagcgg

SEQ ID NO: 497480 - DNA, 100 bp, Homo sapiens
ccgccggcatggccggcccgctgcccgacgagcaggacttcatccaggcctacgaggaggtgcgcgagaagtacaaaggcccctggccccaacatggccc

SEQ ID NO: 497481 - DNA, 100 bp, Homo sapiens
ctgggcgccgcgccgcacgagcaccagcctagagccaggcggatcctggtccccctggtgagccaggccctcgggggccaagaggagtcccaggacccga

SEQ ID NO: 497482 - DNA, 75 bp, Homo sapiens
tggtctcctactcccagatgcatccgtgtcaattttgtatcagattgtaccatctcataaattgatgttggaatt

SEQ ID NO: 497483 - DNA, 75 bp, Homo sapiens
cgcttttgctatggccttcgtctgtgccggcttatccgatgatacatttgatattgcctggaatggcagaactgg

SEQ ID NO: 497484 - DNA, 82 bp, Homo sapiens
ggttatcatggattcccagcgcgggacagccaggtatggcccatctcctgtacgcttggagcgacctttggctacgtggctg

SEQ ID NO: 497485 - DNA, 100 bp, Homo sapiens
ccgctggagagggcccagcatctgcaaagctcccggcaccgccgagccctggacaccaactattgcttcagggtctccagaagcttccactgactgctgt

SEQ ID NO: 497486 - DNA, 98 bp, Homo sapiens
gcacaggtcacagtaaggccaaaaatgtgcatactcacagagttagagagagggatggtggtgactgctggctgctggcagccattgcctccctcacc

SEQ ID NO: 497487 - DNA, 90 bp, Homo sapiens
gcctgcgagggttgaagattgtgaagcaatagcctaagagttttgccgaattgacaagcccctgtgtcacagtgaggatgagaaactcag

SEQ ID NO: 497488 - DNA, 153 bp, Homo sapiens
ctggatcaaggacagacagctcaccaaccgtgacagcaccatactggaacttcaaaaagttctgaaaacatgttggttaacgtccctaaaacccgccggactttctgtaagaagtgtggcaagcaccaaccccataaagtgacacagtacaag

SEQ ID NO: 497489 - DNA, 75 bp, Homo sapiens
gcgcgcgcgaagcgagcgagaaggcacggagtcgccgcggagcgcagagaggtgagagacttcagaggctgccct

SEQ ID NO: 497490 - DNA, 75 bp, Homo sapiens
ggggcatgttcccgaggctgtcaccagaattccaggttaccgagttggttgttattactgccttttccaaaatga

SEQ ID NO: 497491 - DNA, 87 bp, Homo sapiens
tgtcataatccacatgctaactcgatatgctcggacacagtttgtcagcccttggaaagagaatactgggatcttcagtggcaggag

SEQ ID NO: 497492 - DNA, 100 bp, Homo sapiens
ttaaggaggcagaattacgattatgcagtgtatctactaacagtgttataccatgagtcttggggagtaagccctgaaccaattcatcttaagatttttt

SEQ ID NO: 497493 - DNA, 127 bp, Homo sapiens
cggatcaccggcgtgccccaccatgtcagacgcagccgtagacaccagctccgaaatcaccaccaaggctactgcagcactggggtgtcagttgttggtccgacccagaacgcttcagttctgctct

SEQ ID NO: 497494 - DNA, 100 bp, Homo sapiens
caacggctcaagaatttcaagaacaaaggccgcgacttggaggaagatgttaccgagtacttcagtgaattccttagtgcaggggaacggagtcttgaat

SEQ ID NO: 497495 - DNA, 126 bp, Homo sapiens
ctacaactcgcccaccacgtccagcttcaccacgcggctgcacaactgcaggaacaccgtcacgctgctggaggagtggcattttgtcagcacttgggaacttcctggcccagatgattgagaaga

SEQ ID NO: 497496 - DNA, 50 bp, Homo sapiens
aacagagccaacatttcatagcaccatggagaataaaggcagccccgttg

SEQ ID NO: 497497 - DNA, 83 bp, Homo sapiens
cggctacagcctgtgcccgggccgggagctgggcagctgagcgggctttggacaccatgaactttgatgtgattaagggaaag

SEQ ID NO: 497498 - DNA, 51 bp, Homo sapiens
cctgacactgagaatgaagagtatcacagtcccatcagggccctggatccc

SEQ ID NO: 497499 - DNA, 83 bp, Homo sapiens
accatttctagcttgttgaaacccaaaactaatgagtgaccgaggaggtggcgttcctttgaggaaaattgacagacttttca

SEQ ID NO: 497500 - DNA, 101 bp, Homo sapiens
acatccttgtctgtgaagctaaactcaatgctgctgtgtgggaagaagatttgtaaagaaaactcttaggaatctgagaaaaaggggttgattgaaagaat

SEQ ID NO: 497501 - DNA, 75 bp, Homo sapiens
ctcaccatctacggcatccggtcaaaatgatgcttcaacacccaggccaggtctctgcctcggaagtgagtgctt

SEQ ID NO: 497502 - DNA, 75 bp, Homo sapiens
aacgaaagcagtgacggaggagcttgtaccaccgctatttagctggtacctactgctatatcacctagtgtgaca

SEQ ID NO: 497503 - DNA, 73 bp, Homo sapiens
cctcagcagcatgaagaagaggacctggatgatgatgtcatcctgacagaaggttcacctttagatgttctta

SEQ ID NO: 497504 - DNA, 74 bp, Homo sapiens
ctgcatcaacctgatcaccagccaggagtacgccgtcaagggaatagcatttcaaggttcagtggaggagaacc

SEQ ID NO: 497505 - DNA, 100 bp, Homo sapiens
accctgaagatgacacaattcaagtaaatgaaccagaggtgaaaaatagtggattacttcaagttaatcagctgtgttcagcgaatacttatgaacagaa

SEQ ID NO: 497506 - DNA, 82 bp, Homo sapiens
cggggcctgcgggcgcccagagccgcgccgtccgcgccgcccgttctgtgtgtaaaggttgccataaaggacaaacaagtga

SEQ ID NO: 497507 - DNA, 98 bp, Homo sapiens
aaaaattctacagagtgggaaaaagtgaagtccctatttgaagaacttggaagtagtcgctactgctgcttcctgtggcctccatggctgaggactgg

SEQ ID NO: 497508 - DNA, 74 bp, Homo sapiens
aaagagtcaacagcagtggcaacaggtggagtctttcattttggatcaggatgatttggaaaatccaatgctgg

SEQ ID NO: 497509 - DNA, 101 bp, Homo sapiens
gagttcagcttccaaagagatacagggcagaggaaaatgcaagaagactgatggagcaggcttgcaatattaaaacaggatttcaccatgttgcccaggct

SEQ ID NO: 497510 - DNA, 100 bp, Homo sapiens
gctcagcctcagaagaaagacgttcaacgacttactggggagagaaagaaaaggaacgggagctgagaggtggcggctttgaaatacatcccatctgtcc

SEQ ID NO: 497511 - DNA, 101 bp, Homo sapiens
gaccgctcaccgcaaccatggtctccaaatccgaccaattgctcatcgtcgtgtccatcctagaaggtgcctgtcctgagacccatggacctgatggtgga

SEQ ID NO: 497512 - DNA, 98 bp, Homo sapiens
gagaccttgaaaggacctctagtttatcctgcaactccagtcaatatcccacttaaatcattccaggtccaagaatgcctcaggatggatcagatgac

SEQ ID NO: 497513 - DNA, 88 bp, Homo sapiens
ggacagctggtgttctccaagctggagaatgggggctttccctatgagaaagataacattaaccaggtggtatttgttggaaatttct

SEQ ID NO: 497514 - DNA, 101 bp, Homo sapiens
ggaaaggcaaaactaggaaaggaaccagtattggccgcagagaataaaggtgttaacagaactgaaatccgacaaccagaggctgaaagatgaaaatggtg

SEQ ID NO: 497515 - DNA, 88 bp, Homo sapiens
ctacctctaacacagtacctgttaacaacgccctgaagaggaaagtgaggatgactctcatctcgaaggcagggatcctgatatttgg

SEQ ID NO: 497516 - DNA, 96 bp, Homo sapiens
tgttaaggattccaagtaactcttatttggggcatcttcctggataccattgtccccaagtatgaggtgaacggggtgaaacctcccattggccaa

SEQ ID NO: 497517 - DNA, 90 bp, Homo sapiens
ctgctgtactgcgcccggcccccacaggacctcaagggaactgtctgggacctttgctcatctgtgtcagcaagttgacgtcacccggga

SEQ ID NO: 497518 - DNA, 100 bp, Homo sapiens
atagacttaaaatatttcccatattatgggaaaaaactgcattttggggggaaagagctcagagatgaggaacagacagctgagagcattaagaaccaaa

SEQ ID NO: 497519 - DNA, 100 bp, Homo sapiens
gtacaatgtcagtgtttacactgtcaaggatgacaaggaaagtgtccctatctctgataccatcatcccagccatcctgagaggcctgaagaagaaaggc

SEQ ID NO: 497520 - DNA, 90 bp, Homo sapiens
cttcactgggcttgctacaatggtcataatgattacggttatcagcaaccgtcgtatcctgaacaaggctacgataggccttatgaggat

SEQ ID NO: 497521 - DNA, 87 bp, Homo sapiens
tttggatcggcatctagtctttccgcttcttgaatttctctctgtaaaggagttggtggctaaaggagttaagagttctgatgtttc

SEQ ID NO: 497522 - DNA, 51 bp, Homo sapiens
aatcagcatgctgtgtctagctcaagtctgtaggtatattgttagagccat

SEQ ID NO: 497523 - DNA, 75 bp, Homo sapiens
cgtggcttccccctccctacagagagatgctgtcccgtggatctcattcgtcggttcggatccaagccagttctg

SEQ ID NO: 497524 - DNA, 100 bp, Homo sapiens
ctgccccgcagtaccagggagcgactgaagtgcccatgccgcttgctccggagaagtgaaaatgcctcgtgtaaaagcagctcaagctggaagacagagc

SEQ ID NO: 497525 - DNA, 100 bp, Homo sapiens
tgtgcagctccctaatgatgatgctcagtttgatgcgtcacactacgacagtgagaaaggagcaacaggtcaccttcaagccagtgtcctgacccagtgc

SEQ ID NO: 497526 - DNA, 95 bp, Homo sapiens
caagcgcttcagcctcgttctctgtgagctgatctgtggatcgcggcgtgtcgggcttcttctcatatcggtaattccactcaggccactgtgag

SEQ ID NO: 497527 - DNA, 100 bp, Homo sapiens
gccttatacagctaaagccatggaaagagtcaaggaaacttttcttttgagctactgacagcttaactcctgtgaacaaaatttggagcatatttgtttc

SEQ ID NO: 497528 - DNA, 76 bp, Homo sapiens
ggaacagcaagaactgcaccgaaccagcgttctgccctaggtccaaatgttaccaaaatcactctagaatcttttc

SEQ ID NO: 497529 - DNA, 73 bp, Homo sapiens
ttctacagacgggctcaagcccacaaagcactcaaggactgtgaggaatgtatccagctggagccgaccttca

SEQ ID NO: 497530 - DNA, 96 bp, Homo sapiens
cttatatggcaatgtggagaaggtgaaattcgatgctactgtgatgctgcccactgtgtagccactggttatatgtgtaaatctgagctcagcgcc

SEQ ID NO: 497531 - DNA, 83 bp, Homo sapiens
gaagaggttgttgttggagaagcaggctggcggaaacccttggattttttatcaagcagaaatgcatcgaacaacgagaatca

SEQ ID NO: 497532 - DNA, 83 bp, Homo sapiens
ctggaagatgggaagaaagaagcagctgccagggcagctgcaatgactctccgcacggtattattgtcattgcaagcactatt

SEQ ID NO: 497533 - DNA, 75 bp, Homo sapiens
accgactggaccgggaaggagcatcccaggacctaccagaatctgaatgacagcccatatcaaggcggtgtattc

SEQ ID NO: 497534 - DNA, 100 bp, Homo sapiens
ggcttcagcagcccgcgcccgggcagggtgttcagacttacatctcttggatatgttgaccccaactgaaagaaagcgacaaggatacatccacgagctc

SEQ ID NO: 497535 - DNA, 102 bp, Homo sapiens
tactctctctttctggcctggaggctatccagctgtctttggtgcaacactaacaaggcttgtctggactacccagttacaagcgtcttgccaccggcttcc

SEQ ID NO: 497536 - DNA, 97 bp, Homo sapiens
gatcccatgcaacagccacgatgtgaagcggggcagagccgggggagcccagcccagccagcctccagggggcagctggcattttatgctatgtggg

SEQ ID NO: 497537 - DNA, 74 bp, Homo sapiens
ttgagaccctgattgaagagagagaagaaagctgtggtgattcgtcacttgtataatgaagataatgttgacat

SEQ ID NO: 497538 - DNA, 76 bp, Homo sapiens
gggaccctgtgccccaactctacttccctctgctccttcccagcacaacattctgaaattttttggttattgtaat

SEQ ID NO: 497539 - DNA, 83 bp, Homo sapiens
agtcgcccgcctcgagccagcccgccagcatgccccagtccaaaggtgacagagctgaatgaacctctctccaatgaagatcg

SEQ ID NO: 497540 - DNA, 50 bp, Homo sapiens
actgggaaacatcattaaatcgcctgatcacttgaacggacatatcaagc

SEQ ID NO: 497541 - DNA, 113 bp, Homo sapiens
aggaaacaagacagttctgtctgcagaagcccattatggctgtaactggagatgacacagattcgagtggtgaatgcatttcgtagttctttatatgaagggttagaaaaacc

SEQ ID NO: 497542 - DNA, 76 bp, Homo sapiens
gctgtggaaagaagttgcaaaacactgggtttatctggcaagactgaggcaaataagactacagaatttcaatgag

SEQ ID NO: 497543 - DNA, 83 bp, Homo sapiens
cccggaccccccgattcaccaacgagccctagtcagcccaaggccaaccccactgtcactctgttcccgccctcctctgagga

SEQ ID NO: 497544 - DNA, 119 bp, Homo sapiens
gattctggccaacgcagacaccatgaaggtgctgggagtgcagcggcctctcctacaggctaggcagctggaagagaaagaccgagtgctaaagaagcaggatgcattctacaaagaac

SEQ ID NO: 497545 - DNA, 75 bp, Homo sapiens
gcttgatcgaaatcgtccacagtgacctcttcacacagcatggggaaggtgtggctcattgactttaatccattt

SEQ ID NO: 497546 - DNA, 83 bp, Homo sapiens
gcaatgatgttggaacttgctcgtgccttagacaagaaactcctttccttaaagacctgcctagagctggaacgttacctcca

SEQ ID NO: 497547 - DNA, 108 bp, Homo sapiens
gggagcggtacctcgcctcggtgcagggctccgccccgtcgcctggaaagagttgtctgctggttctcagcttgaagaagattctgcagtccttattgatcctttttc

SEQ ID NO: 497548 - DNA, 101 bp, Homo sapiens
aaaccgcaagcagttgctaacccagtgggacaggcggattggaagagcgggaaggtcctggcccagagcagtgtggtgtgagatgcacaatgcgaaaccta

SEQ ID NO: 497549 - DNA, 100 bp, Homo sapiens
tactccgccagtgaccctggacagtaacaaaacatataaagcccgagcccaaaccccgccaccatcataggtccaaccgtgactgccagatcgaccagca

SEQ ID NO: 497550 - DNA, 51 bp, Homo sapiens
tgcctttgagcggactcccttttaagcacgtgcagcacatccgcatcgatg

SEQ ID NO: 497551 - DNA, 50 bp, Homo sapiens
ccgccgggtctgaagcctgaacaggctgaatcatgtcagggagatttaag

SEQ ID NO: 497552 - DNA, 98 bp, Homo sapiens
ccaagaacttccagattgagttagaggggcggcaggctcaagcaaagacagcctctgagctttctaaatccatggagtccatgcgtgggcatttgcag

SEQ ID NO: 497553 - DNA, 49 bp, Homo sapiens
gcagaatacagagatatggaatcagcttggatttacactgggcaacgtg

SEQ ID NO: 497554 - DNA, 50 bp, Homo sapiens
ctgaaagcaacctaagctgtggtactgatgctttgggttggaaaaaattg

SEQ ID NO: 497555 - DNA, 100 bp, Homo sapiens
ttccaggaacagctgaatcaatgtgctgagctgctggagaaattggaaaagctatttctcaacgggtgaaaaccaagacagctgccaaatatggcctttc

SEQ ID NO: 497556 - DNA, 75 bp, Homo sapiens
agcttcagagttctttgtggatggacttgattctgatgagagatgctgagctttttataccaccaaagatcaaca

SEQ ID NO: 497557 - DNA, 100 bp, Homo sapiens
caaagagtttggggtgttccaattcctgtgtttcatcataagaccaaggatgaatacttgatcaacagcccatatagttgcaaggaagccccgtgtgttt

SEQ ID NO: 497558 - DNA, 74 bp, Homo sapiens
tcacaagaggggaagctgacagagatacctacagacggagtgctgtgccacatgcagctgtcttctcctcagtg

SEQ ID NO: 497559 - DNA, 98 bp, Homo sapiens
ccaagcccgatccaagaaccttctggactaatgatgatccaggaggctctgtcggtggtgagcgacgaccagtccctctttgactcagcgtacggagc

SEQ ID NO: 497560 - DNA, 89 bp, Homo sapiens
tctaaaggaaggcgtccgttggccttcgtacccgtcttgattgagacaatgcagatcttcgtgaagactctgactggtaagaccatcac

SEQ ID NO: 497561 - DNA, 75 bp, Homo sapiens
gaaagggattgatcttacacaagtaaaagatcctgataacttaagtgactctctcttttccggtgatgaagaaaa

SEQ ID NO: 497562 - DNA, 100 bp, Homo sapiens
gtgctcttgagagagttcagcgtcctcacagaactcctgaagaagctctgtagtggccccgaaggaggactgaggaagtcttttagagattcctgccaaa

SEQ ID NO: 497563 - DNA, 75 bp, Homo sapiens
ggaatcgccgtggcgtcttggtgttctccacgctggttcgcaggtttttagaacttcagccataaaaatgggcag

SEQ ID NO: 497564 - DNA, 100 bp, Homo sapiens
cagaaagctcctgacagacggtgcctctgtgtgcagcaacaggagaccacggcggtctcacctggtgaaattgggtgaggatgcccccaattccagtgtg

SEQ ID NO: 497565 - DNA, 100 bp, Homo sapiens
ggaagaagaactcaagaatgttactaacaatctgaaatctctggaggctgcatctgaaaagattatgtttgagaccttcaacaccccggccatgtacgtg

SEQ ID NO: 497566 - DNA, 82 bp, Homo sapiens
tcggtgctggagaacttcgtgggccggttgattcttcaccacactgaaaccattaggaaaaatccttgtggttaacagcaga

SEQ ID NO: 497567 - DNA, 75 bp, Homo sapiens
gccacagatcctcatccaaagatcaatgtgaaaagtagtgatgaggcagtgatcctgtgtaaaacagcaattgga

SEQ ID NO: 497568 - DNA, 100 bp, Homo sapiens
cagaagaggaaaggaaaggagccaggcatggctcttcctcaggtgaacctgagcaaggtgggcgagtattggtggaacgccatcctggagggagaagagc

SEQ ID NO: 497569 - DNA, 100 bp, Homo sapiens
caagaaccttgacaagctcatccggctggtaaatgcgcaggtcaagtctggcaccatctttgacaacttcctcatcaccaacgatgaggcatacgctgag

SEQ ID NO: 497570 - DNA, 50 bp, Homo sapiens
ttcccagtagctgggaccacagattgaaagtggagctgtttggaaacaag

SEQ ID NO: 497571 - DNA, 100 bp, Homo sapiens
cgacagcctcaaacaggagctggagcagctcaaagaggtactatgtggagatgcaggagaagatgcagagtgtcatgcagctaaacttctggaagtcatc

SEQ ID NO: 497572 - DNA, 75 bp, Homo sapiens
cggaccatgggcgacaaagggacccggtggcttgctttggtgaaggtattcatacagccttcctaaaggcaatgc

SEQ ID NO: 497573 - DNA, 100 bp, Homo sapiens
agaacatttcaatggtgttgctgaacttcttgaaatattaggaaggtcttagtcctgggtaacaagcgagaccttccgggagcattggatgagaaggagc

SEQ ID NO: 497574 - DNA, 74 bp, Homo sapiens
acgtctgtctggtgataccaggggcagagggaccactctgacagaaaatggcggctgccaggcccagcctgggc

SEQ ID NO: 497575 - DNA, 75 bp, Homo sapiens
cacctcgctactcgcttgcctacccgccggcccgcgggtctacttcctcaaagagttgcatgctgagaatttgaa

SEQ ID NO: 497576 - DNA, 100 bp, Homo sapiens
tcattttctccccttcggtagaagatttcaacactacacttgcacaatgtctttgaaaccaagagtagtagattttgatgaaacatggaacaaacttttg

SEQ ID NO: 497577 - DNA, 83 bp, Homo sapiens
ctttgatattgatgtgaacgcctctgtgtttgaaacaaacattcgagcaggaggccactgtctgcagctcccgtgaagatgtc

SEQ ID NO: 497578 - DNA, 119 bp, Homo sapiens
gcaaaacgtgaggagctagagcgaatactggaagagaataaccgaaaaattgcagaagcacaagccaaactgggtgctcctggtgctgtaggtgcccctggtcctgctggagccacagg

SEQ ID NO: 497579 - DNA, 100 bp, Homo sapiens
gatggctggaagagatgtgaatcttgtagtcagaaacttgaaagagagaataaccgttgtaacatcagtcacagcataaaatgatgcatcctgttgccag

SEQ ID NO: 497580 - DNA, 76 bp, Homo sapiens
ctggattcaatgtcatccagagcccagagcagttttcataccttggtcctgaccctgtccataagctgctcacact

SEQ ID NO: 497581 - DNA, 100 bp, Homo sapiens
ctggataactatgttattcgaggcagacatctggtccctgggcataacagctattgaacttgcaagaggggaaccacctcattccgagctgcaccccatg

SEQ ID NO: 497582 - DNA, 82 bp, Homo sapiens
gcagtggtgtgctttggacctgtgtacccacccaaggctaaaggcagagccaggctgtgtgggtatccccccttctactcca

SEQ ID NO: 497583 - DNA, 100 bp, Homo sapiens
cgggcaggaggcgtggaaagtcgagggggtaaaccgcgaatgctttttgaaagcaaagatgagcaacactcaagctgagaggtccataataggcatgatc

SEQ ID NO: 497584 - DNA, 75 bp, Homo sapiens
cgagggcggcgcaaggcctgaggcccagcacaggtccacctgggcttgcgaaggcacagattccccgtccacagc

SEQ ID NO: 497585 - DNA, 114 bp, Homo sapiens
cacagctacagagcctggaagcagtgagctaggtgttcccgagcagcctgacctccaggctccagaaatgggaattaaatacatacttgtatgccccaaaagatgactacaaac

SEQ ID NO: 497586 - DNA, 80 bp, Homo sapiens
ctgcagccatgatctccttaacggacacgcagagtatcttgcaatatattcagaactctccctcctagtgacagcaatga

SEQ ID NO: 497587 - DNA, 100 bp, Homo sapiens
ctgggcgccaagccgcggagcctccagacgggacttcattcacctctcagccacccatccctgcagtcctccctaagcaatcccaacctccaggcttccc

SEQ ID NO: 497588 - DNA, 98 bp, Homo sapiens
tggatgccctggggctgacaggaatcttctggtgtactctttttatgaaaagctgatcatggatgaacaggatcaacagctggagatggtgtctggga

SEQ ID NO: 497589 - DNA, 90 bp, Homo sapiens
cctacagcatatccaaaagctttacaaggtcactgctgaaactcaagagaaagaagacgttatcacacatttgcaagagaaggttgcatc

SEQ ID NO: 497590 - DNA, 100 bp, Homo sapiens
atctctctcatctcgctcggctgcgggaaatcgggctgaagcgactgagtccgcgatggagggatgatggcgccacttcctcagtttcggcactcaagcg

SEQ ID NO: 497591 - DNA, 75 bp, Homo sapiens
tatgacaaactttctccagaaaatgtgccggtggtggtgtgcacattgagccccggtatagacagttcccccagc

SEQ ID NO: 497592 - DNA, 98 bp, Homo sapiens
gctgctggagggcgaggagtgcagactcagtggagaaggagttggaccagtcaacatctgtaagtagctttgaacagacattaacaacgacaataata

SEQ ID NO: 497593 - DNA, 50 bp, Homo sapiens
gtggttgtagagttccgtgactcccagatatcagttttagagaatgtggc

SEQ ID NO: 497594 - DNA, 50 bp, Homo sapiens
cttcaacactgttattgtaaacaaagagaatggatcttggagaatgtctg

SEQ ID NO: 497595 - DNA, 100 bp, Homo sapiens
ctgaggtgtggtggaaccttgtgccgcgtaagacagtgtcttctgggggtgagtataggtgcttggagaggataaggaaatcaccctgatccaatagctg

SEQ ID NO: 497596 - DNA, 48 bp, Homo sapiens
taagaagaattccagtcttataaaggtgtacaactatgagcctttgac

SEQ ID NO: 497597 - DNA, 112 bp, Homo sapiens
cgaggtggagccgctgcggcccgacgagctggagcgcctgtcaggctgggaggaggaggaggagagctgcaataggcgaatatgaagaccttagagcagagaaccagaaaac

SEQ ID NO: 497598 - DNA, 75 bp, Homo sapiens
tctcttaccttgtgtttgatgaagcagatcgaatgtttgacatgggatttgggtggagagattcaaccagttagc

SEQ ID NO: 497599 - DNA, 87 bp, Homo sapiens
acaagagatgcctgggcgtcaccatgccacagctacccacttgttgccaccagaagtgatgagagcctatttacaacagctaaggca

SEQ ID NO: 497600 - DNA, 110 bp, Homo sapiens
agcgccagcggccgagcgggcggcttcctggcctgggcgctccggtggcggcggaggtgtggacactgccagcggctgcagccgacttggaatgacctgggagacaaata

SEQ ID NO: 497601 - DNA, 75 bp, Homo sapiens
aacaaaattgccagaaaatctttcctctaaagtcaaactggtatgggcactaggaaaagacttcttccatcaagc

SEQ ID NO: 497602 - DNA, 51 bp, Homo sapiens
ctcagcctcccaagtagctgggactgcaggtgcccgccaccatgcccggct

SEQ ID NO: 497603 - DNA, 75 bp, Homo sapiens
agatttttgttcttctttaaattcattttcaatgagtgaatccaaacgaggtgatgtaaaattctcaaacaatga

SEQ ID NO: 497604 - DNA, 108 bp, Homo sapiens
cgggacccggttccccggcccacagtgggggtgtgcaaacccgagagaactggggcagagcggcttgggtaaatccaccttaatcaacaccctcttcaaatccaaaat

SEQ ID NO: 497605 - DNA, 82 bp, Homo sapiens
cgtcatggaggagatccggcggcagggcaagctgtgcgacgtgaccctcaagagttatgcccagccaagtcttcagtatatc

SEQ ID NO: 497606 - DNA, 83 bp, Homo sapiens
cgcgcagggcctgcagcgggagctggacggcgagcgcgagcggcgcgagaaaaacctgagagccagaagcaacaaagatgcca

SEQ ID NO: 497607 - DNA, 100 bp, Homo sapiens
gaacctacgtctgcatagccaccaatgctcttggaaaggcagtggcaacatctgtactccacttgctgggtatgaaagatgggcaaaagatactatttca

SEQ ID NO: 497608 - DNA, 100 bp, Homo sapiens
aagagcaggagcccggcaccccccgccgacaaggagggtgtgtgaccgatgtcggcagaaaactcgaagtaccaaaaagttgacagtacaaagattccct

SEQ ID NO: 497609 - DNA, 100 bp, Homo sapiens
cttcaggatctgctttcagagtacatgaacaacgatcgccccaggacattcgacatgcactcactggagagttcactcattgacataatgagagctgaaa

SEQ ID NO: 497610 - DNA, 75 bp, Homo sapiens
tgcatcagcctcccgaatagctgcgattacagggtgctttcttctgcgacctggtactcatctacctcatcaaaa

SEQ ID NO: 497611 - DNA, 116 bp, Homo sapiens
ttagcttcagggtgtatgaaatatgaaggatctgattttcagtgcaaagtccctccttgtggtccatttctgggcaccatgggctccacagtgtgcacagatgaacgaagttatgg

SEQ ID NO: 497612 - DNA, 100 bp, Homo sapiens
ggagcgcgaacgagcgacggcggaacccgtgggcctgtggactgcagcctcggcggtcagcagatatgaggccccaggattcctggcgaggtcctcctcc

SEQ ID NO: 497613 - DNA, 75 bp, Homo sapiens
ggaacagcccggcttattgaacacatcagaatccacacagttggccagtcagtgctgaaagatgtaagcaaagtg

SEQ ID NO: 497614 - DNA, 131 bp, Homo sapiens
cgcaaccattgacgccatgtcgggttattcgagtgaccgagaccgcggccgggaccgagggatttagaagaattctgctttaagttttgcatcaatcatttgacagaagttacacagactgcagcattttg

SEQ ID NO: 497615 - DNA, 100 bp, Homo sapiens
gtctcggaaaccccgcctcttacagtcacgagagttgctggagaatgtaaccctaatccataaaccagtgtcgttgcaaccccgtgggctgatcaataaa

SEQ ID NO: 497616 - DNA, 83 bp, Homo sapiens
ctaaggccgcgttggggtgagaccctcacttcatccggcagggcaagaatcctttcgttccatcacaaggtcgtattacagag

SEQ ID NO: 497617 - DNA, 100 bp, Homo sapiens
tcttgttgttgcggaataattccatccaaaaccggcagctgttagccgagcaagtatgccttgcaatagctcattattcccagccaacagacctccagct

SEQ ID NO: 497618 - DNA, 103 bp, Homo sapiens
agagggctgttctggggtggagcaggaactttcttggctctggggtttccttgtctgtcaaatgaccaggtatttatgagcctccatttcttatactactgca

SEQ ID NO: 497619 - DNA, 95 bp, Homo sapiens
cgtgattcccgtgattgcgttacaagctttgtctccttcgacttggagtctttgtccaggacgagtttgctctccaaagctcggggaattgattc

SEQ ID NO: 497620 - DNA, 90 bp, Homo sapiens
tgccaagttagatgccgattacccacttcgagtcctttattgtggagccaagtatcttcaagaccttctcatggagagtgtgaatttttc

SEQ ID NO: 497621 - DNA, 87 bp, Homo sapiens
gcagatttgtggtgcgttctgagccgtctgtcctgcgccaaggtgcccctgggcgctgggattgctctagcctgtaagtataatgga

SEQ ID NO: 497622 - DNA, 106 bp, Homo sapiens
gatgacaaaccctttctatgtactgcgcctggatgtggccaggaagctgacagctgggaaattatagaagggctgaaaataggccaaaccaatgtccagaaaccag

SEQ ID NO: 497623 - DNA, 100 bp, Homo sapiens
cagagaatgagatgaccacaattcactatgatagaattacttctctacagagagcaacctcgatcctgagagagtccctggaagccaaagtggaagcatt

SEQ ID NO: 497624 - DNA, 100 bp, Homo sapiens
catgcatcaagaagacttttctggaggctgataaaataccagtaatgcgtggacagtggtttattgacggcacttggcagcctctagaagaggaagaaag

SEQ ID NO: 497625 - DNA, 124 bp, Homo sapiens
catggatgaacttcaggatgttcagctcacagagatcaaaccacttctaaatgataaggcatagaatgtcaagctaaccaggcgtccgctacttcagaagagtgtactgtcgcatggggagtct

SEQ ID NO: 497626 - DNA, 96 bp, Homo sapiens
ccgtcttctcgcccgacggccacctcttccaagtggagtacgcgcaggaggccgtcaagaagggctcgaccgcgggccgagccacgtgtccatgca

SEQ ID NO: 497627 - DNA, 100 bp, Homo sapiens
caatactgctgctctgacgtgctgaagaaatttgtgtggagcgaggaaaggtgtgctgtgcctgaggccaggtggaatgacatggggaatatcactcata

SEQ ID NO: 497628 - DNA, 94 bp, Homo sapiens
cacgaaataaagctcctgggcaaggggacgtctgcagctgaaaactatgttccaacttcctgtcaacaatcttggcagtttaagaaaagcccgg

SEQ ID NO: 497629 - DNA, 100 bp, Homo sapiens
cgtctacaacggcaagaccttcaaccaggtggagatcaagccctcggacgacgagaacagcgacaacagcaacgagtgtgtggtgtgcctgtccgacctg

SEQ ID NO: 497630 - DNA, 97 bp, Homo sapiens
ctgtacatgctttttattacaagactacggagcataggaggaaaattcatcatctggctgtgtttgatgtggacaagaagaaagggttgactctgat

SEQ ID NO: 497631 - DNA, 75 bp, Homo sapiens
gcaaattgttcagctaattgagaagcagatttcagagagcaccaatcataaaatatttacaccagcagctccagt

SEQ ID NO: 497632 - DNA, 50 bp, Homo sapiens
caagaagaaattcccacctgtcaaagagagtctcactctgttgcccaggc

SEQ ID NO: 497633 - DNA, 100 bp, Homo sapiens
tttaatgttgtttcttccaactctggaaacaattccactagaaggctcaatagttcaggagtttcaattactgaaaattacttggaaatagaaggaatgg

SEQ ID NO: 497634 - DNA, 122 bp, Homo sapiens
tttgtcttttgcagatgatcgccgggtgtcgatccttttccctccagtcaggtggccatcaagtcaatccggaaggacaaaatcaaagatgagcaagatctgatgcacatacggagggagat

SEQ ID NO: 497635 - DNA, 89 bp, Homo sapiens
aatatgctctgactagaaattatttggaacttatggtagaacttccttggaacaaaagtacaactgcatggacaccacgttgctgaaaa

SEQ ID NO: 497636 - DNA, 100 bp, Homo sapiens
atccctcaagactggtccacggagtgtatgaccacaaacagccatcaagatatgattctataacagactcttccagaaatgatatgaagaggaaatttgc

SEQ ID NO: 497637 - DNA, 75 bp, Homo sapiens
gttctgcagcagcagctctttagccaggaggctgccgatgagatctgcaagagtagagacggggtttcgccatgt

SEQ ID NO: 497638 - DNA, 74 bp, Homo sapiens
aaaaaactggctgtgaataatatagctggtattgaagagggtacagccaaagaccggagctttggagagatgaa

SEQ ID NO: 497639 - DNA, 96 bp, Homo sapiens
ccaggccacggctcctttgtcaactgtggcatgaaaaaggtgagattgatcgctgcctcaagaaggtgtccgagggcgtggagcagtttgaagata

SEQ ID NO: 497640 - DNA, 82 bp, Homo sapiens
aaaaagccgagtagagaagttatcaggtgtcgtgaaaactacccctaaaagccaaaatgggaaaggaaaagactcatatcaa

SEQ ID NO: 497641 - DNA, 82 bp, Homo sapiens
ccgagtctgacggcgccggttcgctgcccggtccgcccgcggtgagagcttcctccatacagtggaacagttctgtgtggca

SEQ ID NO: 497642 - DNA, 100 bp, Homo sapiens
attaccacagtcaaagcaacagaaacaaaagcaggcaaatggagtcgttgggaattgaatgcagtagtagagcagtgtctatattcaacaaagaagggtg

SEQ ID NO: 497643 - DNA, 71 bp, Homo sapiens
gctgggcaccaggaagcgaaggctggccccgccagcaggcgaagcagggagatgtcagactgctacacgga

SEQ ID NO: 497644 - DNA, 80 bp, Homo sapiens
atgaacttagcagcagctccactgaacagataaggaatgtgacagtgatgataacatgggtgccaaaaatacttcaatag

SEQ ID NO: 497645 - DNA, 74 bp, Homo sapiens
ttcagaaggagctagctgaaataacccttgatcctcctcctaattgcagagtgcacagttgactgagatcatca

SEQ ID NO: 497646 - DNA, 100 bp, Homo sapiens
cccatccacacaacgaccctgacctggtcatggcgtccagctccggcctggcgtgaggaccccccaatccgcgtgagttaagtgggcagaccaacatcca

SEQ ID NO: 497647 - DNA, 93 bp, Homo sapiens
ggatttcatcgctgaggtggatggagaagcagctgggggccttggctgtaaggacccctaagggttgcaagaaagctcaagtagcctatggag

SEQ ID NO: 497648 - DNA, 82 bp, Homo sapiens
gaatgccaggagcaggatctgcagaagacgcagggctcaagggctgggttacgacccctacaaccctgagctgcccaagccc

SEQ ID NO: 497649 - DNA, 100 bp, Homo sapiens
aaatggacctccagagagcagccatcatcttgggttaccgaattcaaggtgtcattgcccagcggcgtctctggccgagcctctttttgtggaaaacgac

SEQ ID NO: 497650 - DNA, 75 bp, Homo sapiens
ggtggtaacgacggcctcagcaggcggggaagatgaaagggaactaagcgtcttgtagaaggaactattaatcca

SEQ ID NO: 497651 - DNA, 122 bp, Homo sapiens
cgggcggcagcatgtcggtggcggggctgaagaagcagttctacaaggcgagccaggatgagttccacccgttcatcgaggccctgctgcctcacgtccgcgccttcgcctacacctggttc

SEQ ID NO: 497652 - DNA, 100 bp, Homo sapiens
gttaaggattccaagtaactcttatttgggatgcccgctgtctgtagccccggcatggtgcccgtggccctgcccccggccgccgtgaacgcccagcccc

SEQ ID NO: 497653 - DNA, 100 bp, Homo sapiens
ctgtgcctcgagaggtattaggcagtgctacaagggatcaagatcagctccaggcctgggaaagtgaagatggattaattgcctctgaaggagccataag

SEQ ID NO: 497654 - DNA, 50 bp, Homo sapiens
gtcccgaacgcagtgtgtggaaagggcaaacttgaagataaatcttttga

SEQ ID NO: 497655 - DNA, 100 bp, Homo sapiens
tcccccaggcaccatgcccagtgccagtgactggattggcatcttcaagggaaatcgtgatgagaaccagagtataaaccaccaaatggctcaggaagat

SEQ ID NO: 497656 - DNA, 90 bp, Homo sapiens
tctctgaaaaatggctccctccgagttaaggaccaagaatcgccttcagccctgtctggtgcatccttggcagaaagtgaggaggaaaac

SEQ ID NO: 497657 - DNA, 103 bp, Homo sapiens
ggagcctcccctgcagcgactcggaagattcgaggcggcgggggacaagtcggcgccccagagcggacgagaacccttaggagaaatcttgagagtggacagc

SEQ ID NO: 497658 - DNA, 100 bp, Homo sapiens
ctggcgctcgtcctccacccctggaatccctgtctgggtgcggactcggagaagccctcgagcatccccacaggattaattggaattcttcaaaatgtca

SEQ ID NO: 497659 - DNA, 100 bp, Homo sapiens
caacgtcaagcgggagtatgaccacatgaatggatccagaacttggagcgtgatgcccagaagtgtgtgaactggtctgtgaccacaaagatgagaaccg

SEQ ID NO: 497660 - DNA, 100 bp, Homo sapiens
cctgggagacgcacagctaagatgcccggacatcctggaagctgggaaatggaaaggctaaccggtggtttggggttgctccccctaaatctggaaaaat

SEQ ID NO: 497661 - DNA, 50 bp, Homo sapiens
catgccttcttcctggtcaagttctgggctagcgagggcccaaagtttgc

SEQ ID NO: 497662 - DNA, 74 bp, Homo sapiens
gcggcttcgagctctcctctgatggcaggacctgccaaggattttttatcaagcagaaatgcatcgaacaacga

SEQ ID NO: 497663 - DNA, 95 bp, Homo sapiens
tctgacatttcttttgtgcaagatgagcctcaagtgcttctgcattacaatcttccaccacctcctgtgccgccacctgctataaagtcacctac

SEQ ID NO: 497664 - DNA, 141 bp, Homo sapiens
cttgcgggcgccgctggacgctggtggggactcgctctcggcttgaccgcattcttcctcccagaccaatctgaagaaatgcatggatcacattcagcatcgcttggtggagaagatcaccaagatgctggaccgaggcct

SEQ ID NO: 497665 - DNA, 75 bp, Homo sapiens
ccacgggccagccccgccgccctcgcaacctggcagccgccgccgtggaagcgggagatacagatgacccaccaa

SEQ ID NO: 497666 - DNA, 90 bp, Homo sapiens
acttggataaagttccagagcctggagtgcccactgaaaccataaagtggatccttcaggttccagggatttcaccagtagcagtgaaag

SEQ ID NO: 497667 - DNA, 82 bp, Homo sapiens
gtgcccgaggaggcagccaagctcatggcctgccactgcgtgcacgcaaacatgcagatctttgtgaagaccctcactggca

SEQ ID NO: 497668 - DNA, 98 bp, Homo sapiens
aaccggtagcgcttgcagcatggacaactacacctttgcccaacctgggattcaaatgaaagtgaaaatgttagaagaactcgtgagccggattgatg

SEQ ID NO: 497669 - DNA, 50 bp, Homo sapiens
aaaatggtgaaactaaagctgaagaggagatgcatttagaagatactacc

SEQ ID NO: 497670 - DNA, 88 bp, Homo sapiens
ggggcctgctcccggagagatacggctatgtcgatcgaaatcgaatcttcggagaaatgattgaagccatccgcgaagcggtggtcta

SEQ ID NO: 497671 - DNA, 75 bp, Homo sapiens
gcccccgaggcccgcagcctccgcggatccgggcccgctcggcccctcccatgaaatcttcccaaggctgcagac

SEQ ID NO: 497672 - DNA, 75 bp, Homo sapiens
ggaaccacccagggctgccatccagagtatcctgagctccagctggaccctaaattggatcctcttcctgctgag

SEQ ID NO: 497673 - DNA, 51 bp, Homo sapiens
ttcaggacaacctcttgggcagggtagattttcgttccgtcacccaggctg

SEQ ID NO: 497674 - DNA, 75 bp, Homo sapiens
cagtgattctacatctcaagctcatattttgaagtgtttacgggtagagatcttttcctagcaagctgttcacaa

SEQ ID NO: 497675 - DNA, 89 bp, Homo sapiens
agattcagaaggagcaggattaccaaaggtttctcgtgaactgtaacagcattcagaatctgcccagcttgaccttcatcatcaatggt

SEQ ID NO: 497676 - DNA, 51 bp, Homo sapiens
cagggccgcaggaagacgcagaaccaaccggtgagccctctcctaagagac

SEQ ID NO: 497677 - DNA, 100 bp, Homo sapiens
acaacaatatcggcattctgtgctacgaaggtggtatggtcaggaaaaagactacaatgtactagtcatggatcttctgggacctagcctcgaagacctc

SEQ ID NO: 497678 - DNA, 90 bp, Homo sapiens
accttacacccaatagaaattgctcgacaactcactttacttgaatcagatctataccgcagccaactcttcctgccaaataaatagagt

SEQ ID NO: 497679 - DNA, 100 bp, Homo sapiens
cgcagaggaccccccgacaccagcatggactgctgcaccaataatgatctcctttgggaagactacgaggagaaactggctgaccaggctgtaaggacca

SEQ ID NO: 497680 - DNA, 76 bp, Homo sapiens
gacgtgtcccttcaccggaacccagcaacggttctgcggcatgaggaatttgaagaaggctgcaaagctgcctgta

SEQ ID NO: 497681 - DNA, 50 bp, Homo sapiens
gttctccaaacatgatcgtttactgcaaactccagtaataaaccgattca

SEQ ID NO: 497682 - DNA, 90 bp, Homo sapiens
gccgcgcgggacccggaggaccgtatccccagcccactgggctacgcagaccgagacatgggtgcccggcaccgcgcccgagcccactcc

SEQ ID NO: 497683 - DNA, 97 bp, Homo sapiens
ctagatcctgtgctttactctgaagactcgttccacttccaaacatgagttccaggccgagacaaagaagcttttggacattgttgcccggtccctg

SEQ ID NO: 497684 - DNA, 75 bp, Homo sapiens
ccacctcgaggctctgtctgcctcagggacatgccagcccaggcctgggacctggtagagcgaatgaaaaacagc

SEQ ID NO: 497685 - DNA, 87 bp, Homo sapiens
gtctccctgagtctttgaggacacagcctcgctggaggcagtttctgcaataggcgtgctggagctctgggtgctggccaccaactt

SEQ ID NO: 497686 - DNA, 82 bp, Homo sapiens
gacagtgccacttgttggggagccaggccccaaggaagagaacgttgacatagaaggtgtggacaacagtgagtatatgcgg

SEQ ID NO: 497687 - DNA, 100 bp, Homo sapiens
catttgctttataaaagaccactggatcccaagagtgaagctcagcttcagggcatgagccagaaggagagctctaagtctgccatgatgtatattcagg

SEQ ID NO: 497688 - DNA, 97 bp, Homo sapiens
ccgggatcgtgaccgagaccgtgaccgagagcgtgaccgagagcgcgaatatcgtcatcgttagaaggcctggttgcagtatgcttgaaatctggga

SEQ ID NO: 497689 - DNA, 101 bp, Homo sapiens
gactatttccctagcgaggacttctaccgctgcggctactgcaagaacgagtcgggcagccgctccaatggttcaaaccttgtactactcagctgatcaca

SEQ ID NO: 497690 - DNA, 75 bp, Homo sapiens
gtttggagaaaaaacatacctcttccttcaaagacgagttgtactgctgtcacaggaaatggacgctggattaca

SEQ ID NO: 497691 - DNA, 50 bp, Homo sapiens
gctgaggaacgacgccgaggaagaaaaatatggctcaggagactaaccag

SEQ ID NO: 497692 - DNA, 83 bp, Homo sapiens
ccttgccttgagtcagtgcgccgctctccagcccgcttgaacgatcatggaagggaagtggttgctgtgtatgttactggtgc

SEQ ID NO: 497693 - DNA, 101 bp, Homo sapiens
ccagagtgcagagccgcctttccagcatgcaggggctgctcagctgtgaaagttgtgtagatttactgtttgtgagaggagctggaaactgccctgagtgt

SEQ ID NO: 497694 - DNA, 90 bp, Homo sapiens
caacaccgttcccccagccgggctggtagcatctccgcccccacttactgatactcctgacactacagcaaatgctgaaggagatttacc

SEQ ID NO: 497695 - DNA, 83 bp, Homo sapiens
agactatgaatctctgttccaaatgctttgctggaaatggtcaacaagaggctcagagtcccatgagcttaatgaaggaggag

SEQ ID NO: 497696 - DNA, 100 bp, Homo sapiens
aatgacacgctctaaactgaaggaagtagtggaaaaaggagtgaacactcctatgccaccttcaccagctgtacaagtgcagggccagcctaacagttct

SEQ ID NO: 497697 - DNA, 98 bp, Homo sapiens
ggaaagaagggttttaaggggagacagtggtccactgtaggtgtgccaagtgtttctgttatcctacaaagcgaagaataaggaggaggccccgaaac

SEQ ID NO: 497698 - DNA, 76 bp, Homo sapiens
caagacacacaactcataacagttgatgaaaaattggccttcacctaccaccatatccaggagatcatggtccagc

SEQ ID NO: 497699 - DNA, 80 bp, Homo sapiens
ggccgacaggattcgttggctgccgtccccgctgctgtgcattgggctcctacccagagattctacccagtgaaactccc

SEQ ID NO: 497700 - DNA, 74 bp, Homo sapiens
ggaatgaatccttctagagacgtccacggtgatttgaagatattaaagctagaaattggaactagaaaatcaaa

SEQ ID NO: 497701 - DNA, 73 bp, Homo sapiens
cagattcgcagtggtcgcttcttctccttgtgcatcccaggcagctcttagtgtggagcagtgaactgtgtgt

SEQ ID NO: 497702 - DNA, 90 bp, Homo sapiens
gactcgtgatctgcccatcttgttactccctagcagtgtggtaaggaccattgcttggatccccaattcaggatgtagcaattactttac

SEQ ID NO: 497703 - DNA, 88 bp, Homo sapiens
gccggccagaagcgggcggcgcgggggagatgaaagtatgctgaggccttggattaccaccgtcaggcactggtgttgattcctcaga

SEQ ID NO: 497704 - DNA, 75 bp, Homo sapiens
caccaagttaaaatgaaggccttcagatgatattgctgataggatgaggatggatgctggagaagtgactttagt

SEQ ID NO: 497705 - DNA, 100 bp, Homo sapiens
ttgggatccggagggaggaagctgggacacccgggagtcaggaaatgcatcaacaacagcaacttgtgattggcggtgaccggatattcagttgcacatc

SEQ ID NO: 497706 - DNA, 100 bp, Homo sapiens
agagaaggcacgcatgggctcagcgggactcagaggtcccatgactcaatgaacatgcttgtccagctcatctggaaacctgctgccttcaaataccatc

SEQ ID NO: 497707 - DNA, 51 bp, Homo sapiens
cactatggcgctgaaacggattaataagggatctaccgaacagaaagggac

SEQ ID NO: 497708 - DNA, 75 bp, Homo sapiens
gaatgatcatgattttcttgaaaaggaccttgtagaacctctttgcaggcctggcagctgcgattcagccacctc

SEQ ID NO: 497709 - DNA, 100 bp, Homo sapiens
tgaataattccacacctctagtggacccctcagtatatggatacggagtacaaaaacggcccttggatgatggagaaaatgatgcatcctgttgccagca

SEQ ID NO: 497710 - DNA, 95 bp, Homo sapiens
gactggaagctgcggcttcccgtggcctgcacgcagaggctccccacggccgccgtctgtgcagacttttgcagacaaatcaaaacaagaagctc

SEQ ID NO: 497711 - DNA, 75 bp, Homo sapiens
cagatttcagtgtcctccttagctctgcaggttgcactgctgtgatccatcctcatctcctaaagatgcatcctg

SEQ ID NO: 497712 - DNA, 100 bp, Homo sapiens
ccatggcccggctggctgactacttcatcgtggtaggctatgaccacgagaagccaggctcccagccaacctctgataaaccctcccagcggccatcaga

SEQ ID NO: 497713 - DNA, 80 bp, Homo sapiens
cctgctcggggttttcttggctctcgtcgcaccgggggtcctcggttgaaaggattgttgacaaaaggaaaaataaaaaa

SEQ ID NO: 497714 - DNA, 74 bp, Homo sapiens
tagacgccccttcgccgggacctggcacccgaatccggcctgccgggcctttccacagaagaaaacctgtctgc

SEQ ID NO: 497715 - DNA, 75 bp, Homo sapiens
ccagatgtctgacagccctgtgtgacaccaagataagtaacgcctctccttccgatgaaaagagaaaggaagaat

SEQ ID NO: 497716 - DNA, 88 bp, Homo sapiens
gctgtgacgcgcgcgccggagcggggtccgatggttctcgaaggcccgcggcgccccgtgctgcagacatggagcagagtaaccctgc

SEQ ID NO: 497717 - DNA, 75 bp, Homo sapiens
acaacattaatcagatactgcatttaagagaccatcatgcagacatcagagactgggtcggacacaggctcgaca

SEQ ID NO: 497718 - DNA, 100 bp, Homo sapiens
aagaagaaaattaatgctgggataaacagaataggagagctgatcccatgttctcctgccctgaagcagggcaagtgtccagagaatggctgggatgaaa

SEQ ID NO: 497719 - DNA, 98 bp, Homo sapiens
cctcacctgtggagctctgggtacagaataatccagaatggctactctgatctatgttgataaggaaaatggagaaccaggcacccgtgtggttgcta

SEQ ID NO: 497720 - DNA, 83 bp, Homo sapiens
gaagtcctctgagcagcctgttaccttctgcctcagtgccagagtccatgacaattattcagaatgaccgaagaagcatgccg

SEQ ID NO: 497721 - DNA, 74 bp, Homo sapiens
tccctcacggacagcagcgtgttcagattcagaacaagaaagtggacatctctaaggtctcctccaagtgtggg

SEQ ID NO: 497722 - DNA, 83 bp, Homo sapiens
tccgccgctgcgggcccgctccgacgcggaaggatgggagtcccagcttctggagacggggttcctggggatcttcctgtgcc

SEQ ID NO: 497723 - DNA, 76 bp, Homo sapiens
ggcatttggctttgcctttctggacacagaagtatttgtgacagggctggttgatatgtgaagagccaacctgtcg

SEQ ID NO: 497724 - DNA, 100 bp, Homo sapiens
cccgcagggacatggccggggacacccagtggtccaggttggtgttcgaggaagagacattgttgttcttggtgtggagaagaagtcagtggccaaactg

SEQ ID NO: 497725 - DNA, 100 bp, Homo sapiens
cgccctcatgtccaactttgagcagctgctccgaggggtctggaagccagagaccaacgagatcctgcacatgtctttattccgtcctatttcagtgttc

SEQ ID NO: 497726 - DNA, 98 bp, Homo sapiens
gtcaagctggccaagcacaaagagcttgctccctacgatgagaactggttctacacgcgagctgacttcctcttcaaattcctggtgattggcagtgc

SEQ ID NO: 497727 - DNA, 100 bp, Homo sapiens
ggaccgtcacccgctatcctgccaactctatcgtggtcgtaggaggctgtcctgtctgcagccttgaaaatattctgcttcgttatttcgggcactccac

SEQ ID NO: 497728 - DNA, 101 bp, Homo sapiens
ttcgcagtggtcgcttcttctccttggtatatcccgtgccttacctgactgggggctctgagtccagttgtgttgtcttcaacttagacaccatggaggca

SEQ ID NO: 497729 - DNA, 135 bp, Homo sapiens
agcggatcctgcgcatcactggctactatggctaccagccctgggcagcgagctgcaaaagttatggccacaccgtgcccttgtcagatggaggtaaggccttctgcatcatctactccgtcattggcattccct

SEQ ID NO: 497730 - DNA, 75 bp, Homo sapiens
acacccgcaaggtcgtgcacgatgccaaggaatcggatgcacaaggacatcaagtggctgccaggttctcccacg

SEQ ID NO: 497731 - DNA, 75 bp, Homo sapiens
gataacatgtcggagtacagcaagcagatgcagagatgtttttcgttggaatatacgttgcacatttatggcgat

SEQ ID NO: 497732 - DNA, 75 bp, Homo sapiens
ttgtggcgaatggggctcacgtcgaatacagtttatgtaacttgatggaagaaaatggaattactccaaaaagac

SEQ ID NO: 497733 - DNA, 75 bp, Homo sapiens
gtggagggacgagacctgaccttgcagtacaacatctacaatgttggctcaagagctaatccagacagagctgca

SEQ ID NO: 497734 - DNA, 95 bp, Homo sapiens
ctctccctaaatattatttctgccaagtacctgaagtcttcccacaactctagcaggaactgcctcctgagcgtggagcctgccattagcaccaa

SEQ ID NO: 497735 - DNA, 100 bp, Homo sapiens
gacccggttccccggcccacagtgggggtgtgcaaacccgagagaactgggttagagcagccagcgggtacagaatggattttggaagagggagtcacca

SEQ ID NO: 497736 - DNA, 74 bp, Homo sapiens
gcaaagtggttgtggtcactggagctaattcaggaatagtgattcggaatgtcaagtttaagatcctggatgcg

SEQ ID NO: 497737 - DNA, 75 bp, Homo sapiens
ctgggaaggtggagccaccagcctctccctgacctagaggatcaagacataatgggagcatttttagacaagcca

SEQ ID NO: 497738 - DNA, 75 bp, Homo sapiens
tactacctcagttacattgaggaatgctggatgctagtgattccagttctagcagcaatctttcacttgctaagg

SEQ ID NO: 497739 - DNA, 75 bp, Homo sapiens
cggagattgctttctggggaaggttggccttggggaggcactattagaggctgaaactattgaagaacaagaatc

SEQ ID NO: 497740 - DNA, 80 bp, Homo sapiens
gtccgcctcgacccaaccggcggccttgagcgctgagcaagcaaagggtctcggcgcggaagatggccggcggcgtggac

SEQ ID NO: 497741 - DNA, 89 bp, Homo sapiens
ctgtctgttttcgtgattcagcaagtttcatctcaagccgcctgtcttggttagatggctctggattaggattctcactggaatacccc

SEQ ID NO: 497742 - DNA, 83 bp, Homo sapiens
aaggtcttcagcggggcgctccaggaggcactcacaggatgaccggaaagaagggatgaccgcgtttgtggaaaagagaaagg

SEQ ID NO: 497743 - DNA, 100 bp, Homo sapiens
taaccatgaagacttgaacttaatacagcaagaaagaccatcaagtttaccaaattcaattcgtcataatctgtccctacacagcaagttcattcgtgtg

SEQ ID NO: 497744 - DNA, 83 bp, Homo sapiens
gccgcgcggactgaaggagactgaaggtggcagtgctccttttggacttttctctaggtttggcgctaaactcttcttgtgag

SEQ ID NO: 497745 - DNA, 74 bp, Homo sapiens
aaagctgtccagggtgctgagctgtcagaagcaggcaatgagtgaaagctggacattgaagaagccaaaatctg

SEQ ID NO: 497746 - DNA, 90 bp, Homo sapiens
gaaaatgttgatgataacaaccagctcttcaggaatataaatagtttctggaaaggacactgacaacttcaaagcaaaatgaagttcttt

SEQ ID NO: 497747 - DNA, 101 bp, Homo sapiens
ccgcgcgctggagctggagaacgaccggctcctgctcaagatctcagagaaggaggaggtgaccacgcgcgaggtaactaggatttctacctcaaccgcga

SEQ ID NO: 497748 - DNA, 101 bp, Homo sapiens
gccgagccgggatctcaggtcctcgggggcggcggccacgccaaggacgggtatttataacagcaatgatgtagcagtatcgtttccaaatgtagtatctg

SEQ ID NO: 497749 - DNA, 100 bp, Homo sapiens
ggatgccctgcagtacctgcagaaggtctctggagacatcttcagcagtggctgtaaacctagctgaagacacagctcatcccaaactcgtcttctccca

SEQ ID NO: 497750 - DNA, 75 bp, Homo sapiens
tgtttaccttggcgaggcctttcaccaagtccatggatgagagagacctagagaaagatgatgaactggaactga

SEQ ID NO: 497751 - DNA, 75 bp, Homo sapiens
gtctcctgcttccgcacccccttcgggcctctgtcctcaagggaaatgtttcaacgtgcgcaagcgttgcggcgg

SEQ ID NO: 497752 - DNA, 75 bp, Homo sapiens
acatatgtcgagggaatgcagaaagagttaaggaaggcagccgcttgatggcattgaaacgaatgggaattgtaa

SEQ ID NO: 497753 - DNA, 100 bp, Homo sapiens
ctatccttgcctgaagcagtcttttgcaggaacatttgagatttacactgactgggccaaccactacctagcaaaatcaggccacaagcggctgatcaag

SEQ ID NO: 497754 - DNA, 100 bp, Homo sapiens
aggagtcctgcttatcacaatggcatctaataggattcaggaatcaaagaatcagtgtactcaggtggtacaggaaagagagagccttctggtgaaaatc

SEQ ID NO: 497755 - DNA, 83 bp, Homo sapiens
gccactatgaggagggccctgggaagagccaaggcactgatgtttgaactggaaacttcaaaacgtttaataagagtcttcag

SEQ ID NO: 497756 - DNA, 98 bp, Homo sapiens
ttacagtgggtttgactcaattcaaggttaaagcacgaattgggagctctcagcgacatcaccagtcagcagccaaagacctaactcagtcccctgag

SEQ ID NO: 497757 - DNA, 73 bp, Homo sapiens
gccggttctgcaccatcttcaggtcctactccaggggcgctcaggtggagattctggacgcaaagacaaggga

SEQ ID NO: 497758 - DNA, 75 bp, Homo sapiens
tgggacagcattaccgacaagcaagggagagtcccgtattctcagagtaaaagttgtttctggaattgatctcgc

SEQ ID NO: 497759 - DNA, 100 bp, Homo sapiens
caagtacttgagcatccctgggttaatgtgaccaagaatatggcccaggtgaccaaagccctggacaaggccctgagcaccatggacctgcagaaggtct

SEQ ID NO: 497760 - DNA, 98 bp, Homo sapiens
tggacctcattgagaaggactatgctgaccgagaggcacgagaactctggtcccggctacagttccgatgaagttaaattccgtcaagatttaatgaa

SEQ ID NO: 497761 - DNA, 74 bp, Homo sapiens
tcttctgtatgacttgtattcttaaatgggcagagtccacaggtcctggctaccctgggaagagacaagaagta

SEQ ID NO: 497762 - DNA, 74 bp, Homo sapiens
tggaccttgtctcgctcgggagcggaaacagcggcagccagaggatgttttcactccagaatgcaaattcaagg

SEQ ID NO: 497763 - DNA, 82 bp, Homo sapiens
taatttgaaccatgtttggattgaagccgcctctgtattacttaccagatgatatcatcaagttgaatcgaaaggaagggaa

SEQ ID NO: 497764 - DNA, 90 bp, Homo sapiens
gcacagcttccccacactcaagttctttcctgccagtgccgacaggacgttgtctcaggcaaggctcctgacttccttcttgccggctca

SEQ ID NO: 497765 - DNA, 74 bp, Homo sapiens
tcctgctgccttcccgtcgccgctcccgaagcttttccagaggaacgagccagaatctattcatcagacagtga

SEQ ID NO: 497766 - DNA, 100 bp, Homo sapiens
gcttggcctgaaaacaggacggacctccatgcctttgagaacctagaaatcatacgcggcaggaccaagcaacagcccctgggggagaagaagacgggcg

SEQ ID NO: 497767 - DNA, 96 bp, Homo sapiens
gcaaagccacgctcaccttcctgaaccgagccgaggattacacccttaccatgccctacgcccactgcaaagggcccgaaagatccccatcatcat

SEQ ID NO: 497768 - DNA, 75 bp, Homo sapiens
tgtatcaaagactgtttgttcaacatatctacaatctcggtactacagggaatgaaggatggcagcatgccgtgc

SEQ ID NO: 497769 - DNA, 90 bp, Homo sapiens
tgctcggccgatgaagtgcagaggtttttttctggtacctggaatggaaacacaaaagtagccataaagactcttaaaccaggcacaatg

SEQ ID NO: 497770 - DNA, 82 bp, Homo sapiens
cggagcttcgccaaggctggcgcagtcggagtggagtcaacatatcaatggagcaagtcacagtcgtcgatgccagcttctt

SEQ ID NO: 497771 - DNA, 50 bp, Homo sapiens
ctgttgtctttcatgcatatggagggaggctggagtgcaatggtgcaatc

SEQ ID NO: 497772 - DNA, 83 bp, Homo sapiens
agcaagcggggcgctgtgtccccaagctccccgtcctcgggtgtggacactgccagcggctgcagccgacttggaatgacctg

SEQ ID NO: 497773 - DNA, 88 bp, Homo sapiens
cctgctgtatagcctgcagaacagtttcattgaaaacagatcctgcaaaagttccaggtgcccacactggaaacttggagatcctgct

SEQ ID NO: 497774 - DNA, 83 bp, Homo sapiens
aaaaacaagcaggctttgtgtcaagacgtggcacgtgtcagagaatttgacgaaaggagaatcacttgaacccaggaggagga

SEQ ID NO: 497775 - DNA, 74 bp, Homo sapiens
attttactcatattagtagccaatgcaattgtgggtgtatggcaggagttgaagaatgctgaaatagctttaag

SEQ ID NO: 497776 - DNA, 83 bp, Homo sapiens
aaccttggaacagaacaagaggacaggaggtgtcgttccaggaatactctgaagatagtaactccgagccaaatgtggatttg

SEQ ID NO: 497777 - DNA, 102 bp, Homo sapiens
ctggacatcgagcctgagggaggggaaaggcgcaggatgagacaaggggccttcctggtgaacacagcccggggtggcctggtggatgagaaggcgctggcc

SEQ ID NO: 497778 - DNA, 90 bp, Homo sapiens
gttagaatctgggactttcttcgttgccatgaggaaagaattctccgagcacctgtggaatcctctcaagaggaacagtcattgtgtgaa

SEQ ID NO: 497779 - DNA, 83 bp, Homo sapiens
gttctttaatatgctggatgagctgctgaagcccaccgaattaggtgatgtgtccaatctagatcccaacttctcatttgaag

SEQ ID NO: 497780 - DNA, 49 bp, Homo sapiens
tacaacatggcagacattgacaagaaacctcgacctgtctcccagttgg

SEQ ID NO: 497781 - DNA, 50 bp, Homo sapiens
aatggataaggcaaaacggaggctggggggacttgatctcatcttcatgc

SEQ ID NO: 497782 - DNA, 101 bp, Homo sapiens
tgacttcacttttgagtgcaactgccttccagggaccgacgtcatggttcggtgcctcaagctgctgaaggaatttaaacggaatgaccatgatgatgacg

SEQ ID NO: 497783 - DNA, 100 bp, Homo sapiens
cctgagcatgcagaggcccggcaggaggaagagcaagcaggccctgagggactataagaaggttcagatccagctggagaatctggagagcagtgtgcgg

SEQ ID NO: 497784 - DNA, 95 bp, Homo sapiens
gaaaggagtggagggggcctgcggagcatttaaatcaaacggtattgagatggattgggttatgaaacataatggtccaaatgacgctagtgatg

SEQ ID NO: 497785 - DNA, 90 bp, Homo sapiens
cattgatctgaggactataataccttgggatgtggacacaatttgtaaggaggagacatcacagctttcccagatcgggaggaaaaatat

SEQ ID NO: 497786 - DNA, 78 bp, Homo sapiens
acaaggcagacatcagctcctggttcaacgaggccattgacttcatagtccagatggcccctccatccctcaacgtga

SEQ ID NO: 497787 - DNA, 127 bp, Homo sapiens
tatggatattctggtggggagatgaacccaacctagtgggtgtaatacatcatgaactgcaggagaaaccctaaagcaggcagcagctcagaagtcccagcagctttcagcgttgcaagaagagaac

SEQ ID NO: 497788 - DNA, 83 bp, Homo sapiens
acaccaagtgagaggccaaccaggttgagaacttgttgcttagtaaccaagggaccattaagctgtgtgactttggcagtgcc

SEQ ID NO: 497789 - DNA, 98 bp, Homo sapiens
aggagtgtttgacatagacctggaccagccagaggacgcgggctctgaggatgagctggaggagggggacgccaggaaagcatgtgcagatgcaactc

SEQ ID NO: 497790 - DNA, 75 bp, Homo sapiens
aggcaaagccggctgttaccctgcacagccgtcaccctcaactttcccttcagcgctcctggttgcagccagaat

SEQ ID NO: 497791 - DNA, 97 bp, Homo sapiens
gcaccatgccgctcctaagcctgcacagccgcggcggcagcagcagtgagagccttatgccagcctggaccatcttggaggcagtgtaggatcatgg

SEQ ID NO: 497792 - DNA, 101 bp, Homo sapiens
gcctagcacccagagagcaggaggctcctgggacccaatggcctctggatgaaacgtcaggaatttactacacaggattacttccttaggatagattgcca

SEQ ID NO: 497793 - DNA, 124 bp, Homo sapiens
cttggatatgacccatatgccaacccacctaactacggaaaacctgatcccaaaattattgaaaacactcgaaggctggaaaggcagctcatcatgcagagtgaaatgagggaaagacaaatgg

SEQ ID NO: 497794 - DNA, 107 bp, Homo sapiens
agcggcagctgaggagactccggcgctcgccatggccgacgaaaagcccaagccaggcccagacatgtccgtccttgtaagttaaaagcttccatgggagccttcct

SEQ ID NO: 497795 - DNA, 109 bp, Homo sapiens
accgcccagccgctcgcaggcgccgcacggagttgcgtcccggggacttggggccgcagggagggcacctgtgctggttgcacttgctttgattgaatgtggaatgaag

SEQ ID NO: 497796 - DNA, 97 bp, Homo sapiens
attggctgtctcaacccccagccagggtcaccatcaaaatggaatgtaaccctagccaggtgaatggctcaagtttgtggggacattcatggacaat

SEQ ID NO: 497797 - DNA, 100 bp, Homo sapiens
aacccaggaggagactctccctggaaaacttcccttccctttcgattaccagagactgatgactgtggcggagacgattacagctctcatgtttcctttc

SEQ ID NO: 497798 - DNA, 78 bp, Homo sapiens
ggaagcgtctttgctcaaggatcccagttttctctggatgacgtggaggtggtccaggccacgctggtggtcctggcc

SEQ ID NO: 497799 - DNA, 97 bp, Homo sapiens
cctcgggacagccgccgtatggagggcaccagcccggcctgtacccacagcagccgagtgaaccagaggaaatgcctccagaagcaaagatgaggat

SEQ ID NO: 497800 - DNA, 100 bp, Homo sapiens
aagtgaacatttcagatttcgaaggacattccaatccagaggggaccccagtatttgcagatcgcaccaaggatgacattgatcttgatgccttggctgc

SEQ ID NO: 497801 - DNA, 87 bp, Homo sapiens
tatgggatacagctggacaagaagattatgacagattacgccccctatcctatccgcaaacagaagaaaacaggcagattttggcgc

SEQ ID NO: 497802 - DNA, 75 bp, Homo sapiens
atgactttcaacgggactattatgataggtatgaccgcttgcttcggatcagagcactcagatgggaatatggta

SEQ ID NO: 497803 - DNA, 100 bp, Homo sapiens
gaacaagaagagtctaggacagtgcagagaggtgatttccaagctctcctttgggtggaacacagtgaagatcgacatgagtgcagcccggagagatcct

SEQ ID NO: 497804 - DNA, 49 bp, Homo sapiens
caggagagtccggccgcgacaggacgcaaacggggattcagcgtccgat

SEQ ID NO: 497805 - DNA, 90 bp, Homo sapiens
aggatatcatgcccctgtggcattgcttaatgatataccacagtcaacagaacaggatgaagatttgataaagtggaaggcactgtttga

SEQ ID NO: 497806 - DNA, 75 bp, Homo sapiens
aattgtacagtgacatcttctgggatttagtctggaatggcggcgctagatagtaaggcatcagggaagatggga

SEQ ID NO: 497807 - DNA, 100 bp, Homo sapiens
tcgtgagaacaccgacatcagtgagaaggaggctggctgcagagaccatggtgcatgctattatgatgctaatcagtctatgtatgtgtttggaggctgt

SEQ ID NO: 497808 - DNA, 132 bp, Homo sapiens
ggagcctcgccgcccgtccccggcacacgcgcagccccggcctctcggcctctgccggagaaacagttggaggtccccctccccactaagtgcctctttgcatagcaccagtccccacccgcacgctctctg

SEQ ID NO: 497809 - DNA, 82 bp, Homo sapiens
accggcgtcgagaatttcaactggtactgtgctaaaccctggggagacggcgaagtggaaaacatatagagtctgtgccctc

SEQ ID NO: 497810 - DNA, 100 bp, Homo sapiens
tgcggggcttccctgcggctggagctcaaagcttggattctgccgtgccactcacgaatggcgacacagaagacgatgctgacaaaatgcacgttgatag

SEQ ID NO: 497811 - DNA, 94 bp, Homo sapiens
gcctcagttggaagcagccgatccagcctgcggagcctgtggggcagctcagagtcaagatctccactgaagttggcatcacaaatgttgatct

SEQ ID NO: 497812 - DNA, 99 bp, Homo sapiens
gcgacaggccgctgacggccggaaggaaaatggattgtcagtggcttcgccccgaggagagctgactgccctgggctgctgcctccggcagagctgagc

SEQ ID NO: 497813 - DNA, 83 bp, Homo sapiens
gaacaaaaatgagtgtgaggcgaacagccatcccgggcactatgtgaatttggggctgaccccgcactacatctacccaccag

SEQ ID NO: 497814 - DNA, 101 bp, Homo sapiens
gagcatttggactttatccagtcacacctgcggaggttctgccttcagtatatggccagggtttataattgggatgtaaaaagaagaaacaaggatgactc

SEQ ID NO: 497815 - DNA, 75 bp, Homo sapiens
gtcgtcggcatcctcctggcctacctggcagtgactgaggatctcctctctgtgctggctgagctgcaagaggct

SEQ ID NO: 497816 - DNA, 100 bp, Homo sapiens
ggagcccctccacctggcagccaccccgtctgggagagaggccatttcaatcgaatatctcatggcctacagggactttctgcagtgcctctgagaactt

SEQ ID NO: 497817 - DNA, 101 bp, Homo sapiens
ctgttggtaggctctgctgtgaggtctcctcttccggctttcccacttcccaagcaatcccacagagtattgatgaggaaactgaagtttggagcgatcac

SEQ ID NO: 497818 - DNA, 101 bp, Homo sapiens
tcgggatttacgtggagatcaagcgcagcgatgtggaatgcagtagccctctgggcctgggatattgtggttgataactgtgccatctgcaggaaccacat

SEQ ID NO: 497819 - DNA, 100 bp, Homo sapiens
atgttttttgctcccacagtgctaggcttggcccgcctaaggcactgggtgtacctgctttgcttctctgcaggtggttatcactaggctaaaactggac

SEQ ID NO: 497820 - DNA, 117 bp, Homo sapiens
caatttctgaacccagccggctccatctcagcttctggtttctaagtccatgtgccaaaggctgccaggaaggaggtctcctctgagcctccggcctccataagacccaaaacagat

SEQ ID NO: 497821 - DNA, 100 bp, Homo sapiens
gcttattccgcagtggtttttgacaggacgattactgagagccaatcagattagtttcaactgggacaggcttgctagctggatcaaccttactgagcag

SEQ ID NO: 497822 - DNA, 50 bp, Homo sapiens
atgccatctcacagcctgatgcccagagctatctcacgtgagagggcagt

SEQ ID NO: 497823 - DNA, 75 bp, Homo sapiens
gtgacaccttccgagaccagtccacctacatcagggtcagagtgcagacctgagaccactgctcaccgacttcag

SEQ ID NO: 497824 - DNA, 74 bp, Homo sapiens
gaagcacttggaactcctttataagtgtcagctgtgaggtctattctggataagcaggttttgtgaagacattt

SEQ ID NO: 497825 - DNA, 75 bp, Homo sapiens
gctccacgcatttcccttcgtgggcaattgaaggaacagactaaaaatcgtgtcctggaaggaaactacaggtac

SEQ ID NO: 497826 - DNA, 100 bp, Homo sapiens
ggctccgggtcttccagagcgtgaagatcaagatcggatgtaatccctgttcattactacttaatacctccaccaacaaagactaagaatggcagcaaag

SEQ ID NO: 497827 - DNA, 82 bp, Homo sapiens
tgcacagccgcggcggcagcagcagtgagagacacgcagcccaagaaggtccggaaggtcccgccgggtcttccatcctcgg

SEQ ID NO: 497828 - DNA, 82 bp, Homo sapiens
cctggggaatttaagatgccaaagcagctcattcacatacagcggaccagttactctccacaagaaaattcacacaaccaca

SEQ ID NO: 497829 - DNA, 75 bp, Homo sapiens
ctttggtgccctcaacatctctcagagacgaaagtgaaagccctgtgtaaggaatgtgtagtagaacgttgtcgc

SEQ ID NO: 497830 - DNA, 50 bp, Homo sapiens
gggagatagacgctgctgccttgtgtgatccagtcttgggtgacaagtgg

SEQ ID NO: 497831 - DNA, 75 bp, Homo sapiens
gggagccctcgcgacgcgcccggcccggagcccccagcgcagcggccgcgggaaaatatttatccccaaacagaa

SEQ ID NO: 497832 - DNA, 83 bp, Homo sapiens
cgacttgagcgaagttttatgcaaggtgtcgtgaaaactacccctaaaagccaaaatgggaaaggaaaagactcatatcaaca

SEQ ID NO: 497833 - DNA, 50 bp, Homo sapiens
tgatgttggaggatacctgtgacttcattagaggggtggtagactcggag

SEQ ID NO: 497834 - DNA, 83 bp, Homo sapiens
gcacgaactgagctgatccttgccccagtttgcatttatgtcggatcctcagtgaaaataaaagccatgatagttcaacatac

SEQ ID NO: 497835 - DNA, 100 bp, Homo sapiens
cttggttccagagcggggtgagcctgagctggcggtcaaggggttaaattctccaagcccagcaggatacagacgtccctcaccagtgccagcttggggt

SEQ ID NO: 497836 - DNA, 100 bp, Homo sapiens
ctcccccgtccggtccctctctccacggtaaggggtagatgatgagctggagatcaaggcctactatgcaggccacgtgctgggggcagccatgttccag

SEQ ID NO: 497837 - DNA, 90 bp, Homo sapiens
caccatggaaatatttgacattgagaatcagttgctcaactaccgttctgccatttcaaatcatggatcaaaaatagaaggcctggaaag

SEQ ID NO: 497838 - DNA, 90 bp, Homo sapiens
atgaaacaacctggcccatgagatgatagctgtggaagattcatgatgttgctatcaaaagttgagaaattgtcagaagaaatcatggag

SEQ ID NO: 497839 - DNA, 75 bp, Homo sapiens
gtgaaacctccaattggattgcagccaacacaaaggatggatgagggagatgctgcaatcatgcatcccggggtc

SEQ ID NO: 497840 - DNA, 90 bp, Homo sapiens
ggttcgtgctggactacaatgcaggactgctctcctactacacgttcaaatctgaacatcaatgatgtactagggaactactcattgact

SEQ ID NO: 497841 - DNA, 100 bp, Homo sapiens
caccagttgaaccagtgctatactcagctaacatggcaacagaataatgttcagagcagacagtgagcaagctgacattgcgaggatgctatataaagac

SEQ ID NO: 497842 - DNA, 75 bp, Homo sapiens
caagattccagatgttcctgtggaccccagtccagccaaaagaatgcaatggtgtaaagattccagttgatgcca

SEQ ID NO: 497843 - DNA, 100 bp, Homo sapiens
ctacaacagtttggcgtgcaacatggggcttgagaaaggttttacatgaggctgtgagcactggcgatcctgagatggtgtacacagttctccaacatcg

SEQ ID NO: 497844 - DNA, 75 bp, Homo sapiens
gacgcacagagaccgtgaagattccaagttcaggagaactcgaccgggctgaccagtttgagtatgtaatgtatg

SEQ ID NO: 497845 - DNA, 90 bp, Homo sapiens
tggacaaaaacatgagtcaatatgtattgtggcattcaaatcctagcactctgggagagatcatgcaacagatgagtgaccaccgctacg

SEQ ID NO: 497846 - DNA, 89 bp, Homo sapiens
cacggggacggattggttgttttttcctgtatgaagcggttggcaccactgaagtgaccgaatgagaaactggcgatggaatatgagag

SEQ ID NO: 497847 - DNA, 100 bp, Homo sapiens
ggctgtgcttgccaggcctggctccagccatggaggaattgcaagaccaagagggctgggaatatgcttctctaattggctggaaatttcactggaaaca

SEQ ID NO: 497848 - DNA, 82 bp, Homo sapiens
gctgtgctgtgaactgtgaacagaagcaaggccacaatgctgtttgctgagctgacctacactctggccacagaggaagcgg

SEQ ID NO: 497849 - DNA, 98 bp, Homo sapiens
gacgtgtctgcttccactcctgccgtgattgtcagcttcctgaggtctcctcagccatgctgaactgctgaactccagtgcacccagttagacttgga

SEQ ID NO: 497850 - DNA, 75 bp, Homo sapiens
aaggcatggtcccagccaggacggagataacaccatcttcaaggagggggttcctgaggagactgatgactttgg

SEQ ID NO: 497851 - DNA, 75 bp, Homo sapiens
tggactccctggagaagcagatggaaaaggaatactcccccagttgcaagaggcgcaggaccgtggaagacttca

SEQ ID NO: 497852 - DNA, 90 bp, Homo sapiens
ctcctggccatgtgcgcaggggcagaagtggtgcacaggtactaccgaccggacctgcccagcagaccgggttatcccagtccgaggtcc

SEQ ID NO: 497853 - DNA, 100 bp, Homo sapiens
tgttgtcactagcatttttggtgtgaaaaatacagagctggctgtcttccatgatgaaacaggttgaaactgataaagccactgttggatttgagagcct

SEQ ID NO: 497854 - DNA, 50 bp, Homo sapiens
gtgaagcaagtgcagatagatggcctttgagtgatggattggaactgaga

SEQ ID NO: 497855 - DNA, 75 bp, Homo sapiens
cagcaacaaatggagacgttccatgctcagatactacaggtgcttttgaagatgatgatatcacgcacgttgaag

SEQ ID NO: 497856 - DNA, 50 bp, Homo sapiens
ccttcgtgtcgtacgtacgccctgagggctggtgaattaccatatctccg

SEQ ID NO: 497857 - DNA, 100 bp, Homo sapiens
ataggctttggctatgatgagacagatccatttattgataactcagaggctagaatggatcttggagaatgtctgaaagtccatgacctggctttaagag

SEQ ID NO: 497858 - DNA, 82 bp, Homo sapiens
agtgatgtggaggaaaacaacttcgagggcagaggctctctttacctatgaaggcaacagcaatgacatccgcgtggctggc

SEQ ID NO: 497859 - DNA, 74 bp, Homo sapiens
caggacgctgcgcacaacatgggcaaccacctgccgctcctgcctggtttaactatagatcaacacatcatctt

SEQ ID NO: 497860 - DNA, 50 bp, Homo sapiens
cgtggagagcgactcagggacaaaatgattagatcctgtgctgaaagaga

SEQ ID NO: 497861 - DNA, 99 bp, Homo sapiens
cctcgggagccagctcgggcccaggcccccaaccaccgagtgatcgaagaggttcctggtgagctcatgcaggaagacctggcaacggatgacgtcatg

SEQ ID NO: 497862 - DNA, 82 bp, Homo sapiens
cacgcctcatggagcccatctaccttgtggagatccagggcccgcccttcatggagagcctgcccgagaacaagcccctggt

SEQ ID NO: 497863 - DNA, 98 bp, Homo sapiens
gacttcagagacactgccaagcagccttagccctagtgtagagcatcaacaacagcaacttgtgattggcggtgaccggatattcagttgcacatccc

SEQ ID NO: 497864 - DNA, 100 bp, Homo sapiens
tagagctggcagcagcatctcagcccaagagaaggcaagtatatcgcgtcaacacagcgacctgacgggacctggcgcaagcagcggagggtgaaagaag

SEQ ID NO: 497865 - DNA, 95 bp, Homo sapiens
taacttttccaatgtggaatcctgggccttcattggtgttttgtccagtctgagtcctgtgaattcttccaaccatggaccagtgtctactggct

SEQ ID NO: 497866 - DNA, 100 bp, Homo sapiens
cagccttttggatgaaatcgagtgaacattgatatcagtaaatgccattatttagtggatttggacaccatgagagaaacaccccgggagccaaaatatt

SEQ ID NO: 497867 - DNA, 84 bp, Homo sapiens
cgccatgtcgggttattcgagtgaccgagaccgcggccgggaccgagggaagtactagccggacatcatgagtggctgtcgggt

SEQ ID NO: 497868 - DNA, 75 bp, Homo sapiens
gttgtgtttgtgaaacagagaaagataggcggccatggtccaaccttgaaggttcgtttaccaagcaaaagttgg

SEQ ID NO: 497869 - DNA, 74 bp, Homo sapiens
gcaccccggcggggccaccccagtctgcgtgtacacgagggatgagaatgcagccaatcggggcttaaaagcca

SEQ ID NO: 497870 - DNA, 99 bp, Homo sapiens
cacatggatgccagtggtgaggctgtaagcgaaactcttcagtttaaagctcaagattcatgatgttgctatcaaaagttgagaaattgtcagaagaaa

SEQ ID NO: 497871 - DNA, 100 bp, Homo sapiens
cttcttcgccaaattaaagttttacaagatttaacctgtcatcaagacctgggattttggtggttctccttactatgacaatgtccgccccctctcttac

SEQ ID NO: 497872 - DNA, 100 bp, Homo sapiens
tggaagatgaggaggtcgctgagagctgggaagaggcggcagacagcgggagagtaaaacttgtctcggcacagagtcaagtaaagaaagccaacataca

SEQ ID NO: 497873 - DNA, 90 bp, Homo sapiens
aggaaggcgagcggaagatttacttggcaattgaaagtgatggagaggtgattgaacaaattataagcctgcaaaccaatgataatgatg

SEQ ID NO: 497874 - DNA, 82 bp, Homo sapiens
caacttcctcttcagtcatcagtaaaatatttacaccagcagctccagttcataccaataaagaagatcctgctacccaaac

SEQ ID NO: 497875 - DNA, 100 bp, Homo sapiens
cgacagctccaagacgctgcggccaagcagaaagttgaacagaacgcggctcccagccacaccaagttcagtgctgccgggccaccactctcggaggacg

SEQ ID NO: 497876 - DNA, 95 bp, Homo sapiens
gatgttgctgccggcatgattaaaccaggtgtaactactgaagaaatagatcacgctgtacacttaagagcagcacttgaggcatgtcacaaggg

SEQ ID NO: 497877 - DNA, 83 bp, Homo sapiens
cctgaattgcccttgtaggacccagaacagctaccagcagaatcaggcaaagcagagagcagaggttcttcagtccacgcaac

SEQ ID NO: 497878 - DNA, 96 bp, Homo sapiens
ccggctctagttctgaatctgatctccagttaagtgggcagaccaacatccacctcagcaaaaacttcttcctgacgaatcgcgccagggagcgct

SEQ ID NO: 497879 - DNA, 100 bp, Homo sapiens
gccttggggaagacagttggaagctcagacatggtgaaaggtgtagcagtcactcggcctacacccacagcatcgaccttgtgaacccagcgacctgact

SEQ ID NO: 497880 - DNA, 100 bp, Homo sapiens
cgcgtccaggcctgacagctctgcggctcgggccctgaggaattgtactctcagagatgttgagaaaagatacatgggtcttggaagataattactcaaa

SEQ ID NO: 497881 - DNA, 100 bp, Homo sapiens
aatttcattatctcccaagtagccagtggtgacatcaacacaagtatccaagctctgacacagacagttaatcaactggcccatgcccttcacatggaca

SEQ ID NO: 497882 - DNA, 100 bp, Homo sapiens
gcactgagtcaacagactgagcgcgtccaggcctgacagctctgcggctcgggccctgaggagcatccccttagtgcaggtgctgcggactacggccctg

SEQ ID NO: 497883 - DNA, 50 bp, Homo sapiens
agccgtgcccatttccccagggcatggagcaagccctggatgaaaacatg

SEQ ID NO: 497884 - DNA, 75 bp, Homo sapiens
ctgtcaggtacctcaaagcgtaatccttattggaaatgaaggagttaagaagaagtaagaagcaaaccaaatttg

SEQ ID NO: 497885 - DNA, 98 bp, Homo sapiens
ctcgtcagcagcgaggaaggaaacagcggcaagaggaggaacgacgtagaagagaggaagagatgatgattcgtcaacgtgagatggaagaacaaatg

SEQ ID NO: 497886 - DNA, 75 bp, Homo sapiens
cggtcgtccgctggacaagcacgagggcgcgctcgagacgctcctgaggcttttctttgtgggctcaagagaagg

SEQ ID NO: 497887 - DNA, 96 bp, Homo sapiens
tcaagtcctggctggccaagttactggagccgatgatggcccaacagcaggccttgaggttccgaggtccggctcccccaccaaatgcagtgatgc

SEQ ID NO: 497888 - DNA, 74 bp, Homo sapiens
gccgctgactcgggaggaggacctgatcaagactgatgatgtcctggatctgaacctgctcccctcaaaagctt

SEQ ID NO: 497889 - DNA, 51 bp, Homo sapiens
ctgtgccacttagaggaagccaaaaggaaaatgtttataggaggccttagc

SEQ ID NO: 497890 - DNA, 108 bp, Homo sapiens
agggtaaagtcgagtatctggtgaagtggaaaggatggcccccaaaacaatgcagatcttcgtgaagactctgactggtaagaccatcaccctcgaggttgagcccag

SEQ ID NO: 497891 - DNA, 101 bp, Homo sapiens
gatttaaaaagcagccggggcctccgtattgaatgaaagacccagtgcaaagacatcaccatgaacactagcaggttcccagcaccatgagggcctggatc

SEQ ID NO: 497892 - DNA, 83 bp, Homo sapiens
tctacaatttattcctccacacttggagtcttcatgtctcgtaaagtttctccacattagctaaagtctccagtgaatattga

SEQ ID NO: 497893 - DNA, 98 bp, Homo sapiens
ttgagaataaggctgaacctggaacacatttatgcattgatgtggaagatgcagtgtgatccctcacatccacaaatctctgattggaaagaagggac

SEQ ID NO: 497894 - DNA, 100 bp, Homo sapiens
cccggagaaggtctacagagcggcctgcgccagcgagcatggaagaggagatggttcgtgttacgcagtggccgtttaactggagatccagatgttttgg

SEQ ID NO: 497895 - DNA, 98 bp, Homo sapiens
gactatcgggagaaagtggagtccgagctgagatccatctgcaccacggtgctggtccatggaattgtacggcggtccagttcatttaatacgggtcg

SEQ ID NO: 497896 - DNA, 100 bp, Homo sapiens
ctcacccaggcccctgtcaagaaggtgccggtggtgcgagtcttcggagcgaccccggcagtgacaggatcacagaatgtgaattttgaacagatctgaa

SEQ ID NO: 497897 - DNA, 75 bp, Homo sapiens
gcacctactcatggatggcggctacatcaacaatctgccagggttcttgatggtgctagacattccccaggagcg

SEQ ID NO: 497898 - DNA, 75 bp, Homo sapiens
tggctgaaggccttaccgaggaggagtatcagatgaaggtcaccgtgtccaaagggggcgaccgggacagtgacg

SEQ ID NO: 497899 - DNA, 90 bp, Homo sapiens
aagatagtgaagatgaggaaatgtcagaagatgaagaagatgatagcagtggagaagaggtagagaagcggcgggtcaatctgcctaggg

SEQ ID NO: 497900 - DNA, 100 bp, Homo sapiens
aggtggcgcagccatggcggcaggggagagcatggctcagcggatggtctgggtggacctggaggtaactgcatcctgcccagcatgacggccccctgcc

SEQ ID NO: 497901 - DNA, 75 bp, Homo sapiens
agacatgagatggtagccaacccctcaggaaactcccagtacagccagcagcaggccgggtaccagcagggtgcc

SEQ ID NO: 497902 - DNA, 82 bp, Homo sapiens
gcagttcccgttaaccttagccacaaagtcaaagcagaaaaatatggctcaggagactaaccagaccccggggcccatgctg

SEQ ID NO: 497903 - DNA, 83 bp, Homo sapiens
ttccaccacctccgccagttaagaggaaaaagggtaagggactgttctgaagaacctttccatttagtgatcaagatatggaa

SEQ ID NO: 497904 - DNA, 100 bp, Homo sapiens
cttgccaaacagacccgagacccatgtcagccccactggatgccgtcccccacggcccttcaggatgaaagctgcggtgctgaccttggccgtgctcttc

SEQ ID NO: 497905 - DNA, 100 bp, Homo sapiens
aaaaaacttcccaaagaactcctgttacgataaaataccatgaggagtttgagaagagccgcatgggccctagcgggggcgagggcatggagccagagcg

SEQ ID NO: 497906 - DNA, 100 bp, Homo sapiens
cccttctactgaattagtttctggaggatctgataatcaagtgattcactgggaaatagaggataatcagtctcctacggtagtgtgcagcttatgcaaa

SEQ ID NO: 497907 - DNA, 75 bp, Homo sapiens
gtgccctcaacatctctcagagacgaaaggcagcagtgaggatgccagagttcatgggtttctagaagacaagtt

SEQ ID NO: 497908 - DNA, 97 bp, Homo sapiens
gatgcagatgagaaggttcagttggcaaaccagatatatgacttgattgtcagcagcctgctgcctccgtaccgccacagtgctcacaactagccgg

SEQ ID NO: 497909 - DNA, 100 bp, Homo sapiens
aaactcgaggcaactattgtgcacaaatgaagatgtttccagccctgcctcggcggaccaaaggaaagaagttttcccatttccagaagttagccaagat

SEQ ID NO: 497910 - DNA, 97 bp, Homo sapiens
cttctaacagaattattttgggagggttttctcaggctggagcattggatttgctaaaggagcttaagaatattcctatgaccctggaattactgca

SEQ ID NO: 497911 - DNA, 50 bp, Homo sapiens
cggaacaccctggaagccgagaaatggtatattttggaacttcacatcca

SEQ ID NO: 497912 - DNA, 75 bp, Homo sapiens
tgcgactgctacagggaccatgggacactattacgcaacagactcagggtttgggcactgctctgaagatcttat

SEQ ID NO: 497913 - DNA, 106 bp, Homo sapiens
gtgtccagatcctccaaagacagatctgacatatctgaagagatggattaagaatgctttggattaaggattgtggagcacatttcaatcattttaggattgtcaa

SEQ ID NO: 497914 - DNA, 89 bp, Homo sapiens
aaaggctctccaaggcttttttgaccgagaaggagaagtgccagaaagcccggaagcaaggaaggaaagtgaccaagcatgtggcaaaa

SEQ ID NO: 497915 - DNA, 101 bp, Homo sapiens
ggtgaaggtactggtgttgggagactcaggtcctgggaactccaacaagggagcaaatcagagaaatgaacccaaactacacagaatttaaattccctcaa

SEQ ID NO: 497916 - DNA, 83 bp, Homo sapiens
tgccaagaagactgccgaagagccagctgcctctggccgcatcatcttttctcccgtacatcccagtccagccccagcctctg

SEQ ID NO: 497917 - DNA, 74 bp, Homo sapiens
gcaggatcgcttgagcccagatgtttgagaccagcctgctttggagtttaacccttctgccaatccagaggcaa

SEQ ID NO: 497918 - DNA, 100 bp, Homo sapiens
agcaagggggttgtccacgaggaacaaattgtacatttgcccattctcaggaagagcttgaaaagctgcaagaagtgaaagtcatggctgaccgcatcat

SEQ ID NO: 497919 - DNA, 74 bp, Homo sapiens
acgtaccaggaggatggtgcccaggtagtgggcagcagtcagtgacaggtgtaacctctgtggatgacagcaac

SEQ ID NO: 497920 - DNA, 100 bp, Homo sapiens
gtgacgggtctggagtgcgtgggggaccggctgttggcggggctctgtggtatatgactgcttcgaggctgccctagggagtgaggtacgaatctggtcc

SEQ ID NO: 497921 - DNA, 74 bp, Homo sapiens
tggacaaaggaacaggtatctcaggttcaaaactggtcaaatcaatggtgatttgctgatataccatgtcttac

SEQ ID NO: 497922 - DNA, 83 bp, Homo sapiens
catctttcagcagttggcacacatggttaaggaacaggaggaaaccattcagagtgagaaagatcagtctaaagaaaaggaga

SEQ ID NO: 497923 - DNA, 75 bp, Homo sapiens
ggatccagagcgccgcgcacttcgtcatgttcttcgcgccctgatgaccggttctaacgagttcaagctgaacca

SEQ ID NO: 497924 - DNA, 83 bp, Homo sapiens
gtggaggacgggcctgaagcagaggcagcagagctgtaggtaaaacttgcctactgatcagttacacaaccaatgcatttcct

SEQ ID NO: 497925 - DNA, 104 bp, Homo sapiens
ccgggcgcggctctgtgtggactcggagaaacgcggtgtcactactccatccagaagggagctgcgtttctgggacttggcaccgacagtgtccgagtggtcaa

SEQ ID NO: 497926 - DNA, 98 bp, Homo sapiens
aagcatatccaatcaacatgcataatgatctggaactgctgacacaatactcgtgaccattgtgaggtagatattttgttctaattttccagatgagg

SEQ ID NO: 497927 - DNA, 83 bp, Homo sapiens
attggatgtgaaaatgaagccagaccgagaatcccctactttgaaactagtgctgccaatgggacaaacataagccaagcaat

SEQ ID NO: 497928 - DNA, 97 bp, Homo sapiens
cttggtggaacatgtcaaggaggagtgtgaccgcctgggccctggcatggccgacatatttgcagacctgacagacgctgctgcccgcaacgcggag

SEQ ID NO: 497929 - DNA, 100 bp, Homo sapiens
tcaaggcggattaattagcccaagaaacattatattcatgtctgagaaccattggagttatcaccaaactggaccttatggatgaaggaacggatgccag

SEQ ID NO: 497930 - DNA, 73 bp, Homo sapiens
taatacccctgctgacatttggagcacggcatgcatgcatgggaatcattgtgctggagctgtactggaagca

SEQ ID NO: 497931 - DNA, 82 bp, Homo sapiens
ctgacagcccccacctcgcaagagcagccgcggcgccactgtgccgaggtaaacagagcatccacggaaggggaaagcccgg

SEQ ID NO: 497932 - DNA, 82 bp, Homo sapiens
agctggacttccggaagagtgtgttcgaggagacatgcaagaaagcacttcagccaagcagaagggagccagctggacgagg

SEQ ID NO: 497933 - DNA, 75 bp, Homo sapiens
atccgtcattgagacttattcatgctgtcagagggttgttgaagattggaaattcatagcccaggttcttgatcg

SEQ ID NO: 497934 - DNA, 75 bp, Homo sapiens
cagaacagagagccatccgagttaaaagagtggtggataagaaaagattatggagtctcactttgtcacccaggc

SEQ ID NO: 497935 - DNA, 90 bp, Homo sapiens
ggccacgctgcgggcccgggccatggccgccgccgatgccgagggatcctggacacactggagggccccaacatcccgcccatccagagg

SEQ ID NO: 497936 - DNA, 75 bp, Homo sapiens
gagaaggactccaaggcggagcaggccaaagtgaagaaggctgttttggagtcagcggaagatcaccaaggccag

SEQ ID NO: 497937 - DNA, 100 bp, Homo sapiens
catggaggccgtgaagaccttcaatagcgaggctggcgcccatgcggctctacacgctctccaagcgccactttgtcctcgtgtttgtcgtcttcttcat

SEQ ID NO: 497938 - DNA, 100 bp, Homo sapiens
cccgttcttgcctcaggccagtcgcctccaggccaagagggatccttcacccgtgtctggttctccgggtgccggtccctcccaacgtcgcctttgaact

SEQ ID NO: 497939 - DNA, 98 bp, Homo sapiens
gctactccaaaccaaacagttgctgcagccaagtccagctaatgaggaaactttggtagccctgctgcgcaaacctgcttaaatgaatatcatctttt

SEQ ID NO: 497940 - DNA, 75 bp, Homo sapiens
cggggcctggtccgggcggtgcagatggcccactgcgtgaccttggttcagctgtccatttcctgtgaccatctc

SEQ ID NO: 497941 - DNA, 95 bp, Homo sapiens
aaataatgagagaaaaggccaaagagaggtgttctgaacaagttcaaggtgacagccgtgagggtgtatgtgaacagttcctctgagaatctcaa

SEQ ID NO: 497942 - DNA, 75 bp, Homo sapiens
gcatccagaggtggaattggggcccggacatggtctgctatacagctcagactctcgtccgaatcctctcacatg

SEQ ID NO: 497943 - DNA, 120 bp, Homo sapiens
cgacaggtgtcgcttgaaaagactgggcttgtccttgctggtgcatgcgtcgtcggcctctgggcagcaggatggatagaatgacagaagatgctcttcgcttgaatctgttgaagcgga

SEQ ID NO: 497944 - DNA, 100 bp, Homo sapiens
ccctcgcctcccgagtcactgcagccaacccttcagcaagatttgataatgggctgcattaaaagtaaagaaaacaaaagtccagccattaaatacagac

SEQ ID NO: 497945 - DNA, 131 bp, Homo sapiens
tcggggggcacgcagctgaagctcatcatgaccttccagaattacgggcaagcgctgttcaaacccatgaaaagcccccgagcgcccacagcatgaaggaggaggccttcctccggcgccgcttctccctg

SEQ ID NO: 497946 - DNA, 75 bp, Homo sapiens
agttaatcctcaatttaagcctgatctaacccctagaaacaggggaggttcattacacctgctcactacagtgat

SEQ ID NO: 497947 - DNA, 75 bp, Homo sapiens
gtgccacagcagagacgcgaaggagaggccctagaaccgttctggcagcgtgaggacaggacacatggagagaga

SEQ ID NO: 497948 - DNA, 100 bp, Homo sapiens
gccgccaccaggtcaccctggaagagtcgctggccgaagatcctaattatctcatggctaatgaacgcatgaacctcatgaacatggccaagctgagtat

SEQ ID NO: 497949 - DNA, 100 bp, Homo sapiens
gagtctcccgtcactcaggacatcatctgcgacgtggggatgaacctggcttctgtatttaccatgtacctggagcattggtttggcagctgaaccaggt

SEQ ID NO: 497950 - DNA, 102 bp, Homo sapiens
cagtgtaataccctgaatcccgctttacaggaagtatggtgctggcatctgcttggcttctagagagtcttacaatcgtggaggaaggtgaatggagagcag

SEQ ID NO: 497951 - DNA, 97 bp, Homo sapiens
cccagttgctgtacgagagcaagctctataagattcttcaaggtggggttggcatcccccacatacggatgtacagttacccagcacgtgtacctcc

SEQ ID NO: 497952 - DNA, 97 bp, Homo sapiens
aatgggatggcttcagctgtgactgtagtatgacttccttcagtggaccactctgcaatgaccttcacagacattgggaccttcgagacagtgtggc

SEQ ID NO: 497953 - DNA, 80 bp, Homo sapiens
atctcggctcaccgcaacctctgcctcccaggcagagtggcatgattccgactggatactctcagtgccagccaaattac

SEQ ID NO: 497954 - DNA, 75 bp, Homo sapiens
ccaagatgcggatccgggcctttccggctacagaagaagtttccaaaaatctggttgccatgaaagaaattctgt

SEQ ID NO: 497955 - DNA, 100 bp, Homo sapiens
gttctctccatttggccagatagaagaatgccggatcctccggggacctgatgggctgagtcgagacaagttggatggcttgaggactggtactaaaagg

SEQ ID NO: 497956 - DNA, 95 bp, Homo sapiens
agacccgggagcaggagctgggcctaggtctgcgccctgggtgggccaggaggcagattctcatcagatttggaaggaagcaaccatttggactg

SEQ ID NO: 497957 - DNA, 97 bp, Homo sapiens
tgcgacgagcaagcagcgggtcctggacgaggaagagtatatcgaggtggctattatcatggaaaactaatttttcccagagaatttcctttcaaac

SEQ ID NO: 497958 - DNA, 117 bp, Homo sapiens
tgaactgaatcagcctgctgaacttttacctcagttttctagcattgaatatgtagttctggagcaaatccagaaccagctcgaccatttaaaaagagtgaaagatttaaagaagag

SEQ ID NO: 497959 - DNA, 83 bp, Homo sapiens
gtgcttggcaaaatcgagcgggccattggtgctggagaatctggtaaaagcaccattgtgaagcagatgaggatcctgcatgt

SEQ ID NO: 497960 - DNA, 98 bp, Homo sapiens
cagccatgttgctcacacaaagcctgtttggtggtctcttcccacggacgcgcgagacaatgaggaggtactaaatcagaagtactgaatatagataa

SEQ ID NO: 497961 - DNA, 50 bp, Homo sapiens
aggagagaaaagtctctaagtttgtgtattgctaccagtagtgcagtttc

SEQ ID NO: 497962 - DNA, 100 bp, Homo sapiens
aacagcttatgcattagctgaacatctttcagagttgtatcccaggaggatgcattagcacaacaggcctttgaagaggctcggagaaggacacgcgaat

SEQ ID NO: 497963 - DNA, 114 bp, Homo sapiens
cttcggctgtgtcaatgccattgaattctccaacaatggaggccagtggctggtctcaggtctctaattaacagaagatggcaaagcccagccacagcagctatgtccttcagc

SEQ ID NO: 497964 - DNA, 100 bp, Homo sapiens
aagatgatggaaatcatgacccgagaggtgaagaaataccaccggttgaaagaagaagccagcaagagagcagctaccctggcccaggagctggagaaat

SEQ ID NO: 497965 - DNA, 76 bp, Homo sapiens
accatttgccgtggccaggctagagtcttactactttgaccgcgatgatgtggctttgaagaactttgccaaatac

SEQ ID NO: 497966 - DNA, 83 bp, Homo sapiens
tatagctctgtatgagaaggacaacacctacttaggctgaaggtgatgtggccgccctcaaccgacgcatccagctcgttgag

SEQ ID NO: 497967 - DNA, 76 bp, Homo sapiens
agtctccaaattcgcctccatctgtaccatgagaccatttgtttgtgactatgaagggtgtggcaaggccttcatc

SEQ ID NO: 497968 - DNA, 75 bp, Homo sapiens
ttcctgcgctgttccacctcattcaacttcagaatctccggcctgtgaaactgtgaggggattcggccaagacgt

SEQ ID NO: 497969 - DNA, 100 bp, Homo sapiens
cttagccaagagtctgggtctccgggccaacctgagggcagaagtcaattcatctggaaagactatctctgagtcagacttaaaccactctttttcacta

SEQ ID NO: 497970 - DNA, 88 bp, Homo sapiens
cttgaggcctttctattttgcagtacatccagatttctttggacagcaccccgtagaaaggggttcccagttttccagacctgaagtg

SEQ ID NO: 497971 - DNA, 100 bp, Homo sapiens
ttggtaccagcgtttgggaggtagaggtggcgctcatgcatatttgagacaacatctggatggttggggagaacggaggcacgcggacctccagtggccg

SEQ ID NO: 497972 - DNA, 90 bp, Homo sapiens
tggcgccgggggccggggagcgccagcatgaaggccctggtccaggtcattataatgtgaaaatgcctccaacaagctctgtcacttctt

SEQ ID NO: 497973 - DNA, 75 bp, Homo sapiens
ctctgctgctcaaaatttctcttccagacctcgaagtagggggaaaactgcagtggaagatgaggacagcatgga

SEQ ID NO: 497974 - DNA, 100 bp, Homo sapiens
acccctatccagacggctgcccttcaagtaccaatatttctccctcgagtggctgggaaacttggcaagagaccagaggacccaaatgcagacccttcaa

SEQ ID NO: 497975 - DNA, 82 bp, Homo sapiens
atcgtgccggcttcgcgcgcgaacccggctttcgcatttgggaccctgcagggtgacttaagagattaaaattaatttggtt

SEQ ID NO: 497976 - DNA, 74 bp, Homo sapiens
tccacatgttgctgcaaatgggtgctaatcacaccagccagacttacctcaacacttcactccatggcagttcc

SEQ ID NO: 497977 - DNA, 90 bp, Homo sapiens
ctgctctggatgatgcagaagaggagtcctttaggaaggcatctaataggattcaggaatcaaagaatcagtgtactcaggtggtacagg

SEQ ID NO: 497978 - DNA, 97 bp, Homo sapiens
tctggagtccgtgtgccagcaacagagctgggtccgggtgtacggtgtcatggagaaactccagctgggcccagagattctgcagcgggaaaatcca

SEQ ID NO: 497979 - DNA, 140 bp, Homo sapiens
agtggaaactaggcataaggaagaatgtctcatgttcgagtctggggctgtcgctgtgctctgaaggagctcattgccaagttagatcaggcagaaaaggagaaggtggatgctgctgagctggttcgggaattcgaggc

SEQ ID NO: 497980 - DNA, 83 bp, Homo sapiens
gaacacgacaattctgacgcccaatgggaatgaagacaccacagctggagtgggaactggtggtgctggggaagttgaagtgg

SEQ ID NO: 497981 - DNA, 75 bp, Homo sapiens
gtgaaattccgtggggaagaaggtttggattacggtggtgtggccaggttccttgtggagaagcactggtataag

SEQ ID NO: 497982 - DNA, 90 bp, Homo sapiens
ggccgcggggccaggaagtcggagtttgagccccggaggcagagcggctgccatgatgctgtcttcgcaggtgccatgcctacaatggca

SEQ ID NO: 497983 - DNA, 89 bp, Homo sapiens
atgtctttgttactagactgggcattagttccttaataagagctaacagtaacaccaacagtaacagtagccttataacaagtcaggat

SEQ ID NO: 497984 - DNA, 105 bp, Homo sapiens
cttggtgtccggcgtcccgggggcgcagggaaggagggcgtccgagtcaacaaccgcttcgagctggtgatgtgtccaatctagatcccaacttctcatttgaag

SEQ ID NO: 497985 - DNA, 100 bp, Homo sapiens
gtggtcccggaacctctcgtaaaccagcttcttctcagcctgttgataaccatgttagcccatcttccttcttgggccagacaccagcatctccagccag

SEQ ID NO: 497986 - DNA, 101 bp, Homo sapiens
agtggtggctggcgcagtatatctacaagagcgcacctgcccgttcctatgtcctgcggttggatggcaagcatgtggtgtttggcaaagtgaaagaaggc

SEQ ID NO: 497987 - DNA, 100 bp, Homo sapiens
tgaatcgccatctcctgtgactacaaacactccagcgcagaattttgatttggctgctgggctgctaccttgaaatccaagccctaaaaatgccagcttc

SEQ ID NO: 497988 - DNA, 82 bp, Homo sapiens
gtcctctcgggagaagcagcgcctgttcccggggcagatccaggttcagtttggtgccctggttgtcagatgttggaaagca

SEQ ID NO: 497989 - DNA, 75 bp, Homo sapiens
gggacgcgggcgccaggaccggccgaacgcagagaaattgttccaactgctggtgttctgcaagatggagccagg

SEQ ID NO: 497990 - DNA, 100 bp, Homo sapiens
cggcggcttccgtcacctccgctcccccgatcctattcccagtcgtcacacgttagatgtcaagagtacaatgttacctgctgccgttcgttgctctgag

SEQ ID NO: 497991 - DNA, 98 bp, Homo sapiens
gccaacatacaatgtggctgtcggcagagctggtagagttgttgacctcctgtactggagagacattaagaagactggagtggtgtttggtgccagcc

SEQ ID NO: 497992 - DNA, 95 bp, Homo sapiens
aaacaccgaagggacattctgtcttcatggacatttttgaacttgtgttggtgacaaagttcctgctgatataaggttaacttccatcaaatcta

SEQ ID NO: 497993 - DNA, 100 bp, Homo sapiens
tcccacccaccgcagagccagcaaaaacagctcagagggctgtgctgaagtttgctgctgccactggagccactccaattgctggccgcttcactcctgg

SEQ ID NO: 497994 - DNA, 75 bp, Homo sapiens
gcctggactgtgggctggtgtgtggaactggaattatgtttcgcagaaaagtgtccccaaggaagtgccaccagg

SEQ ID NO: 497995 - DNA, 100 bp, Homo sapiens
gctttgatttacagcagctgcagggtgaggtggctttgaccccgggttgcccggccagcacgaccgaggaggtggctggacagctggaggatgaacggag

SEQ ID NO: 497996 - DNA, 98 bp, Homo sapiens
tgaagaagcaggaggctaagaaagtggtgaatcccctgtttgagaaaaggcctaagaattttggcattgatgccgacaaaaggatcaaggtggcgaag

SEQ ID NO: 497997 - DNA, 100 bp, Homo sapiens
ttgggaaatgcaacaatccaaatggccatgggcacaattataaaggtgtctcccagtctgctaaagccctaaggccatcaccatggacttccagcatcgc

SEQ ID NO: 497998 - DNA, 100 bp, Homo sapiens
ctttggttacctatgtacctgttaccactttcaaaagtgtggatgaggtcaccattgtcaacattttgaccaaccgcagcaatgcacagagacaggatat

SEQ ID NO: 497999 - DNA, 100 bp, Homo sapiens
cattaacatcaggcacgataaaagccatgttgagtggcccagtatgcaggaagcaggcggtcaatgcctctgggagcaaggatccttttccacggtgtgt

SEQ ID NO: 498000 - DNA, 101 bp, Homo sapiens
cttctgagggacagcaatgagaccaccgggctgtactctctctctgtgagatttggagcaagaggtggtggtggccttcccccgaagaaatttggtaatcc

SEQ ID NO: 498001 - DNA, 100 bp, Homo sapiens
tgatgataccgatgtagaggttacctctgaggaaggaacctcaaaatttgcaaacctggacagcagtgtgaaagaaaaccagaagcgtacccagaggcgg

SEQ ID NO: 498002 - DNA, 80 bp, Homo sapiens
cgtcatcaacgggcagtttgtcgaacgatgttggactcatagtcactgccagaaaggaagctcttcgtgggcggtcttga

SEQ ID NO: 498003 - DNA, 115 bp, Homo sapiens
gagtgtaggaagaggcactgctgagggggcgcgaggggaacggaggccagagctgcgtggcttgttgtcagaggccccaaatgaaaaactcttcttcgtggacactggctccaag

SEQ ID NO: 498004 - DNA, 100 bp, Homo sapiens
cggagaccgaggagcagcagcgattctcttaccaacagattgccacggcagtgaagtttctacagaattcccgggtccgccagagcccacttgcaaccag

SEQ ID NO: 498005 - DNA, 100 bp, Homo sapiens
atggccaagtccagatatatggagctctacacgtatcctcctgcctagcgcaggcctccccatggccacccatggaccagtcggcattcacttcctccct

SEQ ID NO: 498006 - DNA, 97 bp, Homo sapiens
ctgcctttgagcggactcccttttaaggaactggagctctgctatcgaagccctggagaagaccagctgttctcggagttctacgttggccacttgg

SEQ ID NO: 498007 - DNA, 75 bp, Homo sapiens
cctcagggcagagaaccatcttatgccagacagctgttccaagaagggcggcgactggcggcgcgatggacctga

SEQ ID NO: 498008 - DNA, 80 bp, Homo sapiens
gacctggcactaagggagcacgccgcggtcaaccaggatgtcctggaacaggtggaggcctatcaagctgaggctcgtga

SEQ ID NO: 498009 - DNA, 100 bp, Homo sapiens
ctcgcacatttgacttggaagcaatgtttgaacaaactcgaagaacagctgtggaaagaagttgcaaaacactgggccggaaggtggtggtcgtacgctg

SEQ ID NO: 498010 - DNA, 74 bp, Homo sapiens
ctatggcgaggtcggacgcgtcttctttcaggctgagggagaagatggtataaactggtccatcagtgacaaag

SEQ ID NO: 498011 - DNA, 100 bp, Homo sapiens
tttccttacctgtttttccagctcacccactgccagcagagattgtctaaagccccaggaaaaatggtggaaaattcaccgtcgccattgccagaaagag

SEQ ID NO: 498012 - DNA, 73 bp, Homo sapiens
gacggtggaggttcgcggctctaacggggctttctacaagtgatgtcttggcattgcccattttcaagcagga

SEQ ID NO: 498013 - DNA, 82 bp, Homo sapiens
aggcttcgcggggctacatgacatcaggtatggcacagtcacaagggtgggtgaaaagatacatcaaggccttttgtaaagg

SEQ ID NO: 498014 - DNA, 75 bp, Homo sapiens
gtgtgcaatgccccgggctgtggacagctgcagaaccttggcctgaaaatgctacattatatcagcaattgaaag

SEQ ID NO: 498015 - DNA, 75 bp, Homo sapiens
ggagaagccgcccaaagaactgatgccatggacaatattaccaggcagaaccaattctacgatacccaagtcatc

SEQ ID NO: 498016 - DNA, 98 bp, Homo sapiens
ccacctgagcccccgctgagcagcccagccagtcagcacaaaggaggacgtgtgaaactggaacgccaagctgaagaagaacgaatacggaagcacaa

SEQ ID NO: 498017 - DNA, 90 bp, Homo sapiens
cgaagctggccgagcaggctgagcgatacgacggactgaaaactggatatttggtccccatggactttctggtcaccctgtgaagtggac

SEQ ID NO: 498018 - DNA, 90 bp, Homo sapiens
tgatgcagcagaagctggtggaccagaacatcttctccttctacctgagcagccctctggaccccgaggttggaccctactgtgacacac

SEQ ID NO: 498019 - DNA, 89 bp, Homo sapiens
cggcagcatcttcagctcttgggtttagcaaaagttcatctccttctgcatccttaactgagaatgagttacatgggaattggtctttc

SEQ ID NO: 498020 - DNA, 74 bp, Homo sapiens
ctgtccagtttggaactgttcctctcctgtgcacagaaacagagaagaatttggattggtttcctcggatgcga

SEQ ID NO: 498021 - DNA, 50 bp, Homo sapiens
ggggggcctggccgcgcagccgtctgcgggccaggcatcgacatccgcaa

SEQ ID NO: 498022 - DNA, 96 bp, Homo sapiens
cttgcagaagcaaaggagaagatatatctaaaaggattttatgagggtgtctggtctctgatccagctggcgcgcagatacctgcagaagggctac

SEQ ID NO: 498023 - DNA, 90 bp, Homo sapiens
agcgagctgagtggttgtgtggtcgcgtctcggaaaccggtagcgcttgcagcatgcacccagtcagcttgaagagtttcaaatggaccc

SEQ ID NO: 498024 - DNA, 73 bp, Homo sapiens
gcatggggcagccgccagcccaaacaggcgtgtcacagaactgataatgctatcaagaaccactggaattcta

SEQ ID NO: 498025 - DNA, 50 bp, Homo sapiens
cagaaccccagctctacccacgcaattctgtggtgttcttggtcacacat

SEQ ID NO: 498026 - DNA, 83 bp, Homo sapiens
caagcctctacaggggcctcccgcgccccccgggacccccacgccgccgccagacgtggaatagctgcacaacctctttatgc

SEQ ID NO: 498027 - DNA, 100 bp, Homo sapiens
tccgccaacgcggtcatctcgcagaacgccatcaaccagctctctggaagaaaacacattgaattcatgatcatggttaacctttggagagagagaggag

SEQ ID NO: 498028 - DNA, 82 bp, Homo sapiens
caggacttcaacactatgtttacaaattgttacatctacaacaagctccttccgcttccagccgttcgagtcctatgactcc

SEQ ID NO: 498029 - DNA, 59 bp, Homo sapiens
aagaagaatcttcagcccagttatcaaatgaagagttcacaacaaagatatgagttggc

SEQ ID NO: 498030 - DNA, 147 bp, Homo sapiens
gcagaaatgaaaactgaagatggcaaagtagaaaaacactatctcttctatgacggagaatccgtttcaggaaagcttttgttctatggaaagagatgaggaagactctataatcgtctcagaaggaataattgaggaatacctagc

SEQ ID NO: 498031 - DNA, 71 bp, Homo sapiens
cgtcgggagcggagcctcctcgggaccaggtgttctcctgccggagcaatatgaacaagcacctgctcacc

SEQ ID NO: 498032 - DNA, 131 bp, Homo sapiens
gagctcctggtgcccttcttcctcttcctcggccggcgggcgtgcatcatccacggggtgctgcagatcctgttccaggaacaagatcactcaaggtgaaggataatctactaataccagcactttgaatg

SEQ ID NO: 498033 - DNA, 75 bp, Homo sapiens
gcctgacagagaaggctcactcaaggatcagttggctttagcaattggagactctgcacattgatgaggatgata

SEQ ID NO: 498034 - DNA, 100 bp, Homo sapiens
tcgtcggggaggtggtagaagaagtgctgtccccggcataggtccatctctgcagaagccatttcaggagtacctggaggctcaacggcagaagcttcac

SEQ ID NO: 498035 - DNA, 100 bp, Homo sapiens
tctgagggtacattttggcaaccccaaagacagcacagttcatctctgcctgtctttccaagagcaaagataggaaccaaggctttagccttctcaactc

SEQ ID NO: 498036 - DNA, 100 bp, Homo sapiens
ggggcacccgtgtacatggccgccgtcctggaatacctgacagctgatgttctaatcatgtcagataaagatgatattgagactccactgctaactgaag

SEQ ID NO: 498037 - DNA, 144 bp, Homo sapiens
acttgaccttcattccagaagaaatccagtatctgagtaatttgcagtactttgctgtgaccaacaacaatgtcatgcaagacaagataatctgccttccgaaaagagtgcagcctgctcagaaccactcttccctttcgaatg

SEQ ID NO: 498038 - DNA, 99 bp, Homo sapiens
ctccttttccctctccctttccctaaggaatcccagtcagaagttccagcctgccactgttctctgatgccatgccagcaccaactcaactgttttttc

SEQ ID NO: 498039 - DNA, 50 bp, Homo sapiens
gaaattcagacggctcccgaggcttcctggacaagatcgacgtgatcaag

SEQ ID NO: 498040 - DNA, 75 bp, Homo sapiens
aagttcctgccttaactcctctttacttgctgtcagctgcggaggttgatgagaacatgaaggtagcacagaaaa

SEQ ID NO: 498041 - DNA, 100 bp, Homo sapiens
ccgctggccgacgagcggagcctcaggagccggcggggacgccatgcgagccagtaatctatgccagcaattatgacaatgttagcagaccatgcagctc

SEQ ID NO: 498042 - DNA, 83 bp, Homo sapiens
gttgtgttgtgccaatggtggagaagaaaacttcggacaatgcagatcttcgtgaagactctgactggtaagaccatcaccct

SEQ ID NO: 498043 - DNA, 100 bp, Homo sapiens
tcctggcggtttttattaaggctgttcatgtgaaaggacctgatcccaaccttgaagaaagtcctaaaagaaaaaatattacatatgaggaattaaggaa

SEQ ID NO: 498044 - DNA, 100 bp, Homo sapiens
aatgggacgtgaagcgcttgcagacgcactgctacaaggtccatgacccagaaaaagtcctacctggagcgaagcgttaaggaagctgaggacaacatcc

SEQ ID NO: 498045 - DNA, 50 bp, Homo sapiens
ggccatgtaccccttcaagaaggccatgactgctccctgcgtctctggag

SEQ ID NO: 498046 - DNA, 101 bp, Homo sapiens
ggcctcggcggctgaggaaagcaggaggaggtggcggcggcgggaagatgtgctggagaatctggtaaaagcaccattgtgaagcagatgaggatcctgca

SEQ ID NO: 498047 - DNA, 83 bp, Homo sapiens
cgacaaggagggcatgatcaacctcgtcatgtcctacgcgttcctccgtgtcacaaagcagtacctgccccacgtggcgcgcc

SEQ ID NO: 498048 - DNA, 51 bp, Homo sapiens
actggaggagtcccgctcgaagctagatccaaacgatcaaagatgttgctg

SEQ ID NO: 498049 - DNA, 106 bp, Homo sapiens
aagattatggccaacagttagaaatcgtatgtctgattgacctgggctgcttccgagaaattgatgagctaataaaaaaggaaaccaaaggcaaaggttctttgga

SEQ ID NO: 498050 - DNA, 78 bp, Homo sapiens
tgcacttaaaggaattctacctcactcccaactctcctgcagaaatggtttgtgagccgtatctccgtggtgccaact

SEQ ID NO: 498051 - DNA, 100 bp, Homo sapiens
agttcgtctcttacgtctgcggaagtgcagctgcctcagttcttagcgcagacctggaatggccaaatatcaaggtgaagttcaaagtttgaaactggat

SEQ ID NO: 498052 - DNA, 98 bp, Homo sapiens
ttggggcccgcacggaccctctacttcagctcttgcagccaatgccggaacaggatttgctgttgctgagcctcaaatcgcaatgttttgtgggaagt

SEQ ID NO: 498053 - DNA, 100 bp, Homo sapiens
atccccccgggctacatctcacaggactttttttatgaagacatggagtccttgacgcagatgcttagggccttggcaacagatggaaataaacaccggg

SEQ ID NO: 498054 - DNA, 100 bp, Homo sapiens
gtggagaatgtcaagctgaaggcgtcctcttcttccaagtgcttcatgcccaccagtttctgcagaatgaatatgccctcagtctggtttcctgcaagct

SEQ ID NO: 498055 - DNA, 100 bp, Homo sapiens
caccaagtctgtgtcagaaggccacctcaagaggaacatcgtggtgaagaccgtggagatgcgggatggagaggtacagagccagatggactccttcgga

SEQ ID NO: 498056 - DNA, 75 bp, Homo sapiens
cagtggtggccctggagcagtatgccagcaagaacaaactcacgatgttggacattgcatcaaatagaatcaaaa

SEQ ID NO: 498057 - DNA, 100 bp, Homo sapiens
ccacagcatgcacttccttccagcagctacacagctgctagcagaagaaagtcttcccacaaccccattttatttcatattgggaaaacacaggcaacag

SEQ ID NO: 498058 - DNA, 83 bp, Homo sapiens
gattccaacaacaattccgatggcaaagccgttgccaagtcgactcctttacatctagcagcgggctacaacagagttcgaat

SEQ ID NO: 498059 - DNA, 88 bp, Homo sapiens
acatcatcaactcctaatagtaactctacatctggttctgctactagcaacccttttggtttaggcatagaatgtcaagctaaccagg

SEQ ID NO: 498060 - DNA, 89 bp, Homo sapiens
ctaaccttcccttcttgaacccccagattgcttcctccacagtttcctcaggaaaaaccagtgatcagtgtttatccaccaatacgaca

SEQ ID NO: 498061 - DNA, 100 bp, Homo sapiens
cctcgtggacaagtttgcagatcgggagcgcaaggtcgccctcaaggccatgatcaaaacctatcatggtgaacttacttcagattgtgcgggaccactg

SEQ ID NO: 498062 - DNA, 98 bp, Homo sapiens
tttgcaaaagtaaaattggcaagacatatccttacaggcagagagacctctgtgagtgaaagccttcagagggaagctgctaagaagcaggccatgaa

SEQ ID NO: 498063 - DNA, 83 bp, Homo sapiens
acgcggacatggtcatgagctttgtgaacctgggctaccggctctctgaccagttccacgacatcctcattcgaaagtttgac

SEQ ID NO: 498064 - DNA, 98 bp, Homo sapiens
cgagagcggttgcaggacgactcggtggaaacagtcacgtccatagaacagaatcattgcgatgatgagtccagaggacagctgggtctccaagtggc

SEQ ID NO: 498065 - DNA, 100 bp, Homo sapiens
tcggtaccaggctgtcctggccaacctgctgctggaggaggataacaagttttgtgcagattgccagtctaaaggaatctacttgaaaatggatcggttt

SEQ ID NO: 498066 - DNA, 75 bp, Homo sapiens
tccaaacaagcagctggataaggatcttacatgcagacactgaaaacaccacagggatggcgagaagtatttgtt

SEQ ID NO: 498067 - DNA, 51 bp, Homo sapiens
ttgtcctcacaagttctgatgaaataagcgggttttgaaaacaaaaaaaag

SEQ ID NO: 498068 - DNA, 73 bp, Homo sapiens
ctggaattgctgtaggtgcagctatgattattcagcgatgttttactaaccacttctgaaaaaccacagttta

SEQ ID NO: 498069 - DNA, 106 bp, Homo sapiens
cttatgcaagaaactgttgaattagacccgtttcctatagatgagaaaccatacaagctgtggtgagcctgaatttaaatacattgggaatatgcatgggaatgag

SEQ ID NO: 498070 - DNA, 83 bp, Homo sapiens
gccgggagctgcagagacacaacaagactctgaaggaactgtggctgcaccatctgtcttcatcttcccgccatctgatgagc

SEQ ID NO: 498071 - DNA, 97 bp, Homo sapiens
ttgccgccgtctcctcctcttgcccgcgcaggcacccctctggctgctcagtcctgcctcagtgaagcgagaagctgccctacccccagtgagcccc

SEQ ID NO: 498072 - DNA, 83 bp, Homo sapiens
aaaaaaaaaattcatctgggcggtatctggaacttggcttcaacggaccacaccaaaatgccatctcaaatggaacacgccat

SEQ ID NO: 498073 - DNA, 83 bp, Homo sapiens
ggcagcggccggagccgggccgggcagctagcagggcgcttcgggcggctatgagaggttttcctccgagtacccagaattct

SEQ ID NO: 498074 - DNA, 90 bp, Homo sapiens
gtaccgggattccttgccccagttggtacagagtgaagacagtgtcctcctgtttgttattgcatggacgatcacggaaatcatccgtta

SEQ ID NO: 498075 - DNA, 75 bp, Homo sapiens
gcaagccggtgcagcagccttcagcttttggcagcatgaaagttagcattccatacgttttgaagagctgtgcag

SEQ ID NO: 498076 - DNA, 75 bp, Homo sapiens
gcgacccgtggccttgtgtttcagattctgcctgatcaatgcaggagtcctgtacctctacttcagcaattacct

SEQ ID NO: 498077 - DNA, 101 bp, Homo sapiens
acgagcaccaagaagctgagaatgctgtttcctcagataaacaacccagacatgcgagtgcagatcctcaaagattacgtcaggcagcacttccctgccac

SEQ ID NO: 498078 - DNA, 117 bp, Homo sapiens
gcgccttctgcgtctcccggctggtggggaagcctctgcgccgccggcaccatgaggtgctggagaatctggtaaaagcaccattgtgaagcagatgaggatcctgcatgttaatgg

SEQ ID NO: 498079 - DNA, 90 bp, Homo sapiens
cccacccaggaggatggtgtggaccctgttgaggctcatcagattcaagagatgtttccccaggttccataccatctggtactgcaggac

SEQ ID NO: 498080 - DNA, 75 bp, Homo sapiens
tgctgtttctcttcgccgacggagaccatctagctggctgcccccgacagtgagtgtgttggctcttgtgaagcg

SEQ ID NO: 498081 - DNA, 91 bp, Homo sapiens
cgcaaacccaaagatccccgttcctggagattctgattgaggtatcatgatattagctggtttgacatcaagtcatttgtgagtcatcaga

SEQ ID NO: 498082 - DNA, 98 bp, Homo sapiens
atgtatcagggacagtggcggatgtgcactgctacaggactctactatggaggtctggagggtgagcgacctgcgagactcacaagaggggaagctga

SEQ ID NO: 498083 - DNA, 90 bp, Homo sapiens
cctcctgctgccttcccgtcgccgctcccgaagcttttccagtgcacctatgatatgtgttttagaaatagccgttaaactttggtttga

SEQ ID NO: 498084 - DNA, 100 bp, Homo sapiens
gaagagcgctgggttggacctttacctgtggaggcaacactggccaagaagaggaaagcctaccgtatgtgaacgggagctgtgtgtgtttgcttttcaa

SEQ ID NO: 498085 - DNA, 106 bp, Homo sapiens
gggagattcgggaccatggcacctgtgcacggcgacgactgtgagataggggcgagtgatgcatatgaaacagccaagatgctgtgtgaacagtattacctggtag

SEQ ID NO: 498086 - DNA, 90 bp, Homo sapiens
tactactactactacatggacgtctggggcaaagggaccacggtcaccgtctcctcagcacggggtcactctggtgcccattgaggagtt

SEQ ID NO: 498087 - DNA, 75 bp, Homo sapiens
cagcaaaccatcctgtgttaccagcttccttgtggtcatagatgcaaagagatgtgtcatcctggtgaatgtccc

SEQ ID NO: 498088 - DNA, 83 bp, Homo sapiens
cagccagcgccttcatcctggggctgcgatgcctcaaggaataggttctcctagtgtctatcatgcagttatcgtcatctttt

SEQ ID NO: 498089 - DNA, 98 bp, Homo sapiens
ccaacaatgttattcggctgaaacctccttctaatgtggtgtcccccctggaacaggctctctcacaacatggctgacttcaaaatttctgaggagtg

SEQ ID NO: 498090 - DNA, 82 bp, Homo sapiens
cgagtacctgcagtttaataagcgctgcgggggcttgctgttcaacctggcggtggtttggtgaggattcatcaacctccag

SEQ ID NO: 498091 - DNA, 99 bp, Homo sapiens
aagagaaatggagcccttctccaagatggaacagattaaaagggccaataaactgtttaccaatgattgtatatttctgaagaaaactttgaacatccc

SEQ ID NO: 498092 - DNA, 100 bp, Homo sapiens
tgattctgaagagggtctggaggagccttctcaagaacagagtggaggccatagtggagtttgactaccaggcccagcacgatgatgagctgacgatcag

SEQ ID NO: 498093 - DNA, 100 bp, Homo sapiens
ctcggagacccagacaatcacaggcaaaggaaggatgaactggagcagaggatgtcggccctgcaggagagcaggcgggagctgatggtccagctggaag

SEQ ID NO: 498094 - DNA, 100 bp, Homo sapiens
catccataattcctatctttaaaagaggctattactccaaagcgactcctcacatctataaccacagtaagtagaatttttgagaaattgagcttccttg

SEQ ID NO: 498095 - DNA, 74 bp, Homo sapiens
ggaggttgggatcttcttcactgcctctggcatggatgagccgccagctgagggccattcgcagcttctccagg

SEQ ID NO: 498096 - DNA, 96 bp, Homo sapiens
atgaattgtatggaatagttggtgctaaccttaagaggagctttgatgtccgagaggacacaactcagatgggaagttcatcgcccgggcacagcg

SEQ ID NO: 498097 - DNA, 83 bp, Homo sapiens
gtgaattcggtaaccatagaccaaaagttttaaccgtgattggagataccacaaagaagaacgagtatggattaccagggcac

SEQ ID NO: 498098 - DNA, 100 bp, Homo sapiens
atccccggggcagctgctggtgtgctccaggtattcatgggctgccctgggcaagagccagctctgtttagcactgataatgatgacttcactgtgcgga

SEQ ID NO: 498099 - DNA, 83 bp, Homo sapiens
cttggactgagtcctgcaggacacagattatgagcctcaaacaatttgtgagcatctccagtacttgtttgccttgttgcaaa

SEQ ID NO: 498100 - DNA, 101 bp, Homo sapiens
ctatccttttgggaccatgcgcggaggaggctttggggaccgggaccgggatcgtgaccgtggaggagtgatcagcagctggactgtgccttggacctaat

SEQ ID NO: 498101 - DNA, 108 bp, Homo sapiens
tgagcgcaactagcggcgggtcgtgggcacctccaggtatgcacctgtgggcatcctgttcctgattgctgggaagattctggagatggaagacatggccgtcctggg

SEQ ID NO: 498102 - DNA, 83 bp, Homo sapiens
ccccgtcttcgacctcagttacttcatcgtctccatcctctacctcaagtatgagccaggccgagacgcatccagagctttcg

SEQ ID NO: 498103 - DNA, 82 bp, Homo sapiens
ccacgcaaccccagatccatttacactttacaccacgccgcaatgaagagcttcttacagtgaaagcaaagtaggtcgagtc

SEQ ID NO: 498104 - DNA, 90 bp, Homo sapiens
cctgtattggtctcctgctcctagaggatctctctaggagctgacactcgaaccttcacgacccattcggatttttccaggactcaggag

SEQ ID NO: 498105 - DNA, 100 bp, Homo sapiens
ccccgtctcgtactgtcgccgtcaccgccgcggctccggccctggccccgatggctctgtgcaacggagactccaaggaagtggatgctttggaagaatt

SEQ ID NO: 498106 - DNA, 75 bp, Homo sapiens
cggggccaccggctggagcggatcccacacctccggaccgagggacgcggctcaccatggatgatgatatcgccg

SEQ ID NO: 498107 - DNA, 99 bp, Homo sapiens
ggaaagtttttccaaatattcatctgtacagatatttcagcagttgaatcagttgaattcacttcatcaagaaactatcatgaaatgcgtgaaaagtag

SEQ ID NO: 498108 - DNA, 100 bp, Homo sapiens
cctccaggacagcacctagtcgtggccggaggagtctcagagctgtcagaaagtacatccagcagtggtcattcgacaacgaaagtcataccgtagaaaa

SEQ ID NO: 498109 - DNA, 100 bp, Homo sapiens
cgagcacagagcctcgcctttgccgatccgccgcccgtccacacccgccgccagatgccgcatcctcgaaggtaccactcctcagagcgaggcagccggg

SEQ ID NO: 498110 - DNA, 100 bp, Homo sapiens
tccgatgcagatttatggctcctgaacagttgcactgtaaaaaacccagctgaagaccactttagaaactcaattaagtggagccgccaccaaaatgcag

SEQ ID NO: 498111 - DNA, 100 bp, Homo sapiens
cctcaggacacggcctacaacaccaagagcgccactggcttcaccacgcggtcagacattgggcccgcccgtgatgcaaatgaccctgtggatgatcgcc

SEQ ID NO: 498112 - DNA, 82 bp, Homo sapiens
gggcgccggctcccagtttggagaggtggagaagagcgagtacttgagaaagaagaggaagaagatgatgatgaagatgaag

SEQ ID NO: 498113 - DNA, 77 bp, Homo sapiens
ggagcagaggggacagaggcaccaaggacctccaagacagaactgccattggatgtccagaatcccctgtagttgat

SEQ ID NO: 498114 - DNA, 96 bp, Homo sapiens
ctgtagggtatggtccagctgtgccgcaccgaggcgagcaggagcagggaacaggattgttaaaatgagtcttcggaagcaaacccctagtgactt

SEQ ID NO: 498115 - DNA, 155 bp, Homo sapiens
ataaaaaggagcaaaagaaaaaagaatggatcaaccaagaacgtcaaacactccaacaattgagagcatttaaagattgcatacatagagacgtgaagccagaaaatatcctcatcacgaaacattccgtgattaagctttgtgactttggattt

SEQ ID NO: 498116 - DNA, 100 bp, Homo sapiens
ggaaaaccgaagttggaagtgtctcttagcagcgcgcggagaagaacggggagccaggctttgatgacagtagggaaagaaccatttcctaccatttacg

SEQ ID NO: 498117 - DNA, 80 bp, Homo sapiens
gggggccaactctgaggagtccactgcagcagaaatatggctacacacacctttctgcaggagagctgcttcgtgatgaa

SEQ ID NO: 498118 - DNA, 96 bp, Homo sapiens
cgggcgggccgcgatggcagcttcctggtccgagacagcgagagcgtggcgggggccttcgcgctctgcgtcctcatgtgaagatggatataggct

SEQ ID NO: 498119 - DNA, 90 bp, Homo sapiens
ttggcgccaccgcctcatgcactgtgtagtgatcccgaaggtcaccaagcacctgctctcaaaccctgtgttcacctgcatcatcctggc

SEQ ID NO: 498120 - DNA, 80 bp, Homo sapiens
cccagatcccagcggaaaggagcgcgcctctttttggcttggggagctgcagcgttcgcccagggccttgctgccgccat

SEQ ID NO: 498121 - DNA, 92 bp, Homo sapiens
caaaatggaatgtgaagagcaaaaagtctcagatgagctcatgagtgaaagagtgttgcggagataggaacatgggagagaaacaatctggg

SEQ ID NO: 498122 - DNA, 82 bp, Homo sapiens
tccgctgggagggcgtcttccgctgcatccccatcttcggcatgtccttcgcctgccagtcttgatattcactgatggactc

SEQ ID NO: 498123 - DNA, 100 bp, Homo sapiens
gttaattggtaggttggagttgagtctcacgttgaaacagaatgaagtgcttcctggagctaagaatgtcgttcatgagctaagaataaccaatcaggta

SEQ ID NO: 498124 - DNA, 100 bp, Homo sapiens
gctgtgggacctattgttcagttacaagagaaactttatgtgcctgtaaaagaatacccagatgtatgctatacctccggagcatggaaaacgacttgaa

SEQ ID NO: 498125 - DNA, 51 bp, Homo sapiens
tgagcggcctccacctaaacgacttactagatccctgcatgtcactgagtc

SEQ ID NO: 498126 - DNA, 74 bp, Homo sapiens
acctttttgcctgtgtttggggcacattcattctcatctcttgacaacactgcagctgaaggaggagttgctgg

SEQ ID NO: 498127 - DNA, 100 bp, Homo sapiens
caaacaatcatgggaatttccaaggggattcaaacttcaacagaatgtggcaaccagaatatccaagggactgagtgaaaagatatttgcaaaacctgaa

SEQ ID NO: 498128 - DNA, 119 bp, Homo sapiens
ctcctgctgtaaggagtgcatgctgtgtcttggggccctttgggacgagtgctgtgactgtgttggtgtcatggagaaactccagctgggcccagagattctgcagcgggaaaatccaa

SEQ ID NO: 498129 - DNA, 97 bp, Homo sapiens
cagacgcggccccagcgcccactggggatggcaaagacgacatccggtgcgccgaggctgctcacaaaagtgtcatggagaaactccagctgggccc

SEQ ID NO: 498130 - DNA, 96 bp, Homo sapiens
tctggccagagacctgctggaaggtgtggtcactcacctgtctaccactcccgtgaaatggcagctcgtgccttggtcccatttgttatgatagat

SEQ ID NO: 498131 - DNA, 100 bp, Homo sapiens
cgtagcagcgcaggccgggaagcttctgcgagccctagcgctgcggccccgcttcctggcggccgggtcccagggggcagtgcccaaaggaaatgccact

SEQ ID NO: 498132 - DNA, 75 bp, Homo sapiens
agctgaagaaaacctgtttaaactcattgtcaaaatgtttggaatggttttggaaaaaattattattcctgaaat

SEQ ID NO: 498133 - DNA, 50 bp, Homo sapiens
gcgtcaggcatctcaatcatggcaagaaactatattcagtctttgactca

SEQ ID NO: 498134 - DNA, 82 bp, Homo sapiens
gcgagcacagagcctcgcctttgccgatccgccgcccgtccacacccgccgccaggtgtcccgacccaggctaagcttgagc

SEQ ID NO: 498135 - DNA, 90 bp, Homo sapiens
aaatgcacgtctctcttcagctcactgaccatctgcctacctcccgttaatggaaccgcgactcacagatatcaatgatgtcaaacggct

SEQ ID NO: 498136 - DNA, 75 bp, Homo sapiens
ctgcgccccaggtgttgtgtgtgggggtgcaggccataaaattttgagtagaaaaatccagaaatttgaaaatca

SEQ ID NO: 498137 - DNA, 97 bp, Homo sapiens
cttcagctccagctccgctctcttcggctgccccaatccccggcagctctctcaggtcagcccaaggccaaccccactgtcactctgttcccgccct

SEQ ID NO: 498138 - DNA, 80 bp, Homo sapiens
tcctggtcgatgaagaggatgatgtttttggtgaagtgcctacaccaactaatgttacaattgaatcctataacatgaac

SEQ ID NO: 498139 - DNA, 90 bp, Homo sapiens
gactattcagatcatccaagtggaggttcctacagagattcatatgagagttatggtgtggtggctggaggtggccgaattgacaaaccc

SEQ ID NO: 498140 - DNA, 100 bp, Homo sapiens
agtgcaggtgttggaagtgaaaggaatgcccaattcttctggactcatgaaccgtcgtgatgccattgccaaaacagatgccactgtggtggcattactg

SEQ ID NO: 498141 - DNA, 101 bp, Homo sapiens
acgacccggagcacccgacccctgaatcttgagccagatgattgtgcatccatttacatctttaatgtagatccacctccatctactttaaccacaccact

SEQ ID NO: 498142 - DNA, 99 bp, Homo sapiens
gaaacccgattcaggtttgctggatggatttatgacggcaaatggcattaaaattggccctcagcatgctgctaccaatgcaacacatgcaggcaatca

SEQ ID NO: 498143 - DNA, 100 bp, Homo sapiens
cagtatcagaaacatttgacccagaagagaaacattccatggcctatcaagacttgcatagtgaaattactagcttggaacttatgctgtgctatttgat

SEQ ID NO: 498144 - DNA, 100 bp, Homo sapiens
gaaatccaggaacaactgtgtcagcagctagcccttttcctcaaggcatccgtgtacaagatttgcagagaaatgtatgacgatggagtgggtttaccct

SEQ ID NO: 498145 - DNA, 85 bp, Homo sapiens
tttggaccagacaggcgtgtctaagtacaggtgaacaaaggcagagtaaactgtcaccccagatgcaggtacatcaagacaaaac

SEQ ID NO: 498146 - DNA, 71 bp, Homo sapiens
ttcatcctgagttgccaatcattatcacaggttcagaagatgagtacaggggctcaggtccaggtggcagg

SEQ ID NO: 498147 - DNA, 112 bp, Homo sapiens
aaatcccggaaactccagcgtgtctccagccgtgtaagactttgaccccgacgcaggcttcagtgattgccgcggatcagaagcctgagcactttggctcgagacaattaag

SEQ ID NO: 498148 - DNA, 98 bp, Homo sapiens
gctgaactaaggagaaagtcctacaacagtttggcgtgcaacatggggcttgagaaagggttcctgcacttggccatcatccatgaagaaaaggcact

SEQ ID NO: 498149 - DNA, 75 bp, Homo sapiens
ggaaaatggcggtgtctacagtgttctcgacttcgtcgctggcaccatgagccaggacaccgaggtggatatgaa

SEQ ID NO: 498150 - DNA, 100 bp, Homo sapiens
cagagacctgactgtggagatggcggctcagaagataaacgaggggctggaacacctcgccaaagcagagaaatagttggagatgcttgatgctgcaaag

SEQ ID NO: 498151 - DNA, 75 bp, Homo sapiens
actttcaggcagcaacatggcaagacggtggtgggccaaatcactgtggacatgaaatcttcccaaacatctggc

SEQ ID NO: 498152 - DNA, 50 bp, Homo sapiens
catggattcccagcgcgggacagccaggtccatggaggtgaaccacccag

SEQ ID NO: 498153 - DNA, 100 bp, Homo sapiens
aagacatcgacgaagccaaactttctgtcttctcaaccgtagatgctcctgtcgctccttcagacaaaggataacttagaagatgatgatgtggaaatga

SEQ ID NO: 498154 - DNA, 72 bp, Homo sapiens
ccagtgccccaagagtcacaagagagaggtttcatcgtccataacgaagagtgagactatttggaaacagag

SEQ ID NO: 498155 - DNA, 100 bp, Homo sapiens
gggaactctttggaggaggcctcagagaagaacgataccatttcttagaggagcgcttagccaggcctggaagaaacgctggtttatcctgcggagtggc

SEQ ID NO: 498156 - DNA, 75 bp, Homo sapiens
ggacacagcgagacctgtgatcctgagacaggttcctgatgttattagcagcataaggcaattatctaaagcggc

SEQ ID NO: 498157 - DNA, 101 bp, Homo sapiens
cgagatgacaactccgcagcaaacaactccgcaaacgaaaaagaacgacatgatgcaatcttcaggaaagtaagaggtgtgtgaaagtaaagatttatctg

SEQ ID NO: 498158 - DNA, 100 bp, Homo sapiens
gctccatggtgggattgtcgggcggtcagcggacttcgtggtagaatccattggctctgaagtggggtctctgggtgaccccaaaggagccatgataacc

SEQ ID NO: 498159 - DNA, 82 bp, Homo sapiens
tgtgtgtctccccggacgcgagcccgctcccctgaatttttggaagtaccagcacagtgacgcttcctgaaaccttgttgtt

SEQ ID NO: 498160 - DNA, 83 bp, Homo sapiens
cctataccgatgctccacctgcctactcagaggttatcaacgaaacttctcagcatcacgatgaccttgaataaaaattgcac

SEQ ID NO: 498161 - DNA, 88 bp, Homo sapiens
cactagtcctgaattccaagaaatgagtctcttggaaaggagggctgtgctgaagtttgctgctgccactggagccactccaattgct

SEQ ID NO: 498162 - DNA, 100 bp, Homo sapiens
cacggagccgcgaggagacagctgaggcccgcggagaccagggaacccgaaaacagtggccaaatgtcaggtaactcccagaagaaatgttctccaaaaa

SEQ ID NO: 498163 - DNA, 90 bp, Homo sapiens
cagtcccgtgttaaaagaaaacaaggcgattccgcagtccccccgttccctggaggtcctgtggaatggggttgtgtccactgtggtccc

SEQ ID NO: 498164 - DNA, 50 bp, Homo sapiens
tcccaaggagctgggattacaggtggcacaagatctctgtaaagtagcag

SEQ ID NO: 498165 - DNA, 83 bp, Homo sapiens
acttccggaagactcctggcccgggattatgccaagaaaccaggtagagcgggaaaaggccattcttttggccaacctacagg

SEQ ID NO: 498166 - DNA, 100 bp, Homo sapiens
tggggcccagctcgccgtcctgccccccttggagagaaactgaaaggagcccagtttcctccaattgcagcacaagaccttccttttgttctaaaggctg

SEQ ID NO: 498167 - DNA, 98 bp, Homo sapiens
caaagtcgttatcctcctcactctgtccagtatacatttcccaacacccgccaccagcagttattaaagagggtgtacgggagtttcttggtaaatcc

SEQ ID NO: 498168 - DNA, 108 bp, Homo sapiens
ctggacatcgatagggatgcagaggatcagaaccggtacctggatggcatgaaaaagcttgtggtgaaggggggcaaaaaaaagaagcaagttctgaagttcactctt

SEQ ID NO: 498169 - DNA, 100 bp, Homo sapiens
ctgggacccccaggaggtgaccctgcaggttgaacaaatcctggcagaatttaaagtcagagctctggaatgtcacccagacaagcatcctgaaaacccc

SEQ ID NO: 498170 - DNA, 51 bp, Homo sapiens
ggatgagaaaggcaacagcggaagactgtgcagcagcgtggcgctgctgtc

SEQ ID NO: 498171 - DNA, 98 bp, Homo sapiens
caacattcttggcattacgcaggccagcaactcccagctcaatgcaatgatggaagacgtcatagcacggatgcaagatgaaaaaaatggaattccta

SEQ ID NO: 498172 - DNA, 75 bp, Homo sapiens
cgatgatgaggacctggaggagtgtgagcccagtactggtaataaagacatcacatgggtaatgttagaagctgg

SEQ ID NO: 498173 - DNA, 100 bp, Homo sapiens
ttgaaaacctgggatccacagaggaaagatccgagtgaagcctgacaggaccggtgtggtcacggatggtgtgaagcactccatgaaccccttctgtgag

SEQ ID NO: 498174 - DNA, 78 bp, Homo sapiens
ctcagtggttgaatcataggcaagtggtgtgtggcacaaaatgcaacacgattgagaggatccagaatccagatctct

SEQ ID NO: 498175 - DNA, 75 bp, Homo sapiens
tgaacggaataaataattccagtgggatggaacttgtaatagctggcatcgttgagaatgaatggaaaagaacgt

SEQ ID NO: 498176 - DNA, 100 bp, Homo sapiens
aaaagaagccgaagaaagaagaggaacagaagtggaaatgactgcttccccacaacaaagagaaatgatggatcaggcagctgctcaattagctcaggac

SEQ ID NO: 498177 - DNA, 100 bp, Homo sapiens
cagagcctaagagaactatggcaacatcaggtgactgtcccagaagtgaatcgcagctttgtgtccctggtgatgttggaacattaatgatggaacatgg

SEQ ID NO: 498178 - DNA, 90 bp, Homo sapiens
cgtggaaacttggatttagtaaagtactttttgatcatatgggatgtctgaagaaatatgaaactgtgcaagacattctgaaagaattct

SEQ ID NO: 498179 - DNA, 100 bp, Homo sapiens
tctgggtccaccaccttcaccaagtatcaagtggggcagctgtattctgtggctgaggccagtaaaaatgaaacgggtggtggcgaaggcgtggaggtcc

SEQ ID NO: 498180 - DNA, 120 bp, Homo sapiens
cctccaggaggccttttctgactcctcatactcacctcccatccagcctggcatctattgttggggtgatcggacctaacaccaggttgtggggacaacgaagtccagaagagtgaaagg

SEQ ID NO: 498181 - DNA, 83 bp, Homo sapiens
ccgccctgttccccgcgctgcggcctggcggcttccaggcgcactaccgcggttttgggatttgagattgacgcggtgaactc

SEQ ID NO: 498182 - DNA, 96 bp, Homo sapiens
gggacccgcggtccccgctcttgctggagacctgtcttctggttacctggatgatactaagcaggaaacagctaatgggcccacctcctgtctgcc

SEQ ID NO: 498183 - DNA, 50 bp, Homo sapiens
tgcaaatcagactggaagatggtcttttccaatggtcaccttggaagtga

SEQ ID NO: 498184 - DNA, 83 bp, Homo sapiens
caaggaaccgtcaagggcagtcatcagatccaccatctgcttcaacgttgactaagataacacgcacaggtccttcagcttgg

SEQ ID NO: 498185 - DNA, 100 bp, Homo sapiens
ctgatggatatgaatggacatattcggttagcagattttggttcttgtctgaagctgatggaagatggaacgtatatttgccttccctccatgatctcca

SEQ ID NO: 498186 - DNA, 88 bp, Homo sapiens
ttcggcgctatggaggagctcgatggcgagccaacagtcacttgtcttgggacaaggtgcgcattcctggtgtgctgcagcgattggg

SEQ ID NO: 498187 - DNA, 75 bp, Homo sapiens
ctgctattaaagggaagatcgatgtgtgcattggtatgctgccccacaaaaccaagcgaggccaggccgctctgg

SEQ ID NO: 498188 - DNA, 100 bp, Homo sapiens
tgtctggagcaaggaaaagatccctggaatatgaagagacacagtatggtagccacacccccaggaaagcagatggtggagctgaatatgccacttacca

SEQ ID NO: 498189 - DNA, 89 bp, Homo sapiens
aaggattccaagtaactcttatttggcattcccatcaagagcaccatggacaaccccaccaccacccagtatgccagcctcatgcacag

SEQ ID NO: 498190 - DNA, 97 bp, Homo sapiens
gcatttggctttgcctttctggacacagaagtatttgtgacagagaatgtgatcaatgggcaggactacgaagtgatgatgcagattgactgtcagg

SEQ ID NO: 498191 - DNA, 98 bp, Homo sapiens
agggaatgccacagcatcctccagcacctcagcccagaagaatcagtgcggtttctgtggcagagcgagttgcatttgaaagaggagaagagcctgga

SEQ ID NO: 498192 - DNA, 49 bp, Homo sapiens
gatttgagttcaattactgaacaggaatacaaacagaagcttgcacgag

SEQ ID NO: 498193 - DNA, 74 bp, Homo sapiens
cactggagtggccttcaacccatcagcgccccagccaacaaatggaattttcttgagcatgtttctaatcgttt

SEQ ID NO: 498194 - DNA, 82 bp, Homo sapiens
agatgatgcggtggtgggggacctgccggcacgcgactccccccgggcccaaaacctcctgccccccgaggtctgcagtctc

SEQ ID NO: 498195 - DNA, 75 bp, Homo sapiens
ctatgatcccattaccacagcaacagatatgtggcaaagccttccaagcaacagggagctggggatgcagaagag

SEQ ID NO: 498196 - DNA, 100 bp, Homo sapiens
gtgatcaaacactgcaaggaccccctccggctcaagtgtgtcaagcaaggtggcccgacgttggggcattcagaaaaacaggccagctatgaactatgat

SEQ ID NO: 498197 - DNA, 100 bp, Homo sapiens
tcctgtggtcagccgtcaagagccgctgggtgattgtgggtacttcaggtcatgccttctgacagcttctttttttccattgtccgagacccagcggctc

SEQ ID NO: 498198 - DNA, 75 bp, Homo sapiens
gcatctctgtcacacccggggagaagtttgaccttgtctgtgtcaatgcgtggatgctggacctcacccaagcca

SEQ ID NO: 498199 - DNA, 98 bp, Homo sapiens
aggccactagcagccagttccggcccgaggacaccgactaccagcagctggaaaaggattttggtctgagatgctgggcgtgggggacttctattacg

SEQ ID NO: 498200 - DNA, 96 bp, Homo sapiens
tcagctccaatctgaggcaacccaacataaatctccagtgccccaagagtcacaagagagagctggatgaaaaagaaagtcggcgtctgttccaac

SEQ ID NO: 498201 - DNA, 100 bp, Homo sapiens
tcaagactttgacatgtgtgaaaacatgaaatggtgctgtccttattcccagcccagtcaagagctaccggggctggctagtcatgggggagcccagtag

SEQ ID NO: 498202 - DNA, 100 bp, Homo sapiens
gaggaagaggtcggacgtggaggagctggcagccaaggaggtggacaccatcacggcaggtcatgcagaaggcttttgtatgatgtgtacaatgcaagca

SEQ ID NO: 498203 - DNA, 123 bp, Homo sapiens
cgaatatcagcctggcaagtcttccgttctgaccaacgaaaagatggtcactcctggaagcaaggcggctctagctaatttatgtattggagatgtaatcacagccattgatggggaaaatac

SEQ ID NO: 498204 - DNA, 90 bp, Homo sapiens
tctggcacgccttcaccgcactcgaccaggaccacagcggcaaggtctccaagtcccagctcaaggaagatgagagactgcttaggcgcc

SEQ ID NO: 498205 - DNA, 101 bp, Homo sapiens
ctgcccttccttctgtatatggctgcgccccaaatcaggaactttatattgctgttggaatatctggagccatccaacatttagctgggatgaaagacagc

SEQ ID NO: 498206 - DNA, 51 bp, Homo sapiens
atcaccaaatggaaagttaatcgaagagaaaaagcttgtggtgaagggggg

SEQ ID NO: 498207 - DNA, 74 bp, Homo sapiens
agagctcagacatgttctcaccacccttggtattgcacatctattacaaatttcctggttatgggaggattcca

SEQ ID NO: 498208 - DNA, 100 bp, Homo sapiens
tgcacgaaacaaaaacatccattactatttcatggccctgaagaatgatgaggctctgtggatagcaactggatcgtgggtgccacgctggagaagaagc

SEQ ID NO: 498209 - DNA, 100 bp, Homo sapiens
caagtaccgaggtgccttctgtgaggcaaagattaagactgtgaaaaggctggtgaaagttaagggcttcgtgggacacatatgcaacatgcctatgatt

SEQ ID NO: 498210 - DNA, 96 bp, Homo sapiens
gcagcagattcaagcagctatgggattcaagattgatggaggaattctaaggaaaggtgcaaagctgttcttccgccggcggcatcaacagaaaga

SEQ ID NO: 498211 - DNA, 100 bp, Homo sapiens
gcccagtgagggagaccgacagcccgagggcaacatccttcgagaccggttcaagagcttccagaggaggaatatgatcgagcctcgagagagagccaag

SEQ ID NO: 498212 - DNA, 100 bp, Homo sapiens
tatttggaacaaaaaaaggagatgcctggcagccccgctctctgcaatacatgttataaagccagttttaccaaagctaaacaatctgtttgaatatgcg

SEQ ID NO: 498213 - DNA, 83 bp, Homo sapiens
ccctaacacgcacgtcccaggagacggcagatgtcaaggcgtactccaaagattcaggtttactcacgtcatccagcagagaa

SEQ ID NO: 498214 - DNA, 75 bp, Homo sapiens
cgttggccttcgtacccgtcttgattgaggtgccatgcctctgcaactcctcctgttgctgatcctactgggccc

SEQ ID NO: 498215 - DNA, 100 bp, Homo sapiens
cggacggctgcgtcgcccgaggcgaggaggagcgctggcgcaatgggtagaaggcctgagatcaatcatacacaacttcagggccaacaacgtcagtcca

SEQ ID NO: 498216 - DNA, 80 bp, Homo sapiens
catggagcaagtctgtcagcaccatctttctaacagttttaaaatcaaagatgggaaaatcggagaaaattgcccttccc

SEQ ID NO: 498217 - DNA, 82 bp, Homo sapiens
agtcgacaggggatgggaccctagacacgatgaggcgagtggtacgacagagcaagtttcggcatgtatttgggcaagcggt

SEQ ID NO: 498218 - DNA, 75 bp, Homo sapiens
gtgagcaagcccaggcacagccgacgccgcgggggcgtgatggtgggcatgggtcagaaggattcctatgtgggc

SEQ ID NO: 498219 - DNA, 100 bp, Homo sapiens
tcgccttggaggaagaatataacccccaaatacatcaagatgtttgtactggatgaagctgacgaaatgttaagccgtggattcaaggaccagatctatg

SEQ ID NO: 498220 - DNA, 83 bp, Homo sapiens
ctgaaatgtttgacgacactgatggtttgatctggacgttggtggttggctatgtgttgactgtttcattcaagtggaatgca

SEQ ID NO: 498221 - DNA, 75 bp, Homo sapiens
ctggcgcagcccacgctcatgatcgacttcctcacccgcgcctgcgacctcgggtgctttcttctgcgacctggt

SEQ ID NO: 498222 - DNA, 75 bp, Homo sapiens
cgaccctgaagatgctcatggagatggtgatgaccaaagctcgtccgcatggtgctgaatggctgaggaccttcc

SEQ ID NO: 498223 - DNA, 97 bp, Homo sapiens
agctgacgaagctcgggacaggatcaaccggttcctcccaggcggcaagaacatacggtccctaatgagcacagagaagaccaagggcttctgccag

SEQ ID NO: 498224 - DNA, 101 bp, Homo sapiens
ctcaaaactgtaatactaaatgtgttaccataccaaggtgggcctaccatgactttttcaaccggtatcgggtgctggtcaagaagagagagctcgccaac

SEQ ID NO: 498225 - DNA, 100 bp, Homo sapiens
ggacagcgcatcgccgcccgcccgggtcgccgcgccacagccgctgcggatcatggccttgtatgaagcaggagaaaggagaaaggggacagacgtaaac

SEQ ID NO: 498226 - DNA, 130 bp, Homo sapiens
tacgatcaagttttagactctgttttagtgggtcctgttcccgcaggaaggcatatgtttgtatttcagaccaaatacacgctgatcgatgagcaggacatcccgctggtggagagctactcctttgagg

SEQ ID NO: 498227 - DNA, 97 bp, Homo sapiens
attcgcagtggtcgcttcttctccttgattcattcatggaggtgccattgcaaccatgattgatgctactgttggtatgtgtgcaatgatggctggg

SEQ ID NO: 498228 - DNA, 99 bp, Homo sapiens
aacgcactcctcagagtccgactctcccacctgctaaggagaggttcacctgccccagcctcgccttgcacccgagagagcccgtgttcctggcacaga

SEQ ID NO: 498229 - DNA, 75 bp, Homo sapiens
tctctctttctggcctggaggctatccagccaggttacgggcaggacttgagtggcttcggacagggcttctcag

SEQ ID NO: 498230 - DNA, 100 bp, Homo sapiens
aaccaccaaagtgggaaacattgaaatcaagtacacagtgtatagtcaagccagcaccatgagcattccggttgcaatggagacagatgggcctttattt

SEQ ID NO: 498231 - DNA, 98 bp, Homo sapiens
gcccgtcccgccagttccagtacctgcatgtcctcctcgacctcagctcccatgagaaggacaagggtgattctgggggtccacttgtctgtaatggt

SEQ ID NO: 498232 - DNA, 100 bp, Homo sapiens
agttgctcgaagaactcgagcgacagagacaagctgagcttgccgcacaaaaagctagagaggtgcagcggaactgctgcctgacgctctgcaacttcag

SEQ ID NO: 498233 - DNA, 100 bp, Homo sapiens
tgggcgcgcaccgtggccaccctgtgggcctggcgctggaggcagcggtgcacgtgcagtgtaactatgttttcaccaaagaccaacatcaagagtgagg

SEQ ID NO: 498234 - DNA, 90 bp, Homo sapiens
ctgtggactggagctgttcctatgcggccatcttggctcctccctagataggaagatgatccctatgatcttgaagatgtttctgcacag

SEQ ID NO: 498235 - DNA, 75 bp, Homo sapiens
cggcagtctctccctgccaggctcttcatccaagctcttgaatgtcgtctctcaactagccaaacggaatctgcg

SEQ ID NO: 498236 - DNA, 100 bp, Homo sapiens
acccaccaatggaagcagctggcttcactgctcaggccaacgtgcagcggctgaaggagtaccgctccaaactcatcctcttccccaggaagccctcggc

SEQ ID NO: 498237 - DNA, 71 bp, Homo sapiens
gaaaggagaggatcccggagccgatcatggccaccaccatcgacaactcccgggtcatcctggagatcgac

SEQ ID NO: 498238 - DNA, 74 bp, Homo sapiens
gccgagtcgaacggggagccgagctggagctgccgcggcgcagccagactcggtgaaatacctggagtgctcag

SEQ ID NO: 498239 - DNA, 95 bp, Homo sapiens
aagatccggcccatagccgagcagactggcatctgtaaggtgcggccgccgccggaggctactcacagtcgaactacaactccccggggtccggc

SEQ ID NO: 498240 - DNA, 100 bp, Homo sapiens
tcaacaccctaactaaaaagcagaagaaacatcttcgagatttcggcgaggagcatcccttctatgacaggatattggtgctggaaaaggcaaatactat

SEQ ID NO: 498241 - DNA, 102 bp, Homo sapiens
tctgttgtagctgttcctctggcaatacaaactttctgctttcagtattagaaaactactcggatgctccaatgacaccaaaacagattctgcaggtcatag

SEQ ID NO: 498242 - DNA, 87 bp, Homo sapiens
ctctttcaacagatagaaaggcaggagcagcttctggatgaaatacatcgtgagaagagaggagattacctggggcaattgatgtta

SEQ ID NO: 498243 - DNA, 100 bp, Homo sapiens
caggtcatctacacggacgacgccggcaggccccagactgcctacctgcagtgcaaggacagagcgggatgccaccagcttgtccaaagggaagttccag

SEQ ID NO: 498244 - DNA, 100 bp, Homo sapiens
gattctgctggtatacagctacatccaggagagaatgctgacagtcctgcagccttgccttacacccagacaaaactctcgttgcaactggccaagtcgg

SEQ ID NO: 498245 - DNA, 87 bp, Homo sapiens
cgccatgtcgggttattcgagtgaccgagaccgcggccgggaccgaggacccaacatgagtgaagtttcctgcaagaaacgggacga

SEQ ID NO: 498246 - DNA, 98 bp, Homo sapiens
atctccccatgctcacatcagtgaacaagctgtctgggctctaggaaacattgcagatgttgacgatgagtatgaggacgaggaccagtgggaggatg

SEQ ID NO: 498247 - DNA, 50 bp, Homo sapiens
atcctggttctggaatcctcagttcaaggagcccagtttcctccaattgc

SEQ ID NO: 498248 - DNA, 75 bp, Homo sapiens
cagaaattgccggtctgggagttgggggcaaggagaagatcctggctcgtgaagaagaaatgactgcaaaagtaa

SEQ ID NO: 498249 - DNA, 99 bp, Homo sapiens
gaaccttgggtgatttgttctgtatcagaagacaatatcatgcaagtgtggcaaatggcacgacgacatcatcggcaagatctcgctgagcagggaggc

SEQ ID NO: 498250 - DNA, 99 bp, Homo sapiens
caggaggttgctaacccagaacactatattaaacatcccctacagaacaggaaaatgtttataggaggccttagctgggacactacaaagaaagatctg

SEQ ID NO: 498251 - DNA, 117 bp, Homo sapiens
aatattggccaatcatcaagacaagccagcagctcgctcagtacaagagaatcgagagctccagatcatgagaaagctagatcactgtaacatagtccgattgcgttatttcttcta

SEQ ID NO: 498252 - DNA, 75 bp, Homo sapiens
atggcatctaagaaatttgctgttaaaaacgtttattgaagatgaccttagaagagagacgcaaagaatacctaa

SEQ ID NO: 498253 - DNA, 49 bp, Homo sapiens
aaaagcagtaaagccagaggaaggctcagcttgtcaatcggaaacagaa

SEQ ID NO: 498254 - DNA, 100 bp, Homo sapiens
tgtgaaggtacaaggactgttcgtctgacatacaaaaacagaatttgcaccatcctgggattgtaaacctggaatgtatgtttgaaaccccagaacgagt

SEQ ID NO: 498255 - DNA, 91 bp, Homo sapiens
cagtttttgtttcaaaagaaacatgttggaagatcaaaggcacaggaatgatgagaagacagcagctgattacaagattttaggtggttca

SEQ ID NO: 498256 - DNA, 100 bp, Homo sapiens
cgatggtgttctcagcgttcctgtgcatggcaaaccagcaataacacttacatgcaagaaagcacttcagccaagcagaagggagccagctggacgaggt

SEQ ID NO: 498257 - DNA, 100 bp, Homo sapiens
agagcgtgaccgagagcgcgaatatcgtcatcgttagaagattagcctgaggcctgctcagtcgttcctaatgaataaaaatcaagtgccaaagcttcag

SEQ ID NO: 498258 - DNA, 74 bp, Homo sapiens
gactgcccacggaggaagagtgggagtttgccgcccgagggggcttgaaggctggactgggcagcctttggggt

SEQ ID NO: 498259 - DNA, 100 bp, Homo sapiens
ttgcctgggggcacacaggtgctggatggtacctcggggttctctcctgcccccaagctgggagagaagatgactgaggaggaggtggagaccgttctgg

SEQ ID NO: 498260 - DNA, 87 bp, Homo sapiens
gatctcttctgttctgttggccttaatgttaacaaccctcactttctcatcatgcaggctgctggaaagtacagacaacaaggcaga

SEQ ID NO: 498261 - DNA, 74 bp, Homo sapiens
atggttctcactaaaatgaaagaaaccgctgaggcttatttgggaaagaagagctggctttatgtgctggggca

SEQ ID NO: 498262 - DNA, 75 bp, Homo sapiens
agctggctggcggagcatgagcgccccagtgcctgaagacctctcattagaagagagagaagaacttctagacat

SEQ ID NO: 498263 - DNA, 82 bp, Homo sapiens
actcattattgaggacaaagcgaatgatgaacagatctttgactgggtagaggttttaaaatcaaagatgggaaaatcggag

SEQ ID NO: 498264 - DNA, 100 bp, Homo sapiens
ccgttcctggagattctgattgagcctgttcgacatgggcggtgagtattactgcttcgcttccgacatcacctgctcctttcccgccaacggcaagttc

SEQ ID NO: 498265 - DNA, 82 bp, Homo sapiens
gaaaccagtcccttggacagtctgcaccttctcttactgctggcctggtccttcgcaacatggtacactgtgcagacctgag

SEQ ID NO: 498266 - DNA, 50 bp, Homo sapiens
aggtcaccaaggaggcctttgacagatcgcaccactgcactccagcctgg

SEQ ID NO: 498267 - DNA, 90 bp, Homo sapiens
cagggatacatgccctacctcaacaagtacatcctggacaagccggcccaggcctttgtggtgaagcggggcgtccacgtgtcaggagcg

SEQ ID NO: 498268 - DNA, 82 bp, Homo sapiens
cgctcgctcgggtggcgacttcctccccgcgccccctccccctcgccatgaagagttgcatgctgagaatttgaaaaatgaa

SEQ ID NO: 498269 - DNA, 75 bp, Homo sapiens
gtggtttgccacaactgactggattgccatctaccagaggaaggtggccaaacaggagaagaagaagaagaagac

SEQ ID NO: 498270 - DNA, 107 bp, Homo sapiens
cgccggcccgctcactccgcccggccccagccctagcgctggccgcgaccccggcgacaatgcagatcttcgtgaagactctgactggtaagaccatcaccctcgag

SEQ ID NO: 498271 - DNA, 51 bp, Homo sapiens
cggggctccaatggcgctttctacaaggtgcatacattcagagggccacac

SEQ ID NO: 498272 - DNA, 103 bp, Homo sapiens
cgcaagcggcggcgtggaagctgtgagcgcccccatcccggaggtctccgccggctcccggacaagttggatggcttgaggactggtactaaaaggaaacgtg

SEQ ID NO: 498273 - DNA, 97 bp, Homo sapiens
aagcttgaaatgctacatttccaaggtttaagattatctgactctcagctatacaggattgctgactgctgctagaaaggccttcataaccaaaatg

SEQ ID NO: 498274 - DNA, 75 bp, Homo sapiens
agagccctttgcaggatgcagaagaagccaaaaacattctgggtagaatatgtggcctagaagaagatttaaaga

SEQ ID NO: 498275 - DNA, 82 bp, Homo sapiens
agcacttgacctggagctgagcagggccaaaaaacaggtgggtggagccgctgactgccgagggcagagcctcgcttcggtg

SEQ ID NO: 498276 - DNA, 82 bp, Homo sapiens
aacagcaacaggtctcaattcaggagcattggtttgaaaaggccctacgagacaagaagggcttcatcatcaagcagatgaa

SEQ ID NO: 498277 - DNA, 97 bp, Homo sapiens
caacagaagctgaattgcaggatatgatcaatgaagtggatgctgatgctggaagatctatgcccctggcttcccctgcatggtagacgtcaacagc

SEQ ID NO: 498278 - DNA, 100 bp, Homo sapiens
gctgccacaatgggacatgtgcaacaaagtacccatgtttggcctggaggccatctggaggaacggccaagtggtgggccatgtccggagggctgacttt

SEQ ID NO: 498279 - DNA, 82 bp, Homo sapiens
caaagagtgtctgacatttcttttgtgcaagatgagcctcaagtgcttctgcattacagccgtactccaaaaacaccagact

SEQ ID NO: 498280 - DNA, 90 bp, Homo sapiens
gggggagtgcgcggcggccgcagctgccacaaaccagctagacttcgggctccttgaggatattcagttttgtatgtttgaatatcctct

SEQ ID NO: 498281 - DNA, 82 bp, Homo sapiens
gtggactccttcggcagtccacccaccgccgccgcctcccagctacgagttccagggagctctgtcctggtgaccgtgcccg

SEQ ID NO: 498282 - DNA, 52 bp, Homo sapiens
caccaagtcacttggcaagcgtttagcaggatgctcacaactgtattcctga

SEQ ID NO: 498283 - DNA, 100 bp, Homo sapiens
ggagagcttcagtctttacgacctatattaggtgttgctatcaagatcatagataagacccagctggatgaagaaaacttgaagaagattttccgggaag

SEQ ID NO: 498284 - DNA, 101 bp, Homo sapiens
gactccgctggacaaacactaggctcaggcgaccccctcctgcagttccaggacgaccatcctaacccccatcattcatctccttttgtttccaacaacat

SEQ ID NO: 498285 - DNA, 90 bp, Homo sapiens
ggcgaccaccgtcagcactcagcgcgggccgttcctccgtgtcacaaagcagtacctgccccacgtggcgcgcctctgtctgatcagcac

SEQ ID NO: 498286 - DNA, 75 bp, Homo sapiens
gggtaccctctatgaaaaacagaatggaaaagagtcttctggcctgaccttcataagaagacccagagtaaacac

SEQ ID NO: 498287 - DNA, 100 bp, Homo sapiens
gcaaggaagactgaggtttgctcgaaagcccttctgtgttataggtcagggctcatcttctaccggaaaggggtgaaggctgtggaccccaagactggcc

SEQ ID NO: 498288 - DNA, 90 bp, Homo sapiens
ccaggaggcggcaggacggccaagaccagcgcgagggccctgggcaaggcccgacagagcagataaaatccccccatctctgtactccac

SEQ ID NO: 498289 - DNA, 74 bp, Homo sapiens
cagctttctcgggaggagatccaggaaattgcaagacctaacatggctgaaagagaaacagaaacatcaaattc

SEQ ID NO: 498290 - DNA, 75 bp, Homo sapiens
gggaaggggcttctctgtgctccacacttaccaggaccacttgtgttcatttcactgacacggcccctggactcc

SEQ ID NO: 498291 - DNA, 82 bp, Homo sapiens
gaaaagagaaggaaattgcaaaactaaaacgacccacagcacttaaaaagcatcctcatgtctatagtcctgtaatacaggg

SEQ ID NO: 498292 - DNA, 75 bp, Homo sapiens
tcttccctgggtggactggaggaggccgcgccgatgaacctgaccgagtgcacgtggtgattgctacccctggga

SEQ ID NO: 498293 - DNA, 97 bp, Homo sapiens
caggctcttcacaatggaccttaacgtggtggagcataaggtgttctacacagaggcatcaagcatgatggaaccatgtgtgatacctgccgccagc

SEQ ID NO: 498294 - DNA, 50 bp, Homo sapiens
gggacttcaagacggccgagagccactgcttttcggctttgtgagaaacc

SEQ ID NO: 498295 - DNA, 82 bp, Homo sapiens
tgccgaggagcgggaagagttgctgggatgaggacggggacttggttgccttttccagtgacgaggaattgacaatggccat

SEQ ID NO: 498296 - DNA, 100 bp, Homo sapiens
catcgttgctgccttcttcgtcaagttctggagagtcttggcttctgggaggaagtcagagggattatctcaggatcagagctgataacgggattccctt

SEQ ID NO: 498297 - DNA, 100 bp, Homo sapiens
attcagaaaaagatgattgacgctggaatctaagggaggaaattatcaactgtgcacaaggaaaaaaatagatatgtgaaaggttcacgtaaatttcctc

SEQ ID NO: 498298 - DNA, 100 bp, Homo sapiens
tggcctctccagctccagtgctttggtctgttgtgctggcttggtgacgctcacagtgctgggaaggaatctatccaagtgtcttctcagaaacaaccag

SEQ ID NO: 498299 - DNA, 98 bp, Homo sapiens
taaaaggcaccaagaatttgtacacatgtacaatgcccaatgcgatgctttgcatcctaaatcagatctgcgatttccttctggttggctgtcctgcg

SEQ ID NO: 498300 - DNA, 100 bp, Homo sapiens
gatttctgaattttgaaattgtggaaacctactttcctgtttagaaacatcaactggaatcaatttgcatttgaaaattagatcagcacaaagacttgat

SEQ ID NO: 498301 - DNA, 71 bp, Homo sapiens
agacatgaagatttactggcacaagcaactgggattgagtcgttggaaggatgatccactcacaaatctga

SEQ ID NO: 498302 - DNA, 100 bp, Homo sapiens
caccgccgagcgagctcaccatgtcggaaggatcccatgacagattctgttgtcacgtctccttacagagtttgagcggtgctgaactgtcagcaccatc

SEQ ID NO: 498303 - DNA, 98 bp, Homo sapiens
tcccagctccctctacagcctgtggactgacttagggaatcccgaacgccctgtctctgcccctggtggtcatcgtccatggcaaccaagacaacaat

SEQ ID NO: 498304 - DNA, 100 bp, Homo sapiens
aaactatggaccaaatccaagaccagtttaatgaccttgttatcagtgatggctcttctctggaagatcttgtgttaagtgggcagaccaacatccacct

SEQ ID NO: 498305 - DNA, 100 bp, Homo sapiens
catccatggcccttgagggagttcctgagctgctccaaaaaattctcgagatttatgtgatcagtttggctgaaccccgtctgcccctgcagctggatga

SEQ ID NO: 498306 - DNA, 74 bp, Homo sapiens
tccaggacacccctgaagccgagaaatgtcaggatggctaaaggtgaccccaagaaaccaaagggcaagatgtc

SEQ ID NO: 498307 - DNA, 87 bp, Homo sapiens
gggttcctggggcatcgacgatctccatatttcattgcaaggtatttaaaccatgtcagagctgcctcaccacaggaccttgctgga

SEQ ID NO: 498308 - DNA, 74 bp, Homo sapiens
agagatttagagtgctccttgctgtaagacaaaaaactcttcaagatacccaaataccatgtttgtgtggaagt

SEQ ID NO: 498309 - DNA, 76 bp, Homo sapiens
ccagtcttctatgtttccacatcggtcagaaaaagatattgcaggaggagatgcttcagagagaggaagccgaaaa

SEQ ID NO: 498310 - DNA, 82 bp, Homo sapiens
atcaaactgcagctcaaactccagggcagcgtgagtgttcaggttagcatggcctcattgaaagaactagatcaaagactct

SEQ ID NO: 498311 - DNA, 75 bp, Homo sapiens
cctttacagaggttaaaattggaagctgaatatggtgggcatgatcagatagatttgtatgacgatgtcatatct

SEQ ID NO: 498312 - DNA, 103 bp, Homo sapiens
tgtcattacagtgatcatcataggcttatgtcttgctgcaggttactataacaacagtaccaaggtggctgtgaaaaccctgaagccaggaactatgtctgtg

SEQ ID NO: 498313 - DNA, 80 bp, Homo sapiens
aacttggttccccctccctcagcttccgccccaaaagtagccatccctgccattggggctcagtattccatgtttccagc

SEQ ID NO: 498314 - DNA, 100 bp, Homo sapiens
tagagctgcggaacaggacgccctctgatcttgctcacttccgacagagaaaaacaaaaggtgacagttcgcattcggagaaaaagacggcgaagaggaa

SEQ ID NO: 498315 - DNA, 51 bp, Homo sapiens
aaggactgcctcactgagcaaccaagaaggcagggtttcaccatgttgccc

SEQ ID NO: 498316 - DNA, 88 bp, Homo sapiens
gcgggcagatcacttgagatcaggagttcgagaccagcctggaaactactaaagttcctggggaagcaaagtagaatttcataagaac

SEQ ID NO: 498317 - DNA, 95 bp, Homo sapiens
actgttactacaacctcgggcgtctggttcagcctccgttttgtactccagatgaatttacatactgggcaacagactgtggaaattatgctggg

SEQ ID NO: 498318 - DNA, 100 bp, Homo sapiens
cagagatcggcggagaccctcgaagtgcgcaaacttgacactcaccctgaccgtggaagagaaagccaatacccacctcctcttgggcatgtgcttagac

SEQ ID NO: 498319 - DNA, 118 bp, Homo sapiens
ggacacgagcggcgccttctcagggctcgacagcctcagcaagctgtgccttgtccacattttgcgagagacaacagtaaaatactccaaaatacgttcttttcatggtcagtgtcag

SEQ ID NO: 498320 - DNA, 74 bp, Homo sapiens
accattggagctcatcagactgaccgtgtcttacatcagttcagagagagcctggagacacaggccccatcctt

SEQ ID NO: 498321 - DNA, 100 bp, Homo sapiens
ctttccagcctcagtcggacgggcgcggagacgcttctggaagatgcctgaaaacttcatgcctcctgttcccatcacatcaccaatcatgaacccgttg

SEQ ID NO: 498322 - DNA, 75 bp, Homo sapiens
ggccctccgggcccacagctgcctcagcgacagactccacaaagccttctagacaagctcagtggaatctgaagg

SEQ ID NO: 498323 - DNA, 75 bp, Homo sapiens
ctattcctttgtatctcatgccacggccaaattcagtagcagaatctggccaacctatttgtggaaatggaatgg

SEQ ID NO: 498324 - DNA, 74 bp, Homo sapiens
gtcagagcccggggacggcgaggccctcatgtaccacacggtttttcgttggaatatacgttgcacatttatgg

SEQ ID NO: 498325 - DNA, 75 bp, Homo sapiens
gaccctcacggagctgggcgacgagctgaccctgggagacatcgacgggcagatgattctggaccagatgaagcc

SEQ ID NO: 498326 - DNA, 90 bp, Homo sapiens
tgattcttcagataacttctgtgaagctgatggacctgagggcactcgctttgctcctgtcagtacacactcccaaacagttaaacccag

SEQ ID NO: 498327 - DNA, 100 bp, Homo sapiens
ctggtagacggcaaggatgtgatgccagaggtcaacaaggttctggacaagatgaagtctttctgccaggtcaagtctggcaccatctttgacaacttcc

SEQ ID NO: 498328 - DNA, 50 bp, Homo sapiens
ctcaatagcactggctaccggacaggaaagaccacagcaagattctttca

SEQ ID NO: 498329 - DNA, 74 bp, Homo sapiens
actctgaagtcatcctgccagtcccgaattcagatcaggaaggaggtggaaagaaaaagaagaaaaagaaggac

SEQ ID NO: 498330 - DNA, 71 bp, Homo sapiens
gacactagaagatgaaatccacagtccagcccacccaggggttggccggagacctacgacatgaatacctc

SEQ ID NO: 498331 - DNA, 101 bp, Homo sapiens
ggaagcaggggtagcggagccatgggggacgctcccagccctgaagagaaactgcaccttatcacccggaacctgcaggttatcaatactctggctgacca

SEQ ID NO: 498332 - DNA, 83 bp, Homo sapiens
caagaagatcatcattaaggacggaggcacggcgtccgacctccgatcatgaacgggcccctgcacccgcggcccctggtggc

SEQ ID NO: 498333 - DNA, 100 bp, Homo sapiens
ctttttgctactgggaatctgcgttctaaaacaggaaagctggcagttaaggaaaggagtaagtgaaattggagaagatgtggactatgatgaggaactc

SEQ ID NO: 498334 - DNA, 100 bp, Homo sapiens
gactgctgtgctagcaatcagcgagactccgtgggcgtaggaccctccgagccaggactcaactattgttactccaattattttgaggactgaccctcag

SEQ ID NO: 498335 - DNA, 100 bp, Homo sapiens
aaataggagaaattgcttccaagattgggcagctatactatcattattaaccctgcttttacatggaaacatcatcacctctcttagaatggcacctgct

SEQ ID NO: 498336 - DNA, 50 bp, Homo sapiens
ctggacaggacggagcgcaggcagaaaccaaggtgtatgttggtaacctg

SEQ ID NO: 498337 - DNA, 80 bp, Homo sapiens
ccgtagaagaaggaaaaatagatggcatcattgacaagatccagctatgggacacagcaggacaagaacgattcagaaag

SEQ ID NO: 498338 - DNA, 96 bp, Homo sapiens
agaagtgccagcttaggctcctgaagacgctggagacaaacgccctcctgcaaaacggcccaactacgttaagcttggcactctggcacctttctg

SEQ ID NO: 498339 - DNA, 123 bp, Homo sapiens
gcggcggcgtgatgttctcggcaggagcggagagtttgctccaccaggccaggaagtggtcagcaggcagaaaggaaatgagctacaaggaaatggcacttgagtatgaaagatcaacacgtt

SEQ ID NO: 498340 - DNA, 100 bp, Homo sapiens
gtgaaggaggcgaattttcagttgatagccctactgccaataaagggaaaataagagatgctcatcgacgaattatgcttttaaatcatcctgacaaagg

SEQ ID NO: 498341 - DNA, 80 bp, Homo sapiens
agcctcaagggcttcagcaccgcgcccatggcagagccagaccggtggctataacctgacatccatctcagagtccatgg

SEQ ID NO: 498342 - DNA, 101 bp, Homo sapiens
aactgccacatgaaaaacaccacaatcaaccttattgtggcattgcgccgtacattcgagagtttgagaaaccagcctggacaccaagtctgtgtcagaag

SEQ ID NO: 498343 - DNA, 80 bp, Homo sapiens
aacaagggccgcgggaacgagtgcgtgcagcacctgaatggacagaagaggacctcagccaactgacaagaagtatggtt

SEQ ID NO: 498344 - DNA, 74 bp, Homo sapiens
ataaaaacagtacgctcaacggtacaggtaccagcaactaaggtttcagagctgaaccctaatgcagaagtgtg

SEQ ID NO: 498345 - DNA, 87 bp, Homo sapiens
ttgatcctggggagtctgattcagatgacaactgtacagatgtcactggaagtggggataaatggtcaaacaagcaactcttcttgg

SEQ ID NO: 498346 - DNA, 100 bp, Homo sapiens
ctggggcttccaagctacttggagtagggacaaaatatcttggctcacgtatttaagagcctgaatattccaggagaaactcccatgtatggaatcccac

SEQ ID NO: 498347 - DNA, 100 bp, Homo sapiens
gcctcttcttagttgatgatttagttgattctctgaaggttcactggttgaggacccagttcccatctttggatatagaggtcgatggtggagtaggtcc

SEQ ID NO: 498348 - DNA, 82 bp, Homo sapiens
gacgtcttgcctgtgtcccacttgttcgcggcctatagggccgcgatgggcctcttggaacattggtgtgttcatctgcatt

SEQ ID NO: 498349 - DNA, 101 bp, Homo sapiens
cgggacggctctgtaggaaggaacttggttccccctccctcagcttccgccccaaaaggaagagcaagcagtcagaccaaaatacctactgggtcgggaag

SEQ ID NO: 498350 - DNA, 100 bp, Homo sapiens
gacctgcctgtcgtcgtggtggccaacaagcagctaacagatgagcttgctcctcccaaaccacctctgcctgaaggtgaggtccctccacctaggcctc

SEQ ID NO: 498351 - DNA, 99 bp, Homo sapiens
cgcctgacagaggaagatggacagctgggaattgctgaattagaactgcagaggttcctctacagcaaggcctttgaagacctcagcaaactaatgatc

SEQ ID NO: 498352 - DNA, 90 bp, Homo sapiens
agcccaactaaagccccacatttgcagctcattgaaggaaaggtgctgtgacatgtatatggatgaatgaacagtgtagcagtatcatca

SEQ ID NO: 498353 - DNA, 82 bp, Homo sapiens
atggaaggagcgacacaagctgactggcaggaccaagaatcgccttcagccctgtctggtgcatccttggcagaaagtgagg

SEQ ID NO: 498354 - DNA, 83 bp, Homo sapiens
caataagatagttgcccggactgcacaactagcaagacttcagacaatgagttacaaggcactaatagttctggatccttggg

SEQ ID NO: 498355 - DNA, 74 bp, Homo sapiens
atccgttccttcccacatgataatgtagaggacctcatcagaggggaccctgatgctcccataagacagaaaat

SEQ ID NO: 498356 - DNA, 75 bp, Homo sapiens
cccaggaggggcgagagggagccgcagctgatgtcagctgccttcctatttcaaggaaagacgccaaggtaattt

SEQ ID NO: 498357 - DNA, 138 bp, Homo sapiens
acgtggagccctcgccgctgccgttctcagccggctctggagtgcgggcgggggcgacagggccgattccggagtggcctcgtcacgtgttcaatatgctaaagaagtatgtccgcgcagaacagaaggacagacagc

SEQ ID NO: 498358 - DNA, 100 bp, Homo sapiens
ctccacccaaaacagacctcatggccttcagtccaagccttcctcagggtcccacctctacagacaacatgatagaggtactgacaacaactgactctca

SEQ ID NO: 498359 - DNA, 113 bp, Homo sapiens
ggtttggttgaagttggagaagtatccaatagggatattgtagaaactgtctttaacctggttacttgtctgcaagacttttttggtgatgacgatgtttttattgcatgtgg

SEQ ID NO: 498360 - DNA, 98 bp, Homo sapiens
cgaggtgccaccgtggaaggacagaatggctcagacgtgcagcttctggaatacgaggcgtcagctgctggcctcatccgatccttctctgagcgttt

SEQ ID NO: 498361 - DNA, 75 bp, Homo sapiens
cctttcaggaaggagccattatttatgtcatcaagaagaatgacgatggtggcgcctggactctcgccctcagag

SEQ ID NO: 498362 - DNA, 76 bp, Homo sapiens
agaagtgataggagggctctgtaggcatgagccatgagcccaagtccccttcgctagggatgctttccaccgcgac

SEQ ID NO: 498363 - DNA, 74 bp, Homo sapiens
acaatctacctaatcaagctgcattgggatcccgtggcagttgcagcactgaagtggagaaggagacccaggag

SEQ ID NO: 498364 - DNA, 125 bp, Homo sapiens
aagttttctactgtaaagtcaccaacgagatcttccgccactacgagttgtggcagcactgcctgaaggtatgagaccagattctaatctttatggttttccatgggaattggtgatatgtgcag

SEQ ID NO: 498365 - DNA, 100 bp, Homo sapiens
aggtgtcgcgaccggtcccaggtgggtcgggcgcggagagaagccgcaaccagagccgccgccacgtttccaacatggctagatccatcagaaactgaag

SEQ ID NO: 498366 - DNA, 100 bp, Homo sapiens
ctagatcatcaattgaaaatgcatgatttgaacactgatcaaggttatggaggttttgatgactatggtggctataataattacggctatgggaatgatg

SEQ ID NO: 498367 - DNA, 96 bp, Homo sapiens
gtttgcatctcagtggttgaatcataggcaagtggtgtgtggcacaaaatgcaacacggttctaaatggcttctaagaagttgggtgcagattttc

SEQ ID NO: 498368 - DNA, 83 bp, Homo sapiens
ctgaaattactattgcctttgattttgactatggaaattggttgtcatttagtaaaaacggagtagttagaatagatggtttc

SEQ ID NO: 498369 - DNA, 82 bp, Homo sapiens
tctctttccagaggccaggctttatgggagcatgggttaccagcgacgcacccttttttgaatcagagccgacaggcacttg

SEQ ID NO: 498370 - DNA, 75 bp, Homo sapiens
gcagcacgaggggctgcaagagcccctcaccctgagctggggaatgggtaccacagaccatgtcatcgtcctggc

SEQ ID NO: 498371 - DNA, 100 bp, Homo sapiens
ggagagagaggaatgtgctcttgtcctggcattgcatccacaggaggggcaggaaattctttgaagcacttgaaaagtcttatgacacgtccttctggcc

SEQ ID NO: 498372 - DNA, 82 bp, Homo sapiens
catacctcaatgaaaaccctctgagactaaagggtgaatcatgtttaagaaggtcaacaggattgagcacaagaggaataag

SEQ ID NO: 498373 - DNA, 76 bp, Homo sapiens
aagatggcggacaaaacgccaggcggatctcagaaggccagttcaaagattttaggtgatgggcaagtcagaaagt

SEQ ID NO: 498374 - DNA, 75 bp, Homo sapiens
ctgccctgcaaaagctggaagaagctgaaaaagctgctgatgagagtgagagagcaagctataccagagaatcag

SEQ ID NO: 498375 - DNA, 99 bp, Homo sapiens
cgtggttggagagctcatctggaattttgccgatttcatgactaaccagtacttaattcagtgcacaaatgagatgaatgtgaacatcccacagttggc

SEQ ID NO: 498376 - DNA, 100 bp, Homo sapiens
gaaaaatgtatatgccatcattatgttgactaaatgtgttgaacagggaagagaggaacatatgcagcagaaaaaagaggaggaagaagttcttaaagaa

SEQ ID NO: 498377 - DNA, 96 bp, Homo sapiens
agagattgtgaagaagaatttcgatctccgccctggggtcattgtcagatgatgattattccccaccttctaagagacaaagaccaacgagccacc

SEQ ID NO: 498378 - DNA, 100 bp, Homo sapiens
ggacagttcgctacacagcaatgcatcgaggggaaagttgctcagacagcttgcatgtcagcctgccagcatctgtcaacatccttaatgcagatgctac

SEQ ID NO: 498379 - DNA, 90 bp, Homo sapiens
ctgcatggaagcccagacaccaggaaaccctcagattggaggctggtgtcccggagcagtgcaaggtggcgtcatcacctacattggctc

SEQ ID NO: 498380 - DNA, 83 bp, Homo sapiens
ctgcttgctaactccaggaacaggatcaggcagctagagacatgaagaggcttgaagaaaaggacaaggaaagaaaaaacgta

SEQ ID NO: 498381 - DNA, 98 bp, Homo sapiens
gaaggggcagtacaagcttacgtctctgctcttcagtacaatcctcagcagctgtcgattcggcagaccgaagtcctcggcccacttctgcacctgcc

SEQ ID NO: 498382 - DNA, 88 bp, Homo sapiens
acctcaggacttgagtaacagcaacatgcttcccgtgcggcctgcgacccatggaaggagagtggtgacatctcggacagcggcagca

SEQ ID NO: 498383 - DNA, 114 bp, Homo sapiens
ttcagacctgaaactgaattggagactgttaggcccagaagaacaattagggtgacgtgtgcattgagtaaacaggagctctacggtgactttgaagacttggaaacaggggac

SEQ ID NO: 498384 - DNA, 100 bp, Homo sapiens
cagcctgctacggcggatttgacctgtacttcattttggacaagagtgattcgggaaagttacctcaaaggccacgaccagctggttcccgtcaccctct

SEQ ID NO: 498385 - DNA, 100 bp, Homo sapiens
tggtgaagagcgtccaccggcggctccgcaagaagtaccgagaagcaaatggttatgagccttagagtttctgaactccaagtactgttgggctacgccg

SEQ ID NO: 498386 - DNA, 83 bp, Homo sapiens
cagcaattcaggatgagagtgcgatggggaatccaacagaattctggtcaaaatgcagatcttcgtgaaaacccttaccggca

SEQ ID NO: 498387 - DNA, 90 bp, Homo sapiens
gaaggaggctcagttcaaagacctgttcttaaaaaaagattttaggtgatgggcaagtcagaaagtcagatggatataactgatatcaac

SEQ ID NO: 498388 - DNA, 100 bp, Homo sapiens
tgtccgagcccaaggcaattgatcccaagttgtcgacgaccgacagggtggtgaaagatctgtgacttcctccgcggagccacagtccatagaatcctcg

SEQ ID NO: 498389 - DNA, 100 bp, Homo sapiens
ggagatgcttctcggcccagtagtgacaatgcagatgtgttttcacagtcctgtgtttggtatggagagtgtggaattgcatatggggacaagaggtaca

SEQ ID NO: 498390 - DNA, 82 bp, Homo sapiens
ttgtgtggtcgcgtctcggaaaccggtagcgcttgcagcatggttcttcacacacccccattcggcgtagtacccagagagc

SEQ ID NO: 498391 - DNA, 96 bp, Homo sapiens
tgatgacgccgttgagccgctcagctcccaccaccctctacctcgtgcacactgaccatgcttaccaggtaaaaatgcatttgcaaagggagaaaa

SEQ ID NO: 498392 - DNA, 100 bp, Homo sapiens
agaaaatctttattataatggagtggatgttaccgaattagccaagaaacacaaaccacagatcctcatgatgggccattatgctgtgatgaacaacccc

SEQ ID NO: 498393 - DNA, 90 bp, Homo sapiens
agacttggaggaggtatgcctggactgggccagagaaaattcctgttccaagagaaaataaggcaacatcaatgaaggagagaagagcca

SEQ ID NO: 498394 - DNA, 101 bp, Homo sapiens
gtccgcccagcagccgcgcttcagccagactgggactcttcaattaatctgacatttcacaaatccaaaattgccgtggatgaactctttacttcacttcg

SEQ ID NO: 498395 - DNA, 82 bp, Homo sapiens
ctggactctttcaggttctgaaggctcattgtcatccccaagccaggccagttctccaggtggaactgtagtgtagcgacct

SEQ ID NO: 498396 - DNA, 100 bp, Homo sapiens
cgctactcaggcgctggagaaatacaacatagagaaggacattgcggctcatatcaagaaggctgcccaaagacacgagactttaacaagcttgaactta

SEQ ID NO: 498397 - DNA, 76 bp, Homo sapiens
ctcatgtattgaagaattccaatcccagttcatttttgcttagtaaaatcaccaaccgcctgaccatccaaaggaa

SEQ ID NO: 498398 - DNA, 100 bp, Homo sapiens
agaggatgaaggaaggagagagagtattaaagggagagaaggtacccaaagggaaaaagggaaaagctgatgctggcaaggaggggaataaccctgcaga

SEQ ID NO: 498399 - DNA, 51 bp, Homo sapiens
tccatttctcctattgaggagtcaacgtggcattggtagggtggtcaacgg

SEQ ID NO: 498400 - DNA, 82 bp, Homo sapiens
cctcttcctctggcccgaagccttcctttatcgctttcagcagcctcccgcgacgatgcccctcaacgttagcttcaccaac

SEQ ID NO: 498401 - DNA, 96 bp, Homo sapiens
cctgcttactctaaaagaggggacattgtttttgttttaaggaagaaatctctaaacgttttaaatcacatactgaccaacttgtgttgatatttg

SEQ ID NO: 498402 - DNA, 83 bp, Homo sapiens
gcctcgggaccggctgtatgattaggccacaatcttcaatgagtaaacatattcctgacatggatttgattgacatactttgg

SEQ ID NO: 498403 - DNA, 97 bp, Homo sapiens
agaattaaaacagacggtgctgggtctcctatggacagaagtgcgggcaaggagctttgttcctccccgatgtcaccctcccacagcccacttgcta

SEQ ID NO: 498404 - DNA, 100 bp, Homo sapiens
tggaggtggactacagcgccacggtggatcagcgcctacccgagtgtgcgaagctagccaagatatgacaatggatgatgttcgggaatacgagaaaaac

SEQ ID NO: 498405 - DNA, 100 bp, Homo sapiens
aggctgcagattattttggtgatgctttcaaacagtgtcaatacaaagatactctccccaagctagagatgatcgctatggaaaatcctgcagacttgaa

SEQ ID NO: 498406 - DNA, 75 bp, Homo sapiens
agcgactcactgacggagaagcagtggctcaagagcacgcaggcccatgagaacagcagggatagccggctggca

SEQ ID NO: 498407 - DNA, 100 bp, Homo sapiens
tatcgacgtcgtgatccagaagtccagagctgaggactgcctgtttgcaggattctcaaagttggattggtggaaacaatgaaccattgacaggctttac

SEQ ID NO: 498408 - DNA, 100 bp, Homo sapiens
cgacagcggaggcagagaggaaggcggttctgagagcttcagagagcgatggaaagcgtggttaccctaacagctaatgataagacaagtgtttccttct

SEQ ID NO: 498409 - DNA, 100 bp, Homo sapiens
ctccggttggggctgctgtttctcttcgccgacggctccacataaacacggtttccttgaaggccgccatgcagagctgtgcttcctggacgtgattccc

SEQ ID NO: 498410 - DNA, 90 bp, Homo sapiens
gaggggttgttttataaactgcctggccgaatcagccttttcacgctcaagtgggacacagcaggccaggaaagatttcgaacaatcacc

SEQ ID NO: 498411 - DNA, 83 bp, Homo sapiens
ggacggtttcgccggcagtctcggtttttagaacttcagccataaaaatgggcagaattttccttgatcatatcggtggtacc

SEQ ID NO: 498412 - DNA, 74 bp, Homo sapiens
ctgcctggagtgctcggggagacaccgcgggcttggggttcacctcaggtgctggacgtcattgctcctcctta

SEQ ID NO: 498413 - DNA, 100 bp, Homo sapiens
taagtgagagagatgccatctacaaagaattctccttccacaattttaatcagccaggcgggcaccacggcaggggctgagctaccctcatggaagggag

SEQ ID NO: 498414 - DNA, 75 bp, Homo sapiens
gtttgtgttgcgggggccggacttcaaggtgagaattatgaagatgatgacctagtaaattctgatgaggttatg

SEQ ID NO: 498415 - DNA, 98 bp, Homo sapiens
ctggacaggaaggtgcaggccctgaagcacttttcaggattagaagaggctgtgtatagaaacatacaagcttgcaaggagcttgcccaaaccactcg

SEQ ID NO: 498416 - DNA, 90 bp, Homo sapiens
gattgacgccagtaagaacgaggaggatgaagggctcagtattctcaccatgtgatccaggagattctaggacaccttgatgctcgtaaa

SEQ ID NO: 498417 - DNA, 75 bp, Homo sapiens
gacaccatgcagtcggatgatatacttccaggctttggtgaataatatgtcctttgtaagatataaagaagtgta

SEQ ID NO: 498418 - DNA, 50 bp, Homo sapiens
gtcaaacccacccggcccaactcactgctttcatgagaaggacaagaagc

SEQ ID NO: 498419 - DNA, 100 bp, Homo sapiens
gcatcaaatacttcatatttggcttcaatgtcatattttgggacattctgagcatgtgagacctgaggactgcaaacagctataagaggctccaaattaa

SEQ ID NO: 498420 - DNA, 75 bp, Homo sapiens
ccgagtcagattggagcatttgtgttgatgaagatgaaagagactgcagatgcagaggccaggatgtgggcccag

SEQ ID NO: 498421 - DNA, 100 bp, Homo sapiens
aagagctggagaaatggatacaggaaaaacttcagattgcatctgatgagaattataaagacccaaccaacttgcaggtgcagcggaactgctgcctgac

SEQ ID NO: 498422 - DNA, 50 bp, Homo sapiens
gaaagctacacttcaaccagagggagagataatgcatgtgagaaaacttc

SEQ ID NO: 498423 - DNA, 83 bp, Homo sapiens
gttgcaacggagataaattcccggaaccgcgattcggcgtgtcaggcacatccatctggaaggcctttttcttcacccccaac

SEQ ID NO: 498424 - DNA, 100 bp, Homo sapiens
agttatcaagctttagagcctggctactcacagttgaagcctgattgcaggtgcccctgggcgctgggattgctctagcctgtaagtataatggaaaaga

SEQ ID NO: 498425 - DNA, 90 bp, Homo sapiens
ccagaacattgaagacccattcaaaattcccaggagaaatataagtgagaaatgttttagatgaagataatgataatgttgggcaaccca

SEQ ID NO: 498426 - DNA, 95 bp, Homo sapiens
atccagaaactctccttccacggcttaaggggtacttgatatcagggaccagcaggagagcagtacaccatccaaggactcaactctctgtcctc

SEQ ID NO: 498427 - DNA, 80 bp, Homo sapiens
acttcgtcatgttcttcgcgccctggtcaccgacgatgagggcgcacctgctgtcctggagcttccgatctctgttcggg

SEQ ID NO: 498428 - DNA, 75 bp, Homo sapiens
tccagaagcatctgaagaccatggatcacaaccggaaccgcagggatttccctggggaaagtcttcactcagagc

SEQ ID NO: 498429 - DNA, 90 bp, Homo sapiens
attgctagaatggcccaatatagctttgacaaaatttgcaccatcctgggattgtaaacctggaatgtatgtttgaaaccccagaacgag

SEQ ID NO: 498430 - DNA, 75 bp, Homo sapiens
cacagagcctgccttcaacccccaaagcagcggtggagacacagagcaccagctcagaggagatggtgcccagct

SEQ ID NO: 498431 - DNA, 95 bp, Homo sapiens
ggacgtggtagtttattactgagagccagagcccagaggtggagcagttagggagggttgtggaactggacagtgacatggtagatatcacccag

SEQ ID NO: 498432 - DNA, 74 bp, Homo sapiens
gctctctcatttgctggccatcggattgggggatgaaggtggctggagaagaggaccagctgaggaatcttcaa

SEQ ID NO: 498433 - DNA, 100 bp, Homo sapiens
gcaccagtggcctggacaacagacctctgtttggggagacgtccgccaagggtcagccaggaggaaagggaaagaccagcctgaaagtcggcgcccggga

SEQ ID NO: 498434 - DNA, 83 bp, Homo sapiens
agcgagaaggaggttgccgacgccatcaggctcaacgaggaactcaaagtggatgaggaaaaggacgggaggggcaagctgcg

SEQ ID NO: 498435 - DNA, 75 bp, Homo sapiens
tgttaaggattccaagtaactcttatttgtagtcgtgaaaggtgccaaattggcagaggctcacgtttcttctct

SEQ ID NO: 498436 - DNA, 100 bp, Homo sapiens
tacaaccctcagcagttcccaggccagccagccatgatgcagcccatggcccactacccctcacagggatcctggtgtacgggctgagcctgttatgctt

SEQ ID NO: 498437 - DNA, 100 bp, Homo sapiens
tttcccccctcagtttctgaaatgattctccagaatttctcctcataaaaaagaaatgtgattgataacagtaaagccacactcctcaagtgcctgaaat

SEQ ID NO: 498438 - DNA, 100 bp, Homo sapiens
cggctgccagcaacaatcaccagttgtatcttaattcagtgagcttccaactttttggggggtggaggtgatggagtttcgctgtgtcccccaggctgga

SEQ ID NO: 498439 - DNA, 51 bp, Homo sapiens
ccgttggtatcctcatggacggcatcgccgaatggaggctgtgcgactgcg

SEQ ID NO: 498440 - DNA, 97 bp, Homo sapiens
gagtcagattggagcatttgtgttgatgaagatgaaagagactgcaggtatcttgcggtaccgagtagatttccagggaatggaataccaaggagga

SEQ ID NO: 498441 - DNA, 78 bp, Homo sapiens
ctcatcgggcaccacgggcgcacccaagtgcatggtgcattccgctgggttcttggccaggctgactgagagatttgt

SEQ ID NO: 498442 - DNA, 75 bp, Homo sapiens
tccaggcatcaagcaggacctggatgctgtcactctctgggcttatcatggagatatggaccaaaaggaacgaga

SEQ ID NO: 498443 - DNA, 101 bp, Homo sapiens
tggagctcttctggcattgctgtttcctgtggtaaacactcggctgacatccacgacagcgatggcagttccagcagcagccaccagagcctcaagagcac

SEQ ID NO: 498444 - DNA, 110 bp, Homo sapiens
caagaagccgcaggaacttaaagaaatggaaaggctgcccttgcctcaaggaataggttctcctagtgtctatcatgcagttatcgtcatctttttggagttttttgctt

SEQ ID NO: 498445 - DNA, 74 bp, Homo sapiens
cccaggagctcctggaagatctccgcactctggagcataatgtgcctgtttaaagaagaaaacccgtatgctag

SEQ ID NO: 498446 - DNA, 51 bp, Homo sapiens
cagaggaaccacacgctgatcatgcctccacctcagatatatgacaagcag

SEQ ID NO: 498447 - DNA, 90 bp, Homo sapiens
gcttcaccatcgtcagcctcatgtacttcgcctttaccagggctgcctgtcgacttgcagtacctgccaccagacaagcagcgagaacct

SEQ ID NO: 498448 - DNA, 98 bp, Homo sapiens
aggatacatgccatattcccatccttcaagttacacaacacatccacagatgcaacaagggatacctcagacaatggcagcttttggattgaaatatt

SEQ ID NO: 498449 - DNA, 75 bp, Homo sapiens
gtacgagagtggccctgacggaggggaggaacttccacagcgcggcacctgtacctccggggtggcgctggggtt

SEQ ID NO: 498450 - DNA, 90 bp, Homo sapiens
ggccgccgcgatgtcagctcagtgctgtgcgggccagatatttaacaccgtgcccgatatgcctctcaccaatgcccagctgcacctgtc

SEQ ID NO: 498451 - DNA, 97 bp, Homo sapiens
ccagccctgcccggctgctctgcttccggtcgttaccgaccactaggggaaagaccacagcaagattctttcattcgtctcctcctagcctggggga

SEQ ID NO: 498452 - DNA, 82 bp, Homo sapiens
ggagcctcagttggaagcagccgatccagcctgcggagcctgtggggcagagtcaaagccaagagctccctgctgattcaca

SEQ ID NO: 498453 - DNA, 100 bp, Homo sapiens
acacaagaatatcataaatcttcttggagcctgcacacaggatgttcattcggctcctaaagaagtagcagtgtccaaggaacaagaagagaaatctgat

SEQ ID NO: 498454 - DNA, 51 bp, Homo sapiens
gacgccgtggcccttgggagagagatgacctactccctgactcggttcgcc

SEQ ID NO: 498455 - DNA, 90 bp, Homo sapiens
ggcgagcggctgtgtggatgtcggcgaagccgcgggcgaggaaagaccacagcaagattctttcattcgtctcctcctagcctgggggac

SEQ ID NO: 498456 - DNA, 100 bp, Homo sapiens
tatctgctgaggatcttggaggtgctgatcttcattgcaggccaaacgtaccaagaaagtcgggatcgtcggtaaatacgggacccgctatggggcctcc

SEQ ID NO: 498457 - DNA, 75 bp, Homo sapiens
gaaagcagtgctgatgataaggaaaacagcggaagcagatgcacaaccacctccggcagaacatgtgcccggccc

SEQ ID NO: 498458 - DNA, 90 bp, Homo sapiens
tttacgaatgcttttcaagcgaaatcctgcaaacagattagaaaggcttcccaactgatgcaactcttgatgacataaaagaatggttag

SEQ ID NO: 498459 - DNA, 68 bp, Homo sapiens
ccccctggggcgtgagggcaccttctgccagacaggtgtaatggataggtaacagagaagacctcgtc

SEQ ID NO: 498460 - DNA, 75 bp, Homo sapiens
gtactggagggtagtaccgcaacctttgaggctcacattagtgccgtttccctggggagatggtaaccatactct

SEQ ID NO: 498461 - DNA, 83 bp, Homo sapiens
aacggcaggggcaggcctagtttgactctgacagtcctcccactaagctgcctgtggaggaaccgattgtgtccacagatgag

SEQ ID NO: 498462 - DNA, 98 bp, Homo sapiens
ctcagttcctcaaatatgcagcaaagattacaccaagatctgtgctgaccacaggaattggatctactagtgcaggttcgttccaccagtcataaacc

SEQ ID NO: 498463 - DNA, 100 bp, Homo sapiens
cacgtcccgccggcaggtcgcaggagccctgggagccgccgccatggacctggaatggccaaatatcaaggtgaagttcaaagtttgaaactggatgatg

SEQ ID NO: 498464 - DNA, 74 bp, Homo sapiens
ggggtccccgagtggttccatggtgcaatctcaagagattggactaaatgctcttccttcagaggattatccgg

SEQ ID NO: 498465 - DNA, 72 bp, Homo sapiens
ggagatggtgcagaagatggaggagtgccggtggtggtgtgcacattgagccccggtatagacagttccccc

SEQ ID NO: 498466 - DNA, 100 bp, Homo sapiens
ctggctgcagcagagcgagtacttcgttccaacatggacatcctgaagccaatcctggactttccgtgacatttctgaagatctgaaatcttcagtaggt

SEQ ID NO: 498467 - DNA, 97 bp, Homo sapiens
acacaggaaccatttagcgtcagaaataagccgttttttgacatctgtacttcaagaaaggcaacagcattattgagaaaagcccttacagaagagt

SEQ ID NO: 498468 - DNA, 101 bp, Homo sapiens
aggttctgagactctaggcaggctggcaggcaacaccttagggttacttcttgctgcagattctgcgcaggatcggagctgtgggccaggctgtgtccagg

SEQ ID NO: 498469 - DNA, 100 bp, Homo sapiens
tgggcctgcaggtctctgtcgagcagcggacgccggtctctgttccgcaggatggttatgaagacagtatggagtttccagaccatagtagacatttgct

SEQ ID NO: 498470 - DNA, 75 bp, Homo sapiens
cacatggcccaggcagaccttgcagtcaaaagttgatctctctaatgtattagatcttcatgcctttgatagtct

SEQ ID NO: 498471 - DNA, 75 bp, Homo sapiens
gatgaacttctagatcgccctcttctcaggaaacgcaggagcttgcttggctcaggaacaacagaagagaataaa

SEQ ID NO: 498472 - DNA, 75 bp, Homo sapiens
gtgtcacacagggacagccgcaatccggacctggcggccaagaagcttgagagaagaaaaatttcagaaaaattg

SEQ ID NO: 498473 - DNA, 109 bp, Homo sapiens
atcacgttgacgtccatttaccagtcttccctggcaagattcttctgaattgtgctgccttggccaaaagaggctaccacatactgttgattgtgatgaaatgccagtt

SEQ ID NO: 498474 - DNA, 97 bp, Homo sapiens
ctcatgcaacatctcctctggggaaatgcagaaggcatcctcgcgatatcttaagctgcgactcagaaaacaaatcctactcctggcatcatccaca

SEQ ID NO: 498475 - DNA, 101 bp, Homo sapiens
cagcatggagtcgcccgcctcgagccagcccgccagcatgccccagtccaaagagttggcgtggacctggatgaaaatctgaaggaggacccctcctcaca

SEQ ID NO: 498476 - DNA, 112 bp, Homo sapiens
ccgaagagccaagagtcagtattccggccagcttcacgaagtcagagaggtaaaatctgtaaaaactgggtcagttttttggacaatgtgctgctgcttatcctatttctat

SEQ ID NO: 498477 - DNA, 100 bp, Homo sapiens
aaaggaagcaacaacataatgcccagagttggagccaattaaaccagataaagtcctgtttatgaccacagctgtagatttggtaataacagaagtacag

SEQ ID NO: 498478 - DNA, 75 bp, Homo sapiens
cccttcgcgagcggctgctgagcgtgcagcaggatttcacctccggtgacaaccatgagtggaaaaaactaatta

SEQ ID NO: 498479 - DNA, 88 bp, Homo sapiens
actatgaatggagacatgaggtttttcctactccacaaacgtaacagtaaggaaaaaatcacccacaaacctgctgagtttgaatcac

SEQ ID NO: 498480 - DNA, 71 bp, Homo sapiens
cctggacccctttgactccttggagtctaagcccttcaagaaaggaattgactttaaaattaggaccatag

SEQ ID NO: 498481 - DNA, 101 bp, Homo sapiens
gcagaactacctgtacaacgtgctggagagaccccgcggctgggcgttcatctaccacgctttcgtgtatgaggatacatgggctgcacttcacagaagag

SEQ ID NO: 498482 - DNA, 60 bp, Homo sapiens
gggacgagctcggagcagcagccagccatcgacgagtacaagccccaggatgctaccacc

SEQ ID NO: 498483 - DNA, 98 bp, Homo sapiens
ggagaggaggtcttccgggccgcggcctccgagcgcgcgggatttgcaggtgcggccgggtgtgtggcaacattacttcatgatgcagccatgaaccc

SEQ ID NO: 498484 - DNA, 87 bp, Homo sapiens
cctgtgctggccgcgggagaggtaaacagaacaccaggacatcccagagtctgggaaatgtgccctgtgggacatcgagaccggcca

SEQ ID NO: 498485 - DNA, 101 bp, Homo sapiens
accgaattagttttcaagaatctatctttttgtgtgaggatctgcagctcctccacccccaccacctgtgatccgaaatggtgccagggatgctccccctc

SEQ ID NO: 498486 - DNA, 98 bp, Homo sapiens
gaagcagacgcacaacaatgccgtggttaagatgctgccctccttcgtccggagaactcccgacgggaccgctcagttttctgtgcttggaccctctg

SEQ ID NO: 498487 - DNA, 100 bp, Homo sapiens
gaagtggatccatgccttagaagaaacaattcttcgacatactctccagcttcaagtaactcaactggacccaaataaatcattattggaggtaaagttg

SEQ ID NO: 498488 - DNA, 96 bp, Homo sapiens
gttccagaatgtcatgacctacctcaccagcatccccaggattgtcagtggcttcgccccgaggagagctgactgccctgggctgctgcctccggc

SEQ ID NO: 498489 - DNA, 100 bp, Homo sapiens
tgaacatcgatgtgtccgatgtcaatgacaacgcgcccgtcttctccaggggaaactacagtgtcattatccaggaaagtaatggtccaacagacagtta

SEQ ID NO: 498490 - DNA, 80 bp, Homo sapiens
atgcttcctcttctctcaatatattctcacttatgggtataaaggatgattatttcagaaactggaatcccaacaagccc

SEQ ID NO: 498491 - DNA, 100 bp, Homo sapiens
gtgggattctgctcgtgttccaaatcatcgcctttctggtgggaggcttgattggtcatcatcagatttgaaatatttaaagtggatacaaaactatttc

SEQ ID NO: 498492 - DNA, 98 bp, Homo sapiens
cgctatggccgcgagctccggaggatgagtgacgagtttgtggactcctttaaggtttctaccatgaatgaaatgaagagttattctcaagctgtcac

SEQ ID NO: 498493 - DNA, 100 bp, Homo sapiens
gaggaggaatcacgctcggaaacaatgggctctacagattctcccctgcccctggagaaggaggagcaggtccgacttcaggctcggaagtggctggaag

SEQ ID NO: 498494 - DNA, 82 bp, Homo sapiens
gagagagccctttgcaggatgcagaagaagccaaaaacattctggccacccggcccaagttgaagaagatgaagagccagac

SEQ ID NO: 498495 - DNA, 74 bp, Homo sapiens
catctttgtctttgcagtggtcatctatttccagtataacactgcctttaaattcagatgtccccaaggtattt

SEQ ID NO: 498496 - DNA, 83 bp, Homo sapiens
actccaatgggcctttccagcccgtggtccttctccatattcgaggtgatgagaagctacaaggcgaccatccagcagacctt

SEQ ID NO: 498497 - DNA, 87 bp, Homo sapiens
ctcagatcttttctacagcttctgataatcaaccaactgttacaatcaaggtctatgaaggctgctttgctggctctgcaagaaaat

SEQ ID NO: 498498 - DNA, 82 bp, Homo sapiens
caccatgccgtccgccttctctgtcagctctttccccgtcagcatcccagccgtgctcacgaaagtttcctacactactgag

SEQ ID NO: 498499 - DNA, 98 bp, Homo sapiens
cccaaatcccggaaactccagcgtgtctccagccgtggttggacgtgataagtatgagcctgcagctgtttcagaacaaggtgataaaaagggcaaaa

SEQ ID NO: 498500 - DNA, 51 bp, Homo sapiens
ctgatttttagaactccacatttgaggttctttagtaatcgaggataaaga

SEQ ID NO: 498501 - DNA, 100 bp, Homo sapiens
ctgaaatttgatgacctagatggaacacatgctctgatgaccgagtgacggttctctacaggagcaaagccattcgctatacctggccttgtccatttcc

SEQ ID NO: 498502 - DNA, 51 bp, Homo sapiens
tatgggttctccttcatggaatttttcaggaagacaactgttagttttgtg

SEQ ID NO: 498503 - DNA, 90 bp, Homo sapiens
gattgaggtcggcagctcccgagaagcaggagaagcagagtttttgcaagcatggtagaatcaattaaacactgcattgtgttgctgcag

SEQ ID NO: 498504 - DNA, 75 bp, Homo sapiens
gaattgtcttagaaagtcctcattatgctgtgaaaatattagacctaatctgggagcctgcaagtgacaacagcc

SEQ ID NO: 498505 - DNA, 101 bp, Homo sapiens
ggacaagcgaatttcagtcagtgtgggagtgtggattgatgttggcagccgttttgagactgagaagaataatggggcaggctactttttggagcatctgg

SEQ ID NO: 498506 - DNA, 100 bp, Homo sapiens
agacagccatagcccgggcgtggccgtgatacagttcgccgtcggggagcaccgagcccaggtcttctcccctgtctgcctcccggagctaggactgcag

SEQ ID NO: 498507 - DNA, 123 bp, Homo sapiens
gtccgccccgcgagcacagagcctcgcctttgccgatccgccgcccgtccacacccgccgccaggagcaggccgggctctcgccatgggtcactgtcgcctctgccacgggaagttttcctcg

SEQ ID NO: 498508 - DNA, 100 bp, Homo sapiens
cagagggtgaccaccaccgccttcctggccgagatcacctctgcagcctgcacagccgggcctttggactcctggatgctagagtgacctgggcgctgag

SEQ ID NO: 498509 - DNA, 74 bp, Homo sapiens
tggtattgttggattgccaaatgttggctgcagaaccttggcctgaaaatgctacattatatcagcaattgaaa

SEQ ID NO: 498510 - DNA, 82 bp, Homo sapiens
cctgactctgggagcacgcagtcccaggtgtgacaccttcagcaggtctcagggaagatggcagccctaggggacattcagg

SEQ ID NO: 498511 - DNA, 75 bp, Homo sapiens
aaggggcaactgggccatgagagggaaggaaacaagccagtccagctgtgaagagacttcttgggtggaaacagg

SEQ ID NO: 498512 - DNA, 83 bp, Homo sapiens
attatacctagaagtctactaatggacagttagtcacccacctacatgttgagcgccagcagccctgtggtggcgacgacgat

SEQ ID NO: 498513 - DNA, 83 bp, Homo sapiens
cgctctggctgtgctgcgcgacccccgcgcatggtaagtaaggaggtctctgtaccatggctcgtacaaagcagactgcccgc

SEQ ID NO: 498514 - DNA, 82 bp, Homo sapiens
aaagagcttgctccctacgatgagaactggttctacacgcgagctgacaatgcagatcttcgtgaagactctgactggtaag

SEQ ID NO: 498515 - DNA, 115 bp, Homo sapiens
aggacaccataaatcgcatccaggacctgctggctgaggggactataacagtgcccccctggcttagtcatggcgaagctggagacgctgcctgtgcgcgctgacccagggcggg

SEQ ID NO: 498516 - DNA, 100 bp, Homo sapiens
caccaagtacaccagctcgaaattgggaaaatgaggtacgttagtgttcgcgattttaaaggcaaagtgctaattgatattagagaatattggatggatc

SEQ ID NO: 498517 - DNA, 82 bp, Homo sapiens
tgactccgtccttccctcagcagccgcggcgcgcagggcacttgggctctgacgcccgctctgcggcttcggtgtttgaaca

SEQ ID NO: 498518 - DNA, 74 bp, Homo sapiens
cacttcttttttgagaaaggaaggaatatatcctgactgattgccaggaatagttgctgaacaccccaggcctg

SEQ ID NO: 498519 - DNA, 85 bp, Homo sapiens
ggccaggccggcctgtctgccgcgatggatgacagtaagctctcaaaggtctatggccctgtgttcactctgtattttggcctga

SEQ ID NO: 498520 - DNA, 75 bp, Homo sapiens
ccgagcaggctgagcgatacgacgacctgcgaccgcatcaagcagtccgccagcggaaccaagcggcgcgtgttc

SEQ ID NO: 498521 - DNA, 90 bp, Homo sapiens
cagaagtcaattcaaaggacctgcccccagagagaaccaccatcatggcagtggagtttgacgggggcgttgtgatgggttctgattccc

SEQ ID NO: 498522 - DNA, 82 bp, Homo sapiens
gagcgggcggagctgtgcgagagcctcctcacttggcaataccaagaaggagggtgacctgatagctgctcaggctcggctg

SEQ ID NO: 498523 - DNA, 51 bp, Homo sapiens
ggactgcagcctcggcggtcagcagccacgaaggaagacaggaggtccgag

SEQ ID NO: 498524 - DNA, 146 bp, Homo sapiens
ctgggccagccactggattcctgtgctctgcttcactcctagttaccagaaaggtggaatctggatgagtggagatgacacctttgaggccctgtgcatcgagccgttttccagcccgccagagctgcccgatgtgatgaagcccc

SEQ ID NO: 498525 - DNA, 74 bp, Homo sapiens
ctgctgggcagcgggaagcgaggccccaggcatgaaagaattactgatgtccttgatcaaaaaaattatgtgga

SEQ ID NO: 498526 - DNA, 93 bp, Homo sapiens
cggcgcccagcccagcgcctcggccgaacccctccgcagcaggtttggtgcacctcgatttggaggaagtagggcagggcccttatctggaaa

SEQ ID NO: 498527 - DNA, 100 bp, Homo sapiens
gtttcagctggcatggtactggatatagtacagcactgcactttggagttgggcagctacatcaaggacctctctgtggtccacagtgacctctccagca

SEQ ID NO: 498528 - DNA, 51 bp, Homo sapiens
ccgggagcccgccgcgctggtagcggagcgatctctctttgagtcggcatg

SEQ ID NO: 498529 - DNA, 82 bp, Homo sapiens
caagatggggacatacttcgcgaccaccagttctggtgactcagtccgcagctatagttccagtaagaactaaaaaacgttt

SEQ ID NO: 498530 - DNA, 96 bp, Homo sapiens
ggcatgggaaagcatcgctacacatcagcaggaatatcacaatacactgtgaaagattccttcgcctcagaaaccaatctagattttagaagtggg

SEQ ID NO: 498531 - DNA, 75 bp, Homo sapiens
cgccgcggggcagttcgggccggctgtcctggcgcgggccaattcctgtccccccagcagcatggcatcgtgtgc

SEQ ID NO: 498532 - DNA, 73 bp, Homo sapiens
aggtctctgtcgagcagcggacgccggtctctgttccgcaggatgattatctgactccagaaaaagaacgcgt

SEQ ID NO: 498533 - DNA, 75 bp, Homo sapiens
caggactgcgcccccgggagcgggcgcccagagtgttatagttttgccgctggactcttccctcccttcccccac

SEQ ID NO: 498534 - DNA, 100 bp, Homo sapiens
caatcatgtgcgacctcgatctgtcccaagcattcatgttccctcaccagctgtaggccgttgctccagggagaactgcaaatatcttcatccaccccca

SEQ ID NO: 498535 - DNA, 96 bp, Homo sapiens
actccgtgaaggtcatgacagtgaattacaacacgcatggggagctgggcgagggcgccagaacaccttccaccatgaccacctcagcaagttccc

SEQ ID NO: 498536 - DNA, 75 bp, Homo sapiens
ggcggctgctgaagaacagattaaggtgctggaggtgacggagggtgctggagaatctggtaaaagcaccattgt

SEQ ID NO: 498537 - DNA, 109 bp, Homo sapiens
cccggaagcggatcgggtggagtgtaggtcatatcgccgcggtgctggagaatctggtaaaagcaccattgtgaagcagatgaggatcctgcatgttaatgggtttaat

SEQ ID NO: 498538 - DNA, 75 bp, Homo sapiens
ttgtcttgtattagagccttcagaaatgattgtgccgcctcggatctcgctgccaccagccttactgcacacccg

SEQ ID NO: 498539 - DNA, 50 bp, Homo sapiens
cgggagtacacagacatcatccgggccaattcctgtccccccagcagcat

SEQ ID NO: 498540 - DNA, 50 bp, Homo sapiens
atgcactggccttatgcctttgaggtcaatacacctaagaaacaaggagg

SEQ ID NO: 498541 - DNA, 50 bp, Homo sapiens
ggaaggactcctcgctctatataggtgtgcaactgaggaacatggctcaa

SEQ ID NO: 498542 - DNA, 83 bp, Homo sapiens
aggaaggattcaagggaaccttccctgatgcggtgttggggatgtcctttgcactgaccctgaactgccagattgacaaaacc

SEQ ID NO: 498543 - DNA, 74 bp, Homo sapiens
atccagatcattccacttaccatgatttcgatgatgatgatcctgaggcaaatttagcgatcaacccagcggcc

SEQ ID NO: 498544 - DNA, 73 bp, Homo sapiens
tccgcagggttcggatgagaccaggtcaccaggcagcagggattggaaaccaggcaacaggaattggacatca

SEQ ID NO: 498545 - DNA, 75 bp, Homo sapiens
catgaaatggatggacttatttttcagcctactggaatggagagaccagagaagagaacaagctgttgattccta

SEQ ID NO: 498546 - DNA, 82 bp, Homo sapiens
tccgccttctctgtcagctctttccccgtcagcatcccagccgtgctcacggggccaaaccagtgctcctgccacctctctg

SEQ ID NO: 498547 - DNA, 51 bp, Homo sapiens
atcccagcactttgggagcccgagtagagacggagtttcaccgtgttagcc

SEQ ID NO: 498548 - DNA, 88 bp, Homo sapiens
gaaaggccagccaccagttcaggagcacttgggagtgatctagaatttatccagttggcgaaggactttgaggatttccgtaaaaagt

SEQ ID NO: 498549 - DNA, 100 bp, Homo sapiens
cattagccagattggacatatgtaaagggacatcagtatatctggatcatcaggtttttgtcatccattggagggacactgtatgaggttggaaagcctg

SEQ ID NO: 498550 - DNA, 100 bp, Homo sapiens
ctggctttatcgacaccgcaagaagagaaacggacttactagtacctacgcgggtatcagaaaagctggcccgagataacttcttccgctgtggtgtgct

SEQ ID NO: 498551 - DNA, 90 bp, Homo sapiens
cgccgggagctctgaccgaggcgcctcgctggggcggggaccttgccttgcccgggaagcctccccagctttctgaggatgatatctggc

SEQ ID NO: 498552 - DNA, 83 bp, Homo sapiens
gccaactgtgcccaccagctccccatcgcagaggccatgctgacctacaagcagaagagcaggatacagacgtccctcaccag

SEQ ID NO: 498553 - DNA, 97 bp, Homo sapiens
cagcgtggattttaaccgaggcacggacaacatcaccgtgaggcagggggacacagccatcctcagatcaaattttctccggtggctaaaaagttgt

SEQ ID NO: 498554 - DNA, 90 bp, Homo sapiens
ccgggggtcgctggctctgctgctgccgccggcgaaggaggaggcgttgccggaaagctcctgctgcttctgtaccccgcctgtccctcc

SEQ ID NO: 498555 - DNA, 75 bp, Homo sapiens
tgttgcctccttctcaaaactcaaatactctttattcatctaagctcttagaacaagctctggtgattgaggaac

SEQ ID NO: 498556 - DNA, 96 bp, Homo sapiens
tttgcagatagtgatcctgccaacattgttcatgactttaacaaggtccctgattaccctccaaactatattttattccttaataacttaccagaa

SEQ ID NO: 498557 - DNA, 90 bp, Homo sapiens
ggctggcgttagtgaagcgcgcccggcgtcacggtctgccatcatggatgttctcgcagaagcaaatggcacctttgccttaaacctttt

SEQ ID NO: 498558 - DNA, 50 bp, Homo sapiens
ccgcgcacaatcggggcaccgagctcgaacgctttaccctgtacagctct

SEQ ID NO: 498559 - DNA, 74 bp, Homo sapiens
tgaagagggaagacacgcggaaacagttttcggctttgtgagaaaccttaccatcaaacacgatggccagcaac

SEQ ID NO: 498560 - DNA, 83 bp, Homo sapiens
ttcagcgatatgaagttaaaaccagctttgatgtggaaaatggcccttccccaggtcggagtccactggatccccaggccagc

SEQ ID NO: 498561 - DNA, 75 bp, Homo sapiens
ctcggaatcacgacccctccctgccatgtatccgcagggcagacatccgccttatgccagcctggaccatcttgg

SEQ ID NO: 498562 - DNA, 90 bp, Homo sapiens
gctggactcctggactcccacaatgaaatgcatcgtgattcctgtccattggactgtaaggtttatgtaggcaatcttggaaacaatggc

SEQ ID NO: 498563 - DNA, 75 bp, Homo sapiens
ggggaagaccatcaccctcgagcaagaagtctatgtgccccaggatcctggattacctgaggaagaagagatcaa

SEQ ID NO: 498564 - DNA, 83 bp, Homo sapiens
ctgaaacccgcagaggaaaattcaggcaacgcctcgcgttgatgcctgaggaagtgcaccatggagaggaggaggtggagact

SEQ ID NO: 498565 - DNA, 87 bp, Homo sapiens
atgggcgtttgcctaacgtatttaatggaggagtggttaatgtgttgctaacaactccactctgggtggtaaacaccagactgaagc

SEQ ID NO: 498566 - DNA, 98 bp, Homo sapiens
gtcaacaagctgtaccaggacgaaaaggggaaggtgtggctcattgactttaatccatttggtgaagtcacagattcactgctgttcacctgggaaga

SEQ ID NO: 498567 - DNA, 100 bp, Homo sapiens
cgtgcacgcgggccagaggcgatgtgttcagagcaacattgttttgttgacacaagcatttagaagaaagtttgtgattcctgactttatgtcttttacc

SEQ ID NO: 498568 - DNA, 107 bp, Homo sapiens
gccagccttgagcatgaagctgagatggacctgggaactccaacatatgatgaaaaccccatgaaggtggtttgttctggatgcagaaaccagagatctagtttcta

SEQ ID NO: 498569 - DNA, 101 bp, Homo sapiens
caaccacgacggggccgacgagacctcagactagacgcttgaagcaaagctgccatcccagaagacgacatgctctcagcaacccccctgtatgggaacgt

SEQ ID NO: 498570 - DNA, 50 bp, Homo sapiens
ctgggagaatgttgactctactgcaggacatggatttgattgacatactt

SEQ ID NO: 498571 - DNA, 100 bp, Homo sapiens
gcgtgaccgagagcgcgaatatcgtcatcgttagaagctgccactgcagagccccgccatggaagacacgccgttggtgatatcgaagcagaagacggag

SEQ ID NO: 498572 - DNA, 100 bp, Homo sapiens
agccttcccatgctatctgttgacatggaaaacaaggaaaatggctctgtcggtgtaaaaaaaatgtgaaagatgttgcagaagtgttccagaagtggct

SEQ ID NO: 498573 - DNA, 100 bp, Homo sapiens
caagaacatccgagggtgcctgggaatcggtcgcctggaggaccagtatttcccatggagggttacccatgcagttgttactgtaccagcctattttaat

SEQ ID NO: 498574 - DNA, 75 bp, Homo sapiens
ggtggcctaccaggaggccaggggtgtcgccatgggcttccgagtggacctgccaatcaagtcggcccgctaccg

SEQ ID NO: 498575 - DNA, 104 bp, Homo sapiens
cagctcttcaccatgaaatggatagatgaggaaggtttatcaggtagaagatgtgtgtgaagaagaaatgccagaagagtcagatgaatgtgtccggatggata

SEQ ID NO: 498576 - DNA, 100 bp, Homo sapiens
tgtccctgcgtgtccgcgaggatgcgtgttcgcgggtgtgtgctgcgttcacaggtgtttctgcggcaggcttgggcactgtttaaaggaaagttccgag

SEQ ID NO: 498577 - DNA, 83 bp, Homo sapiens
cccagttaagctgcgctccgggagatgaggacggggacttggttgccttttccagtgacgaggaattgacaatggccatgtcc

SEQ ID NO: 498578 - DNA, 85 bp, Homo sapiens
ctgttgcagctgggagcggacgaagcgcgaagctggggaccccaaattacgtgaacttttggatgtggggaacatcgggcgcctg

SEQ ID NO: 498579 - DNA, 82 bp, Homo sapiens
ctccgtcccccgcgggtctgctctgtgtgccatggacggtgcaagagaagcctgagccagtgccgctggagagccgctcctg

SEQ ID NO: 498580 - DNA, 50 bp, Homo sapiens
caacattttgcggatactcttctgggtttcgaaaaaacgatgaaatgaaa

SEQ ID NO: 498581 - DNA, 113 bp, Homo sapiens
tccttgatcagaagggtgatcagcaccgcgaaagccccaggggccattggaccctacagatcatcaatgctgtggtactgttgattttattgagtgccctggctgatccggat

SEQ ID NO: 498582 - DNA, 100 bp, Homo sapiens
ctgctttcttttcctcagaactactatattcagtggctaaatggctccctgattcatgcacagaagttgggcctcattgggcctccaccacctccactgt

SEQ ID NO: 498583 - DNA, 75 bp, Homo sapiens
ctcggaaaccggtagcgcttgcagcatggagtctgctacaccatttttgatttgggcttccgctttgatgtggca

SEQ ID NO: 498584 - DNA, 100 bp, Homo sapiens
gaaaataaatctgtcttaaatgaacatcaggagacatctaaacagtgtgagcaaaaaattgccatggagaagtcctcagataaaaatgtctaccaaaaga

SEQ ID NO: 498585 - DNA, 51 bp, Homo sapiens
tctcaggcctttagtgatgatgtgatcagggccaaagcggtcagtgagaag

SEQ ID NO: 498586 - DNA, 98 bp, Homo sapiens
ctgactcctgcagatgtctttttcagggaggtatccctgttgatccgccgggagctgacagagagggccaaggacttcagcctcatcctggatgatgt

SEQ ID NO: 498587 - DNA, 100 bp, Homo sapiens
gtgagctggaggagtaccgcagggaggtggagaggaagcagaagggctctgaaggctgaacaagctccaaacacttgtgaatgtcatgtttgtaagcagg

SEQ ID NO: 498588 - DNA, 81 bp, Homo sapiens
tgtgccatcatcgtggtagttattgtaagacaaggagagggacaaattccttcttggcatccttatggccctgtgacctgc

SEQ ID NO: 498589 - DNA, 76 bp, Homo sapiens
ggcaggagacagacttatagagacgttggaacttgccaggaatccagcaatgatgcaggagatgatgaggaaccag

SEQ ID NO: 498590 - DNA, 50 bp, Homo sapiens
ttgaaagaggcacgcatttttgacaggcctgtctggccctgagggagtcc

SEQ ID NO: 498591 - DNA, 75 bp, Homo sapiens
ctgggaggccgaatgtgcaggatcaccgaggggaaagtgagcttgacagcaatccaggcgccctggacctcccca

SEQ ID NO: 498592 - DNA, 114 bp, Homo sapiens
agcgaactgtcaaagaggtgctgcccgctttggagaacaacaaggagcaggtttggaattacaagcttcggcgctgtcttttcacattgcttgggcacttagattatattcgca

SEQ ID NO: 498593 - DNA, 75 bp, Homo sapiens
cttaaggatctctttggcaagtttgggtggcttatctgcattcaaaaaatttcagtaaagcagatgttgcacaga

SEQ ID NO: 498594 - DNA, 74 bp, Homo sapiens
tctatcaaggggctggtgtactccagcaacttccaggaagctgaagagggaactacccttttcattccgatcaa

SEQ ID NO: 498595 - DNA, 87 bp, Homo sapiens
tgcagagctgcagcgttatatcctggcaaccttactaaagaaccttttgcccagagtagcagccaaacttgaggttgccccgatttc

SEQ ID NO: 498596 - DNA, 119 bp, Homo sapiens
agcacaaaagagtctccgcggtggaggtctgcgttgctcttgcttttcctcgctggggtgtacgattactgatctctcattacccaactatctgatggcatcttcggttggactgcttc

SEQ ID NO: 498597 - DNA, 83 bp, Homo sapiens
cttggggacggagcagcgcgtcgtggggcgagcggcaggacgtggcccagtggaacatcgggagcctccggaccatcctggac

SEQ ID NO: 498598 - DNA, 113 bp, Homo sapiens
ccggacggtacttctgccactgctgctccgtggagatcgtcccgcgcctgccggtgagaagccctaccactgcaactgggacggctgcggctggaagtttgcgcgctcagacg

SEQ ID NO: 498599 - DNA, 98 bp, Homo sapiens
gacactaaaaggaatcagaatcgagagggcctgagggccctgcagaaggatctcagcctctctgctggagaagcgactggaggagtggttggggagga

SEQ ID NO: 498600 - DNA, 75 bp, Homo sapiens
ccggtacatcggggatttctggctctttcctcttcgccttaaattcggtgctacagctcgagagggcagagccac

SEQ ID NO: 498601 - DNA, 82 bp, Homo sapiens
gaatgggctgaaggaggaggacaaagagcccctcatcgagctcttcgtcaagggccatgaagcccccaggaggagaatcgag

SEQ ID NO: 498602 - DNA, 75 bp, Homo sapiens
catgatgctgccatctttccaggaggctttggagcggctaaaaacctatcggatcaacatcaagaggaagggagc

SEQ ID NO: 498603 - DNA, 50 bp, Homo sapiens
gcaatggttgtatcaactatgaagtagagacggggtttcgccatgttggc

SEQ ID NO: 498604 - DNA, 90 bp, Homo sapiens
atccaagaccagtttaatgaccttgttatcagtgatggctcttctctggaagatcttgtggcctcagcaactgttgccattcccaaagaa

SEQ ID NO: 498605 - DNA, 83 bp, Homo sapiens
ctggcagcgaagaagatcgaaaattaaacctcaggaagatgagaatgtgcctactgctcctgatcctccaagtcaacatttac

SEQ ID NO: 498606 - DNA, 100 bp, Homo sapiens
ctctcactgtgtctttctgtgttacaggtgcagcttcaagcttaggaccacccaccatgcctatccaggtaacagagattcaaaggtaccttcagaagga

SEQ ID NO: 498607 - DNA, 98 bp, Homo sapiens
caggctcttgtggcggtgggagaccatgcaagcaagcagatggttaaatttgctgccaagcggaagcccggctcgctgcaaaacgggcggcccgcgcg

SEQ ID NO: 498608 - DNA, 129 bp, Homo sapiens
cggacggacaccggatggccactcatcagaaggactgctcgctgccatatgctacggaatccaaagaatgcagaatcaaagaatcttcaggatggcagcaagtgtttacgagcccatatttggattgga

SEQ ID NO: 498609 - DNA, 100 bp, Homo sapiens
gttagtagcagcggggcacagaacagcgacagtacaaagaagactcttgtcacactaattgccaacaacaatggaactcctggatatgatgattgctgaa

SEQ ID NO: 498610 - DNA, 100 bp, Homo sapiens
aagttctggaggagatgaaagctttgtatgaacaaaaccagtctgatgttactaaggctcgtacgtctgcatcgattatcttacgtggggcaaatgattt

SEQ ID NO: 498611 - DNA, 101 bp, Homo sapiens
ggtgggggtgccccacgctgaaagagaggaacttacaatgtctcagaaaaatggtgggaatgttcttcagatgatgtatgagaaacctgaacgatggtctt

SEQ ID NO: 498612 - DNA, 79 bp, Homo sapiens
catgaaaatattgtagcactctatgatgttcagattgtcaaaagagtggggaatggtgaggaaacgccgatgattggag

SEQ ID NO: 498613 - DNA, 137 bp, Homo sapiens
cttatgaacgccttgttgcccagttccccagttctggcagattctggaaactgtacattgaagcagaggacactcatgaggaccatgatacttccactgagaatacagacgagtccaaccatgaccctcagtttgag

SEQ ID NO: 498614 - DNA, 100 bp, Homo sapiens
ggtccttacagccgctcgtcagactccagcagccaagatggtgaagcagatcgagagcaagggacaagaatccttcaagaaacaggaaaaaactcctaaa

SEQ ID NO: 498615 - DNA, 99 bp, Homo sapiens
aaaaaagtaaactacttgaaaaatttagccttgttcaaaaagagcactattcctgatcagagaactccagttgcttcaacacacagtatcagtagtgca

SEQ ID NO: 498616 - DNA, 75 bp, Homo sapiens
aggaccaggcaccttctgtggaagctgtgaattcctttggacaattgatgatatttatcattgtgcccagtttct

SEQ ID NO: 498617 - DNA, 103 bp, Homo sapiens
cgggagcaagatggcgattccgggcaggcagttttgcacactagggaccaagaagccctcggggacactgctgagaaaagactgccgaagggaagaccagcgg

SEQ ID NO: 498618 - DNA, 75 bp, Homo sapiens
tcctcagaccaaccagcccaaggaacatcttgccaatttcaaatcggatgaaactggagcgagcagagtggggca

SEQ ID NO: 498619 - DNA, 100 bp, Homo sapiens
agaccaccaaatgttgacctgacgaaattccacaaaacctcttctggaaacacctaccgtatgtgaacgggagctgtgtgtgtttgcttttcaaaccctg

SEQ ID NO: 498620 - DNA, 101 bp, Homo sapiens
gctggagctgccgcagatcgccgtggtgggcggccagagcgccggcaagagctcggtgctcgagaacttcgtgggcagcaccatatgaaggcggagtatgg

SEQ ID NO: 498621 - DNA, 74 bp, Homo sapiens
tgaactcttcagataatcagagtggaggaagtacagccagcagagaactgcgacacatcaccaagctgaagccc

SEQ ID NO: 498622 - DNA, 82 bp, Homo sapiens
ggattatcagcatagaaagaaagccttgtaaccatcaggtagatacagcaccaacgaaatatccagagaagttgtattttga

SEQ ID NO: 498623 - DNA, 74 bp, Homo sapiens
aacagacccggcgcccagcggtagccctccttgcgcctccgattcccagagtgatcagcagctggactgtgcct

SEQ ID NO: 498624 - DNA, 98 bp, Homo sapiens
ggaggctcggggtgaccagtgtgacaagtgtggcaagctcatcaatgctgtcgagcttaaggtgaacctgggcccaaacaaaatggtggttgacctga

SEQ ID NO: 498625 - DNA, 90 bp, Homo sapiens
ctagtgatcctttgcaccctgcttggagacggacttgcttccgacaagttggatggcttgaggactggtactaaaaggaaacgtgactgg

SEQ ID NO: 498626 - DNA, 90 bp, Homo sapiens
agcctatgagagaggaagaatatattttgacaattatcggcgctgtgtcagcagccagcacctaaccaagtcacttttcatctgccacta

SEQ ID NO: 498627 - DNA, 83 bp, Homo sapiens
attccagcttcggaacaagagaccctggcggcaaagaagtttgtttctggccagaagtcaatggcagcaagtggaaatttggg

SEQ ID NO: 498628 - DNA, 82 bp, Homo sapiens
gaaccagccgactggagcaggcagcagcccagcccaagaagatgaaaggattgttcttgttgacaacaaatgtaagtgtgcc

SEQ ID NO: 498629 - DNA, 98 bp, Homo sapiens
gacgccgtcacccttcctgcgattctacttagcttgtctttaaccgaactgtcacactgaaggaagacccaggaaaggtgtgagctggaagcactgaa

SEQ ID NO: 498630 - DNA, 100 bp, Homo sapiens
cggatgaaggaccagtgtgacaagtgccgggagatcttgtctgtggcaagaaagtacgactatcagcagccacaaaaccaagctgacagtgtgcaactct

SEQ ID NO: 498631 - DNA, 90 bp, Homo sapiens
taaaagttgatggagattacctttggttatgtactgcaccgaccccggagaggtggatcactcgacccgcttaatttcggatcctgtgct

SEQ ID NO: 498632 - DNA, 98 bp, Homo sapiens
gggaaatggctgcgagaccctagaggcctgcggcctgcggtgaaaggtgtagcagtcactcggcctacacccacagcatcgaccttgtgaacccagcg

SEQ ID NO: 498633 - DNA, 88 bp, Homo sapiens
atccttaagttcgtcgtcttcatcgtcgcggttctgctgccggtgaatgaaaactttgccattgatttgatagcagagcagcccgtga

SEQ ID NO: 498634 - DNA, 100 bp, Homo sapiens
agacgcccccggacggcagcctcaaactccaggaaggcagcagcggccacagcgcggccttgcaggttccctgctacggatgccggctccaggagcagca

SEQ ID NO: 498635 - DNA, 100 bp, Homo sapiens
gaggaaccacacgctgatcatggggaacagagtgtgtggtgctggctatggctactttttccatctcatgaccaaccaaacatcacaagctccgcttctt

SEQ ID NO: 498636 - DNA, 75 bp, Homo sapiens
ggactgaccgctgccgcccagcacgtccaggtgctttgtaacagagccagactggtttcctatctcccaggattt

SEQ ID NO: 498637 - DNA, 100 bp, Homo sapiens
gagcctgagctctgccgcccgattcgccaccatccagatttcgaggtcattcctgtcccaatcagctgctctactactgatgacattaaagatgccttca

SEQ ID NO: 498638 - DNA, 100 bp, Homo sapiens
gattcttcgcctgagccaccagcaaaggtcgaatgggagcaggagaaaaaaagaatgcctgtagtgtccagtaccgacgaccctttggctgtgcagttct

SEQ ID NO: 498639 - DNA, 87 bp, Homo sapiens
gcaatccgtggtgatgaagagttggattctcttatcaaggctaccatagctgggggtggtccctttctagagataggagaagagaga

SEQ ID NO: 498640 - DNA, 83 bp, Homo sapiens
aagagagctggcaaggcctggctagaaaaactccaggcaaggcctgtgctgaaggtgatgtggccgccctcaaccgacgcatc

SEQ ID NO: 498641 - DNA, 50 bp, Homo sapiens
tccacctgcagtcgcccttcctgacccagtagagacggggtttcgccgtg

SEQ ID NO: 498642 - DNA, 83 bp, Homo sapiens
agatgaagacaatgatgttcctggggacagctcttccgccctctctggatgagggaacagaagtggaggaaacaaaagaagca

SEQ ID NO: 498643 - DNA, 100 bp, Homo sapiens
cagggacctggtatagacgcagaatctgtttcacacaacaactgctatttgaagaagctccaccatgaggcgaggtggatggaggaagcgagctgaaaat

SEQ ID NO: 498644 - DNA, 75 bp, Homo sapiens
tatgaggatgacaaactctggagtaattggagccaagaaatgagtatagtcttgctggtggatgccctccttact

SEQ ID NO: 498645 - DNA, 95 bp, Homo sapiens
taagattgtgcccattggccagccatcccaaagaaggtttccaatacttatctacaggaatcgccatgaccccagctctgagggaggcaacagca

SEQ ID NO: 498646 - DNA, 100 bp, Homo sapiens
cgagttggaggctgctaagcaggccaaagtcaagctggaaaaccgtatcaaggagctggaagaggaactgaaaagtggattttgctctgaaggttctcca

SEQ ID NO: 498647 - DNA, 100 bp, Homo sapiens
atgaacagcctgctacagacgttatttttcacgaatcagctacgaaaggttatcaatactctggctgaccatcatcatcgtgggactgactttggtggaa

SEQ ID NO: 498648 - DNA, 75 bp, Homo sapiens
cactcctgggccgtccctgaagcgggctacattgagagacctcagctgattcgagcaaaagtgccaattgtgaag

SEQ ID NO: 498649 - DNA, 100 bp, Homo sapiens
ttggaggcactggactacttacaaaaatgatgttgtaaattttgatgacatagcttcctcagaaaacttgcttcatctcactgcaaatagaccaaagatg

SEQ ID NO: 498650 - DNA, 75 bp, Homo sapiens
cgaaggaaaaggaggaattcgccgtgcccgagaatagctccgtccagcaggtctctcaggcagctgcagagcttc

SEQ ID NO: 498651 - DNA, 75 bp, Homo sapiens
ctaggcatcttattgatcctccagtcgagattctgaggttgggaccaagaaggaactatctattttaaaccaaaa

SEQ ID NO: 498652 - DNA, 75 bp, Homo sapiens
gctgccggagctgtcgacccggcctggcgccggactagggggatatgagactttctactcggaatatcctgagtg

SEQ ID NO: 498653 - DNA, 100 bp, Homo sapiens
gaaaagactgcgaggtggccgcagctgtggccggagagagaatgatgaggagcaggaggcactgccatctctggataaacctggctggtactcccaaggg

SEQ ID NO: 498654 - DNA, 97 bp, Homo sapiens
cccaggagttctgctgctcctgctggtggccacagcttggcatgccttctcttggagtcaagaagcctaccaaagccctgctctttgtactcttgag

SEQ ID NO: 498655 - DNA, 115 bp, Homo sapiens
caatttgtccgtaaccttgtggagaagaccccggcgctggtgaacgttggattggatgctgctggcaagacaaccattctgtataaactgaagttaggggagatagtcaccacca

SEQ ID NO: 498656 - DNA, 100 bp, Homo sapiens
atggcatctttcatctaacacgtgttctttgacctaatgagagaaatcagaacaaagaagatgtcagaaaacaaagacaagaatggcaagaaaagcagca

SEQ ID NO: 498657 - DNA, 126 bp, Homo sapiens
gctgaatgtgcgagtccatagctgaagaggagcgccagatggtggaggaatacacttatttatgaaggccgttgctccagggagaactgcaaatatcttcatccacccccacatttaaaaacgcag

SEQ ID NO: 498658 - DNA, 90 bp, Homo sapiens
gggctttgaatgcatcagaaccatgcacggaagagagaagggcacagttacctaagtatcaacgtaatcttcctcggccaggacaggccc

SEQ ID NO: 498659 - DNA, 100 bp, Homo sapiens
atcggcgcccgcctgaaccgagtagaagacaagcgtttagtgggctacagatggcatggcatctaaaaccttacaatgcttgattttcatacagaagaca

SEQ ID NO: 498660 - DNA, 100 bp, Homo sapiens
ctcgggtctcgggggccgctctgggatcccggccaccagcaattgtccgaactgccattggatgtccagaatcccctgtagttgataatgttgggaataa

SEQ ID NO: 498661 - DNA, 75 bp, Homo sapiens
ctgaccttgcagtacaacatctacaatgttggctcaagacggcagttctgctactgcgaattgatgacatcgttt

SEQ ID NO: 498662 - DNA, 101 bp, Homo sapiens
agctatccagcttgagagagcaaaggttttatacaagcagaactgggaagacaccaaggataagtacctgcttcctcctgatgcccctgaacttgtccagg

SEQ ID NO: 498663 - DNA, 98 bp, Homo sapiens
ctgggatatatttttgagaccaaattaatcagcacattgatttataagagtggtggacatgacaacagagtcaactgcatacagtggcatcaagacag

SEQ ID NO: 498664 - DNA, 74 bp, Homo sapiens
caagcatgtggtttggcacccaagtcaggaggccccatcacaggtatatggaggagtgacctactataaccccg

SEQ ID NO: 498665 - DNA, 101 bp, Homo sapiens
gctgaagaagcagttctacaaggcgagccaggctgtgggtgagcgtggaggatgctcagatgcacaccgtcaccatctggctcacagtgcgccctgatatg

SEQ ID NO: 498666 - DNA, 75 bp, Homo sapiens
tggctccccatactagtcgccgcatccatgagtatgttttctgatttcctgcagtcttttctgaagcactcttcg

SEQ ID NO: 498667 - DNA, 100 bp, Homo sapiens
ctgctgcggcgcggggaccgctgtgctctcgggactctgtaagctcggttcggctggagggactgacttcagcatgaagcagtttgctgaaggctccact

SEQ ID NO: 498668 - DNA, 50 bp, Homo sapiens
ctttcggccgcgctggtgaacaggataaagtggccagtgtgtacgaagcc

SEQ ID NO: 498669 - DNA, 75 bp, Homo sapiens
ccggaggcggccggtgagtgaggcttacagggccccgggaccaagattacttctctaacaggatcaccagtttgc

SEQ ID NO: 498670 - DNA, 73 bp, Homo sapiens
gctacattggaacagggccgcctctcaagtctctgctggatgaaccgaatcctaacagtccagccaatagcca

SEQ ID NO: 498671 - DNA, 101 bp, Homo sapiens
cagacagagaagctgctgcagtttcagacactacaacaacaggagtgcaaacttctctacagccgaaaagagggtcaaaggcaagaaaacaaaaacaaaaa

SEQ ID NO: 498672 - DNA, 75 bp, Homo sapiens
gaagtgcagctgcctcagttcttagcgcagacctgtgacatccggggcagtctgcaggaggacagccaggtcact

SEQ ID NO: 498673 - DNA, 73 bp, Homo sapiens
ctggactttgggcgtcccattgccatgtgccttgctttccatgacatttcccctcaagcaccaacacattttc

SEQ ID NO: 498674 - DNA, 98 bp, Homo sapiens
cgtgcgggacgcgggcgccaggaccggccgaacgcagagaaccaacatcccgggtaaccgggtggctgaaggacaggtgacgtgtccctacctccccc

SEQ ID NO: 498675 - DNA, 100 bp, Homo sapiens
attgacgccatgtcgggttattcgagtgaccgagaccgcggccgggaccgagggactgcctccaagtggaagttggcaggatttaaaggatcacatgcgt

SEQ ID NO: 498676 - DNA, 74 bp, Homo sapiens
ccggggttcggtggcctctagtgagatctggagggtgatcagcccatgacctaaacctccagacaaaataaaac

SEQ ID NO: 498677 - DNA, 82 bp, Homo sapiens
ctggagtgcgtgggggaccggctgttggcggtgcaccgtccaggtgaggttagagctggggcatcgcgcccaactgcgcaag

SEQ ID NO: 498678 - DNA, 100 bp, Homo sapiens
ctggctgcgtgaccccgacggctgcttctgggacatgtattcctctgagaaaccttggacagcagattttggtttaatatctgattgggacaacattcag

SEQ ID NO: 498679 - DNA, 90 bp, Homo sapiens
agatgaacctctaacacagtggaaaggaaccgttctggatcaggtgccagatgcaattaaaaagtgtcagagggctggaattactgtgcg

SEQ ID NO: 498680 - DNA, 100 bp, Homo sapiens
caagaactggctcaagaaatttgcctcgaaaaccaactgccttgaggtgcagtgttggggatccagagccatgtcggacctgctactactgggcctgatt

SEQ ID NO: 498681 - DNA, 82 bp, Homo sapiens
gcgagtgggagcaccaggatctcgggctcggaacgagactgcacggtatagtggaggattacaagccaccgttctacgatgt

SEQ ID NO: 498682 - DNA, 87 bp, Homo sapiens
ctcgctccgtggccttagctgtgctcgcgctactctctctttctggcctggaggctatccagcgtcatgatgatgggcagcgcccga

SEQ ID NO: 498683 - DNA, 98 bp, Homo sapiens
gcagcatgaagcgcaccccgactgccgaggaacgagagcgcgaagctaaggtcaaatattcgggacaatgtagaaatgattaagcttcataaacagct

SEQ ID NO: 498684 - DNA, 82 bp, Homo sapiens
gtgatcaccatgaacgaggagtacgagacgaggttcctgtgcaactcttcacagtttcaggaaaatgccagtgaagggaagg

SEQ ID NO: 498685 - DNA, 97 bp, Homo sapiens
agcccctcagagcctgccctgcagtgctgctgccctcgtctaccagcatggccgaaacagaagccctgtcgaagcttcgggaagacttcaggatgca

SEQ ID NO: 498686 - DNA, 50 bp, Homo sapiens
cggcgccctgcaccgcgcctcgcaaagctgaaggggatgctaagggagat

SEQ ID NO: 498687 - DNA, 99 bp, Homo sapiens
aaatctggtctaatgaactttctcctgtcctcaatctctggaagaaactaaaccaggtgacaggccgctgcggctctgtgctggtacgcctcatccctg

SEQ ID NO: 498688 - DNA, 80 bp, Homo sapiens
cagatcttcacaggcgggttgcagtcagacgtcacctgccaagtctgccaaaggacaggacaatggggcggaagattctg

SEQ ID NO: 498689 - DNA, 100 bp, Homo sapiens
caatatcatgcaagtgtggcaaatgaaatatggctacacacacctttctgcaggagagctgcttcgtgatgaaaggaagaacccagattcacagtatggt

SEQ ID NO: 498690 - DNA, 100 bp, Homo sapiens
gaggagctgctgctggacgccaaccagctccgcgagctgcccgaggatactggtatcgggatgacacaggaagagctggtgtccaacctggggacgattg

SEQ ID NO: 498691 - DNA, 50 bp, Homo sapiens
gcgttcgcgctcaagatcaacaggagaggcagatgcgaaccagaacaatg

SEQ ID NO: 498692 - DNA, 75 bp, Homo sapiens
aatgtgtacagccccagtctttgcaatttatcatcgatgcgtttaagggacagcttccagtggtgtctgtagtga

SEQ ID NO: 498693 - DNA, 100 bp, Homo sapiens
acttaaaagatgccacctctaagcaaaccagtccagctacgggggcccagccagccagcagctgagtgggggttacggaggcggctacggtggccagagc

SEQ ID NO: 498694 - DNA, 98 bp, Homo sapiens
cgtgacatccgaggtgcctttctccaaaagaagtgagcttgtagtggacaaaacaaagaggaaaaaaagaagagaactgtctgaggaacagaaacaag

SEQ ID NO: 498695 - DNA, 75 bp, Homo sapiens
gggcacgttctcatcagcatgatccagacatttaatgtggatgcaccatgccagaccgtggaagatttaacgaat

SEQ ID NO: 498696 - DNA, 98 bp, Homo sapiens
actctcacacaagtcaaggatgccataagagatggacttcgtgctatcaaaaatgccattgaagatggattggaggctgttgtcattggagaagttca

SEQ ID NO: 498697 - DNA, 95 bp, Homo sapiens
atgcataactatactgattggatgctgctcaaaatcagcctacatgccatctttgggttttggccaaattgggcgagggcacaaaataaccactt

SEQ ID NO: 498698 - DNA, 100 bp, Homo sapiens
acttcggagttcagactgacaccccacatcgacaatttggaggtggcaaacagcttcgcagtcactaatgcttataatcagacagctaaatggagtctga

SEQ ID NO: 498699 - DNA, 98 bp, Homo sapiens
gagcctcccgagccctctctccatttcccacaattgtgctggaacttctagcaatagtaaaacaaaagactactgagaatttagatgatgtcaccttc

SEQ ID NO: 498700 - DNA, 90 bp, Homo sapiens
gccacgtgcagacatctacaaccttcgatctcctgacgagacacattggcgtgagacctgggagtacgttgtgccaaatcattgccactt

SEQ ID NO: 498701 - DNA, 50 bp, Homo sapiens
tcggaggcagccttaccagacagatatcctgcaaggaaactttaagcctg

SEQ ID NO: 498702 - DNA, 50 bp, Homo sapiens
gatttacctgttttctgggagcttcgaagagatggggtctcactctgttg

SEQ ID NO: 498703 - DNA, 75 bp, Homo sapiens
gcctcgctgtccctgcggcttctggggaatgcctaccgcaggaatgggatggcttttctagcctgctgatgtgac

SEQ ID NO: 498704 - DNA, 90 bp, Homo sapiens
gaatttgcaaaacttactgtagctatcaaggaagactctgtggatgttcgttcctacattgctcgttccctcattgatggcttcgaaggc

SEQ ID NO: 498705 - DNA, 100 bp, Homo sapiens
gtgctcgaaatgacatccagagaaatctaaactgctgtgggttccgaagtgttaacccaaatgacacctgtctggctggaacagtgttgataaagactgc

SEQ ID NO: 498706 - DNA, 50 bp, Homo sapiens
cttgccaaccctcccaagaagttcagagctttcctcttgctgatgacatg

SEQ ID NO: 498707 - DNA, 100 bp, Homo sapiens
ggctaatttgcaatacggaaattttaatagattgtcctgtgaagtgaagtatgatcggacagcctcttttcagcttttatgacaatggagacagaggaat

SEQ ID NO: 498708 - DNA, 83 bp, Homo sapiens
aagcttttggacattcctggggtgttgacagctcttctaccacaagcagtgcttctccaatgcccaacagttatgatgccctg

SEQ ID NO: 498709 - DNA, 98 bp, Homo sapiens
caagctcgtagcctgccactccgtgctgaaatgcaaaatggaggacgatgcagtacctgcagccaagatgaaaattccatcatcttaaccatagctaa

SEQ ID NO: 498710 - DNA, 75 bp, Homo sapiens
ctcggtgctgcagacggcgagacctcctgcacaggtttacccaaggtccagcctagcccctaggcaccatgtcgg

SEQ ID NO: 498711 - DNA, 80 bp, Homo sapiens
cctagcagtggctctccccagtcacccccttcacccccagtccagcagcccaagtttttggagccgtgagggatacagca

SEQ ID NO: 498712 - DNA, 100 bp, Homo sapiens
gcggccccggagcgcccggcggcggtttcggcgcgcggccgggctggcgatggaagatggaaggaaggagcgcagcgctgccttcctatttcaaggaaag

SEQ ID NO: 498713 - DNA, 90 bp, Homo sapiens
ctggacttccggaagagtgtgttcgaggaggtctcctctgagcctccggcctccataagacccaaaacagatgacacctcttcccagtcc

SEQ ID NO: 498714 - DNA, 82 bp, Homo sapiens
cagggaggcatagcgcctctctgatcttcctgcatggctcagtgcatcgtccatgccaaagtgtgcggcccttcctgacatc

SEQ ID NO: 498715 - DNA, 50 bp, Homo sapiens
ccgagacccaccgaggcagcccagatatctcttccaaacgcatgatgaag

SEQ ID NO: 498716 - DNA, 75 bp, Homo sapiens
cagtcagtggagacttaaccaaagaggagcgagcccagggcgtggtgctgaaagtgctcacaaacttcaagagca

SEQ ID NO: 498717 - DNA, 76 bp, Homo sapiens
aaatgcggtttccaagcacacggtgcactggtgattgctgcggtgtttgaccgagacataaactgcagaagagcag

SEQ ID NO: 498718 - DNA, 100 bp, Homo sapiens
cttggacaggaattggaagaactcacagctagtctatttgaggttatacattggctcttcaaagacgttcacctcatcagagaaatccctgactcctttg

SEQ ID NO: 498719 - DNA, 98 bp, Homo sapiens
gtcatcctgaacgacatcaccgaggagtgtaggcccccatcgtccctcatgtggccaggtggtaaacctgatgaaccagcgcctgcaaacaggcttta

SEQ ID NO: 498720 - DNA, 100 bp, Homo sapiens
atttatgaagatgcttatgacaaactttctccagaaaatgatgagacgtgcaggtaccatcaggaagcagcgggataagctgataaaggaaggaaagtac

SEQ ID NO: 498721 - DNA, 100 bp, Homo sapiens
aagaactgctgggaggatgacaggtcagtatagaccttctgatttgctgtgccctgagacatatgtttgggtacccattgagcaatgcctgccttcactt

SEQ ID NO: 498722 - DNA, 96 bp, Homo sapiens
cgccaaggtgttcggtccttccgaggaagctaaggccgcgttggggtgagaccctcacttcatccggtcacgatgagggcccaggctctggatggg

SEQ ID NO: 498723 - DNA, 75 bp, Homo sapiens
ttgcggaaggttcgcgccaaggagaccaggaagcgagcactcagcagccttgtcctgggatctcgaactctgaga

SEQ ID NO: 498724 - DNA, 100 bp, Homo sapiens
gtcggagtctgggggttcgcgcccgccgacccgcgccctgctccctctcagcacctgggcggacgcaatctgaagaggatgtaagtcagtttgattccaa

SEQ ID NO: 498725 - DNA, 75 bp, Homo sapiens
cacttcaaaatcagacctctgtggcagcattttttccagaacacaaaaggtactccaaagattcaggtttactca

SEQ ID NO: 498726 - DNA, 100 bp, Homo sapiens
ggctgagtacgacagcctcaaacaggagctggagcagctcaaagaggattttctgccgtctcttggcaaaaatggcaaataatgatgctgttctgaagag

SEQ ID NO: 498727 - DNA, 74 bp, Homo sapiens
cggaggcgttcagctgcttcaagatgaaggtgaaaaggggaccgggaaatcaactcagaaaccattacattata

SEQ ID NO: 498728 - DNA, 75 bp, Homo sapiens
aatctatacaaagaagtgatgctggagaattacaggaatcttctctcattggaaacctccacagctgttgagaaa

SEQ ID NO: 498729 - DNA, 99 bp, Homo sapiens
tacccggaatgagatttcagagatgaaccgggccatccagaggctgcaggctgagatcgacaacatcaagaaccagaacctcagaggatccagaacggc

SEQ ID NO: 498730 - DNA, 100 bp, Homo sapiens
ctgaaccggcacctgcacacctggatccaggataacggaggctgggttcatgaaccatcgagctccagccaatggccgctacaagccaacttgctatgaa

SEQ ID NO: 498731 - DNA, 88 bp, Homo sapiens
ctcagcttcccattgctgagagctcctgctgttgattgtggaaaaggacacctcttctgctggatcaccattaacaaggacaccaagg

SEQ ID NO: 498732 - DNA, 100 bp, Homo sapiens
agaaggcatgggatcctgaaactaaaagatgtcacaaaggaaaacgaggaaagtcccaggatgactactgtgtcaaaaaaatggctacaaacttcctagc

SEQ ID NO: 498733 - DNA, 50 bp, Homo sapiens
cacggagaaggcagcctacataggaaggcaggctcctgcaggagtcttgg

SEQ ID NO: 498734 - DNA, 75 bp, Homo sapiens
agcacctcatcccctggatgggggaccacaagatcctcatcgacaggtctgtcagtggcccagcggaagtttgct

SEQ ID NO: 498735 - DNA, 100 bp, Homo sapiens
ataacttctggctggaattaaggagcccagtttcctccaattgcagcacaagaccttccttttgttctaaaggctggctaccttgaaaaacgcagaaaag

SEQ ID NO: 498736 - DNA, 83 bp, Homo sapiens
gaagcagccttcaagctgaaagaaattgcacggcgggagaaacaacaacgctcctcttttgacttggactatgactttcaacg

SEQ ID NO: 498737 - DNA, 50 bp, Homo sapiens
gtggtgacattgtatcattggttactatactggcaattgctggagaagat

SEQ ID NO: 498738 - DNA, 75 bp, Homo sapiens
cgatggaataatgcccagcggcccgccaggtcccgctcagtgtggaggctgctggccctgccatctgtaagaaga

SEQ ID NO: 498739 - DNA, 82 bp, Homo sapiens
cgcgcacagctgctcccttcgccttcgccctttccacctcgcggcagttcggtgcccgtggttgacacgagctgtgtcccca

SEQ ID NO: 498740 - DNA, 97 bp, Homo sapiens
ccgcaactgggggggccccgacttcgagcgggtgcgctgtggccttgagcacgagcggcagatggaattgtcagccacttgaagaagcaggcaggac

SEQ ID NO: 498741 - DNA, 92 bp, Homo sapiens
tgactttcatgaaatatgtggattccaatctctgttgcttcatcccaggaaagtgggtaattccagaattgattggccataccattgtcact

SEQ ID NO: 498742 - DNA, 101 bp, Homo sapiens
tccggcggccgaagacactgcgactccggagacagcccaaatatcctcggaagagcgctcccaggagaaacaagattctataaacctggagagtaatccta

SEQ ID NO: 498743 - DNA, 50 bp, Homo sapiens
gggacattaccaaaccactcattttaggagagaacattgaaagtattctc

SEQ ID NO: 498744 - DNA, 100 bp, Homo sapiens
gagacccagtctgagtgtctgtccccagagcctcagtttgtgcaggacaccgacatggaacagggactcactggggacactctgacctggtcacagccag

SEQ ID NO: 498745 - DNA, 96 bp, Homo sapiens
taattttagggtcctttatatagaagggagagtagagagaaacaggcggccaccaagtcgctgaagcagaaagacaagaagctgaaggaaatcttg

SEQ ID NO: 498746 - DNA, 100 bp, Homo sapiens
ccagcagttcccagaaggactcttctatgagacagcatcgcacagaattattttaaaaaaaagcagtgatccaagcaattgaattggaagcactctgggg

SEQ ID NO: 498747 - DNA, 101 bp, Homo sapiens
ttactacctggaagacccatctgcttacttcagatagccaaggagaacagaacatatcttccagtagcttcctgagaaagtgtatatgcaaagcacacttc

SEQ ID NO: 498748 - DNA, 75 bp, Homo sapiens
acatgggttcagcctcatcgtcggccagcctgagggtcctagatggcctgatatgaaggagtcacgcctcccgcc

SEQ ID NO: 498749 - DNA, 50 bp, Homo sapiens
tggtgaaatggatgatagtcgagatttctctatgaatcatcatcaagaac

SEQ ID NO: 498750 - DNA, 82 bp, Homo sapiens
tgcacgcagcccggcgggaggataaagaccaccacgacctcctgccccccgaggtctgcagtctcctgaacccagcagccat

SEQ ID NO: 498751 - DNA, 75 bp, Homo sapiens
cggggagctggagaaggagaaccaccagctcagcaagaaggtatggttccgaccggcgtttagccgagctctctg

SEQ ID NO: 498752 - DNA, 100 bp, Homo sapiens
gctatcctgtcatacatcatgtgtgtggctgctttgactctcccgcgaagacctttccttcactgttctactgtgattcccgttgtggttctgaccctga

SEQ ID NO: 498753 - DNA, 107 bp, Homo sapiens
atagatacacattttatgtcttggaatttttggaagaaattaacccagctagccaaactaatatgaatgaccttggtgatgaccagttaaatgtatttggagaggac

SEQ ID NO: 498754 - DNA, 51 bp, Homo sapiens
cttcattcagctcagcaccaccttggacttaattcagtgcacaaatgagat

SEQ ID NO: 498755 - DNA, 80 bp, Homo sapiens
gagggttgacgtttgctatcttgaaagctgcagcccccgtagagaagatgatatcatcaagttgaatcgaaaggaaggga

SEQ ID NO: 498756 - DNA, 80 bp, Homo sapiens
tatccctttatgtttgcgaattatggaatctggaagtgaactttctaaaacacgggacgaccctgggacagtctccactg

SEQ ID NO: 498757 - DNA, 140 bp, Homo sapiens
cgtattttcaccccactgctgcaccagattgagctggagaagcccaagcccatcccctatatttatggcaggtcaaaatgcagatcttcgtgaaaacccttaccggcaagaccatcacccttgaggtggagcccagtgac

SEQ ID NO: 498758 - DNA, 90 bp, Homo sapiens
ccaccatgtctcgccgcaagcaaggcaaaccccagcacttaagcaaacgggaattctcgcttacagaatgtctgaaggggacagtgtggg

SEQ ID NO: 498759 - DNA, 100 bp, Homo sapiens
aaaaccggagcggccgggggcggccacggtgatgagccgggcctggcggacgcggcgccatcgcagtcaggctgaccccgcactacatctacccaccagc

SEQ ID NO: 498760 - DNA, 49 bp, Homo sapiens
acccaggaacctcgccatccagaacaaaagctggcaggctgacagaggc

SEQ ID NO: 498761 - DNA, 98 bp, Homo sapiens
agactcagggtaaccgccatgtcgacgcaaaccagccttcagcagtcggctacgaaacagcagcggaagtagccggctctcatgggaggttgaatgga

SEQ ID NO: 498762 - DNA, 80 bp, Homo sapiens
atgagcctgaagacaaggatgtgactcaaacggggattcagcgtccgatcctttggaacagggactcacgtgaagcttcc

SEQ ID NO: 498763 - DNA, 100 bp, Homo sapiens
tctgttcctcctgctcttacttgtcctgctcctgctgctcgaggacgctggagcccagcaagaacctaaaggcagacccagaagagctttttacaaaact

SEQ ID NO: 498764 - DNA, 82 bp, Homo sapiens
agctgcggagcatgtcgaccccggcccggaggaggctcatgcgggatttcaagcgatgtgaagttcatttccaatccgccct

SEQ ID NO: 498765 - DNA, 100 bp, Homo sapiens
gggtgtctttccccttccgtgtgtctcacgtacctggcagagtccacaggcgaaaagactcccaaattcgtcagagcacagcttatagcttacatcagcc

SEQ ID NO: 498766 - DNA, 76 bp, Homo sapiens
agggacaggatccggaggcgccagctcaaccgtatcaaggttacattggtgcagccctagttttagggggagtaga

SEQ ID NO: 498767 - DNA, 100 bp, Homo sapiens
ttttacaagaaaagccatacttgttttctctggggtatgattctaatatggtgtttcaggcctcacctgaagatcatgaaaaatacggtggggatccaca

SEQ ID NO: 498768 - DNA, 101 bp, Homo sapiens
gaaccattgttagtgaacgtggacaaagctgttgtctcagggagcacagaaaagtccatataatgcttgatggcctgttacctcctgacacctattttaga

SEQ ID NO: 498769 - DNA, 75 bp, Homo sapiens
tgcagcggaggtgggtcttcgtgctgctcgacgtgctgtgcttactggtcgctgtttgcagacaaggtcccaaag

SEQ ID NO: 498770 - DNA, 82 bp, Homo sapiens
aaggagagacgtcgctgaggggcttgcctgaagcgagggtcctattttgtaacggattatgatccaaccattgaagattctt

SEQ ID NO: 498771 - DNA, 76 bp, Homo sapiens
tcaagaggagcaacctcgtcagcagcgaggaaggaaacagcgcacccagtttcatgtatttgaatcgacaagacag

SEQ ID NO: 498772 - DNA, 96 bp, Homo sapiens
ctgttgctgctgcctttgtgacgggatcgctttctcccatcgaaccttctagttgcttattgcaggtatgaacgctgccgtccgtgccgtggtgcg

SEQ ID NO: 498773 - DNA, 75 bp, Homo sapiens
tcattggaaattgtacagtgacatcttctgggatttagtctggtgttcaaactggatccaaacaataaagaaggc

SEQ ID NO: 498774 - DNA, 100 bp, Homo sapiens
caaactccgggccacaggaggaaataggacgaagaccgtgtaaacagctgcagacaagtggctgatggggagaccccacacacactagaggctggcgcag

SEQ ID NO: 498775 - DNA, 75 bp, Homo sapiens
tcctagtgagaaccgagtcagtgctcttacccagtgccggtggtggtgtgcacattgagccccggtatagacagt

SEQ ID NO: 498776 - DNA, 75 bp, Homo sapiens
tctccaagcaatagggaagccatggatcctatagctgcctgagttctaccaagtatgccacaccaaaaaggatta

SEQ ID NO: 498777 - DNA, 100 bp, Homo sapiens
aagatggtgttgctgagagtgttaattctgctcctctcctgggcggcggggatgggagattgtggatttcttaaagaagaagcatgattttgtagacctt

SEQ ID NO: 498778 - DNA, 51 bp, Homo sapiens
atgagcctgcagagcgcgcagtacctccggctgcaaggtgtgactgttgta

SEQ ID NO: 498779 - DNA, 100 bp, Homo sapiens
ctgcagtggcgcctaaagtctgagagagggaagtcgcctctgtgctcgtgagtgcatggggtataaggcagcctgcttctgcaaagtggtacgatcgaag

SEQ ID NO: 498780 - DNA, 80 bp, Homo sapiens
atgggccaaagtgggggaaaggtcgtcctccagaggtctgcggggtttccgagaggctcgccgggatttctggcgggggg

SEQ ID NO: 498781 - DNA, 103 bp, Homo sapiens
aggaagactcccactccctgaaatctggagtgaagaacgccgccatccagccaccattccaagagcttgtcaggaagatcggaggtgccaagtagcagagaaa

SEQ ID NO: 498782 - DNA, 82 bp, Homo sapiens
gcgattctcagggattgatcgcctcttcagattaactgctgaagtactgatcgagttctgcatttcttcaatgaggaactac

SEQ ID NO: 498783 - DNA, 83 bp, Homo sapiens
gtactgccggatcaagatcaatctgtttttgaagaaccctccatcagcctttttgctctggagcattgtgagggaagagagtt

SEQ ID NO: 498784 - DNA, 74 bp, Homo sapiens
aggccagattgtcttggaagttccaaagttgcaacgatttctgctgccgcgggcggacacgccagaggaggagg

SEQ ID NO: 498785 - DNA, 75 bp, Homo sapiens
aacctgtacatgtggagaattcctgcagatccagaagcagaatgccgggtctaagttgtagattttatcaacaca

SEQ ID NO: 498786 - DNA, 49 bp, Homo sapiens
ggaaacgcttgtagggtttcaccaggtgaaatgacaatggatgctctgt

SEQ ID NO: 498787 - DNA, 100 bp, Homo sapiens
atcaatagacgatgtggaaacaatccattgattggaagaccaaacaaggctttatcctgtggataaacgcagagtgaacgagtttggggagtcctacgag

SEQ ID NO: 498788 - DNA, 74 bp, Homo sapiens
cacagacaagttgaagatgaccttgatttggcagctgatcggaagctctttcgtcttgtctccaatgactcctt

SEQ ID NO: 498789 - DNA, 100 bp, Homo sapiens
actttgagtctgaaaatgactggtgatttgaagatattaaagctagaaattggaactagaaaatcaaaagaattcaaggcatcttaacgtgacagttgaa

SEQ ID NO: 498790 - DNA, 83 bp, Homo sapiens
ggaagatctcatgatgttcaaccattcacttacactccagacccagttttctgactcagaatgtgccaaaaaggctttggaac

SEQ ID NO: 498791 - DNA, 48 bp, Homo sapiens
tgaatcagaagggcaccatcttgggctgctgccaatcgcaatgatcct

SEQ ID NO: 498792 - DNA, 83 bp, Homo sapiens
atggtctacaagactctcttcgctctttgcatcttaactgcagcagaaaaatatggctcaggagactaaccagaccccggggc

SEQ ID NO: 498793 - DNA, 82 bp, Homo sapiens
gacctcccccagaatttgtccgagatgtcatgggtattgaaaaccttccctttgaattacagagaaactttcagctcatgag

SEQ ID NO: 498794 - DNA, 100 bp, Homo sapiens
atgataaagggctctgaaagctagaagaaaaggtgtacttgcaagaaacctcaggacttgagtaacagcaacatgggtcctctctgcccagttggaccag

SEQ ID NO: 498795 - DNA, 75 bp, Homo sapiens
gttctccattgtgatgaaagcacatggtacaggactgggctaatgctaatgtcagcagacagattgaggacactg

SEQ ID NO: 498796 - DNA, 99 bp, Homo sapiens
gagaccgtgaccgagagcgtgaccgagagcgcgaatatcgtcatcgttagaagaaccaggaagacagcgcttccagcaacccgtttgcactccccaact

SEQ ID NO: 498797 - DNA, 100 bp, Homo sapiens
gtttgattccagtcatgatagaaatgaaccatttgtctttagtcttggcaaaggggcttacggtgagacatatcctgccattgaagatgacgtcctccct

SEQ ID NO: 498798 - DNA, 82 bp, Homo sapiens
tggaggattgtcactccaacctcttttcgctgattctggtacaggtcaaagaggtcctctccaagctgagcacgctcgtgga

SEQ ID NO: 498799 - DNA, 75 bp, Homo sapiens
ttgacaagactcaactgaactcctccagcctccagaaactcaaaagccaaaagtctctgagaacgactttgaaga

SEQ ID NO: 498800 - DNA, 75 bp, Homo sapiens
ccaggcgcggagggaagacgccctggtgctcaccaagcaaggcactggaaatgtacaaagatgactggaacaaag

SEQ ID NO: 498801 - DNA, 89 bp, Homo sapiens
gcagaatctgtcacagagggagatgtcaggtgggagaaagtttaagtgctgtggggctgctaactacacagattgggagaaaatccctt

SEQ ID NO: 498802 - DNA, 100 bp, Homo sapiens
gcggcctcgctaccaacatccgaagggagcacctaatgcagatctaatctttaagactggtgggagggttcttgaagcttttgagattaacaatggcagg

SEQ ID NO: 498803 - DNA, 88 bp, Homo sapiens
gacgccgggactccctggaaacctagaaatgctacgagagtacaaggtagtgggtcgctgcctgcccacccccaaatgccacacgccg

SEQ ID NO: 498804 - DNA, 80 bp, Homo sapiens
gaaaaccacccagattggatgcctgctgcgcttggagccgaacctgcaagcccagcaaattgtggctactaatttgcccc

SEQ ID NO: 498805 - DNA, 100 bp, Homo sapiens
cgaggccccctcttcgcctcctccaggtgtcatggagaaactccagctgggcccagagattctgcagcgggaaaatccaaggcttatttatgccaggctg

SEQ ID NO: 498806 - DNA, 88 bp, Homo sapiens
aattttagggtcctttatatagaagggagagtagggcagggtgccatttgccgtgcctgacaaagtgctgtggccacagctgtgtgag

SEQ ID NO: 498807 - DNA, 50 bp, Homo sapiens
gacacatggtccagggtcggctttcggtggcatctccacagaaagcgact

SEQ ID NO: 498808 - DNA, 90 bp, Homo sapiens
gtggtgaaggtccggggcttgccctggtcttgctcggccgatgaagtgcagaggtttttttctggacctctggtcctcaatcgagttcct

SEQ ID NO: 498809 - DNA, 83 bp, Homo sapiens
ctggtgccaaatacattgtcttaacttccaaacatcatgaagagaacggagaccaacctgggctgaagaaagaagattaaatg

SEQ ID NO: 498810 - DNA, 100 bp, Homo sapiens
gatgatcttttgatactaagtcctttcctacaagagactgaccatagatttattgaagaacaggtcagaatggcggcagtggagcatcgtcattcttcag

SEQ ID NO: 498811 - DNA, 100 bp, Homo sapiens
tatcctggacgcccagacatggctgtcccaggtactgaacgacacctgggtctccttcccttcctggtctgaggactccacgttcgtcagctccaagaag

SEQ ID NO: 498812 - DNA, 100 bp, Homo sapiens
ttcagactgacaccccacatcgacaatttggaggtggcaaacagcttcgcagtcactaatgcttgtgtccttgaatggccattttggacaaaactggttg

SEQ ID NO: 498813 - DNA, 83 bp, Homo sapiens
aacgaggcaaggagctaaagcagcgtgcgttcagccctggggctctgacgcccgctctgcggcttcggtgtttgaacaggcca

SEQ ID NO: 498814 - DNA, 75 bp, Homo sapiens
gccaccaccaccgccgctgccccggctgcctcctccctgaggcacattgcaagcaacccgtgccttgatggtggt

SEQ ID NO: 498815 - DNA, 88 bp, Homo sapiens
aagatatggaccatcacttggtgcagttcagcagctccacagaacagagcagtgcctcacgcctgatgagaagacacaagcggcggcg

SEQ ID NO: 498816 - DNA, 83 bp, Homo sapiens
cccggaagggcggacacctccacatcgccttttgccacctttccctttatttccggaggaaaagggagcgatgttgatctcag

SEQ ID NO: 498817 - DNA, 101 bp, Homo sapiens
cggagtttgagccccggaggcagagcggctgccatgaactctaagaaggagctgatgtggaggagcagctgagacagttcaagatgacgaccacagtagcc

SEQ ID NO: 498818 - DNA, 71 bp, Homo sapiens
gggggtttgggaaacaaggcttccagtgccaagatcaggcctttgtgacactaaccacaaacgatgcctac

SEQ ID NO: 498819 - DNA, 100 bp, Homo sapiens
gtggagtgtccgctgtgcccgggcctgcaccatgagcgtcccggccttcatcgacatcagtgaagaagatcagaccattactgggacttccacccccacc

SEQ ID NO: 498820 - DNA, 136 bp, Homo sapiens
ctggcgctgggctgcgtcctgctgctggtccctgtcatctgccaaatccggagccaagaagatcccagtgtctgagtgaactaacagtcctgctttcagccaccatttgcacaagacacccagcactgaaagtccc

SEQ ID NO: 498821 - DNA, 101 bp, Homo sapiens
tgagaaagaatatcagacaatgcgagagagtcagctgcaacaggaagacccaatggatagatacaaggtcatacagcagatggaacaaaaaaaattacaac

SEQ ID NO: 498822 - DNA, 101 bp, Homo sapiens
ctacaacatccagaaggagtcgaccctgcacctggtcctgcgtctgagaggtgaaatccgggtccccggccgtgctggcattcgcaaaggagaagtctttt

SEQ ID NO: 498823 - DNA, 80 bp, Homo sapiens
ttcatccttgtttaatgactttggtgccctcaacatctctcagagacgaaaggaattggcagcaatgaaacagattctcg

SEQ ID NO: 498824 - DNA, 82 bp, Homo sapiens
ttgagagtgggaacatgacgcaggtgcaggtgtctcttctcgccctggcggggaaggtacggacattgctgcaggagaagag

SEQ ID NO: 498825 - DNA, 90 bp, Homo sapiens
tccggctgcgggaggaggccatcctgcagatggagtggttagcaggaagaagatgagccttaagtctgaacgccgaggaattcatgtgga

SEQ ID NO: 498826 - DNA, 87 bp, Homo sapiens
atgacaatgctccctctccttatatggtcgtctacttcacagccacttttccattcgccatgctcctggtgctgctggtccgagggc

SEQ ID NO: 498827 - DNA, 50 bp, Homo sapiens
ggtcttcatctcggatatccgcaactaataccctctaccatctgctttgg

SEQ ID NO: 498828 - DNA, 100 bp, Homo sapiens
gggcgtgaataaagtcagagcatcttttcctgaagacagaaagactacacaggctctaaggcaccaaaggggtctaaggatgtacagttacccagcacgt

SEQ ID NO: 498829 - DNA, 83 bp, Homo sapiens
cttttcaagacaccaagtgagaggccaaccaggtagccaatctgaattctaaggacctctcatataccttaaaggattatgtt

SEQ ID NO: 498830 - DNA, 103 bp, Homo sapiens
atgagaaataaggacaaaagccaagaggaggacagttcgctacacagcaatgcatcgagcagcctcgtcttacagcgtgactgcaaagaaaaagacttttgtt

SEQ ID NO: 498831 - DNA, 80 bp, Homo sapiens
agtgctgatgtgaaaaataccacgacaaaaccaccctagtgagtgctccagttgtaacatctaccactcaggaaaagccg

SEQ ID NO: 498832 - DNA, 98 bp, Homo sapiens
gtcatcttatcttttaattattaaaacagagcttcctgctgctattgcagaatttttgactggagactatagtaggcatggaggagtgacggcaggaa

SEQ ID NO: 498833 - DNA, 110 bp, Homo sapiens
gggctcctgcgagaagcaagcggaacttcctgagtaagactttgaccccgacgcaggcttcagtgattgccgcggatcagaagcctgagcactttggctcgagacaatta

SEQ ID NO: 498834 - DNA, 100 bp, Homo sapiens
ctgccgtggccgcccggctgccgggagccgacagcttcgcgccggcctgtgacccaaacaacaaacgccttcgtcaaatcaaggaccagattctaacaga

SEQ ID NO: 498835 - DNA, 82 bp, Homo sapiens
tcccccaaagatgagatttacctgtgagatgtttcatcccaacacaaagcatgtggattcaaagttaagagcaggcaacaaa

SEQ ID NO: 498836 - DNA, 98 bp, Homo sapiens
tgggccgagggctgctcggccgccgcagcctcgccgcgctgggagccgcctgcgcccgccgaggcctcggattccagaggagaaccagccacccagca

SEQ ID NO: 498837 - DNA, 75 bp, Homo sapiens
caactttcggggcatgtacaatcagagttgcatccaagaattgatgcccggagagctgatgaaaaccttggaatg

SEQ ID NO: 498838 - DNA, 75 bp, Homo sapiens
gatgattgagccgcgcacgctacagtacaaggtgttcatgaagtctgtgaagctggagtgggtgcaagacaacat

SEQ ID NO: 498839 - DNA, 50 bp, Homo sapiens
atttgaagctggcagtctggttccaggttgggggccgtcccgctcctaag

SEQ ID NO: 498840 - DNA, 100 bp, Homo sapiens
gtcaaacctgaaagaccccagttatggatgggagcattccaggatgccttgaagattttctgtaggataaaaggtggtcgagtttcaactgatgacgtgt

SEQ ID NO: 498841 - DNA, 90 bp, Homo sapiens
atcagataatcagccatcaactgaaaagggtcaacatatttcactggcacctattcacaagcttgaagaagctctgtatgaataccagcc

SEQ ID NO: 498842 - DNA, 75 bp, Homo sapiens
aagctgcagaaccaacgaggtggccgaatcttccttcaggatatcaagacaggatttcaccatgttgcccaggct

SEQ ID NO: 498843 - DNA, 74 bp, Homo sapiens
agaaagctcagctggtggtgattgcacacgacgtggatcccatcgaggacccttcccgaaggccccgcgtccct

SEQ ID NO: 498844 - DNA, 82 bp, Homo sapiens
ggactgagtcctgcaggacacagcatggcgaggacaacatccttgctgcctccagctggcgggcgaccacagctactgcctg

SEQ ID NO: 498845 - DNA, 101 bp, Homo sapiens
gtggcccaggtgcccgccgtcgtcagcggggccgcttgatgcgacgcctggtcgtgatgtctcgggagtcggatgttgaggctcagcagtctcatggcagc

SEQ ID NO: 498846 - DNA, 81 bp, Homo sapiens
gtggggtggtgcacacagaacaacaaggtgttgatgccgccggacggattttttatcaagcagaaatgcatcgaacaacga

SEQ ID NO: 498847 - DNA, 100 bp, Homo sapiens
tgggcagcaagatggcgtctgctagtagggtcgttcagccagaaacgtttgagcatctttttatcaagcatacagcatcagtgacatgtggtcctcttct

SEQ ID NO: 498848 - DNA, 100 bp, Homo sapiens
tttgatccagaacttgcagcaacaataggttgcatcataaatacaaaggactgaagttataaaagagaaaagagaagtttgctgctaaaatgaatctgag

SEQ ID NO: 498849 - DNA, 100 bp, Homo sapiens
ccacagcccgcatctaccggaagcactttctcggcaaggcgcattggagtgactgtctggcatcaccaagatgacactccacgccacccggggggctgca

SEQ ID NO: 498850 - DNA, 75 bp, Homo sapiens
gatcctgggcagcctccagcagggacctgtgacaggttctgggccggagaaggggcgacgttcgggcaccccccg

SEQ ID NO: 498851 - DNA, 75 bp, Homo sapiens
caagccgactgatgactggagaggatggctactatttcaccaatctgtagagacaagagtttttccatgtaggcc

SEQ ID NO: 498852 - DNA, 100 bp, Homo sapiens
tgtgactgactagcagcttcattttgaagtgcagacaaccatgcgtgaaaacctggccacagttgaggggaactttgccagcattgatgaacggatgaag

SEQ ID NO: 498853 - DNA, 75 bp, Homo sapiens
atccggaagaagatgatggaaatcatgacccgagaggtgcagacaaccatgcgtgaaaacctggccacagttgag

SEQ ID NO: 498854 - DNA, 98 bp, Homo sapiens
cgctgttggcaaatcaagcctagtgcttcgttttgtgaaaggccaatttcatgaatttcaagagagtaccattggggaccagcatctcagacatgtcg

SEQ ID NO: 498855 - DNA, 89 bp, Homo sapiens
cagtggaatccttttgttgatggtgcaaatactggcaaacgccctcctgcaaaacggcccaactacgttaagcttggcactctggcacc

SEQ ID NO: 498856 - DNA, 50 bp, Homo sapiens
cccgaccgccctcttctgtcttggtgagcgagtgctgtgctttcatgggc

SEQ ID NO: 498857 - DNA, 74 bp, Homo sapiens
caaggatatccatgtgccaccccgggtgaaagagtctatgcagatgcagatggcttcccagttacgactcttcg

SEQ ID NO: 498858 - DNA, 95 bp, Homo sapiens
gggataagaaagtaacgcatttttgtttttggaaggagaaggatagacttggctttgagccgtgctggtatagaggactctaagaagtggggcat

SEQ ID NO: 498859 - DNA, 75 bp, Homo sapiens
ggtgcggggtggaccgcggcggcccttcgaccaaagtattgaaatggctgatggcaagtgcaggaagatcctttt

SEQ ID NO: 498860 - DNA, 100 bp, Homo sapiens
cacgagcaggtggtggagcggctgctggaaacgcaagacggtgccgagaagcagctgcgagtgctcttaaagttccgtacagataaaggaagagatccca

SEQ ID NO: 498861 - DNA, 82 bp, Homo sapiens
tctcactaaaatgaaagaaaccgctgaggcttatttgggaaagaaggtaccacgaaaggcagtggtagaaaagccagctcgg

SEQ ID NO: 498862 - DNA, 50 bp, Homo sapiens
gagagaactcagcgaggattctgaggcacagtaaccttggtgcacgaccg

SEQ ID NO: 498863 - DNA, 87 bp, Homo sapiens
cgtcgccgccgccaccatgcccaagagaaagttcaaatctgaacatcaatgatgtactagggaactactcattgactcttgttgatg

SEQ ID NO: 498864 - DNA, 101 bp, Homo sapiens
cactccacgagttccctcggattaaacgccggagagagcgtgaatttgcctcggggacgcctctccaggataaaagaatcagagtgtctcaacccttgaca

SEQ ID NO: 498865 - DNA, 82 bp, Homo sapiens
ctgagtttcgatcggatcctcaagaaggatctggtgcagcacagccatgacagtgcagatcctgctgaagctggaccgcctg

SEQ ID NO: 498866 - DNA, 75 bp, Homo sapiens
caagaaagagtgcccaattccaaatgtacagatgacgaagatgatcctgcagaagctgaaaaggagggaaatgaa

SEQ ID NO: 498867 - DNA, 100 bp, Homo sapiens
tgaccacagctggaccctttttgagcacctgcctcacataggtgtaggacaagaaatggattctcagtcatgaagatgtcatattgggagaattactggg

SEQ ID NO: 498868 - DNA, 84 bp, Homo sapiens
tccgcgctgcttccacccaacttcctgttagacctgcctagagctggaacgttacctccagagcgagccctgctatgtttcagc

SEQ ID NO: 498869 - DNA, 50 bp, Homo sapiens
ccttggtcccagagtcatcatgaaggaggcaagtgaggcctatctggttg

SEQ ID NO: 498870 - DNA, 100 bp, Homo sapiens
ggcaagcgcagggggacggggaccagcagctgtcgccgccgctctcaggtgacagagctgaatgaacctctctccaatgaagatcgaaatctcctctctg

SEQ ID NO: 498871 - DNA, 75 bp, Homo sapiens
ggggccctctcagcaagaacgggaacaaaactctgtgaggagctggtttcacctgaggacctgctggagtggctg

SEQ ID NO: 498872 - DNA, 100 bp, Homo sapiens
atagtgacaaccagaaatgccctccatattttccagtgatcccaggaattcaaaatgtcctcagcctcttttgtgcagtcctcacagaaaataaggttct

SEQ ID NO: 498873 - DNA, 76 bp, Homo sapiens
ctcgaatcctctcctggtttagggaggggaagggtcgaagctgctgaagtggtttttcctaatggaaaatcacata

SEQ ID NO: 498874 - DNA, 82 bp, Homo sapiens
gggggctcggctgcagacttggccaaatggacgggactattaaggagctgacatggacccaaatcctcgggccgccctggag

SEQ ID NO: 498875 - DNA, 90 bp, Homo sapiens
cttggcgaagcgctgcgctcgcgcccggatccctcagggcgcaccctacgacgcgcacaccaccggcatgaccggcgccatcagctacca

SEQ ID NO: 498876 - DNA, 51 bp, Homo sapiens
tggagtccatcttccacgagaaactaaaccatttacacagctggtgaaaga

SEQ ID NO: 498877 - DNA, 100 bp, Homo sapiens
ggacctccaggggaacaatgaggcctacgcagagctcatcgtccttggcctggagctgctgaagactgctattgggaaagctggctacactgataaggtg

SEQ ID NO: 498878 - DNA, 104 bp, Homo sapiens
ctgaatttccttctgcctgctgcccgatttctatttgactggcaatagtctgtttggtgccctggttgtcagatgttggaaagcagtaggacggaacatactct

SEQ ID NO: 498879 - DNA, 100 bp, Homo sapiens
tttaaatgatacctatcactcaagagactcttcatttagattggattctgaatatcaggtgtttggagaagagggattgaccctgaatcttgaagacgtt

SEQ ID NO: 498880 - DNA, 75 bp, Homo sapiens
ccaacatctggaggctgttctgctttggagttaaaggaactagcggaattactggaggaagaaaaactaagttgt

SEQ ID NO: 498881 - DNA, 100 bp, Homo sapiens
caacagcatcgttcctctttccaagaaggtgagccctattcccagaggcaggtggtgctgaccctgtaacccaaaggaggaaacagctggctaagctcat

SEQ ID NO: 498882 - DNA, 50 bp, Homo sapiens
gccagttatttgcctcagtaaaagagacccagatgatgtggtaccagttg

SEQ ID NO: 498883 - DNA, 75 bp, Homo sapiens
ccgtctccttaacaccgaacaccacaggtgatttggcttctgcacagttaggaggagcaccaaaccgatgggagg

SEQ ID NO: 498884 - DNA, 100 bp, Homo sapiens
tcactttgggaagcagtgacatccaacctgtatcaagtcttctaatctgtgaacatgatggcttgttcaatcagtatatcagtcaacaggaatataagcc

SEQ ID NO: 498885 - DNA, 104 bp, Homo sapiens
cgggactgagagcgcctggaggctcgagcggagggtggtattaaagataatcaaacattatcaagaagaaggacaaggaactgaagttgttcaaggagtgcttt

SEQ ID NO: 498886 - DNA, 83 bp, Homo sapiens
ctgcccccccttccccacgcaaccccagatccatttacactttacaggcagctgtgcggagggtagtggcagccatgaaccgg

SEQ ID NO: 498887 - DNA, 99 bp, Homo sapiens
aataacccttgatcctcctcctaattgcagggtaaaggagctggaagtgcgaaaattgatgcatgtgagaggagatggaccctggtattactatgagac

SEQ ID NO: 498888 - DNA, 100 bp, Homo sapiens
tgtgcagggccccgagccggcccgggtcgaggtaaattctactgtaagccacactactgctatcgactctctggctacgcacaaaggaagagaccggcag

SEQ ID NO: 498889 - DNA, 100 bp, Homo sapiens
gcgaggagaacagtccgaaatggcggggactgttggtctcggccctgcggaaggaagatgatccctatgatcttgaagatgtttctgcacagaaatgagg

SEQ ID NO: 498890 - DNA, 100 bp, Homo sapiens
cccagacgcggcacagagagggcctgggagcttgctgcagcttcaggccgccatggcatcagatgaaggcaaactttttgttggagggctgagttttgac

SEQ ID NO: 498891 - DNA, 98 bp, Homo sapiens
aatgaaagtaaacctggtgactcacagaaccttggatgtagcccatcggatgctggccacaggcgagtgtactcctgaggatctgtgtttctccctgc

SEQ ID NO: 498892 - DNA, 50 bp, Homo sapiens
ccaggagaaattcgccctcaaagaggactggaatgaaattgaccccatta

SEQ ID NO: 498893 - DNA, 75 bp, Homo sapiens
aaatcatccgagacatgattggaccggaaaagactttggtctgctggagtttgttggagttccactccagaccct

SEQ ID NO: 498894 - DNA, 82 bp, Homo sapiens
tgagcgcgtcgagccagacagactgctgagcgactatattgagaaggaggtaaaggtggtggtgaagtttattaagaaggag

SEQ ID NO: 498895 - DNA, 100 bp, Homo sapiens
ccagaagcctgcatttctgcattctgcttaattccctttccttagaccaaagagaaccctgtacagtaagaaatatggtgtggacctcatcagatacact

SEQ ID NO: 498896 - DNA, 51 bp, Homo sapiens
cttctgctgcatttcctgcccagagaacctcaagaaggcatgaagccagcc

SEQ ID NO: 498897 - DNA, 74 bp, Homo sapiens
aagcgaagggcaccatctttgcaattctgtggtgttcttggtcacacatttatggagtttctgaagggcagtgg

SEQ ID NO: 498898 - DNA, 100 bp, Homo sapiens
ccaagatgcagttttttgatgctgaggagctcctggtcgatgaagaggatgatgtttttggtgaaggtatctgctcgctcgtgggaccacaatgaattct

SEQ ID NO: 498899 - DNA, 100 bp, Homo sapiens
cgtcatgggcgcctcggccgccatggtcttcagcggaaagaccacagcaagattctttcattcgtctcctcctagcctgggggaccaggctcgaactgac

SEQ ID NO: 498900 - DNA, 100 bp, Homo sapiens
gaggcaggctgcggcagacggcgacagtggcggcggcgccatggcagggcttgcaggttccttgcattgactccatggagagtatatcacctgatttccg

SEQ ID NO: 498901 - DNA, 75 bp, Homo sapiens
gccggcaaggccatctgggtcacgggctggggacacacccagtatggagacttaattcagtgcacaaatgagatg

SEQ ID NO: 498902 - DNA, 98 bp, Homo sapiens
aggagaggaaaggccaagggaagagaaaagtctgcgttagtctggagaagttggactagtgagacacgttggtcgtcattgcctccgagcccacttta

SEQ ID NO: 498903 - DNA, 74 bp, Homo sapiens
cgcccgcggttgtagcagctgccgctgcagccatagcagcagaggcagtcaaatgcttctcagactctctgtga

SEQ ID NO: 498904 - DNA, 100 bp, Homo sapiens
gaataattccacacctctagtggacccctcagtatatggatacggagtacaaaaacggcccttggatgatggagaaagaatcttcaagagggagacatag

SEQ ID NO: 498905 - DNA, 75 bp, Homo sapiens
gtgtaagcgcagaaagcaggcgaacccgcggcgcaataacgggcttttttccagacttcaagctcccattccaac

SEQ ID NO: 498906 - DNA, 100 bp, Homo sapiens
atcgaggtgtggacgcatccggcgaaaccacctacaagaagggtgccctgaaaaccttgaaggaattttaacgaacgatgttggaaagacaggcgagcct

SEQ ID NO: 498907 - DNA, 83 bp, Homo sapiens
tgcagtacgccacggggccgctgctcaagttccagatttggtgctggagaatctggtaaaagcaccattgtgaagcagatgag

SEQ ID NO: 498908 - DNA, 75 bp, Homo sapiens
gtttacgaggatatatagtcatagaagatttgtggaaggagaactttcaaaaggccctgctacccacaaggcgct

SEQ ID NO: 498909 - DNA, 74 bp, Homo sapiens
gtttgttccctgacaactttgtaagaaatcccgtcacggggctgctgtcagccagccatgagcagaaggatgcc

SEQ ID NO: 498910 - DNA, 76 bp, Homo sapiens
cttcaatgatgggaaggtggatcccgccgggaggtactttgctgacttgtggaagaaagcaaactgatcccactca

SEQ ID NO: 498911 - DNA, 100 bp, Homo sapiens
gatgaagttcgagcactaatatttaagaaagaagatgttaactttcaggaatcccgttctgcttccagaagtggaagtgctcacggatcggggaaatctg

SEQ ID NO: 498912 - DNA, 88 bp, Homo sapiens
gatgatgaccctagtctggccatcactggggtccctgtggtgacttggccaaagaagactccaaagtaatctatgccagcaattatga

SEQ ID NO: 498913 - DNA, 90 bp, Homo sapiens
cactttccaaagcatgttgcagatttacatgcaagtagtgggtttactgaagaatttgagtcggatcctgacctcccagccgatgtgcag

SEQ ID NO: 498914 - DNA, 82 bp, Homo sapiens
tccagaaaacattgtaatggccatcgctggaaacaagtgcgacctctcagatattagggaagtctgttagaactgctgtgct

SEQ ID NO: 498915 - DNA, 90 bp, Homo sapiens
cacatgtccctgcaggacagtgggggccagagccgggccatcagccctgacagccccatcagtcaggcaccccccgagcccagctccaca

SEQ ID NO: 498916 - DNA, 100 bp, Homo sapiens
aggtcaacgagacggtggagagcggctctgacactctgggtaccaggtcatcagtacaccatctgatattttcatggtgatggaatatgtctcaggagga

SEQ ID NO: 498917 - DNA, 71 bp, Homo sapiens
gataactgaggacaatggacctgcctgggcatagacttccttaaggactgagcagggggaggaacatttaa

SEQ ID NO: 498918 - DNA, 99 bp, Homo sapiens
ctgaaaagtcgcagcgagctggagccgccggaggacctacaagaacagtgaggagcttcggtctcgtattgtgtctggaatcatcacacctatccatga

SEQ ID NO: 498919 - DNA, 83 bp, Homo sapiens
gccgcggcggcagcagcagtgagaggctgtctgtccccagaccccagagcacgtccggcaccaccatgactgggctgttgaag

SEQ ID NO: 498920 - DNA, 83 bp, Homo sapiens
ctaattaaaacatttttcagggacgtagccatccagaggttttgattcccaccatggccatcacccagtttcggttatttaaa

SEQ ID NO: 498921 - DNA, 74 bp, Homo sapiens
tcggcagtcgcgaagcagcaaccatggaatatgaagacaaggctggaagacctagcaagccaccctctccaaag

SEQ ID NO: 498922 - DNA, 106 bp, Homo sapiens
agaccgattttctgcagaagatgaagctttgagtaacattgccagagaggagtcagtggatcggtggggaaaatgctgcttaccctgggccctgggctgtagaaag

SEQ ID NO: 498923 - DNA, 82 bp, Homo sapiens
caacgccttaacccaaggaagtgactcaaactgtgagaacttcaggtcttgagtcaccacgtccgaatataattcttgggtt

SEQ ID NO: 498924 - DNA, 74 bp, Homo sapiens
tgaaatgtttggatatatgaaattacatccagaggattttcctgaagaagatcgagacatgtaagcagcatcat

SEQ ID NO: 498925 - DNA, 100 bp, Homo sapiens
ctgtgatgggccctgtccctgtctcccagagcctgagccaccaaagcacaaggcagaaaggagtggagatgaccaggatagtgaaaagtcaaaaccagca

SEQ ID NO: 498926 - DNA, 50 bp, Homo sapiens
agggagaaggaagaggtgtttgaaaaggctatagaaagcgcaattggtgg

SEQ ID NO: 498927 - DNA, 100 bp, Homo sapiens
ctcatgtgtattgtgaaggaaatgatgtctatgatgtcatgctaaatcaggtagtgggcagcagtcagtgacaggtgtaacctctgtggatgacagcaac

SEQ ID NO: 498928 - DNA, 101 bp, Homo sapiens
cgccgcgcagctcctggcctattacttcacggagctgaaggatgaccaggtcaaaaagacttcacagagaatgcagttgtcttgacttcaggtctgtctgt

SEQ ID NO: 498929 - DNA, 96 bp, Homo sapiens
acaactaccgctgctggaccacaaaccgctgccagaaaagtctcggcgcggaagatggccggcggcgtggacggccccatcgggatcccgttcccc

SEQ ID NO: 498930 - DNA, 90 bp, Homo sapiens
gccggaacgatgccggccgtgagcctcccgcccaaggagaatgcgctcttcaagcggatcttgatccctttcagctccctgcaaaaacag

SEQ ID NO: 498931 - DNA, 100 bp, Homo sapiens
gaacccatcgggcagctacacatcttgaaagagaagctcttcctgtgaggtcctacgggaagtgaaggtgctggcaggtcttcagcaccccaatattgtt

SEQ ID NO: 498932 - DNA, 74 bp, Homo sapiens
cctacttacagtcacgttactacaggtcttgggcttgccttcaacttgaatccagctctgaccatgattggcaa

SEQ ID NO: 498933 - DNA, 74 bp, Homo sapiens
gcctgtggggactggaggcccagaaacgggccaattcctgtccccccagcagcatggcatcgtgtgctgaaccc

SEQ ID NO: 498934 - DNA, 95 bp, Homo sapiens
aatacaggtcatcccctagtgacttctgagcacaccagaaggagacacatccagggccgttgctccagggagaactgcaaatatcttcatccacc

SEQ ID NO: 498935 - DNA, 100 bp, Homo sapiens
ctggaaacaagtgcgacctctcagatattagggcaattgaaggaacagactaaaaatcgtgtcctggaaggaaactacaggtactaccagggattttcag

SEQ ID NO: 498936 - DNA, 101 bp, Homo sapiens
ccacatacagcaacttagcgaagctgccggtgaagatgatacacctgtaagatcggaatggagtgaacttcaaagtcaggaacgatctgaacaaaaaaagt

SEQ ID NO: 498937 - DNA, 75 bp, Homo sapiens
gaagaccctggactttgtgaagttgttagagtacatgagcattacttgggctggagtgcaaaggcgtgatctcgg

SEQ ID NO: 498938 - DNA, 100 bp, Homo sapiens
cgcacctgctggggacctgtttgacatcatccctccccagggcctggagtccctcggctgcatccggaagcgctggctgagaaagccaaggcctgtctcg

SEQ ID NO: 498939 - DNA, 90 bp, Homo sapiens
catggttcggctttttgtggtgattgtgatgtttgcctggtctatagttggtgccgtgagcgatgtggagatgcaggaacactatgatga

SEQ ID NO: 498940 - DNA, 100 bp, Homo sapiens
aggccaaaaagagaggaggaagaagatttcataaggtgactctgttttgagaagtgcaaccagatctctcctggaattcaacacaacagtgagctgtgac

SEQ ID NO: 498941 - DNA, 50 bp, Homo sapiens
ttgacacttatatcctccctgggtttttatttcagggcaataatggaact

SEQ ID NO: 498942 - DNA, 101 bp, Homo sapiens
tggaatagcctctcttcagtgttcacagagatgcaaccagtgtacacttaaagcgttctgggaatatgaatcccttctgcaccctggaatcaccagtccag

SEQ ID NO: 498943 - DNA, 100 bp, Homo sapiens
tggcaacttctatgtacctgcagaacccaaattggcgtttgtcatcagaatcagaggaggaagtttgctaactagaagtctagcagaaattgtgaagaag

SEQ ID NO: 498944 - DNA, 83 bp, Homo sapiens
tccttccagaaggagcgaactgaagaggttctacacaattggaaatgctctatgtacagtgaagtgtgatgagaaagtgaaag

SEQ ID NO: 498945 - DNA, 100 bp, Homo sapiens
gcactatcccaagactgctggcaacaggtggtcgttctcgttaccggaccacttcttcagccaacaatcccaatctgatgtatcaggatgagtgtgaccg

SEQ ID NO: 498946 - DNA, 73 bp, Homo sapiens
tctgacagccctgtgtgacaccaagataagtaacgaagagagaagggcacagttacctaagtatcaacgtaat

SEQ ID NO: 498947 - DNA, 100 bp, Homo sapiens
tctctttctggcctggaggctatccagcaatgtgtcgagccactgggcctggagaatgggaacattgccaactcacagatcgccgcctcgtctgtgcgtg

SEQ ID NO: 498948 - DNA, 75 bp, Homo sapiens
aacggcagaagcttcaccacaaaagcgaaatgggcacaccacagcacgagggccgggaggaggatcagcggttga

SEQ ID NO: 498949 - DNA, 124 bp, Homo sapiens
aaacaagtggctgcggccgtcgcccaggagtcatcggacgccagaatctgacaatgcagatcttcgtgaagactctgactggtaagaccatcaccctcgaggttgagcccagtgacaccatcga

SEQ ID NO: 498950 - DNA, 76 bp, Homo sapiens
tacatggcaagttgttggaacagtgacttgcaagccttcaaatgtttatctggtgtgactgtattatgccctcaga

SEQ ID NO: 498951 - DNA, 75 bp, Homo sapiens
tggcaagtattgctgtgggtgctgggacttcccgtccgcggcgtggaggtgagttattctccccacctcagaagt

SEQ ID NO: 498952 - DNA, 98 bp, Homo sapiens
ggcgttcttccgctggctcagccgcaagtacccgtccatcatagtcaactgcgtggaagagaaggctgaactcacgggaatcaaatggcgtaggtaca

SEQ ID NO: 498953 - DNA, 102 bp, Homo sapiens
ctgggctacaagacgctggccgcgggctccatcagcatggctgagaatgagctgaaagccagtggtggcgaaatcaaaattcataaaatggagcaaaaggag

SEQ ID NO: 498954 - DNA, 100 bp, Homo sapiens
tttgaagggggaagtctcttgcaaattccagtcaaggccctaaaatatagatcagtcgcatcgaatacattcattcaaagaacttcatccaccgggatgt

SEQ ID NO: 498955 - DNA, 75 bp, Homo sapiens
cgcggccgtcggagacatgggagacccggggtcggaggtgaaatgacaatggatgctctgttggctcgattgaaa

SEQ ID NO: 498956 - DNA, 84 bp, Homo sapiens
ggaggacagcctcctggccgccgaagaggccgccgccaaggttgactgcattcagccagtgccaaaagaggagcccagtcccgc

SEQ ID NO: 498957 - DNA, 75 bp, Homo sapiens
ggttgcgctccgtgcacctcttgcgggagatacaactcgtcaacgaatcaaattcagtgatgacagagtatgcaa

SEQ ID NO: 498958 - DNA, 100 bp, Homo sapiens
ccgccattttgctaccaagaaagccaaaggtgtcatggagaaactccagctgggcccagagattctgcagcgggaaaatccaaggcttatttatgccagg

SEQ ID NO: 498959 - DNA, 90 bp, Homo sapiens
gcaacccagacgtgcaacaaagtgcgatgggaactgtacctggggaatgaattgtaggtttatacaccctggagtgaacgacaaggggaa

SEQ ID NO: 498960 - DNA, 90 bp, Homo sapiens
gccaaagaaacaagccgtggaataggtgtatcaagtaatggtgcaaagcctgaagcactgcccagactccagacgtacctttaccaaacg

SEQ ID NO: 498961 - DNA, 100 bp, Homo sapiens
agttgttgagcagagggaaagggataggagaaggatgtggactgcagtgctgcagtgccaggccaagtcctgtatctgccatgtctgtggcgtccacctc

SEQ ID NO: 498962 - DNA, 90 bp, Homo sapiens
gtcatcaagaagtactggctccagttccgggaaggcccctgggggggtaatgcgggcatcgctgctgcctatgctgctaggaagctgggc

SEQ ID NO: 498963 - DNA, 100 bp, Homo sapiens
gtctccaggaaaagttgggctttcaacattcaagaatgtgacagtgatgataacatgggtgccaaaaatacttcaataggagaagaatttatatccacag

SEQ ID NO: 498964 - DNA, 101 bp, Homo sapiens
atctgcgctaggtggcatctcctctcacggatgcctcgatgatgtctttctacctaaagatattgacctagacagtgtggatatggatgagacagagaggg

SEQ ID NO: 498965 - DNA, 50 bp, Homo sapiens
gccgccggagccgcgaggccaaagggaaaattgcaacccttgcctacaac

SEQ ID NO: 498966 - DNA, 82 bp, Homo sapiens
ctggagcctcagttggaagcagccgatccagcctgcggagcctgtggggcaggtcaaggtggccatgcatatcttaaggaat

SEQ ID NO: 498967 - DNA, 100 bp, Homo sapiens
catcaggtaggctgcgttgaggatctttgctcttccatccgcctttgatcgtcttcctcttcagccatccagtttttgcagaagggaagcctttggcctt

SEQ ID NO: 498968 - DNA, 98 bp, Homo sapiens
gcattctccagggaaaggatgacatatttttggacctgaaacagaaattctggaacacctatatgatcaggatcctcatgaccagccaaagagaagaa

SEQ ID NO: 498969 - DNA, 75 bp, Homo sapiens
cggagacgcagatgtggacttgaaagaagctgcagcggaggaaggcgaggaagagagaagggcacagttacctaa

SEQ ID NO: 498970 - DNA, 83 bp, Homo sapiens
aggacaaccagatggtggagatcagtgcctggttccaggaggccataggcttcattgatcgatgctatagaagacaaacaagg

SEQ ID NO: 498971 - DNA, 83 bp, Homo sapiens
cgagatcgtgcacatccaggcgggccagtgcggcaaccagatcggcgccaagactaatagggatgccaaaggaaaaatatgat

SEQ ID NO: 498972 - DNA, 100 bp, Homo sapiens
aggacaggcgggctgcagcagcaaaggcctgcaagaccccccaaagccagcagtcagcctacttcctgttaacactgtttagagaggtggctattttgta

SEQ ID NO: 498973 - DNA, 87 bp, Homo sapiens
atgaaaatgaaagaaagtccacatttccaaaagtccaaggatgaagagcatgatctagaagaggatgagagtggcactcgacgaaaa

SEQ ID NO: 498974 - DNA, 110 bp, Homo sapiens
acggcttcgccatcgccagcttcagcaccctggaggccctggaggtatcatgatattagctggtttgacatcaagtcatttgtgagtcatcagatcttctcctgaaaatg

SEQ ID NO: 498975 - DNA, 99 bp, Homo sapiens
ggaggggccccagcagcccccgaaggccctatcaggacatggagtatgaaagacggttctaagctggtctatgtccatcaccttcttggagaaggagcc

SEQ ID NO: 498976 - DNA, 74 bp, Homo sapiens
gcaccctgctcctgttggctaaggccctgggaggagcggggacactgaggacctctctccaaattggcctctca

SEQ ID NO: 498977 - DNA, 50 bp, Homo sapiens
ccaatatccaggagctcaatgtctacagctcttcacagatggaatcacaa

SEQ ID NO: 498978 - DNA, 52 bp, Homo sapiens
tggagaaccacagcagtgtggctggactagaagggcacagtgccagatgatg

SEQ ID NO: 498979 - DNA, 101 bp, Homo sapiens
ttctcatggatgttcttcttcgagtatttgtagaaggagctgtgtgtgggggacccaagtcctgagctcggaggcattttctggccagggctgtttcctcc

SEQ ID NO: 498980 - DNA, 75 bp, Homo sapiens
ctagcaatgagctcccaaagccatccaggtatctctggagacaaagtagagatagaccctgttacgaatcagaaa

SEQ ID NO: 498981 - DNA, 82 bp, Homo sapiens
ccaggcaccccttcctcacactctgtgtcctcagtatcctgcctggcacgtggagggaagcctggaggaggggaggagggcc

SEQ ID NO: 498982 - DNA, 75 bp, Homo sapiens
gacgagctgaccctgggagacatcgacggtagctacagcaagctgggtagcaggcagatccaaaggatatcatga

SEQ ID NO: 498983 - DNA, 75 bp, Homo sapiens
ggccctcagaatttaaacttaaggaaagagtgggaaagtgagggtacaaacccgtagtgctgatgaaccaatgac

SEQ ID NO: 498984 - DNA, 98 bp, Homo sapiens
ctcagtggctcaacaggctgaagggagttgtgacttctcaccaggagatttggtttgggccaagatggagggttacccctggtggccttgtctggttt

SEQ ID NO: 498985 - DNA, 74 bp, Homo sapiens
gctgcgagcacatgatggcgatacgggagctcaaagtgtgccttctcgggttgaaaacaatcctcgaacaggaa

SEQ ID NO: 498986 - DNA, 98 bp, Homo sapiens
aggttacaatagcatacattatgctgccgcctatgggcacaggcagtgtctggaattgggtgttgatgatgccttctatacattagttcgagaaattc

SEQ ID NO: 498987 - DNA, 80 bp, Homo sapiens
ccggaggagacatcggcctctgcaggcttgccgaagaagggagggactggtgattgcagctggaagtgcccatgaccgag

SEQ ID NO: 498988 - DNA, 100 bp, Homo sapiens
atgataattcatgacagaagggagtttgctaaatttgaaaaggagaaaatgaatgccaaatgggacacgccttcacttaacttaagggaccttggattat

SEQ ID NO: 498989 - DNA, 112 bp, Homo sapiens
gttcggagctgcaggcctcctcctcttcatcagcctgcaggaccctacggagctcgccccccagcaggtgccagaggaaggcatcaaccacgagtgtaagctgtgcaaccag

SEQ ID NO: 498990 - DNA, 100 bp, Homo sapiens
acctgcgcgaagctggccaaagcctgcccagacggctcacctgtgcgggatggaacaaaagattgagaggatccagaatccagatctctggaatagctac

SEQ ID NO: 498991 - DNA, 100 bp, Homo sapiens
ctgttgaaaaaaatctgggaggttgaacttattaataattttgtatgggcgaatgaagaataagactgggagtaaaactcaggggaaatctgcttcaggc

SEQ ID NO: 498992 - DNA, 97 bp, Homo sapiens
ttagaaatcttcaagaatttctgaggacgagctcacatctggaagaacccagtgacttgattgtaaaaatttacagagcggaatcatatgctggtct

SEQ ID NO: 498993 - DNA, 120 bp, Homo sapiens
gaagaccgcgcgcagggcctgcagcgggagctggacggcgagcgcgagcggcgcgagaaagctgaccccgcactacatctacccaccagccatcgtgcagcccagcgtggtgatcccagc

SEQ ID NO: 498994 - DNA, 83 bp, Homo sapiens
gtcaccgaccgctactttcggatccaggaggtgctgaagcacgccaggggggatatgagactttctactcggaatatcctgag

SEQ ID NO: 498995 - DNA, 80 bp, Homo sapiens
tgccccacggccgttttcatggctgcttaaaatggtctatggtctgtctctgtgaaatgacaatggatgctctgttggct

SEQ ID NO: 498996 - DNA, 100 bp, Homo sapiens
gtcaaagccatgatgaaaaactcagtcgcaaacctgtatgtgggactggtggtcatgtgtggcttcgtcctttttgatactcaactcattattgaaaagg

SEQ ID NO: 498997 - DNA, 74 bp, Homo sapiens
atgaatctctgttccaaatgctttgctgcattatgccagtacatacaggcttctaaagccagggatggtgccag

SEQ ID NO: 498998 - DNA, 100 bp, Homo sapiens
cgcaaccagagcagagaccatatagctgccctcagctgcactgtggcaaggcttttgcttccaaatacaagctgtatagcttgctggcctctggttccga

SEQ ID NO: 498999 - DNA, 100 bp, Homo sapiens
gcgagcagccaaggtgttggagcagctcacagggcagacccctgtgttttccaaagtttgttgaaagtgatgcagatgaagagcttctgtttaatattcc

SEQ ID NO: 499000 - DNA, 82 bp, Homo sapiens
ctgctacctgcagcgccgtgtggcacgacacaaaaatcagattatttactggcaagatgagcaggattaccatgaaagaaaa

SEQ ID NO: 499001 - DNA, 100 bp, Homo sapiens
cgaaaaacaaccacactgcttcgatcctggacaggatgcaggcagatgaggctgaagatgagaagtcagtcctgatggcagctgtgcagagtgggggtga

SEQ ID NO: 499002 - DNA, 82 bp, Homo sapiens
ctcaactgcccagcgtgaccagtggccacctctgcagtgtcttccacaacctgggctttaatgactgatgaaacaatatcca

SEQ ID NO: 499003 - DNA, 97 bp, Homo sapiens
tgttctgggtgcctgtgcctcaggggatttcgcttctgtacagattgccttctctcagcacagcaattttatggacctggtacagttcttcgtgact

SEQ ID NO: 499004 - DNA, 90 bp, Homo sapiens
cgaagggagccgaccgggccctgggctggaggtaaaaccccacggctgaagaaatgtcaacaattgggagttttgaaggattccaggctg

SEQ ID NO: 499005 - DNA, 98 bp, Homo sapiens
gtacacttttggccaggggaccaagctggagatcaaacgtgctggagaatctggtaaaagcaccattgtgaagcagatgaggatcctgcatgttaatg

SEQ ID NO: 499006 - DNA, 87 bp, Homo sapiens
tttatctgcctagagaagaactatggatctacaacatggagactggaagatgataacgaaggaggcccaacttcattcaataaggag

SEQ ID NO: 499007 - DNA, 98 bp, Homo sapiens
agccatggtgcggttcaagcacagttgcagatctgatctcttctgaacacctcatcgtgtctccatccctgggaatctgaccctagcaactggaccac

SEQ ID NO: 499008 - DNA, 50 bp, Homo sapiens
caagaacaaaggccgcgacttggagggtttgagaaatactttaagaggag

SEQ ID NO: 499009 - DNA, 50 bp, Homo sapiens
agaatgtacagtgatcggaaaggtcaggatctggtgattttgaagagaaa

SEQ ID NO: 499010 - DNA, 83 bp, Homo sapiens
agaggcccgcccaccagttcgcccgtccccctgccccgttcacaatggtgtccttctgtgctgaacatgtccgtaggaatgcc

SEQ ID NO: 499011 - DNA, 100 bp, Homo sapiens
gctggccatccgtgaatccatcgagagtgagattaggcgagaacgagagaggcagacaaacccatcagccatggacttgaaagaggagattgatattcga

SEQ ID NO: 499012 - DNA, 83 bp, Homo sapiens
gaccgccctggacatcaagattaaaagagcgaataaagtttatcacgccggggaaagagttcctagagagagaagacaaagac

SEQ ID NO: 499013 - DNA, 83 bp, Homo sapiens
ccatgcagagctttaattctacccagcaaaatgaaactgagcctaatcagcagtttactttatcatcatcaagaaataagaag

SEQ ID NO: 499014 - DNA, 98 bp, Homo sapiens
gtgggcacctggcaaagatctatgccatgcactgggggaccgactcaagagcactgcagtttcctcctgaaggctggctccggctctccctcaataat

SEQ ID NO: 499015 - DNA, 74 bp, Homo sapiens
acccacttcgagtcctttattgtggaggaatgttcttaatgagtcgccagttcaattaccgcctctgccaccga

SEQ ID NO: 499016 - DNA, 90 bp, Homo sapiens
ggaatatgcattgaagcaaattgaaggcacaggaatatccatgtcggcttgtagagagattgcaataacccaacagcttgagggaatctg

SEQ ID NO: 499017 - DNA, 100 bp, Homo sapiens
acagagaccgtgaagattccaagttcaggagaactcgaccgacacgatgaggcgagtggtacgacagagcaagtttcggcatgtatttgggcaagcggtg

SEQ ID NO: 499018 - DNA, 80 bp, Homo sapiens
gtacgtgaagaaggagacgtcgcctctgcttcggagggctttgttatgcacctaaagccatattggaagctccagaagaa

SEQ ID NO: 499019 - DNA, 95 bp, Homo sapiens
cgcgtccgccccgcgagcacagagcctcgcctttgccgatccgccgcccgtccacacccgccgccagtgggttgctctggttgtgggacatgaac

SEQ ID NO: 499020 - DNA, 75 bp, Homo sapiens
accaagtctcccaacaacagagacagggtatgcagaagttggctagtcaatacctgaagagagattggcctggag

SEQ ID NO: 499021 - DNA, 74 bp, Homo sapiens
ctgtctgtggtcacgtgatgaccctggatttcctgggtgtaactattagtcaggtggatgaagaaacgttttct

SEQ ID NO: 499022 - DNA, 100 bp, Homo sapiens
ccagccctacgcctcgtcccctacaagctcctccaagtgccggtggtggtgtgcacattgagccccggtatagacagttcccccagctgaccagatccca

SEQ ID NO: 499023 - DNA, 99 bp, Homo sapiens
atttgggacattcgggaatccccccatggagctgaggagtacctgtcatttgcctttgagcattgtcaccgttctagtcagaagaacaaaaggatgatt

SEQ ID NO: 499024 - DNA, 75 bp, Homo sapiens
aaaggattaccttttgtgtgactacaacagagatggggactcctataggtactggttttggattaggaattgttt

SEQ ID NO: 499025 - DNA, 100 bp, Homo sapiens
tggatttattaactactatggaatgcaaagatttggaaccacagctgtccctacgtatcaggttggaagatgaatttcctgaaataaaccgagcctcaat

SEQ ID NO: 499026 - DNA, 100 bp, Homo sapiens
gtctgaagttgttaccaatggtgaaactacatgttcagaaagtatttcatggaaacttggagagagaaaagtgatgaagtgatgggagagctgactgatc

SEQ ID NO: 499027 - DNA, 75 bp, Homo sapiens
gagatatttagctactggagattttggtggaaaccttcatatatgtgtgaacacagcaggtgtgagatgtcatct

SEQ ID NO: 499028 - DNA, 78 bp, Homo sapiens
ttttgccaggtgtttgttaccttgggaccacgggatcattcgaactctggatttacccatctatgtcacacgggtgaa

SEQ ID NO: 499029 - DNA, 50 bp, Homo sapiens
gaggacgtttccaactcaaagtgaatctggattgggaaagtcgacattaa

SEQ ID NO: 499030 - DNA, 100 bp, Homo sapiens
accatatattcgacatgaacctattggatatgatagaagtcggaggaaatactggttcttgaaccgaagactcataatgattatattccatcacaacaag

SEQ ID NO: 499031 - DNA, 50 bp, Homo sapiens
gacaagacacttttcagaaagacaggtatccgttacagcactgatgtgag

SEQ ID NO: 499032 - DNA, 100 bp, Homo sapiens
tagttctgtcccaagaagaactctgaagatgattcagccttctgcatctggatctcttgttggaagagaaaatgagatggagcagcatattgtatgggac

SEQ ID NO: 499033 - DNA, 100 bp, Homo sapiens
agtacctgaaccggcacctgcacacctggatccaggataacggaggctgggtattgttgcagcatctggcagtgagactgaggatgaggacagcatggac

SEQ ID NO: 499034 - DNA, 75 bp, Homo sapiens
cgcagccgcacctgtattccccggtgttgatcagccagcttgtgcagaaaaaggtgcactgcctcaacatggaca

SEQ ID NO: 499035 - DNA, 83 bp, Homo sapiens
tcatcgggaacctcttccagttggaattgaagaatattcccaagtccttcacccgggctgaccccgcactacatctacccacc

SEQ ID NO: 499036 - DNA, 51 bp, Homo sapiens
ctgcaggagtgcttgtgggctggtgaccatggaggaagaagatgagtctcg

SEQ ID NO: 499037 - DNA, 75 bp, Homo sapiens
ttgggcaaggatcagacacaaaggttagaggtgctccatctcgaaaagcgagaaaggcctccagaccaccaacac

SEQ ID NO: 499038 - DNA, 95 bp, Homo sapiens
ctggagaatgacaagagcttccgcggtgtcattctgacctcggaggcatacacggaatacctgaggagcatccactatatctcccaggtgttact

SEQ ID NO: 499039 - DNA, 75 bp, Homo sapiens
atttaatgagagcatcttatccttgcatgtctcttcatggaggctaaaggttggtcttcaggttgtggcagtcaa

SEQ ID NO: 499040 - DNA, 130 bp, Homo sapiens
aaccatgaatattttgcactccagcatgccgatagttcaaacttctatatcacagaaaaggatttaagtgccctgtatgctcaaaatttgtatcctcagatgaaatggatttgcatcttgtaatgtgttt

SEQ ID NO: 499041 - DNA, 75 bp, Homo sapiens
ctgggaagccaacgaccacacgcagtacatgtcccagagcaagcacacggaggcccgggagctcatgtactcggg

SEQ ID NO: 499042 - DNA, 50 bp, Homo sapiens
cgcgaatatcgtcatcgttagaagatgtaccggctcacgctgcgcacaag

SEQ ID NO: 499043 - DNA, 75 bp, Homo sapiens
ctgaagaacttccctaatgccatcgagcacaccctgcagattcgggaactggagcctctcctctgtcacagtgac

SEQ ID NO: 499044 - DNA, 98 bp, Homo sapiens
atcttttgaattttgatgatccactgaatattgaagctgcagaacatcatttgcgggacaagatgatggtggtgctaccccagtacaggatgaacggg

SEQ ID NO: 499045 - DNA, 75 bp, Homo sapiens
tttccctctcccaacatggcggcctcagctgcagaaccttggcctgaaaatgctacattatatcagcaattgaaa

SEQ ID NO: 499046 - DNA, 100 bp, Homo sapiens
gctaaacttgcatatcttcagatattatcagaagaaacctcagtggttattgaagaaattgaagaaatgatgcaggaatcaccggacccagaagatgatg

SEQ ID NO: 499047 - DNA, 98 bp, Homo sapiens
catttttgaaaagacaagccatcaaaactgccttcagaagcaaaaggtatgttgagtctaaaaaggacagagtcacagtagtcttcagcacagtgttt

SEQ ID NO: 499048 - DNA, 100 bp, Homo sapiens
gaaataaaaacagaacaggaggtggtagagggcatggatatctctactcgctccaaagggatgtccgtcgcttggtagtggccatgtctagagccagact

SEQ ID NO: 499049 - DNA, 90 bp, Homo sapiens
gagacacccggacttctcccccaggacctaccaccctctgtcctcaaagtgcagaggaaagttccacttccagaaaaagaactacagaag

SEQ ID NO: 499050 - DNA, 100 bp, Homo sapiens
cctgggtaacacacgtctgcggtgttacccacgactgcctgggacctggccaagggctccacacaccaagaccaaggacaatggcgtctcttggccacat

SEQ ID NO: 499051 - DNA, 100 bp, Homo sapiens
gttcaaggccttcaaccagaggttcctgtggttcctgcagaaaacagtccaggagcactatcaggactttgacaaggttgatgcagagactgtggtgggc

SEQ ID NO: 499052 - DNA, 100 bp, Homo sapiens
ataaagcgttggcttctgattttcctcacatttctgcttgtgcacatgagtttgcttgcctaaactggacttgaagcaatttaaactactggagatctgc

SEQ ID NO: 499053 - DNA, 116 bp, Homo sapiens
cccccgcgctggtgcagccaccctcgctccctctgctcttcctcccttcgctcgcaccatggtactccaaagattcaggtttactcacgtcatccagcagagaatggaaagtcaaa

SEQ ID NO: 499054 - DNA, 74 bp, Homo sapiens
ccaggatcctgcaccgggtggtggctggggcagacgcgtgccatgcctaccagatcattcaccgcaatgggatt

SEQ ID NO: 499055 - DNA, 75 bp, Homo sapiens
tctttacctgcttcccaatcccactgatgaggatcagcccatggtatcagcagatgttgcacacaaacttggtat

SEQ ID NO: 499056 - DNA, 89 bp, Homo sapiens
caaaaggaactgcccagacttcaccacgatgcaatatatgcataatgacagcccatatcaaggcggtgtattctttttgacaattcatt

SEQ ID NO: 499057 - DNA, 100 bp, Homo sapiens
acgggtgaatgctgctaaaaacaagactggggctgctcccatcattgatgtggtgcgatcggagcgggctgcagatgacagcaaagaggttgagagcttc

SEQ ID NO: 499058 - DNA, 101 bp, Homo sapiens
gcagactacgccctggagtcaggagaggcctcgtggacagagagattcaagctattattgggaaatagaagccagtgaagtgatgctgtccactcggattg

SEQ ID NO: 499059 - DNA, 80 bp, Homo sapiens
ggacgagctcggagcagcagccagtttttgaatcagagccgacaggcacttgaattgaaaatggaaaaccctactgctgg

SEQ ID NO: 499060 - DNA, 75 bp, Homo sapiens
tggtcattctcgctaacaactgcccagctttgaggtccagaggtgtccttctaaagctggtagaggtttcacgag

SEQ ID NO: 499061 - DNA, 100 bp, Homo sapiens
ggccgccgtgcaggcggccgtcagcaacctcgtccggcatttaaatcaaacggtattgagatggattgggttatgaaacataatggtccaaatgacgcta

SEQ ID NO: 499062 - DNA, 82 bp, Homo sapiens
gaaggaggtcctgccgtccatgcggaagatcgtcgccacctggatgctggaggaagctcttcgtgggcggtcttgactggag

SEQ ID NO: 499063 - DNA, 90 bp, Homo sapiens
tcggccatgagcagcgcccctcggcgccccgccaagggcgcagattctttctgtacgcccacagcccccatcccgtagcccttcctggat

SEQ ID NO: 499064 - DNA, 50 bp, Homo sapiens
gaaggaggaggtgaccacgcgcgagtgtactaatggtcacttgatgtgcg

SEQ ID NO: 499065 - DNA, 96 bp, Homo sapiens
gacagcttgccgtgtttcctgtgcctgtagctccctggttgttaataatgggacttggtacccagggggcagagaagaagagtgcagcatctattg

SEQ ID NO: 499066 - DNA, 83 bp, Homo sapiens
cagattcgcagtggtcgcttcttctccttgcaccaaatcagatgaaagccaaggaagggaggaatgtgtacagttcttcacgc

SEQ ID NO: 499067 - DNA, 75 bp, Homo sapiens
gagcaaagtaaatgctgtcttttcccaaaagacaggctcttcacctgaagagcaaccatctaaacctgaaattgt

SEQ ID NO: 499068 - DNA, 104 bp, Homo sapiens
tgttggcggtccctgtgacctgtggagacacggccagatctgccctccagtcccactctatgaccagtgggaggatgtgatgaaagggatgaaggtggaggtgc

SEQ ID NO: 499069 - DNA, 102 bp, Homo sapiens
gcggagcttcgccaaggctggcgcagtcgataagctgtcattggaaggaatagtggtacaaagagctgaatgccgaccagctgccagtgaaaactacatgcg

SEQ ID NO: 499070 - DNA, 90 bp, Homo sapiens
ttccagttcattcctagctcagaaagcaacgttttgagccacaactgtcacaactccagcaggtggtccattatggctgacatgcaaaat

SEQ ID NO: 499071 - DNA, 88 bp, Homo sapiens
agctttgtcacttttgaagcgctggagatgccttcaattaagttgcagagttctgatggagagatatttgaagttgatgtggaaattg

SEQ ID NO: 499072 - DNA, 75 bp, Homo sapiens
gagcttctcagaagacagagggttttcttttgagcacaacattctgaaattttttggttattgtaatgatgttga

SEQ ID NO: 499073 - DNA, 90 bp, Homo sapiens
gaaggctggatcgctccagagatgctgagcgaagactgtaaggagaaccctgctctgcgaacatcaatagatgcttatgacaactttgac

SEQ ID NO: 499074 - DNA, 50 bp, Homo sapiens
gtgaaacaccactgaagcattgccaaggagaagggaaaatgttacattgt

SEQ ID NO: 499075 - DNA, 83 bp, Homo sapiens
caggagtttgcccaggatgtgggccgcatgttcaagcaattcaacaagttaactgagggacccagacatggagctgcgggaag

SEQ ID NO: 499076 - DNA, 147 bp, Homo sapiens
tgctccgttgagagacgcggctttcggcaagaactggattcgtggcgccacaagctcattcactgtgtagcttagaccatgctcagcctccaagcagccttgtcatcgacaaagaatctgaagtttacaagatgcttcaggagaaac

SEQ ID NO: 499077 - DNA, 100 bp, Homo sapiens
atgatgaatttgatgaagaaagtgaggaagggaaagcagcaatttcacaactcaggaagggagaattccacaagttggctgatgccaagatatttttgag

SEQ ID NO: 499078 - DNA, 74 bp, Homo sapiens
ttccccggaaatgcaggcgtgccagggaccccaggagaacgaggtgactgtggggatcatgttgttataatgaa

SEQ ID NO: 499079 - DNA, 78 bp, Homo sapiens
ggaccagctcatgggcacggctcgggacgacgtccttctatggccgcttcaggcacttcttggatatcatcgaccctc

SEQ ID NO: 499080 - DNA, 88 bp, Homo sapiens
cgggcagcgtggcctgcggccctggcctccgctgcagcgctcgcctggcccggaggcaataggctgggaggcggcagaatgcagccag

SEQ ID NO: 499081 - DNA, 74 bp, Homo sapiens
cttcaatactacctttatttccaccataggatgctcacaactgtattcctgagctggacagtgagacagccatg

SEQ ID NO: 499082 - DNA, 106 bp, Homo sapiens
gcagcgccagcggccgagcgggcggcttcctggcctgggcgctccggtggcggcggaggatgatcggctgaatgtaacagaggaactaacgtccaacgacaagacg

SEQ ID NO: 499083 - DNA, 100 bp, Homo sapiens
cttgtagcatgttgtttggctgatatctttcgtatctatgccccagaagctccatatacttcccatgataaacttaagtctctggatggtcgtcagatcc

SEQ ID NO: 499084 - DNA, 50 bp, Homo sapiens
tgacaatcgagcaaggaaacctgggaaacaggcgtacatcaggggctgtt

SEQ ID NO: 499085 - DNA, 88 bp, Homo sapiens
gccgtggagaggagggcatattgcgagggctgctacgtggctgacaaacgggctcatcataatgcactggaacgaaaacgtagggacc

SEQ ID NO: 499086 - DNA, 83 bp, Homo sapiens
gaatatccagtttgagccatcggatctaagatccaaaagaggctgacccgcggctgattgagtccctctcccagatgctgtcc

SEQ ID NO: 499087 - DNA, 74 bp, Homo sapiens
cagcatccttgatgataaaccagtaaatagtgtagcttccattggcaatactttaaacagcgtccatcttgctg

SEQ ID NO: 499088 - DNA, 75 bp, Homo sapiens
cttcagttcacatactatttatggatattgatgatgttaagaagttcaaaccgggttacctggaagctactctta

SEQ ID NO: 499089 - DNA, 100 bp, Homo sapiens
atgggccgggaccgaaacctagccccggacgagaagcgcagcaacgtgcggtgggaccacgagagcggttgacatgatgaacaatcggtttcggaaggat

SEQ ID NO: 499090 - DNA, 83 bp, Homo sapiens
ggccagtcacctcaacaatgtttttgttcaacaggagatcctaagaaaaagcttatatgttcagtgtgcaataaaaagtgttc

SEQ ID NO: 499091 - DNA, 80 bp, Homo sapiens
ggagctgcctgcgggaaggtgcggggagcggagccatggcctccgttgttgacctcctgtactggagagacattaagaag

SEQ ID NO: 499092 - DNA, 83 bp, Homo sapiens
gtttctctgctgcaccgacctcgacgtcttgcctgtgtcccacttgttcgcggcctataggagcgagcccagggcgtggtgct

SEQ ID NO: 499093 - DNA, 74 bp, Homo sapiens
tcaaccagatgacccttacattgcagacctccttcaagtggctgataacagggtgagcagggcagcatttcctt

SEQ ID NO: 499094 - DNA, 73 bp, Homo sapiens
aaaatttgcctcaaagcgagtctcaaaggtgttcctggatttgtacgaggatgtcgtccaggaaagattgtgc

SEQ ID NO: 499095 - DNA, 75 bp, Homo sapiens
atccaggataacggaggctgggtgcaggtatttggactgtattctggagaagaatttcacgagacttttgactgt

SEQ ID NO: 499096 - DNA, 100 bp, Homo sapiens
gtgttcctggcttccctctggatgctgacagaaacaaggctgtcccctttcctccaacccaacggcttactttcaaggaagtatttgagaatgggaaacc

SEQ ID NO: 499097 - DNA, 90 bp, Homo sapiens
tatagtagtattactgtggaagtacctacaacttcaggtcttgagagctgatgacaataacatgggcaatggctgctctcagaagctggc

SEQ ID NO: 499098 - DNA, 100 bp, Homo sapiens
tggacgcaaggctatgtttgacagcgattttaagcaagctggcagcgatcgacccttcacccttgacgatttacagtacatgatctttcatacacccttt

SEQ ID NO: 499099 - DNA, 96 bp, Homo sapiens
ttcaacaggctgccaataaaggagcaagatggctaggggtcctcgggcgggaagtgtacacctccaataaccagctggggggcatccagattatgc

SEQ ID NO: 499100 - DNA, 75 bp, Homo sapiens
ccgtggggaaactaaaaacgcatctatctaacgtttaccctagcaaaccaagcctgatttgaaaaagcggatccg

SEQ ID NO: 499101 - DNA, 73 bp, Homo sapiens
ccgccgtcagcgagggcgccgagcaacttcgatacgtaggtaacctttccagagatgtgacagaagtccttat

SEQ ID NO: 499102 - DNA, 75 bp, Homo sapiens
ttttgcttcagcgttctgtggttgtcaacaggtgacaatccttacccttccaaggaggacacccctaccagcagt

SEQ ID NO: 499103 - DNA, 75 bp, Homo sapiens
cttcagagttctttgtggatggacttgattctgatgagaggacatggtccggcgaggagagatcatcgacaatga

SEQ ID NO: 499104 - DNA, 83 bp, Homo sapiens
ccgtggccttagctgtgctcgcgctactctctctttctggcctggaggctatccagcttcgtgccctcgtgaggctggcatgc

SEQ ID NO: 499105 - DNA, 75 bp, Homo sapiens
gaagctattattacaagaataaaggcaggaatcaatccattcaatggtcatgcttcaccccttcctccatctgct

SEQ ID NO: 499106 - DNA, 74 bp, Homo sapiens
tttcaagctgctcaaaaactgggaggatatgaaacagtagattgtttgaagcagaagtcagttctcctggagct

SEQ ID NO: 499107 - DNA, 89 bp, Homo sapiens
ccgaagcactcgttccgggggtgaagcctcctgcgccggccttgcctcgggtgtcatggagaaactccagctgggcccagagattctgc

SEQ ID NO: 499108 - DNA, 50 bp, Homo sapiens
atggaatcttggccaaaatcgtgactctggatgggcacatggtggtgcgt

SEQ ID NO: 499109 - DNA, 82 bp, Homo sapiens
aagaaggtgtctaagcgctcgcggaaggaggaggtgaccccagggtttgaagaaaaggagggggagctgctggtgaggggac

SEQ ID NO: 499110 - DNA, 50 bp, Homo sapiens
cctcactctctctgtcagaaaaatatctcattcgtcggttcggatccaag

SEQ ID NO: 499111 - DNA, 100 bp, Homo sapiens
gagagattgaggataaacctgttgccaccagtaacatacaggagctgcaggctcagatttctcggcatgaggagtggagtcaacatatcaatggagcaag

SEQ ID NO: 499112 - DNA, 100 bp, Homo sapiens
aacacagacccaccagctgaggcttgggcaatggtagatggtggttcaaatgtgaaagcccgctcttcctacaatgagaagaccccaaggatcgttgtgt

SEQ ID NO: 499113 - DNA, 83 bp, Homo sapiens
ccttgctggtgcatgcgtcgtcggcctctgggcagcagggaggaggtacaggagaactgtgtgcggtggcgaaagaggttcac

SEQ ID NO: 499114 - DNA, 100 bp, Homo sapiens
gacacgcatgggcccagcggcttcagctgtcaggaggacgatttcctggggggcatggagtgcaccctggggcaggttatcaatactctggctgaccatc

SEQ ID NO: 499115 - DNA, 100 bp, Homo sapiens
gaagatatctgtgaagactctgatatagatggtgattatagagtggatatgggccctcacattttccaaacctgtccatctgctaactattttgactgca

SEQ ID NO: 499116 - DNA, 100 bp, Homo sapiens
gcgcccgtggccgccgtgcaggcggccgtcagcaacctcgtccgggttgccaagctgttctgcctttctggaatggtgcatggagaatatcaaaaccaag

SEQ ID NO: 499117 - DNA, 103 bp, Homo sapiens
cgaggctgaaggaagatggcggacggcgtggaccacatagacatttacgcggatgtcggcgaagagttcaaccaggacctgaaggagaagaaggagaaggtgg

SEQ ID NO: 499118 - DNA, 100 bp, Homo sapiens
tttgctgcgggcgccggcgctggcggccgtgccgggagctcccggagccctgcctgttccctgtccatccaggccagcagctgaaggagcctcacctgcc

SEQ ID NO: 499119 - DNA, 100 bp, Homo sapiens
ggtattggtggctctccaggaatcacaggctctaagggtgatatggggcctccaggagttccaggatttcaaggttgcatcccagcgcattagctcagtg

SEQ ID NO: 499120 - DNA, 74 bp, Homo sapiens
ctccgacaccatggtggcccagctcgtgcagcggctccagagaggccacaagaggaagctgaatgaagaggacg

SEQ ID NO: 499121 - DNA, 100 bp, Homo sapiens
ttagtgggagatccttgttgccgtcccttcgcctccttcaccgccgcagaccccttcaagttctagtcatgcttcctggacaagatcgacgtgatcaagc

SEQ ID NO: 499122 - DNA, 50 bp, Homo sapiens
caaataccagcctaaaggggggcagaccattcctcaagaattttgtatcc

SEQ ID NO: 499123 - DNA, 101 bp, Homo sapiens
caaaacctcctgcacgaaaggctctggaaagatgtggtgatggggcattcttgctaacaacatgtggacgagtgctcactagcagaaaaaacctgtgtgag

SEQ ID NO: 499124 - DNA, 75 bp, Homo sapiens
ttgatattattacagcttcatatgcaccagaaggagatgaaggttttgattcatggattcacccagtcattactt

SEQ ID NO: 499125 - DNA, 83 bp, Homo sapiens
ccggagctgggtctggagacgccgtggcagcctgaacggagtgtgcgacggattgggaggacgcccctttcgccccaacggtc

SEQ ID NO: 499126 - DNA, 90 bp, Homo sapiens
gaacgcccgtctctgagactgcagttgtctcctctgagcctccggcctccataagacccaaaacagatgacacctcttcccagtcccccg

SEQ ID NO: 499127 - DNA, 75 bp, Homo sapiens
ccacagtctgctcctgcacagcaaggggctggctctcgctcgccaaggctcgctacgcgatgggcgccaagtcgg

SEQ ID NO: 499128 - DNA, 82 bp, Homo sapiens
tgaacctagtggtaaaacagggtgatttcaagagacacctccataatgggagaagtaaagaacaaagacttaaggaacagct

SEQ ID NO: 499129 - DNA, 90 bp, Homo sapiens
ggaggagaaaggcaggagagatagaggcagcagaagccagggcagctgaaagacagagaccttcagaaatgaaagctcattagcatctac

SEQ ID NO: 499130 - DNA, 87 bp, Homo sapiens
ccacccagtgaccggacttctcacccccaggatgtcatcgaggagaaagtggctcatgccaaagaagaaaaccttagtatgcatcag

SEQ ID NO: 499131 - DNA, 75 bp, Homo sapiens
gatttgcctcctttgactccacaaaaggctttatcagacctaaacaaggatgggaagatggatcagcaagagttc

SEQ ID NO: 499132 - DNA, 75 bp, Homo sapiens
cagaagatccagctttgttgaaaagcgaagccgttagtcccttaatacaaaggctgcagaaccttggcctgaaaa

SEQ ID NO: 499133 - DNA, 90 bp, Homo sapiens
gaatgctgaatcatatgtttccttcacaaccaaactggatattcctactgctgctaaatatgagacaacagcagttctgtagagagttta

SEQ ID NO: 499134 - DNA, 100 bp, Homo sapiens
caggggggcgaggagctccagccagagggctgtgatgcagatccatccgccctagcaaaatatgttctggctttggtaaagaaagacaaaagtgaaaaag

SEQ ID NO: 499135 - DNA, 83 bp, Homo sapiens
gcgcgatggagcagcgaaaacgtggttgtagagttccgtgactcccagcgaaatccgctcctgctcccaagaagggctccaaa

SEQ ID NO: 499136 - DNA, 83 bp, Homo sapiens
agatgtcatgatggagaattatggaaacctggtctcactgggtggagccgccaccaaaatgcagattttcgtgaaaaccctta

SEQ ID NO: 499137 - DNA, 75 bp, Homo sapiens
gcggcggcggcggcggctgcggcccaatatagaaagttcaggagccctggaaaggagaaggaataagacggcagg

SEQ ID NO: 499138 - DNA, 85 bp, Homo sapiens
ggtgcccgctgtgtgccaggccgggtgctgggcacggtcccgcgagatgatgaggagtctgatgaggaagctgtgaagaaaacca

SEQ ID NO: 499139 - DNA, 98 bp, Homo sapiens
gcttcgagcggaccaaggagcagatggataggtcctcagcccaggtggtggccgaaatgttattttaacgaggctgctctttggcgtaaattgcaatc

SEQ ID NO: 499140 - DNA, 100 bp, Homo sapiens
ctcttgagtagcctgagtagctgggactaaagctcggggacctgcttcacaagttacagttcgtcctgacatatgtggctccttggcagatggcttgggg

SEQ ID NO: 499141 - DNA, 50 bp, Homo sapiens
gctgcagctcctcctgtgcggggttaaagctcaaaaacgacactgaaaat

SEQ ID NO: 499142 - DNA, 100 bp, Homo sapiens
gccgttcctggctttgtagctcgctcaagatggcggcgcagccaccccgcgggatacgcctcagcgcgccctgaaggatggctgccatattgggagacac

SEQ ID NO: 499143 - DNA, 75 bp, Homo sapiens
gtttaatgactttggtgccctcaacatctctcagagacgaaagtgcctccaaagccattacacctgcagaattca

SEQ ID NO: 499144 - DNA, 100 bp, Homo sapiens
agtcactggtcccaagaagacctatatcacagatcctgtttcagccccctgtgcgccaccattgcagccaaagggttttgacccaccacatcagagtgac

SEQ ID NO: 499145 - DNA, 90 bp, Homo sapiens
gaatcctgcaaaaatgtctctctatccatctctcgaagacttgaaggactgatcctttgaaatactccagccatgactaaaagagaagca

SEQ ID NO: 499146 - DNA, 100 bp, Homo sapiens
caaatgctgaggactcagaccagtctctgcaagagacagaactgtaccgctctctttttggccagctccaccctcccgacgaaggccacggggattgaca

SEQ ID NO: 499147 - DNA, 50 bp, Homo sapiens
gcaggagatacggaccctggagacaatgcagatcttcgtgaagactctga

SEQ ID NO: 499148 - DNA, 75 bp, Homo sapiens
cgaccatccagctctgcttccactaaagctgaagaagcatctgtagggaatccagaaggagcgttcatgaagatg

SEQ ID NO: 499149 - DNA, 100 bp, Homo sapiens
gcgggaggcagcggccgcgcggcgctggactggagcagaaccccaggactgcgcccccgggagcgggcgcccagagcactggaagacgcaacgcagtgag

SEQ ID NO: 499150 - DNA, 96 bp, Homo sapiens
aattcctgaagacaatttcttcttccaaaatcctcggattctctacttctgctcgcagataaagtgagcccggaaagggaaggagggggcggggac

SEQ ID NO: 499151 - DNA, 104 bp, Homo sapiens
ataccttcacccagcatttcatccctcgtcgaaaggattggattggcatctttagagaagagagaagggcacagttacctaagtatcaacgtaatcttcctcgg

SEQ ID NO: 499152 - DNA, 82 bp, Homo sapiens
atcaagccaagaacagcccaatctcctttctgggcaaacgttccaagattacaacagcagtgaattgaaaacagcctgcagg

SEQ ID NO: 499153 - DNA, 76 bp, Homo sapiens
gagaaattcagaacctcaagcttttcaggcatcctcatataattaaactgtaattcaacaggcattgcatcggccc

SEQ ID NO: 499154 - DNA, 89 bp, Homo sapiens
cggcctccccttggattcagacgccgattcgcccagggtcaaagaattgactgtagatccaactgctgctggtgatgttcgtccaataa

SEQ ID NO: 499155 - DNA, 75 bp, Homo sapiens
tcaatttcaactctaactttaactttgcattggttggacaccttttaaaaggtctgccaaggtcccagagcgaaa

SEQ ID NO: 499156 - DNA, 98 bp, Homo sapiens
aggcggcccgtcctggctcccttgtccgggaagcccgcccaggcgcagcccagcctcgaaatgcagaacgacgccggcgagttcgtggacctgtacgt

SEQ ID NO: 499157 - DNA, 83 bp, Homo sapiens
cgagacttttctcagatgttggatatttgcttggaaaaacgtgtgggtacgaccttggctggagtgtagtggcgcaatcttgg

SEQ ID NO: 499158 - DNA, 76 bp, Homo sapiens
caggcgtgcgcggacggtgtgcggaaacaggtgagaatgaccactttaactcaccgggcccgtcgcactgaaataa

SEQ ID NO: 499159 - DNA, 96 bp, Homo sapiens
ttttcagaacacttaacctcctacatatgttttcttaggaagattcttccctatcagttaaaaagggacggaagaagtctatagtggctgtggagc

SEQ ID NO: 499160 - DNA, 98 bp, Homo sapiens
gggagaaccattccacgaatatctggacagcatgttttttgaccgctttctccagtggaagtggttggaaagcttcaaacactccagagtgaaaattc

SEQ ID NO: 499161 - DNA, 74 bp, Homo sapiens
catctttatgcaaagccagcgttacagtaatgttccagagctcaggccccggggcctccagcggcaccagcgga

SEQ ID NO: 499162 - DNA, 101 bp, Homo sapiens
gtggcactggacggggaatcaagagacccggtttctaatccctgctctgtcactaacaagctgcgtgatcttcggaatcagagatcattgatttcttcctg

SEQ ID NO: 499163 - DNA, 83 bp, Homo sapiens
gtgattttaaccaaggcagttggtggaaatgagtttgcagaagctgcctgtgatgtggtccatgtgatgctcaatggatcccg

SEQ ID NO: 499164 - DNA, 101 bp, Homo sapiens
cgaatggggatatctgtggccactatccccggcacatcgtgttcctggagtatgagagttctgagaaggagaaagacacgctccaaccaggaatggagacg

SEQ ID NO: 499165 - DNA, 98 bp, Homo sapiens
gccactttcaacctgtttccgagtcctgaggctgtgcgtgcagttgggaaactgagttacaaccagctggtggagaggatcatcacctgcaaacactc

SEQ ID NO: 499166 - DNA, 96 bp, Homo sapiens
ccctctacaacgtgctgtacaccagcctgcccgtgctcctcatggggctgctcgaccaggatcactactcttggaatcaaagataaatccaaatac

SEQ ID NO: 499167 - DNA, 83 bp, Homo sapiens
catagacatttacgcggatgtcggcgaagagttcaaccagcagaaagatgaaggtcttagaatcattgattggaatgatccag

SEQ ID NO: 499168 - DNA, 101 bp, Homo sapiens
ggccaagaatatgctgtcatgctgtacacctggaggagctgctcccgggccatcccacaggtgcaatgaagggcgtgttggtagacattgtgaatgcagca

SEQ ID NO: 499169 - DNA, 100 bp, Homo sapiens
gaaagtagaagagatcaaggcagagttatttggtcatggaagaacaactgacttgtccaaggctcttgcagaccaatttgaagataaaactacatctgta

SEQ ID NO: 499170 - DNA, 75 bp, Homo sapiens
cctggatcttcgaacttttgacacggctttggaaacgacgtcatgtgttaggtgtgatgaatgcagactctgcta

SEQ ID NO: 499171 - DNA, 74 bp, Homo sapiens
tttgaggtcactttccagcagtccagcacggccaagtcagccacctggacgccctcgtcccagcctggctctcc

SEQ ID NO: 499172 - DNA, 98 bp, Homo sapiens
ggttcgtcctcttcttggtgctgtggctgatgcatttcatggctatcatctacactttgtgaagaaatatgggaacctttttagcttggagcttggtg

SEQ ID NO: 499173 - DNA, 75 bp, Homo sapiens
gtgaaacatggcggtaggctgggaccataacacaaggaaaatgtttataggaggccttagctgggacactacaaa

SEQ ID NO: 499174 - DNA, 82 bp, Homo sapiens
aggaacgaggcaaggagctaaagcagcgtgcgttcagccctgggtaaaatgtttattggaggcttgagctgggatacaagca

SEQ ID NO: 499175 - DNA, 100 bp, Homo sapiens
tgggagagaggtacctctccttttccctctccctttccctaaggttaccagagagaacttctctatcagagggaagatggctctttcagtgcttttggga

SEQ ID NO: 499176 - DNA, 100 bp, Homo sapiens
caagcagctgcttgccggccccaacacggaccttgcgaggatgccatgaggaaagctggtgtggcacacagtaaatccagcaaggatatggagagccatg

SEQ ID NO: 499177 - DNA, 90 bp, Homo sapiens
cgcctccgaagatgggggatttctacgacccggagcacccgacccctgagtttggacatatttgactcttttccccccaggttgaattga

SEQ ID NO: 499178 - DNA, 74 bp, Homo sapiens
aattctggataatggtgaatggcttacgaggaaatatttcagtaaaagcagttaaaaaagaagtagaaaagaaa

SEQ ID NO: 499179 - DNA, 75 bp, Homo sapiens
gatatctggggccaagggacaatggtcaccgtctcttcaggtaactgcatcctgcccagcatgacggccccctgc

SEQ ID NO: 499180 - DNA, 75 bp, Homo sapiens
caagcacagagtatgaccaccactattaattttagaaagagcgttttcgctacgtaaagcacattcgataaagga

SEQ ID NO: 499181 - DNA, 90 bp, Homo sapiens
ctgctgtaagacagtctaaactacgaaatacaccttatcaggtcctggacccaagccagaagcctctgcaaagcttccttccagacctgc

SEQ ID NO: 499182 - DNA, 97 bp, Homo sapiens
ggaagaataagaacgtcgacattctctggcaagctgctgaggtgccaggaccattgacaccagaaatggaggcacggcaggctacacggaaaaggga

SEQ ID NO: 499183 - DNA, 82 bp, Homo sapiens
cgggcctctggaatttagcgctcgcccagctagccgcagatcatcaatgctgtggtactgttgattttattgagtgccctgg

SEQ ID NO: 499184 - DNA, 117 bp, Homo sapiens
aaatggcacttcattggccacctacagaaacaaaatgtcaacaaattgatggtccaacatgtttaccgtggctgatgtgttgagtcaagatgaactgcgcaaaaagctataccagac

SEQ ID NO: 499185 - DNA, 50 bp, Homo sapiens
cgcgagtgaggaaaggaggtactgtagcatcaacaacagcaacttgtgat

SEQ ID NO: 499186 - DNA, 100 bp, Homo sapiens
gggaaagaagtttcagtatctcctgtgtgttctttcttatgatccaactaaacatccagtcttcacttacttctacaaggggaacaaatactggaaattc

SEQ ID NO: 499187 - DNA, 96 bp, Homo sapiens
gacaacaaaaatggcggaggggagccagtcggcgcctgaggcaggcatgtactggcattgaaaacattgacgaagctattacattgcttgaacaaa

SEQ ID NO: 499188 - DNA, 75 bp, Homo sapiens
gcttcaggtcctgggtcgatgtctgtctatggaataaagccccgtcagtatctcctgatatgcagcatgaatgaa

SEQ ID NO: 499189 - DNA, 83 bp, Homo sapiens
ccccggagtgagcggagtagcgagtcggcaacccggagatataacacgtgggaaccggaggagaacatcctggaccccaggct

SEQ ID NO: 499190 - DNA, 100 bp, Homo sapiens
ggacagaattggacgaaagtttcaaggagtttgggaaaaaccgcgaagtcatggggctctgtcgggaaggtagtggaggacatgctagaggacgaggaag

SEQ ID NO: 499191 - DNA, 101 bp, Homo sapiens
caattccatttggggaccagagatggacggtcactcagcctatggaggtggtccattatggctgacatgcaaaatctggtagaaagattggagagggcagt

SEQ ID NO: 499192 - DNA, 97 bp, Homo sapiens
tgattacagttcttcctaaaaaaggctgaacgagcgcgaccgcctgatcaagaggctgggccggaagacgcccccgacgctgttccggggcagctcc

SEQ ID NO: 499193 - DNA, 75 bp, Homo sapiens
tagcctgggctgtctggaaatctgaggtaaacactacacgtgaagagtggtgaaagggaacattgattactgaag

SEQ ID NO: 499194 - DNA, 82 bp, Homo sapiens
agcagccttgttagggcgtggcctgaggcttggataagtgggaactgtcagaccttcagcagcctcagctgcctgagcgcag

SEQ ID NO: 499195 - DNA, 106 bp, Homo sapiens
ctgggagagaggtacctctccttttccctctccctttccctaagctgatcttgcatctttaatggataaaacatttgagagaaagttgcctgttagttctttaaca

SEQ ID NO: 499196 - DNA, 100 bp, Homo sapiens
atggcagccggcttcaagcagatgacttcctccaggactatactttattgatcaacatccttcatagtgacctacggcatgatgagctccaatgtgtact

SEQ ID NO: 499197 - DNA, 75 bp, Homo sapiens
ttgctgcttgggattctcgttttccggtccaggagcacttcccgaacgagtttacctcgggagatggaaagaaag

SEQ ID NO: 499198 - DNA, 89 bp, Homo sapiens
tgactttaagctggtcattaatgacttaacataccacgtacgaccaccaaaaagaggagcatctttccttgaagaagtacattattgac

SEQ ID NO: 499199 - DNA, 100 bp, Homo sapiens
gtttaaacagaaatcaccttcagctgtttcctgagttgctgtttcttgggactgcgaagctatacaggctcagataatcaccagaatgggagtgaatgac

SEQ ID NO: 499200 - DNA, 100 bp, Homo sapiens
ccggggtgcacacatccgcttcgagtttcggcattgttccagcattgaatgccccagaggagcccgaaacctcccaggcttggtgcaggaaggagagccc

SEQ ID NO: 499201 - DNA, 50 bp, Homo sapiens
caactatactgtttgtaaaaggagaaggaggaatgcaggctcaggttgga

SEQ ID NO: 499202 - DNA, 82 bp, Homo sapiens
acagagatacccagacaacaggatcgtctcgtccaagacctgcctagagctggaacgttacctccagagcgagccctgctat

SEQ ID NO: 499203 - DNA, 82 bp, Homo sapiens
gacgctaagttgctgatcgtggcggtgacttaagagattaaaattaatttggttgctgttggttctgaacaaataatgagtt

SEQ ID NO: 499204 - DNA, 100 bp, Homo sapiens
ccgtcagcagtggcctctgggatgagctgggaggctggcgggatccggaccacgagccggagctggaagaggcgccgctgacggtgaagagtgacatgag

SEQ ID NO: 499205 - DNA, 100 bp, Homo sapiens
gaatatgttttacatccaagaactacaggctttacttttgtggtagaccgtctaagagaagccaaaatgaagtttaatccctttgtgacttccgaccgaa

SEQ ID NO: 499206 - DNA, 82 bp, Homo sapiens
ccctggaggagacctggcagcagacaatgcagatcttcgtgaagactctgactggtaagaccatcaccctcgaggttgagcc

SEQ ID NO: 499207 - DNA, 90 bp, Homo sapiens
cgacaagatgcgccgcgccagctcctactcctccctcaactccctcatcggtgctggagaatctggtaaaagcaccattgtgaagcagat

SEQ ID NO: 499208 - DNA, 87 bp, Homo sapiens
aacttcagaatacttcaagaatagcagaggagcaggttcaggaacaagtgcatcccactctctcagctaatgaagagtctctctatt

SEQ ID NO: 499209 - DNA, 75 bp, Homo sapiens
catgcacttccttccagcagctacacagatggactttctggccgagaccagccagtggagctgctgaatcctgcc

SEQ ID NO: 499210 - DNA, 82 bp, Homo sapiens
tcagtttctgaggaatttcatcaggaatgggctatgtgaatgaaaaaaggtatccgttatgaaacttccagaaaaacgagct

SEQ ID NO: 499211 - DNA, 75 bp, Homo sapiens
tgggcaagaactattcacacttttcaggtttaccgacaagactgtgaaactttcgggatggtggtgaaaatgctg

SEQ ID NO: 499212 - DNA, 80 bp, Homo sapiens
gtgcggggagctggagaaggagaaccaccagctcagcaagaagggctcagtaaagagacaagcactatatgcctgtagta

SEQ ID NO: 499213 - DNA, 142 bp, Homo sapiens
tcagaggccgccatcaaccgccagatcaacctggagctctacgcctcctacgtttacctgtccatgcctgagatcttctttgatgttgtcagcctctcaacatggcaggaagtgttaagtgattctcaacgtgaacacctcc

SEQ ID NO: 499214 - DNA, 90 bp, Homo sapiens
tggaatgtgtttgttatctgcttctatttggaggctggggacctctcaaagtcatgatcatgcatttcaactagtacatgtattcaccgc

SEQ ID NO: 499215 - DNA, 100 bp, Homo sapiens
ttccggagccctcggggcggcggactggctcgcggtgcaggtcaaaatgcagatcttcgtgaaaacccttaccggcaagaccatcacccttgaggtggag

SEQ ID NO: 499216 - DNA, 82 bp, Homo sapiens
tcacagaaggaagataaactccacatatttctgtgagaagccctaccactgcaactgggacggctgcggctggaagtttgcg

SEQ ID NO: 499217 - DNA, 74 bp, Homo sapiens
gggaaccatggggactgtgcacgcccggagttacactgttagaccttatgatagccaagataacgagtgatgag

SEQ ID NO: 499218 - DNA, 75 bp, Homo sapiens
ggaagtaaccccttccgggagcctagatcctgtgctttactctgaagactcatggagtcttactctgtcgcccag

SEQ ID NO: 499219 - DNA, 51 bp, Homo sapiens
catgatagttcaacatacagagtattctaccttgtaaatactgttatttgt

SEQ ID NO: 499220 - DNA, 87 bp, Homo sapiens
gccgtgtcccgaggaagtgcaagacccggtgctggagaatctggtaaaagcaccattgtgaagcagatgaggatcctgcatgttaat

SEQ ID NO: 499221 - DNA, 75 bp, Homo sapiens
agtggcggaagccttcgtctcccagattgcaggtcatctaatacatgggagaaacatggattttggagtatttct

SEQ ID NO: 499222 - DNA, 112 bp, Homo sapiens
agtcgcccaaagttccgtgagttgatcatcgaattctccaaaatggcccgagacccccagcgctaccttgtcattcagctgcaggacaagttcgagcatcttaaaatgattc

SEQ ID NO: 499223 - DNA, 75 bp, Homo sapiens
gaagagggaagacacgcggaaacagatctgccgacaccccaggccatcgagccccaggccatcgtgcagcaggtc

SEQ ID NO: 499224 - DNA, 83 bp, Homo sapiens
gccaaggaaaaactggagagcttcatcaaaaatagtgatagctttgataaatgttccatttaagcagacctcttccatagctg

SEQ ID NO: 499225 - DNA, 100 bp, Homo sapiens
cctgtacagcctgcagaactgtcgcactggggcagtgttgtctggtgggtactggagaccttccgtgtcactgctgctctcaccatggcttggatccaga

SEQ ID NO: 499226 - DNA, 100 bp, Homo sapiens
ctcggaaccgagccccgacaggctatgacgtagtcacgcaatatttaaactcacgtatctaagcaatcacgactataaacacctctactttgaatcggac

SEQ ID NO: 499227 - DNA, 89 bp, Homo sapiens
ggaatcagaacggcgccgagggcgaccagatcaacgccagcaagaacgaggaggacgcgggagccagaggccaagaagagtaagacggc

SEQ ID NO: 499228 - DNA, 99 bp, Homo sapiens
gtatctgcagacacattgggaagaagaggagtgccagcaggatgtcagtcttttgaggaaacagagcatctgctgcacccaagcctgagccggttcctg

SEQ ID NO: 499229 - DNA, 75 bp, Homo sapiens
cgcagtctggaaagctttaggagttcacagtattgactggggcgactttggggtagaggcagtgtctgaggggac

SEQ ID NO: 499230 - DNA, 50 bp, Homo sapiens
aacaatcaaatggaaacccttaattcgttacatcatatattacagtacag

SEQ ID NO: 499231 - DNA, 100 bp, Homo sapiens
gaaaaagaacattactgtcttgaaatgatgtgctcacgggtgccctctgaacagtcttctggtacctctctcttgcctaaagacggtgccccattttctt

SEQ ID NO: 499232 - DNA, 83 bp, Homo sapiens
ctcgctgccgcgcgcccaagctcggcggacggcagtgccccaggtccgcgggagagctgtggggcttggtgagtgtttcgtgg

SEQ ID NO: 499233 - DNA, 98 bp, Homo sapiens
cagaggatccatctgtcttagcaaggctgtcatcacagatccatcagttacacaagtgacaagaaatgttccaccaggacttgatgaatataatccat

SEQ ID NO: 499234 - DNA, 82 bp, Homo sapiens
caccgggagtcagcagagtgaagcaaaatgatgcttcaacacccaggccaggtctctgcctcggaagtgagtgcttctgcca

SEQ ID NO: 499235 - DNA, 88 bp, Homo sapiens
tcatgtcaagcgaagccttgaaaaagctgccctgagacggtgtcccgccgaaaggccaagatgttcataaatataaagagcatcttat

SEQ ID NO: 499236 - DNA, 100 bp, Homo sapiens
gttgacatacgagaagaaattaaatgtgacttcgaatttaaaggttgaaaggattgttgacaaaaggaaaaataaaaaagggaagacagagtatttggtt

SEQ ID NO: 499237 - DNA, 102 bp, Homo sapiens
gctgcaaggagggcggcgggactgcactcgagtgtccagacctgctcgatgcttagaccatgctcagcctccaagcagccttgtcatcgacaaagaatctga

SEQ ID NO: 499238 - DNA, 83 bp, Homo sapiens
cggcctttcacattcgggaagcgtcgggattaggtgaaaacaatgcagatcttcgtgaagactctgactggtaagaccatcac

SEQ ID NO: 499239 - DNA, 50 bp, Homo sapiens
ccatccacacatcataaagctttaccaggaacttagtgatttggcccgtg

SEQ ID NO: 499240 - DNA, 100 bp, Homo sapiens
agggacatcactgaattcaaatgactatggttatgggggacaaaaaagacctttagaagatggagggctgaagcagtgcctactcgacagaaccggtcat

SEQ ID NO: 499241 - DNA, 74 bp, Homo sapiens
agccaggctggtttcggaaatgcccttacagcagcagtgacctacggcatgatgagctccaatgtgtactacta

SEQ ID NO: 499242 - DNA, 100 bp, Homo sapiens
ctggagtaggagcaaacagcaaaatattccaacccgggaccggctagagggcatggcagccttcagggagaagcggactcccaaatttgttggcaaatga

SEQ ID NO: 499243 - DNA, 82 bp, Homo sapiens
gcggctctaacggggctttctacaagctgtttgatgaagacaatccagtacacaagtctggaaccagatacatgttcacaac

SEQ ID NO: 499244 - DNA, 97 bp, Homo sapiens
ctcggacttcatctcattgctcagcgcggacctagacctggaatcgcccaagtccctctactcgcgaggagccatgtctgaccaggacgtttggaag

SEQ ID NO: 499245 - DNA, 50 bp, Homo sapiens
atttcctcgtcgagcgcaacccaagcaggcagctcagagaacggctctcc

SEQ ID NO: 499246 - DNA, 83 bp, Homo sapiens
gctggaaggaaccgctctcgcttcgtcctacacttgcgcaaatgtctccggaacccttctctgaagcaacagctcttctccta

SEQ ID NO: 499247 - DNA, 115 bp, Homo sapiens
cctctgcccccccttccccacgcaaccccagatccatttacactttacagtgctggagaatctggtaaaagcaccattgtgaagcagatgaggatcctgcatgttaatgggttta

SEQ ID NO: 499248 - DNA, 100 bp, Homo sapiens
ccgcgagcaaggagcgcggaatcggggagcgtccggagctagctggatcctctaggcagggcattttggaagtgtcaaaggccagggacatccctgttgt

SEQ ID NO: 499249 - DNA, 75 bp, Homo sapiens
cgacacccccgggatcctgtctggagagaagcagcggatcagcagagggttcaaaaagaattcttcgctccaacg

SEQ ID NO: 499250 - DNA, 82 bp, Homo sapiens
cacaatcttcaatgagtaaacatattcctggaaagcaggcaggatgggagagtcgccgatagaaccacctcttccctgcctc

SEQ ID NO: 499251 - DNA, 100 bp, Homo sapiens
tctctccctggggctgcatgtagaagtcgagccgtctgtatttttcacccgagtcagcaccctcccagcaaccagtttttcagaagaagtgaagtcaaga

SEQ ID NO: 499252 - DNA, 74 bp, Homo sapiens
cacagcctgtgatgctgtcctggaggaactgtggctgcaccatctgtcttcatcttcccgccatctgatgagca

SEQ ID NO: 499253 - DNA, 80 bp, Homo sapiens
caaccagatcagcccgaccttcaagaagaacttcgctgtgctgcagaagaaaaggatccacgtgccccccggctgcagca

SEQ ID NO: 499254 - DNA, 97 bp, Homo sapiens
aatactcccctcttcttccttcatctaggatgcttcctcttctctcaatatattctcacttatgggtataaagatggagtctctctctgttgcccag

SEQ ID NO: 499255 - DNA, 75 bp, Homo sapiens
tgcaccggcaggtgagaggcggatctacagacataggacttcactgaggatgtcaactgtgcttttgagttcctg

SEQ ID NO: 499256 - DNA, 117 bp, Homo sapiens
attctctcccaggccacaagacatttcctgctcggaaccttgtttactaattcatttgacattgtgcagcaaagaaatggttatggagaagcccagtccgctgcttgtagggcggga

SEQ ID NO: 499257 - DNA, 100 bp, Homo sapiens
aacaacaactgcgaggaaaatgagcagtctctgcccccgccggccggcctcaacacttaagagttggacagtggaggaccttcagaagaggctcttggcc

SEQ ID NO: 499258 - DNA, 82 bp, Homo sapiens
tggaattctaatttgaaccatgtttggattgaagccgcctctgtattacttaccagggctggaccccaatggagaacaggtg

SEQ ID NO: 499259 - DNA, 89 bp, Homo sapiens
cctaatgaaaatcttcacagtgctgttactaaagcctgcctttccagaatatggttgagccccttatacccacgaattgctgatggaac

SEQ ID NO: 499260 - DNA, 100 bp, Homo sapiens
tgagccccggggcatctatgccagtgagaggcccaagtccctaggtactggtgtggcatactcggacagagaagcccaagatgaagcaggaggagcagct

SEQ ID NO: 499261 - DNA, 87 bp, Homo sapiens
agcgacgtcaccctgtgccagtggtggctcgcggcggcgccccgccctcccgagacccaacatgagtgaagtttcctgcaagaaacg

SEQ ID NO: 499262 - DNA, 101 bp, Homo sapiens
ctataagagagtagaaagccctggaaggtgtcttgctgcaggtaactaatgaagaagtggtcaaccacagagtcttcaagaaataagaaattctgtaccat

SEQ ID NO: 499263 - DNA, 74 bp, Homo sapiens
tcttcttcttccagggactcagcacctggcaggtgggagatgccatcccagcagtggaggtgtttgaaggggag

SEQ ID NO: 499264 - DNA, 98 bp, Homo sapiens
ggaattttgccgatttcatgactaaccagtgttgaaaggattgttgacaaaaggaaaaataaaaaagggaagacagagtatttggttcggtggaaagg

SEQ ID NO: 499265 - DNA, 100 bp, Homo sapiens
cttgtggccaagagttcagaccgtggcgaagtggagagtgacatgcagttggatggcggtgactgcgtgagacaaagcatggaggacacaagaatgggag

SEQ ID NO: 499266 - DNA, 100 bp, Homo sapiens
tgttcacgacttccttctgagactcttcttggaccgagacctcatgacacttcctattcagaagactaaaaacagcccttgtagaaagagatgatttctc

SEQ ID NO: 499267 - DNA, 97 bp, Homo sapiens
atcactttcattgtctcggacgtgcggggcctgggcctcccggtccgcaagcaggtgtcatggagaaactccagctgggcccagagattctgcagcg

SEQ ID NO: 499268 - DNA, 73 bp, Homo sapiens
tggactttatccagtcacacctgcggaggttctgccttcagtgagaacctggagatgtagctactccaccacg

SEQ ID NO: 499269 - DNA, 100 bp, Homo sapiens
tgacctcctgtgggttcccaaacactaacttgtttccctgggaatttggagttcaaatctgaacatcaatgatgtactagggaactactcattgactctt

SEQ ID NO: 499270 - DNA, 74 bp, Homo sapiens
agacagtcctcgtcagcactgactttcagctatggaatcgatgcagacagacatgctgaactatctggaagtcc

SEQ ID NO: 499271 - DNA, 101 bp, Homo sapiens
gaaacaccggtaggagcggggaggtgggtactacacaaccgtctccagccttggtctgagtggactgtcctgcagacagagggatgtcccggaagccggag

SEQ ID NO: 499272 - DNA, 82 bp, Homo sapiens
gcacaatgagaagtctgtcctgaaggaagtcagccacccgttcctcatcaggctattggagctggagtgagccttccaggaa

SEQ ID NO: 499273 - DNA, 100 bp, Homo sapiens
ccgcgccctgctccctctcagcacctgggcggacgatgtgtatatctcatgattgatatggagaaactagtcatgggccaaaggtcaagatacttctctg

SEQ ID NO: 499274 - DNA, 100 bp, Homo sapiens
aaaactgtattcctaataaccagctaagcaaaccagacgcactggtcagcaggtggtccattatggctgacatgcaaaatctggtagaaagattggagag

SEQ ID NO: 499275 - DNA, 82 bp, Homo sapiens
ttctgctgctgaagtaatgcaatggtctcaatctctggaaaaacttcttgccaaccaaagcttctggagttacagtgaatga

SEQ ID NO: 499276 - DNA, 101 bp, Homo sapiens
ccggcgacaggactttgggtctgggtgagccttctcgtggcggcggggaccgtccagcccagcgattctcagtcagccgcccatgccaacttccgttccca

SEQ ID NO: 499277 - DNA, 80 bp, Homo sapiens
ggctattgtgaaggagggttggctgcacaaacgagcaaaatgatgcttcaacacccaggccaggtctctgcctcggaagt

SEQ ID NO: 499278 - DNA, 106 bp, Homo sapiens
tttgctggagcacttgagccacgtgcatgaaccaaacccacttcgttcaagacaggtgtttaagccacaacattctgaaattttttggttattgtaatgatgttga

SEQ ID NO: 499279 - DNA, 82 bp, Homo sapiens
tgtcttcggtggactccttcggcagtccacccaccgccgccgcctcccaggtagcccctgaagaagatgaaaggaaaaagag

SEQ ID NO: 499280 - DNA, 97 bp, Homo sapiens
accttggcaccccagcggctgctcttcgaagtgaccagcgctaacgttgtcaaggacccgccctccaagtacgtggaaattcgaaatgagtcccatg

SEQ ID NO: 499281 - DNA, 96 bp, Homo sapiens
gccgggtggtggttaaaccatgttaaggaggattttacagaggatgtgtatatctcatgattgatatggagaaactagtcatgggccaaaggtcaa

SEQ ID NO: 499282 - DNA, 96 bp, Homo sapiens
ggatatgaaaatgtttcggatattgtaccacctttcagtgctttctctcctcaaggaatgccagaggatgttcaagatccttcagtatttgtaact

SEQ ID NO: 499283 - DNA, 51 bp, Homo sapiens
ccctatcacctgccagctcatcacaaatttggtcatgtggtggacattgtg

SEQ ID NO: 499284 - DNA, 100 bp, Homo sapiens
gcggcgtctccagcgagcggcgcggagctggacgccgcgatcgtggggcccgcgaggcgggcagccggggcgtccagtgtgttttatggaccatgtgctg

SEQ ID NO: 499285 - DNA, 82 bp, Homo sapiens
attggctgcaaccccaccatactgcacgtggtgtgacattcggctaccagggacagaaaccactctttaagaacttggattt

SEQ ID NO: 499286 - DNA, 80 bp, Homo sapiens
caaggagctaaagcagcgtgcgttcagccctggggtgctgggagccctgttcctggctatcggcctctgggcctggggtg

SEQ ID NO: 499287 - DNA, 100 bp, Homo sapiens
agcggaaacgcagacactgaactttgggcctgaatggaatcaacgctgaatgtggacttggatttcaagcagcctttcctagagttgaatcgaatcctgg

SEQ ID NO: 499288 - DNA, 75 bp, Homo sapiens
cagaacagttaatcctcaatttaagcctgatctaacccctagaaacaggaccagaggagcgagagcagcaagaac

SEQ ID NO: 499289 - DNA, 88 bp, Homo sapiens
gcgcgctgagggtctcggggcgggcgccgcgggacctctccgggccatgggtgctggggagtcagggaagagcaccatcgtcaagcag

SEQ ID NO: 499290 - DNA, 75 bp, Homo sapiens
aggcctctacaagccgcgccgtagggtactggtgtggcatactcggacagagaagcccaagatgaagcaggagga

SEQ ID NO: 499291 - DNA, 83 bp, Homo sapiens
accgctactcggagggcgagcggacctccctggagaagacgtccttctatggccgcttcaggcacttcttggatatcatcgac

SEQ ID NO: 499292 - DNA, 49 bp, Homo sapiens
caacaagctcccattggatcttaaggagtccccagagccaggcaggggg

SEQ ID NO: 499293 - DNA, 100 bp, Homo sapiens
cgcgagcacggcgagccgctggtcatcaccaaggataacaaagccattgacctttgccgattgtgttggggacgaacttcctttaggatgggaaaccgta

SEQ ID NO: 499294 - DNA, 101 bp, Homo sapiens
cttgctctggggctcttatgctcagaagaagggcagtgccattgatagggcatggaggagtgacggcaggaactttctgtgctctgacaacccttatgcac

SEQ ID NO: 499295 - DNA, 98 bp, Homo sapiens
ttagaaccgcagcagggacgtcggtttgctatcgggactcggcgaggacgggccaattcctgtccccccagcagcatggcatcgtgtgctgaaccctc

SEQ ID NO: 499296 - DNA, 134 bp, Homo sapiens
cttcagtgctccagcggctacagcacccagacaaccaccccctgctgctctgaggacaccatcccttcccaagatattggtatcaacttgactgaccctatgttcagaggaatttataggggggttcaaaagca

SEQ ID NO: 499297 - DNA, 90 bp, Homo sapiens
tacctccacctatgggccctccacacctccaggctttacagatgccagttttctaacactattaaagaagatgccagatgttgaacagct

SEQ ID NO: 499298 - DNA, 74 bp, Homo sapiens
gcaaaaaacgagaagtccagttacaggcatcagatgccagctctgaaaaactcttcaacactgttattgtaaac

SEQ ID NO: 499299 - DNA, 98 bp, Homo sapiens
ggcagccgaggccgcgaactgcatcatggagtgtgccgtgcaggtgaagctggagctggggcaccgcgcccaggtgaggaaaaaacccaccgtggagg

SEQ ID NO: 499300 - DNA, 74 bp, Homo sapiens
tttgtgatcagagccgtgttcggggagtctttcagacagagggggaagacggtggggcctccccacctgccccg

SEQ ID NO: 499301 - DNA, 83 bp, Homo sapiens
caggagtgcccgcgccctgagcgctcagctccagaggcgccgagagggtgacctctctgggcaaggactggcatcggccctgc

SEQ ID NO: 499302 - DNA, 100 bp, Homo sapiens
ccgccctggaagaggatgtgatttatgacgacgtcccctgcgagagcccagatgcgcatcagcccgagagctgtagtacacatggatgaacgacgagaag

SEQ ID NO: 499303 - DNA, 96 bp, Homo sapiens
aggaaattgaactaagaaatggagaggtacttcttgcaagggatatgcattagcacatactcaagaaggggaagaaaagaagcaaacttctggtac

SEQ ID NO: 499304 - DNA, 58 bp, Homo sapiens
tcttgataaagtcttggttgctgccaacaaggttcgtcacaaggcatcgcagaaggtt

SEQ ID NO: 499305 - DNA, 80 bp, Homo sapiens
ccttcagtacttggcaagatttgatgctcttgtgctcagtgacatcattcagggggtgaatctctacattaagaacttgg

SEQ ID NO: 499306 - DNA, 73 bp, Homo sapiens
caacaagtgtcacggcatacaagcaggttgatactgcctctccaagcccaatggaaacatctggatgtgcccc

SEQ ID NO: 499307 - DNA, 100 bp, Homo sapiens
ggcggctcagttgtccatgaccctgaaggtccaggagtacccgaccctcaagggagagctggtgacggcctccaaggccatcattgaaaaggagtaccag

SEQ ID NO: 499308 - DNA, 75 bp, Homo sapiens
tggggggattctcgacctgctaacagaactggaccttttcggtgaaaggaaagcaagccaggatggatatttacg

SEQ ID NO: 499309 - DNA, 85 bp, Homo sapiens
gtgcgcacgttgtaatcagctgaggccatgtcaggagacggagccacggagcagatgacaggccgggaccttctcaaggatcgaa

SEQ ID NO: 499310 - DNA, 75 bp, Homo sapiens
caatcttttggatcctttgaaataccacatgaagtgtgctggatcgaaggggtattttgccactggaggaaagtg

SEQ ID NO: 499311 - DNA, 50 bp, Homo sapiens
tttctaggaaaggccggacaccaggagcagtttttgcaagaaaggatcaa

SEQ ID NO: 499312 - DNA, 90 bp, Homo sapiens
cagacccaatggaacatcagcaatgcttctgatgtcatttgtcagagtgaaccgctgtggtccccgagttggtgtaagaaagacaccgaa

SEQ ID NO: 499313 - DNA, 100 bp, Homo sapiens
ttttgcagttgttgaaattgtccccgcagttttcaatcatggaactgcaagcacatgttgaccagataactgaaatggcagcagtaatgaggaaagccat

SEQ ID NO: 499314 - DNA, 83 bp, Homo sapiens
tggaaccgaagagagctctgttgttgcagacagtaataccccacttttattcgctataatttgcaagaaagagaaaatggtgg

SEQ ID NO: 499315 - DNA, 82 bp, Homo sapiens
cgggtggctggctttgccattagcgggggcctttcctgaggacggcgtacggagtgtggcacttgctctgaaatttggggac

SEQ ID NO: 499316 - DNA, 97 bp, Homo sapiens
taggtgtatcaagtaatggtgcaaagcctgaaaccttcccctcctccaatgagtcccgccaatgccccaatgcccgttgccagttcgccttctacgg

SEQ ID NO: 499317 - DNA, 135 bp, Homo sapiens
ttccacgtctgacgtgtgatctcgagagacctgcgtacattcggggtgccagaaggaaagcatagatggatggagtggaaccctggcttccccttgagcatcgatgccaaatgccacaaggatttaccccgtgat

SEQ ID NO: 499318 - DNA, 100 bp, Homo sapiens
tcatcagctgcctccaccccagcccccaaccttcccaggaccggaagctcaccaagctggagcggcagcggttcaaggaagaggctgagatgctgaaagg

SEQ ID NO: 499319 - DNA, 80 bp, Homo sapiens
gcagtccctacagccctgtgctcaggatttggagtggatcagttacgagatgacaatctagaaacttattggcaatcaga

SEQ ID NO: 499320 - DNA, 98 bp, Homo sapiens
cgcagctatgatggagactttgtctttgatgactcagaagctattgttaacaataaggcattttgttcccaacatcacctttggtcaccctgtggtag

SEQ ID NO: 499321 - DNA, 83 bp, Homo sapiens
aaaagaaatagcaagaactgaggagcaccaggagacgcaactcatcggtttggtgccctggttgtcagatgttggaaagcagt

SEQ ID NO: 499322 - DNA, 141 bp, Homo sapiens
ggctgcgagcggggacttcactgctctgctgtctcctgcaagaactggctcaagaaatttgcctcgaaaaccaatttgcgtgtgaacttggacatgggcaaagcggtgtatggatggatgatgatgaaagatgagaacatc

SEQ ID NO: 499323 - DNA, 100 bp, Homo sapiens
gcctctttctctcaggctttcctacaactcatgcccagcagcagcaagcagagcttcttcgagacaccttcacttccctgggctatgaagtccagaaatt

SEQ ID NO: 499324 - DNA, 102 bp, Homo sapiens
tgttgatcactgaaaatgatttatgcaagtttaagtgcagtcattggagaaatcgatgaagaaacagattctgcgcttgatttggggaatattcgagcagaa

SEQ ID NO: 499325 - DNA, 100 bp, Homo sapiens
gaaactgcagccagttactatggcagttgcaaaatattcaggagaccgtcgttgccttgtatttccagagaacagatcacagaactgtgtggtgcaaagc

SEQ ID NO: 499326 - DNA, 50 bp, Homo sapiens
ccatgctggcaagtctgaaggtcaagcaaggtgcccggcgacgactgccc

SEQ ID NO: 499327 - DNA, 136 bp, Homo sapiens
aagaccgcgcgcagggcctgcagcgggagctggacggcgagcgcgagcggcgcgagaaattccagggtctccctccactgctgtagtaacccgggtccggggcctcggtggtgctcctgatgcccctcacccaccc

SEQ ID NO: 499328 - DNA, 100 bp, Homo sapiens
aaatgtatgatatatttgggaaatatggacctattcgtcaaatcagagtgtcaccatatcatcagccaacctcttacaggccacgcttattgctctctgg

SEQ ID NO: 499329 - DNA, 75 bp, Homo sapiens
tgacactgtataaacacgatgaccctgccttggtgacagaccatgccaccactgccctgctccactatcagctgc

SEQ ID NO: 499330 - DNA, 100 bp, Homo sapiens
caggaccattaaaggatttgaaactctcgtagaaaaggagtggataagctttggacacaggtttgcactggctggttggaaggaaaatcatgcaacattc

SEQ ID NO: 499331 - DNA, 75 bp, Homo sapiens
gaaaatgtccatggaggaattttagctgatgatatgggtttgaatgccagaggattcaacatgagcatacctatg

SEQ ID NO: 499332 - DNA, 97 bp, Homo sapiens
aaaatggccttcagtgatcttacatcgaggactgtgcatctttatgataattggatcaaagatgctgggcgaactttctgaccaagtatacaactac

SEQ ID NO: 499333 - DNA, 78 bp, Homo sapiens
cttagctgtgctcgcgctactctctctttctggcctggaggctatccagcggcatccgagcatgggcggcccaatgca

SEQ ID NO: 499334 - DNA, 75 bp, Homo sapiens
gggagtaagcctgtctgcctggcgggccttcaggtgcggcgtgagagggaggacatgtatgcccaggactctata

SEQ ID NO: 499335 - DNA, 75 bp, Homo sapiens
actcagttgtgcgttgcggccagtcgccactgctgttgtccttctattcaggccactcttcgttttccatgtact

SEQ ID NO: 499336 - DNA, 100 bp, Homo sapiens
cggcggcaccgggaggccgggccgagcggcagacgcgtgccatgcctaccagatcattcaccgcaatgggattcctgacgaacagatcgttgtgatgatg

SEQ ID NO: 499337 - DNA, 88 bp, Homo sapiens
acgttgtgcctgaccgaggaactggcagcagcgtgcctccaaagccattacacctgcagaattcaccttcgtccaatatacaccaaac

SEQ ID NO: 499338 - DNA, 115 bp, Homo sapiens
cctggactctgtggatgcggcctttatctgccctgggtcttctcggctccatatcatggcagattccttctggaaccccaacgccttcgagacggattccgacctgccggctgga

SEQ ID NO: 499339 - DNA, 80 bp, Homo sapiens
gcccaggcagaccttgcagtcaaagatgtacagttacccagcacgtgtacctcctcctcctcctattgctcgggctgtag

SEQ ID NO: 499340 - DNA, 100 bp, Homo sapiens
gctagtaacgtcatggaggatgaacgacaggtgcaaacagctgcacagcaagtggcagaggataaatttgtttttgacttacctgattatgaaagtatca

SEQ ID NO: 499341 - DNA, 90 bp, Homo sapiens
ctttgacatggacggacttcttctgggaatctgcaagcagaatatgaccgtctaaagcagcagcacgaacataaaggcctgtccccactg

SEQ ID NO: 499342 - DNA, 75 bp, Homo sapiens
cggaaacagagcaacccccggcagatcaagcatgacgtccggttgtttgccttcgtgcgcttcaccaccggggat

SEQ ID NO: 499343 - DNA, 75 bp, Homo sapiens
tgtcacccgcttcctcaacgaggaaatgcttccagactgcacacttttacttagaggacagtacatcccctagag

SEQ ID NO: 499344 - DNA, 75 bp, Homo sapiens
gctgctcggacagatgaagctccccaaggagctgcaggtattagaaaactactcggatgctccaatgacaccaaa

SEQ ID NO: 499345 - DNA, 83 bp, Homo sapiens
ctgggagcgtgctttccacgacggtgacacgcttccctggattgggtgcaccttcgctctgccaggcgtctctgtgagctctg

SEQ ID NO: 499346 - DNA, 96 bp, Homo sapiens
ggcctccgcgccgcggccgttagtcatgtcgggacagtcattttgtttactcattcagccctgttgcaggtcccaataaactcttcataaggttga

SEQ ID NO: 499347 - DNA, 100 bp, Homo sapiens
aaggagcggtgtcctcttaagaaaatgcattgatatgaaccatggacaagtatattctgctgccacaaagactgtaaagtgcttcatttcaacagctgag

SEQ ID NO: 499348 - DNA, 74 bp, Homo sapiens
acggccacgaacttccgagtggtgctgggcctaaaggagataacatttatgaatggagatcaactatacttggt

SEQ ID NO: 499349 - DNA, 73 bp, Homo sapiens
tgctggtgttcgcccacgaccatggggaatgactctgactttgagacggtgtaccagcagtgtgtcaggtgct

SEQ ID NO: 499350 - DNA, 83 bp, Homo sapiens
gccctgcattcgcggcgtgtgcaggcaacgcggtaaaaatattgcttcggtgggtgacgcggtacagctgcccaagggcgttc

SEQ ID NO: 499351 - DNA, 90 bp, Homo sapiens
ctcaagaaaggcatctgtgaaggcagcctggcatcctcgctacaacctcattgttgtgggccgatacccagatcctaatttcaaaagttg

SEQ ID NO: 499352 - DNA, 83 bp, Homo sapiens
gaagaatttcctctgaagcaccgagtctcactgtcgcccaggctgcagtgcagtggtgccatcacgcgtcactgcaacctctg

SEQ ID NO: 499353 - DNA, 101 bp, Homo sapiens
gcaggcacggtggatgaggactcgtcaggctccgaccagctgaggtgggtgtcctggttggcaaagaccggtcaagtttttacgtgaatgggctgacactt

SEQ ID NO: 499354 - DNA, 74 bp, Homo sapiens
aagaggaaggagcagactctcctctgctaatgcaaagaacagtcaatgtgacggtggactacattagaccagcc

SEQ ID NO: 499355 - DNA, 100 bp, Homo sapiens
catgggaaattgtattctccgagtcagattggagcatttgtgttgatgaagatgaaagagactgcaggaagcaattgcagctctggaagtgaaggagaac

SEQ ID NO: 499356 - DNA, 76 bp, Homo sapiens
acgcagagctcatcgtccttggtatctacgagaccccagcaggcaccatcctttaccatgctcatttagacatcga

SEQ ID NO: 499357 - DNA, 80 bp, Homo sapiens
taagagtctaaatcccatcccgccacaatgcagatcttcgtgaagactctgactggtaagaccatcaccctcgaggttga

SEQ ID NO: 499358 - DNA, 111 bp, Homo sapiens
tcagaagcatgtgtcttccccagctctgcagccacatactatccgtttgttcaggaaccaccagtgacagaggtgatcagcccatgacctaaacctccagacaaaataaaa

SEQ ID NO: 499359 - DNA, 90 bp, Homo sapiens
ggaggatcccacctcagccttcgtgactagtgagtgtatgtggtagaagaccaaagaagagatgagctaggaccatccacctgcctcaca

SEQ ID NO: 499360 - DNA, 88 bp, Homo sapiens
aagaacgctggggttacaatccaagacacactcaacacattagacggcctcctgcatctgatggctgatgactactagctcccctccc

SEQ ID NO: 499361 - DNA, 75 bp, Homo sapiens
catgagaactgcgactcagcatgcagaagggatcgcttacacctgagacgaactacagaacagcacgtaccagag

SEQ ID NO: 499362 - DNA, 100 bp, Homo sapiens
tgaatttgaggacctggattccctgctcagtgccctgagtctcaatgaagagttgaccaagctgcaccagttggcaatgcaacagtctcattttcccatg

SEQ ID NO: 499363 - DNA, 100 bp, Homo sapiens
caccttggcatataaacttcctgtcgtggctccatcagaaaccaggaaatggaagttccagtattaccgaaaatctctctaccgatcaccagttcttcac

SEQ ID NO: 499364 - DNA, 90 bp, Homo sapiens
cttggtttcgggatctcggtgctgcagacggcgagacctcctgcacaggtgtctgtgacctttgaggatgtggctgtgacattcacccag

SEQ ID NO: 499365 - DNA, 75 bp, Homo sapiens
ttcctactttaaccagaaaaccaaaggaggattctaagatgatgattacgtggacgtgactctggacccagacac

SEQ ID NO: 499366 - DNA, 75 bp, Homo sapiens
gctgacctcgctgtacgccgagcacccaggcgactgcctcatcttcaagaacgatgccaacgggactgcaaagcc

SEQ ID NO: 499367 - DNA, 98 bp, Homo sapiens
gcgagaacaagttacaactccagaaaatatcaatttggatttaacttactcaacaaatttacatgtattggagaccagaccagaagcccttctgaatt

SEQ ID NO: 499368 - DNA, 100 bp, Homo sapiens
acccgttaagtcccccaaagatgagatttacctgtgagatgtttcatcccaacaaatacagattctgttcatcttgctctgaaattaaataattctgaac

SEQ ID NO: 499369 - DNA, 90 bp, Homo sapiens
atgttctttcccttttggagaatgtatttactcctatgttctgccatagtgatgaggggtctaaattatggataataatggaatacctgg

SEQ ID NO: 499370 - DNA, 80 bp, Homo sapiens
ctggagcagaaggtgcaggaggtgctgaaggccaggtattgttgcagcatctggcagtgagactgaggatgaggacagca

SEQ ID NO: 499371 - DNA, 50 bp, Homo sapiens
atttgaagctggcagtctggttccagggacaaactctgcctgggcgagtc

SEQ ID NO: 499372 - DNA, 75 bp, Homo sapiens
cgacaaggtgctggggcaaccaatggaaaagacaagacatctggtgaaaatggtgctggagaatctggtaaaagc

SEQ ID NO: 499373 - DNA, 75 bp, Homo sapiens
tgggaagaagatttgtaaagaaaactcttaggaaggcggagcgtgaagtaaaagcattggcaaaacttgatcatg

SEQ ID NO: 499374 - DNA, 90 bp, Homo sapiens
ctgatggcggatcaggatcggaagcctgcgtaactttctcccttgatccgggagtctttccactggttgcattaaaatcctcccctactg

SEQ ID NO: 499375 - DNA, 87 bp, Homo sapiens
gccttttcttgttcctactgtaaaggagatgggttagatgttgtttgaagactgcttcattctgcctctagtaccagcggtttctct

SEQ ID NO: 499376 - DNA, 90 bp, Homo sapiens
gtgagcgcctcgcctggatgtgagtttcagccagagttgtctgctggttctcagcttgaagaagattctgcagtccttattgatcctttt

SEQ ID NO: 499377 - DNA, 90 bp, Homo sapiens
taaggaaaacataacaattgttgatatatccagaaaaattaaccagcttccagaagcagaaaggtagatatagttgtaggtactccggga

SEQ ID NO: 499378 - DNA, 97 bp, Homo sapiens
ccaggaagcccctctgaagcctcctcgccgccgtttctgagaagaatatggtgcacctgaagattgggaactcaaaacacagcaaccacttatgctg

SEQ ID NO: 499379 - DNA, 100 bp, Homo sapiens
gagcctaactttgcaaccattggtctgcaggacatcactttagatgatgtggtattggaaggaactggccctgggcctctggaggcagcagtattctggc

SEQ ID NO: 499380 - DNA, 100 bp, Homo sapiens
ggtatttggtcccggaacaaagcttatcattacaggggaaagttgctcagacagcttgcatgtcagcctgccagcatctgtcaacatccttaatgcagat

SEQ ID NO: 499381 - DNA, 90 bp, Homo sapiens
gaatacctgccctccttgcaagtagctccagaaataattcagttgcagagcttgaagtgaaaaccagagaaaaattagaagctgctaaga

SEQ ID NO: 499382 - DNA, 75 bp, Homo sapiens
atttattgctgtcattattctcagtggagatccggggatttctttcacggtttgataatgtccttcccgtcagcc

SEQ ID NO: 499383 - DNA, 100 bp, Homo sapiens
ttttattttggctgttacaacagatgagcccaaagaatcttttagctgaaaaagtagagcagctgatggaatggagttccagacgctcaatcttccgaat

SEQ ID NO: 499384 - DNA, 90 bp, Homo sapiens
tagcccaggcccggaagctggtggaacagctacgcatagaagccgggattgagcgcatcaagggagcgtggctgtgctgtctgcagagca

SEQ ID NO: 499385 - DNA, 83 bp, Homo sapiens
agttccaggaagatgcctttgggaagcatgtcaccaacccggccttcaccaaactccctaccatggcaaaagttataaccacc

SEQ ID NO: 499386 - DNA, 83 bp, Homo sapiens
cacggggtgaaactgaccacagtgctcaccacccaccaccactgacacgcagcccaagaaggtccggaaggtcccgccgggtc

SEQ ID NO: 499387 - DNA, 95 bp, Homo sapiens
ctgcaagtggatggggatctgcaacttcaatcaatcaacttcatcggaggccagcccctccggccccaggttcccattgtccccatagtcatgtc

SEQ ID NO: 499388 - DNA, 75 bp, Homo sapiens
cgctccctctgctcttcctcccttcgctcgcaccatggtgtccttaagtttgctcgcttggtcaagtcctacgaa

SEQ ID NO: 499389 - DNA, 147 bp, Homo sapiens
aagatttaaaaagcagccggggcctccgtattgaatgaaagacccagtgcaaagacatcaccatgaacactagcacaatggctgccatccggaagaaactggtgattgttggtgatggagcctgtggaaagacatgcttgctcatag

SEQ ID NO: 499390 - DNA, 89 bp, Homo sapiens
aagatggcgacggcgaccatagctctctgcgcgtcccgggacgactggcgctgtgcgcgctccatgcacgagttttccgccaaggacat

SEQ ID NO: 499391 - DNA, 134 bp, Homo sapiens
gcagccggtgacccggcgagaggcggcgccgctcccaagatgtcgcagacggccatgtccgaaacctacggtctgccatcatggatgttctcgcagaagcaaatggcacctttgccttaaaccttttgaaaacg

SEQ ID NO: 499392 - DNA, 75 bp, Homo sapiens
ctgcaagcaggcaacctgaatacagtggaaatttaatggagccaccatttcagaaccaaaagaaatttggaacaa

SEQ ID NO: 499393 - DNA, 100 bp, Homo sapiens
ccatcgccggagcctgaggacacttctctgtcgtcacagttaggagtggtgaaaggacataggaaggagtctggggaactgtactacagcattgaaaaag

SEQ ID NO: 499394 - DNA, 74 bp, Homo sapiens
ttacctacgttggcggccccagaagagagctattgcttaccttttcccaagtggtttgtttgagaaacgagcca

SEQ ID NO: 499395 - DNA, 83 bp, Homo sapiens
tggcactacttgtccaagacgtactggtggcgaggatttttagactctgaggagcagttggagctaatccacattatggaaat

SEQ ID NO: 499396 - DNA, 83 bp, Homo sapiens
ctcccagccacctctgaagttgccaggcttcccaacattcttgtctgtgaaatccgagaggcctttcgggttctggaccggga

SEQ ID NO: 499397 - DNA, 106 bp, Homo sapiens
ctgccctttaggatttgttagaaaggagacccgactgcaactgctggattgctgcaaggctgagggacgagaacgagagttactggaggtgaactgtttgaagaca

SEQ ID NO: 499398 - DNA, 100 bp, Homo sapiens
gtttgtagaagaggagcatctgctccaggtgcctcgagtctttattggtaaagattgtataggcggatgcagtgatctagtctctttgcaacagagtggg

SEQ ID NO: 499399 - DNA, 101 bp, Homo sapiens
agctgagcgcctccagcgagaagttgagggagaaaggcgggcccgggaacaggaggcaagtgaggcctatctggttggcctttttgaagacaccaacctgt

SEQ ID NO: 499400 - DNA, 50 bp, Homo sapiens
tggagatccagggcaagcgggtcaaggaaggtaaatactacagtgaggag

SEQ ID NO: 499401 - DNA, 50 bp, Homo sapiens
agagatcagagtactaagagacagaattaaacaaccaccatgtcgagcaa

SEQ ID NO: 499402 - DNA, 100 bp, Homo sapiens
agctgcaagtcctgtggggctcactttgcaaacacggccaggaagattaaaggtggtggctgtggccttgaaaacagtcatgtgaaaactcatcacctta

SEQ ID NO: 499403 - DNA, 100 bp, Homo sapiens
gcgagctcaagctgctgctgctcggacccttgaacatctgtgaagaaatgactattctgcatggaggcttcttgctggccgagcagctgttccaccctaa

SEQ ID NO: 499404 - DNA, 82 bp, Homo sapiens
agcaactggagcagcttcatcttccaggtgagaagccctaccactgcaactgggacggctgcggctggaagtttgcgcgctc

SEQ ID NO: 499405 - DNA, 58 bp, Homo sapiens
caaggacaaagaaggcaaacccctgctgaaggccattacagccatgggcttcaagcag

SEQ ID NO: 499406 - DNA, 82 bp, Homo sapiens
caaccgtcggtgggtcggggatcggtcgcctgagagcgggctgacgcacgaggcacacaggaaggaggtggagcaggtgtat

SEQ ID NO: 499407 - DNA, 74 bp, Homo sapiens
acaggaagagtacgagcgcgagggcatcacctggcagagcgcacagaaaactgaatctgtagataacgagggag

SEQ ID NO: 499408 - DNA, 113 bp, Homo sapiens
cgaggggacggagccggatcaggagccgccgccgccatatcaggtaactcaactggacccaaataaatcattattggaggtaaagttgttccctcaagaaacccttttccttg

SEQ ID NO: 499409 - DNA, 88 bp, Homo sapiens
cctgctggcacgaggcactaagggctcccgggagccaggggagatgctacctcggaagctgaagcggatcctccggcaggagcactgg

SEQ ID NO: 499410 - DNA, 75 bp, Homo sapiens
tcttcagcaccacctttttggggaagatttacctagctgccaggtactccaaagattcaggtttactcacgtcat

SEQ ID NO: 499411 - DNA, 76 bp, Homo sapiens
cggcacccagacaggtggcgacggcagaggagaatggaagttggatacactttgtgacttgtacgagacactgacc

SEQ ID NO: 499412 - DNA, 149 bp, Homo sapiens
tggagacagagctgagggagcaagaggtgtcggaggtctcatctttgaactactgccggagcttctgccaggagccagatgaccaggatgccccagatgagcatgagccctctccatcagaagatgccccattatatcctcattcacct

SEQ ID NO: 499413 - DNA, 100 bp, Homo sapiens
cattaaatacatcatgcttaaccctagttcacgaatcaaggctgatgagccctgaaaacacactcctgcagcccagggaggaggaaggggtcaagtatga

SEQ ID NO: 499414 - DNA, 83 bp, Homo sapiens
agctcactgatttcatcctcaagtttccgcacagatctattccagaggggagcttcaccacttcattgacggctttaatgaag

SEQ ID NO: 499415 - DNA, 75 bp, Homo sapiens
gcttgggtaaggacatgaagacagttcctgtcataccttttaaaggcattctgaaggcaaatcctgtttagaccc

SEQ ID NO: 499416 - DNA, 97 bp, Homo sapiens
aaattcttagaaataacacacatttatctatcactgtgaaaaccaatttatttggtaataaatctcctaatggaataagtgactatccaaagatcag

SEQ ID NO: 499417 - DNA, 80 bp, Homo sapiens
ggcggcgtgcggcctagcgtctcagatggaggacggccataccctcttcgactacgaggtccgcctgaatgacaccatcc

SEQ ID NO: 499418 - DNA, 101 bp, Homo sapiens
agtttacctgcgcctgcccggacggcatgctgctggccagggacatgaggagctgcctcacagtggatatcaaagtattgcagagtgccttagcagccatc

SEQ ID NO: 499419 - DNA, 88 bp, Homo sapiens
gaaaaatgctcagggatggagccctctggcggaagccatcagctatggagataggcagatgatggagcagcgtgacttcattggagtg

SEQ ID NO: 499420 - DNA, 97 bp, Homo sapiens
cgggtggaggtgtccgtgtcctgcagaggaattcaagggctccacagtcgtcgagctgatgaagaaggaaggcactaccctgggtctgacggtatcg

SEQ ID NO: 499421 - DNA, 100 bp, Homo sapiens
gtttatgctgagagaacagtttgaagcaaatgggtatttctttaaaagctctcgtgctcattcccccatgatcgccgtaggaagtgatgacagtagcccc

SEQ ID NO: 499422 - DNA, 75 bp, Homo sapiens
ctttgcgctcagacgagtaacttcggcaaagggatggggagagatatttgttcagtcgaatcaaggtgaagagga

SEQ ID NO: 499423 - DNA, 74 bp, Homo sapiens
gtgattgtgaggcctcctcagccacgtggaactaacccttaggagaaatcttgagagtggacagcaattgtgaa

SEQ ID NO: 499424 - DNA, 100 bp, Homo sapiens
ctgggatgtgaagtagatgataaagatgatgatatccttctcaaccttgtgggatgtgaaaactctgttactgaagattctggctgtgactcagtcactg

SEQ ID NO: 499425 - DNA, 100 bp, Homo sapiens
cggacgcgcgcagcccgcccgcccggcgaccagcaagtattcatgtgattgaacggcgtgctcttcctgagttcttcaatggaaaaaacaaatccaagac

SEQ ID NO: 499426 - DNA, 100 bp, Homo sapiens
gctggttataatccttcaatatgcatgattccaacagaactgcagcagctctggaaagaagtgacaagtgctcatactgcagaagaaaccacaggcaaca

SEQ ID NO: 499427 - DNA, 100 bp, Homo sapiens
cgtctgtgcggctgcgtggggctcggccgcgcggactgaaggagactgaaggccctgaaagccattatcgccatggatacagcaggaatgatcctgggat

SEQ ID NO: 499428 - DNA, 75 bp, Homo sapiens
agaatatgaaaataagagccctgaggatccacaggtcttggataagagccagatgaccaggatgccccagatgag

SEQ ID NO: 499429 - DNA, 50 bp, Homo sapiens
cgggaagaacaaagacttagactcggcccccccaggatgcaatggcgcag

SEQ ID NO: 499430 - DNA, 83 bp, Homo sapiens
accatccccatgtttgtcccagaatctacgtctaaactgcagaagtttacaagatctgccaggctggactgtgctgttcctct

SEQ ID NO: 499431 - DNA, 90 bp, Homo sapiens
cacagaaatctggaggcagtatcacctaacggagctttcaagttgtggatggaataaaaaagaaaaatatagttctgcaccaaatgcagt

SEQ ID NO: 499432 - DNA, 111 bp, Homo sapiens
tggacgtgctggtgtctgagtggatggggacctgcctgctggtttgaagatcagcttcagcaatggttgtctgaagactcaggagcatttacggatttaacttcccttccc

SEQ ID NO: 499433 - DNA, 82 bp, Homo sapiens
cctcgcgcccgggagcaggaggagctgctggcgcccgcagatgatctgcgagtgaagagggacgagggaaaagaaacaaagc

SEQ ID NO: 499434 - DNA, 75 bp, Homo sapiens
cgcggctgaccctgatggaggaagtgctcctgctgggcctcaaggaccgcgaggatcccctaacaacagtgagag

SEQ ID NO: 499435 - DNA, 100 bp, Homo sapiens
gtgatcctgtggtttcagctggcgctgtgcttcggccctgcacagctcacgggcgatgccacttcaaatgaacaacaagagcttttctgtcagaagttgc

SEQ ID NO: 499436 - DNA, 75 bp, Homo sapiens
ctgtatgattacttttcactggatactgactcgcatttcagaagatggacacaaagaagaaggaggaacagttga

SEQ ID NO: 499437 - DNA, 100 bp, Homo sapiens
gacaagctcagaactgagaagctgtcaccacaggtcagaagccaatgacctggccctgaggctggctcgccactacacgggacaccaggacgtggtggta

SEQ ID NO: 499438 - DNA, 98 bp, Homo sapiens
cggcttccacacggtgacgtgctgcggcttcatcccgcaggacgagattgaggagctgcgggccgagatgctggagatgcgggacgtctatatggagg

SEQ ID NO: 499439 - DNA, 82 bp, Homo sapiens
gcagagtggagtatctggtgaaatggagaggctggtcgcccaagtacagcacatgggaaccggaggaaaacatcctggatgc

SEQ ID NO: 499440 - DNA, 100 bp, Homo sapiens
ctgatctggactcctccgtgcccgctgacattatctcatccacagacaaacttgacttaattcagtgcacaaatgagatgaatgtgaacatcccacagtt

SEQ ID NO: 499441 - DNA, 50 bp, Homo sapiens
actgggaaacatcattaaatcacaatgcagatcttcgtgaagactctgac

SEQ ID NO: 499442 - DNA, 100 bp, Homo sapiens
gcagcggcggcggcgcccgcgggtggtataaaatggcggatttcgaagagttgaggctcctcagagaaattttgaaattgccttcaagatgtttgatttg

SEQ ID NO: 499443 - DNA, 82 bp, Homo sapiens
ttggggagagttgctaggaaaatgtgacgagtagcacagcccctctatggtttagatggcagtgctgcaaaggaggcaacag

SEQ ID NO: 499444 - DNA, 90 bp, Homo sapiens
cgacccggcccgtagtgtggaagcagcttcaggttgacgtggagaatcccgacctggaaaagttccccaagtttgccaaggccccattcc

SEQ ID NO: 499445 - DNA, 75 bp, Homo sapiens
ttcacttcccactcagccgcatcctgatgtgtctgaaagatacaaactggactctcaggacaaaacgacaccagc

SEQ ID NO: 499446 - DNA, 100 bp, Homo sapiens
taactctggctaccagtacaagagactagaagagtgtctacccacaggatctgtgaagtcctggaacgctcccactctccacccctgaagctgacccctg

SEQ ID NO: 499447 - DNA, 100 bp, Homo sapiens
gatgactgagtacctgaaccggcacctgcacacctggatccaggataacggaggctgggagtggctgtaaggtgaagaagcatgaaactcagtctctcgc

SEQ ID NO: 499448 - DNA, 101 bp, Homo sapiens
cccaaggacagggggacagggctctgtctcgcacttcccagctttacttttagaagcccagtcaacaccatttcaggtcacaccttcaactatggcaaata

SEQ ID NO: 499449 - DNA, 50 bp, Homo sapiens
accgagaccgcggccgggaccgaggaaagcaaggagatggccaccaagga

SEQ ID NO: 499450 - DNA, 87 bp, Homo sapiens
gcagcatgttaataaaactgatagtgccgtcagacttgtccacatccccacagtaccttctccaggcaaattccgttcccctgcagc

SEQ ID NO: 499451 - DNA, 80 bp, Homo sapiens
cagaggggcctcccggtgtcctcgggatatcgccaatgtgatgcagaggctgcaagtcacagcccgttggagattgtgat

SEQ ID NO: 499452 - DNA, 80 bp, Homo sapiens
caaccataaagacatcttaattgggcacgaaagaggttggtcaaagaaaaagtgatgtatgaaaaagaggcaaaacaaca

SEQ ID NO: 499453 - DNA, 97 bp, Homo sapiens
ccgagatgccgggggagcggggccttccacaccccctccgtgggtgtgtgcgattattggagccggaattggtggcacttcagcagcctattacctg

SEQ ID NO: 499454 - DNA, 50 bp, Homo sapiens
gtgggggtgtgcaaacccgagagaactggctgggggctctcttccctata

SEQ ID NO: 499455 - DNA, 98 bp, Homo sapiens
tggccgggagatgatggctgatgaagaggaagaagtcaagccgatcttgcagaaattgcaggcctgatcacttgaacggacatatcaagcaggtgcac

SEQ ID NO: 499456 - DNA, 50 bp, Homo sapiens
ccggagactttggggcctaactagcatcgagagtaaacatgaggttacga

SEQ ID NO: 499457 - DNA, 100 bp, Homo sapiens
cgctgctgctgaggagaggagcgtcaacagcagcaccatggggacacttgacattcagggacgtggccatagaattctctcaggaggagtggaaatgcct

SEQ ID NO: 499458 - DNA, 100 bp, Homo sapiens
cagcagtcatggtcctggatttgcaaggctgaatagaagagatggtggagagtatagtgaagatgatgtaaatgaattagtgaaggaagatgaagtggat

SEQ ID NO: 499459 - DNA, 83 bp, Homo sapiens
gatagctgttgtttcagagaaaggacccagatgatgtggtaccagttggccaaagaagagcctggtgttggtgcatgtgcttt

SEQ ID NO: 499460 - DNA, 104 bp, Homo sapiens
ctccactttcgccagcccgtgccgcgagcgcggcctgcaggaggccaagactaaggggctgcagagcggggtggacattggcgtcaagtactcggagaagcagg

SEQ ID NO: 499461 - DNA, 90 bp, Homo sapiens
ctcagatccaagtcaacagtttatgagttgcagaaacgaattgctgaaatggaaactcaaaaggaaaaaattcatgaagataccaaagaa

SEQ ID NO: 499462 - DNA, 82 bp, Homo sapiens
aatttgtacctgcaggcctcctacacctacctctctctggaagaaggtagataatgactataatgcccttcgagaaagactc

SEQ ID NO: 499463 - DNA, 98 bp, Homo sapiens
ggcgcgaggcggcatgagggagccgctcgatctttaatctcatgaagtacgacagctacagccgcttcttaaagtctgacttgtttttaaaacacaag

SEQ ID NO: 499464 - DNA, 100 bp, Homo sapiens
gggaaattcaccttcgatgttgagaaatcggagattcagactttccacctgcaggaattgaatgatctggcacgggaccctccagcacagtgttcagcag

SEQ ID NO: 499465 - DNA, 100 bp, Homo sapiens
gcctacagagaagaactgacacagacttccttagatgtgttgtcttcctgtcactggtgcattccttatcaatgtggcttctccagggaaagtgaccgag

SEQ ID NO: 499466 - DNA, 78 bp, Homo sapiens
tgaggagagaatggcatgccagacattccagctgcagctcttgtctcctagcagcagcattgtcccagcatttaacac

SEQ ID NO: 499467 - DNA, 80 bp, Homo sapiens
gggattatttcctccccactgactggaaagggcttccgagtggacctgccaatcaagtcggcccgctaccgtggccagta

SEQ ID NO: 499468 - DNA, 100 bp, Homo sapiens
gtggctggaggaattcagtttcttgggggaagaacctaggaaagtccgctttgattatgacttattcctgcatcttgaaggccatccaccagtgaatcac

SEQ ID NO: 499469 - DNA, 83 bp, Homo sapiens
cggaagatgatcagccaggcacagaaggtcgcaatggaagaagagatcgccgcgctggtcattgacaatggctccggcatgtg

SEQ ID NO: 499470 - DNA, 80 bp, Homo sapiens
agatggaaccagaaaagatacgaggctctaggagagacatatgtagagtgtgtcggtcagaaggaacacctgagaaaccg

SEQ ID NO: 499471 - DNA, 100 bp, Homo sapiens
tatgaccagccctgggagtggaagaaggagcggatttccaaagcctttgcagaacaccttccaccatgaccacctcagcaagttcccacttaaataaagg

SEQ ID NO: 499472 - DNA, 73 bp, Homo sapiens
ggaaatcttagatttggctcctttttgcacccttaaatgtaagctagaaaaagtcctacagcaaggagacatt

SEQ ID NO: 499473 - DNA, 50 bp, Homo sapiens
ccagggtctgcagacaaggcaggatgttcctgcagcagccagctgtatcc

SEQ ID NO: 499474 - DNA, 100 bp, Homo sapiens
gacaggccgccccatgagagttgtgggctggtatcattcccatcctcatataactgtttggccttcacatgttgcacttttcaggattagaagaggctgt

SEQ ID NO: 499475 - DNA, 74 bp, Homo sapiens
agtgtttgaacttcttggtcatacctatgctattaggagggtgaaaccttgtagcagtacctgggaacctgcat

SEQ ID NO: 499476 - DNA, 98 bp, Homo sapiens
gaagattattgagcggctggaccacctggagaatgtcatcaagcagcacattcaagagagccagctgctccccgggaacaacttcaccaatgagtgca

SEQ ID NO: 499477 - DNA, 90 bp, Homo sapiens
gaacccgctgacgtggatggctgactgtattgtaggtgagctcgtgaaacaatatgaagaggagaaaatagccttttaaggaaattggcc

SEQ ID NO: 499478 - DNA, 76 bp, Homo sapiens
cacaaccaccaccttcaagggagtcgaccccaacagcaggaatagctcccgatggagttttaacattgaatgcgga

SEQ ID NO: 499479 - DNA, 104 bp, Homo sapiens
agaagctcagggagaagttgaaggaggaggagaacacagtggaatggatgatgaacttgttgttggacatagtgcaagatcagacatctccagcttcccttgta

SEQ ID NO: 499480 - DNA, 59 bp, Homo sapiens
ctgtgtctcgtcttgtatctctaattggaagcatggtggccaccacatcgaagaatgcc

SEQ ID NO: 499481 - DNA, 97 bp, Homo sapiens
ttttgagtagatccatagtgaaacggtgggcaaattttgcaaaatatggccacccaggctactttgggaaagttggtatgaagcattaccacttaaa

SEQ ID NO: 499482 - DNA, 50 bp, Homo sapiens
caggaagatatggaccatcacttggtgcacactggccccctcaccttttc

SEQ ID NO: 499483 - DNA, 82 bp, Homo sapiens
agaaaggcgagcggctccagattgtcaacaacacgtcttgaggaccggcccagctcaggctcctggggcagcggcgaccaga

SEQ ID NO: 499484 - DNA, 116 bp, Homo sapiens
agagactgctgcccccaaggtgagatggcacctggccagctgcccaagcagagtgcttgtgatttcacgtatttttgctgaactcgtaaaagagacacttggatggtggattaacc

SEQ ID NO: 499485 - DNA, 83 bp, Homo sapiens
gtgagaagcgcacgctggagggcgagctgcatgatctgcggggccaggtggccaaggtgagaaaccttaccactgtgactggg

SEQ ID NO: 499486 - DNA, 100 bp, Homo sapiens
ctccagcagcagaagcagcgcctgatcgagtccctccggaactcacactccagccaccaattaccctagttatgggcccatcatctcacctggactatca

SEQ ID NO: 499487 - DNA, 75 bp, Homo sapiens
acaatccaagttccacaatatattgactactgccacaattccggtgccctcaccaccaatggcatcaaccctgac

SEQ ID NO: 499488 - DNA, 100 bp, Homo sapiens
gcatggccatctcctccgacggcaagtaccttgcctctggtgaccttcgacctcttgggagaagaccagctggttctcggaaggctggcgcacaccttag

SEQ ID NO: 499489 - DNA, 83 bp, Homo sapiens
caacatcttccagcagatctcccccgtggcgagcagctgatgcagctgtacagtgcgcgccagcggcggcggctgaaccgggg

SEQ ID NO: 499490 - DNA, 130 bp, Homo sapiens
ggtgaccatcgaaaggagcaagagcaagatcaccgtgacatccgaggtgcctttctccaaaagagctcagttatgggtaatacttctaatttattccttcagaatctttctcatataccactggcacaac

SEQ ID NO: 499491 - DNA, 75 bp, Homo sapiens
gcctaggcattttgctgtctcctcctaatacgggaggttatattcaaaagaaaaaggaactgtggggaatctgta

SEQ ID NO: 499492 - DNA, 100 bp, Homo sapiens
ggaagctctttgcggtggcgttggtgctgtttgcggatgctgatgcagcctcttctgaaacagtctccctggagcaaccatcagagcagtggctggggca

SEQ ID NO: 499493 - DNA, 75 bp, Homo sapiens
cggcgacgcagcccgcggcagaagtttaagctatgaagaaggacatccctcacactctgaaacagatctccttca

SEQ ID NO: 499494 - DNA, 100 bp, Homo sapiens
ccttaaggaacttacgcacttaaaataattgggcagaagagaagcagtgaaggagtgcagaggcatcacctgaaaggtatctgatgtgtagccatgcaga

SEQ ID NO: 499495 - DNA, 91 bp, Homo sapiens
caccctgagtgcggatttctgctatgatgacaggttatcttatgatgaggcttttgctatggctaatgatcccttggaaggcttccatgaa

SEQ ID NO: 499496 - DNA, 100 bp, Homo sapiens
gcgtagataccgagctgctagccgagagattttactaccaagccctgtcagtagctcctcagattgagacgagttgtactgctgtcacaggaaatggacg

SEQ ID NO: 499497 - DNA, 101 bp, Homo sapiens
gcggaggcggaagcatccatggcggagggcggcagcccagacgggcgggcagggccgggctccgcagttgatgcggatgaaattaaaaggctaggaaagag

SEQ ID NO: 499498 - DNA, 50 bp, Homo sapiens
tggggatcctctgtacgcccgttcactgatacttgccagaactaatacag

SEQ ID NO: 499499 - DNA, 75 bp, Homo sapiens
tggctgcagggacccggtgacagcgtgagagcacttttccagccattaactccaggctctcgagaatttgaagat

SEQ ID NO: 499500 - DNA, 75 bp, Homo sapiens
ggaagcggcaagcagagaaaacctgccaatcaagatgagtatggtaccttctccaggcaaattccgttcccctgc

SEQ ID NO: 499501 - DNA, 74 bp, Homo sapiens
tcaaccaaaatctcttgtacgctgcaaaaacagccttgaatagtttcatgcattccaaagaagcaacagcaaga

SEQ ID NO: 499502 - DNA, 119 bp, Homo sapiens
tcgggccgagatgtctcgctccgtggccttagctgtgctcgcgctactctctctttctggcctggaggctatccagcgtttttcgttggaatatacgttgcacatttatggcgattctg

SEQ ID NO: 499503 - DNA, 75 bp, Homo sapiens
ctgcagttggaagaggccgagtctccagacatcacctgcaagctttcttcctggtggcagatgacatcatggatt

SEQ ID NO: 499504 - DNA, 101 bp, Homo sapiens
aggcccagctgagaggtgcgcgggcgaggacagcggcagcgatggtttttcgttggaatatacgttgcacatttatggcgattctgagtgtgagggcagac

SEQ ID NO: 499505 - DNA, 83 bp, Homo sapiens
agaaaatccaaccagctcttcaggagaagcacgccatgaaacaggctctggatgagggggatattgccttgttgaaaacttat

SEQ ID NO: 499506 - DNA, 100 bp, Homo sapiens
tttaaaagacagtcctcgtcagcactgactttcagctatggaatcggtacgtagagaatacaggaaattcttcagagccaatgctggaaagaaaatctat

SEQ ID NO: 499507 - DNA, 100 bp, Homo sapiens
ccttcgccggtcaccggctcctgcaggcttaacagagcgttccaaaaagaggactctccagctactttttattgcatcagtatgcagtggtttagagaat

SEQ ID NO: 499508 - DNA, 90 bp, Homo sapiens
cactgaagaaagcatcgtcctaggaatggatttctcctctaatgacaggatggaagggggagagctgtttgacaaagtggtggggaataa

SEQ ID NO: 499509 - DNA, 100 bp, Homo sapiens
cggtatttgtgagaggagtcggcgtttgaagaggtggaactcctagggcttttttgagagtgtgttcacaataatgtttcgacccaaagtaatggctccc

SEQ ID NO: 499510 - DNA, 93 bp, Homo sapiens
agggaaggagggcgtccgagtcaacaaccgcttcgagctggaaactggtcaaagaactcatgcaagtggaacttacagcttccttgatcggac

SEQ ID NO: 499511 - DNA, 75 bp, Homo sapiens
aggaatcctcaacagatgccactgtaagtggggagagaagctgctcaggacagagcgggatgccaccagcttgtc

SEQ ID NO: 499512 - DNA, 75 bp, Homo sapiens
tttgaaagtgcgattgtggaagctgctcggggagaagagaagtttacctttattgagaaatgtaacaaccctcgt

SEQ ID NO: 499513 - DNA, 100 bp, Homo sapiens
ggcccgggaagagctgatgagaatgctggcggaggacgagctccgggatgctgtactccttgtctttgcaaacaaacagtttgacaagtatgcgcccaag

SEQ ID NO: 499514 - DNA, 100 bp, Homo sapiens
tttgtccctttgcctcatcccaggttgccttggaaaatgccaacgccgtgtctgaagccaaaatgaagtttaatccctttgtgacttccgaccgaagcaa

SEQ ID NO: 499515 - DNA, 97 bp, Homo sapiens
aggccagcctgtccctaagaacatcctgcaggtggggaagctgaggcaggaagccctttagtcacttgccgaaggccacgctgttacccatgggacc

SEQ ID NO: 499516 - DNA, 82 bp, Homo sapiens
acggacaagcacagtcttcggaagcaggaacgaatgcaggaatttgggaactgagctgtgcaagtgctgaagaaggagattt

SEQ ID NO: 499517 - DNA, 75 bp, Homo sapiens
gcagtagctcccccgcctcccgggctgagggtacatctttgcagacgcttatgcccagtacctctggatcacgtt

SEQ ID NO: 499518 - DNA, 75 bp, Homo sapiens
cagccaccctcgctccctctgctcttcctcccttcgctcgcaccatgatgtgtatatctcatgattgatatggag

SEQ ID NO: 499519 - DNA, 74 bp, Homo sapiens
ggaactgtctatctggtttcagacaagaaagccaaacgaggagaggaattaccctggtgggcagcagtgggacc

SEQ ID NO: 499520 - DNA, 74 bp, Homo sapiens
gcaggggtcagtgatggagctgcttcaggagttactgcaagagctcaggcacctcaaaatcaaagtggaagagt

SEQ ID NO: 499521 - DNA, 75 bp, Homo sapiens
cgagatcacatgcaggactctttcttaatgcagcctgagcttattgacatgtgtgtgcagaactgtggtccaagt

SEQ ID NO: 499522 - DNA, 100 bp, Homo sapiens
ggtgcagattttaatttcagtgactgaattaaaaggtgtcaagaagctcagaatggatgaatttttagatgtgatctactggttccgacagatcattgct

SEQ ID NO: 499523 - DNA, 121 bp, Homo sapiens
ctgttggtggaaccaggggaaatgcagaaaacagaaacacttcttttattttcctgtaatatatctgtatcatcggagattcaaaaacatgccacaggaaagaagtctccagcaaagagtc

SEQ ID NO: 499524 - DNA, 75 bp, Homo sapiens
gagcaagtagaaaaggagttgttgagagtagcaagagggagccggcatcagaaaacaacactgggagctggggac

SEQ ID NO: 499525 - DNA, 82 bp, Homo sapiens
ggatagctgttgtttcagagaaagatattttatgacctggtcagacagataaataggaaaacaccagtggaaaagaagaagc

SEQ ID NO: 499526 - DNA, 75 bp, Homo sapiens
cgttgagctcagagaagagcaactcggagttttgggggtgtgctttgaaacctatgagaatatcccaggccagtc

SEQ ID NO: 499527 - DNA, 80 bp, Homo sapiens
gatttgttaaggattccaagtaactcttatttgttatggattgaggtatatagccaaagtactgaagaattcgatccatg

SEQ ID NO: 499528 - DNA, 98 bp, Homo sapiens
ggcagctgtactaggactgggaacggggtctcctatggacagaagtgcgggcaaggagctttgttcctccccgatgtcaccctcccacagcccacttg

SEQ ID NO: 499529 - DNA, 100 bp, Homo sapiens
gaagtagaggtggaggtgaaagaagaggagaatgaaattagagaggatgaggaacctccaaggaagatgttggagctggtggcccagaagcagcgggagc

SEQ ID NO: 499530 - DNA, 83 bp, Homo sapiens
ccacacagctcagaacagttggatcttgctcagtctctgtcagaggaagatcccttggaactgtggctgcaccatctgtcttc

SEQ ID NO: 499531 - DNA, 90 bp, Homo sapiens
cttatgtagcctcattatcccgctccgtgaggaatccagacgctctgcagtgtcccatcgtcttatgcggatggcggggaaaggcctcca

SEQ ID NO: 499532 - DNA, 99 bp, Homo sapiens
tgaagagaggcctctcccaaagcacctgcgcagaatccagactccaaaatgatgcaaatcaacctgactggatttttgaatggaaaaaatgctcgagaa

SEQ ID NO: 499533 - DNA, 75 bp, Homo sapiens
tcaaacctgaaagaccccagttatggatgggaggaatttgaagcctacattaatgcttctggagaacatggaatt

SEQ ID NO: 499534 - DNA, 75 bp, Homo sapiens
ccaatatggaattgccaggttcttcactgaataaaaagagtagttgaacagctacggaagaacctgatagtaaag

SEQ ID NO: 499535 - DNA, 89 bp, Homo sapiens
ccgggggcaaggccaaaaagaagcattccatcattccgaggggatcactttctctgaaagtgttggcagaattgcccattattgttgtt

SEQ ID NO: 499536 - DNA, 83 bp, Homo sapiens
ctcacaatgaggctccctgctcagctcctggggctgctaatgctctgggtctctggcaccatgactcctgtgaggatgcagca

SEQ ID NO: 499537 - DNA, 100 bp, Homo sapiens
gttctaaaaagaggcgaaaggaagcaagcagttcagaagagccaaggaataaacatgcaatgaacccaaaagggaagctgtgctgaatggtttggtggcc

SEQ ID NO: 499538 - DNA, 90 bp, Homo sapiens
tcttctctccgagttccccgacaagtttggatcctgtgttccccatgtctctctctgtgcccctcactcatctcactggatctgtctgcc

SEQ ID NO: 499539 - DNA, 88 bp, Homo sapiens
ctgaagaagcagttctacaaggcgagccaggtggagctgatcagaataatgttcagcatcaaccccctggagaacctgaaggtgtaca

SEQ ID NO: 499540 - DNA, 49 bp, Homo sapiens
gatggcgcctgttgtgacagggtcaaaatgcagatcttcgtgaaaaccc

SEQ ID NO: 499541 - DNA, 100 bp, Homo sapiens
aaaagttgtcaggttgaaaatggaagagtaattgcctgctttgattccctaaagcttcttaatgaagaggataactcagaatcatcggctatagagcagc

SEQ ID NO: 499542 - DNA, 58 bp, Homo sapiens
atctccttgatcctggctgtggactggctagtgctttggaactgcgacataactagcg

SEQ ID NO: 499543 - DNA, 100 bp, Homo sapiens
aagagattgaaagattctttaaattacatcaggtctaagagtgtaaccagttccagtagcagtagcagtgacagttctgccagtgattcttcatcagaga

SEQ ID NO: 499544 - DNA, 100 bp, Homo sapiens
gtttccccatctgcaaactccggaccctggagacgctgtttggaatgtgagatgggcgaggctgtaggagtgcaattggaacctgagcgcttggtcaaga

SEQ ID NO: 499545 - DNA, 100 bp, Homo sapiens
acttcagtcggaaagttggaacctctgacaagaccaagtactaccttcaagagtgtgaacatggctacgcctcttcattcccgtccatgccgagcccccg

SEQ ID NO: 499546 - DNA, 98 bp, Homo sapiens
acctgagtataaggataaaaagggatattcaccccttgacactgccctaaccatcatggaggtggccgaggtggaaagtcctctgaaccccagctgta

SEQ ID NO: 499547 - DNA, 95 bp, Homo sapiens
agagagagagcttggttaacttgggagaaagtttcatctgtggatggagtattggtttgtgactggttatatcctctagttcctgatagatctcc

SEQ ID NO: 499548 - DNA, 100 bp, Homo sapiens
atttgttaaggattccaagtaactcttatttggacgagattgaggagctgcgggccgagatgctggagatgcgggacgtctatatggaggaggacgtgta

SEQ ID NO: 499549 - DNA, 75 bp, Homo sapiens
ggaatatgaagagacacagtatggtagccacacccccaggcagagaagaggcgatggcggcgatggcatctctcg

SEQ ID NO: 499550 - DNA, 100 bp, Homo sapiens
caaaaactgaaagaacatcacacagttgaagctccaggaggtcaaaagacatacaacagctgtgccagactctgcttaaaccaagaaacagtatgtttag

SEQ ID NO: 499551 - DNA, 87 bp, Homo sapiens
ctccaagatgtagctaatgaccgtggttcccactgaggtagcagatggggcaaatgcaattgtgctggggacattgggagacatttc

SEQ ID NO: 499552 - DNA, 100 bp, Homo sapiens
tttgtcgtttcccagcgctgcgcaggacttctcctggcggcgctgcggatccagggggtcggctgccaggtacagaggcagaagaggcctggaccttggc

SEQ ID NO: 499553 - DNA, 82 bp, Homo sapiens
actacaacacgacctactccatccaggtggaacacctgcagcaggagactgctgctctgaaaaagcaaatgcaaaaaataaa

SEQ ID NO: 499554 - DNA, 87 bp, Homo sapiens
tatttagctttagttggtggtggaaaaaagccgaaataccctcccaacaaaggatgagaacaagttgagcagtgccaacggccatga

SEQ ID NO: 499555 - DNA, 100 bp, Homo sapiens
ctaacatctacgtgaccagttttggccctgtctcagatacagatatgatgactcctggtctccatcctggatccactctgattccaatgaataatatttc

SEQ ID NO: 499556 - DNA, 107 bp, Homo sapiens
cgagcaggtgccatcaggcacatgaacggtggagtcttcaaaggtgcagctctgtcatttccactctgctctgctgcacagaaggcagaagccctggccgtcccctg

SEQ ID NO: 499557 - DNA, 51 bp, Homo sapiens
gacgacaagctcgagcagatcaggaagtgacatcgtctttaaaccctgcgt

SEQ ID NO: 499558 - DNA, 90 bp, Homo sapiens
tcaaaacttgcaaaagctgacattaagatctgggtgcttactggagacaaaaagggacagtcattttgtttactcattcagccctgttgc

SEQ ID NO: 499559 - DNA, 87 bp, Homo sapiens
tcagccctgaagaaaagggaaaacttgctgcggttgctcaaggtgaattcatcattggccgagttatcaaagccatgaataacagct

SEQ ID NO: 499560 - DNA, 100 bp, Homo sapiens
aatatagcaccttttattaaccagtttcaggtgggatgatgacgttgtcttcaagaactgtgcaaaaggtgtagatgaccagaagaaagacaaaagattt

SEQ ID NO: 499561 - DNA, 75 bp, Homo sapiens
tggggatactacacctggccaaagagtttaatctgattgataggcgtgagctggcacctcttcaagaattaatag

SEQ ID NO: 499562 - DNA, 74 bp, Homo sapiens
gggaattgcttgctggaagaaatgatggaattgtggtgcttggaataaacagagcttatggcaaaaattcactc

SEQ ID NO: 499563 - DNA, 100 bp, Homo sapiens
ctttgccaacatgcgctccctcatccagtctattatcctcccagtccacaacgctgaaccgtggctggacgaatgtttgaggtctgttttgcaacaggac

SEQ ID NO: 499564 - DNA, 97 bp, Homo sapiens
tcagatccttgagtgataaaggagtagagagatcctgcagatcattcagctggacctagacctgaagtttaagaccaacatccgggagttgtttgag

SEQ ID NO: 499565 - DNA, 75 bp, Homo sapiens
caaagcatgtctgcaacccagccattttcagtttgaaattggcacaatggaagaagctggaatttgtgggctagg

SEQ ID NO: 499566 - DNA, 75 bp, Homo sapiens
gaagaaatacagcttggtgaagagttactagctcaagatgagcagcaccagcagtaagagggctccgaccacggc

SEQ ID NO: 499567 - DNA, 74 bp, Homo sapiens
cagctgggggagctcctggccggccatggaccatcagcacgtgcccatcgacatccagaccagcaagctgctcg

SEQ ID NO: 499568 - DNA, 101 bp, Homo sapiens
gtccccctggccctgctggcgagaaaggatcccctggtgctgatggtcctgctggtcctcctggtccccaaggtgtcaaaggtgaacgtggcagtcctggt

SEQ ID NO: 499569 - DNA, 74 bp, Homo sapiens
caacgaccagtactacgtgtacttcggcaccgtccgcgactgctatgaggacgagccaaactcaggctgtacct

SEQ ID NO: 499570 - DNA, 83 bp, Homo sapiens
cagaggagtcgtagcggtcgaggcttttgcggctccggcgtgccggaaaagcttactcacatagcatattggtatatcaaaat

SEQ ID NO: 499571 - DNA, 101 bp, Homo sapiens
gacttgattgatatatatgctgacgaggagttcaaccaggtgagtcctgcaaatgttaagtgatttgctcaaggtgcccatttcgcaggaattggagccca

SEQ ID NO: 499572 - DNA, 75 bp, Homo sapiens
gaaaaatttgagaaggaggctgctgagaggtccagttccggccgtaccgcacagacgacttcatcacgcgcctgt

SEQ ID NO: 499573 - DNA, 96 bp, Homo sapiens
tttcaccacaagaagggctgccaggatcatgctcctctgtggagcaagtgcctccatgaaatgccatattttgtgaagaaagtgcatgcaggaata

SEQ ID NO: 499574 - DNA, 101 bp, Homo sapiens
cttcaaataactgcaagaactcctagactgtggcaccatgactcctgtgaggatgcagcactccctggcaggtcagacctatgccgtgcccctcatccagc

SEQ ID NO: 499575 - DNA, 90 bp, Homo sapiens
gccgagtggggcgacgaggctgacggcggccaggtggatccataaagaacccagccaacccgcagagggaggggaggggctgagctgtga

SEQ ID NO: 499576 - DNA, 71 bp, Homo sapiens
caataggaagtacgagtgtgaccttcctacagcaacttcccactccaggtggccagacgggagttccagac

SEQ ID NO: 499577 - DNA, 75 bp, Homo sapiens
atcagaggtagtcggacctttcccgctggcgcgcagcctcagctagggtctcattctgtcgcacaggttggcgtg

SEQ ID NO: 499578 - DNA, 75 bp, Homo sapiens
cttttgggcagcttttccggcctgacaacttcatctttgcaacttgagttggtggaaccaagtggctggattcat

SEQ ID NO: 499579 - DNA, 75 bp, Homo sapiens
agtgatctatcaggcaccagacttgggatcagttataaactctagagtggtttgcaagtgacagcataaagacgg

SEQ ID NO: 499580 - DNA, 90 bp, Homo sapiens
tgagagtcggagccgaataccaagctcggatccctgaatttgatccagtactaaggctcgtacgtctgcatcgattatcttacgtggggc

SEQ ID NO: 499581 - DNA, 132 bp, Homo sapiens
gaggacctctcgccaagggccccaatgagtggcacacagtctactatcaccgacagacttaattcagtgcacaaatgagatgaatgtgaacatcccacagttggcagacagtttatttgaaagaactactaa

SEQ ID NO: 499582 - DNA, 74 bp, Homo sapiens
gtgtgaatgtgcagtttgagtctgatgaggaggtgcctgtaatcctagcaactccggaggctgggcaggagaat

SEQ ID NO: 499583 - DNA, 90 bp, Homo sapiens
actggggccagggaaccctggtcaccgtctcctcaggcctcagagaaccatggctactgccaagggaatcgccataggcatcgacctggg

SEQ ID NO: 499584 - DNA, 83 bp, Homo sapiens
gcagagcaagcgcggggaaccaaggagacgctcctggcactgcaggtgcaatggatgagcttcatagtctggatccaagaagg

SEQ ID NO: 499585 - DNA, 101 bp, Homo sapiens
tgtaaattacagagaacctaagtctgtttgcaaagcacctgaactggaatggaagttggatacactttgtgacttgtacgagacactgaccattacacagg

SEQ ID NO: 499586 - DNA, 96 bp, Homo sapiens
gatggaagggaggagactcctgaccctcagaatgggctgatcccttatccaacatggttctaaccttcagtactaaagaagatgcagtttcctttg

SEQ ID NO: 499587 - DNA, 75 bp, Homo sapiens
gagtttggcgagtcagtgactgaagcgcccgtccattccaagaacatacatatgatagttgagaaagacacatat

SEQ ID NO: 499588 - DNA, 100 bp, Homo sapiens
ggagcgcttctttaagggctacgggaagatcctggaggtggatctgaagaacggggaacttaggctgcggaactatgtcccggaggatgaggacctgaag

SEQ ID NO: 499589 - DNA, 100 bp, Homo sapiens
ggggagtggaaaggctctcagtgaaaaagaatatcctccgaatcctaaatctagagctccaaggatgctggtcattaagaaaggtaatacaaaagactta

SEQ ID NO: 499590 - DNA, 50 bp, Homo sapiens
cgctgcgcaagcacgctgaggagagcccgtgttctggtactacgtgaagg

SEQ ID NO: 499591 - DNA, 89 bp, Homo sapiens
agctttgcagcccccgaacgcggcctcgcacaggttaatgttgaagaaggaaaatgcggaagtcgtcatttgacaagttttataaatga

SEQ ID NO: 499592 - DNA, 83 bp, Homo sapiens
tttcatttcttcagacagagagtcagtgcagtggaactagaggaggatggaagagcccgacctctggtcctgcacatgtccac

SEQ ID NO: 499593 - DNA, 100 bp, Homo sapiens
gcagaggaagctcaccccgaggaagtctctcgccacgatatgtgttgagacggattctccgccgagctgtccgatacgcccatgaaaagctcaatgccag

SEQ ID NO: 499594 - DNA, 120 bp, Homo sapiens
gagcaactttcctatcctgtctctcctgatgaaggctcctgctgcttcttatgagatgagcccatggattccacaatggatgatgctgttgcgggtgactttgcattgataaataaactg

SEQ ID NO: 499595 - DNA, 96 bp, Homo sapiens
gtttatagaaaggattcatgactttgtaatggagggatgttaaattagaagacacctactttgatagagatgtggagaaggcatttatgaaggcta

SEQ ID NO: 499596 - DNA, 98 bp, Homo sapiens
ttgaccaatttaaagaagcattaatactcatcttgtccagaactctgtcaaatgaagaacactttcaagaaccaggaaccagcacctatgacagaaga

SEQ ID NO: 499597 - DNA, 75 bp, Homo sapiens
cttcatcaagttttatgctccatgggtggagccagccatcctgagacgtccgtacagcccgtactggtggagtgt

SEQ ID NO: 499598 - DNA, 83 bp, Homo sapiens
ataactgtggattatattttctactctgcagaaaaggaagatgttgctgggcacccagtgttctaagaacggaagcatctggg

SEQ ID NO: 499599 - DNA, 74 bp, Homo sapiens
ctcagagccaactgttggatgcagatggggtcaaggaggaggtcaagttggcctgaatggacctctccagctct

SEQ ID NO: 499600 - DNA, 82 bp, Homo sapiens
tccagcttggctacgtggtgcaagagtcaggccagaacttcagcaccctggctgagaagcctcttcggtgatctttggtctg

SEQ ID NO: 499601 - DNA, 42 bp, Homo sapiens
ggctgcggggccgaaccccggctccaccgggggacggctacg

SEQ ID NO: 499602 - DNA, 75 bp, Homo sapiens
tacccactgagaccagagttagtggaatccacatatctcctctaccagggtgaggcgctcaggcaagttctggtc

SEQ ID NO: 499603 - DNA, 90 bp, Homo sapiens
gaaaaagagaagatgaagaaacccagcttgatacgttgtttaccaagtactggacagaatcaaatggggtggaatctaaatcattaactc

SEQ ID NO: 499604 - DNA, 82 bp, Homo sapiens
ttactgcggcagtatgataatgagaaaaaatgggaactgatttgtgatcagctggatcagctcctttgtggcagtaaagcag

SEQ ID NO: 499605 - DNA, 97 bp, Homo sapiens
caccgtggccctgttctgggatgagcaaggtgtaaagatcaaagaaatcggctggacagatgtcgggggctggaccggccaaggaggctccattctt

SEQ ID NO: 499606 - DNA, 50 bp, Homo sapiens
agccgggaggacatctacaagcgggatcttatggttggtgatgaggcaag

SEQ ID NO: 499607 - DNA, 100 bp, Homo sapiens
tggggcgggacagcggccccctggagggggcagtcccgggagaacctgcggcggccggagcgcataagccggaccaagctgagggaggtggaaccagcag

SEQ ID NO: 499608 - DNA, 100 bp, Homo sapiens
aagatgtctgacatggaggatgatttcatgtgcgatgatgaggaggactacgacctgcctctggaattgctttggcactcgttagatgaatggctagttt

SEQ ID NO: 499609 - DNA, 99 bp, Homo sapiens
tggagagcttcatcaaaaatagtgatagctttgataatcgaggggagctgcagcgggagtcagacttcatggccagtgtagacagcagctggatctcct

SEQ ID NO: 499610 - DNA, 50 bp, Homo sapiens
agggtcctttatatagaagggagagtaggagtgaaagctggacattgaag

SEQ ID NO: 499611 - DNA, 89 bp, Homo sapiens
gcggcgggcaggcgtgcggaggacactcctgcgaccagatgctcaagccgcttgtggagaagcggcgccgggaccgcatcaaccgcagc

SEQ ID NO: 499612 - DNA, 87 bp, Homo sapiens
gatgtagatacgttagccagtttacttagtcatgctaaatgtgtagaagttgtaaaaacttttaacttaccattactgatgcttgga

SEQ ID NO: 499613 - DNA, 90 bp, Homo sapiens
aagatttcttaatgaaaatgaaagaaagtccacatttccaaaagtccaaggaggctgacccgcggctgattgagtccctctcccagatgc

SEQ ID NO: 499614 - DNA, 98 bp, Homo sapiens
ctgacgccgggggcacagaccaccctccactgagtgcggagcagccaaggtcgcaatggaagaagagatcgccgcgctggtcattgacaatggctccg

SEQ ID NO: 499615 - DNA, 100 bp, Homo sapiens
tttgccaaatgtgattatcaatgagaagcgcaacatccacgcagctgctcatcagaaagctgatattgcaattgctccattaactattacccttgtgaga

SEQ ID NO: 499616 - DNA, 97 bp, Homo sapiens
ctgagtcgcagttaccaccaaacccaggaggagactctccctggaaaacttcccttccctttcgctgtgcctttggctgcaacaagtatgttgatta

SEQ ID NO: 499617 - DNA, 83 bp, Homo sapiens
acggaccgcacgcctcttctaccgggcgccccacgggccgaagccgcaattctgtggtgttcttggtcacacatttatggagt

SEQ ID NO: 499618 - DNA, 101 bp, Homo sapiens
tccccatgacaagattgggaaaatattcaagaagtgtaaaaaggggtgcccaccagctgacctctcctccttctcagtcagagtctctgctggccatgttt

SEQ ID NO: 499619 - DNA, 75 bp, Homo sapiens
gccagaacctccgcattgcccttctgggtggatctgatgggcatgtttgagaaacggcgcttccgcaagttcctg

SEQ ID NO: 499620 - DNA, 100 bp, Homo sapiens
ggcccacagactgacgctgctctgcttcctggattcagccctcttcctaaggagcacagtgacaatccagactcagcggtgtttagagacttggaaagag

SEQ ID NO: 499621 - DNA, 100 bp, Homo sapiens
cgcgaagacggtaacccgtgtgactttgactgggaaacattggcaaatttggagcgacagatctatgcttttgagggaagctacctggaagacactcaga

SEQ ID NO: 499622 - DNA, 118 bp, Homo sapiens
gttctcagagaggaaattcaggaaactttgacttcggagtatttccagatttgcaaggagttgatccctgaattttattatctccctgagatgtttgtcaacttcaataattataatc

SEQ ID NO: 499623 - DNA, 80 bp, Homo sapiens
cttgctcgtgcactttacacacatgagtgctggtcccaaaggcgataacatctatgaatggagatcaaccattctagggc

SEQ ID NO: 499624 - DNA, 100 bp, Homo sapiens
acttatagatcttctgcactgtttacaggcacagggctgcttccaaccttcaatttgtaaaaaaaccagaaaacctcaggatccacaaagtatcatcaaa

SEQ ID NO: 499625 - DNA, 100 bp, Homo sapiens
cgtcgagcttgcgctctttgctgccgccttcctgtgcggggccgtggcggccgcggcgatgactcggacccagatcctaagtgtgaacgtgaagtcccca

SEQ ID NO: 499626 - DNA, 98 bp, Homo sapiens
gggaggtggaccggagctcgtccagctgcgtgcctagatgccatggacaatattaccaggcagaaccaattctacgatacccaagtcatcaaacaaga

SEQ ID NO: 499627 - DNA, 78 bp, Homo sapiens
ttcattcttgaagtcagtgagaccaagaacccaccaattccggacacggccaaatttgagtttcatcatggtgactat

SEQ ID NO: 499628 - DNA, 82 bp, Homo sapiens
cccactccctgaaatctggagtgaagaacgccgccatccagccaccattccaaggctgtggatgagatgaacggaaaggagc

SEQ ID NO: 499629 - DNA, 50 bp, Homo sapiens
gcgaaaacatgaccgctgagcccatgaggccggaaggtggtggtcgtacg

SEQ ID NO: 499630 - DNA, 82 bp, Homo sapiens
gttcccgggacccctggccaaacggctttttttcgccaacatggatgcacagccaatgatgccaacaccaaatataatagcc

SEQ ID NO: 499631 - DNA, 90 bp, Homo sapiens
caaagcacaggaatctcactctgttaaagctggtctgttctaactgaggtagtgggcagcagtcagtgacaggtgtaacctctgtggatg

SEQ ID NO: 499632 - DNA, 51 bp, Homo sapiens
tcgaagtgtgtgccactgtttataccagactgcttttcaggaagccttgga

SEQ ID NO: 499633 - DNA, 75 bp, Homo sapiens
agccagtggtgacatcaacacaagtatccaagctctgacacaggtcaatgagctgaaggagaaaggcaacaaggc

SEQ ID NO: 499634 - DNA, 75 bp, Homo sapiens
ggaacaacaaataaaccctcaggaagtcttagtgcagcggacaaggcaaaatctcagcaagttcggacctctagt

SEQ ID NO: 499635 - DNA, 100 bp, Homo sapiens
acagacgctgccatatatgtcacagtacactgaaaaggagccagcaggtgtgggtcctgtggtagctggagtgttggtggccatcttggtgctggcggtc

SEQ ID NO: 499636 - DNA, 88 bp, Homo sapiens
gagagcgcgaatatcgtcatcgttagaagagccctcatcctgcaagtctctcggaaacacctccctgagtggcccctccatccactgc

SEQ ID NO: 499637 - DNA, 100 bp, Homo sapiens
gacacctaggctacctgggctaccccaccctctgtgagcaggaccaggcccatgccatcacaggttcctgcgtgaagaccagctgggagcccactgcctg

SEQ ID NO: 499638 - DNA, 75 bp, Homo sapiens
cctcggacaagcacagataatgaagactttccatcaaggaaggctgtgctctagcccacctgaccctgtctgcaa

SEQ ID NO: 499639 - DNA, 97 bp, Homo sapiens
ttagtggaaaagctgagaaagtttcgttttcgcaaagaaacgaacaacgctgctattataatatatcctttcgggctctgatgacttcaacctgtac

SEQ ID NO: 499640 - DNA, 90 bp, Homo sapiens
cttgccggctcctgctcttgaaacacacccaagtgcaatgttcaatagccagtcttggtgctctgtgttcacctggttcatctgaggagc

SEQ ID NO: 499641 - DNA, 97 bp, Homo sapiens
tggagcacagtgtggagggtgcccagcgcgccgctgctatcgcgcgccagaaggccgagattgccgcctccaggtttctgtggatcccttctgaagt

SEQ ID NO: 499642 - DNA, 97 bp, Homo sapiens
atgatcagtagcaccagtgtttatgttgcagatctgatctcttctgaacacctcatcgtgtctccatccctgggaatctgaccctagcaactggacc

SEQ ID NO: 499643 - DNA, 51 bp, Homo sapiens
ccaacacccccaccagctgggcctcgggaacaatgcctcgaagttgctcct

SEQ ID NO: 499644 - DNA, 100 bp, Homo sapiens
tgagtatgatgttggctctaagtattcatatgaggcctacgtcaaattcatacatgtcgaatatcaaattggggaagctccctggggaagggaatgcagg

SEQ ID NO: 499645 - DNA, 99 bp, Homo sapiens
atccatctaaagcaccagtaaaatatggtgaactcattgtcttaggaaatgaagctgttgtcatttctggaaggaaactggcccagcagatcaagcagg

SEQ ID NO: 499646 - DNA, 80 bp, Homo sapiens
gactccaaatggttgaaaacagatatacaggcaagtgtcaattgaggagggagagaggaaagccaaagagctgaatgtta

SEQ ID NO: 499647 - DNA, 99 bp, Homo sapiens
aactccaagactgtgttcgggagtccttggaactgtggtccatggtaaagttttacagttttccacctatttccctggatattttgatggtcagtactg

SEQ ID NO: 499648 - DNA, 100 bp, Homo sapiens
gccttccacgtccgccggaccaaccgggttaaggagtgcttggcaaaaggcaccttctcaggtccagattcggccttggaatctcagtgacagtgacttt

SEQ ID NO: 499649 - DNA, 100 bp, Homo sapiens
ttcacaggaatgacagcatctatgaggagccaagagtcgaagctaaaccagaagttcaatctcagccacctcgtgtgcgtgaacaacgacctagagaacg

SEQ ID NO: 499650 - DNA, 95 bp, Homo sapiens
ctatcctaggattacctgaaggtgaaacagattgagccagaaggaagacaatgctgattcctagaggggagtgcctgcgagcctcgggtgagcct

SEQ ID NO: 499651 - DNA, 100 bp, Homo sapiens
attcagaaaaagatgattgacgctttatggaaattcttgaagcccaatactccactggaatctcggatttctaagcagtggtgtgaaattggtttccaag

SEQ ID NO: 499652 - DNA, 100 bp, Homo sapiens
cttcagcttttggatccattacaggcccagcccactgggagccaaggtggtgccccagcagatcacgcacacttctcctcggatccagccagactaccct

SEQ ID NO: 499653 - DNA, 114 bp, Homo sapiens
gaagccaaaaagcattgctggtatttcgaaggactctatccaacctattatatagccataagtgtgatccttggtgacaggtggaagaaaatgaagaatgaagagagaagaatg

SEQ ID NO: 499654 - DNA, 90 bp, Homo sapiens
ctaaaatgaaagaaaccgctgaggcttatttgggaaagaaggtctatgttaacaatgaatgggcaaccagtgttggggaaggagggagct

SEQ ID NO: 499655 - DNA, 98 bp, Homo sapiens
ctgacatggtcatgagctttgtcaacttagaatggaaacagactgtaatcccatggagctaagcagtatgtcaggatttgaagaaggttcagagctga

SEQ ID NO: 499656 - DNA, 74 bp, Homo sapiens
aggccctggccgccgcctgcgaggcgctgcgagcaggtacatgtgaagattttttggcagcttagcgtggaaac

SEQ ID NO: 499657 - DNA, 100 bp, Homo sapiens
gccttttgtccctttgcctcatcccaggttgccttggaaaatgccaacgccgtgtctgaaggacgaaaatgatgatgacgatgactggaacccctgcaaa

SEQ ID NO: 499658 - DNA, 100 bp, Homo sapiens
gccgagtggggctggaaacagacccggcgcccagcggtagccctccttgcgcctccgattcccagatggactagaggcttttaccagatttcttaaaact

SEQ ID NO: 499659 - DNA, 83 bp, Homo sapiens
cgcccgtccacacccgccgccagggatacccacccaccatcccagggtctacaacatccacagccggaccgtcacccgctatc

SEQ ID NO: 499660 - DNA, 83 bp, Homo sapiens
tgatgtattttgtgatcgcagcgatgaaagactacatgaggaaataattgacttttataacttcatgtccccttgtcctgaag

SEQ ID NO: 499661 - DNA, 100 bp, Homo sapiens
aagaatgacagctgcctacatctgaaacatgactagacgcttgaagcaaagctgccatcccagaagacgacatgctctcagcaacccccctgtatgggaa

SEQ ID NO: 499662 - DNA, 98 bp, Homo sapiens
cggaaaacctgatcccaaaattattgaaaacactcgaaggtatgacatgatgggaagaaatcagactgctgtgagagaagagatgattctcctggcaa

SEQ ID NO: 499663 - DNA, 75 bp, Homo sapiens
tcagctgtaccagcttcctgatgcagctcttcagtgggtcatctgtgtgtcacagcctcagaagaccagcgagat

SEQ ID NO: 499664 - DNA, 50 bp, Homo sapiens
agaatcttttatggggggcttcctcacacaggtattcaggaataccagga

SEQ ID NO: 499665 - DNA, 99 bp, Homo sapiens
ttcctcaggagtcatttctgttccgcacaggcctgctgaactgggtgctttatataggacaaatcttcctattttcaagctgaaagaatctactgttag

SEQ ID NO: 499666 - DNA, 83 bp, Homo sapiens
gacaggaccatcgactatgaggcctcaaggagctggagtcccaggtgtcgggtctggagaaggaggccatcgagctcagggag

SEQ ID NO: 499667 - DNA, 96 bp, Homo sapiens
ctcacacgacgtgcgctatgggtcagacctcgaagtagggggaaaactgcagtggaagatgaggacagcatggatgggctggagacaacagaaaca

SEQ ID NO: 499668 - DNA, 100 bp, Homo sapiens
agatgaaagctttgtatgaacaaaaccagtctgatgtgctccagggagcagtgtcagggccagggagacgatggtctccgtgactatgggtgagtctgtg

SEQ ID NO: 499669 - DNA, 73 bp, Homo sapiens
aatggcagtgggaaagtttgccttgtctacaaaagtgggaaaccaggtgctaaagagattgatatcgcagcga

SEQ ID NO: 499670 - DNA, 75 bp, Homo sapiens
tcttgaactggtgctgtctgggcttcatagcattcgcctactccgtgaagggtcccagggctggtggttgctttg

SEQ ID NO: 499671 - DNA, 100 bp, Homo sapiens
cccggcccggctcgacgccaatggggttacatcaattgcagacaggttgaatgtggaatttgctttgatccacaaagagaggaagaaggcgaatgaagtg

SEQ ID NO: 499672 - DNA, 50 bp, Homo sapiens
tttctccaatctttctacatcccagagtttactattatgcaaatgctcag

SEQ ID NO: 499673 - DNA, 82 bp, Homo sapiens
ggaagcggcccccgcagacgctcggcagcaattctgtggtgttcttggtcacacatttatggagtttctgaagggcagtgga

SEQ ID NO: 499674 - DNA, 75 bp, Homo sapiens
ccagaccttcagcccgtggcccggatgcaggacagacccctcagacacccatcatactgactccaagccccttgc

SEQ ID NO: 499675 - DNA, 96 bp, Homo sapiens
tttaacaggaacaccacttcaaaataacctaattgagttcggcctggagattctacgccaccaacctctcgcgcacagacctgcactccacgtggc

SEQ ID NO: 499676 - DNA, 76 bp, Homo sapiens
cactcgcctcacctgagcctggggggaaatttgcagtggtgagaaaatgtataaagaaagattctgggaaagaatt

SEQ ID NO: 499677 - DNA, 48 bp, Homo sapiens
cgggaggcagttgcagctttcagtgatgatgacagcctcttcatctat

SEQ ID NO: 499678 - DNA, 51 bp, Homo sapiens
ccacggggtgctgcagatcctgttccaggtatgacctggacgcgtgtgaca

SEQ ID NO: 499679 - DNA, 75 bp, Homo sapiens
ggagccctgcattcgcggcgtgtgcaggtgggaatggaagtggccccacatctcaaagaaaccctaaataagaac

SEQ ID NO: 499680 - DNA, 98 bp, Homo sapiens
gaactagatctttctgacaacaaactcgaagactggcatgaggtcaataacaacggagttgtttccttcaatgtgctagtgagccagttcacgccaga

SEQ ID NO: 499681 - DNA, 100 bp, Homo sapiens
acaacagctggcttcctcaagcagaacactgctgggagtcctaaaacctgcgacaggaagctgacccacctccatacattgatggaattcgaattaacag

SEQ ID NO: 499682 - DNA, 75 bp, Homo sapiens
gaggctctgcgacaagtacaaccgtgccatcgacagcatccaccagctggagcgcctggaccatgctgctgagcg

SEQ ID NO: 499683 - DNA, 124 bp, Homo sapiens
gcgatgccggagctggcagtgcagaaggtggtggtccaccccctggtgctgctcagtgtggtggatcatttcaaccgcaagggcaagtattttgtaaccttcccatatccatatatgaatggac

SEQ ID NO: 499684 - DNA, 89 bp, Homo sapiens
catcaacaaccctcgggactttattgattgcttcctgatcaaaatggagaaggcaccacactgtaactcgaggcatcaccaaaggcgtg

SEQ ID NO: 499685 - DNA, 101 bp, Homo sapiens
ctggcccgtcatggagatggaaaaggagttcgagcagatcgacaagtccgggagctgggcggccatttaccaggtgagcgagtgctgtgctttcatgggcc

SEQ ID NO: 499686 - DNA, 90 bp, Homo sapiens
ccagacaaaagaccgtttgtgttttgtgatggaatatgttaatgggggcgagtgagaaagatcagtctaaagaaaaggagaagaaagtga

SEQ ID NO: 499687 - DNA, 102 bp, Homo sapiens
acgaggatccatctcgtctgctccaggggcaggctggtgtatgcccacgcaggcgcgacgctggaggggaagatgtatatcacctgcggccgcagaggggag

SEQ ID NO: 499688 - DNA, 100 bp, Homo sapiens
ccaaggagttcaatcacttggcgtgacttcactacttttaagcaaaagagattcaaaccatttgccaaaaatgagtctaagtgcatttactctcttcctg

SEQ ID NO: 499689 - DNA, 90 bp, Homo sapiens
tatattccgctactttccctcttagtgtacagaagttcatggaagtattacttaattcacctctacaggaggaacataacttccccccag

SEQ ID NO: 499690 - DNA, 100 bp, Homo sapiens
aaacgtcaggaatttactacacaggtggcagtagagaagagcatcacagaagttgctcaggagctgacagagctggtggaacatcttgtagacattgtca

SEQ ID NO: 499691 - DNA, 50 bp, Homo sapiens
cttggggcaaaatgtggacaagggcccaggctgcaagcacaaaggaagtt

SEQ ID NO: 499692 - DNA, 100 bp, Homo sapiens
tctgcatctttccaacattccgtttctgctgatgtactccacggttctgtgcagctattacaattcagccctgacgacagcagtggttggagccatcaag

SEQ ID NO: 499693 - DNA, 100 bp, Homo sapiens
tagacctgcctgagttgccgttccctgagctggagcgggtgctgcaggcgccgccgccggacgtcggcaacggagaagagttttgccgaattgacaagcc

SEQ ID NO: 499694 - DNA, 75 bp, Homo sapiens
gaggaaatgagagaaatgcttacacacagaaatggtggtcgtcggttttctgagggtacttcagctgacagagag

SEQ ID NO: 499695 - DNA, 75 bp, Homo sapiens
taccagccgcaactgcgagggctggaggactacaggaatatgtggaagctgtctcttttcaacacttcatcaaaa

SEQ ID NO: 499696 - DNA, 80 bp, Homo sapiens
caggcgtgtgccaccatgcccaggtacctgaaagaattccgcacagagcagtgcccactctttgtgcaacacaaatgcac

SEQ ID NO: 499697 - DNA, 75 bp, Homo sapiens
ggtgtaccaggcgaagctggccgagcaggctgagcgatacgacggagtggagcaccagcaactgttagacctcgc

SEQ ID NO: 499698 - DNA, 90 bp, Homo sapiens
gccggaggctgggagccgcggcggcctggggggcgtttgtggtatgctggaccccgggcctggtggttctgctcctcgacggcctgaact

SEQ ID NO: 499699 - DNA, 100 bp, Homo sapiens
atcgattgaagacagaaccatttgaagaaaattccttcttggaacaatttatgatagagaataacaagcctttgtattcatttgaagataatgcagacta

SEQ ID NO: 499700 - DNA, 85 bp, Homo sapiens
ggtattggaagaatgaatctggcacatggattcagtatggagaagaggcctactgaacttgacgcactggtatttggccatctat

SEQ ID NO: 499701 - DNA, 75 bp, Homo sapiens
ctctgaacatactgccttatgggacagatcaagagtccaatgtgctgattgctgctaacagtcagggtacaatta

SEQ ID NO: 499702 - DNA, 100 bp, Homo sapiens
ttggaactacgtcttctctgcattttgtccacatgagaggattacctttccaagccaatgcccaagacattataaacgttcagattcagaacaagaaagt

SEQ ID NO: 499703 - DNA, 125 bp, Homo sapiens
acgatctatgtgaatcctgccaatacccaccagtttgcagtgggtggacgagatcagtttgtaagggaccacgggatcattcgaactctggatttacccatctatgtcacacgggtgaagggcaa

SEQ ID NO: 499704 - DNA, 100 bp, Homo sapiens
ccccgacggccgagttgacggggtccgggagaagagcgaccctcacaaacagaaactgttcatacttggtgcgctgtggactcttgtgataattaaccaa

SEQ ID NO: 499705 - DNA, 129 bp, Homo sapiens
tggaaggagatactgacactgcctcctgtcagccagtgcagtgagcttagacattccattgctggttcgatgcccagaactgaatgctgtgctccagctgtggcctcaccggtgctgaatagagaggaa

SEQ ID NO: 499706 - DNA, 101 bp, Homo sapiens
ttgtaatccagtgtgaagccaaagggaaaccgcccccaagaggtggtttgtgctccccctactgcctatatcgacttcgcccggcagaagctagatcccaa

SEQ ID NO: 499707 - DNA, 48 bp, Homo sapiens
acattttcgagtctggcactaaagccaccaaccgctaaaatgcacgcc

SEQ ID NO: 499708 - DNA, 80 bp, Homo sapiens
tgagatgatggacgccaaggcgaggcaggactgtgtcaaggagatcggcctcttgaagactctcccaggtgcctcatgct

SEQ ID NO: 499709 - DNA, 97 bp, Homo sapiens
tgcactgcttctaccctgccaaagagcttgctaaagcccttttgtgctgcactacttaaggatcagatgtggccgcccagcagttgtgcacatagga

SEQ ID NO: 499710 - DNA, 98 bp, Homo sapiens
cttacagctaactgtgtgccttagaaaccaggcctgtatccggtgtccgaggcgaactcagtaagatgatgttaagaggaaacctgaagcaagtgcgc

SEQ ID NO: 499711 - DNA, 85 bp, Homo sapiens
agactagctgctaccccaagcccgggagcttctcagaaatgtgattgataacagtaaagccacactcctcaagtgcctgaaatac

SEQ ID NO: 499712 - DNA, 90 bp, Homo sapiens
gctagtgggcgcagaagcgttgtcactgcagcaactgctggttcagaagcagactctattcatggacatagtcagttggataaaagaccc

SEQ ID NO: 499713 - DNA, 100 bp, Homo sapiens
ttcctagttggcattgaaggttcactcaaaggcagatctcacattcttgaaggtggcattgaagagcactaagatcggaagatgagtgagcttgaccagt

SEQ ID NO: 499714 - DNA, 75 bp, Homo sapiens
gtgttggggacccaaagaaaaaatacacaagatttgaaaaaattggtcaagggattcttaatcattcaacttctg

SEQ ID NO: 499715 - DNA, 100 bp, Homo sapiens
gcagcatataagccaggcatgtctcccgaggagtgcaggcgcttcaccacagacgaattatatccagatcgagagacagaagattctgaaagggttcaat

SEQ ID NO: 499716 - DNA, 131 bp, Homo sapiens
gccagggacctgcttggccagcgacagatcctttgctgctctgtctgccggttcttgagttgctgtggttggctgataaatatttgtcgaagaaagaaagagctgaaagctcgcacagtatggcttggatg

SEQ ID NO: 499717 - DNA, 51 bp, Homo sapiens
cgctgctgctgcccggcctcggggagtctctgagaacaagccagccagagg

SEQ ID NO: 499718 - DNA, 100 bp, Homo sapiens
cgcggacggcgcacgacgagtactggcatgcgcacgtggacaagcagtggacgtcagctcagcgaggtcttcatccagctgccctcgcgaaaggagctgc

SEQ ID NO: 499719 - DNA, 114 bp, Homo sapiens
aagcagttcagaagagccaaggaataaacatgcaatgaacccaaaagggcttattgtgtaacagaacctggagcaggctctgatgtagctggtataaagaccaaagcagaaaag

SEQ ID NO: 499720 - DNA, 75 bp, Homo sapiens
aaaaatgaattcatctcagaatactgtggagagctgagtcagtgctgattctctcaaatagagcttgaaggataa

SEQ ID NO: 499721 - DNA, 100 bp, Homo sapiens
cccggctgtgggggccccactgagtatgtcggaggagagcgacatggacaaagccatcaaggccaccagcccctcgggttccaagatgcagctactggag

SEQ ID NO: 499722 - DNA, 100 bp, Homo sapiens
atcagccgaaattcagatcgatttgtctcaatgaaggttgatttcatcagactaaaaagttacaggagttacactgttagaccttatgatagccaagata

SEQ ID NO: 499723 - DNA, 76 bp, Homo sapiens
aacctcaagatgtggatttaccttatcccctcaacaacttttcagtggcaaaacatacaacctcctcttcagtgtc

SEQ ID NO: 499724 - DNA, 82 bp, Homo sapiens
ttgtagcaagaagactggagaagagattctgccagcttatttatccaggtagcccctgaagaagatgaaaggaaaaagaggc

SEQ ID NO: 499725 - DNA, 83 bp, Homo sapiens
tccgccatgggctactcagtttacagccactgcagtatcacagccaggtgcccctgggcgctgggattgctctagcctgtaag

SEQ ID NO: 499726 - DNA, 100 bp, Homo sapiens
ctgcaactcgagccaagaaagtgaagatggccaccaaatcatgccccgagtgcgaccaacagaatccacctcacttaaatgggactggaccattgaaaga

SEQ ID NO: 499727 - DNA, 90 bp, Homo sapiens
gcttcaaccccaggggaccagaggaactcagccctgattgcggtgcaaacagctgcacagcaagtggcagaggataaatttgtttttgac

SEQ ID NO: 499728 - DNA, 100 bp, Homo sapiens
cagagggaaaaaggagaaagttaactgaattggtgacacttcgggtctctcacagaggaagggtctctattccaatgtggcctgtccaggtacagcattg

SEQ ID NO: 499729 - DNA, 100 bp, Homo sapiens
gcccgccgctcctggcgctgctggccgcgctgctgctggccgcacgcggggctgctgcccaaggattggattcagcatcaaaatacatctactcatattg

SEQ ID NO: 499730 - DNA, 100 bp, Homo sapiens
agaggtgccatgaatttgttactttttcttgtccgggtgcggataagggacccgacactgatgatcaccattcccgtgcagaccttctccaacctgcaga

SEQ ID NO: 499731 - DNA, 95 bp, Homo sapiens
ttgtgagctggttaagaagtttttagatccaaacaactattccgcaaactatactgattttgtggaagtataatactttgtcattatgagatgtc

SEQ ID NO: 499732 - DNA, 100 bp, Homo sapiens
aagacgcgcctcagcgtgtcgggcgaggtgcggttggtcaaagaaaaagtgatgtatgaaaaagaggcaaaacaacaagaagaaaagattgaaaaaatga

SEQ ID NO: 499733 - DNA, 80 bp, Homo sapiens
tcaaattcaacagaatcctctgaaacttccacagcttggaagtctttttgcatgttactgttccactgaagtcactcagg

SEQ ID NO: 499734 - DNA, 100 bp, Homo sapiens
cgcaagaagcagagccgcgtcacggagcaggacaaggccatcctggattttttatcaagcagaaatgcatcgaacaacgagaatcaagatcactgagcta

SEQ ID NO: 499735 - DNA, 100 bp, Homo sapiens
cccgagttcgctgccagccccaagaaggagaccctcatccagctgatgcccttcttcgtggggatatgagactttctactcggaatatcctgagtgttgc

SEQ ID NO: 499736 - DNA, 100 bp, Homo sapiens
cggagtgggctgcagcccccagcagccgagaggggccccggccacagtgaccatggtgatttgccatacggatgggaacaagaaactgatgagaacggac

SEQ ID NO: 499737 - DNA, 98 bp, Homo sapiens
tgcggtttccggctgcaccgcggcatgaatgtgcccttcaagcgcctgtctggatgagaacaagttgagcagtgccaacggccatgaagaacgtagca

SEQ ID NO: 499738 - DNA, 100 bp, Homo sapiens
ccgggagatcccaggcggtgacagagtggagccatggctagaggaccatggccaacctggagcgcaccttcatcgccatcaagccggacggcgtgcagcg

SEQ ID NO: 499739 - DNA, 90 bp, Homo sapiens
ggagagggcccagttgctggaagagcaagagaagaccctcactagtaaacttcagggtgaccctaagaatgactcctggatctttgccct

SEQ ID NO: 499740 - DNA, 100 bp, Homo sapiens
cattggctcccaggtgtctgagcacagcatcatcaaggacttcaccaagcagatcaccggcgtaatcaacccagcgttggacaaatactttccgtcagac

SEQ ID NO: 499741 - DNA, 99 bp, Homo sapiens
taagctggtcatcattgagagcgacctggaacgtgcagaggagcgggctgagctctcagaaggctggcaggctgggaaccacagcgccttctggggcat

SEQ ID NO: 499742 - DNA, 100 bp, Homo sapiens
tgaggcccggcggtcgcgcctcaaccggctgtacggaatccaagctggacccacaaaccgtggagaccaagaactggcacacggacgtgattgagatgaa

SEQ ID NO: 499743 - DNA, 96 bp, Homo sapiens
gccctctccgccgtcatggcccggcatcggaatgttcgaggctataactacgatgaaggcaaatacgccatgcgagacctagtccacaggcttcca

SEQ ID NO: 499744 - DNA, 75 bp, Homo sapiens
gttggactgcagctcgcggtttcctggcttctagagttttcaaaaggccatgggacttaagaagacggtcgacag

SEQ ID NO: 499745 - DNA, 54 bp, Homo sapiens
gaattagcagattggccgatgattcaggtgtaatggataggtaacagagaagac

SEQ ID NO: 499746 - DNA, 100 bp, Homo sapiens
gaatgtttgggcgcgaattactctaagcgcggctctcagaagggtgcaagaagaatcagtggttagcatggcctcattgaaagaactagatcaaagactc

SEQ ID NO: 499747 - DNA, 87 bp, Homo sapiens
gggttctccgggagagggggagtgcgcggcggccgcagctgccacaaaccagatcaggagaacctcagtctgacgacattgaagcta

SEQ ID NO: 499748 - DNA, 100 bp, Homo sapiens
gcccgccggcttcctgctggccaccatccttgggaccgcctgcctggccattgcgagcggcatctacctactgcgggctgacgcacgaggcacacaggaa

SEQ ID NO: 499749 - DNA, 100 bp, Homo sapiens
cagcctggggaatgagacccaaactgctcatacagaattacgcatttccacttctaatgatgtggacgagtgctcactagcagaaaaaacctgtgtgagg

SEQ ID NO: 499750 - DNA, 51 bp, Homo sapiens
gcctgggctgtctggaaatctgagctgcagaaccttggcctgaaaatgcta

SEQ ID NO: 499751 - DNA, 100 bp, Homo sapiens
taacacagcatttgttctttgtacgacttaccttacccagcagctccaaactgcaagtgtatattgttcttggaaaatgtttataggaggccttagctgg

SEQ ID NO: 499752 - DNA, 75 bp, Homo sapiens
cagaagaaattcaacagagagctcaccagattactgatgaggttatcagtgagctgaatggaaaaaacattgaag

SEQ ID NO: 499753 - DNA, 83 bp, Homo sapiens
accagctcggctacctggtactgagtgaaggtgcagtgctggcgctggatcgccatacctaccctgtggtcctcatcttcctg

SEQ ID NO: 499754 - DNA, 90 bp, Homo sapiens
tctccttcctgcgcgcgcgcctgaagtcggcgtgggcgtttgaggaagctgggtactccaaagattcaggtttactcacgtcatccagca

SEQ ID NO: 499755 - DNA, 100 bp, Homo sapiens
ccgggcatgagttagtcgcagacatggacaccaaacatttcctgccgctcgttcctccgtgtcacaaagcagtacctgccccacgtggcgcgcctctgtc

SEQ ID NO: 499756 - DNA, 100 bp, Homo sapiens
gagatcaacctgaatgaccaggtgtaaagtgcaagagtaatatgctatgactgaggctgtggatctttccattgatgagtccagcttgacaggtgagaca

SEQ ID NO: 499757 - DNA, 80 bp, Homo sapiens
ggaacgggcaatgaggcagacacaggtggtatggtcaggaaaaagactacaatgtactagtcatggatcttctgggacct

SEQ ID NO: 499758 - DNA, 114 bp, Homo sapiens
aagaggtttagtgccctcctgagtgactgcgtcaggcatctcaatcatggtcttgagtcaccacgtccgaatataattcttgggttagtaatctgccaaaaaatcaaacgtccc

SEQ ID NO: 499759 - DNA, 95 bp, Homo sapiens
ccgcgcgcagggcctgcagcgggagctggacggcgagcgcgagcggcgcgagaaagactctgctgggccgctcagccatgcctgagggagcccaa

SEQ ID NO: 499760 - DNA, 100 bp, Homo sapiens
ccattctgtggcatagttatgagctgcttgtagaatatgacttaccagcactcctggaccaagagctctttgagtgtggtcactgtcaaagattaacacc

SEQ ID NO: 499761 - DNA, 75 bp, Homo sapiens
ccaagtttctttcccaagaccaaattaatgcttaacaaacaacagttgcagttactgaaagaacggttccaggcc

SEQ ID NO: 499762 - DNA, 100 bp, Homo sapiens
ttttgggactgctgtgcctcctcctcctgtggtggaggagaaggaaagggaaagagaagaaggcgccgcccttgctggagggggcccccttgcgactgaa

SEQ ID NO: 499763 - DNA, 101 bp, Homo sapiens
agacggccgacggctggaagcgcttcctggatgagaagagcggcagtttcgtgagcgacctcagcagtgtaacctcacctccagctctcacacccttacat

SEQ ID NO: 499764 - DNA, 99 bp, Homo sapiens
agtcggagagctccagtgagtccagctcctctgacagcgaagactccgaaacaggccggaaggtggtggtcgtacgctgtgaaggcatcaacatttctg

SEQ ID NO: 499765 - DNA, 98 bp, Homo sapiens
caaaagccccttgccatccctgtgtgacagcaatgaggtgaacccaggggccgaagcccacccagggagttgatggattgacttctaaagactcttgg

SEQ ID NO: 499766 - DNA, 83 bp, Homo sapiens
ttcgatagagacgttttccggagggattccatcataggtcatcatcagatttgaaatatttaaagtggatacaaaactatttc

SEQ ID NO: 499767 - DNA, 50 bp, Homo sapiens
ctgagtctcacagcttgtaaaggttctgcggggagtgtctccagccctgc

SEQ ID NO: 499768 - DNA, 100 bp, Homo sapiens
gactccctcaagtacagtgacctgcagaacttagccaagagtctgggtctccgggccaacctgaggcatcagaggctccttgaaatgctagatacagaga

SEQ ID NO: 499769 - DNA, 83 bp, Homo sapiens
tggggctgtttggaaagacccaggagaagccgcccaaagaactgcggagctggagtttgttcagatcatcatcatcgtggtgg

SEQ ID NO: 499770 - DNA, 75 bp, Homo sapiens
actaaaacattgccagatgatcatcagggcgacccttgggcgctggagtacgcttgggactggggctgcgagtga

SEQ ID NO: 499771 - DNA, 74 bp, Homo sapiens
ggcggctgctgctagagctggagcatttgccggaaaggcctaaagaatgtatttgacgaagcaatattggctgc

SEQ ID NO: 499772 - DNA, 100 bp, Homo sapiens
gctgcccctggagcacctggtggaagaacaagtggcaggtgcagtagacattgttgcaatcatgatcggcaatctgaaaggcacaaaaattctgcaatct

SEQ ID NO: 499773 - DNA, 100 bp, Homo sapiens
cccggctttacgtggatcagacactgcgagagcgggaggctggcaccggtccttgaatgggcaagagggcacatgaagtacggcgtcctccacattcacg

SEQ ID NO: 499774 - DNA, 100 bp, Homo sapiens
caacaatgagattagaagtgtgaaaagattgcagctgctaccagaatcttttatttgcaaagagaaactaggcatagaatgtcaagctaaccaggcgtcc

SEQ ID NO: 499775 - DNA, 100 bp, Homo sapiens
ttgggattttaaagaaaaatgatccctactctgttaaaagaaatgtggcaagaaccctaaatagtcaacctgtgtttgaatatatacttcattgtttaag

SEQ ID NO: 499776 - DNA, 100 bp, Homo sapiens
tcctgcaacagttggagattgagttcaaggagacccaagcactagtattggcccccaccagagaactggctcaacagatctcactgatgaaaaggcctcc

SEQ ID NO: 499777 - DNA, 75 bp, Homo sapiens
tttggagttcttacaacatggcagacattgacaatctttaacacctctgtgtgaagatgacaaccaggcacagga

SEQ ID NO: 499778 - DNA, 74 bp, Homo sapiens
gtatctatgcctatgataactttggcgtgctgggcctggacctctggcagaacctcaagaaggcatgaagccag

SEQ ID NO: 499779 - DNA, 82 bp, Homo sapiens
tggtttttcggatcatgtctggtggctccgcggattataacagaatccaaaggactgcatgacacaccataggatatagtca

SEQ ID NO: 499780 - DNA, 98 bp, Homo sapiens
agtataatggcaacctgcaagacttaaaagtaggagaaagtgttgtgaagagcgaagacttttcgctcccagcttatatggatcggcgtgaccacccc

SEQ ID NO: 499781 - DNA, 75 bp, Homo sapiens
tggtgctccatttgaacataaggtgccaatgggtcatgtttggttagaaggtgacaatctacagaattctacaga

SEQ ID NO: 499782 - DNA, 75 bp, Homo sapiens
ctgcagacccagaccgccaagctgcagcaaactgaaaccgtgtcagttcagtcttcggtattggggaagggtgta

SEQ ID NO: 499783 - DNA, 75 bp, Homo sapiens
tggagatcggcagagacaccttctggcccgactgtgccctgtccacggtgcctcctgcatgtcctgctgccctga

SEQ ID NO: 499784 - DNA, 97 bp, Homo sapiens
aaagcagcaagcctcggcagcagtcaatcctccagaacctatgctggtggaacagcctcggccaccaagcttcagaggatgattccgaagaagacgg

SEQ ID NO: 499785 - DNA, 51 bp, Homo sapiens
cgcatccgagctacatatggagaatacaactcagcccgcctgcacccaggt

SEQ ID NO: 499786 - DNA, 101 bp, Homo sapiens
aagcaatttaatgatgaagaaactttgctacagcctcctttgaccagatccatgactgttggtgcaccttatgaaatatgccctgaggattatctgatgtc

SEQ ID NO: 499787 - DNA, 83 bp, Homo sapiens
aaagaattcaaggccaaggaagctgcggtatgggcggagctgccattgccccacccacttctctggtagagaaagacaaagag

SEQ ID NO: 499788 - DNA, 90 bp, Homo sapiens
cagaaggactgcctcactgagcaaccaagatgataccaagaagaagcaggggatgaagaagaggagcaacagtgaagtggaagacgtggg

SEQ ID NO: 499789 - DNA, 75 bp, Homo sapiens
ccaagctcggatccctgaatttgatccaggcagcacgctggctcttctcctgaacttcctcgcctgcctggccag

SEQ ID NO: 499790 - DNA, 118 bp, Homo sapiens
gcggttcgagctggcccaggaggaataccagcagctgcacaaaatgtgtgaggatgacagccgctcgtacgccagctcaggcacagctgtttggtctagaaatggaggacaggcctca

SEQ ID NO: 499791 - DNA, 98 bp, Homo sapiens
ttcagacagcatatttgagtcatttccttcgtacccacagtgcttcatgagagaatcctggtaattgatgtccacccgagaaatccctgcagatgttc

SEQ ID NO: 499792 - DNA, 75 bp, Homo sapiens
ttggcgacattgacaatgatggctttgaaggtctcgatctagaagacggtcacgaagtaggagtcgcaggagcag

SEQ ID NO: 499793 - DNA, 75 bp, Homo sapiens
gaagacgtggccgaaatgcacaacatcctgaagaaataccaccaggtatgatgatattctgatcaatggacttcc

SEQ ID NO: 499794 - DNA, 51 bp, Homo sapiens
gagccaaactgtccaaggctttggcagaggaggtgcgccagtctgtaactc

SEQ ID NO: 499795 - DNA, 98 bp, Homo sapiens
tcagtgcccgggaggacagaggaggccacagtgatgacctgtacgctgtgccacacagaaatcagaaagcatgctctgaattgccatcggatgaagcc

SEQ ID NO: 499796 - DNA, 90 bp, Homo sapiens
cagaagaagccctggagaatggaccaaaagtcaccgttacttcatccccaatccgaggagcaggagatggaatggaaactgaggaaccac

SEQ ID NO: 499797 - DNA, 130 bp, Homo sapiens
ctgcaacctggctgtacagctcctcaagtgcaacaagtcccacttccgaaaccacaagtttgccgatcatgaccctctggtgcctctgtcggcctccatagagctcatcctggtggaggacgtgagggtg

SEQ ID NO: 499798 - DNA, 101 bp, Homo sapiens
tcagagacctaagctttttccagagaagagaagctttactggtgttccagccctaagcatggaaataaccagcctgcaagaactggcacactgtcgagaac

SEQ ID NO: 499799 - DNA, 74 bp, Homo sapiens
aaaagatgatagctttagttgctcttttggttgaacagtctcgatcagaaagtaatctatgccagcaattatga

SEQ ID NO: 499800 - DNA, 100 bp, Homo sapiens
gtggcccagtcttaccgttcagtggcttcctgaagtgactaaatccaggtccagagagcatcgcagacatcgatctcgctccatgtcacgtgaacgcaag

SEQ ID NO: 499801 - DNA, 90 bp, Homo sapiens
ccgcactgtcgctgcccgcctgccctgaggagtccccgctgcttggggagtcctcagcactgcctcttctatttccctgtggaaacctca

SEQ ID NO: 499802 - DNA, 100 bp, Homo sapiens
tgggaaatagtaaccctgccaaatacatcagcttgtaggagacagagaatgatctctgcctttcacaaagaccacctttgtgcatccatgcctactcttc

SEQ ID NO: 499803 - DNA, 100 bp, Homo sapiens
atgaggtttggggagaggaatttgagaaactatatgcaagatcaccggggaacccttgatccgtcgatcagatgataatgaaaaggccttgaaaatccgc

SEQ ID NO: 499804 - DNA, 83 bp, Homo sapiens
ctggaaaaacttcttgccaaccaaagttgagcaatgtttaaagcgtttgaaaaacatgaatttggagggctcaattcaagacc

SEQ ID NO: 499805 - DNA, 83 bp, Homo sapiens
accggggactcaggagtgcccgcgccctgagcgctcagctccagaggcgtgccacaccagaggaatataatacagttgtacag

SEQ ID NO: 499806 - DNA, 98 bp, Homo sapiens
ggggacgccagcaagtgcactgtcacaggaagctggagaagcttcgagagaaggagcgtaagaaggaagccaagcggaagatctccagcctgtccttc

SEQ ID NO: 499807 - DNA, 101 bp, Homo sapiens
tgtcggtcgcagccgtcgtgcggtggatcgcgcgcagcacccagggttcggaggctattttcaaaatgatcactcccgaggacgtgaagctccttccagac

SEQ ID NO: 499808 - DNA, 75 bp, Homo sapiens
gggtcctcgtggatcagactacagcttcatcgcagtaggaatggcagccccatctatgaaggaaagacaggtctg

SEQ ID NO: 499809 - DNA, 100 bp, Homo sapiens
caaccttctgtgagcctagggacccatttctcctcctttgacagggacatcagtggagccttctcagacccacaggtggagttggcatgaacttaacagc

SEQ ID NO: 499810 - DNA, 100 bp, Homo sapiens
cattaatgtcaacaccagccttgaagacatgaggagcaacaacgttgaggactgcaagatgatgggtggtggccttgtccatgtcacctgtggatgacac

SEQ ID NO: 499811 - DNA, 100 bp, Homo sapiens
cggagccccggctcgcccgtgtgcagaggcatgaatcatacaaaactcaatatagagcaatgtttgtaatgaattgttctattaacaaagaggaggttct

SEQ ID NO: 499812 - DNA, 90 bp, Homo sapiens
gggcagccgagaaggtgtccgaggcccgcaaaatgctcccaaatgtgtcagaagaaacagtgtctcccaccagagcacggaacatgaagg

SEQ ID NO: 499813 - DNA, 107 bp, Homo sapiens
tgggggctgccagtgctaccctgagaaaggtggacgtgtggaagttgatgggtcgaaactaaatgtgaccagcacgtggaacctggcttcgcccttattgtctgtca

SEQ ID NO: 499814 - DNA, 100 bp, Homo sapiens
aggcccccaggacctccatctcccaatgttggagagccaagaaaatgatgagctaagagatgcccatgaaaaacgcaaggaacggctacagatgttacag

SEQ ID NO: 499815 - DNA, 83 bp, Homo sapiens
gtccggatgagatcgcacttcctgcagtgggcattagccacgtccagtaagactttgaccccgacgcaggcttcagtgattgc

SEQ ID NO: 499816 - DNA, 90 bp, Homo sapiens
caaagagaggtggaaagagttagctgcacaaggttgccacagttttgatgatcatctctctcccaaccaagatggtggaaaaagcaaaaa

SEQ ID NO: 499817 - DNA, 100 bp, Homo sapiens
gtggagttggactgaatgctgcacagttcaaacagctgcttatttcggctgtgaaggacctgtttggggaggatgagagtagtgaagaagaggaagaata

SEQ ID NO: 499818 - DNA, 75 bp, Homo sapiens
ggctgctggtggagctgaacaagatccctaccgtgcgcgccttccttttggcaagataacccctgtgacagaagg

SEQ ID NO: 499819 - DNA, 98 bp, Homo sapiens
tctgtccccggactgggagtttgaccgcgttgacgacggctcgcagatgagaaagatcagtctaaagaaaaggagaagaaagtgaaaaaaacaattcc

SEQ ID NO: 499820 - DNA, 101 bp, Homo sapiens
gtctttttgttcaagataaagtgattttttgcctttgttgattaactggacaaattcagtttgtgaagaaatatgggaacctttttagcttggagcttggt

SEQ ID NO: 499821 - DNA, 95 bp, Homo sapiens
gggtctgcagggcctgggccgccgctgctacctgcagcgccgtgtggcacgacacaaaaatcagcagtgttgtactgctacttctataaacggac

SEQ ID NO: 499822 - DNA, 100 bp, Homo sapiens
ctccatcatctccttacaaggcttcacagcagcacagatgggcaatgaagcagtgcagcagattctgagtggtcatacttacctggttgcttgcgcatct

SEQ ID NO: 499823 - DNA, 101 bp, Homo sapiens
agagcattcagctgtctcaaatgcaggaccttaaaggctttgatccaggagagaaatactttcataacacatcatggggtgatgtttctctctgggaacct

SEQ ID NO: 499824 - DNA, 100 bp, Homo sapiens
acctgctccgggacaacatgctgcggggcacagagtatcgagatcgttatgattcagaccggtatcgggatgggtatcgggatgggtatcgggatggccc

SEQ ID NO: 499825 - DNA, 83 bp, Homo sapiens
gaacaaaggcgacccaagacacccagagagggacagatttttggaagtaccagcacagtgacgcttcctgaaaccttgttgtt

SEQ ID NO: 499826 - DNA, 75 bp, Homo sapiens
ccaatcgtgaaaactatattcacaggggcaagattcttgccaagagaattaatgtgcgtattgagcacattaagc

SEQ ID NO: 499827 - DNA, 90 bp, Homo sapiens
gtggactgctctggcctgcctgacccagtgagaggcaaagaatgcaggaaatcctcattgacgattcaatttgttgaaggccaatttgtg

SEQ ID NO: 499828 - DNA, 98 bp, Homo sapiens
gcagatcgagcgctactcgcgcttttcgccgtcgccgctctccatcaaacaattcctggacttcgggccgttgctccagggagaactgcaaatatctt

SEQ ID NO: 499829 - DNA, 82 bp, Homo sapiens
atgataccttacttaatactgagtctcaggagcaggggctgcggcagaggctgctggacgagcagttcgcagtgttgcgggg

SEQ ID NO: 499830 - DNA, 75 bp, Homo sapiens
caccgggtcttatgcacagaagtatggcaaggcaagaaacctattggaattcgagacttaattaatgaagctttg

SEQ ID NO: 499831 - DNA, 90 bp, Homo sapiens
caggcactggagctggtggtgcaggaggtctccagcgtgctcaggtcggcggaggagaagctgttaggcaattttcttcagtggtatggc

SEQ ID NO: 499832 - DNA, 100 bp, Homo sapiens
tgccacggctgaaccctccttctcaatcttggaacagcacccccttctttaagcttggatttacactgggcaacgtggttggaatgtatctggctcagaa

SEQ ID NO: 499833 - DNA, 100 bp, Homo sapiens
ggacaccgcagtgtgcttgaggagacttcagaaacgagaactggtgccacttcggataaaccctttggactcctaactccaatcaggtgtctgctttgtt

SEQ ID NO: 499834 - DNA, 83 bp, Homo sapiens
ctgctcatcaccaaggccaagaacgggcacctggctgtggcccagctcatcgcccaggccattggccaggccttcgccgccgc

SEQ ID NO: 499835 - DNA, 88 bp, Homo sapiens
gccagcagccgtccggagccagccaacgagcgggacagagcagaatgggctgatatagatccggtgccgcagaatgatggccccaatc

SEQ ID NO: 499836 - DNA, 75 bp, Homo sapiens
tattggattcataacctgctccatgcttgaaaacatggggattggaattcggatggctgacttcaggctgcggaa

SEQ ID NO: 499837 - DNA, 90 bp, Homo sapiens
ctggagagaaatcctacaagtgtgcagcaaaccctctgctttgctccaccgcccgctaccactgcaagaacggcctctgtattgacaaga

SEQ ID NO: 499838 - DNA, 100 bp, Homo sapiens
gctctccttcaggataaggacgtaattgccatcaatcaggaccccttgggcaagcaagggtaccagcttagacagtgcagtgctggagttcgtgggtgac

SEQ ID NO: 499839 - DNA, 101 bp, Homo sapiens
gaaatccttgggtttgaagatgatgttgtgattgagtttatattcaaccagctggaagtgaaggagtttggatcataatacaagagaagcacagggcaaag

SEQ ID NO: 499840 - DNA, 83 bp, Homo sapiens
tgggattacaggcgtgagcctccgcgcccggccgggactggtgattgcagctggaagtgcccatgaccgagctggcgtcctcc

SEQ ID NO: 499841 - DNA, 100 bp, Homo sapiens
agatcaggccaagtttggaatcactgggaacaggatctggacttggcacatttcttttaaaggtgcttgaagacgaattcccagaagtatacagatttgt

SEQ ID NO: 499842 - DNA, 100 bp, Homo sapiens
aaaaggaagtattagaaatgagctgaagaccattcacaggaatggtttgcagtgtatgtggaacttaatcagcaaattgcagcactcttgaatgctggcg

SEQ ID NO: 499843 - DNA, 83 bp, Homo sapiens
cagagaagtgcccgaggagagttaacagataacgaaggaggcccaacttcattcaataaggagcctgacggatttatcccaga

SEQ ID NO: 499844 - DNA, 76 bp, Homo sapiens
tcctatatctcaaaccacttctcagacaagttccatcccacctttgagtcaggaagtccccatgggctgcagggga

SEQ ID NO: 499845 - DNA, 90 bp, Homo sapiens
gttccctgactcggagtcttagtgtgtctaaagatgacggcgccttgaggtaagctacaggcaacaccacttccgcgtttctcttgcgcc

SEQ ID NO: 499846 - DNA, 82 bp, Homo sapiens
gagattggggccatgccaaggactatgtggagcaaaagactgttgaagtagagagcattttgcccagctcactcggattctt

SEQ ID NO: 499847 - DNA, 50 bp, Homo sapiens
ctgctggtctcctcacagctgggccccggatttggagcaagaggtggtgg

SEQ ID NO: 499848 - DNA, 75 bp, Homo sapiens
gagatgcgaaacaagttgcagagctacgtggacgcaggaactccaggatggggaaagacaccatagtcataaaag

SEQ ID NO: 499849 - DNA, 101 bp, Homo sapiens
accacaatggctacgaagtaaatggtggaccatcaaaaggcaaattgcaaaccataaggatgtttcgttccctgtcaccgacttagtccagttccctgtga

SEQ ID NO: 499850 - DNA, 51 bp, Homo sapiens
ctccgtacgctgcgcccgcggcaagacggagtctccactgctggtccgacc

SEQ ID NO: 499851 - DNA, 99 bp, Homo sapiens
gatgaactgtccttccaacggggtgacctcatccgtattctgagcaagtgatcctggtggagggattgaaatgtctgagttcatccgagaggccacacc

SEQ ID NO: 499852 - DNA, 80 bp, Homo sapiens
agctctgaaaaactcttcaacactgttattgtaaacaaagtggttagcaggaagaagatgagccttaagtctgaacgccg

SEQ ID NO: 499853 - DNA, 100 bp, Homo sapiens
cttctctacagaagagcttctcctcatcaactggggatgattacagttcttcctaaaaaagattcgtattttacatggagaagtgaacaaagtgaaactg

SEQ ID NO: 499854 - DNA, 97 bp, Homo sapiens
gtcccatggagctggaggggcagtggtggcgaggacagctggccgccgatattcaccaagcgcttcgctacaaggtggacccccaaaagtacaaggg

SEQ ID NO: 499855 - DNA, 83 bp, Homo sapiens
ctgggagtaacagttctgggagggatggtctacgctattggaggtcaatgagtggtcattgaagataagaaaggaaatgagag

SEQ ID NO: 499856 - DNA, 98 bp, Homo sapiens
tcttgttgcccgtgcccttgcaatacagttgctctggctatatcaaataaaagtgtcaagagtgagcatccttgccttgtgctgaatcacaaaggaat

SEQ ID NO: 499857 - DNA, 82 bp, Homo sapiens
caaatatatatgagacttagtttttgaacggagtcattattcctctaaggtggccaaacaggagaagaagaagaagaagaca

SEQ ID NO: 499858 - DNA, 74 bp, Homo sapiens
tttaagcctgatctaacccctagaaacaggtgaccaagaatatggcccaggtgaccaaagccctggacaaggcc

SEQ ID NO: 499859 - DNA, 82 bp, Homo sapiens
gccgcggcggcagcagcagtgagagaaattcattgagtttgaagatgctctggaacaagagaagaaagagctgcaaatccag

SEQ ID NO: 499860 - DNA, 99 bp, Homo sapiens
gagctgaaggacagctgtatcagcctccagaagcagaactcagacatgcaggctgagctccaaaagaagcaggacacgcaggagaaagaaggtattctg

SEQ ID NO: 499861 - DNA, 99 bp, Homo sapiens
tgctctgacgtgctgaagaaatttgtgtggagcgaggaaaggtgtgctgtgcctgaggccagtgtaaacaggaacatcgataagtagtgtaaaaacttg

SEQ ID NO: 499862 - DNA, 100 bp, Homo sapiens
atcagtgcaagcgaaattaagggaaaatggatgtagaaaatgagcagatactgaatgtaaaccctgcaggagtgtaaagctgttaccttagctgtgcagc

SEQ ID NO: 499863 - DNA, 78 bp, Homo sapiens
cccttatgggagtccttaaaaacgaagttatacggaagcgtctcctcattgatggagatggtgctggagatgatcgga

SEQ ID NO: 499864 - DNA, 80 bp, Homo sapiens
acctgcaagctctttgacacacagcagttcttgtcagatcatccagacttgaaacatatcgacccagtggttttaaaaca

SEQ ID NO: 499865 - DNA, 100 bp, Homo sapiens
gtacgacatgatgacagctggccttttttgaaacttgtttctaaaatccagataaagatgacctctccccaactgctgaggtttgggatgtagaccaggg

SEQ ID NO: 499866 - DNA, 82 bp, Homo sapiens
tgggagatccaagagattcagtatcactcgctcccttgatgatcttgagaacccagtgacttgattgtaaaaatttacagag

SEQ ID NO: 499867 - DNA, 75 bp, Homo sapiens
caaacagaggcgctcatccacagagccacatctgttagggctggtgaattaccatatctccgtcaagtgcagtaa

SEQ ID NO: 499868 - DNA, 107 bp, Homo sapiens
tcccagagttcgaggtggtgggactcaccgctctggccagggtgcttttggaaactaatagctcttcaagtctgcaataaaaaatggcctccaacaaaactacattg

SEQ ID NO: 499869 - DNA, 49 bp, Homo sapiens
gaacaggcagcccatcaaacctggtgacgcatccaaagaagacattgac

SEQ ID NO: 499870 - DNA, 75 bp, Homo sapiens
gtgtaaatggggaagcgctgtcttctgtaaacagccgcaaagacaagtctttaagggtaatgagccagaaatttg

SEQ ID NO: 499871 - DNA, 98 bp, Homo sapiens
ttggacctgaaacagaaattctggaacacctatatggggctgttgaaagttgccatagataatgccagagctcaagagaaacaggtccaactggaaaa

SEQ ID NO: 499872 - DNA, 100 bp, Homo sapiens
ctttgatgtgcgtgaaattgtaaataacatcaggcgtttgatggatggagaagaacctttgccaatggtttattacagaggtcagctgggaagagctacc

SEQ ID NO: 499873 - DNA, 88 bp, Homo sapiens
tgatcatctttgcctgggaagttgaatgataaagccagaagaaagcatgctttctgatcattatgagaagggcgagctgctgaacccc

SEQ ID NO: 499874 - DNA, 74 bp, Homo sapiens
gaaagcaaagaagaaagcttctaatgggaagtgatacacctgttgatgcacagaggcctatcggcagtgaaatc

SEQ ID NO: 499875 - DNA, 97 bp, Homo sapiens
ggtgaaggtccggggcttgccctggtcttgctcggccgatgaagtgcagaggtttttttctggtgccgacttcctggtgacggaggtggaaaatggt

SEQ ID NO: 499876 - DNA, 100 bp, Homo sapiens
ttcacacaaagaaaattgctcactttgatctcaagatgtctttggtggacttgggaaagaggttgctagaagcagcaagaaaaggccaagatgatgaagt

SEQ ID NO: 499877 - DNA, 100 bp, Homo sapiens
aaaaaggtagcatcgagtctctgcgaacattccttttaacctatgtcttacaaaggcccaagctgaaaggttccctgagtcgaggtgactggtacaagac

SEQ ID NO: 499878 - DNA, 75 bp, Homo sapiens
atccgctgctgctgaggagaggagcgtcaacagcagcaccatggtgtacagtattttctccaaggtacactccga

SEQ ID NO: 499879 - DNA, 100 bp, Homo sapiens
tcaagatcaagaggcacacgccgctgagcaagctgatgaaggcctactgcgagaggcaggccaggcagcagcgttcaacgtgaccttccggcgggccaag

SEQ ID NO: 499880 - DNA, 82 bp, Homo sapiens
aacacttcagatatggaagctgtggtttactcctggcttgggggcattaggaagcactggaggctcttcgggaactaatgga

SEQ ID NO: 499881 - DNA, 140 bp, Homo sapiens
ctccttgaagttcgtggaaggctgtatgagcttctaactcattgtattcctcctgagataataatgaagggcgccaatgcttcggcattagagaaagagattggtccagaacagtttccggtcaatgagcactattttgg

SEQ ID NO: 499882 - DNA, 125 bp, Homo sapiens
atgtctcgctccgtggccttagctgtgctcgcgctactctctctttctggcctggaggctatccagcgtgatcgtgttgccatcgagcctggtgctccccgagaaaatgatgaattctgcaagat

SEQ ID NO: 499883 - DNA, 75 bp, Homo sapiens
cgactcagtggaacaatcttttgttggattgaaacagctaatcgcaatttgaatcaacccatagaagtgacagcg

SEQ ID NO: 499884 - DNA, 90 bp, Homo sapiens
accaccaccaccaccacagagtctgtggaagaggtggttcgagtttctattgctccaccccctccccctatgcctcagttgactccacag

SEQ ID NO: 499885 - DNA, 73 bp, Homo sapiens
ccgaacagaaacccctcctcccctagcttcactcaatgttagtaagctgaatagcattggcaattactacaag

SEQ ID NO: 499886 - DNA, 73 bp, Homo sapiens
gcagcctgaacccggggctggtgggcctttctgtgtcctactccttgcaggtggaggagaaccgccagtaccg

SEQ ID NO: 499887 - DNA, 101 bp, Homo sapiens
cgcagtggtcgcttcttctccttgtaccacctgtactctgagcctcagtttaatgtccctgaaaagccggagttggtgactttcaacaccgcatttggaag

SEQ ID NO: 499888 - DNA, 73 bp, Homo sapiens
caagcttttcaggcatcctcatataattaaacttttgcaggcctttcagatatatccatctcacaagacatcc

SEQ ID NO: 499889 - DNA, 50 bp, Homo sapiens
gtcaggccgatccgctccgctcacggaatactctgaagatagtaactccg

SEQ ID NO: 499890 - DNA, 50 bp, Homo sapiens
gtggagaacttcaaccaggcactcaagaaagcagagtgagggcactcact

SEQ ID NO: 499891 - DNA, 82 bp, Homo sapiens
ccgtagacaccagctccgaaatcaccaccaaggttttgggatttgagattgacgcggtgaactctgtccagttttcaaacca

SEQ ID NO: 499892 - DNA, 100 bp, Homo sapiens
ggaatggacttcggaccctggcctcttgggatgcaaagatgccgacaaaaggatcaaggtggcgaagcccgtggtggagatggatggtgatgagatgacc

SEQ ID NO: 499893 - DNA, 50 bp, Homo sapiens
aagctcacagctctaacgtaaggcgataacgaaggaggcccaacttcatt

SEQ ID NO: 499894 - DNA, 100 bp, Homo sapiens
gcggcctctagctcgagcagcaggagcagcccgcaccggacaacttgcgagccatggggctggcggatgcgtcgggctgaagtcttttcacaacgagctg

SEQ ID NO: 499895 - DNA, 50 bp, Homo sapiens
cggcgctagcccagcccgacccagataacgaaggaggcccaacttcattc

SEQ ID NO: 499896 - DNA, 50 bp, Homo sapiens
ctgttctccaggagtttggtagagtcctggacccaagccagaagcctctg

SEQ ID NO: 499897 - DNA, 83 bp, Homo sapiens
cggcctcggccaccgagatcctgctgacgccggctaggtgtggacgaatgtggaacctcgctctgtggctgtgttcccttggc

SEQ ID NO: 499898 - DNA, 75 bp, Homo sapiens
agacctaccggtctgtcagtgagatggcttctaacaaggctttatatgaattggttaaatgcaattttgatacag

SEQ ID NO: 499899 - DNA, 100 bp, Homo sapiens
ggcggccacccggagccagcggagggacaggcacatagggcagcccaacgaagccttaaagttcctgaacaaggcacgcaaggacagcacttggggccag

SEQ ID NO: 499900 - DNA, 100 bp, Homo sapiens
gacaaatacaaagtggtgcttgacactccagaatacagaaaagtgcaagaactgaagacacatctgagtgagggctgtcacatggtgactgaagaacttc

SEQ ID NO: 499901 - DNA, 100 bp, Homo sapiens
gtggcttgtggtgcggcctcaccatacaggaacagggcagacgttagcgtgagtgatcactctcaatcccggacagcaatggatcaacttcatatgcact

SEQ ID NO: 499902 - DNA, 101 bp, Homo sapiens
cgctgtccctgcggcttctggggtctgaaaacttagagaatacagtaatcataccagatatcaaactacatagcaatccttctgctttcaatatttactgt

SEQ ID NO: 499903 - DNA, 100 bp, Homo sapiens
ggcatctagactttggtttacatacaggaaaaactttccagccattgcagggtggcagcactggaagcatcaggaaccctggctgctctctaccctgtgg

SEQ ID NO: 499904 - DNA, 83 bp, Homo sapiens
cacctggaccttggacattcagacttcagaatgttttgcagaacactgaaatctatggactctaaaatggacttcatttaaag

SEQ ID NO: 499905 - DNA, 100 bp, Homo sapiens
ctagaactgtgtcaaaacagctgctacactaacgggcatctttgtcttgttctcagtcttaaaaagagtatccgttacagcactgatgtgagtgtagatg

SEQ ID NO: 499906 - DNA, 100 bp, Homo sapiens
acacaggatggcttgcagaagacgctatttttacaataaagaccttttagacaaggtgatggaaatggccgatgggattgaagtggaagacctgccacaa

SEQ ID NO: 499907 - DNA, 99 bp, Homo sapiens
tgcgtgtcacccacgcagacatcttcagccgctgccaggtttacccaaggtccagcctagcccctaggcaccatgtcggacagtgatctaggtgaggac

SEQ ID NO: 499908 - DNA, 75 bp, Homo sapiens
ccctttccagctttttgcctgaaagctttgcagaagctctattaccaggttttaaacttcgccatgatcgtgtct

SEQ ID NO: 499909 - DNA, 73 bp, Homo sapiens
gccagttctacatcaacgtggaacgagaggaatggaatttgaaggtgctatcatcgcacttttccatctgctg

SEQ ID NO: 499910 - DNA, 100 bp, Homo sapiens
caagcacccagcagcttccagctcctttatgacctcaaggtccaacttaaccttatggatttagtgtctgggattccagcaactcaaagtcaaaaaattc

SEQ ID NO: 499911 - DNA, 80 bp, Homo sapiens
gtgagtccagctcctctgacagcgaagactccgaaacaggctgagtttgagaaagctgcagaggaggttaggcaccttaa

SEQ ID NO: 499912 - DNA, 98 bp, Homo sapiens
tcatttctactggacttcatgcttagatacatgtataacaagacagcccacctgaggatattgaccataaggactcatatctcattacaagaagcatc

SEQ ID NO: 499913 - DNA, 50 bp, Homo sapiens
cagcaccagaagcccaagcaaaggttggagtcagttagctgctatgcact

SEQ ID NO: 499914 - DNA, 82 bp, Homo sapiens
atcctgccgtccttctccactttcgccagcccgtgccgcgagcgcggcctgcaggaggaatcccttggcaccatgtcctgtg

SEQ ID NO: 499915 - DNA, 74 bp, Homo sapiens
cttggattcgtgaacagaccacagtggaccacttctgggatctgactgcagccatgagcagcaatgagtgcttc

SEQ ID NO: 499916 - DNA, 100 bp, Homo sapiens
gctactagcaagattcaaagataaaactcctgcccctcttcaacacctggacaccttgttagatggaacctacaagcagatacagatccacgggttttag

SEQ ID NO: 499917 - DNA, 100 bp, Homo sapiens
tggtccagctgctgcggacagtgaaccggacagtcatcaccatgggccgggatcacattctgattgacttaaccaccaccatgtcgagcaaaagaacaaa

SEQ ID NO: 499918 - DNA, 83 bp, Homo sapiens
tggatatcttcggggacctgaagaagatgaacaagcgccagccattggatttaatgtagagacggtgacgtacaaaaacctta

SEQ ID NO: 499919 - DNA, 75 bp, Homo sapiens
ccgctcgtcatggcctacccgggatacggaggaggggacaactacacctttgcccaacctgggattcaaatgaaa

SEQ ID NO: 499920 - DNA, 90 bp, Homo sapiens
gaagctggatgagctgaggagagtgagcgtcccctatccaagtagcctgctgtcgcccagccgcggtgtaccttcagttgaatttttaga

SEQ ID NO: 499921 - DNA, 74 bp, Homo sapiens
ccctcgtattctcctgcccttccccaggaactgtggctgcaccatctgtcttcatcttcccgccatctgatgag

SEQ ID NO: 499922 - DNA, 83 bp, Homo sapiens
ggaagttaatgtttacggcgaagtctactcaacgtttccaaggtcatgcaagacaagataatctgccttccgaaaagagtgca

SEQ ID NO: 499923 - DNA, 101 bp, Homo sapiens
gtgcactattctttcccaggaaccattggataaggataaagatacaaaatcttaccctaatcagtgtggagttgcatgctcgaactagacgagacttagaa

SEQ ID NO: 499924 - DNA, 90 bp, Homo sapiens
ggctcctccagctaccggcccaaggccatctacctggacatcgatggacgcattcagaaggccctcgggaccaaggatcacgtcatgact

SEQ ID NO: 499925 - DNA, 83 bp, Homo sapiens
taccaggcgaagctggccgagcaggctgagcgatacgacggttttgaagccgcttctctggccgagttaggtttcgcccagcg

SEQ ID NO: 499926 - DNA, 90 bp, Homo sapiens
agaggcagagctgtgggcggtggagtctagacttccccaaggcgtgtacccagggtttgaagactgggatgtattatttaaggacaagac

SEQ ID NO: 499927 - DNA, 100 bp, Homo sapiens
ctggctttgaagagacagatctcacctaccaggtgtcggagtctgacagcagtggggagaccaagatgtgtctgggaagctgaggatctgggataccacg

SEQ ID NO: 499928 - DNA, 90 bp, Homo sapiens
ggtacttttcatggtgcatggaaggaaagccaatgcgcagctccaaagacaacaggccctccctctgccctcccgtctgtgagctccctg

SEQ ID NO: 499929 - DNA, 80 bp, Homo sapiens
gttagatgtcagggatacagcctatcctgaaaccaatactttgggatcatgctactatgacagaagtgaaatctctaaat

SEQ ID NO: 499930 - DNA, 90 bp, Homo sapiens
tcccacttgattacccgttaagtcccccaaagatgagatttacctgtgagatgtttcatcccaacagagacatggtctcaaagtaccgag

SEQ ID NO: 499931 - DNA, 100 bp, Homo sapiens
ggactgctgtgcctcctcctcctgtggtggaggagaaggaaagggttttctagtaccttcacaggagaaaggagacccaaagatgaccaagtgtttgaag

SEQ ID NO: 499932 - DNA, 98 bp, Homo sapiens
catcaagggcggcacgctccggggcatcatcaagagcatgaaactaatctggattcactccctctggttgatacccactcaaaaaggacacttctgat

SEQ ID NO: 499933 - DNA, 100 bp, Homo sapiens
tttaagaattactggttacaaaaggttggtcaaagaaaaagtgatgtatgaaaaagaggcaaaacaacaagaagaaaagattgaaaaaatgagagctgaa

SEQ ID NO: 499934 - DNA, 96 bp, Homo sapiens
ccaacgtgaaacactggaatgtccagatgaaccggctgatgcatccaattgagcctggagggtctggaatggtctggagtggtctggaaagcaggg

SEQ ID NO: 499935 - DNA, 99 bp, Homo sapiens
ggggacgtgaagtgaggagggggttgggaggggagaggacgcgggcgaggaagaccagccccggggccccggtccagcctgatgagtgaagaggctaag

SEQ ID NO: 499936 - DNA, 101 bp, Homo sapiens
cagcatccgtgagctacacgacatgttcatggacatggccatgctcgtggagagccaggctgcagagaaggctggtatgtctgcagaacaagcccagggac

SEQ ID NO: 499937 - DNA, 75 bp, Homo sapiens
cctcagaatatagaatggaacccttttgatcaagatgcggtgaacatggaagaagttgcctatgaagaaagggcc

SEQ ID NO: 499938 - DNA, 75 bp, Homo sapiens
cccgatcctattcccagtcgtagttgctggagaatgtaaccctaatccataaaccagtgtcgttgcaaccccgtg

SEQ ID NO: 499939 - DNA, 96 bp, Homo sapiens
aatgaagatcgatgcttttcattatatccagctgggaactgtctacaggtagcagtagctgatgtgcagtttggccccatgagatttcatcaagat

SEQ ID NO: 499940 - DNA, 75 bp, Homo sapiens
cgccgcagcaacaccaggagaggccgggggcagccgccatcggcagcgccaggaagaagaaaggtggggcgaagc

SEQ ID NO: 499941 - DNA, 151 bp, Homo sapiens
gaaaaatcatttttcttctctgggaaggtgaacatttgtagcattgatttcccggatctggtaacatggcaaaagattttctcctggcggcgctggtcctgtctctcattctgccgaggagcagccagtacatcaagtggatcgtctctgc

SEQ ID NO: 499942 - DNA, 82 bp, Homo sapiens
tcaggagcctcctaaaaccacagttcaaggagcagggacaagttacaggaatgttctccaagcagcaatccaaaagagtctc

SEQ ID NO: 499943 - DNA, 91 bp, Homo sapiens
aaggaaatgctaaagcgattccaagtgcaaaatggcaactcttaaggaaaaactcattgcaccagttgcggaagaagaggcaacagttcca

SEQ ID NO: 499944 - DNA, 100 bp, Homo sapiens
tgagctggcctgtcgggaacctgatgtcctcatcttggagcccaagaagaggccgaaaccgagaccatgccagggaagctgaaggtgaaaatcgtggccg

SEQ ID NO: 499945 - DNA, 100 bp, Homo sapiens
cgttgacaaggcactgctttttcatgacggtatacccgaaatcttgtggatcaaggaaatggaaaatttaatctgatgattctctgttggggtgaaggac

SEQ ID NO: 499946 - DNA, 100 bp, Homo sapiens
ttcgcagtggtcgcttcttctccttggtgccattgagaaacagaaattggtgtatattttgaacagagatgctgcagcccgacttaccatttcatctccc

SEQ ID NO: 499947 - DNA, 82 bp, Homo sapiens
gcgcggaggcggctgaggtgcgagccgtgagacggtttaagcggaagcatcttactgccattgactgccagcatttggctcg

SEQ ID NO: 499948 - DNA, 90 bp, Homo sapiens
tgataaaaaagtggctgctattgaagccctaaatgatgtgtggcaaaggagcagagaactttgacaagttcttcacacgaggacagcccg

SEQ ID NO: 499949 - DNA, 99 bp, Homo sapiens
ggcgagtttccgatttaaagctgagctgcgaggaaaatggcggcgggaggttcctcaagccaggacctacgcacctgttgtgagtggtgttatagttct

SEQ ID NO: 499950 - DNA, 100 bp, Homo sapiens
cggcctgacggtcgaggctacacctgccgctgccacctgggccgctcggggttgcggtgtgaggaaggcatgtactcctgcccctgctattactatccca

SEQ ID NO: 499951 - DNA, 90 bp, Homo sapiens
acaggacactgtgtacacatgcggggattaccttacagagctactgagaatgacatttataatgtattggcatactccacacatctgtac

SEQ ID NO: 499952 - DNA, 98 bp, Homo sapiens
cccgccgccccgcgggggagggcggagctggcgcggcccctagctttctccttctggtgtggggcccgagaactcatgagccttgtgtctgggctgct

SEQ ID NO: 499953 - DNA, 50 bp, Homo sapiens
ctgaaatgtttgacgacactgatggtttgttacagaatgtctgaagggga

SEQ ID NO: 499954 - DNA, 85 bp, Homo sapiens
tgcttgaagctttgttcctcaccgtggatccctacatgaggaaagaccacagcaagattctttcattcgtctcctcctagcctgg

SEQ ID NO: 499955 - DNA, 101 bp, Homo sapiens
ggagaacttcagacactacgagcaggccgtggagcaggttcccatgatcagtggtgaaatatagtgattttcacctgtgcttccattctgaagttctggaa

SEQ ID NO: 499956 - DNA, 100 bp, Homo sapiens
caggcgccgaccgcctcatgacccagctgtcttgcctgttagctgtggcatatgtgagcagtgtggccctggctgtggcatcggtggccgtaatacatca

SEQ ID NO: 499957 - DNA, 95 bp, Homo sapiens
ctaccagaagtgcctggccatgggcatgaagcgggaagctgcatcttcctcccgtgaggctggccgagctccacgctgatctgaagatacaggag

SEQ ID NO: 499958 - DNA, 80 bp, Homo sapiens
tctgaacacagatgtgtgtcatcagccttgtattcctaagcaacagttgaaagcagaaccagctgcagtttaataggaat

SEQ ID NO: 499959 - DNA, 98 bp, Homo sapiens
ttttacatctctcctgcgtcggtgactaagaccctgctagaccaacaggagttgctttgtggacagattgctggagttgtccgctgtgtttctgacat

SEQ ID NO: 499960 - DNA, 100 bp, Homo sapiens
gtacgcccaagccgccctggatggagactcccagggtcgagctgtgcagttttagcgggtacaagatctaccccggacacgggaggcgctacgccaggac

SEQ ID NO: 499961 - DNA, 74 bp, Homo sapiens
gacaagctcctacaaggcaggcagtattgggtgcaggcagagtgtctctggcacagtttgccttggccttcgtg

SEQ ID NO: 499962 - DNA, 75 bp, Homo sapiens
tcgtcagcactgactttcagctatggaatcgcaatcatcctcttccagtggtagcgtgtttgggtctggaaacac

SEQ ID NO: 499963 - DNA, 100 bp, Homo sapiens
ctccgtccctttccagggagggaacaaagcccacaagcaccgcaatcagaaacggagactgttcatctgtttatcccagctctatcagtcggtgccatca

SEQ ID NO: 499964 - DNA, 100 bp, Homo sapiens
ggagaaactcctcctcataccttctgcaaagttgacaaaaacttaaattgtggaatggaaagtgactattttaccccacagggagaattccgtgtagaca

SEQ ID NO: 499965 - DNA, 76 bp, Homo sapiens
gcgatgccacgggagatggaaccaaggagaaaccatttaaaacaggtctaaagtctgaagatgatgagaaactgaa

SEQ ID NO: 499966 - DNA, 100 bp, Homo sapiens
cagatggcactttccaaagtggatgcctccggggaggttggtgttcgaggaagagacattgttgttcttggtgtggagaagaagtcagtggccaaactgc

SEQ ID NO: 499967 - DNA, 96 bp, Homo sapiens
ctggcaaggatggtgcagattttggcagattatggctttgtccccacccagcactgatgatattataaatttggtgaggattcatcaacctccagt

SEQ ID NO: 499968 - DNA, 83 bp, Homo sapiens
ggggaggcaagatgatccaccagcggttccatcctacacttggtgagaaagatcagtctaaagaaaaggagaagaaagtgaaa

SEQ ID NO: 499969 - DNA, 49 bp, Homo sapiens
cagcctgcggagcctgtggggcaggtgaggaagatcttctcagtcctcc

SEQ ID NO: 499970 - DNA, 74 bp, Homo sapiens
ccgggcaggagccgcgagccagctgcgcgaagaataaccatgtgcatggacagccatatacaggcccagcagca

SEQ ID NO: 499971 - DNA, 82 bp, Homo sapiens
ggtaccgctggctgtgtcgcctgtctggggtgctgggggcagtctctcctgccagggccatccaggtgaccgtgtccaaccc

SEQ ID NO: 499972 - DNA, 50 bp, Homo sapiens
gtctgggaccccaactgggacaggtttactcctggcttgggggcattagg

SEQ ID NO: 499973 - DNA, 122 bp, Homo sapiens
agcgattttagtttatgacataacagatgaagattcttttcagaagatccacagaagagcaagagccttgaagaaacttgcaaaacaactaatggaaggcaaagttgttctgtcttctaaat

SEQ ID NO: 499974 - DNA, 100 bp, Homo sapiens
cccggaggcagagcggctgccatgactaatagggatgccaaaggaaaaatatgatcctccagatcctcgcagaatttataccatcatgtcagcagaggag

SEQ ID NO: 499975 - DNA, 100 bp, Homo sapiens
atggcaagaaaatcacagcctttgtacccaatgacggttgcttgaactttattgaggtgtgtggaggtcattgcaaaggaaggacaaaacctgaaagagc

SEQ ID NO: 499976 - DNA, 100 bp, Homo sapiens
taccttcgcctgtgcacagcttgccactggcgctgcctgccgcctggtggaggctgtgctctcaggagagaccccaccaacaactgaacgctttggtcag

SEQ ID NO: 499977 - DNA, 100 bp, Homo sapiens
gccatgtctaccctcaatgacactcatggaggaaatgctgagagaagcattcagatgcatgacacaaggcggtctatgcttgcttggtgcttatgctgac

SEQ ID NO: 499978 - DNA, 75 bp, Homo sapiens
ggctttggtccccagcgcagtgaagtggtgagcctttttgtcactgttgccagcccttctaatgctgaggatacc

SEQ ID NO: 499979 - DNA, 101 bp, Homo sapiens
cgctggagcacaaaagagtctccgcggtggaggtctgcgttgctcttgcttttcctcgctggggtgtacggccactgtgagcatgcatttcaggttgttgg

SEQ ID NO: 499980 - DNA, 98 bp, Homo sapiens
agaggtgtgcccaccgctgctctgccagaacccctcacgcacccaggattcctgctgcccacagtgtacagaagttaaaatgcattttgctaatcagt

SEQ ID NO: 499981 - DNA, 88 bp, Homo sapiens
gaaaattatactcagtggctgcaaaaagaaaatatttgcaatacctgccacgtccaaggttcagctgaggccaatgtaaagccagtat

SEQ ID NO: 499982 - DNA, 90 bp, Homo sapiens
cagggacccctccatccactcggtgaatgttttccagggacacacggagtgctaagtgtggtggctcacacctgtaatctcagctacttg

SEQ ID NO: 499983 - DNA, 100 bp, Homo sapiens
gagctggtgtcttcatccagaagggacagtttgtgccagctctccagagagaaaaggaagtatatattcaagcccaggactgtatagtaaaacaatgacc

SEQ ID NO: 499984 - DNA, 98 bp, Homo sapiens
aggagaccaagtaccttcgagtggccgaagcactccactacagagcaactgattttgttgttcctgggcctggaaaagtagagataacctacacacca

SEQ ID NO: 499985 - DNA, 100 bp, Homo sapiens
tgctgtaattgctgaacttaaaaagcagtctaaacctgtgaccacccctgaagaaattgcacaggttggtcctacagctacacaagctatgcaagaattt

SEQ ID NO: 499986 - DNA, 95 bp, Homo sapiens
tggtcgaacaatcaaactatgggttttggagaccaaagaagtctacagggaagggcctgtcccagtcggctttaccctatcgacgcagcgtcccc

SEQ ID NO: 499987 - DNA, 100 bp, Homo sapiens
gtttcttcatctacaacccgcgcttctggccgcgggaaggagagcctagggactccacgtaccccagctgggtctcattgttccagaactgcattagtta

SEQ ID NO: 499988 - DNA, 50 bp, Homo sapiens
ggccgggttgccagattacggaaactctataaaacaggtcgggagatgca

SEQ ID NO: 499989 - DNA, 83 bp, Homo sapiens
cagagcctgaacacactgggaaatgccgtgtcagtggggttgttttggaccccacactgtggacacaggagcatgtgaggcaa

SEQ ID NO: 499990 - DNA, 75 bp, Homo sapiens
tccgacctgggcgctcagcccccggatcagcctgcctctggttcaaatctgaacatcaatgatgtactagggaac

SEQ ID NO: 499991 - DNA, 83 bp, Homo sapiens
aagagagtccagttcggagtcctgagtccggatgaactggttgccttcttcctcatctctgcagtaactgtcttcatggtttc

SEQ ID NO: 499992 - DNA, 90 bp, Homo sapiens
cagtggagccttatgttccagaatttacagtctccccatttgcagtgcaaaaactttccagcgcgatgtacaatacggtgtggagtatgg

SEQ ID NO: 499993 - DNA, 75 bp, Homo sapiens
aggagggggctgcggtggccaccgcggcggagcccgaggaggaatgccagctcctgagcaggcctcattggtgga

SEQ ID NO: 499994 - DNA, 130 bp, Homo sapiens
cgcgcaccacgcgccccgcgcggcccgcccggatcgtggcctctcgagagcaagggaccagttactctccacaagaaaattcacacaaccacagtgctcttcatagttcaaattcacattcttctaatcc

SEQ ID NO: 499995 - DNA, 75 bp, Homo sapiens
cccagccacagcacacaggaccaggctgcgagaacagtgctacagttgaaactccagcagcgccggacccgggaa

SEQ ID NO: 499996 - DNA, 83 bp, Homo sapiens
aacagtttacagcccttccagatacagctaccagatcacaaaatttgtccaggatagacatagagctagaagaaacagacttc

SEQ ID NO: 499997 - DNA, 82 bp, Homo sapiens
agaagagatcctgatgctcatggcaagggacaagcacccaccagaggaatcctacggcccctgaatattttggcatcttcaa

SEQ ID NO: 499998 - DNA, 75 bp, Homo sapiens
agattcgcagtggtcgcttcttctccttgttttaccgggcagaagttgaagccctccattcttcgggtatgacag

SEQ ID NO: 499999 - DNA, 80 bp, Homo sapiens
ccggcccggcggctgctgctgctgctgacgctgctgctgcccggcctcggggggttgtgtccactgtggtccccgactct

SEQ ID NO: 500000 - DNA, 82 bp, Homo sapiens
ctttcacaataagagcagaggatggaacacttcagtgcattcaagtggtgtcaatatcaaaatgccagtcaactccagtgga

SEQ ID NO: 500001 - DNA, 100 bp, Homo sapiens
tccggcgcgttctcaagggcttgcagctgtgtgctttctggtgaccatgaatggatgctgtcagtagatgccttggtgctctttacggtgctggtgcaac

SEQ ID NO: 500002 - DNA, 100 bp, Homo sapiens
aacgaggccgagctgctgcggcgccgcaactttaaagtcatgatctaccaggaaagaccacagcaagattctttcattcgtctcctcctagcctggggga

SEQ ID NO: 500003 - DNA, 75 bp, Homo sapiens
cggggacctgcgctgactaggtccggggaaggtgatctgtgaaaatggttcgctattcacttgacccggagaacc

SEQ ID NO: 500004 - DNA, 100 bp, Homo sapiens
cttgactgacaggcggcggcggcgcagttgcgagtgcaggctcaccagctggattccctcctgggggcttcattcccaaaacggccaccacgcccaaagg

SEQ ID NO: 500005 - DNA, 101 bp, Homo sapiens
gagatgtgatgttggagaactatagcaatctggttttcttggggtgataaaagaaaatgtggctgaagttacccgaagttcagcttgcagtgtaattcaga

SEQ ID NO: 500006 - DNA, 80 bp, Homo sapiens
gggggatcgcttgagcccaggagtttgagaccagcctggacaacattttgctgaacctgtttgcatgagttgctcctgac

SEQ ID NO: 500007 - DNA, 101 bp, Homo sapiens
aaaaattattggaatcagataagcaaaggaaacaattgacagaagagctccagaatgtgaaacaagtaaagattatagttcccaacagcacagcaggtctg

SEQ ID NO: 500008 - DNA, 114 bp, Homo sapiens
gaggtgtcagtgttaaaggaacctctacaacgaaggtgaagccacggaagataaggaattgaatgatctggcacgggaccctccagcacagtgttcagcaggtcctgttggaga

SEQ ID NO: 500009 - DNA, 51 bp, Homo sapiens
gtgcagtgtctgacttgtgacagggtatttctttaaatccagaacaatgga

SEQ ID NO: 500010 - DNA, 100 bp, Homo sapiens
cttccgtatctgcctaggcattttgctgtctcctcctaatacgagtgagcgattacagtctgacctggtagtatgcattgtaattggtgtgctgtatttt

SEQ ID NO: 500011 - DNA, 100 bp, Homo sapiens
gggagagggcacgcgggacgaggagccctggggtcccatcggtaggtgcacgtctcatcgcacatgctggcagcctcaccaacctggccaagtatccagc

SEQ ID NO: 500012 - DNA, 101 bp, Homo sapiens
gccgtggggagcggacgcagtgatttgctccccctcgtgcagcaacccccacacccagcaccagtctgcgctcctcagaccaccggcaggtgaacagcctg

SEQ ID NO: 500013 - DNA, 100 bp, Homo sapiens
tggctggttcctcttggaaggtgcatctgcagtacaggatatgaagaaattgagggttcttgccatggggcccagtcagatagtgagctcccatcctacc

SEQ ID NO: 500014 - DNA, 100 bp, Homo sapiens
attaaaaaatttattaaaggaagcacacctaaggaatactctgaagatagtaactccgagccaaatgtggatttggaaaatcagtactataattccaaag

SEQ ID NO: 500015 - DNA, 100 bp, Homo sapiens
tctggccagaagccacggactgccacctcgttacatcatgcaggctacagatgtgatgcggaagcaggtctccaacaattcgagatatggttgtacggtg

SEQ ID NO: 500016 - DNA, 100 bp, Homo sapiens
tccaaacatgatcgtttactgcaaaactgggactcttcaattaatctgacatttcacaaatccaaaattgccgtggatgaactctttacttcacttcggg

SEQ ID NO: 500017 - DNA, 100 bp, Homo sapiens
tcttcttcgagtatttgtagaagggtgatcgcagacatgcgggagaagcgttatgaggacgagggcatcgggagcagctacatgttccgggtggaccatg

SEQ ID NO: 500018 - DNA, 100 bp, Homo sapiens
tttaaactgttgtgccagtgcttaggctttggaagtggtcatttcagatgtgattcatctaggctacttctacaagtccgaacagccagtccagcaaaat

SEQ ID NO: 500019 - DNA, 90 bp, Homo sapiens
catccatcgcataagagcaaagaatactattgttgccacaggtgaacagcagagaatttcaaaggaccttgctaatatctgtaagacggc

SEQ ID NO: 500020 - DNA, 75 bp, Homo sapiens
aatccgagaagagcagagcggagggagccccagacacgacagccgcgaggagagtgtcctaggcagcgtcctgct

SEQ ID NO: 500021 - DNA, 100 bp, Homo sapiens
agaaagtgaagctgtttcgggccagcgacccgctgctcagcgtcctcatgtggggggtaaaccactcgggctttgttcgcgggggtcacagctctcatgg

SEQ ID NO: 500022 - DNA, 82 bp, Homo sapiens
ctggcgggcccggcggctctcactatccaggtcacgaacgagatcacgccggtgctgtcgtactcctacctggccgtgctgg

SEQ ID NO: 500023 - DNA, 83 bp, Homo sapiens
gtgggctcgctcttcgacgacgtgtcttcaaaaacaaacatatttaaaagattttacttctcatctccaggaagaaccagcta

SEQ ID NO: 500024 - DNA, 100 bp, Homo sapiens
gtctgccccaacagcccggaagagtttgaccccatgactggacgctgtgttcccccacgaacttctgctgggaaaagaatcccgcccactaagacgcgac

SEQ ID NO: 500025 - DNA, 98 bp, Homo sapiens
agggtgtctggtccacgacctatcctaggcgccatgccaagaaggatcaagaaggtggagaagaaaagaaatctgtgcaaaagaaaaaagtaaaagag

SEQ ID NO: 500026 - DNA, 83 bp, Homo sapiens
taccaagaaggggagtgcccgcggcagatggattaccgggccttggtgcatgagcgagatgaggcagcctatggggagctcag

SEQ ID NO: 500027 - DNA, 99 bp, Homo sapiens
agctgcttatccgcttcttcaactccttcaatgaggccaccatggttctggtctcctggatcatgtggagcaggggagagaagacagaagaggttggag

SEQ ID NO: 500028 - DNA, 83 bp, Homo sapiens
ggagcagagagctggcgagcaagtatggtttgaagtggtgaacatggatttttctcggcttcacatgtacagtcctccccagt

SEQ ID NO: 500029 - DNA, 80 bp, Homo sapiens
ctcgtgtcagaagaagataaacacgccatcatagtggaaccggagaaaaggggcaccatgccggtggaaaggatgcgcat

SEQ ID NO: 500030 - DNA, 90 bp, Homo sapiens
cgagaagaaggctgctggcaaaggggacgtcccaacgaagagaccacctgtccttcgagcagagcccagcattacatcaacatgcccgtg

SEQ ID NO: 500031 - DNA, 100 bp, Homo sapiens
ccgcgctgcgctgctgaggccgggccggccgcccagacgctgcccgcgggcccggccacggcggagccaagcggggatctgacgagcttttctctacttg

SEQ ID NO: 500032 - DNA, 152 bp, Homo sapiens
gtatctaacagccaatagaaaagcagaaagccgcctcttggtttgcgtcctgcactgaaaggaaatgacggattttatgagctttgatccaaaccttctccacaacaatggacataatgggtaccctaatggtacttcagcagcactgcgtg

SEQ ID NO: 500033 - DNA, 100 bp, Homo sapiens
cagccctccagccttctgccgctcgccctctgcctgctggctgcacccgcctccgcgctcgtcaggccgagtgtactacttcaaccacatcactaacgcc

SEQ ID NO: 500034 - DNA, 75 bp, Homo sapiens
atcatgcgcaccttggccatgcttgttgctcgataatgtggaaaataagatgaaaggcacctgtgtagagggcac

SEQ ID NO: 500035 - DNA, 100 bp, Homo sapiens
gatgtacttcctgaagcagctgctctagtgaaggtacagccaaagaccggagctttggagagatgaagtttaaacagtgtcctacagagaacatggctcg

SEQ ID NO: 500036 - DNA, 130 bp, Homo sapiens
acgccggatgagttgcttttaggcttgctggcccgcggggctgtccaggcacgcgaggcccctcagttttcggctttgtgagaaaccttaccatcaaacacgatggccagcaacgttaccaacaagacag

SEQ ID NO: 500037 - DNA, 100 bp, Homo sapiens
gtttagatggaatgtggactacaccaccattgtgtttagcgtggggtagagcagcggctgccatgctcttctgtggcttcatcatcctggtgatctgttt

SEQ ID NO: 500038 - DNA, 100 bp, Homo sapiens
gaatatggtgtttcttctatcattccaaactttcagatctctcaagattcagtagggaacaggaaatggcagcagtgtctgcttttcttcaaccaggagc

SEQ ID NO: 500039 - DNA, 83 bp, Homo sapiens
aacaagacccggacattccaggccacagtcctgggaagtcagatgggattgaaagatggtggatgcttccaaaagcatcgaag

SEQ ID NO: 500040 - DNA, 143 bp, Homo sapiens
tttacggcatcgtgtgataaaactgccaaaatgtgggacctcagcagtaaccaagcgatacagatcgcacaggctcacctttcgagtgcggagggtgacggacgccccccgttcaagcagcagctcagccacctcgaagtggc

SEQ ID NO: 500041 - DNA, 50 bp, Homo sapiens
cttcaatcatcattttgagctcaaaggagtccaaaactacttacctggaa

SEQ ID NO: 500042 - DNA, 100 bp, Homo sapiens
ccagtaaaactactcatgtcagctgttctgcaggatcccatgagaaggtttggaattcacccagttgcaggccgaatgcctggtcagcttaatgtgctgc

SEQ ID NO: 500043 - DNA, 75 bp, Homo sapiens
attgtctcactttcagcaaacattctatttccatggagaatgattatctgggacctcgaagaattgagagtctac

SEQ ID NO: 500044 - DNA, 100 bp, Homo sapiens
aagaatgtttttgaccagaaaaccgacaaccttcccagaaagtccaagctcgtggtgggtggaaaagtgttcgccgagcggtggtgtctgtggatgggcg

SEQ ID NO: 500045 - DNA, 75 bp, Homo sapiens
cgctttttagaattgcacttggaggacaaggagtggcaaaattctattcagaagaatgcaggccttgcttttatc

SEQ ID NO: 500046 - DNA, 99 bp, Homo sapiens
ccgggatttgggtcgcagttcttgtttgtggatcgctgtgatcgtcacttggctgaactcacgggaatcaaatggcgtaggtacaattttggagggcat

SEQ ID NO: 500047 - DNA, 78 bp, Homo sapiens
gatgccccagctgcagttcaaagatgccttttgggttgcacagagcattgaggatcaccatcaggaagtgattggttt

SEQ ID NO: 500048 - DNA, 75 bp, Homo sapiens
ctcctgccccgccgaggcttgacccacttaattcagtgcacaaatgagatgaatgtgaacatcccacagttggca

SEQ ID NO: 500049 - DNA, 90 bp, Homo sapiens
gattcgttggctgccgtccccgctgctgtgcattggttgcagatctgatctcttctgaacacctcatcgtgtctccatccctgggaatct

SEQ ID NO: 500050 - DNA, 88 bp, Homo sapiens
aacaaatactactacatcccgcagtacaagaactggagagcctccaccaggcggtgtgaagatgcctaatgtacccaatacacaacca

SEQ ID NO: 500051 - DNA, 82 bp, Homo sapiens
agccccccgctctgagggccccggcccctggatgcacagccccggcgctgatggcggcagctatgccatccacgactcccag

SEQ ID NO: 500052 - DNA, 82 bp, Homo sapiens
ggacgtccggcttcggagcgggagtgttcgttgtgccagcgactaaaaagaggagattacctggggcaattgatgttatcgg

SEQ ID NO: 500053 - DNA, 73 bp, Homo sapiens
tctctcattggcttctttgagactgaaatggcagatgctcccataatactctcagatagtgaagaagaagaaa

SEQ ID NO: 500054 - DNA, 75 bp, Homo sapiens
aagaagtggccggagagttctgcatgttgattcctacaccaaaattgcattgagccaaacttgccaccaagagcc

SEQ ID NO: 500055 - DNA, 100 bp, Homo sapiens
ttggaggccccctggaaggctttaggatccagcgttacatccttactattcaaagtgccatccacagacctgctgatgggcagcatgagcatcacctggg

SEQ ID NO: 500056 - DNA, 100 bp, Homo sapiens
agatgatgaacaacatgggtggtgatgaggatgtagatttaccagaagtagatggagcagatgatatggcgttcaggaagtggcttatattcactcaaac

SEQ ID NO: 500057 - DNA, 83 bp, Homo sapiens
cgagttcttcgtgctgctcaagctggtaggtgagtgctgtcctcggctcactttcctcaagctctccggctgccacggtgtga

SEQ ID NO: 500058 - DNA, 101 bp, Homo sapiens
agttgacactgctccacgtgctgcacaagttccggttccaagcctgccctgagacccagatgatccgagccgcgccgccgccgctgttcctgctgctgctg

SEQ ID NO: 500059 - DNA, 75 bp, Homo sapiens
ccccggggcacatgatcatctcagctgctggccctaaggtatgacctggacgcgtgtgacattcaagaaaaatac

SEQ ID NO: 500060 - DNA, 75 bp, Homo sapiens
gtggacggaccccgggagcccagacgattttttatcaagcagaaatgcatcgaacaacgagaatcaagatcactg

SEQ ID NO: 500061 - DNA, 82 bp, Homo sapiens
aaagaattgagctgaagcagggctacacatttttcatcccttccgctgcattaatactacattgtcaaagacaaagacgaac

SEQ ID NO: 500062 - DNA, 75 bp, Homo sapiens
tctgtggtggaagcagcagtccaggaatgcagtcagtctgttgatgaaactattttaatgagtggtgttaagaat

SEQ ID NO: 500063 - DNA, 100 bp, Homo sapiens
gcaacgccaacctcaggcgagatgaagaggcaattcggacataaagagaaacatcaagggcatgagtgcacagaggaaagaccatgtgacggcatggcta

SEQ ID NO: 500064 - DNA, 85 bp, Homo sapiens
aggacatttctgcacccaaaccaggacctctaaaaaaggcacctgctgctaagattggagctggagggagcatcactgggctgaa

SEQ ID NO: 500065 - DNA, 75 bp, Homo sapiens
aactggtgctgtctgggcttcatagcattcgcctactccgtgaaggctaaagaattacctccaaagccattgtca

SEQ ID NO: 500066 - DNA, 75 bp, Homo sapiens
cagacctggtggaggtgttaaatgaaagggtcattgccggagcctttgtgggcatcctcctgtttctcatcctcg

SEQ ID NO: 500067 - DNA, 50 bp, Homo sapiens
ctcggacatgctgccaacgacgcgagctggacccacaaaccgtggagacc

SEQ ID NO: 500068 - DNA, 100 bp, Homo sapiens
cagtggttttgatttacaacctgtcaggtgacagagctgaatgaacctctctccaatgaagatcgaaatctcctctctgtggcctacaagaatgtggttg

SEQ ID NO: 500069 - DNA, 101 bp, Homo sapiens
ccaggaaaagactcaggacggacaagcacagtcttcggaagaatggagatgtatgcatttcgattcttcatccgcctgtagatgacccacagagtggagaa

SEQ ID NO: 500070 - DNA, 93 bp, Homo sapiens
cagaacagaaaaatgacattgagggacaatgaggaaacctggataattagatttcagccttccaagttctgatgtaacaaacaacttaaaacc

SEQ ID NO: 500071 - DNA, 98 bp, Homo sapiens
ctcgccgccctcgccaccgctcccggccgccgcgctccggtacacacaggatcccattgaagataccacgctgcatgtgtccttagtagtcatgtctc

SEQ ID NO: 500072 - DNA, 87 bp, Homo sapiens
gaggtccgcgcagcccagcgcagccatgtaagtaaggaggtctctgtaccatggctcgtacaaagcagactgcccgcaaatcgaccg

SEQ ID NO: 500073 - DNA, 76 bp, Homo sapiens
tggaaaacaacgccttaccaagtggctgctgaaattagagaccttttaatcaaagtgaagtttggggaaagcattg

SEQ ID NO: 500074 - DNA, 75 bp, Homo sapiens
agaagatctgggtgcccgtggaccacaggccctcgttgcccagatcccgtgcagcctgccaggactcttccagac

SEQ ID NO: 500075 - DNA, 123 bp, Homo sapiens
gagagggacaggcttctccggaaggaacagattttagctgtggccagaccaaactgcagctggaatacccagtacagttctgcttactacacttcaagaaagatctgaaagcggaaaaagaac

SEQ ID NO: 500076 - DNA, 74 bp, Homo sapiens
tgctgcggcgcggggaccgctgtgctctcggcttgggcactgtttaaaggaaagttccgagaaggcatcgacaa

SEQ ID NO: 500077 - DNA, 83 bp, Homo sapiens
agctggacggcgagcgcgagcggcgcgagaaagacaagcagctgcggatctttgaccccagaacaaagccgcgggcctctcag

SEQ ID NO: 500078 - DNA, 74 bp, Homo sapiens
gatgcactcaaagccgaccgggcagatgctgagtttgtgtgtgaacggacactgaaatattttctaggaattgc

SEQ ID NO: 500079 - DNA, 75 bp, Homo sapiens
gacctctctccaaagtctatgtcccggaactcctccattgccagtgatatttggtagctggcagtgttgtgatgg

SEQ ID NO: 500080 - DNA, 98 bp, Homo sapiens
aagaacagagagagaggtggacagatctgagagatactgagtggcaagctggtgtctcccaagtggaagaatttcaaaggcctcaagctgctctgcag

SEQ ID NO: 500081 - DNA, 100 bp, Homo sapiens
cggcttcaagcagatgacttcctccaggactatactttattgatcaacatccttcatagtgaatcatcctctacaatttcatctaaccagagtcaggagt

SEQ ID NO: 500082 - DNA, 75 bp, Homo sapiens
tgcagcaaagccattcgggttggagtaattgctgacacttcctccatggcccatctatcgccggcatcctctcaa

SEQ ID NO: 500083 - DNA, 98 bp, Homo sapiens
attgaaccaccaaaagtccattatgaaactgaactcaagacatggctgcccagtgtgtcacaaaggtggcgctgaatgtttcctgtgccaatcttttg

SEQ ID NO: 500084 - DNA, 90 bp, Homo sapiens
gactttgagcctcatgacaaaagaggaaattcgaaatgagtcccatgactatcctcatagagtggccaagtttccagaaaacagaaatcg

SEQ ID NO: 500085 - DNA, 76 bp, Homo sapiens
gtggctcccttggtgttccccttttactgccaggacactgagatttggagagatggggcattctcttctcccaccc

SEQ ID NO: 500086 - DNA, 101 bp, Homo sapiens
ccagagtggttcgggaacaggatgcagacattgtcctcaacgaccagcggaccttctaccgctttgaggctgtgtgggatagctctctgcataactccctt

SEQ ID NO: 500087 - DNA, 90 bp, Homo sapiens
ccggcatgttcttgtcacactggcaaatcacatacttagatggatttgatcaggaggataatgaagcgccggactctgaagaggaggatg

SEQ ID NO: 500088 - DNA, 76 bp, Homo sapiens
gagaaagtttcatctgtggatggagtattggtgggaacaagagcccagtcagagcgaattcggacatataatttca

SEQ ID NO: 500089 - DNA, 98 bp, Homo sapiens
agtgactccgcgctccacgttttgcaggctgccaccgtgtcggaggcgaggcgaggaagggagctggaataacaaagatgggaaactcttgtctagtg

SEQ ID NO: 500090 - DNA, 82 bp, Homo sapiens
cttgtccacccagatttcttcagccagaggtctcagcacctacgccccagtgaagtccttccttcgagtggataaagaaaag

SEQ ID NO: 500091 - DNA, 100 bp, Homo sapiens
caaaaatagtgatagctttgataaggttctcatgtatcagccatcttctgtaagggtgcccagtgtgacttcggttgatcctgctgctattccgccttca

SEQ ID NO: 500092 - DNA, 114 bp, Homo sapiens
ggcgcaggatgggatccggctcctccagctaccggcccaaggccatctacctggacatcgatggacgcattcagaagacaccattcgcttttcacccaagatgatttgatgtct

SEQ ID NO: 500093 - DNA, 75 bp, Homo sapiens
caagaaccggcacggcctcgtgcccttcgccttcgtgcgcttcgaggacccccgacaaaaggatgccacggagaa

SEQ ID NO: 500094 - DNA, 97 bp, Homo sapiens
tgaagcagaggacaacatgaactgccagatgacgggcaggtatgagatgtacgcacgggagctcgccgaagctgtcaagtccaactacagccccacc

SEQ ID NO: 500095 - DNA, 100 bp, Homo sapiens
tagaggactctgaggatagcaaagatgaaaactttcggaagagaaagttgcctgtggtaagttcagttgttaaagtaaaaaaattcaatcatgatggaga

SEQ ID NO: 500096 - DNA, 75 bp, Homo sapiens
cgccccccaccctgcagccaggactcgatggaggtcctggcaaaactggcctgtggactaaacaagcccaaccgc

SEQ ID NO: 500097 - DNA, 82 bp, Homo sapiens
ccactgctggggtggtggttccaatgagacagggcacaccaaactccatctgctatgacatggtgcattacggccactccaa

SEQ ID NO: 500098 - DNA, 75 bp, Homo sapiens
ggtaagtgtactggagagagttggttatacattctaggaatctcaaaggtctagtgacggagcccgcgcgcggcg

SEQ ID NO: 500099 - DNA, 87 bp, Homo sapiens
cccggacgctgtccccaggccacacctgggaggtcgccagcaaaagaagagataacactgcatttccctttaccaactagcgctggg

SEQ ID NO: 500100 - DNA, 75 bp, Homo sapiens
gttcctgctgccctcaaggtcgtgcgtctgaagcctacaagaaagccccttggatctcccttcgtggagacgaca

SEQ ID NO: 500101 - DNA, 87 bp, Homo sapiens
ggaccaattcgggaacaaatactactacatcccgcagtacaagaactggagagatgccttcaattaagttgcagagttctgatggag

SEQ ID NO: 500102 - DNA, 102 bp, Homo sapiens
gccgatgtgtgagaagaccaccatcaacaatgagtacaactaccgctgctggaccacaaaccgctgccagaaaacggtgcagaggggcaggatgccgccgac

SEQ ID NO: 500103 - DNA, 75 bp, Homo sapiens
aagagaacaacctctctgaagaaggatggcactggatctttaaaacgcagtggttcctttagcaaactccgggct

SEQ ID NO: 500104 - DNA, 100 bp, Homo sapiens
atcctgacactatgaatgctacttggatgcctcttaaggaagaaatgttggctatttggcgatgagaggtggtgaacagtgaccatactggtatacaaca

SEQ ID NO: 500105 - DNA, 83 bp, Homo sapiens
gttgggacccgctccaaccctcgctgtcgcctggttgggcccggaaatgggacgtcgcgctttctcagggagcgtagaagcag

SEQ ID NO: 500106 - DNA, 122 bp, Homo sapiens
gagggaggagattcagcccggcgatattgtcattattgatcagttcattgacagatacgtaggtaacctttccagagatgtgacagaagtccttatacttcagttgttcagtcagattggac

SEQ ID NO: 500107 - DNA, 75 bp, Homo sapiens
acaaccgcgtgcgtcagattctcatggcctctgggtccaccaccttcaccaaggaagaggatcacctagcccggg

SEQ ID NO: 500108 - DNA, 100 bp, Homo sapiens
atgttagcgttgtatcttgggagaaagacacagtctccatcatcccaggttttgcacactagggaccaagaagccctcggggacactgctgagaaaagac

SEQ ID NO: 500109 - DNA, 89 bp, Homo sapiens
cttaaatcgtctggacattgaagggcactccacagaaggatgttattatcaagtcagatgcaccggacactttgttattggagaaacat

SEQ ID NO: 500110 - DNA, 98 bp, Homo sapiens
ggagaaccattaatcatctctaaggtttttgattggtcaaggagcacatgtaggggctgtcaacagtgaaggagatacacctttagatattgcggagg

SEQ ID NO: 500111 - DNA, 90 bp, Homo sapiens
ccaccatgaaagctaagctgctgaaggggtcctagcaggatgaagccatttaaatacaaccatcctcagggattcttcagccatcgctga

SEQ ID NO: 500112 - DNA, 89 bp, Homo sapiens
ggccttcctcacaggcctggcgcgctccaaaggcttccgcgtccttgacgcctgcaggcatccgtgtcattctggaccttactcccaac

SEQ ID NO: 500113 - DNA, 100 bp, Homo sapiens
ccagcgccgcacttacctgcgggattggtgagagcgttttcgcgaggtcgcaaattccggaattaaacaaccaccatgtcgagcaaaaaggcaaagacca

SEQ ID NO: 500114 - DNA, 51 bp, Homo sapiens
cgggaagccatagctctgcatgattgacttgatgcacaacatcacaaaggc

SEQ ID NO: 500115 - DNA, 50 bp, Homo sapiens
gttgagctgcagcgaagcacctctttacgcctcattgaatttgaagaatg

SEQ ID NO: 500116 - DNA, 97 bp, Homo sapiens
cgtgtgcccaacggtcggtgtccccggctgaggcagcgcggccgcagcagcccttgtaaaatgccacacgttggatgagatgattatccgagctcag

SEQ ID NO: 500117 - DNA, 51 bp, Homo sapiens
ctgggagcaaatatccagaacagttgcagaatgaagaagagtctggagaac

SEQ ID NO: 500118 - DNA, 89 bp, Homo sapiens
gggtccttccttccagcctgatgctaccaaaggtggaaagtcctgaagaaatccagtgggaccttgttgctcgcctggatgaactcggg

SEQ ID NO: 500119 - DNA, 100 bp, Homo sapiens
ccatatttatctggaccagataaaaacctgaccagtgcagagacccctgggcatactccttccttaagatgggatgagacaccaggtcgtgcaaagggaa

SEQ ID NO: 500120 - DNA, 88 bp, Homo sapiens
gtaccaggcgaagctggccgagcaggctgagcgatacgacgggaattagaatcatggagatgctgctaaaggaacagtgtggtgcccc

SEQ ID NO: 500121 - DNA, 75 bp, Homo sapiens
aatgacttccttatgctctctaatacccagttcatagagaatggtctgcggaagagggagctgctgaaggagctg

SEQ ID NO: 500122 - DNA, 90 bp, Homo sapiens
ctgcagtacctgcagaaggtctctggagacatcttcagcagctgccgcagcgggaaccgcaagagcttggtggtaggaacgccctccccg

SEQ ID NO: 500123 - DNA, 51 bp, Homo sapiens
gacgagactacagcttggatgaatttgatgcatggtcatggaggctatgat

SEQ ID NO: 500124 - DNA, 100 bp, Homo sapiens
tccaaaagagggatgtaaagttcacgtggtcttcagcacagagcgctacaacccagagggcagcaggatgggtgtggaagcagtgatggcacttttggag

SEQ ID NO: 500125 - DNA, 75 bp, Homo sapiens
tgaagatgtcagtgcagttgccaaaggttgcttatcaagtgtcccacaaatgaaaaaaatttctacatcttacga

SEQ ID NO: 500126 - DNA, 73 bp, Homo sapiens
ttctgagtgcctcagttttcccttccacaaaatgagtacataccgagcatcaaatattaaggcacccggagaa

SEQ ID NO: 500127 - DNA, 75 bp, Homo sapiens
ccagaatacatgtgcaatgctgacaacttttaatgagattgacatgagctatcatggtgaacttacttcagattg

SEQ ID NO: 500128 - DNA, 75 bp, Homo sapiens
ggaattttgaagtacaccgtggtgacattgtatcattggtgccccttcacagatgtagtcactacaaatcttaaa

SEQ ID NO: 500129 - DNA, 50 bp, Homo sapiens
tgccttatcaccttcttgcttgcagatcttaccaatatatttgagtcctt

SEQ ID NO: 500130 - DNA, 90 bp, Homo sapiens
gctggcatctggggtgtgctcgcacctgcgaagaatccagcttctagggagcaccgcgagctgattgtccagaacatcgtgggcacagct

SEQ ID NO: 500131 - DNA, 74 bp, Homo sapiens
tagaagaacgcttagcccaggctatggaggaattatgtttcgcagaaaagtgtccccaaggaagtgccaccagg

SEQ ID NO: 500132 - DNA, 90 bp, Homo sapiens
gtcggttcgtgctgctgagctgcccaggcttcacggagcgggtctgggggtggtggcatctcccctaaaggaagtggtccctctgtggca

SEQ ID NO: 500133 - DNA, 101 bp, Homo sapiens
cagaccattgggaattcctgtggcacaatcggacttattcacgcagtggccaataatcaagacaaactgggatttgtggtttgatgataagaacccaattt

SEQ ID NO: 500134 - DNA, 98 bp, Homo sapiens
agccacttgaagaaaagggtgaaggaggcgaattttcagttgatagtgtgaaaaaaaaggtgcagtttgatggaacaaattccgcatttaaagagctg

SEQ ID NO: 500135 - DNA, 128 bp, Homo sapiens
gttacacgaggttggtcatgaaagagattccttgcagagacagctcaacacggcacttccacagacggaatcagtccccaatgcctggaaattcctcattggattactgtgttttaaacagaatttcg

SEQ ID NO: 500136 - DNA, 83 bp, Homo sapiens
cgcgtgtctaggtgagtcgcggtgggtcctcgcttgcagttcagcgaccacgccactgaggcggctcccagctgcgttggcga

SEQ ID NO: 500137 - DNA, 83 bp, Homo sapiens
tgcagaggccatggaggacgaggagagacagaagaagctggaggccggcaaagccaaggatatcaatgcttacaattgtgaag

SEQ ID NO: 500138 - DNA, 83 bp, Homo sapiens
gttttcaatgcacaaggggaaatttggcttgcaattcatcactttgaaaagtattacaaatgcggtgcccagtttgctttggt

SEQ ID NO: 500139 - DNA, 75 bp, Homo sapiens
tgatccggttcgacgaggagacccagaggacgttcctcaaggagggggcagtacccaaaggaaacgctacgaaag

SEQ ID NO: 500140 - DNA, 100 bp, Homo sapiens
tgttgcgccagtgccccctgcttctgccccagaaccggtcgaaaaccgtgtatgagggattcatctcggctcagcctaaacccaccaagggacgaatgcg

SEQ ID NO: 500141 - DNA, 82 bp, Homo sapiens
tggagtgcgtgggggaccggctgttggcggaggcctaacatcgtgtcccagctcagccaagcctgcgatggagccataacga

SEQ ID NO: 500142 - DNA, 100 bp, Homo sapiens
gctggggcttttgcggcaccgagggctcaggccaggtgtccgcaatgttgccagtgtctgtctgcagattggctacccaactgttgcatcagtaccccat

SEQ ID NO: 500143 - DNA, 100 bp, Homo sapiens
atattgtccttttggagcagggcaggcggatgaagaccccatcatggggttccaccagatgttcctattaaagaacatcaacgatgcttgggtttgcacc

SEQ ID NO: 500144 - DNA, 88 bp, Homo sapiens
gaagcgtcgggattaggtgaaaatgccatggacaatattaccaggcagaaccaattctacgatacccaagtcatcaaacaagaaaacg

SEQ ID NO: 500145 - DNA, 100 bp, Homo sapiens
tcacggaggtcaatgtctacggctccggcaccctggtcctggtgacagaacctgcagatgacagcagcttctcgctgtcccaggaggttctccggcacct

SEQ ID NO: 500146 - DNA, 100 bp, Homo sapiens
gggaatcaatgttgaaaataaaagaaggacttctaaggcagaaagaaattgtaatcgatcgctacttgaaggaaattttgccaaagaagtgagccatgaa

SEQ ID NO: 500147 - DNA, 51 bp, Homo sapiens
cacctgtgcgggatggaacaaaaggcttttatcttgagaacatggtgtctg

SEQ ID NO: 500148 - DNA, 77 bp, Homo sapiens
gggactgcctggagagctcctatttcaaggagaagcccctacgtcgggagcaggctgaactcactgggctccgcctg

SEQ ID NO: 500149 - DNA, 75 bp, Homo sapiens
atgcagatgaacactattcaaaggaccatgatgtgaaaatggagtgcatctgggggaggtgttgtagccattgac

SEQ ID NO: 500150 - DNA, 75 bp, Homo sapiens
agataaaccaccgcttacagatattgggtgtggtcactcacctgtctaccactcccgtgaaatggcagctcgtgc

SEQ ID NO: 500151 - DNA, 100 bp, Homo sapiens
ctgagaggctgtttcagctcttcagggaggggctgctgtatgcggcctcacactcgggcgtagtccaggtgcccatggccaactgcagcctgtacaggag

SEQ ID NO: 500152 - DNA, 74 bp, Homo sapiens
tgacctcgacacagagtggaatctgtttataggccgtttgagcaaggaagacattgaacgtatggtccaggaag

SEQ ID NO: 500153 - DNA, 100 bp, Homo sapiens
cgggccctcaagcccagtcgggactcgagcctagggaggcgaggttcccgcaccggatagggccacccgttcatcgtgcagttcaatgatggaaatgccg

SEQ ID NO: 500154 - DNA, 92 bp, Homo sapiens
attggcgcaaaagggacatgacacttctagactgattaaaaatcttggtggcttggtccagcatagtttatcagctgattcccaatgttcag

SEQ ID NO: 500155 - DNA, 83 bp, Homo sapiens
cagcacctggaatctaaggagtggtttgtgcagctctattaccacgggaagggcaagaatatcacggcatgggcatgagtagc

SEQ ID NO: 500156 - DNA, 98 bp, Homo sapiens
gtgtgcttagaggtgtacgagaagccggtacaggtgccctgcggacacgtaaggcagacggtaacaagtactccttgctggattgaacttcatctgaa

SEQ ID NO: 500157 - DNA, 82 bp, Homo sapiens
ttggggatggcgtgcagcgcaaccacgagacggccttccaagattatttgacttccaacgggcacctgagtgagaacgaggc

SEQ ID NO: 500158 - DNA, 74 bp, Homo sapiens
ttcttccactagaagctcttctgagggaggaaaatcctgccttgcttcgttgggcctatgcaagaacaataaat

SEQ ID NO: 500159 - DNA, 50 bp, Homo sapiens
ctcctaaagtgctgggattacagggattcagaatgtgttgctggacttca

SEQ ID NO: 500160 - DNA, 100 bp, Homo sapiens
gacatgagtgatgtggaggaaaacaacttcgagggcagaaaaaagcttgtggtgaaggggggcaaaaaaaagaagcaagttctgaagttcactcttgatt

SEQ ID NO: 500161 - DNA, 82 bp, Homo sapiens
aagaaggtgggcgttatcttccgactgatccagctggtggtcctggtctacgtcatcgggctgaccccgcactacatctacc

SEQ ID NO: 500162 - DNA, 50 bp, Homo sapiens
ccgaagtctggacatcaatgcctttaggtggataagtggttccatcacca

SEQ ID NO: 500163 - DNA, 75 bp, Homo sapiens
ccagatgaactgtccttccaacggggtgacctcatccgtattctgagcaaggttcaaaccttgtactactcagct

SEQ ID NO: 500164 - DNA, 96 bp, Homo sapiens
aggcccttttggatcttcatgccctgggttctgcccgcacggacccccatctagagacatgacctaacaccctgatgaccactctcagggaccttg

SEQ ID NO: 500165 - DNA, 100 bp, Homo sapiens
aatgatgggaaggtggatcccgccgggaggtactttgctggtttgggagttgagtgatattgaccatgatggaatgcttgacagagatgagtttgcagtt

SEQ ID NO: 500166 - DNA, 75 bp, Homo sapiens
tgctcagcaggagcttcatcaacgatatatgtcagatctaaagagcagcccgacggccatggaggctgaagagac

SEQ ID NO: 500167 - DNA, 98 bp, Homo sapiens
tctcttctaagctgaataaagctgttttggaactgtcaggtacctcaaagcttcttcaccaaaggacatggatgaaaatgaaagcaaccagtctctga

SEQ ID NO: 500168 - DNA, 90 bp, Homo sapiens
aaattgcatttttagaacctagagaaatcacactgcctgaggccaaagataaggattttatattgcacgctgatcttgcctatgtatcac

SEQ ID NO: 500169 - DNA, 97 bp, Homo sapiens
gtgagcgacccggacaccgacgcgctcatctgctggagcccgatcctattgatcatcgcttcagttattgggatcattgtctataggctctcggtgt

SEQ ID NO: 500170 - DNA, 90 bp, Homo sapiens
tctgtggtggaagcagacctcgtggaagcgctggaaaaatttgggacaatatggtactccaaagattcaggtttactcacgtcatccagc

SEQ ID NO: 500171 - DNA, 100 bp, Homo sapiens
ggacagctagctgcttatggctataaaattacagatagctgatcagcttccttgggttttgctgatgacacaagagagctttgcctgaagatggaaacac

SEQ ID NO: 500172 - DNA, 80 bp, Homo sapiens
gtaagagcccatagcagtctgccagacaatagagcatatgggtgcatgtgagggaaccctggcttgttcaacctgtcacc

SEQ ID NO: 500173 - DNA, 100 bp, Homo sapiens
acctctacaacgaaggtgaagccacggaagataaggatttctctctgatcaaacggacagttcaggactcagaatctaaggatgaatgttcaccgtggca

SEQ ID NO: 500174 - DNA, 76 bp, Homo sapiens
tgccagattcacagatttattgtgaacactctgaaagacggaagcgagctggattactacgactcccacaatgtca

SEQ ID NO: 500175 - DNA, 98 bp, Homo sapiens
acccgtgcccaggagcttgacgccttagataacagccatcctattgaagggcacgttccgctttgaaagacctgatggctcccactttgatgttcgga

SEQ ID NO: 500176 - DNA, 82 bp, Homo sapiens
aagcccatggtaacttctgcttgtaatggaacacggaatgtggccccttcaggagaggaaatgaagtgtctgatgaagagtg

SEQ ID NO: 500177 - DNA, 75 bp, Homo sapiens
agtcacacttggagcagaaggcataattagtgaatttacacctttgccaaggtcatacttacctggttgcttgcg

SEQ ID NO: 500178 - DNA, 101 bp, Homo sapiens
ttttgtgaaaccaagaaagaagcccaggagctgtcccagaattcagctataaagcagtgttctccgtggcccgatgcccccacagcctatgtgaataacag

SEQ ID NO: 500179 - DNA, 100 bp, Homo sapiens
ccggtttccctcggcgtgctactgtgcgctcgatccagcaccatggggaagcgggacaatcgggtggagcgggacggtatgcgggccatcctggggtcct

SEQ ID NO: 500180 - DNA, 74 bp, Homo sapiens
ggtcagcatttgaatgcctgagagaagctggaggctttcaccgttgttttaagcgcacctctacaagtgcccgg

SEQ ID NO: 500181 - DNA, 88 bp, Homo sapiens
ttgggtttctttcttaaaggactgatttttagaactccacatttgagggcattcttagcagggttacagaatctgttaagaatattgt

SEQ ID NO: 500182 - DNA, 74 bp, Homo sapiens
gccatgagcatggttcaaaacaggcaaggaattgttcctcctggtcttacagaaaatgaattgtggagagcaaa

SEQ ID NO: 500183 - DNA, 97 bp, Homo sapiens
gcgcactgctcgccctgtcaacaaagtgatcaagtccgcctcagccacagccctctcactcctcattccttcgggccttcccttcttcttggtggtg

SEQ ID NO: 500184 - DNA, 90 bp, Homo sapiens
ccaacgctcccgcccagggctcatcgccacggccaagcatactccggaagaaacctgccacagatggtcatgcccataaaaacacagtaa

SEQ ID NO: 500185 - DNA, 100 bp, Homo sapiens
ggcgggccagggccgcactccggagactcgcggttgctacgcgcaccatggctggagtattggatgaacgaatatacctcatccattggaattggagttt

SEQ ID NO: 500186 - DNA, 83 bp, Homo sapiens
gggcgctcgagacttaccagagccacaaggagcttactccacgggaacagcctctagataatctgagttgttgaaaatacgaa

SEQ ID NO: 500187 - DNA, 100 bp, Homo sapiens
acactatggagagggaagcagatggcaaagcagagagcagaggttcttcagtccacgcaacggttcttctctgaacagcaacagagcaaacagataggag

SEQ ID NO: 500188 - DNA, 99 bp, Homo sapiens
cgtgaaaatccgcagcaggaagcttggggttatgaagacagtatggagtttccagaccatagtagacatttgctacagtgtctgagcgagcagagacac

SEQ ID NO: 500189 - DNA, 90 bp, Homo sapiens
gtagaagtgctgagtaagccgaggccaggcacctcattgagaagtcagtgcgtaagatcgtctccttgctggcagcgtccgaggctgagg

SEQ ID NO: 500190 - DNA, 82 bp, Homo sapiens
gccatattgcggccctcagcggccgcgaccgagtcatggctgagacctacgacctgcttttttaaaggctgcagaaaacttc

SEQ ID NO: 500191 - DNA, 100 bp, Homo sapiens
tgccgcctcaagaagtgcctcaaagtgggcatgaggcgggaaggaacgtctggtcctaaccagtgagcactggttagtactggtccccttctgggcaaca

SEQ ID NO: 500192 - DNA, 96 bp, Homo sapiens
cctaatccagcatcggaaagtccacccagtggctgaatcaagctagctccttggaacagtgccttcccagaccttccaccttaggttctgctgcaa

SEQ ID NO: 500193 - DNA, 115 bp, Homo sapiens
cgagcctgggaggccggccggtgccagcacctttcggcttctgagacggcggcagcagcggcattcagccatgtacatcttcatgtgatcagccaggattttgattctccttgcc

SEQ ID NO: 500194 - DNA, 83 bp, Homo sapiens
tgggcgggggtctgagcccagtgcagccaggccgagggctagtctattatcctcccagtccacaacgctgaaccgtggctgga

SEQ ID NO: 500195 - DNA, 75 bp, Homo sapiens
gcctcaatttgctggatttaagcactgctgcactttatgagccttatgattctgcagatgactggtctgagcata

SEQ ID NO: 500196 - DNA, 75 bp, Homo sapiens
aggagctgttagccaggctaggtgcctgcaggttgaagaactgagctctatctgaagatgcctctaatggaggag

SEQ ID NO: 500197 - DNA, 83 bp, Homo sapiens
ctctttcgaagccattcagtcctcaatctccttttccttggctacccaaaatggtgtgaatggaacattaacttcaaatgtag

SEQ ID NO: 500198 - DNA, 100 bp, Homo sapiens
cgcgctctgggcacagccttggaaagtcaggaccgcgacggcagcagagcaggcagcatctcatcacggcagttgctgaccatctatttaagctgaagac

SEQ ID NO: 500199 - DNA, 100 bp, Homo sapiens
gcggatcgaagtgatggccctgcccaaaccgggcggggcccacagcctaggtaccgagcccctgaactgctgttgggaaccaccacgcagaccaccagca

SEQ ID NO: 500200 - DNA, 87 bp, Homo sapiens
ggccctgtgggcctgggagctgcctctgaggaacacgccgcaggcgacgttgtggacgtttaccagcgggagttcctggcgctgcgc

SEQ ID NO: 500201 - DNA, 75 bp, Homo sapiens
tgaatactgtccgagaaattataggtgatgaactagtccaggtccagtgtcgtcctcttctgccacacagtccag

SEQ ID NO: 500202 - DNA, 75 bp, Homo sapiens
tttgggcagcttttccggcctgacaacttcatctttggccggtcatgcccaacatggtcttcattggaggtatca

SEQ ID NO: 500203 - DNA, 75 bp, Homo sapiens
tggtggtcggatttcaccacaagaagggctgccagtactttgccagacgtttatcaaaatggggctgctgtcttc

SEQ ID NO: 500204 - DNA, 98 bp, Homo sapiens
tgaccgagagcgcgaatatcgtcatcgttagaagcttcccagtgatcctgtccatcgaggagcactgcagcgtggagcaacagcgtcacatggccaag

SEQ ID NO: 500205 - DNA, 100 bp, Homo sapiens
ttatgaccagtacagcagtgaccgagaccaccggggacacagagattattatgacagaatggtggtttggcctggagtgatgatgcagatggaggccggg

SEQ ID NO: 500206 - DNA, 100 bp, Homo sapiens
ccggaatggagaaggaagaggagtcggatcacagaagaactgcagcttcctggggagcagtttcacctccacaggcatcgcttcatactcctcactgtca

SEQ ID NO: 500207 - DNA, 75 bp, Homo sapiens
cttcagtatctcagtcctccagtgtttggatattcagatgcagagcaaagcggcagtccccggacagggatgggc

SEQ ID NO: 500208 - DNA, 100 bp, Homo sapiens
gtgtggccgtcgaggtccgtgtgcagaggaacagatggagtcggataactgttcaggaggagatgatgactggacccatctgtcttcaaaagaagtggac

SEQ ID NO: 500209 - DNA, 76 bp, Homo sapiens
agatgattactctcgggatgattataggcgtgatgatagaggtgtatggactggagaaaccattcctgtgcggact

SEQ ID NO: 500210 - DNA, 100 bp, Homo sapiens
ctcatgaagctcaagatgcagggtcaaaacgtgagcaggaggtgaacatcctgaagaagaccctggaggaggaggccaagacccacgaggcccagatcca

SEQ ID NO: 500211 - DNA, 75 bp, Homo sapiens
cggccggagaagggctgcgggttagggggccggcgcccgcggttcagagagcatcagtgatgtcacgtttggagc

SEQ ID NO: 500212 - DNA, 51 bp, Homo sapiens
ctgtcactgcaggagctgcagaccatcagtacagaacctgctaaggccatc

SEQ ID NO: 500213 - DNA, 75 bp, Homo sapiens
cctcaagcagcacgtgctcatccacactcacaccatatgaaggcggagtatggaaagttagagtggacctacctg

SEQ ID NO: 500214 - DNA, 100 bp, Homo sapiens
agctgtatgttctcatgtcctggacactaccacgttgatggctttctaaatccaggattcatgatgttgctatcaaaagttgagaaattgtcagaagaaa

SEQ ID NO: 500215 - DNA, 100 bp, Homo sapiens
ggatgcgttgctgttccaagcccaggcggatgagacctgcgtcttgtggcagtatttccctggccggcccttagtccagaacttcctgcactccgtgaat

SEQ ID NO: 500216 - DNA, 98 bp, Homo sapiens
ccaaccccttcttcgtgctgcagcgacgccggggccacggcaggggcggcggccttacggaaatgcactcggtgatggaaagagagccactattctga

SEQ ID NO: 500217 - DNA, 100 bp, Homo sapiens
cctgacctcctgtgggttcccaaacactaacttgtttccctgggaatttggaggtgggttcgaaaaagctaagaaatggcatttcaaaaggcagtgaaag

SEQ ID NO: 500218 - DNA, 90 bp, Homo sapiens
acctccggggccacaatagcgagccaactgggtcctgaagtagctgaaatgcgaaaaaggcagcagtcccaaaatgaaggaacacctgcc

SEQ ID NO: 500219 - DNA, 75 bp, Homo sapiens
gtgcgggctccttgcggcaggtcccaagagacttgggaccctggaggactgacgctgctggcctgggcgtcccct

SEQ ID NO: 500220 - DNA, 90 bp, Homo sapiens
gaagatgttgatggagaagctctaagtacactcgtcttgaatagggtgttcatttagaagaaagcaacactaatgattcaaacagcttcc

SEQ ID NO: 500221 - DNA, 100 bp, Homo sapiens
aggctgtaaaacctggcactctgcttgggagttcatgatcaagtgttgcccacaccaaatgcttcatccagagtcatagtacatgtggatctggattgct

SEQ ID NO: 500222 - DNA, 50 bp, Homo sapiens
atgaagccgcggaccctcacgcactgtgacttctgccgtgttcaccgtgg

SEQ ID NO: 500223 - DNA, 100 bp, Homo sapiens
tgacagaatcgcatttattagtcacttgtgactgtttaaactgctggaacccaatgtgaatattggactggcggagccttgggaagtgaaccttccatag

SEQ ID NO: 500224 - DNA, 75 bp, Homo sapiens
ggcctagcccagagacatggagagttgctacaacccactggaagcagagatccaaagctgtcttgatttcctccg

SEQ ID NO: 500225 - DNA, 80 bp, Homo sapiens
atggcatagcagagttactggaaatattgggaagtctttctctaatacacagaattctaggaaggaggctgttcttttag

SEQ ID NO: 500226 - DNA, 88 bp, Homo sapiens
tggcgaccgagggaatgatccttactaaccacgaccatcaaatccgtgtcggagtccttacaggttatcttgacgaatcagattacaa

SEQ ID NO: 500227 - DNA, 50 bp, Homo sapiens
cgaggatcaggaaaaactatggagaactgcgacacatcaccaagctgaag

SEQ ID NO: 500228 - DNA, 89 bp, Homo sapiens
aagcaatcctaccatgtcagccttcccagtagctggaactacaggtgtcagttgtacccgaggcgttctcagcagcagcaagtacctgt

SEQ ID NO: 500229 - DNA, 142 bp, Homo sapiens
agaagtgtatatcaagccacaatttccatcaaaaagtgattaagcagagaatggagaagaaggttgattccaggcatagaatgtcaagctaaccaggcgtccgctacttcagaagagtgtactgtcgcatggggagtctgta

SEQ ID NO: 500230 - DNA, 100 bp, Homo sapiens
caccctccaaacctaaccctgtctttaaagtgtttggtgcagcacctttggagaatgtggaagctggagacaacagccagttctgctggaggaacctctt

SEQ ID NO: 500231 - DNA, 99 bp, Homo sapiens
gcagaatgttgcctatcagtacctgtgccggctggaggaggccaagcgagcaaaatatgctgtgaattccatcaagaagaaagtcaacgacaagaaccc

SEQ ID NO: 500232 - DNA, 82 bp, Homo sapiens
cgcggttcttctccagcgccctggcctccctcaccttggacacctcgcttggtaagactttgaccccgacgcaggcttcagt

SEQ ID NO: 500233 - DNA, 100 bp, Homo sapiens
ttcctcgtcgagcgcaacccaagaaaatatttacaccagcagctccagttcataccaataaagaagatcctgctacccaaactaatttgggatttatcca

SEQ ID NO: 500234 - DNA, 78 bp, Homo sapiens
gctgtggacaaccagccccgagacatcggactgcaggtcaccagtgaaaagttgtgcagagcccaacatgagcttcat

SEQ ID NO: 500235 - DNA, 96 bp, Homo sapiens
ggatgccattagcaaggatgtttttaataaggtgacatctgttcccgagctgttcctgactgcagtgaagctcacccatgatgacacaggagccag

SEQ ID NO: 500236 - DNA, 102 bp, Homo sapiens
actggaggttttggctctgcgtgagtgtggtctacgagctgtttctcatctttatactcttccagaatctccggcctgtgaaactgtgaggggattcggcca

SEQ ID NO: 500237 - DNA, 75 bp, Homo sapiens
ctccaccctgtacactaaagctaatcttatcctttgtcgcagagactatctgagattgcattctcacaacacaat

SEQ ID NO: 500238 - DNA, 73 bp, Homo sapiens
gttggtccaagggaactgggtggtgaagagcgggacgaccctgggacagtctccactggggcagatccagctg

SEQ ID NO: 500239 - DNA, 75 bp, Homo sapiens
ccactcttcaatatggaagataagacctggaatcatttttctgataatgaggcagagcgggttaaaatgatggaa

SEQ ID NO: 500240 - DNA, 100 bp, Homo sapiens
cttccgccgacccgaagtcatcgctgggagtactggttgccctttcctcaggcctttgaggattggaataagacagagctagactcattcctgattgaaa

SEQ ID NO: 500241 - DNA, 103 bp, Homo sapiens
gcattaatactcatcttgtccagaactctgtcaaatgaagaacactttcaagaaccaggtatcttgcaatatattcagaactctccctcctagtgacagcaat

SEQ ID NO: 500242 - DNA, 75 bp, Homo sapiens
ctcggctgtacaaagttttaaagatatatggtacatttgctggagttggctgtgactttcattgagagattagaa

SEQ ID NO: 500243 - DNA, 100 bp, Homo sapiens
acgaggggtgaagcggcccaggtgagggtgaaaggtgtagcagtcactcggcctacacccacagcatcgaccttgtgaacccagcgacctgactgccttg

SEQ ID NO: 500244 - DNA, 75 bp, Homo sapiens
cggaacaggacgccctctgatataagatgctcccaagtcccttgcagctctcttcagaagaaaaatcactagtgc

SEQ ID NO: 500245 - DNA, 75 bp, Homo sapiens
cttggtctcactgacttcaagaatgaagccgcggaccctcgcgagctggactggccattatggaggaggagctgc

SEQ ID NO: 500246 - DNA, 100 bp, Homo sapiens
gctgatgcaggtgaacgacactctgacttccgaagatgccggactccggaacagcaagaactgcaccgaaccagaaagctgacttcatgagaccgaggat

SEQ ID NO: 500247 - DNA, 90 bp, Homo sapiens
ggcgggctgaggcggcccagcggcggcagggacgtaccaaggccagttcaccaacggcatgcgccatggctacggagtacgccagagcgt

SEQ ID NO: 500248 - DNA, 96 bp, Homo sapiens
aatgacctgttgcagtgctttcattgaagtgttcttcgttccctcagcaatatgattgtgtcatggagaaactccagctgggcccagagattctgc

SEQ ID NO: 500249 - DNA, 50 bp, Homo sapiens
cggcagttcatcatctcctgggggtcacgggcgtcagcggtccagggaag

SEQ ID NO: 500250 - DNA, 100 bp, Homo sapiens
tggaggcccggggggcccagctcccgtagggagccgtgggcgctcggtgcccgggccgggcaggttcagattcagaacaagaaagtggacatctctaagg

SEQ ID NO: 500251 - DNA, 100 bp, Homo sapiens
ctgggctttgggagtgccaaagaggcagtcactggctcccgactggggcaagaggcattatcatcccatagtgcagagatttgcagcccacctgatcgct

SEQ ID NO: 500252 - DNA, 75 bp, Homo sapiens
cgaaggatggaatcttcaatcaatcatatttcacaagtttacttagaaaggcttttaacttatgctgaaatcgac

SEQ ID NO: 500253 - DNA, 98 bp, Homo sapiens
gatggtgggccccaacttccgcgtcggcaagaagatcggctgcggcaacttcggggagctccgcctagtgatgagtctcaagcaacaaaagaaatttt

SEQ ID NO: 500254 - DNA, 100 bp, Homo sapiens
cgctccgctcgtcggcgcaccacgcagatcatcaacatcaccatgaccaagtcggctacagtcgcaatacaagcagcgtgtccccgcgaggctacgtccc

SEQ ID NO: 500255 - DNA, 100 bp, Homo sapiens
gtttcctgtgtccagcgctgccggagccgcctgaggtctacgacgttcctccatcggtgagcaaggatgtgcccgatggcccactgctgcgtgaggagac

SEQ ID NO: 500256 - DNA, 50 bp, Homo sapiens
ctgcaacctccgcctcctgagttcaagcgattctcctgcctccgcctccc

SEQ ID NO: 500257 - DNA, 100 bp, Homo sapiens
ccaattcagttaatacagcttcgtgggattttcctgttcctatctgtagaggtgatgtgtccaatctagatcccaacttctcatttgaaggcaccaaact

SEQ ID NO: 500258 - DNA, 100 bp, Homo sapiens
tcagtgtacccgcagcccagaaccctgaggacctccgcatgtttgccaggcctgccttgctctgccaggaaccatgagtgaggcccgcagggacagcacg

SEQ ID NO: 500259 - DNA, 100 bp, Homo sapiens
ttacgtgccaccaaagtgacaaagggggcctttggtgacatgcaaggacagaataacgggctcccagattcacaagccccaccaagaggatcaccccagg

SEQ ID NO: 500260 - DNA, 98 bp, Homo sapiens
caaccatctggggaaaaggcaaaaatcccatctaccgcaactctcagttcgagagtaaagccacccacacagaatatgcctatgggtcctggagggat

SEQ ID NO: 500261 - DNA, 105 bp, Homo sapiens
cactgctgctccgtggagatcgtcccgcgcctgccggatgatcggctgaatgtaacagaggaactaacgtccaacgacaagacgaggattctcaacgtccagtcc

SEQ ID NO: 500262 - DNA, 139 bp, Homo sapiens
ttagattgctgttcctccttagaccacccgacagaccagaaactcatcccagagttcattaagaaggatgctcgtcagaagttccgctctgttctggttgaagcaacggtgaaactggatgaactggtgaagaaaattg

SEQ ID NO: 500263 - DNA, 100 bp, Homo sapiens
caggccagcaactcccagctcaatgcaatggaacgactgaagctggtgactgttttgggtgctggccttctctgtggaactgctctggcagtcatcgtgc

SEQ ID NO: 500264 - DNA, 100 bp, Homo sapiens
tcagtgttctcagaaaaaggctcagaagataacagaactccggccctttaatagttgggaggctctggaggagatgttaaagtaacccatcttgcaggac

SEQ ID NO: 500265 - DNA, 50 bp, Homo sapiens
tgatattgctactgtgtgtgattcagatcagttggccttatttcctcagt

SEQ ID NO: 500266 - DNA, 99 bp, Homo sapiens
gggaaatcggcgccatccttcagaatgcaggcattgaatgccccagaggagcccgaaacctcccaggcttggtgcaggaaggagagcccttcagcgagg

SEQ ID NO: 500267 - DNA, 82 bp, Homo sapiens
gtttctggtcttagggatgtcaagatggcgggtgaaaaagttgagaagccagatactaaagagaagaaacccgaagccaaga

SEQ ID NO: 500268 - DNA, 51 bp, Homo sapiens
tgtgatgtttgcctggtctatagttggactatctgctgccaaactcttgac

SEQ ID NO: 500269 - DNA, 100 bp, Homo sapiens
gtacagatttcgcctgaaggtcaccagcccctctggggagtgtgagtacagcccactcgtctcagtgtctacaaccaggaatgaaggatggcagcatgcc

SEQ ID NO: 500270 - DNA, 100 bp, Homo sapiens
ccgggagcggagcccctgtgggtggttggaggcaaagtaaagaagcccggtaaacgtggtcggaagccagccaaaattgacttgaaagcaaaacttgaga

SEQ ID NO: 500271 - DNA, 100 bp, Homo sapiens
ccgaatcaaacagggcattcagggagactggaataactgatgaggaacaagccattagcaggcaacctggcggttcattgaatgccaacacctccaacac

SEQ ID NO: 500272 - DNA, 109 bp, Homo sapiens
tggtgttctatactggaagaggcatgccagaggtagagcaggtctgtccacgttctctgtgggttcattgccggacttgagtctgagttcatggagactctgtcggatg

SEQ ID NO: 500273 - DNA, 75 bp, Homo sapiens
ccagggtcattgtcgtggatttgcacagtcggctgggcggtgcaatggcgctttagcgtcacctccctcactggg

SEQ ID NO: 500274 - DNA, 83 bp, Homo sapiens
aaaacactatcccagggagtgcaagcttagagcgtctggccaagaatcagaggaagtggccaagaaggatcaagaaggtggag

SEQ ID NO: 500275 - DNA, 100 bp, Homo sapiens
aggaaaaatgaccatgtccaaggttatcaatactctggctgaccatcatcatcgtgggactgactttggtggaagtccttggttacatgtcattattgcg

SEQ ID NO: 500276 - DNA, 75 bp, Homo sapiens
ggagcgtggcggaactcaggctccagctccagcagatgcggcagctccagaattccctgaccaggagcgcacccc

SEQ ID NO: 500277 - DNA, 97 bp, Homo sapiens
tggccgcagcttctatatccatggactcagtattatcaaggtggagccgccaccaaaatgcagattttcgtgaaaacccttacggggaagaccatca

SEQ ID NO: 500278 - DNA, 80 bp, Homo sapiens
aatataaccgagctgtgacatttaaggtgatggtgtttgtacatgctcgaaatgccactgtaagaacagctatgtctcta

SEQ ID NO: 500279 - DNA, 100 bp, Homo sapiens
gtggcataggttatgaagctaatcctggcgttccaccagcaaccatgagtggttccatgatgggaagtgacatgacaaatgctgtgcttcatgaagttaa

SEQ ID NO: 500280 - DNA, 100 bp, Homo sapiens
tggagcgagagatggatgctcacccgaaggctgattactttgggccaccttcagctcctaggaatgtggtttttaacatcaatgaaacagcccttatttt

SEQ ID NO: 500281 - DNA, 97 bp, Homo sapiens
gtgccctggagttacctcgtctttctaactaagtactatcccaactgtgaggtcgtgttcatgggaatggccaacatccatgccatccggaacagct

SEQ ID NO: 500282 - DNA, 99 bp, Homo sapiens
cgcctgaggagcgggatctaacccaggagcagacagagaagctgctgcagtttcaggtttacccaaggtccagcctagcccctaggcaccatgtcggac

SEQ ID NO: 500283 - DNA, 96 bp, Homo sapiens
ggaaactactatgcatgtaaacaaatgaagcagcgctttgaaaggcgtatgtgggctctgcagtcatgaccgatgagacatccgtggtttcctcac

SEQ ID NO: 500284 - DNA, 98 bp, Homo sapiens
cgcgccccgccgctgagccgtcgcggagccgcgcagccctcggagcacggatcatgtatatgaacttctcaacaccattgatgcctgccagtgccatt

SEQ ID NO: 500285 - DNA, 75 bp, Homo sapiens
tcatagacttcatagctgatgaggtgtccctggccagtgtccttccacctgtccacaagcatggggaacatcttc

SEQ ID NO: 500286 - DNA, 90 bp, Homo sapiens
gacatcttctggtcagagatacttcttaaaaaatcgaaacgagttggctgagactcttgcactcctgaaagcacaaattgatcctgtact

SEQ ID NO: 500287 - DNA, 100 bp, Homo sapiens
ctttccactggagttgcttcacttagctctacaatcaacccatgtggtacatgtccagggccgccgggtccccttccccattgccagcccctgaccctgc

SEQ ID NO: 500288 - DNA, 80 bp, Homo sapiens
ggcaaaggggaggttacgcagcaaaccatccagaagtgagaaggcaaccaaagtgcaggacatcaaaaacaacctgaaag

SEQ ID NO: 500289 - DNA, 80 bp, Homo sapiens
gcttgccggccccaacacggaccttgacttatctaaaaacagactggttgaagttccaatggaattgtgccattttgtat

SEQ ID NO: 500290 - DNA, 100 bp, Homo sapiens
tggaatcacccctagatctttcttgaagacttgaattagattacagcgatggggacacagaagaccttagctggatctccaaaatacaagtgaatcaccc

SEQ ID NO: 500291 - DNA, 97 bp, Homo sapiens
gcagatgcactggataactatgttattcgagtgccgcagaatggaattcggcattgttcctacacagcttctcggcaacatctctatgttgataaaa

SEQ ID NO: 500292 - DNA, 75 bp, Homo sapiens
cgctttccccgcaagatggacggtttcgccggcagtctcgcaaattgtggctactaatttgccccctgaagatca

SEQ ID NO: 500293 - DNA, 116 bp, Homo sapiens
catcctgccgtccttctccactttcgccagcccgtgccgcgagcgcggcctgcaggaggtgtcccgacccaggctaagcttgagcatggctgagcaggagcccacagccgagcagc

SEQ ID NO: 500294 - DNA, 75 bp, Homo sapiens
gtcacagggaagaaagcgatttcctccgcctcttccaaagcggttttgggatttgagattgacgcggtgaactct

SEQ ID NO: 500295 - DNA, 75 bp, Homo sapiens
aacaagtaatggaggagaagctgaatgcaacaaacattgaggtcagatgtaccaacagtaccagcaacaggccgg

SEQ ID NO: 500296 - DNA, 100 bp, Homo sapiens
tatgaagagctggctcggatgctgatggggctggacctgctggtgttcgcccacgaccatgtgaacacctacctcttcatgatgcaagcccaaggcattc

SEQ ID NO: 500297 - DNA, 75 bp, Homo sapiens
atggcactgaccctcctcggaggacctaacagaggcgttggggctgaacctctgctcccatggaaccggatgctg

SEQ ID NO: 500298 - DNA, 75 bp, Homo sapiens
ccgggactctgaactatggcgcttacaaaacactacacagcaaaataatgatctgctagactgctaacccgagca

SEQ ID NO: 500299 - DNA, 96 bp, Homo sapiens
agttctgcaagaggagctattctgatcttgaggagcccaaggtgggcatcaagaccatcaaggtgtactgccagcgcatgcaggaggagaacatca

SEQ ID NO: 500300 - DNA, 100 bp, Homo sapiens
gaacagcggtcgcgccggcaagagcagcgggagcggcgcggggaagggggcggtgtccgcagagcagtggtaagcatccgtggcattcaagacgaagatc

SEQ ID NO: 500301 - DNA, 98 bp, Homo sapiens
aagaggcgactgaggccggacggggcggacggcgacgcagcccgcggcagaaggttatcaatactctggctgaccatcatcatcgtgggactgacttt

SEQ ID NO: 500302 - DNA, 100 bp, Homo sapiens
ccatacaggaacagggcagacgttagcgtgagtgatcactctcaatcccgggtgatgcagaagatggggaagaatatgatgacccttttgctgggcctcc

SEQ ID NO: 500303 - DNA, 90 bp, Homo sapiens
atagctggtttaatcagaggttctaagcactggacatttgaaaaggcaacttcagttcatttatgcagaaggaaatatttgagcagccag

SEQ ID NO: 500304 - DNA, 80 bp, Homo sapiens
gcgcaaccacgagacggccttccaaggtgttcaggcgcttcgtggaggttggccgggtggcctatgtctcctttggacct

SEQ ID NO: 500305 - DNA, 100 bp, Homo sapiens
gccgggccccgcgctccgccccggcctagggccttgccccgggagcccgcgaggcacgtcagctaactgttcagatgatgcaaaatcctcagattcttgc

SEQ ID NO: 500306 - DNA, 75 bp, Homo sapiens
cgacggggtggacggcgtgaagacttcacagagaatgcagttgtcttgacttcaggtctgtctgttctgttggca

SEQ ID NO: 500307 - DNA, 88 bp, Homo sapiens
gactgttgggagaatttaggatcttgttgaatccagtccaggaagagagaagggcacagttacctaagtatcaacgtaatcttcctcg

SEQ ID NO: 500308 - DNA, 100 bp, Homo sapiens
gttcaccgccaaccccttcgagcaagacgtggtatttttcagtgctgtacaagcgtcttgaattactctggtagcttttccagaaagacccatgacttca

SEQ ID NO: 500309 - DNA, 90 bp, Homo sapiens
taacactccagtgggatgaacagacaaaccccacaagcactgcatacggccactcgctctggtgggaccctcgtgcttgtggggctgggc

SEQ ID NO: 500310 - DNA, 100 bp, Homo sapiens
agattcgcagtggtcgcttcttctccttggttgcctgggcttctggttcctcttcagattacattgggagatatttacacacaacttaaaaatcttgttc

SEQ ID NO: 500311 - DNA, 98 bp, Homo sapiens
gaggcgttctcccgactctggaccgacgtgatgggtatcctggacaagaaatggattctcagtcatgaagatgtcatattgggagaattactgggcaa

SEQ ID NO: 500312 - DNA, 96 bp, Homo sapiens
gccgagaaggtgtccgaggcccgcaaaaggaaatcctcattgacgattcaatttgttgaaggccaatttgtggactcctacgatccaaccatagaa

SEQ ID NO: 500313 - DNA, 75 bp, Homo sapiens
aaagcattaaaatcagaagttcagaagctacagactcttgtttctgaacagcaagatggaaagttgccttttgtt

SEQ ID NO: 500314 - DNA, 98 bp, Homo sapiens
cgccccggtttgacgcacacggcaccaaactaggagaaggcagagcccccccaggctatgaatgccctgatgcggttgaaccagctgaagccagggct

SEQ ID NO: 500315 - DNA, 100 bp, Homo sapiens
caacgcgagtgggagcaccaggatctcgggctcggaacgagactgcacggggatggcctttacccttgaagaaaggctgcagcttggaatccacggccta

SEQ ID NO: 500316 - DNA, 50 bp, Homo sapiens
tgggctgccggcacttcgcggcagatgggggctccggaggtggcgcccag

SEQ ID NO: 500317 - DNA, 100 bp, Homo sapiens
aaaacttacagcaagatggttcatcttttgccctagagcaattgaagcttaacagagcgttccaaaaagaggactctccagctactttttattgcatcag

SEQ ID NO: 500318 - DNA, 100 bp, Homo sapiens
ccgctagcgcggcctgggatgcgcttgggctccctggaatatattaaaggaatctgtgaacctgaactagaagaaagagaatgttaccccaaggacatgc

SEQ ID NO: 500319 - DNA, 100 bp, Homo sapiens
ccaaggaggacccaaaggagcagaagcttctgttaaggattctcagaagaatgctcatcatactggctagtggtggaccccaagctttagtaaatataat

SEQ ID NO: 500320 - DNA, 88 bp, Homo sapiens
aatggagcacgtccaggctgaccacgagcttttcctccaggcctttgagagcctgaccgccgctgcctacagagtcacactcaatcct

SEQ ID NO: 500321 - DNA, 90 bp, Homo sapiens
gacaaaaccagacttaaaaagtgtcatattgctgttggatctcctgatcctgcagctccaccaaagaaaccgcctcgccctggagctccc

SEQ ID NO: 500322 - DNA, 100 bp, Homo sapiens
ggcaaggtgatccagcaaggtcggcagagcaaggggcttacgcagaaggacctggccacggccacccagaggagaaggccaccccgcctggaggcacagg

SEQ ID NO: 500323 - DNA, 75 bp, Homo sapiens
cgcgcgcagggcctgcagcgggagctggacggcgagcgcgagcggcgcgagaaatttttgaaatcatgaatcctg

SEQ ID NO: 500324 - DNA, 82 bp, Homo sapiens
ccgggcgcggcgcggggaggctgaagggacgctcgggtaggcaagctggccactgccccaacccaggcatttcactgggcgc

SEQ ID NO: 500325 - DNA, 100 bp, Homo sapiens
atccattgcaaaccttattaatctcagggaactggatgtcagcaagaatggtcgaatgagtgatttgagtgtaattggtcatccaatagattcagaatct

SEQ ID NO: 500326 - DNA, 82 bp, Homo sapiens
accgcagcctccgcggccgagagtgcagcgattggattggatgctgctggcaagacaaccattctgtataaactgaagttag

SEQ ID NO: 500327 - DNA, 83 bp, Homo sapiens
aatggaagctggatttcctctcctgtaaaatgagttggaaaatggatataccttatttgattatgatgttggactgaatgata

SEQ ID NO: 500328 - DNA, 75 bp, Homo sapiens
gcagacggccatgtccgaaacctacggatttttttcccaggaagccatcccgtcagaggggttcaagtgatgaaa

SEQ ID NO: 500329 - DNA, 98 bp, Homo sapiens
ccgggactccctgtgccttgcttggagctgacgccgacgggtggtcctgacaaccaagtccactttgaagggtaccaggtgtccaatcagtgtatggc

SEQ ID NO: 500330 - DNA, 75 bp, Homo sapiens
aagaaaccagggcagaagaagtctaaaaatggaagcggttgcccccaagtttcctggcagtgtgtgatactgagg

SEQ ID NO: 500331 - DNA, 100 bp, Homo sapiens
ggcgatggtaggcgtccctggagcggccgccttccagcaatgacatccttaactccaggctgcaggtactctgtacgtgtgtcacctcagatggcgaacc

SEQ ID NO: 500332 - DNA, 74 bp, Homo sapiens
ggccactgcaagtctataaagaacacgctcaggaggttgttggaagaggagcctttggagttgtttgcaaagct

SEQ ID NO: 500333 - DNA, 75 bp, Homo sapiens
tttgaagtatatgttgaagtggcctatcccaggacaggtggcactctttcagttggctgattgcaattctggccc

SEQ ID NO: 500334 - DNA, 83 bp, Homo sapiens
cgaatgcaacgtttgcgccaagactttcggccagctctccaatctgaaggcttattcaaacctccttagagctaacatggatg

SEQ ID NO: 500335 - DNA, 100 bp, Homo sapiens
agttggaagcccgggaccgtttaaaaaactggttgtacatcctggagacctgaagaattctgttgaagtcgcactgaacaagttgctggatccaatccgg

SEQ ID NO: 500336 - DNA, 100 bp, Homo sapiens
gatgagagcgacgaagccaactgtccagggcaatgacatcattgcagcagccaagcgcatggctctgctgatggctgagatgtctcggctggtaagaggg

SEQ ID NO: 500337 - DNA, 74 bp, Homo sapiens
tacaacacccccagcggccgccggctcccccacgaggtgctgggcctcgtgcgggtcccgctgtacacccagaa

SEQ ID NO: 500338 - DNA, 90 bp, Homo sapiens
cgggaggcggaggcgagggtgcgatggcgcggagcccgggacgcgcgtacgccctgctgcttctcctggccccttcacagatgtagtcac

SEQ ID NO: 500339 - DNA, 74 bp, Homo sapiens
tccaagacccacatcatgaagtcggcggatgtggagaacttggtgttgtggttgccccacatacattaaagtta

SEQ ID NO: 500340 - DNA, 75 bp, Homo sapiens
gatgaaaaagtgtgacttggcagctgggagtgcatccgccccaacccttttccccctcgtctcctgtgagaattc

SEQ ID NO: 500341 - DNA, 100 bp, Homo sapiens
tatgaggccagcaagcggaggtgctgggagcgagttggctgctgatcttgcatctttaatggataaaacatttgagagaaagttgcctgttagttcttta

SEQ ID NO: 500342 - DNA, 83 bp, Homo sapiens
cgcgtgtctaggtgagtcgcggtgggtcctcgcttgcagttcagcgaccacgtatgactggtataccaaggttacctcagtgg

SEQ ID NO: 500343 - DNA, 95 bp, Homo sapiens
cgtctgcggtgttacccacgactgcctgggacctggccaagggctccacacaccaagaccaagaaaaagcttgtggtgaaggggggcaaaaaaaa

SEQ ID NO: 500344 - DNA, 100 bp, Homo sapiens
acaggcgagacctggagatggacctgtgatctggggtgtgggccgaagatatgctcatgtggtgttgaggaaagcagacattgacctcaccaagagggcg

SEQ ID NO: 500345 - DNA, 100 bp, Homo sapiens
tatctcaacaccctgagtgcggatttctgctatgatgacagaatgtgagcatttgatccgccatatgttggtgttagatcccaataagcgcctctccatg

SEQ ID NO: 500346 - DNA, 101 bp, Homo sapiens
aaaaagaaagaggacgatgatggagaaatcgatgatggggaaatagactaaaatgtttattggaggcttgagctgggatacaagcaaaaaagatctgacag

SEQ ID NO: 500347 - DNA, 75 bp, Homo sapiens
ctcaaggccgaagccgagcagaggatctaaatacaagagtggcctattgtgacactccattcagggtaatggaca

SEQ ID NO: 500348 - DNA, 116 bp, Homo sapiens
ataaagtggagctgatgctgcccgagaaattgaggccgttgtacaaccatccagcaggaaagaccggcagagaccaatgccaatgtggacaactcggcgtccccctcggtggccca

SEQ ID NO: 500349 - DNA, 102 bp, Homo sapiens
acttgactactcgcatcgcgcactttttggatcggcatctagtctttccgcttcttgaatttctctctgtaaaggagagtcttgctctgtggcccaggctgg

SEQ ID NO: 500350 - DNA, 75 bp, Homo sapiens
cggatcccgtccgagccccggccccaagtaacgccgccgccccggagccgccgccaagcatggggatcagcacga

SEQ ID NO: 500351 - DNA, 97 bp, Homo sapiens
gaaacatgaatttgatgcagacttacaggcaaacgagatgctgctcagtggacggaagctgacagcgcaggaggcgtgtggcaagggcctggtctcc

SEQ ID NO: 500352 - DNA, 80 bp, Homo sapiens
ggagccgcagaggctcccgggctggactcaggcttctcaggaattttggagagtaaaaggctgaaccttgttaaagagaa

SEQ ID NO: 500353 - DNA, 74 bp, Homo sapiens
tcaagctttatacttaagtcattctcgcaggctctccccggaggctcagccccctctgctccccatgggcaact

SEQ ID NO: 500354 - DNA, 49 bp, Homo sapiens
agatcctcagccaccgcttcaaagggggccttgggcgtggaagtgcgag

SEQ ID NO: 500355 - DNA, 88 bp, Homo sapiens
gaagatcatcattaaggacggaggcacggtctatgaaggcctagacatcatcaccaacaaggtttctgcccaagagcagagaatctgc

SEQ ID NO: 500356 - DNA, 100 bp, Homo sapiens
aggcgagagggcgggcgctttacggcgaactcagaacattgatgatggcacctcagatcgcccctacagccatgctctggtggctggaattgaccgctac

SEQ ID NO: 500357 - DNA, 88 bp, Homo sapiens
cgaagctggccaaagcctgcccagacggctcacctgtgcgggatggaacaaaaggtgattgaaatctctgaatatcgaacccagctct

SEQ ID NO: 500358 - DNA, 100 bp, Homo sapiens
ggaagcaatgtttgaacaaactcgaagaacagctgtggaaagaagttgcaaaacactggtgggcaaatcaaactagcagattttggacttgctcggctct

SEQ ID NO: 500359 - DNA, 82 bp, Homo sapiens
acaaagtcatcaagctagtggacatcacggacatccagaagggtttgccttcccggattgggcctacaagccagagtcgtcc

SEQ ID NO: 500360 - DNA, 125 bp, Homo sapiens
gcctttgccatgacggaagtatgtggcatgattctgtgctatatttggctcctggttcttcttcttcacaagcacagcaatgtgtattcctccatcatatgctgaccttggcaaagctgccagag

SEQ ID NO: 500361 - DNA, 87 bp, Homo sapiens
aacagcctgcagatgatggtgcagtcgggagccaaaggttcaactgtgaacacgatgcagcacctacagaagcggctcaaattattt

SEQ ID NO: 500362 - DNA, 73 bp, Homo sapiens
gaccagcttcctctggactatgccaaggatctgtgccagttcagaagcaggcgagcctcttccctgatgaaaa

SEQ ID NO: 500363 - DNA, 100 bp, Homo sapiens
gttgggaagtgggagcgggagggccgggcaattcccgaccgaaccaaacgcccaagtatattcacaacttgctaaaagcagttgagatcagaaaaaagga

SEQ ID NO: 500364 - DNA, 75 bp, Homo sapiens
ctgctcatgaagatagacacatcaaattttttgacaataaaacggctcccattgctatcacatgttttaccagag

SEQ ID NO: 500365 - DNA, 80 bp, Homo sapiens
catggcgacattgacagtggtccagccgctcaccctggacagaggttttcaaatggaacattttgatgcatcacttagta

SEQ ID NO: 500366 - DNA, 100 bp, Homo sapiens
cagagggtgagacagaagtgaagaaagatgaggccggagaaaactattccaagaacttataatcaaaactgtattaagctcggcaagagatgagccctct

SEQ ID NO: 500367 - DNA, 73 bp, Homo sapiens
gctggagagggatgtgtggctgcgatcctcggggaaaccgaggagacccgtgtacagtatcatctcagttgga

SEQ ID NO: 500368 - DNA, 100 bp, Homo sapiens
caaagatccccgttcctggagattctgattgaggacctgatgaccttcgaggatgtggccgtgtacttctcccaggaggagtgggggctcctggacacag

SEQ ID NO: 500369 - DNA, 75 bp, Homo sapiens
gtcaccgtccgagacgccaaacacaccaactttgtggaggttctggaggacacgtgccggcggcaggacttcaac

SEQ ID NO: 500370 - DNA, 75 bp, Homo sapiens
tgtaggcagaatacctttacagaggttaaaattggaagcaggctgtgagccaaggggaaggcagaggacagaaat

SEQ ID NO: 500371 - DNA, 75 bp, Homo sapiens
aggagcaggagttcgctcaagatccaagaaaggtccgagcctgtgcccagggcaccttcaagcccctgtcaggag

SEQ ID NO: 500372 - DNA, 100 bp, Homo sapiens
ggggaccgagcctgggaggccggccggtgccagcacctttcggcttctgagacggcggcagcagcggcattcagctctacattaatcatactcctccacc

SEQ ID NO: 500373 - DNA, 100 bp, Homo sapiens
acagtactcggtctatagtattgtgcctcagtcttggtctccaaatcctacaccttactttgaaacaccactgacctgtgaccgcatcaagcagtcagca

SEQ ID NO: 500374 - DNA, 99 bp, Homo sapiens
tgctcttcagcctcagcggcagtgttctgtgtgcaggaatcccagtcagaagttccagcctgccactgttctctgatgccatgccagcaccaactcaac

SEQ ID NO: 500375 - DNA, 95 bp, Homo sapiens
ttttctaccatatcagagatgacaggaagatgttaccgagtacttcagtgaattccttagtgcaggggaacggagtcttgaattccagggatgcg

SEQ ID NO: 500376 - DNA, 50 bp, Homo sapiens
ttaaaggcttatcaccctttgacaaggttggtttcagtgctgatgaaact

SEQ ID NO: 500377 - DNA, 73 bp, Homo sapiens
gagaagcaataacactttcagatcttttgagctttggacatcagacagtgcaggagaagaatgtgatgcggca

SEQ ID NO: 500378 - DNA, 100 bp, Homo sapiens
ctccgtaatgagagcccggaaccactctttgtgccgcagcttcgcagaataatccagaatggctactctgatctatgttgataaggaaaatggagaacca

SEQ ID NO: 500379 - DNA, 74 bp, Homo sapiens
gctcaactccaaccacgacggggccgacgagacctcagcctgacatttaccccggtaactgctgggcatttaaa

SEQ ID NO: 500380 - DNA, 75 bp, Homo sapiens
cggcgccttcggcaaggtttacaaggcgccaagcccatctttgtgtgcttgcatccaactgtgatgagcctatgt

SEQ ID NO: 500381 - DNA, 87 bp, Homo sapiens
gcggagggagataatcgcagcaccaacctgctgtgttatagttttgccgctggactcttccctcccttcccccaccccatcaggatg

SEQ ID NO: 500382 - DNA, 100 bp, Homo sapiens
ggatctgctgccagcattagcctggctcaatatctaatcaatgtcagaatcctcactatggatgggctcattgaggacattaagcatcggcggtattatg

SEQ ID NO: 500383 - DNA, 99 bp, Homo sapiens
cactgcagaggtgctggagctggcaggtccttatgtcgtcagaagatcgagaagctcaggaggatgaattgctggccctggcaagtatttacgatggag

SEQ ID NO: 500384 - DNA, 100 bp, Homo sapiens
aaatatcctatgatgtgtatgtttatacagacatgagacctggggacagtgtcatacaggcaagataacccctgtgacagaaggctactgttgctgtaac

SEQ ID NO: 500385 - DNA, 83 bp, Homo sapiens
ccagctccccatcgcagaggccatgctgacctacaagcagaagaggtgctggagaatctggtaaaagcaccattgtgaagcag

SEQ ID NO: 500386 - DNA, 100 bp, Homo sapiens
ggggactcagaggagtacttcgccacttactttaatgagaagatctccattcctgaggaggagatggcgggtgaaaaagttgagaagccagatactaaag

SEQ ID NO: 500387 - DNA, 143 bp, Homo sapiens
aagaggattggaggtgtcagtgttaaaggaacctctacaacgaaggtgaagccacggaagataaggtttggtgcacctcgatttggaggaagtagggcagggcccttatctggaaagaagtttggaaaccctggggagaaatt

SEQ ID NO: 500388 - DNA, 82 bp, Homo sapiens
tttgagaaccgggaggaggatatgatcggcggcgtgcaggaccagcggcggccgtgcaggcggaggacttcggcgcggctcc

SEQ ID NO: 500389 - DNA, 74 bp, Homo sapiens
gttggaggctggcagcgaagaagatcgaaaattaaacctcagcttcacaatttatactacggtaatgagcgccg

SEQ ID NO: 500390 - DNA, 100 bp, Homo sapiens
gcaagttatggcaatgtgatcgtcatcacagtcaactatcgacttggagtactcgcaaactggagcctacacttgaaaatctagaaaatctggatgtcag

SEQ ID NO: 500391 - DNA, 100 bp, Homo sapiens
agcagatcccccagccggctgagacagaaatcaactgatgagccttctgagaaggatgctctgcaaccaggccggaacctggtggcagccggctacgcac

SEQ ID NO: 500392 - DNA, 100 bp, Homo sapiens
gatgtgggcatggcagacaaatctgtagacaagttggatggcttgaggactggtactaaaaggaaacgtgactgggaggccattgccagcagaatggagg

SEQ ID NO: 500393 - DNA, 75 bp, Homo sapiens
tctaccagaatttccttcttgtagtctattgaagacgccacaggtcatcatctggatcatcccattctggttccc

SEQ ID NO: 500394 - DNA, 100 bp, Homo sapiens
ctgccatcctcgcctcagtcaaagaacagtgaaagctggtggaatgcgaattgtgcagaaacacccacatacaggagacaccaaagaagagaaagacaag

SEQ ID NO: 500395 - DNA, 121 bp, Homo sapiens
accacccagaaatctacaggtcattcctggagatcctgcacacgtaccagatcctgcggaccccacaccctgcccctgctggactcagttggctgacctcgccccaggggctgctcatgat

SEQ ID NO: 500396 - DNA, 98 bp, Homo sapiens
ccattggcaagtgttcctgcaatgctggctatgaagaaagaggttttatgtgccaagcccccagtgagcctttgctgtgcaaattcgctgatggagga

SEQ ID NO: 500397 - DNA, 101 bp, Homo sapiens
ccgaggccgcgaactgcatcatggaggcaacatgagtgagaatgaggaagaggaaatttctcagcaagaaggcagtggggactatgaagtcgaagagatac

SEQ ID NO: 500398 - DNA, 86 bp, Homo sapiens
gacatcttaattgggcacgaaagaggtttttagaacttcagccataaaaatgggcagaattttccttgatcatatcggtggtaccc

SEQ ID NO: 500399 - DNA, 74 bp, Homo sapiens
ttgataactcaagtttaggcctttgtccaggaacagttgatacgccatctctacaagaaagaatacaagccaga

SEQ ID NO: 500400 - DNA, 111 bp, Homo sapiens
cggcgggcagaggtgatgtctgggagcccttccttgacagcccgggccgagaagacaatgcagatcttcgtgaagactctgactggtaagaccatcaccctcgaggttgag

SEQ ID NO: 500401 - DNA, 83 bp, Homo sapiens
ttcgccagcccgtgccgcgagcgcggcctgcaggagatgaagaaaccaaggctttgtgactaactcaacccctcaagaaggac

SEQ ID NO: 500402 - DNA, 98 bp, Homo sapiens
attaaagaccagggagcccaaatggagccgctgctgcctacggctacagtggtggctgtgttgccatgcgaggaaggcatccacttggtcgctgggaa

SEQ ID NO: 500403 - DNA, 88 bp, Homo sapiens
tctgggagaatatttaatggaaaatcgcttggttaaaacctgacacttttaacaggtagacgttacatccaagaggaaataatccagg

SEQ ID NO: 500404 - DNA, 75 bp, Homo sapiens
aatagtggcaggtgacagtctgcatgtgcagttttcagtgattctaccagaaaggaatgaagaacagaaccttca

SEQ ID NO: 500405 - DNA, 116 bp, Homo sapiens
aattgggatgggatcgcttctaagccactcactctatggtcatcagaagctgaagctagcatcccattctctgtggttggatccaatcagttgattgaagccaaaggaaagaaggt

SEQ ID NO: 500406 - DNA, 89 bp, Homo sapiens
gtctccttgagcaaaaaagaaaagttgtttcctccaacattgatgttcctccagcaaggaatgcaatggaaaaacttcatagtatggat

SEQ ID NO: 500407 - DNA, 100 bp, Homo sapiens
gagactcaccagcgagcgtcattgttgtctttctgggaactcattcccatgaggtctaaagaccctcattccagagagcatcctgccccatatccagaat

SEQ ID NO: 500408 - DNA, 74 bp, Homo sapiens
ccgcgcgcacatgtaggcgttccgagcggcggcggagattagtctgctgaactcaattcatgagaacttctcac

SEQ ID NO: 500409 - DNA, 100 bp, Homo sapiens
cccaggcctatgccaatcagcatttcacattcctcatggttggttcaaagagcagcccgacggccatggaggctgaagagacgatggaatgccttcagga

SEQ ID NO: 500410 - DNA, 106 bp, Homo sapiens
caagtggcggggactactggtgcctgcgctgaaaaaggaggcaggtggaagtcatcataaagtttctgtttcacccgtcgtccatgttcgaggactctgtgaatct

SEQ ID NO: 500411 - DNA, 85 bp, Homo sapiens
ggcgcgcggacccaggcgcggatggcgaggccagcagatcctgaaggacacagccctgcagaaagtgaagcgtggccagagctgc

SEQ ID NO: 500412 - DNA, 100 bp, Homo sapiens
gttggctgtgacatctattccatctgtgagtgactctttgacatggagagaatttcactatattcaggtgagggcttccacaactaccaccactcctttc

SEQ ID NO: 500413 - DNA, 100 bp, Homo sapiens
gactttttatccatgaaacagtctcctgccctcgctccggaagagcgctgccgcagagccgggtccccaaagccgttacggcagtcccagtcctactgca

SEQ ID NO: 500414 - DNA, 100 bp, Homo sapiens
gattgacaatcaatgggccatcttggacgatgttccatttaagcagacctcttccatagctgtagctggagcggtaattggagctgttcttgcccttttc

SEQ ID NO: 500415 - DNA, 134 bp, Homo sapiens
gtcggttcctgctattccggcgcctccactccgtcccccgcgggtctgctctgtgtgccatggacggccctgggcgctgcctatggcacagccaagagcggtaccggcattgcggccatgtctgtcatgcggcc

SEQ ID NO: 500416 - DNA, 76 bp, Homo sapiens
ttactgttgcgtggttcgttattaacagatatggatcagaaactttcgaagttggtagaagagctcacaacttcag

SEQ ID NO: 500417 - DNA, 51 bp, Homo sapiens
tcaggccagcctttgctctatctccagccctacctgaacccatccttccat

SEQ ID NO: 500418 - DNA, 74 bp, Homo sapiens
ccaggtccctgtctgagccagctcgattatttgatgaacctcagcttgctagtctttgtctagatacaatagac

SEQ ID NO: 500419 - DNA, 98 bp, Homo sapiens
ccagcgcagaagggacgtgagcccagccgaggtaccgctgaagaggaatcaattttggattgtcagtggcttcgccccgaggagagctgactgccctg

SEQ ID NO: 500420 - DNA, 100 bp, Homo sapiens
gaacgaggcaaggagctaaagcagcgtgcgttcagccctggggtctgcgaggaacagaagtgcgaggaggaggtcttcccgctggccatgaactacctgg

SEQ ID NO: 500421 - DNA, 100 bp, Homo sapiens
tcctcccatctcagcctcctgagtagctaaggactacagatgtcagtattgaatatggtggtgaggcgtgaccctggcaacactgaacctgtgaaagcca

SEQ ID NO: 500422 - DNA, 83 bp, Homo sapiens
ggctggacggcgcggccacggagaagggcgcggaggaggcctcggtggtaccagaagaggaggggctgatgtgaacatccggc

SEQ ID NO: 500423 - DNA, 97 bp, Homo sapiens
tctgggacattcgaaaacctcagagaatgcaaggccagaaactgtcactaatgacgatgaagaagccttggatgaagaaacaaagaggagagatcag

SEQ ID NO: 500424 - DNA, 101 bp, Homo sapiens
gaggaactgctgttgttacctgggaaccctggaggggccttcctcatccgggagagccagaccaggagagctctggacttattggacaaaatgttgacatt

SEQ ID NO: 500425 - DNA, 100 bp, Homo sapiens
aaaaaagtggtgcagtttttgatgaaattgtagagaactttcaagaatgctaatgcagtcatggaatatgagaaaatagcagaaacagattttgagaagc

SEQ ID NO: 500426 - DNA, 102 bp, Homo sapiens
atcacaggagaggaaatgagtgacatctacgtcaaagggaaactctgatgaggaagaaagtgcttcagaatctgaactttggaagggtccactaccagagac

SEQ ID NO: 500427 - DNA, 100 bp, Homo sapiens
gggaggccctgcctatgaccagcaagaggatggggccctggatgagggggaagggcctcaaagccagaagaactcatcccaagaacagtatccataagga

SEQ ID NO: 500428 - DNA, 74 bp, Homo sapiens
ggagcatttgtgttgatgaagatgaaagagactgcaggagatgtaatcagtgtagagaaaaccgtgaagagatg

SEQ ID NO: 500429 - DNA, 100 bp, Homo sapiens
tggaagcaaaagtagtatgcttttatagacgacgtgatatttccaacacacttataatgctcgcagataagcatgctattacaaggacaaatcaagtcca

SEQ ID NO: 500430 - DNA, 100 bp, Homo sapiens
agcaatcagttgccactttaatattggattcccttatacaggtggcaggttttaagaagcaaatggcagatactggaaaactgaacacactgttgcagag

SEQ ID NO: 500431 - DNA, 96 bp, Homo sapiens
acatgaaagtgctgtacaccaaccgagcccaggacatatctactgaagatggtgataggttatattccttatgcaaaacagtgatggatgaaggac

SEQ ID NO: 500432 - DNA, 100 bp, Homo sapiens
gaagatcatgtcccaagatgccatgatgatcacggatgaggtcaagactgtgggctgcggtcattcacgagacaggctcgtgttgttgggggcacggatg

SEQ ID NO: 500433 - DNA, 82 bp, Homo sapiens
ccaggcatggtctacgattagtacgaaaaagcaggtttggatgcatctgctcagactacttctcatgaactcaccattccaa

SEQ ID NO: 500434 - DNA, 83 bp, Homo sapiens
gaggctccgaagtctgcaggtcgttgatctggagtcccggaagaccacgtacacctcagaacctagaagtcggaatccggaag

SEQ ID NO: 500435 - DNA, 101 bp, Homo sapiens
ataattactaagtaccgcaaaggagcatgtgaaaattgtggggccatgacacacaaaaagaaagactgctttgagggtctggaaagcaatcctccacagaa

SEQ ID NO: 500436 - DNA, 75 bp, Homo sapiens
tcaaggagaaggcagacctgggtggagccgccaccaaaatgcagattttcgtgaaaacccttacggggaagacca

SEQ ID NO: 500437 - DNA, 75 bp, Homo sapiens
tgattggatttccctctgtggacccgagagggactcacttatgggaattcatccgcgacatcctcttgaacccag

SEQ ID NO: 500438 - DNA, 82 bp, Homo sapiens
tgaatgtttcagggtggagaagaatctgcttgtctatgggcatttattaatacagcaaaagaaatttatgaaaaaattcaag

SEQ ID NO: 500439 - DNA, 75 bp, Homo sapiens
tctgaagccgcgtcctactttgacagctgcagggccgcggcctggataacccagcagccaactggcttcatgcgc

SEQ ID NO: 500440 - DNA, 75 bp, Homo sapiens
tggcggatgccctgcagtacctgcagaaggtctctggagacatcttcagcagtggaaattaatctcactaatgac

SEQ ID NO: 500441 - DNA, 90 bp, Homo sapiens
gagatattatggcctttgccaatagcccctgggtggttcagaaaatgcttggacagaagagatgagtactatttccactaaggcctagaa

SEQ ID NO: 500442 - DNA, 49 bp, Homo sapiens
cttatgcttataagagtggaacagacaccattcgcttttcacccaagat

SEQ ID NO: 500443 - DNA, 51 bp, Homo sapiens
agcgcttccgcaccatcacctccacattccgacaccatagctgagttacag

SEQ ID NO: 500444 - DNA, 97 bp, Homo sapiens
ttctacccactgagaccagagttagtggaatccacatatctcctctaccaggtcactctgactgctgagacctcatgtagctacatttcctggcccc

SEQ ID NO: 500445 - DNA, 75 bp, Homo sapiens
cagaccaggatggagataaaggaactcaaagaatttggttttggaaagacatcgttgatgataatgaagttcgtg

SEQ ID NO: 500446 - DNA, 101 bp, Homo sapiens
cgaaaggaagcaagcagttcagaagagccaaggaataaacatgcaatgaacccaaaagggccccctggaaaaaggacaagtgaaaaatgaggcgcttagag

SEQ ID NO: 500447 - DNA, 98 bp, Homo sapiens
agagatttgtacacaactgtgatgctggagaattatcagaacctggtctggctgggtccctccttgtggtccatttctgggcaccatgggctccacag

SEQ ID NO: 500448 - DNA, 131 bp, Homo sapiens
gaaacttgttttgcttgcagttggatgaagtaaatgttggtgcacatgaaatttccaatatattagattcacagattttaagagtaatcttcacaaagtgtaccaggccatagaggaggccgacttcttcg

SEQ ID NO: 500449 - DNA, 74 bp, Homo sapiens
catatggacagatggacttcaaatgctgtttgtattccagagactagcccgagggcaacatccttcgagaccgg

SEQ ID NO: 500450 - DNA, 74 bp, Homo sapiens
tttggagtgtgcgtgcgcgccgagcggtcccgcggcagtgctggtggccatggttcccgtagccagaaggagtt

SEQ ID NO: 500451 - DNA, 75 bp, Homo sapiens
cgccgcaccaggtcttgtagcagcgcctcctcgaagcatcaagtgtacctgatttgtgaacctatcttgcttcag

SEQ ID NO: 500452 - DNA, 143 bp, Homo sapiens
tgctggtcctgggagccttttccttcggagcagcagccctgtccggcatctgtcttgagctcccagcaaggtgttggggcgatgtttcctgactgtggtgcaagtccatttccagtttttgactcatgcgttacagaaggtcc

SEQ ID NO: 500453 - DNA, 75 bp, Homo sapiens
ggttagcggtggcaggggctgactgagagcgtctgcttggatttagtcgtccgtgttgtttttattcttggcaac

SEQ ID NO: 500454 - DNA, 83 bp, Homo sapiens
cttaggaagttcgtcttctccacggaggagagagatcgagccagcgcagagatgtgcctcgaaccacacaaagcacctcaagg

SEQ ID NO: 500455 - DNA, 82 bp, Homo sapiens
ggagactgggcggccggccgacccttcctgtcgctgacggcgactgcgggaggccagaccatgtctcagttggaggactcgg

SEQ ID NO: 500456 - DNA, 75 bp, Homo sapiens
tggagggatgcttgtatggtctccatatcacagtatcccagatgccaaatggtggcagtgaaagctggttcacag

SEQ ID NO: 500457 - DNA, 100 bp, Homo sapiens
ttcccagtagctgggaccacagtcctgataaacctgtgagtgtgaaaataagttttgaagatgaaccaagaaagaaatacgtggatgctgaaacttcatt

SEQ ID NO: 500458 - DNA, 82 bp, Homo sapiens
cgcgggaggtgttcgagaacgaccccgagacgcacatggattaattgatgtatgttgagtttatggagctgccttttggtgg

SEQ ID NO: 500459 - DNA, 75 bp, Homo sapiens
agcgagccttgaaagagataaaagcggaagtttgccacacggtgagaagccctaccactgcaactgggacggctg

SEQ ID NO: 500460 - DNA, 98 bp, Homo sapiens
attagtgatgaaacttataacatcgtatggggtcatcgcagaggctttgctcaggttgcaattgatgcaaaagtggctggagtgcaatggtgtgatct

SEQ ID NO: 500461 - DNA, 101 bp, Homo sapiens
gctggccctcgggctgcgggagccgggctaggacgccgagcggtgactccccgccgctcccgggggccgtgacgatgatcatgggaacagcaatagtagtc

SEQ ID NO: 500462 - DNA, 90 bp, Homo sapiens
ctcttcctccacatctggctctcaaagcagatcttagaaaccaaccatacagacgagccgatgcggtgaggagaagcgtcaggcggcgct

SEQ ID NO: 500463 - DNA, 98 bp, Homo sapiens
atgacaactttgttgaacttgtagctaatttgaaggaaggcacaaagatttgtttagtgaatgaccctaggccccagcacaagtacaacaaactttac

SEQ ID NO: 500464 - DNA, 99 bp, Homo sapiens
gaacaggcgctgcggctgatcatctccatcttcctggatctcattcgtcggttcggatccaagccagttctgtggtcagcaaggctcccctctgggcag

SEQ ID NO: 500465 - DNA, 51 bp, Homo sapiens
aagtcacaattacactgccacatatccctgacaatgaaaagcgaaccccat

SEQ ID NO: 500466 - DNA, 51 bp, Homo sapiens
aaagaacttcttcccaaaatggaagagctggatattctttcgcccagttat

SEQ ID NO: 500467 - DNA, 75 bp, Homo sapiens
cggctaaggaaaggtgccacagcagagacgcgaaggagaggccctagaaccccttccttgaatccagaagctggc

SEQ ID NO: 500468 - DNA, 98 bp, Homo sapiens
caggcgaacccgcggcgcaataacggattatatgcgtcaggcaggagaagtgacttatgcagatgctcacaagggacgcaaaaatgaaggggtgattg

SEQ ID NO: 500469 - DNA, 87 bp, Homo sapiens
cttgtggggccatccagtacatcccaactgagctggatcaagatcccaaactctcctctgagctccgttgtaccttccagcagagcc

SEQ ID NO: 500470 - DNA, 83 bp, Homo sapiens
cgagttatggatccaacaaagattctgataactggcaaaacaagcttgacaaaagtaagctgaagccaggaacaagagttgct

SEQ ID NO: 500471 - DNA, 75 bp, Homo sapiens
cgccgagctgcgcccgctgccttcacaccccggacatccgcgccacaccacaagctccgggtggataaggcagct

SEQ ID NO: 500472 - DNA, 100 bp, Homo sapiens
cccgaaggctctccatcgaaggcaacattgacctgtcatttactccatcctttatagtgatgctacaggacgaagaggaatggataaaaacattggcgag

SEQ ID NO: 500473 - DNA, 90 bp, Homo sapiens
gtgcaggtgcaggcctctcagctttcctccctgccacagcaatggccaatgtacatggtggactatgccggcctgaacgtgcagctcccg

SEQ ID NO: 500474 - DNA, 75 bp, Homo sapiens
cattaaacggaccagccccagtgatggagcaatggcaaactatgaaagtacagatggagtcttgctttgttgccc

SEQ ID NO: 500475 - DNA, 100 bp, Homo sapiens
tggaactgcaggaggctgacggggactgtcacctccaggctttcgtgatgccttccgtgccttccatcaagatctcaattttgtgcgcaagttcctacag

SEQ ID NO: 500476 - DNA, 100 bp, Homo sapiens
ccggatgctcatccataaaactgaagatgtgaatactctgcacatcaaagctgcccaatgatctgcttgatttgcagcagccaacttttcacccatctgt

SEQ ID NO: 500477 - DNA, 74 bp, Homo sapiens
caggaggcggagcggacaaggctccggcctgcgaggaggtgtccctggccagtgtccttccacctgtccacaag

SEQ ID NO: 500478 - DNA, 101 bp, Homo sapiens
tatcacgtgatccggcacgccatgaacctggaggccgtgaacacctacgaaggatgtgttcgaaatgcgctttgccaagatgccggacgagcctgaggagc

SEQ ID NO: 500479 - DNA, 101 bp, Homo sapiens
tcctggtgcttgatggtcgaggccatctcctgggccgcctggcggccatcgtggctaaacaggtaccgaaagcacagtaatcactggtgtcgatattgtca

SEQ ID NO: 500480 - DNA, 100 bp, Homo sapiens
ctggcggctgctggtagttccatgctgtctgttcagacttcagcttggtgaattgaatgatctggcacgggaccctccagcacagtgttcagcaggtcct

SEQ ID NO: 500481 - DNA, 83 bp, Homo sapiens
ctctttctggcctggaggctatccagctgctgagcttgcaagacctctgctgccgggcggtcgtgtcctgcacgccggtgcac

SEQ ID NO: 500482 - DNA, 90 bp, Homo sapiens
ggcaagatctcatgtccatcatggaaatgcaggaggtgattacagtgcgtgttcaggacccccgagtgcagaatgagggctcctggaact

SEQ ID NO: 500483 - DNA, 126 bp, Homo sapiens
cctgctgatgagggaggtgcccctgcgttgtaccatccgcctgtgggacacctaccagctggattcactcctgcttgcgaaaagctgacaaaaacaaggacaacaagatgagcttcaaggagctgc

SEQ ID NO: 500484 - DNA, 100 bp, Homo sapiens
ccggcccgcctccctggccggggcgcagttcggaggttcaggtatcagcagatgttgcacacaaacttggtataccttgctacaatagcagattctaatc

SEQ ID NO: 500485 - DNA, 83 bp, Homo sapiens
ggggaatggccgcggtgtggcagcaagtcttagcagtggacgcgaggaaaatgtttataggaggccttagctgggacactaca

SEQ ID NO: 500486 - DNA, 97 bp, Homo sapiens
agctctactgtgacttcagagacactgccaagcagccttagccctagtgtagaggccttagattttagtgatgatgaaaaagagaaggaagccaaac

SEQ ID NO: 500487 - DNA, 83 bp, Homo sapiens
atcgcctgcggcaagtgctgcctgcaggtccatgccacaacatggctgacaaggccaagcctgccaaagctgccaacaggacg

SEQ ID NO: 500488 - DNA, 100 bp, Homo sapiens
gactgcatatttgacaaatttgaatgttgttggaatggatctgacagcttggatcctagcatgactatacattgtgacatggtcattacatatggattag

SEQ ID NO: 500489 - DNA, 99 bp, Homo sapiens
gaaggaatttctcataaaagaagagtcagaaggaaaactttcgtttcagatttacttccgcatggacaccacgttgctgaaaacatgctttgggactgc

SEQ ID NO: 500490 - DNA, 100 bp, Homo sapiens
ccgcaccatcaagctgctcaccggctcctcctacaaggttgagcttgtactcccagagtacctcatccacgctttcttctgtgtcatgtttctttgtgca

SEQ ID NO: 500491 - DNA, 99 bp, Homo sapiens
ccagagcctgccggaaggctccctcggtcgcgagtatctccgtttcctggatgtgaaccatttgaagacatgctggagaacccactgaacagcacccag

SEQ ID NO: 500492 - DNA, 95 bp, Homo sapiens
actacagaaacctcgtctccctgggtatacccctagaaacacttaaagaagaaagtcagtcaagacatgttctacctgcaagttttgaagtcaac

SEQ ID NO: 500493 - DNA, 75 bp, Homo sapiens
ctcctgaaatgattccaccatcagacagggccagtttacaaaagatgtgtcttgctgaatcagggctctcttatc

SEQ ID NO: 500494 - DNA, 100 bp, Homo sapiens
ttccccgcgcccctccagccctcgccgccctcgccaccgctcccggccgccgcgctccggtacacacagctggcggaggcagtgacctcagactctggac

SEQ ID NO: 500495 - DNA, 89 bp, Homo sapiens
gtcatctgcggactggacacggagaccgggctggagccggacgagctgtcggaaaaatcctgggtagaagctggatcagcaagaatgtc

SEQ ID NO: 500496 - DNA, 100 bp, Homo sapiens
cacagacaccgcctacaggagtatgatgcaagggtcccaccttgtggtcaccaactgctccgcggaacacagccacccagctctgtcctgcaagatggct

SEQ ID NO: 500497 - DNA, 97 bp, Homo sapiens
tgttgatgctgtaattgctgaacttaaaaagcagtctaaacctgtgaccacccctgaagaaattgcacagtttcttaaacaattaggtctacatcct

SEQ ID NO: 500498 - DNA, 75 bp, Homo sapiens
tgctggagacaggaaggagtttgagacactctgctcagagctgaccagggtgttacaggacatgggcttgccgac

SEQ ID NO: 500499 - DNA, 83 bp, Homo sapiens
ccggctgcttccctgggctgggcgtcagccgccaccggcagcagcagcaccaccggacgaagatgctcatgaagcagcaggac

SEQ ID NO: 500500 - DNA, 113 bp, Homo sapiens
ttaaaagatgatgagaaataaggacaaaagccaagaggaggacagttcgctacacagcaatgcatcgagtctctagtgatccctgaaaagttccagcatattttgcgagtact

SEQ ID NO: 500501 - DNA, 100 bp, Homo sapiens
ccgcccgcttcctcctgcttcccatcgaagctctagaaatgaatgtttccatctcttcagagatgaaccagggcgccctgcgtccggcagaggaggcgag

SEQ ID NO: 500502 - DNA, 100 bp, Homo sapiens
ttccttcggagcagcagccctgtccggcatctgtcttgagctcccagcaaggtaagaatgattgatgttggctgatattggagtgctcattcacatgaag

SEQ ID NO: 500503 - DNA, 99 bp, Homo sapiens
tagacacgttggaagtagctgatgaagataacagtgaaatatcagattcagaggatgacagttgcaagttcttcctcaagttcttcctcaaatgcaacc

SEQ ID NO: 500504 - DNA, 94 bp, Homo sapiens
cttggtttcgggatctcggtgctgcagacggcgagacctcctgcacagtacctggagtagaacagaaaaattattatgtctgtgttcccttggg

SEQ ID NO: 500505 - DNA, 75 bp, Homo sapiens
ctgaggtggtgcgcggctccgtgctcctgggtccccttctgcttgttatagccccagtagtcctgtccaggttct

SEQ ID NO: 500506 - DNA, 97 bp, Homo sapiens
tgatgatcacgcagctggctggcttcagtggaccaccctgaaacatgtatctgatgacatgaagactcacaagaaccctgccctgaaggctcagagt

SEQ ID NO: 500507 - DNA, 76 bp, Homo sapiens
ccgcctgctgcactttgggttcaaggcgacagagctgctgctcttcctccagaacctgcccacagcccactgggat

SEQ ID NO: 500508 - DNA, 75 bp, Homo sapiens
cccggacgtgaagtgcgtcgtgcacattcacaccccagcaggggctgcggtgagggtgggattgatggagatgga

SEQ ID NO: 500509 - DNA, 90 bp, Homo sapiens
attgaagaacttcaaccccacagtctgcataatacatctaaaatctatgggagtagcttccagacatgagtatttttcgggaactcttca

SEQ ID NO: 500510 - DNA, 115 bp, Homo sapiens
caaggccaagtatccgccagtcaataggaagtacgagtgaggttctgggggaagagaagctgaaggagatactgaaggagcgggaacttaaaatttactggggaacggcaaccac

SEQ ID NO: 500511 - DNA, 100 bp, Homo sapiens
tgagagcgcctggaggctcgagcggagggtcatattgaacattccagatacctatcattactcgatgctgttgataacagcaagatggctttgaactcag

SEQ ID NO: 500512 - DNA, 82 bp, Homo sapiens
cttcggcagtccacccaccgccgccgcctcccaggacagctggcctgaagctcagagccggggcgtgcgccatggccccaca

SEQ ID NO: 500513 - DNA, 83 bp, Homo sapiens
agactttgccatcttggtccagtctggctgcagcaaaaagcagctgtccccgccctactccggaccgccccaaagactccatg

SEQ ID NO: 500514 - DNA, 83 bp, Homo sapiens
ccaggaggaggttttcaggaccaaaattgtggaaaagtcactctgttcctgtaaccagcacagtgcctgattcatgaattaaa

SEQ ID NO: 500515 - DNA, 90 bp, Homo sapiens
tggagctgggtgctggcacggggctggtgggcatagtggctgccctgctgggtaactaaatgaccatggaatctggagccgagaaccagc

SEQ ID NO: 500516 - DNA, 100 bp, Homo sapiens
gggagccagtgggtgaaagctcatgaactcaaggagcacaacggacacatcacagacagaacaatggcagcccgagtacttataattggcagtggaggaa

SEQ ID NO: 500517 - DNA, 100 bp, Homo sapiens
tttctaatcatcccagtagttttggaatgtacccatctcagatgaaacttacaacgtgaagacattagtagtatagaaattgtaggaggagcaacacgaa

SEQ ID NO: 500518 - DNA, 101 bp, Homo sapiens
aagaggaggaaaatggctccgagcagggaccgcctgctgcactttgggttcaaggcgacaggaaatcctcattgacgattcaatttgttgaaggccaattt

SEQ ID NO: 500519 - DNA, 100 bp, Homo sapiens
agtggagtgggactggaaactgctcacctatgtcatggaggaagaggatcactactcttggaatcaaagataaatccaaatactgcatatcagaaacaac

SEQ ID NO: 500520 - DNA, 97 bp, Homo sapiens
tggacgggggcggcggcggggccccggactccgtcggcgcacatccccgtcccagcgcagagggcagcatctcatcacggcagttgctgaccatcta

SEQ ID NO: 500521 - DNA, 100 bp, Homo sapiens
aaccagctcgggggccaactctgaggagtccactgcagcagggaagcggatttgtcttggtgaaggcatcgcccgtgcggaattgttcctcttcttcacc

SEQ ID NO: 500522 - DNA, 71 bp, Homo sapiens
atggctataatggatttggtaatgatggaagcggtgggaaggcctggtgcacatctctgagctccggcggg

SEQ ID NO: 500523 - DNA, 101 bp, Homo sapiens
taaagaaattccacccagtatttcaagagtcacttctttacttggtgcaggaaggcagtctttgctacgtacagcaaaagagctgtccgtggcacagtgca

SEQ ID NO: 500524 - DNA, 110 bp, Homo sapiens
cagttttaaaggatgagcttacggcttcacttgaggaagttcgcaaagaaagtgaatctggattgggaaagtcgacattaatcaactcattattcctcacagatttgtat

SEQ ID NO: 500525 - DNA, 90 bp, Homo sapiens
cgctgaggtgatttggatatccctagaacgttgagggcacgagtcgggtcctgagaccaggatccagcaagtaggcaatgaagcctatgt

SEQ ID NO: 500526 - DNA, 100 bp, Homo sapiens
ccccggcaccgccgccgccgccccctcctgaggaggacccagagcaggacagcggcccggaggacctgcctctcgtcagaattgaagatgttcctgctcc

SEQ ID NO: 500527 - DNA, 50 bp, Homo sapiens
aattacttttccattggcgtggtgcagtggcttctatgttttgggttgat

SEQ ID NO: 500528 - DNA, 90 bp, Homo sapiens
ccaagacctcatcaacaattaagaccaagatcactccatggatgaaatgacagctgtggtgaaaattgaaaaaggagttggtggcaataa

SEQ ID NO: 500529 - DNA, 51 bp, Homo sapiens
gcccaggattcatcgctccacataggtctgcggggtttccgagaggctcgc

SEQ ID NO: 500530 - DNA, 99 bp, Homo sapiens
gcactgtattctttacctgcttcccaatcccactgatgaggatcagcccatggatctagtgaaaagccatttgatgtatgcggtcagagaagaagtgga

SEQ ID NO: 500531 - DNA, 87 bp, Homo sapiens
aggagggcttcgtgtatggacctcaagcgttggaggtagcagacttttcagcagaaggactttctgtctcttctgaaggcccttctc

SEQ ID NO: 500532 - DNA, 75 bp, Homo sapiens
gatcatgatacagttgataaaattgttggcattacctgacactcagatcaccagttatgcagcaactttacaccg

SEQ ID NO: 500533 - DNA, 100 bp, Homo sapiens
ggaccaccgggcgctggtctgctcccagccggagaactacgatgacccgcacaaaacccctgcctccccagttgtccacatcaggggcctgattgacggt

SEQ ID NO: 500534 - DNA, 82 bp, Homo sapiens
aggagagcccgtcattagcgtgaaaaccacaagcaggtccaaagagagagtctcggcgcggaagatggccggcggcgtggac

SEQ ID NO: 500535 - DNA, 74 bp, Homo sapiens
gagagcagacgaggtgctattcgagtgctagtggtggaacgggaccacacgtctctcatcacttttgtgaacaa

SEQ ID NO: 500536 - DNA, 100 bp, Homo sapiens
aggcgcatcactcccagctgcgcaaagcttgcgaggtggcgttagctttgcccgaagtttttacatacaaattctactagtcacacctggccattcagtg

SEQ ID NO: 500537 - DNA, 51 bp, Homo sapiens
gaaagccagtaggacacgaaggtgtggaagaactggccagagagtctggaa

SEQ ID NO: 500538 - DNA, 98 bp, Homo sapiens
gcggcggagactgcgggcccgtagctgggctctgcgagctggccgcccggatcctggaggcgcaccagaacgtggcccagatgcccctggtcgaagcc

SEQ ID NO: 500539 - DNA, 98 bp, Homo sapiens
atcagtcaacgtgttgtcagccttccaggagcctcaccaatgcagatgctgcccccgaccccgacctggtcagtgccccaggtccctcggccccacgt

SEQ ID NO: 500540 - DNA, 98 bp, Homo sapiens
cagacggagtcctgttccaccttcagagcgtcacggcgtacgccctcatggggaaaatctccccggtgactttcagctgtgcggtcagagaagaaacg

SEQ ID NO: 500541 - DNA, 75 bp, Homo sapiens
tgattaaatactggtttcacactccaccaagcatcccattacagatagaagagtactggagaaaatgaaactggg

SEQ ID NO: 500542 - DNA, 98 bp, Homo sapiens
actgcttttgctgtcttggatcaagaccagaaagaaattattgataccaatggagctggagatgcatttgttggagaaacctctgcgccatgagagcc

SEQ ID NO: 500543 - DNA, 100 bp, Homo sapiens
attacctgccacccattgtgtcttctcaagaagggcgatgccagtccctccactccagaggagaacgaaaccacgacaaccagcgccttcaccatccagg

SEQ ID NO: 500544 - DNA, 100 bp, Homo sapiens
tggttcctcacattaagaagttcttacaagaagatttttccttccaaactatgcagattgcaatgaacttcctccaagaagaaatacagaaattctgaca

SEQ ID NO: 500545 - DNA, 100 bp, Homo sapiens
catggagcaagtggtttttaaatatcttcgagctgaacctgaggaccattattttttaatgagaggccaatgagacttgaaccctgagcctaagttgtca

SEQ ID NO: 500546 - DNA, 100 bp, Homo sapiens
cctgcttcacctggaggaagacagtgttctgcatgagaatcagctgacccatacagacttgaaaccagagaacatcctgtttgtgaattctgagtttgaa

SEQ ID NO: 500547 - DNA, 100 bp, Homo sapiens
gttgagctcctgcagccgccgccgctgcagtggtcgtccctgccctccccggccccggggtgcaccccgcaaggtgtccggctttgctggcccagcaagc

SEQ ID NO: 500548 - DNA, 100 bp, Homo sapiens
ctccgccccgcgtccagctcgcccagctcgcccagcgtccgccgcgcctcggccaaggtgctggctgccagctgctgcgccccccatgtagaaggtgcac

SEQ ID NO: 500549 - DNA, 73 bp, Homo sapiens
gatccggactgctcgggaagctccatccgaatgtgtctgccccccagattgccagcgtcctgacgtcacagaa

SEQ ID NO: 500550 - DNA, 97 bp, Homo sapiens
accaaccgggacaccctggctgtcatccgccacttccgcgagcccatccgtctcaagactgtgaaaccagacatgccttgaattggaacgctaccta

SEQ ID NO: 500551 - DNA, 100 bp, Homo sapiens
tatgaagccagaatggatttataaagcttgggaaaggcggaatgaacacacccacatgcaggatctccaggaggtgacccaggaccttcattatgaaaac

SEQ ID NO: 500552 - DNA, 97 bp, Homo sapiens
tgagagattgaagcatgctctggaaatgttcccagaacattgcacgatgcctcctgacaaagtttacatggggccaggacaactgtatcaagattta

SEQ ID NO: 500553 - DNA, 101 bp, Homo sapiens
aggattagaaaagatgctgtgggcccgcaagagaaagcagagtttcccagagctatggggacttcccatccggcgttcctggtcttaggctgtcttctcac

SEQ ID NO: 500554 - DNA, 100 bp, Homo sapiens
tcagatctggagcatcggctgcaggggtcagtgatggagctgcttcagtgggtgaatttgtaagtgatgtcctgctagttccagaaaagtgccagttttt

SEQ ID NO: 500555 - DNA, 98 bp, Homo sapiens
gccgcgggaaggccgaccgactgccgcggtagttaaaccagagagcaatgacaaagaaacagaagctgcgtatgaatcagatatccccgaggagctct

SEQ ID NO: 500556 - DNA, 96 bp, Homo sapiens
gatcggcaactcaatggagaattctggtcactcagtgacacacacaactcgggcctccccagcgacaggcctgggatacaacagtgatgagataag

SEQ ID NO: 500557 - DNA, 111 bp, Homo sapiens
gccctgtccgcgccgaagcagcccgggactgcgcagcgccccgcgtgccggtgtgatgaatgcagactctgctaccattttggctgtttggatcctcctttgaaaaagtct

SEQ ID NO: 500558 - DNA, 76 bp, Homo sapiens
gcggggagctgcgcgaagccggggcggagcacgcgagctatggtttacccaaggtccagcctagcccctaggcacc

SEQ ID NO: 500559 - DNA, 82 bp, Homo sapiens
cccaggagaaattcgccctcaaagaatgggtaccacagaccatgtcatcgtcctggcgtccacgaaccgagctgacattttg

SEQ ID NO: 500560 - DNA, 51 bp, Homo sapiens
ctgcagcctcctatgtgctcccagagttcctgagactggcccagacgctgc

SEQ ID NO: 500561 - DNA, 100 bp, Homo sapiens
ttatacagggatgtgatgctggagaactatagccacctggtttctcttgagcgaaagattgcctaaaagccataatgaaaagggtaaatcataaggttcc

SEQ ID NO: 500562 - DNA, 98 bp, Homo sapiens
gagcctcagttggaagcagccgatccagcctgcggagcctgtggggcagaagtgaccggggaggtgcgtcctcatcatgggaaggaggctgtggatcc

SEQ ID NO: 500563 - DNA, 75 bp, Homo sapiens
ccaacttcaagcctttgattttgaagatgaccactttggaaatggttatcccaatccagaaaatttttcctggac

SEQ ID NO: 500564 - DNA, 100 bp, Homo sapiens
tagaaatgagaatgacagctgtgataaaaaaaaaattcatctgggcggtatctggaacttgggaagacactgatcaaggtggcagaagctgaaaagcaac

SEQ ID NO: 500565 - DNA, 100 bp, Homo sapiens
aaggcaagaagaacatcccgcggatcacgctatagaatgtgctgtccatacacaagaagagcttcaaaatccagccgtcctatgtatggagctgtcactt

SEQ ID NO: 500566 - DNA, 100 bp, Homo sapiens
cctcctgtaacccagcctgtttcacttcttgaatacaaatggagagatttgcatgggatgcagaaatatggaagactaaccaagcagaccaggagagacc

SEQ ID NO: 500567 - DNA, 100 bp, Homo sapiens
cgcgaagagccgttagtcatgccggtgtggtggcggcggcggagactgcgggcccgtagctgggctctgcgaggtactactaaccaataacctgcttggc

SEQ ID NO: 500568 - DNA, 75 bp, Homo sapiens
agaagagaaacataagaaggaggaggaggatgaagaacttgacctcaataaaggaacctctaaaacattatactc

SEQ ID NO: 500569 - DNA, 130 bp, Homo sapiens
tggcacctgcgcgaagctggccaaagcctgcccagacggctcacctgtgcgggatggaacaaaaggagagcgacttgcagttgtggaggtacagtgtgaacggctgaggatgctctaccgggactgtgct

SEQ ID NO: 500570 - DNA, 75 bp, Homo sapiens
gggcagcaggagctcctgacttgggaccatggtgattcttcagcaggttgtggcagcactgcctgaaggtatgag

SEQ ID NO: 500571 - DNA, 78 bp, Homo sapiens
agagttcaaggaggccttccagctgtttgaccgaacaggtaactataactacccaatattgcagccatggagtccatg

SEQ ID NO: 500572 - DNA, 100 bp, Homo sapiens
ccggaggacatgcgggagagagaatgagccagagggacacgctggtgcatctgtttgccggagggtgatttgatgaaggctgctgcaggagagttcgcag

SEQ ID NO: 500573 - DNA, 100 bp, Homo sapiens
cttcagtgatcttacatcgaggactgtgcatctttatgataattggatcaaagatgctggagaagtggaggcctctcagttaagaagactgaatataaag

SEQ ID NO: 500574 - DNA, 100 bp, Homo sapiens
gcccgagcctcgcgagcagagggacgtggagcgagcgggtggaaaccaggcggccagccagctggaggcttttgcagggcccccagatcctctgcacggg

SEQ ID NO: 500575 - DNA, 89 bp, Homo sapiens
gaagacggtaacccgtgtgactttgactgggagccaaagcagatgggagctggagttgctggagctcctggtctgtatgcagagcaggc

SEQ ID NO: 500576 - DNA, 49 bp, Homo sapiens
gatcactccatgccatcaagaaagcaaactgtcatcaggagcttaaata

SEQ ID NO: 500577 - DNA, 82 bp, Homo sapiens
cttggaactcctttataagtgtcagctgtgagatttgtgaaagctctggtgactctctgattccttgtgagggagagtgctg

SEQ ID NO: 500578 - DNA, 116 bp, Homo sapiens
cccgctccccgccgggacgccccgcgccgagccggaggccgcgtggacccgaaagccgctgggaaaaggagtgcatccgccccaacccttttccccctcgtctcctgtgagaattc

SEQ ID NO: 500579 - DNA, 83 bp, Homo sapiens
tacgagctgcacgtcttcaccttcggcagccggctgtacgcacacaccatcgcagagtcattcaggagagcaggaaagaaaag

SEQ ID NO: 500580 - DNA, 74 bp, Homo sapiens
tgcatgctgcttttgatgtctgacaacgtggatcgttgttttgaaacggtgatcagcccatgacctaaacctcc

SEQ ID NO: 500581 - DNA, 75 bp, Homo sapiens
ttcacaccgtcttcggtctcctggggtcggcgccgagtgggaggatggcggaactcaccatggatgatgatatcg

SEQ ID NO: 500582 - DNA, 51 bp, Homo sapiens
tgcaatgagaagactgatcaatctggttctgccggagacttccatttggcc

SEQ ID NO: 500583 - DNA, 75 bp, Homo sapiens
cttagctgtgctcgcgctactctctctttctggcctggaggctatccagcaacatggtccaagacaattcctggg

SEQ ID NO: 500584 - DNA, 74 bp, Homo sapiens
ccccaacgcatcatgccagggagccaagcgtcctgcccggccgattgacttctaaggactcttggtacatgagg

SEQ ID NO: 500585 - DNA, 75 bp, Homo sapiens
agtgccggcgccgccgcgtcttcccggtctcctttcccggccgcacagggagccttttgtggcagatgaatatat

SEQ ID NO: 500586 - DNA, 98 bp, Homo sapiens
aacagaaacacctaggaagggagaactgaagatgaacaagtttctgctgtttgaggcacagacttttctggaagcagagcgagccacctgaaaggaga

SEQ ID NO: 500587 - DNA, 100 bp, Homo sapiens
gcggcggcggcgctgctcccgggggcgacggagtgcttgtgatttcacgtatttttgctgaactcgtaaaagagacacttggatggtggattaaccagaa

SEQ ID NO: 500588 - DNA, 97 bp, Homo sapiens
cggagtgagcggagtagcgagtcggcaacccggagataaatttgcgcctcattttggtaagcggaaaaacaaaagagttcctgttttctcctaacga

SEQ ID NO: 500589 - DNA, 100 bp, Homo sapiens
gagcgagcagaggcttaaggtcttcagcggggcgctccaggaggcactcacagcagcctcccgcgacgatgcccctcaacgttagcttcaccaacaggaa

SEQ ID NO: 500590 - DNA, 74 bp, Homo sapiens
tccggagagtggacaagaaaacacgatgaggcgagtggtacgacagagcaagtttcggcatgtatttgggcaag

SEQ ID NO: 500591 - DNA, 100 bp, Homo sapiens
gtggaggattcaatatgcgtggtggaaatttcagaggaggaggtgtatgtgcccacagtgtttgagaactatgtggcagatatcgaggtggatggaaagc

SEQ ID NO: 500592 - DNA, 98 bp, Homo sapiens
catcaccaatggtaaaagttttgaaaacatcagcaaatggcttagaaacatagatgagatacacaatcatcatcttactagttctctgtgttgctcgc

SEQ ID NO: 500593 - DNA, 50 bp, Homo sapiens
accagctctcagttgcacttctcaaagaaaaagcttgtggtgaagggggg

SEQ ID NO: 500594 - DNA, 75 bp, Homo sapiens
gtttaagaggcagctgcctcatctgcagtccggactcatctagcctcggagccctaatttgtttagaactgtaat

SEQ ID NO: 500595 - DNA, 100 bp, Homo sapiens
cagaggtggaagtccaagtcaaacgcagaaggactgcctcactgagcaaccaagagctgtggatgagatgaacggaaaggagctcaatggaaaacaaatt

SEQ ID NO: 500596 - DNA, 75 bp, Homo sapiens
ctggaccctagtcaccatgacatcgccctggccaacagccttgcctgtcaaggaaagtacactccgagcggtcag

SEQ ID NO: 500597 - DNA, 100 bp, Homo sapiens
cctggagctgtagtagaccttttggaaattttcggctttgtgagaaaccttaccatcaaacacgatggccagcaacgttaccaacaagacagatcctcgc

SEQ ID NO: 500598 - DNA, 80 bp, Homo sapiens
gagagggggaaaagcgagcgatcgagcgagcgcgcgcgcgaaaactccgggcaggtgagaagccctaccactgcaactgg

SEQ ID NO: 500599 - DNA, 74 bp, Homo sapiens
agggaaccctggtcaccgtctcctcagcatttacagccgaacaataccagcaacatcaacagcaactggcactc

SEQ ID NO: 500600 - DNA, 90 bp, Homo sapiens
ctgcagcactctgatctgcaccccctgaggggcttccactgtccgcggggtgagaatgcccctgggaataactcaagtcacctgtactgg

SEQ ID NO: 500601 - DNA, 74 bp, Homo sapiens
caaggggcttacgcagaaggacctggccacgtgcaagagaagcctgagccagtgccgctggagagccgctcctg

SEQ ID NO: 500602 - DNA, 100 bp, Homo sapiens
ctggtctttctcaacctcatcttctgggtgatcgtgcagtccggccgccaccccacagtgctgcagaagctctgccagttgcccttccagtatttcagtg

SEQ ID NO: 500603 - DNA, 100 bp, Homo sapiens
cgttgttctcggcgggctgtggggcctccgcgccgcggccgttagtcatgtcggtgttcctttctgccgaaattctccattcatatagaaaccaagtatg

SEQ ID NO: 500604 - DNA, 50 bp, Homo sapiens
gaagaagcaactgtacaaaccatgatgaccagtgtcccagtgaaggaacg

SEQ ID NO: 500605 - DNA, 100 bp, Homo sapiens
cgcgccgcgggggccatggcggagccaggaagccgggagtccgagacccggtttgatgaaggccggaacaactttgaaggggaggtcaccaaggagaacc

SEQ ID NO: 500606 - DNA, 90 bp, Homo sapiens
aagcaaccagcatttagagctgtttatgaagcactgagaaatcttaaagtatcagtggttgagaagagcttttcggacctgttactaccc

SEQ ID NO: 500607 - DNA, 100 bp, Homo sapiens
gttgagtcactgatgtctaatcccctttaaaccaaaccctgtactcagtcttttgtgcccaggttgttatcgtcaggagctgtgcaaactgatgtgtgaa

SEQ ID NO: 500608 - DNA, 100 bp, Homo sapiens
ctctcggcgtccgccagcgatggcacagatttggagcaagaggtggtggtggccttcccccgaagaaatttggtaatcctggggagcgtttgcgtaaaaa

SEQ ID NO: 500609 - DNA, 50 bp, Homo sapiens
tattttggaaagcagtttttaagacaagtgtcggtgtcagaggtcaaagc

SEQ ID NO: 500610 - DNA, 75 bp, Homo sapiens
gggaaaatctccccggtgactttcagggttgccattaggggactcctgaggtcctatctccaggctgcggtgact

SEQ ID NO: 500611 - DNA, 50 bp, Homo sapiens
ttgatacatgctggaggtctggctcagacctaactaccataatgaatgct

SEQ ID NO: 500612 - DNA, 75 bp, Homo sapiens
tgagctcctgaaggtcctaggaactggagggaagtagatcgagattcagatggtcacgtcagctttagagacttt

SEQ ID NO: 500613 - DNA, 100 bp, Homo sapiens
gtttggttcttggcaggaatatggaagacagtcgggaacatgccctgtgtgccgccgtcatttcccacctgcggttattgaagcatctgcagctccttcc

SEQ ID NO: 500614 - DNA, 74 bp, Homo sapiens
gacaagctcctacaaggcaggcagtattgggtgcagctcgatgcattctatttctcatcatttggctcataact

SEQ ID NO: 500615 - DNA, 74 bp, Homo sapiens
aggattccaagcaaagatcttccctgagaagactaacttaatggtaaatctaggtatacctcttggagatcctt

SEQ ID NO: 500616 - DNA, 98 bp, Homo sapiens
tctatgatctcttctttgccttcctacaaacaggaaattacaaagaggccaagaagatcattgagagctctgagctcttcaccctgacctatggtgcc

SEQ ID NO: 500617 - DNA, 100 bp, Homo sapiens
ttcatttctgtgcaaaacaggactggctgatactacatattccagatgcacacagcaagaaggaggccatcagcaaactgggaagaggaccctcaccagg

SEQ ID NO: 500618 - DNA, 100 bp, Homo sapiens
aaagcggccgaggacgcagccaacagggctgccagtgcatctgaatctgccctccaggacagagcgggatgccaccagcttgtccaaagggaagttccag

SEQ ID NO: 500619 - DNA, 74 bp, Homo sapiens
ccgctgtccccaccactgcagccatgatctccttaacggacacgcagagatgaagcctgctgggagcgtgaatg

SEQ ID NO: 500620 - DNA, 82 bp, Homo sapiens
cgtccgccgccaccacccactccggacacaggttcgaaaacatggccaaaagaaatgccgagaaggaactgacagataggaa

SEQ ID NO: 500621 - DNA, 100 bp, Homo sapiens
cggcggcagcggggaccattcccaccaggtccgggtgaaagcctactaccgcgggcttttaaagaagcagttttttcaccgagccctaaaagtaatgaaa

SEQ ID NO: 500622 - DNA, 75 bp, Homo sapiens
agttgaatgataaagccagaagaaagcatgctttctgatcattttgggtatccctggtcagtaagaattatgaga

SEQ ID NO: 500623 - DNA, 96 bp, Homo sapiens
ctcttctcctccaacccagaactggacaatctgaccatgaatgacttcgactatctcaaactccttggcaagggaacctttggcaaagtcatcctg

SEQ ID NO: 500624 - DNA, 100 bp, Homo sapiens
ggaaagcaccatgacgtccatccatttcgtggttcacccgctgccgggcaccgaggaccagctcaatgacaggtggggaccaaggcatactgaacacatt

SEQ ID NO: 500625 - DNA, 100 bp, Homo sapiens
agcggtggcgtcgttgtcgccccctcctcgtcgggaagaatcgtttggtctcctgccgtgcccggttttgattcccaccatggccatcacccagtttcgg

SEQ ID NO: 500626 - DNA, 101 bp, Homo sapiens
gaaattattcttgatgatgatgagtgtcctttacaaatcttcagggaatggccaagtgacaaaggtctatgttaacaatgaatgggcaaccagtgttgggg

SEQ ID NO: 500627 - DNA, 74 bp, Homo sapiens
cttgatatcgagagcctgcaaaaactcaacactggctaattatttatactggttaaaagagcagaaccttgtga

SEQ ID NO: 500628 - DNA, 75 bp, Homo sapiens
tacaggcacgcgccaccactcccaggtgaattttaccgggaaggccgagatgggaggaccgttttcctatgtgta

SEQ ID NO: 500629 - DNA, 51 bp, Homo sapiens
catcctttgactggttagccagatactttcattcagaaaaccaagaagctc

SEQ ID NO: 500630 - DNA, 82 bp, Homo sapiens
caagctcctggccctggccctgatcatcctgctgggcttcgtccagatcgggaagggccagaagcggactcctagaagaggg

SEQ ID NO: 500631 - DNA, 50 bp, Homo sapiens
atcttgctgcttttaattcaactcagagggctctctgccccgccgactcc

SEQ ID NO: 500632 - DNA, 99 bp, Homo sapiens
ataacacaccggagacttttggggggaaactaggtcgatggtcggcggcgcccggatgggcagctgaggtgacttgcttttggagggcttcaacaacta

SEQ ID NO: 500633 - DNA, 97 bp, Homo sapiens
gaggaagaattgggacctagctcggcctgcacaagcccaccgtactgttgtgtggatctgtattcacttcgtactggggagatggtcaagtccattc

SEQ ID NO: 500634 - DNA, 82 bp, Homo sapiens
tcctgaactgctcttggtctccatgaaggctactggcaggagcacatgagagaggggatgttcgtctaaccccagaagactt

SEQ ID NO: 500635 - DNA, 97 bp, Homo sapiens
tggcggacagtgcggaactaaagggttcacacctccaggaatggatagatcctctccagataacagcccagtgcacgggatgttacgtcaaccatcc

SEQ ID NO: 500636 - DNA, 76 bp, Homo sapiens
ggcaggcgccatcatcagcacccggcattgcaacagccagaacgggcatctcctccgccaaggccggccggctgtg

SEQ ID NO: 500637 - DNA, 90 bp, Homo sapiens
gaaccaccaaaagtccattatgaaactggggtccctgtgaaggtgaccaacgtcaaggatggcaccacccaccagacctccttggagctc

SEQ ID NO: 500638 - DNA, 100 bp, Homo sapiens
gcatcaaggatcttggccaatgacatagaccctagaatgttacgttcataacttactaaggattagtgtatattttccaaccttgaggcatgaaattctg

SEQ ID NO: 500639 - DNA, 90 bp, Homo sapiens
ctccaggacacccctgaagccgagaaatgaaccaggacaatcctgtgattgatgaaatagacttccttgaagcttttaaaaatattcagc

SEQ ID NO: 500640 - DNA, 100 bp, Homo sapiens
gcttggatgtctgattcaggaacagaatttatccagttggcgaaggactttgaggatttccgtaaaaagtggcagaggactgaccatgagctggggaaat

SEQ ID NO: 500641 - DNA, 82 bp, Homo sapiens
cctccccgcagagggcgggcccgctggccgatagcctgggctggaagctcttctacgtcacaggctgcctgtttgtggctgt

SEQ ID NO: 500642 - DNA, 120 bp, Homo sapiens
ctccaaaaaaccactgaaggaaaaagtggtgctgatgtatgatgagatcttcatgtgaaactctctgggaaattgcaaaagctgaagtggaaaaaaggggaattaatggaagtgaaggtg

SEQ ID NO: 500643 - DNA, 82 bp, Homo sapiens
cataggctgggtgtgcagggaccgatgcctccaacacagctatgcaggattccccagctttccgttgcacaaacagtgaagt

SEQ ID NO: 500644 - DNA, 50 bp, Homo sapiens
cgtacagaatacattcagccgtcaggctggacagtcttgtgaaattgaga

SEQ ID NO: 500645 - DNA, 50 bp, Homo sapiens
catgagtgcctctcccagcagatccagatgaacaagttgttatgggcaat

SEQ ID NO: 500646 - DNA, 101 bp, Homo sapiens
aataatatgggaaaaacatcaaattcttgaccaatctaggattcgagaaatgatggagtccttcgaaggccctcagcctgcggatgtgaggctgatgaaga

SEQ ID NO: 500647 - DNA, 58 bp, Homo sapiens
agtccgtgctgtttgtgtgtctgggctaaagaattacctccaaagccattgtcaagac

SEQ ID NO: 500648 - DNA, 83 bp, Homo sapiens
gagcctatttacccagaagtagtccatatgtgttctggacttggtgcctctttctgttatatgctttcctatttagttgggag

SEQ ID NO: 500649 - DNA, 100 bp, Homo sapiens
gggagaaacctcgtggcctggtctccattatttgagatgagttacatcttggaggtggtcttcaagctgacagagaagctgacggaacagaaggagtgga

SEQ ID NO: 500650 - DNA, 83 bp, Homo sapiens
attgtcactccaacctcttttcgctggtttttcgttggaatatacgttgcacatttatggcgattctgagtgtgagggcagac

SEQ ID NO: 500651 - DNA, 100 bp, Homo sapiens
aaccagagattcatctttcatgcagtgacatgttgataaaaaatgatggaacttgcttgctagaaaacaaagtgcaaggcttgacaaacacaatgacttg

SEQ ID NO: 500652 - DNA, 83 bp, Homo sapiens
cgacgcgctcatctgctggagcccgagtctctggtaagaagagtgaaagcaaagaagccaagaagtctgaagaaccaagaatt

SEQ ID NO: 500653 - DNA, 90 bp, Homo sapiens
gttgcaacaatattctttaacagtggactatcattgaaaacagagaaggacagaataacgggctcccagattcacaagccccaccaagag

SEQ ID NO: 500654 - DNA, 82 bp, Homo sapiens
cagagctggcctggagtccgcggctggccgcgtgagtagctcatgatggagcagtccaagaagtcctccctcatggtggccc

SEQ ID NO: 500655 - DNA, 74 bp, Homo sapiens
gtggggtctgatatcaccagcataaccgagcgggcccttctgcgatgttttacctggctgcggctgtgtcagat

SEQ ID NO: 500656 - DNA, 100 bp, Homo sapiens
ctacatgttcaactggcacccagtgcttatggttgctggcatggtggtattctatggaggtgaagcagctgacacaggatgatgatactgatgcggttga

SEQ ID NO: 500657 - DNA, 75 bp, Homo sapiens
cagtggtacaaggaccagaagaaactgcaccggaaatgtgcctaccaggatgatcttgaagaccttatagttaat

SEQ ID NO: 500658 - DNA, 89 bp, Homo sapiens
aacttacaaaacttcttgataacttgcatgattgcttagatgagtacgaagatgatgaagcagggcagaaagagcggaaacgagaagat

SEQ ID NO: 500659 - DNA, 80 bp, Homo sapiens
caacattgcagactgctcctcagcccacctcacaggtacagactgacgtgggtgtggacactaagcatcaaacactacaa

SEQ ID NO: 500660 - DNA, 100 bp, Homo sapiens
gcgcgaggtcaagctgctgctgctcgtgtctaaaaagcacggcaagctcattacgttcttacgaacattcatgaagtctcgtccaacaaaacagaagctg

SEQ ID NO: 500661 - DNA, 100 bp, Homo sapiens
ttatttcagaaactggaatcccaacaagccctttgaccaaggtgtcatggagaaactccagctgggcccagagattctgcagcgggaaaatccaaggctt

SEQ ID NO: 500662 - DNA, 83 bp, Homo sapiens
tcactctgtaaagtatacgtttcccagcacccaccaccagcagatcctcagtttgtggtctgccagctaaaggtgaagatata

SEQ ID NO: 500663 - DNA, 83 bp, Homo sapiens
atcagccagtgtggaaaaccagtggtaaatgtcagctacaggccagcttatgaccagtcaagctacaacttcaagcagaagag

SEQ ID NO: 500664 - DNA, 75 bp, Homo sapiens
cgggcatgcgaagccgtccctccccggatttgtaagactccagggcctcccagccgtgaataatctgatggttcc

SEQ ID NO: 500665 - DNA, 100 bp, Homo sapiens
aacattcaagtgaagcaaaagcctttcatgattattgttcatctgtagcttcatggtggctgcccccatcttcggctacctgggcgaccgcttcaacagg

SEQ ID NO: 500666 - DNA, 89 bp, Homo sapiens
aatgggagttgcttttggaatgaatttggaatcttcccttgaagaggaaccactgtgtctcttgaaacaacaaatagtctcttggattt

SEQ ID NO: 500667 - DNA, 99 bp, Homo sapiens
agcgtggatatttacctggagcaagtactgctataaccagaatttggtagaaaaaggatttacttgttggggccctcttgataaaaagagatgtggggg

SEQ ID NO: 500668 - DNA, 75 bp, Homo sapiens
tctgaggatgagctggaggagggggattactacagcatcccatttcccacacccactactccgctgactgggagg

SEQ ID NO: 500669 - DNA, 90 bp, Homo sapiens
gacatcagaaaatgtgtccagagattacaagattgagaggatccagaatccagatctctggaatagctaccaggcaaagaaaaaaactat

SEQ ID NO: 500670 - DNA, 85 bp, Homo sapiens
atgctcaacttcggtgcctctctccagcagactgcgccttatgccagcctggaccatcttggaggcagtgtaggatcatggaaga

SEQ ID NO: 500671 - DNA, 75 bp, Homo sapiens
attatttgagatgagttacatcttggaggtttgtgaaatggctgctgacatttctgaatccagcggggctgactg

SEQ ID NO: 500672 - DNA, 75 bp, Homo sapiens
gagtggacagaacaggaaaccctgcttctcctggaggagccagcaccgctctttgaccttgccatgcttgcctta

SEQ ID NO: 500673 - DNA, 98 bp, Homo sapiens
cttctccatcctctcagtgtttcccgagcgcctcggcttctgccagcaccacgacgacgagctttcctcaaatgaaagagatagcagtgaaccaggga

SEQ ID NO: 500674 - DNA, 85 bp, Homo sapiens
ccttgaggacctactcacagataggaattgaagacagccagctaaaggtgtggatgagcaaatacggctggagtgccgacgagtc

SEQ ID NO: 500675 - DNA, 82 bp, Homo sapiens
cttcttgacgctctgctccagaacctttacgactttgtaatctcaggggcgatataatcaatgaggtggtcctaaagttgct

SEQ ID NO: 500676 - DNA, 100 bp, Homo sapiens
ggacctccagatttccttactgttggggttagacttggaggaactcgaggagatagaagaagatgctggccttgggaatggaggcctggggaggctggca

SEQ ID NO: 500677 - DNA, 75 bp, Homo sapiens
gaactagaagaattgttgggacatcaggtcgtcctaaaggaacctagaaagattgtacaatgaatggtgattctc

SEQ ID NO: 500678 - DNA, 75 bp, Homo sapiens
cactctcccgccgcccaaccctccagtggtgatctttgtgaagtctgtgcagcggtgcattgccttggcccagct

SEQ ID NO: 500679 - DNA, 74 bp, Homo sapiens
aaaaaaggaagactacaatgaaacagctccaatgctggagcaggttgttgaagattggaaattcatagcccagg

SEQ ID NO: 500680 - DNA, 80 bp, Homo sapiens
ttgatgttcgtgactttggaaaggctatccgacatgttcagaccatgtatgaagaggcttacaatgattaccttaaagac

SEQ ID NO: 500681 - DNA, 99 bp, Homo sapiens
cgtcatggggctgtttggaaagacccaggagaagccgcccaaagaactgtaatctatgccagcaattatgacaatgttagcagaccatgcagctcgtca

SEQ ID NO: 500682 - DNA, 100 bp, Homo sapiens
gagggagttaaggacattccaggcagaggcaaggctgagaatcaggctgaaagccgggcagcagtggaggggacagtggaggctggagctacagttgaaa

SEQ ID NO: 500683 - DNA, 88 bp, Homo sapiens
ctcttcaacagttataccagagacaacaatgcagatcttcgtgaagactctgactggtaagaccatcaccctcgaggttgagcccagt

SEQ ID NO: 500684 - DNA, 82 bp, Homo sapiens
acggcgagcgcgagcggcgcgagaaaaaagacgagctttacctaaatctggtgctggaatatgtgcccgagacagtgtaccg

SEQ ID NO: 500685 - DNA, 101 bp, Homo sapiens
aagaaatcactgtttgtcctgtgaagtacatgcgagaagccacgccctatgtgaagaaaggatccccagtatccgagattgggtgggaaacacctccgcct

SEQ ID NO: 500686 - DNA, 98 bp, Homo sapiens
cccactctttccgccctaatggaggtctccagtttcggtggttatggaggaggcggccctggttactctggaggaagcagaggctatggaagtggtgg

SEQ ID NO: 500687 - DNA, 74 bp, Homo sapiens
cgccgccgggagactccagccggcgggcgagcagggtacttcaactcccgcccccacctgtgtcccgctggctc

SEQ ID NO: 500688 - DNA, 105 bp, Homo sapiens
ttgtttatcctaatcccaatgctgaagtaagattgtcttggaaatactaagttggatgcttgggatttgctttacattctaagtggatttggagaagagacaata

SEQ ID NO: 500689 - DNA, 138 bp, Homo sapiens
taacatacagcactttgtggagaaagtcgtcttccacttgcacgaaagctttcctaggccaaaaagagggagagtccggtagtgaaaggcaatgcgctgttagctctaagcagccttgctgtcgtcgtatctagacat

SEQ ID NO: 500690 - DNA, 90 bp, Homo sapiens
cgagttcaggcgtctgagacttggtgggaacggaccttcctcttaggttatatcttaagtgtggtgctgctaacattgcccaggcagcat

SEQ ID NO: 500691 - DNA, 75 bp, Homo sapiens
cgcacggtgccaggaccaagtatctgactctggtggagcaacgttcaggtggttcaggaaagggcagcaataagg

SEQ ID NO: 500692 - DNA, 100 bp, Homo sapiens
gcggctttagtggcagcatgaagcgcaccccgactgccgaggaacgagagcgcgaagctaagttgacgaaggatcagagattggtgtattcgggcagact

SEQ ID NO: 500693 - DNA, 90 bp, Homo sapiens
agcaggcatcatccgctatgcaattgggatgaccaaaatgttagacttgcttgaggacttcttagactatgaaggctacaagtatgagcg

SEQ ID NO: 500694 - DNA, 101 bp, Homo sapiens
ctcacccgtgtcctggcactctaccgttccatcttggatgcctacatcatcgatgaatttttagatgtgatctactggttccgacagatcattgctgtggt

SEQ ID NO: 500695 - DNA, 75 bp, Homo sapiens
cagtacggccagatgtacatcaaggcctccggcagctatgcaggtgtaccttccggtttcccagcacggccatca

SEQ ID NO: 500696 - DNA, 100 bp, Homo sapiens
cttgcacacaaagaagagacatgatgtatttgcatccttccctgcttcagccagcttgcagaacacagagaagtacggcatacctacagcctggagtccc

SEQ ID NO: 500697 - DNA, 75 bp, Homo sapiens
tgagaaacccggcaatgaaaaaaatgctgctcaaattccagtggctactccacaggtctctcctaacacagtgaa

SEQ ID NO: 500698 - DNA, 101 bp, Homo sapiens
gaagttataacgctacacgaagaactaagaatattattagcacaagagcaccatactttgaggccatctgttgaatcttcaagtccaggtaagtattttcc

SEQ ID NO: 500699 - DNA, 100 bp, Homo sapiens
ttccccaggcggcggcggtcctggtgcggaccctccggccgcagccatgtgggacccgcgggcagctagttaataacgacatgatagtcactgacaacaa

SEQ ID NO: 500700 - DNA, 75 bp, Homo sapiens
gcctggcatactgcataaatggaagcagggtaccgcgcatccacaaggacaaagataaacctcccagcttctctg

SEQ ID NO: 500701 - DNA, 89 bp, Homo sapiens
gttctgcaagaggagctattctgatcttgtgacattctgaaagttcccaaacctgaacctataccagagcctaaagaaccttctccgga

SEQ ID NO: 500702 - DNA, 89 bp, Homo sapiens
ggaccatattctctgggtgaaagtctgcaaccctgaaaaagatgcaatgccgaaagttcagtataaatcgaactgtaaaccatccacat

SEQ ID NO: 500703 - DNA, 98 bp, Homo sapiens
gagcccctccacaagttccatctaggcctacgagggccccgcccagtgtcccaaggtatgacccacggcacaaccgctggttccagatccagtccctg

SEQ ID NO: 500704 - DNA, 101 bp, Homo sapiens
caaacgaaaaagaacgacatgatgcaatcttcaggaaagtaagagggtggaacgagaactttgttcagccacagctgaatttgaggatttcgtcttacagt

SEQ ID NO: 500705 - DNA, 75 bp, Homo sapiens
gggtgtctcgtgtgtgaacatcacaggggacaagggcctgtccgacacgccctacgacagcagcgccagctacga

SEQ ID NO: 500706 - DNA, 96 bp, Homo sapiens
tccactccccagctgtgaaagggcctgtttaaagaagaaaacccgtatgctagatttgaaaacaactaaagcgctccagcacatcagtcccgacgc

SEQ ID NO: 500707 - DNA, 75 bp, Homo sapiens
catgggctcaatggctcctggccatgttgctgaggagtgttcctgtgtggctcctgctcctgctgtgtgtcgggc

SEQ ID NO: 500708 - DNA, 98 bp, Homo sapiens
agaccattcagatgggatctttccggatcaatccagatggcagccagtcagtggtggagtcaggtagcattggtgctgcagatagtcctgagaactgg

SEQ ID NO: 500709 - DNA, 100 bp, Homo sapiens
atgaggcacctaaaaattgtataccgcagattcagggttatgtggtccgaatcagtggtgggaacgacaaacaaggtttccccatgaagcagggtgtctt

SEQ ID NO: 500710 - DNA, 100 bp, Homo sapiens
acgcgggcggctagagccggagtggggcgagccgcggaacccggccgggagccgcgcgaggcgcctctggacgagaccagccagatgagcgacctcccgg

SEQ ID NO: 500711 - DNA, 100 bp, Homo sapiens
cggtggcggggctgaagaagcagttctacaaggcgagccagcaagagtgagccatggagctacgtgtggggaacaagtaccgcctgggacggaagatcgg

SEQ ID NO: 500712 - DNA, 51 bp, Homo sapiens
ctttccgaatctgcaaaagaagtctgttcaaaatagtcatttcaaggaacc

SEQ ID NO: 500713 - DNA, 101 bp, Homo sapiens
gcaggagtttacttccagcgccaaaatccacttccacacccgctggtgatctgcaactctttcaccatctgtaatgcggagatgcaggaagttggtgttgg

SEQ ID NO: 500714 - DNA, 51 bp, Homo sapiens
gtcccttacggccacgaccaagcccaccttcccctcctccaatgagtcccg

SEQ ID NO: 500715 - DNA, 100 bp, Homo sapiens
tggacccggcctgggagaagcagcagagaaaggtgtttcccattaaacactaccaggacaaaatcaggccttacatccagctgccatcgcacagcaacat

SEQ ID NO: 500716 - DNA, 71 bp, Homo sapiens
tgccaagaggaacagcagtgtaaatgactcagatgccgacaaaaggatcaaggtggcgaagcccgtggtgg

SEQ ID NO: 500717 - DNA, 100 bp, Homo sapiens
ggactcgccctctgggaggcttaccgagagtttgaaagtgcgattgtggaagctgctcggcaagccaaattacagcagcagatggacctgcagaaaaatc

SEQ ID NO: 500718 - DNA, 83 bp, Homo sapiens
ctcaatgacagtcgagctttggctaagacaccattcgcttttcacccaagatgatttgatgtcttataaaactctgatgaacc

SEQ ID NO: 500719 - DNA, 98 bp, Homo sapiens
acaaggagaagaaccatggagactggaggaagaattcccaagccagagctttccaggtggcaagtgggagaaaccatcagaaattttggaaatcaaag

SEQ ID NO: 500720 - DNA, 100 bp, Homo sapiens
cgaggtcgagtaccttccctgtcccatcgcaaacccaaagatccccgttcctggagattctgattgaggaactgtggctgcaccatctgtcttcatcttc

SEQ ID NO: 500721 - DNA, 85 bp, Homo sapiens
catcatggtttgattataactggtctcctctgagcctccggcctccataagacccaaaacagatgacacctcttcccagtccccc

SEQ ID NO: 500722 - DNA, 100 bp, Homo sapiens
cggaggcagggcagtgtggtgtccagccggatccagcatctctccaccatcgactacgtggaggacgccttagattgtaagcaaaagaaatcaaggtcaa

SEQ ID NO: 500723 - DNA, 90 bp, Homo sapiens
caaggagaaagagaaagaggagcggaagaaacagcaggaggatgaatctgaggacacagatactgatggggaagaggagacatcacaacc

SEQ ID NO: 500724 - DNA, 74 bp, Homo sapiens
cgacggcctcagcaggcggggaagatgaaaggaatcctgctgcatcacagaagctggaagttctgatgttccac

SEQ ID NO: 500725 - DNA, 75 bp, Homo sapiens
acaataagagcaactggaatgtgtttagggagtgctggaaacaagggcaggatgcacttgcagccttggaaactc

SEQ ID NO: 500726 - DNA, 75 bp, Homo sapiens
gaggaggaggacgagaagcagcggctgcagaatgagagcataaggaaacccagcccagagccacgagctcagatg

SEQ ID NO: 500727 - DNA, 75 bp, Homo sapiens
ccgagacggcgatccgggcgctcgagacttaccagagccacaagagattcgtcagcgaactgcagctcaaagaaa

SEQ ID NO: 500728 - DNA, 74 bp, Homo sapiens
tcgcacgggagccagctgggtgtcctcctccgcctcctcctctctgcatgcgcgtcagagcccgtgccaagaac

SEQ ID NO: 500729 - DNA, 100 bp, Homo sapiens
tttaagcactgctgcactttatgaggtctgaatttcctgctgctgttcacaaagatgctttttatctttaactttttgttttccccacttccgaccccgg

SEQ ID NO: 500730 - DNA, 96 bp, Homo sapiens
gccgagctggacccggaccggttttgggtgagctgctccccggtgtctgcccagctcctgtcggtgctgcagggcctcctgcacctggagcccacc

SEQ ID NO: 500731 - DNA, 150 bp, Homo sapiens
gaattgttgatgttaatctaactagtgaaggaaaggtgaaactggttccaaatactaaaatccagatgtcatattcaggaggtggggaagacagggctccagctaccacaggacgggctctgggtatagccgttccagtcagggacagcc

SEQ ID NO: 500732 - DNA, 75 bp, Homo sapiens
cccctccgacctcctaaaatgaaattcattacagaaatctggcacccaaatgacatcgctattgcggttccgagg

SEQ ID NO: 500733 - DNA, 100 bp, Homo sapiens
cagctcccccagtccctcaggattgagtgccatctatggggggacatatatgctgaacaaacctgtggatgacatcatcatggagaacggcaaggtggtg

SEQ ID NO: 500734 - DNA, 75 bp, Homo sapiens
ccaaagttcaccatcctccaaacaagtgaaatatcgggaggcaattcagaagtgggatgaagcactacagttaac

SEQ ID NO: 500735 - DNA, 100 bp, Homo sapiens
tgaattggatatcaagccagagaagtgcccgaggagagttaacagaatatgacagatacctagcatctagcaaaataatggcagctgcttaccttgaccc

SEQ ID NO: 500736 - DNA, 100 bp, Homo sapiens
gatgaagccatacaggctgtgaaggtccagtcattccaaatgaagagatgcctggtactgagtttgagggtgcagtcatagctctgttccatttgttggc

SEQ ID NO: 500737 - DNA, 129 bp, Homo sapiens
ttttcacctcgcgtcgcgcccgggaggaaggaacgaggcaaggagctaaagcagcgtgcgttcagccctggggttttaaaatcaaagatgggaaaatcggagaaaattgcccttccccatggccagctt

SEQ ID NO: 500738 - DNA, 73 bp, Homo sapiens
cttcatccccttctacagtggccttatccctccttccttcagaggcgtggctgcaataggatctgtggctttg

SEQ ID NO: 500739 - DNA, 101 bp, Homo sapiens
gggccaggcgccgctcagaacgcttagaccatgctcagcctccaagcagccttgtcatcgacaaagaatctgaagtttacaagatgcttcaggagaaacag

SEQ ID NO: 500740 - DNA, 101 bp, Homo sapiens
ttctccattttgccacacctgtggatcctctatttctgcttctccactacctcataaaggctgataaggaggtctgtgcagacttttgcagacaaatcaaa

SEQ ID NO: 500741 - DNA, 100 bp, Homo sapiens
gccttttttgacgctgtccattgtgagaggacaaagcgatctcccactaccaggtcagactatgatgactggagaccgtctctggccagtttgcttcaac

SEQ ID NO: 500742 - DNA, 83 bp, Homo sapiens
gtcaacctgtcccacagcgaaaggcccagctgagagccagcctggaggttacccagcagcaggccacccaggccgaaggccag

SEQ ID NO: 500743 - DNA, 100 bp, Homo sapiens
cagccggggcctccgtattgaatgaaagacccagtgcaaagacatcaccatgaacactagcagaagaaatctgtcctcaaagagaaaaaaatgcaaccca

SEQ ID NO: 500744 - DNA, 100 bp, Homo sapiens
gccaccaggcagcaaaaccatcttctctaaggaggctggcaggatgtacagtttttatcacaggtgcaagccgtggcattggcaaagctattgcattgaa

SEQ ID NO: 500745 - DNA, 75 bp, Homo sapiens
gcaacatccgcgagttcctgcgcggctgcggggcttccctgcggctggaggggaggcacacgatccgaggtcctt

SEQ ID NO: 500746 - DNA, 90 bp, Homo sapiens
tgccgtcctagcccgggtcctgggggtgggctgaccttcacctgtcactgtgcccagctgtgccacgaccgtggctatctggtgacccag

SEQ ID NO: 500747 - DNA, 82 bp, Homo sapiens
ccgcgaaccgcagtatcatgctggccaagaagatcatcattaaggacggaggcacggcttgggcactgtttaaaggaaagtt

SEQ ID NO: 500748 - DNA, 100 bp, Homo sapiens
gcaatgatgacatcacagatggcaaccccaagttgaccctgggtctgatctggaccattattttgcatttccagatcatcacgggggaattctaccggat

SEQ ID NO: 500749 - DNA, 100 bp, Homo sapiens
cgtgaactgaagggacagggaacagccagacgagagcttcagccatcacgaggatgatttcggaacctggagaaaatctccatttctttcacctcaaagc

SEQ ID NO: 500750 - DNA, 100 bp, Homo sapiens
cttgcagatcatcccgatgcacccatgtcccaggtgtatggagcgccacatctcctgagattatttgttgaagattcctgtctctggatccaaatcagag

SEQ ID NO: 500751 - DNA, 75 bp, Homo sapiens
caaactaagccgattttccggaaaaagccgtgctatcaagactaatcaggaccttctcccagaaactccatggac

SEQ ID NO: 500752 - DNA, 119 bp, Homo sapiens
ggtcagggaggaggaaattgaggtggattcacgagttgcggacaactcctttgatgccaagtggcgagctttcctgcccggcctgaagttcgaggtcatcagctctgctcacatctccc

SEQ ID NO: 500753 - DNA, 100 bp, Homo sapiens
gctgccgctgctgctggtgttagcgctcagtcaagattgttaaaggaaatgggctggcaggaagacagtgaaaatgatgaaacatgtgctcccttaactg

SEQ ID NO: 500754 - DNA, 96 bp, Homo sapiens
gctccaggtgcccacccctggcagagccggcctactgaacacctctgggagcgtggctgtgctgtctgcagagcagaaccacaaggttgacacgtc

SEQ ID NO: 500755 - DNA, 75 bp, Homo sapiens
gtgctctcctgggcccccactgtccccaggcctcagggcgactacgtgcacaagtctgtgtttatcattttcttc

SEQ ID NO: 500756 - DNA, 100 bp, Homo sapiens
atgtggtggaatatgccaaggaaaaactggagagcttcatcaaaaatagtgatagctttgataaggctactacaaagttctgggaaagggaaagctccca

SEQ ID NO: 500757 - DNA, 108 bp, Homo sapiens
gctgaagaaggctctgtgcaatcctcacattcaagctgataggctgcgctaccggaatgtcatccagcgagtgattaggaccaacatcatttctgacctagaagagca

SEQ ID NO: 500758 - DNA, 100 bp, Homo sapiens
gtactctttcctcgtggaatttgaagattctacagataaatcaggtgacgcatccaaagaagacattgacactgctatgaaattaggagccggttacccc

SEQ ID NO: 500759 - DNA, 75 bp, Homo sapiens
gcgcgattcgcggcagcgccccgatggaacctcctggtcctgtgagggtcaaaagcggctggtgctttccgaaag

SEQ ID NO: 500760 - DNA, 75 bp, Homo sapiens
cgacgccgcctggcaggccctgcgcaccaggtggtataagttgaaatccaaaccaggaaagaaggacaaggagcg

SEQ ID NO: 500761 - DNA, 101 bp, Homo sapiens
ataaatggcattaatgtgagaaaatgtagacatgaagaagtgttggaagctgaaggtgttcctgaagtatctgaaaaatatgaaattagctctgttcccac

SEQ ID NO: 500762 - DNA, 100 bp, Homo sapiens
ggctcctccagcgtcgccgctatgaagaaagtggttcaacagctccggctggaggccggactcaaccgcgtaaaagcttgccgctgttccgtaacccagt

SEQ ID NO: 500763 - DNA, 78 bp, Homo sapiens
ccggagagccccggagtgagcggagtagcgagtcggcaacccggagtaattcgccaaaatgacgaacacaaagggaaa

SEQ ID NO: 500764 - DNA, 90 bp, Homo sapiens
cggaggataaaatggaggtggacctgagtgaacgtggcccacaaactctttaacaacttgaaataaatgtgtggacttaattcaccccag

SEQ ID NO: 500765 - DNA, 100 bp, Homo sapiens
gggcgccgcagcctcccggggccctacggccgcccgccaccagtttccacgggctcccttgctcagcagtatgcgcaccctaacgctaccctgcacccac

SEQ ID NO: 500766 - DNA, 50 bp, Homo sapiens
gcggcgccggcctccggggagaaacggtctgtttctgtcgactgtggacc

SEQ ID NO: 500767 - DNA, 75 bp, Homo sapiens
cccccggcccgcgctgcccgcactcctggtcctgctcggggctctgttcccagcattttgaaagcgaagcagaag

SEQ ID NO: 500768 - DNA, 74 bp, Homo sapiens
tttttcatctgcactgccaagactgagtgagatggacagagacgtatgtgcgttggtctcctaagggcacctac

SEQ ID NO: 500769 - DNA, 100 bp, Homo sapiens
cgctcgctccgctcgtcccgctcgtcatggcctacccgggatacggaggagggtgagcaagaagaacccatcaggtgattgtcaggcctctgagcccaag

SEQ ID NO: 500770 - DNA, 95 bp, Homo sapiens
tcatattatgtagaatacttgggtgacatctgcctgagagatctccaagaattacagccagagcctaagcctggagacctgattgagatttttcg

SEQ ID NO: 500771 - DNA, 76 bp, Homo sapiens
gaatttatcctcaagagtcagctggcaggtactgaagtttcttcatgacaagggattcccttatgggcatcttcac

SEQ ID NO: 500772 - DNA, 100 bp, Homo sapiens
ggcggtgccggcgccggagacgatgccgttgtgcaaggaatatgtagagataattccactatcaaagactgtatatacattttccaagatggggagatga

SEQ ID NO: 500773 - DNA, 75 bp, Homo sapiens
gatcctgcatagccttcacagagagtccagttgccaagttcctaatgtggatctaccacccctgtgttcatcgag

SEQ ID NO: 500774 - DNA, 87 bp, Homo sapiens
ccgttgcttcaagcgccacggtgcagaagtcattgatacacctgtatttgaactaaagatccttcatggatttaaaaatcaagttgg

SEQ ID NO: 500775 - DNA, 74 bp, Homo sapiens
catggacgaagccttcaaatccatcaagctcatcaaaagtgccctacttgttttgctccaagacagcctgctag

SEQ ID NO: 500776 - DNA, 100 bp, Homo sapiens
cagggaacggacagcccgacctcttaggcgccgggaccctcaggctcagatcagtggccgaggccccagagagttgggtatcagaaattaaaaaagaaga

SEQ ID NO: 500777 - DNA, 50 bp, Homo sapiens
gcgctgccgaggagaacccagcggcctacaaggagaagatgaaggagctg

SEQ ID NO: 500778 - DNA, 75 bp, Homo sapiens
atttagagctgcggaacaggacgccctctgattaatctatgccagcaattatgacaatgttagcagaccatgcag

SEQ ID NO: 500779 - DNA, 82 bp, Homo sapiens
aaccagtaccggctgacctcgctgtacgccgagcacccaggcgactgcctcatcttcaagaaggtagaagatagcaccatgc

SEQ ID NO: 500780 - DNA, 101 bp, Homo sapiens
cgggtttagcggcagcctcttcgctattgacctgttgtattggcgggacatcaagcagacgggcatcgtgtttgggagtttcctgctgctgctcttctccc

SEQ ID NO: 500781 - DNA, 127 bp, Homo sapiens
agatgggaccgtctagttgcaagaaaacaagctcagggctcccactgattctacattacggtactacattaaaccttctgaagtttcctatttgcaacccaactccttacagaatgtttaaaaggca

SEQ ID NO: 500782 - DNA, 74 bp, Homo sapiens
cagccagagttctttgaggctgtaaacgaggccattttgctgtcctgcaggatatggtcccccctaagaagcac

SEQ ID NO: 500783 - DNA, 148 bp, Homo sapiens
ggtccaggcagtgcagcatgtagtgattgggcccagtagcctgattgtgcatttcaatgaagtcataggaagaggctcctgagtcctataagaatgtgacagatgtggtaaatacctgccatgatgctggaatcagcaagaaagccat

SEQ ID NO: 500784 - DNA, 83 bp, Homo sapiens
cgagatggcaaggctgaggacgggaggctgattgagaggcgaaggtgcagaggccaagaccgttttgcccaagaaggagaaaa

SEQ ID NO: 500785 - DNA, 75 bp, Homo sapiens
tgttgtcgtggccggagcggcccgcgcctgggctgccggcacttcgcggcagatattgatgatgttaagaagttc

SEQ ID NO: 500786 - DNA, 100 bp, Homo sapiens
gaagagtgatgtggttttggataagcggggcattacgtcgctggaaagagaacaccatggcccgagtggatgaagccaaaaaaacctttcaagcaagtac

SEQ ID NO: 500787 - DNA, 100 bp, Homo sapiens
caagaatttctgaggacaggagctcacatctggaagtgctctacggaaacgtattcgagaggacagaaaggccaccacagctcagaaggtgcagcagatg

SEQ ID NO: 500788 - DNA, 80 bp, Homo sapiens
cagacatggacccctcgcgagccatccagaacgagatcagctccctcaaaggaacttgctactaccagcaccatgcccta

SEQ ID NO: 500789 - DNA, 87 bp, Homo sapiens
cgcttgtacaaaggagagtttaaacagccaaaacagttcattcatattcagcgaataatcaagctgggaaggtggaaccctctcccc

SEQ ID NO: 500790 - DNA, 100 bp, Homo sapiens
cgccctctggaagaagattgtaccttggagcttctcaagtttgaggatgaggaagctcaggcaataagaccatcatcatgtggaaactgaccagggatga

SEQ ID NO: 500791 - DNA, 96 bp, Homo sapiens
acagaaacaaaagacttggtcaccgttcacacagatggaaacgaacagctctctgtaatgcgatactcaccaggtagtgaagctgattttagctcc

SEQ ID NO: 500792 - DNA, 83 bp, Homo sapiens
gagaaaaccagctgagacagggcgccacttactaggtccctggtgctgaaccgcctgcgtccagttgccagcgggggtgggaa

SEQ ID NO: 500793 - DNA, 100 bp, Homo sapiens
tccagttgtttgacaagagtggaaatggagaggtgacatttgcacaacgtggaagttcttggaatactttccgatgatgtagagactgataccgtagccc

SEQ ID NO: 500794 - DNA, 100 bp, Homo sapiens
ctggattcaaaaacaattcaaggggagctgggctggatctcttatccatcacatggggattctccttttacaaatgcaggaatgggatctaatctaaatc

SEQ ID NO: 500795 - DNA, 71 bp, Homo sapiens
cggaacccgagaccgagtcagaacccgagtgctgcttggcggcgagttatacatgggaagctgttgatacc

SEQ ID NO: 500796 - DNA, 90 bp, Homo sapiens
ctaccatgacgaaaacatgtactacagccagtcttctatgtttccacatcggtcagaaaaagatataagccaatggacacgtcagtgtta

SEQ ID NO: 500797 - DNA, 75 bp, Homo sapiens
caagggactgtgtccaccctcagccctgggcgctgcctatggcacagccaagagcggtaccggcattgcggccat

SEQ ID NO: 500798 - DNA, 80 bp, Homo sapiens
cctcctaagtagctgggactacagatgctggaggaacataaggctgtgatcctacagaaatacgcacgggcgtggctggc

SEQ ID NO: 500799 - DNA, 75 bp, Homo sapiens
agcagtggagctgacacggagacacatcgggagatacttcaggggattaccggaagattctgctgaagatctgtg

SEQ ID NO: 500800 - DNA, 74 bp, Homo sapiens
accgcagtatcatgctggccaagaagatcatcattaaggacggaggcacgaaactgccaagttttggaccttat

SEQ ID NO: 500801 - DNA, 90 bp, Homo sapiens
atctgctcaaggatattttctctaagtttacaattttcctacagagagtgaaggaaataatgcaaaaggtgtcccaaggctcctgaccag

SEQ ID NO: 500802 - DNA, 103 bp, Homo sapiens
ccccagccgaccttgagctccaggagttcgtctcttacgtctgcggaagtgcagctgcctcagttcttagcgcagggaaagcgtcgagaagagacactccagc

SEQ ID NO: 500803 - DNA, 100 bp, Homo sapiens
tgctgccgctgagagcagggccccttagcctctgggtttgcgctagcagcgtaagacagaagccctgcagcagctgcagaaggactctgaggccatccgc

SEQ ID NO: 500804 - DNA, 147 bp, Homo sapiens
gcgccgcctggctttcgtattcgttgttctcggcgggctgtggggcctccgcgccgcggccgttagtcatgtcggatggtgatggaatttcctgataatgtgttaaatctcgatggacatcagaataatggtgcacagctaaagcag

SEQ ID NO: 500805 - DNA, 75 bp, Homo sapiens
tcagcaagactggagtccctgatggaattatgcagtttattaaggtcaaaagcgtcaggcagagagataagaaag

SEQ ID NO: 500806 - DNA, 89 bp, Homo sapiens
cgaaattggtcattctcgctaacaactgcccagctttgaggaggagaaaagcacactggtggtggcagggagtctggcagtgatgcctg

SEQ ID NO: 500807 - DNA, 83 bp, Homo sapiens
cttctcacccccaggatgtcatcgagggtgacttaagagattaaaattaatttggttgctgttggttctgaacaaataatgag

SEQ ID NO: 500808 - DNA, 75 bp, Homo sapiens
ggagaacacttttccttcaccgaaagggtgaagttgaacaaattgctatgatgaaaccaaaaggccagactgaac

SEQ ID NO: 500809 - DNA, 100 bp, Homo sapiens
gaaacgttatttttcaacctgtggcagagctgaagaagcaaacggattttgaaggaacagctgccccctgggttcccttccatcgacatggggcctcagc

SEQ ID NO: 500810 - DNA, 98 bp, Homo sapiens
gccgcaggggcgcgcagcgcggggagctgccagatctggaaagcatgaagactgggctttttttcctatgtctcttgggaactgcagctgcaatcccg

SEQ ID NO: 500811 - DNA, 83 bp, Homo sapiens
aagccacactgtgccatctgcactctgctcatgccgtaccacaaggagccatgaccctctgcattacaaacccattatgggta

SEQ ID NO: 500812 - DNA, 75 bp, Homo sapiens
aaggaacgaggcaaggagctaaagcagcgtgcgttcagccctgggaggagcaggagcggcttcgcttggagcagg

SEQ ID NO: 500813 - DNA, 98 bp, Homo sapiens
ttaatctcaactgaatggaatgaacgacagcctgcaccagcttgaccacatattatcccctccacccatgccgtttcggaaatgcagcaacccagatg

SEQ ID NO: 500814 - DNA, 100 bp, Homo sapiens
cagtatcaacggagtctccggggtgagccctattcccagaggcaggtggtgctgaccctgtaacccaaaggaggaaacagctggctaagctcatcattgt

SEQ ID NO: 500815 - DNA, 98 bp, Homo sapiens
tgatatttatactgaatgagttactgaccggagcagggccccaagcccccgggcctggtgggggacgcgcttcttcccacactgtgagcctcagcagc

SEQ ID NO: 500816 - DNA, 117 bp, Homo sapiens
gtcgcttgaaaagactgggcttgtccttgctggtgcatgcgtcgtcggcctctgggcagcagtttggtgccctggttgtcagatgttggaaagcagtaggacggaacatactcttcg

SEQ ID NO: 500817 - DNA, 96 bp, Homo sapiens
aactgtcctcaagagcttcctaagtcaaggccaagtattgaaattggaggctaagctcatggggcattcagaatgggaccacaaacgagggccaag

SEQ ID NO: 500818 - DNA, 98 bp, Homo sapiens
gcgcaggaagttccagctctgcgccgatctatgcacgcagatgctggagaagtccccttatgaccaggtgaatctggattgggaaagtcgacattaat

SEQ ID NO: 500819 - DNA, 75 bp, Homo sapiens
tatagctctgtatgagaaggacaacacctacttagagcgtgccaggaagatgtcgagcccgggcatcgacggcga

SEQ ID NO: 500820 - DNA, 50 bp, Homo sapiens
tttgcattcaacattcaggctatcaggaggaacatatgcagcagaaaaaa

SEQ ID NO: 500821 - DNA, 100 bp, Homo sapiens
tccagacatgtggctcttcttcgggatcactggattgctgacggcagccctctcagggatcccaacggcttcaatgactggaccttctccactgtgcgat

SEQ ID NO: 500822 - DNA, 73 bp, Homo sapiens
caacttattgtttcatcagctaacattgatgttgatgggacaatgacagtggactggaatgaatggagagact

SEQ ID NO: 500823 - DNA, 98 bp, Homo sapiens
ttggccttcgtacccgtcttgattgagttccctgttcttcaggacaatttagaagtttatttgggattacaacagtttatagtcacttcagggtcagg

SEQ ID NO: 500824 - DNA, 49 bp, Homo sapiens
agaagagaccatccatatttccagcctgattacatcaaccccagagccg

SEQ ID NO: 500825 - DNA, 101 bp, Homo sapiens
atgtaccgactgcttttggaataaaaagattcccaggatgtgagcaacacgggaccggtgctggagaatctggtaaaagcaccattgtgaagcagatgagg

SEQ ID NO: 500826 - DNA, 50 bp, Homo sapiens
ttaatttcaaagcttttcccatggagggactgttgacatttagggatgtg

SEQ ID NO: 500827 - DNA, 147 bp, Homo sapiens
cctggtgtgtctggtgtcctagagcggacgaaagcaggtgactctctagtcaacttccgacttggactccgaagatcgacaaggcgcctctgtcgaagagccttctgctggtccccagtgccctctccctcctgctcgccctcctcc

SEQ ID NO: 500828 - DNA, 98 bp, Homo sapiens
cacagaatggcctttatcagcatttccctgtttgcagttcgactgctacaaacgcttctccctgttgaaaaggtgacaaaattgaattgcttatcttg

SEQ ID NO: 500829 - DNA, 76 bp, Homo sapiens
acggctgcagtgggacattccaaaacaggtgacggccctgctcgggaggccctccagtctctgagccagcggcttc

SEQ ID NO: 500830 - DNA, 98 bp, Homo sapiens
attggaagaacacgaggaatttttcccagcatttcaggcatttactaatgatctacttgaaatcttaggttggactccatgaaagaattgcacaaaac

SEQ ID NO: 500831 - DNA, 101 bp, Homo sapiens
ggctgccagaaacgctccttctcgattattgatggactcaccctgtcacccaggttggactgcactggcctcaacctcctgagttcaagtgatcgtcccac

SEQ ID NO: 500832 - DNA, 101 bp, Homo sapiens
aacggggccctcaaagtctccgtctggagtaaggtgctgcggagcgacgcggcctgggaggataaggaatgaatctgaagtctgctgcagtaaaacacaga

SEQ ID NO: 500833 - DNA, 100 bp, Homo sapiens
atgggacgaggtcatcaagcaggaagaaggatggtgaactcggtgtgctgggccccccatgactacggcctgatcctggcctgtgggagctcggatgggg

SEQ ID NO: 500834 - DNA, 82 bp, Homo sapiens
agcagcgtgagctggtgaagctgcagcgccgccgggactccgaggcgtctctggccgagcctctttttgtggaaaacgacag

SEQ ID NO: 500835 - DNA, 96 bp, Homo sapiens
tgctggtgaagaaaatgctttatttttgtggcaggcatctgtgggatctgtaatagaaatttgagacatttgggaaatgatgaagtgcacattgtt

SEQ ID NO: 500836 - DNA, 100 bp, Homo sapiens
cagcgagcgggagaagcggggtcaattgactttggtgtgagtgctcagctggacaggactgtggggcggagaaatacgttcataggcactccctactgga

SEQ ID NO: 500837 - DNA, 90 bp, Homo sapiens
cgccaaatacttggtcgtctacacaggcgcgggaatcagcacgagtacaggggctcaggtccaggtggcaggggatatgctacccaactc

SEQ ID NO: 500838 - DNA, 101 bp, Homo sapiens
gcgggaggcagcggccgcgcggcgctggactggagcagaaccccaggactgcgcccccgggagcgggcgcccagaggtagtggaggacatgctagaggacg

SEQ ID NO: 500839 - DNA, 75 bp, Homo sapiens
ccatcccactggctgcaggcctcctgctgctcctgtttgtggggacaagaatccttcaagaaacaggaaaaaact

SEQ ID NO: 500840 - DNA, 75 bp, Homo sapiens
agcgaccgagggactgggagtcgttagtgaggctcctgtgacgtttgatgacatcactgtgtacttactccagga

SEQ ID NO: 500841 - DNA, 82 bp, Homo sapiens
ggcctttctgctcctcgcggcccagggtttccaggcctgaggtgcccgccctggccccaggagaatgaaccagccgcagagg

SEQ ID NO: 500842 - DNA, 90 bp, Homo sapiens
tatggcagtggacgtggatttggggatggctataatgggtatggaggaggacctggaggagtggagcaccagcaactgttagacctcgcc

SEQ ID NO: 500843 - DNA, 82 bp, Homo sapiens
gtctagttctcgatcaagatcaagatctcattctagaaagaagcgatacaggacgatactttgatgaaatcagccaggacac

SEQ ID NO: 500844 - DNA, 100 bp, Homo sapiens
aaaaacagtcctttctactatgccaaagtggaacaggtgaagttcgatgccacatccatgcatgtcaagcctcaggtggctgcccagcagaagatggtag

SEQ ID NO: 500845 - DNA, 75 bp, Homo sapiens
cagggatacatgccctacctcaacaagtacatcctggacaaggagaccagtatgatgtctgtgccatttgcctgg

SEQ ID NO: 500846 - DNA, 100 bp, Homo sapiens
gtcgtttttccttgagctgaacgtcttgcaacagtggccgcacgcataggtatatcaggattggagataaagaatgtgaatttaacaagaactttcgcct

SEQ ID NO: 500847 - DNA, 106 bp, Homo sapiens
tggtattatggtctgggtgatgatcatcatggtgattctggtgctgggctacggctcggacatcatcatgcagctggacgacgtggttagcagtactgtgactggg

SEQ ID NO: 500848 - DNA, 100 bp, Homo sapiens
acgatccattcagtagaaaccctctgttctgtggagctgaaaatacaagtctttgggaactcaaaaagcccctgcctgacttctcacgagtccctggtct

SEQ ID NO: 500849 - DNA, 78 bp, Homo sapiens
tccagatattaggtcacagcagaagcagccaaaatggatccccagtgggtttcgtgcacctgaagttgccagaggaaa

SEQ ID NO: 500850 - DNA, 104 bp, Homo sapiens
ccaagatggccgcccccgtggatctagagctgaagaaggtgcactttacaggtccccgatgaaccaagagaaccctccaccatatccaggccctggtccaacgg

SEQ ID NO: 500851 - DNA, 100 bp, Homo sapiens
aaatattcaggagaccgtcgttgccttgtatttccagagaacagagcagcccgacggccatggaggctgaagagacgatggaatgccttcaggagttccc

SEQ ID NO: 500852 - DNA, 110 bp, Homo sapiens
caactctgacctggccaattctgacgccctcaaggtcgccaaggaggtggacccccagggatggccaggccatgttatgggatctcaacgaaggcaaacacctttacacg

SEQ ID NO: 500853 - DNA, 98 bp, Homo sapiens
atggctaaacaggcaacagttgtcctcaattgcgtaggaccaaacccagtgacttgattgtaaaaatttacagagcggaatcatatgctggtctccaa

SEQ ID NO: 500854 - DNA, 98 bp, Homo sapiens
gctggtgccgcgttcctgctgctctgcctgctccacaagcggcgccgcgccctcggcctgcacggtatgtccgtggttcagaccctgtattaaagctt

SEQ ID NO: 500855 - DNA, 90 bp, Homo sapiens
gcgtgccatagcggaggagcgcggccgtcttagcctgcgccgcgaggtctgcggcctcggtgctggagaatctggtaaaagcaccattgt

SEQ ID NO: 500856 - DNA, 98 bp, Homo sapiens
tgacagctctgcggctcgggccctgaggttcttgagcacgtgcccctgctgctgtatatcttggcagcaaaaacattaattctctgcctgacatttgc

SEQ ID NO: 500857 - DNA, 50 bp, Homo sapiens
ctttgatgtactactataatgggaaagcgagtgatcagcagctggactgt

SEQ ID NO: 500858 - DNA, 96 bp, Homo sapiens
ctcgcctcccggccgagctgacgagtcaacctatttgatttcttgacaagaccacaatctgatcccaaagatgtgctccacaaatccaggcaaatg

SEQ ID NO: 500859 - DNA, 88 bp, Homo sapiens
catctgctgctgaccctcgtgaatgatatggaacctagcaaagctgttccactgaatgcatctaagcaagatggacctatgccaaaac

SEQ ID NO: 500860 - DNA, 82 bp, Homo sapiens
tccctgatgatcagactcagaaaattttggaaagagaagatgctcggctgatgctggttctagtgagccctacatcagagca

SEQ ID NO: 500861 - DNA, 100 bp, Homo sapiens
ctgaacatctttcagagttgtatcccttgtacctccttttaaacctcaagtaacatctgagacagatactagatattttgatgaagaatttacagctcag

SEQ ID NO: 500862 - DNA, 82 bp, Homo sapiens
ccagagacgtcctgtttgagctgtcagccccagcatgagaccagatgtaagctctcctccatccagctcctcaacagcaaca

SEQ ID NO: 500863 - DNA, 51 bp, Homo sapiens
ttttggaactgtcaggtacctcaaagctacaaaattggacagctgtacatg

SEQ ID NO: 500864 - DNA, 75 bp, Homo sapiens
acagtgccctgagggccttcgagagctaccgcgccagacaggtgccgccatgccgccattgccaagtacttcggg

SEQ ID NO: 500865 - DNA, 82 bp, Homo sapiens
gagaggagctgtggataacgggaggtgaatttccatgtcaacatagtcctggcaccatgactcctgtgaggatgcagcactc

SEQ ID NO: 500866 - DNA, 82 bp, Homo sapiens
tggaattctaatttgaaccatgtttggattgaagccgcctctgtattacttaccaggtgctttgcaagatatcaccttgtca

SEQ ID NO: 500867 - DNA, 98 bp, Homo sapiens
gggagcccgcgccacgcccgtcgctcgcgcgttccagtccaggctacagcagaccatgtcgcctgaagaatggacgtatctagtggttcttcttatct

SEQ ID NO: 500868 - DNA, 80 bp, Homo sapiens
ggcacagcccgatcccgccatggagcagccgaggaaggcggtggtagtgacggacaatgcagatcttcgtgaagactctg

SEQ ID NO: 500869 - DNA, 90 bp, Homo sapiens
gaaggtctctggagacatcttcagcaggacattgccgagaatggctgcgcccccaccccagaagagcagctgccaaagactgcaccgtcc

SEQ ID NO: 500870 - DNA, 111 bp, Homo sapiens
cgcggccaaacggtgcctgcggtgcctgagctgagtgaggccgaggccgggaggccgtgcccggaggaaggacattccccaagaagggccaaacgtgtgtggtgcactaca

SEQ ID NO: 500871 - DNA, 76 bp, Homo sapiens
aacaatttctcctgctctgcagcttctgttcagctgtgtgccaaccacgatgcaaacatggtgaatgtatcgggcc

SEQ ID NO: 500872 - DNA, 100 bp, Homo sapiens
catgtgacatggtttctccctatgttacgtggatgtttgtaacatacgatgaatggattaaagcagataaaatagtaagacctgctgataaaaatgtgcc

SEQ ID NO: 500873 - DNA, 71 bp, Homo sapiens
gcgatcaacacgctgaacggcttgaggctccagtcaaaaaccattaaggtgggcgggggcaggacggaagc

SEQ ID NO: 500874 - DNA, 100 bp, Homo sapiens
ctgtgtcccaaccggcctgagtcaagtatctgaaaactgaagagtggagaatatgttcagcagggaacaagaggattcttttagaaataagaggtagaag

SEQ ID NO: 500875 - DNA, 83 bp, Homo sapiens
cagaaaacaagcggctgctttaagaatgatggccagcttttcaaccacgcctgggagggatgagtatttccgcatgaagctgc

SEQ ID NO: 500876 - DNA, 83 bp, Homo sapiens
cgcggatcgaccggagcagagagctggcgagcaagagctccacgcaggagatcggtgaggagctgatcaacggagtcatctac

SEQ ID NO: 500877 - DNA, 75 bp, Homo sapiens
agcgaagccttgaaaaagctgccctgagacggtgtcccgccgaaaggttggagttgctgtgggtgagctgctgtg

SEQ ID NO: 500878 - DNA, 100 bp, Homo sapiens
accagaggccggggttggggtcggtgcagaccgagggctggtttccttgactgtgggagaaacgccgggagccggatcaccaggagactaaagtccatca

SEQ ID NO: 500879 - DNA, 100 bp, Homo sapiens
tcctggaggtgcgggaggagctcagaccagcgccaccgcctccgacagtgtcctcgctctacctctgacctctccggaggttccgctgcctccaagccgg

SEQ ID NO: 500880 - DNA, 90 bp, Homo sapiens
aaccattgctttacattcctccacctccttgtcagcccctaattaacacaacagagtctctcagatgggacgcctatgcctgacagctac

SEQ ID NO: 500881 - DNA, 90 bp, Homo sapiens
catggagccgctggggtcccttttgcctcagatactattttgaagtgtggcaaaggagcagagaactttgacaagttcttcacacgagga

SEQ ID NO: 500882 - DNA, 88 bp, Homo sapiens
tggagtgcgtgggggaccggctgttggcgggggctttgaccacgacctttgaagagcttcattttgagatcaagccccacgatgactg

SEQ ID NO: 500883 - DNA, 75 bp, Homo sapiens
cagaggccgttgcttttgaccagaatgctttggttaaacgaatcaaagagcatccacccaacccaccagtatcac

SEQ ID NO: 500884 - DNA, 100 bp, Homo sapiens
gggatttgccaagtcgatatgttgaaataggtataagtgtgctagcggagtgtctagattgtcctgaattgaaagcaactgcagatgactttattcatca

SEQ ID NO: 500885 - DNA, 76 bp, Homo sapiens
agaggcccatctcaatgttcaacaaatcgttgatcgacatactagagagctaaagctacagatgccagcatggtgg

SEQ ID NO: 500886 - DNA, 98 bp, Homo sapiens
tgggggctacaggtgcagctgcccccagggctacctccagcactaccagtggaaccagtgtgttgatataagcttaccaaagtcagcaacaatatgct

SEQ ID NO: 500887 - DNA, 75 bp, Homo sapiens
attacaagccagcctctgggaccgaggcccttccttctaccatgattatagtagcagtttattgtcctgtgatag

SEQ ID NO: 500888 - DNA, 100 bp, Homo sapiens
cggccgccaccaagatgagcagggcccttgcggagttccgcgtccgaggtgtgaagacctttccaaagtgaaactgatgagatttgatgatccactgttg

SEQ ID NO: 500889 - DNA, 75 bp, Homo sapiens
agccagagacctacgtggcagctgtgaaaaaagccatttccgaagtttaattcccgtaaaccaattacacctgag

SEQ ID NO: 500890 - DNA, 97 bp, Homo sapiens
ggcggcggttgcgggggggaagtgactgggcggtgccggcgccggagacgatgccgttccggaaatcactgtggaaaatcttcccagttatttcaga

SEQ ID NO: 500891 - DNA, 75 bp, Homo sapiens
ttaatggaaaatcgcttggttaaaacctgacacttttaacagcgagtgatagacagccaagcagagaaactgaag

SEQ ID NO: 500892 - DNA, 76 bp, Homo sapiens
ctcaacagtttgtggcaagacaagctcagaactgagaagctgtcaccacaggtgttgagatctgcatagccactcc

SEQ ID NO: 500893 - DNA, 90 bp, Homo sapiens
ccttataggatctctgcccacagtcagcagcacaacagaggcggtgccggtggtggtgtgcacattgagccccggtatagacagttcccc

SEQ ID NO: 500894 - DNA, 90 bp, Homo sapiens
ggaaggtcattgtcatcgtggggcatgtggcaaaacacacagctgagcaacacagatgtacacacggtggcatcacttcttaagctgtac

SEQ ID NO: 500895 - DNA, 108 bp, Homo sapiens
ctgcgggagagccgggtaccggccgtggaagcggccaccgactactgtcagcagctgtgccaggtgtcgtgaaaactacccctaaaagccaaaatgggaaaggaaaag

SEQ ID NO: 500896 - DNA, 74 bp, Homo sapiens
acaccggctgacctctactgctcgtggaagggtggcggagcgagggctactgcacagctagcagagtcgtggcg

SEQ ID NO: 500897 - DNA, 75 bp, Homo sapiens
gaggtctccaacaagcttccaaaatggcctgagtgtgaacatggctacgcctcttcattcccgtccatgccgagc

SEQ ID NO: 500898 - DNA, 100 bp, Homo sapiens
caagcctcccctgccaccggccaggacacagggcacaccaggcgggggccggccccagcccagactggaagatgagattgacttcctggcccaggagctt

SEQ ID NO: 500899 - DNA, 88 bp, Homo sapiens
gttactcggggtgcgccagtggaagcgggaggcagttgcagctttcaggatagtaatgatgacactgaagatgtttcactgtttgatg

SEQ ID NO: 500900 - DNA, 99 bp, Homo sapiens
gcagagttttgcacaaaatctgttcccatgcaaaccaatgagggagaagtatcggaagaaagcagttccaaggtccgatgtggcctccgtgaactggag

SEQ ID NO: 500901 - DNA, 118 bp, Homo sapiens
gctgctcatcatgctcaagtcagagggcttttactcctacctgtgtaccgagccaggtgtgatgaatgcagactctgctaccattttggctgtttggatcctcctttgaaaaagtctc

SEQ ID NO: 500902 - DNA, 100 bp, Homo sapiens
gattagcttcgcagtctggaaagctttaggagttcacagtagcaaagactcaggtggactgaaggccgctatgatcgaattggtggaaaggttgaagttc

SEQ ID NO: 500903 - DNA, 75 bp, Homo sapiens
ctccgcgcccgccgcgccgggagcagcaccgcggggccagatggactagaggcttttaccagatttcttaaaact

SEQ ID NO: 500904 - DNA, 74 bp, Homo sapiens
ttctcctaatgttttccttcagcaaggacaaaggtaatagcctgcagctggtgttttgagaagccctactgctg

SEQ ID NO: 500905 - DNA, 74 bp, Homo sapiens
ttcgcggagctggaatgactggcaacccaggggcaagattcttgccaagagaattaatgtgcgtattgagcaca

SEQ ID NO: 500906 - DNA, 88 bp, Homo sapiens
cggttttcttatgcttataagagtggaacaggtgagtacactggtgaaacaatgcccaatcgcacggccaagagatttgaggagcagg

SEQ ID NO: 500907 - DNA, 98 bp, Homo sapiens
catggaccaggccctcaagtccctgatggcctcagaggaggagcagcgtccctcagagcgggttgcgcagggaggagcccgaccttcagcctcaactg

SEQ ID NO: 500908 - DNA, 100 bp, Homo sapiens
gcgttccaggcggtgggggagatgggcatctaccagatgtacttgtgcttcctgctggccgtgctgctgcagcattcctgtttcccattgcttattgcat

SEQ ID NO: 500909 - DNA, 98 bp, Homo sapiens
gcacctctccgcgcacatcactcccgagtggaggaagcaatacatccagtatgagagatccgtgctcagctcacagagcagatgaaatgcctggacca

SEQ ID NO: 500910 - DNA, 90 bp, Homo sapiens
ggcctcgcacattcagttggacagactctggccatctatgaccggtttggccggttgatgtatggacaggaagatgtacccaaggatgtc

SEQ ID NO: 500911 - DNA, 87 bp, Homo sapiens
gaagctaatcctggcgttccaccagcaaccatgagtggttccatgatgggaagtgacatggtgaatgaaaactttgccattgatttg

SEQ ID NO: 500912 - DNA, 97 bp, Homo sapiens
tcagcgctgggaggggggtgacagcaacagcgacgactatgacctcgagtctgacatggtcaagtctggcaccatctttgacaacttcctcatcacc

SEQ ID NO: 500913 - DNA, 76 bp, Homo sapiens
tatgaaaaaagccatcacctatattagaaggagtatgagcctggagaaagttcttgtggaattcagtcacaaggag

SEQ ID NO: 500914 - DNA, 90 bp, Homo sapiens
gcagacaacgccagttatccaggctctgcgaaggacccgcatccgcgccgtcatggtgacagaacgctgccaagaagagagaccaggagc

SEQ ID NO: 500915 - DNA, 50 bp, Homo sapiens
cgaccgtccgccagtcgtcccgagaaaactttagaaactgttcctttgga

SEQ ID NO: 500916 - DNA, 96 bp, Homo sapiens
gccagcgagccgccgacccgccgagcaaaatgtcaattacagttaaagactcttcatgaagatttgtcaggtagattagaggaatccttatcaatc

SEQ ID NO: 500917 - DNA, 100 bp, Homo sapiens
ccggagcttgagatacgccgctctgaatcttgccgccctgcactgccgcttcggtcactagttggatggcaagcatgtggtgtttggcaaagtgaaagaa

SEQ ID NO: 500918 - DNA, 50 bp, Homo sapiens
cttcgctctttgcatcttaactgcaggagggtttgcatttgtgtatgaag

SEQ ID NO: 500919 - DNA, 90 bp, Homo sapiens
gcttgattctgatgaagatgatgatgaattgggtagagagaccaaagatcttgatgaggtggtgaagaaggtgaagtccatgcagatgtt

SEQ ID NO: 500920 - DNA, 100 bp, Homo sapiens
cgaccccagagcggcgctggacaggtgtcccgacccaggctaagcttgagcatggctgagcaggagcccacagccgagcagctggcccagattgcagcgg

SEQ ID NO: 500921 - DNA, 100 bp, Homo sapiens
cccgaatgaggaccagggagggaaatatgtcatgtatcccatagctgtgagtggcgatcacgagaacaataagcaaaacccttgaagatcgtttgaaaat

SEQ ID NO: 500922 - DNA, 86 bp, Homo sapiens
cccctcctcgtcgggaagaatcgtttggtctcctgccgtgcccgtgtttgaaagatgtatggtgatcttgaaacctccagacacaa

SEQ ID NO: 500923 - DNA, 83 bp, Homo sapiens
ggccaagaagctcctggcaaaactgcgctttctggctgaggagactgcctcttcaaggtgtgccccatgaaccgctactcggc

SEQ ID NO: 500924 - DNA, 82 bp, Homo sapiens
accgccggggccgctgccgttgaggaggagacggaggagaccgacgttgttagaacatccagtcatggataaaaatgagctg

SEQ ID NO: 500925 - DNA, 76 bp, Homo sapiens
ggagaaaccaggcagtggcaaacagaattctaccttgtcaaagattcctgctttacagggtagcacaaagtcccca

SEQ ID NO: 500926 - DNA, 90 bp, Homo sapiens
ggggcgaggttcgggctggttgttccgttgcgagctgcagctgcgatctctgtggtaggcccaggacaccagcagtgaaaacactgtggt

SEQ ID NO: 500927 - DNA, 90 bp, Homo sapiens
cggaactgcggagttgctgggtccaccgacccttaccctcagcgagagaagtaaccgtacatcgaagtcttttgacctccatacagtgat

SEQ ID NO: 500928 - DNA, 82 bp, Homo sapiens
aagcggctcaatgaccatggcaagaactggcgtcacgtttacaaggtggcagccaagagcctcctggcacagcggcaccagg

SEQ ID NO: 500929 - DNA, 82 bp, Homo sapiens
gggacggcgaggccctcatgtaccacacggaggaagttaagtcttcagagcctactgaggatgtggagcccaaagaggctga

SEQ ID NO: 500930 - DNA, 100 bp, Homo sapiens
tgttatatcctccaggaatactggccaggcaactttggctttggggattcacgtggtggcggtggaaatttcggaccaggaccaggaagtaactttagag

SEQ ID NO: 500931 - DNA, 120 bp, Homo sapiens
gaagccctgagggcagctgttcccactggctctgctgaccttgtgccttggtgctggagatcagaatttatttacctctgtttatccaacgctctctcagcagcttccaagagaaccaat

SEQ ID NO: 500932 - DNA, 90 bp, Homo sapiens
cccccgcaggcgcccgcggcagcgaacgttggaagatgctggctcaagtagtttagataatctactaagtagatacatctcaggcagtca

SEQ ID NO: 500933 - DNA, 82 bp, Homo sapiens
taacagcagcgccgtcccgtccgacagccaggcccgggagaagtgggaggaggagctcgccaagcgcatgaaccttcagacc

SEQ ID NO: 500934 - DNA, 90 bp, Homo sapiens
gtccccgcagttttcaatcatgaggcggggtttcaccatgttgcccagactggtcttgaactcctgagcttaagcaatccacctgcctcg

SEQ ID NO: 500935 - DNA, 73 bp, Homo sapiens
aagtgtgtctctagcccccatttccaggtgcagctcagtggaagatgatgacaaccagaagacatgagctaag

SEQ ID NO: 500936 - DNA, 51 bp, Homo sapiens
gattttaattatgacctttgtgactctatcgcgttccttcacctcgggcag

SEQ ID NO: 500937 - DNA, 97 bp, Homo sapiens
aaacacatctttacacactaagtctgctgagaacagacccagtccctgaggaaggagaagatgttgctgccacgatcagtgccacagagaccctctc

SEQ ID NO: 500938 - DNA, 75 bp, Homo sapiens
tccagcttctgctgtccttctttgtggagagcaagatttctctatgaatcatcatcaagaactctgggagaactt

SEQ ID NO: 500939 - DNA, 51 bp, Homo sapiens
ccgcggagcgccagctcaatgaagtcttctttgtgatccgcctcattgctg

SEQ ID NO: 500940 - DNA, 50 bp, Homo sapiens
gtgcctccgacgcctcctgatggtccacaagagcttgcagaggatccggg

SEQ ID NO: 500941 - DNA, 50 bp, Homo sapiens
tgtggatcttcgctttggtgccataaagatatcagttttagagaatgtgg

SEQ ID NO: 500942 - DNA, 100 bp, Homo sapiens
tgctgcagcttatgaccatcaatatgtttgcagtacacaactcccagctgaaagaatacagattctgttcatcttgctctgaaattaaataattctgaac

SEQ ID NO: 500943 - DNA, 75 bp, Homo sapiens
ggccgcgcgcctctaaggccccggcgttcatgaatgacgtgggcggcgaaaagctgctgcagaagaagtggacca

SEQ ID NO: 500944 - DNA, 90 bp, Homo sapiens
gggggttgttttgatgaaagtgaaaggttatcagtgagctgaatggaaaaaacattgaagacgtcattgcccagggtgagttgatgtgga

SEQ ID NO: 500945 - DNA, 101 bp, Homo sapiens
agccagactgcctgggtttgaattgtgcggtttcaggaatgaatctgaagtctgctgcagtaaaacacagaaggctttaaaatgttttcttgcataaaatt

SEQ ID NO: 500946 - DNA, 82 bp, Homo sapiens
ctaagactccaggacacccctgaagccgagaaatgccgaggtgctcggtggagtcatggcagtgccctttgtggaagactgg

SEQ ID NO: 500947 - DNA, 82 bp, Homo sapiens
cggcaagcagtccaaactgcaggatccccgccaatatcgtcaggatctgccactgtgaaggagatgatgagagccccctgat

SEQ ID NO: 500948 - DNA, 100 bp, Homo sapiens
ggcggtggtgatctctggtgcaggaaaaatgttcactgcaggtgtcatggagaaactccagctgggcccagagattctgcagcgggaaaatccaaggctt

SEQ ID NO: 500949 - DNA, 100 bp, Homo sapiens
tgcggttggggcgggaagagccggggccgtggctgacatggagcaggtggagccgccaccaaaatgcagattttcgtgaaaacccttacggggaagacca

SEQ ID NO: 500950 - DNA, 100 bp, Homo sapiens
taataaatgtaggcttgatctcagtttcaaatctccccaagctgcctaaattgaaaaagaattgcggcgagcagtaagaagcagcgtgtggaaaagggag

SEQ ID NO: 500951 - DNA, 100 bp, Homo sapiens
agataccgcgcttggcgagaaggtgtgcatggatctgccaaattttatatttcagatttgtggaaggatgcctccattgcacacagattccacatcatga

SEQ ID NO: 500952 - DNA, 51 bp, Homo sapiens
gccagctccagagccacgtacggctcccaatcgtcaactcatgacttactg

SEQ ID NO: 500953 - DNA, 50 bp, Homo sapiens
aaacttctgttccacctcctcctgcagccctgctgagccacatggccggc

SEQ ID NO: 500954 - DNA, 105 bp, Homo sapiens
caccccccaagcggatactggtcttctcgtcggattgcccatgcacttgttgcagaaacagccaagacctggccgagtgcaagctggtctcctttcccattggca

SEQ ID NO: 500955 - DNA, 101 bp, Homo sapiens
tctgcaaccgcaacatcgaccagaccatgctctccatcctgctcttcttccacaggtactccaaagattcaggtttactcacgtcatccagcagagaatgg

SEQ ID NO: 500956 - DNA, 98 bp, Homo sapiens
tgcgccagcaagcggggccggtggcgcccgtgtcggagaccccgcgccggaccctgaggcagcgagtgtatccagggcagcagtatctgcaaggaggc

SEQ ID NO: 500957 - DNA, 50 bp, Homo sapiens
tcccgcatggcccctccggccagattgcagagggaatggcatacatcgag

SEQ ID NO: 500958 - DNA, 110 bp, Homo sapiens
ggagatgctgttcatctatggccactacaaacaagcaactgtgggcgacataaatacagaacgtaggcgttcccggtccacatcccgggagagagaacgcaggcgccgag

SEQ ID NO: 500959 - DNA, 75 bp, Homo sapiens
cctaatcacagctgcacaggcaggctttgaattgtattccatggtgccatctatttgtcctctagaaactcttca

SEQ ID NO: 500960 - DNA, 123 bp, Homo sapiens
tcttatttagttctggggagcgcctcgtcgacatgagtgatgtggaggaaaacaacttcgagggcagagccgactgaaccaagctaactcctccggaagagagtccaaggtgcctggtgcccg

SEQ ID NO: 500961 - DNA, 89 bp, Homo sapiens
acgagtcctagatgtcaataaccagtccttcagagaacaagagatttgttagcatcagtgacctcctggtaccaaaagacttgggaaca

SEQ ID NO: 500962 - DNA, 97 bp, Homo sapiens
agttggaagcagccgatccagcctgcggagcctgtggggcagaaacattgctgaggctcttgtcagcaaaggtctagccacagtgatcagataccgg

SEQ ID NO: 500963 - DNA, 75 bp, Homo sapiens
caggacctgtcggtgatgactatgaccacctaagaaaggaggaacagaaaagtactaacattgaagatcttcatg

SEQ ID NO: 500964 - DNA, 108 bp, Homo sapiens
agcagcctccgccaccccctccgcccagcagcagtatggcttccagtacccccttgccatggcagcaaactttcactttcagaagaacagaatgaagtaatgaaaaat

SEQ ID NO: 500965 - DNA, 97 bp, Homo sapiens
taaaccatgttaaggaggattttacagagggtacatgtcccagagcaagcacacggaggcccgggagctcatgtactcgggagccctgctcttcttc

SEQ ID NO: 500966 - DNA, 71 bp, Homo sapiens
caactcttccaggaccaccaaaaataactttggctggtttgcattgagactccttgcattccgccagatac

SEQ ID NO: 500967 - DNA, 95 bp, Homo sapiens
aaagagaaagatagatgccctctctcttcatcttcacttgaaataccggatgattttggaggctcgactgaccaaagaacatcgctggggaagcg

SEQ ID NO: 500968 - DNA, 83 bp, Homo sapiens
tctgcggctctcggtgccctctccttttcgtttccggaaacatggttatgccaaggacgccctgaatctggcacagatgcagg

SEQ ID NO: 500969 - DNA, 80 bp, Homo sapiens
caggcagagtgctgatgtgaaaaataccacgacaaaaccaccctagtaagaaccttgatgctgtccatgatatcactgtg

SEQ ID NO: 500970 - DNA, 90 bp, Homo sapiens
gacccacccatgatctggagatgatgccgcctgatgatccacggatgagcactattcctgatcagagaactccagttgcttcaacacaca

SEQ ID NO: 500971 - DNA, 98 bp, Homo sapiens
gtcaatatttctgatggagtgaaggatgaattctgtaggtggtgcatccaaaacagaacttcagcgagagggaagcatcgagactctgagtaacagct

SEQ ID NO: 500972 - DNA, 99 bp, Homo sapiens
agagaggatttgcttttgtaacttttgatgatcatgatacagttgataaaattgttggcctgtctcctccctcctacacatttccagctcctgctgcag

SEQ ID NO: 500973 - DNA, 75 bp, Homo sapiens
catcgacccctcatcctcaagactggcagcaagttcaccgtccgaacaaggccacactggtgtgtctcataagtg

SEQ ID NO: 500974 - DNA, 93 bp, Homo sapiens
ccaagaaggaagtcatcatgggccggcctggaacagtgctgctcacggccgtgaactgctacagcgtgaaggccgccacccgggtccaggatg

SEQ ID NO: 500975 - DNA, 75 bp, Homo sapiens
attagcacaagagcaccatactttgagggttacacggtgtgggcacacaacctcattgccattgctcgtcttcgg

SEQ ID NO: 500976 - DNA, 80 bp, Homo sapiens
cttttcttttccatgatatcattatatggacagtttaggccgagcctcttgaagccattcttacagatgatgaaccagac

SEQ ID NO: 500977 - DNA, 90 bp, Homo sapiens
ggtgacaccagcctataggctctccaggaaacaagggcatgaatatgtcatattatacagtctctcagcaaacctgctgggcgacagcgg

SEQ ID NO: 500978 - DNA, 100 bp, Homo sapiens
ctggacaaggaggcccacaggatccttgaaggcttccaggccttggacaagattcgctatgagagcctgacagacccttcgaagttggacagtggtaaag

SEQ ID NO: 500979 - DNA, 82 bp, Homo sapiens
agcagcgtgcgttcagccctggggtcccgcaggctcccgatggcgagattacggcgccctggccatcatcatggcaggcatt

SEQ ID NO: 500980 - DNA, 74 bp, Homo sapiens
tgctgggccctgaggctgcaccaagtggcgaaggagccggctccaaggtcaccatcagaaaagctaagtttgct

SEQ ID NO: 500981 - DNA, 100 bp, Homo sapiens
ttggtgctgtttgaaacgtctgtgggttacgccatctttaagccagaaagactccaggggactcattactctgtgcagtcagacatctggagcatgggac

SEQ ID NO: 500982 - DNA, 100 bp, Homo sapiens
atctgaaggagcacctgctgcacggcaacatgaccagcagtgacatcctcctgtgctacaccacggtactccaaagattcaggtttactcacgtcatcca

SEQ ID NO: 500983 - DNA, 74 bp, Homo sapiens
tggcggagcaccgccttccggcagaagctggtcagtcaaatggagcttctgataattggaggtgttgcagcccg

SEQ ID NO: 500984 - DNA, 100 bp, Homo sapiens
aggagatccgatgctacgtgcgggacaaggaagtcaactcccaggtctacagccggctcacagcacgagtattgtccttgtgaacttccttgaagatggc

SEQ ID NO: 500985 - DNA, 101 bp, Homo sapiens
tcatacaccagtactaccaaggacagcttttttcctgcaagatgaaaggttgtatcaaagttcttaaggaccaacctcctaatagtgtggaaggtcttcta

SEQ ID NO: 500986 - DNA, 100 bp, Homo sapiens
atcgactacaaacggaacttgccgcgtcgaggactgtcgggtgaccctggcagcaaccccaacaaacgccagaggcagccccctctcctgggagatcacc

SEQ ID NO: 500987 - DNA, 74 bp, Homo sapiens
agagaaacatgagaagcagcagtggtcatgatgtttggcagcaccgccatcgccctggagctgctgaagcaagg

SEQ ID NO: 500988 - DNA, 100 bp, Homo sapiens
gatttctttgctcagcaaacacgatttggaaagaagaaatataatcttcatcctggtgtaaccatacacgtcgtgacttggaacgtggcttcggcagcgc

SEQ ID NO: 500989 - DNA, 80 bp, Homo sapiens
aagaggaccagactttgttaatgaagtggtttatcagatactatcattttggatataatatcaaactatctggtgcttcc

SEQ ID NO: 500990 - DNA, 98 bp, Homo sapiens
gctggagcggacggactgagtcagagggggcgccagcgctgcaggagctgacatggatgtgtgccttacaaactatggtcactgtaactacgtgtccg

SEQ ID NO: 500991 - DNA, 75 bp, Homo sapiens
attgagcctcaaaatgaagatggcacatggcccaggcagaccttgcagtcaaagaggcggctttccggaaagtag

SEQ ID NO: 500992 - DNA, 83 bp, Homo sapiens
ctagcctatctggaaaggagagaacgagaggcactgggtgcaagttcctgtgaaatatgccacgaggtgttcaaatcaaaaaa

SEQ ID NO: 500993 - DNA, 100 bp, Homo sapiens
gcccatggaatcggtcctggaggacagccagaagatcagctgccatgttacttgactcacaccaaccctagagtggatgagattgtccttaagaaccttc

SEQ ID NO: 500994 - DNA, 100 bp, Homo sapiens
catgggtcttttcaaatcaagccggtatgacccaagcatttctttttctggaatgtcattatcagacacaatgataaagtggagaattttcatgaagaac

SEQ ID NO: 500995 - DNA, 98 bp, Homo sapiens
agcgacggcgccatgagtctgacttccagttccagcgtacgaggtatactgcaacatccagatggcacagttttgaaacagttacaaccacctccaag

SEQ ID NO: 500996 - DNA, 73 bp, Homo sapiens
ggtgctggctgccgcgcggccgagtggcccagaaggtagtggccttgcgaaagaagcagcaactggccatcgg

SEQ ID NO: 500997 - DNA, 100 bp, Homo sapiens
aggggagccaggcggccgcctcagctgtcaataccagcaaatatgcagaaagctatcggatccaaacctatgctgaatatatggggagaaaacaggaaga

SEQ ID NO: 500998 - DNA, 88 bp, Homo sapiens
cactgttgagaaagtggaagttcatcgtctgattaggagaagcaacagtttcagcgccatctgacccgcccaccaccccagtaccaag

SEQ ID NO: 500999 - DNA, 75 bp, Homo sapiens
tcatctactgcacacttgagtccatgagattttagagtggtcaaaatgcagatcttcgtgaaaacccttaccggc

SEQ ID NO: 501000 - DNA, 83 bp, Homo sapiens
gccgcccgcgggccagcgcaccggtcccccagcggcagccgagcccgcccgcgcgccggtttttctatatgagtggagaagac

SEQ ID NO: 501001 - DNA, 101 bp, Homo sapiens
gtttaatttttctaaagagtcttgttatttcttctttgagaaaaacctgaaagatgtctcagtggatcttcttgttccaaccaaagtgactggcatcatta

SEQ ID NO: 501002 - DNA, 100 bp, Homo sapiens
cccggccgcacggggcactgagccgggtgctgagcaccggaggccccgccgaggccgggactcaggccttctgacagtggcccgcccgctgagcgctccc

SEQ ID NO: 501003 - DNA, 119 bp, Homo sapiens
cccagagctttcacgaaggcaccgacgtcatcatgctgaccaccaatcagatccgtaagctgtgagccgtgagctttgaggcggtgggatgtgtcagcagaatgtctcctgcccccgag

SEQ ID NO: 501004 - DNA, 115 bp, Homo sapiens
ctgctcctcatgattttaatactggtgaacttggccatgaccatctggattctcaaagtcatgaacttcacaattgcagagattgtcaagaggctgaatgctatctgtgcacaag

SEQ ID NO: 501005 - DNA, 100 bp, Homo sapiens
caagctgcgaaacttggcaatgcgaaggcccagagcatcctaagaacagaagatggctgtgccacccacgtatgccgatcttggcaaatctgccagggat

SEQ ID NO: 501006 - DNA, 97 bp, Homo sapiens
cggggctggctgctctgtgtctcttccaaggtaatgtaatccagggaagtggaaaagaagaaatctgcaaagataaatcccagctaaacacaaccca

SEQ ID NO: 501007 - DNA, 84 bp, Homo sapiens
ggtttcagcagccaaagccccaagtgccgcagacttgtctgagattagctggggtggaaaggagaatggctttggacttgcaga

SEQ ID NO: 501008 - DNA, 100 bp, Homo sapiens
gtggtcagagcgagtctcggagaagatgtggtggcttccgtttgttggtggaggaggtggcaggcctcggcggtgctgacgtacagaaaggcaaatattg

SEQ ID NO: 501009 - DNA, 82 bp, Homo sapiens
ctgctgctcttcctgctcgtgctcactgtcaccgagccgctgcggccaggtagctacagcaagctgggtagcaggcagatcc

SEQ ID NO: 501010 - DNA, 100 bp, Homo sapiens
gcttgtccagccggaagccctgagggcagctgttcccactggctctgctgaccttgtgccttgaccacagcaccgggaagtccagtcagcggcagatggt

SEQ ID NO: 501011 - DNA, 100 bp, Homo sapiens
cacaccacgtcctctgtcctgatacagtggcagggtttgtcgctggtgctttcggagggcagcctgcgggacggggaggagaaggagccccccatggagg

SEQ ID NO: 501012 - DNA, 100 bp, Homo sapiens
ggccaagggcgctccccaggaagtggcagtcagtcaagtggatggcatgaagtggagccagggtctcaatccattgcgcccaggctggtatgcagtcatg

SEQ ID NO: 501013 - DNA, 83 bp, Homo sapiens
ctcggcctcgcggcgacggcggcggtggcggcttggacgactcggagagccggactctgctgggccgctcagccatgcctgag

SEQ ID NO: 501014 - DNA, 95 bp, Homo sapiens
agtgcagctgcctgacaacaccgatcacagaccaacaaattttaccaaatgttgcaagaactctggagttcttatggtagtaaaatgccggaaag

SEQ ID NO: 501015 - DNA, 75 bp, Homo sapiens
gctgctacaaggccatgtccggacccacactggaggaggcctcggtggtaccagaagaggaggggctgatgtgaa

SEQ ID NO: 501016 - DNA, 75 bp, Homo sapiens
aaaccgcaaggatgaagaaataagtaatcttcaccaaagaaataggaaggttgttgattactcacagtttcagga

SEQ ID NO: 501017 - DNA, 100 bp, Homo sapiens
aaacaaaactcgctgattttaaaagatctggaacatcgaaaggaccaagtaacacagctttcacaagaggagctgactaaggctttggaacagaaaccag

SEQ ID NO: 501018 - DNA, 87 bp, Homo sapiens
tcataagaaagatgctggaatgtttcaggctcaagagctcaaagcatgcctgtttttaaggaagtaaaggtacatctgttagaagat

SEQ ID NO: 501019 - DNA, 82 bp, Homo sapiens
cggagaggcggcggccgcggcctccgcaagccggtgagaagccctaccactgcaactgggacggctgcggctggaagtttgc

SEQ ID NO: 501020 - DNA, 101 bp, Homo sapiens
tgtctcttgattggacgtcaggatctttccaagcaggcctgcgaaggaaacttacccaaagggaagtctgtggttgtgtcaaaccgattggtgacatctcc

SEQ ID NO: 501021 - DNA, 75 bp, Homo sapiens
gcggctagccggaggaagctttggagccgggtggtctgacccaggacctgaaagctgccgccaggtgctttttga

SEQ ID NO: 501022 - DNA, 85 bp, Homo sapiens
aagttgttctaacgctgcctttgctttaaaacagtattacttgcgatgttcttggcagctctgtcactcagctttattgctaaga

SEQ ID NO: 501023 - DNA, 88 bp, Homo sapiens
tgatacctatgccagcaccatagggcactatgttgaacaaatcctggcagaatttaaagtcagagctctggaatgtcacccagacaag

SEQ ID NO: 501024 - DNA, 90 bp, Homo sapiens
ctgggagtgctggcttccgcccacatcctccagttcagtggcctgtttcaaagtgttatagttttgccgctggactcttccctcccttcc

SEQ ID NO: 501025 - DNA, 75 bp, Homo sapiens
gaggaacgctcactgtcagcgcctggaaacttgctcacagccctgaggatgatgacaggaaggtccgaaggagag

SEQ ID NO: 501026 - DNA, 100 bp, Homo sapiens
cgaacttagacttccggaaggactttggcgagggctgaagggtatgtgattggcagctgtattaaacacattccaatcgcaggacgagatataacatatt

SEQ ID NO: 501027 - DNA, 100 bp, Homo sapiens
ctgttggatcgggttctaaaggaaaggtacttcctcctccagctggttatgttcctattcgaactccagctcgaaagctgacagctactccaacaccttt

SEQ ID NO: 501028 - DNA, 100 bp, Homo sapiens
tcaacatcgtcttcacctccctcttctctctggaatgtgtgctgaaagtcatggcttttgggattctgggagaggcgcacctccttctccacgagcgacg

SEQ ID NO: 501029 - DNA, 100 bp, Homo sapiens
agaaaagaatacattcctgattacctgccacccattgtgtcttctcaagaagacctgcctagagctggaacgttacctccagagcgagccctgctatgtt

SEQ ID NO: 501030 - DNA, 83 bp, Homo sapiens
aagcccaaagacagtgaagaactcgagtttgctggcctagacctgaactcttcagataatcagagtggaggaagtacagccag

SEQ ID NO: 501031 - DNA, 75 bp, Homo sapiens
agctcctacgtttggaacgtggaggtctcacagatttcaagcctggctactggattggtgtccgctatgatgagc

SEQ ID NO: 501032 - DNA, 89 bp, Homo sapiens
ctttttggacgatgtgcggcggatgaacaagcggcaggaatcccgttctgcttccagaagtggaagtgctcacggatcggggaaatctg

SEQ ID NO: 501033 - DNA, 107 bp, Homo sapiens
gcaagactatgaatctctgttccaaatgctttgctggtcctggcagtcagtaacttttgaaaggcagcctgcctccttcatccgtatcgttgggacacacaacacag

SEQ ID NO: 501034 - DNA, 75 bp, Homo sapiens
aacctcttcgccaaagccttaatttatctgaaagggcatcttctctgcattcagtttcatccaagtcattccggg

SEQ ID NO: 501035 - DNA, 91 bp, Homo sapiens
cagtccatttggggaaatccttcggatggtgaactcattagaagtcttgcaagagcaaaatccgtccctagccacacatactccaacgaag

SEQ ID NO: 501036 - DNA, 74 bp, Homo sapiens
ttggcaagatttgatgctcttgtgctcagtgacatcattcaggtcgcagaacttgaaaagcgcctgacagagct

SEQ ID NO: 501037 - DNA, 51 bp, Homo sapiens
tatgcagtcatgtatcctgtgtttaatgagaaaactggtggtcagtacttg

SEQ ID NO: 501038 - DNA, 101 bp, Homo sapiens
cctccccccacccgggctcggcgggggagcgactcatggagctgccgtaagggaaatcctcattgacgattcaatttgttgaaggccaatttgtggactcc

SEQ ID NO: 501039 - DNA, 90 bp, Homo sapiens
gagctcatctggaattttgccgatttcatgactaaccagtccagaagatcagctgccatgttacttgactcacaccaaccctagagtgga

SEQ ID NO: 501040 - DNA, 90 bp, Homo sapiens
atcgggagacagccgggcgctgcaagagatccgcacgcagctggtggagcagttcaaatgtctggagcagcaatcagagtcgcgactgca

SEQ ID NO: 501041 - DNA, 100 bp, Homo sapiens
gacaagtggttctccctggaattcttccctcctcgaactgctgagggagctgtcaatctcatctcaaggttcgagaaatggctgctactaccttaagcgg

SEQ ID NO: 501042 - DNA, 100 bp, Homo sapiens
tggtccctcagtcacacatgccagagattgctcaggaagcaatggagatctcccttgagtttagaaatctggctgagaaataccaaacagtgattgccga

SEQ ID NO: 501043 - DNA, 100 bp, Homo sapiens
catgtatcccatagctgtgagtggcgatcacgagaacaataaggttattaatgctgcactggctttagcagcaaaaccacagagtaaactggcccaagag

SEQ ID NO: 501044 - DNA, 76 bp, Homo sapiens
cggagaccaagtcccagcagaaccgcgtgacgctgctgcaccacgtgctggagtaatgggggcctagcagacatct

SEQ ID NO: 501045 - DNA, 88 bp, Homo sapiens
tgaagatcctggtgtcgccatgggccgccgccccgcccgttggtgctggcatcggccccaccattcagattggggaggagacggtgat

SEQ ID NO: 501046 - DNA, 100 bp, Homo sapiens
tacccgccaagctgtcatcacaaaagagttgattgaaattatctctggtgctgcagctctaataagaaagccttgagttttgtgaaaaaccggagaagag

SEQ ID NO: 501047 - DNA, 100 bp, Homo sapiens
gagctttgaatgaagcttgtgaatctgtaatccagacagcctgcaaacatataagatctggagacccaatatatgtgttgagacggattctccgccgagc

SEQ ID NO: 501048 - DNA, 100 bp, Homo sapiens
actaagccaagggattcaggtgtggtgccggtgggaactgaggaagcgcccaaggtgcaaacagctgcacagcaagtggcagaggataaatttgtttttg

SEQ ID NO: 501049 - DNA, 87 bp, Homo sapiens
tggactgacttttcttatgctgggatgtgccttagaggattatgggatgcctttgtggaactgtacggccccagcatgcggcctctg

SEQ ID NO: 501050 - DNA, 98 bp, Homo sapiens
gtgtggctacaagtttacccgacaggcccatggacagaccttcacgttcccagatctgtttcccgagaaagacgagagccctgaaggcagcgctgccg

SEQ ID NO: 501051 - DNA, 75 bp, Homo sapiens
cagagaattgccttcaaccgggaacagagaatgtttaagtgctacaaggtgagctgcctggaaatccctgggccc

SEQ ID NO: 501052 - DNA, 88 bp, Homo sapiens
gcttgccgggcagctggtgagtcggtgacctggcctgtgagagaatgccacgggtgacctggccaccagcaggaatgcagcggattcc

SEQ ID NO: 501053 - DNA, 100 bp, Homo sapiens
aggcaattgatcccaagttgtcgacgaccgacagggtggtgaaagttggtaggaggacagtttgatctggaaatgaatttcattatccaagaaggtgaga

SEQ ID NO: 501054 - DNA, 100 bp, Homo sapiens
gcagtgcgtccagaatttcaacaagcagctggactcacaccacccggcaagaactgctcactacggctccctgccccagaagtcacacggccggacccaa

SEQ ID NO: 501055 - DNA, 97 bp, Homo sapiens
ctcagccatgatttagtccaagaagctattgaccatgcacaggaccttcaacaagaagctaatgaattgagcagctacccagaatggaatcctgaca

SEQ ID NO: 501056 - DNA, 75 bp, Homo sapiens
gtctcggaacccgtggtcctccgcttcatagattaaaagctgctttgacccagcaacatcctccagttaccaatg

SEQ ID NO: 501057 - DNA, 75 bp, Homo sapiens
gatgaatttgcttttctggaagatcttcccagacccgtcagattttgaccgctgctgcaaactgaaggaccgtct

SEQ ID NO: 501058 - DNA, 50 bp, Homo sapiens
gcctgaaatgccagaggacatggagcagagtgcttcatgttggcggaacc

SEQ ID NO: 501059 - DNA, 83 bp, Homo sapiens
cctcctgagtggctgggactacagatgggaacagcgagagctgcccaacggacgtgtctattatgttgaccacaataccaaga

SEQ ID NO: 501060 - DNA, 100 bp, Homo sapiens
gtcgcgctgtaagaagcaacaacctctcctcttcgtctccgccatcagctcggcagtcgcgaagcagcaaccatgtggactaaagaggatggacatagaa

SEQ ID NO: 501061 - DNA, 74 bp, Homo sapiens
cctgagtatgtcgaaaatctctgcccctggaggagaaatagaagtgttgttacagatcttataacagtcggttt

SEQ ID NO: 501062 - DNA, 99 bp, Homo sapiens
gcagaaatacagtcctctatcggcagagtatgatggatacagtagtgaagcatcaatagatgaagatgcctgtgaggagccaccaacatttgaagctat

SEQ ID NO: 501063 - DNA, 109 bp, Homo sapiens
caagtgtgctacagtgcttggctactggaaactggaattctgttcctccagaatgccaaggtacaggtttgcagattccgccagcagcacagcaagctctacagatgag

SEQ ID NO: 501064 - DNA, 96 bp, Homo sapiens
tatcaaatctgaggtcttattttgttgagtcgaaagtgaaattttcctttggccaacgtgacaggttggtcaaagaaaaagtgatgtatgaaaaag

SEQ ID NO: 501065 - DNA, 115 bp, Homo sapiens
gaccctggagcctcagttggaagcagccgatccagcctgcggagcctgtggggcaggtatttaacatgaagtcgctccagattgtgttacctgcccgagcagaccccgaaagccc

SEQ ID NO: 501066 - DNA, 100 bp, Homo sapiens
gaacttacgcacttaaaataattgggcagaagagaagcagtgaaggagtgcagaggcatcacctgaaaggtttctggccagctccgtctctatccctggg

SEQ ID NO: 501067 - DNA, 95 bp, Homo sapiens
tggaattgctactgctgcctctgtcactcctggtgaccagcattcaagttagtgattggcaactttggcctcagctggaatcagcaagtaactca

SEQ ID NO: 501068 - DNA, 100 bp, Homo sapiens
gaaaagcctctgggagcagaagggaggctccaagacctcatcaacaattaagaaccaaaaacttttgctagaaaatcagcttttacgagagaaaactcat

SEQ ID NO: 501069 - DNA, 97 bp, Homo sapiens
ctccaaccctcaggacagtgttggctctccgtgctcccgagtgggtgaggaggagcacgtctacagatttctggtgttcagcaaattcagttttcat

SEQ ID NO: 501070 - DNA, 89 bp, Homo sapiens
cccgtccatcatagtcaactgcgtggaagagaagctgcagtacggagacagcaaggacaaccctctcaagtactggctttataaagaag

SEQ ID NO: 501071 - DNA, 96 bp, Homo sapiens
gctaccatggaccatcctgctggtcagcactgcggctgagcctaaagtaagctgcaaattaggccggtctgcgtcgacgtcaggtgtgcctcctcc

SEQ ID NO: 501072 - DNA, 74 bp, Homo sapiens
cgggacgcgcggcggcaccgggaggccgggccgagcgtttagaaatcagtccccagaatgtggatgttaatgtg

SEQ ID NO: 501073 - DNA, 90 bp, Homo sapiens
cggccgcagtggcgtcctggagccctcctcaggtgagctggagctgcccggctcggcagcgggaagatgcaccagcaaggaatactgaag

SEQ ID NO: 501074 - DNA, 82 bp, Homo sapiens
cgggtccagacccacgcggcgccagttctccggcgggaaggaaaaccgcgcagagagctcaccatggatgatgatatcgccg

SEQ ID NO: 501075 - DNA, 100 bp, Homo sapiens
agagacggctgctccagctaaagtgtctcgactgcattgtgagagtgaatctttcaagatggatctaatcttagatgtaaacattcaaatttaccctgta

SEQ ID NO: 501076 - DNA, 100 bp, Homo sapiens
cagggactgggggctcccaggctgagctggcccagagcaccatgtcaatgagaaagaaggaggaatctgaagccttggaaagcatccctggagaacagcc

SEQ ID NO: 501077 - DNA, 75 bp, Homo sapiens
agaaacctgaagttagaaaggctcaacgagaacaagctatcaggtgagcgaaggaccccctctgaggctttggag

SEQ ID NO: 501078 - DNA, 100 bp, Homo sapiens
cgggatggagccgctcagccaccggggcctgccgcgcctgtcctggatcgacaccctctacagcagtcagcaagtcctgggcttggtggagaaccagagt

SEQ ID NO: 501079 - DNA, 83 bp, Homo sapiens
tctaccttctggaagctactactacgtggtgcttggaaaggtcaaaatgcagatcttcgtgaaaacccttaccggcaagacca

SEQ ID NO: 501080 - DNA, 98 bp, Homo sapiens
tccgtgctgcacggaagaatatcagctccagggaggtcacaatcacattgagccaaaacgcatccagtgttttctccagttacaaataaaacgaatat

SEQ ID NO: 501081 - DNA, 74 bp, Homo sapiens
aagctatatactttggttacctatgtacctgttaccactttcaaaagacccatacaatgtactggccccaaagg

SEQ ID NO: 501082 - DNA, 100 bp, Homo sapiens
aaggacatggagggaaggcttcctaagaattatatccagatcgagagacagaagattctgaaagggttcaatgaaatgagagtcatcttggacaatgagg

SEQ ID NO: 501083 - DNA, 50 bp, Homo sapiens
aaattagaagaaatccatttacagatgttggaagttctgatgaatctgca

SEQ ID NO: 501084 - DNA, 86 bp, Homo sapiens
catttcatccctcgtcgaaaggattggattggcatctttagagtgatggaggcctttgagcaggccgagcggaagcccaaacccaa

SEQ ID NO: 501085 - DNA, 100 bp, Homo sapiens
gaggacacgacacatgcagtggcttctggactgcgcgatgactggacgcatttaaatcaaacggtattgagatggattgggttatgaaacataatggtcc

SEQ ID NO: 501086 - DNA, 100 bp, Homo sapiens
agccaagtttaaagatttttatcagtttaccttcaccttcgctaagaacccagggcagaaaggtttagatggatattgcccaatactgatatcagttcac

SEQ ID NO: 501087 - DNA, 83 bp, Homo sapiens
gtggggacagggcgacgtgtgtccaggcgtttgccgccagcgacgtgccccaggacgggctgcttctgcacggccccttcgca

SEQ ID NO: 501088 - DNA, 110 bp, Homo sapiens
gtgtgcggcccgataagcgctttcgcttggcgctgggcagcttcgtggaggagtacaacaacaagatgaccaatttgcagatcaaggaagagaaagtcaaagcagatacc

SEQ ID NO: 501089 - DNA, 74 bp, Homo sapiens
cagtgttcaccatcctggccccggaaggtaacctgtgtatggtgactggaggtgctaacctaggaagaattggt

SEQ ID NO: 501090 - DNA, 100 bp, Homo sapiens
gtgcaagagttcatacaagcagagctaaaggcagtataccttaaatggcaagaaggaaataaatcatctgacatcactcagattgaagaggagctttttt

SEQ ID NO: 501091 - DNA, 74 bp, Homo sapiens
caagtgcctgcctctgccccttggtgggctgaagcttcatggagagctttttgacaactacatgcaacaagatg

SEQ ID NO: 501092 - DNA, 83 bp, Homo sapiens
gcaagcccaggcacagccgacgccgcggggtaaaagtacacctgtaagccagcttggttccgcagactttcccgaggcccccg

SEQ ID NO: 501093 - DNA, 100 bp, Homo sapiens
cgacaggcggcgcgggcggcgggagtggagcaactgctgtagtccaagcagcttattgtgcccctaaaaaggagaaagtggcaatcaaacggataaacct

SEQ ID NO: 501094 - DNA, 100 bp, Homo sapiens
gaaaaatcaaaaggagttcatgcttatgaatgctcgacttcaggatatgggccctcacattttccaaacctgtccatctgctaactattttgactgcaga

SEQ ID NO: 501095 - DNA, 75 bp, Homo sapiens
tacccaaagtctcgcttctgccgaggtgtccctgatgccaagtgacaagaccattgggggaggagatgactcctt

SEQ ID NO: 501096 - DNA, 124 bp, Homo sapiens
cggcctcaggacatcaaggagcgccgagcagtcatcatcctcaggaaggccgcctcctgtccctgcttgatgacagcagtctgcatctctgggagattgtccaccataatggctgtgcccacct

SEQ ID NO: 501097 - DNA, 82 bp, Homo sapiens
ggaatatttcaagacaccgaaaggtatgcaggtgccttgagagcttcaggggaaatggcttcagcgcagtatattactgcag

SEQ ID NO: 501098 - DNA, 98 bp, Homo sapiens
gtggatccaagatggcgacggcgatgatccagacatttaatgtggatgcaccatgccagaccgtggaagatttaacgaatggggttgtgatggcccag

SEQ ID NO: 501099 - DNA, 80 bp, Homo sapiens
gatccagcctgcggagcctgtggggcagacacatgcctcactcctgtcagcagttccaccttttcatggttgaggagcac

SEQ ID NO: 501100 - DNA, 83 bp, Homo sapiens
ctccgtggaactcagcgctccgctcctcccagttcctaagagagaagaaataccacttgcaggagagggttgacaaagtaaag

SEQ ID NO: 501101 - DNA, 75 bp, Homo sapiens
agcatgtgtttctgccttgctgggaaacgagtcacgccgatgatggagctgaagcccaacgcaggtagcgaccgt

SEQ ID NO: 501102 - DNA, 100 bp, Homo sapiens
tccaggagttcgtctcttacgtctgcggaagtgcagctgcctcagttcttagcgcagatttatgtgatcagtttggctgaaccccgtctgcccctgcagc

SEQ ID NO: 501103 - DNA, 82 bp, Homo sapiens
tcgcggatgcttttgaacaaatgtggcagaaaagacgtaacaatttggacaagacagcaaatgctattgtcgaagttttcta

SEQ ID NO: 501104 - DNA, 75 bp, Homo sapiens
cagcctgcggagcctgtggggcagggcgtgatggtgggcatgggtcagaaggattcctatgtgggcgacgaggcc

SEQ ID NO: 501105 - DNA, 98 bp, Homo sapiens
gattttcaccagactgcattatggatgatgccatcaacatcctgcagaatgaaaaaccccagctcaaagggattgtgacaaggttattcagccagcag

SEQ ID NO: 501106 - DNA, 87 bp, Homo sapiens
tcgtggaaggcaacaggtgtcacagcacggactgatcctttgaaatactccagccatgactaaaagagaagcagaggagctgataga

SEQ ID NO: 501107 - DNA, 101 bp, Homo sapiens
agaacaatcttgaatcatgaagctactaaccagagccggctctttctcggggctttgaccacgacctttgaagagcttcattttgagatcaagccccacga

SEQ ID NO: 501108 - DNA, 99 bp, Homo sapiens
agctactgctgcatcagaagaaatgagtcgtccttgtctactccactaccaaatgttgaagttcttcaagaatcagtcctttggaggtgatgtcattga

SEQ ID NO: 501109 - DNA, 82 bp, Homo sapiens
tctgggaccggaggagacatcggcctctgcaggcttgccgaagaagggagggaacggcaggagcagctgatgggatatcgga

SEQ ID NO: 501110 - DNA, 82 bp, Homo sapiens
cttttccttggagagtcataacatatcactgactgtcgtgagatggagaataaagaaactctcaaagggttgcacaagatgg

SEQ ID NO: 501111 - DNA, 95 bp, Homo sapiens
acattcaggggaaccgcctcaccgttctgcccccagaactaggtctaacttcaaacttgtggctgttaattcaaaactctatgccatcggagggc

SEQ ID NO: 501112 - DNA, 100 bp, Homo sapiens
gttgtgagctgagcccagtatgggaaagatctaccttctggaagctactactacgtggtgcttggaaagctccatttgtaaaggtcttaataacaagaac

SEQ ID NO: 501113 - DNA, 100 bp, Homo sapiens
aggaagtagtttaaatgatacctatcactcaagagactcttcatttagattggattctgaatatcaggttcgtgctggccgtgggcagcgccgtctttga

SEQ ID NO: 501114 - DNA, 82 bp, Homo sapiens
gctaaagcagcgtgcgttcagccctggggccagctgcgggccgtccagcggctgtgccacttctacagcgccgtcatgccca

SEQ ID NO: 501115 - DNA, 75 bp, Homo sapiens
caacttgcgcaaaaacaacagacagccctatgctgtcagtgaattagcaggactcagaattcatgattgaagaaa

SEQ ID NO: 501116 - DNA, 96 bp, Homo sapiens
cgtggatgccctgcaccgggtccggcagtgatgtcttggcattgcccattttcaagcaggaagattccagccttccattggatggtgaaacagagc

SEQ ID NO: 501117 - DNA, 76 bp, Homo sapiens
tagatggaaacttcttttgtaagttgtcattgaatctttgggaattattatttataaagcactggactatggtttg

SEQ ID NO: 501118 - DNA, 74 bp, Homo sapiens
caagcagtttcgggaggagttcaactcacccacaaaagctgtatataatgccagacattggaatcatccagatt

SEQ ID NO: 501119 - DNA, 98 bp, Homo sapiens
cgcctttgttgattatgattggctacagtgatggaatgcaggtctggagcatcccttctttactcctcctgtgaagaagggagaggaccccttccgaa

SEQ ID NO: 501120 - DNA, 50 bp, Homo sapiens
cagagccaaggatgagtatgagaggctgcaagctttcttcctggtggcag

SEQ ID NO: 501121 - DNA, 101 bp, Homo sapiens
ctcgcccggccgggagccgccgcgggcaggacgcgcgctgcagacatccacgacagcgatggcagttccagcagcagccaccagagcctcaagagcacagc

SEQ ID NO: 501122 - DNA, 98 bp, Homo sapiens
tgtctggctgtgatgctcgggagggagactgttgttcccggagatgcggcgcgcaggatggtgccatgacaatggtgtgaactacaagattggagaga

SEQ ID NO: 501123 - DNA, 50 bp, Homo sapiens
attgttcctgaggaagagcaaaaatccgcttacaaacacgcagatggcaa

SEQ ID NO: 501124 - DNA, 100 bp, Homo sapiens
cacggcttcccccaaggaatatacagttccagaaacgccgctggactgcgaggtctccctgtggtcgtcctggggactgtgcggaggccactgtgggagg

SEQ ID NO: 501125 - DNA, 90 bp, Homo sapiens
cagggagttctgacagctctgcgtctcaggcccctaccattgatatccgcccaagatcagcaaccattcaaatgaataatgctacacacc

SEQ ID NO: 501126 - DNA, 100 bp, Homo sapiens
cgcagggaggatgtcgggacaccccggaagctgggaaatgacgacctagctgcccagccagatctctcccagggagaggagaatgagccacgcgttccag

SEQ ID NO: 501127 - DNA, 100 bp, Homo sapiens
tgatgatgatcctgaaatcataacattggaaagaagagaatttggagggaaaacccctgatcctaaaatgaatgctaggacttacatggatgtaatgcga

SEQ ID NO: 501128 - DNA, 90 bp, Homo sapiens
cacggacggtcggtcccaggatgaggtcaagaaggcggctttggtcatccagcagtcagggaaatcctcattgacgattcaatttgttga

SEQ ID NO: 501129 - DNA, 80 bp, Homo sapiens
gtagccatggcacaagaatatatttgtagaagactatgaacctaccaaagctgacagttatagaaagaaagtggttcttg

SEQ ID NO: 501130 - DNA, 101 bp, Homo sapiens
cgtggtttctgtcccagccgtctgtttccatagaaaaaggttgtgcagcctgactctgaagaagctggtggtcttcaaggagctggagaaggagctgatct

SEQ ID NO: 501131 - DNA, 98 bp, Homo sapiens
ggctctgggagacctcatcatcctcatcacttttggcccgctggctgtgatgttcgcctacgccatccagatggcccactgcgtgaccttggttcagc

SEQ ID NO: 501132 - DNA, 100 bp, Homo sapiens
gttttgagaaatggtgcttgggaaattgtccactgggaaaagctccaaatagattgggagaaaatcaaagccaaaattgagatggaaattacaaaagaaa

SEQ ID NO: 501133 - DNA, 102 bp, Homo sapiens
caagatgtcacctgaaagtggtcacagccgcatctttgaagtttctggcccccaaagacaaaccaagtggagacacagcagctgtatttgaagaaggtggtg

SEQ ID NO: 501134 - DNA, 97 bp, Homo sapiens
tgttcgagaacgaccccgagacggtattaataggggaccctattaccacatgtctttctccctcagtgtatgatataatttgtaatcttgggtttca

SEQ ID NO: 501135 - DNA, 75 bp, Homo sapiens
aggcaactgtgtttcacttaccagaatactacgttcagctaaattaaggtgaaagtgggagatacattggatctt

SEQ ID NO: 501136 - DNA, 75 bp, Homo sapiens
acactcaaggatggggattcaaggatggaatttttcataactccatatggcttgtaccttctgtctgacttcaac

SEQ ID NO: 501137 - DNA, 100 bp, Homo sapiens
gatgtaccacctttctggcaatgagattgtgataccattcttcagtctcttaatcaaagatatttatttcctcaatgagggttgtgccaaccgccttccc

SEQ ID NO: 501138 - DNA, 106 bp, Homo sapiens
cttcccgtgctgctgttgatgctggctttgttcccaatgacatgcaagttggacagacgggaaaaatagtagcaccaaccctggtgggcagcagtgggaccattct

SEQ ID NO: 501139 - DNA, 97 bp, Homo sapiens
ggataaggaccagtacctgcccaggaaactggtttccttcaagcaggatggtacctttccactttcctccatcaaaatgtgcactttggaacccaac

SEQ ID NO: 501140 - DNA, 50 bp, Homo sapiens
atgtacctgcattctgccttagtcaaggttatcaatagtctggctgtcta

SEQ ID NO: 501141 - DNA, 72 bp, Homo sapiens
tcatcaacatcaagtttgccgaccagcacgtgcctgttgtttgctatcagtccaaccgtgatgagctccgac

SEQ ID NO: 501142 - DNA, 82 bp, Homo sapiens
cgggatgatcgataagaacgagctgaagcaggccctctcaggtttcgagaaattcactgcatgtaactatgaccacgcatga

SEQ ID NO: 501143 - DNA, 83 bp, Homo sapiens
ctcttgaactgtcctgtgccttacatcagtaaggtagagatgatgaccccccactacaggctgaccaactgactgaagagcag

SEQ ID NO: 501144 - DNA, 90 bp, Homo sapiens
catcaagcccaacagccagggccaggcgcagacctttctccaagaggagggtcttcccggaagccctggaccccaaggccccgttggccc

SEQ ID NO: 501145 - DNA, 100 bp, Homo sapiens
ggaattttgccgatttcatgactaaccagtactctcagcgttctcatctctcttccttcaccatgaagctgatggacaaattccactcacccaaaatcaa

SEQ ID NO: 501146 - DNA, 90 bp, Homo sapiens
atttttctcacagtcttcttgcttcctgaaatttcctctgatctacggaatccagaggcagcattgtctccaaccttccgtagtgacagc

SEQ ID NO: 501147 - DNA, 100 bp, Homo sapiens
aacccagccggctccatctcagcttctggtttctaagtccatgtgccaaaggctgccaggaaggaggtcgctacccacaggagaacaagggaacctacat

SEQ ID NO: 501148 - DNA, 75 bp, Homo sapiens
caacagcgacgactatgacctcgagtctgacatggaaacagagcaaatgcagcgttacaatcaaagacttattga

SEQ ID NO: 501149 - DNA, 100 bp, Homo sapiens
aggaagtgatattattgtagatctagaagtcactttggaagaagtatatgcaggaaattttgtggaatgggcagaaatggatctggaaaaagtaactttt

SEQ ID NO: 501150 - DNA, 89 bp, Homo sapiens
cgaaccccgggacacgcaggaacggctccagcatcaagatccgtctgacagatgggcttaggtcacgagcaaggatttggagccccttg

SEQ ID NO: 501151 - DNA, 98 bp, Homo sapiens
cgcaactacaagaaaaccctcctcctgaggcaccacgtctctaccgagcacaaactccacgaagccaacgcccaggactcacaccacccggcaagaac

SEQ ID NO: 501152 - DNA, 90 bp, Homo sapiens
cttcccggtctcctttcccggccgcacagggcaatggtggcttgctatccgggaaatggaacaggttatgttcgccacgtggacaacccc

SEQ ID NO: 501153 - DNA, 82 bp, Homo sapiens
ggaacttgtacaaacaggacctgcctaattaccttcaaacctggtgacagcgggaaggtgaccacagtcgtagccactctag

SEQ ID NO: 501154 - DNA, 75 bp, Homo sapiens
atccaaggcaagactggcacccagcacagcaggacacagcattgttggttttgccatgtactattttacctatga

SEQ ID NO: 501155 - DNA, 75 bp, Homo sapiens
cggcgcttgttggcggcgctgcgaggccagagcctagggctagcggccatgcctggtgtgtccgtttctctggtg

SEQ ID NO: 501156 - DNA, 75 bp, Homo sapiens
cagaggcttaaggtcttcagcggggcgctccaggaggcactcacagagtttcactcttattgcccaggctggagt

SEQ ID NO: 501157 - DNA, 100 bp, Homo sapiens
tgacctgtggagacacggccagatctgccctccagtaaccatgtgcgaccgaaaggccgtgatcaaaaatgcggacatgtcggaagagatgcaacaggac

SEQ ID NO: 501158 - DNA, 100 bp, Homo sapiens
agggcctcgccatgtcctgctgcccgatggagtcccctgtttccacaccagcagtgctgccaatacaccttttggtgccagtggtcaacaatgacatctc

SEQ ID NO: 501159 - DNA, 75 bp, Homo sapiens
cccgcaccatggaggaggacgacagctacggatcccctaacaacagtgagagagcaatgcgagcagttggagaaa

SEQ ID NO: 501160 - DNA, 90 bp, Homo sapiens
gccggggagcggcggcggccttggactttgctgtctttcctcgcggagacaggagacaaagcattatctaactgtgaaccttaccactct

SEQ ID NO: 501161 - DNA, 90 bp, Homo sapiens
taaacatagttttggaactagcagatgctggcgacctatccagaatgatcaagacctctgtgagtgaaagccttcagagggaagctgcta

SEQ ID NO: 501162 - DNA, 50 bp, Homo sapiens
ggtcctatctattactgctatgttgtcagctcctttcatgtggacttctg

SEQ ID NO: 501163 - DNA, 98 bp, Homo sapiens
acatacacaagcttgaaaactaaactttctaatgttatcaacagtgctacagatacagaagctcgacagaacaattggccccctctaccttctttttg

SEQ ID NO: 501164 - DNA, 74 bp, Homo sapiens
gtggacaggttaagggactcccaggaatatcagggctgttgataatcaggtgtatgtggccacagcctctcctg

SEQ ID NO: 501165 - DNA, 101 bp, Homo sapiens
agacagctctatagcagtctggtgaagttccatgcccatccagagagtaactgtgttgccatggattgggataaagatggagatgtcctagcagtgattgc

SEQ ID NO: 501166 - DNA, 100 bp, Homo sapiens
ccccgagaagtttactgggaaaactgccagcggagctggagtttgttcagatcatcatcatcgtggtggtgatgatggtgatggtggtggtgatcacgtg

SEQ ID NO: 501167 - DNA, 50 bp, Homo sapiens
attgagtgccagcccggttcccggacagtttcagggtctagccattgccc

SEQ ID NO: 501168 - DNA, 100 bp, Homo sapiens
tggacgccggcggagacgcgggcgaggtttttcgttggaatatacgttgcacatttatggcgattctgagtgtgagggcagacttctgccaggctcagca

SEQ ID NO: 501169 - DNA, 75 bp, Homo sapiens
cccagacaagtccccagggaatgccacagcatcctccagcacctcaggtaaaggcgacacaggaggagaaccggg

SEQ ID NO: 501170 - DNA, 100 bp, Homo sapiens
gaacatggcgaaggtggagcaggtcctgagcctcgagccgcagcacgagctcaaattccgagctactcccgagcccggagaggacccacgcgtgacccgg

SEQ ID NO: 501171 - DNA, 90 bp, Homo sapiens
gaggccttcacccagatctcgagggagattgatgtggacgagtgctcactagcagaaaaaacctgtgtgaggaaaaacgaaaactgctac

SEQ ID NO: 501172 - DNA, 100 bp, Homo sapiens
ggcaccgtatcaagccaagaacagcccaatctcctttctgggcaaacgttccaagttacatcatgctgatgacagcttcctggtcctcaccacagatgga

SEQ ID NO: 501173 - DNA, 83 bp, Homo sapiens
agcacgattttcccgagagttcacagcaaaacgcagcagtatgactgcaaatggtacattccgctcacggatctcagcttcca

SEQ ID NO: 501174 - DNA, 98 bp, Homo sapiens
tgggcaaatctttatcagccactgccttctgctgccaggaagccagctagagtggtggagcctgccccgctggaggctgcctggtggccctgacctgt

SEQ ID NO: 501175 - DNA, 101 bp, Homo sapiens
ctgtcattcctgctgctgccctagctggctacacagtgagccccttcaagatacctatagaggaacttgaggacagagtgtttgtgaattgcaataccagc

SEQ ID NO: 501176 - DNA, 74 bp, Homo sapiens
gcacttcatccagcagtgcacaggtccggcctctttggcctacccccgttggctccgctgccccaggtcgatga

SEQ ID NO: 501177 - DNA, 51 bp, Homo sapiens
ggaggttcaggctacggtgagccgaagacaaagatcattccactcagcctg

SEQ ID NO: 501178 - DNA, 100 bp, Homo sapiens
tgacatcagcggctctttgtatgatgacatgcgtctgttactagagtggagagtctaccttcgtctcacatgtgccacaaaggatggcatggcccgggag

SEQ ID NO: 501179 - DNA, 109 bp, Homo sapiens
cttgggttttttgtggcttccttcgttattggagccaggcctacaccccagggggatatgagactttctactcggaatatcctgagtgttgcgtggatgtaaaacccat

SEQ ID NO: 501180 - DNA, 124 bp, Homo sapiens
gtgatccctcaagactggtccacggagtgtatgaccacaaacagccatcaaggtagtgggcagcagtcagtgacaggtgtaacctctgtggatgacagcaacagttactggaggatacggggga

SEQ ID NO: 501181 - DNA, 83 bp, Homo sapiens
tgcatcagagtggatggcctccccagccccaaaaccatcactggtgcaagctatatttaacggagatcctgatgaagttcgag

SEQ ID NO: 501182 - DNA, 100 bp, Homo sapiens
ctgtacttccagggagacaccgattataagaagagaaactcagcgctggggaagaaggagagaaggttgcacatgtacatagcttattgtcaaaataaac

SEQ ID NO: 501183 - DNA, 100 bp, Homo sapiens
cgacggccactgttctctgggacaatgcttttgcagagcctatggagtctcccaggcgggaatgcaatggtgcgatctcgacttcactgcaatcttcacc

SEQ ID NO: 501184 - DNA, 90 bp, Homo sapiens
ctcacagacattggtcggtaccacccccaggctgtgaattcaattgcaaaacgatacagcaccaatggaaagatcaccttcgacgactac

SEQ ID NO: 501185 - DNA, 75 bp, Homo sapiens
cacgggtgccggcatcagcactgcctctggcatccccgacttcaggactcagaattcatgattgaagaaatgcag

SEQ ID NO: 501186 - DNA, 75 bp, Homo sapiens
gaactgctagatgaacccatcccccagatagtggctacagagcatcttgacagcagtagcaatgagcgtccagac

SEQ ID NO: 501187 - DNA, 101 bp, Homo sapiens
aagaataagacattaggagaaaaaatcgactcctatgatgtaataataagctgtctgtgatcctggaaacatacgtgtgactgaagctcccaaacacccaa

SEQ ID NO: 501188 - DNA, 100 bp, Homo sapiens
tgagaacaatacttagtggataccatcgaatagtacaacaggtttatcttgcagattatggactttcctacagatattgtcccaatgggaaccacaaaca

SEQ ID NO: 501189 - DNA, 100 bp, Homo sapiens
gattgaccgaagagctgttcctgcaagagtttccctggagagctcagaaatatgctcagcaagtcttgcagaaggaatgtcgtcccaagtttgccaagac

SEQ ID NO: 501190 - DNA, 100 bp, Homo sapiens
atcaggtaggctgcgttgaggatctttgctcttccatccgcctttgatcgtcttcctcttcagccatccagggccctcgtggacctcagggaattgatgg

SEQ ID NO: 501191 - DNA, 99 bp, Homo sapiens
aaacaaaaactgatgaccaagagaatgtgtcagccgatgcaccgagtccagcccaggaaaatggagaggcgactgaaccgaaaccagctgcacatgtta

SEQ ID NO: 501192 - DNA, 74 bp, Homo sapiens
gcagggcaagctgtgcgacgtgaccctcaaggcatttcctgcagatcaccctgtgcgtgtgcgagctgtatggc

SEQ ID NO: 501193 - DNA, 100 bp, Homo sapiens
gagctggtctgcgatcctgaatgggggcggcgtgcccgccggggggctagtggccacgctgcagagcctcgaccactctgcttcatttttgggagaaaac

SEQ ID NO: 501194 - DNA, 136 bp, Homo sapiens
cgagtccgccccgcgtctccgcagcgcgcccaactgcatcctcctggccatgttcctcgtccactacgggcatcgactacatgaggaaataattgacttttataacttcatgtccccttgtcctgaagaagcagct

SEQ ID NO: 501195 - DNA, 102 bp, Homo sapiens
tcaccaaataagctatatactttggttacctatgtacctgttaccactttcaaaagctctctaggaaacaccagaattatcagtgaagaatatattaaatgg

SEQ ID NO: 501196 - DNA, 91 bp, Homo sapiens
gagactgctgagcccgtccgtccgccgccaccacccactccggacacagggttgtgagtcccggcccagcccctccacccccctgcccccc

SEQ ID NO: 501197 - DNA, 50 bp, Homo sapiens
tacaagcctgagatctccagggagcaggacgcaaacatgcagatctttgt

SEQ ID NO: 501198 - DNA, 75 bp, Homo sapiens
agaggaaatagagcattatgctcggcaggttaaagaactgaatcattatctggaagctgagaaatcttgtaggac

SEQ ID NO: 501199 - DNA, 100 bp, Homo sapiens
gaccttccccttcaactcttttctctcgggcttcatctcttgtgtggggagtttcatcctagcgggtctgtgcagacttttgcagacaaatcaaaacaag

SEQ ID NO: 501200 - DNA, 100 bp, Homo sapiens
caacaagctcagcttcaggagtttggtcaaagcaaccgaaaaggagagtttcctgctttccccacaaataaaccagagaaagatgcaagacatgtagtaa

SEQ ID NO: 501201 - DNA, 100 bp, Homo sapiens
ccgggcagactctcaccagtgcgcatgcgtggctctccggcaccgactccatggataccgaggactcggcctcttctcagaagttggatttgtcaggaga

SEQ ID NO: 501202 - DNA, 75 bp, Homo sapiens
gtcctttatatagaagggagagtagaaacactttgtgctactctgtggggctttggaaaagcatgttaaatgtga

SEQ ID NO: 501203 - DNA, 109 bp, Homo sapiens
cagcggccgagcgggcggcttcctggcctgggcgctccggtggcggcggagaaaccaaggtgtatgttggtaacctgggaactggcgctggcaaaggagagttagaaag

SEQ ID NO: 501204 - DNA, 101 bp, Homo sapiens
taatatcttaagcattcttgttgagctggtgtcagctgggatcatggcccaagttgcaatgtccaccctccccgttgaagatgaggagtcctcggagagca

SEQ ID NO: 501205 - DNA, 99 bp, Homo sapiens
ccagccgctcgcaggcgccgcacggagttgcgtcccggggacttggggccgcagggaggaggatacgaagcgttttcggcttcctgcccggagctgtgc

SEQ ID NO: 501206 - DNA, 97 bp, Homo sapiens
aaattgcatgtgaacacgaacactctaattgcctcctgatagcacacagaaagcggaggcctcagcaacctgctcttccgctgctcgctcccggacc

SEQ ID NO: 501207 - DNA, 97 bp, Homo sapiens
gtatgttgttctcagctacttgggactcctctctcaagagaagctgcaagagcaacatctttcctcaccccaaggtgtcatggagaaactccagctg

SEQ ID NO: 501208 - DNA, 80 bp, Homo sapiens
agcagttctacaaggcgagccaggttaacacagaaatctgcctcctgggccatgccgcttctaaggcctgtttcttctca

SEQ ID NO: 501209 - DNA, 83 bp, Homo sapiens
gctgtctctgctgatagactccttccagaataactcaaaggtggtagctgagcacccagatgcttcaggtgaggagattgaag

SEQ ID NO: 501210 - DNA, 75 bp, Homo sapiens
gacgggctccagctccccgtgcctcgacctcagtgatcctgagcttcctgttctcctactggctcagccatcgac

SEQ ID NO: 501211 - DNA, 97 bp, Homo sapiens
catgtttggattgaagccgcctctgtattacttaccagggatcgcttacacctgagacgaactacagaacagcacgtaccagaggtggaagtccaag

SEQ ID NO: 501212 - DNA, 100 bp, Homo sapiens
aaagaattacgatgccgctctccgaaaaatcacctttccccacgggagaacattaatatctgctggagtcctgatgggcagaccattgctgtaggcaaca

SEQ ID NO: 501213 - DNA, 75 bp, Homo sapiens
ggacacctctcggagccactaatgaaccgcctggaagacaagagtgcgcgcgcaggatgaagaagtgcatcaggt

SEQ ID NO: 501214 - DNA, 100 bp, Homo sapiens
gttttttgatgctgaggagctcctggtcgatgaagaggatgatgtttttggtgaagatgttggtcaggcgtcatttaaatattttcagtcagcagaggaa

SEQ ID NO: 501215 - DNA, 100 bp, Homo sapiens
ggtgtcaggagaatggaagaactctgatagcaccccaaggccccttcacagatgtagtcactacaaatcttaaattgcgaaatccatcggatagaaaagt

SEQ ID NO: 501216 - DNA, 100 bp, Homo sapiens
gagtctgaaaaaggggagcgcggagaggaggctggaagaggaagatgcctagcacagaccttctgatgttgttcacaagattcctttgcagttcaccctt

SEQ ID NO: 501217 - DNA, 100 bp, Homo sapiens
gcagccatctttagttcgtctttcctagagagttttctggatatgccgcagaaggatccgtgccagaagcaagcctgtgagatacagaaatgtttacaag

SEQ ID NO: 501218 - DNA, 96 bp, Homo sapiens
cggactctgcctggggcgactcgggctccagccctgcccgggcgggcactgggctctccagggtcgaaggcagggatgccatggacaatattacca

SEQ ID NO: 501219 - DNA, 100 bp, Homo sapiens
aaggaggagtgtgaccgcctgggccctggcatggccgacatagcccagctcatcgcccagtctatcggccaggccttcagcgtggcctaccaggagttcc

SEQ ID NO: 501220 - DNA, 90 bp, Homo sapiens
gatcctatagaagatcctgatcctgaggttatggcaaaggtggatattccatctattataaccaagaaactattaaaagcagcaatgaag

SEQ ID NO: 501221 - DNA, 100 bp, Homo sapiens
acataaggtgttaagaccatttttactaaggagactgaagaaagaagttgaatcccagcttcccgaaaaagtggatatggttatagaagaagtggccgag

SEQ ID NO: 501222 - DNA, 101 bp, Homo sapiens
caggaggacttcctgaaactgctagggaacagcttgatacacatatgggggtgaatctctacattaagaacttggatgacactattgatgatgagaaatta

SEQ ID NO: 501223 - DNA, 82 bp, Homo sapiens
gacggcccttatgatccgcgagtcggaggacagcaccggtatcgtcggggcattcacaaatgcattgagtgttgttccgaaa

SEQ ID NO: 501224 - DNA, 75 bp, Homo sapiens
actgctgagcctgccaatgcaacagccacggaagattaagcaggcatattttggtggtgaagctcgctgcgatgc

SEQ ID NO: 501225 - DNA, 50 bp, Homo sapiens
gccacacagtgtccagatacgaggcaacacggaggtagtcacgtttcccg

SEQ ID NO: 501226 - DNA, 83 bp, Homo sapiens
gccagctgccgaggcgttcggtcctgctgttgcggccgctgccccagggctgcggggacgaaatgagccgtcagactgctaca

SEQ ID NO: 501227 - DNA, 100 bp, Homo sapiens
caagaagtcgtcaccccagacaacatgtgcatggggaggaccagtcgtgcaattaatggatgcctcgaagttgacgtacatatatattcagaaatgtttt

SEQ ID NO: 501228 - DNA, 101 bp, Homo sapiens
gaaacgtgtttcaagaccaaaaaacacaataccaggcatacatttggcagaataaatgaaccaggttctcccatgggcaggtggtctctctggatgagctg

SEQ ID NO: 501229 - DNA, 75 bp, Homo sapiens
gcaggctctcggctgcagcgctggtgtactaatggtcacttgatgtgcgctggctgttttatccacctactagca

SEQ ID NO: 501230 - DNA, 90 bp, Homo sapiens
ctcgaggagatagaagaagatgctggccttgggaatggaggcctggggaggctggcagctcctttagcggcagagttttccgagtgacct

SEQ ID NO: 501231 - DNA, 99 bp, Homo sapiens
ggaagaacaaatatgtctgtcagattcaagatggaaaaggtgatgtaaccattacaaatgatggtgctaccattctgaaacaaatgcaagtattacatc

SEQ ID NO: 501232 - DNA, 90 bp, Homo sapiens
ggggccggacacgctctgcttcgacaaggacgagttcatgaagtgctggagaaagacgatcattacctctccagagtctttgaatctccc

SEQ ID NO: 501233 - DNA, 49 bp, Homo sapiens
gttccctccaagacaactgaatgctgcggttggatttctcacgatgtcc

SEQ ID NO: 501234 - DNA, 101 bp, Homo sapiens
ggcgcgctgctgctggcactgctgctctgctgggacccgaggctgagccaagcagatcaatgaactgagccatgttcaaatccctgttatgttgatgccag

SEQ ID NO: 501235 - DNA, 100 bp, Homo sapiens
cggcggcaccgggaggccgggccgagcggatattaccttccaaatgatgatggagaattttatcagttctgttacgttacccataagggtgaaattcgtg

SEQ ID NO: 501236 - DNA, 75 bp, Homo sapiens
acacacccaaggtcacagagcagctcatgaaactggatgaacaaggggtaggaaacatgagcggcaccaacttgg

SEQ ID NO: 501237 - DNA, 100 bp, Homo sapiens
gcagatccgagtagaccaggcaggcaactttggctttggggattcacgtggtggcggtggaaatttcggaccaggaccaggaagtaactttagaggagga

SEQ ID NO: 501238 - DNA, 100 bp, Homo sapiens
atttcagtgactgaattaaaaggtgtcaagaagctcagaatgaccagtctgcttagttttaagtgaaattccttttatgtctacttggtttttacttgtg

SEQ ID NO: 501239 - DNA, 99 bp, Homo sapiens
attttctactgtccctgcgcgagttttcggctttgtgagaaaccttaccatcaaacacgatggccagcaacgttaccaacaagacagatcctcgctcca

SEQ ID NO: 501240 - DNA, 100 bp, Homo sapiens
atgtgaagaggatccacgagtacaagcggcagctgctcaactgcctgcacgtcgtcaccctgtacaatcgtccagggagtcggtagtaagggatggcggg

SEQ ID NO: 501241 - DNA, 100 bp, Homo sapiens
ggttctcgaaggcccgcggcgccccgtgctgcagcatgtagagcgcatgaagtacaggacaataaagcttcctacacatatcaccaggaggatctctttg

SEQ ID NO: 501242 - DNA, 90 bp, Homo sapiens
cttgctctgcgatggactattccctggctgcagccctcactcttcatggtcactgaccagaatccgtagaagctagccctgtggtagttg

SEQ ID NO: 501243 - DNA, 100 bp, Homo sapiens
gagaatctgaaaaaaagagaaacctgggtgaactttcacggacaacctcagaggacaacgaagtgttcggacactgcccatctctaagataagaacctgg

SEQ ID NO: 501244 - DNA, 101 bp, Homo sapiens
ctggagaaaatttggagaatacaatggcagcctttcagcagcaatgatagtaagaaatgctaaagatacagctcatacaaaagcagaacggaatattctgg

SEQ ID NO: 501245 - DNA, 100 bp, Homo sapiens
cctgcatttccccgaagtattacatgattttcactccttgcaaactttgccatctttgttgcagagaatcggaaatgcactcggtgatggaaagagagcc

SEQ ID NO: 501246 - DNA, 100 bp, Homo sapiens
tatcccagagctttgctacattggaacagggccgcctctcaagctgctcctgctaaggccaagccggctgaagctcctgctgctgcagccccaaaagcag

SEQ ID NO: 501247 - DNA, 75 bp, Homo sapiens
gcctgtgtcctcattgctccaaactgtgttgtttcagctgtattaggaacccagactcccatggttatgacaagg

SEQ ID NO: 501248 - DNA, 90 bp, Homo sapiens
acggcggagtcctttggtcccaggcatcatcacagttattgacaccgaaaccgttggagagggccagctttacatggtgagaaccatgct

SEQ ID NO: 501249 - DNA, 82 bp, Homo sapiens
ggcgccacaagctcattcactgtgtagcatcccagccatcactcttccacctgctccttagagaagggaagatgagtgagtc

SEQ ID NO: 501250 - DNA, 100 bp, Homo sapiens
cgcgcccctcggacggccacgagactcgggaaagaccacagcaagattctttcattcgtctcctcctagcctgggggaccaggctcgaactgaccctgga

SEQ ID NO: 501251 - DNA, 100 bp, Homo sapiens
ctttgccggacagcagagtcccagctacacacttgaatgcaactacaacactggacgctcagtaaacagcatccctgctgcctgccatgacaatgggcgt

SEQ ID NO: 501252 - DNA, 75 bp, Homo sapiens
aaagcttcatagcctcaaccatgaaggaaaccaacaatgcagatcttcgtgaagactctgactggtaagaccatc

SEQ ID NO: 501253 - DNA, 100 bp, Homo sapiens
ccactccccccagagccgacctgcagcaaataattgtcagtctaacagaatcctgtcggagttgtagccatgccctagatagcaacttcatccttgccaa

SEQ ID NO: 501254 - DNA, 82 bp, Homo sapiens
cagtgccctgagggccttcgagagctaccgcgccagacaggatgaccgagtgggagacagcagcaccagcggtggcagagac

SEQ ID NO: 501255 - DNA, 50 bp, Homo sapiens
gacactgaagatcacagactgagtgacagttcatttagattctttgtatt

SEQ ID NO: 501256 - DNA, 100 bp, Homo sapiens
cgtttgagcctcagaaagcgaggagcggcctccacggaagccaagctggccgaggtcctgctcaatctggaattttgtcagatcgtgaagtggtaaacct

SEQ ID NO: 501257 - DNA, 50 bp, Homo sapiens
tggacagacgggaaaaatagtagcaccacaccgaacaagatttgtgatga

SEQ ID NO: 501258 - DNA, 82 bp, Homo sapiens
gaatgaatgaagtgcttcagatttaaatatgctgctgggggtgaaatctttgaccagtgtgttgcagacagagaagaagcct

SEQ ID NO: 501259 - DNA, 100 bp, Homo sapiens
ctcggcttcatcccggccaaagctgactcagtggtggtgctgctgtgcaggtctaccccgagccccggagcgagagcgagtgcctgagcaacatccgcga

SEQ ID NO: 501260 - DNA, 100 bp, Homo sapiens
cgagttaaagttggatgtgctggaacagaataactgaagtgaagtgatggactccgatttggagagtagtaagacgtgaaaggaatacacttgtgtttaa

SEQ ID NO: 501261 - DNA, 96 bp, Homo sapiens
cggacaccatggacaagttttggtggcacgcagcctggggactctgcctcgtgccgctgagcctggcgcagatcgagtgtgaacatggctacgcct

SEQ ID NO: 501262 - DNA, 90 bp, Homo sapiens
tggaaagcagtttttaagacaagtgtggcggggcaccctggcccgcatgcggtacaaaagaaccaaggcagctctgacaataatcaggta

SEQ ID NO: 501263 - DNA, 142 bp, Homo sapiens
ttgttggtctcctccttgctgcccttgttgctggtgtcgtctactggctgtacatgaagaagtcaaagaagatgttaccgagtacttcagtgaattccttagtgcaggggaacggagtcttgaattccagggatgcggcaag

SEQ ID NO: 501264 - DNA, 100 bp, Homo sapiens
ggaatgaagagaggcggccgggccccgcgctccgccccggcctagggccttgccccgggagcccgcgaggaaatgtctttcctccaggacccaagtttct

SEQ ID NO: 501265 - DNA, 100 bp, Homo sapiens
tgctaagaaagctaggcttctaccagaaggggaggagacgttggaatcaggttatgtgcagagtctgattagacgagttgtaaataatgtaaacattgtg

SEQ ID NO: 501266 - DNA, 71 bp, Homo sapiens
taatccagtggaaatcaggagagtgggaagagattggtgaagtggatgaaaattatgcccctatccacaca

SEQ ID NO: 501267 - DNA, 102 bp, Homo sapiens
ctggggactcgcgccgggtccgtggagctctgcgagctggctgcttttcgcctcccttgcggtagcctccagaaaagatggtctgcttacctgaaccagtga

SEQ ID NO: 501268 - DNA, 100 bp, Homo sapiens
ccccggctcccggtgcagacaccatgcctcctgacaaggtgatccgggcgggccccgcaggaattttatcccctcaccggcctcacactagtatcgcatg

SEQ ID NO: 501269 - DNA, 51 bp, Homo sapiens
atcagttataaactctagagtgtgctcaaagatccagacagcaatccatac

SEQ ID NO: 501270 - DNA, 74 bp, Homo sapiens
gacttgtggcggggacctcaaacagaccactgtgtgcagcataacgaagcgtccagacttctccgaaactggtc

SEQ ID NO: 501271 - DNA, 75 bp, Homo sapiens
ggctgtaacttacgtgtactttaccaacgagctgaagcaggtctggagcccggcactgtggtcataacagagcag

SEQ ID NO: 501272 - DNA, 101 bp, Homo sapiens
cctttgacagggacatcagtggagccttctcagacccacagatacatgatcacggatatcatcgggaaggatgatggcttgggcgtggagaatctgagggg

SEQ ID NO: 501273 - DNA, 127 bp, Homo sapiens
catgaacctcctgccgtgtaaccctcacggcaacgggctgctctacgccggcttcaaccaggaccacgccgcggcgagtcctttgcacatgttggcaacacacgcatccgcatcggcctccctgccc

SEQ ID NO: 501274 - DNA, 97 bp, Homo sapiens
aatcatcagagacctagcaactgttgagcttggttttggctgtcaggcccctgttctgctgatggattgagcttcaaaagcagtggactgtcttttg

SEQ ID NO: 501275 - DNA, 75 bp, Homo sapiens
aagctagggtcgccgccactgccgcaggaggcgtgagtgccggtggtggtgtgcacattgagccccggtatagac

SEQ ID NO: 501276 - DNA, 100 bp, Homo sapiens
ttgcctactacaatcacttcatggacaataccacgctgctgattgagctggaatattgtaatggccagaagcggactcctagaagaggggagcagcaagg

SEQ ID NO: 501277 - DNA, 50 bp, Homo sapiens
gagattggactgggagactcagcagggattaaagcctgtggtttccacag

SEQ ID NO: 501278 - DNA, 95 bp, Homo sapiens
gtataaacacaacatctactattggcatgtgattgcagccaagctggcttttatcattgtcatggaggtttaccgacaagactgtgaaactttcg

SEQ ID NO: 501279 - DNA, 100 bp, Homo sapiens
cttcttttctccgcgggcgccgaccaggcctggctcgcgcctctcccaggacccgcctggctgcgagatatctatcagttgagggatttgcagttgataa

SEQ ID NO: 501280 - DNA, 100 bp, Homo sapiens
catgcctgcccgaccgcgctgccggagccccaggtgctgaaggtcgccatcctggctgagaagtacgcggtggactacacctggtatgtggataccatct

SEQ ID NO: 501281 - DNA, 100 bp, Homo sapiens
tacattgagataatcaccagcagcatcaagaaaatcgcagactttctcaactcgttcggttgtttacattcagagctctatcaataagaggaatacatat

SEQ ID NO: 501282 - DNA, 90 bp, Homo sapiens
gacatcctggaagctgggaaatgggggcttgtacatgacagctggaatagcctccagttgaggggcttggtggtgctccttatctctaaa

SEQ ID NO: 501283 - DNA, 50 bp, Homo sapiens
gcagaagtacgaccggcagctgagtggcctgaagcacgaggacaaacgtg

SEQ ID NO: 501284 - DNA, 98 bp, Homo sapiens
aacagagccgggagttcaagaagaacactccagagccacccgtgggacacggtcatccaggcggccatgcgcaagtacccgaacccgatgaacccgag

SEQ ID NO: 501285 - DNA, 74 bp, Homo sapiens
tttccaaatgaatttgcaaaacttactgtagtgttctccgtggcccgatgcccccacagcctatgtgaataaca

SEQ ID NO: 501286 - DNA, 51 bp, Homo sapiens
ctacattttgccgcacaaacacatgtagggtaaaggacatgttcagttttg

SEQ ID NO: 501287 - DNA, 97 bp, Homo sapiens
cgcagctcggcttgctgcggtctcaggaatactcccccagttgcaagaggcgcaggaccgtggaagacttcaacaaattctgcacctttgtcttggc

SEQ ID NO: 501288 - DNA, 90 bp, Homo sapiens
atttctaccaacacagctggctgccagcccgggccttggtggaagaggcccttgcccagcgattccagggtgctgccccacgtcccccac

SEQ ID NO: 501289 - DNA, 100 bp, Homo sapiens
ggctgggcctgagcatcgttgggggttcagacacgctgctggcagcactgtgtgctgttcatgtcatcaggaaagttcctgaacttatggagatgttttt

SEQ ID NO: 501290 - DNA, 100 bp, Homo sapiens
gacgaggcggaagaccgcgcgcagggcctgcagcgggagctggacggcgagcgcgagcggcgcgagaaattgagccccatatgggggttggcaggcagca

SEQ ID NO: 501291 - DNA, 83 bp, Homo sapiens
tccttttcgaccttcaatccagttccaaggactccacgggaggaagaacttgtcgcttttcctaagcattagtttgttaattt

SEQ ID NO: 501292 - DNA, 100 bp, Homo sapiens
gcagagtgctgaagacggggtagccacgagattcaaccctatgaaaagataaaggccaggggcttgcctgataatatatcttccgtgttgaacaaactag

SEQ ID NO: 501293 - DNA, 124 bp, Homo sapiens
gtgctgagtcagtgtgacagtccatatgtaaccaaatattatggatcctatctgaaggcaaagccaaagctaattgagccactcgactatgaaaatgtcatcgtccagaagaagactcagatcc

SEQ ID NO: 501294 - DNA, 115 bp, Homo sapiens
taaagggaaggacaaggaattacataacatcaaacgtggtgttccttgcctgtatctccccttggttcaatagctaccagatttttggaagaggaggaactgaggtctcatcaca

SEQ ID NO: 501295 - DNA, 100 bp, Homo sapiens
cccttttttactccattcaagagcagcattcataaatttccaggtgtgagccactgcaccaggccccttcatcttaattttaatatatctttgaataaac

SEQ ID NO: 501296 - DNA, 50 bp, Homo sapiens
aacccctccgagacccagtccaaaagaatgctgtgaagatattaaggaaa

SEQ ID NO: 501297 - DNA, 100 bp, Homo sapiens
aatggacatcctgtgaaagcctttgttgactcaggtccaggccatcaacgtgtccagccgcttcgaggaggagatcaaggcagagcaggaggaaaggaag

SEQ ID NO: 501298 - DNA, 100 bp, Homo sapiens
cccattgcccccctcctcccctggctggagtgccctgcctggagggagccctcctggctgggggcaaggtttctactttccaggtccactggtgtttggt

SEQ ID NO: 501299 - DNA, 74 bp, Homo sapiens
tgctgcgggtcgctgactactgcgaggacaactatgtgcagcttggtgctaacagtggtttgcacatcatcatc

SEQ ID NO: 501300 - DNA, 83 bp, Homo sapiens
ccggcatcgtctttccgtcctctgaggcgacggccgcggctgcacagaaaagacttgatggaatctacatggatgcagcctga

SEQ ID NO: 501301 - DNA, 90 bp, Homo sapiens
gggagaagtggctgctctgcgcctcacggccagatcccagagacgagttgtactgctgtcacaggaaatggacgctggattacaagcatg

SEQ ID NO: 501302 - DNA, 75 bp, Homo sapiens
gttcagtatcgctacttcaaagggtactttttagaaccaaaggcatggaggagtgacggcaggaactttctgtgc

SEQ ID NO: 501303 - DNA, 103 bp, Homo sapiens
gaagattgctgcgctctttgatcttgaatattatgtccatcaggaattgaaagatgttggccatcgtgatcagatggctgcagctagaggaatcctgcagaag

SEQ ID NO: 501304 - DNA, 98 bp, Homo sapiens
tgctcttgaggttcacagatgatacctttgatccagaacttgcagcaacaatagaaggacagaataacgggctcccagattcacaagccccaccaaga

SEQ ID NO: 501305 - DNA, 98 bp, Homo sapiens
ttgcttatttattggcttaaggattaaggatccccaaagtctcagacttcaatttattgctaaacatgggtgcatttttggataaacccaaaactgaa

SEQ ID NO: 501306 - DNA, 100 bp, Homo sapiens
tgctgaggaggagccgaagcccaaaaagctgaaggtggaggcgccgcaagcgctgagaagtgatgagagcctatttacaacagctaaggcaagagactgg

SEQ ID NO: 501307 - DNA, 75 bp, Homo sapiens
tagcaaacgtccgcggcctctcaggcagttaatagtatcatatctatcgtttttggtactcgaagaattgcctgg

SEQ ID NO: 501308 - DNA, 95 bp, Homo sapiens
gtgttggctaccttgggacatcatcagactcctacaccaaatagtacagtggtattcatgggtagtttgaaatatccagatgagaatggatttga

SEQ ID NO: 501309 - DNA, 82 bp, Homo sapiens
tgatccagcaaggtcggcagagcaaggggcttacgcagaaggacctggccacgggacgcagaccaggacctggatggcagcg

SEQ ID NO: 501310 - DNA, 83 bp, Homo sapiens
cctgtcgtccgttctctcaggctcccgttcaggcccactgctcagtggagcgtggaggacgaggaggaggccgtccacgagca

SEQ ID NO: 501311 - DNA, 115 bp, Homo sapiens
gaacttcgttgcttgcttgcctgtgcgcgcgtgcgcggacatggcctcaaacggtgagaagccctaccactgcaactgggacggctgcggctggaagtttgcgcgctcagacgag

SEQ ID NO: 501312 - DNA, 82 bp, Homo sapiens
ggcctcggacgaggaggacgcgcccgccaccgacatctactttgtctcctctgagcctccggcctccataagacccaaaaca

SEQ ID NO: 501313 - DNA, 100 bp, Homo sapiens
gtggcccagagaccaagatcactgataagaaatgttctcgacagcaagctgttcgggggtcttgtctggattttggttgcctcctccaatgttcctctac

SEQ ID NO: 501314 - DNA, 100 bp, Homo sapiens
gctcccccacactgagggacagcaccacccagacaacagtgccttgtgttacccatgctggcttctgctgccctctggtggtcacgatgaggcccattcc

SEQ ID NO: 501315 - DNA, 90 bp, Homo sapiens
gggagggagccgcaggcgcagacccacccgccatgaagccccccgcagcctcctgctcttcatggatgaagcagacgccttccttcggaa

SEQ ID NO: 501316 - DNA, 50 bp, Homo sapiens
ctggcctcgcttctgtcccaatgagaaatattcgattatctgacttcact

SEQ ID NO: 501317 - DNA, 82 bp, Homo sapiens
ttccttgcagcctcttctccgggaacctatccgcttacggtacaagctgacattcaaccaaggtggacagcctttcagcgaa

SEQ ID NO: 501318 - DNA, 100 bp, Homo sapiens
agagtgctgttttagagctggcagcagcatctcagcccaagagaaggtatccagctcacatagaagacattgactacgaggaaggaaaagtactcatcca

SEQ ID NO: 501319 - DNA, 74 bp, Homo sapiens
gagactggagtcgaaggccgtgagcacccttacccttctgaagaacagaaaaagcagttggcacaagacacggg

SEQ ID NO: 501320 - DNA, 75 bp, Homo sapiens
ccaccccagtgcacctccctggcctggtctgctgatggccagagctggctttatgtgctggggcagaagagatcc

SEQ ID NO: 501321 - DNA, 73 bp, Homo sapiens
tgatgagaaatgagcccattgaaggcaaactctcactgtataggcaacagagccagattcttactctgtcacc

SEQ ID NO: 501322 - DNA, 116 bp, Homo sapiens
gcagaagtcgcgtgtctaggtgagtcgcggtgggtcctcgcttgcagttcagcgaccacggtgagaagccctaccactgcaactgggacggctgcggctggaagtttgcgcgctca

SEQ ID NO: 501323 - DNA, 101 bp, Homo sapiens
cctccacaaactccagtgacagcaggtcagacatggctgtgatgccacatgctggggtccgggacctggtgggtgccttcagacgctcctgcacagagcca

SEQ ID NO: 501324 - DNA, 100 bp, Homo sapiens
ctcccaatgcagcctggtctgaaactgctttaagaagcctctgaccctcttcagggtccctgatgctggatgaggggagctcatgcccaacacctgccaa

SEQ ID NO: 501325 - DNA, 100 bp, Homo sapiens
gagtattttggaccttcataataaattacgaagtcaggtgtatccaacagcctctaatatggagtatatggtttgggatgaaaatcttgcaaaatcggca

SEQ ID NO: 501326 - DNA, 87 bp, Homo sapiens
tctgcgatgtgaggaaaggcacctccaccaggaatagcgggttttgcagcaattgttgcatatggattatataaactgaagagcagg

SEQ ID NO: 501327 - DNA, 75 bp, Homo sapiens
aacgcctccaaaaagccaaactacagcgaactggacacacatacaggtgccagatgcaattaaaaagtgtcagag

SEQ ID NO: 501328 - DNA, 99 bp, Homo sapiens
caactattcgcagtccgagcgacaagttggatggcttgaggactggtactaaaaggaaacgtgactgggaggccattgccagcagaatggaggattatc

SEQ ID NO: 501329 - DNA, 75 bp, Homo sapiens
actcatcatggggctcctgtacaaggttcatctgcagaagccagcggacgcctctgttcaacttgtgggttacct

SEQ ID NO: 501330 - DNA, 75 bp, Homo sapiens
cagttccaaggactccacgggggaggtggggaagacagggctccagctaccacaggacgggctctgggtatagcc

SEQ ID NO: 501331 - DNA, 74 bp, Homo sapiens
tgatgatgccatcaccccattgctaaaccaggaagagagaagggcacagttacctaagtatcaacgtaatcttc

SEQ ID NO: 501332 - DNA, 75 bp, Homo sapiens
catgctgaccaccaatcagatccgtaaggaggcagtggagaaggtgacacagcacatccacggcctgtctgggaa

SEQ ID NO: 501333 - DNA, 100 bp, Homo sapiens
tctttgaagccatatgttggtttgtagccaaaaacttgctggaaaccctgaaaggttggatggcaagcatgtggtgtttggcaaagtgaaagaaggcatg

SEQ ID NO: 501334 - DNA, 82 bp, Homo sapiens
gtcaaagcaaccgaaaaggagagtttcctgtacgagctcaactggaggcagtcctgtgcggaaatctgaagaaaaaacagat

SEQ ID NO: 501335 - DNA, 95 bp, Homo sapiens
ggggctgcttctgaggaatcagcttgactgggacacaactcagatgggaagttcatcgcccgggcacagcggatagagtacgactgtgaactagt

SEQ ID NO: 501336 - DNA, 100 bp, Homo sapiens
ggaagcgatgccacgggagatggaaccaaggagaaaccatttaaaacaggtctaaagtgggctcgggatgagtttgaaggcctcttcaagcagccagcag

SEQ ID NO: 501337 - DNA, 75 bp, Homo sapiens
attctacctatggaaatccaggcagccaaggctatggacaagcatcacaagctgaatcttctccatttgttgagc

SEQ ID NO: 501338 - DNA, 100 bp, Homo sapiens
cgcggccgggctggcgatggaagatggaaggaaggagcgcagcgacaatgcagatcttcgtgaagactctgactggtaagaccatcaccctcgaggttga

SEQ ID NO: 501339 - DNA, 75 bp, Homo sapiens
cacctgcagctctgctgagagagtgcaagccgtggggaaaatggcaaatgcacgacagcggcctcctgaacatca

SEQ ID NO: 501340 - DNA, 100 bp, Homo sapiens
ggaaagagtgggaaagtgagggtatctcagatgaagacatcatcaacattactcttcctactggagtccccattcttctggaattggatgaaaacctgcg

SEQ ID NO: 501341 - DNA, 100 bp, Homo sapiens
gctgctgctgctgctcattttcatagtgctgtacaaggtgtttggagaagagggattgaccctgaatcttgaagacgttcagcctcatgacttaggaaaa

SEQ ID NO: 501342 - DNA, 75 bp, Homo sapiens
ccattgaagcttgagagaaaagcccccaaaagcagctattcaggtagtgggcagcagtcagtgacaggtgtaacc

SEQ ID NO: 501343 - DNA, 78 bp, Homo sapiens
tcacacagtggggacaacagcagtgagcaaggaaataatgcaaaaggtgtcccaaggctcctgaccagtgaacaaaga

SEQ ID NO: 501344 - DNA, 88 bp, Homo sapiens
gctggccgagcaggctgagcgatacgacgaatgacctggatgaccctgaaagaggaatgatttttgtctgctctgcaacccataaaac

SEQ ID NO: 501345 - DNA, 90 bp, Homo sapiens
ctttccatattctagcaatagcgaccaaagatgtgagaatttttacattaaagcctgtgaggctacgtgagcttttagcattagaagaaa

SEQ ID NO: 501346 - DNA, 75 bp, Homo sapiens
gtcgcgtttgcccattgaatcagctgaaaccaactggcattgctcgggtaccacttgctggagctgctggaggcc

SEQ ID NO: 501347 - DNA, 83 bp, Homo sapiens
tggggatggcgtgcagcgcaaccacgagacggccttccaagtgtgtttcctgtaacaaatcgttcaagaaactctggtccctt

SEQ ID NO: 501348 - DNA, 100 bp, Homo sapiens
gaatcagaatgccacagcagtcccaaatgggaaaaagattgccaggtggaggaagctaaacaagaattacaggaagttgttgaattcttgaaaaatccac

SEQ ID NO: 501349 - DNA, 100 bp, Homo sapiens
cacccatctccagccctaaaaccaatggcctatccaaggacatgagcagtttacacatctcacccaattcagtgatcagggccaaagcggtcagtgagaa

SEQ ID NO: 501350 - DNA, 100 bp, Homo sapiens
gtttgttcaggaaccaccagtgacagacatgttggcagataaattgaacatgactccagaagaagctgaaaggtggattgtaaatttgattagaaatgca

SEQ ID NO: 501351 - DNA, 100 bp, Homo sapiens
attgccatggtgaccagccagatgaactgtccttccaacggggtgacctcatccgtattctgagcaaggaattgaatgatctggcacgggaccctccagc

SEQ ID NO: 501352 - DNA, 100 bp, Homo sapiens
ggcgttgacgtaatttaggacgtggaatcataagcgaaacagcacactgtttgaataaagagcgagtcggatcaccacgatgaatgacacggtaactatc

SEQ ID NO: 501353 - DNA, 78 bp, Homo sapiens
ttggtatactacatggcaaaatgggaaagtggccaatccgccatggtatagttgaagattgggacttaatggaaaggt

SEQ ID NO: 501354 - DNA, 50 bp, Homo sapiens
cggcgatccggggtctgggcgcggcgagcgtcgtcccccagactacagta

SEQ ID NO: 501355 - DNA, 100 bp, Homo sapiens
cccatctggccgggcagtaccttcttcaagagaaatggagcccttctccaagacaggcaaatgtacactggggaccaccatgttcacgtgacatcaagag

SEQ ID NO: 501356 - DNA, 51 bp, Homo sapiens
cagagaacttgccggtgccagctgaggaaaatcctgccttgcttcgttggg

SEQ ID NO: 501357 - DNA, 99 bp, Homo sapiens
caagcagtacattgggccaccctctgcagcagccatcttcaaaatctacctctcttgtttggaagaactgatgaagggagacataagacatcagtcagt

SEQ ID NO: 501358 - DNA, 82 bp, Homo sapiens
ccagctgcgagtgcggcctcggctggcggcggcaccagggacccagacatggagctgcgggaagaagcctggtctccggggc

SEQ ID NO: 501359 - DNA, 100 bp, Homo sapiens
gtctgacgtcatcaggcttgttcaagacacaccggaggcgacggccatggccacagatatgaggccccaggattcctggcgaggtcctcctccccttttc

SEQ ID NO: 501360 - DNA, 75 bp, Homo sapiens
agaagatcgaaaattaaacctcagaagcggcaccatgtactacagacggctcatccctcccctttgtcagtgtat

SEQ ID NO: 501361 - DNA, 100 bp, Homo sapiens
ccttggtttcaaagtcccgcaggcgcagcccaccaaacccgcactcaagtcagaggagaaggtgaagtgcaccggtttagaacctctgacgtctctcaag

SEQ ID NO: 501362 - DNA, 51 bp, Homo sapiens
gcataggaggaaaattcatcatctgatctgactgcagccatgagcagcaat

SEQ ID NO: 501363 - DNA, 75 bp, Homo sapiens
gcaggggccagaagacaaagtcaattccatgaaagactaatatctcttgtatttggacttttaaaacaaagaaag

SEQ ID NO: 501364 - DNA, 75 bp, Homo sapiens
ttgtgctggacggcaccattgagtacatgcgagggtacaggtgaaagggggcagacccctcatcatgctttccag

SEQ ID NO: 501365 - DNA, 83 bp, Homo sapiens
cgacgagggggccgaaaccgagagatcatccagctgaccccggtgcctgtgagcacacccagcggcctggtgccgcccctgag

SEQ ID NO: 501366 - DNA, 90 bp, Homo sapiens
gccaggagagctgcgccggcgagaagcggccgagccagcagcagttggcaaacatgaattgactgggcataaagtagctgtgaagatact

SEQ ID NO: 501367 - DNA, 74 bp, Homo sapiens
gcgtccagggcagctagggcctgggccgcggttcggccgcgccggccgggtctggctctgtcacccaggctgga

SEQ ID NO: 501368 - DNA, 90 bp, Homo sapiens
cgaagatgggggatttctacgacccggagcacccgacccctgaaacgtgcgcatcgaccccagtagcctgtccttcaacatgtggaagga

SEQ ID NO: 501369 - DNA, 98 bp, Homo sapiens
tctctgagactgtctggggagctctccgagaactctactacgatcgcgggaaccaccatgagtttgtgtccctggtgaaggacctggcccggcctgga

SEQ ID NO: 501370 - DNA, 100 bp, Homo sapiens
tgctgctaaaaacaagactggggctgctcccatcattgatgtggtgcgatcggaaacccagcgtttgctggcagaaccagttcctggcatcaaagccgaa

SEQ ID NO: 501371 - DNA, 93 bp, Homo sapiens
acgaaggtactcgcagcacttggagcgcagaaccggccgcgcccgagatgtaacctagaagtcaagcggtaaaacaagctttgcaactatgtg

SEQ ID NO: 501372 - DNA, 100 bp, Homo sapiens
tgggttgatatatcttccaacactgccgggaagatggtggatgcttccaaaagcatcgaagctgtccatgaggacatccgcgtgctctctgaggacgcca

SEQ ID NO: 501373 - DNA, 97 bp, Homo sapiens
gagagcggacccagtggcctcggcgattatggacccggccgaggcggtgctgcaagagaaggcactcaagtttatgatcaatgaactgagccatgtt

SEQ ID NO: 501374 - DNA, 82 bp, Homo sapiens
ctggactgttctccccatggaagttcttcaagtttgcaatggattttggataaacaagatctgttgaaggagcgccaaaagg

SEQ ID NO: 501375 - DNA, 75 bp, Homo sapiens
tcctgcagaggagtcgtttccagcccggctggtacatccagacactgaaggaccacaggccccggatggtgtggg

SEQ ID NO: 501376 - DNA, 90 bp, Homo sapiens
ctcgtcagcactgactttcagctatggaatcgacccagtcatggcagcctccagcatcagttcaccatggggaaagcatgtgttcaaagc

SEQ ID NO: 501377 - DNA, 82 bp, Homo sapiens
gaacgaggcaaggagctaaagcagcgtgcgttcagccctgggagatcctgaaggagctagacgagtgctacgagcgcttcag

SEQ ID NO: 501378 - DNA, 100 bp, Homo sapiens
tactctgtaacacccagctaccaggctaccaagcagtttctcgaagagattaacaagtggacagttcagtacaatgtttccccgctgtcttggaatgtgg

SEQ ID NO: 501379 - DNA, 75 bp, Homo sapiens
gccttccagtacacagacgagcatggggaaggacacatccggatttcagacctcggtttggccacagagatccca

SEQ ID NO: 501380 - DNA, 82 bp, Homo sapiens
ctgggaccgggacctgctcctggacccggcctgggagaagcagcagagaaagagggtcaccatgaagttcaatcccttcgtt

SEQ ID NO: 501381 - DNA, 50 bp, Homo sapiens
atttttacgccaatacatctggtacaggggcaccctttggagaagaaccc

SEQ ID NO: 501382 - DNA, 75 bp, Homo sapiens
agctactgagtggcaacacaaagtgtgcgacgacccggaggagctgcgggggaaggtccgggagctggccagcgc

SEQ ID NO: 501383 - DNA, 97 bp, Homo sapiens
aggtggccctggagctgccggccagcaagtttctgtggttaaaggcacaggcagcctggcatcctcgctacaacctcattgttgtgggccgataccc

SEQ ID NO: 501384 - DNA, 90 bp, Homo sapiens
ggtgaacctccggagccttggcacagctcgcttctaaaggtgttgctggaagaagccaaggatttgctctctgactggctggattctaca

SEQ ID NO: 501385 - DNA, 90 bp, Homo sapiens
aagaagccttcagagaggaccttcataacagaggtaccaatcttgggaaaaagaagcaacacatttgtcatataccaggatgtggtaaag

SEQ ID NO: 501386 - DNA, 74 bp, Homo sapiens
ttcgaccctgcccagcacgaccagctcatgcaggtggacactgacaccatctggaatgagcttcattcctccaa

SEQ ID NO: 501387 - DNA, 100 bp, Homo sapiens
tggagctttgcagctgacctacatctcgaagatgtttgtatctgaaagcaaggagacggcatctggagatgtagacagcttctacaactttgctgatata

SEQ ID NO: 501388 - DNA, 90 bp, Homo sapiens
ccttattggagcaagggaaagaaccctggctggggaaaagggaagtgaaaagagatctgttttcagaaaggatctatgtttatgaaaata

SEQ ID NO: 501389 - DNA, 74 bp, Homo sapiens
atctcacacctttccaaaggacgcgaccataactctaaaagatagcccggagaccatcggcaggcgagtggctg

SEQ ID NO: 501390 - DNA, 83 bp, Homo sapiens
cgattggaggaaggacctccacacactaaaaactggagctcttggagcagtcggagtggcagccaacaaacgtggatgggaag

SEQ ID NO: 501391 - DNA, 80 bp, Homo sapiens
gctctttgaactttggatgctttattgtacaaagcgatgtgcattttgtaagcactttggagccactatcaaatgctgtg

SEQ ID NO: 501392 - DNA, 100 bp, Homo sapiens
ctgcgttgctcttgcttttcctcgctggggtgtacgaatgaagagcttcgaaacttgtctttgtctggccatgtgggatttgacagcctccctgaccagc

SEQ ID NO: 501393 - DNA, 99 bp, Homo sapiens
ttagtttagaagagatatataccaacaagaattataaatctcctcctgcaaacagtctgcagatctccaggggagcccaccagcctagtcaacatggcc

SEQ ID NO: 501394 - DNA, 100 bp, Homo sapiens
attcaggttagattctcagaatgcccagggatatgaatggatattcattgcatggtctccagatcattctcatataaagagaggcctgtccagtctttga

SEQ ID NO: 501395 - DNA, 74 bp, Homo sapiens
cttcttcaaaagcttggaaagcaacctttatttgggaatggatgatgaaggagatgatgacccagttcctctac

SEQ ID NO: 501396 - DNA, 75 bp, Homo sapiens
cggggagcggagccatggcctccgatatatttttgccatcatggatcagtttggagatatattagaaggtgaagt

SEQ ID NO: 501397 - DNA, 113 bp, Homo sapiens
tggaattctgcccactctgcggagttagcagtcacgacctccagcacaggttgtttacattcagagctctatcaataagaggaatacatattacagtgaattcgacaaccgca

SEQ ID NO: 501398 - DNA, 82 bp, Homo sapiens
tgccaagttgaaaatggacgagtaatcgcctgctttgattcattgaaagaactgtggctgcaccatctgtcttcatcttccc

SEQ ID NO: 501399 - DNA, 98 bp, Homo sapiens
agccagaccaggagctcaacctcatgtagaatccaggtccataattcagcagccaaatctttccctcgaaggtttgttttgcctttaaatgtcagttt

SEQ ID NO: 501400 - DNA, 97 bp, Homo sapiens
gttgctgtaattgaacgggtcgaggtgccaagcaagccacccgaggggactgcctggccttccagatgcgagctgggttgcttccctgagggccccc

SEQ ID NO: 501401 - DNA, 100 bp, Homo sapiens
ttccccatgatgatcctgccatgcaggcaggccctgagcacgctgctgtgtgagcagcaggtgcgctcccaggccctgctgttcatcaaacgcatgtatg

SEQ ID NO: 501402 - DNA, 75 bp, Homo sapiens
cctctccttttccctctccctttccctaagaataccgtagcagtaggcaggacagttccaattcaacaaaaacct

SEQ ID NO: 501403 - DNA, 118 bp, Homo sapiens
tgccgggagggggccctgagcctcctgcaacacctgcggcctcactgggacccccaggaggtgaccctgcaggtggatgatgaagacttacaagatgaacctttacagatcacagttc

SEQ ID NO: 501404 - DNA, 75 bp, Homo sapiens
ctcagaggtggtggattcgaatccctacagcgagtaaccagctcataaatcacatcgaacagtttttggatacta

SEQ ID NO: 501405 - DNA, 100 bp, Homo sapiens
ccggctagtacgcgaattggagaaaaagttcagtgggaagcatgtcgtctttatcgctcaggttaaatgggccagggaaaactatcaccataacattggc

SEQ ID NO: 501406 - DNA, 101 bp, Homo sapiens
gctgttctctcggattatgaaagtgcagaagactcggaagctctgacgcccgctctgcggcttcggtgtttgaacaggccacagtccaggagcgcttacat

SEQ ID NO: 501407 - DNA, 82 bp, Homo sapiens
accgcgcgcagggcctgcagcgggagctggacggcgagcgcgagcggcgcgagaaacctacagacctggtacctggattttt

SEQ ID NO: 501408 - DNA, 73 bp, Homo sapiens
aaaccgcctcgaaaacggagaagcaggaggaggaagccaagaatctggtgagcgaagccatcgcagctggcat

SEQ ID NO: 501409 - DNA, 83 bp, Homo sapiens
aaagactgttgtgaacagggatgtacctaatgcttataccagccagtttgtatcccttgtgatgtttgcccttatgatgtgtg

SEQ ID NO: 501410 - DNA, 82 bp, Homo sapiens
ccggaagatcggcagcggctccttcggagacatctatctcggttcaagaagacgtggaagctgcgggctctgaaggaaggca

SEQ ID NO: 501411 - DNA, 51 bp, Homo sapiens
cctacatttagcgcatcatgtgatccgggttcgatacaagaggctgttttc

SEQ ID NO: 501412 - DNA, 75 bp, Homo sapiens
ctgacagatgtccagtactactggggagcccatcatggcgacgccccctaagcggcgggcggtggaggccacggg

SEQ ID NO: 501413 - DNA, 135 bp, Homo sapiens
gagaattacacggccagttttgaaatcgacacacaaagaatagagttgagcctgtgggacacttcgggtttggtgcacctcgatttggaggaagtagggcagggcccttatctggaaagaagtttggaaaccctg

SEQ ID NO: 501414 - DNA, 96 bp, Homo sapiens
agaacccagaaaattgatcagttctaaaaaaccatgccccacacacgtgctcccgagtcagaagggccttgcactggagccagggatgctgttaag

SEQ ID NO: 501415 - DNA, 100 bp, Homo sapiens
cagcaatcagctggcctggtttgatactgacctgtaaatcatcctttaggcatctggtgtcgaaggctcagatattcctgatgatggtaaactgatagga

SEQ ID NO: 501416 - DNA, 95 bp, Homo sapiens
caaaggcggctcgggagattcagccgtgaagcaagtgcagatagatggccttctcagccagacgtccaggatcccaccccttgcaaaagaccagg

SEQ ID NO: 501417 - DNA, 90 bp, Homo sapiens
ccggccttcttcccgctggccgccatctgctgcagactggagcctgagagcagcttctccaaacaggctggtgtacagggagcaacaccg

SEQ ID NO: 501418 - DNA, 82 bp, Homo sapiens
tgtggaaaggagattgacagtcacaattttgtaataagggaagaggaagaacgtctgagaaataaaattcgagctgatcatg

SEQ ID NO: 501419 - DNA, 89 bp, Homo sapiens
aagaaaaatatcaccaagtgtccctgttttataatgagcttcattatgtggaaaaagctgctgcagaggagaaggcagagcccccccag

SEQ ID NO: 501420 - DNA, 100 bp, Homo sapiens
ctcctccctgccagatagctcttattttgaggagagacagcgtctggagaccatcctcagtctctgtgctgaatacacaaagcctgacagtcgcttatct

SEQ ID NO: 501421 - DNA, 96 bp, Homo sapiens
gggcgccggatgtgacgtttccggaacctccgggtgtcatccgcggggaaaggtacctgtcccttggagaacatgaccggaagcgcctggaagatg

SEQ ID NO: 501422 - DNA, 75 bp, Homo sapiens
gggaaggagggcgtccgagtcaacaaccgcttcgagctgattggagacccacagttggtgatctgtatggactgc

SEQ ID NO: 501423 - DNA, 50 bp, Homo sapiens
gcctacccgggatacggaggagggggaataaccagcaagtacctgtcaag

SEQ ID NO: 501424 - DNA, 83 bp, Homo sapiens
tttgcaccagtgacgcagccgctgcatctccgccagtccgcgcagttgttgacctcctgtactggagagacattaagaagact

SEQ ID NO: 501425 - DNA, 82 bp, Homo sapiens
gagaggatctggtgtaccaggcgaagctggccgagcaggctgagcgatacgacgtcccaggggcagccactggcctcccagc

SEQ ID NO: 501426 - DNA, 87 bp, Homo sapiens
aaagacacacctaccaagaagccagtcaagcggccaggtcctgactttttggaatgcccttcttcctccttggctggcaatcaatct

SEQ ID NO: 501427 - DNA, 50 bp, Homo sapiens
gggagaccttgggcatcatcggacttgggggggccctcagcctcttggcc

SEQ ID NO: 501428 - DNA, 100 bp, Homo sapiens
cccacaggtgctaaagagagcagtaccctgatggagtcccttgcaggtgaggcggaaccaaccctcctggccatgggaggggccgtggtggacgagggcc

SEQ ID NO: 501429 - DNA, 85 bp, Homo sapiens
gaccaccgaagactgcatcgccaagatcatggttctggggctgctggtatggacgcttattgctggaactgagtacttccgggtc

SEQ ID NO: 501430 - DNA, 97 bp, Homo sapiens
gccccggacaggaggcagtgccgcttcggccgaaggcccgagcgcccgaggcgtctgggatggtgtgggaccgggtgtcatggagaaactccagctg

SEQ ID NO: 501431 - DNA, 82 bp, Homo sapiens
gaaaaggaatcgtatcgtatgtccgctatccagaacctccactctttcggtgaccagcgccatgtccagccaggtggtgggc

SEQ ID NO: 501432 - DNA, 100 bp, Homo sapiens
cagcagctctcgctccagaagcttcactttgggttatgtggtccgaatcagtggtgggaacgacaaacaaggtttccccatgaagcagggtgtcttgacc

SEQ ID NO: 501433 - DNA, 75 bp, Homo sapiens
agtctggccttagcacatgcagatgagaagtccttaggtattcatccaagagaaatgaaaatatgcatcacaaaa

SEQ ID NO: 501434 - DNA, 100 bp, Homo sapiens
ctgggctgcagtgaccccgctttcctcacgcccagtgttcagcctgcaggacctctgctgccgggccatcgtctcctgcacccccgtgcacctcatcgac

SEQ ID NO: 501435 - DNA, 90 bp, Homo sapiens
tccccctctccgccccccaggaggggcgagagggagccgcagctgatgtcaggtagcagcagcagcagcagcagcagcagcagcagcagc

SEQ ID NO: 501436 - DNA, 89 bp, Homo sapiens
attcgcagtggtcgcttcttctccttggatgtacgaagtaggtccaaagttgttgaccgtatttacagtctctacaaacttacagctca

SEQ ID NO: 501437 - DNA, 51 bp, Homo sapiens
gcctgggggaccagaagcaagagctgattgggcagaaagtggcccatgctc

SEQ ID NO: 501438 - DNA, 74 bp, Homo sapiens
ctactttgaccctttgatcaacccaatctcccataggcactcagtcaaggatctcaaagatttcatgagacaag

SEQ ID NO: 501439 - DNA, 90 bp, Homo sapiens
gaaccgcagtatcatgctggccaagaagatcatcattaaggacggaggcacgcttaggcttgatttccgactcttttcacatgtttttcg

SEQ ID NO: 501440 - DNA, 100 bp, Homo sapiens
ttttgtgaatatggtggaaaaaggaatcattgacccaacaaaggttgtgagaacccaaagccaagcctcacagatctcgtggttctggaacacgggctgt

SEQ ID NO: 501441 - DNA, 75 bp, Homo sapiens
catcttccaccacagcttagagtcaagtctctatttatgaggtggacaagcaagattgtcgcaaattttgcacta

SEQ ID NO: 501442 - DNA, 98 bp, Homo sapiens
gaacatccgagggtgcctgggaatcggtcgcctggaggaccagtatttcccatggagggtaactgtgacatttgatgatgtggccttatatttttcgg

SEQ ID NO: 501443 - DNA, 90 bp, Homo sapiens
ttgtcgtgcccatgtcgactggttcaccaacatcagacatttggcgtgctcagaggtgcccagctaagacctgaatgccatcaccctccc

SEQ ID NO: 501444 - DNA, 89 bp, Homo sapiens
ccggcgtgccccaccatgtcagacgcagccgtagacaccagctccgaaatcaccaccaaggagggctccccgaggactttctgaactcc

SEQ ID NO: 501445 - DNA, 82 bp, Homo sapiens
cgacatctggcacttcctctcctccatcgccatgttcgggtccttcctgggagtaccctgacttctaccggaagctctacgg

SEQ ID NO: 501446 - DNA, 83 bp, Homo sapiens
gcgttgcgtgccctacttcaaggataagggcgacagcaacagctctgccggctggaagtatacagaagatgaagctaggaaaa

SEQ ID NO: 501447 - DNA, 89 bp, Homo sapiens
cggacggaggagtcttctgccgtgcagtacttccaggcgaccacctccatcggctcccgcacgacctttcttctgagcttcgtgggagg

SEQ ID NO: 501448 - DNA, 74 bp, Homo sapiens
gctcttctcccaaacgggtcgaggtcccagctgaggctctcccaggacaagaggcagcagttggggacagctgt

SEQ ID NO: 501449 - DNA, 75 bp, Homo sapiens
gccaagaacaggaaacggaccaatgtctgtagactaagaaagcactgtgcatcaccttgaccctggggaccttcc

SEQ ID NO: 501450 - DNA, 100 bp, Homo sapiens
gcagccgcagaggaggagcgcagcccggcctcgccatccgcagagccatcctgtgcaaaggaaggagctaggctgtgcgccctgggcgtcatgatccttc

SEQ ID NO: 501451 - DNA, 90 bp, Homo sapiens
gtgcaagatgagaacaacaaaggtctacaaactcgtcatccacaagaagggctttgggggcagtgtccttcagtgaatctacagacctat

SEQ ID NO: 501452 - DNA, 100 bp, Homo sapiens
acagccattatttctcaccccttacattgaagctgggaagatccaaaaagggcttttttccagacttcaagctcccattccaacagtaagagcttcttcc

SEQ ID NO: 501453 - DNA, 100 bp, Homo sapiens
ccttggcaagagcagtgcctagaaagcgtgagtgcatctccatccacgttggccaggctggtgtccagattggcaatgcctgctgggagctctactgcct

SEQ ID NO: 501454 - DNA, 75 bp, Homo sapiens
ccagtcatgaccactagacccacagctgttaaagcaacagccaaggccacctttgatgccatttctaagacctac

SEQ ID NO: 501455 - DNA, 75 bp, Homo sapiens
ttgactttgattcaattaacagcagaccgagtcaaaagcttcacttctcggacaaactatttagtggaaaaggct

SEQ ID NO: 501456 - DNA, 50 bp, Homo sapiens
ctactctgcctcggggacgaaagcagttaacaagcacaagccctggctgg

SEQ ID NO: 501457 - DNA, 89 bp, Homo sapiens
acctggatccaggataacggaggctgggtgttgacttcaaaatcaaaactgtagagctaagaggaaagaaaattagattacagatctgg

SEQ ID NO: 501458 - DNA, 82 bp, Homo sapiens
caactttcttcttttcttcattcatgaaaatgcagatccactgagaaagggaataaggtgctggagaatctggtaaaagcac

SEQ ID NO: 501459 - DNA, 100 bp, Homo sapiens
gaaattccacccagtatttcaagagtcacttctttacttggtgcaggaaggcagtctttgctacgtacagcaaaaggtttccaaggtgctattgggagct

SEQ ID NO: 501460 - DNA, 60 bp, Homo sapiens
ggaaaatcatattatagatggagtaaagattgaccccaaagttgcatttcctcgtcgagc

SEQ ID NO: 501461 - DNA, 82 bp, Homo sapiens
cggaggagaccctttgaaggtcccttgtggggactggaaagaggacggaactgtggctgcaccatctgtcttcatcttcccg

SEQ ID NO: 501462 - DNA, 90 bp, Homo sapiens
gctgttttggaactgtcaggtacctcaaagcgataacaaagccattgacctttgccgattgtgttggggacgaacttcctttaggatggg

SEQ ID NO: 501463 - DNA, 75 bp, Homo sapiens
ttgtgttcgatatatacagagacagtaggcaaaagcgaaagcttcggatctacatttccaatacgttcagtccca

SEQ ID NO: 501464 - DNA, 100 bp, Homo sapiens
cagctacttaagcgccacgagaaggtctatgttaacaatgaatgggcaaccagtgttggggaaggagggagctttggagaacttgctttgatttatggaa

SEQ ID NO: 501465 - DNA, 90 bp, Homo sapiens
ttatggcatgtggctggtaactttcctcctgctcctggactctttacacaaagccagaaggtcagtttgaaagatcgtgtcttctccagc

SEQ ID NO: 501466 - DNA, 101 bp, Homo sapiens
tccagactcggtgctgtacccgccgtagatatagttgtaggtactccgggaagactagatgacttggtgtcaactggaaagctgaacttatctcaagttag

SEQ ID NO: 501467 - DNA, 83 bp, Homo sapiens
ccttccccacgcaaccccagatccatttacactttacagtcttgggcgtctttggtactggcttttttaggggtctgcctggg

SEQ ID NO: 501468 - DNA, 100 bp, Homo sapiens
ttggcttcgggctgagctagcagtgagcaccttttggcccaatgaatatcagattttaggtgatgggcaagtcagaaagtcagatggatataactgatat

SEQ ID NO: 501469 - DNA, 82 bp, Homo sapiens
tgggtccgcgactccttggcgtccccgggccgcagctgcgaagcgccaagaaccagaaccagaacagccacccagaccagag

SEQ ID NO: 501470 - DNA, 75 bp, Homo sapiens
aagcttgcaactgaactccctgatgctgaacttaggaggactttatggctgggaacttctccacttcatctagca

SEQ ID NO: 501471 - DNA, 87 bp, Homo sapiens
tggttagtgtgctctgagggagggtccgagccagccgctgttttgccggaggagcccctcaggcccctccaccaggcggtgtgaaga

SEQ ID NO: 501472 - DNA, 100 bp, Homo sapiens
catttaaaccaccctcaggaaaagtggcagtggatgatagtgagtctttctctaatacacagaattctaggaaggaggctgttcttttagccaaaatgaa

SEQ ID NO: 501473 - DNA, 101 bp, Homo sapiens
gtgtgtacgtggtgggggcttcctcggtggcgggcatggaggcttcgcgctgccggctcagtcccagcggcgacaggttgctaggaagaggctcaatgttt

SEQ ID NO: 501474 - DNA, 97 bp, Homo sapiens
cccaaagctgcagctgggaagtggcagacgctccaccctgggcccaagacaagagctgctgctggattatatctgtccaagatgcgagtctggtttt

SEQ ID NO: 501475 - DNA, 82 bp, Homo sapiens
ctagagcactgtgtgtctccccggacgcgagcccgctcccctgaatgccatggacaatattaccaggcagaaccaattctac

SEQ ID NO: 501476 - DNA, 83 bp, Homo sapiens
tgcctgagctgaagggctgcctgggtgttagcaaagaagtttgcctgagaatacagatcaacccacagaacaaagcggatttc

SEQ ID NO: 501477 - DNA, 83 bp, Homo sapiens
ggggaggcgacgctaagttgctgatcgtggcggtgagaagccctaccactgcaactgggacggctgcggctggaagtttgcgc

SEQ ID NO: 501478 - DNA, 75 bp, Homo sapiens
cagggagctcacatttctcatattgctcaacagggccctgagcaccccaatcccggaaagccgttcactgccaga

SEQ ID NO: 501479 - DNA, 100 bp, Homo sapiens
ttttcctggctaactggggaggtgccagggctgaaccagggtctccgtctctccaccgggggcttcatccttccagggaggagaagagggactccagaat

SEQ ID NO: 501480 - DNA, 100 bp, Homo sapiens
cagacggggcagcaaccaggagattccctgggcctgcaggaagcccttccgcggaccgaaagggcagcaaggagcgcttccactggcagagccacaacgt

SEQ ID NO: 501481 - DNA, 75 bp, Homo sapiens
aagaccatgctggcaagtctgaaggtcaacatcacaggacatggccccctcagccacctagctggggcccatcta

SEQ ID NO: 501482 - DNA, 75 bp, Homo sapiens
gttagcccgtcagtccctgctctgtgcgcgcctccatctgggccatggatgggagggtgtgaagacagagaatga

SEQ ID NO: 501483 - DNA, 90 bp, Homo sapiens
cggagaggagcatgaatggagcaaaatggcggatcatgtgcaggaatctttgtgacattctctctcagcattctttatcccctgtttgct

SEQ ID NO: 501484 - DNA, 82 bp, Homo sapiens
ccgcgagcacagagcctcgcctttgccgatccgccgcccgtccacacccgccgccaggtcagctccgccgaaggcgccgcca

SEQ ID NO: 501485 - DNA, 90 bp, Homo sapiens
gagtatgcgctgaagcaggaaagaaaaatggctacaaacttcctagcacatgagaagatctggttcgacaagttcaaatatgacgacgca

SEQ ID NO: 501486 - DNA, 100 bp, Homo sapiens
cgaagttggaagtgtctcttagcagcgcgcggagaagaacggggagccaggcgttggagaccagggccagccctggccacaccccaggctgtgtcacctt

SEQ ID NO: 501487 - DNA, 83 bp, Homo sapiens
cacagggtccccaactaccggcggctggagacgcagagagacaatgcagatcttcgtgaagactctgactggtaagaccatca

SEQ ID NO: 501488 - DNA, 101 bp, Homo sapiens
aggcaaacagggaaactgaggaccagagaggatgtgttcagagcaacattgttttgttgacacaagcatttagaagaaagtttgtgattcctgactttatg

SEQ ID NO: 501489 - DNA, 85 bp, Homo sapiens
gcccctaaaatgtcgagatttgtacaaggatgagactgtgatgcctggatgtacagccatctgttgaccataatactgaaagcca

SEQ ID NO: 501490 - DNA, 101 bp, Homo sapiens
gtgcaatcaagatagttgactttggcagttcttgtcagttggggcagaggtgtgaagagtggccagattcgaaatctggagtctgcccgtgtctcaatggt

SEQ ID NO: 501491 - DNA, 100 bp, Homo sapiens
ccctgatgagctcctgtttagccactgcagaataaggaagaagtgatggctgtgaggcttcgggaagcagatagcatagctgctgtggctgaactacgac

SEQ ID NO: 501492 - DNA, 75 bp, Homo sapiens
tgccctgtctcctcgcagatgagatggcccactgcgtgaccttggttcagctgtccatttcctgtgaccatctca

SEQ ID NO: 501493 - DNA, 73 bp, Homo sapiens
cgggccgcacccgccgagccgtagttttgcggcctccaggtggtggatccaatttttcattaggttttgatga

SEQ ID NO: 501494 - DNA, 100 bp, Homo sapiens
ccccaccatcccaccaaagggggctgctgaccgagagagctcactcagccagtttacagttcccatctcacagtgaggatgaaatgagatcagagcacct

SEQ ID NO: 501495 - DNA, 100 bp, Homo sapiens
aactcctctcttgtgcagattgtggcagtagtggttttctgtctcaactggtctctgacaagcctctgactgaatgtatccgtgctggccactatgcagc

SEQ ID NO: 501496 - DNA, 82 bp, Homo sapiens
aaggaatcatcgaggcatgggggtccacactgcaatgtttttgtggaacatgacgttatgacagtgttataaatcgactgta

SEQ ID NO: 501497 - DNA, 100 bp, Homo sapiens
ccagaagatgggtatagcactgttacattaaatgcaaaggaaggatgaactggagcagaggatgtcggccctgcaggagagcaggcgggagctgatggtc

SEQ ID NO: 501498 - DNA, 100 bp, Homo sapiens
gctgctgaagcaaacaaaaacgccagcattttgttagaggagttagacttggaaaagaacattaaccaggtggtatttgttggaaatttcttgagaatta

SEQ ID NO: 501499 - DNA, 100 bp, Homo sapiens
ggtgacagtctgcatgtgcagttttcaggccagaggcattgatgtgcagcaggtttctttagtcatcaactatgaccttcccaccaacagggaaaactat

SEQ ID NO: 501500 - DNA, 74 bp, Homo sapiens
ataaatcatgcgttttcatcctcagaagcaggagacccggtgagcctccattgataaaaggttggcttccttat

SEQ ID NO: 501501 - DNA, 73 bp, Homo sapiens
acataaagaaaaatataaatgcatacttccccttgtgacaagtggggatgagaaccttccagtctgggaacag

SEQ ID NO: 501502 - DNA, 100 bp, Homo sapiens
tgaagaagatgaagatgaggatgaggatgaagcctccacaaatgggaagtgttcctgtaatgacgcaaccaaccttaatatacagccagcctgtcatgag

SEQ ID NO: 501503 - DNA, 98 bp, Homo sapiens
gttttacattggctgttttcctcacattcctcaagcagggagactgccagactcgggaggaggcagtggcgctcggcgtgggtctgtgcaacaatggc

SEQ ID NO: 501504 - DNA, 83 bp, Homo sapiens
tatgtctgttccaactcccatctatcagactagcagcggacagtacagacttggatgttgtgggtgatggtatgcagtgtcct

SEQ ID NO: 501505 - DNA, 100 bp, Homo sapiens
agaagctctttgtgtatgaccttcacgcagtcaagaacgacttccagggaattgacataggggatagcttaactattccagatgaattcacggaagacga

SEQ ID NO: 501506 - DNA, 95 bp, Homo sapiens
gaacattctcgaatacctagaatggggctaggcagctggaagagaaagaccgagtgctaaagaagcaggatgcattctacaaagaacagctggct

SEQ ID NO: 501507 - DNA, 75 bp, Homo sapiens
cgcggtccccgccagcgccccatcctgagccgacccaacatgagtgaagtttcctgcaagaaacgggacgactat

SEQ ID NO: 501508 - DNA, 72 bp, Homo sapiens
cgagttcaacatcctcctggccaccgactcctacaagaatttctctgcaaagaatgtccaaaaattcatatt

SEQ ID NO: 501509 - DNA, 105 bp, Homo sapiens
ggacaaccaagcattttcatgaaacaaccccaaataaaggaagtggaaccacttcagatcactccaagaactgaggcccctgtcagcagtgtcagtaatagtttg

SEQ ID NO: 501510 - DNA, 50 bp, Homo sapiens
ggacagccagccagcagcaggagggtgagccctattcccagaggcaggtg

SEQ ID NO: 501511 - DNA, 100 bp, Homo sapiens
cttctgggacgcacagagaccgtgaagattccaagttcaggagaactcgaccggaatttatcatggcatccagcattgaccactacaagtaaaatgcgaa

SEQ ID NO: 501512 - DNA, 71 bp, Homo sapiens
taaccctgccctggagttcatcaaatacgtgtgcaaggaaaggatccaggccctggaggcggagctgcagg

SEQ ID NO: 501513 - DNA, 50 bp, Homo sapiens
taaatttggtcaacaaaatccacgtcagtactgtaagattgatgttaaag

SEQ ID NO: 501514 - DNA, 83 bp, Homo sapiens
aactctttgggtgctgctataggctcagccctcagtggatttggttcatcagtaatctatgccagcaattatgacaatgttag

SEQ ID NO: 501515 - DNA, 90 bp, Homo sapiens
atccagactgaggaagacccggaaacttaggggccacgtgagccacggccacggccgcataggtgcgggagtatgagttaagaaaaaaca

SEQ ID NO: 501516 - DNA, 75 bp, Homo sapiens
cttccttataggcgtcagcgggggaacagctagcggcaagatcactgtgtccactactatgatcttcgtaacact

SEQ ID NO: 501517 - DNA, 75 bp, Homo sapiens
ttcttacgacagggagcccagaagtgtatgtggtagaagaccaaagaagagatgagctaggaccatccacctgcc

SEQ ID NO: 501518 - DNA, 73 bp, Homo sapiens
aagcttgcaaatcagaattcaagccgcagctgtggcccctctggtgaatctgattaacgagcccctggtgata

SEQ ID NO: 501519 - DNA, 93 bp, Homo sapiens
cgctcatgatcgacttcctcacccgcgcctgcgacctcgggagcatttcctgaagacgtagtcatgcagcacgtcagcagctcccagagcagc

SEQ ID NO: 501520 - DNA, 83 bp, Homo sapiens
gacctcttcaccaactacatctcactctacaacacgtgtatgaagggcctcctttctggggcctggtgaatgcagcgtggagt

SEQ ID NO: 501521 - DNA, 82 bp, Homo sapiens
gatcggcgagggaggacagggggttcatcatgggaggaatcggagaagcagctctgtctgattgaggcgcagaccatggagg

SEQ ID NO: 501522 - DNA, 100 bp, Homo sapiens
caagccagccatcctgggaccccaggcgtgcaggttctctttgagggcagcaaagctggccaagatgaagattccccccagtgagatgttcttgtcagaa

SEQ ID NO: 501523 - DNA, 96 bp, Homo sapiens
gctctcgtcagcctcccgccggccgtctccttaacaccgaacaccgtgagacatggaatccattaaaattgcattatcagttaagaaatgtacggg

SEQ ID NO: 501524 - DNA, 96 bp, Homo sapiens
ctggagaggaccaacaaattcatcaaagacgtaatcaaagacggcaacgcgcttatcagcgctatgagaagctacagatgcacatgttgaatggag

SEQ ID NO: 501525 - DNA, 100 bp, Homo sapiens
tgctgttgtgaaccttttgccctggtgggattattgactgactgcattgcacagatgatggatatttacgtatgtttgaaacgaccatcctggatggtgg

SEQ ID NO: 501526 - DNA, 75 bp, Homo sapiens
ctcccctctcaggacaacccagatgtgcaacaaagtgcgatgtgacaaagcataaatcatggacaccagagaata

SEQ ID NO: 501527 - DNA, 51 bp, Homo sapiens
aggatcattgaagagaacatccctgagatggtcagtaggacagaaggtaac

SEQ ID NO: 501528 - DNA, 101 bp, Homo sapiens
gatgttggtgagcgtggggaatctggaagaggctggggagtctgtgtccttccagctgcagatacggagtttcgcgatcccgagtacggggaatggtttgg

SEQ ID NO: 501529 - DNA, 100 bp, Homo sapiens
ctcgacatttccacacccagacccaaagtttgcaacaatcagtcagtagaatcctgcttatctgtgaaatgcagttaacacatcagctggacctatttcc

SEQ ID NO: 501530 - DNA, 83 bp, Homo sapiens
ccgatcggaaaacttcgaggaattgctcaaagtgctggaacctgacttccatgcggttgaaccctacacgaagaaagaacttt

SEQ ID NO: 501531 - DNA, 100 bp, Homo sapiens
cttcaaagacattattaagccgtattgcagaaaacctacccaaacagcttgctatctgtacccccgatttggtggtattcctggcttgtgctaatcagag

SEQ ID NO: 501532 - DNA, 100 bp, Homo sapiens
ggataccagcactgtaccccaggatgctgccaccatccccagctcagccatgcaggccccaacagatctgcattaccgttggaaaacagcagcctcagaa

SEQ ID NO: 501533 - DNA, 90 bp, Homo sapiens
ctgagagccaaccagtacaaagagaaccacaaccgaactcagcagcaggtagaagcagaggacacaactcagatgggaagttcatcgccc

SEQ ID NO: 501534 - DNA, 75 bp, Homo sapiens
aacatggctagagactgccgggactggtcagatgaacccatcaaagagtgcgctgttaaagaatcattgactaca

SEQ ID NO: 501535 - DNA, 75 bp, Homo sapiens
aacaatttctcctgctctgcagcttctgttcagtctgaaaacttagagaatacagtaatcataccagatatcaaa

SEQ ID NO: 501536 - DNA, 74 bp, Homo sapiens
gccgaggtgggaggatcacctgagaaaaatagtagtctagtcattcaagtgaaaggtccaagaaaggaagaaag

SEQ ID NO: 501537 - DNA, 98 bp, Homo sapiens
cgagctgtgcgaggtgatcggaaagtgtggtttcagaaccgaagagccaagttccgcaggaatgagagagccatgctagccaataaaaacgcttccct

SEQ ID NO: 501538 - DNA, 101 bp, Homo sapiens
tgaatggtttgaagtaaatagatcttgccctgagcacccttcagattaagcgtcagcttcctgttttataggaactttatattgctgttggaatatctgga

SEQ ID NO: 501539 - DNA, 100 bp, Homo sapiens
ccgtctggtacgtccccgaggtgacggggactcataaggtggtaaataaagatgtcctggacgtttacattgagcatcggctaatgatggagcagcggag

SEQ ID NO: 501540 - DNA, 100 bp, Homo sapiens
caaatagaaaatttgtagacccgtctgcagccctggatctattaaagggagcattccgatcatctgaggaacagcagaaccctcggcctcaggaaagtcg

SEQ ID NO: 501541 - DNA, 51 bp, Homo sapiens
cggacatgatcctctccgcctctcgagtgtactaatggtcacttgatgtgc

SEQ ID NO: 501542 - DNA, 90 bp, Homo sapiens
aggagcagtagatgatgatgtagcagaaggcgggtgccccggtgatgactggtgcgggagagagcaccaatcccgagaacagcgagctca

SEQ ID NO: 501543 - DNA, 100 bp, Homo sapiens
catgcggttcgggtccaagatgatgccgtgaacagagtatctgtcaggcaagagctgctgtgatggtttatgatgatgccaataagaagtgggtgccagc

SEQ ID NO: 501544 - DNA, 83 bp, Homo sapiens
gagtggcaccatggacctgcccttccagggcgtctctggccgagcctctttttgtggaaaacgacagcagcagcagtggcctg

SEQ ID NO: 501545 - DNA, 75 bp, Homo sapiens
tcattggtgacacagtgcttgtggatgaggattcctgccagctcccaggggctttggttatagaagtgaagtgga

SEQ ID NO: 501546 - DNA, 121 bp, Homo sapiens
aaggaacacccaggtgaacaattaggtcctccacaatgaagacaggtaatgtggaggaaagagagcttgtcatgcctgagttctaccaagtatgccacaccaaaaaggattatgaagaaat

SEQ ID NO: 501547 - DNA, 95 bp, Homo sapiens
gtgcttctcgaaaaaaaccttcaggcggcccatggagtcttgctatggagatacacttcaattcctacttcagtggaagagtcgggaaagaaaga

SEQ ID NO: 501548 - DNA, 100 bp, Homo sapiens
ggacgctatgctggaagaatttaagaaagagaacaccttctgcagtggggaccatgtgtcctggcacagccctttggataacagtgagtcaagaattcag

SEQ ID NO: 501549 - DNA, 73 bp, Homo sapiens
tgcctcaggtttatttgtacaaatagcacaggaggaccctgagcaactgccagagcttgaggcccatggagtt

SEQ ID NO: 501550 - DNA, 78 bp, Homo sapiens
ggtcacacagtgactgtctggaaccgcactgcagagaaaccggagcggttgcagggcacacattactcggtgcagtcg

SEQ ID NO: 501551 - DNA, 50 bp, Homo sapiens
cgccgctctccagcccgcttgaacggacgagattgaggagctgcgggccg

SEQ ID NO: 501552 - DNA, 90 bp, Homo sapiens
ctttcggggatgcagctggccaagctgatccgacagagaaagggaatccctggagatagagaaagtcaggctgtggttgacccccctcaa

SEQ ID NO: 501553 - DNA, 110 bp, Homo sapiens
gtcaaaaaacatttgatttttggaaggatatagttgctgctatacaacacaattataaaatgtcagcttttaaggaacctaatccaccaatagatcaagttatacagaaa

SEQ ID NO: 501554 - DNA, 101 bp, Homo sapiens
cacaaactttgcacaacaaaatgtttgagtcaattctgaaagctccggtattattctttgatagaaatccaatagctgagaaatttcttgaatctgttgaa

SEQ ID NO: 501555 - DNA, 100 bp, Homo sapiens
aagagaaaatagcaaacgatccagacggcagggagtgcatcaaaggtgtgaacacaggtatatttgcgtgctctcgtgagaaatctttttaatgaaggaa

SEQ ID NO: 501556 - DNA, 90 bp, Homo sapiens
ggggttggcctaggcgaagatccggactctgggtgttttgctaccgtgaccgtttaggtcctaaagagcaagcctaactcaagccattgg

SEQ ID NO: 501557 - DNA, 98 bp, Homo sapiens
cgacttcccctaaagccaggcgtgtatctgcgcgtgtgaggtgctctgccgcaaccctatgcagagagcaggccggatcacctcaacagtcacgtcag

SEQ ID NO: 501558 - DNA, 100 bp, Homo sapiens
agtccggagctgaaaaaggatcctgactgaaagctagaggcattgaggagcctgaagattctcagccttggaatggatggctttggccaaccagttggca

SEQ ID NO: 501559 - DNA, 78 bp, Homo sapiens
gacgcgcagtccatctctctcagtgaaaccagcagtgtgtgtagcagcagtgacactgggctctttaccaatgatgaa

SEQ ID NO: 501560 - DNA, 98 bp, Homo sapiens
gttcctccccgggcccctgagccatgcccatcgcagccgccccgaaggagccagaaccctggggttattagtaaaacgattggagaaaggtggtaaag

SEQ ID NO: 501561 - DNA, 83 bp, Homo sapiens
ctggagactcgcaacaagatcccctatgagagtcccatcttcagcagaggacacacacctcctctacgtactggcagctgcca

SEQ ID NO: 501562 - DNA, 100 bp, Homo sapiens
tgcagaccctgccaacctggattctgaggccaaggtggcgggacaggcttcattgggacagccctaacccagctgctgaatgccagaggccacgaagtga

SEQ ID NO: 501563 - DNA, 100 bp, Homo sapiens
cagcctgaacggagtgtgcgacggattgggaggttgcacttcccccagctggccctgaggcggaggctggggcagctgagctgcatgtccagacccgctc

SEQ ID NO: 501564 - DNA, 98 bp, Homo sapiens
ctacaatctaagaaggatttcagcaaatttggagcagggtaggagcaacggtgggaatgccctctgaggaatgcagtgatgtccatcagtcacctctc

SEQ ID NO: 501565 - DNA, 90 bp, Homo sapiens
cccaagacagggatcagatttatagaattggcagagggggtcgatttgggaggaaaggtgtggctataaactttgttactgaagaagaca

SEQ ID NO: 501566 - DNA, 100 bp, Homo sapiens
cttcgacgggcacgggggagagataatgagtgtgtatatggcaactaccctgaaatacctttggaagaaatgccagatgcagatggagtagccagcactc

SEQ ID NO: 501567 - DNA, 100 bp, Homo sapiens
catgaagtggatcagtttctaaacttctctcctaaagaagcatgttggcagataaattgaacatgactccagaagaagctgaaaggtggattgtaaattt

SEQ ID NO: 501568 - DNA, 75 bp, Homo sapiens
gttgatgggcacctcccgggacgtgacagacatcacacctccagtgcaatccctgttcctaagagacaaagctcc

SEQ ID NO: 501569 - DNA, 83 bp, Homo sapiens
atacgtgtaatttacaacttttgtaattcggtcagagtcatgatgacagcacagctaggactatgattctattgtgaagctgg

SEQ ID NO: 501570 - DNA, 83 bp, Homo sapiens
agctgggcgcggattcgccgaggcaccgaggcactcagaggaggctggttggaaggaaaatcatgcaacattcatgagcgaac

SEQ ID NO: 501571 - DNA, 100 bp, Homo sapiens
ccctcacaccagacctacggagggagctggaaattcctgacgttcattgatctggtctgccatcatggatgttctcgcagaagcaaatggcacctttgcc

SEQ ID NO: 501572 - DNA, 75 bp, Homo sapiens
gaagaaaccagccgaacttcagggtttccaccgttcgttcaaggaatactcccccagttgcaagaggcgcaggac

SEQ ID NO: 501573 - DNA, 96 bp, Homo sapiens
gagaccgtgaccgagagcgtgaccgagagcgcgaatatcgtcatcgttagaagctggactgggcagcctttggggtcatgacccttccctccatcg

SEQ ID NO: 501574 - DNA, 100 bp, Homo sapiens
aatactggaagaacctcacctttgtctccccgatctacggggctgacatcagcggctctttgtatgatgacgttcagaatgaccagtgccagcccaatgc

SEQ ID NO: 501575 - DNA, 82 bp, Homo sapiens
agaaatttggagtgtgcgtgcgcgccgagcgtccctgaagaggaaggagaaggaatatgagcatgaaatggagcggctggca

SEQ ID NO: 501576 - DNA, 51 bp, Homo sapiens
ggaacaggcttcggcgaacacaaagtgatagatacagtgatgccagtgatg

SEQ ID NO: 501577 - DNA, 100 bp, Homo sapiens
tgcgcaacgacttcccgggagaaatggtcgtggtggacgacctggagaacacggagctgccctacttcgtgctggttacagatgaggacacagtaaagag

SEQ ID NO: 501578 - DNA, 90 bp, Homo sapiens
cccaacggggaggccaacgtgaagaagtctcctctgagcctccggcctccataagacccaaaacagatgacacctcttcccagtcccccg

SEQ ID NO: 501579 - DNA, 100 bp, Homo sapiens
aagaacagtggctcgccagattacactgttggagtgtgtcggattcacaatttgattccacaactggatttctaggtaaaactatgggcaaactgaagat

SEQ ID NO: 501580 - DNA, 100 bp, Homo sapiens
cggagtcggggacccaggagtttcctgtgtccagcgctgccggagccgcctgagtgccggtggtggtgtgcacattgagccccggtatagacagttcccc

SEQ ID NO: 501581 - DNA, 90 bp, Homo sapiens
ctttccaagccaatgcccaagacattataaacagagtgactcagacatctcctctacaagtacctaacccatcctggatgcaccaccatt

SEQ ID NO: 501582 - DNA, 98 bp, Homo sapiens
tacctacaagagccttcatccaggagcatccacactgcaatgatataggaatgaggtcctgcagctgcttgttaagctttttgagactgagcactccc

SEQ ID NO: 501583 - DNA, 74 bp, Homo sapiens
ggaaggggtcccgaagccccctgcaggaactctacaacccaatccagtatgcattgcctcttcagctagtgaat

SEQ ID NO: 501584 - DNA, 75 bp, Homo sapiens
aagaaaccttccctaacactgaaaccaatggtgaatttggggaatctgcaacattaagaagcttattgctcaatc

SEQ ID NO: 501585 - DNA, 88 bp, Homo sapiens
tgcgagtccatagctgaagaggagcgccagatggtggaggaatacacttatttatgaagagccatgtggctagaaatcctcctcactt

SEQ ID NO: 501586 - DNA, 83 bp, Homo sapiens
aggtgtactgcaaggaacaaaatgtttgtaaattctccttttaccaaggctgaacatgaactaaatctggcaagaaaaatgag

SEQ ID NO: 501587 - DNA, 100 bp, Homo sapiens
atggttcgttacatcagaaggatacagttcatgacaatgactttgagccctaccttactggacagtcaaatcagttattgccttgtctgtcaagatccgc

SEQ ID NO: 501588 - DNA, 100 bp, Homo sapiens
ggaggctccaagacctcatcaacaattaagatacctcaagaagaacatgctgctaatggtccagaacttctgaggaaaaaacgtacaacttcagctgaaa

SEQ ID NO: 501589 - DNA, 100 bp, Homo sapiens
aaaacaatagctcaaggaaacctttccaacacagatgtccaagctgccaaagatggcatagaatttgcttttaaagagcctaatccgcaaggggagagcc

SEQ ID NO: 501590 - DNA, 100 bp, Homo sapiens
cattcctccagcctttcccccacctactggtgaaaaaccatttcgctgtgatgaatgtggtatgagattcatacaaaaatatcatatggaaaggcataag

SEQ ID NO: 501591 - DNA, 97 bp, Homo sapiens
gtggctccgtaggccacaccgaggaacagggcggagtagcggccgagctgcgaaagaggcgtcacaatgtagcagggaccccaggcgtcgtgctcag

SEQ ID NO: 501592 - DNA, 100 bp, Homo sapiens
ccgacggcgacgtcggggccgagctaacccggcctctggacaagagtttgagaagatggtcagtggcatgtacttgggagagctggttcgactgatccta

SEQ ID NO: 501593 - DNA, 75 bp, Homo sapiens
caccggggctccgtcatctgtctggaggtactccaaagattcaggtttactcacgtcatccagcagagaatggaa

SEQ ID NO: 501594 - DNA, 74 bp, Homo sapiens
tttcctaatcatcctaccacctcccaaagctagtcactcagccagaataaaagctacttggccgtaaggctaaa

SEQ ID NO: 501595 - DNA, 51 bp, Homo sapiens
ccaccccgatttagacctgcgatgatgaacaacatgggtggtgatgaggat

SEQ ID NO: 501596 - DNA, 99 bp, Homo sapiens
gtcgttgtcctccgcgagcgtccggattgcaggtgtccggctttgctggcccagcaagcctgataagcatgaagctcttatctttggtggctgtggtcg

SEQ ID NO: 501597 - DNA, 89 bp, Homo sapiens
cagctctttcctttccgtctggcggcagccatcagccgcagggccgtaggcagccatggcgcccagccggaatggcatggtcttgaagc

SEQ ID NO: 501598 - DNA, 74 bp, Homo sapiens
tggtgcaggaaggcagtctttgctacgtacagcaaaaggcatggattccgtgaaggaacaacacctaaacccaa

SEQ ID NO: 501599 - DNA, 83 bp, Homo sapiens
cttctttcttcagccgaggccgccgccgcctctccttgctgcagccatggaccttatgccagcctggaccatcttggaggcag

SEQ ID NO: 501600 - DNA, 75 bp, Homo sapiens
ctacaagagatcagtcattacaatagcaacttctgttgataagttgggaagcagtggctgggacaagctgtggaa

SEQ ID NO: 501601 - DNA, 100 bp, Homo sapiens
ggagaagaggaatgttccctgacaatttcgttaagatcagtgtactgttacccggacatacctattccttcacaagttctggttcttcagtgctgcttac

SEQ ID NO: 501602 - DNA, 80 bp, Homo sapiens
tggccagtggagagaggaattcctcaagacaccattccaggatgaagctggaggcagattcgtcgctttctctggagaag

SEQ ID NO: 501603 - DNA, 75 bp, Homo sapiens
ggaatatggagccctgggcgcgggggcggcgtgtcaggtggttgcggagctgatggtccagtagtctatgcagca

SEQ ID NO: 501604 - DNA, 100 bp, Homo sapiens
gctatttcagaactgttctcaggactcattattttaacatttgggagaaacacagccagaaggaagctcttcgtgggcggtcttgactggagcacgaccc

SEQ ID NO: 501605 - DNA, 101 bp, Homo sapiens
ggaagatggaaggaaggagcgcagcgaagatggcagtgaacgtatactcaacgtcagtgaccagtgataacctaagtcgacatgacatgctggcctggatc

SEQ ID NO: 501606 - DNA, 88 bp, Homo sapiens
tggaggcggagtggcgcccggcgaggtagcgccaggcgagagccatgggaccacaccaccaccaccacaaccaataggccaggaacca

SEQ ID NO: 501607 - DNA, 50 bp, Homo sapiens
aaaaagtaaaccacgatcgttatgctgaaacacccatctcggctttctcg

SEQ ID NO: 501608 - DNA, 97 bp, Homo sapiens
tcagcctcctaagtagctgggactacagaattctcctaccaaaaaccatctcaccaatccctgttaccctcgggattatagcatcagcttcaccatg

SEQ ID NO: 501609 - DNA, 75 bp, Homo sapiens
atgaaatttatggcattcagaacaaaaaagcttgtggtgaaggggggcaaaaaaaagaagcaagttctgaagttc

SEQ ID NO: 501610 - DNA, 75 bp, Homo sapiens
atggtttttggagtaaagagaaaccaaagtgtgtggggaatcgctgtgtgaaaggagattctctcagcctaaaag

SEQ ID NO: 501611 - DNA, 75 bp, Homo sapiens
ctggcccaggacacagggactgggactgcctacattgaggagtccaggcatgataaagaaaagatagaaaagaaa

SEQ ID NO: 501612 - DNA, 74 bp, Homo sapiens
caaggctacaactttgccgaggctgtcaacttttgcactgctgactgggctgatgaaccaattgcagattatgc

SEQ ID NO: 501613 - DNA, 99 bp, Homo sapiens
gttttaacaacggctgtgctagacgaagtggtgaagcccaacagtcccagctatctgacttcatgtgaaagatggctaatgcagaagtgagtgtcccag

SEQ ID NO: 501614 - DNA, 75 bp, Homo sapiens
taccaagacccttcctgcctcagagccttcagacatgctgcttcctgtgctccggcattttgcacagaggccgtg

SEQ ID NO: 501615 - DNA, 101 bp, Homo sapiens
tgcagtgttgaaggaaaagtgcggacaaattcataaagctttacaaggatcctgtgttgccataagcccttggcccacatttaagtgggaatgcagctagc

SEQ ID NO: 501616 - DNA, 83 bp, Homo sapiens
atcgcctgggtggttgttggcgtgtccctgcagcgaaggatcctggttgccttatgccagcctggaccatcttggaggcagtg

SEQ ID NO: 501617 - DNA, 75 bp, Homo sapiens
gtcggaagtggccgtgagcccaagccgcggtcccgggtgagaagccctaccactgcaactgggacggctgcggct

SEQ ID NO: 501618 - DNA, 76 bp, Homo sapiens
taatgaatttgcccaatgttttgatgattggcagagacccactgtctggacagaactgtaccgctctctttttggc

SEQ ID NO: 501619 - DNA, 75 bp, Homo sapiens
gaagagggaagacacgcggaaacaggtcacaaggcacttaaagcattgttgaggtcattggtaggtcttcaggaa

SEQ ID NO: 501620 - DNA, 100 bp, Homo sapiens
agcggcctgcgggcgatcgggccgaggatcacagaagaactgcagcttcctggggagcagtttcacctccacaggcatcgcttcatactcctcactgtca

SEQ ID NO: 501621 - DNA, 100 bp, Homo sapiens
gggaagtcaaaagtgtggatgggatttccaagatcttcagcagaccttgggacctgtgagcgctgcatccaattaaccatgggaagggtcagcaccagcc

SEQ ID NO: 501622 - DNA, 98 bp, Homo sapiens
ccggtttgctgatcgccccagggatcaggagacaagttggatggcttgaggactggtactaaaaggaaacgtgactgggaggccattgccagcagaat

SEQ ID NO: 501623 - DNA, 98 bp, Homo sapiens
gcaaacgtatgtttctggaacattgcgatttggaattgagttctctggtgatgttgatagcctggaactgggggacatggtcgagtatagcttgtcca

SEQ ID NO: 501624 - DNA, 83 bp, Homo sapiens
tgttcgtcggtcaccctctggacacggtcaagggaactctaatgatccaggacaaagaagttaccctggagtatgtatcaagc

SEQ ID NO: 501625 - DNA, 82 bp, Homo sapiens
tgggcttcatagcattcgcctactccgtgaaggccctgtttgtgctcttcgtcctggcctacatccacatcgtcttctcccg

SEQ ID NO: 501626 - DNA, 88 bp, Homo sapiens
cctttcgactagcctctgctgaaaggaaaatcctgccttgcttcgttgggcctatgcaagaacaataaatgtctatcctaatttcaga

SEQ ID NO: 501627 - DNA, 74 bp, Homo sapiens
ctactctcagcctactatctgtctggagaagaggttaatgactccagagagtaagatcagattcgtccacaaag

SEQ ID NO: 501628 - DNA, 100 bp, Homo sapiens
ctatgccctcaactacagcctccggcagcgcatggacatcctggattgtactaatggtcacttgatgtgcgctggctgttttatccacctactagcagat

SEQ ID NO: 501629 - DNA, 83 bp, Homo sapiens
atagactgcacaaggtgaagactgtctgcagcaaggaaggagtcaagactgagaacaacgatcatattaatttgaaggtggcg

SEQ ID NO: 501630 - DNA, 75 bp, Homo sapiens
cggaggctgaggagaaggaggagcgggccgtggaggcttcgccgcctagaagaacatgagctgcctgtggacatg

SEQ ID NO: 501631 - DNA, 90 bp, Homo sapiens
tgaaagcccagaacagtgccgattccaaagcctatttccatcttctcaatcaaatcgcaccaaaaggacaaaaggaaggtgaaccacgga

SEQ ID NO: 501632 - DNA, 73 bp, Homo sapiens
tctgagcaggtgctcactgtgctgaaaacagtctctttgttggctgagatctgtatctgtggacctgaatgtt

SEQ ID NO: 501633 - DNA, 75 bp, Homo sapiens
aggctgcagagagtatcgccttccgcaggctttcgctcctgcgacaaaatgctggcactaaggcacagtatctgg

SEQ ID NO: 501634 - DNA, 100 bp, Homo sapiens
cgttacgcggagctctcggaggaggacctgaagcagctggaaaaaatgtttctgcatgtgaaaggagaaattcatctgggaagatttgtaatgagaaatc

SEQ ID NO: 501635 - DNA, 100 bp, Homo sapiens
ctatgagcgggggcagtgtgaccttgagctcatcaagcgagtccctgtggcccatcgaggccagaaacgcagccattgccaatcactgcttcacctgcgc

SEQ ID NO: 501636 - DNA, 100 bp, Homo sapiens
attttagtacctttggagaagttcttatggtgcaggtggtgatctttgtgaagtctgtgcagcggtgcattgccttggcccagctactagtggagcagaa

SEQ ID NO: 501637 - DNA, 101 bp, Homo sapiens
aggtccagggcagaggaccaacatgggcattttgtttatgagcaaggtggaagaagagcccgaagaagaacctgaagagacagcagaagacacaacagaag

SEQ ID NO: 501638 - DNA, 102 bp, Homo sapiens
cagaaggatatcgacgtcgtgatccagaagtccagagctgaggactgcctgtttgcagaaaagtcttcagaccgtggacaatgtgctctttgcccctattat

SEQ ID NO: 501639 - DNA, 82 bp, Homo sapiens
cttaaaaatcaccagttactttaatgaagattcagttgtggaaattctttttgaacaagataatgaagagcaatcagttgcc

SEQ ID NO: 501640 - DNA, 100 bp, Homo sapiens
gtgaggccgcggagcgccagctcaatgaagcccctccagccagcgtcaggtgcagaatggcccctctcctgatgagatggacatccagagaaggtaaccc

SEQ ID NO: 501641 - DNA, 75 bp, Homo sapiens
cgaaatgttagaaaccctctcagatgatgatttcgtgaatgtagcttcaatcaggatcctcatgaccagccaaag

SEQ ID NO: 501642 - DNA, 98 bp, Homo sapiens
agctgttcctcgcgggccgccgggtgctggtcaccggggcaggcaaagcacacggaccctgactactcggctgcctatgtcgtcatagaaactgatgc

SEQ ID NO: 501643 - DNA, 75 bp, Homo sapiens
ctgatcactactgacttgttgggagccttttcataagctgctggcccaaggccttatcaaggggcagacattccg

SEQ ID NO: 501644 - DNA, 74 bp, Homo sapiens
aaagacagtggagagaagaagttgcttcacttcaggctgttatgaaaggtgccgtgagcgatgtggagatgcag

SEQ ID NO: 501645 - DNA, 80 bp, Homo sapiens
tttgacgacactgatggtttgatcagacctattgtgaccgcctggtgcaggacacgcctttcctgacaggccatgggcgc

SEQ ID NO: 501646 - DNA, 75 bp, Homo sapiens
aggggaataagactgcatctgttcatatgaggaatatgcactttctggttggaatttgaataacatgcctgtcct

SEQ ID NO: 501647 - DNA, 74 bp, Homo sapiens
ctgtacataagtgtcatgcagcaggacgtcactgttggaagaagatgtgatggagctgcttgaagaagatctca

SEQ ID NO: 501648 - DNA, 96 bp, Homo sapiens
cgtgaacgcgctgcacctctacctgtggctctttctgctgggcctgcccttcaccctctacatggggcatggtctagtggcccagtcaggacgcgg

SEQ ID NO: 501649 - DNA, 117 bp, Homo sapiens
gcggccagccaaagctttccccctcctctgatgattaaacaggaacccagagattttgcatatgactcaggatattaccttccaaatgatgatggagaattttatcagttctgttac

SEQ ID NO: 501650 - DNA, 46 bp, Homo sapiens
ctttatatagaagggagagtagaacaagccttaccagtggcttcag

SEQ ID NO: 501651 - DNA, 82 bp, Homo sapiens
agtgcaccatccaggagaaggacgtgttgacttcaaaatcaaaactgtagagctaagaggaaagaaaattagattacagatc

SEQ ID NO: 501652 - DNA, 100 bp, Homo sapiens
ggcggcggcggaggctgccatggacgacgaggaggagacgtaccggctctggaaaatccgcaagaccatcatgcaggattttttatcaagcagaaatgca

SEQ ID NO: 501653 - DNA, 100 bp, Homo sapiens
acagagatgtgatgttggagaactatagcaatctggttttcttggatccttatgtgaagattcatctgatgcagaatggtaagaggctgaagaagaaaaa

SEQ ID NO: 501654 - DNA, 100 bp, Homo sapiens
ttcggtgtagaagtggcagcacggcaggtcgacctccaatggaagtccgggcacatggcggagagcctcaccaacatgccacggcactccctctacatca

SEQ ID NO: 501655 - DNA, 83 bp, Homo sapiens
tgcatgcgtttgctgagagtagtatctgttctgattaagcagttttacagtcttttgactggatgttgaatttgttctctcag

SEQ ID NO: 501656 - DNA, 82 bp, Homo sapiens
aaaaaagcttattgggaagaagtggaagaagttgttccgaatgtaattgaaccttccttcggcctgggtaggatcatgtata

SEQ ID NO: 501657 - DNA, 100 bp, Homo sapiens
tggaaagtcggccaagaaagacaaagacccagtgaacaaatccgggggcaaggccaaaaagaagagagcccgagcccagcacattgtgccctgtactata

SEQ ID NO: 501658 - DNA, 100 bp, Homo sapiens
gagagagggaagtcgcctctgtgctcgtgagtgcatggggtataaggaataatgtatttgtggccttggacatgaggcagtcagtcctctgttgctgtta

SEQ ID NO: 501659 - DNA, 98 bp, Homo sapiens
gcctggcaggacgtgaaggggaagaggcccaccctggagtaaccctcactggagaatccagagtggtccatcaagattcacaatggtagcagtgaagc

SEQ ID NO: 501660 - DNA, 75 bp, Homo sapiens
cattctacaaagaacagctggctagactggaggagaggtaatcaacaagatgccacatcagtagcaactgagtct

SEQ ID NO: 501661 - DNA, 83 bp, Homo sapiens
ccggacgctggcggatgtgcgagcgaggatttttagactctgaggagcagttggagctaatccacattatggaaatggaaacc

SEQ ID NO: 501662 - DNA, 95 bp, Homo sapiens
ctccaagatggcggcgcagaggaggagcttgctgcagagtaagacgtgcgatgggacacatttcccctaggccgaatgccaggtcagaccgagga

SEQ ID NO: 501663 - DNA, 100 bp, Homo sapiens
ccgggagcgccgggacggggcgcgaagccggaggctccgggacgtggatacaggttacaggaggttccagtggcatcgggaagtgcattgctatcgagtg

SEQ ID NO: 501664 - DNA, 100 bp, Homo sapiens
ctgctctcagacaaaactccttccaaaaacgtgcgcatgatgcaggcccaggaagccgtaagcaggatcaaggtgactacacttgtcaacacaagcaaca

SEQ ID NO: 501665 - DNA, 90 bp, Homo sapiens
gggcagacgctgtgctcgctggcaccccgaacgggttgcttcccccgctgcgagaggctgggaggcggcagaatgcagccagaggagggc

SEQ ID NO: 501666 - DNA, 90 bp, Homo sapiens
cagaactggccaggaatttaataggacagtcattttgtttactcattcagccctgttgcaggtcccaataaactcttcataaggttgaca

SEQ ID NO: 501667 - DNA, 100 bp, Homo sapiens
cacggagcggccgggggctcggccgggccgtcccggcctgcgcagcctgaggaaacttggctgtaacttcaaaagaagatttgattctttatttctggac

SEQ ID NO: 501668 - DNA, 90 bp, Homo sapiens
cgaatatcgtcatcgttagaaggacttgagagagacaagtttgataataaaacggtttcatttgaggagcacattaagtcagaacacaat

SEQ ID NO: 501669 - DNA, 98 bp, Homo sapiens
ccagagttgtgggccgccgtcggcagcaagaacagagagagaggtggacagatctgagagatactgaggttcacaagtttttaaacagaaaccgggat

SEQ ID NO: 501670 - DNA, 75 bp, Homo sapiens
ggagactgtgccgtggagggcctcgccatgtcctgctgcccggcccctccagccagcgtcaggtgcagaatggcc

SEQ ID NO: 501671 - DNA, 90 bp, Homo sapiens
gccgtgtagcgtcgccgttactccgaggagataccagtcggtagagggactatgatgatggatatggcactgcttatgatgaacagagtt

SEQ ID NO: 501672 - DNA, 101 bp, Homo sapiens
atttctggtggtgctgaccatctttgggatacaatctcatggatacgaggtgaaagaaaagatgttgtcccggttaagagtagtttccaccacttgtactt

SEQ ID NO: 501673 - DNA, 97 bp, Homo sapiens
cagcaggccacagagctgcttgcggccaagtacaaggggtttgttgcatcggaccagtgtccctaaggaagtagttgattatatcatctttggtaca

SEQ ID NO: 501674 - DNA, 121 bp, Homo sapiens
tgataagaagcacctggatgagacatttgctacagcatcccacattaagtcaacggtttgccaagatggtggataagaatatttacatcattcaaggggagattaacattgtggttggggc

SEQ ID NO: 501675 - DNA, 76 bp, Homo sapiens
ggcctcttgcgctacgccctggatgagatgttcttcccgtccttccctcctgccatcccgggactgcccaccctgc

SEQ ID NO: 501676 - DNA, 99 bp, Homo sapiens
aagaagatgaagaaaccagcttgatatgttggccatcgaagacggcaatttggaggaaatggaagaggaagtacggcttaagaagcgaaaaagacgaag

SEQ ID NO: 501677 - DNA, 100 bp, Homo sapiens
aggtctctgtcgagcagcggacgccggtctctgttccgcaggatgttgttgacctcctgtactggagagacattaagaagactggagtggtgtttggtgc

SEQ ID NO: 501678 - DNA, 113 bp, Homo sapiens
gcgaggagaactactccgtgacctggtacatcgccgagttcttgtctattcaggccaccagtctgtcttaattcctcctatggagttagagaacaaccttttcctctggctct

SEQ ID NO: 501679 - DNA, 100 bp, Homo sapiens
cttcacccaggccctggagtgcatgcgcagggccaattcctgtccccccagcagcatggcatcgtgtgctgaaccctctgagccctctgccccactgccc

SEQ ID NO: 501680 - DNA, 75 bp, Homo sapiens
ggtggaaagaatctgatgagccttttaggcctgttcagaggacaagaattttgggcagatttgaatgccatgaac

SEQ ID NO: 501681 - DNA, 101 bp, Homo sapiens
aggacggcgcgggaactctacgccaacgtggtgctggggtttgtccagaggggttgcgtttatccggtttgacaaacggtcggaggcagaagaggcaatta

SEQ ID NO: 501682 - DNA, 74 bp, Homo sapiens
gagatttctgaaattattgatgggctctctgagcaggaggaagatgagaatgtgcctactgctcctgatcctcc

SEQ ID NO: 501683 - DNA, 75 bp, Homo sapiens
gatgaatgaaaatgaagaagttataaatattctccttgctcagggcatcttttatgaccaaaactgtgccttgtg

SEQ ID NO: 501684 - DNA, 100 bp, Homo sapiens
gtggacacctactgcagacacaactacggggttggtgagagcttcacagtgcagcggcgagcaaccgcgtcttcactgagggcacctgtaagctgctgac

SEQ ID NO: 501685 - DNA, 100 bp, Homo sapiens
aaggagcaaaagaaaaaagaatggatcaaccaagaacgtcaaacactccaacaattgagagcatttaaagatgaaactaaatatattttgccaactttgg

SEQ ID NO: 501686 - DNA, 74 bp, Homo sapiens
gagcgacaagccgctggcagccgcggatctcaccgccgctcaggggaaggatcgaatcatatttgtaaccaaag

SEQ ID NO: 501687 - DNA, 75 bp, Homo sapiens
cagagctgcatcattccttggggcaaaatgtggacaagggacttgacccaatgaaagaagcatatggcacttgtg

SEQ ID NO: 501688 - DNA, 100 bp, Homo sapiens
ggtcagaaggacctctaccgagatgtgatgttggagaactacaggaacatggtcttgctgggctgaaacacttttccaggaaatctgccccaatgaagat

SEQ ID NO: 501689 - DNA, 49 bp, Homo sapiens
ttatgctgatatacatccaatgagggcaagaaactatattcagtctttg

SEQ ID NO: 501690 - DNA, 100 bp, Homo sapiens
tgctcctcctcgcctgcgaagcatcacgtccgcttcccgacgctgagggcagccccgtccaggttcacggaggagaaatttggccaggctgagaagactg

SEQ ID NO: 501691 - DNA, 98 bp, Homo sapiens
attcggttcctgaaggaccctggtggaggaagaaagatatggtccggcttgctttcacagatgtttcgataaaaaattttgaagagttttttaacctc

SEQ ID NO: 501692 - DNA, 75 bp, Homo sapiens
tcgtggcctggtctccattatttgagatgagttacatcttggagagacggtgctgagataggatcatgaaggaag

SEQ ID NO: 501693 - DNA, 100 bp, Homo sapiens
ctgaggaatcggcaaactccctggtctctgttggtgtagaagccaaaatcagccgtgctggtatagaggactctaagaagtggggcatgctgtttctggt

SEQ ID NO: 501694 - DNA, 75 bp, Homo sapiens
cgccgctcgcatgagcacctcatacggctgcttctggagaaggttgcagagcctgaggcctgtgatcagatgtac

SEQ ID NO: 501695 - DNA, 100 bp, Homo sapiens
tatctccaacaatgagcaactgcccatgctgggccggcgccctggggccccggagagagtgaagacatttccacctggacacctgaccatgtgcctgccc

SEQ ID NO: 501696 - DNA, 90 bp, Homo sapiens
cactgaagatcctggtgtcgccatgggccgccgccccgcccgttggtttggtgcacctcgatttggaggaagtagggcagggcccttatc

SEQ ID NO: 501697 - DNA, 100 bp, Homo sapiens
ctgcagtgggtgaagttttggtaggcgcagacggggaagcggagccaacatgccagtggcccggagctgggtttgtcgcaaaacttatgtgaccccgcgg

SEQ ID NO: 501698 - DNA, 83 bp, Homo sapiens
ggaatgcatcacatctgcatcgagttcacttcttcaactgagatggacatgatataatctccattgagtcaaagaatggcatc

SEQ ID NO: 501699 - DNA, 75 bp, Homo sapiens
cgtcgaaaggattggattggcatctttagacaaagagagcaggatgaatggacagtaccagcagcccacggacag

SEQ ID NO: 501700 - DNA, 100 bp, Homo sapiens
tggattgtgtccacatgttgctgcaaatgggtgctaatcacaccagccaggccccgccgtggcgggcatcctctccatccagaacatgacgacattgctg

SEQ ID NO: 501701 - DNA, 83 bp, Homo sapiens
ttggccacctccccaggtgatgcctgaagctcaagggactgtgtccaccctcaggtctcctctgagcctccggcctccataag

SEQ ID NO: 501702 - DNA, 100 bp, Homo sapiens
ggcccacctgcgccggcacacgggtgagaagcccttcgcctgcacctggccaggctgcggctggagtgcaagaagaaacacacgctgctgtgccccgact

SEQ ID NO: 501703 - DNA, 100 bp, Homo sapiens
tttggaagtggtcatttcagatgtgattcatctaaggcacagttgaatgctgttgatgctttgattgactccatgagcttggcaaagaaagatgagaaga

SEQ ID NO: 501704 - DNA, 75 bp, Homo sapiens
tttccaggagatattgggattcctggacaaaacggccctgaaggaccaaagagaggatctgacgaactactctca

SEQ ID NO: 501705 - DNA, 90 bp, Homo sapiens
cgacctgctaacagaactggaccttttcgggaaatcctcattgacgattcaatttgttgaaggccaatttgtggactcctacgatccaac

SEQ ID NO: 501706 - DNA, 83 bp, Homo sapiens
ttcggccccggacgaaggtactcgcagcacttggagcgcagaaccggccgcgcccgggtttccaggcctgaggtgcccgccct

SEQ ID NO: 501707 - DNA, 97 bp, Homo sapiens
ccttaaatttacagaaagtttccaggagaggtggaaccgtcccaaaatgtcccttgctcagaagaaggatcgggtagctcaaaagaaggcaagcttc

SEQ ID NO: 501708 - DNA, 83 bp, Homo sapiens
atttcctcctgacggctgtacttgagcagtcacctggcacagatgatgattattccccaccttctaagagacaaagaccaacg

SEQ ID NO: 501709 - DNA, 100 bp, Homo sapiens
aacagcatcaacatcaaccagggcaggagacttcgtcgtcgtctacactgatggctgctgctccagtaatgggcgtagaaggccgcgagcaggaatcggc

SEQ ID NO: 501710 - DNA, 73 bp, Homo sapiens
gcggcggccgtgcttagggattcgacttcgggattgggggggtggggcggggccccccacctttctgacatca

SEQ ID NO: 501711 - DNA, 75 bp, Homo sapiens
ctctaggaagcgctagacacatgtatccaaaccttgaaacctttgctctagatgtcaggcttgtttttgacaact

SEQ ID NO: 501712 - DNA, 82 bp, Homo sapiens
gcgagcgcgagcggcgcgagaaagggatttgggagcagcttgtcttacacaaggacgaaggaaaaggtcagggatcgagtgg

SEQ ID NO: 501713 - DNA, 102 bp, Homo sapiens
ttctcaattttctttctcagaaagcagaggctcagagcttggagacagacgagtatctttagaagatctgtataatggcaagacaaccaaactacaacttag

SEQ ID NO: 501714 - DNA, 51 bp, Homo sapiens
ccgaggccacgagtgggcaggagcttgcagctgtggaggaagatgcagagt

SEQ ID NO: 501715 - DNA, 90 bp, Homo sapiens
gttggaccctcgtcaatctctttcgaagccattcagtcctcaatctccttttccttggctacccggtttgctgacatcccgacaggaaag

SEQ ID NO: 501716 - DNA, 82 bp, Homo sapiens
cgacttcctccccgcgccccctccccctcgccatgaagatctgactgcagccatgagcagcaatgagtgcttcaagtgtgga

SEQ ID NO: 501717 - DNA, 96 bp, Homo sapiens
ccggcgccatgggcaattgccacacggtggggcccaacgaggcgctggtggtttcaggacagtcattttgtttactcattcagccctgttgcaggt

SEQ ID NO: 501718 - DNA, 98 bp, Homo sapiens
cgtcaggctggcccaggaccaggaggagatgaaggttgtttacattcagagctctatcaataagaggaatacatattacagtgaattcgacaaccgca

SEQ ID NO: 501719 - DNA, 86 bp, Homo sapiens
cctggagcctcagttggaagcagccgatccagcctgcggagcctgtggggcagagatgctgcaatttgtcagtaatcaagtgggag

SEQ ID NO: 501720 - DNA, 100 bp, Homo sapiens
gcagcctggacgacatcgacctgtccgccctgcggtggaatgcagtagccctctgggcctgggatattgtggttgataactgtgccatctgcaggaacca

SEQ ID NO: 501721 - DNA, 82 bp, Homo sapiens
atttaattccttttcgaccttcaatccagttccaaggactccacgggatgatgataattccgaagaaggcttccacactatt

SEQ ID NO: 501722 - DNA, 90 bp, Homo sapiens
caggacaccgggagtgggagagattggactgggagactcagcagatttgcctactggctgggaagaagcatatacttttgaaggtgcaag

SEQ ID NO: 501723 - DNA, 83 bp, Homo sapiens
gtgaaaagggtcctcctgctcacagtgtgaataacagccagaacatttgttgaacacaagtgataatgttacagtgcagtgtc

SEQ ID NO: 501724 - DNA, 90 bp, Homo sapiens
cctgatgccacatgatttggctagagcagcgcttacgtgattccagatcactgtatctttgccagtaacacatctgctctcccaatcagt

SEQ ID NO: 501725 - DNA, 100 bp, Homo sapiens
aaccgcttcgagaagcgccacaagaacatgtctgtacacctgtccccctgcttcaggctcctcgtccatccaccggtccccacaagttgagagagtgtct

SEQ ID NO: 501726 - DNA, 74 bp, Homo sapiens
gaattcggccatgagccgctacatactcatcatggggctcctgtacaaggtgtggaaacaggaagagaactaga

SEQ ID NO: 501727 - DNA, 100 bp, Homo sapiens
ctccttctccaatcagatgtagtctgtcttctgagttgacagagcagaagcttcgtgcctgtttagagggtagtataaatgagcacagtgcacattgtcc

SEQ ID NO: 501728 - DNA, 51 bp, Homo sapiens
tactgccgataatgaaacctcatgtatgaagtgtaacagaacagactttac

SEQ ID NO: 501729 - DNA, 83 bp, Homo sapiens
gaaaaccagtctgggtaaaatcacagtcttgaatccagataatagttttgaaatactggttgaccaatctgtggtgaatagtg

SEQ ID NO: 501730 - DNA, 76 bp, Homo sapiens
tcagcgcggagttaccccagacccctcagcgtctggcatctactctgttacggcatggtgcaaatccagatctgag

SEQ ID NO: 501731 - DNA, 100 bp, Homo sapiens
gatagtgccaggcctatgttggagactggatgttgaatttgttctctcagcacctatttctgaatggaatggcaaacagggacatatttcaccagctctt

SEQ ID NO: 501732 - DNA, 100 bp, Homo sapiens
ccgcgctggaccagctcaagcagttcaccaccgtggtggccgacacgggcgacttccacgaaaaatgtccattccacaaggtttgtgacatatttctgtg

SEQ ID NO: 501733 - DNA, 97 bp, Homo sapiens
ggatggaaatcctaatgacagtctccaaattcgcctccatctgtaccatggtcaatgagctgaaggagaaaggcaacaaggccctgagcgtgggtaa

SEQ ID NO: 501734 - DNA, 100 bp, Homo sapiens
gttcatattgccaaacaaagttctgtgctcgttgtggaggtcgagtgtcattacgctcaaacaaggcatctccttggaaacaatgccatctttgaatgtg

SEQ ID NO: 501735 - DNA, 75 bp, Homo sapiens
gggcaaaggtcgtatttccacttcaacaggactcattaccagagaagctggctgtgcatgagaagaatgtccgcg

SEQ ID NO: 501736 - DNA, 100 bp, Homo sapiens
tgccctcttgaaattaattttttcccaggagagagatgtcttatcaggggaagaaaaatattccacgcatcacgggtgaggacgcttgagcggaagttag

SEQ ID NO: 501737 - DNA, 89 bp, Homo sapiens
tgtattctgacgtttacaaaactacagacactatcctgaggagcgacatgtggttgaacgccatggacgggacacaagcggaccaagga

SEQ ID NO: 501738 - DNA, 75 bp, Homo sapiens
ccagtactctgccgagtgcggcgttgcagaatgaagaagagtctggagaacctgaacaggctgcaggtgatgctc

SEQ ID NO: 501739 - DNA, 100 bp, Homo sapiens
tcgtccgcggagatctctctcatctcgctcggctgcgggaaatcgggctgaagcgactgagtccgcgatggaggttggtgttcgaggaagagacattgtt

SEQ ID NO: 501740 - DNA, 75 bp, Homo sapiens
gctatcaaccagattcttggcagaaggctgcaagctttcttcctggtggcagatgacatcatggattcatccctt

SEQ ID NO: 501741 - DNA, 75 bp, Homo sapiens
caggaaaacaagttcagggctcccactgattctacattatggtgcagtcagcctcagtttccaaagccggaaaag

SEQ ID NO: 501742 - DNA, 82 bp, Homo sapiens
ataaaataaccgtccccgccagtcagaagttgagcttaaagcttttcaagccaggccaagaagctgtgaagtaccagggtcc

SEQ ID NO: 501743 - DNA, 82 bp, Homo sapiens
cgggggccgctctgggatcccggccaccagcaattgtccgctcaccatggatgatgatatcgccgcgctcgtcgtcgacaac

SEQ ID NO: 501744 - DNA, 74 bp, Homo sapiens
cacccccagcgctctgataaaaataatgctgtcggaaaaggtaacagaagatggaactcgaaatcccaatgaaa

SEQ ID NO: 501745 - DNA, 100 bp, Homo sapiens
ctgccaagagacatgttagaaggacaagtatgaacgctgccgtccgtgccgtggtgcgcatgggtatctacgtgggggccaaggtgtacttcatctacga

SEQ ID NO: 501746 - DNA, 88 bp, Homo sapiens
cgcagcattactccctttgaccagtgctttctatagggaaatgggtcctgatgaatatgaagagatggaagaagaggaggaggaggaa

SEQ ID NO: 501747 - DNA, 98 bp, Homo sapiens
gcgactggccttgagggagagctggggcctgctcccggagagatacggctatgtcgatcgaaatcgaatcttcggatagagacggggtttcgccgtgt

SEQ ID NO: 501748 - DNA, 74 bp, Homo sapiens
cgccgtccgccaggaagactccctgcctcctgagtcccagtcacgactgctgaatatgagacgatctgcagcac

SEQ ID NO: 501749 - DNA, 88 bp, Homo sapiens
gctccaggagttcgtctcttacgtctgcggaagtgcagctgcctcagttcttagcgcaggtgttcaggcgcttcgtggaggttggccg

SEQ ID NO: 501750 - DNA, 102 bp, Homo sapiens
gaaaaaaacttaacacatccactaaaaatgtacctggtcactctacatgacatgatcctgaaaaatatcgagaagatcaaacggccccggagcagcaatgca

SEQ ID NO: 501751 - DNA, 50 bp, Homo sapiens
cagatactttgaagtagaagaagctgatgatctaattacttgtttggaca

SEQ ID NO: 501752 - DNA, 100 bp, Homo sapiens
cggcgggcccaaggcgtgaggcgccgcccgggtgtccccgcggcgcaggaggcggtggagcgcagagcgggcgagcgcgcgatacctctgggtattctag

SEQ ID NO: 501753 - DNA, 100 bp, Homo sapiens
gtcttccaggacttcgacctggagccgtcccaggactgtgcaggggactctgtcacaaatcaggaaacccaggcccaacggcaggtggatgcaagaagaa

SEQ ID NO: 501754 - DNA, 95 bp, Homo sapiens
tggaagcttacaaaacgactgggaagtttccaaaatcaatggaaattaaggatgcagacactcagggcgtgtgtcttgcacagccagccagcctg

SEQ ID NO: 501755 - DNA, 98 bp, Homo sapiens
cagaggcgcagcctcaaggaggaggagtgtccagcagggatctaccgaacagaaagggacaaagggacattgtatgagctcaccttcaaaggggacca

SEQ ID NO: 501756 - DNA, 82 bp, Homo sapiens
ggacatggacatgagccccctgaggccccagaactatcttttcgacctcctgccccccgaggtctgcagtctcctgaaccca

SEQ ID NO: 501757 - DNA, 100 bp, Homo sapiens
tcagaactctggaagaatgagaatggcggagtggaaaagagtcctggatttgaagtaaacagatgagaattctaggtcctgtcatttgggcagaggtggg

SEQ ID NO: 501758 - DNA, 100 bp, Homo sapiens
agaagcccggcgccgggaagcctcagctcgcctgaagcctctgaagagccaatccattcaggatgggaaaccacgcaggcaaacgagaattaaatgccga

SEQ ID NO: 501759 - DNA, 98 bp, Homo sapiens
gccctgggagccaactgcatctttctcaacatcacaaacagtgagctcttcattctggtgaagacacacctgcaggcacaggcagcctcagaaattgc

SEQ ID NO: 501760 - DNA, 51 bp, Homo sapiens
cgggaccctggcccctgtcgagttccagggtcacccccgagaggacaacag

SEQ ID NO: 501761 - DNA, 98 bp, Homo sapiens
tattgaaatggacagtggagatgaagcctaagaatatgatcaggatttctatgatgactggattttgaattttgtggaacgctttttctccatctact

SEQ ID NO: 501762 - DNA, 80 bp, Homo sapiens
caagaatgaaatagaggatgcccgctggttcactagagaacaggcgaaagtcaaaccgtatgttaatggtacatctcctg

SEQ ID NO: 501763 - DNA, 75 bp, Homo sapiens
cgcctcctacgtttacctgtccatgaaacaagccaacgacctggtggccacactgatgaggtgcacaccccacta

SEQ ID NO: 501764 - DNA, 98 bp, Homo sapiens
tgagacctggctgtggttcacaagctcgtgaattagcaggttcttaacggagctccctgggtcctcagcagtgaggctggcctccctgcgtgacctgc

SEQ ID NO: 501765 - DNA, 74 bp, Homo sapiens
tccgaacaccgggtggctggtgcagccgaggtcttcgggaattccagcgagggaatgcagacatggagatgact

SEQ ID NO: 501766 - DNA, 83 bp, Homo sapiens
cgagcggtggtttggacgccggcggagacgcgggcgagatcaacaggcggtccttcgggtcggagtggacatcggatggtggc

SEQ ID NO: 501767 - DNA, 100 bp, Homo sapiens
tgaatatcaagaggaggagttgttgtgtgagatcaaggtggcccagcccaaagaagtctatcagcagcagcagtatggctctgggggccgtggaaaccgc

SEQ ID NO: 501768 - DNA, 100 bp, Homo sapiens
ggcactcctaggctctatcagactgacccctcgggcacataccatgcctggaagccaaggccacctttgatgccatttctaagacctacagctacctgac

SEQ ID NO: 501769 - DNA, 101 bp, Homo sapiens
aatgaagcaagtttacctaacacgtctttgcaaggtttctgctttgggacaaccatacatctaattccttaaagtagttttatatgtaaaacttgcaaaga

SEQ ID NO: 501770 - DNA, 100 bp, Homo sapiens
cttggtagcgcgccgtagctgcttccacgtccttgcttcacctcaggtaaaggtgacagatcagtcagtgaaagcatttgctgaacactgtcctgagctt

SEQ ID NO: 501771 - DNA, 50 bp, Homo sapiens
gttgggagtaaaaatctggtttggaaggatcgagatcgagaccgggatcg

SEQ ID NO: 501772 - DNA, 100 bp, Homo sapiens
atccacttccccatctgtaacgaggtgttgagacgagggaatgaaagctactggttgattttaaagtgcctgggcctcacaggtttggagatgtcccaga

SEQ ID NO: 501773 - DNA, 90 bp, Homo sapiens
gctcgctctgggagcctagaatgcatcagtgcccttgtggcgaatggggctcacgtcgatgaacagcagagaatttcaaaggaccttgct

SEQ ID NO: 501774 - DNA, 82 bp, Homo sapiens
ggaacgaggcaaggagctaaagcagcgtgcgttcagccctggggaccaggaatcaccttcaagcctatgtcgtgaggctttg

SEQ ID NO: 501775 - DNA, 100 bp, Homo sapiens
caatgacgtacagaagaaaacctttaccaaatggataaatgctcgattttcaaagcgggaatgcatatcagtccacgtgggccaagcgggagttcagatt

SEQ ID NO: 501776 - DNA, 100 bp, Homo sapiens
ggtgctcctaggattatcagagcctatctttcagacactattgtgtaactatccccgaaattctacccaaattgcttctgtctgttaaatggaattctag

SEQ ID NO: 501777 - DNA, 75 bp, Homo sapiens
agccatgtgactgtagtccacatggagctctcagcataccgtgcaacagctatctcccctggttcgaggtatttt

SEQ ID NO: 501778 - DNA, 75 bp, Homo sapiens
atcgacaagatccggggcaagctgcggcgccgtctttgtgaaaatggaatcagtgtgagtggctttcccctgtcc

SEQ ID NO: 501779 - DNA, 100 bp, Homo sapiens
gcctcatactctgttatagataaacaaggagacaaggacggcagcaaggtgacaacagtggtggcaactcctgggcagggtccagacaggccacaagaag

SEQ ID NO: 501780 - DNA, 75 bp, Homo sapiens
gccgagcgcacgccttgccgccgccccgcagggaaagcaggcaggatgggagagtcgccgatagaaccacctctt

SEQ ID NO: 501781 - DNA, 100 bp, Homo sapiens
aatcccaacaagccctttgaccaaggtggagctcatgaaggacttcagcatttgggtccttttggcaacatccccaacatcgtggcagagttgactggag

SEQ ID NO: 501782 - DNA, 75 bp, Homo sapiens
cgccattatcgcatctccccgacaaacaccacgagaattccgcagcccacacgccgccaagctgagccaccaaag

SEQ ID NO: 501783 - DNA, 101 bp, Homo sapiens
aagaagtggacattgaaggcactactgttatagaagtcggccttgatcctagcaacaacatgacactggcgatgtggctgatgaagaaattgctgccctcc

SEQ ID NO: 501784 - DNA, 100 bp, Homo sapiens
ggtgaggggcgcgcgcctgcccagctttgcagcccccgaacgcggcctcgcacaggttttcctcctccaccaggcgctccacctccatctcttataccaa

SEQ ID NO: 501785 - DNA, 125 bp, Homo sapiens
tgttctctgtgttctcagaagacgttctgtatttcagcttcctgctatgtgccctctttgttcctaaaggtttttcgttggaatatacgttgcacatttatggcgattctgagtgtgagggcaga

SEQ ID NO: 501786 - DNA, 75 bp, Homo sapiens
ggctctgctgaccttgtgccttggtgtgttgtgctctccgaccccttgaaggactcttctcgaactcaggaatcc

SEQ ID NO: 501787 - DNA, 90 bp, Homo sapiens
ccaggagcagcgaggcactcatcctgcacgccggcgagtgccagcgcatctatattggaaagcgactgagcacaccctctgccagcacct

SEQ ID NO: 501788 - DNA, 90 bp, Homo sapiens
ggcaaccatgaccgaggagagctctgacgttcccagggagttgatagtattgctgacagacagaacgccttggaggctgagtggaggacg

SEQ ID NO: 501789 - DNA, 100 bp, Homo sapiens
tttcacagcactctgggcgaaaattggatgtgaaaatgaagccagaccgagtgccggtggtggtgtgcacattgagccccggtatagacagttcccccag

SEQ ID NO: 501790 - DNA, 50 bp, Homo sapiens
ctggatcggtgtgagggagagcgccagctgaggtgggtgtcctggttggc

SEQ ID NO: 501791 - DNA, 100 bp, Homo sapiens
gccgagtgggacagcgctggtgcggagactgcttccggactccagtgaagacgacccgggctttccaccgcttgcgcctggagctgctgcttgacacgtg

SEQ ID NO: 501792 - DNA, 60 bp, Homo sapiens
accatggctccctgcagtaccctttaacgttagcagacttgaagaaagagaagcagaact

SEQ ID NO: 501793 - DNA, 102 bp, Homo sapiens
cagctccgcgcccgccagttgcttgatcaggtggaacagattcagaaggagcaggattaccaaagggaagatgagaatgtgcctactgctcctgatcctcca

SEQ ID NO: 501794 - DNA, 100 bp, Homo sapiens
tggtcaaccgcgaccctaaacacctcaacgatgacgtggtcaagcaaagctgtggggatgccttcccctgtttctccaaagctgtcaccaggcaattcag

SEQ ID NO: 501795 - DNA, 106 bp, Homo sapiens
ggtgcgccttcccggcgtctaggggagcgaaggctgaggtggcagcggcaggagagtccggccgcgacaggacggtcaaaatgcagatcttcgtgaaaacccttac

SEQ ID NO: 501796 - DNA, 75 bp, Homo sapiens
gatgtctaacgataaggagcggtttgccagatccaatggaagaagacattctccaagttgtgaaatactgtactg

SEQ ID NO: 501797 - DNA, 100 bp, Homo sapiens
ctgatgtggaaggaaccttatttgtttatacaagagtacaggggctcaggtccaggtggcaggggatatgctacccaactcaactgagcgggccatcact

SEQ ID NO: 501798 - DNA, 100 bp, Homo sapiens
agaagaagggtgtttggggtgtgttttacaaagctatgatagtagtggagcttccaaagatgaaattaaggagagatttgctcagaccatggagtttgtg

SEQ ID NO: 501799 - DNA, 75 bp, Homo sapiens
caactgctaacaaccagctggaggacattgatgaatgctctgatggttttgttcaatgtgacagtcgtgctaatt

SEQ ID NO: 501800 - DNA, 100 bp, Homo sapiens
atcgcctccatctgtaatatgcgcgcagggaccatgtcggcggagaccgcgagcggccccacagaggaccaggtggaaatcctggagtacaacttcaaca

SEQ ID NO: 501801 - DNA, 100 bp, Homo sapiens
gctttgagctcctgcagcttgtacttcttcaggggcttattctcttgtcctgtgctggcattgacggagtggaggaaattaagcgccatcccttctttgt

SEQ ID NO: 501802 - DNA, 74 bp, Homo sapiens
gtggactccttcggcagtccacccaccgccgccgcctcccagactgtgagctgcttgtccccatcctgcggccg

SEQ ID NO: 501803 - DNA, 111 bp, Homo sapiens
aagctaaactcaatgctgctgtgtgggaagaagatttgtaaagaaaactcttagctgaaccacaatctctacgaggtgatgagcaaactggagaagcaacattccaataaa

SEQ ID NO: 501804 - DNA, 76 bp, Homo sapiens
tgtcggaagaccgccgggaggaccgacgtgcaggctctccccggaggctcagccccctctgctccccatgggcaac

SEQ ID NO: 501805 - DNA, 100 bp, Homo sapiens
agctcaatgccttcgcggctgtcttcacggtgctctcagttagcagacttgaagaaagagaagcagaactgaagaaggaatataatgcattacatcaaag

SEQ ID NO: 501806 - DNA, 90 bp, Homo sapiens
aaatttacatgtattggagaccagaccagaagcccttctgaattaaggttctcccatgggcaggtggtctctctggatgagctgcgcccc

SEQ ID NO: 501807 - DNA, 101 bp, Homo sapiens
aagcgaagccttgaaaaagctgccctgagacggtgtcccgccgaaaggtgacctcatacatttgcctccataccttagaatggactttttgttaaaccgag

SEQ ID NO: 501808 - DNA, 75 bp, Homo sapiens
caaagatgagatttacctgtgagatgtttcatcccaacagaggaaacaccaattggaagcctccgctcaactgta

SEQ ID NO: 501809 - DNA, 100 bp, Homo sapiens
ctcggtctctccctgaagcccaccggtccccaacgcatcatgccagggagccaagcgtcctgcccggccgactaccgaccagactcccggaaatcatgtt

SEQ ID NO: 501810 - DNA, 49 bp, Homo sapiens
cttgtgagaagtggaagaggcccttcagaaactggcgatggaatatgag

SEQ ID NO: 501811 - DNA, 110 bp, Homo sapiens
aatgtggatgggctagtgttggacacactggcagtaatacggactcttgtagataagttatggaggttttgatgactatggtggctataataattacggctatgggaatg

SEQ ID NO: 501812 - DNA, 76 bp, Homo sapiens
catccattgtgaaaagaccaagaagtgttatgagttgcagaaacgaattgctgaaatggaaactcaaaaggaaaaa

SEQ ID NO: 501813 - DNA, 98 bp, Homo sapiens
ccagagactgctgagcccgtccgtccgccgccaccacccactccggacacaggcgccatgtcagaaccggctggggatgtccgtcagaacccatgcgg

SEQ ID NO: 501814 - DNA, 100 bp, Homo sapiens
acactacagcaaatgctgaaggagatttaccaacaaccatgggaggacctcttcctccacatctggctctcaaagcagcgatggtggcccagccggcgga

SEQ ID NO: 501815 - DNA, 51 bp, Homo sapiens
aaagaatcccttgaagaaagtattggcaagaaaaatggctacaaacttcct

SEQ ID NO: 501816 - DNA, 83 bp, Homo sapiens
ctataggctctccaggaaacaagggcatgaatatgtcatattatacaggaactgtggctgcaccatctgtcttcatcttcccg

SEQ ID NO: 501817 - DNA, 98 bp, Homo sapiens
atggaagcgccgcgatgttcgccccccggctgctggatttccagaagacgaaatacgcgaggtcatctgtgacaaaatatttcgccattggttttccg

SEQ ID NO: 501818 - DNA, 80 bp, Homo sapiens
gcatagctgctacactgaagatgaagcaaggcccaatgacccaggcggttcccgtgtcagtggctatgatgacacctcaa

SEQ ID NO: 501819 - DNA, 75 bp, Homo sapiens
ttgtctccaattcaaaattgttttcagctaatgttaatacaatctgttggaatgacactggagaatatattttat

SEQ ID NO: 501820 - DNA, 98 bp, Homo sapiens
ccgcagctccacgcagcaagacccgcgccgccgggacccccaggacgacgtgtacctggacatcaccgcacccccccaggcagcagcagcagttttca

SEQ ID NO: 501821 - DNA, 87 bp, Homo sapiens
agccccggcctggccccggcccctcctgcccatggcggtggccgagctgtacacgcagttgatgcgatgaagagagttgaagaaatc

SEQ ID NO: 501822 - DNA, 100 bp, Homo sapiens
ggcggcgcggcggccactgggcgcagcacccaggtatgacctggacgcgtgtgacattcaagaaaaatacccggatttatttcaagtgaacctggaagtg

SEQ ID NO: 501823 - DNA, 75 bp, Homo sapiens
gcagctggcgccgctctcgcagtccctacagccctgtgctcaggaatttggataaagagagggcagtgctactac

SEQ ID NO: 501824 - DNA, 75 bp, Homo sapiens
tcctccttgaagtatttggctgaggagttttcaatcccagcttgcagccctgagtgatcgagagactcggctgca

SEQ ID NO: 501825 - DNA, 98 bp, Homo sapiens
ccaaccctgagactctgctgggggagatggaggcgaagacaagagagctcattgaggaattacggaggttgagctggtccggaatccctaagccagtg

SEQ ID NO: 501826 - DNA, 80 bp, Homo sapiens
caactccaatgggcctttccagcccgtggtccttctccatattcgagacaaatttacatgtattggagaccagaccagaa

SEQ ID NO: 501827 - DNA, 74 bp, Homo sapiens
aagaggagaaatagcaggacctccagacacaccatatgaaggcaaaatttggtttctctaatattactggaatt

SEQ ID NO: 501828 - DNA, 83 bp, Homo sapiens
cgcaaaatcaatatagtacactatccaaaccagcagcactaacagatcgccaaactgaggcagcaactacaacgcagtaaaca

SEQ ID NO: 501829 - DNA, 51 bp, Homo sapiens
gtttgcctatgtgccatttggagctggatggagagcaatacatcatcatct

SEQ ID NO: 501830 - DNA, 75 bp, Homo sapiens
gccctcacggagaagcagtggctaagggaatgctgtctctgcaatttgagaggaggtgctcttaagcaaacgaag

SEQ ID NO: 501831 - DNA, 83 bp, Homo sapiens
cgagggatgcggagagaccatatatgtcattgggcagggatcagacaatgcagatcttcgtgaagactctgactggtaagacc

SEQ ID NO: 501832 - DNA, 89 bp, Homo sapiens
atctgcccacccctcctgtaacccagcctgtttcacttcttggtttctacgataaagacagttcagggtggagttctagcaaagataag

SEQ ID NO: 501833 - DNA, 72 bp, Homo sapiens
ttgttgaccgggagaaacgagatgggggtgaagctggagatatttcggtgcaccgtccaggtgaggttagag

SEQ ID NO: 501834 - DNA, 100 bp, Homo sapiens
gtggccggcttcgttctgaaccgcctgcaatatgcaatcatcagcgaggcctggcggctagtggagcctcaaggaataggttctcctagtgtctatcatg

SEQ ID NO: 501835 - DNA, 90 bp, Homo sapiens
tgcagaggaaaggcgggagtgcccggctcgctgtcgcagagccgagtgctgccaggttgccagatttctaagaaggagtttgaagaggag

SEQ ID NO: 501836 - DNA, 83 bp, Homo sapiens
ctgaagttgccaggcttcccaacattcttgtctgtgaaaacctcggatcaattctcagctggtggcacaacaagtggcacaac

SEQ ID NO: 501837 - DNA, 86 bp, Homo sapiens
cctgggagcaccagcgctgccacttgtacccgcagacattatgaaaggaatcaaagatcaactcccactgaggacaaatggacctg

SEQ ID NO: 501838 - DNA, 100 bp, Homo sapiens
ctttggtgtcactttcagaagaggatctggagtcagaccagagagaacataggatgtttgatcagcaggatcccgttgaagataccacattacacttagg

SEQ ID NO: 501839 - DNA, 82 bp, Homo sapiens
ctcgcgccagccacgagggagcgtccgcggcccgcgcgcccgcgcggcggaggagaggatattgtacctgtggatgcatctt

SEQ ID NO: 501840 - DNA, 90 bp, Homo sapiens
tactgcattcctaccggtgtgacagaggaagttcagaagcagaaggaactttccaaagctgaaatccagaaagttctaaaagaaaaagac

SEQ ID NO: 501841 - DNA, 75 bp, Homo sapiens
tgcggcgagcggagcttcgcggggatcctgctggactgcacgaaaaagtgatgtgtccaatctagatcccaactt

SEQ ID NO: 501842 - DNA, 96 bp, Homo sapiens
cgtaaaggcatcgtgctgctcgaggactggagcgctgctcagcgctttcgttcagctgtgccacatttccacgacgctggcagagaagacgtgggt

SEQ ID NO: 501843 - DNA, 100 bp, Homo sapiens
cctgagtgaagaggaggaggaagaacgggagttcagaaaacagttccccctgcatgaaaagccgtggtccttcagcatatctctgtgctgcagacaacac

SEQ ID NO: 501844 - DNA, 87 bp, Homo sapiens
cacacctgaactaccaaaagacttccattctttatcgactctggcatgttatttgaaagcaattgagacgcaaccgaactttgcagt

SEQ ID NO: 501845 - DNA, 100 bp, Homo sapiens
ctcacggagctgggcgacgagctgaccctgggagacatcgacgggtttcttgaattcctctgagctttctggacttccagctgggcctgacagagaaggc

SEQ ID NO: 501846 - DNA, 110 bp, Homo sapiens
gacgatctgcacttcgcattttggcattgacatttaattttagggtcctttatatagaagggagagggttatggttttgtgaaattcacagatgaactggaacagaagcg

SEQ ID NO: 501847 - DNA, 90 bp, Homo sapiens
tgccagtctcaattctcgggaatacagagctaagtcatatgaaagctcacaatgtctctctgcaccaagctccatgactcaggatttgcc

SEQ ID NO: 501848 - DNA, 100 bp, Homo sapiens
ccgtgaccgagagcgtgaccgagagcgcgaatatcgtcatcgttagaagattatgccgacaagcccctggagaagcctctaaagctagtcctgaaggtcg

SEQ ID NO: 501849 - DNA, 95 bp, Homo sapiens
cgccgcccggcgcgcacaggctgtagcaggttccggcggacggcgttgcgaagatgatgactttgaccagtttgataagcctggcgcggaacggt

SEQ ID NO: 501850 - DNA, 100 bp, Homo sapiens
cggagtttgtggatcggatattccttcctcatgggcgtctctggccgagcctctttttgtggaaaacgacagcagcagcagtggcctggaagacgccacc

SEQ ID NO: 501851 - DNA, 74 bp, Homo sapiens
caaaaagtctcagatgagctcatgagtgaaaggtacaagcagaatcgatctggtcggcttaccataaagagtct

SEQ ID NO: 501852 - DNA, 75 bp, Homo sapiens
cttgcctcaggccagtcgcctccaggccaagagggatccttcacccgtgtctgggtgtgagatggcagacaggtt

SEQ ID NO: 501853 - DNA, 83 bp, Homo sapiens
aatcttgatgctttaatacagaaccagcatgtgcatgtgagggaaccctggcttgttcaacctgtcacctcatctttgaagat

SEQ ID NO: 501854 - DNA, 75 bp, Homo sapiens
ctgaatttaacacggagaccaccccagctacgaacagattcagatggagtcatcagaacccactgtgaggaagtg

SEQ ID NO: 501855 - DNA, 90 bp, Homo sapiens
tgcggaaaggatgttggcggtccctgtgacctgtggagacacggccagatctgccctccataatagctcttcaagtctgcaataaaaaat

SEQ ID NO: 501856 - DNA, 99 bp, Homo sapiens
ctgaagtggatcttcgtcgggggcaagggtggtgtgggcaagaccacctgcagctttgtgctgaccgaagggcagaagcgctacttcgagaagcttgtg

SEQ ID NO: 501857 - DNA, 100 bp, Homo sapiens
ctcagcttgtctgcactggcagtgacgatggcacagttaaggtcaaagtacatgtcagaaagcagcaaagtcattcatttaacatcttttactgacattt

SEQ ID NO: 501858 - DNA, 83 bp, Homo sapiens
cgggtgtccggccgtgtcccgaggaagtgcaagacccgcaaaacaagctatcgatcagggaagatctccagttataatagata

SEQ ID NO: 501859 - DNA, 82 bp, Homo sapiens
aaagtttgcagaaaagaatatgagcttctcaataggtttggcatggacaagatctatgaaggccaagtggaggtgactggtg

SEQ ID NO: 501860 - DNA, 75 bp, Homo sapiens
aagatgatgacgatgatgatgaagaggatgatgatgaagacatcaaagctaagccagaagatttatcacattttc

SEQ ID NO: 501861 - DNA, 95 bp, Homo sapiens
aaagatgagtatgcctgccgtgtgaaccatgtgactttgtcacagcccaagatagttaagtggggtatccaccaacccctcctccaacatcgatc

SEQ ID NO: 501862 - DNA, 50 bp, Homo sapiens
cggaagtgaattcggattgtttgctggttcgatacaagaggctgttttcc

SEQ ID NO: 501863 - DNA, 100 bp, Homo sapiens
acaactcgcccaccacgtccagcttcaccacgcggctgcacaactgcaggaacaccgtcacgctgctggaggaggaagccttatcagttgtgagtgagga

SEQ ID NO: 501864 - DNA, 49 bp, Homo sapiens
caagagccggcggcatgacgagaagatgatgagaagcttattgaggaaa

SEQ ID NO: 501865 - DNA, 82 bp, Homo sapiens
cccatcagcttcgagatctccattggccgagcaggagctccgcgtggcccagacagagtttgaccggcaagcagaagtgacc

SEQ ID NO: 501866 - DNA, 74 bp, Homo sapiens
gcgccgtgtaactgtgaatctttcaaagctcaaagatcctctcaagacagtatccggctctgctcctttcatct

SEQ ID NO: 501867 - DNA, 83 bp, Homo sapiens
caaggaataaacatgcaatgaacccaaaaggagatggacagagacgtatgtgcgttggtctcctaagggcacctacctggcta

SEQ ID NO: 501868 - DNA, 90 bp, Homo sapiens
aaggagatcgctcggacacagaagaacaaggcttctcgctgaattccgagggggctgagaggatggccaccaccgggaccccaacggccg

SEQ ID NO: 501869 - DNA, 100 bp, Homo sapiens
tgaacttttgaagataatggcctgcattttattggtctacaaagacagcaggaagaacagctttgcattggtcctgcaacaatggataccttgatgccat

SEQ ID NO: 501870 - DNA, 54 bp, Homo sapiens
cacgttgcaaacccctgcttccagtggaaagaggaggagcgacagaagcaggag

SEQ ID NO: 501871 - DNA, 102 bp, Homo sapiens
ggtctccttccgaaaacactacccttgggtccagctttctggacatgctgtcctgtgtcccttgatctgtcacaatggcggtgtgtgcgtgaagcctgaccg

SEQ ID NO: 501872 - DNA, 129 bp, Homo sapiens
cacgcggttcctttttgcgagctttccgagtgccaggcgccggccggctgcgaagacgcggtgggccgcccctccgatatttgatcctgatgacctttattcaggggtcaatttctccaaggtactgag

SEQ ID NO: 501873 - DNA, 74 bp, Homo sapiens
caagagtacttatgaaacttatgccgccagaagctgcacacatacatgtaagagaagcaaaaatgtcagatgat

SEQ ID NO: 501874 - DNA, 100 bp, Homo sapiens
ctgattccttcaacactgtagcagagatcactgggagcaaatatccagaacagtccaatatcagatggaaatgatgcggagccttcgccatgtaaacatt

SEQ ID NO: 501875 - DNA, 100 bp, Homo sapiens
ctgggatgttggcagccacttcaaaatcagacctctgtggcagcattttttccagaacacaaaagggctgacaggacaactggatcagtttcattaaaaa

SEQ ID NO: 501876 - DNA, 122 bp, Homo sapiens
tgggcatgtcctgtgatggccccttcaagccggatcactaccgctactgagagccagattatttgcatgggtgcaaaagaaaatggtttgccgctggagtatcaagagaagttaaaagcaat

SEQ ID NO: 501877 - DNA, 101 bp, Homo sapiens
tacatcatgtgaaaactcctttccagaagactgtacatttctccacccgaaacaatgaaatgtaatacattcataagacaagtgaaagaagagcatggcag

SEQ ID NO: 501878 - DNA, 97 bp, Homo sapiens
agatttgtgtggctgcagccgagggagaccaggaagatctgcatggtgggaaggacctgatgatacagagaaccagacgtcctgggtcctctccagc

SEQ ID NO: 501879 - DNA, 98 bp, Homo sapiens
aggcgtgatgcttaagctggtggagaaactcgattttatcatgtgggcaacctgctgcaactggttctgcctggatggacagcctgaggaggtcccac

SEQ ID NO: 501880 - DNA, 82 bp, Homo sapiens
ctggtcatcttctatttccaaaaggggaggtatggtgtcaagaaaacatagtcaccattattacgaaaagtaaaatatggaa

SEQ ID NO: 501881 - DNA, 74 bp, Homo sapiens
gctttgagccgccccgaactaagcagggcggtcgggggtctctgctggagaaggagctggagtctgtgggcatc

SEQ ID NO: 501882 - DNA, 101 bp, Homo sapiens
ctccgttagctaattaaaacatttttcagggacgtagccatccagagactgtgagctgcttgtccccatcctgcggccgtcctggggacacagagccctcc

SEQ ID NO: 501883 - DNA, 80 bp, Homo sapiens
agataaattcccggaaccgcgattcggcgtgtcaggtgtttcagtcacctccagtaacacgggcgtgccagatatctcgg

SEQ ID NO: 501884 - DNA, 100 bp, Homo sapiens
gtgcacacatgtagagacctttgtatgtgctggagaatctggtaaaagcaccattgtgaagcagatgaggatcctgcatgttaatgggtttaatggagag

SEQ ID NO: 501885 - DNA, 75 bp, Homo sapiens
ccgaggccgcgaactgcatcatggagtctgcgctcctcagaccaccggcaggtgaacagcctgatgcagaccgag

SEQ ID NO: 501886 - DNA, 100 bp, Homo sapiens
cttgcctgcgcgcctaccaggctcgaccccaggaaccctaaggactctgcaatatgaataattccctagagaacaccatctcctttgaagagtacatccg

SEQ ID NO: 501887 - DNA, 98 bp, Homo sapiens
aaagcacggctctatcatttatcacccatccatcctgcccaggcacagaggagcctctgctatcaattgggcaccagaactagcacctctgaaaagta

SEQ ID NO: 501888 - DNA, 100 bp, Homo sapiens
ttttattcctcggggcgcctttggaaaggtatacttggcacaagatataaagacgaagaaaagaatggcgtgtaaactgaacctaggtccctctgtcctg

SEQ ID NO: 501889 - DNA, 100 bp, Homo sapiens
cgactagcggcggcgggagcggcgccgagaggccgtgcgggacgcgggcgccaggaccggccgaacgcagagttcctgccgcatgggaggcatggccccg

SEQ ID NO: 501890 - DNA, 75 bp, Homo sapiens
gagcccgacctcgggcgccccgccggtcacctccgcgcggacaccaggccttgtctctgaaggagtctgagaaga

SEQ ID NO: 501891 - DNA, 97 bp, Homo sapiens
accactccccaaacaggctggctcccgtctccaggccccaaggagccacacctggaccagaccccaggaaaggtattgggagagttgctgctacatc

SEQ ID NO: 501892 - DNA, 127 bp, Homo sapiens
cggatctggacacccagcggtctgacatcgcgacgctgctcaaaacctcgctccggaaaggggacacctggcctggtctccaagtcctctcctaagaagcctcgtggacgtaacatcttcaaggccc

SEQ ID NO: 501893 - DNA, 100 bp, Homo sapiens
cggcgtggaccacatagacatttacgcggatgtcggcgaagagttcaaccaggagtgaacatggaaaggtttgcagaagaagcagatgttgtaatagttg

SEQ ID NO: 501894 - DNA, 75 bp, Homo sapiens
acagatgtccaagctgccaatgacacaactggagcaagtttccaggaggagagaagaattccagtgaagcagcag

SEQ ID NO: 501895 - DNA, 75 bp, Homo sapiens
cgggtttgccgccagaacacaggttacacgcatggggagatactctggaggaagcatttgagcaatgtgcaatgg

SEQ ID NO: 501896 - DNA, 50 bp, Homo sapiens
cggaggttcctgatctgtacaccaggtagagacggagtttcaccgtgtta

SEQ ID NO: 501897 - DNA, 75 bp, Homo sapiens
ccgcctccgccgctgcctcaggagcggaacaacgtcggcgagcgggccgtgcttcctcaaagactgggaaatgca

SEQ ID NO: 501898 - DNA, 100 bp, Homo sapiens
ggatgaggtaaaagtcggaaacaagatggtcaaagctcgccagtacccttggggtgttgtacaagccaaagaatttagaacgagtctacgtggacacgca

SEQ ID NO: 501899 - DNA, 99 bp, Homo sapiens
caagaaatgttcaaaggaacaacatctttaccatctcatctcaagaatggagggtgactattatatggttaaaaagattttggaggaaaacagttcagg

SEQ ID NO: 501900 - DNA, 115 bp, Homo sapiens
gtcgcgcccgggaggaaggaacgaggcaaggagctaaagcagcgtgcgttcagccctgggttttccaagagataacttcaccaagatgtccagtgataggcaaaggtccgatgat

SEQ ID NO: 501901 - DNA, 100 bp, Homo sapiens
gctgcgctcgcgcccggatccctcaggttgcacactgggccacagaggatccagcaaggatgaagaaatggagcagcacagacttgggggcagctgcgga

SEQ ID NO: 501902 - DNA, 83 bp, Homo sapiens
atgaaatcttccaagtccaaggatgtagtgtcacaccctccgcagattgttctgcccattcataactgggaaccagaagagga

SEQ ID NO: 501903 - DNA, 82 bp, Homo sapiens
cctggcggtttttattaaggctgttcatgtgaaagggggatatgagactttctactcggaatatcctgagtgttgcgtggat

SEQ ID NO: 501904 - DNA, 75 bp, Homo sapiens
cggctcactgcaacctctgcctcccaggaagctgagaagtacaaagctgaagatgagaagcagagggacaaggtg

SEQ ID NO: 501905 - DNA, 83 bp, Homo sapiens
cgccccgcgagcacagagcctcgcctttgccgatccgccgcccgtccacacccgccgccagttgattatggaagattcccaca

SEQ ID NO: 501906 - DNA, 88 bp, Homo sapiens
gggaacctcacttacggctatatactgcttttgcaaaaaataaagatgatggaaaatggtactattttgatgacagtagtgtctccac

SEQ ID NO: 501907 - DNA, 109 bp, Homo sapiens
ggggtggtggttccaatgagacagggcacaccaaactccatctgtaagactttgaccccgacgcaggcttcagtgattgccgcggatcagaagcctgagcactttggct

SEQ ID NO: 501908 - DNA, 100 bp, Homo sapiens
caaagtgatccgaagcgatggagccccagctgaaggaaagcggaatcgatctgacaccgagcagtggtctcggaaagagggtcgtggtcccgcacggatg

SEQ ID NO: 501909 - DNA, 75 bp, Homo sapiens
aaccttggaagtgggatttatttcagtgattcgctcagggcattcttcttgagcaccgagaaaaagaatttggag

SEQ ID NO: 501910 - DNA, 98 bp, Homo sapiens
cagtttgtggcaagacaagctcagaactgagaagctgtcaccacagatgaccgcacctcgagcaggagtggggatgccacgtctgcccccagcgcccg

SEQ ID NO: 501911 - DNA, 101 bp, Homo sapiens
gtattgttcaggacctggccttgcatatgagtctcagatctgagtgggacatacttttgaaggatgtgcaatgttcaatcataagtgtgacaaaaactgac

SEQ ID NO: 501912 - DNA, 74 bp, Homo sapiens
ctgacttgttcaagatgttatcaggccattgaacacccagttcgaaccaatcagattccacgtcagattcctga

SEQ ID NO: 501913 - DNA, 75 bp, Homo sapiens
tcctggacttcgcctttcccgagccctggaggtggggagaaaagcccctcttggagtctgtgccttatgaagaag

SEQ ID NO: 501914 - DNA, 97 bp, Homo sapiens
tttggagttcttacaacatggcagacattgacaactgaacaaaaggttcatcctcagttttctccatgcccatgggaagctgtttacccggattggg

SEQ ID NO: 501915 - DNA, 100 bp, Homo sapiens
agaggcgaattgttccactgtagtgacagatcagtcagtgaaagcatttgctgaacactgtcctgagcttcaatatgtaggcttcatgggttgttcagtc

SEQ ID NO: 501916 - DNA, 96 bp, Homo sapiens
cagaaacaaggtcgtcggctggcggagcggctttacaagttgtgcaaagtgaggaagattactgtgggagtgaagggaatccctcacctggtgact

SEQ ID NO: 501917 - DNA, 97 bp, Homo sapiens
cacagccatcactcatgtccataaggagaatgattacggacctgaagccaaagaacaagatgcgctagtggacagattgctgaccaggggcttgaga

SEQ ID NO: 501918 - DNA, 89 bp, Homo sapiens
gggcggccccggcccgcgcccttgcccctcggccgggcggacggataagttctgaacgtcgaaaagaaaagtctcgagatgcagccaga

SEQ ID NO: 501919 - DNA, 100 bp, Homo sapiens
aactcggagtggcagactgacaactgtgagacatgcacttgctacgaaacagaaatttcatgttgcaccctgcaggtggacacgaacaccaaaaatgtct

SEQ ID NO: 501920 - DNA, 100 bp, Homo sapiens
aatcctggaggggaggtgtttttcctgtcgtacgtgggacaggccacgctgtccgtccgcagtaccgacgcctgcaggattatatctgtccaagatgcga

SEQ ID NO: 501921 - DNA, 76 bp, Homo sapiens
acagagcgctactcctggcagtgcgtcaatcagagcgtcctgtgcggtctagaattacggagtcaacaaagcaaac

SEQ ID NO: 501922 - DNA, 80 bp, Homo sapiens
gtgcatgctgatgacgaaaaacgtcaaaatgcagatcttcgtgaaaacccttaccggcaagaccatcacccttgaggtgg

SEQ ID NO: 501923 - DNA, 75 bp, Homo sapiens
cttccatctctgctgctctctcatttgctggccatcggattgggtaaggttcgtgatcctcgggccaattttgat

SEQ ID NO: 501924 - DNA, 75 bp, Homo sapiens
aaccagtcatgaccactagacccacagctgttaaagcaacagggtttttaatgaccacaacaagcaagcatgcag

SEQ ID NO: 501925 - DNA, 98 bp, Homo sapiens
tgaagctcttactggatcgaggcggtcagatcgatgccaaaactaggagaatggatcttggagaatgtctgaaagtccatgacctggctttaagagcg

SEQ ID NO: 501926 - DNA, 75 bp, Homo sapiens
gaagtcttctgtgagaggacacccaaaacatgtgaggctttccttaaagtttcccatgtctcaatggactcctga

SEQ ID NO: 501927 - DNA, 75 bp, Homo sapiens
gcgaaggaggaggcgttgccgggtagattggggtcaactggactacttagttgtagacatgccaccaggaactgg

SEQ ID NO: 501928 - DNA, 88 bp, Homo sapiens
tgatgagctgaagactgattacaagaatcctatagaccagtgtaataccctgaatcccattggtggaacgagaatgcctacacgcagc

SEQ ID NO: 501929 - DNA, 100 bp, Homo sapiens
caatacagaggcagagtccgggtccagctcaaacaggaagatgggagcctctgccttgtacagttcccatcacccctactgccaataaagggaaaataag

SEQ ID NO: 501930 - DNA, 100 bp, Homo sapiens
tccttaagttccttgcttttttgctgctgtttggtgactggaagaggcaccagagactctcactctggggagtgagaaagatcagtctaaagaaaaggag

SEQ ID NO: 501931 - DNA, 100 bp, Homo sapiens
tcgatgtcgaacggtattagcagaatacaatatgtcttgtgatgatgcagggcaagaatcctttcgttccatcacaaggtcgtattacagaggtgcagca

SEQ ID NO: 501932 - DNA, 100 bp, Homo sapiens
ggaatctgatcctccacttcagagaacagggatggtgaccccagaggaagacgtgcattgggtccgctggccccaggccagtgtctctcagccatgtgct

SEQ ID NO: 501933 - DNA, 74 bp, Homo sapiens
ccagtgtcccttcttccacatgaaaaggataagcgtttgctgccaattgatggggcaaatgatctcttttttca

SEQ ID NO: 501934 - DNA, 100 bp, Homo sapiens
ctcagggcatcagttggagctaccgacctgagcccacaaactcaagagagtgataatgaactctcaagtggaacaggtgatgtgtctaaggattgtcctg

SEQ ID NO: 501935 - DNA, 100 bp, Homo sapiens
ggaaaaactggagagcttcatcaaaaatagtgatagctttgataagttttgcacactagggaccaagaagccctcggggacactgctgagaaaagactgc

SEQ ID NO: 501936 - DNA, 100 bp, Homo sapiens
agacttaccacatctgagagaaacctgacatgtgggcatacctcagtgatccttaatagaacctgtctgagaaactctctgaacaagaattacaatttcg

SEQ ID NO: 501937 - DNA, 100 bp, Homo sapiens
ggcgggggcctgcagcaagctcgccgatgccctctgcgcctgctgggcccgcaggtgcctacctttgcccgtcgttccaatgtcctgaccggcctccagg

SEQ ID NO: 501938 - DNA, 83 bp, Homo sapiens
gccgctctgcgggactctgaggaaaagctcgcaccagaattggtagggtgcccccctttttcacagagaacatacaggctttt

SEQ ID NO: 501939 - DNA, 83 bp, Homo sapiens
gccttgggcctcgcgccggctatggccgtgccctggggctgagccctcagaacaccttccaccatgaccacctcagcaagttc

SEQ ID NO: 501940 - DNA, 90 bp, Homo sapiens
tacagtatgcacttaatgtccctaaagatgaggtctatcttaatctggtgctggactatgttccggaaacagtatacagagttgccagac

SEQ ID NO: 501941 - DNA, 100 bp, Homo sapiens
aagaattggtatttcaaatgaccaccatgttgcaaaaggtgagtacccagaacatgaagatgggtgggctgccgcgtacaacacctccaactcagaagcc

SEQ ID NO: 501942 - DNA, 112 bp, Homo sapiens
tggggagcgcctcgtcgacatgagtgatgtggaggaaaacaacttcgagggcagaattgatatcagtaaatgccattatttagtggatttggacaccatgagagaaacaccc

SEQ ID NO: 501943 - DNA, 75 bp, Homo sapiens
ccctgcctggacccctactattgcaacaagatccagacatttaatgtggatgcaccatgccagaccgtggaagat

SEQ ID NO: 501944 - DNA, 103 bp, Homo sapiens
aaaaagaatggatcaaccaagaacgtcaaacactccaacaattgagagcatttaaagatgacccagatgatgtggtaccagttggccaaagaagagcctggtg

SEQ ID NO: 501945 - DNA, 75 bp, Homo sapiens
tgtccaacctggggacgattgccagatcggggtcaaagcctcttccatgagtggggagcccgctgcttgtctcca

SEQ ID NO: 501946 - DNA, 90 bp, Homo sapiens
cgctagtgatcctttgcaccctgcttggagacggacttgcttccggacactggggttgggaaatcaagcatcgtgtgtcgatttgtccag

SEQ ID NO: 501947 - DNA, 101 bp, Homo sapiens
ccttccctgacccccagttacgcctggaatatgaaggcttccccgtcccgtattaaaggtggaagaaggtccatatctttttctgtgggtgcttcaagtgt

SEQ ID NO: 501948 - DNA, 75 bp, Homo sapiens
ggagagcgggcagccttccaggtggacaggaaagttcacatccttggctccttccaaaatatcaagatggcaaga

SEQ ID NO: 501949 - DNA, 100 bp, Homo sapiens
tcgacatttccacacccagacccaaagtttgcaacaatcagtcagggatcctgcctttcagatgattacaattgccaaggaaacaggccttggcctgaag

SEQ ID NO: 501950 - DNA, 87 bp, Homo sapiens
aagtaatgggatgaataaaattggactcagagtttccattgacactgatatgtcatccgtccttggctcaggatttggagagcttgc

SEQ ID NO: 501951 - DNA, 100 bp, Homo sapiens
gggttggtaaagacagcttctgggccaaagcagagaatgacagtccctatcagggtggagtatttttcttgacaattcatttcccaacagattacccctt

SEQ ID NO: 501952 - DNA, 75 bp, Homo sapiens
gtggaggaggtggatgtgaaagatcctaactatgatgatgaccagttttgattacgaagatgcaggctaccagac

SEQ ID NO: 501953 - DNA, 75 bp, Homo sapiens
cccggagtgtatgtctttggagaacttctggagctggccaacgtgcaggagctttccagttctcagggaacaata

SEQ ID NO: 501954 - DNA, 75 bp, Homo sapiens
ttctagtctggggtcaagaacactgggcgtctctggccgagcctctttttgtggaaaacgacagcagcagcagtg

SEQ ID NO: 501955 - DNA, 100 bp, Homo sapiens
aaaaacaatcgcttcaatgatgggaaggtggatcccgccgggaggtactttgctgattccctggactttgtcacccagtggctggaagaagcctcagagg

SEQ ID NO: 501956 - DNA, 75 bp, Homo sapiens
gttccccaacatgcctcaccctcatctatatcctttggcagctcacagccaaaccaaacaggaagcttacttttc

SEQ ID NO: 501957 - DNA, 50 bp, Homo sapiens
atgggatccagctgttagtcggagactctccaacatgtgccttctgacca

SEQ ID NO: 501958 - DNA, 100 bp, Homo sapiens
gaagagtaaaacgccggaattgtcctttccaacatccagagctgcatcattccttggggcaaaatgtggacaaggattgtttgggatgaaaagaaaaacc

SEQ ID NO: 501959 - DNA, 100 bp, Homo sapiens
atagaaaacggcgagagtgggcgagaacgtccactgcgggccggcgaaagctggaccaagaatcgccttcagccctgtctggtgcatccttggcagaaag

SEQ ID NO: 501960 - DNA, 137 bp, Homo sapiens
ctggccgccgccgggagagcccggggcagagcagaggtgctcatcagcactgtaggcccggaagttcctctgtgacgagggtgcaggtatctctggggactacatcgatcgcgtggacgagcccttgtcctgctctt

SEQ ID NO: 501961 - DNA, 90 bp, Homo sapiens
tcaacaccaagagtcaggcagtgaaggtggagccttacaaagtaaacctctctcaagatttagagcatcagctgcaaaacatcattcaag

SEQ ID NO: 501962 - DNA, 100 bp, Homo sapiens
ctcaaggcccacctgcgccggcacacgggtgagaagcccttcgcctgcacctggccaggctgcggctggaggactggttgccataaaggaagcccacgac

SEQ ID NO: 501963 - DNA, 98 bp, Homo sapiens
cgacgagcaggtggcggcggctgcagacccaacatgagtgaagtttcctgcaagaaacgggacgactatttggaatggccagagtattttatggctgt

SEQ ID NO: 501964 - DNA, 92 bp, Homo sapiens
attgactgttccggggtgcaccgctccctgggcgtccatctgagcttcatcagaaatgagccgtcagactgctacagcattacctaccggta

SEQ ID NO: 501965 - DNA, 97 bp, Homo sapiens
ccacacgcccggctcccccacagagacctcctccgccttcaggtgaccaagaatatggcccaggtgaccaaagccctggacaaggccctgagcacca

SEQ ID NO: 501966 - DNA, 51 bp, Homo sapiens
cagcggccgccgagctctcgccagggccaaggagatctgttgaagaatgcc

SEQ ID NO: 501967 - DNA, 100 bp, Homo sapiens
tctgccagcaggtggtgcggaaagtggctggattggacaagcaggcaaagctgagatgggcttccccaaggatttattgacattgctacttgagtgtgaa

SEQ ID NO: 501968 - DNA, 100 bp, Homo sapiens
ccgcgagaggcttcgtcgccgctgcagctccgggggctcccaggggagcgtgcgcggaacctccaggcccagcagctgttcgggggtcttgtctggattt

SEQ ID NO: 501969 - DNA, 97 bp, Homo sapiens
atttatctggtgaaatatgtgaaatgcagaccgaagaattagctggaaattctgagacactaaaagaacctgaagcccttcagcggccagtagcatc

SEQ ID NO: 501970 - DNA, 75 bp, Homo sapiens
tcccagcctcaggcgtgcgcggacggtgtgcggagagatgcaggtcagctcctccagtaccacaacttctgagag

SEQ ID NO: 501971 - DNA, 101 bp, Homo sapiens
caaaatggcgccctacagcctactggtgactcggctgcaggtggtgatcgtggcagaggtggccctggtggcatgcggggaggaagaggtggcctcatgga

SEQ ID NO: 501972 - DNA, 134 bp, Homo sapiens
agaaactgcagattcagagaacagtgacatacaaagccttttatccctcacgtcagaggagtacacagatgaaatctgaacggagaggattaaccaaataccatttggacttaaaagcagcttgaggccgggcg

SEQ ID NO: 501973 - DNA, 96 bp, Homo sapiens
tgacattgaggaaagaagcagctatgaagaccagggggttcagctttccaagacaaaggtgctggagaatctggtaaaagcaccattgtgaagcag

SEQ ID NO: 501974 - DNA, 89 bp, Homo sapiens
aagaaaagctgtggcaaccgaaatgagactccctcagatccagtgataattgacaggtgctgctggtgagtagcagccggtacccagac

SEQ ID NO: 501975 - DNA, 97 bp, Homo sapiens
accagggactggcagctccactgccgtcaactcctgttctcctcagagcctgtctaataaagttcctgtcgttcagcacccgcatcacatgcatccg

SEQ ID NO: 501976 - DNA, 98 bp, Homo sapiens
agtatttctttggcatcactgcagctagtaatttgccttctggattgttggtgacatcgtgaaagtcacaaggatgaatataaatggccagtgggaag

SEQ ID NO: 501977 - DNA, 100 bp, Homo sapiens
ccccttggagccaggcgccggggtctgaggaaaatatgagagccacacccgtgttcacacaggtgagaagccctttgagtgtgatatttgtcaccagcgc

SEQ ID NO: 501978 - DNA, 97 bp, Homo sapiens
aacaacgttctcccgcaaaaacttcgcatatcatttaagtggatggttcgagctttctctggatacttagctacagatcagctcttgcttttatggg

SEQ ID NO: 501979 - DNA, 50 bp, Homo sapiens
caagagtggagacaaagagatgagcaggtttactcctggcttgggggcat

SEQ ID NO: 501980 - DNA, 82 bp, Homo sapiens
cgccgccgccgccggagctaacctcggggaccgagatgcaggtatcatgatattagctggtttgacatcaagtcatttgtga

SEQ ID NO: 501981 - DNA, 83 bp, Homo sapiens
aagtggagcgtgtcctgaaggagttccaccaggccgggaagcccatcggataacgaaggaggcccaacttcattcaataagga

SEQ ID NO: 501982 - DNA, 83 bp, Homo sapiens
tgtctccccaggatgtgacgaccatgcaaacctgacctctgtgagtgaaagccttcagagggaagctgctaagaagcaggcca

SEQ ID NO: 501983 - DNA, 97 bp, Homo sapiens
gaaggatggaagaagagacgaagagacagctggatgaagttcgagaacttgtcttggacaattgcaaatcaaatgatggaaaaattgagggcttaac

SEQ ID NO: 501984 - DNA, 75 bp, Homo sapiens
cggggctgtggcacggtcgggtccggggttaaagaactgaatcattatctggaagctgagaaatcttgtaggact

SEQ ID NO: 501985 - DNA, 96 bp, Homo sapiens
ctgatcaagactgatgatgtcctggatctgataacaatgatgatgttatgttgatttctgtggaaagtcctaatttgacaactccaattacatcaa

SEQ ID NO: 501986 - DNA, 50 bp, Homo sapiens
attgggtcgatctgtgacagattacatagtggaatgtcatgggatcaccc

SEQ ID NO: 501987 - DNA, 80 bp, Homo sapiens
gagcaggagcccggcaccccccgccgacaaggaggcaattctgtggtgttcttggtcacacatttatggagtttctgaag

SEQ ID NO: 501988 - DNA, 100 bp, Homo sapiens
atttcaacctgaaagtggaggctgcgaaaatagggagcacagtgggctttctcctcaagatgacactaattctggaatgtcaattccccgagtaaatccc

SEQ ID NO: 501989 - DNA, 100 bp, Homo sapiens
ctcaaggcccacctgcgccggcacacgggtgagaagcccttcgcctgcacctggccaggctgcggctggagtgtgtcccggcatggatatccggaacaac

SEQ ID NO: 501990 - DNA, 75 bp, Homo sapiens
cagatttctgctcacttcatgggctggcctggaattgacgatggctttgaagacaagattcccaaaaggagattc

SEQ ID NO: 501991 - DNA, 101 bp, Homo sapiens
cgcggggctgtccaggcacgcgaggcccctcaggaaaagtacccagatgccgtgtacctctcggaggggccctcctcctgctccatggggatccgcagcgc

SEQ ID NO: 501992 - DNA, 80 bp, Homo sapiens
gctggaaggaaccgctctcgcttcgtcctacacttgcgcaaatgtctccgaatgccacccagaggatgtttgaaattgac

SEQ ID NO: 501993 - DNA, 83 bp, Homo sapiens
ctgcgggaaatcgggctgaagcgactgagtccgcgatggaggagttgtatcccgcattttgtattcacaacggaggctccgac

SEQ ID NO: 501994 - DNA, 100 bp, Homo sapiens
ttctacagcacccggtgctgcggctgttgccatgtccgcaccgggacgatcatcctggggacctggtacatggtagacatagctgacattgagaatgaag

SEQ ID NO: 501995 - DNA, 51 bp, Homo sapiens
gttttcattgggcaaaatggggagtagatcccataatagatcacgttcaag

SEQ ID NO: 501996 - DNA, 100 bp, Homo sapiens
cagacagaggggagcacagagaaagagaatgatgaagagaaaggcccggagactcatgaagaggaaccacctcagaatatgaaaccacaatcaggaaacg

SEQ ID NO: 501997 - DNA, 100 bp, Homo sapiens
agaagactcttgtcacactaattgccaacaacaatgcatgctacaagtgaaaactgatgagaaactgaatgtgtctgatgagaatacagcaagttgccct

SEQ ID NO: 501998 - DNA, 90 bp, Homo sapiens
gttcaagctgcattttagacatagctggcaagagtattttcgtggtacttttaggttgaaatacgcccctccagcagaaagtctggactc

SEQ ID NO: 501999 - DNA, 83 bp, Homo sapiens
ggcccacgccagcaccagcgctatggcgggttgggttcaatatacggagagtgccctgtgccaaagccacgagttgatcgtcc

SEQ ID NO: 502000 - DNA, 100 bp, Homo sapiens
cctgcacgcccgccgcgcacagagcataaagaatctgcgctgaggaggcaggagaagaaagccggtctcctctgagcctccggcctccataagacccaaa

SEQ ID NO: 502001 - DNA, 100 bp, Homo sapiens
gagattgactccttgaccagcatcttggctgaccttgagtgcagctccccctataagcctcggcctccacagatgccttcaattaagttgcagagttctg

SEQ ID NO: 502002 - DNA, 75 bp, Homo sapiens
tcggtcctgtttcgacagcgaacatgtcgcggcctgtcagatatggaatgtgcagatgtcccactattaactcca

SEQ ID NO: 502003 - DNA, 75 bp, Homo sapiens
agcatcctgaaaaccccaaagctggtgtctgacttccagcaactgctggcctgtgccagggtgcaagctgagcac

SEQ ID NO: 502004 - DNA, 109 bp, Homo sapiens
tggcagacgagcccgaggacctggacacggaggacgagggcctcatcagcttcgaggaggagcgggaaagaccacagcaagattctttcattcgtctcctcctagcctg

SEQ ID NO: 502005 - DNA, 101 bp, Homo sapiens
cggcgctggacgtgctcctctccatggggttccccagagcccgcgcctgggagtgtccactcgccttccaccagcatggcaacgtcttcacagtaccgcca

SEQ ID NO: 502006 - DNA, 100 bp, Homo sapiens
aacatggctgcggccgccgcctccgcctcccaggatgagctgatctcagctgtttcagttccgggaatgacagatacctcagtcttggaccaatggaaag

SEQ ID NO: 502007 - DNA, 75 bp, Homo sapiens
cggaaaccagtggccacagcatctttgtctagccccagtgcaggttttttgcatgtctgacacccatgactccac

SEQ ID NO: 502008 - DNA, 99 bp, Homo sapiens
ggcgcgcggcgagccggaagtcacggtggagatcggagaaacgtacctgtgccggcgaccggatagcacctggcaggagaaggcagagcccccccaggc

SEQ ID NO: 502009 - DNA, 100 bp, Homo sapiens
cagtcctcgtcagcactgactttcagctatggaatcgatacctcaccaccaaggagcagtttcaccaattcctggaagccaaagggcaggagaagacttg

SEQ ID NO: 502010 - DNA, 100 bp, Homo sapiens
ttttgatgttgtcattgatggtctcaatgttgccaaaatgtttcctaaagttcgtgaatctcaacttgctttaaaggagatagatgaagttggggaccta

SEQ ID NO: 502011 - DNA, 90 bp, Homo sapiens
gcaaaatggggatctccacagtcatccttgaaatgtgtcttttatggggacaagttctatctacaggacccagatgatgtggtaccagtt

SEQ ID NO: 502012 - DNA, 90 bp, Homo sapiens
gtacagagatgtgatgttggagaactatagcaatctggttttcttgggcaaaatttggtttctctaatattactggaattgattactctc

SEQ ID NO: 502013 - DNA, 75 bp, Homo sapiens
gctgtggaccccctgcgaaggacagtggagaagtacagcatggaggtacagcaggtacagactgtgcagcaggta

SEQ ID NO: 502014 - DNA, 75 bp, Homo sapiens
attttgattcccaagtaattatttatggaaaacaagttataatcaatctgcggatagcaggctccaagctctctc

SEQ ID NO: 502015 - DNA, 82 bp, Homo sapiens
taaagtttcatcaacttccataccgggagatggagcatttgagacaggtgcccctgggcgctgggattgctctagcctgtaa

SEQ ID NO: 502016 - DNA, 125 bp, Homo sapiens
ccgatgtctgcgggaataggacctatggcgtggtggcccagtactaccggcccctgcatgtttggtgcacctcgatttggaggaagtagggcagggcccttatctggaaagaagtttggaaaccc

SEQ ID NO: 502017 - DNA, 89 bp, Homo sapiens
tgccacttcgacatcgagatcaaccgggagccggattacaagtggacacctgagtcagcaggacctggaatcccagatgagagagctta

SEQ ID NO: 502018 - DNA, 100 bp, Homo sapiens
gcgccgctgacttctccactggttcctgggcaccgaaagcgcctgaagggaaacgatcctcaggcctgacagccgtttgggtcgctcgaaatcggtttgc

SEQ ID NO: 502019 - DNA, 102 bp, Homo sapiens
aaagagcaaagaagaggcctgcaaagctgtacaagagatcatgcagaacgacaccgtaactatccgcactagaaagttcatgaccaaccgactacttcagag

SEQ ID NO: 502020 - DNA, 100 bp, Homo sapiens
atctttcaaaacaagaagagggtcctgctgggagaaactggcaaggagaagctcccgcgggcctgaacctggacgactgctccatgtatgaggacatctc

SEQ ID NO: 502021 - DNA, 101 bp, Homo sapiens
ctttattaaaagtgaatgtttaaataatattggtgactcctctcctctgattagagccactgttgtatgtgccaagagttgtaacctctgcacaacagaaa

SEQ ID NO: 502022 - DNA, 80 bp, Homo sapiens
acatccacctgatcccgtacatcattcacactgtgctttacgtcctgaacacagaaataagtcatactgtgccagacata

SEQ ID NO: 502023 - DNA, 98 bp, Homo sapiens
gagcctcaagtgcttctgcattacaatggagtttcactcttgtctcccaggctggagtacaatggcatgatctcagcttactgcaacctccgtctcct

SEQ ID NO: 502024 - DNA, 83 bp, Homo sapiens
taaggattccaagtaactcttatttgctctaagcgaaagacatgaggcctcagcctgaaatgaggttgttttgaggtcatctg

SEQ ID NO: 502025 - DNA, 75 bp, Homo sapiens
acctagacctggaatcgcccaagtccctctactcgcgagatggccaaaaaggctttgaaatctgagtccgctgcc

SEQ ID NO: 502026 - DNA, 49 bp, Homo sapiens
cttagctcagcaattcttaccttgaatactcccccagttgcaagaggcg

SEQ ID NO: 502027 - DNA, 98 bp, Homo sapiens
aaaaaacacacccttgcactatgctgctgcctcagggatgaaagcctgtgtagaggttgttcggaatcctataattgaaaaacagtaaagatggaaaa

SEQ ID NO: 502028 - DNA, 75 bp, Homo sapiens
gcagcagagatgataacatgtttcagagccatcgcctgtgacactgggtcgaaggagttctggccgacagggagg

SEQ ID NO: 502029 - DNA, 90 bp, Homo sapiens
acctgggtgaactttcacggacaacctcagaggacaacgaagtgttcgatcctgataacttaagtgactctctcttttccggtgatgaag

SEQ ID NO: 502030 - DNA, 88 bp, Homo sapiens
acctctgatccagcacctccttgctgcctagaaaataatcgcagatacgtgcaaaaaggtgaccattgtgaggtagatattttgttct

SEQ ID NO: 502031 - DNA, 82 bp, Homo sapiens
cgcgcggcggggcagaccgctggggactgcgggcggcgctgtgtccgtcgccatgacaggttcttctgtgtggcagttcaga

SEQ ID NO: 502032 - DNA, 101 bp, Homo sapiens
gcgagtttccgatttaaagctgagctgcgaggaaaatggcggcgggaggcgctagatggggccttcacagaggagaaccgtgcccagtgccgagcagcaac

SEQ ID NO: 502033 - DNA, 100 bp, Homo sapiens
ggcagatcagagggagctgagggaggcctgacctgaggccggcacccggagctggcgggagccagacccagagaccttcacggcatggtgcaactcccac

SEQ ID NO: 502034 - DNA, 50 bp, Homo sapiens
attctgtcttcacaagcagaaggagtgtggccatctggggccgtgtggta

SEQ ID NO: 502035 - DNA, 100 bp, Homo sapiens
ttctactgaattagtttctggaggatctgataatcaagtgattcactgggaaatagaggataatcaggaggatttgacagctaaggatattgaagaaatt

SEQ ID NO: 502036 - DNA, 100 bp, Homo sapiens
cttgcacggatacctcagcgggcgccacggtggctcccagaattatatccagatcgagagacagaagattctgaaagggttcaatgaaatgagagtcatc

SEQ ID NO: 502037 - DNA, 75 bp, Homo sapiens
ccggttggcccgggacgagtggaatgtgcattgaagtaatgggagatggatgccttaataatgaacactttgaag

SEQ ID NO: 502038 - DNA, 96 bp, Homo sapiens
tttggatatatgaaattacatccagaggattttcctgaagaagtcattgaaattatgagactatcattcaaatggaagcattatagttcttcggaa

SEQ ID NO: 502039 - DNA, 90 bp, Homo sapiens
atttaaggtctcatttccaaaaataccaagtttctgaaatttcaatttatgattctactaattacaggcaagacatctgtatagattctg

SEQ ID NO: 502040 - DNA, 99 bp, Homo sapiens
ctgctcctccgcgcccgcggctcgcgcgctcccgaggaagagtgagggcgcgacgcgcaccaacggtggaggcacgtctgagaatggtggatgtggtgg

SEQ ID NO: 502041 - DNA, 82 bp, Homo sapiens
cgagccccgcactctctcgatgagtcggagaagtccctaagactttgaccccgacgcaggcttcagtgattgccgcggatca

SEQ ID NO: 502042 - DNA, 50 bp, Homo sapiens
cattgatctaagtgtgtgcacacaatggaaaaatatattcagggggaaga

SEQ ID NO: 502043 - DNA, 108 bp, Homo sapiens
caccgcaagatcggagagcgcctggccgagatggaggactacccggctgccttgcagacgcaggaggcgcaggtgctgaagcagctggcggagcggcgcgagcacgag

SEQ ID NO: 502044 - DNA, 99 bp, Homo sapiens
aaaccccaacaacagctcccttagcctcccctggtgaagacacaaactgtcaccatctcagataatgccaatgctgtgaaaagtgaaatcccaaccaaa

SEQ ID NO: 502045 - DNA, 75 bp, Homo sapiens
ccatcacccaccaacaacaccacaataatccacagccaagcctcaaggaataggttctcctagtgtctatcatgc

SEQ ID NO: 502046 - DNA, 99 bp, Homo sapiens
ccgctgctcccgctcctgctgggagaggattctgtttctggcgtctgcatacgcaagtccccaactcgctgaggagagctgttcagctatggctgctgt

SEQ ID NO: 502047 - DNA, 96 bp, Homo sapiens
tgagccaaccacctgggccagtattatcaggcatggagatgctactgatgtcaggtgaggacgtgtgcaaacgtggcttcactgtcatcatcgaca

SEQ ID NO: 502048 - DNA, 90 bp, Homo sapiens
ttcccgcgtccgccgattcctcctccttggtcgccgcgtccttggctggcgtgtaaagtcagtgataaatcttttgtttgctgcatatac

SEQ ID NO: 502049 - DNA, 75 bp, Homo sapiens
attgaattaaacaagacgtgcaaagcaagtggttcacgaggtccctgtgcgttttattgcgacctgccggtggga

SEQ ID NO: 502050 - DNA, 100 bp, Homo sapiens
cagcatggcaagccagacccggacatcttcctagcttgtgccaagaggttctctccccctcctgctatggagaagggacatggatgaagctggaaaccat

SEQ ID NO: 502051 - DNA, 50 bp, Homo sapiens
aggagctcaatgcccacaaccagggctgccggtcacttgctgcagggcac

SEQ ID NO: 502052 - DNA, 50 bp, Homo sapiens
ccaactgttacaatcaaggtctatgaaggatgcttaaatggcagaggcca

SEQ ID NO: 502053 - DNA, 100 bp, Homo sapiens
gcggctgtatccgacgccgcgagttcgcggtgtcatggagaaactccagctgggcccagagattctgcagcgggaaaatccaaggcttatttatgccagg

SEQ ID NO: 502054 - DNA, 103 bp, Homo sapiens
cggctctgccactttggcagcgttaagtgtggaatcggggcctgtgtccgcgggcttgtgactttctcattctccctgggtacatcgacttcactgcagacca

SEQ ID NO: 502055 - DNA, 100 bp, Homo sapiens
agcctcggaaagtgctcctgcggctgtatggagcgattttgcagatggaattttggaagcagctggggaacctgggcgtattgggcatcacagcccctgg

SEQ ID NO: 502056 - DNA, 99 bp, Homo sapiens
ggaggctggaagttcaacagaaggcaaatacgaagacgaggcaaagcacccagctttcttcactcttccggctgtcacccttgacccaaactttctgga

SEQ ID NO: 502057 - DNA, 88 bp, Homo sapiens
ctatgctgctgtaacacagtttgagagaagggatctcaatgtgttgcctaggctggtctcaaacccctgggctcaaacaaacaatcca

SEQ ID NO: 502058 - DNA, 74 bp, Homo sapiens
tctcgcgcagggcggccccggttctggtgtttggcgtcggaatgatatggaacctagcaaagctgttccactga

SEQ ID NO: 502059 - DNA, 50 bp, Homo sapiens
tggggattcctgaggccgtgtttgtggaactccaggatggcattgggcag

SEQ ID NO: 502060 - DNA, 103 bp, Homo sapiens
gcgatgttcaaccgcgccgtgagccggctgagcaggaagcggccgccgtcaggtactccaaagattcaggtttactcacgtcatccagcagagaatggaaagt

SEQ ID NO: 502061 - DNA, 98 bp, Homo sapiens
tttggatgagacttttaaagatgcagaggatgctttgcagaaacttcataaatatatgcaggggagaatcgctttgtgtcaccattatcttgggactt

SEQ ID NO: 502062 - DNA, 100 bp, Homo sapiens
tcccccacagaagccccctcggtccatcaccctcaggtgccgtggaggtcccagcccccgctgcggttctcggaggtccggagcccctgatgcagtgcac

SEQ ID NO: 502063 - DNA, 83 bp, Homo sapiens
ctcagactcttagtcccctactcccagatacagcggccctaccgtggctcctggcaagaaccacgaagctgccctgagacgct

SEQ ID NO: 502064 - DNA, 90 bp, Homo sapiens
cagcaaattgaagactttcgacaaggaagtgaaacaccaatgcaggtggttattaacttggtgatgcttttggctgaaatgaaaatacag

SEQ ID NO: 502065 - DNA, 92 bp, Homo sapiens
tcgaggacggtcggactcccgcggcgggaggagcctgttcccctgaggtgtcgtgaaaactacccctaaaagccaaaatgggaaaggaaaag

SEQ ID NO: 502066 - DNA, 96 bp, Homo sapiens
gatatgacagcttcattgaacttcaggagaaattacatcagaatatttgcagcaagtctggaaaagtttgaaattccagtaaaaattcgtttgagt

SEQ ID NO: 502067 - DNA, 50 bp, Homo sapiens
agtttgggttcgccagttggaattgaaggacatgaacaagctgagtggag

SEQ ID NO: 502068 - DNA, 122 bp, Homo sapiens
cgcgggttttgggccgaggcctgggttacaagcagcaagtgcgcggttggggccactgcgaggccgttttaggtgctggagaatctggtaaaagcaccattgtgaagcagatgaggatcctg

SEQ ID NO: 502069 - DNA, 74 bp, Homo sapiens
acctcagaagtaaatttggagacctcttcaggtaacacaagtggcaagacagccgggaacccctaccccatccc

SEQ ID NO: 502070 - DNA, 100 bp, Homo sapiens
cgctgccgactgcatttcctcagtcacgggcctagaactccaaggagaaaggcggcggagctgactgctgggcaggaacgtctctcaggagaaagagtgg

SEQ ID NO: 502071 - DNA, 73 bp, Homo sapiens
attcgcagtggtcgcttcttctccttgtcaggacagctgaatgagtacacagaacggaaggagatgtcagcag

SEQ ID NO: 502072 - DNA, 100 bp, Homo sapiens
aagggggtccccctgtaccgccacatcgctgacttggctggcaactctgaagtcatcctgccagtcccggtcgctttgctgttcgtgatatgagacagac

SEQ ID NO: 502073 - DNA, 90 bp, Homo sapiens
caaagattcagaccagcgaaacctcacctaaagcctttcaatggtcggcactcttcaccctcccgagccctgcccgtctcggccccatgc

SEQ ID NO: 502074 - DNA, 75 bp, Homo sapiens
aaaagctttatggaaactgcaatggatgttgttgatggtggtggttgggggccaagcaccaaaggctatccggag

SEQ ID NO: 502075 - DNA, 75 bp, Homo sapiens
gaggatgcttctcatcattgccaccactcatgaaggcccgaacaagacaggaacgtcctgtgccctggactgtgg

SEQ ID NO: 502076 - DNA, 82 bp, Homo sapiens
ggagaagcaggcgtgtcacctggcattttttactgtctacagaaacttattgtaattcatttttcctcactccagtagtaag

SEQ ID NO: 502077 - DNA, 75 bp, Homo sapiens
agacagtcctcgtcagcactgactttcagctatggaatcgggtgtgtccgcagccggccaggtggtatccctgaa

SEQ ID NO: 502078 - DNA, 75 bp, Homo sapiens
ccgcgcgacgtacccgccgccgccgttggctggagcaaccatgtccaagggacctgcagttggtattgatcttgg

SEQ ID NO: 502079 - DNA, 80 bp, Homo sapiens
agtcctccagtgtttggatattcaggaactgattcatttggaagaaagattaggcaatgtcaatcgtggagcatcccagg

SEQ ID NO: 502080 - DNA, 82 bp, Homo sapiens
gcttatggcggcgctggagagggggcgctgagctgttgggatgcgagccacccctctggctgctcctgcgggttccctgtcc

SEQ ID NO: 502081 - DNA, 90 bp, Homo sapiens
agaccgtgaccgagagcgtgaccgagagcgcgaatatcgtcatcgttagaaggtgctgatgggaagggtgcctgacaggggaggccggcc

SEQ ID NO: 502082 - DNA, 90 bp, Homo sapiens
ctcagaaacatcagttactctgaagggcatcatgcatcttactgaagcttagcagtgtctgcaaaaacgaatcttttcctacaacctgtt

SEQ ID NO: 502083 - DNA, 82 bp, Homo sapiens
ctgcctgggaggaagagaatttgtccaaatacaaagacagcacccgacagctacaaagtgcaagataagaaaaatgcctcca

SEQ ID NO: 502084 - DNA, 82 bp, Homo sapiens
cccatcctgccgtccttctccactttcgccagcccgtgccgcgagcgcggcctgcaggagccatccgggtgacctgcatagg

SEQ ID NO: 502085 - DNA, 126 bp, Homo sapiens
cttagtcctgggagccgcctccgtcgccgccgtcagagccgccctatcagaccctggaagctgtcctgaatttcaaatactctggaggcccgggccacactgaaggatattacaggaatctctccc

SEQ ID NO: 502086 - DNA, 74 bp, Homo sapiens
gggcacaaggcccaggagagcaaggtcaaatttgagctgattgtgtcagaggcctcctacctgcgcagtctaaa

SEQ ID NO: 502087 - DNA, 100 bp, Homo sapiens
ccgcgtctgtgtccgtcgctcggagggtggaagccggggtctcgcgggccgcgggccgcatgtgggtcctggccttcgagatcttcatccccctggtgct

SEQ ID NO: 502088 - DNA, 96 bp, Homo sapiens
cctctgccgccgccgccgcgttggcctcgccgcccctgctcggcatccctctctacctgccaacatcctgtattagagaacttgtggccggaggtg

SEQ ID NO: 502089 - DNA, 78 bp, Homo sapiens
gagaagctgcatcccagaggagcgcgtccaggagcggacccgaaagtttcctacactactgaggtttaggggcactgt

SEQ ID NO: 502090 - DNA, 100 bp, Homo sapiens
agcgaacccgcgtgcaacctgtcccgactctagccgcctcttcagctcgccatggatcccaactgctcctgcgccgccgttggcttcagctgttctggag

SEQ ID NO: 502091 - DNA, 82 bp, Homo sapiens
gaatttgaaaaatgaagatgatgtagacactggactattagacttaattcagtgcacaaatgagatgaatgtgaacatccca

SEQ ID NO: 502092 - DNA, 100 bp, Homo sapiens
gagcgcggagcccggctcccgcaccatggaggaggacgacagctacggggaggcgccacctgctgcagaagtttcctcatcttttgtgatcctgtgtgtg

SEQ ID NO: 502093 - DNA, 82 bp, Homo sapiens
gagacgtaccggctctggaaaatccgcaagaccatcatgcaggaccaagaatcgccttcagccctgtctggtgcatccttgg

SEQ ID NO: 502094 - DNA, 75 bp, Homo sapiens
tgtcactcatccacctgctggtgatggaaagaagccttctattgctgctgcaagaggaggaacgacgtagaagag

SEQ ID NO: 502095 - DNA, 133 bp, Homo sapiens
gagctcctgccagcagtgcctggctgtgagccccatgtgtgcctggtgctctgatgaggtactaggttttgacaagcttgcatcatgcgtgagtataagctagtcgttcttggctcaggaggcgttggaaagt

SEQ ID NO: 502096 - DNA, 75 bp, Homo sapiens
attgctcccaagagggagcgtaagacggccccccggacagaccacccagccctgtacagggacctgctgaggacc

SEQ ID NO: 502097 - DNA, 101 bp, Homo sapiens
agacacaccaggccggcaggctgagaaaagcgagaccgcgtgcgaggaccggtgcccgtggttgacacgagctgtgtccccagctgttcccgtctacaatg

SEQ ID NO: 502098 - DNA, 82 bp, Homo sapiens
tggagacagcaatctcaacttcaggctacagaagaagtttccaaaaatctggttgccatgaaagaaattctgtatggcacaa

SEQ ID NO: 502099 - DNA, 100 bp, Homo sapiens
acgacagctgcccgcgggcccagcctgacgccatctcacgcctgctggagagctgcctgagaactggacagacacgcgggagacgctgctggaggggatg

SEQ ID NO: 502100 - DNA, 101 bp, Homo sapiens
gtcttttgatagatgtcataacagtatttggagaactcactgatgaagtggaatacatgttggtatcttttgatcatgaaaataaaaaagtccggttggtc

SEQ ID NO: 502101 - DNA, 100 bp, Homo sapiens
tggagtaaccctcactggagaatccagagagatgacctgatcagagccatcaagaaactaaaggcacttggcactggcttcggcatcatccctgtgggcg

SEQ ID NO: 502102 - DNA, 100 bp, Homo sapiens
aacattacccagcctgaaagaagaaaactttcagctttggctttgctctctcttctgccatctgataataggtatcgagaaccttccctgcgaacttcag

SEQ ID NO: 502103 - DNA, 51 bp, Homo sapiens
agcagcccaagcgccttccctcacctcattgctatggacagtgctatcacc

SEQ ID NO: 502104 - DNA, 97 bp, Homo sapiens
catttcctctctccagaggacctttcctgcctaggactcatgattgtcccctccctggccggaaggtggtggtcgtacgctgtgaaggcatcaacat

SEQ ID NO: 502105 - DNA, 82 bp, Homo sapiens
acaaaccccacaagcactgcatacggattttttatcaagcagaaatgcatcgaacaacgagaatcaagatcactgagctaaa

SEQ ID NO: 502106 - DNA, 83 bp, Homo sapiens
agccgcgtggagcgcgcggaagaggcacttgcccacatgggcagctccaaatgcgatgatgttcaataatgatttgatggcag

SEQ ID NO: 502107 - DNA, 95 bp, Homo sapiens
gacaggatggattgccagggcttcctggcccgaaaggagagcctttttaacttctagtcatggcgaatgatcgcaggagagcacagactggaccc

SEQ ID NO: 502108 - DNA, 82 bp, Homo sapiens
tcctgcgcaaggccgtgcagaaggccggcgaccaccaggggcctgaggatgaagccaagtctgctgtgccggcccctgtcct

SEQ ID NO: 502109 - DNA, 99 bp, Homo sapiens
gaaggtgaaacgatcatcgagctaaaatatcgtgttggtcacagtaatgaaaggcagtaatagaaataaggatcattcagcagaaggagaaggggttgg

SEQ ID NO: 502110 - DNA, 74 bp, Homo sapiens
ctcacaacatgcacagcctggcgacggctgcgcttaccgatgtccttatgaatgaaattctccatggagctgat

SEQ ID NO: 502111 - DNA, 100 bp, Homo sapiens
ccgccctggccacggggactctcttctggatgagcaaatcatggaggaagataaaaaacatggtgcactggtctcccttcgtcatgtccttcaagaagaa

SEQ ID NO: 502112 - DNA, 75 bp, Homo sapiens
ctcgtcgaaaggattggattggcatctttagagctgaagtttctctttggctcatcagccacccaggccttggac

SEQ ID NO: 502113 - DNA, 75 bp, Homo sapiens
cagcatgcttagcattcgagagaacaaaattaaacaactacctgctgaaattgggtggcccagttgaaatccttc

SEQ ID NO: 502114 - DNA, 101 bp, Homo sapiens
actcctacttccacttcgtgttcttcctagcttccctgtatgtgatgatgaccgtcaccaactggttcaacttttgccttatgaacagtcctctcttttgg

SEQ ID NO: 502115 - DNA, 98 bp, Homo sapiens
ctgcggctgctaccgtcgccgcggagaaattgttggatctggcagtctaggaatgtcctccatgaatgccatgggctccctttccgtcctgtcgccgg

SEQ ID NO: 502116 - DNA, 90 bp, Homo sapiens
tcaagatggaacaaagactgttgagtatgctccatgtagatcaccacgtcagctaactgttcagatgatgcaaaatcctcagattcttgc

SEQ ID NO: 502117 - DNA, 100 bp, Homo sapiens
aaaggcagcgcaaaaaacagccaccgattttgctatgtctctgagctgcgaggttgctgaaaagccaggagtcaaaatgactgagcgctttgactgccac

SEQ ID NO: 502118 - DNA, 117 bp, Homo sapiens
aggccgggacccggttccccggcccacagtgggggtgtgcaaacccgagagaactgggatacatgtgctgcccttttgttctggacaaagatggagtcagtgccgctgtcataagtg

SEQ ID NO: 502119 - DNA, 75 bp, Homo sapiens
gcggctgcagtccagcctgcagtctcagcgaagctcacagcagatgtgaagttcatttccaatccgccctccatg

SEQ ID NO: 502120 - DNA, 74 bp, Homo sapiens
ctttcatcctgagttgccaatcattatcacaggttcagaagatggtttgactggcaaattcactttttactcat

SEQ ID NO: 502121 - DNA, 100 bp, Homo sapiens
tggacttcacgattacacctgaaaccttacagaacgtcaaagaggctactctttggagcccatctatggtttgtggtatgaccactcctccaacttctcc

SEQ ID NO: 502122 - DNA, 75 bp, Homo sapiens
tatttgggctgcctccggagtcacagtgtcttgggccgccggaagagctcgtccgcatggtgctgaatggctgag

SEQ ID NO: 502123 - DNA, 88 bp, Homo sapiens
gctctccttctacctaattttcaccaatgagggaaatattagtcgtcaagaagctgttagcatgatcccaccactgctcctcaacgtg

SEQ ID NO: 502124 - DNA, 83 bp, Homo sapiens
gacaactttctggcttttgaaaggctccttcttcaggaaagaactgacttcctctggtgggccaacaaagtttgaaatccata

SEQ ID NO: 502125 - DNA, 101 bp, Homo sapiens
aactgttcgcaagggcagcagctggcgactttctccagtgactgggaaatccaggaagacagtagggaaggagaagcagaagggtcagtaaaagaaatcaa

SEQ ID NO: 502126 - DNA, 83 bp, Homo sapiens
cagcatatttgagtcatttccttcgtacccacagtgcttcatgagagatgtgtcttgctgaatcagggctctcttatccctgc

SEQ ID NO: 502127 - DNA, 82 bp, Homo sapiens
gcagcaccatcggggagacaagcaagagccttcacgtaaatgggtccagtcatgcctcccagtaagaagccagaaagctcag

SEQ ID NO: 502128 - DNA, 49 bp, Homo sapiens
gaaacacaaagcagcccaaccaaagggagattacctggggcaattgatg

SEQ ID NO: 502129 - DNA, 100 bp, Homo sapiens
tcaaggtggcctaccaggaggccaggggtgtcgccatggacacatgacggaagtgtgtatttttgggccactccacggcaggtccctagcctgcaacatt

SEQ ID NO: 502130 - DNA, 100 bp, Homo sapiens
ccacaagaggtgccatgaatttgttactttttcttgtccgggtgcggataagggacccgacactgattatacgctcaacggcaagaaagtggaagttgcc

SEQ ID NO: 502131 - DNA, 50 bp, Homo sapiens
catcagctgcaagacaccttcttaagggcttcgtgggacacatatgcaac

SEQ ID NO: 502132 - DNA, 95 bp, Homo sapiens
tctggtgtttggcggcatgaacctgacaagagatgccgacatcggcctggctgcctggggacgcaaggccctggacattgctgagaacgagatgc

SEQ ID NO: 502133 - DNA, 75 bp, Homo sapiens
gtttcctgtgtccagcgctgccggagccgcctgaggttgcctgttcactctgatcgtagtattggaagttctggc

SEQ ID NO: 502134 - DNA, 75 bp, Homo sapiens
ccggtatgacccaagcatttctttttctggaatgtcattatcagacacaatgctaatagatcagttaaagcccgg

SEQ ID NO: 502135 - DNA, 100 bp, Homo sapiens
ccacgcggctgcacaactgcaggaacaccgtcacgctgctggaggaggatcgaatcatcaatttagttgttggcagcttaacatccttattgattctagt

SEQ ID NO: 502136 - DNA, 90 bp, Homo sapiens
tagtattatgagaggagtcaatcagaggtaaggaaacaagtgggagaagatgccaggataacgcagctggaagcgacagtgctgtgttag

SEQ ID NO: 502137 - DNA, 82 bp, Homo sapiens
ggagcagacgctgcagttggagcaacagtccaagctcaaaagcacgaacttccaggagccggtgcagccgctgacacagcag

SEQ ID NO: 502138 - DNA, 100 bp, Homo sapiens
ttcggagaagcagtggtgggttccatgtgatggtggagtaggaggcaggtctccgcgggttattttggagctgttggagcactccttgagctgttgaaga

SEQ ID NO: 502139 - DNA, 50 bp, Homo sapiens
acgctaggaatatggcaaacgtttattcttcagtccaaggaagcaattca

SEQ ID NO: 502140 - DNA, 98 bp, Homo sapiens
gccaacaaaattagttaaggtgtccaggaagaacatccaagggcccggaagctgaagaaacttggtaatctgaaactacaggaggaaggagaggcttc

SEQ ID NO: 502141 - DNA, 90 bp, Homo sapiens
aggcactgaggaggccgagagatgaggccggagcccaccaagttctgggaagtttttcgttggaatatacgttgcacatttatggcgatt

SEQ ID NO: 502142 - DNA, 100 bp, Homo sapiens
gtctggagcaaggaaaagatccctggaatatgaagagacacagtatggtagccacacccccagcatgcttttcacttccactgcatctctcgctggctca

SEQ ID NO: 502143 - DNA, 76 bp, Homo sapiens
ttggctcctgacaacgtgcacgcagttatgatgatcgttcgtccgaccggagggtgtatgaccggcgatactgtgg

SEQ ID NO: 502144 - DNA, 51 bp, Homo sapiens
ttagttcgtctttcctagagaggacatggatttgattgacatactttggag

SEQ ID NO: 502145 - DNA, 100 bp, Homo sapiens
cgagtgcggcagtaccgcctccttcccagccgcgcggcttcctccagacctctcggcgcggagcatgtctgttcgatcctggcttccctcctgcggaacc

SEQ ID NO: 502146 - DNA, 100 bp, Homo sapiens
atgattgagaagaagcggaaaaaagaaaactctagaagtctggatgtcggtgggcctctgagatatgccgtttacggaaaggatctatgtttatgaaaat

SEQ ID NO: 502147 - DNA, 100 bp, Homo sapiens
ctctctcgaccccttctgcccggcgcttcggcccgggccgctcaggtgcagcaagtaactggcagaagttttggtgataaagattttcggacaggtttag

SEQ ID NO: 502148 - DNA, 100 bp, Homo sapiens
ggggcccgagggcggggaccggcggcgctggaggagcgaggcagctgtactaggactgggaacggccccatctgctttgatatgattgaagaagcataca

SEQ ID NO: 502149 - DNA, 107 bp, Homo sapiens
ggaattacaggagcagctgtggtaataaccatcttaaaggtgtttttcccagtttctgaatacaaggatgcgtccttgatggcaatgagaaggcgcattgaaggttt

SEQ ID NO: 502150 - DNA, 75 bp, Homo sapiens
ggcttagagcaggccgcttggttctgacccagctgagctggtggaggccattgtcttgccaatgaaccacaagga

SEQ ID NO: 502151 - DNA, 83 bp, Homo sapiens
ggtttggcactgctcctgctggccgcctggacggctcgggcgctggaggtcagcccaaggccaaccccactgtcactctgttc

SEQ ID NO: 502152 - DNA, 120 bp, Homo sapiens
aaaatccaagtccggctagtacgcgaattggagaaaaagttcagtgggaagcatgtcgtctttatcgctcaggtgagaaaggagattccggtgacataggaccccctggtcctaatggag

SEQ ID NO: 502153 - DNA, 83 bp, Homo sapiens
cctcaaggccatgatcaaaacgaccctggatgttgcctgccctgcaactcagctgcccgaccccaggagtcgccatacctgtg

SEQ ID NO: 502154 - DNA, 101 bp, Homo sapiens
atggagccgcacgtgctcggcgcggtcctgtactggctgctgctgccctgcgcgctgctggctgccttgaaaagatcttttgaggtcgaggaggtcgagac

SEQ ID NO: 502155 - DNA, 75 bp, Homo sapiens
acccttgtagagtcattcctgcctttgagcggactcccttttaaggcacgtgtggttctcaaatataggcattct

SEQ ID NO: 502156 - DNA, 98 bp, Homo sapiens
ccagaggtggaggggaggattttgaggacacttgtggagagctcgaattccagaatgatgaaattgtatcacccggaagttcaggctgaattctgaag

SEQ ID NO: 502157 - DNA, 124 bp, Homo sapiens
tgcagacacgaaaatttggaatgggatggttggagaacttgtatatggggtgtttgatcagtatgtaaagaccagggcagaggaagaacgcagggaaaagaaaaataaaataatgcaagccaag

SEQ ID NO: 502158 - DNA, 100 bp, Homo sapiens
tggtggtagtatcctaaaaggagtattaaaggttaacgtccctaaaacccgccggactttctgtaagaagtgtggcaagcaccaaccccataaagtgaca

SEQ ID NO: 502159 - DNA, 97 bp, Homo sapiens
catctgcaaggacagttgtttggtgttttgcttcaggttatagatggagagacctataaagacaatgcagatcttcgtgaagactctgactggtaag

SEQ ID NO: 502160 - DNA, 90 bp, Homo sapiens
cccagatggtggctcccggagtccagacggaatcagtccccaatgcctggaaattcctcattggattactgtgttttaaacagaatttcg

SEQ ID NO: 502161 - DNA, 83 bp, Homo sapiens
cgtgaaggaaaagcagctccgtccacaacgccgcttcggggctcctaggagtgcctgtgaagaaaacggggtattgccctgag

SEQ ID NO: 502162 - DNA, 82 bp, Homo sapiens
ccgggcacctccgagcgcaaggacagcgcgaggtccgcgcagcccagcgcagccatgaacccaagacagaccaggatgagga

SEQ ID NO: 502163 - DNA, 50 bp, Homo sapiens
ttcagcatccccaagcagggggaggtttttagaacttcagccataaaaat

SEQ ID NO: 502164 - DNA, 100 bp, Homo sapiens
aggcaattgatcccaagttgtcgacgaccgacagggtggtgaaagtaccttctccaggcaaattccgttcccctgcagcaccatctcctttggctcttcg

SEQ ID NO: 502165 - DNA, 100 bp, Homo sapiens
tcttgggcatacgcagcccgcctggccggagctgtgggagtcctcagccccaagacccagcaggcgtctgagggaacttgctactaccagcaccatgccc

SEQ ID NO: 502166 - DNA, 75 bp, Homo sapiens
tgatttatgccagctccaaggacgccatcaagaagaagctgacaggaatcggtgagtttcaaggatgtggctgtg

SEQ ID NO: 502167 - DNA, 98 bp, Homo sapiens
tcttcagcccgtcagcaagtggcaagcctatggactcaaaggctatcctgttttcagcattgcaaataacaatctcagctactgggatgcccccctgg

SEQ ID NO: 502168 - DNA, 100 bp, Homo sapiens
ctctgtattcagatcttcatgtgtctcttctaagctgaataaagctgttttggaactgtcaggtacctcaaagccacgagtacacgagacaggattgaga

SEQ ID NO: 502169 - DNA, 73 bp, Homo sapiens
ctcttatggcccatgccatggaggaagtcaagaaatttctagtaccggatgaaattgattctgcagtaaagat

SEQ ID NO: 502170 - DNA, 100 bp, Homo sapiens
ctttgttgtgagaagaactactgaattaactgttacagatccaggtccagagagcatcgcagacatcgatctcgctccatgtcacgtgaacgcaagagga

SEQ ID NO: 502171 - DNA, 75 bp, Homo sapiens
caaaggcgctgtggagttattcttgaagggcccctgggtagacagacacagcttgatttcagagcagacataggc

SEQ ID NO: 502172 - DNA, 101 bp, Homo sapiens
gctatttattcagctggttctgaagcaagaacaagaggaataccagcgggaagggatcccctggaaacatgttttgcacactagggaccaagaagccctcg

SEQ ID NO: 502173 - DNA, 90 bp, Homo sapiens
cggaggtaacagtgaagggattcaggatatacggtgcaccttgggagtggtacgggtatcactttccggagctggtgaagatcatcaacg

SEQ ID NO: 502174 - DNA, 100 bp, Homo sapiens
ctggacgaccaggtcatcctgctgcgggcagaaatgagccgtcagactgctacagcattacctaccggtacctcgaagtgtccaccatcccagagggtgc

SEQ ID NO: 502175 - DNA, 82 bp, Homo sapiens
aaactgaatgaactgataacggagaatggaactgtatgccagcagcttgttgtacagtgctgggtcttcagctctaaagagg

SEQ ID NO: 502176 - DNA, 50 bp, Homo sapiens
accacacctgtgtggccttcgcctggatgcggcattccaaaagaactcac

SEQ ID NO: 502177 - DNA, 100 bp, Homo sapiens
attacccttcatattggagactacaatatggatggctatccagacgctctggtcatactaaagaacacatctggaagtactaaggctcgtacgtctgcat

SEQ ID NO: 502178 - DNA, 96 bp, Homo sapiens
tcagaagttcatggatgctgtcaacaagaagagcagttcccaggatctgcataaaggacagtcattttgtttactcattcagccctgttgcaggtc

SEQ ID NO: 502179 - DNA, 87 bp, Homo sapiens
ccccgggcacgacctctcggacacggtgcaggcaggggacaccgtggtgtttaaggatggccagtactggatccgaggccggacctc

SEQ ID NO: 502180 - DNA, 100 bp, Homo sapiens
caggaaaagaggttatatggcatgggcggacaaatgatgaaccagctcattactgtagcatttgtgagttgaatggatcgcagcagttaccattgctgct

SEQ ID NO: 502181 - DNA, 98 bp, Homo sapiens
ctcctcttcatccactggggaggaaggatgggcaacactccagattcagcctcagacaacctcggtttccgctgtgctgcagacgcaggccggccgcc

SEQ ID NO: 502182 - DNA, 82 bp, Homo sapiens
agcgaagggcgggcgggtcccggaggagcaaatggaatgatgactttgaaaaccactggcttacgcccaccatttccgaggt

SEQ ID NO: 502183 - DNA, 75 bp, Homo sapiens
tgggaagaaactcttagcgcaatgatccatccttttacaatccctgctattattcgtccattcagcgtattgaac

SEQ ID NO: 502184 - DNA, 100 bp, Homo sapiens
cgctgaggcggccaccgcgactccggctctgcgctcggctgcctgacttcttcctgctgctgcttttcagggttgaagagatgaaggcgcagaggcatga

SEQ ID NO: 502185 - DNA, 100 bp, Homo sapiens
gctgaccggtggaaaccagagcagtacctcgtgtatactacgctatcaatggaatgactcctctaatgcatgcagcatataaaggaaaactcgatatgtg

SEQ ID NO: 502186 - DNA, 100 bp, Homo sapiens
gactgacacccataccttttgggcttcagaatgcagtgttttcgtggcccaggcacccctgaaaccaaaaacacctcggggtaccaagacaccgatcaac

SEQ ID NO: 502187 - DNA, 83 bp, Homo sapiens
gtgaatttccatgtcaacatagtccagctacaccaaaattgcattgagccaaacttgccaccaagagcccaacaatcaccatg

SEQ ID NO: 502188 - DNA, 100 bp, Homo sapiens
cgggaagagatagatcatgcagagtattacctttacaaccgtgctggtatagaggactctaagaagtggggcatgctgtttctggtgaaccagctgttta

SEQ ID NO: 502189 - DNA, 100 bp, Homo sapiens
gaccgcgccaacgatgatcttctctccgagttccccgacaagtttggatcctgtgttccccctcagcaaagacccaaatatcgtcatagccaagatggat

SEQ ID NO: 502190 - DNA, 75 bp, Homo sapiens
gacagcgaagctgctgcggttcctgagccggaggtttgcgccgtaatctcaggggcgatataatcaatgaggtgg

SEQ ID NO: 502191 - DNA, 100 bp, Homo sapiens
gcacggcgagcagtctcaggcctttagtgatgatgctcttcacagatggaatcacaaataaacttattggctgttacgtgggaaacaccatggaggatgt

SEQ ID NO: 502192 - DNA, 59 bp, Homo sapiens
aagcattggtgcacgatgtactgctgtcaaagctcgaaaaacagcagcagaggaaagaa

SEQ ID NO: 502193 - DNA, 100 bp, Homo sapiens
tacagaaacaaaatgtcaacaaattgatgggatctagtgaaaagccatttgatgtatgcggtcagagaagaagtggaggtcctcaaagagcaaatcaaag

SEQ ID NO: 502194 - DNA, 101 bp, Homo sapiens
cctgagtatccatcctccctggtggctgaggacacgctgaccagcgtggggtcaggagcatggcccctggaaagattgaaaaggaagatcaggccaacccc

SEQ ID NO: 502195 - DNA, 90 bp, Homo sapiens
gcagtatcggtttgtcattgagttggaccttagcccatctactggcattgtgtgttttaactcaaatgggtgatgaaaaggactcttgga

SEQ ID NO: 502196 - DNA, 90 bp, Homo sapiens
cgcaggcccccccgcgccgaccgcgttcctatggacagacgcacagacacctgcaggtgaaaagccatacaagtgtacctgggaaggctg

SEQ ID NO: 502197 - DNA, 101 bp, Homo sapiens
gtctgaggcccgagcacgcgcgagagcggttgcaggacgactcggtggaaacagtcacgtccatagaacagtgttgatgggaaccattttcagcatcctgc

SEQ ID NO: 502198 - DNA, 82 bp, Homo sapiens
cttgatatcacagaggaaactctgcattctcgcttcctggaggttggctctgactgtaccaccatccactacaactacatgt

SEQ ID NO: 502199 - DNA, 100 bp, Homo sapiens
ctcatttgacacgacgtcttatattagacatctctgccgatagtgaaattgaagaaaacatggtagagtggctaagagatgtgatggtggcaggtgggat

SEQ ID NO: 502200 - DNA, 100 bp, Homo sapiens
tgctgctggaggaggataacaagttttgtgcagattgccagtctaaagtagtttatgccaacgtgacttcattcatacagatgaaccaaggatcgggata

SEQ ID NO: 502201 - DNA, 100 bp, Homo sapiens
ttactgagctcccttctggaaatgacacctctgggcttgagaataagactgttgttgtcaccacaattttggacataagcagctctatgaccaatagcac

SEQ ID NO: 502202 - DNA, 75 bp, Homo sapiens
aactctgttaatcctcacgaccacctcatgaggatgactgtcttttgaaggtttggtataatgtagaaaactggc

SEQ ID NO: 502203 - DNA, 96 bp, Homo sapiens
tgaggatgatttcatccaagtcactaaaaatggatcaggagaaagatcaccaacattccttgaacgccacacatcatgctgataaaattcctttcc

SEQ ID NO: 502204 - DNA, 100 bp, Homo sapiens
acgaagttgctggaagaaaatgagacagaagcagtgaccgtgcccacgccaaggaagctgaagagggaactacccttttcattccgatcaattaatacga

SEQ ID NO: 502205 - DNA, 98 bp, Homo sapiens
accggaggcccaggtctccgtgcagcccaacttccagcaggacaagggagaagccggagacccagggccccctggactacctgcctactcccctcacc

SEQ ID NO: 502206 - DNA, 96 bp, Homo sapiens
atctccttcgcccaccccttggccttcctcacgctcctgcccacctccatcagccagttcttctccggcatagaatgtcaagctaaccaggcgtcc

SEQ ID NO: 502207 - DNA, 89 bp, Homo sapiens
aagcacaaggagacccctctttacatcctctgcacagcaggcatgaggcttctccctgagagggccatgttctgcaacgatttaaagga

SEQ ID NO: 502208 - DNA, 100 bp, Homo sapiens
ttctacctgcccggcctggcgcccgtcaacttctgcgacgaagaaaaaaagagcgacgagtgcaagggccgttgctccagggagaactgcaaatatcttc

SEQ ID NO: 502209 - DNA, 75 bp, Homo sapiens
tggccaccatcgcgggcatcagcgggaacaaggtgttttctggctggtctccaggaggtaaggcccgccctgcag

SEQ ID NO: 502210 - DNA, 83 bp, Homo sapiens
ctcaacagctacaagccacaggcaagaacccctgaacagtgcccaagtgttgtctctttgttgtcagagagttacaaccctca

SEQ ID NO: 502211 - DNA, 100 bp, Homo sapiens
cttaactcaagacccccgtggatccaggaactggcataggtgcactcagcaacggctccagggagttccacgctgtccagttctctctgccgtgataaac

SEQ ID NO: 502212 - DNA, 101 bp, Homo sapiens
ctgcgatcccgggtcatctccagatgctagggttatgggatgaaaactttcggaagagaaagttgcctgtggtaagttcagttgttaaagtaaaaaaattc

SEQ ID NO: 502213 - DNA, 100 bp, Homo sapiens
gaagatcaagcgcctgagaaagaagtttgcccaaaagatgattggccgcgtaatccaggttgctgctgggagcagcaacctcaagagagtgaccttggag

SEQ ID NO: 502214 - DNA, 100 bp, Homo sapiens
tgctgcctgggccagaagcagctggccatcctcctgagcttggtggggcgacccgcagggctgttcagcctcagggaggccacggagaagatggtatcta

SEQ ID NO: 502215 - DNA, 92 bp, Homo sapiens
ctgcaacctacggggtgtacttgggaacgaggggtgaagcggcccaggtgagggtgcagcggaactgctgcctgacgctctgcaacttcagc

SEQ ID NO: 502216 - DNA, 75 bp, Homo sapiens
ggagaggagcgtcaacagcagcaccatggactccactgagatacacaaagacattattgcttccagttgttcttg

SEQ ID NO: 502217 - DNA, 149 bp, Homo sapiens
atgagttcacggatcagcgaaccaaagctgaacaaggcaactgttcaaccaggagaaaagacagcaatggaccgaggggtgctacatccattgtgtacagatgcaaacagaaggggacccagaagccttatgctctcaaagtgttaaag

SEQ ID NO: 502218 - DNA, 89 bp, Homo sapiens
gaaaaagtggatcaatattcggaagtcatatggaaatttttacaaggctctgggctacagaccactatcagcctttaagaatatttgcc

SEQ ID NO: 502219 - DNA, 82 bp, Homo sapiens
gagcgggtgcgtctgccgcagagtcggcacctgaaggacatggagaaatgcactcggtgatggaaagagagccactattctg

SEQ ID NO: 502220 - DNA, 82 bp, Homo sapiens
tgaaccggctgatgcatccaattgagcctggagctctattaccaggttttaaacttcgccatgatcgtgtcttctgcactca

SEQ ID NO: 502221 - DNA, 82 bp, Homo sapiens
caggccttggaccaggccaacaagtccagaacacatattacataatggagccgggagacagactagggctggcttgatccgg

SEQ ID NO: 502222 - DNA, 100 bp, Homo sapiens
cagcggtagcacgagtgcgggcagcagcagccccggggcccggagaggtctgtaaacagatttggctaggattatttgatgatagatcttcagcaattcc

SEQ ID NO: 502223 - DNA, 95 bp, Homo sapiens
agcctcatcacccggctgctggaggatacactgcctctaggactgggacagatagccactgagtacctgcttcaaatcaccctgcacgttttctc

SEQ ID NO: 502224 - DNA, 75 bp, Homo sapiens
gctaaggcctgggttgggtaactgcctgacgttttactgtacaggtttgcagattccgccagcagcacagcaagc

SEQ ID NO: 502225 - DNA, 100 bp, Homo sapiens
gtagcctcaaactcccaggctcaagcagtcctaccatgtcagccttcccagtagctgggaccacagccactggacggatgtccaggtgaaggggacgtcg

SEQ ID NO: 502226 - DNA, 82 bp, Homo sapiens
ggagaagctgagcctttctggacagaccaacctgtcagtgctgcaaggtctgactgcgtaccatgatatctccctggacaag

SEQ ID NO: 502227 - DNA, 113 bp, Homo sapiens
cgaaattgagtttgaagggcttatgaggactctggacaacttgataatgtgcaaaatggctcccatggttgggaaggatattacagagcgtcttatcctccctaggttttgtg

SEQ ID NO: 502228 - DNA, 83 bp, Homo sapiens
gaagaactggcttcgggaattttaccagacaatgcagatcttcgtgaagactctgactggtaagaccatcaccctcgaggttg

SEQ ID NO: 502229 - DNA, 75 bp, Homo sapiens
ctgatggagagctgaacattactcttccagaagagtatgactatgaatatgatgaaaatggtgacagagtcgttt

SEQ ID NO: 502230 - DNA, 100 bp, Homo sapiens
cctggcaagcccatgtgtgttgagagcttctcagactatccacctttgggagaggagccaagagcaggcaaagaggaatctggagtttcagtctccaact

SEQ ID NO: 502231 - DNA, 146 bp, Homo sapiens
agcagccgccacccctgcgttcagagccgggcacactgggctctgcagcctcatcctacagccccctagggtgaggtggctttgaccccgggttgcccggccagcacgaccgaggaggtggctggacagctggaggatgaacggag

SEQ ID NO: 502232 - DNA, 82 bp, Homo sapiens
atccatctgcaccacggtgctgggctggttgatatgtgaagagccaacctgtcgcaatcgaactcgtcaccttccccttcaa

SEQ ID NO: 502233 - DNA, 75 bp, Homo sapiens
ttcaagttcatgccaccaccgacttatactgaggtgaatcaacggaatgtaccaggtattgacagtgcatacctg

SEQ ID NO: 502234 - DNA, 111 bp, Homo sapiens
aatgttttgtttgactccagtgttaagagaagaaatgaggacatatcagtatcgaatcatcggactcaggtacatctgtgagtgagaacaggtgtcaccttgaaggtggga

SEQ ID NO: 502235 - DNA, 74 bp, Homo sapiens
taaaagtgaaattaaataggaagatcatcagtcaaggaagacccactggagaggtcttactctgtcacccaggc

SEQ ID NO: 502236 - DNA, 100 bp, Homo sapiens
cttttgatggtggaagtggtgaaacccaaacaacatctcctgctattccttgggctgcctttcctgcagtccaatatcagatggaaatgatgcggagcct

SEQ ID NO: 502237 - DNA, 82 bp, Homo sapiens
ggaaccggacaagctgcacatccagatgaatgatgtcatcaccgtcatcgagggaagtgtactaatggtcacttgatgtgcg

SEQ ID NO: 502238 - DNA, 98 bp, Homo sapiens
gagaggagcgtcaacagcagcaccatgggtatttcaggacagccaggagggggcgcacatccgccgcgaaactgtgagcaagagcgtctgtgctgaac

SEQ ID NO: 502239 - DNA, 51 bp, Homo sapiens
gaaaatggaatcctcctctgcgaagactcgagctttagagtaattgggatg

SEQ ID NO: 502240 - DNA, 75 bp, Homo sapiens
tgacttgactcttcaaacacaaaggtatccagctcacatagaagacattgactacgaggaaggaaaagtactcat

SEQ ID NO: 502241 - DNA, 153 bp, Homo sapiens
aagatgatttctactgccccgtctgtcaggaggtgctcaaaacgcccgtgcggaccacggcctgtcagcacgtgcatctgcagccctggctagaaagaaggggaaaagtttgcataaagacatggctatcttttggcacaggaagaaaataag

SEQ ID NO: 502242 - DNA, 98 bp, Homo sapiens
aaaaagcagctcttggtctacaagattcagatgatgaggatgctgcagttgattctctgctggatgaaccgaatcctaacagtccagccaatagccag

SEQ ID NO: 502243 - DNA, 75 bp, Homo sapiens
gtcgaggttctgcagaaggttgtgactttagtatacaaaatggtggagtcaatgaagaaagtagcagggatggat

SEQ ID NO: 502244 - DNA, 104 bp, Homo sapiens
gaacatgacgcaggtgcaggtgtctcttctcgccctggcggggaaggtatcacctcttctgggctcaagatggacaacaagaagcgcctggcctacgccatcat

SEQ ID NO: 502245 - DNA, 75 bp, Homo sapiens
ggcggattatgtgataccagctcagttccaagatgagatgggattctccaacatggaagatgatggcccagaaga

SEQ ID NO: 502246 - DNA, 90 bp, Homo sapiens
gggcgacctgggcaccagcaggacccgaggccaggagccaggggcccagaagagtaaacatcagtctccaaagataactacatcccttct

SEQ ID NO: 502247 - DNA, 114 bp, Homo sapiens
gccagccgcaccatgccgctcctaagcctgcacagccgcggcggcagcagcagtgagagggtcctcactgagcagcgagtcgtcccccgtgtcctctccggccaccaaccacag

SEQ ID NO: 502248 - DNA, 51 bp, Homo sapiens
tcgccaggtgctggaggacttcccaacgtttttcagttatgggacaaaaat

SEQ ID NO: 502249 - DNA, 109 bp, Homo sapiens
cagaccctggagcctcagttggaagcagccgatccagcctgcggagcctgtggggcagaaagcgtggatacccatcaacgaagttttgatattggaattcagattggct

SEQ ID NO: 502250 - DNA, 101 bp, Homo sapiens
tgccacctcaaaaacttgtgccacaactatagcatatccacatgctaatataatgccttcgtcgtctcatctctttggctcaatgccatggggaccatcgg

SEQ ID NO: 502251 - DNA, 90 bp, Homo sapiens
agtccgtaaggagcagcttccaggatcctgagatccggagcagccggggtcggagcggaaatcatgcccaagttcaaacaacgaagacga

SEQ ID NO: 502252 - DNA, 90 bp, Homo sapiens
tcggcactgctactgcgaagacagctggcagtgtgtttcctgtaacaaatcgttcaagaaactctggtcccttcatgaacatatcaagat

SEQ ID NO: 502253 - DNA, 106 bp, Homo sapiens
tctgtgcttggcagaactggtgaagacctattgcagcagaaatacagcccctcggaccctgcatttgcatatgcgcagctgacccacgatgagctgattcagctgg

SEQ ID NO: 502254 - DNA, 83 bp, Homo sapiens
aggcgggagggggggtggtgcgcacgcccccgaggacgcagtggtggtcctgctccatgatgtccgtgatgtgagcgtggagg

SEQ ID NO: 502255 - DNA, 111 bp, Homo sapiens
gagatgtggcccctggtagcggcgctgttgctgggctcggcgtgctgcggtgattcgcaaggggtggctcaccatcagcaacattggcatcatgaaaggcggctcgaaggg

SEQ ID NO: 502256 - DNA, 74 bp, Homo sapiens
gtgctgtttctctccctggcttttggggcaagctacggaacaggtcacttggtacatatgaccgtggtctccgg

SEQ ID NO: 502257 - DNA, 100 bp, Homo sapiens
agggcttcgtgccctgtgcacgtttgccacctagtgaccaaactgaacaaacaaaggtgatgcacttgccaaccgagtccagaacacgcttggaaactat

SEQ ID NO: 502258 - DNA, 50 bp, Homo sapiens
agggagagtgtggaagaagcaaccaagaaattttactgcaggataaaact

SEQ ID NO: 502259 - DNA, 95 bp, Homo sapiens
ccatctccatcacccaccaacaacaccacaataatccacagccaagtattctgacaagtccctgtacacccagctgtgcttttaccggtacattt

SEQ ID NO: 502260 - DNA, 51 bp, Homo sapiens
gtcagagacttctgtgacaacaggttaatgttgaagaaggaaaatgcggaa

SEQ ID NO: 502261 - DNA, 95 bp, Homo sapiens
gaccgctgccgcccagcacgtccagggagagtcccgtattctcagagtaaaagttgtttctggaattgatctcgccaaaaaggacatctttggag

SEQ ID NO: 502262 - DNA, 90 bp, Homo sapiens
cacagactacgagggagtttgacagctattaaaaccagggctccacagttaggaggctattgagggcacctacattgacaagaaatgccc

SEQ ID NO: 502263 - DNA, 50 bp, Homo sapiens
cagcctcagctcccactcgcaccaggttgtgggctgcacactgcagaaag

SEQ ID NO: 502264 - DNA, 101 bp, Homo sapiens
gataattttgtggccttagctacaggagagtacgaattggagcaatgttggcttatacacctctggatgagaagagccttgctttattactcaattatctt

SEQ ID NO: 502265 - DNA, 100 bp, Homo sapiens
gagagaaagagcctccgtcaccacatagtgtctttcctgaagactatcttcccgtctcaaaatggacatgatggatccacggatgtacagcagagagcca

SEQ ID NO: 502266 - DNA, 100 bp, Homo sapiens
cttcaatactacctttatttccaccataggggatcatcgtcttgctcttcttttatctcagtttgtgggtagccagtcagtccgggagctgctcaccatg

SEQ ID NO: 502267 - DNA, 80 bp, Homo sapiens
ggagccggagctgggcgcggattcgccgaggcaccgaggcactcagaggagggaatgaaagctactggttgattttaaag

SEQ ID NO: 502268 - DNA, 50 bp, Homo sapiens
tgtgcagattgccagtctaaaggagatgttacagcccagatagctcttca

SEQ ID NO: 502269 - DNA, 87 bp, Homo sapiens
cagatgaaatggatttgcatcttgtaatgtgtttaacaaagccacgaataacctataatggaatttgtaagtgtctgggttcgagat

SEQ ID NO: 502270 - DNA, 98 bp, Homo sapiens
ggaatttccccaggagaagatgtgtctgcggctcttcagaagcctggctacagataagggaccaaaatgactgactcaaaatatttcaccacgaccaa

SEQ ID NO: 502271 - DNA, 100 bp, Homo sapiens
aggagaccaaaataaaactaacagtctatgatgtcaaggataagtctcatgacaccgagctgaccagtgctttggtgcatctaaaactgcatctttttat

SEQ ID NO: 502272 - DNA, 75 bp, Homo sapiens
ctaacacctggcagactctgctccatgagaggcatccgtgtcattctggaccttactcccaactaccggggtgag

SEQ ID NO: 502273 - DNA, 80 bp, Homo sapiens
ggaaagaaaccatgtgctgaaatgtttgacgacactgatggtttggtggacacctgcgcaggtgtgtgccctccggcccc

SEQ ID NO: 502274 - DNA, 90 bp, Homo sapiens
atggtgggcaacgtggtccgggctgagagagactgccttagtggcaaggctcttgatggaaatgtgtatgatcatctcaaggattattta

SEQ ID NO: 502275 - DNA, 100 bp, Homo sapiens
tgagtgcctggaagtttacgcctgataggtgtgatgaatgcagactctgctaccattttggctgtttggatcctcctttgaaaaagtctcctaaacagac

SEQ ID NO: 502276 - DNA, 98 bp, Homo sapiens
ctggaaggtgcgtgtggggctgggtctcggagtgggagacgtggagtgcagtacaaggtgaatatcttaaccagacttgccgcagaattgaacaaatt

SEQ ID NO: 502277 - DNA, 74 bp, Homo sapiens
cggcggagacggctgtagcacaaggttctagtaaataccgcttgctgtgttttgatgttggtggctaagctcat

SEQ ID NO: 502278 - DNA, 98 bp, Homo sapiens
aaaaaggctgaaaaatgtttctgtccaggcaagggtgtgtgctgaatgactcaaggattttttggttggccagtcagtgctgaaagatgtaagcaaag

SEQ ID NO: 502279 - DNA, 87 bp, Homo sapiens
tcggccggaggacaccccatcgtgcagacaatgcagatcttcgtgaagactctgactggtaagaccatcaccctcgaggttgagccc

SEQ ID NO: 502280 - DNA, 100 bp, Homo sapiens
tgtggaaaagcagctgtggacccaggtgccatcgcctgcaggattctttattcagctctgacagtggcttcagcaactaccgtggcatcctgaactggtg

SEQ ID NO: 502281 - DNA, 96 bp, Homo sapiens
gggccttccacaccccctccgtgggtgtgtggtgagtgtggcccgtggaccgggagcccgtggaccgggagccggtggtgtgccaccccgacctgg

SEQ ID NO: 502282 - DNA, 100 bp, Homo sapiens
cgagcggatcctaataaggggaaaatggacccttgaacatctgtgaagaaatgactattctgcatggaggcttcttgctggccgagcagctgttccaccc

SEQ ID NO: 502283 - DNA, 100 bp, Homo sapiens
tggtctcctactcccagatgcatccgtgtcaccgaacgcacggccggcgacgcagagcgggcgacactcggtgtccgtggaggtgcagatgcagcggcag

SEQ ID NO: 502284 - DNA, 100 bp, Homo sapiens
cccgagactcgtggggctggatgggaatcgtagtcttcctaggagttgtaaaataccatgaagattttgaaaaaacaaaggggagaggctttactcccgt

SEQ ID NO: 502285 - DNA, 75 bp, Homo sapiens
aacctagaaagccagttgatgccacttgctattggagttgtggttgcagataataatgaagatgttgatggtgat

SEQ ID NO: 502286 - DNA, 75 bp, Homo sapiens
cactgagctggagcccgcctggagagacagacacgtaggcggggtttcaccatgttgcccagactggtcttgaac

SEQ ID NO: 502287 - DNA, 82 bp, Homo sapiens
cacagctgtggatatctggagcattggttgcatctttgcagagatgattttgactaaaggagaagttcaagtatcagataaa

SEQ ID NO: 502288 - DNA, 100 bp, Homo sapiens
gagattccaggaggaagtactggcgaagtgctccatggtgtgataaagcggaattgggaatatatatgtagccatgataaagaaaaaacgaagatcctag

SEQ ID NO: 502289 - DNA, 82 bp, Homo sapiens
gcgaaggcccaggagctgatccaggccaccaaccagccgaggcctgcctggagccccagatcaccccttcctactacaccac

SEQ ID NO: 502290 - DNA, 75 bp, Homo sapiens
aagatcaagaaagtgggaaccactgagaaggaacatgaagttgaaaacgaggcccactgcgactttgtgaagctg

SEQ ID NO: 502291 - DNA, 80 bp, Homo sapiens
gcccaggaagaagacgaggatgacaacatctggggaagatgtacgagacttcacaaaggtacttaagaacaagttcaggt

SEQ ID NO: 502292 - DNA, 75 bp, Homo sapiens
tcgattgcactttactgggggatttgcctcagatggagttacagaggccttttgtactaaagaagaaaaggggtc

SEQ ID NO: 502293 - DNA, 100 bp, Homo sapiens
gggaccaaagatgttaggatcgtgaagggtcagactggtcaccagctgttcaaagtcacccaggctccagggtgcaggtagcaaaggacgtgacacttca

SEQ ID NO: 502294 - DNA, 75 bp, Homo sapiens
acaagagcaagatcttaaggcttctttgtacagtgaacaagcacatcatgattgacttggggactggcaacaaca

SEQ ID NO: 502295 - DNA, 82 bp, Homo sapiens
cggctgcacatcgggtgtgatgaggtatcgagaaccttccctgcgaacttcagaggaacttccagctgatgcgagagctgga

SEQ ID NO: 502296 - DNA, 100 bp, Homo sapiens
tgcctagaggctccagaagaagactggtctctcccaccacacagaggtcagcccaaggccaaccccactgtcactctgttcccgccctcctctgaggagc

SEQ ID NO: 502297 - DNA, 84 bp, Homo sapiens
ccggttttgaccgccacattaccattttttcacccgagggtcggctctaccaagtagacaatgcagatcttcgtgaagactctg

SEQ ID NO: 502298 - DNA, 101 bp, Homo sapiens
ctcaggccactcttccctggagccagtgaaattgacacaatattcaaaatttgccaagtgctggggacaccaaaaaagaaaaagcttgtggtgaagggggg

SEQ ID NO: 502299 - DNA, 82 bp, Homo sapiens
ggaagcagcagctcaccgaggacggggactctaatagttatgcacgagtgcgagctgtggtgatgacccgagatgactcaag

SEQ ID NO: 502300 - DNA, 50 bp, Homo sapiens
gttcccgctgcgctaggggaagcgggcagcaattctgtggtgttcttggt

SEQ ID NO: 502301 - DNA, 50 bp, Homo sapiens
ctcgacttctcaatcccaagtggccaaagatagtgtgtgtaccatatcag

SEQ ID NO: 502302 - DNA, 82 bp, Homo sapiens
gtccgccgctcaccccgcggccgcaccttcccgccttctcaggacatggatttgattgacatactttggaggcaagatatag

SEQ ID NO: 502303 - DNA, 100 bp, Homo sapiens
ttaaactttggccctgcgcctcgtccagcctaggttccacccttttctgggaacgtaacacgtacacagacctctcggccggaatctccagggatgacca

SEQ ID NO: 502304 - DNA, 100 bp, Homo sapiens
tatgatgtggaccgggccatctccgggggctccattcagggcttcgtgctgtgtcactccatcgctgggggtacgggttctggcctgggctcctacctcc

SEQ ID NO: 502305 - DNA, 101 bp, Homo sapiens
gccgcggaggcctgcagcagcagaagcagcagaaaggccgcggcatgggcggcgctggccgaggataaagtggccagtgtgtacgaagccccgggcttttt

SEQ ID NO: 502306 - DNA, 100 bp, Homo sapiens
tcaattttctttctcagaaagcagaggctcagagcttggagacagacggctcttgagatctgtcaacagagaaactttgtagaagagacagtttatcttc

SEQ ID NO: 502307 - DNA, 90 bp, Homo sapiens
ggaaagggaagagatgatttctccatcctgaacgtgcagcggcccggattgcatttctacaaggcgaaagaaaaggtcaagagaacctga

SEQ ID NO: 502308 - DNA, 100 bp, Homo sapiens
gacagcccatcgtgtgaactatagagtttgtggacagatttatattgttggagtgcctcaagcttattgcctctcaaaaatttacagacaaacgcattgg

SEQ ID NO: 502309 - DNA, 87 bp, Homo sapiens
gcgctacgtcgtcacctctgtgtcctggtggagccataaggcccgctacaacttcatccgaagcatggccgcctacagcctcctgct

SEQ ID NO: 502310 - DNA, 75 bp, Homo sapiens
gcctccccttctcttccatgcccactgcctacaacacagaatacagattctgttcatcttgctctgaaattaaat

SEQ ID NO: 502311 - DNA, 90 bp, Homo sapiens
caccgggacctcctggaagccaaaaatgcatataatcaagtttcacagagcttctaaagcaaacaagaagccagttcagttacctcgggg

SEQ ID NO: 502312 - DNA, 90 bp, Homo sapiens
gctacaataaagctctggagttgacagaggtgaagaacaaattggttttgagctagtggagaaattatttcaaggtcagctggtattaag

SEQ ID NO: 502313 - DNA, 50 bp, Homo sapiens
cgggacaccccggaagctgggaaatgggcgagctgaggatcagtgtcctg

SEQ ID NO: 502314 - DNA, 101 bp, Homo sapiens
tgttcaccatcctggccccggaaggaacaacaacctgaccttcctgcggccgtactaccagacggaggagggcgaggagaacccgttcatctgctcctcac

SEQ ID NO: 502315 - DNA, 90 bp, Homo sapiens
gagcagcagccgcccgcttcaaccccaggggaccagaggaactcagccctgattgcggcaaagggtggaggttatgaaagtgaagatgcc

SEQ ID NO: 502316 - DNA, 100 bp, Homo sapiens
aaaatgtgcatactcacagagttagagagagggatggtgcagcaagatgaagagcgacgtcggcagctgagagagagagctcgtcagctaatagcagaag

SEQ ID NO: 502317 - DNA, 100 bp, Homo sapiens
acaactgctcgcgtgacgaccgcattcgtggcagcatttaaatcaaacggtattgagatggattgggttatgaaacataatggtccaaatgacgctagtg

SEQ ID NO: 502318 - DNA, 100 bp, Homo sapiens
ctttggctgcccggctgctgcagcccgcgcacagctgctcccttcgccttcgccctttccacctcgcggcagttcgctgtgcggtcagagaagaaacgcc

SEQ ID NO: 502319 - DNA, 74 bp, Homo sapiens
ccaaatgattcagtccttgaaaacaaggacctcagcaatggagaatatccccatcatcacaactgtcatcactc

SEQ ID NO: 502320 - DNA, 75 bp, Homo sapiens
agagaatgtgacacggacaaggatagttttggctgatgtataagatttgtgaccaaatcagtgatgctgtccttg

SEQ ID NO: 502321 - DNA, 50 bp, Homo sapiens
gcggaggtcgataagctggaactgatgaacacacgaggagatgccacaga

SEQ ID NO: 502322 - DNA, 75 bp, Homo sapiens
gggttattcgagtgaccgagaccgcggccgggaccgaggtgatcagggccaaagcggtcagtgagaaggaagtgg

SEQ ID NO: 502323 - DNA, 100 bp, Homo sapiens
ccgacccttcctgtcgctgacggcgactgcgggaggccagactgacgacaacagtggagacttggacccaggagtcttgctgacagctcaaactatcaca

SEQ ID NO: 502324 - DNA, 90 bp, Homo sapiens
gtgccgaccctgccctgcttcctggggactgctgctcttcctgtccagcttgcgcgatctctggcctcttcaactgcatcaccatccacc

SEQ ID NO: 502325 - DNA, 100 bp, Homo sapiens
cagaaattaaaggtccacagaaggagccatccagtccaatggatcagatgggcaagatgagacctcagccatatggcgggactaacccatactcgcagca

SEQ ID NO: 502326 - DNA, 100 bp, Homo sapiens
tggagttgggccctgcaggaaggacggacttcaggggcaggcctactgaacttgacgcactggtatttggccatctatacaccattcttaccacacaatt

SEQ ID NO: 502327 - DNA, 100 bp, Homo sapiens
cagccaccgctccctcttcccacggctaccaaagtgacagcagatggcgagcagaccggacaggatgctgagaggaccaacacaagagcaaagtccctgg

SEQ ID NO: 502328 - DNA, 100 bp, Homo sapiens
ctcaaaaggtgatctggacaaaggaacaggtatctcagagttcagttgattccaccatctctagttcttcttccactaaaggaataaagaggaaagctac

SEQ ID NO: 502329 - DNA, 50 bp, Homo sapiens
tgaaacaccactgaagcattgccaaggaacttcctgtagaaaagccccca

SEQ ID NO: 502330 - DNA, 75 bp, Homo sapiens
gatgaagtgcagaggtttttttctggtggagtattgctcctggaaaatccaaaaggtgacaataggttggacctt

SEQ ID NO: 502331 - DNA, 87 bp, Homo sapiens
tcccatccctgcagcatgaacaagctggtgctcaagaccgaatcggctgggcttttggcctaggattagaaaggctagccatgatcc

SEQ ID NO: 502332 - DNA, 97 bp, Homo sapiens
agaagactccatttggttccggccaacattgctacaggacagtggtctctacgcctgtgtcatcagggttcttgaagcttttgagattaacaatggc

SEQ ID NO: 502333 - DNA, 75 bp, Homo sapiens
tcggaacagaaccaaaggctattggatcagctcagcaggggaatctggaaacccaggaaaataccaaatccagat

SEQ ID NO: 502334 - DNA, 100 bp, Homo sapiens
cgcaccttgtcgcttagattgttatgaagatctgtttacccgaggtattgatatacaagctgtgaatgtggtaataaactttgatttcccaaagctggca

SEQ ID NO: 502335 - DNA, 48 bp, Homo sapiens
ctgaggcctccccaaccatgtgcaattacagcaccagttgcccttgaa

SEQ ID NO: 502336 - DNA, 100 bp, Homo sapiens
cccgagctcagagagtaaatgtagcctttccagtaaatatatgactcagggaaaagcctcagcgaagaggacccagcaggaatcatgagggaaggaaaat

SEQ ID NO: 502337 - DNA, 75 bp, Homo sapiens
cacacacgtggtctgtagcgacagcggcttggaagtgctctaccagagttgcggacttgacacagcaagcaaaag

SEQ ID NO: 502338 - DNA, 82 bp, Homo sapiens
gtgtctggagcagtggagcccaaagacccctggagacatggacttgagcagccccagccagtacgacacaggtgttgcactg

SEQ ID NO: 502339 - DNA, 100 bp, Homo sapiens
ctagtggaccagaggcgggatttgcaaatgcttcagaggacacaaagagaacttaattcagtgcacaaatgagatgaatgtgaacatcccacagttggca

SEQ ID NO: 502340 - DNA, 73 bp, Homo sapiens
ggcggcccagctctctctgacacaggtggttggttctagctattgccatggtacgtttttatatggaaaaagg

SEQ ID NO: 502341 - DNA, 50 bp, Homo sapiens
cgcgctcatctgctggagcccgcagcaagatggaacttattgatgataac

SEQ ID NO: 502342 - DNA, 88 bp, Homo sapiens
ggtaacctagacctgaatgggcttgaccatctcacaactgctcgcgtgacgaccgcattcgtggcagactgaggaccatttagatctg

SEQ ID NO: 502343 - DNA, 99 bp, Homo sapiens
cccagacccaagagctgtgagctgcctaagaaatcatggcattcacacagcccataaagcaagacagaactctaagaaggagctgatgtggaggagcag

SEQ ID NO: 502344 - DNA, 100 bp, Homo sapiens
ggaacccgtgggcctgtggactgcagcctcggcggtcagcagatggtggatgcttccaaaagcatcgaagctgtccatgaggacatccgcgtgctctctg

SEQ ID NO: 502345 - DNA, 100 bp, Homo sapiens
ccttgaggacggtgaggatccagaagtcattccggagaatactgacctggtgactttggggtggctgactgttcttgggatgaaacaataaagatctatg

SEQ ID NO: 502346 - DNA, 87 bp, Homo sapiens
aggcaaaggcggctcgggagattcagccgtgaagcaagtgcagatagatggccttcatgttggcagataaattgaacatgactccag

SEQ ID NO: 502347 - DNA, 135 bp, Homo sapiens
ttcaggcagctccaggcgctcctagaccttccagcagtactttggtggacgagttggagtcatctttcgagacatcccagttaccagtgtccttgaattgatagtggcttctgtttgtcagtctcatataagaac

SEQ ID NO: 502348 - DNA, 100 bp, Homo sapiens
tgtaagatgtgacttgcttctccttgtcttctgccacgattgtgaggcctccccaaccacatggaactgcatttcactgaaagcagaagctgtctcagtc

SEQ ID NO: 502349 - DNA, 90 bp, Homo sapiens
tattgtgcagttcctaggtgatgctgttttcatacctgctggagccccacaccagtatatccggaactgtgtgatgaacagagccctgcc

SEQ ID NO: 502350 - DNA, 75 bp, Homo sapiens
aaccatgcaaaaaatgtggccttccaaaccatcctgagctaattactccaaaggtttcggcggcaaatacggtat

SEQ ID NO: 502351 - DNA, 110 bp, Homo sapiens
gggcattcccgacggcccgcccctcaaggacaacctcggcctgagacaccggaggaccggacaatgcagatcttcgtgaagactctgactggtaagaccatcaccctcga

SEQ ID NO: 502352 - DNA, 74 bp, Homo sapiens
ggatttgctaaaggagcttaagaatattcctatgaccctggaattactgcagggaggagctttatctttatata

SEQ ID NO: 502353 - DNA, 100 bp, Homo sapiens
ctggggagacccctgcgagctctgccccacggaacctgatggatcaaagcaagttggagaaacatcagcacctggagacaccttagatggcacacctcgt

SEQ ID NO: 502354 - DNA, 103 bp, Homo sapiens
ttccaatttgtaatctcttgctcatgtctggctattaaccgaagcaaacagtgtccccacaccctcctctgagacgccatgttcaactcgatgaccccaccac

SEQ ID NO: 502355 - DNA, 82 bp, Homo sapiens
cggccgtcctgggggccttcagagccgcaatcaagcagtaagactttgaccccgacgcaggcttcagtgattgccgcggatc

SEQ ID NO: 502356 - DNA, 89 bp, Homo sapiens
tggtctcgaactccggacctcaggcaagcaccggaagcaccccggcggccgcggtaatgctggtggtctgcatcaccaccggatcaact

SEQ ID NO: 502357 - DNA, 98 bp, Homo sapiens
ctgcaggcattaatgtccgaaaggactttgaagaatatcctgaacatagaacgaactttttcttactacttcaggctgtcaattctcattgtttccca

SEQ ID NO: 502358 - DNA, 75 bp, Homo sapiens
gcgttttcctcgcagtgctccgcttgtggggagactgtcatgcctgtagagacgggggttcaccatgttagccag

SEQ ID NO: 502359 - DNA, 82 bp, Homo sapiens
tagactccgttccctaccacagccttaagtgagttgctgaatgagcttatggacagtgcaaaagtgtctaacagcccttccc

SEQ ID NO: 502360 - DNA, 98 bp, Homo sapiens
gctgcagagaaagtcagctggataaaggacaaacttctgcatatttattatcagaacagcattgacgacaatgcatctagtgagagtgaagctgaaaa

SEQ ID NO: 502361 - DNA, 100 bp, Homo sapiens
cgcgcgggccgggaggggacggccgccggagccgcgaggccaagccttttccctcagaggagaccacagagaatgacgatgacgtctaccgcagcctgga

SEQ ID NO: 502362 - DNA, 90 bp, Homo sapiens
ccaagagggtgttcgactgctagagccgagcgaagcatgccatggacaatattaccaggcagaaccaattctacgatacccaagtcatca

SEQ ID NO: 502363 - DNA, 75 bp, Homo sapiens
agctgcttcccaataaggaaacacccaccttgggacaccttgactccaagcccagcagtaagtccaacatgattc

SEQ ID NO: 502364 - DNA, 98 bp, Homo sapiens
gggagtttcttggtaaatccagaatcaggtgttctgaagacgcagatcccgatattaacttaccaaggtggatcagtggaagctgctcaggcattcct

SEQ ID NO: 502365 - DNA, 75 bp, Homo sapiens
ccggggagtccctcgccacctgcaagagcctgcagcagtcgcttctccgcaggtctctaattaacagaagatggc

SEQ ID NO: 502366 - DNA, 50 bp, Homo sapiens
cttatcaccgacatacttgatacatttgagtctcgctcttgtcgcccagg

SEQ ID NO: 502367 - DNA, 100 bp, Homo sapiens
ctcttcccggcccctgaagttggcactgcagcagacagctccctgggcaccaggcagctaacaggtcgcctgcgaggccgctggccaggcctgagcctct

SEQ ID NO: 502368 - DNA, 96 bp, Homo sapiens
cctcatgctagtagctgccttctgctctccagcgctctcagcaccaaatgaggacgctgaggcccagagagggaaagccacttgcctagggacaca

SEQ ID NO: 502369 - DNA, 88 bp, Homo sapiens
ccgccgcgtcttcccggtctcctttcccggccgcacagggtagctaaaattggtgctttctgctgtggccttagtttatgtaaccagc

SEQ ID NO: 502370 - DNA, 98 bp, Homo sapiens
tattacagcttcatatgcaccagaaggagatgaaggtcacaaggcacttaaagcattgttgaggtcattggtaggtcttcaggaagagttgcttttcc

SEQ ID NO: 502371 - DNA, 83 bp, Homo sapiens
cgcagaaaccccgttgacaaggcactgctttttcatgacgatgcctgctctgtgcctgtatctgagatcatcgccgttgagga

SEQ ID NO: 502372 - DNA, 100 bp, Homo sapiens
atttgttctgcctgacttggaccctggaaaacctggccctcttcaatttctgacaaaagtgtttcaacaaaagacagccagaagacaatctgatgatgac

SEQ ID NO: 502373 - DNA, 50 bp, Homo sapiens
tcgtagcctgccactccgtgcgtatggacctgtctgccaatcaggacgag

SEQ ID NO: 502374 - DNA, 90 bp, Homo sapiens
gccgctccgactccaggggagccgtggcctcctctccgccctagcgctgagcacacacatgccctcttggttctgtttctttgaagaacc

SEQ ID NO: 502375 - DNA, 50 bp, Homo sapiens
tggaagcagctggcttcactgctcaggccaaagaatcctgggagatggat

SEQ ID NO: 502376 - DNA, 100 bp, Homo sapiens
gtgaagcctgcctacagttttcacaaatctcattgtttgtgctccccaaacctaaagtgatctcctgtctagagcaaggggaagagccatgggttcaagt

SEQ ID NO: 502377 - DNA, 75 bp, Homo sapiens
cctcacgccagcctggatggagaacccctacatcaagctcatgatggagcagtccaagaagtcctccctcatggt

SEQ ID NO: 502378 - DNA, 75 bp, Homo sapiens
aacacctggagatcctgcgtttggtggtgccacaatggtgcgcatgaatgtcctggcagatgctctcaagagtat

SEQ ID NO: 502379 - DNA, 100 bp, Homo sapiens
caaagctggcaaaggagaagtaacttttggtgtcagcagttgagtctttggagggccccctgctccaggtggaaggactgagtgaccttcgactagagct

SEQ ID NO: 502380 - DNA, 100 bp, Homo sapiens
gtccaccgggaactgtacttcgtctgcaattaaggccttacgtcctggagggatacttgtatactctacatgcacgctttccaaggcagaaaatcaagat

SEQ ID NO: 502381 - DNA, 100 bp, Homo sapiens
gaaagtgaggaggaaaacacccccattgaggaagaaggcacctacgatcaaactctggagttccgtaggggaggtgatggccagccaagacgatccactc

SEQ ID NO: 502382 - DNA, 73 bp, Homo sapiens
gtggaactccagtagagcctaaaagacgagaatccaggacttgaatcgtatcttcccactttctgaggactac

SEQ ID NO: 502383 - DNA, 101 bp, Homo sapiens
ccccggtggcctcaccagcctccagcagcagaagcagcgcctgatcgagtccctccggaactcacactccagatccaaatcacaggacagtacccaaacac

SEQ ID NO: 502384 - DNA, 75 bp, Homo sapiens
atgatattggaagaatagatactaagtcttggagaggcaccgaccgtcacgagctaacttcctggaagagctttc

SEQ ID NO: 502385 - DNA, 82 bp, Homo sapiens
gttgtgccagcgactaaaaagagccaagaccgaggataggtgtggccattggcgaccagatcctggacctcagcatcatcaa

SEQ ID NO: 502386 - DNA, 100 bp, Homo sapiens
gaccaaccgcaccctccgagacctcctgagggaacagcactgcaaagagatcgggcccgggacacccagacagatgagattgtcgcactgaagaaggtgc

SEQ ID NO: 502387 - DNA, 97 bp, Homo sapiens
gaagatgggcgacccggatctcctggaagtgttggcggaggaaggtgatcccattaagatactaatgccatcactgtctcctacaatggaagaagga

SEQ ID NO: 502388 - DNA, 82 bp, Homo sapiens
tctcgtcagtgactttctttactccactgggacactctgattgtgtggtctgaagcagaaaattatgacttggcccttagct

SEQ ID NO: 502389 - DNA, 100 bp, Homo sapiens
ttgctctgtctgggatcgccgcacagctgctgaatgccttgggactagctgcttgtctccttcagatggagcccgtgaactacgaacgagtgagagaata

SEQ ID NO: 502390 - DNA, 82 bp, Homo sapiens
taaaaacaaaatcaaccgggaccccagcttttcagaactgcagggaaacagccatcatgagatggagtcatcagaacccact

SEQ ID NO: 502391 - DNA, 98 bp, Homo sapiens
agagcattttactactgagctgcaaagcttgtgatgaatggaaaatactaccaaaaccaaatcttcatagagatgtcaacagatttggacactctgca

SEQ ID NO: 502392 - DNA, 90 bp, Homo sapiens
ccggtctacagctcccagcgtgagcgacgcagaagacgggtgatttctgcatttccatctgaggatatcaaagcagactgcaatacctgc

SEQ ID NO: 502393 - DNA, 83 bp, Homo sapiens
ccgggactagtggaccagctggtgaaggcagacagcgagtggcgacgatgagagaacattgaaagtattctctaagctatttg

SEQ ID NO: 502394 - DNA, 90 bp, Homo sapiens
tcttcagctccccattctctgagaacagcacttccctgcaggccctcaggaaagcagagagcttgaagaaatgtctctctgtcatggaag

SEQ ID NO: 502395 - DNA, 75 bp, Homo sapiens
ggagaggaaggcgtggtgtggcgtctccaggccgcacttggtgagagtcttcacggaccacagtgttgcacgagg

SEQ ID NO: 502396 - DNA, 100 bp, Homo sapiens
cccaaggacgccgtcagtcctttcagcttcagcctgctcaagaactgcagcattgcagccgccaagacgaacattactactggatggaaatccattccga

SEQ ID NO: 502397 - DNA, 50 bp, Homo sapiens
tgtggagtgttctaaccaacaaggaagaatggaacagattaaaagggcca

SEQ ID NO: 502398 - DNA, 50 bp, Homo sapiens
cccggctgccttccacctccagtgctggctggagtgcaatggcgcgatct

SEQ ID NO: 502399 - DNA, 98 bp, Homo sapiens
ccgattactgcgagaacaactacatacagacagcaccagttgcccttgaagcagaaaacagaggtgaaatgaaactagctctccagtatgtcccagag

SEQ ID NO: 502400 - DNA, 75 bp, Homo sapiens
gtcaatgcacactccaacatattgaaagccgccatggacaattctgagtggaaatttaatggagccaccatttca

SEQ ID NO: 502401 - DNA, 100 bp, Homo sapiens
agttctggggagcgcctcgtcgacatgagtgatgtggaggaaaacaacttcgagggcagaggcactgtgacctttgaagatgtggctgtgaacttttccc

SEQ ID NO: 502402 - DNA, 90 bp, Homo sapiens
acggaaaaggaacagattgttcctaaaccagaagaggaggttgcccagaagaaaaagggtgtccgcaatgttgccagtgtctgtctgcag

SEQ ID NO: 502403 - DNA, 100 bp, Homo sapiens
gaaaaccccatggctcactttcttcttggcaggtggtgctatcaggccttggacaagattcgctatgagagcctgacagacccttcgaagttggacagtg

SEQ ID NO: 502404 - DNA, 75 bp, Homo sapiens
cggggcgggcgccgcgggacctctccgggccatgggtcacccgtgtgaacagaaagtgagaggttgtagcacatt

SEQ ID NO: 502405 - DNA, 107 bp, Homo sapiens
agagaaggtgaaacgatcatcgagctaaaatatcgtgttgggccgttgctccagggagaactgcaaatatcttcatccacccccacatttaaaaacgcagttggaga

SEQ ID NO: 502406 - DNA, 100 bp, Homo sapiens
gctgcggcagcaggggactagcgtgagaggtacctactgtcaacaacgggaagtggaggccattactgaaggtgtagaggaagatgaaggattttgctgt

SEQ ID NO: 502407 - DNA, 98 bp, Homo sapiens
tttaagggctacgggaagatcctggaggtggatctgaagaacgggttctggcctataggaacaagacattttcagtaatggaagaaggagcttccagg

SEQ ID NO: 502408 - DNA, 98 bp, Homo sapiens
gtgctcgccgtcctgcggaaccgctggctgtcagacagcttcaaggagacgcagcagcagctccaggcgcagcacctctcccatgccacacacggccc

SEQ ID NO: 502409 - DNA, 73 bp, Homo sapiens
caggcggcgtgggcatgggcatgtacaacaccgacgaggtattgctggacatcttcactggggtgcggcttta

SEQ ID NO: 502410 - DNA, 83 bp, Homo sapiens
agacgtccaatctgagcgtgctgcggacggcgctgcggtacatccaggattttttatcaagcagaaatgcatcgaacaacgag

SEQ ID NO: 502411 - DNA, 90 bp, Homo sapiens
atgaatatccacaatttagcatcaggcaaaggaagcaccgcacatttttcagtctgaacctgagtccgggaaacctggattctagtccct

SEQ ID NO: 502412 - DNA, 90 bp, Homo sapiens
cttctttgacgtccagaagaccaagtacctgcagatcctgacctctctgatgagatggatcgacgtgctgtattgcccagaagccatcgt

SEQ ID NO: 502413 - DNA, 75 bp, Homo sapiens
tcccaccgtgattctgaggcctccccaaccatgtgcaatttgtgcaggagaagagaattgggtggacagcaggac

SEQ ID NO: 502414 - DNA, 98 bp, Homo sapiens
gagaacgtgcgcggggtgatcaccatgaacgaggagtacgagacgaggttcctgtgcaactcttcacagggcaatagtctgaccttgattgaccttcc

SEQ ID NO: 502415 - DNA, 100 bp, Homo sapiens
ccataatcctgtcttaatactgcaaacaaatcatagtggaactaaggggaacttaatttactgtaggcagtactcatcttggccctgggaagaaactcaa

SEQ ID NO: 502416 - DNA, 74 bp, Homo sapiens
ttcctatttgtattcattgcagaaattgcatctgatggtctcaagggtcgtgtgtttgaagtgagtcttgctga

SEQ ID NO: 502417 - DNA, 73 bp, Homo sapiens
actacaggagaattcggtttgtaggtcgtcagaaagaggtcagcccaagactaccccgtcggtcattctgttc

SEQ ID NO: 502418 - DNA, 82 bp, Homo sapiens
ttgacgccatgtcgggttattcgagtgaccgagaccgcggccgggaccgagggtgaccagcgccatgtccagccaggtggtg

SEQ ID NO: 502419 - DNA, 100 bp, Homo sapiens
gaggagcctggcggccaccccctcttcctcacttccctgtactctcatcgctctcggcctccgacacggcttttatcttgagaacatggtgtctggagtt

SEQ ID NO: 502420 - DNA, 100 bp, Homo sapiens
gggggttgctgacccagaggagagttctccaaacatgatcgtttactgcaaacattgttggaaactgttactacatttttactggaaatactattattca

SEQ ID NO: 502421 - DNA, 100 bp, Homo sapiens
ctgcctcacccagttccaggtagacatggaggccgtcggggagacgctgtggtgtgactggggcaggaccatcaggactggaatgtcacgtggaatacca

SEQ ID NO: 502422 - DNA, 90 bp, Homo sapiens
ggaaccacaaggccttcaagaaggagctgcgacaatgggacatccggaacctgctcatctggatcaagaagaatttgctaaaagagcggc

SEQ ID NO: 502423 - DNA, 75 bp, Homo sapiens
ccgtgaactcagtactgatgcccagtggggcattcgtcttggtaaacttggtgtcatgcttcaccccttcctcca

SEQ ID NO: 502424 - DNA, 83 bp, Homo sapiens
caacgcgcccccggggaggggcggagctgtagtggaagatagatgataagcctgtaaaaattgacaagtgggatggatcagct

SEQ ID NO: 502425 - DNA, 90 bp, Homo sapiens
actttatattgctgttggaatatctggagccatccaacatttagctgggatgaaagacagcaagattctgctcctaagtgtaggagagaa

SEQ ID NO: 502426 - DNA, 73 bp, Homo sapiens
ggccatctgtgtgtctgggcagtgcaagttgcctagacctggagcagtgttctcttaaggtactggagcctga

SEQ ID NO: 502427 - DNA, 83 bp, Homo sapiens
gaagaaaagtagaaggaaaaacagaacgttgcaaactctggaaaaaaacttgggtgctgactgggttacttttttaaacacta

SEQ ID NO: 502428 - DNA, 74 bp, Homo sapiens
aaagatctatagcactctggctggcaccaggaaagatgttgaagtgactaaggaaacagattgtctcagtttac

SEQ ID NO: 502429 - DNA, 73 bp, Homo sapiens
ttaggcctgtgtgttgcttagccgaaagaggcatcgttttctctttaggagcatctttccttgaagaagtaca

SEQ ID NO: 502430 - DNA, 132 bp, Homo sapiens
tgttccagtgcctcgagcgctcaggatggaggaagactcgatccgcctgcctgcgcacctgccttgccgggattgctgtccttgccattggactatggctccgattcgactctcagaccaagagcatcttcg

SEQ ID NO: 502431 - DNA, 82 bp, Homo sapiens
gcgcgtcttctggagcaatgggaggttgcagagcctgaggcctgtgatcagatgtacgagagcttagcgcgactccattcaa

SEQ ID NO: 502432 - DNA, 51 bp, Homo sapiens
gaacatggcgttgctggtgcgagtccttggagcaatggaccacagaaattc

SEQ ID NO: 502433 - DNA, 90 bp, Homo sapiens
cggtggagagcggctctgacactctgggtaaagccttggaaaaggctgggggaaaagagttcttggaaacggtaaaggagcttcgcaaat

SEQ ID NO: 502434 - DNA, 83 bp, Homo sapiens
caaggaatctgcttttcaagtatgccaccaacagtgaagagcggccctccaggcactgaagcgtaagaagaggtatgagaagc

SEQ ID NO: 502435 - DNA, 100 bp, Homo sapiens
cagcacagagcccctcgtgaaggagtatgctgcgtttgtgctgggcgctgccttttccagcaaaacccttgaagatcgtttgaaaattgaagcaaaaaat

SEQ ID NO: 502436 - DNA, 100 bp, Homo sapiens
agctcagcaaaaatgacgttcccattatagtgaacagctgtatagcatttgttacacagtatgggaaagtggaagaggagaccctagcaggcttcaagca

SEQ ID NO: 502437 - DNA, 51 bp, Homo sapiens
ccagtgactgtcaggtcgatcatatggaagtgggaatgtccttggcatcat

SEQ ID NO: 502438 - DNA, 78 bp, Homo sapiens
acacaagctggccttggcagtttcggtgcatagaaaatcaggtccttggtcactacctccggcggcagcgagatccca

SEQ ID NO: 502439 - DNA, 90 bp, Homo sapiens
ggagaaggcggcggctctctggtccgcagcggcaacagtaacgaaaaacagggctgactttggcatggcagaggaatttgcttccaaggc

SEQ ID NO: 502440 - DNA, 100 bp, Homo sapiens
aaaagtttggaaatccggacgctaacagtggaaaggctgttggagccacttgttacacagagtgcctggaagagctgggatgtctggttgagtcctatgg

SEQ ID NO: 502441 - DNA, 100 bp, Homo sapiens
agcaggatgatgacaaaggcaactgtgaggactaccttatgatttcctttgcacgtgcattatttaatcacatagacaagtcaggattgaaggatagttc

SEQ ID NO: 502442 - DNA, 100 bp, Homo sapiens
agaacttcaacatgaagccgcggctgaagagcattttccgcagaggcctggtcaaggtggctcagaccacagactcggtgaaatacctggagtgctcagc

SEQ ID NO: 502443 - DNA, 98 bp, Homo sapiens
ctggatgagggggaagggcctcaaagccagaagatgtcagtattgaatatggtggtgaggcgtgaccctggcaacactgaacctgtgaaagccaagga

SEQ ID NO: 502444 - DNA, 82 bp, Homo sapiens
gggagtgttcgttgtgccagcgactaaaaagaggtgaaaggaaagcaagccaggatggatatttacgacactcaaaccttgg

SEQ ID NO: 502445 - DNA, 75 bp, Homo sapiens
caagcacacccaatggacagcatgcctcaccaagtcacatgacaagcattcagagaagccgaactgggattacca

SEQ ID NO: 502446 - DNA, 82 bp, Homo sapiens
gccaacctgctgctggaggaggataacaagttttgtgcagattgccagtctaaaggtgcagaccatgaattacgtggggcag

SEQ ID NO: 502447 - DNA, 50 bp, Homo sapiens
gaaagctgtgaaagttctcaagggtgcaaatagctatgggcaacttggcc

SEQ ID NO: 502448 - DNA, 82 bp, Homo sapiens
caagaagcgaaatgtgctcattggccattcctacgggtttttcgttggaatatacgttgcacatttatggcgattctgagtg

SEQ ID NO: 502449 - DNA, 75 bp, Homo sapiens
cttgccagaaaccttatgttgcacttattcatggaattacaatgggtgggatgggacctgcaaaggataaactgg

SEQ ID NO: 502450 - DNA, 74 bp, Homo sapiens
agacttgaaggcgtatacaggaacaatattgatgatgtagtaaggtacgtgcagcactacggcctgggcagtgc

SEQ ID NO: 502451 - DNA, 101 bp, Homo sapiens
aaactgcatgctgttgtagaaactctagtcaaccataggaaagacgaagttatacggaagcgtctcctcattgatggagatggtgctggagatgatcggag

SEQ ID NO: 502452 - DNA, 98 bp, Homo sapiens
gcctttgttgctgctgcacattaggttgcagtatgtggccagttatttgcctcagtaaaagagatttgacgggatctgaactatacacccaggcggcc

SEQ ID NO: 502453 - DNA, 75 bp, Homo sapiens
ctgctgagtgtccagatcctccaaagacagatctggtcagctacacaacctggatcttaccacagtttggatatg

SEQ ID NO: 502454 - DNA, 83 bp, Homo sapiens
gttggaaatcttagtggatgcagaatcagatgaacttaattaaacatgtggacatgaaccaaaagagcatattatggagtgca

SEQ ID NO: 502455 - DNA, 96 bp, Homo sapiens
gattatatcaatgactgcaagcacctattatgggtgaagttgaacaaattgctatgatgaaaccaaaaggccagactgaacacgatgagggtatgc

SEQ ID NO: 502456 - DNA, 87 bp, Homo sapiens
caggactgcggacaagggctggcaggtcaaaatgcagatcttcgtgaaaacccttaccggcaagaccatcacccttgaggtggagcc

SEQ ID NO: 502457 - DNA, 90 bp, Homo sapiens
cagccccagttatgtggacgagctgttaaaccagctgtattctgtacgggtggaagagatggcaacattatggtctgggataccaggtgc

SEQ ID NO: 502458 - DNA, 100 bp, Homo sapiens
gtggggacatcaggctgccccgcagtaccagggagcgactgaagtgcccatgccgcttgctccggagaagtaagactttgaccccgacgcaggcttcagt

SEQ ID NO: 502459 - DNA, 96 bp, Homo sapiens
ttacctgcaggtattgggagatccacagctaagacgccaggacccactggaagcctagaaatgatgggaatttcttagccataggctcacatgaca

SEQ ID NO: 502460 - DNA, 128 bp, Homo sapiens
gtgaagggcagggagctggacctggaggcgccgccgcgacagcagcagccatggaggacgagatgcccaagactctgtagattggggtcaactggactacttagttgtagacatgccaccaggaactg

SEQ ID NO: 502461 - DNA, 80 bp, Homo sapiens
ctgctgcagtccaggctgaagacagagggctctgatctgtgcgacagattgagccccatatgggggttggcaggcagcag

SEQ ID NO: 502462 - DNA, 90 bp, Homo sapiens
catctcagatctggagcatcggctgcaggggtcagtgatggagctgcttcaggcaaccacacctccaaatcaaggaaggccagattctcc

SEQ ID NO: 502463 - DNA, 74 bp, Homo sapiens
ttgcaacgaccgtctggggaagaaggtccgcgttaaatactgactggagctctcccgtgtcagctcgtagcaca

SEQ ID NO: 502464 - DNA, 83 bp, Homo sapiens
ttctcgcgcactcgaaagggaatcctcctgtttgctgagattcacgagtacacgagacaggattgagaaaggagagattcaaa

SEQ ID NO: 502465 - DNA, 101 bp, Homo sapiens
tgaaagtggagagtcacagaggggaacagatttcagtgtcctccttagctctgcaggtactataagatctccgtggtgctcatgtgctttgtggtccccac

SEQ ID NO: 502466 - DNA, 100 bp, Homo sapiens
cgggacccgatcctccgctcctgaggcccccacaatgaagcagtcggacgcgtctccccaagaaagggtttgccttcccggattgggcctacaagccaga

SEQ ID NO: 502467 - DNA, 101 bp, Homo sapiens
gttggccaacagcgaaaagcaaggcatgcggacacacgccgtctctgtgtcagagttagtgctgagggtgctgtactatggccggcaaaattttatggaag

SEQ ID NO: 502468 - DNA, 95 bp, Homo sapiens
aagaggggacaagtacctttatgaaccagtgtatcccaagaaactgttaaggcagcaataatagaagagcagaaacgaagtgaaaaggctgtgga

SEQ ID NO: 502469 - DNA, 100 bp, Homo sapiens
cgaggagaagggacccaggatgaggaggaaggcagtccttgatggagatgcagagtcgtcatggggcgagaacaagtgactctgaccagcaggcttacct

SEQ ID NO: 502470 - DNA, 76 bp, Homo sapiens
cccaccggaatggagaaggaagaggagtcggaatgtatcctgtcaggtataatgtcagtgaatggcaagaaagttc

SEQ ID NO: 502471 - DNA, 75 bp, Homo sapiens
ggcagccccaaagcctgaacaggcagggccagacccaggggttcggtccgagcccggtgggaggctcccggagcg

SEQ ID NO: 502472 - DNA, 96 bp, Homo sapiens
ggccagtgcgtctgccccgccggctgggtgggcgagcaatgccagcactgcgggggccgcttcagaaacagcacttcttctcagtctcagacaagt

SEQ ID NO: 502473 - DNA, 104 bp, Homo sapiens
ggactcttgattggaatgttctccctgcagcagtcagcccaaaggaaggtgtagagttcggtgctcgaatgataactattgatgggaaacagataaaacttcag

SEQ ID NO: 502474 - DNA, 80 bp, Homo sapiens
ccggcgtcttcgtttgggacgaggagaggatccaggaggaggagttgcagaggacccgctacatcagcacggagctgggc

SEQ ID NO: 502475 - DNA, 101 bp, Homo sapiens
cacccactcagctcactcgggcctctggccaacagggcatggggacatcatatcaggcccagctgagagccagcctggaggttacccagcagcaggccacc

SEQ ID NO: 502476 - DNA, 107 bp, Homo sapiens
gctgcgacggggagcggcggagaccgcctctgctcccgcctggggaatgaatctgaagtctgctgcagtaaaacacagaaggctttaaaatgttttcttgcataaaa

SEQ ID NO: 502477 - DNA, 100 bp, Homo sapiens
cggagctggaatgactggcaacccagctgatgttctaatcatgtcagataaagatgatattgagactccactgctaactgaagcagcccccatccttgaa

SEQ ID NO: 502478 - DNA, 127 bp, Homo sapiens
aagactctcagcagagggcgtcgcatcctggacaggaaaattcagagcctgggagacagcaagaccattcccgggactttgaacatgtcggggatcgccctcagcagactcgcccaggagaggaaag

SEQ ID NO: 502479 - DNA, 83 bp, Homo sapiens
gcgcacttcgtcatgttcttcgcgccctggccatgacgctgatggagtacctcatcaagaccggctcggagcgcgtgtcgcag

SEQ ID NO: 502480 - DNA, 101 bp, Homo sapiens
ccagtacagggagctgcagaggtacgccgaggaggttgggatcttcttcactgcctctggcatggatgaggataatgttgtctgtctgtctccaaaactgg

SEQ ID NO: 502481 - DNA, 80 bp, Homo sapiens
aagtctgtgtcaaacatccatatcataagtggaattttggagatattcaaaggtgctgctagctgaggaggggatagctc

SEQ ID NO: 502482 - DNA, 96 bp, Homo sapiens
ccagcttcctctggactatgccaagatgcctgaggaagtgcaccatggagaggaggaggtggagacttttgcctttcaggcagaaattgcccaact

SEQ ID NO: 502483 - DNA, 83 bp, Homo sapiens
agggaaccctggtcaccgtctcctcagattcactgcgtgctgtcctcacttgttctacaatgagtgccaaatctgctatcagc

SEQ ID NO: 502484 - DNA, 100 bp, Homo sapiens
ctcagcctgagccttctgtcacccaaagggctccagctggtttttcactcaggcctcactttatcttccaaggaatccatgggaaagagctatgatggga

SEQ ID NO: 502485 - DNA, 82 bp, Homo sapiens
agaaccgctcgctgcagtccgagaacgccgcgctgcgcatctccaacagcgacctgagcgcggaaggagagttttacatgga

SEQ ID NO: 502486 - DNA, 100 bp, Homo sapiens
ggccacgctgcgggcccgggccatggccgccgccgatgccgagtctgagtaccactatgagtacacggcgtgtgacagcacgggttccaggtggagggtc

SEQ ID NO: 502487 - DNA, 87 bp, Homo sapiens
ggagagagtttgtccatctcccaaacacagaaggcctttcagggtctctctctgtcacaggctggagagcagtggcgtgatcagggc

SEQ ID NO: 502488 - DNA, 75 bp, Homo sapiens
ggacagcatttctgtgaacacatctttggatcaaaactccagcaaacatgctgaggctggagtttggagtttgac

SEQ ID NO: 502489 - DNA, 74 bp, Homo sapiens
ccaaagctattctgggggcaacagagggggtgaatctctacattaagaacttggatgacactattgatgatgag

SEQ ID NO: 502490 - DNA, 100 bp, Homo sapiens
ttctcttccttcgctaacgcctcccggctctcgtcagcctcccgccggccgtctccttaacaccgaacaccatgaggaaaatgaggcccaaagaagtgat

SEQ ID NO: 502491 - DNA, 96 bp, Homo sapiens
ggtcctgctcacgagagaaaaaggagatggcccactgcgtgaccttggttcagctgtccatttcctgtgaccatctcattgacaaggacatcggct

SEQ ID NO: 502492 - DNA, 100 bp, Homo sapiens
agaaggacttcggaatgcactacaacaggaaaatcatattatagatggagtaaagggggagaagcgagcggacatccagctgaacagcttcggtttctac

SEQ ID NO: 502493 - DNA, 100 bp, Homo sapiens
cagaaggtgaccaagttcatgctgtgtgctggacgctggacagggggcaaaagcacctgctcgacttcacagagaatgcagttgtcttgacttcaggtct

SEQ ID NO: 502494 - DNA, 74 bp, Homo sapiens
gacgaggacacgacagtcacaatcccctcggccgtctttcaccaacaatcaccagtggtttacacaacattgca

SEQ ID NO: 502495 - DNA, 74 bp, Homo sapiens
aagaacagctgtggaaagaagttgcaaaacactggcaggaacgaatgcaggaatttgggaactgagctgtgcaa

SEQ ID NO: 502496 - DNA, 75 bp, Homo sapiens
tgcgcggagaaggggtccgagggcagtctgtgtcaaacgcagtgtggcaaaggagcagagaactttgacaagttc

SEQ ID NO: 502497 - DNA, 124 bp, Homo sapiens
taccttggaagaactccgtgcccagatgctcataaggattgtcctctttctacaaaaggagaaaggatcctgggttatgctgaggagccctgctatctctggtttgtcatggagttctgtgaag

SEQ ID NO: 502498 - DNA, 100 bp, Homo sapiens
atggcggcggccgcgctaaggttccccgttcaggcaggatgtagccaatcaaatgtgcaccaagaccaaggaggagtgtgagaagcactatatgaagcat

SEQ ID NO: 502499 - DNA, 100 bp, Homo sapiens
cggcggcgctgcccctcccctggtccccgcgagctcggagggcccggctggtgctgcgggggccccgggaggaagcacaagcctatgcagacgacaacag

SEQ ID NO: 502500 - DNA, 76 bp, Homo sapiens
gatgcttgtgatggtcatgagattggaaggaagcctaaagaaactgttccaactcttgctccaaaaactctttcag

SEQ ID NO: 502501 - DNA, 101 bp, Homo sapiens
tgtggtctctgcacctcctttctgttggatggagtactgctcgtgattattacacgtttttatggtcccctatgcctgaacattatgtggaaggatcaaca

SEQ ID NO: 502502 - DNA, 83 bp, Homo sapiens
ccgccgctgccgccgcgacccttggcgcctgcccctgcaacgggagggtttccaggcctgaggtgcccgccctggccccagga

SEQ ID NO: 502503 - DNA, 76 bp, Homo sapiens
agtagagtatttcaaccataaagacatcttaattgggcacgaaagaggcaggtttaacaacttactttcatcctgg

SEQ ID NO: 502504 - DNA, 50 bp, Homo sapiens
gcagaaggcctcacgcaaaaatgagtcttgccctgtcgcccaggctggag

SEQ ID NO: 502505 - DNA, 82 bp, Homo sapiens
aagcaaacagaaatttgtgctcaaaacccccaagaagctaaaccagccccagaaatatttgaaaatgaagtcatggccctgc

SEQ ID NO: 502506 - DNA, 98 bp, Homo sapiens
tggagaatggctctgcctgcgagagctggatgacatctcacttacacctgacccagagcctacccatgaagtggtagtcgctcttctaaaacttttaa

SEQ ID NO: 502507 - DNA, 90 bp, Homo sapiens
tctggtgttatcaacttaaaagatgccacctctaagacttattcgtctaatggaagagatcatgagtgagaaggagaataaaaccattgt

SEQ ID NO: 502508 - DNA, 96 bp, Homo sapiens
ttttatatgccagagaaccctgagtgtgcccctgacatgacaaggagccgtcgtcgttaggtagctacagcaagctgggtagcaggcagatccaaa

SEQ ID NO: 502509 - DNA, 100 bp, Homo sapiens
cctgcctgaatggcgggaagtgtgaagcggccaatggcacggaggcctgcgtaaaaggtgtgagcggtactgggcccaggagcaggagccactgcagact

SEQ ID NO: 502510 - DNA, 111 bp, Homo sapiens
gccagctggacctagctcagcggaccctgtaccaggaggtgatgctggaaaactgtgggctcctggtatctctgggactttgtggtgtatgtgatgacgcgagagcagcac

SEQ ID NO: 502511 - DNA, 95 bp, Homo sapiens
tccttcgtccctgacatcatctctgtgcactgataataaccctgcagagtcattcttatagaagagcatcagaggaagataaaaaagaatcctca

SEQ ID NO: 502512 - DNA, 97 bp, Homo sapiens
ggaaacagctatatgggaacaacatacagtgacgcttcacaggtgttctcaggcgctgtggtctcaccttccactggggcaacaatgggccatttcc

SEQ ID NO: 502513 - DNA, 100 bp, Homo sapiens
gatgaccggcctgaatgtccctatggaccatcctgttatagatggctcggactcaaaagaacaaggccacagcacaccacttagggctgcttaaggctcg

SEQ ID NO: 502514 - DNA, 144 bp, Homo sapiens
gggctgaagggttagcggagcacgggcaaggcggagagtgacggagtcggcgagcccccgcggcgacagatctgaaactcagcaccgaggctctgctccccactctgagagtgatctaccagagcaggaagaggagattctggg

SEQ ID NO: 502515 - DNA, 109 bp, Homo sapiens
ttgtgtatgaagctcaagatgtggggagtggcagagagtatgcattaaagacatgcaagaaagcacttcagccaagcagaagggagccagctggacgaggtgcgccagg

SEQ ID NO: 502516 - DNA, 82 bp, Homo sapiens
aaccccgagtgcggcccggaggcggcggagggcaccccgggcgggcggcggctgctacaatgcagatcttcgtgaagactct

SEQ ID NO: 502517 - DNA, 95 bp, Homo sapiens
gccggaacaccctggaagccgagaaatggtgatctttgcagagctgtttcaacttccagcaccccctcacattgatgtgatgtacacaacactcc

SEQ ID NO: 502518 - DNA, 101 bp, Homo sapiens
tcaaggagattatgtctacgtttacagtggagacctttggcgacttggcctttggcgacatcttcctccacctgctcacgggcaaccttgcgctgctggcc

SEQ ID NO: 502519 - DNA, 100 bp, Homo sapiens
agcaccgggagtcagcagagtgaaggtcctctcctggaagtcgaagctgccgctgcagaccatcatgaggctgctgcaggtgctggttccgcaggtggag

SEQ ID NO: 502520 - DNA, 75 bp, Homo sapiens
ggactacagtgacgccctcacggagaagcagtggctaaggttccagtgtctcgccccatcctcaccctcagggtt

SEQ ID NO: 502521 - DNA, 75 bp, Homo sapiens
ctgggaagttacctcgaagtccctcttttccactggtacactggagaacctagaagaactgtatttgaatgacaa

SEQ ID NO: 502522 - DNA, 90 bp, Homo sapiens
gtttgagatcgccctgcccgtcgccaatgacaggaagacagagatgtcaatgaccccatgcccaaccgaggcggcaatggactagctcct

SEQ ID NO: 502523 - DNA, 80 bp, Homo sapiens
agaaggcaacgacgttccatctgtggaaggacctaccaaccagggttctggctggtgtggaccatcatcatcatcctgag

SEQ ID NO: 502524 - DNA, 100 bp, Homo sapiens
gtgccggacgctggcggatgtgcgagcgaggctgacaaaccaagaggatttgccagaggtcttgatcctgaaagaataattggtgccacagacagcagtg

SEQ ID NO: 502525 - DNA, 82 bp, Homo sapiens
gaccttgggcatcatcggacttgctgccgcagcgggaaccgcaagagcttggtggtaggaacgccctccccgaccctctccc

SEQ ID NO: 502526 - DNA, 76 bp, Homo sapiens
cgccgggtcccgcggggaaaggggggccctcagcctcttggccttgaacgggctgttcatcttgattcacaaacac

SEQ ID NO: 502527 - DNA, 80 bp, Homo sapiens
ccagatggcagccagtcagtggtggaggattttacagtttttggaggcagtctgtcaggagcacatgcccaaaagatctg

SEQ ID NO: 502528 - DNA, 80 bp, Homo sapiens
acgattcaacccgggggagctcaggatgaaaactttcggaagagaaagttgcctgtggtaagttcagttgttaaagtaaa

SEQ ID NO: 502529 - DNA, 98 bp, Homo sapiens
gatttggctacacacttatagatcttctgcactgtttacaggcacaggtgaaggttgctatccttaaatacatagaaactctggccaaacagatggat

SEQ ID NO: 502530 - DNA, 82 bp, Homo sapiens
tgaagacttgaacttaatacagcaagaaagaccatcaagtttaccaaggcaaatttctggagatgtgcaatgatctcttagc

SEQ ID NO: 502531 - DNA, 98 bp, Homo sapiens
cgctgcccgcggctgcagtcggggcggcagctgaggcggaggctgacgaggaggcggatcccccggcgtcagtgaagatagtgatccggggagacagg

SEQ ID NO: 502532 - DNA, 90 bp, Homo sapiens
agagctgaggactgcctgtttgcagaaaccaatagagccatggcgactccctctgctgccttcgaggcccttatgaatggtgtgacaagc

SEQ ID NO: 502533 - DNA, 80 bp, Homo sapiens
gcggacatctccctggacgaactcatcaggaagcgcggggcggcggcgaaaggacgggctgaagaagatgcagagcagcc

SEQ ID NO: 502534 - DNA, 113 bp, Homo sapiens
taatgccagagaactacaagaacagagggattctttgactcagaaactacaggcagagatcctacaagaatccaggatgatgatcccagattgccagcgcaggttggaagccg

SEQ ID NO: 502535 - DNA, 100 bp, Homo sapiens
ctcggatacgatagaaaatgtaaaggccaagatccaggataaggaagaaaagctgtatagctccagtggtcctgagctccgccgctccctcttctcactg

SEQ ID NO: 502536 - DNA, 95 bp, Homo sapiens
gattttgacagtcgtagatacaaatttttggatgatgatggatccatttctcctattgaggagtcaactgacattgatgtttgggtaccagaacc

SEQ ID NO: 502537 - DNA, 90 bp, Homo sapiens
acagcagcagcaagttagtggattaaaatctcccaagaggaatgacaaacaaccagctcttcagtgcacgatctgattttctggagagat

SEQ ID NO: 502538 - DNA, 80 bp, Homo sapiens
cacaacatgcacagcctggcgacggctgcggtttgtcctggttgtggtcaagactggatgatgtaactggctctctagga

SEQ ID NO: 502539 - DNA, 83 bp, Homo sapiens
accaactacctgcagccgcagctggactggcaggcccgagggcgaggagccttcacgtaaatgggtccagtcatgcctcccag

SEQ ID NO: 502540 - DNA, 100 bp, Homo sapiens
cggctccctgctgggcgggaccctggtctccgcgtacggggcagcgggtggcatgagacgtgggaacatgggccacctcacacggatcgccaacgcggtg

SEQ ID NO: 502541 - DNA, 50 bp, Homo sapiens
ctgccgccgccgccgccgccagataaggatgacattcggctgctgccgtc

SEQ ID NO: 502542 - DNA, 100 bp, Homo sapiens
atcgcatcctatggctcaaagaaagatgattatgcgttggagaccagggccagccctggccacaccccaggctgtgtcaccttcgtcctgaatgaccaca

SEQ ID NO: 502543 - DNA, 50 bp, Homo sapiens
tggacgagcaggaagctgcggctgagtcgatacatttcatcaatgaagcc

SEQ ID NO: 502544 - DNA, 95 bp, Homo sapiens
aaatattgctgtacctaaattcaaaatttctctgcaaagaatgtccaaaaattcatattcacattgatcgtatcgacaaaaaagatgtcccagaa

SEQ ID NO: 502545 - DNA, 136 bp, Homo sapiens
gcaggaagagcaaagctgtcctaggccaaccagagattcatctttcatgcagtgacatgttgataaaaaatgatgggaaatcctcattgacgattcaatttgttgaaggccaatttgtggactcctacgatccaac

SEQ ID NO: 502546 - DNA, 105 bp, Homo sapiens
cggctttttcggagccggcggagcaggttactcgcacgcggatttggctggcgtcccgcgagcatcagatccatgctgctgctgactcggagccccacagcttgg

SEQ ID NO: 502547 - DNA, 75 bp, Homo sapiens
catgaggatcgtctgcctggtcctaagtgtggtgggcacagcatggaaaggccctgtggacatcctggagatact

SEQ ID NO: 502548 - DNA, 90 bp, Homo sapiens
gctgaacccggcccccgacggctctgcagttaacgggaccagctctgcggagtaagaatgattgatgttggctgatattggagtgctcat

SEQ ID NO: 502549 - DNA, 95 bp, Homo sapiens
caagaaagctcagctggtggtgattgcacacgacgtggatcccatcgaggttcagagtattgagttcacccagatcgaaatgaaagtgatggagg

SEQ ID NO: 502550 - DNA, 100 bp, Homo sapiens
cctctttggcctctattctcgccaagacaacactcgatggctggaggcctctgttgtaggcaagatcaacaaagacctcccacagcccagtgtgccagga

SEQ ID NO: 502551 - DNA, 75 bp, Homo sapiens
tggaggtgaaactgggcaagaggccccagcccgtgaaaagtgagaatgtatgacaacatgtccacaatggtgtac

SEQ ID NO: 502552 - DNA, 87 bp, Homo sapiens
ggaccctccaagagcactagtgtctagaaggcactaagggaaggcaacagcccccaggggagcaaccagggagtcaaaatcacaccg

SEQ ID NO: 502553 - DNA, 98 bp, Homo sapiens
gcggcgggctggagacatggaccgcggcgagcaaggtgtcatggagaaactccagctgggcccagagattctgcagcgggaaaatccaaggcttattt

SEQ ID NO: 502554 - DNA, 75 bp, Homo sapiens
gaagctgactactaaggagaataagggcatgagccagaaggagagctctaagtctgccatgatgtatattcagga

SEQ ID NO: 502555 - DNA, 82 bp, Homo sapiens
cagcgacccaagcgccgcggttaaccacgtctcgtccacgacctccctagaaaatgcttggacagaagagatgagtactatt

SEQ ID NO: 502556 - DNA, 75 bp, Homo sapiens
ggagcctgagccgccgtccggccgcacggagagcccagccaccgccgcaggttgctccttgagggcaggacagtt

SEQ ID NO: 502557 - DNA, 75 bp, Homo sapiens
gaacctgaaggctgcgcaggaggagtatgtcaagcgagccctgataacaactattccacaccaaatgagagagga

SEQ ID NO: 502558 - DNA, 127 bp, Homo sapiens
aattacggagtgttgcatgtgacgtttcccttgctgtttccaacctgtcagttagaggagcttcagttgatgggctgtttccttacttccgattcctgtaaggacattgctgctgttcttatttgca

SEQ ID NO: 502559 - DNA, 96 bp, Homo sapiens
gggacctgctgaaggaccagagagggagccctgcctacatcagtcccgacgtgctcagcgtattctccaagcatgacgatgagtgtgtgatccccc

SEQ ID NO: 502560 - DNA, 75 bp, Homo sapiens
ggctgtggcgcggcggccgcgagaaactatgttccaacttcctgtcaacaatcttggcagtttaagaaaagcccg

SEQ ID NO: 502561 - DNA, 98 bp, Homo sapiens
gcggcgctggaggagcgaggcagctgtactaggactgggaacggagtgcctggtgaagaatgtgatgggatcactagcatgtctgcggagagcggccc

SEQ ID NO: 502562 - DNA, 59 bp, Homo sapiens
tggtgacttcacttttgagtgcaactgccttccaggatgctccaggatgaaacgccata

SEQ ID NO: 502563 - DNA, 75 bp, Homo sapiens
tttgacaaaacataccaattcttgaatgacatccgagcgaaagagaaagagtcagactcagtcacatgcccactc

SEQ ID NO: 502564 - DNA, 75 bp, Homo sapiens
cgtgtgttgaaagtacaattctattgcacatcaatgatatcatcccaggtgacttaagagattaaaattaatttg

SEQ ID NO: 502565 - DNA, 100 bp, Homo sapiens
cacctgggacacctggaagaattggtctagaaggccctcctgggccacccggctttccaggaccaaagcaatcatttggggaagaatctacagttgctga

SEQ ID NO: 502566 - DNA, 83 bp, Homo sapiens
cacctcttccaagtggagtacgcgcaggaggccgtcaagaagggctcgaccgcggggtcgggccccggctcagtggtcccagg

SEQ ID NO: 502567 - DNA, 98 bp, Homo sapiens
gccggaagctggttttcaggccacaaatgctttcacaggattccagtcctctactaaatgaagtttcttcttcccttattggaactgattcccaagcc

SEQ ID NO: 502568 - DNA, 74 bp, Homo sapiens
aatcatatctttagattttggcagcaacgaacacagatatgtagaactcttcttgaattctacagcaggagcaa

SEQ ID NO: 502569 - DNA, 99 bp, Homo sapiens
ttttctccatggatggaaacagactgaccagtgacaaaaaattctgctcccctcatcaggactccctggaggaaaagcggaagcggcagcggtctgaac

SEQ ID NO: 502570 - DNA, 100 bp, Homo sapiens
cctcctgtaacccagcctgtttcacttcttggggatcatcgtcttgctcttcttttatctcagtttgtgggtagccagtcagtccgggagctgctcacca

SEQ ID NO: 502571 - DNA, 75 bp, Homo sapiens
cgccatggcgaccggagcgaacgccacgccgttgggctgaccccgcactacatctacccaccagccatcgtgcag

SEQ ID NO: 502572 - DNA, 98 bp, Homo sapiens
ttcgaggagaggtcggcatctttgttccctgcccggccattgttcgtgccgcgcttctagcaacgccgggccggcctctgtctatattcagggacagg

SEQ ID NO: 502573 - DNA, 101 bp, Homo sapiens
tgaagtacaccgtggtgacattgtatcattggtgagaaaattttgagcagacaccattgagaagaacattcaaatctaaggtccttgcacgatatcctgag

SEQ ID NO: 502574 - DNA, 100 bp, Homo sapiens
cagcatcgacagcgagttcagcaatgccattgcatccatccggcatgccaggtgcgggccagtgctattgcccaggacgcggaccagaactacgactacg

SEQ ID NO: 502575 - DNA, 75 bp, Homo sapiens
cacgactactagaaggggaggggagtggaaaggctctcagtgaaaaagctgcggttggatttctcacgatgtcca

SEQ ID NO: 502576 - DNA, 90 bp, Homo sapiens
tggggcgcgctgggcttggagctggctgtgtccgtgaaagatagaccttcctccgagggccgtctctcccagccgaacacagcccacccg

SEQ ID NO: 502577 - DNA, 98 bp, Homo sapiens
gcggcgggactgcactcgagtgtccagacctgctcgatgcgctgcaaactcctgcccctccagcccccggggagcggggtcttcagggtacaaggtgg

SEQ ID NO: 502578 - DNA, 98 bp, Homo sapiens
cttctgcggccggcctgggcaggtgtcttcctcgagaggcaggcaggggatcccggacacatcacttagtgctcttacccagctgatgaaaaagatgc

SEQ ID NO: 502579 - DNA, 74 bp, Homo sapiens
ctcgatggcaagagaattaaactgcagatatgctcatgatggagcagtccaagaagtcctccctcatggtggcc

SEQ ID NO: 502580 - DNA, 74 bp, Homo sapiens
cagccaggcccttggagctggggagatcccggcaccttctgagacacagcccaaatcttgtgacaaaactcaca

SEQ ID NO: 502581 - DNA, 51 bp, Homo sapiens
gtggatccaggtgaagggggcagaggcccagaggcacatcagtgacctgta

SEQ ID NO: 502582 - DNA, 83 bp, Homo sapiens
gacttatggatccgttacagtcagtacctacaaaaaatcccagaagtgggatgaaatgaacatcttggcgacgtatcatccag

SEQ ID NO: 502583 - DNA, 95 bp, Homo sapiens
ttcctcaacgacgcggacatggtcatgagctttgtgaacctgggttctggaggacacgtgccggcggcaggacttcaacccctgtgaatatgatc

SEQ ID NO: 502584 - DNA, 83 bp, Homo sapiens
attttgcagagcatcccccaaagacagattgaagaaatgcagagacagctttatgaaaactttatcagtgaatttgaacacag

SEQ ID NO: 502585 - DNA, 83 bp, Homo sapiens
ggcagctcaaatggcaagacgaactcaaccagcacaacaggttcatgatcaagagggcccaaggacggaagcgctttgggatg

SEQ ID NO: 502586 - DNA, 73 bp, Homo sapiens
gaatcattagtatcggacacagaaactgattacagtggcgagatcttgaacaactgctgcgtcatggagtacc

SEQ ID NO: 502587 - DNA, 83 bp, Homo sapiens
tggggctggaaattgcgctggaccgtcgccttgctcctcgccgcggcggggactgcaggattccccagctttccgttgcacaa

SEQ ID NO: 502588 - DNA, 74 bp, Homo sapiens
caccatgccagtctctccggcaggcagtcacaagcagcagaacttcgggttttcttttagatcagcctgagata

SEQ ID NO: 502589 - DNA, 82 bp, Homo sapiens
gcagcatcaaggagcttcacgacatgtttatggacatcgccatgctggtggagaatcaggcacgtgtggttctcaaatatag

SEQ ID NO: 502590 - DNA, 74 bp, Homo sapiens
ctgcagccgcctgaccacggcgactggacttacgaggagcagtttaagcagaacccagcgggtgccgcttctcc

SEQ ID NO: 502591 - DNA, 90 bp, Homo sapiens
catcatttgaggaatcagaacgcaagcaaaatgcgttaggaaaatgtgatgcatgtctcagtgggcttcgtgggacacatatgcaacatg

SEQ ID NO: 502592 - DNA, 100 bp, Homo sapiens
gacacgccacagcctcttttggattttgatacagatgatcttgatctcaacagtctcaggatctgattgagaaagttgtcatcctgcgaaaagctgtgca

SEQ ID NO: 502593 - DNA, 100 bp, Homo sapiens
agcgccggttccttgcggtcaagatgctgcaaaacgtgactccccacaataaatattaataaggcagcggaaagaagaaatatgaatacggctccatcaa

SEQ ID NO: 502594 - DNA, 100 bp, Homo sapiens
gcacacgagtgggactggttccaacgcgaggagctcatcgggcagattagcgacatccgagtgcagaacctgcaaggggagctatccagtttgggaagat

SEQ ID NO: 502595 - DNA, 100 bp, Homo sapiens
gactgtgacgatgacaagtaccgacgtcggccggccttgggttggctggcccggctgctaagcgcccccctcgcgggcccagctgcaactgcacttgccc

SEQ ID NO: 502596 - DNA, 50 bp, Homo sapiens
atccggtgcgccgaggctgctcacaaaaacaaaaggatgccacggagaaa

SEQ ID NO: 502597 - DNA, 100 bp, Homo sapiens
ctgaatgacatctacctccatcaggaccccagatgtctgacagccctgtgtgacaccaagataagtaacgtgaacacacaggatttcagaggattagtgc

SEQ ID NO: 502598 - DNA, 87 bp, Homo sapiens
gggattcaaatgaaagtgaaaatgttagaagaactcgtgagccggattgatgacaacagcagttctgtagagagtttaaatatgaag

SEQ ID NO: 502599 - DNA, 75 bp, Homo sapiens
aggtgtaagcgcagaaagcaggcgaacccgcggcgcaataacgttcctccgtgtcacaaagcagtacctgcccca

SEQ ID NO: 502600 - DNA, 75 bp, Homo sapiens
gggcccgggcatggtggtctggggcaacgcggaaggtcgcaatggaagaagagatcgccgcgctggtcattgaca

SEQ ID NO: 502601 - DNA, 100 bp, Homo sapiens
cggcccccgagagccgccgacatgaagaaagacgtgcggatcctgctggtgggagaacgtcgagctgtgtttagagtgcatcgaatgggccaagtcagag

SEQ ID NO: 502602 - DNA, 100 bp, Homo sapiens
tacttagagcagaagatatgctgggcttctgatgatggctgcactgcatggagtctaccatggctcaagaatctcccaaaaattcagcagcagaaattcc

SEQ ID NO: 502603 - DNA, 100 bp, Homo sapiens
ctcagcagacccttcctgagggccgagcaacagtgtagtggcgtattccacatagcaaacaggtcctgggaactccaacaagggagcaaatcagagaaat

SEQ ID NO: 502604 - DNA, 74 bp, Homo sapiens
tgttactccattgctgaggagtgtatctggagtccatctttcaccatcttctcctgagattgtactggaccgtg

SEQ ID NO: 502605 - DNA, 101 bp, Homo sapiens
gccaagctctccaagttcagcatccccaagcagggggagttcacacaaaagatgttggacaatttctacaattttgcttcatcatttgctgtctctcaggc

SEQ ID NO: 502606 - DNA, 75 bp, Homo sapiens
tccgagcgcaaggacagcgcgaggtccgcgcagcccagcgcagccatgtgagcgagtgctgtgctttcatgggcc

SEQ ID NO: 502607 - DNA, 100 bp, Homo sapiens
ccgttcctcgcgccagcctcggcggtggcaagcgctgtcccccagcagaggtgtccctggatacagatcctgcagctccaccaaagaaaccgcctcgccc

SEQ ID NO: 502608 - DNA, 75 bp, Homo sapiens
gtttctattaaaacggagaatacagatgcaagctggaatttgaatggatttccagatgtgacttgcactcagaag

SEQ ID NO: 502609 - DNA, 90 bp, Homo sapiens
aacaaactcaaccaactccactacagctgttcccagcttggttgcacttgagaaaattaatgtggcagatcgagttttggttcgggttag

SEQ ID NO: 502610 - DNA, 101 bp, Homo sapiens
aggctggacccacagtgccaaatatggccctggaacagctgggagtgtccactcgccttccaccagcatggcaacgtcttcacagtaccgccagctgctca

SEQ ID NO: 502611 - DNA, 75 bp, Homo sapiens
catcctggccgatgccacggagcaagtgggccagaactgaagctagtttagcctcacgcagagaacaaaagagag

SEQ ID NO: 502612 - DNA, 83 bp, Homo sapiens
gctttctgatgatgcccgtctcttcacagaggccgtatctgaggaacagcagcctgcactcaagggcaaaaagggaaaggaag

SEQ ID NO: 502613 - DNA, 83 bp, Homo sapiens
gtaaagtcgagtatctggtgaagtggaaaggatggcccccaaagccttccggagcagtactacagcctcacctggttcctgag

SEQ ID NO: 502614 - DNA, 75 bp, Homo sapiens
ctcctgggatcggcccaaggccagttctccgcagattctggaacttttcaaagcctgactctcttcttgaaacag

SEQ ID NO: 502615 - DNA, 75 bp, Homo sapiens
ccatgagggccgggcccagtcaccgaccaacaagttgaaatcatcgcagaaggataaagttcgtcagtttatgat

SEQ ID NO: 502616 - DNA, 83 bp, Homo sapiens
tgtccaccatcgagcagtatgccgccctggccacggggactctcttctggatggagcatcagatccatgctgctgctgactcg

SEQ ID NO: 502617 - DNA, 75 bp, Homo sapiens
gaagaagcgcctcttgatgcccagtaggggtgcgtgctctggaggaggccaacgccgacctggaagtgaagatcc

SEQ ID NO: 502618 - DNA, 96 bp, Homo sapiens
gtcctctagctaggcttaaaaaagcaatttttagtccagagctctatgaaaacattgctgaatggattgtgggggacttgatctcatcttcatgcc

SEQ ID NO: 502619 - DNA, 51 bp, Homo sapiens
gtggatggggacctgcctgctggggcttggaagaattctgtggaagagtgg

SEQ ID NO: 502620 - DNA, 100 bp, Homo sapiens
tggtcttcagagagcaactatcctccccagagcacaatcattgtggagaagacagttcaagacctcctgaacctgatgcatgacttgagtgcatattcag

SEQ ID NO: 502621 - DNA, 101 bp, Homo sapiens
cggaccttcatcaccattggagacagagtcgttccaggggtagaggaggcatgaaggatgaccgtcgggacagatactctgcgggcaaaaggggtggattt

SEQ ID NO: 502622 - DNA, 82 bp, Homo sapiens
tcagtccctctgtgctccaggactccctcaataatggggtgaatctctacattaagaacttggatgacactattgatgatga

SEQ ID NO: 502623 - DNA, 80 bp, Homo sapiens
aaggagattacttggggaaaactgtccaagacttcctgctatatcctgatcatcactattgcaaatattgcaaatttggc

SEQ ID NO: 502624 - DNA, 96 bp, Homo sapiens
agaagggcaggacctgggcggaggccgccaagacgatttgctgaccatgaaagaatatcactgtttgctgcaattactgtgtcctgatttcccgct

SEQ ID NO: 502625 - DNA, 75 bp, Homo sapiens
ctctggaccaacttgaccgtctactggaaatctgaatgctgttatcacggcttcgtgggacacatatgcaacatg

SEQ ID NO: 502626 - DNA, 100 bp, Homo sapiens
gacgcgccggggccgcctcctcccgcacggacccatgaaccagccgggcggcgcggcggctccgcaggaaagaaccggaggctgaagcaggccaaagaag

SEQ ID NO: 502627 - DNA, 98 bp, Homo sapiens
gaaatatgagaaagaatatcagacaatgcgagagagtcagctgcaacaggaagacccaatggatagatacaagacaaagaaacagccttggtataata

SEQ ID NO: 502628 - DNA, 82 bp, Homo sapiens
tcttcggtggactccttcggcagtccacccaccgccgccgcctcccagaaacgcttcgttaagggactcaggcagtacggga

SEQ ID NO: 502629 - DNA, 100 bp, Homo sapiens
gcgggagcctttggggcaccacagagatgcgggttcgatacaagaggctgttttcctagcgtggcttgctgcctttggtaagaacatgtcgtccatcttg

SEQ ID NO: 502630 - DNA, 73 bp, Homo sapiens
gccacctctgactgcttggggaggcgcccggtgatgctgctgtgcctgctcctggtaacgtttttatccatgg

SEQ ID NO: 502631 - DNA, 100 bp, Homo sapiens
gaaggagctgtttgccctgaaacccatgaactgcccaggacactgagatctggttggagttggagggtgagagaaaatgaattctaatttacctgcagag

SEQ ID NO: 502632 - DNA, 82 bp, Homo sapiens
gaggctccgttgcctgctcccggagggagacgcgctgccgaggagaacccagcgggagtctgctacaccatttttgatttgg

SEQ ID NO: 502633 - DNA, 100 bp, Homo sapiens
tgagaggccccctgaggagtatgaccagccctgggagtggaagaaggagcggatttccaaagcctttgcaggacacattggcgtgagacctgggagtacg

SEQ ID NO: 502634 - DNA, 51 bp, Homo sapiens
aatgcccggtgctgacggacccccgcccgacggccatggaggctgaagaga

SEQ ID NO: 502635 - DNA, 100 bp, Homo sapiens
gcaaagttcagggtacctggatgaatgccaacttttgcatttcccatgtgtatcctgtgaccattctatctggggtgggaaagcagtgccactctccgct

SEQ ID NO: 502636 - DNA, 87 bp, Homo sapiens
tacaggaatcttctctcattgggattctttctactaatccagatacttgttgaagtgctgactagtttcttggggaaagatgtcaag

SEQ ID NO: 502637 - DNA, 83 bp, Homo sapiens
ggacaaaagccaagaggaggacagttcgctacacagcaatgcatcgagcccagatggcagttacacagaggagcagagtcagg

SEQ ID NO: 502638 - DNA, 50 bp, Homo sapiens
ctggattccatgtagagacccctggagcacaagcagcgctgccctgtgct

SEQ ID NO: 502639 - DNA, 100 bp, Homo sapiens
gactgaaaagacatctaatttcattgctcggcaggttccaatcgttgcacttactgctactgcaagttcttcaatccgggaagacattgtacgttgctta

SEQ ID NO: 502640 - DNA, 80 bp, Homo sapiens
aaggaggtcacccgcgtgctaatggtggaaacccacaacggttggtggttctgtcagatgaaagcaaagcgaggctggat

SEQ ID NO: 502641 - DNA, 75 bp, Homo sapiens
gcgcggccttgcaggttccctgctacgctgctcctgctaaggccaagccggctgaagctcctgctgctgcagccc

SEQ ID NO: 502642 - DNA, 75 bp, Homo sapiens
gaggaagagccgggcagtccctggagcgggccagggtgacgagaacaagtcagtgcgcgaccgtttcaacgcccg

SEQ ID NO: 502643 - DNA, 75 bp, Homo sapiens
ctccgcgtcccgctcgctgggagagagtggccacagatgtctttaattccaaaaacctggccgttcaggcacaaa

SEQ ID NO: 502644 - DNA, 75 bp, Homo sapiens
ctacgacatccacttctaccccaccttccgggcagacatctggtccctgggcataacagctattgaacttgcaag

SEQ ID NO: 502645 - DNA, 100 bp, Homo sapiens
tcagacagatcgccggggaggcagcgcgggatcccagcctcaggcgtgcgcggacggtgtgcgggttacttcttgctgcagattctgcgcaggatcggag

SEQ ID NO: 502646 - DNA, 76 bp, Homo sapiens
cacgtgtttgcggttcagccctttgatgaccgcagcaggtctataagaaggagaaagctcgagtcatcactgagga

SEQ ID NO: 502647 - DNA, 82 bp, Homo sapiens
caaatgtcagccctggagttccatgataccacacgaacacaggtgtgagttcttgatacgaatgaaaggccaagagtttgtt

SEQ ID NO: 502648 - DNA, 100 bp, Homo sapiens
aagaggtgcaggcctgggcgcagcgcaaggagcgggaagtgctgcagctgcagatccagacatttaatgtggatgcaccatgccagaccgtggaagattt

SEQ ID NO: 502649 - DNA, 74 bp, Homo sapiens
tgctgaggtgaccttggccatcctgctctttgtatatgaacagaaggtgcctctcttgaccagctaccctccca

SEQ ID NO: 502650 - DNA, 82 bp, Homo sapiens
cggcgcggggaccgctgtgctctcgggattaaagcctgtggtttccacagaagcaccacctatcatatttgccacaccaact

SEQ ID NO: 502651 - DNA, 100 bp, Homo sapiens
agcgtgaccgagagcgcgaatatcgtcatcgttagaagtcgagcaaaagatgtgataataccagcaaagccacctgtcagctttttctccttgaggtctc

SEQ ID NO: 502652 - DNA, 98 bp, Homo sapiens
aaaaaatcccaaggtctgcaaagggttgttatgaggctcaaaggaacggctgctgtgaaaaaacatgctttgcaatttatgaagcactggataaacat

SEQ ID NO: 502653 - DNA, 100 bp, Homo sapiens
ggagttgctggtgttctatactggaagaggcatgccagaggtagagcagcatcctaatgtcctatgatcacgtggaactcacattcaatgacatgaagaa

SEQ ID NO: 502654 - DNA, 94 bp, Homo sapiens
cgggcggcttcctggcctgggcgctccggtggcggcggaggtcgcaatggaagaagagatcgccgcgctggtcattgacaatggctccggcatg

SEQ ID NO: 502655 - DNA, 100 bp, Homo sapiens
ggctgcctttgttgctgctgcacattaggttgcagtatgtggccagttatttgcctcagtaaaagacttctcaataggtttggcatggacaagatctatg

SEQ ID NO: 502656 - DNA, 83 bp, Homo sapiens
caagacagcatcaaacctcactgtctctgtcctggaagcagaaggagtctttgaaaaagggggaagcgagtagcattatctga

SEQ ID NO: 502657 - DNA, 97 bp, Homo sapiens
cgcccgcctgcagctggagctgagcaaagtgcgtgaggagtttaaggagctgaaagcgcggtgtagtattgagtcctgtttgagctattgttctctt

SEQ ID NO: 502658 - DNA, 89 bp, Homo sapiens
ccggccggtgccagcacctttcggcttctgagacggcggcagcagcggcattcaggtaaagaatctcatttggacacattgagtcgggc

SEQ ID NO: 502659 - DNA, 83 bp, Homo sapiens
caacccttttggaggtgcttctcatgcaaaaggaatcgtgctggaaaaagtgttgtgaccgagattcccgacgagagagactg

SEQ ID NO: 502660 - DNA, 74 bp, Homo sapiens
gcagaagaaacatcttcgagatttcggcgaggagcatcccttctatgacagcgttgggaattcaagcatcctca

SEQ ID NO: 502661 - DNA, 50 bp, Homo sapiens
cacggctttagcggtgtcttttgcggatctgccagagcatcttttggaga

SEQ ID NO: 502662 - DNA, 83 bp, Homo sapiens
ctggaggcggcgggatggaggcggcggccggtatcacctcttctgggctcaagatggacaacaagaagcgcctggcctacgcc

SEQ ID NO: 502663 - DNA, 50 bp, Homo sapiens
cgccgcgccgcccggcagcctcggcagtactatactggcaattgctggag

SEQ ID NO: 502664 - DNA, 83 bp, Homo sapiens
ttcgcagtggtcgcttcttctccttggtgcccaaattgctgtctgctctctgtccagaagaaccaccagtccattcgtcagcc

SEQ ID NO: 502665 - DNA, 75 bp, Homo sapiens
ggcactgaggctctggaacttctgcccagctctccttgtgcaaacggttagagcaggagcttcatcatgtgaaag

SEQ ID NO: 502666 - DNA, 75 bp, Homo sapiens
cgactttctccagtgactgggaaatccaggaagacagtaggggtgctggtgacagctttgtgggagctctggcct

SEQ ID NO: 502667 - DNA, 101 bp, Homo sapiens
cagactagccactttgcattgactggaaacaatggcatttacagaaagagtcaacagcagtggcaacaggagagtaatggcacctatctttccttttacaa

SEQ ID NO: 502668 - DNA, 100 bp, Homo sapiens
attcttttcatcattcggaagcaacagcggcagtcccctgcccaaggaaaatatatgcagatgatgaacattcttaagccaattgcctttgatgttattc

SEQ ID NO: 502669 - DNA, 97 bp, Homo sapiens
ccctcagtcctgctctgaagatcctgccctgccctgggaaatcacattctgcctgatgaagatctggcttcctttcactggagtttacttggtccag

SEQ ID NO: 502670 - DNA, 100 bp, Homo sapiens
aaacaggcggaggagcccagagtatgacaatctcctgagccagtttggctgcatgcaggtgtcttcgtcctcctcctcacactccctgtcagcctccgac

SEQ ID NO: 502671 - DNA, 100 bp, Homo sapiens
tttggactctaatttcacggacactgaaagcagagaccatggagcttcttggaatgatgagaagacagcagctgattacaagattttaggtggttcagtc

SEQ ID NO: 502672 - DNA, 100 bp, Homo sapiens
cacccaattactgttatcgttgtgggaaccaggctgctatcatggaattagatgacactttaaaatattccttatgccatggctagtccagggaaagata

SEQ ID NO: 502673 - DNA, 82 bp, Homo sapiens
ggcggctgaggaaagcaggaggaggtggcggcggcgggaagataaaggacctaagtgtgaaataccccgaagacgtccccat

SEQ ID NO: 502674 - DNA, 74 bp, Homo sapiens
aggatggagtggctgcaaacaaaaagtacaaggtgaatatcttaaccagacttgccgcagaattgaacaaattt

SEQ ID NO: 502675 - DNA, 140 bp, Homo sapiens
cccccttctccaagttttgacagtttcaactgaaaaaatgcagcgcctctctcgatttttagattggcggcagtaagcacacaatgaatgatcacctgcatgtcggcagccacgctcacggacagatccaggttcaacag

SEQ ID NO: 502676 - DNA, 100 bp, Homo sapiens
cacaagatcaacactgagagttctctctggagtctcgagcccgggaagtgcgttttggtgaccccagggtttgaagaaaaggagggggagctgctggtga

SEQ ID NO: 502677 - DNA, 83 bp, Homo sapiens
cagagcgccgcgcacttcgtcatgttcttcgcgccctggactggagactgatgcatgagggggctacggaggcgcaggagcgg

SEQ ID NO: 502678 - DNA, 101 bp, Homo sapiens
tacccagaacaacatctttaagccttcatctcctcgtcctccaggcagcacaagccattgtggaatctccaccaggtgtacagaacggtgcctctgcgtcc

SEQ ID NO: 502679 - DNA, 102 bp, Homo sapiens
caatgtcctaatgtgggaacttgaaaagaagtcagctgttgcagataaacatgaattgctcagccttgccagcagacctgaagattatcggctataagagaa

SEQ ID NO: 502680 - DNA, 100 bp, Homo sapiens
ggcctggaccttgcagccgcaatgtacctgccatcctggctggacttgaccccagggacattgtggctgtgctgaatgaagagggaggctaccatcagat

SEQ ID NO: 502681 - DNA, 100 bp, Homo sapiens
cgcgccgaccgcgttcctatggacagacgcacagacacctgcaggctctgaaccaagttgtcctatgggacaagattgttttgagaggtgataatccgaa

SEQ ID NO: 502682 - DNA, 100 bp, Homo sapiens
aagggtcctgagctgctcaccatgtggtttggggagtctgaggccaatgtcagagaaatctttgacaaggtctctccccctgtacctagaaagctatttg

SEQ ID NO: 502683 - DNA, 96 bp, Homo sapiens
gaaggatattcgcgattacaatgatgcagacatggcgcgtcttctggagcaatgggagtaagactttgaccccgacgcaggcttcagtgattgccg

SEQ ID NO: 502684 - DNA, 95 bp, Homo sapiens
tgtgatgtgagggatcctgatatggttcaaaacactgtgtcagaactgatcaaagttgcaggacatcctaatgttgctccttgagggcaggacag

SEQ ID NO: 502685 - DNA, 98 bp, Homo sapiens
ataagaagctaaccaaagcccatgtgttcgagtgtaatttagagagcagcgtggagagtatcatctcaccaaaggtcgttttctgatgtgacggctga

SEQ ID NO: 502686 - DNA, 83 bp, Homo sapiens
tctgcctcgtgccgctgagcctggcgcagatcgatgcttgtttgctactgatgggtgtgagcaagttagatattctataccgg

SEQ ID NO: 502687 - DNA, 101 bp, Homo sapiens
cgggtggccccgcgctgcgcccgccctcgcctcacctggcgcaggccctggagagtgaatttgtttcctgccagcttcaccaatggattgatctcattttt

SEQ ID NO: 502688 - DNA, 100 bp, Homo sapiens
cttgtgacacggacggcgcgtcctgctgaccccagccggcgccgagggcttggaatctcgagcgggaaaaggtctcctaaaaacccagaacagaagatca

SEQ ID NO: 502689 - DNA, 50 bp, Homo sapiens
gcctgctcaaggagcagatcagcaatggagaggagcggaagaccttctgg

SEQ ID NO: 502690 - DNA, 75 bp, Homo sapiens
aaaaccttgcaacctacatgaatagcatcagattgtatgctggagtatttgtgtggaagtaatcgaaaagacaac

SEQ ID NO: 502691 - DNA, 75 bp, Homo sapiens
agaagaggaggatgcggctcgtggtggatggcatggggcgctttggcagaattcaattcgtcataatctgtccct

SEQ ID NO: 502692 - DNA, 82 bp, Homo sapiens
gcgcgcgtgcgcggacatggcctcaaacgaacatccagtcatggataaaaatgagctggttcagaaggccaaactggccgag

SEQ ID NO: 502693 - DNA, 90 bp, Homo sapiens
cggtccagtctcaggaggacaatctgcgcagcctgcagacgccgcctgccctgcagccatgaggcccccgcagtgtctgctgcacacgcc

SEQ ID NO: 502694 - DNA, 100 bp, Homo sapiens
cgaaggatccccaacggggaggccaacgtgaagaagtcaaaatgcagatcttcgtgaaaacccttaccggcaagaccatcacccttgaggtggagcccag

SEQ ID NO: 502695 - DNA, 75 bp, Homo sapiens
ctgcgtgtacacgagggatgaggctcttgtcaggatggtgaagctgttcatcggaaacctgccccgggaggctac

SEQ ID NO: 502696 - DNA, 100 bp, Homo sapiens
tctacaatgaatccttcagcttcaaagttccccaagaagaactggaaaatgccagcctagtgtttacagctgctgtgacttactcgaagcctcgattggc

SEQ ID NO: 502697 - DNA, 75 bp, Homo sapiens
ctctgcgcggctttttgagcggtcccgcatcaaggctctggcagcttcaacattgctttatggcatgtgtggtcg

SEQ ID NO: 502698 - DNA, 100 bp, Homo sapiens
gaacctttgacttggtgttgaaagtgaaatgtcatgcctctgaaaatgaaggcaatggacctcatcatgaccgttgctgtacttacaatgaaaacaactt

SEQ ID NO: 502699 - DNA, 80 bp, Homo sapiens
gagagggaagtcgcctctgtgctcgtatgagcacattcttttagaacctgacccagtaccagcatatgctctgaaactgc

SEQ ID NO: 502700 - DNA, 96 bp, Homo sapiens
cttacacttatggaatttacgtcagaagaggcctgccatactacattcgcttaaattttgcagagaaaggtttggtgcacctcgatttggaggaag

SEQ ID NO: 502701 - DNA, 101 bp, Homo sapiens
gacagtcgcgaggttcgagtgttgcagagcctgcggggcaagatctaggagtatggaatgtcccatatatggctaatgtgtacttaattaaaggaaagaca

SEQ ID NO: 502702 - DNA, 100 bp, Homo sapiens
ggaatgccgaagcgtgggaaaaagggagcggtggcggaagacggggatgagctcaggacaggaacaagagttgaatgctcgagcccgggccctccaagct

SEQ ID NO: 502703 - DNA, 83 bp, Homo sapiens
ctccagtgtcccttcttccacatgaaaaggataaggagaaaagccttacagatgctcatgggaagggtgtgagtggcgttttg

SEQ ID NO: 502704 - DNA, 90 bp, Homo sapiens
cacgtgggcaggagtctctcctctgatccaggagcattggcaggcatgtcagagcgggagcgacaggtgatgaagaagctgaaggaggtg

SEQ ID NO: 502705 - DNA, 75 bp, Homo sapiens
cggaggctgcggcggggcggacggtcgcgcggcggcaggcacagtgttctaagaacggaagcatctgggctggat

SEQ ID NO: 502706 - DNA, 100 bp, Homo sapiens
ttagaaagatctatagcactctggctggcaccaggaaagatgttgaagtgactaagggatttaaatgtggatgaatttgaggaaatattcaagacaaaag

SEQ ID NO: 502707 - DNA, 75 bp, Homo sapiens
ggaatatatcctgactgattctgcggttggatttctcacgatgtccagtgttatctccatgtctgcccctttctt

SEQ ID NO: 502708 - DNA, 89 bp, Homo sapiens
cgcaggtgctggggaagacaagccggcggaaagaccacagcaagattctttcattcgtctcctcctagcctgggggaccaggctcgaac

SEQ ID NO: 502709 - DNA, 82 bp, Homo sapiens
cgaaccgcagtatcatgctggccaagaagatcatcattaaggacggaggcacgttcacatgagagatcctaataatcaactt

SEQ ID NO: 502710 - DNA, 98 bp, Homo sapiens
cagcctctgcttctcttttcccgttgaaggtgctaccgctgacgacacccctggtggatggcgaggatgagagacttgccttcaaggtgtgcaagtaa

SEQ ID NO: 502711 - DNA, 75 bp, Homo sapiens
aagtggaaccggatatttaagtacaatggtgggcttaattttagtgttgaatatgaaacattcgatatattggag

SEQ ID NO: 502712 - DNA, 83 bp, Homo sapiens
atttgtttctgctgaccgcgggccctgccctgggctggaacgaccctgactgtgccctgtccacggtgcctcctgcatgtcct

SEQ ID NO: 502713 - DNA, 100 bp, Homo sapiens
aggcgaggctagggaggacctcacttccccggggtgtaataatgttaactgagaggcctgagggagctcaatcctggtagcaacacccctgaattcctgg

SEQ ID NO: 502714 - DNA, 100 bp, Homo sapiens
cggcagctcttcccagtaacagctttacttctggaacttggatttttccaaaggtcaccagggtattacaggggacaaagaaggccagcaacgacgaata

SEQ ID NO: 502715 - DNA, 100 bp, Homo sapiens
ggcggcagcctgggacgcgcttatcgtgcggccagtccggcgctggcgccgcgtggcagtgggtacctgtttgaaaatggtagaatagataacattttta

SEQ ID NO: 502716 - DNA, 75 bp, Homo sapiens
acttgggagaaagtttcatctgtggatggagtattggaagagagagaaaatccttcaaaacggagtagaattgaa

SEQ ID NO: 502717 - DNA, 82 bp, Homo sapiens
catggcatttcagtcactggtttgcagagtccagctattgaaaccaatttcagggaaattgagggcccagtgggaaatgggc

SEQ ID NO: 502718 - DNA, 98 bp, Homo sapiens
ggggatttctcctcctaatctgggcctcttgtcatggtgctggagaatctggtaaaagcaccattgtgaagcagatgaggatcctgcatgttaatggg

SEQ ID NO: 502719 - DNA, 90 bp, Homo sapiens
ttttgccagcgataatacgcctcagcccgtggtctggacattccttcaattaagactgtcattaactatgatgtggcacgagacattgat

SEQ ID NO: 502720 - DNA, 74 bp, Homo sapiens
gccgtggaggcagaggtggcatggggtgtccctggccagtgtccttccacctgtccacaagcatggggaacatc

SEQ ID NO: 502721 - DNA, 82 bp, Homo sapiens
ctgagggagaagcacaagatcatgcacagaggctggattctagtgacatttataacgaattgaaagaaacatatcctaatta

SEQ ID NO: 502722 - DNA, 88 bp, Homo sapiens
gtgtattgtcccttaatttcaggactcagaattcatgattgaagaaatgcagctcagtaaacgctctgccactgacctgtgtggcagg

SEQ ID NO: 502723 - DNA, 100 bp, Homo sapiens
gtggcaagtcccccagtgactgctgccacaaccagtgtgctgcaggctgcacaggcccccgggagagcgactgcctgaacaacatagacgtttgtcctga

SEQ ID NO: 502724 - DNA, 100 bp, Homo sapiens
cgggagccacgttcacagatgctgagagtgaaggggggagagctcaaaggatggctactgacatgcagaggaagagaagcagcgaatgccttgatggcac

SEQ ID NO: 502725 - DNA, 100 bp, Homo sapiens
cttttgaatgtcgagctcgagttgaaagctgagaaagacaatgctgagataagagtccacacagttgaggattctgtaaagcctggtgcccatctaacag

SEQ ID NO: 502726 - DNA, 76 bp, Homo sapiens
gctctgtccgctgcccacagcctagcagtcgggaccgtactgagacccaatgtctgtggatcacgttataatgctt

SEQ ID NO: 502727 - DNA, 100 bp, Homo sapiens
aaaagaccactggatcccaagagtgaagctcagcttcaggatctcaccatcccggagtctagtaccgtgaaggggatgatggccggaccgatggccgcgt

SEQ ID NO: 502728 - DNA, 101 bp, Homo sapiens
tgcgccgcggctacgtgcgcgtccagtggtacccggagggcgtcaagcagcatgtgaaggagaccaaggtttttcgttggaatatacgttgcacatttatg

SEQ ID NO: 502729 - DNA, 74 bp, Homo sapiens
tgacagcgcgcacttcacccgcagttgggacccagacatggagctgcgggaagaagcctggtctccggggccgc

SEQ ID NO: 502730 - DNA, 100 bp, Homo sapiens
gcctcggccaggaggaagccgcgggcggaggatcagacggaaagcaggtacgaccccgaccacgtgtgcaatgcctccgacaacaccggccgctacgcgt

SEQ ID NO: 502731 - DNA, 50 bp, Homo sapiens
gggttcccagaagtcagaatccaagatggaattcctcctgatcagcagag

SEQ ID NO: 502732 - DNA, 100 bp, Homo sapiens
agagaaacctgggtgaactttcacggacaacctcagaggacaacgaagtgttcgttggctggggaacagaccagggaattggtggatttggagaagagcc

SEQ ID NO: 502733 - DNA, 97 bp, Homo sapiens
tttggacggcaaggtttaaaccttgcagctactgctgctgttactgcagcagtaaagtgacttctgacagctctctccatggaaggaggcggcggcc

SEQ ID NO: 502734 - DNA, 97 bp, Homo sapiens
gccgatgtgtgagaagaccaccatcaacaatgagtacaactaccgctgctggaccacaaaccgctgccagaaaagatatccattaccaaaacttgac

SEQ ID NO: 502735 - DNA, 100 bp, Homo sapiens
gtgggcgagaacgtccactgcgggccggcgaaagctggttatgcaatggtctctgcaagatggtttattcttgaattggacctttttaagactgacaaat

SEQ ID NO: 502736 - DNA, 101 bp, Homo sapiens
cagattcttgcagcccttcaagaaagacttgatggtctggtagaaacaccaacaggatacattgaaagcttagaccatgctcagcctccaagcagccttgt

SEQ ID NO: 502737 - DNA, 75 bp, Homo sapiens
gaatcgtatcgtatgtccgctatccagaacctccactctttcgatcccagttggctatcatcccccaggagccct

SEQ ID NO: 502738 - DNA, 98 bp, Homo sapiens
tggaaagaagatgctaattaaagtgaagatatgggagaagggactactataaatgcaagtgcagatggcaacattggaactatagaggatggtagtga

SEQ ID NO: 502739 - DNA, 83 bp, Homo sapiens
cacacgcataatggatgaaaggaaccgacagagagatggaaccatgtaaccaccacgaccaagaggccagtaaccaccagagc

SEQ ID NO: 502740 - DNA, 100 bp, Homo sapiens
acatggctcccagggcttggcaacccccaggatgtgacctattttgtggcctatcagagggtcttaccaggatgtgcttccagccctatacatatagcca

SEQ ID NO: 502741 - DNA, 50 bp, Homo sapiens
gtcctcttgtcctcctcagcctcggtacggttcctggagcagcagaacaa

SEQ ID NO: 502742 - DNA, 100 bp, Homo sapiens
gacggaagaaaaggtctggccgaagtacccttagaaagaggccctcagaagagtcttctcttaagaagataaagaaggtagtggaaacgaacttcctgag

SEQ ID NO: 502743 - DNA, 100 bp, Homo sapiens
aagtttcggagcatcggttaacagcctatgggtgaaatttggctttcattcatgaatgagtttcatcgcaaaccagaaaaggttagaaatcatcaacgaa

SEQ ID NO: 502744 - DNA, 83 bp, Homo sapiens
caggcaatttccctgagaaccgtttacttccagaagattggtggagcttgatctgaaggaggatcagctgatttattcggagg

SEQ ID NO: 502745 - DNA, 99 bp, Homo sapiens
agatgattcaagtcgtggatgaaatagatgccagaagtgggtggagaactgtaggagagcagacttagaagataaaacacctgatcagctaaataaaca

SEQ ID NO: 502746 - DNA, 131 bp, Homo sapiens
ttgagggaatctgcttacaggtcattggtactgttttacaacagcatgtcttaggctccttcctcagagaagcttcctgttatgtaccttatggattctattgtgaaaaacgttggaagagagtatctcac

SEQ ID NO: 502747 - DNA, 100 bp, Homo sapiens
cccatctgagtatcccatctatgaggagaccaaaataaaactaacagtctatgatgtcaaggataagtctcatgacaccagcagctgcaggagccccaag

SEQ ID NO: 502748 - DNA, 76 bp, Homo sapiens
ttctccctgcagcagtcagcccaaaggaaggtcatcgtattgaggaagttcctgaacttcctttggtagttgaaga

SEQ ID NO: 502749 - DNA, 98 bp, Homo sapiens
cgccagacttacctgtcctactcaccgatttgaagattcaatatactaaggtgagtcctgcaaatgttaagtgatttgctcaaggtgcccatttcgca

SEQ ID NO: 502750 - DNA, 75 bp, Homo sapiens
cgacgaaccttggagagaggagaacgaacatcttctggacctttgtccagattctggatgaaattgaagaacata

SEQ ID NO: 502751 - DNA, 82 bp, Homo sapiens
tgcaggtgttcaagtgcagggagttcccgttacaatcactagtgttgcagcatatagcactttctacattgtgggtttaata

SEQ ID NO: 502752 - DNA, 118 bp, Homo sapiens
actagcagatgtggttggaatccttgctgtgctgaatcctggctgtgtgaccccaaggtgtccgcaatgttgccagtgtctgtctgcagattggctacccaactgttgcatcagtacc

SEQ ID NO: 502753 - DNA, 100 bp, Homo sapiens
gtacctgaagtgtagcgaaaatgctactatgactcttcctggaatacacccacctaccttgaaccaggtattcgtggacaccgtagggatgccagagaca

SEQ ID NO: 502754 - DNA, 100 bp, Homo sapiens
attcgatctgctaagtttgttggaaaagatctggcagagttttacatctccatggtgcaatgtatggaagtggaatctatcttagtccaatgtcaagcat

SEQ ID NO: 502755 - DNA, 75 bp, Homo sapiens
tgctcagggctgcggccgcccgaagaggagagagcgcgggcctctaggaaggtctgccatcatggatgttctcgc

SEQ ID NO: 502756 - DNA, 101 bp, Homo sapiens
aggggcagggacggcggcggcgcagctcggaacccgccagggtccagggtccaggttccagcgcccggcggcccagagacggggtttcgccatgttggcca

SEQ ID NO: 502757 - DNA, 75 bp, Homo sapiens
ttaaacttaggtatttaagtactgaaaggtgacatgtctgagagtaaagccaaaaagatagaaatcaaggacgtg

SEQ ID NO: 502758 - DNA, 83 bp, Homo sapiens
cattgatctcttggagcagctggggatcatgaatccacattcatctcaatggaaggatcctgccttaagtcaacttatttgtt

SEQ ID NO: 502759 - DNA, 95 bp, Homo sapiens
catcagttctacgagaccctccctgctgagatgcgcaaattcactccccagtacaaagacggtctggaaaatcccgaagcagaagcccgtattca

SEQ ID NO: 502760 - DNA, 107 bp, Homo sapiens
gctggcagacttttccactaccggatcacagtctccccgcctacgaactttttagtgctaaaatgatgtattttctggacaagtcaaggcaggagaaagcaattgct

SEQ ID NO: 502761 - DNA, 75 bp, Homo sapiens
ggcatggccccgcaggtcttcacccaggccctggagtgcatgcgcaggttaaacccatccagagtaatggctgcg

SEQ ID NO: 502762 - DNA, 80 bp, Homo sapiens
cctgatgggtcgaggcggacgcgcggctgcgtcagcaggttcaggagaagtggcacctggtggaggacctgtcgcgactg

SEQ ID NO: 502763 - DNA, 135 bp, Homo sapiens
ctctatcatgtttctagtagcgcttagtgaatatgatcaagttctcgtggagtcagacaatgagagctcttcagtatccccatcagccagtttccgaggtgctgagaagcacagaaactccgcagactactcctc

SEQ ID NO: 502764 - DNA, 75 bp, Homo sapiens
cgagatttgctgctaggggaccaaggatggcaaaacgacgacaggtagcagaaggtcaagaaatttgtgtgattg

SEQ ID NO: 502765 - DNA, 100 bp, Homo sapiens
ccgccagtacctgcgtatccgcactgtccagcccaagcctgactatgctccctacaccatcatcaccttccccttcctgtttgctgtgatgttcggggat

SEQ ID NO: 502766 - DNA, 128 bp, Homo sapiens
aagactctgaggctgatatgcaatgtcacttacaacattaatcagatactgcatttaaggacactgatgacattgaaagtcctaaacgcagtatccgagacagtggctacatcgactgctgggattcc

SEQ ID NO: 502767 - DNA, 75 bp, Homo sapiens
gagtacgagtctgaggcggagggagtaatgattatttactggcaagatgagcaggattaccatgaaagaaaagtc

SEQ ID NO: 502768 - DNA, 82 bp, Homo sapiens
agataaaccaaaggaattttgaagtcaccactgaggaggaattcaccctgttcgtctatgggtaatactgaacaacctgtcc

SEQ ID NO: 502769 - DNA, 50 bp, Homo sapiens
gagcagtgcgtcagagtttcaggttcatgggacggctccagacattgcag

SEQ ID NO: 502770 - DNA, 83 bp, Homo sapiens
caggaggaagcaggagcagcccaagcgccttccctcacgtttcaggcacagaactgtatatccaataatagtgaaatggatcc

SEQ ID NO: 502771 - DNA, 75 bp, Homo sapiens
ggagttccaccaggccgggaagcccatcgggcttgggcactgtttaaaggaaagttccgagaaggcatcgacaag

SEQ ID NO: 502772 - DNA, 82 bp, Homo sapiens
tgttctgccctgctctgctctaacaacatttttgtaaccctcctgcagttccttatcttgggatgtacttgacagacctggc

SEQ ID NO: 502773 - DNA, 82 bp, Homo sapiens
gaaactatcacagtggaaatgatgtagaggcttatgagtatcttaacaagatagcagactccttgaaagcagggtccttgtt

SEQ ID NO: 502774 - DNA, 100 bp, Homo sapiens
cggaaattcaggaaaccatcacagcactcagagagcaggtggggagcattaagcgggaaatgaccttcacatttcagtcagaggacttaaaacgtgactg

SEQ ID NO: 502775 - DNA, 75 bp, Homo sapiens
ggattgcctccagacattgatgaagatgagaaagggcaacaccatgcagcagttcctgcagaaggcgctcgagat

SEQ ID NO: 502776 - DNA, 83 bp, Homo sapiens
agaagaattcatgctcatccgggcggccatcgtgagaatcatgaagatgaggaaggttctgaaacaccagcagttacttggcg

SEQ ID NO: 502777 - DNA, 96 bp, Homo sapiens
tggattttaaccgaggcacggacaacatcaccgtgaggcagggggacacagccatcctcagaacccttaggagaaatcttgagagtggacagcaat

SEQ ID NO: 502778 - DNA, 125 bp, Homo sapiens
acatttcccccagtacattcagaaaacatggtttggctcatgatgaaatgaaaagtccccgggaacctggctacaagactacagtggtagtggaggccgaagcggcgggaacagctacggctcag

SEQ ID NO: 502779 - DNA, 75 bp, Homo sapiens
agcaaaactttgggcttgcaacttttgttaccaaaggaatcaggtacatcaggaacgtctctatcaagaatacaa

SEQ ID NO: 502780 - DNA, 75 bp, Homo sapiens
ttctgaaaacaaacatgttgttgcagcttgatggaagctattccggaggcccacaccagcctccatgctggctcg

SEQ ID NO: 502781 - DNA, 100 bp, Homo sapiens
tggggatcatatactgtttttgctttagcaactctgttttccggactgttattaggactcgaacttggatacgattggtgttgctgttgatttgattctt

SEQ ID NO: 502782 - DNA, 80 bp, Homo sapiens
ctctggtgtccggggtgctttcggagcccgaagttttgctcccggtgagaagccctaccactgcaactgggacggctgcg

SEQ ID NO: 502783 - DNA, 72 bp, Homo sapiens
tgctcagtaaggactcggcggacatcgaggatgaagtggcacacactctaactgaaagcagagtattaaaga

SEQ ID NO: 502784 - DNA, 100 bp, Homo sapiens
cgggcgggtcccggggtgcgagcagcgcacttccggaacttgctactaccagcaccatgccctaccaatatccagcactgaccccggagcagaagaagga

SEQ ID NO: 502785 - DNA, 50 bp, Homo sapiens
agacacataccaaattggatctatccagataactgttcccaggaaaaaaa

SEQ ID NO: 502786 - DNA, 82 bp, Homo sapiens
cggcggcggcggcagcgacagcagcagcagcagccagtattcgggaaaggcagacagagtaatcaagtcagaggattatatg

SEQ ID NO: 502787 - DNA, 83 bp, Homo sapiens
gaaagtcctctcgggagaagcagcgcctgttcccggggcagatccaggttcaggtgacagagttagtccttgataattgcctg

SEQ ID NO: 502788 - DNA, 98 bp, Homo sapiens
tgcgagtctgggctctgcctcaccacttgtctcagagggacagagcagaatgggctgatatagatccggtgccgcagaatgatggccccaatcccgtg

SEQ ID NO: 502789 - DNA, 75 bp, Homo sapiens
ggacaagcttaataaaataaccgtccccgccagtcagaagttgaggatgaagttcctgatggaattaaatctgcg

SEQ ID NO: 502790 - DNA, 96 bp, Homo sapiens
ggcctacctcgtcaatacctatgcactggacagtgggtggccagaacgtatttatcagagtccatatggagttactgctgtggatttttcaattgg

SEQ ID NO: 502791 - DNA, 100 bp, Homo sapiens
tcctaagcctgtaccacctccttccaaggttattgttcagttccagccctcctcagtgccagatgaatggggcaccacgcaagatggacagacaaggccc

SEQ ID NO: 502792 - DNA, 86 bp, Homo sapiens
ggccgcgaacacctcactattgatggtgtagcgctttaggggaagtactatactggcaattgctggagaagattttgcaattgttg

SEQ ID NO: 502793 - DNA, 82 bp, Homo sapiens
aggagctagtgtccgggatctacctggtctgaagaactgtggctgcaccatctgtcttcatcttcccgccatctgatgagca

SEQ ID NO: 502794 - DNA, 100 bp, Homo sapiens
ccgacatgactcaggatatgaagttcatcatcaaaaattgatgattgccttgctcagtgtggcaaagattgcaaatcttactgctgtgatggaaccacgc

SEQ ID NO: 502795 - DNA, 87 bp, Homo sapiens
gcatgaatggagcaaaatggcggatcatgtgcaggatggacactccacagctgaccttgactgaactccgggtccttcttgagcaga

SEQ ID NO: 502796 - DNA, 82 bp, Homo sapiens
ataatgctggcaaagtggaaaaatgtgcggaaccagcacctatgacagaagatctgctagaagagcagtctgaagttttagc

SEQ ID NO: 502797 - DNA, 100 bp, Homo sapiens
gaggtctgagcgaccatggaccggccggggttcgtggcagcgctggtgggtcgtcatgtcaaaacgggccagcttgcagccatcaaggttatggatgtca

SEQ ID NO: 502798 - DNA, 100 bp, Homo sapiens
caaggatggcaagtttcagatgctggtgtgcttgggagccaggtagagttggctttgtgggacacagctgggcaggaagattatgatcgcctgaggcccc

SEQ ID NO: 502799 - DNA, 99 bp, Homo sapiens
aaaatccgttactgcatcaccaaacttgacagggagcttcgaggactggatgacatcaaggacttgaaggccccccagggcccgtcagtggcctgagga

SEQ ID NO: 502800 - DNA, 49 bp, Homo sapiens
cgtcctgaccagactcaagtcagaaggtctgaaggggcgtctcgattac

SEQ ID NO: 502801 - DNA, 88 bp, Homo sapiens
gttctctctcgaccccttctgcccggcgcttcggcccgggccgctcaggtgcaggatgacgcggcatggcaagaactgcaccgcaggg

SEQ ID NO: 502802 - DNA, 90 bp, Homo sapiens
ccaggaggcggaggcggagtggagttaggttggtcaaagaaaaagtgatgtatgaaaaagaggcaaaacaacaagaagaaaagattgaaa

SEQ ID NO: 502803 - DNA, 100 bp, Homo sapiens
ggaagatggggaagtttacacatgtggtttgaacaccaaggggcaactgggccatgagagggaaggaaacaagccagcaactttcatcctttgaaacgtg

SEQ ID NO: 502804 - DNA, 100 bp, Homo sapiens
tacctcttgagtgagagtgaagatgagaggagttgaagccaaacagccaaattctgccattaggaagtgtgtaagggtccagctgatcaagaatggcaag

SEQ ID NO: 502805 - DNA, 90 bp, Homo sapiens
ccgaggcgcaggtggcgctggggcatgacgtccttgatgaaggccgcgctggacctcacctaccccatcacgtccatgttctccggagcc

SEQ ID NO: 502806 - DNA, 74 bp, Homo sapiens
gaaggaggttcaggctacggtgagccgaaggctttggaactgcgacataactagcgatggctgctgcgatctca

SEQ ID NO: 502807 - DNA, 75 bp, Homo sapiens
aagatggctttaaagaatacacttcaaggaaacactactatgaagtatcctgtcatgaccaagggttatgcaggg

SEQ ID NO: 502808 - DNA, 95 bp, Homo sapiens
ccgctgccgctgccgctgccggctccagggagccccgtgtcaagcaagctttatcttcaagccaggatgaagggagactgggcaagactcttacg

SEQ ID NO: 502809 - DNA, 90 bp, Homo sapiens
ctggtgtaccaggcgaagctggccgagcaggctgagcgatacgacgattgagaggatccagaatccagatctctggaatagctaccaggc

SEQ ID NO: 502810 - DNA, 101 bp, Homo sapiens
gagggagagagggagagtgacagcagcgctcgtgccctctggtggtcagaagatgctgtgctgtctcgttaggatgaatggattaaaatgtacttttcctc

SEQ ID NO: 502811 - DNA, 99 bp, Homo sapiens
actgtggacgtggtattgctgaaggtgtggatgaggtcaccattgtcaacattttgaccaaccgcagcaatgcacagagacaggatattgccttcgcct

SEQ ID NO: 502812 - DNA, 83 bp, Homo sapiens
tgctgaattggatgaaagataaagcccttaaggacaagggcagcaggatgggtgtggaagcagtgatggcacttttggagggg

SEQ ID NO: 502813 - DNA, 98 bp, Homo sapiens
cggcgccggcagcggacagctcggacagcgcccagggccggagcccgagcccttggaggttatgaagacagtatggagtttccagaccatagtagaca

SEQ ID NO: 502814 - DNA, 82 bp, Homo sapiens
gcgagcgcgagcggcgcgagaaattgggccggtgcacaaacagcgtggtcaagtatgagctgatgcgcccctccaacaaggc

SEQ ID NO: 502815 - DNA, 101 bp, Homo sapiens
ccaggccctttcccgcttcccatcatcgggaacctcttccagttggaattgaagaatattcccaagtccttcacccgggctgaagtacagtggtgtgatct

SEQ ID NO: 502816 - DNA, 129 bp, Homo sapiens
gcgcagaaccgctcctacagcaagctgctgtgcggcctgctggccgagcgcctgcgcatcagcccggacaggtggcagctgccaacaagaagcattagaacaaaccatgctgggttaataaattgcctc

SEQ ID NO: 502817 - DNA, 96 bp, Homo sapiens
tccaatctgagcgtgctgcggacggcgctgcggtacatccagggggatatgagactttctactcggaatatcctgagtgttgcgtggatgtaaaac

SEQ ID NO: 502818 - DNA, 98 bp, Homo sapiens
ctggctctgaaggcgaacgcttcgctggccatttaggagctctgctcaaagccagacgggtatacctcagttaccatgtgccaaagcattatacaact

SEQ ID NO: 502819 - DNA, 83 bp, Homo sapiens
gcctctttttggcttggggagctgcagcgttcggagaatccatatgctacactgaccatgactttggcacagaccaacttctg

SEQ ID NO: 502820 - DNA, 82 bp, Homo sapiens
cgggcgagcggctgtgtggatgtcggcgaagccgcgggcgagccctgggcgctgcctatggcacagccaagagcggtaccgg

SEQ ID NO: 502821 - DNA, 100 bp, Homo sapiens
ggagaatgtaactgaaagatacatggcttgcaaaaagtaaaccacgatcgttatgctgaagtctctggacaagtgggaacgtcttacggtagctgatgca

SEQ ID NO: 502822 - DNA, 83 bp, Homo sapiens
aggagctcattaaggacggctctctgctcattggggcgttgaggacaaccatgtccaagggacctgcagttggtattgatctt

SEQ ID NO: 502823 - DNA, 100 bp, Homo sapiens
gaggacgcgggtgcggtctaggaagcccagggccccggccagtgcccagccccgctgggagacccggccagcaccacggacggcgcccaggaagcccgag

SEQ ID NO: 502824 - DNA, 90 bp, Homo sapiens
ccgccgccccgaaactttcaccgcgagcgggtattgttgcagcatctggcagtgagactgaggatgaggacagcatggacattcccttgg

SEQ ID NO: 502825 - DNA, 75 bp, Homo sapiens
gaagagggaagacacgcggaaacagtccagaatctcgcccacccgccagaagtcgtgttgacagatttccagacc

SEQ ID NO: 502826 - DNA, 74 bp, Homo sapiens
ggagttgaaggctgcagtgagccctgtttttgccaccacactccagcttgggggttccaatttcatctgctgtt

SEQ ID NO: 502827 - DNA, 100 bp, Homo sapiens
ctagaattacctggaacttcatcatcatctacttcacaggaattgccattttgactgagttttcaaagaaaacaggagactaccccagcctctctgccac

SEQ ID NO: 502828 - DNA, 98 bp, Homo sapiens
gaagactgaaagagtcgaatggtttgttggcagatggcctgatatgaaggagtcacgcctcccgcctcccggagctgcccagtggctgccttgtcctt

SEQ ID NO: 502829 - DNA, 101 bp, Homo sapiens
cattttgaaaaacagtattccaaagaactcggagatgcctggaatacagtaagaaaggtgactcttttgatggtgggacttgataatgctggtaaaaccgc

SEQ ID NO: 502830 - DNA, 100 bp, Homo sapiens
gccaagctcgtggcctgcctctgcgtgcgttatgaagacagtatggagtttccagaccatagtagacatttgctacagtgtctgagcgagcagagacacc

SEQ ID NO: 502831 - DNA, 100 bp, Homo sapiens
cgctgttgctgggctcggcgtgctgcgtgggtaattccagaattgattggccataccattgtcactgtattactgctcatgtcattgcactggttcatct

SEQ ID NO: 502832 - DNA, 75 bp, Homo sapiens
ggtaccctaaaattagggcatgattaaggtatcctacctcctggaagggggcagcatggcccatgaagacttctg

SEQ ID NO: 502833 - DNA, 74 bp, Homo sapiens
accaatcaggtcggggcactcaggtgtttgttactgctcttcacagatggaatcacaaataaacttattggctg

SEQ ID NO: 502834 - DNA, 100 bp, Homo sapiens
aaaacactttcgagtgccagaacccaaggaggtgcaaatggacagagccatactgcgttatagcggccgtgaaaactaatctggattcactccctctggt

SEQ ID NO: 502835 - DNA, 100 bp, Homo sapiens
ctgagagctatcaacaagtttgcagaaaccatgaaccagaagttcctagaacacacgaactttgagttccaggagtggagtcaacatatcaatggagcaa

SEQ ID NO: 502836 - DNA, 100 bp, Homo sapiens
gcacacattgaatgggccaaggaaaaatcgagcagaaagaatgtctttcaggctggagcattggatttgctaaaggagcttaagaatattcctatgaccc

SEQ ID NO: 502837 - DNA, 75 bp, Homo sapiens
cctcatccttccttttctcggggctcccgtggcaacaactgcgagaaggactcggtgattgtgtccatcatcaac

SEQ ID NO: 502838 - DNA, 80 bp, Homo sapiens
cgcggagggagaggctgcagagcgagggcaggaggtatggaacgccgtggactccgggcactgcctgcagacctactccc

SEQ ID NO: 502839 - DNA, 101 bp, Homo sapiens
cgaaagagaaacccggagggcgccggggagaacatttcaggataggaataggccaagtgctgagaagatgagtcttaggattgatgtggatacaaactttc

SEQ ID NO: 502840 - DNA, 75 bp, Homo sapiens
ggaaattcagttaggatggaggcgggatttcctatggcaagtggtccagaaatggcaagttccaatcctgtgtat

SEQ ID NO: 502841 - DNA, 74 bp, Homo sapiens
caaaaatcaccaactaccttttagagtgggatgaggagaatcttatttatactgctgatccagaatcctttgaa

SEQ ID NO: 502842 - DNA, 82 bp, Homo sapiens
tccagatggcagccagtcagtggtggaggatgctgaaatttctggaaaagacaatggaaatcaggggcaggaagagaacagt

SEQ ID NO: 502843 - DNA, 50 bp, Homo sapiens
ggcccagcagctgagatcacaggtcctggacccaagccagaagcctctgc

SEQ ID NO: 502844 - DNA, 75 bp, Homo sapiens
ccggctctcgggagcgcaacactgcagattctggctgtgactcagtcactgacactgagcctgaggacgagaagg

SEQ ID NO: 502845 - DNA, 97 bp, Homo sapiens
gcgacctccggcggcgggaggcccggcctgggcagttttagaaagagcgttttcgctacgtaaagcacattcgataaaggatatggaaaatactttg

SEQ ID NO: 502846 - DNA, 100 bp, Homo sapiens
atgtgatgctggagaccttgacacttatatcctccctggcatttttgaaacgttggggttgttggagtggttggattttccctggaattgagtgagaaat

SEQ ID NO: 502847 - DNA, 100 bp, Homo sapiens
caggtctcatcgggaggaaatggaggtggataattactgtaccttcctcatggaaaaagttttatttaaagtgttatttctcattgaatactatcaaaaa

SEQ ID NO: 502848 - DNA, 100 bp, Homo sapiens
ccgggagccggggccgccgccggagtcgttgtcgccggagcctggagccgtgaacccagccgcgccaggaagcaagatttccagatgtagcaaatgggtt

SEQ ID NO: 502849 - DNA, 90 bp, Homo sapiens
cactgataagattgaatgccaagcagaaaattacctaaatgcactctttcgaaagaaaggatttaagtgccctgtatgctcaaaatttgt

SEQ ID NO: 502850 - DNA, 74 bp, Homo sapiens
aactgaaggactctgaagctgagagcaaatttttcagaacataaaacaagaatatagtcgttatcagaggtgga

SEQ ID NO: 502851 - DNA, 75 bp, Homo sapiens
gataaaagtacttgggattttaaagaaaaatgattggctctaccagtgcacctggacagggaggaatcctggctc

SEQ ID NO: 502852 - DNA, 90 bp, Homo sapiens
tggggccagggaaccctggtcaccgtctcctcagcaggtgtccctggagtccaacgcgtccatgagctccaacacaccactggtgcgcat

SEQ ID NO: 502853 - DNA, 83 bp, Homo sapiens
aaaacattcaagaatgagagcgagaacacctgtcaaggctcggacatcatcatgcagctggacgacgtggttagcagtactgt

SEQ ID NO: 502854 - DNA, 86 bp, Homo sapiens
tttatagcagtccttggcattctttccattattgcacagtgtctttttccttggagccatccttgtaataacagctacttttttgt

SEQ ID NO: 502855 - DNA, 100 bp, Homo sapiens
tgaaagtgagcagtccagaaagcggcttatcgaacagagccgggagttcaagaagaacactccagagttttccaaattgagagtctcctgtggatatata

SEQ ID NO: 502856 - DNA, 97 bp, Homo sapiens
cggctgtgtcaatgccattgaattctccaacaatggaggccagtggctggtctcagaatctccaatgaaaactatgttcctcacgggctgaaggtgg

SEQ ID NO: 502857 - DNA, 90 bp, Homo sapiens
gttgcttcccagactggtggtgaatcctccatagtctgggccatgatccaaaggaaccagagcagttgagaaaactgtttattggtggtc

SEQ ID NO: 502858 - DNA, 82 bp, Homo sapiens
gccgaggtctgcagcgacttcctcaaaggctactgccccctgggtgcaaaggtgtgaacccacatccctgcccccagggcca

SEQ ID NO: 502859 - DNA, 80 bp, Homo sapiens
gtgaggcctccccagccatatggaacttaatctatgccagcaattatgacaatgttagcagaccatgcagctcgtcagct

SEQ ID NO: 502860 - DNA, 87 bp, Homo sapiens
gggatctggtggtcgtgaaactgcttcccgaggagcattggaagtcagcagataagcagagagccctagaagaaaccaaagcctaca

SEQ ID NO: 502861 - DNA, 78 bp, Homo sapiens
tacgtgtgcctggtgctgctggtggccaacattttgcggatactcttctgagcggttctggtgaggttggaaggatgc

SEQ ID NO: 502862 - DNA, 100 bp, Homo sapiens
tgagcctcccgcccaaggagaatgcgctcttcaagcggatcttggtactccaaagattcaggtttactcacgtcatccagcagagaatggaaagtcaaat

SEQ ID NO: 502863 - DNA, 75 bp, Homo sapiens
ttcgaggaggtcatgaaggacctgagcctgacgcgggccgcgcggggcaaaataacatggcagccagacgaatta

SEQ ID NO: 502864 - DNA, 100 bp, Homo sapiens
cctcaccaatgccaccatcatggtcgtcagcgtcaccgcctccaccacccagggaaactaatctggattcactccctctggttgatacccactcaaaaag

SEQ ID NO: 502865 - DNA, 100 bp, Homo sapiens
ctgggtcctgatgaaagcaaacagaaatttgtgctcaaaacccccaagttgtggacatcggatacccaaggagacgaagctgaagcaggagaaggagggg

SEQ ID NO: 502866 - DNA, 100 bp, Homo sapiens
cggacgtgtccgcgaagatggcgggccgggtatgcccaagaggacagagaacgaatgcacagaaatattgtcagccttgcacagaatctcctgaacttta

SEQ ID NO: 502867 - DNA, 75 bp, Homo sapiens
ttgggccctgcaggaaggacggacttcaggggcagtctctgctggatgaaccgaatcctaacagtccagccaata

SEQ ID NO: 502868 - DNA, 97 bp, Homo sapiens
caaaggtggatacctgaaaggtctcctaaccgctgcagagagtgctttcttccagaggagctgactaaggctttggaacagaaaccagatgatgcac

SEQ ID NO: 502869 - DNA, 51 bp, Homo sapiens
tagtcacccacctacatgttgagaaggggttccattagatggagatgatcc

SEQ ID NO: 502870 - DNA, 51 bp, Homo sapiens
gtactaccggccaactgaagtggttcagcttgttggtttagatgaggagag

SEQ ID NO: 502871 - DNA, 76 bp, Homo sapiens
agatattaaaccagacaagtgtcctaggagagtgaacaggttcttgatagtccacaatgggtgaaccacagcaagt

SEQ ID NO: 502872 - DNA, 100 bp, Homo sapiens
aggaggagtaggtgcgggtgaagatggcggcagccgaggccgcgaactgcatcatggagaccctacagcttggggcctgggctcctctgaccatcctcat

SEQ ID NO: 502873 - DNA, 90 bp, Homo sapiens
gaaaaattcaacattcctgaagattcaagctccttctcctgaaaaagccgaggaggagagtgagaggcttctgagggaactctatttgtt

SEQ ID NO: 502874 - DNA, 80 bp, Homo sapiens
cgtgagaacctgtctgcagtcatgttgtataaccccggtttgaaagctgaatggctctatagtcaaggcaaggggagagc

SEQ ID NO: 502875 - DNA, 98 bp, Homo sapiens
agccctggtgccaggtgtccatccccgtgctgagaatataacaccagcaatcctgacttgttgctagtcatatttcaagtgacaggcatcagcctcct

SEQ ID NO: 502876 - DNA, 90 bp, Homo sapiens
gctcggcaactcatagaagaaaagattggtggattgtcaatgaggcagatcagattccgatttgacgggcaaccaatcaatgaaacagac

SEQ ID NO: 502877 - DNA, 50 bp, Homo sapiens
agaaacccagcttgatatgttgtttcttaaacaattaggtctacatccta

SEQ ID NO: 502878 - DNA, 90 bp, Homo sapiens
gtcattgccattaatgtggatgatcctgatgcagccaattataatggtgactctcctattccatctgtttcttcgggatcatcttcacct

SEQ ID NO: 502879 - DNA, 100 bp, Homo sapiens
cgagtgcttccaggaggagctgaggaaagcgcaaaggaaattactgaaggtgtcccgggacaagaggctttagaaaagaactcaggaatttggaagcagg

SEQ ID NO: 502880 - DNA, 90 bp, Homo sapiens
ggctgcttcagcggcgggcgggcgccagaaaggtgtccctggccagtgtccttccacctgtccacaagcatggggaacatcttcgccaac

SEQ ID NO: 502881 - DNA, 101 bp, Homo sapiens
tgtatggccgtgggcatctcctacattagcgtctacgaccaccaaggcattatccaattggtttgctatttgatcttcttgcatcaagttcagctcttcct

SEQ ID NO: 502882 - DNA, 100 bp, Homo sapiens
ttgacagcccaatcacgatgaagaggaggcggggagaccgttcatgtgaaatggattttggacactgatattttcaatgaatggatgaatgaggaggatt

SEQ ID NO: 502883 - DNA, 98 bp, Homo sapiens
acagggttctggacatccaggaagaggagccgagcatctgggccgagaccattccgtatggagagccgggcagcacaacaagattcgcagcgtggagg

SEQ ID NO: 502884 - DNA, 90 bp, Homo sapiens
gtccccgggggcgccatggcgaccggagcgaacgccacgccgttggtgtggacgaatgtggaacctcgctctgtggctgtgttcccttgg

SEQ ID NO: 502885 - DNA, 82 bp, Homo sapiens
gtcaggagggcagcagtagaatcacttgggttcattctattcagataactttgtggtagattccagttcttgtgtgcgtgcc

SEQ ID NO: 502886 - DNA, 96 bp, Homo sapiens
gtgttttacagagcatggattggtgcgttttacagagcgctgattggtacatttcacagaactcgtgagacaggtgaaatggccaccagacccagg

SEQ ID NO: 502887 - DNA, 106 bp, Homo sapiens
gcgagctgagtggttgtgtggtcgcgtctcggaaaccggtagcgcttgcagcatgggagtgcatccgccccaacccttttccccctcgtctcctgtgagaattccc

SEQ ID NO: 502888 - DNA, 50 bp, Homo sapiens
agtgcagctgcctcagttcttagcgcagccactgaggcggctcccagctg

SEQ ID NO: 502889 - DNA, 100 bp, Homo sapiens
gaccacactcacctctctctgctcatgcaggtgaagctcgtgtgtggagtgccacggtacaatcagacgacagatggacagtgtgacaaaagtgtcagaa

SEQ ID NO: 502890 - DNA, 143 bp, Homo sapiens
cacatcctctgccgggagctgggcttcacagaggccacaggctggacccacagtgccaaatatggccctggaacaggaggagctggctctgtgtggctccaggctgctggtcttgggctccttcctgcttctcttctgtggcc

SEQ ID NO: 502891 - DNA, 96 bp, Homo sapiens
gggcaggttgtcataatccacatgctaactcgatatgctcggacacagtttgtcagcccttggaaagaggagctgcgggcgtctttggagacacag

SEQ ID NO: 502892 - DNA, 90 bp, Homo sapiens
gggagaagaaatggggcctgggggacggtaggagcctccgtgcggagaccactgttcaaggccacaggcctggagctgctgaagactgct

SEQ ID NO: 502893 - DNA, 80 bp, Homo sapiens
tcaaagatcttgtctcgctggcctgcgacccagccagccagcaacctggaccgcaagagtgagccatggagctacgtgtg

SEQ ID NO: 502894 - DNA, 88 bp, Homo sapiens
gaaatgtgagactaaatttatgccagcagcagaaggcacaatttgtgggcatgacatggattttgcaggttaattcctcacacacgtt

SEQ ID NO: 502895 - DNA, 75 bp, Homo sapiens
ccctcatcgagctcttcgtcaaggtcaaaatgcagatcttcgtgaaaacccttaccggcaagaccatcacccttg

SEQ ID NO: 502896 - DNA, 76 bp, Homo sapiens
ctactaatggacagttagtcacccacctacatgttgagtgctggacccaaaggagacaacatttatgaatggaggt

SEQ ID NO: 502897 - DNA, 98 bp, Homo sapiens
ttccaccagcaaccatgagtggttccatgatgggaagtgacatgggtcttactgaagtaacacaaagcttaaaaatggaaaatgaagagtttaagaag

SEQ ID NO: 502898 - DNA, 100 bp, Homo sapiens
gcgtgggtgagcggcgcagcggcggcagcggagagcgagagaggggagcagatgggcaaaacatgtagctgagaaaaatggctacttgggccatgtcatc

SEQ ID NO: 502899 - DNA, 82 bp, Homo sapiens
gactgctggagatggtggagtccgtcattgtcgccgtgatcctgaaggcgctgacctacgacgagaagcggggtgcctgcag

SEQ ID NO: 502900 - DNA, 97 bp, Homo sapiens
ggatctttgaattggtggaacttgttggaaatggaacatacgggcaagtttataagcaaaagctgatgaagcattgaaagccaaagaaagaaatgag

SEQ ID NO: 502901 - DNA, 88 bp, Homo sapiens
gctgccgagaagctttacctcgctgaccctatgaagtggcatgccctctcccgtgaagagcaggctaaatattatgaattagcacgga

SEQ ID NO: 502902 - DNA, 82 bp, Homo sapiens
ggagcagaaggactcggacacagatgaggacggggacttggttgccttttccagtgacgaggaattgacaatggccatgtcc

SEQ ID NO: 502903 - DNA, 94 bp, Homo sapiens
gaagccatcagctatggagataggcagatgatgattcgcctttgccagtctcatctcgtgtctgctttgttaagttccatgatccagactcagc

SEQ ID NO: 502904 - DNA, 82 bp, Homo sapiens
cgcgcgtgcgcggacatggcctcaaacgggctgtggtggaggctgtgcatcgacttgacctcatcctttgcaacaaaactgc

SEQ ID NO: 502905 - DNA, 83 bp, Homo sapiens
cttctccactttcgccagcccgtgccgcgagcgcggcctgcaggaggccactcttcacctccaccatgagcctggacatccag

SEQ ID NO: 502906 - DNA, 83 bp, Homo sapiens
cagagttacaaagacaacttgcagagatggtcttgctgcattcagggcttttttaaagtcggaattctgtgaagaaaatattg

SEQ ID NO: 502907 - DNA, 82 bp, Homo sapiens
gtccgattagccttttctctgccttgcttgcttgagcttcagcggaattcgaaatggtgtcgtgaaaactacccctaaaagc

SEQ ID NO: 502908 - DNA, 75 bp, Homo sapiens
tgaagcccactttttgtgacaactgtgctggatttgtatggtgctgggtgcagatgcagtgtggctctggatagc

SEQ ID NO: 502909 - DNA, 75 bp, Homo sapiens
gaacaacaaggtgttgatgccgccggacggttatgaagacagtatggagtttccagaccatagtagacatttgct

SEQ ID NO: 502910 - DNA, 113 bp, Homo sapiens
ggaccggcgtccccggcgcgaagaggctggactcggattcgttgcctgagaatagcctaacatggcagaccagagacagcgctcactgtctacctctggggagtcattgtacc

SEQ ID NO: 502911 - DNA, 90 bp, Homo sapiens
gattgctgcagccgcttgtcagtgtgatgaagattggcacccagacagagctgtgaaccaaccccgctcacggctaacaagcccacccac

SEQ ID NO: 502912 - DNA, 100 bp, Homo sapiens
gttggcagcaaggaggtgaccctgaacctctacgacacggccgagaattttctctacatgtgcacccatttaaaggactcggcttcaagggaagcagctt

SEQ ID NO: 502913 - DNA, 82 bp, Homo sapiens
agggccgccccgcccgcaggtgctatgctgtgggccccgctcagacaatgcagatcttcgtgaagactctgactggtaagac

SEQ ID NO: 502914 - DNA, 100 bp, Homo sapiens
tttgaatttactgtgatgggacgcttaaacaaaggagtcttttagtcctgctatacagctgcaccttgtacatcaagctccatgtaatgttcctccttac

SEQ ID NO: 502915 - DNA, 90 bp, Homo sapiens
cccaggtggtctgccatgccccagggagctcccagagctgtaggtaaaacttgcctactgatcagttacacaaccaatgcatttcctgga

SEQ ID NO: 502916 - DNA, 98 bp, Homo sapiens
ggcggagcttggcaacatgcaggggctgctggaggctcagctgcaggcccagagcctggagcatgaggaggaggtggagcatctcaaggctcagctcg

SEQ ID NO: 502917 - DNA, 100 bp, Homo sapiens
tttatggtgcagagattgtctcggctcttgagtacttgcactcgcgggacgtggtataccgcgacatcaaggacaagaagaggcaagcatctcctcatct

SEQ ID NO: 502918 - DNA, 75 bp, Homo sapiens
tctgttaaagctggtctgttctaactgagatgcctttgagtgttcaaggatgctctgtgatcagtattatttatc

SEQ ID NO: 502919 - DNA, 100 bp, Homo sapiens
gagaaggataagtcgaaggggaaggcgcctgaagaggacgaagtggtacacctgatactgttctatgagaaccggctgaaggaccatcatcttgtgatcc

SEQ ID NO: 502920 - DNA, 96 bp, Homo sapiens
ccaccatcaagttcttcaggaatggagacacggcttcccccaaggaatatacagagcaaatttttcagaacataaaacaagaatatagtcgttatc

SEQ ID NO: 502921 - DNA, 101 bp, Homo sapiens
ggaggagttcaaagatgcttcttggagggagccgataacccgcgggtggagcctacccggtgggtttggaggatttgggacaacatctacaactgcaggtt

SEQ ID NO: 502922 - DNA, 87 bp, Homo sapiens
ggcatttaaacttccctcttagaactgcttttgtggcatcccataagttttggatgtcacatgtacttcagtttgaggataaaagca

SEQ ID NO: 502923 - DNA, 82 bp, Homo sapiens
cttgcccaagatgtattgcaggggaatcttgccgtggaggtcccagcccccgctgcggttctcggaggtccggagcccctga

SEQ ID NO: 502924 - DNA, 100 bp, Homo sapiens
aattactagctgataaaaaacttgtggattcccttgatccagaaacaagggtgataaaagaaaatgtggctgaagttacccgaagttcagcttgcagtgt

SEQ ID NO: 502925 - DNA, 90 bp, Homo sapiens
ggaaaggagaggatcccggagccgaataatccagaatggctactctgatctatgttgataaggaaaatggagaaccaggcacccgtgtgg

SEQ ID NO: 502926 - DNA, 90 bp, Homo sapiens
ttacatctttgccaagaagaacgacattcccttcgagctgcgcatcgtggatctgattaaagaccattcctcaagaattttgtatccaag

SEQ ID NO: 502927 - DNA, 83 bp, Homo sapiens
ctgtcctagctctgtaactgtttacacttttagagctctttgacagtgaagatcctcgggagagagattttcttaaaaccacc

SEQ ID NO: 502928 - DNA, 95 bp, Homo sapiens
tggagctgacagcgcgcacttcacccgcagttgatcctgataacttaagtgactctctcttttccggtgatgaagaaaatgctgggactgaggaa

SEQ ID NO: 502929 - DNA, 90 bp, Homo sapiens
cagatgttgtcaaggtggcctaccaggaggccaggggtgtcgccatggcggcttacagggagaacacagttggcctccaccgtttctgcc

SEQ ID NO: 502930 - DNA, 98 bp, Homo sapiens
tacttcttcctcaacaccagcaccgcagatgttgtcaaggtggcctaccaggaggccaggggtgtcgccatggttctgctccagacgagcccttacca

SEQ ID NO: 502931 - DNA, 90 bp, Homo sapiens
gggccggggtccgcaaggccggagaaggccgccgggcccgggcatggtggtctggggcaacgcggaaggctggcgcccatgcggctctac

SEQ ID NO: 502932 - DNA, 87 bp, Homo sapiens
aggacagcgcgtgcccgcgaggagccgccgcgcgcccgcgccctccgcgcgacgccagtgtggacgaatgtggaacctcgctctgtg

SEQ ID NO: 502933 - DNA, 98 bp, Homo sapiens
gaactttaaagtccgcttctttgtgttaaccaaagccagcctggcatactttgaagatcgtcatggggtgtagcaatgatgcaaatagtcagctgccc

SEQ ID NO: 502934 - DNA, 100 bp, Homo sapiens
agggctgagcagtcaactcaaatgcaagtccaagaggaggaggaggcggaggtccaagcggaaaggcatcaagcatgatggaaccatgtgtgatacctgc

SEQ ID NO: 502935 - DNA, 100 bp, Homo sapiens
ctgcgggcggagctgctgcagaagtgccctgggctgcatcttgtacctgctgtgcttccggcagcacccttttgaggatggagcgaaacttcgaatagtc

SEQ ID NO: 502936 - DNA, 97 bp, Homo sapiens
cctcatataactgctgcagagggtaaacttcacaacatgatagttgatctggataatgtggtcaaaaagctgatgggacggttgacagtggtcaggg

SEQ ID NO: 502937 - DNA, 50 bp, Homo sapiens
caggatcatcttccggacccgcgaggttggtaacaaggaagatgctgaga

SEQ ID NO: 502938 - DNA, 100 bp, Homo sapiens
ccctgtgacctggccgatgaggaagtactgagcctgttggaggaactggcccggaaacaggaggacctgtgccacgaccgtggctatctggtgacccagg

SEQ ID NO: 502939 - DNA, 100 bp, Homo sapiens
ccgccactggtgctgagctgctaggaagcccctatcgccgagctcgttggagcttgaacccattgtcacccctccgatgctaccgtcactcacaatgtcc

SEQ ID NO: 502940 - DNA, 100 bp, Homo sapiens
ggaaatgtcctggccgcgccgcctcctgctcagatacctgttcccggccctcctgcttcacgcctgaaaactggttttttaaaatggaagccagattatg

SEQ ID NO: 502941 - DNA, 75 bp, Homo sapiens
tcacattggaacaaccttctttccagtgctaaaggatctctgatctgggaaccatggacactgaatctaaaaagg

SEQ ID NO: 502942 - DNA, 100 bp, Homo sapiens
actcgctcaaggggctctgccgcatcatgggcaacggcttcggagaagcagaatttgcccgcatcatgagcattgtggaccccaaccgcctgggggtagt

SEQ ID NO: 502943 - DNA, 80 bp, Homo sapiens
ctgctaggagccggtcagagggaactgtggctgcaccatctgtcttcatcttcccgccatctgatgagcagttgaaatct

SEQ ID NO: 502944 - DNA, 75 bp, Homo sapiens
gtttcctccatttgctaaaggaatagtgtttggctgctctttggcgtaaattgcaatcgattagggatcgtttct

SEQ ID NO: 502945 - DNA, 82 bp, Homo sapiens
ggcgaggcgctcaacggcgagccagagctggacctcaccagcaaggcctccggtgtggctgtctctgatggtgtcatcaagg

SEQ ID NO: 502946 - DNA, 98 bp, Homo sapiens
tggaggtctacgcagatgccgacgaaatcctccaggaggagatcaaggagtacaagaaactagatgatggccatttaaacaactctttgagctctcca

SEQ ID NO: 502947 - DNA, 75 bp, Homo sapiens
caaggagttcccgtgcctgggtcaggagggcctggacaagatcctagagcccgagcgggaagaagttccgcagca

SEQ ID NO: 502948 - DNA, 90 bp, Homo sapiens
acccccagcggtgcacgctgctggtcagccagttccgctcctgtcagctctgcggccgtcacgatgttctggaagtttgacttgaacacc

SEQ ID NO: 502949 - DNA, 98 bp, Homo sapiens
tcatggtgttgatctgtttaggaagtggtatcatgagagatatagcccacttagaaatcacattggcaaccagaacgccaggttccatttaatgaagt

SEQ ID NO: 502950 - DNA, 100 bp, Homo sapiens
tgaaaattggtattgttggattgccaaatgttgggcaacaagaatgggtgaatcagcaaagggaagatattgaaaggcaaaggaaacttctagccaaacg

SEQ ID NO: 502951 - DNA, 80 bp, Homo sapiens
cctggctgtcctgcgggagcctgtgcctgctgggctggcctgctgctgtgggtctgcaggctgctctctctgctgtgatt

SEQ ID NO: 502952 - DNA, 83 bp, Homo sapiens
ctgcccttcgccaaggagatcgtctctctcatcgaggcccaaaccgccaaggtgctatgggcataaacaacagaggtgccatg

SEQ ID NO: 502953 - DNA, 100 bp, Homo sapiens
ggagtgctggtccctgcgcaaggagggactccccgtgaacaacatcttccagcagatctcccccgtgggccgccatggcatcagatgaaggcaaactttt

SEQ ID NO: 502954 - DNA, 85 bp, Homo sapiens
agctcttctgcagagccgcccgctgtggccgggaccgagggtggcggcggcggaatctgaattatccagaacagaaagttgtgac

SEQ ID NO: 502955 - DNA, 100 bp, Homo sapiens
ccgagataaagccaccacgtctggagttgtgaacagatgtgtgtacagcacaaccaaggcagccgtgattggcctcacaaaatctgtggctgcagatttc

SEQ ID NO: 502956 - DNA, 100 bp, Homo sapiens
aaggctaaaagacgaaataccaccggaactggtcgaatgaggcacctaaaaattgtataccgcagattcaggcgtccctttcccttgcacctgttaacat

SEQ ID NO: 502957 - DNA, 100 bp, Homo sapiens
caacatcatgcgagcctggttgttccagcacctctcggtcatccgcaagggctggctgactatcaataatattggcatcatgaaagggggctccaaggag

SEQ ID NO: 502958 - DNA, 74 bp, Homo sapiens
gaagccccctgcaggaactctacaacccaatccagagtgattctcatcagttccgtgtaatggcagctgtcctt

SEQ ID NO: 502959 - DNA, 100 bp, Homo sapiens
tccgcgaggcttcggccaagctaaccacgctggtggatgccgacgccgaggccttcaccgcctacctgaacatacggtccctaatgagcacagagaagac

SEQ ID NO: 502960 - DNA, 97 bp, Homo sapiens
gcgtggagatatggcgcaactgcggcgcgtgtcatggagaaactccagctgggcccagagattctgcagcgggaaaatccaaggcttatttatgcca

SEQ ID NO: 502961 - DNA, 73 bp, Homo sapiens
cctgacttgtggaaccaatcctgtgcagtcattggagaaatcgatgaagaaacagattctgcgcttgatttgg

SEQ ID NO: 502962 - DNA, 90 bp, Homo sapiens
tcggaccccccaacaccctctacgaaggcggctacttcaagatagtgtgtgtaccatatcagtggcgtgtaactatgctcatcattgttc

SEQ ID NO: 502963 - DNA, 83 bp, Homo sapiens
gggacagcacctcatcccctggatgggggaccacaagatcctcatcgacagcgtgagtgcatctccatccacgttggccaggc

SEQ ID NO: 502964 - DNA, 82 bp, Homo sapiens
ggcgtttgtagaagaggagcatctgctccagatcgtcagtatttaaacagatcacatcatgcgtgagtacaagctagtggtc

SEQ ID NO: 502965 - DNA, 75 bp, Homo sapiens
attgaagtgtcaaaatccatagatggaaaagatgaatatgcttttaaggctattaaccagggtggccttacatca

SEQ ID NO: 502966 - DNA, 90 bp, Homo sapiens
cttccaatgaggctgctggccctggattatggagcggacattgtttactgtgagttctttggggtgactttcaagatggactctactcta

SEQ ID NO: 502967 - DNA, 76 bp, Homo sapiens
agattatttcaagtggaatatgccattgaggctatcaagatttgaagaacccaagtgattcagcagtgcacagccc

SEQ ID NO: 502968 - DNA, 74 bp, Homo sapiens
cggacgctcacgataaccaaggacgaccgcgaaccaaggctgaaggtgatgtggccgccctcaaccgacgcatc

SEQ ID NO: 502969 - DNA, 100 bp, Homo sapiens
tgaaccggagaccccgaaaacggaagcgcagggagaaggaagaggtgtttgaaaagcagagagagatcatcattgcctgaatttagctttgtgactgcaa

SEQ ID NO: 502970 - DNA, 75 bp, Homo sapiens
ggtgaatttccatgtcaacatagtccagcaagtgcggaggcaagacacatcaaagcagagatgggaagtgaaaga

SEQ ID NO: 502971 - DNA, 75 bp, Homo sapiens
gactttcacaataagagcagaggatggaacacttcagtgcattcaaggaatgtggttcctgttttaacgtagtac

SEQ ID NO: 502972 - DNA, 83 bp, Homo sapiens
acctacccgcagggcctggcactggccaaggagattggcccgcagcccgagtgtcgccgccatggcttcgccgcagctctgcc

SEQ ID NO: 502973 - DNA, 83 bp, Homo sapiens
ggaggcgccccgcgcagctggctggcggagcatgagcgccccagactcagcccacctgcacccaggtgaaataaacagcttta

SEQ ID NO: 502974 - DNA, 96 bp, Homo sapiens
ccgagccttcctgctcatctccaccctgaaggacaagcgcgggacccgctatgagaaccccatgcatcccagctcaaggtggtcagagctagacct

SEQ ID NO: 502975 - DNA, 100 bp, Homo sapiens
cccaggacctaccagaatctgatggcccactgcgtgaccttggttcagctgtccatttcctgtgaccatctcattgacaaggacatcggctccaagtctg

SEQ ID NO: 502976 - DNA, 50 bp, Homo sapiens
cggaaccagagaatgctgaggacttgccttcaaggtgtgcaagtaaggac

SEQ ID NO: 502977 - DNA, 98 bp, Homo sapiens
tggacccaaagaacaaataccaggaactgatcaacgacattgccaggggcttcgtgggacacatatgcaacatgcctatgatttttacaagcctgata

SEQ ID NO: 502978 - DNA, 75 bp, Homo sapiens
agaaagggaagctattgctgggattttgaggaggtctgtgtatgatgaccaaccaaatgcgcacaagaagtttat

SEQ ID NO: 502979 - DNA, 98 bp, Homo sapiens
agggcaagccccgctccggccaacaacacttgctctgaaatttggggactgagtacaccaaatacgatagatcagtgggatacaacaggcctttacag

SEQ ID NO: 502980 - DNA, 98 bp, Homo sapiens
tttgacaccttcagaatcgactcaagagttacatgcatcaggtctagatgttgatggaatatatcgagttagtggcaatctggcaacaatacagaagt

SEQ ID NO: 502981 - DNA, 100 bp, Homo sapiens
caaaccctgtgctgcccagagactctttcttccgaagaagtaccgtcagcatccagatgctttgaagtttaccagtattaaagacactccggagatggtc

SEQ ID NO: 502982 - DNA, 100 bp, Homo sapiens
ggtgaatatggccgtgatcgtgcccaaagaggagggcgtcatcagcgtctccgaggacaggtgtgaggcaggcgatgccggggttccacgccaggttcgg

SEQ ID NO: 502983 - DNA, 98 bp, Homo sapiens
ggacgggccatacccaataaccaggtgcttggcaaaatcgagcgggccattggtgtccccaggtgtcattgccaacccctttgcggcaggcatcggcc

SEQ ID NO: 502984 - DNA, 100 bp, Homo sapiens
ctggagtcaaggcttgaagatttctatgcaggaccccaaaatgcagctccttttcccagcagcagtttgcccaccaggggaatcctgcagtgtatagtat

SEQ ID NO: 502985 - DNA, 100 bp, Homo sapiens
catccctggctcaagcgccaataccagcacccccaccgtcagcagctacagccctccacaggaactgttgacattcagggatgtgaccatagaattctct

SEQ ID NO: 502986 - DNA, 100 bp, Homo sapiens
caagtacctgccagagaacgacctgaaggtgagagaactggagcagaccttgcaggcctctgaggagcagctccaacagagcaagggcattgtggctgcc

SEQ ID NO: 502987 - DNA, 83 bp, Homo sapiens
ggaaagttccagccggttcgagagctagcaaaatgatgcttcaacacccaggccaggtctctgcctcggaagtgagtgcttct

SEQ ID NO: 502988 - DNA, 75 bp, Homo sapiens
ggcacccagacaggtggcgaaggcagaggagtgctggagaatctggtaaaagcaccattgtgaagcagatgagga

SEQ ID NO: 502989 - DNA, 82 bp, Homo sapiens
catttacagagcaacttgatgaaggtacacccaatagagagatatcacacttcagtggcttattcagcattcaaaatctaga

SEQ ID NO: 502990 - DNA, 111 bp, Homo sapiens
ctgcgtcagtctttgatgaaactagaaagaccacgaacttcaaaggggaaagcaaggccaaagacagggagaagggaggtggggaagacagggctccagctaccacaggac

SEQ ID NO: 502991 - DNA, 90 bp, Homo sapiens
gctccctctcagcacctgggcggacggtgtccaacacgctctcttgggctctgtatgagctctcccggcaccccgaagtccagacagcac

SEQ ID NO: 502992 - DNA, 82 bp, Homo sapiens
tgtttgcctctggttcagctcatacaacagcttcttagcatttgacattgtgcagcaaagaaatggttatggagaagcccag

SEQ ID NO: 502993 - DNA, 82 bp, Homo sapiens
accaagggcctagatgacgacacgcctttgcacgacgctgccaacaacgggcactacaagttttgccgacggatggggcaaa

SEQ ID NO: 502994 - DNA, 76 bp, Homo sapiens
ttttcttcagctccttctcatctcgtccttgccaagagaggatcatgtgtccaaaaggggagtgtttggaactgat

SEQ ID NO: 502995 - DNA, 100 bp, Homo sapiens
tttagcaagtcagaatgaagatttgccggttgctgaaccaatccccatctgtagtttctgtcttggtacaaaagaacaaaaccgagaaaagaagccagag

SEQ ID NO: 502996 - DNA, 100 bp, Homo sapiens
cgagtccggaccggagactttggggcctaactagcggcaacctttggcactgcatccatgagcatgcccacaggattcggcactcctgctccctacagtc

SEQ ID NO: 502997 - DNA, 100 bp, Homo sapiens
tgtcatatttactgaaagacaagcggtctggaaaaactgcagcatttctgttgcccatcttgagtcagatttattcagatggtccaggcgaggctttgag

SEQ ID NO: 502998 - DNA, 100 bp, Homo sapiens
tatgcattcattggacccctggaaaccatgcatctcaatgcagaaggcatttatgtttgaatcatctttaagtctggcggtcacaaagtggggactcaag

SEQ ID NO: 502999 - DNA, 75 bp, Homo sapiens
agttagtcacccacctacatgttgagccagtttcaagcgcccggtagtgatcctgggacccgtggccgacattgc

SEQ ID NO: 503000 - DNA, 90 bp, Homo sapiens
cgacatccggagccggctgcaggccggggcagacctccatgcccccctggaccacggggccacgctgttttagagacaaggtctgactgt

SEQ ID NO: 503001 - DNA, 80 bp, Homo sapiens
ccgtcagcatcccagccgtgctcacggtggtctttgggaagaagcttcctgcctttgccaccatccccatccaccagctg

SEQ ID NO: 503002 - DNA, 102 bp, Homo sapiens
cgacaagccgctggcagccgcggatctcaccgccgctcagggctgaaggtgatgtggccgccctcaaccgacgcatccagctcgttgaggaggagttggaca

SEQ ID NO: 503003 - DNA, 97 bp, Homo sapiens
tctcagaacagaagggtgggaagccagagccgcctgccatgccccagccagtccccacagcataacaggcgcattggagtgactgtctggcatcacc

SEQ ID NO: 503004 - DNA, 99 bp, Homo sapiens
cttcggggacctgaagaagatgaacaagcgccagagtttcactctgtcacccaggctcgagtgcagtggcgtgttctcggctcactacaacctccgtcc

SEQ ID NO: 503005 - DNA, 75 bp, Homo sapiens
gtcggggagacgcttcagagggccggagagggaggtattagaaaactactcggatgctccaatgacaccaaaaca

SEQ ID NO: 503006 - DNA, 89 bp, Homo sapiens
gtggatccttgaatgttgaagatgtccttaccagctttgacaatacaggaaatgtttttggaatgccaagatgccttggaaacagcagc

SEQ ID NO: 503007 - DNA, 75 bp, Homo sapiens
aaactatggacgactccgaggaacattgagaaaccaggaatggatctggcagacacctatattatgtttgttcgg

SEQ ID NO: 503008 - DNA, 90 bp, Homo sapiens
ctctgctgctgttgcacactgggttgcagcctatggcctgttatttgtctcaacaaaagaatttttaaagagcgagaagaagatttgagg

SEQ ID NO: 503009 - DNA, 114 bp, Homo sapiens
gctagacagcagcgactagggctcgggcgccggcgagatgcctttgttcaccgccaaccccttcgagcaagacgtggaacatcatcaagaaggtgatcgggcagaagtttgtgt

SEQ ID NO: 503010 - DNA, 75 bp, Homo sapiens
gagcgcctcgtcgacatgagtgatgtggaggaaaacaacttcgagggcagagtgcaaacagctgcacagcaagtg

SEQ ID NO: 503011 - DNA, 75 bp, Homo sapiens
cttaaatgccgcaccctacggcatcgaaagatcccctgtttttggagcacagctttcaactttgaacagatccga

SEQ ID NO: 503012 - DNA, 74 bp, Homo sapiens
aacagagtgcctgacccaggtcagaaatgcactcggtgatggaaagagagccactattctgaagaacacttggc

SEQ ID NO: 503013 - DNA, 80 bp, Homo sapiens
ggaaacccggagggagagtcccgcctgaagaaacctggatctttgctagaaagagagggagaaggccagtggctttgagg

SEQ ID NO: 503014 - DNA, 137 bp, Homo sapiens
gccctggggcagctgaactgagcgtatgtgccacgccgcccaggagacccctctgctgcaccacttcatggtgtcatggagaaactccagctgggcccagagattctgcagcgggaaaatccaaggcttatttatgc

SEQ ID NO: 503015 - DNA, 100 bp, Homo sapiens
aggctggggatcctggggcaaatctctgctgtcgtcagcatctgccacagtaggcaatcctttatcacaggatattctcaacttataccaggacccagat

SEQ ID NO: 503016 - DNA, 100 bp, Homo sapiens
ttttatttcaaaattggagcatgtcgtcatggagacaggtgctctcggttgcacaataaaccgacgtttagccaggctaaactgctcttttcagatggag

SEQ ID NO: 503017 - DNA, 75 bp, Homo sapiens
gggacagccgcccctggtgcacacaccctcgtattctcctgcccttccccaggacctgaaggagaagaaggagaa

SEQ ID NO: 503018 - DNA, 100 bp, Homo sapiens
ttaggaaagctgcctgcagagaggtggagagcatgcagcagattggaataaatatgatgaccgattgatgaaagcagcagaaaggggggatgtagaaaaa

SEQ ID NO: 503019 - DNA, 73 bp, Homo sapiens
aatgaacctgcccacggtgtccgcgctcaggtactgctgcgcacggccactgccaacggcttccagatggtca

SEQ ID NO: 503020 - DNA, 96 bp, Homo sapiens
ctttgggtctgggtgagccttctcgtggcggcggggaccgtccagcccagcgattctcagtcagcactttcagaccatgctgaagtctaaattgaa

SEQ ID NO: 503021 - DNA, 74 bp, Homo sapiens
cgggcagctacacatcttgaaagagaagctcttcctgtgagcttcgtgctctgtctgatgatggagtatctgat

SEQ ID NO: 503022 - DNA, 101 bp, Homo sapiens
aagtggaaaatcaagctaagcgcctactagagcagggtttggagactcaggttggtgttagcatcaaaatgagcagtttcaacctttcacgaatagttacc

SEQ ID NO: 503023 - DNA, 100 bp, Homo sapiens
ttttccggaccctgcagtggcgcctaaagtctgagagagggaagtcgcctctgtgctcccacccctttgctgtgaagttgcttgcgctctgtaagaaaga

SEQ ID NO: 503024 - DNA, 75 bp, Homo sapiens
ctggaaattgcgctggaccgtcgccttgctcctcgccgcggcggggactgcagccgtggtccttcagcatatctc

SEQ ID NO: 503025 - DNA, 82 bp, Homo sapiens
tctacatcgccttcatcctgggcagcaaagaacagtctgaacttgatcaagatttggatgatgttgaagaagtagaagaaga

SEQ ID NO: 503026 - DNA, 97 bp, Homo sapiens
tgatccccagccacagcacacaggaccaggctgcgagaacaggtacggttcctggagcagcagaacaagatgctggagaccaagtggagcctcctgc

SEQ ID NO: 503027 - DNA, 97 bp, Homo sapiens
ctttatggaaacttctttgtgaacatcaattcactatcattgtggcagaacttcagaagggtggtgattccactgaagcaactgccaaaccaaagag

SEQ ID NO: 503028 - DNA, 90 bp, Homo sapiens
cgggaccgccaggccaccaccggccgcctcagccatggacgcgtccctggagaagggaaaacttgttattggacacaatatgctcttgga

SEQ ID NO: 503029 - DNA, 82 bp, Homo sapiens
cccaccttgtggccctgggctttaccatctttgtggctgtgcttgccaggcctggctccaggatacccacccaccatcccag

SEQ ID NO: 503030 - DNA, 91 bp, Homo sapiens
ctgtgctcgcgctactctctctttctggcctggaggctatccagcaggctgaggggatctggcggtggagcgctaggatcagacgcccccg

SEQ ID NO: 503031 - DNA, 83 bp, Homo sapiens
ccagaccaggcttcaataaggcccagttagcagaaatgatagaggtactgacaacaactgactctcagaaactgctacaccag

SEQ ID NO: 503032 - DNA, 100 bp, Homo sapiens
ctggccctgggctgtcactataggattgcccacgcagaggttcaaaccttgtactactcagctgatcacaagctgcttgatgggaacctactagatggac

SEQ ID NO: 503033 - DNA, 76 bp, Homo sapiens
actgcttgtcaggagggatttatttgcacatggggaaggcctggtaaagtgatgttcctcctgctgatcaagagaa

SEQ ID NO: 503034 - DNA, 75 bp, Homo sapiens
ttcatgacaatgactttgagccctaccttactggacagtcaaatcagattgtttgctacatgaggagaacttctc

SEQ ID NO: 503035 - DNA, 83 bp, Homo sapiens
cctcagtgacaccccagaggccctcatcaacgcgggagacttccacggcctgcaggttcaaggtgtttgcagactatgaagcc

SEQ ID NO: 503036 - DNA, 99 bp, Homo sapiens
cggggaggggggcctgggtgagcacaactattgcagccctggactttgtctcacaagatgaaatgttgacgcccctggggagattggacaagtatgctg

SEQ ID NO: 503037 - DNA, 82 bp, Homo sapiens
ggacgtgggagtcacctgaaagccaggaaatggtgagaagccctaccactgcaactgggacggctgcggctggaagtttgcg

SEQ ID NO: 503038 - DNA, 75 bp, Homo sapiens
caaagagcagatgccaaatctgaatcgagagctccagatcatgagaaagctagatcactgtaacatagtccgatt

SEQ ID NO: 503039 - DNA, 101 bp, Homo sapiens
tgcatcaatccctaccactataagagagtagaaagccctggcatggaagaggagatggttcgtgttacgcagtggccgtttaactggagatccagatgttt

SEQ ID NO: 503040 - DNA, 111 bp, Homo sapiens
agtcatgggaccagaagtttacactggaactggacagggaggaatcttcaaatttaatgcaacacatcttaggtttcttccagactttgacagatggcacatgcgaaaacg

SEQ ID NO: 503041 - DNA, 96 bp, Homo sapiens
ccagcactggactcatggaggctgagcatttattcagcagatcgacccatctgagcaaaagactctggccaatctaccgtggattgtggagccggg

SEQ ID NO: 503042 - DNA, 100 bp, Homo sapiens
gatccccttctcccggaccccaggagccggcgcccccgccctgtagattgcagagggaatggcatacatcgagcggaagaactacattcaccgggacctg

SEQ ID NO: 503043 - DNA, 100 bp, Homo sapiens
ccagcgcaaggtcatctgcctgctcaaggagcagatcagcaatgaaaatattatttcccctatggaggattctcctattcctgacatgtctgggaaagaa

SEQ ID NO: 503044 - DNA, 100 bp, Homo sapiens
gactgtggtgcctacccccatcactgcttccctcagccataacaggtgtcatctttaagaaatgaaaagcgaggctcatcatatctcatctctgccccag

SEQ ID NO: 503045 - DNA, 100 bp, Homo sapiens
cgctgtggtgtgactggggcaggaccatcagtaagactttgaccccgacgcaggcttcagtgattgccgcggatcagaagcctgagcactttggctcgag

SEQ ID NO: 503046 - DNA, 100 bp, Homo sapiens
ttgaggcggcagtatgaccgggtttctttgatgcgacctcaggaaggagatgaggctaaagaattacctccaaagccattgtcaagaccacagcagtcat

SEQ ID NO: 503047 - DNA, 96 bp, Homo sapiens
agctgaggaggccggctgcagccccaagacagagcgctactcctggcagtgcgtcaatcagagcgtcctgtgcggctggagtgcagtggtgtaatc

SEQ ID NO: 503048 - DNA, 85 bp, Homo sapiens
ggtggcgtggcaagccggactaaggaccggggacttcttgattgagattccctataaggagcccctgctggtgcaccagaactac

SEQ ID NO: 503049 - DNA, 101 bp, Homo sapiens
catttgttggggagaagaggattggaggtgtcagtgttaaaggaacctctacaacgaaggtgaagccacggaagataagcggcgcgcgagcgggccgggcg

SEQ ID NO: 503050 - DNA, 100 bp, Homo sapiens
ggcatccgcgtggcaacaggctcctacagatgtgggcgctatctccaactgtctttgcacttctgagtaagaatctgatgattgtgcacagtgacctggc

SEQ ID NO: 503051 - DNA, 82 bp, Homo sapiens
ctgaatttgaaagctagacaggatcgtcaggctgaaggaatcttggtaaatgggaactgtggctgcaccatctgtcttcatc

SEQ ID NO: 503052 - DNA, 100 bp, Homo sapiens
cgcgtacgagttcaacctcagcgctctgaagttttgcacactagggaccaagaagccctcggggacactgctgagaaaagactgccgaagggaagaccag

SEQ ID NO: 503053 - DNA, 101 bp, Homo sapiens
gaaggaggagtggattaagtgcattaaccgcggcgagtcctttgcacatgttggcaacacacgcatccgcatcggcctccctgcccacaaagcgccacaac

SEQ ID NO: 503054 - DNA, 100 bp, Homo sapiens
attaacatgatggagtacctgttgcagggggctggcaaggtttaattgcttatggatgtcattcacttgtggtagtgattgattccattactgcccaaac

SEQ ID NO: 503055 - DNA, 97 bp, Homo sapiens
tgccaaaggaattggttatccagctgactttggtgtggctgcaaaaataacagctaccattgcaaaacgaaaatctttcattggcaccccttactgg

SEQ ID NO: 503056 - DNA, 100 bp, Homo sapiens
ccctcctcatttatgccatttcagctacagtgttcacagtgatctttgcagagctgtttcaacttccagcaccccctcacattgatgtgatgtacacaac

SEQ ID NO: 503057 - DNA, 75 bp, Homo sapiens
caggttctcaaaccattggatgtgaaaaccaaattttacaatgcagaggagctgctgctcaagaggtcatcaaaa

SEQ ID NO: 503058 - DNA, 97 bp, Homo sapiens
gcagcatggagaggggccgtggcccctgcagcggaaccggacccagtccctgagccgcccctacacccacaggtgatttgatgaaggctgctgcagg

SEQ ID NO: 503059 - DNA, 100 bp, Homo sapiens
ttcaccaagggctaccaggagaccatctcagactgctgcagtaagaatgtcttttccacctcatttgaatcgccctcccatgggaatcccagcactccca

SEQ ID NO: 503060 - DNA, 74 bp, Homo sapiens
gccacttgcttgggatcctttatcctggtcatcttctatttccaaaggaaatcctcattgacgattcaatttgt

SEQ ID NO: 503061 - DNA, 76 bp, Homo sapiens
ttgttacttcaacttctgctgggttatgatcatagctactacttcattgcaacctttattactgaccacatcagac

SEQ ID NO: 503062 - DNA, 100 bp, Homo sapiens
ttacaccaagatctgtgctgaccacaggaattggatctactagtgcagatgctgagatgaatcgtcacctgtgtgtttggctttttagacatccatctct

SEQ ID NO: 503063 - DNA, 100 bp, Homo sapiens
aagatcttcaaatgggcattcacaagaatgatcaagtctcggcctctggattatacctttgttcctcgaacttggatctttcctgctgaatatactcaat

SEQ ID NO: 503064 - DNA, 108 bp, Homo sapiens
cagaccctggagcctcagttggaagcagccgatccagcctgcggagcctgtggggcagagaaccatggagtctggcagtaccgccgccagtgaggaggcacgcagcct

SEQ ID NO: 503065 - DNA, 95 bp, Homo sapiens
cggcagcggcggtggcggggacagccggcagcgccgcctcctcgcggctaaaggtgctctggggccaggtgccaccggccattgtccaggcagct

SEQ ID NO: 503066 - DNA, 51 bp, Homo sapiens
cggagatcttaataggaaccatcccagctctgagcccagaggaagccgagt

SEQ ID NO: 503067 - DNA, 87 bp, Homo sapiens
tcaaaagtggtatacagtggacctcatcctcaaagggagatgctgacagcacagaatcgggtaacacgtgccatcagtgtcgacaaa

SEQ ID NO: 503068 - DNA, 87 bp, Homo sapiens
agaagaccgaagcgttcgtatctggaaggctgccagctgttggtatatccaggagcttttaatctgaccactggaccagcccattgg

SEQ ID NO: 503069 - DNA, 87 bp, Homo sapiens
atccttctgtagtatattttcagtgctgccgtatcgcgacagtacccaagtcgggctttcatgagaaggacaagaagccatattgcc

SEQ ID NO: 503070 - DNA, 49 bp, Homo sapiens
ggaggcttgggcttgcgccgttgaagacaaatttacatgtattggagac

SEQ ID NO: 503071 - DNA, 82 bp, Homo sapiens
tctttcctaccatctaaaatacgaaggtttctggctgggtggggtggaagacaacccgtgagtattacaccttcatgtgggt

SEQ ID NO: 503072 - DNA, 98 bp, Homo sapiens
gccctggccggcatcaacatgctgctcaacaacggcttcagggagtcggaccagcttttcaaacaatacagggccagttctgtgactattgcaattct

SEQ ID NO: 503073 - DNA, 100 bp, Homo sapiens
ccgcagtggagaaggcgcctgtggaacatcgcatgctacaagtgaaaactgatgagaaactgaatgtgtctgatgagaatacagcaagttgccctttgag

SEQ ID NO: 503074 - DNA, 88 bp, Homo sapiens
gaatttctgtcctttgtacgacagcagactcctccagggctctgtccacttgcagacaagcatgagacgaagctgaagggagtcatct

SEQ ID NO: 503075 - DNA, 50 bp, Homo sapiens
ttcagcaagctctctccaacgagtacccaaaggcaagtggaacagctcta

SEQ ID NO: 503076 - DNA, 100 bp, Homo sapiens
gtcaggaggaacctcagaacatgggtccgtggtcgtttgtttctccaaggtttgaaaagcagctggcctgcaagagacggggtttcgccatgttggccag

SEQ ID NO: 503077 - DNA, 75 bp, Homo sapiens
gctttgtggaagcatttggcggcataccaccctgcactgtgagatcagtgtactgttacccggacatacctattc

SEQ ID NO: 503078 - DNA, 50 bp, Homo sapiens
gctgtaatcaattgtgctgacaacacaggagcaaagctggaggattcgga

SEQ ID NO: 503079 - DNA, 100 bp, Homo sapiens
gaaataccagtgtgtgaagctgaatgatggtcacttcatgcctgtcctgggatttggcacctatgcgcctgcagaggtatccagtcggaattctttatta

SEQ ID NO: 503080 - DNA, 75 bp, Homo sapiens
caggggcagaaaatagcacacttttactctacgcaactgttgctttttcatggtaaagattatagttcccaacag

SEQ ID NO: 503081 - DNA, 50 bp, Homo sapiens
ccggcgccggagacgatgccgttaatccaactcaagtcggaacagctctt

SEQ ID NO: 503082 - DNA, 100 bp, Homo sapiens
gaacagggcaatagtatgatggttaacttccacctcaaaagaagcatccctcaagtaagccctgtgaggagagctcccagcagaaggcacggagtcagag

SEQ ID NO: 503083 - DNA, 50 bp, Homo sapiens
ataaacatgcaatgaacccaaaagggggatgtggagacgctggtagcggg

SEQ ID NO: 503084 - DNA, 75 bp, Homo sapiens
ttggccttatccagtctatgaagcatgttatttgaaagcaattgagacgcaaccgaactttgcagtagcttggag

SEQ ID NO: 503085 - DNA, 51 bp, Homo sapiens
gaattgccaaagttttggaaaagataagtgggcggaaaaaccagcctttgg

SEQ ID NO: 503086 - DNA, 96 bp, Homo sapiens
ggaagaccctcctgccaaaaggaaatgcatctttatgtcagaaacacaaagcagcccaaccaaaggggcaaatccagacagaacctttgacttggt

SEQ ID NO: 503087 - DNA, 100 bp, Homo sapiens
cagcacttccggtcacgccatcgttgctgccttcttcgtcaagctattgtggacgatgaaaggctctctgcagaggagatggatgagaggaggcggcaga

SEQ ID NO: 503088 - DNA, 87 bp, Homo sapiens
gagagcaaaatctacaagatgatgcagggaggaggtggcagtagagaagagcatcacagaagttgctcaggagctgacagagctggt

SEQ ID NO: 503089 - DNA, 87 bp, Homo sapiens
tacatggcctattcagctgtaccagtccgccattttgctaccaagaaagccaaaggaggaggaagccaagaatctggtgagcgaagc

SEQ ID NO: 503090 - DNA, 74 bp, Homo sapiens
gaagatgcccacggactacatcaggaacggggtgctctacgtcacggagaagtttggtgcacctcgatttggag

SEQ ID NO: 503091 - DNA, 95 bp, Homo sapiens
gagttcccttcccttccacagtgcaaggaagacgccgaggggcaatgaaaactattctaggtgatcaacgaaaacagatgctccaaaaatacaaa

SEQ ID NO: 503092 - DNA, 100 bp, Homo sapiens
cgcgaatatcgtcatcgttagaagcttgatgaagaaatctctggaattgtggaagtggttggaagagtaaccgccaaggccaccatcttgtgtacatctt

SEQ ID NO: 503093 - DNA, 100 bp, Homo sapiens
gcctggaggaccagtatttcccatggaggaatcaagctatagaagtggtctggagtcaccagcctgcattcttgagctgggtggaaggcaggcattttag

SEQ ID NO: 503094 - DNA, 80 bp, Homo sapiens
cccgcctgcagctggagctgagcaaagtgcgtgaggagtttaaggagctgaaagcgcggaaaggacttagaagccttaca

SEQ ID NO: 503095 - DNA, 97 bp, Homo sapiens
gaaggcagcgcgttgtacccgaggaaacttggatttaactggccagaagcaggtattcaaagcagagaacaatccctgggtgacccccattgcagac

SEQ ID NO: 503096 - DNA, 83 bp, Homo sapiens
ggctgcgggaaatcgggctgaagcgactgagtccgcgatggagaagtccattggaatattaagcccaggagttgctttgggga

SEQ ID NO: 503097 - DNA, 75 bp, Homo sapiens
gcagctagtaatttgccttctggattatggatcctgagcttgaaaaaaaactgaaagagaataaaatatctttag

SEQ ID NO: 503098 - DNA, 50 bp, Homo sapiens
acatccagtttgatgtttactacaagaatgtgacagtgatgataacatgg

SEQ ID NO: 503099 - DNA, 98 bp, Homo sapiens
ttgaatttatcagcaaaaaagaaagactcacatttacaagagtggagtggaatgcaaaattaaatgttagagttatggaacccgatcctaattcagag

SEQ ID NO: 503100 - DNA, 100 bp, Homo sapiens
gatggaccacctgggctgcatgcactacacggtgcgggccccggtgggagtcgtgccggtggtggtgtgcacattgagccccggtatagacagttccccc

SEQ ID NO: 503101 - DNA, 75 bp, Homo sapiens
tttaagcctgatctaacccctagaaacagagttccccaccaccaagttagagatgactgctgtggctgacatttt

SEQ ID NO: 503102 - DNA, 75 bp, Homo sapiens
agaaagtgaggaggaaaacacccccattcttcagtatcagacacagcacagcagccatctgaagagcaaagcaag

SEQ ID NO: 503103 - DNA, 120 bp, Homo sapiens
cgcagcccccgcgctggtgcagccaccctcgctccctctgctcttcctcccttcgctcgcaccatgacacgatgaggcgagtggtacgacagagcaagtttcggcatgtatttgggcaag

SEQ ID NO: 503104 - DNA, 100 bp, Homo sapiens
ggcttctctgtggccctgcaccggcagttgcagccccgaccccagagctgtcctggaaagacaagcatcatgcctctgaccagtgccttcagggctgtgg

SEQ ID NO: 503105 - DNA, 82 bp, Homo sapiens
ccctgagggccttcgagagctaccgcgccagacaggttctccttactatgacaatgtccgccccctctcttaccctgattcg

SEQ ID NO: 503106 - DNA, 99 bp, Homo sapiens
gtgccagcgatgtccccatccgccgccgagaggaggcctatgagaatcaggtactggtgtggcatactcggacagagaagcccaagatgaagcaggagg

SEQ ID NO: 503107 - DNA, 50 bp, Homo sapiens
gagaagcaggcagaagattgcatcacacgccgggggccatcaagtataag

SEQ ID NO: 503108 - DNA, 74 bp, Homo sapiens
gaagcgtgcttttgaagaagcaaggcggcaaatggatgtgatcttcgtggtggaaagctaaattttaaaaccac

SEQ ID NO: 503109 - DNA, 50 bp, Homo sapiens
cccaagatgccactggtgaagaaggaaaatcctgccttgcttcgttgggc

SEQ ID NO: 503110 - DNA, 100 bp, Homo sapiens
ggtttgcgcgccttggtgagccgttggcgtggtggtcccggagtgatcctggcagccggtggggaagacaaggagggttctccagcaagtagataacaag

SEQ ID NO: 503111 - DNA, 82 bp, Homo sapiens
gccaacagtacctcattgctctttggcgactcttattggctttccttaaagtttcccatgtctcaatggactcctgaatata

SEQ ID NO: 503112 - DNA, 82 bp, Homo sapiens
ccttggtgttccccttttactgccaggacactgagatttggagagtggtggtgtgatgatctactttgacagaattgaagtg

SEQ ID NO: 503113 - DNA, 130 bp, Homo sapiens
gggagctcctggtcatcgagctgtccgacaaccctggcgtccatgagcctggactggccaaccaagcgcaccaggtgacacttcagtgaatggccctgtatgacgggtgacgtctgctgctgctgactga

SEQ ID NO: 503114 - DNA, 89 bp, Homo sapiens
atgaagccgagaaggcgctgaagcacatggatggagacctcagttggatgaacccattccactgtatgaggcaaaagtttccatggaag

SEQ ID NO: 503115 - DNA, 95 bp, Homo sapiens
cgtacctggtgggcaccctgagcctcagaataaatccaccagtaccccaacttctccggggccccggactcattcaactccctccatcccggtgc

SEQ ID NO: 503116 - DNA, 78 bp, Homo sapiens
tatccccggcacatcgtgttcctggagtatgagagttctgagaaggagaaagacacgatgcaattcgaagtcacagcg

SEQ ID NO: 503117 - DNA, 51 bp, Homo sapiens
cctgagagatctccaagaattacaggtgaccattgtgaggtagatattttg

SEQ ID NO: 503118 - DNA, 100 bp, Homo sapiens
gaattaatccttgaaggaaatgacattgagcttgtttcaaattcaggtgaatatgaccatctcccagaacaggccttctatatggtgggacccattgaag

SEQ ID NO: 503119 - DNA, 90 bp, Homo sapiens
ctccttgcgtcccgcctccctgggagctccgcacgggagtctccccaggacagtgctatcacccgggatattaaccgaacattcccagcc

SEQ ID NO: 503120 - DNA, 75 bp, Homo sapiens
aaaaattcaattctttagacgctcatgaagaaatcagggatttcctcaggcatattctcaagatgcctacctgaa

SEQ ID NO: 503121 - DNA, 88 bp, Homo sapiens
atccgtgctcaatgctgccagagatgatattagcaaggcacgtgtggttctcaaatataggcattctgatgggaacttgtgtgttaaa

SEQ ID NO: 503122 - DNA, 100 bp, Homo sapiens
gatatagaacatttcttttatcacaagaggtgagagacttcagaggctgccctttcttttcatctgctgcttgtgaaaggaaaacatcttgggcccccag

SEQ ID NO: 503123 - DNA, 101 bp, Homo sapiens
gagaggaaactgttgtgcctcttcatattggcgatcctgttgtcactattcctgatcagagaactccagttgcttcaacacacagtatcagtagtgcagcc

SEQ ID NO: 503124 - DNA, 50 bp, Homo sapiens
ttttgcggcaccgagggctcaggccactgatcatggatgaacaggatcaa

SEQ ID NO: 503125 - DNA, 78 bp, Homo sapiens
ggtggggctgcggcgcctgggactgcaccgcaccgagggcgagctccaggtactgcttctccgagatggccccagtgt

SEQ ID NO: 503126 - DNA, 100 bp, Homo sapiens
agctcactggggctgactgtgaccctgtgtacaaggttacgttatatataggattcgtgttcgccgtggtggccgaaaacgcccagttcctaagggtgca

SEQ ID NO: 503127 - DNA, 100 bp, Homo sapiens
aattgccggtctgggagttgggggcaaggagaagatcctggtaaataccagctgtcccctacagtgaatatgccccaagatgacactgtcattatagaag

SEQ ID NO: 503128 - DNA, 95 bp, Homo sapiens
aatcttggtgccaataatggaacgaacactggacacaggactggggaagactggatttcagcttaggagaagtactatactggcaattgctggag

SEQ ID NO: 503129 - DNA, 100 bp, Homo sapiens
ctgacactcggcgatgagctaagacgctgtttcagagcgtttgggtcctctgaggccccttgaccagtgcccagcagaggagcacgcagctgaacaagaa

SEQ ID NO: 503130 - DNA, 75 bp, Homo sapiens
ctggtagctcatatccccctcacatgcagtcctcctccgcctcctcctctctgcatgcgcgtcagagcccgtgcc

SEQ ID NO: 503131 - DNA, 75 bp, Homo sapiens
agttaatgtggtctcccatgtctcatcggatactctgttttcaaggaagctgaatgggaaatacagacttgagcg

SEQ ID NO: 503132 - DNA, 100 bp, Homo sapiens
tggacaaggatctgcaaattgaagtgcaggctgaccggttccctgatgtgttacctgcttctgctactgatccaaactgcagaacttctcattcatcccc

SEQ ID NO: 503133 - DNA, 75 bp, Homo sapiens
tttttacgggccttctggagatgcttccgaactgtgggcaaaaatggcggaaccactcgttttgactattatttt

SEQ ID NO: 503134 - DNA, 90 bp, Homo sapiens
caaacatcgaggctctgaatggcaactgctctgacactgagacaattggcgggcaacgacctttcttttatccacccaaaggccttgtct

SEQ ID NO: 503135 - DNA, 76 bp, Homo sapiens
gtgatatttgcctttagtgcactcttctccttcacagtaaagtggctgggtgaagttgaacaaattgctatgatga

SEQ ID NO: 503136 - DNA, 75 bp, Homo sapiens
tcaagaatcatctgtaaacctgataacactgcatgaaatgttagagatatgcacccaatgtccagggagcgtgca

SEQ ID NO: 503137 - DNA, 98 bp, Homo sapiens
aagagcaggaagtcattacatgtgtactaatggtcacttgatgtgcgctggctgttttatccacctactagcagatgcccggctgaaggaggagcagg

SEQ ID NO: 503138 - DNA, 80 bp, Homo sapiens
gtgttcaatacacctcccacctgtcctcaggcatatcaaagaaaaattggaagctccaccacccaccccaggacagctga

SEQ ID NO: 503139 - DNA, 82 bp, Homo sapiens
agacaaattcttaactctgacacaattgtgattcgttggaaaaattcattgtctctagagattgtcagcttggtccacatca

SEQ ID NO: 503140 - DNA, 101 bp, Homo sapiens
aatcaaagccacaagacactgctgataaggatgaatttcacggtccctcatggtgtctcactccagcagacagaggattgtgtcgtgccaatgagaacaga

SEQ ID NO: 503141 - DNA, 100 bp, Homo sapiens
ctggccggagagagagggaaggacggggcctggcccccgggactccctgtgccttgcttggagctgacgccgacggtttcgaccacttggcacagtaacg

SEQ ID NO: 503142 - DNA, 98 bp, Homo sapiens
ggcgcccggatgggcagctgaggaaccttttgaggatggctttgcaaatggggaagaaagtactccaaccagagatgctgtggtcacgtatactgcag

SEQ ID NO: 503143 - DNA, 75 bp, Homo sapiens
ggcgacgaacatggagaacccccagcttggagcgcaagttgtcggacaagtaaccgcaagagcttgattgtgacc

SEQ ID NO: 503144 - DNA, 100 bp, Homo sapiens
tggacactgcacagcggaatgtatataggcatgtgatgttagagaactacagaaacctggttttcttggcgttctccacagatgcctgggcaccctgttc

SEQ ID NO: 503145 - DNA, 100 bp, Homo sapiens
aggatctcgggctcggaacgagactgcacgatggacaatctaaaatatgtaaatcagttgaagaaggaaaatgaacgtgcccaggggaaaatgaagttgt

SEQ ID NO: 503146 - DNA, 100 bp, Homo sapiens
gcgtggactgcggggacggggttggcgcccggcagcacgtgttcctggtttcagactggattatggacagaacttggaaatattgagaataatttcttaa

SEQ ID NO: 503147 - DNA, 50 bp, Homo sapiens
ggaactcagcaacatcacatacaggttggttaccacagagaagcgcttcc

SEQ ID NO: 503148 - DNA, 83 bp, Homo sapiens
gtgctgggctggtcccccttgctgtcccccgaggcagcctatgatgtgctgagcgtcgccgacatgtacctgctgccaggcct

SEQ ID NO: 503149 - DNA, 50 bp, Homo sapiens
catgctcagggaccctgtggagagaggttgacggatatattcagacgtta

SEQ ID NO: 503150 - DNA, 132 bp, Homo sapiens
gaccggagcggtaggagcagcaatttatccgtgtgcagccccaaactggaaagaagatgctaattaaagtgaaggtcattgacgagactctggatgttaaggaaatgattttcaatgccgagagagttggag

SEQ ID NO: 503151 - DNA, 90 bp, Homo sapiens
tggagctgcggggttaccatgggaaccgaaccgccgcgcctcgcccaggacagttacacttagaggccttacggagtttcgctcttgttg

SEQ ID NO: 503152 - DNA, 101 bp, Homo sapiens
cggagacctaagggcggcgactacgacggcgttgatatcggtggtaacgacggcctcagcaggcggggaagatgaaaggtgctggacccaaaggagacaac

SEQ ID NO: 503153 - DNA, 100 bp, Homo sapiens
gttcctggaccgtgagagcatcaagctcgtgtccatcggtatggacctgtctgccaatcaggacgaggagaccgaccaggagaccttccagctggagatc

SEQ ID NO: 503154 - DNA, 75 bp, Homo sapiens
ggctctttgaactttggatgctttattgtacaaagatgtgtatatctcatgattgatatggagaaactagtcatg

SEQ ID NO: 503155 - DNA, 100 bp, Homo sapiens
agagactgcatccccgagacgatggcggagggagataatcgcagcaccaacctgctgataacgaaggaggcccaacttcattcaataaggagcctgacgg

SEQ ID NO: 503156 - DNA, 100 bp, Homo sapiens
gttggaccttccggagcttctcagaagacagagggttttcttttgaggccaggagtggtggctcacacctgtaatcccagctctgggaggccaaggccag

SEQ ID NO: 503157 - DNA, 96 bp, Homo sapiens
accagttatgtgtgttgcatgagaaaacgccagtccatgctgcctgatgtcattgacgacttccatctgaagcagccccacttccatggaaccgag

SEQ ID NO: 503158 - DNA, 75 bp, Homo sapiens
ctggaaaaatatggcaaagacttcaatgacatacggcaagattttctcgatgcattctatttctcatcatttggc

SEQ ID NO: 503159 - DNA, 75 bp, Homo sapiens
ggaacttctggaaagaagacaagcccacacttccagaaatttcagagtctcactctgtcacccaggctggagtgc

SEQ ID NO: 503160 - DNA, 50 bp, Homo sapiens
caggaacaccgtcacgctgctggaggagattactctcgtggctttggtgg

SEQ ID NO: 503161 - DNA, 100 bp, Homo sapiens
gaggcaggcaggtccacttcgaaatttgctcttcagactgatggactcaactgtcccagatgaaatccaagaggatttaggactgagaggtgtataaacc

SEQ ID NO: 503162 - DNA, 98 bp, Homo sapiens
aagacaataacaagtgccttgaaacagtatttgaggcaaaatgggcatatcaagtttttgaccaaaggagataataatgcggttgatgaccgaggcct

SEQ ID NO: 503163 - DNA, 75 bp, Homo sapiens
gcccaaggtttcaaagcattatatgaaggttctttcagagcacggcttcggccccatcactaccgacatccggga

SEQ ID NO: 503164 - DNA, 88 bp, Homo sapiens
aatcgtcactgaggttgcagttggcgtgaaggtgacagattgactgggatcccctcgcacatcctcaacagctccccatcagaccggc

SEQ ID NO: 503165 - DNA, 99 bp, Homo sapiens
ccgctccttgcccgagaacatccagtttgatgtttactacaagaatatgagtgatgccatggcaattttgcacaaactacagacaggcctggatgtaaa

SEQ ID NO: 503166 - DNA, 100 bp, Homo sapiens
ggagcagaatttctagggcaaagaagctttataagatttacatccagccacagtcccctagagagtgaccaagaagatgaaatggcaaaagcacttctta

SEQ ID NO: 503167 - DNA, 75 bp, Homo sapiens
attttagggtcctttatatagaagggagagtagagattgagaatttatcacaagttgatggtcctcaagtggaag

SEQ ID NO: 503168 - DNA, 100 bp, Homo sapiens
tggaggagggcatattgacgcaatcagaaaatcaagtaaaggaacccaacagagatctcttctgttctccactgctaggatgagattgtctgaaacgaag

SEQ ID NO: 503169 - DNA, 101 bp, Homo sapiens
aaactcctctcctccgggcttcggctctgcgcctctgcccgcggatctggggcaacctggtacaaggcaatgaatcgctccctggctaatgtgattcttgg

SEQ ID NO: 503170 - DNA, 90 bp, Homo sapiens
cgcttcacggcgccgagccgcggtccgagacaaccctccatatgataagggagccttcagaatcgaaatcaactttccagcagagtaccc

SEQ ID NO: 503171 - DNA, 100 bp, Homo sapiens
ggagcattcagcacagaacaaagtcgttatcctcctcactctgtccagtatacatttcccaacacccgccaccagcagggagctgagcacataacgactt

SEQ ID NO: 503172 - DNA, 75 bp, Homo sapiens
gaaaacactaggactaactcagcatgttcagggcacgtgtggttctcaaatataggcattctgatgggaacttgt

SEQ ID NO: 503173 - DNA, 96 bp, Homo sapiens
tgagtgcccaaggtttcaaagcattatatgaagccaagaagtatgatgcgtttttggcctcagagtctctgatcaagcagattccacgaatcctcg

SEQ ID NO: 503174 - DNA, 88 bp, Homo sapiens
accgcagttggaattcatccttgttaagtgggcagaccaacatccacctcagcaaaaacttcttcctgacgaatcgcgccagggagcg

SEQ ID NO: 503175 - DNA, 75 bp, Homo sapiens
tatggctccatgctccacactgaccctgtggccaccagcttcctccagctgttccatcgggactgtgagcaagct

SEQ ID NO: 503176 - DNA, 100 bp, Homo sapiens
ttatgcaaacttgggccaaaggacagttagaagacagtagggtgaggtggctttgaccccgggttgcccggccagcacgaccgaggaggtggctggacag

SEQ ID NO: 503177 - DNA, 75 bp, Homo sapiens
cgcagtccggaggtgaggcggaactctgaggtattgaggctctgaaacaagtaactaagagatatgcccggaaac

SEQ ID NO: 503178 - DNA, 75 bp, Homo sapiens
tctggatcggcacactgacactacctattttcaagagccctgtgggccaaacgtaccaagaaagtcgggatcgtc

SEQ ID NO: 503179 - DNA, 100 bp, Homo sapiens
agaatattatattccaagacagagcacctaggattaaattggtttcctaagtcacggtctagatcacattctcgatccagaggaaggcgatactctcgct

SEQ ID NO: 503180 - DNA, 74 bp, Homo sapiens
ctctccataggctatggagctgtccaaggattgtcaatgaggcagatcagattccgatttgacgggcaaccaat

SEQ ID NO: 503181 - DNA, 90 bp, Homo sapiens
tgctccaaactgcccagcagcaccaagtcgggctggccccgacagaacgaaaagaagccctccgagctgtttggggctcagctaagtgac

SEQ ID NO: 503182 - DNA, 100 bp, Homo sapiens
gggcgcagaagcgttgtcactgcagcaactgctggttcagaagcaggagtcgatagcagcagttggtgacgagatggcactcagaaacggcgttgacgta

SEQ ID NO: 503183 - DNA, 80 bp, Homo sapiens
cacggctgaaccctccttctcaatcttggaacagcacccccttctttaaggttggacacgagttgccgctggttgtccaa

SEQ ID NO: 503184 - DNA, 75 bp, Homo sapiens
cagtggtgaggctgtaagcgaaactcttcagtttaaagctcaagctgcatatctatgtgagactgaattttcctc

SEQ ID NO: 503185 - DNA, 75 bp, Homo sapiens
tatccttcatatgatccatcttagtgaagaattaggatacagggaaatcctcattgacgattcaatttgttgaag

SEQ ID NO: 503186 - DNA, 100 bp, Homo sapiens
ggatgttaagtgtcaagttttacagtcgccagggacaagaacaggtcaactttgtagtgtgccaactctttgccttgctagcagccatttggtttcgaac

SEQ ID NO: 503187 - DNA, 100 bp, Homo sapiens
gttttcaggaccaaaattgtggaaaagtcactctggtgaaaggaaagcaagccaggatggatatttacgacactcaaaccttgggggttgtggtctttgg

SEQ ID NO: 503188 - DNA, 100 bp, Homo sapiens
gtcttctggtccctgttgacccaaggccacctttgatgccatttctaagacctacagctacctgacccccgacctctggaaggagactgtattcaccaag

SEQ ID NO: 503189 - DNA, 90 bp, Homo sapiens
attgcagatcttatggatctgagacaaggtcgagccgtgctgcacgtggctctgcggaaccggtcaaacacacccatcctggtagacggc

SEQ ID NO: 503190 - DNA, 100 bp, Homo sapiens
agaagctgcagaagaaagacgcaagctttccccagacatggccaacaagggtccttcctatggcatgagccgcgaagtgcagtccaaaatcgagaagaag

SEQ ID NO: 503191 - DNA, 80 bp, Homo sapiens
tcaccagcaagtttcgaggcaaatacctctccattatgcccctcggactcagcccaaaaccatgtttgcccaagttgaat

SEQ ID NO: 503192 - DNA, 100 bp, Homo sapiens
gcgcgagagatggagatgggcagacggattcatttagagctgcggaacaggacgccctctgatctctggaaaggaagagaaatggaagtgagaaagttga

SEQ ID NO: 503193 - DNA, 101 bp, Homo sapiens
cggcaccttctacacatcacactgcgtcagcgccagctgccggcacgaatacccgctaagctggatgaaaggactcagaattcatgattgaagaaatgcag

SEQ ID NO: 503194 - DNA, 75 bp, Homo sapiens
cgagttttaaagcaaaagaggatgagggctctgagagatttcatttctgtcctgctgatgaagtctacgttcatt

SEQ ID NO: 503195 - DNA, 75 bp, Homo sapiens
cacctcctcgccagcagccgtccggagccagccaacgagcgcaacaatggtgtggttggtgaatatggcagaagg

SEQ ID NO: 503196 - DNA, 100 bp, Homo sapiens
tgccattcacagatcgcaaacaggcagtctgttccaatggccacatttggctccggtcactcacaactggacggtgtatttaaatccgaggagaagcgag

SEQ ID NO: 503197 - DNA, 105 bp, Homo sapiens
ttttatttcgggagcaagggggctctgctgcatcttccaatcttccaggcactccacgaagaggccttggctagctgcacatctccctacatgggtatgtcaaga

SEQ ID NO: 503198 - DNA, 75 bp, Homo sapiens
ggggatttggaaatgtcatccgatggcacaatcaggatgaatctggttatagatggacaagagacgatcattctg

SEQ ID NO: 503199 - DNA, 76 bp, Homo sapiens
gaatcgagctcagctaacctttgaatatctgcacacaaattcgttcgacgaggtgctttataaatcatctcaggac

SEQ ID NO: 503200 - DNA, 75 bp, Homo sapiens
tggcctcgccggtcttggggggatggttccatcatggcgtcaatgcaggtggttgctgtatatggaactttatct

SEQ ID NO: 503201 - DNA, 100 bp, Homo sapiens
cccaagagcagcggaaaatgatccagtcacaggtcatcctgtacagttctacagcatgaataggcctgcctctcgccatactcccccaacaatagggggc

SEQ ID NO: 503202 - DNA, 50 bp, Homo sapiens
accgggaccgccagcgcaggaggctggagtgcaatggtgcaatctcggct

SEQ ID NO: 503203 - DNA, 82 bp, Homo sapiens
gcgagcacagagcctcgcctttgccgatccgccgcccgtccacacccgccgccaggaggctactcacagtcgaactacaact

SEQ ID NO: 503204 - DNA, 100 bp, Homo sapiens
gcactataagacggacgcaccgctcaacatccgcagcatcttctacgtgcccgacatggagctcactcctctacttgaaaaagaaagagatggattacgg

SEQ ID NO: 503205 - DNA, 80 bp, Homo sapiens
ctacacatctattatttatcgactctcatcaaaaagaaacctgggtttatctggcaagactgaggcaaataagactacag

SEQ ID NO: 503206 - DNA, 101 bp, Homo sapiens
aaaaaggctcagaaagatggatttttgcatgagacgcttctggacaggcaccacactgtaactcgaggcatcaccaaaggcgtgaaggaggactttcgcct

SEQ ID NO: 503207 - DNA, 98 bp, Homo sapiens
acgccttcaccgcactcgaccaggaccacagcggcaaggtctccaagtcccagctcaaggagttcgcagcacttactaaagaactcaatgtatgcagg

SEQ ID NO: 503208 - DNA, 82 bp, Homo sapiens
ggcagcagttactcgcacaaccccagttaagctgcgctccgggagaataccaagctgctattttacacttgaagagggagca

SEQ ID NO: 503209 - DNA, 100 bp, Homo sapiens
gcagaaccagatccgggagcacgtcatcgccatcgaaggacatagttgacggcaaggaaaaagaaggacaagaacttggaactgcggattgctctgtccc

SEQ ID NO: 503210 - DNA, 100 bp, Homo sapiens
cgaccagtgaggcggccgccgcagcccaggcgcgggggcgacgacagattacttctctaacaggatcaccagtttgctccacaaagcacaatgtctcgat

SEQ ID NO: 503211 - DNA, 100 bp, Homo sapiens
caaggcaggaggagaccaagaaggactacagagaggaccctgatgctcccataagacagaaaatgccccttgatgatctggatagagaagatgaagttag

SEQ ID NO: 503212 - DNA, 126 bp, Homo sapiens
gcggcctgaaggccggggtgctcagccaggccgactacctcaacctggtgcagtgcgagacgctagaggcacctttggggagttgaagacggtccgcctgccaaagaagatgactgggacaggcac

SEQ ID NO: 503213 - DNA, 97 bp, Homo sapiens
tacgcagtggacctggtgaagcacatccgaagtgagtttggtgactactttgacatctgtgtggcagccccgtcgcagaatttagtctcaaaggaaa

SEQ ID NO: 503214 - DNA, 75 bp, Homo sapiens
tttattcactccttcaaaagcccccaaaccagtgaatgcatgaatggatacatcaattttgacaagcggaggaag

SEQ ID NO: 503215 - DNA, 87 bp, Homo sapiens
tccacgctggactggtgcgaggagaactactccgtgacctggtacatcgccgagttctgtgttcttcttttgggagacgcatataat

SEQ ID NO: 503216 - DNA, 83 bp, Homo sapiens
tttgtgttccctcaaatggcggtgtgaagagagttcgcctgagccagatcccagattgtctaaagccccaggaaaaatggtgg

SEQ ID NO: 503217 - DNA, 90 bp, Homo sapiens
ctatgagaagcgtatggccacagaagttgctgctgacgctctgggtgaagaatggaaggagatcaatgatctgttggttaaggaaaagat

SEQ ID NO: 503218 - DNA, 97 bp, Homo sapiens
attggcctataccaggagagcggatcccagacgtggctgcattgtccatgggcttctctgtgaaagaacatggaggagcaggacttggagcgaaggt

SEQ ID NO: 503219 - DNA, 83 bp, Homo sapiens
catgtcccagaaacaagaagaagagaaccctgcggaggagaccggcgaggagaagcagatcccagatgcagtgactggttact

SEQ ID NO: 503220 - DNA, 100 bp, Homo sapiens
ctgggcttccacacaactccagtgctaactcaacaggttaatgttcgtgaagaaattgaagagttttttccaagaatgtggaagataaatcaagataaaa

SEQ ID NO: 503221 - DNA, 100 bp, Homo sapiens
ctgcctttgagcggactcccttttaagaaggccaatgatgaggccaatcagagtgatacaagtgtctccttgtcagaacccaagagcaaaagcagccttc

SEQ ID NO: 503222 - DNA, 100 bp, Homo sapiens
gggaggtgttcgagaacgaccccgagacgcccagctcaacattggcaatgtgctccctgtgggcaccatgcctgagggtacaatcgtgtgctgcctggag

SEQ ID NO: 503223 - DNA, 90 bp, Homo sapiens
agggaagatctttttcctcaattgcggagtttaagagagctgtgaaagtagcaacaggacaagaactctcaaacaatattttggacactg

SEQ ID NO: 503224 - DNA, 100 bp, Homo sapiens
caacagcgagtggcagctggggaagaccaagggggaaggttcctcctcattcttgtcggaaacttgccatgaggatccctctgtttcccccaactttact

SEQ ID NO: 503225 - DNA, 100 bp, Homo sapiens
ttagcctaacaagatggaagcaggtttaaaattttacataagaagttacctttttcaggattactacagcatcccatttcccacacccactactccgctg

SEQ ID NO: 503226 - DNA, 82 bp, Homo sapiens
tatgtctgataacagaaagtcaagatctaggtcagcatccagagaaccatggagtctggcagtaccgccgccagtgaggagg

SEQ ID NO: 503227 - DNA, 75 bp, Homo sapiens
gcataatccaccatcaatatatctggaggttccagtgacttttgtcgacattgctgtgtacttctccgaagacga

SEQ ID NO: 503228 - DNA, 82 bp, Homo sapiens
gtctgtgttgtgactgctttggacgtgggagtcacctgaaagccaggaaatgaattgtgggagagagactctttgaaagtaa

SEQ ID NO: 503229 - DNA, 98 bp, Homo sapiens
caacagccctcatcgagggatgctcaggtgacgcatccaaagaagacattgacactgctatgaaattaggagccggttaccccatgggcccatttgag

SEQ ID NO: 503230 - DNA, 75 bp, Homo sapiens
ctgatgactccctggagcacactgacagttcaggatccgagccaggagacactgagcctttggagttaggaggtc

SEQ ID NO: 503231 - DNA, 96 bp, Homo sapiens
ggctcctggacagatatggacacacccagccgctgtgtctctgctttctatccgtcaagatgataaagtcgtgtgcccgagaaccaaagaagtctt

SEQ ID NO: 503232 - DNA, 83 bp, Homo sapiens
ccaagggacaatggtcaccgtctcttcagggcgtctctggccgagcctctttttgtggaaaacgacagcagcagcagtggcct

SEQ ID NO: 503233 - DNA, 108 bp, Homo sapiens
agaaggatatcgacgtcgtgatccagaagtccagagctgaggactgcctgtttgcaggttgtgaccgagattcccgacgagagagactgaggggaagagaggaaggag

SEQ ID NO: 503234 - DNA, 82 bp, Homo sapiens
caggaataccacctctgatgcctggaatgccaccagtttggcaataaagccttttcatccttctgcaaacaattttcccata

SEQ ID NO: 503235 - DNA, 100 bp, Homo sapiens
gcagcaaatctacttttgggttacaaaaatccagaccaggaagctgaagtcttcagcagaaccctgacctaggtagggagtctcaatggccctgggtgaa

SEQ ID NO: 503236 - DNA, 82 bp, Homo sapiens
caagctcgaggccaaaaccggcgtgaacaggagcttcatcgctcttgataacgaaggaggcccaacttcattcaataaggag

SEQ ID NO: 503237 - DNA, 98 bp, Homo sapiens
agccttttccgttgccggtgccggcctagcgtcctggaattacttcaatcaagtttgaaattgaaattgaacccatttttgcaagtttggctttatat

SEQ ID NO: 503238 - DNA, 100 bp, Homo sapiens
tccaggagttcgtctcttacgtctgcggaagtgcagctgcctcagttcttagcgcaggggaaagttggggacatgctgctacaatacggctaatctttca

SEQ ID NO: 503239 - DNA, 76 bp, Homo sapiens
tatgtgatgccattccagcactggactcatggaggctgagcatttattcagtctgaagatgatgagaaactgaaaa

SEQ ID NO: 503240 - DNA, 75 bp, Homo sapiens
gacagctgtgtccttaacaaccaggccccaggtcaggatggctaactggttggctccccacatggtgccctacgt

SEQ ID NO: 503241 - DNA, 50 bp, Homo sapiens
aaagcagcgtgcgttcagccctgggaagctgacgggtcgcctcatgctgg

SEQ ID NO: 503242 - DNA, 96 bp, Homo sapiens
cagaagttcacttaaaagctacaactggcgggcctcaaagagctttaggacatgctccaaagaagagtgttgatccctcaattgttaacatatcag

SEQ ID NO: 503243 - DNA, 75 bp, Homo sapiens
ctgagaggactgagaggatgggaaattctctgctgagagaaaacagtttggctgtagcagcaattcctgaaggtc

SEQ ID NO: 503244 - DNA, 100 bp, Homo sapiens
ggagcacgtggagaggccgagtagccacagcggcagctccagcccggcccggcagcgacatggaagagcaacttatgactctcatctctgctgcacgaga

SEQ ID NO: 503245 - DNA, 98 bp, Homo sapiens
atcattcaagagctcttcaaagcatttgttcagatcttcagtactggccagatttatgttgaaattgagcgtgcgcgactgactaaaacattagcaac

SEQ ID NO: 503246 - DNA, 90 bp, Homo sapiens
aggagccctggttggctgacagagagctaacaagaggccagtggccagatcagcctctgtggactcggtgcttctcctggcaagtaaacc

SEQ ID NO: 503247 - DNA, 85 bp, Homo sapiens
aactacctgcagcgggcctacatcaaggatatgaacgagactgccaaacaagaagatattttggaatccacaacagatgctgcag

SEQ ID NO: 503248 - DNA, 75 bp, Homo sapiens
ctcgtggtctaaagcttcggcacaagggcccaactggaattccacttacggttgctgatgattcctctgatcatg

SEQ ID NO: 503249 - DNA, 83 bp, Homo sapiens
catcgttgctgccttcttcgtcaaggtgccagatgtgacatccagatgacccagtctccatcctccctgtctgcatctgtagg

SEQ ID NO: 503250 - DNA, 95 bp, Homo sapiens
gccgggatctcaggtcctcgggggcggcggccacgccaaggacggaaaagaggcacagttagatgaagaaggacagtttcttgtcagaataatat

SEQ ID NO: 503251 - DNA, 82 bp, Homo sapiens
aaactgaaaacgcaagccaggctaaacagttggcaggttgcctgtggctggagaaaggaatgtgctcatcaccagtgccctc

SEQ ID NO: 503252 - DNA, 75 bp, Homo sapiens
gattgatcatcatatgggttttctgttccacatgtacgactcggacagcgacggccgcatcactctggaagaata

SEQ ID NO: 503253 - DNA, 100 bp, Homo sapiens
caaaacttatgtgaccccgcggagacccttcgagaaatctcgtctcgaccaagagctgaagctgatcgtgatgtggcatgggcgtctctggacctgccat

SEQ ID NO: 503254 - DNA, 100 bp, Homo sapiens
cagggaacagctgcggtgctctgccatattgtgtcttccccggccggtccctcgcctcccggccgagctgacgaattgccattgccttcagaaagtgttg

SEQ ID NO: 503255 - DNA, 82 bp, Homo sapiens
tgatgacaacactttaaaagtttggtcagcagtcacaggcaaactgatattcagcaatgagtatacccaggcagaaaaccag

SEQ ID NO: 503256 - DNA, 83 bp, Homo sapiens
tgaagccgaccagaatgatagccagtccctggagctggtgcacaggttccaggctgaccaactgactgaagagcagattgcag

SEQ ID NO: 503257 - DNA, 83 bp, Homo sapiens
aacagacttttgaagaaatgatgaattacattccagaacagccaccccatcttttctctcaactgggagtgtgtggtcagttt

SEQ ID NO: 503258 - DNA, 121 bp, Homo sapiens
tttctctgctgcaccgacctcgacgtcttgcctgtgtcccacttgttcgcggcctatagggtggcccagttgaaatccttcccttcctctaccttggaagtgcctaccatgcatccaagtg

SEQ ID NO: 503259 - DNA, 82 bp, Homo sapiens
cttggttataaagcatccactaatcttcaggatcaacttgagaaggagccttttgtggcagatgaatatattgaacgtcttg

SEQ ID NO: 503260 - DNA, 100 bp, Homo sapiens
ctgcgaggaaaatggcggcgggagtggaatgcagtagccctctgggcctgggatattgtggttgataactgtgccatctgcaggaaccacattatggatc

SEQ ID NO: 503261 - DNA, 100 bp, Homo sapiens
cccggaggagcaggtgcagagcactgcgctgtcagcgatagcccagtggatggccattccagaatctggtcaacctgtagttccgttggacagacagttt

SEQ ID NO: 503262 - DNA, 89 bp, Homo sapiens
cgacctctcacagaaactatatgccaccatggagaagcataaagaggtggagccccctgagctgcccgctgatctgcagcactggatct

SEQ ID NO: 503263 - DNA, 100 bp, Homo sapiens
agagaaagccctaccacaagaagcggaagtatgagttggggcgcccagctgccaacaccaagacaggggcaagtgtccgagtggtgaatcagctacttac

SEQ ID NO: 503264 - DNA, 100 bp, Homo sapiens
cttcgccgggccggtactccaggtccgacccgcgaacccctctgggatccccgccgctctgtctacaacccgagttcttggccaggctgactgagagatt

SEQ ID NO: 503265 - DNA, 75 bp, Homo sapiens
caggacaccttccccttcctgaacatcaatgaaccatatttatttagagtcagaatggagcgatttgtagtaaca

SEQ ID NO: 503266 - DNA, 100 bp, Homo sapiens
cacgctcagcgccgagggcgagatcgtgcagggtcctcactgagcagcgagtcgtcccccgtgtcctctccggccaccaaccacagctcccccgccagca

SEQ ID NO: 503267 - DNA, 98 bp, Homo sapiens
ggacctagacctggaatcgcccaagtccctctactcgcgaggtgtctgatgatttgtgagcctcaagtgactactctgtggaatcatctgtccttgcc

SEQ ID NO: 503268 - DNA, 100 bp, Homo sapiens
gaggacttccttagtggtttccaggtggggaacgccaagcacaacgtgcatgtcatgaacatctccacaggcaagaaagtgaaggggggctccagcaagc

SEQ ID NO: 503269 - DNA, 75 bp, Homo sapiens
ctggcggcttccaggcgcactaccgcgttccagtgtctcgccccatcctcaccctcagggttcccagggcccagg

SEQ ID NO: 503270 - DNA, 74 bp, Homo sapiens
gctgacctcgctgtacgccgagcacccaggcgactgcctcatcttcaaggagcctgatcaggtgtacgagggga

SEQ ID NO: 503271 - DNA, 98 bp, Homo sapiens
gctcaagaacggcagccttgactccccagggaagcagggtgtgggccgaagatatgctcatgtggtgttgaggaaagcagacattgacctcaccaaga

SEQ ID NO: 503272 - DNA, 75 bp, Homo sapiens
cgaagtagaggatgccgaggagaaaacagcaggcacccaagcgggcggcaggaggagccattggatgaaagctca

SEQ ID NO: 503273 - DNA, 98 bp, Homo sapiens
gttccagggaggtgggattgagttgagataagtcgaagagtgactctggaaaaactccctcctgtcctcgtgctgcacctgaaacgattcgtttatga

SEQ ID NO: 503274 - DNA, 95 bp, Homo sapiens
cttaaagttacgttgttagaatgtagcagaagaaaagatgtggagtgggctgctacctcctggcctaaatgaaagtgacgctgagtcaaactcgg

SEQ ID NO: 503275 - DNA, 50 bp, Homo sapiens
gtcagctctgccggccaccctagacttgccaaccgaaccatcactcgtgt

SEQ ID NO: 503276 - DNA, 82 bp, Homo sapiens
ctgcagtctttatggacaaacctgaagagtttatatctgaaatggaccttcgagctggtccatttgatgagttccagattgc

SEQ ID NO: 503277 - DNA, 135 bp, Homo sapiens
ttttgaaattgcaagattcgatgtctatatttaagtatctccgctacttcactcgcactatccttgatgctaggtattttgaaggtggcgtctcatctgtctacctctgggatctggatcatggctttgctggag

SEQ ID NO: 503278 - DNA, 98 bp, Homo sapiens
gtcagccttcccagtagctggaactacagttacatggacacagaacagtatgaagaagcagtacgagactatgaaaaagtataccagacagagaaaac

SEQ ID NO: 503279 - DNA, 101 bp, Homo sapiens
tggaatgagaggcccctcaggaccaggccaagaataaaatctttatgaactaacaagatgaattaaagatggaatgattcatttctatggttaggttttaa

SEQ ID NO: 503280 - DNA, 83 bp, Homo sapiens
cagaggaactcagccctgattgcgatcaggatcctcatgaccagccaaagagaagaagaattaggaagcataaatcaaagaaa

SEQ ID NO: 503281 - DNA, 97 bp, Homo sapiens
agatggccagtcacgagaacccaggccaaacaccagagcaccctagaaggtttaactaaaagaatgctcatgtttgacccagttcctgtcaagcaag

SEQ ID NO: 503282 - DNA, 78 bp, Homo sapiens
gacgccatgtcgggttattcgagtgaccgagaccgcggccgggaccgaggggctgaagaagatgcagagcagcctgaa

SEQ ID NO: 503283 - DNA, 88 bp, Homo sapiens
aaagagaaacccggagggcgccgggccatcgacgagtacaagccccaggatgctaccaccaacccgtccctgatcctggccgcagcac

SEQ ID NO: 503284 - DNA, 82 bp, Homo sapiens
caaactgagggagctcaacaagaggacgggaggggcaagctgcggccaaccaaggccaagagcgagcggaagaagaagagct

SEQ ID NO: 503285 - DNA, 50 bp, Homo sapiens
ccagctccgaaatcaccaccaaggcaagtgaaccggagcaaacgacttcc

SEQ ID NO: 503286 - DNA, 98 bp, Homo sapiens
tggtcttgagatgaaaagcattggttctccagttaaggttggaaagatggatgctacttcctattctagtaaattgggatattcacaatgtatggaaa

SEQ ID NO: 503287 - DNA, 87 bp, Homo sapiens
tgatgagcccttgaagcacagcaggtgactgcttagaaaactgcacagcatctgatgaaattagcgaataagaacatcaaccatgtc

SEQ ID NO: 503288 - DNA, 98 bp, Homo sapiens
aagtgacaagaaatgttccaccaggacttgatgaatataatccattctcggattctagaacagctgctttgtaccgcctcagtggagactggaatccc

SEQ ID NO: 503289 - DNA, 101 bp, Homo sapiens
caaaaatcaagcaaacccttctagacagccggggagtgttcctcgacatgtttctccagtgacacctcccagagaagttgaaaaggcattaatagctgctc

SEQ ID NO: 503290 - DNA, 75 bp, Homo sapiens
acaaggagatcgaggtggaagagaggcgacttgcatcacggagatgtcggtgatgatggcttgctggaagcagaa

SEQ ID NO: 503291 - DNA, 100 bp, Homo sapiens
ttctgaacaaatgcctcctgaggatttctgtgcctggaaaatatctgttaacagactgcttttacacctacctgtccgcaggcttgtccaaaaggaaaca

SEQ ID NO: 503292 - DNA, 90 bp, Homo sapiens
ctcatggggaaaatctccccggtgactttcagactatcggtggtccatgtcaagtgatagttcacaagtgggagactcatctacaaccac

SEQ ID NO: 503293 - DNA, 76 bp, Homo sapiens
ggctgggcgacttgcgaggatgagagcgacgaagccaactgtccagaggaattacggaggttgagctggtccggaa

SEQ ID NO: 503294 - DNA, 75 bp, Homo sapiens
acagtgtcatcagtggctgcatcacgggaggagctattggtttcagagttggtttccctttcctggacaagcgtt

SEQ ID NO: 503295 - DNA, 82 bp, Homo sapiens
tctctttctggcctggaggctatccagcacagcacttcaaatgcaggcggggcgaaggcggagccccgggaccgtttgtccc

SEQ ID NO: 503296 - DNA, 101 bp, Homo sapiens
gaaaaaacagcagatggctcgagaatacagagagaaaattgagacggagctaagagatatctgcaatgatgtactgggaggcttgtggatcagaatctgaa

SEQ ID NO: 503297 - DNA, 74 bp, Homo sapiens
agagcctcactaatgactgggaagaccacttggcagtcaaggtccatctggttggtattgacatctttactggg

SEQ ID NO: 503298 - DNA, 75 bp, Homo sapiens
ctccgaggtctgatagtgaagaaagtggctcagaagaagaggaagaggctgtaacagaagacaagtacgaaatac

SEQ ID NO: 503299 - DNA, 75 bp, Homo sapiens
cgacagggtcaaagatgttcattctgggtgacacagcctacggcagcacttgctagaagtaaattctttaaagca

SEQ ID NO: 503300 - DNA, 75 bp, Homo sapiens
ccctgccttcagcaaggcccccggcagcgccggccactacgaactgccgtgcgctggagagcaagtgtaagtcag

SEQ ID NO: 503301 - DNA, 90 bp, Homo sapiens
cgagttaaccttcagctacttggagattcatggcgtcgtttgcagcaagtcagctcagaatgctatcttctttgagaagtcaaattgtca

SEQ ID NO: 503302 - DNA, 90 bp, Homo sapiens
ttaaactcccgggcctgcggacgctatgcacaggacatgacaccagtggcatatcacggccatggggtctcagcattccgctgctgctcg

SEQ ID NO: 503303 - DNA, 75 bp, Homo sapiens
tgtggaaatcaaactgttcaaaggccctaaagattactatgacatggaatccatggtccatgcagacacaagatc

SEQ ID NO: 503304 - DNA, 76 bp, Homo sapiens
cgaggccgcgggcgcgcgggcgcgactcggcggcggcgtcttttgcagcaattccatttccgtgagggcgtttcta

SEQ ID NO: 503305 - DNA, 100 bp, Homo sapiens
gctaggccatctgaataactttactaagtatccagagcaggagattgtgaatctcttcatcccaacccaggctgtgggcgccatcatcgggaagaagggg

SEQ ID NO: 503306 - DNA, 100 bp, Homo sapiens
gtttcctgacctctgacacgtattgtctcaagattaaagccccggtttctctggattctgtgcttctccatggaggaaactcaaggagaactgacaagtt

SEQ ID NO: 503307 - DNA, 90 bp, Homo sapiens
aattgtatgtacgcagagttttcatcatggataactgtgaggagctaatccctgaatatctgaatgctcccataatactctcagatagtg

SEQ ID NO: 503308 - DNA, 96 bp, Homo sapiens
gggctcctcacgttcagtcgtgaacatggagtgggacaaaatctgggcgtttaacaaaaaggtagtgggcagcagtcagtgacaggtgtaacctct

SEQ ID NO: 503309 - DNA, 83 bp, Homo sapiens
ctccattggatttaaaagacagtcctcgtcagcactgactttcagctatggaatcgcattttgaaagcgaagcagaagccgta

SEQ ID NO: 503310 - DNA, 96 bp, Homo sapiens
ctctccagtcccgcgtcggtcgccgcagtcacggagcgcacggagctcgaggagcagcacggcatccactgcaacatgacgttactcttctccttc

SEQ ID NO: 503311 - DNA, 97 bp, Homo sapiens
tcaaatataggcattctgatgggaacttgtgtgttaaagtaacagatgatttagttacttccattagtttgatgaatctgacttccacaccactatg

SEQ ID NO: 503312 - DNA, 75 bp, Homo sapiens
tggacggcatctttttgaaccaaattatgctgcaaatggttctctataaaggtgtcttaaaaaggttgattttgt

SEQ ID NO: 503313 - DNA, 50 bp, Homo sapiens
gttcaacttcccggatccctactccaaaggtgcccggcacccatttgccc

SEQ ID NO: 503314 - DNA, 97 bp, Homo sapiens
gggttgccagcaaggccagggaggttatcaatagtctggctgtctatcgtcatcgtgagactgactttggtgtaggagttcgagaccaccctggcca

SEQ ID NO: 503315 - DNA, 100 bp, Homo sapiens
tctatgatcatgcaggagattttaacagctctagaggacaaaatcccagtccttggcacaaactcaggaaatggaagccggagtctgttttttgtggggc

SEQ ID NO: 503316 - DNA, 88 bp, Homo sapiens
tgagctgcagcgaagcacctctttacgctggacgtaaagaaagaagtgatgcactcaattctgcaatagataaaatgaccaagaagac

SEQ ID NO: 503317 - DNA, 98 bp, Homo sapiens
agagagggtggtgcggatagcttgaggaaggaaacatgccctgaactgtcacagaatgaaaccagcgctcttcagcgtcctgtgtgagatcaaagaga

SEQ ID NO: 503318 - DNA, 100 bp, Homo sapiens
cggcctcatcagcccggcctacctcttcctctggcccgaagccttcctttatcgctttcaggcttatgcatctggatgtgacattgtaatactgggaagc

SEQ ID NO: 503319 - DNA, 101 bp, Homo sapiens
gcaggtgggccgacgcggaggcggcagcggcgggcctgaggcgaaggagcggccgggagcccgccgcgctggtagcgctccagaaacatgacaaggaggac

SEQ ID NO: 503320 - DNA, 80 bp, Homo sapiens
ctttccagagagccagaaagaattgcagagtgggcaggatcttaagacccgataggtgcagaacccatctggacacggag

SEQ ID NO: 503321 - DNA, 100 bp, Homo sapiens
tgcccggcctgtgggatgcaagtgggagcaaaaagtggatgactgtgagcggtgccgggaatttttcaacaaagaagggcgtgtaaaaggcataagctca

SEQ ID NO: 503322 - DNA, 99 bp, Homo sapiens
gaaaatggaaactctagagcaccgtttattagggaagaaggagaaagggccaacccctgaagaagcaatacagaaactgaaggagacagagaagatact

SEQ ID NO: 503323 - DNA, 100 bp, Homo sapiens
agaggtaggagaaaaaattgcccttagccgaagagttgaaaaacactggcggagaactgtgtttatgaaactgtagttttgcctttggatgaaagggcat

SEQ ID NO: 503324 - DNA, 103 bp, Homo sapiens
cggcccgcgctgcccgcactcctggtcctgctcggggctctgttcccagacaatgcagatcttcgtgaagactctgactggtaagaccatcaccctcgaggtt

SEQ ID NO: 503325 - DNA, 100 bp, Homo sapiens
tgaatggtactcggggaaaaagaggaaatatttgttaaggaaacacaaattaacaaagaaaaggaagaagaactagttgagtatcttccacaacttcagg

SEQ ID NO: 503326 - DNA, 83 bp, Homo sapiens
caagcagtttcgggaggagttcaactagtttatgccaacgtgacttcattcatacagatgaaccaaggatcgggatagcagta

SEQ ID NO: 503327 - DNA, 71 bp, Homo sapiens
atctactcggccctcattctgcacgacgatgaggtgacagtcacgggcgtctctggccgagcctctttttg

SEQ ID NO: 503328 - DNA, 80 bp, Homo sapiens
ttctaatccctgctctgtcactaacaagctgcgtgatcttcggttacttcttgctgcagattctgcgcaggatcggagct

SEQ ID NO: 503329 - DNA, 80 bp, Homo sapiens
ctcgctgtggggcaatccgggcttgcagacgaggctgtggaaaatctctgttctcacaaagtctccccaatgctctacaa

SEQ ID NO: 503330 - DNA, 74 bp, Homo sapiens
aagctatcaatatattgctggaagggaattcagacacaaataactgaagtgaagtgatggactccgatttggag

SEQ ID NO: 503331 - DNA, 100 bp, Homo sapiens
ttgcacaagggaggcgacagagacagcagcaggcagtaacagagaagaattttgaaacaaaagattttcgagcctctctagaaaatggtgttctgctgtg

SEQ ID NO: 503332 - DNA, 98 bp, Homo sapiens
ttgaagtatttggctgaggagttttcaatcccagtctctaattaacagaagatggcaaagcccagccacagcagctatgtccttcagcagctaaacaa

SEQ ID NO: 503333 - DNA, 75 bp, Homo sapiens
tgcccacaaggagttagcgacctactggggttttgtgatgaaggaacctgtacagataaagccaatattctgtat

SEQ ID NO: 503334 - DNA, 100 bp, Homo sapiens
atggcgctgagtgaacccatcctgccgtccttctccactttcgccagcccgtgccgcgagcgcggcctgcaggagcttgcgcgatctctggcctcttcaa

SEQ ID NO: 503335 - DNA, 80 bp, Homo sapiens
ggcggccctgacagcccccacctcgcaagagcagccgcggcgccactgtctggagacttttagccagcttgtttggaaat

SEQ ID NO: 503336 - DNA, 80 bp, Homo sapiens
gaagttcctggtccacaacgtcaaggagctggaagtgctgctgatgtgcaacaattattctgtcattatcgagctagttg

SEQ ID NO: 503337 - DNA, 83 bp, Homo sapiens
ccaggttgaccattgctgccgttctgtacttgcttttcatgattggagaacttgtagctagtgagacctgcaacgacttccac

SEQ ID NO: 503338 - DNA, 83 bp, Homo sapiens
agaagtccagagctgaggactgcctgtttgcaggtattatcgggggacccacggggtcattgtggtttacgacgtcaccagtg

SEQ ID NO: 503339 - DNA, 74 bp, Homo sapiens
ccaagaagaagagggaagagcctactgcaggtcacaaatcttctggaataccttattgatgtagaaattgcccg

SEQ ID NO: 503340 - DNA, 51 bp, Homo sapiens
agcctcccgagtggctgggattacaggaacttggcattagaattcctcgac

SEQ ID NO: 503341 - DNA, 100 bp, Homo sapiens
gcacacttccccacagaacatgctgatgttccagcagccagattctctctggcccaaaatccgggttccattaaaagttgtgaggactgctgaaaacaag

SEQ ID NO: 503342 - DNA, 80 bp, Homo sapiens
atggatatccaggtgctgagccaggagcagcagcctttctcattactctactgactggcagagacaggagaggtagatgt

SEQ ID NO: 503343 - DNA, 82 bp, Homo sapiens
cttgacggcttggacgaagatggggagaaggaagcgagactcatacgcaacctcaatggtgtgagatgcacaatgcgaaacc

SEQ ID NO: 503344 - DNA, 75 bp, Homo sapiens
tggccatcaaagtgattccccggaatcgtgtgctgggctggtcccccttgactggtcaaacaaatggattttaca

SEQ ID NO: 503345 - DNA, 98 bp, Homo sapiens
taatcctcaatttaagcctgatctaacccctagaaacagaacattaaccaggtggtatttgttggaaatttcttgagaattaatacgatcgccatgcg

SEQ ID NO: 503346 - DNA, 75 bp, Homo sapiens
cggagctttcgcagctggagaaggtaaggggcctggataccaagaagtgactgctcatctaatccataaagctat

SEQ ID NO: 503347 - DNA, 83 bp, Homo sapiens
ctccagatgaagtgtgagcactgcacgcgcaagatcatgcatgccccgcggtccagggacaggttcacagcgccgtccttcat

SEQ ID NO: 503348 - DNA, 100 bp, Homo sapiens
ccgaagagccaagagtcagtattccggccagcttcacgaagtcagagagggtactatttttctgcctggaaataaagtttctgagcatccctgcaatgaa

SEQ ID NO: 503349 - DNA, 91 bp, Homo sapiens
cttggtttcgggatctcggtgctgcagacggcgagacctcctgcacaggttcgtgctggccgtgggcagcgccgtctttgatgccatgttc

SEQ ID NO: 503350 - DNA, 100 bp, Homo sapiens
cagaagaaaggtgttccttcccatggatatttgtatgctggtggggtggaagacaacccgtgagtattacaccttcatgtgggttactttgcccattgac

SEQ ID NO: 503351 - DNA, 90 bp, Homo sapiens
gctcgcctcctccagctgttgttgctgctgcaaaacacggcatgtgaacattctgcttttcatggggtacatgacaaaggacaacctggc

SEQ ID NO: 503352 - DNA, 75 bp, Homo sapiens
ccttcattacttcagttgaaatcgtctccaggcagttgtgaaaaacttcaggacaaaaatgtttcatttaaggac

SEQ ID NO: 503353 - DNA, 100 bp, Homo sapiens
tctataaccagagactgtgagctgtacagggctctgaacatgcactacaataaagcaaatgactttgaggttaatacaatctgttggaatgacactggag

SEQ ID NO: 503354 - DNA, 82 bp, Homo sapiens
ccaggaagtaactttagaggaggatctgaaggcaattctcaagttcaactactcagtgcaggaggagagcgacacttgtctg

SEQ ID NO: 503355 - DNA, 83 bp, Homo sapiens
ttagaccccaatgagaccaatgaaatcgccaatgccaactcccttttcggctttgtgagaaaccttaccatcaaacacgatgg

SEQ ID NO: 503356 - DNA, 90 bp, Homo sapiens
atggacaaaaaggcatatttcttggggatgatgaatggagagagactgcatggggagcttctcttcacacaaaagatgttggacaatttc

SEQ ID NO: 503357 - DNA, 75 bp, Homo sapiens
tggcgccctacagcctactggtgactcggctgcagcattttgaaagcgaagcagaagccgtagaatcagcggcga

SEQ ID NO: 503358 - DNA, 82 bp, Homo sapiens
agcaccgcagccttgggcctcgcgccggctatggccgtgccctggggctgagccctcaggtgctgggcgtcctcttctttgc

SEQ ID NO: 503359 - DNA, 75 bp, Homo sapiens
ggcggatgccctgcagtacctgcagaaggtctctggagacatcttcagcaggagaaggcacaatccctgtggaat

SEQ ID NO: 503360 - DNA, 98 bp, Homo sapiens
caagaggaccttctgattagtccacagtcttcctctataggcttatttgcagctgggtatcaatgaaaagttaggactctctggaaggccagacaggc

SEQ ID NO: 503361 - DNA, 74 bp, Homo sapiens
gcttgtcctggctcttgccctcatcctggttctggaatcctcagttcaaggagcagacaagatggagacaaatt

SEQ ID NO: 503362 - DNA, 98 bp, Homo sapiens
agctcttcttgaattcctacaatggttgtggaagatatcaataagcgcagagagccgctccccagcctggaggctgtgtatctcatcactccatccga

SEQ ID NO: 503363 - DNA, 88 bp, Homo sapiens
tacaatgaagaactgaagaagctggagttgctcagacagacaatgattgaagctcacgttgatgtcaagactaccgatggttacttgc

SEQ ID NO: 503364 - DNA, 89 bp, Homo sapiens
ccgccctcagttgctgctccgacgcggaccccagtaccaaggtctagacgtgttgggatgttggctgtactcttgaaggtggttcgcac

SEQ ID NO: 503365 - DNA, 100 bp, Homo sapiens
ttgtgagtctctttcctgtttacctccagtgtcccttcttccacatgaaaaggataagtgggctaccttgagaatggagcgaggagccaaggagaagaac

SEQ ID NO: 503366 - DNA, 80 bp, Homo sapiens
tgagtgtgttgcacagacatggtttcgctttttacacatgttaagaggaagcctttgacaagttgcctcagtctacggtt

SEQ ID NO: 503367 - DNA, 50 bp, Homo sapiens
gcacagcaagcccaggctcattatcagaactgtcaagtaatccacctctg

SEQ ID NO: 503368 - DNA, 100 bp, Homo sapiens
gttcctgctgctctgcctgctccacaagcggcgccgcgccctcggcctgcacgggtggctgtacttttgatgatggtccaggggcctgtgattaccacca

SEQ ID NO: 503369 - DNA, 82 bp, Homo sapiens
cctgccaaagccaagctcaccaaactgaagatgccttctcagtcagttgaggtgatgaagggagtatgccagcagatatagc

SEQ ID NO: 503370 - DNA, 75 bp, Homo sapiens
tggagaactacagaaacctggtctccctaggacctgaaggagaagaaggagaaggtggaggagaaggcaagccgg

SEQ ID NO: 503371 - DNA, 95 bp, Homo sapiens
gtgtaccaggcgaagctggccgagcaggctgagcgatacgacgtatggtttgaagtggtgaacatggatttttctcggcttcacatgtacagtcc

SEQ ID NO: 503372 - DNA, 106 bp, Homo sapiens
caccatcaagaagcatgagatcagcaacgagttcaaggtggccggcattcacaagaaggtggcccggaccatcggcatttctgtggatccgaggaggcggaacaag

SEQ ID NO: 503373 - DNA, 100 bp, Homo sapiens
caccgagtacgaagcgggcgtttgcgaagttttcggctttgtgagaaaccttaccatcaaacacgatggccagcaacgttaccaacaagacagatcctcg

SEQ ID NO: 503374 - DNA, 100 bp, Homo sapiens
tgctggtcaaggcttcagtgtggagtaattgacactttcgaggtatgttaagctactgcgacagatacagcgaaggcataaaacatgtcctacagacttt

SEQ ID NO: 503375 - DNA, 74 bp, Homo sapiens
gaaactagcaccagccccaaatttcacctgcctagagctggaacgttacctccagagcgagccctgctatgttt

SEQ ID NO: 503376 - DNA, 100 bp, Homo sapiens
ggctgcagctgcagcctgccagctgttcaaggccatgttacaggagctgaattttggtgcatatttgggtcttccagctttcctgctgccccttaatcag

SEQ ID NO: 503377 - DNA, 75 bp, Homo sapiens
cccaattcctgcaaagccgtaacttaaaatgcatagccttatgtgaagaaccttctgataacttaagagagattc

SEQ ID NO: 503378 - DNA, 90 bp, Homo sapiens
tctaagcaagatgcattggattatatcacctggacttactttttccgacgtcttatcatgaatcccaggacaaagcagttccaattccag

SEQ ID NO: 503379 - DNA, 75 bp, Homo sapiens
ctactgccgcttcgccgagtgctgccgcgaggagcggccgctcaacgcttcggggatccatatggctttggagac

SEQ ID NO: 503380 - DNA, 74 bp, Homo sapiens
ggagaggacctgttcaccagcactgtctccaccctagagccaacaaatggaattttcttgagcatgtttctaat

SEQ ID NO: 503381 - DNA, 100 bp, Homo sapiens
cgaggcattatggaaagtcccatagtaagatccctggccaaggtggtgctggacaacacagccctgaaccggattgccacagaccgcctgcacatccaga

SEQ ID NO: 503382 - DNA, 100 bp, Homo sapiens
ctgttatggatgatttcgcagcttttgtagagaagtgctgcaaggctgacgataaggagacctgctttgccgaggagataatttttaaacacatgggaga

SEQ ID NO: 503383 - DNA, 50 bp, Homo sapiens
agtctgcaccttctcttactgctggcctgacctttccagctcacccccag

SEQ ID NO: 503384 - DNA, 51 bp, Homo sapiens
caaccgcctacgagacactcaagaatcttctgctgactctcaacttttcct

SEQ ID NO: 503385 - DNA, 75 bp, Homo sapiens
caggccttcaacagccttattaggtttgaattcctcagcaacatctacagcaaataatagccgttgcgaggggga

SEQ ID NO: 503386 - DNA, 100 bp, Homo sapiens
tgaatccaagttaacccttaccacccagcagcagggcatcaagcttatgttcctgaggaagaattgaaggcagcagaaatagatgaagagcacgtggagg

SEQ ID NO: 503387 - DNA, 83 bp, Homo sapiens
cccgcttctatgtcctgtacacaatcttcatgaaaggccccccaccccaagcaggaaccccaggagatcaattttcccgacga

SEQ ID NO: 503388 - DNA, 100 bp, Homo sapiens
tatcagcctctaatgagattgcgacataaggtcatgatgatgggcagcgcccgagtggcggagctgctgctgctccacggcgcggagcccaactgcgccg

SEQ ID NO: 503389 - DNA, 100 bp, Homo sapiens
ggggcgtcggcatgctcacccgcctctacaacatcaagaaggaatcccgttctgcttccagaagtggaagtgctcacggatcggggaaatctgcaaggca

SEQ ID NO: 503390 - DNA, 83 bp, Homo sapiens
aaagcgacgttcggccaccggaggagcgggagccaagcaggacgagattgaggagctgcgggccgagatgctggagatgcggg

SEQ ID NO: 503391 - DNA, 100 bp, Homo sapiens
ccgcctcgccgcagaagtatctccgaatggagccatcccccttcggcgacgtctcctcccgcctcaccacagatagcagctgtggagaagtcccaggaaa

SEQ ID NO: 503392 - DNA, 106 bp, Homo sapiens
ctgctctggatgatgcagaagaggagtcctttaggaaggttcaaaccttgtactactcagctgatcacaagctgcttgatgggaacctactagatggacaggctga

SEQ ID NO: 503393 - DNA, 75 bp, Homo sapiens
cacctatggatcttgctcctttgcctgcaaacctaaactaatggcagatcccggaaatccagacttgtatcatgt

SEQ ID NO: 503394 - DNA, 83 bp, Homo sapiens
gctgtgctcgcgctactctctctttctggcctggaggctatccagcgcaggtgacagcagggacatgtctcgggagatgcagg

SEQ ID NO: 503395 - DNA, 100 bp, Homo sapiens
tggccatttaggagctctgctcaaagccagacgggaagatcagttttcctgccatccaggctgctccctccttcagcaactcattcccacagatcttccg

SEQ ID NO: 503396 - DNA, 76 bp, Homo sapiens
aggaacccacatcccccataggtcactgtgtggccatctaccactttgaaggaaaagctggaacgggtgatcctag

SEQ ID NO: 503397 - DNA, 100 bp, Homo sapiens
tgaagttaaaatcctggtgggctacaaattacgatgatccgttggtgctgaatgagatcagagaagaccttcgagtagagtgttcgaagtttggacaaat

SEQ ID NO: 503398 - DNA, 98 bp, Homo sapiens
ggtggctctgctacggcggcgcagaaatgaggcagaagcggaaaggtaatacgatcatacttcaaacgtgctgatccattctatgatgagcaggaaaa

SEQ ID NO: 503399 - DNA, 82 bp, Homo sapiens
tccctcaaaccttgcttctaggagataaaaagttcaaatctgaacatcaatgatgtactagggaactactcattgactcttg

SEQ ID NO: 503400 - DNA, 100 bp, Homo sapiens
ctgcttgccggccccaacacggaccttggcttggtggagccagtgaacgtggtggacaatggagatggcacacacacagtaacctacaccccatctcagg

SEQ ID NO: 503401 - DNA, 87 bp, Homo sapiens
ccaggcccctgtcaagaaggtgccggtggtgcgagtcttcggagcgaccccggcaggatttaagtgccctgtatgctcaaaatttgt

SEQ ID NO: 503402 - DNA, 89 bp, Homo sapiens
ccgaggctgaggatgatggtagattgccaggaccgcacctgtgaaatcgttgaggacacagaatccagccggatggttaagaagatgaa

SEQ ID NO: 503403 - DNA, 75 bp, Homo sapiens
ccatcgcgtcgtggaggagtactttgtggcccccccaggcagagaagaggcgatggcggcgatggcatctctcgg

SEQ ID NO: 503404 - DNA, 98 bp, Homo sapiens
aagcctgagagatggaaactactatgcatgtaaacaaatgaagcagcgctttgaaagcttctcctcttatgggtgctcagagtttccctaatttgacc

SEQ ID NO: 503405 - DNA, 100 bp, Homo sapiens
agtccagtaagaagttgggccaagctggaagggattgaccgggcaatggacctcatcatgaccgttgctgtacttacaatgaaaacaacttggtggatgg

SEQ ID NO: 503406 - DNA, 87 bp, Homo sapiens
tgaaaactacaaatcccaggagcacttcacgggcgaagctgtgctcaggcccgggctggacgcagagccagagctgtccccagagga

SEQ ID NO: 503407 - DNA, 90 bp, Homo sapiens
caacaccacaataatccacagccaaggtggctgcagtccgagaagggatgtcctggattgttcctgtgccgctgctgtccctcctcacag

SEQ ID NO: 503408 - DNA, 100 bp, Homo sapiens
acctgagctgaaatggcagacgatctcggagacgagtggtgggagaaccagccgactggagcaggcagcagcccagaccagctttcagtgccagaggaga

SEQ ID NO: 503409 - DNA, 51 bp, Homo sapiens
ctttgatgtggagtccaaatttgaaagccttatgtttgatcatcggccaag

SEQ ID NO: 503410 - DNA, 101 bp, Homo sapiens
caaagctattctgggggcaacagagggtctaaaattcccaggactccacagctttgcaccagataagcctggaggaatactaatgatggatctaaaagaag

SEQ ID NO: 503411 - DNA, 100 bp, Homo sapiens
ggcagctccgtagcatgaggaagagtcaggggcacagagagatggagagagacctagttagctccacaggctcccaggatggtcccgtgagcaaccccag

SEQ ID NO: 503412 - DNA, 135 bp, Homo sapiens
aaggccccaaccatcgttgggaaatcatctctaaatcccatcctctttcgaggtgttgggttggatggcaagcatgtggtgtttggcaaagtgaaagaaggcatgaatattgtggaggccatggagcgctttggg

SEQ ID NO: 503413 - DNA, 82 bp, Homo sapiens
cagaagcagggccgcttccgcagcctggaggaagcactgaaagctatcaccggcgtaatcaacccagcgttggacaaatact

SEQ ID NO: 503414 - DNA, 100 bp, Homo sapiens
atccactcgatggtagcccacctagaagctgttacaagtttagcagttgatcccaatggcctttacttgatgtctggcattatgcaaagggtgacctgga

SEQ ID NO: 503415 - DNA, 100 bp, Homo sapiens
attcaccaaataagctatatactttggttacctatgtacctgttaccactttcaaaactcattgctatggacagtgctatcaccctgtggcagttccttc

SEQ ID NO: 503416 - DNA, 100 bp, Homo sapiens
ccggacacttctctattcatcaatgtttgtagagacataggtggggtggaatggctgcaaataaaggataatgatttctcctatcgacccaacatgattt

SEQ ID NO: 503417 - DNA, 100 bp, Homo sapiens
tttgactggtccccagtggtgacctatgtgtgtgatcttgaagggaacagctatacctgcaggcccgcttcacttggcgaggagcccgcctgctccggcc

SEQ ID NO: 503418 - DNA, 102 bp, Homo sapiens
gccggtgccagcacctttcggcttctgagacggcggcagcagcggcattcaggctcagctgtcgcaggccctggaggagctgggaggccagaaacaaagagc

SEQ ID NO: 503419 - DNA, 90 bp, Homo sapiens
atccagaagtccagagctgaggactgcctgtttgcagaaattcatcaaacctatcttcacggatgagtcctaccttgaactctataggaa

SEQ ID NO: 503420 - DNA, 75 bp, Homo sapiens
ttgcagagctacgtggacgcaggaactccagatgaccatgaaagctgtggttctaattctaccaaccgtagtact

SEQ ID NO: 503421 - DNA, 51 bp, Homo sapiens
gcgggggcgcgctggccgcgggtgacctgagcatctctgcagaccgcctga

SEQ ID NO: 503422 - DNA, 80 bp, Homo sapiens
catagagggctgcgtcacttctgggggatttaagcgagagcctcactggttcccaggacatcaacctgaactggatcctc

SEQ ID NO: 503423 - DNA, 90 bp, Homo sapiens
gtcagggatcgtgaaggacgccagcatcatacaccggctgttcgaggccttgactgtaggtgagaagccctaccactgcaactgggacgg

SEQ ID NO: 503424 - DNA, 90 bp, Homo sapiens
cagcgcaaaggcaagacgcacaggaattaggcacagcatttatcctggagaagagtccacctaaacccactgtgttcatctctggggtca

SEQ ID NO: 503425 - DNA, 90 bp, Homo sapiens
gcaattatggcatcctggccgatgccacggagcaagtgggccaggctaatacactgcgagagttggtagaacctctccatgccaaatcgg

SEQ ID NO: 503426 - DNA, 100 bp, Homo sapiens
ctccacgggagaagccgcatcgggcatctggccgacgccctcgttcctgtggctgacagacgagttgtactgctgtcacaggaaatggacgctggattac

SEQ ID NO: 503427 - DNA, 82 bp, Homo sapiens
tccggttccttggtgtcatccagccttagcaaaccagagcagtacttctggaatagaaattctaaacattagcctgccgaac

SEQ ID NO: 503428 - DNA, 83 bp, Homo sapiens
tcacaaagattgcctgcagtttattgggaaataggggatcagtggcatttggcaattcaagaagcaattttagaaaaatgcag

SEQ ID NO: 503429 - DNA, 130 bp, Homo sapiens
gtcaaaggatcatggcagtgtgcccattattgtacctttaattccaccacctttcataaagccaccagcagacaagttggatggcttgaggactggtactaaaaggaaacgtgactgggaggccattgcc

SEQ ID NO: 503430 - DNA, 98 bp, Homo sapiens
tgaggagtaagcggcgcggtagcgaaggccgccgaacctgcctggctagccggcgacttgagtgacgagaaagattctgaagcttggcggagaggggt

SEQ ID NO: 503431 - DNA, 100 bp, Homo sapiens
ggcgacccctcggcgccgatgtccctgatccctggagcgacgacggccgctgcctaagctggaaaattagtgggatggtttggccatgaactcagcacca

SEQ ID NO: 503432 - DNA, 50 bp, Homo sapiens
gtgattttcattccaagctaaagatgaagactggcccatttgcagagcac

SEQ ID NO: 503433 - DNA, 84 bp, Homo sapiens
tacctagaagtctactaatggacagttagtcacccacctacatgttgaggtagagcgggaaaaggccattcttttggccaacct

SEQ ID NO: 503434 - DNA, 90 bp, Homo sapiens
gatggatggtggtagtgccagtttcaatctcagggaacatgagtgcctggtgaagaatgtgatgggatcactagcatgtctgcggagagc

SEQ ID NO: 503435 - DNA, 75 bp, Homo sapiens
gaaggtctctggagacatcttcagcagggaggggctggagacaggtctgaggaggaggcgtcatccacggagaaa

SEQ ID NO: 503436 - DNA, 80 bp, Homo sapiens
tgattacagttcttcctaaaaaagcatggcctgtatgagaagaaaaagacctcaagaaagcaacgaaaggaacgcaagaa

SEQ ID NO: 503437 - DNA, 101 bp, Homo sapiens
ggcggcggcctgctacggccgcgcgatcaagagacggaggatgcaaatgaagaagccccattgagggaccgctcccacatcgagaagaccctcatgctgaa

SEQ ID NO: 503438 - DNA, 90 bp, Homo sapiens
cacattcagaacctgttacccaaggaattccctaaaggtaaacaaagctaactgtcgactaccagaaaatactttcaacataaatgaact

SEQ ID NO: 503439 - DNA, 75 bp, Homo sapiens
aaaaagtaccatcatttgaaacagggagagtcacaccgggacagctcatgtcctatattcagctcttcaagaaca

SEQ ID NO: 503440 - DNA, 100 bp, Homo sapiens
tgagcagagccctgcctaaggtccagggctcgatctggccctaaccacagagtcaccttgagggccaattcctgtccccccagcagcatggcatcgtgtg

SEQ ID NO: 503441 - DNA, 96 bp, Homo sapiens
cggctccccagccccaggccgggaggagccagagtgacccctcgacctgtcagccatgggggagatggagcaactgcgtcaggaagcggagcagct

SEQ ID NO: 503442 - DNA, 98 bp, Homo sapiens
atctcgagccagaggggaaagtatttgtggtaataacccttaccgggagtttcactgaagacaagttggatggcttgaggactggtactaaaaggaaa

SEQ ID NO: 503443 - DNA, 98 bp, Homo sapiens
aagacattccccttggcatcagggctgaagtggctgcgatttatgagccacctcagatctgcgatgagctgggagtgaagcggccatcttctgtgaaa

SEQ ID NO: 503444 - DNA, 101 bp, Homo sapiens
tccgctaccgcgcgtgcgggattccggcgccgctctccgagctcgatccgctgctcgcacgggagccagctgggtggaagaggcagaaatccaggcagaac

SEQ ID NO: 503445 - DNA, 100 bp, Homo sapiens
ttggagcccattttagaggcatctgttctatcttcccatcataaaaaagacaaaaagttgaaactgttggcagaaacccaaagtcaatattgaagccaag

SEQ ID NO: 503446 - DNA, 146 bp, Homo sapiens
gaggagatggatgaatgtgagcaggcgctggctgctgagcccaaggccaaggaccccttcgctcacctgcccaagaggtgtcagttgtacccgaggcgttctcagcagcagcaagtacctgtggtggatttccaggctgaactgag

SEQ ID NO: 503447 - DNA, 103 bp, Homo sapiens
cggagctcgtccagctgcgtgcctagagcatgcaagcggcaagatgtcctacagatgaattatctttaaccaattgtgcagttgtgaatgaaaaggatttcca

SEQ ID NO: 503448 - DNA, 75 bp, Homo sapiens
cgccgctcaccccgcggccgcaccttcccgccttctcagcggtgcagcgcggccgcatcccgcactcgctgcctg

SEQ ID NO: 503449 - DNA, 82 bp, Homo sapiens
ggcaccaggagtttactagatttgttcctaaatttaagcgagaattagaactgcagcgtcagcgtgacttgcataagatcaa

SEQ ID NO: 503450 - DNA, 82 bp, Homo sapiens
tccaccccttccacgtcatccgcatcaacaagatgttgtcctgtgctggggctgacagcaattttccagattattcaaagta

SEQ ID NO: 503451 - DNA, 73 bp, Homo sapiens
cccttccgggagcctagatcctgtgctttactctgaagactcgttggttacatcacttgctgagttgtatgac

SEQ ID NO: 503452 - DNA, 100 bp, Homo sapiens
ctcactgcagaggtgctggagctggcaggtggcagtagagaagagcatcacagaagttgctcaggagctgacagagctggtggaacatcttgtagacatt

SEQ ID NO: 503453 - DNA, 98 bp, Homo sapiens
gaaaatctccccggtgactttcagtccaaaagaaactcttccttcaaaacctgtgaagaaagagaaggaacagaggacacgtcacttactcacagacc

SEQ ID NO: 503454 - DNA, 82 bp, Homo sapiens
gggacaccgagtgacacgcaggagcttcgggacagcctacatgcaagaaagcacttcagccaagcagaagggagccagctgg

SEQ ID NO: 503455 - DNA, 90 bp, Homo sapiens
tggagcagaggaaacgagttactcagatcctgcaaagtcctgaaacctgtccagtttaagtcgtcttggtctgagatataacagactgtc

SEQ ID NO: 503456 - DNA, 99 bp, Homo sapiens
gcagcatctcagcccaagagaagcaaatctcctgttcccgttaactctgatgatagtcctcaacaaacttcaagggcaaagagtgctaaaggggttctt

SEQ ID NO: 503457 - DNA, 82 bp, Homo sapiens
agcgaacctcgagaccaacgtggaggagctgtgggtggaaggtgacttaagagattaaaattaatttggttgctgttggttc

SEQ ID NO: 503458 - DNA, 82 bp, Homo sapiens
ccccctacccgcttctcgtagtcctgggagcacagcagaagttgtaaacaggaacatcgataagtagtgtaaaaacttgcac

SEQ ID NO: 503459 - DNA, 105 bp, Homo sapiens
cgaattctggtgaaaaaggaagaattgacccttgaaggaatcaaacagttttatattaatgttgagagagaggccactggagaatgcacggcaaccgtggggaag

SEQ ID NO: 503460 - DNA, 96 bp, Homo sapiens
tatacagagatgtcatgttggagaactacaggaacttggttgaaaggattgtagacaagaggaagaacaagaaaggaaaatgggagtatcttatcc

SEQ ID NO: 503461 - DNA, 73 bp, Homo sapiens
ggagaggctgctgtggaggctgaggaggcggcggcggagatctgggtataccaagcttggctacgcaggcaac

SEQ ID NO: 503462 - DNA, 101 bp, Homo sapiens
agcatcgcgtggtaccagtgccgctgggcacactggcttcacgccggctccgcctcaccagcaagcgcattcccaggtcttaggagggaatgattccccag

SEQ ID NO: 503463 - DNA, 82 bp, Homo sapiens
ctgccgttcagcacccgtcgagcgaactgtggctgcaccatctgtcttcatcttcccgccatctgatgagcagttgaaatct

SEQ ID NO: 503464 - DNA, 50 bp, Homo sapiens
ctgaccctgggagacatcgacggtcatcatcagatttgaaatatttaaag

SEQ ID NO: 503465 - DNA, 100 bp, Homo sapiens
cctgaacctgcacctccatcacgacccattcaggagcctccaggagcccagacaccagccccccaccatgaaagaaatgaccgcccggatgtgccactga

SEQ ID NO: 503466 - DNA, 100 bp, Homo sapiens
ctaccctggaaggggtttcggactactattctcagttgatctacaagccttctccactcgtctgtttgctgtcctgagatttgaaagtgttatccatgag

SEQ ID NO: 503467 - DNA, 75 bp, Homo sapiens
tctgacagaactcattctcaccaataatagtctcgtggaactgacagcatgagtatctatgacgatattgatgct

SEQ ID NO: 503468 - DNA, 83 bp, Homo sapiens
ctatgtgctgtgtccggacaacggctgcggcgacaattttgtttttagaacttcagccataaaaatgggcagaattttccttg

SEQ ID NO: 503469 - DNA, 80 bp, Homo sapiens
gttttctcagccaggcggcggcggcgactggcaatgtttggcctcaaaagaaacgcgacacctagctcccctgtttgaca

SEQ ID NO: 503470 - DNA, 97 bp, Homo sapiens
accccccactcgcagtccccaaggtgtcatggagaaactccagctgggcccagagattctgcagcgggaaaatccaaggcttatttatgccaggctg

SEQ ID NO: 503471 - DNA, 100 bp, Homo sapiens
atatcactcttgcttattctgagggttacacatcattttggaatgactgtatatcatctggattacgtggctgtatgttaattgaattagcattgagagg

SEQ ID NO: 503472 - DNA, 96 bp, Homo sapiens
ggaagatggtgttgctgagagtgttaattctgctcctctcctgggcggcggggatgggagaataatccagaatggctactctgatctatgttgata

SEQ ID NO: 503473 - DNA, 100 bp, Homo sapiens
cggcgccggcctccggggagaaacgcgcgttccttcacctcgggcagaataactttgcagaagcccacaggttcttcacagagatcttaaggatggatcc

SEQ ID NO: 503474 - DNA, 97 bp, Homo sapiens
gctgtattagcaaaaccattcatttttgctgataaacccttgatagttcatgagtccattcttgcacaccgagaaaatatgcgacagatgataagaa

SEQ ID NO: 503475 - DNA, 75 bp, Homo sapiens
tgtctcgaacccaatttatgacaaccatctgctgatttgggtcctactttaatgacaagacctggacaaccagca

SEQ ID NO: 503476 - DNA, 100 bp, Homo sapiens
agtcatgcctgcacagtcacctcgagaagatgaagaaagcagcattcagggtaactaaggaagtggatgctacatctaaagaggccaaatccttcttcaa

SEQ ID NO: 503477 - DNA, 97 bp, Homo sapiens
tcaaacttgggaataaaaagtattgtaacagctgaagtgtcttcaatgcctgcttcaaaagcggcgccaggaaattgaacaaaaacttgaagttcag

SEQ ID NO: 503478 - DNA, 74 bp, Homo sapiens
gaaggatacaaatggttcacagttcttcatgagttaagaagtttccattattttgctccaaaccagaagactct

SEQ ID NO: 503479 - DNA, 75 bp, Homo sapiens
cgacatcgacgccgcctggcaggccctgcgcaccagaaaaatggctacaaacttcctagcacatgagaagatctg

SEQ ID NO: 503480 - DNA, 100 bp, Homo sapiens
atttaggccccagcacactcagagacagggaggtggttgactcaatggttcagcattttaaagtaactatatttggagaccgtagaccagtttatgatgg

SEQ ID NO: 503481 - DNA, 80 bp, Homo sapiens
cggcaggctgagaaaagcgagaccgcgtgcgaggaccggagaacgtatttaccgggcagtcaaagatctattcctacatg

SEQ ID NO: 503482 - DNA, 50 bp, Homo sapiens
gccccctcttcgcctcctccaggtagcacaggcggagtgcagcggaggcc

SEQ ID NO: 503483 - DNA, 100 bp, Homo sapiens
ggagaatggcatgctggtgacggacagtgcagggaagcaactgcagagccctgactataatgtggaatttttccgacagtttatactggttatgaatgct

SEQ ID NO: 503484 - DNA, 75 bp, Homo sapiens
cagcagtttgcctggtggtggaagaatgtctccttgctcgggtttcccccccagactgctgcttccccggatgag

SEQ ID NO: 503485 - DNA, 89 bp, Homo sapiens
attatcgtaggaggagtcctccacctcgtcgcaggaccaggcctcctcttcccacctgtccagcagcatgaaagcagcatgattggccg

SEQ ID NO: 503486 - DNA, 75 bp, Homo sapiens
ggcagtccgagccctgaagaacaacagtaatgatattgtaaatgcgattatgaagtgatgagagcctatttacaa

SEQ ID NO: 503487 - DNA, 104 bp, Homo sapiens
atcagactgctgtgagagaagagatgattctcctggcaaactacttggatagtagtgtagcttccattggcaatactttaaacagcgtccatcttgctgtggaa

SEQ ID NO: 503488 - DNA, 100 bp, Homo sapiens
cactcagtacaacatccagaaaaaagcgatgactgtgaaggagttcaggcagctggccaacagtggcaactgaaggaagaggatcaccttccaagacaaa

SEQ ID NO: 503489 - DNA, 50 bp, Homo sapiens
aaggattccaagtaactcttatttggtcatgcaaggatcagatgtgagag

SEQ ID NO: 503490 - DNA, 90 bp, Homo sapiens
cgcgcagttaggcagcagcagccgcggagcagtagccgccgtgggagggagccatgaagcattacgagacctggagtggaagatcattta

SEQ ID NO: 503491 - DNA, 92 bp, Homo sapiens
ccagcccccaaagagtgcagagacctcactatgtggcaccatttattgagtttctgaaggccatacaagatggaacaatagttttaatggga

SEQ ID NO: 503492 - DNA, 75 bp, Homo sapiens
ccctcatcgagctcttcgtcaagggactgcccatgaattcaagaagcattttgaattgccaattttgaagggtcg

SEQ ID NO: 503493 - DNA, 88 bp, Homo sapiens
gatcacgcagctggctggcttcagtggaccacgatgtgcattttgtaagcactttggagccactatcaaatgctgtgaagagaaatgt

SEQ ID NO: 503494 - DNA, 75 bp, Homo sapiens
cttcgcagtctggaaagctttaggagttcacagtgccttttctgatgccattaaaaaatggcaggagctatcacc

SEQ ID NO: 503495 - DNA, 100 bp, Homo sapiens
gcgtcagggacacggggtgctgcgctgcgccgacggctccacctacaaggctgacccagctggatgttgacagccacctggcccagtgcttggccgaaag

SEQ ID NO: 503496 - DNA, 83 bp, Homo sapiens
ctgccgaacagagcttcctgttctccagggaggaggcggacacgctcagctacgagttccagggagctctgtcctggtgaccg

SEQ ID NO: 503497 - DNA, 74 bp, Homo sapiens
atggcggcggcgtctgtctctgcggcttctggttctcacttgtcggcccgataaaagtgaaggatgtaatagat

SEQ ID NO: 503498 - DNA, 98 bp, Homo sapiens
cagtgacgttttccacaggcatcaaaatggttttcctttggaatatggataaatacaccatgatacggaaactagaaggacatcaccatgatgtggta

SEQ ID NO: 503499 - DNA, 101 bp, Homo sapiens
agcacagttcctgggaaggtggagccaccagcctctccttgcacccttacccttctgaagaacagaaaaagcagttggcacaagacacgggactcaccatc

SEQ ID NO: 503500 - DNA, 50 bp, Homo sapiens
ccacttgaccttgcacatatagtgtcagcccaaggccaaccccactgtca

SEQ ID NO: 503501 - DNA, 75 bp, Homo sapiens
aaaactacagttctgtcactcacttacacagtattgggaaatctgtgaaaggctttcagtccagtgtaaagctgt

SEQ ID NO: 503502 - DNA, 50 bp, Homo sapiens
cgaggagagaaaagtctctaagtttgtgtattcccacgagcattctgctg

SEQ ID NO: 503503 - DNA, 74 bp, Homo sapiens
aaatattaaaggtgattggtcgaggagcttttggggaggttttaaaatcaaagatgggaaaatcggagaaaatt

SEQ ID NO: 503504 - DNA, 50 bp, Homo sapiens
gcagctgtactaggactgggaacgggtcagctacacaacctggatcttac

SEQ ID NO: 503505 - DNA, 123 bp, Homo sapiens
cttcccaggaccctcagggagagcgggcagccttccaggtggacagccggagcggttgcagggcacacattactcggtgcagtcggacatctggagcatgggcctgtccctggtggagctggc

SEQ ID NO: 503506 - DNA, 74 bp, Homo sapiens
cgacagaggatgccgaaccactccagatctttccaattaaagatgtacccctggagactgatgaccttaccact

SEQ ID NO: 503507 - DNA, 100 bp, Homo sapiens
gtgtcatcctccacagctccagggaaggcactcaaaagtggggggcaggaaaggtcttcatcctccaggtccacctttagcaagacctattctcccccga

SEQ ID NO: 503508 - DNA, 75 bp, Homo sapiens
catcaaggacaaacccaccttcatcaaaggggctgtggatctttccattgatgagtccagcttgacaggtgagac

SEQ ID NO: 503509 - DNA, 96 bp, Homo sapiens
ggttggtgggggagccctgccctcctggttcggcctccccgcgcactagaacgccacagcatgttccgaagagatgattggaagatggaagtggag

SEQ ID NO: 503510 - DNA, 75 bp, Homo sapiens
gcagattttgaaaccgatgagaagattgtaaaatgtaccgagcaactttgcctgactgcttcaaaatttgtggcg

SEQ ID NO: 503511 - DNA, 75 bp, Homo sapiens
ggccacatatatgcgaatctataagaaaggtgatattgtagacatcaaggtggtcctggctctgccatatgacac

SEQ ID NO: 503512 - DNA, 75 bp, Homo sapiens
tcttcttgacagccttatggttaaggcttacagcttcgccatgggctgctggcccaagaatggacttctagacat

SEQ ID NO: 503513 - DNA, 90 bp, Homo sapiens
gaagttcaagatggccgccgcggagacccagtcgctacgggagcagccagattccagtctcatcagattttccatgtcctggtggtggca

SEQ ID NO: 503514 - DNA, 83 bp, Homo sapiens
gcatacatctttcttcgacaaaggacttcccaagtaagaagcggaagaggagccgctggaaccaagacacaatggaacagaag

SEQ ID NO: 503515 - DNA, 90 bp, Homo sapiens
ggctgaagaggaaataaaaacagaacaggaggtggtagagggcatggatatctctactcgctccaaagaacattgatgatggcacctcag

SEQ ID NO: 503516 - DNA, 75 bp, Homo sapiens
caaagatcctcgcaatgggaagtcatctgtgtagctgctggtgctgttggattagcacaaagagctttggatgaa

SEQ ID NO: 503517 - DNA, 100 bp, Homo sapiens
ggaaactgtttaaccggatcccattgtacccagagtgcagagccgcctttccagcatgcaggggctgctcaggtcctggatgcctcatcccttagtttca

SEQ ID NO: 503518 - DNA, 73 bp, Homo sapiens
acttctgctgggaccacaaggagaagagggcagcagagtcacagctgcaggtttgtctacagattttgagcgt

SEQ ID NO: 503519 - DNA, 90 bp, Homo sapiens
tttgtgcattcccaacatgctctaatgcttcagaatccacattcatctcaatggaaggatcctgccttaagtcaacttatttgtttttgc

SEQ ID NO: 503520 - DNA, 82 bp, Homo sapiens
tcctcgccgtgctcagtgcctgttacttgggcaccccgaggagctgtggctaaaggaagtggaggggccgtgggatgcggag

SEQ ID NO: 503521 - DNA, 100 bp, Homo sapiens
ggcggaggtcgataagctggaactgatggtgtcccgacccaggctaagcttgagcatggctgagcaggagcccacagccgagcagctggcccagattgca

SEQ ID NO: 503522 - DNA, 82 bp, Homo sapiens
gaggaaacgtcggaaactttagagaagttaagagaagaattagctatcaaatccggccagcaaacggggattcagcgtccga

SEQ ID NO: 503523 - DNA, 100 bp, Homo sapiens
agctgggggagactgtgcctgccgtccctacagtagatttggctagctgattggctgctgaaaaataatcctaacaaacccaaactttgtcaccatccaa

SEQ ID NO: 503524 - DNA, 83 bp, Homo sapiens
tggggttctgagactccctgtcccggaccgcaggttgcgaggggcggtgttgaagaatgtgtgggcgaacatcctgtcactta

SEQ ID NO: 503525 - DNA, 50 bp, Homo sapiens
aagacactccaagtttggcatgaaagagacaggatctccgtatgttgtcc

SEQ ID NO: 503526 - DNA, 75 bp, Homo sapiens
ttcattacaagtactcggcaagttgtcaggatgaaaggttgtatcaaagttcttaaggaccaacctcctaatagt

SEQ ID NO: 503527 - DNA, 75 bp, Homo sapiens
aggcttgtccatctgtaacttcattaagactctttttgatcagaacaatgctgcaaaaaaagaagagtcagaaac

SEQ ID NO: 503528 - DNA, 97 bp, Homo sapiens
tcgtctcagcagtgctcgggcgcaggggttggctgtgttccggccgcagagcaccgtctgcgtgaggagatcctggccaagttcctgcactggctga

SEQ ID NO: 503529 - DNA, 75 bp, Homo sapiens
cctttaactctccttatgctgggtgaaaacaaagcacgttcacgtccatgttcttcccaggaaggctggagactt

SEQ ID NO: 503530 - DNA, 82 bp, Homo sapiens
tgcacaacatggtgaaattattaaacatatggccaaactcctggacagtatcactcatttaaatcaaacggtattgagatgg

SEQ ID NO: 503531 - DNA, 100 bp, Homo sapiens
gggcggtgcaggaggccaaagaccactgtgatcctaaggcttcctggactgggtccccaagaagatgcagcgggtgggctgtgtggagctgctcaacacg

SEQ ID NO: 503532 - DNA, 113 bp, Homo sapiens
tagatcttgctggaagtgaaagaactaaccggaccagagcagaagggaacagattacgtgaagctggccctggccaacgtcaacattgggagcctcatctgcaatgtaggggc

SEQ ID NO: 503533 - DNA, 75 bp, Homo sapiens
ggttctggttcccgccggcgagcaagaagatccttataggaagaaaaagcttcaggagaaaagagaaggaaattt

SEQ ID NO: 503534 - DNA, 101 bp, Homo sapiens
gtcatcctcaaccaagaaatccgggagttggaacgtcaacaggagcaacttgtaaagggattgagtgttgctatagtgggacccacgtttcaagatttggc

SEQ ID NO: 503535 - DNA, 80 bp, Homo sapiens
aaggagaatgcagaccctcgacctccagtgcagttcccaacccatctgctggcaaggctaagattagaacagctcatagg

SEQ ID NO: 503536 - DNA, 90 bp, Homo sapiens
accgaacagaaatgctgtctgagagcaagaggtaaaaaacttgttgctgcaagtcaagctgccttaggcttataacatcacatttaaaag

SEQ ID NO: 503537 - DNA, 75 bp, Homo sapiens
cgacacacaaagaatagagttgagcctgtgggacacttcgggagcaggccgggctctcgccatgggtcactgtcg

SEQ ID NO: 503538 - DNA, 104 bp, Homo sapiens
ggaaccactcattcacttctagacgacaaaatgcaaaaaaggaggccaaagactttctggaataagctctgattatagccttgaagagatagatgaaaaggaag

SEQ ID NO: 503539 - DNA, 88 bp, Homo sapiens
tgcagccacgcgggcgagcggctgtgtggatgtcggcgaagccgcgggcgaggttcgtgctggccgtgggcagcgccgtctttgatgc

SEQ ID NO: 503540 - DNA, 120 bp, Homo sapiens
cggcacacagccgcgcagctgggcgagaagctgctccggcctagcctggcggagctccacgacgagctggaaaaggagaacggcctcaaggaagactaaccatctgcaatactagaagcc

SEQ ID NO: 503541 - DNA, 50 bp, Homo sapiens
aggacactatgcaatcacccgaaagaatacttcagagagtcagagttgtg

SEQ ID NO: 503542 - DNA, 100 bp, Homo sapiens
ggaacttcctgttctgatagcgtggaagcttcgcaaacctgggtatacttcatgtgacaaagaaaaaagtatttgaaacactggaagcacgaatgacaga

SEQ ID NO: 503543 - DNA, 80 bp, Homo sapiens
gcagttgactccctcaatggattggtttacataggtcaagctgaatcttctccatttgttgagcgacttctgaaaaaggg

SEQ ID NO: 503544 - DNA, 90 bp, Homo sapiens
ctgggaagatggcgaaggtctcagagctttacgatgtcacttgggaagtactatactggcaattgctggagaagattttgcaattgttgc

SEQ ID NO: 503545 - DNA, 88 bp, Homo sapiens
tatcaggttcacgccaacagtacctcattgctctttggcgactcttattggatgctgacagacagcaccaagaagtaattgcaattta

SEQ ID NO: 503546 - DNA, 100 bp, Homo sapiens
tctggagtaggtggtggaggtggcaagatgagacgagaaagaacacgctttgttgcttctaaacctctggaggaggagggagaaaatccccttcaacatt

SEQ ID NO: 503547 - DNA, 82 bp, Homo sapiens
cggtgtgcctcggcagccttgcgctgctctaatggtccggacttccgtgtgttttggctacgggcctccacctccaccgcca

SEQ ID NO: 503548 - DNA, 96 bp, Homo sapiens
ttaagaaaaatgcctcacattaaacatgtggatctaagtaattttatgcgtcaggagtgtttggattccagatttgtattcgatagaccactgcct

SEQ ID NO: 503549 - DNA, 100 bp, Homo sapiens
ccagctgccatgagcgagcgcctccgtcccagagggtgatgagacaggagtgatggataatctgctggaggccttgcagtccggggctgccttccgcgac

SEQ ID NO: 503550 - DNA, 75 bp, Homo sapiens
tgccacactcctggacttcatgtgccgcgcatctatcctttctctggtgacaaaaataaacaatgtgattgataa

SEQ ID NO: 503551 - DNA, 71 bp, Homo sapiens
ggagaacttttcgcttatggcctcagtagaacaaaatccagtctcatagcagaggagaatataatgtttac

SEQ ID NO: 503552 - DNA, 127 bp, Homo sapiens
ccgtccgccttctctgtcagctctttccccgtcagcatcccagccgtgctcacggtactccaaagattcaggtttactcacgtcatccagcagagaatggaaagtcaaatttcctgaattgctatgt

SEQ ID NO: 503553 - DNA, 83 bp, Homo sapiens
ctgtctgtccacgatagtgccaggcctatgttggagctgagcgggctttggacaccatgaactttgatgtgattaagggaaag

SEQ ID NO: 503554 - DNA, 98 bp, Homo sapiens
ttccctgggcatctctaagccaccaattgggttgcctgcacctgagcaaatacagcaagatgaacagactagccactttgcattgactggaaacaatg

SEQ ID NO: 503555 - DNA, 75 bp, Homo sapiens
caaggctttctgttaaaaagttattagaaggaggaaaaggtgacgatgcctggggagcctgtggacgtggcatgt

SEQ ID NO: 503556 - DNA, 96 bp, Homo sapiens
gaagctcaaggcacaggtggcccgatcccagcaggacattgaaagattgtaaaccatggctgtgtggatacaagctcagcagctccaaggagaagc

SEQ ID NO: 503557 - DNA, 75 bp, Homo sapiens
cttggactgagtcctgcaggacacaggtgatgagacaaaccatgcttctgccacatcaacacaggactttctgga

SEQ ID NO: 503558 - DNA, 75 bp, Homo sapiens
taaggattccaagtaactcttatttggatgtgatgcagcaggccaccaatgcaattcttaggggtggcaccattc

SEQ ID NO: 503559 - DNA, 50 bp, Homo sapiens
gaaggattcaccacctccaggaaaaggctacaagtgacgacaaagattct

SEQ ID NO: 503560 - DNA, 100 bp, Homo sapiens
gcagggtctgcacgaaataaagctcctgggcaaggggacgtctgcagctgatattaaaggtggaagaaggtccatatctttttctgtgggtgcttcaagt

SEQ ID NO: 503561 - DNA, 100 bp, Homo sapiens
agcttcagggcgtggtgccccggggcgtcaacctgcaagctctggacttattggacaaaatgttgacattcaacccacacaagaggattgaagtagaaca

SEQ ID NO: 503562 - DNA, 80 bp, Homo sapiens
ttcttcccaggaaggctggagactttcacaggaatgacagcatctatgaggagagtgttgcggagataggaacatgggag

SEQ ID NO: 503563 - DNA, 50 bp, Homo sapiens
cgtcctcatgtggggggtaaaccactcgattgataggcagcagtttgaag

SEQ ID NO: 503564 - DNA, 100 bp, Homo sapiens
gggagaagctggcctgggccaagcaatgagtcggatgtggtcgagagcctggatgaaatctaccacacggggacgtttgcccagatccatgagatgcagg

SEQ ID NO: 503565 - DNA, 100 bp, Homo sapiens
ctgaaatttacagaaacaaactacatctcaggatatggaggtaccacatggttctcagagcagcgaaagttttcagtttcaaccaccattacctcctgac

SEQ ID NO: 503566 - DNA, 83 bp, Homo sapiens
atttggagtgtgcgtgcgcgccgagcggctgaaggtgatgtggccgccctcaaccgacgcatccagctcgttgaggaggagtt

SEQ ID NO: 503567 - DNA, 100 bp, Homo sapiens
cattggatttaaaagacagtcctcgtcagcactgactttcagctatggaatcgcactatgagatgcttgctaatcgaacagctgcaaatggtcactgcat

SEQ ID NO: 503568 - DNA, 51 bp, Homo sapiens
atttctcctattgaggagtcaacggaaaccccaaagccacggagaaaatca

SEQ ID NO: 503569 - DNA, 82 bp, Homo sapiens
gaaataaggacaaaagccaagaggaggacagttcgctacacagcaatgcatcgagatatgcacccaatgtccagggagcgtg

SEQ ID NO: 503570 - DNA, 75 bp, Homo sapiens
ctgaccctgggagacatcgacgcctgcctgctccgcttcagcggactctcgctggtctacctgctcttcctgctg

SEQ ID NO: 503571 - DNA, 73 bp, Homo sapiens
acattttgcagcctgcaccggccaacggtgctggagaatctggtaaaagcaccattgtgaagcagatgaggat

SEQ ID NO: 503572 - DNA, 74 bp, Homo sapiens
cacggtggcaagcaagtttaatcagacctgctcacacttcagaatagagaagggcaagtgtccagagaatggct

SEQ ID NO: 503573 - DNA, 82 bp, Homo sapiens
gttgaacgtagtagagcaggtgcgggttcagatcatatctgaagatattagtgagctacaaaagaatcaaactacatctgta

SEQ ID NO: 503574 - DNA, 75 bp, Homo sapiens
gacggagctatcggcgccgcggcaagagccaggcccagggccccggccagtgcccagccccgctgggagacccgg

SEQ ID NO: 503575 - DNA, 100 bp, Homo sapiens
gaaaagcatgttaaatgtgatattagggaagatgcaagacttttttacagaactaagcctcatcttcatggtgccagtggcgtgtgggcttttcccacag

SEQ ID NO: 503576 - DNA, 102 bp, Homo sapiens
tgacaacagctgtcgtctctgggactgtgaaacaggacggcccccaagttacatgaactacctgctagactcacaccccagcaaaaatattgatgtccccag

SEQ ID NO: 503577 - DNA, 100 bp, Homo sapiens
tactccgctttcattggcatgttctggtggacgtcaggaggaaaatatgcccaggttaccaacaatcctgaaaatgatggatgtataaatgcagtcttac

SEQ ID NO: 503578 - DNA, 75 bp, Homo sapiens
tttcttcaaggcccggaggaaatgctaccactctcatcagaggaaggcaacagcccccaggggagcaaccaggga

SEQ ID NO: 503579 - DNA, 75 bp, Homo sapiens
acgcggccgcggagacctacctgcggcgtcggcagctgctgctccgaggttatgaagacagtatggagtttccag

SEQ ID NO: 503580 - DNA, 96 bp, Homo sapiens
ctgaccccgcagaagctgtggctgggaaccgcaaagccagcaagccacccgaggggactgcctggccttccagatgcgagctgggttgcttccctg

SEQ ID NO: 503581 - DNA, 75 bp, Homo sapiens
ccaacacaccagcccagacagctgcaagtcaccatggacgctgaagccagaagatcagctgccatgttacttgac

SEQ ID NO: 503582 - DNA, 75 bp, Homo sapiens
atttcttccaaggttgatgcatctctctcagagacttttggaacagcgatcgtaatcaatcctgagaaagacaaa

SEQ ID NO: 503583 - DNA, 51 bp, Homo sapiens
ttcgatgatcgtgtgtcggatgaggagaagaactcggcctgcatcttggcc

SEQ ID NO: 503584 - DNA, 100 bp, Homo sapiens
gtcctgacctttgccctggacagcgtggaacggaagctgctgatgtccagcaccaaggggctctactcagacactgaggatggagtgcaatggcgcgatc

SEQ ID NO: 503585 - DNA, 90 bp, Homo sapiens
gtcggctcggggttctccgggagagggggagtgcgcggcggccgcagctgccacaaaccagatgagttctggttctccgatgggtcctta

SEQ ID NO: 503586 - DNA, 51 bp, Homo sapiens
ctcaggagcctcctaaaaccacagagagcgcctgctcgctgtgcccccggg

SEQ ID NO: 503587 - DNA, 50 bp, Homo sapiens
ctgctgcaggtggcaagctctgagtttatgtggccgaggcagacaagtgg

SEQ ID NO: 503588 - DNA, 96 bp, Homo sapiens
agtgtgagcagagctctgccaggcagaaggcctctctcctgatacagcaggcgctcaccatgttccctggagtacgctggcatcaacccctcggac

SEQ ID NO: 503589 - DNA, 76 bp, Homo sapiens
caaacactggaatcctactttttcttacttggaccatgagactgtttcagccactttcatcgacagcagtggacag

SEQ ID NO: 503590 - DNA, 82 bp, Homo sapiens
ctcctgtatttgcagaatgaattctcggtgggacctttggggctttgttatgcacctaaagccatattggaagctccagaag

SEQ ID NO: 503591 - DNA, 75 bp, Homo sapiens
atttaatgttcctaatgaaatgaagttaaaactatgcttttcttgaagccctgcagactggagcaagacaacttg

SEQ ID NO: 503592 - DNA, 100 bp, Homo sapiens
ccatgtcccgctacctgcgtccccccaacacgtctctgttcgtcaggaacgtggccgacgacaccaggtgttgagatctgcatagccactcctggacgtc

SEQ ID NO: 503593 - DNA, 50 bp, Homo sapiens
ccgagaccgcggccgggaccgagggtcccgcacagtcgggcatcctggtg

SEQ ID NO: 503594 - DNA, 98 bp, Homo sapiens
caaggaccggcccttcatggggggccagaagccgaatctcgctgatttgattcttggtgccaccattgagaactccaggattgtcctgcagatcgaca

SEQ ID NO: 503595 - DNA, 99 bp, Homo sapiens
ctagtggttcttgtgggtattctcatctactggagacttcacagagaatgcagttgtcttgacttcaggtctgtctgttctgttggcaagtaaatgcag

SEQ ID NO: 503596 - DNA, 88 bp, Homo sapiens
cggtggaccttgctcgcgtgggcgcgtgcatcctgaagcatgcggtgaccggggaggagtttgtggggttcatgtggcggcagcgggg

SEQ ID NO: 503597 - DNA, 87 bp, Homo sapiens
gaaggcgacttcaagacgcggcccaaggtgtcccttggcggcgcgagcaggaaggtttgcctgcaatgagatttcattctctacatt

SEQ ID NO: 503598 - DNA, 109 bp, Homo sapiens
gcgagaagctgctccggcctagcctggcggagctccacgacgagctggaaaaggagttcgcagcacttactaaagaactcaatgtatgcagggaacagctccttgaaag

SEQ ID NO: 503599 - DNA, 95 bp, Homo sapiens
ggattccaacatcctgctagacttgttaagattagcctgaggcctgctcagtcgttcctaatgaataaaaatcaagtgccaaagcttcagcccca

SEQ ID NO: 503600 - DNA, 82 bp, Homo sapiens
gttagccagccacgaagttctcgcgagagtcgtctcctcgataccaaatgatatcatcaagttgaatcgaaaggaagggaag

SEQ ID NO: 503601 - DNA, 98 bp, Homo sapiens
gtccctttgcctcatcccaggttgccttggaaaatgccaacgccgtgtctgaaggtttgggccccatggtatccctgtgacagtatttcccaaaaggg

SEQ ID NO: 503602 - DNA, 100 bp, Homo sapiens
gcgctccctgcgtttcgggtggggccgcgcaggcaaggacaaggccacagagtcggggtcttcacgtgaataaccctataccttccaatttgaaatcaga

SEQ ID NO: 503603 - DNA, 100 bp, Homo sapiens
gcaaatgagatgaaccatcttcctgcacacagccaaagtctgcaaagggacatccaacgggctcatagagtggtagctgagcttcaggctgggacgtgct

SEQ ID NO: 503604 - DNA, 75 bp, Homo sapiens
gatgtttcaatattggaagcgctttgatttacagcagctgcaggccaggtcagagcagcccaccatgggatgggg

SEQ ID NO: 503605 - DNA, 100 bp, Homo sapiens
cttgccgttcacccgccggagagcctggccgtggttgctaacgcgaaaccaaatattgctatatggagatttgccaaaaaataaagaaaatataatatat

SEQ ID NO: 503606 - DNA, 100 bp, Homo sapiens
agatgctcccttctgctcctgaattaaatgtgagggagtctgacgtaagagtttgtgatgagtcatcatgtaaatatggaggagtctgtaaagaagatgg

SEQ ID NO: 503607 - DNA, 99 bp, Homo sapiens
catgcttcagtttttctatgcttatattcaaaggtctgcatgaatttgattccttgaaggatcctgaagtaaatgaatttcgaagaaaaatgcgcaaat

SEQ ID NO: 503608 - DNA, 82 bp, Homo sapiens
cttgggacccaccgctgccctcagctccgagtccagggcgagctgaaccttagccggccgatcgaggagcagggccccctgg

SEQ ID NO: 503609 - DNA, 50 bp, Homo sapiens
ctcatgaagaaatcagggatttcctcagttgacacttactttgacaaagg

SEQ ID NO: 503610 - DNA, 74 bp, Homo sapiens
ccgctcaccccgcggccgcaccttcccgccttctcagacggttgatgatgaagcgccggccgtgtaaatgaaga

SEQ ID NO: 503611 - DNA, 100 bp, Homo sapiens
gcctaacttcagttcctcccactactttcagcctcaccttcaagtactaaggctcgtacgtctgcatcgattatcttacgtggggcaaatgatttcatgt

SEQ ID NO: 503612 - DNA, 106 bp, Homo sapiens
gagagcgaaaccatcttcaagttagcagcgtttattttacaggcatagaatgtcaagctaaccaggcgtccgctacttcagaagagtgtactgtcgcatggggagt

SEQ ID NO: 503613 - DNA, 80 bp, Homo sapiens
tcagccaccctcgaccctgaactggaataattaggatgtaatccctgttcattactacttaatacctccaccaacaaaga

SEQ ID NO: 503614 - DNA, 82 bp, Homo sapiens
tcgaccaagagctgaagctgatcgttttgtaccaatggctagaagcagatcgtcatggcaagagccaaggtgctgcaaatac

SEQ ID NO: 503615 - DNA, 50 bp, Homo sapiens
ctgattctactgtgcaattcttggtaatagagggaaagctggctccattc

SEQ ID NO: 503616 - DNA, 100 bp, Homo sapiens
ggcggtcctggagctgctgcagcggccggggaacgcgcgctgcgcggactgcggcgccccgggccaccagcccctcgggttccaagatgcagctactgga

SEQ ID NO: 503617 - DNA, 82 bp, Homo sapiens
ggagctgcagtcggcactgctactgcgaagacagctggcaggttgattcttcaccacactgaaaccattaggaaaaatcctt

SEQ ID NO: 503618 - DNA, 90 bp, Homo sapiens
tgaaagagatcctggacctatgaatatccagtttgagccatcggatctaagatccaaaagtgtgctcatggataacatgaaacacctatt

SEQ ID NO: 503619 - DNA, 74 bp, Homo sapiens
ggcttcccccaaggaatatacaggctgggtccgatacgccgagcgggtgctgggtcgccccatcactgcccacc

SEQ ID NO: 503620 - DNA, 51 bp, Homo sapiens
cggtagatctccttgaatatccattaaaggcattaggatttcctgaaggac

SEQ ID NO: 503621 - DNA, 75 bp, Homo sapiens
ccgtaacctgcgggagaggtttggaattgatgatcaagatttccaggatgtgtttcacatggtagttgaagtacc

SEQ ID NO: 503622 - DNA, 101 bp, Homo sapiens
aagtacactgaaattcatcctgagatgaggtacaccaggggttggaaaaaccacactaggcaaagaacttgcgtcaaaatcaggactgaaatacattaatg

SEQ ID NO: 503623 - DNA, 75 bp, Homo sapiens
gccaggtcttcaaggagcccaagatggtgagaagccctaccactgcaactgggacggctgcggctggaagtttgc

SEQ ID NO: 503624 - DNA, 90 bp, Homo sapiens
acgtctgcggaagtgcagctgcctcagttcttagcgcaggtcctagcagaagatgtgactcagactgcctctgggtggggctggctggcc

SEQ ID NO: 503625 - DNA, 98 bp, Homo sapiens
cggaaagtcccctcgccgctggccaccagccttccagcccttacggcccacgccgtaatcctggtgaccgagaagttcgcctctacggaccaaacttc

SEQ ID NO: 503626 - DNA, 82 bp, Homo sapiens
ccgggaactccactttgtggcaccgtgagattctccaggaaacctgtaggaagtgtcagggactctggaaagaacataatgg

SEQ ID NO: 503627 - DNA, 114 bp, Homo sapiens
aaggaaatcatgtcaagcgaagccttgaaaaagctgccctgagacggtgtcccgccgaaagggacttgccatgaggtgttgaagccttgtttcactgagttggagagactggac

SEQ ID NO: 503628 - DNA, 100 bp, Homo sapiens
gatgcctgaagtgtagactgctgctagctgaataccatctgggagcataaaggtgacctgaaggtgccctgccagtcagcgtcgtcagcctctgccctgg

SEQ ID NO: 503629 - DNA, 100 bp, Homo sapiens
actgctggcaggctgccttccctgacccccagttacgcctggaatatgaaggcttccccgtcccggcctcattgctacgatttcagagtaccctggtaat

SEQ ID NO: 503630 - DNA, 90 bp, Homo sapiens
cttcttgcgggagaacatcaaggccagcaccggtgtacttctctgaagtaagatgatttgtcaaaaattctgtgtggttttgttacattg

SEQ ID NO: 503631 - DNA, 90 bp, Homo sapiens
cgcgtcttggtgggtctggagctggctgacaatgcaggcttcccatcgacggtcagtgcgcacgttgtaatcagctgaggccatgtcagg

SEQ ID NO: 503632 - DNA, 96 bp, Homo sapiens
gttcgaggccctgcggagctgcttcgccgctgcggagatgtcagtgaaaaaagggatccagaatgattactaacctatgactcccaacagtatgac

SEQ ID NO: 503633 - DNA, 99 bp, Homo sapiens
gactgcggagcctgcgggtcgccagcggccccgccgagagccggaggcaatggatgaacagagcgtggagctccagaacctgggtatcaacccagcaaa

SEQ ID NO: 503634 - DNA, 50 bp, Homo sapiens
cgcagtggtcgcttcttctccttgagtgtgaacatggctacgcctcttca

SEQ ID NO: 503635 - DNA, 75 bp, Homo sapiens
ctcagatgcctccatcaacaccaagcagcagtttcttaaccacggctgtggaagagatgaatggaaaagaaataa

SEQ ID NO: 503636 - DNA, 50 bp, Homo sapiens
accctatgtgggcaacctcatcaccaagtccttgctggtgcagacgaagc

SEQ ID NO: 503637 - DNA, 90 bp, Homo sapiens
ccttattattggccctccagatacactttagtccacctaatcatcctgtgaaagtggtttctctatggaaagctttgtttgcttcctaca

SEQ ID NO: 503638 - DNA, 100 bp, Homo sapiens
aagttcaaagggaccatcatcctgacagctgtgtactttgccctcagcatctcccttcatgtctgggtcatggagtctggttggaagcaaatgttttttt

SEQ ID NO: 503639 - DNA, 82 bp, Homo sapiens
cttccagaggctttgtggtgcgggacgcaccctggaccgccagcagcagtgagaaggctttatcctgtggataaacgcagag

SEQ ID NO: 503640 - DNA, 100 bp, Homo sapiens
gccggatggtgctggccacttgcttgggatcctttatcctggtcatcttctatttccaaagtatgttgcacccagtgtactaatggtcacttgatgtgcg

SEQ ID NO: 503641 - DNA, 58 bp, Homo sapiens
cggagccaagatgcgaatgggatattgatgatgttaagaagttcaaaccgggttacct

SEQ ID NO: 503642 - DNA, 100 bp, Homo sapiens
attctcctacacttcctatttatgaggtgatgtggaaacagctgtaaaatttgcaactcagcttattgacctgggagcagacattagtttgcggagtcgc

SEQ ID NO: 503643 - DNA, 89 bp, Homo sapiens
gctgagcgtcggcgccggggttcggtggcctctagtgagatctggagtcacccacaaaagctgtatataatgccagacattggaatcat

SEQ ID NO: 503644 - DNA, 53 bp, Homo sapiens
agtggacattttggtctttgtccgcgggtgaacagggatattgtgtcaggcct

SEQ ID NO: 503645 - DNA, 75 bp, Homo sapiens
ttcagacccatttccagtcatgaaaatcatgagtggaggatctcaagtccacattttttggggtgctccaattgc

SEQ ID NO: 503646 - DNA, 82 bp, Homo sapiens
tgctaacagaactggaccttttcggtactccaaagattcaggtttactcacgtcatccagcagagaatggaaagtcaaattt

SEQ ID NO: 503647 - DNA, 100 bp, Homo sapiens
taacccttaccacccagcagcagggcatcaagtttaatagaaaatggtcagcttgaaattgtgacaggtggctgggttatgcctgatgaagctactccac

SEQ ID NO: 503648 - DNA, 74 bp, Homo sapiens
tcgtcggacacgctgaagctgcagaagaaggcgcgcaaagcccttccccaacagcaccaacttgctgcccacgg

SEQ ID NO: 503649 - DNA, 75 bp, Homo sapiens
cctcaacatcccggagcagctgccacaatgggacatgtgcaaaggtcatgacgccagtcagatcacactagcctt

SEQ ID NO: 503650 - DNA, 100 bp, Homo sapiens
gtgctgggattataggcgtgagccaccgtgcctggctgaaggacaggcgacactaacaggtgaagatctcgggagaccatgactaagaaaagaattgctg

SEQ ID NO: 503651 - DNA, 74 bp, Homo sapiens
aagtggccatggggagcctcagcggtctgcgcctggcagcaggtcttaaccatgaacttctctggaggagggag

SEQ ID NO: 503652 - DNA, 74 bp, Homo sapiens
atgagaagagtgttcaaaattcaattacacacatgttggcagataaattgaacatgactccagaagaagctgaa

SEQ ID NO: 503653 - DNA, 82 bp, Homo sapiens
ggagatggtgcagaagatggaggagctgcaagctttcttcctggtggcagatgacatcatggattcatcccttacccgccgg

SEQ ID NO: 503654 - DNA, 74 bp, Homo sapiens
ttccttcttccggaagttacgtctgattcgaggagagaccttggaaattgggttgtaaagaagaaagttctacc

SEQ ID NO: 503655 - DNA, 80 bp, Homo sapiens
ctcaggcttgcccatggtgtcagactaaaggcaaacaaggactctctgtataaggtggataatattaatgcagctgtgat

SEQ ID NO: 503656 - DNA, 75 bp, Homo sapiens
cagcacagtcgggggtgtaggttatgggggagcccagtttcctccaattgcagcacaagaccttccttttgttct

SEQ ID NO: 503657 - DNA, 50 bp, Homo sapiens
gagccccttcctgagaagatcccaggagctggtggtggctctgagtcatc

SEQ ID NO: 503658 - DNA, 75 bp, Homo sapiens
tggaagcagccgatccagcctgcggagcctgtggggcagaatgattacggacctgaagccaaagaacaagatgcg

SEQ ID NO: 503659 - DNA, 82 bp, Homo sapiens
cggggacttcggcggcggcgcctcaggcacctcggcccggggaagagcatggaggaaatcaagaaggtgctgctgctggtgc

SEQ ID NO: 503660 - DNA, 98 bp, Homo sapiens
tttaccttgtgatgcacctgggattaaccagcgaggatcaggtcatctccgcggtgtcgaggctctccctgcacagcatcgcgcagaacaaagggatc

SEQ ID NO: 503661 - DNA, 75 bp, Homo sapiens
tgcatctactcggccctcattctgcacgacgatgaggtgacagtcacggtggatccataaagaacccagccaacc

SEQ ID NO: 503662 - DNA, 83 bp, Homo sapiens
gagattaaagatgcagtacgccacggggccgctgctcaagttccagatttgagtctcccccccctccttactccagatacccg

SEQ ID NO: 503663 - DNA, 100 bp, Homo sapiens
tggacacgctactttagctaaggcatgaccagcaatgaacagtagtaagggaactctaatgatccaggacaaagaagttaccctggagtatgtatcaagc

SEQ ID NO: 503664 - DNA, 89 bp, Homo sapiens
caacaataagaaactcctgggccgcgtgaaggccttcgatagccaagacaatgcaaactccagtgaacattcccgtgcctgtgctccgg

SEQ ID NO: 503665 - DNA, 100 bp, Homo sapiens
gagaagagatcacagaaacgtgaggatcaagaagccggactacaaggtcgcctacgtgcagctggttcgagaacttgtcttggacaattgcaaatcaaat

SEQ ID NO: 503666 - DNA, 75 bp, Homo sapiens
aggatgccgaggagaaaacagcaggcacccaagcgggcggcagggcaccatgccggtggaaaggatgcgcatgcg

SEQ ID NO: 503667 - DNA, 112 bp, Homo sapiens
gaaaggaagcaagcagttcagaagagccaaggaataaacatgcaatgaacccaaaaggattgcccccgaggaattagcacttgttcacaacttgaggaaaatgatgaaaaat

SEQ ID NO: 503668 - DNA, 90 bp, Homo sapiens
cgaagatcttatctgccctatttgcagtggagtcttggaggagccagtacaggtggacccaagtggagagattgtggaactggcgaaagg

SEQ ID NO: 503669 - DNA, 100 bp, Homo sapiens
cctgagcagtgcagaaaattccttgtctggaagctgccaatccttggacagctatatcgagaagtttactgactttcttcggctctttgtgagtgttcac

SEQ ID NO: 503670 - DNA, 100 bp, Homo sapiens
attttgtggaattcgtgaaacttgtccgtgccaaatttcctgaacacaccattatgcatgcttttcacttccactgcatctctcgctggctcaaaacacg

SEQ ID NO: 503671 - DNA, 100 bp, Homo sapiens
ctgatcccaaaattattgaaaacactcgaagggtgcatcatttctggcatggcttcaggaagcattgtgctattttacaacgactttaaccggtggcatc

SEQ ID NO: 503672 - DNA, 83 bp, Homo sapiens
tcctaatgcaactactttagaagaaacgacaccattgtttttagctctggatgagggggatattgccttgttgaaaacttatg

SEQ ID NO: 503673 - DNA, 96 bp, Homo sapiens
gaagttaatgtttacggcgaagtctactcaacgtttccaaggaacggagctttgactgtaagatctgtgggaagagcttcaagaggtcatccacac

SEQ ID NO: 503674 - DNA, 100 bp, Homo sapiens
caaggatggtgcagattttggcagattatggctttgtccccacccagcactgatgatattataaagtgtaattagcatggtcaatgcgggagcgatgagt

SEQ ID NO: 503675 - DNA, 97 bp, Homo sapiens
actcacactcctgggagccggctccagggctgaccagggtcgcctcctggactgcgtggtgcgatggggaagcctcactgaagggaagatcagggcg

SEQ ID NO: 503676 - DNA, 100 bp, Homo sapiens
ccaagacctcatcaacaattaaggaagagttacaggccaacctggacctgatccaaacctacagaatgcatattgcccaagacatcaaccaagacaacct

SEQ ID NO: 503677 - DNA, 50 bp, Homo sapiens
caggattcttctttgcagcaacttctccatatacaacctcaactccaaac

SEQ ID NO: 503678 - DNA, 83 bp, Homo sapiens
gcccggccggacccgggcccgaggaaccatcactgttgctggaggcacctgacaaatcctagcgaatttttggagcatctcca

SEQ ID NO: 503679 - DNA, 98 bp, Homo sapiens
agagcctcatccacaccgtgttgctgcaaaaggactatcaggtccctcgccggctccctcggggcctccactgcagcgcagctgcccatagctctgaa

SEQ ID NO: 503680 - DNA, 82 bp, Homo sapiens
ggagcagaaggactcggacacagcttcgagagctgtgcccaggagtgaacaaccagccctacctctgtgagagtggtcactg

SEQ ID NO: 503681 - DNA, 75 bp, Homo sapiens
gcagtggtcgcttcttctccttgaggggtctggttgctgcttacagtggtgacagtgacaatgaggaggagctgg

SEQ ID NO: 503682 - DNA, 75 bp, Homo sapiens
gccttggagaacagcacgtccccgctgagtgattgccgtatccctcaaatcgaagatgctgagattcataacaag

SEQ ID NO: 503683 - DNA, 100 bp, Homo sapiens
gcggcagctgccctgcaaccacctgttccacgacggctgcatcgtgccctggctggagcagacaatgcctgtggaagacaagtcagaccccccagagggg

SEQ ID NO: 503684 - DNA, 99 bp, Homo sapiens
aaacccaaacaacatctcctgctattccttgggctgcctttcctgcagatacactgcctctaggactgggacagatagccactgagtacctgcttcaaa

SEQ ID NO: 503685 - DNA, 98 bp, Homo sapiens
ggaaagagtcctgcatggtttcaagggacgtaccaggaggatggtgcccagaatactcggtggagcaggcgcagcaggtgcttcaccagtcagtgtcc

SEQ ID NO: 503686 - DNA, 101 bp, Homo sapiens
ctacagtgttctcgacttcgtcgctggctgacaaacgggctcatcataatgcactggaacgaaaacgtagggaccacatcaaagacagctttcacagtttg

SEQ ID NO: 503687 - DNA, 97 bp, Homo sapiens
ctttccacgctatcctcaggctcatctgttttctgaagatgggaaaagccctttggacaagagccatgggaccacaccaccaccaccacaaccaata

SEQ ID NO: 503688 - DNA, 87 bp, Homo sapiens
agaacgcggctaaagttctgatgctgctactgtttgaacggtcttggatgaacagatggaagtctgctgttctgcatgaaggggaag

SEQ ID NO: 503689 - DNA, 96 bp, Homo sapiens
catcgcccggcccggccgcgcccgcggaaccagaccagcggggatctgatgagcttctttcttctggcatcattaacggaccttttaccatgaata

SEQ ID NO: 503690 - DNA, 100 bp, Homo sapiens
acttgagcgacatggagaacgaattctactatcgctacccaagaaagaccacagcaagattctttcattcgtctcctcctagcctgggggaccaggctcg

SEQ ID NO: 503691 - DNA, 97 bp, Homo sapiens
gacgaggggctccgggtcttccagagcgtgaagatcaagatcgtaagactttgaccccgacgcaggcttcagtgattgccgcggatcagaagcctga

SEQ ID NO: 503692 - DNA, 75 bp, Homo sapiens
tccacttcaccaccaggctcagaggttcaggacctggccatgggcacagatgctgagggagagaagatcaaggac

SEQ ID NO: 503693 - DNA, 73 bp, Homo sapiens
agtatttctcctataaccagatggtggcgtctttcagctatgatttaggcatagagaatcgtgatgccaccaa

SEQ ID NO: 503694 - DNA, 50 bp, Homo sapiens
cgacgaccgcccgacgtgcattcccggtcaaaatgcagatcttcgtgaaa

SEQ ID NO: 503695 - DNA, 82 bp, Homo sapiens
cctgggcgctccggtggcggcggagatttggtcgtattgggcgcctggtcaccagggctgcttttaactctggtaaagtgga

SEQ ID NO: 503696 - DNA, 97 bp, Homo sapiens
gagtggacattgctagcaatgagctcccaaagccatccaggtcgtgtacaacgtgggactctgcatttgtctgtttgatatcaccaaactggaggat

SEQ ID NO: 503697 - DNA, 83 bp, Homo sapiens
ctccccacatccctggttgttttgcttcagcctcagttgacggactggacaaagcttctatagcaaactcagatggccccaca

SEQ ID NO: 503698 - DNA, 49 bp, Homo sapiens
cagctgcctcagttcttagcgcagatcggcttcaccaccgaccctcgga

SEQ ID NO: 503699 - DNA, 101 bp, Homo sapiens
caccgctcccagaaatgcatgcgaccgatccccttctcccggaccccaggagccggcgcccccgccctgtaggcagctggctaagagtcttgggcaggctg

SEQ ID NO: 503700 - DNA, 100 bp, Homo sapiens
ggggatggcgtcccccgggggcccgtactgcacatcgtggtggtcggatttcaccacaagaagggctgccaggttgaagctccattcataccaaagttta

SEQ ID NO: 503701 - DNA, 75 bp, Homo sapiens
gagaatatgatacagatgtattcaaatggatcttcaaagattgagaggatccagaatccagatctctggaatagc

SEQ ID NO: 503702 - DNA, 111 bp, Homo sapiens
cccagaccctggagcctcagttggaagcagccgatccagcctgcggagcctgtggggcaggttgaaatcacaaagattagacacctttttagataggtgttcttcagcacc

SEQ ID NO: 503703 - DNA, 74 bp, Homo sapiens
tgtcttcaggctggaatgaacctggaagaaacttcaggttttgtggacaaactatttgaaagtctctatactaa

SEQ ID NO: 503704 - DNA, 53 bp, Homo sapiens
caccatcgaggatgaagacaccaaagcccttgcctggactccccttccagacc

SEQ ID NO: 503705 - DNA, 97 bp, Homo sapiens
ttaatgctaaatttgtgaatgctgtgtatgataccttacttaatactgtggtcattgggactcccacacttaaacaaagaaaggaaattctgcaagt

SEQ ID NO: 503706 - DNA, 80 bp, Homo sapiens
actttcctcggcaagaaatgtgtggccacagacctccaccagcacgaagtggacatcgttgtgtggcagataataccaac

SEQ ID NO: 503707 - DNA, 100 bp, Homo sapiens
ggcagacttggctaagaagaaaaatcttgattgttctaggttcacgagtactaatcttcagtcaaatgacaagggtattggacattttggaagattattg

SEQ ID NO: 503708 - DNA, 96 bp, Homo sapiens
agctattggatttcccacccagaatctttaggtaaatgagtccacctctggaggtatgaaggaggctatccagccctcacagaagtcatgaataaa

SEQ ID NO: 503709 - DNA, 83 bp, Homo sapiens
cctcgtccgacctcacaggccgacaagatacctctcgcatgtccacctcacagatgaacgagaagctgtgcagaagaaaacct

SEQ ID NO: 503710 - DNA, 100 bp, Homo sapiens
cagagatggagcactacggccagtggtcaggcggccggcatgaggtgaagcagatcctccgcaagcgccagatccgtccacactggatgttcgttctgga

SEQ ID NO: 503711 - DNA, 75 bp, Homo sapiens
gcaccaccaagggaggtggaggtggaatacagcactgtgccttcctgcaggaggaggtgcggcgggctgggctgg

SEQ ID NO: 503712 - DNA, 88 bp, Homo sapiens
ttgttttacagtctgttccgcatgatcgttataataaggtccctccttgtggtccatttctgggcaccatgggctccacagtgtgcac

SEQ ID NO: 503713 - DNA, 97 bp, Homo sapiens
gccttgatgtggtaggaaaaatccgcagagaaattcagaacctcaagcttttcaggcatcctcatataattaaactcatggcttctcgctgtttctg

SEQ ID NO: 503714 - DNA, 82 bp, Homo sapiens
cgggctccgggaaaactacactggccaggaacttgctactaccagcaccatgccctaccaatatccagcactgaccccggag

SEQ ID NO: 503715 - DNA, 74 bp, Homo sapiens
agaagacatacctgcccgctgtagatgagaaactcagggagctcactcagtgggtttgatgtggtggatgctgg

SEQ ID NO: 503716 - DNA, 100 bp, Homo sapiens
ccattctttgtcgtcttcctctcagaatatgtgggaatcattgtagtcaatcattttccagttctcagccgctcagttgtgatcaagggacacgtggttt

SEQ ID NO: 503717 - DNA, 50 bp, Homo sapiens
atctggaactgctgacacaatactcatgccccccactgatggatattacc

SEQ ID NO: 503718 - DNA, 100 bp, Homo sapiens
ctggaatcgccagctcccggcactgctacctctgacccaaagcagttgcaggacgaggagcggaggcggcagcagcagttagaagagatgcgcaagcggg

SEQ ID NO: 503719 - DNA, 75 bp, Homo sapiens
gttgctcttctccgccgcggcactgatccccacaggaaagtcgtggaaggcgctgacgctgtcccagaagaggcc

SEQ ID NO: 503720 - DNA, 75 bp, Homo sapiens
tcgcaagagcagccgcggcgccactgtgaatgaaaactttgccattgatttgatagcagagcagcccgtgagcga

SEQ ID NO: 503721 - DNA, 98 bp, Homo sapiens
tcttgacgaggctgcggtgtctgctgctattctccgagcttcgcaatggtctttggcaaagggaacacggcgttctggatcgtcttctccatcattca

SEQ ID NO: 503722 - DNA, 97 bp, Homo sapiens
aagagacgttaaaatacttccggatcgcttacacctgagacgaactacagaacagcacgtaccagaggtggaagtccaagtcaaacgcagaaggact

SEQ ID NO: 503723 - DNA, 100 bp, Homo sapiens
ctttggcagaattgaaaacacgagtggaaaagattgaatgtaacaagaggcataaaacagttctcactgaactacagcacctggctgcagtggaagaaag

SEQ ID NO: 503724 - DNA, 101 bp, Homo sapiens
catgtggaaggtgcgcgagctggtggacaaagcgccgaatacatcaagcaatggtaacatctttaaatgaagataatgaaagtgtaactgttgaatggata

SEQ ID NO: 503725 - DNA, 80 bp, Homo sapiens
cggacctcctcctctaccacccccaatcgaaaggtggttggaggcaaagtaaagaagcccggtaaacgtggtcggaagcc

SEQ ID NO: 503726 - DNA, 100 bp, Homo sapiens
cgagccctggaggtggggagaaaaggtcaagaagatcatgaaccaggtgttccagtccttacggagagagtttgagctggaggaatcttacaatggcagg

SEQ ID NO: 503727 - DNA, 80 bp, Homo sapiens
ttggccagggaactcaaacagcagatgcagcccaagaagatgaaaggattgttcttgttgacaacaaatgtaagtgtgcc

SEQ ID NO: 503728 - DNA, 100 bp, Homo sapiens
gctgtgcagcatcaaagaggcaggagagctccctctttgcccactagcagggcattagctggtgctgaagacagtggctgcttggcgagcctggatctcc

SEQ ID NO: 503729 - DNA, 101 bp, Homo sapiens
gtgctgctgtgttaacctggaggcattatggaacagaccaggtgataggtttgatcgagacagaccgttgagaggacgtggaggcccgagagggggtatgc

SEQ ID NO: 503730 - DNA, 100 bp, Homo sapiens
caatgagacagggcacaccaaactccatctgaaccgcatgcacgagtctctcatgctcttcgactccatctgtaacaacaagttcttcatcgatacctcc

SEQ ID NO: 503731 - DNA, 100 bp, Homo sapiens
atgaatgcaataattctccattgagaagagagaagaacattctcgaatacctagaatggggagctttgctggcagtagaacacgtgaaagacgatgtcag

SEQ ID NO: 503732 - DNA, 50 bp, Homo sapiens
caaaagacagctccagttttacagacccaacatgagtgaagtttcctgca

SEQ ID NO: 503733 - DNA, 74 bp, Homo sapiens
gactggggctgctcccatcattgatgtggtgcgatcggtcaaaatgcagatcttcgtgaaaacccttaccggca

SEQ ID NO: 503734 - DNA, 82 bp, Homo sapiens
cagcaacaacggggaagtcacccagcccccaaggattctgggggaggcctcaggtgacttaagagattaaaattaatttggt

SEQ ID NO: 503735 - DNA, 100 bp, Homo sapiens
aagccccctgcaggaactctacaacccaatccagggagtgcagcctgccacaggcgaggttgtgtttgatagtttccaggactctgcttctcgttcagag

SEQ ID NO: 503736 - DNA, 50 bp, Homo sapiens
tatgaccggcgtcgagaatttcaactgtgtcctgggtcatgaaacttaat

SEQ ID NO: 503737 - DNA, 83 bp, Homo sapiens
caagggaccaaggtggaaatcaaacgtgtggacactgccagcggctgcagccgacttggaatgacctgggagacaaatacaac

SEQ ID NO: 503738 - DNA, 98 bp, Homo sapiens
ttggagttcgcggtgcagatgacctgtcagagctgtgtggacgcggtgcgcaaatccctgcaaggggtggcaggtggaaaaggagggagctactctaa

SEQ ID NO: 503739 - DNA, 55 bp, Homo sapiens
tggagaaggaggtgctggccgcgagtcacgcagccctgttgcgcttccggcgcct

SEQ ID NO: 503740 - DNA, 75 bp, Homo sapiens
cggacttcaatgcccagtccccagctcgccagctatgccaccacgggctgttccctgaccctgcaccatacggag

SEQ ID NO: 503741 - DNA, 75 bp, Homo sapiens
ctgcttcacagtcactagaaaataaagaactatgcatccttaggaatgactgtcctcccaaaccgaaggaccctg

SEQ ID NO: 503742 - DNA, 78 bp, Homo sapiens
aacagcccaatctcctttctgggcaaacgttccaaggttatccaggtacctcaagggaagtacaaagttttgccaaca

SEQ ID NO: 503743 - DNA, 100 bp, Homo sapiens
taaccatggcctacagtctgaactcttctgctcaggagcgcctaataccacttgaattgaagaggagctgggcagcaaggctaagtttgccggcaggaac

SEQ ID NO: 503744 - DNA, 100 bp, Homo sapiens
aagctgcctgaatttgcctgtatactctcgttctgcgacttataaaggaccagacaaatcaaattagtggttttgacatctttccaggaacagcgtgagg

SEQ ID NO: 503745 - DNA, 80 bp, Homo sapiens
atgtttgggaacagctccatcaagggaacacagccgcacccgggtctgtgccagctgtggttggcagtgccctcctattg

SEQ ID NO: 503746 - DNA, 80 bp, Homo sapiens
cgccgccggtgtgaggcggcccgtcctggctcccttgtccgggaagcccgcccaggttatgcctccgcctcgttgccctg

SEQ ID NO: 503747 - DNA, 87 bp, Homo sapiens
ctctgggacgggaccgacgcctcggaccgggctgcgccgcgggagttcgaggtgatgatgaacagtctacacagatggctgcaagtt

SEQ ID NO: 503748 - DNA, 75 bp, Homo sapiens
ttttacagtggtgtagagtgcagtgcagctgaaaccagatctcagtggttcaatagcatccccagatgtcaaatt

SEQ ID NO: 503749 - DNA, 50 bp, Homo sapiens
gcggcgacctcatccacgccatgccagagacaaagcatggaggacacaag

SEQ ID NO: 503750 - DNA, 100 bp, Homo sapiens
acagatgaaaaccctgtacctcacgtattgtgccaatcacccttctgcagtgaatgtcctcacggaacacagccagagactgctgctactttgaaacgta

SEQ ID NO: 503751 - DNA, 101 bp, Homo sapiens
ggctcggcgaggccctcgagggcccagcgccttcatccccgtggaggaggtatcatgactggtgccttttattcagtctcaacgttattaaatcaaatgat

SEQ ID NO: 503752 - DNA, 51 bp, Homo sapiens
agggattatggtgtccagctggttgaggagacgaagaatgctgttcaagct

SEQ ID NO: 503753 - DNA, 100 bp, Homo sapiens
aacatcgccctgtggatgactgagtacctgaaccggcacctgcacacctggatccaggataacggaggctgggactcacaccacccggcaagaactgctc

SEQ ID NO: 503754 - DNA, 112 bp, Homo sapiens
agccaaggaattttgtgtttcttgccatcttacaagcacaagcccaccgtactgttgtgtggatctgtattcacttcgtactggggagatggtcaagtccattcaatttaag

SEQ ID NO: 503755 - DNA, 115 bp, Homo sapiens
tctaccttgtatgcctcaatttgctggatttaagcactgctgcactttatgaggcagaaggagaagacagcctgaagaagatgcagctgatggagcttgcgattctgaatggcac

SEQ ID NO: 503756 - DNA, 100 bp, Homo sapiens
ggaatttccttgtgcctccattcccgggaggggggagcggcgttggaggccaccgtttccaggttctaagctggtctatgtccatcaccttcttggagaa

SEQ ID NO: 503757 - DNA, 75 bp, Homo sapiens
aacattcaagtgaagcaaaagcctttcatgattattaactctgggtggattttaactacaactcttgtcctctcg

SEQ ID NO: 503758 - DNA, 100 bp, Homo sapiens
cagcggcctcggggaatggaagcggagaacgcgggcagggtgtaccagtgatggcaataagaaacaaaatgatatcagaaggactagacccagatcttct

SEQ ID NO: 503759 - DNA, 83 bp, Homo sapiens
tgttcgagaacgaccccgagacgaaatgctttgtggtctacagccacaccaccccaaatgtgcctgatcttgtctgatcttgg

SEQ ID NO: 503760 - DNA, 100 bp, Homo sapiens
acagcggggacggcacggcgcgcgcagatccagacatttaatgtggatgcaccatgccagaccgtggaagatttaacgaatggggttgtgatggcccagg

SEQ ID NO: 503761 - DNA, 98 bp, Homo sapiens
cagatgccctgttccaggaggacagctacaagaaacacctgaagcatcactgtaacaagttctctttgtaaagaatccttttctggtcaagtttcttc

SEQ ID NO: 503762 - DNA, 142 bp, Homo sapiens
gtggcccgggcgtccgctcctcagcggatgtggcagccccgagccatggctctcgccgtccgagtcgtttattgatgccatggacaatattaccaggcagaaccaattctacgatacccaagtcatcaaacaagaaaacgag

SEQ ID NO: 503763 - DNA, 75 bp, Homo sapiens
cgtgtgcgaggagtgcctcaaagtctacctgagcgcccagttgcaggacgaggagcggaggcggcagcagcagtt

SEQ ID NO: 503764 - DNA, 101 bp, Homo sapiens
ggcgtcctctcccggccctctcgcgctgcactgtctctccgacgcaagactgtcccggcccggagttgcatgctgagaatttgaaaaatgaagatgatgta

SEQ ID NO: 503765 - DNA, 90 bp, Homo sapiens
gggagccttgcgagctctgagcctgcctctgacccaggtggttatcactaggctaaaactggacaaagaccgcaaaaagatcctcgaacg

SEQ ID NO: 503766 - DNA, 100 bp, Homo sapiens
gatatgtttggtgaaaaaagcctgcattcattggtaaagagtcgtccttgtctactccactaccaaatgttgaagttcttcaagaatcagtcctttggag

SEQ ID NO: 503767 - DNA, 75 bp, Homo sapiens
gaaaatacaaatcacacgcataatggatgaaaggaaccgacaggagtcttttagtcctgctatacagctgcacct

SEQ ID NO: 503768 - DNA, 76 bp, Homo sapiens
gaaaacagcaggcacccaagcgggcggcagctgcctgctgaagatgaagtcttactacagaaattaagagaggaat

SEQ ID NO: 503769 - DNA, 121 bp, Homo sapiens
ggcaatttagccatctgtgtgattatcctcttgtttatcctggctgtcatcaatttaatagccatttatgccagtgttcttcctggagagttgatgagggggtacatgacccagtttccca

SEQ ID NO: 503770 - DNA, 83 bp, Homo sapiens
cagaagctggaggaggcagaaaaagctgcagatgagagtgagaggctctaagtatgcagtcatctccaaatggccagtttgta

SEQ ID NO: 503771 - DNA, 100 bp, Homo sapiens
tggagaagttgtttgaactcagtgaagcatatccaatcaacatgcataatgatctggaactgctgacacaatactcgttctctctttaggagcagatgtc

SEQ ID NO: 503772 - DNA, 96 bp, Homo sapiens
gattcaaaaacaattcaaggggagctgggctggatctcttatccatcacatggggtaaaaaaccatatatgggtttttattaattgccttattgaa

SEQ ID NO: 503773 - DNA, 101 bp, Homo sapiens
ttcagtttgcatctctccctcctttaaacagcttctccgggtctcagcatgggtggttctcttcccaaagtggaagccaaattcatcaattatgtgaagaa

SEQ ID NO: 503774 - DNA, 87 bp, Homo sapiens
tctgattgaagccaagaaaaaggatcaagtgactgctcaggaaattttccaagacaagctccactttgaggctctgatgaacattcc

SEQ ID NO: 503775 - DNA, 90 bp, Homo sapiens
tgatcagttcttacaattctcaaagcatggcccatactggcacagcctccaggttggcgggctcatctgcgctggggttctgtgcgccat

SEQ ID NO: 503776 - DNA, 100 bp, Homo sapiens
tcttcacttggcaaactcaacaagggctccatggagaacgagcctgtagcccttgaggaaactcagaagacagatcctgctatggaaccacggttcaaag

SEQ ID NO: 503777 - DNA, 96 bp, Homo sapiens
cgcccatccagctgaacccggcccccgacggctctgcagttaacgggaccagctctgcggagtccctggatggccggttgcaggtgtcccatcgga

SEQ ID NO: 503778 - DNA, 75 bp, Homo sapiens
tgaagccgagggagtcgtcttgagcgacagttggtgttggtattaggagatctgcacatcccacaccggtgcaac

SEQ ID NO: 503779 - DNA, 74 bp, Homo sapiens
cccggccgtcagcagcatgcaggatttgaaaaagggcgcatctatacgttcattggagaagtcgtcgtttctgt

SEQ ID NO: 503780 - DNA, 100 bp, Homo sapiens
cggtcggcactgtgcagagatcagagtactaagagacagatgggaaccaacaaatgtgccagccaggcaggtatgacagcttacgggactaggaggcatc

SEQ ID NO: 503781 - DNA, 87 bp, Homo sapiens
ccactccagtcggtgttgagcacggcgagcagtctcaggcctttagtgatgatggcctgttacatgaacagaatatggcaaaaatga

SEQ ID NO: 503782 - DNA, 90 bp, Homo sapiens
ccggcgccgtcgcgccactcctccgagtgcttttgaagatgatgatatcacgcacgttgaaggaagtgtagatcctattcgagatataga

SEQ ID NO: 503783 - DNA, 50 bp, Homo sapiens
ttcatgttttcctggaatatgatcaggatatatgcaaccattgtctccaa

SEQ ID NO: 503784 - DNA, 80 bp, Homo sapiens
gtaccaaaaacgtcaacaacagttttacggtccacaaggcgattacaatttccagtcccctaaccacagacctgactgca

SEQ ID NO: 503785 - DNA, 90 bp, Homo sapiens
atacggtgtctttacaggtcagtcaggacggatcccaacggcttcaatgactggaccttctccactgtgcgatgctggggggagagagcc

SEQ ID NO: 503786 - DNA, 83 bp, Homo sapiens
ctcgcgccggctatggccgtgccctggggctgagccctcagtgtcttgggacaaggtgcgcattcctggtgtgctgcagcgat

SEQ ID NO: 503787 - DNA, 100 bp, Homo sapiens
tcagcgcctacctgatctacttgtcccagcacacgcctgtggaggagcaggcccagcacagcgacctggccctggtcgacgtgttgatgcccaatgttgg

SEQ ID NO: 503788 - DNA, 82 bp, Homo sapiens
tcagggatcgtgaaggacgccagcatcatacaccggctgttcgaggccttgactgtagggaaatcgtggaacacatggtcca

SEQ ID NO: 503789 - DNA, 100 bp, Homo sapiens
gatttaagcactgctgcactttatgaggttagaggatgcattgggctcagtgaaaattcatgaaactaagtcaccagccttcagcaatctgagcaaagat

SEQ ID NO: 503790 - DNA, 82 bp, Homo sapiens
taattggagaaacaccaaaaggaatccgcaggttcgagaacttgtcttggacaattgcaaatcaaatgatggaaaaattgag

SEQ ID NO: 503791 - DNA, 100 bp, Homo sapiens
tggattctaaggcaacacttccttgaagaaacaagcttacagaggcggggtttcaccatgttgcccagactggtcttgaactcctgagcttaagcaatcc

SEQ ID NO: 503792 - DNA, 100 bp, Homo sapiens
aaatgcattgagcttgggtcaggacaattccatttggggaccagagatggacggtcactcagcctatggagggttacgactcactgattaaaaagaggga

SEQ ID NO: 503793 - DNA, 88 bp, Homo sapiens
gggcgcggcactgcgggtcccgattgctgcagccgcttgtcagtgtgatgaagattggcacccagggcagcgggtggcatgagacgtg

SEQ ID NO: 503794 - DNA, 80 bp, Homo sapiens
cggattatgaaagtgcagaagactcggaaggatgatggcgccacttcctcagtttcggcactcaagcgcctggaacggag

SEQ ID NO: 503795 - DNA, 75 bp, Homo sapiens
tcttatctactttggaggcctgtctggctcctttctctacacaggaggaactgtggctgcaccatctgtcttcat

SEQ ID NO: 503796 - DNA, 115 bp, Homo sapiens
atccgcggaggccgacaggattcgttggctgccgtccccgctgctgtgcattggacaatgcagatcttcgtgaagactctgactggtaagaccatcaccctcgaggttgagccca

SEQ ID NO: 503797 - DNA, 49 bp, Homo sapiens
aaagacaggctcttcacctgaaggcattgaatgccccagaggagcccga

SEQ ID NO: 503798 - DNA, 80 bp, Homo sapiens
cctggacagaacttcatgtgtctgtggcagtcttgtaaaaagatattagaaatggctactccccagtcaattttcatctt

SEQ ID NO: 503799 - DNA, 83 bp, Homo sapiens
gaaactcttcgactacttcaaccaggaggttttccgagacaacaacggcaccgcgatgaagatctccttcaacgacaaaagcc

SEQ ID NO: 503800 - DNA, 100 bp, Homo sapiens
cattcaaaaaaattaattcatagagatcttaagcctatggaccagctctcattgaacactgtcttttagaaaatggattctcgggtaatgtcaaagtgga

SEQ ID NO: 503801 - DNA, 100 bp, Homo sapiens
ttcgacctgaggaccaaggcacttactgctgccaggccggccaggacagcacccacacacggctgctggtagagggctgtgaacaaccggtccatccaac

SEQ ID NO: 503802 - DNA, 82 bp, Homo sapiens
aagttattggagtggtttaatgacccgagcctcagggataagataagccaatggacacgtcagtgttatctgaagaaggagg

SEQ ID NO: 503803 - DNA, 74 bp, Homo sapiens
gagaagctaaacaaccagctcctgagcctcccaaaccttacaggcggatgtcagatgggctttttctacaaaaa

SEQ ID NO: 503804 - DNA, 100 bp, Homo sapiens
cttggaatgaaacattatcccgtaacaccaggtgaagagtgcgacattgacataaatgaatgtgacagtaacccctgccaccatggtgggagctgcctgg

SEQ ID NO: 503805 - DNA, 50 bp, Homo sapiens
tcattgtccaggcctgcagaggtgggcaattgaaggaacagactaaaaat

SEQ ID NO: 503806 - DNA, 73 bp, Homo sapiens
gcagtgcagaagtccagggaatggctggcccagcagctgagatcacagctatgaggtgtcaggtcgcattgag

SEQ ID NO: 503807 - DNA, 75 bp, Homo sapiens
gccgccgccgcctcggccgaccagggacctgcccgcctgcggctgctccgggagattacctggggcaattgatgt

SEQ ID NO: 503808 - DNA, 110 bp, Homo sapiens
accgtatttcatctgtagcattcaagacttcaaactggaaagaatgtccagatgttgtttttggagaagaagaactacaaagttagagcaaatactcttatttataagaa

SEQ ID NO: 503809 - DNA, 92 bp, Homo sapiens
gctcgctggcaccccgaacgggttgcttcccccgctgcgagaggaacgcgttgtggtgatcagcagctcggaagactcagatgccgaaaact

SEQ ID NO: 503810 - DNA, 98 bp, Homo sapiens
tgatcctttgctattagcaataataccaaaatatcttcgtgcttccatgactaacttggtcaagatttcagatgcagaactccaggaagttgtaaaag

SEQ ID NO: 503811 - DNA, 82 bp, Homo sapiens
ctgcctactacagctatcagaataggaaccagtgaccttcaaggacgtggccgtggacttcacccaagaagagtgggggcag

SEQ ID NO: 503812 - DNA, 80 bp, Homo sapiens
agctatcaggggaagatatgcatcagttccatcgagccattactacagcggatgagaacatcccagcgaagatcctttct

SEQ ID NO: 503813 - DNA, 83 bp, Homo sapiens
cgggtccgggccccggggggtccagggtagcagtagctgatgtgcagtttggccccatgagatttcatcaagatcaacttcag

SEQ ID NO: 503814 - DNA, 75 bp, Homo sapiens
tccagaaagatggcatcatttttgccctcaaaagaaatggcagtgtatgtggtagaagaccaaagaagagatgag

SEQ ID NO: 503815 - DNA, 110 bp, Homo sapiens
cctggtcattcagactgcagttccccagtgattcgcctttgccagtctcatctcgtgtctgctttgttaagttccatgatccagactcagcagttgtggcacagcatctg

SEQ ID NO: 503816 - DNA, 87 bp, Homo sapiens
gaggacggcggcggaccggggcagccccgcgccctggccagatgggtgttcctgataaagaagggttaccaagacgtcgacacctcc

SEQ ID NO: 503817 - DNA, 51 bp, Homo sapiens
cacgaagggactgtgtattttaaatgcaggagacagtcttgctctgttgcc

SEQ ID NO: 503818 - DNA, 83 bp, Homo sapiens
tggcagccctgcatggagcaagtctgtcagcaccatctttctaacaacctgcctagagctggaacgttacctccagagcgagc

SEQ ID NO: 503819 - DNA, 98 bp, Homo sapiens
cctccacccagagctcttggacacaaaccggtatctttacttccatttgcagatcacaaaatttgtccaggatagacatagagctagaagaaacagac

SEQ ID NO: 503820 - DNA, 75 bp, Homo sapiens
atttcaccaaaatctgcaaatgtaaactgaaggacatcgcatgtttaaaatgctggtcccagattcgctgctgga

SEQ ID NO: 503821 - DNA, 75 bp, Homo sapiens
tcattctgactgacaactgcctttactactttgagtataccacggttaacgtccctaaaacccgccggactttct

SEQ ID NO: 503822 - DNA, 50 bp, Homo sapiens
aggcggtggcacatcacacaacaggtgttggcagagctgaaagagtacgc

SEQ ID NO: 503823 - DNA, 73 bp, Homo sapiens
agcgcgccctgcaggacctgcggaagacagcctgcagcctggacgcgcgggctcctgcttctgggtggccgtg

SEQ ID NO: 503824 - DNA, 100 bp, Homo sapiens
tggaatgacaggaatggcctcctcccttagctccctgttcttggacttgcctcctcatgcggcagcagcacgaggccgcggccctgaacgccgtgcagag

SEQ ID NO: 503825 - DNA, 51 bp, Homo sapiens
gcatccccaactggtccaaccgtccgggtcaaaatgcagatcttcgtgaaa

SEQ ID NO: 503826 - DNA, 82 bp, Homo sapiens
tggcaggagattatagctctgtatgagaaggacaacacctacttagttttcaccatggagcagctgagctcagcaaacaccc

SEQ ID NO: 503827 - DNA, 74 bp, Homo sapiens
gtcccggggccgacccggcccgtagtgtggaagcagcttcagacaaatttacatgtattggagaccagaccaga

SEQ ID NO: 503828 - DNA, 90 bp, Homo sapiens
tgcttctgggacagctctactgacggattccagacagcattggaaaagacatagaaaaggcttgccaatctatttatcctctccatgatg

SEQ ID NO: 503829 - DNA, 98 bp, Homo sapiens
cgcagagggggccagcgtcgagtccagcagcccggggcccaaaaagtcggacatgtgcgagggagctgagcacataacgacttacacgttcaatactc

SEQ ID NO: 503830 - DNA, 75 bp, Homo sapiens
gacgccctcaaccgcttcggcaagacggcgctgcagctccatgttcatgcatgtcttttaacccggaaacaagaa

SEQ ID NO: 503831 - DNA, 75 bp, Homo sapiens
tgacaacaggctgcgtcctggatttgggggaagcagaatctgaaactttctgaggagagcatttgagcttcagat

SEQ ID NO: 503832 - DNA, 100 bp, Homo sapiens
caaggccaagctctccaagttcagcatccccaagcagggggagactgcagctgaatatgtaaaatctcgactcccagaggcccttaaacagcatcttcag

SEQ ID NO: 503833 - DNA, 100 bp, Homo sapiens
aatcaagtagtgtttgccagagttgattgtgatcagcactcgttacagtgtttctgccacctctgtacaaaagacaattttacttgtgtgacagatgggc

SEQ ID NO: 503834 - DNA, 103 bp, Homo sapiens
tagagggcaataaatgccacatgagatgatcacctcagcagaaaactcttaccctgaaagaagcagatcccagttcaaaagtagccataagaaggaaggattc

SEQ ID NO: 503835 - DNA, 78 bp, Homo sapiens
tgctttcagtcctgaaaagctgaacgagggtggatccatgctgtgctcacttctcaggactgtatggcttttgggggg

SEQ ID NO: 503836 - DNA, 100 bp, Homo sapiens
atgccaacatcctgaccaagcccgatccaagaaccttctggactaatgatgatccagcacccgacagctacaaagtgcaagataagaaaaatgcctccag

SEQ ID NO: 503837 - DNA, 100 bp, Homo sapiens
caatggcgagatctgcgtcaacgtgctcaagagggactggacggctgagctgggcatccgacacgtactgctggatgaaatctgtaagtacagacctgag

SEQ ID NO: 503838 - DNA, 103 bp, Homo sapiens
ggatatagcagaagcagcagcagcaactcctgatttaggggcaatcgattacatgcccttacagtcggcctccctttggctatggaaattttccgagttcaat

SEQ ID NO: 503839 - DNA, 82 bp, Homo sapiens
gctgaggacacacccaggaaaagactcaggacggacaagcacagtcttcggaaggtgaaatgacaatggatgctctgttggc

SEQ ID NO: 503840 - DNA, 100 bp, Homo sapiens
cgggaagagaagatcatcgagcatttcaaacgggaacccgagcgtcatgttagggtgaagcagaggacctcagtgctgaacatgctaaggaggttggaca

SEQ ID NO: 503841 - DNA, 90 bp, Homo sapiens
ggaatctgccttctactccatcgtgggactcagcagccttggtgctcaggtgccagatgcaaaggctccttgccagaggcctccactcac

SEQ ID NO: 503842 - DNA, 82 bp, Homo sapiens
ctccattggatttaaaagacagtcctcgtcagcactgactttcagctatggaatcgggtactactacgacctcgatgactct

SEQ ID NO: 503843 - DNA, 75 bp, Homo sapiens
ccgcagtcggggcagccgctcgcccctcttttccatgtatccgtccaggtgcggccggccggacggacctactac

SEQ ID NO: 503844 - DNA, 76 bp, Homo sapiens
cgccgacatgaagaaagacgtgcggatcctgctggtgggagaacacctaatctgggagcctgcaagtgacaacagc

SEQ ID NO: 503845 - DNA, 98 bp, Homo sapiens
cgaccctgccctgcttcctggggactgctgctcttcctgtccagggaaggatggagacgctgaaggataagaccctgcaggagctggaggagttgcag

SEQ ID NO: 503846 - DNA, 75 bp, Homo sapiens
gccatgtgggtggtggttggctaaagttcggatgatgaaaggagaagagaaagaccatttatctgcgaattatgt

SEQ ID NO: 503847 - DNA, 75 bp, Homo sapiens
aattggactactgcttgctgcaaaggttcatatccagctttcagagtggcaccgtgcaatttttcttccacaggc

SEQ ID NO: 503848 - DNA, 100 bp, Homo sapiens
agctggctgacctgtacaagtccttcatcaaggactacccaggcccctacaaaggcttcagagtagatatctctgccaacatgaggacagaaggactggt

SEQ ID NO: 503849 - DNA, 98 bp, Homo sapiens
acgactcatttctgtttgttactttgagtctgaaaatgactgatctttgcagattatcctgtggaaggaaaatgcctaaagtcaaaagaagccggaaa

SEQ ID NO: 503850 - DNA, 50 bp, Homo sapiens
gggaccacaaatacgtgatttggagagagaaaatgtggacacagacttgc

SEQ ID NO: 503851 - DNA, 80 bp, Homo sapiens
atattctggtggggagatgaacccaacctagtgggtgtaatacatcatgaactgcaggaaatgctgagccgattatcagg

SEQ ID NO: 503852 - DNA, 98 bp, Homo sapiens
ccagtggatgactccttggttaaggaggactcatctctgcttctacaatcaacccagaatgtgactgtaaatgcgcgcaactcagaaggggaggtcac

SEQ ID NO: 503853 - DNA, 83 bp, Homo sapiens
cccaggcccagctcgtccagagtctgcggacagcgcacgtccaggtgcgcgcggagccatggttatcatgtcggagttcagcg

SEQ ID NO: 503854 - DNA, 75 bp, Homo sapiens
gtcggagctgggcgcggagcccctcacagtgcaggtttacccaaggtccagcctagcccctaggcaccatgtcgg

SEQ ID NO: 503855 - DNA, 89 bp, Homo sapiens
caactttctcaaaatgattaaggagtgtgacatggctaaaggcctttgaactggccacaggtgactatttgtttgaacctcattcaggg

SEQ ID NO: 503856 - DNA, 100 bp, Homo sapiens
gtgcaaacccgagagaactggaatgacagggagagagtttttctctcgtttcccagaactctatccttttcttctcaaacagttggaaactgtagccaat

SEQ ID NO: 503857 - DNA, 75 bp, Homo sapiens
cagtactctgtaacacccagctaccaggcagcctggcatcctcgctacaacctcattgttgtgggccgataccca

SEQ ID NO: 503858 - DNA, 75 bp, Homo sapiens
tcaatatcactgaagacatgctccggggcatctttgagccctttggtaaattggaggtgcagttcatcatcacag

SEQ ID NO: 503859 - DNA, 75 bp, Homo sapiens
tgaatcacaagcccagcaacaccaaggtggacaagaaagttggccctgggaggagcggggacactgaggacctct

SEQ ID NO: 503860 - DNA, 75 bp, Homo sapiens
gaagagggaagacacgcggaaacaggatgcctgctggatttcctgaagacagatgaagggagcagattgtcactc

SEQ ID NO: 503861 - DNA, 91 bp, Homo sapiens
atgtcctgttgtggggcttttacagcctttggatgggagcttgcctgattgtcaacccatcggcctggaccccagagcccacccagttgag

SEQ ID NO: 503862 - DNA, 100 bp, Homo sapiens
attccagtgcccttccatctatctctggaaactttcctcctccaccacctcttgatgaagaggctttcaaagtacaggaatacaaacagaagcttgcacg

SEQ ID NO: 503863 - DNA, 90 bp, Homo sapiens
cggagtcggcgctccaagttgtggagaagctgcaggcgcgcctggccgcgaacccggaccctaagaagagccctatgagtttgtctctct

SEQ ID NO: 503864 - DNA, 82 bp, Homo sapiens
ggcgggcgccgcgggacctctccgggccatgggtgaggcggaaccaaccctcctggccatgggaggggccgtggtggacgag

SEQ ID NO: 503865 - DNA, 90 bp, Homo sapiens
ggcccacgcagctggatgtaccgcatgtgatcactctgggactcgtggggctgcagcaccggtgggagcttgttggatctgtgtctcact

SEQ ID NO: 503866 - DNA, 75 bp, Homo sapiens
gatgcccctatctctcaattttccatcatcgtctacagactgccgtggacctggaaatgcagcaagctcctgatg

SEQ ID NO: 503867 - DNA, 98 bp, Homo sapiens
agtcatggatgggcacactgtgggggtgtcctggtgcacccccagtgggtgctcacagctgcccattgcctaaagaaatcacccggaagttcaggctg

SEQ ID NO: 503868 - DNA, 138 bp, Homo sapiens
ccccactccttccccgtcggcccccacccagagttcctgccatcaagaagccaaccttgagaaggacaggaaagtgtggcaaaggagcagagaactttgacaagttcttcacacgaggacagcccgtcttaacaccac

SEQ ID NO: 503869 - DNA, 100 bp, Homo sapiens
cgcgtctcggaaaccggtagcgcttgcagcatggttgaaggtcgaggagctggaaggcgagcggagtcggctggaggaggaaaagaggatgctggaggca

SEQ ID NO: 503870 - DNA, 95 bp, Homo sapiens
agagatggcgagcgcccggattggggatgagtatgcggaggacagctctgatgaggaggaatcccttggcaccatgtcctgtgtgcattataaat

SEQ ID NO: 503871 - DNA, 100 bp, Homo sapiens
gaaaggaacatactctcaaaatatttacttatatcaattcctggacacagagtgatgatgatgatgattttgatgatgaggaagctgaagaaaaagcgcc

SEQ ID NO: 503872 - DNA, 100 bp, Homo sapiens
accacctcagcggctgtagtgtcccagagtcctcagctgtataatcaaacctccaatccacctggctctccggtctgctcaccaggtggccagataccgc

SEQ ID NO: 503873 - DNA, 97 bp, Homo sapiens
gaaccagatccgggagcacgtcatctccatcgagggtgtcatggagaaactccagctgggcccagagattctgcagcgggaaaatccaaggcttatt

SEQ ID NO: 503874 - DNA, 100 bp, Homo sapiens
ttcgggatctcggtgctgcagacggcgagacctcctgcacaggctggagcattggatttgctaaaggagcttaagaatattcctatgaccctggaattac

SEQ ID NO: 503875 - DNA, 75 bp, Homo sapiens
gagataattgataacaccctgtaacagctgaattattcagagctgggagagcttcccccacgatctcctttagaa

SEQ ID NO: 503876 - DNA, 51 bp, Homo sapiens
gtgtcatccagccttagcaaaccagagccagaagatcagctgccatgttac

SEQ ID NO: 503877 - DNA, 80 bp, Homo sapiens
ctctaccagcctcagctggccaccagcccaggaaccaaattacttgctttacctcattgtgtaagacaagcgtcaaaaac

SEQ ID NO: 503878 - DNA, 100 bp, Homo sapiens
ggtgctgtggaacaaccagctcacgcacacaggcatggccttcctgggcatgacactgacggtggagcatggcttcccgcaccagcccagcgccctcggc

SEQ ID NO: 503879 - DNA, 100 bp, Homo sapiens
gtgcttgtgggacacccgtttgacacggtcaaggatctcctgtatcgaaggtctaggtcactagtggattatgaaaatgctaataaagcactggataaag

SEQ ID NO: 503880 - DNA, 98 bp, Homo sapiens
agcagtcaactcaaatgcaagtccaagaggaggaggaggcggaggtccaagcggaaaggcggttcaggaccatcatcctccatagccatagcgggcac

SEQ ID NO: 503881 - DNA, 100 bp, Homo sapiens
ttggtctcagatctcctgaacctgtttctgctcagattgaggaaacaatggaagaggttactgtgaacatccttgaagaaaatgatgaaaagccaatttg

SEQ ID NO: 503882 - DNA, 75 bp, Homo sapiens
tccatctctcttcctttctcatgttttggctttggggctagggttgtgggctgcacactgcagaaagatacagct

SEQ ID NO: 503883 - DNA, 75 bp, Homo sapiens
gaatgccagcgcctcttctaccggggcaagcaggaggaccccgttctggagcgttatttcaaaggccacaaagct

SEQ ID NO: 503884 - DNA, 100 bp, Homo sapiens
aaacaagtccgtgttctcacagatgctgtcgatgacattacttccattgatgacttcttggctgtctcagttgactatattgtggagtatgactatgatg

SEQ ID NO: 503885 - DNA, 90 bp, Homo sapiens
gcgccccgaagcgggaaaaaggctgggtgccgccgtcccccagctgcgcaaccctaggaactctcggaatagcctaacatggcagaccag

SEQ ID NO: 503886 - DNA, 100 bp, Homo sapiens
ggagcaagagcaagatcaccgtgacatccgaggtgcctttctccaaaaggtaactatggtggtggtgggaactataatgattttggaaattatagtggac

SEQ ID NO: 503887 - DNA, 90 bp, Homo sapiens
gtgggcgtaggaccctctgagccaggaccccaaattacgtgaacttttggatgtggggaacatcgggcgcctggagcagcgcatgatcac

SEQ ID NO: 503888 - DNA, 75 bp, Homo sapiens
ccgctgccgcctccgagcagcccgccaggctacccacctttctgttctgagacccctcaagagacatataagaag

SEQ ID NO: 503889 - DNA, 100 bp, Homo sapiens
acaccgaccaatcctcacgattgagtgtcaaagaagatggcagtcttgggcacgtccatctgtaaacctgctgagagctctggtgacaagaaaggcagtg

SEQ ID NO: 503890 - DNA, 80 bp, Homo sapiens
ctatgggcaaactgggagacagctgccatccactgactcgtaaaaaaatatttacaccagcagctccagttcataccaat

SEQ ID NO: 503891 - DNA, 83 bp, Homo sapiens
cagagcctcgcctttgccgatccgccgcccgtccacacccgccgccaggacggggaggtttactgcatcgacgcgcggttcta

SEQ ID NO: 503892 - DNA, 75 bp, Homo sapiens
tggagagttttctagaagcctgtcgaaaaatgggggtgcctgagacttcccaagtaagaagcggaagaggagccg

SEQ ID NO: 503893 - DNA, 75 bp, Homo sapiens
gggaccttgaagacgacttcgaccctgcccagcacgaccagctcatgcaggcagcctggcatcctcgctacaacc

SEQ ID NO: 503894 - DNA, 82 bp, Homo sapiens
gtctttgaacagcagtgcacagtgcagtcttcttcgtggctgaacagttaattggccttggtcctcacagctccaaaaagaa

SEQ ID NO: 503895 - DNA, 83 bp, Homo sapiens
gatatttgcttggaaaaacgtgtgggtacgaccttgcaccagatactgctacaccatctcatcggcatggacctatatgtggc

SEQ ID NO: 503896 - DNA, 100 bp, Homo sapiens
gttttctcttgttcttaaccacctggatttccatctggatgttgctgtgatcagtctgaaatacaatactgtggcctcatgaataggaatgtctgcccat

SEQ ID NO: 503897 - DNA, 100 bp, Homo sapiens
agccagaacatcagcagcaagctcacccatgacactgtggagcaggtgcgctacagatgcagacagacatgctgaactatctggaagtccactgaaaagc

SEQ ID NO: 503898 - DNA, 96 bp, Homo sapiens
gcctccgtcgccgccgtcagagccgccctatcagattttaggtgatgggcaagtcagaaagtcagatggatataactgatatcaacactccaaagc

SEQ ID NO: 503899 - DNA, 99 bp, Homo sapiens
tcgcttgcaggcaagttgtcagattgacatgtacgtggaggggacactggatctgctggaactgcttatcatgcatcctttcttaaaaccagatgatca

SEQ ID NO: 503900 - DNA, 82 bp, Homo sapiens
tcttcagcggggcgctccaggaggcactcacagctgcagaaccttggcctgaaaatgctacattatatcagcaattgaaagg

SEQ ID NO: 503901 - DNA, 82 bp, Homo sapiens
gcggaggcggaggcagaggtggaggcgctttgaaaggttatacattggctcttcaaagacgttcacctcatcagagaaatcc

SEQ ID NO: 503902 - DNA, 50 bp, Homo sapiens
tgtcaacagtcagctcaagaagctgcagtgttgcaaacaggaacccgagg

SEQ ID NO: 503903 - DNA, 51 bp, Homo sapiens
ggcctcggcagtcctgtttccctgtaagaagtcacctgcaccggtgcccgt

SEQ ID NO: 503904 - DNA, 102 bp, Homo sapiens
gtctgggtggtcagaatggatccacgcctgatggctccacgcatttcccttcgtggtagagttggctttgtgggacacagctgggcaggaagattatgatcg

SEQ ID NO: 503905 - DNA, 101 bp, Homo sapiens
gggaggaggaggaaggcggtgacgagtctgacctggcccagggccccggccagtgcccagccccgctgggagacccggccagcaccacggacggcgcccag

SEQ ID NO: 503906 - DNA, 75 bp, Homo sapiens
gcctcgttgcggccatcgccctgccggaccgcgcctcaggctcccccagacctgcctagagctggaacgttacct

SEQ ID NO: 503907 - DNA, 83 bp, Homo sapiens
aagaagatatgtatgacgagattattgagttaaagaagagtctcactgtcgcccaggctgcagtgcagtggtgccatcacgcg

SEQ ID NO: 503908 - DNA, 100 bp, Homo sapiens
ttgcttctgaggaagctggaagctgcagccacaatgtgcctttgcaggggagcctgagagccacagaatgctggggcagtgattggaaaaggaggcaaga

SEQ ID NO: 503909 - DNA, 100 bp, Homo sapiens
tggctttgtctcctttttcaacaaatgggtgctcatgtgactatcacggatcgaaaagtagcattagaatttcttaaatcaaacgttcaagccaacttac

SEQ ID NO: 503910 - DNA, 75 bp, Homo sapiens
tactgggataattatccaaataaattgcaagcattctatccaaatggacccatggatgaaggaccagatcttgat

SEQ ID NO: 503911 - DNA, 100 bp, Homo sapiens
agtgcacagagctgcttgcctgaaaaaacaaaagattaccattgttcacaatgaagactgcttctttaaaggacgctgccaaggtctgcagagaattcac

SEQ ID NO: 503912 - DNA, 100 bp, Homo sapiens
ggcaacaacgacgccgaattacatctgtccagccacctacaggcctccaggaatggctaaaaatgtttcaggaagaacatacttcgtttcttagatgcag

SEQ ID NO: 503913 - DNA, 98 bp, Homo sapiens
tcctgtgccacctcctcctttagaaaactgatcttaatacaggcagttatacttaagcatgaacattgacgacaaactggaaggattgtttcttaaat

SEQ ID NO: 503914 - DNA, 75 bp, Homo sapiens
cacttggcatcacttgtattgaattggagcctccattatggcatgctgaatttaccaaagaagaattggttcaga

SEQ ID NO: 503915 - DNA, 90 bp, Homo sapiens
ggtcgatttaccatagaaattggtagttgctgcaaaaagagatcttcatcatctgggccatcagcagttggttccgccgagggccggccc

SEQ ID NO: 503916 - DNA, 100 bp, Homo sapiens
aaggaagctctttatgccttaacgtgccctgaggtacggctgaacatcatctctaacctggactgtgtgaacgaggtgattggcatccggcagctgtccc

SEQ ID NO: 503917 - DNA, 96 bp, Homo sapiens
tctgaaccgaatccttgtagattctggatatcgcaccttcataggaatattctgagaatattttctcctattcggctgaccagtgcaccggtcttc

SEQ ID NO: 503918 - DNA, 95 bp, Homo sapiens
ccggggcagtttcagtctccaccccaaatgcaggtgcatggctgcctcctaatcccatagtccagaggaggcatccctaggactgcgggcaaggg

SEQ ID NO: 503919 - DNA, 87 bp, Homo sapiens
ttcttcagagcactgacccaggggacactggacagagcgggatgccaccagcttgtccaaagggaagttccaggagctcctggtggg

SEQ ID NO: 503920 - DNA, 98 bp, Homo sapiens
agctgctgctgacttgagtgagaacaagagagaggacggcagcgccaagcaggagctgaaggacttcaggtttttcgttggaatatacgttgcacatt

SEQ ID NO: 503921 - DNA, 82 bp, Homo sapiens
taacaaagcttgttcatggacgagaaggattggattctgctaaaaggaaacgtaaatattttcaccacgatcgattagactg

SEQ ID NO: 503922 - DNA, 100 bp, Homo sapiens
gatgtgcgatgtgcggaagggcacctccacccgttttgtaccaatggctagaagcagatcgtcatggcaagagccaaggtgctgcaaatacgacttcagg

SEQ ID NO: 503923 - DNA, 50 bp, Homo sapiens
agaggaggagcttgctgcagagtacttaattcagtgcacaaatgagatga

SEQ ID NO: 503924 - DNA, 88 bp, Homo sapiens
gaagccttcctttatcgctttcagcttcaaggttactgactttttatgatgtttggtggctatgagactatagaagcatacgaagatg

SEQ ID NO: 503925 - DNA, 96 bp, Homo sapiens
gacaattgttcagttgcaaaaagaaactggagccaccatcaagctgtctaagtccaaagatttttacccaggctcttaaacctgatctacaatgga

SEQ ID NO: 503926 - DNA, 51 bp, Homo sapiens
cggagtgggcgatgccagcgtgccagtgtggacgaatgtggaacctcgctc

SEQ ID NO: 503927 - DNA, 90 bp, Homo sapiens
cgacaggcgcctccggcccatttacgggcagcccaatggatccaatggtgatgaagagacctcagttgtatggcatgggcagtaaccctc

SEQ ID NO: 503928 - DNA, 100 bp, Homo sapiens
gtggattcctatggatcagaggtgtcctagggctcacgttgttattctgcattgcacttgcagccagcactcccgatttggaaaaacaaccaaatgaaaa

SEQ ID NO: 503929 - DNA, 100 bp, Homo sapiens
tgctaaatttgaaaaggagaaaatgaatgccaaatgggacacggacttgagaccaggagacgtatccagcaagcggaacctctgggaaaagcaatctgtg

SEQ ID NO: 503930 - DNA, 75 bp, Homo sapiens
gccggtgtgttggtggtcccggaacctctcgtaaaccaggtacaagaaaattccccaggacacagagctggtttg

SEQ ID NO: 503931 - DNA, 98 bp, Homo sapiens
caataactccaattacctataggccgcgaacaagtgggacacaggcaagacgtcgaggccttggacaagattcgctatgagagcctgacagacccttc

SEQ ID NO: 503932 - DNA, 100 bp, Homo sapiens
gtggggcgcgcgtgcggaggaccaggcgcggcgcggctgcggctgaggacatccggaacacggtgggcaacgtgcccttggagtggtacgatgacttccc

SEQ ID NO: 503933 - DNA, 100 bp, Homo sapiens
atgatgagaaacttcggtctcagttggagttattaattagcccaacctgttcttgcaaacaagcagatatttgtgtgggcaagtgtccagagaatggctg

SEQ ID NO: 503934 - DNA, 75 bp, Homo sapiens
cacctcctcgccagcagccgtccggagccagccaacgagcgggccaggcgtggacgccgccggaccgctgagact

SEQ ID NO: 503935 - DNA, 100 bp, Homo sapiens
ctcaaaaggagccacaccccctgcagtttctcaggtaaactttggagtcggagtttaaaactagcttatactctacttaataaactgacaagtaagaatg

SEQ ID NO: 503936 - DNA, 82 bp, Homo sapiens
gaacttttgacacggctttggaaacgacgtcatgtgttagatggagttttaacattgaatgcggagaacactaattatgcct

SEQ ID NO: 503937 - DNA, 100 bp, Homo sapiens
ccatagtagaaagaatggagaactattaactgcctttcttctgtgggctgtgattttcagaggggaatgctaagaggaagccctcctatgacactgaaac

SEQ ID NO: 503938 - DNA, 82 bp, Homo sapiens
agtaagcttctacaaaatacttcaggtgcagcggaactgctgcctgacgctctgcaacttcagcatccccgaggagctggaa

SEQ ID NO: 503939 - DNA, 100 bp, Homo sapiens
gttggggagaagaggattggaggtgtcagtgttaaaggaacctctacaacgaaggtgaagccacggaagataagccactgaggcggctcccagctgcgtt

SEQ ID NO: 503940 - DNA, 96 bp, Homo sapiens
ggaaggatggagaccggtggattcagtgcagcaaacaggtgagttctgcatcctggtacttcctcaatgtatttgggcttcggagcatttactctc

SEQ ID NO: 503941 - DNA, 144 bp, Homo sapiens
tcccgcgccccgagaccgccgtcgctcggacgctcctgctcggctgggtcttcgcccaggtggccggcgcttcaggatatgggccctcacattttccaaacctgtccatctgctaactattttgactgcagagccatgtccatt

SEQ ID NO: 503942 - DNA, 82 bp, Homo sapiens
aagaaataccgtgccctgaggttggacgtggggaatttctcctggggctcagagtcgacttttgctcaaaggtgaagaacac

SEQ ID NO: 503943 - DNA, 102 bp, Homo sapiens
tggagattctccggggacccttccgtatctgcctaggcattttgctgtctcctcctaatacggtattatagctgcaaatgtccttgtattctgtttatggag

SEQ ID NO: 503944 - DNA, 100 bp, Homo sapiens
gatgtcgaagccgccacccaaaccagtcaaaccagatagtgtttttagaagaagcatctcaacaggaaaaactggccaaagaatggtgcttcaagccgtg

SEQ ID NO: 503945 - DNA, 100 bp, Homo sapiens
tcaccacactcacagaccgtgagctggaggagtaccgcagggaggtggagaggaagcagaagggctctgaagagcgccgccctgtgctgggctgccggga

SEQ ID NO: 503946 - DNA, 73 bp, Homo sapiens
gaagaatttagacgcacactgggctccctgaaacaacagtaacctacccctgtgggtcatcatcatgccctcc

SEQ ID NO: 503947 - DNA, 100 bp, Homo sapiens
gcttacgtctctgctcttcagtacaatcctcacagtgatgcggtccatgacctccttctggatgtgatcacgtgggttggaattttgctgtcccttgttt

SEQ ID NO: 503948 - DNA, 100 bp, Homo sapiens
tgaagaaggctctgtgcaatcctcacattcaagctgataggctgcgctaccggaatgtcatccagcgagtgattaggctccatggagtgtgctgatgagc

SEQ ID NO: 503949 - DNA, 98 bp, Homo sapiens
ccgacgcctgcagctgctccccggtgcacccgcaacaggcgttttgcaatgcagatgtaggaacccagctatttagtggtcgaagtgactttagaatc

SEQ ID NO: 503950 - DNA, 133 bp, Homo sapiens
gaatcacagttttccttgaagacagcagcgctaagagtgtttgatcttcctctgacttggtactattctctctcccagcttttccttccctccatgagaaagaagccagctctgtctgacggcagcaatcctg

SEQ ID NO: 503951 - DNA, 89 bp, Homo sapiens
acacagagtgctataaaaagtatggaaaaatgtgggggaagttctccctggacgacctgctgaccaacgtcatgctctactggacaaca

SEQ ID NO: 503952 - DNA, 80 bp, Homo sapiens
tcatgagcttcgttaacatgggtgaaatcgccatgcttggtggtgtgggagaagagaatgagaaactgtggagctttacc

SEQ ID NO: 503953 - DNA, 100 bp, Homo sapiens
aaggcccgcggcgccccgtgctgcaggactcacaccacccggcaagaactgctcactacggctccctgccccagaagtcacacggccggacccaagatga

SEQ ID NO: 503954 - DNA, 75 bp, Homo sapiens
tcgactacaagaagagggcggagcggagacgggagtattatgaaaagatcccacctcctaagctgcccaacggtg

SEQ ID NO: 503955 - DNA, 98 bp, Homo sapiens
cggccttcgcgagcgtctgggcgggtggtaggtacctgcacatgttgttctttgtcagtgctgtcaagtgtgtgccagggtgatccatggtcactttc

SEQ ID NO: 503956 - DNA, 99 bp, Homo sapiens
ccccgcaccacctcctgctgccttcccgtcgccgctcccgaagcttttccaggagcggagagtttaataggcaagaaggaagggagaagacagaaggaa

SEQ ID NO: 503957 - DNA, 100 bp, Homo sapiens
gcaagatcttatccacagactccaggcatatcttgaagaacatgggtggagagattcaaccagttagcgtgaaagttggagataaagttcttctcccaga

SEQ ID NO: 503958 - DNA, 71 bp, Homo sapiens
gtccttccttctacagaccatgctggacttcttgtcggatcaggggtctcactctgtcacctgagctagag

SEQ ID NO: 503959 - DNA, 82 bp, Homo sapiens
cgtgcactccgcacctcggggacattattgcgcgtggaacggctgcttttggaagcttccccgggcgctgcctggacaggcc

SEQ ID NO: 503960 - DNA, 82 bp, Homo sapiens
ctttccaaggcaccggatggttacattgtcaaatcacagcactcaggcaactcatgcagcaattccagaaccccgacttccc

SEQ ID NO: 503961 - DNA, 82 bp, Homo sapiens
gccaccgcctcatgcactgtgtagggaaatcctcattgacgattcaatttgttgaaggccaatttgtggactcctacgatcc

SEQ ID NO: 503962 - DNA, 80 bp, Homo sapiens
cctcccagtgacgggtctggagtgcgtgggggaccggctgttggcgggactggagactgatgcatgagggggctacggag

SEQ ID NO: 503963 - DNA, 52 bp, Homo sapiens
cccatatctaagcaaaggaactgctggttttccaagaattgatataaagcgg

SEQ ID NO: 503964 - DNA, 101 bp, Homo sapiens
ggatgggctcgtccatgtcggcggccaccgcgcggaggccggtgtttgacgacaaggaggacggtgtcgtgaaaactacccctaaaagccaaaatgggaaa

SEQ ID NO: 503965 - DNA, 83 bp, Homo sapiens
agcgcaactagcggcgggtcgtgggcacctccagggaccttaaaccggaaaacattttgttaaatgaagatatgcacatccag

SEQ ID NO: 503966 - DNA, 83 bp, Homo sapiens
cagcagaagcagcagaaaggccgcggcatgggcggcgctggccgaggagaatgtactactcatcacctcccacctgtgaaagc

SEQ ID NO: 503967 - DNA, 100 bp, Homo sapiens
gagtcaaaaatctggcatggagcgttgccgaatccttttggaggctgccaggataataaggtcttccgtgtgtgctaagatcgtgcagctcctggggcag

SEQ ID NO: 503968 - DNA, 100 bp, Homo sapiens
tgcgccatcatcctcatcatcatcataggaagccgctctgtgacccacctctgaatcccacaaaactgcaccagagagccgggcgcaagatgaaccagca

SEQ ID NO: 503969 - DNA, 75 bp, Homo sapiens
ctctacagagaagtgatgttagagaattatgggaacgtggtctcactgggtttggaaagcagagtggagaacaaa

SEQ ID NO: 503970 - DNA, 90 bp, Homo sapiens
accccaactgcgcccggtgcggcaagatcgtgtatcccacggagaaggtgaactgtctggataagaactgccattggatgtccagaatcc

SEQ ID NO: 503971 - DNA, 100 bp, Homo sapiens
cccagaaataaaagcatcagagagacgaacagctgtggccattgcaggtgaacctgagcaaggtgggcgagtattggtggaacgccatcctggagggaga

SEQ ID NO: 503972 - DNA, 103 bp, Homo sapiens
ctggtcacctgtctggagcaaataaaagagccctgcaatttgaagatacatgagacagcagccaaacccccagatattgatgatgttaagaagttcaaaccgg

SEQ ID NO: 503973 - DNA, 89 bp, Homo sapiens
tgcaggaagctgagaattatccttggacttacataaagcattttggactttatttaagtgggcagaccaacatccacctcagcaaaaac

SEQ ID NO: 503974 - DNA, 101 bp, Homo sapiens
tgaggatgaagattcaccaaataagctatatactttggttacctatgtacctgttaccactttcaaaatgcacttcagaaggagatcacaacgcgttatca

SEQ ID NO: 503975 - DNA, 90 bp, Homo sapiens
gcggaggcagaggtggaggcgctttgaaaggctctccccggaggctcagccccctctgctccccatgggcaactgccaggcagggcacaa

SEQ ID NO: 503976 - DNA, 95 bp, Homo sapiens
ttagttgatgatttagttgattctctgaaggttggtcaaagaaaaagtgatgtatgaaaaagaggcaaaacaacaagaagaaaagattgaaaaaa

SEQ ID NO: 503977 - DNA, 75 bp, Homo sapiens
caggaggccaaggacggcgttctggatctcaaagcggttccacgcaggcgcgggggacgacggcgggggctacac

SEQ ID NO: 503978 - DNA, 119 bp, Homo sapiens
cgctccgtggccttagctgtgctcgcgctactctctctttctggcctggaggctatccagccttccccgggcgctgcctggacaggcctgcctgcgtgctgggacatgtctggcctcca

SEQ ID NO: 503979 - DNA, 95 bp, Homo sapiens
ttggattcatccacagagacatcaaaccagacaaccttcttttggacagcaaggggaccctcacaatgatcccaatgctcagggggatgccttca

SEQ ID NO: 503980 - DNA, 98 bp, Homo sapiens
gaggcattgaccacaaacctcgggacggctttcatctggtcaagtattatacctgaagaaccttagccctcgggtgactgaaagagatcttgtgtcat

SEQ ID NO: 503981 - DNA, 97 bp, Homo sapiens
ttatctctcaggagttctaattcttgccagtgaactggatcagttccatgacaagaccccttatacgattatgtttggtccagataaatgtggagag

SEQ ID NO: 503982 - DNA, 90 bp, Homo sapiens
gtctcagccgccaaagaccccgtccggtagattccagactccatcatttctcgtggtgttcaggtgctcccacgagacacagcctccctc

SEQ ID NO: 503983 - DNA, 74 bp, Homo sapiens
ggcctccctcaagtgaaaccggaaactgcaagtgtgaaatgcaaaatggaggacgatgcagtacctgcagccaa

SEQ ID NO: 503984 - DNA, 98 bp, Homo sapiens
ccgggcccggccacagcctgcagcggagcccacgagaggcagcgccatggcggagcagacctactcgtgtggatcaatcttcctgtcctacaactgac

SEQ ID NO: 503985 - DNA, 75 bp, Homo sapiens
gcgaccatgaagcgaatgcttagtctcagagatcagaggctatatactggagtcctcactgagctgaagttaccc

SEQ ID NO: 503986 - DNA, 82 bp, Homo sapiens
agtccctgagccgcccctacacccacagcaaacggggattcagcgtccgatcctttggaacagggactcacgtgaagcttcc

SEQ ID NO: 503987 - DNA, 100 bp, Homo sapiens
cctgtctggagcaaggaaaagatccctggaatatgaagggacacagtacggtagtcaaacccccaggaagtgggaaaactcttgcctttgccatcccaat

SEQ ID NO: 503988 - DNA, 104 bp, Homo sapiens
tgctctgtatctttcattttaacgggaacgtgaagcaggccactccttacatcgctgtcacggatgataccatcggggaccttaagaagctgattgcagcccaa

SEQ ID NO: 503989 - DNA, 74 bp, Homo sapiens
ttcaggaaccaccagtgacagagaaatcaaggactttctgttcacagcccaatgaaaggatgctgaatctgtca

SEQ ID NO: 503990 - DNA, 75 bp, Homo sapiens
tggttccctggccgcggcgaccggtggtcccacgtccagccgggctcagtgagccctgggcgctgcctatggcac

SEQ ID NO: 503991 - DNA, 82 bp, Homo sapiens
cccaaatatcctcggaagagcgctcccaggagaaacaagccctgggaggagcggggacactgaggacctctctccaaattgg

SEQ ID NO: 503992 - DNA, 100 bp, Homo sapiens
acgcgcaggtgctagcggccccttcgccctgcagctgttttcactcattagctcctgaggtaaacaaattgaaaaaatgagcgaactggaacagttgagg

SEQ ID NO: 503993 - DNA, 98 bp, Homo sapiens
ggggagccctgtccagagcctccagggccctgcgccttgctccttttgtctaccttcttctgatccagacagatccaacttagaaataatgtttcatt

SEQ ID NO: 503994 - DNA, 100 bp, Homo sapiens
gctggtctaccctgctggaggcgcccaggacaggctgccacggatgataccatcggggaccttaagaagctgattgcagcccaaactggtacccgttgga

SEQ ID NO: 503995 - DNA, 80 bp, Homo sapiens
ggagtggaaaggctctcagtgaaaaagactcaagaatgaacaatccgtcagaaaccagtaaaccatctatggagagtgga

SEQ ID NO: 503996 - DNA, 100 bp, Homo sapiens
gaacggggagccgagctggagctgccgcggcgcagccagacggcgccccgctcagcgagctgtcctggccatcctccctcgccgtggtggctgtgtcttt

SEQ ID NO: 503997 - DNA, 100 bp, Homo sapiens
atcttcaaagctgaactgaatgagtttcttactcgggagctggctgaagatggctactctggagttgagggctcctcgcacctaccccagcaactcaaat

SEQ ID NO: 503998 - DNA, 75 bp, Homo sapiens
gaatgtgtgccctttttacaagatcatgtgatagcttcaaaaacaggtgcagaaagtaagatcacagccctggaa

SEQ ID NO: 503999 - DNA, 96 bp, Homo sapiens
cggccgcccagacgctgcccgcgggcccggccacggcggagccaagggggggccctcagcctcttggccttgaacgggctgttcatcttgattcac

SEQ ID NO: 504000 - DNA, 75 bp, Homo sapiens
gtttgggatttgaagaacacggccatgatccaaaggaaccagagcagttgagaaaactgtttattggtggtctga

SEQ ID NO: 504001 - DNA, 98 bp, Homo sapiens
gagaccgcatcaattgacatccagatcattgctgagtttattgatgacattgagttaatgttttcgaactgctttgaatacaaccctcgtaacacaag

SEQ ID NO: 504002 - DNA, 75 bp, Homo sapiens
gaaaaagaggaaagtggactgtccggggccgggctcaggagcagagtttgagttcctgagatctagttggtgaga

SEQ ID NO: 504003 - DNA, 74 bp, Homo sapiens
accgttatgaaatgtatcgccgctcagctttccctaaggcagccatcaaaaggttggctggatctattattggc

SEQ ID NO: 504004 - DNA, 75 bp, Homo sapiens
ccgagtccacgctgatggactgccgtagacgatgaaactgtaacaattgaaacagtctttccatttgatgttgcg

SEQ ID NO: 504005 - DNA, 100 bp, Homo sapiens
cgccagcgtccctttgttgtgaaggcgccggggcctagcgctatgcctgcggcggagactgcatcaggctctcggttacctgtcctgctgccgattcctg

SEQ ID NO: 504006 - DNA, 74 bp, Homo sapiens
gggacactcctgaagtcgggaaatgacaaagaaacagccttggtataatagcacgttagcatcaagacgaaaac

SEQ ID NO: 504007 - DNA, 50 bp, Homo sapiens
agagcgtgtggcatctccacctcaaggatacagaagtttacggtgagttt

SEQ ID NO: 504008 - DNA, 109 bp, Homo sapiens
cctttgggacaggtgcagccccattttacatctcagttgctgacggtgcacggacgcaccaaggagcagaaggggcccctgtcgggtgcagcgtcctgggagcatatca

SEQ ID NO: 504009 - DNA, 82 bp, Homo sapiens
ctgttgagaagaaaaacgctttttgcatacaagcaggaaaatgagatgttatccaggtgaaatgacaatggatgctctgttg

SEQ ID NO: 504010 - DNA, 82 bp, Homo sapiens
gagcagccccgggcccgcccgcccgcatccaggtgagaagccctaccactgcaactgggacggctgcggctggaagtttgcg

SEQ ID NO: 504011 - DNA, 50 bp, Homo sapiens
ctgagactccctgtcccggaccgcagattttcgacaatgaagccaaagac

SEQ ID NO: 504012 - DNA, 90 bp, Homo sapiens
gattttgaacggcttacgaaaatttgtgcaacacatcaagagctgagtcatcactagagagtgggaagggcagcagcagcagagaatcca

SEQ ID NO: 504013 - DNA, 98 bp, Homo sapiens
gctgagcttcaaaaggggggacatcctcaagaaattaccaagaaagcctggaccccgggtgaaacggagaaatggacacaagtcccctgtgtttctcc

SEQ ID NO: 504014 - DNA, 50 bp, Homo sapiens
cagtgactaccaacgtttggaccagaagttgccctcaaattggctgtagc

SEQ ID NO: 504015 - DNA, 98 bp, Homo sapiens
gaagagttctgcgttttgccagtcacctctcaactgtgtgccaaagattcaggggtcagtttacttcataaaaaatcattagaaaaggaagaattatg

SEQ ID NO: 504016 - DNA, 75 bp, Homo sapiens
gaaaagcatgcgccaagctgcagcagatgcaaagcctgaaagtttatcaccagatcttcaatctatggagcagat

SEQ ID NO: 504017 - DNA, 95 bp, Homo sapiens
gaaggtgcattttaccttttgtgaccaagaatatggcccaggtgaccaaagccctggacaaggccctgagcaccatggacctgcagaaggtctcc

SEQ ID NO: 504018 - DNA, 100 bp, Homo sapiens
cgatgttgaacatgtggaaggtgcgcgagctggtggacaaagcatggactagaggcttttaccagatttcttaaaactgaattcagtgaagaaaatattg

SEQ ID NO: 504019 - DNA, 80 bp, Homo sapiens
ggttttttgtggcttccttcgttattggagccaggcctacaccccagctttgtgactctgccccctgaagcttctggaag

SEQ ID NO: 504020 - DNA, 100 bp, Homo sapiens
gctggggctttgattgcaaaagactgggtgttgactgcagctcactgtaacttgtcatacagcagatggaacaaaaaaaattacaacaaggaattcctcc

SEQ ID NO: 504021 - DNA, 75 bp, Homo sapiens
agctggaagatggacgtactttgtctgactacaatattcaaaagggccatgatccaaaggaaccagagcagttga

SEQ ID NO: 504022 - DNA, 76 bp, Homo sapiens
ctcagatggtagtggataggcctgtgacgaaggtgctaccatcgtgagagtaagctacaagcctatcgtggaattc

SEQ ID NO: 504023 - DNA, 100 bp, Homo sapiens
tctgatgacggcactgttagaatctgggactttcttcgttgccatgaggaaagaattctccgaggcaaagatgcaatctacacaatcccagtaaaaaaca

SEQ ID NO: 504024 - DNA, 100 bp, Homo sapiens
atgaagatgatgacgatgatgatgaagaggatgatgatgaagaccgatggatgcactgactggtctatcgatatcaagaaatatcaagttttggtgggag

SEQ ID NO: 504025 - DNA, 80 bp, Homo sapiens
tgctttccactcggctcctgtcgtccgttctctcaggctcccgttcagtgaaacaaagagtcctcttcgtggaaaagaaa

SEQ ID NO: 504026 - DNA, 88 bp, Homo sapiens
ttcatctttacagaggaatagtctacaaaggaagacttgtaacctggagaagagggtcggcactcttcaccctcccgagccctgcccg

SEQ ID NO: 504027 - DNA, 82 bp, Homo sapiens
gtcttcaaacgccacagcatgcggctccagcggcgccatgagcaaatgaaaaagaatttggaagcacagcacaaagaattgg

SEQ ID NO: 504028 - DNA, 75 bp, Homo sapiens
ctcttcctcccttcgctcgcaccatgatcacacaaaccctgaactggctggtgaggatgacatcagaaatagaga

SEQ ID NO: 504029 - DNA, 98 bp, Homo sapiens
tagtactgaaggctcatcatgatattgtacgatttctggtacagttagatgactacagttggtagctggcagtgttgtgatggcttttgaagaagtat

SEQ ID NO: 504030 - DNA, 100 bp, Homo sapiens
gcagattgtcagatatattccgggtggtcccattcatatcagctattgacctgaaaagtggttctggaaaagtgtaccaaggccctgcaaaaggtgctgc

SEQ ID NO: 504031 - DNA, 75 bp, Homo sapiens
tggggacaccagcagcttaatagatccagacacttcattaagtgaattgcggaatgcatctactcatgcctcgaa

SEQ ID NO: 504032 - DNA, 75 bp, Homo sapiens
gttcatctaccacgctttcgtctctttcaccatgcctggatcacttcctttgaatgcagaagcttgctggccaaa

SEQ ID NO: 504033 - DNA, 100 bp, Homo sapiens
ggatcttctgccgcaccaggctcatcctgtccatcgtgtgcctgatgatcacgcagctggctggcttcagtggaccagatgctggaggtcagcagattgg

SEQ ID NO: 504034 - DNA, 104 bp, Homo sapiens
gagcagcggcggcggcaagacctctccccctcggaggcggcgggcggaggcggcggccctgggcgctgcctatggcacagccaagagcggtaccggcattgcgg

SEQ ID NO: 504035 - DNA, 101 bp, Homo sapiens
ggaagaagcttggggagctgacgggcaccgtgaaggagcttggacgaaccttgacaggatgggtgcagcgaactttccagagcacccaggcagctacggct

SEQ ID NO: 504036 - DNA, 100 bp, Homo sapiens
ttacgtctgcggaagtgcagctgcctcagttcttagcgcaggtctgggcccctgctgctgacatcccccacatgtcagtctgcctgctagtgggattgac

SEQ ID NO: 504037 - DNA, 100 bp, Homo sapiens
ggggttcctcgaagcagttttcaggacttaaggctctgggagagccagtggggtgggtcgcagccacattaagaatgccctgctcagccagaatccggag

SEQ ID NO: 504038 - DNA, 100 bp, Homo sapiens
gccgggaggaccgcgcgggagagcacggatgggcaccctgggctcgataagcgagacatccccgactacctgtgtggcaagatcagctttgagctgatgc

SEQ ID NO: 504039 - DNA, 100 bp, Homo sapiens
ctgctcctaaaaaacctacaggatatctaacagtgatacgccttcaccaccacctggtttgtcaaaatccaatccagtcatccccatcagttcatccaat

SEQ ID NO: 504040 - DNA, 75 bp, Homo sapiens
tctaaatcaggaatggattgaaatctaatgaaccgaaactttgggaatggaaactgaaagtggaaatcaggaaaa

SEQ ID NO: 504041 - DNA, 74 bp, Homo sapiens
aatcacacgccgccatccgggaggcccagggaagattgagaggatccagaatccagatctctggaatagctacc

SEQ ID NO: 504042 - DNA, 100 bp, Homo sapiens
ttgaagctgccgctgtcgctgctgctcgttcgagtcgcagaacatccatgatagcagtcttctgtaaatcgaacttttcaagaattctctgaaggaacca

SEQ ID NO: 504043 - DNA, 100 bp, Homo sapiens
cagttcctaccttatgagctcggttttcttatgcttataagagtggaacagatgctggacgagaaccaccacctgatccagtgcatcctggagtaccaga

SEQ ID NO: 504044 - DNA, 100 bp, Homo sapiens
ctcctgggaccctccaagagcactagtgtctagaaggcactaaggatgagattgtggggaacctgggtgaaggcacctttggcaaggtggtggagtgctt

SEQ ID NO: 504045 - DNA, 50 bp, Homo sapiens
ggatgtgatgcctgctagccaaaagggttatcttgacgaatcagattaca

SEQ ID NO: 504046 - DNA, 100 bp, Homo sapiens
tgcctgtcttcagatcttcacagcacagttcctgggaaggtggagccaccagcctctccctggttcgagaacttgtcttggacaattgcaaatcaaatga

SEQ ID NO: 504047 - DNA, 49 bp, Homo sapiens
agaatttgttcacataaacagattggttgggggccgtcccgctcctaag

SEQ ID NO: 504048 - DNA, 74 bp, Homo sapiens
tctgccacaaaaaaatataataaggctgagtgcggagccaaggtgaccctggcagcaaccccaacaaacgccag

SEQ ID NO: 504049 - DNA, 99 bp, Homo sapiens
cacgtgtgctgtgcacagcggctccagtgggggacccctcttctccaaccactcaggaaacctccttgtcacctactgccaccttcgaaaaacacggag

SEQ ID NO: 504050 - DNA, 97 bp, Homo sapiens
ggcagccccgccgatcaggttcctttgggagacttcgacttgttggcgcctgtgcctactacactggcacaagtggatagagaaaagatctatcagt

SEQ ID NO: 504051 - DNA, 83 bp, Homo sapiens
tcgcactggcgctgcaacaagacgctgcccgtcgccttcaagtcagagcaccataacatggtgtgggaagtgaagacaaatca

SEQ ID NO: 504052 - DNA, 100 bp, Homo sapiens
ctgcacgacacatggaaattggactaaattaccagaatgcagggaattgaagctatcacaagctcaggacagatgggctccttcatacgcctcaagcagt

SEQ ID NO: 504053 - DNA, 100 bp, Homo sapiens
ggccgaactcgggttctgacaagatggccgggctgccccgcaggatcatcaaggagtgttcagcctgggtgttcctgtagatgctctcttctttattggt

SEQ ID NO: 504054 - DNA, 89 bp, Homo sapiens
ctagagtgtatacgtttggacccaagcttaacttttccaatgtggaatcctgggccttcattggtcagctgttgccagcaaaccgcaat

SEQ ID NO: 504055 - DNA, 100 bp, Homo sapiens
gcttgagatgctcagaatgcattgactggggggaaaagcgcaatactattgcttccattgctgctggtgtactattaaacacagtgggaatatcactttt

SEQ ID NO: 504056 - DNA, 51 bp, Homo sapiens
ggcggcgagctcgggggccgcagccatgtttgaccgtgagaacaaggccgg

SEQ ID NO: 504057 - DNA, 100 bp, Homo sapiens
ctctgtttctctgctgcaccgacctcgacgtcttgcctgtgtcccacttgttcgcggcctataggccaagcagatagaacttcagttcactattggcgaa

SEQ ID NO: 504058 - DNA, 139 bp, Homo sapiens
cctcatcaccagccttgggcacagctccacccatcaccccagaacaccccgcagaaagtgcctgtgcatcaggaattaatgaccaagttaataactgagacacctgaccagccaatcccatttctcattgaccatcttc

SEQ ID NO: 504059 - DNA, 100 bp, Homo sapiens
tttaagtcagacttttccaatgaagagcgttttacggggtttgctgcatactatgttgccacaggacgactgggtttggattcagaagaggattattata

SEQ ID NO: 504060 - DNA, 114 bp, Homo sapiens
ctggaaagcaagggattgctggctacagcttcagaagaccgaagcgttcgtatctggaaggatgaaacaggcgcctatttaatcgacagagaccccacctactttgggcctgtg

SEQ ID NO: 504061 - DNA, 75 bp, Homo sapiens
gtgaaacagagaaagataggcggccatggtccaaccttgaaggaataataatggttggggttatcgttggttcaa

SEQ ID NO: 504062 - DNA, 75 bp, Homo sapiens
aaaaccattacaagatatacaatctgtgtcctggggaagtgtcgctacgtttactatgggaaaaactcagagggc

SEQ ID NO: 504063 - DNA, 95 bp, Homo sapiens
tcgtcctccggttgcgggggcggtgcgggcaaacctcgcgaggagaagaggacggccctgagcaaggtaaaataccatgaagattttgaaaaaac

SEQ ID NO: 504064 - DNA, 100 bp, Homo sapiens
ttgaaaacaatcggcaaggggaattttgcaaaagtaaaattggcaagacatatccttacaggcagagagaggcaaggtctcactcggtcatccaggttgg

SEQ ID NO: 504065 - DNA, 100 bp, Homo sapiens
gagagaggggactctggacgtgccagggtcagatctcgcctccgaggaagaataccctctaccatctgctttggtcagggtgccgctcgaggatttaaaa

SEQ ID NO: 504066 - DNA, 73 bp, Homo sapiens
cagctgccacctgcctttgacctttttgaagcctttgcaaaagttgtaggtcataaagaaggtctggatgtta

SEQ ID NO: 504067 - DNA, 73 bp, Homo sapiens
cgactcactgacggagaagcagtggctcaaggatgatgtgaggcataaagttcatctgaacacctttggcttc

SEQ ID NO: 504068 - DNA, 101 bp, Homo sapiens
gcgggagcggccggaggagccatggactgcagcctcgtgcggacgctcgtgcacagatacgactcacaccacccggcaagaactgctcactacggctccct

SEQ ID NO: 504069 - DNA, 74 bp, Homo sapiens
tccccaacggctccccgtcgtcctggtgctgcagcggtgtcatggagaaactccagctgggcccagagattctg

SEQ ID NO: 504070 - DNA, 75 bp, Homo sapiens
tttgggagcggccccgagacgcgcctggcgcgggtccatgtgaaatctgaggtccttgctgtcaagttgtcacaa

SEQ ID NO: 504071 - DNA, 100 bp, Homo sapiens
gtttgtatggacaggcttgtccatctgtaacttcattaagatcaacaagttggagaaagctgttgctgcagcacacaccttcttcgtgggcaatcctgag

SEQ ID NO: 504072 - DNA, 82 bp, Homo sapiens
gcgctagggaagatcgcaccgcggacgcccgctgagcttggcgcacgggccgaccaggtctggacggatctggctgagaaga

SEQ ID NO: 504073 - DNA, 99 bp, Homo sapiens
aaccatctcagaagccatgcccctcaggctggaacttgccctgtctcctcgcagatgagagatgcccgagtggtaaaagacatggcaacaggaaagtct

SEQ ID NO: 504074 - DNA, 100 bp, Homo sapiens
gctcaccagctgtgtctcaaaattgacaggtcacggtctagatcacattctcgatccagaggaaggcgatactctcgctcacgcagcaggagcaggggac

SEQ ID NO: 504075 - DNA, 50 bp, Homo sapiens
aaaaaataagcaaaagcgtcccaggaggatgtgggctctcttgatgagaa

SEQ ID NO: 504076 - DNA, 99 bp, Homo sapiens
gcggcgtcggagcccgaggcgggagccatgccggagaagcgcgcgggcgcgcaggccgcggggagcacctggcctgccttcaaaggcctcaccttcact

SEQ ID NO: 504077 - DNA, 75 bp, Homo sapiens
tccatgaacaatctcacccaattactctgctcagctgtcaaagacttcgtgattatccccctgcacaccacccca

SEQ ID NO: 504078 - DNA, 80 bp, Homo sapiens
ggggccagggaaccctggtcaccgtctcctcagacatttatgcagtgtgtgattctttctaaaacaactccctggaagag

SEQ ID NO: 504079 - DNA, 82 bp, Homo sapiens
gcctgctgtctgactgcctcaagttccagcgggaggagcggcccctcttcccccagcatctacaaatctgaaggacaaaaca

SEQ ID NO: 504080 - DNA, 82 bp, Homo sapiens
cgcggacgaagatggcgaccgccatgtacttggagcactatctggacagtgagaagccctaccactgcaactgggacggctg

SEQ ID NO: 504081 - DNA, 82 bp, Homo sapiens
gaaaccacagacatgactgagtcctccatgaagaccaggtgctgcccacctacgacagcctggatgagccgtcagtgaaaac

SEQ ID NO: 504082 - DNA, 87 bp, Homo sapiens
ccagttccgctcaggaaaaagcccaattttagtggctacagcagttatgatgtgattgctcaagcccaatctgggactgggaaaacg

SEQ ID NO: 504083 - DNA, 82 bp, Homo sapiens
gcagacttggccaaatggacgggactattaaggtccggcctctttggcctacccccgttggctccgctgccccaggtcgatg

SEQ ID NO: 504084 - DNA, 90 bp, Homo sapiens
ccgcctcagaacccgaccaacatccagaacttccagctgcccccagggcatccctcagaagggctttatttgaaccccggtgatatgcag

SEQ ID NO: 504085 - DNA, 98 bp, Homo sapiens
atatcacgtgcgaccccccagaagagcggcggctggaccacttctctgtcgacggctatgacagttctggtgggatgtgtgtgggctgaaattccgag

SEQ ID NO: 504086 - DNA, 90 bp, Homo sapiens
tcagagtatagggaggacgtgggcccattcattgcaggactcggtgaccttcgcagacgtggctgtgaacttcaccaaagaggagtggac

SEQ ID NO: 504087 - DNA, 90 bp, Homo sapiens
cgggatcgtgaccgagaccgtgaccgagagcgtgaccgagagcgcgaatatcgtcatcgttagaaggcagtttcccagctacctcgagac

SEQ ID NO: 504088 - DNA, 83 bp, Homo sapiens
gcgtcgcgcccgggaggaaggaacgaggcaaggagctaaagcagcgtgcgttcagccctgggccaagacaatgcaaactccag

SEQ ID NO: 504089 - DNA, 90 bp, Homo sapiens
ccgcaggttccctacacggtctcctgggtcaagttcagggcgacagctcagtgaagtcttcattcagttaccttcaaggaaagaattacc

SEQ ID NO: 504090 - DNA, 82 bp, Homo sapiens
cccgcgcgcccggccggcccggagcaccgagctcgcggcacggtaggagggggatatgagactttctactcggaatatcctg

SEQ ID NO: 504091 - DNA, 90 bp, Homo sapiens
gcagcatccgctggaggcccagaaattatggatccggatgagcaattggaaacccttcatgaagcactgaaactactgccacctgctcac

SEQ ID NO: 504092 - DNA, 100 bp, Homo sapiens
tgcaatccattaatccagccgagccacacaaggagtgtcccaaccccaaaccagtccagcctagggtgaatgtttccccctccaagaaggggcccttgca

SEQ ID NO: 504093 - DNA, 74 bp, Homo sapiens
catacgtggggtccaccccacatggcactgatacaacacggccgccaaggaagagtgaggaagatgggaaggag

SEQ ID NO: 504094 - DNA, 75 bp, Homo sapiens
ggaaaactttcggaaagctacttgtagagagaaagcttcttgctatctacctccaccatgatgaaagtgtgttaa

SEQ ID NO: 504095 - DNA, 83 bp, Homo sapiens
gtggaagtccaagtcaaacgcagaaggactgcctcactgagcaaccaagagaaatttggtgagcggcctccacctaaacgact

SEQ ID NO: 504096 - DNA, 98 bp, Homo sapiens
acagataccctcgtgattagaggtcttttgctggaggttgactgtgctgtctggaatgtatcctgtcaggtataatgtcagtgaatggcaagaaagtt

SEQ ID NO: 504097 - DNA, 100 bp, Homo sapiens
aagagatgagtttgtttacagctgttgtcctggtatctgcagctgctctgttaaaagcgaaaatgaaacaattgcctgcggcaacagttcgactcctttc

SEQ ID NO: 504098 - DNA, 90 bp, Homo sapiens
gggggtggtgccgcgctcctggccccgcgcgggcggacggcggaggcgcctcccaggttcgatacaagaggctgttttcctagcgtggct

SEQ ID NO: 504099 - DNA, 96 bp, Homo sapiens
cacggtcaaaggctttggtccagccacagccatcaatgtcaccaccaatatctcagttcctggtccagaactttacacagaaaaggtgctcaaagg

SEQ ID NO: 504100 - DNA, 90 bp, Homo sapiens
ataaaaagattcccaggatgtgagcaacacgggaccgagtcttggaaattcacagagagaatatgaaaagcaggttgtcctgtacagtat

SEQ ID NO: 504101 - DNA, 49 bp, Homo sapiens
attgagccgggagctgctcatcaaggctggagtgcaatggcatgatctc

SEQ ID NO: 504102 - DNA, 50 bp, Homo sapiens
atgtttgctacaaaggtggtgggcttcctgaggctgcggtggtcacgctt

SEQ ID NO: 504103 - DNA, 82 bp, Homo sapiens
gctcacaattatcctagagtgaggacttgtatcatgaactgatcactaaatatgggaagttggagcctttggcagaagtgga

SEQ ID NO: 504104 - DNA, 100 bp, Homo sapiens
gctgtgggacacgaaaaccatgaagcagcaggtacatgtcccagagcaagcacacggaggcccgggagctcatgtactcgggagccctgctcttcttcag

SEQ ID NO: 504105 - DNA, 90 bp, Homo sapiens
ttggagaaacatgcagattatatcgcatcctatggctcaaagaaagatgattatagatcgagccactgctgaagaatgtctaaagcaccc

SEQ ID NO: 504106 - DNA, 100 bp, Homo sapiens
caggttccgatgatcgcgctgcagttgattatggaagattcccacaagagtaccacgtcagagacagcacctcaacctggttcagcagttcagggagctc

SEQ ID NO: 504107 - DNA, 100 bp, Homo sapiens
tttccattggtaaaaactcctcaatgtcagcatgtcagtcctggcatgctaggttctataaataggtccaggttcacactagaaggccaaaacttccgca

SEQ ID NO: 504108 - DNA, 100 bp, Homo sapiens
agcagtcaatgtccgaaacatccttcatgcaacatattgctgaacgttctgattccacccaatatgccatgtacgcgaacagggaagaataacgttctta

SEQ ID NO: 504109 - DNA, 95 bp, Homo sapiens
gtggaattgctgatagacatgggggcctcaaacgtggagatcaactcctctctgttaatggagtgcttccagatgctgtatgccgactgctacat

SEQ ID NO: 504110 - DNA, 76 bp, Homo sapiens
gctgtttgtattttggctgctgcaggagccattttaggacgagcagctgagggccctggtgaggcagtttggacag

SEQ ID NO: 504111 - DNA, 89 bp, Homo sapiens
atctgatggcagcctagaatcttatcaaaatctaaaccctcacaagagctgttatttatctgaaagaattgatgaattgcaagtttgtg

SEQ ID NO: 504112 - DNA, 96 bp, Homo sapiens
tttcagagtgtaaagtaatcttggaatataaagaaatctccaaattggacatccagagcagcattcttgttctgtctacgtcttgaattagaaact

SEQ ID NO: 504113 - DNA, 110 bp, Homo sapiens
taaatccatcagaatgacaccttctcaggttgcctttgaaataagaggaactcttttaccagctgtgtcagcgtgttatgatgccgtcccgtaccaacctggctactgga

SEQ ID NO: 504114 - DNA, 98 bp, Homo sapiens
aaagtggcactgaggctctggaacttctgcccagctctccttggtcatcatcagatttgaaatatttaaagtggatacaaaactatttcagcaatgca

SEQ ID NO: 504115 - DNA, 75 bp, Homo sapiens
caattcaggctgttgccacaaatcccaaaactacccacgagcttaaagggctgatgctgcagaagatgaggaagt

SEQ ID NO: 504116 - DNA, 87 bp, Homo sapiens
gcccccgcctgtggccggtgacctccctcctccgagggaggggggttgtgaccccaggaagaaaaaatgctgggcatcttggtgcag

SEQ ID NO: 504117 - DNA, 90 bp, Homo sapiens
ctgcagtgctacccgcctccaggtgctggagaatctggtaaaagcaccattgtgaagcagatgaggatcctgcatgttaatgggtttaat

SEQ ID NO: 504118 - DNA, 98 bp, Homo sapiens
atggagcgtatcggcctcgccactgcaggcctcttgaagccagggctcagggctgttgtgggaggggccgccgccgtgtccactcaagccatgcacaa

SEQ ID NO: 504119 - DNA, 100 bp, Homo sapiens
cgccgcgcccggggccgtgcgctctcgggccactcggccgcagtgcagaatacagaaactgcagccatgaccacgcacgtcaccctggaagatgccctgt

SEQ ID NO: 504120 - DNA, 83 bp, Homo sapiens
agtcacgtctccaacaaccaaggaaccaacgtccaagaggcccagaagatactcaacaacagcggactccccattacttcagc

SEQ ID NO: 504121 - DNA, 100 bp, Homo sapiens
cagttaataaagcatctacaaatgaggcagcctggggcaggatctagtgaaaagccatttgatgtatgcggtcagagaagaagtggaggtcctcaaagag

SEQ ID NO: 504122 - DNA, 90 bp, Homo sapiens
gtggactaagaacgcattgccgccggtcctgaccaccgtgaacggacagtcccccccagtctgttcccagttctccaaaggagtctatgc

SEQ ID NO: 504123 - DNA, 76 bp, Homo sapiens
ataatgtctgcttccactacacttttgccctcaaccgatcaccacgctcaggagccgcattgaccaggcccagaag

SEQ ID NO: 504124 - DNA, 82 bp, Homo sapiens
gattaacaccttgataaatatcatgtcacgccttggccaagatgacccaactccctcgagggagttctgggaaatcgttcat

SEQ ID NO: 504125 - DNA, 98 bp, Homo sapiens
ggatttcagatgggcaatattgtggatattggccccgacagcttaacaattgaacccttgaatcagaaaggcaaggtcaaaatgcagatcttcgtgaa

SEQ ID NO: 504126 - DNA, 100 bp, Homo sapiens
ggcagtaaattcttcagctgctcggacagatgaagctccccaaggagctgcagcggcaacctttggcactgcatccatgagcatgcccacaggattcggc

SEQ ID NO: 504127 - DNA, 100 bp, Homo sapiens
aagctctagcagaggaaaataagaacacagtggatgtcgagaacggtgcttctatggcaggatatgcaagagaaggcagctgctgtggatttgactaacc

SEQ ID NO: 504128 - DNA, 82 bp, Homo sapiens
ctttcttccagcttctgctgtccttctttgtggagagcaaggtccccctccggatgattgacagtgtggagagccgtgatat

SEQ ID NO: 504129 - DNA, 51 bp, Homo sapiens
cagccagaagccaggagcctcggtcctggaagatactgctctttggtgtaa

SEQ ID NO: 504130 - DNA, 75 bp, Homo sapiens
aggagagcgccccagggcaagccccgctccggccaacaagatgcctaaatcaaaggaacttgtttcttcaagctc

SEQ ID NO: 504131 - DNA, 82 bp, Homo sapiens
aagaagaagattaacctggagttaaggaacagatccccggaggagggactggtgattgcagctggaagtgcccatgaccgag

SEQ ID NO: 504132 - DNA, 50 bp, Homo sapiens
aaaagctggatacaatgtaaagcaggaaattcctgttaatgatggaatag

SEQ ID NO: 504133 - DNA, 82 bp, Homo sapiens
caggatcaaagctatctgctgtgagacacaatgagaaatgcttttgtgtaaagatggagtctcgctctgtcatccaggctgg

SEQ ID NO: 504134 - DNA, 100 bp, Homo sapiens
atggacccatgggagctggaaattcagttaggatggaggcgggatttcctatggcaagtggtccaggcagtgctttcctcagtgctatttttcttgcctt

SEQ ID NO: 504135 - DNA, 90 bp, Homo sapiens
ctacaagacagtaaagatgcactgcatttggcacaaacaaatggtgttggggatgtcctttgcactgaccctgaactgccagattgacaa

SEQ ID NO: 504136 - DNA, 99 bp, Homo sapiens
atacctcggagtggcggaccacaagatggaagacgtcatagcacggatgcaagatgaaaaaaatggaattcctattcgtacggtcaaaagctttctttc

SEQ ID NO: 504137 - DNA, 100 bp, Homo sapiens
aatccacagtaaaaggaaagaagtgcattgttttggtgactgaacttatgacgtctggaacacttaaaacgaagaggatcacctagcccgggtagaagag

SEQ ID NO: 504138 - DNA, 74 bp, Homo sapiens
aagagtatgaggagctggtgtctgtgtcagatttgtagctgcggacttgtgcaccatggacaattttgctgagg

SEQ ID NO: 504139 - DNA, 90 bp, Homo sapiens
ggacactgtgagggaacaagaccagagtttcacgctgcaagctttcttcctggtggcagatgacatcatggattcatcccttacccgccg

SEQ ID NO: 504140 - DNA, 50 bp, Homo sapiens
tgtctcttctcgccctggcggggaagcattgtcccagatatagccgttgg

SEQ ID NO: 504141 - DNA, 100 bp, Homo sapiens
agaaaatcaagcttcttgggccaagtcagcaggtggaggaggagctgacgcacctccagaagaaactaaaagggacagaggacgagctggataaatattc

SEQ ID NO: 504142 - DNA, 90 bp, Homo sapiens
tacagaaaccagaccagccaggcagagtcctactataggcatgcagctcagcttgtcccctccaatggccctcgggaccaaggatcacgt

SEQ ID NO: 504143 - DNA, 76 bp, Homo sapiens
atctcgtgctcaccggtttctcccacatcgacctggttatcaatactctggctgaccatcatcatcgtgggactga

SEQ ID NO: 504144 - DNA, 75 bp, Homo sapiens
gaggaactggcccggaaacaggaggacgatctcgaggacctggaagaagcagaggagccagacatggaggaagac

SEQ ID NO: 504145 - DNA, 73 bp, Homo sapiens
gaaatagatgacatcaataccagtgataaggacggcatcagaattaatgtaactacactgaaagatgatgggg

SEQ ID NO: 504146 - DNA, 74 bp, Homo sapiens
agaaaccatttaaaacaggtctaaagaaagccattgatctggtgacgaaagccacagaggaggacaaagccaag

SEQ ID NO: 504147 - DNA, 82 bp, Homo sapiens
ctcaatatctgtcttcggtggactccttcggcagtccacccaccgccgccgcctcccaggttaaacccatccagagtaatgg

SEQ ID NO: 504148 - DNA, 74 bp, Homo sapiens
tttatatcctgacactatgaatgctacttggatgcctcttaagaaacgcttcgttaagggactcaggcagtacg

SEQ ID NO: 504149 - DNA, 82 bp, Homo sapiens
ctttttatttttccccaattcagcagagaatattttcaaggggggcacttccgttccggcgcccctccggtcatcaacccgc

SEQ ID NO: 504150 - DNA, 75 bp, Homo sapiens
ccgcaaggccttcaagagccacgtggccctcatgacactgacgctcttcccggtccggctcctggttgccgctgc

SEQ ID NO: 504151 - DNA, 90 bp, Homo sapiens
cagccttagactatttttcaaacatactatactggcaattgctggagaagattttgcaattgttgcttctgatactcgattgagtgaagg

SEQ ID NO: 504152 - DNA, 100 bp, Homo sapiens
tgcatcgacctcgacttatctgtaagcagcggaaggggtgagcttatggaaccaaggaagagctgatgaagttgtcagtgcctctgttgggagtggggac

SEQ ID NO: 504153 - DNA, 75 bp, Homo sapiens
tctatggtgcagatattaatgggagcatatatgatgagtcttccgtgtgtgctaagatcgtgcagctcctggggc

SEQ ID NO: 504154 - DNA, 100 bp, Homo sapiens
gcttggctccttgctcagcctgtcgtgcctggcgctttccgtgctgctgctggcgcagctgtcagacgccgccaagggcaaacttgaagataaatctttt

SEQ ID NO: 504155 - DNA, 100 bp, Homo sapiens
tctggcggggtgcagaactgagcccaggccacagtaccctattcacgctctgtgcttgtgccaagataaagcatatgatggctttcattgaacaagaagc

SEQ ID NO: 504156 - DNA, 90 bp, Homo sapiens
gcggagtcgagacctacccgaacgacgcgggcgagcggggctttggacgccggtggagacgcaggcgagtaaaacgatgtttgcagaaat

SEQ ID NO: 504157 - DNA, 83 bp, Homo sapiens
gctgcttctccccccacccccacattggaacaggctcattaagagttgatctctctaatgtattagatcttcatgcctttgat

SEQ ID NO: 504158 - DNA, 100 bp, Homo sapiens
gaaaagcttgcagaatatatttgttccaatgttgttattcatgaggaccaatggattggcgagacagtactacaatcaacatttagcagtcagttattaa

SEQ ID NO: 504159 - DNA, 75 bp, Homo sapiens
aaaccagtccccgaaccaaaatcacgttgtcatttacgtgctgaagcatattgacttgaggaaaacgccttcctt

SEQ ID NO: 504160 - DNA, 51 bp, Homo sapiens
cttggcctcccaaagtgctggaattacaggcgtgagccaccacgcctggcc

SEQ ID NO: 504161 - DNA, 100 bp, Homo sapiens
gaacttcattcccactcatgagatccaagtctctacagttaactggcaaagaaggaaagtaatggaccagtgaaggtgtggggaagcattaaaggactga

SEQ ID NO: 504162 - DNA, 98 bp, Homo sapiens
gaacacaaagggaaagaggagaggcacccgatatatgttctctaggccttttagaaaacatgatgaggcagggagcattccttgtgaacgcagcccgt

SEQ ID NO: 504163 - DNA, 90 bp, Homo sapiens
ggaaaaagaaactggaatctcccaacagagaaattattattttacacaatccaaagtttggcctgtcactgctcctcatcctcctgagcc

SEQ ID NO: 504164 - DNA, 90 bp, Homo sapiens
gagtcaagatggaggagtacgcgcgagagccttgaagctgacgggtcgcctcatgctggccgtgggaggagcagtgcttggctccctgca

SEQ ID NO: 504165 - DNA, 75 bp, Homo sapiens
attggggttgatgaaacttacctctttgaatctgaaggtttagggtggcatggagaaatcgttgtcaaaacagag

SEQ ID NO: 504166 - DNA, 100 bp, Homo sapiens
aaggggtcccgaagccccctgcaggaactctacaacccaatccaggctatttctgccgggcgctccgcgaagatgcagctcaagccgatggagatcaacc

SEQ ID NO: 504167 - DNA, 136 bp, Homo sapiens
cgcagcaggactacgaactcgtccagagggtcggcagcggcacctacggggacgtctataagatcttatgccttcattcatccggcatggtccaacaattccaagacgaactgatatctgtcttccagattcaagc

SEQ ID NO: 504168 - DNA, 115 bp, Homo sapiens
cttctgcatcaatcgcaaactggctttgaagatggctccgtgggccagaaggagaggacttgggtgaggagctgctgccacccgggctgggccaggacctgagatctcattgcta

SEQ ID NO: 504169 - DNA, 82 bp, Homo sapiens
ttgctgtctgcatctctttgagtagtattactgcctgcatacttctttttgcctgaattcatcaatggagactttgattcta

SEQ ID NO: 504170 - DNA, 75 bp, Homo sapiens
ctaaagtctgagagagggaagtcgcctctgtgctcgaagccagttgagggaagttctccatgaatgtacgtcaca

SEQ ID NO: 504171 - DNA, 50 bp, Homo sapiens
ctcaaccctggaaaacagcttcaagctgcagtttcagctcaggccacatc

SEQ ID NO: 504172 - DNA, 99 bp, Homo sapiens
aggagtggacgcctacggagaaagtcaagccagtggctggtcttccatttacagtgtcactattccctgacggagctgttatgtgccgctctagcgaag

SEQ ID NO: 504173 - DNA, 96 bp, Homo sapiens
caccctgcccctgccgaggcaggcgcccaccgccggcggtgatgcggctgtgaagccctagtcggaagaagaaattgtcgagacgaataacatgag

SEQ ID NO: 504174 - DNA, 75 bp, Homo sapiens
cttagctgtgctcgcgctactctctctttctggcctggaggctatccagcactttaagtttgccatgtacccacc

SEQ ID NO: 504175 - DNA, 75 bp, Homo sapiens
ctcatgtctcactgccccactcagtgagaaagatcagtctaaagaaaaggagaagaaagtgaaaaaaacaattcc

SEQ ID NO: 504176 - DNA, 97 bp, Homo sapiens
gccatggcataaggaactctatcccaggaatacagctttgcattaggaccatggccaacctggagcgcaccttcatcgccatcaagccggacggcgt

SEQ ID NO: 504177 - DNA, 75 bp, Homo sapiens
gctgaagatgacaacatctatcaacagaagatcaagaattatatccagatcgagagacagaagattctgaaaggg

SEQ ID NO: 504178 - DNA, 100 bp, Homo sapiens
agcaattaactcagttagaaagaacacgtcagcgaaacccatctgatcgacatgttattctatgaagagcgagctctgtatctcgaagcaataattcaga

SEQ ID NO: 504179 - DNA, 111 bp, Homo sapiens
gtaccgcagcccccgggcacgacctctcggacacggtgcaggcagggaggttatattcaaaagaaaaaggaactgtggggaatctgtatctttattgcagcagttgaccta

SEQ ID NO: 504180 - DNA, 50 bp, Homo sapiens
ccgggtgcccggtgtgtggcaaggaaatttggtgagcggcctccacctaa

SEQ ID NO: 504181 - DNA, 100 bp, Homo sapiens
atcctctacaccatcgacaccgaaaactccaccgtagcccttgccaaagacctagaggatcaagacataatgggagcatttttagacaagccaaagatgg

SEQ ID NO: 504182 - DNA, 100 bp, Homo sapiens
ggggaagcgggacaatcgggtgattcccaacttcttctggagcctggggatcggtcacactggtgcgtggtggcatactgggaggagaagacgagagtgg

SEQ ID NO: 504183 - DNA, 100 bp, Homo sapiens
tccagtaccagtacattaggaaacatgctagaattacctggaacttcatcatcatctacttcacaggaattgccatttatagaagagtgatggatgtcat

SEQ ID NO: 504184 - DNA, 75 bp, Homo sapiens
gatataacaacattcagatgactctcccgaaaacttacaccatagctaatcaattccagtctcatcagattttcc

SEQ ID NO: 504185 - DNA, 98 bp, Homo sapiens
gcgcgccttcggcattggccgccgcgatgtcagctcagtgctgtgcgggccaggtgatttgatgaaggctgctgcaggagagttcgcagatgatccct

SEQ ID NO: 504186 - DNA, 100 bp, Homo sapiens
ctctgcttccaggacaagtcctgcgcttggggatcctctgtacgcccgttcactggatgagggagtggtgggtccaggtggggctgctggccgtgcccct

SEQ ID NO: 504187 - DNA, 100 bp, Homo sapiens
ctctccagcgacgatgtccttgagaagtcctcacagaagtcccggcgagaggcaacagtaactagtgtcttggaatatctgagtaattggtttggagaaa

SEQ ID NO: 504188 - DNA, 75 bp, Homo sapiens
tcagttcgaatacatttattgaccaaaatggcagacattgaaaagcagaagccactggagaaaaacggccaagag

SEQ ID NO: 504189 - DNA, 87 bp, Homo sapiens
gaaaaaccaggacgaaaagatgtagcatttaaatcaaacggtattgagatggattgggttatgaaacataatggtccaaatgacgct

SEQ ID NO: 504190 - DNA, 80 bp, Homo sapiens
agtataatccagcaggcaaccaaaaaaactctctgcagaggaattagagcgaaaacggcaagagatgatggaaaacgcca

SEQ ID NO: 504191 - DNA, 51 bp, Homo sapiens
cccaagcgccttctccgcaccaggttcaagcactgtcttcctgttggccct

SEQ ID NO: 504192 - DNA, 74 bp, Homo sapiens
gcgtctcgtggcccagctgcatctgctgcagccaacaagtcccaaatttggaaaagctgactcatatgaaaagc

SEQ ID NO: 504193 - DNA, 82 bp, Homo sapiens
agggaacgcccggcccagccccggaaaagagtgcaaattcggaaagcacctcaagctgtttcagatacagttcctgagagga

SEQ ID NO: 504194 - DNA, 83 bp, Homo sapiens
cttctgtgagaaatccttccgccagctctcccaccttcagcagcacacccgtgcctccggagccagcgtggtggccatagaca

SEQ ID NO: 504195 - DNA, 51 bp, Homo sapiens
aaaagacacttatactatgaaagagctggtggtagattggttagagagtat

SEQ ID NO: 504196 - DNA, 83 bp, Homo sapiens
ggggaaggagcaggatttagaggaccactagttggaccccatcctcgtgctggaggaacaggagtgcctgtgaagaaaacggg

SEQ ID NO: 504197 - DNA, 75 bp, Homo sapiens
ggttgctgcccgtcagtctcgaaagatacactctgtgcagttttagagagagacacactcagtattcgagaaagt

SEQ ID NO: 504198 - DNA, 89 bp, Homo sapiens
ctgtgctcgcgctactctctctttctggcctggaggctatccagcagttcaagctgaagaagatgtggaaaagtcccaatggaactatc

SEQ ID NO: 504199 - DNA, 80 bp, Homo sapiens
ggaaggcgggagacgagaagcctgaaaagtcgcagcgagctggagccgccggagtttgaagaaaacaggtctgaaacaag

SEQ ID NO: 504200 - DNA, 87 bp, Homo sapiens
ggcgagccctggtggaggaagaggtatggtttggagaagatctgcctctaagtcctcggagtcctctgactcccagacacggaccag

SEQ ID NO: 504201 - DNA, 100 bp, Homo sapiens
tccgaggccgagagccgacccaacgatctgaactcctcaggcaaaatacatatctcagtgcattgatgagatcaagcaggagctgaagcaggacaacata

SEQ ID NO: 504202 - DNA, 83 bp, Homo sapiens
aaggaacgaggcaaggagctaaagcagcgtgcgttcagccctgggaggacaaaagcatgtcttcccttcctgggtgcattggt

SEQ ID NO: 504203 - DNA, 96 bp, Homo sapiens
gtaaaatggtcccctcggctggacagctcgccctgttcgctctggatctattaatgagatgaagcggttggaagaaatgtcaaatatgtttcagag

SEQ ID NO: 504204 - DNA, 75 bp, Homo sapiens
tgtcagcgacagacccctcggggtgtccatcacaaaagccgaggccgccatggcatcagatgaaggcaaactttt

SEQ ID NO: 504205 - DNA, 75 bp, Homo sapiens
caaggcactgctttttcatgacggaccatgaatggcacctacaacacctgtggctccagcgacctcacctggccc

SEQ ID NO: 504206 - DNA, 100 bp, Homo sapiens
ggaggaagagattgcagtgggggctgccagtgctaccctgagaaaggtggacgtttggtagctggcagtgttgtgatggcttttgaagaagtatgcccgg

SEQ ID NO: 504207 - DNA, 75 bp, Homo sapiens
gcagtggtcgcttcttctccttgatgaaggcggtgagcctgaacacacctggctgactgagatgctcgagaattg

SEQ ID NO: 504208 - DNA, 51 bp, Homo sapiens
caacatatctacaatctcggtactacagggagaactaatgccgacgtgatg

SEQ ID NO: 504209 - DNA, 100 bp, Homo sapiens
tggagagcgccagagtaatgggggggacacagcgattgccacgcgccattggaatgtccctggccaaggagctcatattctctgcgcgagtcctcgatgg

SEQ ID NO: 504210 - DNA, 100 bp, Homo sapiens
ccgtgacatcctgggatattctttgttgagagaacctgtgagaagtttctacaatggtgggctcagctctcaggagaggtgcccatgcatatgtctacct

SEQ ID NO: 504211 - DNA, 88 bp, Homo sapiens
aagcctgtaactgtgaaaccagtaacaacggaacctgcctccatgaagaagtggactattctgagaaactgaagttcagtgatgatga

SEQ ID NO: 504212 - DNA, 97 bp, Homo sapiens
aagaggtgacacttcccaaaacagaagatgcctctaatggaggagtttctgagcagcacccctggcccagtggctttgaaagggagctcaaaccaga

SEQ ID NO: 504213 - DNA, 74 bp, Homo sapiens
cccagatccatttacactttacaggccaattcctgtccccccagcagcatggcatcgtgtgctgaaccctctga

SEQ ID NO: 504214 - DNA, 100 bp, Homo sapiens
gaaggagagtctgtgccgacaagatggcggacggggagctgaacgtggacagcctcatcacccggctgctggaggaatccacctcctctctttaatgaag

SEQ ID NO: 504215 - DNA, 118 bp, Homo sapiens
gaggcgctggatctgtggtcgcggctggggacgtgcgcccgcgccaccatcttcggctgaaggtgctggagaatctggtaaaagcaccattgtgaagcagatgaggatcctgcatgtt

SEQ ID NO: 504216 - DNA, 83 bp, Homo sapiens
taaggattgtcctctttctacaaaaggatgtaatccctgttcattactacttaatacctccaccaacaaagactaagaatggc

SEQ ID NO: 504217 - DNA, 90 bp, Homo sapiens
attgacagagatggggaagaggaagaggaagagacagctcagcagctcctcctcctatagtggggacatcagcaggcaccacaacagcac

SEQ ID NO: 504218 - DNA, 100 bp, Homo sapiens
gaagcagggagccgggcagcccgcgactgacggagggtttggtgcacctcgatttggaggaagtagggcagggcccttatctggaaagaagtttggaaac

SEQ ID NO: 504219 - DNA, 100 bp, Homo sapiens
caggaatcttcgtctgatgataatgagaaagatcagtctaaagaaaaggagaagaaagtgaaaaaaacaattccttcctgggctaccctttctgccagcc

SEQ ID NO: 504220 - DNA, 82 bp, Homo sapiens
ctgctcattggggcgttgaggaaaagtgtggactatgggccagtttttgtgcaagaaccagatgatattatttttccaactg

SEQ ID NO: 504221 - DNA, 100 bp, Homo sapiens
gatcccaatggtccagtggaaggaacagtaatagagtctttcacagacaaaggaagaggcctgaagcaggacattctaaatgaaaagactgaattggaag

SEQ ID NO: 504222 - DNA, 50 bp, Homo sapiens
gccggcagccggcagctttgcagcggaaaatgtttcgatgaaagatcctc

SEQ ID NO: 504223 - DNA, 83 bp, Homo sapiens
gtggactccttcggcagtccacccaccgccgccgcctcccaggtgaccctggcagcaaccccaacaaacgccagaggcagccc

SEQ ID NO: 504224 - DNA, 104 bp, Homo sapiens
cgagcgcccctccgagctggggttggacgctgccagtttgcacagcagcagggggatatgagactttctactcggaatatcctgagtgttgcgtggatgtaaaa

SEQ ID NO: 504225 - DNA, 75 bp, Homo sapiens
tgaggcctacgcagagctcatcgtccttgctcatcccactgatgacaccacgacgctctctgagagaccatcccc

SEQ ID NO: 504226 - DNA, 150 bp, Homo sapiens
cccttggtcggcaaactcggcctcatcagcccggcctacctcttcctctggcccgaagccttcctttatcgctttcagctcaaagcttggattctgccgtgccactcacgaatggcgacacagaagacgatgctgacaaaatgcacgttg

SEQ ID NO: 504227 - DNA, 75 bp, Homo sapiens
gaaatgtctcggattttgataatgaagaaggttcagcagactgtacaggatctttttggcagagccccaagtaaa

SEQ ID NO: 504228 - DNA, 123 bp, Homo sapiens
ttgcgtcacgacgcacataaagacgtacgaagccgtcgccaagtactccaaagattcaggtttactcacgtcatccagcagagaatggaaagtcaaatttcctgaattgctatgtgtctgggt

SEQ ID NO: 504229 - DNA, 100 bp, Homo sapiens
gctggggccaggacccagacagagacacacggtcactgcagctgaagccgctgcccctgctacagaatagcctaacatggcagaccagagacagcgctca

SEQ ID NO: 504230 - DNA, 100 bp, Homo sapiens
gacaatctcaacgacagctctcagcagctacaggtgactgcccaggatgtgcggaaggaaagccccctgctctttaagttccgtgccaagttctaccctg

SEQ ID NO: 504231 - DNA, 82 bp, Homo sapiens
accgacaaagtcctgaattctatcatttcttcccttgatctactgccgataatttcttgagaggagataactcccgtaaagt

SEQ ID NO: 504232 - DNA, 100 bp, Homo sapiens
tagacctggacaagtatgtggaaatagcgcggctgtgcaagtacctgccagagaacgacctgaaggggtgagcccctccagactccgaataggagatcaa

SEQ ID NO: 504233 - DNA, 90 bp, Homo sapiens
ttacaatgctaccctgctttttctggtgtcctgaacctggaagttgtgctttttaaggggtcaccagtcgttggcacaccaagaagctgc

SEQ ID NO: 504234 - DNA, 75 bp, Homo sapiens
tcgggatctcggtgctgcagacggcgagacctcctgcacagatcgacgacatcgcggatggcgccgtgaagcccc

SEQ ID NO: 504235 - DNA, 83 bp, Homo sapiens
cgggacccggtgtctgctcctgtcgccttcgcctcctaatccctagccactatgcatcaagatggtgctcatgtggaccagtg

SEQ ID NO: 504236 - DNA, 74 bp, Homo sapiens
gccgtgcccgagaatagctccgtccagcaggacggggaggtttactgcatcgacgcgcggttctacgggaacgt

SEQ ID NO: 504237 - DNA, 75 bp, Homo sapiens
caaggttctggacaagatgaagtctttctgccaggattttaaactgtctacggttcttaacctcatctgttaagt

SEQ ID NO: 504238 - DNA, 100 bp, Homo sapiens
cgacaatttgaaagtggattatcttacaaaggtgaaaagccatacaagtgtacctgggaaggctgcgactggaggttcgcgcgatcggatgagctgaccc

SEQ ID NO: 504239 - DNA, 90 bp, Homo sapiens
ggatccgtgggtcagagaacacaggaccagtttgccatcccaaggccgaagaaagatgtagcacttaagcctcaggaacgtgtggagaaa

SEQ ID NO: 504240 - DNA, 82 bp, Homo sapiens
cagaggtggaggcgctttgaaagcttgtcaaaattcccaaaaatgatcccctcaatgaagttcataactttaacttttattt

SEQ ID NO: 504241 - DNA, 100 bp, Homo sapiens
cgccccgggcccaggcccggccccagccgccgctgcggagcccgccgggaccccccggagcgcggccacggcgcaggtatcacctcttctgggctcaaga

SEQ ID NO: 504242 - DNA, 100 bp, Homo sapiens
gaatggaccaccacattttacagaaagcacagtgtttccaagtttggctgtagcagcaattcctgaaggtctccccattgtggtcacagtgacgctagct

SEQ ID NO: 504243 - DNA, 134 bp, Homo sapiens
agaaggggtcaggaccgccaggacttcttaccgctgcatcctcagagcatgcttggtgctgttgcagggtgtgatggagaacaaagctatgtacctacacaccgtcagcgactgtgacaccagctccatctgtg

SEQ ID NO: 504244 - DNA, 100 bp, Homo sapiens
gatcttacctcttagcagcttcaaatgattttgcaagccgaatctggactgtggatgattatcgattacgggtggtagaagttgccagggacagataaca

SEQ ID NO: 504245 - DNA, 99 bp, Homo sapiens
ctgccacgtccaagcaaaccgggaaaggagaggatcccggagccgagattgtggacggcaacgcaaagatgaccctgggaatgatctggaccatcatcc

SEQ ID NO: 504246 - DNA, 100 bp, Homo sapiens
caggaagcttacaatcatggcagaaagcaaaggagaagcaggcgtgtcacctggttggatggcaagcatgtggtgtttggcaaagtgaaagaaggcatga

SEQ ID NO: 504247 - DNA, 50 bp, Homo sapiens
agcctcctgagtagctggtattacaggacagacaatgctgtgaagaatca

SEQ ID NO: 504248 - DNA, 75 bp, Homo sapiens
tttcgctttgatgaatcaggtcccgaaagtgctaaaaagctcctctggtgcaagtgtggtagctattgacaacaa

SEQ ID NO: 504249 - DNA, 100 bp, Homo sapiens
ctggggccctctgagaacccactgaagcggctgttggtgccgggggaagactaccatgccggggatgaagcgagactgcgggggtgctgcggccgtcctg

SEQ ID NO: 504250 - DNA, 96 bp, Homo sapiens
gggcacggagccgcccgcgcacttccaggtgcacagcgcgggagccgtcacggtgctcaagaacagcatgatcctctctgctgccatcttcatcac

SEQ ID NO: 504251 - DNA, 76 bp, Homo sapiens
gcttttcctccaggcctttgagaaacattaaccaggtggtatttgttggaaatttcttgagaattaatacgatcgc

SEQ ID NO: 504252 - DNA, 83 bp, Homo sapiens
gtggaccacatagacatttacgcggatgtcggcgaagagttcaaccaggcactactgcagtcttcagttaagcaacaagtaga

SEQ ID NO: 504253 - DNA, 105 bp, Homo sapiens
atgtgatctgaccacaaagaaagtagtagactacacaacagcgaaggtaccgaaagcacagtaatcactggtgtcgatattgtcatgaaccatcacctgcaggaa

SEQ ID NO: 504254 - DNA, 82 bp, Homo sapiens
caagtccagagcggttagataaggttttcctttggaatatggataaatacaccatgatacggaaactagaaggacatcacca

SEQ ID NO: 504255 - DNA, 75 bp, Homo sapiens
cgaaaagcaaggcatgcggacacacgccgtctctgtgtcaggcaaatacgccatgcgagacctagtccacaggct

SEQ ID NO: 504256 - DNA, 100 bp, Homo sapiens
cactgaggctctggaacttctgcccagctctccttggcctttgaactggccacaggtgactatttgtttgaacctcattcaggggaagagtacactcgag

SEQ ID NO: 504257 - DNA, 135 bp, Homo sapiens
ggggacccagaccctggagcctcagttggaagcagccgatccagcctgcggagcctgtggggcaggttccgtggggaccccactgcctggagtacaggtgcgcattgtctcagaaaacccacagagggaagcctg

SEQ ID NO: 504258 - DNA, 100 bp, Homo sapiens
ggcagctacttaatcctactcagaagaacttgtacagagatgtgatgttggagaactatagcaatctggttttcttgggaattgaatgatctggcacggg

SEQ ID NO: 504259 - DNA, 100 bp, Homo sapiens
gtttggatgttggatctacactttctcaagcactgtgatcttcaaataaaccaccatcatgggttcgggtcccatagaccccaaagaacttctcaagggc

SEQ ID NO: 504260 - DNA, 100 bp, Homo sapiens
aacaagtttgcagaaaccatgaaccagaagttcctagaacacacgaactttgagttccagatgctgaaattttcttctaaggagaaatatcccttattta

SEQ ID NO: 504261 - DNA, 115 bp, Homo sapiens
gcagaagtcgcgtgtctaggtgagtcgcggtgggtcctcgcttgcagttcagcgaccacgatgcggcattccaaaagaactcactgtcctgattgggatagcagagaaagctggg

SEQ ID NO: 504262 - DNA, 100 bp, Homo sapiens
tgtgtaccatgctgctattgtcatcttccttgaattctttgcgtggggccttttgacaactccaatgttgactgatgaaatctgtaagtacagacctgag

SEQ ID NO: 504263 - DNA, 90 bp, Homo sapiens
tcctcagccatgaagctgatgcccgggcggcaggccaaggaccctgagtgcaagacagagagaaccatggagtctggcagtaccgccgcc

SEQ ID NO: 504264 - DNA, 74 bp, Homo sapiens
ccccttcttgtccttggctgcctgtgtcatgccctctaggctcaaggctttggttattgccttgtctgtcaaga

SEQ ID NO: 504265 - DNA, 100 bp, Homo sapiens
ctcaactgccattctggattccagaagatttaactacgtggtccgggtggcagatgcctttgtgttccttgctgacctgcctgggcctcaacgtcttgtt

SEQ ID NO: 504266 - DNA, 50 bp, Homo sapiens
ggaggaagcaatacatccagtatgagagctctgattatacaaaaccagga

SEQ ID NO: 504267 - DNA, 75 bp, Homo sapiens
ttctggaaggccctgaccttcatggccgtcggaggaggagatcgggcgcatctccattgagatgaacgggaccct

SEQ ID NO: 504268 - DNA, 100 bp, Homo sapiens
gtgtcgggtcatgtatacaataatcagtaggatacatggtaatgggtgattctttcaatacttccttattcaaacaaacttttcaaagagtctttaccaa

SEQ ID NO: 504269 - DNA, 86 bp, Homo sapiens
gatgacatatttttggacctgaaacagaaattctggaacacctatatgtgagaaagatcagtctaaagaaaaggagaagaaagtga

SEQ ID NO: 504270 - DNA, 83 bp, Homo sapiens
ctttccagtgctaaaggatctctgatctgggcgtgcactggggctatgaagaaaccaagacttttcttgatatcctccgtgag

SEQ ID NO: 504271 - DNA, 75 bp, Homo sapiens
gggccatcttggctccaccaccctggttatcaatactctggctgaccatcatcatcgtgggactgactttggtgg

SEQ ID NO: 504272 - DNA, 101 bp, Homo sapiens
ggcagcctggcttccctcactggccagatatcaaactttacaaaggatatgctgatggagggcacggaggaagtggaagtttgaaggatgacctctaggaa

SEQ ID NO: 504273 - DNA, 74 bp, Homo sapiens
gacccccagccagcccggttctcggacgtgacctccttcagcacaccccccaccccagaacggaacaaccggcc

SEQ ID NO: 504274 - DNA, 50 bp, Homo sapiens
ctgccatgagcgagcgcctccgtcccagtgtaaacaggaacatcgataag

SEQ ID NO: 504275 - DNA, 100 bp, Homo sapiens
agactcttccaaggcactaccaatatgttatctccagatgccgcgcaactgtctgatctcagttcatggtgattcatggcaggggacgtggaaggattct

SEQ ID NO: 504276 - DNA, 100 bp, Homo sapiens
ggggcacgtgcagaaaggagccccgcgagtggcgcgccggggatgtgaaagaaaatggcccgaaccaagcagactgctcgtaagtccaccggtgggaaag

SEQ ID NO: 504277 - DNA, 74 bp, Homo sapiens
ttcatggagagcaaggagaaggatcgccaggtgctggaggacttcccaacgaatgtttcatccatttgtggacc

SEQ ID NO: 504278 - DNA, 74 bp, Homo sapiens
tttttgatctgacaaatgagcaaagtttcctcaatgtcagaaactggataagcgtttaaatgcagaattgcagg

SEQ ID NO: 504279 - DNA, 90 bp, Homo sapiens
gaggacggcggaacatctggaggctgggaaatgacaaggagccccaaactgtctcacagtcctcaaccacccagtctgggtgacccggtc

SEQ ID NO: 504280 - DNA, 75 bp, Homo sapiens
gttccttgtctgcctcgctttctccttggccaccctggtccagcgaggtactccaaagattcaggtttactcacg

SEQ ID NO: 504281 - DNA, 131 bp, Homo sapiens
ctgccgccgggttgctgtgcgactattctccgggagccgtccgtgtcaccgccggaacctggcgcagtgaacagagtatctgtcaggcaagagctgctgtgatggtttatgatgatgccaataagaagtgg

SEQ ID NO: 504282 - DNA, 100 bp, Homo sapiens
tccagatgaaaaactgggagagaaagggaaggaaattatgaccaagtacctcaccccaaagggactacttctgatgaagaaagtggcataattaaagctg

SEQ ID NO: 504283 - DNA, 100 bp, Homo sapiens
ccagcaagcggggccggtggcgcccgtgtcggagaccccgcgccggaccctgaggcagcgaatgacgacaacccccccgtgtcttttgtgaagttctccc

SEQ ID NO: 504284 - DNA, 74 bp, Homo sapiens
aaggtccagagaaggtggaggaatcctgatactgagcggtaagagcaaagaggcggaaattaagagaatcaaca

SEQ ID NO: 504285 - DNA, 121 bp, Homo sapiens
ccgccccgcgagcacagagcctcgcctttgccgatccgccgcccgtccacacccgccgccagcattttgaaagcgaagcagaagccgtagaatcagcggcgagcctgttgaaagaacccac

SEQ ID NO: 504286 - DNA, 100 bp, Homo sapiens
ggaaacagtggcatggttcgtgccaaattccgaagcaatcttcctgctaaggccattggacacagaatccgagtggtattggcatactccacacatctgt

SEQ ID NO: 504287 - DNA, 107 bp, Homo sapiens
ccgagaaggtggacgtgctggtgtctgagtggatggggacctgcctgctgattgtagaaggcatgaaacaaaaaatgtggagtattgaaaatattgccttcggttct

SEQ ID NO: 504288 - DNA, 74 bp, Homo sapiens
ttcattttgactaaaaacctaaggacttgcaattgtgaccaaatatattacaaagggctggaaagaagttcatg

SEQ ID NO: 504289 - DNA, 75 bp, Homo sapiens
agtgatggaccgtgctagtgacctgactgatgccttcgtggagaccatcatggagcagttcaaccctagcctccg

SEQ ID NO: 504290 - DNA, 75 bp, Homo sapiens
gagtggacaggttaagggactcccaggaatatcagcatctctggaagttgatggtagaagaatccgatttactgg

SEQ ID NO: 504291 - DNA, 83 bp, Homo sapiens
gatcctgatgaagttcgagcactaatatttaagaaagaagatgttaactttcaggatttttagactctgaggagcagttggag

SEQ ID NO: 504292 - DNA, 75 bp, Homo sapiens
aagctgataggctgcgctaccggaatgtcatccagcgagtgattagaatccaggagtcctccagctgagaacgag

SEQ ID NO: 504293 - DNA, 80 bp, Homo sapiens
cgtcttgcctgtgtcccacttgttcgcggcctatagctacaaggctttggccgaccaagtgtgtaccatgctgctattgt

SEQ ID NO: 504294 - DNA, 83 bp, Homo sapiens
ttggcccgcctaaggcactgggtgtacctgctttgcttctctgcagcttccgacttcgactccttaccttaaaagatgctgga

SEQ ID NO: 504295 - DNA, 90 bp, Homo sapiens
gcgtattcttttagtggaccaccagagatcgttaactgaagacaatatgcaaaattctcacatggatgaatacagaaattctagtaatgg

SEQ ID NO: 504296 - DNA, 89 bp, Homo sapiens
aatggagactcacctgctaatgttgatgctgcggaggagttggatttgtcttctagttctcagatgtctcccctttccttatatggtga

SEQ ID NO: 504297 - DNA, 83 bp, Homo sapiens
caatatctgtcttcggtggactccttcggcagtccacccaccgccgccgcctcccagggattaaagcctgtggtttccacaga

SEQ ID NO: 504298 - DNA, 75 bp, Homo sapiens
gggaaggatgttaattcatcttcacccgtgatgttggcctttaaatacctcggaatatacagaactggatgacag

SEQ ID NO: 504299 - DNA, 75 bp, Homo sapiens
agaacagtgcctaaagcacaacagacactgcacgtggtgaggtgtgtatggcttcccgtggactcagcctcttcc

SEQ ID NO: 504300 - DNA, 100 bp, Homo sapiens
aggacacttcactaaatcggcttcacagaaaggagtcactgccttctaacgaaagggcagtacagactttggcagaatacaaatggagagatttgcatgg

SEQ ID NO: 504301 - DNA, 100 bp, Homo sapiens
cggagatggtgcagaagatggaggagtcagatgccctggatgcagctagaggatgattctctgtacatatcccaggctaatttcatcctggcctaccagt

SEQ ID NO: 504302 - DNA, 90 bp, Homo sapiens
gcacactcttggggctctacctctttttcaaaagcctgccaggcagcatcactaaagcaggagacttccttgaagccaactacatgaacc

SEQ ID NO: 504303 - DNA, 96 bp, Homo sapiens
ccaggaaactgttcttacatttttgcaaaggactgtggtgatttggagcctcggtacactgtatgggtgatagattatacttgtcgagtttgtcaa

SEQ ID NO: 504304 - DNA, 100 bp, Homo sapiens
atcggcggcggcttccgtcacctccgctcccccgatcctattcccagtcgtatagccgcaatggctgaaaatggtgataatgaaaagatggctgccctgg

SEQ ID NO: 504305 - DNA, 80 bp, Homo sapiens
tctatgaggaacgagccaagaaatttccaactggagtgatcctgccatgaagcagtttctgctgtacttggatgagtcca

SEQ ID NO: 504306 - DNA, 75 bp, Homo sapiens
cctgcaggcacggtggtgtcaaggcagggagaccaggccgctacctgtctgaggaacccgagccctacctggcag

SEQ ID NO: 504307 - DNA, 88 bp, Homo sapiens
aagatggtgagaagaagattaaattgcttactggtaaacgcgttcaactggcggaagacctcagagtcagtggatcggtggggaaaat

SEQ ID NO: 504308 - DNA, 90 bp, Homo sapiens
ggctccgggggtggcgggcgcagctgctgtgacagggtttcagtgagctcaaccctttagctttatacacgacatccagtggagggccag

SEQ ID NO: 504309 - DNA, 82 bp, Homo sapiens
attggaactcagtgaagacacagatgttcctgttcagagcaaccagctaatgaagtggacgttgtggtagcaccatgccaag

SEQ ID NO: 504310 - DNA, 90 bp, Homo sapiens
caacctggggacgattgccagatcggggtcaaagaccatgctcgacagctgaccaaggccatgatgcgaaaggccacggccagccgcctg

SEQ ID NO: 504311 - DNA, 74 bp, Homo sapiens
gtcttcatcgctgaggttcccataataggctcttctggagctggagatgaactcggacctcaaggctcagctca

SEQ ID NO: 504312 - DNA, 100 bp, Homo sapiens
caaaagaatatttagaatgcaggatggagagttactccacaggatccgctgaacataggatgttgccacaaaatctacctcgtgtatttttctctttcac

SEQ ID NO: 504313 - DNA, 96 bp, Homo sapiens
cagaggtcttcacactttcagtaccaaatatttcactcccagctccctcgcaattccagccttctgtaggaagagtcagtgaatggctgcggtgtg

SEQ ID NO: 504314 - DNA, 96 bp, Homo sapiens
atgtggaacggagtcgcttcccctactgcgtggtgtggacgcccatcccggtgctcactttcaggtggagcctctgggaggtgatgaggtcatgag

SEQ ID NO: 504315 - DNA, 95 bp, Homo sapiens
cggccggcgaaaggagctggtgcctgtgcaagttgttgagaaagttggagtgactggtccccctgatccacaagtccgctgtccctctgtcattg

SEQ ID NO: 504316 - DNA, 88 bp, Homo sapiens
cgtagtccgacgcctggggcgatggatccgtttacggaggtggatccataaagaacccagccaacccgcagagggaggggaggggctg

SEQ ID NO: 504317 - DNA, 51 bp, Homo sapiens
tgcctgattacaggagctttaacaggcttaatgccagaccgggagttggag

SEQ ID NO: 504318 - DNA, 99 bp, Homo sapiens
gaggctgtggcagataggaccacgtttggcgagctcatccagcccttctttgaaaaggagatggcagagaaccatggagtctggcagtaccgccgccag

SEQ ID NO: 504319 - DNA, 90 bp, Homo sapiens
caacggcaagggcggcgaggctccggccaacgggctgcgcagagccgcggcgccggagtgataacaatccatattcctcatttggagcaa

SEQ ID NO: 504320 - DNA, 83 bp, Homo sapiens
ccagagcgccggcaagagctcggtgctggagaacttcgtgggccgggggatatgagactttctactcggaatatcctgagtgt

SEQ ID NO: 504321 - DNA, 98 bp, Homo sapiens
gaagaacgttggttcagtctggaaaggcatgacatcttgaagcaggaagggggcttccaggtcatagaagctgaccttggggctctggaattatggag

SEQ ID NO: 504322 - DNA, 83 bp, Homo sapiens
cgggagatcatggacgcggcggaaatcactgagctgcgtcagaagctggctgatttgcagaagcaggtgactgacctggaggc

SEQ ID NO: 504323 - DNA, 51 bp, Homo sapiens
acttcgaggaattgctcaaagtgctgggccaaacgtaccaagaaagtcggg

SEQ ID NO: 504324 - DNA, 81 bp, Homo sapiens
cgcagatcctgagacccggacagtggcagtgaaacaggccatctggctgctgtgcacaggcgctcgtgaggctgccttccg

SEQ ID NO: 504325 - DNA, 82 bp, Homo sapiens
ccgctgcaaggggaggagagaggccgcctcagaactgaaggcagaagctagtctaatggaccagatgagtagttgtgatagt

SEQ ID NO: 504326 - DNA, 100 bp, Homo sapiens
gggaaatctggtgtatgttgtcaactatccaaaagaccgaccaagaccatcactatgaccgatggagactatgattatctgatcaaactcctggccctcg

SEQ ID NO: 504327 - DNA, 98 bp, Homo sapiens
cgcctttcccggagagtacatccccaccgtggcagctgcaatgactctccgcacggtattattgtcattgcaagcactattggcagctgcagagccag

SEQ ID NO: 504328 - DNA, 100 bp, Homo sapiens
cagggatggagccctctggcggaagccatcagctatggagataggcagatgacttgataaagatgacatggtatacatggaagcatatgataaattgttg

SEQ ID NO: 504329 - DNA, 100 bp, Homo sapiens
ctactggatcaaggacagacagctcaccaaccgtgacagcaccatactggaacttcaaaaagttctgaaaacatgttgggtccttctcccacacctgagg

SEQ ID NO: 504330 - DNA, 83 bp, Homo sapiens
gtctctctgctgcggcgcggggaccgctgtgctctcgcttgctcacttccgacagagaaaaacaaaaggtgacagttcgcatt

SEQ ID NO: 504331 - DNA, 103 bp, Homo sapiens
cgactgaggccggacggggcggacggcgacgcagcccgcggcagaagacaatgcagatcttcgtgaagactctgactggtaagaccatcaccctcgaggttga

SEQ ID NO: 504332 - DNA, 90 bp, Homo sapiens
ataaaaagagatgtggggggattctcgacctgctaacagaactggaccttttcgacaaatttacatgtattggagaccagaccagaagcc

SEQ ID NO: 504333 - DNA, 87 bp, Homo sapiens
ctccgtggtttccacgaggaaagaagagctgattgcaattcttgatcattttaacatccagcaaagtggaagatgctttctacaaag

SEQ ID NO: 504334 - DNA, 83 bp, Homo sapiens
cttggactgagtcctgcaggacacaggtgcaagaaagcctttgaggtgaaggtgtatgaaagtcatcataacagatgttttcc

SEQ ID NO: 504335 - DNA, 85 bp, Homo sapiens
cccggtttgacgcacacggcaccaaactacttatctaaaaacagactggttgaagttccaatggaattgtgccattttgtatcac

SEQ ID NO: 504336 - DNA, 90 bp, Homo sapiens
gcggcggccatggagttgggcgagctgctctacaacaagtctgagtacatcgagacggtgccttggcatctcccaatggggtggctttgc

SEQ ID NO: 504337 - DNA, 98 bp, Homo sapiens
aatctcttggagaaagactactttggacttttgtttcaggaaagccctgagcagaaagttcagccgtctgtatatctccccagatacctgaaactgac

SEQ ID NO: 504338 - DNA, 83 bp, Homo sapiens
gcccctgcgccggcctcggccaccgagatcctgctgacgccggctaggtttcagctcctggcatcagctctattcaaatctgg

SEQ ID NO: 504339 - DNA, 75 bp, Homo sapiens
gacaatcgcactttataccacctgcgattactggcatggtgctgatgtgaaatgtgtagactggcatccaaccaa

SEQ ID NO: 504340 - DNA, 83 bp, Homo sapiens
actaccactcacccgcagactccttctccagcatgggctcgcctgtcaacgcgcagagtccctgtgaagcaggaagagtgagg

SEQ ID NO: 504341 - DNA, 100 bp, Homo sapiens
ccctggcccgtcatggagatggaaaaggagttcgagcagatcgacaagtccgggagctgggcggccatttaccagatattaataaggcagcggaaagaag

SEQ ID NO: 504342 - DNA, 75 bp, Homo sapiens
atatattggatatgaaactggaagacatcctggctcgcttctcatatgtgcggatgaaatatcttttcttttcct

SEQ ID NO: 504343 - DNA, 75 bp, Homo sapiens
attccaatcccttctcttccagacaaacaagtcacaggtgcagtagacattgttgcaatcatgatcggcaatctg

SEQ ID NO: 504344 - DNA, 82 bp, Homo sapiens
aatttccatgtcaacatagtcctggtgtgcaactgaggaacatggctcaagaaactaatcacagccaagtgcctatgctttg

SEQ ID NO: 504345 - DNA, 98 bp, Homo sapiens
ataattgggagaagactcactggccgaatggcagcagtagatgacttgcaatttgaaggcatcaagattacgcgaagaagcgcataacatgggaacta

SEQ ID NO: 504346 - DNA, 50 bp, Homo sapiens
caaatccgggggcaaggccaaaaagaagtatcctagaaggaaaacatcac

SEQ ID NO: 504347 - DNA, 100 bp, Homo sapiens
ggagtcatgagcgacagcggcgagcagaactacggcgagcgggatgttttagaagaatgtatgtctcttcccaagctatcttcttattctggatgggtgg

SEQ ID NO: 504348 - DNA, 87 bp, Homo sapiens
gtagactgaatccacatagagaaagtgatggggatcactactcttggaatcaaagataaatccaaatactgcatatcagaaacaaca

SEQ ID NO: 504349 - DNA, 90 bp, Homo sapiens
tccacagcagcagctggatattgagccggatagacctattggatatggagcctttggtgttgtctgctctgcttatgataatgtcaacaa

SEQ ID NO: 504350 - DNA, 100 bp, Homo sapiens
ttgaaaaggctttgagaaattttgagtcctcgagtgaatgggcggatctcatatcttcacttggcaaactcaacaagctggtgccgacaagaaagccgag

SEQ ID NO: 504351 - DNA, 102 bp, Homo sapiens
agcatcatttcaatttatgcaggctctttcattatcatcctcatcttgatatagttccatgaatattaaatgagattatttctgctcttcaggaaatttctg

SEQ ID NO: 504352 - DNA, 51 bp, Homo sapiens
tgtacctgttaccactttcaaaagtggcagtagagaagagcatcacagaag

SEQ ID NO: 504353 - DNA, 100 bp, Homo sapiens
ggggacttggcagatctcaccgtcaccaacgacaacgacctcagctgcgatgtgcccgtggggcaggaggtggaggggatgaacatcctgggcttggtag

SEQ ID NO: 504354 - DNA, 75 bp, Homo sapiens
agtgggggtgtgcaaacccgagagaactgggttcatgtgtgcccagctgcccaaccccgtcctggacagcatcag

SEQ ID NO: 504355 - DNA, 83 bp, Homo sapiens
aaggtctggtgtggcgtgatggagaacctgtccaggcctatgaaaggaggttccctacatgtcctttgattccgatgttcgtg

SEQ ID NO: 504356 - DNA, 95 bp, Homo sapiens
attggatttaaaagacagtcctcgtcagcactgactttcagctatggaatcggtgtagcccatcagtgttatcatggtttcatgaaggctgtcca

SEQ ID NO: 504357 - DNA, 85 bp, Homo sapiens
aagtatgttgtaccttgtgacagaatatgccaaaaatggagaaatttttggtcacggtctagatcacattctcgatccagaggaa

SEQ ID NO: 504358 - DNA, 100 bp, Homo sapiens
aatagctgtttgtattttggctgctgcaggagccattttagcatctgcctgcccttctgccatccgagcgccctgactgcgccacactgcaggccatgga

SEQ ID NO: 504359 - DNA, 87 bp, Homo sapiens
gctctgctgtctcctgcaagaactggctcaagaaatttgcctcgaaaaccaagatgaaacaggcgcctatttaatcgacagagaccc

SEQ ID NO: 504360 - DNA, 98 bp, Homo sapiens
gctccggaggatgagtgacgagtttgtggactcctttaaggtcaatgagctgaaggagaaaggcaacaaggccctgagcgtgggtaacatcgatgatg

SEQ ID NO: 504361 - DNA, 100 bp, Homo sapiens
ctacaccatggagaacaagcccatcgtcacctacaatgcagatcttcgtgaagactctgactggtaagaccatcaccctcgaggttgagcccagtgacac

SEQ ID NO: 504362 - DNA, 132 bp, Homo sapiens
gcaggttttaaatcaagatttaacattccaacacataaaaattatttatccaacagctcctcccaggttgcttagccagacaatgaaggatcatctagtaagagtagcaaatgaagctgaatttatcctgag

SEQ ID NO: 504363 - DNA, 100 bp, Homo sapiens
tctttggcaagtggacattttactggctcaaaacaactctgctcatggtgattacatgcaaaataacgagagcagcttaatagagcaagctccaatacct

SEQ ID NO: 504364 - DNA, 80 bp, Homo sapiens
aggaacagaattagaagaaaaggaaccctggcctgaggtagctacagcaagctgggtagcaggcagatccaaaggatatc

SEQ ID NO: 504365 - DNA, 82 bp, Homo sapiens
gcggcgcgagggaggctacacgtgcgtctgccgcccgcgcttcaccggcgagaaccactgtctctgatcaacgtgcggaaga

SEQ ID NO: 504366 - DNA, 74 bp, Homo sapiens
ttttcacttatctcgaaagcctatcagcatagttaaggaggcccaggcatatgcagatgacaacagcttattgt

SEQ ID NO: 504367 - DNA, 100 bp, Homo sapiens
tgcagaaaccaacagacaatgccaatttacgtgtcattatggaactacttatgagggcacaggagctgcaagttttgacgaatttggcaattctaagtac

SEQ ID NO: 504368 - DNA, 75 bp, Homo sapiens
tgcgtctgccgcagagtcggcacctgaaggacatggagatgatgaggagtctgatgaggaagctgtgaagaaaac

SEQ ID NO: 504369 - DNA, 73 bp, Homo sapiens
acactgcactaatgcttacatgttagtctacatcagggaatcaaaactgagtatatgaatggcacctgcccag

SEQ ID NO: 504370 - DNA, 75 bp, Homo sapiens
cccgggcccgcgcaattctccgccagagggccttctggcggccgcccctggtttctcctggggggtgatgagcgg

SEQ ID NO: 504371 - DNA, 100 bp, Homo sapiens
aagcctcttgtacgactgcgaacagcaccagttgcccttgaagcagaaaacagaggtgaaatgaaactagctctccagtatgtcccagagccagtccctg

SEQ ID NO: 504372 - DNA, 121 bp, Homo sapiens
aaaaaggagagcctctgagctcaacggaggattgtgcctgagaagaacccacagagctcctgaattcagaccacagatccacagccacagtccagatatgtagcggttctgtaaaccttaa

SEQ ID NO: 504373 - DNA, 100 bp, Homo sapiens
gcggcacgactggaggcacaaggaggacgccggcgtcttctgctcagttgtggaagctgatcgaggaagcctaagcaggctctgtgaagtgggaatagtg

SEQ ID NO: 504374 - DNA, 82 bp, Homo sapiens
gctgccctcagctccgagtccagggcgagccctgccaggagcccggaagtgggtccgcacgagacagaatagactacactca

SEQ ID NO: 504375 - DNA, 143 bp, Homo sapiens
cctcggcgccctttcttggcccttgttcccccaaatgtctgactctgactctcggactgagaaacgcaaggcagagtggctcctcacagcctgaagctcatccttctgcacgggccagccaggccagcacagaggcaccaggg

SEQ ID NO: 504376 - DNA, 82 bp, Homo sapiens
ctctttcaactacaccagccagcccgaccaggtatgtgaggagcagcgctgtgaggaggaagtcttccccctggccatgaac

SEQ ID NO: 504377 - DNA, 80 bp, Homo sapiens
gaattgcatgggaaaatcatggaagttgattactcagtctctaaaaagctaaggtgctatacttggtagatcagaaactc

SEQ ID NO: 504378 - DNA, 87 bp, Homo sapiens
taatttgagcaagccagaatttaacccaacgtcaatcaaattcaaaatccagctggtcgctgttcatgatgctatggactcctacta

SEQ ID NO: 504379 - DNA, 114 bp, Homo sapiens
acaggccttcgagtacatctccattgccctgcgcatcgatgaggatgagaaagtgagttccttcggggttactcctgcagtaggtggactatcatctgggacagttggggaagc

SEQ ID NO: 504380 - DNA, 100 bp, Homo sapiens
caacaccgtgctcctcgaccccccactgatcgcgctggataaagatgcgcctctgcgatttgcaggtcatcatcagatttgaaatatttaaagtggatac

SEQ ID NO: 504381 - DNA, 90 bp, Homo sapiens
tgcataccctggaccagcagaaacctagagtgtgacagctggagtatcagccttggaagtatatacgccaaaagaaatcttcgtggcaaa

SEQ ID NO: 504382 - DNA, 126 bp, Homo sapiens
ccgtgcttgccctgtcatcccacctgagaaccatgctcaccgaccctctcagagtcaagatctccactgaagttggcatcacaaatgttgatctttccaccgtggataaggatcagagcattgcac

SEQ ID NO: 504383 - DNA, 99 bp, Homo sapiens
agcgtcacgctgctggtggcccgggtcttccagaaggctgtagaccagagtatcgagaaggactgatcctttgaaatactccagccatgactaaaagag

SEQ ID NO: 504384 - DNA, 100 bp, Homo sapiens
cacctccatcatcgtcaaccagctcaagaagatcatcaagcgcaagcacaccctaccgaattacaagatcagttttaacttctagtcatggcgaatgatc

SEQ ID NO: 504385 - DNA, 90 bp, Homo sapiens
aaggttgtgagctgtatggagcagttgacacgtagtcactgggaaggatttgcctctgcctttggctatgggctgctttgtctaggaatg

SEQ ID NO: 504386 - DNA, 74 bp, Homo sapiens
ctcagcgccctgcagaaggcccaggtgaaaggtgtagcagtcactcggcctacacccacagcatcgaccttgtg

SEQ ID NO: 504387 - DNA, 75 bp, Homo sapiens
tgggaccagcgtctcggaggcgccgcaggcaaacagaccttgctgactgaaggcaaagactcctccatcccacct

SEQ ID NO: 504388 - DNA, 83 bp, Homo sapiens
cgagcactaatatttaagaaagaagatgttaactttcagacttaattcagtgcacaaatgagatgaatgtgaacatcccacag

SEQ ID NO: 504389 - DNA, 98 bp, Homo sapiens
atcaataaaaaacttcccaaagaactcctgttacgctgaagaagcatctgtagggaatccagaaggagcgttcatgaagatgttacaagcccggaagc

SEQ ID NO: 504390 - DNA, 90 bp, Homo sapiens
gctgaagctgcgctttggcgaggccccaatgcacttctgtgaagtcatgctgaaggtaatcatggccacaaacagagcagacaccctgga

SEQ ID NO: 504391 - DNA, 100 bp, Homo sapiens
ggatcgtcacctaccccaagtccgcgtatctggtgcaggccgtgagagcagcgggcaagtgcgatgcggtcttcaagggcttttcggactgtttgctcaa

SEQ ID NO: 504392 - DNA, 124 bp, Homo sapiens
tgtgaactgtttctcttctgcagaaaaagaggctcttcctcctcctcccgcgacggtgctggagaatctggtaaaagcaccattgtgaagcagatgaggatcctgcatgttaatgggtttaatg

SEQ ID NO: 504393 - DNA, 100 bp, Homo sapiens
gtctcctgtgtggcgatggtcttcctgctggggctcatgtttgagggcgccctgcgtccggcagaggaggcgagcatcccgctcaggtgatgaggaaccc

SEQ ID NO: 504394 - DNA, 95 bp, Homo sapiens
ccggcgcgacctactttcagcgaggcagtctgttctggttcacagtcatcaccctcagctttggctactacacatcacccacaaaagctgtatat

SEQ ID NO: 504395 - DNA, 92 bp, Homo sapiens
aagcgagagcctgaagagttggaccagttgtacctggatgacgagcggttctggtgaggttggaaggatgcagccacccggttgtcatgaaa

SEQ ID NO: 504396 - DNA, 98 bp, Homo sapiens
tggcagcgcgacctggccagctgccgcgactgggaggagcgccggaacgccgaggcccagagataattgacgaccttgccaacctagtggagaacaca

SEQ ID NO: 504397 - DNA, 82 bp, Homo sapiens
aaaggaaacaaaattcgatttgcaaatcattcagtgaatcccaactgttatgccaaagatctgttaccattgggatgataac

SEQ ID NO: 504398 - DNA, 75 bp, Homo sapiens
cgccgccatcatggacaccagccgtgtgcagcctatcaagctggccagggctgcctctaagaatcaaacttcact

SEQ ID NO: 504399 - DNA, 75 bp, Homo sapiens
ggctccgctggaagtgagggttctgggcccacgaggtagcagcaccgcctgcattgtggtgctggacagaaccag

SEQ ID NO: 504400 - DNA, 83 bp, Homo sapiens
ctcggagaccccgcgccgacggctgctcaaacatcagggcgtccgacctccgatcatgaacgggcccctgcacccgcggcccc

SEQ ID NO: 504401 - DNA, 98 bp, Homo sapiens
agaatgtcctaccttctctatcagatgctgtgtggaatcaagcaccttcattctgctggaattattcatcggaacacacgcaggacttgaaagatgtt

SEQ ID NO: 504402 - DNA, 90 bp, Homo sapiens
ccggatcccgagccgggcaggatggatcaccaccagccggggactgggcgctaccaggtgagataaagaagccaccagtggcccccaagc

SEQ ID NO: 504403 - DNA, 100 bp, Homo sapiens
cccccttgctgcctgggggttcagacttgatttgacagacaagaagtggactgagctggataccaaccagcaccggacccatgccatgaggctcctggat

SEQ ID NO: 504404 - DNA, 100 bp, Homo sapiens
tcacctgtgcgggatggaacaaaaggtggccagcatcgaaatgttcagccttttagtgatgaagatgcatcaattgaaacaatgagccattgcagtggtt

SEQ ID NO: 504405 - DNA, 87 bp, Homo sapiens
aacaactggatcaacccagacaagctttctctgaagtttttgagtcccagagagccattctatgtcaaacattccaagtactctttg

SEQ ID NO: 504406 - DNA, 100 bp, Homo sapiens
cggagccaggtatacgctgtgaatggcgactactatgtgggcgagtggaaggacaacgtgaaacacgctgtcttttggggagacattgccttagatgaag

SEQ ID NO: 504407 - DNA, 75 bp, Homo sapiens
taccttgggcacaacagcgaggaccctgctctagaaggaacgtacgccaggtttgtaaccccagatcagaagtac

SEQ ID NO: 504408 - DNA, 80 bp, Homo sapiens
gccgctgccaccggcgcgcccgagcctctccttccgatgaaaagagaaaggaagaatggactacagccaccaaacgtccc

SEQ ID NO: 504409 - DNA, 100 bp, Homo sapiens
tggaaacaggaacaggactgactccagtgatgacgcaggccttaaggagaaagtttcaggctcagcaacagcctcaccaaggactccatgaatatcaaag

SEQ ID NO: 504410 - DNA, 76 bp, Homo sapiens
tgttcttcttcgagtatttgtagaaggcttgccaagaagtatcaccctgacacaaataaggatgatcccaaagcca

SEQ ID NO: 504411 - DNA, 87 bp, Homo sapiens
caaatccccgacgtttccagggccaccccccatacgtattctaccttgtaaatactgttatttgtatatactgtaaatgatgacatc

SEQ ID NO: 504412 - DNA, 75 bp, Homo sapiens
cctggacccagctgagcgggcggtcattcgcatcgcagagagaaaaggaacagttccgtaagctctttattggtg

SEQ ID NO: 504413 - DNA, 90 bp, Homo sapiens
ctaattgctaatccagtatttgcggatagctccaaactgggatatgctactgcagcactggggtgtcagttgttggtccgacccagaacg

SEQ ID NO: 504414 - DNA, 89 bp, Homo sapiens
ttcaacaaaaagatgtatgaggagttcaagcagctggctctggaggacgccaaagaaggctacaggtttgatgaacttgtgaaaaaatt

SEQ ID NO: 504415 - DNA, 75 bp, Homo sapiens
cctgggagcttgctgcagcttcagtgtctccagaacgctatagctatggcacctccagctcttcaaagaggacag

SEQ ID NO: 504416 - DNA, 83 bp, Homo sapiens
aacaggcagagccaagtgcgtcctggaggcttcccccgttgcgaagatcagacactcctctaatttacaaagcagtgcccagc

SEQ ID NO: 504417 - DNA, 80 bp, Homo sapiens
gcacctcggggacattattgcgcgtggaacggctgcttttggaagttactccacaggatccgctgaacataggatgttgc

SEQ ID NO: 504418 - DNA, 75 bp, Homo sapiens
aacaaattcatcccagaaatctaagaggcacaacgaggccctcttggaggaggcgaagatgatgaacagactgag

SEQ ID NO: 504419 - DNA, 100 bp, Homo sapiens
gtggcggcggcgccatggcagggcttgcaggacgagattgaggagctgcgggccgagatgctggagatgcgggacgtctatatggaggaggacgtgtatc

SEQ ID NO: 504420 - DNA, 100 bp, Homo sapiens
ccgcaccgcctgcgggagcacctggagaggggccgcggaaacctggagtggaaggacaaatggtggcccggagtttgctcgataccttgagggaagtctg

SEQ ID NO: 504421 - DNA, 112 bp, Homo sapiens
tgcagaagtggaaggagcagaacgtgagggtgtaacttacaaaaagaaagtcctacctccatctccgtgggccccagcaccagccgacggcccgcagcctcccaaagactct

SEQ ID NO: 504422 - DNA, 98 bp, Homo sapiens
gatgaatttaaagatgtttctgcaacagaaccactatcagatgtagaaggtggtgatggactgcagctcagaaaggaacatactctcaaaatatttac

SEQ ID NO: 504423 - DNA, 80 bp, Homo sapiens
ccccaccaaggatgcccaggataccgggcatttgccactgcaagatgcttgaccactatgctatcatcaagtttccgctg

SEQ ID NO: 504424 - DNA, 88 bp, Homo sapiens
ggacaatttgtagctaagactcccggataccctgaagtcgggaaatgacctagaggatcaagacataatgggagcatttttagacaag

SEQ ID NO: 504425 - DNA, 74 bp, Homo sapiens
ctgagcgcccaggaccctgttccatccaaactcttgccctttgagggaccaggaatacaaacagaagcttgcac

SEQ ID NO: 504426 - DNA, 82 bp, Homo sapiens
ttgtgaacagctgtgtgtttgttcatcagactcttcaccagttggaggaaatgtggactggaaacagatagcaagtattcag

SEQ ID NO: 504427 - DNA, 82 bp, Homo sapiens
gtgtcgccatgggccgccgccccgcccgttgttggaatcgaagcctcttaaaatggcagatgacttggacttcgagacagga

SEQ ID NO: 504428 - DNA, 90 bp, Homo sapiens
aaaccaacgcctggctcggagcagcagcctctgaggctgaaggtgatgtggccgccctcaaccgacgcatccagctcgttgaggaggagt

SEQ ID NO: 504429 - DNA, 76 bp, Homo sapiens
ggaaaaccagttattgaatatcaagaggaggagttgttgcaaagccttctagacaagctcagtggaatctgaaggg

SEQ ID NO: 504430 - DNA, 100 bp, Homo sapiens
cagaaaatgtgctagattggaggtgaagaccctggagccagagagcctaggcttagtcctagccctgcactgaagttacagaatgtctgaaggggacagt

SEQ ID NO: 504431 - DNA, 100 bp, Homo sapiens
ctggtgactttgaacatgctggtgccgctagccaagctgtcctgcctggacttaattcagtgcacaaatgagatgaatgtgaacatcccacagttggcag

SEQ ID NO: 504432 - DNA, 80 bp, Homo sapiens
cgacccggcccggtcaggccccatactcagacaatgcagatcttcgtgaagactctgactggtaagaccatcaccctcga

SEQ ID NO: 504433 - DNA, 95 bp, Homo sapiens
acgagcagatcctggtcctcgatccgcccacagacctcaaattcaaaggggtacttcggtccttggtggaagcatctagctcaggtgtgtcggta

SEQ ID NO: 504434 - DNA, 100 bp, Homo sapiens
cctgcccttcccatgaggcaggctcttcaatatcagttttagagaatgtggcgtggagaaattctcaaggaaagagtaaaatgctggtgatgtgctgagg

SEQ ID NO: 504435 - DNA, 75 bp, Homo sapiens
gtcaatttgacacttgtggatttgccaggaatgaccaagctcaagactgcagtgcagatgacgacaacttccttg

SEQ ID NO: 504436 - DNA, 153 bp, Homo sapiens
gccgcctgtggcagcgcctgcgcgacgcctttcccgaggaccggtccgaactggcgcaggggccgctgcggcaagtgcctgcacctctgcatccctggagccctcttatgtgcttagagcaattggcactgatgaggatttagcgcactcttc

SEQ ID NO: 504437 - DNA, 90 bp, Homo sapiens
cgcagatgttgtcaaggtggcctaccaggaggccaggggtgtcgccatgattgaaaactgtaactatgcagtggaacttgggaagaacaa

SEQ ID NO: 504438 - DNA, 98 bp, Homo sapiens
ggcaacctccgggactctgacgttggatatgtcaagtgaccagatagctgccaatctgcaagcagttattaatgaagtttgtaggcacagaccgctga

SEQ ID NO: 504439 - DNA, 100 bp, Homo sapiens
gatgcggcccacgctcttccgactggcgagtgacacagaggacaatgatgaggccttaggtgccctcaagtcctatctgcgggagctgccagagcctctg

SEQ ID NO: 504440 - DNA, 100 bp, Homo sapiens
gaagctcgcggcgcgggacccggaggacggtatcccgagcccaccgtgctacgcagttaagggaagaaagtcggaggctggctttggctgcgaaaagaga

SEQ ID NO: 504441 - DNA, 82 bp, Homo sapiens
ctccaggatgaggggcatggtggcaattctcatcgtttgttgaaattaaaggaagtgttttcaagaagtttgaaaagaacaa

SEQ ID NO: 504442 - DNA, 75 bp, Homo sapiens
gaacgggcaatgaggcagacacagtgctctgccaatggatttatgacccaaactaccaacaactctagccaaggt

SEQ ID NO: 504443 - DNA, 99 bp, Homo sapiens
gttctttgtctgctggcagctaggggcgacgaggcgggacgtcatggaagtgacagtactgcttttaaagagacagtgttagggatcttggaagcacag

SEQ ID NO: 504444 - DNA, 96 bp, Homo sapiens
tcgtctgcaagaccgcgaggcgagacctcttcaagagtgagccatggagctacgtgtggggaacaagtaccgcctgggacggaagatcgggagcgg

SEQ ID NO: 504445 - DNA, 95 bp, Homo sapiens
agtttgcagaaaaaacttcagcatgtgccaggaacacaacctcaccttgatcagacatccccgattgaaagaaccagagaggctctgagaaacct

SEQ ID NO: 504446 - DNA, 98 bp, Homo sapiens
agtaaccctgagacaaccacttctggtggttgccactcacctgaggatctccctagatctttagcttctactcccactgctcctaccactccagcaac

SEQ ID NO: 504447 - DNA, 97 bp, Homo sapiens
ggagagctcgccttggagagcccaggagcaggggagacatggtgtcttacaagtatcaagaacttactatatgtggttgaataaacaatcaaggtaa

SEQ ID NO: 504448 - DNA, 90 bp, Homo sapiens
ggagcagcagaacaagaggcagctggaacggcgggttggcaaggccacaggcttcctcaagaactttctgatcgagcccttcgtccccca

SEQ ID NO: 504449 - DNA, 75 bp, Homo sapiens
agcctgcggagcctgtggggcagagacacctgtgcatagcagatcatcttcacctattcctctgactcctagcaa

SEQ ID NO: 504450 - DNA, 100 bp, Homo sapiens
gcagacgctgcagttggagcaacagtccaagctcaaatttcagcccaaggctatgagtatgacaatctctacgtccacttctttgtagaattgccaactg

SEQ ID NO: 504451 - DNA, 82 bp, Homo sapiens
cagtgcccttgtggcgaatggggctcacgtcgagaaaagcccgatggctccccagtatttattgccttcagatcctctacaa

SEQ ID NO: 504452 - DNA, 98 bp, Homo sapiens
catgcgtttattgcgcaggccttgtgcctccaaggaaaatccacctcgcagcttgtaaatctacaggttttgccagtcagtcagatgatgatcaggtg

SEQ ID NO: 504453 - DNA, 100 bp, Homo sapiens
tgaagactcgcatccgaatgggccagtatgaatttcccaacccagaatggtcagaagtatcagaggaagggtgtccgcaatgttgccagtgtctgtctgc

SEQ ID NO: 504454 - DNA, 82 bp, Homo sapiens
gttctctcgatcagggcatacatctttcttcgacaaaggtgttctaagaacggaagcatctgggctggatggaatttagcat

SEQ ID NO: 504455 - DNA, 75 bp, Homo sapiens
agggagggctccgctagcccggggggccctccccgcggggcagatgaccgatttgggatgttgcccctggatgag

SEQ ID NO: 504456 - DNA, 83 bp, Homo sapiens
gagagacagaagaagctggaggccggcaaagccaaggtcatgatgatgggcagcgcccgagtggcggagctgctgctgctcca

SEQ ID NO: 504457 - DNA, 100 bp, Homo sapiens
cgcgacttcctggccatcgttttcttcgcctccataggttggagcaaaacgtcccactcactggaggcacctgaggacgacgggggctggtcaagtgcag

SEQ ID NO: 504458 - DNA, 75 bp, Homo sapiens
gcggagccgtgggacgagggcggcgcagtggacgtcagctcagcgaggtcttcatccagctgccctcgcgaaagg

SEQ ID NO: 504459 - DNA, 75 bp, Homo sapiens
caaaaggagttcatgcttatgaatgctcgacttcagggggcagctggcattttatgctatgtgggagcctatgtc

SEQ ID NO: 504460 - DNA, 96 bp, Homo sapiens
agctggacccggaccggttttggacgcaaacatgcagatctttgtgaagaccctcactggcaaaaccatcacccttgaggtcgagcccagtgacac

SEQ ID NO: 504461 - DNA, 100 bp, Homo sapiens
cgctactctctctttctggcctggaggctatccagcgtatggctttgtaattgctgtcaccaccattgacaatattggtgctggtgtgatccagccaggc

SEQ ID NO: 504462 - DNA, 99 bp, Homo sapiens
cattattggtccacttgatatgaaacaagtcagtttaggggctggtgcaaaggatgagttgcacattgttgaagcagaggcaatgaattacgaaggcag

SEQ ID NO: 504463 - DNA, 50 bp, Homo sapiens
agacaacagagtcattgatcttagggttcgtcacaaggcatcgcagaagg

SEQ ID NO: 504464 - DNA, 100 bp, Homo sapiens
cgtggaattcgcgaagctgccaaagccttagacaagctaagtcctatcagccatggaaacaccattgctctcttcttccggtcactgttgccaaactata

SEQ ID NO: 504465 - DNA, 101 bp, Homo sapiens
ttacatattccagtaatggtggatgaagttgttcattgtttgtcaccacaaaaaggacagacagtgggagtagctcaccgttacccaagtatgcttcatct

SEQ ID NO: 504466 - DNA, 75 bp, Homo sapiens
ctgctggaccagctcagtttgggctggatctgtctaaacataaagaggtagcatcttggacaaaatattgggcag

SEQ ID NO: 504467 - DNA, 100 bp, Homo sapiens
ccaaagtctctcacattacttttgctcacgaagttggacataactttggatccccaatgttcctcctgctgatcaagagaagctttttatccagaagtta

SEQ ID NO: 504468 - DNA, 50 bp, Homo sapiens
gatcaacaccggggagtctgcgggcccggagcgatggcagccttgatgac

SEQ ID NO: 504469 - DNA, 73 bp, Homo sapiens
caccaccatctccatcacccaccaacaacaccacaataatccacagccaagctctcatgggaggttgaatgga

SEQ ID NO: 504470 - DNA, 90 bp, Homo sapiens
tgcagctgcagcattagctgctatgaatggacggaagataatgggtaaggagattccaggtatccattacttggccagccactgcagtac

SEQ ID NO: 504471 - DNA, 75 bp, Homo sapiens
cagcctcctaagtagctgggactacagagtttcactcatgttgcccaggcttcagtgcaacgatgtgatttcagc

SEQ ID NO: 504472 - DNA, 96 bp, Homo sapiens
actcccacgtctacaatggagtcgagtctagaattcacacagagccacctagtatttaaaagacccaactcagcccatcttagaggccttggacaa

SEQ ID NO: 504473 - DNA, 97 bp, Homo sapiens
cctcaatggcctgagcaagtaccagccagcgccagctgcagccctggccgcgcactcgcctcagctgagcctggcaaattcaacacccaacagcttc

SEQ ID NO: 504474 - DNA, 100 bp, Homo sapiens
accaaagctgaacaaggcaactgttcaaccaggagaaaagacagcaatggaccgagatatggatcagaaactttcgaagttggtagaagagctcacaact

SEQ ID NO: 504475 - DNA, 75 bp, Homo sapiens
atccaggataacggaggctggaatcatgtcaaccctgccatggacttcacgcagactccacctgggatgttggct

SEQ ID NO: 504476 - DNA, 75 bp, Homo sapiens
cttcggcatcgggcgacagcaggtcacagtggacgaggtgttggcggaagccctccagaatacccatcatatagc

SEQ ID NO: 504477 - DNA, 109 bp, Homo sapiens
gaagcaagcagttcagaagagccaaggaataaacatgcaatgaacccaaaagggatcagttccatgacaagaccccttatacgattatgtttggtccagataaatgtgg

SEQ ID NO: 504478 - DNA, 100 bp, Homo sapiens
gtgtgattaccatggcgaggagtctctgtccgggggcctggctaaggaaaccctattacctccaggttggatggcaagcatgtggtgtttggcaaagtga

SEQ ID NO: 504479 - DNA, 103 bp, Homo sapiens
gatgaacagactagccactttgcattgactggaaacaatggcatttacagaaagagtcaacagcagtggcaacagctccaaagacaacaggccctccctctgc

SEQ ID NO: 504480 - DNA, 51 bp, Homo sapiens
caacacggtcttgctgaaagccagggaagcctctacggcagacacatgcag

SEQ ID NO: 504481 - DNA, 119 bp, Homo sapiens
caaagacatccacagcagtgtttctcgggttggaaaagccattgataagataattcagcattggcgtatttgcttgtcccaatacaagaatgccaaaggaggaaacaggaaaaattgcc

SEQ ID NO: 504482 - DNA, 119 bp, Homo sapiens
cggcaaagtcaagcgggccaccgagaggttttctggccgagtgtcctaacttaaactggattgtttttcaactctgatctgtcccctggttggcatctctcaccttccaataccaataa

SEQ ID NO: 504483 - DNA, 75 bp, Homo sapiens
agatccctgagatgctacaggctgaaattgctgacatagcccagagatacaggataagcaaatacccaaccctca

SEQ ID NO: 504484 - DNA, 100 bp, Homo sapiens
caacaagccattcatgggccggttttatgagtgggaaccatttgcagaaggagaagccgtacaagtgctcagagtgcagcaaggccttcagccagaagcg

SEQ ID NO: 504485 - DNA, 75 bp, Homo sapiens
ccggagtcttcctgatccatggacccgatgaacatagacacagctcctcagagaaattttgaaattgccttcaag

SEQ ID NO: 504486 - DNA, 100 bp, Homo sapiens
attgaggcgcaatgatgagaggatgtggtggtctactctgatgtcaatcttgagggctaggaaaatgttggggcttttcaggaagcataataagattcct

SEQ ID NO: 504487 - DNA, 83 bp, Homo sapiens
ccgagaacgcctccagcggggatgacacagaagacctgcctagagctggaacgttacctccagagcgagccctgctatgtttc

SEQ ID NO: 504488 - DNA, 100 bp, Homo sapiens
gcggcgccttgcggagggaccccacaatcatttggggaagaatctacagttgctgatggacagagtggatgaaatgagccaagatatagttaaatacaac

SEQ ID NO: 504489 - DNA, 100 bp, Homo sapiens
tagtattgatgaaaagagggactgccataacattcccaaagttctggacatggcaagacatgtgccactctatcgggcactgctggaattgcttcgggcc

SEQ ID NO: 504490 - DNA, 75 bp, Homo sapiens
tccagagtgtctggaggagggaccaaagtccagggctctctaaatacgtacagattctgcgataatgtgtggact

SEQ ID NO: 504491 - DNA, 98 bp, Homo sapiens
catcaggaaagcagtgctgatgataagggcttttattgagatggagacaagagaagatgcaatggcaatggttgaccattgtttgaaaaaagcccttt

SEQ ID NO: 504492 - DNA, 80 bp, Homo sapiens
ttagctgtgctcgcgctactctctctttctggcctggaggctatccagcattttgagaagagggggaaaaaggaagtttg

SEQ ID NO: 504493 - DNA, 75 bp, Homo sapiens
ggtcatgtccccttagcactctgtgtattgagaaaagatataatgaagatctggaacttgaagatgccattcata

SEQ ID NO: 504494 - DNA, 90 bp, Homo sapiens
ggtatgagagtggataatataatcaactcctctgcctgaaatgagccgtcagactgctacagcattacctaccggtacctcgaagtgtcc

SEQ ID NO: 504495 - DNA, 100 bp, Homo sapiens
caggcttttgctttgattccagcccatggacacagaggctgatttacagttccgtccccgcacgggaaaagctgcgtcgacacccctcctgcctgaagtg

SEQ ID NO: 504496 - DNA, 75 bp, Homo sapiens
ccgattttgaaacggctgcagtgatacatgcgaaggtaccgaaagcacagtaatcactggtgtcgatattgtcat

SEQ ID NO: 504497 - DNA, 100 bp, Homo sapiens
aaccgacagcctcctccgagaaggctgcagatctgggacacggccggccaggagcggttccgcaccatcacccagagctactaccgcagtgccaatgggg

SEQ ID NO: 504498 - DNA, 100 bp, Homo sapiens
cacttgccgggtcaccttgtcccggaggtgtcagttgtacccgaggcgttctcagcagcagcaagtacctgtggtggatttccaggctgaactgaggcag

SEQ ID NO: 504499 - DNA, 100 bp, Homo sapiens
tgcaaccccgcagagcgcatccatcaaagctttgcgcaacgccaacctcaggcgagatggaagagcccgatgcccttggtttgactctactaagagcccc

SEQ ID NO: 504500 - DNA, 73 bp, Homo sapiens
atatttcccaccttgtcagaaagaaggaaacattggcaaatttggagcgacagatctatgcttttgagggaag

SEQ ID NO: 504501 - DNA, 100 bp, Homo sapiens
ggagggaaatgggaatgtacacgataattaaagagtaaagttgtgctcaacgctcctcttttgacttggactatgactttcaacgggactattatgatag

SEQ ID NO: 504502 - DNA, 98 bp, Homo sapiens
tcttcgaggccaggggcttttctaccaggattctggggtgtttctcctcctttcctccctcccagatcttctcacggctgaagccgacgtagcttctc

SEQ ID NO: 504503 - DNA, 75 bp, Homo sapiens
cccctaggagtgctgagcccgcggaaccgcagccatggtgctcttacagcctgttccaagtgtggcttaatccgt

SEQ ID NO: 504504 - DNA, 98 bp, Homo sapiens
agagcagccccggtctctcggacaccattttctgccgctggacgcaagattctggacaatcaggaagtccaagccacaatgatcctgccaagaatcct

SEQ ID NO: 504505 - DNA, 83 bp, Homo sapiens
caactttcgtttccctctgagggaattgggaggtcggcggccccaaaagctgcaagaaagcgtaagattgccattcgaaaagc

SEQ ID NO: 504506 - DNA, 82 bp, Homo sapiens
agacgcgctgccgaggagaacccagcgggtgacagagctgaatgaacctctctccaatgaagatcgaaatctcctctctgtg

SEQ ID NO: 504507 - DNA, 98 bp, Homo sapiens
agccctccatcttgcagcccagaagggtgtgggccgaagatatgctcatgtggtgttgaggaaagcagacattgacctcaccaagagggcgggagaac

SEQ ID NO: 504508 - DNA, 100 bp, Homo sapiens
aaggcgctccacaatgggacactgagctttgtggaagcatttggcggcataccaccctgcactgtgaggtacaggacatctgcttcagccatgactgtcg

SEQ ID NO: 504509 - DNA, 117 bp, Homo sapiens
ctgctgagctcgcggctcacgctgagagggacacgcagtgacgagcggccgaagcagctttgcggaatcctatccatcttcttcaccgatatggtttgtggattctgaagacccaaa

SEQ ID NO: 504510 - DNA, 74 bp, Homo sapiens
ggatgccagctgttgaccgcttgtgcctggggattccccctggtgagcatggggtcctgtcccagcaattcgtg

SEQ ID NO: 504511 - DNA, 51 bp, Homo sapiens
caagaagtgttcggagagatggaagcctgaatcattaatacgaaagactgg

SEQ ID NO: 504512 - DNA, 87 bp, Homo sapiens
acgtgaagtgtggcaagtgtgacccacaaaattctcgcccatattcagctcttttgaaacagatggtcaccatgtttagatattagc

SEQ ID NO: 504513 - DNA, 100 bp, Homo sapiens
cagccgcaccatgccgctcctaagcctgcacagccgcggcggcagcagcagtgagaggctactgcagcactggggtgtcagttgttggtccgacccagaa

SEQ ID NO: 504514 - DNA, 75 bp, Homo sapiens
caggaccccagatgtctgacagccctgtgtgacaccaagataagtaacgtgcaggcctggggtagtctcctgtct

SEQ ID NO: 504515 - DNA, 80 bp, Homo sapiens
aatatccatgtcggcttgtagagagattgcagtttgtgaaatggctgctgacatttctgaatccagcggggctgactgca

SEQ ID NO: 504516 - DNA, 74 bp, Homo sapiens
ttttactactgtgacaacattaacgttccaggaatggatggaggtgctttaactgatacaagtctcacagattc

SEQ ID NO: 504517 - DNA, 83 bp, Homo sapiens
cattaaggacggctctctgctcattggggcgttgaggaagacggtctcgccacattgcccagactggtctgaaagtcttgggc

SEQ ID NO: 504518 - DNA, 97 bp, Homo sapiens
gaaggacaaaactattcaacatgtggaagtattttgttatgccaggaggtcttgctggagttgctagaacaatgtgtggatggcttatggaaggcag

SEQ ID NO: 504519 - DNA, 101 bp, Homo sapiens
aagacaaggatgaccaggaatgggaaagccccagtggaatgcagtagccctctgggcctgggatattgtggttgataactgtgccatctgcaggaaccaca

SEQ ID NO: 504520 - DNA, 95 bp, Homo sapiens
cagaagagaagaagaagcaggatgaactgaaacggattgccagagaattggcagaagctgtggaggaagatgcagagtcagaagatgaagaggag

SEQ ID NO: 504521 - DNA, 51 bp, Homo sapiens
ccaagggcgcagattctttctgtacgaaacgcttcgttaagggactcaggc

SEQ ID NO: 504522 - DNA, 83 bp, Homo sapiens
aacgaggcaaggagctaaagcagcgtgcgttcagccctgggggcagctgcaatgactctccgcacggtattattgtcattgca

SEQ ID NO: 504523 - DNA, 75 bp, Homo sapiens
gagtagcttggttggtggtaccctaaaattagggcatgattaaggtccgtgacgagaagttattaccgaggcgcg

SEQ ID NO: 504524 - DNA, 75 bp, Homo sapiens
cgacaccaaccccttcgcggacccagtggatgtaaaccccttccagggtcatctagtagcaggcacccaaatcag

SEQ ID NO: 504525 - DNA, 100 bp, Homo sapiens
aggaagctacgtttgtgttgcgaggaactatcttggtgaagcagtgagtcgaaatgcgtctctggaagtggcattatgccgagattttgctgtcctggag

SEQ ID NO: 504526 - DNA, 83 bp, Homo sapiens
ctggaagcagcagctcaccgaggacggggactcggccgccttcaacaacaacgtgagcgtggcctacgagtgcctgagcgccg

SEQ ID NO: 504527 - DNA, 100 bp, Homo sapiens
tgaacctgcgggagctgtaccttagccacaatggcatcgaggtcatcgagggcctggagaacaatgttcatctgcagaagccagcggacgcctctgttca

SEQ ID NO: 504528 - DNA, 129 bp, Homo sapiens
gtctcatcgaagttctattcctggctgtggagtgacttttgaaattgtctccaatattccagaggaccacagaatactggccatggtgcaacttctggttttggcagtgcttttacaggacaacaagga

SEQ ID NO: 504529 - DNA, 100 bp, Homo sapiens
gagtttccaagtggagagacaattgttatgcacaatccaaaggatgcagaaaatgcgattgtgcatatgggcggtcagtggttgggtggtcgtcaaatcc

SEQ ID NO: 504530 - DNA, 97 bp, Homo sapiens
agaattgtcatcatgtaatagccagacatgagtatacattcagtatcatggatgaatttcaggctgtggatgagatgaacggaaaggagctcaatgg

SEQ ID NO: 504531 - DNA, 76 bp, Homo sapiens
agttttgtgtccatgtgaacaacttatttggcatgatcattactatcggccagtctatcgtgtatgtgatgaccgg

SEQ ID NO: 504532 - DNA, 100 bp, Homo sapiens
ggtgtacaagcgttcctctctgcgtcacccccacctggacacagcctgtggagtgagagagcctacgcggaagggaatggccaagggaaaacctcggagg

SEQ ID NO: 504533 - DNA, 100 bp, Homo sapiens
aacagcagcgccgtcccgtccgacagccaggcccgggagaaggggatatgagactttctactcggaatatcctgagtgttgcgtggatgtaaaacccatt

SEQ ID NO: 504534 - DNA, 83 bp, Homo sapiens
ctggagccctcctcaggtgagctggagctgcccggctcggcagcgggaagcaaaatgatgcttcaacacccaggccaggtctc

SEQ ID NO: 504535 - DNA, 80 bp, Homo sapiens
tcactgcaccttaaaaacaaaagattgagctgcactgtattcctatgtcatttatggatcaagttgtttccaccaattcc

SEQ ID NO: 504536 - DNA, 73 bp, Homo sapiens
gacaacatctcttctgaactcaagaccagagagaagaagaaggaggttcctgctgtgccagaaacccttaaga

SEQ ID NO: 504537 - DNA, 97 bp, Homo sapiens
ttcgagtgacccgggtgccgaggagcgggaagagttgctgggttacagaatgtctgaaggggacagtgtgggagaatccgtccatgggaaaccttcg

SEQ ID NO: 504538 - DNA, 75 bp, Homo sapiens
tcttcttgaaattggtcgaattgtgtcaaggtctatccaggaaaatggtgaactaaaaattgaaagcaagattga

SEQ ID NO: 504539 - DNA, 51 bp, Homo sapiens
atttttcataactccatatggcttgatcactgtgtccactactatgatctt

SEQ ID NO: 504540 - DNA, 75 bp, Homo sapiens
gccctcccaaaggatttgatacgactgccataaacaaaagctattacaatgtgctctgggtgaaccaggaggatg

SEQ ID NO: 504541 - DNA, 74 bp, Homo sapiens
cccagtccccagctcgccagcgttgaaatcacaaagattagacacctttttagataggtgttcttcagcaccac

SEQ ID NO: 504542 - DNA, 71 bp, Homo sapiens
gccgtgtggcacgacacaaaaatcaggtgctcttacagcctgttccaagtgtggcttaatccgtctccacc

SEQ ID NO: 504543 - DNA, 50 bp, Homo sapiens
tccagttccagcgttcagttaatgcccgtgctttgaagaagaggagcact

SEQ ID NO: 504544 - DNA, 100 bp, Homo sapiens
agaccattccaaatctgggaccagtctcggcaaatattacacttctctccttggcatacaaaaccattgaggatgaggacttgaagttcccccttatata

SEQ ID NO: 504545 - DNA, 100 bp, Homo sapiens
gctcattgttctgaactccacgctgctacaggccagagcggatggtcatttccagcagagagccctgcctgctgccttccacacatggaacagactctgg

SEQ ID NO: 504546 - DNA, 87 bp, Homo sapiens
cctgggatgccttcgcgtcttctcttccctcgggtgacttgaggtagctaaaattggtgctttctgctgtggccttagtttatgtaa

SEQ ID NO: 504547 - DNA, 114 bp, Homo sapiens
gagaattactagcaacaggagataaaggtggtagagttgtcatctttcaacaggagcaggagcactgaacctaccagatgtatttgggttggtcgtcctcccattggaactgaa

SEQ ID NO: 504548 - DNA, 101 bp, Homo sapiens
cccgccccggtgcagatgaacctgtacgccacctgggaggtggaccggagctcgtccagctgcgtgcctagtcagctgagcaagttgcaagaagtttctct

SEQ ID NO: 504549 - DNA, 99 bp, Homo sapiens
agacagctttgatgactacccacctagaagaggtgatgatagctttggagacagcaaaatttggtttctctaatattactggaattgattactctcctt

SEQ ID NO: 504550 - DNA, 100 bp, Homo sapiens
ggcatcgacaagatccggctcacaggtggagagccgcttatccggccggacgtggtggacattgtggctggagagatttaccagcatgagaattaagaag

SEQ ID NO: 504551 - DNA, 100 bp, Homo sapiens
acagaaacatgatcattgacagagagaaccagtgcgtcattatcagggcttcataaacttcacttaccaaatacttcaagggattcagaaacagccaagc

SEQ ID NO: 504552 - DNA, 124 bp, Homo sapiens
acagccggaccgtcacccgctatcctgccaactctatcgtggtcgtaggaggctgtcctgtctgcagtgccggtggtggtgtgcacattgagccccggtatagacagttcccccagctgaccag

SEQ ID NO: 504553 - DNA, 75 bp, Homo sapiens
ctgcccactctgcggagttagcagtcacgacctccagcacaggttagtggatgacagatgtgtggtgcacccaga

SEQ ID NO: 504554 - DNA, 96 bp, Homo sapiens
gggctttttttcctatgtctcttgggaactgcagctgcaatcccgggaatttcggacatcgatgaagagttcatcttgaaacagtttgacattgac

SEQ ID NO: 504555 - DNA, 83 bp, Homo sapiens
ccaagagcaacctcacacggtgtgggctgaatgaagagctgccagatcccacagatcatcacgaagtatgtatatgagctcct

SEQ ID NO: 504556 - DNA, 75 bp, Homo sapiens
ctcgctttctctcgtggatcttctcgctcctgatgacacttctgtggtgtgtagtgagtctctacttttatggaa

SEQ ID NO: 504557 - DNA, 82 bp, Homo sapiens
ctcagcacacagaggatgatgctgactttgatgaagttactggctgaccaacaaagttcctatcaaaagacccagcacaggt

SEQ ID NO: 504558 - DNA, 75 bp, Homo sapiens
ggtcgtattgaatggtgttgtagggcatttttggtcgaagagagctgaagtaatgagaagacatcatggaggccc

SEQ ID NO: 504559 - DNA, 75 bp, Homo sapiens
gaagatgttcctatttgtattcattgcagctatcagttgagggatttgcagttgataaaatggctggagaggtta

SEQ ID NO: 504560 - DNA, 100 bp, Homo sapiens
actgtgtattgcatcaggctgagagcagacacgatgtgaagatccattgctcccattgaggcagacaagtgactgtgaagtgctgaccacactcacccca

SEQ ID NO: 504561 - DNA, 96 bp, Homo sapiens
cgacccggtgtgtggcgcgcccagagccccgcgtttcagccctagggaagtccataaaagaattccaatcagaagaatatcttcagattattacag

SEQ ID NO: 504562 - DNA, 100 bp, Homo sapiens
gaaatcatgttgattcagagttggcttggagacggttgatgatgaagcgccggccgtgtaaatgaagatcgggtgaggagcaggacgatgcccaagggtg

SEQ ID NO: 504563 - DNA, 82 bp, Homo sapiens
ctccgcgttcccagcccgggtccccgcgttcacagccccagcgcagtgcaccgtccaggtgaggttagagctggggcatcgc

SEQ ID NO: 504564 - DNA, 98 bp, Homo sapiens
tcacggcttactgcagccttgacctcctgggctcaagtgatcctcccacctcagcttgtgccacatcatctcacagttcaaccaaggcttctacgact

SEQ ID NO: 504565 - DNA, 75 bp, Homo sapiens
gggcggctccgcagtgaccggactcgggggagtgtctaaaaagcacggcaagctcattacgttcttacgaacatt

SEQ ID NO: 504566 - DNA, 82 bp, Homo sapiens
ggctgatggcggaggcttcgagtgacccgggtgccgaggagcgggaagagttgctgggaaatatcttcccttccaacctggt

SEQ ID NO: 504567 - DNA, 87 bp, Homo sapiens
tgatctttgataagaatgattcagattttgaagctaaagttaagcagagaccagcatgctgatgatgtcaaagaagactttgaagag

SEQ ID NO: 504568 - DNA, 90 bp, Homo sapiens
cctaagagaactatggcaacatcaggtgactgtcccagaagtgaatcgcagcaaacatgtctgacaaagagctaaagaagctacgtaata

SEQ ID NO: 504569 - DNA, 83 bp, Homo sapiens
ggcctcccgggctccgggaaaactacactggccagagatgccctgtatccaagcccaatatgggacaccagcaccgagtccgg

SEQ ID NO: 504570 - DNA, 100 bp, Homo sapiens
cgagttttctctgccatgttgctattgcaggacggaattggtccagaaaagggcgtggtgcacctggcgacagcggccgtcctaaacgcggtgtgggact

SEQ ID NO: 504571 - DNA, 89 bp, Homo sapiens
gctggcgcggcttttggcggcctttctgctcctcgcggcccaggttgaaggtcgaggagctggaaggcgagcggagtcggctggaggag

SEQ ID NO: 504572 - DNA, 82 bp, Homo sapiens
cccaggtgtaagcgcagaaagcaggcgaacccgcggcgcaataacggaagggagtgaacaggcaccactaatgagtgaagat

SEQ ID NO: 504573 - DNA, 87 bp, Homo sapiens
ccgggtcagctcttccttatgttcctgaagtactatactggcaattgctggagaagattttgcaattgttgcttctgatactcgatt

SEQ ID NO: 504574 - DNA, 76 bp, Homo sapiens
cgtggccaagaccaagaacaacctgggacagaagatgagcctgtcggtcctggagggtatggggttccgtgtgggc

SEQ ID NO: 504575 - DNA, 101 bp, Homo sapiens
aaaccactcaagagtcataggattagatgatccaagtcaccaagaaattactgtctcaagtgatacgatatttggagttcttacaacatggcagacattga

SEQ ID NO: 504576 - DNA, 88 bp, Homo sapiens
ttggacagttttgtacagtaggaagaaaatccacggctggaaattttcttgttaatccccttgagccaaaaaatgcagaaaagctcaa

SEQ ID NO: 504577 - DNA, 100 bp, Homo sapiens
cttcggcagtccacccaccgccgccgcctcccaggttatcaatactctggctgaccatcatcatcgtgggactgactttggtggaagtccttggttacat

SEQ ID NO: 504578 - DNA, 98 bp, Homo sapiens
caagtttcaaaaaaggacagtagagcttacctatcgtgggatcagatacttcagggatacaaagccaaacttccagatctgcaaccatttccttctcc

SEQ ID NO: 504579 - DNA, 90 bp, Homo sapiens
tggagctgagactgaagtcgcccgtgggggctgagcccgccgtctacccgtggccgctgccggtctacaggtcagctggcggctccagtc

SEQ ID NO: 504580 - DNA, 76 bp, Homo sapiens
gggatgaggacgacgatgaagtcagtgaggaggaggacaatcccaagggggagggcacagagcaggaacccagcac

SEQ ID NO: 504581 - DNA, 100 bp, Homo sapiens
tgtccaggcagcattaaaacttaagcagtatgaaaagacacagactgtactctcagaactgaagttgaagtttgaaatgactgagcaggaaaagcagtca

SEQ ID NO: 504582 - DNA, 100 bp, Homo sapiens
cagaggcgacctccccgcgttccatgcgcacagggacagggagcttggggcttccttggtcgcacccaccacctgcctgcccactggtcagccttcaggg

SEQ ID NO: 504583 - DNA, 90 bp, Homo sapiens
ctctgcttcccttcggaggaaaatttcaggctgaaggtttagcgggtgccgagcctggcccaactagagaatctgtgcaaacagctgtat

SEQ ID NO: 504584 - DNA, 83 bp, Homo sapiens
gttgcaaaactggaaaagacaattgatgacctggaaggaggaatcggagaagcagctctgtctgattgaggcgcagaccatgg

SEQ ID NO: 504585 - DNA, 75 bp, Homo sapiens
gaaacgcgctgaagctggacttgctgacttccgaccgggcccctctcctacccagataccgatgttatactgatg

SEQ ID NO: 504586 - DNA, 98 bp, Homo sapiens
ggaaacctctccatttcaaaggatgcccttttcatcgaaatataaagatgaagcgcagctgtataaagaagagcacctgaggaatcggcagcaccctc

SEQ ID NO: 504587 - DNA, 95 bp, Homo sapiens
ggtcggcagcggcacctacggggacgtctataaggacttgtttacactgggcatgtaaacgaaaccatggtcaggtggtctcttacctgttaaaa

SEQ ID NO: 504588 - DNA, 100 bp, Homo sapiens
aatgagaggaatatactcatcatcagtctatttagaagagattcatgctggtcctggccagcaatctgcctgagcagttcgactgtgccatcaacagccg

SEQ ID NO: 504589 - DNA, 82 bp, Homo sapiens
gggtattttccattccagaaggacaaaaactctttgagtttcggagaggagtaaagagggggaaatttgcagtggtgagaaa

SEQ ID NO: 504590 - DNA, 89 bp, Homo sapiens
ccatcccttccgaggcccgacttcgggtgaaggttgccgaactgtccccctggctggacatgtggggtttgacagcttgcctgaccagc

SEQ ID NO: 504591 - DNA, 100 bp, Homo sapiens
tagtaaaccgagctcgaggaatggaagcatgctggaagatggactgccctccaatggtgtgccccgatctacagccccaggtggaatacccaacccagag

SEQ ID NO: 504592 - DNA, 100 bp, Homo sapiens
ctggcggtcccgggtgctgctggacttcagggccacaggtgctgccaagatgctccagggcacctgctccgtgctcctgctctggggaatcctgggggcc

SEQ ID NO: 504593 - DNA, 97 bp, Homo sapiens
gttacctgcaggtattgggagatccacagctaagacgccaggacccactggaagcctagaaatggtcattagtaattatcagcactttagatgggag

SEQ ID NO: 504594 - DNA, 80 bp, Homo sapiens
gggacagaggagcgggcagcaagcggaaacgaatcttttgggtgagttgtgaggctggcacctacattcggacattatgt

SEQ ID NO: 504595 - DNA, 80 bp, Homo sapiens
gcgtctttgctcccggagcgcttgaaggagctgcggacaatgcagatcttcgtgaagactctgactggtaagaccatcac

SEQ ID NO: 504596 - DNA, 98 bp, Homo sapiens
ctgtaatgcagagtcaccagtggccctggaggaggccaagtttcttggcggatctgatggataactcagagctcatcagaaatgtgaccctttgtgga

SEQ ID NO: 504597 - DNA, 73 bp, Homo sapiens
tcatcaactccctccggaggcagcacctcaggaaaggttggatggcaagcatgtggtgtttggcaaagtgaaa

SEQ ID NO: 504598 - DNA, 97 bp, Homo sapiens
aaaatgaagaaagcatgatgtcctatgagggagacggtggggaggcttcccatggtttggaggatagcaacatcagatggagtctccctctgtcacc

SEQ ID NO: 504599 - DNA, 75 bp, Homo sapiens
cctggagcctcagttggaagcagccgatccagcctgcggagcctgtggggcagcctgtggacatctctacagcaa

SEQ ID NO: 504600 - DNA, 139 bp, Homo sapiens
cattggctggggagacccatctggactaccaaggagaagctatagactacttctactccaccaggaaggtgtcatggagaaactccagctgggcccagagattctgcagcgggaaaatccaaggcttatttatgccagg

SEQ ID NO: 504601 - DNA, 75 bp, Homo sapiens
aacaagttggccagggtgccctcagggctcccagacctcaagctcctccaggagatcgtcaacttcaactgccgg

SEQ ID NO: 504602 - DNA, 90 bp, Homo sapiens
gttttcttctggtatctggctaaatgtgctggaattgatgttcgtctgtgtgatgttggtgaggccatccaagaagttatggagtcctat

SEQ ID NO: 504603 - DNA, 80 bp, Homo sapiens
gaggccgaggacacaccgctggatcagtgtaagacctgtcatttactccatcctttatagtgatgctacaggacgaagag

SEQ ID NO: 504604 - DNA, 80 bp, Homo sapiens
attctctagagcaggtgctggccaagaacaatgctctcaacatgaataaggatgttggtctcacattggagatccccaag

SEQ ID NO: 504605 - DNA, 113 bp, Homo sapiens
ggctcatcgtgatcccggcgacatactacctctggccccgagatcagaatgccggttttaaaatcaaagatgggaaaatcggagaaaattgcccttccccatggccagcttgt

SEQ ID NO: 504606 - DNA, 50 bp, Homo sapiens
gcgcctttgtgcgcgcgccgagacacgaatgcagagtttgagtccagatc

SEQ ID NO: 504607 - DNA, 83 bp, Homo sapiens
gagaacgacatcatccccaatgtcctggagaaatctcccaagcctaagaagaagaagcacaggaaggagaaggaggagcggac

SEQ ID NO: 504608 - DNA, 82 bp, Homo sapiens
gcgtcgagaagggcgactactacgaggcgcaccagatgtaccggaccctgttcttcagattctgaaggaagatttccattag

SEQ ID NO: 504609 - DNA, 96 bp, Homo sapiens
gcggggcgatggggaagggccgaagccccgccagcccagctaaagcagacggctcgcactgcgacccgaaggtagagcagagccggagccaggtgc

SEQ ID NO: 504610 - DNA, 100 bp, Homo sapiens
gccaacttcccggtgcggcccagcgacgtgtggatcgtcacctaccccaagtccggttttcgaaacactacaacatccacaaggatactgcagtagatta

SEQ ID NO: 504611 - DNA, 75 bp, Homo sapiens
tgctcaatggagagaaggaaagtcaatcgtaggaagaacacagtacaggtgttcttccagagagcaaagccctga

SEQ ID NO: 504612 - DNA, 90 bp, Homo sapiens
gcgccctctactcagcatggatatccaggtgctgagccaggagcagcagcctttctaagtcagctggggagactctgtgaaagtaatgaa

SEQ ID NO: 504613 - DNA, 100 bp, Homo sapiens
cagctgcccagctgaaagccaaggacctggtctcttgccttgcctgcttagaaagtgttttcagccggttctatggcttggggggcagctccacaagtcc

SEQ ID NO: 504614 - DNA, 50 bp, Homo sapiens
aagcagtttcgggaggagttcaacattgcagagggaatggcatacatcga

SEQ ID NO: 504615 - DNA, 82 bp, Homo sapiens
agccttccaagtagctgggactacagacatgcgccagcacgcctgaaagacctggtggaagaggaggctgaggaggctggag

SEQ ID NO: 504616 - DNA, 100 bp, Homo sapiens
tgatcttttcaatgctgcgaaagctgccaaaagtgacatgcaggtgtggatgaggtcaccattgtcaacattttgaccaaccgcagcaatgcacagagac

SEQ ID NO: 504617 - DNA, 100 bp, Homo sapiens
ctgaaggcgaacgcttcgctggccatttaggagctctgctcaaagccagacgcctgtttctggaccagtacagagccagccttgttgatgcaataaagag

SEQ ID NO: 504618 - DNA, 100 bp, Homo sapiens
tccgacctctacaactgggaggtggccatcttcggaccccccaacaccctctacgaaggcggctacttcaagttggtgttggtattaggagatctgcaca

SEQ ID NO: 504619 - DNA, 100 bp, Homo sapiens
gacaaaaacgggatcgctttggaaacatctttaccctgttcattgggccagagatataccatggggtatacagttagcagccgtgtatgctctttgtgac

SEQ ID NO: 504620 - DNA, 100 bp, Homo sapiens
tagacaaaactcagctaaatcctaccagtctacaaaagaaagaacatactggtcgtcttgttataggagatcacaaatcaacatctcacttccgaaccgg

SEQ ID NO: 504621 - DNA, 100 bp, Homo sapiens
atgactttcctccaagagcacattgcctggtaagatggagggccgcaagaacgagatgctgctgtccaaggtgaaagcgaaggcctcctgaacatcccca

SEQ ID NO: 504622 - DNA, 50 bp, Homo sapiens
atccattccaggagccagctatctgaggtgtgacagtttgggagttgatg

SEQ ID NO: 504623 - DNA, 96 bp, Homo sapiens
caaaacgccaggcggatctcagaaggccagttcaaaggccaccagcccctcgggttccaagatgcagctactggagacagagttctcacacaccgt

SEQ ID NO: 504624 - DNA, 98 bp, Homo sapiens
taaagcagagtaccctgaaggatttgagattcacagcatgcaatcagtagaagagttgggatctaacccagaaaactctctcgtggcattatccttca

SEQ ID NO: 504625 - DNA, 97 bp, Homo sapiens
agttcctctccagctcagccgcgtaggcaggtgacagcagggacatgtctcgggagatgcaggatgtagacctcgctgaggtgaagcctttggtgga

SEQ ID NO: 504626 - DNA, 82 bp, Homo sapiens
acatttacgcggatgtcggcgaagagttcaaccagatggagttttcctctagttgtttaggatggagtgcaattgcacgatc

SEQ ID NO: 504627 - DNA, 129 bp, Homo sapiens
gaaacctgtatttatcactgccttcttgggaattgcttcgtttgccattttcttatggagaactgtccttgttgaaagaccaagaagtgcagtggaacagctctgtttggctgaaagtactcgaccaag

SEQ ID NO: 504628 - DNA, 51 bp, Homo sapiens
cgcccgcccggcgaccagcaagcattttgaaagcgaagcagaagccgtaga

SEQ ID NO: 504629 - DNA, 74 bp, Homo sapiens
acttcatattttggaaagcagtttttaagacaagtgaagaacgaggtggagaagctcccccgacagcagcggaa

SEQ ID NO: 504630 - DNA, 98 bp, Homo sapiens
cagccttctacttgtcccatgagactgaagttgctgaagatcctcaacaagtttcaactgtccatctccaactgggcttaccactggtttttattgtt

SEQ ID NO: 504631 - DNA, 50 bp, Homo sapiens
gaactacagaaacctggtctccctagagactcttgaagacaactctgaaa

SEQ ID NO: 504632 - DNA, 100 bp, Homo sapiens
gttactcaggcactttcttctcaatttcatatggcaacaaactacaatgagttacaaggcactaatagttctggatccttgggtggtcttgatgttcgca

SEQ ID NO: 504633 - DNA, 82 bp, Homo sapiens
aattatttatccaacagctcctcccagatacgatgaatggattaaagcagataaaatagtaagacctgctgataaaaatgtg

SEQ ID NO: 504634 - DNA, 100 bp, Homo sapiens
ctcggcagaagaggacatcattgatggatttgccatgaccagctttgtcacttttgaagcgctggagcaacccagactactacggactcatctaacaaaa

SEQ ID NO: 504635 - DNA, 101 bp, Homo sapiens
gcgccgggccgcagcggccctggaggagcagctggacagcctctccctggggcgctcggagcagccgcaccccatctgctccttccaggatgacttccagg

SEQ ID NO: 504636 - DNA, 90 bp, Homo sapiens
gtcagccttcccagtagctgggaccacaggatttaggttgagtccccaggctgtgaattcaattgcaaaacgatacagcaccaatggaaa

SEQ ID NO: 504637 - DNA, 75 bp, Homo sapiens
gttactatcgctttggacaggtttacacagaagccacaaggacacccaggcccattattttcctccagcctccat

SEQ ID NO: 504638 - DNA, 100 bp, Homo sapiens
taagaagggacaagtaattaatttggatcaacttcattcatcatggaagaatgttccatccgtaaacagattaaacatttatgacattaacagagaacag

SEQ ID NO: 504639 - DNA, 106 bp, Homo sapiens
aattccatttggggaccagagatggacggtcactcagcctatggaggtgctggagaatctggtaaaagcaccattgtgaagcagatgaggatcctgcatgttaatg

SEQ ID NO: 504640 - DNA, 50 bp, Homo sapiens
tttggctttccagagggcagtgtagaggcctctctatccggagcgtgtgc

SEQ ID NO: 504641 - DNA, 75 bp, Homo sapiens
tgagctttgagcctggtgaccaggcgggatgtagctcattttgggatacgagtctccatcgtggagcctggcttc

SEQ ID NO: 504642 - DNA, 101 bp, Homo sapiens
aaccagttccagaaaaaaaattggaacctgttgtttttgagaaggtgaaaatgggagatgcacttatttacatggaaccagagaaacaagtgatgtccagg

SEQ ID NO: 504643 - DNA, 83 bp, Homo sapiens
tacctaaatgcactctttcgaaagaaagtttcaccagtgatcattaaagaatgggcagcttacaaaggaaagtctcctcaaac

SEQ ID NO: 504644 - DNA, 100 bp, Homo sapiens
ggacaggacaggggacgagggaggaacactctctgaggaagcccaactcctatgagctcctctctggcaggtgctggagaatctggtaaaagcaccattg

SEQ ID NO: 504645 - DNA, 100 bp, Homo sapiens
cggagcgcggagcccggctcccgcaccatggaggaggacgacagctacggttttaaaatcaaagatgggaaaatcggagaaaattgcccttccccatggc

SEQ ID NO: 504646 - DNA, 50 bp, Homo sapiens
cgacgtccttctggaagaggcgaaactgatggctgagagctagcaaggaa

SEQ ID NO: 504647 - DNA, 74 bp, Homo sapiens
cttggaggagcgcgccctgcctgagaaggagcccctcgtcagatcttggagaaattcattcaaggcttttggat

SEQ ID NO: 504648 - DNA, 101 bp, Homo sapiens
gcaggaagaacccatcgggcagctacacatcttgaaagagaagctcttcctgtgagtgagaacaatctccaggaagatctcttcgaccagatcttggctgg

SEQ ID NO: 504649 - DNA, 100 bp, Homo sapiens
atctgcacaggcaacggccgaggagagtggaagtgtgagaggcacacctctgtgcagaccacatcgagcggcaagaagttatgaaatggaatggatgggg

SEQ ID NO: 504650 - DNA, 100 bp, Homo sapiens
tagtggcggaagccttcgtctcccagattgcagggaacacatgcccactttggaggaattctttgaagaagccattgaacaggcagaccctgaaaatatg

SEQ ID NO: 504651 - DNA, 100 bp, Homo sapiens
gcacaaggcacaacaggctgctctgggattctcttcagccaatcttcattgctcaaacctgcctagagctggaacgttacctccagagcgagccctgcta

SEQ ID NO: 504652 - DNA, 50 bp, Homo sapiens
ggcaacgtcgccaagacctcgttttacatgtggcacccataaaagatgag

SEQ ID NO: 504653 - DNA, 100 bp, Homo sapiens
gaaaatgaagatgatgtagagattatgtcaacggactcctcaagcagtagtagaactatccaagatcacgatgccagttatatttaatgagcctctgagc

SEQ ID NO: 504654 - DNA, 83 bp, Homo sapiens
aaaaaacactttgcactgcataaaacattggagtttttttggagacagaattggggtgctggagaatctggtaaaagcaccat

SEQ ID NO: 504655 - DNA, 100 bp, Homo sapiens
ggggcccagggcaggcgcggagccgggccggcaggtctccaggtccgcccccgcctgtaacccccagcgccgcccctctggaagcctgggaggactgtgt

SEQ ID NO: 504656 - DNA, 50 bp, Homo sapiens
gggactgcgaagctatacaggctgaacttagtgatttggcccgtgaccct

SEQ ID NO: 504657 - DNA, 100 bp, Homo sapiens
gcccctcctgaaagctgtcacccacaagttgggtatctacagccattggttgctgttcaggtcagctttgctcctaacaacactgggaaagaagtaacag

SEQ ID NO: 504658 - DNA, 97 bp, Homo sapiens
acgcgcggcgcatcacggtgcgcgtggccggtgaccaagaatatggcccaggtgaccaaagccctggacaaggccctgagcaccatggacctgcaga

SEQ ID NO: 504659 - DNA, 100 bp, Homo sapiens
aagtgatttgaaatcattatcagtggtcacagaagtctctaccaatggtgcttcagaagtttcatactttcaggagtgtgtcatgaacaatgtcacctgt

SEQ ID NO: 504660 - DNA, 98 bp, Homo sapiens
gtgaggctcacgttggagggcttcgcgtctgcttcggagaccgtaagggtgtccctggccagtgtccttccacctgtccacaagcatggggaacatct

SEQ ID NO: 504661 - DNA, 75 bp, Homo sapiens
aagatggcgactgtcgaaccggaagatgatccctatgatcttgaagatgtttctgcacagaaatgagggaaatac

SEQ ID NO: 504662 - DNA, 51 bp, Homo sapiens
accccagcatgcccagcactgcggctgaggccagctccaccagggcaaggg

SEQ ID NO: 504663 - DNA, 96 bp, Homo sapiens
agagagaaaattgagacggagctaagagatatctgcaatgatgtactgaaaatcgagagccttggttacaaccgacttatcctgcaaattggtaga

SEQ ID NO: 504664 - DNA, 75 bp, Homo sapiens
ttcagcttcagcctgctcaagaactgcagcattgcagccgccaagacgttgcctcttgaagtggatttaactaaa

SEQ ID NO: 504665 - DNA, 113 bp, Homo sapiens
agataactttcgacacacctgtagacgttcgccaggtaaaggtggaggaactgcaatgtctggtggagaacagaaaccagagaggtactatgtgggtgtggacgttggaacag

SEQ ID NO: 504666 - DNA, 50 bp, Homo sapiens
gtcgccctcaaggccatgatcaaaaccattctcccagatggtgatcagct

SEQ ID NO: 504667 - DNA, 152 bp, Homo sapiens
aaggctctggtgattggtggagaggcttgtatgtggggagaatatgtggacaacacaaacctggtccccaggctctggacctcagcagccatgtcgaagccccatagtgaagccgggactgccttcattcagacccagcagctgcacgcagc

SEQ ID NO: 504668 - DNA, 73 bp, Homo sapiens
tgcaacagttgcctatatcctataccgcaggtatagggaaagcagaggtgtcagaactgggaaggtggcattg

SEQ ID NO: 504669 - DNA, 100 bp, Homo sapiens
ctggaaatgtcctggccgcgccgcctcctgctcagatacctgttcccggccctcctgcttcacgagaatgtaactggtcactacatttccccctttcatg

SEQ ID NO: 504670 - DNA, 83 bp, Homo sapiens
ctaccgttcggactatttgtagtcatgtacagaacatgatcaagggtgttacactggaggcatgtgagcgcagcctggcagag

SEQ ID NO: 504671 - DNA, 98 bp, Homo sapiens
cgagctgcctgtctcgtcgtggcaggtcaccgagccgtcaagcaagaatctgtgggagcagatctgcaaggtgcactcactcttgaggatgagaaaag

SEQ ID NO: 504672 - DNA, 98 bp, Homo sapiens
tggtgcaccaggtgttggaaaaacacaattatggtgatgatgaacagtctacacagatggctgcaagttgggaagatgataaagttacagaagcatct

SEQ ID NO: 504673 - DNA, 74 bp, Homo sapiens
gtaccaggcgaagctggccgagcaggctgagcgatacgacggtcgggcccctcggggccgcgtggccaatcaga

SEQ ID NO: 504674 - DNA, 97 bp, Homo sapiens
ggctgccgtgctgctcggcggcgctgaggacatggacatcttccagcaacagatctcgagaagacagctggctaaaatccttatttgtccggaaagt

SEQ ID NO: 504675 - DNA, 74 bp, Homo sapiens
ggatcacgaggttaacctcttagtggaggaaattcatcgtttgggttcaaaaactacttgaaggaaattttgcc

SEQ ID NO: 504676 - DNA, 50 bp, Homo sapiens
cagcctctggttcagactgcagtaaccatgggattttcctgtgatgggat

SEQ ID NO: 504677 - DNA, 100 bp, Homo sapiens
ttggaccccggcttctgggacgcgtcaggagaaataaagtgtagtccttctgaaagccccttaatggaaaaaaagaatagcttgaaagaagaccatgaag

SEQ ID NO: 504678 - DNA, 100 bp, Homo sapiens
cagagcagccggtaacgttgctggaccgggacgcacgctcagctgaggaggacccccaaaggacaatcatatcctgattcagcccttcctccacaaaggc

SEQ ID NO: 504679 - DNA, 100 bp, Homo sapiens
tcgtgggcggcaaggacttcgagcagcctctcgccatttcccggggagacttgcagctcctctgctgaaacgtttaagcctctccacatccaaattgaac

SEQ ID NO: 504680 - DNA, 100 bp, Homo sapiens
tacatcaaagtttttgttccatcctggaggaaggacccaccaagagctgacacccctatcagagggcttttttccagacttcaagctcccattccaacag

SEQ ID NO: 504681 - DNA, 76 bp, Homo sapiens
agctgacattgcatcttcaagactgtttttgtcagcctggcgggtggcagctgtccagagagaggaagcagccaac

SEQ ID NO: 504682 - DNA, 75 bp, Homo sapiens
ccagaggtcgtggaggtggccgtggaggcagaggtggcatggggtgtcagaactgggaaggtggcattggcgggg

SEQ ID NO: 504683 - DNA, 100 bp, Homo sapiens
aagaccagccgggccctggtggccgacagccatcctgaaagatcatcactgccctggaggaggatggcacggcccagaagatgcagctgggctatcggct

SEQ ID NO: 504684 - DNA, 50 bp, Homo sapiens
tgacaaatttggatcctgtgttcctcgtccaagcatctcattttgaaggc

SEQ ID NO: 504685 - DNA, 82 bp, Homo sapiens
ggatcgctacggaccttaaaatacccgcaacagccccttcgtcccaagctgaagaaaatcttggtatggtgatgatttttac

SEQ ID NO: 504686 - DNA, 101 bp, Homo sapiens
gatcctattgatgtttgcgaaataggctcaaaggtgctgactgggttacttttttaaacactaggaatggtaatttctactcttctggacttcaaactaag

SEQ ID NO: 504687 - DNA, 83 bp, Homo sapiens
caagcataagctgccaaaccaagtttaaaattggtggtgaatggtggacatggatcgattataaccgcttccaggagctcatc

SEQ ID NO: 504688 - DNA, 100 bp, Homo sapiens
caaaactatttcaaaacctcgagcatctagaaaagaaaatggacctgttgtagttttgcacagtaataagttgactcacacagacttaaagcctgaaaac

SEQ ID NO: 504689 - DNA, 83 bp, Homo sapiens
ctgcgggagatagaacaatatgccagcaacaaggtcatcactgtgttagtggaccatcccaatctggcaaaacaagccacatg

SEQ ID NO: 504690 - DNA, 51 bp, Homo sapiens
tgtttgacgacactgatggtttgttcctccgtgtcacaaagcagtacctgc

SEQ ID NO: 504691 - DNA, 75 bp, Homo sapiens
aatactacctttatttccaccatagatctcagtggttcaatagcatccccagatgtcaaattaaatcttggtgga

SEQ ID NO: 504692 - DNA, 117 bp, Homo sapiens
tgaagctggaacagccagaattggacccgaaaccatgcctcactgtcctaggcaagctctcgtgggcgcctgcggtgggaactactcagccatgtcttctgtggtctattcccctga

SEQ ID NO: 504693 - DNA, 50 bp, Homo sapiens
ccggaggggaagcttgggatcatggtcagcccaaggccaaccccactgtc

SEQ ID NO: 504694 - DNA, 82 bp, Homo sapiens
caatgatcgagcagctgagagaagcagtagatttgctgcaagatcccaatgggcccccttgtatttgctggtcctattttta

SEQ ID NO: 504695 - DNA, 98 bp, Homo sapiens
aaggattccaagtaactcttatttgtttctcaactcattggatgctaaagaaatatatttggaagtaatacataatcttccagattttgaactacttt

SEQ ID NO: 504696 - DNA, 75 bp, Homo sapiens
gaaagtcctctcgggagaagcagcgcctgttcccggggcagatccaggttcagggggatatgagactttctactc

SEQ ID NO: 504697 - DNA, 82 bp, Homo sapiens
ggagattatagctctgtatgagaaggacaacacctacttagcagggagaagaggatgatgagcatgccaggcccctggccga

SEQ ID NO: 504698 - DNA, 100 bp, Homo sapiens
tgctgcggctggtgcgtcgtcgctctaggaggaagtgcttgaaacctcgtcagcaccacagaaaactgcagctccctgcaggactggagagttccaaaag

SEQ ID NO: 504699 - DNA, 100 bp, Homo sapiens
gaagacatacaccatgggggaggccagtgtggacttaattcagtgcacaaatgagatgaatgtgaacatcccacagttggcagacagtttatttgaaaga

SEQ ID NO: 504700 - DNA, 99 bp, Homo sapiens
cagaagtgagctggaaggtcttggagcgaagagctcggaccaagcgctcagaggagctctacggtgactttgaagacttggaaacaggggacgtgcaca

SEQ ID NO: 504701 - DNA, 99 bp, Homo sapiens
gcctttgcctgatcatgcagacatctccaactgtgggaactctttccagcttgtgtctggcagtttgctggatttcctgaagagcgatgaaggtggcaa

SEQ ID NO: 504702 - DNA, 75 bp, Homo sapiens
ctcttttcgatccgggacggccggtcaggctcgccgccgagctgttactccacaggatccgctgaacataggatg

SEQ ID NO: 504703 - DNA, 101 bp, Homo sapiens
cttgcaggaaggtaccatccctacacagtatgtgaatgcacacttagacaccacacagcactgtctcgcccaagaacttcaaggtgaaaatgatcatgaag

SEQ ID NO: 504704 - DNA, 74 bp, Homo sapiens
aatgctgcaaactagcaaggagaatcatgctttagggaaaagaagatctcccggagcagtgccctgaaagtgct

SEQ ID NO: 504705 - DNA, 100 bp, Homo sapiens
cctgggcaaaccgaaccctgcgctcgcacctcctacacggctgcagtgggacattccaaaacagacagaccccgtgcggctgacacagctgtatgagcag

SEQ ID NO: 504706 - DNA, 100 bp, Homo sapiens
ggtctccgcgccccgaggtctccgcggcccgaggtctccgcccgcaccatgcggctgggcaggggagtacatcaagacctggcggccacgctacttcctc

SEQ ID NO: 504707 - DNA, 100 bp, Homo sapiens
gcggcggcggcggtggtatcggcggcagctgtgagggggttccgggaagatggtgctgatcaaggaattgtgctggagaatctggtaaaagcaccattgt

SEQ ID NO: 504708 - DNA, 99 bp, Homo sapiens
tgggaggctccgttgcctgctcccggagggagacgcgctgccgaggagaacccagcgggcttctcatcgaatgaaaactccagtcaagtacatgaccgg

SEQ ID NO: 504709 - DNA, 100 bp, Homo sapiens
ctggataattttatcccagggtggctgaatcacggaatgaacaaaatccagtctcatagcagaggagaatataatgtttacagcaccttccagagccatg

SEQ ID NO: 504710 - DNA, 90 bp, Homo sapiens
ggtctggccgtcggctgcggcgccatcggtcaaggtgaagatgttcttaaagggtcccagattacgtatgttacaggtgtagaaggggac

SEQ ID NO: 504711 - DNA, 98 bp, Homo sapiens
tgcaatttgaagatacatgagacagcagccaaacccccagtctgcaaaatgaatgttcaccgtcgatgtgagaccaacgtggctcccaactgtggagt

SEQ ID NO: 504712 - DNA, 75 bp, Homo sapiens
ggcgggacggctgccggcctgtgtggtggactgtggcacggggtgctcagaattttgatgtcatacgactatcaa

SEQ ID NO: 504713 - DNA, 100 bp, Homo sapiens
ccgtgaacatgccaacaaattgattgagccaatggtgatcaaaagcttcaggacgctggtgagtcactgcggaggagccgaacactgaccgcgccgtccc

SEQ ID NO: 504714 - DNA, 82 bp, Homo sapiens
agcaatgaccaaagcaacccctgctgtacggacagcatataaatttgtgacttaagagattaaaattaatttggttgctgtt

SEQ ID NO: 504715 - DNA, 100 bp, Homo sapiens
agggcacagagatgaagttctaagtgctgtgcaaacagctgcacagcaagtggcagaggataaatttgtttttgacttacctgattatgaaagtatcaac

SEQ ID NO: 504716 - DNA, 87 bp, Homo sapiens
agatggtaccgtgcatcgcacctatttaagaggctcacctccacctccagtaaaagtttcttctgaacctcccacacaagccactcc

SEQ ID NO: 504717 - DNA, 97 bp, Homo sapiens
ggtttccccgcaaatgactggtcacgcgggactgaacaccgcacaggcaggaggcatggccaagacgtactctggcctcttctgcgtggtggtcaac

SEQ ID NO: 504718 - DNA, 50 bp, Homo sapiens
ccgggccgtaccgagctaccaggctggtggtatggtcaggaaaaagacta

SEQ ID NO: 504719 - DNA, 73 bp, Homo sapiens
ttgaattacaacaagagccaaactcattttttgatgcaacagctttctacaagttctgattaaagtcagaaat

SEQ ID NO: 504720 - DNA, 100 bp, Homo sapiens
ataattatgacatgaatcagtatgaaaatgctgagaaactttatttgcgatctatagcaattggaatactcccccagttgcaagaggcgcaggaccgtgg

SEQ ID NO: 504721 - DNA, 100 bp, Homo sapiens
ctcaaatccacttgacacatcagtgaaggagaaaatatcaatgttctgccatgttgagcctgaacaatggtttggattttacagaagtggccaagccaag

SEQ ID NO: 504722 - DNA, 83 bp, Homo sapiens
cctggtgtcgccatgggccgccgccccgcccgttggactcagtggcttttgaggatgtgtctgtgagcttcagccaggaggag

SEQ ID NO: 504723 - DNA, 129 bp, Homo sapiens
aaaaagatctaaagtcacccggcggccaaaggccagtgactaccaacgtttggaccagaagtacctgcagatgaaatggcccctcctcgatgtcccctccagcgccacagtcaaggacacgaggtcacc

SEQ ID NO: 504724 - DNA, 82 bp, Homo sapiens
cgcgggccagcgcaccggtcccccagcggcagccgagcccgcccgcgcgccggcttgggcactgtttaaaggaaagttccga

SEQ ID NO: 504725 - DNA, 82 bp, Homo sapiens
ggcggaggcggcggtcgccccggggctccggcggcggacgggaggcgtgggcagcttcgacatcgccggcctgctgaacaac

SEQ ID NO: 504726 - DNA, 100 bp, Homo sapiens
gcaacatttcccacaggacacgaagtttgtcggcccttgccttggcagagctgagaaaaatggctacaaacttcctagcacatgagaagatctggttcga

SEQ ID NO: 504727 - DNA, 100 bp, Homo sapiens
aaaacaagaacttggatttagagccatgtaccggattcatgatgttgctatcaaaagttgagaaattgtcagaagaaatcatggagataatgcaaaattt

SEQ ID NO: 504728 - DNA, 75 bp, Homo sapiens
gtgaccctcagcgccggtgcatgtcgattctgaagatgatgagaaactgaaaaagaggaaggagcgatttgggat

SEQ ID NO: 504729 - DNA, 75 bp, Homo sapiens
gaacatgaactcaaagatgaggaggatggggtcaccagtcgttggcacaccaagaagctgccccgcaagacccac

SEQ ID NO: 504730 - DNA, 88 bp, Homo sapiens
ccgggagatcccaggcggtgacagagtggagccatggctagagagtgtgaacatggctacgcctcttcattcccgtccatgccgagcc

SEQ ID NO: 504731 - DNA, 100 bp, Homo sapiens
ctttgacgtccagaagaccaagtacctgcagatcctgacctctctgatgagatggatcggtactccaaagattcaggtttactcacgtcatccagcagag

SEQ ID NO: 504732 - DNA, 100 bp, Homo sapiens
agcagctcccaacctcagaagccgtggtgtctgctgtgagcgaggcgggggcgtctggaataacagaggcgttaagtgggcagaccaacatccacctcag

SEQ ID NO: 504733 - DNA, 100 bp, Homo sapiens
agatctctctcatctcgctcggctgcgggaaatcgggctgaagcgactgagtccgcgatggagaagaagaagaggacagtgctccagtgaaagtggaaga

SEQ ID NO: 504734 - DNA, 50 bp, Homo sapiens
gtcatgtagccaagactggagaaacaatgcctaaagatattggaagacct

SEQ ID NO: 504735 - DNA, 100 bp, Homo sapiens
tccgaagatgagaagaggttgttgttggagaagcaggctggcggaaacccttggcctgcactgcccaaagtcttggaaacttgctggatatgatgtaccg

SEQ ID NO: 504736 - DNA, 82 bp, Homo sapiens
ggcaacccggagaaggtctacagagcggcctgcgccagcgagaagctcttcgtgggcggtcttgactggagcacgacccaag

SEQ ID NO: 504737 - DNA, 75 bp, Homo sapiens
aaagtcaggctaaagaacaatacgagcagatccttgcatttgtccaagagttcactgcatccaagaagaggagaa

SEQ ID NO: 504738 - DNA, 97 bp, Homo sapiens
gaaagagagccactattctgaagaacacttggccaaaggtgcaggccctagcaggtgcaggtggagtagacaatctccatgtactggactttcagaa

SEQ ID NO: 504739 - DNA, 88 bp, Homo sapiens
aacactttgcacagttcggccatgtcagaaggtgcattttaccttttgtatctcatggtccatcagagagactgctggtaatagcggc

SEQ ID NO: 504740 - DNA, 137 bp, Homo sapiens
gttccatggaaaaatctctcgggaagaatctgagcaaattgtcctgataggatcaaagacaaatggaaagttcctgtgaagtggaggttctggatccgaacgaccctttaggaccccttgatgggcaggacggcccg

SEQ ID NO: 504741 - DNA, 76 bp, Homo sapiens
cggggctccaatggcgctttctacaaggctgaccggttccctgatgtgttacctgcttctgctactgatccaaact

SEQ ID NO: 504742 - DNA, 98 bp, Homo sapiens
tgatgacagaccgacttaagttcggattcggcttccaccgcttcttagtgtgactcaagaccctcttaggaacttcttcactgaactcaaggaggaga

SEQ ID NO: 504743 - DNA, 90 bp, Homo sapiens
agtagacggtacagcgaaggcagagagttcaggtacatgtcccagagcaagcacacggaggcccgggagctcatgtactcgggagccctg

SEQ ID NO: 504744 - DNA, 100 bp, Homo sapiens
aacatggctagcaggaatgcttactgttgcgtggttcgttattaacaggctaaagaattacctccaaagccattgtcaagaccacagcagtcatctgcac

SEQ ID NO: 504745 - DNA, 71 bp, Homo sapiens
agcatcgcggagcttgacccgtccatcgctgtggtgcccctgctgatgacgcccccaccaccaccgttccc

SEQ ID NO: 504746 - DNA, 75 bp, Homo sapiens
ctggacgccggaagccgggaaatggttcgtgctggccgtgggcagcgccgtctttgatgccatgttcaacggggg

SEQ ID NO: 504747 - DNA, 100 bp, Homo sapiens
tgccatggatgccaccaagctgctggtggaggccattgtcttgccaatgaaccacaaggagaagtttgagaacttggggatccaacctccaaaaggggtg

SEQ ID NO: 504748 - DNA, 82 bp, Homo sapiens
agtgacctcctggacttcagcatgtgtcaacagcatctccaccctggagcctgtgagccggtgccagcgcctgagtgagctg

SEQ ID NO: 504749 - DNA, 100 bp, Homo sapiens
ccgctcaccccgcggccgcaccttcccgccttctcaggtgacggccacccacggactctgtcacttgctgggattcacacacggcacggaggcagagtgg

SEQ ID NO: 504750 - DNA, 82 bp, Homo sapiens
gtacggggctgagcctggaacaggtcaagaagcttaaggagagatggggctccaacgtgtactaatggtcacttgatgtgcg

SEQ ID NO: 504751 - DNA, 82 bp, Homo sapiens
cgggaggcggcggcggcgcggagcccagactttgtgtggacagtaatgacctcacgtttccgattgcctgctggcagaacct

SEQ ID NO: 504752 - DNA, 96 bp, Homo sapiens
ggaacgagaaaagtgaagatgctgaagttttggatgccacaccttctggaaaaggccaaagttgttgagcccctggactatgagaatgttattgcc

SEQ ID NO: 504753 - DNA, 89 bp, Homo sapiens
actgaacaaagacaacattgttcctggaacgccctctttttaaaaaagtacatcgggtgattcttctcggtcaaacctttttgaagatg

SEQ ID NO: 504754 - DNA, 110 bp, Homo sapiens
agcaaagaggttgagagcttccagcagctgctcaatgctcggacacaggagctgacatggacccaaatcctcgggccgccctggagcgccagcagctccgccttcgggag

SEQ ID NO: 504755 - DNA, 101 bp, Homo sapiens
ctacaagggtcctgaagtcagttgttgcatcaaatacttcatatttggcttcaatgtcatattttggatataaagatgaagcgcagctgtataaagaagag

SEQ ID NO: 504756 - DNA, 75 bp, Homo sapiens
tagtttgcatatgagtgctgctgcagcttcccgagacatcaccttgacatatccagttcaatcacatggtggaaa

SEQ ID NO: 504757 - DNA, 89 bp, Homo sapiens
aacattagttcacacacaaacattgttttcaggtctcctgactcagaagctaacttatgaaaatggcttgttaaaaatgaacttcacgg

SEQ ID NO: 504758 - DNA, 100 bp, Homo sapiens
gcatgaccccagtgctgcctgcattcgcggggcatgttcccgaggctgtcaccagttggtagctggcagtgttgtgatggcttttgaagaagtatgcccg

SEQ ID NO: 504759 - DNA, 75 bp, Homo sapiens
ccgttagctaattaaaacatttttcagggacgtagccatccagaggattttaagagtggacttggtattaccata

SEQ ID NO: 504760 - DNA, 100 bp, Homo sapiens
ggggaagcatgactgctgtgggccgaaggtgccccgcgctggggtcccgaggagtgagcctcgcagctggtccctgctagagcagctgggcctggccggg

SEQ ID NO: 504761 - DNA, 100 bp, Homo sapiens
tttgcccaacctgggattcaaatgaaagtgaaaatgttagaagaactcgtgagccggattgatggtcccagcacaactatttaagaatcactcgtattct

SEQ ID NO: 504762 - DNA, 82 bp, Homo sapiens
cccggttcgccggcgcgcgctcgcccgcctagtgctgcgcctcaacgcgccgttgtgatgtgaagttcatttccaatccgcc

SEQ ID NO: 504763 - DNA, 99 bp, Homo sapiens
attttggaagagtcgccctgtgggcgctggcagaagaggcgagaagaggttctccagagagcgggcatccagagaggagtcctgggagagcgggcggag

SEQ ID NO: 504764 - DNA, 75 bp, Homo sapiens
cttatgacccatccagtccacaaaccagccagattttaacagcttctctgtggatgatgagtgcttagtgaagtt

SEQ ID NO: 504765 - DNA, 77 bp, Homo sapiens
tccgagccggggaagccgggcgcgtgctgccgctcgtggcgggccgagatgggccatcaactgagaaagaccttgac

SEQ ID NO: 504766 - DNA, 75 bp, Homo sapiens
cggtgctgcaagagaaggcactcaagtttatggtgctgctgcatgaggaggcgggtgattctggctttgtcagtc

SEQ ID NO: 504767 - DNA, 101 bp, Homo sapiens
cggagccgcgcagccctcggagcacgatccccataccgagtgtgcctacgttccagccgtctacacctgtccctgagcgcctggaagctgtgcagcgctac

SEQ ID NO: 504768 - DNA, 75 bp, Homo sapiens
ggcaaagtggaaaaatgtgcgagctccttaataagcatttatagtcagtttttggcagcaatagaatcactaaag

SEQ ID NO: 504769 - DNA, 90 bp, Homo sapiens
gagagaacactggaactgcaggccagagctcgtccgcatggtgctgaatggctgaggaccttcccagtctccccagagtccgtgcctttc

SEQ ID NO: 504770 - DNA, 80 bp, Homo sapiens
tcctgtcacaggccatgctctggcaaaaacgcggctatgagaggttttcctccgagtacccagaattctgttctaaaacc

SEQ ID NO: 504771 - DNA, 101 bp, Homo sapiens
gcctcgacttagaagctaccgagttaccctaagaaagacccaacatgagtgaagtttcctgcaagaaacgggacgactatttggaatggccagagtatttt

SEQ ID NO: 504772 - DNA, 82 bp, Homo sapiens
cgggctttagctatggcagcggcagcaccgggagtcagcagagtgaaggccagcactccttgcccgaggacagagatggcga

SEQ ID NO: 504773 - DNA, 75 bp, Homo sapiens
ggcttctccggagagaagagatcagtgctcaggacttgccggagcagccttacttgcagcctccactcagcatct

SEQ ID NO: 504774 - DNA, 100 bp, Homo sapiens
ccctgagtgctcggaaaatggccttgtctccggtcgttcccgttcaggagcaggactttctgaagaccttttcccccgatgtcttccggttcttctgcct

SEQ ID NO: 504775 - DNA, 75 bp, Homo sapiens
gaaagacccaggagaagccgcccaaagaactggttggtgtgaaaggtaccaactgcaagtttcaacttgcaaaaa

SEQ ID NO: 504776 - DNA, 74 bp, Homo sapiens
cgtgtccttcattgccacgtacagctgtgcaagttcattcgcaaacgtcctagaagtggaactgctgggtcaaa

SEQ ID NO: 504777 - DNA, 100 bp, Homo sapiens
catttctcctattgaggagtcaactgggtaattccagaattgattggccataccattgtcactgtattactgctcatgtcattgcactggttcatcttcc

SEQ ID NO: 504778 - DNA, 100 bp, Homo sapiens
cagcatccagaaaacggcgaggaagctgtggctctggttgaggatgtacagagagctcctggacaacagggcaagaaagactcctccccgtggacctgcc

SEQ ID NO: 504779 - DNA, 74 bp, Homo sapiens
catcacatgtttctgctgtggggggcccttccgagcagcagacaggagcaagatgtgaaatctggcaactatac

SEQ ID NO: 504780 - DNA, 100 bp, Homo sapiens
atcaatccagatggcagccagtcagtggtggaggatgccaggccaaggtggagcaagcggtggagacagagccggagcccgagctgcgccagcagaccga

SEQ ID NO: 504781 - DNA, 124 bp, Homo sapiens
tcattggagagctgctgaaacaggcggatctctacatttctgaagaatcagagatcattgatttcttcctgggggcctctctcaaggatgaggttttgaagattatgccagtgcagaagcagac

SEQ ID NO: 504782 - DNA, 100 bp, Homo sapiens
ctcctcagggctccagtcaggccgatccgctccgctcacgacaatgcagatcttcgtgaagactctgactggtaagaccatcaccctcgaggttgagccc

SEQ ID NO: 504783 - DNA, 75 bp, Homo sapiens
ccaatacaaatcccttgtatccggagcatgattgagcggatattagtgtcgtgcaacaaccagcaggatctgcag

SEQ ID NO: 504784 - DNA, 80 bp, Homo sapiens
cgcctttgccgatccgccgcccgtccacacccgccgccaggacagagcgggatgccaccagcttgtccaaagggaagttc

SEQ ID NO: 504785 - DNA, 99 bp, Homo sapiens
actctacaggagtggctgactgaagttatgaaaagcaataaaggcatcaagctggatttcaaaagctcaggcatttgaaaggatgatgagtccaactgg

SEQ ID NO: 504786 - DNA, 100 bp, Homo sapiens
ggggagctctacaaggagctgcagaagagctgcacatttgacgagcagcgaacagccacgcccctccagcgtggggaggcctaagtacctcaaggttcag

SEQ ID NO: 504787 - DNA, 83 bp, Homo sapiens
ctcgctactcgcttgcctacccgccggcccgcgggtctacttcctcaaaggattctgtttcactgaggccatctatccgattt

SEQ ID NO: 504788 - DNA, 97 bp, Homo sapiens
gccacatactatccgtttgttcaggaaccaccagtgacagagttggcaaaagcagcttttgatgatgcaattgcagaactggatacgctgagtgaag

SEQ ID NO: 504789 - DNA, 98 bp, Homo sapiens
tcgaggccgttgagaatggcaccgtctgccgaggtctcgctgtgtcgcccaggctgtaatgcagtggcgcgatcaccgctcactgcagtctccacctc

SEQ ID NO: 504790 - DNA, 83 bp, Homo sapiens
ccggaccccagcacacagaagccgagacgacacgatgaggcgagtggtacgacagagcaagtttcggcatgtatttgggcaag

SEQ ID NO: 504791 - DNA, 83 bp, Homo sapiens
cagagcgtcggggaggcaagatgatccaccagcggttccatcctacacttgggcacagttggtggatctgaaatctgaactga

SEQ ID NO: 504792 - DNA, 100 bp, Homo sapiens
tttcatttgctccacttgtgcaaccaagtaagaatgataatggcaaaccagattctgtgggactccgaaagtgactattttaccccacagggagaattcc

SEQ ID NO: 504793 - DNA, 95 bp, Homo sapiens
ctggttagtgtgctctgagggagggtccgagccagccgctgttttgccggaggagcccctcaggcctgtatttgcatgcccgagtctttgagccg

SEQ ID NO: 504794 - DNA, 98 bp, Homo sapiens
tggatgcaaggaaattattagatgaattgtcagacccagaatcttcatgcatttgattatgacacagaaaatatgaactctgaagatatttatagctc

SEQ ID NO: 504795 - DNA, 102 bp, Homo sapiens
tctttcttaaaggactgatttttagaactccacatttgaggttgaaatcacaaagattagacacctttttagataggtgttcttcagcaccactgacaacac

SEQ ID NO: 504796 - DNA, 75 bp, Homo sapiens
agcagccaccatatacaggagctcagactcaagcaggtcagattgaagtgtccctgaatgagatttcattgctag

SEQ ID NO: 504797 - DNA, 101 bp, Homo sapiens
accatgccagaccgtggaagatttaacgaatggggttgtgatggcccaggttcttcaaaagatgaatgaatctgaagtctgctgcagtaaaacacagaagg

SEQ ID NO: 504798 - DNA, 90 bp, Homo sapiens
cacaaagccgcaggggagaaagccctgaagaaggtcaaagttgctcagcggagcccagtagattcaggcaccatcctccgagaacccacc

SEQ ID NO: 504799 - DNA, 99 bp, Homo sapiens
ttcataaggataaaggatttggctttatccgcttggatcaagtagatatagctgttcaagaactccttcagctaaaggcacagtacaagtctttgatag

SEQ ID NO: 504800 - DNA, 90 bp, Homo sapiens
ggtggatccggatcgcatggaagacgcagcctggccgcgctctcccagttggatggcaagcatgtggtgtttggcaaagtgaaagaaggc

SEQ ID NO: 504801 - DNA, 97 bp, Homo sapiens
atttgtttctcattctcatatttcaccaataaagccggctcagttcggggaagctgcaggagttcggcgtgggtgatggcagcaagctgaccttggt

SEQ ID NO: 504802 - DNA, 97 bp, Homo sapiens
tggatttattaagatatgcagtgttcatactccaagtagtaatccaaagttgcctcctcctaaaccacttccagctaactgccttctatgaaagcag

SEQ ID NO: 504803 - DNA, 100 bp, Homo sapiens
gcagatgagattttccaagagttggagaaagaagtagaatattttacagggtgcatctgagaaagacatcgtgcactctggcttggcatacacaatggag

SEQ ID NO: 504804 - DNA, 100 bp, Homo sapiens
ttgctggttcttgaagaacaagaggaattccgtggttgctctcgatcttgcaatttccaaggagacggatgctttccaaccccacaagcagacccggctg

SEQ ID NO: 504805 - DNA, 126 bp, Homo sapiens
ctcaatatctgtcttcggtggactccttcggcagtccacccaccgccgccgcctcccaggtgtggacactgccagcggctgcagccgacttggaatgacctgggagacaaatacaacagcatggaa

SEQ ID NO: 504806 - DNA, 75 bp, Homo sapiens
agcgctgtcctgtgtctggccttccaccccacgcagccctcccacgtcgcagtctgtagatggacggcagatccg

SEQ ID NO: 504807 - DNA, 100 bp, Homo sapiens
tccgccgctaaggaacatggcgaaggtggagcaggtcctgagcctcgagccgcagcacgagctcaaattccgaggctggttatgaagaagaaactcaaaa

SEQ ID NO: 504808 - DNA, 99 bp, Homo sapiens
gggggaggaagccctttctcctcggcactgtattctttacctgcttcccaatcccactgatgaggatcagcccatggctggagtgcagcggcacaatct

SEQ ID NO: 504809 - DNA, 82 bp, Homo sapiens
aagtgtgtgcatctggctgttagaagaattcatgctcatccggggcagcaaggcgaaccccatccctactcactggagctca

SEQ ID NO: 504810 - DNA, 75 bp, Homo sapiens
agcctttttggcctggcttgtttgcaaaggtgcccccacttgactctcgccccagctccccagccctctacttca

SEQ ID NO: 504811 - DNA, 101 bp, Homo sapiens
acgccctggagttgctggtgatccgcaattacggccccgaggtgtgggaagacatcaagtgaattcatcattggccgagttatcaaagccatgaataacag

SEQ ID NO: 504812 - DNA, 82 bp, Homo sapiens
gggccggttctgcaccatcttcaggtcctactccaggggcgctcagacacgcagcccaagaaggtccggaaggtcccgccgg

SEQ ID NO: 504813 - DNA, 75 bp, Homo sapiens
gtttgagaaaaggcctaagaattttggcattggtatgtaccctctggtcacagcgacccaggatgctgacagcag

SEQ ID NO: 504814 - DNA, 100 bp, Homo sapiens
gcgagtcttcggagcgaccccggcaggtgaactggcacaaaggttaatctcaagatgccgctagtgaaaagaaacatcgatcctaggcacttgtgccaca

SEQ ID NO: 504815 - DNA, 98 bp, Homo sapiens
atcagcttcttaccaaatacagaagatgataatgaatgtggaaatttaactcagtcctgtggcgaaaatgctaattgcactaacacagaaggaagtta

SEQ ID NO: 504816 - DNA, 98 bp, Homo sapiens
cggccggtactgttgaaagcgacaagtggaggcgccgctctagcggccgggactctgaactatggcgtttattaaccttgcaagaactcttcaggcac

SEQ ID NO: 504817 - DNA, 74 bp, Homo sapiens
gaagacgaagaagcagaagcgtctgctcaggttgcagcaggagagagcttgctcacttccgacagagaaaaaca

SEQ ID NO: 504818 - DNA, 96 bp, Homo sapiens
ggaccaggctgcactgaagggacagaggttacaccgtgacctggctgccctcccggcaaaagacttcgttgctggcctcgggagcccctcgatacc

SEQ ID NO: 504819 - DNA, 100 bp, Homo sapiens
cgaccagaaggcgctgctggagttccgcgacaccatcttcgacaacatcctcaagaggaaaaagctatgtattctgctgaactcgaaaagcaaaaacagc

SEQ ID NO: 504820 - DNA, 100 bp, Homo sapiens
taatgatagaatgaagaccacaataaaagagacctctacttagctcagcaattcttaccttgaggaacatatgcagcagaaaaaagaggaggaagaagtt

SEQ ID NO: 504821 - DNA, 100 bp, Homo sapiens
catttgggatcacttccaacagtgacgtgttctccaaataccagctcgacaaagatggggttgtcctctttaagaagaacctttcagagatcgtggccct

SEQ ID NO: 504822 - DNA, 100 bp, Homo sapiens
aatggccagtgatatgctagaggcctgtgtcaaaagaaatggcacctcgaaaggggaaggaaaagaaggaagaacaggtcatcagcctcggacctcaggt

SEQ ID NO: 504823 - DNA, 90 bp, Homo sapiens
cgcgccccgcgcggcccgcccggatcgtggcctctcgagagcaaggcaaccacacctccaaatcaaggaaggccagattctcctgtctat

SEQ ID NO: 504824 - DNA, 75 bp, Homo sapiens
ccacagcatctttgtctagccccagtgcagatgaagcccggggcaagaactgtggtgtcttggtacattgcttgg

SEQ ID NO: 504825 - DNA, 100 bp, Homo sapiens
tggcagcattcagccagtattttaggagagcgacttgcagttgtggaggtacagtgtgaacggctgaggatgctctaccgggactgtgctcggcccccac

SEQ ID NO: 504826 - DNA, 90 bp, Homo sapiens
atcagatcaaccaccaaagtgggaaacattgaaatcaagggaagaggaagaacgtctgagaaataaaattcgagctgatcatgagaaggc

SEQ ID NO: 504827 - DNA, 100 bp, Homo sapiens
ctttttcgtttttcggatgatgccttcaatactacctttatttccaccatagttgctcaaatgctctcaggtatggcggctctgaatggaggacttggcg

SEQ ID NO: 504828 - DNA, 100 bp, Homo sapiens
tcgttccctcggctgtggaccgggcggcacgcacgcggtgcagggtaacatggcggatgcggaagaaagtgaaattcgttattctacatggaagaaagct

SEQ ID NO: 504829 - DNA, 75 bp, Homo sapiens
gaatatatcctctaaatctgatgatttttagactctgaggagcagttggagctaatccacattatggaaatggaa

SEQ ID NO: 504830 - DNA, 100 bp, Homo sapiens
gtttcccagcgctgcgcaggacttctcctggcggcgctgcggatccagggggtcggctgccaggtacagttaaagccttccatctgaagtatgatgaagt

SEQ ID NO: 504831 - DNA, 100 bp, Homo sapiens
gggcaagccccgctccggccaacaaatttcaccacccaatcctcagtcctttggaaagcagtttccagctggaagttgacgtcctgtgtcatctcctgaa

SEQ ID NO: 504832 - DNA, 122 bp, Homo sapiens
acttcaagaaagagacagaatggtccgagcatgcattgccattatctgtgaactaggtactagcaaaggccagacgtcttactcaacaacttccctgccaccacctccaccatcccatccgg

SEQ ID NO: 504833 - DNA, 87 bp, Homo sapiens
gccccgcgagcacagagcctcgcctttgccgatccgccgcccgtccacacccgccgccaggctggcgcccatgcggctctacacgct

SEQ ID NO: 504834 - DNA, 83 bp, Homo sapiens
gtgaacctgggaccagtgtgaatttggaagggatcgtgtggcatgaaacagaagaagtttatgcaaataccgtatacgtgata

SEQ ID NO: 504835 - DNA, 101 bp, Homo sapiens
gtcgggccagggtcgtgccgccggcgggtcgggccgggcaatgcctcgcgggcgcaatgaatccgcggcagtgttaaaagatcactgaagttggatggtct

SEQ ID NO: 504836 - DNA, 96 bp, Homo sapiens
ctataggctgtccagtcttgagggagctgcaggaacaggaaaaagggctgtaatccccttgcacaaaccggccggagtaaattgcagaatcaaaga

SEQ ID NO: 504837 - DNA, 90 bp, Homo sapiens
ctttttcaatgagaagaatgaacagacctagtgggcgttgcctttagacccagttttgagtatccgaggagcccaggaggaggaacccac

SEQ ID NO: 504838 - DNA, 75 bp, Homo sapiens
atccgtgaacatggcgaacgaggtgttcattgaggatgtcagcagggagtttgtggaggagttcatctggccggc

SEQ ID NO: 504839 - DNA, 99 bp, Homo sapiens
ctgaacttattattactgattcaataaccctgaagaataaaacggaatcaagtcttctagctaaattagaagatgggaaagggctccttcaagtatgcc

SEQ ID NO: 504840 - DNA, 75 bp, Homo sapiens
ctgtccctcacatccgatgcaccctttttgtcagattatcaggatgagggatctggggactttgatgattttaac

SEQ ID NO: 504841 - DNA, 100 bp, Homo sapiens
aggagggcggcaaggcgccggccagcagcctgcacacccaggaagcagggcggtccctcatcaagaaggaggacactgcatgtgagacttcagattggac

SEQ ID NO: 504842 - DNA, 98 bp, Homo sapiens
ccaagctcactcatgcggcaattggcaggcctgaggtccttgttggctgcttgctggagaggccccttcacagatgtagtcactacaaatcttaaatt

SEQ ID NO: 504843 - DNA, 100 bp, Homo sapiens
ccgtgtgaagctgccctccggctccaagaaggttatctcctcagccaacagagctgtggttgaagagcaggctattggagcaatccgaaccctgcgcagc

SEQ ID NO: 504844 - DNA, 89 bp, Homo sapiens
cttgttaccagaattccaaaggttctgttaaacacagtgggaatatcacttttgatgagattgtcaacattgctcgacagatgcggcac

SEQ ID NO: 504845 - DNA, 50 bp, Homo sapiens
tgaaagtttccaacaggaaatcatatgggtgagtcaagtgaagacataga

SEQ ID NO: 504846 - DNA, 100 bp, Homo sapiens
gccacctacagaaacaaaatgtcaacaaattgatgggaaaatttctaccttgaaccgtatctgaaagaggttattcgggaaagaaaagaaagagaagaat

SEQ ID NO: 504847 - DNA, 100 bp, Homo sapiens
agccaacacaccagcccagacagctgcaagtcaccatggacgctgaaggtatggacctgtctgccaatcaggacgaggagaccgaccaggagaccttcca

SEQ ID NO: 504848 - DNA, 83 bp, Homo sapiens
gggtgactcagagagggaagagattcagccagcacactcctcgcgagcaagaggctgggaggcggcagaatgcagccagagga

SEQ ID NO: 504849 - DNA, 75 bp, Homo sapiens
ggtctacaccgaccagccgcacacgcagcggcgcaaggagatactgggtactaggttttgacaagcttgcatcat

SEQ ID NO: 504850 - DNA, 82 bp, Homo sapiens
tcaaggacacggtctacaccgacttcgacggtggcagtagagaagagcatcacagaagttgctcaggagctgacagagctgg

SEQ ID NO: 504851 - DNA, 75 bp, Homo sapiens
ccagcggtccggccaaggacgctgagaaactagaaaaactgcttttggaattatctctacagtgaagaaacctcg

SEQ ID NO: 504852 - DNA, 75 bp, Homo sapiens
ggagtactcattcctgtaatagctgtgggcgagcctccctcagccctgggcctgtccacgcggaaggccctcagc

SEQ ID NO: 504853 - DNA, 51 bp, Homo sapiens
aaattcacgcatcaggcgcgggaagcgctgtgtattcttattacaaccaag

SEQ ID NO: 504854 - DNA, 75 bp, Homo sapiens
gttccccctccctcagcttccgccccaaaagatcaggcctttgtgacactaaccacaaacgatgcctacgccaaa

SEQ ID NO: 504855 - DNA, 97 bp, Homo sapiens
agtttcccacttgattacccgttaagtcccccaaagatgagatttacctgtgagatgtttcatcccaacagtgcataaggcaaatccaatacgcaag

SEQ ID NO: 504856 - DNA, 100 bp, Homo sapiens
tgctactcgggacgctgcacctcccgcgccgcacggtggacgagatgaaggatttgggggcagagcacttggcaggtcatgaaggggtccaacttctcgg

SEQ ID NO: 504857 - DNA, 83 bp, Homo sapiens
ccttacaccaagaagcgctctgctgtacaagttcaatggcagcccttctaagcacaactttgatgaagatgaaatggatgatc

SEQ ID NO: 504858 - DNA, 101 bp, Homo sapiens
agcagagcagccggtaacgttgctggaccgggacgcacgctcagctgaggaggacccccaaagatcttggcatatacagaagggctgcatggaaaatggct

SEQ ID NO: 504859 - DNA, 76 bp, Homo sapiens
gaaactgaggccacagagctaaagtgacttttcccaaggtcgcccagaaggagatccggttggcagctaaaccgcg

SEQ ID NO: 504860 - DNA, 76 bp, Homo sapiens
ggagttctggtctcaggcaaggtggggactgggcacatcatcaatacgaatcttgtggaagaagaatgaagttgct

SEQ ID NO: 504861 - DNA, 100 bp, Homo sapiens
caccatcttgttggtgcttcctcatgtattgaagaattccaatcccagttcattttttactggagaaaatgaaactgggattgacccatcaagatgcttg

SEQ ID NO: 504862 - DNA, 99 bp, Homo sapiens
tctgatggccacctttgtcaatgtatacatcgccagttttatcaggtccccttcccctgagcccatctacaatagcgaggggaagcggcttaacacccg

SEQ ID NO: 504863 - DNA, 51 bp, Homo sapiens
tcactgtatttgaccttaaaaacagggagagcaacaagccccggccctcag

SEQ ID NO: 504864 - DNA, 101 bp, Homo sapiens
ggaatggcataccacaccagacagatgcgttcagccgatgaagggcaaactgtcttctacacctgtaccaactgcaaccccaaactggataccacccacat

SEQ ID NO: 504865 - DNA, 100 bp, Homo sapiens
aactcacacgggagagagaccctatggctgtgatgagtgttatgaagacagtatggagtttccagaccatagtagacatttgctacagtgtctgagcgag

SEQ ID NO: 504866 - DNA, 75 bp, Homo sapiens
gacaaaagacacagaagaaaaagtgggactgaagtacactgaagcagattgaagatggaaaatccccaagacatt

SEQ ID NO: 504867 - DNA, 75 bp, Homo sapiens
cagggacgtcctcattgtcctcggtgatgaagccaacccttgcaagtttcaggcctgtaatgaattttcagagtg

SEQ ID NO: 504868 - DNA, 100 bp, Homo sapiens
ggcggggatggaagtgttggctgggtcctctccgaaatcgacagcctcaaccttcataaacaggtcagaatggcggcagcggagcatcgtcattcttcag

SEQ ID NO: 504869 - DNA, 75 bp, Homo sapiens
cctgcaaataaaccgtttattgaagagagtgctgagattggtacaagcgcaattttgccatcaccttcttcatgg

SEQ ID NO: 504870 - DNA, 49 bp, Homo sapiens
gtggatgatgccaaagttttattaggtcacggtctagatcacattctcg

SEQ ID NO: 504871 - DNA, 85 bp, Homo sapiens
atcctggcggcgaagccctggactaaggagtgaggagggaaaaccttagcactggcaagaaccatggacattccccggtctgtgc

SEQ ID NO: 504872 - DNA, 100 bp, Homo sapiens
gagctcggaggggcgctgtgtgtacatcacccccatggaggccctggcagagcagggcaccagcaccaagtacagtccgcagcgggtgggcctgacccac

SEQ ID NO: 504873 - DNA, 100 bp, Homo sapiens
gttagagattacaatttgactgaagaacagaaggcgatcaaggccaagtatccgccagtcaataggaagtacgagtgctctagaccaagatagaacagcc

SEQ ID NO: 504874 - DNA, 90 bp, Homo sapiens
caagaggtgcaaaaatcttagctctctcaatctctgtctgaactggatcataaatgacagacacttgtgtaacaacaaggaatagcacca

SEQ ID NO: 504875 - DNA, 50 bp, Homo sapiens
tcgacgaccgacagggtggtgaaagggagaccaaattttgaggaaggtgg

SEQ ID NO: 504876 - DNA, 100 bp, Homo sapiens
gcagttgtgactgagtgtgctggtggaggggccttcctcgtcatccccctgcaccagcctggctgggaagaaagaattcacttggatggccgaacgtttt

SEQ ID NO: 504877 - DNA, 100 bp, Homo sapiens
ttttgagaagcgagattttcggaagagtacaggggctcaggtccaggtggcaggggatatgctacccaactcaactgagcgggccatcactattgctggc

SEQ ID NO: 504878 - DNA, 83 bp, Homo sapiens
ctcaaagccgggagatcgactgtttgagcccggaagcgcagaagctgcttcctgcctgacacagctcacttcaagaagtgcac

SEQ ID NO: 504879 - DNA, 98 bp, Homo sapiens
ataaaagagacctctacttagctcagcaattcttaccttgtgtccccctgaagcccagaaaagagttacgatttacagaactgcagtctggacagctg

SEQ ID NO: 504880 - DNA, 100 bp, Homo sapiens
ccagatgtcctcatcatcccgtcagagctgaggtacttcgtgaagtcatacacgtggacctaactgcaccagtagcttttctgagaatacttgctgaaaa

SEQ ID NO: 504881 - DNA, 83 bp, Homo sapiens
tcttctgtgatgtgaaacttcagtatgcagtccctatcatcagccagcagggggaggcagagaatatgttattccatccttgg

SEQ ID NO: 504882 - DNA, 100 bp, Homo sapiens
gggatcgaggcctcccctggccagaagcggcccctgtggctgtgtaagatctgcagtgagcaaagagagacacatgcctcactcctgtcagcagttccac

SEQ ID NO: 504883 - DNA, 80 bp, Homo sapiens
ttcaaaacgcactcattcagtttgctactaggcaagagtacagcactgcatctgctctgtagccagtgaccactcagtag

SEQ ID NO: 504884 - DNA, 99 bp, Homo sapiens
tgctgggccagcccccaactccttcggatattctgctgaagtgatccagtctcgagtgaacgaccaggagggccgagaggaattctatgtacactacgt

SEQ ID NO: 504885 - DNA, 83 bp, Homo sapiens
gaaatgcgcagagcaaacatctttcaaagatttgaatataacctgccgctttgcaggtgtattccacgtggagaaaaatggtc

SEQ ID NO: 504886 - DNA, 100 bp, Homo sapiens
tggctgcactgcgtgtgtgtggtgggcttcgacctggagctgggccaggccgtggaggtgcttcagcgaagagtcctgcgtctccatccctgaagtggag

SEQ ID NO: 504887 - DNA, 49 bp, Homo sapiens
tgcacctcatgatcaacaatgtcctctccacccggatcctggccatgaa

SEQ ID NO: 504888 - DNA, 98 bp, Homo sapiens
cgagaagaattaagtgactatgaagaacgaattgaagaacttgaaaatctgttacaacaaggccaccccaacatgggaggatcaatgcagagaatgaa

SEQ ID NO: 504889 - DNA, 75 bp, Homo sapiens
atcttgaatcagaaattgagaagctgagacattccataagtggaccaatctcaacatccaaacccctgacagccc

SEQ ID NO: 504890 - DNA, 83 bp, Homo sapiens
tccctcggtttgcctactgaagagcttatcagagctctacttgggaaagtctatcagccacagtctctgcaagtttccaagag

SEQ ID NO: 504891 - DNA, 90 bp, Homo sapiens
aattacgccaatgtggacggactcactgccctgcaccagaatcaacctaccgacaccaagcaaccatcgatgatgaagttgtttccatgg

SEQ ID NO: 504892 - DNA, 90 bp, Homo sapiens
aggtgttttcaggttaaccgtcaggctcatgctgaagattcggttatggaccatcatttccggaagccagcaaatgatataacgtctcag

SEQ ID NO: 504893 - DNA, 75 bp, Homo sapiens
aggtggtcaggtggaacccatgcctggagcctcaccgcttcaatgacacagagacagggtctcattctgtcgccc

SEQ ID NO: 504894 - DNA, 90 bp, Homo sapiens
caaagcttatgaaaaagttggatgtcagttaaggcatcttcatgatacagttaagaggaatcttgacagcgccacttcccctcagaatgg

SEQ ID NO: 504895 - DNA, 82 bp, Homo sapiens
cgggacgcggagcccggagctggggcgacgaggcgattgcgggggcctgggctagatcaatgtccgagttaccaccatggat

SEQ ID NO: 504896 - DNA, 75 bp, Homo sapiens
cctgaagagggaagacacgcggaaacaggggcacaggacgacctgaggaaggtcacccgcatcgcctactccatg

SEQ ID NO: 504897 - DNA, 100 bp, Homo sapiens
cttcaagcttaggaccacccaccatgcctatccagtcctgaatggcatggaatgctctactcccaagctgacagcaagaagaaatcaaacctcatgatgt

SEQ ID NO: 504898 - DNA, 83 bp, Homo sapiens
ggcggatggacacggacgtggtcaagctcagccccgggctcagctcctggttcccagtatggcacaatgaccaggcagatatc

SEQ ID NO: 504899 - DNA, 100 bp, Homo sapiens
gccgcgcttctgctctcagtgtcccggacttcagatggactcaccctgtcacccaggttggactgcactggcctcaacctcctgagttcaagtgatcgtc

SEQ ID NO: 504900 - DNA, 50 bp, Homo sapiens
cgggcaagttctatcatactgaccccacagcagggccctcagcatcggac

SEQ ID NO: 504901 - DNA, 83 bp, Homo sapiens
cctctctggacagggacagtgggcagtgctcccggaacacaagctgtgaaacactagaaggaagaatcctgctcaaaaatgag

SEQ ID NO: 504902 - DNA, 100 bp, Homo sapiens
cccgtgcccacggtatcttccagaggacgagaacaagccgtaaggacagtcattttgtttactcattcagccctgttgcaggtcccaataaactcttcat

SEQ ID NO: 504903 - DNA, 74 bp, Homo sapiens
ctgccgccatacgcgctctccctgtttagggtgctctggaacagggctcaaattctcagctgatggctgttcaa

SEQ ID NO: 504904 - DNA, 99 bp, Homo sapiens
gttttgacacaagggcgcatatcttcaaagcacctagtacctcctaccattgtcaactgatggcgggtgaaaaagttgagaagccagatactaaagaga

SEQ ID NO: 504905 - DNA, 100 bp, Homo sapiens
gatgaccttaaccctcaagccgaagccttcagtgggactcccccagcagatacattctcacaactctctgcaaggtcctaagggttctaagttgaataag

SEQ ID NO: 504906 - DNA, 51 bp, Homo sapiens
gggagctgccgagcctgcagtcgctgagccgggtgtgggctgagccctgcc

SEQ ID NO: 504907 - DNA, 100 bp, Homo sapiens
ccctcggcctcggagcaacgagcgcagcgccggtgtcatggagaaactccagctgggcccagagattctgcagcgggaaaatccaaggcttatttatgcc

SEQ ID NO: 504908 - DNA, 74 bp, Homo sapiens
gtttctttgtcatgtagccaagactggagaaacaatccatcatcgtctacagactgccgtggacctggaaatgc

SEQ ID NO: 504909 - DNA, 80 bp, Homo sapiens
ggaactgtgatattgtgactgcctgcttgcaggctgtgtcacagaagagaagcctgggttctgaggaaaacgcaatggtg

SEQ ID NO: 504910 - DNA, 135 bp, Homo sapiens
ggctcattgtagcctcaaactcccaggctcaagcagtcctaccatgtcagccttcccagtagctgggaccacagggcgacctccggcggatgtggtctgagcctttccactccaagtccagcagctcccgattcc

SEQ ID NO: 504911 - DNA, 89 bp, Homo sapiens
ctgaagtaacagcagcaatgaccttccctcgggaattccacctctgcgtttttccctccaggccaggaatagttgctgaacaccccagg

SEQ ID NO: 504912 - DNA, 75 bp, Homo sapiens
ttcaccaatgtaagtctgccttatgttcctccagccaattgcaaaggatcatggaggacacccaggctattgact

SEQ ID NO: 504913 - DNA, 87 bp, Homo sapiens
ggcccagcagggccagcaggggcagatggcaagtggagacagcaatctcaacttcagtactttggaagtgttgctgaaatcatcagg

SEQ ID NO: 504914 - DNA, 74 bp, Homo sapiens
aggacggatatccagtgccttatcccatgtgccattgaccaggaggaggagacggaggctgccattggagcccc

SEQ ID NO: 504915 - DNA, 89 bp, Homo sapiens
cggcgggggacaagtcggcgccccagagcggacgaggcctcatgcattgtgcgtcagcagcaatgtttatggtgaaaaatggcaacggg

SEQ ID NO: 504916 - DNA, 83 bp, Homo sapiens
atttgccaaaggaaacttgccttatcaccttcttgcttgcagggggatatgagactttctactcggaatatcctgagtgttgc

SEQ ID NO: 504917 - DNA, 50 bp, Homo sapiens
cctcgcgtccggagtccccgtggccaggtcactgtgattgcccggcagcg

SEQ ID NO: 504918 - DNA, 119 bp, Homo sapiens
ttttactcatccatgtgaccatgaggaaatgagagaaatgcttacacacagaaatgagatctgaaactggacaatgtcctgttggaccacgagggtcactgtaaactggcagacttcgg

SEQ ID NO: 504919 - DNA, 82 bp, Homo sapiens
cggcgccccggccgaggtggcggcggctcctcagacaatgcagatcttcgtgaagactctgactggtaagaccatcaccctc

SEQ ID NO: 504920 - DNA, 100 bp, Homo sapiens
cggcgatgagctaagacgctgtttcagagcgtttgggtcctctgaggccccttgaccagagtacaggggctcaggtccaggtggcaggggatatgctacc

SEQ ID NO: 504921 - DNA, 88 bp, Homo sapiens
caccacctcctgctgccttcccgtcgccgctcccgaagcttttccagatcggtcgcttggttatcggacagaatggaatcctctccac

SEQ ID NO: 504922 - DNA, 88 bp, Homo sapiens
gagctctgatagttgttccttgtgcagaaggttgtttacattcagagctctatcaataagaggaatacatattacagtgaattcgaca

SEQ ID NO: 504923 - DNA, 74 bp, Homo sapiens
tcggcccctggctcctgctcctgggtcaaggtcagcatctcctcgacgatcaagatctatctctcttcgtagat

SEQ ID NO: 504924 - DNA, 75 bp, Homo sapiens
ctacaactcatgcccagcagcagcaagcagatataattgaccctgcaatcctgcgcccgggccgcctggacaaaa

SEQ ID NO: 504925 - DNA, 75 bp, Homo sapiens
atccgcaagaacaagtaccgccccgacctgcgcatgggcgaagctgtgctcaggcccgggctggacgcagagcca

SEQ ID NO: 504926 - DNA, 75 bp, Homo sapiens
aatgtcatccagcgagtgattaggtttatgctaaaactatcgatgggcaacagactattattgcatgtattgaaa

SEQ ID NO: 504927 - DNA, 80 bp, Homo sapiens
gctccctcgccgtcactgttgtataaatgtttttagaacttcagccataaaaatgggcagaattttccttgatcatatcg

SEQ ID NO: 504928 - DNA, 74 bp, Homo sapiens
ccgcccatcatccacagggacctcaaggtcaaggccttcttggctgatccatctgcctttgtggctgctgcccc

SEQ ID NO: 504929 - DNA, 82 bp, Homo sapiens
gccctcagaggccccggtgctggcagctgagcccgaggctgacaagagtttcagattgccaaaagacaaaacgggtaccaca

SEQ ID NO: 504930 - DNA, 96 bp, Homo sapiens
aaaacatcaaagaggtctagcaaagtgaggagaaggaggaagtgaccatggacacaagtgaaaacagacctgaaaatgatgttccagaacctccca

SEQ ID NO: 504931 - DNA, 90 bp, Homo sapiens
gtcaaacgtaagatgaaagctattggatggggaaagaagactctggaccagatgcagacagacatgctgaactatctggaagtccactga

SEQ ID NO: 504932 - DNA, 90 bp, Homo sapiens
cctcggcctgttgttgtgaatcgccagacctttgtaacacccggaagtctgaagaatgccagaggattcaacatgagcatacctatgcct

SEQ ID NO: 504933 - DNA, 75 bp, Homo sapiens
catgcaatggcaatgaccagattggctgctgaacgaaagtgacaagcgccccttcatcgaggaggctgagcggct

SEQ ID NO: 504934 - DNA, 88 bp, Homo sapiens
accattcacgccgacagcgtggccaagcgtccggagcacaatagatctgaagccttgaaggaatcagagatcattgatttcttcctgg

SEQ ID NO: 504935 - DNA, 95 bp, Homo sapiens
cggcaccaactattcgcggagctggaatgactggcaacccaggtgactattatatggttaaaaagattttggaggaaaacagttcaggtgacttg

SEQ ID NO: 504936 - DNA, 88 bp, Homo sapiens
gcaatagcccttcagtactgttgtacggtgtaaagaagacattccagtgtgagctttgcagttacacgtgtccacggcgttcaaattt

SEQ ID NO: 504937 - DNA, 139 bp, Homo sapiens
cgcggaggatttgcagcaggacatcaacgcgcagtccctggagaaagttcagcagtattaccgcaaactcagagatatcaaagacacgacggtgggcactctgtcccagcggatcacaaaccaggtccatggtttgaag

SEQ ID NO: 504938 - DNA, 98 bp, Homo sapiens
accccctttctgctgacatcgccatggccacccgtgcagatgaggacggagacacggcaagaagactatgaccggctgcggcccctgtcctaccagaa

SEQ ID NO: 504939 - DNA, 82 bp, Homo sapiens
ttcaccagcgccaccaactataagaatcacgtgcgcatccacacaggtctatcagccacagtctctgcaagtttccaagagc

SEQ ID NO: 504940 - DNA, 75 bp, Homo sapiens
tgcacattttgcctctggttggtggaaaggaaattgaacttagctcattaagggaagctttgtctttcgtgtcat

SEQ ID NO: 504941 - DNA, 75 bp, Homo sapiens
gtttctttgtcatgtagccaagactggagaaacaatgctcctcagtggttggaaagtgattcttgtcagaaatgt

SEQ ID NO: 504942 - DNA, 75 bp, Homo sapiens
cgagaccgtgaccgagagcgtgaccgagagcgcgaatatcgtcatcgttagaagtcatcttggccaagtatggtc

SEQ ID NO: 504943 - DNA, 98 bp, Homo sapiens
ccgccaggcagtttctgctaaaatggtctttctacagaaaccttctctatgtctacccacagaggctgaactttgtaaacaaactagcatcagcccgg

SEQ ID NO: 504944 - DNA, 90 bp, Homo sapiens
gtttggctgcccaggctcgcctcgactccaaatggttgaaaacagatatacaggtttctgctttgggacaaccatacatctaattcctta

SEQ ID NO: 504945 - DNA, 99 bp, Homo sapiens
tttacagccaggtgaggaagtggagatagctgagctcactacaggatgaagtgatcaaagtccgaacagataccaaattagacttcaacctagaaaaga

SEQ ID NO: 504946 - DNA, 100 bp, Homo sapiens
caggccgaggccatatccgagcgggccaattcctgtccccccagcagcatggcatcgtgtgctgaaccctctgagccctctgccccactgcccgccgggg

SEQ ID NO: 504947 - DNA, 95 bp, Homo sapiens
agatgcaaaaatgcaccctactccagcatcgcaccccaagaaaccagatgctgagatgaatcgtcacctgtgtgtttggctttttagacatccat

SEQ ID NO: 504948 - DNA, 100 bp, Homo sapiens
aaactcaaggaacatctgttgagaagaaaaacgctttttgcatacaagcaggaaaatgagatgttatccagccatatgtgtcattggctcagcagatggc

SEQ ID NO: 504949 - DNA, 75 bp, Homo sapiens
ttgcctgtgtcccacttgttcgcggcctatagcatggagcagatccaactaaaaagaacagagatggaaatacac

SEQ ID NO: 504950 - DNA, 90 bp, Homo sapiens
caacaacctggtggaaatcattaaccgacccaacacacccaagacactgctggaaaacacaggggcatatgggggcctctcagaccgccc

SEQ ID NO: 504951 - DNA, 51 bp, Homo sapiens
caccaccggcatcctcaatgagcaggtggcatttattttcaactggcttgg

SEQ ID NO: 504952 - DNA, 83 bp, Homo sapiens
atctgagcgtgctgcggacggcgctgcggtacatccagccttatgccagcctggaccatcttggaggcagtgtaggatcatgg

SEQ ID NO: 504953 - DNA, 102 bp, Homo sapiens
aaacagcccgcccgaccccgtcccgaccctggccgccccgagcggagcctggagccgctgtacaaccagccctccgacacccggcagtatcatgagaacatc

SEQ ID NO: 504954 - DNA, 100 bp, Homo sapiens
ggaggcctcttccagaccatcatcagcgacatgaaggaatcccagtcagaagttccagcctgccactgttctctgatgccatgccagcaccaactcaact

SEQ ID NO: 504955 - DNA, 75 bp, Homo sapiens
tatgccggaagctggttttcaggccacaaatgctttcacaggtgacagagctgaatgaacctctctccaatgaag

SEQ ID NO: 504956 - DNA, 90 bp, Homo sapiens
ttcagcatagctattcctgttgatggtgatgaagacaggattttggcattagagaagctcggtgctgtcttcaatcaagtagccttccca

SEQ ID NO: 504957 - DNA, 75 bp, Homo sapiens
ggtccctgaagagggaagacacgcggaaacaggagtctcgctctcagtcaaaatctccaacgggaactcctgctc

SEQ ID NO: 504958 - DNA, 98 bp, Homo sapiens
atcatggcggatgatctaggcactggggatctcggttgctacgggaacaatacactgaggtgtgatgaatgcagactctgctaccattttggctgttt

SEQ ID NO: 504959 - DNA, 100 bp, Homo sapiens
gattctgctgtgggatgtggatggtggcctcacccagattgacaagtacctgtactcctctgaggactacattaagatatctcgcagagcatatttcaat

SEQ ID NO: 504960 - DNA, 74 bp, Homo sapiens
tcgtcgagaagcctatcatcggttacgaagtgacagtgctggtgcgggactcctccaggctgccatcagagggg

SEQ ID NO: 504961 - DNA, 82 bp, Homo sapiens
taaccctgagacaaccacttctggtggttgccactcacctgaggattgcctccggagccagcgtggtggccatagacaacaa

SEQ ID NO: 504962 - DNA, 98 bp, Homo sapiens
ggtgagattggaagtggcggcggcggcaggcggcagaggggagcttttcctccgcaaccatgtctgacaaacccgatatggctgagatcgagaaattc

SEQ ID NO: 504963 - DNA, 75 bp, Homo sapiens
ggagtactcggtgaaatcctgtcctgaagactgtaagataatcagcaactgctgtgatgagatgctgcctttaat

SEQ ID NO: 504964 - DNA, 100 bp, Homo sapiens
cggtgtctacagtgttctcgacttcgtcgctggaggcaattcatagcagccaggttggcacttcaagaagcagccaggaaatggcaagaaatgaacaaga

SEQ ID NO: 504965 - DNA, 80 bp, Homo sapiens
tctgcaaaaccttccactccatggcctacgggcacatagggcggaaggatcatagacggtatttctatgtaaacgaacag

SEQ ID NO: 504966 - DNA, 100 bp, Homo sapiens
gctgctgtgtgggaagaagatttgtaaagaaaactcttagcatcctgaggttagcattacacttctcccagtggagcccatgacttctgatcaggacgct

SEQ ID NO: 504967 - DNA, 82 bp, Homo sapiens
gaaaaatggctctgtcggcagtgtgtttttgcaacaacaacaaaggttgcctgggcttctggttcctcttcagattacattg

SEQ ID NO: 504968 - DNA, 75 bp, Homo sapiens
aactggcacccagtgctcatggtcaccggcttcgtcttcatccagggcatcgtgtgtgttttaatagaaaagttg

SEQ ID NO: 504969 - DNA, 76 bp, Homo sapiens
tgggttcccaaacactaacttgtttccctgggaatttggagtgtcgtgtgggagccaatgggagatgggaagaaaa

SEQ ID NO: 504970 - DNA, 51 bp, Homo sapiens
caggcacagccttttacattgatcaggttcaaaccttgtactactcagctg

SEQ ID NO: 504971 - DNA, 100 bp, Homo sapiens
ggcgtgttggccccgcacagattgagccgagttgtcgccccgctgggagaagtgaccctcctgcgcctggtttattcttcagtccaaggaagcaattcac

SEQ ID NO: 504972 - DNA, 75 bp, Homo sapiens
gggcctggagtcaggtggcggtgcagaaggtcaacgccgcaggcacaggagcgggacggtatgcgggccatcctg

SEQ ID NO: 504973 - DNA, 74 bp, Homo sapiens
caggccagaccctctgggagcttctcagccattttccacagatcaggaggatttgatgaagatgttaaagcgaa

SEQ ID NO: 504974 - DNA, 82 bp, Homo sapiens
cgccatcaaccgccagatcaacctggagctctacgcctcctacgtttacctgtccatgctgtcaccactgactaaagaagag

SEQ ID NO: 504975 - DNA, 90 bp, Homo sapiens
aaaggagcaacagtttacagcccttccagatacagctaccaggaagctgcacaagccttaatttatgctgagatggcaggatcaagccta

SEQ ID NO: 504976 - DNA, 100 bp, Homo sapiens
cccatattcgagccccgtggaatcccgcggcccccagccagagccagcatgcagaacagtctcctctgagcctccggcctccataagacccaaaacagat

SEQ ID NO: 504977 - DNA, 96 bp, Homo sapiens
cggaggcggaaggggaaagcctggagtcctggctcaagctcccagctcctccagcagccgacaggaggcccgtcaagatgcaggcaggcattgcca

SEQ ID NO: 504978 - DNA, 75 bp, Homo sapiens
agtgtctgcagtgccaaatgtgtgacccagagttgagtaatgtggagttccactgcgggagggccgaggacctgg

SEQ ID NO: 504979 - DNA, 82 bp, Homo sapiens
gaaggaagattatttcaagtggaatatgccattgaggctatcaagccgctgtgattggaaccaggctgcatgctgctgtggc

SEQ ID NO: 504980 - DNA, 100 bp, Homo sapiens
tttgttttcactcatgtacttgtacctgtctggattattcattattacatgaagtatcatgtttctctgccactgcagagccccgccatggaagacacgc

SEQ ID NO: 504981 - DNA, 75 bp, Homo sapiens
gccggcgcttacctctgctacagggattatacttactcagctgttaagagtaggcaatttcttcagttcttccac

SEQ ID NO: 504982 - DNA, 121 bp, Homo sapiens
ggacatgctcagggctgcggccgcccgaagaggagagagcgcgggcctctaggaaggtcaccggattgaaactgtctcaggaccttgatgatcttgccattctctacctggccacagttca

SEQ ID NO: 504983 - DNA, 82 bp, Homo sapiens
acgcggagcccggagctggggcgacgaggcgattgcgggggcctgggctagtgcaaggatgatgctgaaaggaataacaagg

SEQ ID NO: 504984 - DNA, 80 bp, Homo sapiens
gagtccttggggacggagcagcgcgtcgtggggcgagcggcagggctgggttacgacccctacaaccctgagctgcccaa

SEQ ID NO: 504985 - DNA, 100 bp, Homo sapiens
ctcccctctcggggcaacccagacgtgcaacaaagtgcgatggctgagtcatcactagagagtgggaagggcagcagcagcagagaatccaaaccctaaa

SEQ ID NO: 504986 - DNA, 89 bp, Homo sapiens
cggactgcccacaggagagtacccagggctgatgaagcactcctggaagcctgcactttccgtagaccttaaaatctcagaggtagggc

SEQ ID NO: 504987 - DNA, 82 bp, Homo sapiens
agcaccgcagatgttgtcaaggtggcctaccaggaggccaggggtgtcgccatgaagcagcgctatgcaaacaagcactgaa

SEQ ID NO: 504988 - DNA, 96 bp, Homo sapiens
caaaccgtacaagaaaaagtcgtgtttctgtgtctccagggagaacttcagcttcgccgacacgaggtgaccatctgcaattacgaagcatctgcc

SEQ ID NO: 504989 - DNA, 100 bp, Homo sapiens
tggaagaaagaagagcttattttgacttgcagacacatgcccctgtaaagatagctgtcattttcaagcagctgagagttctcattgattcagttttaag

SEQ ID NO: 504990 - DNA, 75 bp, Homo sapiens
aagtgatgagatgaatgaagacttcagatctggtttcgtgagatggagaataaagaaactctcaaagggttgcac

SEQ ID NO: 504991 - DNA, 74 bp, Homo sapiens
cgccaacgcagtgaccgaaggctccgctcacgcccggggatcgcttacacctgagacgaactacagaacagcac

SEQ ID NO: 504992 - DNA, 75 bp, Homo sapiens
aggcaactcgacctttggaagcctctatgttgtgactccacttgataagggctttaaacacgaagacctgatttg

SEQ ID NO: 504993 - DNA, 90 bp, Homo sapiens
gcggagtactgtgatggctgtggggagcacatcgctatcagctggcccagcggaccttccgcacttttgatttctacaagaaacaccaag

SEQ ID NO: 504994 - DNA, 101 bp, Homo sapiens
aacttcggcaagatccagatcgggatttacgtggagatcaagcgcagcgatggtttctaagcatgaattgaggaacagaagaagcagagcagatgatcgga

SEQ ID NO: 504995 - DNA, 96 bp, Homo sapiens
ctgattggccggtgtacttcagtttccgtccaaggtccgcctcctacctccttctgcttcggagcatcagcataggcagaggaaccaggaagagag

SEQ ID NO: 504996 - DNA, 82 bp, Homo sapiens
tttgtccctggagacgctctgccagccagcagcccctgtcaaagggaacaggaagcagtccacggagggtgacgccctagac

SEQ ID NO: 504997 - DNA, 96 bp, Homo sapiens
agttcatcagttctactgccctctgcctgcggatcagttccatgacaagaccccttatacgattatgtttggtccagataaatgtggagaggacta

SEQ ID NO: 504998 - DNA, 101 bp, Homo sapiens
tatctggtcaactccaaaaaggagacataagaaaaaaagcctcccaggaggtgtgataaagcggaattgggaatatatatgtagccatgataaagaaaaaa

SEQ ID NO: 504999 - DNA, 98 bp, Homo sapiens
gtgagttatcttctggaaatgagtcttcaagctctgtaagacatgtgggatgtgtgtgggctgaaattccgagctgcggttgtgcatgagaatacacc

SEQ ID NO: 505000 - DNA, 74 bp, Homo sapiens
cgcgaagaggctggactcggattcgttgcctgagtactaaggctcgtacgtctgcatcgattatcttacgtggg

SEQ ID NO: 505001 - DNA, 100 bp, Homo sapiens
gctctaagtacatgcccagtggatactccatgtgacatggtttctccctatgttacgtggatgtttgtaacggcgcaaccatgtcgccatttcttcggat

SEQ ID NO: 505002 - DNA, 130 bp, Homo sapiens
atttcacggtggccttgtggagacaacgccttaacccaaggaagtgactcaaactgtgagaacttcagccgacatcggcctggctgcctggggacgcaaggccctggacattgctgagaacgagatgccg

SEQ ID NO: 505003 - DNA, 101 bp, Homo sapiens
ctcgcccagcggccgcgacgctatggcgcactggagtaccctgttcctggcagttaacacagaaatctgcctcctgggccatgccgcttctaaggcctgtt

SEQ ID NO: 505004 - DNA, 101 bp, Homo sapiens
agtcgggagagctttctggatgatgtaaaccttattctggccaacagtgttaagtataatggtgtttgatgtacagaggaaagtcacctataggaacctga

SEQ ID NO: 505005 - DNA, 100 bp, Homo sapiens
ttcagcttggacattttacccttcagtcggcccaagaaatcaaaataaaggaaacacatttcatatactgcagttccagatggaaacatgtggaagggcc

SEQ ID NO: 505006 - DNA, 75 bp, Homo sapiens
cggggtggtgtgtgggggaagccgcccccggcagcaggaaagtggagaatgaggacatgaataaagaccagatct

SEQ ID NO: 505007 - DNA, 82 bp, Homo sapiens
gatgtctacttcgaagactggcaagcacggccacgccaaggagactcgagtccgggcaggggagctggaccaggctctagga

SEQ ID NO: 505008 - DNA, 82 bp, Homo sapiens
cggcggggctgaggcggccgcggggcccgagcgcagctgtcccctttcctccaacccaacggcttactttcaaggaagtatt

SEQ ID NO: 505009 - DNA, 50 bp, Homo sapiens
cagaggggcgagcatcctccaatctagaattcctagaggacctgtgcaac

SEQ ID NO: 505010 - DNA, 87 bp, Homo sapiens
ccaaacccacttcgttcaagacaggtgtttaagctggcaacatgaagatctacttatcaatagaccacaagccatgtcagtcacacc

SEQ ID NO: 505011 - DNA, 90 bp, Homo sapiens
gaagagcagtacttccagttcctggccaagtttgagatcgccctgcccgtcgccaatgacagggtgatctggaccctctggcatctctca

SEQ ID NO: 505012 - DNA, 82 bp, Homo sapiens
cccccagtatctgcaagccaagatgatgaaacatgcttggaataattataaaggttatgcctggggattaaatgaactcaaa

SEQ ID NO: 505013 - DNA, 100 bp, Homo sapiens
tctttatggatgtggctgctgggctgaaaatactggagctcataacccctactccacagctcaacgcagtgtgcatattttatctggttctccgagctct

SEQ ID NO: 505014 - DNA, 100 bp, Homo sapiens
ggagactttcatttcactgactgtttattttttggttcactgatgtctgctacagatccagtatgccgagattttgctgtcctggaggaccacaccctgg

SEQ ID NO: 505015 - DNA, 74 bp, Homo sapiens
ctggttctggaatcctcagttcaagggttgagaatgcttgcaccaagcttgtccaggcagctcagatgcttcag

SEQ ID NO: 505016 - DNA, 51 bp, Homo sapiens
ttcggatttgttctacagagagaaagcgtggatacccatcaacgaagtttt

SEQ ID NO: 505017 - DNA, 75 bp, Homo sapiens
ggccaaacacagcatcgacggcatcctgagcgagcgagacatggcccatgaacatggacatgagcatggacatca

SEQ ID NO: 505018 - DNA, 82 bp, Homo sapiens
ctgaaagaccggcatgccctattctgtgggcttccgcgaaatttgagttctgtgaacctgcatttgttgttggtaattgcct

SEQ ID NO: 505019 - DNA, 96 bp, Homo sapiens
gaacactgctgggagtcctaaaacctgcgacaggaagccacgtcatgaatattttaatgtccctgtgtactaaatgactactcatcgagtatgcag

SEQ ID NO: 505020 - DNA, 100 bp, Homo sapiens
tcatgccatgctggatatgtggctgatggtcttctttggatatcagctccaacatctatccggagaatgccaccgccaacgggcatgacttccagatgtt

SEQ ID NO: 505021 - DNA, 101 bp, Homo sapiens
cgcgagcgccctgcagcgcttggtagagcagctcaagttggaggctggcgtggagaggatcaaggagcttcaggatggttcgtactaagacatggaccctg

SEQ ID NO: 505022 - DNA, 100 bp, Homo sapiens
agtaccggacgatgagactctgaaccaaatgattgctcgacgagaagaagaatttgacctttttatgaatgaacaactttgtcaggatattattgactac

SEQ ID NO: 505023 - DNA, 101 bp, Homo sapiens
tgctttcccccgggcccaggtgtttggggttataatgagaagaaactaacagacaatattcagtgtgagatttttcaagttctttatgaagaagccacagc

SEQ ID NO: 505024 - DNA, 101 bp, Homo sapiens
ggcttgtccatctgtaacttcattaaggtgatcgaggagttctacaaccagacatgggtccaccgctatggggagagcatcctgcccaccacgctcaccac

SEQ ID NO: 505025 - DNA, 75 bp, Homo sapiens
ctcaccgagtacgaagcgggcgtttgcgaagattcccgacagttaagcaatggggagacatttggctttgctcct

SEQ ID NO: 505026 - DNA, 88 bp, Homo sapiens
gagacggcctgggtgctggcgaagcggaggccggaggtcagcccttcataaacccagatgggagtccagttgtgtataatcctcctat

SEQ ID NO: 505027 - DNA, 90 bp, Homo sapiens
gagcaaagctacttccattccagaaagatggcatcatttttgccctcaaaagaaatggcagttgaaaacaatcctcgaacaggaaatctt

SEQ ID NO: 505028 - DNA, 101 bp, Homo sapiens
atgcacttgtggaatgagagaaccgaggaacgaagaaacagacattcaacatgattgcatttgaaccctaccacttatgtcttggatgaagatgaacctcg

SEQ ID NO: 505029 - DNA, 48 bp, Homo sapiens
gcacccagaggaccaggcggcggacacaatgtttgcacgaggactgaa

SEQ ID NO: 505030 - DNA, 90 bp, Homo sapiens
cagccccgccggcagccctaagggcaaggacctgggatccagttggaggacggcggtgatggcagggaggatgccccgttgagaatggag

SEQ ID NO: 505031 - DNA, 101 bp, Homo sapiens
gttcgagctgtgcgggcgggcggtgagcgcccatatgggggttctggagagcggggtgtgggaagtccattggaatattaagcccaggagttgctttgggg

SEQ ID NO: 505032 - DNA, 90 bp, Homo sapiens
cagaaattgctagaagaaaacgttagtgctttcaaaacagaagttgattcaagtcagttgagacgccagttgtgtggaggaagtcaggcc

SEQ ID NO: 505033 - DNA, 75 bp, Homo sapiens
gcaggagcaggagcgggagcgggatccccagcaggagcaggagcgggagcggctccaattaaggaacagctatat

SEQ ID NO: 505034 - DNA, 82 bp, Homo sapiens
ccggcacaaagaacacaagaaggagaaggaccgggaaaagtccaagcatagcaacaggaattcgaatttagagtttaatttc

SEQ ID NO: 505035 - DNA, 96 bp, Homo sapiens
cctcgcgctgattctcacgggcccggctgccggcccccgctctgccctggcaatctttggcagccagacactacctaactccaatttatggacaat

SEQ ID NO: 505036 - DNA, 75 bp, Homo sapiens
gaaaaatgtttcagttcagcgcttttgcctgcagttgaggctttatggcattgtgtggctgctcaattaatgtac

SEQ ID NO: 505037 - DNA, 76 bp, Homo sapiens
ctccaactggaccgtcaccaacacccgcttctctgtggatgaagatgcagacagtggaggagatagtcaggaagag

SEQ ID NO: 505038 - DNA, 88 bp, Homo sapiens
cagcctggcgccggagctgaaacacgacgtgaaggtgctgactgggttacttttttaaacactaggaatggtaatttctactcttctg

SEQ ID NO: 505039 - DNA, 82 bp, Homo sapiens
gtaggtgcgggtgaagatggcggcagccgaggccgcgaactgcatcatggagttccagggtctccctccactgctgtagtaa

SEQ ID NO: 505040 - DNA, 96 bp, Homo sapiens
cccggcttcaggatttacacagacgtggggcgatgcttgtgaccctgcagctcctcaaaagttgcatgctgagaatttgaaaaatgaagatgatgt

SEQ ID NO: 505041 - DNA, 88 bp, Homo sapiens
cggctatgggaatgatggctttgatgacagaatgagagatggaagaggggcaccaccacgaggcgatttgtgggccataccaaggatg

SEQ ID NO: 505042 - DNA, 82 bp, Homo sapiens
tggagaaacgactctgcgccgccgctgcctccatcctgggcaaacctgcggacataaacattgacgatcttgaggatgaccc

SEQ ID NO: 505043 - DNA, 74 bp, Homo sapiens
cagaagaagccaaaaacattctggtgaagtgtatccggagcaccccggaatattttgctgaaaggctcttcaag

SEQ ID NO: 505044 - DNA, 75 bp, Homo sapiens
acctctgggagcagctcaatttggacacccagagatcgcggattcaggtgtggctctatgagcaagtgaatatgc

SEQ ID NO: 505045 - DNA, 82 bp, Homo sapiens
agcgggagctggacggcgagcgcgagcggcgcgagaaaaacatacatatgatagttgagaaagacacatattctgatcatga

SEQ ID NO: 505046 - DNA, 74 bp, Homo sapiens
cagaggccaactgcagaggaactggaacagaggaacattttgaaacaagagcttaaagcagcgcctgggtaaga

SEQ ID NO: 505047 - DNA, 101 bp, Homo sapiens
tgctgccaccatccccagctcagccatgcaggccccaacagcccattgcagatgcaaaggctcctgagaagcgggcctcaccatccaagccagcttctgcc

SEQ ID NO: 505048 - DNA, 100 bp, Homo sapiens
ttggaatactgtcacaaaaagaatttcctgcatcgggatattaagtgttctaacattttgctgaataacagtgagaaagatcagtctaaagaaaaggaga

SEQ ID NO: 505049 - DNA, 83 bp, Homo sapiens
cggagtggagctcagccaggggcagccggctctggtgctcccagaagaggtgaaaggaaagcaagccaggatggatatttacg

SEQ ID NO: 505050 - DNA, 100 bp, Homo sapiens
ccgcgagtgcccgggcccagcccggcctagttcaggtgctggagaatctggtaaaagcaccattgtgaagcagatgaggatcctgcatgttaatgggttt

SEQ ID NO: 505051 - DNA, 75 bp, Homo sapiens
gcgccttgcagcactgctggaccagatatatgcaagttgccgaaagacgaaggaacttgcagggatttcatatta

SEQ ID NO: 505052 - DNA, 75 bp, Homo sapiens
gggacaactaatggatacaaatcaggattcactcagacagtgactgtcatgtggcatgggtctctgcccaagctc

SEQ ID NO: 505053 - DNA, 75 bp, Homo sapiens
atgggatttcccctcatttatgtggaagctgaacaggcccgccaagctgccccctgtgtgctattctttgatgag

SEQ ID NO: 505054 - DNA, 100 bp, Homo sapiens
catggatacttttctagtgaacagtgcattgaagtaatgggagatggatgccttaataatgaacactttgaagaactgggaggtatattgaaagcaaagc

SEQ ID NO: 505055 - DNA, 75 bp, Homo sapiens
aaccaattgcagggagctatgcaacagtttaaccaacgatacctctattcggcacctgaatggacagaagaggac

SEQ ID NO: 505056 - DNA, 75 bp, Homo sapiens
aagaaacattggaaaagaaatcctgataagaactgctttcactagaaagtttgggatttggctcttacatcagtg

SEQ ID NO: 505057 - DNA, 75 bp, Homo sapiens
cagcctggtgagggtgatgttcgggaggaggccttgtccacaggaataacttagcttgcacatgaatgcagtcat

SEQ ID NO: 505058 - DNA, 82 bp, Homo sapiens
ccatgagctgtcgctgcatctttctcatgaagcacggggaacgggtcggatgattctcattcagattgtggatgcctcgtca

SEQ ID NO: 505059 - DNA, 141 bp, Homo sapiens
ttcgggccgagatgtctcgctccgtggccttagctgtgctcgcgctactctctctttctggcctggaggctatccagcagacacctatggctgccgatgaaggctcagcagagaaacaggcaggagaggcccacatggctg

SEQ ID NO: 505060 - DNA, 95 bp, Homo sapiens
aggcgcgggaggtgttcgagaacgaccccgagacgtgcaagagaagcctgagccagtgccgctggagagccgctcctgcgtcctcatccgccgcg

SEQ ID NO: 505061 - DNA, 90 bp, Homo sapiens
aggccgcgggcgggtggaggcgcgtctccggcacgctgagctgactgctgcccactttggaggaggcggtgggctccttcacaagaagac

SEQ ID NO: 505062 - DNA, 98 bp, Homo sapiens
cttcacttccctcggtctgggcttctctgaggcggcgagagatggtcaggtctggagctcgaccgggccagatcacttatttgagacatagtcctcaa

SEQ ID NO: 505063 - DNA, 74 bp, Homo sapiens
ggaaaactggatgctgcagacactgaacgaggagccagtgacgccttctggcaagaggggagagcctctggaac

SEQ ID NO: 505064 - DNA, 100 bp, Homo sapiens
catgggaacagagaaggaggagcaaggaaaagtgtatgtgtatgctctcaatcaggttggccctgacaacgttcatgtggctctttccttggttgaatat

SEQ ID NO: 505065 - DNA, 100 bp, Homo sapiens
ctcgtgcctacaccaaaccccatctctgggaaagccacagtatccgtggaatgcagtagccctctgggcctgggatattgtggttgataactgtgccatc

SEQ ID NO: 505066 - DNA, 100 bp, Homo sapiens
aggacactacccaatgcctcaaccgtggacaatattcgctccatctttggaaatgctgttagtcgatccagctccaggtcccacaggggctcttcttccc

SEQ ID NO: 505067 - DNA, 120 bp, Homo sapiens
tatccaggctgaatctatcccattgatcttaggaggaggtgatgtacttatggtagacatagctgacattgagaatgaagagaaccgctactgtctattcatggaactcctggaatctag

SEQ ID NO: 505068 - DNA, 83 bp, Homo sapiens
gggaaacagaccagaaccaatgccaagcgcaagatcagatccagactgtgaagacatgaaaagataatagttggaaacctcag

SEQ ID NO: 505069 - DNA, 75 bp, Homo sapiens
gcccagacaatgccggtggaggaatttgtggctggctggatctctgcagcccctgtcaaagggaacaggaagcag

SEQ ID NO: 505070 - DNA, 101 bp, Homo sapiens
taagactccaggacacccctgaagccgagaaatgaaattgcccaggttattgcctcatacaccgccaccggccccgagcagctcactctcgcccctggtca

SEQ ID NO: 505071 - DNA, 97 bp, Homo sapiens
atgccaagacagtggagtgggactggaaactgctcacctatgtcatggaggaagagtctctatgaagaagctgcagaaaatttgcatcagctgtcag

SEQ ID NO: 505072 - DNA, 96 bp, Homo sapiens
acggggctgagcactcgctccccaccctgggcctcaccaataaccagctcttcttcctgggctttgcacagcaatcccacagagtattgatgagga

SEQ ID NO: 505073 - DNA, 75 bp, Homo sapiens
agaaggcataacctctgagggttaccattactattatgatcttatctcaggaggcagcaaaggaacagactcaag

SEQ ID NO: 505074 - DNA, 82 bp, Homo sapiens
gtcgacatgagtgatgtggaggaaaacaacttcgagggcagatgacagctggagtatcagccttggaagtatatacgccaaa

SEQ ID NO: 505075 - DNA, 101 bp, Homo sapiens
tgcagaaggttgtgactttagtatacaggtaatggcagatgagttaaccaactcaagagcagctttacagcgtcaaaaccgtgatgcacacggggctatac

SEQ ID NO: 505076 - DNA, 75 bp, Homo sapiens
gccaccaatcccttcgatcaggatgttgtggctgcttcaacccccaactccactgctggtgcagccatgaactcc

SEQ ID NO: 505077 - DNA, 71 bp, Homo sapiens
cgaaaccaagttggacttacagagaggagacatggattacaactggttggatcatacgtcttggcatagca

SEQ ID NO: 505078 - DNA, 75 bp, Homo sapiens
ctgaggcagcggcaggctcaggtgcagccgctgtacgtggcatgcctggatgtccctgccctggctgtggcatgg

SEQ ID NO: 505079 - DNA, 50 bp, Homo sapiens
cctctccttgctgcagccatggagcgtccgagctgggccacagcctgaac

SEQ ID NO: 505080 - DNA, 74 bp, Homo sapiens
cccgatggcgccctggctaaatgtgcttttccagactgatccaactgcagagatggcagctgagtcattgcctt

SEQ ID NO: 505081 - DNA, 82 bp, Homo sapiens
ctgtgagatgtttcatcccaacaatgcatagctctcttaggtcccttcgtaatagtgcagctaagaaaagagcaaaactgag

SEQ ID NO: 505082 - DNA, 90 bp, Homo sapiens
ggcagcgctcctgctgtggattgtcagcagctgcctctgcagagcctggacggctccctccacgtcccctgatggtgagaccattctaaa

SEQ ID NO: 505083 - DNA, 78 bp, Homo sapiens
cgagactccgtgggcgtaggaccctccgagccagcgtttctcacctctggaggactcagcattcaaggtgccatcttg

SEQ ID NO: 505084 - DNA, 82 bp, Homo sapiens
tccaaaacagtcatgtcacacctggataggtggatccataaagaacccagccaacccgcagagggaggggaggggctgagct

SEQ ID NO: 505085 - DNA, 74 bp, Homo sapiens
aacttcaaggaaattggatcgagaacagcaggcagaacattttctggagagtcaagggtccagagaaggaggag

SEQ ID NO: 505086 - DNA, 100 bp, Homo sapiens
ggagaagaagcagcgcaagtttgaccagagcgtcacggggttcggacgtcagatgatcgagaaaaccaagcagctggtggagtctaagtacacagtggag

SEQ ID NO: 505087 - DNA, 50 bp, Homo sapiens
ttgtctcagggagcacagaaggccctccagaatttccacagcatacacct

SEQ ID NO: 505088 - DNA, 98 bp, Homo sapiens
acagcctggtgggaaaacactgtgaggatgggatctgcactgtaactgctggacccaaggacatggtggtcggaaaaaacactgtgaagtggttcgat

SEQ ID NO: 505089 - DNA, 89 bp, Homo sapiens
tactctggggcttcctgctccagctggtcagtatgggaatcctttaaataaatatatcagacattatgaaggattatcttacaatgtgg

SEQ ID NO: 505090 - DNA, 75 bp, Homo sapiens
ctggcagattctggaaactgtacattgaagcagaggtgagccgttctccaaccctttggcccccgatggccacga

SEQ ID NO: 505091 - DNA, 80 bp, Homo sapiens
agagaacagggtggccgcttggtccaggcagaagtcaattcatctggaaagactatctctgagtcagacttaaaccactc

SEQ ID NO: 505092 - DNA, 101 bp, Homo sapiens
gatgatgattttgagccatacttaagtagccagacaaatcagattgaagaatggcggtcacgagcagccaagtttgaagagatgtgtggactagtgatggg

SEQ ID NO: 505093 - DNA, 99 bp, Homo sapiens
agatttccacagaaggactgggatgatacaccttttccacagggaattgagttggctcatccaaaatacttgagttgtattgcaatcagctgttttttc

SEQ ID NO: 505094 - DNA, 100 bp, Homo sapiens
taaaaaggatgaaagaaagtcgcctcgaagatacacaaaagcacagagttgatgagacgcgtccgtcgcttccagattgctcagtacaagtgcctggtga

SEQ ID NO: 505095 - DNA, 90 bp, Homo sapiens
cgttctccaaccctttggcccccgatggccacgatgtggatgatcctcactccttccaccagtgacaatctccaatagacttgtgtcttc

SEQ ID NO: 505096 - DNA, 76 bp, Homo sapiens
ggatcggatcccgcagatcggagacggggcctggaggcgatgacccaggatgcagccaggggccacgacatgcacg

SEQ ID NO: 505097 - DNA, 90 bp, Homo sapiens
ctccgcggcgctccgggcccgggcggctggcctcaccgcccactggttgcctttccccatcttcctggttctgctccttcgtggcctagt

SEQ ID NO: 505098 - DNA, 83 bp, Homo sapiens
agtttcctgcgtcgggcacaacagattaaaaggagcccaagccccatctcatcctagcacaccctcctccactgtcctggcag

SEQ ID NO: 505099 - DNA, 100 bp, Homo sapiens
agtggtttgtctgtgatggctggaagttcctctgtaccaggtagccaaagatgtatctgtcagattgcaccacgaacttaagacggtggaggaaaagcgc

SEQ ID NO: 505100 - DNA, 97 bp, Homo sapiens
gggacctcctggaagccaaaaatgtgacctagagtcccgcagggatgtgaagagagaagaaggagaggcctttgctagggagcatggacttatattc

SEQ ID NO: 505101 - DNA, 108 bp, Homo sapiens
gtggcggttgagacagcggcggtactgggaggcgtagctggagcaggctctgcggctggagcctggggagctggagacgcaggagcccagggggctggtacggcagag

SEQ ID NO: 505102 - DNA, 117 bp, Homo sapiens
ctccgcgcctcgcggcatggcgtcggaggggccgcgggagcccgaaagcgagataaggagtcaggccagggcgggatgacactcattgattctaaagcatctttaatctgccaggcg

SEQ ID NO: 505103 - DNA, 93 bp, Homo sapiens
gcgcgtgtggtccttgcgccgctgacttctccactggttcctgggcaccgaaagtggatgattcaacagccacacaaagcagcaacatttttt

SEQ ID NO: 505104 - DNA, 83 bp, Homo sapiens
ggagcgcctcgtcgacatgagtgatgtggaggaaaacaacttcgagggcagaatgatcaagttccagatgatcctcagtgagg

SEQ ID NO: 505105 - DNA, 99 bp, Homo sapiens
ctgcaggtggtcagacatgtcatcaactcagctggtatggacctgtctgccaatcaggacgaggagaccgaccaggagaccttccagctggagatcgac

SEQ ID NO: 505106 - DNA, 114 bp, Homo sapiens
ttgtagttaaagaagagatggatgcctccattaagaaaatgaaacaagcctttgctgaattggagagctggctcccagccaacctctgataaaccctcccagcggccatcagag

SEQ ID NO: 505107 - DNA, 96 bp, Homo sapiens
ccgggcccggccacagcctgcagcggagcccacgagaggcagcgccatggcggagcagacctactcgtgatcatccagcccctcttagaacttgac

SEQ ID NO: 505108 - DNA, 75 bp, Homo sapiens
ttacggtctctataagaagatgatcgtgcttacatgttgcagaagctaattgaagagacagataggtttgtagtg

SEQ ID NO: 505109 - DNA, 82 bp, Homo sapiens
tcaccatggaaaaagtgacttgagcaggttaatgttcgtgaagaaattgaagagttttttccaagaatgtggaagataaatc

SEQ ID NO: 505110 - DNA, 83 bp, Homo sapiens
caagaagcagcccaaagtcgaatgattcagacttgcaaggagcttgaagaaatccgcaaatgtgggatgaaaaacttccgtaa

SEQ ID NO: 505111 - DNA, 80 bp, Homo sapiens
cggggttcagcgctcgggtgaggagctggtggcgtcggcaggttcgaggcgattcgagatcttcttcagcagtatcgttc

SEQ ID NO: 505112 - DNA, 75 bp, Homo sapiens
gcagaaaggtggaggccgggaggacgaagagagcagagccactgccagaaggaaggggacaagacccagcaggac

SEQ ID NO: 505113 - DNA, 100 bp, Homo sapiens
ccctgtatgtgatgatgaccgtcaccaactggttcaaacttgccttcaaggtgtgcaagtaaggacttatctccagaaaagaacacttatgaaacagaat

SEQ ID NO: 505114 - DNA, 101 bp, Homo sapiens
gatagaactctataatgcacccgaggggcgatacaagcaggatgtgtacttgcttcctaagaaaatgggagacgaaaccagacagagggtcaagtttacag

SEQ ID NO: 505115 - DNA, 100 bp, Homo sapiens
gggcggtcggctgcggtggcggcgtttggatgattgtctctcggcggcggagtcggttcatcatgcctagtggcgtataagaagaccccgccaccggtcc

SEQ ID NO: 505116 - DNA, 109 bp, Homo sapiens
gtgctcgcgctactctctctttctggcctggaggctatccagcgctggaatgagctgctcatcgcctccttctcccaccgctccatcgccgtgaaggacgggatcctcc

SEQ ID NO: 505117 - DNA, 75 bp, Homo sapiens
cctactagagcagggtttggagactcagcccgaccctgcccgccctggactggcagctgccgtcccactcaggcc

SEQ ID NO: 505118 - DNA, 100 bp, Homo sapiens
gtaaagtgcaagagtaatatgctatgactgaggtctctgaaagaagatgaatttggctgagatttgtgataatgcaaagaaaggaagagaatatgccctt

SEQ ID NO: 505119 - DNA, 96 bp, Homo sapiens
aagcagtgtttcatttacagcagcttttagaacgtaagccagccttggtcatctataatttcctgagcctgtgctatgagtacctaggaggagaaa

SEQ ID NO: 505120 - DNA, 50 bp, Homo sapiens
agatggcggacagtgcggaactaaaggtccttggatgtggctgtgttgcc

SEQ ID NO: 505121 - DNA, 82 bp, Homo sapiens
ctagaactgaacttgaaacacttcaaaggaccagttactctccacaagaaaattcacacaaccacagtgctcttcatagttc

SEQ ID NO: 505122 - DNA, 75 bp, Homo sapiens
aaagagaaaaggcaacatcctgtcacaggccatgctctggcaaaaacacctaccgggacctgaaggatcgtcaac

SEQ ID NO: 505123 - DNA, 80 bp, Homo sapiens
gctggaaccctggggactacgacgtccctcaaaccttgcttctaggagataaaaagtgcctccggagccagcgtggtggc

SEQ ID NO: 505124 - DNA, 75 bp, Homo sapiens
tcgaggcatgggggtccacactgcaatgtttttgtggaacatgagtgttgcggagataggaacatgggagagaaa

SEQ ID NO: 505125 - DNA, 100 bp, Homo sapiens
agaaccattgaagcttgagagaaaagcccccaaaagcagctattcagtaaataacagatgcgggtgaaagatccaactaaagctttacctgagaaagcca

SEQ ID NO: 505126 - DNA, 100 bp, Homo sapiens
ctttctggacacagaagtatttgtgacagacagcaaatcaaaaggcctccagtggataatagatacaacgatagcttatcccaaagctgaacctatagat

SEQ ID NO: 505127 - DNA, 75 bp, Homo sapiens
atgagacttcggagatcctttctattcaggataacacaagtcccttgccgccaaatgctcctatctggctcatac

SEQ ID NO: 505128 - DNA, 82 bp, Homo sapiens
gcagacttcaggtcgtggcagagaaaaccagctgagacagggcgccacttactagccctgggcgctgcctatggcacagcca

SEQ ID NO: 505129 - DNA, 100 bp, Homo sapiens
agcacttctggaagatcattaatgccttccgctactacggcctggacagtttttgacggtgcagtcttgctatatggtgtgagaaatggctgtaggaaac

SEQ ID NO: 505130 - DNA, 100 bp, Homo sapiens
tgtccacccaagatggagttcctcctggggaacccgttcagcacaccagtggggcagtgcctcggccgagtgtactacttcaaccacatcactaacgcca

SEQ ID NO: 505131 - DNA, 87 bp, Homo sapiens
agtctcatcctgaaagcatctgagcagggcgacagcatgttgggggaggctgagagagaagaggttcgagactgggtgcttacagtc

SEQ ID NO: 505132 - DNA, 80 bp, Homo sapiens
gtatcattggcaacatgatttcgatactgaaacaagaatggcccaaacattggccaacttttatcagtgatattgttgga

SEQ ID NO: 505133 - DNA, 82 bp, Homo sapiens
cgcaggtgctagcggccccttcgccctgcagggggatatgagactttctactcggaatatcctgagtgttgcgtggatgtaa

SEQ ID NO: 505134 - DNA, 88 bp, Homo sapiens
tgggagaagagctccagagagcggaagcccggctcgctgcaaaacgggcggcccgcgcggaggctcgcgagatccgcatgaaggagct

SEQ ID NO: 505135 - DNA, 80 bp, Homo sapiens
tatagttggcaacctcactgagttagaatcagaggagaccccaggaactgaagtggcaagggtgaatcctgtgagacgat

SEQ ID NO: 505136 - DNA, 90 bp, Homo sapiens
cggcttcctagtgagtcggcggctgatttagaaggaggttcaggctacggatgccacagctgagcctgtcctcgctgggcctttggccaa

SEQ ID NO: 505137 - DNA, 100 bp, Homo sapiens
gcgcagtacagcaacagtggatgttcaagattaagattagagtcaagttgtgtgattaagacaggtgattcatggcaggggacgtggaaggattctgttc

SEQ ID NO: 505138 - DNA, 95 bp, Homo sapiens
atggctgccgcgccgccgctacgggaccgcctgagctttctacaccgggaggccacagggcctgggggctcccaggccatcaacaaccttagaag

SEQ ID NO: 505139 - DNA, 100 bp, Homo sapiens
agcgggccctgcgcgcctgatgggtcgaggcggacgcgcggctgcgtcaggatgctgaaaacgccattcaacagatgggtggccagtggcttggtggaag

SEQ ID NO: 505140 - DNA, 49 bp, Homo sapiens
ctatacaaaacatccttctaaaccagtattcaagtcaaacaacgttgaa

SEQ ID NO: 505141 - DNA, 83 bp, Homo sapiens
cgtgacatccgaggtgcctttctccaaaaggtgatgctgtgtaaccccatctgcggcgtcagctatgccctgacagtgtggcg

SEQ ID NO: 505142 - DNA, 74 bp, Homo sapiens
tgaaaaataccacgacaaaaccaccctaatgaagatctccttcaacgacaaaagcctgcagaccacatttgagt

SEQ ID NO: 505143 - DNA, 82 bp, Homo sapiens
cattcgttcattgtatcgtacccatgttatccggcgtttctggaacacgctgcagagcaggggaaggctagcctaatcaggg

SEQ ID NO: 505144 - DNA, 50 bp, Homo sapiens
gtgcgagagcctcctcacttgggctttcaacagacctcacatctttcttc

SEQ ID NO: 505145 - DNA, 124 bp, Homo sapiens
cctgcgtcctttttcgtttttcggatgatgccttcaatactacctttatttccaccatagaacattgacatcaccaatttcagcagcagctggagcgatggcctggccttctgtgctctgctcc

SEQ ID NO: 505146 - DNA, 74 bp, Homo sapiens
caaagcctttgctatgatcattgacaaactggaagagcttttatcaaaatacaactcaaacctagctactccaa

SEQ ID NO: 505147 - DNA, 100 bp, Homo sapiens
ctcaagcagtcctaccatgtcagccttcccagtagctgggaccacaggtcaagagcaatctgaatccaaatgcaaaggagtttgttcctggggtgaagta

SEQ ID NO: 505148 - DNA, 76 bp, Homo sapiens
tccaggcatcccagctacgaaggatggaatcttcaatcaatcatatttcacaatactaaggctcgtacgtctgcat

SEQ ID NO: 505149 - DNA, 141 bp, Homo sapiens
gcctgggaggccggccggtgccagcacctttcggcttctgagacggcggcagcagcggcattcaggcaacagctgaacagatgcgtctcgctcaagtgatctttgataagaatgattcagattttgaagctaaagttaagc

SEQ ID NO: 505150 - DNA, 98 bp, Homo sapiens
ggggattttgtcagcttgtcgtcaagttaaacacagtgggaatatcacttttgatgagattgtcaacattgctcgacagatgcggcaccgatccttag

SEQ ID NO: 505151 - DNA, 100 bp, Homo sapiens
ccagccccctgagctctccggcttatactcccagcggggaggcgggcagctctgcccggcagaaacctgtcttagcctgtggggcccggatagtcagccg

SEQ ID NO: 505152 - DNA, 98 bp, Homo sapiens
ccccaccggcaatggagcggttgacgttgcctctcggcggcgcggcggcggtggacgagtacctggagtaccggaggaagaaccgaggttgggatcga

SEQ ID NO: 505153 - DNA, 122 bp, Homo sapiens
tctatggcctctactatggagttctggaacgggactttgcagaaatgtgtgcagactacatggcatctaccatagggaaaaagcttgtggtgaaggggggcaaaaaaaagaagcaagttctg

SEQ ID NO: 505154 - DNA, 74 bp, Homo sapiens
gacaagcaggagctgggagccccagacccaagcaccagccgccgcttcacacctccctccccggccttcccctg

SEQ ID NO: 505155 - DNA, 50 bp, Homo sapiens
tacagcaagaaagaccatcaagtttaccaccagaagtcattggatctgtg

SEQ ID NO: 505156 - DNA, 99 bp, Homo sapiens
cgggaggaaggaacgaggcaaggagctaaagcagcgtgcgttcagccctgggaaacgcttcgttaagggactcaggcagtacgggaagaacttcttcag

SEQ ID NO: 505157 - DNA, 83 bp, Homo sapiens
ggccgccccgccgcccccgcggccccggccggaggagacagatctgactgcagccatgagcagcaatgagtgcttcaagtgtg

SEQ ID NO: 505158 - DNA, 123 bp, Homo sapiens
gcagggccttggaccccgcggcgcccctcggcctcggagcaacgagcgcagcgccgcatcaagatggtgctcatgtggaccagtggtgacgccttcaagacggcctacttcctgctgaagggt

SEQ ID NO: 505159 - DNA, 100 bp, Homo sapiens
cgatgagaactggttctacacgcgagctggtgtggtggctggaggtggccgaattgacaaacccatcttgaaggctggccgggcgtaccacaaatataag

SEQ ID NO: 505160 - DNA, 50 bp, Homo sapiens
cctcccggcgtggcagatgctccaggttgtacatcctggagacctgaaga

SEQ ID NO: 505161 - DNA, 97 bp, Homo sapiens
catcaccattggcaatgagcggttccggtgtccggaggcgctgttccagccttccttcctgggtattgatgaagatgaccctactgctgatgatacc

SEQ ID NO: 505162 - DNA, 98 bp, Homo sapiens
ctggacaagaagattatgacagattacgccccctatcctatccgcaaacagtaatttcatctgtgccaaagcctccagaggacaagccagaagatgta

SEQ ID NO: 505163 - DNA, 50 bp, Homo sapiens
cggcgcggcgctcgctcctacggtggaaaggagactatggaaccaggatc

SEQ ID NO: 505164 - DNA, 75 bp, Homo sapiens
agaagaattttccaaatgaatttgcaaaacttactgtagtcttctcattcacaggttaaggctacctttccagat

SEQ ID NO: 505165 - DNA, 142 bp, Homo sapiens
cccgtcctaggcagtggggacaaggaggctacagggtacaaataaatgagtgaacgatgttgctctagatacaggtcagactactccctgtgccatgaacggagatgacacctttgcaaggagacccacggttggtgctcaa

SEQ ID NO: 505166 - DNA, 88 bp, Homo sapiens
gacgctggagtggggagaagcatcatggttcaacgtacggggctgatgttgacgtcaaccaccacctgactcctgatgtccagcctcg

SEQ ID NO: 505167 - DNA, 82 bp, Homo sapiens
agtacctgcagaaggtctctggagacatcttcagcaggtttggaagaggacagttgccctttattctggcggcagatagcag

SEQ ID NO: 505168 - DNA, 100 bp, Homo sapiens
ggagtatcgttctatttctctagctattgccttattttttctcatggatgttcttcttcgagtatttgtagaagggtgtcatggagaaactccagctggg

SEQ ID NO: 505169 - DNA, 98 bp, Homo sapiens
gttccctccctcggcaagatgccggagtgctgggatggggtcatcatcctgaaccacccggggcagattagcgccggctactccccggtcatcgactg

SEQ ID NO: 505170 - DNA, 100 bp, Homo sapiens
tcccagcctcaggcgtgcgcggacggtgtgcgggttttgctgttactgctcagtgtagtcacaccttgaataagaaatggaaaaccttgggatgttgata

SEQ ID NO: 505171 - DNA, 88 bp, Homo sapiens
cagtggcatagtgtcattccaatgtgactgtccactacatttcactggccgcttctgtgaaaaagaagtaaccaagatccttctgttt

SEQ ID NO: 505172 - DNA, 100 bp, Homo sapiens
ctgagggcacgtgtttgcggttcagccctttgatgaccgcagcaggtatcgaaggatgatcgcagtgatgtggagagcagctcagaggaagaagatgtga

SEQ ID NO: 505173 - DNA, 75 bp, Homo sapiens
gcctcccaggctcaagtgatctgctcagcttcccgagtaactggggctacaggtacagtagcagagggagctccc

SEQ ID NO: 505174 - DNA, 90 bp, Homo sapiens
ggcaggtgcacgcttatctttatctgtggcatgcaactggagtacgagacccaatctagtgcagaagccaaatttgtgaagcagctagac

SEQ ID NO: 505175 - DNA, 80 bp, Homo sapiens
gatgcctctcagctgccacctgcctttgacctttttgaagcctttgcaaaagctggagcattggatttgctaaaggagct

SEQ ID NO: 505176 - DNA, 75 bp, Homo sapiens
aaaagagtagcctgggctgtctggaaatctgagttggttgaatctggcgatgtggaacccatggatatggagggc

SEQ ID NO: 505177 - DNA, 75 bp, Homo sapiens
cagatgtggacttgaaagaagctgcagcggaggaaggcgagattcaagatggaaaaggtgatgtaaccattacaa

SEQ ID NO: 505178 - DNA, 101 bp, Homo sapiens
ctgcgtgtgggacgggtttagcggcagcctcttcgcttgtacctccttttaaacctcaagtaacatctgagacagatactagatattttgatgaagaattt

SEQ ID NO: 505179 - DNA, 101 bp, Homo sapiens
gccggctgcgggagtggcctcaagatggatgaagacggcggcggcgagggtggtggcgtttccctgaaacctgggctcttgaagacgcatcactggagcag

SEQ ID NO: 505180 - DNA, 80 bp, Homo sapiens
acgcaaaacagactttttcattggaggagaagaagggatggcagagaaggaacgtcaaggtcgtgggaaataaaaggcag

SEQ ID NO: 505181 - DNA, 75 bp, Homo sapiens
cactcgcgggtaacaaggcagacctggccagcaagagagccgtggaattccagggacatctacgagagggcaagt

SEQ ID NO: 505182 - DNA, 90 bp, Homo sapiens
tgagcctagtcctgctgttcctgatccgcactgccctttttgcaccccagggagctgctgctggcctttgaactggccacaggtgactat

SEQ ID NO: 505183 - DNA, 82 bp, Homo sapiens
gcatgatcggcatgtccaccaagatctgaattccagagaacaggagacctgccagcctgtgcacgtggtcaatgtggacatc

SEQ ID NO: 505184 - DNA, 82 bp, Homo sapiens
gagggccagctgacggagatggtgcagaagatggaggaggagcgtgaggatcatccccggagaggacgggaggatcggcagc

SEQ ID NO: 505185 - DNA, 90 bp, Homo sapiens
ctgtgggaactctttccagcttgtgtctgaccagcatctcagacatgtcgaaaaagatgttttgatccctaaaataatgagagaaaaggc

SEQ ID NO: 505186 - DNA, 83 bp, Homo sapiens
ccacttttggaccaaaggcctgtgtgctgcagaacccccagaccatcatgtccctgtgcgttttattgcgacctgccggtggg

SEQ ID NO: 505187 - DNA, 98 bp, Homo sapiens
cagatcatgtcagagagagagcttggttaacttgggagaaagtttcatctgtggatggagtattggaacttgtaatagctggcatcgttgagaatgaa

SEQ ID NO: 505188 - DNA, 50 bp, Homo sapiens
gaagaggatgatgtttttggtgaagaatgttgctgcgggatgtaaaagct

SEQ ID NO: 505189 - DNA, 82 bp, Homo sapiens
ggcggatggccccaggtgtaagcgcagaaagcaggcgaacccgcggcgcaataacgaattcaattcgtcataatctgtccct

SEQ ID NO: 505190 - DNA, 75 bp, Homo sapiens
cggcgagcagaactacggcgagcggaagcatcagatggtgaaggagaaggagacacagaagtgatgcagcaggag

SEQ ID NO: 505191 - DNA, 100 bp, Homo sapiens
ggccgccatctggacacccttcgcgttgttgctcaggagagacgagttgtactgctgtcacaggaaatggacgctggattacaagcatggcagctcaggc

SEQ ID NO: 505192 - DNA, 100 bp, Homo sapiens
gaccccgcgcagtgctgccaacgccccggtggagaagctgagaacctactgggttggtgacatttacaagacagagtcttgaagattttccagaatggga

SEQ ID NO: 505193 - DNA, 75 bp, Homo sapiens
ccggaatcccgctcggagccagccagccgtcccgagctaccagcagataagaccatcatcatgtggaaactgacc

SEQ ID NO: 505194 - DNA, 83 bp, Homo sapiens
ctcattgctactgccctctgcgctcctgcatctgcctccccatttgctgctgacacgccgaccgcctgctgcttcagctacac

SEQ ID NO: 505195 - DNA, 83 bp, Homo sapiens
cccgggaggaaggaacgaggcaaggagctaaagcagcgtgcgttcagccctggggctgatcagctgaccgaagaacagattgc

SEQ ID NO: 505196 - DNA, 100 bp, Homo sapiens
agattacaataaagagattcataagccaggctacctggctaatgatagactcctaccccagcgctctttgccgagggcgtgtggtgagagtccccacagc

SEQ ID NO: 505197 - DNA, 83 bp, Homo sapiens
cttgaaaagactgggcttgtccttgctggtgcatgcgtcgtcggcctctgggcagcaggttcatcatgcctagtggcgtataa

SEQ ID NO: 505198 - DNA, 95 bp, Homo sapiens
agaagccttttccgttgccggtgccggcctagcgtcctggaattacttcaatcaaagggagacgatggactgagctgatccgcaccatggagtct

SEQ ID NO: 505199 - DNA, 100 bp, Homo sapiens
attaacaatcgcaaagggaaacttatcttcttttatgaatggagcgtcaaactaaactggacagatcaatgtaaccactgtgcgggaatatctgccagaa

SEQ ID NO: 505200 - DNA, 100 bp, Homo sapiens
cctgccttgtgctcacagcttttgtcagaagtgtattgataaatggagagcttgtttcatatccatatcccactgtattcctgctaatctgctaatgcag

SEQ ID NO: 505201 - DNA, 73 bp, Homo sapiens
ctaaagccacagtcttcaagagcccacggacaccacctcaacggcgacagaaggctagagagaggcagcagaa

SEQ ID NO: 505202 - DNA, 82 bp, Homo sapiens
cccagtgagggtgtacaaatacccctttgaattaattatggctataaaagccatcatggctttggttgctgctatccttttg

SEQ ID NO: 505203 - DNA, 51 bp, Homo sapiens
tgttctgctgctttcagacccccgaagaagctgtttgttttgattctgagc

SEQ ID NO: 505204 - DNA, 75 bp, Homo sapiens
ccatgataggctttgcccatggacagattaatgcgctcacagggactctttttacttctaaagtcctagaagaaa

SEQ ID NO: 505205 - DNA, 50 bp, Homo sapiens
ttcacagatgctgagagtgaagggggtagagacggggtttcaccgtgtta

SEQ ID NO: 505206 - DNA, 100 bp, Homo sapiens
gctggatattgagccggatagacctattggatatggagcctttggtgttgtctgattctggaaaccaaaatggaggaaatgatgataagactaagaatgc

SEQ ID NO: 505207 - DNA, 50 bp, Homo sapiens
cctgctgatgtcagtgggacccattcagtttggaaattttagcattcagg

SEQ ID NO: 505208 - DNA, 100 bp, Homo sapiens
ctgtcggatggacttggggctagctgcggcggggctgggctttccttaaagtttcccatgtctcaatggactcctgaatataacgagctctacaccttaa

SEQ ID NO: 505209 - DNA, 75 bp, Homo sapiens
agctcccgagcgctggccttctggacatatcaggtcttcaaagcttcacctttctccaaaggcagatgtgaagaa

SEQ ID NO: 505210 - DNA, 50 bp, Homo sapiens
ttgcttaactggagcaactgagggcatccgcttcgatcctgaaattccgc

SEQ ID NO: 505211 - DNA, 100 bp, Homo sapiens
atcccactgatgaggatcagcccatggtctgcaaagaaagcagagttggaagaaaatcagcggagctataaacagaaaaagaaaaggcgacgtattaagg

SEQ ID NO: 505212 - DNA, 90 bp, Homo sapiens
tcaagataacttgccaaaatatcttactgtgccgagatcgctcacaatgtttcctccaagaaccgcaaagccatcgtggaaagagctgcc

SEQ ID NO: 505213 - DNA, 99 bp, Homo sapiens
ctgcaatgacgagggcctggagtgtgtgcccactgaggagtccaacatcaccatgcagcatggagatatggaccaaaaggaacgagacgtgattatgag

SEQ ID NO: 505214 - DNA, 90 bp, Homo sapiens
agatgttcctccttcagctgtcacaagaccaatatttggtatactgggcacaatccatctggtggcagcttttgcctgcctcctcctttc

SEQ ID NO: 505215 - DNA, 96 bp, Homo sapiens
gatccgtcattggattggctgcggggcccacctctctaagcctatggaaaagcttctggttttagaaagagcgttttcgctacgtaaagcacattc

SEQ ID NO: 505216 - DNA, 100 bp, Homo sapiens
ttaacaagtggtggaataacctaagtgatggccagcggactgtgacaggagatgttacagcccagatagctcttcagcctgcactgaagttcaatggtgg

SEQ ID NO: 505217 - DNA, 84 bp, Homo sapiens
ctggctcttgccctcatcctggttctggaatcctcagttcaaggaaatctggcattttttaaagtttgcgccccacaaagagga

SEQ ID NO: 505218 - DNA, 98 bp, Homo sapiens
aaaggtgaatcttttggttggtgattttgatgatagccacaaagcaagcaggagaagagcaagttagtaccttgtaccaaaacatcaaccttgtggag

SEQ ID NO: 505219 - DNA, 75 bp, Homo sapiens
ggacctggaaggggagactctgctgacacccatcacccacatctcacaacacaggcagccatgccgcgcagccca

SEQ ID NO: 505220 - DNA, 82 bp, Homo sapiens
ggccgaggcctgggttacaagcagcaagtgcgcggttggggccactgcgaggccgttttagcccgaggagccttcaacacct

SEQ ID NO: 505221 - DNA, 90 bp, Homo sapiens
ggggtcattccctacgctggcctgagcttcttcacctatgagacgctcaagagcttgcacagagaaaaggactggacggaggaggaccgg

SEQ ID NO: 505222 - DNA, 100 bp, Homo sapiens
ccccgccgcagggatggaccgccgaggcggcggccggggcggcggaggcggaggcggccggcccggatcaggatcctcatgaccagccaaagagaagaag

SEQ ID NO: 505223 - DNA, 90 bp, Homo sapiens
ccatggctgactacctgctgtacaccctcaacaaacaccagcgctttggctgagcttcagtcattgtctattcctggaacttaccaagag

SEQ ID NO: 505224 - DNA, 99 bp, Homo sapiens
tatcgccaaacacccaaagaagactcccattcgacaacagggacagctgcatgtagagcgcatgaagtacaggacaataaagcttcctacacatatcac

SEQ ID NO: 505225 - DNA, 97 bp, Homo sapiens
ttgggttgagcgggctttttggaagtttgtggcggagttaaacacagtgggaatatcacttttgatgagattgtcaacattgctcgacagatgcggc

SEQ ID NO: 505226 - DNA, 50 bp, Homo sapiens
tgcctttgagcgggtctacactgccaaggaagaaggccgtgctgggttcc

SEQ ID NO: 505227 - DNA, 99 bp, Homo sapiens
ccaagctcttcctgaacgaagtggccaagaaggagaagcagctgcggaaaatgctagaaggaacctgacagaacttcacaggagaactctcctgccctt

SEQ ID NO: 505228 - DNA, 75 bp, Homo sapiens
gggagggggcgttagccccgcgcagccgccggcgtcgccgccatggacctagggaggtggggaagacagggctcc

SEQ ID NO: 505229 - DNA, 51 bp, Homo sapiens
tgggaagagcacacagattcctcaggcgtgtgctcgcccactgatatcggt

SEQ ID NO: 505230 - DNA, 100 bp, Homo sapiens
acaaccttcccagaaagtccaagctcgtgaatctccctggggtgccctccccaggcagcaatgccaggatgcctgtgtccacctccctccaccaggatgg

SEQ ID NO: 505231 - DNA, 83 bp, Homo sapiens
cgcgaagaggctggactcggattcgttgcctgagcggggatctgatgagcttctttcttctggcatcattaacggacctttta

SEQ ID NO: 505232 - DNA, 90 bp, Homo sapiens
atcaccctgaaattggtgaaggaaaacccacacctgcactttcaggcttcaacggaccacaccaaaatgccatctcaaatggaacacgcc

SEQ ID NO: 505233 - DNA, 50 bp, Homo sapiens
agatcctgtgctttactctgaagactcgagccaagttacaccctgtttaa

SEQ ID NO: 505234 - DNA, 102 bp, Homo sapiens
catctgatgtggtgcttttgaaccactggaaagtgaggaattttgaagtacaccgtggtgacattgtatcattggttttcagacccaaagtttacgcctatc

SEQ ID NO: 505235 - DNA, 76 bp, Homo sapiens
atcatgcagccgccgccgaggaaggctgtctgcggacctggtttcagcgctggtgggactgcagccggaggtcagc

SEQ ID NO: 505236 - DNA, 100 bp, Homo sapiens
aaagagtgctgcaagttcatgtgtctggacccagacctcctgccccccgaggtctgcagtctcctgaacccagcagccatctacgccaacaacgagatca

SEQ ID NO: 505237 - DNA, 83 bp, Homo sapiens
caccgaatcgctgtcacgccggcagatgagcagcaccagcagtaagagggctccgaccacggcaacccagaggctgaagcagg

SEQ ID NO: 505238 - DNA, 83 bp, Homo sapiens
cccaggagaaattcgccctcaaaatcctgataacttaagtgactctctcttttccggtgatgaagaaaatgctgggactgagg

SEQ ID NO: 505239 - DNA, 98 bp, Homo sapiens
agcgagcgcagcaaagcgcccagcctgccgcctcgctgtccctgcggcttctggggttttgtcagcctggcgggtggcagctgtccagagagaggaag

SEQ ID NO: 505240 - DNA, 90 bp, Homo sapiens
cagtgactgaagcgcccgtccattccaaggtaaagaagcttcttaataaagtagtgctccgtgaatcttgcttttaccggaaattaacag

SEQ ID NO: 505241 - DNA, 100 bp, Homo sapiens
cctgctgatgtcagtgttatatcctccaggaatactggccaggattcgctaaatattgtaatggatcaaggagatacacctacactagaggaagatttga

SEQ ID NO: 505242 - DNA, 100 bp, Homo sapiens
cggatggcccccggtgcaagaggcgcaaacaagccaatcccaggaggaaaaacgctatccagtcagttcgctgctattcccatgggtcacaggagacaga

SEQ ID NO: 505243 - DNA, 75 bp, Homo sapiens
tgtattccctggggatggcgcatcacacaccaaagcccatgaaacccctgaaggccaccgccaccacctcccagc

SEQ ID NO: 505244 - DNA, 90 bp, Homo sapiens
aatcaacatgagaatgaagcaaagtcattctttgagaaccaggcccagacatgtccgtccttgtaagttaaaagcttccatgggagcctt

SEQ ID NO: 505245 - DNA, 82 bp, Homo sapiens
ctgcagccgcgagctcctggaggcggcgggatggaggcggcggccgctgtgagaaacgaccgaaacaagaagaagaaggagg

SEQ ID NO: 505246 - DNA, 99 bp, Homo sapiens
ccacgcgggcgagcggctgtgtggatgtcggcgaagccgcgggcgaggcgaggccttcttgggcagctttgtggccagcgggatggggccctcggcctc

SEQ ID NO: 505247 - DNA, 80 bp, Homo sapiens
caagactcaatatgatttcccatcttgcagatgtgtaggttgaagcactggacaatgccacatactttgtggatggtgtg

SEQ ID NO: 505248 - DNA, 75 bp, Homo sapiens
ggagagacacgctgggccgaccccagagcggcgctggacaggacgtggcccagtggaacatcgggagcctccgga

SEQ ID NO: 505249 - DNA, 82 bp, Homo sapiens
cagaccttgccagagacctggcaaatgacatcatgacactggccgactgcagctcccgcccactccttctggccggctatga

SEQ ID NO: 505250 - DNA, 76 bp, Homo sapiens
ttaaggtccaaaaaaactccagctgtgaaagcaacataaatgttccaggagtagattttagcataactcaattcgt

SEQ ID NO: 505251 - DNA, 82 bp, Homo sapiens
tcagcctcccgagtggctgggactacagagctccagcattgactttctagcaagccagggatttgattttaataaagttttt

SEQ ID NO: 505252 - DNA, 100 bp, Homo sapiens
gaatgatattcagtggtgtttttctcaggtgaaaggagcagtagatgatgatgtagcagaaggttggtgacagcgtcccaagctggtgacagacccactc

SEQ ID NO: 505253 - DNA, 87 bp, Homo sapiens
agaaagtctaccttgtacttcaacacccaggagaagagcgccaggcgccgcggggaaataatagtgtaatccttgctgatgaaatgg

SEQ ID NO: 505254 - DNA, 101 bp, Homo sapiens
aatggagcaagtcacagtcgtcgatgccagcttcttcttgaaatgttaatgaactttctgaggaagaagaggaagatgaaaagctggaacatattgaagaa

SEQ ID NO: 505255 - DNA, 81 bp, Homo sapiens
gacgacagaccgtttgtgtgcaatgccccgggctgtggacagctctcctgccacagctcctcaccccctgaaaatgttcgc

SEQ ID NO: 505256 - DNA, 110 bp, Homo sapiens
ggcgacccggtgtgtggcgcgcccagagccccgcgtttcagccctagggaaggtgagaagccctaccactgcaactgggacggctgcggctggaagtttgcgcgctcaga

SEQ ID NO: 505257 - DNA, 90 bp, Homo sapiens
cacctgcctgctccagatgaaggatttgagcaacttctatgcacagtacaaatccattgagccttatttgaagaagaaggatgaatctca

SEQ ID NO: 505258 - DNA, 75 bp, Homo sapiens
agcagacccccaccatccctaaccggctggctgcagacccgataagaccatcatcatgtggaaactgaccaggga

SEQ ID NO: 505259 - DNA, 100 bp, Homo sapiens
aaaaagatggccaagaactaagtaacgatctggatgcccaggcaccatcatgggagcagcattgctggaggactggtgaagggggctttgtctgttgctg

SEQ ID NO: 505260 - DNA, 90 bp, Homo sapiens
gaaagtcgggggctttcgcccgggtcctcctagaaattccccccgaagaagactcccccacatctggccactgaggcggctcccagctgc

SEQ ID NO: 505261 - DNA, 99 bp, Homo sapiens
aatctgtatgtctttgctctgatgttcttgtatgcaccatcccataaaaactatggagaagaccagtccaatggacatggatttgattgacatactttg

SEQ ID NO: 505262 - DNA, 90 bp, Homo sapiens
gggatccatgaagaacaagaccaagagccacaggatctctttgcagtggccagtttgccatcgtgaagaagtgccgggagaagagcacgg

SEQ ID NO: 505263 - DNA, 74 bp, Homo sapiens
tgactggcacagtggagaaaccgcctcgaaaacggagaagcagcatttggccatccagtgtcattggtctcaga

SEQ ID NO: 505264 - DNA, 82 bp, Homo sapiens
caggacctgacccaaccactgtctacgtggacatgagagccctgagacacgacagacctgcctagagctggaacgttacctc

SEQ ID NO: 505265 - DNA, 99 bp, Homo sapiens
cgcagaggaaaattcaggcaacgcctcgcgttgctggacgcacagaacagtctctccgtgggaggagacattatggggcgtccaccaccacccctccct

SEQ ID NO: 505266 - DNA, 115 bp, Homo sapiens
tcaacgagctgctggaggacgagggccagctgacggagatggtgcagaagatggaggaggtcaaaatgcagatcttcgtgaaaacccttaccggcaagaccatcacccttgaggt

SEQ ID NO: 505267 - DNA, 88 bp, Homo sapiens
tggttgtgagcagggtctgcacgaaataaagctcctgggcaaggggacgtctgcagctgaggtcagtatagaccttctgatttgctgt

SEQ ID NO: 505268 - DNA, 98 bp, Homo sapiens
atacagctacatccaggagagaatgctgacagtcctgcaggtgatgatgaacagtctacacagatggctgcaagttgggaagatgataaagttacaga

SEQ ID NO: 505269 - DNA, 74 bp, Homo sapiens
taccactgcatctgtgtcagcaacagcagctccaaggatgtttggatctggccgagaacataactttacacgac

SEQ ID NO: 505270 - DNA, 90 bp, Homo sapiens
ccctgtgatccctgtcctgccagtccctgctgagaatactgtcatcctacccaccataccacaggtgatgctgtggagtcttcaaaaagc

SEQ ID NO: 505271 - DNA, 83 bp, Homo sapiens
agaagattaacctggagttaaggaacagatccccggaggagaaaattgtacaagctggagataaggaccttgatgggcagcta

SEQ ID NO: 505272 - DNA, 100 bp, Homo sapiens
tccctgaggcggagccccggagtcccgctgggcgtgagatgcagagagcggccgcagggtgtccgcaatgttgccagtgtctgtctgcagattggctacc

SEQ ID NO: 505273 - DNA, 83 bp, Homo sapiens
gtgaccgagaccgcggccgggaccgagggccagctgcgggccgtccagcggctgtgccacttctacagcgccgtcatgcccag

SEQ ID NO: 505274 - DNA, 82 bp, Homo sapiens
tacagaccaagtatgtggaagccaaggactgtctgaacgtgctgaacaagagcaacgagggaactgtggctgcaccatctgt

SEQ ID NO: 505275 - DNA, 75 bp, Homo sapiens
gtggagaaagtcgtcttccacttgcacgaaagctttcctaggccaaaaagagtattgactcggagacaaaaagag

SEQ ID NO: 505276 - DNA, 75 bp, Homo sapiens
ctttgagaagagcaatgacattgggggcctgtggaaattttcagaaacaaaccatcaggcctcccagaaagtatc

SEQ ID NO: 505277 - DNA, 80 bp, Homo sapiens
tatgagacacacaaatctaaaaggcgcgagagaatggatgatagtagtcctagagcctgaagcatcaagtcaaataccag

SEQ ID NO: 505278 - DNA, 111 bp, Homo sapiens
aaagactgggcttgtccttgctggtgcatgcgtcgtcggcctctgggcagcagaaagcacacctgagctgctcttaatatcatctcttgaagatacaaatgaaacacgaaa

SEQ ID NO: 505279 - DNA, 100 bp, Homo sapiens
agctgctgcagagtgaacttttccaaaattctggaaatggcaagtgtccagagaatggctgggatgaaagtacacttgaactctttttacatgaacttgc

SEQ ID NO: 505280 - DNA, 98 bp, Homo sapiens
tcccagggcatataccttctactgtccaagcacagtctcagccccatggggtatatccaccctcaagtgtgaaagcataacccctactgtagaactaa

SEQ ID NO: 505281 - DNA, 100 bp, Homo sapiens
gcccccacgcccagccaggagcaccgccgaggactccagcacaccgaggagcttggggcttccttggtcgcacccaccacctgcctgcccactggtcagc

SEQ ID NO: 505282 - DNA, 75 bp, Homo sapiens
ggggtctccagactgtttttgcatgattccacctttccactgatagactcaagttcccagaaccagattagaaaa

SEQ ID NO: 505283 - DNA, 110 bp, Homo sapiens
gccggcagggttgtggcgcagcagtctccttcctgcgcgcgcgcctgaagtcggcgtgggcgtttgaggaagctggccatctcaatcagtgaccacactgcccttgctca

SEQ ID NO: 505284 - DNA, 97 bp, Homo sapiens
gctccactcgaggcatctcacagatctccagatcacactaagtttgtgggaagcttcaaaaccaaacaagacttcatagatttgattgaagtaatct

SEQ ID NO: 505285 - DNA, 102 bp, Homo sapiens
tttgacagtgtactgccccgttacttatttttacaactctaagcgaaagacatgaggcctcagcctgaaatgaggttgttttgaggtcatctgatttctgac

SEQ ID NO: 505286 - DNA, 75 bp, Homo sapiens
ggatatacagaccttactatcccggatggaggaatttgctgacacaatatcttccgcctggtgctgggcatatcc

SEQ ID NO: 505287 - DNA, 75 bp, Homo sapiens
ggctcccgcaccatggaggaggacgacagctacggaagctctatgcagaactgtgccaaggcatcgtggacatag

SEQ ID NO: 505288 - DNA, 82 bp, Homo sapiens
tttgtaacaaatatttgcggtttcagcctcaacccagaggaatcgttactctttcaggcctggaatcctgctgctgaagatc

SEQ ID NO: 505289 - DNA, 75 bp, Homo sapiens
cactagaagatatttgctgcagcctttaggacagtcattttgtttactcattcagccctgttgcaggtcccaata

SEQ ID NO: 505290 - DNA, 90 bp, Homo sapiens
cggaggcttcgagtgacccgggtgccgaggagcgggaagagttgctgggaggctgaggggatctggcggtggagcgctaggatcagacgc

SEQ ID NO: 505291 - DNA, 75 bp, Homo sapiens
ccgaggaggcagccaagctcgtagcctgccactccgtgcgcgaggaggatggccgagaccagtccaggttggaga

SEQ ID NO: 505292 - DNA, 97 bp, Homo sapiens
aatccgttctcctcaaaattcacattcacattccactccttcctcatcttgactcgatggaaacagaagaaaagacaagcagtgcatttgtaggaaa

SEQ ID NO: 505293 - DNA, 90 bp, Homo sapiens
gaagaacagaaggcgatcaaggccaagtatccgccagtcaataggaagtacgagtgtgatacctccctgcacttggctattcaaaacggg

SEQ ID NO: 505294 - DNA, 100 bp, Homo sapiens
acacttgatagaaaagtacatgttactccctaatcaagtgtgggatagtataatccagcaggcaaccaaagcctttccacagaagaaaacctgtctgcct

SEQ ID NO: 505295 - DNA, 75 bp, Homo sapiens
cctcaagtcctggctggccaagttactggagccgatatattgaagcacagattcgagaaattcaaggcaagaagg

SEQ ID NO: 505296 - DNA, 106 bp, Homo sapiens
accctctctgaagcacaaaaagttaatcactttcccaggcaaaccacagggaagctggaaaagaagcggccctggcagaagtggctgacgagaagatgcttagcgg

SEQ ID NO: 505297 - DNA, 75 bp, Homo sapiens
ggactgcgaggacggcgatgggggagccaacccggaggacggcttctctcactactcgctgactgtccacggctg

SEQ ID NO: 505298 - DNA, 74 bp, Homo sapiens
gcggccccagcactcccagctgcgcagggcctgccaggtggcgctcggtactggttttggattaggaattgttt

SEQ ID NO: 505299 - DNA, 83 bp, Homo sapiens
tgcagatcctgacctctctgatgagatggatcggatccctgctgccttggtgatcccgggctgacagccagagagcacagcgg

SEQ ID NO: 505300 - DNA, 75 bp, Homo sapiens
gtttaatgaaaatagatgaaccaagcactccttaccataggaacatgaatctgaaggtggaagaacacctttgat

SEQ ID NO: 505301 - DNA, 82 bp, Homo sapiens
ggcggatgccctgcagtacctgcagaaggtctctggagacatcttcagcaggctgacccagctggatgttgacagccacctg

SEQ ID NO: 505302 - DNA, 90 bp, Homo sapiens
gtcaaagacttagcttttaaattaaaaaggaagctattcaccattgagcatccagctttcaagcagatgtgtccctaggcaatgatgcag

SEQ ID NO: 505303 - DNA, 113 bp, Homo sapiens
cccaagccgcgtccccagagagcgccctgagagaacagggtggccgcttggtccagatcgtcagtatttaaacagatcacatcatgcgtgagtacaagctagtggtccttggt

SEQ ID NO: 505304 - DNA, 50 bp, Homo sapiens
tggctcaaagaaagatgattatgttgagcttcagcgacagcgagagtgac

SEQ ID NO: 505305 - DNA, 98 bp, Homo sapiens
aaagaatacatcaagattctgaatctggtgatgaacttagcagcagctccactgaacagataaggattagaagcccaggacccaggaaggagacacag

SEQ ID NO: 505306 - DNA, 50 bp, Homo sapiens
aggaagagaggccgtgcccctcaggaatccatcaacagcatcaagtccag

SEQ ID NO: 505307 - DNA, 51 bp, Homo sapiens
gaaagagaagacaaagtgtaggaggctattcaagatctctggcagtggagg

SEQ ID NO: 505308 - DNA, 101 bp, Homo sapiens
gaagtggttgagaagcctgtacctgttttatacttgcttttgcttcagcgttctgtggttgtcaacagaattctgcttggtcagaatcgtgatggcattgt

SEQ ID NO: 505309 - DNA, 100 bp, Homo sapiens
cttaatatgattcggcagatttatccacagctaaagggacattccagctacatcacacaccttgactggtccccagacaacaagtatataatgtctaact

SEQ ID NO: 505310 - DNA, 100 bp, Homo sapiens
acaagacgctggccgcgggctccatcagcatggctgagcttcccccacgccacgagccagaccctgctggccaagttcaaacagcaacatgaggacaata

SEQ ID NO: 505311 - DNA, 98 bp, Homo sapiens
acttggcggtgggagccggagcctgcttgttgcagctgtgggtgaggacggctctagctagaggtcatgacgccagtcagatcacactagccttgggc

SEQ ID NO: 505312 - DNA, 74 bp, Homo sapiens
atcgctgacagctgaggaagtctgcatccacattgcacataaagttgggactccagaacgggtggaactggcac

SEQ ID NO: 505313 - DNA, 89 bp, Homo sapiens
cagaagttgctgctgacgctctgggtgaagaatggaaggaattactctgcttaatgtaagcaagctgaacattttgaagcttgctcctg

SEQ ID NO: 505314 - DNA, 100 bp, Homo sapiens
tgaagttcttccatttgagaagtggtctggaagtagatatcagtttgtataacacattggtggcttctggcacagcagcttaattgaccggaacctcatt

SEQ ID NO: 505315 - DNA, 51 bp, Homo sapiens
ggaaacaccgcaacccagatggcccagcatggcaccacactcctgatggtt

SEQ ID NO: 505316 - DNA, 90 bp, Homo sapiens
tctaaaagatgtgtatgttgattccaaagatcctgtgtcttccttgcagggtccaattggttccaagacgcgtaggcgagttggtctgaa

SEQ ID NO: 505317 - DNA, 74 bp, Homo sapiens
gaccacaggccctcgttgcccagatctctcttggcctcctagtttctacctaatcatgtccctggtggaggcca

SEQ ID NO: 505318 - DNA, 97 bp, Homo sapiens
aatatgtatgccaaagcagcagccttctcgacagccttttactgtgaacaggtgacttcatggtcatgacgattttcttcaatgtgagcaggcggtt

SEQ ID NO: 505319 - DNA, 100 bp, Homo sapiens
ttttatgatttactggatgaactgataaaacccaccagtctaggaacccaagacagaccaggatgaggagcattgccggaaagtcaacgagtatctgaac

SEQ ID NO: 505320 - DNA, 76 bp, Homo sapiens
gaagaactcgagcgacagagacaagctgagcttgccgcacaaaaagctagagagattgagaggatccagaatccag

SEQ ID NO: 505321 - DNA, 100 bp, Homo sapiens
agaatcatctgtgaaaagactctcagctttccaaaacaggagttgatccctgaattttattatctccctgagatgtttgtcaacttcaataattataatc

SEQ ID NO: 505322 - DNA, 75 bp, Homo sapiens
cctcttcttagttgatgatttagttgattctctgaaggcctctactacgtggacagtgaagggaaccggatttca

SEQ ID NO: 505323 - DNA, 100 bp, Homo sapiens
agtactaccttgggaatatgttggccaagaaccttctatttgaaaaaggatttaagcgagagcctcactggttcccaggacatcaacctgaactggatcc

SEQ ID NO: 505324 - DNA, 100 bp, Homo sapiens
agaggaagcccagaaagggaaaaactaccagaacggagatgtgtttggcggttggtttgttggaccttgaactcaatcggctgacgaaagcgctattttt

SEQ ID NO: 505325 - DNA, 97 bp, Homo sapiens
aagctgcagaaggaggcgtccgggagcaagtacaaagccatcaaggagagctgcacctgggccctgggttgctccgactgtgtgttccaggagtggt

SEQ ID NO: 505326 - DNA, 100 bp, Homo sapiens
gtaaaccgaatggagagactgacatttcatctatcagtatttttactggaattaaggaattcaagatgctgagctttttataccaccaaagatcaacaga

SEQ ID NO: 505327 - DNA, 100 bp, Homo sapiens
gggaggacctcacttccccggggtgtaataatgttaactgagaatcatgtcaaccctgccatggacttcacgcagactccacctgggatgttggctctgg

SEQ ID NO: 505328 - DNA, 83 bp, Homo sapiens
ttcgcagtggtcgcttcttctccttgaccaggtgataggtttgatcgagacagaccgttgagaggacgtggaggcccgagagg

SEQ ID NO: 505329 - DNA, 98 bp, Homo sapiens
aaaatagagctgatcaccgttccagccccaacgtagcaatccgctctttgtgacgtggaagacagggcgggacaagcggcttcgtggctgcattggga

SEQ ID NO: 505330 - DNA, 91 bp, Homo sapiens
gctgatgctttatctcagtttcatgctgccgtaggtatctctcctaaatgtgtgatcaaggaattaccaccaacagagaacagtaatacag

SEQ ID NO: 505331 - DNA, 100 bp, Homo sapiens
tgcaaaacatgttgtctgccccctacatgagaagcatgatgcagtcactaagccagaatcctgaccttgctgcacaggctaatgcagagtcaagtaaaac

SEQ ID NO: 505332 - DNA, 89 bp, Homo sapiens
ggagaccctcacggagctgggcgacgagctgaccctgggagacatcgacgggttccccactgaaggacttggtccagctgtctggcagg

SEQ ID NO: 505333 - DNA, 100 bp, Homo sapiens
aagccgactgctgcctggtctgcaaagaagtcctttcaagtctctaggactggactcttcctaagcaagtccgggtggagccagccatcctgagacgtcc

SEQ ID NO: 505334 - DNA, 100 bp, Homo sapiens
ttgaagatggagcagatactacttccccagagacacctgattcttctgcttcaaaagtcctcaaaagagctccagaaggtcctgagcctcggccacatca

SEQ ID NO: 505335 - DNA, 119 bp, Homo sapiens
cccacagataccgactgaaaagtgttagcatgagcaaaagttcctatctaatattatatgctttcctttgctcccagagtcgacttcaatgttcctatgaagaacaaccagataacaaa

SEQ ID NO: 505336 - DNA, 90 bp, Homo sapiens
gtacatctacatgcattttggggagcaagaagtctatgtgccccaggatcctggattacctgaggaagaagagatcaaggaaaaaaaacc

SEQ ID NO: 505337 - DNA, 99 bp, Homo sapiens
gatgagcatccgggatgggatccacggacccctgctgctttactgcagatggtgcgtgacgagagccaccagatcctggcgctgtcagaaggccttgca

SEQ ID NO: 505338 - DNA, 82 bp, Homo sapiens
ttatggtgctgctgtgaacactgccaagacaacagcagttctgtagagagtttaaatatgaaggaatggcaggacgggctaa

SEQ ID NO: 505339 - DNA, 90 bp, Homo sapiens
ggaacaccgattttctgtttggagtacaagcgcaagctagccagagtttccctggtgcgcaaagaactcaggtcccggatccagagcctg

SEQ ID NO: 505340 - DNA, 75 bp, Homo sapiens
tccagaggtccagcccgcggcccgaagggtgaatgaaaactttgccattgatttgatagcagagcagcccgtgag

SEQ ID NO: 505341 - DNA, 82 bp, Homo sapiens
ctcagcggcggcgccagctcctgtggtgacagattgactgggatcccctcgcacatcctcaacagctccccatcagaccggc

SEQ ID NO: 505342 - DNA, 100 bp, Homo sapiens
gatattcttctcctggttaatcaagaattctctatttctgctccgtcatccatgccactccaaaactggacaagccaaggcatctgtagccaaagtaaac

SEQ ID NO: 505343 - DNA, 50 bp, Homo sapiens
cagtcgcgaagcagcaaccatgacgagccaaactcaggctgtaccttgag

SEQ ID NO: 505344 - DNA, 133 bp, Homo sapiens
ggggtgtcctggtgcacccccagtgggtgctcacagctgcccattgcctaaagaaagacgagttgtactgctgtcacaggaaatggacgctggattacaagcatggcagctcaggcagcagaagttgcaggaa

SEQ ID NO: 505345 - DNA, 83 bp, Homo sapiens
ctcagttgtccatgaccctgaaggtccaggagtacccgaccctcaaggacccttgaacatctgtgaagaaatgactattctgc

SEQ ID NO: 505346 - DNA, 83 bp, Homo sapiens
gcctggaagaaaaagatacaacgaactagcacaacgagggtactaggttttgacaagcttgcatcatgcgtgagtataagcta

SEQ ID NO: 505347 - DNA, 82 bp, Homo sapiens
ggaacgcagctgaaagcgtgaactgtcttccatgaggcaggctgaacctgcagatatgcgcccagagatatggatcgcccaa

SEQ ID NO: 505348 - DNA, 90 bp, Homo sapiens
cacctgggcccggccgggcaaggcgggccgctgcacttgggtgaaccctttgcagaagacagaggaggaggaggacctgggggaggagga

SEQ ID NO: 505349 - DNA, 90 bp, Homo sapiens
ccttgagggtgggagagagccagctcctcctgcagagcccccagtccgggaccatgtctggagaactaccaccaaacattaacatcaagg

SEQ ID NO: 505350 - DNA, 90 bp, Homo sapiens
tggcggcagctgtggctgtggctggcggaggccgagcagaaaccctcagattccacagaccttgcctctcccaagactatgggtaacagg

SEQ ID NO: 505351 - DNA, 75 bp, Homo sapiens
ctgggcggtgcggacaagcgcctgcggctgtgggtgagcgtggaggatgctcagatgcacaccgtcaccatctgg

SEQ ID NO: 505352 - DNA, 100 bp, Homo sapiens
acatggaactgctttatatcaagtagatttgctagtgaagatctcttctgaaaagagtgaagatgaagctggatgtagctcagttgatgaagaaagttac

SEQ ID NO: 505353 - DNA, 75 bp, Homo sapiens
cgacaggaaaacgtgtgagcgcgcggctgaaagcgactgggacctggaaatggaatctatttggaatttgcagaa

SEQ ID NO: 505354 - DNA, 51 bp, Homo sapiens
ggcctacgcagagctcatcgtccttggtctgggatctgccgatatggggga

SEQ ID NO: 505355 - DNA, 90 bp, Homo sapiens
gtctggagcagtggagcccaaagacccctggagacatgcttggatttacactgggcaacgtggttggaatgtatctggctcagaactatg

SEQ ID NO: 505356 - DNA, 100 bp, Homo sapiens
gggagccggaaatggttgtggactacgtctgtgcggctgcgtggggctcggccgcgcggactgaaggagactgaagaaggaagcccggtgccagccagcc

SEQ ID NO: 505357 - DNA, 129 bp, Homo sapiens
agatagcagattctgtcaaccacatttcataaagagttctgattctaagaggtttcttcttgaagggctcaaggaatgaagcatcccacaaaatgatcctgctgaataattgccagatgctgctggccc

SEQ ID NO: 505358 - DNA, 82 bp, Homo sapiens
caaaggcctgtgtgctgcagaacccccagaccatcatatctcacattcttgaaggtggcattgaagagcactaagatcggaa

SEQ ID NO: 505359 - DNA, 98 bp, Homo sapiens
ggggcggagaccctggcctccaaagtgcaattgcctcggtctggcatggtaccctctcgaagctgctgggaagcctgtatgctctgggcatccccaag

SEQ ID NO: 505360 - DNA, 82 bp, Homo sapiens
gcctgcgcgccgctgcccgcgccacagatggtctgtcttctgctgatcccaactctgattggaatgcaccagcagaagagtg

SEQ ID NO: 505361 - DNA, 75 bp, Homo sapiens
ttctgcctcctcatagagcaagctctggtttattcttcagtccaaggaagcaattcacagtcagctgttagagaa

SEQ ID NO: 505362 - DNA, 75 bp, Homo sapiens
cggctcgacaggcggcgcgggcggcggttctgcggggagtgtctccagccctgcctgcaggtgccatccccgctg

SEQ ID NO: 505363 - DNA, 83 bp, Homo sapiens
cttttgtgctcccctcccccatcaaaggaaaggggaaaatgtctcagtcgaaagatgtcatgggaacagacatgtcttggaga

SEQ ID NO: 505364 - DNA, 96 bp, Homo sapiens
ctgaattggaaatttttattcggaagtcggtgacctttgaggacgtggctgtgtacttcacccaggcggaatgggatggcctgtcccctgcacaga

SEQ ID NO: 505365 - DNA, 90 bp, Homo sapiens
acagctacacaaatctggaacgggtggccgattactgcgagaacaactacatacaggcaccgggagcctggccgctgcagtggagacagc

SEQ ID NO: 505366 - DNA, 50 bp, Homo sapiens
tgactgggcaacatgttattcaggacacaatgtttgcacgaggactgaag

SEQ ID NO: 505367 - DNA, 82 bp, Homo sapiens
gtgacctgaaggctgtcaagtatgtggagtgttctgcacttacacaggcccgatgagagaaagggaaagttaaggatgctgg

SEQ ID NO: 505368 - DNA, 80 bp, Homo sapiens
gaattctaatttgaaccatgtttggattgaagccgcctctgtattacttaccagctgtttgcagacaaggtcccaaagac

SEQ ID NO: 505369 - DNA, 75 bp, Homo sapiens
cgcatcaggcatgaagaagaatatctatggcaatatcgaggacctggtagttgatgtcacttggcgatattcctg

SEQ ID NO: 505370 - DNA, 100 bp, Homo sapiens
cgcctgattcccactgagttacgccgagaggctctggccttacaggggtccctggagtttgatgatgctggaggttgatgttgaacagcacactttagcc

SEQ ID NO: 505371 - DNA, 82 bp, Homo sapiens
ctgaaaacagatgagggcattgcctacagcggagctggagtttgttcagatcatcatcatcgtggtggtgatgatggtgatg

SEQ ID NO: 505372 - DNA, 90 bp, Homo sapiens
cgcgttcctatggacagacgcacagacacctgcaggtgtatgcaacagcgttattgcaacaggctaacgaaaacagacaaaattcaactg

SEQ ID NO: 505373 - DNA, 88 bp, Homo sapiens
atgttatctggtggatgttataggaggagccgaagacaagatgtgagacatggaaacccactgactcaatgcagaggatttaatctaa

SEQ ID NO: 505374 - DNA, 100 bp, Homo sapiens
cttcgacttcagtgccggagatcctttcgagataatagaggagttggcagatgccctgacctactgccatgacaagaaagtgattcacagagatattaag

SEQ ID NO: 505375 - DNA, 76 bp, Homo sapiens
gttcttacaacatggcagacattgacaagtaagaatgattgatgttggctgatattggagtgctcattcacatgaa

SEQ ID NO: 505376 - DNA, 75 bp, Homo sapiens
ttgagggcttcctcatcgacttaaaggtatataatgtttacatggcagggaggcagctgtgttctaagcggtacc

SEQ ID NO: 505377 - DNA, 50 bp, Homo sapiens
taattgcctcctgatagcacacagaaagggcttctcaaatttaataacta

SEQ ID NO: 505378 - DNA, 51 bp, Homo sapiens
atcagtacaacacattgtaaagagagctcaaaggatggctactgacatgca

SEQ ID NO: 505379 - DNA, 100 bp, Homo sapiens
ctctctctccagtccttgctgaagagactttccgttacatgagcatctgtcatcagttctggggaataagtttgaccatggagctgaagccattatgcca

SEQ ID NO: 505380 - DNA, 96 bp, Homo sapiens
gaaaagtggcactgaggctctggaacttctgcccagctctccttgggtaagaaggtggatggctctgtaaatgcctatgccataaatgtctctcag

SEQ ID NO: 505381 - DNA, 75 bp, Homo sapiens
ggcgcgggagccggcgtgggcggcggcaacggggcactgacctgggtgataaaataccatgaggagtttgagaag

SEQ ID NO: 505382 - DNA, 100 bp, Homo sapiens
cctaaaaaggagaaagtggcaatcaaacggataaaccttgagaaatgtcaaactagcatggatgaactcctggctacaactgagacccggaggagactag

SEQ ID NO: 505383 - DNA, 75 bp, Homo sapiens
ttaccatattgggaagttgcactggtcaagttcaagtcacacaggcctgggaattttcataaattttccaaaatt

SEQ ID NO: 505384 - DNA, 75 bp, Homo sapiens
cacaccgtcttcggtctcctggggtcggcgccgagtgggaggatggcggaaggctggctgctggcgggatggaca

SEQ ID NO: 505385 - DNA, 51 bp, Homo sapiens
gccggagcctgcgagccgagaccgtgaggcggaccctgttcatcacaggac

SEQ ID NO: 505386 - DNA, 97 bp, Homo sapiens
gtggctggaggaggatgaacactatgattaccaccaggagattgcaagcaccctggaggagaagaggttctgctggaacaagctggtgtagatgcaa

SEQ ID NO: 505387 - DNA, 100 bp, Homo sapiens
ctcccccgagataccggcgccatgtccagcgctcggacccccctacccacgctgaacgagagggacacggagcagttaaacacagtgggaatatcacttt

SEQ ID NO: 505388 - DNA, 76 bp, Homo sapiens
gaccccccactgatcgcgctggataaagatgcgcctctgcgatttgcaggacacaactcagatgggaagttcatcg

SEQ ID NO: 505389 - DNA, 89 bp, Homo sapiens
gcgcagctgggcgagaagctgctccggcctagcctggcggagctccacgacgagctggaaaagggctcaaaatctccttcgccaagacc

SEQ ID NO: 505390 - DNA, 75 bp, Homo sapiens
tgaggttcagattaagaaatctgccccaaagtcttagaactggaaacccagcgtttgctggcagaaccagttcct

SEQ ID NO: 505391 - DNA, 82 bp, Homo sapiens
cctatgctgtcagtgaattagcaggagtggacgcttctcttgtgagccagctggaggtcttacctctttgactgaaccaccc

SEQ ID NO: 505392 - DNA, 75 bp, Homo sapiens
aggagctcaactccaaccacgacggggccgacgagacctcagccgagccgctgccgctcatggatttgtgccgtc

SEQ ID NO: 505393 - DNA, 75 bp, Homo sapiens
gacggataagagatattgatctgaaaagaggctttggttttgtgatgctggccagagcaagtgtcgcctggagcg

SEQ ID NO: 505394 - DNA, 100 bp, Homo sapiens
ggggagccagcgagcgcgccttcggcattggccgccgcgatgtcagctcagtgctgtgcgggccagtccagattcctaagatgaggacacagcatcctgg

SEQ ID NO: 505395 - DNA, 75 bp, Homo sapiens
ggccagtcgcctccaggccaagagggatccttcacccgtgtctgatcttcgagtacttccgcagagacacagaga

SEQ ID NO: 505396 - DNA, 100 bp, Homo sapiens
ctggactggcacccagacagcgagcacattcttgctacctccagtcaagacaattctgtgaaggatcacagaagaactgcagcttcctggggagcagttt

SEQ ID NO: 505397 - DNA, 82 bp, Homo sapiens
agaccctcctgagacgttctgtgcaatgttctcttgcaactagcaagtgaagccttgccaaatgacatgaccttggctcttg

SEQ ID NO: 505398 - DNA, 97 bp, Homo sapiens
aatggtggatccaaactcacgcagtgaccccaagcttcaagaactgatgaagggcgagctggagcggcagctgctgcaggccaaccccatcctggag

SEQ ID NO: 505399 - DNA, 75 bp, Homo sapiens
gtgcaccaggtgttggaaaaacacaattatggttggatggcaagcatgtggtgtttggcaaagtgaaagaaggca

SEQ ID NO: 505400 - DNA, 74 bp, Homo sapiens
tgaggatgaaggtgaagaagatgaagatgatgatgaaggggaggaaggagaggagaccccgaaagaaagcctca

SEQ ID NO: 505401 - DNA, 100 bp, Homo sapiens
aaaatccgttttgaagattgttgagaaattggatcttacacttgaaatacagactgttggggaacaagagccctggtacctgacagtgtaaagaaggagc

SEQ ID NO: 505402 - DNA, 90 bp, Homo sapiens
ccgtgtggtcgctggcaaaagcgacgggagcagggcggcgactggcggcgcgatggacctgaccgggctcctgctggacgaagaaggcac

SEQ ID NO: 505403 - DNA, 100 bp, Homo sapiens
cagatgtggaggagaatatatcctctaaatctgatagatgtcggcttatttataggaattgcttgaagccagagtcatggtggatgtcggaaagtggccc

SEQ ID NO: 505404 - DNA, 100 bp, Homo sapiens
tgtctttgtgtcctgagatcaaatggcacttcattggccacctacagaaacaaaatgtcaacaaattgatggccttatttagtgtctctgacaaaaccgg

SEQ ID NO: 505405 - DNA, 75 bp, Homo sapiens
cctcgagaccaacgtggaggagctgtgggtggaaggggacatcacccagaagggctatgaaaagaaaaggtccaa

SEQ ID NO: 505406 - DNA, 50 bp, Homo sapiens
cgagcagcctctcgccatttcccggattgtggtggtgccatgcagcaaga

SEQ ID NO: 505407 - DNA, 74 bp, Homo sapiens
ctggatgtactggtggattacctgtcctttgcccagtgttctgtcatagtggatgaggatgaggatgacctgga

SEQ ID NO: 505408 - DNA, 98 bp, Homo sapiens
ccagatcttctactggcacaagttcgtgagtcccgtgggaaagctaacctcaccaatgagaaagatcagtctaaagaaaaggagaagaaagtgaaaaa

SEQ ID NO: 505409 - DNA, 73 bp, Homo sapiens
tcatttcttcagatagctccccagctgtggaaaatgagcatcctcaaggtattgtcttctaagaactctgaag

SEQ ID NO: 505410 - DNA, 82 bp, Homo sapiens
caagggtgttcccgaactagagtgggcattgaagttgatatcgatgtggagcacggagggaaaagaagccgcctgacccccg

SEQ ID NO: 505411 - DNA, 100 bp, Homo sapiens
tgcagaaggtctctggagacatcttcagcagtgactggctttgatctgtggctgtccgtgctggccctgggcattgtctgtaccgtctatacagctctgg

SEQ ID NO: 505412 - DNA, 89 bp, Homo sapiens
atgcttttggctgccctgagctggcagtacctgaccactctctcccagtaacaacatgctgtaccccaaggaagacaaggagaaccgca

SEQ ID NO: 505413 - DNA, 100 bp, Homo sapiens
tcgatttattccctatactgaggagttcagtgaaaaactagagcctcaacaagaacttgatttaaactctccacgaaataccactttggaaagacagact

SEQ ID NO: 505414 - DNA, 78 bp, Homo sapiens
accctcagctccacattgagagcaaaatctacaagatgatgcagggaggaggatttgaacttctcgaagagctaccaa

SEQ ID NO: 505415 - DNA, 83 bp, Homo sapiens
ggggacgaaacaataaagaccggaagctgagtttttatccgtcattatccagctcaggaaaacctgatgttccttgttctctg

SEQ ID NO: 505416 - DNA, 85 bp, Homo sapiens
cacaggagatccaggtcaccagcatccactggagctacaagagggcctcatccacatgctcacccacttggccgaggctctgcac

SEQ ID NO: 505417 - DNA, 100 bp, Homo sapiens
tcggaggtgcttaagcggctgcgacttcagaagcgaggcacagaccctctttcccagctgcccgctcctcagcacccgaagattcgcctgtacaacgcag

SEQ ID NO: 505418 - DNA, 100 bp, Homo sapiens
cggcagacggcgacagtggcggcggcgccatggcagggcttgcaggcacttccgttccggcgcccctccggtcatcaacccgctgggcaccagcttcccg

SEQ ID NO: 505419 - DNA, 97 bp, Homo sapiens
gcactgtctttcagtttgatgtccagaggaagtacttcaaggaagctcttgatagtggctctgtttctcagtactttgaagttataactaatctgcc

SEQ ID NO: 505420 - DNA, 97 bp, Homo sapiens
acctccccccggagccaggctggtttcggaaatgcccttacagcagcagatgggagattctttggtcagagagacctacgaaggtgaatgcttccca

SEQ ID NO: 505421 - DNA, 100 bp, Homo sapiens
ctggcgttccatccggcccgtgacctactggctgcaggggacgtggacggggacgtgttcgttgcagaggcagtgttaacatcccaactgaaagcacatc

SEQ ID NO: 505422 - DNA, 98 bp, Homo sapiens
gtcagatccttgagtgataaaggagtagaggtcctactgctctgttggctcatgaaataggttttggaagtaaagttacaacacaccctcttgctaaa

SEQ ID NO: 505423 - DNA, 75 bp, Homo sapiens
ctcatctaatcatccagccctgtgacttaagagattaaaattaatttggttgctgttggttctgaacaaataatg

SEQ ID NO: 505424 - DNA, 76 bp, Homo sapiens
tcgtgctcaccggtttctcccacatcgacctgacaacagcccagacccttggacctgaggaatcccaaaccttcac

SEQ ID NO: 505425 - DNA, 90 bp, Homo sapiens
gaaggagtcgccagggctgcgtaggcttgtggcgcgcccgcggagaggccggggggtgagcccctccagactccgaataggagatcaaga

SEQ ID NO: 505426 - DNA, 100 bp, Homo sapiens
gttctccaccatagctttggactctcttgttcttgaaaacttaagtacccaggtgttggggatgtcctttgcactgaccctgaactgccagattgacaaa

SEQ ID NO: 505427 - DNA, 117 bp, Homo sapiens
agatcatttgggagatccaagagattcagtatcactcgctcccttgatgatcttgaggtgccctacgagacgctgaacaaacgctttcgcgccgctcagaagaacattgaccgggag

SEQ ID NO: 505428 - DNA, 89 bp, Homo sapiens
ggcggctcagatccccagatccagtgtgtgggagcaggaccagcaggagctgaaagatctccgaaaacaaagtgaaatcatacctcagc

SEQ ID NO: 505429 - DNA, 100 bp, Homo sapiens
gaataaaggaaagacctcagagtgttctcaggtatctgtgcagatcaagtgaaagttttcagctatcatcgctaccaaagagtagaaatgaatgaaaatg

SEQ ID NO: 505430 - DNA, 96 bp, Homo sapiens
aagatagatgccctctctcttcatcttcacttgaaataccggatgattttggagcggagcgtgctttggacaccatgaattttgatgttataaagg

SEQ ID NO: 505431 - DNA, 73 bp, Homo sapiens
atccagcgcttcgcacaggctcagcagcagctgccgctcgagtcacttggggaaaatttctaccttgaaccgt

SEQ ID NO: 505432 - DNA, 100 bp, Homo sapiens
cgcggggagagtagggtgctgtggtctgagctagagggtgaagctggcggagcaggaggatgggcggtttctgacgtagaagagcttacccctccagagc

SEQ ID NO: 505433 - DNA, 83 bp, Homo sapiens
gcgcctcattcgggtggagctgagccggagacagacaggtccggtggtagaacaggcagtgagaggccttgttcttgttccta

SEQ ID NO: 505434 - DNA, 82 bp, Homo sapiens
gagatggaacccgaagaagaaaggattcgttacagccagagattgcgtttttgccggttgtcaaatcccttacccaaaacga

SEQ ID NO: 505435 - DNA, 83 bp, Homo sapiens
cgccgcggccaggcagggaggagaccggcacccagacaggtggcgaaggcagaggaggactggtgattgcagctggaagtgcc

SEQ ID NO: 505436 - DNA, 99 bp, Homo sapiens
ccgccgcctcggccgaccagggacctgcccgcctgcggctgctccgggaagtgcattttcagctgagcacctcaaacttcaactccagaaggaatccct

SEQ ID NO: 505437 - DNA, 100 bp, Homo sapiens
aaggacttggatggtgctgggaagaggagaaagaccagtcaatcagaggaggttgcaaaaagccagatgtgggggaaaagtaacatcaacactgtcccat

SEQ ID NO: 505438 - DNA, 50 bp, Homo sapiens
cacacttcgagttttatcaatcaaagaatggcaacatacttgtttaacat

SEQ ID NO: 505439 - DNA, 50 bp, Homo sapiens
cgcagaggaggagcgcagcccggcctcgaaaacccgcctagtgccaagca

SEQ ID NO: 505440 - DNA, 75 bp, Homo sapiens
acggggcagatggactcggagcgccccgccggttaaagatcgaggtccggaagccactaggagattttttaattg

SEQ ID NO: 505441 - DNA, 96 bp, Homo sapiens
gggagcagctggaggaggaggaggaggccaagcacaacctggagaagcagatcgccaccctccatgcccaggtgttggcagagctgaaagagtacg

SEQ ID NO: 505442 - DNA, 100 bp, Homo sapiens
gaaaaaaagcagagaggagcggggagcaatgcaggtttttctcagaaattacgtactctacggctgcccatcctattcaagaatgaggcaatagaaaagc

SEQ ID NO: 505443 - DNA, 75 bp, Homo sapiens
ggcaacaagatgatgagggcgcggcagtatccttggggcactgtgcagggagtgaagtgcaaccagtggtctgag

SEQ ID NO: 505444 - DNA, 83 bp, Homo sapiens
tcaacagctacagccaattttgctaactttgcacatttcaacagtcatgcaggttcacagtgtcttcacctggaatagattcc

SEQ ID NO: 505445 - DNA, 90 bp, Homo sapiens
gagtctggcagatccagtcttgctcagctctcacaggagagggcgttcagggtgtgtccgcagccggccaggtggtatccctgaaggtgt

SEQ ID NO: 505446 - DNA, 99 bp, Homo sapiens
agttcaagtggccctcagggcatccccgttttcggcctgccgtggtacagaactggactgtggcattgagacagacagtggtgttgatgatgacatggc

SEQ ID NO: 505447 - DNA, 75 bp, Homo sapiens
ggttgtcatgtttatcacactccttggatgatttccgaagatgcaccttggtgtggagtcaaaagtacacatgct

SEQ ID NO: 505448 - DNA, 50 bp, Homo sapiens
ctggaccagccccaaaagaggagatgccctggctcaagcacccatggatg

SEQ ID NO: 505449 - DNA, 102 bp, Homo sapiens
ggtgtaccaggcgaagctggccgagcaggctgagcgatacgacgcaaaccagtccagctacgggggcccagccagccagcagctgagtgggggttacggagg

SEQ ID NO: 505450 - DNA, 99 bp, Homo sapiens
agacatctacgacttccgagatgttctgggcacacagagtgggaagctttggagctgacggatcaccagtgggcactagatgatgtcgaagaagagctc

SEQ ID NO: 505451 - DNA, 88 bp, Homo sapiens
tttgttaaggattccaagtaactcttatttgcattccaaaatatgcccggtgctatccgcccagctgctcctagaccaccatttagta

SEQ ID NO: 505452 - DNA, 100 bp, Homo sapiens
tgtgttctcaatcacagaacatgaatcctttacagcaactgccgaattcagggaacagtgttgataaagactgctgaagaattgatgaattttagtaagg

SEQ ID NO: 505453 - DNA, 83 bp, Homo sapiens
attagatctaaaagccacccaggccttggtcctagcacccactcgagaattggctcagcagtttcacagattccttggtgtct

SEQ ID NO: 505454 - DNA, 85 bp, Homo sapiens
tggatgggggaccacaagatcctcatcgacagcaacaggtgtgccctggggctatgaagagaccaagacgctcctggctattctt

SEQ ID NO: 505455 - DNA, 90 bp, Homo sapiens
aaggtgtcaagaagctcagaatgcatggaaataaccagcctgcaagaactggcacactgtcgagaacaaatcctcctactcagaaaccgc

SEQ ID NO: 505456 - DNA, 74 bp, Homo sapiens
ttggactcaagcagaaacaatggctaatgactgaggcaaatcctgatcctaactgttgtcttggagtatttggg

SEQ ID NO: 505457 - DNA, 82 bp, Homo sapiens
agagcggtcggtgacagcctcaagggcttcagcaccgcgcccatggcagagccagaccaagtccccacgagaagaagaagaa

SEQ ID NO: 505458 - DNA, 100 bp, Homo sapiens
aaggcgctgaagcacatggatggaggttgacatgatgaaagaagcattagaaaaacttcagctcaatatagtagagatgaaagatgaaaatgcaacttta

SEQ ID NO: 505459 - DNA, 96 bp, Homo sapiens
ggcggcgcggcggctcctcactcatcccagctgacatctgaaatgtttgaagcagatcttgagaaggcattgttactaagtaaactagaatatgaa

SEQ ID NO: 505460 - DNA, 82 bp, Homo sapiens
ggtggaggttcgagcgctgttctcgctccggagccgctgcacatttcgctcaccatggatgatgatatcgccgcgctcgtcg

SEQ ID NO: 505461 - DNA, 90 bp, Homo sapiens
ccaaaatcccaaatcctcgatttcagagattatttcaggtggagccgccaccaaaatgcagattttcgtgaaaacccttacggggaagac

SEQ ID NO: 505462 - DNA, 75 bp, Homo sapiens
tgctgtgggtgctgggacttcccgtccgcggcgtggaggcaacatgaaccgtgaagaccggaatgtgctgcgtat

SEQ ID NO: 505463 - DNA, 74 bp, Homo sapiens
agtttcataggataggactccctcctaaggattacaccagcggagccatgctcaccggtgagctcaagaaggca

SEQ ID NO: 505464 - DNA, 100 bp, Homo sapiens
aggagggagaaaaatcgtattgccgcccagaagagccgacagaggcagacacagaaggccgacaccctgcacctgatataccagtatattcagagtcgct

SEQ ID NO: 505465 - DNA, 98 bp, Homo sapiens
ctgaccctggtgtgcagctcggccccgggccccctggagctggacctgacggatgacatcaccctgactgtagatggccgggacacctatgaggaagt

SEQ ID NO: 505466 - DNA, 87 bp, Homo sapiens
tcgacttcaaggagccagcagtaaagattcaggtctatgcctctcagcgaatgagagctggcaaaggcaaaatgagaaaccgtcgcc

SEQ ID NO: 505467 - DNA, 100 bp, Homo sapiens
ggccaacgtggaggcctcacgcagctccacagacagccccagctcggtgttcctcaggttaattaccatgctcagcattaccatctcactccatttacag

SEQ ID NO: 505468 - DNA, 90 bp, Homo sapiens
caaagaaacaagccgtggaataggtgtatcaagtaatggtgcaaagcctgaattactccacaggatccgctgaacataggatgttgccac

SEQ ID NO: 505469 - DNA, 88 bp, Homo sapiens
gctttgaggaaaagccagtttatatccaagacttagatgagcttaaaactagagatcgatacatcagtagtctgaaaaagaaatgcca

SEQ ID NO: 505470 - DNA, 51 bp, Homo sapiens
tgagccggttgcgccacccgaggacaagccgggtcccaatgataagaagtc

SEQ ID NO: 505471 - DNA, 101 bp, Homo sapiens
gggctggcaacgaaaatgagcctcgcgaggccgacaagagccacccggagcagcacggggtcactctggtgcccattgaggagttcagcccggagttcgtg

SEQ ID NO: 505472 - DNA, 80 bp, Homo sapiens
aaaacattgctgaatggattgtgatctgaagaggaatgattatacgcctgataaaattatatttcctcaggatgagcctt

SEQ ID NO: 505473 - DNA, 49 bp, Homo sapiens
cagagtccagacccaccacagaccgtataattgatgccggcccaaaagg

SEQ ID NO: 505474 - DNA, 50 bp, Homo sapiens
atttcattggcgtttgagtcagcaaaggcccagaggcagagctacacaac

SEQ ID NO: 505475 - DNA, 105 bp, Homo sapiens
aggggattcaacttcaatttttctgcagtggctctgggtccagccccttacttaaagcatggactggaggaaacagctgccaaatgcaagggactgggtgccaag

SEQ ID NO: 505476 - DNA, 100 bp, Homo sapiens
gactttggagaaaccaccgtgctggaccgcttttacaatgcaggtagtcagatgcctccgcagccacccgggagccagtcagaatccagttcccatcccg

SEQ ID NO: 505477 - DNA, 83 bp, Homo sapiens
attcgaagtgacctcagcagggcatccagacttccattagtttgatgaatctgacttccacaccactatgcaacctttctgat

SEQ ID NO: 505478 - DNA, 96 bp, Homo sapiens
acagggctcgtccaactggtccctcagtcacacatgccagagattgctcaggaagcaatggaggacttgcaattgtgaccaaatatattacaaagg

SEQ ID NO: 505479 - DNA, 100 bp, Homo sapiens
accatcagacctttttcacctgtgacacagattttttacgtccttcagacacagaattcaaagaagctttttcactatttgacaaagatggtgatggaac

SEQ ID NO: 505480 - DNA, 74 bp, Homo sapiens
atgatgctcagtttgatgcgtcacactacgacagtgagaaaggagatctccagatcacactaagtttgtgggaa

SEQ ID NO: 505481 - DNA, 74 bp, Homo sapiens
cagggaaggagggcgtccgagtcaacaaccgcttcgagctggagcatcagatccatgctgctgctgactcggag

SEQ ID NO: 505482 - DNA, 75 bp, Homo sapiens
tgcccacttcctggtggttcaggaaacgcaactcagcagcaaggtggttatcactaggctaaaactggacaaaga

SEQ ID NO: 505483 - DNA, 83 bp, Homo sapiens
gggagcttggggggcgcctgctgccaaggatggcgattttgctgacagctgccaagaaaatgcttcactcaacagtcctcatg

SEQ ID NO: 505484 - DNA, 83 bp, Homo sapiens
ccagaagtgcatcctctcacaccccagctgtgcatggtgcaagcaactgacaatgcagatcttcgtgaagactctgactggta

SEQ ID NO: 505485 - DNA, 100 bp, Homo sapiens
agctggagcgccggcttcgtcatccaccactacgctggcaagctgaaggaagaggatcaccttccaagacaaaacagtcttcatgggggaaaaatgacgc

SEQ ID NO: 505486 - DNA, 119 bp, Homo sapiens
aagaagtctgaattttaacctgaagggacatgggagctactgcaggctggagcaatttacagcaatgagggatttatacatgaaaaatggacaaggatttgcattagtttattccatca

SEQ ID NO: 505487 - DNA, 74 bp, Homo sapiens
tgctggcacggggctggtgggcatagtggctgccctgctggggccagatgcagatggctggagatgggtgcaga

SEQ ID NO: 505488 - DNA, 95 bp, Homo sapiens
gaggagtcagctgtgtgtccagaacgtgccatggagacgcttaacgaaatacactttcgggaaatggcctctaaatcctggctgaattttttaac

SEQ ID NO: 505489 - DNA, 89 bp, Homo sapiens
gtccagttctgaagacaacagggaagaccaagatgtgaaaaccaagaggaaccggctcctgggtagaactgcacttcagcaataatggg

SEQ ID NO: 505490 - DNA, 82 bp, Homo sapiens
ggccagatagtaccatgatagctgtatcaatgagtgaccgaggaggtggcgttcctttgaggaaaattgacagacttttcaa

SEQ ID NO: 505491 - DNA, 105 bp, Homo sapiens
tggccctgtaccacactgaggagcgcggccagccctgctcgcagaattaccgcctcttctttagagagcctgacaaggagctgaatcctaagaagaagatttggg

SEQ ID NO: 505492 - DNA, 103 bp, Homo sapiens
tggggttcctggtgtgcagaacattctcaaaattggcttcctgaatgacaaggtcatgaaggagaagggcaagagatcctctgaacacatccaccaggtctac

SEQ ID NO: 505493 - DNA, 75 bp, Homo sapiens
tgctgaatcctgcccgcgtgaaccacatgcccagcacgggatggagagcaatacatcatcatctttggagaattt

SEQ ID NO: 505494 - DNA, 75 bp, Homo sapiens
tacctcatcaaggctggggccctggtggatcccaaggctccctacacaccttttctcactgaattgatgtaccag

SEQ ID NO: 505495 - DNA, 88 bp, Homo sapiens
tcttctaaacctggtaaaatttcacggcaggatcctgttacatacatttcagaaacagattattcagagctgggagagcttcccccac

SEQ ID NO: 505496 - DNA, 101 bp, Homo sapiens
gagaaggtctacagagcggcctgcgccagcgagggtatagaacaggctatgcttacaggcatcctctcattcgagagaagcctaggcacaagagtgatgtg

SEQ ID NO: 505497 - DNA, 88 bp, Homo sapiens
gcctccccagccatgtggaactgatttctctctgatcaaacggacagttcaggactcagaatctaaggatgaatgttcaccgtggcag

SEQ ID NO: 505498 - DNA, 100 bp, Homo sapiens
tggcagctatgttcagagaatttacccagcaaaattgtgaagcctcagtttaggtcatctggtggttcagaacactcaacagagggctctgtatccttgg

SEQ ID NO: 505499 - DNA, 90 bp, Homo sapiens
cggggcccgagccccgcccggcccgggccatgtcggtgggcgagctctacagccagctccatcaagtatgatggtgaaggatgaatatgt

SEQ ID NO: 505500 - DNA, 100 bp, Homo sapiens
aagcaccagctccacgtgtcgccttacgttgccagggatcgcttacacctgagacgaactacagaacagcacgtaccagaggtggaagtccaagtcaaac

SEQ ID NO: 505501 - DNA, 75 bp, Homo sapiens
tgggcgcggaggcgaccgccatggcgttcctcaaactccgtgaccaggttccgaggcctcatcctgctgctgacc

SEQ ID NO: 505502 - DNA, 100 bp, Homo sapiens
gctgattgctatcacttctgcagaatccagtgggccgaatacatcaagcaatggtaacatctttaaatgaagataatgaaagtgtaactgttgaatggat

SEQ ID NO: 505503 - DNA, 101 bp, Homo sapiens
cctcccaagtagctgggatttcagctcgcaaaggatctccttcatccctctccagaagaggagaagaggaaacacaagaagaaacgcctggtgcagagccc

SEQ ID NO: 505504 - DNA, 82 bp, Homo sapiens
gcggattcgccgaggcaccgaggcactcagaggaggccactcttcacctccaccatgagcctggacatccagagcctggaca

SEQ ID NO: 505505 - DNA, 75 bp, Homo sapiens
agtccatttggggaaatccttcggatggtgaactcattagaagcattgaatgccccagaggagcccgaaacctcc

SEQ ID NO: 505506 - DNA, 98 bp, Homo sapiens
gcccctccacagacccagggcatttggtggacacttttgcttgcagttaggtcaagtggagaggaattacggaggttgagctggtccggaatccctaa

SEQ ID NO: 505507 - DNA, 74 bp, Homo sapiens
ggacacgggctgcaacctgcagcacatcagcgaccgggagaacatagacggctattactcgtggaggagcccag

SEQ ID NO: 505508 - DNA, 74 bp, Homo sapiens
ctgaactgctccgatcccactagtgagagggcttatttcaaaacctttgtccctcagttccaggaggcagcatt

SEQ ID NO: 505509 - DNA, 90 bp, Homo sapiens
ggtctctgcacctcctttctgtcaaaagaaatagactggcaaccttattttactacacgcattgtagatgactttggcacacacttacga

SEQ ID NO: 505510 - DNA, 100 bp, Homo sapiens
ctgagccaggagcagcagcctttctggctgggttacgacccctacaaccctgagctgcccaagccccccgcgcagagggagaatggcaccctgggcctgg

SEQ ID NO: 505511 - DNA, 75 bp, Homo sapiens
gggccctagccggcgtcccctgcctccagaacgcgtaagactttgaccccgacgcaggcttcagtgattgccgcg

SEQ ID NO: 505512 - DNA, 98 bp, Homo sapiens
ctcagggtcatgattacacatggtgtggatgtgacagcccaagatactaccgataaaaatctggataatgccgcagaagcagctgaacaatttaaatt

SEQ ID NO: 505513 - DNA, 74 bp, Homo sapiens
cgcgggagttcgaggccctgcggagctgcttcgccgctgcggccaccgtgaacgcccggccgcagcgcgtcctg

SEQ ID NO: 505514 - DNA, 75 bp, Homo sapiens
tgagagccagtttcaacaaccctgacagagcagtggagtatcttttaatgcatgagtctgctttgccctgggatg

SEQ ID NO: 505515 - DNA, 98 bp, Homo sapiens
gttcaaggaggccttccagctgtttgaccgaacagatgaaggtcaccgtgtccaaagggggcgaccgggacagtgacgacgacagcgtcctcgaagcc

SEQ ID NO: 505516 - DNA, 75 bp, Homo sapiens
tacaattcacatctaaaccaaccactgccacaacctgcgcagcagacagattcccagttctcaatcttccttcct

SEQ ID NO: 505517 - DNA, 75 bp, Homo sapiens
ggacacagcaatatctctgggctttcacaggatgctattcctatgatcagcaaactgaggtacaatcccagattt

SEQ ID NO: 505518 - DNA, 100 bp, Homo sapiens
atcgtccactgggaccaactgccacaataccaactaaacagacaggatgcaccacatctagtaaaggtctgctaccgctgccacggccccccctgctgcc

SEQ ID NO: 505519 - DNA, 98 bp, Homo sapiens
cataaaaattcatcagagagcattttactactgagctgcaaaggccatggatcatctgcagtcattcattgcagattgtgatcgtagaacagaagtgg

SEQ ID NO: 505520 - DNA, 100 bp, Homo sapiens
tgcgcgcctgatgggtcgaggcggacgcgcggctgcgtcaggtatcgcaggacttccctttcctccaccccagtgagaccagtgtcctgaatcgactctg

SEQ ID NO: 505521 - DNA, 75 bp, Homo sapiens
aagcttacacagcagatggaatcaagtacttcatcaagtactattaccaaaggggtattctggcaaaagtggaag

SEQ ID NO: 505522 - DNA, 82 bp, Homo sapiens
caataaaagaactccagtgcaaagaactccactgtcagcagctgcacacacatgagaaagatcagtctaaagaaaaggagaa

SEQ ID NO: 505523 - DNA, 101 bp, Homo sapiens
agtcccagtcgccacgacaggcggcagccagtgctgttccctcgtcacaccaatgccagtgctcgagacaacaccatcaacctgatccacacgttccggga

SEQ ID NO: 505524 - DNA, 100 bp, Homo sapiens
ctcaaactcccaggctcaagcaatcctaccatgtcagccttcccagtagctggaactacaggcagcgtctatcccagactaccggggccctaatggagtg

SEQ ID NO: 505525 - DNA, 75 bp, Homo sapiens
gatatcttgaaaagctgccagaaaggtcagaagagatcaattctacagaaatttccagtggttctgttgaggctt

SEQ ID NO: 505526 - DNA, 100 bp, Homo sapiens
ggcgcggctgccggcggctgggactgaagagggacgggtcccgcggcgagcgagctcctgagagactgcaaataggacatttcaagaaaaaggcatcctg

SEQ ID NO: 505527 - DNA, 75 bp, Homo sapiens
cgccgcaccaggtcttgtagcagcgcctcctcgaaactccccaacttttaaatcatttgaagaaaaggtcgaaaa

SEQ ID NO: 505528 - DNA, 100 bp, Homo sapiens
aggagccactgagatgaggaggcgtcgcgcgcgcctgtagctcgcgggcctcgcagggacccgtgacattaaaggatgttattgtggaattcaccaagga

SEQ ID NO: 505529 - DNA, 87 bp, Homo sapiens
gccactcatcagaaggactgctcgctgccatatgctacggaatccaaagaatgcagccctggcaggtgcccggcccgccccccaccc

SEQ ID NO: 505530 - DNA, 98 bp, Homo sapiens
gcttcatcctcggcggcggtggccgctagctccaaggaagaatgctgtccagtttcaacgagtggttttggcaggacaggttctggttaccacccaat

SEQ ID NO: 505531 - DNA, 100 bp, Homo sapiens
cggtcagagagagccgagcaacagcgcttcagaactgagaaggaacgcgaacgtcaggctaagctggcggtgtggatgtggaagcagccaagcgggcaga

SEQ ID NO: 505532 - DNA, 75 bp, Homo sapiens
gcgggtaacaaggcagacctggccagcaagagagccgtggaattccagattcgtattttacatggagaagtgaac

SEQ ID NO: 505533 - DNA, 98 bp, Homo sapiens
gcgcttcttccccactcccgagacaggatggacaaccggaaattttctacacattttggaattcagttactcaggcactttcttctcaatttcatatg

SEQ ID NO: 505534 - DNA, 51 bp, Homo sapiens
aatccaccgcatcctggatcaacttattctgacaagtccctgtacacccag

SEQ ID NO: 505535 - DNA, 49 bp, Homo sapiens
ctggaacagagcgagagtatcgtattagaaaactactcggatgctccaa

SEQ ID NO: 505536 - DNA, 51 bp, Homo sapiens
atcgattcctcattggaggatatcacggcaccagttgttctgcaaactcac

SEQ ID NO: 505537 - DNA, 82 bp, Homo sapiens
ctagcgaatttttggagcatctccacccaggaacctcgccatccagaaggtctccatcacccaactccatgcttcgagtcct

SEQ ID NO: 505538 - DNA, 82 bp, Homo sapiens
ctggaggacggagaggacctgttcaccagcactgtctccaccctagaggtgtttgaggaactgtggaagagggaaggcaaga

SEQ ID NO: 505539 - DNA, 101 bp, Homo sapiens
catggaagagtttttaaaccagttctgtgatatgagcaacaatggaccagaagattttatctctagcagcagaaaaaacagcagacaaactgcaagaattt

SEQ ID NO: 505540 - DNA, 100 bp, Homo sapiens
gtggagaagtaaaatttctggctctgacactgaaacattaggtggttttccagtagaatttcttatccaagtggcagaaaccactaatactagcctcttg

SEQ ID NO: 505541 - DNA, 90 bp, Homo sapiens
tgccacctgctgcacccacgaatctgcccacccctcctgtaacccagcctgtttcacttcttgccaaaactggacaagccaaggcatctg

SEQ ID NO: 505542 - DNA, 83 bp, Homo sapiens
atgtgcgaagtggcaaggaacagtgtcttgcagtgtggaatttctcatgagacctgcctagagctggaacgttacctccagag

SEQ ID NO: 505543 - DNA, 75 bp, Homo sapiens
cacagccttggaaagtcaggaccgcgacggcagcagagcacaattctgtggtgttcttggtcacacatttatgga

SEQ ID NO: 505544 - DNA, 99 bp, Homo sapiens
tggaaatggcacctatggacaagtctataaggactcacaccacccggcaagaactgctcactacggctccctgccccagaagtcacacggccggaccca

SEQ ID NO: 505545 - DNA, 100 bp, Homo sapiens
aagagaagtcacaaaacagcagatttcccaagagcagcggaaaatgatccagtcacaggtatctttcagatgaaggcattgaagcttgcacaagctctcc

SEQ ID NO: 505546 - DNA, 83 bp, Homo sapiens
taaccagttagtggtgctcaacgtgtacgacatgacaatgcagatcttcgtgaagactctgactggtaagaccatcaccctcg

SEQ ID NO: 505547 - DNA, 101 bp, Homo sapiens
atcacatatgacatcagtcagttgtttgatttcatcgatgatctggcagacctcagctgcctggtgcattgtgtggctgctcaattaatgtaccaacactg

SEQ ID NO: 505548 - DNA, 100 bp, Homo sapiens
tgaacatgatagacctacagctctcatcaatggccatttgaattcacttcagagcaatccactactgccagaccagaagaaaatgtcactgaaattcaca

SEQ ID NO: 505549 - DNA, 71 bp, Homo sapiens
gtattattccaggtcctatctccaagaatatcaaacagggcacacgtgtttcacgttgacaggtttgcttg

SEQ ID NO: 505550 - DNA, 51 bp, Homo sapiens
ggaaagagcaagatcggcagccctaaagcatgttacatggaattggaaaat

SEQ ID NO: 505551 - DNA, 82 bp, Homo sapiens
cctcacaactccaaaaacaaaagggagatactccagcttcagcaacagggagaaaacatggagatatgaatgactgtgtgga

SEQ ID NO: 505552 - DNA, 96 bp, Homo sapiens
gagatagaaggggaggggttacagactgtggtgcctacccccatcactgcttccctcagccataacaggaaatgcttccagactgcacacttttac

SEQ ID NO: 505553 - DNA, 98 bp, Homo sapiens
tcccacagccgcgtggagatcatggtcaaggaacagcatatgccatatatgagctggctgtggcttcatttcccaagaagcaggagtgacttcagtca

SEQ ID NO: 505554 - DNA, 100 bp, Homo sapiens
gctaccaagttttgggagatgggagatggtgctatacggtctttagggttacgtgaagtcaagtaaaatcgcacactgctacaagcctatcgtggaattc

SEQ ID NO: 505555 - DNA, 51 bp, Homo sapiens
tgaccaacccgaaaacattgctagatatttggagttcttacaacatggcag

SEQ ID NO: 505556 - DNA, 97 bp, Homo sapiens
cccaggctccaagaagcagctgaagtttgaaagtgtgaacatggctacgcctcttcattcccgtccatgccgagcccccgactgcagcattcaaagc

SEQ ID NO: 505557 - DNA, 98 bp, Homo sapiens
gcgggggggccttggtggaggtgacagagcatgtcggctgcgagtctgccaacacacaggtcctgcagttaagtgggcagaccaacatccacctcagc

SEQ ID NO: 505558 - DNA, 51 bp, Homo sapiens
gacttcatcctcccagacactacagaggggcttggaagaattctgtggaag

SEQ ID NO: 505559 - DNA, 76 bp, Homo sapiens
atgagtctgaaatatgtgctggggctgaaaagattggatcaggaccatgtgaggcccagttggaagcaaggcgaga

SEQ ID NO: 505560 - DNA, 90 bp, Homo sapiens
tccagctgtcaaatcaacaccaagtaacaaatgtggcaattattttggatctatcacctgtcatcataactggcttctgcttgtcatcca

SEQ ID NO: 505561 - DNA, 100 bp, Homo sapiens
ctgtgagcttggccttggagcgaggctatcacaagctgcaccagcttctaaccgacggggccttttccgaagtggttttagctgaagagaaggcaactgg

SEQ ID NO: 505562 - DNA, 100 bp, Homo sapiens
gtttgggactgccccggcaactccagggtgtctggtccacgacctatcctaggcgccatggtacgacagtgccagcccacagggccatcctggtggcccg

SEQ ID NO: 505563 - DNA, 82 bp, Homo sapiens
cgctctcgattctacagtggttttaacagcaggccccggggtcgcgtctacagcatgaccgacggagcccagcaagccttga

SEQ ID NO: 505564 - DNA, 83 bp, Homo sapiens
ctcggtattggagctgaaggcggcggcagagaacttgccggtgccagctgagcttgaaataactgtgaatgtcccagatgtag

SEQ ID NO: 505565 - DNA, 75 bp, Homo sapiens
ggccaacttactgcttcctgaactgggcagtgccttctatgacatggccagacttcacagagaatgcagttgtct

SEQ ID NO: 505566 - DNA, 71 bp, Homo sapiens
tcctcctagaaattccccccgaagaagactcccccacatctggcccgacggccatggaggctgaagagacg

SEQ ID NO: 505567 - DNA, 51 bp, Homo sapiens
cagagtgcagtgtgacctgcgggacagtacatgttcagtgctttgcgcgac

SEQ ID NO: 505568 - DNA, 100 bp, Homo sapiens
attccgcccggaggtgcgcacgaaacaaacctgcagcgctggccgagggcggctcagcttcggagggcgcgactccggggttttggccaaattgggcgag

SEQ ID NO: 505569 - DNA, 100 bp, Homo sapiens
catgtttctggacgcggatttttggcctcatactctgttatagataaacaaggttgctgttgaagaaatctggttgcagaacaccacggattgaattgga

SEQ ID NO: 505570 - DNA, 100 bp, Homo sapiens
caggtcacccactatctggatgccgggcaggtgcatctgcagacgcagcaggaggtgaagctgcgcatgacgggcatggcgctgcgggtggtgcgtaccg

SEQ ID NO: 505571 - DNA, 80 bp, Homo sapiens
ctgggggaccgcttgcagcggggacgcgaggacccgggctgggctttcctcacccggggacagcaatcagacctattgct

SEQ ID NO: 505572 - DNA, 100 bp, Homo sapiens
ctgccgtctgctcttctgcctcttgatctccgccaccgtcttcaggccagaatgagaagactttgggacatttcatgagtcattcaagcaacatttctaa

SEQ ID NO: 505573 - DNA, 75 bp, Homo sapiens
ggccggcatcgtctttccgtcctctgaggcgacggccgcggctgcacagatctgcaaatgagaaattcacaagcg

SEQ ID NO: 505574 - DNA, 123 bp, Homo sapiens
cgatgacgagctcacattcatcgagggagaagtgattatcgtcacaggggaagaggaccaggagtggtgggagaagaaactgaggcctggaatttgattaactcattcaaggttacccagttg

SEQ ID NO: 505575 - DNA, 75 bp, Homo sapiens
ctgacagccccagatagcaatgatgatgtgaaaacagaagctgtggctggaagacatgtaaggaatttgcataag

SEQ ID NO: 505576 - DNA, 82 bp, Homo sapiens
ctgtggaccagcaggatgatgacaaaggcaactgtgaggactaccttatgatttcctgtcaaaatgcagatcttcgtgaaaa

SEQ ID NO: 505577 - DNA, 97 bp, Homo sapiens
aacgacctgtggaaacctgtgatccattctcattaaataaatctctggatttccatgaggacaacttacaaggacctgtatggcctcattttagctg

SEQ ID NO: 505578 - DNA, 100 bp, Homo sapiens
cagaggattggacccacagggcagatgggccatgatcatagctttcacgtcggacatgatcccccgcctagtgtactactggtccttctccgtccctccc

SEQ ID NO: 505579 - DNA, 100 bp, Homo sapiens
taggctataatgtacttctttttagtacattggacagcatttgcttttaataacccacgaccagggcaactgggcaggttattgccaaaccagaatttac

SEQ ID NO: 505580 - DNA, 82 bp, Homo sapiens
ttttatcaacaaaggcaaaggattcggatttattaagcttaacaaaatccagtctcatagcagaggagaatataatgtttac

SEQ ID NO: 505581 - DNA, 80 bp, Homo sapiens
gtctcacgaggctgtcatcaccgccatgcccaagaataaaggttaaacccatccagagtaatggctgcggccttacccag

SEQ ID NO: 505582 - DNA, 100 bp, Homo sapiens
gcggaagtccccgaggcagcctccgcggaggagcagaagattgatcattcttagaagagctgctgtaacacataggggaagtgaaaactaacagatgaaa

SEQ ID NO: 505583 - DNA, 90 bp, Homo sapiens
aatgtttgagcgaattcctgatatagttttatggccaagcaccagtctgctgagtggcggtcgtgaatctgtacttgtagagtggcgcga

SEQ ID NO: 505584 - DNA, 75 bp, Homo sapiens
gtgcatgttagtgctcaagagcctcattatctaccacccgagatgccccaaggtaatactcagctggccttacag

SEQ ID NO: 505585 - DNA, 76 bp, Homo sapiens
cggaagaggcgtctgtgtcgcagcttggtctcagaggagcatcgctgggattcacagtctgagaatgaggcttcac

SEQ ID NO: 505586 - DNA, 101 bp, Homo sapiens
cccaatgctgaccaaggaggagcctgttccagaactgctggaagctgagaattatatccagatcgagagacagaagattctgaaagggttcaatgaaatga

SEQ ID NO: 505587 - DNA, 100 bp, Homo sapiens
tgaagctccagatggccagctgcagcttggacccagacatcagcattccaggtgtttaaaattatccaactgccatagagctaaattcttttttggaaaa

SEQ ID NO: 505588 - DNA, 50 bp, Homo sapiens
ccgctccgacggcggtccatcctggtttatcaccagatcttcaatctatg

SEQ ID NO: 505589 - DNA, 75 bp, Homo sapiens
cagctccagggaaggcactcaaaagtggggggcaggaaaggtgttgaaaagtctcctctagagctttggaaggct

SEQ ID NO: 505590 - DNA, 74 bp, Homo sapiens
gaacaacctgtcttggagcgcttgcaggtgaactactgagttcttcattatgtctgatggagattatgattacc

SEQ ID NO: 505591 - DNA, 83 bp, Homo sapiens
ctcagttggaagcagccgatccagcctgcggagcctgtggggcaggcacaatccctcgggggccaatgtgtgcctgtggtgtg

SEQ ID NO: 505592 - DNA, 101 bp, Homo sapiens
ctgctttcttcagcctatgtagacagccacaaatgggaagcaagagaaaaagaacattactgtcttgcggttaagaagattgtctaccaaatatagaacag

SEQ ID NO: 505593 - DNA, 82 bp, Homo sapiens
aggaggctaagaaagtggtgaatcccctgtttgagaaaaggcctaagaattttggcattgtttgcagaaaaaacttcagcat

SEQ ID NO: 505594 - DNA, 78 bp, Homo sapiens
aagacaattggtcaaaagatgcaaatggtgaaatgacaatggatgctctgttggctcgattgaaacttctgaatccag

SEQ ID NO: 505595 - DNA, 97 bp, Homo sapiens
acttcatcgtttgactggacagtaaagctttggacaactaagacaggtgatttggcttctgcacagttaggaggagcaccaaaccgatgggaggttt

SEQ ID NO: 505596 - DNA, 76 bp, Homo sapiens
gatcattctgcaagcaggcaacctgaatacagcaaactcattattacattgggtaagaaacaaaaaagaaagaatg

SEQ ID NO: 505597 - DNA, 100 bp, Homo sapiens
gttggacctcaggaatatactttactcaaattgaaggtgcttgagccatacccatctaaattaagagtgtcaatccatatctacaaggacagagactgga

SEQ ID NO: 505598 - DNA, 49 bp, Homo sapiens
tggtgtctcagtgcatgttacagacggccatcctgagacgacagggtcg

SEQ ID NO: 505599 - DNA, 82 bp, Homo sapiens
ccaagaagatcatcattaaggacggaggcacggaccaagaatcgccttcagccctgtctggtgcatccttggcagaaagtga

SEQ ID NO: 505600 - DNA, 99 bp, Homo sapiens
ccggtgcgctgcagctcccagcactctgtgtttggcttcaaccaggtctcgactcaaagtcctctggctcacagcctctcagccctgcagcattgtgga

SEQ ID NO: 505601 - DNA, 75 bp, Homo sapiens
ggcgcgcagagcagcctccggccgccgccgcgcaggcatgaacgctgctgtccgggctgtgacgcgcatgggcat

SEQ ID NO: 505602 - DNA, 96 bp, Homo sapiens
cggctcctgtcgatacgcagcccaaggtgtcatggagaaactccagctgggcccagagattctgcagcgggaaaatccaaggcttatttatgccag

SEQ ID NO: 505603 - DNA, 49 bp, Homo sapiens
gatatgtgatttctcagaaggaaagatggagttttgcccttgttgccca

SEQ ID NO: 505604 - DNA, 101 bp, Homo sapiens
gggccctgaggctgcaccaagtggcgaaggagccggctccaagttacagaatgtctgaaggggacagtgtgggagaatccgtccatgggaaaccttcggtg

SEQ ID NO: 505605 - DNA, 100 bp, Homo sapiens
tgttaaaggaacctctacaacgaaggtgaagccacggaagataagatacctgaaaaaagcggcagtctgcaacccagaagagggccttacttggaaccta

SEQ ID NO: 505606 - DNA, 100 bp, Homo sapiens
cagcagccgcccggaccgggcatggtgttgggcgccgggcccgcctcgcctgtctcggggagcccagtgtgaacgtggcatcactgacacaatcagaaat

SEQ ID NO: 505607 - DNA, 100 bp, Homo sapiens
tacaagatggacagggatgataattgggcctccaagatggacatttgggagcaataaaaataagaagaaaggaaaagccagaaaaatagagaagaaagga

SEQ ID NO: 505608 - DNA, 80 bp, Homo sapiens
caagccgctggcagccgcggatctcaccgccgctcagggtggagccccctgagctgcccgctgatctgcagcactggatc

SEQ ID NO: 505609 - DNA, 98 bp, Homo sapiens
ctcttcggcagcagctggatgacctcagagctctcaagcatgaacttgcctttaagctgcaggatatgggccctcacattttccaaacctgtccatct

SEQ ID NO: 505610 - DNA, 100 bp, Homo sapiens
ccacagttatgcactttaccctttttaatattggccaatcatcaagacaagccagcagctcgctcagtacaagagataatcagcaactgctgtgatgaga

SEQ ID NO: 505611 - DNA, 89 bp, Homo sapiens
cagaacctgtcgggctctccactcattacggtccacctcaagcacagattggattcgctaaatattgtaatggatcaaggagatacacc

SEQ ID NO: 505612 - DNA, 75 bp, Homo sapiens
ccggcgggtgcagcggaggcggcggcggcggcggcagtgacgtcgccggggaccatgcctggccggatgctgccg

SEQ ID NO: 505613 - DNA, 80 bp, Homo sapiens
atccgctgctcgcacgggagccagctgggtgacccctcctcctgtagagagtggtgctgccctctcgggatgtacctgca

SEQ ID NO: 505614 - DNA, 74 bp, Homo sapiens
aaaaaacccagctgaagaccactttagaaactcaattaaagcctacaaatacatttggcaagtacccaagggcc

SEQ ID NO: 505615 - DNA, 80 bp, Homo sapiens
cctaaatgcactctttcgaaagaaagccattggaaaagaagtttgttcgagtttcaggagaagcaactattggacatgta

SEQ ID NO: 505616 - DNA, 74 bp, Homo sapiens
aatacacttaagctgcagtcccaaaattaggggttcattgtagggaaggaagaaattcccacacattctttttc

SEQ ID NO: 505617 - DNA, 74 bp, Homo sapiens
gaaagtctaagttcatcaaaatcggatacagatacagggctctgtcagattcagggagttttgtatcttctcga

SEQ ID NO: 505618 - DNA, 89 bp, Homo sapiens
tggcgacgctctctctgaccgtgaattcaggagaccctccgctaggatgtgggaatgagtgacacagcaatgacatctttcctcggctc

SEQ ID NO: 505619 - DNA, 75 bp, Homo sapiens
gcctgctaaccaacggcaagctgccactgtgggcaaagcggctgggattcccctgaaaccaatgttggcccatcc

SEQ ID NO: 505620 - DNA, 85 bp, Homo sapiens
ctactgtgacttcagagacactgccaagcagccttagccctagtgtagagcaggaggatgcattagcacaacaggcctttgaaga

SEQ ID NO: 505621 - DNA, 74 bp, Homo sapiens
ccgatccagcctgcggagcctgtggggcagaaacagaaaccacactgccgaggaatggctcccaatggcttacc

SEQ ID NO: 505622 - DNA, 100 bp, Homo sapiens
gaagttcttctaaatcaggaatggattgaaatctaatgaaccgaaactttggatcagtacaatggaacatgaattttcaataaaggaacgtggatttgaa

SEQ ID NO: 505623 - DNA, 100 bp, Homo sapiens
cgtccccgctgctgtgcattggcccacatacttcttattggccaagatatgtctgctctttactgctggaattcggagcgtaatcaattctcttttgttc

SEQ ID NO: 505624 - DNA, 80 bp, Homo sapiens
tgccctgcagtacctgcagaaggtctctggagacatcttcagcagcccgctgatccagttccacctgctgcactccaagt

SEQ ID NO: 505625 - DNA, 78 bp, Homo sapiens
aagtcctgcgcttggggatcctctgtacgcccgttcactggcgcagacggggaagcggagccaacatgccagtggccc

SEQ ID NO: 505626 - DNA, 100 bp, Homo sapiens
ttggacattgaccccaaactgcaagaatacctcggcaaattccgacgtcttgaagacttccgagtagatgtcaaaatgcagatcttcgtgaaaaccctta

SEQ ID NO: 505627 - DNA, 75 bp, Homo sapiens
catggatgatgagcgccttaaggatctctttggcaagtttggagtccttcaataatgttaaacagtggctgcagg

SEQ ID NO: 505628 - DNA, 98 bp, Homo sapiens
tggaaaccagatgaagaagatgagatttcggtatcactaccattaaagttaacattcgtaatgccaattccctgggaggaggcttccattgctggacc

SEQ ID NO: 505629 - DNA, 98 bp, Homo sapiens
ccccgagaccgccgtcgctcggacgctcctgctcggctgggtcttcgcccaggtggccggcgcttcagcttagtcatccagtggagatttgtgaacag

SEQ ID NO: 505630 - DNA, 100 bp, Homo sapiens
cagagttcaaggaggccttccagctgtttgaccgaacagagcaaaatatgctgtgaattccatcaagaagaaagtcaacgacaagaacccacacgtcgcc

SEQ ID NO: 505631 - DNA, 83 bp, Homo sapiens
cgcttatgccttctactacctgagcagcattgccaagaatcttatggcaagggccttatatgacaatgtcccagagtgtgccg

SEQ ID NO: 505632 - DNA, 75 bp, Homo sapiens
cttacataaagcattttggactttatgcagcggaggaggagaaagagatggacctcccggactcggcctcgaggg

SEQ ID NO: 505633 - DNA, 100 bp, Homo sapiens
gtgtaaccaatatttccttggcaaatataattagacaactaagtagcctaagtgtgagcgccactttgaagggcatccaacccgcggctatccatgtgga

SEQ ID NO: 505634 - DNA, 99 bp, Homo sapiens
cgagaaggctggcgttagtgaagcgcgcccggcgtcacgggtcggaatctggcagatcttcgccgtagccagtcccgaggcacattcaccattagtacc

SEQ ID NO: 505635 - DNA, 82 bp, Homo sapiens
atcaacctcacgctgcacctgggatttttagactctgaggagcagttggagctaatccacattatggaaatggaaaccaccg

SEQ ID NO: 505636 - DNA, 90 bp, Homo sapiens
cttgtggataagcacaaagtcaagagacagcgattggacagaatttgtgaagacatatgtagagtgtgtcggtcagaaggaacacctgag

SEQ ID NO: 505637 - DNA, 100 bp, Homo sapiens
ctggatgccgcgtctccgcttctgctgcctgccgggcgggctccggtggccggaaccatattacgttcgttgcatcaaacccaatgacaagaaatctcca

SEQ ID NO: 505638 - DNA, 96 bp, Homo sapiens
gggctcccggagatgctaggtgtgccgatgcaacttggtcctgagaaaagggtgccagcgatgcctggatcgcctgtggaagtgaagatacagtcc

SEQ ID NO: 505639 - DNA, 76 bp, Homo sapiens
caggatgccaccgtggtggacgtggagaagcggaggaacccctccaagcactacggaggttcccctgaaggatgct

SEQ ID NO: 505640 - DNA, 101 bp, Homo sapiens
ctgttttgcagattggactacaagattgaggaacagttgactttggaaaagttgcatgagtggactaaacctgagaatctcgatttcattgaagttaatgt

SEQ ID NO: 505641 - DNA, 100 bp, Homo sapiens
gggagaaagactttgacttggacatgactgaagaggaggtgcagatggcactttccaaagtggatgcctccggggaggataaggaagcctgtgtgggtac

SEQ ID NO: 505642 - DNA, 90 bp, Homo sapiens
tggtgatggagattttgatgtggatgatgccaaagttttattaggtccttttggtgtgaaccatggggtggaacttcactcagatgtgat

SEQ ID NO: 505643 - DNA, 82 bp, Homo sapiens
atgtgagtgaccatgcagcaaaagaaggagggtcctctcagtgattaagattcgaatgcaggctcaaggaagcttgttccaa

SEQ ID NO: 505644 - DNA, 75 bp, Homo sapiens
gccacgtatccagagactgaatgaattggagatgctgccaagggaaaaattaagaagaagagaagagagaaaaca

SEQ ID NO: 505645 - DNA, 131 bp, Homo sapiens
gatatgaatgagtatcctaaaaaaagaaaaaggaagactctacacccttctcgttattcagttgaagactgggatagtttccaagctattttggatcatacctacaaaatgcatgtcaaatcagaagccag

SEQ ID NO: 505646 - DNA, 101 bp, Homo sapiens
catgtctgtacctactgatggtgctgtaaccacctcacagattccagcttcggaacaagagaccctgtagaaaacccctttggtgaaacatttggaaaaat

SEQ ID NO: 505647 - DNA, 100 bp, Homo sapiens
cggagcccggcccggaagctagcgggagatacagatgacccaccaagaattactcagaaccctgtgatcaatgggaatgtggccctgagtgatggacaca

SEQ ID NO: 505648 - DNA, 100 bp, Homo sapiens
agctagccggacgtcctccgactcaagggaactctaatgatccaggacaaagaagttaccctggagtatgtatcaagcctggatttttggtactgcaaac

SEQ ID NO: 505649 - DNA, 50 bp, Homo sapiens
gtcgtgttctgatcactactgacttgttgcctctgctgcgagaagttctg

SEQ ID NO: 505650 - DNA, 98 bp, Homo sapiens
caggatgggatccggctcctccagctaccggcccaaggccatctacctggacatcgatggacgcattcagaaggtgctggagaatctggtaaaagcac

SEQ ID NO: 505651 - DNA, 75 bp, Homo sapiens
tcgtaggaggctgtcctgtctgcaggtatggcctcacaagtcttggtctacccaccatatgtttatcaaactcag

SEQ ID NO: 505652 - DNA, 100 bp, Homo sapiens
aatcaattgtaaagtcatcgttgggtgtcatggagaaactccagctgggcccagagattctgcagcgggaaaatccaaggcttatttatgccaggctgag

SEQ ID NO: 505653 - DNA, 82 bp, Homo sapiens
atgttccgacgcaagttgacggctctcgactaccacaaccccgccggcttcaactgcaaagtgtctgtcacctgcaaatccg

SEQ ID NO: 505654 - DNA, 119 bp, Homo sapiens
gaagaaagcgagaaaggaacaggcgccttcaaaagcccacttggcgatgggttacagtaagagggttccgagtctgaggaagacataaccttgtgcctgcctgcccacctctctctctg

SEQ ID NO: 505655 - DNA, 75 bp, Homo sapiens
ggcacccctttgaagagaagattgtcagcagttcggttggatgccagtgagatccaggtggacgaaaccatcttc

SEQ ID NO: 505656 - DNA, 100 bp, Homo sapiens
gaggtggcacccccaaaggctcatgaagttcgaatcaagatcatcgcacccccagagcgcaagtactcggtgtggatcggtggctccatcctggcctcac

SEQ ID NO: 505657 - DNA, 82 bp, Homo sapiens
aaaagagatcaccgacaagatcaccacggacgagatgatcaaacgcctgaagattgggaaaatgaggtacgttagtgttcgc

SEQ ID NO: 505658 - DNA, 75 bp, Homo sapiens
cttgcttctttggagaatgatatcaaaccagtgtgatccctcacatccacaaatctctgattggaaagaagggac

SEQ ID NO: 505659 - DNA, 82 bp, Homo sapiens
aaacaccacgagaattccgcagcccacacggccctgggaggagcggggacactgaggacctctctccaaattggcctctcaa

SEQ ID NO: 505660 - DNA, 50 bp, Homo sapiens
aattgaagcagttcaagcaatttagcgacgagctggggctgcagaagaag

SEQ ID NO: 505661 - DNA, 103 bp, Homo sapiens
catgaactcgctcttcaggaagagaaacaaaggcaaatacagccccactgtgcagacccggaggtcagccatgtcatctgagcctcccccaccaccacagccc

SEQ ID NO: 505662 - DNA, 75 bp, Homo sapiens
gtacgggctgtcggccgaggtcaagaaccgggagcatcagatccatgctgctgctgactcggagccccacagctt

SEQ ID NO: 505663 - DNA, 75 bp, Homo sapiens
cggcaggagcgcgttgagggactcaggttcaggagaagtggcacctggtggaggacctgtcgcgactgctgccgg

SEQ ID NO: 505664 - DNA, 50 bp, Homo sapiens
gtcactccaacctcttttcgctggttatgaagacagtatggagtttccag

SEQ ID NO: 505665 - DNA, 90 bp, Homo sapiens
ccaaagaagagaaagacaaggatgaccaggaatgggaaagccccaggaagggaaaaggccgaggcatcagcgtgtgaagaccgcaaagac

SEQ ID NO: 505666 - DNA, 50 bp, Homo sapiens
cctgctcttcctggactcctgagcagagattctctttgtggccagatggg

SEQ ID NO: 505667 - DNA, 100 bp, Homo sapiens
tcttcgctctttgcatcttaactgcaggcagtgaaatcaactgtgcagaccatcactgttggaggagtgagcacatcacagtttaagacaattattcctc

SEQ ID NO: 505668 - DNA, 100 bp, Homo sapiens
cttggatctaaagaaacagttggctgtagctgaggggaaaccccctgaagcccctaaaggggaattagtgacccactgaccgtatttgaacaaactgagg

SEQ ID NO: 505669 - DNA, 100 bp, Homo sapiens
tctgtatttttcacccgagtcagcaccctcccagcaaccaggtgtcttcctgcccccgtccccagcagtggcaaacgaacgagtcctcgaagaagtgggg

SEQ ID NO: 505670 - DNA, 95 bp, Homo sapiens
agggcagccggcgggaggaacgctcactgtcagcgcctggaaacttgctcacgcgtttattcgacgatgcttggcctaccgaaaggaggaccgca

SEQ ID NO: 505671 - DNA, 100 bp, Homo sapiens
agatggcgccaggacgaaggccctactgggcaagctacaggaccgcactcagttcagtgaccgagacttagccacccttaagaagtattgggacaatggc

SEQ ID NO: 505672 - DNA, 50 bp, Homo sapiens
tgctgttgaggaaatggactggagtgtggcaccttatgaagctaggcagc

SEQ ID NO: 505673 - DNA, 90 bp, Homo sapiens
gcgggggcagccgctgagacggtttttcacaagttttctgaatttccagatcccatgtggggttcagattatgtgcagttgtcaaggaca

SEQ ID NO: 505674 - DNA, 82 bp, Homo sapiens
gcgaccaacaacattgacagcgtccatgccaccgctttcatcatcgtccagggagcctccatcgacctgcagaagacatccc

SEQ ID NO: 505675 - DNA, 94 bp, Homo sapiens
gaccgcgcgcagggcctgcagcgggagctggacggcgagcgcgagcggcgcgagaaattctccaaggagaagtacatcctggactcatcgccag

SEQ ID NO: 505676 - DNA, 96 bp, Homo sapiens
cgggaatcctctccaaagaaggaggagactgtagcaaacctgaaaggaagcggagagatgtcatgcaagtggccaacaccaccatgtccagccgaa

SEQ ID NO: 505677 - DNA, 82 bp, Homo sapiens
acggtgtggctggcggcctacggactcttcaccctctgcgagtctctgcgatatgataccagctattttgtggagtattttg

SEQ ID NO: 505678 - DNA, 75 bp, Homo sapiens
cgggagccggcgtgcgagcggcaggtactggctgtgatcgaacttctcaaccctcagagacttagatcttccacc

SEQ ID NO: 505679 - DNA, 98 bp, Homo sapiens
agtgccaaggggctagttgaggaatggcttcatgagaacattaaccaggtggtatttgttggaaatttcttgagaattaatacgatcgccatgcggct

SEQ ID NO: 505680 - DNA, 90 bp, Homo sapiens
cctgacttttggggtcctctggctgttgttcttttcttttccatgatatcattatatggacagtttaggtgggccacagttacatttcat

SEQ ID NO: 505681 - DNA, 51 bp, Homo sapiens
actttggcccagttgctctaacgaaaggccttgtgaaaaagggtaaagaac

SEQ ID NO: 505682 - DNA, 75 bp, Homo sapiens
cttagcgggtacctaccaggaggatcagggcaaggtccctctccagctgcaggcccaagtctgttttggtggtct

SEQ ID NO: 505683 - DNA, 50 bp, Homo sapiens
gctgccttctgtctagcccagaagaaatgactgctgtccatgcaggcaac

SEQ ID NO: 505684 - DNA, 75 bp, Homo sapiens
ctgccaagcagccttagccctagtgtagaggttcttcctcaagttcttcctcaaatgcaaccagaactgcctgaa

SEQ ID NO: 505685 - DNA, 90 bp, Homo sapiens
ccgtggcaatgaattcttctgtgaagtctcctactccctccctccagtactgcgagaactgtgacacccacttccaagattccaaccacc

SEQ ID NO: 505686 - DNA, 87 bp, Homo sapiens
ctgctggagcttgtcaccaccaggtagaatggaagaatctcacttcaattctaacccgtacttctggccttctatccccacagtctc

SEQ ID NO: 505687 - DNA, 98 bp, Homo sapiens
ctgcctgggggctgaggatgacaaaaaagccttcatagacacctagctcccctgtttgacaaccctaagttggataaggagctgcgggcaatgctgag

SEQ ID NO: 505688 - DNA, 100 bp, Homo sapiens
tttaattttagggtcctttatatagaagggagagtagcctccagctgcaccaacaagtagaaattatgcagaaatgagggaaaagcttcgcttacggctg

SEQ ID NO: 505689 - DNA, 100 bp, Homo sapiens
tggccacattcccccagggcactgtctgaagagctggagctggaattattaccgaattgtagccaggttccgctttgattataccaatgagagggccctg

SEQ ID NO: 505690 - DNA, 100 bp, Homo sapiens
cgagattccggttgagtaccaaacagtccagagactcatccccgccctgtgggagaagcacagtccacagattgtgaataagtggaatacagctctcatt

SEQ ID NO: 505691 - DNA, 82 bp, Homo sapiens
cccggctctgcatcgcgtcgccatgatgggccatcgtccagtgctcgtgctcatgttttaaccaaacagttgtggctactca

SEQ ID NO: 505692 - DNA, 83 bp, Homo sapiens
ggagaccctcacggagctgggcgacgagctgaccctgggagacatcgacggcagcctgcttctgcaaagtggtacgatcgaag

SEQ ID NO: 505693 - DNA, 74 bp, Homo sapiens
ttttcttggctctcgtcgcaccgggggtcctcggttgaaggtcgaggagctggaaggcgagcggagtcggctgg

SEQ ID NO: 505694 - DNA, 99 bp, Homo sapiens
cgctcaccccgcggccgcaccttcccgccttctcaggttattcagcttctcaaggctggaaaagcgaaggaagtttcctacaatgcactagcctcacac

SEQ ID NO: 505695 - DNA, 100 bp, Homo sapiens
gatgatccagcaaatagggccaaaacttgatgggaaaatcccggtgtccagagctcccaagcctgtgagcaagatgcgcatggccaccccgctgctgatg

SEQ ID NO: 505696 - DNA, 100 bp, Homo sapiens
tatttacctgaatcacatcgagccactgaaaattcaggtctatcatttggcaagtgtacgcttacgtgatctatgtctaaaactggatgtttcaaatgag

SEQ ID NO: 505697 - DNA, 49 bp, Homo sapiens
gaatctgaggagaatagtagagactctgcctgaagcaggacattctaaa

SEQ ID NO: 505698 - DNA, 110 bp, Homo sapiens
ccacaccgatcgcccgccgccatgggctcctcgcaaagcgtcgagatcccgggcgggggcaccgagggctaccacgttctgcgggagtgcatcatcgacgaggactgtgg

SEQ ID NO: 505699 - DNA, 125 bp, Homo sapiens
gtgattaccatggcgaggagtctctgtccgggggcctggctaaggaaaccctattacctccagatattgcggtggtggagatgagcgatgccttccggcagccgtccttgttttaccaccttggg

SEQ ID NO: 505700 - DNA, 90 bp, Homo sapiens
cttgggatctgcctcatcatggagctcattggtggcgtggtggccttgaccttccggaaccagccatcctgagaggcctgaagaagaaag

SEQ ID NO: 505701 - DNA, 83 bp, Homo sapiens
ttcgaaagctgggtttcccgggagatcccaggcggtgacagagtggagccatggctagagaggtggggctggtgtccgagcac

SEQ ID NO: 505702 - DNA, 75 bp, Homo sapiens
gctcgctgtatttactgggaactagtcttgcaggaagattgaagaattggaggagaaacttaatgatgcacttca

SEQ ID NO: 505703 - DNA, 100 bp, Homo sapiens
tggggaagacctgcgtcctttttcgtttttcggatgatgccttcaatactacctttatttccaccataggtatgttgaagaaagtacgcacatcttatct

SEQ ID NO: 505704 - DNA, 95 bp, Homo sapiens
ctcttgtgccctagcaccccgagaaccgtcagtttgagccagatgggtaaccaggagccgacaacaactcctgacgcaatggttcagccttttac

SEQ ID NO: 505705 - DNA, 75 bp, Homo sapiens
aaatgggagaagaggaatgttccctgacaatttcgttaaggctgccttggagttttcataagaaattgtccctgg

SEQ ID NO: 505706 - DNA, 75 bp, Homo sapiens
gttgaatcctgcagggactacaaggagcatctcaaagacaaattttggaattttattttctacaagttcattttc

SEQ ID NO: 505707 - DNA, 75 bp, Homo sapiens
ccatgaatacggatttagctgctggaaagaaccccgagatgcccctgtccttcacaataagccgaggattctggg

SEQ ID NO: 505708 - DNA, 88 bp, Homo sapiens
cgcgacaagtacgtggccgagttcctcgagtgggatgttcctcctgctgatcaagagaagctttttatccagaagttacgtcagtgtt

SEQ ID NO: 505709 - DNA, 96 bp, Homo sapiens
ggcggacgcgcgcagcccgcccgcccggcgaccagcaagaaatggcttcagacatacctggatctgtgacgttgcccgttgcccccatggcggcca

SEQ ID NO: 505710 - DNA, 100 bp, Homo sapiens
cttgagtgctatgttggaagcccaccgacgccagcgtcaccctttcttactccttggcactacgggcgggcgccgcagctgagggaaactctcctgcagg

SEQ ID NO: 505711 - DNA, 97 bp, Homo sapiens
acagtaaattatcaggaagatatcggcgacattgtggacttggcttcagtgaggcatttcagaagatggacacaaagaagaaggaggaacagttgaa

SEQ ID NO: 505712 - DNA, 51 bp, Homo sapiens
tcttcgctttggtgccataaagcacaagtgaagctgatgtggaggctgtca

SEQ ID NO: 505713 - DNA, 98 bp, Homo sapiens
cgaacccggctttcgcatttgggaccctgcagggggggattgacggtgaagatgctaatacctgcccagcatcgaccctagtgcgggtcccaagacca

SEQ ID NO: 505714 - DNA, 100 bp, Homo sapiens
tccgttgctgaccgccgactgtcaatggagctggaaaacatcgtggccaacacggtcttgctgaaagccagggaaggagcctgtgtgaaatgcagcaaag

SEQ ID NO: 505715 - DNA, 80 bp, Homo sapiens
cgccatcttggatccgcgggacaagaaaattcatgcgatgctgcacttaaaaggatgcttgttttgatgtcctgctcatt

SEQ ID NO: 505716 - DNA, 75 bp, Homo sapiens
ccgcgtcccgctcgctgggagagagcatttgacattgtgcagcaaagaaatggttatggagaagcccagtccgct

SEQ ID NO: 505717 - DNA, 83 bp, Homo sapiens
gagggaaagtgccgctttaaggagaactgcagggagtgcatccgccccaacccttttccccctcgtctcctgtgagaattccc

SEQ ID NO: 505718 - DNA, 104 bp, Homo sapiens
aaaaggcagaggttcttaccgaaagcagagctggtggagttgagatctataatggagatcgtaaaataaaggtttccaacaccctggaaagccggctggatctc

SEQ ID NO: 505719 - DNA, 89 bp, Homo sapiens
gtgaaagagactcggtgacagatacagacaacagtgagctgggacggagacaagctccagtgtgtgcagaagggtgagaaggaggggcg

SEQ ID NO: 505720 - DNA, 100 bp, Homo sapiens
atgttaatgaatggtgctatacttgaattttctaaggtgtcattagggggtgcagatgatgcctgggcagatgtggaggacgtcacggaggaggactgtg

SEQ ID NO: 505721 - DNA, 50 bp, Homo sapiens
ccgactcggaggacagcatccccccggagagatcatcttcagacaccaac

SEQ ID NO: 505722 - DNA, 100 bp, Homo sapiens
gacaatggtgatcgcattgacttgcgtttccaccccaagcccagtgaccttcacctgcagaccggctataagattggaggtggacacaaaggaagaggca

SEQ ID NO: 505723 - DNA, 83 bp, Homo sapiens
agctggacctctacctggcctacttcgtgcgtgagcgagcactccttgctcaagacccctccccagtacctacccttccaggc

SEQ ID NO: 505724 - DNA, 100 bp, Homo sapiens
cagacatcaagctctttgggaagtggagcaccgatgatgtgcagatcaatgacatttccctgcagcaccttgcagagtgaagtcaagcccatcctagaga

SEQ ID NO: 505725 - DNA, 82 bp, Homo sapiens
acagggcgctcctgagaccctccagcgctgcctggaggagaatcaagagctccgaggtctcctctgagcctccggcctccat

SEQ ID NO: 505726 - DNA, 75 bp, Homo sapiens
ctctcagcaagcaactttgagctgcacgttgcacaaggctggacggcagtctggaaacgaccaatgagatcttgg

SEQ ID NO: 505727 - DNA, 100 bp, Homo sapiens
ggctatgtagctggtgcgctgctcacggccattcactgcccatgctgagcgcctctcacacagaagctgttgtgaaggcagagcagcatctgctgaagag

SEQ ID NO: 505728 - DNA, 145 bp, Homo sapiens
ttacagaatgcagcagatatgcctgctaacatggataagcatgccctgaaaaagtatcgtcgagaagcctatcatcgtggaatgcagtagccctctgggcctgggatattgtggttgataactgtgccatctgcaggaaccacat

SEQ ID NO: 505729 - DNA, 82 bp, Homo sapiens
ttgctctccctcgagaagctccagatggcgtcttccgtgggcaacgtggccgacagcacagacaatgcagatcttcgtgaag

SEQ ID NO: 505730 - DNA, 100 bp, Homo sapiens
atcgtgatcccggcgacatactacctctggccccgagatcagaatgccggtcgtttatacgcaatgcagactggaatgaagatcgatagtaaaactcctg

SEQ ID NO: 505731 - DNA, 100 bp, Homo sapiens
ccacttctccccacagacctaggtactgaacgacacctgggtctccttcccttcctggtctgaggactccacgttcgtcagctccaagaagacaccgtac

SEQ ID NO: 505732 - DNA, 75 bp, Homo sapiens
tttgtctgcgcccacacgggtatcatcttctatgctccatacacagacatagggcctgattacattccaacagag

SEQ ID NO: 505733 - DNA, 74 bp, Homo sapiens
cccggacccaaagtgccatgtctttaatgtgaggaaatcctcattgacgattcaatttgttgaaggccaatttg

SEQ ID NO: 505734 - DNA, 100 bp, Homo sapiens
agcctgagcccgacattattcctgagatgatatcatcaagttgaatcgaaaggaagggaagaagcagaattttccaagactaaatagaagactcctccag

SEQ ID NO: 505735 - DNA, 75 bp, Homo sapiens
ctgatttttagaactccacatttgagctctcaaaggtctatggccctgtgttcactctgtattttggcctgaaac

SEQ ID NO: 505736 - DNA, 74 bp, Homo sapiens
tgggactcaccgctctggccagggtgcttttggaaacacatatataggatctgtattaatctcagtcaaccctt

SEQ ID NO: 505737 - DNA, 80 bp, Homo sapiens
gattgcatctgacagggcgagcagcctcctgacaaggtgatccgggcgggccccgcaggaattttatcccctcaccggcc

SEQ ID NO: 505738 - DNA, 100 bp, Homo sapiens
tcacagcacagttcctgggaaggtggagccaccagcctctccttgatcctgtttgaccaaactcagagatcaattaaggcacagcttcagaactttgtta

SEQ ID NO: 505739 - DNA, 100 bp, Homo sapiens
cttcagaaaaacatggcagctggggaagtggtttggacatgcacaccaaaccctgggttagagcaagttcataaaccagaaaaggtcacatggacggaag

SEQ ID NO: 505740 - DNA, 82 bp, Homo sapiens
catcagccggcagcccgggcgggtcccggggtgcgagcagcgcacttccggtgctgccttcacctgcctggagactgccttc

SEQ ID NO: 505741 - DNA, 90 bp, Homo sapiens
caagtaatggtgcaaagcctgaagtacttacaatttcatcagaaattcctaaaagaattcgaagtgccttaaaaaatgcagaagaatcaa

SEQ ID NO: 505742 - DNA, 100 bp, Homo sapiens
ctgtgatttggactccacagtgtctgctcttgccctggctttttacctagcaaagagagacaagagagacacctccaacttcgacaaagagttcaccaga

SEQ ID NO: 505743 - DNA, 100 bp, Homo sapiens
gcggaagaggaggaggaggaggaggaggtggcagtggaggagtgtgacagggatgatgaagaagacctgctggatgaagttggattccatgggttccaag

SEQ ID NO: 505744 - DNA, 100 bp, Homo sapiens
agaaacgctccttctcgattattgcacatggattaattgatgtatgttgagtttatggagctgccttttggtggcttgctttatctgcagtttttaagaa

SEQ ID NO: 505745 - DNA, 83 bp, Homo sapiens
tgccgctgtcgtctttgcttcagccgcagtcgccactggctgcctgaggtcatcgacatcctgagggggaaggccacccggcc

SEQ ID NO: 505746 - DNA, 100 bp, Homo sapiens
tgacgcagagtgggcggcggtggtgtcaatcctttcccatggtaccgtggcagactgtgctgttgttggcaaggaagatcccttaaaaggtcatgtcccc

SEQ ID NO: 505747 - DNA, 82 bp, Homo sapiens
aatgtatatgcaacaactgtggggacaccttacaaagagagttggaaactcaactattggaacaatgtactgttgacacaag

SEQ ID NO: 505748 - DNA, 90 bp, Homo sapiens
cagacctcggtgtccacgctgtccccgcagcccggcagcgtcaagagaacaatcggatgatgagactgaggagtcggtgaagtttaagag

SEQ ID NO: 505749 - DNA, 97 bp, Homo sapiens
caagtgcatgcagctcactgatttcatcctcaagtttccgcacaggtggtgagtcctggatcaaaaatgaagggctagttataaagcaggaagcctc

SEQ ID NO: 505750 - DNA, 76 bp, Homo sapiens
agcggtgaagaaaggatccaccgcggtatcagcagatgttgcacacaaacttggtataccttgctacaatagcaga

SEQ ID NO: 505751 - DNA, 98 bp, Homo sapiens
ccagaggatgatgatgatgatgactaacagtgcaccaattccagctggacatcactgtgaaaatgggacgggataaagtccgagaaatgtttatgaag

SEQ ID NO: 505752 - DNA, 112 bp, Homo sapiens
gaagaacccatcgggcagctacacatcttgaaagagaagctcttcctgtgagttacctggtaggagatgaattgtttgtggtcatggaataccttgctggggggtcactcac

SEQ ID NO: 505753 - DNA, 50 bp, Homo sapiens
cgagaggcccctgcccaacccggaggaatatcgataacttgatgacccca

SEQ ID NO: 505754 - DNA, 87 bp, Homo sapiens
tggctgcgtgccaggccgctgtccgcctggctctgaagcaccgacaaggcaagaatcacaagatgcgcatcattgcctttgtgggaa

SEQ ID NO: 505755 - DNA, 101 bp, Homo sapiens
atggatttgaggtctttgcacggtttggcagtgccatagctcctttgggagatctggaccaggatggtttcaatgaatctttagaacacgatgttcttgat

SEQ ID NO: 505756 - DNA, 75 bp, Homo sapiens
ggtctggagcatgcagcagccagaaagctcaggctctgtggatagcaactggatcgtgggtgccacgctggagaa

SEQ ID NO: 505757 - DNA, 75 bp, Homo sapiens
tgttattgataactatgtttatgaacataccctgatttatcgaggtgtgagagtcggagggttgaaagagtctgc

SEQ ID NO: 505758 - DNA, 75 bp, Homo sapiens
ccggggacggcgaggccctcatgtaccacacggatcgaatcatcaatttagttgttggcagcttaacatccttat

SEQ ID NO: 505759 - DNA, 75 bp, Homo sapiens
tctcctcctacccggtcacaggcagctttggacggaagaggagcaggacttggatggtgagaaggggccatcatc

SEQ ID NO: 505760 - DNA, 73 bp, Homo sapiens
tgaaacactggttgctcttggtgaagaacaaaacagacagagcgggatgccaccagcttgtccaaagggaagt

SEQ ID NO: 505761 - DNA, 100 bp, Homo sapiens
ctggccttgttgtccttggagctgtggtcactggagctgtggtcgctgctgtgatgtggaggaagaagagctcaggccctcgggaccaaggatcacgtca

SEQ ID NO: 505762 - DNA, 98 bp, Homo sapiens
agacgctgcccttccgcagcgatggcatcccggctggattttcctctacgtgcttcagtcttctctacacaaagagctgcaaaccaggtctttgtttt

SEQ ID NO: 505763 - DNA, 100 bp, Homo sapiens
cccgcggccggagagctggaggagaggttcaaccgcgccctggctaactcaggtgagatggagccgctatagtcctgaattcaaggatcccttgattgac

SEQ ID NO: 505764 - DNA, 129 bp, Homo sapiens
gtatctttcactgacatctggggatgtgaccaagcgccttctcattcagaagaactgcctcctcttgctcacgggctacattgagagacctcagctgattcgagcaaaagtgccaattgtgaagttcag

SEQ ID NO: 505765 - DNA, 96 bp, Homo sapiens
aatgaacaggtatctaaagaatagagtgaaacccttctcagaaaatgaagctcaactataaatttccagcaacagtgcacatggcgcatcaaaaac

SEQ ID NO: 505766 - DNA, 88 bp, Homo sapiens
gccaggcagggccggttcgtgcggaaccgccatggccgagccggcttcgaaattgttgccaaggtcagagaagtctcccagcccgact

SEQ ID NO: 505767 - DNA, 75 bp, Homo sapiens
ggtggacctgagcacctccaccgactggaaggaggcgaaatgacatggatttgattgacatactttggaggcaag

SEQ ID NO: 505768 - DNA, 100 bp, Homo sapiens
gacatcctggaagctgggaaatgtttctcaactcattggatgctaaagaaatatatttggaagtaatacataatcttccagattttgaactactttcggc

SEQ ID NO: 505769 - DNA, 122 bp, Homo sapiens
cctctccaagatctgccgagatgtacagaaaacactaggactaactcagcatgttcagggtgcattggatcgttgtgtgatggggataacagcagttgagattctaaacgcttgtgatgaag

SEQ ID NO: 505770 - DNA, 88 bp, Homo sapiens
ccgaccggcgccgggagatcctgggttgaaatcacaaagattagacacctttttagataggtgttcttcagcaccactgacaacacgg

SEQ ID NO: 505771 - DNA, 75 bp, Homo sapiens
gcctgcggagcctgtggggcaggatagagggaggaatcagcagcttggaaattcaagcacgtgatctggcgggat

SEQ ID NO: 505772 - DNA, 90 bp, Homo sapiens
aggctggagaatatggtgcagaggccctccacgtcatccgtccttggctcaggatttggagagcttgcaccaccaaaaatggcaaacatc

SEQ ID NO: 505773 - DNA, 82 bp, Homo sapiens
cagaaagcaggcgaacccgcggcgcaataacgttgaacaggtagttaagcccccccaaaacaagacggaaagtgaaaatact

SEQ ID NO: 505774 - DNA, 87 bp, Homo sapiens
gctgtcaggaggacgatttcctggggggcatggagtgcaccctggggcagaaaacctaaagacagctgctgatcggcaggctgagga

SEQ ID NO: 505775 - DNA, 98 bp, Homo sapiens
agctaaagcttttcttcagtaaacttcaaggagataaaggacgatgggttaaagtattgcacaatcagctggtccttttccacaatgccattgccgct

SEQ ID NO: 505776 - DNA, 83 bp, Homo sapiens
agtcattttactgtcaagacatttcttcggcattctgcaacaggtcctcgatgggcttcctggaatattggtgtgtttatttg

SEQ ID NO: 505777 - DNA, 73 bp, Homo sapiens
tttcaaagacagtagattgaaaaggaaaggcttggtaaaaaaggttcagtcagaagaggcagaagtggatgtg

SEQ ID NO: 505778 - DNA, 75 bp, Homo sapiens
cccgcaggaactcggcagaggagaaattcagacggctcccgagggtgctgcgataagcggttgtggacccgcatt

SEQ ID NO: 505779 - DNA, 98 bp, Homo sapiens
agaaagtgaggctggcccagggcagcggagcacgcgggctgctcatcgtcagcagggagaggctgctcccgtggaagtcgctgaccagcatcattgag

SEQ ID NO: 505780 - DNA, 99 bp, Homo sapiens
gaatatggccgtgatcgtgcccaaagaggagggcgtcatcagcgtctccgaggacaggtgatgatgaacagtctacacagatggctgcaagttgggaag

SEQ ID NO: 505781 - DNA, 80 bp, Homo sapiens
gcggtggagcgcagagcgggcgagcgcgccaccagctgaacaggccaaagccagactacagctggttcttgaagctgctg

SEQ ID NO: 505782 - DNA, 89 bp, Homo sapiens
ctagagtcctggggagcttctgtccacctgtcctgcagaggagtcgtttccagcccggctgattatgtttgagaccttcaacaccccgg

SEQ ID NO: 505783 - DNA, 75 bp, Homo sapiens
atcgaggcatgggggtccacactgcaatgtttttgtggaacatgtgatagactggagtgatgttagaaaacacaa

SEQ ID NO: 505784 - DNA, 75 bp, Homo sapiens
ccagaagtggtccagagcacacggccgataattgagggttccatttcccagatttgtttagtgaatgaccctagg

SEQ ID NO: 505785 - DNA, 76 bp, Homo sapiens
ggcgctgcctggcccaggcgcacacggaagtggttgacatgatgaaagaagcattagaaaaacttcagctcaatat

SEQ ID NO: 505786 - DNA, 99 bp, Homo sapiens
ctcggtctcccggcgctgctactgctgctgctgctccggccgccggcgacgcgggctgtcagcgactattttgggggcagctgcgtcccgggggcagga

SEQ ID NO: 505787 - DNA, 74 bp, Homo sapiens
cggctgagggaaaagcgaggcaaggcaggcgggagatacaactcgtcaacgaatcaaattcagtgatgacagag

SEQ ID NO: 505788 - DNA, 100 bp, Homo sapiens
gctgctgagtggtgacagtagcccagcccgccggccagaacattctagtatgccagtagaaaaaaatatcactttagaaaggccttctaatgtaaatctc

SEQ ID NO: 505789 - DNA, 101 bp, Homo sapiens
tggtgggagcaagtgtgctacagtgcttggctactggaaactggaattctgttcctccagaatgccaaggatctagtgaaaagccatttgatgtatgcggt

SEQ ID NO: 505790 - DNA, 75 bp, Homo sapiens
cggggttctccgggagagggggagtgcgcggcggccgcagctgccacaaaccagacctagaggatcaagacataa

SEQ ID NO: 505791 - DNA, 101 bp, Homo sapiens
tcacactggagatgttttgaagggcaggagcgatttggcaacatgacccgagtatactacaaggaagctgttggtgcttttgtagtctttgatatatcaag

SEQ ID NO: 505792 - DNA, 100 bp, Homo sapiens
aggggaccagaggaactcagccctgattgcgatggcccactgcgtgaccttggttcagctgtccatttcctgtgaccatctcattgacaaggacatcggc

SEQ ID NO: 505793 - DNA, 83 bp, Homo sapiens
atctgtgccacttagaggaagccaaaagtcaacgttggtgaggactgtccagtattcgatggcctgtttgagttctgtcagtt

SEQ ID NO: 505794 - DNA, 100 bp, Homo sapiens
aagtttggtgggagcattagcaaaggcttcaggaaatacccttgttagaatcaacttatcagagcaaacgccgggcccctcagatgagagctgcacccag

SEQ ID NO: 505795 - DNA, 76 bp, Homo sapiens
gggaaatgtctgccgccgccggctctcgggagcgcaacactgcaggttgggggccgtcccgctcctaaggcaggaa

SEQ ID NO: 505796 - DNA, 90 bp, Homo sapiens
gcaaggaaaagagccctggaatctgaagagacatgagatggtagacaaaaccccagggaagctgccaaagaatgtcgacgtcgaaagaaa

SEQ ID NO: 505797 - DNA, 82 bp, Homo sapiens
gcgccagcggccgagcgggcggcttcctggcctgggcgctccggtggcggcggagctggtgtcgaggacaagagaaccacaa

SEQ ID NO: 505798 - DNA, 83 bp, Homo sapiens
atgcaatgaaaaaagttggaagaaagggtgtcatcacagtaaaggaagctgcagtaaaggaagatgaagaagaagtttcagat

SEQ ID NO: 505799 - DNA, 74 bp, Homo sapiens
gcacccatccttattgctacagatgtagcctcccgtgggctagaggagaaggcagagcccccccaggctatgaa

SEQ ID NO: 505800 - DNA, 50 bp, Homo sapiens
gatatggtttctgaagtcaatatgcttgtcaaggtggctttggagaaaag

SEQ ID NO: 505801 - DNA, 90 bp, Homo sapiens
gtgaaggaagtggcatcatatcagccattacagcgaaaactcttcactgcagccaaagaggtgctgaaaaaatatttggagtccaaggag

SEQ ID NO: 505802 - DNA, 80 bp, Homo sapiens
agctgcgcaaagcttgcgaggtggcgttagatgcagaatcctgatacactatcagcaatgtcaaaccctagagcaatgca

SEQ ID NO: 505803 - DNA, 90 bp, Homo sapiens
gggacggcgcagtgttggcctgcatgcctgactgccacacacctccagaatcaggtgtctgaaaagctggagtgcaatggcgcgatctcg

SEQ ID NO: 505804 - DNA, 78 bp, Homo sapiens
ccatccacgcctgtagagtttgattcccgaaggaccttaactagaattggcagagggggtcgatttgggaggaaaggt

SEQ ID NO: 505805 - DNA, 100 bp, Homo sapiens
tcctcctcttcctcctcctcctccacctccggcttttgggggatcactgtcctctctcggcagcaggctggagccaacataaatgcagtggacaaacagc

SEQ ID NO: 505806 - DNA, 96 bp, Homo sapiens
gcgaagatggcagctgctgaggaggagccgaagcccaaaaagctgaaggtggaggcgccgcaagcgctgagtgaagggaatttggctacaaagcag

SEQ ID NO: 505807 - DNA, 80 bp, Homo sapiens
tggaggacgaacgtgttgtgcctgctgaggatggccggaggctcgccgacgaccttgtgttctggacttggtgcctcttt

SEQ ID NO: 505808 - DNA, 99 bp, Homo sapiens
aggtcctccatgcgcagtcatgagtcgcttcaagtttatcgctcatctttgggtgaaaaattgtcgggatcttctgcagtccagctacaacaaacagcg

SEQ ID NO: 505809 - DNA, 100 bp, Homo sapiens
tggacaaagacaagaggaaccagtgccgctactgcaggctcaagaaatgcttccgggctggcatgaagaaggaaggcctcctacacctacctctctctgg

SEQ ID NO: 505810 - DNA, 111 bp, Homo sapiens
cgcgctgcggcctggcggcttccaggcgcactaccgcgggggatatgagactttctactcggaatatcctgagtgttgcgtggatgtaaaacccatttcacaagagaagat

SEQ ID NO: 505811 - DNA, 101 bp, Homo sapiens
caaggatagccaatcggaccaaaaattcactcactttgcaatggaaggtggaggacttgaagtctcagctggtggcccaggatgactcccagaggctggtg

SEQ ID NO: 505812 - DNA, 82 bp, Homo sapiens
ggaccacagaggagcagcttctagcagtgcaaggtggtgttatcaaggagaagaaattcctgccttgaccagatgtgtggag

SEQ ID NO: 505813 - DNA, 100 bp, Homo sapiens
ctgttttcctaaaagactgaaatgggggcgaccattcttagaagtatgatgggcatcttccaatagaaataaaagctgttcctgagggctttgtcattcc

SEQ ID NO: 505814 - DNA, 90 bp, Homo sapiens
gtttgaacaaactcgaagaacagctgtggaaagaagttgcaaaacactggagttttatggacgaggagccccctacaatgccttgacggg

SEQ ID NO: 505815 - DNA, 83 bp, Homo sapiens
gtcctggcggtttttattaaggctgttcatgtgaaagacaaaatgctaagaagtttggaatcaggttccaatttcgccccttt

SEQ ID NO: 505816 - DNA, 50 bp, Homo sapiens
gaaatgtccggcaagatcgagaaagcagacaccatgaccacccttgatga

SEQ ID NO: 505817 - DNA, 82 bp, Homo sapiens
ctaaagtctgcgaggaggaagtcgcctctgtgctcgtgagtccagggatctaagacaggtgatttggcttctgcacagttag

SEQ ID NO: 505818 - DNA, 75 bp, Homo sapiens
tgcgagagcctcctcacttggcctcttctgaaacagtctccctggagcaaccatcagagcagtggctggggcact

SEQ ID NO: 505819 - DNA, 100 bp, Homo sapiens
ctctgctgcacatgcccttcacaatagcagcggagaaggtgtacaacacccgccatcaggccatcatgcagaagggggatacaaacataaagcccatcct

SEQ ID NO: 505820 - DNA, 100 bp, Homo sapiens
gggggcctcgccgaaccgcccagactcttcagggaaaagattctctcgggcctagccgtccttggaacccgatattcgggctgggcggttccgcggcctg

SEQ ID NO: 505821 - DNA, 50 bp, Homo sapiens
caggatcataaaatacatgatctggccagctgaggtgggtgtcctggttg

SEQ ID NO: 505822 - DNA, 100 bp, Homo sapiens
tctgctggagccaccagttcccgcaagcccagacaatgccggtggaggaatttgtggctggctggatctctgaggtgctgatactcaaagaaggtttaag

SEQ ID NO: 505823 - DNA, 75 bp, Homo sapiens
ttcataatcagggtcttgcagccattgaaaagtgtggagaagctgctttaaatcaaatcaccgatgttcatatgg

SEQ ID NO: 505824 - DNA, 51 bp, Homo sapiens
gcagtggtcgcttcttctccttggcttaagtccactccccgccctaagttc

SEQ ID NO: 505825 - DNA, 97 bp, Homo sapiens
ctctgcgcgccggggcctcgaggctttttttctccagccgagaggacgcggctgtgatatacgaagcatcaacaaagagagcattgtggatgtagaa

SEQ ID NO: 505826 - DNA, 100 bp, Homo sapiens
caggaagtgtgctttcatcagacaaccagtttaatgaagagtgcctggaagagctgggatgtctggttgagtcctatggcatgaatgtttgccaaccaac

SEQ ID NO: 505827 - DNA, 87 bp, Homo sapiens
tgacccagaggagagttctccaaacatgatcgtttactgcaaacatgacgtatcccagactttactcaaggcaacactggacagtgt

SEQ ID NO: 505828 - DNA, 100 bp, Homo sapiens
gctgtagcctggaggctccgggcgcggggaagtcatgctcgcttcacggaggcaatagctagccgagtttcagattgccaaaagacaaaacgggtaccac

SEQ ID NO: 505829 - DNA, 83 bp, Homo sapiens
ctgccctgtggcctcgctcctcggaggcggagctcccacctccatatacagccattgccagtccagacgccagtggtattcca

SEQ ID NO: 505830 - DNA, 75 bp, Homo sapiens
ataaggagatcatagcagagtacgatactcaggtcaaagcccttgaagataaggatggtcaaacaaaataatatc

SEQ ID NO: 505831 - DNA, 75 bp, Homo sapiens
catcaatgaggcctataaggagggaaaatctctgaaggaaatggaaacaccgttgtcagcacttggaatacaaga

SEQ ID NO: 505832 - DNA, 74 bp, Homo sapiens
tgagattcggtaacccccttctggtccaggttttaattacaacaagaacggctgctgataattttagcacccag

SEQ ID NO: 505833 - DNA, 75 bp, Homo sapiens
tgccctggctccatgcagtttatgcagcactgggagcgggtgtatttacattgatggagtctcgctctgtcgccc

SEQ ID NO: 505834 - DNA, 83 bp, Homo sapiens
cttagctgtgctcgcgctactctctctttctggcctggaggctatccagcgatcatccagcagctcgtcaacggcatcatcac

SEQ ID NO: 505835 - DNA, 75 bp, Homo sapiens
cccctggacgaccaggtcatcctgctgcgggcaggtcagtcattggcaccatgaactggaataaaggtggtcctg

SEQ ID NO: 505836 - DNA, 100 bp, Homo sapiens
aaccactgcgtctccttatctggacacgtgcaggctgtcccacagaacaacgagaagcttcaggagagcccgtgcatcttcgcattgacgccaagacagg

SEQ ID NO: 505837 - DNA, 75 bp, Homo sapiens
accatggtctacaagactctcttcgctctttgcatcttaactgcagattcttctgcacagtcagtatcctcggga

SEQ ID NO: 505838 - DNA, 100 bp, Homo sapiens
cagccgacatgtctctagtggcggaagccttcgtctcccagattgcagaaggacagaataacgggctcccagattcacaagccccaccaagaggatcacc

SEQ ID NO: 505839 - DNA, 101 bp, Homo sapiens
tcccagagtgttgggattacagatcttgagccagatgattgtgcatccatttacatctttaatgtagatccacctccatctactttaaccacaccactttg

SEQ ID NO: 505840 - DNA, 74 bp, Homo sapiens
gaggattcagggaataggagctggggagcccttctgcgccacagcgtcatcacgtagacataaccaagaaactt

SEQ ID NO: 505841 - DNA, 75 bp, Homo sapiens
tggaacttgccctgtctcctcgcagatgagaaagctgacttcatgagaccgaggatctcgttcgttgatcgatgc

SEQ ID NO: 505842 - DNA, 78 bp, Homo sapiens
gaaaagtcaatacaaaactaccatccttttgcagtttattgagagaacattcaattgatggcactggctgggctccca

SEQ ID NO: 505843 - DNA, 83 bp, Homo sapiens
ccggcgtctccgcagcagatcagggaccggctgctgcaggccatcgacccccagagcaacaaactatgttccaacttcctgtc

SEQ ID NO: 505844 - DNA, 82 bp, Homo sapiens
ttggaggaggaggaaggatgcagagagaaaggagaggttgcaatgaggtgtcgctgcagcagcatgcacttcttggtagcag

SEQ ID NO: 505845 - DNA, 90 bp, Homo sapiens
gtatcccatagctgtgagtggcgatcacgagaacaataaggccaagaaccccatgtggggctgtgacaggcagaaggatggctccttgaa

SEQ ID NO: 505846 - DNA, 100 bp, Homo sapiens
cgcggctcatgcgcggtgcacagaggcttgtttcacatctgtaacaacagatggctcggactcaaaagaacaaggccacagcacaccacttagggctgct

SEQ ID NO: 505847 - DNA, 98 bp, Homo sapiens
tccagactgaggaagacccggaaacttaggggccacgtgagccacggccacggccgcatagctgaaggcaggtacaatctctacacagcggaaggcaa

SEQ ID NO: 505848 - DNA, 50 bp, Homo sapiens
aggggacggccgtggccgtgttcgagattggtgctgaagacatggacggc

SEQ ID NO: 505849 - DNA, 85 bp, Homo sapiens
attttccctcctcaaactgactttgcagccacggagaggacacattcagctaacgtattttagcaggtggagtgaggttgaagat

SEQ ID NO: 505850 - DNA, 82 bp, Homo sapiens
taaagacagggatatgagtgaagaaaacacagagccaccctggaaagggggatatgagactttctactcggaatatcctgag

SEQ ID NO: 505851 - DNA, 100 bp, Homo sapiens
gtgatggagattttgatgtggatgatgccaaagttttattagacatagggcctgattacattccaacagaggaagaaaggagagtcttcgcagaatgcaa

SEQ ID NO: 505852 - DNA, 98 bp, Homo sapiens
aaaggattcgttacagccagagattgaggcaagaatctgcatcaaagagccctggaagcaatcatggctcaactgtgatgcctttagaacatgaagtc

SEQ ID NO: 505853 - DNA, 101 bp, Homo sapiens
gggcggcagcgatgttcggccaggtggctccaaggagaggaagcagtgatgcattgagataacaagtttaaaaccccggctaagccagaagagccaaagag

SEQ ID NO: 505854 - DNA, 124 bp, Homo sapiens
gctcgggtcgttgtggtgcgctgtcttcccgcttgcgtcagggacctgcccgactcagtggtcctctccacccggatcctggccatgaaggcctcgctctgcaagctgtcgccctgcacggtga

SEQ ID NO: 505855 - DNA, 100 bp, Homo sapiens
ccatgttattcatttctgtgcaaaacaggactggctgatactacatattccagatggccagaacacaaagcgtgaatccggaagaaaagttcaatctgga

SEQ ID NO: 505856 - DNA, 134 bp, Homo sapiens
ggaaggggcaagacgggttcagttcgtcatggggctgtttggaaagacccaggagaagccgcccaaagaactgacaatgcagatcttcgtgaagactctgactggtaagaccatcaccctcgaggttgagccca

SEQ ID NO: 505857 - DNA, 100 bp, Homo sapiens
ttaggggccagcagatgcaggaaaatttcgatattgaagtgtcaaaatccatagatggaaaagatggtcctagcagaagatgtgactcagactgcctctg

SEQ ID NO: 505858 - DNA, 89 bp, Homo sapiens
ataacacccctgctcctgctgctttttatcctacatggctttccaccaacctgggcatcctgacctgcatcgagtgttccggaatccac

SEQ ID NO: 505859 - DNA, 100 bp, Homo sapiens
tcgcagtctccctgctacttaccacctgccgccggttgccggaggccatcgaggaagtgaagaagactggagtccagagttgccaccagatgggatattc

SEQ ID NO: 505860 - DNA, 50 bp, Homo sapiens
aaacaacggggcagatgttaacattcagtcaggatttgcatgaagatgtc

SEQ ID NO: 505861 - DNA, 98 bp, Homo sapiens
atttggccagagcgttttgtactctggccatctatgaccggtttggccggttgatgtatggacaggaagatgtacccaaggatgtcctggagtatgtt

SEQ ID NO: 505862 - DNA, 145 bp, Homo sapiens
ctcagaccgtgcagaatgttacattgtcgctcactctgcccatcacgtgccacatttgcttggggaagaattaaacaaccaccatgtcgagcaaaaaggcaaagaccaagaccaccaagaagcgccctcagcgtgcaacatccaa

SEQ ID NO: 505863 - DNA, 50 bp, Homo sapiens
ctggcagccgccgccgtggaagaaaataagacctactcatctgtgagaac

SEQ ID NO: 505864 - DNA, 75 bp, Homo sapiens
gggagaggctgcagcggaggcggaagcaggactcggggcacttgggggcttctttcctgtcgttgttggctttat

SEQ ID NO: 505865 - DNA, 98 bp, Homo sapiens
tcctagtagaaaaagttcttgggacaaacttcatttgggtaaactagcgctcctttccgtaaccacgggaggcacggccgagatgtacacgaagacag

SEQ ID NO: 505866 - DNA, 88 bp, Homo sapiens
aactgcaggcgcggtggttccccagcagaaccactctgcatcgatggcagtcttgggcacgtccatctgtaaacctgctgagagctct

SEQ ID NO: 505867 - DNA, 101 bp, Homo sapiens
tgattactcagtctctaaaaagctaaggagtgatttgggccccgatgttggctatgaagctattggtcttgtggacagtagtttgcccacagttggtgttt

SEQ ID NO: 505868 - DNA, 100 bp, Homo sapiens
aggcagactcttcaaaacgcactcattcagtttgctactaggtggctgatttatgaagaacctggatttcagggtgttcctttcatcctggaacctggtg

SEQ ID NO: 505869 - DNA, 83 bp, Homo sapiens
ggaaagaagacaagagagaacgcaaacagtttgaagctgaggattttgaactgtggctgcaccatctgtcttcatcttcccgc

SEQ ID NO: 505870 - DNA, 75 bp, Homo sapiens
agctgggaaatggtgaatgtgccaggtctcggcgcggaagatggccggcggcgtggacggccccatcgggatccc

SEQ ID NO: 505871 - DNA, 74 bp, Homo sapiens
ccgcgccctgctccctctcagcacctgggcggacggtctatgttaacaatgaatgggcaaccagtgttggggaa

SEQ ID NO: 505872 - DNA, 86 bp, Homo sapiens
ccgggacctgctgctggacccggcctgggagaagcagcagcgcaaggccgcaccgagtccccggcaccatgtttgggaagaggaag

SEQ ID NO: 505873 - DNA, 100 bp, Homo sapiens
gtggacttcaagaaaaaggaagaactagaaaggctgaagaaacatgtaaaaggtctacttaacagatttctctatgaatcatcatcaagaactctgggag

SEQ ID NO: 505874 - DNA, 90 bp, Homo sapiens
gagaagaggaaaactctaccggtgcagagacagggtctcattatgttgctcaggatggacttgaactcctggagtcaagcgattctccca

SEQ ID NO: 505875 - DNA, 100 bp, Homo sapiens
gcagagaggagcagctggaagccgtggctgcgctctcttccctctgctgggcgtcctgttcttccaggggaaaagactactttgtgtgtatccattctgg

SEQ ID NO: 505876 - DNA, 75 bp, Homo sapiens
catgaaggacgtgcccgactggaagttccagaaagctgagtctgatctggattacattcaatacaggctggaata

SEQ ID NO: 505877 - DNA, 100 bp, Homo sapiens
ccgtgtcccccgccaactctgacctggccaattctgacgccctcaaggtcgccaaggaggtggacccccaggttgccaaagctctgcaggaatttgactt

SEQ ID NO: 505878 - DNA, 75 bp, Homo sapiens
gaaaaatccagagaccccctgaagattcgatgtcatgtggcctgtgttttggaccgtggttcgtacctatgctcc

SEQ ID NO: 505879 - DNA, 75 bp, Homo sapiens
tagtttcaaatacaagattgattgctgctgctacttctgtatcatatggaaaagaaggtgtgaaaatgaacttca

SEQ ID NO: 505880 - DNA, 140 bp, Homo sapiens
tgtccgctcactggggccaccctgaggaaggaccagcgggacgcctgcatcaaggaggccattctcttggcggagttcgccatgttcagcgggacccacgtggagcgggactttgtggaggcgccgtcgcagatgctgga

SEQ ID NO: 505881 - DNA, 98 bp, Homo sapiens
gggtgggggaagctggtaggcacgggcggctccgcagtgaccggactcgggggagaaatggaatctagttcatcagactactataataaagacaatga

SEQ ID NO: 505882 - DNA, 75 bp, Homo sapiens
aaggatttcagcaaatttggagcagggagtgaggatgtggcctggatgctgcccaatcttgcctagaactggctg

SEQ ID NO: 505883 - DNA, 74 bp, Homo sapiens
gggaaccaggtggccacccggtgtcggggagctgatggagctgatccgcagagagggcaggaggatgacggccg

SEQ ID NO: 505884 - DNA, 82 bp, Homo sapiens
caccgttcaacttctgctgactctgcttcctcctccgatacttcccgcagtcgggccaaatccttgtagctgtcttcttgcc

SEQ ID NO: 505885 - DNA, 87 bp, Homo sapiens
gctcctggaggtcagaggccctttcatcatcaggtctctaattaacagaagatggcaaagcccagccacagcagctatgtccttcag

SEQ ID NO: 505886 - DNA, 100 bp, Homo sapiens
caggatttggtctccacggtcaacgtggtatactcgcagacaacccaaccggtatacaatgctcctaatttccgaatggaaccagtgacagccctgggta

SEQ ID NO: 505887 - DNA, 51 bp, Homo sapiens
cggcttgccacagtccacatgtcccggagttatgatgtgattgctcaagcc

SEQ ID NO: 505888 - DNA, 100 bp, Homo sapiens
gaaactgttcagctcccacaggtttcagctgtgatgcagatccatccgccctagcaaaatatgttctggctttggtaaagaaagacaaaagtgaaaaaga

SEQ ID NO: 505889 - DNA, 98 bp, Homo sapiens
gtcagaacacacccacctcctacaagtgctcctgcaagcctggctaccaaggggaaggcaggcagtgtgaggcgctaagctgcaacgaaaacgacgca

SEQ ID NO: 505890 - DNA, 90 bp, Homo sapiens
attgaaatggacagtggagatgaagcctaagaatatgatcaggccattgcaatcatggaagtagctcacggcaaagatcatccatatatt

SEQ ID NO: 505891 - DNA, 100 bp, Homo sapiens
gagggactgagcgccagcccgtggcccggcagtgggggcctggctggctcggaagggactgcagccagctgaggtgggtgtcctggttggcaaagaccgg

SEQ ID NO: 505892 - DNA, 74 bp, Homo sapiens
attgatcccaagttgtcgacgaccgacagggtggtgaaagagccctatgagtttgtctctctggaatggctgca

SEQ ID NO: 505893 - DNA, 98 bp, Homo sapiens
aagttccggcgcatcctccacaccgacaccatctggaggaggcgttgccgtgagggtgctgcagggtgcacagctgatcgccgtggcctcctcggacc

SEQ ID NO: 505894 - DNA, 75 bp, Homo sapiens
ttcaaaaagttgctggatcagtgcgagaaccaggagctcgagggagcgagtcaaggccatgttctaccacgccta

SEQ ID NO: 505895 - DNA, 74 bp, Homo sapiens
caaggtctcctcggatcgcctggagaggcactcggacctgctcaaccaaatcccgggagatgagaaccctattt

SEQ ID NO: 505896 - DNA, 75 bp, Homo sapiens
tctgacatggaggatgatttcatgtgcgatgatgaggaggactacgacctggtcctcagaatggttggaatgacc

SEQ ID NO: 505897 - DNA, 80 bp, Homo sapiens
ccccattcctatctcgtacacttcttggcagtcatggacaagagctattgatagaagtttttcagaagaagtgaagtcaa

SEQ ID NO: 505898 - DNA, 100 bp, Homo sapiens
cacgacaattcggagaaagtgagggtagcttttgtggacatgctgttgaagatcaaagctgtgagggctgctaaggtgtgtgcagtggcctcagggatcc

SEQ ID NO: 505899 - DNA, 122 bp, Homo sapiens
tggagaagtaaaatttctggctctgacactgaaacattaggtggttttccagtagaatttcttatccaagtggaaaatcctgccttgcttcgttgggcctatgcaagaacaataaatgtcta

SEQ ID NO: 505900 - DNA, 50 bp, Homo sapiens
caagtacatgtttgctacaaaggtggtgaatcctgttacacctgggattt

SEQ ID NO: 505901 - DNA, 100 bp, Homo sapiens
ggccgagatgtctcgctccgtggccttagctgtgctcgcgctactctctctttctggcctggaggctatccagcgagccccggtggagttgagctcagag

SEQ ID NO: 505902 - DNA, 98 bp, Homo sapiens
aagaaagaaaattagagtgaatgtagttgcaccagcagatatatggagtgatcactcatttcagactgatccagatttgccgcctggctggaaaagag

SEQ ID NO: 505903 - DNA, 100 bp, Homo sapiens
gacgacgcctgcgaagatggccgctgcgtcctcatcggattccgacgcctgcggagctgagagaaataacatctgctttgctgccgagctcagaggagac

SEQ ID NO: 505904 - DNA, 96 bp, Homo sapiens
cctcagcaaccgctacatgcaggtctggttctcaggccttactgggctcctcaagtctgaagttgcagccggagtgaagaagagcggaccgctgcc

SEQ ID NO: 505905 - DNA, 74 bp, Homo sapiens
aaggactgcctgcctccaacaggttgacctgacagttcaagaaaaggagaaatatcttaatgtgtctcgctggt

SEQ ID NO: 505906 - DNA, 75 bp, Homo sapiens
aatgatgacccaagtatggaagactcagtggcctttgaggatgtggctgtgaacttcacccaggaggagtgggct

SEQ ID NO: 505907 - DNA, 98 bp, Homo sapiens
ggaggcagtagccaaacacccagatcttaccaatatatttgagtccttcctgcctcagttattggcctatcctaaccccatagatcctctcaatggtg

SEQ ID NO: 505908 - DNA, 82 bp, Homo sapiens
atcaattttgcatgagaggattgaacaagagattgagatggaaatgaaaggaaggatgcctgtggccctcggagagcacagt

SEQ ID NO: 505909 - DNA, 100 bp, Homo sapiens
ctcattgtagcctcaaactcccaggctcaagcagtcctaccatgtcagccttcccagtagctgggaccacaggttgaggagccttcgagaccatcagcgt

SEQ ID NO: 505910 - DNA, 98 bp, Homo sapiens
tctagcatgccagggggcagtacgcccgtcagcagcgccaatatgatgtcagtgacaaagcataaatcatggacaccagagaataaggtggacctcag

SEQ ID NO: 505911 - DNA, 73 bp, Homo sapiens
ccagtctttgaaggacaccaagaccacgtctgtagatcttttaccaccaatgtctcccctttcgtttgatcct

SEQ ID NO: 505912 - DNA, 82 bp, Homo sapiens
actggcaactgcagcccgaggacaagcggctggggatatgagactttctactcggaatatcctgagtgttgcgtggatgtaa

SEQ ID NO: 505913 - DNA, 100 bp, Homo sapiens
atggtgaaacaccactgaagcattgccaaggtgaaagaacttgtcctggacaacagtcggtcgaatgaaggcaaactcgaaggcctcacagatgaatttg

SEQ ID NO: 505914 - DNA, 98 bp, Homo sapiens
acggatcccaggaccctcttcgcgggcgattcgcgtagcctcagattttcagctgaactctcatctctcaacactggcaaatattcataagatctacc

SEQ ID NO: 505915 - DNA, 113 bp, Homo sapiens
ctccttcgagcgctacatggcccagctcaaatgctactactttgattacaagcctgtagtggtggagacacgcccagtggatgatcctactgctcccagcaacctctacatcc

SEQ ID NO: 505916 - DNA, 75 bp, Homo sapiens
ggaagggcattggagacccagggacctgcatagacaaagcagttgagatgcacacttgactgaaggaggacaggg

SEQ ID NO: 505917 - DNA, 101 bp, Homo sapiens
caagaacaatatcgacttccccggccacaactacaccacgaaagaccacagcaagattctttcattcgtctcctcctagcctgggggaccaggctcgaact

SEQ ID NO: 505918 - DNA, 75 bp, Homo sapiens
ccgcccgaccccgtcccgaccctggccgccccgagcggagcctggagtaccatggggcgcaagttggaccctacg

SEQ ID NO: 505919 - DNA, 118 bp, Homo sapiens
ggtttgagtccgcatcgccacagctgaaggctgcgagggactaagagcagaagttcgaaatttgagcaacccagccaagaagttcaagattgaagccaatgctgggcaactgtacctg

SEQ ID NO: 505920 - DNA, 98 bp, Homo sapiens
tggatcagctggtggacatctgtcgccctgagcgacacacaagaagttatgattacatggaaggaggggatataagagtgagaagactcttctgtcga

SEQ ID NO: 505921 - DNA, 101 bp, Homo sapiens
cggtgcattgtgggagcggcccgcggcccgttttcgggaggaggcggagggcgcaaagcgagccggcggcctcgagtatcctccacagaaatgaacaagaa

SEQ ID NO: 505922 - DNA, 82 bp, Homo sapiens
caagttttcacttatctcgaaagcctatcagcatagttaagggggatatgagactttctactcggaatatcctgagtgttgc

SEQ ID NO: 505923 - DNA, 75 bp, Homo sapiens
agccaggcatgtctcccgaggagtgcaggcgcttcaccacagacggtcgtcgtcccgcagacacacaatccagaa

SEQ ID NO: 505924 - DNA, 97 bp, Homo sapiens
ggacatggagatgaagaagaagattaacctggagttaaggaacagatccccggaggaggctgaagccgacgtagcttctctgaacagacgcatccag

SEQ ID NO: 505925 - DNA, 100 bp, Homo sapiens
tgttccttggccatcccaaagctattctgggggcaacagaggcagcaattccatttccgtgagggcgtttctagatgaagatgacatgagcttggaagaa

SEQ ID NO: 505926 - DNA, 153 bp, Homo sapiens
ccgaggactaggcggcggcggaagatggtgccgggggtcgctggctctgctgctgccgccggcgaaggaggaggcgttgccggttcatttgatgaatacagttcagaacttaaatctggaaggttggaatggagtcctgtgcacaaatctgag

SEQ ID NO: 505927 - DNA, 75 bp, Homo sapiens
gctacagagacgtgtctgatctaaaggtcactacaggaaaagatatcttcattaaagtgcaacagcacactgaga

SEQ ID NO: 505928 - DNA, 50 bp, Homo sapiens
ccgtcttctttgcctgcactaatgctgtgatgcagatccatccgccctag

SEQ ID NO: 505929 - DNA, 82 bp, Homo sapiens
cctcaaagaggaacaaagtcatcaagctagtggacatcacggacatccagaaggtgtccctacctgcaccggacgacggggg

SEQ ID NO: 505930 - DNA, 76 bp, Homo sapiens
ttggggtctgccttgactgttaccggctcaggaaaagccggccacgcagtggtggtggccctaggggatgttccag

SEQ ID NO: 505931 - DNA, 75 bp, Homo sapiens
ctgggttgaaacccgggcgccgccaagatgccgattgccttgggtccccagtgtttactcccatcaaggcagaca

SEQ ID NO: 505932 - DNA, 96 bp, Homo sapiens
aaatgcccacttcatggttagcaggctcagtagatgaaggcgtttctgagggcttgcctacacttcaaagcacgtctagcactaatgctcctccgg

SEQ ID NO: 505933 - DNA, 100 bp, Homo sapiens
cgccgtgatgcttggctgggcgcggcagctcatgatggagcagtccaagaagtcctccctcatggtggcccgcagtattctcaacaacaagctcatcagc

SEQ ID NO: 505934 - DNA, 100 bp, Homo sapiens
tagtacttcaagagcacagtcttatgtaagacatgggatgtagagctggaaagatctgcagaatcctgggctgaaagttgcttgtgggaacatggacctg

SEQ ID NO: 505935 - DNA, 110 bp, Homo sapiens
gccactgcaagttttctgggggctcgtgacaagcggggcgcagactaggcaccagcatgcagagtacaatcatttggggaagaatctacagttgctgatggacagagtgg

SEQ ID NO: 505936 - DNA, 74 bp, Homo sapiens
ctcgctctaaagacggaaccgccacagcactcaagatgaaacaggcgcctatttaatcgacagagaccccacct

SEQ ID NO: 505937 - DNA, 82 bp, Homo sapiens
accactcccaggcagtgcatatccgccctgtttgcagagctctcggtgcccgccggcttcctgctggccaccatccttggga

SEQ ID NO: 505938 - DNA, 100 bp, Homo sapiens
ttctgaaattattgatgggctctctgagcaggaggcctagaatatcctgcagtggtagagtttgctccattccagaagatagccaaaaagaagctgagaa

SEQ ID NO: 505939 - DNA, 97 bp, Homo sapiens
agcagccggtagacttaggtctgttagaggaagacgacgagtttgaagagttccctgccgaagaggatgaggaagatgaggaaatggtggaatctaa

SEQ ID NO: 505940 - DNA, 100 bp, Homo sapiens
cttcagctcctgctcccagggctccctggcccagtacagctgtgcggacccccagtggcatgtcctccgagtggcaggtgaccagaagtcagcagcttcc

SEQ ID NO: 505941 - DNA, 98 bp, Homo sapiens
cgacctcttccactccgaggaaatcaaggtaatcacagacctggaggagcagctaaaccagctgaccgaggacaacgctgaactcaacaaccaaaact

SEQ ID NO: 505942 - DNA, 83 bp, Homo sapiens
caccgagacggcgatccgggcgctcgagacttaccagagccacaaggtgagaattatgaagatgatgacctagtaaattctga

SEQ ID NO: 505943 - DNA, 83 bp, Homo sapiens
gccaccgaggctgaggatgatggtagattgccaggctgaaggtgatgtggccgccctcaaccgacgcatccagctcgttgagg

SEQ ID NO: 505944 - DNA, 100 bp, Homo sapiens
tgaaaggcttgaccccaactggcatgctccccagcggagtactttctggagggaagcaaaccctgcaaagcggacctcaagattcctggaaagaagcccc

SEQ ID NO: 505945 - DNA, 113 bp, Homo sapiens
tttatggatgtggctgctgggctgaaaatactggagctcataacccctactccacagctgtgagtacctcaggaataagacgagttggaagaagacctgatcaacaacttcag

SEQ ID NO: 505946 - DNA, 100 bp, Homo sapiens
gaccaggaccgtaggatgatgtttcctccgccaggtgtccttcttcacatcattatggaatcacccatttttcaccattagctgtatcactctaataggc

SEQ ID NO: 505947 - DNA, 75 bp, Homo sapiens
gatatctttctatttgatagactaacaaatggcatttattaatacagcaaaagaaatttatgaaaaaattcaaga

SEQ ID NO: 505948 - DNA, 74 bp, Homo sapiens
ccgggaggtcaacgaggtcatccagatgggaacagcgagagctgcccaacggacgtgtctattatgttgaccac

SEQ ID NO: 505949 - DNA, 74 bp, Homo sapiens
ggcctccccagccacgctttctgtacagcctgcagaactctgccactgcagagccccgccatggaagacacgcc

SEQ ID NO: 505950 - DNA, 82 bp, Homo sapiens
ctcggtgcagggctccgccccgtcgcctggaaagactgtgagagcctgatccgccgcatgctggtggtggaccccgccaggc

SEQ ID NO: 505951 - DNA, 99 bp, Homo sapiens
tcaggttcacgccaacagtacctcattgctctttggcgactcttattggggtctgtcctccagcctcagcagatgagacttttacgcatcatcttcagc

SEQ ID NO: 505952 - DNA, 75 bp, Homo sapiens
ctggggaacccgttcagctctccagtgggacagcgcatcgacctgcaatgcttcttttgccacccgagaccgtct

SEQ ID NO: 505953 - DNA, 75 bp, Homo sapiens
gtctccttagctgctcacatatggatactttcacagttcagtatatttgccttccctccatgatctccaacacta

SEQ ID NO: 505954 - DNA, 75 bp, Homo sapiens
gaagcggaggcttgttcgacccaacagcatcgttcctctttccaagaaggttctggccactgcatttgacacgac

SEQ ID NO: 505955 - DNA, 99 bp, Homo sapiens
ggcttgccctggtcttgctcggccgatgaagtgcagaggtttttttctgaacacagaccaccagtgcaaaacaagaaaaagcaccaagtaaaaagccag

SEQ ID NO: 505956 - DNA, 50 bp, Homo sapiens
agcgctttgatttacagcagctgcagcggaaggagagttttacatggaag

SEQ ID NO: 505957 - DNA, 90 bp, Homo sapiens
atgactgtatctggaaagaagcaaactatgggatttgaagtgcctgggttgggggccgtcccgctcctaaggcaggaagatggtggccgc

SEQ ID NO: 505958 - DNA, 82 bp, Homo sapiens
ccaaaaagctgaaggtggaggcgccgcaagcgctgaggaatagccaggccagaagaaggaaggcctgtggtgagtgggacag

SEQ ID NO: 505959 - DNA, 87 bp, Homo sapiens
tgtttccacgtgcggtgctcgtcgggagtgatcacctaccctacaggacttgtcagtcacatctgtaacctgctcactgaaactgcc

SEQ ID NO: 505960 - DNA, 83 bp, Homo sapiens
gaaaaaaccaacaccttcctgtgcagtcctgttggaatttcccagaagaatcagtgcggtttctgtggcagagcgagttgcat

SEQ ID NO: 505961 - DNA, 83 bp, Homo sapiens
actattttaagagaactagaagtggagttggcatgaacttaacagcagcagatactgtgatttttgttgacagtgactttaat

SEQ ID NO: 505962 - DNA, 100 bp, Homo sapiens
ccttgacctcccaaggctcaggtgatcctcctgcctcagcccccaagtagctgggacctacaggtatgggttcgaaggggtcatcctctccatctatggc

SEQ ID NO: 505963 - DNA, 73 bp, Homo sapiens
tattgtgtctaattctgctaacctgaaagtaatgcccaaggtggccgctgttcctccaactccccagccttta

SEQ ID NO: 505964 - DNA, 100 bp, Homo sapiens
gaaaatggacgagtaatcgcctgctttgattcattgaaaagacatattgatgtctttgactgttggaaaccttgcagagcaagaatttgtaaccattgca

SEQ ID NO: 505965 - DNA, 89 bp, Homo sapiens
tatacacacatcactaaaaattatccctactacaggactgcggacaagggctggcagggcccctcagcagaaggcagaacagaaccgag

SEQ ID NO: 505966 - DNA, 76 bp, Homo sapiens
taggcattctgatgggaacttgtgtgttaaagtaacagatgatttagttatgtctttggtggacttgggaaagagg

SEQ ID NO: 505967 - DNA, 98 bp, Homo sapiens
ggatctcgagataaaaccatcaagctatggaataccctgggtgtgtgcaaatacactgtccaggtccaagcagctcagtctgaggctaaggttgtatc

SEQ ID NO: 505968 - DNA, 100 bp, Homo sapiens
tttctcttgtggatatttaccctaccatgcttggaaaaagtgacccattttgtgtggtagaactgaacaacgatagactgctaacacatactgtctacaa

SEQ ID NO: 505969 - DNA, 73 bp, Homo sapiens
gtcattaagggatccatcctacagaagtcaaaggtcgtgataaacatatcaataatttgaaaaagaaatgcca

SEQ ID NO: 505970 - DNA, 100 bp, Homo sapiens
aggcgacctccccgcgttccatgcgcacagggacagggagccctatgagtttgtctctctggaatggctgcaaaagtggttggatgaatcaacacctacc

SEQ ID NO: 505971 - DNA, 83 bp, Homo sapiens
gcgcgactcgcttctttcggttctacctgggagaatccaccgccatccgccaccatgaaactatgttccaacttcctgtcaac

SEQ ID NO: 505972 - DNA, 100 bp, Homo sapiens
ctcggtctcccgccagcgcgtcgaaagcctgaggaaaaagcggccgcatatgaggccccaggattcctggcgaggtcctcctccccttttccagcagcaa

SEQ ID NO: 505973 - DNA, 100 bp, Homo sapiens
cccagcgccaccatccacgccagccgcaccatgccgctcctaagcctgcacagccgcggcggcagcagcagtgagagggcggaccccggaggcctgagcg

SEQ ID NO: 505974 - DNA, 126 bp, Homo sapiens
cccagatggaacaagggatgttgctgaacagttggagaagatctatgggtcagacagaattctacttaaagagtttaaagatgaagactggaacatgggcgatatagtatacacgctcacaaacag

SEQ ID NO: 505975 - DNA, 141 bp, Homo sapiens
gaattggtgaagaaatactctctgcccagcaagttcagtgactttttacttgatccatacaaggagggcctgaggctatggcaggaggagcaggagaggaaggtgcaagccctctcggagatggcatctgaacaactgaag

SEQ ID NO: 505976 - DNA, 74 bp, Homo sapiens
acagaatgccctgatccttagaggcagaggcagctcttcagcctatgggatggtggaagagagtgaagagcggc

SEQ ID NO: 505977 - DNA, 82 bp, Homo sapiens
gttacatcccgagaagtagctcagatctctgcaattctgtggtgttcttggtcacacatttatggagtttctgaagggcagt

SEQ ID NO: 505978 - DNA, 75 bp, Homo sapiens
agctctaagtacactcgtcttgaataggaatttgctgattcccttggaattccgtttttggaaaccagtgctaag

SEQ ID NO: 505979 - DNA, 102 bp, Homo sapiens
caccatgccgtccgccttctctgtcagctctttccccgtcagcatcccagccgtgctcacgactgtgccctgtccacggtgcctcctgcatgtcctgctgcc

SEQ ID NO: 505980 - DNA, 83 bp, Homo sapiens
ggacgtggttgaggaattcagcgatttatacaacgaggaaactaaatatattttgccaactttggaaaaagaattattcttgg

SEQ ID NO: 505981 - DNA, 100 bp, Homo sapiens
tggtggagccaaaatgctattgccctgtcttcatcaacatttaatcaacattccactgcccttctcccaaaaagatgtcttttcgaaaaatggatcccag

SEQ ID NO: 505982 - DNA, 100 bp, Homo sapiens
ccgtcgccagcggagcgaacccgagagcgtggagcgggctgggccagctgtggaggaagatgcagagtcagaagatgaagaggaggaggatgtgaaactc

SEQ ID NO: 505983 - DNA, 75 bp, Homo sapiens
ctcctcagcttgcagacggcctattgtgagacttcacctcgtgatcatgtaggtgagctcgtgaaacaatatgaa

SEQ ID NO: 505984 - DNA, 75 bp, Homo sapiens
ttaacaagcagagagctcacctaccacaaacagccagatatcagttttagagaatgtggcgtggagaaattctca

SEQ ID NO: 505985 - DNA, 74 bp, Homo sapiens
gacaagctgttcgcggcgaccggagagggctcctcgcacctaccccagcaactcaaattcaccacctcggactc

SEQ ID NO: 505986 - DNA, 101 bp, Homo sapiens
gagaggacagaggtgcctggggcaacctccaccttgacggttccagggcagagcatcaaccccaagttggcgggcctgattgggcggcacgggccccagaa

SEQ ID NO: 505987 - DNA, 100 bp, Homo sapiens
agagacataccggctcctgggaggagcagacctggcgcaggggaaccacagtggggcccgcaagaaactgaagaagtctgcgggccaggcatcgacatcc

SEQ ID NO: 505988 - DNA, 90 bp, Homo sapiens
gcagcccagccttgtcaggccagctccagttcccagagaatatggtctacaggtccaactgctgccactggcagtaatcgaagacttcag

SEQ ID NO: 505989 - DNA, 100 bp, Homo sapiens
aagtgttatgacatcgttccaaccagttcaaagcttgttgtctttgatactacattacaaaggaaaggccatgtgaggacacagtgagaaggtggccgtc

SEQ ID NO: 505990 - DNA, 82 bp, Homo sapiens
cgaccctggccgccccgagcggagcctggagctgacatcctggagccctctccacacccagacatgctgtgctttgtggaag

SEQ ID NO: 505991 - DNA, 51 bp, Homo sapiens
ccgacaagaacttcacgcgggagcagagaggtggagaagagcgagtacttg

SEQ ID NO: 505992 - DNA, 106 bp, Homo sapiens
gattgcccccacccctcaccacacaccccagatgatgaactacttccttgatgatgaaccaggtggaagggcagcagaagaaccttgtgcacgccattgagtccct

SEQ ID NO: 505993 - DNA, 82 bp, Homo sapiens
cgctacttccgggagctctttgggatccggccagatgattacttgagaggtggagaagagcgagtacttgagaaagaagagg

SEQ ID NO: 505994 - DNA, 75 bp, Homo sapiens
tgagccgctcttcccttacagtttctttgagcagtttgtggaagcgatcagcggttcaggaccatcatcctccat

SEQ ID NO: 505995 - DNA, 100 bp, Homo sapiens
gggcggcctgccccgccggagcagcatcatcaagtgaaaagctactgaagtatgaccactacctagtgccgttcactctatttgaattggcatctttgta

SEQ ID NO: 505996 - DNA, 101 bp, Homo sapiens
taactcatatatttaacccccctccaaaaatttgaacgccatgaccctgtggatgggagaattactgagaggcagtttggtggcatgctacttgcctacag

SEQ ID NO: 505997 - DNA, 51 bp, Homo sapiens
gaactacaagatgacggctctgacaggcagcgtggacattctcaggctgac

SEQ ID NO: 505998 - DNA, 90 bp, Homo sapiens
ggaaaagacaccaccagccctggaagtgttcgccagttactacatgaaaagataagagatgcttatactcacccacaatttgtgaccgat

SEQ ID NO: 505999 - DNA, 100 bp, Homo sapiens
gagcagctcatcacccagtacgagcgggagaaggcgctgcgcaagcacgctgaggagtgtggcaaaggagcagagaactttgacaagttcttcacacgag

SEQ ID NO: 506000 - DNA, 96 bp, Homo sapiens
aatatggctgctctttgccggacagcagagtcccagggcaattgaaggaacagactaaaaatcgtgtcctggaaggaaactacaggtactaccagg

SEQ ID NO: 506001 - DNA, 75 bp, Homo sapiens
agagcccatagcagtctgccagacaatagagcatatgggaggaagacaatggtcctataatgcccttggataaga

SEQ ID NO: 506002 - DNA, 75 bp, Homo sapiens
aatgccactcagctttgaggaaaagccagtttatatccaagacttagatgagggtcctaacctgattataaaaca

SEQ ID NO: 506003 - DNA, 51 bp, Homo sapiens
ctgcggcgcggggaccgctgtgctctcgctcatcagcatcggatcttccta

SEQ ID NO: 506004 - DNA, 100 bp, Homo sapiens
cggcgcttggcagccaggagctctgcattgaaggcactggggtggtcagaatggcttcaacattcctcaagtcaccccatgcccagaagtaggagagtac

SEQ ID NO: 506005 - DNA, 80 bp, Homo sapiens
ggacgaccaggtcatcctgctgcgggcagcaattctgtggtgttcttggtcacacatttatggagtttctgaagggcagt

SEQ ID NO: 506006 - DNA, 99 bp, Homo sapiens
ggagacggcctgggtgctggcgaagcggaggccggagagtgtgaacatggctacgcctcttcattcccgtccatgccgagcccccgactgcagcattca

SEQ ID NO: 506007 - DNA, 75 bp, Homo sapiens
agttgattgaaattatctctggtgctgcagctctcacaagctccgggtggataaggcagctgctgcagcagcggc

SEQ ID NO: 506008 - DNA, 98 bp, Homo sapiens
gcccagcggcctcacgctgtaaccctctgctggaaaaccagtagattcccagacatcgcgaagtgaatctgaaattgtgccaaaagttgctaaaatga

SEQ ID NO: 506009 - DNA, 100 bp, Homo sapiens
ctttatccgagcgctggattgcatgagaagatatatcattgtggtggaacatgatctaagtgtattagactatctctccgacttcatctgctgtttatat

SEQ ID NO: 506010 - DNA, 90 bp, Homo sapiens
aacggaccttttaccatgaatagttctactccttctacagggtctgcggaagagggagctgctgaaggagctgctaccagtcatcgggca

SEQ ID NO: 506011 - DNA, 98 bp, Homo sapiens
ccaagcttctgagggaggaggacaacaagtactgcgccgactgcgaggccaaagctgggcctgaactgatatctgaagagagaagtggagacagcgac

SEQ ID NO: 506012 - DNA, 82 bp, Homo sapiens
tcttctcatgcacagaggcaacaaatggcaactttctgagtgactggctactagggaaataaatgaatgtggaattgaggat

SEQ ID NO: 506013 - DNA, 75 bp, Homo sapiens
ctcccgcaccatggaggaggacgacagctacgatgagctccttcaggagcagcgtgcagatatggaccagttcac

SEQ ID NO: 506014 - DNA, 74 bp, Homo sapiens
aggtctatcacagcctcacctacctggggcagaaactaggggcttctttcctgtcgttgttggctttattagaa

SEQ ID NO: 506015 - DNA, 83 bp, Homo sapiens
ctggaggctggcggacaggcgacagcgacctgcggcagcaagagacagagcgacatgagagattggaccgcgggctgcactgg

SEQ ID NO: 506016 - DNA, 75 bp, Homo sapiens
gcggctaccagtgtaaagccagagctgagaacttggtcctgatgtctgaccatggagatgtgagcctcccgcccg

SEQ ID NO: 506017 - DNA, 98 bp, Homo sapiens
ggtcacagagtgcaccgtatcctgtcacttctggatgtgagggggcagtgcccaaaggaaatgccactaaagaattcatcgagagtttacagttgaag

SEQ ID NO: 506018 - DNA, 100 bp, Homo sapiens
agaactgcgccatcatttactgcaacgacggcttctgcgaactcttcggctactcccgagtggaggtcctaggcctacttacaagcctccagtctcaaat

SEQ ID NO: 506019 - DNA, 98 bp, Homo sapiens
agaaccctgtacaatttgatagtcattcgtaatcagcaggccaaagactcagaggagtgcctgtgaagaaaacggggtattgccctgaggcttatatt

SEQ ID NO: 506020 - DNA, 82 bp, Homo sapiens
cactcattcacttctagacgacaaaatgcaaaaaaggaggccaaagactttacctcggaatatacagaactggatgacagta

SEQ ID NO: 506021 - DNA, 74 bp, Homo sapiens
ctgcaggtctcggagccctcggggcgacgtcgtaaaccaggacgacctgtaccaggccttggccagtggtaaga

SEQ ID NO: 506022 - DNA, 51 bp, Homo sapiens
ctctaccagccgcaactgcgagggctggagtctcgctctgtcgcccaggct

SEQ ID NO: 506023 - DNA, 98 bp, Homo sapiens
acctgcaggatattaaagtgaaattttctgaccctggacagcctatggcaatgcggtgtgcagagggtgcttggtggttctctcctgatggccccgca

SEQ ID NO: 506024 - DNA, 90 bp, Homo sapiens
atttgcgccatcatcctcatcatcatcatagttggaatcgaagcctcttaaaatggcagatgacttggacttcgagacaggagatgcagg

SEQ ID NO: 506025 - DNA, 75 bp, Homo sapiens
ccatggccgccgccgatgccgagctgagtcagtgctgattctctcaaatagagcttgaaggataaatcttcattt

SEQ ID NO: 506026 - DNA, 82 bp, Homo sapiens
gcctggggtagcggcggcgggagtcctggcgctctgcagctgctgatgcaaggaatcccctgggctcccgtccactccactg

SEQ ID NO: 506027 - DNA, 100 bp, Homo sapiens
tagacaaagaattgacaggcttgaacaacaaatggtcattcagaatgcttacggctattaataggaaatgcagaaccacagaatgcagtggatattcaag

SEQ ID NO: 506028 - DNA, 75 bp, Homo sapiens
caagaccttcgtggaaaaatacgagaaacagatcaagcactttgaccagccggttcctgctggaagctcctggtc

SEQ ID NO: 506029 - DNA, 101 bp, Homo sapiens
gcccctgctgaaagaccggcatgccctattctgtgggcttccgcgaagcttgcagccaatttactggagcagggatgacgtagcccagtggctcaagtggg

SEQ ID NO: 506030 - DNA, 82 bp, Homo sapiens
tccaacaacaattccgatggcaaagccgttgccaagtttgcagtgttgatgtgggtatttacctatgttggtgccttgttta

SEQ ID NO: 506031 - DNA, 75 bp, Homo sapiens
attctggatggcacccgaggtcatcaaacagtcggcctatgactcgaaggtccttaaaattctagtcagggcagt

SEQ ID NO: 506032 - DNA, 82 bp, Homo sapiens
agatgaagaaacccagcttgatatgttgtttcagctgtgagttcaacatggaggcaaatcagtgccccctggttgtggaacc

SEQ ID NO: 506033 - DNA, 100 bp, Homo sapiens
gtaccttcggatcatatctcatgaggctgtaggctccttcaacccgtggctgatagctgaaagaataagaaagccttgagttttgtgaaaaaccggagaa

SEQ ID NO: 506034 - DNA, 50 bp, Homo sapiens
gccgtggaggcagaggtggcatggggtgctgctagctgaggaggggatag

SEQ ID NO: 506035 - DNA, 88 bp, Homo sapiens
agaatccaggagttcattgaactcatccggcagaataagagactggacgctgtgaggtgagaagccctaccactgcaactgggacggc

SEQ ID NO: 506036 - DNA, 90 bp, Homo sapiens
cgagaccacagccaccactattctagcatccgtgaaggagcaggaacatcatttacagcgagcaatttcagcacagcaagtgtttagaga

SEQ ID NO: 506037 - DNA, 85 bp, Homo sapiens
ccatccgggaggcccagggaagggaaaggtggcccagacagcgtgtatgtcagcttgcaagcatttagccacatccttgatgcaa

SEQ ID NO: 506038 - DNA, 83 bp, Homo sapiens
gccgatccagcctgcggagcctgtggggcaggtgcagcggaactgctgcctgacgctctgcaacttcagcatccccgaggagc

SEQ ID NO: 506039 - DNA, 89 bp, Homo sapiens
gggtaaagtcgagtatctggtgaagtggaaaggatggcccccaaatgtggacgaatgtggaacctcgctctgtggctgtgttcccttgg

SEQ ID NO: 506040 - DNA, 113 bp, Homo sapiens
ggggcagcttggagatgtcgtcggatggggaacccctgagccgcatggactcggaggacagagggccatatcattcgagggagcagagcactgacagtggcctggggttaggg

SEQ ID NO: 506041 - DNA, 50 bp, Homo sapiens
gatgggaaacccggagaccaaatccttgtgggagagatctctgagctttg

SEQ ID NO: 506042 - DNA, 101 bp, Homo sapiens
ccagaggaaaatagtatgggaattcctattatgttaataacgacatgatagtcactgacaacaacggtgcagtcaagtttccacaactgtgtaaattttgt

SEQ ID NO: 506043 - DNA, 83 bp, Homo sapiens
ccttcggcagtccacccaccgccgccgcctcccagtaatgaagcagtagttctggcagactaaccctcccacagctaacaact

SEQ ID NO: 506044 - DNA, 75 bp, Homo sapiens
cagaaagcaggcgaacccgcggcgcaataacgggaaaagcttcactctgaccatcactgtcttcacaaacccacc

SEQ ID NO: 506045 - DNA, 83 bp, Homo sapiens
caagggaccaaggtggaaatcaaacgtattagaaaactactcggatgctccaatgacaccaaaacagattctgcaggtcatag

SEQ ID NO: 506046 - DNA, 101 bp, Homo sapiens
tggaacaagccaattataccatccagtctttgaaggacaccaagaccacgatgggcttccccaaggatttattgacattgctacttgagtgtgaacagtta

SEQ ID NO: 506047 - DNA, 90 bp, Homo sapiens
tatacactaggggttcatgttaaccaggccaaacagaaacctcgacctgtctcccagttggttgcacagcaggttactcagcagtttgtg

SEQ ID NO: 506048 - DNA, 75 bp, Homo sapiens
gtgaaagtggtgattggcattgtactgctagctggaagatttgaacatggaattcaatccttcagatcatcctcg

SEQ ID NO: 506049 - DNA, 100 bp, Homo sapiens
ggccgcacagtatagtgaagataaagccaggcaagggtttttcacagcatatggtcctgattatgtgctggaaatcacgccaagctgccggccagaccgc

SEQ ID NO: 506050 - DNA, 75 bp, Homo sapiens
gttgcggccgctgccccagggctgcggggacggttctgtacagagtaatgagatgtgtgacggctgcaaaccagg

SEQ ID NO: 506051 - DNA, 90 bp, Homo sapiens
ggagatatggcgcaactgcggcgctgtgtcccggcatggatatccggaacaacctcactaggttgcatgagctggagaattgctctgtca

SEQ ID NO: 506052 - DNA, 82 bp, Homo sapiens
cggggcagtttcagtctccaccccaaatgcaggaactgtggctgcaccatctgtcttcatcttcccgccatctgatgagcag

SEQ ID NO: 506053 - DNA, 82 bp, Homo sapiens
ttgtctcgctggcctgcgacccagccagccagcaacctggaccggagaactacgatgacccgcacaaaacccctgcctcccc

SEQ ID NO: 506054 - DNA, 75 bp, Homo sapiens
gatgggggagctggccagcgagagccagggctccaaagaactcgacggcgccccgctcagcgagctgtcctggcc

SEQ ID NO: 506055 - DNA, 88 bp, Homo sapiens
ccttttccctctccctttccctaagatatcattaacggagctcaagaaaaatgtgtattgcctcctatggacggctaccctcactgtg

SEQ ID NO: 506056 - DNA, 83 bp, Homo sapiens
gtttgataaaactaccaacaggcacagaggttccctctcccagcctgtgctgactcagccatcttcccattctgcatcttctg

SEQ ID NO: 506057 - DNA, 74 bp, Homo sapiens
gaaggcactgaagcttggggccaaaaaggtgttcagctcagagcggctgcaggacaagaagagctgggtccagg

SEQ ID NO: 506058 - DNA, 75 bp, Homo sapiens
tgtcattgatttttcaccatttggagaaccaatatttttgatcttcttggaaacagaattgttctacaaaggtat

SEQ ID NO: 506059 - DNA, 75 bp, Homo sapiens
gaccttccggagcttctcagaagacagagggttttcttttgagctgttccgatggccccactatggggctccact

SEQ ID NO: 506060 - DNA, 74 bp, Homo sapiens
gaggggcggcagcttctccgacactcgggttcatgacgctctcgatattcctgtgcagaaacctggaccacgtc

SEQ ID NO: 506061 - DNA, 75 bp, Homo sapiens
gtcagcactgactttcagctatggaatcggaacttgctactaccagcaccatgccctaccaatatccagcactga

SEQ ID NO: 506062 - DNA, 90 bp, Homo sapiens
gtccctttccagggagggaacaaagcccacaagcaccgattcaaggcctcttccagatgtagccctgactgggaagtgcactcgtgagtg

SEQ ID NO: 506063 - DNA, 100 bp, Homo sapiens
agcacccggcggacaagcggcgggacgccaggacgcggcgagcaagatctcaacagcaacggattcatttgtgactatgaacttcatgagctcttcaagg

SEQ ID NO: 506064 - DNA, 108 bp, Homo sapiens
gaaggagagaacagaggaacctatggagacagagcccaaagacctgaaggctgaaattgacaagttggccactgagtatatgagtagtgcccgcagcctgagctccga

SEQ ID NO: 506065 - DNA, 100 bp, Homo sapiens
gcgctccaaggcccgcccgggagggccggggccgcgctcagggagcaatggaccacagaaattctgcattgaaaaagttgggaaagaaaattggctaccc

SEQ ID NO: 506066 - DNA, 88 bp, Homo sapiens
caacctctctggctccagtgcaggcagccccctcagtggactggggggagaaggatgacaaggagtatgtgggctttgcaaccctccc

SEQ ID NO: 506067 - DNA, 90 bp, Homo sapiens
aaaagatgttgtggggagagccagggggcaagaaggggttaaaagtggaatgtatgttgtaatagaagttaaagttgcaactcaagaagg

SEQ ID NO: 506068 - DNA, 98 bp, Homo sapiens
ttgcccgggagaagaagctctatgccaatatgtttgagaggctggctgaggaggagaacaaggcattagtatcatttgaagacgtggttgtgaccttc

SEQ ID NO: 506069 - DNA, 74 bp, Homo sapiens
cgccgcgctgcgcatctccaacagcgacctgagcgagttgtctgctggttctcagcttgaagaagattctgcag

SEQ ID NO: 506070 - DNA, 132 bp, Homo sapiens
aacaaaatcctggaccttgagacccagctgagcagaaccaaaacggaattgagccagctgcggcggagccgtgatgatccctccaagcaatagacttgtcaacccattttacagatgaggaaaccagagccc

SEQ ID NO: 506071 - DNA, 100 bp, Homo sapiens
gggtcccttttgcctcagatactattttgaagagtgaagtcaccctgctgagaaatgaagtggcacagctgaaacagcttcttctggctcataaagattg

SEQ ID NO: 506072 - DNA, 98 bp, Homo sapiens
acaagagcgacctggtgcgctctcgtgaggtctcggtggatgtgcggctaaagaaggaagagaagagccgacaggagctggagaagctgaaacggaag

SEQ ID NO: 506073 - DNA, 80 bp, Homo sapiens
tcaacattttgatgttcctcccaggagacagctatatttgcccatgttattcaagggacaaaagtggctctcaatccagc

SEQ ID NO: 506074 - DNA, 97 bp, Homo sapiens
cattgatgctgatcgcatctatcaacacctaagggtgccgacgccaccgccgagcccatgatcctggaacagtacgtggtggtgtccaactataaga

SEQ ID NO: 506075 - DNA, 100 bp, Homo sapiens
ttgttcaccgccaaccccttcgagcaagacgtgggacgctgtgcagagctgcaagtccgtatcactgaggctgtggccacagccactgagcagagagagc

SEQ ID NO: 506076 - DNA, 75 bp, Homo sapiens
caacaccacaataatccacagccaaggcctcattgctacgatttcagagtaccctggtaatagctgagcatgcaa

SEQ ID NO: 506077 - DNA, 75 bp, Homo sapiens
tcgcatccgcctcactttggctcagcatgatccatcagcggttgcagttgctgaaaccagggtggttatgaccgc

SEQ ID NO: 506078 - DNA, 101 bp, Homo sapiens
ctcctgagtagctgggattacagatgccaccggaaatgtcatcttctccccagacgctggcttgcaagcacagcagcacccagaggctaacctatttcccc

SEQ ID NO: 506079 - DNA, 100 bp, Homo sapiens
ggatcacggatgtaggaagtgctcgatgcattctatttctcatcatttggctcataactggaggaaggcaccacttttggttcttgccaaatctgactgc

SEQ ID NO: 506080 - DNA, 98 bp, Homo sapiens
tggttttgaaaaatgtcaaaccagaccaatgggtgaaggatgaaaactttcggaagagaaagttgcctgtggtaagttcagttgttaaagtaaaaaaa

SEQ ID NO: 506081 - DNA, 83 bp, Homo sapiens
cccggtgttcccgcgctttatcaagattatcgagatgtgaacgagtgtgaaacactacagggtgtatgtggagctgccctgtg

SEQ ID NO: 506082 - DNA, 100 bp, Homo sapiens
cgggcctacggggcgggggcggggcggcagtgagctcggccggcaaccgagggacccgcgtccagggtttcgaaaaaacgatgaaatgaaagctatggat

SEQ ID NO: 506083 - DNA, 82 bp, Homo sapiens
aggcggcggacgggccggagggaggatgttaaagccccgcgattctgaagaatatttctgtgtaaaaagaattttctcaggg

SEQ ID NO: 506084 - DNA, 75 bp, Homo sapiens
tggaaggcgctgattcccagttctcaggttcaccggaacagcacaatccgccctggctgtgatgtgaatccctcc

SEQ ID NO: 506085 - DNA, 100 bp, Homo sapiens
ttggccctgtgatccctcaagactggtccacggagtgtatgaccacaaacagccatcaagttccgcagaaagggaaccttctcatttacaccgagtttgg

SEQ ID NO: 506086 - DNA, 100 bp, Homo sapiens
ccctcaccccgcacgcggcgacccggccgcctagcctccctcgctcaggcgcgaccgcggcgttctctgaggcgcgagggctggacttgtcccgagtgag

SEQ ID NO: 506087 - DNA, 75 bp, Homo sapiens
aaacgaactgaatactgtccgagaaattataggtgatgaactagtccagaaatggaatctatttggaatttgcag

SEQ ID NO: 506088 - DNA, 100 bp, Homo sapiens
gtactgctcctcagttaaacattgcatgacgatggtctgctggaagtcgttggagtatatgggtctttccactgtgctcagattcaagtaaaactggcta

SEQ ID NO: 506089 - DNA, 75 bp, Homo sapiens
cttggtggatgactttgagaagaaggcttcacaggctgctcaagaagccgagatcaatgccagaaaagccaaaaa

SEQ ID NO: 506090 - DNA, 118 bp, Homo sapiens
caaagctgtcctaggccaaccagagattcatctttcatgcagtgacatgttgataaaaaatgatggtgaccaagaatatggcccaggtgaccaaagccctggacaaggccctgagcac

SEQ ID NO: 506091 - DNA, 75 bp, Homo sapiens
aaactgcggaactcggccaagggaaaggtgcccaagtcggcactggatattgatgatgttaagaagttcaaaccg

SEQ ID NO: 506092 - DNA, 88 bp, Homo sapiens
aacaaagccacccagccaatgaagatggaggagatgtataagaaagctcatgctgctatacgagagaatccagtctatgaaaagaagc

SEQ ID NO: 506093 - DNA, 74 bp, Homo sapiens
ggaaattccatgtcattgtagcagagtgtgctcctttctgccagaactgttgggaatcaaagagctttccaaac

SEQ ID NO: 506094 - DNA, 75 bp, Homo sapiens
catcaatccaggtgatcgcaaatggaggaagttaacatccctaataggagggttctggttactggtgccactggg

SEQ ID NO: 506095 - DNA, 100 bp, Homo sapiens
tgctgagaatgagtttgtgatgctgaagaagatttataagattggccagggctaccttatcaaggacggcaagctgatcaagaacaatgcctccactgac

SEQ ID NO: 506096 - DNA, 90 bp, Homo sapiens
gaagggtaaccgagagatggtatatgactgcactagctcttcctttgatgggatacttttgtggaactctatgggaacaatgcagcagcc

SEQ ID NO: 506097 - DNA, 98 bp, Homo sapiens
ccagatgcgcgcgatgctggaccagttgatgggcacctcccgggacgctcttttgtgacagggacggcttgttgcgggcacttctcacccctgagaat

SEQ ID NO: 506098 - DNA, 75 bp, Homo sapiens
catcatcatcgcctcctgcgtcatcaacttaggcggtatggacctgtctgccaatcaggacgaggagaccgacca

SEQ ID NO: 506099 - DNA, 83 bp, Homo sapiens
ggggaacatggacatgaagaggaggatccacctggagctgaggaaccggaccccggcagctgagtgcctgtgaagaaaacggg

SEQ ID NO: 506100 - DNA, 75 bp, Homo sapiens
cgaaaggattggattggcatctttagatccctgcactaggtcagacaatcccctttggggtacaggaaacaaagc

SEQ ID NO: 506101 - DNA, 50 bp, Homo sapiens
cctgactgatgccttcgtggaggaaagccgggttagtaaagcagttgaag

SEQ ID NO: 506102 - DNA, 107 bp, Homo sapiens
gtttccgtcagtacgcgaaggatatcggtttcattaagttactgaatcaaatggatggatttgatactctgcatagagttaaaatgatcatggctacaaacagacca

SEQ ID NO: 506103 - DNA, 74 bp, Homo sapiens
atagtcgttgtcacgacatggattgaaaaaattctcactgatttgaagcttcctgcctgacacagctcacttca

SEQ ID NO: 506104 - DNA, 125 bp, Homo sapiens
gggggcccggattcccaccctggcctcacggaccttgggctgaccggtctgtctggcttcaggttcgagaacttgtcttggacaattgcaaatcaaatgatggaaaaattgagggcttaacagct

SEQ ID NO: 506105 - DNA, 100 bp, Homo sapiens
attccaaaatcatgctgtcggcatgaagagctacatgaagctgagaatgaagtttctagattagaagacataatgcagcatttaaaatcaaagaagcggg

SEQ ID NO: 506106 - DNA, 89 bp, Homo sapiens
gatcttagaaaagagttgtctgaaccaagcagcacgcgtatctatgccattgccaaggcaaacctaattagtgaagatattgaaagtgc

SEQ ID NO: 506107 - DNA, 75 bp, Homo sapiens
ggataacaagttttgtgcagattgccagtctaaaggaggaggtgcgccagtctgtaactcctgccgagccagtcc

SEQ ID NO: 506108 - DNA, 75 bp, Homo sapiens
gttacaaatgaacaaggatctcccaggatgctcacaactgtattcctgagctggacagtgagacagccatgtttt

SEQ ID NO: 506109 - DNA, 80 bp, Homo sapiens
gtccagatggctgttctaccgttatgtttcccaagataatgggaggagcatctagtgaagacatttccacctggacacct

SEQ ID NO: 506110 - DNA, 100 bp, Homo sapiens
tcttcaaagaatgatatttccaaagtttgcagaaaagaatatgagtccctgctatgtggatatttggtagcaatgactgatgtggaaactacatatgcag

SEQ ID NO: 506111 - DNA, 99 bp, Homo sapiens
agtgcctttgcattggtttggctttggctacacagcactggttgtttctggtgggatcgttggctatgtaaaaacaggacgccaggaaagcatgtgcag

SEQ ID NO: 506112 - DNA, 74 bp, Homo sapiens
caggaccaggcaccttctgtggaaggtggttgtgggaagagaagtttgcagaactgaaatggaggtcagagctt

SEQ ID NO: 506113 - DNA, 75 bp, Homo sapiens
acaccagaggagtctctctcatcctcccggattgctctgaggccaggagaatgaactctggaagcccagccaggg

SEQ ID NO: 506114 - DNA, 100 bp, Homo sapiens
gatggaagaatttccccagccctgtggatgctgcattccgtcaaggtcacaacagtgtctttctgatcaagatgactttcacacgacctgccaatcacag

SEQ ID NO: 506115 - DNA, 108 bp, Homo sapiens
agaacggggctgagcactcgctccccaccctgggcctcaccaataaccagctcttcttcctgggctttgcacaggtaacacaagtggcaagacagccgggaaccccta

SEQ ID NO: 506116 - DNA, 100 bp, Homo sapiens
tgaagacaaaaaggaaccattttctcagttttcgttctatgggaacctgtctccaaggaggtcgctttaccgcacgctgtctgacgagagcatctgcagc

SEQ ID NO: 506117 - DNA, 100 bp, Homo sapiens
tttgaagctttcttaactcagaaagaaacttccaacacagtttcccaaagaaaaatgggcaccaagggcaaagtcctcagaatggttggaatgaccctcc

SEQ ID NO: 506118 - DNA, 82 bp, Homo sapiens
ctttcattgtgaaagatcttctcatgaatgatcggtgctgggattacaagcgtgagctaccacacccagcgaggaagccaag

SEQ ID NO: 506119 - DNA, 100 bp, Homo sapiens
aaggatctgcttgatatgattgatgggaaataaggccaagattgcaaaatgtcctttaagaacaaaaactgggcacattctaaaatcaacacaagatact

SEQ ID NO: 506120 - DNA, 83 bp, Homo sapiens
atgcggtcccagtggccctcggcgcggcagcgctccagctcgctctccaccttcagcaaattgtggctactaatttgccccct

SEQ ID NO: 506121 - DNA, 90 bp, Homo sapiens
cgcgtctgcccggccaagaggcaaaggggaggttacgcagcaaaccatccagaaggacttgatcatcttccctgacgactgtgagttcaa

SEQ ID NO: 506122 - DNA, 100 bp, Homo sapiens
gaccgcccgcgggtgccgctcatctccatcgtgaccaaggagaaggccacagatgaagatatccttgctaaaggaaaacagtccatcaggagtcaggctt

SEQ ID NO: 506123 - DNA, 90 bp, Homo sapiens
ctcttcttcaccaacgaccagtactacgtgtacttcggcaccgtccgcgactgctatgaggattgtaagtgcctggaggccggggacctg

SEQ ID NO: 506124 - DNA, 101 bp, Homo sapiens
gatctctccagtttccatatgttgagattctacttattcatcagtttgttgtgcttgtcaagatcaggctttaatagatgaagatagactcttatcacggt

SEQ ID NO: 506125 - DNA, 83 bp, Homo sapiens
agtgtctcccggacctcttcattgcctaaagcattaagggatcattgcaagagcagcgtgactgacattatgaaggcctgtac

SEQ ID NO: 506126 - DNA, 75 bp, Homo sapiens
cagagatggggatacagctgattgttcaagacaaggagtcgagagaactcgatgccaccgcaacggtattggcga

SEQ ID NO: 506127 - DNA, 75 bp, Homo sapiens
ggcagaagggctacgaagaagtgcttcagcgggccaggaagcgcatccaggaggacacaatgtttgcacgaggac

SEQ ID NO: 506128 - DNA, 100 bp, Homo sapiens
ggacagtgggcagtgctcccggaacacaagctgtgaaacactagaacagtgcaaccctgaaactcgtcctgttgagaaaaaaataagatcagctcttcct

SEQ ID NO: 506129 - DNA, 100 bp, Homo sapiens
tgctggctgtgtgtgctgcaaaccgagacaagttcaccccgaagtctgccggcccccaaaggctctgcgcagaccagcactgtctcctccttcatccaca

SEQ ID NO: 506130 - DNA, 98 bp, Homo sapiens
ctggcctttcaagcaccagtcaatatccagaaaaggtgtgagcggtactgggcccaggagcaggagccactgcagactgggcttttctgcatcactct

SEQ ID NO: 506131 - DNA, 100 bp, Homo sapiens
aacactatctcttctatgacggagaatccgtttcaggaaagagaacaccttctgcagtggggaccatgtgtcctggcacagccctttggataacagtgag

SEQ ID NO: 506132 - DNA, 100 bp, Homo sapiens
tcttgatgcccaagttaaaggcgaaacccatcagaactgctagtggggccaagtgcaggaacatggagcatgcactgcgggagaaggccaaggccttctg

SEQ ID NO: 506133 - DNA, 87 bp, Homo sapiens
gcccaattcggggtcctccaattactgaggcatatgtaacagatgacacttaccgaagaaggcagatgcagaggaccatcactcgcc

SEQ ID NO: 506134 - DNA, 101 bp, Homo sapiens
gccccctggagagatactacgactacagcggggccttccggaaagaccacagcaagattctttcattcgtctcctcctagcctgggggaccaggctcgaac

SEQ ID NO: 506135 - DNA, 88 bp, Homo sapiens
gatgaaggaatttcttacattttagagatggaggaagaaacttcacaacagtatcaaagtgctctattttgggcagataaagtagctt

SEQ ID NO: 506136 - DNA, 101 bp, Homo sapiens
gctttgcagcggggacttcggcggcggcgcctcaggcacctcggcccggtccctgtgggccttgctcagagcggagaaagcatttgtttgtacaagatccg

SEQ ID NO: 506137 - DNA, 100 bp, Homo sapiens
gatccagacggcagggagtgcatcaaaggtgtgaacacaggttctaagctggtctatgtccatcaccttcttggagaaggagcctttgcccaggtgtacg

SEQ ID NO: 506138 - DNA, 90 bp, Homo sapiens
gcctgcactctgcgctttgagctactgggctgtgagctgaacgatgccactgccgccaggagccctgtaacatcagccatcgtcaacccc

SEQ ID NO: 506139 - DNA, 95 bp, Homo sapiens
gagggaagagattcagccagcacactcctcgcgagcaaggtgctggagaatctggtaaaagcaccattgtgaagcagatgaggatcctgcatgtt

SEQ ID NO: 506140 - DNA, 76 bp, Homo sapiens
tggctggaagtggaaactcacaggaatagccaggccagaagaaggaaggcctgtggtgagtgggacaggaaatgac

SEQ ID NO: 506141 - DNA, 82 bp, Homo sapiens
gcgagcgagaaggcacggagtcgccgcggagcgcagatggcggcagctatgccatccacgactcccaggcccccagtctcag

SEQ ID NO: 506142 - DNA, 100 bp, Homo sapiens
gagcggccaacatggcggaacgcaggagacacaagaagcggatccagacggttgatgatgaagcgccggccgtgtaaatgaagatcgggtgaggagcagg

SEQ ID NO: 506143 - DNA, 100 bp, Homo sapiens
gactgggaccgggacctgctgctggacccggcctgggagaagcagcagcgcaaggggacatcacccagaagggctatgaaaagaaaaggtccaaactcct

SEQ ID NO: 506144 - DNA, 100 bp, Homo sapiens
taatgcgactcaaagctgcacggcagtctgtttatgaggtctctaattaacagaagatggcaaagcccagccacagcagctatgtccttcagcagctaaa

SEQ ID NO: 506145 - DNA, 50 bp, Homo sapiens
cagcttctgcacacatgaccgccaaaacaacttcccgacaagtggcagca

SEQ ID NO: 506146 - DNA, 100 bp, Homo sapiens
gttttatctagccacatcttggaggtgtcttctctttagggatggtgaggttggaaaaaggctcctgtaaccctcctccaggatgaaccacctgccagaa

SEQ ID NO: 506147 - DNA, 83 bp, Homo sapiens
gaacggcagccttgactccccagggaagcagaatgaaaaagctattttgggaagatgttccgaaccccaagaattgttcctgg

SEQ ID NO: 506148 - DNA, 100 bp, Homo sapiens
ctcgaggccgctgctgctggcgctcctgtcgttgggcagcccatggaggacaggcatctctaatgaaaatatccgatagcaccttgaagactgtgccagc

SEQ ID NO: 506149 - DNA, 100 bp, Homo sapiens
cgcccctgtcctgggagtcccttggcccagacacccacctgacttagtggctcctctgcaggaaagccggttgttatgacaatggaaaacactatcagat

SEQ ID NO: 506150 - DNA, 75 bp, Homo sapiens
cgggtgctctgcgagcagcgctactgcgccgtgtgccgcgaggagctgcgccagacgtttgccttctctgtgcgc

SEQ ID NO: 506151 - DNA, 82 bp, Homo sapiens
agcagcggcggcggcaagacctctccccctcggaggcggcgggcggaggcggcgggccggatcacctcaacagtcacgtcag

SEQ ID NO: 506152 - DNA, 76 bp, Homo sapiens
gcttacagagatgaaaacaaccagcctatctcagactctgatgccagtatggactggagatgatgggagccagttg

SEQ ID NO: 506153 - DNA, 100 bp, Homo sapiens
acagctgctgcaatcgcttgggagagctcctgggccacccctcctttcaggtcaagcccgtggaccgggagcccgtggaccgggagccggtggtgtgcca

SEQ ID NO: 506154 - DNA, 50 bp, Homo sapiens
caactttcactgccatcggggacaagactgcctgcgctgctgacttaagg

SEQ ID NO: 506155 - DNA, 46 bp, Homo sapiens
agcagcagctacgggcagcagagcttgcagccaatttactggagca

SEQ ID NO: 506156 - DNA, 95 bp, Homo sapiens
gccccggcgccacctggagagaggccgcgtcctgggcagagcctcgcttttaaccttctggaacctgccaaacagtgcccagaccaatattgatg

SEQ ID NO: 506157 - DNA, 75 bp, Homo sapiens
cggagggagtccatctggagcggccaactgtgctccattgaagtgacttgtgaatcagccagtgtgatggctgcg

SEQ ID NO: 506158 - DNA, 87 bp, Homo sapiens
ggagccgggggcctgggacccgtcgcgtcagagccaggtgagaagccctaccactgcaactgggacggctgcggctggaagtttgcg

SEQ ID NO: 506159 - DNA, 100 bp, Homo sapiens
ctgctctaaaccttatagcctgcttatgggggaaggtactccaaagattcaggtttactcacgtcatccagcagagaatggaaagtcaaatttcctgaat

SEQ ID NO: 506160 - DNA, 100 bp, Homo sapiens
cacttctgagtacatcatttcatgtcatcctgttggcactgatgaagaacccttacaggaagccaaggaggcgctggaggcaaaggaacgctatatggag

SEQ ID NO: 506161 - DNA, 98 bp, Homo sapiens
cgcgcgggctgacgggccggagcccgcacggagcggccgggcgggacaggcctccggtgtggctgtctctgatggtgtcatcaaggtgttcaacgaca

SEQ ID NO: 506162 - DNA, 83 bp, Homo sapiens
cttgaatttggtgtggaagaaataacatcagtagttcagtatttgagaacacagtggctacggtgatggctctgcgcagggag

SEQ ID NO: 506163 - DNA, 71 bp, Homo sapiens
ggcacatttccgttgcaatggataagtttggattcagcccgtctggtaaacttgtccagattgaatatgct

SEQ ID NO: 506164 - DNA, 100 bp, Homo sapiens
tgcggtttccggctgcaccgcggcatgaatgtgcccttcaagcgcctgtctgggacttcaaggatgttgaagccgccttgcatgccatgaagaacgtggc

SEQ ID NO: 506165 - DNA, 83 bp, Homo sapiens
tcccagtgacgggtctggagtgcgtgggggaccggctgttggcggcggagcgtgctttggacaccatgaattttgatgttata

SEQ ID NO: 506166 - DNA, 100 bp, Homo sapiens
agcactggcaagatcggctggttcctgggaggccagttaaatgtctctggtcctcagaatggttggaatgaccctccagctttgaacagagtacccaaaa

SEQ ID NO: 506167 - DNA, 74 bp, Homo sapiens
attgatgcacaaaataagctggaaaaatctgaggagtacttgattcttcagaaaacctccaaagtagatgtgga

SEQ ID NO: 506168 - DNA, 98 bp, Homo sapiens
gttttgtaaagcaccgctcaagcgtgatgaaacagttcctggaaactgccattaacctccagctttttaagcagaaacctctgcgccatgagagccaa

SEQ ID NO: 506169 - DNA, 83 bp, Homo sapiens
cgcgtctcggaaaccggtagcgcttgcagcatggcggcagcagagacctccggggggcaacaagccccaacagcatggtgacc

SEQ ID NO: 506170 - DNA, 50 bp, Homo sapiens
ccccaccggaggtttatcacaagactgattcttgctattccaaatcctct

SEQ ID NO: 506171 - DNA, 88 bp, Homo sapiens
cgggccggggccggggcgccgctggcaggagcgcttggggatcctccaagcaaagtgcctgcattcgtgaggatgattgctcccgagg

SEQ ID NO: 506172 - DNA, 96 bp, Homo sapiens
aagatggacgtactttgtctgactacaatattcaaaagatctggcaccactccttctacaatgagctgcgtgtagcacctgaagagcaccccaccc

SEQ ID NO: 506173 - DNA, 115 bp, Homo sapiens
ggcggctaaggaaaggtgccacagcagagacgcgaaggagaggccctagaaccctcctcagagaaattttgaaattgccttcaagatgtttgatttgaatggagatggagaagta

SEQ ID NO: 506174 - DNA, 82 bp, Homo sapiens
gtgaaattgactaaatacatgctggccaaagtgagggaaaaagtgaaggatgtgcctgcccttgtggccaaatttgatgaga

SEQ ID NO: 506175 - DNA, 90 bp, Homo sapiens
aggtgatgatggacatcggctccacccgggatggatagaatgacagaagatgctcttcgcttgaatctgttgaagcggagcttggaccca

SEQ ID NO: 506176 - DNA, 102 bp, Homo sapiens
tccaccagcaaccatgagtggttccatgatgggaagtgacatggacttatcaaactggtttcaaagcacagagctcaagtaatttacaccagaaataccaag

SEQ ID NO: 506177 - DNA, 75 bp, Homo sapiens
tgtacctcggggacctgctggagacctgccatttccaggccttctggctgcacaagatccagcaggatgtggcag

SEQ ID NO: 506178 - DNA, 82 bp, Homo sapiens
atggaagctctgcggtcatacaaccaggagatagtgccaatcttggcagcattgagggacagagttcacaccgaagagagag

SEQ ID NO: 506179 - DNA, 75 bp, Homo sapiens
gtaggacttgtgcattcaaacatagcaactgaggcatggattccgtgaaggaacaacacctaaacccaagagggc

SEQ ID NO: 506180 - DNA, 100 bp, Homo sapiens
aattcatcaccatattaagctggatattcctgtttagtaaatatctttccctagctgatatctcccggggccaattcagcatctctacctggccatccta

SEQ ID NO: 506181 - DNA, 83 bp, Homo sapiens
ccttgtggagccggagctgggcgcggattcgccgaggcaccgaggcactcagaggagggcagctgcaatgactctccgcacgg

SEQ ID NO: 506182 - DNA, 108 bp, Homo sapiens
gtggagccggagctgggcgcggattcgccgaggcaccgaggcactcagaggaggcttgggcactgtttaaaggaaagttccgagaaggcatcgacaagccggaccctc

SEQ ID NO: 506183 - DNA, 100 bp, Homo sapiens
ggtgggcggccgcagctgcgaggagctcactgcggtcctaaccccgccgcagctcctcggacgcaggaatgaggggagaatcatacttcatcggaatgag

SEQ ID NO: 506184 - DNA, 83 bp, Homo sapiens
aaccgcttcgtgcaactctccgggcggccgcacctgccagattatctttctcaaggaatagatctttctggaatagaagtgat

SEQ ID NO: 506185 - DNA, 95 bp, Homo sapiens
atcgatctaagatggcgactgtcgaaccgatgcaggcctggggtagtctcctttctggactgagaagagaagaatggagaagcccctcttcccat

SEQ ID NO: 506186 - DNA, 50 bp, Homo sapiens
gaaaatgcgctcgggctggaccagcagtaatctcaggggcgatataatca

SEQ ID NO: 506187 - DNA, 83 bp, Homo sapiens
cgcagatcagaggtagtcggacctttcccgctggcgcgcagcctcagctaggcatcagttttgaatgtcaaggaatccaaagc

SEQ ID NO: 506188 - DNA, 80 bp, Homo sapiens
ggcgacagcagcgtgtccagggcggctgtggaggtgttcgggaagctgaagggagtgcatccgccccaacccttttcccc

SEQ ID NO: 506189 - DNA, 75 bp, Homo sapiens
ctgcctgtgtccctgaccatggctccctgcagtaccctttaacggatattagaaatggctactccccagtcaatt

SEQ ID NO: 506190 - DNA, 114 bp, Homo sapiens
gggggattgtgggagtctccgcgtcccgctcgctgggagagaggtacctctccttttccctctccctttccctaagaacatccagtcatggataaaaatgagctggttcagaag

SEQ ID NO: 506191 - DNA, 83 bp, Homo sapiens
gatctacggggctgacatcagcggctctttgtatgatgacacaaatttacatgtattggagaccagaccagaagcccttctga

SEQ ID NO: 506192 - DNA, 100 bp, Homo sapiens
cctcctgaaactctaccctccaggggatgaggaagattccatccatcattcgagtcattctgctgtgttgtcttctaaaccatcatcaaccagtgcatct

SEQ ID NO: 506193 - DNA, 76 bp, Homo sapiens
gacctgcagtccatgcaccagtttcgccaggacacaggactgagcagggggaggaacatttaagctgatggaagtg

SEQ ID NO: 506194 - DNA, 75 bp, Homo sapiens
aaaagcgagcgatcgagcgagcgcgcgcgcgaaaactccgggcaggaattgaatgatctggcacgggaccctcca

SEQ ID NO: 506195 - DNA, 73 bp, Homo sapiens
tttgggacatgatcctgtagaacttcggagtaaagatgacggcgccttgaggtaagctacaggcaacaccact

SEQ ID NO: 506196 - DNA, 75 bp, Homo sapiens
caagaagagggcggagcggagacgggagtattatgaaaagatcgatgaaactgattccaagacagcctccccgtg

SEQ ID NO: 506197 - DNA, 151 bp, Homo sapiens
agcaggatgaggaagtgagctcgctcacttgtgatgccctgactgagctgctggctaagatcaccaacacagacgtggaaactgttaaggcagcaataatagaagagcagaaacgaagtgaaaaggctgtggaagaggcagtgaaaagaac

SEQ ID NO: 506198 - DNA, 50 bp, Homo sapiens
cccaagtccctctactcgcgaggacatgaagaatgcaaccctctccctga

SEQ ID NO: 506199 - DNA, 100 bp, Homo sapiens
gatggaccttcagtctctgcattaacaaatggttttgacactccagaagagagggttgatccattttctaagaaagattggtatgatgtgaaagcacctg

SEQ ID NO: 506200 - DNA, 83 bp, Homo sapiens
tgcgcggcggggctgaggcggccgcggggcccgagcgcaggggacggcaaaacagaacagaaaggcggagataaaaagagggg

SEQ ID NO: 506201 - DNA, 101 bp, Homo sapiens
ggtgaatgtgtgcggacacactctgtatcatgatattagctggtttgacatcaagtcatttgtgagtcatcagatcttctcctgaaaatgggagacacagt

SEQ ID NO: 506202 - DNA, 101 bp, Homo sapiens
gaaggacagcggcaccgccagacggccagaaagttccgccatgagctggggcacggagctgtggggaggttcccctgaaggatgctaaggaatacgctgaa

SEQ ID NO: 506203 - DNA, 75 bp, Homo sapiens
tctttgactccttgctgaatctgagcaatgatcatgacgcagtcctgaggtttaatggggcacccacagccaact

SEQ ID NO: 506204 - DNA, 145 bp, Homo sapiens
gttcaacatcgtcttcacctccctcttctctctggaatgtgtgctgaaagtcatggcttttgggattctgctatcatggtgaacttacttcagattgtgcgggaccactgggttcatgttcttgtccctatgggatttgtcattg

SEQ ID NO: 506205 - DNA, 74 bp, Homo sapiens
aagcagttgctgttcgaaagcatcttgagaggaacagaaaggccctttctggttactgtggctttatggcagcc

SEQ ID NO: 506206 - DNA, 50 bp, Homo sapiens
atttggctgaggagttttcaatcccaggcaaacttgaagataaatctttt

SEQ ID NO: 506207 - DNA, 75 bp, Homo sapiens
aagaagaccgagagtcaccacaaggccaagggcaagtgatttgacaggaccgtataatagacgctggccccaaag

SEQ ID NO: 506208 - DNA, 74 bp, Homo sapiens
tgcagaactccacggcaagcagcagtaccgagacgagttgtactgctgtcacaggaaatggacgctggattaca

SEQ ID NO: 506209 - DNA, 75 bp, Homo sapiens
ggcacggtggatgaggactcgtcaggctccgactatggcctgctgtgcagttagccaacttctacctggtccccc

SEQ ID NO: 506210 - DNA, 89 bp, Homo sapiens
agagcctctggtgtccggggtgctttcggagcccgaagttttgctcccgacaatgcagatcttcgtgaagactctgactggtaagacca

SEQ ID NO: 506211 - DNA, 50 bp, Homo sapiens
aagaccttcaagcagcgccgcaccttcgtgttctaagaacggaagcatct

SEQ ID NO: 506212 - DNA, 100 bp, Homo sapiens
cgccgttaccttcttgctggcgttggtgggagccgtgctctacctctatccggttcgagaaatggctgctactaccttaagcggtctgctacagtgtaac

SEQ ID NO: 506213 - DNA, 75 bp, Homo sapiens
tgatgatatccttctcaaccttgtgggatgtgaaaactctgttactgaaggggttgtagaaggtgatttagctgc

SEQ ID NO: 506214 - DNA, 127 bp, Homo sapiens
gtgaaagtggagacggacggcaggatggattcacttggcgacatggcggggagctgggaagacggacaccgaggagagcgccatgagtagcgaccgcatggactgtggccgcaaagtccgggtggag

SEQ ID NO: 506215 - DNA, 82 bp, Homo sapiens
catcccggaagcgcgagcaaggccgccagatgtgcaggtgagaagccctaccactgcaactgggacggctgcggctggaagt

SEQ ID NO: 506216 - DNA, 100 bp, Homo sapiens
tgctcctgcagtctctctgtgtggctgtaacttacgtgtactttaccaacgagctgaagcaggtggttccttaaaaacagttattgctcaagatgaaaac

SEQ ID NO: 506217 - DNA, 140 bp, Homo sapiens
ggtcgacaagctggggacgcgtcctcagacgcagcgtctagtccctggccatagctccgccgctgcccggtacaccaggggttggaaaaaccacactaggcaaagaacttgcgtcaaaatcaggactgaaatacattaat

SEQ ID NO: 506218 - DNA, 101 bp, Homo sapiens
ctggagaagaagaggcgaggctcaggggtcccctgggctagccggcctgaggccaccctgcagggtgcagccgtccggccagtcggcctgcctcggggccc

SEQ ID NO: 506219 - DNA, 100 bp, Homo sapiens
aaattaccagtctgcattcactgaatgccttcttgctgccaattaaaactgtaggtgtgcaggaccacccagccttctgggccctccccccatggccaat

SEQ ID NO: 506220 - DNA, 100 bp, Homo sapiens
cgcgctgggtcggaagtgagcagaaatgactgctgtccatgcaggcaacataaacttcaagtgggatcctaaaagtctagagatcaggactctggcagtt

SEQ ID NO: 506221 - DNA, 100 bp, Homo sapiens
aataatgcacgccagctggtagaaattgcagccagggatattgagaaacttctgagcaacagatctaaagccctggtgaaataagcgggttttgaaaaca

SEQ ID NO: 506222 - DNA, 75 bp, Homo sapiens
atgttcgccccccggctgctggatttccagaagacgaaatacgcgagccactgaggcggctcccagctgcgttgg

SEQ ID NO: 506223 - DNA, 50 bp, Homo sapiens
ggaatgacaaacaaccagctcttcaggtcagcccaaggccaaccccactg

SEQ ID NO: 506224 - DNA, 73 bp, Homo sapiens
tttgcacctcgcagctaaaaacggccacatcgacatcatcaggaatggaagttggatacactttgtgacttgt

SEQ ID NO: 506225 - DNA, 75 bp, Homo sapiens
cgcgtccgccgattcctcctccttggtcgccgcgtccttggctggcgtgctcagctgtcgcaggccctggaggag

SEQ ID NO: 506226 - DNA, 83 bp, Homo sapiens
cttacaccatggacgcgttcatgcttggcatggggatgctgggtttggtgcacctcgatttggaggaagtagggcagggccct

SEQ ID NO: 506227 - DNA, 74 bp, Homo sapiens
catctacccatggacagacatgtcttcccatggagggcggcgactggcggcgcgatggacctgaccgggctcct

SEQ ID NO: 506228 - DNA, 75 bp, Homo sapiens
agtgcagctgcagaagcacttctggaagcctcctgacttgaactagaccttgggctctgaccaagaatgacagga

SEQ ID NO: 506229 - DNA, 100 bp, Homo sapiens
atcaataatgaaatgctgactaaggaacaaggatatttggccttgacattaaaggcagagactgtggcaatgaggcagctaagtggttcaccaacttctt

SEQ ID NO: 506230 - DNA, 76 bp, Homo sapiens
cccacatcatgaagtcggcggatgtggagaagtcatgcaagacaagataatctgccttccgaaaagagtgcagcct

SEQ ID NO: 506231 - DNA, 101 bp, Homo sapiens
atgaattgcagagatgtctgacacagtctggcattgctggaggatacaaacgagagaaggatattcctggactgactgatactacagtgcctcgccgcctg

SEQ ID NO: 506232 - DNA, 80 bp, Homo sapiens
tctaccgatgggaagtccttattattggccctccagatacactttatgggacaaatctgctcagtgtggatgaagatgag

SEQ ID NO: 506233 - DNA, 100 bp, Homo sapiens
ccatccatgggaagccctgctactgctggattagcgccagatgagtgagcagtttgccaggtacattgaccaacagatccagggtggcctgattggtgga

SEQ ID NO: 506234 - DNA, 74 bp, Homo sapiens
agaatggaactgtatgccagcagcttgttgtacaatcttgatgtggaagaaatggaggactcagaaccaaggat

SEQ ID NO: 506235 - DNA, 100 bp, Homo sapiens
agcgtcaaacttgttatgcagcatataacaggtgatttgtggagctatgatttcttcagtggtgaatttgtggtgtcacctgaaccagacacaagtgtcc

SEQ ID NO: 506236 - DNA, 82 bp, Homo sapiens
ggagttgaaggctgcagtgagccctgtttttgccaccacactccagcttggacagaatgttgctgcgggatgtaaaagctct

SEQ ID NO: 506237 - DNA, 75 bp, Homo sapiens
ctggccgctacctctgctgtttctggcaccaggtccagtgcgaggcattgacttccataagcagcagccactgtt

SEQ ID NO: 506238 - DNA, 90 bp, Homo sapiens
catctgcctggaggtctatcaccggcccgtggccatcggcagctgcggccacacgtcaaaatgcagatcttcgtgaaaacccttaccggc

SEQ ID NO: 506239 - DNA, 100 bp, Homo sapiens
cgtagacaccagctccgaaatcaccaccaaggacacaatgtttgcacgaggactgaagaggaaatgtgttggccacgaggaagacgtggagggagccctg

SEQ ID NO: 506240 - DNA, 75 bp, Homo sapiens
atttgatggccttagcatttcttactacaataatgagaaggtttgttggtggaccaaagtaagatctacagcagg

SEQ ID NO: 506241 - DNA, 75 bp, Homo sapiens
gctggcagctctctgtaagaaatatgctgatctttaacaacatgctgtaccccaaggaagacaaggagaaccgca

SEQ ID NO: 506242 - DNA, 88 bp, Homo sapiens
acaagtggacattgttattacctgtacaggtgaattcatgacacctttgactcttctactgtctcagaccttaggtaacatacctgca

SEQ ID NO: 506243 - DNA, 83 bp, Homo sapiens
ttcaaccttcgtattctgtggtgactcatctcgcacgtgacccccctccctcttcaaggttaacacagaaatctgcctcctgg

SEQ ID NO: 506244 - DNA, 51 bp, Homo sapiens
aagagaataagatttttggaagaaaaggcagataagttgctgtcacaggat

SEQ ID NO: 506245 - DNA, 75 bp, Homo sapiens
agatgggcacccctttggttggccttccaacggcttcccagggccccagggaaacctggattaacaggacgaggc

SEQ ID NO: 506246 - DNA, 100 bp, Homo sapiens
cagatgtggtggaatatgccaaggaaaaactggagagcttcatcaaaaatagtgatagctttgataagtgtaattgaaaagtgatcctctcttcagagat

SEQ ID NO: 506247 - DNA, 87 bp, Homo sapiens
aaagttggaagttaagggagacaaagttgaaaacaaagtgctgttacagatgaggacacagtaaagaggtattttgccaagtttgaa

SEQ ID NO: 506248 - DNA, 101 bp, Homo sapiens
cggggccccgggatctcggctgtccttcctcccggtctcggcgcggaagatggccggcggcgtggacggccccatcgggatcccgttccccgaccacagca

SEQ ID NO: 506249 - DNA, 83 bp, Homo sapiens
cccagcccgggtccccgcgttcacagccccagcgcaggttgacatcatggacatatgtgagtccatcctggagaggaagcggc

SEQ ID NO: 506250 - DNA, 100 bp, Homo sapiens
tctgaccacagactccgatggcagcggcggcgctgcgggaccccgcgcagttccctgaatgtggtttctacggaatgtatgataagatcctgctttttcg

SEQ ID NO: 506251 - DNA, 90 bp, Homo sapiens
tggcaggagggcggcggcggcggctgcggtcgaagaaggggacgccgacaagtgttatgtgccaagaaccttgcaaagaaagacttcttc

SEQ ID NO: 506252 - DNA, 100 bp, Homo sapiens
ccgttaaactcctgctctgtttactgtggattggatattctcaaggaaccacacatgtattaagatttgaggtcctgctgtactagccaccaaagcagct

SEQ ID NO: 506253 - DNA, 75 bp, Homo sapiens
actggtaggaccagcaccccataccccgaagccagtgggagctggtgaggtggccaacttcgctgcgtatgcgtt

SEQ ID NO: 506254 - DNA, 101 bp, Homo sapiens
aaacgtcacctccttcccaccaccaggagccagtggggtgggtcgcagccacattaagaatgccctgctcagccagaatccggagaagtttgtgtaccctg

SEQ ID NO: 506255 - DNA, 74 bp, Homo sapiens
atccttaatactttgttgacactgcaagagagctttgtcaagcaagttggagatggagggagattagttcctgt

SEQ ID NO: 506256 - DNA, 97 bp, Homo sapiens
cgctgacgcagagcggaaggagggtcctatcggtggtgctaatagagatatttctattctccagtgccacggggattgtgaccctttggttcccctg

SEQ ID NO: 506257 - DNA, 75 bp, Homo sapiens
gcagcagcaagagcaagaaagagccaaaatccaccagactgaacacaggagatatgcagcagccacgcacatgct

SEQ ID NO: 506258 - DNA, 100 bp, Homo sapiens
cgcagcccgggcccaggccccggcagcgcctgggacaaggtacttcgtactggatttcgaggctggcatcctgcagtattttgtgaatgagcaaagcaaa

SEQ ID NO: 506259 - DNA, 75 bp, Homo sapiens
agccaaaaagaggagaaggggagaaaccaggcagtggcaaacagatattgatgatgttaagaagttcaaaccggg

SEQ ID NO: 506260 - DNA, 90 bp, Homo sapiens
cgaagccatgggcgccgggaccccgccgccgccgccgccgccgccgtctggccccaggtgctggagaatctggtaaaagcaccattgtga

SEQ ID NO: 506261 - DNA, 90 bp, Homo sapiens
cttagaggtgtacgagaagccggtacaggtgccctgcggacacgtatcttcccagacccgtcagattttgaccgctgctgcaaactgaag

SEQ ID NO: 506262 - DNA, 75 bp, Homo sapiens
ggatgaagttgttcattgtttgtcaccacaaaaaggacagattttgtgaacaatttggcatgaggagagaaagga

SEQ ID NO: 506263 - DNA, 90 bp, Homo sapiens
cgcgctggataaagatgcgcctctgcgatttgcaggtgcagaggacgtggtgatggcgttttccaggtcggagacggaagaccggaggca

SEQ ID NO: 506264 - DNA, 100 bp, Homo sapiens
cggactgcacaactagcaagacttcaggatattttggaactcttagaaaaaagagtgaagtcaagattttctcaccggcagatacacttaatgaattcat

SEQ ID NO: 506265 - DNA, 100 bp, Homo sapiens
ggggaacatgtctgagtcggagctcggcaggaagtgggaccggtgtctggcggatgcggtcgtgaagataggagggagccatggatttgctgcgggagct

SEQ ID NO: 506266 - DNA, 100 bp, Homo sapiens
tggctacaggccgcggaggaggaggaggtggagttgctgcccttccggagtccgccccgtgaggagaatgagttcaaggcccaagctacaagcagcttgc

SEQ ID NO: 506267 - DNA, 80 bp, Homo sapiens
gtcccgcaagtttctgcttagcaatgtccttttgatacaaccaagtcggatgggcagtttaagaagacagccagtaacag

SEQ ID NO: 506268 - DNA, 88 bp, Homo sapiens
ccgcgaggaggcgcgggaggtgttcgagaacgaccccgagacgccaaggccacctttgatgccatttctaagacctacagctacctga

SEQ ID NO: 506269 - DNA, 90 bp, Homo sapiens
gaaaaatgcaatcatattccgtgaatcatttgctgatgtacttcctgaagcagctgctctagtgaacaaaagtactttgactcaggagac

SEQ ID NO: 506270 - DNA, 100 bp, Homo sapiens
tacctgtacccattcaccggcggctaccggcggcggcgcgcagcgtgtcaggcggagagacccgccgccaggaacttaaaaggagtctagaaaatccagc

SEQ ID NO: 506271 - DNA, 112 bp, Homo sapiens
gctcagttgggtggactacggggagcgcgccgagctggatgactcggacggtgagaagccctaccactgcaactgggacggctgcggctggaagtttgcgcgctcagacgag

SEQ ID NO: 506272 - DNA, 90 bp, Homo sapiens
cgagaagagcagagcggagggagccccagacacggttctgcggggagtgtctccagccctgcctgcaggtgccatccccgctgtgcccac

SEQ ID NO: 506273 - DNA, 98 bp, Homo sapiens
tgtgatgacatcctcattgatgttaatgaatggtgctatacttgaattttctaaggtgtcattagcccccattcactggggagaatagaaagaaaaca

SEQ ID NO: 506274 - DNA, 75 bp, Homo sapiens
atctacaaccttcgatctcctgacgaagtttattaaccacttaacctctcagaactgaacaaagacaacattgtt

SEQ ID NO: 506275 - DNA, 100 bp, Homo sapiens
cgcttcgaaagcatcatccacgagttcgacccgtggaagaaggtagataatgactataatgcccttcgagaaagactcagcaccttgcctgataaattgt

SEQ ID NO: 506276 - DNA, 100 bp, Homo sapiens
cccagacgcggcacagagagggcctgggagcttgctgcagcttcagaatgggtgcgcacagcctcgggaccgcgactcagaattcacccctcttgcctct

SEQ ID NO: 506277 - DNA, 50 bp, Homo sapiens
gaggagtcctccacctcgtcgcagggtgggcttggtggaatcaaaaatcc

SEQ ID NO: 506278 - DNA, 75 bp, Homo sapiens
acgtgcatgaaccaaacccacttcgttcaagacaggtgtttaagcgtggacccaagtggagagattgtggaactg

SEQ ID NO: 506279 - DNA, 120 bp, Homo sapiens
gcaacttgcgcggtggaggtgttcgggctcctggaggacgaggtactccaaagattcaggtttactcacgtcatccagcagagaatggaaagtcaaatttcctgaattgctatgtgtctg

SEQ ID NO: 506280 - DNA, 90 bp, Homo sapiens
attcaccgtttggctcgatattataagaccaagcgagtcctccctcccaattggaaataaacctgctaaggctgcctcagacctgactgc

SEQ ID NO: 506281 - DNA, 76 bp, Homo sapiens
gcaacggccatgaggactcacgccggaggagagccgcttgaaggtccccaccaccattactctgacacttcgtggc

SEQ ID NO: 506282 - DNA, 100 bp, Homo sapiens
agacgacaagcacacactatggcgctgaaacggattaataaggccaaggctgcaggtgatgatgaggccatgttcatagatgaaaacttctgtactgccc

SEQ ID NO: 506283 - DNA, 75 bp, Homo sapiens
ctctccgccttcaagttgcggggcttgctgctccgtggatctgactgcagccatgagcagcaatgagtgcttcaa

SEQ ID NO: 506284 - DNA, 100 bp, Homo sapiens
acggaggaccggagcggcctgtccgagtggtggacttgctttgtgaagagacagttcatgaacaagagtctttcaggacctggacagtgaagggagcccg

SEQ ID NO: 506285 - DNA, 100 bp, Homo sapiens
ggaagatgaaccaacgttagaagcagcctggcctcatctacagaaccatatttatttagagtcagaatggagcgatttgtagtaacagcaccacctgctc

SEQ ID NO: 506286 - DNA, 100 bp, Homo sapiens
accaggactcagaggccgccatcaaccgccagatcaacctggagctctacgcctcctacgtttacctgtccatggttatgatgtgattgctcaagcccaa

SEQ ID NO: 506287 - DNA, 100 bp, Homo sapiens
ttcggggcacttgggtcccacagtctgggtgtttgatttcaccaccatagacttgacatctgagactgatgaaattccagatattatagctttggaagag

SEQ ID NO: 506288 - DNA, 85 bp, Homo sapiens
tgctgttcataagatctacccaagtgcatatataaaggatgaatgctatcaagtaagacaagtgtttgcccagaaacttcacaaa

SEQ ID NO: 506289 - DNA, 82 bp, Homo sapiens
aactccagatatctacctaattgattgggcgaccattgacgaggtggagacggacgtggtggagattgaggccaaactggac

SEQ ID NO: 506290 - DNA, 100 bp, Homo sapiens
aagacctgaccaataaggctcggggcagtaacaaatcctttctggcggcagctaatgcatcagcgagagctttctaactgtcaaaggtgctgcccttttt

SEQ ID NO: 506291 - DNA, 75 bp, Homo sapiens
gaaagaggtgcatcgtatcaactcggcgcacggatcggataaatcgaaagaatcagtgtactgttacccggacat

SEQ ID NO: 506292 - DNA, 75 bp, Homo sapiens
ccagaatttcctgcgctgttccacctcattcaacttcaggatgataatgaagataattcaaatgatgggacccag

SEQ ID NO: 506293 - DNA, 78 bp, Homo sapiens
gatgagcaacttttttggaaaagctgctatgatgccgcaggttcttcaaagctgcacagcattcattgagagatatgg

SEQ ID NO: 506294 - DNA, 83 bp, Homo sapiens
gaaaaacatttgagagagccatgaaactggaacaggagtttactgaacatttcacagtttgttttgacaccgattgaagttgc

SEQ ID NO: 506295 - DNA, 100 bp, Homo sapiens
gaagaaacagcagtgcagcttcaagggcaaggacccacagattgtcctgtgaagtgaagtatgatcggacagcctcttttcagcttttatgacaatggag

SEQ ID NO: 506296 - DNA, 100 bp, Homo sapiens
ttgcatgtgacaatggattgaatgtgagaggttgaccccctgtttacagtgccagcgccaccaccgccgatttccagcagtctcacgcctcagattctac

SEQ ID NO: 506297 - DNA, 100 bp, Homo sapiens
agccctgagcagcccagtgcctcagtttccctgcttgacgacgagctcatgtctctggggagtacctgacaggcttccacaagcggaaggtcgagcgaaa

SEQ ID NO: 506298 - DNA, 75 bp, Homo sapiens
acaaaagcccagcggaagaacatcagcgtgtggtgcaaacaagctgagaataacatagctgatccagaagaactg

SEQ ID NO: 506299 - DNA, 50 bp, Homo sapiens
cgaacatgcgcttttgacacattggaggtctccaattgagaaacatggca

SEQ ID NO: 506300 - DNA, 80 bp, Homo sapiens
acccgtactgggcctactctggtcagcccaaggccaaccccactgtcactctgttcccgccctcctctgaggagctccaa

SEQ ID NO: 506301 - DNA, 73 bp, Homo sapiens
gagtcatgaccgcccagaaatacctgcagactcgggccgtggccgcctacagatgaaggatttgggggcagag

SEQ ID NO: 506302 - DNA, 75 bp, Homo sapiens
ctagaagacacactcaatcaagtggtggaaccgtcccaaaatgtcccttgctcagaagaaggatcgggtagctca

SEQ ID NO: 506303 - DNA, 90 bp, Homo sapiens
gagctgcggaagcaaaaggcagactttttgatattcagagccttggaagtcaacactgtcaatcacaggctgtatcgagatggaactctc

SEQ ID NO: 506304 - DNA, 143 bp, Homo sapiens
cgggccgagatgtctcgctccgtggccttagctgtgctcgcgctactctctctttctggcctggaggctatccagccctaacaggacgtattatctgatggaccccagcgggaacgcacacaagtggtgcaggaagatccagg

SEQ ID NO: 506305 - DNA, 51 bp, Homo sapiens
ggctgttcgaggccttgactgtagagacacgctgtgaacaagacaggcctt

SEQ ID NO: 506306 - DNA, 100 bp, Homo sapiens
cagcggagtgactgggacctgggaacctactgtggggccgcggccggaccgagcgcctcgacctcggtctgagcattgcagtgtcgagatggctatgaac

SEQ ID NO: 506307 - DNA, 80 bp, Homo sapiens
tttctcccaagccattcacagctattacagtgaccacggatcaagatggtatgctatacctccggagcatggaaaacgac

SEQ ID NO: 506308 - DNA, 100 bp, Homo sapiens
tcctgcctcagcctcctaagtagctgggactacagagccagcggtgagcctggagcagtgtgagcagctggtggcagagctccgcggcagcgtgcgccag

SEQ ID NO: 506309 - DNA, 82 bp, Homo sapiens
cagaagtcagaatccaagatggaaaattgcctaagaattatgacccaaaagttaccccagatccagaaagatggctgccaat

SEQ ID NO: 506310 - DNA, 83 bp, Homo sapiens
tttggcgctgcagaaccagatccgggagcacgtcatctccatcgaggcatttgacattgtgcagcaaagaaatggttatggag

SEQ ID NO: 506311 - DNA, 80 bp, Homo sapiens
tcgccctcttgccccccggagccgcgagcacccaaggtgagaagcgccactgctttgatgtcaactataattcaagttac

SEQ ID NO: 506312 - DNA, 50 bp, Homo sapiens
ccagtacacagacgagcatggggaagctatcatggtgaacttacttcaga

SEQ ID NO: 506313 - DNA, 75 bp, Homo sapiens
tagtgttcatcactgctggcacaatggggtgtgaggacttctgcatcttacagtcagcacagaacacactgagac

SEQ ID NO: 506314 - DNA, 90 bp, Homo sapiens
atagagaaatctggtctaatgaactttctcctgtcctcaatctctggaagaaactaaaccagccttacgacagtctgcctacctcacaga

SEQ ID NO: 506315 - DNA, 90 bp, Homo sapiens
ctagttgcagtcaggcttcatacgctattgtcctgcccctgccactgcagagccccgccatggaagacacgccgttggtgatatcgaagc

SEQ ID NO: 506316 - DNA, 75 bp, Homo sapiens
gagcagctcgtgcagctaagcagccaactgcagaaacgtcaggggctcttggctttgggcctcagtgcaagtcca

SEQ ID NO: 506317 - DNA, 98 bp, Homo sapiens
tgcctactcccagaagaggagggaagcacagactgtgccctgtccacggtgcctcctgcatgtcctgctgccctgagctgtcccgagctaggtgacag

SEQ ID NO: 506318 - DNA, 75 bp, Homo sapiens
gggaccgcgctcaagaggctgatggccgagtacaaacgcctgtttaaagaagaaaacccgtatgctagatttgaa

SEQ ID NO: 506319 - DNA, 74 bp, Homo sapiens
gaagatcatcattaaggacggaggcacgatttagctttggagtcaaacccttctgaccatccaagggcaagcac

SEQ ID NO: 506320 - DNA, 87 bp, Homo sapiens
gcagactttggacttgctcgattgtatagctcagaagaaagtgccggtggtggtgtgcacattgagccccggtatagacagttcccc

SEQ ID NO: 506321 - DNA, 98 bp, Homo sapiens
ggaaaatatatgaatgttgccatctttagtgcagaatacagaaactgcagccatgaccacgcacgtcaccctggaagatgccctgtccaacgtggacc

SEQ ID NO: 506322 - DNA, 75 bp, Homo sapiens
ctctggccgacgagtggagaaatattaaaggtggaagaaggtccatatctttttctgtgggtgcttcaagtgttg

SEQ ID NO: 506323 - DNA, 82 bp, Homo sapiens
gtgacttgactcttcaaacacaaagtcattgaaattatgagactatcattcaaatggaagcattatagttcttcggaaccat

SEQ ID NO: 506324 - DNA, 51 bp, Homo sapiens
cagcttctagaagacccattacagaggagacgagttgtactgctgtcacag

SEQ ID NO: 506325 - DNA, 99 bp, Homo sapiens
actacggaaactatgaagaggtgctactgagcaatatcaagcccattcaaacagaggcatgggtgatggcttggacaacagtgtagcttcccccagcac

SEQ ID NO: 506326 - DNA, 100 bp, Homo sapiens
atcatcccctatgcgggcatcgacctggccgtctacgagaaaaatggctacaaacttcctagcacatgagaagatctggttcgacaagttcaaatatgac

SEQ ID NO: 506327 - DNA, 75 bp, Homo sapiens
tcacggacgtctcagaacacgctggacagcgataagggattaaagcctgtggtttccacagaagcaccacctatc

SEQ ID NO: 506328 - DNA, 100 bp, Homo sapiens
ggagctggacggcgagcgcgagcggcgcgagaaactaatggcagcattagccgctgttgggcctcctaatcctcgggcagatccagagtgctgcagtatt

SEQ ID NO: 506329 - DNA, 99 bp, Homo sapiens
atttgcagctcattgaaggaaagatatgcaagaactgtacaggttgctttgatcgacacatcccatgtgtttctctgaactgcccagtacttttcaaac

SEQ ID NO: 506330 - DNA, 100 bp, Homo sapiens
ccgcaaggaccctttggaaggccgggtgggccgagagagcccactccagttctacgtgaactaccccaacagtggaagtgtttctgcatacggtccaggc

SEQ ID NO: 506331 - DNA, 82 bp, Homo sapiens
gctgcctcctgcagcccccatagcagattgctagtcatagtggctatgtgcagattgactggaagagagttgaaaaagatgt

SEQ ID NO: 506332 - DNA, 100 bp, Homo sapiens
cgtgttctgatcactactgacttgttgtgaacacttgtcctgctccttcacctttttcttgcatggagacagcaatgtttgtaccagtgtggaaattaac

SEQ ID NO: 506333 - DNA, 100 bp, Homo sapiens
aaagatctatgatgtggaacaaacacgttataaggtactaggttttgacaagcttgcatcatgcgtgagtataagctagtcgttcttggctcaggaggcg

SEQ ID NO: 506334 - DNA, 100 bp, Homo sapiens
agcagtggcgaagggaatcgcaaggctcttccctgaccattttctactgtccctgcgcgaggaaagaccacagcaagattctttcattcgtctcctccta

SEQ ID NO: 506335 - DNA, 100 bp, Homo sapiens
agcttcgtggcgtgtgcggtttcgacccggtcacacaaagcttcagcatgtcatgtggagatcatgaatcagacagataaaaatcaacaagaaatcccat

SEQ ID NO: 506336 - DNA, 97 bp, Homo sapiens
agatgaaacgaaaataccgagtttgtaatgtgactagacggccagccagtcatcaaacgtggacccaagtggagagattgtggaactggcgaaaggt

SEQ ID NO: 506337 - DNA, 74 bp, Homo sapiens
gcgccgacatcaattacgccaatgtggacggactcactgccctgcaccaggttagcatggcctcattgaaagaa

SEQ ID NO: 506338 - DNA, 100 bp, Homo sapiens
tttaagagctctgagactgatacagttttcagaaattttgcagtttctgaatattcttaaaacaagtgaccacaactgaaatcactcatcatggaacctg

SEQ ID NO: 506339 - DNA, 98 bp, Homo sapiens
tcctgttcctgctcctagccctggctctcctctggtggttctggcccctctgctgcactgtgcttgtgcgatctgcctcattctccagaggaggacaa

SEQ ID NO: 506340 - DNA, 97 bp, Homo sapiens
cttaccgaatccggagatcctgaggagcttcacggaggcaagagggtaatggagtgcctaaaaaaagctctaaaaatagcaaatcagtgcatggacc

SEQ ID NO: 506341 - DNA, 82 bp, Homo sapiens
tgaggccggcatcgtctttccgtcctctgaggcgacggccgcggctgcacaggataaagataaagtttctctaaccaagacc

SEQ ID NO: 506342 - DNA, 90 bp, Homo sapiens
ggaatcttcaatcaatcatatttcacaaggagaggctagtggtaacaggccgagctggatggatgggtatggggagaggggcaggacgtt

SEQ ID NO: 506343 - DNA, 50 bp, Homo sapiens
cggcatttttggtggacacatcagtaatcactggccagcatcgaaatggt

SEQ ID NO: 506344 - DNA, 75 bp, Homo sapiens
aaaatagcacacttttactctacgcaactgttgctttttcatgcaccagcagacgtttttgaatcaactgagaga

SEQ ID NO: 506345 - DNA, 98 bp, Homo sapiens
gaaggtgaccgcggatcccagcttcctgcagccagggacacgtgatggaccgtaggaagaaggcactgaccgactacaagaagctgcgggccttcttt

SEQ ID NO: 506346 - DNA, 97 bp, Homo sapiens
tggggccgcgtccggtgtgaagacagggagacgctgctgcagctccgggacacctggggccgccgaggcaaaggagcgccacgggggaggcctggca

SEQ ID NO: 506347 - DNA, 96 bp, Homo sapiens
ccacaagaagcggaagtatgagttggggcgcccagctgccaacaccaagcaatctggagtgccgttagctaaaggaactttgattacccactgcta

SEQ ID NO: 506348 - DNA, 100 bp, Homo sapiens
agcagctgattgtaatgaatttgcccaatgttttgatgattggcagagacccactgtctgcattgacttgggcaaggcaaatgagcccaaccacgtggag

SEQ ID NO: 506349 - DNA, 75 bp, Homo sapiens
caatcagataaattacaacacggatgtgaagccccatgtgccactcccctgatctgcagcttcggtaggccggtg

SEQ ID NO: 506350 - DNA, 100 bp, Homo sapiens
ctagagaggacaccgggacacccagaagccgggaaatggtatacactgaatatcctcgaagaaattggtggtggccagaaggtcaatgatgacattattg

SEQ ID NO: 506351 - DNA, 82 bp, Homo sapiens
aaggaacgaggcaaggagctaaagcagcgtgcgttcagccctgggcactccttgctcaagacccctccccagtacctaccct

SEQ ID NO: 506352 - DNA, 87 bp, Homo sapiens
gggagcccctacacagtggaggcctcgctgccaccagatcccagcaagattcctgaagtcatgggctggccaggacattggtgaccc

SEQ ID NO: 506353 - DNA, 101 bp, Homo sapiens
ggcctggaccgagttccacaagaaggactgcggggacctggtggccatcgatagcctgggctggaagctcttctacgtcacaggctgcctgtttgtggctg

SEQ ID NO: 506354 - DNA, 87 bp, Homo sapiens
gggcgaagcacgctactacctggtgcagggcctgattgaggactgccagctggcgctgcagctgggatagatgggcagcagaagatc

SEQ ID NO: 506355 - DNA, 74 bp, Homo sapiens
cggccacccgagacgcggcgcgcacgctccggcctgcggccccggccagcgccgcctggaggagcgtcctcagg

SEQ ID NO: 506356 - DNA, 90 bp, Homo sapiens
tgatgttggagaactatagcaatctggttttcttgggcgaggattaaatccaccacacagggtgaaatctatctccatgacaacattcac

SEQ ID NO: 506357 - DNA, 51 bp, Homo sapiens
ggcaaaagcctttggccagggaggcagatgtgtggagttggctgttacgac

SEQ ID NO: 506358 - DNA, 74 bp, Homo sapiens
tctctgtcagctctttccccgtcagcatcccagccgtgctcacggttttaaaatcaaagatgggaaaatcggag

SEQ ID NO: 506359 - DNA, 74 bp, Homo sapiens
ccccagcgatggaagaggatcaggagctggagagggctgatcccttatccaacatggttctaaccttcagtact

SEQ ID NO: 506360 - DNA, 97 bp, Homo sapiens
tccgcttctgttgcagctggcggtgctcggcgcggcgctggcggccgcagccctcgtactgtggtattcatgggtagtttgaaatatccagatgaga

SEQ ID NO: 506361 - DNA, 83 bp, Homo sapiens
caggagattatagctctgtatgagaaggacaacacctacttaggatgaagattctgaattcacattagcctctgattttgaaa

SEQ ID NO: 506362 - DNA, 75 bp, Homo sapiens
ccctggaccagcagaaacctagagtgaatccagggcctgaaaacccagaatgaacttgtgtccatcccagagatc

SEQ ID NO: 506363 - DNA, 101 bp, Homo sapiens
agaacgacctagtatttgaatttgctagtaacgtcatggaggatgaacgacagattcttggatctcccagtcagcttcatttccccgtaatcagaaacaac

SEQ ID NO: 506364 - DNA, 130 bp, Homo sapiens
ccgccgcgcggagcgccccttcgcgtcccctgcaccatgagctggggcaccgagctctgggaccatggccaacctggagcgcaccttcatcgccatcaagccggacggcgtgcagcgcggcctggtgggc

SEQ ID NO: 506365 - DNA, 101 bp, Homo sapiens
cgcgccgtggccgcgtcccactcctcaggccggggcgcacgtcggctcccacgcttagccagctcccgactgctgtggatgtttttcgaaggataattttg

SEQ ID NO: 506366 - DNA, 101 bp, Homo sapiens
agagaatgtgtgtttctgcatagaaacagatttcttcgcatggatttaggagaatgtaccaaaatccacgacttggccctccgagcagattatgagattgc

SEQ ID NO: 506367 - DNA, 83 bp, Homo sapiens
ctgcttaattaagcactttgatgatttaagaaatcttggctttcttcgagagtcacccagctccttcagctgagcgtaccatc

SEQ ID NO: 506368 - DNA, 87 bp, Homo sapiens
catttccaatttgctggaaaaaatgacatccagcgacaaggactttaggtctacttccccagcaggacagcatcattctcctatatc

SEQ ID NO: 506369 - DNA, 83 bp, Homo sapiens
gtggatgtgaaagatcctaactatgatgatgaccagcgagaaccctctgcccacagtggagattgccatccggaacacgggcg

SEQ ID NO: 506370 - DNA, 50 bp, Homo sapiens
aggtggcctcccgcgtgctggccatgaagcccctggcaaccactaatctg

SEQ ID NO: 506371 - DNA, 90 bp, Homo sapiens
ccacgcactgggtcgtcacggaggacgggaaaatccagcagcagtaagaagaggaggaggccaggcaggcaaaaggagtcatggcttctg

SEQ ID NO: 506372 - DNA, 90 bp, Homo sapiens
gtggagacacggccagatctgccctccataaaggcatgacttcctggcaccacagggaaaatcgggtgcaagcccagaaactatttcccc

SEQ ID NO: 506373 - DNA, 51 bp, Homo sapiens
acagccagaccaacccaattatggacctgaaggagaagaaggagaaggtgg

SEQ ID NO: 506374 - DNA, 100 bp, Homo sapiens
aagcaccaggcatcagagatagagtcttccctggcattgcaggagagaatctgaagggatgatggatgcatcaaaagccaaaagaatgcaatggtgtaaa

SEQ ID NO: 506375 - DNA, 83 bp, Homo sapiens
aagagatccagcccccttataagccaaaagctgggctttccgaggcgtgtgcaagaaaatcgatcacttccctgaagatgctg

SEQ ID NO: 506376 - DNA, 83 bp, Homo sapiens
atgtgatgttggagaactacagaaacctcgtctccctggtgctggacccaaaggagacaacatttatgaatggaggtcaacta

SEQ ID NO: 506377 - DNA, 98 bp, Homo sapiens
ggcgcctggcggggcctccgcgaggacgagttccacatcagtgtcatcaggcgggctggtccgagtctctgttttggaagctcaaccagtggctgatg

SEQ ID NO: 506378 - DNA, 75 bp, Homo sapiens
agaagccacccagcctcggtgaccaggagactcggcgcaaggcccgagggtcacggagactcaccagttggcaga

SEQ ID NO: 506379 - DNA, 75 bp, Homo sapiens
ctggccttctccatggcctcaacacgtccctaacttgtggctccagggagcagtgtcagggccagggagacgatg

SEQ ID NO: 506380 - DNA, 75 bp, Homo sapiens
ccaacagtgtaccagcagggcgttggctatgtgcccatcacaggtcagcccaaggccaaccccactgtcactctg

SEQ ID NO: 506381 - DNA, 83 bp, Homo sapiens
gagcagtttgaagacttgctagttaggattttattactggcagcatgtatatcttttgttcaaggtgtttgcagactatgaag

SEQ ID NO: 506382 - DNA, 75 bp, Homo sapiens
gaatttatgggaagaaattgtcaatacaatatgaagagcattttaagaggtgcagcctctggaagtggatcaaac

SEQ ID NO: 506383 - DNA, 100 bp, Homo sapiens
ctcattacacttcaacataactgaagatatgcttcgtgggatctttgagccttttggaagaaggatctctgggaaagtttagaaaatgctagtggtaaac

SEQ ID NO: 506384 - DNA, 98 bp, Homo sapiens
acatcctcccctgagtccggagctaccaaaaccatcctcctggtatcgagaaccttccctgcgaacttcagaggaacttccagctgatgcgagagctg

SEQ ID NO: 506385 - DNA, 75 bp, Homo sapiens
gacgaccgacagggtggtgaaagtcgacagaggtacgttcttggagacacagcaatgcagaagatggccaagtcc

SEQ ID NO: 506386 - DNA, 50 bp, Homo sapiens
ctgtcgacagttacgtcaacaaactgataaatttcaaacggaagagagtg

SEQ ID NO: 506387 - DNA, 100 bp, Homo sapiens
acaaagaagactcttgtcacactaattgccaacaacaatgactgaaaaggacttctcagagaagcattcgaccctggtgaatgatgcctataagaccctc

SEQ ID NO: 506388 - DNA, 83 bp, Homo sapiens
gccttgaccaggacttgggactttgcgaaaggatcgcggggcccggagaggtgaaaacttttggcccgtttggaagcggcagc

SEQ ID NO: 506389 - DNA, 85 bp, Homo sapiens
cctgcccgtttctgcggacttgttctgaggccgagattccaatggtattacatctttttgatactctgcatgctctttgcaatct

SEQ ID NO: 506390 - DNA, 90 bp, Homo sapiens
caccgccatgtgatcctctctgagatcaaggaagccgtcgctgccctgcccccgccccttggatctcccttcgtggagacgacaccgggg

SEQ ID NO: 506391 - DNA, 82 bp, Homo sapiens
cgcgtctcggaaaccggtagcgcttgcagcatggagtccaaaactacttacctggaagaccttccaccaccccctgagtatg

SEQ ID NO: 506392 - DNA, 50 bp, Homo sapiens
ctggattttacagaacttgactgaggttgggtatctacagccattggttg

SEQ ID NO: 506393 - DNA, 97 bp, Homo sapiens
cggacgagaggtgctgcggcaggcgctgcgctgcactactccgacagttagttaatatgtgcatcaacccagatccagagaagcgaccagacgtcac

SEQ ID NO: 506394 - DNA, 100 bp, Homo sapiens
tcgtgcactttacacacatgagtgttggaaaaccttggacagacaattgtccccgatttgggatcactggaaagtcagcatgattttcgaaccccggagt

SEQ ID NO: 506395 - DNA, 99 bp, Homo sapiens
gtggcctcgtgctggagcccggacgggcgccacattctcaacaccacggaattccatatggcccactgcgtgaccttggttcagctgtccatttcctgt

SEQ ID NO: 506396 - DNA, 100 bp, Homo sapiens
ttgtttttctcttggtgttcaactggaatagagcaggaacgaatgcaggaatttgggaactgagctgtgcaagtgctgaagaaggagatttgtttggagg

SEQ ID NO: 506397 - DNA, 97 bp, Homo sapiens
gcacctgcgcgaagctggccaaagcctgcccagacggctcacctgtgcgggatggaacaaaaggctgctgtacaggacagattgaatgagcaagagg

SEQ ID NO: 506398 - DNA, 83 bp, Homo sapiens
taggcaggcgttgaggaagaagccacccgagcggactcccgagacaatgcagatcttcgtgaagactctgactggtaagacca

SEQ ID NO: 506399 - DNA, 97 bp, Homo sapiens
ctgattgaggactgccagctggcgctgcagaactgaagcagattacctggctcagtgtcacagggctgctgatggtggtcttcggagaatgtctgag

SEQ ID NO: 506400 - DNA, 75 bp, Homo sapiens
cgtctcttacgtctgcggaagtgcagctgcctcagttcttagcgcaggctgcctgctgtttcccggggagatcat

SEQ ID NO: 506401 - DNA, 75 bp, Homo sapiens
ctgtggttgagaacctccccaggacagtcatcagaggctctcaggctgcctgtgaagttgaagcagggaaagtat

SEQ ID NO: 506402 - DNA, 100 bp, Homo sapiens
acttctgccagtgagagcactaaatgaagtcttcattggggagagtctgtcatccaggtggcccacaaactctttaacaacttgaaataaatgtgtggac

SEQ ID NO: 506403 - DNA, 93 bp, Homo sapiens
ctacaacacatggtggaatgtatccgggaggtcaacgaggtcatccagacctgcctagagctggaacgttacctccagagcgagccctgctat

SEQ ID NO: 506404 - DNA, 75 bp, Homo sapiens
tttgggaaacaaggcttccagtgccaaggtaggcgaaaaccaagagtacatcggcctcgttctcctatattggaa

SEQ ID NO: 506405 - DNA, 74 bp, Homo sapiens
ccaggctgctccagtactcaagggaacgggatgaatgctatcaagtaagacaagtgtttgcccagaaacttcac

SEQ ID NO: 506406 - DNA, 89 bp, Homo sapiens
ggcgcggggcggtcggctgcggtggcggcgtttggatgattgtctctcggcggcggagtcggtccctccagctacaaggtgggcaccat

SEQ ID NO: 506407 - DNA, 100 bp, Homo sapiens
tttggaaagttcttccgtgtcccgatgtagaagaaatagcaaattggacatattgaaagttttgagtatccgaggagcccaggaggaggaacccacagac

SEQ ID NO: 506408 - DNA, 56 bp, Homo sapiens
gtcccggagagctgagcagtcaagatgtggggtgccgaggctcaggcagcatgacg

SEQ ID NO: 506409 - DNA, 110 bp, Homo sapiens
cgcgagaggaccgagctcgcccggcagcttaacctctccgagacccaggtttgccctccaatcagtggtctgccttcattttccagattgatgaagtctgcctcagagaa

SEQ ID NO: 506410 - DNA, 50 bp, Homo sapiens
tccaaaacagtttacctcttatctaacagaataactgaagtgaagtgatg

SEQ ID NO: 506411 - DNA, 50 bp, Homo sapiens
ccgcgagaaggaaggtcgagccagtccaatatcagatggaaatgatgcgg

SEQ ID NO: 506412 - DNA, 75 bp, Homo sapiens
agctggtccagattgcttcccggacaaagaggaactttattcttgatcaggcgcagttgtgtagcagttgagtaa

SEQ ID NO: 506413 - DNA, 50 bp, Homo sapiens
cgcaaagcttgcgaggtggcgttaggacaaacagaggatgtgcagatgct

SEQ ID NO: 506414 - DNA, 75 bp, Homo sapiens
cgattttgctatgtctctgagctgcgaggaaatgggtcctgatgaatatgaagagatggaagaagaggaggagga

SEQ ID NO: 506415 - DNA, 100 bp, Homo sapiens
ggcatcggcaggtctggaaccttctgtctggctgatacctgcctcttgctgcctctgctgcgagaagttctggagaagcagccagtgctaagccagaccg

SEQ ID NO: 506416 - DNA, 51 bp, Homo sapiens
ccagggctggagggacgactgccatggtcggagctcttaggcctgctgaaa

SEQ ID NO: 506417 - DNA, 74 bp, Homo sapiens
cggagacagcggcacagaggtgcttctgccagtttggaaattttagcattcaggtgccaggaatgcagatggga

SEQ ID NO: 506418 - DNA, 83 bp, Homo sapiens
gaagcatctgatgcacgttccatccggcgctcagctgggcttgaggtgttggagtgtggatatgagtcatggaactctggggc

SEQ ID NO: 506419 - DNA, 74 bp, Homo sapiens
cctctctgaagaatgcagccttcctaggtccagggggatgacagcatgggaggcaatggctccacatgtaaacc

SEQ ID NO: 506420 - DNA, 100 bp, Homo sapiens
tgctaaaacacgtgaggaggaacaagctgggatatgtgagcgttaagctactcacatccttcaaaaagagtgatcatttaggatcaggaagtcatttcag

SEQ ID NO: 506421 - DNA, 75 bp, Homo sapiens
cgaaggccctatcaggacatggagtatgaaagacggaggtcccaggtgattgaaaagtttgaggccttggacatt

SEQ ID NO: 506422 - DNA, 100 bp, Homo sapiens
gcaggcctggacttccagtgctcagagggcggggagaatctcagcaacctgcggcagatcttccagtccctgccgcccttcatggacatcctcctgctgc

SEQ ID NO: 506423 - DNA, 110 bp, Homo sapiens
cgaccatctcgcactaccctgactacagctggagcgcccagaggcgagccctggtggaggaagagaaccgcatgcacgagtctctcatgctcttcgactccatctgtaac

SEQ ID NO: 506424 - DNA, 80 bp, Homo sapiens
ggccgctctcccctcctctcacggcacctcccaccatgaagaaaatatttacaccagcagctccagttcataccaataaa

SEQ ID NO: 506425 - DNA, 83 bp, Homo sapiens
ctgcgaggctcggagaaacaggcgccgcgggctccgcgcccggccggacccgggcccgagtctgtagatggacggcagatccg

SEQ ID NO: 506426 - DNA, 78 bp, Homo sapiens
agcatggaaccaaagcggatcagagagggctaccttgtgaagaaggtttacccaaggtccagcctagcccctaggcac

SEQ ID NO: 506427 - DNA, 100 bp, Homo sapiens
gccattttgtctcctgtaacaatttacgcgccgtgtaactgtgaatctttcaaaggagtctcgctctcagtcaaaatctccaacgggaactcctgctcgt

SEQ ID NO: 506428 - DNA, 100 bp, Homo sapiens
ggttataagaccatttatttctttggagacaaaactatgccaataatgttaattcaagactctcgaagagaagcttcagtgcagatggatttgagatgct

SEQ ID NO: 506429 - DNA, 51 bp, Homo sapiens
cagagggccgagaaggacaggatcagtagagaaatggtcagaaggaacgac

SEQ ID NO: 506430 - DNA, 90 bp, Homo sapiens
aacagcgagctgtttgacccctttgacctcttcgatgtgcgagactttggaaaggactggacctacagagacatctgggattttctgcgt

SEQ ID NO: 506431 - DNA, 83 bp, Homo sapiens
ggggacgcctgaggagccgcagtctccaggagagcgcaattctgtggtgttcttggtcacacatttatggagtttctgaaggg

SEQ ID NO: 506432 - DNA, 50 bp, Homo sapiens
cattggttggctcctgacaacgtgcacggactcagaattcatgattgaag

SEQ ID NO: 506433 - DNA, 90 bp, Homo sapiens
ccttgtgtcaaccatccattccaggagccagctatctgaggtggagccgccaccaaaatgcagattttcgtgaaaacccttacggggaag

SEQ ID NO: 506434 - DNA, 100 bp, Homo sapiens
atgctgctggataaatctggacatttgaagttagcagattttggtacttgtatgaagatgaataaggatttaaaaactggaacggtgaaggtgacagcag

SEQ ID NO: 506435 - DNA, 100 bp, Homo sapiens
tttgggaaagagggcctttggaaacttcttggaggttttcaggaaacttgcagcaaagccattcgggttggagtaattgcttcgcagaatcaagaacggc

SEQ ID NO: 506436 - DNA, 115 bp, Homo sapiens
gtggatattgggcttgacagctgcaaggagttactgaagaatgtatgacaacatgtccacaatggtgtacataaaggaagacaagttggagaagcttacacaggatgaaattatt

SEQ ID NO: 506437 - DNA, 74 bp, Homo sapiens
gtggtagttaaaggcccagatgataggaatcccatctcatttagggcaaaataacatggcagccagacgaatta

SEQ ID NO: 506438 - DNA, 100 bp, Homo sapiens
gcctcctggacgtgctcgcgcccctggtcctgctgctcggggtccgcgcggcctccgcggagccagagtgcctggaagagctgggatgtctggttgagtc

SEQ ID NO: 506439 - DNA, 101 bp, Homo sapiens
aaggtggacaggcatgattattgggccaccaagggtctgcctgcagtcccacttccaggctgaactccctgaggtctctgattccctaggtgtcctggagt

SEQ ID NO: 506440 - DNA, 83 bp, Homo sapiens
ccgagcgagcgagcggcgcccagcccagcgcctcggccgaacccctccgcagcagttttctttttaaaagcggaaggagagtt

SEQ ID NO: 506441 - DNA, 75 bp, Homo sapiens
ggattttacttctgggaagcagcactgttactcaggaagcagtcaattatagatttcttcaaaccagcttcaaaa

SEQ ID NO: 506442 - DNA, 82 bp, Homo sapiens
cggggatttctggctctttcctcttcgccttaaattcggtgaaatgacaatggatgctctgttggctcgattgaaacttctg

SEQ ID NO: 506443 - DNA, 75 bp, Homo sapiens
tgcttgcttacttactcttatcaatttctatgagaggaagtgcacggctgtctataacgtgctgccgggtctcag

SEQ ID NO: 506444 - DNA, 83 bp, Homo sapiens
caggcggtgacagagtggagccatggctagaggactttgaacgggatgaggagcgctcagccaacggtggctccgaatctgac

SEQ ID NO: 506445 - DNA, 50 bp, Homo sapiens
ctatgataccacaatcctcacagagatcaatgaactgagccatgttcaaa

SEQ ID NO: 506446 - DNA, 87 bp, Homo sapiens
cggtgttccacgtgaagctcaccgacagtgccctgagggccttcgagagctaccgcgccagacaggctagagtaccgtggcacaatc

SEQ ID NO: 506447 - DNA, 80 bp, Homo sapiens
ggagattctccaccattgtggatccactccttataccgccgcacaggtgccagctttcagaaggcccagcaagaatttgc

SEQ ID NO: 506448 - DNA, 96 bp, Homo sapiens
attgagcaggctgatctactgcaggagggttatctgtcagaagggttggtaacaaagtggtaccgttccccacgactgctcctttcccccaataac

SEQ ID NO: 506449 - DNA, 82 bp, Homo sapiens
cgctctccagcccgcttgaacggaacggagctttgactgtaagatctgtgggaagagcttcaagaggtcatccacactgtcc

SEQ ID NO: 506450 - DNA, 100 bp, Homo sapiens
gcagtgcaagacccatccccactttgtgattccctaccgctgcttaggttaaacccatccagagtaatggctgcggccttacccaggaccctgggggagt

SEQ ID NO: 506451 - DNA, 96 bp, Homo sapiens
gcctgcttggcgtgggttctcccgacagatgcctgaaaacttcatgcctcctgttcccatcacatcaccaatcatgaacccgttgggtgaccccca

SEQ ID NO: 506452 - DNA, 51 bp, Homo sapiens
caaattgttacatctacaacaagcggctcgtctactccatgtgctccctct

SEQ ID NO: 506453 - DNA, 75 bp, Homo sapiens
caaagagcccctcatcgagctcttcgtcaagcaaacggggattcagcgtccgatcctttggaacagggactcacg

SEQ ID NO: 506454 - DNA, 100 bp, Homo sapiens
agagtctgtccaaggtggagaaaccaggatctatttggatttgccacagaatttcaagatatttgtgagcggatcatccataagaatggttacagtgagc

SEQ ID NO: 506455 - DNA, 91 bp, Homo sapiens
attcagttctgagtgcctcagttttcccttccacaaaatgagtacaagccagctgccatgttgtgagcacataccacatagctccatggag

SEQ ID NO: 506456 - DNA, 88 bp, Homo sapiens
tgttctttgcctcaagacccagctattgttcaggtgtcagttgtacccgaggcgttctcagcagcagcaagtacctgtggtggatttc

SEQ ID NO: 506457 - DNA, 75 bp, Homo sapiens
gaaggacgacaagcccatccgagtgatgcagcttggtttaacgaatcttggttaagccgaattaaagaggatgtt

SEQ ID NO: 506458 - DNA, 73 bp, Homo sapiens
actggctgtgtgctgccacaggccccagcatcaagatctggtgattcacaggacacagcactggtttcacggg

SEQ ID NO: 506459 - DNA, 82 bp, Homo sapiens
ggcaaagctgccagagatattttcaacaaaggatttggtatggcctcacaagtcttggtctacccaccatatgtttatcaaa

SEQ ID NO: 506460 - DNA, 82 bp, Homo sapiens
cgctggggatccctgctcttcgctctcttcctggctgcgtccctagaggagaaggcagagcccccccaggctatgaatgccc

SEQ ID NO: 506461 - DNA, 100 bp, Homo sapiens
gggctgcttgttttgtctctgaaattgacaaggacgcagggaatccgctgctaaataatgtttctgaaagttcgtcgctgcttcctgtgctccaggagag

SEQ ID NO: 506462 - DNA, 87 bp, Homo sapiens
ggcgcgggcactgctttccactcggctcctgtcgtccgttctctcaggctcccgttcaggttgaaatcacaaagattagacaccttt

SEQ ID NO: 506463 - DNA, 98 bp, Homo sapiens
ggaagggccgaagccccgccagcccagctaaagcagacggctcgcactgcgacccgaagataatctggagctttcaaaatgtttgccaaagcaaccag

SEQ ID NO: 506464 - DNA, 75 bp, Homo sapiens
gtggagagcagcagcagcagcagcagtcggggtctgagagtcactggagctaccagaagcatcatggggccctgg

SEQ ID NO: 506465 - DNA, 100 bp, Homo sapiens
cttctggagcggttgtgcgatcagatcgatctaagatggcgactgtcgaaccgatcttggcatatacagaagggctgcatggaaaatggctgttcacaga

SEQ ID NO: 506466 - DNA, 80 bp, Homo sapiens
gtcttggcccgggcagcagtggcggcagcgcccgagagagggacctgatgcccagaaccctggacgggcagatcaccatg

SEQ ID NO: 506467 - DNA, 82 bp, Homo sapiens
actcctgtctacagagaaaaagaagatatgtatgacgagattattgagttaaagaagacctcctgccccccgaggtctgcag

SEQ ID NO: 506468 - DNA, 97 bp, Homo sapiens
ctcagaagcatgtgtcttccccagctctgcagccacatactatccgtttgttcaggaaccaccagtgacagaggattcgcaacagttcttgctgaag

SEQ ID NO: 506469 - DNA, 100 bp, Homo sapiens
cttcagtgagcaaggcatcaacgagtttctcagcatatatagcagtgacgaggatgatgaggactttgagatgtgtgaccatgactatgatgggctgctt

SEQ ID NO: 506470 - DNA, 83 bp, Homo sapiens
gattcgccgaggcaccgaggcactcagaggagatggagaaggaggagacaacccgggagctgctgctgcccaactggcagggt

SEQ ID NO: 506471 - DNA, 128 bp, Homo sapiens
gatctacgtgtgctttttcaagggagctgataaagaacttcttcccaaaatgggtgctgtgattgtctccacgccccaggacatcgcattgatggatgcacacaagggtgctgagatgtttcgcagag

SEQ ID NO: 506472 - DNA, 90 bp, Homo sapiens
agcagcgtggcctccgccaccgtgcacatccgaatgggttctgaccacatccgtgagaaagatggactgtgggctgtccttgcctggctc

SEQ ID NO: 506473 - DNA, 100 bp, Homo sapiens
agaggcctgtgcccggaatacgcatgtaccaggttcagtacaacagttccgttgatgactccctcgtctacagatttggatttacagtgtgagataatca

SEQ ID NO: 506474 - DNA, 101 bp, Homo sapiens
agggaggcactcaagatgaaaactacttcaactaaaagccaaccacttgaacaaggttcagggagcaagtttccgaggttggaaagaagtgacttcactgt

SEQ ID NO: 506475 - DNA, 90 bp, Homo sapiens
tgaagtagcaaaggcaagaaggcaacgacgttccatctgtggaaggacctaccaaccaggtcagcccaaggccaaccccactgtcactct

SEQ ID NO: 506476 - DNA, 75 bp, Homo sapiens
gcgagctagccgggagttacaccgccaccgccagagcttaaagcagcgcctgggtaagagtaacatccaggcacg

SEQ ID NO: 506477 - DNA, 88 bp, Homo sapiens
tacccccagcaccacctccagcccctgcgcctcgacgaacaggaggcattgaactcaatcatgaacgatctggtggccctccagatga

SEQ ID NO: 506478 - DNA, 100 bp, Homo sapiens
cgagtggtcaacagtgagacaccagtggttgtggatttccacgcacatatgtttgtgctactgaaaggagccactaaggagcagtcttttaagattggtc

SEQ ID NO: 506479 - DNA, 75 bp, Homo sapiens
cagaataagattaagggttgtacaggctctttgaatatgactctgcaaaggtggggaagaaaacatgacagaaac

SEQ ID NO: 506480 - DNA, 82 bp, Homo sapiens
ttttgcattgtacgtgggaaggcacagatcgccaaactgaggcagcaactacaacgcagtaaacagagtagtcgtcacagta

SEQ ID NO: 506481 - DNA, 100 bp, Homo sapiens
tcggtgaaatcctgtcctgaagactgtaagcctcaagtactacagccttccagcagccttcccagacccacagatcacacccagggaaaactaataaagc

SEQ ID NO: 506482 - DNA, 100 bp, Homo sapiens
ctcgcagccgccgccgccccccgcccggaacatggactctgactcttgcgccgccgccttccacccggagggtttccaggcctgaggtgcccgccctggc

SEQ ID NO: 506483 - DNA, 100 bp, Homo sapiens
gtgtttgatatgttaaacagaagatacctttgtcacaaagcctactgcctgctaatcggcaagtggacctgtttctctaacaatggcccgaaacttcaca

SEQ ID NO: 506484 - DNA, 110 bp, Homo sapiens
cctacctgggataacggcggcgagcggacggctgcatttacggggtctcccggagggccagagtcggaaacctcgacctgtctcccagttggttgcacagcaggttactc

SEQ ID NO: 506485 - DNA, 91 bp, Homo sapiens
gacgggccggaacctcaagaaggaggtcagccgggtgctgtgcaagcggtgcgttgaccacgttgttcctgagcctgggacaagcctgctc

SEQ ID NO: 506486 - DNA, 75 bp, Homo sapiens
tttgttcaccgccaaccccttcgagcaagacgtgggcttcaacggaccacaccaaaatgccatctcaaatggaac

SEQ ID NO: 506487 - DNA, 100 bp, Homo sapiens
ggctgaagaggcggatgtggatatcgaaggggacgtggtagcggcggcgggggcacagccaggcttctagtacgcctgctgtgaacattcagccagatgt

SEQ ID NO: 506488 - DNA, 121 bp, Homo sapiens
atcaatgaagtccgagtcatacccccaggagtaagagcccatagcagtctgccagacaatagagcatatggggcatgtctttaacttcagaatggtttgcaaagtatttgcaatcatcagc

SEQ ID NO: 506489 - DNA, 48 bp, Homo sapiens
ccttccaaagtgcagcgctgtgcagtgcaacacagtcactcctggcgg

SEQ ID NO: 506490 - DNA, 49 bp, Homo sapiens
ggacacagaagtatttgtgacaggtcacagggattatggacccagaaca

SEQ ID NO: 506491 - DNA, 98 bp, Homo sapiens
gatgtcatccgcaagaggcactaccgcatcggcctgaacctcttcaacaaggccgagaactactggtggcgtggccagaacacacggacgctgtgtgt

SEQ ID NO: 506492 - DNA, 80 bp, Homo sapiens
agccctccttcgtgtcgtacgtacgccctgagccaagaaggatcaagaaggtggagaagaaaagaaatctgtgcaaaaga

SEQ ID NO: 506493 - DNA, 96 bp, Homo sapiens
cgcgcacgcgccgacagacagcgccgttccagccctcgcccgatgcacgggaacttgctactaccagcaccatgccctaccaatatccagcactga

SEQ ID NO: 506494 - DNA, 74 bp, Homo sapiens
ctttgtctccttcgacttggagtctttgtccaggacgctctgcggccgtcacgatgttctggaagtttgacttg

SEQ ID NO: 506495 - DNA, 80 bp, Homo sapiens
cgggacttccagacactggaaaactggatgctgcagacactgaacgaggagccagtgtggccaagttgaatgatgctgcc

SEQ ID NO: 506496 - DNA, 103 bp, Homo sapiens
gactctgctaacaccagatagtggaaagaaaccatgtgctgaaatgtttgacgacactgatggtttggaaagcttagatatgccaacaacagcaattacaaaa

SEQ ID NO: 506497 - DNA, 100 bp, Homo sapiens
aaaaccacaaatgtttttctgttttgcctgaatacatgatttaaacaagagatttccacagaaggtcaaaatgcagatcttcgtgaaaacccttaccggc

SEQ ID NO: 506498 - DNA, 100 bp, Homo sapiens
ctgcaacacctgcggcctcactgggacccccaggaggtgaccctgcagttggcacttggcaatgtaataagtgccttgggagacaagagcaagagggcca

SEQ ID NO: 506499 - DNA, 98 bp, Homo sapiens
cgccgcagaggaaagcgggctggcaggcgagggagcccgcgtcggctgagagcccacaggcccccacagacccgtgagcagctacaagccgaagtgca

SEQ ID NO: 506500 - DNA, 76 bp, Homo sapiens
cggacagcagactttgtatttatgttcctttttggtggattcttaatgaccacaatgcttctctccaagcaattcg

SEQ ID NO: 506501 - DNA, 83 bp, Homo sapiens
ccgactgccgaggaacgagagcgcgaagctaagagcccaggaaactctgcccgcagcttatgacggtcattaaccagtttctg

SEQ ID NO: 506502 - DNA, 75 bp, Homo sapiens
atttaatggaaaatcgcttggttaaaacctgacacttttaacaggatcccattgaagataccacgctgcatgtgt

SEQ ID NO: 506503 - DNA, 75 bp, Homo sapiens
ggcttcaccgggagcaactgtgatgagggtcagcccttcataaacccagatgggagtccagttgtgtataatcct

SEQ ID NO: 506504 - DNA, 50 bp, Homo sapiens
tgttgctgggctcggcgtgctgcggctgagaatcaggctgaaagccgggc

SEQ ID NO: 506505 - DNA, 100 bp, Homo sapiens
catgcatccaagttccagtttgtggcctcctaccaggagctcatggttgagtgtacgaagaaatgtatttgactacagtcattccttatgagaaaaaaaa

SEQ ID NO: 506506 - DNA, 98 bp, Homo sapiens
gagattcgggccgtcaccctgcctcccctgcgtcccgccaccggccgcttctgtcctcgggccaattcctgtccccccagcagcatggcatcgtgtgc

SEQ ID NO: 506507 - DNA, 100 bp, Homo sapiens
gcactgtggttcctgcatgaagacagtggctggcggtgcctggacgtacaagaaatctactttcttcaatgtgttaaccaatagtcaggcttcagcagaa

SEQ ID NO: 506508 - DNA, 82 bp, Homo sapiens
tgagatatctgttcattgggaacatgttttagaaaaaatagtggaaagctatcagggatttcttccagaaagcatgtatgaa

SEQ ID NO: 506509 - DNA, 100 bp, Homo sapiens
ctgggaccttctccctgcctggacccctactattgcaacaaggttttatgacttacctagtggagcctttatttacagaatgggccaggttttccaatac

SEQ ID NO: 506510 - DNA, 110 bp, Homo sapiens
cggcgatatggaagaggagggcaagaagggcaagaaggtgaacctgagcaaggtgggcgagtattggtggaacgccatcctggagggagaagagcccatcgacattgaca

SEQ ID NO: 506511 - DNA, 90 bp, Homo sapiens
ggagctcgagaaccgtttggcaatatgtacgacgcggatgaggctaaagccagggggttagaattccagatctccaacgtgaagtttgaa

SEQ ID NO: 506512 - DNA, 100 bp, Homo sapiens
ccggctccggcccgggacggaggagccggcgctcgacacagagcagagcatcctggccagaacaagccaaggagccaagacgagagggacacacggacaa

SEQ ID NO: 506513 - DNA, 75 bp, Homo sapiens
ggagcatcccaggacctaccagaatctggaccttaaaggctttgatccaggagagaaatactttcataacacatc

SEQ ID NO: 506514 - DNA, 96 bp, Homo sapiens
gatatcatggaaccagcagcaaagaagtgctatctggaaagagagccaaatgggcggactgttgaagtggctgagggtgaagctgttcgaacacct

SEQ ID NO: 506515 - DNA, 96 bp, Homo sapiens
ctgccccagagaaagtcctcgctcgtcaccagcaagcttgcgggatggagtttcactcttgtctcccaggctggagtacaatggcatgatctcagc

SEQ ID NO: 506516 - DNA, 137 bp, Homo sapiens
tctgtacgcctagaacagtgccctctgcagctgaataacccttttaacgagtattccaaatttgatggcaaggtatccaattggtttggcaacaaacgaatcaggtacaagaagaacattggcaagtttcaggaaga

SEQ ID NO: 506517 - DNA, 87 bp, Homo sapiens
cacctcccaccatggacagcttcgacttagccctgctccaggaatgggacctcgagtcactgtgaaggaacccagccagccggcgga

SEQ ID NO: 506518 - DNA, 98 bp, Homo sapiens
cagagaggggagccggcgaggatcaaaatcttcgaaggagggctttacaggaagtatggtgctggcatctgcttggcttctagagagtcttacaatcg

SEQ ID NO: 506519 - DNA, 50 bp, Homo sapiens
ttcagtctccaccccaaatgcaggatgatgagcctccagctaaagggaag

SEQ ID NO: 506520 - DNA, 97 bp, Homo sapiens
tgacaagttcgataaaagtgtgcagaccaaggctcctgcttaccatcttattttggaagggattctgatcctctggataatcagacttcttttctct

SEQ ID NO: 506521 - DNA, 51 bp, Homo sapiens
tgtcagccttcccagtagctgggaccacagcgcaaatccagaaaaaccctg

SEQ ID NO: 506522 - DNA, 100 bp, Homo sapiens
cggaacccgtggtcctccgcttcattcaagagaatccatcccattaaatgacctgaagtcagaagtatcaccacggatttcagcagaggacctgattgac

SEQ ID NO: 506523 - DNA, 100 bp, Homo sapiens
agggcgtggctgtgaccaacacttctaaacttggattccggatctgggatgtggcggattatgtgataccagctcaggtacaaagtgaaatcacttcagc

SEQ ID NO: 506524 - DNA, 83 bp, Homo sapiens
acagccacagcgccgagatggaggtacgctatttgaagaacaggtttccatgctcttagaggagcatcagaaaatgaacaaac

SEQ ID NO: 506525 - DNA, 111 bp, Homo sapiens
cagaaggatatcgacgtcgtgatccagaagtccagagctgaggactgcctgtttgcaggagcttactccacgggaacagcctctagataatctgagttgttgaaaatacga

SEQ ID NO: 506526 - DNA, 75 bp, Homo sapiens
tgctgatttacaggtttctgcaaagattgggtttttgaagatcgaatcatcaatttagttgttggcagcttaaca

SEQ ID NO: 506527 - DNA, 100 bp, Homo sapiens
agccggccgcgggcgcgaccggaggcaggttcatgtactggacagactggggagaagtgccaaagatagaacgtgctggaatggatggttcaagtcgctt

SEQ ID NO: 506528 - DNA, 83 bp, Homo sapiens
gccgggatttgggtcgcagttcttgtttgtggatcgctgtgatcgtcacttgagctgccatcagtcatgctcttaaacgggga

SEQ ID NO: 506529 - DNA, 100 bp, Homo sapiens
gatcatcctgctgggcttcgtccagatcgggaagggaaggtgctcgggtcttcggggcactgggtcccatcggtccctcctcacctgggctcaccctcgg

SEQ ID NO: 506530 - DNA, 96 bp, Homo sapiens
ttcggaagcggcggcggcgcgatgaccacgctacgggcctttacctgcgacgacctgttccgcttcaacaacatattagtatccaatggaattcga

SEQ ID NO: 506531 - DNA, 137 bp, Homo sapiens
ttgagaattacacggccagttttgaaatcgacacacaaagaatagagttgagcctgtgggacacttcggaagttccacctggtgccaagcatcaacaccatgagtggcagtcaggagctgcagtggatggtacagcc

SEQ ID NO: 506532 - DNA, 83 bp, Homo sapiens
ctgccccgcggccaacatgagcttcttgttgagggagccatggatttgctgcgggagctgaaggccatgcctatcacgctgca

SEQ ID NO: 506533 - DNA, 83 bp, Homo sapiens
gcggtggcaggggctgcaggagcaagtgaccaggagcaggactggggacaggaactgtggctgcaccatctgtcttcatcttc

SEQ ID NO: 506534 - DNA, 98 bp, Homo sapiens
gttgaaaatggacgagtaatcgcctgctttgattcattgaaatctacaaataagaaacctcgaaaatctccaggtgagaagagcagaattgaagctgg

SEQ ID NO: 506535 - DNA, 100 bp, Homo sapiens
cgccgccgctgcagtggtcgtccctgccctccccggccccggggtgcaccccgcaaggattgtcagctgacctctgtcctgtgtgcccagtggccccagg

SEQ ID NO: 506536 - DNA, 100 bp, Homo sapiens
ccctctgtctgcctgtgtccctgaccatggctccctgcagtaccctttaacggtatgaatctccagaaatagctctaaattgtggaataatgttaagaga

SEQ ID NO: 506537 - DNA, 89 bp, Homo sapiens
gaggagtcaacagatgccacaggcagcacagcaagcagctgagatctgtatctgtggacctgaatgttgatccctcgcttcagattgac

SEQ ID NO: 506538 - DNA, 96 bp, Homo sapiens
gtttcttcgtcttatctttgggaccctagttcaaagataaactcatcctgaaagtcgctgttgttctcctgctgagcaagaatggaggccccactg

SEQ ID NO: 506539 - DNA, 51 bp, Homo sapiens
ggccccctcttcgcctcctccagcggggatctgatgagcttctttcttctg

SEQ ID NO: 506540 - DNA, 75 bp, Homo sapiens
gtcagggacatttctgaagcgagcgtcttcgatggaatttgctgattcccttggaattccgtttttggaaaccag

SEQ ID NO: 506541 - DNA, 100 bp, Homo sapiens
aaagatgctgcttgtgaaagcaaatgaatttgaggaaccattggcactggcaagtggggctctgccagactggtgtgaacaattaaccagcaaatgtcct

SEQ ID NO: 506542 - DNA, 51 bp, Homo sapiens
gcccagagtccgcggccggggcgcgggagatcagtgaaaagcatgatgtgg

SEQ ID NO: 506543 - DNA, 75 bp, Homo sapiens
gaagacagagggttttcttttgaggggctgacgtttaccctacgtcctggtgaggtgacggcgctggtgggaccc

SEQ ID NO: 506544 - DNA, 97 bp, Homo sapiens
aaaggtggcccataaacaagttgcagcagaattgctggatagcttgaagaagaatacccacacctacttctacaccagctttgcagcctacatcttc

SEQ ID NO: 506545 - DNA, 149 bp, Homo sapiens
ttgcccaagtacctaagcaaacagataacaaccctacggagccagagacttcaattgatgaattcctaggacttccggttgttcctactgaaggattggtctccatattaaagaagaggaatgatactgtaggagatcatcctgcccaa

SEQ ID NO: 506546 - DNA, 88 bp, Homo sapiens
ggacaacatcaccgtgaggcagggggacacagccatcctcagccgagcccctgccactgatggacctgtgccggagatccatccgctc

SEQ ID NO: 506547 - DNA, 75 bp, Homo sapiens
tttgcaaagaatccaggacaaaaaggattaggtggctcagaagttagttcaaagaggaaaaaagatgaaacagcc

SEQ ID NO: 506548 - DNA, 100 bp, Homo sapiens
gcattttggagtatagagactttttacagagaggaggtggagcctgccttttcaacaggccaacaaagggtcagcttctggaggttggttggaacaatac

SEQ ID NO: 506549 - DNA, 100 bp, Homo sapiens
ttctaactttgagaggaagaaattgaccacctggactatggaactgtgaacggggcactaccctgtctgggggccagaagcagcgcctggccatcgcccg

SEQ ID NO: 506550 - DNA, 90 bp, Homo sapiens
cctgtgacctgcatgtactgggggattcgcagggaggatgtcgggacaccccggaagctgggaaatggcttggaagtcctaagcgatgac

SEQ ID NO: 506551 - DNA, 136 bp, Homo sapiens
tatggctcagcagactcctgtaggtaatgctgctgtatcctcagttgactcattcactcagatacagtttatgtaacttgatggaagaaaatggaattactccaaaaagacaagtgctcaagcagcaaaatcctta

SEQ ID NO: 506552 - DNA, 83 bp, Homo sapiens
atcagatcatcaaggacttggcctccatggtgtcagagcaaggagaagctgttggtgatgtatcacccatcagtatgtctccc

SEQ ID NO: 506553 - DNA, 98 bp, Homo sapiens
gatcatgaactagtgacctggaaaggtgaaaggtgtagcagtcactcggcctacacccacagcatcgaccttgtgaacccagcgacctgactgccttg

SEQ ID NO: 506554 - DNA, 49 bp, Homo sapiens
gtattgagctacgcatcaagagaacaggaaatatagtggtcattatgat

SEQ ID NO: 506555 - DNA, 82 bp, Homo sapiens
caagagcggcagccacaccggcagattgcagcattcaatgctctggttaccttctgcatcagagacctcattggctgtctcc

SEQ ID NO: 506556 - DNA, 75 bp, Homo sapiens
tggacatcagcgccatccccgagcagcggtggaagctgtgccaggtggagctcaacaggaaagtcctagcggatc

SEQ ID NO: 506557 - DNA, 126 bp, Homo sapiens
cgcgaagagccgttagtcatgccggtgtggtggcggcggcggagactgcgggcccgtagctgggctctgcgagatgtttctttctcagcaaaatagaggagaagcttacccctcttccagaagata

SEQ ID NO: 506558 - DNA, 85 bp, Homo sapiens
agagcttgctccctacgatgagaactggttctacacgcgagctgatcctgcggaccccacaccctgcccctgctggactcagttg

SEQ ID NO: 506559 - DNA, 100 bp, Homo sapiens
ctcctgctctgcagcttctgttcagggaaaagcttcactctgaccatcactgtcttcacaaacccaccgcaagtcgccacctaccacagagccatcaaaa

SEQ ID NO: 506560 - DNA, 75 bp, Homo sapiens
gagcagtctcaggcctttagtgatgatgaatgaagactattctcagcaatcagactgtcgacattccagaaaatg

SEQ ID NO: 506561 - DNA, 75 bp, Homo sapiens
aaaggcaagaaggcaacgacgttccatctgtggaaggacctaccaaccaggttacttttcacatagaaccatata

SEQ ID NO: 506562 - DNA, 100 bp, Homo sapiens
gaataacacaccggagacttttggggggaaactaggtcgatggtcggcggcgcccggatgggcagctgaggatgtacagttacccagcacgtgtacctcc

SEQ ID NO: 506563 - DNA, 100 bp, Homo sapiens
tttgaaacaaaaatgggtggagtacagatctctgcagttacaggaacatcgtctgcttcatggtatggcctcacaagtcttggtctacccaccatatgtt

SEQ ID NO: 506564 - DNA, 75 bp, Homo sapiens
tgctgctgtgtgctcgacaatggtgacattgtggttggtgcgagccttcaaaagtatgttcgggaacagattcta

SEQ ID NO: 506565 - DNA, 100 bp, Homo sapiens
ccccagttattgaaactgcctattatgcaaatgaggaagcgctccagttacctgcaaaagcttgggcttggagaagcaatgaagcttggagatacatggg

SEQ ID NO: 506566 - DNA, 74 bp, Homo sapiens
ccccaagtgccgcagacttgtctgagattctgatggtgagaccattctaaaaggcctccagtccattttccagg

SEQ ID NO: 506567 - DNA, 50 bp, Homo sapiens
cgcagcgtaacttcattcttcaggcaattttcgttctgctctcaatgatg

SEQ ID NO: 506568 - DNA, 75 bp, Homo sapiens
tttgtctcctgtaacaatttacgcgccgtgtaactgtgaatctttcaaagacaagttgctttggcagatgccatt

SEQ ID NO: 506569 - DNA, 50 bp, Homo sapiens
gtgaaacaccactgaagcattgccaagatcttcttcagcagtatcgttct

SEQ ID NO: 506570 - DNA, 90 bp, Homo sapiens
aagagaatgacctagcaaaagttgatgatcttccccctggatgagaacaagttgagcagtgccaacggccatgaagaacgtagcaaaaag

SEQ ID NO: 506571 - DNA, 74 bp, Homo sapiens
aataacctgttggccttgggcacagaccggaagctggatgacgtcctcagaatggttggaatgaccctccagct

SEQ ID NO: 506572 - DNA, 87 bp, Homo sapiens
ctttctgaaatggaacctcaggatcttgagctagagatccaaaggggctattctgaacatttcatctggcagtggcatgctccctgt

SEQ ID NO: 506573 - DNA, 82 bp, Homo sapiens
cccaccccaggcgtggtattcagcacatgattaagtaccggtacatcccgttcacacatgggaagagaaggtacagaggcaa

SEQ ID NO: 506574 - DNA, 100 bp, Homo sapiens
acgaggaagcttataaaaatgtggtcctaaagaagacgaagagaagccttcagcctcagcacttgagcagccggccaccctccaggaggtggccagtcag

SEQ ID NO: 506575 - DNA, 99 bp, Homo sapiens
caggacagcgtggactttgatattgatgtgaacgcctctgtgtttgaaacaaacattcgaggagtcagtggatcggtggggaaaatgctgcttaccctg

SEQ ID NO: 506576 - DNA, 75 bp, Homo sapiens
gctacacttactccagtgggaggaggactccactgacaagctctctactgatgatctgaactccctcattgctca

SEQ ID NO: 506577 - DNA, 105 bp, Homo sapiens
ttcaaggacaagttcggattatttgctgagttgctgttagaaactttgcaagaggagctgaagctttttaacgaaacagccaaaaagcagatggaggagttacag

SEQ ID NO: 506578 - DNA, 98 bp, Homo sapiens
ccgggacccacttcactccagtgcctccgacgcctcctgatgatgccatccggcagagcaaccagattctgcgggagcgctgcgaggagcttctgcat

SEQ ID NO: 506579 - DNA, 80 bp, Homo sapiens
gagcggcctgcgggcgatcgggccgagatggcagaaacggtggacacaagcgaaatggtcaacggcgctacagaacaaag

SEQ ID NO: 506580 - DNA, 98 bp, Homo sapiens
acgtcctccgggaccggagtcagaaccctccgcagagtaaagcctgtgggccaaagctgaccaactcccccaccgtcatcgtcatggtgggcctcccc

SEQ ID NO: 506581 - DNA, 75 bp, Homo sapiens
tatgtatatgagagtttcttgatctctttatctgtggatgaacagtggttggatttcatcccttactggtctcaa

SEQ ID NO: 506582 - DNA, 98 bp, Homo sapiens
gcggctgagaccccacccaggccaaggacccccgggaggccccttagctcaaagcggaccgagagcacgcaccccagcagaaatcgggagagaatgcc

SEQ ID NO: 506583 - DNA, 74 bp, Homo sapiens
agtttatactatcagaccttattttcctaaggatgagcttcttggacacttaatgattgttggcaagaaatgtg

SEQ ID NO: 506584 - DNA, 75 bp, Homo sapiens
ccaaaagtccattatgaaactgtttgctggaaaccatgtctcattatacagatgaacccagatttaccatagagc

SEQ ID NO: 506585 - DNA, 75 bp, Homo sapiens
cccggactgagaggcagcgagaggtgaagcctggtgttcggtacagagaattgggaaacattatccagaagcatg

SEQ ID NO: 506586 - DNA, 113 bp, Homo sapiens
aggctgcaagcgcccaaagccaatgggaatcacctggttcaagatgcacaccggctgcaccatgtcagcagcctggcctggctggacgagcacacgctggtcacgacctccca

SEQ ID NO: 506587 - DNA, 50 bp, Homo sapiens
cgacacactatgctccctccaaagcctggctggcaaacccttctaatgat

SEQ ID NO: 506588 - DNA, 51 bp, Homo sapiens
cttccacaccccctccgtgggtgtgtgcagtcctgcgttaactgcggccgg

SEQ ID NO: 506589 - DNA, 96 bp, Homo sapiens
cccggctcgggccgcaccgccagggactggggtgagcggcccaggcttaaatcaagtgatgcttacaaaaaagcctggggcaataatcaggacgga

SEQ ID NO: 506590 - DNA, 100 bp, Homo sapiens
atgaggaagatcagggatcaaaactcattcgaaaagctaaagaggcaccattcgtacccgttgcctactcagcaggaagacaatgaggatgaagaccttt

SEQ ID NO: 506591 - DNA, 90 bp, Homo sapiens
cttttcttaacctgggaagtggaaccggatatttaagtacaatggtgggcttaattttaggctgggcatggtggctcacacctgtaatcc

SEQ ID NO: 506592 - DNA, 100 bp, Homo sapiens
gaaataccagtccccagtgagggtgtacaaatacccctttgaattaattatggctgcccgccacgatgactatcatggtggaggacatcatgaagctgct

SEQ ID NO: 506593 - DNA, 75 bp, Homo sapiens
gccaactttgaatttcttctatcaacagggttcacacctccaggaatggatagatcctctccagataacagccca

SEQ ID NO: 506594 - DNA, 74 bp, Homo sapiens
agccgatgcaccgagtccagcccaggaaaatggagaggctttggcataggatcagaaattctgaagaatctaag

SEQ ID NO: 506595 - DNA, 50 bp, Homo sapiens
gttcacggcaggattcggttaggagctgacatggacccaaatcctcgggc

SEQ ID NO: 506596 - DNA, 51 bp, Homo sapiens
cagcgaccgggagaacatagacggagacaaggacggcagcaaggtgacaac

SEQ ID NO: 506597 - DNA, 83 bp, Homo sapiens
cgaaagcgacgttcggccaccggaggagcgggagccaagcagatgtggacgagtgctcactagcagaaaaaacctgtgtgagg

SEQ ID NO: 506598 - DNA, 100 bp, Homo sapiens
agatgacacgtgcgtggggtgttgggctttatcctgtggataaacgcagagtgaacgagtttggggagtcctacgaggagaaggccacgcgggcgcccca

SEQ ID NO: 506599 - DNA, 101 bp, Homo sapiens
aaattctcatgatagcttccaagggacaaggtgtcaacaatgtgccgtgtatactctgaaagagcgatgcctccaggttgtccggagcctagtcaagcctg

SEQ ID NO: 506600 - DNA, 100 bp, Homo sapiens
gatcagcaatccttggctcactgaggaggtttggcatgaacaaccgggaggtgctggagcaggtggagcgaggctacaggatgccctgcccgcaggactg

SEQ ID NO: 506601 - DNA, 96 bp, Homo sapiens
tcctcggccacttcggctgtgtcaatgccattgaattctccaacaatggaggccagtggctggtctcaggcaaactcagactgtcacagtgaaccc

SEQ ID NO: 506602 - DNA, 99 bp, Homo sapiens
aaaagggcgagacataccttcacgcaaggcgaggatgcatgagttttcctgtgaagcaggccctccagggaaacgaggtaagagaggccgaagaggaga

SEQ ID NO: 506603 - DNA, 75 bp, Homo sapiens
tgaccagcttagcttctgtcctaaaggtaattctgttccacaggatatctgctgtatggcagctgatggcagatt

SEQ ID NO: 506604 - DNA, 79 bp, Homo sapiens
ggaatatcacaggagtgatgctgtgttcttcactgcatgatttcaaaagaaatggaatctatttggaatttgcagaagc

SEQ ID NO: 506605 - DNA, 100 bp, Homo sapiens
ccgactcctaagtccttcggccgccaccatgtccgcctcggctgtcttcattctggacgttaagggcaagatcgttcttgatgttggctgtggctctggg

SEQ ID NO: 506606 - DNA, 82 bp, Homo sapiens
ggattcccagccatggcagattcctccgggcagcagggtagcagtagctgatgtgcagtttggccccatgagatttcatcaa

SEQ ID NO: 506607 - DNA, 98 bp, Homo sapiens
ttagccttgcgactggcccagtatccaggtcgaggttctgcagaaggttgtgactttagtatacaaatctccctggaaaaggagacatgaatgtctgc

SEQ ID NO: 506608 - DNA, 98 bp, Homo sapiens
ggtctggaagtagatatcagtttgtataacacattggcggcttacagggagaacacagttggcctccaccgtttctgccccacagaaaacgtagcaaa

SEQ ID NO: 506609 - DNA, 82 bp, Homo sapiens
cttctggcagggcagcacggaccaccgcggggtccccggcaagctgaccatgccactgcctcggtacggctccgggcagcag

SEQ ID NO: 506610 - DNA, 105 bp, Homo sapiens
ctcagacctgccaatttaccagagataattgataacaccctgtaacagctgagaactgtggctgcaccatctgtcttcatcttcccgccatctgatgagcagttg

SEQ ID NO: 506611 - DNA, 127 bp, Homo sapiens
ctacctggatgcattttaactaatcctgaggacttcatccggtcaccatctacctattcttcaaatgatttgtggtggtgacaaaccatttctggccccaaatgacttgcagaccaaacacctgcaa

SEQ ID NO: 506612 - DNA, 74 bp, Homo sapiens
tatttcctggcccaatagacaactctgggctattttcagggagcgtaaccacgctgaaagcactgaacctaaga

SEQ ID NO: 506613 - DNA, 100 bp, Homo sapiens
ggagccgacgggcggtggccgcactgggaccccggaatcccgcgcgctgcccacgattcgcttctgagcatccataccccagtttaccaattcccccaca

SEQ ID NO: 506614 - DNA, 100 bp, Homo sapiens
gttcaaggaggtgctgaagagcgaggaggaatgaattcttccaaaacaaaactagaactgcaaaagcacctgacgacattaaccaatcaggagcaggcga

SEQ ID NO: 506615 - DNA, 100 bp, Homo sapiens
ctttacttaaacatctatgtgcccatggaagatggcaaaggcagctcgagcatctcatctgacgtgagttcaagtacagatcacacgcccactaaagccc

SEQ ID NO: 506616 - DNA, 75 bp, Homo sapiens
cttttgttctctggcatggaaggggtcctcagagttactggggaactttatattgctgttggaatatctggagcc

SEQ ID NO: 506617 - DNA, 75 bp, Homo sapiens
gtcggtgctccggggaggtcacctgacgaggaggtgccgtgtggacaggcgacaacacagcagaatggagcaact

SEQ ID NO: 506618 - DNA, 127 bp, Homo sapiens
gcgcaactccttgaaggaactgtggcttgtgatccatgggcgagtctacgatgtcacccgcttcctcaacgaggagctcgaggccatgagcagatataccagcccagtgaacccagctgtcttcccc

SEQ ID NO: 506619 - DNA, 74 bp, Homo sapiens
cttaactcctctttacttgctgtcagctgcggagtctgcgggccaggcatcgacatccgcaacgactatcagca

SEQ ID NO: 506620 - DNA, 75 bp, Homo sapiens
cagatggcagaaccatgcttcctgtaaatcctgcagaatcccacagacccctttgcttctgtttttgggaatgaa

SEQ ID NO: 506621 - DNA, 101 bp, Homo sapiens
cccgggacccgcctgctgagtggacccgggtgcaactcatgcagcaattccagaaccccgacttcccacccgaagtagaggaacaggatgccagcaccctg

SEQ ID NO: 506622 - DNA, 50 bp, Homo sapiens
ggccccgcgggctgtgaagctgccctgcctgatgtggctctgggaattcc

SEQ ID NO: 506623 - DNA, 80 bp, Homo sapiens
caatatttacgaggcagtcaagtttcagcagagcagctttaccatttgggctggtgaggcgagaattatcctgtgaaggt

SEQ ID NO: 506624 - DNA, 75 bp, Homo sapiens
tcccacctgagaaccatgctcaccgaccctatgccgtagggccaggtgagctgctgtgaaggactcattcttggt

SEQ ID NO: 506625 - DNA, 88 bp, Homo sapiens
cagctaaggtcacagcaccacagggagaggaatcaaatgagtctgcagaatctagcagtaattgggaaaagcaggaaagtattgtact

SEQ ID NO: 506626 - DNA, 73 bp, Homo sapiens
tagacttgtgcaaccagggcaactctggtgaaaggtgtagcagtcactcggcctacacccacagcatcgacct

SEQ ID NO: 506627 - DNA, 75 bp, Homo sapiens
ggtgcctggagatgaagctggaaaggatagcaaaacctgatctcataaaacctaggtcacaaaggacagccctgc

SEQ ID NO: 506628 - DNA, 100 bp, Homo sapiens
ctcagaaatcgtatacatagacggatctcaatggagttcaaaaggtgatgacctatcaacagccattctcaaacagaagaaccgtcccaatcggttaatt

SEQ ID NO: 506629 - DNA, 100 bp, Homo sapiens
atctgaagaagttcatcgccaaaaaactcaacctttcatcctttaacgagtttggaaattttagcattcaggtgccaggaatgcagatgggacagccagt

SEQ ID NO: 506630 - DNA, 96 bp, Homo sapiens
tttcatttccatttctaccttgtatgcctcaatttgctggatttaagcactgctgcactttatgaggccaagtcctgtatctgccatgtctgtggc

SEQ ID NO: 506631 - DNA, 100 bp, Homo sapiens
ccaagatgaaggtgtgtggaagtatgaacatttaagcaggtagcatctaaaggaactggtttaaatcctaatgccaaagtatggcaagaaattgctcctg

SEQ ID NO: 506632 - DNA, 100 bp, Homo sapiens
tctgattctccagcgacaggacccggcgccgggcactgagcaccgccaccatggggaaggggggtcatccgcacagaatggcagcgcattaaagagggaa

SEQ ID NO: 506633 - DNA, 75 bp, Homo sapiens
catctgctgtcaggtggctcagtctcttcaagaaaatgaggaggaggagattgggaacctagagcttgcctggga

SEQ ID NO: 506634 - DNA, 97 bp, Homo sapiens
agaaagtgaaatcagaggagatgtaactatcggaatgtgttccagaagatctagaactgaagaagaagatttttgctcagttagattccatcattga

SEQ ID NO: 506635 - DNA, 98 bp, Homo sapiens
cgggattctggaccttcagctactatcagagcttctttgacgtggacacctcacagatgatacataccttttctcgatgtgtgttatgctgtgctgaa

SEQ ID NO: 506636 - DNA, 90 bp, Homo sapiens
cgcgggccgaagcgcccggagcgggagcgagcggcgcggcccgatctggaaacagttgccacatctaaaggcagtcgtgatatataaaga

SEQ ID NO: 506637 - DNA, 75 bp, Homo sapiens
gagcaccagaggtcttgacaaagtgccccaatcaaactacagtatgatccatttgctgagcacagacctccaaag

SEQ ID NO: 506638 - DNA, 98 bp, Homo sapiens
tggtgggaaatcaagtcgtaaaaacaggtcaagtgatttcaccacccaatcctcagtcctttggaaagcagtttccagctggaagttgacgtcctgtg

SEQ ID NO: 506639 - DNA, 134 bp, Homo sapiens
caggacaacatcaccgtactgcatgtgaagctcaccgagacggcgatccgggcgctcgagacttaccagagccacaaggatcaactcactatcctgaaggtccattctcccaagaagaggggacagaaagacag

SEQ ID NO: 506640 - DNA, 82 bp, Homo sapiens
cagaaccatggcccaatttgtccgtaaccttgtggagaagaccccggcgctggtgaacgaacctaaatcacagccacagcag

SEQ ID NO: 506641 - DNA, 50 bp, Homo sapiens
gctgcatcttccaatcttccagggtgccgtgagcgatgtggagatgcagg

SEQ ID NO: 506642 - DNA, 96 bp, Homo sapiens
tgatgttcctcccaggagacagctatatttgcccatgttattcaaggacctgagggcactcgctttgctcctgtcagtacacactcccaaacagtt

SEQ ID NO: 506643 - DNA, 90 bp, Homo sapiens
tcagcaccgacagccgacgcgcagatagcagagccatccttggggatgttttagaagaatgtatgtctcttcccaagctatcttcttatt

SEQ ID NO: 506644 - DNA, 100 bp, Homo sapiens
ctgcccccttttcctggtgcatgtgaagttatcaaaaacagacaagaaatcgctttgaaggcactagatcagaagtggaatcactgatgaaaaagatgaa

SEQ ID NO: 506645 - DNA, 75 bp, Homo sapiens
ccagagctgaggactgcctgtttgcagaacactctgctccagccaaggtggtgagggcagctgttcctaaacagc

SEQ ID NO: 506646 - DNA, 82 bp, Homo sapiens
cggggcttccggaggtcgcggagatggaattggagcagagagaagggaacttgctactaccagcaccatgccctaccaatat

SEQ ID NO: 506647 - DNA, 100 bp, Homo sapiens
gaccattatagatgaactgggcaaggcttctgccaaggtacccactgatggtaatgctggcctgctggctgaaccccagattgccatgttctgtggcaga

SEQ ID NO: 506648 - DNA, 100 bp, Homo sapiens
aggggttggttcccgtcgtcgtacacgaagttgctggaagaaaatgagacagaagcagtgaccgtgcccacgccaagtgcaacaggtgatcgagaaccac

SEQ ID NO: 506649 - DNA, 83 bp, Homo sapiens
aagttccaaactgtctgatgctgggagcagtatagcatcaagttctagaggaattgggagccattgcaaatctgagggtcagg

SEQ ID NO: 506650 - DNA, 98 bp, Homo sapiens
gtgctgttcccaaacagacttgcacctggaatggataaaagtggcagtttttgtttcttcccatgaggttgtgtatctggactgagaaccaggaaatt

SEQ ID NO: 506651 - DNA, 101 bp, Homo sapiens
ggaacgaatgggacaagatcccgtccatgaatcagggactttgaacatgtcggggatcgccctcagcagactcgcccaggagaggaaagcatggaggaaag

SEQ ID NO: 506652 - DNA, 90 bp, Homo sapiens
cactccctttcctctgctgccgctcggtcacgcttggtattggatcaggagtcaattttcagttgaacaaccaacataaattcaacattc

SEQ ID NO: 506653 - DNA, 73 bp, Homo sapiens
gagacctagtggaagtggttctttcaggtggtgactatcctgttgagaagcaaaagatactttgcaagtaaaa

SEQ ID NO: 506654 - DNA, 100 bp, Homo sapiens
agaagaagaagttgcgaaggatccccaacggggaggccaacgtgaagaagtcgcaatggaagaagagatcgccgcgctggtcattgacaatggctccggc

SEQ ID NO: 506655 - DNA, 98 bp, Homo sapiens
ctttcctcggcaagaaatgtgtgcactgggtattgtacccctccaatatgtgtttgttatgacctttacacttgatgatggaacaggagtactagaag

SEQ ID NO: 506656 - DNA, 76 bp, Homo sapiens
aggcaaagcgaaattggtcattctcgctaacaactgcccagctttgagtgcagtcattggagaaatcgatgaagaa

SEQ ID NO: 506657 - DNA, 100 bp, Homo sapiens
gctatcaggggaagatatgcatcagttccatcgagccattactacaggacctgatcccaaccttgaagaaagtcctaaaagaaaaaatattacatatgag

SEQ ID NO: 506658 - DNA, 75 bp, Homo sapiens
ccggaggagcagctcacctgagagacggagccccggctcgcccgtgtgcagagttgacgaaggatcagagattgg

SEQ ID NO: 506659 - DNA, 91 bp, Homo sapiens
cggggcccgccgtcaggtggaagcgacccaagatgcattcctggagcaagctgtgtcatatcaacagtttgtggacaaccccgctattatc

SEQ ID NO: 506660 - DNA, 50 bp, Homo sapiens
tggcaagtggacattttactggctcaagtgacaatatcagtggatgggat

SEQ ID NO: 506661 - DNA, 99 bp, Homo sapiens
ggcaattccaagaagagggaaaagcttgtgcacagattgtcactgctgttccaagggcacacgcagagggatttggaattcctggagagttgcctttgt

SEQ ID NO: 506662 - DNA, 100 bp, Homo sapiens
actgactttcagctatggaatcgctggatgaactgcagctttgcaagaattgcttttacttgtcaaatgctcgtcctgacaactggttctgttatccttg

SEQ ID NO: 506663 - DNA, 82 bp, Homo sapiens
gattggggagatttttgaacttcgaggaagtgtctactatgaaccatcctgtactcagaatgtgaatcatggtgtacttgtg

SEQ ID NO: 506664 - DNA, 129 bp, Homo sapiens
tgaagactacagagaagcttcttcttgtgccgtgaacctcgttttgagattaagcatgtttccccctccaaggacatccggacagccagcacagaggccgacaagaagctctctgagttcgacgtggag

SEQ ID NO: 506665 - DNA, 74 bp, Homo sapiens
gctccaagacctcatcaacaattaaggcagctgcagttgcactttcctccctgattcatgctttggatgactta

SEQ ID NO: 506666 - DNA, 75 bp, Homo sapiens
gccaggccctgcaggacctgctttcggagtacatgggcaatactatctgttatagtccctgggtcaagacaacaa

SEQ ID NO: 506667 - DNA, 92 bp, Homo sapiens
tccgccacgcagccggccaccgccgagacccagcacatcgccgaccagaggatgtccggcttccagatcaacctcaacccgctcaaggagcc

SEQ ID NO: 506668 - DNA, 101 bp, Homo sapiens
caccatttagaagtctggcaggcaaagaggacaaggtcttaaaattttggtagcagaaagcaaatgtgcaaagagcaatggaaaacaagtcagaagctgct

SEQ ID NO: 506669 - DNA, 83 bp, Homo sapiens
ccaggactgcgcccccgggagcgggcgcccagagaaccttcaacaactagtactgcttcaaattatccagatgtgttaacaag

SEQ ID NO: 506670 - DNA, 97 bp, Homo sapiens
ccgtcctccgttagctaattaaaacatttttcagggacgtagccatccagagataaccacctgcctcaaagataatctgctcaaaagacttccattt

SEQ ID NO: 506671 - DNA, 75 bp, Homo sapiens
ctcttcggatgaggagaccctggaagacaatctaagattgcaggcgagaagaaatctgctcagtggcgcacagtg

SEQ ID NO: 506672 - DNA, 74 bp, Homo sapiens
ctgcttcccaatcccactgatgaggatcagcccatggccagaagcggactcctagaagaggggagcagcaagga

SEQ ID NO: 506673 - DNA, 100 bp, Homo sapiens
ttttggagagagaatgctgtgaggttaaatgagaagaattatgaactcttgaaattaatactgaggaacacgtggatgcagctgatcaggaggttatctt

SEQ ID NO: 506674 - DNA, 74 bp, Homo sapiens
tgggaatagctgggctgagacctacaggaatcggactcagaattcatgattgaagaaatgcaggttagtttaaa

SEQ ID NO: 506675 - DNA, 83 bp, Homo sapiens
acatctctttcaatgacaaaaagtttgtcattaaacccatcgacaagaaggcacctggcgaactttctgaccaagtatacaac

SEQ ID NO: 506676 - DNA, 127 bp, Homo sapiens
ctcagatcaaggattcggagaaaggtctctacaggtccctcctcgttagtatagtggaagaaatgttggctatttggcgatgagaggtggtgaacagtgaccatactggtatacaacactatgggac

SEQ ID NO: 506677 - DNA, 98 bp, Homo sapiens
ttcggagcagggttttcagggaggtggagatgctgtaccagtgccagggacacaggcccagggaggggagcaaggagaaggcaggtgcgcgcagcaag

SEQ ID NO: 506678 - DNA, 100 bp, Homo sapiens
ggcgctgacggactgggggcgccgcccgcgcccgggaccgacccctctgctcgcggccgcgcctttgaggcaaaaatctccagccctacagagactgagc

SEQ ID NO: 506679 - DNA, 149 bp, Homo sapiens
acgagtagggggcgcccgcgcctttgcccccgtgcgcacccccgccccgctcaccttagccccgcgcccgagggtgctgaaaagtcacccaccacttcagctgaccttaagtcagacaaagccaactttacatcccaggagacccaagg

SEQ ID NO: 506680 - DNA, 101 bp, Homo sapiens
cacaagcagatctactactcggacaagtacttcgacgaacactacgagtaccgtctttcccagggaactccgatgaagtgttccaacaaaatgagcgagtg

SEQ ID NO: 506681 - DNA, 88 bp, Homo sapiens
ggacgtggggaatttctcctggggctcagagtggctccacagagagctgcaacaccaccacagaagatgaggacctcaaaggtaggtg

SEQ ID NO: 506682 - DNA, 100 bp, Homo sapiens
gcatggagcaagtctgtcagcaccatctttctaacaaacatacatatgatagttgagaaagacacatattctgatcatgaagaaataaacacaagttaaa

SEQ ID NO: 506683 - DNA, 100 bp, Homo sapiens
cggcgaatcacttataaatggcgccgaagcaggacccgaagcctaaattccaggaggatctgaagaagacacttgaatcatgggtgacgttaaaaatttt

SEQ ID NO: 506684 - DNA, 88 bp, Homo sapiens
gaggctgaggaggagaggacagaggtgcctggggcaacctccaccttgacggttccagggcatggactggaactcccaatacccctga

SEQ ID NO: 506685 - DNA, 83 bp, Homo sapiens
gacgcgcaggagaagctggagctcacggagaagaaggcctccgacaattaaatgtgagggagtctgacgtaagagtttgtgat

SEQ ID NO: 506686 - DNA, 146 bp, Homo sapiens
ttataatacctaagaagaatcctttgtatgtgccccttgaaggtgaaattttccaaagttttaacaaaaggtgcgttgtagaagacaagaactcaaaggtggcctggttgaaccgttctggcatcatttttgctggacatgacaag

SEQ ID NO: 506687 - DNA, 98 bp, Homo sapiens
aacagaacaccaggacatcccagagtctgggaaatgaggccatgtggaagtgttacatcaccttttgcttggaaagatttactaagaagtcaaatagt

SEQ ID NO: 506688 - DNA, 90 bp, Homo sapiens
cccattcctttaaatccggagggggaaaaaatcccaaggtctgcaaagcctcccaaagtgaaatgcctgaccaagatctggcaccccaac

SEQ ID NO: 506689 - DNA, 100 bp, Homo sapiens
aaacagagcaacccccggcagatcaagcgagctacagggagctggccgactgcacctggcacatggcggagaagctgggctgcttctggcccaatgcaga

SEQ ID NO: 506690 - DNA, 75 bp, Homo sapiens
ctttggagcatcattttgcactggcaggttttaaaatcaaagatgggaaaatcggagaaaattgcccttccccat

SEQ ID NO: 506691 - DNA, 100 bp, Homo sapiens
gttattgccgtgtgcagtataataacctggaacaggttacctacctgggcaaagtctccaccactggcatgcagtttttgtcaggctgcacagaaaagcc

SEQ ID NO: 506692 - DNA, 75 bp, Homo sapiens
gctggataccaaatagcagtggaaaccgatcctgataacttaagtgactctctcttttccggtgatgaagaaaat

SEQ ID NO: 506693 - DNA, 100 bp, Homo sapiens
acctgcaggcggccgccgagttcgacgggaggtttggtgcacctcgatttggaggaagtagggcagggcccttatctggaaagaagtttggaaaccctgg

SEQ ID NO: 506694 - DNA, 75 bp, Homo sapiens
gctcctgccccggagcgtccaagaatccctttgcccacgtccagctgaagccgacagtgaccaacgacaggtctg

SEQ ID NO: 506695 - DNA, 76 bp, Homo sapiens
cgacagtacaaagaagactcttgtcacactaattgccaacaacaatggtattgctattaaggagtcagcaaaagtg

SEQ ID NO: 506696 - DNA, 75 bp, Homo sapiens
gtaccagtcccttccccacctccacgcccctccgcagaccagtgagctcctccgacagcgaggcccccgaggcca

SEQ ID NO: 506697 - DNA, 101 bp, Homo sapiens
tgttgctcaccccgcaggagaacgagtccctcttcactttcctcggcaagaaatgtgtgggtgctgataagactgtgaaaggcccagatggactgaccgcc

SEQ ID NO: 506698 - DNA, 100 bp, Homo sapiens
agaacatcattgttggttttgcaagaatgaatgggaggactgttggaattgttggcaaccaacctaaggtggcctcaggccactgggagacgcaggagga

SEQ ID NO: 506699 - DNA, 74 bp, Homo sapiens
caaatatcctcggaagagcgctcccaggagaaacaacatcctggtggggaagaagttttaagggaacaagctgg

SEQ ID NO: 506700 - DNA, 100 bp, Homo sapiens
agctgccaggctgctcaaacgcaggtataaaagcctgccgttggtggaaaaggaaaaggtggtccagttagacaagatgccaccggcttctgaaaccaga

SEQ ID NO: 506701 - DNA, 80 bp, Homo sapiens
ggcccggagtactagtctcaacgagagacccaagagccatggccatgcagaaaatctttgcccgggaaatcttggactcc

SEQ ID NO: 506702 - DNA, 98 bp, Homo sapiens
tatgacaagattgacccagagaagcttaattgagtccctgaagttctggaggacccgcttcctgctgctgccagcctgtgtcaccgccaccaagcgca

SEQ ID NO: 506703 - DNA, 76 bp, Homo sapiens
agtgacgaggtccgctacgtaaatccctttgcggcgggctatttgctttctagaagagaaggccaagcagggtctc

SEQ ID NO: 506704 - DNA, 83 bp, Homo sapiens
gagtgcccgcgccctgagcgctcagctccagaggcggatgaccgagtgggagacagcagcaccagcggtggcagagaccccag

SEQ ID NO: 506705 - DNA, 74 bp, Homo sapiens
aatctgttcagtcaaataactccagctcatttctgaattttgcctgaagcaggacattctaaatgaaaagactg

SEQ ID NO: 506706 - DNA, 75 bp, Homo sapiens
tttgttaaggattccaagtaactcttatttgtctggctcttgctgattgaattcctttggtgcagtttagcatgt

SEQ ID NO: 506707 - DNA, 100 bp, Homo sapiens
gtggaaacaaagggaggaactgtttgtagccctcgtccagacgccccaaacaaacagtgaatcttggaagcaaccagtaccttttctctgtcatagtgga

SEQ ID NO: 506708 - DNA, 108 bp, Homo sapiens
cccaccagcagctacggaagggcccaacatagtttgtaaagcctgtgggctttcattttcagtctttagaaagaaggcttctttgctaaagaatgatgagactaaggc

SEQ ID NO: 506709 - DNA, 76 bp, Homo sapiens
actgcaaaggccaatgttggtgctggcaaaaaggatgaatctggttatagatggacaagagacgatcattctgcaa

SEQ ID NO: 506710 - DNA, 100 bp, Homo sapiens
agtcgccctgagatccagcgcctggacacgttgcttgtctggagatggagccactacaggcgggcctgggcgcctggagtcgggcatgaaagaaaatagc

SEQ ID NO: 506711 - DNA, 100 bp, Homo sapiens
cgactgctgcctggtctgcaaagaagtcctttcaagtctctaggactggactcttcctaagcaagtccggtatgtagataaacaacttgatgcagatgtt

SEQ ID NO: 506712 - DNA, 100 bp, Homo sapiens
cacaaggcaaggtgactttgaaaggaggatttgacagctaaggatattgaagaaattattgatgagctcaaggctggcaaaatcccaaaaccagggccaa

SEQ ID NO: 506713 - DNA, 83 bp, Homo sapiens
ggggagatgaacccaacctagtgggtgtaatacatcatgaactgcagggcacagaccccacaggctcctcggacactgggtcc

SEQ ID NO: 506714 - DNA, 100 bp, Homo sapiens
aggccaaaaatgtgcatactcacagagttagagagagggatggtgaaaagagtctcatcgtggaaggcaagagggaaaagaaaaaagtagagaggttgac

SEQ ID NO: 506715 - DNA, 105 bp, Homo sapiens
tctacgcagaacccgggagtaggagactcagaatcgaatctcttctccctccccttcttggtgctggagaatctggtaaaagcaccattgtgaagcagatgagga

SEQ ID NO: 506716 - DNA, 98 bp, Homo sapiens
gtcagccttcccagtagctggaactacagctgttcgctgatgtggtcctgctctgtcccagtctagcagctttagtgtatggaaaaattgaactagga

SEQ ID NO: 506717 - DNA, 100 bp, Homo sapiens
cagccataacattgcccaccgagatgtcaagcacctggctgcagtggaagaaagaaagatcaagtccctggtagctctcttggttgagacacaaatgaag

SEQ ID NO: 506718 - DNA, 75 bp, Homo sapiens
cacttatccaaatacttacatttttgacttgtttggaggtgttgataggagctctacggtgactttgaagacttg

SEQ ID NO: 506719 - DNA, 100 bp, Homo sapiens
gatgcagcaggcatcatccgctatgcaattggggtgtgcctaccgcatgttgccgctgctgtttctgctgggacgtctgactccagttccttctcccctc

SEQ ID NO: 506720 - DNA, 100 bp, Homo sapiens
gtgcggacaaattcataaagctttacaaggatgctagtgatcaaagagaagatgtttatattggaaaccacatgccttgccctgaaaacctcaatggtta

SEQ ID NO: 506721 - DNA, 100 bp, Homo sapiens
gggaaccttggtggaggggtggtgaccatcgaaaggagcaagagcaagatcaccgtgacatccgagggaatgacagaggaagaggaagacaaacttctgg

SEQ ID NO: 506722 - DNA, 73 bp, Homo sapiens
tggatgttcagcagctttcacaaatagtaccaaagaaggggtagaagagccatccaaaaaacgagttatagaa

SEQ ID NO: 506723 - DNA, 90 bp, Homo sapiens
tgctggccaagaagatcatcattaaggacggaggcacggcacaattctgctttcccaggaactgcatcactcaggactctgcaagtttcc

SEQ ID NO: 506724 - DNA, 90 bp, Homo sapiens
caggacccgcctggctgcgagatattttcactgttacatgccttgaagtgatgaggaggtttctgttactatatgctacacagcagggac

SEQ ID NO: 506725 - DNA, 100 bp, Homo sapiens
atcgtctgggcctgtgtttcagctgggataggacttgtgcaccatggacaattttgctgagggagatttcactgtggcggattatgccttgttagaagat

SEQ ID NO: 506726 - DNA, 98 bp, Homo sapiens
ggagatcaagctggaacaggagttccgatcgacccggtaccaagaaggggagtgcccgcggcagagtgaaagcagcagcagtagcaacatctccacca

SEQ ID NO: 506727 - DNA, 75 bp, Homo sapiens
tggaaatgtagcttaatgacctccttgtcctggagtctcccttaatacagggcaattcaagctgctggaacaaga

SEQ ID NO: 506728 - DNA, 75 bp, Homo sapiens
gggacatgtatgaatctgcaaacaatcgataggagagaagtttgctgaggaatgccttcaagcacaaagtgatga

SEQ ID NO: 506729 - DNA, 100 bp, Homo sapiens
gggcgagggagaataagctgtaccatcgcaatatctcggaaaaggaaagccaagaactgggaagatgaagacttttatgatagtgatgatgacacatttc

SEQ ID NO: 506730 - DNA, 100 bp, Homo sapiens
ctcttacgtctgcggaagtgcagctgcctcagttcttagcgcaggcgccaagcccatctttgtgtgcttgcatccaactgtgatgagcctatgtatgtca

SEQ ID NO: 506731 - DNA, 100 bp, Homo sapiens
aagaggggcaagatcctgatgaaattggcatcgagttagaagccaccagcaagaagtcagccaagagatgtgttaaagggcgcaaaccagaagaagaggg

SEQ ID NO: 506732 - DNA, 100 bp, Homo sapiens
attgactgctgctggggctgggctcgccagtcttggggacagtgtcagcgcttgcagatgggtcaagggttgtggagagtggtcagaaaccagcagctgc

SEQ ID NO: 506733 - DNA, 100 bp, Homo sapiens
gctggagatggtggagtccgtcagaacatgcttgccaactcagccagcgtgaggatcctcatcaagggaggcaaggtggtgaacgatgactgcacccacg

SEQ ID NO: 506734 - DNA, 100 bp, Homo sapiens
ccaacgcctctttggaagaaatggcttctctagaggaggaagcctgcagccttaagactgccactctccgcccctacctgagtgccgtgcgggccacatt

SEQ ID NO: 506735 - DNA, 100 bp, Homo sapiens
agaacgccgcgctgcgcatctccaacagcgacctgagcggttcatctgcagaagccagcggacgcctctgttcaacttgtgggttacctggctcatgaga

SEQ ID NO: 506736 - DNA, 100 bp, Homo sapiens
ctctcctgcccttttaggagtgcaaaaagtgtatgtggtagaagaccaaagaagagatgagctaggaccatccacctgcctcacagcctgctggacggct

SEQ ID NO: 506737 - DNA, 82 bp, Homo sapiens
ggagaatcgcccaagcggcctcggaagtcccagggagtggagacacaacatttgcctgcaacaaggacagcggccagtggca

SEQ ID NO: 506738 - DNA, 75 bp, Homo sapiens
ctctataagctgaattatggcagcccagtcaagtcacagcaaactgtacaatggcagttgagtgggttttgaaaa

SEQ ID NO: 506739 - DNA, 82 bp, Homo sapiens
caaatgtttttctgttttgcctgaatacatgatttaaacaagagatttccacagaagggcgcaaaccagaagaagagggtgt

SEQ ID NO: 506740 - DNA, 101 bp, Homo sapiens
tgttctcggcaggagcggagagtttgctccaccaggccagtgattcgcctttgccagtctcatctcgtgtctgctttgttaagttccatgatccagactca

SEQ ID NO: 506741 - DNA, 101 bp, Homo sapiens
gagaatcagtacttacagcactattgcaattccaagtattgaagcaatcgcaggtcaccatccttgtcagcctggccctagctttccttgcgtgcatcgtg

SEQ ID NO: 506742 - DNA, 90 bp, Homo sapiens
ggcggaggccttgctgatgaacctgactgaggcaatggtggcttgctatccgggaaatggaacaggttatgttcgccacgtggacaaccc

SEQ ID NO: 506743 - DNA, 98 bp, Homo sapiens
gaggacttcttcttcaccgccaggacctccttcttcaggagagcgccccagggcaagccccgctccggccaacaagttacttgaatttccactagagg

SEQ ID NO: 506744 - DNA, 100 bp, Homo sapiens
gaacgactcttgaagatgctgagcaacttctgactgaacattcttcacgatctgaaaggaaaagaagagattctttcgggatgtttgacggttatgatag

SEQ ID NO: 506745 - DNA, 75 bp, Homo sapiens
gtcctcctcacctatggccgctggcagaacagctttgctgagccatcaaggtctaatggaagcatggttcggcat

SEQ ID NO: 506746 - DNA, 90 bp, Homo sapiens
ctgtccagcgaagcctggaggaaatcttgccagcctgtgaccctctcaggatcggggacgcaggaatgggtaccacagaccatgtcatcg

SEQ ID NO: 506747 - DNA, 75 bp, Homo sapiens
attggagctcatgcagtcttcagtggataataccaaaatgggatgaggagaatttctgtgccactgtgcccaagg

SEQ ID NO: 506748 - DNA, 100 bp, Homo sapiens
ggagctcctcttccagtctgccattcgcctggagaccaacctgcacttgttaggtggttggaggcaaagtaaagaagcccggtaaacgtggtcggaagcc

SEQ ID NO: 506749 - DNA, 100 bp, Homo sapiens
ggcggcggcggaagatggtgccgggggtcgctggctctgctgctgccgccggcgaaggaggaggcgttgccgggtgcttttgaagatgatgatatcacgc

SEQ ID NO: 506750 - DNA, 75 bp, Homo sapiens
aggcaaacgagaattaaatgccgagaaggccagtacggttctaagctggtctatgtccatcaccttcttggagaa

SEQ ID NO: 506751 - DNA, 97 bp, Homo sapiens
atatgcaccagcacgcctggctaatgccggtggtggtgtgcacattgagccccggtatagacagttcccccagctgaccagatcccaggtgttccag

SEQ ID NO: 506752 - DNA, 100 bp, Homo sapiens
agcacattgaagtgttgaaggagtccttgactgctaaggagcagagggctgccatcctgcagactgaggagacagagctactggatctcagccttgtcaa

SEQ ID NO: 506753 - DNA, 100 bp, Homo sapiens
ctagtagatagagccaaacaatcttttcaagcatccagagctgctgttggcggattgtacccacggggagatgattcctcatgaagagcctggatcccct

SEQ ID NO: 506754 - DNA, 101 bp, Homo sapiens
tctgacgaggcacagcgtttcttgcaagaatgggagcacttctcagaacttctggatgagttttcccagaacgtcttgggtcagctcctgaatgatccttt

SEQ ID NO: 506755 - DNA, 100 bp, Homo sapiens
actcttggaagatgccatcggatgcatggaggccaaccaggtcaatgtgcgaaatggaatgagcttgcatgactgccttatgaaagcactcaaggtgagg

SEQ ID NO: 506756 - DNA, 100 bp, Homo sapiens
ttggattcagttctcctgtgtgcatggctttccaaaaggattggcactacgagatgcacttttgaaaaagagaaaaagaatgaagtaacttcctggcaag

SEQ ID NO: 506757 - DNA, 100 bp, Homo sapiens
agagtgagaactcattcactaccatgaagacaacaccaagccattcctgagaacactgatatttgcatttaatggggaacaaaagatgaagaaggaaaag

SEQ ID NO: 506758 - DNA, 50 bp, Homo sapiens
gtgtgtcacaggaagactcttgttggagtcagttagctgctatgcactgt

SEQ ID NO: 506759 - DNA, 74 bp, Homo sapiens
cgcgccaggaggccgaacgcggactcgccacccgggcatgctgcttgcagggtttctcatcagaaatatcccag

SEQ ID NO: 506760 - DNA, 100 bp, Homo sapiens
gtgagctccagcagcagctcaagatgttgctgtggtagacatgagcgatgtctccagacagccttccctcttctaccatcttggagtccgagaaagcttt

SEQ ID NO: 506761 - DNA, 51 bp, Homo sapiens
cgcgaccgcggcgcgagtcaccatgtttacatccacgtgttctctgccttg

SEQ ID NO: 506762 - DNA, 82 bp, Homo sapiens
tcgcgctgctgggcacccacggagcctccggggctgggactggtgattgcagctggaagtgcccatgaccgagctggcgtcc

SEQ ID NO: 506763 - DNA, 100 bp, Homo sapiens
actgatctgtttccccatttagctggattctgatggcaccattactatagaggagcagattgtccttgtgctgaaagcgaaagtacaatgtgaactcaac

SEQ ID NO: 506764 - DNA, 75 bp, Homo sapiens
acatcgagcctgagggaggggaaaggcgcagggacctgaaggagaagaaggagaaggtggaggagaaggcaagcc

SEQ ID NO: 506765 - DNA, 75 bp, Homo sapiens
gggctccaacattgtgcagctgctgatcgagctggaccctgagagcgagctgggcaagaacctcagcctcatccc

SEQ ID NO: 506766 - DNA, 100 bp, Homo sapiens
ctcatcgtttgcgacgttccctcagcctctgcccaaagaaagaaggagcctggagatgcccaaagatgagctgcccaaccataactgcattaagcacctg

SEQ ID NO: 506767 - DNA, 90 bp, Homo sapiens
cagcaatggcggaaggagaagatgtgccgccgctgccaacgtcgagcggcgacggctgactttttaaaactgtggacttaaatgttctgc

SEQ ID NO: 506768 - DNA, 82 bp, Homo sapiens
acaacgcagacggtgcgcctgtgcagccctcccaggtggagtacacggcagactgagaaccaggtgcatcagcgcattgcgg

SEQ ID NO: 506769 - DNA, 100 bp, Homo sapiens
gaaacacagcatctgcttttccacaaccagtttataagtgctgttaaatatgtgattgtcaaaagagtggggaatggtgaggaaacgccgatgattggag

SEQ ID NO: 506770 - DNA, 50 bp, Homo sapiens
ttcgcgttatcatcctggtcgcagggtattagtcactgtaccactggctt

SEQ ID NO: 506771 - DNA, 99 bp, Homo sapiens
caccgcccctgcctgtgctctgcctcgggccatcgctcctccccagggcccagtgcggactcgcctccgtgaaggcccatgaagcttcccatcaccaac

SEQ ID NO: 506772 - DNA, 100 bp, Homo sapiens
ttgagcatacaccgagagagtgaggagccagacgacaagcacacactatggcgctgaaacggattaataaggcactttgatccggttttccagttcttgc

SEQ ID NO: 506773 - DNA, 98 bp, Homo sapiens
tttttaccctcaacagcaaaccggggtctccctcccaggacacaggagtcaagttataggatattccaagataaatgcatgaatactaccttgacgga

SEQ ID NO: 506774 - DNA, 83 bp, Homo sapiens
gaaaacttctgagaaacttggagagtggaatgagaaagtgacccagtcagacctatcttcagtttagatcttggaggcatatc

SEQ ID NO: 506775 - DNA, 51 bp, Homo sapiens
tgtgagaagagcatgatcagcagaaaggttggtgtcaaaggaaatccccaa

SEQ ID NO: 506776 - DNA, 76 bp, Homo sapiens
gcggccggggcctggggctgcctgccgggcggccgggcgcggcgagcccagtacaaaattggacagctgtacatga

SEQ ID NO: 506777 - DNA, 100 bp, Homo sapiens
cagccacatggagacattcttgcgctgcatcgaagcctcaggtgcccccacttgactctcgccccagctccccagccctctacttcacccacgatgccag

SEQ ID NO: 506778 - DNA, 97 bp, Homo sapiens
ggagagttcttccgagaccaagggaggcagattcgggaactggagcctctcctctgtcacagtgacaatccatctcagctcatctggacatcatctc

SEQ ID NO: 506779 - DNA, 75 bp, Homo sapiens
ctgagatccagaggagtggaaggctcccccttgactaaagctttggtctcttcccatggcgatgtccatctgcca

SEQ ID NO: 506780 - DNA, 75 bp, Homo sapiens
agcaggctgagcgatacgacggaggtgcttcccaaggaccgtagatgcctctctagagcatgagctcaggcaaga

SEQ ID NO: 506781 - DNA, 83 bp, Homo sapiens
actagagaaggatgctcagaacagattggcacccattgggagcccatgaagcttcccatcaccaacagcaggcagcacagaac

SEQ ID NO: 506782 - DNA, 90 bp, Homo sapiens
gtaccgttggttcgtgctggactacaatgcaggactgctctcctactacacggtcttcaatgaaatttatccagtatggacttactctta

SEQ ID NO: 506783 - DNA, 75 bp, Homo sapiens
ccgctctccagcccgcttgaacgatacattcctcagaaacagtctgaggacatgcatgcctttgtcactgaagtt

SEQ ID NO: 506784 - DNA, 60 bp, Homo sapiens
gctagaagtgggggactcggcgggatagctgatcagcttccttgggttttgctgatgaca

SEQ ID NO: 506785 - DNA, 125 bp, Homo sapiens
ccgcagcctctgcggagccgggctcgggtcgccggagccgcgccccaccccgccagctccagagccactgtgccggtccaacaaaagcccttgggtctgtttgacttgttcaagtgtccactgtg

SEQ ID NO: 506786 - DNA, 74 bp, Homo sapiens
tactggagatgtgtctgcacttcgaagctaaaccaggtggacaggtgaaatgtcagtatatctctgctgtggat

SEQ ID NO: 506787 - DNA, 123 bp, Homo sapiens
gttgtgcaagaggtactgtccatcaaacatcttccaccacagcttagagcttcgtgctctgtctgatgatggagtatctgatcttgaagacccaaccttgactcccctgaaagatacagaaag

SEQ ID NO: 506788 - DNA, 75 bp, Homo sapiens
attttaaaaaaatcccatgaggagaaggcattctaatttagctgccactgcagagccccgccatggaagacacgc

SEQ ID NO: 506789 - DNA, 75 bp, Homo sapiens
atgagtttggagataatacagcaggctgttcttgccttagctgcatcttggacctcaagacaagtaggagaacgg

SEQ ID NO: 506790 - DNA, 99 bp, Homo sapiens
gcagggtcgtgtggctgagctggagcacgaccgaagccaggacagcacagccgtagcactctcagactctagctcaacgcaggacttctttaatgagcc

SEQ ID NO: 506791 - DNA, 82 bp, Homo sapiens
aagagttggatactcagcgtcgctggcagccgctgtacttgccctgggcgctgcctatggcacagccaagagcggtaccggc

SEQ ID NO: 506792 - DNA, 82 bp, Homo sapiens
ctggagagcttcatcaaaaatagtgatagctttgataagtgctgcgacaagagactttggacaaaaattgacttgagtaggt

SEQ ID NO: 506793 - DNA, 91 bp, Homo sapiens
aagctgggtttcccgggagatcccaggcggtgacagagtggagccatggctagagggcgtgatggtgggcatgggtcagaaggattcctat

SEQ ID NO: 506794 - DNA, 101 bp, Homo sapiens
tcttgtcctacctgaagtatgccattagttcccaggatattctgtgccgtctggagcatacaacgttgaggaaggtgactgccaacacagccatctactat

SEQ ID NO: 506795 - DNA, 101 bp, Homo sapiens
tggtggtagcccacagtgagtcagaagaactccactgaacattcattgaaggcccagatttagagtgagcggggcaaaccaagttttgtgctgggtggaag

SEQ ID NO: 506796 - DNA, 90 bp, Homo sapiens
ttccccacagaggacagcaggacttccaaggagagcatgtcggaggctgatcgcgcccagaagaactgatagtgcatcagctgacccagg

SEQ ID NO: 506797 - DNA, 50 bp, Homo sapiens
gaggaaacgcaggcgagtgggaagatggactcaccctgtcacccaggttg

SEQ ID NO: 506798 - DNA, 118 bp, Homo sapiens
gtaaaaatgagttggagccatgcattttatgacagtcaaacatgggaaaacattcttaatatgttttagctgttgggagctctgtgttccatgcgatgttttacggagaacttgcaga

SEQ ID NO: 506799 - DNA, 104 bp, Homo sapiens
cttctaccagcccatgcccctgaaggcctcgctggagatcgagtaccaactctagaggacaaaatcccagtccttggcacaaactcaggaaatggaagccggag

SEQ ID NO: 506800 - DNA, 80 bp, Homo sapiens
cagccgggctggtcctgctgcgagccggcggcccggagtggggcggcggaattcagaaggagctggcggacatcacttta

SEQ ID NO: 506801 - DNA, 75 bp, Homo sapiens
taccaggagaggagggaactgcggagcggtgtttacaggcattggagtttttacatgctaatcaagtgatccaca

SEQ ID NO: 506802 - DNA, 75 bp, Homo sapiens
ccagagcggggccgtggaccgcgtgttgcaagtggagtccatgttgtacttagatgggcagcggcatttcaactc

SEQ ID NO: 506803 - DNA, 104 bp, Homo sapiens
ctgcgtgagcgagcagaggcttaaggtcttcagcggggcgctccaggaggcactcacaggaactgtggctgcaccatctgtcttcatcttcccgccatctgatg

SEQ ID NO: 506804 - DNA, 101 bp, Homo sapiens
gagcgagctgagtggttgtgtggtcgcgtctcggaaaccggtagcgcttgcagcatggaaacttggatttaactggccagaagcaggtattcaaagcagag

SEQ ID NO: 506805 - DNA, 100 bp, Homo sapiens
gagtttttgctccaggcaaaagatgaggatgaccggaaagaagggatgaccgcgtttgtggaaaagagaaaggccaacttcaaagaccagtgagaaccag

SEQ ID NO: 506806 - DNA, 50 bp, Homo sapiens
ctattcatttattctcaccaggcatttatgacattaacagagaacaggac

SEQ ID NO: 506807 - DNA, 50 bp, Homo sapiens
tcttgatctacattacatgaacaatgagacacatcatctcagagttggag

SEQ ID NO: 506808 - DNA, 100 bp, Homo sapiens
ctgcagtgcttctcctggcctctgtcttctcagctgaacggacagtgtcatggagaaactccagctgggcccagagattctgcagcgggaaaatccaagg

SEQ ID NO: 506809 - DNA, 82 bp, Homo sapiens
ggctcttctgcgagaggaacaagaccaatttcttcaacgtgacagagctgaatgaacctctctccaatgaagatcgaaatct

SEQ ID NO: 506810 - DNA, 100 bp, Homo sapiens
tccagtgacaagcggacttccactcttctttgtcattactgtgacggctatcaaacagaacaccttccaccatgaccacctcagcaagttcccacttaaa

SEQ ID NO: 506811 - DNA, 50 bp, Homo sapiens
cagcctcccgagtaggtgggattacagcaccagtggaacagtgattaaca

SEQ ID NO: 506812 - DNA, 100 bp, Homo sapiens
agaagactctcccttcccttcctttgcccagttgacattcgtgaaattaaggagatccgcccagggaagacctcacgggactttgatcgctatcaagagg

SEQ ID NO: 506813 - DNA, 127 bp, Homo sapiens
agacaccagctatgcccccgtggccaccgcctccagcttgccaccaaagacctgcgactttgctcaggccgccatggcatcagatgaaggcaaactttttgttggagggctgagttttgacaccaat

SEQ ID NO: 506814 - DNA, 100 bp, Homo sapiens
agagcgtcacggcgtacgccctcatggggaaaatctccccggtgactttcagaatcggtcgaggtggacggtttggccgtaaaggtgtggctattaacat

SEQ ID NO: 506815 - DNA, 100 bp, Homo sapiens
acatttgacttggaagcaatgtttgaacaaactcgaagaacagctgtggaaagaagttgcaaaacactggcaactacactgcgctgcatcggactcgacg

SEQ ID NO: 506816 - DNA, 51 bp, Homo sapiens
ggtgaagatcgagctggataagagcgagtccttcaataatgttaaacagtg

SEQ ID NO: 506817 - DNA, 82 bp, Homo sapiens
aaaggccggcctgcagcacccgccaccgtcgccggccgcccgcacgtccgtccgtctatccttcactggagtctgatgatga

SEQ ID NO: 506818 - DNA, 83 bp, Homo sapiens
cgaccgccccgcgtcatgcggctcctcggctggtgaacccagcgggtgccgcttctccacccgaggcttccacctccaacgag

SEQ ID NO: 506819 - DNA, 100 bp, Homo sapiens
ccgtcccgagagcatcattgtcgccagtatcacggcccgcaagccgctgccaaggatcagttcttaagagcagccccggtaactggaggaatgggagccg

SEQ ID NO: 506820 - DNA, 119 bp, Homo sapiens
ggcagcaggagaatgggcccattttcttggataccaaggacctactctatactctcagtggcttaggtagaaaaccagattgtgtaaaccctactgaggctaatgttgaagaacctgaa

SEQ ID NO: 506821 - DNA, 99 bp, Homo sapiens
cgactccgagacctccgaaaagcgtttccgcagacagaagtggggagaagcggaggtgggatgagagactgagaaaagaaataagacacggagacaaag

SEQ ID NO: 506822 - DNA, 100 bp, Homo sapiens
accatgcaaaaaatgtggccttccaaaccatcctgagctaaccattaaaaatctcaagtgacgactttgggaaactctggttatccttcgcaaatgatgt

SEQ ID NO: 506823 - DNA, 100 bp, Homo sapiens
gtgggtgctcacagctgcccattgcctaaagaaccacccctttgctgtgaagttgcttgcgctctgtaagaaagaaatcaagaattcaaaagatatccag

SEQ ID NO: 506824 - DNA, 100 bp, Homo sapiens
caatgacagtgttttttcccctggatacagctagacttcgacttcagggatgaaagcgtgactcagcttggtcaggagctggcccagaaactggggctgc

SEQ ID NO: 506825 - DNA, 100 bp, Homo sapiens
tgtcctcggagcgcggtccctgtattggtctcctgctcctagagaaggaagaggcccagcagaagggactcgctgagccaccccccgccccactccatgt

SEQ ID NO: 506826 - DNA, 82 bp, Homo sapiens
actggggccagggaaccctggtcaccgtctcctcagatcctgataacttaagtgactctctcttttccggtgatgaagaaaa

SEQ ID NO: 506827 - DNA, 100 bp, Homo sapiens
gagcgcgctcgctccggcgccggcctcgcctcctcgcagcagcgccatggtctcggcgcggaagatggccggcggcgtggacggccccatcgggatcccg

SEQ ID NO: 506828 - DNA, 90 bp, Homo sapiens
caaaacgacaggagcatcccaggaaggggttcccagaagtcagaatccaagatggcttctctatctgagatgtgcacagaaacccagaca

SEQ ID NO: 506829 - DNA, 100 bp, Homo sapiens
ggaccaaaaggacaagcagtttgttgccaaggtgaatctgattaacgagcccctggtgatatttgtttgtgcaactacaggccaaggagacccccctgac

SEQ ID NO: 506830 - DNA, 82 bp, Homo sapiens
cctggcctgggcgctccggtggcggcggagcgggtccatatggaatatttgctggtagggatgcctccagaggactggccac

SEQ ID NO: 506831 - DNA, 101 bp, Homo sapiens
gggccggcgagccaaagaggagccggccgcgcgggccgggaggggacggccgccggagccgcgaggccaagtccggcctctttggcctacccccgttggct

SEQ ID NO: 506832 - DNA, 88 bp, Homo sapiens
gcagaagctgaagggtctcagaggaggaggctgctggttccagcaaatggtgctgaccccactgagaagggctccacaggtaagacgt

SEQ ID NO: 506833 - DNA, 89 bp, Homo sapiens
aaatccctgagtcctgtgcactcaaaagttggagacatccaggtctgcaccatgagccgctcccgaggccccggcgcggcgcgagggcg

SEQ ID NO: 506834 - DNA, 90 bp, Homo sapiens
cggaagcccagcgcggagccggccgcggccccctgttgtgttgctgcggagaggatccgggagacagtggaccctggagagaggacccag

SEQ ID NO: 506835 - DNA, 96 bp, Homo sapiens
agcggcgcgggctccagactcgccgtggtcaagttcaccatgagagggaaacaggaagagcgagtacagcaagtacgcaagaaattggaagaagca

SEQ ID NO: 506836 - DNA, 100 bp, Homo sapiens
ccggcggctctccaccccccagggaatggatccaattacacgtcaagtaggacaacatattgaaatggaaccagagtgggaagcagccttcacactacaa

SEQ ID NO: 506837 - DNA, 88 bp, Homo sapiens
ggcaacccgtgtgtgtctcatcccagaaagagaagactttaaccactgtgatgcctgagaatccaatggaggcagaagaagctgctgc

SEQ ID NO: 506838 - DNA, 97 bp, Homo sapiens
tgcggtccagaacccggccctcaccgccctcaccacccctatccagacggctgcccttcaagtaccaaatttatatgacctggatgaagatgatgat

SEQ ID NO: 506839 - DNA, 75 bp, Homo sapiens
cgccgcgtccttggctggcgttttttggctttcacccccaaccagtgaccaaagacttgaccactcaaagtccag

SEQ ID NO: 506840 - DNA, 100 bp, Homo sapiens
tttttctcatggatgttcttcttcgagtatttgtagaaggcaggggaaatgctgtctgtagctgagcacttcctggagcagcagatgcacccaacagtgg

SEQ ID NO: 506841 - DNA, 90 bp, Homo sapiens
tttgatatctggggccaagggacaatggtcaccgtctcttcagggaggagtctgctactagtcttatcagctcttaaaaacagaaactca

SEQ ID NO: 506842 - DNA, 100 bp, Homo sapiens
caccactggatgttgtttactgggatttgaaactggacaacatccttctggatgcagaaggtcactgcaagctggctgacttcgggatgtgcaaggaagg

SEQ ID NO: 506843 - DNA, 75 bp, Homo sapiens
ctcgacaagttcaagcagctgcttgccggccccaacacggaccttgtgctgaggaatgtaaacaagtttgctggg

SEQ ID NO: 506844 - DNA, 75 bp, Homo sapiens
ttttaactgaagatagtgcctttcagccctaccaggtctgaatttcctgctgctgttcacaaagatgctttttat

SEQ ID NO: 506845 - DNA, 83 bp, Homo sapiens
cactccctgaaatctggagtgaagaacgccgccatccagccaccattccaagattcatttggattcaaggttggctctcaaca

SEQ ID NO: 506846 - DNA, 100 bp, Homo sapiens
ggcaacatcaggtgactgtcccagaagtgaatcgcagttttaacttctagtcatggcgaatgatcgcaggagagcacagactggaccctgctacgatctc

SEQ ID NO: 506847 - DNA, 90 bp, Homo sapiens
tcccttcagtcctccctcggtgttaacgtctgctccagctcgcagcccgctgctgggttgctaggaagaggctcaatgtttgtgttttca

SEQ ID NO: 506848 - DNA, 99 bp, Homo sapiens
ttggacattttacccttcagtcggcccaagaaatcaaaataaaggaaacacatttcatatactgcagtgcaggaatcacagccatggcccccaccctcc

SEQ ID NO: 506849 - DNA, 75 bp, Homo sapiens
atcgcttcaatgatgggaaggtggatcccgccgggaggtactttgctgatattgcaggagaagaggctgggtccg

SEQ ID NO: 506850 - DNA, 83 bp, Homo sapiens
cagagcgccgcgcacttcgtcatgttcttcgcgccctgggctttgttcgcgggggtcacagctctcatggctgcagctagcgt

SEQ ID NO: 506851 - DNA, 71 bp, Homo sapiens
gagtgcaaatgcacctcctgcaagaaaaggatcctgtggaacctttcatccagcgaccacctgaaggaccg

SEQ ID NO: 506852 - DNA, 50 bp, Homo sapiens
aggagaccctggaaaaagtccggaaaccatcatagcctttgcctgggaac

SEQ ID NO: 506853 - DNA, 75 bp, Homo sapiens
ttcctggcccgaaaggagagcctgagtttgaccactttctggccaccaagttctcgacagtgaagcgatatggag

SEQ ID NO: 506854 - DNA, 101 bp, Homo sapiens
gtacgtgggagtggggggggcctggatgcttctctctgctctgccctggctgggccactacagactcccaagacagctgggctgcgaccaatggaaacaaa

SEQ ID NO: 506855 - DNA, 82 bp, Homo sapiens
ctctacctctgcacatcgcacccaggtggttcagctcgcatagtggagagaagatgactgaggaggaggtggagaccgttct

SEQ ID NO: 506856 - DNA, 50 bp, Homo sapiens
gtaagtgcagatggaacacaacaggttgtactggtcagtggacatctgga

SEQ ID NO: 506857 - DNA, 50 bp, Homo sapiens
caacctcagaggacaacgaagtgttcggtcctgcagacattcgctttgtc

SEQ ID NO: 506858 - DNA, 100 bp, Homo sapiens
ccggcgaatatttggcttgttgatgggtacccttcaaaaatttaaacaagaatccactgttgctactgaaaggcttgtagaccctggagttaaggcatgg

SEQ ID NO: 506859 - DNA, 90 bp, Homo sapiens
atgtgtgattaccatggcgaggagtctctgtccgggggcctggctaaggaaaccctattacctccagtgtttgagaacagcagcaagatc

SEQ ID NO: 506860 - DNA, 97 bp, Homo sapiens
tcttcgagcgccgcggacgcgtcatcgagtgtgacgtggtgaaagacctcctgccccccgaggtctgcagtctcctgaacccagcagccatctacgc

SEQ ID NO: 506861 - DNA, 100 bp, Homo sapiens
tgttggctctcctgtaggaagcaaccagtctcgatctggcccaatctctcctgcaagtatcccagctttagtgcagccgtcattatccatgacaccggaa

SEQ ID NO: 506862 - DNA, 96 bp, Homo sapiens
gcagcgtggcctccgccaccgtgcacatccgaatgggtgtttcggcatggagaccgaagtcccattgacacctttcccactgaccccataaaggaa

SEQ ID NO: 506863 - DNA, 75 bp, Homo sapiens
gagggcagctgttcccactggctctgctgaccttgtgccttggtgactctcctattccatctgtttcttcgggat

SEQ ID NO: 506864 - DNA, 101 bp, Homo sapiens
cagcgatgctcaagagtgagctgcggaagcaaaaggcagactttttgatattcagagccttggaagtcaacactgtcactcacagccagcgcctggtcaac

SEQ ID NO: 506865 - DNA, 98 bp, Homo sapiens
tgctggctgcgtcctgcgattacttcagggcaaacttgaagataaatcttttgactccagctctttagaggatctaaagtgaccttgatggacagtgg

SEQ ID NO: 506866 - DNA, 75 bp, Homo sapiens
cgacaactgctttgcctcaaactcagctttctaccagcagacagtttgccattgtcttcaaaactccaaagtata

SEQ ID NO: 506867 - DNA, 50 bp, Homo sapiens
gccaataccgagagtgagaagaggaaagcccgacttaaatctctgcaatg

SEQ ID NO: 506868 - DNA, 90 bp, Homo sapiens
gttttcggaataattctttatcaaaaccagatgattcaactgaggacactttgccaccatcaccttgaccttcatcgacaagaacggaga

SEQ ID NO: 506869 - DNA, 100 bp, Homo sapiens
ccagatgggaggacaaacaggattgagaggcccccagcctcttaagatgggaaagggctccttcaagtatgcctgggtcttggataaactgaaagctgag

SEQ ID NO: 506870 - DNA, 82 bp, Homo sapiens
tctccactttcgccagcccgtgccgcgagcgcggcctgcaggagtggagacctttggcgacttggcctttggcgacatcttc

SEQ ID NO: 506871 - DNA, 100 bp, Homo sapiens
ctattcgactttttcagagactgggacttggagcagcagtggtgagaagccctaccactgcaactgggacggctgcggctggaagtttgcgcgctcagac

SEQ ID NO: 506872 - DNA, 50 bp, Homo sapiens
caacaagcagagttgattcttcaaaggaaaatgtttataggaggccttag

SEQ ID NO: 506873 - DNA, 100 bp, Homo sapiens
aagggaggctccaagacctcatcaacaattaaggcgaatctttctgcattgaatttgaagatttctgaacagaaggaaatattaataaaagaattagaca

SEQ ID NO: 506874 - DNA, 95 bp, Homo sapiens
gagctgagatggatcgtttacagccaggtgaggaagtggagatagctgagctcactacagctttcaccaacaatcaccagtggtttacacaacat

SEQ ID NO: 506875 - DNA, 51 bp, Homo sapiens
actgggcagtacccacacagcaggggacaactgtgaggtgaaagacccaag

SEQ ID NO: 506876 - DNA, 100 bp, Homo sapiens
tgagaagagcaatgacattgggggcctgtggaaattttcagagatgttggcacacctgaaaccatggccccaaccattgtggttcccccgggcaacagaa

SEQ ID NO: 506877 - DNA, 101 bp, Homo sapiens
tcctgggttgacaattctacacaaggaggaactaccactgctggaatgaagcatggatgacaaggcctgaccttcctgttggatttggaggctggcaagct

SEQ ID NO: 506878 - DNA, 100 bp, Homo sapiens
gaaaggtccctccacactcctggaactgtacacctattggaacccttaaggaagggaaaaggccgaggcatcagcgtgtgaagaccgcaaagacgatccc

SEQ ID NO: 506879 - DNA, 76 bp, Homo sapiens
ctcacaccagatgagtacctgacatactccctgaagctgaagaaaggagctggtaagaagcctgacctttcatctg

SEQ ID NO: 506880 - DNA, 86 bp, Homo sapiens
gaaaatgggctttgtcctgcatgtagaaagttcctgagggaagacctcaattaccatgacccaacagtgaaacacagcaccttcca

SEQ ID NO: 506881 - DNA, 100 bp, Homo sapiens
ggctcttcgacagctcgtacagcttccgccacctgctggaatacatcaatgagtaccaggaacttcaggtgtctgcccagcttcatggggacaggatgca

SEQ ID NO: 506882 - DNA, 74 bp, Homo sapiens
gctgaggaggcagggggcacccggttggagcccctgaagccacttaagaggtctgcggggtttccgagaggctc

SEQ ID NO: 506883 - DNA, 90 bp, Homo sapiens
cggaaacggcgggtttcccaggacctggaagtgatacgatgaatggattaaagcagataaaatagtaagacctgctgataaaaatgtgcc

SEQ ID NO: 506884 - DNA, 121 bp, Homo sapiens
agtagggcatccttcacccatctgaagggaggaaatagtggcaggtgacagtctgcatgtgcagttttcaggaaatgcaacctcaccacaagtacaaagaccatctttcatggactacttt

SEQ ID NO: 506885 - DNA, 75 bp, Homo sapiens
ctgaagatgacccattatttccacctattgaccctagggtggtcccaaccatgtgatgtctggagcataggatgc

SEQ ID NO: 506886 - DNA, 100 bp, Homo sapiens
atcctcacagaaagtgaaaataaacttcgggaccttcagcaagaagcagagacttacagaactaatgagctgaaagccagtggtggcgaaatcaaaattc

SEQ ID NO: 506887 - DNA, 100 bp, Homo sapiens
ccagtgtcgggcctttgtggtcaccaaccagaccacctggacagagacgagttgtactgctgtcacaggaaatggacgctggattacaagcatggcagct

SEQ ID NO: 506888 - DNA, 80 bp, Homo sapiens
cagaatagacctgaagacaaaaatccagaagtacaagcagtctggattgacgtgtctcagaatgaccttccttgggaatt

SEQ ID NO: 506889 - DNA, 75 bp, Homo sapiens
cagttatgggtcgcaagaagaagaagcagctgaagccgtggtgctgaacacagcttgaaggggaccgaagacaga

SEQ ID NO: 506890 - DNA, 100 bp, Homo sapiens
acatattcaccttgaagaggaagacggggcggaagaccaagatcatcgagatggatattcttggtgatcttggaagtgtccgtatcatggaatcaatctc

SEQ ID NO: 506891 - DNA, 87 bp, Homo sapiens
gactggagaggatggctactatttcaccaatctggatttaagcgagagcctcactggttcccaggacatcaacctgaactggatcct

SEQ ID NO: 506892 - DNA, 100 bp, Homo sapiens
acatgaccacgtcgttccgcgacggcctggctttctgcgccatcctgcaccgccaccggcccgacctcatgtccagcaccatgtgctaggtcactcccag

SEQ ID NO: 506893 - DNA, 50 bp, Homo sapiens
tccagccctgcctcggcggaccaaaggtacgtagagaaatcgacactctt

SEQ ID NO: 506894 - DNA, 99 bp, Homo sapiens
cgcgtctcggaaaccggtagcgcttgcagcatggaaggcgtggaagtgcgagtggccagaatcttcaacacctttgggccacgcatgcacatgaacgat

SEQ ID NO: 506895 - DNA, 101 bp, Homo sapiens
catggggaagcgggacaatcgggtggttcaggcgtgaacggcctggaggagcccagcatcgccaagcgactgaggggcaccccagagcggatcgagctgga

SEQ ID NO: 506896 - DNA, 90 bp, Homo sapiens
gggctcaccagggccaccaactctccaccctagacgaagcctttgaagaattaagagtggattcaccaatgaacttgaagcatcctcatg

SEQ ID NO: 506897 - DNA, 99 bp, Homo sapiens
gcttctcgtagtcctgggagcacagcagaagtgtgtggccgacgacgatgccctcgctgaggagcgcatgcggagaggccagaacgccctgccagccca

SEQ ID NO: 506898 - DNA, 100 bp, Homo sapiens
catgtctcactgccccactcagccatcactggtgcaagctatatttaacggagatcctgatgaagttcgagcactaatatttaagaaagaagatgttaac

SEQ ID NO: 506899 - DNA, 100 bp, Homo sapiens
ggatgtgcggggtgcgccggcagaggatccagtgttcaccatcctggccccggaagcaaacggggattcagcgtccgatcctttggaacagggactcacg

SEQ ID NO: 506900 - DNA, 82 bp, Homo sapiens
cgggggcgatggcggcggcggcggccggagcttctctcagccggatctgcccaataacatgattcatcaggtgccaattaaa

SEQ ID NO: 506901 - DNA, 73 bp, Homo sapiens
agtgccttatcccatgtgccattgaccaggatgggcaacactccagattcagcctcagacaacctcggtttcc

SEQ ID NO: 506902 - DNA, 100 bp, Homo sapiens
cagccacaaatgggaagcaagagaaaaagaacattactgtcttgggtgccttcaccagggatggaagaggcaggctgcagcagagagatgcagagttctt

SEQ ID NO: 506903 - DNA, 100 bp, Homo sapiens
cagatcgccggggaggcagcgcgggatcccagcctcaggcgtgcgcggacggtgtgcgggagccaaaaacctgtatatcatctccgtgaaggggatcaag

SEQ ID NO: 506904 - DNA, 100 bp, Homo sapiens
ggaagacccagtacagctggacgtttgccgtccactctgaggtaggtggagagttttcaaacactgttatcggccagatgaagaaatttggaaggattgc

SEQ ID NO: 506905 - DNA, 75 bp, Homo sapiens
gattatcagcaaaatcgagaatcatgagggggttcggaggtttgtcttgtgaccgcgggcggccgctgcttcttt

SEQ ID NO: 506906 - DNA, 98 bp, Homo sapiens
agccgactgctgcctggtctgcaaagaagtcctttcaagtctctaggactggactcttcctaagcaagtccggtctgaatttcctgctgctgttcaca

SEQ ID NO: 506907 - DNA, 82 bp, Homo sapiens
gctggtggcaagtattgctgtgggtgctgggacttcccgtccgcggcgtggagggccagaagcggactcctagaagagggga

SEQ ID NO: 506908 - DNA, 101 bp, Homo sapiens
acagcttttctatgatcatgcaggagattttaacagtctacatcagcatcagcatctgcgtcaccatttcaatctgcatggtatagtgaatctgagataac

SEQ ID NO: 506909 - DNA, 83 bp, Homo sapiens
ctccaactttgaagctaaagaagactgtttattccatggctccgttccctttcccacaattggcagagttgagggaaaaatac

SEQ ID NO: 506910 - DNA, 75 bp, Homo sapiens
caaaaagctaccacctgccagtctgaagcaccgagatggaacgaatgatcacacactttgaaaggtccaaaatgg

SEQ ID NO: 506911 - DNA, 100 bp, Homo sapiens
gggagctgaggaaccagatatcttgaaaagctgccagaaagctctaagcgaaagacatgaggcctcagcctgaaatgaggttgttttgaggtcatctgat

SEQ ID NO: 506912 - DNA, 83 bp, Homo sapiens
ctcagttggaagcagccgatccagcctgcggagcctgtggggcaggctgatgagccctgaaaacacactcctgcagcccaggg

SEQ ID NO: 506913 - DNA, 100 bp, Homo sapiens
gaaatccctgagacagattgggaggtgtatctgagggagactgcaaatgctattgtcagtcagcaaactccacaaagatgagcaatgtgaagagactacg

SEQ ID NO: 506914 - DNA, 90 bp, Homo sapiens
gaggccagagagaaaagactgcgaggtggccgcagctgtggccggagagtgtgtgttttaatagaaaagttgtcactttccaaaatgccc

SEQ ID NO: 506915 - DNA, 100 bp, Homo sapiens
ttgacaacataacccagatagaagatgccaccgagaagctcaagggggcagaccgggccgttccagtgctgatcattggcattctggtgttcctacccgg

SEQ ID NO: 506916 - DNA, 82 bp, Homo sapiens
catcgcgcgcacggcagcctagcgcaatgaggcgggcagcactgcggtcgttcttccctctttccaatagatgatggcttgc

SEQ ID NO: 506917 - DNA, 100 bp, Homo sapiens
cggagacctcgctgcgctcatggcgtcgcccgggtaagaacaagagagttggaaagcagttagcctcacagaagatccttcagctgctgcacccacatgt

SEQ ID NO: 506918 - DNA, 50 bp, Homo sapiens
gagcagaaagaatgtctttcaggaattcatgatttgttcctgtagctgaa

SEQ ID NO: 506919 - DNA, 100 bp, Homo sapiens
ccaatgatgatggctgccagacagctccatgatgaagctcgcaaatggtccagcaaggaccaaactcttacccaggatctactggagcagctgttggagc

SEQ ID NO: 506920 - DNA, 50 bp, Homo sapiens
ctcggattctcgtagctgtgccggcaaaaagaagctctgtgccctctatg

SEQ ID NO: 506921 - DNA, 75 bp, Homo sapiens
ctccggatggctccgcaagtcccccccggagaaaaagttgaagcgttatgaacttagtgatttggcccgtgaccc

SEQ ID NO: 506922 - DNA, 82 bp, Homo sapiens
gggccatgagcggggcggtgccccaggacctagcggaaactggagcacccatcctaactgatgatgttagcctgcaggtgtt

SEQ ID NO: 506923 - DNA, 107 bp, Homo sapiens
agaccggctgccggctgacgtctccttgcgatggagcatatccggacgaccaagcaattctgtggtgttcttggtcacacatttatggagtttctgaagggcagtgg

SEQ ID NO: 506924 - DNA, 149 bp, Homo sapiens
gttgtttgaggaatttgacagtttcctgccaggcgccatcatcggcatagcccgggagatgcagccagtttacagttggggacgaaggacaaaaagccaggaagaacaaacaggagacatttccaacactggagactgtgttcactaaa

SEQ ID NO: 506925 - DNA, 129 bp, Homo sapiens
ccgaaacgcgagtccggagaggagttccgcatggagaagttgaaccagctgtgggagaaggcccagcgaacctgcgaccgcatcaagcagtccgccagcggaaccaagcggcgcgtgttcatcatcgag

SEQ ID NO: 506926 - DNA, 75 bp, Homo sapiens
taagctgttcaacaattcctccagaactgtggctgcaccatctgtcttcatcttcccgccatctgatgagcagtt

SEQ ID NO: 506927 - DNA, 82 bp, Homo sapiens
tgggcgccggagccgaggcgagcgccgcgcgcaccactgcgcatgattgcaaatacggccagaacagtgagatactacagga

SEQ ID NO: 506928 - DNA, 75 bp, Homo sapiens
ctccttttccctctccctttccctaagtcaagagaatccatcccattaaatgacctgaagtcagaagtatcacca

SEQ ID NO: 506929 - DNA, 90 bp, Homo sapiens
cacctgaggttctccgagatgagccctataatgaaaaggatcttaagattgaaagtgatgttcaagaaccaactgaaccagaggatgacc

SEQ ID NO: 506930 - DNA, 99 bp, Homo sapiens
ggctgactggatccacagcagtgggggctggtgatccgtatgtgaaactttcattgtacgtagcggatgagaatagagaacttgctttggtccagacaa

SEQ ID NO: 506931 - DNA, 128 bp, Homo sapiens
gccgccgaaacagacagttaaaatctttaatataacagataatgctgcaattaaaccagatttctctatgaatcatcatcaagaactctgggagaacttttgaattcataaccaagccaacatctcca

SEQ ID NO: 506932 - DNA, 74 bp, Homo sapiens
tcctgctgcaggtggcaagctctggacagagcgggatgccaccagcttgtccaaagggaagttccaggagctcc

SEQ ID NO: 506933 - DNA, 75 bp, Homo sapiens
atcatccacgcacctgcagctctgctgagagagtgcaagccgtggggtagctacagcaagctgggtagcaggcag

SEQ ID NO: 506934 - DNA, 96 bp, Homo sapiens
ctgcctgcttgcaggctgtgtcacagaagagaaatgggaatttcttagccataggctcacatgacaactgcatctatatatatggcgttagtgaca

SEQ ID NO: 506935 - DNA, 100 bp, Homo sapiens
attttgacgatcgccgaggcctagcgcttggcctgatttcaacaggaccaaactcttacccaggatctactggagcagctgttggagcccatgacgcctg

SEQ ID NO: 506936 - DNA, 97 bp, Homo sapiens
agacatccgtgtccgtgtaaagggtggtggtcacgtggcccagatttatggtgccgtgagcgatgtggagatgcaggaacactatgatgagtttttt

SEQ ID NO: 506937 - DNA, 75 bp, Homo sapiens
tacagatcacacgcccactaaagcccagaagaatgtggctaccagcgaagagcatatcatgtcccgagtgggaaa

SEQ ID NO: 506938 - DNA, 100 bp, Homo sapiens
atggctgtttaaagttgaccacatttgccgctaatcttctaacattaagctgtaggatttcagatagctatttcccccagtcaaccagagaggagaaaag

SEQ ID NO: 506939 - DNA, 96 bp, Homo sapiens
ggagttctcagtgattcttaatcagcgcactggcaagtgcagcgcctgtaatgtttggcgagtctgatcccaccaaatattttggttgtgagctgg

SEQ ID NO: 506940 - DNA, 100 bp, Homo sapiens
ctggagaacatcatggaaaacaacactcagtggctaatgaagttgccaccttccagagaagaggtacgagatgacaagacaaccataaagtgtgaaacct

SEQ ID NO: 506941 - DNA, 100 bp, Homo sapiens
cctgcgcagaaggccggggccggccagaagcgggcggcgcgggggagatgttttttgtagcatcagatccaacagttaaaacagatcgactgtggcacga

SEQ ID NO: 506942 - DNA, 100 bp, Homo sapiens
cctccctcagcttccgccccaaaagatctttaatctcatgaagtacgacagctacagccgcttcttaaagtctgacttgtttttaaaacacaagcgaacc

SEQ ID NO: 506943 - DNA, 77 bp, Homo sapiens
aaaaatgattcgggaatatcggcaaatggagtttcagaagactcttggtggcaagcagcctgtgtatgataccacaa

SEQ ID NO: 506944 - DNA, 100 bp, Homo sapiens
gacatcctggaagctgggaaatgccaacattggtactcagaccacaggacccagtggggtaggatgctgtacaccaggccggccgctcctgccgtgcaaa

SEQ ID NO: 506945 - DNA, 96 bp, Homo sapiens
tatgcagaagaatggagctggattacacacagcaagttcctgcttctgggacagctctactgacggggccggccaggacgtgggccgaagctgcat

SEQ ID NO: 506946 - DNA, 74 bp, Homo sapiens
aaacatgaagttcgggactatcttctgtatcaccttttgccatgatagcatttctttcattggacagttcctta

SEQ ID NO: 506947 - DNA, 75 bp, Homo sapiens
taagcgtcggcaagttctgtagagaaactcgggcaacctttgaacccccgcacagtccctgttcagcctgccttc

SEQ ID NO: 506948 - DNA, 75 bp, Homo sapiens
aaaagtggacagatactttcaaagcttgaagtagaaaatgccatgatgagaaaaactattaaaaaacaggatgac

SEQ ID NO: 506949 - DNA, 75 bp, Homo sapiens
cctccaacggagactggggagagcagccaagctgaagagaacataggtgagaagccccaccaatgcagcatctgt

SEQ ID NO: 506950 - DNA, 83 bp, Homo sapiens
cacctcctcgccagcagccgtccggagccagccaacgagcgacaatgcagatcttcgtgaagactctgactggtaagaccatc

SEQ ID NO: 506951 - DNA, 75 bp, Homo sapiens
gggctgtaaactccagcatagatgtggatagcttggtgcgtatagcagcaaaattcatcattcatgcccctcctg

SEQ ID NO: 506952 - DNA, 75 bp, Homo sapiens
agatggcattacgaacctttggccacttggcttggccttcgtgcctctgcagatctggtccaaagtcctggccat

SEQ ID NO: 506953 - DNA, 106 bp, Homo sapiens
caaagcctgcccagacggctcacctgtgcgggatggaacaaaaggcatagaatgtcaagctaaccaggcgtccgctacttcagaagagtgtactgtcgcatgggga

SEQ ID NO: 506954 - DNA, 80 bp, Homo sapiens
accatctcaccagtggtctgctacacaaagagttaagcatccactcatgtgaagtcaatcttgctctgtcacccaggctg

SEQ ID NO: 506955 - DNA, 97 bp, Homo sapiens
cgagagctggaccagaggacggaagcaatactggagtaaccgcttcctaaaccattttgcagaaatgtaagggtgttcggttgcgtgcatgtgcgtt

SEQ ID NO: 506956 - DNA, 83 bp, Homo sapiens
ggaatgctggcgtcataaaatgagttggtgagccagccatgagagggtatcttgtggccatattcctgagtgctgtcttcctc

SEQ ID NO: 506957 - DNA, 98 bp, Homo sapiens
aagaagaagaacttcctctgggtgaggcacgaaagcaagagattatcaaagtcactgaacaactgatcgaagctatcaacaatggggactttgaagcc

SEQ ID NO: 506958 - DNA, 73 bp, Homo sapiens
tgtggtcgcgtctcggaaaccggtagcgcttgcagcatggactccctggaggaaaagcggaagcggcagcggt

SEQ ID NO: 506959 - DNA, 78 bp, Homo sapiens
aagcctatcagcaagaaggaaatgattcagaggtccaaacggtgttgacttcaaaatcaaaactgtagagctaagagg

SEQ ID NO: 506960 - DNA, 98 bp, Homo sapiens
ccaaaatggaatagaatgtggtggtgcctatgtgaaactgctttctaaaacaccagaactcaacctgggagaaacacatctcatctttcctaaaaaag

SEQ ID NO: 506961 - DNA, 75 bp, Homo sapiens
cggccatggtccaaccttgaaggccatgggtgttgagagtgaccaggaaattgtgcagatgattggaacagagga

SEQ ID NO: 506962 - DNA, 100 bp, Homo sapiens
ggaggaccggagcggcctgtccgaggtcttgactccactaacggggacttctcatacggctttgaacttggaccttggtgcataagcaaatgtaactcag

SEQ ID NO: 506963 - DNA, 98 bp, Homo sapiens
ggccaccaacgtgggctccattcgcatctactttgaccggatgcctgtggtctctctgatgtagcccatgtggaaagcttgcaggaaaagtctcagtg

SEQ ID NO: 506964 - DNA, 75 bp, Homo sapiens
atgaagccgaggtagaagaagatgaacccacagatttgtgtggatggtggggagctgtttgaccgcatcatcgat

SEQ ID NO: 506965 - DNA, 95 bp, Homo sapiens
ctcggccctgcgccgcgacaagtacgtggccgagttcctcgagtggggttcttctgtgtggcagttcagaatgatggatcaagctagatcagcat

SEQ ID NO: 506966 - DNA, 82 bp, Homo sapiens
gtttctctccctctgcccccccttccccacgcaaccccagatccatttacactttacagtgaccagcgccatgtccagccag

SEQ ID NO: 506967 - DNA, 50 bp, Homo sapiens
atgaagctcgcaaatggtccagcaaggttctctgttaatggaaactgaag

SEQ ID NO: 506968 - DNA, 95 bp, Homo sapiens
gaggcccgcccaccagttcgcccgtccccctgccccgttcacaatcacatttcagttggactgcgatgcagttcttcagctcttcattgaaacgc

SEQ ID NO: 506969 - DNA, 75 bp, Homo sapiens
tcaagaactcaggccacagtggcttggccaatggcacaggtgtcagaaatggctgtttctgagctacctggtaac

SEQ ID NO: 506970 - DNA, 82 bp, Homo sapiens
cctacaaggtctatgctgacaagaggctggacgcacaagcaagagtgagccatggagctacgtgtggggaacaagtaccgcc

SEQ ID NO: 506971 - DNA, 75 bp, Homo sapiens
gctcagagcataatttggcaataattggaacaaaggagaagccactttccccaggacgcaagactctcccctcca

SEQ ID NO: 506972 - DNA, 75 bp, Homo sapiens
aaagatgatgttgtaacagtgactggtcagtgctgacagttgcttgtgaacaaactgaagttctgctttttgacc

SEQ ID NO: 506973 - DNA, 96 bp, Homo sapiens
tcggggcgggcgccgcgggacctctccgggccatggcatttgacattgtgcagcaaagaaatggttatggagaagcccagtccgctgcttgtaggg

SEQ ID NO: 506974 - DNA, 98 bp, Homo sapiens
gatgctgttcatctatggccactacaaacaagcaactgtgggcgacataaatacaggttcctaaagagaaagatgaaatggtagagcaagagtttaac

SEQ ID NO: 506975 - DNA, 75 bp, Homo sapiens
acaaccagctcacgcacacaggcatggccttcctgggcatgacactgggacagaagatgagcctgtcggtcctgg

SEQ ID NO: 506976 - DNA, 83 bp, Homo sapiens
gttaatgtttacggcgaagtctactcaacgtttccaagtgtcaacagcatctccaccctggagcctgtgagccggtgccagcg

SEQ ID NO: 506977 - DNA, 51 bp, Homo sapiens
gctgcagcagggctgtgtgagctcagaactgagagaagatggtttccagcc

SEQ ID NO: 506978 - DNA, 90 bp, Homo sapiens
gcggccaactccaatgggcctttccagcccgtggtccttctccatattcgagatacacatggtctacagtaagcggtcaggaaagccccg

SEQ ID NO: 506979 - DNA, 136 bp, Homo sapiens
tgagatgtccctccgctcaaatcctaaagccccctgatgaaagatttggctctgatttgctgccaacttattggcgacttcagaatgcccacactggcctcgacctgactgtgccccagcaccaggaggtacgggg

SEQ ID NO: 506980 - DNA, 75 bp, Homo sapiens
cctgatcatggctaaagatgacctctctggtgctgacatcaaggtatgcccaagaggacagagaacgaatgcaca

SEQ ID NO: 506981 - DNA, 82 bp, Homo sapiens
ctggagcctcagttggaagcagccgatccagcctgcggagcctgtggggcaggcaaaatacatatctcagtgcattgatgag

SEQ ID NO: 506982 - DNA, 98 bp, Homo sapiens
ggaaattctgtcactggagaagatgaaagccttgagggaattagacagattttctgttttgaatagccaacacatgtttgaagtactagctgccatga

SEQ ID NO: 506983 - DNA, 131 bp, Homo sapiens
ggcgagctgaggtggaggcaggctgcggcagacggcgacagtggcggcggcgccatggcagggcttgcagggggggccctcagcctcttggccttgaacgggctgttcatcttgattcacaaacacaacct

SEQ ID NO: 506984 - DNA, 75 bp, Homo sapiens
agatctgaagacctattttactgataagaaaacacatctttacacactaattgtgaatgggagagttcacatccg

SEQ ID NO: 506985 - DNA, 49 bp, Homo sapiens
aaggattccaagtaactcttatttgaaggtggagctgattcctacagtg

SEQ ID NO: 506986 - DNA, 100 bp, Homo sapiens
caaaacagcagatttcccaagagcagcggaaaatgatccagtcacagcttaacattggtatcccttccctgacaaagtgttgcaaccaacacgacaggtg

SEQ ID NO: 506987 - DNA, 80 bp, Homo sapiens
gcgagagtgggcgagaacgtccactgcgggccggcgaaagctgaagccccatgtgccactcccctgatctgcagcttcgg

SEQ ID NO: 506988 - DNA, 76 bp, Homo sapiens
tttatattcatctcaaaaacaaaattctgaactcaggacttggcaatataccaacagatgttttaaagattgtgta

SEQ ID NO: 506989 - DNA, 100 bp, Homo sapiens
ggacacagccggccaggagaaattcggtggactgagagatggctattatatccaaggccgcttccaccctcagcggatgataatctcaagacaccttccg

SEQ ID NO: 506990 - DNA, 75 bp, Homo sapiens
gaaaacacaggagccggagcagaagcaaagagcagcctgagggaactggcatgatagatgaagagttcactgttg

SEQ ID NO: 506991 - DNA, 87 bp, Homo sapiens
cgggagccatgccggagaagcgcgcgggcgcgcaggccgcggggagcacctggatcgagctgggagcattagtacccttgattcttt

SEQ ID NO: 506992 - DNA, 100 bp, Homo sapiens
cccgggcatggtggtctggggcaacgcggaagaatgactgttgccgagggaagcgagatggaattaacagtcttgagagaaaactgaagagacgcctgga

SEQ ID NO: 506993 - DNA, 100 bp, Homo sapiens
attttcctgagttccctgatccccacacctacatcaaaactccgtctcacaccattttgctggtacagcctaccaagaggccagaaggcagaacttatgc

SEQ ID NO: 506994 - DNA, 101 bp, Homo sapiens
ccgctctgggcgactgtgctggcgctgggggcgctggcgggcgttggcgtaggaggctattttggcattctgctggatatatgttcgtaaataccaaagtc

SEQ ID NO: 506995 - DNA, 101 bp, Homo sapiens
gttcgcgtctctctgctgcggcgcggggaccgctgtgctctcgaaaccaatagagccatggcgactccctctgctgccttcgaggcccttatgaatggtgt

SEQ ID NO: 506996 - DNA, 75 bp, Homo sapiens
ggaggagctgaaggacctgctgaaggttatcagtgagctgaatggaaaaaacattgaagacgtcattgcccaggg

SEQ ID NO: 506997 - DNA, 82 bp, Homo sapiens
ggaggcgggccaggcgcgggatgcccaggacgtccagcaaattgtggctactaatttgccccctgaagatcaagatggctct

SEQ ID NO: 506998 - DNA, 50 bp, Homo sapiens
atagtcagtctgggatatggcatcgtcaattccttcctcagagatcacct

SEQ ID NO: 506999 - DNA, 75 bp, Homo sapiens
ttgatcaggagaaagaagacagccatcatttgaaagggaccagttactctccacaagaaaattcacacaaccaca

SEQ ID NO: 507000 - DNA, 83 bp, Homo sapiens
ctcggcgtgctactgtgcgctcgatccagcaccatggggaagcgggacaatcgggtgaggcagaggaggtggacacggtggac

SEQ ID NO: 507001 - DNA, 75 bp, Homo sapiens
aagggggaagtagagagataacaaaagctgctcagagtctcaatgaacttgaggccagtaatagtagccatgagt

SEQ ID NO: 507002 - DNA, 100 bp, Homo sapiens
cgcctttccagcatgcaggggctgctcaggaaggatcgagatcgagaccgggatcgtgaagatcggtctaaagatcgagaccgagaacgtgatagaggag

SEQ ID NO: 507003 - DNA, 103 bp, Homo sapiens
ttcttctcttctctgcttggaggggatgtggtttccgttaagctggacaacaggtgagaagccctaccactgcaactgggacggctgcggctggaagtttgcg

SEQ ID NO: 507004 - DNA, 75 bp, Homo sapiens
ttggagcagaagaagcaggaccgcggggagctgaagctgctgcttttgggtgtggatgaggtcaccattgtcaac

SEQ ID NO: 507005 - DNA, 100 bp, Homo sapiens
cgggacctcttcatctgagagcactcatccagaaggccctgaggaaggtttgtcctggttgtggtcaagactggatgatgtaactggctctctaggaagc

SEQ ID NO: 507006 - DNA, 100 bp, Homo sapiens
aaactatcccacgatctccaggcctcttatatgccgctttggataccagatggatgaaagcaaccaatgtgtggcagaattacctgattctaggacaaag

SEQ ID NO: 507007 - DNA, 95 bp, Homo sapiens
gttacctatgtacctgttaccactttcaaaagtattagaaaactactcggatgctccaatgacaccaaaacagattctgcaggtcatagaggcag

SEQ ID NO: 507008 - DNA, 101 bp, Homo sapiens
caggtgccctcgcgcccctcccggggtccccagcctggtatcgccagccttaaggtgtctggagcccccacacttggccaacctgaccttggaagatgctg

SEQ ID NO: 507009 - DNA, 83 bp, Homo sapiens
cgtgaacctggcatatctgggcgccaagccgcggagcctccagacggctgaaactagaggaccgttctgtggtgccccgagat

SEQ ID NO: 507010 - DNA, 83 bp, Homo sapiens
ttcgttctgaaccgcctgcaatatgcaatcatcagcgaggcctggcggctagtggaggaaaccactgttgctgcgattgcccc

SEQ ID NO: 507011 - DNA, 100 bp, Homo sapiens
aggtggccatagaatggccgggcgcctaccccaaactcatggaaattgatcagccagagactgctgctactttgaaacgtacgatagaggccctgatgga

SEQ ID NO: 507012 - DNA, 110 bp, Homo sapiens
ttcccagagttcgaggtggtgggactcaccgctctggccagggtgcttttggaaacataatggagtgaagaaagtgaagtgttacaacccacagcatcatatgtgatacc

SEQ ID NO: 507013 - DNA, 75 bp, Homo sapiens
ataacatacaagaagtattattgccggaaattcacctcttctatagaagagtttgttttgaactatacgatttga

SEQ ID NO: 507014 - DNA, 82 bp, Homo sapiens
tgctatcaaggaaccacgctctcgtctggtttgatcacaagacgggcaagatctttctcctggcctgccctccatgtcgggg

SEQ ID NO: 507015 - DNA, 100 bp, Homo sapiens
tctgtggagtggctggaggaggatgaacactatgattaccaccaggagattgcaagtgaacgagataattgggagagacatgtcccagatttctgtttcc

SEQ ID NO: 507016 - DNA, 95 bp, Homo sapiens
tttcaaggacttgctgctgcacgatctgcagccaggagagcagggacgtcctgtgcgaactgtcagaccaccacaaccacactctggaggaggaa

SEQ ID NO: 507017 - DNA, 51 bp, Homo sapiens
tgatgttgatttcccaatagggtgtgagttcttgatacgaatgaaaggcca

SEQ ID NO: 507018 - DNA, 75 bp, Homo sapiens
ccgtgatcgtgcccaaagaggagggcgtcatcagcgtctccgaggacagcgcttctctgaagtagctttggaaag

SEQ ID NO: 507019 - DNA, 76 bp, Homo sapiens
acgacgaggcagctgagttgatgcagcaggtcaaggctaatgtcttctgaagacttagcagagatccctcaactcc

SEQ ID NO: 507020 - DNA, 100 bp, Homo sapiens
gcgagagccagggctccaaagaactcgtgatcagggccaaagcggtcagtgagaaggaagtggactctggaaacgacatttatggcaaccctatcaagag

SEQ ID NO: 507021 - DNA, 100 bp, Homo sapiens
ggcaaatcctcccccagtactggtcaacacagatagcttggaaacaccaacttacactcgagaacaggaagaactggaagaagctttagaagtggaacga

SEQ ID NO: 507022 - DNA, 90 bp, Homo sapiens
tcactttctgcttgccagggtgttttacttgtggttgatgcaaatgaggcaaggccatgtgaatcttcctccacttgagttcaaaccagc

SEQ ID NO: 507023 - DNA, 90 bp, Homo sapiens
ctttggcacaagattctccttcccaggttatggaaacaaaggacatgctttacatcgtcactgaatttgctaaaaatggagaaatgtttg

SEQ ID NO: 507024 - DNA, 82 bp, Homo sapiens
ctaccgggacctcatcagccattgacctgatccacctgggggccaagttctcaccctgcatccggaaggacgggcagatcga

SEQ ID NO: 507025 - DNA, 75 bp, Homo sapiens
gcctctggatgaaacgtcaggaatttactacacagtgctgccgggccaccactctcggaggacgacaagctgcag

SEQ ID NO: 507026 - DNA, 82 bp, Homo sapiens
atcggctacagcgacacagcctggatctcctccatcctgctggccatgctctacgggacagtgtactaatggtcacttgatg

SEQ ID NO: 507027 - DNA, 100 bp, Homo sapiens
tgtggagtttggagctcgtatggtcaacattgatggaaaacaaatcaaactgcaaatctgggatacgttactccacaggatccgctgaacataggatgtt

SEQ ID NO: 507028 - DNA, 100 bp, Homo sapiens
ttctaacatccagaagatcacacagtgttcaatcatttggggaagaatctacagttgctgatggacagagtggatgaaatgagccaagatatagttaaat

SEQ ID NO: 507029 - DNA, 100 bp, Homo sapiens
aggttttggctctgcgtgagtgtggtctacgagctgtttctcatctttatactcttccaggccacggcatatgcctccaaggacggggtcctcactgagg

SEQ ID NO: 507030 - DNA, 100 bp, Homo sapiens
cggcagggttgtggcgcagcagtctccttcctgcgcgcgcgcctgaagtcggcgtgggcgtttgaggaagctggagcgcatcagcgaggaggtggggctg

SEQ ID NO: 507031 - DNA, 100 bp, Homo sapiens
ctgggcagccccttgcccttggacaggccagcactccttgcccgaggacagagatggcgagcgcccggattggggatgagtatgcggaggacagctctga

SEQ ID NO: 507032 - DNA, 100 bp, Homo sapiens
aaaaccgttatggggatgtaccctgcctggaccaaactagagtgaagctaacaaagcgaagtggccatactcagattgatcagggaccatgaaaagaaac

SEQ ID NO: 507033 - DNA, 75 bp, Homo sapiens
aagggactttggaaaaaggctgtctctagacagcagtcttgtgagaggtacagaaagcagtcaacactgcccagg

SEQ ID NO: 507034 - DNA, 100 bp, Homo sapiens
agcagcaagtcccatcggaggacctccctgccctgtataccgagggaacagaacttcgagaaaccaagacctctgaatacttcagcctttcccaccatcc

SEQ ID NO: 507035 - DNA, 100 bp, Homo sapiens
cgctgatctagtgcttctcgaaaaaaaccttcaggcggcccatgggcatgcccaagagaatcgtaaatgcaaaaattgcttgccttgacttcagcctgca

SEQ ID NO: 507036 - DNA, 100 bp, Homo sapiens
gagggcggcagcccagacgggcgggcagggccgggctccgcagaacccttaggagaaatcttgagagtggacagcaattgtgaagatcgccagagagttc

SEQ ID NO: 507037 - DNA, 82 bp, Homo sapiens
cttatggcggcgctggagagggggcgctgagctgttggggaatcaagtactggaaatgtttgatcatgcttatggtaactat

SEQ ID NO: 507038 - DNA, 75 bp, Homo sapiens
cagctccccgtgcctcgacctcagagctagagccggtgcaggccacgcagaacaagacagggaagtatgtgccgc

SEQ ID NO: 507039 - DNA, 82 bp, Homo sapiens
caccagacagatcgctgtcaaaaccctaggcatcaagcatgatggaaccatgtgtgatacctgccgccagcaaccaatcatt

SEQ ID NO: 507040 - DNA, 107 bp, Homo sapiens
cagcggccgagcgggcggcttcctggcctgggcgctccggtggcggcggagccaggcccagacatgtccgtccttgtaagttaaaagcttccatgggagccttcctt

SEQ ID NO: 507041 - DNA, 75 bp, Homo sapiens
cttcgtggctccacgacttactctctacccttggcagtggatccttcaggttccagggatttcaccagtagcagt

SEQ ID NO: 507042 - DNA, 101 bp, Homo sapiens
cgcagccatgaccgtggagttcgaggagtgcgtcaaggactccccgcgcttcagtttttagccagacgccaattctccaggcgctgcagcatgtccaagcg

SEQ ID NO: 507043 - DNA, 111 bp, Homo sapiens
acgagccatggttgctgggagcgacgcggggcgggccctgggggtcctcagcgtggtctgcctgctgcactgctttgggagcctgcacacatgatcctgaccgtcggaaac

SEQ ID NO: 507044 - DNA, 90 bp, Homo sapiens
gaaacctatggttatctgcagagggagtcatgctttcaaggacctcatgttatcagtgagctgaatggaaaaaacattgaagacgtcatt

SEQ ID NO: 507045 - DNA, 75 bp, Homo sapiens
gcagtccacccaccgccgccgcctcccaggtgtgaacccacatccctgcccccagggccacctgcaggacgccga

SEQ ID NO: 507046 - DNA, 100 bp, Homo sapiens
aatccaaatccaggtcgcgatcgaagagtccccccaagtctcctgaagaggaaggagcggtgtcctcttaagaaaatgcctatgaaagagacaaccagca

SEQ ID NO: 507047 - DNA, 82 bp, Homo sapiens
caagccagcatggctcacaccacaaaggttaacggcagtgcctcaggacttaaccaccaccatgtcgagcaaaagaacaaag

SEQ ID NO: 507048 - DNA, 74 bp, Homo sapiens
tggctgctgaaggatgaacggagaggaagaattctttgatgccgtcacaggtggttcagtcaggtggcaaaaac

SEQ ID NO: 507049 - DNA, 106 bp, Homo sapiens
ggggcgctgtgtgtacatcacccccatggaggccctggcagagcagacacctggatttcattagcatcatgacctacgattttcatggagcctggcgtgggaccac

SEQ ID NO: 507050 - DNA, 98 bp, Homo sapiens
gaatagctctgaccacccggcgaagatttatccacctatcaatgtgctgccctcactatcacggttaatgaagtctgctattggagaagggatgacca

SEQ ID NO: 507051 - DNA, 90 bp, Homo sapiens
ctcgggccggcggacagtgagggcgcgagaggaacttgatacagatgaatatgaagaaaccaaaaaggaaactctggagcaactaagtga

SEQ ID NO: 507052 - DNA, 50 bp, Homo sapiens
aagctattctgggggcaacagaggttatctgggatacactaggaaacaag

SEQ ID NO: 507053 - DNA, 100 bp, Homo sapiens
atgccgaagaggacgagccactgaaggagtcccgcaggaaggaggccttcttgttgcaaaagcttctcatttcagagagatgccaggatcctaagtgcct

SEQ ID NO: 507054 - DNA, 74 bp, Homo sapiens
ttttttccagaaattgatttggagaaatataaacttctgccagagtatgcatcttctattgatgatattttgga

SEQ ID NO: 507055 - DNA, 100 bp, Homo sapiens
tacctgatgccgatattcaacgctttcggaccagttgctcttctgtgatgactgcgatcgtggctaccacatgtactgtctcaccccgtccatgtctgag

SEQ ID NO: 507056 - DNA, 75 bp, Homo sapiens
acaagtggaccaactatctgagcggttgaattctcttacccgcccctgattccaggagatggacatgacagccac

SEQ ID NO: 507057 - DNA, 75 bp, Homo sapiens
ggattctcgacctgctaacagaactggaccttttcggcatagaatgtcaagctaaccaggcgtccgctacttcag

SEQ ID NO: 507058 - DNA, 124 bp, Homo sapiens
tgctgccatgtgagacgtgactgctcctctttgccttccactgtgattgtgaggcctccccagccttgtggaactgtgaaggagtacctcctggcaactatgggaactatggctatgctaatag

SEQ ID NO: 507059 - DNA, 100 bp, Homo sapiens
ctgagcgtatgtgccacgccgcccaggagacccctctgctgcaccacttcatgccccccaatcagccatgagtattatgacccggcggagtttatggagg

SEQ ID NO: 507060 - DNA, 98 bp, Homo sapiens
gaggatatcgtgtctggagcagtggagcccaaagacccctggagacatgtcaaggcggataagaaggcggcacaagaaaagatgatccagcaggagca

SEQ ID NO: 507061 - DNA, 100 bp, Homo sapiens
actctttctgttcaggccagaccctctgggagcttctcagccattttccacagatcagtttgatgaaggccggaacaactttgaaggggaggtcaccaag

SEQ ID NO: 507062 - DNA, 71 bp, Homo sapiens
gggaaggaagctgcatgcatgagacccacagactcagaaccgtgctgcatactatcctcctagccaaattg

SEQ ID NO: 507063 - DNA, 80 bp, Homo sapiens
tgcccatcttcagcagactttccatctcagatgactaagccagggcctgggcagcatggccgtattccggtcgggtctcc

SEQ ID NO: 507064 - DNA, 75 bp, Homo sapiens
tggaaacccacactcgggcctgtgttgagcaaccacgtttgacgcctgaattctgctattatctatgaccgagat

SEQ ID NO: 507065 - DNA, 82 bp, Homo sapiens
ccgcgtccgccgattcctcctccttggtcgccgcgtccttggctggcgtcaaaatgatgcttcaacacccaggccaggtctc

SEQ ID NO: 507066 - DNA, 75 bp, Homo sapiens
cccggccggacccgggcccgaggcgggggccggccccagcccagactggaagatgagattgacttcctggcccag

SEQ ID NO: 507067 - DNA, 82 bp, Homo sapiens
ctgggcccagagacgcggggacgggccgtgggcccccggaacgagctcaccatggatgatgatatcgccgcgctcgtcgtcg

SEQ ID NO: 507068 - DNA, 98 bp, Homo sapiens
cgagctgagggtggcggcggtcgacatgttccaggtcccggatagcgagggcggccgcgccggctccagctgggagtgtccactcgccttccaccagc

SEQ ID NO: 507069 - DNA, 99 bp, Homo sapiens
aagtctttccaaaaggtcaaggttcacaagccctggactttgtctcacaagatgaaatgttgacgcccctggggagattggacaagtatgctgcaagtg

SEQ ID NO: 507070 - DNA, 100 bp, Homo sapiens
gttctcagcagacaagaagcgggtggagactgcgctggaatcctgtggcctcaaattcaaccggtgtggcaaaggagcagagaactttgacaagttcttc

SEQ ID NO: 507071 - DNA, 100 bp, Homo sapiens
caaggcactcagctcaaatacacacacctgttgccattatagagctggaattaggcaaatatggacaggcaacaatgcaggatttggaacagaggcgtcc

SEQ ID NO: 507072 - DNA, 101 bp, Homo sapiens
tatgcaacgttatattttgtcttctgtgtggattcttcagaaagtgaacttggcattttagatctaattcaagtatacccgaaatcttgtggatcaaggaa

SEQ ID NO: 507073 - DNA, 95 bp, Homo sapiens
ctgccagcaaatcaacccagctgctccaggcagctgcagctgaggccagtctcaataagtccaagtcagatggcaaaaatcaagcaaacccttct

SEQ ID NO: 507074 - DNA, 83 bp, Homo sapiens
ggctcgcggggcccggcgaagggcaggtccctgtgcgttttattgcgacctgccggtgggaactttgtctccgagtcggagca

SEQ ID NO: 507075 - DNA, 75 bp, Homo sapiens
gagagctcgccccgaacgggggtcttcctcctccgccgttgacaggtttattaatgccagaagaagaatagtaca

SEQ ID NO: 507076 - DNA, 75 bp, Homo sapiens
ggttgcaacggagataaattcccggaaccgcgattcggcgtgtcaggtgtcagttgtacccgaggcgttctcagc

SEQ ID NO: 507077 - DNA, 100 bp, Homo sapiens
tggagcgcgagtacagctgcaccgtgcggctgctggacgacagcgagtacacctgcaccatccagtacttcgggatgacttcagacaaaacccttcggat

SEQ ID NO: 507078 - DNA, 74 bp, Homo sapiens
atttttcaacctgaacttgcagtagctagtggagaggcaggtaagggcacctgtgctggttgcacttgctttga

SEQ ID NO: 507079 - DNA, 100 bp, Homo sapiens
catccatcgcataagagcaaagaacactgttgttgccacaggattggctgataggctgaataatctcctgtagggtaagaagtgtcaactgtatcaagca

SEQ ID NO: 507080 - DNA, 100 bp, Homo sapiens
tctcagctgccaaagtgatgcacaaagtccagcggtaacctggtacaagctgtctgtggaagcccgtaaagagatgactagaaaggctattaagacagtc

SEQ ID NO: 507081 - DNA, 100 bp, Homo sapiens
tcaagcgatcctcccaccacctcagcctcctgagtagctggaaccatcatatgcaccagcacgcctggctaagagtataacatgtatggctggtgggtgg

SEQ ID NO: 507082 - DNA, 50 bp, Homo sapiens
ggttgtgagaagacgtctgtgtcgtgcgtatccatatattcctgcacata

SEQ ID NO: 507083 - DNA, 100 bp, Homo sapiens
agcctgtgaaagtgtggaaagctcgttccaggaaaattggaataatcacctcattggctggctttcaggcgctgtttgcagacaaggtcccaaagacagc

SEQ ID NO: 507084 - DNA, 98 bp, Homo sapiens
gtcgtggtccagacagtttagcagaacagcctccgcggctccggggagaaggtggagattttcattttacctttatgtatttacctacggagtcagat

SEQ ID NO: 507085 - DNA, 75 bp, Homo sapiens
tctcgcttcgtcctacacttgcgcaaatgtctccggtgaggcaggcgactaatcagattgtgatgaattgtgctg

SEQ ID NO: 507086 - DNA, 100 bp, Homo sapiens
ctcgaccaacgtcagcctcaccctgcgatgggatctcactctgtcggccaggctggaatgcaatggtgccaacttggctcagtgcaacctccccaccccg

SEQ ID NO: 507087 - DNA, 50 bp, Homo sapiens
cctgaatcgagcagagaaactgctctatctaatgttcctcctctccggaa

SEQ ID NO: 507088 - DNA, 74 bp, Homo sapiens
cacacccctgcgcagggccacagtggaatgtgtgaaagatcaggtgatgcagctaattgccccagtttggaaaa

SEQ ID NO: 507089 - DNA, 75 bp, Homo sapiens
ccgcctcggagcggctgtacgagttgtggctgctctactacgcgcaggtggggaccaatgccatggacagccccc

SEQ ID NO: 507090 - DNA, 96 bp, Homo sapiens
cagaccctggagcctcagttggaagcagccgatccagcctgcggagcctgtggggcaggcttctccagggaaagtgaccgaggcagtgaaagaggc

SEQ ID NO: 507091 - DNA, 75 bp, Homo sapiens
acttccccgttagaactcgcgtttccacttcagagatctgatactttcattcagaaaaccaagaagctctacatt

SEQ ID NO: 507092 - DNA, 83 bp, Homo sapiens
gcgcttcctgcggaccggggcggccgtcaggacagaactgtaccgctctctttttggccagctccaccctcccgacgaaggcc

SEQ ID NO: 507093 - DNA, 75 bp, Homo sapiens
cagagacccaggagttgggcccagcgtccctcccggaacgggtggcggcggcatggaggcgcgcttcacgcgcgg

SEQ ID NO: 507094 - DNA, 75 bp, Homo sapiens
cacaaacttgaagatggatatcagctacagactttcctgagtcagagctccttaataagcatttatagtcagttt

SEQ ID NO: 507095 - DNA, 101 bp, Homo sapiens
atgacttcctcagtcatgaggagaaatgaacagctgaccctacatgatgagaggtttgagaaggtcatacagcagatggaacaaaaaaaattacaacaagg

SEQ ID NO: 507096 - DNA, 109 bp, Homo sapiens
tgccaatctctgcttgaaaggagaagacttggattctcagttctttatagctccaagctctacagattcttcaaatatattgagaatagggatgttgcaaaaacagtgt

SEQ ID NO: 507097 - DNA, 75 bp, Homo sapiens
aaattctgctgtcaacattagaggtgaaaaggaaactgttgcctatttctgtgcccatttcgaagaacaactgaa

SEQ ID NO: 507098 - DNA, 74 bp, Homo sapiens
atatatgcgaatctataagaaaggtgatattgtagacatcaagtttgatgaaggccggaacaactttgaagggg

SEQ ID NO: 507099 - DNA, 83 bp, Homo sapiens
atcctcatgctcctactatccatttcaactacagatactttgaagtagaagaagctgatgagacgagttgtactgctgtcaca

SEQ ID NO: 507100 - DNA, 100 bp, Homo sapiens
ggcctaggcgaagatccggactctgggtgttttgctaccgtgaccgtttagaatttcagaatgcatggatagtgaagctgagaccgtcatgcagctccga

SEQ ID NO: 507101 - DNA, 100 bp, Homo sapiens
cagatgcaggaaaatttcgatattgaagtgtcaaaatccatagatggaaaagatggttttataggatcacattgacaaaagtaccatggagttttatgag

SEQ ID NO: 507102 - DNA, 101 bp, Homo sapiens
cctgcaccaagtgcggcaagcgcatgagtatggatcctggcgggagccagtcaacccctattatgtcaatgccggctatgccctggccccagccaccagtg

SEQ ID NO: 507103 - DNA, 75 bp, Homo sapiens
atgtccccagcctgaagcagaggtcctcaggtggcagtgctccttttggacttttctctaggtttggcgctaaac

SEQ ID NO: 507104 - DNA, 96 bp, Homo sapiens
gcgtcagatccttgagtgataaaggagtagagaagagacggggtttcatcatattcaccaggctggtcttgatctcttgacctcgtgataccctca

SEQ ID NO: 507105 - DNA, 98 bp, Homo sapiens
caacaacttcatgggctgcctcaaggacgtatctttgctgactcagaagttgaaagaacactgcaaagttgaatatcaaattaaaacattttctgggc

SEQ ID NO: 507106 - DNA, 83 bp, Homo sapiens
atggcatccgggacatcaggaaagcagtgctgatgataagggagtggagtcaacatatcaatggagcaagtcacagtcgtcga

SEQ ID NO: 507107 - DNA, 95 bp, Homo sapiens
gttgagtcagtgagttgcgtgtctgcaagagagcatcctatctgtgcatgcaagatatgggaaatactaaagcaagactactctatgaagccaat

SEQ ID NO: 507108 - DNA, 83 bp, Homo sapiens
agaaactgaggttcagagaggttaagagactccactgaggtcacacagccgtgtactccttggatgggattctggtgtttggt

SEQ ID NO: 507109 - DNA, 100 bp, Homo sapiens
atataataaaaatataaatgatgactttgaaatgatagattgtggttcaagcactgtcttcctgttggccctgacaatcatagccagcacctgggctctg

SEQ ID NO: 507110 - DNA, 100 bp, Homo sapiens
ctgcgtcccactgctccagggcctggtcctggtcctcgccctccatcgtgtggagccctcaggggcttagggaaggccgagccagcctgggtcaaagaag

SEQ ID NO: 507111 - DNA, 100 bp, Homo sapiens
cgctgcccgcggctgcagtcggggcggcagctgaggcggaggctgacgaggaggcggatcccccggcgtcaggtacttgaagctggtgtgtgtttccttt

SEQ ID NO: 507112 - DNA, 75 bp, Homo sapiens
ccaagttcatctcctccgtcaccagccacatctaccagaggctgggaggcggcagaatgcagccagaggagggca

SEQ ID NO: 507113 - DNA, 75 bp, Homo sapiens
taaagactccttaggaccgcttttacttcagaaggtctgaagaaaaccctgcgggatgagatcaatgccattctg

SEQ ID NO: 507114 - DNA, 100 bp, Homo sapiens
gattcccgggagcccccagcccgacaggacaaccttccttccccgcttcctcctttccaggtgtgtgcagtggcctcagggatccggaaagtctaggact

SEQ ID NO: 507115 - DNA, 98 bp, Homo sapiens
caaggatggcaaaacgacgacaggtgtacctgaaggaaatcttaaaagaaattggtgttcagaatgtaaaagggatccacaaaaacacatgggagctg

SEQ ID NO: 507116 - DNA, 100 bp, Homo sapiens
cggaaaaaagaaaactctagaagtctggatgtcggtgggcctctgagatatgccgtttacgggccactggagaatgcacggcaaccgtggggaagaggag

SEQ ID NO: 507117 - DNA, 75 bp, Homo sapiens
ggactgaccaagcctgagacctactgcacccagtatggcgagcctcagagtttgaagaccccttagttggtgaag

SEQ ID NO: 507118 - DNA, 90 bp, Homo sapiens
atgtcatttgaaaacagtttcatcgggatataattcgcaacccatacagtgaatccatttaaggaggctgtgcagaaggtatcctgcaga

SEQ ID NO: 507119 - DNA, 83 bp, Homo sapiens
ctgactctcggactgagaaacgcaagtttaaggaagaaatctctaaacgttttaaatcacatactgaccaacttgtgttgata

SEQ ID NO: 507120 - DNA, 82 bp, Homo sapiens
gacgctgtgagttggcgtgctagtgggatggcagatgaggaagaagaccccacgagttgatctctctaatgtattagatctt

SEQ ID NO: 507121 - DNA, 74 bp, Homo sapiens
ggagatccagaagtgaaacgccaggctctctggaggccaggagatgctatcatggtgaacttacttcagattgt

SEQ ID NO: 507122 - DNA, 99 bp, Homo sapiens
gtggtgctgcccgagaaggtggacgtgctggtgtctgagtggatggggacctgcctgctgctcaaactttggaacaaataccgaatttccaacattcca

SEQ ID NO: 507123 - DNA, 100 bp, Homo sapiens
caccatgtaagaagtgcctttcgcctcccaccatgattctgagacctccccagcaatgtggaactgttgccacatgaacatcttccagcatcttgcgttc

SEQ ID NO: 507124 - DNA, 97 bp, Homo sapiens
ccacgacctggacaggacggagcgcaggcagcctcacgattttgatgaatgtcgatttgatattagtgtaaatgatagtgtttggtatcttcgtgct

SEQ ID NO: 507125 - DNA, 100 bp, Homo sapiens
gccgccaccatgcccaaaacggctgtgggtgagcgtggaggatgctcagatgcacaccgtcaccatctggctcacagtgcgccctgatatgacagtggcg

SEQ ID NO: 507126 - DNA, 76 bp, Homo sapiens
ttttggaggtttccccacagcaagtcactctccttttcagccccaaactacagatgaaaaagagaggtttgaccct

SEQ ID NO: 507127 - DNA, 80 bp, Homo sapiens
gcgcgttggagcggcactcggagcttctacagaaggggtcggcaccaggaattattatagaaagatcggctacagattac

SEQ ID NO: 507128 - DNA, 100 bp, Homo sapiens
ctgggagagaggtacctctccttttccctctccctttccctaagacaaagaaacagccttggtataatagcacgttagcatcaagacgaaaacgacttac

SEQ ID NO: 507129 - DNA, 87 bp, Homo sapiens
cgcgaccgcggcgttctctgagcggggccttttccgaagtggttttagctgaagagaaggcaactggcaagctctttgctgtgaagt

SEQ ID NO: 507130 - DNA, 89 bp, Homo sapiens
gaaggcttccagctggacccccacacgaaggcctgcaaggctgtggctggcacagtgatgtttgagtatggaatgcggcttggcagaga

SEQ ID NO: 507131 - DNA, 75 bp, Homo sapiens
ccgggaagcactggggcattgccatgctcaaatcaatatgtgtggatcagaataaaccgctgtttatcacagcag

SEQ ID NO: 507132 - DNA, 97 bp, Homo sapiens
cattttccgtttctgcgaccggtcggtgccccctgcccgggccctcctgaagaggcggcgctcagacagctgccactgcagagccccgccatggaag

SEQ ID NO: 507133 - DNA, 83 bp, Homo sapiens
cgcctcgtgggcggcaaggacttcgagcagcctctcgccatttcccgggccctgtttgtgctcttcgtcctggcctacatcca

SEQ ID NO: 507134 - DNA, 74 bp, Homo sapiens
agtttgtaatgtgactagacggccagccagtcatcaaacagacattttaaatcctaaggatgtgatcacaactc

SEQ ID NO: 507135 - DNA, 99 bp, Homo sapiens
taaaataactcaatatgttgaagaagtaaagaaaaaccacagcatcattctttctgcaccaaacccggaaggaaattctcacatgcttaacactggaaa

SEQ ID NO: 507136 - DNA, 100 bp, Homo sapiens
cagcaccgtgctgggaccaagtgtggtgcctcctatactccttgataagcagttctctgaattcactccagacattacaccaatcattttggcagcccat

SEQ ID NO: 507137 - DNA, 100 bp, Homo sapiens
ctgctgcttcaatgtccgcatcgcaaccaccgccctggccatctaccatgtgggacagtatgatttggtgaaatgcctggctcctattcgagaccccaag

SEQ ID NO: 507138 - DNA, 50 bp, Homo sapiens
cttggaagctcatggacaaagtggtggcagggcccagccccgaaccagac

SEQ ID NO: 507139 - DNA, 51 bp, Homo sapiens
acctcccaggttactacagtgcagggctggaagcaattttggaggtggtgg

SEQ ID NO: 507140 - DNA, 74 bp, Homo sapiens
gcgggatcaagctgtgtgcattagtacaaatggaaactggagcacccatcctaactgatgatgttagcctgcag

SEQ ID NO: 507141 - DNA, 96 bp, Homo sapiens
aacccgagacaccattttcagaggatacctcatccccaagggcacacgcagagggatttggaattcctggagagttgcctttgtgagaagctggaa

SEQ ID NO: 507142 - DNA, 100 bp, Homo sapiens
cgcgtggaacggctgcttttggaagaccttagctggatctccaaaatacaagtgaatcacccggcagttctgaggcgtgcggaacaaatccaggctcgca

SEQ ID NO: 507143 - DNA, 100 bp, Homo sapiens
tgtggcgcttctgccgggccctcagactggggagtgtgagggccaagaccagcttcaagtctccatggtaccagaaaacaacaacctcacagcacctgaa

SEQ ID NO: 507144 - DNA, 88 bp, Homo sapiens
caagccatcctgctgggtatactgctcaaaagagaaggccccaacttcatcacaaaggaagatttattcctgacgacattgaatgcca

SEQ ID NO: 507145 - DNA, 90 bp, Homo sapiens
ccattaccagtcaaccaggaaggtaaagcggtaccaatgtacctttgagggctgtccccgcacctacagcacagcaggcaacctgcgaac

SEQ ID NO: 507146 - DNA, 50 bp, Homo sapiens
cgaggactcggagttcacctgcaggtagctacagcaagctgggtagcagg

SEQ ID NO: 507147 - DNA, 90 bp, Homo sapiens
accagatcaacgtcctccgggaccggagtcagaaccctccgcagagtaaaggtccaggggcaagttcatcctactctcgagtctaatgat

SEQ ID NO: 507148 - DNA, 80 bp, Homo sapiens
agccccttatcctctccccaacaaacacagctgaataccactagaaacatacctgtaaccagagacagctgattatagct

SEQ ID NO: 507149 - DNA, 83 bp, Homo sapiens
gtcatgatctatgacgccgagaagcagaggccccgaggagcaggccgggctctcgccatgggtcactgtcgcctctgccacgg

SEQ ID NO: 507150 - DNA, 100 bp, Homo sapiens
cttcggaggcctatagcccgcaggtatgagcacattcttttagaacctgacccagtaccagcatatgctctgaaactgctagtcgcgatgactgaacaca

SEQ ID NO: 507151 - DNA, 83 bp, Homo sapiens
cgggatcgtgcgtcgtcccgccgcgtccctgaagggaaggaagcgagttcaaggagcagggacaagttacaggaatgttctcc

SEQ ID NO: 507152 - DNA, 75 bp, Homo sapiens
agcgcggcggggagcgacgaatatggttttggagaggcagggaagcctaaatttggcattgaacctaatgctgag

SEQ ID NO: 507153 - DNA, 98 bp, Homo sapiens
cctgcaccgcgcctcgcaaactgagtcagtgctgattctctcaaatagagcttgaaggataaatcttcatttttgtttcaacaaaacttcgaaacaaa

SEQ ID NO: 507154 - DNA, 110 bp, Homo sapiens
gttggagcaaggagaagagccgtggtcagtggagcaggcatgtcctcaacgcacttgtccaggaaccagtgacctttgaagatgtaacactgggttttaccccggaagag

SEQ ID NO: 507155 - DNA, 76 bp, Homo sapiens
tcagcatcgaccagtccaagctgcctggagtcaaggaaggaagccagttgagggaagttctccatgaatgtacgtc

SEQ ID NO: 507156 - DNA, 90 bp, Homo sapiens
gtctatcaaccttctcaaatctaaaaaatgtcccttcattgttgcactcaataaggcaaaagagatttcactagcagacctccaggagaa

SEQ ID NO: 507157 - DNA, 97 bp, Homo sapiens
agggactctccttctcaccgttccgggaacaaatgctagatactatgatcgaagccttttcacatcctgggcataccactcctcaatcaatgcaagt

SEQ ID NO: 507158 - DNA, 100 bp, Homo sapiens
gccaccccggtcaaaggatgctgagtccggagcgcctagccctaccggactacgagtatctgggaatcgcttcagtttcacagacctgacttcatctccc

SEQ ID NO: 507159 - DNA, 100 bp, Homo sapiens
tcttgttatagccagtgtgcagctccctaatgatgatgctcagtttgatgcgtcacactacgacagtgagaaaggagacctttccaaagtgaaactgatg

SEQ ID NO: 507160 - DNA, 100 bp, Homo sapiens
atgtttttctgttttgcctgaatacatgatttaaacaagagatttccacagaagctggaagaagaaagatctgtgctcaataatcagttgttagaaatga

SEQ ID NO: 507161 - DNA, 97 bp, Homo sapiens
aaacagcggatgattctggaactgggagaagatggctttaaagaatacacttcaagtgtggatgaggtcaccattgtcaacattttgaccaaccgca

SEQ ID NO: 507162 - DNA, 88 bp, Homo sapiens
gcggccggggcggccggtcctgagcgcggcccgggctgtcagcacggccgacaagaacggggccctcaagtgcaccttctcggcaccc

SEQ ID NO: 507163 - DNA, 100 bp, Homo sapiens
cctgactgtcagtcagtacaaagccgtgaagtcagaggcgaacgccactcagcttttgcggcacttggaggttttgcactgattgcaaaaataaagtcct

SEQ ID NO: 507164 - DNA, 75 bp, Homo sapiens
aatagagatcctcacaccagaagttaacaagggagtggacatccgccataacaaggaccgaaaggttcggcgcaa

SEQ ID NO: 507165 - DNA, 75 bp, Homo sapiens
ctgaggagcctcctggcctgcagcttctgtgtgctcctgagaggggaaatcagccttatggtcccacctgttaca

SEQ ID NO: 507166 - DNA, 90 bp, Homo sapiens
agcggggcctgggacgcgccccgaggaggagcggggcggcgcaggcggtctcctctgagcctccggcctccataagacccaaaacagatg

SEQ ID NO: 507167 - DNA, 100 bp, Homo sapiens
acatgtctgagactcctgctcagtgtagcattaagaagatggcagtgaacgtatactcaacgtcagtgaccagtgataacctaagtcgacatgacatgct

SEQ ID NO: 507168 - DNA, 100 bp, Homo sapiens
gttccttcaagagaggggcttaagcagtatgagcaagctgccgatgcagaactagcttgggttgctgaaacaaaacggaaactgatggctctgggtccaa

SEQ ID NO: 507169 - DNA, 83 bp, Homo sapiens
tgacgtgcagaacaccaactctgcccttaggagaatacttatctctggcgcacatcactatatttggctgcctctgccagtgc

SEQ ID NO: 507170 - DNA, 90 bp, Homo sapiens
tttaaccccaaaatcagtgattctacatctcaagctcatattttgaagtgtttacggttcctcagtttgaaactacatgtaattacgtag

SEQ ID NO: 507171 - DNA, 89 bp, Homo sapiens
cgtaaatcactgaatcttgttgattctcctcagccactcctagaaaagcatggcacattacacttctgtggatttaaagtccttgcccc

SEQ ID NO: 507172 - DNA, 100 bp, Homo sapiens
agcatctttgtctagccccagtgcagtggatcaggcagatccatttgcacatgtggctgcccttcactttgaccagatgttccagaggtttggctctccc

SEQ ID NO: 507173 - DNA, 100 bp, Homo sapiens
ctggctgggggaaccactatgatcagcaccttctaaaaatgaacaagagcagctctgatttggaaaaagtgagccagggctctgcagaaagcctcagccc

SEQ ID NO: 507174 - DNA, 117 bp, Homo sapiens
aactattcaacatggaggcggaggtcgataagctggaactgatgtgctccactccagctacgagaactagtaaattgtcgttgggcagaagaagtaacacaacagcttgatactctt

SEQ ID NO: 507175 - DNA, 83 bp, Homo sapiens
cctactgatggtgctgtaaccacctcacagattccagcttcggaacaagagaccctgatggagttttaacattgaatgcggag

SEQ ID NO: 507176 - DNA, 82 bp, Homo sapiens
cggagacgatgcctgagatcagagtcacgcccttggcccgtggaccgggagcccgtggaccgggagccggtggtgtgccacc

SEQ ID NO: 507177 - DNA, 100 bp, Homo sapiens
ttctactcaacatgtcccttcagaaacaagtgaggaccctgaagttgaggtgactattgaagggccctccagaatttccacagcatacacctggacctgt

SEQ ID NO: 507178 - DNA, 88 bp, Homo sapiens
gctcggtcatctgtggcagtatatcaaggaatccagccatcatctgaggaagcagttcatgtcgcagcaaaggaagttctgttctcac

SEQ ID NO: 507179 - DNA, 75 bp, Homo sapiens
gaggatggagactccatccgcttcgggcgcttcacaggcaatctatacctgcgggggcccctgaagaagtccaat

SEQ ID NO: 507180 - DNA, 145 bp, Homo sapiens
attcctcggagctttcgtcacctgtccttctacattttcgatagagacgttttccggagggattccatcataggtgctggagaatctggtaaaagcaccattgtgaagcagatgaggatcctgcatgttaatgggtttaatggag

SEQ ID NO: 507181 - DNA, 133 bp, Homo sapiens
agagatcatccgtgacaacaacatggacttcactgacatcatcaagtttttcaatggaccttcttctgaagtccaaaaggggaaaccaaattcaccgttaggaaacagtgagctccggccccacctcgtgaac

SEQ ID NO: 507182 - DNA, 98 bp, Homo sapiens
accaggcaaaccaccatcacatctcattttgcaaagggcttcaagaccagccagccttgatagtggcagaacatccactagcaatagcaataataatg

SEQ ID NO: 507183 - DNA, 100 bp, Homo sapiens
gtgactcagagaaaggagacctcattccaagttccaggattaattctggttatgaatactgatggcactgggagacgagtactagtggaagacaaaattc

SEQ ID NO: 507184 - DNA, 95 bp, Homo sapiens
atatgaagtttctgtcttaactgcagtaaatccacaagagaccgagtgacggttctctacaggagcaaagccattcgctatacctggccttgtcc

SEQ ID NO: 507185 - DNA, 80 bp, Homo sapiens
gagaagccacttcttctgggcccacgaggcagctgtcccatgctctgctgagcacggtgttggaggctggcagcgaagaa

SEQ ID NO: 507186 - DNA, 50 bp, Homo sapiens
tctgcttggaagttctccattagaacagtcgcagatatggccagtacact

SEQ ID NO: 507187 - DNA, 83 bp, Homo sapiens
gaagaaagtaaagttggaagttaagggagacaaagttgaaaacaaagtgctggctaactatatgtcagaaagcatcagctttt

SEQ ID NO: 507188 - DNA, 75 bp, Homo sapiens
gaaacccctcctcccctagcttcactcaatgttagtaaggtaacccacctttttgacaatggagccactgtcttc

SEQ ID NO: 507189 - DNA, 73 bp, Homo sapiens
tttctaccagaagcttgaagggtttggttaaggaccttaattcccattttacatcaaaaagcaaagaggggta

SEQ ID NO: 507190 - DNA, 82 bp, Homo sapiens
ctggagatcaaaactcgctcggtggagcagacgctactcccgctggtttctcaggagccttcacgtaaatgggtccagtcat

SEQ ID NO: 507191 - DNA, 75 bp, Homo sapiens
ctatgggagggccaccaatgggacaagtgtctttccgatagccgttcctggtgagacatcctctttatataaaac

SEQ ID NO: 507192 - DNA, 75 bp, Homo sapiens
tgccgctggggaggggagaagctgctgctgccgccgttgccgggagccgcggagtctccaaaaaaagttggtgat

SEQ ID NO: 507193 - DNA, 83 bp, Homo sapiens
ggagcgcctcgtcgacatgagtgatgtggaggaaaacaacttcgagggcagagtgcctcctttaattcctaagactgattcag

SEQ ID NO: 507194 - DNA, 100 bp, Homo sapiens
gtgatttcctaagcagaggtcgctaactacaagaaatgttacactcggaatatattaaaggaatctgtgaacctgaactagaagaaagagaatgttaccc

SEQ ID NO: 507195 - DNA, 100 bp, Homo sapiens
atcggaatgtgatcacagagcctatttacccagaagtagtccatatggtcgaggccgaagccgtgaatcgtgccatcaccatcgccaaccagaccaactg

SEQ ID NO: 507196 - DNA, 98 bp, Homo sapiens
aggaacctacctttgatcagcaaggaaggactggggtggcaaaggctcatgcccccattttacagagttcaccgaacagcagaaagaatttcaagcta

SEQ ID NO: 507197 - DNA, 100 bp, Homo sapiens
gtgatttacctgggtgagacagcttgagccccatcgtggattccaagacatccctgctgagagagccaaggtggacaagagcaaggaccaagtgtggaag

SEQ ID NO: 507198 - DNA, 83 bp, Homo sapiens
gaaaattacctaaatgcactctttcgaaagaaaggaacctgacagaacttcacaggagaactctcctgcccttttaggagtgc

SEQ ID NO: 507199 - DNA, 83 bp, Homo sapiens
ccgagcgggcggcttcctggcctgggcgctccggtggcggcggaggaagccatcttcgacaagagcacagggaaggttgtttt

SEQ ID NO: 507200 - DNA, 96 bp, Homo sapiens
ccaacattcccaacagccaccaccaccaccagatggtgaactggcacaaaggttaatctcaagatgccgctagtgaaaagaaacatcgatcctagg

SEQ ID NO: 507201 - DNA, 88 bp, Homo sapiens
tgcaggcatgccagtccttgaggtctggaaatcaaagcaggtgacatgtatgaagtcggggcagagagtggccgctactactgtctga

SEQ ID NO: 507202 - DNA, 100 bp, Homo sapiens
agcatatcctgtccttcgagaccatcgacaagatgcgccgcgccagctcctactcctccctcaactccctcatcggaatccctttgcccacgtccagctg

SEQ ID NO: 507203 - DNA, 96 bp, Homo sapiens
ccaaaatggccacttacctgactggggaactgacggatgagtgatgtgtctgcaggaggagccactgtttttcctgaagttggagctagtgtttgg

SEQ ID NO: 507204 - DNA, 100 bp, Homo sapiens
ttctggatgatgtaaaccttattctggccaacagtgttaagtataatgcaccttctagccaccatggcaacctcatctgaagaagttttgctgattgtaa

SEQ ID NO: 507205 - DNA, 75 bp, Homo sapiens
atccctactacaggactgcggacaagggctggcagtggatatcaaagtattgcagagtgccttagcagccatccg

SEQ ID NO: 507206 - DNA, 90 bp, Homo sapiens
ccgatgagtggccgcgcggaaggagctggagacggtcgtagctgcggtcgcgccgagaaaggtacctgtgccgggtggaggagatgcgcc

SEQ ID NO: 507207 - DNA, 89 bp, Homo sapiens
ctctgtctgaggaggagtttcagcggatgcagggaagatcagttttcctgccatccaggctgctccctccttcagcaactcattcccac

SEQ ID NO: 507208 - DNA, 86 bp, Homo sapiens
aggctgaggacgggaggctgattgagaggcgaagacaatgcagatcttcgtgaagactctgactggtaagaccatcaccctcgagg

SEQ ID NO: 507209 - DNA, 82 bp, Homo sapiens
cgcaattgtgcagacgctgtaaggccaaaacgaggatttgtgttgtgagaattcagtttgcctgttctgtatgcaagttccg

SEQ ID NO: 507210 - DNA, 100 bp, Homo sapiens
tcacatcacatgctgacagcacaagaagatgaaaaattggaatcacggaccagaagggttttgagcaacacttatcagaaacttattcagtctgtcttcc

SEQ ID NO: 507211 - DNA, 80 bp, Homo sapiens
agcttggagaaccaccgcatcaagagcttcaagaacaagggccgcgatgtggaacggagctccctgggtcctcagcagtg

SEQ ID NO: 507212 - DNA, 83 bp, Homo sapiens
ggaccttaacaatccacctaagaaattcagagactcagtgttcctgaaagtacacctttcacagcagtcttaaagtttgcagc

SEQ ID NO: 507213 - DNA, 83 bp, Homo sapiens
gtttacttgtaaatatgcagattatatttctagggacaaacctatcacatttactcaggacacagcagggcaagagcggtacc

SEQ ID NO: 507214 - DNA, 82 bp, Homo sapiens
ctacagatgtagcctcccgtgggctaggaaggatttgatgccctggatccctttattcccatcctggtttccaactataacc

SEQ ID NO: 507215 - DNA, 82 bp, Homo sapiens
ccggaggatcgggggccggcgtgggtggggtcccatggagtactccagcacacgcagaccctctttcccagctgcccgctcc

SEQ ID NO: 507216 - DNA, 91 bp, Homo sapiens
aaccgaaacccacccgaacagctgcccatcgtcctgcaggttcattttccagacactgaaagagcagaatggctaaataaggtaagattag

SEQ ID NO: 507217 - DNA, 98 bp, Homo sapiens
gatgacaataaccatcttattcagtgtataatggactctcagaataaaggaaagacctcagagtgttctcagagttcatgatcaagtgttgcccacac

SEQ ID NO: 507218 - DNA, 80 bp, Homo sapiens
cccactctttccgccctaatggaggtctccagtttcgatgtgaagttcatttccaatccgccctccatggtggcagcggg

SEQ ID NO: 507219 - DNA, 100 bp, Homo sapiens
ggatcatatcagaaagatggcatatcagatatgcaagtctgtgaattatgaaaaagagaggtttgaccctactcagtttcaagactgtattattcaaggc

SEQ ID NO: 507220 - DNA, 80 bp, Homo sapiens
ccgaaactgtcaagattggcaaggtgattgaattactcagatatgaagatcatcatctaggttttgtgtaaaaggccctg

SEQ ID NO: 507221 - DNA, 98 bp, Homo sapiens
ctgccacctgcctttgacctttttgaagcctttgcaaaaattgtagggaatggaagtgaacagcagctgcaaaaagagctagcagatgtactgatgga

SEQ ID NO: 507222 - DNA, 75 bp, Homo sapiens
gccatggccgccgccgatgccgagactacgcgtttgttcacatggagaaggaagcagatgccaaagccgcaatcg

SEQ ID NO: 507223 - DNA, 100 bp, Homo sapiens
gtagatcatgaaagagatcctggacctatgaatatccagtttgagccatcggatctaagatccaaaaggagctgtggggggcgtctgcgccctggccaat

SEQ ID NO: 507224 - DNA, 99 bp, Homo sapiens
atcccttcgatcaggatgttggttcaaaagagcattaatgggtccgctgatgtcttacctgatatgttacctgacctgcccgtatctctggttctgtta

SEQ ID NO: 507225 - DNA, 100 bp, Homo sapiens
agaatcgcaaggatatgatatcatggaaccagcagcaaagaagtgctatctggaaagagagattctcaggatgatggagtgagtgatggaataggttgcc

SEQ ID NO: 507226 - DNA, 100 bp, Homo sapiens
gtcgccacccgcgtacccggcgcagccagagccaccagcgcagcgctgccatggagcccagcagcaaggtcgcaatggaagaagagatcgccgcgctggt

SEQ ID NO: 507227 - DNA, 113 bp, Homo sapiens
ccgtccccagaacgcagatcagaggtagtcggacctttcccgctggcgcgcagcctcagctagggatggaagcttcctggcgccaggtggccggtggccgaggccgatcccgg

SEQ ID NO: 507228 - DNA, 96 bp, Homo sapiens
gcctggaagggctcaaccaagagctggaggaggtatttgtgaaggagcagggagaagaggagctgctgaggccatggcaatgacaggctcaacacc

SEQ ID NO: 507229 - DNA, 100 bp, Homo sapiens
tggccatcagagtcaccaaccccaatgccaggctgcgcagtgaagaaaatgacctcatgatgatcctgagacttgtcttgttgctgctctgagcatctgg

SEQ ID NO: 507230 - DNA, 100 bp, Homo sapiens
tggttggatagcataagaccacaaaaagaaggagacttcagaaaggaggagagcgaagacctggagaaacagaacgcggctctacgcaaggagatcaagc

SEQ ID NO: 507231 - DNA, 100 bp, Homo sapiens
ggcggcttcctagtgagtcggcggctgatttagaaggaggttcaggctacggacctcagcatggccctgccctcagggcaggtctgccacgaccagcaga

SEQ ID NO: 507232 - DNA, 100 bp, Homo sapiens
aaagagctcattaaggacgggaagaacctcatcgctgcgacgaaaagcgcctccttggcattataacaaaaaaagatatcctccggcatatggcccagac

SEQ ID NO: 507233 - DNA, 83 bp, Homo sapiens
tcatggataactgtgaggagctaatccctgaatatctgaggcttcgtgggacacatatgcaacatgcctatgatttttacaag

SEQ ID NO: 507234 - DNA, 50 bp, Homo sapiens
ctcaggcgtgcgcggacggtgtgcggaaccttcgagatctgcggtctggg

SEQ ID NO: 507235 - DNA, 100 bp, Homo sapiens
agctcttcactcctcagcgcgacgtcgtgtcgagttcccaaaaagctccgcaggggctgtagggaggttcaggataaattccgcttagacctgtcggatg

SEQ ID NO: 507236 - DNA, 80 bp, Homo sapiens
tgactggggagtcggcaggcggcaggacagagcgggatgccaccagcttgtccaaagggaagttccaggagctcctggtg

SEQ ID NO: 507237 - DNA, 74 bp, Homo sapiens
tgtcatccccccttcaagcaagggcatgatgcctccactaggtctcctatggacagaagtgcgggcaaggagct

SEQ ID NO: 507238 - DNA, 100 bp, Homo sapiens
tgtcatggaccccaggcgatgacaacaatagccccattacaagtatctcagatgaagacatcatcaacattactcttcctactggagtccccattcttct

SEQ ID NO: 507239 - DNA, 54 bp, Homo sapiens
ccttcatcgctggtgctgcaacaaaaaaaatgctgctgtaatggaccaagagcc

SEQ ID NO: 507240 - DNA, 80 bp, Homo sapiens
gatccagcctgcggagcctgtggggcaggagctcagtctgaatattcttggagaaagatgctgagtggcattgcagcctt

SEQ ID NO: 507241 - DNA, 75 bp, Homo sapiens
cgcagtggtcgcttcttctccttgggcttatgtttaaagaagacagtctctctgtgtgacattactatcactcag

SEQ ID NO: 507242 - DNA, 100 bp, Homo sapiens
tcggagaagatgtggtggcttccgtttgttggtggaggaggtggcaggcctcggcggtcctgcaaccctggttccagtctggcaagcattgtagacctgg

SEQ ID NO: 507243 - DNA, 96 bp, Homo sapiens
ataagggcaagtccttagagatccagaaacccgctgttgaacagacacggtagaagactcgcccattttggaatgtgaccgtctgtccttcaggag

SEQ ID NO: 507244 - DNA, 73 bp, Homo sapiens
gagggaaaagcgaggcaaggcaggcgggacgtgttcctcatgatccggcgccacaagaccaccatcttcacgg

SEQ ID NO: 507245 - DNA, 101 bp, Homo sapiens
gctacgagtcccagcggagcgccgcagcacagcgccatggacaaactgataaggagacaaggaggcatccagctcctggtggacctgttggatcatcggat

SEQ ID NO: 507246 - DNA, 83 bp, Homo sapiens
ggggcaaagggaccacggtcaccgtctcctcagggtttccaggcctgaggtgcccgccctggccccaggagaatgaaccagcc

SEQ ID NO: 507247 - DNA, 75 bp, Homo sapiens
ggagcgtcaacagcagcaccatggtcaaggatgctatctaaatgggccttttaattcaaatctactgactatccc

SEQ ID NO: 507248 - DNA, 100 bp, Homo sapiens
ctgcgctcttactatgagaccagcaagatgaaagtcctcaagtttgcctgcaaggctcacctgttactcggcctcccagaaagatggataggagaaatga

SEQ ID NO: 507249 - DNA, 75 bp, Homo sapiens
gcaaaaatgacccaccaatggaagcagctggcttcactgctcagtttgccaccgtttacaaggccagagataaga

SEQ ID NO: 507250 - DNA, 89 bp, Homo sapiens
gggccagggaaccctggtcaccgtctcctcagcaatggctgccatccggaagaaactggtgattgttggtgatggagcctgtggaaaga

SEQ ID NO: 507251 - DNA, 117 bp, Homo sapiens
tgggatgttacgtggccggaatcattcccttggctgttaatttctcagagtatcagcagcgtcgccagcaggagaatatgcagcgccagagccgaggagaacccccgctccctgagg

SEQ ID NO: 507252 - DNA, 83 bp, Homo sapiens
gcccagcgcggcgcggggctgcggagtcgtccggagccgctgcgcgccgcggcgagtcctttgcacatgttggcaacacacgc

SEQ ID NO: 507253 - DNA, 82 bp, Homo sapiens
tttctggcctggaggctatccagcgaccgagtctcctgccattccgagcaggcctggtatgggtaatggtgtgaaggaaggc

SEQ ID NO: 507254 - DNA, 82 bp, Homo sapiens
tccgctccccgccccgccgcggccatggaggacgagcggaaaaacggagcctacggttggtctccgccagctggacatgtcc

SEQ ID NO: 507255 - DNA, 100 bp, Homo sapiens
ggactgaggagtcgccgccgccccgagtcccgggacctccaggtgcatggattggtgctgcccctcatgctgcccagcttctactcagagctcttcacgc

SEQ ID NO: 507256 - DNA, 74 bp, Homo sapiens
acaggacctgagaatctgagaaactgcagctgataggaagatgtcttcaggaaatgctaaaattgggcaccctg

SEQ ID NO: 507257 - DNA, 80 bp, Homo sapiens
cctcagcacatggtgggggccacaccatttgccgtggccaggctagaggatctctatgacgctggagtgaagaggaaagg

SEQ ID NO: 507258 - DNA, 75 bp, Homo sapiens
ctggacagctagctgcttatggctataaaattacaggtggaatacatgttggtatcttttgatcatgaaaataaa

SEQ ID NO: 507259 - DNA, 75 bp, Homo sapiens
ctggctggtgcaatgcttgccttgggactaatgacatgcttgtcaggacaagaagaggtatttacgcctcctgga

SEQ ID NO: 507260 - DNA, 100 bp, Homo sapiens
ataacacaacaagtttagggagtccatggccagaaaacttttggggccccttcacagatgtagtcactacaaatcttaaattgcgaaatccatcggatag

SEQ ID NO: 507261 - DNA, 50 bp, Homo sapiens
ccgcggagctggtttctgccgacaattctccaaggagaagtacatcctgg

SEQ ID NO: 507262 - DNA, 75 bp, Homo sapiens
gtgtgtggagatatccatggacaggatgttgcttcagagtgtgaagtcaaatgcatgccaacattccagtttttt

SEQ ID NO: 507263 - DNA, 90 bp, Homo sapiens
cgcagacaacgcctccgggagggatgacatctgaactggagagcagcctaacgtctatggactggttaccacagctcaccatgagagcag

SEQ ID NO: 507264 - DNA, 100 bp, Homo sapiens
aacctggaagcggcagagttaggtgaaatttcagacatacacaccaaattgttgagagaagatgatccctatgatcttgaagatgtttctgcacagaaat

SEQ ID NO: 507265 - DNA, 82 bp, Homo sapiens
cgcggatctcaccgccgctcagggagtgggaatagctttgcgaaaaatgggcgcaatggccaagccagattgtatcatcact

SEQ ID NO: 507266 - DNA, 100 bp, Homo sapiens
acaaaagacgcattgcaaacttaattaaagaactggccagaaccacgaccatgcctgcatcgcctgtcggatcatctatcggtcagacgagcaccaccct

SEQ ID NO: 507267 - DNA, 75 bp, Homo sapiens
ttccctccagctctgtctatcctaccaagtcaaatctacctgatgacatctttgaaaatggaaaggcagccgagg

SEQ ID NO: 507268 - DNA, 90 bp, Homo sapiens
acttacagcaagagcaaactatcagaatgggaagaacaatgtgccaaggctgaaattatcctacaaaggagaattactggctccagtagc

SEQ ID NO: 507269 - DNA, 76 bp, Homo sapiens
tgtacttgcaagaaacctcaggacttgagtaacagcaacatggtgcaatggatgagcttcatagtctggatccaag

SEQ ID NO: 507270 - DNA, 100 bp, Homo sapiens
agggagcgggagccgccgccgccgccgccgccgccggagctaacctcggggaccgagatgcagtgtaaacaggaacatcgataagtagtgtaaaaacttg

SEQ ID NO: 507271 - DNA, 98 bp, Homo sapiens
gtattcagcatagctattcctgttgatggtgatgaagacaggaattatccagactgccttgccactagatgaatggaagacaatgatttgaactaagg

SEQ ID NO: 507272 - DNA, 98 bp, Homo sapiens
ggcgaaggaggcagaggcacttatgcttgtcaggtgcagattcactttataggaacagcttcagcttcagtgatgaaaaactgaattctccaacagac

SEQ ID NO: 507273 - DNA, 75 bp, Homo sapiens
agagtgccggaccccagcacacagaagccgagacgtgagcaagaagaacccatcaggtgattgtcaggcctctga

SEQ ID NO: 507274 - DNA, 50 bp, Homo sapiens
ggcagctgtactaggactgggaacgggttaacacagaaatctgcctcctg

SEQ ID NO: 507275 - DNA, 82 bp, Homo sapiens
tggctacttcatattttggaaagcagtttttaagacaagtgaccttgggaaaggtgttgaaagtgatcgtcgtcatgcggag

SEQ ID NO: 507276 - DNA, 75 bp, Homo sapiens
ggggccgtggctgacatggagcagatggagttttaacattgaatgcggagaacactaattatgcctatcaagttc

SEQ ID NO: 507277 - DNA, 90 bp, Homo sapiens
gttggttgggacccgctccaaccctcggtggctttctttcagatgcaggctggtacagtgatgctgagaaagtttttctgtcctgccttc

SEQ ID NO: 507278 - DNA, 100 bp, Homo sapiens
ctcaagatgtggatttaccttatcccctcaacaacttttcagtggcaactcaccatctgctacctggatatgctgatgaccagtgaggagcgccggaagc

SEQ ID NO: 507279 - DNA, 90 bp, Homo sapiens
ctgaataacctgcaactaaaaccctggcccactgcagattattgctacgcaatgatattaaacaccgtcgaattccaatcttattctttg

SEQ ID NO: 507280 - DNA, 76 bp, Homo sapiens
agttcgaaaactggataacactaagtttagatctcatgagggtcttactgaagtaacacaaagcttaaaaatggaa

SEQ ID NO: 507281 - DNA, 75 bp, Homo sapiens
aaaaatgagaagacaactcactgaatagctgaaacctttggacttcaagaaaattatatcaaaattgtcataaat

SEQ ID NO: 507282 - DNA, 96 bp, Homo sapiens
tttttctcagaagagaattccacaaggtggtggaatgggtagcatgaacagtgtgactggaggaatggggatgggactggaccggatgagttccag

SEQ ID NO: 507283 - DNA, 100 bp, Homo sapiens
ggcgcgtcgcctcggacgtccactgcaccctgcgcgagaagggaggttcccctgaaggatgctaaggaatacgctgaatccataggtgccatcgtggttg

SEQ ID NO: 507284 - DNA, 95 bp, Homo sapiens
gctgtggcaacgcggcgggacctggccagcgctgctggcgggcgttaggttaagtgggcagaccaacatccacctcagcaaaaacttcttcctga

SEQ ID NO: 507285 - DNA, 98 bp, Homo sapiens
gcccttgccttgagtcagtgcgccgctctccagcccgcttgaacggagcatcagatccatgctgctgctgactcggagccccacagcttggcacaggc

SEQ ID NO: 507286 - DNA, 132 bp, Homo sapiens
caggatttaactatcagaatgaagatgaaaaagtcaccttgtctttccctagtactctgcaaacagccgtttcctctccctcgccggcctcggcggagattccaggccctatagaaaccaggacgtccctta

SEQ ID NO: 507287 - DNA, 90 bp, Homo sapiens
ggaaaggccaagcagtgaccaggaagagggagaaacttctgctcagatctctcaaaggccttggttctgacagaaattggccccaaacgt

SEQ ID NO: 507288 - DNA, 90 bp, Homo sapiens
agaagcgggcggcgcgggggagatggcaaggggagagccagttgcgcagagccctgcaaccagcagtccagggagaagtggtgaatgtca

SEQ ID NO: 507289 - DNA, 98 bp, Homo sapiens
tcaccgccaggacctccttcttcaggagagcgccccagggcaagccccgctccggccaacaaccctggactttgtctcacaagatgaaatgttgacgc

SEQ ID NO: 507290 - DNA, 87 bp, Homo sapiens
cgcaacgagctggaggccctggagtccatctaccctgactccttcacagaccacagagtattcagccatggcctcgctggctggtgg

SEQ ID NO: 507291 - DNA, 51 bp, Homo sapiens
ccaaataaaggaagtggaaccacttcagaaacctctgcgccatgagagcca

SEQ ID NO: 507292 - DNA, 112 bp, Homo sapiens
cggctctcggcgcgtccagcgcagcccgacgttccgctgctggggttgtctgcattcaaaagagcattctattaaagctaccttaatttggcgcttatttttcttaatcatg

SEQ ID NO: 507293 - DNA, 75 bp, Homo sapiens
ccagcccccgcccgcagcctggacgacatcgacctgtccgccctgcgggaagattcggaaagggccaggtattcc

SEQ ID NO: 507294 - DNA, 101 bp, Homo sapiens
ttgctgaaaggcatggtcacaaagaactcaagaaaatcttcgaagacttttcactgttccatttcctccaagtcaccggcttacagcaaaagaagtgtttg

SEQ ID NO: 507295 - DNA, 90 bp, Homo sapiens
ttcacatggatcctcttcaagcttaaacctgggtgatggaggagttgcaggccgcctccgtgcacagtgatgagagggagctgctccagc

SEQ ID NO: 507296 - DNA, 100 bp, Homo sapiens
gtccatgatcgaaattagccggacccaggatgaagaggttggagatgggaccacatcagtaattattcttgcggaaagaacacccggaaatgaaaggcca

SEQ ID NO: 507297 - DNA, 90 bp, Homo sapiens
cgaagacccgcggaggaggaatattcttcgcagcctaaggaggaacactaagatataattgaccctgcaatcctgcgcccgggccgcctg

SEQ ID NO: 507298 - DNA, 100 bp, Homo sapiens
atgtctcttcttctattagcacttactgggattggtcagatagcgagtttgaatggcagttttctggatatgccgcagaaggatccgtgccagaagcaag

SEQ ID NO: 507299 - DNA, 74 bp, Homo sapiens
atcagaaggacgtgggtcaacatttgccaagagtgttgcggagataggaacatgggagagaaacaatctgggta

SEQ ID NO: 507300 - DNA, 82 bp, Homo sapiens
tgatgagaagctgttcctcgttctcttttttgataataagagaagttggtcaaaatgcagatcttcgtgaaaacccttaccg

SEQ ID NO: 507301 - DNA, 73 bp, Homo sapiens
gaggcctcggttggatgcgaaggagctgcagcatccaggcgatcgatagcattcatcaagtgggggtttattg

SEQ ID NO: 507302 - DNA, 75 bp, Homo sapiens
attccttctcacttggcctatggaaaacggggatttccaccatctgtcccaggttttgatgtggccaagacaggt

SEQ ID NO: 507303 - DNA, 83 bp, Homo sapiens
ctccactttcgccagcccgtgccgcgagcgcggcctgcaggaggtagctcgtaagctggtcatcctggagggtgagctggaga

SEQ ID NO: 507304 - DNA, 82 bp, Homo sapiens
gatcccattccttcacagggaccctagccagtgagaaagatcagtctaaagaaaaggagaagaaagtgaaaaaaacaattcc

SEQ ID NO: 507305 - DNA, 100 bp, Homo sapiens
gtgagtgggtcccccgagctctgtgaccttatgctccacactaactctggcagagcctccgtttcctcataggaaaagcgtgcaagtatcagtgatgctg

SEQ ID NO: 507306 - DNA, 75 bp, Homo sapiens
ggatcttcaaccacctcgagcggctgctggacgaagtctgtgatcaaaacagggcgactgctaatcagtcacgag

SEQ ID NO: 507307 - DNA, 74 bp, Homo sapiens
tgcctccaccccagcccccaaccttcccagaaatgctgctcatggattctcccttattcaggtggacaacacaa

SEQ ID NO: 507308 - DNA, 75 bp, Homo sapiens
cctggctctcctggcaaggaggaaggggctagccctgcctggctcccagcctggagcagcaagagcaggagctga

SEQ ID NO: 507309 - DNA, 90 bp, Homo sapiens
gtttttgcagaaggagcaggatctgaaagctgaaattgagaagctttgtgagaagggcagaagattcagtcgggtccactaaaaatctct

SEQ ID NO: 507310 - DNA, 51 bp, Homo sapiens
tgtattttttaagtcacagaattcttggttgatgaaaagcccagaaccttg

SEQ ID NO: 507311 - DNA, 75 bp, Homo sapiens
atccctggaggagacctggcagcagctctgcttatgataatgtcaacaaagttcgagtagctatcaagaaaatca

SEQ ID NO: 507312 - DNA, 100 bp, Homo sapiens
ggactgcacccctacgggaacccacgaccattatatgctggaatggttccttgtgtcacgtcttgaaattttaaatgtcctcagtgactctctacctctg

SEQ ID NO: 507313 - DNA, 74 bp, Homo sapiens
cgtccatcatagtcaactgcgtggaagagaagaagattaagattgcggccctgcgcatgtatactagctgtgtg

SEQ ID NO: 507314 - DNA, 80 bp, Homo sapiens
gtcaaggtggcctaccaggaggccaggggtgtcgccatgtttgccatgagtccatctaacttcagcagcagtgactgtca

SEQ ID NO: 507315 - DNA, 87 bp, Homo sapiens
gaagtccccggagaactctaccctggaggagattctggggcagtatcaacggagtctccggggcattgctcatcgtgatctgaaacc

SEQ ID NO: 507316 - DNA, 58 bp, Homo sapiens
gaaattcctgacgttcattgatctggctcttgcagccaatgccggaacaggatttgct

SEQ ID NO: 507317 - DNA, 75 bp, Homo sapiens
cagatgtctaacgataaggagcggtttgccagtgatgttgcacctgtaaccatctttttatgggtggagcagaga

SEQ ID NO: 507318 - DNA, 73 bp, Homo sapiens
gtacctgcgctatgaagacacgcttcttctggaagaccagccaacagaaacgctatgtattagaggaagctga

SEQ ID NO: 507319 - DNA, 100 bp, Homo sapiens
tggaattttggcatcaaggacaaacccaccttcatcaaagggtgggctcgggatgagtttgaaggcctcttcaagcagccagcagaaaatgtcaaccagt

SEQ ID NO: 507320 - DNA, 75 bp, Homo sapiens
cttcaaagagaaaaggcaacatcctgtcacaggccatgctctggcaaaaacgagtccaaaactacttacctggaa

SEQ ID NO: 507321 - DNA, 83 bp, Homo sapiens
aattctaatttgaaccatgtttggattgaagccgcctctgtattacttaccaggagcatcagatccatgctgctgctgactcg

SEQ ID NO: 507322 - DNA, 99 bp, Homo sapiens
gcaaatcccagtatgagaatcgaacatgagcacgaaacacatgtggcagttccagaaacagcattattacaaacagttgccaatttggacactctagta

SEQ ID NO: 507323 - DNA, 75 bp, Homo sapiens
gaacgaggcaaggagctaaagcagcgtgcgttcagccctgggccccgactatctgagatcggccaagatgactga

SEQ ID NO: 507324 - DNA, 75 bp, Homo sapiens
cgccactacagttcatcaacatcaactacgtccctctgaaggaagctcagcccggagccagaaacgggaggcccg

SEQ ID NO: 507325 - DNA, 75 bp, Homo sapiens
cgagcgggtgcgtctgccgcagagtcggcacctgaaggacatggaggtacgcatagctgctaaattcatcactca

SEQ ID NO: 507326 - DNA, 75 bp, Homo sapiens
aagactggagtccctgatggaattatgcagtttattaaggttattaacacggggatcaaagtctggtgtagaaat

SEQ ID NO: 507327 - DNA, 83 bp, Homo sapiens
ggaggataacaagttttgtgcagattgccagtctaaagccaacatcccatgcaccatcgtggagactggctggatgccctgtg

SEQ ID NO: 507328 - DNA, 83 bp, Homo sapiens
ccgcggccggaccgagcgcctcgacctcggtctgagctgtgagtacccaggaagctgcaccgtgtggcctggagctgtctatc

SEQ ID NO: 507329 - DNA, 100 bp, Homo sapiens
gaaaatcataccatatcagatgcctcgcagagcaccaggcccaccgtgaaaggtcctgcaaccctggttccagtctggcaagcattgtagacctggctgc

SEQ ID NO: 507330 - DNA, 75 bp, Homo sapiens
ttctcttgcctggagacaatatggtgtggacatggggtggctgcttccagacgctgaccggaaaggagattgaga

SEQ ID NO: 507331 - DNA, 82 bp, Homo sapiens
cttctgaaaacatttttgaaaagacaagccatcaaaactgccttcagaagcaaaagcgggagatacagatgacccaccaaga

SEQ ID NO: 507332 - DNA, 100 bp, Homo sapiens
tggatcttctgccgcaccaggctcatcctgtccatcgtgtgcctgatgatcacgcagctggctggcttcagtggaccaatgggaagtgatggaattttac

SEQ ID NO: 507333 - DNA, 100 bp, Homo sapiens
cagacctcgaaatgatagacggtttccacttgagcggcacagtgacagaacctgcaatacaatcggagccagaaactgtttgcaacgtggccatcagctt

SEQ ID NO: 507334 - DNA, 50 bp, Homo sapiens
aaaatgcaaaaaaggaggccaaagactttcttccatgaggcaggctgaac

SEQ ID NO: 507335 - DNA, 75 bp, Homo sapiens
tggtgtacagggtctgggatgggtgtacgaaggaagcaagaaatacaaacctggtcgatgtgatgatattttgaa

SEQ ID NO: 507336 - DNA, 83 bp, Homo sapiens
atggcaagcgcagcaacaacagagagcacgtgctagacttcgggctccttgaggatattcagttttgtatgtttgaatatcct

SEQ ID NO: 507337 - DNA, 100 bp, Homo sapiens
tgtggagttcgggaaccagctggaggacactcatgaggaccatgatacttccactgagaatacagacgagtccaaccatgaccctcagtttgagccaata

SEQ ID NO: 507338 - DNA, 100 bp, Homo sapiens
cgagctgagtggttgtgtggtcgcgtctcggaaaccggtagcgcttgcagcatggtttcaggctctgtataactatactcccaggaatgaagatgagctg

SEQ ID NO: 507339 - DNA, 75 bp, Homo sapiens
tggggttactgtaaatgggaaggacaggcagagctaaacaagctcaaatctaatccaagtgaaaatgaagaaaag

SEQ ID NO: 507340 - DNA, 80 bp, Homo sapiens
tagtgaatctgacccgactggattcctccatgactcaaggcacagactctccagtcattatttagaagcaaggtccttga

SEQ ID NO: 507341 - DNA, 87 bp, Homo sapiens
ggtgaccgcggccggggctgcaggcggcggagcggctggcactttcatttggacccgtggatacccattgaacagatgcttgaaacc

SEQ ID NO: 507342 - DNA, 80 bp, Homo sapiens
caaagtgaccaagaacgtgagcaagcccaggcacagccgacgccgcgggccagcagcgatgacatgaccctcaccagccc

SEQ ID NO: 507343 - DNA, 100 bp, Homo sapiens
agccactcccgcccacgtcccatttcgcccctcgcgtccggagtccccgtggccagggcccaccagctctgagcagatcatgaagacaggggcccttttg

SEQ ID NO: 507344 - DNA, 74 bp, Homo sapiens
ccgtttgttcaggaaccaccagtgacagaaatgtatgacaacatgtccacaatggtgtacataaaggaagacaa

SEQ ID NO: 507345 - DNA, 100 bp, Homo sapiens
gactgacgactgttctcggtcccggcacagggaccagcgtgatgggggtgtgggccgaagatatgctcatgtggtgttgaggaaagcagacattgacctc

SEQ ID NO: 507346 - DNA, 100 bp, Homo sapiens
ttggatcattttgaaaaacagtattccaaagaactcggagatgcctggaatacagtaaggttcttgatacatatttgccagacttcaagatttcagaaaa

SEQ ID NO: 507347 - DNA, 100 bp, Homo sapiens
gattcatgtatgacagttttgacaacacctatcagttgttacagaagatggcccagagcccaaggacaaaggatcattgccacaaccacccattactgaa

SEQ ID NO: 507348 - DNA, 101 bp, Homo sapiens
tcaggactccagattatctacaacactgatgagaggtacttggaaggctccatcgcccctgaagacaaaggaagctgctcattgctgcctgggcctccatt

SEQ ID NO: 507349 - DNA, 90 bp, Homo sapiens
cagattcgcagtggtcgcttcttctccttgccgattcgaagacagtctcttacacctcctcctcagaacactattacatgggaagaatat

SEQ ID NO: 507350 - DNA, 75 bp, Homo sapiens
ccagttccgagccagccgagacctgccgtgggaccccagagattcccatcaggtcaattcagtgaagatatgata

SEQ ID NO: 507351 - DNA, 50 bp, Homo sapiens
caggaagagacgctgaaggccaaggtccatctgggttgaaaggagaaaaa

SEQ ID NO: 507352 - DNA, 100 bp, Homo sapiens
aaagaagatgatacaaatgaatttgttagtgctgtgtgctggagggcactaccagatgggggctcaagggttcttgttgatgcacgagataagcttggca

SEQ ID NO: 507353 - DNA, 101 bp, Homo sapiens
tgtcttagcaaggctgtcatcacagctgtgtttgatgtggacaagaagaaagggttgactctgattgagctctgggaaggcctgacagtggatgacgtaca

SEQ ID NO: 507354 - DNA, 75 bp, Homo sapiens
attcaacccgtgtacgtgcctgtgcctaaatgggacttctcctcttgcatgcctgaatgcaatgcttcacacaaa

SEQ ID NO: 507355 - DNA, 90 bp, Homo sapiens
tgggagggcaacgagcacaacaggagctacgaggagttgaaaatgggaagcttcccttcatggccatgcttcggaacctgtgcaacctgc

SEQ ID NO: 507356 - DNA, 83 bp, Homo sapiens
cgccgccatccagccaccattccaagatcagccggcagtccattgatgcactcaaagactggttcagagatgaaatgcagaag

SEQ ID NO: 507357 - DNA, 89 bp, Homo sapiens
cgagtgacccgggtgccgaggagcgggaagagttgctggggtattgttgcagcatctggcagtgagactgaggatgaggacagcatgga

SEQ ID NO: 507358 - DNA, 100 bp, Homo sapiens
cagagactgctgaaaagctggcccgtgacctgaaggctgtcaagtatgtggagtgttctgcacttacacagggaggaaataatgctggccatacagttgt

SEQ ID NO: 507359 - DNA, 82 bp, Homo sapiens
gtgcaggcgctgcgccgcaacgccgagcgcaccgacatctgcctgctcaaaggtcaaaatgcagatcttcgtgaaaaccctt

SEQ ID NO: 507360 - DNA, 130 bp, Homo sapiens
tttttgtcttttggacttcagccatgtccatgatgcctaccctgtgaagatctctcaccatccaaaaaagatgatcacggacgtgcagctcgccatcttcgccaacatgctgggcgtgtcgctcttcttg

SEQ ID NO: 507361 - DNA, 83 bp, Homo sapiens
ggaagggaggagactcctgaccctcagaatgttggcaaacatgaattgactgggcataaagtagctgtgaagatactcaatcg

SEQ ID NO: 507362 - DNA, 100 bp, Homo sapiens
ccaaggtagaaagcacgggacactggctggtggaagatcatgttcgaatatgggaagttttaaagacagaggaggagtttggatcataatacaagagaag

SEQ ID NO: 507363 - DNA, 83 bp, Homo sapiens
attgccttattggaaaaacatttcttacaaactatgttccaacttcctgtcaacaatcttggcagtttaagaaaagcccggaa

SEQ ID NO: 507364 - DNA, 75 bp, Homo sapiens
ttccaaagaatgccacagaatcaggggaggcatgcttcaggttcgagaacttgtcttggacaattgcaaatcaaa

SEQ ID NO: 507365 - DNA, 82 bp, Homo sapiens
ctcgggacggggcgccgcggccgggcgggcagcagtgtagtcgccgccgccagccgccatgggcaaacagaacagcaagctg

SEQ ID NO: 507366 - DNA, 98 bp, Homo sapiens
aaaattcttaagagtaatgctgaaactgcaactgacctggtggtcttagacaggaaaaatgccagctgtgggacaaggagtgcaggccgcacaacctc

SEQ ID NO: 507367 - DNA, 75 bp, Homo sapiens
gcttgcaggatctctcctggacaaatcaatcaggctgccgcgggcggacacgccagaggaggaggccggggaatg

SEQ ID NO: 507368 - DNA, 75 bp, Homo sapiens
cgaaatgaagaggaggaagaggccatttacttctctgctgaaaagcaatggacttggatgttgtgggtgatggta

SEQ ID NO: 507369 - DNA, 100 bp, Homo sapiens
gaagggtccaggcctgcgatgatgacaccaatgggaatcccaatggggaagtcgatgctggtgcttctcaccttcttggccttcgcctcgtgctgcattg

SEQ ID NO: 507370 - DNA, 75 bp, Homo sapiens
tatcggaacccctccttgaagctgatggtgaatgtgtgcggacacactctggatttatcaaagatgttcatgaag

SEQ ID NO: 507371 - DNA, 83 bp, Homo sapiens
gttttctgccggctgtaaagtcatcacctcctgggatcagatgtgcattgagattgagatggccatcctgcggttcccttacg

SEQ ID NO: 507372 - DNA, 100 bp, Homo sapiens
ttggaaaacggagagactggggagaagtcgggtcggcagcggttctggtcggaacctgtgggtcagcgggctgtcctccacaacacgcgctacggatctc

SEQ ID NO: 507373 - DNA, 88 bp, Homo sapiens
ttgatggtctcaatgttgccaaaatgtttcctaaagttcgtgaatctcaactttactgtaagattgatgttaaaggcatggtgttcac

SEQ ID NO: 507374 - DNA, 100 bp, Homo sapiens
atgtgccgggcggggggcccgggttcgccgagccgcaggagagacacgctgggccgaccccagagcggcgctggacagaatcaaccttgtcctatgttag

SEQ ID NO: 507375 - DNA, 75 bp, Homo sapiens
ctgtgaagcctttaaagcagaagcaaattacaccttggaagagcttaaggaaatagataaaggcatgtggaagaa

SEQ ID NO: 507376 - DNA, 100 bp, Homo sapiens
cttacccaaagaaatagtaacaccaatgtcatggatggagtttcactgtgtcacccaggctggagtgcagtggcacgatctcagctcaatgcaacctctg

SEQ ID NO: 507377 - DNA, 98 bp, Homo sapiens
aagagactagaactcagcacctataccaaagcaatgagaatagtagctcttctagtatctgcaaagacaatgcaggtcttgggcgtctttggtactgg

SEQ ID NO: 507378 - DNA, 100 bp, Homo sapiens
gaaatcttggagaagggtctaaagggcttccgttacaagatgaggtctgtgtatgctcacttccccatcaacgttgttatccaggagaatgggtctcttg

SEQ ID NO: 507379 - DNA, 74 bp, Homo sapiens
ttagctacatcaagtgatgaaaaacacccacctgaaaatatcattgatggctgcctgtgtcagggaatctgctt

SEQ ID NO: 507380 - DNA, 90 bp, Homo sapiens
ctcaggagggaattcagcctcagtgatgtccatgagctccaggccatgcccgcagccggaggtgtgctctaccagccctcgggaccagcc

SEQ ID NO: 507381 - DNA, 111 bp, Homo sapiens
gaacttccagtcactgcataacattggcagtgtggtgcagcacagtgagggggcacaagatgctggtcttggggtgtcaattttactgtgtgtcagagctcttcaactcag

SEQ ID NO: 507382 - DNA, 76 bp, Homo sapiens
ggaaaggccaacatcagcagaactattaaggattgcaagactggaggaagataaagaagaactacgtaaccagctg

SEQ ID NO: 507383 - DNA, 80 bp, Homo sapiens
attctttacagctcaccggatgtaaaagaactctggctagagaccctccaaggtatccggctgctttgatgaacctggga

SEQ ID NO: 507384 - DNA, 100 bp, Homo sapiens
agctgtggcaaccggaatgagacgccctcagaccccgtcatcattgacagaatagcctaacatggcagaccagagacagcgctcactgtctacctctggg

SEQ ID NO: 507385 - DNA, 75 bp, Homo sapiens
gcgaatcaagcgggagttcaaggaggtgctgaagagcgaggagacccaacatgagtgaagtttcctgcaagaaac

SEQ ID NO: 507386 - DNA, 100 bp, Homo sapiens
ggaacagaaccaaaggctattggatcagctcagcaggttttagaaagagcgttttcgctacgtaaagcacattcgataaaggatatggaaaatactttgc

SEQ ID NO: 507387 - DNA, 100 bp, Homo sapiens
gcagtttccatttcctccaaactacggctgtaggttccatgaggacaggccttgagtctgtcctggtctctggaatcacggtgtctagtagaggccagca

SEQ ID NO: 507388 - DNA, 100 bp, Homo sapiens
tggagttcacgactctgagtgctgaaaacctcggatcaattctcagctggtggcacaacaagtggcacaacagtatgccaccccaccaccccctaaaaag

SEQ ID NO: 507389 - DNA, 100 bp, Homo sapiens
gggcgacggcccagtgcagggcatcatcaatttcgagcagaaggaacgagttgaagcagttaatatggctgaaggaatcattcacgacacagaaaccaag

SEQ ID NO: 507390 - DNA, 76 bp, Homo sapiens
gggcactgaagggggactacaggttcgagagtcctttcccataacctgtgcacggtgctgaaggttcctcatgacc

SEQ ID NO: 507391 - DNA, 90 bp, Homo sapiens
gaagtcttcattcataaggataaaggatttggctttatccgcttgaagctggattatatcacatacctgtccatctttgaccaattattt

SEQ ID NO: 507392 - DNA, 74 bp, Homo sapiens
tcgcggagaaaaggctgacatgcccgtcctatatgacaggtttgaagactgcttcattctgcctctagtaccag

SEQ ID NO: 507393 - DNA, 80 bp, Homo sapiens
ccccacggccgctgggggctgggcgcgcacaacttctgccggaattcctcctgatcagcagagactgatctttgctggca

SEQ ID NO: 507394 - DNA, 75 bp, Homo sapiens
cccacccaatggagatggctctaatgcaggggaaatgctgtctgtagctgagcacttcctggagcagcagatgca

SEQ ID NO: 507395 - DNA, 75 bp, Homo sapiens
ggaagatcctggaggtggatctgaagaacggaatgtactcaagactgatcttctaagttcactggaaatgatttt

SEQ ID NO: 507396 - DNA, 51 bp, Homo sapiens
agtgctacccggtgtactggaaccgccaagaagcttgagagaagaaaaatt

SEQ ID NO: 507397 - DNA, 82 bp, Homo sapiens
cctaagagctgggcaccaggaagcgaaggctggtgagaagccctaccactgcaactgggacggctgcggctggaagtttgcg

SEQ ID NO: 507398 - DNA, 100 bp, Homo sapiens
ccatctggcgcttgctgttctccatgatcctctttgtcatcatggttctctggcgaccatctgcaaacaaccagagggaagatggctttatgctttattg

SEQ ID NO: 507399 - DNA, 74 bp, Homo sapiens
caagaacaagggccgcgatgtggaagcaccagaatttcctgagtttgccactaaagtccaggaagctatcaatt

SEQ ID NO: 507400 - DNA, 75 bp, Homo sapiens
aagttatgcttgttggaattggtgacaaaatcagaggcatactttatagaagtcaaggcacacagagagcgagaa

SEQ ID NO: 507401 - DNA, 89 bp, Homo sapiens
gagcgcccctgagcgccggcagcggccgcggtgggttcttcagattgagaaaatcatgagttctattggagaagggattgacttttctc

SEQ ID NO: 507402 - DNA, 125 bp, Homo sapiens
ggagaccatggagaccctcacggagctgggcgacgagctgaccctgggagacatcgacgtgtggacgaatgtggaacctcgctctgtggctgtgttcccttggcactccttagtccccttcctgg

SEQ ID NO: 507403 - DNA, 83 bp, Homo sapiens
ccggggacgagcccgcctccagctccaggccggtccgctgccaggttgaaatcacaaagattagacacctttttagataggtg

SEQ ID NO: 507404 - DNA, 82 bp, Homo sapiens
gtctccaggcccgcgaccgtccgccagtcgtcccgaggtgacttaagagattaaaattaatttggttgctgttggttctgaa

SEQ ID NO: 507405 - DNA, 88 bp, Homo sapiens
tctcagctccatgagctccatgaaacccactctgtcgcacaggcagcaaatatgaagtctatggaccctgcctcaggttattcaaata

SEQ ID NO: 507406 - DNA, 141 bp, Homo sapiens
gatttaaaaagcagccggggcctccgtattgaatgaaagacccagtgcaaagacatcaccatgaacactagcacagtagccatcctaatggatatgggttggttcctgttttctatttggaactttaaaaaaaattaaagc

SEQ ID NO: 507407 - DNA, 48 bp, Homo sapiens
accaaggggcagacccaaaaaactggattttgtgaaaatggaaaatta

SEQ ID NO: 507408 - DNA, 100 bp, Homo sapiens
ctggagcagaaactgagctggaccactggagcctcggtgaggggttcgaccttgaaactacaagagtgaatctgaaagttagttcaaaaagtcaaacggg

SEQ ID NO: 507409 - DNA, 87 bp, Homo sapiens
aataccgtgccctgaggttggacgtggggaatttctcctggggctcagagtggaagtaccactgcccagtgctgtttaccgtgttca

SEQ ID NO: 507410 - DNA, 90 bp, Homo sapiens
ggaagaggaagtacaggccatgcagagctttaattctacccagcaaaatgaaactgagcctaatcagcatactatactggcaattgctgg

SEQ ID NO: 507411 - DNA, 83 bp, Homo sapiens
aacccaccagaaggaaccaattccggacacataacaagcagcagtgaggacaccaaaggagtgtggccatctggggccgtgtg

SEQ ID NO: 507412 - DNA, 100 bp, Homo sapiens
tatagtagagatggaaacctcatagcagctgcctgccagaatggaagcatacagatctgggaccgaaatttgactatctcccttgagtttagaaatctgg

SEQ ID NO: 507413 - DNA, 51 bp, Homo sapiens
ccccaaagagcaagaagtacttcttgctgcaagagaaatagtgtggttaga

SEQ ID NO: 507414 - DNA, 113 bp, Homo sapiens
cggcgctctggctctggctgtgcgcgctggcgctgagcctgcagccggccctgccggagaactacgatgacccgcacaaaacccctgcctccccagttgtccacatcaggggc

SEQ ID NO: 507415 - DNA, 98 bp, Homo sapiens
tcacaggtccagggcagaggaccaacatgggcattttgtttatgagcaaggtgatcccaaaacgaaccaacagaccaggcatcagcacaacagaccgg

SEQ ID NO: 507416 - DNA, 90 bp, Homo sapiens
tcgctatacccgatcgcggttttaatcgacgagctccgcaatgaagacgtgcaggtgacagagctgaatgaacctctctccaatgaagat

SEQ ID NO: 507417 - DNA, 83 bp, Homo sapiens
gagaccttacctgtcaccttggctctcccacccaatggagatggctctaatgtttggtgccctggttgtcagatgttggaaag

SEQ ID NO: 507418 - DNA, 51 bp, Homo sapiens
cagatggcagccagtcagtggtggaggatccacctctgatgttcactgaag

SEQ ID NO: 507419 - DNA, 94 bp, Homo sapiens
cccatcacctacccgcagggcctggcactggccaaggagattgggggggccctcagcctcttggccttgaacgggctgttcatcttgattcaca

SEQ ID NO: 507420 - DNA, 100 bp, Homo sapiens
cgctggccgagagccgcggctccgtgtttctggaaagtgacagcagcaacatgtcatggtttagtggcctcctggtccctaaagtggatgaacggaaaac

SEQ ID NO: 507421 - DNA, 82 bp, Homo sapiens
taggacggggaacgacaattacgattaaagaaaccttctaccctgatattccaaatccagaaaactgtaaagcattacagtt

SEQ ID NO: 507422 - DNA, 110 bp, Homo sapiens
ccccacctccggccactgggacggcggcgcggagaaggcagagccccagtttgagggacagcgggatatccaccatgctgctgtgagactcgggcagttgtgactggttt

SEQ ID NO: 507423 - DNA, 82 bp, Homo sapiens
ttcagccgcgctgccgagaagctttacctcgctgaccctatgaaggcgggagacactatattcaatcgtgctaagctcctca

SEQ ID NO: 507424 - DNA, 100 bp, Homo sapiens
ctggcggccaacgggccaggtaggatttccgggagaggctgctgtggaggctgaggaggcggcggcggagatctgggaggaagttaagtcttcagagcct

SEQ ID NO: 507425 - DNA, 98 bp, Homo sapiens
tggatcccaaagacaattggtcaaaagatgcaaatgctacaagagactgtgaaaaggaagttggaaggagctcgatcaccacttaatggagaccagca

SEQ ID NO: 507426 - DNA, 87 bp, Homo sapiens
ggagaattcctggggcgcaccgccaagagctgggatctgactgcagccatgagcagcaatgagtgcttcaagtgtggacgatctggc

SEQ ID NO: 507427 - DNA, 75 bp, Homo sapiens
ttattcttttcagaatagaaaacactctgaaaagatggctaaattaggtccacctcattcatttaaccgagatga

SEQ ID NO: 507428 - DNA, 98 bp, Homo sapiens
catcagagttttctaaaatgcaagaagatctgtgtcatattgcccataaaggcatgctggaagatggactgccctccaatggtgtgccccgatctaca

SEQ ID NO: 507429 - DNA, 100 bp, Homo sapiens
gctggctctttggcggctcggaggagcggctgctgctgctgctgctgctgctggtggcccctttgcaggaaattcagttcatgaagataagaagtttctt

SEQ ID NO: 507430 - DNA, 98 bp, Homo sapiens
gttgctcgggtgattggtttactggcttcgcacaaaactgatctccaggaaaatacacctgttgttgagctctgaccttcggcaagttacttatgttc

SEQ ID NO: 507431 - DNA, 99 bp, Homo sapiens
atatgaaggactcattgatgaaatttatggcattcagaacacctactcatgaaggttacttctcttgtttggatatctggacgctgtttttggactatc

SEQ ID NO: 507432 - DNA, 80 bp, Homo sapiens
cactttcctcggcaagaaatgtgtgtgtttaactgctgaagagatcttttcccttcatggcttttcaaatgctacccaaa

SEQ ID NO: 507433 - DNA, 75 bp, Homo sapiens
cctgggttacaagcagcaagtgcgcggttggggccactgcgaggccgttttagctcaaagtctccactgcctcct

SEQ ID NO: 507434 - DNA, 75 bp, Homo sapiens
cgacgtcgtgatccagaagtccagagctgaggactgcctgtttgcagcattggacacatttccaccatgctaatg

SEQ ID NO: 507435 - DNA, 83 bp, Homo sapiens
cttacagacgctgccagcatcgccgccgccagcttccccgggcgctgcctggacaggcctgcctgcgtgctgggacatgtctg

SEQ ID NO: 507436 - DNA, 85 bp, Homo sapiens
cctgagcaagcggccgcgcactgaggaggcggcggccgacggtggcggcgggatgcaggagagaagaccaagaggtcggagaaga

SEQ ID NO: 507437 - DNA, 90 bp, Homo sapiens
ctttggatgtagcaaggaagaaattgttcagttcttctcagctgtgttccagatcatctccctggtaatttaccccgtgaagtacaccca

SEQ ID NO: 507438 - DNA, 51 bp, Homo sapiens
gataatgcctttatgttacttactcagtttgaaaatctgaacacagttgct

SEQ ID NO: 507439 - DNA, 82 bp, Homo sapiens
gtggaacgaggacgcggactgcgaaggcagggaggagattggacaggctggactccccattgcttttctaaaaatcttggaa

SEQ ID NO: 507440 - DNA, 83 bp, Homo sapiens
aaaggaaccactcattcacttctagacgacaaaatgcaaaaaaggaggccaaagactttgctgtggatgagatgaacggaaag

SEQ ID NO: 507441 - DNA, 100 bp, Homo sapiens
aaaagtaactggaaagtcacagaccgttctggcaagtggagttgatgagaaacagtgccggtggtggtgtgcacattgagccccggtatagacagttccc

SEQ ID NO: 507442 - DNA, 82 bp, Homo sapiens
cgagcacagagcctcgcctttgccgatccgccgcccgtccacacccgccgccaggctcttgtcaggatggtgaagctgttca

SEQ ID NO: 507443 - DNA, 76 bp, Homo sapiens
agttaaaaaactagatccaggttggaatcctcagggtaagatgatggcatgcaaacactgcagtgacattttcagc

SEQ ID NO: 507444 - DNA, 75 bp, Homo sapiens
gagactataaccacggtgtgctgaagataaccatctgtgtcatcattgtcatctacctgtccgtggtgggtgccc

SEQ ID NO: 507445 - DNA, 74 bp, Homo sapiens
aggaattctggtgctgattaacgatgccgactgggagctactgacaatgcagatcttcgtgaagactctgactg

SEQ ID NO: 507446 - DNA, 96 bp, Homo sapiens
agtccacgttgggcatgttgttcgctttggaggcagcacccggctctttatcctgcagttccaggaaggatgttacctttgacgatgacagtgtta

SEQ ID NO: 507447 - DNA, 100 bp, Homo sapiens
ccccagcagcccccgaaggccctatcaggacatggagtatgaaagacgatctttgtagaatttgatggctgtaactggaagcaacactcctgggtaaaag

SEQ ID NO: 507448 - DNA, 90 bp, Homo sapiens
ctgtatgtgaaaggggagctggtgggaggattggatattgtgaagcttattctaccagattccatgaaagtattgccagtgtacatgaat

SEQ ID NO: 507449 - DNA, 100 bp, Homo sapiens
tgcaaaacgggcggcccgcgcggaggctcgcgagatccgcatgaaggagctggagcggcagcagaaggagacatttatgcagtgtgtgattctttctaaa

SEQ ID NO: 507450 - DNA, 100 bp, Homo sapiens
ggaggaacaaaatttgtctgcaaacctggagccagaaacattaccgtcatattccacccattactaaggtggagataagtaattaacatttcgaaacagg

SEQ ID NO: 507451 - DNA, 82 bp, Homo sapiens
agatggtggctgagctgtgggctcacgaccccgaccccggcccggggccaagacaatgcaaactccagtgaacattcccgtg

SEQ ID NO: 507452 - DNA, 83 bp, Homo sapiens
acgggagagcgcacaccgcgccccgagaaccaatcagcagccgcgttaggtttcacagatggcagtgttacattgaacaaagg

SEQ ID NO: 507453 - DNA, 75 bp, Homo sapiens
ctggagaggatggctactatttcaccaatctgatttggagcaagaggtggtggtggccttcccccgaagaaattt

SEQ ID NO: 507454 - DNA, 98 bp, Homo sapiens
ccgccgcggtggcagtcagcagccggcagcagcagcgggctgaggccgcggaaggagcagggcacatacgccctgtccctcatctatgggaagacggt

SEQ ID NO: 507455 - DNA, 75 bp, Homo sapiens
cgaagctcagttgctacgacttcaggcccagctgtgagatacagtaagttcaagatgtcagaggccaggccgccc

SEQ ID NO: 507456 - DNA, 100 bp, Homo sapiens
gaggaggagatccgtatcagatccgccgacgactgcaagcagtttcgggaggagttcaacacaggtgcagttcaggagcagatgagatccaagggaaacc

SEQ ID NO: 507457 - DNA, 106 bp, Homo sapiens
ctcctgaggaggacccagagcaggacagcggcccggaggacctgcctctcgtcaggtgaaatgacaatggatgctctgttggctcgattgaaacttctgaatccag

SEQ ID NO: 507458 - DNA, 75 bp, Homo sapiens
attgcggcccctgtcgattccgcggcttcgagtgacttctgacagctctctccatggaaggaggcggcggccgcg

SEQ ID NO: 507459 - DNA, 75 bp, Homo sapiens
ggcccgcgggggagccccgggagccgcacggagggtgtgaagacagagaatgaccacatcaacctgaaggtggcc

SEQ ID NO: 507460 - DNA, 101 bp, Homo sapiens
ggaaaagttctgaagactaaagatggtctgtgtacactgggctcagtaagttgttatgttgctggaattgaactactccaccagaaactagagctccctga

SEQ ID NO: 507461 - DNA, 99 bp, Homo sapiens
cggggaggcagcgcgggatcccagcctcaggcgtgcgcggacggtgtgcgggcgtccgacctccgatcatgaacgggcccctgcacccgcggcccctgg

SEQ ID NO: 507462 - DNA, 75 bp, Homo sapiens
cagaactgcacactcagtccctctgtgctccaggactccctcaataatcaagggcaagtattttgtaaccttccc

SEQ ID NO: 507463 - DNA, 78 bp, Homo sapiens
ggcgagcgcccggattggggatgagtatgcggaggacagctctgatgaggagaggtccagttccggccgtaccgcaca

SEQ ID NO: 507464 - DNA, 98 bp, Homo sapiens
ccagaattggacccgaaaccatgcctcactgtcctaggcaagaaatccagatggagacgtgagcccctggtgctatgtggcagagcacgaggatggtg

SEQ ID NO: 507465 - DNA, 75 bp, Homo sapiens
agaggtccgtctaatgaagaacaggaaactaaatatattttgccaactttggaaaaagaattattcttggcagag

SEQ ID NO: 507466 - DNA, 51 bp, Homo sapiens
ttctaaacctttatcttctaagaaaattttccgcagatttccagtggcccc

SEQ ID NO: 507467 - DNA, 83 bp, Homo sapiens
ggtggtgctgttttctgccggctgtaaagtcatcacctcctgggatcagatgtgcattgaggggactcctctccaggtttctc

SEQ ID NO: 507468 - DNA, 100 bp, Homo sapiens
atggaccccaggaatggttacatggagccccactaccacggtctggaaaatcccgaagcagaagcccgtattcatctaggcattcaagatctcgtagcag

SEQ ID NO: 507469 - DNA, 75 bp, Homo sapiens
aagattcatacgcagctggcagatattatcatagttgctgcagccttccttgaatccagaagctggcaaacagca

SEQ ID NO: 507470 - DNA, 78 bp, Homo sapiens
cgcgttgctgcgttgtgaggggtgtcagctcagcctccagggtcgtatagacctccccctcctatgggcaaaccacca

SEQ ID NO: 507471 - DNA, 75 bp, Homo sapiens
gacccgatgcggttagagccgcggagcctggaagagccccgagcgaggcgtctaaactggatccagtgggcttcc

SEQ ID NO: 507472 - DNA, 74 bp, Homo sapiens
taccccgacttggcggaggtggtgggctaccaggtgtttcagtcacctccagtaacacgggcgtgccagatatc

SEQ ID NO: 507473 - DNA, 75 bp, Homo sapiens
ggtttgcgagcaggttctcggagggaccgggatagaaatcttcccaaacatctggcacaaatgaacagtcttcag

SEQ ID NO: 507474 - DNA, 83 bp, Homo sapiens
gctcgcagcgtgccacctcgcctcccgccgctaccgagatgatccagatcctgatgatggatttaactataaacagatgatgg

SEQ ID NO: 507475 - DNA, 97 bp, Homo sapiens
tctgattgaattttttgacagaaaagctgtggatcggtccgtttcatcaagtctgtcagatgcaagagatgccttagtgaatgctgtagtggactca

SEQ ID NO: 507476 - DNA, 102 bp, Homo sapiens
gccactgcaccgacttcatctggaaacttggatttaactggccagaagcaggtattcaaagcagagaacaatccctgggtgacccccattgcagaccagttc

SEQ ID NO: 507477 - DNA, 100 bp, Homo sapiens
gaccaagttcatgctgtgtgctggacgctggacagggggcaaaagcacctgctcggtgcccgagatcgtgagcgtcctgcgctccaagcttcaggaggcc

SEQ ID NO: 507478 - DNA, 75 bp, Homo sapiens
aaggggcctgtgtacttgctgtagatgaaaatggaagttaaatgaagttcgaaagagattgaatgagctaagaga

SEQ ID NO: 507479 - DNA, 100 bp, Homo sapiens
atctacctccatcaggaccccagatgtctgacagccctgtgtgacaccaagataagtaacgcttagagacacagtgaaggccctgactcgggaacaagag

SEQ ID NO: 507480 - DNA, 85 bp, Homo sapiens
gccttctactccatcgtgggactcagcagccttggtgctcaggtgccagatgcaaagctgttcatcaaagaaaaagggttctttt

SEQ ID NO: 507481 - DNA, 83 bp, Homo sapiens
cctggcatcatttattctccgtactgatcactacatcatgaacactctgctccagccaaggtggtgagggcagctgttcctaa

SEQ ID NO: 507482 - DNA, 100 bp, Homo sapiens
gacctaaccgccgaatgcgttcggaggtactccaaagattcaggtttactcacgtcatccagcagagaatggaaagtcaaatttcctgaattgctatgtg

SEQ ID NO: 507483 - DNA, 75 bp, Homo sapiens
tgagcggcggcgaacatgcgcttttgacacattggagatgaacgggaccgggttcagaagaaaacgttcaccaag

SEQ ID NO: 507484 - DNA, 101 bp, Homo sapiens
atgtgtaaccaatatttccttggcaaatataattagacaactaagtagcctaaatctcttcatgccgctgtaagctcggaggccaaggatgcggagtaggc

SEQ ID NO: 507485 - DNA, 74 bp, Homo sapiens
agtatgctgcatgaaaggcgcatcgtgattatctcgagcaaattaagcactgtcatgcaagacaagataatctg

SEQ ID NO: 507486 - DNA, 98 bp, Homo sapiens
aacagtgtgtaccattccgacgttacaatggtggagttggcaggtgtgcgcagccatcaggagttggtatcctctttgcagattctggtggaactgga

SEQ ID NO: 507487 - DNA, 82 bp, Homo sapiens
gggccggcctctacctgcagcagatgccctatccgtgctatgtggacgacgttgtcaacagcatctccaccctggagcctgt

SEQ ID NO: 507488 - DNA, 80 bp, Homo sapiens
agagttcaataacctgttggccttgggcacagaccggaagctggatgactttggtgccctggttgtcagatgttggaaag

SEQ ID NO: 507489 - DNA, 87 bp, Homo sapiens
aaagacgacaagaaaaagaaggaagctgctcaaaagaaggttcaaaccttgtactactcagctgatcacaagctgcttgatgggaac

SEQ ID NO: 507490 - DNA, 75 bp, Homo sapiens
catccagtccggtgccatctgaagcccccttcccagagtgccattaaggggaaattacaagaattaggagcttat

SEQ ID NO: 507491 - DNA, 94 bp, Homo sapiens
agaacatcctggaccccaggctgctgatcgccttccagaacagatggggacccagagcctgctcttgggaacagccagagtaagattggaaccc

SEQ ID NO: 507492 - DNA, 101 bp, Homo sapiens
tgtgttgttgaggctgaggactgactggggttctgagactccctgtcccggaccgcagatttatcagcaagactgttgaacgcataactgcccaagatgcc

SEQ ID NO: 507493 - DNA, 90 bp, Homo sapiens
tcactctgagtacggtctcacagacaacgttgagaggcggccttagcaacatgctgttccagtgctccctacctgacaccacagccaccc

SEQ ID NO: 507494 - DNA, 100 bp, Homo sapiens
acagaacagcacgtaccagaggtggaagtccaagtcaaacgcagaaggactgcctcactgagcaaccaagaataaaataccatgaggagtttgagaagag

SEQ ID NO: 507495 - DNA, 83 bp, Homo sapiens
tcttgggacccaccgctgccctcagctccgagtccagggcgaggaagctcttcgtgggcggtcttgactggagcacgacccaa

SEQ ID NO: 507496 - DNA, 75 bp, Homo sapiens
caaggaaaactcaggaccatgatggctcagtttcccacagctatgaatggagttttgagagcaaaatgacaacac

SEQ ID NO: 507497 - DNA, 100 bp, Homo sapiens
cagagaggcctgaaaatgtgacaggatcatgaatgtcaaagtggtattcatgggtagtttgaaatatccagatgagaatggatttgatgccttcctgaag

SEQ ID NO: 507498 - DNA, 82 bp, Homo sapiens
ctctcccatcttcaatggcaagaaggcactggaggccatcagcagagagagccccacagagcaggtgttgccaatgctgcgg

SEQ ID NO: 507499 - DNA, 100 bp, Homo sapiens
cgagcccggacggcgcctctcgaacgagtgtgggcgcgaggttgaatcgctcctagctgacccctcacgtctcttatgatacgtacagaaagcaagagca

SEQ ID NO: 507500 - DNA, 100 bp, Homo sapiens
acaggagaggagatccaagatcataggcaacaccgtgaaccccatctggcaggccgagacggtctggaaaatcccgaagcagaagcccgtattcatctag

SEQ ID NO: 507501 - DNA, 82 bp, Homo sapiens
gaggagaggcttgagcgtgagcacttctggaagatcattaatgccttccgctactacggttgtcactcagcccagtccatca

SEQ ID NO: 507502 - DNA, 102 bp, Homo sapiens
caactctggctgatcaaagaagagcagcccatgactataatgtaactgcaaactccaagctggtcattatcacggctggggcacgtcagcaagagggagaaa

SEQ ID NO: 507503 - DNA, 100 bp, Homo sapiens
gccgagcaggcggagcgctacgacgacatggcctccgctatgaaggcgatcaccgaagtggccttggagtacaacaactgtcatggggaccaggtggtgg

SEQ ID NO: 507504 - DNA, 100 bp, Homo sapiens
aaagacaggccagatctacgagctagagttgccatttcgctgggatttttgggtggtgcaaaggtgttggtgtctgtccagtcccttatattagtagctg

SEQ ID NO: 507505 - DNA, 50 bp, Homo sapiens
ctagatttccatgcccatggaagggtcaggagacaaacaaccagtcggcc

SEQ ID NO: 507506 - DNA, 82 bp, Homo sapiens
ccgcgggggaccgcccttcgccttcgttgagttcgaggacccgcggtgctttgcaagatatcaccttgtcacagcagacccc

SEQ ID NO: 507507 - DNA, 75 bp, Homo sapiens
gcgggatggaggcggcggccggctactatgtgggcatgtgccttgcggcttcagaaaagcggctccacgccctca

SEQ ID NO: 507508 - DNA, 82 bp, Homo sapiens
tgctcttttcgatccgggacggccggtcaggctcgccgccgagctggtgtcgtgaaaactacccctaaaagccaaaatggga

SEQ ID NO: 507509 - DNA, 100 bp, Homo sapiens
cggcctttctgctcctcgcggcccaggtactccaaagattcaggtttactcacgtcatccagcagagaatggaaagtcaaatttcctgaattgctatgtg

SEQ ID NO: 507510 - DNA, 88 bp, Homo sapiens
gtatgcttttatagacgacgtgatatttccaacacacttataatgctcgcagataagcatgctatcaggatggctaaaggtgacccca

SEQ ID NO: 507511 - DNA, 99 bp, Homo sapiens
ttctcctatgctgtggccagatccactagaaattaacccagaatcttagcctctcagtggcctatcgatggtgttatctgaaaaggttagtcagctgat

SEQ ID NO: 507512 - DNA, 75 bp, Homo sapiens
ggagagcaagccgggcggcctgccccgccggagcagcatcatcaagattgtgtcagcagctaaggtgtgtggagc

SEQ ID NO: 507513 - DNA, 96 bp, Homo sapiens
cgcgggcgcaggaaggcgagcagaggttactgaagctaaaggagatgtttaactccaagtttggatctattcccaagttttatgttcgagcaccag

SEQ ID NO: 507514 - DNA, 100 bp, Homo sapiens
gctagtttggatgtggaggggaatagactccatctatccatatgaggatttacattaaaaaggtacagaagtttcctgaatatagagttcctacagaccc

SEQ ID NO: 507515 - DNA, 51 bp, Homo sapiens
cacgcagcagggacagcagcagatgctgtgggccctgagggaaaggatcac

SEQ ID NO: 507516 - DNA, 100 bp, Homo sapiens
cgtgtaccaggaggtgaagcccaacccgctgcaggacgcgaacctctgctcacgcgtgttcttctgtggtcctttggcgtgctcctctgggagctgatga

SEQ ID NO: 507517 - DNA, 75 bp, Homo sapiens
ctactcctggcagtgcgtcaatcagagcgtcctgtgcgggcgaactttctgaccaagtatacaactacccagagg

SEQ ID NO: 507518 - DNA, 90 bp, Homo sapiens
ttgcaactggaaaacttctgcataccctggaaggcggggagacaaccccttccccaagaatgctgatgggactatatgctacgactccac

SEQ ID NO: 507519 - DNA, 95 bp, Homo sapiens
agaggcccaccctggagtaaccctcactggagaatccagagggcagctgcaatgactctccgcacggtattattgtcattgcaagcactattggc

SEQ ID NO: 507520 - DNA, 51 bp, Homo sapiens
cgcggacaccatgcagtcggatgatggatacaattggtgtcatgatcggaa

SEQ ID NO: 507521 - DNA, 49 bp, Homo sapiens
taaaacttcagatatgggatacgggttctccaaaaaatgtggaatcctt

SEQ ID NO: 507522 - DNA, 75 bp, Homo sapiens
tcaacttgctgggccggtgcaactattcgcagtccgagcgggttttggccaaattgggcgagggcacaaaataac

SEQ ID NO: 507523 - DNA, 75 bp, Homo sapiens
agaaggtatataccatcatgtacagttgctggcatgaggtccctgatgtcaaagaaatggaaaaaagcagcttta

SEQ ID NO: 507524 - DNA, 75 bp, Homo sapiens
cagaaagagtcaacagcagtggcaacagtggcagctctcgccgtcgggattactatgacagaggatatgatcggg

SEQ ID NO: 507525 - DNA, 99 bp, Homo sapiens
agaaatgtcttctagtactttaaatttagtggttgctggagcacctaaaagtcagattgtaacaacatgctgtaccccaaggaagacaaggagaaccgc

SEQ ID NO: 507526 - DNA, 51 bp, Homo sapiens
ctcccgagtagctgggattccagaaactatgttccaacttcctgtcaacaa

SEQ ID NO: 507527 - DNA, 80 bp, Homo sapiens
cagtctaaactacgaaatacaccttatcaggtcaaaatgcagatcttcgtgaaaacccttaccggcaagaccatcaccct

SEQ ID NO: 507528 - DNA, 100 bp, Homo sapiens
ctgcgctgcccgcgccccccgcccgtgccctcccgctcggccccgccagcagcactgtggaggccgtcctcggtccgctcacaaaaaaacgtgacgaggc

SEQ ID NO: 507529 - DNA, 83 bp, Homo sapiens
ctgggctgccggcacttcgcggcaggaagtactagccggacatcatgagtggctgtcgggtattcatcgggagactaaatcca

SEQ ID NO: 507530 - DNA, 50 bp, Homo sapiens
cccaaggctgtcagcctcccggcccagatcgtcagtatttaaacagatca

SEQ ID NO: 507531 - DNA, 50 bp, Homo sapiens
gtttgtcgtcgtcggggtcctgctgcagtttcgccgtgaggaagatgcgg

SEQ ID NO: 507532 - DNA, 82 bp, Homo sapiens
cccccgcgcctctcttcgcctcgcctcgggacccgcggtccccgctcttgctgctcaaactggaggattataaggatcgcct

SEQ ID NO: 507533 - DNA, 51 bp, Homo sapiens
gcggtgattctccaggccttgggtagggaagacatatgagctactcaactg

SEQ ID NO: 507534 - DNA, 127 bp, Homo sapiens
gcgacagcctggattataaggatgtcatccccatggctgatgcagcaggcatcatccgctatgcaattggggatgaccaactcttggatgatggcaagacactgggcgagtgtggcttcaccagtca

SEQ ID NO: 507535 - DNA, 83 bp, Homo sapiens
tcggggtgccagaaggaaagcatagcttcctgcctgacacagctcacttcaagaagtgcacaatgtcagaacgtggaattaag

SEQ ID NO: 507536 - DNA, 75 bp, Homo sapiens
agggagacgctgctgcagctccgggacacctggggccgccgaggcaaaggagaactacgatgacccgcacaaaac

SEQ ID NO: 507537 - DNA, 100 bp, Homo sapiens
tcctcaccctctgccgagtctcaatatctgtcttcggtggactccttcggcagtccacccaccgccgccgcctcccagcgggctgacgcacgaggcacac

SEQ ID NO: 507538 - DNA, 76 bp, Homo sapiens
gttccctacacggtctcctgggtcaaggccttggacaagattcgctatgagagcctgacagacccttcgaagttgg

SEQ ID NO: 507539 - DNA, 75 bp, Homo sapiens
aatggaagcatacagatctgggaccgaaatttgactattgggaaaatgaggtacgttagtgttcgcgattttaaa

SEQ ID NO: 507540 - DNA, 75 bp, Homo sapiens
ctttttagaattgcacttggaggacaaggtgtgactgaagaaatatcaaatgtttcctagtaagacagcaactca

SEQ ID NO: 507541 - DNA, 96 bp, Homo sapiens
cccaccactgccacaaacgccgcaccaggtcttgtagcagcgcctcctcgcatcaacttcaatcaggatgcgtccctcatctgcgtatccagcgac

SEQ ID NO: 507542 - DNA, 100 bp, Homo sapiens
gaagaccattcagatgggatctttccggatcaatccagatggcagccagtcagtggtggaggttgactatagtcaatggggccaatggagccaagtgtat

SEQ ID NO: 507543 - DNA, 75 bp, Homo sapiens
cgaaggtgctaccatcgtgagagtaagcggcctcccagccaacatccagctggacattgatggggaccgtgagac

SEQ ID NO: 507544 - DNA, 100 bp, Homo sapiens
cgcgctcccgggaccatgtccgcgctggcgggctttggaactgcgacataactagcgatggctgctgcgatctcacaaagcttctccaagaaaaatcaag

SEQ ID NO: 507545 - DNA, 82 bp, Homo sapiens
aggtttcccgcatccgatgtggactcagccactttgctgcactgaccaagagaactcgatgccaccgcaacggtattggcga

SEQ ID NO: 507546 - DNA, 100 bp, Homo sapiens
aactaggatgtcccgacatgaaggaactgtggctgcaccatctgtcttcatcttcccgccatctgatgagcagttgaaatctggaactgcctctgttgtg

SEQ ID NO: 507547 - DNA, 75 bp, Homo sapiens
cggaaacttaggggccacgtgagccacggccacggccgcatagtctctcatcacttttgtgaacaagcacctgaa

SEQ ID NO: 507548 - DNA, 90 bp, Homo sapiens
cgggagtaggagactcagaatcgaatctcttctccctccccttcttgctggaaatgcagaaatcacaaaatgaagcagtgtgtgaggggc

SEQ ID NO: 507549 - DNA, 50 bp, Homo sapiens
gaacagaaacacctaggaagggagaactgatcacttttctccagagaatg

SEQ ID NO: 507550 - DNA, 100 bp, Homo sapiens
gtctggagtgcgtgggggaccggctgttggcgggaactgtggctgcaccatctgtcttcatcttcccgccatctgatgagcagttgaaatctggaactgc

SEQ ID NO: 507551 - DNA, 87 bp, Homo sapiens
gggactcgcacgtggaggtggagcgcggacgcctccctcagccagggcaagactaaggagctggattttaggtgatgggcaagtcag

SEQ ID NO: 507552 - DNA, 100 bp, Homo sapiens
ctcgccttggatgccttttccagtgactccattccactctttgaagggcatttgaatatgaaattcgattttacactggaaatgaccctctggatgtttg

SEQ ID NO: 507553 - DNA, 101 bp, Homo sapiens
tcggtctgggcttctctgaggcggcgagagatggtcaggtctggagctcgaccgggccaggagtctccaagagcttttagattaccccggggaggatgtgg

SEQ ID NO: 507554 - DNA, 100 bp, Homo sapiens
caccgacgcgctcatctgctggagcccgctgagttgatggcttccggagaactggcatagctgcagaatatgagtagtgtcccaagaagagtgctttgcc

SEQ ID NO: 507555 - DNA, 80 bp, Homo sapiens
gagcagtctctgcccccgccggccggcctcaacagagtctcacaactcaagaaagaaacgggaaattactgaaaaacaga

SEQ ID NO: 507556 - DNA, 100 bp, Homo sapiens
caattctccaagtaaacaactggtggttttggaatgtatgcttaaaaaagacctcatttataataaggtcactccaacatttcaccactggaagattgat

SEQ ID NO: 507557 - DNA, 50 bp, Homo sapiens
tgcaggcacagttgccgattacagctattgacctgaaaagtggttctgga

SEQ ID NO: 507558 - DNA, 100 bp, Homo sapiens
ataattcaaaaacactatcccagggagtgcaagcttagagcgtctggccaagaatcagaggaagtggacaatgagttacaaggcactaatagttctggat

SEQ ID NO: 507559 - DNA, 82 bp, Homo sapiens
cgggagcgcgggccgcggccatgggcaccctgggcaaggcgagagaggctccgcggatttggcagagagaacggccgtgtga

SEQ ID NO: 507560 - DNA, 101 bp, Homo sapiens
gtgcctgcagtggccgaggagattcaggatgaagttgcatttaaatcaaacggtattgagatggattgggttatgaaacataatggtccaaatgacgctag

SEQ ID NO: 507561 - DNA, 75 bp, Homo sapiens
gggagacgcgctgccgaggagaacccagcggattttatcatgtgggcaacctgctgcaactggttctgcctggat

SEQ ID NO: 507562 - DNA, 87 bp, Homo sapiens
actccctttgttggagttttgcccacgcgttgtaattaagcctcgcacaatatgggatcgcttacacctgagacgaactacagaaca

SEQ ID NO: 507563 - DNA, 90 bp, Homo sapiens
cttatatagcaaaagatttgatgaaagtacttcagggagtcaacggtgaggtaaagtccatggttccctggcccgtgctggaaaagtgag

SEQ ID NO: 507564 - DNA, 96 bp, Homo sapiens
aggactgcctcactgagcaaccaagagaacacctgctgaaggaagggttggcgtggctggacttacaggccccaggggaggcccactactggctgc

SEQ ID NO: 507565 - DNA, 51 bp, Homo sapiens
cagcctccccagtagctgagactacaggctttgtagctgagcagtttctaa

SEQ ID NO: 507566 - DNA, 87 bp, Homo sapiens
ctttgggaatcaggataaggtgttcccccagtctgcagaaacactggcaacatttacaaagacaagtcattacgttttcatttctca

SEQ ID NO: 507567 - DNA, 88 bp, Homo sapiens
ggaatgaattggatgaacaaaatggaaatgggtcctgatgaatatgaagagatggaagaagaggaggaggaggaagaggaggaagacg

SEQ ID NO: 507568 - DNA, 55 bp, Homo sapiens
gagggctgtcaaaaatgctgttgatgatggctgtgtggttccaggtgctggtgcc

SEQ ID NO: 507569 - DNA, 75 bp, Homo sapiens
tgctgctgattctgctgcggggatgcacagatatggaatgtgcagatgtcccactattaactccaagcagcaaag

SEQ ID NO: 507570 - DNA, 75 bp, Homo sapiens
cgcgtctctctgctgcggcgcggggaccgctgtgctctcgtattaaaggtggaagaaggtccatatctttttctg

SEQ ID NO: 507571 - DNA, 74 bp, Homo sapiens
gaaaatctccccggtgactttcaggaatcttttgggtgagttgtgaggctggcacctacattcggacattatgt

SEQ ID NO: 507572 - DNA, 102 bp, Homo sapiens
ccgacaagaacttcacgcgggagcaggtgcatacaatggaataggattaatccgtgaaaaggaagaaattctgacacatgctccggcgtggaggaaccttga

SEQ ID NO: 507573 - DNA, 100 bp, Homo sapiens
gtccctggtctgggccatgtctggctgtgatgctcgggagggagactgttgttcccggagatgcggcgcgcagattgggcccaaatggaaggatgtggtg

SEQ ID NO: 507574 - DNA, 75 bp, Homo sapiens
gtacgatctgaaggaggggcttctggttagcccaggtgtcagctgtgatgcatgtttaaaaggaaattttcgagg

SEQ ID NO: 507575 - DNA, 75 bp, Homo sapiens
actccagcacccagagacgcatccgcgtgaccaccatcgcccgaaaatatgtgtcacaaagatgtctacacggaa

SEQ ID NO: 507576 - DNA, 75 bp, Homo sapiens
gtgccacaataaataggattacaccttcgtatttcaaccgaatggacagcaaattatggatgaacctatgggaga

SEQ ID NO: 507577 - DNA, 100 bp, Homo sapiens
aggctccctcctgctgtcaggctacatcagcaaagggaagtcctggagggtatttgggagccaaaaagaaaaagaagaaacagaagagaaaaaaggagaa

SEQ ID NO: 507578 - DNA, 95 bp, Homo sapiens
cggagcggagacgggagtattatgaaaagatctgccctgaggtacggctgaacatcatctctaacctggactgtgtgaacgaggtgattggcatc

SEQ ID NO: 507579 - DNA, 82 bp, Homo sapiens
tctatgccatcacagacaccgcctacaggagtatgatgcaagagcccaaatcttgtgacaaaactcacacatgcccaccgtg

SEQ ID NO: 507580 - DNA, 90 bp, Homo sapiens
aatccgcatctggggcacggaggatctattaatgagatgaagcggttggaagaaatgtcaaatatgtttcagagctctggagtccagcac

SEQ ID NO: 507581 - DNA, 126 bp, Homo sapiens
ctgagttttgctggaaggggacactccacggccaagagaaggagaggccctgctgctctggcccctcctcaggccgaatggatcagcttccccagaagaatctcctgcgactacaccctgctggct

SEQ ID NO: 507582 - DNA, 85 bp, Homo sapiens
agcagagcgagtacttcgttccaacatggacatcctgaagccaatcctggttctctaattgaacaactaacaacagaaaaatacg

SEQ ID NO: 507583 - DNA, 101 bp, Homo sapiens
taacctcctttgtagcgagggcacttgagaatttctgaacctcgagttgtaatggagctgtatggaaagatgaggacggggacttggttgccttttccagt

SEQ ID NO: 507584 - DNA, 74 bp, Homo sapiens
cgggagaaagtggagtccgagctgagatccatctgcaccacggtgctgagggctgtgctgaagtttgctgctgc

SEQ ID NO: 507585 - DNA, 100 bp, Homo sapiens
tctggcctctgaaacactaccactgctggcgctgaccttcatcacagacaacagcctggtggcagcgaattatatccagatcgagagacagaagattctg

SEQ ID NO: 507586 - DNA, 100 bp, Homo sapiens
gcaactcaaagccacgctggagaacatcaccaacctccggcccgtgggcgaggacttccggtggtacctgaagaccaaactagagtcagaacgaatacta

SEQ ID NO: 507587 - DNA, 132 bp, Homo sapiens
tgcgaggagaccgcgggtttccaccccggcgggagctgtcaggttggctccgcgtgactgcttagaaaactgcacagcatctgatgaaattagcgaataagaacatcaaccatgtcttacactccaggagtt

SEQ ID NO: 507588 - DNA, 75 bp, Homo sapiens
gctggaaccatcatatgcaccagcacgcctggctaagcaaactcaaatgctgagaaccccaagctgatatcagca

SEQ ID NO: 507589 - DNA, 100 bp, Homo sapiens
ccgttataactttcccaatctcaatatggatgtgcataaagtgcagccttcatattcatgcttcctacagcatctcccagaaactgaatgttccaatggc

SEQ ID NO: 507590 - DNA, 75 bp, Homo sapiens
acagagggtggagcttagtctctgggatacctcagtgtatcgcattaagttcaaggagagctttgctgagatgaa

SEQ ID NO: 507591 - DNA, 100 bp, Homo sapiens
ggcattgacatttaattttagggtcctttatatagaagggagagtaggatgtaatccctgttcattactacttaatacctccaccaacaaagactaagaa

SEQ ID NO: 507592 - DNA, 75 bp, Homo sapiens
ggcggggggaaaatggagcccttcaccaatggacttaaccaccaccatgtcgagcaaaagaacaaagaccaagac

SEQ ID NO: 507593 - DNA, 82 bp, Homo sapiens
ttgcacatttcaacagtcatgcaggaggaatgcaggctcaggttggaatgccaggaagtggaccagtgtccatggaacgggg

SEQ ID NO: 507594 - DNA, 50 bp, Homo sapiens
aggaaaacaacttcgagggcagacaccatatgaaggcggagtatggaaag

SEQ ID NO: 507595 - DNA, 100 bp, Homo sapiens
cctgggcctgggccagctggcctgctgctgcctgcaccgccgggccaaaaggaggcctcctatgacccaggatgctataaaatcaccacggtctttagcc

SEQ ID NO: 507596 - DNA, 98 bp, Homo sapiens
gagcgaacacctgccgcggtcctcccgccggcgctggaatgtggaggctgtggacccacgaggtcgaacattattgcatcttgctgtttccttgggac

SEQ ID NO: 507597 - DNA, 75 bp, Homo sapiens
gagacgctgctgcagctccgggacacctggggccgccgaggcaaaggtattgttgcagcatctggcagtgagact

SEQ ID NO: 507598 - DNA, 96 bp, Homo sapiens
ggagctaaagcagcgtgcgttcagccctgggtctgactaaagacatgactggaaaagaagatgtataccgaggcccggccatcagagctctctgca

SEQ ID NO: 507599 - DNA, 50 bp, Homo sapiens
agagaaggcactcaagtttatgaaataagcgggttttgaaaacaaaaaaa

SEQ ID NO: 507600 - DNA, 98 bp, Homo sapiens
atttctgtgcctggaaaatatctgttaacagactgcttttacacctacagccccccaggcatcatgagcgtcttggacgacgtgtgcgccaccatgca

SEQ ID NO: 507601 - DNA, 75 bp, Homo sapiens
gaaaaacagaacgttgcaaactctggaaaaaaacttggatccaagtattttagaacatgctcaagaggtgagcac

SEQ ID NO: 507602 - DNA, 75 bp, Homo sapiens
ctacccacctcttccttcagatcactattcagaagaatgtctcaatttaaaatggtgaattactcctatgatgaa

SEQ ID NO: 507603 - DNA, 98 bp, Homo sapiens
ttcagagcgtcacggcgtacgccctcatggggaaaatctccccggtgactttcaggtgcctctgagcctcggaacatgatctacatgagccgcttggg

SEQ ID NO: 507604 - DNA, 75 bp, Homo sapiens
atcatgctggccaagaagatcatcattaaggacggaggcacgaagttggtgagatggcaaagcagtatatagaga

SEQ ID NO: 507605 - DNA, 74 bp, Homo sapiens
cgttccgctgttctgggaacagccagggcttcagatatggagtttggacctccaacagttaatgataaactaat

SEQ ID NO: 507606 - DNA, 100 bp, Homo sapiens
ctgatacctgtcaagcagtatcccaagcttatcacacagactttcagccaccacaatcagctggcacagaagacccggcgggagaagagagcccggcagg

SEQ ID NO: 507607 - DNA, 100 bp, Homo sapiens
gggtggtgacagcaggtctgaggtgtcatggagaaactccagctgggcccagagattctgcagcgggaaaatccaaggcttatttatgccaggctgagtg

SEQ ID NO: 507608 - DNA, 100 bp, Homo sapiens
actgaacaccgcacaggcaggaggcatggccaagaacaagtttgccttctcctatgttttccagaaatgacttcagtatctggagcatcctcagaaaatg

SEQ ID NO: 507609 - DNA, 75 bp, Homo sapiens
ggaaggagggcgagcgaggaggatggcggagtcggggctcctgacggtctatgctccatcagcaagcactgccga

SEQ ID NO: 507610 - DNA, 97 bp, Homo sapiens
tgatcctttcatctcagcctcctcagtagctgagactacagcatgcagcagattggaataaatatgatgaccgattgatgaaagcagcagaaagggg

SEQ ID NO: 507611 - DNA, 100 bp, Homo sapiens
ccggtcgaaaaccgtgtatgagggattcatctcggctcagggaattcacaattgaaactgaagggaaaacatttcagttaacaaaagacatgatcaatgt

SEQ ID NO: 507612 - DNA, 50 bp, Homo sapiens
gaacactgtgggccaacttgcagaaggtgctgaggctttacagttctcta

SEQ ID NO: 507613 - DNA, 100 bp, Homo sapiens
acagtccaatgtcaacattgcccagcaagtggtgctggagaatctggtaaaagcaccattgtgaagcagatgaggatcctgcatgttaatgggtttaatg

SEQ ID NO: 507614 - DNA, 101 bp, Homo sapiens
aaacactccaacgattgagagcatttaaagatgtactaggttttgacaagcttgcatcatgcgtgagtataagctagtcgttcttggctcaggaggcgttg

SEQ ID NO: 507615 - DNA, 95 bp, Homo sapiens
ggatggcgtggagatatggcgcaactgcggcgcatctggaatcaatgtgtgagaccaaaatattatctctaaagaagagacatttcagtcaagta

SEQ ID NO: 507616 - DNA, 74 bp, Homo sapiens
acacaaccgtctccagccttggtctgagtggactgtcctgcaggaaattaaggatgcagacactcagggcgtgt

SEQ ID NO: 507617 - DNA, 98 bp, Homo sapiens
tgtggatcgctgtgatcgtcacttgtgagcatttgtcctgtgctttcacattctttctgcatggagaaagtaatgtatgcacaagtgtggagattgcc

SEQ ID NO: 507618 - DNA, 100 bp, Homo sapiens
gtgtggcaatcttctcggccatctgtgttggcgtgtttgcagatcgtgcttactgatgaccattctgccccccttggagaaactgcggctgctgctggag

SEQ ID NO: 507619 - DNA, 90 bp, Homo sapiens
gttgaaacatagggaactctttttgtcacgccagtatgaatctctgcccgcaacacatatcaggctccccacaggtgcaggaagccgccg

SEQ ID NO: 507620 - DNA, 96 bp, Homo sapiens
gagcgggacagcgcggcggggagcgacgagtatgatctcgtgaaaccttgagagaaactgaatgacgaatgaaactattgttcctgtttcacacag

SEQ ID NO: 507621 - DNA, 98 bp, Homo sapiens
gacaacgatgatgaggcctggtcggtggatgacataggcgagctgcaagtggagctccagcccttctctgagacggggaccaggggatggcagccatg

SEQ ID NO: 507622 - DNA, 50 bp, Homo sapiens
gctggtgttcgcccacgaccatggaacaagatcactcaaggtgaaggata

SEQ ID NO: 507623 - DNA, 76 bp, Homo sapiens
gtccttagagatccagaaacccgctggaggagacatcacagctttcccagatcgggaggaaaaatatggaatgtgt

SEQ ID NO: 507624 - DNA, 98 bp, Homo sapiens
gcagatgacaaaaaacttcagttctccttaaagaagttaggggtaaacaatatctctggtattgaagaggtgaatatgaccatctcccagaacaggcc

SEQ ID NO: 507625 - DNA, 74 bp, Homo sapiens
caccttaaggtgttaagtgtaaggatcttcatgatgaaatttctgtaaatggttaaaaataagaagttggttga

SEQ ID NO: 507626 - DNA, 100 bp, Homo sapiens
ggacaagatcccgtccatgaatcaggaaatccagttatcaaaattgactcaagaagagagaacctaacagaacaataacaatggaagaaattgggaacat

SEQ ID NO: 507627 - DNA, 100 bp, Homo sapiens
tcggccagagaacgtgaggaagaaccgctacaaagacgtgctgccttaggagaaggcagagcccccccaggctatgaatgccctgatgcggttgaaccag

SEQ ID NO: 507628 - DNA, 100 bp, Homo sapiens
atggatgacagcaaacgcaaggcgaagataggactgaggctttcagtgcatactggcaaccttggaaggcaggaatgtgaaacttttccctactacttag

SEQ ID NO: 507629 - DNA, 74 bp, Homo sapiens
tttagaaggaggttcaggctacggtgagccgaaggcagcacgctggctcttctcctgaacttcctcgcctgcct

SEQ ID NO: 507630 - DNA, 112 bp, Homo sapiens
cggacgcttccggtcttagctggacccgtctgggaggccaaggagcgggagctggaactgaagaacacctggtcagagaacaagctcagccgccgtcagacccaagccaaat

SEQ ID NO: 507631 - DNA, 144 bp, Homo sapiens
ttaaactggagaactactatgtccagcctatttgcacaccatccaggagtcagtttattactggaaagcagtcaagaaagtactgtaatttctcaacttcatggttacttgtcttgaattggaagtagaactgagactatgtag

SEQ ID NO: 507632 - DNA, 100 bp, Homo sapiens
ctgaccctaggcctccaccctggcaggaatcccaatttgcctccacttagtgagcggaagaatggtttcagccatgccacagagctccggcagtcatggg

SEQ ID NO: 507633 - DNA, 95 bp, Homo sapiens
ccgggatctctcagggaaggtcaacgtcactgaaacgagatttcaaggtctccgatgatgacctcgacccatcctttactgtctcaaccagcaaa

SEQ ID NO: 507634 - DNA, 75 bp, Homo sapiens
agatttggggggaattacctacaaagatgtaaggtaattttttctgcaggatgaattaagagaagagacacttgc

SEQ ID NO: 507635 - DNA, 95 bp, Homo sapiens
tgagaagtcagagatgcagcgtcactatgtgatggtaaggctggcctctctgcagtcagaggtctgagctctgccatggggataggggtgtcttt

SEQ ID NO: 507636 - DNA, 75 bp, Homo sapiens
gcctgaccttggaagttttgggacagttgtctacgataggtgatcttcagctttgcaaactggatgaactagatt

SEQ ID NO: 507637 - DNA, 100 bp, Homo sapiens
agaccattcagatgggatctttccggatcaatccagatggcagccagtcagtggtggagctaacaggcctcacctcttccattccggagatgatccttgg

SEQ ID NO: 507638 - DNA, 101 bp, Homo sapiens
ctcctcccagggccaggcgccgctcagaacggtatgtcctggatgatgaatacacaagctcagtaggctccaaatttccagtccggtggtccccaccggaa

SEQ ID NO: 507639 - DNA, 74 bp, Homo sapiens
gctggaaggaaccgctctcgcttcgtcctacacttgcgcaaatgtctccggtgattttacaacgagatgctgct

SEQ ID NO: 507640 - DNA, 100 bp, Homo sapiens
tgttggagtgcgttcggtgtgccgtgggtccgcgctgcttccacccaacttcctgttagagataattgacgaccttgccaacctagtggagaacacagat

SEQ ID NO: 507641 - DNA, 100 bp, Homo sapiens
actccagatatctacctaattgattgtcaccattactttaagtactgcaaaatctcagcattggctctgctgaagatggtgatgcatgccagatcgggag

SEQ ID NO: 507642 - DNA, 90 bp, Homo sapiens
tgcaaggggtaaatgagggtgttgatttctccaaggatctgctgaaagttgctattggcagaacagacattgaagacttagacctttatg

SEQ ID NO: 507643 - DNA, 51 bp, Homo sapiens
ctagcgtcctggaattacttcaatcaaagtttcacgcagagtttgaagagg

SEQ ID NO: 507644 - DNA, 100 bp, Homo sapiens
gtgcagccccctgcagacccgaagagctcacttctccaagtacctcttccacctcatcgtctgggaccagcaatgcagaggttgtggtaggaaccacaag

SEQ ID NO: 507645 - DNA, 50 bp, Homo sapiens
tggacagcggagcacgatgattgataggatgtacagttacccagcacgtg

SEQ ID NO: 507646 - DNA, 124 bp, Homo sapiens
aactccaaatcacacatctctgagcattctggggaaaagaaactacagtcatcacaatggtctggatgggattaaagcctgtggtttccacagaagcaccacctatcatatttgccacaccaac

SEQ ID NO: 507647 - DNA, 100 bp, Homo sapiens
agtggaggggtgaatcagtatgttgtgcaagaggtactgtccatcaaacatcttccaccacagcttagagggttattttggagctgttggagcactcctt

SEQ ID NO: 507648 - DNA, 100 bp, Homo sapiens
gaaggtggacgtgctggtgtctgagtggatggggacctgcctgctggatgaaggatactagccgcaagaacaacatgtttgcacagtttcggaaaaatga

SEQ ID NO: 507649 - DNA, 100 bp, Homo sapiens
agaggaaccacacgctgatcatggaaaaccaattctgtgtcctcggaggaccacagcccagttgggccccaggcgaaacccagcctggagcttgcaggca

SEQ ID NO: 507650 - DNA, 100 bp, Homo sapiens
ggccgtccagcagatggcggatgccctgcagtacctgcagaaggtctctggagacatcttcagcaggagcgctcgctccaagcactgcagcgcctgcaac

SEQ ID NO: 507651 - DNA, 104 bp, Homo sapiens
ctggacctcagctacccccgcacccacgcggccctgctgaaagtggcgcaaatgagtgctccaagctcccgaagccgaagtctcactttgctcccacatggaac

SEQ ID NO: 507652 - DNA, 76 bp, Homo sapiens
gacgatctgctcgagtcacccgctcctcagccaggctaagccagagttctcaaggcaggggaaatggaaggtgatg

SEQ ID NO: 507653 - DNA, 134 bp, Homo sapiens
gccaagatctacatttcaaccctgccttacacccagagcgtccagatctgccacatagaaggtggctgagcatcggagtggagttcgtggggaactgcgtggtgctctttgctgcactatttgccgtcatcggg

SEQ ID NO: 507654 - DNA, 100 bp, Homo sapiens
gtgtcagaacaatcttgaatcatgaagctactaaccagagccggctctttctcggaattgaatgatctggcacgggaccctccagcacagtgttcagcag

SEQ ID NO: 507655 - DNA, 83 bp, Homo sapiens
atgttaaccaaattcgagaccaagagcgcgcgggtcaaagaactcccccactggaaaggattctgaaagaaatgaagtcagcc

SEQ ID NO: 507656 - DNA, 74 bp, Homo sapiens
caaaaagtctcagatgagctcatgagtgaaaggttgtttacattcagagctctatcaataagaggaatacatat

SEQ ID NO: 507657 - DNA, 80 bp, Homo sapiens
ctgctcctggtggcacccagtggcctgtactactgagttgtctgctggttctcagcttgaagaagattctgcagtcctta

SEQ ID NO: 507658 - DNA, 50 bp, Homo sapiens
cctgtggctgggacaagctggtcaagattgtgttcacctattgaaaatta

SEQ ID NO: 507659 - DNA, 100 bp, Homo sapiens
agccgctcacgttctcctctggcccgcgagggcgccgggggcggggagcagctggtggaccagctcatccgcgacctgatccctgcatgtcactgagtcc

SEQ ID NO: 507660 - DNA, 100 bp, Homo sapiens
aattgcttggcaaagcatccagagaagctggctactgtcctttctggggcgtgtgatggagagctgattggcatccaggatgggtacctatcactgctcc

SEQ ID NO: 507661 - DNA, 89 bp, Homo sapiens
atgcggaaaatactacagagtgtgcacactggctatcattgatccagtggatatcaaagtattgcagagtgccttagcagccatccgac

SEQ ID NO: 507662 - DNA, 100 bp, Homo sapiens
aaggatctacatgaggaaatgaactacatcactgcaataattgaggagcagcccaaaaactatcaagtttgttttcggcacagttcagcatgttccagac

SEQ ID NO: 507663 - DNA, 100 bp, Homo sapiens
ctgccagaggtggaggggaggattttgaggacacttgtggagagctcgaattccagaatgatgaaattgtctggggtatggccgtcaatgtgtactccac

SEQ ID NO: 507664 - DNA, 103 bp, Homo sapiens
gggatctggcctttgagaaggggatcaaaactccagaaataaagacgagaatccaggacttgaatcgtatcttcccactttctgaggactactctggatcagg

SEQ ID NO: 507665 - DNA, 90 bp, Homo sapiens
tgcacttgccctcgcgtcttcagaaaacagcagtagtactccagaggagtgtgaggtacactcacgtggaagctgagtgtcctttcctga

SEQ ID NO: 507666 - DNA, 97 bp, Homo sapiens
tcgagctccctgtgtgcaccgcgcgctgcccgaggcgcagcatcctggccagaacaagccaaggagccaagacgagagggacacacggacaaacaac

SEQ ID NO: 507667 - DNA, 82 bp, Homo sapiens
gtagccatgactggagaaattacactgagaggtcttgttcttccagatgtggcagataaccagatagactctggggacctga

SEQ ID NO: 507668 - DNA, 100 bp, Homo sapiens
cagctacatccaggagagaatgctgacagtcctgcaggccagtactaaagtggaagtggacatggagaaagcagaaagcctgcaagtgacgagaggagac

SEQ ID NO: 507669 - DNA, 98 bp, Homo sapiens
agagaaggatcaaggacggatgatgaagtagtacagagcctttatgaaattccagctgtgtcctcatcatccttttttgaagagtttggcaaactgtt

SEQ ID NO: 507670 - DNA, 100 bp, Homo sapiens
ggcggaggacgagctccgggatgctgtactccttgtctttgcaaacaaacagggcgagctgcatgtctccaaactcttcaaccatcccaatatcgtgcca

SEQ ID NO: 507671 - DNA, 100 bp, Homo sapiens
tgccccagaagctccatatacttcccatgataaacttaaggcggcatttattcttcagaatctccttgtaattccaatgcctacagaaattataaaggat

SEQ ID NO: 507672 - DNA, 100 bp, Homo sapiens
caggagctgacagagtgatgggaaacgcgtgagccaggccgagaggcattatccaattggtttgctatttgatcttcttgcatcaagttcagctcttcct

SEQ ID NO: 507673 - DNA, 100 bp, Homo sapiens
ggggtcccgaagccccctgcaggaactctacaacccaatccagattgtcctgggtcacataatgccagctgagcgtaaaaagccagcaagtatggaagaa

SEQ ID NO: 507674 - DNA, 100 bp, Homo sapiens
gaagatccaggcagtcatagactccggagtctgccggagattggtagagctgctgattaatctatgccagcaattatgacaatgttagcagaccatgcag

SEQ ID NO: 507675 - DNA, 136 bp, Homo sapiens
acgtaaatggctcgactccccgctggcattcgcttcatcatctcattctccagggatcagtggtttttcgttggaatatacgttgcacatttatggcgattctgagtgtgagggcagacttctgccaggctcagca

SEQ ID NO: 507676 - DNA, 74 bp, Homo sapiens
gtggagaatttgtcaagtcggtgcagctggcaagacctaaagggtttttaatgaccacaacaagcaagcatgca

SEQ ID NO: 507677 - DNA, 75 bp, Homo sapiens
aacccctcgcctggctcggacccacggagccggcagcccagcactccgcttcggaaccaaaaagaagcttcccag

SEQ ID NO: 507678 - DNA, 100 bp, Homo sapiens
cccagactttccttgttttggatgaccttgacagtttggaggaatcctggtgagtgtgtgctgtatttatggagtttaaagattaatcatcccaaaacat

SEQ ID NO: 507679 - DNA, 51 bp, Homo sapiens
ccaccactgtttctcatcatcaccaaacgagacggtctcgccacattgccc

SEQ ID NO: 507680 - DNA, 82 bp, Homo sapiens
gttttgatcatgttgttaccctcggacgtagcccggcttgtattgggagcgtagagtggcagctctccaagaaattgttcga

SEQ ID NO: 507681 - DNA, 100 bp, Homo sapiens
agcatggaggaatatgcagtgggaccattgcacttccgtcagattgatatcagtaaatgccattatttagtggatttggacaccatgagagaaacacccc

SEQ ID NO: 507682 - DNA, 100 bp, Homo sapiens
gtccctcgggggcgaggggctgcggaggaaaattttcgtgctctgagcactggagagaaaggatttggttataagggttcctgctttcacagaattattc

SEQ ID NO: 507683 - DNA, 75 bp, Homo sapiens
cagattgtaggaccgagcgcgggcaggcgggaggcaacggagctaccagccgatgctgaaattttcttctaagga

SEQ ID NO: 507684 - DNA, 75 bp, Homo sapiens
atgggagcagagctcagacatgttctcaccacccttggtctgtggctcaggacatccccaagctgcagaaactag

SEQ ID NO: 507685 - DNA, 50 bp, Homo sapiens
atgccaatctgaatatcaaaatagcagttcacagaagaaaagcttggcca

SEQ ID NO: 507686 - DNA, 82 bp, Homo sapiens
gctcagcgagtttgccctccagagcgacctggaccaacccgccttccaacagctgcagcccctgtcaaagggaacaggaagc

SEQ ID NO: 507687 - DNA, 50 bp, Homo sapiens
gccagcaatgccaagatctgttgtggatccactagttcctggactatggg

SEQ ID NO: 507688 - DNA, 121 bp, Homo sapiens
acaggatgcctctcagctgccacctgcctttgacctttttgaagcctttgcaaaaggttggagcccaggaagcaaaccagcactgcaccctagatttcagccagaggacgaaagccctgcc

SEQ ID NO: 507689 - DNA, 100 bp, Homo sapiens
aagcaacgtgtatcagccaactgagatggccgtcgtgctcaacggtgggaccgagcgagaacccgagcagcgccatgagcaacactaccgtcgtccccag

SEQ ID NO: 507690 - DNA, 101 bp, Homo sapiens
ctgcgatagctgcaaggaaggtggagatctcctgtgctgcgaccactgcccggctgccttccacctccagtgctgatggcctgatatgaaggagtcacgcc

SEQ ID NO: 507691 - DNA, 100 bp, Homo sapiens
ccgggaccggcggttgtctgtggccggaggctgatcaggctggcgcccatgcggctctacacgctctccaagcgccactttgtcctcgtgtttgtcgtct

SEQ ID NO: 507692 - DNA, 50 bp, Homo sapiens
tgaagcaaaagcctttcatgattatttaaaagaagatggatgcacagtgt

SEQ ID NO: 507693 - DNA, 100 bp, Homo sapiens
gggaggagctggagctctacaaggacggaggcgttgcgattattgaccagtggatctgcgcacacgccaggacggcccacctccatggagacggcccacg

SEQ ID NO: 507694 - DNA, 122 bp, Homo sapiens
caaaccgtggctgctcgataaatcagacagaacagttaatcctcaatttaagcctgatctaacccctagaaacagatcactggggtgatcctgctggctgttggagtctggggcaaacttac

SEQ ID NO: 507695 - DNA, 100 bp, Homo sapiens
tgaattggtgtgacagtgccatcgagcgggtccgcatcatcgagccgctgctggtcttcctcctcgcctacgcagcctacctcactgctgaaatggcctc

SEQ ID NO: 507696 - DNA, 75 bp, Homo sapiens
accggaactggtcgaatgaggcacctaaaaattgtataccgcagattcaggtataagtgtgctagcggagtgtct

SEQ ID NO: 507697 - DNA, 89 bp, Homo sapiens
ccgtgctcaagtgatcctcacacctcagcctcccgagtagccgcgatcacaaatgtccggtctgtgctacgacagcaaaatgttccagg

SEQ ID NO: 507698 - DNA, 82 bp, Homo sapiens
tcgacagattatcggaccatttcagaggttcaccgccatcattggacccaatggctctggaagaaatctttcctgttttctg

SEQ ID NO: 507699 - DNA, 90 bp, Homo sapiens
taccctgaaacctaactccaaagtgttatcgactcgagttacaaacgtcttaatgttttgcactgattgcaaaaataaagtcctccgagc

SEQ ID NO: 507700 - DNA, 83 bp, Homo sapiens
gagagcgtgaatttgcctcggggacgcctctccagatgggcttaggtcacgagcaaggatttggagccccttgtttaaaatgc

SEQ ID NO: 507701 - DNA, 51 bp, Homo sapiens
cgtcgtcggcctctgggcagcagagtcttgctgtgtcgcccaggctggagt

SEQ ID NO: 507702 - DNA, 90 bp, Homo sapiens
cgccaagctgtcatcacaaaagagttgattgaaattatctctggtgctgcagctctgatcaacggccaccccgggaagtccacgcgcctg

SEQ ID NO: 507703 - DNA, 80 bp, Homo sapiens
aaaacactatcccagggagtgcaagcttagagcgtctggccaagaatcagaggaagtggaaacttgaggagaggctggag

SEQ ID NO: 507704 - DNA, 98 bp, Homo sapiens
agctccagctaggatgatcgaggttgtttgcaacgaccgtctggggaagaaggtccgcgttaaattgaccgcttagattcatctgctgtccttgacac

SEQ ID NO: 507705 - DNA, 82 bp, Homo sapiens
aggaagcgagactcatacgcaacctcaatgcaaattgtggctactaatttgccccctgaagatcaagatggctctggggatg

SEQ ID NO: 507706 - DNA, 74 bp, Homo sapiens
tctggagttggtacatgaccacctgaaggatctctggaatgatggggctggtgaattaccagatctctgtcaag

SEQ ID NO: 507707 - DNA, 100 bp, Homo sapiens
cttctcttggcaagagagctctgcatcaatgcgccggccataggttgtgcagcctgactctgaagaagctggtggtcttcaaggagctggagaaggagct

SEQ ID NO: 507708 - DNA, 75 bp, Homo sapiens
ccggtaacaaacgagggttcccgggattggaccgacgcagccatggtcctctggtgatgttcttgagacgttcaa

SEQ ID NO: 507709 - DNA, 75 bp, Homo sapiens
ctcagatatggcccagactaaggagtccatagttaattgatcgaactgtgagaatttggaaggctcgcaatttgc

SEQ ID NO: 507710 - DNA, 100 bp, Homo sapiens
tcggcctgcggcctcttctccgtctgctacccccgagtgtccagtgctgtgaaggcggaacttcgacagtacccgaggattaataaagaatctttacttc

SEQ ID NO: 507711 - DNA, 90 bp, Homo sapiens
cacagagctgggaaaattgttgtgaacctcacaggcaggctaaacaagctctggattaatcgaattacagctgctagccaggaacatgga

SEQ ID NO: 507712 - DNA, 100 bp, Homo sapiens
accagcggcagcatgcatctgatgctctctctccagtccttgctgaagagactttccgttacatgaggaaatgacccatttacagaaggaggtgacagcc

SEQ ID NO: 507713 - DNA, 100 bp, Homo sapiens
gaagatcttcgagttcaaagagaccctcggaacatatggctcgtggacagcagaaaattcagtctcagcagaaaaatgccaaaaagcaagctggacaaaa

SEQ ID NO: 507714 - DNA, 128 bp, Homo sapiens
agggagcacatgtagaagaagtgtcttccaaaggagaaattcatggcggaagtaatgggatctataaaggtcccgttgagcagacagtccaagcaagcagatacaatggttgcacctcgtcaccctca

SEQ ID NO: 507715 - DNA, 75 bp, Homo sapiens
cgctcgtcccgctcgtcatggcctacccgggatacggaggaggggttgatctcctatcaagagtttttggcattt

SEQ ID NO: 507716 - DNA, 75 bp, Homo sapiens
cgatttaaaacttcgccagaatttggtgatgatgatgcttatctgtgtattcatgaagatcagactgtgtacatc

SEQ ID NO: 507717 - DNA, 110 bp, Homo sapiens
tctactgaattagtttctggaggatctgataatcaagtgattcactgggaaatagaggataatcagccaagtatcttcaagaccttctcatggagagtgtgaatttttcc

SEQ ID NO: 507718 - DNA, 100 bp, Homo sapiens
ccggagcgtgaggacagtgagactcgaacagaactgcaagcacatgttgaccagataactgaaatggcagcagtaatgaggaaagccattgaaattgacg

SEQ ID NO: 507719 - DNA, 75 bp, Homo sapiens
ctatacaacttctccgccaacacctgggagtcttgggacctgagtcctgccccgaactgtctcagcaaacagcag

SEQ ID NO: 507720 - DNA, 87 bp, Homo sapiens
aggtcgcgaaggcagtaccgtttcctcagcggcggagaggaggttcagatgagcccctgctgacttgagagagacagagagaccacg

SEQ ID NO: 507721 - DNA, 100 bp, Homo sapiens
ttgacaagatgtcacctgaaagtggtcacagccgcatctttgaagtttcattcattggctcccatgtactatcgaggctcagctgcagctgttatcgtgt

SEQ ID NO: 507722 - DNA, 82 bp, Homo sapiens
ggaaaaggaggaattcgccgtgcccgagaatagctccgtccagcaggtttttagaacttcagccataaaaatgggcagaatt

SEQ ID NO: 507723 - DNA, 76 bp, Homo sapiens
aggaagatgagtcaggatagtgtccatcacacctcaggaatgaaaggaattacccagccttctgcttttataccta

SEQ ID NO: 507724 - DNA, 123 bp, Homo sapiens
agcacaacctccagggccgcatcgggggcgactcaggcctgtccagccggggcaagaaggggattaaatcatttggattggacagaatcattgatatttggatccttcttcagccagaggaag

SEQ ID NO: 507725 - DNA, 96 bp, Homo sapiens
ggaagtggatgagttccacctcattttagagtatcaagcaggaggaagaagcagtacttttttgtctcatagcattagtaaccaagctaatgttca

SEQ ID NO: 507726 - DNA, 74 bp, Homo sapiens
ttctttcttcagccgaggccgccgccgcctctccttgctgcagccatggagaccaagaatcgccttcagccctg

SEQ ID NO: 507727 - DNA, 73 bp, Homo sapiens
acagacagacacagagaaccttgctcttcatatcagcatgggcggcgactggcggcgcgatggacctgaccgg

SEQ ID NO: 507728 - DNA, 60 bp, Homo sapiens
gagaagcattgcttccttcttcaccttgcagccaggagccgaggaggtgctgctgctggc

SEQ ID NO: 507729 - DNA, 100 bp, Homo sapiens
taggctgcgttgaggatctttgctcttccatccgcctttgatcgtcttcctcttcagccatccagtgagacggtttaagcggaagcatcttactgccatt

SEQ ID NO: 507730 - DNA, 75 bp, Homo sapiens
ccagagtactggtttgctgttcctcgggagagatacactgaagagatggtgccttggcacccttgcctggaactc

SEQ ID NO: 507731 - DNA, 75 bp, Homo sapiens
agattggaggctggtgtcccggagcagtgcaaggttaaaaagatcaagtggcatgagcagccttttggggaaaat

SEQ ID NO: 507732 - DNA, 74 bp, Homo sapiens
ttgtccccagcgacgccttgctaacaaaggaaaacggacgatgtattactaagctggaaaacatggggtttcga

SEQ ID NO: 507733 - DNA, 98 bp, Homo sapiens
cagagcgacccttcctggccatcctgggcggctattgacctgaaaagtggttctggaaaagtgtaccaaggccctgcaaaaggtgctgctgatacaac

SEQ ID NO: 507734 - DNA, 100 bp, Homo sapiens
ctcatttagtgaacatccaattcagaataactgaagtgaagtgatggactccgatttggagagtagtaagacgtgaaaggaatacacttgtgtttaagca

SEQ ID NO: 507735 - DNA, 92 bp, Homo sapiens
gcaagtgggagcactggaagtacgggcagttgcagtgttggagctaaagtgcttttgaagatgatgatatcacgcacgttgaaggaagtgta

SEQ ID NO: 507736 - DNA, 83 bp, Homo sapiens
agaccctcttcagacttgaacaaggtcccgcaggctcccgatggcgagattacggcgccctggccatcatcatggcaggcatt

SEQ ID NO: 507737 - DNA, 100 bp, Homo sapiens
cgaggagtctctgtccgggggcctggctaaggaaaccctattacctccagcggagctggagttcgcccaaatcatcatcatcgtcgtggtggtcacggtg

SEQ ID NO: 507738 - DNA, 82 bp, Homo sapiens
gaccaagagggtgttcgactgctagagccgagcgaagcatagcagaccccacgttagctgaaatgggaaaaaacttgaagga

SEQ ID NO: 507739 - DNA, 100 bp, Homo sapiens
ccagtttagcgtaaaccgggaagcggatcgcgtggagtgaaagtcaccgcagcgtgaaactggaacgccaagctgaagaagaacgaatacggaagcacaa

SEQ ID NO: 507740 - DNA, 75 bp, Homo sapiens
ccaaaagatgttggacacaatatctatattctggcccatcaggattcctacaggaagcaagtagtaattgatgga

SEQ ID NO: 507741 - DNA, 89 bp, Homo sapiens
agcgagcaggcatccatcgagatgcgagaggaggcggcacgggagatccgcagagccatcacagtttcctcactgcttggaggaagatg

SEQ ID NO: 507742 - DNA, 100 bp, Homo sapiens
gcaaggtgtcggtgttccacgtgaagctcaccgacagtgccctgagggccttcgagagctaccgcgccagacaggtgaaagaacttgtcctggacaacag

SEQ ID NO: 507743 - DNA, 100 bp, Homo sapiens
ctcagcagggagcccagaccagcctgcactgtgccttaacagaaggtcttgagattctaagtgggaatcatttcagctactgtgtgaagacattcacagg

SEQ ID NO: 507744 - DNA, 50 bp, Homo sapiens
cacgatgcggtaatgaatccagcagaagaatcaggaaacccaggcccaac

SEQ ID NO: 507745 - DNA, 100 bp, Homo sapiens
agacagaaccacatcatgaacttgtcagaagagatcaattctacagaaatttccagtggttctgttgaggctttatggaattcagcatgtcaaaattcac

SEQ ID NO: 507746 - DNA, 75 bp, Homo sapiens
cggcgctgagaggggctgcggccggagcgggcggctgagacaaaggcgacgccagattctactgcaactgaaaga

SEQ ID NO: 507747 - DNA, 97 bp, Homo sapiens
cgcccatgaaagcgcagccatggcggtgtacatatgaagattgaagaaaagataacattaacctgtggacgagacggaggattacagaatatggagt

SEQ ID NO: 507748 - DNA, 100 bp, Homo sapiens
tggaaatgatgtctgcagtggtgctatgctggaaaatgagaagaagaagcgtgaaatggcagagaaggagaaagagaagattgaacgggagaaggaggag

SEQ ID NO: 507749 - DNA, 74 bp, Homo sapiens
tcgggagcaacactgtctgttccggagcatcccccagccagatggagaagtacatccagcagtggtcattcgac

SEQ ID NO: 507750 - DNA, 97 bp, Homo sapiens
tactccggaaatttcttcagagactcctggatagaattccagagacgctgtaacactctgatttcattgattgagaaagaaaatatggaaattgagg

SEQ ID NO: 507751 - DNA, 100 bp, Homo sapiens
attccaactcttcagcgatctgtgtctgaggaatcggcaaactccctggtctctgttggtgtagaagccaaaatcagtactaaggctcgtacgtctgcat

SEQ ID NO: 507752 - DNA, 82 bp, Homo sapiens
accgacctcgacgtcttgcctgtgtcccacttgttcgcggcctataggtcacacaggccgcctcctgcgggcattgctgggc

SEQ ID NO: 507753 - DNA, 74 bp, Homo sapiens
tgcaaatgtctttcgtggaagacataaggacacaactcagatgggaagttcatcgcccgggcacagcggataga

SEQ ID NO: 507754 - DNA, 100 bp, Homo sapiens
gcagtgcgccccgcttcggtgttacttccctcagtcaccattactttaagtactgcaaaatctcagcattggctctgctgaagatggtgatgcatgccag

SEQ ID NO: 507755 - DNA, 130 bp, Homo sapiens
agggaatgcagtgttgggaatctgaagacccagctttgagctgaatttgctttgtgatacctggtggtattaaagataatcaaacattatcaagaagaaggacaaggaactgaagttgttcaaggagtgc

SEQ ID NO: 507756 - DNA, 90 bp, Homo sapiens
gggaattgctgaattagaactgcagaggttcctctacagcaaggttagaaaatggatttctgactggaatctcaccactgaaaaaaagca

SEQ ID NO: 507757 - DNA, 74 bp, Homo sapiens
gctgactgagagcgtctgcttggatactgctattgttcatccagttcccattcgtatgactccaagcaaaatcc

SEQ ID NO: 507758 - DNA, 100 bp, Homo sapiens
tctgtatagagcaactgttgaactcagctgcctgtaggtcttcaaagcttcacctttctccaaaggcagatgtgaagaacttgatgtcttatgtggtaac

SEQ ID NO: 507759 - DNA, 101 bp, Homo sapiens
ggcgcggaggcgaccgccatggcgttcctcaaactccgtgaccagtgccctctggtggtcagaagatgctgtgctgtctcgttaggatgaatggattaaaa

SEQ ID NO: 507760 - DNA, 59 bp, Homo sapiens
cctgttgctgccgtctcgactcgtggatggatttgcagatttacagaatggctgcacat

SEQ ID NO: 507761 - DNA, 100 bp, Homo sapiens
accttcagcggatttggggattaggctcttttagcaatgcagagtccctggacaggctcctgccacctgtgggcactgggcgctctccccggaagcggac

SEQ ID NO: 507762 - DNA, 50 bp, Homo sapiens
gaaagctgccaaaagtgacatgcagtatcagaggttctggtgatagcagt

SEQ ID NO: 507763 - DNA, 74 bp, Homo sapiens
ccagagtaaagcaaagagaaaggaagcaggcccgttggaagtggttgtatttgtccaatatgtgcagcgttacc

SEQ ID NO: 507764 - DNA, 100 bp, Homo sapiens
tggctgctgctgctgcccgccgcccttctgctccacgaggagcacagccgggccgctgcgaaggccaagtcctgtatctgccatgtctgtggcgtccacc

SEQ ID NO: 507765 - DNA, 75 bp, Homo sapiens
actgttgctgtccgtaaactggaacctctgttcactcaagatccacacaacttaaagatctgctgccgagtgaat

SEQ ID NO: 507766 - DNA, 100 bp, Homo sapiens
agaagactgatggagcaggcttgcaatattaaaactcaaggcacaggagggaagaaagtcattcagactgatgagtggagaaatggccctgtcgaagaac

SEQ ID NO: 507767 - DNA, 118 bp, Homo sapiens
tgggatccagcccttctggtgtcacctcccagggtgactcaactccagatatcagttttagagaatgtggcgtggagaaattctcaaggaaagagtaaaatgctggtgatgtgctgag

SEQ ID NO: 507768 - DNA, 75 bp, Homo sapiens
gctgctgcagtgggacaggtggcggcgaccggcggcgtccgaggagctgggagtgtccactcgccttccaccagc

SEQ ID NO: 507769 - DNA, 128 bp, Homo sapiens
ccggagcggcccaggagcacgccgcggggagcgcgggcgtccggggctggagtcgcgcaggagtccccgggccccaggctgcagactggtacctgtcgagagctgttaggaactgggcttcacggcag

SEQ ID NO: 507770 - DNA, 100 bp, Homo sapiens
agataacccaactcctgagatggaagcagcgagacgttccctgtgctttagactggagcaagaattctgcttggtcagaatcgtgatggcattgtgttca

SEQ ID NO: 507771 - DNA, 100 bp, Homo sapiens
gattttgaaacttggactgagctactgctggcttccttgcttctcaacttacagatgggacttcacctatagatcatgttttgagcaaaattttggactg

SEQ ID NO: 507772 - DNA, 51 bp, Homo sapiens
cccggtttctcggcgaatgacagcacagggctgccatcagcagcagtgagc

SEQ ID NO: 507773 - DNA, 80 bp, Homo sapiens
aggccagtcgcctccaggccaagagggatccttcacccgtgtctggtgccacacctccctggatgatccaagatgaagaa

SEQ ID NO: 507774 - DNA, 98 bp, Homo sapiens
cgtgaccgagagcgcgaatatcgtcatcgttagaagatcctaaatgcccaggagatgttgattttcataatagtgactgggacattaagacaatcacc

SEQ ID NO: 507775 - DNA, 100 bp, Homo sapiens
agtgacatgtctgaagaaggaaaagacggccaagctgatccccaacgccatccagatctgcacggagagcgagaaggtagatgatgagctggagatcaag

SEQ ID NO: 507776 - DNA, 95 bp, Homo sapiens
atcggcctcctgtcccgcattgtgactctccgggctaaggccctgggctgcatcttgtacctgctgtgcttccggcagcacccttttgaggatgg

SEQ ID NO: 507777 - DNA, 83 bp, Homo sapiens
cagccgcgtctgggccaggagaaaaggattttttatcaagcagaaatgcatcgaacaacgagaatcaagatcactgagctaaa

SEQ ID NO: 507778 - DNA, 100 bp, Homo sapiens
gtcgtctgccgggagctgggctacgtggaggccaagtcctggactgccagctcctcctacggcaagggagaagggctccaggggacccaagggctacaag

SEQ ID NO: 507779 - DNA, 51 bp, Homo sapiens
gttctctatcgaacaaaagtagagtgagtatcttcccagtcttgttattct

SEQ ID NO: 507780 - DNA, 100 bp, Homo sapiens
ctctgttgtctcggtagaaggccagagtcacacacggtcctaagagctgggcaccaggaagcgaaggctggcacagtaaccttggtgcacgaccgaaagg

SEQ ID NO: 507781 - DNA, 100 bp, Homo sapiens
ctcctggaatgaccttaaatgagaagagtgttcaaaattcaattacacaggttattttggagccgttggggcactgttggaactgttcaaaatgactgat

SEQ ID NO: 507782 - DNA, 149 bp, Homo sapiens
ctggccgtccaaaatccaccaaagaaagtgacctctgagaaagtgagccagaaacatgctgagcctttgacaggttcagggagcaagtttccgaggttggaaagaagtgacttcactgtttaacaaagatgatgagcagcatctcctgg

SEQ ID NO: 507783 - DNA, 142 bp, Homo sapiens
ctgaactctacacagaggactttatacagggatgtgatgttggagaactacaggaacctggtctccctggaaacgttcctggatccgaacactgccccctgacgacctagagagatcccggctcccagcccactgagtggct

SEQ ID NO: 507784 - DNA, 83 bp, Homo sapiens
ctgccaccatcttcgacttgagcgaagttttatgcaagaccaaactgcagctggaatacccagtacagttctgcttactacac

SEQ ID NO: 507785 - DNA, 96 bp, Homo sapiens
agcagtgacacttattttcaaagccgttaattaaggaaaagttgagccagggcgtgaccctcgtcgtggacagatacgcattttctggtgtggcct

SEQ ID NO: 507786 - DNA, 100 bp, Homo sapiens
ttttgagcagttggcactacccgtcttgaggaatgtgagcctgtttaaagaagaaaacccgtatgctagatttgaaaacaactaaagcgctccagcacat

SEQ ID NO: 507787 - DNA, 51 bp, Homo sapiens
cttgctgccaacagagccttctgtctgcgcaggcatggcactaagtgtccc

SEQ ID NO: 507788 - DNA, 83 bp, Homo sapiens
gcagaacttggactgagtcctgcaggacacagctgtctgtgatcctggaaacatacgtgtgactgaagctcccaaacacccaa

SEQ ID NO: 507789 - DNA, 75 bp, Homo sapiens
cgcgccgccgctgccgccgccgcgcgcgggggggacacagcgattgccacgcgccattggaatgtccctggccaa

SEQ ID NO: 507790 - DNA, 87 bp, Homo sapiens
tagacatcttctccctcccttgcctcaggtacggaaaaaggaccagatcaatattgaaacaaagaataaaactgttcgttttatagg

SEQ ID NO: 507791 - DNA, 100 bp, Homo sapiens
tggaagagggagtcaccactggacctccaaggaagccacgtgcagacatctacaaccttcgatctcctgacgagttcttcccgcaaagagatcacaaaac

SEQ ID NO: 507792 - DNA, 82 bp, Homo sapiens
cgtgattgcgttacaagctttgtctccttcgacttggagtctttgtccaggacggtgcgcgcggagccatggttatcatgtc

SEQ ID NO: 507793 - DNA, 97 bp, Homo sapiens
aaggcaccttgggatgagggaatacaagtgtcatgtctgtggaatttcgctaaggagtttgtgatcagtgatcggaaggagctggaggaagatttca

SEQ ID NO: 507794 - DNA, 83 bp, Homo sapiens
cgcacccgcagcctcgcgcccgccgccgcccgtccccaggctacgtgcaggcctgccgcgccctgatgattgctgcctcggtc

SEQ ID NO: 507795 - DNA, 96 bp, Homo sapiens
gctgcattccagtccatgatgacaggagacctcctgccccccgaggtctgcagtctcctgaacccagcagccatctacgccaacaacgagatcagc

SEQ ID NO: 507796 - DNA, 100 bp, Homo sapiens
ctacggaaaacctgatcccaaaattattgaaaacactcgaaggattttaggtgatgggcaagtcagaaagtcagatggatataactgatatcaacactcc

SEQ ID NO: 507797 - DNA, 88 bp, Homo sapiens
gggcaaaggtcatggagatgtccgtaagatcatggaagggaagtggttgctgtgtatgttactggtgcttggaactgctattgttgag

SEQ ID NO: 507798 - DNA, 83 bp, Homo sapiens
ggacacacccaggaaaagactcaggacggacaagcacagtcttcggaagtactgccaaatctgtcgaaagggagataatgaag

SEQ ID NO: 507799 - DNA, 87 bp, Homo sapiens
gctctccaagaccagccgggccctggtggccgacagccatcctgaaaggatcactactcttggaatcaaagataaatccaaatactg

SEQ ID NO: 507800 - DNA, 60 bp, Homo sapiens
agctgggcctaggtctgcgccctggctctccctgcatgtcctatccaggccacctgtgag

SEQ ID NO: 507801 - DNA, 74 bp, Homo sapiens
tgagcttggcctcggcgtcctcggggagagctggtgacggcctccaaggccatcattgaaaaggagtaccagcc

SEQ ID NO: 507802 - DNA, 98 bp, Homo sapiens
gatgctccagtttgagaaacctggatctgcgatctgtttgtgtgcaaaatggcaactcttaaggaaaaactcattgcaccagttgcggaagaagaggc

SEQ ID NO: 507803 - DNA, 74 bp, Homo sapiens
ccattgactatgcagcctaatggatcccaaagaatatcttccatttcttaatacacttaagaaaatggaaacta

SEQ ID NO: 507804 - DNA, 130 bp, Homo sapiens
agggcagcgccggttccttgcggtcaagatgctgcaaaacgtgactccccacaataaggcagctgcaatgactctccgcacggtattattgtcattgcaagcactattggcagctgcagagccagatgat

SEQ ID NO: 507805 - DNA, 100 bp, Homo sapiens
aaggaagagactgaagaacatatcagaaaacgcagacttttttgcttctcttcagttgtctgaggaatgatgagaagacagcagctgattacaagatttt

SEQ ID NO: 507806 - DNA, 60 bp, Homo sapiens
cctcgtcagcactgactttcagctatggaatcggccatcatctgtgcgatctctgcggtg

SEQ ID NO: 507807 - DNA, 100 bp, Homo sapiens
tccaacttcacttttgctcctagcacgattatatttcacctgggacatgctgaattggcagagggggtcgatttgggaggaaaggtgtggctataaactt

SEQ ID NO: 507808 - DNA, 141 bp, Homo sapiens
cagctatctcgggagaaacaacaactgctacatctgttggaggagccaactagcatggaagtgcaggctttggcatcagcaatagcatcaaccaaggttatgaaagctcagcaagttgtgaaaagtgaaagtggagaagag

SEQ ID NO: 507809 - DNA, 100 bp, Homo sapiens
gtgatgttggagaactacagaaacctggtctccctagatgttcctcctgctgatcaagagaagctttttatccagaagttacgtcagtgttgcgtcctct

SEQ ID NO: 507810 - DNA, 100 bp, Homo sapiens
gcagagccggcgcctcctcggcagattctgctcagcaatcctcagatgtggtggttaaatgattccaatcctgaaaccgacaaccgtcaagaaagtcctt

SEQ ID NO: 507811 - DNA, 50 bp, Homo sapiens
gaccttgggcagctcagttcacaagagttcctgagttggaggtagaagaa

SEQ ID NO: 507812 - DNA, 95 bp, Homo sapiens
agcccggattccgcgactgccggggcaccgcaggttttggactcgctgaagcggaaactactttgcttcgcactttttcatgggaggagagaaat

SEQ ID NO: 507813 - DNA, 75 bp, Homo sapiens
gccaggctggccccgagcggaactggagaaagctgagggaactgtggctgcaccatctgtcttcatcttcccgcc

SEQ ID NO: 507814 - DNA, 75 bp, Homo sapiens
agtagagtatttcaaccataaagacatcttaattgggcacgaaagagttttacagctcccagcacagtaggaaag

SEQ ID NO: 507815 - DNA, 83 bp, Homo sapiens
gctctagaaagggtgtggccgttttacattggctgttttcctcacattcctcaagcaggtcatgcaagacaagataatctgcc

SEQ ID NO: 507816 - DNA, 50 bp, Homo sapiens
gagcggagggagccccagacacgccaaaacagagtggagtacgagaaaag

SEQ ID NO: 507817 - DNA, 95 bp, Homo sapiens
ccggcctgtacatcggcaacttcaaaggaacagcgccttttgatagtcctaagtaattgctgctatctagaacgtcacaccttcctaaatatcgc

SEQ ID NO: 507818 - DNA, 100 bp, Homo sapiens
ctcagggctccctcaactcctccgccagcctggaccttggcttcctagccttcgtcagcagcaaatctgagcatattgagtatcagtgctgatattgaaa

SEQ ID NO: 507819 - DNA, 80 bp, Homo sapiens
ccgaggaggcagccaagctcgtggcctgcctctgcgtgcagcctttgcactggcgatgccatctgctgcctggatgtctt

SEQ ID NO: 507820 - DNA, 50 bp, Homo sapiens
gtcagacagcttcaaggagacgccatacatcgaagagatttgtcaaaacc

SEQ ID NO: 507821 - DNA, 100 bp, Homo sapiens
agcaaaacacggagtctccagcagggcccggatggcctccggaagcagcaccagtggaggagcggcgggagcgctacatggactcctatgacatcgtgct

SEQ ID NO: 507822 - DNA, 75 bp, Homo sapiens
cctgccctcagccgcccgctggccgggagcggagcccctgtggattcacttgtcatggattagtgactggtcaga

SEQ ID NO: 507823 - DNA, 75 bp, Homo sapiens
cctcaacaaacaccagcgctttggagcagggtctggattactggggaagcgtgaggctgctgggccctgtgtgtg

SEQ ID NO: 507824 - DNA, 82 bp, Homo sapiens
actacttcacacgccagtacggggatgagtccactctggccttccagcaggaggaaaactccctcttcgtcatgaccaacgt

SEQ ID NO: 507825 - DNA, 73 bp, Homo sapiens
ttgatgacataagtggctacacttgccactgtgtgctgccatacacagggaaagaatatggcaaagctgatgc

SEQ ID NO: 507826 - DNA, 83 bp, Homo sapiens
catgggtcgatttggatctgggatgaacatgggcaggataaatgcaaccatgtccaagggacctgcagttggtattgatcttg

SEQ ID NO: 507827 - DNA, 97 bp, Homo sapiens
tgcctcccaggttcaagcgattctcctgcctcagcctccagagtacctgggattacagatattaataaggcagcggaaagaagaaatatgaatacgg

SEQ ID NO: 507828 - DNA, 90 bp, Homo sapiens
ggcaacatctctgtgcttgagggggtccctgagaatgtgtcccctggacaggcaccggcagtggctctgtgtcccacgccatcatccgca

SEQ ID NO: 507829 - DNA, 101 bp, Homo sapiens
cagactgaaggacagcggcaccgccagacggccagaaagttccgccatgagctggggcacggagctgtgggaatgtttacccttgcggaagttgcatcact

SEQ ID NO: 507830 - DNA, 83 bp, Homo sapiens
ctcgctctgggtctccaggcccgcgaccgtccgccagtcgtcccgagggacccagacatggagctgcgggaagaagcctggtc

SEQ ID NO: 507831 - DNA, 75 bp, Homo sapiens
gaaatgatgaagttaatgggatttgcctcctttgactccacaaaagcctgcactgcccaaagtcttggaaacttg

SEQ ID NO: 507832 - DNA, 75 bp, Homo sapiens
tggccacagcatctttgtctagccccagtgcaggtgaggtttatacatggggcgacaatgatgagggacaactgg

SEQ ID NO: 507833 - DNA, 100 bp, Homo sapiens
cgctttcccgagaccgtcctggcgcgatgcgtcaagtacactgaaattcatcctgagatgagattttcagctgaactctcatctctcaacactggcaaat

SEQ ID NO: 507834 - DNA, 100 bp, Homo sapiens
ggttatggggacatggtgccccacacatactgtgggaaaggtgtctgtctcctcactggcatcatgttggtagctggcagtgttgtgatggcttttgaag

SEQ ID NO: 507835 - DNA, 100 bp, Homo sapiens
gccgatggctccgacccgctctggtatcttaagggaaatactacaaaatgtcgcagaaggtgctggatggatatctaaagttcaaaaaggaagagaacca

SEQ ID NO: 507836 - DNA, 75 bp, Homo sapiens
tgagtgatattgaccatgatggaatgcttgacagagatgagtttgcagttctgcagaagaaagatcagcaactgg

SEQ ID NO: 507837 - DNA, 90 bp, Homo sapiens
cgagactgcaatggggacacgccaaacctgagtttctacagaaatgagatccgcttcctgcccaacggcttgcagggtggcccccgctcc

SEQ ID NO: 507838 - DNA, 98 bp, Homo sapiens
aggtaagaggtttgggactgccccggcaactccagggtgtctggtccacgacctatcctaggcgccatgatgagcaatgtgaagagactacggccacg

SEQ ID NO: 507839 - DNA, 90 bp, Homo sapiens
cggagaccctcgaagtgcgcaaacttgacactcaccctgaccgaggcaaatttctggagatgtgcaatgatctcttagctagagtggagc

SEQ ID NO: 507840 - DNA, 75 bp, Homo sapiens
taagttgcattcctttgagtcacataaggatgaaatattccagggaaaatcacagtgaaattgaacggcggcgac

SEQ ID NO: 507841 - DNA, 95 bp, Homo sapiens
ccgaagaggagagagcgcgggcctctaggaaggccccttcacagatgtagtcactacaaatcttaaattgcgaaatccatcggatagaaaagtgt

SEQ ID NO: 507842 - DNA, 75 bp, Homo sapiens
cgcgtgaccttgattgagttaatgaacttcacgcctcagcgtccagcccccaaatacatcaagatgtttgtactg

SEQ ID NO: 507843 - DNA, 75 bp, Homo sapiens
ggcctcggcaatattgattttagacagatgaagactggcccatttgcagagcactccaaccagctgtggaacatc

SEQ ID NO: 507844 - DNA, 76 bp, Homo sapiens
tcattcttacagtccatatgatcacaaggctggaggctctcaggtcatttttaccaacccattggagatagtgaag

SEQ ID NO: 507845 - DNA, 82 bp, Homo sapiens
gagcaggagcgagagtgtgtcgattgcagagtgggcaggatcttaagacccgataggtgcagaacccatctggacacggaga

SEQ ID NO: 507846 - DNA, 100 bp, Homo sapiens
ccacgttttgctaccagaagaattccctggtcaccccagccggcagttgcccaagatctgatacaaggtaccgaaagcacagtaatcactggtgtcgata

SEQ ID NO: 507847 - DNA, 97 bp, Homo sapiens
ttggattctatccctcctggtcagtacatggattcttcacttgttaaggtgaacataaaatctctggaggatgttgttagggcatatttgaaaatgg

SEQ ID NO: 507848 - DNA, 75 bp, Homo sapiens
gtgccattttcttttagtatatttccacagattggacaggttgcccgacatgtgagtgccattccttggggcatt

SEQ ID NO: 507849 - DNA, 82 bp, Homo sapiens
catggttctcactaaaatgaaagaaaccgctgaggcttatttgggaaagaagaccagcggccagtgacgaggagctcaccag

SEQ ID NO: 507850 - DNA, 90 bp, Homo sapiens
tccccggctcggctctcgctgcggcagacgggctcccccgggatgatctacagagcaagtgcaccggcacctggaccaacacgaagtgag

SEQ ID NO: 507851 - DNA, 74 bp, Homo sapiens
gaggaccatgctgggccggagcctccgagaagtatggcagatcccagaaaatggactcaccctttccctgactg

SEQ ID NO: 507852 - DNA, 90 bp, Homo sapiens
tcctatcacgggcactagtgtggctctcctgttccagcaattgggtcatacagcagatggaacaaaaaaaattacaacaaggaattcctc

SEQ ID NO: 507853 - DNA, 96 bp, Homo sapiens
aaaaattcatccctgaaattactatcagtgatatacttagttgcagagctattttgctgcatgtgaggatgagatccctgccatccggaaccatga

SEQ ID NO: 507854 - DNA, 75 bp, Homo sapiens
gcttgttggaattggtgacaaaatcagaggcatactttatagcattatctaaaaatgaagtgttatatgacggag

SEQ ID NO: 507855 - DNA, 75 bp, Homo sapiens
tcaagacatttcttcggcattctgcaacaggatcagctcagctactatttaataaaacaaaatctgtagaattca

SEQ ID NO: 507856 - DNA, 74 bp, Homo sapiens
gggcaatccgggcttgcagacgaggtggctattatcatggaaaactaatttttcccagagaatttcctttcaaa

SEQ ID NO: 507857 - DNA, 100 bp, Homo sapiens
aggtgaagacagtctaccgtcacgagaagcgggtgaaactgcagatctggaaatgcactcggtgatggaaagagagccactattctgaagaacacttggc

SEQ ID NO: 507858 - DNA, 74 bp, Homo sapiens
aatggatagaaattttaaagactgttgtgaacagggatgtacctaatctgggatctagcaattgggaggcagca

SEQ ID NO: 507859 - DNA, 98 bp, Homo sapiens
agtggcaacagcaccacctgctccagcatataaagctgtcggaaaaggtaacagaagatggaactcgaaatcccaatgaaaaacctacccagcaaaga

SEQ ID NO: 507860 - DNA, 100 bp, Homo sapiens
atgatgagctgagcttcaaggctggtgtcatggagaaactccagctgggcccagagattctgcagcgggaaaatccaaggcttatttatgccaggctgag

SEQ ID NO: 507861 - DNA, 118 bp, Homo sapiens
cttgtggtgcggcctcaccatacaggaacagggcagacgttagcgtgagtgatcactctcaatcccgggctctgacgcccgctctgcggcttcggtgtttgaacaggccacagtccag

SEQ ID NO: 507862 - DNA, 82 bp, Homo sapiens
cgcggggttagccactgctggctgcttccagtgttcgccgagaggtgctggagaatctggtaaaagcaccattgtgaagcag

SEQ ID NO: 507863 - DNA, 90 bp, Homo sapiens
gcacacccctgcactatgcagctacatcagacacagatggcaagcccagagccatggctatctcctcttcctcctgcgaactgcccctgg

SEQ ID NO: 507864 - DNA, 75 bp, Homo sapiens
cacccagagacttccatgatcagaacaggtgtgcctaccgcatgttgccgctgctgtttctgctgggacgtctga

SEQ ID NO: 507865 - DNA, 83 bp, Homo sapiens
gccagcggagcgaacccgagagcgtggagcgggctgggccagttttcggctttgtgagaaaccttaccatcaaacacgatggc

SEQ ID NO: 507866 - DNA, 101 bp, Homo sapiens
aaaagacctgctttgccctgggaaatagtaaccctgccaaatacatcagcttgtaggagacagagtgtgtggctgtgacctggcacaagggggcttcttca

SEQ ID NO: 507867 - DNA, 90 bp, Homo sapiens
ctctccgtcagcaccttgcccagcctgagggaggaggaggagcagaatctgggatgttaaccagaagaccttctatctgaggaacaacca

SEQ ID NO: 507868 - DNA, 100 bp, Homo sapiens
gtagtttgggtggaagaatcagacaaacggtcatttctgcttgacctcctaaatgcaacagatcttcctcagaagaataggcttgttgttttacagtgtt

SEQ ID NO: 507869 - DNA, 100 bp, Homo sapiens
agatgaaaaggaatatgcattgaagcaaattgaaggcacaggaatatccatgtcggcttgtagagagattgcaaagccatgcagtgacacccgctaagac

SEQ ID NO: 507870 - DNA, 82 bp, Homo sapiens
tttttctattttccctacgaaaaacagatctttttaaggagccttcacgtaaatgggtccagtcatgcctcccagtaagaag

SEQ ID NO: 507871 - DNA, 75 bp, Homo sapiens
ccggagtggtgcgagccggcggggctgcggagggccagtggactcaggacctacaagaacagtgaggagcttcgg

SEQ ID NO: 507872 - DNA, 82 bp, Homo sapiens
ccacagagtgaccagagagaggacgtggctgaagacaccaaagatgggggaggggaaggttgtgaccgagattcccgacgag

SEQ ID NO: 507873 - DNA, 75 bp, Homo sapiens
ctctctcgcccacattttccccaagcactctcaggaacctggcaacaggctctgtgtgctccgggatggagcagg

SEQ ID NO: 507874 - DNA, 89 bp, Homo sapiens
tgaaaacgaacttataaagttctgccgggaagcaagaggcaaagagaatcggttggttccctggcttcaaggaagtacgtctggtacca

SEQ ID NO: 507875 - DNA, 83 bp, Homo sapiens
cacaagcagatctactactcggacaagtacttcgacgaacactacgagtaccggttttaaaatcaaagatgggaaaatcggag

SEQ ID NO: 507876 - DNA, 100 bp, Homo sapiens
caagagcttactggtgaaggaatgggacaagacccatctttatgcaaagccagcgttacagtaatgttccagatgaagatgacgccaacagactcgggga

SEQ ID NO: 507877 - DNA, 90 bp, Homo sapiens
tgttggagaactacagaaacctggtctccctaggctatttctgccgggcgctccgcgaagatgcagctcaagccgatggagatcaacccc

SEQ ID NO: 507878 - DNA, 75 bp, Homo sapiens
tcgaatccgatatgggcaaaccaagaagatgatggacaaggtggagttgtttgagtttaagggagaagatctgac

SEQ ID NO: 507879 - DNA, 100 bp, Homo sapiens
ttttgcattattataatgttccattgtgtgtcacagaagagaccttcacaaagagtcacctaaggtcctgcgagtacaagggtcgacccccaaaggcagg

SEQ ID NO: 507880 - DNA, 75 bp, Homo sapiens
cggcgacatactacctctggccccgagatcagaatgccggttcagttccggaaggtgtcttagaggacattaaag

SEQ ID NO: 507881 - DNA, 99 bp, Homo sapiens
gctatcctgccaactctatcgtggtcgtaggaggctgtcctgtctgcagttttctggatatgccgcagaaggatccgtgccagaagcaagcctgtgaga

SEQ ID NO: 507882 - DNA, 80 bp, Homo sapiens
cactggcggtgcgcgacctgggctggctccgggggtggcgggcgcagctgctgtgacagacaatgcagatcttcgtgaag

SEQ ID NO: 507883 - DNA, 106 bp, Homo sapiens
tgaagaaatgaagaaaacagcaaacaacaatgctgtacaggtcattgaatctttgggaattattatttataaagcactggactatggtttgaaggagaatgaagaa

SEQ ID NO: 507884 - DNA, 75 bp, Homo sapiens
cgcgccttccccgccgccacgatgcccaagaggaagaactggaagaagttcgggaactcagagtttgaccccccc

SEQ ID NO: 507885 - DNA, 95 bp, Homo sapiens
ggtgctcgtcgggagtgatcacctaccctacagctattgacctgaaaagtggttctggaaaagtgtaccaaggccctgcaaaaggtgctgctgat

SEQ ID NO: 507886 - DNA, 74 bp, Homo sapiens
ggacttggtttgcctatgtcaagatcacagaagtgacagtgtgttcgtgttcttctgaggtgtcagcaaagttt

SEQ ID NO: 507887 - DNA, 82 bp, Homo sapiens
tggtccccagcgcagtgaagtggtgagcctttttgtcactggtccagaggtgtccttctaaagctggtagaggtttcacgag

SEQ ID NO: 507888 - DNA, 100 bp, Homo sapiens
aatgggtttgaagagctgatccagtggattaaagaggggaaactgggagtttccaattaacaatgaagcaggagaggagagccagagaagtgacagggaa

SEQ ID NO: 507889 - DNA, 82 bp, Homo sapiens
cacccagtcctgcagcgccagcagctggactatggcatctatgttatcaaccaggtgtccctggccagtgtccttccacctg

SEQ ID NO: 507890 - DNA, 97 bp, Homo sapiens
gaagaggaagaggatgatgaggatgaagaagagatcgaggttgaggaggaactctgcaagcaggtcaaaatgcagatcttcgtgaaaacccttaccg

SEQ ID NO: 507891 - DNA, 98 bp, Homo sapiens
ggaacagattgttcctaaaccagaagaggaggttgcccagaagaaaaaggacccagatgatgtggtaccagttggccaaagaagagcctggtgttggt

SEQ ID NO: 507892 - DNA, 116 bp, Homo sapiens
catgaccacaaccaccaccttcaagggagtcgaccccaacagcaggaatagctcccggtattgttgcagcatctggcagtgagactgaggatgaggacagcatggacattcccttg

SEQ ID NO: 507893 - DNA, 83 bp, Homo sapiens
cagcgccttcctcaacgacgcggacatggtcatgagctttgtgaacctgggcttttatcttgagaacatggtgtctggagtta

SEQ ID NO: 507894 - DNA, 82 bp, Homo sapiens
aatgacttaagtcagcccacgggatttttagcccagcccatgaaggaggaatgcaggctcaggttggaatgccaggaagtgg

SEQ ID NO: 507895 - DNA, 75 bp, Homo sapiens
tggggagatttcagtgcattgcctcccctgggtgctcttcatcttgggtcttatcgaatgttacttagcctccaa

SEQ ID NO: 507896 - DNA, 75 bp, Homo sapiens
tgggtctggactgatctccatgtcctgttgtggggcttttacagcctttggggcaggtaagccccctcccggttt

SEQ ID NO: 507897 - DNA, 100 bp, Homo sapiens
ctcggacgtgcggggcctgggcctcccggtccgcaagcagatcccggagatcgcccgccatggctttacttactgcggccgcccggctcttgggaaccaa

SEQ ID NO: 507898 - DNA, 82 bp, Homo sapiens
cctttcggcttctgagacggcggcagcagcggcattcaggcctacagattcctggaggagatgcggcggcggcttcccttgg

SEQ ID NO: 507899 - DNA, 75 bp, Homo sapiens
aaacagatatacagatgtggagaagcttcttggacacttaatgattgttggcaagaaatgtgctgctgatctggg

SEQ ID NO: 507900 - DNA, 75 bp, Homo sapiens
cgacttccttgcagcctcttctccgggtcctggacccaagccagaagcctctgcaaagcttccttccagacctgc

SEQ ID NO: 507901 - DNA, 99 bp, Homo sapiens
cttccctgggctggtgaagtacatgaactcagggccggttgtggccatgatctgcatgttgacgttcgaacacgagatggaaaaggcctttgccttcca

SEQ ID NO: 507902 - DNA, 51 bp, Homo sapiens
aaacctggatctgcgatctgtttgtgggaaagaatatggcaaagctgatgc

SEQ ID NO: 507903 - DNA, 75 bp, Homo sapiens
caacatctgtgtgcctgacctgcagctggaagtgtttgggcacatggtgcttctgaaggagcagtacgggcagca

SEQ ID NO: 507904 - DNA, 98 bp, Homo sapiens
agagccccttacccgccgccgcggccaggccccccaacatggactgtctctgtatagtgacaaccaagtcccaggtccagcgccagccctatcatgac

SEQ ID NO: 507905 - DNA, 50 bp, Homo sapiens
ccggagccgcaatgcctaaaggagagcatgaataatctttcatttagtga

SEQ ID NO: 507906 - DNA, 100 bp, Homo sapiens
ttttcctggagtgtaccctccaaatagcaaatgtacttggaaaatcacagtcaactgatgagacattcagcttggctgaagaaacctgtagctctaatcc

SEQ ID NO: 507907 - DNA, 100 bp, Homo sapiens
gagaggcatgcttccttagaccaggttggttcatgtgatcctggttaatggaacataagtgagattttatgggtgacagggagagagatcaggcttgact

SEQ ID NO: 507908 - DNA, 100 bp, Homo sapiens
aagcgtccatcatccgcctcaccacgagctacctgaagatgcgcgccgtcttccccgaaggaactctgcgaccttcaagtcgtttgaggaccgagttggg

SEQ ID NO: 507909 - DNA, 83 bp, Homo sapiens
cacataatggcgaattggtaaatgctgctcgattaaggaaaaaggctgatgtttcagacaccgcaggaaatgggcttaatagt

SEQ ID NO: 507910 - DNA, 82 bp, Homo sapiens
ctcaactttctgggcgttcatgatcctggccagcctgctcatcgcctactgcacttccccgggcgctgcctggacaggcctg

SEQ ID NO: 507911 - DNA, 88 bp, Homo sapiens
cctggcccggaggaagaaagccaaggaggggttgatggtgcatgttgataaaagaattactctggcagctttcaaacaacatttagag

SEQ ID NO: 507912 - DNA, 96 bp, Homo sapiens
aaatgagagatgagctacatgtccgaggtgtaacaaatgtggcaattattttggatctatcacctgtcatcataactggcttctgcttgtcatcca

SEQ ID NO: 507913 - DNA, 100 bp, Homo sapiens
gacgctgcacctcccgcgccgcacggtggacgaggctttaccgccagcacctgttcagaatcacacaaataagcatcaggtattcaatgcatctcttcaa

SEQ ID NO: 507914 - DNA, 50 bp, Homo sapiens
gagcccatcgtgcgggtcttgcaaagtttcggagcaacatcccctgtcac

SEQ ID NO: 507915 - DNA, 75 bp, Homo sapiens
gagagctgggccctcaaggccatcgaggcgctttcagatcaatgaactgagccatgttcaaatccctgttatgtt

SEQ ID NO: 507916 - DNA, 98 bp, Homo sapiens
catggacaggggagcagaaacaggcaaataatctccccaaagccatcgccgctgctcacacctttctactgaagcatcctgatgacgaaatgatgaag

SEQ ID NO: 507917 - DNA, 83 bp, Homo sapiens
aaaggataataaactagttgagaagcagaacccagctgaaggactgcttttctgaagctcagcagcagctatgcaacaccaga

SEQ ID NO: 507918 - DNA, 51 bp, Homo sapiens
cgaccagaatggattgtggaaagatgctgggctcttgcactgtttggtgga

SEQ ID NO: 507919 - DNA, 97 bp, Homo sapiens
tacaagacggctgaggagaagtacatcaaggggccttcgctgagctaccgttgcttacatttcctcatcccggaagcatgacagcattaaagacgac

SEQ ID NO: 507920 - DNA, 90 bp, Homo sapiens
gcggctgcaactgcctgccgcgccgagggaccgccgggcggcggaaagcagtctggctcttgctgattgaattcctttggtgcagtttag

SEQ ID NO: 507921 - DNA, 100 bp, Homo sapiens
cagaatcagatgaagatgaagattttaaagagcagactagacttctcaagcaagttatttcatgtccgaccagttacacagacagatgtgtatagagcag

SEQ ID NO: 507922 - DNA, 100 bp, Homo sapiens
atcctaaaagtctagagatcaggactctggcagttgagagactgttggagcctcttgttacacaggaaactagcagagttgttcacatcatggattttca

SEQ ID NO: 507923 - DNA, 83 bp, Homo sapiens
ggggtgggtgcaagatgccgctgccggttcaggtgtttaacttgcagccaagaagtatgatgcgtttttggcctcagagtctc

SEQ ID NO: 507924 - DNA, 80 bp, Homo sapiens
tgctcttctccgccgcggcactgatccccacaggtgtcgtgaaaactacccctaaaagccaaaatgggaaaggaaaagac

SEQ ID NO: 507925 - DNA, 74 bp, Homo sapiens
ggggacccaggagtttcctgtgtccagcgctgccggagccgcctgagcccgtgtcccagcccacccaggtaact

SEQ ID NO: 507926 - DNA, 75 bp, Homo sapiens
gtacccagagtgcagagccgcctttccagcatgcaggggctgctcagcctgaggaagaacttgatcctgaagaga

SEQ ID NO: 507927 - DNA, 100 bp, Homo sapiens
agactgttgtccggctgcaggagaagcggcagaaggagctctggaatctcctgaagattgcttgttccttcagctgtggaagaggatgaagatgaagatg

SEQ ID NO: 507928 - DNA, 113 bp, Homo sapiens
gtacgagctcaacggcggcctgcctccgggcacacccggctccccggacgcctcgggggatatgagactttctactcggaatatcctgagtgttgcgtggatgtaaaacccat

SEQ ID NO: 507929 - DNA, 51 bp, Homo sapiens
cctctttacttgctgtcagctgcggagacaagttggatggcttgaggactg

SEQ ID NO: 507930 - DNA, 100 bp, Homo sapiens
gtccatcctgccttggacacctacatcaaggtacagaccaccaccatgtgcgtgtcagtcagcctcagcggctccgtggtgcttggctgcctctttgcgc

SEQ ID NO: 507931 - DNA, 50 bp, Homo sapiens
acacagcaatatctctgggctttcacagaggctgaggggatctggcggtg

SEQ ID NO: 507932 - DNA, 74 bp, Homo sapiens
atgcagcatttttgataggtgcctatgcagaatgtttacccttgcggaagttgcatcacttaatgacattcagc

SEQ ID NO: 507933 - DNA, 75 bp, Homo sapiens
gttagccactgctggctgcttccagtgttcgccgagagctcaaactggaggattataaggatcgcctgaaaagtg

SEQ ID NO: 507934 - DNA, 90 bp, Homo sapiens
ctccaccttccacagggtgatcccttccttcatgtgccaggtggaagttaaacgagctgagcctcgggacagcaagagccaagcgccggg

SEQ ID NO: 507935 - DNA, 86 bp, Homo sapiens
gggcaggatgaaggcagagcgtgtggcatctccacctcaagggggctagtgacatttgaagatgtagctgtggatttcacccagga

SEQ ID NO: 507936 - DNA, 98 bp, Homo sapiens
acgaggaagcctgtccattgaaaccagcaaaaggacttatgagttacaggataattacagctgcagaaccttggcctgaaaatgctacattatatcag

SEQ ID NO: 507937 - DNA, 97 bp, Homo sapiens
tcggcccaaagcagcagcttcagccccgaaaaggaagaggcccagcagaagggactcgctgagccaccccccgccccactccatgttggctgtgctc

SEQ ID NO: 507938 - DNA, 83 bp, Homo sapiens
gttcggccaagggaccaaggtggaaatcaaacgccaagaagcttgagagaagaaaaatttcagaaaaattgtctcaatttgac

SEQ ID NO: 507939 - DNA, 51 bp, Homo sapiens
tagaaagctgtttaaaccttctatatgaccacattctgaagtgggaactct

SEQ ID NO: 507940 - DNA, 100 bp, Homo sapiens
cttctccggcccctccagctgccccctgtgtggcaaacctttcttgagctcaggagcaggaactcaaagcagccgctgatggcgtactatctgaagtgag

SEQ ID NO: 507941 - DNA, 100 bp, Homo sapiens
ctttgggaagtggagcaccgatgatgtgcagatcaatgacatttccctgcaggagcttggtttgatccgcaaacctgcctcgttcatgaccagcatctgc

SEQ ID NO: 507942 - DNA, 75 bp, Homo sapiens
cactgctcagcctgtgactctaacaaatgtggcaattattttggatctatcacctgtcatcataactggcttctg

SEQ ID NO: 507943 - DNA, 98 bp, Homo sapiens
cacaatcacagcaacagactctcctgcagaccttcccaggaagccagagccacacacaccatcatggtcctgggggtgtacaccgccttgagtcagtt

SEQ ID NO: 507944 - DNA, 90 bp, Homo sapiens
cttgtttgatgttcgtgactttggaaagaaatgttgctgaagtgctgctgaaagggccagagatgcaaggatttgggatacattttgaac

SEQ ID NO: 507945 - DNA, 75 bp, Homo sapiens
cttcaaagcctattcaaaaataaaggtggacaatcacctttttaacaacaagcggcgcgaggactcagagcgatc

SEQ ID NO: 507946 - DNA, 95 bp, Homo sapiens
taaaggctgtgctgaagaagagccgagagggaggaaagggaggcaagaaggaagcagatcatctctgaaagtggtgaaggcagcagcccaggtct

SEQ ID NO: 507947 - DNA, 100 bp, Homo sapiens
gagtcgttgctgttgctgtttgtgagcctgtggcgcggcttctgtgggccggaaccttaaagaattttcagatgctaatgccaagttttactgtcggctc

SEQ ID NO: 507948 - DNA, 110 bp, Homo sapiens
caagtatgtggagtgttctgcacttacacagcaactttcatcctttgaaacgtgtgctgaaaaagaagaatcagcaaatactactgaaagtgcaatatttgagtatcact

SEQ ID NO: 507949 - DNA, 87 bp, Homo sapiens
gaaaggcactcctaggggacataaaattagtgattactttgaggttcatgcatgggagatctcagaccagttgttacagatccggca

SEQ ID NO: 507950 - DNA, 98 bp, Homo sapiens
ttcatcagagataaatatgaaaagaagaaatactacgataaaaatgccatagctattacaaattcattttgtccagtgatgatgatgatgacaacgac

SEQ ID NO: 507951 - DNA, 98 bp, Homo sapiens
gtgttaaaaggcggcgccctgaagaagtgcaagagcagaggccttctctagaccttgccaagatggcacagatcaccagaaactagaacgtgaggctc

SEQ ID NO: 507952 - DNA, 100 bp, Homo sapiens
cagggagcccagaccagcctgcactgtgccttaacagaaggtcttgagattctaagtgggaatcatttcaggggctttgttatgcacctaaagccatatt

SEQ ID NO: 507953 - DNA, 74 bp, Homo sapiens
atgtctgagactcctgctcagtgtagcattaaggatgttgagaaagagaaggaaacccacagttacctcagcaa

SEQ ID NO: 507954 - DNA, 88 bp, Homo sapiens
tcccgcagcgccgtagagatcgctcccactcaggtcacaggctccaagcacagggcccgggcagccccggatccccctcccctcttcg

SEQ ID NO: 507955 - DNA, 50 bp, Homo sapiens
agaactaagtaacgatctggatgcccagggcattcttcttgagcaccgag

SEQ ID NO: 507956 - DNA, 100 bp, Homo sapiens
tgggacttggaaaaacagtacaggcatggaggagtgacggcaggaactttctgtgctctgacaacccttatgcaccaactagaaaaagaaaattccgtgg

SEQ ID NO: 507957 - DNA, 100 bp, Homo sapiens
gagtggtgcgtgatgtggctaagatgctgccgactctgggcggcgaggaaggcgtctcccgggtacaagaagaacttgaaggccctctacgtggtgcacc

SEQ ID NO: 507958 - DNA, 71 bp, Homo sapiens
aattcctcaagacaccattccagccgctgccatggcccagacactgcagatggagatcccgaacttcggca

SEQ ID NO: 507959 - DNA, 100 bp, Homo sapiens
ggagcattctgtgaagaaggcagtacattttgggttaccggtggatgggaagagagtcccaagggatgcagggcatcctctgtacccctttaatgacccg

SEQ ID NO: 507960 - DNA, 100 bp, Homo sapiens
gtcggtcagtcagtcccttcgcgctcctgagccgccggcgcgccgggcgccccggtgaacgagataattgggagagacatgtcccagatttctgtttccc

SEQ ID NO: 507961 - DNA, 50 bp, Homo sapiens
cggaggacctacgccggcctgggcacttccgttccggcgcccctccggtc

SEQ ID NO: 507962 - DNA, 83 bp, Homo sapiens
cccccaccccgagtcaaagcgctgaaatgagccccgcggcagacaatgcagatcttcgtgaagactctgactggtaagaccat

SEQ ID NO: 507963 - DNA, 100 bp, Homo sapiens
gacgttttatcaaatgaagaagtagcagaagcaatcactcagtttcttcctaactgtgatccagatgatcctcacaggctcccacatcaggacgagaagg

SEQ ID NO: 507964 - DNA, 51 bp, Homo sapiens
agcgactgagtccgcgatggaggtggagatgttacagccaaaaatatctgg

SEQ ID NO: 507965 - DNA, 100 bp, Homo sapiens
ttccaagctagagaggtcagaggagtgaaagctggtggaatgcgaattgtgcagaaacacccacatacaggagacaccaaagaagagaaagacaaggatg

SEQ ID NO: 507966 - DNA, 75 bp, Homo sapiens
ctttgaagaggagaggaaactggcccagtagtcctctcctccccaaaaagagatcttaaattattttcattttaa

SEQ ID NO: 507967 - DNA, 90 bp, Homo sapiens
atcggaagagtcttcggcatcgggcgacagcaggtcacagtggacgaggtgttggcggaagccaagagtcgaagctaaaccagaagttca

SEQ ID NO: 507968 - DNA, 97 bp, Homo sapiens
accccaaggccaacagagagaagatgactcagagccccggagctatgtggagtctgtggcacggacagcggtggctggaccccgagctcaggactct

SEQ ID NO: 507969 - DNA, 100 bp, Homo sapiens
cagcttggtcttgctctctgcctcgtcccaatccccggctcttaccaaatgcaggaagaaatgttggctatttggcgatgagaggtggtgaacagtgacc

SEQ ID NO: 507970 - DNA, 83 bp, Homo sapiens
gatcttgtgtgctccatagtttatcaaaaggtccctgtgcgttttattgcgacctgccggtgggaactttgtctccgagtcgg

SEQ ID NO: 507971 - DNA, 75 bp, Homo sapiens
ttaaaaacatcatggatcaatctcaaacaaaggcacggaatgttaacactggtgaattagcagcaattaaagtaa

SEQ ID NO: 507972 - DNA, 100 bp, Homo sapiens
aggagcctgccgcgagtgctgacggccgccatggcatcagatgaaggcaaactttttgttggagggctgagttttgacaccaatgagcagtcgctggagc

SEQ ID NO: 507973 - DNA, 74 bp, Homo sapiens
gtagaaggaacgcctcttattgatggaagaagactcaagtatagattaaatggcaaacgaatgcacgtgcagtt

SEQ ID NO: 507974 - DNA, 100 bp, Homo sapiens
agttattaaagagggtgtacgggagtttcttggtaaatccagaatcagactctcaaagatgaagacttttgtaaacgtgtatctttggctactgtggata

SEQ ID NO: 507975 - DNA, 50 bp, Homo sapiens
ctaggattaaattggtttcctaaacttcacagagaatgcagttgtcttga

SEQ ID NO: 507976 - DNA, 51 bp, Homo sapiens
tccgccaccgtgcacatccgaatgggtaaagtgttgagagaggagaaccag

SEQ ID NO: 507977 - DNA, 100 bp, Homo sapiens
ttggcccgcctaaggcactgggtgtacctgctttgcttctctgcagcctccccttccgtgccctctcccccccttgcagaacaagaccgcgaaaggcagc

SEQ ID NO: 507978 - DNA, 100 bp, Homo sapiens
agcatctctgtgcattcagaagagaagaacatttctgagtcctcacgaaactatttcagaagggaatttgaaggagaagaagaatatctggagatccttg

SEQ ID NO: 507979 - DNA, 98 bp, Homo sapiens
ggctgaaggaggaggacaaagagcccctcatcgagctcttcgtcaagctcgatgcattctatttctcatcatttggctcataactggaggaaggcacc

SEQ ID NO: 507980 - DNA, 74 bp, Homo sapiens
ctccaggaaaatacacctgttgttgaggcacaagtgatccttatgtgaaatttaagctgaatgggaagacgctg

SEQ ID NO: 507981 - DNA, 50 bp, Homo sapiens
gaacgcggtctgcaagctgacgtatgttttgtacatcaggaagaagaaga

SEQ ID NO: 507982 - DNA, 100 bp, Homo sapiens
gtacaatgtcagtgtttacactgtcaaggatgacaaggaaagtgtccctatctctgataccatcatcccagttttttggaccatatacaaacaacactct

SEQ ID NO: 507983 - DNA, 101 bp, Homo sapiens
ccggagaggagcatgaatggagcaaaatggcggatcatgtgcaggtccaactggcccaccttcaacactccctctaagcacccagacctctagtggcagct

SEQ ID NO: 507984 - DNA, 82 bp, Homo sapiens
tgctttttccttttgttgctggcggctgccggtgctcgggccgggggatacgaggtcgggaaagaggttaaagaagacacgc

SEQ ID NO: 507985 - DNA, 88 bp, Homo sapiens
gtggtcctcacatgacaagatgctggcacaacccctcaaagacagtgatgttgaggcctcgaaggagctccagcaagcccagacaacc

SEQ ID NO: 507986 - DNA, 98 bp, Homo sapiens
cgaacggctcccacagccgggcgttgggggaaagtgaacagcagagaatttcaaaggaccttgctaatatctgtaagacggcagctacagcaggcatc

SEQ ID NO: 507987 - DNA, 50 bp, Homo sapiens
gacagtcacaattttgtaataaggtgatcgccatgatcaaaggcctgcag

SEQ ID NO: 507988 - DNA, 74 bp, Homo sapiens
taacagcacaaccaaaattgattgttcattgtaaggttctgcggcatgaggaatttgaagaaggctgcaaagct

SEQ ID NO: 507989 - DNA, 75 bp, Homo sapiens
cccccgccgcagcagcaccggcgacagtgtactaatggtcacttgatgtgcgctggctgttttatccacctacta

SEQ ID NO: 507990 - DNA, 100 bp, Homo sapiens
ttggagggagagatgcaaataccaggtcatcatcagatttgaaatatttaaagtggatacaaaactatttcagcaatgcagacaattaagtgtgttgttg

SEQ ID NO: 507991 - DNA, 75 bp, Homo sapiens
agggattggagatggccaagcatcaggcagctggtgatgctatttctgacatgctggtgattgaagcaatcttgg

SEQ ID NO: 507992 - DNA, 123 bp, Homo sapiens
ctctgctctacacactggtgtctcctgcggaagggcagctgggcacgccttccagaccgagctgggatctagcaattgggaggcagcagacttgggtaatgaagagagaaaacaaaagttctt

SEQ ID NO: 507993 - DNA, 100 bp, Homo sapiens
gtattctcttcccagcagagacagcaccaggggtcagcagggggccagctcaggacacacagacccagctggaactcgggcttaaaagacaaccttcttg

SEQ ID NO: 507994 - DNA, 100 bp, Homo sapiens
atcaagagcctctttgcagaatttgctgttcaagctgaaaagaaaattgaagttgtaatggccgaacccttgtcgacagaggtacgttcttggagacaca

SEQ ID NO: 507995 - DNA, 100 bp, Homo sapiens
acagagtgcaagacgctgagcaatgcaggactcagtgacctttgaggatgtggctgtgaacttcacccaggaggagtgggctttgctgggtccttcccag

SEQ ID NO: 507996 - DNA, 100 bp, Homo sapiens
caccaatccagaggagatcctcagaggggagacccctcgggtggaagaagtggggccatacacctacaggtcactcagttgttcagaaagaggccaagaa

SEQ ID NO: 507997 - DNA, 100 bp, Homo sapiens
ctcttgccaaccatgaatattttgcactccagcatgccgatagttcaaacttctatatcacagaaaaggtgtcttctctttagggatggtgaggttggaa

SEQ ID NO: 507998 - DNA, 75 bp, Homo sapiens
cacccagccgcgagggagggcagcggggccgaagggagacctgaggctgctctttggcgtaaattgcaatcgatt

SEQ ID NO: 507999 - DNA, 96 bp, Homo sapiens
ccgatgtgtgagaagaccaccatcaacaatgagtacaactaccgctgctggaccacaaaccgctgccagaaaagaaccctaaggactctgcaatat

SEQ ID NO: 508000 - DNA, 130 bp, Homo sapiens
agtctccatgccacgaagcaggaagggagatgcagcatcccagtttttggtcttctgtcaaaaacacagggatgagctttaccactcctgaaggccctaaaccccgttccagatgctctgactgggcaag

SEQ ID NO: 508001 - DNA, 88 bp, Homo sapiens
gggccctggcggtggacgagcaggaagctgcggctgagtcgaatgtgacagtgatgataacatgggtgccaaaaatacttcaatagga

SEQ ID NO: 508002 - DNA, 50 bp, Homo sapiens
ggcgcgcccgcggagaggccggggtttggtgcacctcgatttggaggaag

SEQ ID NO: 508003 - DNA, 100 bp, Homo sapiens
gccaagcacgccgtgtccgagggcaccaaggcggtcaccaagtacaccagctcgaaaaagaggagcgtgtctctgaactgcgccatcaactccagtctcg

SEQ ID NO: 508004 - DNA, 75 bp, Homo sapiens
caaagatttactttcccatccgtgactcctggaatgcaggttcattgtctgagatcagttgataacttatttgtg

SEQ ID NO: 508005 - DNA, 80 bp, Homo sapiens
ccgcggtggatacgtcgccatcttggatccgcgggacaagaaaattcatgcgtgtcctgggtcatgaaacttaatccaca

SEQ ID NO: 508006 - DNA, 100 bp, Homo sapiens
catatgtgcaagaccagagcgaagactgcctatatttaaatatatatgtcccgactgaggatggccgggtgagagcaaaactttcagcaccacttgctgg

SEQ ID NO: 508007 - DNA, 80 bp, Homo sapiens
aactgtcattttgggactgctgtgcctcctcctcctgtggtggaggagaaggaaaggtggtcttttggtgccttaatgaa

SEQ ID NO: 508008 - DNA, 100 bp, Homo sapiens
ccacgactgggatcctacgtgcatgaagatggacgaggtcctgtacagcatcgccgagaagttggttgaatctggcgatgtggaacccatggatatggag

SEQ ID NO: 508009 - DNA, 83 bp, Homo sapiens
cccgactgcagctccgtggatttcagtgtcttttctgcctgctcagttccagttgtcacagcactccgctggtccaggcggca

SEQ ID NO: 508010 - DNA, 100 bp, Homo sapiens
catttgctacagcatcccacattaagtcaacgctttccaaggaatcccttcaatctgtggatgtcctccgagaggaagtgagtgagatcttagatgaaat

SEQ ID NO: 508011 - DNA, 101 bp, Homo sapiens
cagccgatccagcctgcggagcctgtggggcaggtcagtcaccacgaacaggggcactcggcatgctgccccagcactggagaagcagcgctgtgggggca

SEQ ID NO: 508012 - DNA, 100 bp, Homo sapiens
cgctctggacacggaggtggccagcaatagaatctactggtctgacctgtcccagagaatgatctgcagcacaaacggcggcgtattgctctgaagaagc

SEQ ID NO: 508013 - DNA, 82 bp, Homo sapiens
caaccaccgccctggccatctaccatgtggagcatcagatccatgctgctgctgactcggagccccacagcttggcacaggc

SEQ ID NO: 508014 - DNA, 87 bp, Homo sapiens
gaagaaggcagtacattttgggttaccgttgccactctaaattcagaagaggagagcgaccctccaacctacaaggatgccttccct

SEQ ID NO: 508015 - DNA, 101 bp, Homo sapiens
gcagaagtaagtcagaccaggttgaaaacaatcctcgaacaggaaatcttggtgcactaattaaggtcttcctttctagaaccaaagaactaaaactttca

SEQ ID NO: 508016 - DNA, 82 bp, Homo sapiens
ttcagaagaccgaagcgttcgtatctggaaggaagcgccgcggagccatcaacagcaagcagctcacctacctggagaaata

SEQ ID NO: 508017 - DNA, 50 bp, Homo sapiens
ggatgtgatgcctgctagccaaaagggtttctaaggtaaacggagtcact

SEQ ID NO: 508018 - DNA, 50 bp, Homo sapiens
tatctccggactctgccactctgaggtgccccacctcaaccagaatgcct

SEQ ID NO: 508019 - DNA, 75 bp, Homo sapiens
tttccgcccgcttcgatcgcctcgcgccggctgctctttccggaaggaagaggcccagcagaagggactcgctga

SEQ ID NO: 508020 - DNA, 135 bp, Homo sapiens
gcaaacatctgctgagaaagtacttcattgaagccagtcccttgcccagcagttatccgggaaaaacaaacatggtccaagacaattcctgggaaagttcagttcttctcaagtgagggttctgacacatctgta

SEQ ID NO: 508021 - DNA, 83 bp, Homo sapiens
ccatggcatgaaagacttggaccgccatctcagaatccacacggctgccgggccgcaagtacagccctgggtacaacaccgag

SEQ ID NO: 508022 - DNA, 100 bp, Homo sapiens
ccaagaaactcctggaactgatggaaaacacggatgtgatcattgttgcaggaggagatgggacactgcaggagaactgataaatttcaaacggaagaga

SEQ ID NO: 508023 - DNA, 50 bp, Homo sapiens
cccaacactgcatggagcggatccaggttgtggcagcactgcctgaaggt

SEQ ID NO: 508024 - DNA, 100 bp, Homo sapiens
gaccaacctggcagacagggagctggttcacatgatcaactgggcgaagagggtgccagtctgagaataaaggattagaaactaccaagaacaatgtagt

SEQ ID NO: 508025 - DNA, 87 bp, Homo sapiens
tcagtgagcaaggcatcaacgagtttctcaggtctatcagccacagtctctgcaagtttccaagagcagcagaaaatgaacacattg

SEQ ID NO: 508026 - DNA, 88 bp, Homo sapiens
tatgagaaccttttgacagaagatgagacaaccatatctgatggaaattcagttcatgaagataagaagtttcttgacaaatacatgc

SEQ ID NO: 508027 - DNA, 75 bp, Homo sapiens
cgctgcgggcccgggccatggccgccgccgatgccgaggttaaacccatccagagtaatggctgcggccttaccc

SEQ ID NO: 508028 - DNA, 100 bp, Homo sapiens
ggaagagacaggaagatggtgcccagcttggaagtctttttgcatgttactgttccactgaagtcactcaggcaatatgggatggatatctacaacaagc

SEQ ID NO: 508029 - DNA, 75 bp, Homo sapiens
ttcagtatatggttcccttgcatctgttctagcacagtatggaacccttcagatcaaagcttaccaataaattca

SEQ ID NO: 508030 - DNA, 98 bp, Homo sapiens
gcgcttccacctctccaccaccgaccgcgtcatcaaagcgggagatacagatgacccaccaagaattactcagaaccctgtgatcaatgggaatgtgg

SEQ ID NO: 508031 - DNA, 83 bp, Homo sapiens
cgcgacacggagactaggtggcaggagctgaagttgccctcctataaaggccagtcccctcagttaagtctcagacggtattt

SEQ ID NO: 508032 - DNA, 90 bp, Homo sapiens
ataaaattggactcagagtttccattgacactgatatggtgtccaaagacaggaggtggtctgtaaaaggttggatgacaactccattgt

SEQ ID NO: 508033 - DNA, 131 bp, Homo sapiens
aaccgatctcagccttgctgatcatctcgtacagcagcagaaaatgaccatgttacagtttcagagtcaagtggtgagatcaaagacttttcaccaaaaaatgtcatttatgatgactcatcccagtattt

SEQ ID NO: 508034 - DNA, 100 bp, Homo sapiens
catctatgaaatttagcacttttaatgactacgccttcctaacagctgaagaaaaaatcattttgccaagcacaacctccaagagggaaaacatttctcc

SEQ ID NO: 508035 - DNA, 100 bp, Homo sapiens
ggaattttgaagtacaccgtggtgacattgtatcattggtttttacagctcccagcacagtaggaaagagaaatttgagtcctagtcaagaggaagctgg

SEQ ID NO: 508036 - DNA, 100 bp, Homo sapiens
gttcctggtcgtggtcattgttgcttccttcttcatattgaagaacttcaaccccacagtagcagattttgaagcagtgggaagaatattctgtcttggc

SEQ ID NO: 508037 - DNA, 73 bp, Homo sapiens
tggactcccctaagggctgtggcactgtcctgctctccgccgcttacaaacacgcagatggcaagaagattga

SEQ ID NO: 508038 - DNA, 98 bp, Homo sapiens
ttattgtggttcctgctgtggttttgatcatgttgttaccctcggacgtagcccggcttgtattggtgatccgtatgtgaaactttcattgtacgtag

SEQ ID NO: 508039 - DNA, 100 bp, Homo sapiens
ttgggactcattggaaattgtacagtgacatcttctgggatttagtctgttttttgctccactcaagcctgttagaatcaccatggaatacagctccagt

SEQ ID NO: 508040 - DNA, 100 bp, Homo sapiens
ctccaagtttaaaagaactacgtgttttatccaacaggtttattcttcagtccaaggaagcaattcacagtcagctgttagagaagcagaaaatagcaga

SEQ ID NO: 508041 - DNA, 100 bp, Homo sapiens
catgggcggcaactctttgatgtactactataatgggaaagcgattttaagagtaatcttcacaaagtgtaccaggccatagaggaggccgacttcttcg

SEQ ID NO: 508042 - DNA, 100 bp, Homo sapiens
ttcatgagtgctataagatgcgactgctacagggaccatgggacactattacgcaacaggtccaaagaggactggtgatctacgtgtgctttttcaaggg

SEQ ID NO: 508043 - DNA, 100 bp, Homo sapiens
ggtcaagaacctggagaaggaactagcactactcaagcaggagctggctatccatgacagcctgcaacccaaggagatctgtgcgctggttgggttctgt

SEQ ID NO: 508044 - DNA, 100 bp, Homo sapiens
aaaaataagaaaaacagaaaaataataattacatctgcaaagaccttatttccagggcgaactttctgaccaagtatacaactacccagagggcctagga

SEQ ID NO: 508045 - DNA, 100 bp, Homo sapiens
ctgctctatgcggccggatggtcacctgaaaagcaggcccagcacctgcccctcaggcttccaactgaatatgagaggaacgggagatatgagggctcaa

SEQ ID NO: 508046 - DNA, 90 bp, Homo sapiens
gtctccgcggtggaggtctgcgttgctcttgcttttcctcgctggggtgtacgccctggcttgaaaaacagtccaattgatgaaagtgag

SEQ ID NO: 508047 - DNA, 98 bp, Homo sapiens
tataatcaagtaaaaacaatagctcaaggaaacctttccaacacagatgtccaagctgccaagtttttgaccaatatctcaattttattactttggaa

SEQ ID NO: 508048 - DNA, 74 bp, Homo sapiens
attgatgacgatgctcacctccgccatgacgaaatcatgtttgggttccgtttgctggaaaccatgtctcatta

SEQ ID NO: 508049 - DNA, 100 bp, Homo sapiens
gtagtcctggcgccccgctggaggagctccccagctggtggctggagcgaccccttgttctttggtggcgctgtgttccttgcctgtatctccccttggt

SEQ ID NO: 508050 - DNA, 101 bp, Homo sapiens
ttgaattggtggaacttgttggaaatggaacatacgggcaagtttataaggatttaggtcctgaatatgaaggtatatttaacacttcattgcagtggatc

SEQ ID NO: 508051 - DNA, 50 bp, Homo sapiens
ccgagcaggaggcgccatcatggggaagaggctgctgggggtgacaggct

SEQ ID NO: 508052 - DNA, 100 bp, Homo sapiens
tccgccgcgatggtgacccggttcctgggcccacgctaccgggagctggtcaagaactgtcaaggagaagctgcgccttgatcctgacagcgagatcgcc

SEQ ID NO: 508053 - DNA, 90 bp, Homo sapiens
tcgtgaaactcaagctttgatcttggctcccacaagagagttggctgtgcagatccagaagcccccttacccaggaatggaacaacctcc

SEQ ID NO: 508054 - DNA, 75 bp, Homo sapiens
atgattctgatgatgatgatgaggactttttttatgaagacatggagtccttgacgcagatgcttagggccttgg

SEQ ID NO: 508055 - DNA, 98 bp, Homo sapiens
catgctgctctcctgccacttccggggggaggtctgcagcgctgaagacttcaaggtggtatcgaaggatgatcgcagtgatgtggagagcagctcag

SEQ ID NO: 508056 - DNA, 90 bp, Homo sapiens
gtctgtgacagtaacagtacttgggatcccccagttccaaagtgtcttaaagtgagtgatagttgcttcaggaatcttgcagaagaccgc

SEQ ID NO: 508057 - DNA, 100 bp, Homo sapiens
gcgagggttgaagattgtgaagcaatagcctaaggttgtccaagaagccctggacaaagccagagaaggccgcacctgcattgtgattgctcaccgcctg

SEQ ID NO: 508058 - DNA, 90 bp, Homo sapiens
cgcacgcccaggaggagcaagtccgatggagaggctaagcgacaagagaatgattcaacgaagaatgaaataaaaattgaaacagaatcg

SEQ ID NO: 508059 - DNA, 100 bp, Homo sapiens
acatggacgatggtcgtcactccccgcctatggtcaaaaatgctactgtgcacccaggcctggagttgccatgcactgtgctgtgttgcgggaagtcagg

SEQ ID NO: 508060 - DNA, 87 bp, Homo sapiens
agatgatggtgccagggatggaaggcaaagaggaggcgggctgcgtgcacttcccccacacggcgccctgtgaggtgcgcgtgctca

SEQ ID NO: 508061 - DNA, 100 bp, Homo sapiens
aaaagctgtccgcagaaccagccctgcaggtactttaggagaaaagccagtcaactcctagtaataacaggggtctgcccacggaccggtacatgtggag

SEQ ID NO: 508062 - DNA, 100 bp, Homo sapiens
gactccgaagcccagcggctccccgactccttcaaggctccagcggcgccatgagcaaatgaaaaagaatttggaagcacagcacaaagaattggaggaa

SEQ ID NO: 508063 - DNA, 83 bp, Homo sapiens
ctgaccctggctgactgcaatctgttgcccaagctccatgtggtcaagataaacaggggtcacatgacgacagaagccaagag

SEQ ID NO: 508064 - DNA, 97 bp, Homo sapiens
gtgtcccaccgcaaggactggagaaggggtcgacaagtgcccccaatgatttatggtacaacttcattgaactgccctaccacggggaaagcatcag

SEQ ID NO: 508065 - DNA, 75 bp, Homo sapiens
tggatcagtttctttgtcatgtagccaagactggagaaacaatgaacaagctgaaagctggatacctaatgtcag

SEQ ID NO: 508066 - DNA, 82 bp, Homo sapiens
tgacgggtctggagtgcgtgggggaccggctgttggcggatcattgagaagcagccaggccacattcggagcagggttttca

SEQ ID NO: 508067 - DNA, 100 bp, Homo sapiens
ttccctcaagtgtccagaatttccaattacagacgacaaagtagcactggtgaatcttggaagcaaccagtaccttttctctgtcatagtggatcctaaa

SEQ ID NO: 508068 - DNA, 100 bp, Homo sapiens
gtttcctcggcgtggggcggaagcacgatctccggcagcggcctgggaactcttagctgagcaggcgagagttttgagtatccgaggagcccaggaggag

SEQ ID NO: 508069 - DNA, 97 bp, Homo sapiens
accttgacctcgtcatgaacctcatggatgcacacaaggcactcttaaaagacccattttacatgggcttgtaccagaaacgagatcgcacacaaca

SEQ ID NO: 508070 - DNA, 140 bp, Homo sapiens
gaaagcgttggagaggtgttaccggaacggcggcgacaagggtgttcccgaactagagtgggatagagggaggaatcagcagcttggaaattcaagcacgtgatctggcgggatgggcgtttgcctaacgtatttaatgg

SEQ ID NO: 508071 - DNA, 100 bp, Homo sapiens
gcctctactgtgtcttcttcggctgtttcacaaagaagcatattcacgagcatgcgaaggcgaagcggcacaacctggattgtcttcgcagttttaccga

SEQ ID NO: 508072 - DNA, 89 bp, Homo sapiens
caattacgagaagaggttctgaacggtctttccaaatcatacagtgaagagagtggaggattccagtagcaatgggcaggcacatattc

SEQ ID NO: 508073 - DNA, 100 bp, Homo sapiens
gcccgggcccgcccatcggggtccccaaccccatccggaccccgccgcccgagcgcgcggccccggaagcacccggggatcctcttggtgtatgacatca

SEQ ID NO: 508074 - DNA, 99 bp, Homo sapiens
ccgctccccgaggccggccgcctggtcatggcgcagccgggcccggcttcccagcctgacgagctcttcagtatccccatcagccagtttccgaggtgc

SEQ ID NO: 508075 - DNA, 90 bp, Homo sapiens
ggcgaggcctagaagggtggccggacagtatgatgagctgccgcactacccaggcatcgtggatggccccgcagccctggctagcttccc

SEQ ID NO: 508076 - DNA, 90 bp, Homo sapiens
gcccctcccgcccgcaactccgccgcccaccatggcttccgaggagctgtacgagttgactatattgtggagtatgactatgatgctgta

SEQ ID NO: 508077 - DNA, 99 bp, Homo sapiens
gggctgtttggaaagacccaggagaagccgcccaaagaactggagatgcctacatagaagagtgacagcagctagactaaatgtttaactgctgaacta

SEQ ID NO: 508078 - DNA, 100 bp, Homo sapiens
agcccggccccgctgagcgatcccaccgaagcagcgtgtcctccgtgggagcccgagagctcccagctcctccagcagccgacaggaggcccgtcaagat

SEQ ID NO: 508079 - DNA, 95 bp, Homo sapiens
aaggattccaagtaactcttatttgttggcttcctgaggctcaggtagtccaaagagccctgaattctgcggctaacaacgtgtatcagtatgga

SEQ ID NO: 508080 - DNA, 74 bp, Homo sapiens
ctcccaagtggctgggattacagagggctgaacatgtccgagtttgtctgtaacctgtcagcaaggccttatgt

SEQ ID NO: 508081 - DNA, 90 bp, Homo sapiens
ctgagcgatatcacagaacacaagattaatcaatgtcaactgacaggaaattcagttcatgaagataagaagtttcttgacaaatacatg

SEQ ID NO: 508082 - DNA, 50 bp, Homo sapiens
caggccctggagtgcatgcgcagcaccaaggatgacattgatcttgatgc

SEQ ID NO: 508083 - DNA, 100 bp, Homo sapiens
ttctttacttcccaaaacatcctggaatatccctcagcctggtgagggtgatgttcgggaggaggccttgtccacagcatcctgaggttagcattacact

SEQ ID NO: 508084 - DNA, 50 bp, Homo sapiens
ggagagaaggggatacgggtgaaatgtgattgataacagtaaagccacac

SEQ ID NO: 508085 - DNA, 75 bp, Homo sapiens
atggaagatcaactttatataattggcagtgatattgagctaatggaagtgaaagtacttagcattgatcaaaga

SEQ ID NO: 508086 - DNA, 75 bp, Homo sapiens
agttgaaacagttacactgcttgtagctcttaagctcgaagagtgtggaaaaactaccttcctgctatcaatggc

SEQ ID NO: 508087 - DNA, 50 bp, Homo sapiens
ggcggacagattgaccttcagagcgaggtaccgctagagcgacatgatgg

SEQ ID NO: 508088 - DNA, 100 bp, Homo sapiens
aggcactcagctcaaatacacacacctgttgccattatagagctggaattaggcaaatatggacaggtgcaatggatgagcttcatagtctggatccaag

SEQ ID NO: 508089 - DNA, 96 bp, Homo sapiens
ggattatacattgtaagaggtgacaacgtgattaaactgcaaatatctcatgaagctgctgcctgtatcactggtctccgggcagccatggaggct

SEQ ID NO: 508090 - DNA, 76 bp, Homo sapiens
aaacctcctgcaaaagtggaagcgaagccgaaaaaggcagcagcgaagatatttaagctatggttccggtcccaaa

SEQ ID NO: 508091 - DNA, 101 bp, Homo sapiens
ggaatatggcgctcttaggcagccgagcggagctggaagcggacgagatgccttcaattaagttgcagagttctgatggagagatatttgaagttgatgtg

SEQ ID NO: 508092 - DNA, 100 bp, Homo sapiens
cttttggggggaaactaggtcgatggtcggcggcgcccggatgggcagctgagttccatacgttttgaagagctgtgcagaatttatagagactcacggc

SEQ ID NO: 508093 - DNA, 82 bp, Homo sapiens
gaaggaggttgccgacgccatcaggctcaacgaggaactcaaagtggatgaggaaaatgatatcatcaagttgaatcgaaag

SEQ ID NO: 508094 - DNA, 83 bp, Homo sapiens
tcgggatatcgggtggcggctcgggacggaggacgcgctagtgtccaggtgcaggtacagcagtctccgcaacaggtctcggc

SEQ ID NO: 508095 - DNA, 100 bp, Homo sapiens
gtgaaagctttctgcccagagctcctggaccaatgcatcttcccaccaccttaaaccactgtatgcctgtggcatcaaagccgaggtggtggggaagcct

SEQ ID NO: 508096 - DNA, 85 bp, Homo sapiens
agaggctggcagtggttggaagatgatgaccgtgaaccccgaccatcattgtctcatgaaaaccttctaattaatgaattaattc

SEQ ID NO: 508097 - DNA, 75 bp, Homo sapiens
gatgagtccactctggccttccagcaggtcatacagcagatggaacaaaaaaaattacaacaaggaattcctcca

SEQ ID NO: 508098 - DNA, 75 bp, Homo sapiens
gcgctggagaaatacaacatagagaaggacattgcggctcatatcaagaagatggatccaatttggaaatgaggc

SEQ ID NO: 508099 - DNA, 100 bp, Homo sapiens
aaggagcagaagtacgaccggcagctgagagagaagaagaaggaggttcctgctgtgccagaaacccttaagaaaaagcgaaggaatttcgcagagctga

SEQ ID NO: 508100 - DNA, 107 bp, Homo sapiens
cgtcctgcagaatcacgcggacatcgtctcctgtgtggcgatggtcttcctgctggggctcatgtttgaggtatcattgcccagtgcctaagatcttttatgttcag

SEQ ID NO: 508101 - DNA, 100 bp, Homo sapiens
ggatgcccagctgcaggccctgcggcccatcgagcgcgagtcagccggcaagaactacaacaagatccgagagcagaatttacaggacattaagacggct

SEQ ID NO: 508102 - DNA, 101 bp, Homo sapiens
agtgaagctggaaccatcagggaacatgagtgaattttggcacaaactgggctgctgtgtggtagagaaaccccagccggacacattcagctaacgtattt

SEQ ID NO: 508103 - DNA, 75 bp, Homo sapiens
cccgagtcccagaaggcggcgatcctgggctgcgggcaaggcgagttggtcaaacgccatgctggggtgctagga

SEQ ID NO: 508104 - DNA, 83 bp, Homo sapiens
agatggggcacccagagataggagatgctattgcccggctcaaggaggtgcaggtgatggtcctaccagtgtgtctgttgagg

SEQ ID NO: 508105 - DNA, 100 bp, Homo sapiens
caaaaattggctgccatctcagggtggtgatcgagtcggacctgtacacgcaccagcccctggagctgctgccccaccgcggagaccgcagggaccctgg

SEQ ID NO: 508106 - DNA, 82 bp, Homo sapiens
ggccagctgacggagatggtgcagaagatggaggagagaggtggagaagagcgagtacttgagaaagaagaggaagaagatg

SEQ ID NO: 508107 - DNA, 98 bp, Homo sapiens
tgggtcagaccctttgggttggcttcgtggctccacgacttactctctacccttggcaggtacaaacacaagtgcgccttgcaaaaaaaaactttgac

SEQ ID NO: 508108 - DNA, 86 bp, Homo sapiens
cccgcagctgcagccgcctgaccacggcgactggacttacgaggagcagtttaagcaggtttacccaaggtccagcctagccccta

SEQ ID NO: 508109 - DNA, 89 bp, Homo sapiens
cctccacgttgccctcaaagccctgcattccagaggctcctgatggaaagggaaggcccctagtcctggcaggatctgccggccccaac

SEQ ID NO: 508110 - DNA, 74 bp, Homo sapiens
cagagacccaggagctggtgcagcaggtcctcagtttggccactcaggacaaggagagcatccagcgagtcctg

SEQ ID NO: 508111 - DNA, 100 bp, Homo sapiens
cggcaccatgggccgggcccggcgcttccagtggccgctgctgctgctgtgggcggccgcggcggggccagtggtccatgctgtggacggcaccgccgag

SEQ ID NO: 508112 - DNA, 83 bp, Homo sapiens
ctcaagcatttcaacgtgcgtgtcacccacgcagacatcttcagccgctgccagggagtgcatccgccccaacccttttcccc

SEQ ID NO: 508113 - DNA, 50 bp, Homo sapiens
cggtttcagcgtccagaatggaattccacaatggtgcgcatgaatgtcct

SEQ ID NO: 508114 - DNA, 100 bp, Homo sapiens
ccacttgacacatcagtgaaggagaaaatatcaatgttctgccatgttgagcctgaacaaaggaaacctcggactttgctgaacccaccacctgcctcac

SEQ ID NO: 508115 - DNA, 75 bp, Homo sapiens
cgagtttgtcatcatgtgagagagaataggtgttgacttcaaaatcaaaactgtagagctaagaggaaagaaaat

SEQ ID NO: 508116 - DNA, 80 bp, Homo sapiens
tcccaggccacaagacatttcctgctcggaaccttgtttactaattttgatattcactgatggactccaaagaatcatta

SEQ ID NO: 508117 - DNA, 82 bp, Homo sapiens
agaaaggagctgcttcccaataaggaaacagtgtgggcaagagcagtttactgttgcgttttgcagacaacactttctcagg

SEQ ID NO: 508118 - DNA, 74 bp, Homo sapiens
cgaggagtacgagacgaggttcctgtgcaactcttcacagggttacaagtgtataacaagtgttggaagtttga

SEQ ID NO: 508119 - DNA, 100 bp, Homo sapiens
gcagcgacagagccaaaatcagagctggaacctgaggagagagaggttggaaagaaccatgactgtattcaggaaggcacatgaactgaagcttctgtca

SEQ ID NO: 508120 - DNA, 100 bp, Homo sapiens
ctgttggtttgtggaacagacagctccttctttattgatatggtccggaaaaagaacccccctctgagaaacgttgcaagtgaaggcgagggccagatcc

SEQ ID NO: 508121 - DNA, 82 bp, Homo sapiens
cctcgcggcatggcgtcggaggggccgcgggagcccgaaagcgaggcaccacactgtaactcgaggcatcaccaaaggcgtg

SEQ ID NO: 508122 - DNA, 74 bp, Homo sapiens
gggcttccgcctcgcggccctgggccctcaggatgactatcctccctccagtggagaagctgaaaacggtgctg

SEQ ID NO: 508123 - DNA, 82 bp, Homo sapiens
ccctgttccccgcgctgcggcctggcggcttccaggcgcactaccgcgggcgtctctggccgagcctctttttgtggaaaac

SEQ ID NO: 508124 - DNA, 101 bp, Homo sapiens
cccgaataccaccccgacgcctcagcccaaggcttatcaggagggcagacttcaaaagctactaaaaatgaacggccctgaagatcttcccaagtcctatg

SEQ ID NO: 508125 - DNA, 50 bp, Homo sapiens
gaaaactgtgggctcctggtatctctggtgggccaccaccatcctggaca

SEQ ID NO: 508126 - DNA, 89 bp, Homo sapiens
acaggactaaactgaagaagacacctactgaggctgtatcagtgtcatttgaggatgtgactgtggacttcagtagagaggagtggcag

SEQ ID NO: 508127 - DNA, 50 bp, Homo sapiens
gaatcctcccctgccccttggctcaaaggcggctggactctattacctgg

SEQ ID NO: 508128 - DNA, 82 bp, Homo sapiens
tgggatacgccagccacagtggcatccccaacatcatcctcacaggtcactgcagccagaggggtccagaagagagaggagg

SEQ ID NO: 508129 - DNA, 100 bp, Homo sapiens
agaaggccggggccggccagaagcgggcggcgcgggggagatggaagaaaacaggcagattttggcgcggcaaaagtcaaactcacagtcggactcccat

SEQ ID NO: 508130 - DNA, 86 bp, Homo sapiens
tctggaactaatgtcacagcatggatgtaatgcctggaaagtatacaatgactatgcttctggtgaagtatttgagggctgttttc

SEQ ID NO: 508131 - DNA, 75 bp, Homo sapiens
gagatgatcctggcggattttcaggtgccttagctggaccaattattgtggagccacatgtcacagcagtatggg

SEQ ID NO: 508132 - DNA, 83 bp, Homo sapiens
ggaaatggctgcgagaccctagaggcctgcggcctgcgatgccatggacaatattaccaggcagaaccaattctacgataccc

SEQ ID NO: 508133 - DNA, 128 bp, Homo sapiens
gtcctcagaagcatgtgtcttccccagctctgcagccacatactatccgtttgttcaggaaccaccagtgacagaaggagaggagacgccgtgagcgggacgaccagatgtaccgagagcggctgcgc

SEQ ID NO: 508134 - DNA, 75 bp, Homo sapiens
gaccaccgaggctggagggggagaacacccaggtgcgtgccctggaggaggccaacactgagctggaggtgaaga

SEQ ID NO: 508135 - DNA, 75 bp, Homo sapiens
ctcatcgattcctacgagtcttctagcttcatgttcctggtgtttgacctcttgtctttaaccgaactgtcacac

SEQ ID NO: 508136 - DNA, 50 bp, Homo sapiens
gggcagcggccagccgggaaattctctgaaagccactcggaatttctcca

SEQ ID NO: 508137 - DNA, 75 bp, Homo sapiens
acaaagcattctttgtatgccaattaagaatcatagggaagaggaagatgatcaccttgccaaggaagcatcatg

SEQ ID NO: 508138 - DNA, 90 bp, Homo sapiens
gcgatacccaaggcagacattcaacacctttacatttagcagacatttgaagacagtgatttgttccatttgattggtgttatctgtggc

SEQ ID NO: 508139 - DNA, 74 bp, Homo sapiens
gaaacctctgcgccatgagagccaagtggaggaaggccctgtcttcgccatgtgcatggcgggtgctcatgacc

SEQ ID NO: 508140 - DNA, 92 bp, Homo sapiens
cttccgacgtgggcggtgggccccagccccacagaccagcccagcattcaggcagcttcggtcacctctctgtccaacctggcatgcatgca

SEQ ID NO: 508141 - DNA, 83 bp, Homo sapiens
gttcggtcctgctgttgcggccgctgccccagggctgcggggacgattttgcaagaacgaggctcaaggatgtgagggacaca

SEQ ID NO: 508142 - DNA, 95 bp, Homo sapiens
tgtaccgtgatgtgacgctggagaacctggcacttatgtcctccctgggagcgagaacccgagcagcgccatgagcaacactaccgtcgtcccca

SEQ ID NO: 508143 - DNA, 100 bp, Homo sapiens
gcgtggggctgcctcgccgcgtctcgccacggagcatcagatccatgctgctgctgactcggagccccacagcttggcacaggctctctcagctcaagcc

SEQ ID NO: 508144 - DNA, 100 bp, Homo sapiens
gttgatgaccagtctttcccatatcagagcatcacttttcctgagttaagcaataaagttaatttggagtggcccctggagtcagtttcctacaccatcc

SEQ ID NO: 508145 - DNA, 100 bp, Homo sapiens
atcgaggctgccatgccggagtgtgaccgggacagcgggcagtgcagtactatactggcaattgctggagaagattttgcaattgttgcttctgatactc

SEQ ID NO: 508146 - DNA, 101 bp, Homo sapiens
tacgcaaacttttcagagggagcttgcaagcctggctatgcttcagccttgatgacggccatcttcccccggtaagaatgattgatgttggctgatattgg

SEQ ID NO: 508147 - DNA, 96 bp, Homo sapiens
aagggatactggttcgtccttactgcggaaagcttgtcctggtataaagatgatgagatgactttcacacgacctgccaatcacagacaactcact

SEQ ID NO: 508148 - DNA, 93 bp, Homo sapiens
tgcacgcctacaaattcttctttaagtccatggaccaggacttcggcaaacggggattcagcgtccgatcctttggaacagggactcacgtga

SEQ ID NO: 508149 - DNA, 98 bp, Homo sapiens
ccgaggaatccgcctgcccgcccaggcgtcggccacgagagagcgggagcctcgctggtccccatttcagggtgtcaaattgagaaccaggtagatcc

SEQ ID NO: 508150 - DNA, 98 bp, Homo sapiens
gggccgacatcaagagctgcgagatccaacagatcatgcatgcattttcagttgctccttttgaccagaatttgtcaattgatggaaagattttaagt

SEQ ID NO: 508151 - DNA, 100 bp, Homo sapiens
acttactccaaaatgagtctacagttataccaagtggatagtagaacttatctactggatttccgtagtattgatggtgtcatggagaaactccagctgg

SEQ ID NO: 508152 - DNA, 90 bp, Homo sapiens
tgtcagctcagtgctgtgcgggccagtgccggtggtggtgtgcacattgagccccggtatagacagttcccccagctgaccagatcccag

SEQ ID NO: 508153 - DNA, 88 bp, Homo sapiens
gcgaaactctccaagctggccagcaacgggacccccatggggctcatccagtgaggactggaaggtgggggctttaggcccaggcatc

SEQ ID NO: 508154 - DNA, 60 bp, Homo sapiens
tatatcatggaaccctccatcttcaacactctgaagaggacgaatgccttagtttccact

SEQ ID NO: 508155 - DNA, 74 bp, Homo sapiens
gcgtggcttcctttggtgccagctctttgtctagggccatgctatgatagtggaagcttatccaaaataataga

SEQ ID NO: 508156 - DNA, 52 bp, Homo sapiens
ttttccaggaactgagggaagccacaggcattttccctgaagatgagatccc

SEQ ID NO: 508157 - DNA, 75 bp, Homo sapiens
ctggacctggagaagaatgagtttgggccccatggtatccctgtgacagtatttcccaaaagggaatataaggat

SEQ ID NO: 508158 - DNA, 82 bp, Homo sapiens
ccagcagccttgttagggcgtggcctgaggcttggataagtggggtctcggcgcggaagatggccggcggcgtggacggccc

SEQ ID NO: 508159 - DNA, 50 bp, Homo sapiens
tcttcttcgagtatttgtagaaggattcttacgctgtatgacagtattaa

SEQ ID NO: 508160 - DNA, 100 bp, Homo sapiens
caaaattccctatttggattgttggcagtgagactcacctcaccgtattttttgccaagattcagaccaggatgtagcactcaaacttgcccaggagcga

SEQ ID NO: 508161 - DNA, 126 bp, Homo sapiens
cagaaagcggcttatcgaacagagccgggagttcaagaagaacactccagagaaaaagcttgtggtgaaggggggcaaaaaaaagaagcaagttctgaagttcactcttgattgcacccaccctgt

SEQ ID NO: 508162 - DNA, 75 bp, Homo sapiens
agcccattgacaaaaaagccccgatcactggggtgatcctgctggctgttggagtctggggcaaacttactctgg

SEQ ID NO: 508163 - DNA, 75 bp, Homo sapiens
gaagagagttctggcctcaagagggaatgggtactgttcaaaaaggaatgccccacaagtgttaccatggcaaaa

SEQ ID NO: 508164 - DNA, 88 bp, Homo sapiens
gcaacctccgtgaggacggcgagaaggcggcgcgcgaggtcaagctgctgctgctcggccaccaccacctatcatgacagatggtgaa

SEQ ID NO: 508165 - DNA, 88 bp, Homo sapiens
ggagggccggagacgctgcagacccgcgacccggagcagctcggaggcggtgaagttgcaataaattgacagaccagaccctgatcta

SEQ ID NO: 508166 - DNA, 75 bp, Homo sapiens
aggaactgtcggaacagaaccaaaggctattggatcagctcagcagggtctctaattaacagaagatggcaaagc

SEQ ID NO: 508167 - DNA, 83 bp, Homo sapiens
ctcagctccgagtccagggcgaggagttaaagttcctcgtaattttcgcttgttggaagaacttgaagaaggacaaaaaggag

SEQ ID NO: 508168 - DNA, 100 bp, Homo sapiens
ggcaagtattgctgtgggtgctgggacttcccgtccgcggcgtggaggagttgtctgctggttctcagcttgaagaagattctgcagtccttattgatcc

SEQ ID NO: 508169 - DNA, 75 bp, Homo sapiens
gttggcgactgtgcttcaagcggtgtgttcatcctcgaggtggtgtgattcagagtgtttcttcatggaagcatg

SEQ ID NO: 508170 - DNA, 75 bp, Homo sapiens
ggaatgcatcagaatacacttcgtatcaaagagattcatggcctccccatggccacccatggaccagtcggcatt

SEQ ID NO: 508171 - DNA, 75 bp, Homo sapiens
aggattccaagtaactcttatttggtctggctctgggagaggagtggacagcagctggttgagatacatccccat

SEQ ID NO: 508172 - DNA, 90 bp, Homo sapiens
ctgcagagggacgtggcagctcatgtgaggtttataatgatgcacatatcctggagaagttactcaaggagaaaaggaaagagctgggcc

SEQ ID NO: 508173 - DNA, 96 bp, Homo sapiens
ccgaggggcttcataccagctgaagagcgacaagccgctggcagccgcggatctcaccgccgctcagggagaagactttgcagttgtgcagcaaga

SEQ ID NO: 508174 - DNA, 84 bp, Homo sapiens
tgtctctgatccgcaagcatgctcagaccttcattgctctgtgtgccaccggaactgtggctgcaccatctgtcttcatcttcc

SEQ ID NO: 508175 - DNA, 75 bp, Homo sapiens
ctagcttgagtgaaaaaagtaaagaagaaactggaataagtttacagattatggattggatatgtctacttctgg

SEQ ID NO: 508176 - DNA, 97 bp, Homo sapiens
gatcctttatcctggtcatcttctatttccaaagcgaggattaaatccaccacacagggtgaaatctatctccatgacaacattcacacaacaggaa

SEQ ID NO: 508177 - DNA, 100 bp, Homo sapiens
gccgacgtcaacgccgtagatgacctgggcgccaagcccatctttgtgtgcttgcatccaactgtgatgagcctatgtatgtcaagttggtggaggccct

SEQ ID NO: 508178 - DNA, 98 bp, Homo sapiens
ggcggtgaccggatattcagttgcacatccccacatcaatgcactgccaatgtcctggtacctgggctagcttggttcctttccaagtgtcaaatagg

SEQ ID NO: 508179 - DNA, 50 bp, Homo sapiens
ttttatgtcagtgccgagcaaggctgcctattcccaaacttgaagacacc

SEQ ID NO: 508180 - DNA, 100 bp, Homo sapiens
gggagaagagccatgggtcctcgacctgcagggagcagaggggacagaggcaccaaggacctccaagacagatctcttccaggatctaagtcacttccag

SEQ ID NO: 508181 - DNA, 75 bp, Homo sapiens
caggctcaggctctgctcagcgggaatgtcgttcatgagctaagaataaccaatcaggtaatctacttgaatcca

SEQ ID NO: 508182 - DNA, 100 bp, Homo sapiens
tgatgggtaaacaagaagaaagccaggctggcatcattccacaggctaatctagacgaaatccagatgagttcacctacattccttagagctttaatgac

SEQ ID NO: 508183 - DNA, 100 bp, Homo sapiens
gcggcagcggaaccggtgccagtactgccgctaccagaagtgcctggccatgggcatgaagcgggaagggtggatgtgaacactgaccggaagatcagtg

SEQ ID NO: 508184 - DNA, 98 bp, Homo sapiens
gcgacggtcgccgcccacggcgagtgtgattggtccagatagctgccttatccaactgcctcctttggaccacttcatcatgggacagcttgatgcaa

SEQ ID NO: 508185 - DNA, 100 bp, Homo sapiens
attatcctctgtttctctgctgcaccgacctcgacgtcttgcctgtgtcccacttgttcgcggcctatagcgacatctcgaatcagcgatgcacacttgg

SEQ ID NO: 508186 - DNA, 100 bp, Homo sapiens
gtctgctgctattctccgagcttcgcaatgaaaaagcttgtggtgaaggggggcaaaaaaaagaagcaagttctgaagttcactcttgattgcacccacc

SEQ ID NO: 508187 - DNA, 82 bp, Homo sapiens
gacaatttcttcttccaaaatcctcggattctctacttctgctgccaaagaggtgctgaaaaaatatttggagtccaaggag

SEQ ID NO: 508188 - DNA, 90 bp, Homo sapiens
gctggagcgtgtgcagcaccgagtcccggaggaggcactcaaggctgacgtgcccgagaagacgcggtccctgggaggcaggcagccgag

SEQ ID NO: 508189 - DNA, 100 bp, Homo sapiens
ttaattcgccaggatcttataaaacaaatgctgctgctatgaatatgggtcgaccattccaaaaaaatcgatattgaagcacagattcgagaaattcaag

SEQ ID NO: 508190 - DNA, 100 bp, Homo sapiens
acccggttccccggcccacagtgggggtgtgcaaacccgagagaactggatgactatgctcagctgtgtaacatccccgtgacgggacgccggcagccat

SEQ ID NO: 508191 - DNA, 75 bp, Homo sapiens
aactgccaaaggccctgcaaggacaaggtggatgctctccgattgcgtttggaagagaaggaaaccatgttgaat

SEQ ID NO: 508192 - DNA, 100 bp, Homo sapiens
tggtagttaaaggcccagatgataggaatcccatctcatttagtgatcagggccaaagcggtcagtgagaaggaagtggactctggaaacgacatttatg

SEQ ID NO: 508193 - DNA, 50 bp, Homo sapiens
taagcaatttgagagcaagatcataaagaaggtgtcttgctgcaggtaac

SEQ ID NO: 508194 - DNA, 100 bp, Homo sapiens
tgaagaagcatgatattgagctttacatgcacttgaacagactagaaattgcaccacagatatatgggttgagtcagagtattcatcgaaaagaaagcac

SEQ ID NO: 508195 - DNA, 100 bp, Homo sapiens
ctgttcagaccgcgctccgccgagtctcaaaccatgaattatgtgggacagctggctgggcaggtgattgtcactgtgaaggaactctacaagggcatta

SEQ ID NO: 508196 - DNA, 103 bp, Homo sapiens
ctttccaaaaggtcaaggttcacaaggactgagcagggggaggaacatttaagctgatggaagtggaagtggaagttgctgtacattggcagcaaggcctccg

SEQ ID NO: 508197 - DNA, 100 bp, Homo sapiens
cagctcccctcccactgtggctcccgcatctgcctccctgccccagcccatcctctctaaccaagagatccccctgtactttgtggacttgcaggatgac

SEQ ID NO: 508198 - DNA, 75 bp, Homo sapiens
gtttgtggataagacagtcccacagtccaggtggcaaagaaacacagcatgatgtttggaaatataattcttcga

SEQ ID NO: 508199 - DNA, 100 bp, Homo sapiens
gtgtgctggggcgacccttgctggagtggttcctctggagattaaatgtacttcacagaacctcagcgagcggactccagttatattccgtgctcttgtc

SEQ ID NO: 508200 - DNA, 93 bp, Homo sapiens
actgccgcctcctctcccgccgcggcggccggcgatagcccggcgctcatgacagattattcagagctgggagagcttcccccacgatctcct

SEQ ID NO: 508201 - DNA, 88 bp, Homo sapiens
tcttcgagatggttcttggtcctgcagcttataatgttccattgccaaagaaatcggctgggcttcccaatgatggttgtgtcctgca

SEQ ID NO: 508202 - DNA, 101 bp, Homo sapiens
agctgttaacacttcctagataacgggctcatctggggacaggtgacccttacacacctggattcccttccttcaatcacactcagtttccaccatctcgg

SEQ ID NO: 508203 - DNA, 75 bp, Homo sapiens
ctgctggacccaaggacatggtggtcggggatttgcttcctaaggagaagaacttggaaactctgttgaccttgg

SEQ ID NO: 508204 - DNA, 90 bp, Homo sapiens
taaaaagaaagaccttcatcacagcaatggagaagagaaagcacaaagcatggagaccctccctccaggaaaacgggccttactatacat

SEQ ID NO: 508205 - DNA, 82 bp, Homo sapiens
ttatttctttggagacaaaactatgccaatgcattgttctgggttggcatggcatcctgatgttgctactcagatggtcctt

SEQ ID NO: 508206 - DNA, 98 bp, Homo sapiens
tgcatgggactctacctgctgctgtccaggctggagtatgccaggatgtttcgtctgaactcactttctgctttggcagaactggctgtgggttctcg

SEQ ID NO: 508207 - DNA, 75 bp, Homo sapiens
gcctactccaaagcggccgggagtcgcgcttcttccccactcccgagacagactcctcagacccctgcacaattg

SEQ ID NO: 508208 - DNA, 75 bp, Homo sapiens
gggacttcccgtccgcggcgtggaggcagtgagcccaaagagatagttgaaaagtccaaaatcccaggccgaaga

SEQ ID NO: 508209 - DNA, 74 bp, Homo sapiens
ggaagatcctggaggtggatctgaagaacggacaccaactctacaacattacctgtcatatactgaagaatctc

SEQ ID NO: 508210 - DNA, 100 bp, Homo sapiens
ctaccatggtatttgctaacgtttagagagtgcttccccttgccgagcactggcagagcatcctggccagaacaagccaaggagccaagacgagagggac

SEQ ID NO: 508211 - DNA, 78 bp, Homo sapiens
gagttttgcccacgcgttgtaattaagcctcgcacaatatggttacattgattacccacctagtacaacatcttacgg

SEQ ID NO: 508212 - DNA, 75 bp, Homo sapiens
atgtgttactccattgctgaggagtgcaataagagctaactgccatcaagagccatcagtatgtcttcaagctgc

SEQ ID NO: 508213 - DNA, 75 bp, Homo sapiens
ctcaaggagtatgcccattacttcctagaggtcaccctgcaaggtggtggaagatggatatgaattttttgctaa

SEQ ID NO: 508214 - DNA, 76 bp, Homo sapiens
gacctgctaacagaactggaccttttcggatcatggggttgacagcagcattttccagaatcctaaaaagcttcat

SEQ ID NO: 508215 - DNA, 96 bp, Homo sapiens
ctgaatcctgcccgcgtgaaccacatgcccagcacggacaccattcgcttttcacccaagatgatttgatgtcttataaaactctgatgaaccatg

SEQ ID NO: 508216 - DNA, 83 bp, Homo sapiens
ctggattacaggccaaattagcaaggattacatggatcgtcttctagacgaaagtgaaagtgctgcatctagtcgagcaccat

SEQ ID NO: 508217 - DNA, 87 bp, Homo sapiens
gtgatacaatttgtcctctttttataatagttggtgatttttcactgacatcctcagaagaggaaagtggaaagcctttccagtgtc

SEQ ID NO: 508218 - DNA, 74 bp, Homo sapiens
gccgccacaccgccgctgcctcagtcatgccggaccaagacccctggacctggggcccagtcggccctcagagc

SEQ ID NO: 508219 - DNA, 98 bp, Homo sapiens
ataaagccagccaagatccttttccagcagccataattttaaaagttgctttgaatatggcaagagggttaaaggaattgcttcatgtttggctgttt

SEQ ID NO: 508220 - DNA, 75 bp, Homo sapiens
cttctggccaaggtgattcagattgcaacgtcatcctccacagctaaggatgttgcgcgaggttctccgctcgta

SEQ ID NO: 508221 - DNA, 90 bp, Homo sapiens
cggtgagcccgcccgcccgccggcccaggttcaagcactgtcttcctgttggccctgacaatcatagccagcacctgggctctgacgccc

SEQ ID NO: 508222 - DNA, 90 bp, Homo sapiens
ctggcagatgccggctatggcgaacaggaactggatgccaactctgcccttatggaattggacaaagacagtgatctgacacaaacacag

SEQ ID NO: 508223 - DNA, 50 bp, Homo sapiens
tcgtcttgtatctctaattggaagcactgtggaataatggcaacagaaag

SEQ ID NO: 508224 - DNA, 90 bp, Homo sapiens
taatagtaactctacatctggttctgctactagcaacccttttggtttagatgattcacctccagcagaaagggaaccaggagaagttgt

SEQ ID NO: 508225 - DNA, 74 bp, Homo sapiens
gcccatcgaagcctttcctgcccctgaggaagtcaattacacgcctgaaacaaccagagagctacgggaaagga

SEQ ID NO: 508226 - DNA, 97 bp, Homo sapiens
tccagaagcaaacattcatatcccaacattcctgtgtcaattcgacggagctggatgaactcattcaggccaaaaggtgtgttttgctgacttcaag

SEQ ID NO: 508227 - DNA, 100 bp, Homo sapiens
cagaaagggagagatgcctgtttcagctaaaccatttcccaggctcattccagattgggaggaaggaccggctatggcggaacctgtcacgtatgcagag

SEQ ID NO: 508228 - DNA, 100 bp, Homo sapiens
ggcccggcatgggttaccgctgctgcccctgctgtcgctcctggtcggcgcgtggctcaagctagaccttgaagcatgacactgctgcagtcgatcgttc

SEQ ID NO: 508229 - DNA, 83 bp, Homo sapiens
cttagccctctacttttcaagacaccaagtgagaggccaaccagatattaaaatgcatgctgtggtgaaaaagttatgcttaa

SEQ ID NO: 508230 - DNA, 100 bp, Homo sapiens
gtttgcggagaggtcagtaactaaattggagaaaagcattgatgacttagaagttgcaccaccagcaccaccttccagtagtcagctctgccgttacttc

SEQ ID NO: 508231 - DNA, 100 bp, Homo sapiens
gacttgaagaaacctcgcggaaagaaatgcttctttgtgaaattttttggaacagaagatcagactcagcgaatgctctctacaccaaatgcctccagca

SEQ ID NO: 508232 - DNA, 100 bp, Homo sapiens
caacagtgccgaggatttctcggactgcaattacaacagcttcaatccgtcgtcatagatggagaagagaagctctgggttcccttcattatcctgtgga

SEQ ID NO: 508233 - DNA, 90 bp, Homo sapiens
cttgggccggggatttaacacaggggcaagattcttgccaagagaattaatgtgcgtattgagcacattaagcactctaagagccgagat

SEQ ID NO: 508234 - DNA, 90 bp, Homo sapiens
agctgatcaagtatatgactgaagaagctggtagcagtgtttgatgagcaggatccacatcacggaggtgatggcaccagtgccagttcc

SEQ ID NO: 508235 - DNA, 85 bp, Homo sapiens
tctgcattgctccggactcagccaagttccccaacggctccccgtcgtcctggtgctgcagcggaatttgaagcctacattaatg

SEQ ID NO: 508236 - DNA, 101 bp, Homo sapiens
acaactgtgaagttagaaaagccctgtcaaagcaagagatggctagtgcttcatccagccaaagaggtccagtggcattgcagagcacggatggttgcagg

SEQ ID NO: 508237 - DNA, 100 bp, Homo sapiens
tgaagactattgtggaagaagcatccattaaggttaattatagaaaatgccaagtaggaaatttgccgatggtgaagtggtaagaggtcgatggcctggg

SEQ ID NO: 508238 - DNA, 100 bp, Homo sapiens
gtctttctaccacgtcaaaaacaacgggaagattgaactcatcatctaccctgatgggagagtctgcatttccatcctccacgcgccaggcgatgacccc

SEQ ID NO: 508239 - DNA, 82 bp, Homo sapiens
atcaatcagccagtgagggtcaacgtcaagcgggagtatgaccacatgaatggatccagggcgaactttctgaccaagtata

SEQ ID NO: 508240 - DNA, 82 bp, Homo sapiens
cgacaagccgctggcagccgcggatctcaccgccgctcagggaacagattatcagtctggtcaatcagatctgcggcaaagt

SEQ ID NO: 508241 - DNA, 83 bp, Homo sapiens
catcgtcatcctgctgctgaagatctggaagacgcgctcctgcgccggtttcaccagcaacacaacagatgcagccaacccag

SEQ ID NO: 508242 - DNA, 100 bp, Homo sapiens
ctgtgggcgttccaggaggtggtcgtggcgaacctggcagctgcgacgaagttatacggaagcgtctcctcattgatggagatggtgctggagatgatcg

SEQ ID NO: 508243 - DNA, 75 bp, Homo sapiens
cttctccagaaaaaactacactgtctactgccaaggaactgcaagcacatgttgaccagataactgaaatggcag

SEQ ID NO: 508244 - DNA, 83 bp, Homo sapiens
ccatcctgccgtccttctccactttcgccagcccgtgccgcgagcgcggcctgcaggagttactccacaggatccgctgaaca

SEQ ID NO: 508245 - DNA, 90 bp, Homo sapiens
gtgtccccactgagctcttggaagagagttagcagacttgaagaaagagaagcagaactgaagaaggaatataatgcattacatcaaaga

SEQ ID NO: 508246 - DNA, 100 bp, Homo sapiens
ccagcagcgccaggcaaggggcttgggagcccggaccccgccccctgcggcccagcgcccccagggtctttttggagttcctgagctgagtgccccagaa

SEQ ID NO: 508247 - DNA, 82 bp, Homo sapiens
gtgaacctggcgcaccgcctgctgcccgagctgcgggactggggcgtggcactcgtcacgcaattaccagctctggctgggt

SEQ ID NO: 508248 - DNA, 50 bp, Homo sapiens
gggaaccagtctttcaaaatgtacaccaggggttggaaaaaccacactag

SEQ ID NO: 508249 - DNA, 98 bp, Homo sapiens
gaacttcctgttcaccatgctgcgggaagaggaccctgatgctcccataagacagaaaatgccccttgatgatctggatagagaagatgaagttagat

SEQ ID NO: 508250 - DNA, 83 bp, Homo sapiens
cgaagagctctcctccttcttcctcaactatctcgctgacacgcaggagctgttcacccgctcactggctgagagcgagctcc

SEQ ID NO: 508251 - DNA, 99 bp, Homo sapiens
tggcgaccaacatcgagcagatttttaggtctttcgtggtcagtaaattccgggaaattcaacaggagctttccagaaatgcactcggtgatggaaaga

SEQ ID NO: 508252 - DNA, 100 bp, Homo sapiens
ggcggctgggtttacccttcgaggtgctgagaaggtactgctgcatgcatttgatggtcggccatctgtagccatggaaggagtaagagctgggtacttc

SEQ ID NO: 508253 - DNA, 78 bp, Homo sapiens
aaacggtggttgggtcttgccagatacgacttttcaggtcaaatgaagcgcaacagaggggaagaaatagattttgag

SEQ ID NO: 508254 - DNA, 83 bp, Homo sapiens
gggctgccgcctacccgtgctgcggcggaaccaggacaacgaagatgagtggcatgagaccctttttgctcttcctgctgcat

SEQ ID NO: 508255 - DNA, 100 bp, Homo sapiens
cagcgtccctgtgacctggccgatgaggaagtactgagcctgttggaggaactggcccggaaacaggaggacggaaattcaactactgaggaggttacgg

SEQ ID NO: 508256 - DNA, 97 bp, Homo sapiens
gcattatattgaaacactacagcgcaggattgaagaagagcaggttgagataagtcgaagagtgactctggaaaaactccctcctgtcctcgtgctg

SEQ ID NO: 508257 - DNA, 130 bp, Homo sapiens
aaaaatgtactctgacctgaatcctgaattttccttgatggtcaaaagattaaggaatgtatcctgtcaggtataatgtcagtgaatggcaagaaagttcttcatatggatcgaaacccttactacggag

SEQ ID NO: 508258 - DNA, 100 bp, Homo sapiens
tgtgtcttccccagctctgcagccacatactatccgtttgttcaggaaccaccagtgacagagggggacacagcgattgccacgcgccattggaatgtcc

SEQ ID NO: 508259 - DNA, 98 bp, Homo sapiens
aggtattgggagatgcacagctaagatgccaggaccacctggaagcctagaaatggaccgtgtgtatgtacaacaaaataatgtggagaacgtctaca

SEQ ID NO: 508260 - DNA, 80 bp, Homo sapiens
ggatccagagcgccgcgcacttcgtcatgttcttcgcgccctggaggaaatcagtggtgcttcaggatattgtgaatttg

SEQ ID NO: 508261 - DNA, 130 bp, Homo sapiens
atcaaccttgagtagcagaggccctcacaccttcctcagaatggacccccagtttggaaattttagcattcaggtgccaggaatgcagatgggacagccagtgccagaaacaggcccagctatactcctc

SEQ ID NO: 508262 - DNA, 75 bp, Homo sapiens
attaggtcccctttaccatttcagaatagaggtcctcaaagagggcagcgggctgttcccagatctcctggtgag

SEQ ID NO: 508263 - DNA, 100 bp, Homo sapiens
gccgtgtggattggctggaacttaatgagactggacacaagctcctcttcagggaccggaaacttcgtgatagcagtgagattcacttcaaagtgaaaat

SEQ ID NO: 508264 - DNA, 50 bp, Homo sapiens
cgtgggcaccttgcgcttcttgcagtcgcctaccgtatgtgaacgggagc

SEQ ID NO: 508265 - DNA, 100 bp, Homo sapiens
tggctcccaagaagtccgagacacgcggagctcttgtccctggcaaagcgaaagcgcagtgactctgaggagaaggagccgcctgtgagtcagcctgcag

SEQ ID NO: 508266 - DNA, 74 bp, Homo sapiens
gaaacatatatcccagatttctgtggcagaagatgatgatgaaagtctcttagaacaagctctggtgattgagg

SEQ ID NO: 508267 - DNA, 107 bp, Homo sapiens
agaaaaacaggtcccgatcccgaccccaaaagagtattcttggatcttgcacaggaaggaattaaagaaaacagcaagtctcgaagtaatgcatttgctgaaaaaaa

SEQ ID NO: 508268 - DNA, 91 bp, Homo sapiens
aaccaggacctggacccggacccaaagtgccatgtctttaattcatccgtccttggctcaggatttggagagcttgcaccaccaaaaatgg

SEQ ID NO: 508269 - DNA, 73 bp, Homo sapiens
ttatgcaaagaaaaatgaacccaaacatagacttgcaagattctttattggtgaaaacatgaatccagatggc

SEQ ID NO: 508270 - DNA, 82 bp, Homo sapiens
cgtttgcagagcggatcatccatgactacaaggatcagtttgacaacttagaaaaacacacacagtggggaattgatattct

SEQ ID NO: 508271 - DNA, 97 bp, Homo sapiens
tcgcaatggatcttcagtattcacaacatcccaagatgcctgaggaaacccagacccaagaccaaccgatggaggaggaggaggttgagacgttcgc

SEQ ID NO: 508272 - DNA, 82 bp, Homo sapiens
gaactctcagtggtcctacctggggatattatcaaatctactactgttcatggcagagactctccaacatgtgccttctgac

SEQ ID NO: 508273 - DNA, 75 bp, Homo sapiens
gaccctacagctgtacataagtgtcatgcagcaggacgtcactgttggaagaaatgagagtccggagtgttgtca

SEQ ID NO: 508274 - DNA, 97 bp, Homo sapiens
gcctccagcaggacaatattcgcacccggctgaagttcctgggcttcccgatggactcgagtttttactatgtgagcatcccggtgcctgcacagca

SEQ ID NO: 508275 - DNA, 100 bp, Homo sapiens
tagcacagcagttggaaagacataaagaagaagtgcttgagactgctgataaagagcttggggaagcaaagccttgttagatgacttggataaagaacta

SEQ ID NO: 508276 - DNA, 100 bp, Homo sapiens
gaacctaactacagatcccaaatttgaatctgtggccagagaggtttgcaaatctactataacagaggggatccagttcttggtggagaatgaactgctg

SEQ ID NO: 508277 - DNA, 100 bp, Homo sapiens
ccgggaggacatctacaagcgggtaaaaattgtgacagtggagaagaaagtaaatgagatcctgaaccgattagaaaagaccaaagtcgagcggttccca

SEQ ID NO: 508278 - DNA, 76 bp, Homo sapiens
aagaagattatgacagattacgccccctatcctatccgcaaacagagctgtacttcagcaccgtggacactttcca

SEQ ID NO: 508279 - DNA, 75 bp, Homo sapiens
tccagcgctgcctggaggagaatcaagagctccgaggagcatcagatccatgctgctgctgactcggagccccac

SEQ ID NO: 508280 - DNA, 90 bp, Homo sapiens
gcaggcgagattgcctgacccaggcctgctcggccctcacaggatgctgggctcttgcactgtttggtggaaatggtgagacaggatttg

SEQ ID NO: 508281 - DNA, 98 bp, Homo sapiens
cctcattctattcatgttgctttttgatggccatggcataaggaactctatcccaggaatacagctttgcattagactcacactatcttctcactgct

SEQ ID NO: 508282 - DNA, 75 bp, Homo sapiens
gttaactggattgagtccagctcttgggatggatgaatctggttatagatggacaagagacgatcattctgcaag

SEQ ID NO: 508283 - DNA, 82 bp, Homo sapiens
tgaaaatttacttctggatgccaatctgaatatcaaaatagcagaaagctgatgtcctgaccactggagctggtaacccagt

SEQ ID NO: 508284 - DNA, 74 bp, Homo sapiens
ttgctaatacccatctttactggcatcctaaaggtctggctagtttctgtggtgcagtttttcgtaaatatcca

SEQ ID NO: 508285 - DNA, 100 bp, Homo sapiens
aagaagcccaaggatagcacaacccctttgagtcacgaattctgcttggtcagaatcgtgatggcattgtgttcagcactgatgactattttcaccatca

SEQ ID NO: 508286 - DNA, 74 bp, Homo sapiens
ccgatccagcctgcggagcctgtggggcagggatgcccgctgtctgtagccccggcatggtgcccgtggccctg

SEQ ID NO: 508287 - DNA, 83 bp, Homo sapiens
cccgagtactgggacactgccatcctcttcaccaggcagggcaccctcatccagcatctgaaggagcacctgctgcacggcaa

SEQ ID NO: 508288 - DNA, 74 bp, Homo sapiens
tcgggctgaagcgactgagtccgcgatggaggatttcaaatatgcgtgcattagagaatgattttttcaattct

SEQ ID NO: 508289 - DNA, 50 bp, Homo sapiens
acaggtggcgacggcagaggagtctcctctgagcctccggcctccataag

SEQ ID NO: 508290 - DNA, 100 bp, Homo sapiens
tggagttgcaagtgggagcactggaagtacgggcagttgcagtgttggagctaaagccctggagagtgaatttgtttcctgccagcttcaccaatggatt

SEQ ID NO: 508291 - DNA, 100 bp, Homo sapiens
gccgggtgtcgatccttttccctccagtcagctgggatgaaagcagctccatcagtagtggactcagcgatgcctcagacaatctcagttcagaagaatt

SEQ ID NO: 508292 - DNA, 90 bp, Homo sapiens
gggcagacggattcatttagagctgcggaacaggacgccctctgataaatgcactcggtgatggaaagagagccactattctgaagaaca

SEQ ID NO: 508293 - DNA, 82 bp, Homo sapiens
gagacatcggcctctgcaggcttgccgaagaagggagatgtgaagttcatttccaatccgccctccatggtggcagcgggga

SEQ ID NO: 508294 - DNA, 75 bp, Homo sapiens
tccagtatgcttcctaccatggcagcaggtaaagatggagacaagagccccatgtcctcactacagatctccaat

SEQ ID NO: 508295 - DNA, 90 bp, Homo sapiens
ggcggcggcgcctcaggcacctcggcccggagcatcctggccagaacaagccaaggagccaagacgagagggacacacggacaaacaaca

SEQ ID NO: 508296 - DNA, 75 bp, Homo sapiens
cagaacattgcttatgaatatctgtgccacttagaggaagccaaaagctggagctctcaaacactgctgtcctgc

SEQ ID NO: 508297 - DNA, 98 bp, Homo sapiens
acatgcccatgcgagtacctgaggaaggctatgtcttgcccagccacgtgactgaggagatgctatgggagtgcaagcagcttggggctcactccccc

SEQ ID NO: 508298 - DNA, 100 bp, Homo sapiens
tctcttacgtctgcggaagtgcagctgcctcagttcttagcgcaggataaggaggtagaatttggaggacctgcacccagagttctaagcctggatgatt

SEQ ID NO: 508299 - DNA, 107 bp, Homo sapiens
gaaaatggggagcttcggttattgtcatccattgtggaagagatgaccctgatgatctgcaatgtaagcggggagaacatgttgcgctggctaactggcagaaccac

SEQ ID NO: 508300 - DNA, 100 bp, Homo sapiens
aaggacaaggacagaatcaccagcactggctgaagaggtgaacaagaaggaggtggtggaggctgtgaccattgtagagacaccacccatggtggttgtg

SEQ ID NO: 508301 - DNA, 50 bp, Homo sapiens
cttggcctcccgaagtgctgggattacagtggcagatgcctggagagccc

SEQ ID NO: 508302 - DNA, 101 bp, Homo sapiens
gaccatggagaccctcacggagctgggcgacgagctgaccctgggagacatcgacgaatcctcactatggatgggctcattgaggacattaagcatcggcg

SEQ ID NO: 508303 - DNA, 83 bp, Homo sapiens
gctcacgctgagagggacacgcagtgacgagcggccgaagcagctttgcggtcaccgacgatgagggcgcacctgctgtcctg

SEQ ID NO: 508304 - DNA, 80 bp, Homo sapiens
gattctttgtagcagacactgcaaatgaagctctcgaggctgctaagagactaaggtcctcagaagtggaatacagagcg

SEQ ID NO: 508305 - DNA, 75 bp, Homo sapiens
attgattctagcacgctagaacctaccaaatccctccacctgcatatgcaaccctggtgaccctgctctttggtc

SEQ ID NO: 508306 - DNA, 74 bp, Homo sapiens
cgggaggagcctgttcccctgagtcatccgtccttggctcaggatttggagagcttgcaccaccaaaaatggca

SEQ ID NO: 508307 - DNA, 82 bp, Homo sapiens
gcctgagcaagcggaggacctacgccggcctgggtgacttaagagattaaaattaatttggttgctgttggttctgaacaaa

SEQ ID NO: 508308 - DNA, 100 bp, Homo sapiens
ctcgttactcggcggtcaggagcgggccctcccttaggtgcgccccccgccaggcatgcggatcctggtcactctgctgctggatacgctgcccatgctc

SEQ ID NO: 508309 - DNA, 100 bp, Homo sapiens
agaccagcaagcatgactactccctctccctgaggtacggttcctggagcagcagaacaagatgctggagaccaagtggagcctcctgcagcagcagaag

SEQ ID NO: 508310 - DNA, 75 bp, Homo sapiens
tcccccgcttctatgtcctgtacacaatcttcatgaaaggaatcctgcaatatggcgaacataagagaatattat

SEQ ID NO: 508311 - DNA, 83 bp, Homo sapiens
aggaattcccggcccctcagggccacggctttagcggtgtcttttgcgacctactgctcgccgcaagccagattatgagccag

SEQ ID NO: 508312 - DNA, 75 bp, Homo sapiens
ttggtggaaagtttcattgtgtatgtagaagaccagaagtggatggagaggacagagcagaatgggctgatatag

SEQ ID NO: 508313 - DNA, 100 bp, Homo sapiens
aacgcagctgaaagcgtgaactgtgagtatgctgctgctgttccgctttgcgtcctcgctacaaacgcctggtggacaacatattccctgaagatccaaa

SEQ ID NO: 508314 - DNA, 100 bp, Homo sapiens
tggtagaatatatcacccataatcggaatgtgatcacagagcctatttacccagaagtagtccatatggtggataaattagatgcttcagaatcactgag

SEQ ID NO: 508315 - DNA, 104 bp, Homo sapiens
agtcacatagttggaataatactgtggatatatttttgaatattaagaaaattaaagctccatggcaattgaagtgacccatttggagcaggagtgcctgacat

SEQ ID NO: 508316 - DNA, 101 bp, Homo sapiens
ccgcggagcatggggctgcctcgccgggcaggggacgcggcggagctgcgcaagagcacagcaatggaggaaacagctatatgggaacaacatacagtgac

SEQ ID NO: 508317 - DNA, 97 bp, Homo sapiens
cagttggagaaaatcggcagctgagacggccttggccggcaattttcgttctgctctcaatgatgtgacagctgccagaaagctaaaaccctgccac

SEQ ID NO: 508318 - DNA, 98 bp, Homo sapiens
agcaatagcagtagatccaatagcaggacctgtcatttactccatcctttatagtgatgctacaggacgaagaggaatggataaaaacattggcgagc

SEQ ID NO: 508319 - DNA, 98 bp, Homo sapiens
ctagagcaaataaccgttttgaaattggtcagtgccagtggcggcagccccccgggaaagagatctaccgcaagagcaacatctccgtgtacgaagtt

SEQ ID NO: 508320 - DNA, 90 bp, Homo sapiens
agctgaggaaagtgacatccccccttcagtcaccaactaaggcgaagcccaaagttgtatgaaaactttcaaagacgactagcacagaac

SEQ ID NO: 508321 - DNA, 74 bp, Homo sapiens
ttctccttcacagtaaagtggctgaagaccacgtggccttaaaccaactgctgcaactctgtgtgcaggatgat

SEQ ID NO: 508322 - DNA, 51 bp, Homo sapiens
aggacccgccctccaagtacgtgaatgaagctgataggaccttgatatata

SEQ ID NO: 508323 - DNA, 96 bp, Homo sapiens
cctggccccgcgcgggcggacggcggaggcgcctcccagggtcgataaagacaggagtggagtgatatcagacaccgagcttcagcaagctctctc

SEQ ID NO: 508324 - DNA, 100 bp, Homo sapiens
aggtggacgtgctggtgtctgagtggatggggacctgcctgctgattgatgatcttacagcagaactggagactgcaggttcaaaatgtctacatctgga

SEQ ID NO: 508325 - DNA, 101 bp, Homo sapiens
gcctgcgaagcatcacgtccgcttcccgacgctgagggcagccccgtccaggttttcggctttgtgagaaaccttaccatcaaacacgatggccagcaacg

SEQ ID NO: 508326 - DNA, 75 bp, Homo sapiens
gctcggtcccgcgctgcgcatccccgcggacgccacagcgctgctgctctttggcgtaaattgcaatcgattagg

SEQ ID NO: 508327 - DNA, 83 bp, Homo sapiens
agcccaggagctgtcccagaattcagctataaagcagatcacaaaatttgtccaggatagacatagagctagaagaaacagac

SEQ ID NO: 508328 - DNA, 100 bp, Homo sapiens
ctcgggagctcatcttcgtggggcgtgaggagtgtgagctcatgctacagttcttggccaggctgactgagagatttgtgctgggagtggatatgttcgt

SEQ ID NO: 508329 - DNA, 82 bp, Homo sapiens
cccggggcgaggcagggccagcagcaggcgggagtgggtaattccagaattgattggccataccattgtcactgtattactg

SEQ ID NO: 508330 - DNA, 100 bp, Homo sapiens
ttacctggtatatttcacaaggcccatgacaatgcatcgggcggtgtctcccacagagcctactccgagtcttgtgaaaatgccattgtgtgctggaaac

SEQ ID NO: 508331 - DNA, 100 bp, Homo sapiens
gatggctttgggtggtaccattgggctacttctacaagtccgaacagccagtccagcaaaatgaacagcattgtctaccagaagcagttccagtcagccc

SEQ ID NO: 508332 - DNA, 97 bp, Homo sapiens
gccgccgaacctgcctggctagccggcgacttgagtgacgaagctgtaggtaaaacttgcctactgatcagttacacaaccaatgcatttcctggag

SEQ ID NO: 508333 - DNA, 83 bp, Homo sapiens
tgatgtactgctttaaacttaaagacctctttggacccgaaattgtaaggttccagcaacagatagaaatgctttaagttcac

SEQ ID NO: 508334 - DNA, 89 bp, Homo sapiens
ttctgccactgctgctccgtggagatcgtcccgcgcctgccggtgatgtgtccaatctagatcccaacttctcatttgaaggcaccaaa

SEQ ID NO: 508335 - DNA, 90 bp, Homo sapiens
agacaccaggacagaaaagacagtgttctgctttcatggagttcacagaagagtcgaggaggacttggcagatgaacttgctcttgttga

SEQ ID NO: 508336 - DNA, 98 bp, Homo sapiens
acagccttgttcatcggctcccagagaaaaatcggcagatgttacagctgctcatgaaccacttggcaaaaaatatggacagacttcttagacttgga

SEQ ID NO: 508337 - DNA, 90 bp, Homo sapiens
cgcctgaagtcacccggaattgggaagtgctcagaagcttacaaagctgcctcgaggatgtaaatgaagaccctggagaagatgtggccc

SEQ ID NO: 508338 - DNA, 96 bp, Homo sapiens
gaaaaacggagacttggatgaggtgaaagactatgtggccaaggaaacatggtagaatggtgcttacctcaagatattgaccttgaaggtgttgag

SEQ ID NO: 508339 - DNA, 100 bp, Homo sapiens
ccggactccatcgactcccccggctcttagactagactcgggacctggttcgggccggggtgctgaaggagaagcccctgtggtttgacgtatatgacgc

SEQ ID NO: 508340 - DNA, 90 bp, Homo sapiens
ctcgtcagcactgactttcagctatggaatcggcctccggtgtggctgtctctgatggtgtcatcaaggtgttcaacgacatgaaggtgc

SEQ ID NO: 508341 - DNA, 74 bp, Homo sapiens
gtcattggctgaagctgatgaacaggaagttgtggctgaggttcaggaggagatgttaaagtaacccatcttgc

SEQ ID NO: 508342 - DNA, 98 bp, Homo sapiens
cgggaggaaagaagacaagagagaacgcaaacagtttgaagctgaggattttagtggaaataggattctgtgctccatcattctgagccatcaccagg

SEQ ID NO: 508343 - DNA, 75 bp, Homo sapiens
agggacgtccgcttctggtggacagattgagcaaagatctatgcagttagatcagttgttcccaacaaaagcaat

SEQ ID NO: 508344 - DNA, 90 bp, Homo sapiens
cgaggttctacattggtgaaatggtgctggccattgactccatccatcagcttcattacgtgcacagactgctagatttggttgttcagc

SEQ ID NO: 508345 - DNA, 75 bp, Homo sapiens
tcttccatggggaaaacctggaaattctgtaaagctaaaatataggtggtgaccatgtggataataggatcatag

SEQ ID NO: 508346 - DNA, 75 bp, Homo sapiens
cgaatacacctcaatgtctctggatctgcctacaaactggtttgctactttaccaactggtcccaggaccggcag

SEQ ID NO: 508347 - DNA, 42 bp, Homo sapiens
ggagcgcggagcccggctaggactattgcagatatcatccga

SEQ ID NO: 508348 - DNA, 80 bp, Homo sapiens
ctgcctcctgcagcccccatagcaggaactgtggctgcaccatctgtcttcatcttcccgccatctgatgagcagttgaa

SEQ ID NO: 508349 - DNA, 50 bp, Homo sapiens
aagaagctggtgtgcggagatgaaggaagctcttcgtgggcggtcttgac

SEQ ID NO: 508350 - DNA, 95 bp, Homo sapiens
gaccgggcggcacgcacgcggtgcagggtaacatggcggatgcggaagtggaatcccccaaagaaggtaaagggagcaagccttccccactgtct

SEQ ID NO: 508351 - DNA, 82 bp, Homo sapiens
ggaggagagggtccacttcaaacagcggaaaacgccaggtcttcaagggtgtctgccaccaccatgcctgacccatttggca

SEQ ID NO: 508352 - DNA, 100 bp, Homo sapiens
aagacgtttggtttaaagaattaaaaggaagaacaacttaagagcttcttcaaagtatgaatctgatgaacaagaaaagagtgcctatcaagagtatgac

SEQ ID NO: 508353 - DNA, 80 bp, Homo sapiens
agctgtggaaagaagttgcaaaacactggacttccaccgctgtcagaaggcaatgaccgctaaaggaggcgatatctctg

SEQ ID NO: 508354 - DNA, 90 bp, Homo sapiens
acttcttcgccgccgccgaaggcccgcagcaatgaaaacctcgacaaaatagatatgtctttggcaacacagtcactcctggcggcaaac

SEQ ID NO: 508355 - DNA, 50 bp, Homo sapiens
ctgctcatgaaccacttggcaaagtggacacctgcgcaggtgtgtgccct

SEQ ID NO: 508356 - DNA, 100 bp, Homo sapiens
agggagcagcacagatggcagaacagacttagctaatgattgctctggaagcagccaaagcactggatgacaagaactgctgggaaaagctgggagaagt

SEQ ID NO: 508357 - DNA, 100 bp, Homo sapiens
gcaggcatgataacccaacattcaagttctcaattttgaaccatatggactctccttttcttcatctggcttcactggacgacagtctcctgctggcatt

SEQ ID NO: 508358 - DNA, 82 bp, Homo sapiens
gggaagagcacacagattcctcagcggagcgggcactggacacaatgaactttgagatgctcaaaggccagcctattcgcat

SEQ ID NO: 508359 - DNA, 100 bp, Homo sapiens
atgccctggctgaaggccttaccgaggaggagtatcaggatgaccggaaagaagggatgaccgcgtttgtggaaaagagaaaggccaacttcaaagacca

SEQ ID NO: 508360 - DNA, 75 bp, Homo sapiens
tactgctcgtctcagcaaggaggagactgtgctggcgtacttccgaagatcccagtttacagcgatcagtttcgg

SEQ ID NO: 508361 - DNA, 83 bp, Homo sapiens
ggagtcagtcattttactgtcaagacatttcttcggcattctgcaacagaatatatacagccctgctctgggacacacctcca

SEQ ID NO: 508362 - DNA, 50 bp, Homo sapiens
caaagtgccatgtctttaatgcctgaggtcctttcgagactgctggggaa

SEQ ID NO: 508363 - DNA, 75 bp, Homo sapiens
tggcatactttgtgcatgcagcagctgttccaaagacctaatgcgcttgctgtccagcagttgacagctgctcag

SEQ ID NO: 508364 - DNA, 51 bp, Homo sapiens
gcaaaggaagctctggagaaggaggacctcattgcacaggagaagtcggcc

SEQ ID NO: 508365 - DNA, 89 bp, Homo sapiens
ctggggaaaatcagcaagagctttctggaagaaaggaaatgttaggatcactttattctggaactgcaagcacatgttgaccagataac

SEQ ID NO: 508366 - DNA, 74 bp, Homo sapiens
ggatatcgtgtctggagcagtggagcccaaagacccctggagacatgactgtgccctgtccacggtgcctcctg

SEQ ID NO: 508367 - DNA, 76 bp, Homo sapiens
gacatatcgttggacccagaattgagagtcactggaactggaggacccgtcttctgggctgggtgtgaccaagcag

SEQ ID NO: 508368 - DNA, 75 bp, Homo sapiens
ccggagttcaaacctaagcagctggaagggtatttataacagcaatgatgtagcagtatcgtttccaaatgtagt

SEQ ID NO: 508369 - DNA, 51 bp, Homo sapiens
gctggagcctcaggcggcagcgcttctagaactttacagactagcatggca

SEQ ID NO: 508370 - DNA, 95 bp, Homo sapiens
ggcctacaacgtcatcacgccctttctcttgctcaagagctctctttacgagaaaaggaagatcctggctggtcagcatgaggatgcccgggagc

SEQ ID NO: 508371 - DNA, 98 bp, Homo sapiens
gccgagcggggtcagttctctgtagtgtttgccaatgttggagccgtctgcaaagtgtccccggcaagaaggtctcggcgcggaagatggccggcggc

SEQ ID NO: 508372 - DNA, 75 bp, Homo sapiens
ttcgtttttcgccgtcatgggcgcctcggccgccatggtcttcagcggttctgcgttagacctgcatcttagcaa

SEQ ID NO: 508373 - DNA, 101 bp, Homo sapiens
gtaacagaacatgaccttctgggcactgaggcttggcttgaagcctaccacgatgtcaatgtcactgccatcgagactttgctgtgctacctggagctgca

SEQ ID NO: 508374 - DNA, 90 bp, Homo sapiens
aagcaagcatgcagcttactgcttgaaagctgtccgcaggcttgtccaaaaggaaacatcggaatgaccacttaacatctacaacttcca

SEQ ID NO: 508375 - DNA, 74 bp, Homo sapiens
taccatttggttgcagcaaagaggaaatagttcagttctttcaaggtaagaatgattgatgttggctgatattg

SEQ ID NO: 508376 - DNA, 120 bp, Homo sapiens
agctgcccctgcctacaatcccagcctgtaccccaccaatagtcccagttatgctccagctctttcgacgtgtagcagcagctttgccgggaatggaaagcacacaggacagaagcagag

SEQ ID NO: 508377 - DNA, 101 bp, Homo sapiens
cgcaaactctacatgaaaagtctgttaaaaatctttgcgaatttcagaaactgtggaggagtgtcactgtagattccatggacgaggagaaaattgaagaa

SEQ ID NO: 508378 - DNA, 98 bp, Homo sapiens
gggattgttagatggaacacggctccatcatcacccaggcgcggagggaagacgccctggtgctcaccaagcaagaggcggggtttcaccatgttgcc

SEQ ID NO: 508379 - DNA, 99 bp, Homo sapiens
ccacccatcaccccagaacaccccgcagaaagtgcctgtgcatcagagcgatcgtcttctgatcaaaggaggtaaaattgttaatgatgaccagtcgtt

SEQ ID NO: 508380 - DNA, 75 bp, Homo sapiens
ccttgaacaaggcaaatatggttttgcttccttcaaaatgtctactgttcacgaaatcctgtgcaagctcagctt

SEQ ID NO: 508381 - DNA, 107 bp, Homo sapiens
ggatgacaagaagacgtccaatctgagcgtgctgcggacggcgctgcggtacatccagttggaatcgaagcctcttaaaatggcagatgacttggacttcgagacag

SEQ ID NO: 508382 - DNA, 101 bp, Homo sapiens
ttcgggatctcggtgctgcagacggcgagacctcctgcacagtaagactttgaccccgacgcaggcttcagtgattgccgcggatcagaagcctgagcact

SEQ ID NO: 508383 - DNA, 98 bp, Homo sapiens
ggacccacctcgccttcctcccggcgtggcagatgctccagattcctgctccaaaacgaggagaaatagtaagacagattggcgatgccttgcgggag

SEQ ID NO: 508384 - DNA, 100 bp, Homo sapiens
aaacaacatctcctgctattccttgggctgcctttcctgcaggtcgacctggccgtctctgtttcccagatctccatcgaagagaaggtgaaggaattga

SEQ ID NO: 508385 - DNA, 82 bp, Homo sapiens
cgcggttcttctccagcgccctggcctccctcaccttggacacctcgcttggggaatggctacgtcagtgctcgggcttccc

SEQ ID NO: 508386 - DNA, 82 bp, Homo sapiens
gcttcactacccttatcccggagagctgacaatgatgaatctcagtagttgatgtcacttggcgatattcctgcaaacatga

SEQ ID NO: 508387 - DNA, 74 bp, Homo sapiens
tcttggcagccttcctgatttctgcagctctgtgtgaagtcgggctgtgaagtttttgtttgagattctcagta

SEQ ID NO: 508388 - DNA, 99 bp, Homo sapiens
gcaagagtcaccttctcaactgttgtcctcatgatgtcctttctggaactaataatcatgggccagactgggaagaaatctgagaagggaccagtttgt

SEQ ID NO: 508389 - DNA, 100 bp, Homo sapiens
ggaagcggaggaggaaaggagcagaaggtcttggtgaagaaggcggcctgcaccaggacccacttcggcacaggtggaagttaaacgagctgagcctcgg

SEQ ID NO: 508390 - DNA, 74 bp, Homo sapiens
cgacatcatccagctgcctcaaatcgtcgtagtgggaacgcagaatgccctgttcgtgcagtttgctgaggtgt

SEQ ID NO: 508391 - DNA, 100 bp, Homo sapiens
ggtacctgtgaaccaagtgtttgggcaggatgagatgatcgacgtcatcggggtgaccaagggcaaaggctacaaaggcgcagttgtgtagcagttgagt

SEQ ID NO: 508392 - DNA, 100 bp, Homo sapiens
tgctcttctgcctcttgatctccgccaccgtcttcaggccagtgtcattgtctctcagtggaccaacatgctgaaagttgtagcattgcacctgaagaag

SEQ ID NO: 508393 - DNA, 113 bp, Homo sapiens
gttcaacaccctcttcttgaactggtgctgtctgggcttcatagcattcgcctactccgtgaaggacttcactgaggatgtcaactgtgcttttgagttcctgctgaagctca

SEQ ID NO: 508394 - DNA, 100 bp, Homo sapiens
agtccaggaaaacccttcgatcaggaggagatttgcaccctagttatcgctgagactttccctgaagatgcagggatctttacatgttcagcaagaaatg

SEQ ID NO: 508395 - DNA, 75 bp, Homo sapiens
cttctacgacaccctggacgctgcccgcagcagcatccgcgtcgttcgtggttcattccatgatctgctccgtag

SEQ ID NO: 508396 - DNA, 98 bp, Homo sapiens
aagtaccacggctatccttataggctgaaaatatttacaatgatgaagagtcagatgtcacgacatccgaactggagggacaaggatcttaaacccaa

SEQ ID NO: 508397 - DNA, 90 bp, Homo sapiens
ctacgggagaagcaggaggaggtccggagactgcagcaggtttcccggtcctctggcgaggatcctccaaggcgtctcacatgaaccggc

SEQ ID NO: 508398 - DNA, 83 bp, Homo sapiens
ggaggcacctgtcggcagactggtgacttcacttttgagtgcaactgccttccagaactgctctgagtgcaaggagaagaggg

SEQ ID NO: 508399 - DNA, 83 bp, Homo sapiens
gggtgatatttgcctttagtgcactcttctccttcacagtaaagtggctgatattcaagattaaagcagtgcaattggctgag

SEQ ID NO: 508400 - DNA, 82 bp, Homo sapiens
tgaaatctcgaaggggacctcatgtccctgtgggacacaatgcccccaaggatccacaattatcaacaaggggaagaagaca

SEQ ID NO: 508401 - DNA, 100 bp, Homo sapiens
ctgctcctgtcttccattgaggcagaaggtgtgacgtatgcagccaaaggctactttgacgccctggtgaagatgggggagctggccagcgagagccagg

SEQ ID NO: 508402 - DNA, 84 bp, Homo sapiens
gccggcccggcgcggcccagcgccctcagggggatatgagactttctactcggaatatcctgagtgttgcgtggatgtaaaacc

SEQ ID NO: 508403 - DNA, 99 bp, Homo sapiens
tctgcatttacactcgcagttaatatcatagcaaagaaagttgttgaaaatgataaatttccctctggagacagggtctcattctgtcgcccaggctgg

SEQ ID NO: 508404 - DNA, 82 bp, Homo sapiens
gtcatggatgccctcattctggatgataatgaagataattcaaatgatgggacccagccatccaaaaggaggcgaatgggct

SEQ ID NO: 508405 - DNA, 96 bp, Homo sapiens
gaccatgctgtatactccacaggaaatgaaacaggaaagtgggggctcagcaagaactgattaccgagccattcaactagccaaggaaaaaaagca

SEQ ID NO: 508406 - DNA, 76 bp, Homo sapiens
gagcattttctctgtgccaccagagagtttcgtgtgcggcaaaggtcatgggggagctgctgctgctggctgctga

SEQ ID NO: 508407 - DNA, 100 bp, Homo sapiens
cagtaccgagtgccccggggaagccattccccaccccccagctcttgcaggaggctaccatgagctctctctggtgctcagggactggagatgtcatcga

SEQ ID NO: 508408 - DNA, 74 bp, Homo sapiens
ctgaagagctatggtgaaacaccactgaagcattgccaaggattacttccttaggatagattgccagaagtgga

SEQ ID NO: 508409 - DNA, 75 bp, Homo sapiens
cgccgagatgacgggctttctgctgccgcccgcaagcagagggcccggcgagcagccaaggaggccaaggaggcc

SEQ ID NO: 508410 - DNA, 74 bp, Homo sapiens
gcggcgtctgcgtctgcagctgcaggggaggaggactggatgaagcctgctgggagcgtgaatgacatggccct

SEQ ID NO: 508411 - DNA, 100 bp, Homo sapiens
tggttagtgtgctctgagggagggtccgagccagccgctgttttgccggaggagcccctcaggccggatttcccagatgacccaggcatgcagtgggaca

SEQ ID NO: 508412 - DNA, 100 bp, Homo sapiens
actttaattacttgagaatttataatggaattggagtcagcagaactgaaatagatgtgtgttaaaagagctagaaacattgggaaaggacttatatggg

SEQ ID NO: 508413 - DNA, 90 bp, Homo sapiens
cgccagcccgtgccgcgagcgcggcctgcaggagggccaattcctgtccccccagcagcatggcatcgtgtgctgaaccctctgagccct

SEQ ID NO: 508414 - DNA, 82 bp, Homo sapiens
cagccgcggagcagtagccgccgtgggagggagccatgaagcattacgagccttatgccagcctggaccatcttggaggcag

SEQ ID NO: 508415 - DNA, 100 bp, Homo sapiens
gacctggtcatggggacagacgccaagctcatcaaacggatgattgatgagacatccagtggaggtgtcacaggcaatgacgtcattatgcacttcacgc

SEQ ID NO: 508416 - DNA, 90 bp, Homo sapiens
gcggagctgacggtggaggttcgcggctctaacggggctttctacaagagtttcactctgtcacccaggctcgagtgcagtggcgtgttc

SEQ ID NO: 508417 - DNA, 78 bp, Homo sapiens
agcagatttacaaactggccaagaagggccttactccttcacagatcggctcatgagaggctagaagattccaaacta

SEQ ID NO: 508418 - DNA, 83 bp, Homo sapiens
catcccatcgggaagccattgtgaacagctgtgtgtttgttcatcagactcttcaccagatcccaccaaatattttggttgtg

SEQ ID NO: 508419 - DNA, 82 bp, Homo sapiens
ccgcaaccattgacgccatgtcgggttattcgagtgaccgagaccgcggccgggaccgaggattgctcgctgtaagcagctc

SEQ ID NO: 508420 - DNA, 100 bp, Homo sapiens
cctgccgtgtaagaagtgccttttgcctcccaccgtgattctgaggcctccccaaccatgtgcaattcaattctgtggtgttcttggtcacacatttatg

SEQ ID NO: 508421 - DNA, 75 bp, Homo sapiens
cctagggctactgttgattttgactatcttcttagtggccgctggcagagaggctgatgacatcgtgaactggct

SEQ ID NO: 508422 - DNA, 101 bp, Homo sapiens
ccagaacggatagctccctcctggaaaaggtgtgcaactgaggaacatggctcaagaaactaatcacagccaagtgcctatgctttgttccactggctgtg

SEQ ID NO: 508423 - DNA, 98 bp, Homo sapiens
tgacaaatttcgaaaaactcaagtggcagcagtggaaactggaggcatcactcagcacattggtgcctttcttgattgcttatgcccgtatagagggg

SEQ ID NO: 508424 - DNA, 88 bp, Homo sapiens
cgaccggctgaggcggcgcggcagcggagggacggcagtctcgcgcgggagtgcatccgccccaacccttttccccctcgtctcctgt

SEQ ID NO: 508425 - DNA, 96 bp, Homo sapiens
ggcccagctcaagaacggcagccttgactccccagggaagcaggtcacagagatgcggcggaccctgacgcctgccagctccccagtgtcctcgcc

SEQ ID NO: 508426 - DNA, 75 bp, Homo sapiens
gagcattccatccctacggggctctatcactcagcccctgcgaggaattggcatccttaagcaagccatagacaa

SEQ ID NO: 508427 - DNA, 82 bp, Homo sapiens
tcaaatctaaaaaatgtcccttcattgttgcactcaataagcaactggatgatgctcgcaacaaagctgacaatcaagaaaa

SEQ ID NO: 508428 - DNA, 90 bp, Homo sapiens
ctcttgtcttagatgctcagatggtagtggataggcctgtgacgaaggtgctaccatcgtgagagtaagaccattactgggacttccacc

SEQ ID NO: 508429 - DNA, 80 bp, Homo sapiens
cagggtcggactcccggggccatggccggaatgcagtaccctcagcagcaggttttaaaatcaaagatgggaaaatcgga

SEQ ID NO: 508430 - DNA, 90 bp, Homo sapiens
tacgcaggaaagccccagccacccatcaaatcagagagaaggaatccaccttcttacgctatggcaggttgaaactgatttctcaactcc

SEQ ID NO: 508431 - DNA, 105 bp, Homo sapiens
ggatctcaggtcctcgggggcggcggccacgccaaggacggcaatggaagagttaatagttgaacttcgtctctttcttgaactcctggaccatgaatatctaac

SEQ ID NO: 508432 - DNA, 98 bp, Homo sapiens
ccgacatggaacagggactcactggggggcctggattccttctgaaaacattcaagatatcacagtcaacattcatcggctgcacgtgaagcgcagta

SEQ ID NO: 508433 - DNA, 83 bp, Homo sapiens
catggatctggaagctgagggcacgtgtttgcggttcagccctttgatgaccgcagcagactttctgctgacccctctgtcac

SEQ ID NO: 508434 - DNA, 101 bp, Homo sapiens
ccatatatcagtggctgaagaaggaaatgataaatggctctctcttgatttggagcagagatgtgaactttgtccccataaggatggagctttaaaaagaa

SEQ ID NO: 508435 - DNA, 82 bp, Homo sapiens
agaccctggagcctcagttggaagcagccgatccagcctgcggagcctgtggggcaggtggagataagtaattaacatttcg

SEQ ID NO: 508436 - DNA, 75 bp, Homo sapiens
aaagagccttacaatttgaagatagatgagacagtagccaaacccccaagactacttccagcaacccagtctcct

SEQ ID NO: 508437 - DNA, 74 bp, Homo sapiens
ggtcatgtacaactgaagcaaagaggaaagcagacccatggctcaggaggtatatcgaattccaaagaaaagtc

SEQ ID NO: 508438 - DNA, 100 bp, Homo sapiens
taacaggcgtgagccgctgcccgggccatccctcgaggaagtttcatcagggaaatgtgtccttctcatgtccacagccacagactgtccctgtgacttt

SEQ ID NO: 508439 - DNA, 90 bp, Homo sapiens
actgggcacagcatgagatccaaaggcagggcaaggaaactggccacaaggccgttgctccagggagaactgcaaatatcttcatccacc

SEQ ID NO: 508440 - DNA, 75 bp, Homo sapiens
ctcactttaaataccacctcaagactcatcggtgtgatccctcacatccacaaatctctgattggaaagaaggga

SEQ ID NO: 508441 - DNA, 100 bp, Homo sapiens
aggccatccagctcatcgctcgcatcgctgccgccaacgggacgcaggaggagggagacgcactgatgacatcgggccgctcctgcagctcgggcgcctc

SEQ ID NO: 508442 - DNA, 83 bp, Homo sapiens
cggagagtacatccccaccgtgtcaaaatgcagatcttcgtgaaaacccttaccggcaagaccatcacccttgaggtggagcc

SEQ ID NO: 508443 - DNA, 82 bp, Homo sapiens
tggaagccaaggactgtctgaacgtgctgaacaagagcaacgagggcaccatgactcctgtgaggatgcagcactccctggc

SEQ ID NO: 508444 - DNA, 100 bp, Homo sapiens
cttctctcagtggctggatgaccatccatctgaaaaggacaggctcctcctcatcaggtgcaatgtagcaggacaactcatggagcccccccgggcccat

SEQ ID NO: 508445 - DNA, 100 bp, Homo sapiens
cttggataaagttccagagcctggagtgcccactgaaaccataaaggaacatctggattatgagattatccagtctctaaatcctgaatttaacaaagca

SEQ ID NO: 508446 - DNA, 74 bp, Homo sapiens
accatgcttaatgcaaaagaccttctacaggacctgaagaacaagctgaaagctggatacctaatgtcagtgga

SEQ ID NO: 508447 - DNA, 85 bp, Homo sapiens
gaatttaaacttaaggaaagagtgggaaagtgaggcctcaccctgtgatcccactttcatcctgggctgtgctccctgcaatgtg

SEQ ID NO: 508448 - DNA, 50 bp, Homo sapiens
ctggaagagcctccagcagcaagcactgctccgtgtggagatggcgccct

SEQ ID NO: 508449 - DNA, 98 bp, Homo sapiens
cttcagtgcgcaggaagtggggcagctgcgggcgctgcgtgccgtgttccggagccagcagcaggatatccgacatgaagccagtgacttcccatgta

SEQ ID NO: 508450 - DNA, 87 bp, Homo sapiens
tatgtggtcaagttaatcatgcctggatgttgatgacacaactaaactcactgtggaatgctggtcaaaaattgcatgttcaaacaa

SEQ ID NO: 508451 - DNA, 91 bp, Homo sapiens
gcaaagttttgcagatcttcaacaagaggacccaggagaaattcgccctcaaatgagcaggggtgagcgcagccactgcccaacgcaaacc

SEQ ID NO: 508452 - DNA, 83 bp, Homo sapiens
tatctggagtgaggtggccggttcttggtgggatctgagcagtgtggacgaatgtggaacctcgctctgtggctgtgttccct

SEQ ID NO: 508453 - DNA, 113 bp, Homo sapiens
ccatttccaagagaagagcacagaagagggagaagtggctgctctgcgcctcacggccagatcccaggagaaagacagggctggagaccagtttgctgatagtgaccccaaac

SEQ ID NO: 508454 - DNA, 115 bp, Homo sapiens
attttgtgagatttttcaaactggtccagtcagcttcttacctgaacgcttgtcttttacactgttacttcagtcaggttctgtacagagtaatgagatgtgtgacggctgcaaa

SEQ ID NO: 508455 - DNA, 74 bp, Homo sapiens
ttctacaaacccatttcagaccaatgccagaggagcaacagcgagtaaccagctcataaatcacatcgaacagt

SEQ ID NO: 508456 - DNA, 100 bp, Homo sapiens
tggacctcagctacccccgcacccacgcggccctgctgaaagtggcgcaaatggaatcccttggcaccatgtcctgtgtgcattataaattttcctctaa

SEQ ID NO: 508457 - DNA, 98 bp, Homo sapiens
catccccgtggtgcacgcgtctatcgccggctgccgcatcatcgggcgcatgtgtgtggcctggctgtggcggccattccagagggtctgcccatcgt

SEQ ID NO: 508458 - DNA, 50 bp, Homo sapiens
gccgtggaggcagaggtggcatggggtgctgcagggtgcacagctgatcg

SEQ ID NO: 508459 - DNA, 100 bp, Homo sapiens
taattatctttcagttcaagtgacaaacgtacctgtggtccctggatccagtgctactgctacaaataaggcatgttgttccactggctaacttaaaacc

SEQ ID NO: 508460 - DNA, 100 bp, Homo sapiens
ccagtattctaccaggcctggtgctggcctcctgtgatgggccttcgcactcccagcttctttgcccaaaatgcagtgccaagttgggttccttcaactg

SEQ ID NO: 508461 - DNA, 75 bp, Homo sapiens
gagctcaagaccagggccctgcagctggaagaggagctgttccaggtatggtgctgggtgcagatgcagtgtggc

SEQ ID NO: 508462 - DNA, 76 bp, Homo sapiens
acgggcctgatcaaacttgccttcctgttctccaagaccagctttaaggaagcctcctatttcagtttctcaacat

SEQ ID NO: 508463 - DNA, 100 bp, Homo sapiens
tttgctctctcttctgccatctgataatagcccggaagatggtgagatccatccagaaatctgtcggctttacatccagctgcagtgctgcttagaaatg

SEQ ID NO: 508464 - DNA, 146 bp, Homo sapiens
tggtgatcactaggtgccaacattatgcgaagaactttacgtggacatcccatttaattctcagaagccgatcacaagtgtatgcagagaatatttccaaaatggtgggaagagaaaagcacttgagaaagatgaaaaaagagctg

SEQ ID NO: 508465 - DNA, 74 bp, Homo sapiens
ctggcaagagcgatgtctactacttcaggctgggagtcctccgtcagcatcagctccggctccggtgtcctcct

SEQ ID NO: 508466 - DNA, 75 bp, Homo sapiens
gcaaaatcgagaatcatgagggggttcggaggtgaccattgtcgaaaaagctgacagctccagcgtgctgcccag

SEQ ID NO: 508467 - DNA, 75 bp, Homo sapiens
ccttagctctgggtgtcgggcaccggtggcaagaaaattggatgtatattttgaatatgaagaaaaaataatgag

SEQ ID NO: 508468 - DNA, 125 bp, Homo sapiens
aggtagaccagctcaaggcctttggctatgtcgagatcccctgtgtggccaagaagctggtgtgcggagatgaagcgaatcagtgggaagtggcctacagtgggtcggctaccgaatacaccttc

SEQ ID NO: 508469 - DNA, 100 bp, Homo sapiens
tgcttttttatctcatattagtgcctgtgatggcatctttcatctaacaccttgcattgaaaggctctagttacagtggacttcttgaacgacatcatat

SEQ ID NO: 508470 - DNA, 75 bp, Homo sapiens
aaggcgattccgcagtccccccgttccctggaggtcctgtggaatgactcaatgatgaggcacggcggctcattg

SEQ ID NO: 508471 - DNA, 75 bp, Homo sapiens
cgcggccagatatcacccaccaggacaacaacaggctggagttgttgcccatcctcctgcagtgcctccaagacc

SEQ ID NO: 508472 - DNA, 100 bp, Homo sapiens
gatgactacctctccgatcctgcagctgctgctgcggctctcactgtgcgggctgctgctccagagggcggaggagagggagctggagctgcagaaggaa

SEQ ID NO: 508473 - DNA, 73 bp, Homo sapiens
cacacgatgggccaagaagattgaagccagagaaaggcagcagcagcagcagcagcagcagcagcagcagcag

SEQ ID NO: 508474 - DNA, 98 bp, Homo sapiens
aaacatccaagaaaaatgtccttaaagcaattgagcaggctgatctactgcaggaggcactactgcagtcttcagttaagcaacaagtagaagctatt

SEQ ID NO: 508475 - DNA, 80 bp, Homo sapiens
ggactccctttaatccagtgactgtcaggtcgatcatatggctctgccagcagacagccttggcacacaggcacaagggc

SEQ ID NO: 508476 - DNA, 75 bp, Homo sapiens
aagcagcgtgcgttcagccctggggaaacttcctcctggccaaccctgtgtctggcagccccatcgtgacgggtg

SEQ ID NO: 508477 - DNA, 50 bp, Homo sapiens
agcttggaatcggagctagacacggtggctgactgttcttgggatgaaac

SEQ ID NO: 508478 - DNA, 79 bp, Homo sapiens
cccgtggccaccgcctccagcttgccaccaaagacctgcgactttgctcagagagtcacaccccaaagcctctttattc

SEQ ID NO: 508479 - DNA, 105 bp, Homo sapiens
tgcagaggaaagaaaagaatacattcctgattacctgccacccattgtgtcttctcaagaaggcttctccagggaaagtgaccgaggcagtgaaagaggccattg

SEQ ID NO: 508480 - DNA, 75 bp, Homo sapiens
ggacactgctggtcaggaacgggtctccatcacatttttgcccagaggtaggggggattatgcccagttttggga

SEQ ID NO: 508481 - DNA, 101 bp, Homo sapiens
ctgagaaaacaccatcactaactagaagaattggtgccaatgttaacagggctacagccaataatgatcatacagtagtgtcgctggcatgtgcaggaggc

SEQ ID NO: 508482 - DNA, 99 bp, Homo sapiens
aacgaattctcaacccctacaacttattcctgtccggagacagcctaagggtagcagatatcaagagagttaacaatctcatcagtgatcaagactttt

SEQ ID NO: 508483 - DNA, 87 bp, Homo sapiens
ccacttcaaacattcgtctcggaaaccccgcctcttacagtcacgagtacgtagagaaatcgacactcttaatgaacgtttagctgc

SEQ ID NO: 508484 - DNA, 100 bp, Homo sapiens
ttggaagtggggcccacagactgacgctgctctgcttcctggattcagccctcttcctaaggtgcgaggacgacgggcagacgttcttcagcctagatga

SEQ ID NO: 508485 - DNA, 101 bp, Homo sapiens
tgaaggtaaagtggataatttatcaagagacagcaacagagattgcacaaatgaactgtctaattcttgcaaggtttgtgttgctagttaagctagcttgt

SEQ ID NO: 508486 - DNA, 75 bp, Homo sapiens
agaaccaactggtcccgaaagaggtgtggcagtgtggcgggagtgtggaggtcctgccctgctcacggattgccc

SEQ ID NO: 508487 - DNA, 82 bp, Homo sapiens
gattctgtccgttcagtgtggaactcttctgccatacggctacgtcaccaactccaaggtgaagtttgtcatggtggtagat

SEQ ID NO: 508488 - DNA, 100 bp, Homo sapiens
ccacagtttctgtcccatgacaaggaccagctgactaaggagctgcagcagcatgtaaagtcagtgacagccccattactgccaaatctgtcgaaaggga

SEQ ID NO: 508489 - DNA, 100 bp, Homo sapiens
ccaagaggcccgggctgcgggcgctgaagaagatggactgcagagagatcctgcttcccatgatgaccgatcagctcaagtaccatctggagagacagga

SEQ ID NO: 508490 - DNA, 75 bp, Homo sapiens
tttggatcagacttttgtgttgcagttcgggcatagaatgtcaagctaaccaggcgtccgctacttcagaagagt

SEQ ID NO: 508491 - DNA, 82 bp, Homo sapiens
ggactgtggaatgcacatgggcttcaatgacgacttcacctctgggggacagaggaggttgctgcctggctggagcacctca

SEQ ID NO: 508492 - DNA, 100 bp, Homo sapiens
gcgcccaagtggcggggactactggtgcctgcgctgaaaaagggaattttgcttcagctctttggcgggacaaggaaggattttagtcacactggaaggg

SEQ ID NO: 508493 - DNA, 100 bp, Homo sapiens
tgatttgatgcataaaggcagctttgaaacagagtatggatgtgtccaacagccaaaaactcaagaaagtaaattgaaaattggtggtgtgtcttcagtt

SEQ ID NO: 508494 - DNA, 75 bp, Homo sapiens
aagagaacaatgggaaccagtctttcaaaatggaatgaggtgattgcagtggattggaagggcctgaaggatgtc

SEQ ID NO: 508495 - DNA, 96 bp, Homo sapiens
agcttttccatcctggagatctacaggatttatcaaatcgagtcactgtcaatactgtaagattgatgttaaaggcatggtgttcaccccacttca

SEQ ID NO: 508496 - DNA, 90 bp, Homo sapiens
ctcgccagcagccgtccggagccagccaacgagcgatctttaatctcatgaagtacgacagctacagccgcttcttaaagtctgacttgt

SEQ ID NO: 508497 - DNA, 100 bp, Homo sapiens
gcccaatagacaactctgggctattttcagggactttgaacatgtcggggatcgccctcagcagactcgcccaggagaggaaagcatggaggaaagacca

SEQ ID NO: 508498 - DNA, 82 bp, Homo sapiens
agcagaagagaaagccagttatccacggactggaagatcaaaagagggtattccagcgtcttcaggaaacagtttagactct

SEQ ID NO: 508499 - DNA, 75 bp, Homo sapiens
gcctcggtacaccgtcccgcgggtttccaacatggctagatccatcagaaactgaagccgtggagaacgctctcg

SEQ ID NO: 508500 - DNA, 97 bp, Homo sapiens
gtcattgctgacaatgaatacccatcccgggtggcctttaccttgctggagaaggcctcagatgagggcactctgggaggatcccccaccaagaagg

SEQ ID NO: 508501 - DNA, 89 bp, Homo sapiens
tgtcggttggtcctggagcggcgcagccggagtggggccgtgaggcgcctgtgtctggcagagctggtgtgagacgagacaatcctgcc

SEQ ID NO: 508502 - DNA, 100 bp, Homo sapiens
gcggttgcgggggggaagtgactgggcggtgccggcgccggagacgatgccgttgaagtgggaaaactcttgcctttgccatcccaatgattcatgcggt

SEQ ID NO: 508503 - DNA, 101 bp, Homo sapiens
tttacctcattacttcaagggcgtgctcagtatctacaaagacccagcaatggtacagcagttccatgaaagtcatttgcgtgtggttgactgatagatta

SEQ ID NO: 508504 - DNA, 80 bp, Homo sapiens
cgcctcggaggcgttcagctgcttcaagatgaagttggttgaatctggcgatgtggaacccatggatatggagggctgac

SEQ ID NO: 508505 - DNA, 100 bp, Homo sapiens
gtggttcacctctcccctgcccagtggatggtccagacccaaggaaggagtgaattgaaagctaaggaggggctcagttgctgatatgtgttcaagatga

SEQ ID NO: 508506 - DNA, 75 bp, Homo sapiens
cgcccctcaccagacagatcgctgtcaaaaccctaggatgcattcagtctactagcatattcagatccctggaac

SEQ ID NO: 508507 - DNA, 75 bp, Homo sapiens
cctgtccagacagttcttgaaggtgacaacttagagaccgttacagtgtttctgccacctctgtacaaaagacaa

SEQ ID NO: 508508 - DNA, 90 bp, Homo sapiens
cgaggtccgtgtggccaacgagctcaacgccaggcgccgctcctttacagatcaggatcctcatgaccagccaaagagaagaagaattag

SEQ ID NO: 508509 - DNA, 100 bp, Homo sapiens
ttccggcgccgagctttgatttgtttattgagtgccagcccggttcccggacaggagaactacgatgacccgcacaaaacccctgcctccccagttgtcc

SEQ ID NO: 508510 - DNA, 100 bp, Homo sapiens
tgacaagagaggaaacaaaaagttaaacaagcaagcctgccataagtgagaaggatgaatattctatctttcctcagacatactccatagatattaatgg

SEQ ID NO: 508511 - DNA, 50 bp, Homo sapiens
gatatctgcaatgatgtactgctattcccttcagcaagctcaagcttttt

SEQ ID NO: 508512 - DNA, 101 bp, Homo sapiens
cggagagaacacgagcccatcagctcaccatcaacgaggctgctgcccagttctgcatgagggacaacacgctcttattacggagagtggagctcttctct

SEQ ID NO: 508513 - DNA, 90 bp, Homo sapiens
tgtttgtattttggctgctgcaggagccattttaggtggaatgaatcttacttgttgaatatcttctggttactagttggattcatttgt

SEQ ID NO: 508514 - DNA, 98 bp, Homo sapiens
cgatggtaggcgtccctggagcggccgccttccagcacaatgcagatcttcgtgaagactctgactggtaagaccatcaccctcgaggttgagcccag

SEQ ID NO: 508515 - DNA, 150 bp, Homo sapiens
ttctgtggcctcgttacctgcaggtattgggagatccacagctaagacgccaggacccactggaagcctagaaatggaccctttagatcctacaagatcagtgattgtgatccgctccctggtagcagatggtgtagcagaaagaagtgg

SEQ ID NO: 508516 - DNA, 106 bp, Homo sapiens
gaataccatgaggtcaaaaaggaaatcaccctgcttgagcaaaggaagtggtgaagcagtattttccaatttgaagattcatttgaaggtggctcctgccacctgc

SEQ ID NO: 508517 - DNA, 100 bp, Homo sapiens
taactacacagaattcacgcagtttctccaggcttttgacctttatgaacaaagatatgctgctgtgaagatacatcagcttaataaaagctggagagat

SEQ ID NO: 508518 - DNA, 75 bp, Homo sapiens
gcgacagcagcggcttcagcgactcggagaggacgtccagatcggtgacatcgtcacagtgggcgagtgccggcc

SEQ ID NO: 508519 - DNA, 71 bp, Homo sapiens
ttatagctctgtatgagaaggacaacacctacttaggtggtgttcccactgatgaagagcaggcgactggg

SEQ ID NO: 508520 - DNA, 100 bp, Homo sapiens
tgtacaccccatcccagacgaagacagtccctggatcaccgacagcacagacagaatccctgctaccatgagaaatgttttagatgaagataatgataat

SEQ ID NO: 508521 - DNA, 99 bp, Homo sapiens
catgatccgacacgccggggcgcccgcgcgcggggaccccacgggactactgttttccaaagtgaagttgcagtcactctgccgaggcccggacgaggc

SEQ ID NO: 508522 - DNA, 100 bp, Homo sapiens
ttcaaggagttcctgcggcagtaccgagtgggcaccgaccgcacgggcttcaccttcaaatacagctctttgaggagttgcaggagctgctgacccatga

SEQ ID NO: 508523 - DNA, 74 bp, Homo sapiens
attggatttagcagatccatctgccaaagcagtgcttactggcatgttacatggaattggaaaatttatagttg

SEQ ID NO: 508524 - DNA, 100 bp, Homo sapiens
tcagaggcgccactgcccagcctgcaggttgcagaagtgcttagatgctggcatgaggaaagacagtgtggcgggctggggctggtgctggccagcgcgg

SEQ ID NO: 508525 - DNA, 75 bp, Homo sapiens
gccgcgccgatgaacctgaccgagactggtcttctgaggacctctgccctctacacagcggcctcttcaggtgca

SEQ ID NO: 508526 - DNA, 100 bp, Homo sapiens
acaagagaaactttatgtgcctgtaaaagaatacccagatgctgctttgtaccgcctcagtggagactggaatcccttacacattgatcctaactttgct

SEQ ID NO: 508527 - DNA, 83 bp, Homo sapiens
cccagttgctacccgcccattcagtaccctctttcccagctgcccgctcctcagcacccgaagattcgcctgtacaacgcaga

SEQ ID NO: 508528 - DNA, 100 bp, Homo sapiens
ggtcttattaaacgctttatgaaagttcaactttgtggggaaacttttgggtccacgtggcaattctctgaagcgtttacaagaagaaaccttgacaaaa

SEQ ID NO: 508529 - DNA, 100 bp, Homo sapiens
ctcgccttggggaataatcactttattggtggaagtgctgcatcagtaaatgctaattttgctcattttgataacttccccaaatcctccagtgctgatt

SEQ ID NO: 508530 - DNA, 75 bp, Homo sapiens
cgggtgggagtgacccgattttccaggtattgttgcagcatctggcagtgagactgaggatgaggacagcatgga

SEQ ID NO: 508531 - DNA, 98 bp, Homo sapiens
ttcaacaagctggtgatgcccaactacccattcatcaacattcggtcaagtgagaaactcttgctactcagttggatctagcagaaacaaaagctgag

SEQ ID NO: 508532 - DNA, 82 bp, Homo sapiens
cgcggatctcaccgccgctcaggatctattaatgagatgaagcggttggaagaaatgtcaaatatgtttcagagctctggag

SEQ ID NO: 508533 - DNA, 90 bp, Homo sapiens
ctcagtgctggtgtctggagatgattttggactggttaaattgtttaaatttccttgtctcaagagagtgctgggctttgacaaacttcc

SEQ ID NO: 508534 - DNA, 50 bp, Homo sapiens
gcggcggctgtagcggcgtgacaggtcctgctggttggggcagacaactt

SEQ ID NO: 508535 - DNA, 103 bp, Homo sapiens
gacggtcagtgcgcacgttgtaatcagctgaggccatgtcaggagacggagccacggagcagggtaagcttgatgattaccaggaacgaatgaacaaagggga

SEQ ID NO: 508536 - DNA, 155 bp, Homo sapiens
tccagcaggtgtacacacggcagagcatggccaagtccagatatatggagctctacacgtatcctcctgcctagcgcagaaatcatgagtggaggatctcaagtccacattttttggggtgctccaattgctccactgaaaatcacagtatcaga

SEQ ID NO: 508537 - DNA, 75 bp, Homo sapiens
ggagatcccaggcggtgacagagtggagccatggctagagtttttggctttcacccccaaccagtgaccaaagac

SEQ ID NO: 508538 - DNA, 75 bp, Homo sapiens
gccacctcaagccttgcggagccaaatggtttagcaccgaatggagcatgatttctcgaatgctggcagccaaaa

SEQ ID NO: 508539 - DNA, 75 bp, Homo sapiens
cgcgcacgttggaaccgaagagagctctgttgttgcagttttgggatttgagattgacgcggtgaactctgtcca

SEQ ID NO: 508540 - DNA, 75 bp, Homo sapiens
agtgtggggagatgtagtccagacaaagactgaatcaggtaaagtaatctcacaagctgccaaagaacacatccc

SEQ ID NO: 508541 - DNA, 100 bp, Homo sapiens
tggacgtgggatccacacagctcagaacagttggatcttgctcagtctctgtcagaggaagatcccttggtagacgttacatccaagaggaaataatcca

SEQ ID NO: 508542 - DNA, 73 bp, Homo sapiens
gctcatggacttcgtgccggtggacgataagcgctaccggaaagaccacagcaagattctttcattcgtctcc

SEQ ID NO: 508543 - DNA, 100 bp, Homo sapiens
gattgttcctgtggagcaaagagctgcatcatgaattcaggagcatcattgtctacatgggctggtgtgaagcccgggagcaagaccccctccaggacag

SEQ ID NO: 508544 - DNA, 90 bp, Homo sapiens
aaactggtcagcgtttccctggagaggaagaggcaaggtgaaagtgggagatacattggatcttctcattggagaggataaagaagcagg

SEQ ID NO: 508545 - DNA, 98 bp, Homo sapiens
acgctgggccgaccccagagcggcgctggacaggccaggtcagagcagcccaccatgggatggggagggggtggaggctgcaccccgcgcccacccat

SEQ ID NO: 508546 - DNA, 50 bp, Homo sapiens
atggaatgatatgatggaagagaccccttgttgaaatgggacagttggca

SEQ ID NO: 508547 - DNA, 50 bp, Homo sapiens
cgcaaacttgacactcaccctgaccgttgatttggagcatatgcgaacaa

SEQ ID NO: 508548 - DNA, 89 bp, Homo sapiens
aaaagaagaaacacgtattcaagctaagatgagaactggactgatgaccaactgcttggttttaaaccatgcaatgaaaaccttattgc

SEQ ID NO: 508549 - DNA, 100 bp, Homo sapiens
ccgtcctcggcggcagtgtcagggagctatgaagacatgattggtgaggaggtgccatcggatcaatactactgggctcctttggcccagcatgagcgag

SEQ ID NO: 508550 - DNA, 115 bp, Homo sapiens
ggctgcggccgccctgggccgggccccaccggacggtttttcgttggaatatacgttgcacatttatggcgattctgagtgtgagggcagacttctgccaggctcagcacagcat

SEQ ID NO: 508551 - DNA, 98 bp, Homo sapiens
tgaggcctggaatttgattaactcattcaaggttacccagttggtactccaaagattcaggtttactcacgtcatccagcagagaatggaaagtcaaa

SEQ ID NO: 508552 - DNA, 82 bp, Homo sapiens
aaaaccgaagttggaagtgtctcttagcagcgcgcggagaagaacggggagccagttggaatcgaagcctcttaaaatggca

SEQ ID NO: 508553 - DNA, 100 bp, Homo sapiens
tcccaaggagtctgcaagttggtttttcgttggaatatacgttgcacatttatggcgattctgagtgtgagggcagacttctgccaggctcagcacagca

SEQ ID NO: 508554 - DNA, 75 bp, Homo sapiens
accatttttaagcaagccttttctctcttaagcaagccctggatgaaaacatggacctcttggaaggtataactg

SEQ ID NO: 508555 - DNA, 98 bp, Homo sapiens
cctccaatcaacttgccagaaaactccaggggaccttttcctcaagagcttgtcaggataataagttcagcaagcccatgtgcagacttcttttatcg

SEQ ID NO: 508556 - DNA, 82 bp, Homo sapiens
aagtccttctggggcaggatgagagaatggatcttggagaatgtctgaaagtccatgacctggctttaagagcggattatga

SEQ ID NO: 508557 - DNA, 82 bp, Homo sapiens
cgaagcaccgcagcctggtgcagatcatctacgacgagaaccgggtttgtcctggttgtggtcaagactggatgatgtaact

SEQ ID NO: 508558 - DNA, 97 bp, Homo sapiens
accccctccgtgggtgtgtggtgagtgtgggtgtcatggagaaactccagctgggcccagagattctgcagcgggaaaatccaaggcttatttatgc

SEQ ID NO: 508559 - DNA, 75 bp, Homo sapiens
gatgcaccctttttgtcagattatcaggatgaggggttacattccgaaaagcaaatgggagatggacacatctga

SEQ ID NO: 508560 - DNA, 75 bp, Homo sapiens
cacggcatgatgttcgtccgcaacgattgcaagacattgctacaagtggttggtgtggtctctgtggctgtggcc

SEQ ID NO: 508561 - DNA, 90 bp, Homo sapiens
ctgggatttttgagctggtggaagtggttggaaatggcacctatggacaagtctataaggttttgaacgaagaatgtgatcagaactggt

SEQ ID NO: 508562 - DNA, 51 bp, Homo sapiens
gaagaacagggtcgaggatcgaggaaaccacccctactcctaatcccccga

SEQ ID NO: 508563 - DNA, 82 bp, Homo sapiens
tcagcaaggtcaatgagtcaacagaatcacttactgatgaggtctaccctgatgggagagtctgcatttccatcctccacgc

SEQ ID NO: 508564 - DNA, 82 bp, Homo sapiens
ggaggaggaactgttgacaattgaagacagaaaccgggttttaaaatcaaagatgggaaaatcggagaaaattgcccttccc

SEQ ID NO: 508565 - DNA, 100 bp, Homo sapiens
tgaagcaaacaaaaacgccagcattttgttagaggagttagacttggaaaaggtgatagaaattgaagatgcttcacccaccaagtgtccaataacaacc

SEQ ID NO: 508566 - DNA, 75 bp, Homo sapiens
tttaatatctgattgggacaacattcagacccatttccagtcatgagaacgaatgcaggaatttgggaactgagc

SEQ ID NO: 508567 - DNA, 90 bp, Homo sapiens
tgcaaagatgctgtccgtgcgcgttgctgcggccgtggtccgcgcccttcctcggcgggccggactgacttcgacccccaccacttctgg

SEQ ID NO: 508568 - DNA, 75 bp, Homo sapiens
tttatctgctgtcaaggatcttgtgtgctccatagtttatcaaaaggacccacatgttgactgttacacaatgtc

SEQ ID NO: 508569 - DNA, 114 bp, Homo sapiens
ccatcctgccgtccttctccactttcgccagcccgtgccgcgagcgcggcctgcaggagcacacttccaccctgggcagcgtgtttggggacgcgtactatgagcagcagatgg

SEQ ID NO: 508570 - DNA, 89 bp, Homo sapiens
gctttccagtacatcattgataacaagggcatcgactcagacgcttcctatccctacaaagccatgagacgagttgtactgctgtcaca

SEQ ID NO: 508571 - DNA, 74 bp, Homo sapiens
tctccagcaccctcatcgccctggccgacaagcacgcaaatgaaggatttgggggcagagcacttggcaggtca

SEQ ID NO: 508572 - DNA, 99 bp, Homo sapiens
taatgaagaggaaaaagaggagaatgaagctgaatctgatgtcaaacatagaaccagagggtgtccttctgtgctgaacatgtccgtaggaatgccctg

SEQ ID NO: 508573 - DNA, 75 bp, Homo sapiens
aagccggttggggtgtgagaggttttctcgctctaggtagaagtagatggacagaaattcagaggcgcaggtcca

SEQ ID NO: 508574 - DNA, 75 bp, Homo sapiens
gccggacgtcggcaacggagaaggtaatggtaactcgggatttgaaggacagagtcgctatgtaccatcctctgg

SEQ ID NO: 508575 - DNA, 75 bp, Homo sapiens
cctcttgccttacggcatggcagggcacacgtgtttcacgttgacaggtttgcttgggacgctagtaaccatggg

SEQ ID NO: 508576 - DNA, 100 bp, Homo sapiens
aaccacacggggtgcactttgtggtttgccaccctgaccaccacacccaccaggttcaaaccttgtactactcagctgatcacaagctgcttgatgggaa

SEQ ID NO: 508577 - DNA, 98 bp, Homo sapiens
aaaagacgagtgaaagtaacctggttgtcacatacccccagcttagaggtgcttcaccctgccccaagtgggctcgggatgagtttgaaggcctcttc

SEQ ID NO: 508578 - DNA, 100 bp, Homo sapiens
tgcccctgcctacaatcccagcctgtaccccaccaatagtcccagttatgctccaggggcagtgatcggtgatggacagtctgctgtggccagtaacatt

SEQ ID NO: 508579 - DNA, 100 bp, Homo sapiens
gcgcggagatgtaccactaccagcaccaacggcaacagatgctgtgcctggagcgagtctggctgtatgtcgatgaccagctccagcagatgaagcccca

SEQ ID NO: 508580 - DNA, 88 bp, Homo sapiens
ttcaccttccagaaccatgtctttaacccaacatttgtagtaggagcatttaaactcatcactgctatatatgcagattatgcccgga

SEQ ID NO: 508581 - DNA, 82 bp, Homo sapiens
cgcaaggaacggaagctgcgggagaaggaatggaagttggatacactttgtgacttgtacgagacactgaccattacacagg

SEQ ID NO: 508582 - DNA, 90 bp, Homo sapiens
ctcaagaaatttgcctcgaaaaccaaggtttcatcaccttaaatggttttgaaccaatgaaggtgtattcccttaaaaagacggacagcc

SEQ ID NO: 508583 - DNA, 74 bp, Homo sapiens
attgatcccaggaaacaagagattgttgctcctcctttggaaaatctggcaactgtggaagagactgttgttcg

SEQ ID NO: 508584 - DNA, 75 bp, Homo sapiens
tgtggatcgctgtgatcgtcacttggcattgagtattctgaaacatttgaagtcatacagaagaatttctcctcc

SEQ ID NO: 508585 - DNA, 126 bp, Homo sapiens
tagcacctccagccgtgcttgaaaatatacaaagcaactgtcatggcccaatttcttcaactttagttggcttaccaagagtgaagcgtgacaagtactcagtcttcaactttctgacgctcccag

SEQ ID NO: 508586 - DNA, 83 bp, Homo sapiens
aggatatccagacagccctaatatgtcgggcagtctaggctctgggagctggtatggtgccatcgggcgtgagccgggctggt

SEQ ID NO: 508587 - DNA, 100 bp, Homo sapiens
ggactacctgcactaccacatcaagtgctctaaggatgatgagtttacacacctgtacacactgattgtgcggccagacaacacctatgaggtgaagatt

SEQ ID NO: 508588 - DNA, 82 bp, Homo sapiens
ggtgcctgacagccctgggcagctacaacaagtaccacaacaactgctacagttcacagtgtgcctgcgtcgggaagggcag

SEQ ID NO: 508589 - DNA, 98 bp, Homo sapiens
ggcgccccgcggagccggcctcggtgccacccagccgggggtagatgctgcctcgcccagaccattcccggagtaataaatccagttggagcagcagt

SEQ ID NO: 508590 - DNA, 100 bp, Homo sapiens
tttgcgtgggaggcggtcccgggatttcaggggtctaccggctctcttatggcgaatgcaacccgaagagagagtgagcatggcctgtatgagaagaaaa

SEQ ID NO: 508591 - DNA, 96 bp, Homo sapiens
gtttgatcacaagacgggcaagaccatggcaaaagttataaccaccgtactgaagttccctgatgatcagactcagaaaattttggaaagagaaga

SEQ ID NO: 508592 - DNA, 100 bp, Homo sapiens
ttttggggaccggagagcccaggactccctttgttggagttttgcccacgcgttgtaattaagcctcgcacaatatgacacgctgtttaatggtcttggg

SEQ ID NO: 508593 - DNA, 83 bp, Homo sapiens
cggcgctggggcccccagaagtgatcgctcagctggagaacgcggctaaagttctgatgttttgtaccaatggctagaagcag

SEQ ID NO: 508594 - DNA, 82 bp, Homo sapiens
gccctcctcagtgttgacctatgcctctccgccactcatcaccaatgtcacggtgctgtacttctttgcagtatacaaggac

SEQ ID NO: 508595 - DNA, 128 bp, Homo sapiens
gcagcacccgtgacaccgtgctcagccgggagcgcggcctctccttccaccacatgtgcagtctttgccaacaaaaaaaattaccaagaaacctattccagatgagcacctcattctaaagaccacat

SEQ ID NO: 508596 - DNA, 82 bp, Homo sapiens
aaggggcttacgcagaaggacctggccacggtcacagccaagactgcctttctatttattttacctcagtataacattagcg

SEQ ID NO: 508597 - DNA, 107 bp, Homo sapiens
gtccttctccactttcgccagcccgtgccgcgagcgcggcctgcaggagcgccgtgccgtccctgcagtgacaccgaggtgctcctagccgtctgcaccagcgactt

SEQ ID NO: 508598 - DNA, 50 bp, Homo sapiens
cttgggactgcgaagctatacaggcttaacaatttggacaagacagcaaa

SEQ ID NO: 508599 - DNA, 100 bp, Homo sapiens
cgagaaccaatcagcagccgcgttagtgtaaacaggaacatcgataagtagtgtaaaaacttgcacaatgaaatccgaagccaaggatggagaggaggag

SEQ ID NO: 508600 - DNA, 100 bp, Homo sapiens
ccggccctggagatggtccccggcgccgcgggctggtgttgtctcgtgctctggctccccgcgtgcgtcgcggcccacgattgtctacaaagcctggctc

SEQ ID NO: 508601 - DNA, 100 bp, Homo sapiens
tcagtcccgtgttaaaagaaaacaaggcgattccgcagtccccccgttccctggaggtcctgtggaatgggcaacctcctggcttcaggggccagcgatt

SEQ ID NO: 508602 - DNA, 90 bp, Homo sapiens
gcctggtcgagccggaggaagccaccagattgcagcaaaaattggaggtgatgcagggacatcactgaattcaaatgactatggttatgg

SEQ ID NO: 508603 - DNA, 82 bp, Homo sapiens
gctcaaggcggcgcggcggccactgggcgcagcacccagaatgattacggacctgaagccaaagaacaagatgcgctagtgg

SEQ ID NO: 508604 - DNA, 100 bp, Homo sapiens
ccgagagcgtgaccgagagcgcgaatatcgtcatcgttagaaggtggacgccctgcttcatctggcccgccagaatcgggctgtggcccgcacagcccag

SEQ ID NO: 508605 - DNA, 51 bp, Homo sapiens
ctctacggcatctggagcaactgctaaagtctccagtgaatattgaattgc

SEQ ID NO: 508606 - DNA, 82 bp, Homo sapiens
cagcagctgagaaaggagctcggggactcccccaaagacaaggagtttgggctttgcaaaactgagaacaaagccaagtcgg

SEQ ID NO: 508607 - DNA, 75 bp, Homo sapiens
atcgagatcgactgttacaacagcctggcaggtgctggagaatctggtaaaagcaccattgtgaagcagatgagg

SEQ ID NO: 508608 - DNA, 128 bp, Homo sapiens
aaagcatggacctaatgaacgggcaggcaagcagtgtcaatattgcagctactgcttctgaggtctggtgagctgtaccttctttctggcagtgaatggtctgtattcctctagtgatgatgtgatcg

SEQ ID NO: 508609 - DNA, 95 bp, Homo sapiens
ctcactaaaatgaaagaaaccgctgaggcttatttgggaaagaagtgctactatatcggggccacagatgatgcagccaccaaaatcatcaatga

SEQ ID NO: 508610 - DNA, 100 bp, Homo sapiens
ttcaacaagaaatcacagtgctgagtcagtgtgacagtccatatgtaaccaaatattatggatcctatctgaaggtgtggctggatctcctaaaacccat

SEQ ID NO: 508611 - DNA, 100 bp, Homo sapiens
ctgatggaatccaatcctctgcttccaggacaagtcctgcgcttggggatcctctgtacgcccgttcactggctggtgtttggaatgctttatcctgcat

SEQ ID NO: 508612 - DNA, 71 bp, Homo sapiens
ggcagccgaggccgcgaactgcatcatggagaactggactcagaggatgccccgccatgctgccgtctggc

SEQ ID NO: 508613 - DNA, 80 bp, Homo sapiens
tctctttctggcctggaggctatccagcatacactggcagtgatgtctgtggacctgggcagtgagtccatgaaggtggc

SEQ ID NO: 508614 - DNA, 83 bp, Homo sapiens
tgaagaatccccaccacaataccaaacatcttacctgcaaatgaggagaaggaggaagtgaccatggacacaagtgaaaacag

SEQ ID NO: 508615 - DNA, 75 bp, Homo sapiens
ccaggaccccctagaagtctagaaatgccaggcccagacatgtccgtccttgtaagttaaaagcttccatgggag

SEQ ID NO: 508616 - DNA, 76 bp, Homo sapiens
cgagctgctgctggattgaactcagagaagccgggcaaagggaagcatcgtgctgaagtatgaaccagattctgcg

SEQ ID NO: 508617 - DNA, 82 bp, Homo sapiens
gaccggcgcgcgggagcgctacggccccaacggtgaaaggtgtagcagtcactcggcctacacccacagcatcgaccttgtg

SEQ ID NO: 508618 - DNA, 93 bp, Homo sapiens
ctagacctgcagagtgaagaaagctggtaatagatgtctgacaaactaaagaaagacttgtgttacatatttggagttcttacaacatggcag

SEQ ID NO: 508619 - DNA, 90 bp, Homo sapiens
gatctccaagacgtagaggaagtggagatcggcagagacaccttctggcccgcaggtgcatgggaaaccatggaagacacaaattctgca

SEQ ID NO: 508620 - DNA, 90 bp, Homo sapiens
gccatcttggatccgcgggacaagaaaattcatgcgacaggtgcagttcaggagcagatgagatccaagggaaaccgagataggccatgg

SEQ ID NO: 508621 - DNA, 75 bp, Homo sapiens
tttggaaacattaaagaagccatttatccgacgcttccattgcacacagattccatgtgatgagagagaaacatc

SEQ ID NO: 508622 - DNA, 88 bp, Homo sapiens
gcctacacgccgccgcttgtgctgcagccatgatgtggacgagtgtgcccaggccctgcacgactgtcgccccagccaggactgccat

SEQ ID NO: 508623 - DNA, 82 bp, Homo sapiens
ccccggcctttgccccaatcttgtgtgggcactgaagggggactacaggttcgagaagtcccctttacttggtaaatcacgg

SEQ ID NO: 508624 - DNA, 97 bp, Homo sapiens
gtccagggctggagagaaaacctctgcgaggaaagggaaggagcaagccgtgtgaacagagtatctgtcaggcaagagctgctgtgatggtttatga

SEQ ID NO: 508625 - DNA, 74 bp, Homo sapiens
cacagatgtccaagctgccaaaaagaataaagcgttggcttctgattttcctcacatttctgcttgtgcacatg

SEQ ID NO: 508626 - DNA, 90 bp, Homo sapiens
tgcgtgtggaagactacgaaccttacccggatgatggcatgggtaacaacatgctgtaccccaaggaagacaaggagaaccgcattctgc

SEQ ID NO: 508627 - DNA, 90 bp, Homo sapiens
gcagatatagaacatttcttttatcacaatgactatgctcagctgtgtaacatccccgtgacgggacgccggcagccatatggacgggac

SEQ ID NO: 508628 - DNA, 90 bp, Homo sapiens
cgcactcggagccggcacggctcggcgtgggtaattccagaattgattggccataccattgtcactgtattactgctcatgtcattgcac

SEQ ID NO: 508629 - DNA, 85 bp, Homo sapiens
cttctctgaggcggcgagagatggtcaggtctggagctcgaccgggccagacaagttggatggcttgaggactggtactaaaagg

SEQ ID NO: 508630 - DNA, 100 bp, Homo sapiens
cactccacctggacctgccccatggaggtgctgcgggatcacctcctcggcgtgagcgacagcggcaaaggtggcaatgaccatgagatcttcacagacc

SEQ ID NO: 508631 - DNA, 90 bp, Homo sapiens
gcggaggctggacgcttgcatggcgcttgagcttccttcaaaatgtctactgttcacgaaatcctgtgcaagctcagcttggagggtgat

SEQ ID NO: 508632 - DNA, 83 bp, Homo sapiens
cgatgtgatcgtgctggggaccggtctcaccggggggccctcagcctcttggccttgaacgggctgttcatcttgattcacaa

SEQ ID NO: 508633 - DNA, 74 bp, Homo sapiens
tcagactctgatggtgatggcaaaggtggagccgccaccaaaatgcagattttcgtgaaaacccttacggggaa

SEQ ID NO: 508634 - DNA, 75 bp, Homo sapiens
gcgaaggtggcggcgctgctgctcgggctgctcttggagatgccatggacaatattaccaggcagaaccaattct

SEQ ID NO: 508635 - DNA, 51 bp, Homo sapiens
tcacctctaaaaaatgggatggggtatttctcaagctgccagatacgttta

SEQ ID NO: 508636 - DNA, 100 bp, Homo sapiens
cgacccgctgctcagcgtcctcatgtggggggtaaaccactcggtgttccattgcctaaagaggagaacatttctgctcccttgatctccagctccccag

SEQ ID NO: 508637 - DNA, 100 bp, Homo sapiens
cctggctatgcttcagccttgatgacggccatcttcccccgttgcacctggacttgatatgaaagtaaccatcagaaaatcaacagagatcttaaacttg

SEQ ID NO: 508638 - DNA, 83 bp, Homo sapiens
ctcaacaagaagatagaccgtctgcaaggcaccaccatcaggtcctccagcagcctgacctgagtgggttagtgatccagaga

SEQ ID NO: 508639 - DNA, 82 bp, Homo sapiens
tcgtacacttcttggcagtcatggacaagagctattgatagaaggatcagtgaatgcttgtgaaaagacctcatttatgttt

SEQ ID NO: 508640 - DNA, 75 bp, Homo sapiens
gtcagtattccggccagcttcacgaagtcagagaggaaggcccttttgtctacttgtctttagtaggaaacgttg

SEQ ID NO: 508641 - DNA, 82 bp, Homo sapiens
actctgtttgtgaggcacagccccccacagcagaaccccagctctacccacggcgccatgtcagaaccggctggggatgtcc

SEQ ID NO: 508642 - DNA, 75 bp, Homo sapiens
aatgtccatggatttgtttctcattctcatatttcaccaataaagggaacttatagaaatgctggcaatttcaag

SEQ ID NO: 508643 - DNA, 100 bp, Homo sapiens
accatgccgctcctaagcctgcacagccgcggcggcagcagcagtgagagccctccagaatacccatcatatagcccctgaggtggcatggtgatgtctc

SEQ ID NO: 508644 - DNA, 98 bp, Homo sapiens
ccgattcctctttcccgtggggtgcagttggccaaccaggatctcccaacccgaagacagcaggcagcccaataatgtgatcagacagcctttgggtc

SEQ ID NO: 508645 - DNA, 96 bp, Homo sapiens
gtgctccacaaatatttacagtcggaggagtactcggtgaaatcctgtcctgaagactgtaaggctgtggaaaatctctgttctcacaaagtctcc

SEQ ID NO: 508646 - DNA, 100 bp, Homo sapiens
ttccagtgccaaaccaaactggagctggtgcagcaggaattgggatcgtgtcgctgcggccaagtggcatcagagctgagtgatggacgacctgcagtcc

SEQ ID NO: 508647 - DNA, 83 bp, Homo sapiens
tgtccgagggcaccaaggcggtcaccaagtacaccagctcgaaatttgcctgaagacctggataatctccatttttgtcatgg

SEQ ID NO: 508648 - DNA, 75 bp, Homo sapiens
aaaactggagagcttcatcaaaaatagtgatagctttgataagtcaccaaggaagaaggattggccttggcccga

SEQ ID NO: 508649 - DNA, 90 bp, Homo sapiens
catgactaccgcatagccctatttggaggctctcaaccacagtcttgtagatattttaacccaaagcttccttcaaaatgtctactgttc

SEQ ID NO: 508650 - DNA, 75 bp, Homo sapiens
tttgcctccggttggggctgctgtttctcttcgccgacggctggatctcagcaagtggctcacttagtggggcta

SEQ ID NO: 508651 - DNA, 82 bp, Homo sapiens
ggagtgaaggatgaattctgtaggtggtgcatccaaaacaggagaacttgcgcctgtcaggggctggatccagaaacctgtg

SEQ ID NO: 508652 - DNA, 82 bp, Homo sapiens
tctccctgctccgcagcgacatcaccaagctggaggtggacgccatcgtcaacgccggcccctggccccaacatggcccgtc

SEQ ID NO: 508653 - DNA, 75 bp, Homo sapiens
agcaagtgcgcggttggggccactgcgaggccgttttagggtgagcttgtcggccacagactgctacattgtgca

SEQ ID NO: 508654 - DNA, 83 bp, Homo sapiens
gcacgtgtttgcggttcagccctttgatgaccgcagcagatggcctctccagaggagaagtgtcaacaagtcttggaaccccc

SEQ ID NO: 508655 - DNA, 74 bp, Homo sapiens
atatgccctgtggacatgacttttgtagaggatgttgggagtcgcggggagacaaccccttccccaagaatgct

SEQ ID NO: 508656 - DNA, 144 bp, Homo sapiens
gaagagagagaggcatttagaattcattgaaaacagctggtggacaaaattttgtggcgctctgcgtcccctgaagatggccctgctgtggcaccagtgaccaacgggaacacaacggtgccacccctgaacgatgatctggac

SEQ ID NO: 508657 - DNA, 100 bp, Homo sapiens
aagagaccagtgttccaggaagaccaggttccacgaaacgaaggcagtgctacccaaaagcaccaattccactgatcctgtgaaggctgcccaatttgag

SEQ ID NO: 508658 - DNA, 100 bp, Homo sapiens
ctgcaccatccacggaccacagctcactttccccaaggaccagcttgacgaggcctggactgctggtaggtgagtgctgtcctcggctcactttcctcaa

SEQ ID NO: 508659 - DNA, 75 bp, Homo sapiens
gcgggtcttgggtcctccgagagcagcagcggccgacgcccccaacccatccctcatcccagagactgatgccgt

SEQ ID NO: 508660 - DNA, 97 bp, Homo sapiens
cacagtatagttttgccggctgcagtttcttcagctcatccggttcctaagaataacaagcctttgtattcatttgaagataatgcagactatgttt

SEQ ID NO: 508661 - DNA, 88 bp, Homo sapiens
agggatatggctttgtctcctttttcaacaaatgggtctggagaaaatgatgtggaatataacaacatggaattagaagagggagaac

SEQ ID NO: 508662 - DNA, 121 bp, Homo sapiens
ctggggcccgccgccccgcgggggagggcggagctggcgcggcccctagctttctccttctggtgtggggcccgagcctcagactatggcatgaaactgccaatcctgcgttccaaccctg

SEQ ID NO: 508663 - DNA, 75 bp, Homo sapiens
tttggcgagtcagtgactgaagcgcccgtccattccaaggatgggagtcccagcttctggagacggggttcctgg

SEQ ID NO: 508664 - DNA, 99 bp, Homo sapiens
gcctgtcatagttgattactgccttctgctgcagcgaaaattttatttggagagaagcaagcatctttgcctctttggagtaggaaattcagacttgaa

SEQ ID NO: 508665 - DNA, 88 bp, Homo sapiens
gctggcggcgggcatcttcttcgtgaggctgctcttcgagcgtctgaagatgatgagaaactgaaaaagaggaaggagcgatttggga

SEQ ID NO: 508666 - DNA, 100 bp, Homo sapiens
ggtcgagcacataacggggttcgggtgtctcgtgtgtgaacatcacaggtgaacctgagcaaggtgggcgagtattggtggaacgccatcctggagggag

SEQ ID NO: 508667 - DNA, 100 bp, Homo sapiens
acttgtgcacacatgtagagacctttgtatgtgccgacttcctggtgacggaggtggaaaatggtggctccttgggcagcaagaagggtgtgaaccttcc

SEQ ID NO: 508668 - DNA, 74 bp, Homo sapiens
gtttttcctaatggaaaatcacatacctttccagtttgtttaagcatcttaaacacgtggcatggaagaccaga

SEQ ID NO: 508669 - DNA, 75 bp, Homo sapiens
acaagtggagcgctgagaagaggcggcctctcaagtccagcttgggatctgtgccagttcagaagcaggcgagcc

SEQ ID NO: 508670 - DNA, 80 bp, Homo sapiens
agattataatcaggaagtggatgcctccatttttaaggccagctgcgggccgtccagcggctgtgccacttctacagcgc

SEQ ID NO: 508671 - DNA, 83 bp, Homo sapiens
aagttcagggctcccactgattctacattatgcttaccctgaaagaagcagatcccagttcaaaagtagccataagaaggaag

SEQ ID NO: 508672 - DNA, 75 bp, Homo sapiens
gctctggctgtgctgcgcggcccccgcgcatggcaagaagctcttctggctgccattagtgaaaaagacgccaat

SEQ ID NO: 508673 - DNA, 51 bp, Homo sapiens
ttcacagacatgcggaatttgagattggcacagcaacgaggggacagtgag

SEQ ID NO: 508674 - DNA, 82 bp, Homo sapiens
agcagcgtgcgttcagccctggggattcagtggcctttgaggatgtggctgtgaacttcaccctggaggagtgggctttgct

SEQ ID NO: 508675 - DNA, 51 bp, Homo sapiens
cgggacgctcctgaagccgcgagatggaacaggagtacagctgtgtagtaa

SEQ ID NO: 508676 - DNA, 96 bp, Homo sapiens
gcagctcaccaagaatatgcacttgcacaagctggtggctgggggtcagttccgggtggtcaaggagcccctcggctttgtgaaggtgctgcaatg

SEQ ID NO: 508677 - DNA, 50 bp, Homo sapiens
tgataacgaagcagctattgtccaggtacatcaggaacgtctctatcaag

SEQ ID NO: 508678 - DNA, 96 bp, Homo sapiens
cgcggagaaaaggctgacatgcccgtcctatatgacagaatgattacggacctgaagccaaagaacaagatgcgctagtggacagattgctgacca

SEQ ID NO: 508679 - DNA, 87 bp, Homo sapiens
cgctaatcccgggtcaatatgacccttttcaaggaatggctggaacaatatatttcctggctgacctgctagtccccacaaaagcca

SEQ ID NO: 508680 - DNA, 50 bp, Homo sapiens
aggccaaggaccctgagtgcaagacagagctctactttacgaagtgtttc

SEQ ID NO: 508681 - DNA, 90 bp, Homo sapiens
gctctggactggatatttctacctcggccccaggttctctgcagatgcagtaccagcagagcatgcagggtctccttgtgttgcccgggc

SEQ ID NO: 508682 - DNA, 90 bp, Homo sapiens
ccatcgcgttttgccagcgataatacgcctcaggcaatggtggcttgctatccgggaaatggaacaggttatgttcgccacgtggacaac

SEQ ID NO: 508683 - DNA, 98 bp, Homo sapiens
gcctcccgaagtgctgggattacaggttgtgcagcctgactctgaagaagctggtggtcttcaaggagctggagaaggagctgatctccgtggtgatc

SEQ ID NO: 508684 - DNA, 100 bp, Homo sapiens
cctgactaaagcttgaaatgctacatttccaagattaagcctgatcaagatgacaacctcccaaaagcaccgagacttcgtggcagagcccatgggggag

SEQ ID NO: 508685 - DNA, 80 bp, Homo sapiens
ctggagggaagagcgatgggagagctagcatatttggcagcttattgcttcgaaacccagctggtcaccaaaagcttgat

SEQ ID NO: 508686 - DNA, 51 bp, Homo sapiens
ggcaccgaggaccagctcaatgacaggaacaatcctgtgagtttatgatat

SEQ ID NO: 508687 - DNA, 75 bp, Homo sapiens
ccatacaaagtaagctggaaagcagatggtactcgataccatgtttgtgtggaagtgccccgtgtttgctatgcc

SEQ ID NO: 508688 - DNA, 51 bp, Homo sapiens
gccaagggctacattgaggtgatgaggtactccaaagattcaggtttactc

SEQ ID NO: 508689 - DNA, 77 bp, Homo sapiens
acagtgggggtgtgcaaacccgagagaactggatgaggtttatataactttccaagacaaggaagttgtgcaaagcc

SEQ ID NO: 508690 - DNA, 60 bp, Homo sapiens
aatgtgctattggcaaagagagagaacatgatgagtgtatcacaaatcagcacaactgtg

SEQ ID NO: 508691 - DNA, 88 bp, Homo sapiens
ggagaaggagaaaaacagcctaatgaacaaagcctccaactacgattcacagtctgagaatgaggcttcaccagtaaaacggccacga

SEQ ID NO: 508692 - DNA, 82 bp, Homo sapiens
gtgcccacagctcctggagccccacaggaaagctccaaccatggccatggggctcttccgcgtgtgtctggtggtggtgacg

SEQ ID NO: 508693 - DNA, 80 bp, Homo sapiens
cagtccgccgctcaccccgcggccgcaccttcccgccttctcagatggacacccgctccgggagccagtgttccgtcacc

SEQ ID NO: 508694 - DNA, 74 bp, Homo sapiens
atgtatcctccgaagctatggcctgaagacgggattctttagtgccggtggtggtgtgcacattgagccccggt

SEQ ID NO: 508695 - DNA, 100 bp, Homo sapiens
tccaccatcgactacgtggaggacgggcttggtggccatccctgtctccatcttctatagtgtgccacatcagaagcactttgaccactatatccgcttc

SEQ ID NO: 508696 - DNA, 100 bp, Homo sapiens
ggcactgggatgcttccacagatgtacctgaaaagtcgtcactctttcaccaagagtacccaaaggcaagtggaacagctctaatggggttgaagaaaag

SEQ ID NO: 508697 - DNA, 90 bp, Homo sapiens
gagcgacatgcaagagctgcagtggctggagaaaatgccagagtcatcgccggccaaccacttggctggagtgcagtggcgcaatctcgg

SEQ ID NO: 508698 - DNA, 98 bp, Homo sapiens
tttggaactgtcaggtacctcaaagcgcttcaaccactcccagaagacgtccttcactcccaaaatgaggcttttctgaaacggcgaggaccaccaac

SEQ ID NO: 508699 - DNA, 100 bp, Homo sapiens
agaatttatcaaaggaaagatggatccagacaagtgatttaaagggagtgatagtcactctgagtgatgatggtcacttgcagtgttcatacctggggac

SEQ ID NO: 508700 - DNA, 50 bp, Homo sapiens
acacgctttttggggaactggtgtggagaccagtgtgcttttcttggaga

SEQ ID NO: 508701 - DNA, 83 bp, Homo sapiens
atcgatgtttcaatattggaagcgctttgatttacagcagctgcagattacctctctagtgacccttcagctgttaaccctgg

SEQ ID NO: 508702 - DNA, 75 bp, Homo sapiens
agacgtccaatctgagcgtgctgcggacggcgctgcggtacatccaggcggcggcggcggcgcccgggagccgga

SEQ ID NO: 508703 - DNA, 88 bp, Homo sapiens
ggcgcggcagtatccttggggcactgtgcagggtgggcagaaccgaggtggtccggagcagcctgcatcccgtgttctccaaggtctt

SEQ ID NO: 508704 - DNA, 99 bp, Homo sapiens
ttggcgggtggaggaaaatcttggggtatcgcacatttttataaaggtcattggtttcctggaggccattgtttgcataaaatttggacaagatctctt

SEQ ID NO: 508705 - DNA, 96 bp, Homo sapiens
gagcactcggtcatgtacccggtggactcggtgaagaactacacgaaggccatgcggctgtttgtgggagaaccggtgtggacagcgtacaaccgg

SEQ ID NO: 508706 - DNA, 74 bp, Homo sapiens
ccgttcttgaccaaacatgacagactctgaacatgcagggcacgacagcgggtaccatcgaatgcttcatggga

SEQ ID NO: 508707 - DNA, 88 bp, Homo sapiens
attgacgccatgtcgggttattcgagtgaccgagaccgcggccgggaccgaggaaacgcttcgttaagggactcaggcagtacgggaa

SEQ ID NO: 508708 - DNA, 100 bp, Homo sapiens
tcatgtttgtgaacatttctccactggaagagaacgtctccgagtccctcaactctctacgctttgcctccaagctgccaaggggccaagggatgagctg

SEQ ID NO: 508709 - DNA, 100 bp, Homo sapiens
ccctcactcgccttcgagagataaagaaagcgttacctctcatttctctttgtgattcttgacggtgactcttgagcggtggtgccccccccgggcacgg

SEQ ID NO: 508710 - DNA, 80 bp, Homo sapiens
cagaagtccagagctgaggactgcctgtttgcaggctggacaaatcaggacgcaaaccctcgtcagctttggaacacaaa

SEQ ID NO: 508711 - DNA, 96 bp, Homo sapiens
ggacccacagggctgaaggaagctgccttgtacccacatctcccgccaggagaacggcgccagcgtgatcctccgtgacattgcgagagccagaga

SEQ ID NO: 508712 - DNA, 75 bp, Homo sapiens
gaagggagacgacgctgctgggtccgctgagcggggcgacccgaggacttggatgttgtgggtgatggtatgcag

SEQ ID NO: 508713 - DNA, 78 bp, Homo sapiens
attcaggaaggactattctcattaaggcaccaagtatagatgagaaagtagatcttcattttattgcattagttcatg

SEQ ID NO: 508714 - DNA, 83 bp, Homo sapiens
cggggagcttctgcccggtgattggtcaaatgaggtttttagaacttcagccataaaaatgggcagaattttccttgatcata

SEQ ID NO: 508715 - DNA, 75 bp, Homo sapiens
ggatcctgaggaggcagctgcggtggcagctgctgagttctcggtgaaggttcttcccaggagactctgccggcc

SEQ ID NO: 508716 - DNA, 100 bp, Homo sapiens
gaattcaagaatgatgaaactgtagcattgaatgaaatgtggaaatgtcaaaatctgctccgacatcaagtaaaggatttgcttgacttgattaagcaac

SEQ ID NO: 508717 - DNA, 113 bp, Homo sapiens
cgcatcactcccagctgcgcaaagcttgcgaggtggcgttaggagcctcacagtctactcagagaaaaataaaagaaggcaaaatgagtcctccccatttccatgcaagccag

SEQ ID NO: 508718 - DNA, 99 bp, Homo sapiens
taagacttatgaatgacatgacagctgattcctggtgcccctgatgatgaagcagtacggatatttttagaatttgagagagttgaatcagcaattaaa

SEQ ID NO: 508719 - DNA, 100 bp, Homo sapiens
tggacggggtcctcaggaagttggccaaagtatcccacatgacgagtgccgcttacaaacacgcagatggcaagaagattgatggcaggagggtccttgt

SEQ ID NO: 508720 - DNA, 98 bp, Homo sapiens
agaagcagtgaccgtgcccacgccaagcctcccccactggcaggattgccatgagttgtggagtaagaaacggcgacgtcagcgacaaagtggtgttg

SEQ ID NO: 508721 - DNA, 75 bp, Homo sapiens
gccgaccgcagcagctcaaggtgccatctgcctgaaaccaggaatggatctggcagacacctatattatgtttgt

SEQ ID NO: 508722 - DNA, 90 bp, Homo sapiens
aatgaaaccgggaggaaagaagacaagagagaacgcaaacagtttgaagctgaggattttgctatggtgaactaaacggtaatgctggag

SEQ ID NO: 508723 - DNA, 117 bp, Homo sapiens
cgataccgaagcgggctgtgtgccccttctccacccagagcctgcctagggtagttaaaagacgagtgaatgctctcaaaaacctgcaagttaaatgtgcacagatagaagccaaat

SEQ ID NO: 508724 - DNA, 132 bp, Homo sapiens
cagtccgttgctttactttttgcttcaccgacatagtcattatgccgaagagaaaggtgaagtattacagacacttagcacctgatcacttgctgcaaatatgtcatcgactaggacctcttcttgaacaag

SEQ ID NO: 508725 - DNA, 100 bp, Homo sapiens
aagcaaccctgacttcttgaagaaagacagatcctgtgtcacccggcaactcagaaacatcaggtccaagatagaagcagatttgggatatcctggaggt

SEQ ID NO: 508726 - DNA, 100 bp, Homo sapiens
ggcggggaggcgcggagcgcgcgtgtggtccttgcgccgctgacttctccactggttcctgggcaccgaaagtactatactggcaattgctggagaagat

SEQ ID NO: 508727 - DNA, 75 bp, Homo sapiens
tgaagtataggctgaggctacctgtgaacagtacgcagtgaatgttgatcaccccttctgtgtcattctctgagg

SEQ ID NO: 508728 - DNA, 75 bp, Homo sapiens
ccaagccctactgggaggcacggagggtggcgaggcagaattgcggcgagcagtaagaagcagcgtgtggaaaag

SEQ ID NO: 508729 - DNA, 100 bp, Homo sapiens
caaagagattactccaggcccagcaacatatgagggaaaatgggaagtccctctgcctaaagtacgtgcccagggagaaacagaagtattaaaagttatt

SEQ ID NO: 508730 - DNA, 82 bp, Homo sapiens
ataggaaggttgttgattactcacagtttcaggaatctgatgatgcaggtgacaatggaatggactctgatatggaagagga

SEQ ID NO: 508731 - DNA, 83 bp, Homo sapiens
gggactttcttcgttgccatgaggaaagaattctccgaggccgagacgcatccagagctttcgtgaccggggactgttctgaa

SEQ ID NO: 508732 - DNA, 73 bp, Homo sapiens
ggacctgggcagagactccaagacaagctcagccgaggtcaccatccagattgatctggatactattgatgta

SEQ ID NO: 508733 - DNA, 99 bp, Homo sapiens
tttggcattgctgctaagtacatgctggattgtagaacttctctctcttgttcggtgaccagtgacttggattttccaacacaagtcatcccattaaag

SEQ ID NO: 508734 - DNA, 83 bp, Homo sapiens
ctcctagaaattccccccgaagaagactcccccacatctgggaggcggctttccggaaagtagtacaagcaactatggtacgc

SEQ ID NO: 508735 - DNA, 75 bp, Homo sapiens
cattctttacagctcaccggatgtaaaagaactctggctagagaccctccaaggcctcccgcgacgatgcccctc

SEQ ID NO: 508736 - DNA, 98 bp, Homo sapiens
gcctttagaacgaactatcacttacagagacatgtcttcattcatacagatgttcatttggatttggaagaccgcctggcaaaatttatgaagacaga

SEQ ID NO: 508737 - DNA, 80 bp, Homo sapiens
ccattggagctcatcagactgaccgtgtcttacatcagttcagagaggtaaatcagggatttcttcttggtttggatcca

SEQ ID NO: 508738 - DNA, 100 bp, Homo sapiens
atgatcttgctgctggggaagatctggaggtccaagtgctgcaagggtctgcagcccagagggcaccttctgcaaacatgtctgtggatcccctatccag

SEQ ID NO: 508739 - DNA, 74 bp, Homo sapiens
ttcacactgcagaactgggttctggactttgggcgtcccattgccatgggccatgatccaaaggaaccagagca

SEQ ID NO: 508740 - DNA, 75 bp, Homo sapiens
gcgagaggtgcggcgaaggaggcagaggcacttatgcttgtcaggttatcaatactctggctgaccatcatcatc

SEQ ID NO: 508741 - DNA, 100 bp, Homo sapiens
caccgagcccttccaggacggctacagcctgtgcccgggccgggagctgggcagatgcatatgaaacagccaagatgctgtgtgaacagtattacctggt

SEQ ID NO: 508742 - DNA, 51 bp, Homo sapiens
gcaggaccgaattcagcaagagacccagattgatcactatgttggcatcgc

SEQ ID NO: 508743 - DNA, 98 bp, Homo sapiens
cgccctgcgccccgctctgctgtgggcgctgctggcgctctggctgtgctgcgcgacccccgcgcatgagagtggtttttcctcctgtctcatgaggt

SEQ ID NO: 508744 - DNA, 100 bp, Homo sapiens
cgcagtcagccaatatttctgtgcggggatgcctgatacggaggacttctgatatcctttctaaatatctgcctgtgaagattgagcaggtcgtttgttg

SEQ ID NO: 508745 - DNA, 100 bp, Homo sapiens
tggagaatggctggtctcctactcccagatgcatccgtgtcaatccatgtgtaatatcacaagaaattatggaaaaatataacataaaattaaagtggac

SEQ ID NO: 508746 - DNA, 50 bp, Homo sapiens
aaaaaaagcccagtggaggaaagagctagatggagtctcgctctgtcacc

SEQ ID NO: 508747 - DNA, 100 bp, Homo sapiens
aaatctacagagacaattcctcaagtggacttggccatgattggttatatggatcagaaactttcgaagttggtagaagagctcacaacttcaggagaac

SEQ ID NO: 508748 - DNA, 97 bp, Homo sapiens
ccatgcaagatctgtggagacaaatcatcaggaatccattatggtgtcattacatgtgaaggctgcaagactggcattgctcgggtaccacttgctg

SEQ ID NO: 508749 - DNA, 83 bp, Homo sapiens
ggtacatgaactcttttccagtgtccttcaggagatctgtgatgaggttcaaggtgtttgcagactatgaagcctacatgcag

SEQ ID NO: 508750 - DNA, 75 bp, Homo sapiens
tcaggcctcagggactttacccaggagaagtccgtcttctgccgtatcaggctgccgcgggcggacacgccagag

SEQ ID NO: 508751 - DNA, 75 bp, Homo sapiens
gacgggggccattcagcaactgggtgggacagaacaatggcagcccgagtacttataattggcagtggaggaagg

SEQ ID NO: 508752 - DNA, 75 bp, Homo sapiens
ttcttaacccagaagtagctgaatgtgttactccattgctgaggagtgccagtgacaactacagatcccaattgg

SEQ ID NO: 508753 - DNA, 96 bp, Homo sapiens
ggatatgaaaagtgaagaaagtgatcataggagaaaaccatttcagatcactttgccagctgtgtggaggatggatttgagggagacaagactgga

SEQ ID NO: 508754 - DNA, 83 bp, Homo sapiens
gcagaaggtctctggagacatcttcagcaggacatagatctgattgacatcctttggcgacaggatattgatctgggggctgg

SEQ ID NO: 508755 - DNA, 98 bp, Homo sapiens
acaggctcacggagatggagacgctgcagtctcagaatgacctggatgaccctgaaagaggaatgatttttgtctgctctgcaacccataaaaccaaa

SEQ ID NO: 508756 - DNA, 90 bp, Homo sapiens
agtcactgcctgcgcagctccggccgcctggctccccatactagtcgccggaatttggataaagagagggcagtgctactacaacgccgg

SEQ ID NO: 508757 - DNA, 71 bp, Homo sapiens
ttgccgtcgacggcgagcccttgggccgcgtctcctttgaggtggcacaagatctctgtaaagtagcaggc

SEQ ID NO: 508758 - DNA, 75 bp, Homo sapiens
cttggactgagtcctgcaggacacaggttcttctgagctatgaaggggcccagatttaagggctatttttgacac

SEQ ID NO: 508759 - DNA, 87 bp, Homo sapiens
ccgagctttccgatatcaggagaggttcaaacatatccttgtagatggagatactttaaggctttcctcggagacgggtggcatggg

SEQ ID NO: 508760 - DNA, 75 bp, Homo sapiens
agctgctgctgggcatcgccttgctggcctacgtcgcctgcattttgttcccaacatcacctttggtcaccctgt

SEQ ID NO: 508761 - DNA, 98 bp, Homo sapiens
caatcctcagcaacatcttaatgcacagccacaagttacaatgcaacaggagtctactcttcatcttgtgttgagacttcgtggtggtgctaagaaaa

SEQ ID NO: 508762 - DNA, 90 bp, Homo sapiens
ctcggctgcgggaaatcgggctgaagcgactgagtccgcgatggagggtggagagattcaaccagttagcgtgaaagttggagataaagt

SEQ ID NO: 508763 - DNA, 75 bp, Homo sapiens
agggaaccctggtcaccgtctcctcagaataactgaagtgaagtgatggactccgatttggagagtagtaagacg

SEQ ID NO: 508764 - DNA, 101 bp, Homo sapiens
ctaccgctgcggctactgcaagaacgagtcgggcagccgctccaatgaaaaattgtatggcgacttcttgagctggaagctagaggaaacccttgcccagt

SEQ ID NO: 508765 - DNA, 75 bp, Homo sapiens
ctgatgagctgagaaacaaagccacccagccaatgaagatgtatgagaactttgtggaggaggtggatgctgtgg

SEQ ID NO: 508766 - DNA, 50 bp, Homo sapiens
ggccaagatccaggataaggaaggctggagtgcaatggcacaatctcggc

SEQ ID NO: 508767 - DNA, 100 bp, Homo sapiens
aagaagagcagaaaatagcagccaggaaccaagaaaacttggtcctgggaactccaacaagggagcaaatcagagaaatgaacccaaactacacagaatt

SEQ ID NO: 508768 - DNA, 98 bp, Homo sapiens
tcttagttgatgatttagttgattctctgaagatgccgctcctacgaggactgctgtggctccaggtgctgtgtgcgggccctctccatacagaggct

SEQ ID NO: 508769 - DNA, 75 bp, Homo sapiens
gccacggccgtctctggagagcagcaggtgtgaatgacagaggtggtgccatccagcgcgctcagcgaggtcagc

SEQ ID NO: 508770 - DNA, 75 bp, Homo sapiens
accacagagaatgacgatgacgtctaccgcagcctggaggagctggccgataatctatgccagcaattatgacaa

SEQ ID NO: 508771 - DNA, 80 bp, Homo sapiens
caatcaaaccagtattcttttcacacaggactccctggaggaaaagcggaagcggcagcggtctgaacgcctggaacgga

SEQ ID NO: 508772 - DNA, 104 bp, Homo sapiens
ggagtccttggcgcccccagagagtaccgacgagggggccgaaaccgagaggcagccagataagctggtggtggtatggacccgtcggaaccgacgcatctgct

SEQ ID NO: 508773 - DNA, 100 bp, Homo sapiens
cgtctagagatgtggtgtctcggtccatgactctggagatccgagaaggaaggaagctgcagtaaaggaagatgaagaagaagtttcagataagggcagt

SEQ ID NO: 508774 - DNA, 73 bp, Homo sapiens
cgcccagacgctgcccgcgggcccggccacggcggagccaagatgagcgggatcgtgtgcagaagaaaacctt

SEQ ID NO: 508775 - DNA, 75 bp, Homo sapiens
atttctactggacttcatgcttagatacatgtataacaaggttgctgaagcagaagattgttataatacagctct

SEQ ID NO: 508776 - DNA, 50 bp, Homo sapiens
ggactgttggtctcggccctgcggaagggtcaacatatttcactggcacc

SEQ ID NO: 508777 - DNA, 75 bp, Homo sapiens
ccccagcatctaggaggggtgaaaagacttcactcaggccacactggacacagcaaggagcctctgcccacagat

SEQ ID NO: 508778 - DNA, 82 bp, Homo sapiens
tacgagtgcaacatctgcaaggtccgcttcaccagggctgaagaagatgcagagcagcctgaagctggtggactgtatcatc

SEQ ID NO: 508779 - DNA, 90 bp, Homo sapiens
gaggtcatcagctttgctactgtcacaggtgctggagaatctggtaaaagcaccattgtgaagcagatgaggatcctgcatgttaatggg

SEQ ID NO: 508780 - DNA, 100 bp, Homo sapiens
cacacccaatggacagcatgcctcaccaagtcacatgacaagcatgtggcaaaggagcagagaactttgacaagttcttcacacgaggacagcccgtctt

SEQ ID NO: 508781 - DNA, 100 bp, Homo sapiens
tgacccgaagtaccgacccgagttatgcccaccctccaactttgcgacggaaatgtgtcatcgaaagccaggttgggttaacggcatggagaacagtcac

SEQ ID NO: 508782 - DNA, 96 bp, Homo sapiens
ctcggtctgtggggggaggggttcttgccattccaggcacttctgcgtctgccagcccatctgctccatgcccaggcttttctggctttgcctgcc

SEQ ID NO: 508783 - DNA, 82 bp, Homo sapiens
gcgggcgccaggaccggccgaacgcagagctgtggaaagtgaagaaggcattgaagatgactattttttggagaggcctgat

SEQ ID NO: 508784 - DNA, 75 bp, Homo sapiens
tgctcttggcagacctgttggcactgagtggtatcagaacaaggtttaatagaaatccttaaaaaagtaagccaa

SEQ ID NO: 508785 - DNA, 90 bp, Homo sapiens
ctacaaccttcgatctcctgacgacacaagctccgggtggataaggcagctgctgcagcagcggcactacaagccaaatcagatgagaag

SEQ ID NO: 508786 - DNA, 100 bp, Homo sapiens
accctatcgacgcagcgtccccactacaatgcagatcttcgtgaagactctgactggtaagaccatcaccctcgaggttgagcccagtgacaccatcgag

SEQ ID NO: 508787 - DNA, 75 bp, Homo sapiens
gcctggcaggccctgcgcaccagccaaggccacctttgatgccatttctaagacctacagctacctgacccccga

SEQ ID NO: 508788 - DNA, 75 bp, Homo sapiens
ccgggacccggttccccggcccacagtgggggtgtgcaaacccgagagaactggacctggagtggaagatcattt

SEQ ID NO: 508789 - DNA, 75 bp, Homo sapiens
aagaggaagaaaaagggccagtgtctcccagccccatctgctttgatatgattgaagaagcatacatgacaaaat

SEQ ID NO: 508790 - DNA, 75 bp, Homo sapiens
ggacacgtcccagctctctctgggcatctggaaagaatcctcactatggatgggctcattgaggacattaagcat

SEQ ID NO: 508791 - DNA, 100 bp, Homo sapiens
ttgaggacctactcacagataggaattgaagagatcctgcagatcattcagctggacctagacctgaagtttaagaccaacatccgggagttgtttgagg

SEQ ID NO: 508792 - DNA, 118 bp, Homo sapiens
ggaatgagaagctaaagaaggttgtgaggcttgcccgggttcgagatcattatatctaaaaatggctactggacaggatcgagtggttgctctcgtggacatggactgtttttttgtt

SEQ ID NO: 508793 - DNA, 88 bp, Homo sapiens
agaggccatagctgtctggcatgggcctctccaccgtgcctgacctgctgctgccactgatgtacgaacaagtccgaaagagtttaga

SEQ ID NO: 508794 - DNA, 89 bp, Homo sapiens
accgggccctgtctgtgccggccgtgagctgcggcaggacggctggaggtgtcgtgaaaactacccctaaaagccaaaatgggaaagga

SEQ ID NO: 508795 - DNA, 100 bp, Homo sapiens
gcactccaggtcagcatgaacgatggcctctcttttatctccagttctgtcatcatcaccaccacacactgtaatgtaattatatctagtgctgcagaaa

SEQ ID NO: 508796 - DNA, 75 bp, Homo sapiens
ggaaggtgcgcgagctggtggacaaagcatcttcccagacccgtcagattttgaccgctgctgcaaactgaagga

SEQ ID NO: 508797 - DNA, 100 bp, Homo sapiens
ggagcagcgccaggctgatgtcgagtatgagctccggtgcctcctcaataagccagttttgatggcgacgactttgatgatgtggaggaggatgaagggc

SEQ ID NO: 508798 - DNA, 100 bp, Homo sapiens
tgtcgaaaatctctgcccctggaggagaaatagaaggttggctcaaaaacagaagttgctgagtgcaaggagaaattcgccgcctccaaggaccccacgg

SEQ ID NO: 508799 - DNA, 100 bp, Homo sapiens
ctcgccactgtatttgggccaaattgctttcacaaacttccttgataacatgcttttgcgaagtgcaggaaaattaaatgtgggcaccaagaaagaggat

SEQ ID NO: 508800 - DNA, 74 bp, Homo sapiens
aagacatttcttcggcattctgcaacaggtgtgccacgtcatcaccgaggtgaaatctggaaatttctagctga

SEQ ID NO: 508801 - DNA, 100 bp, Homo sapiens
gggatttggtcgcgagcggcgacgaactgccattggatgtccagaatcccctgtagttgataatgttgggaataagctctgcaactttctttggcattca

SEQ ID NO: 508802 - DNA, 98 bp, Homo sapiens
gccgcccgctgaccccaccagtcttcgcgggcttcgaacccagggagccgacaatggcgtagcttccctctgtgtgaggaaaggatagaaatgttcag

SEQ ID NO: 508803 - DNA, 99 bp, Homo sapiens
acaactcgggcgccgacgagatcggacttcagctacgggacggacgagtacgacggagaggggaatgaggagcagaaggggcccccggagggctcagag

SEQ ID NO: 508804 - DNA, 96 bp, Homo sapiens
ctcttttgtctgcccctattgtaagtgcagatggaacacaacaggctccctggcattgggcagtgttacagtgcactcttctgaacctgaagtcag

SEQ ID NO: 508805 - DNA, 82 bp, Homo sapiens
cggcggcaacatggcagagaccgcggccggagtgggccgcttcaagaccaatttcaggaccacgtcaagacttgtggcaagt

SEQ ID NO: 508806 - DNA, 98 bp, Homo sapiens
gagtccggagcgcctagccctaccggactacgagtatctggtaggcctggaaaatccccagagaggagtcacgtctcttcggagccctacgagcccat

SEQ ID NO: 508807 - DNA, 75 bp, Homo sapiens
cgcctcctacgtttacctgtccatgtgctcaagtaaagctctttgtgacagggcttttcagcttaaatcaagata

SEQ ID NO: 508808 - DNA, 100 bp, Homo sapiens
gagggaggcggcggaccgtcccgcgcggggcacgatgttgaacatgtggaaggtgcgcgagctggtggacaaagcgctggacgtaaagaaagaagtgatg

SEQ ID NO: 508809 - DNA, 100 bp, Homo sapiens
atgattgaatacgatcctgaaagaagattagtgtttgcagaagccaaacctgaccacagacactaaggacaaggagtacaaaccccatgatattccccag

SEQ ID NO: 508810 - DNA, 90 bp, Homo sapiens
cgggacaggaagtggccgtagcggcttgttggataagtacctggagtagaacagaaaaattattatgtctgtgttcccttgggactcatt

SEQ ID NO: 508811 - DNA, 100 bp, Homo sapiens
cgcggcgctgcggagggcttgaggctcgcgagcctccttcgccgcgccccacttgctcgtgcactttacacacatgagtcctattttgtaacggattatg

SEQ ID NO: 508812 - DNA, 101 bp, Homo sapiens
ccgcagagggccctgctggcacgaggcactaagaggctgctggtttgcctagaagagtccatttatattcacaacattaaagacatgaagctgttgaagac

SEQ ID NO: 508813 - DNA, 75 bp, Homo sapiens
acagcttcatttagagtacagattttataaacagcttggcagtgcagatggagtctcgctttgtcacccaggctg

SEQ ID NO: 508814 - DNA, 75 bp, Homo sapiens
gatggagatgaacctctaacacagtggaaaggaaccgttctggatcagtgggaacatcattgtggccactccagg

SEQ ID NO: 508815 - DNA, 75 bp, Homo sapiens
ggagaacacagttggagaaaatcggcagctgagacggccttggccggagcatcagatccatgctgctgctgactc

SEQ ID NO: 508816 - DNA, 90 bp, Homo sapiens
tgaattggaagtttttgctaaagtactgagagctttggataaaaggtcaatggccacaatccggggtctgatggccaagccagggagtac

SEQ ID NO: 508817 - DNA, 75 bp, Homo sapiens
agccctggatctattaaagggagcattccgatcatctgaggaacagcaggactcagaattcatgattgaagaaat

SEQ ID NO: 508818 - DNA, 100 bp, Homo sapiens
cgccgggttctttacctccgagccaggccgccgcaaagcaggctaaagtaaataatgccagcctgattggactgggttatactcagacccttcgaccagg

SEQ ID NO: 508819 - DNA, 98 bp, Homo sapiens
aagaatgcaacaaagctgaatgaactcattcaggttgggccaagtcctgtatctgccatgtctgtggcgtccacctcaacaggctgcattcctgcctc

SEQ ID NO: 508820 - DNA, 100 bp, Homo sapiens
gcgatgcctcacaactccatcagatctggtgctggagaatctggtaaaagcaccattgtgaagcagatgaggatcctgcatgttaatgggtttaatggag

SEQ ID NO: 508821 - DNA, 90 bp, Homo sapiens
gccagaaggaagatggcggatctggaggagcagttgtctgatgaagagaagttaaacacagtgggaatatcacttttgatgagattgtca

SEQ ID NO: 508822 - DNA, 101 bp, Homo sapiens
gatggatgctggcaggggcttggaggtgtcccgacccaggctaagcttgagcatggctgagcaggagcccacagccgagcagctggcccagattgcagcgg

SEQ ID NO: 508823 - DNA, 112 bp, Homo sapiens
actgagagttcactggatgttgctgaagaagaaatcatagacgatgatgatgatgacatcacccttacaggatgctgaaaacgccattcaacagatgggtggccagtggctt

SEQ ID NO: 508824 - DNA, 48 bp, Homo sapiens
gctaacagaactggaccttttcgtattcatgtgattgaacggcgtgct

SEQ ID NO: 508825 - DNA, 49 bp, Homo sapiens
cgcggggctaccggatcggtcggaaatgacggagttagaagccaaaagt

SEQ ID NO: 508826 - DNA, 75 bp, Homo sapiens
ccaccagaaccatcacctcggagacccagacaatcacagctgagatctgtatctgtggacctgaatgttgatccc

SEQ ID NO: 508827 - DNA, 112 bp, Homo sapiens
tcagagggaaaaaggagaaagttaactgaattggtgacacttcgggtctctcacagaggaaggctgagtcatcactagagagtgggaagggcagcagcagcagagaatccaa

SEQ ID NO: 508828 - DNA, 75 bp, Homo sapiens
cagccctggacctggcagatccttcagcaaaagctgtccttacagtgtgtgctgtatttatggagtttaaagatt

SEQ ID NO: 508829 - DNA, 88 bp, Homo sapiens
acattatcactctaaaggatagagttggccatggagataagaaccatgcagatgcagacagatcgcctgtttttcttcaatttattga

SEQ ID NO: 508830 - DNA, 100 bp, Homo sapiens
ctgcaagtgctggagaacatcatggaaaacaacactcagtggctaatgaagcctccatcttccaagaagagcgatggttctgggacatatactaagttgc

SEQ ID NO: 508831 - DNA, 80 bp, Homo sapiens
gcgggccgacctgctggaggcgcaggccctcaagctggtggaggggccggacgtccggttttacagctcccagcacagta

SEQ ID NO: 508832 - DNA, 98 bp, Homo sapiens
actgggaggtggaacgggccgaactgcaggataaccagagcaccattgcctgcttccttcttcctgaaggaaggggaaaatccacccttcacaattaa

SEQ ID NO: 508833 - DNA, 80 bp, Homo sapiens
ggaacatgcagagtctgcacaacttttctgggagaagaggctacaaggacttagtgcatcagatgtaacagaacaaatta

SEQ ID NO: 508834 - DNA, 75 bp, Homo sapiens
tttactgataagaaaacacatctttacacactaaggtctcacgtattgcagggaaggtttggttgtgagatcgag

SEQ ID NO: 508835 - DNA, 96 bp, Homo sapiens
ctgcactcggcctggatcctcattctgcacatggtgaaaggtgtagcagtcactcggcctacacccacagcatcgaccttgtgaacccagcgacct

SEQ ID NO: 508836 - DNA, 90 bp, Homo sapiens
gtttccacgaggaaagaagagctgattgcaattcttgatcattttaacatccaggttggtgttcgaggaagagacattgttgttcttggt

SEQ ID NO: 508837 - DNA, 99 bp, Homo sapiens
gtcaaagtctacccctcctgtcggggaggcaaggtggttttggaccagacaggcgtgtctaagttgcccccaagtttcctggcagtgtgtgatactgag

SEQ ID NO: 508838 - DNA, 82 bp, Homo sapiens
aaaccgaagtgatttccagaggatttacactggcggccaggcggccaggctgcaggaggagtgtgactatgtgcagatgatc

SEQ ID NO: 508839 - DNA, 90 bp, Homo sapiens
gctcctcatcatctttctgctggagatcatcgctggtatcctcgcctacgcctactaccagcaggccaaggagcgggagctggaactgaa

SEQ ID NO: 508840 - DNA, 97 bp, Homo sapiens
atcttcccaacctcatgaatctcatcgccaccatctttgtctttgcagtggtcatctatttccagtgtgacaaaattaggcaagaacgagatgaagc

SEQ ID NO: 508841 - DNA, 100 bp, Homo sapiens
tttggagataaaattttttgaaaatcgggcaaatggccagtcaaaggggtactaggttttgacaagcttgcatcatgcgtgagtataagctagtcgttct

SEQ ID NO: 508842 - DNA, 100 bp, Homo sapiens
atgataatacctcagtgttcacataacttgatccgtatgtgaaactttcattgtacgtagcggatgagaatagagaacttgctttggtccagacaaaaac

SEQ ID NO: 508843 - DNA, 100 bp, Homo sapiens
cgagtatatatctgggatccacataatggagacattctgatggaatttggatgcatcaaattgcaatttggaggagaggcagcacaagcagaagcctggg

SEQ ID NO: 508844 - DNA, 82 bp, Homo sapiens
cgccaggacgaaggccctactgggcaagcaggagcattggtttgaaaaggccctacgagacaagaagggcttcatcatcaag

SEQ ID NO: 508845 - DNA, 99 bp, Homo sapiens
cctcctcctgctgctactgtgtccagcgcaggtaaacagtgttgacctcagagctgctagtcatgagcaggcagcagctgcattgaaaaatgctggcca

SEQ ID NO: 508846 - DNA, 100 bp, Homo sapiens
gtttggtcaatattgtcttaacatgcttcaaataaatcaggtgactgtggggatcatgttgttataatgaacacaagacacattgcattttctggaaaca

SEQ ID NO: 508847 - DNA, 107 bp, Homo sapiens
ctggccaaagcctgcccagacggctcacctgtgcgggatggaacaaaaggccaagtcctgtatctgccatgtctgtggcgtccacctcaacaggctgcattcctgcc

SEQ ID NO: 508848 - DNA, 99 bp, Homo sapiens
aagccgtggaataggtgtatcaagtaatggtgcaaagcctgaaaagaccgggttgaagcttgctctctggagaggctgagccagagaagttctggattc

SEQ ID NO: 508849 - DNA, 100 bp, Homo sapiens
gggctgtcgctcgtctacttcctcagcagcaccttcaagcagggaattgtgggtaacttggccagcggcaagtctgccctggtgcaccggtacctgacgg

SEQ ID NO: 508850 - DNA, 99 bp, Homo sapiens
tcccgggagatcccaggcggtgacagagtggagccatggctagaggtgacttaagagattaaaattaatttggttgctgttggttctgaacaaataatg

SEQ ID NO: 508851 - DNA, 101 bp, Homo sapiens
gagctccaggaagcacgttctctacgtggagcacagttcatcaatggtgctaaggaaatttgctatgctcttcgagctgagggttattgggctgactttat

SEQ ID NO: 508852 - DNA, 75 bp, Homo sapiens
cagatgggcccttcccccaggacgagaagctgaaggatgattcagctaaatttgacagtaatgaagaagattctg

SEQ ID NO: 508853 - DNA, 98 bp, Homo sapiens
agtactggattgtccggaattcatggggtgaaccatgggtaatcaaatgcaaagcagctgtgctatgggagttaaagaaacccttttccattgaggag

SEQ ID NO: 508854 - DNA, 75 bp, Homo sapiens
tctttggaaaaggcaactcaccactgctccagaagatgatagggatgccaaggcctgcgtagtacacggcagtga

SEQ ID NO: 508855 - DNA, 75 bp, Homo sapiens
ggtcctttatatagaagggagagtagatctgaaattcagagtgtagctctgagacttgcttccaaagtcatttcc

SEQ ID NO: 508856 - DNA, 75 bp, Homo sapiens
acgtcactaccactgtctctgctcacagtgccaagtgtgaacgtggcatcactgacacaatcagaaattcgagac

SEQ ID NO: 508857 - DNA, 90 bp, Homo sapiens
ccgccctggacatcaagattaaaagagcgaataaagtttatcacgccggggaatgtcccaaatgccatgtcacaattgagaaggatggtg

SEQ ID NO: 508858 - DNA, 100 bp, Homo sapiens
caacagtgttgtgccagcctacaggaggaaaggccagactcacagaagggtgagaagaacagtgtggactggggtgaccttaacctggtgctgccctgtc

SEQ ID NO: 508859 - DNA, 75 bp, Homo sapiens
cggtgggtgagcggcggccacggcatcctgtgctgtgggggctacgaggaaagaacttgatcttttccctgaatt

SEQ ID NO: 508860 - DNA, 98 bp, Homo sapiens
attgaagacagccatagcccgggcgtggccgtgatacagttcgccgtcggggagcaccgagcccaggttcttgatcaatatgaacgagaaggatttaa

SEQ ID NO: 508861 - DNA, 98 bp, Homo sapiens
tatcctgtccgagcaaagattacctattaccagaacacactgacatttctgtagaaaatgtttcctgactgcaatgagggaaagcggagcacattgtc

SEQ ID NO: 508862 - DNA, 76 bp, Homo sapiens
agaccctgaactagagtcccaggtcaacctagagcccagcgacgtggatggggcagctaggggcagcagcttggat

SEQ ID NO: 508863 - DNA, 84 bp, Homo sapiens
gaggccgccgccgcctctccttgctgcagccatggaaccatggtgaatccgggcagcagctcgcagccgcccccggtgacggcc

SEQ ID NO: 508864 - DNA, 98 bp, Homo sapiens
aaggagtggactagggtcgccggggaagcgggacccctcgtccagtcattgtggaacccatggagcagtttgatgatgaagatggcttgccagagaag

SEQ ID NO: 508865 - DNA, 83 bp, Homo sapiens
gaaaaactggagagcttcatcaaaaatagtgatagctttgataatgcccactgttgatgtctttcagatttccacaaaagagc

SEQ ID NO: 508866 - DNA, 75 bp, Homo sapiens
gtgttcgagaacgaccccgagacggcagaaaatctatttcaggaacttcaggaacattttcaagctctgacggca

SEQ ID NO: 508867 - DNA, 75 bp, Homo sapiens
ggcgaagatccggactctgggtgttttgctaccgtgaccgtttagttgaagactgggatagtttccaagctattt

SEQ ID NO: 508868 - DNA, 139 bp, Homo sapiens
taaaaagcagccggggcctccgtattgaatgaaagacccagtgcaaagacatcaccatgaacactagcagacccagatgatgtggtaccagttggccaaagaagagcctggtgttggtgcatgtgctttggactagcat

SEQ ID NO: 508869 - DNA, 100 bp, Homo sapiens
gctccagcaacagctaaaatctcaaagacaagaggagacactgagggaacaaacacttctggatgcatccgttaaaaggacaactctggtggatagcaga

SEQ ID NO: 508870 - DNA, 100 bp, Homo sapiens
gcgagcacagagcctcgcctttgccgatccgccgcccgtccacacccgccgccaggggtggccgtgactggggagagcacaaccagcggctagaggagca

SEQ ID NO: 508871 - DNA, 74 bp, Homo sapiens
cgtctctctgctgcggcgcggggaccgctgtgctctcggctccccacaggtgcaggaagccgccgcccagccat

SEQ ID NO: 508872 - DNA, 90 bp, Homo sapiens
atattaccagtcagaggcggaaggactcctggaatgccacaaatgcaaatacttgtgcactgggagaggatggatagaatgacagaagat

SEQ ID NO: 508873 - DNA, 75 bp, Homo sapiens
aattctcctgccccagtctcctgagcagctggggttacagttaccttttgatcacagttggagttgtatatgtca

SEQ ID NO: 508874 - DNA, 74 bp, Homo sapiens
ttgtgttcgatatatacagagacagtagggttcatgcatgggagatctcagaccagttgttacagatccggcag

SEQ ID NO: 508875 - DNA, 83 bp, Homo sapiens
gtttatagtttggaacccagactttgcggtggaaaaggaggtgccagatgcaattaaaaagtgtcagagggctggaattactg

SEQ ID NO: 508876 - DNA, 75 bp, Homo sapiens
cgctcctgctgtgcttcgtgctcctgtgcggagtagtgggacatggatttgattgacatactttggaggcaagat

SEQ ID NO: 508877 - DNA, 78 bp, Homo sapiens
ttgaacaaactcgaagaacagctgtggaaagaagttgcaaaacactggaactatgaatagactgacccagctggaaag

SEQ ID NO: 508878 - DNA, 88 bp, Homo sapiens
gtaccctaaaattagggcatgattaagcatgcttatgagcccactcctgatgatgtggccatatcctacctccctctggctcatatgt

SEQ ID NO: 508879 - DNA, 96 bp, Homo sapiens
ttctaattacagcggcgggggcagtgcgcgcttcgggacgcaattggaaacgtgagcctgaatttaaatacattgggaatatgcatgggaatgagg

SEQ ID NO: 508880 - DNA, 100 bp, Homo sapiens
gcttgtgaaaatggacatacggatgttgcagatgttttacttcaagcaggggctgatttagagtggagtcaacatatcaatggagcaagtcacagtcgtc

SEQ ID NO: 508881 - DNA, 75 bp, Homo sapiens
tgaaggagctatcctgagatctgtactgctagaatcacatgcagcccaactacagattcttatggaattcctcaa

SEQ ID NO: 508882 - DNA, 74 bp, Homo sapiens
aggatctggtgtaccaggcgaagctggccgagcaggctgagcgatacgacgaaaaatggctacaaacttcctag

SEQ ID NO: 508883 - DNA, 75 bp, Homo sapiens
atctgtgataaagttggtcagtctcgcactgggaacaagcacatcatgattgacttggggactggcaacaacaac

SEQ ID NO: 508884 - DNA, 75 bp, Homo sapiens
ccctcagtacgccacctactattacccccagtatctgcaagccaaggtcagggccctttgaagtacgagcagacc

SEQ ID NO: 508885 - DNA, 121 bp, Homo sapiens
gttgtcatgaagcaaagcaagttaccaatgtctcttctccatgatcgaatccggcctcatgagcgtgaggatcatccccggagaggacgggaggatcggcagcacagggaaccatcagaac

SEQ ID NO: 508886 - DNA, 82 bp, Homo sapiens
caaagtgggaaacattgaaatcaagcttctggagctatttgacagcgaagaccctcgggaacgggactacttaaaaacagtc

SEQ ID NO: 508887 - DNA, 75 bp, Homo sapiens
accaatcagttgcgaccttctcttaacagacttcctcttcaaattcctggtgattggcagtgcaggaactggcaa

SEQ ID NO: 508888 - DNA, 82 bp, Homo sapiens
ggtctggagtgcgtgggggaccggctgttggcggagcgggatgccttcgacacgctgttcgaccacgccccggataagctca

SEQ ID NO: 508889 - DNA, 138 bp, Homo sapiens
ccatcaaggctgagaccaagaactcaggcttcaagcgttctcgaacccttgaggggaagttaaagggtgtgggccgaagatatgctcatgtggtgttgaggaaagcagacattgacctcaccaagagggcgggagaac

SEQ ID NO: 508890 - DNA, 80 bp, Homo sapiens
tggagtgttccttccgctagtgatcctttgcaccctgcttggagacggacttgcttccgctgaaccttagccggccgatc

SEQ ID NO: 508891 - DNA, 100 bp, Homo sapiens
caggaatcaggagagcaaactataagttaattggccttggtcctcacagctccaaaaagaaacaggatctcgataagctctatgagctgaagtccaaagc

SEQ ID NO: 508892 - DNA, 50 bp, Homo sapiens
aacatgcaatgaacccaaaaggctttgtgtccctggtgatgttggaacat

SEQ ID NO: 508893 - DNA, 100 bp, Homo sapiens
cgcccgctgcctgcctgcctggcatctctctctcccgaacgtgttacgagtcagtttttagtgaaaaaacattgagctaggagccaagacccatctcttc

SEQ ID NO: 508894 - DNA, 100 bp, Homo sapiens
atcccagcatcgtcaaggagacactgcctctgctgctgcagcatctctggcaagtgaacagagattctgctcctaagtgtaggagagaacttggtgcctc

SEQ ID NO: 508895 - DNA, 50 bp, Homo sapiens
ggagactggcactgggctctgagggttctgtacagagtaatgagatgtgt

SEQ ID NO: 508896 - DNA, 100 bp, Homo sapiens
ctgttgcagaggctgcacgtaaaataaaggcgaacgctagtttccgagctcatgtttttcttgttagaaagaagaccggtcctgatgctgggcagctcta

SEQ ID NO: 508897 - DNA, 51 bp, Homo sapiens
atggaggacttgcttttgttgaactggtgtgtctgacttgctgctccaggg

SEQ ID NO: 508898 - DNA, 100 bp, Homo sapiens
aagactctcaggcttactgtggatctggattctaaggcaacacttccttgaagaaacaagcttacaggaggatatgatggttaccgcccttcattctcta

SEQ ID NO: 508899 - DNA, 82 bp, Homo sapiens
ggagaatctcctggaggagcaaggcagcatagcactgcggcaggagcagattgacaatcaggggccccactgcacccaggtc

SEQ ID NO: 508900 - DNA, 100 bp, Homo sapiens
cggcggtggagatcgcaggtcgctcagtgataatatgcagcatgcatactgggaactgaagagagaaatgtctaatttacatctggtgactcaagtacaa

SEQ ID NO: 508901 - DNA, 100 bp, Homo sapiens
gaccccaagaagaccattcagatgggatctttccggatcaatccagatggcagccagtcagtggtggaggacatgaagaatgcaaccctctccctgaatt

SEQ ID NO: 508902 - DNA, 100 bp, Homo sapiens
cgcaggaaggagaagctgctcaagagatgggagcctcactgtattgcccaggctggtcttgaactccggagctcaagtgatcgtcttgcttcagccttgc

SEQ ID NO: 508903 - DNA, 74 bp, Homo sapiens
tctgagctgcgcctggacctggttctgccttctggacaatctttccgggacccttatgatcctcaagtctgcct

SEQ ID NO: 508904 - DNA, 90 bp, Homo sapiens
gccggcccggcggctgctgctgctgctgacgctgctgctgcccggcctcgggacctgcctagagctggaacgttacctccagagcgagcc

SEQ ID NO: 508905 - DNA, 74 bp, Homo sapiens
ctcttcctcctcctcccgcgacgaatgacatccttaactccaggctgcaggtactctgtacgtgtgtcacctca

SEQ ID NO: 508906 - DNA, 82 bp, Homo sapiens
ctttccaaaggacgcgaccataactctaaaaggaggaagacaatggtcctataatgcccttggataagaaaaggaaactttt

SEQ ID NO: 508907 - DNA, 98 bp, Homo sapiens
ggaggatcttctgcggattgttggaatctaccggactttgaacatgtcggggatcgccctcagcagactcgcccaggagaggaaagcatggaggaaag

SEQ ID NO: 508908 - DNA, 87 bp, Homo sapiens
caagcctggaatcacgaagcacagctgtcacccggacatcaagtattcaccagttaatagcaccagtggtgcttcatgccccacctc

SEQ ID NO: 508909 - DNA, 75 bp, Homo sapiens
aaagcacaaggattctcgctgtgacagagacaacaccgagtatgagaagagagcacacagctgctacaaatgccg

SEQ ID NO: 508910 - DNA, 77 bp, Homo sapiens
ggagtatttcagacaaacatttcaggaactgttcaaaggacatggatttgattgacatactttggaggcaagatata

SEQ ID NO: 508911 - DNA, 77 bp, Homo sapiens
atcttgggacccaccgctgccctcagctccgagtccagggcgagaacatccagtcatggataaaaatgagctggttc

SEQ ID NO: 508912 - DNA, 90 bp, Homo sapiens
cagaaccgtgatggcttcattgacaaggaggacctgcacgacatgctggcctcgctgggtgaagttaaaatgaactatttgggcaaacca

SEQ ID NO: 508913 - DNA, 101 bp, Homo sapiens
gctatgagtggcagtcatcaggacctcagtgtgatacagccaattgtaaaagactgcaaagagcacaatcctggaggaagagaaggctcagcaagaagagc

SEQ ID NO: 508914 - DNA, 100 bp, Homo sapiens
gccggccgagacgacgggaagttttatttgcagctcggagcctgtggcggatggtgggactctccggccctgtgcagtagttactggaggtgaactgttt

SEQ ID NO: 508915 - DNA, 100 bp, Homo sapiens
ccgagcgcgcgcctgggctccggcagtgaccgaggcgaactccggggccgctccggggcccgcagctcaccaaagctcatcgacaaggacacatggtgaa

SEQ ID NO: 508916 - DNA, 131 bp, Homo sapiens
ctgacatggcagtcccgaacacaggatgaacatccgaagacaatgttctccaaagataagtctcttgcatggcaccaagaatgttaccaattcaagcagtttaagattgccaagacaaaatagtgatggtg

SEQ ID NO: 508917 - DNA, 100 bp, Homo sapiens
gcagagcccgtcaggagcccacgggacacattttggaggtgatggcccgctccctctccccacccccggagctggaagaaagggatgtggccgcatactc

SEQ ID NO: 508918 - DNA, 121 bp, Homo sapiens
tacatgggagaagtttgtttcacctgaaacactagagagcattctggaatcaagaaacagcaagagattgactctaaagatgctattattttgcatcagtttgcaagacctaacaatggtg

SEQ ID NO: 508919 - DNA, 100 bp, Homo sapiens
gatgacttctctaatcagttacgaatgcaggctcaacagtaccagcagcagcgtcgaaaatttgcagctgccttcttggcattcattttcatactggcag

SEQ ID NO: 508920 - DNA, 98 bp, Homo sapiens
ggtgtctggctctgagctcctgcagctcgtcagcccatttctgggctgccaaggggccaagggatgagctggggccctccttcccaatggcatctccc

SEQ ID NO: 508921 - DNA, 96 bp, Homo sapiens
ccatcttcctgcacacagccacgatttgcaaagctcaagactgcagtgcagatgacgacaacttccttgtgcccatagcggtgggagctgccttgg

SEQ ID NO: 508922 - DNA, 100 bp, Homo sapiens
taccacttctatgaccagatggacctggctggagaagaagagattgagctctactcaggctgcggcaaatctacagggaccctgagaccctcgtgttccg

SEQ ID NO: 508923 - DNA, 100 bp, Homo sapiens
aaacccacccttggagagccatgtgggctgggtgatggattcccgtgagcacaggccccgtactgcttccatcagatagaagaggagttatgggaagaag

SEQ ID NO: 508924 - DNA, 101 bp, Homo sapiens
ataaattgcaagcattctatccaaatgcaatggctgccatccggaagaaactggtgattgttggtgatggagcctgtggaaagacatgcttgctcatagtc

SEQ ID NO: 508925 - DNA, 50 bp, Homo sapiens
cgcgaactctagaaatgaatgacttaagttggtgaaaaccctgtgtcctt

SEQ ID NO: 508926 - DNA, 83 bp, Homo sapiens
tgatgatatccttctcaaccttgtgggatgtgaaaactctgttactgaaggtggagccgccaccaaaatgcagattttcgtga

SEQ ID NO: 508927 - DNA, 100 bp, Homo sapiens
ctttatctgtgatagaattgctgcttaaaaaacttgaaggagtcagagtattcatcgaaaagaaagcacagctaacacttttaggaacagaaatggacta

SEQ ID NO: 508928 - DNA, 90 bp, Homo sapiens
cgggttcaggaggtacccaaactgaaggatccacacacatcctcaccccacagaaactgctggacacactgaagaaactgaataaaacag

SEQ ID NO: 508929 - DNA, 75 bp, Homo sapiens
agctttcttgtcggcactaagtggcacagcactccatctgtagtgttctggacttggtgcctctttctgttatat

SEQ ID NO: 508930 - DNA, 73 bp, Homo sapiens
acaaccttacaaggccacactcgtgtcatcagatctccagtctatgtgctgaagaagcagcagcccaagagca

SEQ ID NO: 508931 - DNA, 100 bp, Homo sapiens
cgcgcctgcttcccgtctgcgcgagtccacgcagctccccagtttgtgtttaaggagaaactaacaatgaaaacggcctcgttgacggaggaaaagttgg

SEQ ID NO: 508932 - DNA, 100 bp, Homo sapiens
tcgcctggccccggctctctggaccttgtctcgctcgggagcggaaacagcggcagccagagatgctgcctggaaacattggccagaaagtaacactgag

SEQ ID NO: 508933 - DNA, 73 bp, Homo sapiens
attctgtgtgtttgagagcaacgccattgcctactatggaagcaattttggaggtggtggaagctacaatgat

SEQ ID NO: 508934 - DNA, 74 bp, Homo sapiens
gcctataaaatgcttcaagtagtcctgtgctcaacattgcttatcgctatccaacttgataaagtcaatcttca

SEQ ID NO: 508935 - DNA, 75 bp, Homo sapiens
gcagagaacagctctttgcatccggagagtggacaagaaactatgctaagaaggaatctgatcttaatggcgccc

SEQ ID NO: 508936 - DNA, 74 bp, Homo sapiens
caggaatgaaagacattcaggatcaacttgaacgaatatttctgctctgaaatagaaaatgtctgcagacggcg

SEQ ID NO: 508937 - DNA, 83 bp, Homo sapiens
acgatgttggactcatagtcactgccagaaaggtgaaatgacaatggatgctctgttggctcgattgaaacttctgaatccag

SEQ ID NO: 508938 - DNA, 82 bp, Homo sapiens
aaatcctggatggaagatagcttgaacagggctgacaacatttttccttttccggatcagctcagctactatttaataaaac

SEQ ID NO: 508939 - DNA, 76 bp, Homo sapiens
tctagctggaggattgtaaatgcaccaatcagcatgctgtgtctagctcaagagatctcggctcaccaaattccac

SEQ ID NO: 508940 - DNA, 75 bp, Homo sapiens
cagaatcaacacagatggggccgaatataacatagagggtaaactggtccatgctaattttggtactaaaaaaga

SEQ ID NO: 508941 - DNA, 100 bp, Homo sapiens
agattccccaggctacacattctgtcagtgctgttctccaagaggcccagagacatgctgaaacatcgaagactgcctgcgctgctgacttaaggcccca

SEQ ID NO: 508942 - DNA, 74 bp, Homo sapiens
ggactgtacctcccttcagagccaacatcacttagaagtgtttcaacaaaagacagccagaagacaatctgatg

SEQ ID NO: 508943 - DNA, 82 bp, Homo sapiens
tgcagacttggccaaatggacgggactattaagagtaacagttacccctcaatgagcgacccctacctgtccagctattacc

SEQ ID NO: 508944 - DNA, 80 bp, Homo sapiens
ccgcagccttgggcctcgcgccggctatggccgtgccctggggctgagccctcaggccgagacgcatccagagctttcgt

SEQ ID NO: 508945 - DNA, 88 bp, Homo sapiens
tcagcctcccaggtagctgggattacaggaatgggatgtttctggggagctgaaaggaaattctgggtcttgaaaggagtgtattcaa

SEQ ID NO: 508946 - DNA, 51 bp, Homo sapiens
aagatgatacctttctaacagcccaagaattagcttaccgaaaggagatgg

SEQ ID NO: 508947 - DNA, 101 bp, Homo sapiens
agacgactgacctggagatccgggagctggtcacagacatatgtagagtgtgtcggtcagaaggaacacctgagaaaccgctttatcatccttgtgtatgt

SEQ ID NO: 508948 - DNA, 88 bp, Homo sapiens
cagattcgcagtggtcgcttcttctccttgacttccaccgctgtcagaaggcaatgaccgctaaaggaggcgatatctctgtgtgcga

SEQ ID NO: 508949 - DNA, 98 bp, Homo sapiens
gccgccgccgcctcggccgaccagggacctgcccgcctgcggctgctccggtcttccgtgtgtgctaagatcgtgcagctcctggggcagaatgaggt

SEQ ID NO: 508950 - DNA, 90 bp, Homo sapiens
ccgtactgcacatcgtggtggtcggatttcaccacaagaagggctgccagatgatcaagttccagatgatcctcagtgagggataccatc

SEQ ID NO: 508951 - DNA, 82 bp, Homo sapiens
aagagcgtgccctacttcaaggataagggtgacagcaacagctcggcgggctggaaggtcattcaagaatgaggttggaaga

SEQ ID NO: 508952 - DNA, 75 bp, Homo sapiens
ttggctcactgaggaggtttgtgccaccatggcaactgcaccatacaactactcttacatctttaaatatattat

SEQ ID NO: 508953 - DNA, 100 bp, Homo sapiens
ggatatggtgcagaaggtgcacagccacagcgccgagatggagatgccttcaattaagttgcagagttctgatggagagatatttgaagttgatgtggaa

SEQ ID NO: 508954 - DNA, 97 bp, Homo sapiens
gaagaagcaggaggctaagaaagtggtgaatcccctgtttgagaaaaggcctaagaattttggcattggttctgcttggattctgctagacagaccc

SEQ ID NO: 508955 - DNA, 51 bp, Homo sapiens
agagacacatttcctgaggatatcgtgagaccatcatgcagacatcagaga

SEQ ID NO: 508956 - DNA, 99 bp, Homo sapiens
gctgcaccaagtggcgaaggagccggctccaagtaatcaagatgattaccaactggttcgaaaacttggtcggggaaaatatagtgaagtatttgaggc

SEQ ID NO: 508957 - DNA, 82 bp, Homo sapiens
ctcaaacgaaaagagaattgtacactgcagtttcctgctctacgaaacgcactcttttgccttgaagcggcattggacagtg

SEQ ID NO: 508958 - DNA, 59 bp, Homo sapiens
gaaaggcgatgttggaaaaagacggagctaacctctgctttgtggacattgacaaccac

SEQ ID NO: 508959 - DNA, 83 bp, Homo sapiens
gggacagcgacttccttgcagcctcttctccggacacccactgcagacccccagcccagcctgctctgcggccccctgcggct

SEQ ID NO: 508960 - DNA, 100 bp, Homo sapiens
atgaatccattcaaatgttggcaagtggagcagagtcccaggacagctccgagtttgaagaggtcaccatcgatcccacgtgcagctggcggccggtgcc

SEQ ID NO: 508961 - DNA, 102 bp, Homo sapiens
cgcgaggcgggcagccggggcgtccagcctcgaagcggaggatccctgtgtcccagccgggcatggccgacccccaccagcttttcgatgacacaagttcag

SEQ ID NO: 508962 - DNA, 90 bp, Homo sapiens
gaaaagatccctggaatatgaagagacacagtatggtagccacacccccagatggcgttcaggaagtggcttatattcactcaaaccaga

SEQ ID NO: 508963 - DNA, 51 bp, Homo sapiens
agctgaaaatagcgtgaacttgaaggttggaagcgaagtggaagcactgaa

SEQ ID NO: 508964 - DNA, 75 bp, Homo sapiens
cttcaagccaaacatcaagcagaatgtgatttgcttgaagatatgagtgtaaacaggaacatcgataagtagtgt

SEQ ID NO: 508965 - DNA, 98 bp, Homo sapiens
aaaaaacctctgaccgtgaagagacatgagatgattgccaaacccccagtcctgattcttggaataatccagtgatgatgaccctcaccaaaagcaga

SEQ ID NO: 508966 - DNA, 75 bp, Homo sapiens
cttaaagtacgtccgcgggttgctgcagacagagccccagaacaaccaggccccggacacccgctctgctgcagg

SEQ ID NO: 508967 - DNA, 75 bp, Homo sapiens
gcggaagtgcagctgcctcagttcttagcgcaggtgacgagagcagacgtggatgtccagccctatgcgttcaca

SEQ ID NO: 508968 - DNA, 80 bp, Homo sapiens
tgttgacctatgatctgcagggagacgcacagccaggacatcctggaacctgggaaaggcccttagagatttgtttgatt

SEQ ID NO: 508969 - DNA, 74 bp, Homo sapiens
cagctctgcagccacatactatccgtttgttcaggaaccaccagtgacagagtttaccgacaagactgtgaaac

SEQ ID NO: 508970 - DNA, 98 bp, Homo sapiens
gacgaggctgcggtgtctgctgctattctccgagcttcgcaatggatgagaaaatgtcagaatctacaatggatgccttccaaagcctacctgcagaa

SEQ ID NO: 508971 - DNA, 100 bp, Homo sapiens
gcactggagatgcaattaaaacatggcgtttcagcaacatgaaacagtggaatgtcaactgggaaatcaaaatgaatggaggctccagagtgaaattaat

SEQ ID NO: 508972 - DNA, 75 bp, Homo sapiens
gtttgatgttcgtgactttggaaagctgtgaaagttgtgtagatttactgtttgtgagaggagctggaaactgcc

SEQ ID NO: 508973 - DNA, 76 bp, Homo sapiens
ccggcctagcgtcctggaattacttcaatcaactgataggaagatgtcttcaggaaatgctaaaattgggcaccct

SEQ ID NO: 508974 - DNA, 82 bp, Homo sapiens
gaacctggacgccggaagccgggaaatgatgaaggatttgggggcagagcacttggcaggtcatgaaggggtccaacttctc

SEQ ID NO: 508975 - DNA, 75 bp, Homo sapiens
aaataaaccttcaaggcaaactgtgttcattgagaccctgattgaagagagagttttctggatatgccgcagaag

SEQ ID NO: 508976 - DNA, 100 bp, Homo sapiens
gtacccacgagagaacccccgcatcctgtttttcctgagcaaccagagaaaccacttgaccttgcacatatagtcagtagcagccagatgaagaagcggc

SEQ ID NO: 508977 - DNA, 73 bp, Homo sapiens
gcgccgcgggcacggcgaggggggcggccgcctcaccgcggaagatccatccaaaagctatgtgaaattacga

SEQ ID NO: 508978 - DNA, 98 bp, Homo sapiens
gtctctggcactgtggcggactgaccacggcccgggcatgggctgcaagggagacgcgagcggaagttctactacatcaccctgctacgagaccccgt

SEQ ID NO: 508979 - DNA, 100 bp, Homo sapiens
aagacacagatatgcacttatacccataccattagcagtaattacaacatgtattgtgctgtatatgaatgagaaggcaacagtatggaggtgcaagtag

SEQ ID NO: 508980 - DNA, 100 bp, Homo sapiens
acggtggataacgacaagaaaaacaatcgcttcaatgatgggaaggtggatcccgccgggaggtactttgctggtcagccaaagaggagcaaagagtcat

SEQ ID NO: 508981 - DNA, 82 bp, Homo sapiens
ccggagcaggcgaggtggccggagccgtgtggaccaggaggagcgctctttgcatgttcaactgtcgttcgagcctatgtgc

SEQ ID NO: 508982 - DNA, 100 bp, Homo sapiens
gaaatagtccagaatgtcacaggtccagggcagaggaccaacatgggcattttgtttatgagcaaggtggaatatattgagtatctgagtcggaaagtga

SEQ ID NO: 508983 - DNA, 100 bp, Homo sapiens
ctggactccagtcccttgtgggaaacaatccctcgcctccggaggcggcgaggagcggcggggctttgttcgcgggggtcacagctctcatggctgcagc

SEQ ID NO: 508984 - DNA, 154 bp, Homo sapiens
gcagcgaggcggcggcggcggctgcggaggcgcaggcagcaactgaggcagcggcaggctcaggtgcagccgctgaccattactgggacttccacccccaccacgtgcacagcgagttcgagagcttcgccgagaacaacttcacggagctcca

SEQ ID NO: 508985 - DNA, 82 bp, Homo sapiens
agcacccaggcgactgcctcatcttcaaggagctgtgtcagagcacactgaccgaaatggaaagccagaagcagctctgccg

SEQ ID NO: 508986 - DNA, 75 bp, Homo sapiens
ggcaagactccacctcctggtgaagaaagcaaacacatgggtggtaaagtaccacctgctactcagaaagctaaa

SEQ ID NO: 508987 - DNA, 82 bp, Homo sapiens
tttcatgggcctcttctttatgaagcaaagaagtctttggatgaggatgacctaggtcctagaagggtagttgccctggaga

SEQ ID NO: 508988 - DNA, 97 bp, Homo sapiens
cctgtttgagaaaaggcctaagaattttggcattggtgaggcggaaccaaccctcctggccatgggaggggccgtggtggacgagggccccacaggc

SEQ ID NO: 508989 - DNA, 100 bp, Homo sapiens
ggcaaaaccgtggaaagccagctttataccaacccaggagcagattctggccagatttctgaagaaacatggaattttctgcagtctatttatggtggag

SEQ ID NO: 508990 - DNA, 87 bp, Homo sapiens
cgctacgggaccgcctgagctttctacaccgggtgtttatctcagtggatgatctggaacccccggagccccaggaccctgaagatt

SEQ ID NO: 508991 - DNA, 75 bp, Homo sapiens
ctgagcctggaagctgcctggccaacataaagaaaccccgttcaccaaggccatggaagtggaggctgcagaggc

SEQ ID NO: 508992 - DNA, 100 bp, Homo sapiens
agaagtggaaaatatgtgtacaaacctgtcatgaatcaaacatgttgtcctcagtacacaataaggattggccatttgatgatggagctccaccccctaa

SEQ ID NO: 508993 - DNA, 50 bp, Homo sapiens
aaggattccaagtaactcttatttgaccctacagcttggggcctgggctc

SEQ ID NO: 508994 - DNA, 50 bp, Homo sapiens
attcatgcacaaatttttatgtggagaaggaaagccacgcaagttgggga

SEQ ID NO: 508995 - DNA, 74 bp, Homo sapiens
ctcccgcgccgcgctcccctcgcccgcccgggccgccaggtgtgttgaggctcctggaacacggggaggagtac

SEQ ID NO: 508996 - DNA, 99 bp, Homo sapiens
cagtccggtcctgacccttaccaaagtggaagagaatagtgacagtggtacaggaaagaaagaaaaagaaaagaaaaacagaaagggcaaagacaagga

SEQ ID NO: 508997 - DNA, 75 bp, Homo sapiens
gttccacctcattttagagtatcaagcagctgtcccctttcctccaacccaacggcttactttcaaggaagtatt

SEQ ID NO: 508998 - DNA, 75 bp, Homo sapiens
ctggcatcaactacccagtcctgaccccaaatttgaaaggcttcgaggcagcgacggagtcttgctctgtcgccc

SEQ ID NO: 508999 - DNA, 82 bp, Homo sapiens
cctgtcccatcgcaaacccaaagatccccgttcctggagattctgattgaggcggacctacgtgggcgccatgcccgggaag

SEQ ID NO: 509000 - DNA, 74 bp, Homo sapiens
aaccccttcgagcaagacgtggggtaccgtgagggttttctctggaagcgtggccgggacaacgggcagttttt

SEQ ID NO: 509001 - DNA, 100 bp, Homo sapiens
agaacgttaaaggaaacaagtagaaatcagcagtggagtgtctgtgttgtggacatcggatacccaaggagacgaagctgaagcaggagaaggaggggaa

SEQ ID NO: 509002 - DNA, 75 bp, Homo sapiens
ggggggcctggccgcgcagccggtcatcatcagatttgaaatatttaaagtggatacaaaactatttcagcaatg

SEQ ID NO: 509003 - DNA, 100 bp, Homo sapiens
aaccgctgctggcagttttgccaggtgtttgttaccttggtgctggaaacgtgcgtagcaacagtaggccgagtatccaacgttgatcataacaaacggg

SEQ ID NO: 509004 - DNA, 83 bp, Homo sapiens
atcatccgttcttccgaagatcctaatgaggacattgtggagagaaacatccgaattatagacggggtttcatcatgttggcc

SEQ ID NO: 509005 - DNA, 75 bp, Homo sapiens
tgggccaccagttaactacaaggatggcacatttcctagaggcagaatcctacaacttccactccaagtgagaag

SEQ ID NO: 509006 - DNA, 51 bp, Homo sapiens
gttcagccctttgatgaccgcagcaggaaagtatgtgatggtgatgggagt

SEQ ID NO: 509007 - DNA, 100 bp, Homo sapiens
acagactgagaagagaagtggagcaccaggagactgcctatggcctactctgtgtatgatgaagacattgggtactgtcaagggcagtcttttcttgctg

SEQ ID NO: 509008 - DNA, 100 bp, Homo sapiens
ctagcaatgagctcccaaagccatccaggtaacatttgtcgatcacccattgcagaagcagttttcaggaaacttgtaaccgatcaaaacatctcagaga

SEQ ID NO: 509009 - DNA, 101 bp, Homo sapiens
cctgatgggtcgaggcggacgcgcggctgcgtcagggtccagattttggctatgtaactcgagggccccaaacagggggtatcagtggactggactccttt

SEQ ID NO: 509010 - DNA, 90 bp, Homo sapiens
gcgcgggcggcggcgccggcaggaagtcattgcacgtgcagaagagcgacgtggacctgatgagaacgaagctccggcgcctggaggagg

SEQ ID NO: 509011 - DNA, 75 bp, Homo sapiens
ctacaccatggagaacaagcccatcgtcacctgtaacacgtacacagacctctcggccggaatctccagggatga

SEQ ID NO: 509012 - DNA, 75 bp, Homo sapiens
aggaatttatcgtatttctaaagcaagacatatctgaagagatggattaagaatgctttggattaaggattgtgg

SEQ ID NO: 509013 - DNA, 101 bp, Homo sapiens
ctgtcgctggagcacaaaagagtctccgcggtggaggtctgcgttgctcttgcttttcctcgctggggtgtacgttatactcagcgtgtggttggaaatgg

SEQ ID NO: 509014 - DNA, 114 bp, Homo sapiens
tgcaaatgcaaagagtgcaaatgcacctcctgcaagaaaaggtgcttcaaggatgaccgcatcgtcttctggacttggatgttctccacctacttcatggagaaatgggctccc

SEQ ID NO: 509015 - DNA, 100 bp, Homo sapiens
agggtctggagagtcaccgcggcggcgccgggtggtggttaaaccatgttaaggaggattttacagaggtgttggagaaatcagcatgttaaaacaactg

SEQ ID NO: 509016 - DNA, 114 bp, Homo sapiens
ctcagtctacctgcctacccgcgagtacccgtctgaacagaagtggaatgttggctgtccgtgaaaaccgctacattgtcctggccaaggacttcgagaaagcatacaagactg

SEQ ID NO: 509017 - DNA, 95 bp, Homo sapiens
gcctacaagaccattgcccgagaggaagggttccggggcctctggaaaggtgtacgccccaagttgggacgccggcatagtatggaaaatatgga

SEQ ID NO: 509018 - DNA, 90 bp, Homo sapiens
ccacccatcggctgttgcaagagctgctcaacatggatttgacgggatctgaactatacacccaggcggccagcctcctgcatcctgtgg

SEQ ID NO: 509019 - DNA, 75 bp, Homo sapiens
ggatatttgcttggaaaaacgtgtgggtacgaccttggcgcatattaaatttcctattgactacccctattcacc

SEQ ID NO: 509020 - DNA, 101 bp, Homo sapiens
cccaggggcttcctttggactggactgtccctgctcatccattctcctgccacccccagacctcctcagctccaggaatgaatctgaagtctgctgcagta

SEQ ID NO: 509021 - DNA, 75 bp, Homo sapiens
gtccctcaccgcggcatcaagcagtgcatctctccaggtgtggtggagacacaattcgccttcaaactccacgac

SEQ ID NO: 509022 - DNA, 103 bp, Homo sapiens
cacagaatctacacagcaaagttaacctgacacagaaaatccttgtgcaaataaatgcttacatttatgacattaacagagaacaggactatgtcaagaattc

SEQ ID NO: 509023 - DNA, 49 bp, Homo sapiens
ggcggcggcgagggtggtggcggtgaaaggtgtagcagtcactcggcct

SEQ ID NO: 509024 - DNA, 100 bp, Homo sapiens
ccaaggcctcaccttctgtctccacagcaggacagccgaactggaatctggatgagcagctcaagcagcttggtgtaaaaattgccaaagcagttgcctg

SEQ ID NO: 509025 - DNA, 96 bp, Homo sapiens
tcagcgcctggaaacttgctcaccgtgaagcctctgcgggccttcttttcgtcttatttgaagtcattgccggatgtgaggaaaaaatcgcttccc

SEQ ID NO: 509026 - DNA, 50 bp, Homo sapiens
acgttttgaaaatttcatcacctgagctttgggatgcgacatcagcaaat

SEQ ID NO: 509027 - DNA, 95 bp, Homo sapiens
ggatttgttaaggattccaagtaactcttatttggcttaagcaggtaaagcagtcactgtgaagaaaataacattttaagaaacttttctgtcac

SEQ ID NO: 509028 - DNA, 100 bp, Homo sapiens
cctgctctgaggaagctggaacacttaggagacacctcctgacagtgagtgagactgccaatgagccccctcaagatgaaggtaattccttcaattcacc

SEQ ID NO: 509029 - DNA, 83 bp, Homo sapiens
caagcccccgacagctcagccagacttcccctatggtcagtatgacaatgcagatcttcgtgaagactctgactggtaagacc

SEQ ID NO: 509030 - DNA, 100 bp, Homo sapiens
aagagctgaggttgctctgtgcagaggacgagcaaaccaggacgtgctggatgacagcgttcagactcctcaaggtttcatggacccaggcactacggac

SEQ ID NO: 509031 - DNA, 113 bp, Homo sapiens
cctcgcccggcctctccattcgtcccccgggtagagaggtgtgaacccacatccctgcccccagggccacctgcaggacgccgacacctacccctcagcagacgccggagaga

SEQ ID NO: 509032 - DNA, 82 bp, Homo sapiens
ctagctttctccttctggtgtggggcccgaggtaacatttgtcgatcacccattgcagaagcagttttcaggaaacttgtaa

SEQ ID NO: 509033 - DNA, 89 bp, Homo sapiens
ggagtgcagaggcatcacctgaaagaagctcagcatgtcagccagatgaaccatggaaactggagaggaacacaggcgataaggaacag

SEQ ID NO: 509034 - DNA, 90 bp, Homo sapiens
aaaacagcccctatcgaagcctttgcaaggcacgcacagaggctgggctgcggtccagatgcgtttgctccatgaattggtctacgcctc

SEQ ID NO: 509035 - DNA, 49 bp, Homo sapiens
tttcacttccagccagctgtgaagaaggacctttgcaagaatgtggaac

SEQ ID NO: 509036 - DNA, 100 bp, Homo sapiens
gccggagcgcgcggcgggagagccgggggagcgctctcggagggagcgcgctttctttggagtcggcgaaacccgggatcctggagctgcaggacacagg

SEQ ID NO: 509037 - DNA, 98 bp, Homo sapiens
ccaaaatgcagctcttacagaaatgtgtcttgttgcatttggtaatttagcagaacttggcatgctgcagacagacctttccgtccttcatgaacaca

SEQ ID NO: 509038 - DNA, 51 bp, Homo sapiens
gaagaaggccagctttgaggaagaggttgcagaacttgaagctaatttacc

SEQ ID NO: 509039 - DNA, 97 bp, Homo sapiens
tctggactaccaaggagaagctatagactacttctactccaccaggaagtgtctaccatcagagggagatctctgccccctggggctgagagacccc

SEQ ID NO: 509040 - DNA, 100 bp, Homo sapiens
cgggccgggcggtttggccccttagcgcccgggcgtcggggcggtaaaaggccggcagaagggaggcacttgaggaagcaatgaggctccccaagaacac

SEQ ID NO: 509041 - DNA, 80 bp, Homo sapiens
gcaagaaggccctggacacagcaatatctctgggctttcacagtccacctggaaggccgctgtggtggaaggatgtttga

SEQ ID NO: 509042 - DNA, 75 bp, Homo sapiens
ctaccggcggcggcgcgcagcgtgtcaggcggagagacccgccgccagggcaaatcataccccttcagggggcca

SEQ ID NO: 509043 - DNA, 100 bp, Homo sapiens
aagaggcattgaggactttccttacctgtttttccagctcacccactgccagcagaggcaccacactgtaactcgaggcatcaccaaaggcgtgaaggag

SEQ ID NO: 509044 - DNA, 75 bp, Homo sapiens
ccatgtgtgccacctgtgccatccaaactgcacctacgggtgaatgaaaactttgccattgatttgatagcagag

SEQ ID NO: 509045 - DNA, 75 bp, Homo sapiens
ccaagaagggccttactccttcacagatcggtcagaatggcggcagcggagcatcgtcattcttcaggattgccc

SEQ ID NO: 509046 - DNA, 83 bp, Homo sapiens
gaaatacctgggcttcccttactacctgaagatcaactactcctgcgaggaaaaggcaggtggacacgaacaccaaaaatgtc

SEQ ID NO: 509047 - DNA, 75 bp, Homo sapiens
ttgatatgcattttgatccaggttttgaggaacagctgttttggggtgaatggtgatattccccctcggttaaaa

SEQ ID NO: 509048 - DNA, 98 bp, Homo sapiens
cgagctccagccgaaggagaagggggatctccaacttgcagcagtccatcagtgatgcagagcagcgtggcgagaatgccctcaaggatgccaagaac

SEQ ID NO: 509049 - DNA, 80 bp, Homo sapiens
tttcctgaggcctccccagccatgcagaactcacacagagccgctgaaaacgactgaagagagcaagggatttcctggga

SEQ ID NO: 509050 - DNA, 90 bp, Homo sapiens
cgggccgtgctgcttatggcggcgctggagagggggcgctgagctgttgggttggtgtaatacggtgcccagtatgccgccaagaatgca

SEQ ID NO: 509051 - DNA, 74 bp, Homo sapiens
cagggtaaatgaactgaaaagtctaaatatatcaactaaagtagctttgggtttgaatgtgctttccagacata

SEQ ID NO: 509052 - DNA, 51 bp, Homo sapiens
gaggaggaagaagatttcataaggtgtgagatgcacaatgcgaaacctagg

SEQ ID NO: 509053 - DNA, 98 bp, Homo sapiens
cgcgagtgaggaaaggaggtactgtaggtcagggaagtcaaagatgcatccctgagttcttcctagcaggcaagcagccgtgcaccaatgacatggcc

SEQ ID NO: 509054 - DNA, 82 bp, Homo sapiens
ctgcttgctcagctcagtatcaacacttatgggagtgcatccgccccaacccttttccccctcgtctcctgtgagaattccc

SEQ ID NO: 509055 - DNA, 98 bp, Homo sapiens
cagattcgcagtggtcgcttcttctccttggaccgtgtttcttcgcctcgcctccctggtggtcctgctcttctctctctggaatcagatcacttgtg

SEQ ID NO: 509056 - DNA, 90 bp, Homo sapiens
gcgtccagccctacctatagaagggccgagcacagcaatgcaatggatgttgatgtagaagattattacccagctttcctggacatggtg

SEQ ID NO: 509057 - DNA, 100 bp, Homo sapiens
agcgagtcaggaacagccacgctgaaagctcggccaagagtccggcccctgctgaccttccttccgctgctttactcctgaagccagcgagatcacgaac

SEQ ID NO: 509058 - DNA, 74 bp, Homo sapiens
ttcagtacaagaggctacttctactagcagcagtgttgtactgctacttctataaacggacagccgtaagacta

SEQ ID NO: 509059 - DNA, 50 bp, Homo sapiens
ctgggccgcgcatttcggcaagctcatatgttagatttgatatcattcga

SEQ ID NO: 509060 - DNA, 100 bp, Homo sapiens
gcttactccagggctggcgttgtgaagaccatgacaggaggcagagacccgtgctgagtttgctgagagatcggtagccaagctggaaaagacaattgat

SEQ ID NO: 509061 - DNA, 75 bp, Homo sapiens
acctgctttgagaagagcaatgacattgggggcctgtggaaattttcaaaatttctacacccagaccatcttctc

SEQ ID NO: 509062 - DNA, 75 bp, Homo sapiens
ctgctctgcctgtgatgtcgagaacactggagtttacagatgcttcctcagcaacggaaagccatagctaagttc

SEQ ID NO: 509063 - DNA, 95 bp, Homo sapiens
aaggaaagtggagtcataaatggcctgttttcagatgatatgcttttcctgagaaccaagatccaattccctggagaatttttaacccctcccac

SEQ ID NO: 509064 - DNA, 75 bp, Homo sapiens
tgagttcattcctccctgctcagattcttcagctcctcgtggttggtttattcaacagggtctcgctctgttgcc

SEQ ID NO: 509065 - DNA, 100 bp, Homo sapiens
acactctctgatttggggatctctagcctacaggatggcttggccttgcacataagagcaaatttttcagaacataaaacaagaatatagtcgttatcag

SEQ ID NO: 509066 - DNA, 75 bp, Homo sapiens
ctgcagcgattgcgagaatgaggaggacaacagctacaaccggggcagcgtcaccctttacaccagaaagctggc

SEQ ID NO: 509067 - DNA, 76 bp, Homo sapiens
tgatgattcttgtagtatcaacagtgacccagaagccaagtgtggaaaagccactggcagtgattcaagtggtgtc

SEQ ID NO: 509068 - DNA, 90 bp, Homo sapiens
cccttaaataaaacagctccctgtgttcgcctgctcaacgccactcatcagattggctgccagtaaactggcgatggaatatgagaggag

SEQ ID NO: 509069 - DNA, 98 bp, Homo sapiens
tggcagtcacttctatcccttcagtgagcaatgctttaaactggagagaattcagttttattcagcttgagttgaagaagacactgctggacaggatg

SEQ ID NO: 509070 - DNA, 98 bp, Homo sapiens
actgaagaagatggtggataagcccacccaggtgaggtccagagatatatccagagaggagtggaagggctcggagacctacagccccaatactgcat

SEQ ID NO: 509071 - DNA, 83 bp, Homo sapiens
gagcattcgaagtgacctcagcagggcatccagtccagttacaacacagggatcacaacaaacacaaccgccacagaagcact

SEQ ID NO: 509072 - DNA, 90 bp, Homo sapiens
tgccctttcaatagacagtgttgaggaccatcttgcctggagcaaggttaatttggagtggcccctggagtcagtttcctacaccatccg

SEQ ID NO: 509073 - DNA, 83 bp, Homo sapiens
gtttccggaagtgtatagggaaacctgggggctccctggacaactccgagcaggaagccatcttcgacaagagcacagggaag

SEQ ID NO: 509074 - DNA, 90 bp, Homo sapiens
gtgaaggacgccagcatcatacaccggctgttcgaggccttgactgtaggtcagttcaccgggacctggaggcccagattgcgatcgtga

SEQ ID NO: 509075 - DNA, 100 bp, Homo sapiens
tggattgtagccataagtggacttgtaaatgggcaatgtgctggccacacagctatgcaagctgctagtcagaatggacatgttgacattttgaagttac

SEQ ID NO: 509076 - DNA, 75 bp, Homo sapiens
ttcgatctccgccctggggtcattgtcagattctccttccagaactcctgtcttggtaggatctgatgaatttga

SEQ ID NO: 509077 - DNA, 100 bp, Homo sapiens
ttcttgccttagcgacataccagtctctgtacccactcaccttgtttgtcccaggactcctctatctcctccaggtaagttcgaggatcgggaagaccac

SEQ ID NO: 509078 - DNA, 74 bp, Homo sapiens
cttggccgtgcttgccctgtcatcccacctgagaaccatgctcaccgaccctaacgtgcgcatcgaccccagta

SEQ ID NO: 509079 - DNA, 90 bp, Homo sapiens
aagtttgcatacctctatgacagtgacagagatggccgcccatgccccatcattctttgggatgcatctttatcttcagcaagtaatgac

SEQ ID NO: 509080 - DNA, 100 bp, Homo sapiens
cgaagatttggccacctccagacgctaccacactctgggacagtgggagatttggaacagctttgagaagagcaagcatttcctgtgttacatctgcaag

SEQ ID NO: 509081 - DNA, 75 bp, Homo sapiens
gagccgcgagcgctgagggtgagtgccgggagctctgagggagtgacagtgaggattcacatttgggttatttca

SEQ ID NO: 509082 - DNA, 75 bp, Homo sapiens
ggccgacccttcctgtcgctgacggcgactgcgggaggccaggataacaaagccattgacctttgccgattgtgt

SEQ ID NO: 509083 - DNA, 96 bp, Homo sapiens
ctttcagaaacttattcacagttaccaaagctggcaggccagaaagcagacccagggaggatagcacatgtcttcggctacactggtgaaggcatc

SEQ ID NO: 509084 - DNA, 90 bp, Homo sapiens
ctatgacaaggaataccttgagcagatctccactctcatcaacaccaccgacagatgaaccagacataagttcagaggaatctgtctcca

SEQ ID NO: 509085 - DNA, 100 bp, Homo sapiens
cttccattttggccaaaccaaccgcacccctgaatttctccgcaaatttcctgccggcaaggtctgccagcttacatttacccaaactgtccattactgg

SEQ ID NO: 509086 - DNA, 98 bp, Homo sapiens
tgtgggatgtgaaaactctgttactgaagactggaatacgctaattgtgggaaagctttctccatggattcgtccagactcaaaagtggagaagattc

SEQ ID NO: 509087 - DNA, 87 bp, Homo sapiens
ccagaattcttcatggtggcatgatccatagacaagcacggccacctcctctggacctgagaaacctctcgatcatccgggaacatg

SEQ ID NO: 509088 - DNA, 90 bp, Homo sapiens
gggaagccctgctactgctggattagcgccagaaatggcgaaaagtcttttgaagacagcctctctgtctggaaggacaaaattgctaca

SEQ ID NO: 509089 - DNA, 100 bp, Homo sapiens
gtggcacctgcgcgaagctggccaaagcctgcccagacggctcacctgtgcgggatggaacaaaagattacgtgtgaaaatgaacttgtgcaaacccaac

SEQ ID NO: 509090 - DNA, 101 bp, Homo sapiens
cggctcagctaatggaaatggagaccttgattctggatcttaccaacagtatcattacagctgtgttcctttcagtagttgccatcttggccatgcaagaa

SEQ ID NO: 509091 - DNA, 99 bp, Homo sapiens
cacgggcgagaagccctacgagtgcaacatctgcaaggtccgcttcaccaggttttaaaatcaaagatgggaaaatcggagaaaattgcccttccccat

SEQ ID NO: 509092 - DNA, 83 bp, Homo sapiens
ggacaatggtcaccgtctcttcaggagacacacggacatcgggaacggacggaggaaggatgtgcagttgcagccttttcagc

SEQ ID NO: 509093 - DNA, 95 bp, Homo sapiens
ctgggggattcgcagggaggatgtcgggacaccccggaagctgggaaatggcttttgatattatgagagtgacacatggcagagaacacagcctg

SEQ ID NO: 509094 - DNA, 50 bp, Homo sapiens
gcgaggagaaccaactggtcccgaaagagagatcgagatggtgatcatgg

SEQ ID NO: 509095 - DNA, 83 bp, Homo sapiens
ctgcgcctcttcccctgcagcgccgtgcagctcgccgcctaccgcaaggttatgtaccgaaggactctaccgtgtcagcggga

SEQ ID NO: 509096 - DNA, 90 bp, Homo sapiens
gagaactcctacccctggccctacggccgacagacggtactgggcctaatcgctacgtgcctctttggctatgatgcctatgtcaccttc

SEQ ID NO: 509097 - DNA, 50 bp, Homo sapiens
ctgccgctggaggccaatcccgagattcaaatgtaccagctgtccaggct

SEQ ID NO: 509098 - DNA, 100 bp, Homo sapiens
ggagctgcagtccatggctgaccaggagcaggtgtcaccagccgccatcaagaagaccatcctggacaaggtggctctgagggtcctgttccccgaccgc

SEQ ID NO: 509099 - DNA, 83 bp, Homo sapiens
gcgggtacggcggccccgcgcagcccccggccgcagcgcaggcagcccagcaggcggctatgagaggttttcctccgagtacc

SEQ ID NO: 509100 - DNA, 51 bp, Homo sapiens
agggaaccctggtcaccgtctcctcagtaattcgccaaaatgacgaacaca

SEQ ID NO: 509101 - DNA, 98 bp, Homo sapiens
aggggaagaggaaagcaaaggcgtcaggaatggttcttcctcagcatctggaacttctcctggtctctcagctggggccactgtcggcatcatgattg

SEQ ID NO: 509102 - DNA, 100 bp, Homo sapiens
cggcggcgcagccccaaagcgagcgaagctagggtcgccgccactgccgcaggaggcgtgaggccgacgcctccccccagggtcagctgcgggctcccag

SEQ ID NO: 509103 - DNA, 50 bp, Homo sapiens
tgccacctccccaaaggcaaagtcagcccaaggctgccccctcggtcact

SEQ ID NO: 509104 - DNA, 100 bp, Homo sapiens
gcactgtattctttacctgcttcccaatcccactgatgaggatcagcccatgaattcagtactgtacacaggaaattactgtcttccgtgaagacttagt

SEQ ID NO: 509105 - DNA, 51 bp, Homo sapiens
ctctctgtcacttccgccatcgtgcgggtcacagaaagtcgagagagccaa

SEQ ID NO: 509106 - DNA, 50 bp, Homo sapiens
tacaggagtcctccacttgccactggatacaagtactggttgaacctgac

SEQ ID NO: 509107 - DNA, 97 bp, Homo sapiens
gagagatgccatctacaaagaattctccttccacaattttaatcagagcctggagaaagttcttgtggaattcagtcacaaggagttgtttgatttc

SEQ ID NO: 509108 - DNA, 100 bp, Homo sapiens
tgagaaaccagtcagtgctcctggggatgatacagagtcgctccatagccagggttacattccgaaaagcaaatgggagatggacacatctgaggcaaag

SEQ ID NO: 509109 - DNA, 83 bp, Homo sapiens
gtgcttttatattcatctcaaaaacaaaattctgaactcaggacttggcaagtagatttcgggcagacaacttgaacaagctg

SEQ ID NO: 509110 - DNA, 101 bp, Homo sapiens
gcggcggcggcgaggaggggaatttccttgtgcctccattcccgggaggggggagcggcgttggaggccaccgtttccagagtttcactctgtcgcccagg

SEQ ID NO: 509111 - DNA, 135 bp, Homo sapiens
gagcacctggagcgcatgaagcggcgcagcagcgccagtgtcagcgacagcagcggcttcagcgactcggagagtgcagctaaatcaagtccagcagctaaaccaggatccacaccttctcgaccctcatcagcc

SEQ ID NO: 509112 - DNA, 50 bp, Homo sapiens
aatttcaggattggtactacaagaattccatacgacataatctgtcattg

SEQ ID NO: 509113 - DNA, 75 bp, Homo sapiens
tgaatcgctgagcgatatcacagaacacaagattaatcaatgtcaactgacaggatgaaggtttaaggctcagaa

SEQ ID NO: 509114 - DNA, 117 bp, Homo sapiens
ccgggatcgtgaccgagaccgtgaccgagagcgtgaccgagagcgcgaatatcgtcatcgttagaaggtcagcccaaggccaaccccactgtcactctgttcccgccctcctctgag

SEQ ID NO: 509115 - DNA, 97 bp, Homo sapiens
cagaagaggactgggaccgggacctgctcctggacccggcctgggagaagcagcagagaaagggctattgtggcgttggtgtacaatgtgttgaagg

SEQ ID NO: 509116 - DNA, 98 bp, Homo sapiens
ggcgacctcaagaagcagctccacgaaaggcagccgcggatcgccgcgctcagcgacaaacaaggatggagccccccaaacagaaattatcaatgctc

SEQ ID NO: 509117 - DNA, 87 bp, Homo sapiens
caggatgtctgacatctgcagctccaaacaggcagaatggagctctaaaacctcctaccagcggagtggtggtgaccgcggtggctt

SEQ ID NO: 509118 - DNA, 100 bp, Homo sapiens
gtgaccgagagcgcgaatatcgtcatcgttagaaggatcgacgagaacgtgctaggagcccagctggacgttgaggccgcccattcagagatcctcaagt

SEQ ID NO: 509119 - DNA, 83 bp, Homo sapiens
taacagctggagagaacagttcattgaagctatcactgtcagtgctgttggtctcttcccatggcgatgtccatctgccaccg

SEQ ID NO: 509120 - DNA, 75 bp, Homo sapiens
tgagactggagtgagagggtcttctgtccctagagcgtccaagatttttggtttcaaaccaatttcctgctgacc

SEQ ID NO: 509121 - DNA, 75 bp, Homo sapiens
tgagaacaaagaacggaagtccttccagaaggagcttgtgatggacatggatttgattgacatactttggaggca

SEQ ID NO: 509122 - DNA, 100 bp, Homo sapiens
gcatcccagaaggtgaagaagatctggcaaaagcaattcagatggcccaagaacaggctacagatactgaaattttgccatccaagaaaacaccatgaaa

SEQ ID NO: 509123 - DNA, 100 bp, Homo sapiens
tttctcttttcagttagactcatggactgaggctccaaagtatgagggcaattgaaggaacagactaaaaatcgtgtcctggaaggaaactacaggtact

SEQ ID NO: 509124 - DNA, 83 bp, Homo sapiens
gcccagaggaggacaagtttgagaatggaggccacggggggttcctggagtcttttaaggaattcctggtgactggaaggggg

SEQ ID NO: 509125 - DNA, 90 bp, Homo sapiens
aatattatccagtttgacattaaatgaagaggtgggggaaaaggaatttgatcatcactgcccctgggtgaataactgtattggtcgccg

SEQ ID NO: 509126 - DNA, 90 bp, Homo sapiens
gggggccgtcctgaggagcctcctggcctgcagcttctgtgtgctcctgagaggtacctgttcgcgctgcaggtgaagcaggacttggct

SEQ ID NO: 509127 - DNA, 100 bp, Homo sapiens
attacctcctttttcctggaccatcttcttcaattaatgcaacctaagactgcaataagctcttttacaggaaatgtggctttagataatctacagataa

SEQ ID NO: 509128 - DNA, 100 bp, Homo sapiens
gcgacggcggaacccgtgggcctgtggactgcagcctcggcggtcagcagaaagcgctttcagtcggagagtagaaggcaaagcacaaaaccactttgaa

SEQ ID NO: 509129 - DNA, 110 bp, Homo sapiens
acaaggctatattccttctaactacgtggctgaggacagaagcctacaggcagagccataccatgtttgtgtggaagtgccccgtgtttgctatgccgatgctgtcctag

SEQ ID NO: 509130 - DNA, 82 bp, Homo sapiens
aggaggatccacctggagctgaggaaccggaccccggcagctctgcatcttcctcccgtgaggctggccgagctccacgctg

SEQ ID NO: 509131 - DNA, 102 bp, Homo sapiens
tgcctgaagaataccaaggaggatcttttagcaatacattccacatcttgaggcctaccaaagctcctggctttgtatatgcctggcttgaactgatttccc

SEQ ID NO: 509132 - DNA, 75 bp, Homo sapiens
tggctttgttgaccgggagaaacgagatgggggtgaagctggagatatttcgggccgagtggtttgaggatgatg

SEQ ID NO: 509133 - DNA, 82 bp, Homo sapiens
ttggatatcaagccagagaagtgcccgaggagagttaacaggcaggtgacagcagggacatgtctcgggagatgcaggatgt

SEQ ID NO: 509134 - DNA, 100 bp, Homo sapiens
cttggggatcctctgtacgcccgttcactgaatgagtccctggaacgccagatgcgtgaaatggaagagaactttgccgttgaagctgctaactaccaag

SEQ ID NO: 509135 - DNA, 74 bp, Homo sapiens
cttggtggacctattattactacacaagtaactattcccaaagataatgagtccctggaacgccagatgcgtga

SEQ ID NO: 509136 - DNA, 100 bp, Homo sapiens
gctgaacaggcttaagatgatgtttgagaaaggtgaaccaactcaaactaaggacaaccttaaacttccaccacaagaggaatataaagaggtccctcct

SEQ ID NO: 509137 - DNA, 75 bp, Homo sapiens
ctttttgccaccaatcccttcgatcaggatgttggtatctctgcattagccagattggacatatgtaaagggaca

SEQ ID NO: 509138 - DNA, 75 bp, Homo sapiens
cagcctgccgcctcgctgtccctgcggcttctgggggttctaaatggcttctaagaagttgggtgcagattttca

SEQ ID NO: 509139 - DNA, 96 bp, Homo sapiens
tgccgagataaagccaccacgtctgtatacgctcaacggcaagaaagtggaagttgccgtcaaacagatcatcgctggaaaagccgtggagcaagg

SEQ ID NO: 509140 - DNA, 82 bp, Homo sapiens
acgagccagtgatttacaatagagcaaggtatgtgaatggccatgcaaaaaaacattatgaagatgcacaagtacctttaac

SEQ ID NO: 509141 - DNA, 100 bp, Homo sapiens
cctcagcagccgcaacagccacctcagcaacagtcccacctggtccctgtatctctcagcaacctcatacttccaagtgctggccttcatctccccgcaa

SEQ ID NO: 509142 - DNA, 82 bp, Homo sapiens
gaaaaggcctatgatactcctggttttcctttggaatatggataaatacaccatgatacggaaactagaaggacatcaccat

SEQ ID NO: 509143 - DNA, 76 bp, Homo sapiens
aatatgaagagacatgagatggtggatgaacccccagtatgagcccagaggacctggtcggcccttgtaccaaaga

SEQ ID NO: 509144 - DNA, 50 bp, Homo sapiens
aagctttcctaggccaaaaagagattatataaggaccatctggaaaagaa

SEQ ID NO: 509145 - DNA, 100 bp, Homo sapiens
ttgcatgcagagccaacctaagagcttcaaaatcgggattccttactgagaaagaatttcctcagtatgtttcagaaaattatcctgagagacagaactg

SEQ ID NO: 509146 - DNA, 83 bp, Homo sapiens
atggagatgggcagacggattcatttagagctgcggaacaggacgccctctgatccgattacacctcaacaagaaggcaactg

SEQ ID NO: 509147 - DNA, 50 bp, Homo sapiens
tcactccccaggattatgcgcgggctgtgtgcaggaaacatgaacttatg

SEQ ID NO: 509148 - DNA, 82 bp, Homo sapiens
ccaaggccaaccgcgagaagatgacccagacaacgtggacgaccccacggggaacttccgcagcgggcccctgacggggtgg

SEQ ID NO: 509149 - DNA, 75 bp, Homo sapiens
aaggaatttccttataggatgaatcataaagaagattcaggagtggatcccaccttcaacaccttacaagtaaag

SEQ ID NO: 509150 - DNA, 78 bp, Homo sapiens
tgagcagtcagaaggcaaagaacagaagatcctccttgctctgctctacaagcccattgaccgggtcactcggagcac

SEQ ID NO: 509151 - DNA, 85 bp, Homo sapiens
tattgtcttaacatgcttcaaataaatcagaacatccatgatagcagtcttctgtaaatcgaacttttcaagaattctctgaagg

SEQ ID NO: 509152 - DNA, 100 bp, Homo sapiens
aagaatctgttgagatctccatccatcaaactgcgcaggagtaaggcaggaaaccgacgagaggacctcagctccaaggagactgaagagccaattgtag

SEQ ID NO: 509153 - DNA, 90 bp, Homo sapiens
ctgggaaactcagcctgtgaccccagcgtgggtgaagataggatcaagatggccatgtggcaggggaaatcctcattgacgattcaattt

SEQ ID NO: 509154 - DNA, 96 bp, Homo sapiens
aagctcttcagcccctgcagcccgagccgccccccgagcccgccttctccgaggcgcagaagtggattgaggtgtcatggagaaactccagctggg

SEQ ID NO: 509155 - DNA, 100 bp, Homo sapiens
ttctgtggagttaactttggtgatattttgatctgccgtgatcaatatcaggaaaggccccatcttcccttcacacctgtgacctgaaaaaaatgtctgg

SEQ ID NO: 509156 - DNA, 100 bp, Homo sapiens
cggctggagagcctgttggagaaacacaaagagtctggctcttgctgattgaattcctttggtgcagtttagcatgttcctctgtgttctgcatctcctg

SEQ ID NO: 509157 - DNA, 100 bp, Homo sapiens
ctgtgtggatcaaagcgtatgcttttgtgcacactggtgacaactcaagagcaatcagtaccatctgaacccagcaagcgtagtcgaggagccctggggt

SEQ ID NO: 509158 - DNA, 75 bp, Homo sapiens
gagattttgccagagaaaggacgagcagcaagtcagggagcttaagatcatcactgccctggaggaggatggcac

SEQ ID NO: 509159 - DNA, 75 bp, Homo sapiens
tggggacaaagccgctccacctcccatgtcggcacaggaactggaagaggaggcaacagtatttggggcaagaag

SEQ ID NO: 509160 - DNA, 82 bp, Homo sapiens
gacagcaacagctctgccggctggaagttctggcataaagcatgcttccattgcgagacctgcaagatgacactgaacatga

SEQ ID NO: 509161 - DNA, 90 bp, Homo sapiens
cccaatctatggcttcccttccgttttcgcgtggttcttttgcaaggttctggcctataggaacaagacattttcagtaatggaagaagg

SEQ ID NO: 509162 - DNA, 98 bp, Homo sapiens
cagagacggcggaaacccgttcgccgagcccagcgagcttgacaacccctttcagttccaagatgagatgggattctccaacatggaagatgatggcc

SEQ ID NO: 509163 - DNA, 82 bp, Homo sapiens
gctggaagccgtgcttcggtatcttgcaattctgtggtgttcttggtcacacatttatggagtttctgaagggcagtggaga

SEQ ID NO: 509164 - DNA, 75 bp, Homo sapiens
cccgacggcaccgtcaccgaggcgccgcgcacagtcaagaagatggaacagattaaaagggccaataaactgttt

SEQ ID NO: 509165 - DNA, 96 bp, Homo sapiens
ggcagactctcaccagtgcgcatgcgtggctctccggcaccggtggttgtgtcaaaccgattggtgacatctccatgctgtattgtcacaagcaca

SEQ ID NO: 509166 - DNA, 101 bp, Homo sapiens
gtctttggtccagatgtcttccagtaagtcagtaatgttgtatgcagcagaaatgatacctaaactaaaaacaaggacacaaaaaacaggaggtgctgacc

SEQ ID NO: 509167 - DNA, 96 bp, Homo sapiens
ggatagcgtggagtgacggtgccaccgcggcgcaccactctgcttcatttttgggagaaaacttctcacactatggcagccatccatgagagtttc

SEQ ID NO: 509168 - DNA, 83 bp, Homo sapiens
gagatatccttaccttactcaacagcaccaacaaggctttcgggtcacctccagcagctcccagttcagctcacgtgattcgg

SEQ ID NO: 509169 - DNA, 100 bp, Homo sapiens
cctcatgattttaatactggtgaacttggccatgaccatctggattctcaaagtcatgaacttcacaattagtaatcaagtcagaggattatatgacttt

SEQ ID NO: 509170 - DNA, 74 bp, Homo sapiens
tgaggaacatgcagaaggaagctattgctgctcacaaggacccagtggcctttgaggatgtggctgtgaacttc

SEQ ID NO: 509171 - DNA, 51 bp, Homo sapiens
gaccttcacctgtcactgtgcccagcgatgtgcattttgtaagcactttgg

SEQ ID NO: 509172 - DNA, 100 bp, Homo sapiens
acaaccttccccacacttacgttgaaatgcaggtggctttggtggcagccgtggtggtggtggatatggtggcagtggggatggctataatggatttggt

SEQ ID NO: 509173 - DNA, 74 bp, Homo sapiens
gtggccctgagaacgttgctgagcaaacccgcaggtctcctccacggctgtcagcagcttctcgtagagcttct

SEQ ID NO: 509174 - DNA, 75 bp, Homo sapiens
aagaagacattagtgagatatggtttgaatatgaaggcacaccactgaaatgaatggccaaagttttctggtctt

SEQ ID NO: 509175 - DNA, 95 bp, Homo sapiens
caaatttgcaaatgatatacaacttctaaggcacccaggcatgtggaatatgctcatagtggcgatgtgcttggcccttctgggctgcctgcaag

SEQ ID NO: 509176 - DNA, 83 bp, Homo sapiens
gcaacatttcaggaaaacagagaaagaagtgataggagggctctgtaggtgctggagaatctggtaaaagcaccattgtgaag

SEQ ID NO: 509177 - DNA, 75 bp, Homo sapiens
ctgccgtccatgcggaagatcgtcgccacctggatgctggagaatgataacactttgtgtccaggattgagaaat

SEQ ID NO: 509178 - DNA, 90 bp, Homo sapiens
ccaactcaaatatcaaggactatgatcagaatgctttcaaggagtttttgggcacatgatggcagaagccctacaggtggcaactactag

SEQ ID NO: 509179 - DNA, 97 bp, Homo sapiens
ccccagggggcactggcaatccgtcaggaaaaactgaagcctcagtacttggaagagctacctggacaactgaaacaattctccatgtttctgggga

SEQ ID NO: 509180 - DNA, 83 bp, Homo sapiens
aggccccagggcgtcgcagcgccgcgtgcggcccactcacgggccggaaatctggcattttttaaagtttgcgccccacaaag

SEQ ID NO: 509181 - DNA, 75 bp, Homo sapiens
aaactggcggctgctggtagttccatgctgtctgttcagacttcagcttggtggttacattccgaaaagcaaatg

SEQ ID NO: 509182 - DNA, 73 bp, Homo sapiens
gtttttccagctcacccactgccagcagagggctcccggagcgtgtggagctggcacccctgcctccttggca

SEQ ID NO: 509183 - DNA, 75 bp, Homo sapiens
ggaagaaattgttcagttcttctcagattaccttaacatccacgtggaaagaagtaaaaaaaatcattaaggaag

SEQ ID NO: 509184 - DNA, 97 bp, Homo sapiens
cgaccccacctccataccccgcggcatccctctggacgcagacaatgccatccccatcaaatcctggttcagtgaccccagcgacacagcccttctc

SEQ ID NO: 509185 - DNA, 100 bp, Homo sapiens
gagcaatttccacctctgtgtgtgtacgagctcatgaactgttcgtcaggtggcacaggagcagttctttttaatgtgcaccagatgttgcatgggacac

SEQ ID NO: 509186 - DNA, 100 bp, Homo sapiens
cgaggctcgagcgagcgacagcgagtgcgaaggtgtatggaatgattcggttctcaggcaccacaggccagatgtctgacctgaacaaaatgatggtcca

SEQ ID NO: 509187 - DNA, 99 bp, Homo sapiens
tggcaatggcctacgtcgtcataccgggcttccttgccctgtccggggaaaatgtttataggaggccttagctgggacactacaaagaaagatctgaag

SEQ ID NO: 509188 - DNA, 96 bp, Homo sapiens
gaagttcctgatggagctgtaaagccacccacaaacaaactacccattttcttttttggaactcatgagaccaaccatgaagttgaaggacacaaa

SEQ ID NO: 509189 - DNA, 98 bp, Homo sapiens
atgggtccctgacccccaggacttagaggagagggacattctgagggtcacatatacaggtttcccaaaccactccttatgatccagtgaatattcaa

SEQ ID NO: 509190 - DNA, 90 bp, Homo sapiens
agaaaatccagggaaatataacattcttggcacaaatactattatggataagatgatggtgggtttggaggatttgggacaacatctaca

SEQ ID NO: 509191 - DNA, 100 bp, Homo sapiens
cagacgttagcgtgagtgatcactctcaatcccgggctgtgggtgagcgtggaggatgctcagatgcacaccgtcaccatctggctcacagtgcgccctg

SEQ ID NO: 509192 - DNA, 75 bp, Homo sapiens
aaaaagcattgctggtatttcgaaggactctatccaacctattatattttgccaaggcacgagtaacaagctcac

SEQ ID NO: 509193 - DNA, 51 bp, Homo sapiens
ctggaatacacccacctaccttgaaccagaaatttgaagatgctaaacttg

SEQ ID NO: 509194 - DNA, 100 bp, Homo sapiens
aggcggtcgtccggccggggacccggcccgggaccggcggcgcgcggcggccgaggccaggagctgtgtcagagcacactgaccgaaatggaaagccaga

SEQ ID NO: 509195 - DNA, 98 bp, Homo sapiens
gaaaaagcagaaagtagatgaagatgagattcagaagatgcagccactttggagttgtctaccacggagaatacatagaccaggcccagaatcgaatc

SEQ ID NO: 509196 - DNA, 90 bp, Homo sapiens
agctgaaataacccttgatcctcctcctaattgcaggttgaaaacgttagcggaagaacttatgcaaacacagcagatgcttttaaacaa

SEQ ID NO: 509197 - DNA, 80 bp, Homo sapiens
tgcaaacttgggccaaaggacagttagaagacagtagattagccgatgaattacatatgccatctctccctgaaatgatg

SEQ ID NO: 509198 - DNA, 83 bp, Homo sapiens
ctcagcatctggtacagccgaaggactcaggagagtgcagcttgctctgtgagtgggtgacaacctcttggcgactcaggctc

SEQ ID NO: 509199 - DNA, 127 bp, Homo sapiens
aagaacacatcaaggagcgccaagagctagagcagactcagaatgagctcaccagggagctgaaactcaaatttctctatgaatcatcatcaagaactctgggagaacttttgaattcataaccaag

SEQ ID NO: 509200 - DNA, 82 bp, Homo sapiens
aaagtgtaacatcagttacagagaactgtggctgcaccatctgtcttcatcttcccgccatctgatgagcagttgaaatctg

SEQ ID NO: 509201 - DNA, 74 bp, Homo sapiens
ggataacgggaggtgaatttccatgtcaacatagtcctgggttttggccaaattgggcgagggcacaaaataac

SEQ ID NO: 509202 - DNA, 87 bp, Homo sapiens
agaagcagggcagcagtgctctggaggtggcagaatcacagctggtgttaacgaggtccgggcccaccagctggtcttgccaccttg

SEQ ID NO: 509203 - DNA, 98 bp, Homo sapiens
aaaaagacaaggaaaaggacaaggggaaatggaaggggcctccagggtctgcagacaaggcaggcaattcccttgactgaagacgttctcataacatt

SEQ ID NO: 509204 - DNA, 98 bp, Homo sapiens
ccctgcagtacctgcagaaggtctctggagacatcttcagcaggaagagatgtcaggagaaagtgtggtgagctcagcggtgccagcggctgctaccc

SEQ ID NO: 509205 - DNA, 97 bp, Homo sapiens
cagagtggagccatggctagagcttcggaaccaaaaagaagcttcccagagccggggccaggagccccaagcgccctctagcagcaaacacagaagg

SEQ ID NO: 509206 - DNA, 98 bp, Homo sapiens
cagcttatcaacccttttggagaagatgatgatgattttgaaactaactggtgcattgacagaaatttgcagggttcccatgtgaccaggtggccggg

SEQ ID NO: 509207 - DNA, 90 bp, Homo sapiens
ccgccctcaggcccgtggccgctgtccaggagctctgctctcccctccaggtgggaaatacaccaagagtgatttcaaggagtatgaaaa

SEQ ID NO: 509208 - DNA, 82 bp, Homo sapiens
gtacctgcaggcctcctacacctacctctctctgatgccatggacaatattaccaggcagaaccaattctacgatacccaag

SEQ ID NO: 509209 - DNA, 93 bp, Homo sapiens
ctctcatgaggaccaaataagaagcctgcgggaggggtcatttttgagggcacctgtgctggttgcacttgctttgattgaatgtggaatgaa

SEQ ID NO: 509210 - DNA, 75 bp, Homo sapiens
actggggccagggaaccctggtcaccgtctcctcaggttcagcagctggacatggagaaccaacgctcatcacct

SEQ ID NO: 509211 - DNA, 97 bp, Homo sapiens
tcgcatcttgcccgaagccgggcggaggagagctcaagctaaggtgcttttcagtgggaagaattggaagaagatatcaggaagaagttgaaagatt

SEQ ID NO: 509212 - DNA, 74 bp, Homo sapiens
agaaggcgctgcgcaggcaggcggaggagtccaaaccaggttgcagagaaggtggcctccagaatcgccgaggg

SEQ ID NO: 509213 - DNA, 96 bp, Homo sapiens
gtccaattagccgggatagagaggagaaacaggatgtggacgttgatctctcagccaaagtacatcaggaacgtctctatcaagaatacaatttca

SEQ ID NO: 509214 - DNA, 50 bp, Homo sapiens
cgccagcgcggctgcaggccaaggtattagaaaactactcggatgctcca

SEQ ID NO: 509215 - DNA, 75 bp, Homo sapiens
gtgatggataggagcaaccctgtaaaaccagccttagactatttttcaaacaatctcccttgagtttagaaatct

SEQ ID NO: 509216 - DNA, 100 bp, Homo sapiens
ccagaccctggagcctcagttggaagcagccgatccagcctgcggagcctgtggggcagcgggctgacgcacgaggcacacaggaaggaggtggagcagg

SEQ ID NO: 509217 - DNA, 93 bp, Homo sapiens
gtcatctccttcatgcagagtgacatgggtcgggaagcagcatatggtgaggaactgaagtccagaggggtttcttgaactgcccaaggacac

SEQ ID NO: 509218 - DNA, 100 bp, Homo sapiens
gctacacgaagaactaagaatattattagcacaagagcaccatactttgaggagacgctctcctggtctgtgttctgactctttggaaaagagcttaagg

SEQ ID NO: 509219 - DNA, 90 bp, Homo sapiens
ttggattggactttatcatatagagaagcatatgcaattgggaagaaagagaaacctcccttcttaccagaggagccatcttcttcctca

SEQ ID NO: 509220 - DNA, 100 bp, Homo sapiens
gccgccgcgaggccgggaaggtgaaggcaagaggaggaacgacgtagaagagaggaagagatgatgattcgtcaacgtgagatggaagaacaaatgaggc

SEQ ID NO: 509221 - DNA, 82 bp, Homo sapiens
cgatgctttaaagttagattctatggaaagttctgagacatcttgtagagagcgtctctacagccaacttgagcgaaaccgc

SEQ ID NO: 509222 - DNA, 100 bp, Homo sapiens
gggagatccacagctaagacgccgggactccctggaaacctagaaatggtcacccgtgtgatgtggacacaacctctccgtgaaagtttttcctatccat

SEQ ID NO: 509223 - DNA, 74 bp, Homo sapiens
aggatgcaccacatctagtaaaggacgactgccctgctcctgtctgtcagtcacctggtgctggtgacaaggaa

SEQ ID NO: 509224 - DNA, 50 bp, Homo sapiens
gtgattgccacgctggggaatatcagcactgctcagcacgcaggcatgtg

SEQ ID NO: 509225 - DNA, 100 bp, Homo sapiens
aggatgtgaaacttaaatttgaagagggtgtccgcaatgttgccagtgtctgtctgcagattggctacccaactgttgcatcagtaccccattctatcat

SEQ ID NO: 509226 - DNA, 100 bp, Homo sapiens
gcggatcaccctgcggaacctggaggaggtggagttctgtgtggaagatcacgctgaccaccattggctacggggacaagtacccccagacctggaacgg

SEQ ID NO: 509227 - DNA, 100 bp, Homo sapiens
cttgcaagaaacctcaggacttgagtaacagcaacatgatgctctctacgatgtcatcactgtgggagccccagctgcccattttcagggatttaagaat

SEQ ID NO: 509228 - DNA, 90 bp, Homo sapiens
ggagccgcggagcctcagcttccgcctggacccagcctcgtgggagccccgcgggtcctgcccagccatttgcctacccacagcatcacg

SEQ ID NO: 509229 - DNA, 88 bp, Homo sapiens
cgcgtccagcacctacgtcccgctgccgtcgccgccgccaccatgcccaagagaaagaaatgcactcggtgatggaaagagagccact

SEQ ID NO: 509230 - DNA, 100 bp, Homo sapiens
gccaagctcgtggcctgcctctgcgtgcatgacgtccggttgtttgccttcgtgcgcttcaccaccggggatgccatgagcaagaggtccaagtttgccc

SEQ ID NO: 509231 - DNA, 75 bp, Homo sapiens
tgctctgaagcgcacgacctccgactactttctccttcaagacacaggttgcaggttagcaggagaacaggcaag

SEQ ID NO: 509232 - DNA, 75 bp, Homo sapiens
tgtggtggaagcagcagtccaggaatgcagtcagtctgttgatgaaactatgtggctttcctgggggaatgcctg

SEQ ID NO: 509233 - DNA, 50 bp, Homo sapiens
cttggacttcccacccaccagaacttctatgcagatggtagtatatgtct

SEQ ID NO: 509234 - DNA, 74 bp, Homo sapiens
atgaaactgaaccaggccagcatggataagttattgccttgtctgtcaagatccgcagttatgaagaacacttg

SEQ ID NO: 509235 - DNA, 113 bp, Homo sapiens
gtcaccttcacgggcctgactcacagtcctaaatatctgacagcgagatcgcttgtagatatatgcttaaaggaggtaacgtcgatggccgacagtctgtataatattcggct

SEQ ID NO: 509236 - DNA, 75 bp, Homo sapiens
ttcctgattggtgctggcatcagcacagacaccgctttgccgatagggagatgacagtctgtctgcagtcacctt

SEQ ID NO: 509237 - DNA, 100 bp, Homo sapiens
atcactggctacacatttccagcaggctgcagatacgagtggacaaattatttactggcaagatgagcaggattaccatgaaagaaaagtccagatggac

SEQ ID NO: 509238 - DNA, 80 bp, Homo sapiens
tgcaagggggaagtagagagataacaaaagctgctcagagtctcaatgaacttgagctgaactagagaaacatggttata

SEQ ID NO: 509239 - DNA, 100 bp, Homo sapiens
gatcccttcactctcggaagtgttccgcaaagtgtgggatgctgtctcaggagatgaattgatgaccctggctcataaacacattgtcaagactgtggat

SEQ ID NO: 509240 - DNA, 115 bp, Homo sapiens
aactactatgcatgtaaacaaatgaagcagcgctttgaaagaagtgacagctttgagaaccccgtgctgcagcagcacttcaggaacctggaggccttggccttggatttgatgg

SEQ ID NO: 509241 - DNA, 75 bp, Homo sapiens
cgggtcccggggtgcgagcagcgcacttccgttcaaaaggtgatgacctatcaacagccattctcaaacagaaga

SEQ ID NO: 509242 - DNA, 78 bp, Homo sapiens
aaacgtttagcatcagtgactcacaaatcagcaacacagaatttctgcaagtaattgtccaagtggtaagaagttcag

SEQ ID NO: 509243 - DNA, 99 bp, Homo sapiens
caagacaagcccattcattcatttgagcatagcaaagagaagacacggttcaatgtgtagaccttctccctctccagtgtctccagcctccaatcccag

SEQ ID NO: 509244 - DNA, 90 bp, Homo sapiens
gagagctgcctgcctgctgctgcttggagagccccagacagtcgcttgaagagtctccctgcttcctggcctttctatttaaaagcaccc

SEQ ID NO: 509245 - DNA, 100 bp, Homo sapiens
ctggacaagaggggtgcggtggatactgacctttgctccggcctcgtatcacaaacaacatcgacccagtgggaagaatccaaatgcgcacgaggaggac

SEQ ID NO: 509246 - DNA, 75 bp, Homo sapiens
gtcctttcaagtctctaggactggactcttcctaagcaagtccggttcgaaaacatggccaaaagaaatgccgag

SEQ ID NO: 509247 - DNA, 93 bp, Homo sapiens
gccagccgcaccatgccgctcctaagcctgcacagccgcggcggcagcagcagtgagaggccactcttcacctccaccatgagcctggacatc

SEQ ID NO: 509248 - DNA, 80 bp, Homo sapiens
cggccccgcgcgccccggcccggccccgcgagttccagggtctccctccactgctgtagtaacccgggtccggggcctcg

SEQ ID NO: 509249 - DNA, 101 bp, Homo sapiens
atgggccactgtttcagcaacctcagccagtgcaacacaacctcagccaagaagagtcgctacccacaggagaacaagggaacctacatcccagtgcctat

SEQ ID NO: 509250 - DNA, 100 bp, Homo sapiens
cccatctggaccgcatcgctgaatgtgcccggacctgcgccttctggataagccaatggacacgtcagtgttatctgaagaaggaggagagccttttcag

SEQ ID NO: 509251 - DNA, 75 bp, Homo sapiens
gacagacagacagctggcaagaggcagcctgggggccacagctgcttcagagccgggtgtgggctgagccctgcc

SEQ ID NO: 509252 - DNA, 100 bp, Homo sapiens
gcattatgaacgaattctcaacccctacaacttattcctgtccggagacagcctaaggctctgtgcagtgtgcctagaagacttcaagcctcgagatgag

SEQ ID NO: 509253 - DNA, 75 bp, Homo sapiens
gaggagggcacattccttttcacctcagagtcggtcggggaaggccacccaggtactccaaagattcaggtttac

SEQ ID NO: 509254 - DNA, 88 bp, Homo sapiens
tgtgacctgctccggagtcataaagaggacgccgggacaccaagaagcagggaaatggatatcaatgcttacaattgtgaagagccca

SEQ ID NO: 509255 - DNA, 74 bp, Homo sapiens
cggatgagaaagaaagtaaaagatgtcattggacagtcattttgtttactcattcagccctgttgcaggtccca

SEQ ID NO: 509256 - DNA, 98 bp, Homo sapiens
ttggacgccggcggagacgcgggcgagtaagactttgaccccgacgcaggcttcagtgattgccgcggatcagaagcctgagcactttggctcgagac

SEQ ID NO: 509257 - DNA, 100 bp, Homo sapiens
ctagctccaggttaggccgagctttgcgggaaagcagcgtctgaaatggttgtgacaaataatctcttggatctgccgcccccctctcctcccaaaccaa

SEQ ID NO: 509258 - DNA, 100 bp, Homo sapiens
ttaatggacagaatcaagaaacagctacgtgaatgggatgaaaatctaaaagatgattctcttccttcaaatccaatagctcctcaaccaaaagcagccc

SEQ ID NO: 509259 - DNA, 75 bp, Homo sapiens
gaagatcttgctagtgccatagggtgggaacaagagcccagtcagagcgaattcggacatataatttcacccagg

SEQ ID NO: 509260 - DNA, 90 bp, Homo sapiens
acagaatttgcttacgaatatgtattgctggattttactctacaaggaaggatctgagtctctccctgcggagacagccctgaagaactc

SEQ ID NO: 509261 - DNA, 100 bp, Homo sapiens
gccagaagggctacgccagcggcgtcgagaggaccatcctgggtgctggccctgtgctggaggcatctgggaacaaagtcagtcgccagtcagtgttgtg

SEQ ID NO: 509262 - DNA, 96 bp, Homo sapiens
cttcctcctgtgcctgatgattgcccgactcccttgggtgtcaaagggaacccgagcgtcatgttagggtgaagcagaggacctcagtgctgaaca

SEQ ID NO: 509263 - DNA, 100 bp, Homo sapiens
ggcgcggctggggcccgaggctagcatctctcgggagccgcaaggcgagagctgcaaagggccgttgctccagggagaactgcaaatatcttcatccacc

SEQ ID NO: 509264 - DNA, 82 bp, Homo sapiens
gaacttcgttgcttgcttgcctgtgcgcgcgtgcgcggacatggcctcaaacggaagcggggagaggtggtgagagatgacc

SEQ ID NO: 509265 - DNA, 100 bp, Homo sapiens
tcaggggccacctgtggacgctcagacacctattaccagagctgtcggaaaaggtaacagaagatggaactcgaaatcccaatgaaaaacctacccagca

SEQ ID NO: 509266 - DNA, 75 bp, Homo sapiens
ggccactgcgcagaccagacttcgctcgtactcgtgcgcctcgcttcgctgtccccgccctactccggaccgccc

SEQ ID NO: 509267 - DNA, 74 bp, Homo sapiens
ccgggagcacgtcatctccatcgaggttcaaatctgaacatcaatgatgtactagggaactactcattgactct

SEQ ID NO: 509268 - DNA, 80 bp, Homo sapiens
cttgcgatcaagctcattacagctgtgggcataagttgggggccgtcccgctcctaaggcaggaagatggtggccgcaaa

SEQ ID NO: 509269 - DNA, 74 bp, Homo sapiens
cgagactcttcagcaacataaactgcttaaggtgccggtgtctgaaggctgcagccaggctctgatgcgtctca

SEQ ID NO: 509270 - DNA, 100 bp, Homo sapiens
ccggtgccttcatgggcaggactaggccgaaaactccccaggttcgccaagcagcttttcagtctctgggacctttcatatctacttttgctaatccatc

SEQ ID NO: 509271 - DNA, 100 bp, Homo sapiens
atcactgtagaattgtagtggatgaaaaatcaggtcaggtgacactggaagataccagggaatgggtactgttcaaaaaggaatgccccacaagtgttac

SEQ ID NO: 509272 - DNA, 82 bp, Homo sapiens
aaaagattcctcaggctctatttccgagcagttaccttgcagagatgatgctccctgtgctgtcaggaatctacaggacttg

SEQ ID NO: 509273 - DNA, 83 bp, Homo sapiens
ctcagccctgaagaaaagggaaaacttgctgcggttgctcaagacaatgcagatcttcgtgaagactctgactggtaagacca

SEQ ID NO: 509274 - DNA, 50 bp, Homo sapiens
catgattacctgaagtttaataaaatcagtcggatttgtcagatgaagag

SEQ ID NO: 509275 - DNA, 75 bp, Homo sapiens
ccgccgtgcaggcggccgtcagcaacctcgtccggggcgccatgttttggaagtttgacctgcacacaagctcgc

SEQ ID NO: 509276 - DNA, 90 bp, Homo sapiens
cctgagcccggcgggccacgaggaggcgaagcgcggcgggcaggcgctacgaggacgactgggtttggattcagaagaggattattatac

SEQ ID NO: 509277 - DNA, 100 bp, Homo sapiens
aacagctccacagatgtacaggcaagaattaatgctggtgagagcatccacatcatccgtgggacaaaagaccaatgatgcgagctcagagtcaatagca

SEQ ID NO: 509278 - DNA, 100 bp, Homo sapiens
cggtgacagagtggagccatggctagaggtgtggccgacgacgatgccctcgctgaggagcgcatgcggagaggccagaacgccctgccagcccagcctg

SEQ ID NO: 509279 - DNA, 74 bp, Homo sapiens
ggggtcgtggctgcgtcctctaggccaggttggtgttcgaggaagagacattgttgttcttggtgtggagaaga

SEQ ID NO: 509280 - DNA, 100 bp, Homo sapiens
ctggtccacggagtgtatgaccacaaacagccatcaagggaggtggggaagacagggctccagctaccacaggacgggctctgggtatagccgttccagt

SEQ ID NO: 509281 - DNA, 50 bp, Homo sapiens
ggagctgggccaggccgtggaggaggccttacatcgggaacaaatgttgg

SEQ ID NO: 509282 - DNA, 100 bp, Homo sapiens
cgcctcgtcaacaggaacttagctaaaccagcctggacaccaagtctgtgtcagaaggccacctcaagaggaacatcgtggtgaagaccgtggagatgcg

SEQ ID NO: 509283 - DNA, 114 bp, Homo sapiens
gctgaggcgggtggcatggcggagaaggatgacaccggagtttgacgaagaggtggtttttgaggcatcgttggcttcacagtatgactgatgatcctccaacaacaaaaccac

SEQ ID NO: 509284 - DNA, 76 bp, Homo sapiens
cctctcctgaccctgaagaactgtgctgagattggggattttgatgaagccttggacagagagcacttagcaaaaa

SEQ ID NO: 509285 - DNA, 100 bp, Homo sapiens
caatgatcgcccgagtggcggacgggctcccgctggccgcctcgatgcaggaggacgaacagacatcacttagtgctcttacccagctgatgaaaaagat

SEQ ID NO: 509286 - DNA, 100 bp, Homo sapiens
catctcctggcagctccctcccaggtatcaatataagtgatgaggattttcttttgctggagcttttgcactggtttaaggaagaattttttcactgggt

SEQ ID NO: 509287 - DNA, 75 bp, Homo sapiens
tctgttccacatgatcattgtaataaggttcgagaacttgtcttggacaattgcaaatcaaatgatggaaaaatt

SEQ ID NO: 509288 - DNA, 75 bp, Homo sapiens
gctgggattcgcgctgctgggcacccacggagcctccggggctgactccgtgggaaggaggcttgtttaaactac

SEQ ID NO: 509289 - DNA, 83 bp, Homo sapiens
cttgctggtgcatgcgtcgtcggcctctgggcagcagaatgtgaaagatgttgcagaagtgttccagaagtggctgaagatag

SEQ ID NO: 509290 - DNA, 75 bp, Homo sapiens
cagacagaacagttaatcctcaatttaagcctgatctaacccctagaaacaggtgagaagccatttaaatgtgat

SEQ ID NO: 509291 - DNA, 100 bp, Homo sapiens
ctcccttctgccccagctccgtctcggcggcggcgggttaatttggagtggcccctggagtcagtttcctacaccatccgaggccccacccagcacgagc

SEQ ID NO: 509292 - DNA, 85 bp, Homo sapiens
ttttgccgccagagggcagcgagggagcgcgcgggctgcggggccgaaccccgggttattgcagctgactgcaaaagggtcacag

SEQ ID NO: 509293 - DNA, 87 bp, Homo sapiens
tgaggttatgttcatgaggatagcaaaagcttatgctgccacaagtgaagctgatgtggaggctgtcatggataagttgtttgatga

SEQ ID NO: 509294 - DNA, 82 bp, Homo sapiens
gtcagcatcccagccgtgctcacgtgcctatgattacacaataccacctatggagaaagctgttgtgaaaacggacattcag

SEQ ID NO: 509295 - DNA, 75 bp, Homo sapiens
gttctctcgcgcgggtgtcgctgggctgtcggcctggaccttgcagccgcaatgctaaaagatggcggcaaggca

SEQ ID NO: 509296 - DNA, 84 bp, Homo sapiens
cgtgatcgactgagcaagcaggggagttgtcttcaggctttggagccacaggccgtgtcttcttacttgagccctggtgctccc

SEQ ID NO: 509297 - DNA, 75 bp, Homo sapiens
ccgagagagcctgcggaacctgcgcggctactacaaccagagcgaggccggagccaaaaacctgtatatcatctc

SEQ ID NO: 509298 - DNA, 100 bp, Homo sapiens
tcttctaagctgaataaagctgttttggaactgtcaggtacctcaaagcgtttaagtttttgaaactgaagtaggcctacacagtaggaactcatgtcat

SEQ ID NO: 509299 - DNA, 74 bp, Homo sapiens
agattatatcgcatcctatggctcaaagaaagatgattatctgagatctgtatctgtggacctgaatgttgatc

SEQ ID NO: 509300 - DNA, 83 bp, Homo sapiens
ggaaaacaacttcgagggcagagcggctatgagaggttttcctccgagtacccagaattctgttctaaaaccaaggccctggc

SEQ ID NO: 509301 - DNA, 82 bp, Homo sapiens
tgggcttcctgccatcaccgatgtgcctaggcgcatttcagccaagctctactccaggaagtgaaaatgtgctgcctcgaga

SEQ ID NO: 509302 - DNA, 101 bp, Homo sapiens
gcacagcaagacccctgaggagagggtcaaagaaggctcttccaagaaacatgtagaagagaagagtgaagaaatttctcttcagcagctgagagcatctc

SEQ ID NO: 509303 - DNA, 101 bp, Homo sapiens
caacctttggtgctcaagtgattcttctatttcagctttctgagcagctaagactacaggaacatgagagaatttcaagaatccatgaagagtttaagaaa

SEQ ID NO: 509304 - DNA, 75 bp, Homo sapiens
gttaaggattccaagtaactcttatttggtggctacagtttcagaaaagtcacgtataatggaactggagaaaga

SEQ ID NO: 509305 - DNA, 95 bp, Homo sapiens
gccacgtggagctgctggaggtaagcccagaggtctccaccccacgggaggaaggctgaggccaagaccccggaagagatggaccgcgtgaccag

SEQ ID NO: 509306 - DNA, 78 bp, Homo sapiens
gctcatcccggtggccgccgcgcaggagcctcccggagctgttcctccaactcctctgccaaccaatgatgttgatgt

SEQ ID NO: 509307 - DNA, 100 bp, Homo sapiens
cagcccgtgccgcgagcgcggcctgcaggagggctgcttccccaagcccacagtctgtaagaagggtctcatcctcccgatctgtctccgggtctcctga

SEQ ID NO: 509308 - DNA, 52 bp, Homo sapiens
ttcatgcatcattttttcaaaataggcaggcagctcagagaacggctctccg

SEQ ID NO: 509309 - DNA, 80 bp, Homo sapiens
atctaaaatacgaaggtttctggctggcaattggtgctgaaaattcagaaaaaatagatgagaattcagataaagagatg

SEQ ID NO: 509310 - DNA, 129 bp, Homo sapiens
gtggttgtctctgctgctgttgcacactgggttgcagcctatggcctgttatttgtctcaacaaaagagaactagaacagtctttggctagctggactcagaacttgaaagaacttcaaactatgaagg

SEQ ID NO: 509311 - DNA, 49 bp, Homo sapiens
caacatcctttcgagccccactatcagttgagggatttgcagttgataa

SEQ ID NO: 509312 - DNA, 113 bp, Homo sapiens
attcgtgtctggctctggaattgctactgctgcctctgtcactcctggtgaccagcattcaaggctgttataatggattagtttatgttctgaaaagtaatagtggagaaaaa

SEQ ID NO: 509313 - DNA, 96 bp, Homo sapiens
gtttttccttgagctgaacgtcttgcaacagtggccgcacgcatagaggctgcctaccacaaggactttagcttactttttaaagattgaagaaaa

SEQ ID NO: 509314 - DNA, 100 bp, Homo sapiens
tattttccttctgaaccagggttctgcatccactacaacattgtcatgccaggaggagatatcaccaaacatgatggaacaggcggacagtccatttatg

SEQ ID NO: 509315 - DNA, 125 bp, Homo sapiens
acggcactcattttttgaccatggatacaatcacctcgtggaccagaattttaacccattaccagtgaaaggaagcatgtttacaccaatgccaaaaagcagatgctaatttctcttgctcctcc

SEQ ID NO: 509316 - DNA, 101 bp, Homo sapiens
gccagccagtgttgcccttggccccctcgtcgtctgccccaggtactccaaagattcaggtttactcacgtcatccagcagagaatggaaagtcaaatttc

SEQ ID NO: 509317 - DNA, 100 bp, Homo sapiens
ttgggctcagtgaagagtctggagtttatctggagtgaggtggccggttcttggtgggatctgagcagacagcaaggccatcgtggacgggaacctgaag

SEQ ID NO: 509318 - DNA, 48 bp, Homo sapiens
cagatcgtggccggtggttctgcagaagtaaattttcgcagaaggact

SEQ ID NO: 509319 - DNA, 50 bp, Homo sapiens
tctggcatcttcttcatactatcgggcagaatggctaatgcggatctggt

SEQ ID NO: 509320 - DNA, 90 bp, Homo sapiens
gaagaatggaatgaccctcctgctgtgggaaatcctcattgacgattcaatttgttgaaggccaatttgtggactcctacgatccaacca

SEQ ID NO: 509321 - DNA, 96 bp, Homo sapiens
gcctcctgagtagctgggattacaggcacccgccaccacgcccagaaaaggtgtgagcggtactgggcccaggagcaggagccactgcagactggg

SEQ ID NO: 509322 - DNA, 75 bp, Homo sapiens
cacttgtgtgcggaactcctcggaaccatgatccagagacaatggccccgatgggatggagcccgaaggcgtcat

SEQ ID NO: 509323 - DNA, 75 bp, Homo sapiens
atgcagagatcattgaactcctgattttgtcagtagtcgtgaaaggtgccaaattggcagaggctcacgtttctt

SEQ ID NO: 509324 - DNA, 75 bp, Homo sapiens
tttacagaaagagtcaacagcagtggcaacaggaactgtggctgcaccatctgtcttcatcttcccgccatctga

SEQ ID NO: 509325 - DNA, 83 bp, Homo sapiens
gaagaaagccatgctgcccagccggtgaaagcccagcctccgtggttcttaatgcctcaggaggactattttcactaaagatg

SEQ ID NO: 509326 - DNA, 98 bp, Homo sapiens
ttgggttcaaattcaagttttaccaggtaccactgatgaaattatgaccaggtgggcccgagttagtaccacatataacaagagacccttgcctgcaa

SEQ ID NO: 509327 - DNA, 100 bp, Homo sapiens
taatttcccgtgggacattgatgaagctttgcgaagaaggttagaaaaaaggatatatatacctctcccaacagtacggccaagtacagcgtgttgacat

SEQ ID NO: 509328 - DNA, 73 bp, Homo sapiens
aatgcacatatcccagtccattgaggttgactatagtcaatggggccaatggagccaagtgtatggaaaccca

SEQ ID NO: 509329 - DNA, 98 bp, Homo sapiens
acaagtccatccgcgacctcatgccaaagaccatcatgcacctcatgatcaacaatgaatacctcaatagcattctccagcatgccaaggatttcaag

SEQ ID NO: 509330 - DNA, 83 bp, Homo sapiens
aacactttccctgcctcacggtctccgtggagctgatcctgtgccggtatcagaatatctggaacatcaacctgcagttgcgg

SEQ ID NO: 509331 - DNA, 100 bp, Homo sapiens
tggttttatggcgcctctactttctggagtttgtgtaaaacaaaaatattatggtctttgtgcacatttacatcaagttgattcgatgtcatcagtcccg

SEQ ID NO: 509332 - DNA, 101 bp, Homo sapiens
aaacagcccgcccgaccccgtcccgaccctggccgccccgagcggagcctggaggtttttcgttggaatatacgttgcacatttatggcgattctgagtgt

SEQ ID NO: 509333 - DNA, 51 bp, Homo sapiens
tgaaggtggatgaactggagaggagcagtagagaactgtggactattctgc

SEQ ID NO: 509334 - DNA, 83 bp, Homo sapiens
caacgagaccagttagaacgtaccaagagtagacatggaggagcaggacttggagcgaaggttcgagctgctgagccgcgagc

SEQ ID NO: 509335 - DNA, 100 bp, Homo sapiens
cggcccttgccttggcagagctgagaaagcaacagcccacaattgcctgcattttctttcctcttcaaaaccacttctgctccaaagaccatgaacctga

SEQ ID NO: 509336 - DNA, 89 bp, Homo sapiens
ctccagtcggtgttgagcacggcgagcagtctcaggcctttagtgatgatgaacatatgctgtcaggaggataagagatgccttcagag

SEQ ID NO: 509337 - DNA, 75 bp, Homo sapiens
ttttgagctgggaaaactgtttcagttgcagactttaggcctgaaaggaaagaccacagcaagattctttcattc

SEQ ID NO: 509338 - DNA, 90 bp, Homo sapiens
atcaagatgaccgacgacgacctgtttgtggacttggggagcggggcaccaccacgaggcgatttgtgggccataccaaggatgtgctga

SEQ ID NO: 509339 - DNA, 80 bp, Homo sapiens
cagaagggtgaatgccatgtcaactttgttcggaaggctaggaattatctgtgaatgtaggaccactggatttgcagtct

SEQ ID NO: 509340 - DNA, 83 bp, Homo sapiens
ctcctttttacctttggttcacaacatcatcaaatgtcttgactcgtctgctgaacaaatcctctgacctcaggccggctgtg

SEQ ID NO: 509341 - DNA, 85 bp, Homo sapiens
cccagcgcccccaggccgctcccggggctcacggaaattggccttgcctctctgggtgcacctgatgaatacattgaaaagctcg

SEQ ID NO: 509342 - DNA, 83 bp, Homo sapiens
cctggagcctcagttggaagcagccgatccagcctgcggagcctgtggggcaggagccaagccgccatggcctaccacagctt

SEQ ID NO: 509343 - DNA, 83 bp, Homo sapiens
accgagaccgtgaccgagagcgtgaccgagagcgcgaatatcgtcatcgttagaagtggaaggagaacatgaatctctcagag

SEQ ID NO: 509344 - DNA, 98 bp, Homo sapiens
tttcggcggccgggagggagttgtcggcgccgcggccgctgcggacggacgctcgcctgccggctgagagtcatattaaatctgtagactcaggagaa

SEQ ID NO: 509345 - DNA, 96 bp, Homo sapiens
ttgcttttgcttcagcgttctgtggttgtcaacaggtccaagggcagccattaatggtgcaggtcagtggaggccagctaatcacatcaactggcc

SEQ ID NO: 509346 - DNA, 90 bp, Homo sapiens
ccttcctggctgatgcaaagtggattttgcacaactgcatcatttataatggggcggcatctggaggtagcagaagtagcagcagcccac

SEQ ID NO: 509347 - DNA, 74 bp, Homo sapiens
ccctgatgtcctgatgtgtgaagtgtcaagggggaaactggcgatggaatatgagaggagccctctggaaagaa

SEQ ID NO: 509348 - DNA, 99 bp, Homo sapiens
tcccgttgtactacgtggggcacgtctgcaagtccacagagaagcagtctgtgaagcagcgatacaggatttttttcccaggaagccatcccgtcagag

SEQ ID NO: 509349 - DNA, 100 bp, Homo sapiens
gttaaggattccaagtaactcttatttgaacggccggtttgtgggcgatgctgaccttgaaagacagaaattttcagatttgaaactcaacggaccccag

SEQ ID NO: 509350 - DNA, 75 bp, Homo sapiens
ctccaattaaccagatcttgccctggtgcagacaagacttaaacaagagccccaagacccgggacatccaggagg

SEQ ID NO: 509351 - DNA, 100 bp, Homo sapiens
gggcgccattgtgcttcgctgccgactgcatttcctcagtcacgggcctagaactccaaggagaaaggcggcggtgcttttgaagatgatgatatcacgc

SEQ ID NO: 509352 - DNA, 98 bp, Homo sapiens
gtgacgttgtggagatggggagcgtcctggggctgtgctccatggcgagctgggacaaaagatccttcatcaccgaagtgacgttttagaaacagtgg

SEQ ID NO: 509353 - DNA, 75 bp, Homo sapiens
agacgcagccgtagacaccagctccgaaatcaccaccaagaggagatgctctgctgaggggcagttgctatggtt

SEQ ID NO: 509354 - DNA, 100 bp, Homo sapiens
aatgaacactgtccttcaaaacgagaagatggatctgaagttggtgttggaggtgcacaagtaactggctctaatacacggaagcacatattgcaagttt

SEQ ID NO: 509355 - DNA, 75 bp, Homo sapiens
cagaaacccggactgagaggcagcgagaggtgccggtggtggtgtgcacattgagccccggtatagacagttccc

SEQ ID NO: 509356 - DNA, 74 bp, Homo sapiens
gccagccagccagcgccttcatcctggggctgcgatggctcactcgaaagtttggcataactacaacacacatt

SEQ ID NO: 509357 - DNA, 100 bp, Homo sapiens
gaggaagactcgatccgcctgcctgcgcacctgcgtgctggagaatctggtaaaagcaccattgtgaagcagatgaggatcctgcatgttaatgggttta

SEQ ID NO: 509358 - DNA, 74 bp, Homo sapiens
gtggaacggctgcttttggaaggtgatgatacatcttccaacattcaaaggctctgttataaagccaaataccc

SEQ ID NO: 509359 - DNA, 75 bp, Homo sapiens
cgacgaaccttggagagaggagaacgaacatcttctggacctttgtccaggccagctgcgggccgtccagcggct

SEQ ID NO: 509360 - DNA, 82 bp, Homo sapiens
gacaccgcctacaggagtatgatgcaagctgcatcttcctcccgtgaggctggccgagctccacgctgatctgaagatacag

SEQ ID NO: 509361 - DNA, 75 bp, Homo sapiens
agatcaccgtgacatccgaggtgcctttctccaaaaggtttctgtcaggatgaattggcagagcttgacccaggc

SEQ ID NO: 509362 - DNA, 87 bp, Homo sapiens
caattggcaggcctgaggtccttgttggctgcttgctggagaggtggtcaggacgtaataaccgagagaagattggtgttcatgttg

SEQ ID NO: 509363 - DNA, 51 bp, Homo sapiens
ttcgcagtggtcgcttcttctccttgactgggtttgtagatgaaactgaag

SEQ ID NO: 509364 - DNA, 83 bp, Homo sapiens
cgcgggccttcgagcagctcatgaccgacctcaccctgtcgcgggtttacccaaggtccagcctagcccctaggcaccatgtc

SEQ ID NO: 509365 - DNA, 74 bp, Homo sapiens
gctcgggacggaggacgcgctagtgtgcatggctgcctcctaatcccatagtccagaggaggcatccctaggac

SEQ ID NO: 509366 - DNA, 83 bp, Homo sapiens
acgcgctggccggagcagtgaaccagcacgggggatccagagacaatggccccgatgggatggagcccgaaggcgtcatcgag

SEQ ID NO: 509367 - DNA, 75 bp, Homo sapiens
gttttttctaatggctattcaaggctatccactctgttgcttggcatcatgaaggaaaacaatttatttgcagtc

SEQ ID NO: 509368 - DNA, 51 bp, Homo sapiens
tgccgccaccatgcccaaaacgtgtgctgtgctttacacgacaatcagtgg

SEQ ID NO: 509369 - DNA, 101 bp, Homo sapiens
acgccggaggaggcattaacgagaccggtttgtacaatgacgacagaaacctgcttcgaattagagagaaggaaagacgcaaccaggaagcccaccaagag

SEQ ID NO: 509370 - DNA, 74 bp, Homo sapiens
cccgctcagaagatcctcaccaagttcaaacaatgccctcggccaccagccacagcgggagcggcagcaagtcg

SEQ ID NO: 509371 - DNA, 100 bp, Homo sapiens
tcgcgtctctctgctgcggcgcggggaccgctgtgctctcgagcgcatcagcgaggaggtggggctgctgcagctccttggggaccccccgccccagcag

SEQ ID NO: 509372 - DNA, 50 bp, Homo sapiens
gacagtacaggaagacttgagggttcagcagactgtacaggatctttttg

SEQ ID NO: 509373 - DNA, 90 bp, Homo sapiens
gaacgtgctgaacaagagcaacgaggaacacggctctagataaggaggggcagattttctgcagcaagcactgtcaagacagcggcaggc

SEQ ID NO: 509374 - DNA, 75 bp, Homo sapiens
cagagcgtgtctgaggtggtgcgcggctccgtgctcctggtaagaagtttgatagctgtaggactgggtgttgca

SEQ ID NO: 509375 - DNA, 112 bp, Homo sapiens
atccgctccttgcccgagaacatccagtttgatgtttactacaagtgccggatggagtgctgtgatgtgccagccgagacactctacgacgtcctacacgacattgagtacc

SEQ ID NO: 509376 - DNA, 50 bp, Homo sapiens
gccaagagacatgttagaaggacaatttgcagttaacatgtttcgaacat

SEQ ID NO: 509377 - DNA, 100 bp, Homo sapiens
agagcggtcggtgacagcctcaagggcttcagcaccgcgcccatggcagagccagaccaccttcacggcatggtgcaactcccacctgcggaaggcaggc

SEQ ID NO: 509378 - DNA, 100 bp, Homo sapiens
ttctatattgtgaacttaaaggatcagtagcaatttggagcggtaagcccccaatatgtgaaacttataatatgactcgatggaggaaaatttgataagc

SEQ ID NO: 509379 - DNA, 83 bp, Homo sapiens
gccgtgtggaccaggaggagcgctatgtcatgtggcctgtgttttggaccgtggttcgtacctatgctccttatgtcacattc

SEQ ID NO: 509380 - DNA, 98 bp, Homo sapiens
aaagcgactgcatttttgcctttgagactcccgaaatatttaggcctgaaggaattctcagtcaaagaggcaccatactggacataccttttatgtgc

SEQ ID NO: 509381 - DNA, 82 bp, Homo sapiens
gaatcaaagataaatccaaatactgcatatcagaaacaacagggcatatctggaatctgaagttgctatatctgaggagttg

SEQ ID NO: 509382 - DNA, 100 bp, Homo sapiens
agcgggagacagcgggctcctgtctcgggacgctgggacacctgtcgcctccaggcccacaactcctctttctgtaggcaccattgtcccacctccgagg

SEQ ID NO: 509383 - DNA, 98 bp, Homo sapiens
cacgagatgtcccaagaaggcttcagcacagccctcacaatgacattcactactttcactgcctaagaatcctggaccttctcaaaggcacagaggcc

SEQ ID NO: 509384 - DNA, 101 bp, Homo sapiens
cagcagctcaactgcccagcgtgaccagtggccacctctgcagtgtcttccacaacctggcttttctgaagctcagcagcagctatgcaacaccagacagg

SEQ ID NO: 509385 - DNA, 109 bp, Homo sapiens
cagagccgagtgcagaagatctgggtgcccgtggaccacaggccctcgttgcccagatgtgctggagaatctggtaaaagcaccattgtgaagcagatgaggatcctgc

SEQ ID NO: 509386 - DNA, 98 bp, Homo sapiens
aaagaaacatgttcagtcccagcgcctgtccattgcttcaagcagggatgttggtggtaaatgtaacgtggaggaacaagacatatgtaggtacactc

SEQ ID NO: 509387 - DNA, 88 bp, Homo sapiens
tgcggaagtgcagctgcctcagttcttagcgcagactgtgccctgtccacggtgcctcctgcatgtcctgctgccctgagctgtcccg

SEQ ID NO: 509388 - DNA, 75 bp, Homo sapiens
gaaaatgtggacagtggagaaggcccagccaatgaagatgaagacataggagccttccatattacaacccgtccc

SEQ ID NO: 509389 - DNA, 80 bp, Homo sapiens
ctatcgtggtcgtaggaggctgtcctgtctgcagggctgaagaagatgcagagcagcctgaagctggtggactgtatcat

SEQ ID NO: 509390 - DNA, 82 bp, Homo sapiens
gactcagaatcgaatctcttctccctccccttcttggctttccttaaagtttcccatgtctcaatggactcctgaatataac

SEQ ID NO: 509391 - DNA, 80 bp, Homo sapiens
gagggaaaagggacgtaggaagaagggcaggacctgggcggaggccgccaagacgtgttctaagaacggaagcatctggg

SEQ ID NO: 509392 - DNA, 75 bp, Homo sapiens
ctcccggaaccgccgcctctagggatggacggacagtcgctctgagcatgagcgtcagtacctgctgtgccccgg

SEQ ID NO: 509393 - DNA, 73 bp, Homo sapiens
ctacagaaacaaaatgtcaacaaattgatggctgttgcagcgcagcatttcctccctgctgaggtttgccgcc

SEQ ID NO: 509394 - DNA, 86 bp, Homo sapiens
gacttaccttaacatgttcttgaagtaccatggcgtggattaaaaggaaaatgtttataggaggccttagctgggacactacaaag

SEQ ID NO: 509395 - DNA, 100 bp, Homo sapiens
atagtgtttgccaggacctcccctcagcagaagctcatcattgtggaaggctgccaaagacaggtggtggtggtgctgcagcaggtcttccagcttatcc

SEQ ID NO: 509396 - DNA, 82 bp, Homo sapiens
gtgctactcttgctgtcattgattctgaaaaggacatggtgaaaagctcttaccgaagcaacaaaattcagcagacacctct

SEQ ID NO: 509397 - DNA, 75 bp, Homo sapiens
gactcctcgctccttggatggcagtggttctgagccaggaaactggagcacccatcctaactgatgatgttagcc

SEQ ID NO: 509398 - DNA, 101 bp, Homo sapiens
acgaccggctctactgcgtctaccagagcatggtgctcttcttcttcgagaattacaccggggtccaggagcacgccaagatgtcccttgtgactgtcccc

SEQ ID NO: 509399 - DNA, 75 bp, Homo sapiens
ttagcttcaaaaatgacaagttcgataaaagtgtgcagaccaaggtgttcctgatccaagcagaaccctgttatt

SEQ ID NO: 509400 - DNA, 100 bp, Homo sapiens
tgagcagaaaggagttggggcttgatgaaggcgtggatagcctgaaggcagccattcagttctcttgctatgagccctggtgaagaaatcttaaccttat

SEQ ID NO: 509401 - DNA, 100 bp, Homo sapiens
ccagcttcactctttttggagctccaaggtgaagtatgaagtaacagaagatgtgtacacatccagaaagaaacaacaccagaccatgatgcattatttt

SEQ ID NO: 509402 - DNA, 75 bp, Homo sapiens
aggagcctctccgcccggcagccaccccatctgggaaatgcttctgatgagcagaattcacagtcctcgatggaa

SEQ ID NO: 509403 - DNA, 82 bp, Homo sapiens
ctgccggctgtgtgctcgtggatccagcttccccgggcgctgcctggacaggcctgcctgcgtgctgggacatgtctggcct

SEQ ID NO: 509404 - DNA, 100 bp, Homo sapiens
gtccaggcctgacagctctgcggctcgggccctgagcagttggaattgatcacaccttttcagttgtacttcaatcctgaattaatctttaaacactttc

SEQ ID NO: 509405 - DNA, 83 bp, Homo sapiens
gcggcgcggtagcgaaggccgccgaacctgcctggctagccggcgacttgagtgacgagaatcccagtcagaagttccagcct

SEQ ID NO: 509406 - DNA, 74 bp, Homo sapiens
cattcataaggataaaggatttggctttatccgcttggtcaagtctggcaccatctttgacaacttcctcatca

SEQ ID NO: 509407 - DNA, 75 bp, Homo sapiens
cctgaatctacccctgcaggaaaccaagaaatggtcactcagctctatgtgccagcatccagacatgtgtggagg

SEQ ID NO: 509408 - DNA, 82 bp, Homo sapiens
ttcgtcctcttcttggtgctgtggctgatgcatttcatggctatcatctacacaaagcgaaacgactgatagtgtgcccagc

SEQ ID NO: 509409 - DNA, 98 bp, Homo sapiens
tctcatcttctacctcagtttctcactgcttatctacataaaaaacttcattagaggggtggtagactcggaggatctccctctaaacatatcccgtg

SEQ ID NO: 509410 - DNA, 75 bp, Homo sapiens
gtcgcgatcctgaggtaacgggtactccaaagattcaggtttactcacgtcatccagcagagaatggaaagtcaa

SEQ ID NO: 509411 - DNA, 100 bp, Homo sapiens
ggcgcgcgtgcggaggaccaggcgcggcgcggctgcggctgagacaccattcgcttttcacccaagatgatttgatgtcttataaaactctgatgaacca

SEQ ID NO: 509412 - DNA, 71 bp, Homo sapiens
ttacagaaagagtcaacagcagtggcaacaggactgagcagggggaggaacatttaagctgatggaagtgg

SEQ ID NO: 509413 - DNA, 90 bp, Homo sapiens
tgctgatggtgatggagattttgatgtggatgatgccaaagttttattagcattccccgtcggagccctttctagagaaaccagtgccgg

SEQ ID NO: 509414 - DNA, 75 bp, Homo sapiens
tgtttgtggatcgctgtgatcgtcacttggcataacctgggtcctggtttacaggacagacaagtacaagagact

SEQ ID NO: 509415 - DNA, 83 bp, Homo sapiens
cacatcgctcagacaccatggggaaggtgaaggtcggagtcaacggcgctttgaacttcaagattcaggaagctctctacttc

SEQ ID NO: 509416 - DNA, 75 bp, Homo sapiens
cctttgcaggatgcagaagaagccaaaaacattctggttactccacaggatccgctgaacataggatgttgccac

SEQ ID NO: 509417 - DNA, 75 bp, Homo sapiens
taagaaaggtgatattgtagacatcaagggtggcatggagaaatcgttgtcaaaacagagatgtccgtcagtatg

SEQ ID NO: 509418 - DNA, 74 bp, Homo sapiens
agaagatcgaaaattaaacctcagaggtcctgctgtactagccaccaaagcagctgctggtactaagaaatatg

SEQ ID NO: 509419 - DNA, 50 bp, Homo sapiens
ctacagaaacctggtctccctagaaaatttttactactggagatgtcaac

SEQ ID NO: 509420 - DNA, 50 bp, Homo sapiens
cggattcaggattcagatgaaccagatcttagcaaagcaatgtctcaaga

SEQ ID NO: 509421 - DNA, 142 bp, Homo sapiens
atgtaaaatgagaataactgcagaagaaatgagtgcactaatagaagaacgggatgctgccttgtctaaggtcaaatttgtcaagatgtccacaatcccgagacactttggcctgaaatacaaagaggaatcgtatatgttt

SEQ ID NO: 509422 - DNA, 82 bp, Homo sapiens
taccagcagggcgttggctatgtgcccatcacaggtcttgagtcaccacgtccgaatataattcttgggttagtaatctgcc

SEQ ID NO: 509423 - DNA, 83 bp, Homo sapiens
ccagttcctgccgtctgctcttctgcctcttgatctccgccaccgtcttcaggccaggagccttcacgtaaatgggtccagtc

SEQ ID NO: 509424 - DNA, 90 bp, Homo sapiens
agaagtcaagttgaaccagcatgtgggcgaaatgctgaaaacttcgaccgatttttcacccgccatccaccagtcctaacacctcccgac

SEQ ID NO: 509425 - DNA, 96 bp, Homo sapiens
catgaaggacatgcgcaaagttctgagaacattacagcagatcaagaaatccagctcaactctctgacacagctggctattctagtcccagaagaa

SEQ ID NO: 509426 - DNA, 75 bp, Homo sapiens
tacctgtggagaccctcctgagacgttctgtgcaatgggctttgttcgcgggggtcacagctctcatggctgcag

SEQ ID NO: 509427 - DNA, 121 bp, Homo sapiens
gccgcggctccggccctggccccgatggctctgtgcaacggagactccaaggaatgtatacaaagactatcgcttccttgagctggcatgtgattcccaggaggatgtcgacagctggaag

SEQ ID NO: 509428 - DNA, 100 bp, Homo sapiens
ttttcctgaagatcttgaaaatgacattagaactttctttcctgagtatacccatcaactctttggggatgaatctgaattctacaaacacattgtgctt

SEQ ID NO: 509429 - DNA, 82 bp, Homo sapiens
tgcagcccgcgcacagctgctcccttcgccttcgccctttccacctcgcggcagttcggctaccggctctctgaccagttcc

SEQ ID NO: 509430 - DNA, 100 bp, Homo sapiens
gccgggagccgggcgcggctctgtgtggactcggagaaacgcggggcaggaagatcccaacagtttgcgccataaatataactttatcgcggacgtggtg

SEQ ID NO: 509431 - DNA, 90 bp, Homo sapiens
gcaccatctctgttttctagcagaattcttaataagtatgtgcaacgtatagagaaacagtttcttttgtatgcctactggataggctta

SEQ ID NO: 509432 - DNA, 101 bp, Homo sapiens
catgtctccatccccgaccgccctcttctgtcttggctgaaaatgatgagaatggacaagcagaaaacttttccatggacccacaattggagaggcaagtg

SEQ ID NO: 509433 - DNA, 75 bp, Homo sapiens
tgaaggacaaactcacatacgactcttactctcctgataccttcctggagatgggaccttgctgcaagaaactgc

SEQ ID NO: 509434 - DNA, 82 bp, Homo sapiens
gcgcgttggagcggcactcggagcttctacagaaggagtcagaaataccatcagaggaggggtactgtgactttaatagtag

SEQ ID NO: 509435 - DNA, 90 bp, Homo sapiens
gtgcccagccgggaactccccatcgcgttttgccagcgataatacgcctcaggttaactccgttgactgccaaaatagcatccccaacgt

SEQ ID NO: 509436 - DNA, 75 bp, Homo sapiens
ctctggtgagacatttttcttccttctgtcacatcacacccaatgctatcatggtgaacttacttcagattgtgc

SEQ ID NO: 509437 - DNA, 97 bp, Homo sapiens
tagcacttctcacattgcaatgcaggacattccgtatctaagccagatttaatcaccttattggagcaaggaaaagagccatggatgattgtgaggg

SEQ ID NO: 509438 - DNA, 100 bp, Homo sapiens
acctccttctatgccctgctcacctgcggtatcatcatcggtcggattgtttgtgctgaacgaactgtcctcttgcttcagaagccccttttgagtgtgg

SEQ ID NO: 509439 - DNA, 90 bp, Homo sapiens
cagattcgcagtggtcgcttcttctccttggcctctgaagaacacctgaagcagcactacattgacctgaaagaccgaccattcttccct

SEQ ID NO: 509440 - DNA, 100 bp, Homo sapiens
ctcacccatcacaaccaccagtcccaagcctacctcccagaaacattaaacctccgtttgacctaaagttctctttggtttccagcaagatgcatcaaac

SEQ ID NO: 509441 - DNA, 100 bp, Homo sapiens
gctgcagcggctcttccctgggcggacgatggacagccagggcaggaaggtggtggtgtgcgacaacggcaccggggttatggatcgccctggaaattat

SEQ ID NO: 509442 - DNA, 97 bp, Homo sapiens
acagttcacatcctggagatgtacgaggataaatttgcgcctcattttggtaagcggaaaaacaaaagagttcctgttttctcctaacgattctgct

SEQ ID NO: 509443 - DNA, 75 bp, Homo sapiens
atgaactaaataatctcctgtctaaagtctctctgaagaggctatcatggagctgaacctgccgactggtattcc

SEQ ID NO: 509444 - DNA, 90 bp, Homo sapiens
acccacagtgcctggagaggacatggggaagatgaataatacggcagctagtccaatgtctactgcaacttcaagtagtggaaggagtac

SEQ ID NO: 509445 - DNA, 83 bp, Homo sapiens
caggaagttggttactccattcgatttgaagactgcagtagtgcaaaaaccattcttaagttttaaaatcaaagatgggaaaa

SEQ ID NO: 509446 - DNA, 101 bp, Homo sapiens
tcatggctttgacaataccaaagagggtgttattgaagcaggagcatttcaaggttgcaaaagcttctcatttcagagagatgccaggatcctaagtgcct

SEQ ID NO: 509447 - DNA, 82 bp, Homo sapiens
cgcgcccagagccccgcgtttcagccctagggaagtgcctccggagccagcgtggtggccatagacaacaagatcgaacagg

SEQ ID NO: 509448 - DNA, 100 bp, Homo sapiens
tttccctcccccttctttcgatcagagatcggcggagaccctcgaagtgcgcaaacttgacactcaccctgaccgaacatcgtagctgtgggagctgggt

SEQ ID NO: 509449 - DNA, 74 bp, Homo sapiens
cgcttcgcacaggctcagcagcagctgccgctcgagtcacttggggcctgtggaggctcaatccagaccagtgt

SEQ ID NO: 509450 - DNA, 100 bp, Homo sapiens
ggttctgccgcttatcttcaggagcgaagagctgcttctgtatcttaagggggaagtccagccaagcagacgacctgggaaggagggcaccgggtcccag

SEQ ID NO: 509451 - DNA, 75 bp, Homo sapiens
gttaaggattccaagtaactcttatttggactcagcccaggagagtgttattactcgagatattcatcgtacatt

SEQ ID NO: 509452 - DNA, 74 bp, Homo sapiens
tcggagtttgagccccggaggcagagcggctgccatgacgtaaaattcatcctgatcagaaaaatattaatgcc

SEQ ID NO: 509453 - DNA, 75 bp, Homo sapiens
acagcctcaaacaggagctggagcagctcaaagaggtgtttggagaagagggattgaccctgaatcttgaagacg

SEQ ID NO: 509454 - DNA, 97 bp, Homo sapiens
ggagaacagcggtcgcgccggcaagagcagcgggagcggcgcggggaagggggcggtgtccgcagagcagtagagatggggtttcgccatgttggcc

SEQ ID NO: 509455 - DNA, 48 bp, Homo sapiens
aggaaagattgatgtttgcattgactgggcatttagctatggagacat

SEQ ID NO: 509456 - DNA, 95 bp, Homo sapiens
ctgcccggtgcccgaggaggcagccaagctcgtagcctgccactccgtgctggagaacatgcagctgaccctgaacctgcagacggagaacaaag

SEQ ID NO: 509457 - DNA, 100 bp, Homo sapiens
taaaggtgctggtaagatttcttctggaccgtgtgtatgtacaacaaaataatgtggagaacgtctacaatttgggattaattatttttcgagatcaagt

SEQ ID NO: 509458 - DNA, 82 bp, Homo sapiens
gtaaatgttgccttggtttacccacccacgccgactgtgatcagcccctgttccaagacacttggtggggttcccacacaag

SEQ ID NO: 509459 - DNA, 97 bp, Homo sapiens
ctgttatcctgtgacctgcaggtactgggagatccatagggaggacggcggaacatctggaggctgggaaatgattgtcataatggaagtgcaaggc

SEQ ID NO: 509460 - DNA, 101 bp, Homo sapiens
gtgcagtgtgtctggtcttatgaggattacctcacagacctcatcaccaatgacagcgtgagcttcttccgcacgtccaagaagatgtacccgcacaggcc

SEQ ID NO: 509461 - DNA, 50 bp, Homo sapiens
ctgcggcccagagccaggtgcagctcatctttgggtgaaaaattgtcggg

SEQ ID NO: 509462 - DNA, 75 bp, Homo sapiens
attctgattggaatccccaagtagatcttcaggctatggaagagaaacgtctcagagaaaaggaagagcaaaaga

SEQ ID NO: 509463 - DNA, 100 bp, Homo sapiens
gccagaaggaagatggcggatctggaggagcagttgtctgatgaagagaaggcagagaaacagcagctggaggaggccctgaatgcgtcccaggaagagg

SEQ ID NO: 509464 - DNA, 111 bp, Homo sapiens
caccatgccgctcctaagcctgcacagccgcggcggcagcagcagtgagagggtgctttcttctgcgacctggtactcatctacctcatcaaaaagagagagttttaccgt

SEQ ID NO: 509465 - DNA, 100 bp, Homo sapiens
gcgagcggccctactgggagttgtccaaccacgaggcaatgttgtttaatgtagaaaatggaaccccagcttcacgtgaagccttgtggttgagtgagga

SEQ ID NO: 509466 - DNA, 74 bp, Homo sapiens
tctatagagatgtgatgctggagaattacgggaatgtgttctcactggctattatttcatcaaacatgtcccgc

SEQ ID NO: 509467 - DNA, 74 bp, Homo sapiens
atttggagcagagaggaaaaaacggctatctataataggtgatgcaggcccagtgtgtcaaaacagaaactgaa

SEQ ID NO: 509468 - DNA, 100 bp, Homo sapiens
gctgatacagaagagatggatattgaaatggacagtggagatgaagcctaagaatatgatcaggtttcatatacactggagaagtcgtacatcgaatgct

SEQ ID NO: 509469 - DNA, 89 bp, Homo sapiens
tttccttcgtacccacagtgcttcatgagagacagcccacctgaggatattgaccataaggactcatatctcattacaagaagcatcat

SEQ ID NO: 509470 - DNA, 100 bp, Homo sapiens
ccacatggaacaaatcaacacagtccacaggtctctgcttggggtggttatgtatttatcatcaatcttattccactgcatgtatttgtgttgttactga

SEQ ID NO: 509471 - DNA, 75 bp, Homo sapiens
agggtctttcacttgtgctgcagatgtgttcagagcaacattgttttgttgacacaagcatttagaagaaagttt

SEQ ID NO: 509472 - DNA, 82 bp, Homo sapiens
gggcagaggatgcagtggaggccatcaggggccttgataacacagagtttcaagacaatgcagatcttcgtgaagactctga

SEQ ID NO: 509473 - DNA, 87 bp, Homo sapiens
tgccaagagagaacagtggaagaaactgcggagggaaagctgggaacgagaggtgtgagcagctgctggaagaggaggtgctcctga

SEQ ID NO: 509474 - DNA, 74 bp, Homo sapiens
gtgctgtggctgatgcatttcatggctatcatctacactcctcctgcatatgcccaagaggattgggagtggaa

SEQ ID NO: 509475 - DNA, 127 bp, Homo sapiens
caacaaggacaacaatgagatcgtggacaagatcatgggcaaaggacagatccagcgtgagtgcatctccatccacgttggccaggctggtgtccagattggcaatgcctgctgggagctctactgc

SEQ ID NO: 509476 - DNA, 89 bp, Homo sapiens
ggctcgagagctcgccccgaacgggggtcttcctcctccgccgttgacaggttatgaagacagtatggagtttccagaccatagtagac

SEQ ID NO: 509477 - DNA, 89 bp, Homo sapiens
ccggtgctgcagaaccagatccgggagcacgtcatcgccatcgaaggatgacgtagctttgccaaagacttagaagctaagcagaaaat

SEQ ID NO: 509478 - DNA, 74 bp, Homo sapiens
gtgatccagaagtccagagctgaggactgcctgtttgcagcgatctagggcagccctgcagaggtacctgttct

SEQ ID NO: 509479 - DNA, 74 bp, Homo sapiens
gtggctctgggatattatcgatgagttcatctaccagctgcaagctttcttcctggtggcagatgacatcatgg

SEQ ID NO: 509480 - DNA, 100 bp, Homo sapiens
ggatgggggaactgtgggcgtcttctctccaaagaaggtcaatgagctgaaggagaaaggcaacaaggccctgagcgtgggtaacatcgatgatgcctta

SEQ ID NO: 509481 - DNA, 75 bp, Homo sapiens
actgtactggctattggaaggaggagattctgaagataaggagattagtgatgatgaaccaggttatgaccttga

SEQ ID NO: 509482 - DNA, 100 bp, Homo sapiens
ctgggaggccggccggtgccagcacctttcggcttctgagacggcggcagcagcggcattcaggatgtctgactcaactctatgaaaacgccttcttcag

SEQ ID NO: 509483 - DNA, 99 bp, Homo sapiens
tcaagaaaatcgcagactttctcaactcgttcggtctgccatcatggatgttctcgcagaagcaaatggcacctttgccttaaaccttttgaaaacgct

SEQ ID NO: 509484 - DNA, 100 bp, Homo sapiens
agatcagaaagaaggggttcctggtcatacaccagtactaccaaggacagcttttttcctgcaagtggcagaaatctgaagctatcatggaacaattgaa

SEQ ID NO: 509485 - DNA, 88 bp, Homo sapiens
ggcgaatggggctcacgtcgatttctggcccccaaagacaaaccaagtggagacacagcagctgtatttgaagaaggtggtgatgtgg

SEQ ID NO: 509486 - DNA, 100 bp, Homo sapiens
taatcaacgactatgaagaattcagcaaagcactatttaggagcctacgtttttattatcttcaccggcttcctcattaccttcttggcttttaccttct

SEQ ID NO: 509487 - DNA, 75 bp, Homo sapiens
gtcgatgaagaggatgatgtttttggtgaaggtcatgaagaaggatatttcacagctataatgttgaagaaatca

SEQ ID NO: 509488 - DNA, 100 bp, Homo sapiens
tttttgtggtctttgaatggaaagatcctttcatccagaaagtccaagatattgaccctcttgctggaatgacatctcttagtataggtggttcagctgc

SEQ ID NO: 509489 - DNA, 100 bp, Homo sapiens
catgactgagtcctccatgaagaccagttcatcaaagcctacaagacgggcaacatggaccaggcgctgtccctgtggttcctcctgggctggattggcg

SEQ ID NO: 509490 - DNA, 98 bp, Homo sapiens
cttggagccatcctctacaggacccgctttctaccattaaggcatgcatatcattctgtttcaactccccctgtttaccctcctaaaaatgttgccga

SEQ ID NO: 509491 - DNA, 80 bp, Homo sapiens
cctgggcaattttaccaaactctgctgaagacgaacaaacctcacagccagagccagagaataatcctcctctgaagtca

SEQ ID NO: 509492 - DNA, 90 bp, Homo sapiens
aggcgagccctggtggaggaagaggtaaatcgggtccttcctcgctccaacatggtctacaatctctatgagtattcagtgccagaggac

SEQ ID NO: 509493 - DNA, 100 bp, Homo sapiens
gaatggagtcgccttctgcctggtcgggatcccgccccgcccggagccccggcccccacaggttatgatgtgattgctcaagcccaatctgggactggga

SEQ ID NO: 509494 - DNA, 88 bp, Homo sapiens
gctcggaagggtctttgttccctgcagccctcccacggtgaaaggaaagcaagccaggatggatatttacgacactcaaaccttgggg

SEQ ID NO: 509495 - DNA, 100 bp, Homo sapiens
gcagcattcaccggcacaccgtggtgaagctggcccacacctatcaaagccccctgctctactgtgacctggagtggaatgcagtagccctctgggcctg

SEQ ID NO: 509496 - DNA, 75 bp, Homo sapiens
gcaaaacagtcggtgtgtgctgagcaaatggaagaacaaatatgtctgtcagggaactctaatgatccaggacaa

SEQ ID NO: 509497 - DNA, 80 bp, Homo sapiens
ctacaacacggctgtcaagctggcgcgccagagcggcatcgagtagtttatgccaacgtgacttcattcatacagatgaa

SEQ ID NO: 509498 - DNA, 75 bp, Homo sapiens
gccggggcaggggcggaggcggaggcagaggtggaggcgctttgaaaggaaggtaaatactacagtgaggaggcc

SEQ ID NO: 509499 - DNA, 98 bp, Homo sapiens
atcaaatggcacttcattggccacctacagaaacaaaatgtcaacaaattgatggagaaatggaaggtgaacttgaagttatttgggaatctaccttc

SEQ ID NO: 509500 - DNA, 83 bp, Homo sapiens
ctgaaagagtaccggatctgcatgccgctcaccgtagacgagacaatgcagatcttcgtgaagactctgactggtaagaccat

SEQ ID NO: 509501 - DNA, 83 bp, Homo sapiens
cttcgatgtatctaaacttggcaccaagtatggaactgtggctgcaccatctgtcttcatcttcccgccatctgatgagcagt

SEQ ID NO: 509502 - DNA, 100 bp, Homo sapiens
cttcaggatagtatcttggccagggaactcaaacagcagatgcaggaagatgagaatgtgcctactgctcctgatcctccaagtcaacatttacgtgggc

SEQ ID NO: 509503 - DNA, 100 bp, Homo sapiens
cggccatgtgtccaacttcgtggagacagagcaggctcgggttatgtatgattttgctgctgaacctggaaataatgaactgacggttaatgaaggagaa

SEQ ID NO: 509504 - DNA, 99 bp, Homo sapiens
cctctcagcttcggagaatggagtcttccatcaatcatatctcacaggatcgaatcatcaatttagttgttggcagcttaacatccttattgattctag

SEQ ID NO: 509505 - DNA, 50 bp, Homo sapiens
ccgggctcgggggagcgtgagttgcagggctgcccttgagatggagttgc

SEQ ID NO: 509506 - DNA, 90 bp, Homo sapiens
atctcaagctaacaagtattgaagagttcatcagagaagatatgaaatataaagatgctactaataaacacagccatctgcacagagaag

SEQ ID NO: 509507 - DNA, 82 bp, Homo sapiens
gaccggacccagagaagaggaaaactctaccggtgcaggtcagcccaaggctgccccctcggtcactctgttcccgccctcc

SEQ ID NO: 509508 - DNA, 51 bp, Homo sapiens
gcgagacggcggcaggacggcggcaggttgaaatcacaaagattagacacc

SEQ ID NO: 509509 - DNA, 100 bp, Homo sapiens
gctgcccagcgccctggccctctcgctgttgctggtctctggctccctcctcccagggccaggcgccgctcagaacgtttcaccagtgatcattaaagaa

SEQ ID NO: 509510 - DNA, 75 bp, Homo sapiens
ctggcatcagggaggctttcagccggagaagcgagtttcagctgagtctccgggaccattatggcagtcaagtgg

SEQ ID NO: 509511 - DNA, 100 bp, Homo sapiens
cgggagagaatacacagagccagggtcaccagtcgttggcacaccaagaagctgccccgcaagacccaccgaggcctgcgcaaggtggcctgtattgggg

SEQ ID NO: 509512 - DNA, 82 bp, Homo sapiens
gggccagagctcttcccttacgcaaggtaaagttctttacaaagttcgctggaaaggctatacatcggatgatgatacctgg

SEQ ID NO: 509513 - DNA, 75 bp, Homo sapiens
caggcactgagctgtctgtgcgcgttcacacaaaagatgttggacaatttctacaattttgcttcatcatttgct

SEQ ID NO: 509514 - DNA, 50 bp, Homo sapiens
aaagacaacagccagaagacgtctgtgtaccgttggtcccaggaagacat

SEQ ID NO: 509515 - DNA, 100 bp, Homo sapiens
tatcagatcttcaacgtcaacattaaatgcgccagatctatggggatgtgctctacttcctgacagagcaccgcgacggattccagcacggagagctggg

SEQ ID NO: 509516 - DNA, 98 bp, Homo sapiens
tcctcctgctgctactgtgtccagcgcaggttgaaatcacaaagattagacacctttttagataggtgttcttcagcaccactgacaacacggttctg

SEQ ID NO: 509517 - DNA, 83 bp, Homo sapiens
atcagctcctggttcaacgaggccattgacttcatagatagcctgggctggaagctcttctacgtcacaggctgcctgtttgt

SEQ ID NO: 509518 - DNA, 75 bp, Homo sapiens
ttcaacgccaagcagcccaccgacatggcccggaggcagcagaagctcagagtcaagatctccactgaagttggc

SEQ ID NO: 509519 - DNA, 100 bp, Homo sapiens
ctcagcagcatcagacacatgatccgcaagaacaagtaccgccccgacctgcgcatgaacaacctccctcctagcatgatgacccgcagaaacacctacg

SEQ ID NO: 509520 - DNA, 75 bp, Homo sapiens
tttatgcaaagccagcgttacagtaatgttccaggaatacttttttgatccagatgtgttaactgaaggagagct

SEQ ID NO: 509521 - DNA, 100 bp, Homo sapiens
cttactatggaagatgaaggaaattctgacatgttagtggtgaccacaaaagcaggccttcttgaggtaatgagggatcctgcaagcaaaagatcaagag

SEQ ID NO: 509522 - DNA, 100 bp, Homo sapiens
gcactgggtgaaggacctgggcagcctcaatggggagaccagtatgatgtctgtgccatttgcctggatgaatatgaggatggggacaagctgcgggtac

SEQ ID NO: 509523 - DNA, 100 bp, Homo sapiens
tgagaagctcttgactgtcttttgtggcatgctgatgaactatagcaatgagaatggaattgaatgatctggcacgggaccctccagcacagtgttcagc

SEQ ID NO: 509524 - DNA, 88 bp, Homo sapiens
ctgccacagtgccagcagctccagatgttcttcctcttgcttgccagagctgctgccttccagggtcttctgctgctgttgccgccac

SEQ ID NO: 509525 - DNA, 90 bp, Homo sapiens
gcggatgccctgcagtacctgcagaaggtctctggagacatcttcagcaggtgtgatcccctgggcccgtttgttgtcgggggagaagac

SEQ ID NO: 509526 - DNA, 95 bp, Homo sapiens
gacctgtatcctaatggtgtatttcccaaaggacaagaatgcgaatacccacccacacaagatggctggttatattctgggcactaaatgaaggc

SEQ ID NO: 509527 - DNA, 98 bp, Homo sapiens
acgtttcgccggcgcgggcgccatcccggaagcgcgagcaaggccgccagatgtgcaggccacggcatatgcctccaaggacggggtcctcactgagg

SEQ ID NO: 509528 - DNA, 82 bp, Homo sapiens
tgagaagcctgacataccaggactgcctgagacaagccacaagctggaaggtgggagtcaatcattttgacaagtctcctga

SEQ ID NO: 509529 - DNA, 100 bp, Homo sapiens
gaacactcaagtgaagcaaaagccttccatgattacggatcgtgggactttaccagatcggtttgtaataacacctcgaagacgctatccgatccatcag

SEQ ID NO: 509530 - DNA, 50 bp, Homo sapiens
caggagcggaacaacgtcggcgagcgggtatcgtcagtgaagcaggagca

SEQ ID NO: 509531 - DNA, 50 bp, Homo sapiens
gagtacgatactcaggtcaaaggtatcacatcggtatcctcgaattcaaa

SEQ ID NO: 509532 - DNA, 100 bp, Homo sapiens
cggaggaatgcctgagcgggacatggactcaacagatctgtctgcctgcaatctacaagggagccgtgaggctgccttcacgtacgccatcaccgcggct

SEQ ID NO: 509533 - DNA, 125 bp, Homo sapiens
gagtacattgagataatcaccagcagcatcaagaaaatcgcagactttctcaactcgttcgcctcctacgtgatcacagacctgacccagctgcggaagatcaagtccatggagcgggtgcaggg

SEQ ID NO: 509534 - DNA, 97 bp, Homo sapiens
tggtgtcgcttctgcccaagatgaggagcccctggcctgcccggacgagttcgatgacttcgtcacctatgaggatgaggagaagcagcagcaggcc

SEQ ID NO: 509535 - DNA, 88 bp, Homo sapiens
gatctaaagctaaaattgcctttggacagtctatggatctacattataccaataacgagattagtgggatggtttggccatgaactca

SEQ ID NO: 509536 - DNA, 80 bp, Homo sapiens
cccggttgtcctcaggcgctgtcaggaggagagacttcagcatgcaaaccttcatctgttcggcttgcaccgtcattttc

SEQ ID NO: 509537 - DNA, 75 bp, Homo sapiens
aacatgactaaaaagaagcgggagaatctgggcgtcgctctagagcagcctcccgcgacgatgcccctcaacgtt

SEQ ID NO: 509538 - DNA, 83 bp, Homo sapiens
ggaaggctggtatctttcagagtgtaaagtaatcttggaatataaagatgttttctggcaaaggccttcctgcatttatgaat

SEQ ID NO: 509539 - DNA, 90 bp, Homo sapiens
ccagaaaccggggaccttaacaatccacctaagaaattcagaggagttaaagttcctcgtaattttcgcttgttggaagaacttgaagaa

SEQ ID NO: 509540 - DNA, 122 bp, Homo sapiens
cccctgcccagcccgcgcctgagaaggtcaaggtggaggtgaagaagtttgtgaagatcggccgcccgggctacaaagagtccttcaagatccagtacctgcagttcctggcatacacaaag

SEQ ID NO: 509541 - DNA, 51 bp, Homo sapiens
atcgtattgcctgctattctaatatgcacaacgtggaagttcttggaatac

SEQ ID NO: 509542 - DNA, 75 bp, Homo sapiens
tgaccagttcctggaagacgtgcggctacaggagcgcacgagcgggaggagatcgggcagttggtgaagcagatg

SEQ ID NO: 509543 - DNA, 90 bp, Homo sapiens
catcgaggcgcaagcccgtgtccaagtgctggattgcaaacagtctatgcgcagtgaggacgaggccaagttcccaacgatgaaccgccg

SEQ ID NO: 509544 - DNA, 100 bp, Homo sapiens
tccgtagagattttcttttggatgaggccaacgggcttctccctgatgacaagcttaccctcttctgcgagcctgatctagttgaatctgaagatgtgga

SEQ ID NO: 509545 - DNA, 75 bp, Homo sapiens
tttggaatcttcccttgaagagctgactgagttgaataccttcttcttgaagcatatctttgtgttccaagccag

SEQ ID NO: 509546 - DNA, 74 bp, Homo sapiens
agggagcgaatcgccaacacgagtgcacagccagaggacaacacatcacacacaagaaacagttgtgctcatgt

SEQ ID NO: 509547 - DNA, 100 bp, Homo sapiens
gctcaacggcgagccagagctggacctcaccagcaaggaggtgcaaaaaaagtcttttgaagagaaatatgaagtcttcatggatgtttgccaaaatttt

SEQ ID NO: 509548 - DNA, 100 bp, Homo sapiens
ctccaccacatctgcaccaactacaacaacgtgtgccgcaagttcccccgagacatgaaggccatgtccccaggttctacctgccccgcaagttctcgcg

SEQ ID NO: 509549 - DNA, 88 bp, Homo sapiens
ggccatcgaggccctgctgcacgacctcagctcccagaggatcaccagcgtggggatacccacccaccatcccagggtctacaacatc

SEQ ID NO: 509550 - DNA, 88 bp, Homo sapiens
tggcagcccccatacctcaagggttctcttgtttatcgaggtttttgggctggtggtttcggcaggatgccttcgtgaagatcgtgag

SEQ ID NO: 509551 - DNA, 98 bp, Homo sapiens
agcatgtctgacaaactgccctacaaagtcgtcttaggaaaagtcctcagtgctgtgggcagtgcccagctactgatgtcccagaaattccagcagtt

SEQ ID NO: 509552 - DNA, 100 bp, Homo sapiens
gaagttcgggactatcttctgtgacgccataagggagaagatgaagaaaaattacatgtccaatccaagttacaattatgaaattgtgaatcgggcttcc

SEQ ID NO: 509553 - DNA, 83 bp, Homo sapiens
cgggggcgcagggaaggagggcgtccgagtcaacaaccgcttcgagctggatgtgttcgaaatgcgctttgccaagatgccgg

SEQ ID NO: 509554 - DNA, 100 bp, Homo sapiens
aaccccagacatcaaccagctgccgccgtccatcctgctcaagtcctggtacctgggctagcttggttcctttccaagtgtcaaataggacacccatctt

SEQ ID NO: 509555 - DNA, 98 bp, Homo sapiens
gggaagtgtggtttggattccatcagtctgttcggcctgccatgtggaaaatgatgcttaatatcgatggtaagaatgattgatgttggctgatattg

SEQ ID NO: 509556 - DNA, 89 bp, Homo sapiens
cggaggaccaggcgcggcgcggctgcggctgagagtgagcacaaatggatcagatgaccctgaagatgcaggagctggtgaaaatagga

SEQ ID NO: 509557 - DNA, 50 bp, Homo sapiens
tcagcggagaataacatatcttcaggcttctccagggaaagtgaccgagg

SEQ ID NO: 509558 - DNA, 75 bp, Homo sapiens
gtcagctcccctttctcgcccagcgcccccaggccgctcccggggctcacggagagggctgaacccccctcatcg

SEQ ID NO: 509559 - DNA, 100 bp, Homo sapiens
taatcagttgccacgttcaaacaagcagctttttgaattactttgttatgcagaaagtgctttccttaaagtttcccatgtctcaatggactcctgaata

SEQ ID NO: 509560 - DNA, 97 bp, Homo sapiens
gctttgcctttctggacacagaagtatttgtgacaggtatctgaaaactgaagagtggagaatatgttcagcagggaacaagaggattcttttagaa

SEQ ID NO: 509561 - DNA, 82 bp, Homo sapiens
agttcatctcctccgtcaccagccacatctaccaggagcaggccgggctctcgccatgggtcactgtcgcctctgccacggg

SEQ ID NO: 509562 - DNA, 75 bp, Homo sapiens
gtagccatgatgccccacttggtgaatggagatgcagctcagcaggcagagaagaggcgatggcggcgatggcat

SEQ ID NO: 509563 - DNA, 100 bp, Homo sapiens
gtcactaagccagaatcctgaccttgctgcacagataacgtggttagaaggccattcactggcacagacagtatttacgtgcctttacattcataatcca

SEQ ID NO: 509564 - DNA, 74 bp, Homo sapiens
ggctgtcccctgccggggccgccctactctggggcttcctgctccagctgttatcatcaagtcttgtaacccgg

SEQ ID NO: 509565 - DNA, 74 bp, Homo sapiens
ttccatcatggcgtcaatgcaggctaaagtaaataatgccagcctgattggactgggttatactcagacccttc

SEQ ID NO: 509566 - DNA, 100 bp, Homo sapiens
aagatagagctgctaaatgtaaaattccagccctggaccttcttattaagactattgcagatatcatccgaacatgtttgggacccaagtccatgatgaa

SEQ ID NO: 509567 - DNA, 83 bp, Homo sapiens
caaagaatagagttgagcctgtgggacacttcggtttgcctgagaatacagatcaacccacagaacaaagcggatttccaagg

SEQ ID NO: 509568 - DNA, 100 bp, Homo sapiens
ctgcacgataaaggaactcaggcgcctcttcttagttgatgatttagttgattctctgaagccatgggaacaaggaggtcttctcctgccggggcatcct

SEQ ID NO: 509569 - DNA, 75 bp, Homo sapiens
caagaataaaagcgtcctgcaggaacgtcaaggtcgtgggaaataaaaggcagttctacacagactgcagcaacg

SEQ ID NO: 509570 - DNA, 75 bp, Homo sapiens
ctgcggagcccgccgggaccccccggagcgcggccacggcgcagaaaaatggctacaaacttcctagcacatgag

SEQ ID NO: 509571 - DNA, 100 bp, Homo sapiens
ccgggaagagatgcagcgctatgcggaggatgttggggccgtcaagatcgacgagaacgtgctaggagcccagctggacgttgaggccgcccattcagag

SEQ ID NO: 509572 - DNA, 90 bp, Homo sapiens
caggactctgaccctgcccctgccttcagcaaggcccccggcagcgccggccactacgaactgccgtgctgaccacagtggccgagaagt

SEQ ID NO: 509573 - DNA, 90 bp, Homo sapiens
catgccccgctacgagctggctttaatcctgaaagccatgcagcgggagcgagaacccgagcagcgccatgagcaacactaccgtcgtcc

SEQ ID NO: 509574 - DNA, 75 bp, Homo sapiens
cgctgatccgagaccctcgctcccccatcaacgtggagagcttgctgaccatcatcaaagaggggatgctgacca

SEQ ID NO: 509575 - DNA, 75 bp, Homo sapiens
ggctcaaaaggagccacaccccctgcagtttctcagtgcggaaggcagtcatgtgtcaggacagagcaacggccg

SEQ ID NO: 509576 - DNA, 87 bp, Homo sapiens
aaggagttcgagcagatcgacaagtccgggagctgggcggccatttaccaggattggttgccgtggtctttactgcttttctccctg

SEQ ID NO: 509577 - DNA, 98 bp, Homo sapiens
cgtaggcctctcggatctgatatcgtggggtgaggtgctggagaatctggtaaaagcaccattgtgaagcagatgaggatcctgcatgttaatgggtt

SEQ ID NO: 509578 - DNA, 100 bp, Homo sapiens
cattttccgacagattatccttttaaaccaccaaagatcacaaaatttgtccaggatagacatagagctagaagaaacagacttcgtaaagatcaactta

SEQ ID NO: 509579 - DNA, 95 bp, Homo sapiens
ggttaattcgaaagtcttgtggaagatctggaagaaacaggggttgcagatggtgtaggaggctggagagactatggagttgatccatctcaatt

SEQ ID NO: 509580 - DNA, 83 bp, Homo sapiens
gctagagaccatacagacctaccggtctgtcagtgagatggcttctaacaagaattaaggaagttcactggagtaaaatggag

SEQ ID NO: 509581 - DNA, 82 bp, Homo sapiens
aatccacattaagaagtacaatagcattcgcgcttcttggacacttaatgattgttggcaagaaatgtgctgctgatctggg

SEQ ID NO: 509582 - DNA, 100 bp, Homo sapiens
ctttgaaccagatgatgggacgaaatcctcactatggatgggctcattgaggacattaagcatcggcggtattatgagaagccatgccgccggcgacaga

SEQ ID NO: 509583 - DNA, 75 bp, Homo sapiens
ggagtattatgtcttggaagagactcctgctgtgattgtccagggatcctgggtttgagcagtttaaaatgtcag

SEQ ID NO: 509584 - DNA, 100 bp, Homo sapiens
cctccacatcccttccccaaggagatcccacacaacgagaagctcctgtccctcaagtatgagaggtacagccccgtggtggaggccggctcggacatgg

SEQ ID NO: 509585 - DNA, 97 bp, Homo sapiens
ctccagcgccgcgggatgtagcgcgggggaccgcggcccccagcagagcccgcctgcccggctgtgacgcatccaaagaagacattgacactgctat

SEQ ID NO: 509586 - DNA, 76 bp, Homo sapiens
gtgggaatgacaacttcggtcgtggaggaaacttcagtggtcgtggttgcccccaagtttcctggcagtgtgtgat

SEQ ID NO: 509587 - DNA, 90 bp, Homo sapiens
tatttaatggaaaatcgcttggttaaaacctgacacttttaacagagcaacctgcaagcaatcaaggccagtctaccctgcagcccttgc

SEQ ID NO: 509588 - DNA, 96 bp, Homo sapiens
tcgcctgcgcagaagttgcttacgccttgtacaaacttgcagcccaagagaacaggagaggtccaggccttctatgaggacctgagtggccggcag

SEQ ID NO: 509589 - DNA, 82 bp, Homo sapiens
agaggaggagttggtcttgctgtctcaggagtggcaaaggtggaagaaaattcttgtgttagagcagccagcgggtacagaa

SEQ ID NO: 509590 - DNA, 100 bp, Homo sapiens
ccaggcctgcagagactggagacgtccagcctgacattcacctgacttctgcagaacattgttctggagaatcatgtagcgacagatgaagacgaacctg

SEQ ID NO: 509591 - DNA, 90 bp, Homo sapiens
tcctgagatcaaatggcacttcattggccacctacagaaacaaaatgtcaacaaattgatggattgtgccttgccagtacatgctgcaga

SEQ ID NO: 509592 - DNA, 98 bp, Homo sapiens
cttggccaggctggccccgagcggaactggagaaagctgagggtagtgctcatagctctctttgtccagtgcttcggccttggtcccagcgccttccc

SEQ ID NO: 509593 - DNA, 75 bp, Homo sapiens
gccgattcctcctccttggtcgccgcgtccttggctggcgtcaggattcctggttttcaagcctgagctgatctc

SEQ ID NO: 509594 - DNA, 75 bp, Homo sapiens
gaatcaacctaagttttaaacagaaggtgaacctctgaggtaccgagttttggcaattggggatgaaaaagatca

SEQ ID NO: 509595 - DNA, 75 bp, Homo sapiens
cagtgaagtgcctcattccagacaggctgctttcagtagccccattgaggagatgttaaagtaacccatcttgca

SEQ ID NO: 509596 - DNA, 100 bp, Homo sapiens
ggcacctggtggtggtggacaaccgcaatcaggatgaaacaggcgcctatttaatcgacagagaccccacctactttgggcctgtgctgaactacctgag

SEQ ID NO: 509597 - DNA, 98 bp, Homo sapiens
gatcagagatcggcggagaccctcgaagtgcgcaaacttgacactcaccctgaccgatacctagagatgctgcttgagtaccttcaggattacacaga

SEQ ID NO: 509598 - DNA, 83 bp, Homo sapiens
gataacaaggcactttatgatactttttctgcttttggaaacatactgtcctgcaaggctggagcgcagtggtacaatctcgg

SEQ ID NO: 509599 - DNA, 97 bp, Homo sapiens
cactcgctggcgtccgggccgctggtgatctccggtagcactcgggccggcggacagtgagggcgcgattgttctctggggccggactgagaaatgc

SEQ ID NO: 509600 - DNA, 95 bp, Homo sapiens
tatctcaaggcctgagtagccggtaacaaacgagggttcccgggattggaccgacgcagccatgatacttggcatatcgaaattttatgattgac

SEQ ID NO: 509601 - DNA, 90 bp, Homo sapiens
tcaccatgaaatcacagcttcagatcactggtaaagaagcttcttaataaagtagtgctccgtgaatcttgcttttaccggaaattaaca

SEQ ID NO: 509602 - DNA, 74 bp, Homo sapiens
taaaagagccctgcaatttgaagatacatgagacagcagccaaacccccagtgtatcgcattaagttcaaggag

SEQ ID NO: 509603 - DNA, 83 bp, Homo sapiens
cgccccccgcccgtgccctcccgctcggccccgccagcagcactgtggaggccgtcctcgaggctgggaggcggcagaatgca

SEQ ID NO: 509604 - DNA, 80 bp, Homo sapiens
tgaaagaccggcatgccctattctgtgggcttccgcgaaggatagctgggagtatggccaccctgctccacgatgcggta

SEQ ID NO: 509605 - DNA, 100 bp, Homo sapiens
tctaccaactacagtgatggatcatagcaaatccccttttatgcgtaaagctaactgccttctatgaaagcagtcattattcaaggtgatcgtattcttc

SEQ ID NO: 509606 - DNA, 75 bp, Homo sapiens
gagacagctgcctgcagagtggtgaccaagaatatggcccaggtgaccaaagccctggacaaggccctgagcacc

SEQ ID NO: 509607 - DNA, 100 bp, Homo sapiens
cggctacgctgaggctctccgctcaggaactgttgacattcagggatgtgaccatagaattctctctggaggagtgggagtttctgaaccctgctcagca

SEQ ID NO: 509608 - DNA, 100 bp, Homo sapiens
aagtggttggttgcagttgtgtagtagttaaggtggtgacgggctcagggctggacagccagaagtcagacgaggagtatcgcgagctcttcgacctagc

SEQ ID NO: 509609 - DNA, 98 bp, Homo sapiens
atagaggcagaactgcaggacatctgcaatgatgttctgtatggggcctcgccagtgctgagtcaaggggtggatccacgaagtaccttctatgtcct

SEQ ID NO: 509610 - DNA, 75 bp, Homo sapiens
aaacatttgagagagccatgaaactggaacaggagtttactgaacatttcacagttcggcagaaggttctggaga

SEQ ID NO: 509611 - DNA, 100 bp, Homo sapiens
cttgcgactggcccagtatccaggtcgaggttctgcagaaggttgtgactttagtatacaatatgagatcctgactccaaactccattcccaagggtttc

SEQ ID NO: 509612 - DNA, 88 bp, Homo sapiens
cagcgcggccgtcggagacatgggagacccggggtcggagatcatggaagggaagtggttgctgtgtatgttactggtgcttggaact

SEQ ID NO: 509613 - DNA, 50 bp, Homo sapiens
ccagtgttcaccatcctggccccggaagatcgtctcctctgcctccaccg

SEQ ID NO: 509614 - DNA, 100 bp, Homo sapiens
cctctcgcgctgcactgtctctccgacgcaagactgtcccggcccgggtacatgtcccagagcaagcacacggaggcccgggagctcatgtactcgggag

SEQ ID NO: 509615 - DNA, 75 bp, Homo sapiens
agttataatagcagccacttgcatgggccttacttctataacagggaaaggaaaacctcttcagcgcaaggtgaa

SEQ ID NO: 509616 - DNA, 50 bp, Homo sapiens
aaacctcagcgacctgatcgacctggtcttttgcacaatcacgcccacat

SEQ ID NO: 509617 - DNA, 100 bp, Homo sapiens
cctggctggacaagtccatcgagttcatcggtacaagaactgcaaagccctccaagagccagccaggtggtaaaggattgtgtgaaggcctgtttgaact

SEQ ID NO: 509618 - DNA, 83 bp, Homo sapiens
caatcccccactctttccgccctaatggaggtctccagtttcggaactctgcgaccttcaagtcgtttgaggaccgagttggg

SEQ ID NO: 509619 - DNA, 90 bp, Homo sapiens
caagcgcagggggacggggaccagcagctgtcgccgccgctctcagagaggatctgacgaactactctcaggcagtgttctcagtagtcc

SEQ ID NO: 509620 - DNA, 90 bp, Homo sapiens
ccgtggctctcttggcagccttcctgatttctgcagctctgtgtgaagattgagaggatccagaatccagatctctggaatagctaccag

SEQ ID NO: 509621 - DNA, 74 bp, Homo sapiens
ctggcgttccaccagcaaccatgagtggttccatgatgggaagtgacatgattgcagagggaatggcatacatc

SEQ ID NO: 509622 - DNA, 59 bp, Homo sapiens
gcacgcgcgtggcccgcgagacgaggtgtccctggccagtgtccttccacctgtccaca

SEQ ID NO: 509623 - DNA, 83 bp, Homo sapiens
cgaaggggaagcccaaatcggggcgagtgtggaaggaccgctccaagaaaagatggcccactgcgtgaccttggttcagctgt

SEQ ID NO: 509624 - DNA, 83 bp, Homo sapiens
caaggagctcattaaggacggctctctgctcattggggcgttgaggaatcatggaagggaagtggttgctgtgtatgttactg

SEQ ID NO: 509625 - DNA, 75 bp, Homo sapiens
gagggagttcgacacccaagagcagcttgtgcacgtggaacaatccaaagttttaatcaaagaaggtggtattca

SEQ ID NO: 509626 - DNA, 90 bp, Homo sapiens
ggcaggagcctggcgaggatgcaccttcccctgccttggaaagaattaaacaaccaccatgtcgagcaaaaaggcaaagaccaagaccac

SEQ ID NO: 509627 - DNA, 50 bp, Homo sapiens
ccccaagctccccgtcctcgggtgctggagaatctggtaaaagcaccatt

SEQ ID NO: 509628 - DNA, 101 bp, Homo sapiens
ttcagatgataatggacagaatcatctagaaggacaaatgaacttcaatgcagattctagccaacataaagtgctcgccagaaacccagagctaattattt

SEQ ID NO: 509629 - DNA, 100 bp, Homo sapiens
ggagtatctgaggatggagaactcagcattacagatgtagagctaaaacgactgaaggatgctttcaagaggacctgtggactctcatattacatgggcc

SEQ ID NO: 509630 - DNA, 98 bp, Homo sapiens
tgctgtgctgttggcagcaaggaccgctcgctttctgtctggaagccatttggaaatagcatcagcagatataatggggagcctgagcatattgagag

SEQ ID NO: 509631 - DNA, 101 bp, Homo sapiens
tggttccagctgcagcacgtggacgctgactcggaagtgcaggagccgcaggcagagcgtccggcggccgggagggacgcggagccacagcccgacgcacg

SEQ ID NO: 509632 - DNA, 95 bp, Homo sapiens
tatttgagtcatttccttcgtacccacagtgcttcatgagagatattgatgatgctcaaatacttccccgctcaactagagtcagacatttttca

SEQ ID NO: 509633 - DNA, 90 bp, Homo sapiens
acagaatctgccggatggtgctggccacttgcttgggatcctttatcctggtcatcttctatttccaaaaacactctgctccagccaagg

SEQ ID NO: 509634 - DNA, 100 bp, Homo sapiens
gcacagcaaagggagacgtcatttgctactatgggaaccgaggggagcctgatcctatcgttttgacgccaggcataatcaccagcaacacccgggacaa

SEQ ID NO: 509635 - DNA, 100 bp, Homo sapiens
aaagacgtgcggatcctgctggtgggagaacatctgagtgggacatacttttgaaggatgtgcaatgttcaatcataagtgtgacaaaaactgacaagca

SEQ ID NO: 509636 - DNA, 83 bp, Homo sapiens
gacctgacgctactatgggccgagtggcagggacgacgcccagggttaaagcacgaattgggagctctcagcgacatcaccag

SEQ ID NO: 509637 - DNA, 154 bp, Homo sapiens
tcttcctccactaacagaggctcagaagaataagcttcgacacctctcagttgtcaccctggctgctaaagtaaaggcaccccagcctgcggtccatgtgcaggggcaggagccactgactgcctccatgctggctgcagcacccccccaggaa

SEQ ID NO: 509638 - DNA, 74 bp, Homo sapiens
ggaggattcagggaataggagctggggagcccttctgcgccacaggtccagcaagactatgaatctctgttcca

SEQ ID NO: 509639 - DNA, 100 bp, Homo sapiens
acttggacatgactgaagaggaggtgcagatggcactttccaaagtggatgcctccggggagtgcaagaagaaacacacgctgctgtgccccgactttgc

SEQ ID NO: 509640 - DNA, 102 bp, Homo sapiens
atgaaatcgtggggcccctctactacacctttgccaccgaccccaatagtgagtggaaaggtatgttgagtctaaaaaggacagagtcacagtagtcttcag

SEQ ID NO: 509641 - DNA, 75 bp, Homo sapiens
ttcgaagtgaagcttccagaaatggcatttagcccaggatgaagatttgataaagtggaaggcactgtttgagga

SEQ ID NO: 509642 - DNA, 83 bp, Homo sapiens
aacggcttcatcagcaccttgggaggctgggaggcggcagaatgcagccagaggagggcacaggctggctgctggagctgctg

SEQ ID NO: 509643 - DNA, 90 bp, Homo sapiens
tggatgatgatggatccatttctcctattgaggagtcaacgatcgttccaggaagagaaaggagatccatctattaagtttttccatgtg

SEQ ID NO: 509644 - DNA, 83 bp, Homo sapiens
tggatgggaagttaatgtttacggcgaagtctactcaacgtttccaaggtttggacatatttgactcttttccccccaggttg

SEQ ID NO: 509645 - DNA, 50 bp, Homo sapiens
gaggaggagcgcagcccggcctcggttctccaaaatacttatcattcagg

SEQ ID NO: 509646 - DNA, 100 bp, Homo sapiens
caaattcttcctggccgtcagtccggcagcctcacctcaccatttctagcttgttgaaacccaaaactaaatctccaatgaaaactatgttcctcacggg

SEQ ID NO: 509647 - DNA, 98 bp, Homo sapiens
cagagcacatattcttatcatttaggaaatcaaaatcaccatttgcagtttgcaagcatattttgggcttatggtgaaggctctggtgctgattgtag

SEQ ID NO: 509648 - DNA, 149 bp, Homo sapiens
ctgtcgctggtgcagctcaacgagctgctggaggacgagggccagctgacggagatggtgcagaagatggaggagtccgtgggctccgtctacagtggcctgatgcagggagtgggggctgctgagaaggtgttcgagttcatcgaccg

SEQ ID NO: 509649 - DNA, 100 bp, Homo sapiens
gccagtggcgccagatagaaaacggcgagagtgggcgagaacgtccactgcgggccggcgaaagctggactgaaatgcaactgcagaagcaacatgtgac

SEQ ID NO: 509650 - DNA, 82 bp, Homo sapiens
ggtccctcatacagagaaatgcatcttggtgagaatgagatggtgatcatgagacctggaaacaaatatgagtacaagttcg

SEQ ID NO: 509651 - DNA, 100 bp, Homo sapiens
aggacggcgttctggatctcaaagcggaacttgctactaccagcaccatgccctaccaatatccagcactgaccccggagcagaagaaggagctgtctga

SEQ ID NO: 509652 - DNA, 100 bp, Homo sapiens
cctggatgaaggtgcccctcgtcacagtaatctaagttggcagaaccaagagatatttattgcctgtgagcaagttctgaaagatcagcctgctctagta

SEQ ID NO: 509653 - DNA, 75 bp, Homo sapiens
gaaccaggagcctcttccatacatgaggtaaatttggaaggcaaagccagccctctgtcacttctacaaatggcc

SEQ ID NO: 509654 - DNA, 74 bp, Homo sapiens
tttcgctcacttgccagactgcaaaggacaatccatggactgatctataatgccctgaagttgtttatggaaat

SEQ ID NO: 509655 - DNA, 111 bp, Homo sapiens
gaaagatgaagaaactgaagagtcagaatatgattctgagcatgaaaattccgagcctgttactaacattcgggaggacatgtatgcccaggactctatagagctactaac

SEQ ID NO: 509656 - DNA, 100 bp, Homo sapiens
cctgcctcagcctccctagaagctggaattacagatatcatggaaatcaggacagtggcagttggaattgtggcaatcaaaggggtggaaagtgaattct

SEQ ID NO: 509657 - DNA, 101 bp, Homo sapiens
ctgagcgcgtccaggcctgacagctctgcggctcgggccctgagctcctcaagagttactgatctatgaaatggcagagaatggaaaaaattgtgaccaga

SEQ ID NO: 509658 - DNA, 96 bp, Homo sapiens
ccgtttcctgccttgctctttggaccacattgtcaattcacaccggtaccaactgccagcatttctgtggagggtaatcctgctcttaatcgtgtg

SEQ ID NO: 509659 - DNA, 82 bp, Homo sapiens
ggagacgttgataacgatacgcctccttttagaggactcagaagaagaagaaggtgacttatgtagaatttgtcaaatggca

SEQ ID NO: 509660 - DNA, 82 bp, Homo sapiens
cgcaccgaggcgagcaggagcagggaacagatgtgcactcccagcaacacccctgccacgccgcccaacttccccgatgcgc

SEQ ID NO: 509661 - DNA, 98 bp, Homo sapiens
cttccttgggctgggccttatcatccgtcaaaggagtcagaaagcacgtttcctgtggcagcctaagagggagtgtcatttcttcaatgggacggagc

SEQ ID NO: 509662 - DNA, 100 bp, Homo sapiens
tggccccacagcaacagaggcgcagcctcaaggaggaggagtgtccagcaggcccgatgagagaaagggaaagttaaggatgctggagcagaacaatgga

SEQ ID NO: 509663 - DNA, 75 bp, Homo sapiens
ccaaagtggatgcctccggggaggatgcagactcttcttattttaaaatctttaagacaaaacatgactgaaaag

SEQ ID NO: 509664 - DNA, 98 bp, Homo sapiens
tgtgctattcactctgctttacaaggtgtttggagaagagggattgaccctgaatcttgaagacgttcagcctcatgacttaggaaaagttggagagg

SEQ ID NO: 509665 - DNA, 100 bp, Homo sapiens
gctccggccgcctggctccccatactagtcgccgacagtacaatgtagattataaactggagacttacttgaagattgctaggctatatctggaggatga

SEQ ID NO: 509666 - DNA, 90 bp, Homo sapiens
ggccctgatccagacctgggcagatccccctgaggtgaccgtgtttcccaaggagcctgtggagctgggccagcccaacaccctcatctg

SEQ ID NO: 509667 - DNA, 102 bp, Homo sapiens
agaccatcatagcgggttggagagaagccacgaaggctgcaagagaggcgctgttgagttctgcagttgatcatggcactatttaggagcctacgtttttat

SEQ ID NO: 509668 - DNA, 100 bp, Homo sapiens
gaaagggagacggcgagacgcgcagcgccggcgcccgggagacccaggaggagcccgcaggtactccaaagattcaggtttactcacgtcatccagcaga

SEQ ID NO: 509669 - DNA, 100 bp, Homo sapiens
gcccgactcggtgattgaggacaagaccatcgagctcatgatcttgtggaagccctgaagccagagtatgtggcacctcttgtcctttggctttgtcacg

SEQ ID NO: 509670 - DNA, 90 bp, Homo sapiens
cagggcccctgggctcccggaaggtcaaaatgcagatcttcgtgaaaacccttaccggcaagaccatcacccttgaggtggagcccagtg

SEQ ID NO: 509671 - DNA, 90 bp, Homo sapiens
caacatcaaccagagcagattccagcctccacatgtacatatgtccccttcccctgagcccatctacaatagcgaggggaagcggcttaa

SEQ ID NO: 509672 - DNA, 71 bp, Homo sapiens
ccaaagatccccgttcctggagattctgattgagagcttggggcttccttggtcgcacccaccacctgcct

SEQ ID NO: 509673 - DNA, 98 bp, Homo sapiens
gttttcatgttgctggtggaccagattggtaactcccatgtgcattctactgacgcgaatagcacccagtcctgcctggcagaagatcatgcagtttg

SEQ ID NO: 509674 - DNA, 101 bp, Homo sapiens
tttctgctatccatattgatcgcctggactgtgcagtatttccagtctgtctcagtgattctaccagaaaggaatgaagaacagaaccttcaggaattgag

SEQ ID NO: 509675 - DNA, 90 bp, Homo sapiens
gcggcagcgcggacccgcccggagatgagcgttgctaatgttatacagcaggctgggtgtcctgtaccagaatacataaaaggttttcag

SEQ ID NO: 509676 - DNA, 75 bp, Homo sapiens
tgcagttagaagaagaagctgccgtttttcctgaagttgcagatgcttcctgggaattagaggaaaacgcttatc

SEQ ID NO: 509677 - DNA, 75 bp, Homo sapiens
catcaacctagagctgccaagaagcattcttcatctaaagataaggagaatggtgttgaacgcgtgtgtcctgag

SEQ ID NO: 509678 - DNA, 74 bp, Homo sapiens
gacaggccaagtgcaggggccagaagacaaagtcaattccattgcacttggaggctcctcagctcttcatatcc

SEQ ID NO: 509679 - DNA, 75 bp, Homo sapiens
cggcgcgacccggggaaccggcattggcaccatggctgaggaaacagctccagcagttcttgagcggcaccaggg

SEQ ID NO: 509680 - DNA, 100 bp, Homo sapiens
aagaggctggactcggattcgttgcctgagacctgcctagagctggaacgttacctccagagcgagccctgctatgtttcagcctcagaaatcaaatttg

SEQ ID NO: 509681 - DNA, 96 bp, Homo sapiens
gctgagagcagacacgatgtgaagatccattgctcccattgaggcagacaagaaactaattctgaagcaagcccttatagttgtgctgcagtggtg

SEQ ID NO: 509682 - DNA, 51 bp, Homo sapiens
gcccagctcaacgtcgtcgcaccaggccttcatggtgaaacacctcttgga

SEQ ID NO: 509683 - DNA, 95 bp, Homo sapiens
aggaccccctccggctcaagtgtgtcaagcaaggttatgaagacagtatggagtttccagaccatagtagacatttgctacagtgtctgagcgag

SEQ ID NO: 509684 - DNA, 100 bp, Homo sapiens
gcatcaatatctctgtctgggacgatgttggcaatctgatccagcctggggacattatccggctcaccaaagggtataatctgcagatgttggaagctga

SEQ ID NO: 509685 - DNA, 80 bp, Homo sapiens
gacctaggggaggattacccctctggcaagaagcgtgcggggaccgatggagtatcctgagctccagctggaccctaaat

SEQ ID NO: 509686 - DNA, 75 bp, Homo sapiens
tgcctctgcctggccgcggctctgggaagtgcgcagtccgtgtaggaagaatgatgatggagacacagttgttgt

SEQ ID NO: 509687 - DNA, 80 bp, Homo sapiens
gtaaagagagactcacctgcaagtactagctctgataacttgggttctttacaattgaggagctcaagcttgggaaaatg

SEQ ID NO: 509688 - DNA, 101 bp, Homo sapiens
cgtcaagctggccaagcacaaagagcttgctccctacgatgagaactggttctacacgcgagctggaagaattcctttggctaccggaagaaaagggagga

SEQ ID NO: 509689 - DNA, 74 bp, Homo sapiens
gtggaattagctcatacagcctaattttaatggccattagctttctacagactctccagaaagagcaacagtaa

SEQ ID NO: 509690 - DNA, 75 bp, Homo sapiens
tggtctagtacaaacaggctgctggcattgagccaatggagatcttcgtggatgatgagacgaagttgacgctgc

SEQ ID NO: 509691 - DNA, 83 bp, Homo sapiens
gaatgtcaagccagattttgttcagcccagggatgttcaggagctgaaagacgcctctgaagagccaatccattcaggatggg

SEQ ID NO: 509692 - DNA, 75 bp, Homo sapiens
ttttggatgatcttgaccccgaggggcaagattcttgccaagagaattaatgtgcgtattgagcacattaagcac

SEQ ID NO: 509693 - DNA, 100 bp, Homo sapiens
caaccgcctgcgaaacccaagccgccgcgtaggagcgtgcgttcgggccctcttctcccacctgttcggtgacctacggctccttcgactacacctcgct

SEQ ID NO: 509694 - DNA, 100 bp, Homo sapiens
gacttctccccttgtggaattacaagagatttcgactgtggaagaatttttccctagattggtgtaaacagccagacgtgggccttcccaaacccgacct

SEQ ID NO: 509695 - DNA, 82 bp, Homo sapiens
ctggtttttgcttcatttccttcaccaccattatccaaagattgtattgagcaggtgattgcatactcggaacatcgttacc

SEQ ID NO: 509696 - DNA, 100 bp, Homo sapiens
gagagttctactgctggattgaaagtcaaaaccgaagaaatgcagtgccaggtgctgggtaggccaggtttcagcatcgcagacaagaagcgcaggacag

SEQ ID NO: 509697 - DNA, 100 bp, Homo sapiens
aagaaatgtgctgaggaggcccaactggtaaattggcaggatgaggagcagcaaatcaaaagaggtgcctttaccaaatccaaggaactctcaaagcaag

SEQ ID NO: 509698 - DNA, 73 bp, Homo sapiens
gatgggagaatcacacctgagccagcagtcagtaatacagaaggtgtctgtgacctttgatgatgtggctgtg

SEQ ID NO: 509699 - DNA, 96 bp, Homo sapiens
ggggctggacgagagcggcttggccaagcaggcggcctcagggcttgtgggccaggagaacgcgcgagagaatatgcttttaaggctattaaccag

SEQ ID NO: 509700 - DNA, 100 bp, Homo sapiens
gttatgaagatgcaaagcctgagagatggaaactactatgcatgtaaacaaatgaagcagcgctttgaaagcacgagtacacgagacaggattgagaaag

SEQ ID NO: 509701 - DNA, 75 bp, Homo sapiens
cggaatctggatgggaccgcctccgggagctgtttggcaaagattggattggatgctgctggcaagacaaccatt

SEQ ID NO: 509702 - DNA, 100 bp, Homo sapiens
ggctggaagcgccttagaggagccatttttccagttgatcatggccttgccaggttggtgacagtatattgtgagcatggtcataaagctgccaaaatca

SEQ ID NO: 509703 - DNA, 75 bp, Homo sapiens
aacatggaggccgtgaagaccttcaatagcgaggttaaccccaaagattggctttccttggagtgaaatcaggaa

SEQ ID NO: 509704 - DNA, 100 bp, Homo sapiens
ccggagcagccgcgggcgcccgaggggccgagcgaggtacgacaccgagcttctggtcaggtgatggctcttaagatgaacacattgagcagtaaccggg

SEQ ID NO: 509705 - DNA, 90 bp, Homo sapiens
ctgcagttggcaggctgctgcgggaggcggcggcggtaggaagccggagacagcagggtgacaggctggagtgcagtggcgggatctcgg

SEQ ID NO: 509706 - DNA, 82 bp, Homo sapiens
ttcaaggaatggttccccaaataagttcagatcttcttcaagttatcaatactctggctgaccatcatcatcgtgggactga

SEQ ID NO: 509707 - DNA, 100 bp, Homo sapiens
ccgagggatgctgaaaacctttgggcttcatggagtcgtcttagatgttgattcaacctttccaaagtgaaactgatgagatttgatgatccactgttgg

SEQ ID NO: 509708 - DNA, 90 bp, Homo sapiens
aaggtatccatggagaacactgaaaactcagtggattcaaaatccattaaaaatttggaaccatacatcgagatatttccaagcagaagg

SEQ ID NO: 509709 - DNA, 100 bp, Homo sapiens
gggtacagttttcaaacctacacgttgatgttccaaaggatttgaccaaacctgtggaagggaaaaggccgaggcatcagcgtgtgaagaccgcaaagac

SEQ ID NO: 509710 - DNA, 88 bp, Homo sapiens
gcacctgcgcgaagctggccaaagcctgcccagacggctcacctgtgcgggatggaacaaaagaatcctgttacacctgggatttagg

SEQ ID NO: 509711 - DNA, 98 bp, Homo sapiens
gaaaaatggaggagggtttaaaattcatcctgttctttttgcacaagacttaattcagtgcacaaatgagatgaatgtgaacatcccacagttggcag

SEQ ID NO: 509712 - DNA, 75 bp, Homo sapiens
tgctaatgctaaaagcattggacaccttatttttgattgtgttcaattagaccttcaggacctctccaagaagcc

SEQ ID NO: 509713 - DNA, 75 bp, Homo sapiens
ctagaggcagctagtggcttctatactcagagctattctcaagctggaataactgagactgaatggacaagtgga

SEQ ID NO: 509714 - DNA, 50 bp, Homo sapiens
gaggcaggcctggcaccagtgcccatgacaatgcagatcttcgtgaagac

SEQ ID NO: 509715 - DNA, 111 bp, Homo sapiens
aaggatgcccggtccccatcaccggcacacattgtcatggagtcatcagaacccactgtgaggaagtgacttctccttgaggtcacccagacactccaaacagagcagagc

SEQ ID NO: 509716 - DNA, 100 bp, Homo sapiens
aaagcttctggcaagaggtgctgatatcaacacggtcaacgtggacggcttgacagccctgcaccagatctttgtagaatttgatggctgtaactggaag

SEQ ID NO: 509717 - DNA, 100 bp, Homo sapiens
gaacttacgaagctcctgttaaatcaatgacaacggcaacacgacaagaagtccttggcctctaccgcagcattttcaggcttgcgaggaaatggcaggc

SEQ ID NO: 509718 - DNA, 100 bp, Homo sapiens
gacaatttcagcttcagtgcaaaaataagagtgggtgacttctatgaagccagagatggaccgcagccctgactgccgccgcaggaagagggaagctgga

SEQ ID NO: 509719 - DNA, 100 bp, Homo sapiens
aagaagacttgcttcagcatttctcaattgtcttcgcagttttaccgacttagaagaacttgatgagacagagttatatatgtgccataaatgcaaaaag

SEQ ID NO: 509720 - DNA, 100 bp, Homo sapiens
cgacaacctggccatccagcttgctcactctacacccccaagtgcatatgggtctgtcaaagcctatactaactttgatgctgagcgggatgctttgaac

SEQ ID NO: 509721 - DNA, 98 bp, Homo sapiens
gccgcacctccgtagctgactcggaagatattttcgattcagataaagaagttcctatcgaatccacttttgttcgcatcaaagaaactccttctgaa

SEQ ID NO: 509722 - DNA, 75 bp, Homo sapiens
cccgagccgtgtttccttccatcgtcgggcgccccagacaccaggtgtcgtgaaaactacccctaaaagccaaaa

SEQ ID NO: 509723 - DNA, 75 bp, Homo sapiens
aatatgggcagtaacacatagcgtcaaagaggaaacaaacgtacttggatttaaaggtcctaggaaaatgtctgt

SEQ ID NO: 509724 - DNA, 50 bp, Homo sapiens
gacaaggcactgctttttcatgacgcttcgagagctgtgcccaggagtga

SEQ ID NO: 509725 - DNA, 100 bp, Homo sapiens
ttggtagcagcgggtgacatggaaggggcagtacaagcttacgtctctgctcttcagtacaatccttcttgtgaaaatgccattgtgtgctggaaacctg

SEQ ID NO: 509726 - DNA, 83 bp, Homo sapiens
cggggcaagagcaggagcccggcaccccccgccgacaaggagggttttgggatttgagattgacgcggtgaactctgtccagt

SEQ ID NO: 509727 - DNA, 98 bp, Homo sapiens
cccgacttggcggaggtggtgggctaccaggccgagggtgacagggaccagtcctgctcaagaccaggatcatccatccgaggagcagggggggcagg

SEQ ID NO: 509728 - DNA, 74 bp, Homo sapiens
gccgggggagcggggccttccacaccccctccgtgggtgtgtggaactcgaatcatttatgacagaaagtttct

SEQ ID NO: 509729 - DNA, 74 bp, Homo sapiens
tttttcagaatggcaaagtaaaggacagagcgggatgccaccagcttgtccaaagggaagttccaggagctcct

SEQ ID NO: 509730 - DNA, 90 bp, Homo sapiens
cattctcccgaaatgggctaaatcagctgaagatttcatctataaacataggaaagctttggaggcaaaaccttcaactgaggacttggg

SEQ ID NO: 509731 - DNA, 75 bp, Homo sapiens
ctgagcctcagcacctgcttgtttggaagcatgccaatgaagatgtggaaagaatgttactaggaaacaagtgtg

SEQ ID NO: 509732 - DNA, 90 bp, Homo sapiens
gtaccatcgccactgcgacgagaaagctctgggtgtgcggcagtaccatgtggcctcagtcctgtgccaacgggccaaggtggcgatgag

SEQ ID NO: 509733 - DNA, 76 bp, Homo sapiens
actgggaaatagaggataatcagatatttgttcagtcgaatcaaggtgaagaggaaacaacaagaatttcatattt

SEQ ID NO: 509734 - DNA, 100 bp, Homo sapiens
caagaaaggggcccggaaatccaagcttccagctgatcttaccaagatgcatctcacagaaaaccctcatccacaggtgactcatgtgtcttctagtcag

SEQ ID NO: 509735 - DNA, 118 bp, Homo sapiens
tgaccgtgctcttcactatgtgttctctgcccgtaattctccatggctacatggaaaacaagcctctgggacttcagatcttcattgggacagctgatgagcggatccttaagccgca

SEQ ID NO: 509736 - DNA, 74 bp, Homo sapiens
ccctgcagccttctggtataccatcgtcaccatgacaacactagggtacgtggtcatctcccgggaggagaggg

SEQ ID NO: 509737 - DNA, 50 bp, Homo sapiens
ctcccaaagtgctgtgattacaggtgcaccgggtataatttcttcaccat

SEQ ID NO: 509738 - DNA, 100 bp, Homo sapiens
agctgaaacggaggcagcagaaggagccactcatttatgagagcgaccgtgatggggccattgaagacatcatcacagggtcacggagactcaccagttg

SEQ ID NO: 509739 - DNA, 100 bp, Homo sapiens
cagggcaagccccgctccggccaacaagttggccttcattccacgatgtgatcaattctgaggcaatcacattcacagatgacttttcctatgggatgca

SEQ ID NO: 509740 - DNA, 75 bp, Homo sapiens
cagctgacggagatggtgcagaagatggaggagcatcacaggacatggccccctcagccacctagctggggccca

SEQ ID NO: 509741 - DNA, 100 bp, Homo sapiens
tattccttccagacaaaagaccgtttgtgttttgtgatggaatatgttaatgggggcgagtgtgtggattctcatgccatataacttgtgtaaacaaagc

SEQ ID NO: 509742 - DNA, 136 bp, Homo sapiens
cgctgaccgcggagaagctgtgcatttacaccgacaactccatcaagcctcaggagctgctggaaagaaatactgagccttgataaactagaagctcagctgaaagcttgcaactgccgactcatcttttcaaaag

SEQ ID NO: 509743 - DNA, 100 bp, Homo sapiens
gaaaaccagttattgaatatcaagaggaggagttgttggaagctgatctggatgcagaattagaaaactgccatcattacatgcagtttgcagcagcggc

SEQ ID NO: 509744 - DNA, 87 bp, Homo sapiens
ggaggaggaggaagaggaggagaaggccatcgaagacggcaatttggaggaaatggaagaggaagtacggcttaagaagcgaaaaag

SEQ ID NO: 509745 - DNA, 75 bp, Homo sapiens
acattattgcgcgtggaacggctgcttttggaaggagtgcctgtgaagaaaacggggtattgccctgaggcttat

SEQ ID NO: 509746 - DNA, 75 bp, Homo sapiens
cagcccggacctctggagtgcccccagcccagagcccggacaaccatgtcgtgatgatgatgatgacgacgatga

SEQ ID NO: 509747 - DNA, 96 bp, Homo sapiens
ccgggctcgaaggctgtgcggtctgccaggagctgcggccccgtccggcccgggctggccgagacgcatccagagctttcgtgaccggggactgtt

SEQ ID NO: 509748 - DNA, 142 bp, Homo sapiens
ctgatgataacggggagccctcagatgacctggtgcccgccattctggacaccgcccatcagtacagcatccagggaggctgccggcgtggaccgcgggaaggcggggctggggctcggcgggaggccacccccacagccgc

SEQ ID NO: 509749 - DNA, 74 bp, Homo sapiens
gaatattgcccattttagtccattgtcttgaaagagatgacaagtattttcaaccaccaggaacttggatacag

SEQ ID NO: 509750 - DNA, 100 bp, Homo sapiens
cccgcggccccccagccgctggagaaggagaacgacggctactttcggaagcttcgaggcagagaatgggccgacaccatctcctggccgcagccccctg

SEQ ID NO: 509751 - DNA, 97 bp, Homo sapiens
aaatttgagatgatcaaacttatagatattgcacgacagactgcacagggcatggaggtattcttggctgaacagtttgagttccttcagccacatc

SEQ ID NO: 509752 - DNA, 51 bp, Homo sapiens
cctgcagcctcctgcccaggctccggaggaaaattcttccagcgatggtct

SEQ ID NO: 509753 - DNA, 50 bp, Homo sapiens
cagctggcaaattcagtgcagatcagcatccagagatacgctgtcatccc

SEQ ID NO: 509754 - DNA, 98 bp, Homo sapiens
ttccagcaacagcagcaactgccgcacccttgaaaggaggcccctgccgtgtggacccgtaaaataaaatggaaagcgtggatacccatcaacgaagt

SEQ ID NO: 509755 - DNA, 76 bp, Homo sapiens
aaatccttcggatggtgaactcattagaagggtttagtggttactctcctgtttggaaaaacaaactcagagaagt

SEQ ID NO: 509756 - DNA, 110 bp, Homo sapiens
gctccttcacatggagagccagctgcaagacgtggaccctggaggagacctggccactgtcaacagtcagctcaagaagctgcagtggaggtgaagccggtgctgccaag

SEQ ID NO: 509757 - DNA, 100 bp, Homo sapiens
cacatccccacatcaatgcactgccaatggtctctaattaacagaagatggcaaagcccagccacagcagctatgtccttcagcagctaaacaaccaaag

SEQ ID NO: 509758 - DNA, 101 bp, Homo sapiens
aaagaccggcatgccctattctgtgggcttccgcgaacttagaccatgctcagcctccaagcagccttgtcatcgacaaagaatctgaagtttacaagatg

SEQ ID NO: 509759 - DNA, 100 bp, Homo sapiens
gcgctcatctgctggagcccggatgttgagaaagagaaggaaacccacagttacctcagcaaagaggagatcaaagagaaagttcataaatacaacttag

SEQ ID NO: 509760 - DNA, 90 bp, Homo sapiens
gcagggggagggggccgaggttcagctgactggaaaggtaccgggtgtctggtccgagccgtggagatggccgcccagcgccaggccgac

SEQ ID NO: 509761 - DNA, 97 bp, Homo sapiens
cacggcgtacgccctcatggggaaaatctccccggtgactttcagggctctggtatcagttcctcttcagtattgcatggcatggtttttaagaagg

SEQ ID NO: 509762 - DNA, 100 bp, Homo sapiens
caagctctttgggaagtggagcaccgatgatgtgcagatcaatgacatttccctgcagtcaccattactttaagtactgcaaaatctcagcattggctct

SEQ ID NO: 509763 - DNA, 127 bp, Homo sapiens
atcacctgtctggagcaaggaaaagatccctggaatatgaagagacacagtatggtagccacacccccagggtcaaggtggaaggtccaaggactgagaaagaccctcgaaggcatccactttagtc

SEQ ID NO: 509764 - DNA, 100 bp, Homo sapiens
ccgaagcaaaagtccattcagaaaagacaagagccctgtgaggttaaagaattgcccacccttaaggatatggactttctcaacaagaaccagaaagtat

SEQ ID NO: 509765 - DNA, 97 bp, Homo sapiens
tttaaaatgcaaagaaaaatgtgaaggattcgaactgcacttctggagggtatgttagagcccaccaaggaaccactgaaaccactttctgctgcag

SEQ ID NO: 509766 - DNA, 83 bp, Homo sapiens
ccgcaagctgagcgagctgtcagagcccggggacggcgaggccctcatgtaccacacgccccagcatgagaccagatgtaagc

SEQ ID NO: 509767 - DNA, 80 bp, Homo sapiens
catatatgcgaatctataagaaaggtgatattgtagacatcaagagacaccaccatgtatgctgtgtctgctgatagcaa

SEQ ID NO: 509768 - DNA, 101 bp, Homo sapiens
tctctgcaacacctttggaggaggggtgtttctggccacgtgcttcaacgctctgctgcccgctgtgagggaaaaggtgatgcagaagatggggaagaata

SEQ ID NO: 509769 - DNA, 100 bp, Homo sapiens
caagaatttaatcaaaagagagcaaaatttaaggagttatatttggctaaagaggatgtcatatggtagagagattcagtgaaagtaaagacagtagtca

SEQ ID NO: 509770 - DNA, 87 bp, Homo sapiens
ggatttggctacacacttatagatcttctgcactgtttacaggcacagactgctcactagaagctcagcccaaatatgttagaggtg

SEQ ID NO: 509771 - DNA, 80 bp, Homo sapiens
cacaaaacaagaaagtcaactccgtaatgaagtggctattttacagtttcctgtgcctggtccccgaggaagccaagacc

SEQ ID NO: 509772 - DNA, 75 bp, Homo sapiens
gaggaattggccttctctagaagactcttgaactctaatgaatcattgattgaccagcactattttaccagttgg

SEQ ID NO: 509773 - DNA, 100 bp, Homo sapiens
cttgatcccaacaatgttatcattgagggttatggttttgtgaaattcacagatgaactggaacagaagcgagccctgacggagtgccagggagcagtgg

SEQ ID NO: 509774 - DNA, 75 bp, Homo sapiens
caccaagtgcatcaccatccccagggactggagccaacagacctttgactatctcctgagccatgtccattctcc

SEQ ID NO: 509775 - DNA, 100 bp, Homo sapiens
acccgggagtggtgcgtgatgtggctaagatgctgccgactctgggcggcgaggaaggcgtctcccggtggatatcaaagtattgcagagtgccttagca

SEQ ID NO: 509776 - DNA, 95 bp, Homo sapiens
cctgccgtccttctccactttcgccagcccgtgccgcgagcgcggcctgcaggagggcagcgggtggcatgagacgtgggaacatgggccacctc

SEQ ID NO: 509777 - DNA, 83 bp, Homo sapiens
cagggacgtccgtctccgacgagccccgtgaagcccagttcccctgccagcaagcctgatggagtttacccctcaatcccaaa

SEQ ID NO: 509778 - DNA, 51 bp, Homo sapiens
cctcctccgatacttcccgcagtcgggtttttaatgaccacaacaagcaag

SEQ ID NO: 509779 - DNA, 100 bp, Homo sapiens
gagaaaagtaggatgaacctgcccaaggggccggacacgctctgcttcgacaaggacgagttcatgaaggtgaaggaaatactcatgaccagccagatgt

SEQ ID NO: 509780 - DNA, 82 bp, Homo sapiens
ccgtccatgcggaagatcgtcgccacctggatgctggaggtaactaggatttctacctcaaccgcgagacctatgcaaggac

SEQ ID NO: 509781 - DNA, 97 bp, Homo sapiens
ctcatgagagaactggacctgatgattttgaatggatgtctgatgaaaggtgtgatgaatgcagactctgctaccattttggctgtttggatcctcc

SEQ ID NO: 509782 - DNA, 74 bp, Homo sapiens
acaagcatggagcctggggaaattctgcagtgagacggaaaaggcgtaacttcagtaaacaggccacagaaatc

SEQ ID NO: 509783 - DNA, 75 bp, Homo sapiens
atttagaggacattatcatgggagctgactgctgggcaggaacgtctctcaggagaaagagtggaagagaaaatt

SEQ ID NO: 509784 - DNA, 82 bp, Homo sapiens
cttctagacgacaaaatgcaaaaaaggaggccaaagactttttacctggctacagaaagaagatgccagatgacacttaaga

SEQ ID NO: 509785 - DNA, 111 bp, Homo sapiens
ctgaacttttgaagataatggcctgcattttattggtctacaaagacagcaatggctatatgcatccagttcatcctcatgtagttagaagacttgcataccaacataatc

SEQ ID NO: 509786 - DNA, 100 bp, Homo sapiens
tggccatctgggcttggcttccggctccccccatctggctggaacacacatcagtcacgttccagaatctcagcttttacctggacagaggtttcaaact

SEQ ID NO: 509787 - DNA, 101 bp, Homo sapiens
cccgggaggaaggaacgaggcaaggagctaaagcagcgtgcgttcagccctgggggcacggccgagcagatgaggactgtgtggacgaccgggccagacac

SEQ ID NO: 509788 - DNA, 100 bp, Homo sapiens
ctgtcagggaagaagcgcagaaaactcctccagcagatccggcttgcccagaaagagaagacagccatggaagttggtaggaggacagtttgatctggaa

SEQ ID NO: 509789 - DNA, 50 bp, Homo sapiens
cacactagaatggagcactacagaggtgtattgtacgagcattgaaagat

SEQ ID NO: 509790 - DNA, 96 bp, Homo sapiens
aaggaggagcctgttccagaactgctggaagctgagctctaagcgaaagacatgaggcctcagcctgaaatgaggttgttttgaggtcatctgatt

SEQ ID NO: 509791 - DNA, 82 bp, Homo sapiens
gggaggtggagcacctgaagagatgccagcagctgtgttggggtggaagaggaggaggcgcccgacatcgacatataccact

SEQ ID NO: 509792 - DNA, 75 bp, Homo sapiens
gggagatcttgcgggaaaaggagagctcggctgttccagccagggtggagcagctcctgtacgaaagccctgagc

SEQ ID NO: 509793 - DNA, 90 bp, Homo sapiens
gggggccttggctgtaaggacccctaaggcccgacggccatggaggctgaagagacgatggaatgccttcaggagttccctgaacatcat

SEQ ID NO: 509794 - DNA, 83 bp, Homo sapiens
gccgtgctctccgggcacgtcaaccccttcctcccgtatatcagggtgagaaggactggcagaaatacgagactgctcggcgg

SEQ ID NO: 509795 - DNA, 83 bp, Homo sapiens
agcaacagaggggactagcagcgaatatatttaggcctattaaaggaaggcaggaagaactaaaggaagtaattgaacgtttt

SEQ ID NO: 509796 - DNA, 83 bp, Homo sapiens
tggaaaaggagttcgagcagatcgacaagtccgggagctgggcggccatttaccagacaaatttacatgtattggagaccaga

SEQ ID NO: 509797 - DNA, 98 bp, Homo sapiens
ggccggttgctaagacttggcgaagcgctgcgctcgcgcccggatccctcaggatggtggatgtggggggccagcggtcggagcggaggaagtggatc

SEQ ID NO: 509798 - DNA, 98 bp, Homo sapiens
aagtacttcaccaactgcaagcagtggtaccaaaggaaaatctgtggcaaatcaacgtactaggttttgacaagcttgcatcatgcgtgagtataagc

SEQ ID NO: 509799 - DNA, 120 bp, Homo sapiens
tgtccctttccttcctggcgctttcctgggttgcttctggcggccatggtgttgctgctgtactccttctccggttatgaagacagtatggagtttccagaccatagtagacatttgcta

SEQ ID NO: 509800 - DNA, 77 bp, Homo sapiens
agaaagaccacttaagcaaacttaatataccagacactgcaactgatattgatgatgttaagaagttcaaaccgggt

SEQ ID NO: 509801 - DNA, 98 bp, Homo sapiens
gggaccctgcggctccgatcccggggccccgccacggtggaggatctgagaaggccagctggttgggggaacagccccagttctggtcgaagacgcag

SEQ ID NO: 509802 - DNA, 80 bp, Homo sapiens
ctgaggtccgcggcagggtcccgcatggcggcgcacaggaagcacggattctgtttcactgaggccatctatccgatttc

SEQ ID NO: 509803 - DNA, 75 bp, Homo sapiens
gaaaagctaccccccaaagtcctggagctgtgcgaggatgccatgaggaaagctggtgtggcacacagtaaatcc

SEQ ID NO: 509804 - DNA, 97 bp, Homo sapiens
cattccagaggaaaaccaccaagaagcatcaagtgtacctgatttgtgaacctatcttgcttcagttggtttcctcctaaatattaggcagatggga

SEQ ID NO: 509805 - DNA, 98 bp, Homo sapiens
tgattagcttcgcagtctggaaagctttaggagttcacagtgccttttcagatattaatggcaaagttcagaccattgttttgacatctggtacatta

SEQ ID NO: 509806 - DNA, 90 bp, Homo sapiens
ggtgtggacgccactacagttcatcaacatcaactacgtccctctgaaggtcaatgtgacggtggactacattagaccagccagcccagc

SEQ ID NO: 509807 - DNA, 98 bp, Homo sapiens
aatgtgtggaatattggggggctcggctgcagacttggccaaatggacgggactattaaggtgtatttacaggagacagcaatggaaacctggtcagt

SEQ ID NO: 509808 - DNA, 98 bp, Homo sapiens
tttgtatggggcaagaacatccgagggtgcctgggaatcggtcgcctggaggaccagtatttcccatggaggaactgtcagaccttcagcagcctcag

SEQ ID NO: 509809 - DNA, 82 bp, Homo sapiens
ctaaagcagcgtgcgttcagccctgggaaaacctcggatcaattctcagctggtggcacaacaagtggcacaacagtatgcc

SEQ ID NO: 509810 - DNA, 75 bp, Homo sapiens
gacctgaactcttcagataatcagagtggaggaagtacagccagcagatagctgtgcccctctgctccgatacct

SEQ ID NO: 509811 - DNA, 100 bp, Homo sapiens
ggacacgacggcgtcggcgagaggacagctaccatgtccgttctcgaagaggtatgaaggttattgaaaaccgggccttaaaagatgaagaaaagatgga

SEQ ID NO: 509812 - DNA, 75 bp, Homo sapiens
cgaggtggagggcaccaggaccaggcccgggatgacgcccccgtgtcagctcaagtaatgtcgtcttgaagacgg

SEQ ID NO: 509813 - DNA, 75 bp, Homo sapiens
gtaacccagcctgtttcacttcttgagcttatgagcaagctggaatgatgttgaaggtcagtaatgttatgtcac

SEQ ID NO: 509814 - DNA, 116 bp, Homo sapiens
aagatccatggttattagagaaagagaaaggatttctaagcaggaactccccaggtatctgctgtgcgtttcagtcaacaatacagcttgtgttcgacaatattccttgatgacag

SEQ ID NO: 509815 - DNA, 101 bp, Homo sapiens
ccccggccccgcgcctggacgacgccgccgcctcctggttcgggcgggctgacgcacgaggcacacaggaaggaggtggagcaggtgtatctgcgctgtgc

SEQ ID NO: 509816 - DNA, 100 bp, Homo sapiens
gttcacacataccctcttcttgccaccagtgttccttgcctgtatctccccttggttcaatagctaccagatttttggaagaggaggaactgaggtctca

SEQ ID NO: 509817 - DNA, 100 bp, Homo sapiens
gctaaggacctcaacccaggagttaaaaagatgttccatttaagcagacctcttccatagctgtagctggagcggtaattggagctgttcttgccctttt

SEQ ID NO: 509818 - DNA, 100 bp, Homo sapiens
gcacagccgcggcggcagcagcagtgagagaaatcttcccaaggctgcagacaccgacggatttgctttgggagccagagtagctgccgccaccagagtc

SEQ ID NO: 509819 - DNA, 82 bp, Homo sapiens
ggagcgaggaacagaagaagaagaaccggaagaaactgtccgagaagcccaaaagacagagtctcactctgttgccaggctg

SEQ ID NO: 509820 - DNA, 100 bp, Homo sapiens
cgtggacagcctcatcacccggctgctggaggatttcttcgcaagactatggaaaggaagtggacctctacgctttggggctaattcttgctgaacttct

SEQ ID NO: 509821 - DNA, 82 bp, Homo sapiens
ttaaagtctctcttcaccctgccgtcatgtctaagtcagagcaatttcctgatcaaattgtaggatttgttcctagaaagca

SEQ ID NO: 509822 - DNA, 50 bp, Homo sapiens
ctgcaggcacagttgccgattacagggggaaatttgcagtggtgagaaaa

SEQ ID NO: 509823 - DNA, 83 bp, Homo sapiens
gagcctgcagccggccctgccggtgaaggtgtggttccagaaccggaggacaaagtacaaacggcagaagctggaggaggaag

SEQ ID NO: 509824 - DNA, 76 bp, Homo sapiens
tggccctgccctgcaaactcaccatcccacagagaggtctggatattgagagcagcttgaagcagttggctgagcg

SEQ ID NO: 509825 - DNA, 75 bp, Homo sapiens
ttctatcattccaaactttcagatctctcaagattcagtagggaacagcacaagtgcatacaccttgatagcacc

SEQ ID NO: 509826 - DNA, 100 bp, Homo sapiens
gttttccctgatcaagtaagacagaccctaagctggagccaagtggctgcttctggactgcgctctgtcttccgagctggaggagggaatgatattcagt

SEQ ID NO: 509827 - DNA, 78 bp, Homo sapiens
ggcggagaccctcgaagtgcgcaaacttgacactcaccctgaccgggctccatgaagaaggagttcccgcagaacctg

SEQ ID NO: 509828 - DNA, 100 bp, Homo sapiens
ggtccattctcctcgcgctgcaaggatgctcctgggatttcggagaggccgcaggagtcatttcgaagaaggtagataatgactataatgcccttcgaga

SEQ ID NO: 509829 - DNA, 100 bp, Homo sapiens
gcctgcgctatgccctgctgtagtcacaggagctgtagagaggaccccggtacatctgaaagccgggaaatgggattggagtttggaatcctgccttcga

SEQ ID NO: 509830 - DNA, 75 bp, Homo sapiens
cgaacatcttctggacctttgtccagtttgcctatctggggcgcctggctcacgaggttggctggaagtaccagg

SEQ ID NO: 509831 - DNA, 101 bp, Homo sapiens
tgtttaatcagtgcaagcgaaattaagggaaaatggatgtagaaaatgagcagatactgaatgtaaaccctgcaggtgcaggccctagcaggtgcaggtgg

SEQ ID NO: 509832 - DNA, 75 bp, Homo sapiens
caagaagccagtcaagcggccaggacttctgcacggacctggccgtctccagtgccaacttcattcccacggtca

SEQ ID NO: 509833 - DNA, 73 bp, Homo sapiens
cgaacgcggagagcacgccatgaaggcctcgggcacggcctgtaggagctgtccaggccatctccaaccatgg

SEQ ID NO: 509834 - DNA, 100 bp, Homo sapiens
cgtggagtgacggtcacaccgcggcggttggatttggtctagggagtcccagaaagaagtagaaaaagagagagaagcctaccgtcggagaactgctgct

SEQ ID NO: 509835 - DNA, 100 bp, Homo sapiens
ccaagacgctgcggccaagcagaaagttgaacagaacgcggctcccagccacaccaagttcaggaaactcattatctgcaatattagagggagaagcacg

SEQ ID NO: 509836 - DNA, 88 bp, Homo sapiens
aacccgacgaggaacgaatgggacaagatcccgtccatgaatcaggttaaacactttaagatgagaaaaattgatctctgtctgagct

SEQ ID NO: 509837 - DNA, 75 bp, Homo sapiens
aaagtattgtaacagctgaagtgtcttcaatgcctgcttgtacgagtggctgctttacagaatctggtgaagata

SEQ ID NO: 509838 - DNA, 76 bp, Homo sapiens
gaaaagttcagatgatgggtccttgaactgtgtatctatttcatagggtgttaacggagcctgtgtccaagtggag

SEQ ID NO: 509839 - DNA, 98 bp, Homo sapiens
tacatcaaggcctggccaccagcagatgataaagccccagtgaccgatacaaatattccatcgcatctggaacagatgttagatatactggttcaaga

SEQ ID NO: 509840 - DNA, 100 bp, Homo sapiens
ggaatcatggcggctgcgctgttcgtgctgctgggattcgcgctgctgggcacccacggagcctccggggctggtacggacattgctgcaggagaagagg

SEQ ID NO: 509841 - DNA, 100 bp, Homo sapiens
cgtcggactggtctgtctgagggagatggtgacaagctcaaggcctgcgagacagcccacctgaggatattgaccataaggactcatatctcattacaag

SEQ ID NO: 509842 - DNA, 100 bp, Homo sapiens
gcccttggacgcatccgactcacccgccccttggtatcggccgccccaggttgtttgatgtgtgcacagtgtcacgaacagacagagaaaccaaactaac

SEQ ID NO: 509843 - DNA, 100 bp, Homo sapiens
ctatatcagagaatgagttaatctcctcagaaatcactaaatactactctgaggggcttagaaattaacagggtccatgaaagacctcctcctccttctc

SEQ ID NO: 509844 - DNA, 102 bp, Homo sapiens
ggaggcaggctgggcggtggcggccgagactggcgggggtggacgcccgggccgggctgcgcccgcttcttgcaggtggaagttgatgggtcgaaactaaat

SEQ ID NO: 509845 - DNA, 96 bp, Homo sapiens
cactgaccatctgcctacctcccgttaatggaaccgcgactcacagcatcaacaacagcaacttgtgattggcggtgaccggatattcagttgcac

SEQ ID NO: 509846 - DNA, 75 bp, Homo sapiens
gattacctctcagtagccatgctcatgatcggcgtgtttggatgtactttacagctgccactgcagagccccgcc

SEQ ID NO: 509847 - DNA, 74 bp, Homo sapiens
ttcagacccatttccagtcatgagccaaatttgagtccctctttaggacgtatgacaaggacatcacctttcag

SEQ ID NO: 509848 - DNA, 90 bp, Homo sapiens
cattcctgcagatgaaaaagtgtgacttggcagctgtccaacctaaggtgactgtatatccttcaaagacccagcccctgcagcaccaca

SEQ ID NO: 509849 - DNA, 75 bp, Homo sapiens
tcagcgccgcctccctgcttcttaacaggttacttcctcagaatgttggcctcctgtatgttggaggttatgaaa

SEQ ID NO: 509850 - DNA, 100 bp, Homo sapiens
gtcagtgaaaagcagtacaccatctacatcgcacctggaggcggggcgttcacgtctctagtgatccctgaaaagttccagcatattttgcgagtactca

SEQ ID NO: 509851 - DNA, 82 bp, Homo sapiens
cgcactcctctgggtcctcgaggctaaagaacgtgccaatggaatggagcttgatgggcgtaggatcagagttgatttctct

SEQ ID NO: 509852 - DNA, 99 bp, Homo sapiens
ttatggctgcggtccagaacccggccctcaccgccctcaccacccctatccagacggctgcccttcaagtaccagagctcttgtccctggcaaagcgaa

SEQ ID NO: 509853 - DNA, 100 bp, Homo sapiens
cttgaaatgaaaggagattccaacctacttcaggaatctacagaagttttaaaagctcagtcagcagggacagtcagaagtgctgctccaccccaagaga

SEQ ID NO: 509854 - DNA, 100 bp, Homo sapiens
ggctgagcaccgtctcccagtacgaccgggacaagtactggaaccgctttcgagacggctgatcccttatccaacatggttctaaccttcagtactaaag

SEQ ID NO: 509855 - DNA, 90 bp, Homo sapiens
ccgagtgcctcaacgcctccctcctggggggtgtcctccgcaggctgtccatctctgccgtggtgatgtcctatctgcagaatcctcagc

SEQ ID NO: 509856 - DNA, 55 bp, Homo sapiens
gagcctctttataagatcctcgcccaggactatacaggctccaacccaagttcca

SEQ ID NO: 509857 - DNA, 83 bp, Homo sapiens
gtgatgtttttgacatagatgatgcaaagtttcagctcctggcatcagctctattcaaatctggttcagattttacagctctg

SEQ ID NO: 509858 - DNA, 100 bp, Homo sapiens
ttttcctcttgatcgggaactcctgcttctccttgcctcgaaatggaccccaactgctcctgctcgcctggggatccagttcttaatagagaacgacctc

SEQ ID NO: 509859 - DNA, 100 bp, Homo sapiens
aagaaaagggaaaacttgctgcggttgctcaagggttattttggagctgttggagcactccttgagctgttgaagatcccgtgatcattacctggggagg

SEQ ID NO: 509860 - DNA, 75 bp, Homo sapiens
agagaacttgccggtgccagctgagagtgaattactggaactgaaacggcagcagcaagagcaagaaagagccaa

SEQ ID NO: 509861 - DNA, 100 bp, Homo sapiens
cgccagccatgttccagaccgcttggcgccagcaatggctgccatccggaagaaactggtgattgttggtgatggagcctgtggaaagacatgcttgctc

SEQ ID NO: 509862 - DNA, 101 bp, Homo sapiens
gaatatttttagagagatactgtttcagacttcacagagaatgcagttgtcttgacttcaggtctgtctgttctgttggcaagtaaatgcagtactgttct

SEQ ID NO: 509863 - DNA, 74 bp, Homo sapiens
cagggaaggagggcgtccgagtcaacaaccgcttcgagctgaaaactttagaaactgttcctttggagaggaaa

SEQ ID NO: 509864 - DNA, 83 bp, Homo sapiens
agccagtccagaccctgctgctgtcttcaaagaagttgagaagctgatgtctcctcgacttccaactggaaccttgaaccccc

SEQ ID NO: 509865 - DNA, 100 bp, Homo sapiens
gggtcatccgtctcttcctccctacccagcatccctgggggaaagccagcaaaatatgctgtgaattccatcaagaagaaagtcaacgacaagaacccac

SEQ ID NO: 509866 - DNA, 100 bp, Homo sapiens
agtgctaaagaagcaggatgcattctacaaagaacagctggctagactggaggagaggaagaagctcattcacacagaagacccatttaatgatgaacat

SEQ ID NO: 509867 - DNA, 74 bp, Homo sapiens
acttccaggtgcacagcgcgggagccgtcacggtgctcaagaatccagggcctgaaaacccagaatgaacttgt

SEQ ID NO: 509868 - DNA, 98 bp, Homo sapiens
ggctctgaaagaatacatcaagattctgaatctggtgatgaacttagcagcagctccactgaacagataaggcatcctgaggttagcattacacttct

SEQ ID NO: 509869 - DNA, 75 bp, Homo sapiens
ccagaagaggatcgacgcctatgtcgacgagcaggagctccagaaagctgtggaccaccgcaaagccatcatcct

SEQ ID NO: 509870 - DNA, 82 bp, Homo sapiens
tgaagtccaatatgaatgtgtcccttacaagtaaacccactttttccagggcaactgcccttgacaatgtcgtgtaagttgc

SEQ ID NO: 509871 - DNA, 108 bp, Homo sapiens
gaggctggctgctgaaggatgaacggagaggaagaattctttgatgccgtcacagacaatgcagatcttcgtgaagactctgactggtaagaccatcaccctcgaggt

SEQ ID NO: 509872 - DNA, 100 bp, Homo sapiens
gatgcgccgcgccagctcctactcctccctcaactccctcatcggctcacagaacatttcctgcctgttgctcacactctgttgtccacagcatacccgc

SEQ ID NO: 509873 - DNA, 100 bp, Homo sapiens
ggaggaggggaggagggccactgggctcccagcagcccaggttcaggaatccctttgcccacgtccagctgaagccgacagtgaccaacgacaggtctgc

SEQ ID NO: 509874 - DNA, 51 bp, Homo sapiens
atcttatcagacgaaggcaaaatgtatgctgttcatgccaagagcctggtg

SEQ ID NO: 509875 - DNA, 75 bp, Homo sapiens
ctcacaaagcatccatattgcactgcttgggcagagtgctgagtctgttcgagagacgagttgtactgctgtcac

SEQ ID NO: 509876 - DNA, 98 bp, Homo sapiens
gggaaccaagcgtttaatgaagacaatctcaaattcatcctcatggactgcatggtttcagcaacatttgctgcaagtttagtcaccagtcctgcaat

SEQ ID NO: 509877 - DNA, 100 bp, Homo sapiens
agcgaacctcgagaccaacgtggaggagctgtgggtggaagatgacagtcatgtccctttccagggacctcaaggacgactttcacagtgacacggtact

SEQ ID NO: 509878 - DNA, 75 bp, Homo sapiens
gcaaggtgatcttgagagtgacaggattatggctgctgttcctcaaaataatctacaggagcaactagaacgtca

SEQ ID NO: 509879 - DNA, 126 bp, Homo sapiens
tctgaaaggcactttattatgcaggtggtctgtgaagccacacagtgtccagatacgagggtggggtggaagacaacccgtgagtattacaccttcatgtgggttactttgcccattgacctaaac

SEQ ID NO: 509880 - DNA, 75 bp, Homo sapiens
tctttctggcctggaggctatccagccatcaggacagaaaggtgtccaagtacctgtatcacagccgcctacgcc

SEQ ID NO: 509881 - DNA, 90 bp, Homo sapiens
ggctcctctccgtcagtgcggtttcgcctttatggtggtggagtctgcccaggctgtgcattctgtgtctggctgactctgccgggagct

SEQ ID NO: 509882 - DNA, 89 bp, Homo sapiens
aatcaagtcacctgacacatttgtgagaactatttatgcaggatcctttgaggttgccttccctgatgctgcggagaaaatgaagaagg

SEQ ID NO: 509883 - DNA, 74 bp, Homo sapiens
gggccccgatggccccgaccgcgtgctggagctcttcgacccacccaagatttggagcaagaggtggtggtggc

SEQ ID NO: 509884 - DNA, 78 bp, Homo sapiens
cggatggcaacctgctccagcgatcagagcgttaagccagcagtatctgttggaaatgttggccagcttgcaatggat

SEQ ID NO: 509885 - DNA, 50 bp, Homo sapiens
ctttgccattgtgtattacctcattcaaactgcctgtggaggaaccgatt

SEQ ID NO: 509886 - DNA, 75 bp, Homo sapiens
ggcggcggctgtagcggcgtgacaggtggaagttgatgggtcgaaactaaatgtgaccagcacgtggaacctggc

SEQ ID NO: 509887 - DNA, 51 bp, Homo sapiens
ttcagcctcttcatcctcaaacagaacacttcagttatggaagatcaaaat

SEQ ID NO: 509888 - DNA, 90 bp, Homo sapiens
ccatctgccttctgcataggccaaacaggacaatataaggcttcaagattgctcagcactatgtgaagaggaagaagatgaagatgaagg

SEQ ID NO: 509889 - DNA, 75 bp, Homo sapiens
gccaaggaaaaactggagagcttcatcaaaaatagtgatagctttgataactctaagcgaaagacatgaggcctc

SEQ ID NO: 509890 - DNA, 100 bp, Homo sapiens
ataattctgaaagaaagaaaacaaagaaaaacatactccagaattcctaatagaacagatttgcagatttacagaatggctgcacattaatggaaagaga

SEQ ID NO: 509891 - DNA, 83 bp, Homo sapiens
cagattttgaccaagcattttgtaagatctattccagaggggagcttcaccacttcattgacggctttaatgaagagaaaagc

SEQ ID NO: 509892 - DNA, 98 bp, Homo sapiens
agatttcattactgtcttcagaaaactcatgatgatcctggccatgaatgaaaagcttaattggcttagtgtcgacttcaataattggaaagactggg

SEQ ID NO: 509893 - DNA, 100 bp, Homo sapiens
tggaggttcataaggataagacattaaaggaagcagtagaaatggcttataagacttttcccaggtccctcgtatcaaaacattaagagtataatggaag

SEQ ID NO: 509894 - DNA, 75 bp, Homo sapiens
ctggaatttgcgttttatgtcattgaacaggagccaaggcaaagagggaccactgtgctcatggacccatcgctg

SEQ ID NO: 509895 - DNA, 50 bp, Homo sapiens
gtgcatcaaaggtgtgaacacagctgtcggaaaaggtaacagaagatgga

SEQ ID NO: 509896 - DNA, 101 bp, Homo sapiens
ttaaagagaggatagaaattgaacagaactatgcgaaacaattgagaatctgtcactgcgaaggggatgaagagagccccctcatcacaccctgtcgctgc

SEQ ID NO: 509897 - DNA, 111 bp, Homo sapiens
ttccacaagggctcttacctgcggaacggctggaacgtcatggacttcgtggtcgtcctcacaggagacacctatggctgccgatgaaggctcagcagagaaacaggcagg

SEQ ID NO: 509898 - DNA, 100 bp, Homo sapiens
tgttaagcagattacttccatcagtattgagccaggagttgaggaatgcagcgaggaagaggatggctacagcagtgaggaggcagagaatgaggaagat

SEQ ID NO: 509899 - DNA, 83 bp, Homo sapiens
gttcttccgaagatcctaatgaggacattgtggagagaaacatccgaattatcttccagtgtgctaggtctacctctaaaagg

SEQ ID NO: 509900 - DNA, 98 bp, Homo sapiens
tatcagccttcggctcatcatatcagagctgaggaatcaatatattggagaaagtttgaatattggtgttgtacaaactgcatatgcaaatggaagtt

SEQ ID NO: 509901 - DNA, 75 bp, Homo sapiens
gcggcagccgccaccatggccctgcagaacttcttggtatacatgaacaagcagcagtaggatttttaacactaa

SEQ ID NO: 509902 - DNA, 75 bp, Homo sapiens
atgggctaataatgctggcaaagtggaaaaatgtgcggtggtatggcaggacttcagtcaatgatgaggcagttt

SEQ ID NO: 509903 - DNA, 100 bp, Homo sapiens
ggcaggagcgggtagtgccagctacggtccgcggctggggttccctcctccgtttctgtatccccacgaggatgagagggccttaccaaaaggagatttc

SEQ ID NO: 509904 - DNA, 76 bp, Homo sapiens
cagcgcctctaccacctgggcctccccagccacggctggtgtgtgacagctctgtgctgctgtgcctcaagaagag

SEQ ID NO: 509905 - DNA, 99 bp, Homo sapiens
cggacacttcaggctatggccagagcagctattcttcttatggccagagccagaacagacggaaccgctggactccaggttccttgcctgggagtagga

SEQ ID NO: 509906 - DNA, 82 bp, Homo sapiens
caacagccaccaccaccaccagatggagcatcagatccatgctgctgctgactcggagccccacagcttggcacaggctctc

SEQ ID NO: 509907 - DNA, 90 bp, Homo sapiens
gaggaaaattggcaaatctgttactgcagacagatgggaaaaatatttgatcaagatctgggacatgagcgatgatgagaccatctgaga

SEQ ID NO: 509908 - DNA, 95 bp, Homo sapiens
gacgaccctgagggtgccttcgttccccccgagttcgacgtgaccgggaacacctttgaggttagcatggcctcattgaaagaactagatcaaag

SEQ ID NO: 509909 - DNA, 137 bp, Homo sapiens
tggagaccacccacctcttcctcaaaatgttggagcgattctgtcggagccgtgggaacctggtggtgcagattgactggggcgactttggggtagaggcagtgtctgaggggactgactctggcatctctgccgag

SEQ ID NO: 509910 - DNA, 95 bp, Homo sapiens
gcatcatagttgtgtatgatgtgacagatcagattcctgacattcagacaactgacttgtaactgacttataactgacttgtaatacactgctac

SEQ ID NO: 509911 - DNA, 73 bp, Homo sapiens
gagaatcatttctgggagaatgccgaagactgcatttcaacttcaagaatgattgaacaggaagtatcactgg

SEQ ID NO: 509912 - DNA, 90 bp, Homo sapiens
agagcgtgaccgagagcgcgaatatcgtcatcgttagaagaacacagaccaccagtgcaaaacaagaaaaagcaccaagtaaaaagccag

SEQ ID NO: 509913 - DNA, 75 bp, Homo sapiens
cctctgaagtgaacactgcagggccatttggtaacttgggtttttactcctgtaacaactgaaataacaagtctt

SEQ ID NO: 509914 - DNA, 75 bp, Homo sapiens
cctcctccaccgagtcgtgctctcgccccaacccgcgcgccagggcagctgcaatgactctccgcacggtattat

SEQ ID NO: 509915 - DNA, 102 bp, Homo sapiens
ggacatggagatcgatgggcagaagctgcgagacgccttcacctggaacatgaatggagccaaaaacctgtatatcatctccgtgaaggggatcaagggacg

SEQ ID NO: 509916 - DNA, 104 bp, Homo sapiens
gtcgactacaagaagagggcggagcggagacgggagtattatgaaaagatcgcctccggtgtggctgtctctgatggtgtcatcaaggtgttcaacgacatgaa

SEQ ID NO: 509917 - DNA, 100 bp, Homo sapiens
tggacatgagccccctgaggccccagaactatcttttcgaaactggcgatggaatatgagaggagccctctggaaagaaaaggacagaccctgtgctttc

SEQ ID NO: 509918 - DNA, 90 bp, Homo sapiens
gttctgctcgctcgctccccgctctggaatctttgaacaggtactaagtgaactggagcccctatgtctggcagaacaggacttcataag

SEQ ID NO: 509919 - DNA, 75 bp, Homo sapiens
gcaaattaaagcaattatgaaagaagtcattccttttttgaaggcagttgtgaaaaacttcaggacaaaaatgtt

SEQ ID NO: 509920 - DNA, 75 bp, Homo sapiens
tgatctccatgtcctgttgtggggcttttacagcctttgggccaaacgtaccaagaaagtcgggatcgtcggtaa

SEQ ID NO: 509921 - DNA, 83 bp, Homo sapiens
ccagagttggagccaattaaaccagcaagacactaagggcgactaccagaaagcgctgctgtacctgtgtggtggagatgact

SEQ ID NO: 509922 - DNA, 100 bp, Homo sapiens
gcagggagaaggaagaggtgtttgaaaagatgtcatctgggtgattctcagtgtggaggtgggtggacttttaggagtaacgcagcagctgtcatctttt

SEQ ID NO: 509923 - DNA, 75 bp, Homo sapiens
tggaggccaggtttactggagtaggtgttagtaagatgcgtctgttactagagtggagagtctaccttcgtctca

SEQ ID NO: 509924 - DNA, 95 bp, Homo sapiens
gttaatattgatccccagacagctgaacttaatcatctaaagcaacagttattaccccattcaagttgacaactgaggcaacgcagactccagtc

SEQ ID NO: 509925 - DNA, 100 bp, Homo sapiens
gcagatgttgttgaagataaagacaaggtcctctcctggaagcttgtgcctgacaattaccccccaggtgaccagccgcctccaccctcttacatttatg

SEQ ID NO: 509926 - DNA, 75 bp, Homo sapiens
ccggggcgccgggagctattgggacctgcgggcagcaaagcacctgctctgagtggccatggggaagcgatactt

SEQ ID NO: 509927 - DNA, 96 bp, Homo sapiens
gtttctggaagttataacgctacacgaagaactaagaatattattagcacaagagcaccatactttgaggatgggaaagggctccttcaagtatgc

SEQ ID NO: 509928 - DNA, 100 bp, Homo sapiens
cgctggacaagcacgagggcgcgctcgagacgctcctgagatttgcttgtaaatgcatcacgaagaggcagcccagaatgaagaaagcaagcaggagtgt

SEQ ID NO: 509929 - DNA, 100 bp, Homo sapiens
caaacagatatccagatgctaaaatggacccaatgaacatctgggatgacatcatcacaaatcgacatgcggctcatgcagggggatgagatatgcctgc

SEQ ID NO: 509930 - DNA, 75 bp, Homo sapiens
gggcactgtgcttgtgttcctgggcttacctatttctactccatgtaccaccataaacaaagtttgtgcttcagg

SEQ ID NO: 509931 - DNA, 83 bp, Homo sapiens
tgaccacggcgactggacttacgaggagcagtttaagcagatctgcgagtgaagagggacgagggaaaagaaacaaagccaca

SEQ ID NO: 509932 - DNA, 82 bp, Homo sapiens
cccctgagcagcctggcctgccatgtccgggagaagacacaagagtgagccatggagctacgtgtggggaacaagtaccgcc

SEQ ID NO: 509933 - DNA, 100 bp, Homo sapiens
ccagatgctcttggctcaaggactcatactacactttcttggtagagggagtgatgatgaatacagtgatgatgatgacatgagttggaaagtgagacgt

SEQ ID NO: 509934 - DNA, 100 bp, Homo sapiens
cgttcaagattcaacttcacccgtaacccaccgccatggccgaggaagggctatgattaaaagtttcatggatgtctaccagcttgcaagcactagaatc

SEQ ID NO: 509935 - DNA, 100 bp, Homo sapiens
tatcccaaggactaatctgatcgggtcttccttcatagagacaagagagacacctccaacttcgacaaagagttcaccagacagcctgtggaactgaccc

SEQ ID NO: 509936 - DNA, 75 bp, Homo sapiens
gccttgggtttctttcttaaaggactgatttttagaactccacatttgagaagcatcaagtgtacctgatttgtg

SEQ ID NO: 509937 - DNA, 83 bp, Homo sapiens
cgccggccagcagaagtggggctgaccctgtgaccagtgtggggaaaagtcaggatggctaaaggtgaccccaagaaaccaaa

SEQ ID NO: 509938 - DNA, 100 bp, Homo sapiens
tttaaccatgagggaaatcgtgcacatccaggctggtcagtgtggcaaccagatcggtgccaaggtggttatcactaggctaaaactggacaaagaccgc

SEQ ID NO: 509939 - DNA, 98 bp, Homo sapiens
aacaagatgacggataagctcaaaacccatgtaagtaacttagcacttgtaaagcctgaaaaaactaaagcagtagagaattaccttatacagatggc

SEQ ID NO: 509940 - DNA, 87 bp, Homo sapiens
ctgctggctgcacccgcctccgcgctcgtcagcaagagtgagccatggagctacgtgtggggaacaagtaccgcctgggacggaaga

SEQ ID NO: 509941 - DNA, 100 bp, Homo sapiens
tcttcacttgaaataccggatgattttggaggattggtagcttatgtcgatcttgatgaaagagcaattgatgctctcagggaatttaatgaagaaggag

SEQ ID NO: 509942 - DNA, 142 bp, Homo sapiens
ggaagacgaaggcaattcaggcccagaaactgcggaactcggccaagggaaaggtgcccaagtcggcactggaacctgcacttgttgccaagtcttccatcttactagatgtgaaaccttgggatgatgagacagatatggc

SEQ ID NO: 509943 - DNA, 50 bp, Homo sapiens
ggaatgtgctttagaagttaaaaaggagttcaaagaaggacgcagagcca

SEQ ID NO: 509944 - DNA, 50 bp, Homo sapiens
cagttacactgcttgtagctcttaaggtctacagtgaatatagagccagt

SEQ ID NO: 509945 - DNA, 100 bp, Homo sapiens
tttagatttagtattttacccaaggataaaattcaggatttcttaaaggatagccaattgcagtttgaggctgatgctgggcagttttatgctaaatata

SEQ ID NO: 509946 - DNA, 90 bp, Homo sapiens
ttccagacccatgtaaaggagaattgcctgcactatgcccgcaaggtgggctacaggagagattaaacagattctagaaaatgaacttca

SEQ ID NO: 509947 - DNA, 50 bp, Homo sapiens
tgtcaccaagaaagaccttgaaaatttagagtcttgctgtgtcacccagg

SEQ ID NO: 509948 - DNA, 75 bp, Homo sapiens
atatcctcagatcccacagtgttcttagatcgccttgcagtgatatttagtgccggtggtggtgtgcacattgag

SEQ ID NO: 509949 - DNA, 100 bp, Homo sapiens
cgggtctggagtgcgtgggggaccggctgttggcgggtgtcatggagaaactccagctgggcccagagattctgcagcgggaaaatccaaggcttattta

SEQ ID NO: 509950 - DNA, 75 bp, Homo sapiens
gacttctccccttgtggaattacaagagatttcgactgtggaaggtggcatttttctgaagttgttcattaagac

SEQ ID NO: 509951 - DNA, 99 bp, Homo sapiens
cagatcctggtcctcgatccgcccacagacctcaaattcaaaggtcaagagcaatctgaatccaaatgcaaaggagtttgttcctggggtgaagtacgg

SEQ ID NO: 509952 - DNA, 75 bp, Homo sapiens
caaagactggatggtatgggctgtctggagtttgatgaggagcgagcccagggtcctaaaaaggtggggacgctg

SEQ ID NO: 509953 - DNA, 100 bp, Homo sapiens
ccatttaccggcgctacagcaagttttttgacctccagggacaagaatccttcaagaaacaggaaaaaactcctaaaacaccaaaaggacctagttctgt

SEQ ID NO: 509954 - DNA, 102 bp, Homo sapiens
tgctgctcccgccctttcgctcctcggccgcgcaatgggcacccgcgacgacgagtacgactacctctttaaagatgcttttgataaagagtacaagatggc

SEQ ID NO: 509955 - DNA, 100 bp, Homo sapiens
aaatctcagaaggctcagggactaagaaacaagccttgtatagatgaacaggaagcggtgcaggaggttcctagagttgttcagaatcctccaaaaccag

SEQ ID NO: 509956 - DNA, 96 bp, Homo sapiens
aacactttagtacagtcgccaactgatgtctacagggtcttactacatattgcaacagaagataatattggaggtgaagagggtaacatgaagttt

SEQ ID NO: 509957 - DNA, 75 bp, Homo sapiens
taaggattccaagtaactcttatttggtgaatctggattgggaaagtcgacattaatcaactcattattcctcac

SEQ ID NO: 509958 - DNA, 80 bp, Homo sapiens
acctacgcattggatcctcaaagaactgcaagaagtctatgtgccccaggatcctggattacctgaggaagaagagatca

SEQ ID NO: 509959 - DNA, 101 bp, Homo sapiens
gtgtggctgcgcgcgccgggagagatgctgaggtcgacgtgttgatgcccaatgttggtgagattgtgggaggctcaatgcgtatctttgatagtgaagaa

SEQ ID NO: 509960 - DNA, 100 bp, Homo sapiens
atgatccgccacgggaaggagctgggcggcgagtccaactttggatcaggagcgtctgggcaagcagctcaagttacgtgcagaaagggaagaaaaggag

SEQ ID NO: 509961 - DNA, 100 bp, Homo sapiens
ctggactctagggaccctgctgaatagctggggctacaggcgtgtgtcactgcgcccagattctggacaatcaggaagtccaagccacaatgatcctgcc

SEQ ID NO: 509962 - DNA, 99 bp, Homo sapiens
aaacaaatagaaaaactggaacaggaacttaaaagatatttattgatagagatccagcagcatttgcacccattttaaattttcttcggacaaaagaac

SEQ ID NO: 509963 - DNA, 75 bp, Homo sapiens
caaggtcaagcttctgcgctcccttcctcagcgtttcaagatcacttcagcatcggtgaggttggtctctcaaga

SEQ ID NO: 509964 - DNA, 88 bp, Homo sapiens
ggaaaccccggaactagaactggtgacctcagcagccatgtcgaagccccatagtgaagccgggactgccttcattcagacccagcag

SEQ ID NO: 509965 - DNA, 75 bp, Homo sapiens
tgttcgagaacgaccccgagacgggacctcaggatggaaaccagcagcctgcaccgcccgagaaggtcggctggg

SEQ ID NO: 509966 - DNA, 100 bp, Homo sapiens
gggtcccgcggcgagcgagctcctgaggtggacactcactgacctgtcacaaggttgccccacaaaactttggggtccatgtctgaatggattgccagag

SEQ ID NO: 509967 - DNA, 74 bp, Homo sapiens
cgtgtctcgaccgcgtcttctgagtcaggaacttgatgggaaacctgcttctcctactccggttattgtggcct

SEQ ID NO: 509968 - DNA, 50 bp, Homo sapiens
gcccatcccgttctctgatttgcagcagaattcaagccaggaagaagcag

SEQ ID NO: 509969 - DNA, 87 bp, Homo sapiens
gccagccgcaccatgccgctcctaagcctgcacagccgcggcggcagcagcagtgagagaaagaagcttccggttctgaggtcctgg

SEQ ID NO: 509970 - DNA, 83 bp, Homo sapiens
cggccccgccagcagcactgtggaggccgtcctcgtcaggatggctaaaggtgaccccaagaaaccaaagggcaagatgtccg

SEQ ID NO: 509971 - DNA, 100 bp, Homo sapiens
aatttccaaaatggaatagaatgtggtggtgcctatgtgaaactgctttctaaaacaccagaactcaacctgcctagtatcagaaggccaggcgagactg

SEQ ID NO: 509972 - DNA, 100 bp, Homo sapiens
ccatgctccatttgggcattgacacccctacccagaacaacatctttaagctttgtcacccgaaagaaccgccaagtgtgtgccaacccagagaagaaat

SEQ ID NO: 509973 - DNA, 75 bp, Homo sapiens
gttcttaccagtttgtccaagttactggagccctcctctcctcaggaagccagtgaggaggaggatggagcggag

SEQ ID NO: 509974 - DNA, 75 bp, Homo sapiens
ctaacgtgaacgcggaccaggaggagtggattagaacaagatgacatgagaattttatacaaataccttaccacc

SEQ ID NO: 509975 - DNA, 96 bp, Homo sapiens
gccgggagtcgctgggtgcgtggggctgcctcgccgcgtctcgccacgaaatgcctccacggctgtgtacgcctgttgcaaccccatccaggagac

SEQ ID NO: 509976 - DNA, 82 bp, Homo sapiens
gaggactctatacagggacgtgatgctggagaattataggaacctggtctccctgggtctgggaggggctgaacgtggtgaa

SEQ ID NO: 509977 - DNA, 82 bp, Homo sapiens
gtgggcatcttccagaaacgcaagaagtacaacgtgccggtccagtcctgtgccgttttccgtccgcgactcttccggccca

SEQ ID NO: 509978 - DNA, 88 bp, Homo sapiens
cattgtggatgcaaatctgagcgttctcaacttggttattgtaaaaaaaggagagaaaggaaagcgcgaggagccgccgccaccacca

SEQ ID NO: 509979 - DNA, 147 bp, Homo sapiens
ttcacctcgcgtcgcgcccgggaggaaggaacgaggcaaggagctaaagcagcgtgcgttcagccctggggtactccaaagattcaggtttactcacgtcatccagcagagaatggaaagtcaaatttcctgaattgctatgtgtct

SEQ ID NO: 509980 - DNA, 74 bp, Homo sapiens
ccgctacgggaagcaggcctcgccacagatgggccatcaactgagaaagaccttgacgaaaagaagaaagaacc

SEQ ID NO: 509981 - DNA, 100 bp, Homo sapiens
gtgcgcgcctccatctgggccatggatggcatttaaatcaaacggtattgagatggattgggttatgaaacataatggtccaaatgacgctagtgatggg

SEQ ID NO: 509982 - DNA, 83 bp, Homo sapiens
cccgaacgggttgcttcccccgctgcgaggggaacgcccttttgcttgtgactggcagggctgcgacaagaagttcgcccgct

SEQ ID NO: 509983 - DNA, 144 bp, Homo sapiens
atcaaagagcagtgggggttgctgacccagaggagagttctccaaacatgatcgtttactgcaaagctgacaaacgggctcatcataatgcactggaacgaaaacgtagggaccacatcaaagacagctttcacagtttgcggg

SEQ ID NO: 509984 - DNA, 88 bp, Homo sapiens
ggaaatggctgcgagaccctagaggcctgcggcctgcgctcttggagtttgacaaggagttgtctgtctttaaggacagactgtatga

SEQ ID NO: 509985 - DNA, 83 bp, Homo sapiens
gctcagtgacctcctggacttcagcatggtcagcccaaggctgccccctcggtcactctgttcccgccctcctctgaggagct

SEQ ID NO: 509986 - DNA, 97 bp, Homo sapiens
cacgccgatccatgaaaatgctttggaaattgacggataatatcaagtacgaggactgcgaggtcaaaatgcagatcttcgtgaaaacccttaccgg

SEQ ID NO: 509987 - DNA, 90 bp, Homo sapiens
atgtggaactacactggaggacacccgagtactgttaaagcaatcctcatggttcactgctggcctataatacaacctcccacaccgacc

SEQ ID NO: 509988 - DNA, 51 bp, Homo sapiens
ggcgtaggaccctccgagccaggttaagcaatggcctcagttttgcttctg

SEQ ID NO: 509989 - DNA, 75 bp, Homo sapiens
cagccttctatgatccaagaagtctgggatttaagcgagagcctcactggttcccaggacatcaacctgaactgg

SEQ ID NO: 509990 - DNA, 74 bp, Homo sapiens
cgagagggagccgcagctgatgtcagtacggcaagaagaagctgaaatacctgccctacaatcaccagcacgaa

SEQ ID NO: 509991 - DNA, 83 bp, Homo sapiens
tgctgccttgtggggtgactgaggaaccccagcgactcttttatggtcatttcatgggcaacaacacagtgctggatgttttg

SEQ ID NO: 509992 - DNA, 90 bp, Homo sapiens
gtcgtaggaggctgtcctgtctgcaggaattgaatgatctggcacgggaccctccagcacagtgttcagcaggtcctgttggagatgata

SEQ ID NO: 509993 - DNA, 100 bp, Homo sapiens
gggtcaccgtccagagccaaggtccagggggcaaggtcgtggatcctggtgaacatggacgacaacattgtgaagcattactccaatgaggacaccttcc

SEQ ID NO: 509994 - DNA, 74 bp, Homo sapiens
tgtcaccttggctctcccacccaatggagatggctctaatgaatttatccagttggcgaaggactttgaggatt

SEQ ID NO: 509995 - DNA, 75 bp, Homo sapiens
ggcggcccctggagatgattgagccgcgcacgctacagtacaagaccatgctcgacagctgaccaaggccatgat

SEQ ID NO: 509996 - DNA, 75 bp, Homo sapiens
cgagataaagccaccacgtctgacagcaactctggaaagtggcttctaactcggcgcattttcttagtggatgca

SEQ ID NO: 509997 - DNA, 83 bp, Homo sapiens
gtggactccttcggcagtccacccaccgccgccgcctcccaggagatctggaagccctcaaaaaggaaaccattgtgttaaag

SEQ ID NO: 509998 - DNA, 75 bp, Homo sapiens
gtatggttggcatggaattgaatttcatctgtctgtgggaattgtaagcaagtagagacgggggttcaccatgtt

SEQ ID NO: 509999 - DNA, 133 bp, Homo sapiens
gatggagagcaatacatcatcatctttggagaatttagcgacggcgcctgtgaaccagatccaagttgtcacatccattggtgagctggttgaagtgtgttccacgcagatccagtcgggatggagacccttg

SEQ ID NO: 510000 - DNA, 75 bp, Homo sapiens
aaaaacaagctcagggatcccactgattctactttacgcaaacttacttcttaccgtgactgctgcacagccttg

SEQ ID NO: 510001 - DNA, 75 bp, Homo sapiens
gacagagaggcaggcagacttcacagctgagaagtttccagatgaaaaggttatgtggtccgaatcagtggtggg

SEQ ID NO: 510002 - DNA, 50 bp, Homo sapiens
cttggtacattcacaaatacgtacaggatcagttcgacagcttagacaag

SEQ ID NO: 510003 - DNA, 89 bp, Homo sapiens
tcgacgtcgtgatccagaagtccagagctgaggactgcctgtttgcagttgagccccatatgggggttggcaggcagcagagaggcccc

SEQ ID NO: 510004 - DNA, 74 bp, Homo sapiens
aagggagacgacgctgctgggtccgctgagcggggcgacccgagggaaatcgtgatgagaaccagagtataaac

SEQ ID NO: 510005 - DNA, 50 bp, Homo sapiens
gagatcaccaatatccgacctagctttgataatcctgatgtaaaccattg

SEQ ID NO: 510006 - DNA, 74 bp, Homo sapiens
ggtcgccggtactcatcagcctggccgccctgttttccaaagagccagccccagtgcctgctgagccgtttgac

SEQ ID NO: 510007 - DNA, 117 bp, Homo sapiens
cagcaaaaccgggcaatattagaccatcaacagtttgactacataataaggatgatgaattgtactctacagtttggaaattttagcattcaggtgccaggaatgcagatgggacag

SEQ ID NO: 510008 - DNA, 76 bp, Homo sapiens
gcctgcttctgcatcgacagatagccgtcttcagcttgagccccatcactagcagcagccgctcttctaaaacatt

SEQ ID NO: 510009 - DNA, 101 bp, Homo sapiens
cgggcggcacgcacgcggtgcagggtaacatggcggatgcggaaggtgtccttaagtttgctcgcttggtcaagtcctacgaagcccaggatcctgagatc

SEQ ID NO: 510010 - DNA, 98 bp, Homo sapiens
gctgggattcgcgctgctgggcacccacggagcctccggggctgtttgcctgagaatacagatcaacccacagaacaaagcggatttccaaggcatct

SEQ ID NO: 510011 - DNA, 100 bp, Homo sapiens
atggggccctggatgagggggaagggcctcaaagccagaagtactatgacgacacctaccccagtgtcaaggagcaaaaggcctttgagaagaacatttt

SEQ ID NO: 510012 - DNA, 100 bp, Homo sapiens
ccgtcaccctgcctcccctgcgtcccgccaccggccgcttctgtcctcgactcggtgaaatacctggagtgctcagctctcacccagagaggcctgaaaa

SEQ ID NO: 510013 - DNA, 100 bp, Homo sapiens
cccagccagcagttctgtgcctgcagaggctgagctggcaggcgaaggcatctcagttaacacaggcaggatgacgcaaaacacggtgattgtgaatgga

SEQ ID NO: 510014 - DNA, 83 bp, Homo sapiens
gctggtcaccggggcaggcaaaggtccgcgggagagctgtggggcttggtgagtgtttcgtggcctctcgggttggtcagcac

SEQ ID NO: 510015 - DNA, 101 bp, Homo sapiens
caaaaacagagggtgagacagaagtgaagaaagatgaggccggagaaaactattccaagcagaatccagagaccacatttgaagtatatgttgaagtggcc

SEQ ID NO: 510016 - DNA, 100 bp, Homo sapiens
cttcctgcgtggctcgtgatggtcgcctgcagcccgcactccttgaggatcgcgggtattcccctacatctcagccatggtgaacaacggctccctcagc

SEQ ID NO: 510017 - DNA, 82 bp, Homo sapiens
gaccggaagatgcccacggactacatcaggaacggggtgctctacgtcacggagaactgcatcttcctcccgtgaggctggc

SEQ ID NO: 510018 - DNA, 100 bp, Homo sapiens
cactatacgagaatggcctttgaatagagggtcttgctctgttgcccacgctggagtgcagcggcgtgatctctgctcactgcaacctccacctcctagg

SEQ ID NO: 510019 - DNA, 100 bp, Homo sapiens
tttcaagaagcatgcacttctcctcttgcaaagacccatacatcacaggctaaagaattacctccaaagccattgtcaagaccacagcagtcatctgcac

SEQ ID NO: 510020 - DNA, 105 bp, Homo sapiens
cgtcgccgcagccccccaatgcggccgcgagaagcagcgggggggcaggcgatcgaaggtgacttaagagattaaaattaatttggttgctgttggttctgaaca

SEQ ID NO: 510021 - DNA, 51 bp, Homo sapiens
ggcatgagccaggagcccgggccgagatgctgtcccccagcccaggaaagg

SEQ ID NO: 510022 - DNA, 73 bp, Homo sapiens
ggaagtgtctcttagcagcgcgcggagaagaacggggagccaggcaagtatatcgcgtcaacacagcgacctg

SEQ ID NO: 510023 - DNA, 100 bp, Homo sapiens
ggccgccaagatggagaagaaggtgtctaagcgctcgcggaaggaggagggaactctaatgatccaggacaaagaagttaccctggagtatgtatcaagc

SEQ ID NO: 510024 - DNA, 90 bp, Homo sapiens
gtgcaagagtaatatgctatgactgagggcagagcatcaaccccaagttggcgggcctgattgggcggcacgggccccagaacaagcagc

SEQ ID NO: 510025 - DNA, 80 bp, Homo sapiens
tatactccatccaaatatgcagtggaaggtttcaatgacagcttaagcaattctgtggtgttcttggtcacacatttatg

SEQ ID NO: 510026 - DNA, 100 bp, Homo sapiens
gccgcctcgctgtccctgcggcttctggggggagttctgggaaatcgttcattcatttacagatgaacagaaaagactcttcttgcagtttacaacgggc

SEQ ID NO: 510027 - DNA, 98 bp, Homo sapiens
cagcccagaaattacaactgaagatataaaagctgcttttgcaccatttggaagaatatcgcccttaagtggcgtttaagtcccctgactattgtgtc

SEQ ID NO: 510028 - DNA, 75 bp, Homo sapiens
gcatcaggatcgtcttcagctacatattctgccttttcaacactacacagttaagtgggcagaccaacatccacc

SEQ ID NO: 510029 - DNA, 75 bp, Homo sapiens
gccgccagcctcggcaccgtcctttcctttctccctcgcgttaggaccatgaatggcacctacaacacctgtggc

SEQ ID NO: 510030 - DNA, 100 bp, Homo sapiens
cctggcccacgccgctccgaggcctcgcgaccgccgagcctgcagcctgccccgcggccaacatgagcttcttgttgtactccaaagattcaggtttact

SEQ ID NO: 510031 - DNA, 100 bp, Homo sapiens
cctccgcgcgacgtacccgccgccgccgttggctggaggctaaggcagctggataagcacagccaggccacagcccagcagctggtgcagctcctcagca

SEQ ID NO: 510032 - DNA, 102 bp, Homo sapiens
gccagtctttgaagggcttgccttcaagagccctctggcacaaatggaagaagaaagaagggagcaagtagctaaaattaagaagatggagatggagatgga

SEQ ID NO: 510033 - DNA, 74 bp, Homo sapiens
gctgttcccactggctctgctgaccttgtgccttgacagaaacagtctccgccagtcaagaaaccctcaaaagt

SEQ ID NO: 510034 - DNA, 98 bp, Homo sapiens
ggagaaatccccactcctccaagaaccaacccccaaattggctgggacaggtgctgacgtacagaaaggcaaatattgggatactccattacatgctg

SEQ ID NO: 510035 - DNA, 90 bp, Homo sapiens
ggcggcggctcctgccctctcgctttccctctcgcgtctctggctgcaggatggacatgtagaggtggcacgtttgcttttggatagtgg

SEQ ID NO: 510036 - DNA, 75 bp, Homo sapiens
tggtccagatcatttatagtgacaaatgaagatgaagatcctgccaaaggtgatcagagtcgatcagttgacctt

SEQ ID NO: 510037 - DNA, 88 bp, Homo sapiens
tgagggaattgggaggtcggcggccccaaaacagcaacaactccaggcccagcatttatcacatggacatggtctccccgtacctctg

SEQ ID NO: 510038 - DNA, 83 bp, Homo sapiens
cgctgaggggcttgcctgaagcgagggacaatgcagatcttcgtgaagactctgactggtaagaccatcaccctcgaggttga

SEQ ID NO: 510039 - DNA, 74 bp, Homo sapiens
tttgtggatggacttgattctgatgagagtgccggtggtggtgtgcacattgagccccggtatagacagttccc

SEQ ID NO: 510040 - DNA, 75 bp, Homo sapiens
atcttgaaggtttacacttgtcaacttcctcttcagtcatcagtaattgttaagactcgaatcagaaatggagtt

SEQ ID NO: 510041 - DNA, 101 bp, Homo sapiens
tccagtttaggaggaagatgcaagcggtttgggaccttgaacaaggcaaatatggttttgagattctagactttggctacccacagaattccgagacaggc

SEQ ID NO: 510042 - DNA, 75 bp, Homo sapiens
gcaggctcaggtgcagccgctgatgtccagctcgccgctgtccaagaaacgtcgcgtgtccgggcctgatccaaa

SEQ ID NO: 510043 - DNA, 75 bp, Homo sapiens
cagatgtatgctcatcagtattatatgcagtagtcctggatgcctcatcccttagtttcaacaccagattgaaat

SEQ ID NO: 510044 - DNA, 100 bp, Homo sapiens
gaaatggccaaacaagctcgaaatctcatcactgatatttgcacagaacagtgtacccttagtgaccagctgcttcattgagagaatcagaccagcagag

SEQ ID NO: 510045 - DNA, 120 bp, Homo sapiens
gcactttaccctttttaatattggccaatcatcaagacaagccagcagctcgctcagtacaagagataactggagtgccaaggctaaaagacgaaataccaccggaactggtcgaatgag

SEQ ID NO: 510046 - DNA, 76 bp, Homo sapiens
ccagcctcagccacagggacgcctccaaggaactgttcagcagcctcccgcgacgatgcccctcaacgttagcttc

SEQ ID NO: 510047 - DNA, 75 bp, Homo sapiens
actatggcgctgaaacggattaataaggtatccctcgtacttggcccctgaggtaattgcacagggaattttcaa

SEQ ID NO: 510048 - DNA, 83 bp, Homo sapiens
cggacccgggcagcacggagagcctgcaggagaagcccatggagatcgaacaccttccaccatgaccacctcagcaagttccc

SEQ ID NO: 510049 - DNA, 75 bp, Homo sapiens
cacctaccatggcttccccagcctgcaggccctggctggcaaagtgtttcatggatttcaaagctggaggcgcct

SEQ ID NO: 510050 - DNA, 50 bp, Homo sapiens
cagacggctgcgaggcgctgggcacaggtgaaaggaaagcaagccaggat

SEQ ID NO: 510051 - DNA, 82 bp, Homo sapiens
aggggttcatgttaaccaggccaaacaatggatcctgagcttgaaaaaaaactgaaagagaataaaatatctttagagtcgg

SEQ ID NO: 510052 - DNA, 75 bp, Homo sapiens
gcgacaagtacaaccgtgccatcgacagcatccaccagctggccaagtcagaacttcgagcagccattgatcggt

SEQ ID NO: 510053 - DNA, 83 bp, Homo sapiens
ctccaggtccgacccgcgaacccctctgggatccccgccgctctgtctacaacccgagagctccacgcaggagatcggtgagg

SEQ ID NO: 510054 - DNA, 100 bp, Homo sapiens
cagggggtctcagccaagaatcaaggcctcccccagggaagaacttcactatgcctcggtggtgtttgattctaacaccaacaggatagctgctcagagg

SEQ ID NO: 510055 - DNA, 96 bp, Homo sapiens
ccagcttctgctgtccttctttgtggagagcaagattgggaaaatgaggtacgttagtgttcgcgattttaaaggcaaagtgctaattgatattag

SEQ ID NO: 510056 - DNA, 90 bp, Homo sapiens
cagattcgcagtggtcgcttcttctccttggttgcagccccacccacgtcacggtgtacagcgagtatggcgtggacgtctttgatgtgc

SEQ ID NO: 510057 - DNA, 75 bp, Homo sapiens
tttccgatttaaagctgagctgcgaggaaaatggcggcgggaggtgtgttccagagaacaagccttcagacattt

SEQ ID NO: 510058 - DNA, 90 bp, Homo sapiens
cacaagaagaggattggaaccagttccgatacagcacaatgggttcatagtggcgtcatgcacgcagactcctgcaagttcccctaagtt

SEQ ID NO: 510059 - DNA, 102 bp, Homo sapiens
ctttaaacagattatttcagcagatctattcagatggttctgatgaagtgaaacgtgccatgaacaaatcctttaatgtttcatccatttgtggaccaaaag

SEQ ID NO: 510060 - DNA, 100 bp, Homo sapiens
gccatgcccgggccggagtgagtgcgcgcgggcgaaaatggcgtacatccagcccttcacatcctcagccgaagatctcacttcctcccagaggcctttg

SEQ ID NO: 510061 - DNA, 76 bp, Homo sapiens
cagttttcgaaggaggatgccctggagacacacaggcagacccatactgacttaattcagtgcacaaatgagatga

SEQ ID NO: 510062 - DNA, 125 bp, Homo sapiens
agttggattttcacgtgctcttgctaaagaggtagcaagaaagaaaattagagtgaatgtagttgcaccaggtgtcatggagaaactccagctgggcccagagattctgcagcgggaaaatccaa

SEQ ID NO: 510063 - DNA, 100 bp, Homo sapiens
aaaactttttaaaagaggcgaaggcagaagagaacaaaggaaggagaaagtaacttgtggaatggtgagaaaggaaaagccatggagacttcagcatcct

SEQ ID NO: 510064 - DNA, 100 bp, Homo sapiens
caggaggtggtgaatatggccgtgatcgtgcccaaagaggagggcgtcatcagcgtctccgaggacagcctctcccactaggtctggatggaggatacct

SEQ ID NO: 510065 - DNA, 83 bp, Homo sapiens
ccgagccgcccggccacccttcgtcatctgcgtgaagctgactagacgcttgaagcaaagctgccatcccagaagacgacatg

SEQ ID NO: 510066 - DNA, 75 bp, Homo sapiens
aaacaggcgccgcgggctccgcgcccggccggacccgggcccgagatcagtcgcatcgaatacattcattcaaag

SEQ ID NO: 510067 - DNA, 98 bp, Homo sapiens
ccaacagtttggagaactcaaatatgtccgcattgtcttgcatccagacacagagcattctaaagctggataacgcagatgaacaagcagcccagatc

SEQ ID NO: 510068 - DNA, 100 bp, Homo sapiens
cccaccctaccacagggtcagcctccccgacccgtaatcgacaaaactttgaacgaggctgactgtgccaccgtccccccagccattcgctcctactgat

SEQ ID NO: 510069 - DNA, 75 bp, Homo sapiens
gatgccagaggtcaacaaggttctggacaagatgaagtctttctgccaggacagagcgggatgccaccagcttgt

SEQ ID NO: 510070 - DNA, 75 bp, Homo sapiens
gacgacttcatccagggctgcatcgtcctgcaggtcgctgaaaattttgttccccctctgttggatgcagttctc

SEQ ID NO: 510071 - DNA, 87 bp, Homo sapiens
gcggacgcgcggcggggcagaccgctggggactgcgggcggcgctgtgtccgtcgccatgacagtacctcctaaatggctctacttt

SEQ ID NO: 510072 - DNA, 82 bp, Homo sapiens
gatctgctggacgaggtcttcttcaacagcgaggtggacgagaaagtggccttccggagcagtactacagcctcacctggtt

SEQ ID NO: 510073 - DNA, 103 bp, Homo sapiens
aatcccagcactttgggaggccgaggccaagctataacatcagaaatggtgaatgaatacaagaaaattcttttgctgaaaggatttgagctcatggatgatt

SEQ ID NO: 510074 - DNA, 88 bp, Homo sapiens
cgccgtcacggccgcgctgctcatccccaaggaggacggcgtgatcacggccagcgaggacaggttgaaatcacaaagattagacacc

SEQ ID NO: 510075 - DNA, 90 bp, Homo sapiens
cagatggtgttacctggagcttaaaaagctgcacgcaagtgttaaacttctggtctgtctgacacttactgccaaacgcatggcaaggaa

SEQ ID NO: 510076 - DNA, 82 bp, Homo sapiens
cccgacgaggaacgaatgggacaagatcccgtccatgaatcaggaggaggagggggccagtgggggagcagtccattcagac

SEQ ID NO: 510077 - DNA, 75 bp, Homo sapiens
gtaaaacgattttctgtgtcgtttgcaaagcatccgactaacgaattttctgggttcctgtgaccctcaggttat

SEQ ID NO: 510078 - DNA, 83 bp, Homo sapiens
ctggatgctgcagacactgaacgaggagccagtggtcattcccaaaagcaagttcgtcttggtgaagttcgacacccagtacc

SEQ ID NO: 510079 - DNA, 96 bp, Homo sapiens
gcaggaagctggaaaggaaggtactgcaccatctgaaaatggtgaaactaaagctgaagagggctcagtaaagagacaagcactatatgcctgtag

SEQ ID NO: 510080 - DNA, 83 bp, Homo sapiens
atacccaataaccaggtgcttggcaaaatcgagcgggccattggcacttccgttccggcgcccctccggtcatcaacccgctg

SEQ ID NO: 510081 - DNA, 75 bp, Homo sapiens
atacccgcaacagccccttcgtcccaaatcatgtttgagaccttcaacaccccagccatgtacgttgctatccag

SEQ ID NO: 510082 - DNA, 100 bp, Homo sapiens
acccactggaccgtggttttgcaggaaatgtgaatctcaggagagagcagccagagtgacttaattcagtgcacaaatgagatgaatgtgaacatcccac

SEQ ID NO: 510083 - DNA, 50 bp, Homo sapiens
tcagtttctgaggaatttcatcagcagaattacctgattctaggacaaag

SEQ ID NO: 510084 - DNA, 83 bp, Homo sapiens
gtgaaagaccgattttctgcagaagatgaagctttgagtaacattgccagagagatctcacattcttgaaggtggcattgaag

SEQ ID NO: 510085 - DNA, 75 bp, Homo sapiens
caaccttgaaacgaaagtgaccgaggagctccttttcgagcttttccaccaggtggtattaaagataatcaaaca

SEQ ID NO: 510086 - DNA, 75 bp, Homo sapiens
aagggaacctgaacagctactattcccagcaggtgtccctgttacctgagaatgacagatggaatgaaactagag

SEQ ID NO: 510087 - DNA, 100 bp, Homo sapiens
gctgcagggggctgcgcctgcctgctccgccccagacctgtcggcgaaaggccgtgctggtatagaggactctaagaagtggggcatgctgtttctggtg

SEQ ID NO: 510088 - DNA, 82 bp, Homo sapiens
ggatgccctgcagtacctgcagaaggtctctggagacatcttcagcaggaaccttttgaggatggctttgcaaatggggaag

SEQ ID NO: 510089 - DNA, 90 bp, Homo sapiens
gccctgaacgcggactggcacgcagactgcttcaggcctaatgggattgtttgaaaaacgtcgcttcaggaaattcctagtgtatgttgc

SEQ ID NO: 510090 - DNA, 90 bp, Homo sapiens
aggctgctggagcgcctgctccccgggaccatcgagaaagacctgctcagtgctgtagaagcaaaagaagctcttgaaagggaagttaag

SEQ ID NO: 510091 - DNA, 76 bp, Homo sapiens
ccgagaccgcggccgggaccgaggacaagagtgagaatggtgaggcatatcagagaaagaaggcggcagccactgg

SEQ ID NO: 510092 - DNA, 80 bp, Homo sapiens
tttctctgctgcaccgacctcgacgtcttgcctgtgtcccacttgttcgcggcctatagccagtgaaactgaaattgcat

SEQ ID NO: 510093 - DNA, 100 bp, Homo sapiens
cgagtgacattggctgacatcacagttgtctgcaccctgttgtggctctataagcaggtgctgatgtatggacagccgtatcgtgttaccttagagcttg

SEQ ID NO: 510094 - DNA, 75 bp, Homo sapiens
gactccttcggcagtccacccaccgccgccgcctcccaggaaagatgaatgggagggctgattttcgagagccga

SEQ ID NO: 510095 - DNA, 82 bp, Homo sapiens
tgagtgtctggctcctgtcgacttggtggtcaaaaagcactgccagtgaaagatgtagaagataaacctgaacaacaaacca

SEQ ID NO: 510096 - DNA, 123 bp, Homo sapiens
gcccgcggagctgctgcagtccttcgcgccctcctcgccctccccaccgacatcatgctccagttcctggtcggaacgagctgattgcccgctacatcaagctccggacagggaagacccgca

SEQ ID NO: 510097 - DNA, 74 bp, Homo sapiens
gcagcaagtgcgcggttggggccactgcgaggccgttttaggtggcctgccatgggtatccatggtgacaagag

SEQ ID NO: 510098 - DNA, 75 bp, Homo sapiens
gtaaaattgagtgggattatgagtgtgagccagggatggtcaaaggcattctttgtgacatacgagcagttgaag

SEQ ID NO: 510099 - DNA, 100 bp, Homo sapiens
cccttcaaccaacatcttctgccctgggtcaagtgtacaaccgtcttcagatctcgtccttgaatgggcaagagggcacatgaagtacggcgtcctccac

SEQ ID NO: 510100 - DNA, 100 bp, Homo sapiens
cccgggtgcagactctgcgtgtccccccgtggcgcacaagcatgtaggtgccagaactcaccgccagagcctgatgattagaacaaactgattaaatggc

SEQ ID NO: 510101 - DNA, 76 bp, Homo sapiens
cgcgtccctgcgaccgccgcggcgaagatggatacctgcccactatgtctatccgcaggcttttgtgcagccggga

SEQ ID NO: 510102 - DNA, 50 bp, Homo sapiens
gccaaagtcactgctgttaacaaggatgtcctcatcaccgggggcatcgt

SEQ ID NO: 510103 - DNA, 88 bp, Homo sapiens
gacatgcgggagagagaatgagccagagggacacgctggtgcatctgtttgccggaggacgcaaacatgcagatctttgtgaagaccc

SEQ ID NO: 510104 - DNA, 99 bp, Homo sapiens
cgctctggcgctacggtctggccgtcggctgcggcgccatcggtgtggatgaggtcaccattgtcaacattttgaccaaccgcagcaatgcacagagac

SEQ ID NO: 510105 - DNA, 89 bp, Homo sapiens
gtaaagggtatctgatcaagccaacaacagtgacggaatgcctccatacatgtgctggagaatctggtaaaagcaccattgtgaagcag

SEQ ID NO: 510106 - DNA, 75 bp, Homo sapiens
gccccgagcactgtggccgaggcccacctgctgacatctacctgccaggtgtccctacctgcaccggacgacggg

SEQ ID NO: 510107 - DNA, 82 bp, Homo sapiens
ggatgctttacttttagacctcagacaaaaatttccacccaaatttgtgcagactggctatgtggatgctggaagatgggga

SEQ ID NO: 510108 - DNA, 100 bp, Homo sapiens
caggattcattttgacatgcatgggttcctgaccaatgtcatccttgcagacctcaacctctcaggatgaagagactcggcacagccttgagtgcatcca

SEQ ID NO: 510109 - DNA, 90 bp, Homo sapiens
gctcaagccatcctccctaccttagcctcccgattatctgggaccacagtatcatggtacagtcaccagaaaaagcttacagttcctcac

SEQ ID NO: 510110 - DNA, 82 bp, Homo sapiens
ttgccataaaggacaaacaagtgaaatacttcatacattacagtggttggaataaaaacttcttggacacttaatgattgtt

SEQ ID NO: 510111 - DNA, 98 bp, Homo sapiens
taatggaggcgcaggcagaaggaccccttacagcgcttctgaaagtacagagaagcttaacaactccactggcctccagagctcctcagtcagtcaaa

SEQ ID NO: 510112 - DNA, 100 bp, Homo sapiens
cagtttctagtgacagacagcggcaggacagtcatcctctataaggaactgaaattaccattcacttttttaagtggacatattcatgaattgaggattc

SEQ ID NO: 510113 - DNA, 98 bp, Homo sapiens
gactgtggagatggcggctcagaagataaacgaggggctggaacacctcgccaaagcagagaaatagtggatcatccatgccatggagtatgaacttc

SEQ ID NO: 510114 - DNA, 51 bp, Homo sapiens
ggcgtggagatatggcgcaactgcggcgcggcaagcgacttggtaatgaag

SEQ ID NO: 510115 - DNA, 100 bp, Homo sapiens
cacgtgatgtgtctacttatcaggtcccgcagcgtggacaagcagcatgccgtcatcaactacgaccaggacagggacgagcactgggtgaaggacctgg

SEQ ID NO: 510116 - DNA, 120 bp, Homo sapiens
ctatgcaagatttgctgggtatgaataatgactttcctccaagagcacattgcctggtaagatgaaatcaatgtggactgaacataaatcacctgatggaaggacttactactacaacac

SEQ ID NO: 510117 - DNA, 97 bp, Homo sapiens
aagaaggcaaggagagaatgtatgaagaacagtcacaggacaggtaagttctcttctacgctgtatgagactggtggctgtgatatgtcacttgtga

SEQ ID NO: 510118 - DNA, 99 bp, Homo sapiens
atcgaccggcgacagcagccaggagtcatgagcgacagcggcgagcagaactacggcgagcgggcccgatgagagaaagggaaagttaaggatgctgga

SEQ ID NO: 510119 - DNA, 102 bp, Homo sapiens
cggcgctgcggggccgcatccagctgcgggagcagctgccccgctacctcatgggggagacgcagctgtgcaccacaagtccaatatcagatggaaatgatg

SEQ ID NO: 510120 - DNA, 95 bp, Homo sapiens
accaccaccatctccatcacccaccaacaacaccacaataatccacagccaagaaatgcatcttctgcagacaccgggttaagagggtctctgga

SEQ ID NO: 510121 - DNA, 74 bp, Homo sapiens
ggcagtcttccttattattaagcactagctgacgcgtctatgggcgcaacgccgcggccctgagccaggcgctg

SEQ ID NO: 510122 - DNA, 100 bp, Homo sapiens
tctaaaactgaaggagaagcccatgaagagatggtggattctcactgagttttgactagcggaagaaaagtttccacgggctcccttgctcagcagtatg

SEQ ID NO: 510123 - DNA, 97 bp, Homo sapiens
taatttttggaacaatttgatgagctaggagataggttcccatatcaaacaccgggtacaggagctgggccatggctgtgccgctctggtcaccaag

SEQ ID NO: 510124 - DNA, 75 bp, Homo sapiens
caggctagtccgacgaagagtgggaatggaagttggatacactttgtgacttgtacgagacactgaccattacac

SEQ ID NO: 510125 - DNA, 87 bp, Homo sapiens
cctgcaccatgagcgtcccggccttcatcgacatcagtgaagaagatcagggtgatcagcccatgacctaaacctccagacaaaata

SEQ ID NO: 510126 - DNA, 75 bp, Homo sapiens
aagagaggtccgaaacccaagcggcttctgctgcagcagtcctgaagtgtggatgttttagagaatgacttaaga

SEQ ID NO: 510127 - DNA, 75 bp, Homo sapiens
cctacttctataaagtcatccagggccgttgctccagggagaactgcaaatatcttcatccacccccacatttaa

SEQ ID NO: 510128 - DNA, 100 bp, Homo sapiens
cagtcgtaagaagaggtcccaatcccccactctttccgccctaatggaggtctccagtttcgacgtaaaattcatcctgatcagaaaaatattaatgcct

SEQ ID NO: 510129 - DNA, 75 bp, Homo sapiens
ggcaggggacgtggcttttgtgaagcacagcacggtactggagaacacggatgcccgtgtccaggagccccgcca

SEQ ID NO: 510130 - DNA, 98 bp, Homo sapiens
caaggggttgatttatcatggaaagctgaactgctgccaacaattaagggctggggagcagaataccaccgccaggatgttactagcaccccctgctg

SEQ ID NO: 510131 - DNA, 100 bp, Homo sapiens
caccatggacagcgtgcggtctgggccttttgggcagcttttccggcctgacaacttcatctttgtcgttccccatcaggaagtcctcgcagaagtgcaa

SEQ ID NO: 510132 - DNA, 90 bp, Homo sapiens
gcgcctcaaagtgcccaaggagcgcctggctcttctccacaaagacacgactcctcctattttgaggacttctccaacatctccatcttc

SEQ ID NO: 510133 - DNA, 98 bp, Homo sapiens
tgttataaagatgaggatgaagagctgtggcaagaagatccatatgagtatataaggatgaaatttggcttgaagaaaatttgcctacacgttgtgga

SEQ ID NO: 510134 - DNA, 75 bp, Homo sapiens
ccaggcgcggagggaagacgccctggtgctcaccaagcaagtcccggcccaggcccctgagctggagggatggaa

SEQ ID NO: 510135 - DNA, 75 bp, Homo sapiens
gaagctacacttttcaccaaggaactggtgctgcagcgagaggtcaaaatgcagatcttcgtgaaaacccttacc

SEQ ID NO: 510136 - DNA, 100 bp, Homo sapiens
agaaaggatcaggactggcggctggcggcaacccgcgatctctagagaacagcctggatgaagaagtgaccatcgagatcgttctctccagctctgggga

SEQ ID NO: 510137 - DNA, 83 bp, Homo sapiens
ttcagaggccggaaaatgccctcaaacgcgccaacgaccatggcaaaagttataaccaccgtactgaagttccctgatgatca

SEQ ID NO: 510138 - DNA, 90 bp, Homo sapiens
gaaagcatgggagccaagagtatgaggagctggtgtctgtgtcagatttgtagctgcgggatgaagcctgctgggagcgtgaatgacatg

SEQ ID NO: 510139 - DNA, 100 bp, Homo sapiens
ggagttggggcttgatgaaggcgtggatagcctgaaggcagccattcagagcgtttcccaaagtgtattctgcggaactagcacctactgtgttctcaac

SEQ ID NO: 510140 - DNA, 98 bp, Homo sapiens
tgaggagaaggaggaggagatgagttggaagggcaagactggagagttaaatcagcttttaaatgcagttaaatcaatgcaggagaagacagttgtgt

SEQ ID NO: 510141 - DNA, 99 bp, Homo sapiens
gcgaggaggctgcgagcgagccgcgaaccgagcgggcggcgggcgcgcgcaccatgggggagaaacccgggaccaggtggccagcatcgaaatgttcag

SEQ ID NO: 510142 - DNA, 75 bp, Homo sapiens
gtggtcagacatgtcatcaactcagctgtgtaaacaggaacatcgataagtagtgtaaaaacttgcacaatgaaa

SEQ ID NO: 510143 - DNA, 82 bp, Homo sapiens
ggagctggacggcgagcgcgagcggcgcgagaaagtgtgaaccgacacttccacatgatttgtattcgggacaagttcagcc

SEQ ID NO: 510144 - DNA, 98 bp, Homo sapiens
tatatgctcttagagcagatcattttctcacaggtacctgggccagctggacgacagtgagtttgagagagccctgcagaagctgcagctgaccagga

SEQ ID NO: 510145 - DNA, 50 bp, Homo sapiens
gcctacccgggatacggaggagggatttggagcaagaggtggtggtggcc

SEQ ID NO: 510146 - DNA, 82 bp, Homo sapiens
cccggcccggagcccccagcgcagcggccgcgaaatggtggagtcaatgaagaaagtagcagggatggatgtggagctgaca

SEQ ID NO: 510147 - DNA, 82 bp, Homo sapiens
ctcagttggaagcagccgatccagcctgcggagcctgtggggcagtttctcagctacctcagtgcctgtgaccgcctgttac

SEQ ID NO: 510148 - DNA, 100 bp, Homo sapiens
ctgaaatgtttgacgacactgatggtttgtcacagcaaactgtacaatggcagttgagtgggttttgaaaaacgtctgaattgtagtgtctacatctacc

SEQ ID NO: 510149 - DNA, 80 bp, Homo sapiens
gaaaatggacatacggatgttgcagatgttttacttcaagcaggggctgatttattaatagatgagcagattttgtgtgt

SEQ ID NO: 510150 - DNA, 90 bp, Homo sapiens
tgaaattctgtgtgctccctccggcgagagactttgtcagctcccgcacagtaacgaattgaatgatctggcacgggaccctccagcaca

SEQ ID NO: 510151 - DNA, 82 bp, Homo sapiens
tccttttcgtttccggaaacatgttccagatttcggaaggttcacgagtgttgccgacacgccctcccaactgcagacatcc

SEQ ID NO: 510152 - DNA, 100 bp, Homo sapiens
gcccacgcagctgcctggacaaaaaccagcctggacaccaagtctgtgtcagaaggccacctcaagaggaacatcgtggtgaagaccgtggagatgcggg

SEQ ID NO: 510153 - DNA, 75 bp, Homo sapiens
gtgaccgagagcgcgaatatcgtcatcgttagaagaatatcctccgaatcctaaatctagagctccaaggatgct

SEQ ID NO: 510154 - DNA, 82 bp, Homo sapiens
tgcaaaggactgtggtgatttggagcctcggtacactgtatgggaactgcaagcacatgttgaccagataactgaaatggca

SEQ ID NO: 510155 - DNA, 111 bp, Homo sapiens
ctcctgtctctctccaatgtagaggaggtggacaccgctctgcagaactttgcctctactttctgctcagggcagctgcaatgactctccgcacggtattattgtcattgc

SEQ ID NO: 510156 - DNA, 75 bp, Homo sapiens
gctcttgtgctcagtgacatcattcagggccacgactgcttcccggtgctgttcacctatgacgccgccgcgggg

SEQ ID NO: 510157 - DNA, 100 bp, Homo sapiens
ccttgatgcgcaagttcattgcctaccagttcacagacacggcaatggatcacttggagtcctttattgctgaatgtgatcggagaactgagctcgccaa

SEQ ID NO: 510158 - DNA, 100 bp, Homo sapiens
ctcaccatacacctgaaggaaggccggaacctggttgtccgagatcgctgtggttggcctcattcagcttgggcaggagcaggtgctaatccagcccctc

SEQ ID NO: 510159 - DNA, 50 bp, Homo sapiens
gccgaccaccatcccggtcaccacgagctggacccacaaaccgtggagac

SEQ ID NO: 510160 - DNA, 73 bp, Homo sapiens
agcctctgcaaatctgggacaaaaaggtctatgttaacaatgaatgggcaaccagtgttggggaaggagggag

SEQ ID NO: 510161 - DNA, 100 bp, Homo sapiens
ttggggaattagttggagcacggcttattgctcatgcaggtgtgggtcctgtggtagctggagtgttggtggccatcttggtgctggcggtcctcatgct

SEQ ID NO: 510162 - DNA, 90 bp, Homo sapiens
cgagaccatagttttgaaggcccttgtgaaggtctccatcgaggacattcaggaggtgcgaatggggcaccgcacggagggtctggagaa

SEQ ID NO: 510163 - DNA, 50 bp, Homo sapiens
gcggcaccttcgagcgtctcctaggctgacccagctggatgttgacagcc

SEQ ID NO: 510164 - DNA, 89 bp, Homo sapiens
ttgaagcaacccttaatgtgcatgatggttgtgtgattttctatgatagcgactggaaccccactgtggaccagcaggccatggacagg

SEQ ID NO: 510165 - DNA, 98 bp, Homo sapiens
tcggcatctagtctttccgcttcttgaatttctctctgtaaaggagcaacttattccatatgtggaagaagatggctcaaagaatgatgatcgggctg

SEQ ID NO: 510166 - DNA, 108 bp, Homo sapiens
ggacccacagacacagccggggtcgggagccgcccggggcagggctcgggagagcggctgtttttggaaggaagaaagatggaaagcggtgcagttctgctggaatcc

SEQ ID NO: 510167 - DNA, 96 bp, Homo sapiens
catctccagccgcctagcaggcaaggttggagtcagttagctgctatgcactgtgttatgctgccagacctactgggattggataaatttaggcct

SEQ ID NO: 510168 - DNA, 101 bp, Homo sapiens
ttcaatgtttggaaaagctatatggagataaatggaattcttttaccatcttattaattcactctgaatatggtgcacctgaagattgggaactcaaaaca

SEQ ID NO: 510169 - DNA, 90 bp, Homo sapiens
gtctggccctgagtagggtgtgacctccgcagccgcagaggaggagcgcagcccggcctcggtggataattactgtaccttcctcatgga

SEQ ID NO: 510170 - DNA, 100 bp, Homo sapiens
tgatagacttaaaatatttcccatattatgggaaaaaactgcatgaggcagccttctgtgctgtgattcttgccctgctgcttttcatcgtgaatgcctg

SEQ ID NO: 510171 - DNA, 75 bp, Homo sapiens
ctcacaaggcagtcctagcagcatgcagtgactatttccggttgcatccttaatgtccagtcaaggagtggtgac

SEQ ID NO: 510172 - DNA, 116 bp, Homo sapiens
ctttcatggagaatggctggaagttcttggctgcggggtgatggaacaacaactggtcaattcaggtccacattggccaactgtattcaactgacaagctgatcattgagaatcga

SEQ ID NO: 510173 - DNA, 83 bp, Homo sapiens
ccagatgtcttacttgtgaaactgatgaagcctgctgggagcgtgaatgacatggccctggatgccttcgacttggaccggat

SEQ ID NO: 510174 - DNA, 100 bp, Homo sapiens
ctctcagcggccatcgctgccatgcagaagttttacggcttgcaagtaacaggcaaagctgatgcagacaccatgaaagataatgctatgttggaatacc

SEQ ID NO: 510175 - DNA, 102 bp, Homo sapiens
agctggcgcgccagagcggcatcgaggtcctgaacgaggctgtgggggccctgatgtaccacaccatcactctcaccagggaggacctggagaagttcaaag

SEQ ID NO: 510176 - DNA, 75 bp, Homo sapiens
ggtctgtctgagggagatggtgacaagctcaaggcctgcgaggtattcacttacaagcagagcacaattacccac

SEQ ID NO: 510177 - DNA, 100 bp, Homo sapiens
aaaaacttcctcgaatttcagcgtaaactgcagcatgatgttctgaagcttgagccgaggcctgcctggagccccagatcaccccttcctactacaccac

SEQ ID NO: 510178 - DNA, 100 bp, Homo sapiens
ctgggacacccgggagtcaggaaatggggagcgtgttcaatacgtggaaacccatgtgggttgtattgttagaagatggaattgaattctataagaagaa

SEQ ID NO: 510179 - DNA, 85 bp, Homo sapiens
cagttggaattgaagaatattcccaagtccttcacccgggatgaccggaaagaagggatgaccgcgtttgtggaaaagagaaagg

SEQ ID NO: 510180 - DNA, 82 bp, Homo sapiens
gttgaaggagggatggacctcatctttttgaaggagcagacacttcaggcgggaatcttgatttggcctggcacgtgggcac

SEQ ID NO: 510181 - DNA, 101 bp, Homo sapiens
tgtatgtaggagtgaatataaaaggacttcatctcctcaacatggaaactaagaatgtgaaagatgttgcagaagtgttccagaagtggctgaagatagaa

SEQ ID NO: 510182 - DNA, 82 bp, Homo sapiens
tgtacagcgccggtcaacatcgcggtcatcaagtactacccctttgctgatgcaagtaagggtgatgacctgcttcctgctg

SEQ ID NO: 510183 - DNA, 96 bp, Homo sapiens
tgacggctttagacctgactgtggataatattaatgcagctgtgatggatttgaaaaaaaagaagatccgcagtctaagtgaagaggtcaaaatag

SEQ ID NO: 510184 - DNA, 82 bp, Homo sapiens
caagtggctgagtacaccttccgccagtcaggatggctaaaggtgaccccaagaaaccaaagggcaagatgtccgcttatgc

SEQ ID NO: 510185 - DNA, 100 bp, Homo sapiens
cagaggatagcctttcacttattcatctgtccagcatgactcatccccgggagtgttgagcaccgcctagaatccttcgatctcgcttcaggaagaaaag

SEQ ID NO: 510186 - DNA, 96 bp, Homo sapiens
ctgccaatgagccccctcaagatgaaggtaattccttcaattcaccccgcaacctggccatggaggcaacgactttgcttaccatggataagtatg

SEQ ID NO: 510187 - DNA, 100 bp, Homo sapiens
acaggtttgcagattccgccagcagcacagcaagctctacagatgagtggctctttggcatttggtgctgtggcagatggagtctccttctgtcgcccag

SEQ ID NO: 510188 - DNA, 98 bp, Homo sapiens
cttgggctggtgattctgctggaaatcctgatcagctgcttagcttttcagccgcaactttgttagaatgtaactggtcactacatttccccctttca

SEQ ID NO: 510189 - DNA, 51 bp, Homo sapiens
aggggtgtacttgttggggtcaggatcgtcagtatttaaacagatcacatc

SEQ ID NO: 510190 - DNA, 73 bp, Homo sapiens
aggatttcagggcaattgctatcgccaggcaggttcctccagcgaagccatcttgaacacaatgagccaggag

SEQ ID NO: 510191 - DNA, 83 bp, Homo sapiens
caatgttggagccgtctgcaaagtgtccccggcaagaaggcaccgggagcctggccgctgcagtggagacagcctcgggacgc

SEQ ID NO: 510192 - DNA, 75 bp, Homo sapiens
tacgcagctggcagatattatcatagttgctgcagtttcaccagtgatcattaaagaatgggcagcttacaaagg

SEQ ID NO: 510193 - DNA, 82 bp, Homo sapiens
cttcgagttcttcgtgctgctcaaggtgtggacactgccagcggctgcagccgacttggaatgacctgggagacaaatacaa

SEQ ID NO: 510194 - DNA, 100 bp, Homo sapiens
ggacgttggaggaaagaaggaatatctcattgcagttcccagtgacctgacagcagaggagcgtcaagaactggagaacatccgacggagaaaacaggag

SEQ ID NO: 510195 - DNA, 105 bp, Homo sapiens
aagtactggccagatccctcatgattcaggctgccgccaaccaggagagcagccatgtgcagcagcaggcccttgctctggagcagcagttcttggagcgcaccc

SEQ ID NO: 510196 - DNA, 51 bp, Homo sapiens
ccagacaacaggatcgtctcgtccaagtttgcaggtcgaagtaagaaggaa

SEQ ID NO: 510197 - DNA, 74 bp, Homo sapiens
agactcaagacacacaactcataacagttgatgaaaaattggtatacagaagatgggtgtccacataagaaatt

SEQ ID NO: 510198 - DNA, 82 bp, Homo sapiens
gatccggttccttggtgtcatccagccttagcaaaccagaggtggagcagttctggaggttttatagccacatggtacgtcc

SEQ ID NO: 510199 - DNA, 88 bp, Homo sapiens
tccgccctaatggaggtctccagtttcgtccttcagctcctacttaatggaagcctcgcagatgcaagatggctccagcaggcccagc

SEQ ID NO: 510200 - DNA, 125 bp, Homo sapiens
gtggaacttctacccgacacttacatgccatggccttctacgttgtgaaaatgaaaacgttgtgtgacgtgatcctcatggtccaggaaagaaagatacctgctcatcgtgttgttcttgctgca

SEQ ID NO: 510201 - DNA, 92 bp, Homo sapiens
actaccacaacccgtaagaatcgctctacagccagcattcaggtgacagagctgaatgaacctctctccaatgaagatcgaaatctcctctc

SEQ ID NO: 510202 - DNA, 75 bp, Homo sapiens
tccaaattcgcctccatctgtaccatgaaaaggcgacggcggattgacagaagtatgattggagagcccacaaac

SEQ ID NO: 510203 - DNA, 74 bp, Homo sapiens
gaaaccgatttctaacagagaggttgattgcactgccaacactaacacctgtaataaatatggagtcagtggat

SEQ ID NO: 510204 - DNA, 98 bp, Homo sapiens
ggcgattccagagagcggcggaaaggataagcctcgacttagaagctaccgagttaccctaagaaagcctacagacctggtacctggatttttgcccg

SEQ ID NO: 510205 - DNA, 98 bp, Homo sapiens
tggactgtcttgggcagcatgcagtgctttctgggttgagagcaccattggatgcttactttcaggtgagcaggacccagcctgacttgccagctacc

SEQ ID NO: 510206 - DNA, 100 bp, Homo sapiens
gtgggaagaagatttgtaaagaaaactcttagggtgaaaatcctatttataagagtgccgtaacaactgtggtcaatccgaagtatgagggaaaatgagt

SEQ ID NO: 510207 - DNA, 98 bp, Homo sapiens
cagttaatggcaagacttgcagaggctcctgcaaaatcttccttattctgaaaagatgacagttttgtttgtctacaatggccctcatatgctggaac

SEQ ID NO: 510208 - DNA, 75 bp, Homo sapiens
aggcacctgtgtagagggcaccatacccaaattattccgcggcaaaatggtggtggtgatggcacttctcaaata

SEQ ID NO: 510209 - DNA, 95 bp, Homo sapiens
agcggagggacggcagtctcgcgcgatgccatggacaatattaccaggcagaaccaattctacgatacccaagtcatcaaacaagaaaacgagtc

SEQ ID NO: 510210 - DNA, 83 bp, Homo sapiens
gtggggggcaagcagtacctcctaggactctatgacacggccggacagtcttgcagccttacagtcatttgtaatggttacct

SEQ ID NO: 510211 - DNA, 82 bp, Homo sapiens
gaggagcctgtccctgactctggactccacaaggagaacaggagacccccaaaagggaatacgccagacaccttttgaaagc

SEQ ID NO: 510212 - DNA, 76 bp, Homo sapiens
cccggccagccgccccgtccgggagctggcagagaggctgatgacatcgtgaactggctgaagaagcgcacgggcc

SEQ ID NO: 510213 - DNA, 98 bp, Homo sapiens
gacggcagggagtgcatcaaaggtgtgaacacaggctgcgtcatcaccatctcgggacgcatgaccttcacgagcaataagtccatggagatcgaggt

SEQ ID NO: 510214 - DNA, 73 bp, Homo sapiens
gccaacccggactggatcaacaccggggagtctgcgggtgattttacaacgagatgctgctctccatagggat

SEQ ID NO: 510215 - DNA, 89 bp, Homo sapiens
agacgacttcgaccctgcccagcacgaccagctcatgcagactgtcactgcgacacccaggctggagtgcaatggcgtgatctcggctc

SEQ ID NO: 510216 - DNA, 83 bp, Homo sapiens
gaactgcttgctgcagaggccagcaataatgacgatgaggacctgacaccagagcagaaggcagagcgtgagaaggagcggag

SEQ ID NO: 510217 - DNA, 101 bp, Homo sapiens
agggcaacgtccaagtctccgaacagagccacacgactcccgctggctcaatgcttgtctttaaccgaactgtcacactgaaggaagacccaggaaaggtg

SEQ ID NO: 510218 - DNA, 75 bp, Homo sapiens
cgtgagagacgtagagctgagcgacccagcccgcgagcgaggcaacgcggtaaaaatattgcttcggtgggtgac

SEQ ID NO: 510219 - DNA, 75 bp, Homo sapiens
ggctggtccaggccttccagtacacagacgagcatggggaaggtgacctgaaacatatcacgaagctgaaacctt

SEQ ID NO: 510220 - DNA, 87 bp, Homo sapiens
acaatgggctactggccaacatacacgcccatggaagtgcacttaaccccagaagagtgtatctcgcagtcagcagtgaaaacaaag

SEQ ID NO: 510221 - DNA, 100 bp, Homo sapiens
aagttccttgaaagaaatagaaccaaatctgtttgctgatgaagattcacctgtgcatgtcctgaggctttctaccaatgcaggccagtggaaggaagca

SEQ ID NO: 510222 - DNA, 78 bp, Homo sapiens
aattttcatactctcttaacattggataataagcttttacaaactgatgaaatgctgtctatgatttcttcattggcc

SEQ ID NO: 510223 - DNA, 49 bp, Homo sapiens
agagacgttaaaatacttccaaagcaaggagatggccaccaaggagaag

SEQ ID NO: 510224 - DNA, 100 bp, Homo sapiens
caagaatgaacaatccgtcagaaaccagtaaaccatctatggagagtggagatggcaacacagatggtgctggatctttgccttggccagggggttccgc

SEQ ID NO: 510225 - DNA, 82 bp, Homo sapiens
ccgcatggaggccggctgaggagcgccgctgcctcgcctcggcccactgctcagtggagcgtggaggacgaggaggaggccg

SEQ ID NO: 510226 - DNA, 83 bp, Homo sapiens
ccttgttcccccaaatgtctgactctgactctcggactgagaaacgcaagcttccccgggcgctgcctggacaggcctgcctg

SEQ ID NO: 510227 - DNA, 100 bp, Homo sapiens
aataaaaaagctctgggcaccgtatcaagccaagaacagcccaatctcctttctgggcaaacgttccaagatgtgccgatggaggaggccaccgatttca

SEQ ID NO: 510228 - DNA, 93 bp, Homo sapiens
gctaggaagcccctatcgccgagctcgttggagcttgaacccattgtcacccctccgacaatgcagatcttcgtgaagactctgactggtaag

SEQ ID NO: 510229 - DNA, 98 bp, Homo sapiens
cggggtcttgcaggaccaccaggcatgccaggtcctaggggaagccctggccctcagggtgtcaagggtgaacctggtctcagaggtgaaattggtaa

SEQ ID NO: 510230 - DNA, 75 bp, Homo sapiens
caacatcgacagcattatccaacggctgctggaagagctcaggccccggggcctccagcggcaccagcggagacc

SEQ ID NO: 510231 - DNA, 50 bp, Homo sapiens
attcctcatgacattgctgtctggtgttatcttcaggaaggcacactgga

SEQ ID NO: 510232 - DNA, 96 bp, Homo sapiens
gcgacacaattgtctgtgacagtaacagtacttgggatcccccagttccaaagtgtcttaaagggattaacatctgctcgtgcagctgagatcctg

SEQ ID NO: 510233 - DNA, 78 bp, Homo sapiens
taatcttggcgacattgacaatgatggctttgaagttcaaggagcagggacaagttacaggaatgttctccaagcagc

SEQ ID NO: 510234 - DNA, 100 bp, Homo sapiens
ggtccatgccatggtgatcctgctgacgctgggcccgcctcgagacatgagcaccagcctccaggaaggccaggaggacgggccggcaggatggagagcg

SEQ ID NO: 510235 - DNA, 83 bp, Homo sapiens
cgcccgtgggggctgagcccgccgtctacccgtggccgctgccggtctacctctccctgtccagccgcctgcagctgaccctg

SEQ ID NO: 510236 - DNA, 98 bp, Homo sapiens
cgtgaccgagagcgcgaatatcgtcatcgttagaaggacaagatgacctcatccagcatcaagatatgaggatcttggagctaacgccagaaccagac

SEQ ID NO: 510237 - DNA, 74 bp, Homo sapiens
aattatgaaacaacctggcccatgagatgatagctgtggaagggtgtcttttatgaataatcaaaagcagcaaa

SEQ ID NO: 510238 - DNA, 82 bp, Homo sapiens
gcaccagggcatcaagatcgagttcatcgggcagatcgtttggtaactctcattcgacatccatctgaactaatgaatgttc

SEQ ID NO: 510239 - DNA, 75 bp, Homo sapiens
aacccgccactccagaaatccaggagattgttgataagggcaaacactgtatccttgatgtgtctggaaatgcca

SEQ ID NO: 510240 - DNA, 51 bp, Homo sapiens
ctagcggcgcggcgctcgctcctacgaggaagaagcccctccagatggtgc

SEQ ID NO: 510241 - DNA, 87 bp, Homo sapiens
aaaaagaagattcgggacacacagaaatataaacctttcaagagtcaagtaaaggccctgtctctgcccctggtggtcatcgtccat

SEQ ID NO: 510242 - DNA, 100 bp, Homo sapiens
ctgcttaggcgccaccactagtaccatgagtccctgcactggttaaagccatcgccacaacctggacaggcagcaaggcactgtttagtacagctgttga

SEQ ID NO: 510243 - DNA, 75 bp, Homo sapiens
cagaaccccaggactgcgcccccgggagcgggcgcccagagggccaattcctgtccccccagcagcatggcatcg

SEQ ID NO: 510244 - DNA, 75 bp, Homo sapiens
gtggactccttcggcagtccacccaccgccgccgcctcccagggtggagttcacagtgggagacaagcctgtcaa

SEQ ID NO: 510245 - DNA, 75 bp, Homo sapiens
cctcactgcagaggtgctggagctggcagggtgtcaaattgagaaccaggtagatccccaccacctacagtaaaa

SEQ ID NO: 510246 - DNA, 50 bp, Homo sapiens
cggccaaggatgaagcctcacttcagagctcccctgaacagcagctgcag

SEQ ID NO: 510247 - DNA, 100 bp, Homo sapiens
agtggaagcgcttcctgaagaataactgggtgttgctgtccaccgtggccgcggtggtgctaggtttttctatatgagtggagaagacagctgttaccag

SEQ ID NO: 510248 - DNA, 100 bp, Homo sapiens
gctgaggcacctggagaccttcgagcaccccaacgtggtcaggtaaaaagaacgtattctcatggtacttacagagctggcccaatgagacaaataagct

SEQ ID NO: 510249 - DNA, 87 bp, Homo sapiens
cgcacgcggcgatatggaagaggagggcaagaagggcaagaaggcgcctgtgtctggcagagctggtgtgagacgagacaatcctgc

SEQ ID NO: 510250 - DNA, 101 bp, Homo sapiens
tagccgcgtcccctccagtccgctccgggcagtttttggctttcacccccaaccagtgaccaaagacttgaccactcaaagtccagctccccagaacactg

SEQ ID NO: 510251 - DNA, 100 bp, Homo sapiens
gagaggctaacggccttctctcgtctggtttagaaggaatcgccgggggaatacaggccaaactacaattcccgagagtgaaagcccctcagggaaaaaa

SEQ ID NO: 510252 - DNA, 74 bp, Homo sapiens
gcgccgccaaggcggcgcgcgagctggagcactcgctggagacctttggcgacttggcctttggcgacatcttc

SEQ ID NO: 510253 - DNA, 100 bp, Homo sapiens
gtattcctgccgattggtatcgcagaatatggcccttatcctattgaaggaggactctttggattctctgctggatgaaccgaatcctaacagtccagcc

SEQ ID NO: 510254 - DNA, 98 bp, Homo sapiens
gaggagaccctggaagacaatctaaggtcacaaacatgtcagacaaaagtgaattaaaggctgagttggaacgtaagaagcagcgactggcccaaatc

SEQ ID NO: 510255 - DNA, 98 bp, Homo sapiens
cttcgagagttcttccaaagtcgcccaggcaccttctccatgcattgcaagatcagcggtttgagtgctacgtttgcagaaattttcttggaaataat

SEQ ID NO: 510256 - DNA, 90 bp, Homo sapiens
ggatggcccacaagcagatctactactcggacaagtacttcgacgaacactacgagtaccggaagaattcctttggctaccggaagaaaa

SEQ ID NO: 510257 - DNA, 89 bp, Homo sapiens
gaatgtgactgactagcagcttcattttgaagtgctggagaatctggtaaaagcaccattgtgaagcagatgaggatcctgcatgttaa

SEQ ID NO: 510258 - DNA, 83 bp, Homo sapiens
agagtccttgctgggggttcggggagcgcttggaccccggcttctgggacgcgtcaggttcgagaacttgtcttggacaattg

SEQ ID NO: 510259 - DNA, 82 bp, Homo sapiens
gcccttgggcgcgcagatacccgcggtgcaccgcctgctgggagcgccgctcaagaaatggtggagtcaatgaagaaagtag

SEQ ID NO: 510260 - DNA, 82 bp, Homo sapiens
aagaacttccgtacgacctcgaggatgccatggtgttctggatcaacaaggtggcacaagaatggctcaactctccaaatag

SEQ ID NO: 510261 - DNA, 74 bp, Homo sapiens
cgctgagaggggctgcggccggagcgggcggctgagacaaaggcgacgagcctggagaaagttcttgtggaatt

SEQ ID NO: 510262 - DNA, 100 bp, Homo sapiens
agatatttgaagttgatgtggaaattgccaaacaatctgtgactattaagaccatgttggaagattgagaggatccagaatccagatctctggaatagct

SEQ ID NO: 510263 - DNA, 75 bp, Homo sapiens
catcatgtcgcgttacgggcggtacggaggagttaccggtattgtaagaacaagccgtacccaaagtctcgcttc

SEQ ID NO: 510264 - DNA, 100 bp, Homo sapiens
aacatcgccctgtggatgactgagtacctgaaccggcacctgcacacctggatccaggataacggaggctgggcatttcctgcagatcaccctgtgcgtg

SEQ ID NO: 510265 - DNA, 100 bp, Homo sapiens
gtgattccttcctcaaatgttagcattacaactgtgaagcctcagtttaggtcatctggtggttcagaacactcaacagagggctctgtatccttggggg

SEQ ID NO: 510266 - DNA, 100 bp, Homo sapiens
ccaagacctccggccagcccagtgatgcgggcagcaggcccctcctgcgcacagggcctcatcctgtaccaccagcaccagcacagctgctgtgagtccc

SEQ ID NO: 510267 - DNA, 100 bp, Homo sapiens
gagtttactggtgcacacatagatattgataaacagaaagacaagactggagaccggataatcactataagtgagggccccaaggctgttgcagctcctc

SEQ ID NO: 510268 - DNA, 98 bp, Homo sapiens
ttccgcaccatcacctccacgatgattcaaagccgccttactcctacgcgcagctgatagttcaggcgattacgatggctcccgacaaacagctcacc

SEQ ID NO: 510269 - DNA, 80 bp, Homo sapiens
agatccagtgtgtgggagcaggaccagcaggactccagtgggggtgactcatgtgcttctgaggaggaaccaacctttga

SEQ ID NO: 510270 - DNA, 100 bp, Homo sapiens
cggatcttagatggaagtcttggctttgctgcagggatgtactggcgaagaatatttggtaaagcagggcatcgatctctcaccctggggcttgtggaag

SEQ ID NO: 510271 - DNA, 98 bp, Homo sapiens
gtggccctcgatgtgctctgcgtgttgctgggtgctgaccttaaggaaagagccaaaatgagttccagtgaagttggtccttttgtctccaaaataag

SEQ ID NO: 510272 - DNA, 100 bp, Homo sapiens
tcccccgaggatctggaggcacagctgcagtctgacgagaggggcagaggtggaggagacactgaagcgactgcagagccagaagggagtgcagggaatc

SEQ ID NO: 510273 - DNA, 75 bp, Homo sapiens
ctgcacatcgtggtggtcggatttcaccacaagaagggctgccaggttgattcttcaccacactgaaaccattag

SEQ ID NO: 510274 - DNA, 100 bp, Homo sapiens
ggttcctgctgtggttttgatcatgttgttaccctcggacgtagcccggcttgtattgggaattttggagagtaaaaggctgaaccttgttaaagagaaa

SEQ ID NO: 510275 - DNA, 100 bp, Homo sapiens
cctctctggagccgagagaggccggtttcccccacccaagcgatccccctccaagaccatcccaggcctccccagacactgccacgtccactgcaagtcc

SEQ ID NO: 510276 - DNA, 50 bp, Homo sapiens
agtaccttcatgagagccaaaaatcaggcctgtctccactaactctggac

SEQ ID NO: 510277 - DNA, 83 bp, Homo sapiens
ccggccgccgcgccgcccggcagcctcggcagtctctgctttctatccgtcaagatgataaagtcgtgtgcccgagaaccaaa

SEQ ID NO: 510278 - DNA, 101 bp, Homo sapiens
ctttgtggcctccccctgatagggttggccgacaggcaaattctctgaagaccacgggtcctgttgtggagtaaactgttattattttaccatgcagaaga

SEQ ID NO: 510279 - DNA, 100 bp, Homo sapiens
aggtgaatgtcggaatccattatctttcgggaaagctctctggggcagggtgctggagaatctggtaaaagcaccattgtgaagcagatgaggatcctgc

SEQ ID NO: 510280 - DNA, 96 bp, Homo sapiens
tcgtgtgattgactttgatgagaacactgctctggatgatgcagaagaggagtcctttaggaagatgacacagtttatctctttgttgtaaaccac

SEQ ID NO: 510281 - DNA, 90 bp, Homo sapiens
tccaagacgctgcggccaagcagaaagttgaacagaacgcggctcccagccacaccaagttcaggctaatggaggttggcaggatgctac

SEQ ID NO: 510282 - DNA, 111 bp, Homo sapiens
ccgggatcgtgaccgagaccgtgaccgagagcgtgaccgagagcgcgaatatcgtcatcgttagaagctcctacagaagaagggaaaaaagagctgctgttcctaagtaac

SEQ ID NO: 510283 - DNA, 83 bp, Homo sapiens
ctggccgcggcgaccggtggtcccacgtccagccgggctcagtgaggatgaccggaaagaagggatgaccgcgtttgtggaaa

SEQ ID NO: 510284 - DNA, 141 bp, Homo sapiens
tgagacatgagatcttcagcctccaggctctccagtttttcgtcgagagattcactatggaatcggcagaggcaaggctggcagcaaaacgggctgcccgggcagaagcaagagatatacgcatgagagaactggaacgac

SEQ ID NO: 510285 - DNA, 87 bp, Homo sapiens
caggaccacctggaagcctagaaatgatttatgtgatcagtttggctgaaccccgtctgcccctgcagctggatgatgctgttcggc

SEQ ID NO: 510286 - DNA, 88 bp, Homo sapiens
aggacggccatagtcatgcctgtaggaggacagaagatgagcctgtcggtcctggagggtatggggttccgtgtgggccaggctctag

SEQ ID NO: 510287 - DNA, 88 bp, Homo sapiens
agaaaatcgagacctcaagtaatcattcccaagtatatgagctccctgaaagcacaaagcagttatttccatcttcagatcattcaga

SEQ ID NO: 510288 - DNA, 100 bp, Homo sapiens
tgggataagatctggaacttccaagccaagcctgatgacctgcttatttctacctatcctaaagcaggtaggagcattgcttttcgtggtgaaagaggca

SEQ ID NO: 510289 - DNA, 75 bp, Homo sapiens
agagaaggggccagtcggaaaatatcagttttagagaatgtggcgtggagaaattctcaaggaaagagtaaaatg

SEQ ID NO: 510290 - DNA, 101 bp, Homo sapiens
tgcggagagcctgccctgccctctgcttctggttgcctggcagagcagtggtccggcaagaagggagacacagctgccctgggagggaagaagtccaagaa

SEQ ID NO: 510291 - DNA, 83 bp, Homo sapiens
cgcgtgtctaggtgagtcgcggtgggtcctcgcttgcagttcagcgaccacggatcttttgccagaaatgagggcatactggc

SEQ ID NO: 510292 - DNA, 100 bp, Homo sapiens
gcgaagaggctggactcggattcgttgcctgaggttgtcaatagggtgactggaaatttcaagcatgcatctcctattctgccaatcactgaattctcag

SEQ ID NO: 510293 - DNA, 82 bp, Homo sapiens
gatccccgagctgctggagaactgaaggcggacagtctcctgcgaaaccaggcaatgggcaagtgaaccggagcaaacgact

SEQ ID NO: 510294 - DNA, 82 bp, Homo sapiens
gacccggaccccgcggagcctcttgcctcgcacctgaactcctggggggaccgtcagtcttcctcttccccccaaaacccaa

SEQ ID NO: 510295 - DNA, 50 bp, Homo sapiens
ggcggccgaccgagaacgcagcatccacgcagggcactgtgacctttgaa

SEQ ID NO: 510296 - DNA, 82 bp, Homo sapiens
ctgcggcgccgtggagtcccggtcgagaggcggcgcccgcgccgagcgccagccaggaatgggtaccacagaccatgtcatc

SEQ ID NO: 510297 - DNA, 101 bp, Homo sapiens
ccgcgaccactggcacattcttgctgacaggactttccttatcccagttgattgtgcagaatacactgcctgtcgcttgtcttctattcaccatggcttct

SEQ ID NO: 510298 - DNA, 74 bp, Homo sapiens
caaatgctgaggactcagaccagtctctgcaagattttggaaagacatcgttgatgataatgaagttcgtgacc

SEQ ID NO: 510299 - DNA, 101 bp, Homo sapiens
ctgagaggaactgagacccaagcagctcagtaaagatgtgaacctgaagatgccccggaacaaccagctgctgcacttcgccttccgggaggacaagcagt

SEQ ID NO: 510300 - DNA, 75 bp, Homo sapiens
tgaaagtggatgagcatctggccaaacaagatgcccagagagagcaggagattcggatgggtcagatggctatgg

SEQ ID NO: 510301 - DNA, 89 bp, Homo sapiens
cggacgagaagcgcagcaacgtgcggtgggaccacgagagcggtgaagagggaacagaaatctttgccccctgactttggaaatctcgt

SEQ ID NO: 510302 - DNA, 100 bp, Homo sapiens
tgcctgcagcctgccatgggacgtggggtccaccggtacaggaaggttgtgcaggaccagcgttccctgtgcaggcgccactgcgtttcctgcagattcc

SEQ ID NO: 510303 - DNA, 100 bp, Homo sapiens
ggaggtgaagttgctgctgttgggtcagcccaaggccaaccccactgtcactctgttcccgccctcctctgaggagctccaagccaacaaggccacacta

SEQ ID NO: 510304 - DNA, 100 bp, Homo sapiens
atgtcagacgcagccgtagacaccagctccgaaatcaccaccaagaatgttgtaccatctttgggtaggcagacttccctgacgacatcagtgataccca

SEQ ID NO: 510305 - DNA, 96 bp, Homo sapiens
aggaaccagatatcttgaaaagctgccagaaaggtcgggacttctctcatgatgacactttggatgttccaacgcaagttgagctgctcatcaaac

SEQ ID NO: 510306 - DNA, 102 bp, Homo sapiens
ggcctgtcctgagagtttctgttcctgagatgctagaggcagaggagttctaaagttcctgttgcttcagacaatggatgagcaatcacaaggaatgcaagg

SEQ ID NO: 510307 - DNA, 100 bp, Homo sapiens
cgcgcaggtgctagcggccccttcgccctgcagggagagcctggggatgtacaggagatgcctgctccagaatctcctcctggaagggatccagctgcaa

SEQ ID NO: 510308 - DNA, 90 bp, Homo sapiens
tgaggttggagttacctcccagttcatctccaagaaaggatggtaatagctgtaatgtgggaagcccctttgccaaggacttcctgccca

SEQ ID NO: 510309 - DNA, 73 bp, Homo sapiens
gataggagcaaccctgtaaaaccagccttagactatttttcaaacattgctgatcatctgggctgtgatccac

SEQ ID NO: 510310 - DNA, 76 bp, Homo sapiens
cttgtatcaggagttcttgcctctccttccaaacctcctgcaagaccacatggttgagaaaggagaaagagaaaat

SEQ ID NO: 510311 - DNA, 100 bp, Homo sapiens
gtttggacatactacatggatcagattcctgacattcagacaactgacttgtaactgacttataactgacttgtaatacactgctactatatcaaaccga

SEQ ID NO: 510312 - DNA, 100 bp, Homo sapiens
cgcggagccgcgcgtcgctgtctctatggccccggatccgagcgcaaagagcgcatcagcgaggaggtggggctgctgcagctccttggggaccccccgc

SEQ ID NO: 510313 - DNA, 100 bp, Homo sapiens
atccgagaccatgtactgcgcatacacaatcccgggcatgggcggcaactctttgatgtactactataatgggaaagcgacgcaaacatgcagatctttg

SEQ ID NO: 510314 - DNA, 96 bp, Homo sapiens
gcggctgagccgatgggcccggcacaggatcaggagaaggtctggggaaaataatccagagatttccacagaaggactgggatgatacaccttttc

SEQ ID NO: 510315 - DNA, 83 bp, Homo sapiens
ctggaatttagcgctcgcccagctagccgcaggcctccggtgtggctgtctctgatggtgtcatcaaggtgttcaacgacatg

SEQ ID NO: 510316 - DNA, 103 bp, Homo sapiens
cagattcgcagtggtcgcttcttctccttgatccgctttatcctcatccagaaccgggcaggcaagacgcgcctggccaagtggtacatgcagtttgatgatg

SEQ ID NO: 510317 - DNA, 75 bp, Homo sapiens
tttggcaccatttggacttagctgcctgtggagctgtttggaactgaggagctccagaggagatgtaatacctta

SEQ ID NO: 510318 - DNA, 94 bp, Homo sapiens
gcagaattaaatcctgagctagatgctttactaggccatgctttacaaggctccagcaaaccttcaccaatttacatcagttcctattcctcac

SEQ ID NO: 510319 - DNA, 75 bp, Homo sapiens
gtggactgtccggggccgggctcaggagcagaggaacggaaaacagttcttccttcaaagcatgcagtacctgaa

SEQ ID NO: 510320 - DNA, 96 bp, Homo sapiens
ggggctgaagaagcagttctacaaggcgagccaggttcttgggtgtctctggggagtccctgggccagaccttcctccagactccagcccacctct

SEQ ID NO: 510321 - DNA, 100 bp, Homo sapiens
gacgatctgccactgacagctgtcccgccctacaggctgcgggtgatcgcagaagcctacgctaccaaagacaagttggatggcttgaggactggtacta

SEQ ID NO: 510322 - DNA, 51 bp, Homo sapiens
gccaccgtgcacatccgaatgggtcatttcttcagatagctccccagctgt

SEQ ID NO: 510323 - DNA, 76 bp, Homo sapiens
cgaagttcagcccagaggagaaactcgctcgccttcagaagacaggatgttttagaagaatgtatgtctcttccca

SEQ ID NO: 510324 - DNA, 121 bp, Homo sapiens
ccataagaacaagaccacctcttggctagacccaaggcttgaccctcgttttggtcgcactggggcagtgttgtctggtgggtactggagaccttccgtgtcactgctgctctcaccatgg

SEQ ID NO: 510325 - DNA, 100 bp, Homo sapiens
ttgttggggagaagaggattggaggtgtcagtgttaaaggaacctctacaacgaaggtgaagccacggaagataaggaagagcaaccgaggtttcaatct

SEQ ID NO: 510326 - DNA, 80 bp, Homo sapiens
tcacaggagaactacacaatggcaccccagcctgcggtccatgtgcaggggcaggagccactgactgcctccatgctggc

SEQ ID NO: 510327 - DNA, 83 bp, Homo sapiens
ctccttttcgtttccggaaacatggggtctaatgtgatggaagagcaggacctgcgggacatcggcatcagcgacccacagca

SEQ ID NO: 510328 - DNA, 129 bp, Homo sapiens
tgtcattataccttcacccagcatttcatccctcgtcgaaaggattggattggcatctttagagtattctctactgccgctgatggtcaaacgcaagtggaaattaaagtgtgtcagggtgaaagagag

SEQ ID NO: 510329 - DNA, 101 bp, Homo sapiens
ggaggatgatgcagcatccaacgaagaatatgttcaagagggaataagatggacacccattgagtactttaataataaaatcgtatgtgacctcatagaga

SEQ ID NO: 510330 - DNA, 90 bp, Homo sapiens
gtccctggggcggcagcgcggacccgcccggagatgagaagatgctgtggacaattatcgagatagactaacagaataccccttctacac

SEQ ID NO: 510331 - DNA, 100 bp, Homo sapiens
tcatccatgtgaccatgaggaaatgagagaaatgcttacacacagaaatggtttacaagaagttaggtcaaacgcacctcgccctgatgaatttctcttg

SEQ ID NO: 510332 - DNA, 100 bp, Homo sapiens
cgaggactcgagcgctggctgcagcgacaccatggatctctcctttatggccgcgcagctaaaccatttacacagctggtgaaagaaatgcagcttcatc

SEQ ID NO: 510333 - DNA, 90 bp, Homo sapiens
ggcccggaaccggagtggggtcacaaatgaagactatgaccgtctgaggcctttatcttacccaatgaccgatgtcttccttatatgctt

SEQ ID NO: 510334 - DNA, 100 bp, Homo sapiens
gacagaacatttacttaacacatcatgaaggctagtttggatgtggaggggaatagactccatctatccatatgaggagtcagaaataccatcagaggag

SEQ ID NO: 510335 - DNA, 82 bp, Homo sapiens
tcggcagtccacccaccgccgccgcctcccagggctctctttacctatgaaggcaacagcaatgacatccgcgtggctggca

SEQ ID NO: 510336 - DNA, 133 bp, Homo sapiens
attttcacctcgcgtcgcgcccgggaggaaggaacgaggcaaggagctaaagcagcgtgcgttcagccctgggccttatgccagcctggaccatcttggaggcagtgtaggatcatggaagaactttgaatta

SEQ ID NO: 510337 - DNA, 100 bp, Homo sapiens
cttagccatgtcgtccttgatcagaagggtgatcagcaccgcgaaagccccaggggccattggaccctacagacagatgtgctggtgctgagctgtgatc

SEQ ID NO: 510338 - DNA, 96 bp, Homo sapiens
gcggagtcgtgcggttggtgggggagccctgccctcctggttcggcctccccgcgcactagaacggtgctggagaatctggtaaaagcaccattgt

SEQ ID NO: 510339 - DNA, 74 bp, Homo sapiens
agaggacagtcgagctgaagacaattttaacttggaaaagggtgaaggcaaatgtttgtcccaggagaaaccca

SEQ ID NO: 510340 - DNA, 75 bp, Homo sapiens
cactggatctgctgccagcattagcctggctcaatatctaatcaatgtcaggatgtggatgctgcctacatgagc

SEQ ID NO: 510341 - DNA, 101 bp, Homo sapiens
taaggaccaacctggggcccaagggcaccatgaagatgcagtcatggatcaggtaatgcagtttgttgagccaagtcggcagtttgtaaaggactccattc

SEQ ID NO: 510342 - DNA, 100 bp, Homo sapiens
ccctatctagaggatataccagaccctggagtgaactggattccatgtagagacccctggagtcaagctgtattagtcgacaggaccatttacatttcag

SEQ ID NO: 510343 - DNA, 100 bp, Homo sapiens
tggttcactgtgcatcgcccactccagaagtagcatggaaatggagggcatcttcaaccacaaagagaggcgtttccatcaaccagttttgcaaggagtt

SEQ ID NO: 510344 - DNA, 75 bp, Homo sapiens
ctagcgcgaccctgagccggcgcccgtggtccggccatggacgacctcgacagggtcagatgtgttactgggctg

SEQ ID NO: 510345 - DNA, 51 bp, Homo sapiens
aatcggatgtatcttgtattcatgatgggaaagggctccttcaagtatgcc

SEQ ID NO: 510346 - DNA, 100 bp, Homo sapiens
gaacctggagatgacactggcatccagactctccacagctgtggcctcagccccgagtccaagaagatcctgacacccgccctcaagaagcgggcccggg

SEQ ID NO: 510347 - DNA, 100 bp, Homo sapiens
aagaagtcagaaatctacagttactcacacaagaggcgtagaggctccggtgttttttgtgccaattgcctgaccacaaagacctctctctggcgaaaga

SEQ ID NO: 510348 - DNA, 99 bp, Homo sapiens
gaggacagcatggatgggctggagacaacagaaacagaaacgattgtggaaacagagtgaaccagaggaaatgcctccagaagcaaagatgaggatgaa

SEQ ID NO: 510349 - DNA, 76 bp, Homo sapiens
tcatgcaatcaaaatgaagttgaagcatcaggttgtctgcattcaaaagagcattctattaaagctaccttaattt

SEQ ID NO: 510350 - DNA, 100 bp, Homo sapiens
tttctgcccaccttcatgtgaagtttgccgccttgatgcagcatcagggtaagggactgttctgaagaacctttccatttagtgatcaagatatggaagc

SEQ ID NO: 510351 - DNA, 75 bp, Homo sapiens
gtcaaattccctgagttgaattatcagcttaaaattaaagtgtgcattgacaactgctacaggagctgagagacc

SEQ ID NO: 510352 - DNA, 99 bp, Homo sapiens
cagcgacccgctgctcagcgtcctcatgtggggggtaaaccactcgcggggatctgatgagcttctttcttctggcatcattaacggaccttttaccat

SEQ ID NO: 510353 - DNA, 75 bp, Homo sapiens
ccagagcgcagctatcggtgctttgcagctttggggccatttggatcacacgatgttttttcaagattttagacc

SEQ ID NO: 510354 - DNA, 90 bp, Homo sapiens
cctcctcaaatcgttgtgaaatgcctggccgccgccgccatctggttaagaccctcgtgttctgctccggcaaacatttctactccctgg

SEQ ID NO: 510355 - DNA, 75 bp, Homo sapiens
aaagagacctctacttagctcagcaattcttaccttgtgaatgaaatcctgtgccgttcttcagtctggagtgcc

SEQ ID NO: 510356 - DNA, 88 bp, Homo sapiens
gcagatggcggatgccctgcagtacctgcagaaggtctctggagacatcttcagcagggtcttcaagaagtcgagccctaactgcaag

SEQ ID NO: 510357 - DNA, 75 bp, Homo sapiens
cagaaaaattggtgtacctcaggcaccatactggacataccttttatgtgcactgggactttttatttaccagtc

SEQ ID NO: 510358 - DNA, 101 bp, Homo sapiens
ggtactttaagcagctatagtcttgtattgatggttttgcactatttacaaaggatgaattgtaaaagcaacatcagcttgaccagtataaaattacagtg

SEQ ID NO: 510359 - DNA, 75 bp, Homo sapiens
aatcgtattgccgcccagaagagccgacagaggcagacacagaaggcctccaagactgcagagaatgccaccagt

SEQ ID NO: 510360 - DNA, 140 bp, Homo sapiens
tgttcgtccgcggagatctctctcatctcgctcggctgcgggaaatcgggctgaagcgactgagtccgcgatggagcacccagtcagcttgaagagtttcaaatggaccctaccactgagaaatcaagatggcagtctac

SEQ ID NO: 510361 - DNA, 95 bp, Homo sapiens
aaagatgcagtacgccacggggccgctgctcaagttccagatttggtgacttaagagattaaaattaatttggttgctgttggttctgaacaaat

SEQ ID NO: 510362 - DNA, 87 bp, Homo sapiens
ctgcactattgtctcacctgatgctggtggagctaagagttttaaccgtgattggagataccacaaagaagaacgagtatggattac

SEQ ID NO: 510363 - DNA, 75 bp, Homo sapiens
tctcttctgatggacataatgggcttggaaaggttcctattatccttgccgtaaataaatgtgacaaagctgagg

SEQ ID NO: 510364 - DNA, 82 bp, Homo sapiens
gtattagataaacttcgctctgttacaactgatatgagtaaaattagcctaatcagaatgttagttcctgaaaacattgaca

SEQ ID NO: 510365 - DNA, 90 bp, Homo sapiens
cgccaccgccgcttctgcaaggtctcagggacgggctgcagccatgtcctattgccggcaggaagatgcctttgaagatgagaaaccccc

SEQ ID NO: 510366 - DNA, 74 bp, Homo sapiens
gggagcagaagggaggctccaagacctcatcaacaattaagctgctgacgacccagcgggtgagctgcgcccac

SEQ ID NO: 510367 - DNA, 113 bp, Homo sapiens
ggaagaacttcttcagaattagaaaggagctgcttcccaataaggaaacagcacaggctgttaccctcaccgtagcccaggccttcaaagtcgcctttgagttttggcaggtg

SEQ ID NO: 510368 - DNA, 98 bp, Homo sapiens
ctgctgctgcctgtggcccgggcggctgggagaagcggagtgttgactttgtgtggacagtaatgacctcacgtttccgattgcctgctggcagaacc

SEQ ID NO: 510369 - DNA, 98 bp, Homo sapiens
tcccgcgcgcgctgagtgggcggagcgaacagggggctggacaggattcaggagcagttccagaaaaatcccgacagttacaatggtgctgtccgaga

SEQ ID NO: 510370 - DNA, 82 bp, Homo sapiens
accgccgcggctccggccctggccccgatggctctgtgcaacggagactccaagtaccttctccaggcaaattccgttcccc

SEQ ID NO: 510371 - DNA, 97 bp, Homo sapiens
caagtccgtcatccaagctgtacagaagtcagaagaaggccatccattcaagggccttggacaagttgttactgactatgttcatggggatgccttg

SEQ ID NO: 510372 - DNA, 75 bp, Homo sapiens
gtgatgtgaagaggttcagctgtcctaatcctcactgccgaaagagctggagtggaccagagaaattgcttgctt

SEQ ID NO: 510373 - DNA, 75 bp, Homo sapiens
ggcatttcagtcactggtttgcagagtccagtgcacagccagaggacaacacatcacacacaagaaacagttgtg

SEQ ID NO: 510374 - DNA, 90 bp, Homo sapiens
tagaaaggttggagctgccgccgcctgcagtcggtgaccgcgcgactcggcgcccgcccgcggcatcctctggtatcacgattccaaaac

SEQ ID NO: 510375 - DNA, 71 bp, Homo sapiens
tggcccagaggatctcttctaacatccagaagatcacacagtgtttctatgcagatggtagtatatgtctg

SEQ ID NO: 510376 - DNA, 74 bp, Homo sapiens
ctgctctgcagcttctgttcaggaatcacatgcagcccaactacagattcttatggaattcctcaaggttgcaa

SEQ ID NO: 510377 - DNA, 98 bp, Homo sapiens
ggaggaggaggagcgggaacggcgagtgttcaaggatgtacaagaagaacttgaaggccctctacgtggtgcaccccaccagcttcatcaaggtcctg

SEQ ID NO: 510378 - DNA, 50 bp, Homo sapiens
ggcgtcgtggccttcagcacgttaatgcaaattccgggtagatatgcctg

SEQ ID NO: 510379 - DNA, 51 bp, Homo sapiens
gtgctgaatagtactttcattcttcaagggtagtatccacatgccattctt

SEQ ID NO: 510380 - DNA, 90 bp, Homo sapiens
tattgaaactagtgcaaaagctggatacaatgtaaagcagcgcatttgtagccatgaagtgccatcttgcccaatatgcctctatccacc

SEQ ID NO: 510381 - DNA, 89 bp, Homo sapiens
gctccagcgatcagagcgttaaggtggtgaaattgcctctacctttgatcacccagaactggtgaagcttggaagttgcaaacttatcg

SEQ ID NO: 510382 - DNA, 50 bp, Homo sapiens
gtgcaaacccgagagaactggcaataccaagtttccaggcccgaagagca

SEQ ID NO: 510383 - DNA, 100 bp, Homo sapiens
gcccctcgcgtccggagtccccgtggccagatcgcccaggaccacaccgcagcgtaactgcaggcctctcagcgaaaaagggggaaagcaaagacccggg

SEQ ID NO: 510384 - DNA, 75 bp, Homo sapiens
agagtgcctcctttctcatcaggaaaccacacactgagagcctagagttgcaggatcatccagcagctcgtcaac

SEQ ID NO: 510385 - DNA, 76 bp, Homo sapiens
ggggggagcctcagcaggattgctgtgtgaaaaccgagctgctgggagaagggtctcctatggacagaagtgcggg

SEQ ID NO: 510386 - DNA, 100 bp, Homo sapiens
tggataaattccggggtgcacacatccgcttcgagtttcggcattgttccagcaattaagttggaatatgcaaggttggttaagttggcccaagaagaca

SEQ ID NO: 510387 - DNA, 83 bp, Homo sapiens
atgattattggcattcctgtgtatgtgggccgcaagtctattatcctcccagtccacaacgctgaaccgtggctggacgaatg

SEQ ID NO: 510388 - DNA, 100 bp, Homo sapiens
ctggacggcgagcgcgagcggcgcgagaaagactgagcagggggaggaacatttaagctgatggaagtggaagtggaagttgctgtacattggcagcaag

SEQ ID NO: 510389 - DNA, 99 bp, Homo sapiens
gcgggctttgccgagcgcagagctgcagccgccgagccggacgtgtccgcgaagatggcgggccgggagctccttcccttaacagagctgagagaggca

SEQ ID NO: 510390 - DNA, 82 bp, Homo sapiens
cacaccacgctgagcctcctgaagcgggccaaggtgcacatcaagggactggtgattgcagctggaagtgcccatgaccgag

SEQ ID NO: 510391 - DNA, 80 bp, Homo sapiens
ttggatatttgcttggaaaaacgtgtgggtacgaccttgggaacaagctgccaataatgtctgcaaaaagtgaattcttc

SEQ ID NO: 510392 - DNA, 100 bp, Homo sapiens
tttactgtcaagacatttcttcggcattctgcaacagatgaagaagatgactttatgtgtaagaaggcggcctctaaatcaaaagagaatggaagatcta

SEQ ID NO: 510393 - DNA, 146 bp, Homo sapiens
attggcgccgtgaagtgctcgtcaccgccccctcctgccccttcatgcatgcgcggaggccgcctgctagcaagctccagagcctggcctgcgctccgcctttaggtgacagctggatctgcaagtctgtcctttctgaaggccac

SEQ ID NO: 510394 - DNA, 100 bp, Homo sapiens
cttgggcacagctccacccatcaccccagaacaccccgcagaaagtgcctgtgcatcagatgcaggacagctggagcacacattgatgaatcattgttcc

SEQ ID NO: 510395 - DNA, 96 bp, Homo sapiens
ccgcctggcaggccctgcgcaccagggcctgaccaaggactacggcaactcacccctgcaccgcttcaagaagccgggctccaagaacttccagaa

SEQ ID NO: 510396 - DNA, 97 bp, Homo sapiens
ataacataaatgcagctacagctgtggctctacaggagcgagaacccgagcagcgccatgagcaacactaccgtcgtccccagcactgcaggtccgg

SEQ ID NO: 510397 - DNA, 101 bp, Homo sapiens
gctgctgtgtgggaagaagatttgtaaagaaaactcttaggctgacaaacgggctcatcataatgcactggaacgaaaacgtagggaccacatcaaagaca

SEQ ID NO: 510398 - DNA, 100 bp, Homo sapiens
taactcccgcaggatctcagggcctgccgccccattatgatgatgtcgaggaaccactcgttttgactattattttatcactctttgtgaaacttcacaa

SEQ ID NO: 510399 - DNA, 74 bp, Homo sapiens
cggattccagactcgtgggggaaaggctggatgtcatccaagtctccaagaagttcctgccaggcatggccatt

SEQ ID NO: 510400 - DNA, 102 bp, Homo sapiens
taaaagacgaaataccaccggaactggtcgaatgaggcacctaaaaattgtataccgcagattcaggcatgcttccagaagagtggtgcatcagtggttgct

SEQ ID NO: 510401 - DNA, 101 bp, Homo sapiens
aagtagcagcttttggaggcagtaatattgagcctagtgttcgcagctgcttccaacaggtcaacaaaaatctctcatttacttcaccaccagcagtttcc

SEQ ID NO: 510402 - DNA, 89 bp, Homo sapiens
gccgggcgacctgggcaccagcaggacccgaggccaggagccaggggcccagaaggttccttgcattgactccatggagagtatatcac

SEQ ID NO: 510403 - DNA, 96 bp, Homo sapiens
ggcttgtggtgcggcctcaccatacaggaacagggcagacgttagcgtgagtgatcactctcaatcccgggtacgccatgaagtgcctggacaaaa

SEQ ID NO: 510404 - DNA, 97 bp, Homo sapiens
cctcctcagtgcgaagaagctgcagccgcacctggccaaggcaccagcagaaccaaaatcgtgtgtggtggcagatcctcctcttcctgcacaacct

SEQ ID NO: 510405 - DNA, 95 bp, Homo sapiens
cctggcctcagcccgccacatcaccctgacctgcttacgcccagatctgcttggctttgaggaagagtggcagtactgcctcactgcataaggga

SEQ ID NO: 510406 - DNA, 50 bp, Homo sapiens
cggcagggcttaaagttccgggacccatggatgaaggaccagatcttgat

SEQ ID NO: 510407 - DNA, 83 bp, Homo sapiens
ggacagtatgaggcaagcgcagggggacggggaccagcagctgtcgccgccgctctcagcaccgaacaagatttgtgatgaaa

SEQ ID NO: 510408 - DNA, 88 bp, Homo sapiens
gcagtgtctgagaccatgcagtcagctacgggaattcagtactctgtaacacccagctaccaggacaatcctccaaacacagactgtt

SEQ ID NO: 510409 - DNA, 80 bp, Homo sapiens
gacttcacttttgagtgcaactgccttccagcccaataggggcacaaaacgtccccgggatgatgaagaggaggagcaga

SEQ ID NO: 510410 - DNA, 98 bp, Homo sapiens
gaagagtgagagagagctattagagattgtgaagaagaatttcgatctccgccctggggtcattgtcagaccttgccaccatggaagaaagagtacaa

SEQ ID NO: 510411 - DNA, 95 bp, Homo sapiens
tggatctgcgatctgtttgtgcctgtcagagttgttcagtataatatcaatacagaagaattatattcctacctaaaggaattcatccacatact

SEQ ID NO: 510412 - DNA, 75 bp, Homo sapiens
gcaccttcaaggccaaactatgcagttaattactacgaagctgggaatttcaggtcatgtgcacagattaatggc

SEQ ID NO: 510413 - DNA, 75 bp, Homo sapiens
ggaggaagcaggagcagcccaagcgccttccctcacatgaaggatttgggggcagagcacttggcaggtcatgaa

SEQ ID NO: 510414 - DNA, 97 bp, Homo sapiens
aacaccaggacatcccagagtctgggaaatgtttcccggaggaaatgacaattacctgacgatcacagggccttcgcaccccttcctgtcaggggcc

SEQ ID NO: 510415 - DNA, 75 bp, Homo sapiens
ggcagcaagaacagagagagaggtggacagatctgagagatactgagggggggctgtcggggggctgttaggtgc

SEQ ID NO: 510416 - DNA, 75 bp, Homo sapiens
cctgggacgctgctgctgttcagggtcacaccccaagggggcgcggggaccttaccgttgtcccaagcttccagc

SEQ ID NO: 510417 - DNA, 90 bp, Homo sapiens
tcaagagaagaatgttacttgggcgtcataacttagagcaggaccttgtcagggaggctaactgtgatctcagacggcaaatagatgaac

SEQ ID NO: 510418 - DNA, 96 bp, Homo sapiens
gtttgaggactgtcccgatggcagcgatgaagagaactgcagaagagaatggagactacacatatgtggaaagagtgaagatacccttggatcatg

SEQ ID NO: 510419 - DNA, 97 bp, Homo sapiens
atccaagatggcgacggcgatggtgagccctattcccagaggcaggtggtgctgaccctgtaacccaaaggaggaaacagctggctaagctcatcat

SEQ ID NO: 510420 - DNA, 100 bp, Homo sapiens
ctataacctccttgaaaaactgggatacatggatctggcctcaagactggtggtgtcagcttcctctggtgcaaccagcaagtcttccagtatgaatccc

SEQ ID NO: 510421 - DNA, 100 bp, Homo sapiens
gcactttcagaaggttatgagacaagaagacattagtgagatatggtttgaatatgaaggcacaccactgaaatgtaggcagtactcatcttggccctgg

SEQ ID NO: 510422 - DNA, 98 bp, Homo sapiens
tgaggcccccgcctgtggccggtgacctccctcctccgagggaggggggttgtgaccccaggagttaggacctggaaatgtacagaaagaagtctcat

SEQ ID NO: 510423 - DNA, 104 bp, Homo sapiens
tggactctgagtcgtcttggtcccaggagccagtagtgaaggcaacagtctgcccacctgtggacaccagcactatggagatgaccgccatggccacggaggac

SEQ ID NO: 510424 - DNA, 100 bp, Homo sapiens
cacctgcagctctgctgagagagtgcaagccgtgggggtaaaccagacttgaatacaacattgccaattagacaaacagcatcaattttcaaacaaccgg

SEQ ID NO: 510425 - DNA, 101 bp, Homo sapiens
gcgtctgattggcggaaccgcgctgttgcatctggaggtggtggggttggagatggtgttcaagaaccaaccacaggcaactggagaggaatgctgaaaac

SEQ ID NO: 510426 - DNA, 74 bp, Homo sapiens
ccccttcagtgacccaaagaacggggatctgacgagcttttctctacttgtgtcactaacggaccgtttatcat

SEQ ID NO: 510427 - DNA, 96 bp, Homo sapiens
aatttttcatcctctggaagagaagatgtagatgtgagaacattaggaaatgttggtcgcattatgtttcagctcttctcagacatatgtccaaaa

SEQ ID NO: 510428 - DNA, 100 bp, Homo sapiens
cggacgacagaagcgactttggtgagactctgctggaaaacctcatgctggacaaagatggccacatcaagatcactgactttggcctctgcaaagaggg

SEQ ID NO: 510429 - DNA, 100 bp, Homo sapiens
aacattcaagaaaacacacagactccaactgtacaagaggagagtgaagaggaagaggctacggaaacaggccgagaagaacgtggagaagaaaattgac

SEQ ID NO: 510430 - DNA, 75 bp, Homo sapiens
gagtcgcgcttcttccccactcccgagacagatgttcgtgctgccagagagcagatcagtattggaggactggcg

SEQ ID NO: 510431 - DNA, 82 bp, Homo sapiens
ccctcagcacatggtgggggccacaccatttgccgtggccaggctagagatcgaacggttggaagtaagcagccttgcccaa

SEQ ID NO: 510432 - DNA, 49 bp, Homo sapiens
gaggacaagaccatcgagctcatgatcctgaggtgcagaggcaattccc

SEQ ID NO: 510433 - DNA, 100 bp, Homo sapiens
gtttacacatgtggtttgaacaccaaggggcaactgggccatgagagggaaggaaacaagccagagcacctgaaggagcgcttggccaatgagctttcgg

SEQ ID NO: 510434 - DNA, 75 bp, Homo sapiens
tctcgggggccgctctgggatcccggccaccagcaattgtccggtgcttgaggaatccaaagccctcgtgcgctg

SEQ ID NO: 510435 - DNA, 82 bp, Homo sapiens
tgcacagacagctgcgaccagagactggagatgtgaagttcatttccaatccgccctccatggtggcagcggggagcgtggt

SEQ ID NO: 510436 - DNA, 82 bp, Homo sapiens
tcctcggatcccgagcgcggggaggcagaccgggtttccaggcctgaggtgcccgccctggccccaggagaatgaaccagcc

SEQ ID NO: 510437 - DNA, 98 bp, Homo sapiens
gagtttctgcagcatggctgggcctaacctgatcgcaattgggtctagtgaatctgcacagaaggcccttaaggaatgtttacccttgcggaagttgc

SEQ ID NO: 510438 - DNA, 75 bp, Homo sapiens
cggaggtggcagccatctccttctcggagacagtgtttcacaaaatgattttccttctgaagctcccatctcctt

SEQ ID NO: 510439 - DNA, 100 bp, Homo sapiens
ctcccccatcaaaggaaaggggaaaatgtctcagtcgaaagtattaattttaaagacccacagtttgctgaagattacatttttaaagctgtaatgcttc

SEQ ID NO: 510440 - DNA, 82 bp, Homo sapiens
ctgaaggacgcgcaggagaagctggagctcacggagaagaaggcctccgacgtgaagctttgttctaagaatatttgtttca

SEQ ID NO: 510441 - DNA, 83 bp, Homo sapiens
ggagccggtctatggactttccgaagacgagcttttctgggagaagaggctacaaggacttagtgcatcagatgtaacagaac

SEQ ID NO: 510442 - DNA, 100 bp, Homo sapiens
aacaatcaggcaatggtttgaataccttactacatttgttccagaccctgcttttacatggaaacatcatcacctctcttagaatggcacctgcttacct

SEQ ID NO: 510443 - DNA, 83 bp, Homo sapiens
gaagagaccccaagagtgttgagcagcccatcgtgcttaaagaaggggactggtgattgcagctggaagtgcccatgaccgag

SEQ ID NO: 510444 - DNA, 100 bp, Homo sapiens
agtgagaagcaagaaggccctggacacagcaatatctctgggctttcacagattagaagcccaggacccaggaaggagacacaggaaatttattcaaagt

SEQ ID NO: 510445 - DNA, 75 bp, Homo sapiens
gcctggctaaggaaaccctattacctccagtataccaaatactacattcaccgaattccaagaagccgggaggtt

SEQ ID NO: 510446 - DNA, 100 bp, Homo sapiens
tcttggcacaaatactattatggataagatgatggactcagaattcatgattgaagaaatgcaggttagtttaaactttgaaggaaatttttaaggtggc

SEQ ID NO: 510447 - DNA, 49 bp, Homo sapiens
ccaactcccagcggagagcaaggactatgatgatggatatggcactgct

SEQ ID NO: 510448 - DNA, 90 bp, Homo sapiens
ctctgacaagaccaagtactaccttcaaggggagttgctggaagccatcaaacgtgactttggttcctttgacaagtttaaggagaagct

SEQ ID NO: 510449 - DNA, 100 bp, Homo sapiens
gaagaaccagacctggactttcttagtgggttacccagaccaaactttggccatttaacggatccatttgacacaccagcatttaacaaactttatagag

SEQ ID NO: 510450 - DNA, 100 bp, Homo sapiens
caggcgggaagaaggaggcatcgtccagtaagaccgtcccggacgggaagctggtgaaaggtttttctattgggaaagctactgatcggatggatgcttt

SEQ ID NO: 510451 - DNA, 101 bp, Homo sapiens
cggagaagagagctctggggtcgacacggtgaaaaaccatttcgctgtgatgaatgtggtatgagattcatacaaaaatatcatatggaaaggcataagag

SEQ ID NO: 510452 - DNA, 101 bp, Homo sapiens
ggctacttctcgctctgcttcatcccactattattttggcacaacaggaagaggaatttgcccagagtgccatacgctatggacaagtcacaccactagaa

SEQ ID NO: 510453 - DNA, 98 bp, Homo sapiens
ggggactgttggtctcggccctgcggaaggccaaggcgaacctagacaagaataagcagacgctggagaaagagaacgcagacctggccggggagctg

SEQ ID NO: 510454 - DNA, 50 bp, Homo sapiens
ggataatataatcaactcctctgcctgaacgctcactctggggaagctgg

SEQ ID NO: 510455 - DNA, 96 bp, Homo sapiens
gacaccaggacagaaaagacagtgttctgctttcatggagttcacagaagagtcgaggagggagatgaataagcgtctaacagaggaacaagccaa

SEQ ID NO: 510456 - DNA, 98 bp, Homo sapiens
agactattcagcacaatcctaatgggcgctgtccctttccccccaacacatcgcttgacatctgaagaagtatttgatttggatgggatacccagggt

SEQ ID NO: 510457 - DNA, 97 bp, Homo sapiens
ggaaacttgatgcttctgggccaccatttgccagggcctcgctcgagattccatcacccagcacaaggtctgtgcccctgaaaactacctattgtca

SEQ ID NO: 510458 - DNA, 80 bp, Homo sapiens
ctgcagccatgaagccaaccgtcccgagaccatggtgaatccgggcagcagctcgcagccgcccccggtgacggccggct

SEQ ID NO: 510459 - DNA, 83 bp, Homo sapiens
tctgaacttccctggtcgaacagttttttctaatggctattcaaggtcagcccaaggccaaccccactgtcactctgttcccg

SEQ ID NO: 510460 - DNA, 90 bp, Homo sapiens
cagagacaccaggacagaaaagacagtgttctgctttcatggagttcacagaagagtcgaggagtgttgagagcagattggacctgagga

SEQ ID NO: 510461 - DNA, 100 bp, Homo sapiens
cgcagacaggaccattcaggaggctgatcaggatggggacagtgccatatctttcacagaatttgttaagctatccgtggtcctgaaccagttatgtgtg

SEQ ID NO: 510462 - DNA, 75 bp, Homo sapiens
gactacgcggccgcggagacctacctgcggcgtcggcagctgctgctccgaggtttggtgcacctcgatttggag

SEQ ID NO: 510463 - DNA, 100 bp, Homo sapiens
cacaatgaagctgttagtcattacaagttgctgcttcagcaaaacaagaaatttcaaaacttgatcaaggtcacggaggtagtcatgatctatgacgccg

SEQ ID NO: 510464 - DNA, 51 bp, Homo sapiens
gaaatctgttgcttcttgcatggtgagaaagatcagtctaaagaaaaggag

SEQ ID NO: 510465 - DNA, 96 bp, Homo sapiens
gctgcaggtgccttcatcctcaccctcccacacttcctctccgagccctaccagtacaccttggccagcactgtcgggaagacgtctctgattacg

SEQ ID NO: 510466 - DNA, 75 bp, Homo sapiens
gacgaagccacttgtccaaggtcacgccgctgggaaaagtctgaagacgcttatgtccaaggggatcctgcaggt

SEQ ID NO: 510467 - DNA, 87 bp, Homo sapiens
cgggccccccagcatgaagaccccggcggacacagatggtcatcatgggccagtgctactacaacgagaccatcggcttcttctata

SEQ ID NO: 510468 - DNA, 101 bp, Homo sapiens
ggcctggggagccgtggccctttcgggggaccttcgagacaaggctgtcagcccctagcgctgtgcttcgccgtgagccgctcgctgctgctgacgtgcct

SEQ ID NO: 510469 - DNA, 59 bp, Homo sapiens
tggaaagacgctcgtcaccaggacccaaggaaccatgtttgaagaacctgaagatccca

SEQ ID NO: 510470 - DNA, 80 bp, Homo sapiens
gccccgcggctgggaggagggcttcacggaggagggcgccagctacttcatcgagtcgttgaggacttccacatggagat

SEQ ID NO: 510471 - DNA, 101 bp, Homo sapiens
ccttccttctgtatatggctgcgccccaaatcaggtttcttcttgaagggctcaaggaatgaagcatcccacaaaatgatcctgctgaataattgccagat

SEQ ID NO: 510472 - DNA, 75 bp, Homo sapiens
ggaagcagctggcttcactgctcaggcagtcgatgatgtgaagaaaggttacatcaaagcagaagaaaagtccta

SEQ ID NO: 510473 - DNA, 82 bp, Homo sapiens
atctgtcttcggtggactccttcggcagtccacccaccgccgccgcctcccagcagtcccagctatctgacttcatgtgaaa

SEQ ID NO: 510474 - DNA, 75 bp, Homo sapiens
gcagctaggcatcaagtacatcgggatgaggaatgagcaagcgtcaggtcaattcagtgaagatatgatacccac

SEQ ID NO: 510475 - DNA, 75 bp, Homo sapiens
gaaacctggagcggtcagagcaggttgtttttgagcacgttcactctcgcagtgtcagctggggctgttttgctt

SEQ ID NO: 510476 - DNA, 83 bp, Homo sapiens
caaaaactcaggcttcgccacctgcgtgcaaagcctttccacgaagagtcctcagccttctccctccagccggaagagccccc

SEQ ID NO: 510477 - DNA, 89 bp, Homo sapiens
cccagctctgcagccacatactatccgtttgttcaggaaccaccagtgacagacctatgtgcttcccaagctgtatgtgaagctacatt

SEQ ID NO: 510478 - DNA, 116 bp, Homo sapiens
ctggatcggattttggaggcattgaagctgctgctgagcccgggagtgaattttgaagattgcaccggtcgacaaaggacagcctatttttccctcgacacccgattcaaagtggg

SEQ ID NO: 510479 - DNA, 100 bp, Homo sapiens
ctgctggattgctgcaaggctgagggacgagaacgaggaagaaatctttcctgttttctgctctgtatgctgcctttatattcggtggtcggcacctaat

SEQ ID NO: 510480 - DNA, 98 bp, Homo sapiens
cttgacacacatcataaactctgcacattcattctcaaaaacccacctgtcggaattgagatgggcgattggcaggaagtctgggatgagaacacggg

SEQ ID NO: 510481 - DNA, 91 bp, Homo sapiens
gctcagcatggtcagtgccgtttaacctttattgtggtggagtccaccccgctgtggtcaaaatgcagatcttcgtgaaaacccttaccgg

SEQ ID NO: 510482 - DNA, 87 bp, Homo sapiens
ttgagaggatgaggcgtggtgcttatggtggagtctgtaggtatattgttagagccatgcagtgaccgtggtgatagtgaagatggc

SEQ ID NO: 510483 - DNA, 88 bp, Homo sapiens
gtgtattgcatcaggctgagagcagacacgatgtgaagatccattgctcccattgaggcagacaagccaccaaaaccctcaacagggg

SEQ ID NO: 510484 - DNA, 100 bp, Homo sapiens
cctgcatggattgggagatactggctccctgtgctgtcaggaatctacaggacttggctcgtatttacattcgacgcacacttagaaatttcataaatga

SEQ ID NO: 510485 - DNA, 90 bp, Homo sapiens
cagcgctctgcctcttcgacgtggatgggaccctcaccgccccgcggcagagaatgccacgggtgacctggccaccagcaggaatgcagc

SEQ ID NO: 510486 - DNA, 97 bp, Homo sapiens
gagtacggtctcacagacaacgttgagcgagtaaccagctcataaatcacatcgaacagtttttggatactaatgaaacaccgtattttatgaagag

SEQ ID NO: 510487 - DNA, 88 bp, Homo sapiens
tcattttggaaaatatagagatgtagcagagtgtgggactccagatgtggacttttggattatccccatgatccaaggttttgtgcag

SEQ ID NO: 510488 - DNA, 50 bp, Homo sapiens
tccagcatcatgattacctcccagttttctggatatgccgcagaaggatc

SEQ ID NO: 510489 - DNA, 100 bp, Homo sapiens
ggacaacgtttattactatgatgaagaaggaggcggagaagaggaccaggacttcagggccacaggtgctgccaagatgctccagggcacctgctccgtg

SEQ ID NO: 510490 - DNA, 100 bp, Homo sapiens
gtcccgtggttccagcgccggttttgaccgccacattaccattttttcacccgagggtcggctctaccaagtaggagcctgcagacagggggatttgcct

SEQ ID NO: 510491 - DNA, 75 bp, Homo sapiens
gttcttgggacaaacttcatttgaaccaaaaacttttgctagaaaatcagcttttacgagagaaaactcatggcc

SEQ ID NO: 510492 - DNA, 99 bp, Homo sapiens
cttagttattcgtctgactgatgacacggatccattttttttatataaccttgttatatctgaggaagattttcaaagtgagggccccaaggctgttgc

SEQ ID NO: 510493 - DNA, 50 bp, Homo sapiens
caggcatcatccgctatgcaattgggatgcaagtgctgctggaccaggcg

SEQ ID NO: 510494 - DNA, 100 bp, Homo sapiens
cttggctgaagaggaaataaaaacagaacaggaggtggtagagggcatggatatctctactcgctccaaaggtaaagtgaatgccgaagacagaagattt

SEQ ID NO: 510495 - DNA, 90 bp, Homo sapiens
acacataggcttgctattgacaagcgattccgagtgtttactaagcctgttgaccctgatgaggcttcacaggctgctcaagaagccgag

SEQ ID NO: 510496 - DNA, 90 bp, Homo sapiens
cagacagcggcatacagaatgcctatgaccggcgtcgagaatttcaactggcagaggtggaggagacactgaagcgactgcagagccaga

SEQ ID NO: 510497 - DNA, 90 bp, Homo sapiens
ccactaaattcttctcccagtctccgggcgcaagtgcctccccagtttatttccccccaggactcctagaaggaccccacccccctcccc

SEQ ID NO: 510498 - DNA, 82 bp, Homo sapiens
ctatgtgaaactgctttctaaaacaccagaactcaacctgcccaagaagatgaaaggattgttcttgttgacaacaaatgta

SEQ ID NO: 510499 - DNA, 74 bp, Homo sapiens
ggagaaacatgaagttcgggactatcttctgaattaaacaaccaccatgtcgagcaaaaaggcaaagaccaaga

SEQ ID NO: 510500 - DNA, 75 bp, Homo sapiens
gcccagatggctttgtgtgtgaacccagcgggtgccgcttctccacccgaggcttccacctccaacgagccatgt

SEQ ID NO: 510501 - DNA, 73 bp, Homo sapiens
gaaggcaactaccgcgagctgcgctggttcaccccgtggtcgaggagtcgcggatgtgatgctggtacaaccc

SEQ ID NO: 510502 - DNA, 100 bp, Homo sapiens
gtttcaacttgagagctctcaaatacttggtcatggatgaagccgaccgaatactgaatatggattttgagacagaggcagagtttacagccatgcggga

SEQ ID NO: 510503 - DNA, 98 bp, Homo sapiens
ttgattcccaagtaattatttatggaaaacaagttataatcaatctggtggtccagcatgacccatgtcggggcggagcagggtattggaacagcctt

SEQ ID NO: 510504 - DNA, 83 bp, Homo sapiens
gagcatcctgaggattatgtggctcatgaagaaccattgaagatagaagaagtcagagatgccatggaaaatgaaatgagaac

SEQ ID NO: 510505 - DNA, 75 bp, Homo sapiens
ttccaataagtgggtgtgtgagcaaaatgatgcttcaacacccaggccaggtctctgcctcggaagtgagtgctt

SEQ ID NO: 510506 - DNA, 74 bp, Homo sapiens
ggggcctgggacgcgccccgaggaggagcggggcggcgcaggcgatgcgtctgttactagagtggagagtctac

SEQ ID NO: 510507 - DNA, 51 bp, Homo sapiens
tggggcccaagaaaaagcacctggactgatgtccatgaggagccccatctc

SEQ ID NO: 510508 - DNA, 75 bp, Homo sapiens
tcaaaaggcaaagtgtgttttgagatgaaggagtccaatgtgctgattgctgctaacagtcagggtacaattaag

SEQ ID NO: 510509 - DNA, 74 bp, Homo sapiens
aaggaactggtacttggagtctggacatctgaaacttgcaattaccagctctggctgggtcgccacaacttgtt

SEQ ID NO: 510510 - DNA, 74 bp, Homo sapiens
cctctgtgccgggaaagacatcacataccttcagcacttctcacaatccccaactggaccctaggcaaaagtga

SEQ ID NO: 510511 - DNA, 75 bp, Homo sapiens
cgcggcggcaccgggaggccgggccgagcgtaattcgccaaaatgacgaacacaaagggaaagaggagaggcacc

SEQ ID NO: 510512 - DNA, 50 bp, Homo sapiens
ccccttaaacttatgcctcaagactgattctgaaaaagagttccacgtcc

SEQ ID NO: 510513 - DNA, 96 bp, Homo sapiens
ttggtttcgggatctcggtgctgcagacggcgagacctcctgcacaggtgtctcccagtctgctaaagccctaaggccatcaccatggacttccag

SEQ ID NO: 510514 - DNA, 98 bp, Homo sapiens
tttcaaggatatgctgtattcagctcaggaccaggcaccttctgtggaaggtggctttttctcaagtatattttccagtctgtttggaactcgggaaa

SEQ ID NO: 510515 - DNA, 95 bp, Homo sapiens
ctccagcacaatgttctgcaggtccagttggggatgataatcaagagactgaaatctcatccttctatcatcatatggagtggcaataatgaaaa

SEQ ID NO: 510516 - DNA, 75 bp, Homo sapiens
gccgagggcaggacgaacttcaccagctaggacttctctcaaacttgtgtgctgaggagactcagatgttggcct

SEQ ID NO: 510517 - DNA, 74 bp, Homo sapiens
atccacctcctgctgacctgtgctggtattgcaggcctgaccgccgctgcctacagagtcacactcaatcctcc

SEQ ID NO: 510518 - DNA, 100 bp, Homo sapiens
aggaatccaccttcttacgctatggcagtgataatatgcagcatgcatactgggaactgaagagagaaatgtctaatttacatctggtgactcaagtaca

SEQ ID NO: 510519 - DNA, 75 bp, Homo sapiens
atggtagctgggatgttagggctcagccgatctgcacaatgcaaccaacctgcggtctcggtccctgtcgggcac

SEQ ID NO: 510520 - DNA, 83 bp, Homo sapiens
cgacaagccgctggcagccgcggatctcaccgccgctcaggcccagctcaacattggcaatgtgctccctgtgggcaccatgc

SEQ ID NO: 510521 - DNA, 100 bp, Homo sapiens
cggtgccgagaagcagctgcgaggacagaactgtaccgctctctttttggccagctccaccctcccgacgaaggccacggggattgacatcgcccacctc

SEQ ID NO: 510522 - DNA, 100 bp, Homo sapiens
cccattcctttaaatccggagggggaaaaaatcccaaggtctgcaaagggtaacaagatgctcaactatagtgctcccagtgcagggggttgcctgctgg

SEQ ID NO: 510523 - DNA, 100 bp, Homo sapiens
tgagcttatgacatacattaatgaaaactgggatagattgcaccctggagagccagaggaagagcatttggcctgtgatatcaccggatccagttcatcc

SEQ ID NO: 510524 - DNA, 98 bp, Homo sapiens
ctaaggctgtggcatttggagaaatgggcttggattactcttacaagtgcaccacgcctgtcccagaacagcacaagacagggtctcactctgtcacc

SEQ ID NO: 510525 - DNA, 82 bp, Homo sapiens
gtggaaaggatggcccccaaagtcagaagttgagtagcaggggcctaggagggctcgaagccttcacagcgatggcagagaa

SEQ ID NO: 510526 - DNA, 87 bp, Homo sapiens
cagatgttgtcaaggtggcctaccaggaggccaggggtgtcgccatggtctgcagactcgtgaatgacgtctaccgcgtgtataatc

SEQ ID NO: 510527 - DNA, 97 bp, Homo sapiens
tgaagcccgagaggagccacaatggagacgccgccgctgcctcccgcttcagacacttctggaaatgaagcaagtgaaatcgaatctgtaaaaatta

SEQ ID NO: 510528 - DNA, 82 bp, Homo sapiens
tggagaagccacgagaggagctcttccagctgtttggctacggagacgtgtgcaggcctgagtgttccttccagcatgtcgg

SEQ ID NO: 510529 - DNA, 100 bp, Homo sapiens
gcgtcctcagcacgcttgaccctaagcaggaggcagtgcgggtccttggtgaattttgtcatggttatttaaggaaccttgcctagaagtcccaacttgc

SEQ ID NO: 510530 - DNA, 83 bp, Homo sapiens
cttttaaacatcctgatgaatggagagcatgaattacatgaatgacagtcttcgaaccaatgtgtttgttcgatttcaaccag

SEQ ID NO: 510531 - DNA, 50 bp, Homo sapiens
ggtgatttctgcatttccatctgagtttctacagcagtataatcactaca

SEQ ID NO: 510532 - DNA, 80 bp, Homo sapiens
ccattaactagtaaagcagtacaagagctccctccttgggcctgtggattcataatggatacaaattctgacccaaagaa

SEQ ID NO: 510533 - DNA, 50 bp, Homo sapiens
gcttgggattcactccctaaccaaaggaatcctatgaggatggttgtgag

SEQ ID NO: 510534 - DNA, 78 bp, Homo sapiens
gcggaggccagggaggaagatgtcgtaatgagcgcactgtgacttctgccgtgttcaccgtgggagacaacgtggttt

SEQ ID NO: 510535 - DNA, 73 bp, Homo sapiens
ttcgcttcaccttcacagcagccctgcgagtgttcggctaatgaatgagttcactaatatgccagtacctcca

SEQ ID NO: 510536 - DNA, 93 bp, Homo sapiens
cttggcctatggaaaacggggatttccaccatctgtcccaggtgcaggtgatggtcctaccagtgtgtctgttgaggtcacccgtcctaaagt

SEQ ID NO: 510537 - DNA, 75 bp, Homo sapiens
ctaagtgccttaagagaggatcgcccaatccacatgcttttccaggttagaaccatcagagagccttgaggaaaa

SEQ ID NO: 510538 - DNA, 83 bp, Homo sapiens
gccgcagcacccctaccagtgggcgaagcccaagcccctgtcccctacgtcctacatgaggttcccaacaaggctacgcagaa

SEQ ID NO: 510539 - DNA, 118 bp, Homo sapiens
gcagaatttgtatagagatgtgatgttggagaactacagaaacctggtctccctaggtgtcatggagaaactccagctgggcccagagattctgcagcgggaaaatccaaggcttatt

SEQ ID NO: 510540 - DNA, 75 bp, Homo sapiens
ctgggacaccgcggaagtcgggaaatgcttgccttgcgccatggactggcagccagacgagcagggcctgcagca

SEQ ID NO: 510541 - DNA, 100 bp, Homo sapiens
tattctttttgacaattcattttcctacagactaccccttcaaaccacctaagctgaggcaacttctcctagaatctcaatctcagctcgatgccgccaa

SEQ ID NO: 510542 - DNA, 74 bp, Homo sapiens
cgaggaagccggtgttgccgagatcacttaggaaaatggctgttggtatgatcctagcatgcctggcatttgca

SEQ ID NO: 510543 - DNA, 98 bp, Homo sapiens
gagaattccatcatggacctgacccaactgatacagccccaggagagcgaggatgaactggaagaggcaaatggaaacaatcccattgacattgaggt

SEQ ID NO: 510544 - DNA, 95 bp, Homo sapiens
ttggagccccggagtggggtgtcggcgcctcattcgggtggagctgagccggagacagtttaagctatgaagaaggacatccctcacactctgaa

SEQ ID NO: 510545 - DNA, 100 bp, Homo sapiens
aggagatggagagactgtggagtttgatgttgttgaaggagaaaagcttgccaattctgtaactccttgggatatcttgctgagcttaattgcagctgcc

SEQ ID NO: 510546 - DNA, 100 bp, Homo sapiens
tatcgaggtggatggaaagcagcctttggccaccactcaacctgcaaagacttcaacatcgaaagccaaaacacagcccacttctctccctaagcagcca

SEQ ID NO: 510547 - DNA, 111 bp, Homo sapiens
gataatgtccaccccgagccgattcaagaaggacaaagagatcatagccgagtatgaaagtcaagtcaaaggctgggccgggatcagatgggaagcagaagctcatcatga

SEQ ID NO: 510548 - DNA, 100 bp, Homo sapiens
tggagggtggctacaagtgccagtgtgaggaaggcttccagctggacccccacacgaaggcctgcaaggctgtggctatcagttgagggatttgcagttg

SEQ ID NO: 510549 - DNA, 87 bp, Homo sapiens
ctccactccgtcccccgcgggtctgctctgtgtgccatggacgggccgccatggcatcagatgaaggcaaactttttgttggagggc

SEQ ID NO: 510550 - DNA, 100 bp, Homo sapiens
cgcgccgccgccgccgccccctccctccggtgggcccgggaggtagagaaagaaacccctcctggagtttccccaaagccatggacagccctagtcttcg

SEQ ID NO: 510551 - DNA, 149 bp, Homo sapiens
tggggagaagaggattggaggtgtcagtgttaaaggaacctctacaacgaaggtgaagccacggaagataaggagaaggccatcagcatttgggagtcaaagaatttcttttttgaacttgagcctctgccaggggccgtggaagctgt

SEQ ID NO: 510552 - DNA, 73 bp, Homo sapiens
catctccacctacggcgagggcgagagcggccccatgggcaacatcatgatcgcaccactgcactccagcctg

SEQ ID NO: 510553 - DNA, 75 bp, Homo sapiens
agaggtcccaatcccccactctttccgccctaatggaggtctccagtttcgggcaattgaaggaacagactaaaa

SEQ ID NO: 510554 - DNA, 74 bp, Homo sapiens
tcagaaccctccgcagagtaaaggatccagagaatcacccgctgatggtttttgcccaggcctgaaacaaccag

SEQ ID NO: 510555 - DNA, 100 bp, Homo sapiens
tggagtagggacaaaatatcttggctcacgtatttaagagcctgaatattccagctatcagatattgtgaaaaatgtcagctgattaaacctgatcgggc

SEQ ID NO: 510556 - DNA, 75 bp, Homo sapiens
tgggagcgtgctttccacgacggtgacacgcttccctggattgggagttccccttggccattctcaggggctggg

SEQ ID NO: 510557 - DNA, 90 bp, Homo sapiens
tctcggtggatgtgcaccaggtgtacaagtaccccttcgagcaggtggtcgccagctttctccgaaagccaagaaggatcaagaaggtgg

SEQ ID NO: 510558 - DNA, 100 bp, Homo sapiens
gttggatcatttgaagtggtgtctacacttataaaaaaggaccctctattgtcccaggcctgtgttggctgcctggaggccttgcttgactacctggatg

SEQ ID NO: 510559 - DNA, 100 bp, Homo sapiens
aaactcagcaaacaggactttttcaaaggaaaggagaatcacttgaacccaggaggaggaggttgtggtgagccgagattgcgccattgccctccagcct

SEQ ID NO: 510560 - DNA, 74 bp, Homo sapiens
gagccgccgacccgccgagcaaaatgatcttagcaaagcaatgtctcaagatggtgcttctcagttccaagaag

SEQ ID NO: 510561 - DNA, 100 bp, Homo sapiens
taactgtggacatcaccattcaggaagatatgaagagaaggctactaaagacttggaacgatacaatagtcaaatgaagagagccattgaacaggagtca

SEQ ID NO: 510562 - DNA, 90 bp, Homo sapiens
caagtaccaagtgaagactttgaacgcactcctcagagtccgactctcccacctgctaaggccaaggtgacagaggagttagcagcggcc

SEQ ID NO: 510563 - DNA, 74 bp, Homo sapiens
ccacttactttaatgagaagatctccattcctgaggaggaggagtctactcttcatcttgtgttgagacttcgt

SEQ ID NO: 510564 - DNA, 76 bp, Homo sapiens
gacaacggctgcggcgacaattttgtagaacgtcatgacatgaataccttaagcctgcccctgaacatacgccgag

SEQ ID NO: 510565 - DNA, 50 bp, Homo sapiens
cagcggctcccaggtgcgggagagagtttttggctttcacccccaaccag

SEQ ID NO: 510566 - DNA, 100 bp, Homo sapiens
gcctctgcactctggattggtgacaggagttatccaggcctgtctgaaggcaatagcagaaacaccatctgattcagatcacaagaagaagaaaaagaaa

SEQ ID NO: 510567 - DNA, 98 bp, Homo sapiens
aacttccaagacagttactacatcaggccacacactctgcatccgacacccaccccctctttgtgtacttcagtcttggagtttggaactctaccctg

SEQ ID NO: 510568 - DNA, 90 bp, Homo sapiens
tgaagagaggcggccgggccccgcgctccgccccggcctagggccttgccccgggagcccgcgagggtgccacacctccctggatgatcc

SEQ ID NO: 510569 - DNA, 122 bp, Homo sapiens
ctggaatcgagagaagactcctcaacaagttgctgcaatgtctgtgtctaatctatcatggttccagcaacagatagaaatgctttaagttcactctggggaaagctggcctctgaaatctt

SEQ ID NO: 510570 - DNA, 74 bp, Homo sapiens
aacctcactgaaaattggtattgttggattgccaaatgttggattttaggtgatgggcaagtcagaaagtcaga

SEQ ID NO: 510571 - DNA, 98 bp, Homo sapiens
caacagcttcctggagcagctgcgtaaaacatacaggccggagcttatcaaaggactggggttttaaggggtgtggcaggaggttttggactcgatga

SEQ ID NO: 510572 - DNA, 101 bp, Homo sapiens
ttatctaccacccgagatgccccaagggatggaagcttcctggcgccaggtggccggtggccgaggccgatcccggggacgggccactgccgccccctcag

SEQ ID NO: 510573 - DNA, 90 bp, Homo sapiens
caacttcctgcaggactccaaggtcattttcgtggagaaagccccagaactggtcatgctgctggagtggtggtcctgcacggagtgtac

SEQ ID NO: 510574 - DNA, 50 bp, Homo sapiens
atggagtccatcttccacgagaaaaatatggttgagccccttatacccac

SEQ ID NO: 510575 - DNA, 100 bp, Homo sapiens
gcagttttgtgtccatgtgaacaactcttagaccatgctcagcctccaagcagccttgtcatcgacaaagaatctgaagtttacaagatgcttcaggaga

SEQ ID NO: 510576 - DNA, 119 bp, Homo sapiens
catctctaaaggatttaattacaaagatgcaactgcaaagagaagccgagattccagatgacctgaggaagagactaaatatagaaatgcatgccgtagtcaggataactccagtggaa

SEQ ID NO: 510577 - DNA, 82 bp, Homo sapiens
cccgcgtttcagccctagggaagtaccatggggcgcaagttggaccctacgaaggagaagcgggggccaggccgaaaggccc

SEQ ID NO: 510578 - DNA, 83 bp, Homo sapiens
ccaaagtgaaagtggcggtgcggatacgacccatgaaccggcgagacctgcctagagctggaacgttacctccagagcgagcc

SEQ ID NO: 510579 - DNA, 100 bp, Homo sapiens
aggatgcttcagctcatcttaggctgtgctgtgaactgtgaacagaagcaagaacattctagtatgccagtagaaaaaaatatcactttagaaaggcctt

SEQ ID NO: 510580 - DNA, 76 bp, Homo sapiens
cgctctcctggctcccttctgccccagctccgtctcggcggcggcgggactttctgcagggcgactgcaccaaagc

SEQ ID NO: 510581 - DNA, 100 bp, Homo sapiens
ggctgcagcgctctcgtcttctgcggctctcggtgccctctccttttcgtttccggaaacatgcttcgagagctgtgcccaggagtgaacaaccagccct

SEQ ID NO: 510582 - DNA, 75 bp, Homo sapiens
aagatatgtatgacgagattattgagttaaagaaggaattggtggagagaaggcgcaccatgatggaagatttcc

SEQ ID NO: 510583 - DNA, 82 bp, Homo sapiens
ggttattcgagtgaccgagaccgcggccgggaccgagggttctgcggggagtgtctccagccctgcctgcaggtgccatccc

SEQ ID NO: 510584 - DNA, 100 bp, Homo sapiens
tctgtgggatctgtaatagaaatttggtggattcaaagtgggattggaccttcttgtagaatttgaattccgcacaactacaacgactggagttcttctg

SEQ ID NO: 510585 - DNA, 100 bp, Homo sapiens
ctgcagccttcccatgctatctgttgacatggaaaacaaggaaaatggctctgtcggtgtaaaaaatggccctcagattctcagcttgattctaaggaac

SEQ ID NO: 510586 - DNA, 98 bp, Homo sapiens
gagaagagccgtgggtaggagatggagaaattccaagttcagattctccagaatgtgacagtgatgataacatgggtgccaaaaatacttcaatagga

SEQ ID NO: 510587 - DNA, 73 bp, Homo sapiens
cagaagacagagggttttcttttgaggcttctagtgaggacgttgccagctccccggagcgccactacacgcc

SEQ ID NO: 510588 - DNA, 98 bp, Homo sapiens
gggagcagttttcatggatgcccctgtttctggtggccccttcacagatgtagtcactacaaatcttaaattgcgaaatccatcggatagaaaagtgt

SEQ ID NO: 510589 - DNA, 82 bp, Homo sapiens
acttcgtcgtgggtcagcaagagggccccgctgaccaggtggctgcaggcatcacgttgggtggtttccatttagaccgagg

SEQ ID NO: 510590 - DNA, 75 bp, Homo sapiens
ctctccctctgcccccccttccccacgcaaccccagatccatttacactttacaaaacaccattgcaacaccagc

SEQ ID NO: 510591 - DNA, 100 bp, Homo sapiens
actatactgattggatgctgctcaaaatcagcctacatgccatctttgagactaaggtgtcagtatgttcttcaagctgctctgctcctgggcccaagct

SEQ ID NO: 510592 - DNA, 101 bp, Homo sapiens
gcactatttgaaacttttatctcatctggcttggcgcctgaggttctcccattaggagctatcgaaaaaccttgaactgagtactaacagtttccaacgac

SEQ ID NO: 510593 - DNA, 74 bp, Homo sapiens
tgcccaccatcgagtccctgataggtgaagattgtccccagtggatggtccctatcacaatctctactagtgaa

SEQ ID NO: 510594 - DNA, 75 bp, Homo sapiens
cggcgagtttccgatttaaagctgagctgcgaggaaaatggcggcgggagattcaagaaatccatggtgaaaggt

SEQ ID NO: 510595 - DNA, 100 bp, Homo sapiens
gcggatctggaggagcagttgtctgatgaagagaaggttattcagcttctcaaggctggaaaagcgaaggaagtttcctacaatgcactagcctcacaca

SEQ ID NO: 510596 - DNA, 75 bp, Homo sapiens
acctgctgctggacccggcctgggagaagcagcagcgcaagtacctgatggagggcagctacaacaaagtgttcc

SEQ ID NO: 510597 - DNA, 50 bp, Homo sapiens
gcacaggcaggaggcatggccaagtttctggcccccaaagacaaaccaag

SEQ ID NO: 510598 - DNA, 145 bp, Homo sapiens
gtcagaacctgtactcttattcagttccttggtgatgctattgttttgccagcgggagcacttcatcaggacctgtgaaaagagcaagagaagaaacagacaaagaagaacctgcatccaaacaacagaaaacagaaaatggtgc

SEQ ID NO: 510599 - DNA, 76 bp, Homo sapiens
cacagacccagctggaactcgatacatttcatcaatgaagccttctggacctggagtttcctatatgagaaggatt

SEQ ID NO: 510600 - DNA, 75 bp, Homo sapiens
tactacgcccgctccgaggactacgtggagctggtgcagcggaagcgagtgccctgagtaaccagcagaaggcgg

SEQ ID NO: 510601 - DNA, 82 bp, Homo sapiens
gcgggcctagactcgctgcacaagaacagcgtcagggcgccctgcgtccggcagaggaggcgagcatcccgctcaggtgatg

SEQ ID NO: 510602 - DNA, 98 bp, Homo sapiens
cggacaccagcctccaggcccagtgccaggagaacccccatcaaaggaagacagtgtggagcagataagctgagtcagtgctgattctctcaaataga

SEQ ID NO: 510603 - DNA, 76 bp, Homo sapiens
cctgttggaggaactggcccggaaacaggaggacagacaagaggagcagcagcggcaccgcccctcaccctggagg

SEQ ID NO: 510604 - DNA, 50 bp, Homo sapiens
ctccttttccctctccctttccctaagaaaattgtacaagctggagataa

SEQ ID NO: 510605 - DNA, 101 bp, Homo sapiens
cgggatttacgtggagatcaagcgcagcgatggctgtgggtgagcgtggaggatgctcagatgcacaccgtcaccatctggctcacagtgcgccctgatat

SEQ ID NO: 510606 - DNA, 82 bp, Homo sapiens
ctccactgttcctggaggaatccgagaagagcagagcggagggagccccagacacgttaatgaaggagttcccccttctgag

SEQ ID NO: 510607 - DNA, 96 bp, Homo sapiens
atggctgaagaacacaaatgtctatctaatgaggaaaaacttataattcaggactttatcttagaagctacacagtctcccatcaaaggacgtgca

SEQ ID NO: 510608 - DNA, 90 bp, Homo sapiens
ccaggggtcagcagggggccagctcaggacacacagacccagctggaactcgaaataacatctgctttgctgccgagctcagaggagacc

SEQ ID NO: 510609 - DNA, 60 bp, Homo sapiens
ttaaaatacccgcaacagccccttcgtcccaacgggtccatatggaatatttgctggtag

SEQ ID NO: 510610 - DNA, 83 bp, Homo sapiens
ggaaactaggaagaggaaattaactatctgtacttataaggtgtcagaaggaggctggcaaatttggcactcacagagggaaa

SEQ ID NO: 510611 - DNA, 98 bp, Homo sapiens
cgacagctacacaaatctggaacgggtggccgattactgcgagaacaactacatacaggcagcgattattagtagagttcagtgtaggattgtagctt

SEQ ID NO: 510612 - DNA, 80 bp, Homo sapiens
gtcggggccccatcgagaaatggccgcgtcggcagaaaacctcggatcaattctcagctggtggcacaacaagtggcaca

SEQ ID NO: 510613 - DNA, 100 bp, Homo sapiens
gaaacgtctgaatactgagtggagtgagttggagaatctggtccttaaggatatgtcagatgttaccaccaccctgtgaatctgcctgcacagtaccaac

SEQ ID NO: 510614 - DNA, 80 bp, Homo sapiens
ccagaagcctacaatgaagaactgaagaagctggagttgctcagacagatcttcatctccgtggtgcttgtctgcctggt

SEQ ID NO: 510615 - DNA, 100 bp, Homo sapiens
agaagaccattcagatgggatctttccggatcaatccagatggcagccagtcagtggtggagcccagtggcacccgactcgctctcctctccctcaccga

SEQ ID NO: 510616 - DNA, 75 bp, Homo sapiens
cagagccccagctcctgtctggtctgtgagatgtcctcactgtttcaggaggcatggcgatttgttgttcctgtt

SEQ ID NO: 510617 - DNA, 82 bp, Homo sapiens
cgaagagtccccccaagtctcctgaagaggaaggagcggtgtcctcttaagaaaatggtggtggaggtggatacagcagtcg

SEQ ID NO: 510618 - DNA, 74 bp, Homo sapiens
gaatacttgctacagtgtctgcgcaccctttgcatatctctacctacttgtgcataattcagcatccagcagag

SEQ ID NO: 510619 - DNA, 95 bp, Homo sapiens
ctttgtcaaacatcacacagatttgcaaagtgaatggtagtgtctagaaagggtatgtcccttcaagagagaggtgccaatgtccaaccggccta

SEQ ID NO: 510620 - DNA, 75 bp, Homo sapiens
cgccgctctagcggccgggactctgaactatggcgattgtggatcccagtcaaattctggaagggatcaacctgt

SEQ ID NO: 510621 - DNA, 90 bp, Homo sapiens
cactcgaggccaggatgtggggcgttatcaggtgccctggatcccactggaccccttggcgccagacctagcacggtaccctagttacag

SEQ ID NO: 510622 - DNA, 100 bp, Homo sapiens
cggccgtgggcccgggcggcgggcggagacgtgggcgccctccccgccaaggcccgtgcgagggtctggaacagaatctgacagtgatgaatcagtacca

SEQ ID NO: 510623 - DNA, 100 bp, Homo sapiens
ggagtcccaggtggccggcacccccatgtttgtggtcaaggcctatctgcccgtcaacgagtcctttgaaatgggcaagttcatgaaacctgggaaggtg

SEQ ID NO: 510624 - DNA, 88 bp, Homo sapiens
tcagcagcagtgccgtacgcgaggccatcctccagcacgcctggttcttcttccagctcatgcttgttttacagcttcctgccttgct

SEQ ID NO: 510625 - DNA, 100 bp, Homo sapiens
tcagaagacaaacttgccaaagctacaagagacagcttaacctggcttctcagtctgtattggaaggactcaatgcttgttttgaccaccgaggagaaat

SEQ ID NO: 510626 - DNA, 75 bp, Homo sapiens
gcaaagaggaggccatgcgctggttccagcagaaggttacggcctccgctgccacagggccatcatcaccatctg

SEQ ID NO: 510627 - DNA, 75 bp, Homo sapiens
tcccaagtggctgggattacagaataagaaagccttgagttttgtgaaaaaccggagaagagaaactaaaaggac

SEQ ID NO: 510628 - DNA, 96 bp, Homo sapiens
aggtgcttcagcgctgggaggggggtgacagcaacagcgacgactatgacctcgagtctgacatggaatcagagatcattgatttcttcctggggg

SEQ ID NO: 510629 - DNA, 90 bp, Homo sapiens
tcttatagtttgtggccgagctgaacaggaccagtgcaatttagaggtgcatggagactacctaggtggagaagcgtactgggccggcgg

SEQ ID NO: 510630 - DNA, 100 bp, Homo sapiens
cagtgcggcaaccaaatcggcgccaaggtctcctctgagcctccggcctccataagacccaaaacagatgacacctcttcccagtcccccgcgccttccg

SEQ ID NO: 510631 - DNA, 50 bp, Homo sapiens
ggcctcgccatgtcctgctgcccggaacaagatcactcaaggtgaaggat

SEQ ID NO: 510632 - DNA, 90 bp, Homo sapiens
ggaaaggctctcagtgaaaaaggtgtggttcctcagagtgcaccaccagtgccaacagcctcttcccggttccatttcccacctctggac

SEQ ID NO: 510633 - DNA, 82 bp, Homo sapiens
cagaagatgagaccgcaattcgagaatcaaagggccgggagcgatggtttggtgcacctcgatttggaggaagtagggcagg

SEQ ID NO: 510634 - DNA, 82 bp, Homo sapiens
cgaagaacagctgtggaaagaagttgcaaaacactggacgttatgacagtgttataaatcgactgtacactggtattcagtg

SEQ ID NO: 510635 - DNA, 99 bp, Homo sapiens
ccttgcgccgctgacttctccactggttcctgggcaccgaaagatattgatgagtgtgcagctaagatgcattactgtcatgccaatactgtgtgtgtc

SEQ ID NO: 510636 - DNA, 74 bp, Homo sapiens
ttcatgatattccaatttatgcagataaggggctatctgatgggttagagtgcctttgagaagaaatcagtgga

SEQ ID NO: 510637 - DNA, 50 bp, Homo sapiens
tgtccacaggatccaacaaattcccagttttgcagatgtgaatggttggc

SEQ ID NO: 510638 - DNA, 50 bp, Homo sapiens
aattttttggaacagaagatcagtgcttctcagcttcacgggaaagggcc

SEQ ID NO: 510639 - DNA, 100 bp, Homo sapiens
agttgagaatcgcaggttggccgcagggaaaagccagcagaaaactgagcttccggtcacagagaacgtgcagacgattcccccgccatatgtggtccgc

SEQ ID NO: 510640 - DNA, 83 bp, Homo sapiens
ccaacatccagaacttccagctgcccccaggaacccaagacagaccaggatgaggagcattgccggaaagtcaacgagtatct

SEQ ID NO: 510641 - DNA, 82 bp, Homo sapiens
gcctgccgatgtgcatcggtacatgaagattttggtgccctggttgtcagatgttggaaagcagtaggacggaacatactct

SEQ ID NO: 510642 - DNA, 100 bp, Homo sapiens
ctcgggacggaggacgcgctagttgaactttgaggcgctgatcatcaccatgtcggtagtcgggggaaccctcctcctgggcattgccatctgctgctgc

SEQ ID NO: 510643 - DNA, 98 bp, Homo sapiens
tctgcctgggccatgccgaaaaaaggagattgtgacatatcactgcattcaatacctagatgatttttgatggcgacgactttgatgatgtggaggag

SEQ ID NO: 510644 - DNA, 75 bp, Homo sapiens
gggtgcggcctgacctgggagaactgtcaaagggtgaaatcaaaattgctgtttctattgaagatgaagccaaca

SEQ ID NO: 510645 - DNA, 90 bp, Homo sapiens
ttgcaagtcatcagactgcataaaatcagcagtgggatgttaccaaacgcagtgcttccaccttcacttgaccataattatgctcagtgg

SEQ ID NO: 510646 - DNA, 101 bp, Homo sapiens
tgacaataagctcctaactttgcccaatggagagcgcctcagtcttccacccaatggttatgggacccacctgatgaaccacctgaaggagtatcacatca

SEQ ID NO: 510647 - DNA, 100 bp, Homo sapiens
ccagccatgtcatcttatctacgaaatgattcagggcttttttccagacttcaagctcccattccaacagtaagagcttcttccacatcacagcccttgg

SEQ ID NO: 510648 - DNA, 82 bp, Homo sapiens
tgttgctcctgtgatgccattagatcgtttcattacaggagaaacatcagatggagtgaggaagtcagttcacaaggtcttt

SEQ ID NO: 510649 - DNA, 112 bp, Homo sapiens
ctcgtctagggggtgatgaagatggttatgaagaagaagaagatgagaacagtagacagtcgttagttgaatccatggacatgaaacccacagatatagagggttggcccgg

SEQ ID NO: 510650 - DNA, 90 bp, Homo sapiens
gccgagatgctgggcgccaagatcaagttggtcctgagaaaagggtgccagcgatgcctggatcgcctgtggaagtgaagatacagtcca

SEQ ID NO: 510651 - DNA, 50 bp, Homo sapiens
ggagaagccgcccaaagaactgggtcagcagttcccagcgctcctcacgg

SEQ ID NO: 510652 - DNA, 50 bp, Homo sapiens
tacacaaaccccaatctcagtggacaagctgttcttccacctgtcccggg

SEQ ID NO: 510653 - DNA, 101 bp, Homo sapiens
agaagcccatgaagagatggtggattctcactgagttttgactagcggaagaaaagcaagaaggacctcaccagatgctgcccctcaatcttggatttcct

SEQ ID NO: 510654 - DNA, 100 bp, Homo sapiens
gagagagaagtttgctttattgatattgcctgcgatgaaattccagagcgctactacaaagaatctgaggttttttgagatggtgaacaccattaccgaa

SEQ ID NO: 510655 - DNA, 100 bp, Homo sapiens
aatccttgctctgcgatggactattccctggctgcagccctcactcttcatggtcactgggattacatctactacaacgacgtgtatgcctttaatctgg

SEQ ID NO: 510656 - DNA, 100 bp, Homo sapiens
tgaggcctccccagccatgtggaactccatttaaagttttggcaactgaaactgtaagtcacaaggcattagatgcagatatatacagtgcaattccaac

SEQ ID NO: 510657 - DNA, 88 bp, Homo sapiens
gcaccccgagaaccgtcagtttgagccagatgggtcctatccttcccccaaagctggagcaactctggtcgtgtacaaggacttgcta

SEQ ID NO: 510658 - DNA, 100 bp, Homo sapiens
aacctgagtatctgcaaaagttgcacaaatacctaataaccagaacagaaagaaatgttgcagtatatgtttgcagaaaaaacttcagcatgtgccagga

SEQ ID NO: 510659 - DNA, 75 bp, Homo sapiens
tagcaagcacatctttgcactctttaatacagagcaaagtagacccaaatgatttgtacattgtagaacccctca

SEQ ID NO: 510660 - DNA, 97 bp, Homo sapiens
tgtgtcttgtgatggaatatgctgaagggggctctttatataatggaaaatatgttgtgttcttcttttaccctcttgacttcacctttgtgtgccc

SEQ ID NO: 510661 - DNA, 83 bp, Homo sapiens
aagaaaactcctccttgtacctaggttctctccataaatgaagaagggctaaggcgatgcgaagagaatacaaaagtctttgg

SEQ ID NO: 510662 - DNA, 83 bp, Homo sapiens
ctcagccttcaggactctcttccagcatggccgaagacacctattcacacagtatcgagaaccttccctgcgaacttcagagg

SEQ ID NO: 510663 - DNA, 75 bp, Homo sapiens
gttcccttcccttccacagtgcaaggaagacgccgaggctgagagcacagacaaaacaacaactcttagaatata

SEQ ID NO: 510664 - DNA, 90 bp, Homo sapiens
gaaccacggcactgattttcagttctgggaaaatggtgtgcacaggagccaagaggtcaaggtcagcatctcctcgacgatcaagatcta

SEQ ID NO: 510665 - DNA, 95 bp, Homo sapiens
aagcttacgtctctgctcttcagtacaatcctgtactccaaagattcaggtttactcacgtcatccagcagagaatggaaagtcaaatttcctga

SEQ ID NO: 510666 - DNA, 95 bp, Homo sapiens
cttaaagccccttcgtctccccagcacccactctctgggggcaggtgggcccggtgacaggtctacgtgttgaagcgtcctcacgtggatgagtt

SEQ ID NO: 510667 - DNA, 83 bp, Homo sapiens
ggatcatgtctgcgagccaggattcccggggccaaaccagtgctcctgccacctctctggctgccccctagagcctgcccatc

SEQ ID NO: 510668 - DNA, 75 bp, Homo sapiens
tgcaaccagtaagttgatccatccagatgaggatatatccctgattgaaaaggccaaacctattaaatgtggaac

SEQ ID NO: 510669 - DNA, 75 bp, Homo sapiens
ttggactaaattaccagaatgcagggccttatatgacttggctgtccttaaaaaaaaggttaaggaaaaagagga

SEQ ID NO: 510670 - DNA, 101 bp, Homo sapiens
agcgatggcttcagacagcatatttgagtcatttccttcgtacccacagtgcttcatgagagcctgagaaatgccagtggcctgacagcagcagacattgc

SEQ ID NO: 510671 - DNA, 80 bp, Homo sapiens
caattcggtgctccgccagccccagcttggcgtcctgagaaatggaactgtggctgcaccatctgtcttcatcttcccgc

SEQ ID NO: 510672 - DNA, 80 bp, Homo sapiens
tgcagttcctgcagtaccccactctacgatcagggactttgaacatgtcggggatcgccctcagcagactcgcccaggag

SEQ ID NO: 510673 - DNA, 100 bp, Homo sapiens
ggccaccgaggacacctcggtggagaagctcaaggagcgctgcctcaagcaccgtgaagcctctgcgggccttcttttcgtcttatttgaagtcattgcc

SEQ ID NO: 510674 - DNA, 51 bp, Homo sapiens
tctggatcacggatgtaggaagtgggatgccattattacttgcaatcctga

SEQ ID NO: 510675 - DNA, 82 bp, Homo sapiens
gctgagaagcctgacataccaggactgcctgagacaagccacaagctggacccatggatgaaggaccagatcttgatctagg

SEQ ID NO: 510676 - DNA, 100 bp, Homo sapiens
agagatcctgctcttaaacgcaaggcccgacgggaggccaaggtcaagtttgaagagaggttgtggggcatttgcagagcatcactggtattgccttggc

SEQ ID NO: 510677 - DNA, 100 bp, Homo sapiens
cctggacgccctgcacgtgctcgagggcctcttccgcaccgaccccgaggccaagatccacgccctggaaggcggggaggtgaagatcttcagcaggaat

SEQ ID NO: 510678 - DNA, 90 bp, Homo sapiens
ttgaaaaacgcttttcacgtcacctggagagatgcacagacatatctgaagagatggattaagaatgctttggattaaggattgtggagc

SEQ ID NO: 510679 - DNA, 101 bp, Homo sapiens
ctgctgctgctgctgctgctgctggtggcccctttgcaggttggaaaagagactgttcaaaccactgaggatcagattttgaagagagatatgccaccagc

SEQ ID NO: 510680 - DNA, 119 bp, Homo sapiens
cacctgtattctgtctgggaaatactagtgaatgtttccaaaacttcagtcagagccacaagaaatgattgaagccatccgcgaagcggtggtctacctggcacacacacacgatggcg

SEQ ID NO: 510681 - DNA, 110 bp, Homo sapiens
cttctttcagccaacagacattcactcatggacatttattcagaacagctggggatcaaccgtttaacctgtccacagtgtcgagtgccttcccaatggtcagccaccca

SEQ ID NO: 510682 - DNA, 98 bp, Homo sapiens
cgtggtgaaggtccggggcttgccctggtcttgctcggccgatgaagtgcagaggtttttttctgctgagtcagtgctgattctctcaaatagagctt

SEQ ID NO: 510683 - DNA, 100 bp, Homo sapiens
gcttcctgaggaagcgcgggcggacgacagaggatgccgaaccactccacaaaacccttgaagatcgtttgaaaattgaagcaaaaaatgggacattgag

SEQ ID NO: 510684 - DNA, 89 bp, Homo sapiens
agatcaagaccctggagggcgagttctcggtcaccatgtggtcctcagctgcgcagttggacagcattggcttcagcataatcaggaaa

SEQ ID NO: 510685 - DNA, 90 bp, Homo sapiens
agaaaacaagtcatttagcgctatggaagatgaccagaggactagacctgaagtttcaaagtgataatatgcagcatgcatactgggaac

SEQ ID NO: 510686 - DNA, 100 bp, Homo sapiens
ttcactatgtatggggtactcaatcctagtactgtgccctacaacattcagattgtggttatggagagggtggagatgcctactgcacagcctgccctcc

SEQ ID NO: 510687 - DNA, 90 bp, Homo sapiens
ctccgggcgttgtacctgccaccacggggcgcacatggcacagcactcaagcctacggccccaccagtgtagccagtgcagctttgcctc

SEQ ID NO: 510688 - DNA, 75 bp, Homo sapiens
ccagtacctggtgtatcagatgctcaaaggccttaagctgccccccaagagggacgagacggccctgcaggagga

SEQ ID NO: 510689 - DNA, 82 bp, Homo sapiens
ctgcccccggaggtgcccacgcagctgcctggacaagtcaaaatgcagatcttcgtgaaaacccttaccggcaagaccatca

SEQ ID NO: 510690 - DNA, 50 bp, Homo sapiens
gggcaagaagagtccgcgactcctgataaagatggaaagccactcctgcc

SEQ ID NO: 510691 - DNA, 98 bp, Homo sapiens
attgcaattattattggggcattcttcattccagaaggaacttttacaactggtctcaccaacggctttgggggtgcgaggagcgagcaggagccggg

SEQ ID NO: 510692 - DNA, 75 bp, Homo sapiens
tcagattttgcattggatattcgcatgcctggggttacacctaaacaggtccaaggatcttataaaggaagctat

SEQ ID NO: 510693 - DNA, 153 bp, Homo sapiens
ccgcgtcatgcggctcctcggctggtggcaagtattgctgtgggtgctgggacttcccgtccgcggcgtggaggacgctgatcaccgccgtggggcagacagtctacaccgtggcctctgtgctcctcctgctcttcctcctcatgtacatct

SEQ ID NO: 510694 - DNA, 50 bp, Homo sapiens
gaaaaaattgccaacctgaatggcttaagcacaataaagacattgccctg

SEQ ID NO: 510695 - DNA, 139 bp, Homo sapiens
cctggacttccagagccggaacgtcatccctgatatccctgaccacttcctgtgtctgtgggagcactgtgaggcaggtgctccgggatcacaactgtctgcagacgctgctgcagcatctgacttcgcacagcctgac

SEQ ID NO: 510696 - DNA, 83 bp, Homo sapiens
ctttcgccagcccgtgccgcgagcgcggcctgcaggagggacagaagatgagcctgtcggtcctggagggtatggggttccgt

SEQ ID NO: 510697 - DNA, 120 bp, Homo sapiens
cgttcttgcctcaggccagtcgcctccaggccaagagggatccttcacccgtgtctgggactttgaacatgtcggggatcgccctcagcagactcgcccaggagaggaaagcatggagga

SEQ ID NO: 510698 - DNA, 75 bp, Homo sapiens
ctccgtcccgacccgggccccgccatgtccttcttccggcggaaaggtggaatgaatcttacttgttgaatatct

SEQ ID NO: 510699 - DNA, 73 bp, Homo sapiens
caagatcaccgtgacatccgaggtgcctttctccaaaaggtatacagaccagggcggcgaggaggaggaggac

SEQ ID NO: 510700 - DNA, 82 bp, Homo sapiens
ctgcatcaggatgaatgatgacccaagtatggaaatatgtgtcacaaagatgtctacacggaactgccagggaatggactca

SEQ ID NO: 510701 - DNA, 101 bp, Homo sapiens
cttttgggcagcttttccggcctgacaacttcatctttggcatccgtgtcattctggaccttactcccaactaccggggtgagaactcgtggttctccact

SEQ ID NO: 510702 - DNA, 50 bp, Homo sapiens
gtccgagtcaacaaccgcttcgagctgactcggtgaaatacctggagtgc

SEQ ID NO: 510703 - DNA, 90 bp, Homo sapiens
ggcgagcccttgggccgcgtctcctttgagtgtggggctgccttccaggaggatgatgtcatcatgctcaatggcaccaaggaggatgtg

SEQ ID NO: 510704 - DNA, 100 bp, Homo sapiens
gccgaccgctgccggcggcgggtcgtgggggctgactgtcgctctgcctttgacaggagaggctgcttcttgtagagaaccagcctttcaaacagtttcc

SEQ ID NO: 510705 - DNA, 100 bp, Homo sapiens
cttaaccctcatcacttctgaagctgatggaatgcatccggtgaaagacagagatcacatttcaactagattcttaggaagtatggattcactaacttca

SEQ ID NO: 510706 - DNA, 98 bp, Homo sapiens
aggaggtcgtgggggccgggagtttgcggattttgaatatagggatgaatttcacccattcatcgaggcacttcttccacatgtccgtgcaattgcct

SEQ ID NO: 510707 - DNA, 100 bp, Homo sapiens
cggaagcgcgagcaaggccgccagatgtgcagagaagaagctggaggagttctccgtggaagaggccgaggtgctacagatcctcacacaggtcaacgtg

SEQ ID NO: 510708 - DNA, 51 bp, Homo sapiens
gtgaaaaaagcctgcattcattggtaaaggatgctggggaaatggttcgtt

SEQ ID NO: 510709 - DNA, 98 bp, Homo sapiens
gggagatggaagttgagcaagagcagcggcgcagaaaggtggaggccgggaggacgaagacaatgcagatcttcgtgaagactctgactggtaagacc

SEQ ID NO: 510710 - DNA, 90 bp, Homo sapiens
aacgagaagcacagcaagaacatcacccagcgcggcaacgtcgccaagacctcgacaaatttacatgtattggagaccagaccagaagcc

SEQ ID NO: 510711 - DNA, 74 bp, Homo sapiens
cccctggtgcagggagtggccataggcagctcagttctggcaccaaaccaaatccccaggtctactcgaggctc

SEQ ID NO: 510712 - DNA, 83 bp, Homo sapiens
attcttccactgatatctcaaaaggtgatctggacaaaggaacaggtatctcaggacatggatttgattgacatactttggag

SEQ ID NO: 510713 - DNA, 90 bp, Homo sapiens
atccccttctgctgtttccgcttcatatgaaacaaccttgtctcaagaaagagattctactatgacatccaggcagaaattgatgcccac

SEQ ID NO: 510714 - DNA, 100 bp, Homo sapiens
tgttcgtacagaatacaggcttattgtagaaaatctttctagtcggtgcagttggcaagatttaaaggttctaatagaagactgtatcccggtactgaag

SEQ ID NO: 510715 - DNA, 100 bp, Homo sapiens
cggagctgatcgggcgcctagccccgcgcctgggcctcgccgagcccgacatgctgaggcattttgttcccaacatcacctttggtcaccctgtggtaga

SEQ ID NO: 510716 - DNA, 127 bp, Homo sapiens
tcacgcgatagaaacgtgttcgctgcccagaagaagggaaggcgcgagtgaggaaaggaggtactgtaggtgcagtagacattgttgcaatcatgatcggcaatctgaaaggcacaaaaattctgca

SEQ ID NO: 510717 - DNA, 75 bp, Homo sapiens
cagacagagacacacggtcactgcagctgaagccgctgcccctgctacaggacacaactcagatgggaagttcat

SEQ ID NO: 510718 - DNA, 101 bp, Homo sapiens
ccgagttcaagacgcagccagtccgtgctgtttggcacggccgatgggcaggtgattgtcatggattgccacggcagaatgctggcccacgtcctcttgca

SEQ ID NO: 510719 - DNA, 90 bp, Homo sapiens
ctctaacggggctttctacaaggcctcccagtagcattggatgcaggaaaaaatacattgacggtgaaaaacaagccgaaccagttgtag

SEQ ID NO: 510720 - DNA, 100 bp, Homo sapiens
tgactgcgctggccaaggccatctccaagaacgtgctcttcgctcacctggatgacaacgagaggaggtctggttccaaaaccgccgggccaagtggagg

SEQ ID NO: 510721 - DNA, 100 bp, Homo sapiens
tgtgcaggtgaggacaggccagggccaaaagagaaacattggctactttgacaaccttaaagcggactccaggaatatcaccaacagcatgacctttgcg

SEQ ID NO: 510722 - DNA, 90 bp, Homo sapiens
catgctctacctgcatgaggaggccttcgtgcccatcctgcaccgggacctcaagtccagcaacatagagacgggatttcaccatgttgg

SEQ ID NO: 510723 - DNA, 82 bp, Homo sapiens
caggatattaatgattataaccggagattctcagggcaacccagatctggagtgcatccgccccaacccttttccccctcgt

SEQ ID NO: 510724 - DNA, 75 bp, Homo sapiens
gttcgagcgctgttctcgctccggagccgctgcacatttcggccaggaatagttgctgaacaccccaggcctgct

SEQ ID NO: 510725 - DNA, 100 bp, Homo sapiens
agcaagaaggtccagcagcagctgtggctccagtatcagaaaggctcccggggagctttctgtgaagtgagaccagatgataaaagaattctggaatttt

SEQ ID NO: 510726 - DNA, 102 bp, Homo sapiens
ctgggaagggtgccctggtcacaggggccatggccttcgtcgggggtttggtgggcggcccaccgggactcgccgttgagacggggtttcgccatgttggcc

SEQ ID NO: 510727 - DNA, 74 bp, Homo sapiens
cagcgccctggcctccctcaccttggacacctcgcttggggaggagtctgctactagtcttatcagctcttaaa

SEQ ID NO: 510728 - DNA, 100 bp, Homo sapiens
agaacattacgctgaaccccggctttggtgggcctgtgttttcctggagggaccaagctgtgctgcggcaggacggcccagatggctacctgtatgagcg

SEQ ID NO: 510729 - DNA, 58 bp, Homo sapiens
ctccgagtgctgctcctgtcattgtggccatggacgcctgcctgctccgcttcagcgg

SEQ ID NO: 510730 - DNA, 75 bp, Homo sapiens
aacttccatgcctctaacactcatcttcaaaagactggtgtttgatttcaccaccatagacttgacatctgagac

SEQ ID NO: 510731 - DNA, 100 bp, Homo sapiens
gatcatcgaggtcgtcgacgccatcatgaccacggcccagaggtatgctccgtatagtgattgtagctgttcctctggattcaccatctgttgagttgta

SEQ ID NO: 510732 - DNA, 82 bp, Homo sapiens
ctgaatggcaatggcacaaagttctctcgatcagggcatacatctttcttcgacaaaggggtggcccggtggaaatcctgcc

SEQ ID NO: 510733 - DNA, 74 bp, Homo sapiens
gcaagatgaatgaggagatctccagcgactctgagagcgagaggtgtggaaacaggaagagaactagaactgga

SEQ ID NO: 510734 - DNA, 98 bp, Homo sapiens
ttatgtcatcactgccaggaccaaagggtaatccaggatatccaggtcctcctggaatacaaacggatgtttccagtcctaaagattagtgtcacagg

SEQ ID NO: 510735 - DNA, 75 bp, Homo sapiens
atttcctggaagcagagaaatggtgggaaactacctccgtatgttccgaggttctctgtacaagagatacccctc

SEQ ID NO: 510736 - DNA, 82 bp, Homo sapiens
ctgactctcggactgagaaacgcaaggtgaaaggtgtagcagtcactcggcctacacccacagcatcgaccttgtgaaccca

SEQ ID NO: 510737 - DNA, 100 bp, Homo sapiens
atatgttcatggtgatataaaagcagcaaatctacttttgggttacaaaaatccagaccagggtaagatgatcatgcaggataaactggagaaggagcgg

SEQ ID NO: 510738 - DNA, 98 bp, Homo sapiens
acccaagcagtggcgaagggaatcgcaaggctcttccctgaccattttctactgtccctgcgcgaggtcaaaatgcagatcttcgtgaaaacccttac

SEQ ID NO: 510739 - DNA, 75 bp, Homo sapiens
caaaagcccacttggcgatgggttacagtaagagattcttctaacagagaaaatgccattgaggatgaagaggag

SEQ ID NO: 510740 - DNA, 100 bp, Homo sapiens
tccagagcaaccagcccgaccgggcgctccgcttcctggagaaggcacagcggctgtatccgacgccgcgagttcgcggctcatggatttgagatcttat

SEQ ID NO: 510741 - DNA, 98 bp, Homo sapiens
gagtctccgccgctgcgggcccgctccgacgcggaagctgatcataggcggcctggataaaatagacttgaacgactggaagtcgaacacgcggctga

SEQ ID NO: 510742 - DNA, 99 bp, Homo sapiens
gacggcccggctgcagcgagcgctggacggagaggaaagcgattccaacaatgtctcacccatcttggctgccacccaaaagcactggtgagcccctcg

SEQ ID NO: 510743 - DNA, 75 bp, Homo sapiens
agcaggacttccgggaggaccaggatgctgccttcttcaaggcagcctggcatcctcgctacaacctcattgttg

SEQ ID NO: 510744 - DNA, 100 bp, Homo sapiens
agccaacccaaattaccttaattggttacacatcattttggaatgactgtatatcatctggattacgtggctgtatgttaattgaattagcattgagagg

SEQ ID NO: 510745 - DNA, 75 bp, Homo sapiens
gaaaagtgtggctggtctgaagtttgcaatggattttggataaacaagatctgttgaaggagcgccaaaaggatt

SEQ ID NO: 510746 - DNA, 75 bp, Homo sapiens
ggaggctccagaaacgggtcctgctgctcaccaaggtctcggcgcggaagatggccggcggcgtggacggcccca

SEQ ID NO: 510747 - DNA, 74 bp, Homo sapiens
ccccatttggcctgctgggggagaagacccgccagcacctgaactcctggggggaccgtcagtcttcctcttcc

SEQ ID NO: 510748 - DNA, 97 bp, Homo sapiens
aacaactttccgaatctgcaaaagaagatgcacattgactctcatgaagcccttggagtgttaaatacattatttgagattttggccccttcctccc

SEQ ID NO: 510749 - DNA, 75 bp, Homo sapiens
gccctggggctgagaggagtcttctggtgcagtcttattttgaaaaggcttttattgagatggagacaagagaag

SEQ ID NO: 510750 - DNA, 100 bp, Homo sapiens
ctacatccaggagagaatgctgacagtcctgcaggcaacaagaatgggtgaatcagcaaagggaagatattgaaaggcaaaggaaacttctagccaaacg

SEQ ID NO: 510751 - DNA, 83 bp, Homo sapiens
aagagattcagccagcacactcctcgcgagcaaggttgacatcatggacatatgtgagtccatcctggagaggaagcggcatg

SEQ ID NO: 510752 - DNA, 100 bp, Homo sapiens
ggggcatctatgacaaggactcagtgcttcggaaagccctgcatgacagcctgcatgactgttcacattggaacgaatgatcacacactttgaaaggtcc

SEQ ID NO: 510753 - DNA, 100 bp, Homo sapiens
ttgacctgtggtgagcactcgtgagcgttagctgctgtatttaccaggatgtgatggtggcaggtgggatggagagcatgtccaatgttccatatgtaat

SEQ ID NO: 510754 - DNA, 50 bp, Homo sapiens
cagagattgctcaggaagcaatggaggtggttggaggcaaagtaaagaag

SEQ ID NO: 510755 - DNA, 83 bp, Homo sapiens
ctcaccatgaaatcacagcttcagatcactggttcgagaacttgtcttggacaattgcaaatcaaatgatggaaaaattgagg

SEQ ID NO: 510756 - DNA, 75 bp, Homo sapiens
gccggctgcggtgtgagaatggagtgggcaggaaagcagcgggactttcagatttctttaaagactcgtgcagca

SEQ ID NO: 510757 - DNA, 100 bp, Homo sapiens
gttcggactatttgtagtcatgtacagaacatgatcaagggtgttacactggctgaactccagtgcacccagttagacttggagcggaaactcaagttga

SEQ ID NO: 510758 - DNA, 100 bp, Homo sapiens
tcagaggtcattagaggaaggagaggggccaatagagtaccttcaagtttaaatctgagagtgatattcatttggcagaacatcataaacaggtgttata

SEQ ID NO: 510759 - DNA, 75 bp, Homo sapiens
attctataagcagttaggatctggaggtgtcatcaatcttacagaagaagtgctgtgggtcaaagtgaatataaa

SEQ ID NO: 510760 - DNA, 80 bp, Homo sapiens
acgtggatgcagttggtggtgaggccctgggcaggccatgaaattattcactgcgatccgggatgccctcatcactcgcc

SEQ ID NO: 510761 - DNA, 100 bp, Homo sapiens
ttctgctgctggggatattacattaggaagtgttcatgagctcaacagccccacctcggcacccagctcagagaagcagagtcccatggcgcagcagagt

SEQ ID NO: 510762 - DNA, 100 bp, Homo sapiens
gtggcagtcgcgaccgcgggtgcatccagtttctgcgcccagacatgcacatgatggtgtccaagccagaacagtgggtaaagccaatggctgtagcagg

SEQ ID NO: 510763 - DNA, 100 bp, Homo sapiens
ttcaaaagccagcagtgtctgatgagaaaccgcaatcggaaggtgctggagaatctggtaaaagcaccattgtgaagcagatgaggatcctgcatgttaa

SEQ ID NO: 510764 - DNA, 98 bp, Homo sapiens
tgaatttgctgctttaagtcgattcacaggagcaacaatatttgagactgacatcaatttgccctatcttacaatggattcttctggacccaagcatt

SEQ ID NO: 510765 - DNA, 75 bp, Homo sapiens
tgtcagcaacctgcagtcattcttccgggcctccaaggaacttaagcaaaggatgggtttgtggagttcttccat

SEQ ID NO: 510766 - DNA, 74 bp, Homo sapiens
ccgtgttgtatgtgagtggaggaaatacgcaggccatcgaggagggcacgctggaggagatcgaagaggaggtc

SEQ ID NO: 510767 - DNA, 100 bp, Homo sapiens
cccgcccccaccgccagctccaccatcaacatcaacacctccacctccaagttctgtgccattgttatagaacgaccaaatgtgaaatggagtgacgttg

SEQ ID NO: 510768 - DNA, 75 bp, Homo sapiens
gcttaagcggctgcatcgagcccaggttgaaatcacaaagattagacacctttttagataggtgttcttcagcac

SEQ ID NO: 510769 - DNA, 100 bp, Homo sapiens
cccggcggcagcagctggaggaggatcgcactgctcatcttggccatcactatacacaacgttccagtttctttgttggaacgaagctcaactcatataa

SEQ ID NO: 510770 - DNA, 50 bp, Homo sapiens
tgctcagggtgccagacctcatcactcctgccctaagagccatagggaat

SEQ ID NO: 510771 - DNA, 49 bp, Homo sapiens
actgcctcagtatctgaacacaaggattcttctcatcgcagtgctccag

SEQ ID NO: 510772 - DNA, 73 bp, Homo sapiens
tcaagcttaggaccacccaccatgcctatccagagtaccaagtatggtgtccttggaagagacaaagttgtat

SEQ ID NO: 510773 - DNA, 100 bp, Homo sapiens
acagtcagcggacatggccgtagtccccacgtggtgttccacggttctgctcaccttgggcggcgactggcggcgcgatggacctgaccgggctcctgct

SEQ ID NO: 510774 - DNA, 82 bp, Homo sapiens
gcgggtgctggagggccgcttccgcatccccttcttcatgtctcaaggttttaaaatcaaagatgggaaaatcggagaaaat

SEQ ID NO: 510775 - DNA, 80 bp, Homo sapiens
agctcccactttcaagaagcaatagacttcattgtacttggaccatgagactgtttcagccactttcatcgacagcagtg

SEQ ID NO: 510776 - DNA, 75 bp, Homo sapiens
cttaactacaaatacagatggcaagattgagtttatttcaacaatggaaggagttgtgaacagatgtgtgtacag

SEQ ID NO: 510777 - DNA, 100 bp, Homo sapiens
agagaagcaccccagaagaggaggggagaagtgccccagaaaaaatcatccagtctctgaagctttgcccagctctatgagagtgctctgactgaaaacc

SEQ ID NO: 510778 - DNA, 110 bp, Homo sapiens
atcctgccgtccttctccactttcgccagcccgtgccgcgagcgcggcctgcaggaggcttctcacggcattcagcagcagcgttgctgtaaccgacaaagacaccttcg

SEQ ID NO: 510779 - DNA, 98 bp, Homo sapiens
aaaaaactgtggctgttggtttgtggaacagacagctccttctttattggtactccaaagattcaggtttactcacgtcatccagcagagaatggaaa

SEQ ID NO: 510780 - DNA, 90 bp, Homo sapiens
gtggccttcgtaccggactggctgaggggcaaggcggaagtcaatcaagagactatccagcggagaattcagcctcagcccccagatgaa

SEQ ID NO: 510781 - DNA, 101 bp, Homo sapiens
ctccccagccatgtggaactgttgtttttcaccattcagaacattgcctgaagcaggtccaccatgccgttagtaacgaggaacatcgagccaaggcacct

SEQ ID NO: 510782 - DNA, 60 bp, Homo sapiens
cggagcttcgcggggatcctgctggactgcacgaaaaatgaacttcgaccacttccagat

SEQ ID NO: 510783 - DNA, 82 bp, Homo sapiens
tgatccagcaaggtcggcagagcaaggggcttacgcagaaggacctggccacgttactgtaaaatggggaaaggagaaattt

SEQ ID NO: 510784 - DNA, 100 bp, Homo sapiens
gaactgtacacctattggaacccttaagaaatacatgctacaggatttaactatcagaatgaagatgaaaaagtcaccttgtctttccctagtactctgc

SEQ ID NO: 510785 - DNA, 75 bp, Homo sapiens
aagaaatgttctcgacagcaagataactgtaagaaacttggcctggtattcgatgacgtggtgggcattgtggag

SEQ ID NO: 510786 - DNA, 107 bp, Homo sapiens
ataagcaccaggagtttgacaatcacattaattcatatgaccatgctcacaagcagggagttaaatacctgtgcatcccagcagcggattcaccatctcaaaacctg

SEQ ID NO: 510787 - DNA, 83 bp, Homo sapiens
tggctcccgcatctgcctccctgccccagcccatcctctctaaccaagggaacccaccaagaccaacctggtcacattcttcc

SEQ ID NO: 510788 - DNA, 82 bp, Homo sapiens
gcggcggcggcggcggaggatgagcctgcagagcgcgcagtacctccggagcatcagatccatgctgctgctgactcggagc

SEQ ID NO: 510789 - DNA, 51 bp, Homo sapiens
ccaaggaagaggactccacgggaccgagaggagcggaagctgctgctggac

SEQ ID NO: 510790 - DNA, 87 bp, Homo sapiens
agtcaggcttcatacgctattgtcctgcccggctttagccgccagtcttcactcctgttcaagattctctccagtgttcggaatcat

SEQ ID NO: 510791 - DNA, 51 bp, Homo sapiens
cagaaagagtcaacagcagtggcaacagaatgacagcccatatcaaggcgg

SEQ ID NO: 510792 - DNA, 100 bp, Homo sapiens
ctttccgggagactggagtcgaaggccgtgaggatgaccagtgtcccagtgaaggaacgagtgaaggtgtctcagaactggagactggggcgctgccgag

SEQ ID NO: 510793 - DNA, 90 bp, Homo sapiens
ctgagtgccactcgtaagaatgccagcaacatggagtacaggatgatgactttgagttcactggcagccacctgacagtaaggaatggct

SEQ ID NO: 510794 - DNA, 82 bp, Homo sapiens
gatcctgaaaacagaaggaaattgaaggaacttggagttaatggtctaatttatgataggagatgcctacatagaagagtga

SEQ ID NO: 510795 - DNA, 98 bp, Homo sapiens
tggaactgtgcccacaccagaagccatcagcagcaaggttgtttttcaccattcagaacattgcctgaagcaggtccaccatgccgttagtaacgagg

SEQ ID NO: 510796 - DNA, 51 bp, Homo sapiens
cagaggatgatgctgactttgatgaagaaaactgtggatttagttactcca

SEQ ID NO: 510797 - DNA, 101 bp, Homo sapiens
gcctcccaaagtgctaggattacaggtgttgagccagtgcaggttcaggaaactgtggaaaatcacttgaagagtttgctgatcaaacattttgacccccg

SEQ ID NO: 510798 - DNA, 100 bp, Homo sapiens
tgagcaagcggccgcgcactgaggaggcggcggccgacggtggcggcgggatgcagaaatgttcccactgccaggaggcaggcgccaccttgggctgcta

SEQ ID NO: 510799 - DNA, 100 bp, Homo sapiens
tggcggtgctggtgcagcgggttgtgaaggacatcactaacgccttcaggaggaacccacacatgattcgtgaagttttttggaaacctggctgtcatgg

SEQ ID NO: 510800 - DNA, 100 bp, Homo sapiens
ccgctataaactgctgatccacatgagagtccactctggggagaagcccaacaagtgtacggcagtactacgagatgctttacaacacagctgacgagct

SEQ ID NO: 510801 - DNA, 96 bp, Homo sapiens
ctgacagtatgctggcccacatgtttaaggacaaaggctcctgggtagaactgcacttcagcaataatgggaacgggggcagcgttccagcctcgg

SEQ ID NO: 510802 - DNA, 80 bp, Homo sapiens
cgagaactggctgaagccgatgaacagcgccgggatccagaacatgaaaggctcccggagcagcgctgactcctccagga

SEQ ID NO: 510803 - DNA, 114 bp, Homo sapiens
gctccggctcctgtttcctgtagcgtccatcctgccagagactgtactgcttagggggggatatgagactttctactcggaatatcctgagtgttgcgtggatgtaaaacccat

SEQ ID NO: 510804 - DNA, 100 bp, Homo sapiens
gtccccttgctggctgcccctcaggacccctgctacgtggagaaaacctcggataagaagattaagattgcggccctgcgcatgtatactagctgtgtgg

SEQ ID NO: 510805 - DNA, 75 bp, Homo sapiens
cacacctggatccaggataacggaggctgggtaaagtcagtgataaatcttttgtttgctgcatatactggagat

SEQ ID NO: 510806 - DNA, 82 bp, Homo sapiens
cccggcgactggccacagtgatcactcatgtcggtttcagtgtagctcagaagccatttggagccacgtatgtatggagcag

SEQ ID NO: 510807 - DNA, 89 bp, Homo sapiens
cccagaacgcagatcagaggtagtcggacctttcccgctggcgcgcagcctcagctagttgtatcacggactgattcaccgagcccaac

SEQ ID NO: 510808 - DNA, 75 bp, Homo sapiens
gcgccgcgctccaaccgcctcctcctcctcagtaacgcgggacagtcattttgtttactcattcagccctgttgc

SEQ ID NO: 510809 - DNA, 101 bp, Homo sapiens
cacaagtgaaagacacaatgaatggtcatatttctaatcatcccagtagttttggaatgtacccatctcagatgaaatcactttgggaagcagtgacatcc

SEQ ID NO: 510810 - DNA, 100 bp, Homo sapiens
caggcatcccagctacgaaggatggaatcttcaatcaatcatatttcacaattggtagctggcagtgttgtgatggcttttgaagaagtatgcccggaca

SEQ ID NO: 510811 - DNA, 72 bp, Homo sapiens
ggaattcgccgtgcccgagaatagctccgtccagcaggaatgtatcctgtcaggtataatgtcagtgaatgg

SEQ ID NO: 510812 - DNA, 90 bp, Homo sapiens
aacgaacaacgctgctattataagtatgataagtattatcagcaacataatagttctgggcatcttcattaagtacaaggaacttcggac

SEQ ID NO: 510813 - DNA, 89 bp, Homo sapiens
agcacatagtggagcaaatggtggctttcattgggttgacctgacagttcaagaaaaggagaaatatcttaatgtgtctcgctggtttt

SEQ ID NO: 510814 - DNA, 83 bp, Homo sapiens
ggagaactgctaacctagggctactgttgattttgactatcttcttagtggccgggggcagctggcattttatgctatgtggg

SEQ ID NO: 510815 - DNA, 76 bp, Homo sapiens
agaaaatcgagacctcaagtaatcattcccaagattaacctccatttcagctaatcatgggagagattaaagtctc

SEQ ID NO: 510816 - DNA, 98 bp, Homo sapiens
tccagcatcaagatccgtctgacagatacttggcatatcgaaattttatgattgacacgtatcgtctaaacccccaagagtatttaactagcactgct

SEQ ID NO: 510817 - DNA, 100 bp, Homo sapiens
aacatataaagcccgagcccaaaccccgccaccatcataggaagtcagcctcataccaaaccatccgtttttgtcatgaaaaatggaacaaatgtcgctt

SEQ ID NO: 510818 - DNA, 112 bp, Homo sapiens
gcagcgtgttacaacgtgggactgtgaccagggcaagcactctgacagtgaccttctaccgctttgaggctgtgtgggatagctctctgcataactcccttcttctgaaccg

SEQ ID NO: 510819 - DNA, 50 bp, Homo sapiens
ttcgaagtttggatcacagcctataccagatccagtttgctgaccagaag

SEQ ID NO: 510820 - DNA, 82 bp, Homo sapiens
gtgctgcgggtctgctcgggggtctacttcgagggggttggcatctgcacatccttcctgggcatctcgtgggcactgctcg

SEQ ID NO: 510821 - DNA, 75 bp, Homo sapiens
gaagagggaagacacgcggaaacagtaccttggccatgtagaagttgatgaatcaagaggaatgcacatctgtga

SEQ ID NO: 510822 - DNA, 118 bp, Homo sapiens
acatttcatgagagaagaaatacaggatgcctctcagctgccacctgcctttgacctttttgaagcctttgcaaaagaactgcaagcacatgttgaccagataactgaaatggcagca

SEQ ID NO: 510823 - DNA, 75 bp, Homo sapiens
ctcgaaggccggccagcaagcttcaggttctctacttttagagtcgaaaataaatcctaacactgcataccagaa

SEQ ID NO: 510824 - DNA, 108 bp, Homo sapiens
cctttgtctccccgatctacggggctgacatcagcggctctttgtatgatgactgcaccgtccaggtgaggttagagctggggcatcgcgcccaactgcgcaagaagc

SEQ ID NO: 510825 - DNA, 100 bp, Homo sapiens
agcggccgccgccgctgccgcttccaccacaggactgagcagggggaggaacatttaagctgatggaagtggaagtggaagttgctgtacattggcagca

SEQ ID NO: 510826 - DNA, 100 bp, Homo sapiens
cgcaaggagctacggaagcgcctcaacctagaggagtggatcctggagcagctcacgcgcctctacgactgccagctccagctccagaaatcccagtacc

SEQ ID NO: 510827 - DNA, 98 bp, Homo sapiens
tgctcctgcgtttggtggatgatttcttgttggtgacacctcacctcacccacgcgaaaaccttcctcagatgtacggagcgcaagaggacggcagcg

SEQ ID NO: 510828 - DNA, 100 bp, Homo sapiens
cacacaaggaggatctaagcagcaagggaggcagcagatggctgaaattctgatccgatgtggctggttaatgcatgatctgaaaacccctgcactggtg

SEQ ID NO: 510829 - DNA, 100 bp, Homo sapiens
gggggctgcggcctagaggtccgggcttggagttcgcctcagacgcggtggagccgccggagtctgagaagatgtgtcttgctgaatcagggctctctta

SEQ ID NO: 510830 - DNA, 74 bp, Homo sapiens
tcatgcgagagaaatatccggagaagttcaacagcaggcaagtatatcgcgtcaacacagcgacctgacgggac

SEQ ID NO: 510831 - DNA, 114 bp, Homo sapiens
gcccgcttcctggaatggcaagcgcagcaacaacagagagcacgtgggtgctttcttctgcgacctggtactcatctacctcatcaaaaagagagagttttaccgtgacaagaa

SEQ ID NO: 510832 - DNA, 90 bp, Homo sapiens
cgggcgccgtcggacctgcagaccccggaagctgcggaccgggccggagccccagtttgagggacagcgggatatccaccatgctgctgt

SEQ ID NO: 510833 - DNA, 102 bp, Homo sapiens
gcaggacttgcatttattgagctcatcaatgaaggaaggagagagttatgtatgtggctccatagagcccttcaagaaactggagtacaccaagaatgtgaa

SEQ ID NO: 510834 - DNA, 74 bp, Homo sapiens
gtgggtgagcggcggccacggcatcctgtgctgtgggggctacgaggaaagcgttggtcaaatcggaagcgatt

SEQ ID NO: 510835 - DNA, 82 bp, Homo sapiens
tgtcggggggcttggcggcttttctcctcagttttctggagtgctttggaggagagggacttgccatgaggtgttgaagcct

SEQ ID NO: 510836 - DNA, 97 bp, Homo sapiens
gaagtgaaagagatggcctggtggaaagcctgggtgctcctgacctctgataaagctgcagccaatttctcagatcgttctttgctgaagaacttgg

SEQ ID NO: 510837 - DNA, 76 bp, Homo sapiens
cttactattgcactgtcacagcaagaatctaggtaaaaatggcttatctaacagtagcattttgttggataaatgt

SEQ ID NO: 510838 - DNA, 100 bp, Homo sapiens
cagttcaattactacgaggcgaagcaggcgtgcgaggagcaggacggacgcctggccacctactcccagctctaccaggcctgcagcatggcccagctgt

SEQ ID NO: 510839 - DNA, 83 bp, Homo sapiens
attctgccgaagagaacaagacgtgtgaagactcagggatgctgagaacttgctggagtcacagccactgggatcctttctca

SEQ ID NO: 510840 - DNA, 100 bp, Homo sapiens
atcctgtctctcaggatgcacttcctccaaaacaggtaattgaggtgaaagccaaaagaagaactggaccacttaactttgtgacttgtatgagagagac

SEQ ID NO: 510841 - DNA, 87 bp, Homo sapiens
ccagcctcttgcgaccacagccagagcctcagcaggagcctgttctcatcaccatggcaacaggtctcaccaacggctttgggggtg

SEQ ID NO: 510842 - DNA, 83 bp, Homo sapiens
gtgcctgcaacctgtccggggatcccagggaggctctgccatccttccagatcccagtctcaccacacatctacaccagtgtc

SEQ ID NO: 510843 - DNA, 100 bp, Homo sapiens
cctttggagtgaatcaacctggaccttatatcatgtatacaactgtagatgcaaatgggtatctgaaaaatggatcagacatgatgtattgagtaaaagg

SEQ ID NO: 510844 - DNA, 98 bp, Homo sapiens
ccagaattgttcagtggaagcccctgcttggatgcctgtccaccactgtactcatcatcatgaccatctcctccacgcttctggccctcgtcttgatg

SEQ ID NO: 510845 - DNA, 51 bp, Homo sapiens
acgtgggccttatcacactggctaagaatcagagatcattgatttcttcct

SEQ ID NO: 510846 - DNA, 96 bp, Homo sapiens
tcgcctccttgcccgtgaccgtcgctagaactcagttgtgcgttgcggccagtcgccactgcttacttggaccatgagactgtttcagccactttc

SEQ ID NO: 510847 - DNA, 100 bp, Homo sapiens
ccagaaactttaaatcttgagaaaagaagattgtctatcatgaaggaggagggagctctgacagcctttcgcaagacatatgacaaaactgtggccctgg

SEQ ID NO: 510848 - DNA, 100 bp, Homo sapiens
tgttggtataaatgaagcaaagaaaaattgtataattgttccaaatggagataatgtatttgctgcagtcaagaccgtataatagacgctggccccaaag

SEQ ID NO: 510849 - DNA, 98 bp, Homo sapiens
cgccccctcgcgtcgcggccctgggcgggcgccgcgagccggatatgtcttctccgactactatgaagaagcctgaaaagccattgttcagctctgca

SEQ ID NO: 510850 - DNA, 100 bp, Homo sapiens
gacatgcccacggagttgcacattgctttgttgcctccttctcaaaactcaaatactctttattcatctaagattatttactggcaagatgagcaggatt

SEQ ID NO: 510851 - DNA, 50 bp, Homo sapiens
tgttctgatcactactgacttgttggtgtttccccccgggccggcctgcc

SEQ ID NO: 510852 - DNA, 90 bp, Homo sapiens
tcgaccagtccaagctgcctggagtcaaggaaggcttgaaactgttacaatatggctttccttggactcttctctttgctggttctgcaa

SEQ ID NO: 510853 - DNA, 100 bp, Homo sapiens
cctggaatgcagccaaatgtctcctttgtgaggataaacagctcgttggcagtagcagcttatgaggatggtccagccgccgcagggaatgacgccggtg

SEQ ID NO: 510854 - DNA, 75 bp, Homo sapiens
ctcggctggacaatctgcacagctgcttctgtgccctgcagctccacaagcagcaggcccaggctgaacctgagc

SEQ ID NO: 510855 - DNA, 100 bp, Homo sapiens
tgtccgagcccaaggcaattgatcccaagttgtcgacgaccgacagggtggtgaaagggtatttgaagtataccatacaactgttttgaaaatccagcgt

SEQ ID NO: 510856 - DNA, 75 bp, Homo sapiens
ctgctacctgcgtctggtcagcgccgaggaaagaccacagcaagattctttcattcgtctcctcctagcctgggg

SEQ ID NO: 510857 - DNA, 97 bp, Homo sapiens
acgcataatggatgaaaggaaccgacagggctttgttcgcgggggtcacagctctcatggctgcagctagcgtgaccccccctggctccctggagtt

SEQ ID NO: 510858 - DNA, 100 bp, Homo sapiens
aacttcacccacgggctggctgtggctgccagcttccttgtgagcaagaagggaccccaaccagccggtgccgcaggataccaagttcatccacaccaag

SEQ ID NO: 510859 - DNA, 75 bp, Homo sapiens
gccagccgctgttttgccggaggagcccctcaggcctgcctggctctctggctatgaaaatcctgtggtgtctcg

SEQ ID NO: 510860 - DNA, 90 bp, Homo sapiens
tctctcatctcgctcggctgcgggaaatcgggctgaagcgactgagtccgcgatggagcccgagcagttcagtgatgaagtggaaccagc

SEQ ID NO: 510861 - DNA, 74 bp, Homo sapiens
cttgaaaggaggcccctgccgtgtggacccgtaaaataaaatggctccggaccaaaatttaacagtgccatccg

SEQ ID NO: 510862 - DNA, 50 bp, Homo sapiens
gattatctacaacactgatgagacaaaaagccttggcatccacgggagga

SEQ ID NO: 510863 - DNA, 101 bp, Homo sapiens
tgctcggccgatgaagtgcagaggtttttttctggaccctgatgcttggtgtgacctgagtaaatttgacctccctgaggaaccatctgcagaggacagta

SEQ ID NO: 510864 - DNA, 83 bp, Homo sapiens
tgtaccatgagggggagcaggtggaatatgcagaaatgaggtctgcggggtttccgagaggctcgccgggatttctggcgggg

SEQ ID NO: 510865 - DNA, 90 bp, Homo sapiens
gagcattccagatcagattctgtgacagagcgttctaccaaggagaagcagagctcagaggaagaagaaaaggaaacaagaggggttcag

SEQ ID NO: 510866 - DNA, 50 bp, Homo sapiens
gggggcatggagtgcaccctggggcagggtgtgggccgaagatatgctca

SEQ ID NO: 510867 - DNA, 123 bp, Homo sapiens
agacgatgcgcaaggcagagacgctgccagaggtggaggctgagctggcccagagaattgcagccctcaccaagttccagtctcatcagattttccatgtcctggtggtggcagcagcctttg

SEQ ID NO: 510868 - DNA, 100 bp, Homo sapiens
tcagcctggggaatgagacccaaactgctcatacagaattacgcatttccacttctaatgatccacatgaagaccatgcccgccgccatgttcaggctcc

SEQ ID NO: 510869 - DNA, 82 bp, Homo sapiens
gcagctgcgatctctgtggtaggcccagagatcctgaaggagctagacgagtgctacgagcgcttcagtcgcgagacagacg

SEQ ID NO: 510870 - DNA, 75 bp, Homo sapiens
gcagaacccaaattggcgtttgtcatcagaatcagaggatctccaagaaggagaagcttctctcgcagccggagc

SEQ ID NO: 510871 - DNA, 82 bp, Homo sapiens
acctggagtcaggaggcggtgtccaggagagtcgctcatcaaccccgggttcaagagagatcctgaaggagctagacgagtg

SEQ ID NO: 510872 - DNA, 75 bp, Homo sapiens
gcaacatggggcttgagaaagggaatggcatcaccagctgccggatgcggactgagagtgagccatcttgtggct

SEQ ID NO: 510873 - DNA, 75 bp, Homo sapiens
gctgtcaacctatgttactaagacacgttggaaagagatgtggctgcaagattattggcaaggtctggaccaggg

SEQ ID NO: 510874 - DNA, 100 bp, Homo sapiens
acgcacatctacggcgcctcggccggggcgctcacggccacggcgctggtcaccggggtctgcctggatgacgacaacccccccgtgtcttttgtgaagt

SEQ ID NO: 510875 - DNA, 100 bp, Homo sapiens
gaggcaaggagcacctggtctggcagctctctggtggctgtgagctgacagtggtgatccatgacttcaccgcttgcaacagcaacgagctgaccatccg

SEQ ID NO: 510876 - DNA, 75 bp, Homo sapiens
gcactggtacacgggcgagggcatggacgagatggagttcaccgaggccgagactggaatgttgacctgattccc

SEQ ID NO: 510877 - DNA, 155 bp, Homo sapiens
ggcaggacttcctcttcaaggccatgctgaccatcagctggctcactctgacctgcttccctggggccacatccacaggccggatcttggacctgaagactgggacggtcaagaaagaagggcagcagtcatccatgaggatgtgcatgggctcg

SEQ ID NO: 510878 - DNA, 98 bp, Homo sapiens
ggcaaagtgtggaaacagcagatgtaccctcagtacgccacctactattacccccagtatctgcaagccaagtgacaaaaatgctgagtttcttccgt

SEQ ID NO: 510879 - DNA, 75 bp, Homo sapiens
ctgccctgagacggtgtcccgccgaaaggacggggaggtttactgcatcgacgcgcggttctacgggaacgtcag

SEQ ID NO: 510880 - DNA, 90 bp, Homo sapiens
cccggggagctgactccattgcatgtgggaccttcagccgtgaactggtggtatcacggaaaacttgacagaacgatagcagaagaacgc

SEQ ID NO: 510881 - DNA, 83 bp, Homo sapiens
cccgccgtcgtgcaccctgagctcaatggggctgcctatagccattgagacccagagcagcagttctgaagagatagtgccca

SEQ ID NO: 510882 - DNA, 100 bp, Homo sapiens
aggcagaaggaacccatggctttagccggctgcccagattcctttttgcaccatccgtactaccaggaggaagatgaaggctcgtgctcccccacctcct

SEQ ID NO: 510883 - DNA, 100 bp, Homo sapiens
ggagaatatggtgcagaggccctccacggaaattgaagttggtggtggtcggaaagctatcataatctttgttcccgttcctcaactgaaatctttccag

SEQ ID NO: 510884 - DNA, 76 bp, Homo sapiens
aagtcttgcctctccattttcttccgttcatgaggacttcagatgagtcaaaaccccatcctagtcctttcaggag

SEQ ID NO: 510885 - DNA, 113 bp, Homo sapiens
gcgaaggtcagcgccgacggcagccggcacctgacggcgtgaccgacccgagccgagccgccgagcgtgcggtcccgggatggctctaccccggccaagtgaggccgtgcctc

SEQ ID NO: 510886 - DNA, 74 bp, Homo sapiens
cagatgaacttctatcacagtttaagggatcatagacggtatttctatgtaaacgaacagtcgggcgagtctca

SEQ ID NO: 510887 - DNA, 83 bp, Homo sapiens
gaaccaagtgaagccacaaacagatcagattcttctgcacagtcagtatcctcgggagttcgtgcaccatctcctgccccatc

SEQ ID NO: 510888 - DNA, 82 bp, Homo sapiens
gcggacccagctgcggcgacgccaggagaccccaagctgcatcgccgagtgggcaatactgaacactgcgcagcttgcagag

SEQ ID NO: 510889 - DNA, 100 bp, Homo sapiens
ctccaggagttcgtctcttacgtctgcggaagtgcagctgcctcagttcttagcgcaggtgacgcatccaaagaagacattgacactgctatgaaattag

SEQ ID NO: 510890 - DNA, 51 bp, Homo sapiens
ctttgtgctgggcaagagggatctaaggcttcttgaaaaaagttttgaact

SEQ ID NO: 510891 - DNA, 100 bp, Homo sapiens
gaggaaccacacgctgatcatggtatccgttacagcactgatgtgagtgtagatgaagtaaaagctttggcttctctgatgacatacaagtgtgcagtgg

SEQ ID NO: 510892 - DNA, 126 bp, Homo sapiens
gccaagcactcagctctccaatctgggaagcaccgagactctagaagaaatgccctccgggtcacaggataagaaccacacgatgagccagcacgcacagtgagggatcgctcaacaggacacctc

SEQ ID NO: 510893 - DNA, 100 bp, Homo sapiens
gaacgtcatgagcatagtgatcccattgggggttgatacagcagagacgtcatacttggaaatggctgcaggttcagagctggtgaatcaaagacttctg

SEQ ID NO: 510894 - DNA, 100 bp, Homo sapiens
gcctgcgcagctccggccgcctggctccccatactagtcgccgtcaatcctttcccatggtaccgtggcagactgtgctgttgttggcaaggaagatccc

SEQ ID NO: 510895 - DNA, 82 bp, Homo sapiens
gccagcccgtgccgcgagcgcggcctgcaggaggccccttcccagctgcctgcctgccctagccagctcccaggtgaagaga

SEQ ID NO: 510896 - DNA, 74 bp, Homo sapiens
ggtctcctttcccggccgcacagggactttctgtctcttctgaaggcccttctcaaagacttggaacacctaag

SEQ ID NO: 510897 - DNA, 100 bp, Homo sapiens
acttacctaggaatgagagggacaggagtatctgaggatggagaactcagcaggacttgagtgagaacgccatccaggccatccccaggaaagcttttcg

SEQ ID NO: 510898 - DNA, 90 bp, Homo sapiens
ggcgcagaggcctacatcccacagagatacccagacaacaggatcgtctcgtccaaggtctggaggcggctggtggaaatccaattcccc

SEQ ID NO: 510899 - DNA, 98 bp, Homo sapiens
gaaaatcataccatatcagatgcctcgcagagcaccaggcccaccgtgaaagaccgaagccaggacagcacagccgtagcactctcagactctagctc

SEQ ID NO: 510900 - DNA, 98 bp, Homo sapiens
agctgcgaggaggggaccccactcagtatcaccagggcccctgaaatcttgatgagaagtggccacaatcgtgctgtggattggtggagtttgggagc

SEQ ID NO: 510901 - DNA, 90 bp, Homo sapiens
gaaatatcctgcagttagatgttaaggacatgagcaaatccttaaccaatctgcctgaacacacagtaaaactctgtgacaatttatcca

SEQ ID NO: 510902 - DNA, 75 bp, Homo sapiens
tccaggtcgagcagttaggccgcgagcgactgcggcgccgagccgacaatgcagatcttcgtgaagactctgact

SEQ ID NO: 510903 - DNA, 119 bp, Homo sapiens
cggagaagcgcgcgggcgcgcaggccgcggggagcacctggtactatactggcaattgctggagaagattttgcaattgttgcttctgatactcgattgagtgaagggttttcaattca

SEQ ID NO: 510904 - DNA, 100 bp, Homo sapiens
tcgctgccagatattccacccatacagggaagaggaagaacgtctgagaaataaaattcgagctgatcatgagaaggccttggaagaagcaaaagaaaaa

SEQ ID NO: 510905 - DNA, 98 bp, Homo sapiens
tgcagtcggcttccgcggggcccagcgtgagtctctacctgagcgaggacgaggtgcgccggctgatcgatgttccagcactctttccttcagagcac

SEQ ID NO: 510906 - DNA, 75 bp, Homo sapiens
tggagagcggtggccaggatggggcaggggatgatgacgtggacctgggctcctcgaaggaggtgacaggcatca

SEQ ID NO: 510907 - DNA, 83 bp, Homo sapiens
gtgatcccggcgacatactacctctggccccgagatcagaatgccggacaactacacctttgcccaacctgggattcaaatga

SEQ ID NO: 510908 - DNA, 100 bp, Homo sapiens
atgggatctgggtggagctacctgtggtggtcaaagagcttccagaggtgtactatgaggggctgcaggacaagctggcacagatccgcgatgcccgggg

SEQ ID NO: 510909 - DNA, 100 bp, Homo sapiens
ttgctctgctcttccaacaccagtggaagatgatcacatcccaggtgtctgacttccagcaactgctggcctgtgccagggtgcaagctgagcactggag

SEQ ID NO: 510910 - DNA, 102 bp, Homo sapiens
cgtcagccccacgtcgccggcctggaggggcgaagaggacgagggggccaaggcttcctccgggggtagaagagcagaggatggctctgtcattgattatga

SEQ ID NO: 510911 - DNA, 100 bp, Homo sapiens
agatgttacagttaatggttgctaaaaaagcggtggatgctgaaccagtcctgaaagctcaccagtctcactctgcagagctggtgactgccctcatgtg

SEQ ID NO: 510912 - DNA, 105 bp, Homo sapiens
ccaagaagtccgagacacgcggtgaggcggcgacgggctccggcaaagtgtgggatgctgtctcaggagatgaattgatgaccctggctcataaacacattgtca

SEQ ID NO: 510913 - DNA, 75 bp, Homo sapiens
cgcagtggtcgcttcttctccttggctgaatccacctccacaatgccgctctcaggaaccccggcccctaataag

SEQ ID NO: 510914 - DNA, 76 bp, Homo sapiens
ctcggattctcgtagctgtgccgggtgaaaagccatacaagtgtacctgggaaggctgcgactggaggttcgcgcg

SEQ ID NO: 510915 - DNA, 82 bp, Homo sapiens
gatgacggctccctgctgttcgagtacctgcccagaggggcccactcgctgtcccaagatggctgtgccacccacgtatgcc

SEQ ID NO: 510916 - DNA, 100 bp, Homo sapiens
ccagctcagacaagacggtggaggtcaagcccgggatgaagtcacgttggtcatgttcggagtttgacctgaatgagattcgcctgatagtttaccagga

SEQ ID NO: 510917 - DNA, 100 bp, Homo sapiens
ccctggctttgatggagtagtcaaggaagagcaagcagtcagaccaaaatacctactgggtcgggaagtcactggaaacatgagagccatcctaattgac

SEQ ID NO: 510918 - DNA, 50 bp, Homo sapiens
tacggagcacgagaaatacggcgtgggttactataacaacagtaccaagg

SEQ ID NO: 510919 - DNA, 75 bp, Homo sapiens
gagctgtaaccatttttattagaggaggaaataagatgattggttcctactttggcagtattttaacaacaactg

SEQ ID NO: 510920 - DNA, 82 bp, Homo sapiens
ctcaaccatgatgcaattgtagttcgaaaggacagagcgggatgccaccagcttgtccaaagggaagttccaggagctcctg

SEQ ID NO: 510921 - DNA, 100 bp, Homo sapiens
gccgcgggcaacctcggagcttatactcctcccagtgacgggtctggagtgcgtgggggaccggctgttggcggttgtcctgggaccaagacaaattcgc

SEQ ID NO: 510922 - DNA, 75 bp, Homo sapiens
tcaacgcgtttggcaacgctttcctcaacagactccatcaagaatgctggaggaagggtgtttgtccactgccag

SEQ ID NO: 510923 - DNA, 75 bp, Homo sapiens
gagaaagtggagtccgagctgagatccatctgcaccacggtgctggactcacaccacccggcaagaactgctcac

SEQ ID NO: 510924 - DNA, 83 bp, Homo sapiens
cgcaagagtgcgccctctactggaggggtgaagaaacctcatcgttacaggccttcaatcaagcaggggcagggccgtacagt

SEQ ID NO: 510925 - DNA, 88 bp, Homo sapiens
ccctcacggcctttgttctcatctcgctgcaggaggctaaagatatttgcgaggagcaggtcaacgccaccctggagaaatgtgccac

SEQ ID NO: 510926 - DNA, 99 bp, Homo sapiens
aagaatttcaacaatctctatggcaccaaagcgagtgatagacagccaagcagagaaactgaaggagcttgacaaggagatccggcccttccggcagaa

SEQ ID NO: 510927 - DNA, 50 bp, Homo sapiens
cccgcaggatcccgccattgttcaggttgttcggaatcctataattgaaa

SEQ ID NO: 510928 - DNA, 100 bp, Homo sapiens
gggcgcagtttctcacgacgggccgagcctgccactacctgtcatttactccatcctttatagtgatgctacaggacgaagaggaatggataaaaacatt

SEQ ID NO: 510929 - DNA, 83 bp, Homo sapiens
cgacaagccgctggcagccgcggatctcaccgccgctcagggactggagactgatgcatgagggggctacggaggcgcaggag

SEQ ID NO: 510930 - DNA, 50 bp, Homo sapiens
gggggatgcagacattgaccatgaccaggatatgggtctgcaggatggag

SEQ ID NO: 510931 - DNA, 100 bp, Homo sapiens
ccaaaatcagagctggaacctgaggagagagagtctgtagaagaggcgacaccagggcttccaaatgaacaaccgaaaggaagatatggaaatcacgtcc

SEQ ID NO: 510932 - DNA, 80 bp, Homo sapiens
gctacctcgcccgggggcatcaggtttttctcccgctccagaaaaaaccaaatacacgctgatcgatgagcaggacatcc

SEQ ID NO: 510933 - DNA, 98 bp, Homo sapiens
gccgccgccggggaggagcagccgctgccgcccaggactgggcccttaggtgtggatccggagttgtatgagttaacaacttctaagctggaaatctc

SEQ ID NO: 510934 - DNA, 100 bp, Homo sapiens
cagagtgaagaaactgtgttccccccttgggttgctatcgggtttcctatcgctgaagtgttcacgctgaagcccctggagtttggcaagcccaacactt

SEQ ID NO: 510935 - DNA, 75 bp, Homo sapiens
tgggtccttgggtcgcaggtgggagccgacgggttctgcttccttcggtgctgcggctgtgtgttttctgagcga

SEQ ID NO: 510936 - DNA, 100 bp, Homo sapiens
caggaaacgataagccattatcaaaaacagctcttaaaaatcaaaggaagcatgaagctaagaaagctgcaaagcagccaaaatgaagtttaatcccttt

SEQ ID NO: 510937 - DNA, 75 bp, Homo sapiens
ggtaaagtcgagtatctggtgaagtggaaaggatggcccccaaaggactggtgattgcagctggaagtgcccatg

SEQ ID NO: 510938 - DNA, 96 bp, Homo sapiens
cagcatcgatgctagacagacagatgagttccacccgttcatcgaggccctgctgcctcacgtccgcgccttcgcctacacctggttcaacctgca

SEQ ID NO: 510939 - DNA, 100 bp, Homo sapiens
ctcccctaagtccagccagactgcaaggtgctaacacacttttccagggatttggacatttggtgccatcttcagaagatccaggagtcctgggaatcgt

SEQ ID NO: 510940 - DNA, 76 bp, Homo sapiens
ctcctccttggtcgccgcgtccttggctggcgtgaaactactaaagttcctggggaagcaaagtagaatttcataa

SEQ ID NO: 510941 - DNA, 75 bp, Homo sapiens
ttgcctttagtgcactcttctccttcacagtaaagtggctgattgggaaaatgaggtacgttagtgttcgcgatt

SEQ ID NO: 510942 - DNA, 82 bp, Homo sapiens
gccgagtgggaggatggcggaaggacccagacatggagctgcgggaagaagcctggtctccggggccgctggattctgagga

SEQ ID NO: 510943 - DNA, 100 bp, Homo sapiens
ctctgctgccgctcggtcacgcttgccatacttcccattgcctccagctgttgcacggaggtttcacatcatatttccagaaggctcctggaaagagtga

SEQ ID NO: 510944 - DNA, 90 bp, Homo sapiens
gaaaatacaaatcacacgcataatggatgaaaggaaccgacagaatgttcgcatcttaccacatacagttctttacatggctgattcaga

SEQ ID NO: 510945 - DNA, 90 bp, Homo sapiens
gcggttaacttcttttcacaagccagaagcctgtcttagatgttcatgcagaactagacagaattacacgaaaaccagttacagtttctc

SEQ ID NO: 510946 - DNA, 101 bp, Homo sapiens
ctcgctgcttcaggaggacctgcaggaggacgcagacggatgccccttcacagatgtagtcactacaaatcttaaattgcgaaatccatcggatagaaaag

SEQ ID NO: 510947 - DNA, 51 bp, Homo sapiens
acgaggagcagggcctgactgcgcaggctatagaaagcgcaattggtggta

SEQ ID NO: 510948 - DNA, 90 bp, Homo sapiens
caagtatcagattgaccctgacgcctgcttctcggttcttcagatagatcctgaagttacagatgaagaaataaaaaagaggtttcggca

SEQ ID NO: 510949 - DNA, 75 bp, Homo sapiens
atcattactaacaggatattcctcatgacattgctgtctgtggtaagcatccgtggcattcaagacgaagatccc

SEQ ID NO: 510950 - DNA, 96 bp, Homo sapiens
aggagaggccgggggcagccgccatcggcagcgccagggagcttctgataattggaggtgttgcagcccgggatcagctctctgttttggaaaatg

SEQ ID NO: 510951 - DNA, 100 bp, Homo sapiens
atttgaagttttagatacaacaggagaagaaccaaaagaaattttcatttcaaacataacgcaactgtcagttccccaaaacgtgtcactcctacctggg

SEQ ID NO: 510952 - DNA, 100 bp, Homo sapiens
gctcttctgcgtggccgtcagcgtggtgtggggcgtcttccgcaacgaggaccagtactggtgtggcatactcggacagagaagcccaagatgaagcagg

SEQ ID NO: 510953 - DNA, 100 bp, Homo sapiens
ggaaaacggagagactggggagaatgtggacaacagtgagtatatgcggaatggagacttcttacccaccaggctgcaggcccagcaggatgctgtcaac

SEQ ID NO: 510954 - DNA, 82 bp, Homo sapiens
gccatcttcgaacttagacttccggaaggactttggcgaggttggagagaggcgatttcctctcagaagagtggagggagcg

SEQ ID NO: 510955 - DNA, 50 bp, Homo sapiens
tccactaaagagttggacctgtcaggatttgtacacacagatatgacgaa

SEQ ID NO: 510956 - DNA, 101 bp, Homo sapiens
agcgtgggcgtttcgcagactcctaaggactgcacatgccagagcgaaggccgatgccgccgaccaggccgcgctggccgctcgccaggagtgcgacatcg

SEQ ID NO: 510957 - DNA, 97 bp, Homo sapiens
gtgactttggagccagcctgctaggggctgaattctgactcagccatttactaactgtgtgaccttagatgcaggacaagtactccaaaagtggcat

SEQ ID NO: 510958 - DNA, 100 bp, Homo sapiens
agctctattcaaatctggttcagattttacagctctgggccgactgaaccaagctaactcctccggaagagagtccaaggtgcctggtgcccgaagcgct

SEQ ID NO: 510959 - DNA, 83 bp, Homo sapiens
cgtcgccccgccgcgccgcgctccaaccgcctcctcctcctcagtaacgcggggaagacatgtaaggaatttgcataagacag

SEQ ID NO: 510960 - DNA, 91 bp, Homo sapiens
gatgccaaagaattgagctgaagcagggctacacatttttcatcccttccgccgtttccctggggagatggtaaccatactctattccata

SEQ ID NO: 510961 - DNA, 100 bp, Homo sapiens
gcattcagtccatcctgaaagaggaccccatggctgggggttatggagtgatgggtgacgatggttctattgattatactgttcacgaagcctggaatga

SEQ ID NO: 510962 - DNA, 50 bp, Homo sapiens
cctcagatccagtgataattgacagatgctgcagttggagaagaaacttg

SEQ ID NO: 510963 - DNA, 98 bp, Homo sapiens
ttacattagcagatatactattgtactatggacttcatcgctttataaatgcctaccgcaggaatgggatggcttttctagcctgctgatgtgacaac

SEQ ID NO: 510964 - DNA, 82 bp, Homo sapiens
ctgctgtgggcgctgctggcgctctggctgtgctgcgcggcccccgcgcatgaccatggtgaatccgggcagcagctcgcag

SEQ ID NO: 510965 - DNA, 50 bp, Homo sapiens
gtttctgggtccacttccaaaggtactctttccattccttaccccagttt

SEQ ID NO: 510966 - DNA, 51 bp, Homo sapiens
tgaagcaaaagccttccatgattacaaaactctcccaccatgtcgcagaat

SEQ ID NO: 510967 - DNA, 75 bp, Homo sapiens
gattctccgcgaggtgtgcagagtgctgagaccgtttcagtcattcagtcagtaccgctgtaagactgccaagaa

SEQ ID NO: 510968 - DNA, 156 bp, Homo sapiens
cccgccccatccccgccactttccccggagctgggccgcgaacacctcactattgatggtgtagcgctttaggggaagtgcacgcgttactttggctaaaaggaggtgagcggcactctgcccttccagagcaagcatggagcaacaggatcagag

SEQ ID NO: 510969 - DNA, 100 bp, Homo sapiens
ctccatcaggaccccagatgtctgacagccctgtgtgacaccaagataagtaacaatgtcatacccaggctatcccccaacaggctacccacctttccct

SEQ ID NO: 510970 - DNA, 76 bp, Homo sapiens
ccccaagttattcgtcagtgaggcggaaattgtggtgtacttgttcttttatcacgagtcatgaatacaggatcac

SEQ ID NO: 510971 - DNA, 118 bp, Homo sapiens
aagcagtataagatgatctgccatgtgttcgagtcggaggatctggtggaagttaaaggccccaatgatcgtctttcacataagcagatgatctggctggctgaactgcagaagctgg

SEQ ID NO: 510972 - DNA, 100 bp, Homo sapiens
tgacagataaagtccaggaagctcgatcaaatgcccgcctaaagcagctctcatttgcagctgctgtgacttactcgaagcctcgattggccacattttg

SEQ ID NO: 510973 - DNA, 87 bp, Homo sapiens
gcttaggaccagaagcctttcgcggagaaaaggctgacatgcccgtcctatatgacaggatccagcaagtaggcaatgaagcctatg

SEQ ID NO: 510974 - DNA, 121 bp, Homo sapiens
tggccgcctgcggcatcgtcctcagcgcctggggagtgatcatgttgattgaagaatggggcccatttgacttggtgattggcggaagcccatgcaacgatctctcaaatgtgaatccagc

SEQ ID NO: 510975 - DNA, 100 bp, Homo sapiens
attgtcattgcaagcactattggcagctgcagagccagatgatccacaggatgctgtagtagcaaatcagtacaagccagctgccatgttgtgagcacat

SEQ ID NO: 510976 - DNA, 100 bp, Homo sapiens
gatctttttcagtgttcttggaggtgtggggtgtgagaacttgatcagtttgtgtcagccaccttgttctctaaaggtacggaatggccacatcaaaaga

SEQ ID NO: 510977 - DNA, 50 bp, Homo sapiens
ccgaaagtggctctacaaacccaagagacctgtcggccatggagcctaat

SEQ ID NO: 510978 - DNA, 100 bp, Homo sapiens
gtgccagatttggaaaaggctgcagcattttataagaatattctgggggcccaggtttgatatacgtttgatgaaagaaggtcgtatgaaaggacaagct

SEQ ID NO: 510979 - DNA, 100 bp, Homo sapiens
aacaaattgacaacctagccacaggaagctgttttaggttatgtgaaagagatgtttcctcatctctaaggcttaccagaagctctgatttgaagagaat

SEQ ID NO: 510980 - DNA, 99 bp, Homo sapiens
tcgacgctggcggtggacgcaggcagcatggaccacggttgctgggcggatggggagcgtctatggtcagatcccatgcgaggcccaagaaaactagaa

SEQ ID NO: 510981 - DNA, 100 bp, Homo sapiens
tgcacaccaaaccctgggttagagcaagcttagcagtgtctgcaaaaacgaatcttttcctacaacctgttaactgactggactgttggtaacaaagtaa

SEQ ID NO: 510982 - DNA, 100 bp, Homo sapiens
tgggtttgaacggaatgctggagtcagtggaagacggagctggtcggcccgaaggtcaaaatgcagatcttcgtgaaaacccttaccggcaagaccatca

SEQ ID NO: 510983 - DNA, 83 bp, Homo sapiens
gagacagctgaggcccgcggagaccagggagacagggcagggcattgttcatgcactgaccgacctcagcagccccggcatga

SEQ ID NO: 510984 - DNA, 90 bp, Homo sapiens
gcccgaaaccaaaatgaaataatttttgggctgaatgatggatactatggtgctccatttgaacataagcatctggaatcaagagaccca

SEQ ID NO: 510985 - DNA, 90 bp, Homo sapiens
actggaaactgattggaaactctttgggaaagccactcgaaaagatacaggccacgcacaagcaaagagagctggctaataaatcatggg

SEQ ID NO: 510986 - DNA, 87 bp, Homo sapiens
cgtcttggctcagacgctcatgggctctggaaggggaggctcaccgtgtgctatttgggtttgtgcctgagacaaaagaagagctcc

SEQ ID NO: 510987 - DNA, 87 bp, Homo sapiens
aattctgcattgaaaaagttgggaaagaaaattggctacccagaagtcatacctgaggtggaggagacactgaagcgactgcagagc

SEQ ID NO: 510988 - DNA, 100 bp, Homo sapiens
ccaaagcaagtttatgttgataagttggctgaattaaaaaatgcagagccagagccccggagcctctccctgggcggccatgtgggtttcgacagcctcc

SEQ ID NO: 510989 - DNA, 80 bp, Homo sapiens
gggtaacaagatacccactgatcattaaaaatgttttgggatttgagattgacgcggtgaactctgtccagttttcaaac

SEQ ID NO: 510990 - DNA, 74 bp, Homo sapiens
gaagaggtgatgatagctttggagacaggtggctacggaccacaacatggataacacgtcaactgtgctgcggg

SEQ ID NO: 510991 - DNA, 90 bp, Homo sapiens
ttccccagctgtgatcccccatacctggcctgccgtctcctggctgctgcttgcatatgacgcacagacattcgggtgcttcagccagaa

SEQ ID NO: 510992 - DNA, 83 bp, Homo sapiens
cttccgggaacgggacgagttcgtcatccgtgctgaggacatcccttccctcaaggctccatcctgagccacatccacaagcg

SEQ ID NO: 510993 - DNA, 89 bp, Homo sapiens
gcgaaccaacaagttcatcaaggagctcattaaggacggctctctgctcattggggcgttgaggagtttttggattcaaagcataaaaa

SEQ ID NO: 510994 - DNA, 98 bp, Homo sapiens
ccgagtgtcactcagccagcctcgtaccctgccagccacctctcggccatctgcaggtgcggtcttgctctgttgcctaggctggagtacagtggtat

SEQ ID NO: 510995 - DNA, 50 bp, Homo sapiens
ttcgcctccatctgtaccatgcaggactctggactgtcttcacactaggt

SEQ ID NO: 510996 - DNA, 105 bp, Homo sapiens
caacgccaggcgccgctcctttacaggtaccagctggaggatgagtctgcgcatttggatgaaatgccactaatgatgtctgaagaaggctttgagaatgaggaa

SEQ ID NO: 510997 - DNA, 75 bp, Homo sapiens
tttcatggacgggaagcaggcgtgcgtgctcatggtgtgcctaccgcatgttgccgctgctgtttctgctgggac

SEQ ID NO: 510998 - DNA, 100 bp, Homo sapiens
cggcaaggagagacgtcgctgaggggcttgcctgaagcgaggggaagtgggaaaactcttgcctttgccatcccaatgattcatgcggtgttgcagtggc

SEQ ID NO: 510999 - DNA, 100 bp, Homo sapiens
cggtggcactctgtgcaggtgcagtactacaacaaggaacttagtgatttggcccgtgaccctccagcacaatgttctgcaggtccagttggggatgata

SEQ ID NO: 511000 - DNA, 100 bp, Homo sapiens
agggagtgtcgactttggcccagaagtcacatcctctgacaagagcctgaaggtgctactcaatgccgaggacaagggcgcactgtgtgaggagaacatg

SEQ ID NO: 511001 - DNA, 51 bp, Homo sapiens
aaatatattgtgtgaatctccagaaaagtacctgtttgaaaatggtagaat

SEQ ID NO: 511002 - DNA, 88 bp, Homo sapiens
aagatccccgttcctggagattctgattgaggtgtggccgacgacgatgccctcgctgaggagcgcatgcggagaggccagaacgccc

SEQ ID NO: 511003 - DNA, 83 bp, Homo sapiens
cccgactgcagctccgtggatttcagtgtcttttctgcctgctcagttccagttgtcacctcaacagacagtcagctaaaact

SEQ ID NO: 511004 - DNA, 74 bp, Homo sapiens
gcaaaaggtcacaaattacattacccaatggtggaatattgtatacctgaccctaataggagtattcataccag

SEQ ID NO: 511005 - DNA, 100 bp, Homo sapiens
aagatgagaagaaatagcaaggcccaaccagttcttcatctggagacagttcaacgttctgcaaaccagagttcttgaagccagcatagcagagaataaa

SEQ ID NO: 511006 - DNA, 83 bp, Homo sapiens
gccccggcgagcagccgccgcccgccgcacccatgaggttatggaaacaaaggacatgctttacatcgtcactgaatttgcta

SEQ ID NO: 511007 - DNA, 100 bp, Homo sapiens
agctgaagaagcttcggaagaagagccagggcagcaagaatcctcagaagtactcggacaaggagctgcaggagcgggctgcagatgacagcaaagaggt

SEQ ID NO: 511008 - DNA, 75 bp, Homo sapiens
agtgaccgagaccgcggccgggaccgagggggcagaaccccttcgagctggccttctccctagaccagcccgacc

SEQ ID NO: 511009 - DNA, 100 bp, Homo sapiens
ccaagtcagttttgaaggagaggggtcttaagaagattagattgggaatagaagatggccgcccatgccccatcattctttgggatgcatctttatcttc

SEQ ID NO: 511010 - DNA, 90 bp, Homo sapiens
ggaaaagcaccaggcaaaccaccatcacatctcattttgcaaaggggtgttcagtggaatcacacttacaaaatttggagggattgtggt

SEQ ID NO: 511011 - DNA, 75 bp, Homo sapiens
aatggtctagcatttccttttaaacatcctgatgaatggagagcatgctttaccaagttttggagggagagaata

SEQ ID NO: 511012 - DNA, 100 bp, Homo sapiens
ggctgagctatacactaggggttcatgttaaccaggccaaacagagtcagtggatcggtggggaaaatgctgcttaccctgggccctgggctgtagaaag

SEQ ID NO: 511013 - DNA, 75 bp, Homo sapiens
cgtcgccttgctcctcgccgcggcggggactgcaggaagcggggagaggtggtgagagatgacccctgttgagga

SEQ ID NO: 511014 - DNA, 74 bp, Homo sapiens
tggaggcgccgctctagcggccgggactctgaactatggcgaaaaagcttgtggtgaaggggggcaaaaaaaag

SEQ ID NO: 511015 - DNA, 100 bp, Homo sapiens
gttgccttttccagtgacgaggaattgacaatggccatgtcctacgtgaaggatgacatcttccgaatctacattaaagacgcaaacatgcagatctttg

SEQ ID NO: 511016 - DNA, 98 bp, Homo sapiens
cctgaatttgcctgtatactctcgttctgcgacttataaaggaccagacaaatcaaattagtggttttggaattacatgaatgacagtcttcgaacca

SEQ ID NO: 511017 - DNA, 75 bp, Homo sapiens
tgtagatgataaaatcatcaaaagagccaatgaggcctcatgcattgtgcgtcagcagcaatgtttatggtgaaa

SEQ ID NO: 511018 - DNA, 87 bp, Homo sapiens
agttactgtggaatcaataagccatggcatctaagaaatttgctgttaaagtgggaaagcagtgccactctccgcttcacagatgcc

SEQ ID NO: 511019 - DNA, 74 bp, Homo sapiens
ctggacaggcagagtgctgatgtgaaaaataccacgacaaaaccaccctactcacggacacagacctaattaaa

SEQ ID NO: 511020 - DNA, 102 bp, Homo sapiens
tcacctccaaatcttgctgcttttaattcaactcagaggtgaggatacaactagaagccagcagtctacaggctggaagaaggccctcaccagaacccaacc

SEQ ID NO: 511021 - DNA, 80 bp, Homo sapiens
actccaaagacatgcagatgaatttcttttggatttaggacatcatgaaaggtgactgaacttgaatgtgttagtagcca

SEQ ID NO: 511022 - DNA, 75 bp, Homo sapiens
ctgagcctgcagccggccctgccgggatacccacccaccatcccagggtctacaacatccacagccggaccgtca

SEQ ID NO: 511023 - DNA, 75 bp, Homo sapiens
cttcatcaaaaatagtgatagctttgataacatgtcccaaattaccatacaacaaggagacaagcccttctttct

SEQ ID NO: 511024 - DNA, 120 bp, Homo sapiens
gggcgtcggtcgtcggtggggtcggagctgggcgcggagcccctcacagtgcaggacacggagttgcagaggaagctagaccatgagatccggatgagggaaggggcctgtaagctgctg

SEQ ID NO: 511025 - DNA, 82 bp, Homo sapiens
caccacaccagaaactagcaccagccccaaatttcggggatatgagactttctactcggaatatcctgagtgttgcgtggat

SEQ ID NO: 511026 - DNA, 90 bp, Homo sapiens
cgcccagacgctgcccgcgggcccggccacggcggagccaaggcaaaatacatatctcagtgcattgatgagatcaagcaggagctgaag

SEQ ID NO: 511027 - DNA, 96 bp, Homo sapiens
cggcgagcagggagcggagtaccagcacttcatccagcagtgcacagaattaaatgtgagggagtctgacgtaagagtttgtgatgagtcatcatg

SEQ ID NO: 511028 - DNA, 83 bp, Homo sapiens
ttcgaggaagtatgcacatttcaacagacactctgccaagccttggaagaatgttcaaagtggatcagtacaagggaaagcgg

SEQ ID NO: 511029 - DNA, 100 bp, Homo sapiens
actaccgctgctggaccacaaaccgctgccagaaaagtcgagtctatgctgtcttgtcaaagagagaaggtcgggtacttcaagaagaaatgaaagaagg

SEQ ID NO: 511030 - DNA, 100 bp, Homo sapiens
ccggtgtccggtgtctggagccgctggctagattcatgatgttgctatcaaaagttgagaaattgtcagaagaaatcatggagataatgcaaaatttaag

SEQ ID NO: 511031 - DNA, 74 bp, Homo sapiens
gtgcctaccaaggtcaaaggctatgacaacctctttgctatggtgtccatgctggcagtggacgagatgtatga

SEQ ID NO: 511032 - DNA, 98 bp, Homo sapiens
aagaagaggaaaataccatttttaaggcgcattggagtgactgtctggcatcaccaagatgacactccacgccacccggggggctgcactcctctctt

SEQ ID NO: 511033 - DNA, 74 bp, Homo sapiens
aacgtggctgtgtatggagaacgtatatttaaagttggagttcgttgctaaagatggcagacccagatgtcctc

SEQ ID NO: 511034 - DNA, 90 bp, Homo sapiens
gaatcggtggccatgatctctagcaaagttctcatatagatgtggttcgttttccatgtgtggtttatatcaatgaagtccgagtcatac

SEQ ID NO: 511035 - DNA, 82 bp, Homo sapiens
ctcacttccagtggagacagggacagcgacttccttgcagcctcttctccggggtttcgaaaaaacgatgaaatgaaagcta

SEQ ID NO: 511036 - DNA, 100 bp, Homo sapiens
cttctaattattattgggcttttccaagtaaagctcttcatgcaaggaaacataagttggaggttctggaatctcagaaaatgtggacacagacttgcca

SEQ ID NO: 511037 - DNA, 98 bp, Homo sapiens
cggcacagaggtgcttctgccagatgtaaaaaaagattggtctgaccatgctctctggtgggaaaagaagagaacttggcttctgaagacacattgga

SEQ ID NO: 511038 - DNA, 96 bp, Homo sapiens
cgaacctgctgcttttctcgctatgctgaagtccagagccaaacccgtcactgaccccccagcccaggcgcccagccactccccaccgctaccatg

SEQ ID NO: 511039 - DNA, 83 bp, Homo sapiens
gacagcgcggaatctgggtgcagttcctgcagtaccccactctacgatcaggtaatgagagatccaaacaccaagcgctccag

SEQ ID NO: 511040 - DNA, 88 bp, Homo sapiens
cagattcgcagtggtcgcttcttctccttggcatgaatcatacaaaactcaatatagagcaatgtttgtaatgaattgttctattaac

SEQ ID NO: 511041 - DNA, 95 bp, Homo sapiens
cctcggtctgggcttctctgaggcggcgagagatggtcaggtctggagctcgaccgggccagctaccagagattcactgactgctataagtgctt

SEQ ID NO: 511042 - DNA, 82 bp, Homo sapiens
caagataaatgtgttcctcttgtccgagaaataacatttgaaaatggagagggaaattatcgtttcatgaaactcttactta

SEQ ID NO: 511043 - DNA, 87 bp, Homo sapiens
gcggctcagaagataaacgaggggctggaacacctcgccaaagcagagaaataacggcgcctcatctcccagagatcttccttggag

SEQ ID NO: 511044 - DNA, 100 bp, Homo sapiens
gtgaaccgcaaacactgtgtcatattcttgggttcaaattcaagttttaccaggggatgtcccactcttgttcaagcattgccaggccctagcacacaag

SEQ ID NO: 511045 - DNA, 98 bp, Homo sapiens
ctcatatgtgccacaggaagccatcagcagtgccatccagcttctagaagacccattacagagggtagacaagggcgtggtccccctggcagggacaa

SEQ ID NO: 511046 - DNA, 98 bp, Homo sapiens
ccggggtctcctacgtcgtgcgggtgtcccaggtatccagggcagcccaaatggcagtccccagctcgcggatcctccagttgtcaaagccgaaggcc

SEQ ID NO: 511047 - DNA, 50 bp, Homo sapiens
ccaagcagccttagccctagtgtagaggtacagagccagatggactcctt

SEQ ID NO: 511048 - DNA, 75 bp, Homo sapiens
ctggtccaggccttccagtacacagacgagcatggggaaggcggaaaagatagcatctcaaatgataaccgaagg

SEQ ID NO: 511049 - DNA, 74 bp, Homo sapiens
cgtgatgggagctgcagcacagtcgggggtgtaggttatgggggtttagcagtttccttacagctattgcacgg

SEQ ID NO: 511050 - DNA, 90 bp, Homo sapiens
gggctcctgagagccaaaaaagagctgctccaggctctgcaccgcctcactaggctggtggcattccgtgacctgtcctctgccgaggca

SEQ ID NO: 511051 - DNA, 98 bp, Homo sapiens
ggcccctcagggccacggctttagcggtgtcttttgcggatgcctttcaggaggagtactacaggacgggcaccttcccagagacgcccatggtgccc

SEQ ID NO: 511052 - DNA, 75 bp, Homo sapiens
caaaagttctcagccaaaaccagtgatagatgcaaaccagtccagctacgggggcccagccagccagcagctgag

SEQ ID NO: 511053 - DNA, 83 bp, Homo sapiens
gatatctcttttaacggaggccaggtgtgggatggtgatactaccagacaagttcagagaatatcatgcttccagtctactgt

SEQ ID NO: 511054 - DNA, 100 bp, Homo sapiens
gcacgcaccacgacggcgccatcaccgagcgcttgatgtgcgcggagagcaatcgccgggacagctgcaagtggtccatgctgtggacggcaccgccgag

SEQ ID NO: 511055 - DNA, 100 bp, Homo sapiens
ctggatcccggtggtgttcatcaccctcctgctcggctggtcctactacgcctacgccatccagctgtgcataggaattatgtttcgcagaaaagtgtcc

SEQ ID NO: 511056 - DNA, 50 bp, Homo sapiens
atccattctcggattctagaacagtatggcatttcaaatatagatacaac

SEQ ID NO: 511057 - DNA, 100 bp, Homo sapiens
tgctgtggaagaccagccccaaaggatgtagtaactggagttagtcccctgctcttcaggaaactcagtaatcctgacatattttcatccactggaaaag

SEQ ID NO: 511058 - DNA, 98 bp, Homo sapiens
atgagaatgccaacatgtggttcaagaaccttgacaagctcatccggctggtaaatgcgcaggtggtctatgttgcccgaaacccaaaggacgtggcg

SEQ ID NO: 511059 - DNA, 100 bp, Homo sapiens
agaacttggtgctgctagaatgcaggaacagcagtactggagaaaatgaaactgggattgacccatcaagatgcttggctcaataagaaaaccacgttag

SEQ ID NO: 511060 - DNA, 129 bp, Homo sapiens
ggagtcaccactggacctccaaggaagccacgtgcagacatctacaaccttcgatctcctgacgatgacctgaccaacggtgcagatgggatgctggccacaagctccaatgggtctcagtacagcggc

SEQ ID NO: 511061 - DNA, 100 bp, Homo sapiens
ttttgccgatttcatgactaaccagtccatgtttgaccgtgagaacaaggccggcgtgaacttcagcgagttcacgggtgtgtggaagtacatcacggac

SEQ ID NO: 511062 - DNA, 90 bp, Homo sapiens
cttcaacaagtctgccctcaaggaagccatgtttgatgatgatgctgaccagtttcctgacgagaagctgatcgtcgaagggcatctaac

SEQ ID NO: 511063 - DNA, 100 bp, Homo sapiens
ctcctcccagtgacgggtctggagtgcgtgggggaccggctgttggcgggtcctcttcctgatggatgggaacaagccatgactcaggatggagaaattt

SEQ ID NO: 511064 - DNA, 98 bp, Homo sapiens
gcctcgtcgacatgagtgatgtggaggaaaacaacttcgagggcagaaatttttccctagattggtgtaaacagccagacgtgggccttcccaaaccc

SEQ ID NO: 511065 - DNA, 82 bp, Homo sapiens
gcacgagctgtgaggggattcacttgtgtgcggaactcctcggaaccatgaacaccttccaccatgaccacctcagcaagtt

SEQ ID NO: 511066 - DNA, 100 bp, Homo sapiens
ttagaaacagtagtggagaatcaagtacctgccatcctggctggacttgaccccagggacattgtggctgtgctgaatgaagagggaggctaccatcaga

SEQ ID NO: 511067 - DNA, 82 bp, Homo sapiens
atatgccaaggaaaaactggagagcttcatcaaaaatagtgatagctttgataagaacgaatgcaggaatttgggaactgag

SEQ ID NO: 511068 - DNA, 100 bp, Homo sapiens
aagaagatcatcattaaggacggaggcacggtgacttaagagattaaaattaatttggttgctgttggttctgaacaaataatgagttcttttatttgag

SEQ ID NO: 511069 - DNA, 75 bp, Homo sapiens
attcgcagtggtcgcttcttctccttggtgaaaggtgtagcagtcactcggcctacacccacagcatcgaccttg

SEQ ID NO: 511070 - DNA, 100 bp, Homo sapiens
ccgcccgcccaaggtctctcgcgggcgggagaacggaaaactcccaacttcctgatgccttcaattaagttgcagagttctgatggagagatatttgaag

SEQ ID NO: 511071 - DNA, 82 bp, Homo sapiens
aataccagtggaggccgacttcttgtatgcatactccacagcacctggaactgtggctgcaccatctgtcttcatcttcccg

SEQ ID NO: 511072 - DNA, 101 bp, Homo sapiens
atctgtattctacccatgctgccctggctgccttgagaggtcacttctgcctttccagtgacaaaatggtgtgttgtgttagcagtgcctgggcctgggcc

SEQ ID NO: 511073 - DNA, 51 bp, Homo sapiens
agcctcctgggtagctgggactacaggcctccccaaagccagtcctgtgtc

SEQ ID NO: 511074 - DNA, 90 bp, Homo sapiens
gcaaccatcaaatcaagaaattggcccaaagccctacagtctgcaaacatacagaaggtggtcatggcactaggagactacatgggcgcc

SEQ ID NO: 511075 - DNA, 76 bp, Homo sapiens
cctcgccatgtcctgctgcccgagccctatgagtttgtctctctggaatggctgcaaaagtggttggatgaatcaa

SEQ ID NO: 511076 - DNA, 95 bp, Homo sapiens
acctgcgcgaagctggccaaagcctgcccagacggctcacctgtgcgggatggaacaaaaggcaggaaactgcatatcttctggtttacatgaag

SEQ ID NO: 511077 - DNA, 115 bp, Homo sapiens
cattgaacgggtgcagcgggaaaaggctaatggcacaactgtccacgtaggcattcaccccagcaagggtcgacaagaagatgctgaggaatacttaggcttcattctaaatgga

SEQ ID NO: 511078 - DNA, 75 bp, Homo sapiens
acgtgggcaccttgcgcttcttgcagtcggcctcaggagtgcaagtagctgatgaagtatgtcgcattttttatg

SEQ ID NO: 511079 - DNA, 98 bp, Homo sapiens
caagtcgtaaaaacaggtcaagtgtgtaatgaacaagtctggggtgaatcgtgtagtttggaaacgacctcgactcactcacaatggacctgttagaa

SEQ ID NO: 511080 - DNA, 98 bp, Homo sapiens
tcagcattatctagtcctttccaccccgaaattcgccccgattaaagactgtgttgcattatcagggtgaagctgacactagaaggcctggaggaaga

SEQ ID NO: 511081 - DNA, 90 bp, Homo sapiens
tgcagcagtgcgcgctgccccccgagcaggagtattgagcaagtcaacaacctacgagagatccaagcactgaggcgcctgaatccgcac

SEQ ID NO: 511082 - DNA, 100 bp, Homo sapiens
atcgatcctgagaaaggagacattgtcactgttgtgtcacctgcgctgctggaccgagagatgatcatgggaacagcaatagtagtcatgtaaaaatctt

SEQ ID NO: 511083 - DNA, 97 bp, Homo sapiens
ctgggacacacctccattggatttaaaagacagtcctcgtcagcactgactttcagctatggaatcggtgcagattcactttataggaacagcttca

SEQ ID NO: 511084 - DNA, 100 bp, Homo sapiens
ttggagttggtggtggcttaagttttgaagggaggtagcatccgttggatatccacaccatccttctcgctgcaggtgtctgtgcctctccccaacatat

SEQ ID NO: 511085 - DNA, 100 bp, Homo sapiens
gtctggagtgcgtgggggaccggctgttggcggatcccgtcggagacggtctcttcaaggacgggaagaacccgagctgggggccgctgagccccgcggt

SEQ ID NO: 511086 - DNA, 100 bp, Homo sapiens
ggaatactggaatacttgctacagtgtctgagtgactgcaccaagctcttcagccagggcattggaggggagcaggcccaggccaagtttgacagctgcc

SEQ ID NO: 511087 - DNA, 75 bp, Homo sapiens
tgcactggcagtgacgatggcacagttaaggtcttgggcgtctttggtactggcttttttaggggtctgcctggg

SEQ ID NO: 511088 - DNA, 113 bp, Homo sapiens
gaatggacttcagactggtggactgttcatcattctgttgaagaaacgcttaacccattaataacgacatgatagtcactgacaacaacggtgcagtcaagtttccacaactg

SEQ ID NO: 511089 - DNA, 100 bp, Homo sapiens
aaggctgcctataatcaagtaaaaacaatagctcaaggaaacctttccaacacagatgtccaagctgccaagaccgccgggagagcctgcccacctcccc

SEQ ID NO: 511090 - DNA, 75 bp, Homo sapiens
ctaccagaacggagatgtgtttggcgttgaccgtcctccaatggaaccctcccagtatgtctcagttgtccctaa

SEQ ID NO: 511091 - DNA, 97 bp, Homo sapiens
ggggcgtgaacgctctggggctcagccaggcctgcgcgggcccgaggccggaggaacccggactccggcgtagcgcgagaaaaagttccagaggaat

SEQ ID NO: 511092 - DNA, 75 bp, Homo sapiens
cctgatggatatcaggggtcacagacatttcatggggctccactaacagctgatgagtgctattcaaaaaggaag

SEQ ID NO: 511093 - DNA, 100 bp, Homo sapiens
ggcctcgacaagttcctgggccgcgccgaggtggacctgcgggatctgcaccgcgaccagggccgcaggaagacgcaacctggaatggccaaatatcaag

SEQ ID NO: 511094 - DNA, 75 bp, Homo sapiens
gggaggtcctccatgcgcagtcatgagtcgcttcaagtttatcgtaatgacatggaagaacatttagaggagcct

SEQ ID NO: 511095 - DNA, 75 bp, Homo sapiens
gcgccatggaggagggggcgccgcggcagacctgcgaccgcatcaagcagtccgccagcggaaccaagcggcgcg

SEQ ID NO: 511096 - DNA, 100 bp, Homo sapiens
attctcctggcagttgtcatatgtactgtgtcagccatcatgtgtgtcagcatgagaggttgaaccatgattccggtgacagagctccgctactttgcgg

SEQ ID NO: 511097 - DNA, 100 bp, Homo sapiens
caagaagctgccaggcataataggaagtactggagaaaatgaaactgggattgacccatcaagatgcttggctcaataagaaaaccacgttaggagcaac

SEQ ID NO: 511098 - DNA, 102 bp, Homo sapiens
gttaagtcccccaaagatgagatttacctgtgagatgtttcatcccaacactgtcggaaaaggtaacagaagatggaactcgaaatcccaatgaaaaaccta

SEQ ID NO: 511099 - DNA, 100 bp, Homo sapiens
ggccgtagcggcttgttggataagattcccagaaaatctaagctggcagttcataggaatatcagagacgacgaaggcttcattatcaggcattttgcgg

SEQ ID NO: 511100 - DNA, 75 bp, Homo sapiens
tgccaatgatgttggaggatacctgtggagtacttcttgcaagcagagctgacaagcaacgtcttaaaaacaggc

SEQ ID NO: 511101 - DNA, 74 bp, Homo sapiens
caaactctaaaccatctgaattggctcaatgatgagaactttgctgcccagatggctggaggatttgatgaaaa

SEQ ID NO: 511102 - DNA, 100 bp, Homo sapiens
cgggagctgtcggccccggcccgactctatcacaagaaggactacaaatccctccaggatatcattgccatcctgggtatggatgaactttctgaggaag

SEQ ID NO: 511103 - DNA, 108 bp, Homo sapiens
cgtccgtgacgctgagcgaggcggagaaggtgtacatcgtgcatggcgtccaggcatatcacacctgaaaaattttatgtggaagcttgtgatgatggagcagatgac

SEQ ID NO: 511104 - DNA, 50 bp, Homo sapiens
cagaaccggtacctggatggcatgggacctcaggatggaaaccagcagcc

SEQ ID NO: 511105 - DNA, 100 bp, Homo sapiens
cttcttcaggaacatgaacttcaagcgcttagaagccgggatgttggaccctcccttcgttccagaccaggatgaagttaaaggaagtagatcgtacagc

SEQ ID NO: 511106 - DNA, 74 bp, Homo sapiens
aggaggtggagttgctgcccttccggagtccgccccgtgaggagaatgatgccatggacaatattaccaggcag

SEQ ID NO: 511107 - DNA, 96 bp, Homo sapiens
ggaagccgcggctctccaagttctaccagccctacgagtgctaacaggaatgaatgaaacttctgctgtaatcattgctgcaccacagaatttcac

SEQ ID NO: 511108 - DNA, 82 bp, Homo sapiens
cttggatatgaaatcttgtgccacattctcctcttctcacagtgcctccggagccagcgtggtggccatagacaacaagatc

SEQ ID NO: 511109 - DNA, 75 bp, Homo sapiens
actactacgaacaatggggaaagcttacagactgtgtgatgctgggctcttgcactgtttggtggaaatggtgag

SEQ ID NO: 511110 - DNA, 100 bp, Homo sapiens
cggcgccagccactcggagctaatccacaatctccgcagaagtgtacaagccccgtcggaaatacaaacgccaccagggagcagaggagctacttgatga

SEQ ID NO: 511111 - DNA, 100 bp, Homo sapiens
ggcaccagcaacatgacctatgggaccttcaacttcctcgggggccggctgatgatccctaatacaggtgctggagaatctggtaaaagcaccattgtga

SEQ ID NO: 511112 - DNA, 83 bp, Homo sapiens
cccacgtgttgcctgaccattcctgagcccagaactgctttgagctttatatccccgacaataaagaccaagttatcaaggcc

SEQ ID NO: 511113 - DNA, 100 bp, Homo sapiens
cagctatacatttacatcagattattgggagcctatttgttcatcatttctcgtgttcaaggcatggaagaggagatggttcgtgttacgcagtggccgt

SEQ ID NO: 511114 - DNA, 83 bp, Homo sapiens
gaaaaagcatccccgaggaggaagacgaatcgttaaacatctgaaagggtcagcaaacggggattcagcgtccgatcctttgg

SEQ ID NO: 511115 - DNA, 78 bp, Homo sapiens
tgaagtataggctgaggctacctgtgaacagtacgcagtgaatgttgtctgccatcatggatgttctcgcagaagcaa

SEQ ID NO: 511116 - DNA, 89 bp, Homo sapiens
ctacggcaccagtggcctggacaacagacctctgtttggggagacgtccgccaagatcatggaagggaagtggttgctgtgtatgttac

SEQ ID NO: 511117 - DNA, 75 bp, Homo sapiens
tgctaccctgctttttctggtgtcctgaacctggaagttgtgctttttaagtgggtaattccagaattgattggc

SEQ ID NO: 511118 - DNA, 100 bp, Homo sapiens
cgccttactcactctctcgggattattgccgattgccagggtgctgaccgtgggagccgaccgagattcccaacctgctgagcatccgcacacccactca

SEQ ID NO: 511119 - DNA, 90 bp, Homo sapiens
cacccctcctgtaacccagcctgtttcacttcttgagaggtgagagacttcagaggctgccctttcttttcatctgctgcttgtgaaagg

SEQ ID NO: 511120 - DNA, 100 bp, Homo sapiens
taagcaggaccagatgataccatgaagagaagtttacaggccctctattgccaactgttaatgtttcctgaggttataggcgggtgtttgaggagtacat

SEQ ID NO: 511121 - DNA, 75 bp, Homo sapiens
ctggagggtggggccagcctgaggctgcacacagcgctgttcacgaaaggtctgaaggggcgtctcgattacctg

SEQ ID NO: 511122 - DNA, 92 bp, Homo sapiens
cccagctcggcccgcgggggagccccgggagccgcacggcctccggtgtggctgtctctgatggtgtcatcaaggtgttcaacgacatgaag

SEQ ID NO: 511123 - DNA, 75 bp, Homo sapiens
tcccattgctgtgcctacaccttcgccacccactattggaccaggagaaggaagccaacatccttttggagccat

SEQ ID NO: 511124 - DNA, 71 bp, Homo sapiens
atcccattatgactgtaaagaaggcatattttactattccgcaggtgccacatcatctcacagttcaacca

SEQ ID NO: 511125 - DNA, 100 bp, Homo sapiens
tacagtgccacagacacaaggccagaccacaggcccccccaggatgcaatggcgcagcccccccggctgagccgctctggtgcctcctcactttgggacc

SEQ ID NO: 511126 - DNA, 101 bp, Homo sapiens
gcagttactagtgtctgaagatccaaaggaaggaggagctaccaccaaagagtcaggactggggttttaaggggtgtggcaggaggttttggactcgatga

SEQ ID NO: 511127 - DNA, 83 bp, Homo sapiens
tgagacccaaggaagggcaaaggcgagccaaagccatcagttgagcttcagaaaagggtctcgctctgtcacccagactggag

SEQ ID NO: 511128 - DNA, 95 bp, Homo sapiens
ctgtcagtactatattggaaaaacctcaaaatatgatggtggttggacagtcagcatttgcagactttgaccgcctggacattagggcagcccgg

SEQ ID NO: 511129 - DNA, 95 bp, Homo sapiens
tgaggcccaacagcggaatcatcgatgcaggggcctcaattaatgtatctggatgggagcaaagtgtttacggcatcgtgtgataaaactgccaa

SEQ ID NO: 511130 - DNA, 98 bp, Homo sapiens
ccatgatgtgccccatggaacaccccctttctgctgacatcgccatggccacccgtgcagatgaggacggagacacggtcaaagaaggctcttccaag

SEQ ID NO: 511131 - DNA, 51 bp, Homo sapiens
ctgaaaggcaaggccatttaaatgttgcatttctaggtcccaaagaccttt

SEQ ID NO: 511132 - DNA, 100 bp, Homo sapiens
gatttccaaggctttgcattggctgtacctgaaacttatggtggcctagactccccagtatccactcttccttatcttgtgagatgagtcagaaaccggc

SEQ ID NO: 511133 - DNA, 96 bp, Homo sapiens
ggattcctgatatagatgccagtcataatagatttcgagacaacagtggccttctgatgaatactttaagcaacaagcagtggtggtttggtggtg

SEQ ID NO: 511134 - DNA, 87 bp, Homo sapiens
aagattttgaagacaatcgtcacttatacaggttaaacccatccagagtaatggctgcggccttacccaggaccctgggggagttgc

SEQ ID NO: 511135 - DNA, 105 bp, Homo sapiens
tgtgtgtgcctgcccacaaggcttcactggacccagctgtgaaacggtgttggaaaaccttggacagacaattgtccccgatttgggatcactggaaagtcagca

SEQ ID NO: 511136 - DNA, 96 bp, Homo sapiens
tagaacctacccaccctcacggcctggagttcttgttccgggactgcaggaatgtctcgcagatttgggtgaacagtccccatacagccagcggct

SEQ ID NO: 511137 - DNA, 51 bp, Homo sapiens
cacactgggaaacatcattaaatcggtgagcagggcagcatttccttctcc

SEQ ID NO: 511138 - DNA, 98 bp, Homo sapiens
ctgggctggctgctgctggccgaagcgaagggcgacgccaagccggagggtgctggagaatctggtaaaagcaccattgtgaagcagatgaggatcct

SEQ ID NO: 511139 - DNA, 97 bp, Homo sapiens
cgcagcgcaaggagcgggaagtgctgcagctgcagattattcagagctgggagagcttcccccacgatctcctttagaaccagtttgtgaagatggg

SEQ ID NO: 511140 - DNA, 75 bp, Homo sapiens
gaagcaagcagttcagaagagccaaggaataaacatgcaatgaacccaaaagggagtgaaagctggacattgaag

SEQ ID NO: 511141 - DNA, 50 bp, Homo sapiens
tttgaaacacgttctgattaaccaaggggcacaaatagtttacatttcat

SEQ ID NO: 511142 - DNA, 74 bp, Homo sapiens
tgcctttcttctgtgggctgtgattttcagaggggaatgctaagagtttttcagttatgggacaaaaatattat

SEQ ID NO: 511143 - DNA, 96 bp, Homo sapiens
ggttgaatgagaaccctacttgcctaaatgaggaatgtctttcctaccatctaaaatacgaaggtttctggctggtcttacctgctgatggtgact

SEQ ID NO: 511144 - DNA, 85 bp, Homo sapiens
aagcctctgatgacaagagtagttgaaaggagtagttctatgacttcaacaatgacaataggattcactccttctccagttgcac

SEQ ID NO: 511145 - DNA, 88 bp, Homo sapiens
cagatgtctgacagccctgtgtgacaccaagataagtaactcagcagataagcagagagccctagaagaaaccaaagcctacaccacc

SEQ ID NO: 511146 - DNA, 82 bp, Homo sapiens
actctttgccgtacccaccggagcctggcgcagcctccctctattaccagggcagttgggtgagaagcagcttccatcttca

SEQ ID NO: 511147 - DNA, 76 bp, Homo sapiens
cggctgctcctcccctccccgccgggatggagcctatagaggtgcctcttgaggaaaatagtgaacggactcagat

SEQ ID NO: 511148 - DNA, 100 bp, Homo sapiens
caagatgccgctgccggttcaggtgtttaacttgcagatccaagagctcctgtctccccaggagccccccaggcctcccgaggcagagaacagcagcccg

SEQ ID NO: 511149 - DNA, 96 bp, Homo sapiens
taaaacctctagacaaagtaaccaaatctccagccagccataggaaaaggatacagagtagagtttcatgaacctgaaacttggtggaaatttgat

SEQ ID NO: 511150 - DNA, 90 bp, Homo sapiens
gagagagcgagctgagtggttgtgtggtcgcgtctcggaaaccggtagcgcttgcagcatggtggagattctggacgcaaagacaaggga

SEQ ID NO: 511151 - DNA, 100 bp, Homo sapiens
ctcctccttcttcctcaactatctcgctgacacgcaggctcttgtcaggatggtgaagctgttcatcggaaacctgccccgggaggctacagagcaggag

SEQ ID NO: 511152 - DNA, 100 bp, Homo sapiens
ccgtgctcagaaactagccagattgaaggtcccacacttacagggaaagcatcacccgaaagtgagaatgcctagaggcaggaatcatggaggcttcctt

SEQ ID NO: 511153 - DNA, 112 bp, Homo sapiens
gcccctgtcaagaaggtgccggtggtgcgagtcttcggagcgaccccggcaggtcatttgattgcccgcctcagaacgatggatctgcatctcttcgactactcagagccag

SEQ ID NO: 511154 - DNA, 105 bp, Homo sapiens
ggcggcagcggcggcggcggcggccctccggtactccaaagattcaggtttactcacgtcatccagcagagaatggaaagtcaaatttcctgaattgctatgtgt

SEQ ID NO: 511155 - DNA, 97 bp, Homo sapiens
caaggaaatcaacgagcccacggacaagaccttggtggatggatgatggcctagtaaatgatatcacgccaaaattgataggagacagacctaatac

SEQ ID NO: 511156 - DNA, 82 bp, Homo sapiens
gtgcaatcttaaaagaaactgtgaagcaaattcgtcagatcaaagaacaaggtgaccatggaggctggtggcctccccttgg

SEQ ID NO: 511157 - DNA, 50 bp, Homo sapiens
cgagccttggcggcggacgtgcagactgactttatggcctttcaccaaga

SEQ ID NO: 511158 - DNA, 98 bp, Homo sapiens
gccggccccggtcccggccccgggcacgcagcgagccagggatgtgagcggcgccccgcggcatggcagcctcagagcaggacaggctgctttggttt

SEQ ID NO: 511159 - DNA, 74 bp, Homo sapiens
tggagtgtaggtcatatcgccgcggcagcagcagcggaaccgcttaggcagtgggggaagcggggacggtccgt

SEQ ID NO: 511160 - DNA, 75 bp, Homo sapiens
ctgctgccggatgacattgaggacgagtccacgggcctgaagaagggtgatacaattctggagactggagaagta

SEQ ID NO: 511161 - DNA, 100 bp, Homo sapiens
gaaattgtgacaaacgtggtcatttatcaaaaaactgccccttaccacgaaacatttccccagaggagctcaaaatggagttgccggagagacagcccag

SEQ ID NO: 511162 - DNA, 100 bp, Homo sapiens
cggcgtttggatgattgtctctcggcggcggagtcggcttgcagatgggtcaagggttgtggagagtggtcagaaaccagcagctgcaacaagaaggcta

SEQ ID NO: 511163 - DNA, 142 bp, Homo sapiens
ttaccaggaggggctccgcagcctgagtcaggaaggggtcgctgtggagatcatggactatgaaggtttttcgttggaatatacgttgcacatttatggcgattctgagtgtgagggcagacttctgccaggctcagcacag

SEQ ID NO: 511164 - DNA, 76 bp, Homo sapiens
tgttggaaatggaacatacgggcaagtttataaggttccagcaacagatagaaatgctttaagttcactctgggga

SEQ ID NO: 511165 - DNA, 74 bp, Homo sapiens
ttggccatcctgctctttgtatatgaacagaaggtctcagacttgatccgcagtggaaaacccatcaagcctgt

SEQ ID NO: 511166 - DNA, 82 bp, Homo sapiens
cgcggcggcagcagcagtgagaggacttgatcatcttccctgacgactgtgagttcaagcgggtgccgcagtgccccagcgg

SEQ ID NO: 511167 - DNA, 100 bp, Homo sapiens
gacggctccaacagggatgcgctgagcgatttcttcgaggtggagtcggagctgggacggagtgacagttcatttagattctttgtattcttcttcgtct

SEQ ID NO: 511168 - DNA, 74 bp, Homo sapiens
gcctgttgcagccatggtgcattgcagttgcgtgttgttcagaaagtcgtgcagccaggataccctgcccaccg

SEQ ID NO: 511169 - DNA, 90 bp, Homo sapiens
cgacatgttgcttttcgtggaggtgcgtcctggctgagagttggagctctccagcaacatgcctgagcagagtaacgattaccgggtggc

SEQ ID NO: 511170 - DNA, 116 bp, Homo sapiens
ctgcgaagtggttgagaagcctgtacctgttttatacttgcttttgcttcagcgttctgtggttgtcaacaggtggtggtatcatggatacagaaatgtctgaagatatagaccac

SEQ ID NO: 511171 - DNA, 100 bp, Homo sapiens
acaaaccttggaaatgttattgataactatgtttatgaacataccctgctgttgttggcctactgtacccctgtatcgacagtcacctcggagaacccca

SEQ ID NO: 511172 - DNA, 51 bp, Homo sapiens
ccggccccacccgatgcggcctccaaggtgatgtgtccaatctagatccca

SEQ ID NO: 511173 - DNA, 74 bp, Homo sapiens
aactaacagcagaagctattcagacacccctgaaatctgccaaaagttactggagttggctataatcaatttgg

SEQ ID NO: 511174 - DNA, 100 bp, Homo sapiens
gcccgttcctgggacgaaccccagcatcctgatgggagctcagcaggcagttacggacgagtttatgctgccgacccctaccaccacgcacttgctccag

SEQ ID NO: 511175 - DNA, 101 bp, Homo sapiens
ggtgttgtgaagttctttaagcccccatatctaagcaaaggaactgaggcacatttgatatttatgtgaaatgtgatggtgttggaagatgtgttggtaac

SEQ ID NO: 511176 - DNA, 50 bp, Homo sapiens
gtgaaaggtggtgaagagccaattgagtcaagtccatcatctccagaacc

SEQ ID NO: 511177 - DNA, 76 bp, Homo sapiens
caaatccaagcgcgacaagaaaggcgccaagcccatctttgtgtgcttgcatccaactgtgatgagcctatgtatg

SEQ ID NO: 511178 - DNA, 75 bp, Homo sapiens
gcatcacctcctccaagaccgtgctggtctttctcaacctcatcttctggccaaagggaaaggacagtcccaaac

SEQ ID NO: 511179 - DNA, 95 bp, Homo sapiens
agattcgcagtggtcgcttcttctccttgcttgacaaaagtaagctgaagccaggaacaagagttgctttggatatgactacactaactatcatg

SEQ ID NO: 511180 - DNA, 83 bp, Homo sapiens
cagtactgcatcctgctcctcttctacttggcctacatccatgaagacaggacttgattattcttagaaatgcacttgacctg

SEQ ID NO: 511181 - DNA, 83 bp, Homo sapiens
ttcaagtacttggcagatcactctcttagcagatctctgtgcaccattgtgccagggctgcgaggaaggtggcccacttcccg

SEQ ID NO: 511182 - DNA, 101 bp, Homo sapiens
cccccggagccaggctggtttcggaaatgcccttacagcagcagttactggggcttccggatgcagatgacgatgcgtttgaagagtacagtgctgacgtg

SEQ ID NO: 511183 - DNA, 83 bp, Homo sapiens
gagtaagagtcttaaacaaaccgaccagcccaaagcacaggagttcatgatcaagtgttgcccacaccaaatgcttcatccag

SEQ ID NO: 511184 - DNA, 82 bp, Homo sapiens
gatcagaaccggtacctggatggcatgatgtggacgagtgctcactagcagaaaaaacctgtgtgaggaaaaacgaaaactg

SEQ ID NO: 511185 - DNA, 98 bp, Homo sapiens
actgctcacaatgagaagatcgttccatggctgtatcaaaaacctgatcttcaatttggaaaaatccattcctcgctgccgaagaattaacaggatgc

SEQ ID NO: 511186 - DNA, 101 bp, Homo sapiens
aggggggatatccacagttcgatcaaggttatggccacaccgtgcccttgtcagatggaggtaaggccttctgcatcatctactccgtcattggcattccc

SEQ ID NO: 511187 - DNA, 75 bp, Homo sapiens
attggagggcgcggggactgcaaccctaatcagttaactagtggagctgtgtgggttcagtttaatgatgggtcc

SEQ ID NO: 511188 - DNA, 101 bp, Homo sapiens
cgtggttcctttcgtgctggcgccgcgacctccggatgacccgggcttcggcccccaccagagactcgatccccgtcgaggtcaagatcaagatccaggtc

SEQ ID NO: 511189 - DNA, 75 bp, Homo sapiens
ctgtggagctttaccaaaaaggcctcgcacattcagttggacagcaatccccaaggtgagactggagacaatcta

SEQ ID NO: 511190 - DNA, 82 bp, Homo sapiens
gggtgcatcttattctaagagtctcatcaaactgcttctggggattgacatactgcagctgatttgaataggatgcacagac

SEQ ID NO: 511191 - DNA, 90 bp, Homo sapiens
tccatttgctaaaggaatagtgtttggattcctccttggtcacttttcagcagcagcctgctcttcttttgcaatctcttcaggatctct

SEQ ID NO: 511192 - DNA, 75 bp, Homo sapiens
cggaaatctggaaccgggatggcgacgtctacactgagtcggaggcgaaggtctgtgcagacttttgcagacaaa

SEQ ID NO: 511193 - DNA, 100 bp, Homo sapiens
aaactctgttctcagttcactccccctcaattctctgagtaggaacaatgaacctcatgatgatcctgagacttgtcttgttgctgctctgagcatctgg

SEQ ID NO: 511194 - DNA, 100 bp, Homo sapiens
ggcccaggtgtggcgtctctgtccccatctggttttaggagggtgaggacaaaatcttcttaatcaacaagcttcactccatctacgagaggaaggagag

SEQ ID NO: 511195 - DNA, 100 bp, Homo sapiens
gcgtggcccagcatctaactaacacggtttttattgacagagctctgatagttgttccttgtgcagaaggagtccaacctataccttctcagggaggcaa

SEQ ID NO: 511196 - DNA, 75 bp, Homo sapiens
gtgattgctgctatgaccgtggggaaggatgttaggaatctaggtaaaaatggcttatctaacagtagcattttg

SEQ ID NO: 511197 - DNA, 93 bp, Homo sapiens
agctggacccgctcaccatctacggcatccggtgtcttcacacaacgagctagaaaagcacaggtaagtgaccccccagttccccacatgagc

SEQ ID NO: 511198 - DNA, 75 bp, Homo sapiens
gaggtccgtgcggcagcagctccagagctttgtcaaagagacaggtcccagaagaggaggccagtcacaatggac

SEQ ID NO: 511199 - DNA, 83 bp, Homo sapiens
cgagctgagcttcaaaaggggggacatcctcaaggttagtccgttcattgatgacaacaccagaaggaagttcctcatttatg

SEQ ID NO: 511200 - DNA, 76 bp, Homo sapiens
atgtgagtgggctccggagcctcagcgccgcgcaggtggtattaaagataatcaaacattatcaagaagaaggaca

SEQ ID NO: 511201 - DNA, 96 bp, Homo sapiens
ctgatctctttttcatgctcctccttgctccaaagaaaagccggatggcaaaagagcccagaacctattgttgatcatggccttgccaggttggtg

SEQ ID NO: 511202 - DNA, 75 bp, Homo sapiens
tcatcacccaggcgcggagggaagacgccctggtgctcaccaagcaaggtgatggcatcagctgagaagggaagg

SEQ ID NO: 511203 - DNA, 100 bp, Homo sapiens
ggatggacagcaggccccgcgccggtggaatcaactatgaaattataatcatagatgatggaagcccagatggaacaagggatgttgctgaacagttgga

SEQ ID NO: 511204 - DNA, 82 bp, Homo sapiens
agctcccggcaccgccgagccctggacaccaactattgcttcaggattgtcaccagacctgcaatctatggagcagattcgg

SEQ ID NO: 511205 - DNA, 80 bp, Homo sapiens
ggagattatagctctgtatgagaaggacaacacctacttaggtcaaaatgcagatcttcgtgaaaacccttaccggcaag

SEQ ID NO: 511206 - DNA, 82 bp, Homo sapiens
tccggagcttctcagaagacagagggttttcttttgagcttcctgcctgacacagctcacttcaagaagtgcacaatgtcag

SEQ ID NO: 511207 - DNA, 78 bp, Homo sapiens
agaatggcagtggggcaccctatggccttcctggatgctctgcagaaccaggctgaggccagcagcaagatcatcggc

SEQ ID NO: 511208 - DNA, 75 bp, Homo sapiens
gtggagccaccagcctctccttgcttcctgcagatttcacaaaactgcatcttactgacagtctccacccacagg

SEQ ID NO: 511209 - DNA, 75 bp, Homo sapiens
gattctgaagagggtctggaggagccttctcaagaacagagggcatttggtccactttggtgccatgaagacatc

SEQ ID NO: 511210 - DNA, 75 bp, Homo sapiens
tcgcggagtcccaatgaaacgggcagccatggccctccacagcccgcaggatgtgggctctcttgatgagaagat

SEQ ID NO: 511211 - DNA, 100 bp, Homo sapiens
cgcggagtgagtttttccgtgctgtgtagggataaacacacttgttacctatgatatggttccagagcccaaaatcattgatgctgctttgcgggcatgc

SEQ ID NO: 511212 - DNA, 73 bp, Homo sapiens
cctagttgttaaggaagaaccatgtgcaacttgctttggtgtttgctgttttattgccacagatgacattact

SEQ ID NO: 511213 - DNA, 100 bp, Homo sapiens
gaaggccgggacccggttccccggcccacagtgggggtgtgcaaacccgagagaactggagccagtcttggtgctctgtgttcacctggttcatctgagg

SEQ ID NO: 511214 - DNA, 110 bp, Homo sapiens
atggctctgccgtgccacctgctgcacccacgaatctgcccacccctcctgtaacccagcctgtttcacttcttgaaatgcactcggtgatggaaagagagccactattc

SEQ ID NO: 511215 - DNA, 74 bp, Homo sapiens
tggcaagagcgatgtctactacttcagaatgtccctcttccagtggaaagcccaaccatgcagacatcttgctc

SEQ ID NO: 511216 - DNA, 89 bp, Homo sapiens
cagaaacaaaatgtcaacaaattgatggaggaggagacccacccggtggacttgagctcgctctccagtaagctactcccaggcttcac

SEQ ID NO: 511217 - DNA, 51 bp, Homo sapiens
cttatgcagagtggccgacttggctttccttaaagtttcccatgtctcaat

SEQ ID NO: 511218 - DNA, 100 bp, Homo sapiens
ctctcgtcccacgagccctgcagtgccacctgcaccacagagctccacgcaggagatcggtgaggagctgatcaacggagtcatctactccatctccctg

SEQ ID NO: 511219 - DNA, 83 bp, Homo sapiens
ctgacacggccaccctactgcctggaggccggggagccgacgcctggtggtcattgggactcccacacttaaacaaagaaagg

SEQ ID NO: 511220 - DNA, 80 bp, Homo sapiens
ccccctgccccgttcacaattatcaggtggcccctgcccagctggtgacccggcagctgcaggtctcggtgtggcatctg

SEQ ID NO: 511221 - DNA, 100 bp, Homo sapiens
caggaggtgctcaaaacgcccgtgcggaccacggcctgtcagcacgtctgctggtcttcagtaggaaataggcgggttgggaagcaagaactttccatcg

SEQ ID NO: 511222 - DNA, 75 bp, Homo sapiens
ggctgggctgaggcgccgcggtaccatgaggcgccgattagagatggacaaccgaattgttatgtactaaagaat

SEQ ID NO: 511223 - DNA, 87 bp, Homo sapiens
cggcgtaggctgtggcgggaaacgctgtttgaagcggagatcacccctgacctgctacctcggccgccccggttgcttctattggtc

SEQ ID NO: 511224 - DNA, 101 bp, Homo sapiens
cagaatgatagccagtccctggagctggtgcacaggttccagggacatctctacaccgttcccatccgggaacagggcaacatctacaagcccaacaacaa

SEQ ID NO: 511225 - DNA, 97 bp, Homo sapiens
tactctatcagctggtacagtcagaaaaactcagcaaacaggactttttcaaaggatctttgtagaatttgatggctgtaactggaagcaacactcc

SEQ ID NO: 511226 - DNA, 75 bp, Homo sapiens
ccgacaccaacaagcgcaagagagacgaagatcagcttgaacgggtctttttacgacttggccatgctgaaacag

SEQ ID NO: 511227 - DNA, 83 bp, Homo sapiens
gatcatgtctgcgagccaggattcccgcagcccctgtcaaagggaacaggaagcagtccacggagggtgacgccctagaccca

SEQ ID NO: 511228 - DNA, 74 bp, Homo sapiens
caaagttttgcagatcttcaacaagaggacccaggagaaattcgccctcaaaaaaaagcttgtggtgaaggggg

SEQ ID NO: 511229 - DNA, 100 bp, Homo sapiens
tggtggcaaccgcctacgagacactcaagggtgataaaagaaaatgtggctgaagttacccgaagttcagcttgcagtgtaattcagaagagttaagacc

SEQ ID NO: 511230 - DNA, 98 bp, Homo sapiens
gccggagcttgagatacgccgctctgaatcttgccgccctgcactgccgcttcggtcactatacccgaataggcttcgccccctcgtcctggatcgac

SEQ ID NO: 511231 - DNA, 100 bp, Homo sapiens
gaagtatccagcgctcattgggaatttagttaagtgtccgatagacaccaggaagcaactagcagagaatttggtagtcataggtggcacttctatgttg

SEQ ID NO: 511232 - DNA, 100 bp, Homo sapiens
ctgcaacaggcacttctccccacatgccagaagtgggtggagaactgtaggagagcagacttagaagataaaacacctgatcagctaaataaacattatc

SEQ ID NO: 511233 - DNA, 74 bp, Homo sapiens
agaattctctttgaaattacagcaggtatcgaaggatgatcgcagtgatgtggagagcagctcagaggaagaag

SEQ ID NO: 511234 - DNA, 90 bp, Homo sapiens
tcgcctcggtgcagggctccaccccgtcgcctcgacagatcggtttgggcttggccagccaggaagaatacctggttctgtgaatgccat

SEQ ID NO: 511235 - DNA, 105 bp, Homo sapiens
gccagcattgcttctaccagctggcggcacttcgcggaggtggcttacattgtggaaggggactttactggtggccacgaaaattttgctaaaatgattgatgag

SEQ ID NO: 511236 - DNA, 90 bp, Homo sapiens
cacttactactatcctcattatctccaaaccaagacggtactgcagggacaccagcaatatcaacgacgacaactgtggaaatccgcaaa

SEQ ID NO: 511237 - DNA, 100 bp, Homo sapiens
cttcgtctatgtggcgcccggcatagcttttagtttggatgctgaacagcctgattatgatttggattctgaagatgaagtatttgtgaataaactgaaa

SEQ ID NO: 511238 - DNA, 90 bp, Homo sapiens
gacaataaccatcttattcagtgtataatggactctcagaataaaggaaagacctcagagtgttctcatagagaaatggtcagaaggaac

SEQ ID NO: 511239 - DNA, 75 bp, Homo sapiens
tgcggaggctgagccggccgcgggcgcgaccggaggcaggtaaagaaactgcggcaatgaaagctgatctcctga

SEQ ID NO: 511240 - DNA, 98 bp, Homo sapiens
cgaaaactgaagcagatgttgaacaacaaggtgacttcaaagatggtaaaaataagacagacaagaaggatcactctaacatcggaaatgattcaaag

SEQ ID NO: 511241 - DNA, 98 bp, Homo sapiens
cttcagcagaagaaacacttcctataaatctcgcccaaacaggaaagacttaattcagtgcacaaatgagatgaatgtgaacatcccacagttggcag

SEQ ID NO: 511242 - DNA, 100 bp, Homo sapiens
aagtgctgcctggtgcagaggatcctggaggcctgggaagccaacgaccacacgcaggagtggggaaggccagggccagattctgcagcgcttcccagag

SEQ ID NO: 511243 - DNA, 83 bp, Homo sapiens
cacgactgcacccaccaggaagatgtggctgtcatctgctcagtgcctactggggccagaagcaatcatcttacctcaggagt

SEQ ID NO: 511244 - DNA, 96 bp, Homo sapiens
ggataaaactataaaaatgtgggaagtgcaaactggggagaatgaagttgaagaggtaaaagaggagggtccaaaagagatgactttggatgagtg

SEQ ID NO: 511245 - DNA, 100 bp, Homo sapiens
gtgacctcagcagggcatccagattgggatgcttggaaggtgtgtctacgacttcgagataatggacttctggccaagccaacccatggcgacattatca

SEQ ID NO: 511246 - DNA, 50 bp, Homo sapiens
tttacgcttgtgtgataaaactgggatcttgctgggtcagaaatacaacc

SEQ ID NO: 511247 - DNA, 100 bp, Homo sapiens
cgacatctggtcccttggcattacttctatagaaatggctgaaggaaaacctccttatgctgatatacatccaatgaggcagcctgtggtagctgttcct

SEQ ID NO: 511248 - DNA, 75 bp, Homo sapiens
cgagggccctgggcaaggcccgacagagtgatcagcagctggactgtgccttggacctaatgaggcgcctgcctc

SEQ ID NO: 511249 - DNA, 98 bp, Homo sapiens
tgtgctaagcaaagcacccgaactaggtattaatctctggagaagacacatccacagttagcactttcttcagatgctgacgctcggtgaacagttgc

SEQ ID NO: 511250 - DNA, 82 bp, Homo sapiens
tgggagccttcctgatccgggagagtgagagctccccaggggagttctctgtgtctgtgaaacctgcctagagctggaacgt

SEQ ID NO: 511251 - DNA, 50 bp, Homo sapiens
caaggaccgcttacaacttctagaaaccagcccaaaagacttcctctttt

SEQ ID NO: 511252 - DNA, 83 bp, Homo sapiens
gtgcagggccaggaggaacatgaggtcaaaatgcagatcttcgtgaaaacccttaccggcaagaccatcacccttgaggtgga

SEQ ID NO: 511253 - DNA, 74 bp, Homo sapiens
gaggttgttgttggagaagcaggctggcggaaacccttggcataatcaccagcaacacccgggacaataatacg

SEQ ID NO: 511254 - DNA, 76 bp, Homo sapiens
gcctgcgagggttgaagattgtgaagcaatagcctaaggctttccttaaagtttcccatgtctcaatggactcctg

SEQ ID NO: 511255 - DNA, 96 bp, Homo sapiens
ggcggatgatctaggcactggggatctcggttgctacgggaacaatacactgagaaattcggaactatccgggcagatttgattgaacagatgaga

SEQ ID NO: 511256 - DNA, 98 bp, Homo sapiens
agacggctgacggctcacactgtgtcccagctgcatctctggtgacccctgctgatgtcatcaagacaagactgcaggtggctgcccgcgctggccag

SEQ ID NO: 511257 - DNA, 101 bp, Homo sapiens
ctttaagacggtctacaaaggtctggacactgaaaccaccgtggaagtcgcctggtgtgaactgcaggtgtgctacattgagggtcatcgggtaattaatc

SEQ ID NO: 511258 - DNA, 107 bp, Homo sapiens
gctggccaagcacgccgtgtccgagggcaccaaggcggtcaccaagtacaccagctcgaatttccaggagactgacaaggcgtggcatgggggatgtctggcgctgg

SEQ ID NO: 511259 - DNA, 82 bp, Homo sapiens
caggctggaacttgccctgtctcctcgcagatgagctgtggccacctgtcgccctgacgaattccagtgctctgatggaaac

SEQ ID NO: 511260 - DNA, 88 bp, Homo sapiens
aagcgcggatacgatgtcaccaggaaccctcatctcaacaagctccagggttccttgaaaagaaaacaggtagttaacctatctcctg

SEQ ID NO: 511261 - DNA, 74 bp, Homo sapiens
tctggaattgctactgctgcctctgtcactcctggtgaccagcattcaagtgagggtcgctgtctgcccattga

SEQ ID NO: 511262 - DNA, 100 bp, Homo sapiens
cctaccccaaactcatggaaattgatcagtggaaattgcaacactaacaagagagaatggaaagacagtaatcagagttctcaaacaaaaagaagtggag

SEQ ID NO: 511263 - DNA, 74 bp, Homo sapiens
cacaagaagcggaagtatgagttggggcgcccagctgccaacaccaaggccctggccaacgtcaacattgggag

SEQ ID NO: 511264 - DNA, 100 bp, Homo sapiens
cccgttgaaggtgctaccgctgacgacacccctggtggatggcgaggatgagagatacccagaaagcggtactctagaaatgaatgtcaaggatcttaga

SEQ ID NO: 511265 - DNA, 100 bp, Homo sapiens
gccgaggagtcactgaacactatggaatcaatgagttcaaagaaggacgcagagccagccacacagccccacaggtcctctttagccacagggaacctcc

SEQ ID NO: 511266 - DNA, 78 bp, Homo sapiens
gaatatccatgtcggcttgtagagagattgcatccaaaagaatatccgctaaggatgccttagcccacccctacctag

SEQ ID NO: 511267 - DNA, 74 bp, Homo sapiens
agcaaaacacactaaagattgggcagtcactggggagaacggatgattctctgaacgactgtcggatcatcttc

SEQ ID NO: 511268 - DNA, 96 bp, Homo sapiens
ttacacaccatccagactgaagaccgagtctggtccattgctatcagcccattactcagctcctgtcttcgttcctggctagaacaagacacctcc

SEQ ID NO: 511269 - DNA, 100 bp, Homo sapiens
ctgctgtggattgtcagcagctgcctctgcagagcctggacggctccctccacgtcccctcttcttcaagtgacaatttcacttagcaaagtagagctta

SEQ ID NO: 511270 - DNA, 82 bp, Homo sapiens
gtcacagcgacatatgatagatggacgatggtgtgactgcaaacttcctaattctaaggatctgtgccagttcagaagcagg

SEQ ID NO: 511271 - DNA, 100 bp, Homo sapiens
ccgacccgcgccctgctccctctcagcacctgggcggacgacagggtcagatgtgttactgggctggagtgtggtggcacaatcacgctcactgcatcct

SEQ ID NO: 511272 - DNA, 100 bp, Homo sapiens
cttggttccccctccctcagcttccgccccaaaaggaagcgttgttgacgaccatggacatcatccacgatggatttggattcatgctggcttttggaga

SEQ ID NO: 511273 - DNA, 98 bp, Homo sapiens
gacatactacctctggccccgagatcagaatgccgacaacatctggggaagatgtacgagacttcacaaaggtacttaagaacaagttcaggtcgaag

SEQ ID NO: 511274 - DNA, 83 bp, Homo sapiens
tggtcactagcggactcttcttcgccttcgaaccatggtgaatccgggcagcagctcgcagccgcccccggtgacggccggct

SEQ ID NO: 511275 - DNA, 75 bp, Homo sapiens
acgagttgaatcattgttcaaataaggacacttgtattagctttaatagaagagaaatggaggagccatagaata

SEQ ID NO: 511276 - DNA, 74 bp, Homo sapiens
gctcaaagccctgggtcgcttggaagaagccaagaagagagctgtgggaagaggactcagccacaagacatttg

SEQ ID NO: 511277 - DNA, 75 bp, Homo sapiens
taaccaccattatcttaactgaggcacccaaaatggttcagcgtcttccatttctttcaagctcaaatctttcac

SEQ ID NO: 511278 - DNA, 88 bp, Homo sapiens
cagaaagcaatgataattcccaggacagtcagtctggtactaacaatgcaggtttcaggtacgttcaccaactttctttcaaaaatcc

SEQ ID NO: 511279 - DNA, 82 bp, Homo sapiens
aagcgcaggggctcctcgggctcagtggcacttctcagaacttctggatgagttttcccagaacgtcttgggtcagctcctg

SEQ ID NO: 511280 - DNA, 100 bp, Homo sapiens
aaccctgctgacaccttgatcgtggacttctagcctccagaactattatgatgatggcttttcaatgaagcatacagccaccgcccgtttccagagaaac

SEQ ID NO: 511281 - DNA, 100 bp, Homo sapiens
aggtggccaaagacccaccaggcatcaaggccctggaagatatgcgcaagaacctggagaagtccagtgtgaaaaaagccagtattaaaatactgaaaaa

SEQ ID NO: 511282 - DNA, 101 bp, Homo sapiens
ttacaacagcatacagcatttctcccaccaggaatccttcaactgctttctaccaagcgttccatttgaacacgttaaaggaatcaaagagcctctgggat

SEQ ID NO: 511283 - DNA, 100 bp, Homo sapiens
agcagaccacgtttgaaggagggatgagggagcctgccctcgcatggtggccagggcacgtcactgcaggccagagacgtctcccacaacctgctccggg

SEQ ID NO: 511284 - DNA, 83 bp, Homo sapiens
aggatgtcaaatttgtcagcaactcgtcaggttatcaatactctggctgaccatcatcatcgtgggactgactttggtggaag

SEQ ID NO: 511285 - DNA, 51 bp, Homo sapiens
gtggacagatctgagagatactgagctaaacaagcattgaggaagcagcaa

SEQ ID NO: 511286 - DNA, 100 bp, Homo sapiens
ggggtcagctagtgtccgctctgctcggccgcgggctcccggaggactgcagccatggaatgtcttacccaatttcaggtttagtgaagatgtataaagc

SEQ ID NO: 511287 - DNA, 74 bp, Homo sapiens
gacaaggaaggcaatgtcctgggtcattccagaattgctgggacaaaggcttgactattgacctgaagaatttt

SEQ ID NO: 511288 - DNA, 100 bp, Homo sapiens
ccccccaccccttggagccaggcgccggggtctgaggagagcaagccctggaggttcactctttcaagaagtcgtgtgctgaggtgtaatgctacacaag

SEQ ID NO: 511289 - DNA, 89 bp, Homo sapiens
ggatgggactggcactcttcaggaaccaccagtcttcttaccaattaacattgatgggcaggatattaggaactttaatgtaaactatc

SEQ ID NO: 511290 - DNA, 100 bp, Homo sapiens
cgccgacggctgctcaaacatcaggctgtgagccgtgagctttgaggcggtgggatgtgtcagcagaatgtctcctgcccccgagagcgaccccgaggcc

SEQ ID NO: 511291 - DNA, 78 bp, Homo sapiens
acaaagtcccctttgtgttcacataatgctgtcaggaactgtgaccaagaattctatcgtgatgcagagaagaaagaa

SEQ ID NO: 511292 - DNA, 100 bp, Homo sapiens
cccatggagatccagttcaattatgaatctcaggaacaccaccttctgtcagattacctggctggtgtttgcttgttctggagtgatcttctgactggaa

SEQ ID NO: 511293 - DNA, 75 bp, Homo sapiens
acccactattcagccattgggtcacaagcgatgaaaagagcaccttgaagctaacttcagtcaacctgaaatagt

SEQ ID NO: 511294 - DNA, 100 bp, Homo sapiens
gtcttcccgcgtccgccgattcctcctccttggtcgccgcgtccttggctggcgtgatacagacgtccctcaccagtgccagcttggggtctgcagatga

SEQ ID NO: 511295 - DNA, 100 bp, Homo sapiens
ctctcatcaaaacaccagagcgactttcattagaaggagagcgacagcccaagtcaccagaaacttcaggttttgtggacaaactatttgaaagtctcta

SEQ ID NO: 511296 - DNA, 82 bp, Homo sapiens
gtcgcaccctcctcctccggagaagtagagaaataaatttctcccaccctaaaccagagcccaaatcttgtgacaaaactca

SEQ ID NO: 511297 - DNA, 82 bp, Homo sapiens
caggcgaccggctccgcagcaagatggcggacgagaaggacagggaagattatccctggcgctggagccgggccgtccccat

SEQ ID NO: 511298 - DNA, 75 bp, Homo sapiens
ggagcgacgacggccgctgcctaagctggaaagattctggactctacttataatatccctaactgctggattctc

SEQ ID NO: 511299 - DNA, 50 bp, Homo sapiens
taaaagacaaggccttctccaaggtctcagatgatgataaagaaaaggga

SEQ ID NO: 511300 - DNA, 100 bp, Homo sapiens
cctccagtgtttggatattcaggtatattgagatcttcagaagtagcaggagtgaaatcaaaggattttatgatccaccaagaagattgctgggacagcg

SEQ ID NO: 511301 - DNA, 98 bp, Homo sapiens
tggcattggaacttcctgttctgatagcgtggaagaaaatgtggacacagacttgccaggcagcctggggcagagtgaagagaagcccgtgcctgctg

SEQ ID NO: 511302 - DNA, 120 bp, Homo sapiens
caagctgtctggccacccccaaagacaaaagacacagaagaaaaagtgggactgaagtacactgaagcagattttgtggaagtataatactttgtcattatgagatgtcgtctctcggtg

SEQ ID NO: 511303 - DNA, 75 bp, Homo sapiens
ctggctggaaatcaaagtccaccatgtgcttttgcacatccacttcctgatttctcccgattccttccttctccc

SEQ ID NO: 511304 - DNA, 100 bp, Homo sapiens
gggagaaactggcaaggagaagctcccgcggtactacaagaacatcggtctgggcttcaagacacccaaggaggacgccaaaggcggcggcagcagcacg

SEQ ID NO: 511305 - DNA, 100 bp, Homo sapiens
acgaattacacatttgatttcaaggcccgatgagagaaagggaaagttaaggatgctggagcagaacaatggatttctctttctctttcatgcaagggat

SEQ ID NO: 511306 - DNA, 90 bp, Homo sapiens
atgagcaacacagccttgtcccgggagcttaagttctcctgtgcctcctgttggctctctttgcatctggcctcatccaccgagtctgtg

SEQ ID NO: 511307 - DNA, 100 bp, Homo sapiens
tcaaagagattccctgaactggagtccttggtccccaatgcactggattacatccgcacggtcaaggagctggtgagcaggctgctgcacctgcacttca

SEQ ID NO: 511308 - DNA, 73 bp, Homo sapiens
ggagagtagcagtgccttggaccccaggagaccagtatgatgtctgtgccatttgcctggatgaatatgagga

SEQ ID NO: 511309 - DNA, 96 bp, Homo sapiens
agagcgacatggacaaagccatcaagatttgagagggaagatctgatctcctagaattagagttggtacagaaaccatttcagctccaaaaatgtt

SEQ ID NO: 511310 - DNA, 100 bp, Homo sapiens
acagacttatgctggaactgggttttagcaaggttcgagaacttgtcttggacaattgcaaatcaaatgatggaaaaattgagggcttaacagctgaatt

SEQ ID NO: 511311 - DNA, 82 bp, Homo sapiens
gaccatcctgggtgctggccctgtgctggagttcttcctgtccaagatccggtcccacgtggctacttgttccaaataccag

SEQ ID NO: 511312 - DNA, 75 bp, Homo sapiens
ctctgcaagctcatgaaagaaatcttagataagaaggttgagaaggatgagacctgcacgcagtggctcacagca

SEQ ID NO: 511313 - DNA, 100 bp, Homo sapiens
cgcggcgcggcgggaccatggagctcagagcgcagccccggcgccggcggcgggaccgcggaccggctccctgactggcagtcctcacctttccgagctg

SEQ ID NO: 511314 - DNA, 100 bp, Homo sapiens
gtgaaggcgtcggccggaggacaccccatcgtgcaggacaggctgcgggaggagctgcaggactgaggtacagaggccaggggcccagggcaggacccag

SEQ ID NO: 511315 - DNA, 76 bp, Homo sapiens
tcacactgcagaactgggttctggactttgggcgtcccattgccatgctccacagcacctgttgccttcattagca

SEQ ID NO: 511316 - DNA, 75 bp, Homo sapiens
atgagaataaagaacacgaagctgatacagctcttggagaaggcaaagacaactttgtacagtgccctgttgaag

SEQ ID NO: 511317 - DNA, 75 bp, Homo sapiens
ggcgtgggggatatgacaaggatggaagaggtcctatgacaggatcaaggcacatagctggcaacctggaataaa

SEQ ID NO: 511318 - DNA, 95 bp, Homo sapiens
tttgcttgcagttaggtcaagtggaggtatggcctcacaagtcttggtctacccaccatatgtttatcaaactcagtcaagtgccttttgtagtg

SEQ ID NO: 511319 - DNA, 75 bp, Homo sapiens
gcgggagccggcgtgggcggcggcaacggggcactgacctgggtgcttcatcgctgtggagaacattgacagcta

SEQ ID NO: 511320 - DNA, 100 bp, Homo sapiens
ctcatggatggcggctacatcaacaatctgccagtcgactcaaccccgagtctcacctcccgcaagatccacgggcttagccactccctccggcagatca

SEQ ID NO: 511321 - DNA, 75 bp, Homo sapiens
accgattcctctcgggctcttgggcgctgctctgaggccaggtcagagcagcccaccatgggatggggagggggt

SEQ ID NO: 511322 - DNA, 101 bp, Homo sapiens
ctcggtacctgttactgctgctacttcctcgtttgacaccttcctgggctgcaagaaagcgtaagattgccattcgaaaagcccaggggaaaaatgtggag

SEQ ID NO: 511323 - DNA, 82 bp, Homo sapiens
ccggagcccctttagccatgtggatacctacggagcacgagaaatacggcgtggaatgtgaaagatgttgcagaagtgttcc

SEQ ID NO: 511324 - DNA, 100 bp, Homo sapiens
gttgttggtctcctccttgctgcccttgttgctggtgtcgtctactggctgtacatgaagaagtcaaagtatgtagaatttaatctgctgtatgatcggg

SEQ ID NO: 511325 - DNA, 83 bp, Homo sapiens
cacaggccctcgttgcccagatgaaacattggcaaatttggagcgacagatctatgcttttgagggaagctacctggaagaca

SEQ ID NO: 511326 - DNA, 100 bp, Homo sapiens
ctaaaattgcctttggacagtctatggatctacattataccaataacgaggtggattctccacagttttcctcgtgcgtactcacggtggaatccgatgt

SEQ ID NO: 511327 - DNA, 75 bp, Homo sapiens
ctattcggacaagtacggccttggactatttgctgtggaataagctaggcgccaccctggccaatggaaaccaga

SEQ ID NO: 511328 - DNA, 100 bp, Homo sapiens
gtatattgcaaataccgtagaggttaatccctatatcctgaagaagaacatgatcctcatgacaaatcatttctatgcagcgatcttgggatatgatgag

SEQ ID NO: 511329 - DNA, 92 bp, Homo sapiens
cgccgcgcacttcgtcatgttcttcgcgccctgatgatatcatcaagttgaatcgaaaggaagggaagaagcagaattttccaagactaaat

SEQ ID NO: 511330 - DNA, 82 bp, Homo sapiens
cgagatcctggagagcctgcaggacggcgcggcagagtccccgtacgcctacagtaacgaacccagcgggtgccgcttctcc

SEQ ID NO: 511331 - DNA, 95 bp, Homo sapiens
gagcggccgccgaggggcccgcagtagctgcgctcccggggaaggagccccacagtccccaggtgatcgccatgatcaaaggcctgcaggtgctg

SEQ ID NO: 511332 - DNA, 75 bp, Homo sapiens
gactcggtgattgaggacaagaccatcgagctcatgggctgtcttcatcggtggaatacaacataatggagttgg

SEQ ID NO: 511333 - DNA, 75 bp, Homo sapiens
gtgagctcttcattagggcaccaaagcgaagggccttgcccgagatggacagccggattccttatgatgactacc

SEQ ID NO: 511334 - DNA, 75 bp, Homo sapiens
ccgagatcgagctctttgtgaaggtgttctccgtggcgcccccatttgaggtgaatggcctcccacgagctgtgc

SEQ ID NO: 511335 - DNA, 76 bp, Homo sapiens
cagaactgggttctggactttgggcgtcccattgccatgaactattccatggcagtatatcttgtaaaacagttgt

SEQ ID NO: 511336 - DNA, 75 bp, Homo sapiens
aatggggaggacaacttcgcccgggacttcatgggtgtgggccgaagatatgctcatgtggtgttgaggaaagca

SEQ ID NO: 511337 - DNA, 50 bp, Homo sapiens
atgtgtctcttgccaaagcgaaggtttcagattatcttgaagtaatcaag

SEQ ID NO: 511338 - DNA, 100 bp, Homo sapiens
gtggtgtacagcagcgggcgccaggacaccgaggagaatatcttgctgggagtggacttttccagtaaggaaaggtactcatgagaagcaagagatgaaa

SEQ ID NO: 511339 - DNA, 90 bp, Homo sapiens
tccttcagaaaaagcatccccgaggaggaagacgaatcgttaaacatctgaaagggtcagggacccagacatggagctgcgggaagaagc

SEQ ID NO: 511340 - DNA, 95 bp, Homo sapiens
gctgctgccgccgctgcccgaatcggaaccgtcgggccgcagccgccggcaatgccgcgaaggaaggtcaaaatgcagatcttcgtgaaaaccct

SEQ ID NO: 511341 - DNA, 100 bp, Homo sapiens
gggcgagcgaggaggatggcggagtcggggctcctgacggtgtacgaagccatcgacagcagagatggagcatcttgtgcagagttggtgtcttttaaac

SEQ ID NO: 511342 - DNA, 50 bp, Homo sapiens
caggtctggagctcgaccgggccagtgggctcgggatgagtttgaaggcc

SEQ ID NO: 511343 - DNA, 83 bp, Homo sapiens
tgaggcaagcgcagggggacggggaccagcagctgtcgccgccgctctcagatcaccgaagtggccttggagtacaacaactg

SEQ ID NO: 511344 - DNA, 98 bp, Homo sapiens
aactttatttcctcccagaagacactccccagggcagaaatagcgaccatggcgaggaaactatgccccagacgtccgttgtcttctccagcatcctt

SEQ ID NO: 511345 - DNA, 98 bp, Homo sapiens
gcgagagctggagaagctgggattggagattccacccaaacttgctggtcactgggaggagcttgaagaaatccgcaaatgtgggatgaaaaacttcc

SEQ ID NO: 511346 - DNA, 100 bp, Homo sapiens
ctgatcatgagcaaacgatacgatggctcccaacaagcccttgacctcaaaggcctccgttcagacccagggagaactaatgccgacgtgatgaccgccc

SEQ ID NO: 511347 - DNA, 75 bp, Homo sapiens
ggtcatctcgcagaacgccatcaaccagctttgtcgagatgtccacagaaggaggatttggtggtactagcagca

SEQ ID NO: 511348 - DNA, 75 bp, Homo sapiens
cgcgcacgttggaaccgaagagagctctgttgttgcagtgaaggtgctaaaggagaagatagaagctgagaaggg

SEQ ID NO: 511349 - DNA, 101 bp, Homo sapiens
ctggaggtggactggagcagtgagaaagcaaaggctgctctgaagcgcacgacctccgactactttctccttcaagacaggaacacagaggacgatcgccc

SEQ ID NO: 511350 - DNA, 98 bp, Homo sapiens
aaggaggccaagaaggccttcctggacttctaccacagcttcctggagaagacagcgggccacgactgcttcccggtgctgttcacctatgacgccgc

SEQ ID NO: 511351 - DNA, 100 bp, Homo sapiens
aacaaaccttacctttattggagacaaaaccgtgatgatctttgaactggcttaccacgtgcagtcatttctcagcgagcataacaagccccctcccaag

SEQ ID NO: 511352 - DNA, 82 bp, Homo sapiens
ctagttttgtacccatcagcgcaggagaaggtgctccagagatcttctgttcttcagattatttactggcaagatgagcagg

SEQ ID NO: 511353 - DNA, 75 bp, Homo sapiens
gagcttcggcatctacccttattccaggcggctgctcaggctcgtgctgtcttggaaagagaatttaacaacctt

SEQ ID NO: 511354 - DNA, 101 bp, Homo sapiens
tgcagtggcgcctaaagtctgagagagggaagtcgcctctgtgctcgtgagtgcatggggtataagaaactggcgatggaatatgagaggagccctctgga

SEQ ID NO: 511355 - DNA, 102 bp, Homo sapiens
gcgcctgcgaccccagtcggtgctccggggaggtcacctgacgaggagggagtgcatccgccccaacccttttccccctcgtctcctgtgagaattccccgt

SEQ ID NO: 511356 - DNA, 100 bp, Homo sapiens
tcacagcacaggaatgggatcccagctttgaggaggctgtgccaagaccttgtaccactcggtccatgaaaagatcttcacacttccaggagactgtctg

SEQ ID NO: 511357 - DNA, 90 bp, Homo sapiens
cggagaggcggtcgggatccgctgcgcgagctgtctcggtcccacgtgtgcgtgcacttgcaggaaagacatggtgaagatttcaatgga

SEQ ID NO: 511358 - DNA, 83 bp, Homo sapiens
gccacccctagctgtccccctgagatgaagaaagagacatggagcagagtaaccctgcctacaccatcagtgctgcgctgtgc

SEQ ID NO: 511359 - DNA, 135 bp, Homo sapiens
cttcctcatggttgtgaggagtgcatgacacatagcgagtgctcagtgaacagtcatttttctggcagaactcacagtttggagatgaaaaaacatttagtgattcatcattgctggaaaatctccaaaataatc

SEQ ID NO: 511360 - DNA, 132 bp, Homo sapiens
ggtgtatgtgcgcttcccagggatcttgagagtgaagatctcgaaggatttcataggaaattatattgagaaatccagatgtgcagttgtgcaagagcaagctggtgtggatttttgaatggatattctgaa

SEQ ID NO: 511361 - DNA, 100 bp, Homo sapiens
gccgaagtacagaaaccatatttacagggagtccctggaagcactcctgcagagggctgtggcccactgccccaaagcagaggtgctgtggctcatgggc

SEQ ID NO: 511362 - DNA, 100 bp, Homo sapiens
cagctgaggaagtctgcatccacattgcacataaagttgggagcatcgagtacagctgtccggcctccaacgagtgtgagatcaccaagcggagacgcaa

SEQ ID NO: 511363 - DNA, 100 bp, Homo sapiens
gggtaaaagagatcaccgacaagatcaccacggacgagatgatcaaacgcctgaagtttttggctttcacccccaaccagtgaccaaagacttgaccact

SEQ ID NO: 511364 - DNA, 50 bp, Homo sapiens
cttggggagagttgctaggaaaatggaattgcattttgtgaaaaaagaac

SEQ ID NO: 511365 - DNA, 99 bp, Homo sapiens
ggataaacggaaccccaggttaattcgtgttgctacgattgtagatgttgatgaccaaagagtaaaggctcaggcccgatgtcaccgcataggccagag

SEQ ID NO: 511366 - DNA, 104 bp, Homo sapiens
gaaactggatgcagcaaggaaataggatttaaccgctctctgcctcccagacaatgcagatcttcgtgaagactctgactggtaagaccatcaccctcgaggtt

SEQ ID NO: 511367 - DNA, 50 bp, Homo sapiens
ggcgaacgctagtttccgagctcatgtgttcagtgtgaggtggagctgat

SEQ ID NO: 511368 - DNA, 88 bp, Homo sapiens
gccttgaaaaagctgccctgagacggtgtcccgccgaaagaatctacctgttactcgtattttggacaatcttatggagatgaagtca

SEQ ID NO: 511369 - DNA, 88 bp, Homo sapiens
caccccggagacccccgcttccagtgcagtcatgctgcaaagcttggagcccagctggccgatttacaccttgataacaagaagcttg

SEQ ID NO: 511370 - DNA, 100 bp, Homo sapiens
tgatgcaggtgaacgacactctgacttccgaagatgccggactccggaacagcaagaactgcaccgaaccagcaaatgccagtcttcttggaggaggagg

SEQ ID NO: 511371 - DNA, 90 bp, Homo sapiens
cctaggatgacttcagtgactagatcagagatcatagatgtcattttgtccagtgatgatgatgatgacaacgacagaactaacagaaga

SEQ ID NO: 511372 - DNA, 51 bp, Homo sapiens
gccacctgctggatgttaaaagctttcagcttatgtggagaagtcgctgtg

SEQ ID NO: 511373 - DNA, 100 bp, Homo sapiens
gctgattgccgctcggaaacacatggacaaggtggagctgaagaagggagccactctcaaaatcacgctggataacgcctacatggaaaagtgtgacgag

SEQ ID NO: 511374 - DNA, 100 bp, Homo sapiens
ccggaggtgacaacaataacaagactgtccttcggacaagttttagtatcacaggtatattgaaattgctataaagcagtgcaggagctcaggaatcgat

SEQ ID NO: 511375 - DNA, 100 bp, Homo sapiens
gatgccgcagtaccagacctgggaggagttcagccgcgctgccgagaagctttacctcgctgaccctatgaagaacatccagtcatggataaaaatgagc

SEQ ID NO: 511376 - DNA, 98 bp, Homo sapiens
taccttccccgggcaggggcgctcaacccaaccggctccagggcactgaccagcatctcagacatgtcgaaaaagatgttttgatccctaaaataatg

SEQ ID NO: 511377 - DNA, 100 bp, Homo sapiens
cgggtggcttacagacgctgccagcatcgccgccgccagcctggctcccaccatgagtgctgagcttaacgtgcctatcgacccctctgctcctgcctgc

SEQ ID NO: 511378 - DNA, 83 bp, Homo sapiens
gccatttctccgtcgattaaagagccatctgtggtgccaattgaagacaatgcagatcttcgtgaagactctgactggtaaga

SEQ ID NO: 511379 - DNA, 95 bp, Homo sapiens
gatctggacaaaggaacaggtatctcaggattttaaacaagctgcactgataagccggactaacgggagcctttgtcacgccactgccatgtgcc

SEQ ID NO: 511380 - DNA, 111 bp, Homo sapiens
cctggagagcctgcaggacggcgcggcagagtccccgtacgcctacagtaacgcttccccgggcgctgcctggacaggcctgcctgcgtgctgggacatgtctggcctcca

SEQ ID NO: 511381 - DNA, 96 bp, Homo sapiens
cattgacctgcttcaaaagaacaggaccccgtacgtcactaccactgtctctgctcacagtgccaagttgatggagaaccttgtgacctgtctttg

SEQ ID NO: 511382 - DNA, 98 bp, Homo sapiens
ttaaaaagaaataataaaatgggagagaatgaagcaagtttacctaacacgtctttgcaagggtgtcaaattgagaaccaggtagatccccaccacct

SEQ ID NO: 511383 - DNA, 95 bp, Homo sapiens
ccgagagcgtgaccgagagcgcgaatatcgtcatcgttagaaggatctactccaagtgaccaacagcaaaacaaattacgaagttcatagacgag

SEQ ID NO: 511384 - DNA, 75 bp, Homo sapiens
ggaaggatattgtccttttggagcagggcaggaactttgcaagttaatgaatctttggacagagagattctgtgc

SEQ ID NO: 511385 - DNA, 80 bp, Homo sapiens
cctgccgtctgctcttctgcctcttgatctccgccaccgtcttcaggccagtgaccgaagctggctttggtgctgacatc

SEQ ID NO: 511386 - DNA, 100 bp, Homo sapiens
tgggagctgagatggatcgtttacagccaggtgaggaagtggagatagctgagctcactacagtccctacagatgaagaagatgaaatggaggagtccac

SEQ ID NO: 511387 - DNA, 75 bp, Homo sapiens
agtcagttgtttgatttcatcgatgatctggcagacctcagctgcctggtatttcgtcatggctattgtaaagga

SEQ ID NO: 511388 - DNA, 51 bp, Homo sapiens
aaaccagctgcagtgttatcaaaggggagagaatgtagaagatgccttcct

SEQ ID NO: 511389 - DNA, 49 bp, Homo sapiens
gcaggcagaacattttctggaggttatcaatactctggctgaccatcat

SEQ ID NO: 511390 - DNA, 75 bp, Homo sapiens
gaacacagcagggcggaggaaagtgcagggaatgacgttggccggagctcctatggcgccatgcaggtgaagcag

SEQ ID NO: 511391 - DNA, 101 bp, Homo sapiens
ctcctagtgcacaacttggccgggctcactgggctcctgcaccactgcctgtcaggtactatggatatagaggagagaaatcgccaaatgaaaattaacaa

SEQ ID NO: 511392 - DNA, 82 bp, Homo sapiens
ctggccacttgcttgggatcctttatcctggtcatcttctatttccaaagtgtgagatcaaccatgagttccgttgcagttt

SEQ ID NO: 511393 - DNA, 100 bp, Homo sapiens
tgtgagacgtttggaatgaggaaaagtgaacttttcgaggcatttgacttgtttgatgttcgtgactttggaaagactaaatgtgttaaatgggcttgcc

SEQ ID NO: 511394 - DNA, 98 bp, Homo sapiens
ccaaatcctccttcagcctcctggcgcccatccgcagcaaggacgtccgcagcagactgggccagtgccattcgcgtcgcagctctggactgcatgga

SEQ ID NO: 511395 - DNA, 75 bp, Homo sapiens
aagactttgtagccatcaacccgagtgcagtttcgatggaaaatgaaggcttcagggatgacttcttagggggca

SEQ ID NO: 511396 - DNA, 100 bp, Homo sapiens
gcgatggcagcgaccgatatagctcgccaggtgatgtgcccgtggagaagctggccgccatgccagccttgcgcagcatcaacctccgcttcaacccact

SEQ ID NO: 511397 - DNA, 80 bp, Homo sapiens
gctcagcagctgcaatggaaccttactcagagttcctatcagactgagattgggcagaccctggacctcctcacagcccc

SEQ ID NO: 511398 - DNA, 75 bp, Homo sapiens
gcccttccaaataagcggcataaagcaattgagaattcagtggccctgaagctgcactatgttggaggtttcctt

SEQ ID NO: 511399 - DNA, 98 bp, Homo sapiens
tcaatgagctcttcggcaagttcgatgaattagccacgatcggcttcaccaccgaccctcggatggcccgctcctccccctaccccactgacgtggcc

SEQ ID NO: 511400 - DNA, 82 bp, Homo sapiens
cctgggggtcagcacggaggggactggagctggagagtgactgtagagcctcagaggaatgtcgggtcctcacaattcaaaa

SEQ ID NO: 511401 - DNA, 96 bp, Homo sapiens
atacgctacttttactcagagtttgaaggttgtgaccaaaagaggctccgatgaccagctgaactcagaagaaaaaaagaagagaaagcagcgaag

SEQ ID NO: 511402 - DNA, 75 bp, Homo sapiens
cgcggctgggcaagaagctgatcgagcccctcaccaatctcatccacaggtcgcaatggaagaagagatcgccgc

SEQ ID NO: 511403 - DNA, 90 bp, Homo sapiens
agtagacaagccctcaaggatgcccggtccccatcaccggcacacattgtcgtgtcagcaatgcatggctggaaactcttctgtctgtta

SEQ ID NO: 511404 - DNA, 101 bp, Homo sapiens
ggtcgcgtctcggaaaccggtagcgcttgcagcatggacccattccaacaatctcgtaaaacatggtggattactatgaagttctaggcgtgcagagacat

SEQ ID NO: 511405 - DNA, 101 bp, Homo sapiens
ggaagtcctaggactgatctccaggaccagcactcttctcccagcccttagggtcctgctcggccaagttattaaagagggtgtacgggagtttcttggta

SEQ ID NO: 511406 - DNA, 50 bp, Homo sapiens
gatcaaccagacggaaaacccggtctcaccaacggctttgggggtgcgag

SEQ ID NO: 511407 - DNA, 83 bp, Homo sapiens
aagaaacaattcttcgacatactctccagcttcaaatgctgcacttaaaaggatgcttgttttgatgtcctgctcattgtttt

SEQ ID NO: 511408 - DNA, 75 bp, Homo sapiens
tctccctgatcttacgtgctcaaggtaccagctggaggatgagtctgcgcatttggatgaaatgccactaatgat

SEQ ID NO: 511409 - DNA, 100 bp, Homo sapiens
tgtggaaaaacagtgatcgctaagaactttgccgataccttaggatacaacatagaacctattatgctctatcaggttggaagtgtatcctcccttctta

SEQ ID NO: 511410 - DNA, 88 bp, Homo sapiens
caggcagagcgggacagccaggaggaagggcagcttggcagagcctcaggccagaagcggactcctagaagaggggagcagcaaggat

SEQ ID NO: 511411 - DNA, 97 bp, Homo sapiens
agagcgtgaccgagagcgcgaatatcgtcatcgttagaaggccgctacctgtctgaggaacccgagccctacctggcagtctacctgcactcggagc

SEQ ID NO: 511412 - DNA, 75 bp, Homo sapiens
ccggccgtggaagcggccaccgactactgtcagcagctgtgccagagcactgcagcctgtggtgttgaggctcac

SEQ ID NO: 511413 - DNA, 77 bp, Homo sapiens
gccgtgcccgagaatagctccgtccagcagaacactcctatgccaccttcaccagctgtacaagtgcagggccagcc

SEQ ID NO: 511414 - DNA, 74 bp, Homo sapiens
ggaggaaaagaagcagttcctgatgttacaaatgaacaaggatctcccagttccgccatggagtcatagttgca

SEQ ID NO: 511415 - DNA, 101 bp, Homo sapiens
caacaacagacaagtgtgcattgacccgaagctaaagtggattcaggagtacctggagaaagctttaaacaacattgtcccagatatagccgttggtacaa

SEQ ID NO: 511416 - DNA, 101 bp, Homo sapiens
gagaatttgaagaaggcctggttagccaatacaagttttatttggaaaatctggaacaaatggttaaagattcccaggactccggctctctctgcttctgt

SEQ ID NO: 511417 - DNA, 98 bp, Homo sapiens
cctgacgagcccctacctccccaacggatcgctctcgcccaccgcccgaaccaacaagttgaaatcatcgcagaaggataaagttcgtcagtttatga

SEQ ID NO: 511418 - DNA, 75 bp, Homo sapiens
atccataaaactgaagatgtgaatactctggatttgtacacacagatatgacgaaagacttgaaagaagaacatt

SEQ ID NO: 511419 - DNA, 82 bp, Homo sapiens
caagcagaatgtgatttgcttgaagatatgaggtgtgatgaatgcagactctgctaccattttggctgtttggatcctcctt

SEQ ID NO: 511420 - DNA, 83 bp, Homo sapiens
gtccaggctgaagacagagggctctgatctgtgcgacagatccctgaagaggaaggagaaggaatatgagcatgaaatggagc

SEQ ID NO: 511421 - DNA, 75 bp, Homo sapiens
ctaaggaccagctgcagactttctcagaggaggaaaaaagggttgctcattttgggtatcactggagtctgatgg

SEQ ID NO: 511422 - DNA, 100 bp, Homo sapiens
caactggcccgagtccgattaccccccgggcatcagctgttcctggcacatcatcgcgcccccggaccaggcctcgggccagcggccaggagctgcctcc

SEQ ID NO: 511423 - DNA, 50 bp, Homo sapiens
ttatcatgtgaaaactgccttctttcacatggagtctcgctctgttgccc

SEQ ID NO: 511424 - DNA, 50 bp, Homo sapiens
cggggacaaactacttcatcaaggaggaagaacgtgcaaaacgtgaggag

SEQ ID NO: 511425 - DNA, 100 bp, Homo sapiens
ttttcgagtaagattttttatacctgatcccaacacactgcagcaagaacaaaccagagttctagtaactcatgttctgtacttgaagctgccaagcacc

SEQ ID NO: 511426 - DNA, 83 bp, Homo sapiens
gaccaccatcccggtcaccacgagagatgccctgtatccaagcccaatatgggacaccagcaccgagtccgggaccccgtgac

SEQ ID NO: 511427 - DNA, 74 bp, Homo sapiens
cgggacaccccggaagctgggaaatgctctaagcgaaagacatgaggcctcagcctgaaatgaggttgttttga

SEQ ID NO: 511428 - DNA, 95 bp, Homo sapiens
gaattacaggtgtgaatcactgcatctgactatggcaaggatctctgtcactgaggtgaatgactggcaggaggactgggtcgtgttctatgccc

SEQ ID NO: 511429 - DNA, 100 bp, Homo sapiens
gcccacagataggagggaccccgtgctggtgtgcagggccatgtgtgctatgatttctcgaatgctggcagccaaaaccgttttggctatccgttatgat

SEQ ID NO: 511430 - DNA, 75 bp, Homo sapiens
gaaagcagtttttaagacaagtggtgaaaactattggcttgagggaagtttggttctttggtctgcagtaccagg

SEQ ID NO: 511431 - DNA, 100 bp, Homo sapiens
agatggagtggcagaacttcctgaacctgtgtatctgccaggagacccagctgcagcacgtggaggactaccgccgggaatcagagatcattgatttctt

SEQ ID NO: 511432 - DNA, 75 bp, Homo sapiens
ggatttgggatgacgtgtcagtatcggtcagacttcatcaatatagatcagtgaaaagcatgatgtggtgttctt

SEQ ID NO: 511433 - DNA, 74 bp, Homo sapiens
ctccttggcctctcctgggatcggcccaaggccagttctccgcagcagcagccgctcttctaaaacattcaaac

SEQ ID NO: 511434 - DNA, 90 bp, Homo sapiens
gtctcctgatacccggatgtgaggcgatccgctggcgctagtctgaccctccgccaggcaaaaggaaggatttggcttaataaagcttga

SEQ ID NO: 511435 - DNA, 108 bp, Homo sapiens
ttgacatttaattttagggtcctttatatagaagggagagtaggtactgggcctaatcgctacgtgcctctttggctatgatgcctatgtcaccttccccgttcggca

SEQ ID NO: 511436 - DNA, 83 bp, Homo sapiens
gctcaacggcggcctgcctccgggcacacccggctccccggacgcctcggaggcagtggagaaggtgacacagcacatccacg

SEQ ID NO: 511437 - DNA, 90 bp, Homo sapiens
cggggacccgctgatcttccagctcccctcacccaacgtcgtcccacagcccccatcccgtagcccttcctggatctggagagagcagct

SEQ ID NO: 511438 - DNA, 100 bp, Homo sapiens
gaaccctacttgcctaaatgaggaatgtctttcctaccatctaaaatacgaaggtttctggctggtttcgataatggacaaggtgacgacagttttcaac

SEQ ID NO: 511439 - DNA, 90 bp, Homo sapiens
tgtaaaagtggctcaccatggggagaatcctgtgtacatccagcagtggtcattcgacaacgaaagtcataccgtagaaaagatggcgtg

SEQ ID NO: 511440 - DNA, 107 bp, Homo sapiens
attttaccttttggttcaatctttattgaaatatggatagcttatgaaggatccaatttcttgggaagacaaatcctactcaggcctaatgagatcccaaactggac

SEQ ID NO: 511441 - DNA, 100 bp, Homo sapiens
ctagactttgtgttccaagatcagagaatgagagaagacagtgctagagtctatgaaaacgtgggcctgatgcaacagcagaaaagtttcagatgagaaa

SEQ ID NO: 511442 - DNA, 100 bp, Homo sapiens
gctgctgctcaaagctgctgccgccccttgggctaaaaggttacttcctcagaatgttggcctcctgtatgttggaggttatgaaagaccctttgcacaa

SEQ ID NO: 511443 - DNA, 75 bp, Homo sapiens
gccttgctgccaggaagcttcggccccgcagctcggcttgctgcggtctcaggcagttcaattaacctccagaag

SEQ ID NO: 511444 - DNA, 100 bp, Homo sapiens
gaaacattcagtgggagagccgtacctatccttatcctggaaccccaatcactcagcgcttctcgcacagcaccttcagtgccccgtgggctgccctggc

SEQ ID NO: 511445 - DNA, 103 bp, Homo sapiens
agacgcagccgtagacaccagctccgaaatcaccaccaaggttttaaaatcaaagatgggaaaatcggagaaaattgcccttccccatggccagcttgttcat

SEQ ID NO: 511446 - DNA, 98 bp, Homo sapiens
ctctgggttgaaacccgggcgccgccaagatgccgggagagggacccaatcctgtagctggaagctgggagcctccgaaggcccatccatacttccct

SEQ ID NO: 511447 - DNA, 95 bp, Homo sapiens
tgaagctcaagggactgtgtccaccctcagggactttgaacatgtcggggatcgccctcagcagactcgcccaggagaggaaagcatggaggaaa

SEQ ID NO: 511448 - DNA, 89 bp, Homo sapiens
tcaagctaagtgtgttcacctccaacaagctcccattggatcttaagacccaagaaactcgagagatcttacatttccactataccaca

SEQ ID NO: 511449 - DNA, 50 bp, Homo sapiens
ttcctgtacagcctgcagaactgacgcaatgagcccctgaagaaagagcg

SEQ ID NO: 511450 - DNA, 51 bp, Homo sapiens
gaggcacgtccgcacacacacagaatgatatggaacctagcaaagctgttc

SEQ ID NO: 511451 - DNA, 98 bp, Homo sapiens
atcctctcgtctcagcctctcaaactgctgggattacagaaataaacggtgactggcaaagagctgatgcagtctggaataaaatccaagaagaaaat

SEQ ID NO: 511452 - DNA, 87 bp, Homo sapiens
tgaacgtggacagcctcatcacccggctgctggagggatagagggaggaatcagcagcttggaaattcaagcacgtgatctggcggg

SEQ ID NO: 511453 - DNA, 75 bp, Homo sapiens
ctgataactggaaagttcctcaagatggagactttgactttggcggcgactggcggcgcgatggacctgaccggg

SEQ ID NO: 511454 - DNA, 88 bp, Homo sapiens
acagcatcagcagtcatctcactagttatgttcaaaaaagcagagatcctacaagaatccaggatgatgatcccagattgccagcgca

SEQ ID NO: 511455 - DNA, 101 bp, Homo sapiens
acaacatggcagacattgacaagaagatgagaatgtgcctactgctcctgatcctccaagtcaacatttacgtgggcatgggacaggcttttgctttgatt

SEQ ID NO: 511456 - DNA, 102 bp, Homo sapiens
cgagaagatgagctcagaggtggtggattcgaatccctacaggagctggccctcagcgcactcctgaagttcgtgcagctggaaggagcgcaccccctggag

SEQ ID NO: 511457 - DNA, 100 bp, Homo sapiens
gtggctctgggtccagccccttacttaaagaaatcctgcaggacggactggactggtgggccgggggcttttggggcgatggggcccaaatcacgctgca

SEQ ID NO: 511458 - DNA, 96 bp, Homo sapiens
caaatccattgaggaatacctcaagttggtgggacaacagtatcttcatgacgcactggcaatctgcacatcgtgctgccacacgaggcttcattc

SEQ ID NO: 511459 - DNA, 98 bp, Homo sapiens
gtgatacagcaataccaccttcagtacttggcaagatttgatgctcttgtgctcagtgacatcattcaggccctggccaacgtcaacattgggagcct

SEQ ID NO: 511460 - DNA, 106 bp, Homo sapiens
aaagcacttaaaagtggaaagatgacggatgaaaagaatgaacactgtccttcaaaacgaagaattcagcctcagcccccagatgaagatggggatcacagtgaca

SEQ ID NO: 511461 - DNA, 100 bp, Homo sapiens
ataaaattcgatggattcaacatcaacacttgcagggaaatgatcagtctgttggatcacggatgataccatcggggaccttaagaagctgattgcagcc

SEQ ID NO: 511462 - DNA, 83 bp, Homo sapiens
ggccggggacacccagtggtccagatgagacaaggggccttcctggtgaacacagcccggggtggcctggtggatgagaaggc

SEQ ID NO: 511463 - DNA, 90 bp, Homo sapiens
agcgcggggcggcggcgaaaggacggtgtgaacttcaacccggagcactgcagccccaatggcaccgacccctacaagcctaagtgcccc

SEQ ID NO: 511464 - DNA, 100 bp, Homo sapiens
caagtaccgcctgggacggaagatcgggagcgggtccttcggagatatctacctggggctgttttgctgcagcttctgaagtgttaaagcacttgaagga

SEQ ID NO: 511465 - DNA, 90 bp, Homo sapiens
ggtgtgggagatcgtgggcgagctgggcgacggcgccttcggcaaggtttacaagtttccaacatggctagatccatcagaaactgaagc

SEQ ID NO: 511466 - DNA, 98 bp, Homo sapiens
cggcgacatgcagcagctgaaccagctgggcgcgcagtgacaaccatgagtggaaaaaactaattatggttcagcactggcctgagacagtatgcgag

SEQ ID NO: 511467 - DNA, 75 bp, Homo sapiens
ggagagcaaggagaaggatcgccaggtgctggaggacttcccaacggtttattcagtcaccatgaagctgctgct

SEQ ID NO: 511468 - DNA, 75 bp, Homo sapiens
atggcctggcgacccattcaggcacttatggccatttcagccattgtggaagatatcaataagcgcagagagccg

SEQ ID NO: 511469 - DNA, 82 bp, Homo sapiens
aaaccataatgctacaaactctagactttcaaacctctggttgaaagaaatatacccagttcagtcactgcagtagaattcc

SEQ ID NO: 511470 - DNA, 50 bp, Homo sapiens
catgaagttcgggactatcttctgatttgtcaaatccaggaaccttccgg

SEQ ID NO: 511471 - DNA, 100 bp, Homo sapiens
tggaaagtttgcagaagtggaaggagcagaacgtgagggtgtaacttacaaaaagattagatcctgtgctgaaagagaaaccaagaaaaaagatgacatt

SEQ ID NO: 511472 - DNA, 100 bp, Homo sapiens
gaagcatcattatttattgttccatcagttgtcaaaggtgtttcccatgatgaattgcttgacttagcaaagtttcatttcggtgactctttatgcacac

SEQ ID NO: 511473 - DNA, 100 bp, Homo sapiens
cactcagaatgctccaggcagtgtaatctcattccatcttcattcatgactccagacagatatttcaagacccaacagcaatgatgcaacaattattgac

SEQ ID NO: 511474 - DNA, 88 bp, Homo sapiens
gactgctgtcagatagcacttgccttccccatattattcaggaacattaatcctgatgttctttttgaagtacacaactataatataa

SEQ ID NO: 511475 - DNA, 75 bp, Homo sapiens
tttcttctgacttgagcctgcagtgtgctgtgagagatctaccactagctattattcatggactatccagtctaa

SEQ ID NO: 511476 - DNA, 96 bp, Homo sapiens
cgaacatcacagattccttatccaatcgttctttgattgttaccaccattttgacagatttgaccagttttgggccatcaatcggaaactcatgga

SEQ ID NO: 511477 - DNA, 100 bp, Homo sapiens
ggatatggctggagactggcactgggctctgaggggatctggacaactctcctctgtccccaccttcaccaaggaccaaaagcagaacgcatactcgggc

SEQ ID NO: 511478 - DNA, 75 bp, Homo sapiens
gcagtcagagtcaaaacagagcttttggaatctgaacaagggtccaagtggtaagaagttcagaagcaagcctca

SEQ ID NO: 511479 - DNA, 100 bp, Homo sapiens
tttcctcttggcatttacactgtggctttagctttcaaaccagaggttcctcttacccagcaaaaagttctgggtctggtaatgaagtcatagaaggccc

SEQ ID NO: 511480 - DNA, 90 bp, Homo sapiens
cagcctcctgggtagctgggactacagactcaagaatgaacaatccgtcagaaaccagtaaaccatctatggagagtggagatggcaaca

SEQ ID NO: 511481 - DNA, 100 bp, Homo sapiens
gccggaggctcgccgacgaccttggtgattgtctgacaagcagaggcatgagctgggtccaggccaccctactggcccgaggcctctgtagggcctgggg

SEQ ID NO: 511482 - DNA, 83 bp, Homo sapiens
catggcccggaggcagcagaagttaatgaaggagttcccccttctgagtatgttcaatatccatgaaaaccttttagaagccc

SEQ ID NO: 511483 - DNA, 100 bp, Homo sapiens
ctgggatttaagctgactaacattttgaaagcccagcccatttcattcacagcaggatggcagcgcttttcctgtattatcgggccaaatggcagtggca

SEQ ID NO: 511484 - DNA, 50 bp, Homo sapiens
ggaaccgacagcctcctccgagaaggccctgggcgctgcctatggcacag

SEQ ID NO: 511485 - DNA, 82 bp, Homo sapiens
attaccttatcagtgcaggagaggattgtgtctgcttggtgtggagccatgaagggaggagattggacaggctggactcccc

SEQ ID NO: 511486 - DNA, 101 bp, Homo sapiens
cccacggggacggattggttgttttttcctgtatgaagcggttggcaccactgaagtgaccgaatgagagtatcctggctttaaatcctcgaacacaaact

SEQ ID NO: 511487 - DNA, 100 bp, Homo sapiens
caacccgcagagacttctactggctgcgctcctttctggccggaggtgtcatggagaaactccagctgggcccagagattctgcagcgggaaaatccaag

SEQ ID NO: 511488 - DNA, 100 bp, Homo sapiens
gctgtaacttacgtgtactttaccaacgagctgaagcagattttaggtgatgggcaagtcagaaagtcagatggatataactgatatcaacactccaaag

SEQ ID NO: 511489 - DNA, 98 bp, Homo sapiens
taggtgcgggtgaagatggcggcagccgaggccgcgaactgcatcatggaggttaagaatgtctgaggggtcaggcggtgctggcaagatggctgcac

SEQ ID NO: 511490 - DNA, 80 bp, Homo sapiens
agaggacgccggaacaccctggaagccgagaaatgaggcggggtttcaccatgttgcccagactggtcttgaactcctga

SEQ ID NO: 511491 - DNA, 75 bp, Homo sapiens
aaggagagacacttgtgaacattcaagtgaagcaaaagcctttcatgattatgcataatcaccagcaacacccgg

SEQ ID NO: 511492 - DNA, 83 bp, Homo sapiens
ggaagatcgtcgccacctggatgctggaggtgaacttcacggtagaccagatccgcgccatcatggacaagaaggccaacatc

SEQ ID NO: 511493 - DNA, 75 bp, Homo sapiens
caagatggagactttgactttggctctggaacttcatccattctctatgaaacctcttctgaggcgggcgatggc

SEQ ID NO: 511494 - DNA, 73 bp, Homo sapiens
cagaaaagagtagcagcagtgaggaagagctgccgagacggccatgcggaccctcagttggaagcacaccctg

SEQ ID NO: 511495 - DNA, 82 bp, Homo sapiens
gaaacgtgcaccttgactaattcggttttctgtggctacgagagcaggctgtgatggaatctgaaatgaagtttgacaagga

SEQ ID NO: 511496 - DNA, 98 bp, Homo sapiens
aaattggatcaagaatgggtcccatattcaacatctgctagtctgtatattcgtcctacattcattggaactgaggatggtgattgctcacaccaaag

SEQ ID NO: 511497 - DNA, 87 bp, Homo sapiens
ccaagggcggtgttgtgggcatcaagaaatctgacccggtcgtctcgtaccgcgagacggtcagtgaagagtcgaacgtgctctgcc

SEQ ID NO: 511498 - DNA, 101 bp, Homo sapiens
ggagtccgggggttcgcccgcggaggccggggagcagccgaccatggagccccagagggtgagcttatggaaccaaggaagagctgatgaagttgtcagtg

SEQ ID NO: 511499 - DNA, 75 bp, Homo sapiens
gcccccgcggcggccgcgctcttcgcctgggaactctgcgaccttcaagtcgtttgaggaccgagttgggaccat

SEQ ID NO: 511500 - DNA, 82 bp, Homo sapiens
tacttatttgtggttggaatgagggacgaccatatttatttcagtcagatccatctgaagaggagttgtacgcatgtcagag

SEQ ID NO: 511501 - DNA, 90 bp, Homo sapiens
cactgatcagaatatgagggctcccctagaccctgttggaaaagagactgttcaaaccactgaggatcagattttgaagagagatatgcc

SEQ ID NO: 511502 - DNA, 82 bp, Homo sapiens
ccacagccacggacgccgaggccagagaagctggtgtagaatgagccaaggagactcaaacccagcagctattccgcatgca

SEQ ID NO: 511503 - DNA, 82 bp, Homo sapiens
gtccacccaccgccgccgcctcccagctccttccgcttccagccgttcgagtcctatgactccaggccctgcctgccggagc

SEQ ID NO: 511504 - DNA, 76 bp, Homo sapiens
ccactcggctcctgtcgtccgttctctcaggctcccgttcaggttgacatcatggacatatgtgagtccatcctgg

SEQ ID NO: 511505 - DNA, 100 bp, Homo sapiens
tcttataaatctggatatgtctattctgaactcaacttctgaaatttacagaaacaaactacatctcagggagagaagtttgctgaggaatgccttcaag

SEQ ID NO: 511506 - DNA, 100 bp, Homo sapiens
cctgcaccatgaccctgagcactggccaagcccggagaccttcaaccctgaaaggctgttcttgccttagctgcatcttggacctcaagacaagtaggag

SEQ ID NO: 511507 - DNA, 96 bp, Homo sapiens
gctgaggagaaagcggcgcgcggagctttatcttcaagccaggatgaagggagactgggcaagactcttacgccccacactgcaatttggtcttgt

SEQ ID NO: 511508 - DNA, 75 bp, Homo sapiens
gactacttcgagttcttcgccgccgacctgagttgactcatgttgaccaagcaagcttccaggttgatgcctttg

SEQ ID NO: 511509 - DNA, 83 bp, Homo sapiens
cttggtggaggatttgaaataggaattgagataacgtgtccaggagagacagcacaaggggctccatcttcatcacacaactc

SEQ ID NO: 511510 - DNA, 89 bp, Homo sapiens
gaaacggttgtgtggacggcataaatgtaatgagatatgctgtgtgattataagcgccatggctatggctagtgttaaattgcttgccg

SEQ ID NO: 511511 - DNA, 80 bp, Homo sapiens
ggcgagtccggtctcaaaatggaggagcaggccgggctctcgccatgggtcactgtcgcctctgccacgggaagttttcc

SEQ ID NO: 511512 - DNA, 75 bp, Homo sapiens
gcctgtggggactggaggcccagaaacgaagcctaaagaaactgttccaactcttgctccaaaaactctttcagt

SEQ ID NO: 511513 - DNA, 90 bp, Homo sapiens
ggtggaacaggaggattttgtaatggaagggcatggcaagactccacctcctggtgaagaaagcaaacatcttgctctgttgcccaggat

SEQ ID NO: 511514 - DNA, 75 bp, Homo sapiens
gccgagtcgcgcggaggcggaggcttgggcccagagagcatgggacttcttgacccagcgaccagtgatgggcga

SEQ ID NO: 511515 - DNA, 90 bp, Homo sapiens
cgagattcaagattatttgcaacagctcacgggagcaagaacgaatttaattccttttcgaccttcaatccagttccaaggactccacgg

SEQ ID NO: 511516 - DNA, 75 bp, Homo sapiens
gacacctttgtctcagtgtacaagatcaacaaaatggccttctgggtcggagagccattggaaaagaagtttgtt

SEQ ID NO: 511517 - DNA, 75 bp, Homo sapiens
gatggaaaactgtacaacttttgcaattccagttgtgtggctaaatttcagaattcaattcgtcataatctgtcc

SEQ ID NO: 511518 - DNA, 100 bp, Homo sapiens
tcctgtacagcctgcagaacttcgtgagatggagaataaagaaactctcaaagggttgcacaagatggatgatcgtccagaggaacgaatgatcagggag

SEQ ID NO: 511519 - DNA, 83 bp, Homo sapiens
cgaaaacaccctgcaatctttcagacagaacactcgtgaaactgctcaggccatcaagggtatgcatatacgaaaagccacga

SEQ ID NO: 511520 - DNA, 75 bp, Homo sapiens
cggccacccggctgctctgggacgagttcatccacgactgggtgtacagcggggtgttcagagacgcttatggcg

SEQ ID NO: 511521 - DNA, 82 bp, Homo sapiens
ccccctccctcagcttccgccccaaaagggaaatcctcattgacgattcaatttgttgaaggccaatttgtggactcctacg

SEQ ID NO: 511522 - DNA, 95 bp, Homo sapiens
ccccggtgctgaggagagagcgatccgagggactgcgccgcccggacggcctgcagagcgctgccatcatgaggaagagcctaggctggatgtct

SEQ ID NO: 511523 - DNA, 75 bp, Homo sapiens
gccgacctccgggagcagcgcagtgtgggactacaatactggcagagtgggagcaccattagtttgctgtgaaat

SEQ ID NO: 511524 - DNA, 82 bp, Homo sapiens
attctcctgcagttataccagtgggggctttggaatggatccatgacaatggcgagttctacctttccacacacacctccac

SEQ ID NO: 511525 - DNA, 101 bp, Homo sapiens
aaagtgttatttctcattgaatactatcaaaaaggaaaaaaaaatgacctaaacttttgagatagatttggctctaaagtcgttggcttcgtaagagcagg

SEQ ID NO: 511526 - DNA, 98 bp, Homo sapiens
gtgcaccaagagcaacctcacacggtgtgggctgaatgaagagctgccagatcccacagccattcgttcctggttaactcggaaacacatccagaggc

SEQ ID NO: 511527 - DNA, 75 bp, Homo sapiens
cctgccaacctttacattttggacttccagcctccgaaatgcctcccaaagtgaaatgcctgaccaagatctggc

SEQ ID NO: 511528 - DNA, 90 bp, Homo sapiens
cacgactcccgatagtgagagacctgctcaagctctcttaagagattatgaggcggggtttcaccatgttgcccagactggtcttgaact

SEQ ID NO: 511529 - DNA, 82 bp, Homo sapiens
ggagaacaagcccatcgtcacctgcctgtttaaagaagaaaacccgtatgctagatttgaaaacaactaaagcgctccagca

SEQ ID NO: 511530 - DNA, 100 bp, Homo sapiens
tggaaggagaactaaatgggagaagaggaatgttccctgacaatttcgttaagcactcctcaagactttgatccttggaaaccgtgtgtccagcattgaa

SEQ ID NO: 511531 - DNA, 100 bp, Homo sapiens
gtacatccaaggagctgcatctcctaaagacatgcttattctggtggatgtagagaatcaacatggtcacagttttctaataaatcgacctggaaaagtc

SEQ ID NO: 511532 - DNA, 100 bp, Homo sapiens
gtcggacctctatgccatgaacttcaatcccatcatttccagaaaggacatcacagtgtaaactggagttgctggtgggcagccctgcttcctgcatgga

SEQ ID NO: 511533 - DNA, 100 bp, Homo sapiens
caaagacctgcgactttgctcagatgaaggatttgggggcagagcacttggcaggtcatgaaggggtccaacttctcgggttgttgaacgtctacctgga

SEQ ID NO: 511534 - DNA, 75 bp, Homo sapiens
ctggtggtggttttcggaggcacaggtgatcagaggactgctgaaattttggccaaaaacctgcagtcagaaaga

SEQ ID NO: 511535 - DNA, 98 bp, Homo sapiens
cgtagggaagagatgctaccacttcatccatgctgaagacgtggagggcatcaggcacagtcacttggactgttcatcctaagttccactataaacag

SEQ ID NO: 511536 - DNA, 75 bp, Homo sapiens
aggtgcgtgagaaggctgccttcaggtggccgggggctccctccaggcctggtctccaagtcctctcctaagaag

SEQ ID NO: 511537 - DNA, 82 bp, Homo sapiens
ggccccagccccacagaccagcccagcattcagctatgacatggtgcattacggccactccaaccagctgcgccaggcacgg

SEQ ID NO: 511538 - DNA, 90 bp, Homo sapiens
ccgcctccgcgagggcaccatggaggtgaatgcagggtatttgaagtataccatacaactgttttgaaaatccagcgtggacaatggcta

SEQ ID NO: 511539 - DNA, 100 bp, Homo sapiens
cctgaagcggcggcaggtggtccgcggcttctcggagcttgctgaagccgacgtagcttctctgaacagacgcatccagctggttgaggaagagttggat

SEQ ID NO: 511540 - DNA, 74 bp, Homo sapiens
gtctttgacaagtgatgagaagctgtcggagcttcccaagagccagtcttggtgctctgtgttcacctggttca

SEQ ID NO: 511541 - DNA, 75 bp, Homo sapiens
tcccagccagcactggccactccagagcctcctccccagaagaatatgaaagtgttactcagacttatttgtttc

SEQ ID NO: 511542 - DNA, 100 bp, Homo sapiens
ggaagcggcctggcaggggaaggatcgagtgagaaagatcagtctaaagaaaaggagaagaaagtgaaaaaaacaattccttcctgggctaccctttctg

SEQ ID NO: 511543 - DNA, 50 bp, Homo sapiens
cagccagcacactcctcgcgagcaaggtacttcgtactggatttcgaggc

SEQ ID NO: 511544 - DNA, 75 bp, Homo sapiens
tcacgcacctgagccccgaggagaaggcgctgaggaggtatgatctcgtgaaatcttgagagaaactgaatgacg

SEQ ID NO: 511545 - DNA, 100 bp, Homo sapiens
ccgccctgggccgggccccaccggacgagatgccctgtatccaagcccaatatgggacaccagcaccgagtccgggaccccgtgaccacctggcaagcga

SEQ ID NO: 511546 - DNA, 100 bp, Homo sapiens
tttcgctccttgacaaccctggcgggggttcgctggctgcggccccggctccggcccccgcaggagcaggtggtgaggtttctgaagaattatccctgaa

SEQ ID NO: 511547 - DNA, 51 bp, Homo sapiens
gttgttactgagtgtgggccaggtgtaagtagagacggagtttcaccgtgt

SEQ ID NO: 511548 - DNA, 100 bp, Homo sapiens
cttcggcatcgggcgacagcaggtcacagtggacgaggtgttggcggaaggagctggttttccatccatcccagtcggcaagagccccatggtggagcag

SEQ ID NO: 511549 - DNA, 101 bp, Homo sapiens
aactgcctatgcaacgctgggcatgaggagcggagcggagaatgccaagacagatttgaccagttttgggccatcaatcggaaactcatggaatatcctgc

SEQ ID NO: 511550 - DNA, 76 bp, Homo sapiens
agccttccgctattcagcagagagctattattccctgtattaaaggttgctccttgagggcaggacagttcttatg

SEQ ID NO: 511551 - DNA, 124 bp, Homo sapiens
ctcgaatcattctttgtacagaaattgaaaggcttcaaagctagcagatgtgttcagagcaacattgttttgttgacacaagcatttagaagaaagtttgtgattcctgactttatgtctttta

SEQ ID NO: 511552 - DNA, 100 bp, Homo sapiens
agcccctgatggagccagaaggggagagttatgaggacccaccccaggagtcaccctccaaggagacattggaggcacatggagcctccatctcagggac

SEQ ID NO: 511553 - DNA, 83 bp, Homo sapiens
catcaagcgagccaaggacgacgggacccagcagaaaggacccaggagcgataacagtaaatcaaataagatatttgtcggtg

SEQ ID NO: 511554 - DNA, 100 bp, Homo sapiens
caaggtgatagacttcgggccttgaaaagcagaagacaatccaaaacaaacgctattcctctcacatggagatcttataacaatttttgatagttctgac

SEQ ID NO: 511555 - DNA, 112 bp, Homo sapiens
ctcagatcttttctacagcttctgataatcaaccaactgttacaatcaaggtctatgaagacactctgacctggtcacagccagagacacttggaaatcctccatctccccg

SEQ ID NO: 511556 - DNA, 99 bp, Homo sapiens
tgggcccgcgagccaggccggcgcttctcctcctgatgcttttgcagaccgcggtcctgcaggggcgcttgctgccaaaccagtccagctacgggggcc

SEQ ID NO: 511557 - DNA, 97 bp, Homo sapiens
aaaatgaacagctaaagcaggaaaataaaactcttttgaaagttgtgggtcagctgaccagggcttttgtttggggtagagtattaataacaagtaa

SEQ ID NO: 511558 - DNA, 101 bp, Homo sapiens
aaaaacagagaactactcaaacaggtcgcagcattatcaaagggtttgatgagaagagggcagtgcagcagctgagagcatgtggtgtcctggaaaccatc

SEQ ID NO: 511559 - DNA, 98 bp, Homo sapiens
agcagcagaccttcaagatagacattgaccccgaggagacggttattcagcgatagttatgacctcccggttacgtgcgttgggtggaagaattaata

SEQ ID NO: 511560 - DNA, 100 bp, Homo sapiens
agaccgtgaccgagagcgtgaccgagagcgcgaatatcgtcatcgttagaagttgtgaaagattttcaagactatatggaacctgaagaaggttgtcaag

SEQ ID NO: 511561 - DNA, 124 bp, Homo sapiens
ggtactacacaaccgtctccagccttggtctgagtggactgtcctgcaggtcatcatcagatttgaaatatttaaagtggatacaaaactatttcagcaatgcagacaattaagtgtgttgttg

SEQ ID NO: 511562 - DNA, 100 bp, Homo sapiens
gaccaaaagtatgttgtaccttgtgacagaatatgccaaaaatggagaaatttttggattcactccttctccagttgcacagccacacccttcagctggc

SEQ ID NO: 511563 - DNA, 75 bp, Homo sapiens
caagactacctgttgctcatcaactgtcaaagcaagaagcccgaacccaccagggaggcttgtggatcagaatct

SEQ ID NO: 511564 - DNA, 90 bp, Homo sapiens
accatgtgctatgcctacatgaagcaggtgaaagaacttgtcctggacaacagtcggtcgaatgaaggcaaactcgaaggcctcacagat

SEQ ID NO: 511565 - DNA, 83 bp, Homo sapiens
acatctcccacaggaagtgtcacacagcagtcaagtatgtcccaaacgtctgtggggaccaaggcatactgaacacatttttt

SEQ ID NO: 511566 - DNA, 75 bp, Homo sapiens
gactggggaaacgaaaattttcagcaggcgcagcccagcctcgaaatgcagaacgacgccggcgagttcgtggac

SEQ ID NO: 511567 - DNA, 100 bp, Homo sapiens
ctgccaagttcatccgacaccctcttcaattctcccaagtcgctctttctgggaaaagttatagcttccattctaaagcaaattactctgcctggaaata

SEQ ID NO: 511568 - DNA, 75 bp, Homo sapiens
atgtgtaatgttggtgtatccatggggcttacaagtgacattctgaaagttcccaaacctgaacctataccagag

SEQ ID NO: 511569 - DNA, 93 bp, Homo sapiens
gctgtgctcgcgctactctctctttctggcctggaggctatccagctgaataaccctataccttccaatttgaaatcagaagcaaaaaaggct

SEQ ID NO: 511570 - DNA, 54 bp, Homo sapiens
gaggcggatgaactgctgagacttggttgaagaagaggatgaacttgaatctgg

SEQ ID NO: 511571 - DNA, 75 bp, Homo sapiens
gatgaggagctggcttccagtccagtctgcatggattctttccagattggctctaccagtgcacctggacaggga

SEQ ID NO: 511572 - DNA, 82 bp, Homo sapiens
acataacgatcaggtcattgccagcggttcagaggactgcacggtcatggcctatcatggtcaccatcaagcactggaagtg

SEQ ID NO: 511573 - DNA, 100 bp, Homo sapiens
gaagctcacggctgacgccaagtttgggtccccagccccaccccagccccaaaggaggctgttcgagagggacgtcctccggagccaaccccagccaaac

SEQ ID NO: 511574 - DNA, 100 bp, Homo sapiens
cgcgaccgccgagcctgcagcctgccccgcggccaacatgagcttcttgttgacccagatgatgtggtaccagttggccaaagaagagcctggtgttggt

SEQ ID NO: 511575 - DNA, 73 bp, Homo sapiens
aaccattgaaatctcagagcttcccgtcagaacatggacccaggttggtggtgtggacccaaagcagttggct

SEQ ID NO: 511576 - DNA, 90 bp, Homo sapiens
tatctacctagaacgttttggtactggaattacaactattatcctcctgtagaggaatgtggctttaccaaggatttgatactgtttgcc

SEQ ID NO: 511577 - DNA, 74 bp, Homo sapiens
ttcttcatgtgcctcttctcctttggcaggcttgggcactgtttaaaggaaagttccgagaaggcatcgacaag

SEQ ID NO: 511578 - DNA, 82 bp, Homo sapiens
aaaccttatgttgcacttattcatggaattacaatgggtggggactgagcagggggaggaacatttaagctgatggaagtgg

SEQ ID NO: 511579 - DNA, 71 bp, Homo sapiens
tggcatttgctctgagcatcagtcacgggtgccttcaaatctcttgacaaagatggcactggacaaatcca

SEQ ID NO: 511580 - DNA, 90 bp, Homo sapiens
gccctggccagtctgggcaggacgcgggccaggatggcctccctcaccgcatacggtggatgctctccgattgcgtttggaagagaagga

SEQ ID NO: 511581 - DNA, 98 bp, Homo sapiens
aagatgtgcacctagggggcggctaccccgtggggccagaagctgggcttacagagattctctaaaggcagaagaaaacagaaaattgcaaaagatga

SEQ ID NO: 511582 - DNA, 98 bp, Homo sapiens
tctttcccctgttaatcatagcttgggtaacgatgactcggacatagacatccaggaggacgatgaatccgacagtgagttggaagaaaggcggctgc

SEQ ID NO: 511583 - DNA, 121 bp, Homo sapiens
ctgaggaggccgagagatgaggccggagcccaccaagttctgggaagttcgttccaccagtcataaaccagatgaaatctatggcatgattgaaagactatctcctggcactcgcaagatt

SEQ ID NO: 511584 - DNA, 83 bp, Homo sapiens
ttcaaagacctgttcttaaaaaaagacaatctgctgggaatttcttgggttgacagctcttggatccctattttgaacagtgg

SEQ ID NO: 511585 - DNA, 98 bp, Homo sapiens
gtcggagccgaataccaagctcggatccctgaatttgatccagatagtcactgccaatccttggaacacaattgctcttctctgtggcgccttcttgg

SEQ ID NO: 511586 - DNA, 100 bp, Homo sapiens
atctccgaccagtctgggggcgctggcggcctgcgcagccacctcaagcaacacgctagaagggtttatgaaattcttcgactactggtaactgacatga

SEQ ID NO: 511587 - DNA, 82 bp, Homo sapiens
agctcgtggcctgcctctgcgtgcttatctccagaagaagaagagaaaaggagaatccgaagggaaaggaataagatggctg

SEQ ID NO: 511588 - DNA, 80 bp, Homo sapiens
ggagaaccagccgactggagcaggcagcagcccagccctgtatgatgagattcgtcagtttcgcaaggcctgtggggagg

SEQ ID NO: 511589 - DNA, 94 bp, Homo sapiens
gaaaaaagggatccagaatgattactaacctatgactcccaacagtatgacagaattcagaaggagctggcggacatcactttagaccctccac

SEQ ID NO: 511590 - DNA, 100 bp, Homo sapiens
agtcagctgtgtgtccagaacgtgccatggagacgcttaacggacacattcagctaacgtattttagcaggtggagtgaggttgaagattcctgtgacag

SEQ ID NO: 511591 - DNA, 75 bp, Homo sapiens
agagttcaaggaggccttccagctgtttgaccgaacagattggagctggagtgagccttccaggaattttggctg

SEQ ID NO: 511592 - DNA, 74 bp, Homo sapiens
gaggttgtgtgtgggttagacttgtgcaaccagggcaactctggaagccacaaattcttcgaagccccagccaa

SEQ ID NO: 511593 - DNA, 98 bp, Homo sapiens
gatgacttggtggtggagtgtagagatatagttggcaacctcactgagttagaatcagaggtgattgcatactcggaacatcgttaccgtatctttgg

SEQ ID NO: 511594 - DNA, 75 bp, Homo sapiens
tgacgattcatattttacttccagctcaaggtactttgacccagccaacggcaagttcagcaagtcagccaccag

SEQ ID NO: 511595 - DNA, 100 bp, Homo sapiens
aacgaccggcccaacaaactggagagagaccagacctgcaagctctttgacacacagcagttcttgtcagccccgagcctggagatgagggggagccggg

SEQ ID NO: 511596 - DNA, 100 bp, Homo sapiens
ggtgatcatagccatccagaccttctgctaccagaaaaccttctccaccagaatccagctcacgctggtggtgagatctgctgaggaagcggcatcagtg

SEQ ID NO: 511597 - DNA, 74 bp, Homo sapiens
acattttctctagctgtgaatttactggacagattcctgtctaaaatgaagatttatccaataatggacaagtc

SEQ ID NO: 511598 - DNA, 90 bp, Homo sapiens
caactgaccacccaatgcagtgcatattaacaagggtagattttgtgccaggccgggcacctggtgtgtaaccaatgccgccagaagttg

SEQ ID NO: 511599 - DNA, 100 bp, Homo sapiens
tggagggggcagtcccgggagaacctgcggcggccggagcggctaatgtaatgcttgaatatgatattgatgaagctcaggcattgttggaaaagaattt

SEQ ID NO: 511600 - DNA, 100 bp, Homo sapiens
ggcagcccgcagaggacagcgaccacgagcagccatcagcagggaccctttctacgaaatgctcgcagcacggaaaaagaaggtctcctccacgaagcga

SEQ ID NO: 511601 - DNA, 50 bp, Homo sapiens
tgctgacgctctgggtgaagaatggaaggatgttccttcaggaggaagca

SEQ ID NO: 511602 - DNA, 75 bp, Homo sapiens
gacttccagaagggcctgaaggatggaactatcttatgcacggaaggtttacaattgcagccaagcaccacatta

SEQ ID NO: 511603 - DNA, 82 bp, Homo sapiens
aaaggtcccggaccccccggatctgacggggcgggacctggcgccaccttgcaggttactcctggatggagcacctctgata

SEQ ID NO: 511604 - DNA, 100 bp, Homo sapiens
aggagtctatgtctgtgtagcaaggaattaccttggagaggctgtgagccacaatgcatcgctggaagtagccagtggatctcgagccagaggggaaagt

SEQ ID NO: 511605 - DNA, 87 bp, Homo sapiens
gtccactgtgacttgaaaccagaaaacgtgttgctggcatcagcagacccatttcctcaggagcgcagctcagctgggctggaactg

SEQ ID NO: 511606 - DNA, 75 bp, Homo sapiens
gcctgttggagaaacacaaagaggtcgtgttttcgcctggggcatgggcaccaactaccagctgggcacagggca

SEQ ID NO: 511607 - DNA, 83 bp, Homo sapiens
atgagcagattggttagtgaagaactgtaagagtaaatgggtccagtaattggaatgactccagataagagagctgaaacccc

SEQ ID NO: 511608 - DNA, 108 bp, Homo sapiens
caatatctgtcttcggtggactccttcggcagtccacccaccgccgccgcctcccagaattcagaaggagctggcggacatcactttagaccctccacctaattgcag

SEQ ID NO: 511609 - DNA, 83 bp, Homo sapiens
acttcatattttggaaagcagtttttaagacaagagaatgccgtgaatggagaacacctgtggctggagaccaacgtctcggg

SEQ ID NO: 511610 - DNA, 100 bp, Homo sapiens
atctcttctccctccccttcttggtgtcatggagaaactccagctgggcccagagattctgcagcgggaaaatccaaggcttatttatgccaggctgagt

SEQ ID NO: 511611 - DNA, 100 bp, Homo sapiens
tcacagagttagagagagggatggtgcccgacggccatggaggctgaagagacgatggaatgccttcaggagttccctgaacatcataaaatgatcctcg

SEQ ID NO: 511612 - DNA, 150 bp, Homo sapiens
ccaggactattttgattatgagtcaaccaatccatttacagcaaaattcagggcttcaaatataatgccatcttcaagtcaggccttgaaaagaggatagaccaggctgtggaggagtggaatattgagaaggctgaggaactcagcaac

SEQ ID NO: 511613 - DNA, 75 bp, Homo sapiens
ccgccctgggcgcggccctgctcctgtcttccattgaggcagaaggatctagtttgaagcactaagaagaataag

SEQ ID NO: 511614 - DNA, 73 bp, Homo sapiens
cctgcagcacgccctcgtcctgcacttcctcctcggaatctgcaagaattcagaaggagctggcggacatcac

SEQ ID NO: 511615 - DNA, 75 bp, Homo sapiens
accttctgactgcggtggaaggaaggttccggaaccagaaccacccaggtatgagttaatacagaaaggagtgac

SEQ ID NO: 511616 - DNA, 73 bp, Homo sapiens
tcacactccgccgccatcatggtgaagctcgcgaagcatttttgaaacgttggggttgttggagtggttggat

SEQ ID NO: 511617 - DNA, 100 bp, Homo sapiens
gcgggctcgagagctcgccccgaacgggggtcttcctcctccgccgttgacagatcacaaaatttgtccaggatagacatagagctagaagaaacagact

SEQ ID NO: 511618 - DNA, 95 bp, Homo sapiens
ctcgtctgccaccatcccattggatgaccccactttgctctttgccaatgcaggcatgaaccagctggttatattctgggcactaaatgaaggcg

SEQ ID NO: 511619 - DNA, 75 bp, Homo sapiens
ttcgacacctacgacgatcgggcctacagcagcttcggcggcggcagagggacaactacacctttgcccaacctg

SEQ ID NO: 511620 - DNA, 98 bp, Homo sapiens
cttggactcacactgctgtctctgtatatgttctgtgaggcgcatattaaatttcctattgactacccctattcaccacctaccttcagattcttgac

SEQ ID NO: 511621 - DNA, 74 bp, Homo sapiens
ttttcccctcagtcgcctcgcgcctgcagagagaagaagaaggaggttcctgctgtgccagaaacccttaagaa

SEQ ID NO: 511622 - DNA, 100 bp, Homo sapiens
ttaagaaatctgccccaaagtcttagaactggtgatgctgggaggttcctggttacagacactggaggctagtggctgtgtcttatctcaggagctgttt

SEQ ID NO: 511623 - DNA, 100 bp, Homo sapiens
tgactatcctcctggtggttctgtataaatacaggtgctataagacaagttggatggcttgaggactggtactaaaaggaaacgtgactgggaggccatt

SEQ ID NO: 511624 - DNA, 98 bp, Homo sapiens
agaaggctctgtgcaatcctcacattcaagctgataggctgcgctaccggaatgtcatccagcgagtgattagggtggttatgctgcataccgctacg

SEQ ID NO: 511625 - DNA, 100 bp, Homo sapiens
gaaaaaaatagtcaatagtgctcagactggtagcttcaaacagctcacagttaagctatccgtggtcctgaaccagttatgtgtgttgcatgagaaaacg

SEQ ID NO: 511626 - DNA, 100 bp, Homo sapiens
ctccccttctaaacctggtcctccagcggctctggcgccttggatctcgaggacctggaagaagcagaggagccagacatggaggaagacgatgatcaga

SEQ ID NO: 511627 - DNA, 89 bp, Homo sapiens
agcgttcaatgccaggttcccagggtgcatgaaagattttcagctgaactctcatctctcaacactggcaaatattcataagatctacc

SEQ ID NO: 511628 - DNA, 75 bp, Homo sapiens
cggcgaggccctcatgtaccacacggaaagtgatgaagcattgggcccaacaatgatgagttggaatgcagttga

SEQ ID NO: 511629 - DNA, 50 bp, Homo sapiens
ataaactcaagcagcgagtcatccagacaccattcgcttttcacccaaga

SEQ ID NO: 511630 - DNA, 101 bp, Homo sapiens
ttccagagcgtgaagatcaagatcgctctcgtggcattatccttcagtggggctattggactgacttttcttatgctgggatgtgccttagaggattatgg

SEQ ID NO: 511631 - DNA, 98 bp, Homo sapiens
ccacgctggactggtgcgaggagaactactccgtgacctggtacatcgccgagttctttgatgaggaatctggattaaaggattcagaaccagagcga

SEQ ID NO: 511632 - DNA, 75 bp, Homo sapiens
ctgtccatcgtgtgcctgatgatcacgcagctggctggcttcagtggaccagttggccgttgtccaatgtgttgc

SEQ ID NO: 511633 - DNA, 89 bp, Homo sapiens
tatgaaggtgtaggaagaatggcatgagccagaaggagagctctaagtctgccatgatgtatattcaggagttgaggtcaggcttgcgg

SEQ ID NO: 511634 - DNA, 80 bp, Homo sapiens
tacaaatcacacgcataatggatgaaaggaaccgacagatgtgtatatctcatgattgatatggagaaactagtcatggg

SEQ ID NO: 511635 - DNA, 74 bp, Homo sapiens
gccggggccgcgctgagggcgcccagctggcagagatcctacaagaatccaggatgatgatcccagattgccag

SEQ ID NO: 511636 - DNA, 100 bp, Homo sapiens
actattagctgcttcttgaactggaccgtggggaaactaaaaacgcatctatctaacgtttaccctagcaaaccagtctcagctgagtctgctctgatca

SEQ ID NO: 511637 - DNA, 78 bp, Homo sapiens
ccgcctcatctgctcagccaagcagcagcagactatgctgagaggcccggcgcccgcctgcccgcaccctcgtcctca

SEQ ID NO: 511638 - DNA, 82 bp, Homo sapiens
ctgcggacggcgctgcggtacatccagcacatacccccggcctcatgagtacctgtccccagcggatctgcccaagagctgg

SEQ ID NO: 511639 - DNA, 75 bp, Homo sapiens
cacctgcctggcctggtgccatgacaacaagtcccggctccggaagatgaagagacaagaggagcagcagcggca

SEQ ID NO: 511640 - DNA, 100 bp, Homo sapiens
ctgcagtttgccaagtgaaaaagagcgatacctctcaagtcaaagcagcaggaagataccacaatcagaccctccggcactggctcaggcgatcagggaa

SEQ ID NO: 511641 - DNA, 98 bp, Homo sapiens
ggaagaggcggcggcgccgaagaggcgactgaggccggacggggcggacggcgacgcagcccgcggcagaaggttatgaagacagtatggagtttcca

SEQ ID NO: 511642 - DNA, 100 bp, Homo sapiens
ccgccgcgcagcgccccagccacacgccggcgggcagaagccgcccgctctccgggatgaagtgatcaaagtccgaacagataccaaattagacttcaac

SEQ ID NO: 511643 - DNA, 95 bp, Homo sapiens
ctccaggtcacccactatctggatgccgggcaggccgccatggcatcagatgaaggcaaactttttgttggagggctgagttttgacaccaatga

SEQ ID NO: 511644 - DNA, 100 bp, Homo sapiens
gccagggtccggcgagcatcacgccgaggcccattttccagacgaccacgacgaggccggggtcactaacaattgctcgagcaattgaactaaaacatgc

SEQ ID NO: 511645 - DNA, 100 bp, Homo sapiens
cgcgtcaacgacaaatccctggcccgggtgacccacgcggaggccgtcaagaaagcgctttcagtcggagagtagaaggcaaagcacaaaaccactttga

SEQ ID NO: 511646 - DNA, 89 bp, Homo sapiens
gtcttcggcatcgggcgacagcaggtcacagtggacgaggtgttggcggaagaatttcgctaaggagtttgtgatcagtgatcggaagg

SEQ ID NO: 511647 - DNA, 80 bp, Homo sapiens
gtaaagttggaagttaagggagacaaagttgaaaacaaagtgctggtgttgacttcaaaatcaaaactgtagagctaaga

SEQ ID NO: 511648 - DNA, 100 bp, Homo sapiens
ccacgacctccacgctggactggtgcgaggagaactactccgtgacctggtacatcgccgagttctggttcatagtggcgtcatgcacgcagactcctgc

SEQ ID NO: 511649 - DNA, 71 bp, Homo sapiens
gctgctgggagccacattcctcattctgttcctgttccagctgctccgtggcctggcctactgccaccggc

SEQ ID NO: 511650 - DNA, 74 bp, Homo sapiens
agtttccagaaaacagaaatcgaaacagatacagagatgtaagcccatgcgggtgccccggtgatgactggtgc

SEQ ID NO: 511651 - DNA, 98 bp, Homo sapiens
gcaagctgtgcgacctcttctgcggccggcctgggcagaaccttcgagatctgcggtctggggtctggttgaaagatggcggccctcactaccctgtt

SEQ ID NO: 511652 - DNA, 156 bp, Homo sapiens
ccgggcggggccaccgacctgcctgggccgaagccccagcactcgccggcggcagtgaaaggacgcgccggagccgggggtcgctgtgatgaaattcaagaaccccccagtgaacagcctgagcctggagtttctgacggagctggtcatcagcct

SEQ ID NO: 511653 - DNA, 98 bp, Homo sapiens
gccagcaagaggatcgtcctgccggagcccagaggcattcgacttacagcagtgtgcggccagccagcagaggggtgactcaacgcttggaccttcct

SEQ ID NO: 511654 - DNA, 75 bp, Homo sapiens
ttctaagagagtggaagctgagccagctgaagatattcttactgattctccgggctctgcagctcttgacccggc

SEQ ID NO: 511655 - DNA, 100 bp, Homo sapiens
tctcacagctgagaaaggtccctccacactcctggaactgtacacctattggaacccttaagagcggacctggcgtggggtgcagatcccactacctgag

SEQ ID NO: 511656 - DNA, 82 bp, Homo sapiens
ttttctgttgcccttaccaaatctggagctgtttatacctgagcacagcaatggaggaaacagctatatgggaacaacatac

SEQ ID NO: 511657 - DNA, 74 bp, Homo sapiens
ggaccttttaccatgaatagttctactccttctacaggtgtgaaatccagacaattgaagatggggcatatcag

SEQ ID NO: 511658 - DNA, 73 bp, Homo sapiens
gtccctgctggaggagcgctttcggtactctaccacctatgaagagaggaatatcaccggaaccagggtgaag

SEQ ID NO: 511659 - DNA, 100 bp, Homo sapiens
cggaggtgcgcggaggcttggtgtgccaggatcaaaatacttgctggatggtggactcagagaccaataaaaataaactgcttgaacatcctttgactgg

SEQ ID NO: 511660 - DNA, 89 bp, Homo sapiens
ggcggccgaggcggcggtgtgggcgcgtcaggccgcgacgagggcgctgaggttgcgggaacagtgccctgagctacgagctgttcctc

SEQ ID NO: 511661 - DNA, 83 bp, Homo sapiens
tcttatgttttggagtcacacaagctaaagacgggccattttccagacctcatccaggctaccggctctctgaccagttccac

SEQ ID NO: 511662 - DNA, 75 bp, Homo sapiens
ccgctataatgaggatgatgcaaaggcagcaagagatgcacaggaggacctcagcagccatgtcgaagccccata

SEQ ID NO: 511663 - DNA, 100 bp, Homo sapiens
ctagctgtccttggagctgtggtcaccgctatgatgtgtaggaggaagagctcaggcttcagaagaggctcgcctctagtgtcctccgctgtggcaagaa

SEQ ID NO: 511664 - DNA, 100 bp, Homo sapiens
ttgctccttgtgttccctgcagttgcaacaaccacagtgacacctgtgaccccaacaccgggaagtgtctggcactttaaagaggaggagacctccacag

SEQ ID NO: 511665 - DNA, 51 bp, Homo sapiens
ctgaacgaggaggccgagaggaaagggattgtcaagtggtcagactgttgt

SEQ ID NO: 511666 - DNA, 100 bp, Homo sapiens
gcgcctcccgggctccggctccggcttctgctgttgctcttctccgccgcggcactgatccccacagactaaaccccagctccgcctcacgcaagtggag

SEQ ID NO: 511667 - DNA, 100 bp, Homo sapiens
ggggacacctcggcacgcagcggagatgcctctttttgccaccaatcccttcgatcaggatgttggaagatgagaatgtgcctactgctcctgatcctcc

SEQ ID NO: 511668 - DNA, 75 bp, Homo sapiens
ctggagaatatggtgcagaggccctccacgaacatccagtcatggataaaaatgagctggttcagaaggccaaac

SEQ ID NO: 511669 - DNA, 101 bp, Homo sapiens
cttctgcgacgaagaaaaaaagagcgacgagtgcaaggactggaacttccttttatgatgatgccccaccctctaattcctgtcagcctacctccagcatc

SEQ ID NO: 511670 - DNA, 82 bp, Homo sapiens
ctggagagcttcatcaaaaatagtgatagctttgataatttgaaattggcacaatggaagaagctggaatttgtgggctagg

SEQ ID NO: 511671 - DNA, 98 bp, Homo sapiens
gacgggggaggaccgctgcttccggcgccgtaactgctgccatcttctccgcgctatggctgcgttcggccgtcaggcccaggctgcaagcacaaagg

SEQ ID NO: 511672 - DNA, 73 bp, Homo sapiens
cgcaggccgcggggagcacctggttaaacagggtaaagatggtggaaaaggaaaaggatgccttagaaggaga

SEQ ID NO: 511673 - DNA, 98 bp, Homo sapiens
agcgacggcggaacccgtgggcctgtggactgcagcctcggcggtcagcagcagccgctcttctaaaacattcaaaccaaagaagaatatccctgaag

SEQ ID NO: 511674 - DNA, 90 bp, Homo sapiens
cctcagcctcttgagtagctgggattacaggaggaatgccagctcctgagcaggcctcattggtggaggaggggcaaccacagacccgcc

SEQ ID NO: 511675 - DNA, 74 bp, Homo sapiens
ctcccaagcccctaaagacctccatccagggaccttgacccagcccctctcagcagacgcttcatgataggaag

SEQ ID NO: 511676 - DNA, 82 bp, Homo sapiens
agcaacccatacctgatccggagaatcgaggagctcaacaagcttccccgggcgctgcctggacaggcctgcctgcgtgctg

SEQ ID NO: 511677 - DNA, 73 bp, Homo sapiens
gctttcaaaaaattaagagtggatgcatcagggtacaggtttgcagattccgccagcagcacagcaagctcta

SEQ ID NO: 511678 - DNA, 99 bp, Homo sapiens
gttgcaggaaaacaagctcaggcctcctgctgatcctattttatggaatcccaataaccctgtttaaagaggaatggagattgccactgtccatttaga

SEQ ID NO: 511679 - DNA, 98 bp, Homo sapiens
gggcctgggcaggcggagcagggccttggaccccgcggcgcccctcggcctcggagcaacgagcgcagcgccggctgcaagatcaaggccctgcgggc

SEQ ID NO: 511680 - DNA, 75 bp, Homo sapiens
gcccaccctggagtaaccctcactggagaatccagagtgccggtggtggtgtgcacattgagccccggtatagac

SEQ ID NO: 511681 - DNA, 100 bp, Homo sapiens
ctttcacttatctcttctttaacttatcgtggaaataaaacagctgttttgcagattggactacaagaaaaggcgacggcggattgacagaagtatgatt

SEQ ID NO: 511682 - DNA, 100 bp, Homo sapiens
aaaaaaagcatcttaaagcaggctgcagatcttacacaggtgctccatctcgaaaagcgagaaaggcctccagaccaccaacactcagctcaagtcaaac

SEQ ID NO: 511683 - DNA, 83 bp, Homo sapiens
acctttttcagaaatgcgcagagcaaacatctttcaaagttttgggttcttataaggaaagctgctaggagtacatgtctaca

SEQ ID NO: 511684 - DNA, 100 bp, Homo sapiens
aactggactcttttacactcaactaattggcatcatcacaacaggcatggtacattgtgatacagcagttggaacaccggattatatatcacctgaggtt

SEQ ID NO: 511685 - DNA, 50 bp, Homo sapiens
aggacattcccagatatcacgtattaagtgaaatctgtgactgttgctga

SEQ ID NO: 511686 - DNA, 88 bp, Homo sapiens
tgctgacagattttggtctgagtaaggagtttgtggctgatgaattttcagataactattatcgtgcagaaatgattgatgccctggc

SEQ ID NO: 511687 - DNA, 100 bp, Homo sapiens
gggaagaaaagaaggggaagaagatcaaaacccaccatgccccagactccttcctccgatttttggaaagaagtgcagctggcgctgccgcggaaggtgc

SEQ ID NO: 511688 - DNA, 90 bp, Homo sapiens
gccgagaaagcatccgtggaaacgctgacagagatgctgcagagctatgcgacctaaagtcatgtggcacctccttcgaaggtacatggc

SEQ ID NO: 511689 - DNA, 74 bp, Homo sapiens
agccgctcgcccctcttttccatgtatccgtccagggcgtctctggccgagcctctttttgtggaaaacgacag

SEQ ID NO: 511690 - DNA, 51 bp, Homo sapiens
caggacatcctggaagctgggaaaggaaggagctgagcctgccacgccgag

SEQ ID NO: 511691 - DNA, 89 bp, Homo sapiens
tctccatttgtatgatacaccaggatccacatataacctccaggaacttccagaaccaacaccagtgaaaactagactacctcctgaaa

SEQ ID NO: 511692 - DNA, 75 bp, Homo sapiens
ggccaagatccaggataaggaaggttttgagaacagagtgctgttttagagctggcagcagcatctcagcccaag

SEQ ID NO: 511693 - DNA, 75 bp, Homo sapiens
aataaactcaagcagcgagtcatccaggttcgttaccgtgaacgcatcaccattcttcgagggaatcatgagagc

SEQ ID NO: 511694 - DNA, 74 bp, Homo sapiens
ctcagcctccccagtatctgggattacaggtcattcaacatttattcaaccaaaaatactaagtcagctctata

SEQ ID NO: 511695 - DNA, 60 bp, Homo sapiens
tggagcgcgcccctgcccggggcccgggtgtgactgtgtgggagctgatgacttttgggg

SEQ ID NO: 511696 - DNA, 100 bp, Homo sapiens
aaggatgagatagcagaagtagctaatgaaattgaaaacctgggatccacagaggaaaggagcaagagcagctctacctgaggtcaggtgtggtgtcctc

SEQ ID NO: 511697 - DNA, 74 bp, Homo sapiens
gctgaagcagcagaaccccaggctggtgtacggagctgttgtcaccatcaccacgcccgtgaacatgaacgtgg

SEQ ID NO: 511698 - DNA, 51 bp, Homo sapiens
tcccatccctgcagcatgaacaagggttacagctgaagtaaagcacaacat

SEQ ID NO: 511699 - DNA, 73 bp, Homo sapiens
gtccatcgaggggaccaaactctccatcacccaggatccacgagagcgtgtgaaagaagatgacttagatgtt

SEQ ID NO: 511700 - DNA, 100 bp, Homo sapiens
gtcatggcaaacgtcttaacattgaacttgtgcaacaggttgggataattcttcactattccacccttgccacagtactatgggtaggagtgacagctcg

SEQ ID NO: 511701 - DNA, 75 bp, Homo sapiens
tcgtggccagcttggccaagatcgggggggccctcagcctcttggccttgaacgggctgttcatcttgattcaca

SEQ ID NO: 511702 - DNA, 100 bp, Homo sapiens
tcctgcctcagcctcctgattagctgggattacaggtgcccagggtggctccgtggcccgcacactcctggaagatgggacattcaaggttcgagtggtg

SEQ ID NO: 511703 - DNA, 75 bp, Homo sapiens
cggagccccgccgccgccggcttggttttacagacatttcaccagaggaattgaggcttgaataccataacttct

SEQ ID NO: 511704 - DNA, 82 bp, Homo sapiens
gttgtgtggtcgcgtctcggaaaccggtagcgcttgcagcatgggagtggggaaggccagggccagattctgcagcgcttcc

SEQ ID NO: 511705 - DNA, 75 bp, Homo sapiens
ggacagtcagtctggtactaacaatgcagcttgtaatgatgttgatcgatggcctgccccagtgccagggaaaac

SEQ ID NO: 511706 - DNA, 83 bp, Homo sapiens
tggcgcagaaaccccgttgacaaggcactgctttttcatgacggagacagaagaaattctggcagatgtgctcaaggtggaag

SEQ ID NO: 511707 - DNA, 75 bp, Homo sapiens
cagttacatggcggctgtcgtcaatgccaatatgaagaaagcacagatgcagattggaaccaaccagatggctgt

SEQ ID NO: 511708 - DNA, 75 bp, Homo sapiens
aaatcgggctgaagcgactgagtccgcgatggagcaacacagtcactcctggcggcaaaccaaacaaaaccagag

SEQ ID NO: 511709 - DNA, 100 bp, Homo sapiens
tgaaaatgaaatttcttcagactgcaatcatcaccagtggcagttcgcagcctccaggacttggctcgcatcgccatccggggcaccattaaaaagatta

SEQ ID NO: 511710 - DNA, 82 bp, Homo sapiens
tacgcatcctgggctgcgagctcatccaggccgccggcattctcctccggctgccgcagttaccggtattgtaagaacaagc

SEQ ID NO: 511711 - DNA, 90 bp, Homo sapiens
aatggattttttaccattgtttcatcaacgtctaagaaacttggagaactccaggattattgcatcgagcttttagtgtcttcttattca

SEQ ID NO: 511712 - DNA, 100 bp, Homo sapiens
accggctggagcggatcccacacctccggaccgagggacgcggatggttgccaccctggggaccacaacatgctgctcctttgacaatctcttagaagtc

SEQ ID NO: 511713 - DNA, 88 bp, Homo sapiens
taacagacacaaattcacagggaagaaagtgactgaagagcttctgaccgataatagtgccggtggtggtgtgcacattgagccccgg

SEQ ID NO: 511714 - DNA, 98 bp, Homo sapiens
ctgtactaccattttgaggatctggactccgtttcctgccttgctctttggaccacattgtcaattcacaccggaatccagacgctctgcagtgtccc

SEQ ID NO: 511715 - DNA, 82 bp, Homo sapiens
tgttcacagtataatggcaacctgcaagacttaaaagtaggaggttcttgccagaaaccttatgttgcacttattcatggaa

SEQ ID NO: 511716 - DNA, 100 bp, Homo sapiens
ccggagggggaaaaaatcccaaggtctgcaaaggattttgacacttcatgacatgtcattatttagagcaataatgaatattgacctgttttggattagt

SEQ ID NO: 511717 - DNA, 100 bp, Homo sapiens
ttgtcccctggcgctacccggacatctctcagggtgccggcaccatgaagatctggacttcggagcacgtctttgactcattcttggaatcccagaacag

SEQ ID NO: 511718 - DNA, 75 bp, Homo sapiens
gttataatcagattttgaccaagcattttgtaagacctgtcatttactccatcctttatagtgatgctacaggac

SEQ ID NO: 511719 - DNA, 83 bp, Homo sapiens
gttcaacatcctcctggccaccgactcctacaaggcggctatgagaggttttcctccgagtacccagaattctgttctaaaac

SEQ ID NO: 511720 - DNA, 86 bp, Homo sapiens
tgcttttgatatctggggccaagggacaatggtcaccgtctcttcaggtggtagctgagcacccagatgcttcaggtgaggagatt

SEQ ID NO: 511721 - DNA, 50 bp, Homo sapiens
agcttggagataaagttgctttttactggagtaaagaaaattgtgttgtg

SEQ ID NO: 511722 - DNA, 100 bp, Homo sapiens
ggtgaatcccctgtttgagaaaaggcctaagaattttggcattggaaaggcagcaacaggtggaagctgttgagttggaggctaaagaagttctcaaaaa

SEQ ID NO: 511723 - DNA, 74 bp, Homo sapiens
tgaggaggtcgctgagagctgggaagaggcggcagacagcgggctatctcacgtgagagggcagtggaactcct

SEQ ID NO: 511724 - DNA, 97 bp, Homo sapiens
tgtcaagacatttcttcggcattctgcaacaggtggtttcagacaccctcacaggttttctaccatgcagcaactgaacatggaggaaaagatgtat

SEQ ID NO: 511725 - DNA, 75 bp, Homo sapiens
cctggaggcctgggaagccaacgaccacacgcagtcttattagtaggtaagaaacagctgctcctccacctccac

SEQ ID NO: 511726 - DNA, 100 bp, Homo sapiens
actacagctgggctctgcctgctgacctggggaggccattggctctatggaaaacactgctgactcttttggtgatcccttcttcccccggactacacag

SEQ ID NO: 511727 - DNA, 83 bp, Homo sapiens
cccaagctgcggttcggctgctgccgaggaattgaatgatctggcacgggaccctccagcacagtgttcagcaggtcctgttg

SEQ ID NO: 511728 - DNA, 75 bp, Homo sapiens
tcatactaaagaacacatctggaaggctcccacatcaggacgagaaggagccctcgagttaccgtgggagctgtg

SEQ ID NO: 511729 - DNA, 100 bp, Homo sapiens
ggaaaatgaggcccataggaaacaagtgacttgctgagtccagataacactgactgtcagagtttttgctgcagagggtttaaagcttacttccagtgtt

SEQ ID NO: 511730 - DNA, 100 bp, Homo sapiens
cgcgggagacgagccggccgtcccgggccgggggacccgcccgccatggccaccaaggaaagcgtctctagcagctgatatccccagacttggatatagt

SEQ ID NO: 511731 - DNA, 50 bp, Homo sapiens
gtccgcgaagatggcgggccgggtcaattgcacagcagaatgttccagaa

SEQ ID NO: 511732 - DNA, 100 bp, Homo sapiens
ccagaagtagctgaatgtgttactccattgctgaggagtggtggatcttcttgttccaaccaaagtgactggcatcattacacaaggagctaaagatttt

SEQ ID NO: 511733 - DNA, 117 bp, Homo sapiens
gggaagatggcgaaggtctcagagctttacgatgtcacttgggaaggttttgattcccaccatggccatcacccagtttcggttatttaaattttgtacctgcctagcaacagtatt

SEQ ID NO: 511734 - DNA, 100 bp, Homo sapiens
tcccgacggcattgtcttctcctcttctcagacagggcagaccgaggagtttggaccgagagtgaagatagtccaagtcctaagagacagcgcctctctc

SEQ ID NO: 511735 - DNA, 90 bp, Homo sapiens
cacttaggcacagagagtgaccacagacctgtgcagattccacgtgtgccatagctgttcactgaagagcaatctgcacatcgtgctgcc

SEQ ID NO: 511736 - DNA, 102 bp, Homo sapiens
ccccgagaaccgtcagtttgagccagatgacttacagccagctggcccaccccatccagcaggccaaggcactgggtctccagttccattctcgcatcctag

SEQ ID NO: 511737 - DNA, 83 bp, Homo sapiens
ccaagctgccccgtggggcttgatccaggaagctacttcagaaagatgttgctgaaatcgctgacgaagtttatatggaagtg

SEQ ID NO: 511738 - DNA, 98 bp, Homo sapiens
gggtggaagcggcccccgcagacgctcggcaggtgtcccgatttcttcatacctactcagctgctactcaggaccttcaagctaaggagcttcatcag

SEQ ID NO: 511739 - DNA, 74 bp, Homo sapiens
ggcagcaaagttcttatttacagaatcggaggaagagttcatcgattggtggagcaaattctttgcctccatag

SEQ ID NO: 511740 - DNA, 90 bp, Homo sapiens
ccgcgagcagagccgcccagccctgccagctgcgccgggacgggggggccctcagcctcttggccttgaacgggctgttcatcttgattc

SEQ ID NO: 511741 - DNA, 73 bp, Homo sapiens
caaaaaatgcagaactagaacaggagcttatgtctttctctaatacacagaattctaggaaggaggctgttct

SEQ ID NO: 511742 - DNA, 80 bp, Homo sapiens
tgaagggggccaggccggccatgagcagggcaggtctgctgagaacagacccagtccctgaggaaggagaagatgttgct

SEQ ID NO: 511743 - DNA, 73 bp, Homo sapiens
ggcgaccgagacggtggagctccataagctaaagaaaaatcctgggtagaagctggatcagcaagaatgtcac

SEQ ID NO: 511744 - DNA, 98 bp, Homo sapiens
atttattcggaagtgacttgcttttttgaccatgttactcatagagtccgactataccacatacagggaggaagttaacatccctaataggagggttc

SEQ ID NO: 511745 - DNA, 76 bp, Homo sapiens
tggccatgatcttgctgctggggaagatctggaggtccaagtgctgcaaggatatcaatgagtgtttgagtatcag

SEQ ID NO: 511746 - DNA, 75 bp, Homo sapiens
cggatcaatccagatggcagccagtcagtggtggaggtgcagcggaactgctgcctgacgctctgcaacttcagc

SEQ ID NO: 511747 - DNA, 82 bp, Homo sapiens
caccaacgcggtgcgcgaccgggagctggacctccggggttgtgaccgagattcccgacgagagagactgaggggaagagag

SEQ ID NO: 511748 - DNA, 100 bp, Homo sapiens
cagaaagctttgtactgggatgtgatgttggagaactacaggaacctggtcttcctgggtctctaactggtttggcaacaaaagaatccggtataaaaag

SEQ ID NO: 511749 - DNA, 80 bp, Homo sapiens
cgcttggggcccgcacggaccctctacttcagttgtgaccgagattcccgacgagagagactgaggggaagagaggaagg

SEQ ID NO: 511750 - DNA, 90 bp, Homo sapiens
ccagaatacgaggaggaagaggtggccataccgttgaccgctcctccaactaaccaaaaaccagaactgatggctctatttgcagtcttt

SEQ ID NO: 511751 - DNA, 114 bp, Homo sapiens
cggtggcggggctgaagaagcagttctacaaggcgagccaggtcaaaatgcagatcttcgtgaaaacccttaccggcaagaccatcacccttgaggtggagcccagtgacacca

SEQ ID NO: 511752 - DNA, 71 bp, Homo sapiens
cggcccattccccgtttgcctcggaagtgagcagctactcttacagcaatccacatggagactgatcccca

SEQ ID NO: 511753 - DNA, 75 bp, Homo sapiens
gtggaagagcttactgtcacagcaactcctttgcaagatgccccggaatggaagttggatacactttgtgacttg

SEQ ID NO: 511754 - DNA, 75 bp, Homo sapiens
acgtggacacgctcagcaaagacggcttcagcaaggaaaacatggctggcaagggcttctccttctgggtctggc

SEQ ID NO: 511755 - DNA, 75 bp, Homo sapiens
tgtggatcgctgtgatcgtcacttggtggagctggaacgagccaagacgcagctgacatcaatgctcatgatgaa

SEQ ID NO: 511756 - DNA, 75 bp, Homo sapiens
tgcagggagacgcacagccaggacatcctggaacctgggaaaggccttatgtttacacaacaccgccctttgtca

SEQ ID NO: 511757 - DNA, 98 bp, Homo sapiens
tcagagtaaaagttgtttctggaattgatctcgccaaaaaggacatctttggagccaggtgtaatggataggtaacagagaagacctcgtcccttcct

SEQ ID NO: 511758 - DNA, 95 bp, Homo sapiens
ggaagatttacacagatggaaccagaaaagatacgaggctctaggagagatgacatctttatatttggcttcaaagaaagaagacccaatttaaa

SEQ ID NO: 511759 - DNA, 100 bp, Homo sapiens
tcctatggctcaaagaaagatgattatccagaagatcagctgccatgttacttgactcacaccaaccctagagtggatgagattgtccttaagaaccttc

SEQ ID NO: 511760 - DNA, 100 bp, Homo sapiens
atcttcaacttgtagacacagccgggcaagagaactgcgacacatcaccaagctgaagccctggagcctctttgatgtacttgtggaaaagtatggctgg

SEQ ID NO: 511761 - DNA, 100 bp, Homo sapiens
ttgggtctggatcaatatataataaaacgctttgatggaaagactcagattgatggacaacttttcttaattaagcaccttttgatacttcgtgaacaaa

SEQ ID NO: 511762 - DNA, 75 bp, Homo sapiens
cacagtactatcgtctatcattggatgaagtggctccggagataacccggcagtgggcaggtgtttgtgacttca

SEQ ID NO: 511763 - DNA, 75 bp, Homo sapiens
ctgctttttctggtgtcctgaacctggaagttgtgctttttaaggtgctggagaatctggtaaaagcaccattgt

SEQ ID NO: 511764 - DNA, 75 bp, Homo sapiens
ggcccctgcaccactaacgcgaggaaacgcaggcgagtgggaagttttcggctttgtgagaaaccttaccatcaa

SEQ ID NO: 511765 - DNA, 88 bp, Homo sapiens
cggtactccaggtccgacccgcgaacccctctgggatccccgccgctctgtctacaacccgaggggtttgttaaagttgttaagaata

SEQ ID NO: 511766 - DNA, 98 bp, Homo sapiens
ctcagcacggggacccccgggccggccttcacgccgcagagccgctgcagggacaaagtggccttcatcacaggaggcggctctgggattgggttccg

SEQ ID NO: 511767 - DNA, 100 bp, Homo sapiens
acttcaggaggatcctcagaagttttggacaagcctccccaaatgtggcaggcagtcatcaagtgcctactatgactttaactaccatgatggaagcatg

SEQ ID NO: 511768 - DNA, 75 bp, Homo sapiens
gtttttgagtatatccgttctgagacatacaaatatactaaggctcgtacgtctgcatcgattatcttacgtggg

SEQ ID NO: 511769 - DNA, 51 bp, Homo sapiens
cgtcaggctctaaacaaaattctggtatagacacgtgtggccgtttacgct

SEQ ID NO: 511770 - DNA, 100 bp, Homo sapiens
agttcagcccactactctgaaccagcacaggaagtcctggagaacctgaaggaccgctggtaccaggcggacagcccccctgcagacctgctgctgacgg

SEQ ID NO: 511771 - DNA, 75 bp, Homo sapiens
ccactgttcactgtgactatttgaatgtgttggggatgtcctttgcactgaccctgaactgccagattgacaaaa

SEQ ID NO: 511772 - DNA, 100 bp, Homo sapiens
ctccaaataccagctcgacaaagatggggttgtcctctttaagaaggttcttgggtgtctctggggagtccctgggccagaccttcctccagactccagc

SEQ ID NO: 511773 - DNA, 95 bp, Homo sapiens
gtctccgcgtcccgctcgctgggagagaggtacctctccttttccctctccctttccctaagctagagaccgttggatggcagcttaaccttcag

SEQ ID NO: 511774 - DNA, 90 bp, Homo sapiens
cgagagcgcgaatatcgtcatcgttagaagggtcaacatatttcactggcacctattcacaagcttgaagaagctctgtatgaataccag

SEQ ID NO: 511775 - DNA, 100 bp, Homo sapiens
gccagccgaaccagctctgagatgagttgggtagatctgaacatccctgataccccagaagtaccctcccccgctgatccccccacgaggggaggtgaac

SEQ ID NO: 511776 - DNA, 100 bp, Homo sapiens
aagccggaaggggcaagacgggttcagttcgtcatggggctgtttggaaagacccaggagaagccgcccaaagaactggaactttatattgctgttggaa

SEQ ID NO: 511777 - DNA, 80 bp, Homo sapiens
cggcagtccacccaccgccgccgcctcccaggcccgcaccgccgccatgatgtgcgaggtgatgcccaccatcagcgagg

SEQ ID NO: 511778 - DNA, 96 bp, Homo sapiens
ccatgcccgcgaattcagaacgctaccaagatgaatgaactaatggagaaatagaaagtcttcagtgatggcctacgccaaagcacaggatggggc

SEQ ID NO: 511779 - DNA, 51 bp, Homo sapiens
gcgtcagcatccccaacagccccttcaggttattctctcagtgtatcgaag

SEQ ID NO: 511780 - DNA, 75 bp, Homo sapiens
caaagtcataggttttacaatggaggaatattgtaatacagtccagctagattctgggatagattaccggaaaag

SEQ ID NO: 511781 - DNA, 99 bp, Homo sapiens
ggcggcgctgccgcctgaagtgcgggcgcagctggcggagctggagctggagctctcggaggctcttgaggctagtgcgcctctaggcaagatgtccct

SEQ ID NO: 511782 - DNA, 100 bp, Homo sapiens
gccggatccagcatctctccaccatcgactacgtggaggacgatttgtgctctacaaaaaattggaatgtctcgttttcagacgtatattacgtactttg

SEQ ID NO: 511783 - DNA, 99 bp, Homo sapiens
gcgcgagccgagtgtgagcggaaaggggcccggcgtctgcctcgagactgaagaccggaggccagcaagcgcatctccagccacatccctttgatcatc

SEQ ID NO: 511784 - DNA, 95 bp, Homo sapiens
aggcctccccagccacgtgaaactggtctccactcatggacatgctgcagttagcagaagagccagtgccacaggctgggcaggagctgagggtg

SEQ ID NO: 511785 - DNA, 100 bp, Homo sapiens
gcagaagttgtctgagtgcgttggtcggcggcagtcgggccagacccaggactctgcgactttacgatccactagttcctggactatgggaactgatgac

SEQ ID NO: 511786 - DNA, 96 bp, Homo sapiens
ctgtggatgaatttgcttttctggaaggctgctctttggcgtaaattgcaatcgattagggatcgtttctcagaatcaagttagaagtgagagttc

SEQ ID NO: 511787 - DNA, 90 bp, Homo sapiens
gaacaatccgtctggatcacggatgtaggaagtggatctcagctaaacgggaagcatttttgaaaagtgattgcacaattgagagtgaaa

SEQ ID NO: 511788 - DNA, 75 bp, Homo sapiens
aaacctgtatgtggaaccacctgcagcacacttctgcttttgttccttcatcaggacgaatttactcttttgggc

SEQ ID NO: 511789 - DNA, 75 bp, Homo sapiens
gcgagaacttaaagagagacaacgctatcacatcaggtatgatgccgggcgggacggcttcatcgacctgatgga

SEQ ID NO: 511790 - DNA, 75 bp, Homo sapiens
ggatacaaagtcagcccaggcagacctccagatcaagttttatcagccagtaatcctacagtttttaatttctac

SEQ ID NO: 511791 - DNA, 75 bp, Homo sapiens
tttggttcacaacatcatcaaatgggggatgaccccgggagaagcagaaatccacttcttagagaatgccaagaa

SEQ ID NO: 511792 - DNA, 98 bp, Homo sapiens
ctggttcctacatctggattgtagccataagtggacttggagtgaactactttatgtccaagggtatcctggatgattcgccaaaggaaatagcaaag

SEQ ID NO: 511793 - DNA, 98 bp, Homo sapiens
gatgatggatctccaacatggcagccttttccttagaacaccaaagattgtctctggcaaagaaaagacccgacgacacagctttccaaatagtggaa

SEQ ID NO: 511794 - DNA, 80 bp, Homo sapiens
ctcatcccctggatgggggaccacaagatcctcatcgacaggagggtgtgaagacagagaatgaccacatcaacctgaag

SEQ ID NO: 511795 - DNA, 100 bp, Homo sapiens
caagcgggagtcggggatagtgtcatcggttcggtaaagtttctgttctctgcacccctgctggatgcatgctgctggcacaactgctggcggatctgcg

SEQ ID NO: 511796 - DNA, 90 bp, Homo sapiens
cagcagagaacccagtcaagtgtgtccagacgtccaacctacagaactctgcagtattgaagtatgagaacaatgttatgaatatcaggc

SEQ ID NO: 511797 - DNA, 117 bp, Homo sapiens
atgtgggaaaggctcggctcatgttctgggacttaggagggcaggaagagctgcagtctttgtgggacaagaacaatgtgagcttcgtggatgacagcttccctcccgggcccgagt

SEQ ID NO: 511798 - DNA, 75 bp, Homo sapiens
gctacagtatgtcaatcgcttgccccagcacagatccagaaccagaaccacagcccttctgaggagctcccaaac

SEQ ID NO: 511799 - DNA, 97 bp, Homo sapiens
catcttcagcctgctcagcttcgagaagattggctacacagatggagtctccctctgtcgcccaggctggagtgcagtggtacgatcttgactcact

SEQ ID NO: 511800 - DNA, 98 bp, Homo sapiens
tacaatgtgtccttcccccacgcagcacaggttccctataaaagagaagaggaagccttagaggagaggagactctcccgtggtgagattccaacgtt

SEQ ID NO: 511801 - DNA, 100 bp, Homo sapiens
gtgctacgaagaccagtccattgaacagttctggcagctctcagggaaccactcacgaattcttgtttggtgcccttgctgaactggttgataatgcaag

SEQ ID NO: 511802 - DNA, 75 bp, Homo sapiens
gagaaaacttacaatttccttccttgccattcaggaattctgagtgggggccattacgtcacttatgccaaaaac

SEQ ID NO: 511803 - DNA, 90 bp, Homo sapiens
tctgggcgattccatctctgaagcaacaaggggaatggggtcaaaatgagcagaaaaagcggatggtggttcctgctgccctcaaggtcg

SEQ ID NO: 511804 - DNA, 90 bp, Homo sapiens
ggggctgctgcgcctctgcttggctttaaggatttttatgaactggagccagagaagttccagaataagaccaatggcatcaccccccgc

SEQ ID NO: 511805 - DNA, 74 bp, Homo sapiens
ggaggggggagcggcgttggaggccaccgtttccaggtggatcttgaacgcaccttcacgtttcgaaattcaaa

SEQ ID NO: 511806 - DNA, 100 bp, Homo sapiens
cggcatgggttaccgctgctgcccctgctgtcgctcctggtcggcgcgtggctcaagctagatgtgtcaccggtggtggccggcctcatcggggcctctg

SEQ ID NO: 511807 - DNA, 90 bp, Homo sapiens
gaaaggccccatcttcccttcacacctggtgataaagtcatcccactcgctattcctcagtgtggaaaatgcagaatttgtaaaaacccg

SEQ ID NO: 511808 - DNA, 90 bp, Homo sapiens
ggtggaagatcagggatttctggattctctacgggatctcatagcagattcaaatccaatggttcaccggaacagcacaatccgccctgg

SEQ ID NO: 511809 - DNA, 100 bp, Homo sapiens
cagtttactgaagataagccaactttgaatttcttctatcaacagaaagaacacccaggttaatgcctgataaagaaagcatgtattacccacgggtaca

SEQ ID NO: 511810 - DNA, 98 bp, Homo sapiens
tgcttgtgggacacccgtttgacacggtcaagcagaaggtgatttactacctctgcatcttattgaaagatccagtggaaccacatgggatatcccaa

SEQ ID NO: 511811 - DNA, 82 bp, Homo sapiens
cgcgcgtacagcccgggcatccagggttacacaacagggcatatttgggcatgtccaccaagtgagggagatgattatatct

SEQ ID NO: 511812 - DNA, 90 bp, Homo sapiens
gatgaattggcagagcttgacccaggcactaatctgaattctacaaacacattgtgctttctggagggtctactatgtatcctggcctgc

SEQ ID NO: 511813 - DNA, 75 bp, Homo sapiens
gaagcagccgatccagcctgcggagcctgtggggcaggttaaaagcagccttcgccttatcccagatgatctatc

SEQ ID NO: 511814 - DNA, 100 bp, Homo sapiens
cgcggctggcaagactgtttgtgttgcgggggccggacttcaagggccgttgctccagggagaactgcaaatatcttcatccacccccacatttaaaaac

SEQ ID NO: 511815 - DNA, 75 bp, Homo sapiens
acctgttaccactttcaaaattggaaatgcagaaatcacctgtcttctgcgtcgatcaggctgggagctgcagac

SEQ ID NO: 511816 - DNA, 95 bp, Homo sapiens
agtccttaaggccaaactgacagaaatgcgtggcatctatgccaaagtggaccggctagagctgttaaagaatcattgactacagatctacaaac

SEQ ID NO: 511817 - DNA, 100 bp, Homo sapiens
caaggagctaaagcagcgtgcgttcagccctgggatgttgctaaatttgcataagaagagttggatggaaggtttgacacttcaggactacagtgaacat

SEQ ID NO: 511818 - DNA, 76 bp, Homo sapiens
caaccacactgcttcgatcctggacaggatgcaggcagatgcggtgctgatgcagtcacgggaacaggtttcagaa

SEQ ID NO: 511819 - DNA, 74 bp, Homo sapiens
cgcgatggagctgggggagccgggcggtgtggagcagaggatcatgtggaagcagtgaaaaagctccagaactc

SEQ ID NO: 511820 - DNA, 100 bp, Homo sapiens
cacagttgaagctccaggaggtcaaaagtttgaaattggcacaatggaagaagctggaatttgtgggctaggggtgaaagcagatatgttgtgtaactct

SEQ ID NO: 511821 - DNA, 100 bp, Homo sapiens
caaggcggaacacgaccagctgctcctcaactctcgtggcattatccttcagtggggctattggactgacttttcttatgctgggatgtgccttagagga

SEQ ID NO: 511822 - DNA, 74 bp, Homo sapiens
acatttttcttccttctgtcacatcacacccaatgggactatgcagccatcgtcttctttgctaacaaccgctt

SEQ ID NO: 511823 - DNA, 76 bp, Homo sapiens
cggggtgcgccggcagaggatccagtgttcaccatcctggccccggaagacacgatgaggcgagtggtacgacaga

SEQ ID NO: 511824 - DNA, 100 bp, Homo sapiens
atgggatctgcactgtaactgctggacccaaggacatggtggtcggatcaagagactgaaatctcatccttctatcatcatatggagtggcaataatgaa

SEQ ID NO: 511825 - DNA, 82 bp, Homo sapiens
cagcccggccggggcctgcgggcgcccagagccgcgccgtccgcgccgcccgttctgggggatatgagactttctactcgga

SEQ ID NO: 511826 - DNA, 100 bp, Homo sapiens
gccctttgcaggatgcagaagaagccaaaaacattctggcgggacgaccctgggacagtctccactggggcagatccagctgaccatccggcacagctcg

SEQ ID NO: 511827 - DNA, 74 bp, Homo sapiens
tgagtgactgcgtcaggcatctcaatcatggatctgcctacaaactggtttgctactttaccaactggtcccag

SEQ ID NO: 511828 - DNA, 75 bp, Homo sapiens
gacgtgttgactgttgaactctacccctcagacaagagatgctgagatgaatcgtcacctgtgtgtttggctttt

SEQ ID NO: 511829 - DNA, 82 bp, Homo sapiens
caggggtacaggaggcctctgggtgaaggcagaggctaacatgggacgccctcctgcaaaacggcccaactacgttaagctt

SEQ ID NO: 511830 - DNA, 95 bp, Homo sapiens
aaaaatcgattctgctcctctagcggtgacttccacagtaaagcaagccctacaggagtccctggtgcagattctgcagccacagcgtcgtgtag

SEQ ID NO: 511831 - DNA, 90 bp, Homo sapiens
ctttctggggagaagcagcgcatcagccgagatgagtgggaaagcagattctacttccatccgatttccgatttgccacctccagagcca

SEQ ID NO: 511832 - DNA, 48 bp, Homo sapiens
gccactgccgcaggaggcgtgagaactgataaatttcaaacggaagag

SEQ ID NO: 511833 - DNA, 90 bp, Homo sapiens
tccgggaaattcaacaggagctttccagtggaaagaggcaaaacctgatgaattaatggattccaaattgagatgcgtatttgaaatgcc

SEQ ID NO: 511834 - DNA, 73 bp, Homo sapiens
cggatctggaggagcagttgtctgatgaagagaaggtcaggttgccaaaaaggaagatctcatcagtgcgttt

SEQ ID NO: 511835 - DNA, 75 bp, Homo sapiens
acacagaacaacaaggtgttgatgccgccggacggagaagatggtataaactggtccatcagtgacaaagacatt

SEQ ID NO: 511836 - DNA, 100 bp, Homo sapiens
ccccatggcttctgctacatcatcccctccaacctccaggccaaaggcaggacgctgatcccttgctatgaagcacgagggccgggaggaggatcagcgg

SEQ ID NO: 511837 - DNA, 75 bp, Homo sapiens
atgaaacaagcctttgctgaattggagagctgctctttcaccatgcctggatcacttcctttgaatgcagaagct

SEQ ID NO: 511838 - DNA, 80 bp, Homo sapiens
agaagaaagtacctgtgaaggaaatcaaaaggaacccagccagccggcggaatgcaagcagcagtaggaagcggaggcgg

SEQ ID NO: 511839 - DNA, 50 bp, Homo sapiens
cctcagtgatgccattgtggaagtacggttcctggagcagcagaacaaga

SEQ ID NO: 511840 - DNA, 75 bp, Homo sapiens
aggacttggaggtggagcaggccctgactccaggttgtaagttctacaaatggagagttaaacacagatgacccc

SEQ ID NO: 511841 - DNA, 99 bp, Homo sapiens
gagcaccgccttccggcagaagctggtcagtcaaatgatggcagaggagcaggagttcacccagctctgcaagttgcctgcacagccctcacacccaca

SEQ ID NO: 511842 - DNA, 74 bp, Homo sapiens
gtggagccaccagcctctccctggaatctgagaaaaaggggttgattgaaagaatctatatggtacaggatatt

SEQ ID NO: 511843 - DNA, 75 bp, Homo sapiens
aacattggcagtgtggtgcagcacagtgagggggtggctacagtttcagaaaagtcacgtataatggaactggag

SEQ ID NO: 511844 - DNA, 100 bp, Homo sapiens
ttgcaagatcaaggaaggcgctgtaagacgggaggatctgttcattgccactaagggaatgacagaggaagaggaagacaaacttctggcactgaaagac

SEQ ID NO: 511845 - DNA, 100 bp, Homo sapiens
gctctagcaggtgcaaggcaaatactctgggcaattccatcgcctccatcccagatgaagcatttaatggattaccaaatttggaaaggcttgatctgag

SEQ ID NO: 511846 - DNA, 96 bp, Homo sapiens
attctggacaagcttatccggaatcccggcagcctgaagatcatcaccagtgcagccgcaaggtttcctgaaatgcagtttttccagcaagaaaat

SEQ ID NO: 511847 - DNA, 80 bp, Homo sapiens
cttcctgatccatggacccgatgaacatagacacagctctactgagatgaagaaagaaaaagaatacctgctcagctcca

SEQ ID NO: 511848 - DNA, 100 bp, Homo sapiens
ctcgctccgtggccttagctgtgctcgcgctactctctctttctggcctggaggctatccagcgttacctaaccaaactcctgcaaaaccacaccaccta

SEQ ID NO: 511849 - DNA, 100 bp, Homo sapiens
gagcatctccacccaggaacctcgccatccagaaaagagaagctgaatttggacgacagccagtgggaggacatccacgttgtcaccggagcactgaaga

SEQ ID NO: 511850 - DNA, 76 bp, Homo sapiens
atggtcagaagatgtggataaccaacggaggaaaagctaattgcttaacagagcgttccaaaaagaggactctcca

SEQ ID NO: 511851 - DNA, 80 bp, Homo sapiens
gagcctcagttggaagcagccgatccagcctgcggagcctgtggggcagttgacgaaggatcagagattggtgtattcgg

SEQ ID NO: 511852 - DNA, 101 bp, Homo sapiens
cgctgcccacagcctagcagtcgggaccgtactgaggcatgaatgctttacagttgcagaacctggcgacgctggctgctgctgcagctgcggcccagacc

SEQ ID NO: 511853 - DNA, 83 bp, Homo sapiens
gagcaggcgaggtggccggagccgtgtggaccaggaggagcgctgtttacaaaggaggaaaacgacttcttctagattttttt

SEQ ID NO: 511854 - DNA, 86 bp, Homo sapiens
gcctgcgcgctgctcctgctctgctacctgcagtatcctggtgtgaaccagctatcctccagtataggaggattgagtcttcagag

SEQ ID NO: 511855 - DNA, 83 bp, Homo sapiens
ctctgaactgactgccccgcatcaccggagcgtcccagctgcgaggagtgggacccagctcgcctgaatgaatctaccacctt

SEQ ID NO: 511856 - DNA, 98 bp, Homo sapiens
gccttcggaagcccgttcggcctggaggagccgcagtgggtcccggacaaggagactgtgccctgtccacggtgcctcctgcatgtcctgctgccctg

SEQ ID NO: 511857 - DNA, 99 bp, Homo sapiens
tgtgcctctctcgcccacattttccccaagcactctcaggaacctggcaacagatatttggatttgacctgcattttggaatttatctacacttaaaat

SEQ ID NO: 511858 - DNA, 100 bp, Homo sapiens
tcctactatccatttcaactacagatactttgaagtagaagaagctgatgcacacggcactttcttgggtcacattcggttggaacctcacaagcctcag

SEQ ID NO: 511859 - DNA, 83 bp, Homo sapiens
cgctggtcctgggcaggggccctgcaccacagctctccaggacataagaccagagctgtggcgcggggccttccaggagtctg

SEQ ID NO: 511860 - DNA, 75 bp, Homo sapiens
caacattgatggaaaacaaatcaaactgcaaatctgggatacggctgatgaaccaattgcagattatgctgcaat

SEQ ID NO: 511861 - DNA, 100 bp, Homo sapiens
cttcgactggctgcttggggagattgagtccaagttcaaccaagccattagaggattccggtcactgtgctgccacctgaggccatcacgatcctggagg

SEQ ID NO: 511862 - DNA, 82 bp, Homo sapiens
gataccaccaatcagctcttcacccggttcagtgacaacaaccaagcattagaacaagccagctcacaccagctggaacatg

SEQ ID NO: 511863 - DNA, 112 bp, Homo sapiens
catgaacatttcaataaattgatggccagacctgcagttgctctacactttcagatttggagtccaggaatgagactaagcatttatctgtaggaaaagatattattcaaaa

SEQ ID NO: 511864 - DNA, 50 bp, Homo sapiens
ggggaccatcaccaaacgaaccgggcctccccatggccacccatggacca

SEQ ID NO: 511865 - DNA, 75 bp, Homo sapiens
gtgggacttacggtccacagatgagccagtatggaccacaaggtgtaaacgtcctactttggggcaacttgccag

SEQ ID NO: 511866 - DNA, 98 bp, Homo sapiens
gcgaccgcgggtgcatccagtttctgcgcccaggcactccactgctggtgaggagaagcagtgacccagtgccaggcccacctgctgatacccagcca

SEQ ID NO: 511867 - DNA, 82 bp, Homo sapiens
tcggagccctggaagcagcagctcaccgaggacggggactccagtctctggtcccagcccaccccatggcccctcccagtcc

SEQ ID NO: 511868 - DNA, 75 bp, Homo sapiens
aggatgtgtacgagctgtgcgaggtgatcggaaaataaaatcagtggttctggaagtaactctgatatgatggaa

SEQ ID NO: 511869 - DNA, 75 bp, Homo sapiens
taaggattccaagtaactcttatttgtgccaaacccaagtctgaaatccacgtgtctatggccactccggtcact

SEQ ID NO: 511870 - DNA, 80 bp, Homo sapiens
tcatcctgctgggcttcgtccagatcgggaaggatgtggacgagtgctcactagcagaaaaaacctgtgtgaggaaaaac

SEQ ID NO: 511871 - DNA, 106 bp, Homo sapiens
ccgccgcacaactacctcaacgccgtgccgcccccctcccgcccccagacaatgcagatcttcgtgaagactctgactggtaagaccatcaccctcgaggttgagc

SEQ ID NO: 511872 - DNA, 101 bp, Homo sapiens
agaagtttctaggaaaggccggacaccaggtaaaatgtcggttccaggaccttaccaggcggccactgggccttcctcagcaccatccgcacctccatcct

SEQ ID NO: 511873 - DNA, 109 bp, Homo sapiens
ggcggcgaggctccggccaacgggctgcgcagagccgcggcgccggagggcctgctttcttccccgggcgatgtgcagagatctttgccaggggtcaaagcgtcgggaa

SEQ ID NO: 511874 - DNA, 90 bp, Homo sapiens
atcgtgttcgaggcggagaccgagggggagccccgcgcgcggcgtcgacccgtgcctgtatattccacgctttgcgcacctgctggaatt

SEQ ID NO: 511875 - DNA, 90 bp, Homo sapiens
attcattttcagcagacacaagaaaagcagtttttttttcaggtgtctgatgatttgtgagcctcaagtgactactctgtggaatcatct

SEQ ID NO: 511876 - DNA, 73 bp, Homo sapiens
gttgtcctcaattgcgtaggaccagaggcaagtgaggcctatctggttggcctttttgaagacaccaacctgt

SEQ ID NO: 511877 - DNA, 109 bp, Homo sapiens
gtttccccgccgcccacccggacgccgacgaaagccagcgagctcctcagcctcagatgcggcattccaaaagaactcactgtcctgattgggatagcagagaaagctg

SEQ ID NO: 511878 - DNA, 142 bp, Homo sapiens
ggaaagccctttccatcctcaaggccgttgcaggagatgcccgcgagccaccttcgccagcaccacaccgggccctggactttgtctcacaagatgaaatgttgacgcccctggggagattggacaagtatgctgcaagtga

SEQ ID NO: 511879 - DNA, 98 bp, Homo sapiens
tggaatcctcctatacgaaattgtcacctatgggaaaattccctacccaggctatggtattgagcatgcccagtgtgttccaccatcggagttctcag

SEQ ID NO: 511880 - DNA, 98 bp, Homo sapiens
gggcaatggcatcgtgggagcgcagtgagaaagatcagtctaaagaaaaggagaagaaagtgaaaaaaacaattccttcctgggctaccctttctgcc

SEQ ID NO: 511881 - DNA, 100 bp, Homo sapiens
ttgacagcgaggcgaatcggctgcggtttgctgggaacggagggctgcagcgcccaccctgcgccagagaccagataaatgtcatcttgcattacaacat

SEQ ID NO: 511882 - DNA, 80 bp, Homo sapiens
ccagcagttctccctgccctccttcaagattgacttctcggaatggaaggatgacgagcagctggaccccgagaacacag

SEQ ID NO: 511883 - DNA, 75 bp, Homo sapiens
tcgaacgatgttggactcatagtcactgccagaaaggtggccagcatcgaaatgttcagccttttagtgatgaag

SEQ ID NO: 511884 - DNA, 98 bp, Homo sapiens
acccgtacgtgcggaaggccctcaacatcccggagcagctgccacaatgggacatgtgcaaggcccagcgtgtgaggcggccgataccagggtcagat

SEQ ID NO: 511885 - DNA, 90 bp, Homo sapiens
gctgaggaagtgctgtaaccatccctacctgatcaatgatgtcatcgcaacagataaagaagacgttgccttcaaagacctggatgtggc

SEQ ID NO: 511886 - DNA, 100 bp, Homo sapiens
ccgggtcctcttggatcaaacatggcactgagtgtactctctgccagtgcaaggcttgcattgatgacaatgttgatatggtgaagtttctggtagaaaa

SEQ ID NO: 511887 - DNA, 100 bp, Homo sapiens
gaagatactcttggccctcggctcgcagatgacgctagtgcaggatactgctggtcaagagaggtttagaacattaactcccagctattatagaggtgca

SEQ ID NO: 511888 - DNA, 90 bp, Homo sapiens
cgcataactgaagccactaagacgtgggtggtcggcccttcttactttgtggaatacttaattaaagaatcaccatgtactaaatcccag

SEQ ID NO: 511889 - DNA, 100 bp, Homo sapiens
ccgtggagaaggaggagaggcatggcggccttgaccagccagtgattctggtacaggtcaaagaggtcctctccaagctgagcacgctcgtggaaaccac

SEQ ID NO: 511890 - DNA, 127 bp, Homo sapiens
atttaaccccaaaatcagtgattctacatctcaagctcatattttgaagtgtttacggctggaacagtgaaccatggagctgtatttcggtgaatatcaacatgtgcagcaggaatatggggtccat

SEQ ID NO: 511891 - DNA, 74 bp, Homo sapiens
gcctgcggcatcgtcctcagcgcctggggagtgatcatgttgatgaggagcgggaaggcctcctgcaccctgga

SEQ ID NO: 511892 - DNA, 90 bp, Homo sapiens
cgaggagatgctttccaaccagatgctgagtggcattcctgaggtggacctgggcatcgagacttggaccctctgtggaacacccgagta

SEQ ID NO: 511893 - DNA, 97 bp, Homo sapiens
agattactttggcctccagttcctcgactctgcccaggttgcgatctggacgttggtggttggctatgtgttgactgtttcattcaagtggaatgca

SEQ ID NO: 511894 - DNA, 96 bp, Homo sapiens
gaagaatttttgcaacgcgccaaatctaaactggtgccttatgtggatttggaacaccaaggaacctactggtgtcatgtatataatgatcgagac

SEQ ID NO: 511895 - DNA, 98 bp, Homo sapiens
tcttggccagggaactcaaacagcagatgcagggttctgagcaaggttcaaccagtcaagaacaggccttatctgctcagcaagctgctgttattaac

SEQ ID NO: 511896 - DNA, 84 bp, Homo sapiens
accacttctctacatcccatctcaatcagaattactagattttctctcaaactacgagggacccccatcaaccgaatccccatc

SEQ ID NO: 511897 - DNA, 101 bp, Homo sapiens
cccggatgtgacggcaccgtcgcccgcagcgctcgccccacgggccgcgcgtggagggtcccggtaggtagagcaagaagatggtgtttctgcccctcaaa

SEQ ID NO: 511898 - DNA, 74 bp, Homo sapiens
cacccaaggttgtaccacagagggagacctgctgtttgcccagaagaatcctcactatggatgggctcattgag

SEQ ID NO: 511899 - DNA, 100 bp, Homo sapiens
attacaactttcggggcatgtacaatcagaggttttgattcccaccatggccatcacccagtttcggttatttaaattttgtacctgcctagcaacagta

SEQ ID NO: 511900 - DNA, 100 bp, Homo sapiens
ctggaaaacctggccctcttcaatttctgacaaaagggccaagaccagcttcaagtctccatggtaccagaaaacaacaacctcacagcacctgaacctc

SEQ ID NO: 511901 - DNA, 76 bp, Homo sapiens
gggaaccacgcgagctgcagccagtgttctaagaacggaagcatctgggctggatggaatttagcatcaagcagag

SEQ ID NO: 511902 - DNA, 76 bp, Homo sapiens
tgtaactgtgtgcaaggataacagtactctgggaccgagtgcactgaagacgataggaagttcagcatcagtgaaa

SEQ ID NO: 511903 - DNA, 74 bp, Homo sapiens
cggcagtcatctcgcggccgttcagaaattgcatctgatggtctcaagggtcgtgtgtttgaagtgagtcttgc

SEQ ID NO: 511904 - DNA, 50 bp, Homo sapiens
agttggggcgcccagctgccaacaccaagctgagatctgtatctgtggac

SEQ ID NO: 511905 - DNA, 98 bp, Homo sapiens
cgggccgggccatggggtggcgggcggcgggcgcgctgctgctggcgctgctgctgcacgggcggctgctggcgccatccagtccaatggatcagatg

SEQ ID NO: 511906 - DNA, 100 bp, Homo sapiens
tactgatttaaataacaactgaatagcaaggaccttctggaacataatcttacattcacagcctgcacagaccttctctcccaccagaaacatttgacag

SEQ ID NO: 511907 - DNA, 87 bp, Homo sapiens
gctgcttgctgcaggctctggggagtcgccatgagtacccaaaggcaagtggaacagctctaatggggttgaagaaaaggagacttg

SEQ ID NO: 511908 - DNA, 80 bp, Homo sapiens
agtgcagatacaactatactgtttgtaaaaggagaagattgtgaagtttgcccgagggccacgtgccaaggtctctccag

SEQ ID NO: 511909 - DNA, 90 bp, Homo sapiens
cacatgtttatgttctatgctccctaatgaagatgctattaaggaggatgctgacagacagcaccaagaagtaattgcaatttatcggac

SEQ ID NO: 511910 - DNA, 100 bp, Homo sapiens
gtgtctttggtccaacgttgttccaggcaaaaatagacatcttattagttggagatgtcactgtgggctacctggctgatactgtacagaaactatttgc

SEQ ID NO: 511911 - DNA, 75 bp, Homo sapiens
ttcacaataagagcagaggatggaacacttcagtgcattcaaggcttgaaactgttacaatatggctttccttgg

SEQ ID NO: 511912 - DNA, 96 bp, Homo sapiens
cgctctgcttcttctgcctgctctacgggaagtacgtcaggaaacatgccctgaactgtcacagaatgaaaccagcgctcttcagcgtcctgtgtg

SEQ ID NO: 511913 - DNA, 82 bp, Homo sapiens
gaacttcgtcgcgctgcaacccccggctcgggttacctgtgcatgacagatgagtggttctctgagtatgtctacgaagtgg

SEQ ID NO: 511914 - DNA, 74 bp, Homo sapiens
cctgtgtggtggactgtggcacgggcaaagctacccattttgaggtttagctttgctcttgtaggtggaccttc

SEQ ID NO: 511915 - DNA, 75 bp, Homo sapiens
ggagagtgacggagtcggcgagcccccgcggcgacagtcattccaaggaagtcaaggacgagcatacctctttaa

SEQ ID NO: 511916 - DNA, 75 bp, Homo sapiens
acaagatgaagtctttctgccaggacctaaaacaggcaccacccagcccaatggacagattccccaggctacaca

SEQ ID NO: 511917 - DNA, 100 bp, Homo sapiens
gggcaagctccagagcctgccggaaggctccctcggtcgcgagtatctccgtttcctggatgtgaacgtagttgatgtcacttggcgatattcctgcaaa

SEQ ID NO: 511918 - DNA, 90 bp, Homo sapiens
ggcgtgggagctgcctaggccgggccctgccagggagcaagtctgcatcgcagaggccaggccacacccactcgcccgggtctatggcca

SEQ ID NO: 511919 - DNA, 60 bp, Homo sapiens
aagtcccagggatattctgtgctggtgtgatccctcacatccacaaatctctgattggaa

SEQ ID NO: 511920 - DNA, 90 bp, Homo sapiens
ggccaagtatccgccagtcaataggaagtacgagtgaaggtgggagtcaatcattttgacaagtctcctgaaaggaacagctagcaggaa

SEQ ID NO: 511921 - DNA, 100 bp, Homo sapiens
tgatgaactcccagagggcgctgtgaagcctccagcaaacaagtatcctatcttcttttttggcacccatgaaacttggaaatctacatttctgaaggaa

SEQ ID NO: 511922 - DNA, 101 bp, Homo sapiens
tcccctgctttgtcttcgtggaggtgcaggaactgcagggccagcggcaggaggaggccatgaaggccgagaaatggctatttgaatgccgcaacctggag

SEQ ID NO: 511923 - DNA, 100 bp, Homo sapiens
gacgccgcgtgctcccaacgtcgccccggtttgacgcacacggcaccaaactatgaattattccgtgagtgctgggctggtggtgggcatcttcatcggg

SEQ ID NO: 511924 - DNA, 100 bp, Homo sapiens
gctgccgcttcagtccgaaggaggaagggaaccaacccactttctcggcgccgcggctcttttctaaaagtgacatggatttgattgacatactttggag

SEQ ID NO: 511925 - DNA, 82 bp, Homo sapiens
accagatatcttgaaaagctgccagaaaggatctctatgaagcaccagaattatcagtgaagaatatattaaatggctcacg

SEQ ID NO: 511926 - DNA, 80 bp, Homo sapiens
cctgaaatctgaaaaatttcaattccaatcagtatttgatttctgacactggaggacaacagctctcaataagtgacgct

SEQ ID NO: 511927 - DNA, 119 bp, Homo sapiens
cgccagacggccagaaagttccgccatgagctggggcacggagctgtgggttttagatggagcaggattagatattgatttccatcttgcctctccagaaggcaaaaccttagtttttg

SEQ ID NO: 511928 - DNA, 82 bp, Homo sapiens
cccggaattctgagcaccaaaaggtgaaagaaaatggcccgaaccaagcagactgctcgtaagtccaccggtgggaaagccc

SEQ ID NO: 511929 - DNA, 75 bp, Homo sapiens
gggattctggcatcagggaggctttcagccggagaagcgagtttcagctgatgccatggacaatattaccaggca

SEQ ID NO: 511930 - DNA, 82 bp, Homo sapiens
cagattcgcagtggtcgcttcttctccttgacattgtatgcaaacctgttccattctttcttcgtggacaacccattccaaa

SEQ ID NO: 511931 - DNA, 90 bp, Homo sapiens
atttacggcatgtacttctgcatgaacatctccagccagggcatcagaaccaatgtggtgaccatgcccactgcccacccaagaatagcc

SEQ ID NO: 511932 - DNA, 97 bp, Homo sapiens
cacgagcccagagggacagcccaaggtccaccgagcccgcaaaaccatgtccaaaccaggaaatggacagaattatatccagatcgagagacagaag

SEQ ID NO: 511933 - DNA, 124 bp, Homo sapiens
agatactttgagaaaattcttacagaaggcatatgaatccaaaattgattatgacaaggagtatctaactatcaagttgaagaagatataggaaagttgaagtcttgtctcactggcttccttc

SEQ ID NO: 511934 - DNA, 94 bp, Homo sapiens
tgtgaggcctccccagccatgtgggactagcaaacgaggcccctgagagctccacctagttcacaggataaaatcccacagcagaactcggagt

SEQ ID NO: 511935 - DNA, 52 bp, Homo sapiens
gaacgctcgccgattctaccattatgggttaagtttagagcaagttgacatc

SEQ ID NO: 511936 - DNA, 95 bp, Homo sapiens
agaagcgcggccttcacacatcccagccggtgactgcagtgagtaagctgtgctagaacaaaaatgcaatgaaagaaacactggatgaatgaaaa

SEQ ID NO: 511937 - DNA, 100 bp, Homo sapiens
agacgatctgcacttcgcattttggcattgacatttaattttagggtcctttatatagaagggagagtagacaacaaaggaggctttgaaaatgttttag

SEQ ID NO: 511938 - DNA, 90 bp, Homo sapiens
gagccccctgaggccccagaactatcttttcggcacagtaaccttggtgcacgaccgaaagggctgtctactctggtgaagagtggtgtc

SEQ ID NO: 511939 - DNA, 101 bp, Homo sapiens
ctgaggacggctcaggagcatgacaagcgagaccctgtggtggcttattactgaaaaccagtagattcccagacatcgcgaagtgaatctgaaattgtgcc

SEQ ID NO: 511940 - DNA, 90 bp, Homo sapiens
gctgaagatttaagaactgaatgtgcaacttgcaagggaactggagacaatgaaaatcttgtcagttctactcagtgaatgtggattaca

SEQ ID NO: 511941 - DNA, 100 bp, Homo sapiens
aaacctgtgaacccacccgagagcaacaaagcaggcgactacagccacgtgaaggaatactcccccagttgcaagaggcgcaggaccgtggaagacttca

SEQ ID NO: 511942 - DNA, 100 bp, Homo sapiens
ggacaccgacatggaacagggactcactggggatggcgatgaagatgatgaagaggaagaggaaaatgaagctggtccaccggaaggatatgaggaagag

SEQ ID NO: 511943 - DNA, 75 bp, Homo sapiens
ggctggcttgctctgagctgcggttactgtgtccaggccccgggttctcaggaataactcaagtcacctgtactg

SEQ ID NO: 511944 - DNA, 83 bp, Homo sapiens
cgcgacgaccctagtgctcgtcgccgtggcgccatgggtgttgtccgcagccgcaggtgagaagccctaccactgcaactggg

SEQ ID NO: 511945 - DNA, 96 bp, Homo sapiens
ccaaagacttttactgaaaattccttatggatctctgagaaggcgcagcgttgaaagggtgctggagaatctggtaaaagcaccattgtgaagcag

SEQ ID NO: 511946 - DNA, 100 bp, Homo sapiens
tgatggataggagcaaccctgtaaaaccagccttagactatttttcaaacatggtgaactatgacaatgtagtggacacaggttctgaaacagatgagga

SEQ ID NO: 511947 - DNA, 75 bp, Homo sapiens
aagaaccatcccaattagaggagctagctgacttcatggagcagcttcttggacacttaatgattgttggcaaga

SEQ ID NO: 511948 - DNA, 82 bp, Homo sapiens
gccggtggtgctgtcgctcttgatactcggctcaggaactgtggctgcaccatctgtcttcatcttcccgccatctgatgag

SEQ ID NO: 511949 - DNA, 83 bp, Homo sapiens
ggatgaagtggctccggagataactcccccactggaaaggattctgaaagaaatgaagtcagccctcagaaatgaagttgact

SEQ ID NO: 511950 - DNA, 75 bp, Homo sapiens
cctaatgacagtctccaaattcgcctccatctgtaccatgttttagaaagagcgttttcgctacgtaaagcacat

SEQ ID NO: 511951 - DNA, 82 bp, Homo sapiens
aactggagagagaccagacctgcaagctctttgacacacagcagttcttgtcagatgatatcatcaagttgaatcgaaagga

SEQ ID NO: 511952 - DNA, 90 bp, Homo sapiens
ttcgtgccctcctcatcttcctagagaagcgtttgcacaaggcccagtactacggggagattggcatcgggacgcccccccagtgcttca

SEQ ID NO: 511953 - DNA, 127 bp, Homo sapiens
gggctggtggtgcttccaactgcgggacaggaagtggccgtagcggcttgttggataagagtcaagggtccagagaaggaggagaagttgagacaggcggtcaagcaggtgctgaagtgtgatgtga

SEQ ID NO: 511954 - DNA, 100 bp, Homo sapiens
ccgccgctctgccacggtctgcccacccaacgcgaagacggtaacccgtgtgactttgactggatatggaatgtgcagatgtcccactattaactccaag

SEQ ID NO: 511955 - DNA, 74 bp, Homo sapiens
atgtcaacatgctgcagaaattattacagaccttcttcgaagtgttcagggtttttaatgaccacaacaagcaa

SEQ ID NO: 511956 - DNA, 82 bp, Homo sapiens
ccctcatctatatcctttggcagctcacagaccctgtacccaagcctgtcatcaaaattgagaagatagaagacatggatga

SEQ ID NO: 511957 - DNA, 110 bp, Homo sapiens
ggtgcgggctgtgagagggggagcgtggagcctccgaggccgagattgccaacactcctgatagctgaatgtgtgctggtttacatgactccagagcagtccgcaaacct

SEQ ID NO: 511958 - DNA, 51 bp, Homo sapiens
agcagctgctcaatgctcggacacagccagagactgctgctactttgaaac

SEQ ID NO: 511959 - DNA, 75 bp, Homo sapiens
gctttatgctgaaaaggtggccactagaggtcgatgagcagatgcttaacgtgcagaacaagaacagcagctact

SEQ ID NO: 511960 - DNA, 98 bp, Homo sapiens
agctgcggaggcagggcagtgtggtgtccagccggatccagcatctctccaccatcgactacgtggaggacgcgctgtgcttcgccgtgagccgctcg

SEQ ID NO: 511961 - DNA, 50 bp, Homo sapiens
cccagccctgcctctccctgggctctgggggctgttgtggttccgactat

SEQ ID NO: 511962 - DNA, 140 bp, Homo sapiens
atcaatatattttggctgtgcctgtgttaaacctaaatcttcaacataataagatatttgtgaaccaagccatttcaacagcaacaccttctccaaaatccactgagcagacaaccacaaacagtgttaccagccttaac

SEQ ID NO: 511963 - DNA, 95 bp, Homo sapiens
ccgctgtgcccgggcctgcaccatgagcgtcccggccttcatcgacatcagtgaagaagatcaggagctgatggtacacacatggatggtgatca

SEQ ID NO: 511964 - DNA, 80 bp, Homo sapiens
agttggaagcagccgatccagcctgcggagcctgtggggcaggggggacacagcgattgccacgcgccattggaatgtcc

SEQ ID NO: 511965 - DNA, 101 bp, Homo sapiens
acagcggcgcgggcaagaagcgctttgaagtgaaaaagcactattcctgatcagagaactccagttgcttcaacacacagtatcagtagtgcagccacccc

SEQ ID NO: 511966 - DNA, 135 bp, Homo sapiens
cttgacctcggtcccagtgccccacaccaccgcactgtcgctgcccgcctgccctgaggagtccccgctgcttggtgctggtcgttatgtaccaggttctgcaagtatgggaactaccatggccggagttgatcc

SEQ ID NO: 511967 - DNA, 101 bp, Homo sapiens
gacgatctgcatttgaggaagaaggcaaagaaacttggtgaagatgaagaggaactatctgaattacagcttcgccttttggctcttcagtcagccagtaa

SEQ ID NO: 511968 - DNA, 60 bp, Homo sapiens
attaggggagtattgtctggctgacataatcaatcactctgagaggagtgataccaatga

SEQ ID NO: 511969 - DNA, 50 bp, Homo sapiens
tacaaatgtgacagatatcatcagggatacagcaggccaggagcgatttc

SEQ ID NO: 511970 - DNA, 83 bp, Homo sapiens
cctcacgcgggcgcggatcgaccggagcagagagctggcgagcaagggggatatgagactttctactcggaatatcctgagtg

SEQ ID NO: 511971 - DNA, 100 bp, Homo sapiens
tggagagtgacatgcagttggatggcggtgactgcgtgcagattccagagtcattaaaaagtatcacatggcagagattgggaaaaggcaattcaggaca

SEQ ID NO: 511972 - DNA, 76 bp, Homo sapiens
tccagtgcagcgcggagtgggcgatgccagcgtgccagattgatgacacagatgccatggaagatgtccattctct

SEQ ID NO: 511973 - DNA, 83 bp, Homo sapiens
ctcttaaactgctacaagctcaggcaggatctattagtggagatatcattgatgagttaatgtcttctgacggtaagtaggtt

SEQ ID NO: 511974 - DNA, 75 bp, Homo sapiens
ctggaaggaccgctggggtcaggagtgagccaagccccccgagaggcccctgctcgtcgggccccatcctcagcg

SEQ ID NO: 511975 - DNA, 96 bp, Homo sapiens
gagaaactcagcgctggggaagaaggaaaccaagtgctacctcctggagcttctcttggaaatgggctcacaccagaggcagcaagagaccttggc

SEQ ID NO: 511976 - DNA, 75 bp, Homo sapiens
cggcggtacccgggtggttaaacttcgcaaaatggaactgtggctgcaccatctgtcttcatcttcccgccatct

SEQ ID NO: 511977 - DNA, 100 bp, Homo sapiens
cggcgcctggcggggcctccgcgaggacgagttccacatcagtgtcatcaggcgccatgtcagaaccggctggggatgtccgtcagaacccatgcggcag

SEQ ID NO: 511978 - DNA, 51 bp, Homo sapiens
aatcattatcacaggttcagaagatgatgttcagcccacaagagcttactg

SEQ ID NO: 511979 - DNA, 89 bp, Homo sapiens
cgccggccgcctgggaccttgcggtgaggctgcgcggggccgaggccgcctccgagcgccaggcgtacaaatccatttggagaatctgg

SEQ ID NO: 511980 - DNA, 125 bp, Homo sapiens
ggacagcggccgggacagcggcgagacgcgcgtgtgtgagcgcgccggaccaagcgggcccagaagcgggtttggtgcacctcgatttggaggaagtagggcagggcccttatctggaaagaagt

SEQ ID NO: 511981 - DNA, 98 bp, Homo sapiens
gcagaccacttcggtggcaagttacacttggggttcattcagatccgagagaagcttgatcagttgagggccgccatggcatcagatgaaggcaaact

SEQ ID NO: 511982 - DNA, 75 bp, Homo sapiens
agctcagcaagactggagtccctgatggaattatgcagtttattaagggcattttgtcagtgatgctgatctttg

SEQ ID NO: 511983 - DNA, 75 bp, Homo sapiens
gaggaatgctactggggccacgtcttctgggaccagcaaggatggaacattactgtggacctggtcattggccct

SEQ ID NO: 511984 - DNA, 100 bp, Homo sapiens
aatctcacgaacctcaccccaagatcttcacattctggatctcagctgctcttgaagatgtctttggtggacttgggaaagaggttgctagaagcagcaa

SEQ ID NO: 511985 - DNA, 101 bp, Homo sapiens
aagcttggtgaaggagaagggtcaatgacgaaggaagaattcacaaagatgaaacaggaactggaagcgatgtacagttacccagcacgtgtacctcctcc

SEQ ID NO: 511986 - DNA, 75 bp, Homo sapiens
cccacttcaaagacgcagtcagtgggaccactgacatttatggatgtggccatagagttctctttggaggagtgg

SEQ ID NO: 511987 - DNA, 100 bp, Homo sapiens
tgggtccacagctgaggacattgtggagtggctgaagaatactatactggcaattgctggagaagattttgcaattgttgcttctgatactcgattgagt

SEQ ID NO: 511988 - DNA, 90 bp, Homo sapiens
gtcaaaattatccgaaaccgcctcactgggagaaaatatggagaagtcttgtgcaagcaaggaagaagtcaaagaagtcagtattgaaga

SEQ ID NO: 511989 - DNA, 50 bp, Homo sapiens
ctgctgcttgctgaccaaatgatttttgattgtccccggctgaagttttc

SEQ ID NO: 511990 - DNA, 82 bp, Homo sapiens
tcactttccagcagtccagcacggccaagtcagccacctggacggtcaaaatgcagatcttcgtgaaaacccttaccggcaa

SEQ ID NO: 511991 - DNA, 75 bp, Homo sapiens
cttttgggcagcttttccggcctgacaacttcatctttggctgttcggctcttgaatcccagcgatgaaaccagg

SEQ ID NO: 511992 - DNA, 75 bp, Homo sapiens
aaaatgacaagttcgataaaagtgtgcagaccaagttcagggcgacagctcagtgaagtcttcattcagttacct

SEQ ID NO: 511993 - DNA, 50 bp, Homo sapiens
ggagcagcagttccatcccgagacctccgggagagcctggaggagatcct

SEQ ID NO: 511994 - DNA, 74 bp, Homo sapiens
cgctggctcaactacggtggaggtgaatatgaccatctcccagaacaggccttctatatggtgggacccattga

SEQ ID NO: 511995 - DNA, 74 bp, Homo sapiens
cctgacaaattatgctgcagcatattgtactggcctgctgctggcccgcagggaggagataagcaaggacctca

SEQ ID NO: 511996 - DNA, 75 bp, Homo sapiens
ggtagcttcccgacttatcgacatgagcaggcaccaagattgaggatggctcgggggaggttgtgctgagccgga

SEQ ID NO: 511997 - DNA, 100 bp, Homo sapiens
cttccccagctctgcagccacatactatccgtttgttcaggaaccaccagtgacagattaattggccttggtcctcacagctccaaaaagaaacaggatc

SEQ ID NO: 511998 - DNA, 100 bp, Homo sapiens
gcaaggaactgatagcttatggttctccattgtgatgaaagcacatggtacagctgaactagatgcagagcacgcccagaaggtcctggaaatggagcac

SEQ ID NO: 511999 - DNA, 74 bp, Homo sapiens
ctactcttctctacaaatatagactccgttccctaccacagccttccacttccggctcctgcgtcgctccggaa

SEQ ID NO: 512000 - DNA, 90 bp, Homo sapiens
agcagaggctgtttgacagagcagacttaccctgaagtagttagaatggaggagagcattcccattgctttatctggtagggatatctta

SEQ ID NO: 512001 - DNA, 83 bp, Homo sapiens
taaaaaaatcccatgaggagaaggcattctaatttagaatatctttaatgctagccaaggagtcagggatttggacgtatttt

SEQ ID NO: 512002 - DNA, 75 bp, Homo sapiens
cccaggctcaagcagtcctaccatgtcagccttcccagtagctgggaccacagcccctatgtcaccacagtggga

SEQ ID NO: 512003 - DNA, 80 bp, Homo sapiens
ctactgatggtgctgtaaccacctcacagattccagcttcggaacaagagaccctgcttggtgatccagctatttttcct

SEQ ID NO: 512004 - DNA, 100 bp, Homo sapiens
tttatgggcatgtcccctctcttacaagcccatcatgctatggaaaaaatggaagaatttgtttgtaaggccatcgaagacggcaatttggaggaaatgg

SEQ ID NO: 512005 - DNA, 75 bp, Homo sapiens
atgaagaaactcaatgatcgtgtcatgagaggagctgagcacataacgacttacacgttcaatactcacaaagcc

SEQ ID NO: 512006 - DNA, 100 bp, Homo sapiens
accgcgaagatgttagcattgcctgctaccctggcggcgagggacacaggctctctctgggggtttgccaacttgttaataagatggaggagaatactgg

SEQ ID NO: 512007 - DNA, 97 bp, Homo sapiens
ggcgagaagccccagctgcactacgcgtgtactaaaggaagtataccaagcctttaatcccaaagcagtggtcttacagctgggagctgacacaata

SEQ ID NO: 512008 - DNA, 100 bp, Homo sapiens
acaaacttatacaacctgatcatccgcagatatctcagcagacaaggcgcctctgtcgaagagccttctgctggtccccagtgccctctccctcctgctc

SEQ ID NO: 512009 - DNA, 90 bp, Homo sapiens
atttgtgcaatgtttagccaacccaaattaccttaattcagtatcctggtgtgaaccagctatcctccagtataggaggattgagtcttc

SEQ ID NO: 512010 - DNA, 100 bp, Homo sapiens
cgcccggcccggagcccccagcgcagcggccgcgagatcctgcagatcattcagctggacctagacctgaagtttaagaccaacatccgggagttgtttg

SEQ ID NO: 512011 - DNA, 100 bp, Homo sapiens
caaaggcaagagtaacagcagcgccgtcccgtccgacagccaggcccgggagaagtttttttaacatgtggggatttggaagagtcagcaaacaagccag

SEQ ID NO: 512012 - DNA, 74 bp, Homo sapiens
tgagctccaggaagcacgttctctacgtggagcacagtattaattttaaagacccacagtttgctgaagattac

SEQ ID NO: 512013 - DNA, 75 bp, Homo sapiens
gcctgcgcagctccggccgcctggctccccatactagtcgccggaaaatgtttataggaggccttagctgggaca

SEQ ID NO: 512014 - DNA, 100 bp, Homo sapiens
accacctctttaataaccatgcttaatgcaaaagaccttctacaggacctgaactccgacagttagttaatatgtgcatcaacccagatccagagaagcg

SEQ ID NO: 512015 - DNA, 100 bp, Homo sapiens
gcctcctaagtagctgggattacagtcaagaaccctattgaggcaagtgtcttgctggctgaagcctcgctggcacggaagcagcggaaaacacatacta

SEQ ID NO: 512016 - DNA, 106 bp, Homo sapiens
aaacatctgaagttcatcgccaggactgtgatggtacaggaagggaacgtggaaagcgcatacaggaccctaaacagattttgactaaaggagaagttcaagtatc

SEQ ID NO: 512017 - DNA, 98 bp, Homo sapiens
cgagagatgaggccggagcccaccaagttctgggaagttctggcctataggaacaagacattttcagtaatggaagaaggagcttccaggctggggaa

SEQ ID NO: 512018 - DNA, 100 bp, Homo sapiens
ggccatccttccgccttcttctgcaggagtcagactgacttccttttggtagtactgcgtgatgttgttcaggcttatcctgaagttcgcattgttctta

SEQ ID NO: 512019 - DNA, 76 bp, Homo sapiens
cttggaatacaagatggttgccgggtcatgttaattgggaaaaagttctttatagctccaagctctacagattctt

SEQ ID NO: 512020 - DNA, 100 bp, Homo sapiens
aaagaaccagatgtcaaaactgatttcagaaatgcatagttttatccaggcttcaacggaccacaccaaaatgccatctcaaatggaacacgccatggaa

SEQ ID NO: 512021 - DNA, 100 bp, Homo sapiens
atgctgctgcttcatggatttccagaattctggtggagcatgaccccgcccatggtgaacgcctactactcgcccaccaagaatgagattgtgtttccgg

SEQ ID NO: 512022 - DNA, 75 bp, Homo sapiens
gaggacacgaggcggcgggctggagacatggaccgcggcgagcaaggatgtttcgtctgaactcactttctgctt

SEQ ID NO: 512023 - DNA, 82 bp, Homo sapiens
agcacaagaaatgtgtataggataatcagtttagatggctcaaaggaaagagtttttaaaatctggaagactcattttctct

SEQ ID NO: 512024 - DNA, 100 bp, Homo sapiens
accagtctattagacggccaagtcgacagcttgccccaaacaaacctagcagtctctggtcccagcccaccccatggcccctcccagtcccagcaccacc

SEQ ID NO: 512025 - DNA, 82 bp, Homo sapiens
agcctcccgagtggctgggattacaggttccaagtctcttcttcggcctctcaaacatggtaccatccctaatgaagtcaac

SEQ ID NO: 512026 - DNA, 80 bp, Homo sapiens
ggctctggatagcaccttatggacagaagctccaccatgaggcgaggtggatggaggaagcgagctgaaaatgatggctg

SEQ ID NO: 512027 - DNA, 74 bp, Homo sapiens
gaacagtttgtcccagattttcagtctgataaccagcttttatctcagttatcaggagtgagacgttctgcagg

SEQ ID NO: 512028 - DNA, 82 bp, Homo sapiens
ccgagacgcggcgcgcacgctccggcctgcgcaattctgtggtgttcttggtcacacatttatggagtttctgaagggcagt

SEQ ID NO: 512029 - DNA, 100 bp, Homo sapiens
ggaggagaccggcacccagacaggtggcgacggcagaggagctcatgtacagtcaggaatggttccttctcatccaactgcccatgcgccaatgatgcta

SEQ ID NO: 512030 - DNA, 100 bp, Homo sapiens
agaagaaacagttagcgcaagacacaggacttacaattctccaagtaaacaactggtattgttgcagcatctggcagtgagactgaggatgaggacagca

SEQ ID NO: 512031 - DNA, 75 bp, Homo sapiens
ggatgaatcccagtccctgttacgggttttttgcatgtctgacacccatgactccacctggaccttatggctcca

SEQ ID NO: 512032 - DNA, 80 bp, Homo sapiens
agccaccctcgctccctctgctcttcctcccttcgctcgcaccatgaaccaagcgcctccaggtctctacacgaagaccc

SEQ ID NO: 512033 - DNA, 100 bp, Homo sapiens
gccacgcgggtggaggtgtccgtgtcctgcaggaacaagcacatcatgattgacttggggactggcaacaacaacaagattaactgggccatggaggaca

SEQ ID NO: 512034 - DNA, 98 bp, Homo sapiens
gaagcatccatggcggagggcggcagcccagacgggcgggcagggccgggctccgcaggactcacaccacccggcaagaactgctcactacggctccc

SEQ ID NO: 512035 - DNA, 75 bp, Homo sapiens
tgaaaggagagaggcattttgctgaaagtgaagtgcctgatgtgttgccagtgttgccagacctcccgttacccg

SEQ ID NO: 512036 - DNA, 100 bp, Homo sapiens
ggggagcgcctcgtcgacatgagtgatgtggaggaaaacaacttcgagggcagagaagatgatccctatgatcttgaagatgtttctgcacagaaatgag

SEQ ID NO: 512037 - DNA, 75 bp, Homo sapiens
tcgggtcgccggagccgcgccccaccccgccagctccagagccacgtacgcacgacttcagcctggagaggacgg

SEQ ID NO: 512038 - DNA, 50 bp, Homo sapiens
gggggctgcatccagataatgtgaagattcccaaatgctggaaaatcctc

SEQ ID NO: 512039 - DNA, 78 bp, Homo sapiens
agaacgaagcctcggctgggagcgaacccttaggagaaatcttgagagtggacagcaattgtgaagatcgccagagag

SEQ ID NO: 512040 - DNA, 98 bp, Homo sapiens
ctccgcaggcccaaccgccgccagcaccatggccagcaccatttccggcggccggcgcggggcgcaggcggcgcggccatgggctcgcagggcagtcc

SEQ ID NO: 512041 - DNA, 100 bp, Homo sapiens
attctcgctgtgacagagacaacaccgagtatgagaagtcttaaagaaagtgcagaagagatggtcaaaaacaaattggaaggaaaggataaactgaccc

SEQ ID NO: 512042 - DNA, 97 bp, Homo sapiens
ccagtggctttatccatatagtattttactaggtcatgaagggaagatggctgtggaaggtgttttaaagattctgctcagcaatcctcagatgtgg

SEQ ID NO: 512043 - DNA, 50 bp, Homo sapiens
cagccgggccttcctggccatcacgcgacgcctgtgtgagcacaagtatg

SEQ ID NO: 512044 - DNA, 75 bp, Homo sapiens
gcctgctggagcagatcctggtggctgagaaccgccgccgccatgtctgcgcatctgcaatggatggtcgtgcgg

SEQ ID NO: 512045 - DNA, 75 bp, Homo sapiens
tgcggccatctggggatattcccacaaggatgaggtatctgtgcctaggtttgctgtggggattgtaataggaag

SEQ ID NO: 512046 - DNA, 100 bp, Homo sapiens
gtcctgtacagcatcgccgagaagggtgtggctgggaatcctatggtgaagtctgtgcttgataagacaaaacattcagtagaaagcatgattacaacgc

SEQ ID NO: 512047 - DNA, 82 bp, Homo sapiens
ttcctccacctaccttcccgatcttccgtgtgtgctaagatcgtgcagctcctggggcagaatgaggtggactatcgccaga

SEQ ID NO: 512048 - DNA, 50 bp, Homo sapiens
gaccaactggaaccctcaagaggaccgagtgctctacagcatcgagctga

SEQ ID NO: 512049 - DNA, 88 bp, Homo sapiens
tatggagcatgcctttaccccgttggagcccctgctttccactggaaacctgtaggaagtgtcagggactctggaaagaacataatgg

SEQ ID NO: 512050 - DNA, 75 bp, Homo sapiens
caactacggggttggtgagagcttcacagtgcagcggcgagtggagcccacagtgaccatctccccatccaggac

SEQ ID NO: 512051 - DNA, 74 bp, Homo sapiens
aaaccagacttgttcagctggacagtgctatcagcatggaattgtggcagtaccacttccgctgtcacggtaaa

SEQ ID NO: 512052 - DNA, 127 bp, Homo sapiens
tcgggtgcctggggcagacgaggccggcttctccgcggacagctagggagagtgtcctggatggactttctggccgagaccagccagtggagctgctgaatcctgcccgcgtgaaccacatgcccag

SEQ ID NO: 512053 - DNA, 90 bp, Homo sapiens
gatgtatccatcaaccacttcctccaggaggagatcgacgtgtggaccgaggagcggaagggcaccctcaaccgcgacctgctcttcgac

SEQ ID NO: 512054 - DNA, 83 bp, Homo sapiens
aatacagatcttgctttcaaaaaggcctccggtgtggctgtctctgatggtgtcatcaaggtgttcaacgacatgaaggtgcg

SEQ ID NO: 512055 - DNA, 76 bp, Homo sapiens
ctctccagctcagagacccctgccaggaccctgcccttcaccacaggtggaggagaagatcaagcagacccaccgt

SEQ ID NO: 512056 - DNA, 100 bp, Homo sapiens
gcctgggcagcggccgggaacccaagatgggccaagtggtgtatgtgccggtcaagacgggctcggccctgggctgcatcttgtacctgctgtgcttccg

SEQ ID NO: 512057 - DNA, 83 bp, Homo sapiens
atcagaaggactagacccagatcttcttgatagacccaaatgatttgtacattgtagaacccctcaagttttctccagaaaag

SEQ ID NO: 512058 - DNA, 82 bp, Homo sapiens
aacgaggcaaggagctaaagcagcgtgcgttcagccctggggcaatactgaacactgcgcagcttgcagaggtctcctggca

SEQ ID NO: 512059 - DNA, 75 bp, Homo sapiens
atacgtgacttgactggttcgaggacagcacccgccaacctcctggaaggtgtaatagcctgcagctggtgtttt

SEQ ID NO: 512060 - DNA, 76 bp, Homo sapiens
ccacctgagtcaccagttaactatggtagcccacccagcattgagctggactggccattatggaggaggagctgca

SEQ ID NO: 512061 - DNA, 50 bp, Homo sapiens
cctgttgtggctctataagcagtacctaggtgctgatatggaagaatttc

SEQ ID NO: 512062 - DNA, 97 bp, Homo sapiens
tggagagaggccgcgtcctgggcagaggtggtgaaattgcctctacctttgatcacccagaactggtgaagcttggaagttgcaaacttatcgagga

SEQ ID NO: 512063 - DNA, 100 bp, Homo sapiens
ggtgaatcagtatgttgtgcaagaggtactgtccatcaaacatcttccaccacagcttagaggacatgatccacatcgcggacaccaaggtcgccaggcg

SEQ ID NO: 512064 - DNA, 100 bp, Homo sapiens
cggcgagccggagcgcggagcccggctcccgcaccatggaggaggacgacagctacgaacaccttccaccatgaccacctcagcaagttcccacttaaat

SEQ ID NO: 512065 - DNA, 97 bp, Homo sapiens
gccgctcaccccgcggccgcaccttcccgccttctcaggagacgttctcttccagatggctgaagtccacaggcagatccagaatcagctggaagaa

SEQ ID NO: 512066 - DNA, 75 bp, Homo sapiens
aagtaaaagaacctggtgaaagtcccatattctggtttctgctttgggacaaccatacatctaattccttaaagt

SEQ ID NO: 512067 - DNA, 100 bp, Homo sapiens
acaagccgctggcagccgcggatctcaccgccgctcaggtgtgtaaatatgttgctgtggagctgaagtcagcctttgaggaaaccggcaagaccaagga

SEQ ID NO: 512068 - DNA, 98 bp, Homo sapiens
gccaggctggggtgtcccagaagagccaggaatcgaaatgcttcatggaacaaccaccctggccttcaaggctgaactccagtgcacccagttagact

SEQ ID NO: 512069 - DNA, 83 bp, Homo sapiens
gctgctatcaacgaagagatatcacgtgtgaccaattcagtgaaaggaacgaatgcgattctctggacctgtttgggactgag

SEQ ID NO: 512070 - DNA, 51 bp, Homo sapiens
ccaggcgcggcgcggctgcggctgagaccatcatggagcagttcaacccta

SEQ ID NO: 512071 - DNA, 100 bp, Homo sapiens
caaggccgtccactccctgtcccgcatcggggacgagctctacctggaacccttggaggacgggggtggcgctccaaccccctttgaccggaactatggg

SEQ ID NO: 512072 - DNA, 83 bp, Homo sapiens
cgccgctctccagcccgcttgaacggctccccacaggtgcaggaagccgccgcccagccatggacggggaggagcagcagcca

SEQ ID NO: 512073 - DNA, 90 bp, Homo sapiens
gtctccaccaccagatctttctccgtggattcctctgctaagaccgctggtgtggatgaggtcaccattgtcaacattttgaccaaccgc

SEQ ID NO: 512074 - DNA, 75 bp, Homo sapiens
ccacatcaatgcactgccaatgctgttttcactcattagctcctgaggtaaacaaattgaaaaaatgagcgaact

SEQ ID NO: 512075 - DNA, 100 bp, Homo sapiens
cgggctgatgggcgccggcattgcccagggcttatttcaaaacctttgtccctcagttccaggaggcagcatttgccaatggaaagctctaggaaacacc

SEQ ID NO: 512076 - DNA, 100 bp, Homo sapiens
tcataatcttggagctggattatcaaggaaaaatgctgggctcttgcactgtttggtggaaatggtgagacaggatttgagcaaaattctacttattcag

SEQ ID NO: 512077 - DNA, 50 bp, Homo sapiens
ttctgggatccagcgagcgacatggttttgcacactagggaccaagaagc

SEQ ID NO: 512078 - DNA, 80 bp, Homo sapiens
ctaccatgctgatgatggcaagcttctcacggcattcagcagcagcgttgctgtaaccgacaaagacaccttcgaattaa

SEQ ID NO: 512079 - DNA, 49 bp, Homo sapiens
ctcggattctcgtagctgtgccgggtactccaaagattcaggtttactc

SEQ ID NO: 512080 - DNA, 90 bp, Homo sapiens
gctggattgaactcagagaagccggggtttctgagtcccttcaacatgatcctgggaggaatcgtggtggtgctggtgttcacagggttt

SEQ ID NO: 512081 - DNA, 75 bp, Homo sapiens
gcattaatctcccaaaatattctagaaggggaaaagctacttcaagaaaatgagttccgaggtgagctgttaaat

SEQ ID NO: 512082 - DNA, 101 bp, Homo sapiens
atctccctgctggagcaagaggcagagctgtgggcggtggagtctagacttccccaaggcgtgtacccagtaaccgggccgccctgcacctctattccaac

SEQ ID NO: 512083 - DNA, 75 bp, Homo sapiens
ttcatcgactcagtcagtctcttggtttggtctctaaaagtaaaggcctatttgatggctttgcagatggactag

SEQ ID NO: 512084 - DNA, 100 bp, Homo sapiens
ctgaacccaagacctctggatgattgaggagagcaccacagtggtcaccacacagtctgctgaggttggagctgctgagacgacgctcacagagctgaga

SEQ ID NO: 512085 - DNA, 100 bp, Homo sapiens
atgagtctcttgaagactacagatgaaatggcacctcgaaaggggaaggaaaagaaggaagaacaggtcatcagcctcggacctcaggtggctgaaggag

SEQ ID NO: 512086 - DNA, 100 bp, Homo sapiens
tggcagcatcacccccggacagcaaggacggggaggtttactgcatcgacgcgcggttctacgggaacgtcagccggttcatcaaccaccactgcgagcc

SEQ ID NO: 512087 - DNA, 88 bp, Homo sapiens
ctgtccagcatccgaccaccgaggctggagggggagaacacccaggagcgggacggtatgcgggccatcctggggtcctacgacagcg

SEQ ID NO: 512088 - DNA, 76 bp, Homo sapiens
cctacacgccgccgcttgtgctgcagccatgagagaagaagaaggaggttcctgctgtgccagaaacccttaagaa

SEQ ID NO: 512089 - DNA, 50 bp, Homo sapiens
cgtccccgaccttgcctgaacaaggtcaaaatgcagatcttcgtgaaaac

SEQ ID NO: 512090 - DNA, 100 bp, Homo sapiens
atgggctaataatgctggcaaagtggaaaaatgtgcgacttcacagagaatgcagttgtcttgacttcaggtctgtctgttctgttggcaagtaaatgca

SEQ ID NO: 512091 - DNA, 83 bp, Homo sapiens
cggcctacctcttcctctggcccgaagccttcctttatcgctttcagttttaacttctagtcatggcgaatgatcgcaggaga

SEQ ID NO: 512092 - DNA, 75 bp, Homo sapiens
cgggccacagagtggagacctgggatgtgaaggatgctattctgaaatacaatgtggcatattctaagaaatggg

SEQ ID NO: 512093 - DNA, 100 bp, Homo sapiens
ggcccgcacgggctccgggaagacggccgcttatgctattccgatgctgcagctgttgctccataggaaggcgggagactgcattgcttattgatccaaa

SEQ ID NO: 512094 - DNA, 73 bp, Homo sapiens
gcgtggtcatgcaaaatgaaaatgagaggaacttccacatctactaccagaaaatcactgtgctgatcgggaa

SEQ ID NO: 512095 - DNA, 90 bp, Homo sapiens
gaacctgtttctctgccacaagaaccaccaaagacatcaactagtcaggcagtcttccgtctccagtctggcatctgccatctcttccga

SEQ ID NO: 512096 - DNA, 75 bp, Homo sapiens
cgccgcttgtgctgcagccatgttggggcctcggtggatccagcaggtgtcaccatgatagatgctgtaaaaatt

SEQ ID NO: 512097 - DNA, 99 bp, Homo sapiens
ccgactacctcaacctggtgcagtgcgagacgctagagggctcctgcttctgggtggccgtgctggatggcaacgtggtgggcattgtggctgcacggg

SEQ ID NO: 512098 - DNA, 100 bp, Homo sapiens
ggaaaacatggcgtctgccctggagcagttcgtgaacagtgtccgacagctctcagctcaaggggcaccaccacgaggcgatttgtgggccataccaagg

SEQ ID NO: 512099 - DNA, 101 bp, Homo sapiens
agaagctggaggtcaacgaggccgagctgctgcggcgccgcaactttaaagtcatgatctaccaggcacagccaccacttcacttacattgtgggattata

SEQ ID NO: 512100 - DNA, 46 bp, Homo sapiens
gaagcattccgtgtgtttgataagggctctctaaatacgtacagat

SEQ ID NO: 512101 - DNA, 99 bp, Homo sapiens
agtacatgaagggacttgggatatttaattggataatagaagattgaagggtgcaaactgaacaatgaggacgcatggacacaggaaggggaacatcac

SEQ ID NO: 512102 - DNA, 75 bp, Homo sapiens
tgcagaaatcacattggaccctcctcccaactgtagggctaagttctaaaaacatcagttcatctccaagcgttg

SEQ ID NO: 512103 - DNA, 75 bp, Homo sapiens
aaaaactacagcaacaattcaatatggtgcacacacttcattcactagcagcatcactttctgcatcaatttacc

SEQ ID NO: 512104 - DNA, 100 bp, Homo sapiens
gaagttggaagtgtctcttagcagcgcgcggagaagaacggggagccagctttgaagatactgctataatttgaaaatttgaaattagtgtttcagctga

SEQ ID NO: 512105 - DNA, 101 bp, Homo sapiens
atcaaatagaatcaaaaagattgaaaatatcagccatctaacagagctgcaagagttctgggcaacagctgaacagatgcgtctcgctcaagtgatctttg

SEQ ID NO: 512106 - DNA, 50 bp, Homo sapiens
cgctgccgaaatgaagtataagatttgaggcttaagcaacttcttccggg

SEQ ID NO: 512107 - DNA, 100 bp, Homo sapiens
agaaacttgaggccatgttacaagagccagtcttggtgctctgtgttcacctggttcatctgaggagctgcatctaccctgcccatgccatagatcctgc

SEQ ID NO: 512108 - DNA, 75 bp, Homo sapiens
atcccaaatcctcgatttcagagattatttcaggattactacagcatcccatttcccacacccactactccgctg

SEQ ID NO: 512109 - DNA, 100 bp, Homo sapiens
gagtggaagagctcggggatctggctcaggcccacatacagcaacttagcgaagctgccggtgaagatggcgtggtgaccaagatgaagatgcagaggac

SEQ ID NO: 512110 - DNA, 100 bp, Homo sapiens
gggcagccatggccctccacagcccgcaggcctcctgctccacgacgtgaccatggccgggctgcaggagctgcgattccctgaggagaagccgctgctc

SEQ ID NO: 512111 - DNA, 100 bp, Homo sapiens
gaggattggaggtgtcagtgttaaaggaacctctacaacgaaggtgaagccacggaagataaggttagagcagccagcgggtacagaatggattttggaa

SEQ ID NO: 512112 - DNA, 76 bp, Homo sapiens
aggtcctccatgcgcagtcatgagtcgcttcaagtttatcggaagcagtcaattatagatttcttcaaaccagctt

SEQ ID NO: 512113 - DNA, 75 bp, Homo sapiens
gcagcctcgggtgcaatcctggagccccccagtgagggaacgtcaaggtcgtgggaaataaaaggcagttctaca

SEQ ID NO: 512114 - DNA, 101 bp, Homo sapiens
agcatcatcaaggacttcaccaagcagcttccccgggcgctgcctggacaggcctgcctgcgtgctgggacatgtctggcctccaaggaccgtcggtgggc

SEQ ID NO: 512115 - DNA, 90 bp, Homo sapiens
gctaagactccaggacacccctgaagccgagaaatgataacgaaggaggcccaacttcattcaataaggagcctgacggatttatcccag

SEQ ID NO: 512116 - DNA, 75 bp, Homo sapiens
cgggcgccatcaacgccacctacaaggtggatgtgatccccccatcttcccgggaagccagccgcccaccagagg

SEQ ID NO: 512117 - DNA, 74 bp, Homo sapiens
aggtgctgcaggcacagcccgagaaaccgcagcactacacatgttgtgactgtgacagactcactggggtttgt

SEQ ID NO: 512118 - DNA, 83 bp, Homo sapiens
ggcggcggcggagactgcgggcccgtagctgggctctgcgagaatcctgcttatctgtgaaatgcagttaacacatcagctgg

SEQ ID NO: 512119 - DNA, 82 bp, Homo sapiens
agacctcacctgcatggacttccactatgaggttcgagaacttgtcttggacaattgcaaatcaaatgatggaaaaattgag

SEQ ID NO: 512120 - DNA, 83 bp, Homo sapiens
catgggcagaggcgaagggctggtgggcgatgggcccgtggacatgcgcacctcacacaggtaaaagtacacctgtaagccag

SEQ ID NO: 512121 - DNA, 83 bp, Homo sapiens
gaagcccaccggtccccaacgcatcatgccagggagccaagcgtcctgcccggccgtggaagttaaacgagctgagcctcggg

SEQ ID NO: 512122 - DNA, 75 bp, Homo sapiens
ctttttcattggaggagaagaagggatggcagagaaggagggcatcctggctgtttcacccgtggacttgaactt

SEQ ID NO: 512123 - DNA, 80 bp, Homo sapiens
caggagaggagggaactgcggagcggatacttgccagaactaatacagctgatgaaatacctgaccttttctgctccagg

SEQ ID NO: 512124 - DNA, 122 bp, Homo sapiens
cagctacttaatcctactcagaagaacttgtacagagatgtgatgttggagaactatagcaatctggttttcttgggtgctggagaatctggtaaaagcaccattgtgaagcagatgaggat

SEQ ID NO: 512125 - DNA, 100 bp, Homo sapiens
ccgcctcccgggttcaagcaattctcctgcctcagcctcctaagtagctgggactacaggttcagcagactgtacaggatctttttggcagagccccaag

SEQ ID NO: 512126 - DNA, 98 bp, Homo sapiens
aggattccaagtaactcttatttgaatgttgtaccatctttgggtaggcagacttccctgacgacatcagtgatacccaaagctgagcagagcgtggc

SEQ ID NO: 512127 - DNA, 96 bp, Homo sapiens
gacaaagaagatggctgcttctatttcaggttatatcaatcagtgaaaattctatattcctttggcatttttgtgacatattcaattcagttctat

SEQ ID NO: 512128 - DNA, 100 bp, Homo sapiens
atcccagaaattggcaaatttggggaaaaaggaaacctcgacctgtctcccagttggttgcacagcaggttactcagcagtttgtgcctcctacacagtc

SEQ ID NO: 512129 - DNA, 122 bp, Homo sapiens
gtccggggcctgtcgcggttgccaagcgctcggcgcttggcgctggcgctggccaaggcgacaatgcagatcttcgtgaagactctgactggtaagaccatcaccctcgaggttgagcccag

SEQ ID NO: 512130 - DNA, 117 bp, Homo sapiens
gtttcttatatgtgatgccattccagcactggactcatggaggctgagcatttattcagatgaagtaaagaaggtcttagacaaattttacaagaggaaagaaattcagaaactggg

SEQ ID NO: 512131 - DNA, 100 bp, Homo sapiens
attctctgagggagcagctgcgtgagtggagatgctttcagtggtggagaatggactggacccccaggctgccatcccgagccgatgatgagcaccccac

SEQ ID NO: 512132 - DNA, 100 bp, Homo sapiens
tcccagatgatctatccctcctgaaactctaccctccaggggatgaggaaggatgaccggaaagaagggatgaccgcgtttgtggaaaagagaaaggcca

SEQ ID NO: 512133 - DNA, 115 bp, Homo sapiens
gtttgtactatcctcggtgctgtggtgcagagctagttcctctccagctcagccgcgtagggtgccaagtaccggggctccatccatgacttcccaggctttgaccccaaccagg

SEQ ID NO: 512134 - DNA, 75 bp, Homo sapiens
cagcagggccagcaggggcagatggcaagtggagacagcaatctcaacttcagattgtgttcacctattgaaaat

SEQ ID NO: 512135 - DNA, 100 bp, Homo sapiens
ctttgaggaaaagccagtttatatccaagacttagatgaggcggagtacgtccagcttgttactgaacttcgaatgacaagagccattcagcctcagatc

SEQ ID NO: 512136 - DNA, 76 bp, Homo sapiens
gcaggaacatggggggaccatatggtggagggccagtgtgccaaagtctcctccatcaacgacaagagtgactgga

SEQ ID NO: 512137 - DNA, 100 bp, Homo sapiens
tgagaggacaagcccagattccaaaacttatgtcaagtgtgtgtggtttcagcgcagcatggctgtggtcatccgtttgcaaggtctcccaattgtggcg

SEQ ID NO: 512138 - DNA, 78 bp, Homo sapiens
aaccgtctccagccttggtctgagtggactgtcctgcaggcattataaccactggatccaccatggtggagcacaatt

SEQ ID NO: 512139 - DNA, 100 bp, Homo sapiens
agggctgagcagtcaactcaaatgcaagtccaagaggaggaggaggcggaggtccaagcggaaagcgttgacagaaggctacgttggggccctgcacgag

SEQ ID NO: 512140 - DNA, 97 bp, Homo sapiens
cgcgaccgcctctcctgcccctcgccggtacctcagcaaggtgctggagaatctggtaaaagcaccattgtgaagcagatgaggatcctgcatgtta

SEQ ID NO: 512141 - DNA, 75 bp, Homo sapiens
tggtctgcagtggaacagtggctggagcagttattcttggtggagtaactaggggttatggttttgtgaaattca

SEQ ID NO: 512142 - DNA, 100 bp, Homo sapiens
ctagggacaaacctatcacatttactcagagctattctcaagctggaataactgagactgaatggacaagtggatcttcaaaaggcggacctctgcaggc

SEQ ID NO: 512143 - DNA, 80 bp, Homo sapiens
tgttcattgagtcatgggacctgccattaacgaaacaaaattaaggcagttctaacaattcagaaggagctggcggacat

SEQ ID NO: 512144 - DNA, 100 bp, Homo sapiens
atgccacacaacatgtacctgcattctgccttagtcaagaggtacttggaaggctccatcgcccctgaagacaaaggaagctgctcattgctgcctgggc

SEQ ID NO: 512145 - DNA, 50 bp, Homo sapiens
tgctcatgttctccttcgtcaacgaccgaacctaaaggcagacccagaag

SEQ ID NO: 512146 - DNA, 90 bp, Homo sapiens
ggggcggaggcggaggcagaggtggaggcgctttgaaaggttcagtgaacagcattttggacaggacatttggtgccaggtctgagtagc

SEQ ID NO: 512147 - DNA, 90 bp, Homo sapiens
accttcggatcatatctcatgaggctgtaggctccttcaacccgtggctgatagctgaaagggtgatcagcccatgacctaaacctccag

SEQ ID NO: 512148 - DNA, 75 bp, Homo sapiens
agcgacggcggaacccgtgggcctgtggactgcagcctcggcggtcagcagttcctccgtgtcacaaagcagtac

SEQ ID NO: 512149 - DNA, 100 bp, Homo sapiens
ctcaacttgaaggtcatttaaccaacctcagctttacaaaccctgaatttataactgaagatcagggaagatgtgccttggagaggaagcatgtcttaaa

SEQ ID NO: 512150 - DNA, 101 bp, Homo sapiens
ttccatttctaccttgtatgcctcaatttgctggatttaagcactgctgcactttatgagccagttcctgttgcacgaaaactatctgctcgggaacagcg

SEQ ID NO: 512151 - DNA, 83 bp, Homo sapiens
atcagagatctccgtcatcaacacaagctaatagcattgttctggaatcatcaccgtcaaagattctaaactgcctgcatata

SEQ ID NO: 512152 - DNA, 98 bp, Homo sapiens
aggaggaggggctccggctggtctgtggtgaggtatgcaaccactcatgtattcggttcaggaagcattaaatgccagaccatggtggattcgtatgg

SEQ ID NO: 512153 - DNA, 100 bp, Homo sapiens
tgaggaggaggaggaagggcatgagccgagcttgaggaatccgtgctccaaactctacactcaaggttctctacttaaaagacaatgactactgatgaag

SEQ ID NO: 512154 - DNA, 75 bp, Homo sapiens
gacaaaagcaacgacttcgtatggcccacccttcctccattctgagcacataaaaaccccacactcagccagact

SEQ ID NO: 512155 - DNA, 100 bp, Homo sapiens
tgaagctctgcgtgactgtcctgtctctcctcatgctagtagctgccttctgctctccagcgctctcagcaccaattgctgctgacacgccgaccgcctg

SEQ ID NO: 512156 - DNA, 101 bp, Homo sapiens
gacgcgcccggcgcccctgagccggccgagcggcgacggaccgcgagctaccaagatgaatgaactaatggagaaatagaaagtcttcagtgatggcctac

SEQ ID NO: 512157 - DNA, 100 bp, Homo sapiens
ctctatagccaaggaaggcttcgagaagattagcaaaggtgctaatccagtggaaatcaggagaggtctatcagtcttggaaatctgtcttataatagca

SEQ ID NO: 512158 - DNA, 101 bp, Homo sapiens
gatggatatcaggggtcacagacatttcatggggctccactaacagcctagatgatgaactggattctttccatgatttgaagaaacaggaaacagaagaa

SEQ ID NO: 512159 - DNA, 109 bp, Homo sapiens
cggacatgatcctcatcttttatacactcttagtgctgtccagatggcatctgagcgagaaggctctggaagttctggcactggggaacaaaaggaagatcaaaaggag

SEQ ID NO: 512160 - DNA, 75 bp, Homo sapiens
cttcctgctgctctgtctcagcgccgcctccctgcttcttaacaggatttggtgctatggagaaatttttggtag

SEQ ID NO: 512161 - DNA, 112 bp, Homo sapiens
ttgccatggctgctggaagaagtctcaaaaagctcccgactagagttgtggaaagtaaaaatgtagccctaccaaaaggaactattgtactggcttctccaggctggacaac

SEQ ID NO: 512162 - DNA, 50 bp, Homo sapiens
catgccgcttgctccggagaagtgcgagggctggaggcctggcagaatgg

SEQ ID NO: 512163 - DNA, 100 bp, Homo sapiens
ggcatcatggactgtgcgcccaagctgtgagccgtgagctttgaggcggtgggatgtgtcagcagaatgtctcctgcccccgagagcgaccccgaggcca

SEQ ID NO: 512164 - DNA, 90 bp, Homo sapiens
aaatgcaatcatattccgtgaatcatttgctgatgtacttcctgaagcagctgctctagtgaaacctcaggatatcattgtgtttgtaat

SEQ ID NO: 512165 - DNA, 100 bp, Homo sapiens
ccacactcattcgggttggacttgccggcgtcaccgccgcggacttcgctttgggccatgaccagctggagttgatcaaggatgatgaaaaagaggctga

SEQ ID NO: 512166 - DNA, 76 bp, Homo sapiens
tcccccgagactcgccgagcgccgttgctgagccctgcaaatagcaggcagctgtgcctcctgctgaatgcggaga

SEQ ID NO: 512167 - DNA, 100 bp, Homo sapiens
ctgctccggcccagcatggcgaccccgacccagacccccacaaagggagcctgattcgggaggatggggggccgggcactgagtgtcgccacctgcagca

SEQ ID NO: 512168 - DNA, 74 bp, Homo sapiens
ggaggcggaggtccaagcggaaagacaagttggatggcttgaggactggtactaaaaggaaacgtgactgggag

SEQ ID NO: 512169 - DNA, 75 bp, Homo sapiens
gtaacaatttacgcgccgtgtaactgtgaatctttcaaaggtaaaataccatgaagattttgaaaaaacaaaggg

SEQ ID NO: 512170 - DNA, 97 bp, Homo sapiens
acaggagggctggtgcctgctgctctgcctggctctatctggagcagcagaaaccaaggagaaggcagagcccccccaggctatgaatgccctgatg

SEQ ID NO: 512171 - DNA, 100 bp, Homo sapiens
tgcggggccctgaagcccccggcgggcgcgcgctgcgggacgcgggctccaaacgaatcctgcggtcccatgagattgtgctgccccccagtggacaagt

SEQ ID NO: 512172 - DNA, 100 bp, Homo sapiens
taaagaacgatcgtccagtggagatcctttcccggagttcagttatgggtgtgagaggtttgcaaggatttgtgggaagtacctgcccacatatatgtac

SEQ ID NO: 512173 - DNA, 98 bp, Homo sapiens
tgattttctggctgaagactattctctttgtgtatgtccaccacagttactttatcccttcatctgtggatgggcagatggagtctcgctgtgttgcc

SEQ ID NO: 512174 - DNA, 75 bp, Homo sapiens
gtacggccagatgtacatcaaggcctccggcagctatgcaggggagtacatcaagacctggcggccacgctactt

SEQ ID NO: 512175 - DNA, 83 bp, Homo sapiens
gatcatcctgctgggcttcgtccagatcgggaaggatactttctgagtgcctactatgtgccagcctgtgctaggcactgagg

SEQ ID NO: 512176 - DNA, 50 bp, Homo sapiens
gagaagtgctggaagctcatggacaagtgtggacgaatgtggaacctcgc

SEQ ID NO: 512177 - DNA, 75 bp, Homo sapiens
ggcagcatcggcacactgctcaatgttttgcacactagggaccaagaagccctcggggacactgctgagaaaaga

SEQ ID NO: 512178 - DNA, 100 bp, Homo sapiens
ggcacagcacgatcctggattacatcaatgtggtcccgacggctggccccctgggtacagaagtgcaggtggatgacatcaagcgggtctactcactctt

SEQ ID NO: 512179 - DNA, 75 bp, Homo sapiens
ccatgaatagttctactccttctacaggtgttatctatctgaaaaatatgataacacagtattggcctgatcgag

SEQ ID NO: 512180 - DNA, 49 bp, Homo sapiens
gggggcccgagaagcttcctctcagacccaacatgagtgaagtttcctg

SEQ ID NO: 512181 - DNA, 90 bp, Homo sapiens
ctactgtcacctgtatggataccagcagccccggaccccccgattcaccaacgagccctatgaaattggagcgatttgaaattccaatca

SEQ ID NO: 512182 - DNA, 88 bp, Homo sapiens
tagcaagtcttaggaaagctattccagaagaggacctaaagaaacgactaggctcagcaacagcctcaccaaggactccatgaatatc

SEQ ID NO: 512183 - DNA, 100 bp, Homo sapiens
gtaccatggaggatccttaccaaatgtgagccagctgcggagcagtgcgtcagagtttcaggttgaacaaattgaagcagggacaccaggccgactcaga

SEQ ID NO: 512184 - DNA, 75 bp, Homo sapiens
tgtggttgccggaagttgagcggcggcaatctttggcagccagacactacctaactccaatttatggacaatgaa

SEQ ID NO: 512185 - DNA, 82 bp, Homo sapiens
tactcaacaccaacatcgatgggcggcggaaaatagcctttgccatcactgccattaaggaaaaaacccttccctgccaaag

SEQ ID NO: 512186 - DNA, 100 bp, Homo sapiens
cagctatcgactgggcttactacaaggccaatgtggccaaggctggcttggtggatgactttgagaagaagctgtttgcagacaaggtcccaaagacagc

SEQ ID NO: 512187 - DNA, 75 bp, Homo sapiens
ttttgattatgcctttgatgactcagctcctaatgaaatggtttacagattagatgcaattgctcgagatgctga

SEQ ID NO: 512188 - DNA, 75 bp, Homo sapiens
caaattacgaaagtgctcccccatccccacagtataaaaaggtggcaatagtgcttcgaagactgagggagctac

SEQ ID NO: 512189 - DNA, 100 bp, Homo sapiens
ctccaatcgagcgtatgattttctgtacggtgcgttgtagaagacaagaactcaaaggtggcctggttgaaccgttctggcatcatttttgctggacatg

SEQ ID NO: 512190 - DNA, 50 bp, Homo sapiens
cgatttgaccaaatttctggaagagtgtactaatggtcacttgatgtgcg

SEQ ID NO: 512191 - DNA, 90 bp, Homo sapiens
ggaagccgaggggcaggccctgctgctggccaaggagaccctgactggatgtcatccaagtctccaagaagttcctgccaggcatggcca

SEQ ID NO: 512192 - DNA, 100 bp, Homo sapiens
agctgcctgaatttgcctgtatactctcgttctgcgacttataaaggaccagacaaatcaaattagtggttttggtccgtgtgaaaaaattcatgatgaa

SEQ ID NO: 512193 - DNA, 88 bp, Homo sapiens
cagcgccagcggccgagcgggcggcttcctggcctgggcgctccggtggcggcggaggtggtctttgggaagaagcttcctgcctttg

SEQ ID NO: 512194 - DNA, 107 bp, Homo sapiens
agagttgtgggccgccgtcggcagcaagaacagagagagaggtggacagatctgagagatactgaggctactatgtgggcatgtgccttgcggcttcagaaaagcgg

SEQ ID NO: 512195 - DNA, 82 bp, Homo sapiens
cggggaggagtgtgtgagaatcaaagagttttgcggcctccaggtggtggatccaatttttcattaggttttgatgaaccaa

SEQ ID NO: 512196 - DNA, 97 bp, Homo sapiens
gcaaaagcaaattgacacccgtgccgcgctggtggagaagcgccttcgctatctcatggacacagatgtcatcgcaacagataaagaagacgttgcc

SEQ ID NO: 512197 - DNA, 133 bp, Homo sapiens
ggacctacgaccgcgagggcttcaagaagcgggcggcgtgcctgtgcttccggagcgagcaggaggacgaggaaacccagcgtttgctggcagaaccagttcctggcatcaaagccgaaccagatgagagcaa

SEQ ID NO: 512198 - DNA, 135 bp, Homo sapiens
tgtctggaccagctagagaccctacagaccaggcactccgtcagtgagatggcctccaacaagaacccattaaaagagccagtaaatcctgtggaaaatggccttcagtgatcttacatcgaggactgtgcatct

SEQ ID NO: 512199 - DNA, 74 bp, Homo sapiens
tgcaaatgggcaacaggccagcagccaaagacacagcattgttggttttgccatgtactattttacctatgacc

SEQ ID NO: 512200 - DNA, 99 bp, Homo sapiens
ggacgaggcggcgcgggccgaggcctgggacagctaccgcagcatgagcgaaagctacacgctggaggaatttatcatggcatccagcattgaccacta

SEQ ID NO: 512201 - DNA, 83 bp, Homo sapiens
cttccgccaggcggtgatgaagaatccccccgaaaggaccccccagggggatatgagactttctactcggaatatcctgagtg

SEQ ID NO: 512202 - DNA, 115 bp, Homo sapiens
tccttgcggaaaggatgttggcggtccctgtgacctgtggagacacggccagatctgccctccagtgctgctacccccgtatgatgatgccactgtgaatggtgctgccaaggag

SEQ ID NO: 512203 - DNA, 90 bp, Homo sapiens
cccccagcctgtggacgcctggcccaccctgagtgagggccgctggagacccttcatcatcaggcccaccccctccccgctcatgaagcc

SEQ ID NO: 512204 - DNA, 83 bp, Homo sapiens
cagagctttcacgaaggcaccgacgtcatcatgctgaccaccaatcagatccgtaagataagaactccattttctgttgatgt

SEQ ID NO: 512205 - DNA, 100 bp, Homo sapiens
cctctgccctgaaggcctggggcgggaagaaggagaacctgaaggctgcgcaggaggagtatgtcaagcgagccctggaggtgtgattgcctatatcagt

SEQ ID NO: 512206 - DNA, 74 bp, Homo sapiens
gcccatcctgccttcaagtacctggcccgaggaacatatgcagcagaaaaaagaggaggaagaagttcttaaag

SEQ ID NO: 512207 - DNA, 100 bp, Homo sapiens
atttataccgctgcgctcaatgacagggaccaggggggcggcagcgctggacacccagcctccagtgtcagatcatataccctcgccagcagctgctgac

SEQ ID NO: 512208 - DNA, 82 bp, Homo sapiens
acgccctcatggggaaaatctccccggtgactttcagatgatgataattccgaagaaggcttccacactattcattcaggaa

SEQ ID NO: 512209 - DNA, 100 bp, Homo sapiens
agagtcgaagcagcagctctcgctccagaagcttcactttggacatgtattcctctgagaaaccttggacagcagattttggtttaatatctgattggga

SEQ ID NO: 512210 - DNA, 51 bp, Homo sapiens
gacatggtcatgagcttcgtcaacctcgtaagactttgaccccgacgcagg

SEQ ID NO: 512211 - DNA, 101 bp, Homo sapiens
aagtgcccttggacaaagcctgaaaccagacacgatgaggcgagtggtacgacagagcaagtttcggcatgtatttgggcaagcggtgaaaaatgaccagt

SEQ ID NO: 512212 - DNA, 83 bp, Homo sapiens
agctgtgctcgcgctactctctctttctggcctggaggctatccagctggggtgccgaggctcaggcagcatgacgacggaga

SEQ ID NO: 512213 - DNA, 100 bp, Homo sapiens
ctccagagggcgtcatctacccttccatctgctggccaccctgctgatacagtatgagcggctgcagggcgtacagtcttcgggggtcctcattatcttc

SEQ ID NO: 512214 - DNA, 83 bp, Homo sapiens
cccgaggccaggagccaggggcccagaaggtcaaaatgcagatcttcgtgaaaacccttaccggcaagaccatcacccttgag

SEQ ID NO: 512215 - DNA, 75 bp, Homo sapiens
aggacttctgcgcgcgggagttcgaggccctgcggagctgcttcgccgctgcgtctagagcatgtttggaaagga

SEQ ID NO: 512216 - DNA, 50 bp, Homo sapiens
cggcacgcgactccccccgggcccaaaccgcttacaaacacgcagatggc

SEQ ID NO: 512217 - DNA, 99 bp, Homo sapiens
cgactgcgagccgtcggaccctgagcaggagacgcgaaccaacatgctgctggagctcgcaaggatcaagaattggttaaaatagttggaatacgatat

SEQ ID NO: 512218 - DNA, 100 bp, Homo sapiens
agtgtttcaggaattttcacattccagaagaggcgtccttctttgcacgaaaaggcgacggcggattgacagaagtatgattggagagcccacaaacttt

SEQ ID NO: 512219 - DNA, 75 bp, Homo sapiens
actgctggagttcctgtccaggtcccagtcctatgaggatatgagaggaatcctgtatgcagccccccagctccg

SEQ ID NO: 512220 - DNA, 100 bp, Homo sapiens
actgataagaaaacacatctttacacactaaggtataatagactacattttctattctaaacctcagctgaacaccttaggcatcctgggccctctggac

SEQ ID NO: 512221 - DNA, 95 bp, Homo sapiens
gtacaccgtggtgacattgtatcattggtggtttgtggatgcacttagatgtttgcaatgagcactgtggctggcatgccccagtgttttggata

SEQ ID NO: 512222 - DNA, 83 bp, Homo sapiens
gaataacccgcccccagcgggatgtgaaggactccgggtgaggccggccacgccccgcacgatataacacgtgggaaccggag

SEQ ID NO: 512223 - DNA, 75 bp, Homo sapiens
cgaacggtattagcagaatacaatatgtcttgtgatgatagacgagttgtactgctgtcacaggaaatggacgct

SEQ ID NO: 512224 - DNA, 75 bp, Homo sapiens
agtggtggatcagaccaaagatggaaaccaatagagccatggcgactccctctgctgccttcgaggcccttatga

SEQ ID NO: 512225 - DNA, 90 bp, Homo sapiens
ccgggacccgccgccgccgcagccaccgccgccgccgccccagcggggaacactcaaagattagaacgactccgaaaagagagacaaaac

SEQ ID NO: 512226 - DNA, 100 bp, Homo sapiens
ggtggattgccgtcctgcagaacaatataatgctgggcatttatcaactgctttccacttagattcagacctggtgccgtgagcgatgtggagatgcagg

SEQ ID NO: 512227 - DNA, 83 bp, Homo sapiens
gctacgcatagaagccgggattgagcgcatcaaggcagttccggcgaggggggagcctcagcaggattgctgtgtgaaaaccg

SEQ ID NO: 512228 - DNA, 75 bp, Homo sapiens
gcctctcgaacgagtgtgggcgcgaggcaggaagcgagtcacgtcccagcgctgctccctggagtttctggaaga

SEQ ID NO: 512229 - DNA, 75 bp, Homo sapiens
ttcggagtacctgcgctatgaagacacgcttcttctggaagaccagccaacagggtgtgtccgcagccggccagg

SEQ ID NO: 512230 - DNA, 50 bp, Homo sapiens
ccccactcctgggccgtccctgaagattgaccctgctacgggaatggtta

SEQ ID NO: 512231 - DNA, 74 bp, Homo sapiens
gtccatcgtgtgcctgatgatcacgcagctggctggcttcagtggaccagtttaacaatgcatgcatcaattct

SEQ ID NO: 512232 - DNA, 96 bp, Homo sapiens
tgaataccagccactgcagatagagacatatggaccacatgttcctgagcttgagatgctaggaagacttggggtgaagaagctgaaggagacctt

SEQ ID NO: 512233 - DNA, 76 bp, Homo sapiens
cgccaggcggatctcagaaggccagttcaaaggacatggatttgattgacatactttggaggcaagatatagatct

SEQ ID NO: 512234 - DNA, 96 bp, Homo sapiens
ggaggatctcccacctttccaagcaaggccaggaggtggagccccctgagctgcccgctgatctgcagcactggatctcctacaacgaggccagca

SEQ ID NO: 512235 - DNA, 51 bp, Homo sapiens
tttggcagcatgaaagttagcaggggcatagatatggacgcatttcaggag

SEQ ID NO: 512236 - DNA, 80 bp, Homo sapiens
ggaaaacaacttcgagggcagatcaatgatgaatctggtcgagattctgaagtcagtgccagggagcacatgagttccag

SEQ ID NO: 512237 - DNA, 129 bp, Homo sapiens
gctgtttgtggcacagatgggaaaacatatgacaacagatgtgcactgtgtgctgagaatgcggctttctgggaattgtcttgacagagaacctcagctggacaaagcagccttgatctgagtgagcta

SEQ ID NO: 512238 - DNA, 100 bp, Homo sapiens
gctctttgtatttcccctgctcctcctccttttggagtcagaattggactttcaagccactgactaggaaaaattcctgggaaatctctgcatttgtgtc

SEQ ID NO: 512239 - DNA, 97 bp, Homo sapiens
aagacgagggagaaatgttttgtttgactccagtgttaagagaagaaatgaggacatatcagtatcgtgttttaactcaaatgggtgatgaaaagga

SEQ ID NO: 512240 - DNA, 96 bp, Homo sapiens
agggcccagcgcccctccccgaccgtcacggggtcgccctgccgcccccgacccagcgaacgccccggcaggttcaactactcaatttcatgctgg

SEQ ID NO: 512241 - DNA, 96 bp, Homo sapiens
gagcctgaggaagctgaagcagaggtttcccaggtttatgtgagattaagaccatttttcagggaattcctggaacgaatgtctcagatgtatgag

SEQ ID NO: 512242 - DNA, 75 bp, Homo sapiens
aagaaagatagtcagaacaagactttacttaaaaccctggcagaattgtggctccctagcacggcccgcaactgt

SEQ ID NO: 512243 - DNA, 100 bp, Homo sapiens
tcaccctcaaaagaagatgacagcccgcagagagttaacttctgtttacatggaactcagacatctgcaaatcatggatcaagattataggaccggccca

SEQ ID NO: 512244 - DNA, 75 bp, Homo sapiens
tcctagagtgtcggagggaactaatggagataggaacaggtggcacatgtcagtggaagatatgtggacttagtc

SEQ ID NO: 512245 - DNA, 83 bp, Homo sapiens
tggacggcgagcgcgagcggcgcgagaaagtcccgcggcagtgctggtggccatggttcccgtagccagaaggagttgcccac

SEQ ID NO: 512246 - DNA, 75 bp, Homo sapiens
ttcagaatagaaaacactctgaaaagatggctaaattagccttcaacaattggatccatggctttgacagaaggg

SEQ ID NO: 512247 - DNA, 100 bp, Homo sapiens
tggacatgtcagtgtcctttcacacccatgtgaaagaggtagaagatgacggtgaaatgttccacacactggatgatggccacacaagatttacagatct

SEQ ID NO: 512248 - DNA, 100 bp, Homo sapiens
agcctacctggttgtagaggaccatgcgcagggaggtacgacttgggagaaatggggtggaagaaatcagacagcatcctttctttaagaatgatcagtg

SEQ ID NO: 512249 - DNA, 75 bp, Homo sapiens
gtttaacaagcggaaatccagagttggcgtgcacagtgtcatgaagcacgatgccatcatggatggagccagccc

SEQ ID NO: 512250 - DNA, 98 bp, Homo sapiens
agaaaacagctctggaaaatgacagccttcatttctctgaacatactgccttatgggacagatcaaagtcctttgtcatggataaaaggcttgaaatg

SEQ ID NO: 512251 - DNA, 98 bp, Homo sapiens
tatgagctggataccagtggtttaggtgtaatcctgagagattcacatggtgttgcacaagtacgttttgtgacaggcaataaaattttaagaattct

SEQ ID NO: 512252 - DNA, 75 bp, Homo sapiens
acctccacgattccagcggcagcagggatctgaaacttgcccacccttcgggatattgcaggacgctgcatcatg

SEQ ID NO: 512253 - DNA, 90 bp, Homo sapiens
cgacagagctgcagatttcctctcggagcctgagggaggcccagcccctgtccctgccttacccagcaagcttcccacgtttggagcccc

SEQ ID NO: 512254 - DNA, 100 bp, Homo sapiens
aatgctgtccaaacttaaacatggttcgaggtgttggaacaggaggaattgtttctacagcattttgcctgttatacaaattatttaccctgaagttaac

SEQ ID NO: 512255 - DNA, 98 bp, Homo sapiens
cccaccggaggttggaaatgtggctgtgaggtggggtacatttaaattcaaagcagaaagcgaccttttccttgctgagcatcacaaacttttattgt

SEQ ID NO: 512256 - DNA, 75 bp, Homo sapiens
cctgatttcacagtccgagacgtcaaactcctagtggattgctcatttagaaagtggatgtgtgggataacatgt

SEQ ID NO: 512257 - DNA, 50 bp, Homo sapiens
tccctgtacagggtttccgatctgtgcttgccttgcgccatggactggca

SEQ ID NO: 512258 - DNA, 80 bp, Homo sapiens
gaagcagccgatccagcctgcggagcctgtggggcaggataagttctgaacgtcgaaaagaaaagtctcgagatgcagcc

SEQ ID NO: 512259 - DNA, 114 bp, Homo sapiens
cttttccgttgccggtgccggcctagcgtcctggaattacttcaatcaagcttattgtgtaacagaacctggagcaggctctgatgtagctggtataaagaccaaagcagaaaa

SEQ ID NO: 512260 - DNA, 90 bp, Homo sapiens
aaagccatacttgttttctctggggtatgattctaatatgtgtgatttggaaggaatcatgccaaatgttaccatcagcttgagtctccc

SEQ ID NO: 512261 - DNA, 100 bp, Homo sapiens
attttataccaacgttgagcaagatgcagaaaccaacagacaatgccaatttacgtgtcattatggaactacttatgagaaatggcaggatattattaag

SEQ ID NO: 512262 - DNA, 100 bp, Homo sapiens
gctgtttcgggccagcgacccgctgctcagcgtcctcatgtggggggtaaaccactcggcctccccatggccacccatggaccagtcggcattcacttcc

SEQ ID NO: 512263 - DNA, 98 bp, Homo sapiens
cgcaaatctggaagcggatcgcgtggagtgacggtcacaccgcggcggtccttttggaataaatcatgggattgagcttcattcagatgtggtggaat

SEQ ID NO: 512264 - DNA, 83 bp, Homo sapiens
ctctggaaaaacttcttgccaaccaaagccaaagaatgcgaagcaaccagagcgtgaagaaaagcgggttttgggtctggtgt

SEQ ID NO: 512265 - DNA, 100 bp, Homo sapiens
aaggactcacagtggctgcaagtgaatggtagtgtctagaaagggtatgtcccttcaagagagaggtgccaatgtccaaccggcctaataacaatccagg

SEQ ID NO: 512266 - DNA, 113 bp, Homo sapiens
gagaaagtttcaagatcttctgtctgaggaaaatgaatccacagctctaccccaggttctagcccagattcctctctttggtgctgacactattggccagagaagtcctgatg

SEQ ID NO: 512267 - DNA, 74 bp, Homo sapiens
gcacataacggggttcgggtgtctcgtgtgtgaacatcacaggacaaggtggagcagacacctcgcagtcaaca

SEQ ID NO: 512268 - DNA, 83 bp, Homo sapiens
ggtgatgcccacccgggcgagaaaggacgagattgaggagctgcgggccgagatgctggagatgcgggacgtctatatggagg

SEQ ID NO: 512269 - DNA, 83 bp, Homo sapiens
caagttcacccaacataactttcaagagatagtttctaatggtgatgaacaattggaaaaagccatggaagagattttgagag

SEQ ID NO: 512270 - DNA, 98 bp, Homo sapiens
gcgatcttaagcgcgcatctgtggaaacaattaagaatacggggtgctttgcattcaggaatacagaaaaaacagcaaagtggagtcaagtacacgta

SEQ ID NO: 512271 - DNA, 100 bp, Homo sapiens
tcggtgccagcggccagagggaggtggtggccgactccgtgtgggtggacgtcaaggactcctgcgtgggctcgggctgcggacagcctggacacctgcc

SEQ ID NO: 512272 - DNA, 100 bp, Homo sapiens
gagtcgggatccaacctctcagacagcggctctgtgaagcggggcgaaaaggacctgcgcctgggggaccgcgtgctgctgaagaaacacttaaattctg

SEQ ID NO: 512273 - DNA, 98 bp, Homo sapiens
cagagtgtaatgctgtccgccaggccctgcaggacctgctttcggagtacatgggcaataaaaaagcttggccagaccacaagcgggaatgcaaatgc

SEQ ID NO: 512274 - DNA, 50 bp, Homo sapiens
ggcgcccttagcgacaccatggtatcgagaaccttccctgcgaacttcag

SEQ ID NO: 512275 - DNA, 134 bp, Homo sapiens
aaggagttcatgtgggccctgaaaaacggagacttggatgaggtgaaagactatgtggccaagaataatcatgggccagactgggaagaaatctgagaagggaccagtttgttggcggaagcgtgtaaaatcag

SEQ ID NO: 512276 - DNA, 50 bp, Homo sapiens
cgggcgcccgaggggccgagcgaggttactataacaacagtaccaaggtg

SEQ ID NO: 512277 - DNA, 100 bp, Homo sapiens
ctggggttctgagactccctgtcccggaccgcagcttcagatgatgaatttgagaatcttagaattaaaggccctaatgctgtacagctggtgaagacca

SEQ ID NO: 512278 - DNA, 90 bp, Homo sapiens
tcctcgcccccctctgcaacgggctcatcaactcctacgaggacaaaagcaacgacttcgtatggttttgcactgattgcaaaaataaag

SEQ ID NO: 512279 - DNA, 83 bp, Homo sapiens
gacggattcatttagagctgcggaacaggacgccctctgatcaacagtatcaaagtgctctattttgggcagataaagtagct

SEQ ID NO: 512280 - DNA, 113 bp, Homo sapiens
ctggaagcagtgagctaggtgttcccgagcagcctgacctccaggagaagcggctgagtgccgagtctggcctgagtgaagactctcgcccatctgccagcacagtctctgag

SEQ ID NO: 512281 - DNA, 101 bp, Homo sapiens
accactgcaacagtaatgtgtttgttcgtctgctgagactcggctccaaggtcacagctcgtaacactggaatgaatctgaagtctgctgcagtaaaacac

SEQ ID NO: 512282 - DNA, 75 bp, Homo sapiens
tcgtgcacattcacaccccagcaggggctgcgtatctttacgcgttcagtattgttcccatgaagctaatggatg

SEQ ID NO: 512283 - DNA, 100 bp, Homo sapiens
gagccggtgcagtacacacactggaacacacaccagccgcatgatggtggtgctaccccagtacaggatgaacgggattcagggtcagacggtgaggatg

SEQ ID NO: 512284 - DNA, 100 bp, Homo sapiens
gcgggccagcctcagcaccgacagccgacgcgcagatagcagagccatccttgggggaactgctcgcagaaagaagaaggtggttcatagaacagccaca

SEQ ID NO: 512285 - DNA, 100 bp, Homo sapiens
aggaagagcaaagctgtcctaggccaaccagagattcatctttcatgcagtgacatgttgataaaaaatgatggttgtatcagagtaagatggacggtag

SEQ ID NO: 512286 - DNA, 75 bp, Homo sapiens
gtacctctgcatgggcgccgacggcaagatgcaggggctggacttgctgtgctcagatcctccattcaagagagc

SEQ ID NO: 512287 - DNA, 54 bp, Homo sapiens
cgacgatctccatatttcattgcaaggtatcttgcaatatattcagaactctcc

SEQ ID NO: 512288 - DNA, 100 bp, Homo sapiens
aaaatgaagatgatgtagacactggactattagctcactgatgatgtgaagaaggagaaagagaaggagccagagaaacttgacaaactggagaactctg

SEQ ID NO: 512289 - DNA, 100 bp, Homo sapiens
cgccatcgttgctgccttcttcgtcaaggctggctacagcaaacatcattcaagatgtccagcaaagggagcagcacagatggcagaacagacttagcta

SEQ ID NO: 512290 - DNA, 90 bp, Homo sapiens
caaggaatcaacatttaccgaaagccacccatctacaaacagcatggatatgctgcaggctgctagtcattatcgccaaaatagaaactc

SEQ ID NO: 512291 - DNA, 89 bp, Homo sapiens
gaaattgaaattacctccgagggaaacaagaaaacatcaaagaggtctagcaaaggtctctaattaacagaagatggcaaagcccagcc

SEQ ID NO: 512292 - DNA, 83 bp, Homo sapiens
cggcggaggacgcgcccggcgcccctgagccggccgagcggcgacggaccgcgagaaaccaaggtgtatgttggtaacctggg

SEQ ID NO: 512293 - DNA, 50 bp, Homo sapiens
cttcgatctgcttctgatgaaatcaagagactgaaatctcatccttctat

SEQ ID NO: 512294 - DNA, 90 bp, Homo sapiens
aaacaaccgtgggagccgtcacagtgacacacaaacaacttacagacttccacaagcaagtcactagggcggcgactggcggcgcgatgg

SEQ ID NO: 512295 - DNA, 98 bp, Homo sapiens
agacatgggagacccggggtcggagggcatccgcttcgatcctgaaattccgcaaacactacgactagagtttgctaaggcaaacacgaagatggcca

SEQ ID NO: 512296 - DNA, 75 bp, Homo sapiens
ccagagaaaaatcggcagatgttacagctgctcatgaaccacttggcaaatttcaccaggtgatatggatcggac

SEQ ID NO: 512297 - DNA, 75 bp, Homo sapiens
ctcgtattctcctgcccttccccaggcatgaatgctttacagttgcagaacctggcgacgctggctgctgctgca

SEQ ID NO: 512298 - DNA, 100 bp, Homo sapiens
ggcgggctgcgcggagcggcgtcccctgcagccgcggaccgaggcagcggcggcacctgccggccgagggctgcccttgagatggagttgctgcctcttt

SEQ ID NO: 512299 - DNA, 100 bp, Homo sapiens
gcttatggcggcgctggagagggggcgctgagctgttggggactcaagcacagagggttcggaaaccgcgttgctgcacggggccccaggggctgcttcc

SEQ ID NO: 512300 - DNA, 100 bp, Homo sapiens
catggacatctttgatatgttttttggaggaggaggaaggatgcagagagaaaggagagactccctgcgacaaggactgtgtactgcatgaatgaggctg

SEQ ID NO: 512301 - DNA, 100 bp, Homo sapiens
gtcgccggccgcggtggcggcgctgccgcctgaagtgcgggcgcagctggcggagctggagctggagctctcggaggagatggtggccacacagcaggag

SEQ ID NO: 512302 - DNA, 98 bp, Homo sapiens
cacatgacaatctctctccaccttttgtcaattccagaatacaaagttggagtcagttagctgctatgcactgtgttatgctgccagacctactggga

SEQ ID NO: 512303 - DNA, 82 bp, Homo sapiens
cgcgagcacagagcctcgcctttgccgatccgccgcccgtccacacccgccgccagatcctgcaaaagttccaggtgcccac

SEQ ID NO: 512304 - DNA, 80 bp, Homo sapiens
tcaagcactctgcccacctcagcctccagagtagctggaaatacaggctctgcagaacattgctgccatcagcctggcca

SEQ ID NO: 512305 - DNA, 73 bp, Homo sapiens
gattccaagtaactcttatttgactctcttgagcctgagggatccattacagtttcaatgggtattgactttt

SEQ ID NO: 512306 - DNA, 80 bp, Homo sapiens
gcgcgatgcgtcaagtacactgaaattcatcctgagatgaggtcagcccaaggccaaccccactgtcactctgttcccgc

SEQ ID NO: 512307 - DNA, 100 bp, Homo sapiens
ggctgaattctgactcagccatttactaactgtgtgaccttagatttagccaggtggcaatcatgagtgaatggatgaagaaaggccccttagaatggca

SEQ ID NO: 512308 - DNA, 100 bp, Homo sapiens
cttccggcagctcctctgaggtctcctccatcaactccgacctggagatagtgtgtgtaccatatcagtggcgtgtaactatgctcatcattgttcttgt

SEQ ID NO: 512309 - DNA, 50 bp, Homo sapiens
ctaaagcagcgtgcgttcagccctggggtgtcttcaaaaacaaacatatt

SEQ ID NO: 512310 - DNA, 92 bp, Homo sapiens
cctcgggtctcgggggccgctctgggatcccggccaccagcaattgtccgtaaatggggagcaggagaaccgagtgcagaagggaaatggat

SEQ ID NO: 512311 - DNA, 75 bp, Homo sapiens
ctctgatgctgcccacacaaaccatcagccaaggggccattgaaaagcaaaccagtccagctacgggggcccagc

SEQ ID NO: 512312 - DNA, 75 bp, Homo sapiens
ccggtttggtgttgcggcgcccaccttcgggaggatcagcgaacacttgccaagtatttcaatccttgctatgcc

SEQ ID NO: 512313 - DNA, 82 bp, Homo sapiens
gctgagaaaagcgagaccgcgtgcgaggaccgcacatacccccggcctcatgagtacctgtccccagcggatctgcccaaga

SEQ ID NO: 512314 - DNA, 97 bp, Homo sapiens
gcatcgtgattatctcgagcaaattaagcactattgttctctggggccggactgagaaatgcctgaaggagacgacggaggagatccggcagatggg

SEQ ID NO: 512315 - DNA, 100 bp, Homo sapiens
aggaggggccccagcagcccccgaaggccctatcaggacatggagtatgaaagacgcccaggatggtgacaagttgctggaaggtgacgagtgtgcaccc

SEQ ID NO: 512316 - DNA, 100 bp, Homo sapiens
ggacccatgaaccagccgggcggcgcggcggctccgcagagccatcctcctcaaggtgcgagacatggtcagcagccatgtggagcgagtgtttcagatc

SEQ ID NO: 512317 - DNA, 100 bp, Homo sapiens
gcgatgttaccattgtgaaagaaggttgggttcagaagaggggttgtttttcaccattcagaacattgcctgaagcaggtccaccatgccgttagtaacg

SEQ ID NO: 512318 - DNA, 82 bp, Homo sapiens
cgagccgggatctcaggtcctcgggggcggcggccacgccaaggacgggctactgcagcactggggtgtcagttgttggtcc

SEQ ID NO: 512319 - DNA, 51 bp, Homo sapiens
gcagaagcagccaaaatggatccccagtggagatttcttctatcttacagg

SEQ ID NO: 512320 - DNA, 75 bp, Homo sapiens
ttggaggctggcagcgaagaagatcgaaaattaaacctcagaaatcgagctatagcagattatcttcgttcaaat

SEQ ID NO: 512321 - DNA, 83 bp, Homo sapiens
aaattccagtccaagtatgagccccggagccacatgatggacgtccaggtcacagctctcatcaagctgaaggagtgtgagga

SEQ ID NO: 512322 - DNA, 90 bp, Homo sapiens
tagcggggcaggcctctaattcaccgcaggatttccgcctcttagcaatgcataccacgagttagcacaagtgtattcaaccaacaaccc

SEQ ID NO: 512323 - DNA, 74 bp, Homo sapiens
tcgggagccgcaaggcgagagctgcaaaggcaattaagttggaatatgcaaggttggttaagttggcccaagaa

SEQ ID NO: 512324 - DNA, 75 bp, Homo sapiens
caacgtgaacctggcatatctgggcgccaagccgcggagcctccagacggtgtgcaggagaagagaattgggtgg

SEQ ID NO: 512325 - DNA, 75 bp, Homo sapiens
ggtcatttctcccttgttggtttgggatttgaagaacacgagatccttcctcaagcccctgctaatgctcatctg

SEQ ID NO: 512326 - DNA, 83 bp, Homo sapiens
cggaaagagtgcatctgtagatgctgaaaaatcaatgctgtccaaacttaaacatgatggactcaccctgtcacccaggttgg

SEQ ID NO: 512327 - DNA, 100 bp, Homo sapiens
ctttgaccgagacagtctgcctgggggaatggtctggggagaatgtaatcattccttccacaactgctgcatgtccctgtgggtgaaacagaacaatcgc

SEQ ID NO: 512328 - DNA, 97 bp, Homo sapiens
ttgtcgccagaaggaagatggcggatctggaggagcagttgtctgatgaagagaagggaaaaggaacaaactgcgggtgtattacctgtcctggctc

SEQ ID NO: 512329 - DNA, 98 bp, Homo sapiens
aaagagcaaagataagaagagaaaaagagaagatgaagaaacccagcttgatatgttgggaaacagaagtacctgtgcgccagcagaaatgattgcac

SEQ ID NO: 512330 - DNA, 135 bp, Homo sapiens
caagataattgaagttggtgacaccccaaaagaccgagctctcttcaacggagcccaaaagtgaaaggcagactacaagttactgagcacctccctgagaaaattgaaagtagtttacaggaagatgaacctgag

SEQ ID NO: 512331 - DNA, 83 bp, Homo sapiens
cgcaaaaggacagtaaactgtggaccttgaagttagcaggtcttctcagtacagcatggtggctggggcaggccgagagaatg

SEQ ID NO: 512332 - DNA, 97 bp, Homo sapiens
gggactatttcctctgccagtttccatcctcaacaattccacgaagctgccgcccatgctgtcgccaccctggctgaggccaccttacaaggtgggg

SEQ ID NO: 512333 - DNA, 75 bp, Homo sapiens
gcgctgcggagcgaacctcacctttccagggcgcaagagagattctccctgagaaacaagcagaattttttgaac

SEQ ID NO: 512334 - DNA, 80 bp, Homo sapiens
cggggtgtacttgggaacgaggggtgaagcggcccagctactacccacagatggcatgatccgaaaacactctcatgtca

SEQ ID NO: 512335 - DNA, 98 bp, Homo sapiens
aagaacaagaagttgagaccgagaatgtggaaacaggaaaaaggcctgtgtcatatcaacacttatctaacagcatggcacaaaagagaaactatgag

SEQ ID NO: 512336 - DNA, 75 bp, Homo sapiens
ctccggtacaggttgaggctactaagattctgcgggacacgggggtgtttgagcacacctggaaggagctggagc

SEQ ID NO: 512337 - DNA, 80 bp, Homo sapiens
cctatgacaatggactggcacagggagctggacttgaatctcatgcatgtaccttccacattgagtattcagaaagaagt

SEQ ID NO: 512338 - DNA, 98 bp, Homo sapiens
tacctctcatcattgtgttaatggtgaagcacagcgattcccagttctaaagttcctgttgcttcagacaatggatgagcaatcacaaggaatgcaag

SEQ ID NO: 512339 - DNA, 88 bp, Homo sapiens
gttccttccgctagtgatcctttgcaccctgcttggagacggacttgcttccgatccagaagcagcaaggtctagcaattccaaaatc

SEQ ID NO: 512340 - DNA, 100 bp, Homo sapiens
cttatggcggcgctggagagggggcgctgagctgttggggtcatgatgatgggcagcgcccgagtggcggagctgctgctgctccacggcgcggagccca

SEQ ID NO: 512341 - DNA, 74 bp, Homo sapiens
cgaaaacgcaaaggaagtgattcagacccatcccactaatggcagcattagccgctgttgggcctcctaatcct

SEQ ID NO: 512342 - DNA, 75 bp, Homo sapiens
ccgcgtttcagccctagggaagttgcagagtgggcaggatcttaagacccgataggtgcagaacccatctggaca

SEQ ID NO: 512343 - DNA, 80 bp, Homo sapiens
taacaccctgtaacagctgaatgttctcaaatagtgatgaagctgtaatcaataaaaaacttcccaaagaactcctgtta

SEQ ID NO: 512344 - DNA, 95 bp, Homo sapiens
gctgaagagcgacaagccgctggcagccgcggatctcaccgccgctcaggaatagcctaacatggcagaccagagacagcgctcactgtctacct

SEQ ID NO: 512345 - DNA, 51 bp, Homo sapiens
tcgctaccttgtgcagcacaacatggtaatcatggccacaaacagagcaga

SEQ ID NO: 512346 - DNA, 75 bp, Homo sapiens
aaagctgcacggcagtctgtttatgagctgtcggaaaaggtaacagaagatggaactcgaaatcccaatgaaaaa

SEQ ID NO: 512347 - DNA, 50 bp, Homo sapiens
gagcaccacgccgaggccacgagcttacaaaacactacacagcaaaataa

SEQ ID NO: 512348 - DNA, 98 bp, Homo sapiens
gctttgcagcggggacttcggcggcggcgcctcaggcacctcggcccgggtagtaaacctattgatggcaattttgctgactgtggaagtgactcatc

SEQ ID NO: 512349 - DNA, 75 bp, Homo sapiens
cgggaagagaagatcatcgagcatttcaaacgaaaaatggctacaaacttcctagcacatgagaagatctggttc

SEQ ID NO: 512350 - DNA, 98 bp, Homo sapiens
aaaccgccaacacagacgagcctttcttatttctttactcaacctctttgatgacacagcaagtggcacagaagatctccggactgaacgattacaaa

SEQ ID NO: 512351 - DNA, 100 bp, Homo sapiens
gtgccgtggagggcctcgccatgtcctgctgcccgagtacccaaaggcaagtggaacagctctaatggggttgaagaaaaggagacttgggtggaagagg

SEQ ID NO: 512352 - DNA, 50 bp, Homo sapiens
gcaactcccagctcaatgcaatgcattcctgggagatggtcgggaagaag

SEQ ID NO: 512353 - DNA, 100 bp, Homo sapiens
gatcctctgaagaggttcttcagtcataccctgactcagatactcactcacagccctgtgctgaaagtcctcatcaccgggggcatcgtggccacagctg

SEQ ID NO: 512354 - DNA, 100 bp, Homo sapiens
ctggtggcgttcgggccgcacccgcgcgactcggtgaaatacctggagtgctcagctctcacccagagaggcctgaaaaccgtgttcgacgaggccatcc

SEQ ID NO: 512355 - DNA, 51 bp, Homo sapiens
gatgttcctgtggaccccagtccagatgagactgatcgtggggttgaccaa

SEQ ID NO: 512356 - DNA, 51 bp, Homo sapiens
gccgcgcagccctcggagcacgatgccatggacaatattaccaggcagaac

SEQ ID NO: 512357 - DNA, 83 bp, Homo sapiens
ctatacacagccatgccccttccgattgggagggacaaggctactgcagcactggggtgtcagttgttggtccgacccagaac

SEQ ID NO: 512358 - DNA, 76 bp, Homo sapiens
tctttggagaatgatatcaaaccagaatgttttaaaggaagttgggctactcacaagttactacataagaaagcaa

SEQ ID NO: 512359 - DNA, 100 bp, Homo sapiens
gtcggtggagatcaacggcatcatgtacacaggtctccaccgggaaccttctggtcatcctgagtcgacactaccaggacgtctcctgccttcagttcac

SEQ ID NO: 512360 - DNA, 97 bp, Homo sapiens
atcttgaaggagatgtacgatgcagaccttttagaagaagaggtcatcatcagctggtcggaaaagattgtcaaaagagtggggaatggtgaggaaa

SEQ ID NO: 512361 - DNA, 82 bp, Homo sapiens
cacaaagaagtgtcctgcttggtgcctgaatctaaccagaagaatcttcctaaatactatgacaattgtccatttttcttct

SEQ ID NO: 512362 - DNA, 75 bp, Homo sapiens
gtcagaggggtgaccagagagcccaacgcctggtgctcaagactttctccgagaggctgataaaataccagtaat

SEQ ID NO: 512363 - DNA, 74 bp, Homo sapiens
ggggaaaccccgtaaagtggttggttgcagttgtgtagtagttaaggttgactatagtcaatggggccaatgga

SEQ ID NO: 512364 - DNA, 100 bp, Homo sapiens
gccagatccagcgcctcgcccagggcctcctgctgggacaccaccacccacggccagacacttccaggagcttcctggggcgctggttcagcgcgggcct

SEQ ID NO: 512365 - DNA, 90 bp, Homo sapiens
ttgtccagtgtttgatggactctttgagttttgtcagctctcaactggcggttcagttggttgaggaacaggttagcaccactgagagag

SEQ ID NO: 512366 - DNA, 100 bp, Homo sapiens
ggcacaggtggcccgatcccagcaggacattgaaagggccctcatctttgtgtcccatggagccggagagcacagtggccgctatgaagagctggctcgg

SEQ ID NO: 512367 - DNA, 100 bp, Homo sapiens
atcccccacggtccacgataagatggtctcgaagtgctgcagctaaaactcatacaactgccttggctgggcgaagtccttcccctgcttcagggcgacg

SEQ ID NO: 512368 - DNA, 80 bp, Homo sapiens
agagctatttcttcttttggatttgcgaagaacatgcggttttcaggtcatcatcagatttgaaatatttaaagtggata

SEQ ID NO: 512369 - DNA, 83 bp, Homo sapiens
actggccatcgtgcccctcctcacagagctctgcattcagcacattatcaggaacttccagaagggagaaccgaagattacag

SEQ ID NO: 512370 - DNA, 99 bp, Homo sapiens
ttgcattctgtgcatttgggcaaaatgagccaattcttctgtatatttacgatttccatgacaacatctggggaagatgtacgagacttcacaaaggta

SEQ ID NO: 512371 - DNA, 98 bp, Homo sapiens
gacagatgatgggccattactggttcctcgagtaaaagtggcagaagatggttccattattttggatgaagaaagccaggcccacaactcctctttct

SEQ ID NO: 512372 - DNA, 75 bp, Homo sapiens
cgggctgaagcgactgagtccgcgatggagctcatgatggagcagtccaagaagtcctccctcatggtggcccgc

SEQ ID NO: 512373 - DNA, 100 bp, Homo sapiens
cagtatgtttagcaagcactgctatgaagactgagaattgtgtggccaaagtacttggaaaaatggacaaggattgtgaaatgaaacgcaccacactgga

SEQ ID NO: 512374 - DNA, 83 bp, Homo sapiens
ttccctgaccctgccctccctgcgagaactccagtccgggctccacaaagggcgcgagtccctgtgaagcaggaagagtgagg

SEQ ID NO: 512375 - DNA, 75 bp, Homo sapiens
gaaattctatttgaagaataccagtttcaagcagtattaagagtaaatggtgagccgttctccaaccctttggcc

SEQ ID NO: 512376 - DNA, 98 bp, Homo sapiens
atcaagggaatgaacttcacaaggcgacaggaagaagggtattacagccgcctggaagccgagaggcgcagacagcacgacgaggcggcgcgcaggtt

SEQ ID NO: 512377 - DNA, 75 bp, Homo sapiens
acggagctaagagatatctgcaatgatgtactgaacaagccttaccagtggcttcagaggaagaacagcaaaggc

SEQ ID NO: 512378 - DNA, 71 bp, Homo sapiens
catcttggatccgcgggacaagaaaattcatgcgaactgggaatccctgcctctgtggatctagtgagcag

SEQ ID NO: 512379 - DNA, 76 bp, Homo sapiens
atccagcctgcggagcctgtggggcagaacactatggctatgcatcctccaacgtcagccccgccctgccgctccc

SEQ ID NO: 512380 - DNA, 76 bp, Homo sapiens
tttgcctttgttgattaactggacaaattcagattgtgggattagtgatatgcttttctaaagagtagaaaagtcg

SEQ ID NO: 512381 - DNA, 100 bp, Homo sapiens
gtgaaatatctgaatctacccccgtggaacatccgtacccttccgaagagcagaagaaacagttagcgcaagacacaggacttacaattctccaagtaaa

SEQ ID NO: 512382 - DNA, 75 bp, Homo sapiens
caccatgggccgggatcacattctgattcattactctactgactggcagagacaggagaggtagatgtccacgcc

SEQ ID NO: 512383 - DNA, 101 bp, Homo sapiens
catcgaaaagattgatttgcttgtttcattgcaaaaccaagggaacaacttgactggctccttttaactggatatagatcccactggcattgttggtggta

SEQ ID NO: 512384 - DNA, 50 bp, Homo sapiens
cctgttacccaaggaattccctaaagctcttcagtgggtcatctgtgtgt

SEQ ID NO: 512385 - DNA, 101 bp, Homo sapiens
caacattcagacccatttccagtcatgagatgcgtattggatagcaatgaatagttctctgaaatgtaaaaccctcagcgacatctttctgcttttcaaga

SEQ ID NO: 512386 - DNA, 90 bp, Homo sapiens
acagagaccgtgaagattccaagttcaggagaactcgaccggaatgtatcctgtcaggtataatgtcagtgaatggcaagaaagttcttc

SEQ ID NO: 512387 - DNA, 122 bp, Homo sapiens
ctattaccgcccttatggggttccagtggatgcccctgatggctgcatccggtctccaactgaattccttgaagagaaaatggcctaccaggaatacccaaatagccagaactggccagaag

SEQ ID NO: 512388 - DNA, 74 bp, Homo sapiens
atcagcgtggaggacctgtggaaggcatggaagtcatcagaagaacatgccgagtttttgcactgcaagtccaa

SEQ ID NO: 512389 - DNA, 72 bp, Homo sapiens
caggacctgagcaggaacctggagttttcaggggatcatcgtcttgctcttcttttatctcagtttgtgggt

SEQ ID NO: 512390 - DNA, 75 bp, Homo sapiens
atgatcaaataatagttcatgcatcaaatgcaataggaagtacttctggagggtacaatggcttggtgaccggca

SEQ ID NO: 512391 - DNA, 82 bp, Homo sapiens
taataaggttccagctgaggaggtccttgtcgctgtggagctgttgaagtgttatgtgccaagaaccttgcaaagaaagact

SEQ ID NO: 512392 - DNA, 100 bp, Homo sapiens
atccgggagagtgagagctccccaggggagttctctgtgtctgtgaacctgatgttcaccaaggtgaagctggagcaggtgctgaaaggcccagaggaag

SEQ ID NO: 512393 - DNA, 74 bp, Homo sapiens
gaggaggagacgtaccggctctggaaaatccgcaagaccatcatgcagggcccggcgagcagccaaggaggcca

SEQ ID NO: 512394 - DNA, 96 bp, Homo sapiens
atcagcgcggcgctggccgagagccgcggctccgtgtttctggaaagtgacagcagagaattttctctacatgtgcacccatttaaaggactcggc

SEQ ID NO: 512395 - DNA, 75 bp, Homo sapiens
agaggaagaactgaccagagctgatcccgagcagcgtcatgtacccctgttgctatcaagatcatagataagacc

SEQ ID NO: 512396 - DNA, 75 bp, Homo sapiens
ggagaagatggtggccaggaagaacacgacaatgcagatcttcgtgaagactctgactggtaagaccatcaccct

SEQ ID NO: 512397 - DNA, 152 bp, Homo sapiens
tgtattgcaatcatggtgcagaaataccagtccccagtgagggtgtacaaatacccctttgaattaattatggctgtactaggttttgacaagcttgcatcatgcgtgagtataagctagtcgttcttggctcaggaggcgttggaaagtct

SEQ ID NO: 512398 - DNA, 98 bp, Homo sapiens
ttgctgcaaatgaagttgatggaattacactgtgatacgactgactcatttttgaaacgttggggttgttggagtggttggattttccctggaattga

SEQ ID NO: 512399 - DNA, 100 bp, Homo sapiens
ggagagagagagaaagaggaggggaggaggaggaggattcagggaataggagctggggagcccttctgcgccacaggttggtactaagaagtgcctttcc

SEQ ID NO: 512400 - DNA, 100 bp, Homo sapiens
cggcgtacccgtcaccctcattgcctgtgacattctggccattgataagtccctgacaccagtcaccctggtcctggcagaggatggcaccatagtggat

SEQ ID NO: 512401 - DNA, 48 bp, Homo sapiens
gagagcgcgcctagccggctcgcgatggatggcattcccaatgacagt

SEQ ID NO: 512402 - DNA, 98 bp, Homo sapiens
atggaggagtccacaaatcgaccaagaaagaaacagaagacagaacagttgggactaacaaggggaggcacctcccgaactaacaacttggagaccgg

SEQ ID NO: 512403 - DNA, 48 bp, Homo sapiens
tcctggagttcacgactctgagtgctgaccgtggctgagcatggagct

SEQ ID NO: 512404 - DNA, 75 bp, Homo sapiens
ccacaaagtgacggcagccgagctgcagcaaaagcgaaagcttcggatctacatttccaatacgttcagtcccag

SEQ ID NO: 512405 - DNA, 88 bp, Homo sapiens
cagaagagtgagagatggaacccgaagaagaaaggattcgttacagccagagattggtgatcaatgttgatgggacgaagaggcggac

SEQ ID NO: 512406 - DNA, 116 bp, Homo sapiens
caagatgtctgacatggaggatgatttcatgtgcgatgatgaggaggactacgacctgatggaccacacatccccgacctacatgcttgctaacttaacccacttgcattctgaac

SEQ ID NO: 512407 - DNA, 82 bp, Homo sapiens
caagcgggagtcggggatagtgtcatcggttcggtaaagtttctgttctctggtgtaccaacattcgaccaggagagactgg

SEQ ID NO: 512408 - DNA, 90 bp, Homo sapiens
cgcgaatatcgtcatcgttagaagaaattcgagctcaactggtagaacaacaaaaatgcctggagcagcaaacggagatgcgagttcagc

SEQ ID NO: 512409 - DNA, 88 bp, Homo sapiens
ctgggaaatgaaagagcgccttgggacagggggatttggaaatgtcatccgatggcacaatcaggtggtcgtcggttttctgagggta

SEQ ID NO: 512410 - DNA, 82 bp, Homo sapiens
cgtctctctgctgcggcgcggggaccgctgtgctctcgatctattaatgagatgaagcggttggaagaaatgtcaaatatgt

SEQ ID NO: 512411 - DNA, 98 bp, Homo sapiens
tgaacgtcaccgaggagaagtaccaggaggcgttggccaagggctagtgtgacggcaggtaaggtcccagaggtggtggccttgggcgcagccgagaa

SEQ ID NO: 512412 - DNA, 90 bp, Homo sapiens
tatggaggcacagctgctgtcttcaatgctgttaactggattgagtccagctcttgggatggactttccttatcccagttgattgtgcag

SEQ ID NO: 512413 - DNA, 98 bp, Homo sapiens
taggctgaggctacctgtgaacagtacgcagtgaatgttgccaggcacctcattgagaagtcagtgcgtaagatcgtctccttgctggcagcgtccga

SEQ ID NO: 512414 - DNA, 97 bp, Homo sapiens
tgggttcatgagatttttcagggaacattaactaatgaaaccagatgtcttacttgtgaaactgttatcaatactctggctgaccatcatcatcgtg

SEQ ID NO: 512415 - DNA, 100 bp, Homo sapiens
cacaagttctcaaaactctctgaaaaatggctccctccgagttaaggtcatcatcagatttgaaatatttaaagtggatacaaaactatttcagcaatgc

SEQ ID NO: 512416 - DNA, 98 bp, Homo sapiens
gatgttgatgaaaccgcactgttgaaacaaatggagcgggagaaaatgcctcctcctccaaagccaaaggtcatttcatgggcaacaacacagtgctg

SEQ ID NO: 512417 - DNA, 100 bp, Homo sapiens
tttgcaaccactggttatcctggcaaaatggcaagccagtttcaaattcatcatttaggacaccctcagctctctgatgtaaaggatggagtaaatcaag

SEQ ID NO: 512418 - DNA, 82 bp, Homo sapiens
gtcgtcttccacttgcacgaaagctttcctaggccaaaaagagacaacgactgaaagacctttcattcagaagctgtttcgt

SEQ ID NO: 512419 - DNA, 100 bp, Homo sapiens
ggacacgaggcggcgggctggagacatggaccgcggcgagcaagatgttctcagtgcagctgagtcttggtgagcagacatgggaatccgaaggcagcag

SEQ ID NO: 512420 - DNA, 74 bp, Homo sapiens
cacgtctgtctggtgataccaggggcagagggaccactctgacagttgtttttcagaggcaccaaataatgtca

SEQ ID NO: 512421 - DNA, 82 bp, Homo sapiens
ctgtccgacggcgacggcaccgtggagaaaggtggaaaacgaagctcattcccaacgtgcaaagccaaggcagcgaccccag

SEQ ID NO: 512422 - DNA, 96 bp, Homo sapiens
tggtgatccccatgaaccacgagacagatgtgaacttccagggcaagaacctggacaccgtgaagtctctggatggtcgtcagatccgtgtggatc

SEQ ID NO: 512423 - DNA, 75 bp, Homo sapiens
tccagaaacacaggctagactggaagctttactagaagctgcagagttcttggagtctctgcggagtccctgggc

SEQ ID NO: 512424 - DNA, 98 bp, Homo sapiens
gattccgtgacagctggacccggcttctgcgtgctgcagcacgtcactggaggcactgaagagcctgctgtccaccacggggcactggcatgactttg

SEQ ID NO: 512425 - DNA, 100 bp, Homo sapiens
atggccgccgcggagacccagtcgctacgggagcagccagacttattccactaagctcaacaaatttcctgtatttaatattaatgatgacttgaatgat

SEQ ID NO: 512426 - DNA, 90 bp, Homo sapiens
tcgcggaccggcgtccccggcgcgaagaggctggactcggattcgttgcctgaggctcaaactgtccaggttgctgaagttgaaccacag

SEQ ID NO: 512427 - DNA, 75 bp, Homo sapiens
taaaaaggctcagaaagatggatttttgcatgagacgcttctggacagacctgtcgcgaaatcgcctttcagaaa

SEQ ID NO: 512428 - DNA, 100 bp, Homo sapiens
ttttctcaccggctggctgggcacacagacactgtcactggagtggccttcaacccatcagcgccccagggggcagtacccaaaggaaacgctacgaaag

SEQ ID NO: 512429 - DNA, 83 bp, Homo sapiens
cggcgagcgcgagcggcgcgagaaaatgagtaacccgaagcccctagaggagtggtcacctgcctgagggcacttctgtccca

SEQ ID NO: 512430 - DNA, 74 bp, Homo sapiens
gtctgataactgactctgatctcaacattttggctgaacggacaaggcaaaatctcagcaagttcggacctcta

SEQ ID NO: 512431 - DNA, 82 bp, Homo sapiens
gttatgaaagatctccttccagaaaccacctaccggaatctgcaaaacctccttatcctcactgcaattaaggctgaccgta

SEQ ID NO: 512432 - DNA, 75 bp, Homo sapiens
cagaagggaggctccaagacctcatcaacaattaagcatgattccacctttccactgatagactcaagttcccag

SEQ ID NO: 512433 - DNA, 104 bp, Homo sapiens
ggactttcaaaattcaacaagatctatgaatttgattatcatctgtatggccagttctttctaccacactcccgaggaagctcccatggacaaagccggataat

SEQ ID NO: 512434 - DNA, 74 bp, Homo sapiens
atgaagatgggcaagacaatcagggcacagtgactgaaggagtgggtcctacgtgtatgaactcagcgcagtcc

SEQ ID NO: 512435 - DNA, 75 bp, Homo sapiens
aacattcagacccatttccagtcatgagtggtgagcttcattttctccaaattggaggaacctgtgatgatattg

SEQ ID NO: 512436 - DNA, 97 bp, Homo sapiens
aaaaaattcatctgggcggtatctggaacttgatctgcacattcattgcaaccttcttctggtgatgaaatatctactaatgtatctgtccagcttt

SEQ ID NO: 512437 - DNA, 82 bp, Homo sapiens
caggctccctgcctactcccccaccggggatttcagggcgccctgcgtccggcagaggaggcgagcatcccgctcaggtgat

SEQ ID NO: 512438 - DNA, 98 bp, Homo sapiens
ggcggcgttcttctgtgtggcccgcctgcaggactacaaagctgatgaagacccagcattattccagtcagtcaagaccaagagaggccctttgggac

SEQ ID NO: 512439 - DNA, 98 bp, Homo sapiens
ccctgggtaacacacgtctgcggtgttacccacgactgcctgggacctggccaagggctccacacaccaagaccaaggccgtatctgaggaacagcag

SEQ ID NO: 512440 - DNA, 100 bp, Homo sapiens
cggcaagtgcgtgtcctgctcttcagaagtggagtgaagggcgtgttctgtgcaggtggctattatcatggaaaactaatttttcccagagaatttcctt

SEQ ID NO: 512441 - DNA, 100 bp, Homo sapiens
agtgtttcacatttgctgccatgagcaaagaggaggtcgacagggaactctaatgatccaggacaaagaagttaccctggagtatgtatcaagcctggat

SEQ ID NO: 512442 - DNA, 90 bp, Homo sapiens
atggaggctgagcatttattcagggaagccaaaagatgggacaaccctgccctaggccttcacattcactctctactaactcactgactc

SEQ ID NO: 512443 - DNA, 98 bp, Homo sapiens
acgacccccgtggccatgctgaagcggaggcggccgctgctcgagctccagggcccacaacggcagtgtcctacatgtcggtgaaatgtgtggatgcc

SEQ ID NO: 512444 - DNA, 156 bp, Homo sapiens
ggtcaacggggtcatctttaactgcttggccgtgcttgccctgtcatcccacctgagaaccatgctcaccgaccctgcctggcctcgccctgtggatgatgatggccttgcccccgtgagctacaacctggccttcagcacccgcccacctccaac

SEQ ID NO: 512445 - DNA, 100 bp, Homo sapiens
tgaagtggtttgcaacatccttcttctggataacactgtacaagctttcaaagtcaatagcattgaatgaaatgtggaaatgtcaaaatctgctccgaca

SEQ ID NO: 512446 - DNA, 82 bp, Homo sapiens
aaatgaagaggaagagaaattggcttgtggcccagagttgctcagaattggagcagagcctgagacgtatctgcagatcctg

SEQ ID NO: 512447 - DNA, 100 bp, Homo sapiens
atgagcgatgttaccattgtgaaagaaggttgggttcagaagagggtagatctctggcttcctgctctgtttgttctggttgccctggaaagcctgctgc

SEQ ID NO: 512448 - DNA, 75 bp, Homo sapiens
ccgggacccccctgcggggacccggaactggacaggaagatgtcacccaagcgcatagctaaaagaaggtccccc

SEQ ID NO: 512449 - DNA, 101 bp, Homo sapiens
cccagacccctcagcgtctggcatcttgataatatgcagcatgcatactgggaactgaagagagaaatgtctaatttacatctggtgactcaagtacaagc

SEQ ID NO: 512450 - DNA, 100 bp, Homo sapiens
caggggtctgggaggacagctcatgagacaagcagggcccagctgtgctgctgtgttaacctggaggcattatggaacaggtaagtaagccattggcatc

SEQ ID NO: 512451 - DNA, 97 bp, Homo sapiens
ggcgagtttccgatttaaagctgagctgcgaggaaaatggcggcgggaggtgtttcccattaaacactaccaggacaaaatcaggccttacatccag

SEQ ID NO: 512452 - DNA, 75 bp, Homo sapiens
aacccactggacaccttcgtcccctttgatccctgtgtgctgaagaggtcgcaatggaagaagagatcgccgcgc

SEQ ID NO: 512453 - DNA, 100 bp, Homo sapiens
gtcctctgtgtggccgaaaaaaacgacgcggccaaggggatcgccgacctgctgtcaaacggtcgcatgaggcgggatgacgcggcatggcaagaactgc

SEQ ID NO: 512454 - DNA, 75 bp, Homo sapiens
aagaaaacacatctttacacactaaggatcatggcccaagttgcaatgtccaccctccccgttgaagatgaggag

SEQ ID NO: 512455 - DNA, 98 bp, Homo sapiens
cacacccacagcggatggccagactcgagccttggtcaaccattccggagcctgtgtggcctacttccttactaagaggcgtgagtaccgcaactccc

SEQ ID NO: 512456 - DNA, 90 bp, Homo sapiens
ctccatttttgtcatggactgttaaaacgtttgaagttccaattctggttgtggacctggcctattagcagatgccaagatgcgggtatt

SEQ ID NO: 512457 - DNA, 80 bp, Homo sapiens
gactacatcaggaacggggtgctctacgtcacggagaagtgctggagaatctggtaaaagcaccattgtgaagcagatga

SEQ ID NO: 512458 - DNA, 100 bp, Homo sapiens
aggctggagaccaggaagaagagagctgaaatgttcccactgccaggaggcaggcgccaccttgggctgctacaacaaaggctgctccttccgataccat

SEQ ID NO: 512459 - DNA, 75 bp, Homo sapiens
aggaaaaggaggaattcgccgtgcccgagaatagctccgtccagcaggaggaggaagccaagaatctggtgagcg

SEQ ID NO: 512460 - DNA, 100 bp, Homo sapiens
gggcactgtccaccgccgcgagggcctgatccatcccacggagggtgtgaagacagagaatgaccacatcaacctgaaggtggccgggcaggacggctcc

SEQ ID NO: 512461 - DNA, 80 bp, Homo sapiens
ccctggagcctcagttggaagcagccgatccagcctgcggagcctgtggggcaggagaaggaagccaacatccttttgga

SEQ ID NO: 512462 - DNA, 83 bp, Homo sapiens
cagaagttgcttacgccttgtacaaacttgcagcccaagagaacaggtttggtgcacctcgatttggaggaagtagggcaggg

SEQ ID NO: 512463 - DNA, 100 bp, Homo sapiens
gtgaggagggaggagaaaacctggaccaggcacgggaagatgcccaggggagcttttggaagagtcccagatggaagcgaccaggctccggcagaaggca

SEQ ID NO: 512464 - DNA, 100 bp, Homo sapiens
cagtgctgaagcctttaaatgcagcatctgcgatgtgaggaaaggcacctccaccagatagcaaagccattgtggatgggaacctgaagctcatcttggg

SEQ ID NO: 512465 - DNA, 75 bp, Homo sapiens
gtgatgagaagctgtcggagcttcccaaggaatttaaactttgggataatgagctgcagtatgtggaccaacttc

SEQ ID NO: 512466 - DNA, 82 bp, Homo sapiens
ctggctggagtgccctgcctggagggagccctcctggctgggggcaaggatgaaattgattctgcagtaaagatgttggtgt

SEQ ID NO: 512467 - DNA, 73 bp, Homo sapiens
agtgaagagactgtacagcaattggcggcttcgagagctgtgcccaggagtgaacaaccagccctacctctgt

SEQ ID NO: 512468 - DNA, 100 bp, Homo sapiens
cttctctacagaattgcctcatttttgcaactgggaatgggtactgttcaaaaaggaatgccccacaagtgttaccatggcaaaactggaagagtctaca

SEQ ID NO: 512469 - DNA, 90 bp, Homo sapiens
tcccccgctgcttctgctgaggctgatggcaaggtggagaaggaacgtgataaagaagtaagcgatgatgaggctgaagaaaaggaagac

SEQ ID NO: 512470 - DNA, 75 bp, Homo sapiens
cttcgagtgatgaattcccaggagcaggttcacagaatgattgcagagttcaagctgatccctggacttaataat

SEQ ID NO: 512471 - DNA, 50 bp, Homo sapiens
gacaatgttgcactacaattttttatggactgctctctctgtataagaaa

SEQ ID NO: 512472 - DNA, 75 bp, Homo sapiens
ccggacggcatgctgctggccagggacatgaggagctgcctcacagagaatagtgacagtggtacaggaaagaaa

SEQ ID NO: 512473 - DNA, 100 bp, Homo sapiens
gtggtggctacagtgaccggagctcgggcgggtcctacagagacagttatgacagttacgggaatggccttaagtcttggagataaaatcaacttgtcac

SEQ ID NO: 512474 - DNA, 100 bp, Homo sapiens
ttgaagcgttcgatcttttaacatcacatcacatgctgacagcacaagaaggctgaagaactatgccctggttattctaatcccaattacatgtacttag

SEQ ID NO: 512475 - DNA, 75 bp, Homo sapiens
cggttttgactctattatgaaacagcaaagatcatctatctaaaaatcacctggaatgcttgttaaaaattcgga

SEQ ID NO: 512476 - DNA, 74 bp, Homo sapiens
gagggttgaagattgtgaagcaatagcctaagaactcctctttcctaaaatggagtcgagtaaaaagatggact

SEQ ID NO: 512477 - DNA, 75 bp, Homo sapiens
caaccaaattgtcgccattaagaaaggccatgctatgatagtggaagcttatccaaaataatagatccagaagaa

SEQ ID NO: 512478 - DNA, 82 bp, Homo sapiens
gctggaccgcttttacaatgcaggagccttcacgtaaatgggtccagtcatgcctcccagtaagaagccagaaagctcagga

SEQ ID NO: 512479 - DNA, 50 bp, Homo sapiens
gaggttcttcagtgtatgcctggtacttccgaagatcccagtttacagcg

SEQ ID NO: 512480 - DNA, 75 bp, Homo sapiens
attcgttacagccagagattgaccagcatctcagacatgtcgaaaaagatgttttgatccctaaaataatgagag

SEQ ID NO: 512481 - DNA, 75 bp, Homo sapiens
tccataaaaacaagtgtgtgcatctggctgttagaagaattcatgctcatccggaacccctgaacagtgcccaag

SEQ ID NO: 512482 - DNA, 99 bp, Homo sapiens
gtcaggccgatccgctccgctcacgcatgcagcagattggaataaatatgatgaccgattgatgaaagcagcagaaaggggggatgtagaaaaagtgac

SEQ ID NO: 512483 - DNA, 100 bp, Homo sapiens
agatgaggacactgaaattcagagaggggaagtgatttgcctcagcttgtactagctgaaatatgctaataccgtgatgcgctttgattacgtctggctt

SEQ ID NO: 512484 - DNA, 97 bp, Homo sapiens
gggcagcttcgtggaggagtacaacaacaaggtcatgaaacgagtgcgtaccgagcagattcagatggcagtgtcctgctacctcaaacgccggcag

SEQ ID NO: 512485 - DNA, 98 bp, Homo sapiens
aattacccaactatacggaaaacattacgcctctggatggatgatgttaatgagcaatgtgctggaattgatgttcgtctgtgtgatgttggtgaggc

SEQ ID NO: 512486 - DNA, 78 bp, Homo sapiens
cgaggtagaggcagtggcgcttgagttggtcgggggcagcggcaggttatgaagacagtatggagtttccagaccata

SEQ ID NO: 512487 - DNA, 51 bp, Homo sapiens
catcactcgtgacttcactcagccgaaagttgcccattgtaaatgaagatg

SEQ ID NO: 512488 - DNA, 75 bp, Homo sapiens
gtcgctgctggcacttcaggctctgcttgaaatggcgattgaaaacctccaaaaaagcgaaggaatcacatcaca

SEQ ID NO: 512489 - DNA, 90 bp, Homo sapiens
gccctggatggtgaatttcagtcagcctcagaggttgacttctacattgataagagagcccgagcccagcacattgtgccctgtactata

SEQ ID NO: 512490 - DNA, 83 bp, Homo sapiens
caaaggcgcaagtcgagaggaaactgttgtgcctcttcatattggcgatcctgttgtaaagatgttctcgtccgtggcgcacc

SEQ ID NO: 512491 - DNA, 82 bp, Homo sapiens
gcaccgccgcccgcgccctcaccaggctccccacaggtgcaggaagccgccgcccagccatggacggggaggagcagcagcc

SEQ ID NO: 512492 - DNA, 82 bp, Homo sapiens
gccgagctggacccggaccggttttgggaggatacgaagcgttttcggcttcctgcccggagctgtgcagcaaacagtcgac

SEQ ID NO: 512493 - DNA, 89 bp, Homo sapiens
ccgtgggcggcgacatgcagcagctgaaccagctgggcgcgcagctgcaggacaaattcgagcatcttaaaatgattcaacaggaggag

SEQ ID NO: 512494 - DNA, 98 bp, Homo sapiens
gtcttatccaaccttgcgctgcatccgctcgacctcgtgaagatccgcttcgccgtggcagccgattaggaggcctggttacagtgttgtgcttcttt

SEQ ID NO: 512495 - DNA, 82 bp, Homo sapiens
gcagatcctggtcctcgatccgcccacagacctcaaattcaaagcaaattgtggctactaatttgccccctgaagatcaaga

SEQ ID NO: 512496 - DNA, 74 bp, Homo sapiens
aagagggtggcaaagactcctgtgagggtgattctgggggccccctggtgtgtgggggagtccttcaaggtctg

SEQ ID NO: 512497 - DNA, 50 bp, Homo sapiens
ctaataaatgtgtcttctgttggcgatatgaagatcaatgatgcagactg

SEQ ID NO: 512498 - DNA, 50 bp, Homo sapiens
gtgcagcacaagaagcagcgtgtgaagatccgggatcagttgaaggaaga

SEQ ID NO: 512499 - DNA, 90 bp, Homo sapiens
gcgcgagtgaggaaaggaggtactgtagcttcgtcagcaattgaagtggttgatatgtgaactctgcagtttatataaccttcctaagca

SEQ ID NO: 512500 - DNA, 74 bp, Homo sapiens
catccttgggaccgcctgcctggccattgcgagcggcatctacctactgatgtgaagttcatttccaatccgcc

SEQ ID NO: 512501 - DNA, 83 bp, Homo sapiens
ctgtcatagaaactcacatgagacaaatgcgctcagcttcaattgaaacgggtatgcaggagattagaagccagtgggcatga

SEQ ID NO: 512502 - DNA, 100 bp, Homo sapiens
acagcaagcgcagagccaaacagccaggcaggtctatgaaaattatcctacttatgatttaactgaaagaaaagatttcataaaaacaactgtaaaagag

SEQ ID NO: 512503 - DNA, 74 bp, Homo sapiens
tttaatctgccagcagttactacgtcaggacgactgggtttggattcagaagaggattattatacaccacaaaa

SEQ ID NO: 512504 - DNA, 100 bp, Homo sapiens
atctggttatagatggacaagagacgatcattctgcaagcaggcaacctgaatacagggctgctaaggaagcaaaaaaggctaagcaagcatctaaaaag

SEQ ID NO: 512505 - DNA, 101 bp, Homo sapiens
gacaggactcagaggagatgagttccctgtattgaacactgatatacaaggaatgaatagaagtcaagaaaaacagacctggtgggaaaaagccttgtact

SEQ ID NO: 512506 - DNA, 102 bp, Homo sapiens
tggcaaatgtaaaaagaagaattgcacttacacacaggtatattcatttcaaccaactagaaatgctacagccagagacctttggagaccttctgagattag

SEQ ID NO: 512507 - DNA, 74 bp, Homo sapiens
ctctatcagactgacccctcgggcacataccatgcctggaaggtgaaggaatatgtctccaaaaaggccctacc

SEQ ID NO: 512508 - DNA, 129 bp, Homo sapiens
ggagaccaaacctgtgataacctgtctcaaaaccctcctcatcatctactccttcgtcttctgggtgattgatatgcccgagcacaaccctggcaatttgggaggaacaatgagactgggaataagaag

SEQ ID NO: 512509 - DNA, 50 bp, Homo sapiens
aagagggatccttcacccgtgtctgttacagaatgtctgaaggggacagt

SEQ ID NO: 512510 - DNA, 151 bp, Homo sapiens
atgtactccagttgctggatatccaagcctctcagcttcggagaatggagtcttccatcaatcatatctcacaggaaacttggatttaactggccagaagcaggtattcaaagcagagaacaatccctgggtgacccccattgcagaccag

SEQ ID NO: 512511 - DNA, 76 bp, Homo sapiens
ttatctgcttctatttggaggctggggacctctcaaaggtggataaattagatgcttcagaatcactgagaaaaga

SEQ ID NO: 512512 - DNA, 90 bp, Homo sapiens
cctcccctcagcggtggctcccaagaagtccgagacacgcggtgaggcggcgacgggctccggatgccttcaattaagttgcagagttct

SEQ ID NO: 512513 - DNA, 98 bp, Homo sapiens
gtttcggcagtgacgcctggggagtgacgcaattgcacccctgtgcagtgatgtcacggcagaaaaatctggtccttcatcagaactaggaaagcact

SEQ ID NO: 512514 - DNA, 83 bp, Homo sapiens
aaaagacacaaccttcttggaatctgactgtgatgaacaggtgccagagtttgtagcctattggaggaaaacacaccaaggta

SEQ ID NO: 512515 - DNA, 100 bp, Homo sapiens
ctagctgcgtggtgaccttcaaaggtcacaaaggaggtttctagggtgctggaacaagtctctgcccagttagaggagtgcaaaggccaaacagaacaac

SEQ ID NO: 512516 - DNA, 75 bp, Homo sapiens
aacaccttgcgctatgctgaccggggctagtgacatttgaagatgtagctgtggatttcacccaggaggagtggc

SEQ ID NO: 512517 - DNA, 98 bp, Homo sapiens
gtcgctgcccgtgtgattactgagactcagggtcaacatatttcactggcacctattcacaagcttgaagaagctctgtatgaataccagccactgca

SEQ ID NO: 512518 - DNA, 82 bp, Homo sapiens
gccgtctccacgcctccgcgggcagttaccagctttggctgctcgcgcctccccaactcggcccgcggcgccatggctcacg

SEQ ID NO: 512519 - DNA, 50 bp, Homo sapiens
aatcattcttgcagcatttcgtatatttggtttccaggcaggactgacgt

SEQ ID NO: 512520 - DNA, 100 bp, Homo sapiens
gaagtgaatcacaacacgcattggaaaagtgcattgcttattctccaccttttggtgattatgcacagggccatgtgaaactttctgactttggtctttg

SEQ ID NO: 512521 - DNA, 107 bp, Homo sapiens
ccgggcggcgcgaagcgctggtggcgggcccgggctgcggcgtgtgcgcgcccgccagctgctccggagatacgatacctgcactcaaataacatagttgtggttcc

SEQ ID NO: 512522 - DNA, 87 bp, Homo sapiens
tctttgctgccatcctttcttctctaaaattgactggaacaacattcgtaacttatacgccatccgagaagctgccaccaacaacct

SEQ ID NO: 512523 - DNA, 75 bp, Homo sapiens
ggtgaaccttctaattgtgaaggatctgttaaggtatcccatttgcctgatgtaaatgctgacattgtgcattgg

SEQ ID NO: 512524 - DNA, 75 bp, Homo sapiens
ctcttagcagcgcgcggagaagaacggggagccaggtttcattgaaaacagatcctgcaaaagttccaggtgccc

SEQ ID NO: 512525 - DNA, 100 bp, Homo sapiens
ttgacagggaggatggaagtcttcagggtccggctggctacagcaaacatcattcaagatgtccagcaaagggagcagcacagatggcagaacagactta

SEQ ID NO: 512526 - DNA, 100 bp, Homo sapiens
gggagattctgctcacggaactgcagattgcttccaagtatgatcatcaggcagaagaagatcttcgcaattggatagaagaggtgacaggcatgagcat

SEQ ID NO: 512527 - DNA, 92 bp, Homo sapiens
tgagcagccaacacaccagcccagacagctgcaagtcaccatggacgctgaagaattcagaaggagctggcggacatcactttagaccctcc

SEQ ID NO: 512528 - DNA, 50 bp, Homo sapiens
gcctcctcagtagctgagactacaggatggcactggatctttaaaacgca

SEQ ID NO: 512529 - DNA, 100 bp, Homo sapiens
aaaggactgatgacatcggagggctctggaggttccaggtagagtggaacccccagctattagaggtcccaccccaaactcagtttgattacacagtcac

SEQ ID NO: 512530 - DNA, 73 bp, Homo sapiens
gcaggacctgcgccgggcactggaggagggctcgctccatagtggaagtaacagtttactaagtaagctcatt

SEQ ID NO: 512531 - DNA, 90 bp, Homo sapiens
atcaggagcaggacacagaactgggcagtacccacacagcagtgaacacctacctcttcatgatgcaagcccaaggcattctgatccggg

SEQ ID NO: 512532 - DNA, 75 bp, Homo sapiens
ccgcgcggaaacctcaggcaaagtggctagaagtgaccccaggatttttttattatcaagagagactagaagaat

SEQ ID NO: 512533 - DNA, 96 bp, Homo sapiens
tccttactggttgcctaattttatggatgtcttcacgtggtctttaccgtttgttggagaaaaagaaggtgcttcctggaggggcctgccccactg

SEQ ID NO: 512534 - DNA, 90 bp, Homo sapiens
ctgcaattgagaaacaggcacacaagtgtgaggagttgctaaatgctcaggtaaagctttccagtttgaatttagatgatcacgcaaaga

SEQ ID NO: 512535 - DNA, 74 bp, Homo sapiens
aaattatctctggtgctgcagctctcttagaccatgctcagcctccaagcagccttgtcatcgacaaagaatct

SEQ ID NO: 512536 - DNA, 75 bp, Homo sapiens
gctttttctaactatttcaagatgatatttattcaccaaacaaggttggctgttgaaggcacgaatggaatagat

SEQ ID NO: 512537 - DNA, 82 bp, Homo sapiens
cgcccggtgacggcggagaggcgccccccgcagcaggcctccaccatggacagaggccaggccctgcccctcccaggcagcc

SEQ ID NO: 512538 - DNA, 98 bp, Homo sapiens
tcataaccgaagatgtcagcctcccctgtcccgaacgcagtgtgtggaaagatgggatggaggtggataccacaccaacagttgctggacagtttgag

SEQ ID NO: 512539 - DNA, 101 bp, Homo sapiens
ggacggcattcgcagctccagctgggagacctcgcagggcaagagctccccagactcggcttggtcatggatcagacttgttgtggaagagggattgaatc

SEQ ID NO: 512540 - DNA, 87 bp, Homo sapiens
tggcggtgaagcgtgaggccggcatcgtctttccgtcctctgaggcgacggccgcggctgcacaggcctgaccgccgctgcctacag

SEQ ID NO: 512541 - DNA, 96 bp, Homo sapiens
aaactttcaggattacatggccaggacctttttggaatttggagtaaagtctacgaccctttatattgtgagggtctcactctgtcacccaggctg

SEQ ID NO: 512542 - DNA, 100 bp, Homo sapiens
ggcggatggccccaggtgtaagcgcagaaagcaggcgaacccgcggcgcaataacgagcacaatcattgtggagaagacagttcaagacctcctgaacct

SEQ ID NO: 512543 - DNA, 99 bp, Homo sapiens
cttctctagctctcagcggctgcgaagtctgtaaacctggtggccaattccctgtattgaacactgatatacaaggaatgaatagaagtcaagaaaaac

SEQ ID NO: 512544 - DNA, 51 bp, Homo sapiens
gcatgccctgccacagccactggccggaaggtggtggtcgtacgctgtgaa

SEQ ID NO: 512545 - DNA, 100 bp, Homo sapiens
agaaaagctgcaggccatgcacctggagcgatgaagaaagccccgcccccacctccaacctcgatgcccaagactgtgcaagctgccccgcctgccctcc

SEQ ID NO: 512546 - DNA, 76 bp, Homo sapiens
cgcagaaagcaggcgaacccgcggcgcaataacggagcattccggaagagtttttcgactacagtttgatgaattc

SEQ ID NO: 512547 - DNA, 98 bp, Homo sapiens
gatacaaggacatactgccatgttatggaggttttgatgactatggtggctataataattacggctatgggaatgatggctttgatgacagaatgaga

SEQ ID NO: 512548 - DNA, 90 bp, Homo sapiens
ggctgagggcggagaggcgcatcgtgttcgaggcggagaccgagggggagccccgcgcgcggcgtcggaaaagcttttgacatcacctat

SEQ ID NO: 512549 - DNA, 82 bp, Homo sapiens
cgattctgcaaccaagcacctgaaacagcaggttatggctcatagttcaccccagagcattttagatgatgttgccatggta

SEQ ID NO: 512550 - DNA, 75 bp, Homo sapiens
gtacacgcccccgagctgggaagcaggctgcagcttcacagctccctgtgctgtcaggaatctacaggacttggc

SEQ ID NO: 512551 - DNA, 90 bp, Homo sapiens
ttgggaaatgcaacaatccaaatggccatgggcacaattataaaggtggacattgaagtggacctaattcggttttccttttaaaagccc

SEQ ID NO: 512552 - DNA, 87 bp, Homo sapiens
aattcagaaggatatcgacgtcgtgatccagaagtccagagctgaggactgcctgtttgcaggatttgttaaggattccaagtaact

SEQ ID NO: 512553 - DNA, 74 bp, Homo sapiens
ccaccaccatctccatcacccaccaacaacaccacaataatccacagccaagcagggctatgtgacctttgagg

SEQ ID NO: 512554 - DNA, 83 bp, Homo sapiens
ccgagcaggctgagcgatacgacgggcagctgcaatgactctccgcacggtattattgtcattgcaagcactattggcagctg

SEQ ID NO: 512555 - DNA, 75 bp, Homo sapiens
aaatatgtctctgggatctttcagtagaactgcaaggtctgggggtggtggcatctcccctaaaggaagtggtcc

SEQ ID NO: 512556 - DNA, 100 bp, Homo sapiens
ctttgggaaagccactcgaaaaggtacttcgtactggatttcgaggctggcatcctgcagtattttgtgaatgagcaaagcaaacaccagaagcctcgag

SEQ ID NO: 512557 - DNA, 100 bp, Homo sapiens
gctgcagcccgcgcacagctgctcccttcgccttcgccctttccacctcgcggcagttcggattttttatcaagcagaaatgcatcgaacaacgagaatc

SEQ ID NO: 512558 - DNA, 100 bp, Homo sapiens
gagggccgagcaacagtgtagtggcgtattccacatagcaaacagaaatgcactcggtgatggaaagagagccactattctgaagaacacttggccaaag

SEQ ID NO: 512559 - DNA, 100 bp, Homo sapiens
aaccggtcgaaaaccgtgtatgagggattcatctcggctcagtgctgggcctaaaggagataacatttatgaatggagatcaactatacttggtccaccg

SEQ ID NO: 512560 - DNA, 100 bp, Homo sapiens
atgggctgcctccaggtgacagcaatcagctggcctggtttgatactgacctgtaaatcatcctttaggttcaaggtaaagacccatcagtggaagtcac

SEQ ID NO: 512561 - DNA, 75 bp, Homo sapiens
gcgtgagtgatcactctcaatcccggtctcatgcagattcaaaaatgtgagttggtcttgatccacacctaccca

SEQ ID NO: 512562 - DNA, 80 bp, Homo sapiens
caagagaaaacatcgaccttcaagatttccaatttccaagcctgatgggatctcccagctggaacaggatctacaggtct

SEQ ID NO: 512563 - DNA, 100 bp, Homo sapiens
ctccgatgatgtcaatgaatacgctatggctctgagggacacagaggacaagctccgccggtgccccaagagggaaacgtgggaagaataagtacgtgag

SEQ ID NO: 512564 - DNA, 98 bp, Homo sapiens
gatgatgaagatgaagatgtagaaggggatgaggacgacgatgaagtcagtgaggaggccctagaaactctgacaggtgccttattccagcgaccccc

SEQ ID NO: 512565 - DNA, 82 bp, Homo sapiens
cagaccttcaaaccaaagggccaatacctggatatggttctgcactgctcagcacgcaggcatgtgaggaagctgggcttaa

SEQ ID NO: 512566 - DNA, 74 bp, Homo sapiens
atagctattcctgttgatggtgatgaagacaggcacagaccccacaggctcctcggacactgggtccatcacct

SEQ ID NO: 512567 - DNA, 80 bp, Homo sapiens
cggctgcggtcgaagaaggggacgccgacaaggtgtctgacttccagcaactgctggcctgtgccagggtgcaagctgag

SEQ ID NO: 512568 - DNA, 90 bp, Homo sapiens
ctttcatgcagtgacatgttgataaaaaatgatggtgagcacctgcggatctgtccccagggctacacctgctgcaccagcgagatggag

SEQ ID NO: 512569 - DNA, 97 bp, Homo sapiens
tccggaacagcaagaactgcaccgaaccaggaataagacgagttggaagaagacctgatcaacaacttcagggtgaagggaaaataattgatagaag

SEQ ID NO: 512570 - DNA, 72 bp, Homo sapiens
gtgttgatgactgcctcaatagtcataccctaatgatcccagcaagataatgtcctgtcttctaagatgtgc

SEQ ID NO: 512571 - DNA, 100 bp, Homo sapiens
tggagctgtggcaggcagaagaaggggaactcctgctgcccactcaggttctctacttaaaagacaatgactactgatgaaggtgccaagaacaatgaag

SEQ ID NO: 512572 - DNA, 100 bp, Homo sapiens
gcgggaaccaaaaaagacaaggaaaaggacaaggggaaatggaaggggcctccagggtctgcagacaaggcaggcctcatttccaccatctacatggcag

SEQ ID NO: 512573 - DNA, 49 bp, Homo sapiens
atgggaaagtccatggtgaagaagtgacatttgccttgcctgaaggacc

SEQ ID NO: 512574 - DNA, 100 bp, Homo sapiens
ccggatttgcttgttccagtaaagagcaggacatcgagactttacatggctctgttcacgtcacgctgtgtgggactcccaagggaaaccggcctgtcat

SEQ ID NO: 512575 - DNA, 75 bp, Homo sapiens
agcttcacctccatgggcatcaacatggttggggtgactcagtgggaacgccatctgagcggggcatgacctatg

SEQ ID NO: 512576 - DNA, 100 bp, Homo sapiens
ctctgagtatgtgaccgaaccgatccaggcctacatcatcccatcgggagatgctcatcagcatgatggaagtggttcattgcatgatattcaactgtca

SEQ ID NO: 512577 - DNA, 100 bp, Homo sapiens
tcctgaggtgcagaggcaattcccggaggactacagtgaccagaggacaagaattttgggcagatttgaatgccatgaacgtgtatgaaacaactgaatt

SEQ ID NO: 512578 - DNA, 134 bp, Homo sapiens
gccgcattactacaggagaaagaacatttccatcaaaccctgagagctttattaccagacatgatctttcaggtcgttccaggggtagaggaggcatgaaggatgaccgtcgggacagatactctgcgggcaaa

SEQ ID NO: 512579 - DNA, 100 bp, Homo sapiens
tcctgatcagcagagactgatctttgctggcaagcagctggaagatggacgtactttgtctgactacaatattcaaaagagatgtggtctcactatgttg

SEQ ID NO: 512580 - DNA, 75 bp, Homo sapiens
ctcagctagccactgctcagtagtgaacctgagcaaggtgggcgagtattggtggaacgccatcctggagggaga

SEQ ID NO: 512581 - DNA, 100 bp, Homo sapiens
cggacgtgtccgcgaagatggcgggccggcacttttcaggattagaagaggctgtgtatagaaacatacaagcttgcaaggagcttgcccaaaccactcg

SEQ ID NO: 512582 - DNA, 75 bp, Homo sapiens
agagtttccattgacactgatatggcatgtgagcagcagtgacagagtgggcaagccttaccgtggcgtaaagcc

SEQ ID NO: 512583 - DNA, 90 bp, Homo sapiens
ggtgctgggtgcagatgcagtgtggctctggatagcaccttatggacagggattcacagaactacttcctattgatttgattaaaatttt

SEQ ID NO: 512584 - DNA, 83 bp, Homo sapiens
cgccgaggaggttgggatcttcttcactgcctctggcatggatgagactgaaatcgccaagagattgaatacgatttgtgcac

SEQ ID NO: 512585 - DNA, 88 bp, Homo sapiens
tgaggccgttctcgcgatgctgtcttacgccaaggccacctttgatgccatttctaagacctacagctacctgacccccgacctctgg

SEQ ID NO: 512586 - DNA, 75 bp, Homo sapiens
tgcctttcaagtgcatgcagctcactgatttcatcctcaagtttccgcacagattgagcagctgtatgtccggca

SEQ ID NO: 512587 - DNA, 83 bp, Homo sapiens
gctttacataaaaatggctgagtgtcttgtcatgctagcactgcattaagtgatgcatacagttccttcctgtgtacagccct

SEQ ID NO: 512588 - DNA, 75 bp, Homo sapiens
actcttggtcatggcaacggaggcacagtctacaatgccggtggtggtgtgcacattgagccccggtatagacag

SEQ ID NO: 512589 - DNA, 100 bp, Homo sapiens
catttatgttttccttacatctcaatgaagcaagggactatgaagagcatccaggatgtgaggagtgatgacgaggattatgaagaggaagaggaagagg

SEQ ID NO: 512590 - DNA, 75 bp, Homo sapiens
tgtccttcatgcagtctctcattggcttctttgagactgaaatggcaggtgcaaacagctgcacagcaagtggca

SEQ ID NO: 512591 - DNA, 75 bp, Homo sapiens
acttggccaatcatgatgaactaatttccaaggagcagtgaggagaatgaataccttccaagaccagagtggcag

SEQ ID NO: 512592 - DNA, 98 bp, Homo sapiens
gcacagttgaaaatttctcaaggccgtcgctttcgggttctctcatcgcttcgtcgttcgccaatgtttgaggagaaggccagcagtccttcagggaa

SEQ ID NO: 512593 - DNA, 83 bp, Homo sapiens
gtctggctctggaattgctactgctgcctctgtcactcctggtgaccagcattcaagtggcctcatcctgcatgactcgcctg

SEQ ID NO: 512594 - DNA, 100 bp, Homo sapiens
cgcgcctgtagctcgcgggcctcgcagaaagtgaatggcttggaggaaggcgtggagttcctgccagtcaacaacgtcaagaaggtggaaaagcatggcc

SEQ ID NO: 512595 - DNA, 96 bp, Homo sapiens
ctgcttgcgcctgtggaatcaaatgacagcgaggacactcccagcaagctcttcggcagtcttgattgatatggaagaaggggtagtgaatgaaat

SEQ ID NO: 512596 - DNA, 100 bp, Homo sapiens
ggtgattgaactggacaaagacctgtatgggccagacaaccatctggtagaaggaatgctggcagactttgtgtcccagacttctccaatgatcccctcc

SEQ ID NO: 512597 - DNA, 75 bp, Homo sapiens
cggtcttggggggatggttccatcatggcgtcaatgcaggttagcatacgtatcaaggacagtaactaccatggc

SEQ ID NO: 512598 - DNA, 75 bp, Homo sapiens
aggcggccctggctgggggaaccactatgatcagtgcattttctagaatcatgaaactttgtgaagaaaaatgtg

SEQ ID NO: 512599 - DNA, 106 bp, Homo sapiens
ctcacaactgctcgcgtgacgaccgcattcgtggcaggtaccttgtggtctataatcctttagaacaagaccgaatctcgttggtctcagtctatgtgagttcccc

SEQ ID NO: 512600 - DNA, 96 bp, Homo sapiens
ggagctcatgcagtggtacaaggaccagaagaaactgcaccggaaatgtgcctaccaggcaatggatcacttggagtcctttattgctgaatgtga

SEQ ID NO: 512601 - DNA, 100 bp, Homo sapiens
gagttcaaagagctggttacccagcagttgccccatctgctcaagggccattatgctgtgatgaacaaccccaccagacagcctttggccctaaacgttg

SEQ ID NO: 512602 - DNA, 100 bp, Homo sapiens
gaacccaaaagttctgatgttcggaagtatgttgcccatattatgaccctgaagttagtaagcacctctgttacgataagagaaaacaagaatattccag

SEQ ID NO: 512603 - DNA, 101 bp, Homo sapiens
ccggggcatctccaacatgctggatgtcaacggcctctccaaaagcgtttgaacaatacttgaatctggaagatggcagactgctgactcatctgaggatg

SEQ ID NO: 512604 - DNA, 88 bp, Homo sapiens
cgctgggcaacttcatcttcgcctgccgcttcaaccaggtctcctgcaaccaggcagttgtaaagatgtggcacctgtggagaagact

SEQ ID NO: 512605 - DNA, 75 bp, Homo sapiens
attccaagtaactcttatttggggatgtggagacgctggtagcggggccaggaaggctccggacggagcaggttt

SEQ ID NO: 512606 - DNA, 101 bp, Homo sapiens
tgaggcaaatgaggaacagggcaatagtatgatgacttgtgtatgcggatacctgcttcagtaccatcaagttaaaagcagaagatgcttctggtagagag

SEQ ID NO: 512607 - DNA, 74 bp, Homo sapiens
ccccggcgccgtccgtgcccgcgggacctgacagccgggtcagagtttgtttcgacgccggaccgcgtaagaga

SEQ ID NO: 512608 - DNA, 50 bp, Homo sapiens
gaggagcgagagtgggaagaacagtattctgcttctcagaagatgcacta

SEQ ID NO: 512609 - DNA, 130 bp, Homo sapiens
tggtgtttggcggcggcaacgagggaatagtggacgaactgcacgtgtacaacacgggtgtttaatgacgaccttaccaagccaatcattgataatattgtgtctgatctcattcagatttataccatgg

SEQ ID NO: 512610 - DNA, 96 bp, Homo sapiens
gatggctgcaagactgtcgacctaaagcctgactggggcaaggtcccgcccagctgcagaccctccaggctggaggaccagccgccctccttccct

SEQ ID NO: 512611 - DNA, 113 bp, Homo sapiens
ggcagctaggcaacagcagcagattgaaaatcagcagcagatgttggttgccaaggtgggaacattctccatggccagtgaggaagtcttgaagaatagagccataaagaaag

SEQ ID NO: 512612 - DNA, 75 bp, Homo sapiens
acctagtgggtgtaatacatcatgaactgcaggatacccattgacaacatgaccaatgagatggagcaaagggtt

SEQ ID NO: 512613 - DNA, 87 bp, Homo sapiens
aagcgccgccccttcctacggctacgggaaggatcgtccagtggctgaggctggacagagcacaggtgttcaggcgcttcgtggagg

SEQ ID NO: 512614 - DNA, 75 bp, Homo sapiens
aatgaattgagaagggaagaaaccaaagctgagaggacaaaagcatgtcttcccttcctgggtgcattggtttgg

SEQ ID NO: 512615 - DNA, 82 bp, Homo sapiens
gggaaatcgtgcacatccaggctggtcagtgtggcaaccagatcggtgccaaggcagttgtgaaaaacttcaggacaaaaat

SEQ ID NO: 512616 - DNA, 90 bp, Homo sapiens
ctgtggatgaatttgcttttctggaagaaaatcctgagcgagcagctctgtactttgtttctggcgtgtgcatcgggctggtgctgaccc

SEQ ID NO: 512617 - DNA, 87 bp, Homo sapiens
ggatctttccctggaggaaattcagaagaaattagaagctgcagaagaaagacgcaagggttttggtgcctttgaacgctcaatctt

SEQ ID NO: 512618 - DNA, 75 bp, Homo sapiens
ctggcggtttttattaaggctgttcatgtgaaaggccatcatgcagaagggggatacaaacataaagcccatcct

SEQ ID NO: 512619 - DNA, 82 bp, Homo sapiens
ggaaaatccacctcgcagcttgtaaatctacagcaaaatgatgcttcaacacccaggccaggtctctgcctcggaagtgagt

SEQ ID NO: 512620 - DNA, 76 bp, Homo sapiens
ctatggcacccggctgcaaaaaacaatgctaaagtagctgtgctaggggcctctggaggcatcgggcagccacttt

SEQ ID NO: 512621 - DNA, 83 bp, Homo sapiens
tcagtacaagaagaaaatagcattgttagaacctctacttgggtacatgcaagctcagaaatgattctggggaccattctgac

SEQ ID NO: 512622 - DNA, 98 bp, Homo sapiens
tctcatctcgctcggctgcgggaaatcgggctgaagcgactgagtccgcgatggagtactgccaaatctgtcgaaagggagataatgaagaactgctt

SEQ ID NO: 512623 - DNA, 75 bp, Homo sapiens
cctgcggctctctacgtccctgcggagcagccgagctaaagttgcagacaagatccagctcatcaataatatgct

SEQ ID NO: 512624 - DNA, 74 bp, Homo sapiens
actcgacagccaccgccgcccccaacgtccatgcctgaagaaaagaaaccttgtttattccctgtgaaaatgag

SEQ ID NO: 512625 - DNA, 75 bp, Homo sapiens
gtccctgaagagggaagacacgcggaaacagatgcagtctacacagaactccagcccacctctccaaccccaacc

SEQ ID NO: 512626 - DNA, 90 bp, Homo sapiens
cagtccccccgttccctggaggtcctgtggaatgtcgtggcattcctggtggctttccatcagaacaagcagctcatcggtgacaggggg

SEQ ID NO: 512627 - DNA, 75 bp, Homo sapiens
gataagcctcgacttagaagctaccgagttaccctaagaaagagaatgtaactggtcactacatttccccctttc

SEQ ID NO: 512628 - DNA, 75 bp, Homo sapiens
cgaacctccagcatcagcttcgagatcctgggctttaacagcaagggagagcgcacaactacgggattggcgccg

SEQ ID NO: 512629 - DNA, 82 bp, Homo sapiens
aggaggatgacgtgcagaacaccaactctgcccttagatttgggaatggatgatgaaggagatgatgacccagttcctctac

SEQ ID NO: 512630 - DNA, 75 bp, Homo sapiens
actgcagccagtgaaaccactgaggttctgggccggagaaggggcgacgttcgggcaccccccgaatggacaatc

SEQ ID NO: 512631 - DNA, 75 bp, Homo sapiens
gccagtttgccattcgctggggctttatccctcttgtgatttacctggggagttacccagggagattatacacct

SEQ ID NO: 512632 - DNA, 100 bp, Homo sapiens
ttaaccaaatctcatgaaatggaaaatgtggacagtggagaaggcccagccaatgaagatgaagacataggagctccttcgagaactcatagaacggaag

SEQ ID NO: 512633 - DNA, 95 bp, Homo sapiens
tggaggaggcggctataataatagcaaacatcgatggcctactggggataacattcatgcagaacatcagcctgaacccccgccaacaaacaaat

SEQ ID NO: 512634 - DNA, 87 bp, Homo sapiens
ggcctactcgcccgccaccctgcgctgccgccgctctgaggagttaaaggtttttcgttggaatatacgttgcacatttatggcgat

SEQ ID NO: 512635 - DNA, 100 bp, Homo sapiens
ggtgaactgctcgtttgggacctccttggagcaaaaatcagtgagagaatacagggccacacaggagtctgcactatggaaacaacctgtcaatccagct

SEQ ID NO: 512636 - DNA, 82 bp, Homo sapiens
ggatttcaacctgaaagtggaggctgcgaaaataggaagcacaagcctatgcagacgacaacagtttgctgttcatggagac

SEQ ID NO: 512637 - DNA, 75 bp, Homo sapiens
gccggcctcgtccagaacgtggtcagcaagaaccacgtcggggaagctcttcccccagagatggtcaccaggctg

SEQ ID NO: 512638 - DNA, 75 bp, Homo sapiens
aagctgccaagttgaaaatggacgagtaatcgcctgctttgattcattgaaagaaattttacctggattgttctt

SEQ ID NO: 512639 - DNA, 74 bp, Homo sapiens
taacctttgaatatctgcacacaaattcgaccctgatgctcccataagacagaaaatgccccttgatgatctgg

SEQ ID NO: 512640 - DNA, 98 bp, Homo sapiens
gttcctggtcatacaccagtactaccaaggacagcttttttcctgcaaggacactttattctgctattggcattgacctggcatctcatgggtttata

SEQ ID NO: 512641 - DNA, 74 bp, Homo sapiens
caggtgtggcaggttgcagaggacagtggaggaataaacatggtgtgtctcgaaagaagattgctcagatgttg

SEQ ID NO: 512642 - DNA, 89 bp, Homo sapiens
agcactcgcagagaaatatgggaaattttatgctttggatccttcattcccaaggatgaatttgttaactcggactacagaagggaaga

SEQ ID NO: 512643 - DNA, 51 bp, Homo sapiens
cgcataacacctatctcactggaaaatatatgcagatgatgaacattctta

SEQ ID NO: 512644 - DNA, 87 bp, Homo sapiens
atagcaaaagcttatgctgcacaccaactctacaacattacctgtcatatactgaagaatctcttcttccagttatgcagcacctgg

SEQ ID NO: 512645 - DNA, 100 bp, Homo sapiens
tcatcaggcttgttcaagacacaccggaggcgacggccatggccacagatattctaaagggaaggactgagaccctgaagccagacccccacctccgcaa

SEQ ID NO: 512646 - DNA, 74 bp, Homo sapiens
ggacgggttccttggcggttggggatttgggtgcctatggttcatgcttgaagttttaatgacaaagaatgaaa

SEQ ID NO: 512647 - DNA, 100 bp, Homo sapiens
caggactgcccctgacccaggcgcgcccgctgctcggtggcaggagggccggcggagcgccatggcctgcatcctgaagcttaacagagcgttccaaaaa

SEQ ID NO: 512648 - DNA, 83 bp, Homo sapiens
ccagaatatgccaagtatctaaagctcccagccaacctctgataaaccctcccagcggccatcagagagcacaaattgtagcc

SEQ ID NO: 512649 - DNA, 101 bp, Homo sapiens
ctggaagtttccagatgaggagggcgcatgccagccttgccccatcaactgcacccactcgaaggaagcagccaccctcgccatggcctccccgcccgcct

SEQ ID NO: 512650 - DNA, 83 bp, Homo sapiens
cttcgatgatcgtgtgtcggatgaggagaagcttctgcagaaagccgtcattacacctgattttgaaaaaaaccactgtgttc

SEQ ID NO: 512651 - DNA, 90 bp, Homo sapiens
tcttttcctccctcaaccacattgtggagaaacgggtcttggcaacaccttccaccatgaccacctcagcaagttcccacttaaataaag

SEQ ID NO: 512652 - DNA, 83 bp, Homo sapiens
acatgattgcctaaatcagccaaacacaggcacttgcacctcctgcgccgccgccccccatccaaggatatgccttcaagcct

SEQ ID NO: 512653 - DNA, 83 bp, Homo sapiens
ctttgtcttccatgacaccaagttggatgccatgctggaggagttcaagaaggggagtggagcttggtttcgggatctcggtg

SEQ ID NO: 512654 - DNA, 82 bp, Homo sapiens
tgcactccgcacctcggggacattattgcgcgtggaacggctgcttttggaagaactgccattggatgtccagaatcccctg

SEQ ID NO: 512655 - DNA, 75 bp, Homo sapiens
cagagatgtgatgttggagaactatagcaatctggttttcttgggttgtggcatcagctgacacttcaggtgctt

SEQ ID NO: 512656 - DNA, 82 bp, Homo sapiens
cttcttcctcaactatctcgctgacacgcagagggtcaccatgaagttcaatcccttcgttacctcggaccgcagtaaaaac

SEQ ID NO: 512657 - DNA, 100 bp, Homo sapiens
gctaatgtctgtctggctgctgcagtgacccagaccctctcctttccctttgagaccgtgaagagaaagatgcagtctcacagaaagttctccgctccca

SEQ ID NO: 512658 - DNA, 100 bp, Homo sapiens
atttgcctttagtgcactcttctccttcacagtaaagtggctgtttaaacccattttcctgaacacaattgacccatctcaccccatggcaaagctgagc

SEQ ID NO: 512659 - DNA, 85 bp, Homo sapiens
gcctaacttctactgacgaagcttggaagttgcagaagactatgccagttactaccagggcctatgggattgccatggtgaccag

SEQ ID NO: 512660 - DNA, 97 bp, Homo sapiens
tgaccatctgcctacctcccgttaatggaaccgcgactcacagggtgagcagggcagcatttccttctcccactgctgctgagatggcagaaattag

SEQ ID NO: 512661 - DNA, 101 bp, Homo sapiens
tcgagaacaaatcctcctactcagaaaccgccaagtcctcccatgtcaggccggggaacactgggggggcttgtacatgacagctggaatagcctccagtt

SEQ ID NO: 512662 - DNA, 74 bp, Homo sapiens
cagcaaaccacaaagttgctaagttccggaactttaagatcatttaccgccgctatgctggcctctacttctgc

SEQ ID NO: 512663 - DNA, 73 bp, Homo sapiens
gtctcctggctgctgcttgcatatgtgttatgagatggagaaaaggctaaaaacaccagatcttttcaaattc

SEQ ID NO: 512664 - DNA, 88 bp, Homo sapiens
accgcccccatcttcagtgaggatgaggctgacccgcggctgattgagtccctctcccagatgctgtccatgggcttctctgatgaag

SEQ ID NO: 512665 - DNA, 96 bp, Homo sapiens
cagaggtcctcaccgggaagctgcacgacgtgtgcttggtggtgactggggagagatccagaaagtgagacagataatgactcccaggaaatattt

SEQ ID NO: 512666 - DNA, 83 bp, Homo sapiens
cgaggctcggagaaacaggcgccgcgggctccgcgcccggccggacccgggcccgaggcagcggaggaggagaaagagatgga

SEQ ID NO: 512667 - DNA, 92 bp, Homo sapiens
ttgagtcatttccttcgtacccacagtgcttcatgagaggttgatgataattagaagcatgctttccactgaacttcccgacaacatttgtt

SEQ ID NO: 512668 - DNA, 97 bp, Homo sapiens
gcttcatcaaaaatagtgatagctttgataagaaagatatggatgaagttgaagagaaatctaaagatgttataaactttactgccgagaaactttc

SEQ ID NO: 512669 - DNA, 100 bp, Homo sapiens
gctggcggcgggcatcttcttcgtgaggctgctcttcgagcgggatcatagacggtatttctatgtaaacgaacagtcgggcgagtctcagtgggagttt

SEQ ID NO: 512670 - DNA, 90 bp, Homo sapiens
gaaagacaaagacccagtgaacaaatccgggggcaaggccaaaaagaagggagaagaaatgggtgaccgttggtgacacatccctacgaa

SEQ ID NO: 512671 - DNA, 86 bp, Homo sapiens
gaaaggagggagctgctgaggggaagcaccagcagtatgactgtaagtggtacatccccctggccgacctggtgtttccatccccc

SEQ ID NO: 512672 - DNA, 74 bp, Homo sapiens
cagcgtggccctgctggaggcctcgctgaggaacgacgccgaggaaggtactccaaagattcaggtttactcac

SEQ ID NO: 512673 - DNA, 83 bp, Homo sapiens
cacccaccgccgccgcctcccaggttggagcaaaacgtcccactcactggaggcacctgaggacgacgggggctggtcaagtg

SEQ ID NO: 512674 - DNA, 50 bp, Homo sapiens
ggaaaatgtgatgcatgtctcagtgtgctgattcctaaagaaaagccccc

SEQ ID NO: 512675 - DNA, 85 bp, Homo sapiens
ggcctgcacggacggtgttggttggggctactgcagcactggggtgtcagttgttggtccgacccagaacgcttcagttctgctc

SEQ ID NO: 512676 - DNA, 76 bp, Homo sapiens
cgaggagcgcggcgagatctacgtgccaggtatcgatatcctgaagcttgtagcagcccaagtgggaagccagtgg

SEQ ID NO: 512677 - DNA, 75 bp, Homo sapiens
tttttcaagggagctgataaagaacttcttcccaaaatgggaggtgaagctgtcatagctctaagtaaggacagc

SEQ ID NO: 512678 - DNA, 75 bp, Homo sapiens
agccatccctgacacccggcatgaccagtggaatgacatggggaatatcactcataacaagtcgaccattctagt

SEQ ID NO: 512679 - DNA, 74 bp, Homo sapiens
gtacgcgaaggatatcggtttcattaagaagcgcatactgtgctgcctccgtagcctcgctgaccaacatcatc

SEQ ID NO: 512680 - DNA, 55 bp, Homo sapiens
gataccttggtcccagagtcatcatgaagttacctgaccttaaagatgctgaagc

SEQ ID NO: 512681 - DNA, 50 bp, Homo sapiens
gcccggcccggctcgacgccaatgggagccttcacgtaaatgggtccagt

SEQ ID NO: 512682 - DNA, 75 bp, Homo sapiens
gagctcatcaaggacgggaagtcactcataagcgcgctcaagagccagctacagatgcatgcatattgtgaaaac

SEQ ID NO: 512683 - DNA, 82 bp, Homo sapiens
gtcatggagctcactctcctgtccctggacctcatgcaccatattcacatgttggagctggcagacctgaagcatgtgcatg

SEQ ID NO: 512684 - DNA, 98 bp, Homo sapiens
tctgtcagaggaagatcccttggataaaaactggatatgcatctaaaacaagatgtaagtcactgaagatttttagaagaccaaggaaactgttcatg

SEQ ID NO: 512685 - DNA, 100 bp, Homo sapiens
cttccgggaacacctgattttcatacaatcccagcatttgtgccgacgccaccgccgagcccatgatcctggaacagtacgtggtggtgtccaactataa

SEQ ID NO: 512686 - DNA, 100 bp, Homo sapiens
ccagctctgcctttgcacctaaatcctggatggaagatagcttgaacagggctgacaacatttttccttttccgaatacgccagacaccttttgaaagct

SEQ ID NO: 512687 - DNA, 100 bp, Homo sapiens
aggcccgcccaccagttcgcccgtccccctgccccgttcacaattgaacagcagagaatttcaaaggaccttgctaatatctgtaagacggcagctacag

SEQ ID NO: 512688 - DNA, 74 bp, Homo sapiens
ttaaaaaacaaaagatttagatccatgtggacagaaacttttggtcctggacccaagccagaagcctctgcaaa

SEQ ID NO: 512689 - DNA, 100 bp, Homo sapiens
ctttgatagtcgtaccatatgcagaagcggcccttctcagcattcctggctttgttgagcggctttgcaaactggcgactcgaaaggtgtcagagtcaac

SEQ ID NO: 512690 - DNA, 75 bp, Homo sapiens
agcggcttatcgaacagagccgggagttcaagaagaacactccagagatcatccccccgaaggagtggaagccgc

SEQ ID NO: 512691 - DNA, 83 bp, Homo sapiens
gtggggctcatcgtgatcccggcgacatactacctctggccccgagatcagaatgccgagttttccagaaaaagaccttctgc

SEQ ID NO: 512692 - DNA, 75 bp, Homo sapiens
ataactgaaaacattggttgtgtgatgaccggaatgacaggtggttatcactaggctaaaactggacaaagaccg

SEQ ID NO: 512693 - DNA, 100 bp, Homo sapiens
atctataagacttcagggattacataaacctgtgtaccatgcactgattgaagactgggatagtttccaagctattttggatcatacctacaaaatgcat

SEQ ID NO: 512694 - DNA, 82 bp, Homo sapiens
gtagagaggaccccggtacatctgaaagccgggaaatgatggtcagtaggacagaaggtaacattgatgactcgctcattgg

SEQ ID NO: 512695 - DNA, 100 bp, Homo sapiens
cagaatccctggggctggagccacaaaatgaaatgacatttcaacgagtttgtcatcatgtgagagagaatagccaggaggaagaagaggaggatgagga

SEQ ID NO: 512696 - DNA, 154 bp, Homo sapiens
cctcggctacagcttcggcggcgaaggtcagcgccgacggcagccggcacctgacggcgtgaccgacccgagccggagaatcctcattgacactggagaaccagcaattccagaatacatcagctgtttaaagcaggctctaactgaatttaac

SEQ ID NO: 512697 - DNA, 75 bp, Homo sapiens
acaggctcttcagcaaagcaccacggcaaaacttcgagaagctcagtacgctggggaggaggaggaggaagggag

SEQ ID NO: 512698 - DNA, 50 bp, Homo sapiens
ggagtacgcgcgagagccttgtgcatcccaggcagctcttagtgtggagc

SEQ ID NO: 512699 - DNA, 82 bp, Homo sapiens
ctatggccctgacctcggtcccctccggttttaaaatcaaagatgggaaaatcggagaaaattgcccttccccatggccagc

SEQ ID NO: 512700 - DNA, 100 bp, Homo sapiens
ctatgtggaggccctacacagttgcctgcagatcctgatcgcggatgtttcaccaaggaaatattgagagagaagtcggccaggtaggatgaacacaggc

SEQ ID NO: 512701 - DNA, 75 bp, Homo sapiens
agccgcctttccagcatgcaggggctgctcagtgatcctggtggagggattgaaatgtctgagttcatccgagag

SEQ ID NO: 512702 - DNA, 57 bp, Homo sapiens
gcccccacatgctccgcgccccagcacggaataacagaggaagagcggcagtttctg

SEQ ID NO: 512703 - DNA, 90 bp, Homo sapiens
tgcgaggaagctccatcaaaattgtcaggcatatcatcaaggcttatagtgatttaggatactacattatcaataaactgcaccatgtgg

SEQ ID NO: 512704 - DNA, 100 bp, Homo sapiens
ggagccttcataccccgaagtctttgagcctcccttgactggctacccaggggaggagctggaggaagaggaggaaagttatgaaggacagaatctggca

SEQ ID NO: 512705 - DNA, 82 bp, Homo sapiens
cgaaaaagagaagacgctttacccgactctttgggccgttatctcacccccctcggaaaaccacactgagagttgcattaaa

SEQ ID NO: 512706 - DNA, 59 bp, Homo sapiens
cgagccagtgatttacaatagagcaagggatccatatggctttggagacagtcgagatt

SEQ ID NO: 512707 - DNA, 100 bp, Homo sapiens
aagggaaggtcattgtcatcgtggggcatgtggcaaaacacacagctgaggatgaccatgaaagctgtggttctaattctaccaaccgtagtactgctga

SEQ ID NO: 512708 - DNA, 98 bp, Homo sapiens
atcttggatgctgggctttgttatgctgtaattcataaggctctgttttatcagacctgatggccaaaagaaaggaagaaaatttttcctctcctaaa

SEQ ID NO: 512709 - DNA, 100 bp, Homo sapiens
cggactggggtgaaatataccaacaatgaggcctattttgatgtgattgaagagattgatgcaattattgataaatcagtgacgttcaagtgtttctcac

SEQ ID NO: 512710 - DNA, 82 bp, Homo sapiens
tcaatttgtacctgcaggcctcctacacctacctctctctgcgggaatgcatatcagtccacgtgggccaagcgggagttca

SEQ ID NO: 512711 - DNA, 75 bp, Homo sapiens
cttggctctcccacccaatggagatggctctaatgatcatgacaagatgtttaagatgagtgaaaagatattact

SEQ ID NO: 512712 - DNA, 100 bp, Homo sapiens
tcgcgggaagacttcgagtgggtctacaccgaccagccgcacgccgaccggcgccgggagatcctggtgcatttgctgaaaaaaaccctgcagaaatgcg

SEQ ID NO: 512713 - DNA, 75 bp, Homo sapiens
tttgcctactgaagagcttatcagagctctacttgggaaagaggataagatcaatgccctcattaaagcagccgg

SEQ ID NO: 512714 - DNA, 90 bp, Homo sapiens
gaagaaacttgcaaaagtatctcatatgaccagtgggcccagtcatatatgcacagttagaccactccggcggacatcacagtgacaaga

SEQ ID NO: 512715 - DNA, 74 bp, Homo sapiens
tacgagaaatgttagagaagaaagacagctttgtggaagagagtctaaatggtgtttggctgaacagagcgcgt

SEQ ID NO: 512716 - DNA, 82 bp, Homo sapiens
cagatagaaaacggcgagagtgggcgagaacgtccactgcgggccggcgaaagctgctacgagttccagggagctctgtcct

SEQ ID NO: 512717 - DNA, 75 bp, Homo sapiens
ccggctgcgacagttacagcagctacagcagctgcgagacagtggcgagaagtccagaacacatattacataatg

SEQ ID NO: 512718 - DNA, 50 bp, Homo sapiens
gtccgagggcagtctgtgtcaaacgcagggcagagcggcttgggtaaatc

SEQ ID NO: 512719 - DNA, 75 bp, Homo sapiens
tagacctgaagccatacaaagtaagctggaaagcagatggtactcggttttaaaatcaaagatgggaaaatcgga

SEQ ID NO: 512720 - DNA, 82 bp, Homo sapiens
tgcccgctcacctgcgctgtgatgcctgcagagctgtggcttaccagctggagaatgctggaggagaccttaaggatggcca

SEQ ID NO: 512721 - DNA, 92 bp, Homo sapiens
caactgctttcctttccctcagcacacagaggatgatgctgactttgatgaagatgtacagatcagctctcaaaatgtcttctgtgtcttct

SEQ ID NO: 512722 - DNA, 100 bp, Homo sapiens
gccagtcgcctccaggccaagagggatccttcacccgtgtctggacctcccactctcgggcaaaggccgaggcagccctcacagcagctcagaaagccca

SEQ ID NO: 512723 - DNA, 83 bp, Homo sapiens
caagcttacgtctctgctcttcagtacaatcctagcactgcagtttcctcctgaaggctggctccggctctccctcaataatg

SEQ ID NO: 512724 - DNA, 100 bp, Homo sapiens
cccttctgccccagctccgtctcggcggcggcggattgggaaaatgaggtacgttagtgttcgcgattttaaaggcaaagtgctaattgatattagagaa

SEQ ID NO: 512725 - DNA, 99 bp, Homo sapiens
gctggaaaagagggtggaaaaagcagggaggttatgaggcttaataaagaagcatgatgccttcttctgtagagtgggcgctttgcagaatacgtgttg

SEQ ID NO: 512726 - DNA, 90 bp, Homo sapiens
gaactggttgattcatcttcattatatccggaaagattatgaagcctgcaagcctgaactgacatcaactcccaatttcgtggttgaagt

SEQ ID NO: 512727 - DNA, 80 bp, Homo sapiens
tggggatattatcaaatctactactgttcatggcagtacgaatgtaaagttatcgcagaaaaatctcatcaggaatgaag

SEQ ID NO: 512728 - DNA, 100 bp, Homo sapiens
ctgacactatggacttcagacatgcagggtgacgaatcatattctaagaactcagccactcaggtatccaccatggtgctgggtcctgaacagaagatgt

SEQ ID NO: 512729 - DNA, 100 bp, Homo sapiens
catcgtcgagggcatcctcaagcggcctcctgacgagcagcggctgtacaagtttcagtcattcagtcagtaccgctgtaagactgccaagaagtcagag

SEQ ID NO: 512730 - DNA, 83 bp, Homo sapiens
aaatgcaacttgaaagccttggaattttaccagatcgaatctgggccaaatagaaagacatgaagagtatttctggagaagaa

SEQ ID NO: 512731 - DNA, 75 bp, Homo sapiens
agattctggaggaaaggtttacaagcaggccacgattgaatctctgaaggtgtggacactgccagcggctgcagc

SEQ ID NO: 512732 - DNA, 96 bp, Homo sapiens
aagactttgaaataattaaagtaattggaagaggtgcttttggtgagagattggtacaagcgcaattttgccatcaccttcttcatgggaaaagtg

SEQ ID NO: 512733 - DNA, 87 bp, Homo sapiens
aagctgcatccctttgatgccggaaaatggggcaaagtgatcaatttcctaaaaggcattgatcaatatgacagagatagcatcata

SEQ ID NO: 512734 - DNA, 100 bp, Homo sapiens
ccgggcttttgctgatatgcatgcatgtaccgaccttctgaacaaggccaacacctatgcagtctccaaacgtccacaactatcccgatatggaagccgt

SEQ ID NO: 512735 - DNA, 90 bp, Homo sapiens
ctcctctccgtctccctggaccgctgtgtaggcacctgagttaacggacgctaagcggggtaggggaagagatgggcagtagcgaacccc

SEQ ID NO: 512736 - DNA, 100 bp, Homo sapiens
ttcctgcatggattgggagatactggctccatctgatccactggaactccactctgtttggcagcattgatgaggctgtggggaagccgcacggaatcgc

SEQ ID NO: 512737 - DNA, 82 bp, Homo sapiens
tgctcctcgccgcggcggggactgcagatgccgacaaaaggatcaaggtggcgaagcccgtggtggagatggatggtgatga

SEQ ID NO: 512738 - DNA, 50 bp, Homo sapiens
gattagtccacagtcttcctctatagatacctcggatctgcattttcaag

SEQ ID NO: 512739 - DNA, 83 bp, Homo sapiens
tcgaaaggtggagcccccctttaaacctctgttggttgcaaaagcttctcatttcagagagatgccaggatcctaagtgcctg

SEQ ID NO: 512740 - DNA, 75 bp, Homo sapiens
ccggggacccttccgtatctgcctaggcattttgctgtctcctcctaatacggtccttcaagggttagattactt

SEQ ID NO: 512741 - DNA, 82 bp, Homo sapiens
gcgcgcgaacccggctttcgcatttgggaccctgcaggcctccactgagcttcagcaagtcatcctgatctccgtgggaaca

SEQ ID NO: 512742 - DNA, 100 bp, Homo sapiens
ggccggcgcgggaagccagccctcggctccgggtccacaagaccttcaagtttgtcgtcgtcggggtcctgctgcagctcaatctgaaattgaagtgtct

SEQ ID NO: 512743 - DNA, 100 bp, Homo sapiens
aataaacaaggggcatccaaatcttgcggcaacgcccccgggacatgcatcgtcccctggactctctcaagcctggttgcagtatgcctgaaatttggga

SEQ ID NO: 512744 - DNA, 74 bp, Homo sapiens
ccagcacgcgcctgcttcccgtctgcgcgagtccacgcagctccccagcagtcctgcgttaactgcggccggga

SEQ ID NO: 512745 - DNA, 89 bp, Homo sapiens
gcggtggagcatgagtctggctgatgggtctgtgaagaaatcccggatctcaagctcgctatggagaattacgttttaattgactatga

SEQ ID NO: 512746 - DNA, 100 bp, Homo sapiens
gacaggcttgagcggcggggcgcgctgcccggccggcggggatgcgggaccggctgccagacctgacggcgggagtaccctgacttctaccggaagctct

SEQ ID NO: 512747 - DNA, 100 bp, Homo sapiens
ccccgaccctctctctgtcctcattgcgcccagacgggccggcccagagctcccgggtcgtctttcgtgtggccgcgagtagagacggggtttcgccgtg

SEQ ID NO: 512748 - DNA, 82 bp, Homo sapiens
tactggaggcggcccgcttcctggaatggcaagcgcagcaacaacagagagcacgtggtgaagatcatgacggagaaggaac

SEQ ID NO: 512749 - DNA, 100 bp, Homo sapiens
gattccacagaatacagccaacctccaggtttcagtggcagttctcaggccaaatttgagtccctctttaggacgtatgacaaggacatcacctttcagt

SEQ ID NO: 512750 - DNA, 100 bp, Homo sapiens
ggctacaggcgtgtgtcactgcgcccaggttaagcagctgcaggaggaaacgccacctggtggtcctttaactgaagctttgccccctgcccgaaaggaa

SEQ ID NO: 512751 - DNA, 75 bp, Homo sapiens
gtgtttccatcgcttgtggcatcctgctagctgccctgcagaaggccaatgatgaggccaatcagagtgatacaa

SEQ ID NO: 512752 - DNA, 101 bp, Homo sapiens
ggcccgctgcagccgccgccggcgccgaacttgggctcgggaagccggcggaccgcgtcctgcgccggagcaggtcagtaacagatccaagagatggaaag

SEQ ID NO: 512753 - DNA, 83 bp, Homo sapiens
gcccagctcccgtagggagccgtgggcgctcggtgcccgggccgggcagccttgagaaggaaaattatgacgtttgggctaaa

SEQ ID NO: 512754 - DNA, 100 bp, Homo sapiens
gggtttgggaaacaaggcttccagtgccaaggtagctacagcaagctgggtagcaggcagatccaaaggatatcatgaagtttccagggcctttggaaaa

SEQ ID NO: 512755 - DNA, 101 bp, Homo sapiens
tttcacttcttcagaaagcctccggaatctaaaaagccctcagtaccagagacagaagcagatggattcgtccttttaggaaattgacaatggcccttcag

SEQ ID NO: 512756 - DNA, 75 bp, Homo sapiens
cgaacacctcactattgatggtgtagcgctttaggggaaggaagaggagttgtacgcatgtcagagaggttgcag

SEQ ID NO: 512757 - DNA, 75 bp, Homo sapiens
ctgaaatgggggcgaccattcttagactcacagatgaatgcttctcacccggaaacaaacttgccagttgggtat

SEQ ID NO: 512758 - DNA, 87 bp, Homo sapiens
aactgtcggaacagaaccaaaggctattggatcagctcagcaggagttttgattcatcatggataatctgtcatcagaagaaattca

SEQ ID NO: 512759 - DNA, 100 bp, Homo sapiens
ggaggtgtcgcaggagcacatcgagaccgcttaccgcatctggctggagccctgcattcgcggcgtgtgcagcatcaacaacagcaacttgtgattggcg

SEQ ID NO: 512760 - DNA, 100 bp, Homo sapiens
gggatcgtgaccgagaccgtgaccgagagcgtgaccgagagcgcgaatatcgtcatcgttagaagtcgaggctgtctgtcaacagcgtgactgctggaga

SEQ ID NO: 512761 - DNA, 102 bp, Homo sapiens
aaaatcagtgattctacatctcaagctcatattttgaagtgtttacggatgtcagtattgaatatggtggtgaggcgtgaccctggcaacactgaacctgtg

SEQ ID NO: 512762 - DNA, 50 bp, Homo sapiens
ccggcggctgctcatggaagatggatggccgccaagaacgagtcatgttt

SEQ ID NO: 512763 - DNA, 75 bp, Homo sapiens
cagtgtcagttacctccgggtgaagagcttcttccaaggctgcgtcatcaccatctcgggacgcatgaccttcac

SEQ ID NO: 512764 - DNA, 78 bp, Homo sapiens
ggagaactacagaaacctggtctccctaggggaacgcccttttgcttgtgactggcagggctgcgacaagaagttcgc

SEQ ID NO: 512765 - DNA, 50 bp, Homo sapiens
ttcaagaccagcctgggcaatatggtagtaaacctattgatggcaatttt

SEQ ID NO: 512766 - DNA, 75 bp, Homo sapiens
aagtgtccagcgacagcttctgggagggaggagatatcaccaaacatgatggaacaggcggacagtccatttatg

SEQ ID NO: 512767 - DNA, 100 bp, Homo sapiens
tggctcattatagcctcaaactcccaggctcaagcaatcctaccatgtcagccttcccagtagctggaactacagacctggcagcctgggtgtcatggag

SEQ ID NO: 512768 - DNA, 108 bp, Homo sapiens
gtactctgggtgactcagagagggaagagattcagccagcacactcctcgcgagcaagcttcctgcctgacacagctcacttcaagaagtgcacaatgtcagaacgtg

SEQ ID NO: 512769 - DNA, 100 bp, Homo sapiens
ggactgcaaaccgagctcccgtctgccttgcagcttcccgtggaggatgacattgacctcagtgatgtggagcttgatgacttagggaaagatgagttgt

SEQ ID NO: 512770 - DNA, 83 bp, Homo sapiens
cgcagggggacggggaccagcagctgtcgccgccgctctcaggggcctttacaacaactaaacggacaggcattccagcccca

SEQ ID NO: 512771 - DNA, 74 bp, Homo sapiens
agacgcctccaggatctgtcggcagctgctgttctgaggtgtggccgacgacgatgccctcgctgaggagcgca

SEQ ID NO: 512772 - DNA, 90 bp, Homo sapiens
tgaagtgttgaagtttgtctcctgtcctcctgaccctcacaaagggatcgacatttctcttgggaagttgtgcatctgacaggaatatag

SEQ ID NO: 512773 - DNA, 82 bp, Homo sapiens
cgctgtaaataattaagaagaccaagtagcatccaaggagaaaagccttacagatgctcatgggaagggtgtgagtggcgtt

SEQ ID NO: 512774 - DNA, 82 bp, Homo sapiens
tttggagacaaaactatgccacgggagatacagatgacccaccaagaattactcagaaccctgtgatcaatgggaatgtggc

SEQ ID NO: 512775 - DNA, 90 bp, Homo sapiens
tggatgaaatgaatcatgattttcaagctcttgcattagaatctcggggaatgggagagtgaatggtagtgtctagaaagggtatgtccc

SEQ ID NO: 512776 - DNA, 75 bp, Homo sapiens
acagacgtggctactatggaaggcgccgtggccctccccggaattattttcatctcagcctagtgacgatgaatc

SEQ ID NO: 512777 - DNA, 75 bp, Homo sapiens
atgtcatcaggctggcccagaaggaggaggagatgaagagaactcaatttcctgtatctactgagtctcaaaaac

SEQ ID NO: 512778 - DNA, 98 bp, Homo sapiens
cagcgctccacagccatcttcttctactgtgaccgcggcacccagcgggaccctgatgctcccataagacagaaaatgccccttgatgatctggatag

SEQ ID NO: 512779 - DNA, 100 bp, Homo sapiens
ttaaaaaaacattggaattctgcttatctaggcgcacatggcacagcactcaagcctacggccccaccagtgtagccagtgcagctttgcctccaagaac

SEQ ID NO: 512780 - DNA, 50 bp, Homo sapiens
ggaaaatgcgctcgggctggaccagcagttccagggtctccctccactgc

SEQ ID NO: 512781 - DNA, 82 bp, Homo sapiens
agaagtcgcgtgtctaggtgagtcgcggtgggtcctcgcttgcagttcagcgaccacggtgtccctggccagtgtccttcca

SEQ ID NO: 512782 - DNA, 125 bp, Homo sapiens
cgggtgtgtgggcgcccagcacgactcctcgggcagcctcaacgagaactcggagggcaccggagagctggacagaggcctcacggagccccagatacaggtggtttgccgccagatgctagaag

SEQ ID NO: 512783 - DNA, 110 bp, Homo sapiens
gcgggactcagtcccatcactccaaggagagaagaataactgaagtgaagtgatggactccgatttggagagtagtaagacgtgaaaggaatacacttgtgtttaagcac

SEQ ID NO: 512784 - DNA, 80 bp, Homo sapiens
ccaagggacaatggtcaccgtctcttcagggtaacaagatgctcaactatagtgctcccagtgcagggggttgcctgctg

SEQ ID NO: 512785 - DNA, 98 bp, Homo sapiens
atatcgggtggcggctcgggacggaggacgcgctagtgaacaggagtacagctgtgtagtaaagatgccttctggtgaatttgcacgtatatgccgag

SEQ ID NO: 512786 - DNA, 100 bp, Homo sapiens
cgaaaagccacttgaagaaaagggtgaaggaggcgaattttcagttgatagaacattactactggatggaaatccattccgagttcctcgagcagccata

SEQ ID NO: 512787 - DNA, 148 bp, Homo sapiens
ggtcatattgaacattccagatacctatcattactcgatgctgttgataacagcaagatggctttgaactcagaactctcctgatgaatgcagtgtggccaaaggcgggaagatggtgggcagcccagacaccgttgggatgaactac

SEQ ID NO: 512788 - DNA, 90 bp, Homo sapiens
aggacctccttcttcaggagagcgccccagggcaagccccgctccggccaacaagtgatctgcaactctttcaccatctgtaatgcggag

SEQ ID NO: 512789 - DNA, 82 bp, Homo sapiens
gcgctggaagggatgtcgtctcagcagtgctcgggcgcaggtcagcccaaggccaaccccactgtcactctgttcccgccct

SEQ ID NO: 512790 - DNA, 123 bp, Homo sapiens
gccggggaccctgtacgtgtacatcatttacggcatgtacttctgcatgaacatctccagccagggtgcctgtgaagcatgtgtaccgtgtgctgcagtgccaggaggaggagctcacgcaga

SEQ ID NO: 512791 - DNA, 100 bp, Homo sapiens
gtccatccatttcgtggttcacccgctgccgggcaccgaggaccagctcaatgacaggaaatctgaaatagagtactatgctatgttggctaaaactggt

SEQ ID NO: 512792 - DNA, 106 bp, Homo sapiens
gcgcgaagctggccaaagcctgcccagacggctcacctgtgcgggatggaacaaaagagtgtgaacatggctacgcctcttcattcccgtccatgccgagcccccg

SEQ ID NO: 512793 - DNA, 74 bp, Homo sapiens
gtgaaatccatgagcgtggatgagacagataagattcaacctagaatgacactgagcaaattgcctcttcaagc

SEQ ID NO: 512794 - DNA, 75 bp, Homo sapiens
ctgatctggcctcatctgttccagggaggtgggattgaaaagatgtgtcatggcaatgctgagaaggaggatcag

SEQ ID NO: 512795 - DNA, 90 bp, Homo sapiens
cccgcgtccgccgattcctcctccttggtcgccgcgtccttggctggcgtatctcacattcttgaaggtggcattgaagagcactaagat

SEQ ID NO: 512796 - DNA, 75 bp, Homo sapiens
ttctataacgtgctggtggaggacggctcctgtcgatacgcagcccaagatgtcatcgcaacagataaagaagac

SEQ ID NO: 512797 - DNA, 87 bp, Homo sapiens
tcccacttccgaaaccacaagtttgccgatatgcagaggccaggatgtgggcccagccctgtgccaggaggctggctggaataaagg

SEQ ID NO: 512798 - DNA, 83 bp, Homo sapiens
cgtcatcctgctgctgaagatctggaagacgcgctcctgcgccggtggaatgaatcttacttgttgaatatcttctggttact

SEQ ID NO: 512799 - DNA, 75 bp, Homo sapiens
ataacccagtgcacacattaactgaagtggagcttctggcatttacatcagtgggtcatgataactgggtacgtg

SEQ ID NO: 512800 - DNA, 90 bp, Homo sapiens
gtcctgagatcaaatggcacttcattggccacctacagaaacaaaatgtcaacaaattgatggccgctccagcctcaatgccaagcccca

SEQ ID NO: 512801 - DNA, 101 bp, Homo sapiens
gacgcagctgcggaaagccgaggcggtggcgctcaagtaccagcagcaccaggagtccctctccgcccagttacaaggttttaaatgcacagagagcagga

SEQ ID NO: 512802 - DNA, 100 bp, Homo sapiens
cctcagcctcctgagtagccgggactacaggtcataccccggccctggcttgcgctcctaacaaagacgtggctgactgcctggccctcattttggctac

SEQ ID NO: 512803 - DNA, 83 bp, Homo sapiens
acgattatcgatgttcataccgaattcacaatggacagaagttagtggttcctgggcaacaagattgacctggctgaaaggag

SEQ ID NO: 512804 - DNA, 100 bp, Homo sapiens
accgtcgctagaactcagttgtgcgttgcggccagtcgccactgcttggttggatttcatcccttactggtctcaaccaaaatattcctgttggaatcat

SEQ ID NO: 512805 - DNA, 101 bp, Homo sapiens
tggctataccctgaagagccaactagacatcttgagcctcctgaaacaggcgtcctgcctctgcggctctgccccctgcatcctgtgcagctgctgccccg

SEQ ID NO: 512806 - DNA, 100 bp, Homo sapiens
tctcctcctcggcgggagccctcgcgacgcgcccggcccggagcccccagcgcagcggccgcggtatgtcgagagtaccaacgtggcaattgcaaccgag

SEQ ID NO: 512807 - DNA, 90 bp, Homo sapiens
aagacatcatttgggaccaagctgatgagcccttgaagcacagcagatcggacagctggcttttaaaggaatgaagagactcaatagaat

SEQ ID NO: 512808 - DNA, 75 bp, Homo sapiens
acgttctcaaggagaaggcagacctgggcgacctgggagacccagccagtaccgcccagacggacttcggagtgg

SEQ ID NO: 512809 - DNA, 101 bp, Homo sapiens
gtgggagtctccgcgtcccgctcgctgggagagaggtacctctccttttccctctccctttccctaagaaaggcctaaagaatgtatttgacgaagcaata

SEQ ID NO: 512810 - DNA, 87 bp, Homo sapiens
ccagcctaggttccacccttttctgggaacgaaccactcgttttgactattattttatcactctttgtgaaacttcacaatgttcgg

SEQ ID NO: 512811 - DNA, 50 bp, Homo sapiens
ctgctggtggctgtggactggctgctaaaccagcctggacaccaagtctg

SEQ ID NO: 512812 - DNA, 75 bp, Homo sapiens
agtcgcctgctgctgtcgtcgggagaacaggggtccttatgtgttgttccagcccaggatggcggcccaggtgac

SEQ ID NO: 512813 - DNA, 82 bp, Homo sapiens
gcgaacgaccaagagggtgttcgactgctagagccgagcgaagcaataccgtagcagtaggcaggacagttccaattcaaca

SEQ ID NO: 512814 - DNA, 83 bp, Homo sapiens
ctttggcaaaggattccaagcaaagatcttccctgagaatcatggaagggaagtggttgctgtgtatgttactggtgcttgga

SEQ ID NO: 512815 - DNA, 75 bp, Homo sapiens
cgctgactgcgtgttaacatcaggatctgcctacaaactggtttgctactttaccaactggtcccaggaccggca

SEQ ID NO: 512816 - DNA, 50 bp, Homo sapiens
caaaatccaccagactgaacacaggagaattctgcttggtcagaatcgtg

SEQ ID NO: 512817 - DNA, 90 bp, Homo sapiens
tcctcggcactgtattctttacctgcttcccaatcccactgatgaggatcagcccatggtgaagcatatatgcgtttaagcaaactcccc

SEQ ID NO: 512818 - DNA, 90 bp, Homo sapiens
gcgcagcaacaacagagagcacgtggtattgttgcagcatctggcagtgagactgaggatgaggacagcatggacattcccttggacctt

SEQ ID NO: 512819 - DNA, 101 bp, Homo sapiens
tctcaacatccaaacccctgacagccctgtcagataagagaccaaactatggggaaatccctgttcaagttccagggccctgcgaaccagaagacctcatc

SEQ ID NO: 512820 - DNA, 100 bp, Homo sapiens
gagccttgttgatccttaacgagctggtccgaatcagcagcatggagggagaggacaatctctatgggaagcagaaggcaaggaccccggtcattttagg

SEQ ID NO: 512821 - DNA, 90 bp, Homo sapiens
atccagaatgaaatccatgctcagagatgccaagaagaatctagacagacaggcctttctagacacgatgaggcgagtggtacgacagag

SEQ ID NO: 512822 - DNA, 82 bp, Homo sapiens
ggaatatcgagagcgtcatgaacccgagctatagagaaaggagatgaggtactccaaagattcaggtttactcacgtcatcc

SEQ ID NO: 512823 - DNA, 95 bp, Homo sapiens
tgactttcagctatggaatcgccctgggcgctgcctatggcacagccaagagcggtaccggcattgcggccatgtctgtcatgcggccggagcag

SEQ ID NO: 512824 - DNA, 83 bp, Homo sapiens
agactacggacctgtctgggtctcagccgccaaagaccccgtccggtaggttaacacagaaatctgcctcctgggccatgccg

SEQ ID NO: 512825 - DNA, 100 bp, Homo sapiens
cctaaagtctgagagagggaagtcgcctctgtgctccgcgagcttcggcctcggctctgtaccatgaagaagggccccagtggctatggcttcaacctgc

SEQ ID NO: 512826 - DNA, 75 bp, Homo sapiens
agctggagagcgtggacaagagcgcggggcaagtggctcggaacacaggagcttcctggacgatttaacaggtcc

SEQ ID NO: 512827 - DNA, 100 bp, Homo sapiens
cagggctcgtacttctgctcgcagtgtccccaactcctgcccagccagtccacgcggtgccggctcctccagttaccgctttgtgcagaacgtgacctcg

SEQ ID NO: 512828 - DNA, 75 bp, Homo sapiens
aaatgaacatggtaccacacaggcagaagcatctctcatggttgtggatgaggatcgcagtacggaacctgaccg

SEQ ID NO: 512829 - DNA, 114 bp, Homo sapiens
cgacgaggagcagctcactgcgaaaactctctatatgagtcatcgagagctacctgcctgggccctgtctctgcccctggtggtcatcgtccatggcaaccaagacaacaatgc

SEQ ID NO: 512830 - DNA, 98 bp, Homo sapiens
aaccctggggactacgacgtccctcaaaccttgcttctaggagataaaaaggaatcccagtcagaagttccagcctgccactgttctctgatgccatg

SEQ ID NO: 512831 - DNA, 100 bp, Homo sapiens
tgtaccggcgcaccgtgcgcctccgccgccgccttccctgccgcctgcttggcccggaggaggacgaggaagagctagccaaagctatgatattgggaag

SEQ ID NO: 512832 - DNA, 51 bp, Homo sapiens
ctgagtcaggcactgggtcagggaataaacattacaacggtggctattcca

SEQ ID NO: 512833 - DNA, 98 bp, Homo sapiens
ctgtaggaaagcggaagcggcctggcaggggaaggatcgagatgatgattattctccaccgtctaagagaccaaaggccaatgagctaccgcagccac

SEQ ID NO: 512834 - DNA, 75 bp, Homo sapiens
ggctctggctgtgcgcgctggcgctgagcctgcagccggccctgccgagacacctatggctgccgatgaaggctc

SEQ ID NO: 512835 - DNA, 118 bp, Homo sapiens
ccactacagctgttcccagcttggttgcacttgagaaaattaatgtggcaggtgatgatgaacagtctacacagatggctgcaagttgggaagatgataaagttacagaagcatcttc

SEQ ID NO: 512836 - DNA, 75 bp, Homo sapiens
agagctcgccccgaacgggggtcttcctcctccgccgttgacaggagcttactccacgggaacagcctctagata

SEQ ID NO: 512837 - DNA, 80 bp, Homo sapiens
gtacccactgagccagcctctgcacatgctgttggaacgtctcggatctatgggcatcttcctggacaagatcgacgtga

SEQ ID NO: 512838 - DNA, 75 bp, Homo sapiens
gagaagcccggcgacggaggaacgcaggtctgctgccaggcaaagcgaaggctggagctaggagaaagcggtcat

SEQ ID NO: 512839 - DNA, 90 bp, Homo sapiens
ctgtgagatgtttcatcccaacagcccagcagtgagaaactttcacaatctgtaatagatggtgtgactgttctaggaggtcaattccat

SEQ ID NO: 512840 - DNA, 76 bp, Homo sapiens
aatacagatctgccagcaggttgagatgccacctcagtatggacagcaaggtgtgagtggttactgccagcagggc

SEQ ID NO: 512841 - DNA, 88 bp, Homo sapiens
ggggccacaaatgctccttctcctggagacgcaactcaaggagatgaaggagttcagcagccagctggccggccaggtcaatgtggag

SEQ ID NO: 512842 - DNA, 100 bp, Homo sapiens
ttatgatcaggcaaagcgggtgcctagatgggttcttgaacatatttccaaaagcaagataatggggagccttttcataagctgctggcccaaggcctta

SEQ ID NO: 512843 - DNA, 100 bp, Homo sapiens
agcccgttcgctggactgcaaaccgagctcccgtctgccttgcagcacacgtcacatggagatgggcgtcaagaagttacctctcgtaccagccgctcag

SEQ ID NO: 512844 - DNA, 90 bp, Homo sapiens
ctttaggagagctgtgttctctgcagattctaattacagaatgtctgaaggggacagtgtgggagaatccgtccatgggaaaccttcggt

SEQ ID NO: 512845 - DNA, 112 bp, Homo sapiens
caaaggacaaactaagagaaacttggcgaaaggcaaaggagccagtggggtgggtcgcagccacattaagaatgccctgctcagccagaatccggagaagtttgtgtaccct

SEQ ID NO: 512846 - DNA, 50 bp, Homo sapiens
gcggatgcggtcgtgaagatagttggttgaatctggcgatgtggaaccca

SEQ ID NO: 512847 - DNA, 75 bp, Homo sapiens
gttataagatgctcatcccgcagctgaaggagagtctacagaacaccttccaccatgaccacctcagcaagttcc

SEQ ID NO: 512848 - DNA, 51 bp, Homo sapiens
gctggttataatccttcaatataaaccgaaccctcaccaaacagatctgct

SEQ ID NO: 512849 - DNA, 96 bp, Homo sapiens
cgcagtggtcgcttcttctccttggtatcattccttggaatgctttccccggaaaaatatgtggctctgccctggagaacatctgcaacacaaacg

SEQ ID NO: 512850 - DNA, 100 bp, Homo sapiens
tctgcccggcgcttcggcccgggccgctcaggtgcaggtacttttacccatttccagttccacctttactttatcaagtggaactttctgtgggaggaca

SEQ ID NO: 512851 - DNA, 100 bp, Homo sapiens
ttctccctcgaactttaaagtccgcttctttgtgttaaccaaagccagcctggcatactttgaagatcgtcatggggtaatctgtaagtcagatgctcca

SEQ ID NO: 512852 - DNA, 100 bp, Homo sapiens
tggtcaaccccaccgtgttcttcgacattgccgtcgacggcgagcccttgggccgcgtctcctttgaggttagaaaatggatttctgactggaatctcac

SEQ ID NO: 512853 - DNA, 50 bp, Homo sapiens
tgcagaacctggacgtccatacatcggtggtgcttaaaggtgatgccaag

SEQ ID NO: 512854 - DNA, 75 bp, Homo sapiens
gcaaaatggcggatcatgtgcagatgatgccatggagagcagcaagcctggtccagtgcaggttgttttggttca

SEQ ID NO: 512855 - DNA, 50 bp, Homo sapiens
tgagagttggccccgatatccgctcagggacaactacacctttgcccaac

SEQ ID NO: 512856 - DNA, 50 bp, Homo sapiens
ccagacgaatgcagcttcgtttgatgagaaaaggttctgcaggacgatga

SEQ ID NO: 512857 - DNA, 75 bp, Homo sapiens
ccggcagcagtgtcctgtgctgatggtgttggcagggtccgcaagcaggtggtgaacatcccgtccttcattgtc

SEQ ID NO: 512858 - DNA, 75 bp, Homo sapiens
gactttctgcagtgcctctgagaacttacgcagatcagccgagtgtggccgacgacgatgccctcgctgaggagc

SEQ ID NO: 512859 - DNA, 82 bp, Homo sapiens
cgctcatcatcccccccgacgccgtcgcggtggactgcaaggatgagtctgctccagctgacaaacagtgtaaaccagaggc

SEQ ID NO: 512860 - DNA, 100 bp, Homo sapiens
ctgggagagggcacgcgggacgaggagccctggggtcccatcgatttctacctggacaaggactggtactatacccacagataggagacaaattggatat

SEQ ID NO: 512861 - DNA, 75 bp, Homo sapiens
cttatcttaatggaatattgtcgagttccatgccattgcagtgtcaactaggcctcagttacttttcagtttgcc

SEQ ID NO: 512862 - DNA, 106 bp, Homo sapiens
gtcaaggagcttgacagagacacagtttttgctctggtgaattacatcttctttaaagctaagtgggagacaagcttcaaccacaaaggcacccaagagcaagact

SEQ ID NO: 512863 - DNA, 100 bp, Homo sapiens
cgaagtcagaatttcctgtgttccctttgccgctcctggagttcactgaggagaattctgcctaagccaactcgaaaaagccgtacaaaaaataagcaaa

SEQ ID NO: 512864 - DNA, 100 bp, Homo sapiens
cagaatttgatgctgtggttggatatttagaggacattatcatgggtgcccgtcctgtagctttccggctctgttggacagtgatgtgaagaggttcagc

SEQ ID NO: 512865 - DNA, 100 bp, Homo sapiens
cctgattacttatctggagcaaggaaaagagccctggaatatgaagcaacatgagatggtggatgaacccacaggtcagcaagtcctgggcttggtggag

SEQ ID NO: 512866 - DNA, 60 bp, Homo sapiens
tttacttttacctacgttggcggccccagaaggtatacaaaactaggatatgctggaaat

SEQ ID NO: 512867 - DNA, 95 bp, Homo sapiens
agctggactatggcatctatgttatcaaccaggtggccaagcaagaggagttcttcaacctgtcccactgccaactggtgaccctcatcagccgg

SEQ ID NO: 512868 - DNA, 74 bp, Homo sapiens
ccttgtgctccaggctgccccataataatgtccccaactcctgcccagccagtccacgcggtgccggctcctcc

SEQ ID NO: 512869 - DNA, 50 bp, Homo sapiens
atcaaaactgccttcagaagcaaaaggtcccacacttacagggaaagcat

SEQ ID NO: 512870 - DNA, 100 bp, Homo sapiens
ccactttgcattgactggaaacaatggcatttacagaaagagtcaacagcagtggcaacagggctggaaaggagaggaacaaagcagacagatatgccct

SEQ ID NO: 512871 - DNA, 97 bp, Homo sapiens
gcgtgtgttgaaagtacaattctattgcacatcaatgatatcatcccagggcacacgtgtttcacgttgacaggtttgcttgggacgctagtaacca

SEQ ID NO: 512872 - DNA, 83 bp, Homo sapiens
gctgcaggcggttgtggactctctccaagattttgcaagaacgaggctcaaggatgtgagggacacagtattgacagctgaag

SEQ ID NO: 512873 - DNA, 110 bp, Homo sapiens
ggcccagcctctgtgactccgttatctgcaggtattgggagatgcacagctaagatgccaggaccacctggaagcctagaaatggtacaagttgcttaaccaagaagaag

SEQ ID NO: 512874 - DNA, 100 bp, Homo sapiens
gcaagctgatcaagaacaatgcctccactgactatgacctatctgacaagagcatcaaccctctggatgaagagaggggagctctttgactacctcactg

SEQ ID NO: 512875 - DNA, 75 bp, Homo sapiens
cttgtttgtggatcgctgtgatcgtcacttggtgaggcttcgagctctgaggaagagcctccatccccagatgat

SEQ ID NO: 512876 - DNA, 100 bp, Homo sapiens
agcccagcaccggccggatggagcgtccgcaacccgacagagaaaaaagagtgccggcgggaccaccgcccaccgtgtgctcaggaggcgccccgcaaca

SEQ ID NO: 512877 - DNA, 98 bp, Homo sapiens
tgcacacgagggtgtcctgagctgcattgcactcaacctgcagggaacaagaattgcaactgcatccgagaaaccacaagtatatggttatgatgact

SEQ ID NO: 512878 - DNA, 116 bp, Homo sapiens
ccggcttcaggaggcccaagacaccacagaagccctccgagcccaggtctccataaattgtctttgggggattccaccacacccaatgctctggagccacaaggagtgtcccttct

SEQ ID NO: 512879 - DNA, 100 bp, Homo sapiens
caagtgaagtgtgctgatgaagtcctctataaggtgacaaaaggtgagacactcacctagaacagtgccgtgctgctgctgggaagttgctttacacaac

SEQ ID NO: 512880 - DNA, 75 bp, Homo sapiens
gctgggtccaccgacccttaccctcagcgagagaagtaaccgtgcaaattgagcatgacccagaattagaaaaag

SEQ ID NO: 512881 - DNA, 82 bp, Homo sapiens
cgcggcccgcccggatcgtggcctctcgagagcaagggctgaagaagatgcagagcagcctgaagctggtggactgtatcat

SEQ ID NO: 512882 - DNA, 100 bp, Homo sapiens
ccagaatggttatctacacacccttctcatggcaatcgagttgagtacttggatagacttatacctcaggcatttgcataacaaccgcatccagcatctg

SEQ ID NO: 512883 - DNA, 74 bp, Homo sapiens
cttgctggattatatctacaggaatgaagctgataggaccttgatatatataactctctacatttctgaatgtc

SEQ ID NO: 512884 - DNA, 96 bp, Homo sapiens
caaactcttctgaaaggtgggcaacctagaaagccagttgatgccacttgctattggagttgtggttattgccttgtctgtcaagatccgcagtta

SEQ ID NO: 512885 - DNA, 90 bp, Homo sapiens
gaggcattttggggcagaatacagagatatggaatcagtgatgcagccaacacgaacggttgtcatgtgtaacacaactttcgatcaccg

SEQ ID NO: 512886 - DNA, 74 bp, Homo sapiens
gacggacagtacctcttctgcaggtactggaaacccacaggcacacccaagaaatgatcgaaatggcctagatt

SEQ ID NO: 512887 - DNA, 90 bp, Homo sapiens
cgacagtctgtctgttcgcgatcctgccggagccccgccgccgccggcttggattctataaacctggagagtaatcctaagaaaaatcat

SEQ ID NO: 512888 - DNA, 75 bp, Homo sapiens
gcgcgtgcgcggacatggcctcaaacggtggctattatcatggaaaactaatttttcccagagaatttcctttca

SEQ ID NO: 512889 - DNA, 98 bp, Homo sapiens
aagacttcccgcaacatccactccttggaccacctcaagttaaaaagatcaagtggcatgagcagccttttggggaaaattggtgccaagaagcagaa

SEQ ID NO: 512890 - DNA, 75 bp, Homo sapiens
tgggacctagacaaagggagagggtgaccgacatcccaactaggtactccaaagattcaggtttactcacgtcat

SEQ ID NO: 512891 - DNA, 98 bp, Homo sapiens
tggagtgaactggattccatgtagagacccctggaggcgagtgttgtgtataaaggaagttgaaatcctgggccttatgtgtgtagactggcaatgtc

SEQ ID NO: 512892 - DNA, 100 bp, Homo sapiens
aaggtggaggaaggcctgcgagaaggacagtaagagggttccccactgaaggacttggtccagctgtctggcagggaggagagacagaagctctggcccg

SEQ ID NO: 512893 - DNA, 90 bp, Homo sapiens
ctcctctctttgcagagccatacaaagttattggcccaagagagagaagcagcaaaagctaagaaagaagaatcaacaacaggtaacgcc

SEQ ID NO: 512894 - DNA, 98 bp, Homo sapiens
ggctgtgctggctctggctgtggcaaatgtgactgccatggagtgaagggacaaaagcacacggcggcgggagacgaaggcggtggccaatcactggt

SEQ ID NO: 512895 - DNA, 95 bp, Homo sapiens
cttcaaggatctactctgaagatccctgtggtagagagaaaaatcctggatctgtatgctttgagcaagagcactgcagcctgtggtgttgaggc

SEQ ID NO: 512896 - DNA, 100 bp, Homo sapiens
ggcgctgagtggtttttcggatcatgtctggtggctccgcggattataacaggaatgaatctgaagtctgctgcagtaaaacacagaaggctttaaaatg

SEQ ID NO: 512897 - DNA, 50 bp, Homo sapiens
agaggggtgtgttcaatgttcaaatggagtcattgaagactctccggaat

SEQ ID NO: 512898 - DNA, 98 bp, Homo sapiens
ggacaaataaaactcgctgacttcggccttgcccgcatctatagtttccagatggctctaacctcagtggaagtttcagctgatcctactgccacact

SEQ ID NO: 512899 - DNA, 90 bp, Homo sapiens
cctgctgcacccacgaatctgcccacccctcctgtaacccagcctgtttcacttcttggtcatgcaagacaagataatctgccttccgaa

SEQ ID NO: 512900 - DNA, 75 bp, Homo sapiens
gctggctttaatcctgaaagccatgcagcggcgtttgctgccaattgatggggcaaatgatctcttttttcagcc

SEQ ID NO: 512901 - DNA, 82 bp, Homo sapiens
tgtcagagaacccctccgtctatgtgcctgcaggagcattggtttgaaaaggccctacgagacaagaagggcttcatcatca

SEQ ID NO: 512902 - DNA, 100 bp, Homo sapiens
tgagatccacatggagccaactctctgcgggccgttgctccagggagaactgcaaatatcttcatccacccccacatttaaaaacgcagttggagataaa

SEQ ID NO: 512903 - DNA, 82 bp, Homo sapiens
caagtacaaggtggtccaggacacctaccagatcatgaaggtggaggacaatgcagatcttcgtgaagactctgactggtaa

SEQ ID NO: 512904 - DNA, 74 bp, Homo sapiens
gacagctggccgccgatattcaccaagcgcttcgctacaaggtggtggtgaagtttattaagaaggagaaggtc

SEQ ID NO: 512905 - DNA, 82 bp, Homo sapiens
gccatctttacggctctggggatcgtgatgggacaggtggtcggactcagggggatatgagactttctactcggaatatcct

SEQ ID NO: 512906 - DNA, 100 bp, Homo sapiens
atcctggatgaggaggtgtttgagagtgatcagcagctggactgtgccttggacctaatgaggcgcctgcctccccagcaaatcgagaaaaacctcagcg

SEQ ID NO: 512907 - DNA, 98 bp, Homo sapiens
ccggcagtgctttccccgcgtactcgggatggcggcggccgcgctgaggctcccggctcaggtggcccacatgaagagcaaagacaatcggatcaagc

SEQ ID NO: 512908 - DNA, 95 bp, Homo sapiens
tcagtgaaaaatgtactctgacctgaatcctgaattttccttgatggtcaaaagattaagttaaacgagaagattcatcaccgctttgatggctg

SEQ ID NO: 512909 - DNA, 83 bp, Homo sapiens
cacctctgctgggccaagcactcttagggccgaggggcactgcagctgacaagagacctgcctagagctggaacgttacctcc

SEQ ID NO: 512910 - DNA, 100 bp, Homo sapiens
aaggtggagccaccagcctctccttgtgcacttggaggctcctcagctcttcatatcccagcttttccaggaggaggatgtctcattgattacgttcctc

SEQ ID NO: 512911 - DNA, 75 bp, Homo sapiens
gccagtcaataggaagtacgagtgtgagattatatgcgtcaggcaggagaagtgacttatgcagatgctcacaag

SEQ ID NO: 512912 - DNA, 60 bp, Homo sapiens
atggggaggataggcccgctgcagtccaccctggacgatacactctggaaatgattaaac

SEQ ID NO: 512913 - DNA, 50 bp, Homo sapiens
cagcacaatacgaccaggcgtcaaccaagaagacctatttggagactgct

SEQ ID NO: 512914 - DNA, 82 bp, Homo sapiens
cacgaacaggaatacatggaagtccgggagagaatacacagagccaaaaggacctaagtgtgaaataccccgaagacgtccc

SEQ ID NO: 512915 - DNA, 74 bp, Homo sapiens
ataagagccatcacctccagctacaggaatacaaacagaagcttgcacgagtaacccaggtccgcaaggaactg

SEQ ID NO: 512916 - DNA, 76 bp, Homo sapiens
gcgtatcactgagaccgagtcgccttatcagggagaagcagaatttgcccgcatcatgagcattgtggaccccaac

SEQ ID NO: 512917 - DNA, 100 bp, Homo sapiens
aaagagatcctggacctatgaatatccagtttgagccatcggatctaagatccaaaagacaagttggatggcttgaggactggtactaaaaggaaacgtg

SEQ ID NO: 512918 - DNA, 83 bp, Homo sapiens
tgcgcgtcctcctccccaggcccgccgcctccctgccaagctcagtgtggaggctgctggccctgccatctgtaagaagatgt

SEQ ID NO: 512919 - DNA, 75 bp, Homo sapiens
caaaaacatcaaaacggcgatccaaaaattcagtggaagacatgcacatgatggtgtccaagccagaacagtggg

SEQ ID NO: 512920 - DNA, 100 bp, Homo sapiens
aaacaagtgtctgcttatgtcgctttcaccaacaatcaccagtggtttacacaacattgcaaggagcattgaaactcgaaactactcagaaggattgacc

SEQ ID NO: 512921 - DNA, 90 bp, Homo sapiens
gcctgccgcctcgctgtccctgcggcttctgggggacctagaagaatcccttaggatgaagctgagtcttaccaaggtagttaatggctg

SEQ ID NO: 512922 - DNA, 50 bp, Homo sapiens
ctctactccaacaaccctggggctggcagtgatggtgaaagcataggaaa

SEQ ID NO: 512923 - DNA, 100 bp, Homo sapiens
ctcaggcgtgcgcggacggtgtgcggcgtattgtcagggcagaaatagtgaagtacccggaagaagaaaatcaacataccacctctactcagagtagaat

SEQ ID NO: 512924 - DNA, 75 bp, Homo sapiens
ggacaacctcagaggacaacgaagtgttcggtcatacagcagatggaacaaaaaaaattacaacaaggaattcct

SEQ ID NO: 512925 - DNA, 100 bp, Homo sapiens
gccgtggtgttttccaccttggtgtgtctcagcaggctctacactgggatgcatacggtcctgcacatgcagatgacaatccaggctctccaggatgaat

SEQ ID NO: 512926 - DNA, 83 bp, Homo sapiens
caaggcgcgagtgctgtacgatgccaagatcgcaccccctccctccctggcggagcccctgaaggagctgttcaggcagcagg

SEQ ID NO: 512927 - DNA, 100 bp, Homo sapiens
aggctagtccgacgaagagtggaaactggcgatggaatatgagaggagccctctggaaagaaaaggacagaccctgtgctttcatgaaagtgaagatctg

SEQ ID NO: 512928 - DNA, 100 bp, Homo sapiens
gagaaaacaggaccatgaccattcacaacggcatgttcttcagcacgtatgacagagacaatgacggctggtttgcatcgccagcttctatatattacgg

SEQ ID NO: 512929 - DNA, 100 bp, Homo sapiens
ctgggccagcccaccgcaaagaattcaccatgacctgtcgagtggagcgtttcattgagattgccccagaaacacttgactcttctggagatgtgtcccc

SEQ ID NO: 512930 - DNA, 90 bp, Homo sapiens
ctgagatggatcgtttacagccaggtgaggaagtggagatagctgagctcactacagaaatggagaaggtagaggagatgccacataaac

SEQ ID NO: 512931 - DNA, 90 bp, Homo sapiens
ccctgattgagcccaagaaaaccccctgcatacacagattcatgacagatgctgcccgccgagagcaggagtccctaaagaagaagattc

SEQ ID NO: 512932 - DNA, 100 bp, Homo sapiens
ggcagctacttaatcctactcagaagaacttgtacagagatgtgatgttggagaactatagcaatctggttttcttggatatttggagttcttacaacat

SEQ ID NO: 512933 - DNA, 74 bp, Homo sapiens
cgggatcccagggtccaggattttattcccaacgcatggcagacgccacaggtcatcatctggatcatcccatt

SEQ ID NO: 512934 - DNA, 88 bp, Homo sapiens
ctgtcttcggtggactccttcggcagtccacccaccgccgccgcctcccagagtctctggtaagaagagtgaaagcaaagaagccaag

SEQ ID NO: 512935 - DNA, 83 bp, Homo sapiens
tcttctccaagctcatgtctgtgtgcgtcatgttcaccaactgcatgcagcttggtacaacggggcaggctggagagtgaggg

SEQ ID NO: 512936 - DNA, 101 bp, Homo sapiens
cccacttggcctgtgcaaagtgtcagtcatcccacccacggctctcaacagcatcgactccgatgaggctgccattcgctgcaaggttgaacacccccatg

SEQ ID NO: 512937 - DNA, 75 bp, Homo sapiens
tcatcgaggcatgggggtccacactgcaatgtttttgtggaacatgtggcctggtttgctttcgaccctggctcg

SEQ ID NO: 512938 - DNA, 100 bp, Homo sapiens
cagtttatggcttccagtggaggcattttggggcagaatacagagatatggaatcaggtgaaatgacaatggatgctctgttggctcgattgaaacttct

SEQ ID NO: 512939 - DNA, 88 bp, Homo sapiens
tacccggggcaacagctgagccgtctgggaagggatgcatcttgtcctctcgcatggcagagcaagtgggaaggcccagaagatccct

SEQ ID NO: 512940 - DNA, 51 bp, Homo sapiens
ggaacgggaggggagaacgaaggaccaggatggctaccaaggctccgagga

SEQ ID NO: 512941 - DNA, 74 bp, Homo sapiens
ctggctcttgccctcatcctggttctggaatcctcagttcaagggtaaagtcgagtatctggtgaagtggaaag

SEQ ID NO: 512942 - DNA, 50 bp, Homo sapiens
aaggccacagagtcggggtcttcacgacacgatgaggcgagtggtacgac

SEQ ID NO: 512943 - DNA, 96 bp, Homo sapiens
acagcctcatgttttcaccagtcacatctcttactactgctagtcgctgcaacactcctctacagtttgaggaggtcccaggtgattgaaaagttt

SEQ ID NO: 512944 - DNA, 100 bp, Homo sapiens
caaaatgtcaacaaattgatggaaaccaggacgtggaccacgccagaagtgaccagccccccaccatccccaagaacattccacacatcatcggcagcca

SEQ ID NO: 512945 - DNA, 89 bp, Homo sapiens
tgggtcgaggcggacgcgcggctgcgtcaggtattgaaaaccttccctttgaattacagagaaactttcagctcatgagggacctagac

SEQ ID NO: 512946 - DNA, 100 bp, Homo sapiens
acagctgatgacctgctgctcgtgctgatctcagggaacttaggctgcggaactatgtcccggaggatgaggacctgaagaagaggagggtgccccaggc

SEQ ID NO: 512947 - DNA, 82 bp, Homo sapiens
ccgcagccttgggcctcgcgccggctatggccgtgccctggggctgagccctcagaacttccttcacaagtgggacccccgc

SEQ ID NO: 512948 - DNA, 76 bp, Homo sapiens
cctccatgcgcagtcatgagtcgcttcaagtttatcggagtgggaatagctttgcgaaaaatgggcgcaatggcca

SEQ ID NO: 512949 - DNA, 83 bp, Homo sapiens
gccaactccaatgggcctttccagcccgtggtccttctccatattcgagccacccatgtggagcatccgttatgtcccccgaa

SEQ ID NO: 512950 - DNA, 98 bp, Homo sapiens
ataccatcacgtgcacggctgcgacgtgttccacctccgctacgcacaccacctccgatatcaacttacgagtgaagtggcccaacgatatttattac

SEQ ID NO: 512951 - DNA, 98 bp, Homo sapiens
agaagagggatactcccatgctgccaaagatggagtccgcctgcgtgaccatccatgaggctctgaaaacggtgattgactcccagacgcattaccgg

SEQ ID NO: 512952 - DNA, 75 bp, Homo sapiens
gcacgcctacaaattcttctttaagtccatggaccaggacttcggcgggctgacgcacgaggcacacaggaagga

SEQ ID NO: 512953 - DNA, 51 bp, Homo sapiens
ggtctccagggttctttggggcccgagatgccttcaattaagttgcagagt

SEQ ID NO: 512954 - DNA, 100 bp, Homo sapiens
atttagagctgcggaacaggacgccctctgatgaggtgcttcccaaggaccgtagatgcctctctagagcatgagctcaggcaagagtgcccgctacaac

SEQ ID NO: 512955 - DNA, 95 bp, Homo sapiens
aagagaccgactggcggagcaccgccttccggcagaagctggtcagtcaaatgtatctgcccaaactggaacttatgctgtagacatttctttgt

SEQ ID NO: 512956 - DNA, 80 bp, Homo sapiens
caaagttttgcagatcttcaacaagaggacccaggagaaattcgccctcaaactggagccgagatggtcataaactcgtg

SEQ ID NO: 512957 - DNA, 74 bp, Homo sapiens
gtggaaaaggctataccaaagaccaagtagatggagttctcagccgtgctggtatagaggactctaagaagtgg

SEQ ID NO: 512958 - DNA, 75 bp, Homo sapiens
ctgccctgagacggtgtcccgccgaaagcagtgaaaggactatggatctggttttggaaatgtgcaataccaatt

SEQ ID NO: 512959 - DNA, 90 bp, Homo sapiens
cggtggggcccaacgaggcgctggtggtttcagggggggccctcagcctcttggccttgaacgggctgttcatcttgattcacaaacaca

SEQ ID NO: 512960 - DNA, 75 bp, Homo sapiens
cccgaagccacaggatggaggagggggatcccagcaaagattctcagcgctgattttgagatgatgggcttggga

SEQ ID NO: 512961 - DNA, 100 bp, Homo sapiens
cgcaggcttctccaagagcagcaccagctctctagcagaatcaacgcaaaatcatgctgccgtgttccgtgtgggaagcttgttgcaagaaggttgtggg

SEQ ID NO: 512962 - DNA, 131 bp, Homo sapiens
atcctgctgggatttttgagctggtggaagtggttggaaatggcacctatggacaagtctataagagtcaacctatttgatttcttgacaagaccacaatctgatcccaaagatgtgctccacaaatccag

SEQ ID NO: 512963 - DNA, 75 bp, Homo sapiens
tactaccgcagcaacatggctgacatgctttataatttgcaccatactggacataccttttatgtgcactgggac

SEQ ID NO: 512964 - DNA, 118 bp, Homo sapiens
ccaactttaaaataaaggacttccctgaaaaagctaaggatatctttattgaagctcacctttgtctaaataagagcgagcccagggcgtggtgctgaaagtgctcacaaacttcaag

SEQ ID NO: 512965 - DNA, 82 bp, Homo sapiens
ccgggacgacgagtacgactacctattcaaagatcgcctgggcctgtggctccccagaggccctgccacctgaagggatggc

SEQ ID NO: 512966 - DNA, 118 bp, Homo sapiens
tttctgggttagtggactctcttctacaaccagagctacagatttgaagaatcttttcagcaaatatgggaaggatatgtttgccttcatgggcagcctggataccaagggtaccagc

SEQ ID NO: 512967 - DNA, 75 bp, Homo sapiens
caaccacaataacaggcggagggtcggcgtaggtgcactttacaggtccccgatgaaccaagagaaccctccacc

SEQ ID NO: 512968 - DNA, 94 bp, Homo sapiens
ctttgatgccctggtgaccttctgtgaagaactggggatttttagactctgaggagcagttggagctaatccacattatggaaatggaaaccac

SEQ ID NO: 512969 - DNA, 100 bp, Homo sapiens
accattttcagcatcagcctgtgcaacagcacatagccaacataaggttcaactccaatttgtgaagatattggtaggcaaatgttatgctataatagaa

SEQ ID NO: 512970 - DNA, 75 bp, Homo sapiens
gaggggctccgggtcttccagagcgtgaagatcaagatcggagaacatattgtgatgttcgtgcctcagagctaa

SEQ ID NO: 512971 - DNA, 100 bp, Homo sapiens
agctttaaagcaaagggggctccccctcgagatggaaaaggtgctgctgttttttcaaacgaaggaaaaggaaaaccatacagcgccacaaatgactctg

SEQ ID NO: 512972 - DNA, 75 bp, Homo sapiens
catggattgttttaaagcaacctataaacatcagctctcaacagtcagtgaaaggggatggagggatcacccact

SEQ ID NO: 512973 - DNA, 50 bp, Homo sapiens
cggctccctaggcgtcccatctcggggttgtgtccactgtggtccccgac

SEQ ID NO: 512974 - DNA, 95 bp, Homo sapiens
agctcgtgtatgtggttgcagacctggacaagcttcaggagcaggtgtgggttgctgaccgaggaaataaaagaatccaagtatttgataaagac

SEQ ID NO: 512975 - DNA, 82 bp, Homo sapiens
gacgttgagagaacgaggaggaaggagagaaaatggcgtccacggatgccatggacaatattaccaggcagaaccaattcta

SEQ ID NO: 512976 - DNA, 51 bp, Homo sapiens
caccaatgacaaggccacccaggttgtggcagcactgcctgaaggtatgag

SEQ ID NO: 512977 - DNA, 100 bp, Homo sapiens
gcctgtcctgctgtctctgctgctgcttctgggtcctgctgtcccccaggagaaccaagatggattatgaagaagctgtgctcttgctgttagaaggagc

SEQ ID NO: 512978 - DNA, 80 bp, Homo sapiens
cttttgttttactgccctaatgggaatgttcaattccatgttcaactactcaatttcatgctggcatgagaagataatcc

SEQ ID NO: 512979 - DNA, 100 bp, Homo sapiens
cgcagcgccccgcagggcgatggacggccgaaccccgcgcccgcaggacgccccagccagatttggaagtcaaaccagaaacttcaggctctactacgat

SEQ ID NO: 512980 - DNA, 100 bp, Homo sapiens
tacaggatattgacaagtgcagacagcagcttcatgatattactgtaccgttagaagtttttgatggagacggcactatgagaaaaaacattgatgtttg

SEQ ID NO: 512981 - DNA, 100 bp, Homo sapiens
ctgcggcagaagccgagttcaacatcctcctggccaccgactcctacaaggtaactaggatttctacctcaaccgcgagacctatgcaaggacggtgtgg

SEQ ID NO: 512982 - DNA, 82 bp, Homo sapiens
gcccactcaactgatgaatttaaagatgtttctgcaacagaaccacgatgtctccccgttcaatgttgtggcctggcacggg

SEQ ID NO: 512983 - DNA, 73 bp, Homo sapiens
gagcaagagcaagatcaccgtgacatccgaggtgcctttctccaaaaggcgtggtgaccaagatgaagatgca

SEQ ID NO: 512984 - DNA, 98 bp, Homo sapiens
tgcctactctgtgaccggggccaagcagctgcaccacctcgtgagcgatgacgtctgcctgaaggtggtggagctctacctgaacgagaagaagcggg

SEQ ID NO: 512985 - DNA, 75 bp, Homo sapiens
gcttaaggtcttcagcggggcgctccaggaggcactcacagatattgatgatgttaagaagttcaaaccgggtta

SEQ ID NO: 512986 - DNA, 96 bp, Homo sapiens
cctcgaggtggagaagaaggacaagcttgcgtccaatggatgggaccccaatgaaatgttcaagttcaatgaggagaactacggtgtgaagactac

SEQ ID NO: 512987 - DNA, 100 bp, Homo sapiens
tggacaacagaacaatattggaatggtggccttctcccgtctcatcctgattctgcgtgccctacatgtgaacaacgatcgggcaaaagtgatcctgaag

SEQ ID NO: 512988 - DNA, 101 bp, Homo sapiens
aaaaattcctggaaaaagaagtccaagaagcaaaaaagggactgctaagaagataccaccaggagatacaactcgtcaacgaatcaaattcagtgatgaca

SEQ ID NO: 512989 - DNA, 97 bp, Homo sapiens
ggcccggcatgggttaccgctgctgcccctgctgtcgctcctggtcggcgcgtggctcaagctagcaaaagttcaaacagaccctccctcagttcca

SEQ ID NO: 512990 - DNA, 87 bp, Homo sapiens
cgccgggaccctcgcgcgcgaccgccgaatcgctcctgcagcagaggtcaaaatgcagatcttcgtgaaaacccttaccggcaagac

SEQ ID NO: 512991 - DNA, 75 bp, Homo sapiens
cgccggcagcgaagacgcggagaaaaaagttctcgttggtgacaaagttcctgctgatataaggttaacttccat

SEQ ID NO: 512992 - DNA, 100 bp, Homo sapiens
agaactcagttgtgcgttgcggccagtcgccactgctcccaggatggcggcccaggtgactctggaggacgcgctgtccaacgtggacctcctggaggag

SEQ ID NO: 512993 - DNA, 75 bp, Homo sapiens
aagaccatcatgctgcgcggccttcccatcaccatcacagagagcgatatgtatgtccctgggaagctgcatgat

SEQ ID NO: 512994 - DNA, 90 bp, Homo sapiens
ccaagaagggccttactccttcacagatcgtggatccaaacttctacagcaaaaacttacttcttttaggaaagacatacttgaaactac

SEQ ID NO: 512995 - DNA, 75 bp, Homo sapiens
cggagacccagtcgctacgggagcagccagagatgatgtcggctgggactgggaccatctgttcactgaggtgtc

SEQ ID NO: 512996 - DNA, 100 bp, Homo sapiens
tgccgcaggacctgcagcatcccagagacctgatggccaaaagaaaggaagaaaatttttcctctcctaaaaatgccaaaaggccaagacaagaagaatt

SEQ ID NO: 512997 - DNA, 97 bp, Homo sapiens
ttcacttggcaaactcaacaaggttgaaatcacaaagattagacacctttttagataggtgttcttcagcaccactgacaacacggttctgacagta

SEQ ID NO: 512998 - DNA, 75 bp, Homo sapiens
gccgcggtggcagtgcaaaaggctggcagtacagccctagatccttgttctgcttacatcagcctgaatgagccc

SEQ ID NO: 512999 - DNA, 75 bp, Homo sapiens
aatcaagcaccttcattctgctggaattattcatcgggttgggataattcttcactattccacccttgccacagt

SEQ ID NO: 513000 - DNA, 100 bp, Homo sapiens
tcagatttcagatactctgactccacctttacttttacctacgttggcggccccagaaggtatctttcagatgaaggcattgaagcttgcacaagctctc

SEQ ID NO: 513001 - DNA, 100 bp, Homo sapiens
gccttcgcaccccttcctgtcaggggccgaggtcgggagtgggctgaggagtggcgtgtgggtctccggaagctcgtcgcaggccatctgtgtgactccg

SEQ ID NO: 513002 - DNA, 98 bp, Homo sapiens
ttcggccccaacttgctcaacacggtgaagcagaagctcttcaccgaggtggaggggacctgcacagggaaggagcgcatgaacctgaaggtgcccat

SEQ ID NO: 513003 - DNA, 83 bp, Homo sapiens
ctcatagattgtgtaggcgttggtcttctgatagcaactttaatgtggtccaccttcatccgaagaggctgaatcataaatat

SEQ ID NO: 513004 - DNA, 99 bp, Homo sapiens
tccagtctgccgcaagttcatgcaagatggtgcagcccggaatcccgaggatgtggaccgggagcggcgagaacacgaacgcgaggagaggatggggca

SEQ ID NO: 513005 - DNA, 83 bp, Homo sapiens
ctcgctgccgccataccctgccttctccagcgacagccggttttaaaatcaaagatgggaaaatcggagaaaattgcccttcc

SEQ ID NO: 513006 - DNA, 98 bp, Homo sapiens
atttccacttgatgtcatcacgcagaaggggtgaaagagactcggtgacagatacaggaaagaccacagcaagattctttcattcgtctcctcctagc

SEQ ID NO: 513007 - DNA, 87 bp, Homo sapiens
ctggcacagatgactccaccctggtccggattgtggtcactcgaagtgagcctggaattgtctcgccatttaaacgagtattcctaa

SEQ ID NO: 513008 - DNA, 75 bp, Homo sapiens
ctgacctcgctgtacgccgagcacccaggcgactgcctcatcttcaaggaagaaaacaggcagattttggcgcgg

SEQ ID NO: 513009 - DNA, 74 bp, Homo sapiens
tcatattgaagaacttcaaccccacagtgtattgtaatagagattttgatgatgagaagatccttattcagcac

SEQ ID NO: 513010 - DNA, 141 bp, Homo sapiens
ctcgaggtcgtatgaacgcacaggccgtcgctatgagcgggaccaccctgggcacagcaggcatcggaggaagtggttacctggaaggaaaggagctgcagaacttgatccaggagctccagcaggcgcgaaagaaggctg

SEQ ID NO: 513011 - DNA, 83 bp, Homo sapiens
gaagagtccagaaaagaagcgaaggaagtcaaatactcaggataatgttgtctgtctgtctccaaaactggcacaaagcctgg

SEQ ID NO: 513012 - DNA, 90 bp, Homo sapiens
gggtgtccatgattctgcaaagccctgtactgggcctaatcgctacgtgcctctttggctatgatgcctatgtcaccttccccgttcggc

SEQ ID NO: 513013 - DNA, 80 bp, Homo sapiens
ctctctgtgtggctgtaacttacgtgtactttaccaacgagctgaagcaggtctgggaggggctgaacgtggtgaagaca

SEQ ID NO: 513014 - DNA, 50 bp, Homo sapiens
ggagagctggtcccctgtcccctggcagaatcccctactttgaaactagt

SEQ ID NO: 513015 - DNA, 101 bp, Homo sapiens
gaccggcctggagatggagttcgactgcgagggcctgagacggctgcttggcaagctcctgcagcaggccacctcctccagcaacctgggtgcgttcagcg

SEQ ID NO: 513016 - DNA, 51 bp, Homo sapiens
cttgtgcccacagcaccttctgtaggggtccatgggattcgaattgaattc

SEQ ID NO: 513017 - DNA, 75 bp, Homo sapiens
gaggttcgagtgttgcagagcctgcggggcaagatctgtttatgcatgtatgatggttttcttcttgagcaacat

SEQ ID NO: 513018 - DNA, 96 bp, Homo sapiens
ccacaagcaaccacatcaaatatgctgtcaccactggtgtggacaacagtgagtatatgcggaatggagacttcttacccaccaggctgcaggccc

SEQ ID NO: 513019 - DNA, 50 bp, Homo sapiens
ccctcttctacttcaacatgggcaaggtgtaccttccggtttcccagcac

SEQ ID NO: 513020 - DNA, 51 bp, Homo sapiens
atttactggacagagtgctgtcttgtattggttggtgatggtggtactgga

SEQ ID NO: 513021 - DNA, 83 bp, Homo sapiens
aaaaaatataataaggctgagtgcggagccaagggatctggacaactctcctctgtccccaccttcaccaaggaccaaaagca

SEQ ID NO: 513022 - DNA, 74 bp, Homo sapiens
gtggaccacaggccctcgttgcccagatatccctctcgagagctgaagacgctttgtgaggaggaggaggaagg

SEQ ID NO: 513023 - DNA, 100 bp, Homo sapiens
agagaatgtgtcagccgatgcaccgagtccagcccaggaaaatggagagatggtgttatggtccagattactgcagagaacatggattccttgaggcagg

SEQ ID NO: 513024 - DNA, 83 bp, Homo sapiens
cttcacggactgcaagcgaggcacttgctaactcttgggtaaactgtcttgagccccaccctcacctgcctgtgctggcaacc

SEQ ID NO: 513025 - DNA, 100 bp, Homo sapiens
gactttggtgccctcaacatctctcagagacgaaaggagttcaaagaaggacgcagagccagccacacagccccacaggtcctctttagccacagggaac

SEQ ID NO: 513026 - DNA, 100 bp, Homo sapiens
cggccccggcgaggaggcgcggaaccatggccgatgggggcgagggcgaagacgagatccagttcctgcgaactagagaagtggagatcctgatgtttct

SEQ ID NO: 513027 - DNA, 100 bp, Homo sapiens
tccttggcacccagcctcctggacagaaataaaactgggcactttgaggtgaatgaccggaaggacccccaagagacggccaagctcttttcagtgccag

SEQ ID NO: 513028 - DNA, 147 bp, Homo sapiens
tgacctctacttccaggactcggggctctcacgctttctgctcaagtcctgtcctcttctgaccaaagaccgtctccaacctggacatagagagtaagctgagtgtgtactaccgcgccccgtggcaccagcagcgcaacatcttcc

SEQ ID NO: 513029 - DNA, 100 bp, Homo sapiens
cagcttctccgcctggctgcactgcgtgtgtgtggtgggcttcgacctggagctgggccaggccgtggaggaatttagataatgggctgtgtgcaatgta

SEQ ID NO: 513030 - DNA, 127 bp, Homo sapiens
ggacgtgcggcagttgcaggcgagcaggcgaggaatcgccgtggcgtcttggtgttctccacgctggttcgcagggctgaggcacatgtctgggtctgagctgaccgagctgctggaccaggtggag

SEQ ID NO: 513031 - DNA, 87 bp, Homo sapiens
acggtgtgcagacacaactacgaggtggcgttccgcgggatcttgcagaggagaggagccaccatgttggtgataccccccggactg

SEQ ID NO: 513032 - DNA, 100 bp, Homo sapiens
cgcttatcagcattatctagtcctttccaccccgaaattcgccccgattaaagactgtgttgcattatcaggcatttggattcagtcctcagtgatcaca

SEQ ID NO: 513033 - DNA, 100 bp, Homo sapiens
ctttacatgttgaatccttgcagcactaaaatttgggaagaaggagaaagggccaacccctgaagaagcaatacagaaactgaaggagacagagaagata

SEQ ID NO: 513034 - DNA, 100 bp, Homo sapiens
tctttcaaactggagccttattggaggatcttcagcctgttaaacaagaaaacgaaaaaccccttccagaaaacatggatgcatttgaaaaagtgagaac

SEQ ID NO: 513035 - DNA, 88 bp, Homo sapiens
cttggcaatgaacaaatatggagccattcttagtcaaaaagctcatcttgccttatcaaatccagaatataagaagtttttagaaacc

SEQ ID NO: 513036 - DNA, 100 bp, Homo sapiens
ccttcaaccgggaacagagaatgtttaagaatgagtccctggaacgccagatgcgtgaaatggaagagaactttgccgttgaagctgctaactaccaaga

SEQ ID NO: 513037 - DNA, 100 bp, Homo sapiens
gagtgaaggaacagccaggcctgcagagactggagacgtccagcctgacattcacctgacttctgcagaacaggtcaaagaattgactgtagatccaact

SEQ ID NO: 513038 - DNA, 100 bp, Homo sapiens
taaatcccgaaaaggagaacttcttaagaagagtgttcaagccaatctttctgggcaccgtggatccacgaagcgagatggcaggcttccgacgtgtggc

SEQ ID NO: 513039 - DNA, 80 bp, Homo sapiens
gctgcttccagtgggaatccacattaagaagtacaatagcattcgcgtcaagctacaacttcaagcagaagagagaggag

SEQ ID NO: 513040 - DNA, 82 bp, Homo sapiens
gcagagcctggagagcatgccccggccccctgagcagagaatctcgatgctggcctggagcagaaactgagctggaccactg

SEQ ID NO: 513041 - DNA, 98 bp, Homo sapiens
tcctgacacaacaccactcatgttatagttttgccgctggactcttccctcccttcccccaccccatcaggatgatatgagacttgaaagaagacgat

SEQ ID NO: 513042 - DNA, 100 bp, Homo sapiens
ccagaaactacaggctgaaaagcatgacgtaccaaacaggcacgagataagatgaagtacaacttgccttcctggtgtgaccgagtcctctggaagtctt

SEQ ID NO: 513043 - DNA, 98 bp, Homo sapiens
ctttggaggtggaaacactgcctgggaggaagagaatttgtccaaatacaaagacagacatcgctattgcggttccgaggcagtgggaagagatgcgg

SEQ ID NO: 513044 - DNA, 100 bp, Homo sapiens
ccacaaacgccgcaccaggtcttgtagcagcgcctcctcggggtcgggccccggctcagtggtcccaggcagctcgggtgtcggaacccccagacagttc

SEQ ID NO: 513045 - DNA, 50 bp, Homo sapiens
gccgccagttcttctgcagccgaaggcgattactttctatgaagacaaaa

SEQ ID NO: 513046 - DNA, 100 bp, Homo sapiens
tcgttctcgttcattttcgaagtctcggtcccgaagccgatctctctctcgttcaaggaagcgcaggctgagatctctgacatctacattagtggagaat

SEQ ID NO: 513047 - DNA, 76 bp, Homo sapiens
ggagtaaggagaaaaagagtttccccagtgcctgagcattgggctcaggatctgaacaaagtccgtgagcggatga

SEQ ID NO: 513048 - DNA, 75 bp, Homo sapiens
gggcgagtgaagcagtgtcacgcattttagaagaatgggttaaaaggactactgactcaaactctgcctcttgag

SEQ ID NO: 513049 - DNA, 100 bp, Homo sapiens
aaatgatattgtcaccggccttacatgcattgctgttgtggggattgaagatcctgtgagacctgagctgtcggaaaaggtaacagaagatggaactcga

SEQ ID NO: 513050 - DNA, 78 bp, Homo sapiens
tttgaagagatcgactacaaggagatcgaggtggaagagctgagcagcgccagttggcactagctgagaagttcaagg

SEQ ID NO: 513051 - DNA, 111 bp, Homo sapiens
ctcagcctccgcagacaccgcaaagcgatctggggacgcggggcgggccccccaggagcaggccgggctctcgccatgggtcactgtcgcctctgccacgggaagttttcc

SEQ ID NO: 513052 - DNA, 99 bp, Homo sapiens
agctgtggctccagtatcagaaagactattgcccagaagaaaagatgtttggttttcacaagccaaagatgtaccgaagtatagagggctgctgtattt

SEQ ID NO: 513053 - DNA, 90 bp, Homo sapiens
actggacaaatccttgtggagcaaatgggaaaagctggtcctatagtacccctcctcaggaatgtctccccagtgcaaggacaaagactg

SEQ ID NO: 513054 - DNA, 90 bp, Homo sapiens
gtggtagcgctcgtctggcggagctggttaacagccaggtccttgcctgctgtgcagtctgatgaaagacttcagcctctgctcaatcac

SEQ ID NO: 513055 - DNA, 75 bp, Homo sapiens
cagatctcctgaacctgtttctgctcagattgaggaaacaatggaagagtaatagctcttcaagtctgcaataaa

SEQ ID NO: 513056 - DNA, 75 bp, Homo sapiens
tgggctgaggcgccgcggtaccatgaggcgccgatgtggtcaaaggtgaaaagattcttccggtatttgatgagc

SEQ ID NO: 513057 - DNA, 74 bp, Homo sapiens
tatgcgccattcacttttgaagggaatttctgcccagatagtgtctgcagctgccatcatcaacagcactgtca

SEQ ID NO: 513058 - DNA, 85 bp, Homo sapiens
gatggaggaggagcagaaagcaatgagagaaagcccaggaggaaccacctgccaagctgctggatgaccttttccgaaagaccaa

SEQ ID NO: 513059 - DNA, 98 bp, Homo sapiens
catcaacttaactgcagctgatacatgtataatttttgattctgattggaatcctcagaatgatcttcagggaaatgatcttcattggttagcatgtg

SEQ ID NO: 513060 - DNA, 51 bp, Homo sapiens
tctgactgaagattttacagcaggcggcaaagaagtttgtttctggccaga

SEQ ID NO: 513061 - DNA, 76 bp, Homo sapiens
caacttggacgtcagagaatgtgaaccacccttacccttctgaagaacagaaaaagcagttggcacaagacacggg

SEQ ID NO: 513062 - DNA, 100 bp, Homo sapiens
tcattgcgggaattctctttgccaccctcagctgtctgcacatctgggtctaccttctgcttccctggaaaggatgaatttacatcatttgacaagccta

SEQ ID NO: 513063 - DNA, 50 bp, Homo sapiens
tcctggattggctagtggtataattacagaatcccctactttgaaactag

SEQ ID NO: 513064 - DNA, 100 bp, Homo sapiens
acgcagtcagctgcgtgattcccgtgattgcgttacaagctttgtctccttcgacttggagtctttgtccaggacgaaatcatgttgttgatgtcagtgt

SEQ ID NO: 513065 - DNA, 106 bp, Homo sapiens
ccaaggcagaaacccctgggccactcgctacaccactgcagccgcctcaggcctgctgactttccctgatggttctcatggaatcccccgcaatgaaggtctcttt

SEQ ID NO: 513066 - DNA, 75 bp, Homo sapiens
ggcggagaggcgccccccgcagcaggttaatttggagtggcccctggagtcagtttcctacaccatccgaggccc

SEQ ID NO: 513067 - DNA, 98 bp, Homo sapiens
ggcctggactgtgggctggtgtgtggaactgattgatgaactcccagagggcgctgtgaagcctccagcaaacaagtatcctatcttcttttttggca

SEQ ID NO: 513068 - DNA, 100 bp, Homo sapiens
gaaagcctccggaatctaaaaagccctcagtaccagagacagaagcagatggattcgtccttttagtggcggcatgattttgtgcacggatggataaaag

SEQ ID NO: 513069 - DNA, 75 bp, Homo sapiens
gctaattacacctcctcctccaccaccctcaccagaaagggcagcaggatgggtgtggaagcagtgatggcactt

SEQ ID NO: 513070 - DNA, 101 bp, Homo sapiens
gacgcgcagcgccggcgcccgggagacccaggaggagcccgcaggtcacagtgctgtcgatatcaccaaggtggctagaagacatcgcatgtctccttttc

SEQ ID NO: 513071 - DNA, 100 bp, Homo sapiens
ctgaagagcagacccgtttgggttctccacgcattctagactcccgaagaggcgcctgaacaagaataagctgcaagtccttccagaattgcttttccag

SEQ ID NO: 513072 - DNA, 100 bp, Homo sapiens
gggctgccctgcggacctagtggtgtgtgacggggctcctgatgggtcacggagactcaccagttggcagaattaaatgagaagaagaatgaaagactcc

SEQ ID NO: 513073 - DNA, 96 bp, Homo sapiens
tgggagactgactgcctatgaatttgctaaacttaaaagcaagctggttctctgggatataaataagattacaggctgtgccagccctggaaaaac

SEQ ID NO: 513074 - DNA, 82 bp, Homo sapiens
gcgggagcgctacggccccaacggtgagaagccctaccactgcaactgggacggctgcggctggaagtttgcgcgctcagac

SEQ ID NO: 513075 - DNA, 100 bp, Homo sapiens
ttaaagattactgctctacctttgtactttgaaggttttttattaatcaagcggtcaggataccggtcccattgttaggcatgcggcaactgctccacct

SEQ ID NO: 513076 - DNA, 89 bp, Homo sapiens
agaagaaaacgttcaccaagtgggtcaacaagcacttaatgaaggtggacattgaagtggacctaattcggttttccttttaaaagccc

SEQ ID NO: 513077 - DNA, 87 bp, Homo sapiens
cggggaggcgggcagctctgcccggcagaaacctgtcttgttctgctccagacgagcccttaccacgttgactcactcctgcagctc

SEQ ID NO: 513078 - DNA, 99 bp, Homo sapiens
gggagacgccaccgaccccaacggcaccagccctttgcacctcgcagctaaaaacggccacatcgacatcatcaggacatagagacactgcatatttta

SEQ ID NO: 513079 - DNA, 74 bp, Homo sapiens
atttaatggaaaatcgcttggttaaaacctgacacttttaacagcaacagggagctgccaccaccgtgtactgt

SEQ ID NO: 513080 - DNA, 51 bp, Homo sapiens
caaatatgagagattctgcagaaggagtactgcaagtttaagaacactgaa

SEQ ID NO: 513081 - DNA, 75 bp, Homo sapiens
caagatggacagggatgataattgggcctccaagagttaaccccaaagattggctttccttggagtgaaatcagg

SEQ ID NO: 513082 - DNA, 80 bp, Homo sapiens
cagtcggcttgtcctggctcttgccctcatcctggttctggaatcctcagttcaaggtgagaagccctaccactgcaact

SEQ ID NO: 513083 - DNA, 90 bp, Homo sapiens
ccaatctgaatatcaaaatagcagtgtccccagttgtcctcatccagggtgctattcgagtccagcctgaagggccggctccctctctac

SEQ ID NO: 513084 - DNA, 75 bp, Homo sapiens
cgtctcctgtgaaggccatatttgataaacaggaacttgagacttaattcagtgcacaaatgagatgaatgtgaa

SEQ ID NO: 513085 - DNA, 75 bp, Homo sapiens
gtggtggcaggctgggcacgaggaccatgctgggccggagcctccgagaagtaatgaaagcatgggatgctcatg

SEQ ID NO: 513086 - DNA, 75 bp, Homo sapiens
cattgcccactggctcctgcgcacctgggagaggtacagaagtctttgcaagaaaccattcagtccctcaagctt

SEQ ID NO: 513087 - DNA, 75 bp, Homo sapiens
ctggaactccggccacagccagcatgcaggtcaaaatgcagatcttcgtgaaaacccttaccggcaagaccatca

SEQ ID NO: 513088 - DNA, 51 bp, Homo sapiens
gtccattcgagggcggatcctctctgaccgagacatgggtgcccggcaccg

SEQ ID NO: 513089 - DNA, 96 bp, Homo sapiens
aaaagacatgaaagtagaggcaaccaatctggaagaagccctaataatccattcagtagaggcctacaagactatgaaagaggatgaaaaaagata

SEQ ID NO: 513090 - DNA, 74 bp, Homo sapiens
cttcggagcgggagtgttcgttgtgccagcgactaaaaagagtcagaagaagaagttgtagaaggagagaagga

SEQ ID NO: 513091 - DNA, 100 bp, Homo sapiens
cagcacaaagtcgccaaggtgcggtctttcgaccactccggaaaggtgtgcctaccgcatgttgccgctgctgtttctgctgggacgtctgactccagtt

SEQ ID NO: 513092 - DNA, 100 bp, Homo sapiens
ccagcctatttgcacaccatccaggagtcagtttattactggaaaacagccaccgcactgtgttcctgacacgtacagcaacgccacgctctggtacaag

SEQ ID NO: 513093 - DNA, 80 bp, Homo sapiens
gttggaagagaatctgagtacaaacagcaactttgcctgactgcttcaaaatttgtggcgcatcttattaaccaaaatgt

SEQ ID NO: 513094 - DNA, 100 bp, Homo sapiens
ggctctcctgtctgccaccatcctgggttgacaattctacacaaggaggcttttgacctttatgaacaaagatatgctgctgtgaagatacatcagctta

SEQ ID NO: 513095 - DNA, 75 bp, Homo sapiens
ctctgggagaggagcatccaattcgggttgtcaatgcattgcaggtctatagtaaagagatgtggcatctgatga

SEQ ID NO: 513096 - DNA, 100 bp, Homo sapiens
atggtttacagagcactagaagctccttccattcagatccagaagtgatgagagcctatttacaacagctaaggcaagagactggactgagactttgtga

SEQ ID NO: 513097 - DNA, 101 bp, Homo sapiens
ggcagcgcagcgccgagcggggcccgcgggcccatgaggaggcctggggaccatgggctccaggatcaaggatgtgtctgcaggccttcgtagaagctttc

SEQ ID NO: 513098 - DNA, 100 bp, Homo sapiens
ctaaaatagagctctcaaaacctggctgttttccttcagagcactggcctccaattgtgctgtgattgtctccacgccccaggacatcgcattgatggat

SEQ ID NO: 513099 - DNA, 100 bp, Homo sapiens
atgaatgcaagaggcgtttctataagaattggcatgactacggggccccccaggaggcgactctcggggccaacaaggtgatcgaaggcctggacacggg

SEQ ID NO: 513100 - DNA, 115 bp, Homo sapiens
tcacgcctgggacccccgaccccacttgtgctggaaggtactccaaagattcaggtttactcacgtcatccagcagagaatggaaagtcaaatttcctgaattgctatgtgtctg

SEQ ID NO: 513101 - DNA, 82 bp, Homo sapiens
gttgctggaccgggacgcacgctcagctgaggaggacccccaaaggtatcatgatattagctggtttgacatcaagtcattt

SEQ ID NO: 513102 - DNA, 100 bp, Homo sapiens
agttcagaaatgagtggaaaaatacccatggtgggcaggaagaggtatttatgagcctccatttcttatactactgcagtgaaccaacattggatgtgaa

SEQ ID NO: 513103 - DNA, 100 bp, Homo sapiens
tacaccggctgttcgaggccttgactgtagatcgcccaggaccacaccgcagcgtaactgcaggcctctcagcgaaaaagggggaaagcaaagacccggg

SEQ ID NO: 513104 - DNA, 88 bp, Homo sapiens
gactcgccatcgtggccttggctgtctgtgcggccctacatgcctcagaaggtgcagtagacattgttgcaatcatgatcggcaatct

SEQ ID NO: 513105 - DNA, 90 bp, Homo sapiens
tgccggcaggacctttctctcgctgccgctgggaccccgtgtcatcgcccaggccgagcacggtgacaaaacacgacagccttcttcaag

SEQ ID NO: 513106 - DNA, 100 bp, Homo sapiens
ttgcaaacaaattattgacggtcaaggtatttcatgccgaggttgaaggtttagaacagatgtggaaaaatgtttacttcagagaaaggggttgtggagg

SEQ ID NO: 513107 - DNA, 73 bp, Homo sapiens
catggcaagactccacctcctggtgaagaaagcaaacatacctcctaaatggctctactttgaacctgctggg

SEQ ID NO: 513108 - DNA, 90 bp, Homo sapiens
ggaggcccaagacaccacagaagccctccgagcccagattcttctgatgtagagcgactggaaagattcttcgactcagaagatgaagac

SEQ ID NO: 513109 - DNA, 75 bp, Homo sapiens
ttaaagaagaaaaactttcgcctgagcctattttgggccgatggggaagtgaagcactgtgtgatctacagcact

SEQ ID NO: 513110 - DNA, 74 bp, Homo sapiens
ggagacgcgctgccgaggagaacccagcgggtggctgtgaaaaacaatatcgatgtcttctacttcagctgcct

SEQ ID NO: 513111 - DNA, 82 bp, Homo sapiens
tttgtgaatgtatgcgagtgtgcaagacgtggtataaatggtcctagaccagaaggagcacaggctggatggccgtgtcatt

SEQ ID NO: 513112 - DNA, 97 bp, Homo sapiens
gaaaattggagatttgataacactggagatcagcaccaaatcccacagaggcatctgaggatcccaggagggcactcatggtggtttatgggactct

SEQ ID NO: 513113 - DNA, 98 bp, Homo sapiens
ttcaacatgattgcatttgaaatggcccactgcgtgaccttggttcagctgtccatttcctgtgaccatctcattgacaaggacatcggctccaagtc

SEQ ID NO: 513114 - DNA, 88 bp, Homo sapiens
gctgccagcagagcagacaccatcctgtgtctagggtccagcctgaaggttaaccgagagatagtgtccggcatgaagtacatccagc

SEQ ID NO: 513115 - DNA, 84 bp, Homo sapiens
cttcggttcgggtgcgctgctcaaggacacggtctacaccgacttcgacgggcgtgatggtgggcatgggtcagaaggattcct

SEQ ID NO: 513116 - DNA, 75 bp, Homo sapiens
gctcgagttacccctcttaccaccgtcatggcagtcccaggctcacttgtgcatttttggcctgcaaagtagatg

SEQ ID NO: 513117 - DNA, 80 bp, Homo sapiens
cgcacttataacaacatatgagatcctcttgaaagataaggcacaagtgatccttatgtgaaatttaagctgaatgggaa

SEQ ID NO: 513118 - DNA, 85 bp, Homo sapiens
taaggattccaagtaactcttatttggacccagatgatgtggtaccagttggccaaagaagagcctggtgttggtgcatgtgctt

SEQ ID NO: 513119 - DNA, 74 bp, Homo sapiens
ggacccgaagcctaaattccaggaggaacccagcgggtgccgcttctccacccgaggcttccacctccaacgag

SEQ ID NO: 513120 - DNA, 98 bp, Homo sapiens
tgagccttcttggtattcttaagtacaaaccttcaggaaatgccacagatatttgcagagcttgaagtgaaaaccagagaaaaattagaagctgctaa

SEQ ID NO: 513121 - DNA, 75 bp, Homo sapiens
ccaggaccggccgaacgcagaggaaccatcactgttgctggaggcacctgacaaatcctagcgaatttttggagc

SEQ ID NO: 513122 - DNA, 82 bp, Homo sapiens
cgctggacggcgggagagaggctcggaggaccggtagctcccagcaaagcggcccagcggacatctacgcagcgaaatcgag

SEQ ID NO: 513123 - DNA, 83 bp, Homo sapiens
aaggaacccaccacctgccacaccgtgaagctgcggggagccccgttcaatgtcacagaggaactgtggctgcaccatctgtc

SEQ ID NO: 513124 - DNA, 75 bp, Homo sapiens
tttgaatggaaagatcctttcatccagaaagtccaagatgttatcaatactctggctgaccatcatcatcgtggg

SEQ ID NO: 513125 - DNA, 100 bp, Homo sapiens
ctgaaagaagcctccagaagctcacctgcgaggattaaatccaccacacagggtgaaatctatctccatgacaacattcacacaacaggaaattgaattc

SEQ ID NO: 513126 - DNA, 100 bp, Homo sapiens
ttacctgctatatctgtaaagggtatctgatcaagccaacaacagtgacggaatgcctccatacatatcctttcccggagttcagttatgggtgtgagag

SEQ ID NO: 513127 - DNA, 99 bp, Homo sapiens
gaaaacagattattattgcaacaaaggtggcacaagaatggctcaactctccaaatagagagaatttctatcagttgcaagtacgaaaatttcctgccg

SEQ ID NO: 513128 - DNA, 98 bp, Homo sapiens
aaaccccggaactagaactggtgaaggacacgtctgccacatcccagtcagttaatggatcaccccaagcggaacaaccttcattggaatctacaagc

SEQ ID NO: 513129 - DNA, 50 bp, Homo sapiens
acatcctgctagacttgttaagggacctgatgcccagaaccctggacggg

SEQ ID NO: 513130 - DNA, 90 bp, Homo sapiens
cccgctcggagccagccagccgtcccgagctaccagcagagtatcagctctttgccttcattagtcacatgggcacctctaccatgtgtg

SEQ ID NO: 513131 - DNA, 100 bp, Homo sapiens
tcatcacccaggcgcggagggaagacgccctggtgctcaccaagcaagacctgcctagagctggaacgttacctccagagcgagccctgctatgtttcag

SEQ ID NO: 513132 - DNA, 80 bp, Homo sapiens
tcgaccggagcagagagctggcgagcaagttggttgaatctggcgatgtggaacccatggatatggagggctgactatat

SEQ ID NO: 513133 - DNA, 83 bp, Homo sapiens
caagaatatgatgaccctaatgcaacaatatctaacatactatccgagcttcggtcatttgtgggtcctacgtgtatgaactc

SEQ ID NO: 513134 - DNA, 74 bp, Homo sapiens
ggtgccaaggaccacgcatccatccagatgaacgtggccgaggcagcctggcatcctcgctacaacctcattgt

SEQ ID NO: 513135 - DNA, 96 bp, Homo sapiens
gagacctcagttcccggcggctcttgcggggcacaggggctgcttgctctcggtgactacatgaatgtccagtgccatgcctgcattggaggcacc

SEQ ID NO: 513136 - DNA, 100 bp, Homo sapiens
gcctccttggggccctggttctgcttggcctgggggtcctcctcttctcagacttggagctgatgtctgtgctgtcctccggctctctggtccactcaag

SEQ ID NO: 513137 - DNA, 74 bp, Homo sapiens
tctcttcagcccccaacccagtggaggtgatgtcagtcaaaagacaacatggcacagaatatcagtattccggc

SEQ ID NO: 513138 - DNA, 109 bp, Homo sapiens
ccttagctgtgctcgcgctactctctctttctggcctggaggctatccagctacctggagtagaacagaaaaattattatgtctgtgttcccttgggactcattggaaa

SEQ ID NO: 513139 - DNA, 60 bp, Homo sapiens
aagagtcaacagcagtggcaacagaaatgaagctgttgtcatttctggaaggaaactggc

SEQ ID NO: 513140 - DNA, 98 bp, Homo sapiens
cgctgcacatcgtcctgtggacgcgtatcgccagcacgatcccaccgcacgttcagaagtcgggggttcagctgttgcaaaaataattggtaataatg

SEQ ID NO: 513141 - DNA, 95 bp, Homo sapiens
gagtgggtgtggaggaggaagactggatgccaatgatcctgaggctgaaccgtctgagcccagaagtgctgaggtgacgaggaagcccaaggctg

SEQ ID NO: 513142 - DNA, 128 bp, Homo sapiens
ctcaacagaatggggaaggggagcctgtcacattatttgaggtggtgaaactggggaaaagtgcaatgcagactgcagctgaatatgtaaaatctcgactcccagaggcccttaaacagcatcttcag

SEQ ID NO: 513143 - DNA, 100 bp, Homo sapiens
gacattgggggcctgtggaaattttcagcatttctcattgcaattgtggtaccagatgttgagacattatgttcctgggcccaaaagagaggatttgaag

SEQ ID NO: 513144 - DNA, 75 bp, Homo sapiens
cgaacagccagcaaccctaaagtggagaatgaggatgaggccatcatgcagaagggggatacaaacataaagccc

SEQ ID NO: 513145 - DNA, 75 bp, Homo sapiens
gccctggtcatgcagcagctgccacggagcaccaagctcaagaaggtaccaaccaagaagctgaagaaatatgag

SEQ ID NO: 513146 - DNA, 87 bp, Homo sapiens
gcgaacccctctgggatccccgccgctctgtctacaacccgaggccggaagctgagaggaaaagccttttattttgtcaacggcaaa

SEQ ID NO: 513147 - DNA, 82 bp, Homo sapiens
ataaactaaggcgtctgcgagatgagctgagggctgtggtgcggcaccggcgagccagcgatttttagactctgaggagcag

SEQ ID NO: 513148 - DNA, 95 bp, Homo sapiens
gatatatcttccttgacagcaaagaacctgatgatttggaaacagaaattctacaagagccaagtggaacaaacaaagatgagagcttgccatgc

SEQ ID NO: 513149 - DNA, 97 bp, Homo sapiens
ccgaagcactcgttccgggggtgaagcctcctgcgccggccttgcctcggacgatcattcccgagtgaggctgcagacaatagaaggagacacaaac

SEQ ID NO: 513150 - DNA, 90 bp, Homo sapiens
gaaagagatcctggacctatgaatatccagtttgagccatcggatctaagatccaaaagaagccaagtacaagaagctggagaagcgatg

SEQ ID NO: 513151 - DNA, 82 bp, Homo sapiens
aaaatgctgagggtgccattgcagtacattgcaaagccagtatcttgaaaattatctctggatgaattattctcctgaggta

SEQ ID NO: 513152 - DNA, 91 bp, Homo sapiens
ctttcccgctgcacactgccctccgaagtcggggacgcgggctcggctttttctcctccgtgacagccagagtaatccaaaggcatttgta

SEQ ID NO: 513153 - DNA, 90 bp, Homo sapiens
cgcggagggagaggctgcagagcgagggcaggagtattctaccttgtaaatactgttatttgtatatactgtaaatgatgacatcggtgg

SEQ ID NO: 513154 - DNA, 51 bp, Homo sapiens
tttaaacaagagatttccacagaagccggcgcgacctggagattgagcgac

SEQ ID NO: 513155 - DNA, 100 bp, Homo sapiens
cccagccaaggctgtcgtttacgtgtcggacattcaggagctgtacatccgtgtggttgacaaggctccttctcctgaaaaagccgaggaggagagtgag

SEQ ID NO: 513156 - DNA, 96 bp, Homo sapiens
gatcccggcgacatactacctctggccccgagatcagaatgccgggactttgaacatgtcggggatcgccctcagcagactcgcccaggagaggaa

SEQ ID NO: 513157 - DNA, 75 bp, Homo sapiens
gccgcagctagaaatgctcaagaaccagctggaccaggggaaggtgtggctcattgactttaatccatttggtga

SEQ ID NO: 513158 - DNA, 50 bp, Homo sapiens
ctcggagctccagacgctgggacagtaagactttgaccccgacgcaggct

SEQ ID NO: 513159 - DNA, 75 bp, Homo sapiens
catctgtgaagatgctgtaaaaagattgaaagctgctgaaggtgatgtggccgccctcaaccgacgcatccagct

SEQ ID NO: 513160 - DNA, 80 bp, Homo sapiens
gagggagttaaggacattccaggcagaggcaaggggtacgtcagcttgaaattatgtgctgctttggctgcatgtcagtt

SEQ ID NO: 513161 - DNA, 95 bp, Homo sapiens
cagaggccgacggagccggagtcgcggacgccgcggggtctccgggacaggcaacaggacctgtaccgaatcctgaaggcctacaccatctaccg

SEQ ID NO: 513162 - DNA, 50 bp, Homo sapiens
aacagagaagagagtgacaggaaggtttttagaacttcagccataaaaat

SEQ ID NO: 513163 - DNA, 100 bp, Homo sapiens
ggccttactccttcacagatcgggagaatgaagttgaagaggtaaaagaggagggtccaaaagagatgactttggatgagtggaaggctattcaaaataa

SEQ ID NO: 513164 - DNA, 99 bp, Homo sapiens
cagttttttgatgacagcccaacaaggggctgggttagcaaaaggcttttaaagccatatacaggttatttccagaaagaagagaatggcaaagtatga

SEQ ID NO: 513165 - DNA, 100 bp, Homo sapiens
tgccaaagtggttgcgctcgaaagtgacaaaacttttattccacatttggaggccgtcgctttcgggttctctcatcgcttcgtcgttcgccaatgtttg

SEQ ID NO: 513166 - DNA, 100 bp, Homo sapiens
ccttcctaggctacttcaagtctggcctgaagtacaagctgttcctgttccagctgctccgtggcctggcctactgccaccggcagaaggtgctacaccg

SEQ ID NO: 513167 - DNA, 101 bp, Homo sapiens
cagattggcaatgtggcagccctgcctggaattgttcatttcccccagaagatcaatggaaggtggattccaaagagtgggcaagtgaggaccccttctct

SEQ ID NO: 513168 - DNA, 82 bp, Homo sapiens
cgtcacggcgtacgccctcatggggaaaatctccccggtgactttcaggtacatgtcccagagcaagcacacggaggcccgg

SEQ ID NO: 513169 - DNA, 75 bp, Homo sapiens
ttccgacacatagccctcgattatgtgcttcaggaatagcgggttttgcagcaattgttgcatatggattatata

SEQ ID NO: 513170 - DNA, 100 bp, Homo sapiens
aagcagaggctcagagcttggagacagacggtactccaaagattcaggtttactcacgtcatccagcagagaatggaaagtcaaatttcctgaattgcta

SEQ ID NO: 513171 - DNA, 100 bp, Homo sapiens
cagtagttcaggaggggagtctgatattgaagaggaagaactgaccagagctgatcccgagcagcgtcatgtacccctgctggctactactgcaggtctc

SEQ ID NO: 513172 - DNA, 82 bp, Homo sapiens
ctccgaaacttctataccctggtcacctccacgcacttcccaccaggactttctcatcaaccgagagcctgcgacaactctc

SEQ ID NO: 513173 - DNA, 82 bp, Homo sapiens
gttatctgcgaacacagtagtggaagatgtaaagcaatatttcgagcagtttggcaaggatgctcgtcagaagttccgctct

SEQ ID NO: 513174 - DNA, 100 bp, Homo sapiens
tggaggccatcaggggccttgataacacagagtttcaaggatacttttgtggaactctatgggaacaatgcagcagccgagagccgaaagggccaggaac

SEQ ID NO: 513175 - DNA, 100 bp, Homo sapiens
agtctatcaaccttctcaaatctaaaaaatgtcccttcattgttgcactcaataagcctcccgcgacgatgcccctcaacgttagcttcaccaacaggaa

SEQ ID NO: 513176 - DNA, 100 bp, Homo sapiens
taagagcaaagctacttccattccagaaagatggcatcatttttgccctcaaaagaaatggcagaccccttatccctctggacagaatgcaggtccaacc

SEQ ID NO: 513177 - DNA, 83 bp, Homo sapiens
gctgcggcgagcggagcttcgcggggatcctgctggactgcacgaaaaaggactttgaacatgtcggggatcgccctcagcag

SEQ ID NO: 513178 - DNA, 97 bp, Homo sapiens
ggacttcgtcgccaagctggccaacaacacgcaccaggatcagttcgacagcttagacaagcatacacaatggggaattgacttcttggaaagatat

SEQ ID NO: 513179 - DNA, 99 bp, Homo sapiens
gtttctgggtggcaagaacttgaaactgcatttcttgagcataaagaacagttcgacatcagcgaggatgacattgatgatggattcaggagactgttt

SEQ ID NO: 513180 - DNA, 122 bp, Homo sapiens
gatggtgccacaggaggctgtgcgggccccgctccgcttcgaatgggtgtcccgacccaggctaagcttgagcatggctgagcaggagcccacagccgagcagctggcccagattgcagcgg

SEQ ID NO: 513181 - DNA, 98 bp, Homo sapiens
cccaggtgagaaaggcccacctgtgtcctggttgagggtctccagggttctttggggcccgaggcatccgcatgctggacggcgatgtcacagatgtg

SEQ ID NO: 513182 - DNA, 98 bp, Homo sapiens
tgagtggaacatgggttatatttggaaccttcgggcaaacaggattccacagtgtcctctggaaaatggaggaaattgggaatctctgaacaatccgt

SEQ ID NO: 513183 - DNA, 96 bp, Homo sapiens
ccgattcctcctccttggtcgccgcgtccttggctggcgtaccaagctgtacaccctgcctgcaagccacgccacgcgtgtgtatgagatgctggt

SEQ ID NO: 513184 - DNA, 82 bp, Homo sapiens
gacatctaccaccagacctgggccagatactttgtgaacttgcttggctcaggaacaacagaagagaataaagaaaatgacc

SEQ ID NO: 513185 - DNA, 78 bp, Homo sapiens
cgaacatggactccgccggccaaggttggagtccgtgcggctggagtaccgtgcggggctgaagaacatcgcaaatac

SEQ ID NO: 513186 - DNA, 90 bp, Homo sapiens
ccgggatgctattgagttaaatgcagccaattatacagtgtggctaaagtaaataatgccagcctgattggactgggttatactcagacc

SEQ ID NO: 513187 - DNA, 51 bp, Homo sapiens
agcggtgattctccaggccttgggaagatgatccctatgatcttgaagatg

SEQ ID NO: 513188 - DNA, 83 bp, Homo sapiens
caagacagttctgtctgcagaagcccattatggctgtaactggagatgacacaggttcattttccagacactgaaagagcaga

SEQ ID NO: 513189 - DNA, 100 bp, Homo sapiens
ggggcacccccatcccactgtgggtcagcgatgactttgaggagaattacggatccagatcaggagatttgaggagctgctgccccaagtgtgttggctg

SEQ ID NO: 513190 - DNA, 97 bp, Homo sapiens
agccgaggaaaagtagaaattgatcagcaacaactaactcagcagcaacttaatggaaactaggaagatgatccctatgatcttgaagatgtttctg

SEQ ID NO: 513191 - DNA, 100 bp, Homo sapiens
gctgatgtcactcaggagcacgagcgaagtacagcttatggatggttaaaggcattaggatttcctgaaggacttgtgatacaagcgtattttgcttgtg

SEQ ID NO: 513192 - DNA, 100 bp, Homo sapiens
cggcgcttcaccgagatctacgagttccatgtgactcgaaaagccctgtttcctggtgactctgagattgaccagctctttcgtatctttcgtatgctgg

SEQ ID NO: 513193 - DNA, 100 bp, Homo sapiens
ggaattggtaaaagatgtttattctgcagcaaaaaagctgaagatggatcgagtaaagcaggatagagactcttaatggaacaatgattctgaaaagaac

SEQ ID NO: 513194 - DNA, 127 bp, Homo sapiens
ggaaggagagtctgtgccgacaagatggcggacggggagctgaacgtggacagcctcatcacccggctgctggaggttgttgacctcctgtactggagagacattaagaagactggagtggtgtttg

SEQ ID NO: 513195 - DNA, 75 bp, Homo sapiens
tttgccggaggagcccctcaggccgttatgaagacagtatggagtttccagaccatagtagacatttgctacagt

SEQ ID NO: 513196 - DNA, 83 bp, Homo sapiens
cttgccttgagtcagtgcgccgctctccagcccgcttgaacgaatccacattcatctcaatggaaggatcctgccttaagtca

SEQ ID NO: 513197 - DNA, 101 bp, Homo sapiens
ctgaggtggtgcgcggctccgtgctcctgctaagatatcaacatggactagggactccagacttgcggcaaacccttcccaacctgaaaaacttcatggag

SEQ ID NO: 513198 - DNA, 83 bp, Homo sapiens
ctggtggaccaggcgctgctgaccatggacacgtacctgggccagttccccgacatcaaggtctcctccgggctggggctgag

SEQ ID NO: 513199 - DNA, 75 bp, Homo sapiens
gaaacatcctgaaaaattcaacagcagtggtgcttcatgccccacctccaaccaagatcaaacgggagctgcaca

SEQ ID NO: 513200 - DNA, 75 bp, Homo sapiens
caccaagagggcgggagaactcactgaggatgaggtggtaaattcactccagcagcaacctcaggctgcatcccc

SEQ ID NO: 513201 - DNA, 75 bp, Homo sapiens
taggaagactgaaaggcaaggccatttaaatgtgtaatgaggagtacctgatcaatctgatagactctccaggac

SEQ ID NO: 513202 - DNA, 75 bp, Homo sapiens
cttagataaaatgacgacgtccttctggaagaggcgaaactggtctaacttcaaacttgtggctgttaattcaaa

SEQ ID NO: 513203 - DNA, 75 bp, Homo sapiens
ctcggagacacatgaaggtggcattttttggcaggtaggaaatgcagatgtacctgactacagcttgcttaagaa

SEQ ID NO: 513204 - DNA, 101 bp, Homo sapiens
tctaactcttatttctccgttggcccaaccagtcccagcgctgtcgtgctcctctactcggctgaggttcaactatgctacctggaagcacaaagagatgc

SEQ ID NO: 513205 - DNA, 82 bp, Homo sapiens
gggaggtgaagttgctgctgttgggagaaccaggtgcatcagcgcattgcggagctgaggaaagcaggtctgtggtcccaga

SEQ ID NO: 513206 - DNA, 75 bp, Homo sapiens
gatgaaggtgggaaggatggtccagaattcacttttactaccccaaagtttgccctactgccaataaagggaaaa

SEQ ID NO: 513207 - DNA, 100 bp, Homo sapiens
gtctttgtctttcacaggctgaaaataaaacagatattacctaccatttacaaagcatcctctggtatcacgattccaaaacccccaaagccaccagata

SEQ ID NO: 513208 - DNA, 100 bp, Homo sapiens
gacccatctttatgcaaagccagcgttacagtaatgttccaggtttgggccccatggtatccctgtgacagtatttcccaaaagggaatataaggataaa

SEQ ID NO: 513209 - DNA, 97 bp, Homo sapiens
ccggtcagaatagagggtatgcatttatcaccttctgtggaaaggaagctgcacaggaagccgtgaaactgttccagtctcatcagattttccatgt

SEQ ID NO: 513210 - DNA, 50 bp, Homo sapiens
ccaggttgagctgcgcgcaggctttcccacaatcgatggattgcgccatg

SEQ ID NO: 513211 - DNA, 75 bp, Homo sapiens
gccgccggccggcgcgtcgtccccacagctgatgcttttttcaaagccgctataagccttgttccggaagttcca

SEQ ID NO: 513212 - DNA, 51 bp, Homo sapiens
cggggaggagcagcagccaccgcacgagatgggcaccaacaaatgcgccag

SEQ ID NO: 513213 - DNA, 101 bp, Homo sapiens
cttcgtgggaggcgccgtgagttcgccgctggtggctccggaattccttaactttggaggcagtgaaacgactaatagcagaaggtaataaagaagaacta

SEQ ID NO: 513214 - DNA, 76 bp, Homo sapiens
gggacctcgcagctctacgtgtaccgcctcaaccgcgacgccgagattctacgattaggactgaaaatgagcaggc

SEQ ID NO: 513215 - DNA, 82 bp, Homo sapiens
gccgcctgctggaggaagagagaagaaagaaggagcaggccgtgcagattctgctgtctacatcaatacacctgaatagttg

SEQ ID NO: 513216 - DNA, 74 bp, Homo sapiens
ccgaggaacgagagcgcgaagctaagaatgatatggaacctagcaaagctgttccactgaatgcatctaagcaa

SEQ ID NO: 513217 - DNA, 74 bp, Homo sapiens
ttcccgccggccgccgccgcccgaggtgaaaggtgtagcagtcactcggcctacacccacagcatcgaccttgt

SEQ ID NO: 513218 - DNA, 96 bp, Homo sapiens
aaaaaagccaaaaagataaaagcccggatgaacttcagaaattaatgcagagaactcctagttgggcaatcagttccagactccacagaccccagg

SEQ ID NO: 513219 - DNA, 97 bp, Homo sapiens
tcaatgaggcagatcagattccgatttgacgggcaaccaatcaatgaaacagacacacctgcacagctaatggttgcagagaagaatggaacaatcc

SEQ ID NO: 513220 - DNA, 97 bp, Homo sapiens
ccagacgcggcacagagagggcctgggagcttgctgcagcttcagggaccagtccaacgtcaggcggatgcacacggctgtgaagctcaatggcgtc

SEQ ID NO: 513221 - DNA, 75 bp, Homo sapiens
aggaacgtggccgacgacaccagctaggacttctctcaaacttgtgtgctgaggagactcagatgttggcctcag

SEQ ID NO: 513222 - DNA, 82 bp, Homo sapiens
gacttttctcagatgttggatatttgcttggaaaaacgtgtgggtacgaccttgtttcttgcagaacataaattattaggaa

SEQ ID NO: 513223 - DNA, 83 bp, Homo sapiens
atctttcccaatgccgaactgggaggcccctttgaccagatgaacggagtggccggagatcaatgtccgagttaccaccatgg

SEQ ID NO: 513224 - DNA, 100 bp, Homo sapiens
gggagagcagcagagacacaagtcctgttcgctcttttcagcccctcgtgtttgagcaacactgcaccactgactgactactttctcaaagatgagtatg

SEQ ID NO: 513225 - DNA, 75 bp, Homo sapiens
cccacatgagctgccccaggaggggaaagtccgggcgaccattgacgaggtggagacggacgtggtggagattga

SEQ ID NO: 513226 - DNA, 75 bp, Homo sapiens
gcagtggtcgcttcttctccttgatcgtgaagaagtcatgctacccacgctggaatgagacgtttgaatttgagc

SEQ ID NO: 513227 - DNA, 101 bp, Homo sapiens
cagaggggtgcgcagtccagcgtgaactacagtcagggcagcctgaaggatgcagttggtcaaagaaaaagtgatgtatgaaaaagaggcaaaacaacaag

SEQ ID NO: 513228 - DNA, 98 bp, Homo sapiens
ccctggggagcaccccatctccggggacactcactttgacgatgaggagacctggacttttgggtcaaaagatgaggacggggacttggttgcctttt

SEQ ID NO: 513229 - DNA, 83 bp, Homo sapiens
gggagaaaaaagattcagattacgaggattatggatgaacgtaacagacaggaagcagttcaggtacttttgaagcattctgc

SEQ ID NO: 513230 - DNA, 124 bp, Homo sapiens
gtggcagtgactttcttggatcgggtcgcctgtgtggcaagagtagaaggagcatcgatgcagtgagcatgtttttgaacacattaacaccgaagttctacgtggccctaacaggcacttcctc

SEQ ID NO: 513231 - DNA, 50 bp, Homo sapiens
ctttattgacctcgactcccatgcggtggacgcggatctgtcaacatggg

SEQ ID NO: 513232 - DNA, 50 bp, Homo sapiens
ctcaacattgttccccgtacaaaggcgtctaaatactttaaacaaatgtg

SEQ ID NO: 513233 - DNA, 76 bp, Homo sapiens
cttcaagactgactggtcttatcaagcgtttcctggaggacaccacggatgatggagaactgagcaagttcgtgaa

SEQ ID NO: 513234 - DNA, 100 bp, Homo sapiens
cccgtttcctatagatgagaaaccatacaagctgtggacttggatgttgtgggtgatggtatgcagtgtcctccttcacctttgctttttgatccttcac

SEQ ID NO: 513235 - DNA, 50 bp, Homo sapiens
ccgcctccctgggagctccgcacgggtcatttggatccaggattcctagc

SEQ ID NO: 513236 - DNA, 75 bp, Homo sapiens
gcccgggcgcccgaggcttcccggtgcgctccgccagattttgaagatgtaactgagtttctggaagaggtcatt

SEQ ID NO: 513237 - DNA, 49 bp, Homo sapiens
cctgctcacacttcagaatagagaagagacggggtttcaccacgttggc

SEQ ID NO: 513238 - DNA, 98 bp, Homo sapiens
gaaactctaggtggtctggataccattgtcaagatccctccacatgtactgagaaatgcactcggtgatggaaagagagccactattctgaagaacac

SEQ ID NO: 513239 - DNA, 82 bp, Homo sapiens
ggcatgttgtataaatgtacaggactaaaatctcaggaagctggtgatgaatgaaaaccttagtcccaatggcactgcacga

SEQ ID NO: 513240 - DNA, 74 bp, Homo sapiens
gaaaaggaactccctgacatccttggaattactccttctacgtcctcgacaaccagaacttgcagcaactgtgg

SEQ ID NO: 513241 - DNA, 82 bp, Homo sapiens
ggcctccctagccacgtggaactgcacggaatgttaacactggtgaattagcagcaattaaagtaataaaattggaaccagg

SEQ ID NO: 513242 - DNA, 82 bp, Homo sapiens
ccgagcactgtggccgaggcccacctgctgacatctacctgccaggggacggcaaaacagaacagaaaggcggagataaaaa

SEQ ID NO: 513243 - DNA, 90 bp, Homo sapiens
ctgttgtgtggccaacccttctggatctcagcagggatgaatgcaaaagaattcttcgaaaattggattgtctccagctttaagaccacg

SEQ ID NO: 513244 - DNA, 98 bp, Homo sapiens
tcctgtgaccttcatctaaagtaggtcatgagacccctgagcttaaaacggagtgatcggctttggagaaggatttactcttcaacccgactatcaga

SEQ ID NO: 513245 - DNA, 100 bp, Homo sapiens
tttcttatgcttataagagtggaacaggaggccccgtgtgggccgcggcccggccctcaccatggagtccatgttcgaggacgacatcagcatcctgacg

SEQ ID NO: 513246 - DNA, 90 bp, Homo sapiens
gacgtgtgaggagcaccagctctgtgttgtggctgtgctgccccatatccttgatactgggcaggtgctgagtgcccatgtgtcgggccg

SEQ ID NO: 513247 - DNA, 100 bp, Homo sapiens
cgctggtggagaagcgccttcgctatctcatggacacagaatatgcttttaaggctattaaccagggtggccttacatcagtagctgtcagagggaaaga

SEQ ID NO: 513248 - DNA, 100 bp, Homo sapiens
tatggttccatccctaaacttatacggatgagtgccacctctcgtaaacggaaagaagaattagctgaagcattgaaaaagcttattttatctaagggca

SEQ ID NO: 513249 - DNA, 100 bp, Homo sapiens
gaatgcatacttggaatgaatccttctagagacgtccacgaacccagtgacttgattgtaaaaatttacagagcggaatcatatgctggtctccaagagt

SEQ ID NO: 513250 - DNA, 75 bp, Homo sapiens
acagtggggacacagccattggtacatcatgctcagatattgcggaggttccagggtcacccccgagaggacaac

SEQ ID NO: 513251 - DNA, 50 bp, Homo sapiens
ggctgcaatcacatgcagtgtgctaagactgcctgcgctgctgacttaag

SEQ ID NO: 513252 - DNA, 100 bp, Homo sapiens
tgaaggccctcgactacatccaccacatgggatatgtacacagctccccccacccgctgcctgcggttttgtttctgttaaaacgtcacctgatgaaata

SEQ ID NO: 513253 - DNA, 100 bp, Homo sapiens
aaagaatatatcagccttcggctcatcatatcagagctgaggaatcaatatgtgtctggggaagccaatgaaactcagattgcagaagcactgaagcgtt

SEQ ID NO: 513254 - DNA, 122 bp, Homo sapiens
ccagaacagtttccggtcaatgagcactattttggattagtcaatcatataatcaagtttcacagagcttctaaagcaaacaagaagccagttcagttacctcggggaatggtgaagtcact

SEQ ID NO: 513255 - DNA, 100 bp, Homo sapiens
tagaagcatctgaagaactagatacaatttgtcccaaagctcccaaattagaggaaaggcagtttgaagagaacacatgaagaagaggatgattttggaa

SEQ ID NO: 513256 - DNA, 98 bp, Homo sapiens
gccgccatcctcggcgcgactcgcttctttcggttctacctgggagaatccaccgccatccgccaccatggtagctacagcaagctgggtagcaggca

SEQ ID NO: 513257 - DNA, 75 bp, Homo sapiens
gacccaggaagccgcgggcaaactcagactcgaagatcctatagcaatggaactcagcgatgcaaatctgcaaac

SEQ ID NO: 513258 - DNA, 149 bp, Homo sapiens
gtttccggtgggctcttctctcaactggcctcatgttcttttatcacttcagcgtcttgcagatcctcggcctgtgcccttaaagatagccgttttcccccaatgacaagggatgagctgccacggcttttctgctcagtgtctctgct

SEQ ID NO: 513259 - DNA, 97 bp, Homo sapiens
agtgtccagcgacagcttctgggaggtacaggtttgcagattccgccagcagcacagcaagctctacagatgagtggctctttggcatttggtgctg

SEQ ID NO: 513260 - DNA, 100 bp, Homo sapiens
gcgtgcgcggacggtgtgcgggttcttgggtgtctctggggagtccctgggccagaccttcctccagactccagcccacctcttcggagcagctctgctg

SEQ ID NO: 513261 - DNA, 90 bp, Homo sapiens
gctctcgggcctcctctgggagctcatcaggactatgggggattgggcagaggtgttgttgaggcatcttcattaagctggagtaccagg

SEQ ID NO: 513262 - DNA, 118 bp, Homo sapiens
gtactgcgcatacacaatcccgggcatgggcggcaactctttgatgtactactataatgggaaagcgtgatcattcaggatatgttcgtccagtaccagtgccacgcagtttaaatag

SEQ ID NO: 513263 - DNA, 83 bp, Homo sapiens
ctcaatatctgtcttcggtggactccttcggcagtccacccaccgccgccgcctcccagcatttaaatcaaacggtattgaga

SEQ ID NO: 513264 - DNA, 98 bp, Homo sapiens
tgcagccttcggaaacgtgccccccagcccgacgagcaaaacgcatgagagcagagcgacttgaggagattatgaaaagaaccaggagaacagaagct

SEQ ID NO: 513265 - DNA, 96 bp, Homo sapiens
gctcgatgctggacatacttgaccggggtcatcctagggaaaacactatcctctgagatcccagatcatgaggggtctcgccaactcctgggctca

SEQ ID NO: 513266 - DNA, 98 bp, Homo sapiens
cctcccttgaaaccggcactgggacttctcgatctctggaggcacctgttgcaagtgacagtgtgaaaaaacagttgatgtgaagaaaagtaaattct

SEQ ID NO: 513267 - DNA, 96 bp, Homo sapiens
ggctgccgcggctcctgtgtgctttgaaggctcctgtaaccgccaggcagcggccccgccatgtcccagccccggaccccagagcaggcactggat

SEQ ID NO: 513268 - DNA, 101 bp, Homo sapiens
cccagattcaggatcagacacctagtccttccgatggaagcactagacaaagttcacctgagctaagggagaacattgagcaattcttcaccaaatttgta

SEQ ID NO: 513269 - DNA, 96 bp, Homo sapiens
tctacagcaaggtttactctgaatcccaatcctacaggagttcaaaacccacacatgttgagactgagctaaagttaatctgttgtgacattctgg

SEQ ID NO: 513270 - DNA, 100 bp, Homo sapiens
atgaagctgctggcatctgacctcctggacaacaaccgcatcatcgaacggacttgaaagaggagattgatattcgactctccagggttcaggatatcaa

SEQ ID NO: 513271 - DNA, 75 bp, Homo sapiens
ctccagtaacactcaagcaaagaagagttgagcacaatcaggaaacccagcgtttgctggcagaaccagttcctg

SEQ ID NO: 513272 - DNA, 100 bp, Homo sapiens
cggtctgacatcgcgacgctgctcaaaacctcgctccggaaaggggacacctgcaattctgtggtgttcttggtcacacatttatggagtttctgaaggg

SEQ ID NO: 513273 - DNA, 100 bp, Homo sapiens
ctgtatcctgaagagaagttggactgtgttatagtagtcttcataggagagggcacctttcacagccagcaggcattggaatatggcaccaaactcgttg

SEQ ID NO: 513274 - DNA, 75 bp, Homo sapiens
tgacatttaattttagggtcctttatatagaagggagagtaggtgatattgaggcatggagtgacacatacgaca

SEQ ID NO: 513275 - DNA, 73 bp, Homo sapiens
gaagatcctggaggtggatctgaagaacgggtggatggaagtttgcttagttgaagaattgccaccaaccact

SEQ ID NO: 513276 - DNA, 82 bp, Homo sapiens
ctacgtgtcccccgaggatctggaggcacagctgcagtctgacgagagggatgtgaagttcatttccaatccgccctccatg

SEQ ID NO: 513277 - DNA, 88 bp, Homo sapiens
aagtgcagctgcctcagttcttagcgcagagagtgactcagacatctcctctacaagtacctaacccatcctggatgcaccaccattc

SEQ ID NO: 513278 - DNA, 101 bp, Homo sapiens
gcgcctcctgcccgcggaccgcggcagcccagagcagccctcttggaacagagatcatgatgacacggcatctactcgttcaggaggaaccccaggccctt

SEQ ID NO: 513279 - DNA, 87 bp, Homo sapiens
gtgaccgagagcgtgaccgagagcgcgaatatcgtcatcgttagaaggtggcagggcccagccccgaaccagacaagggacccctca

SEQ ID NO: 513280 - DNA, 127 bp, Homo sapiens
tgttcttcactgtctgggtatttggaggaggaacaacccccatgttgacttggcttcagatcagagttttccgtctgatgaaggttggccatttgcaaagtatcttggagcttgtggaagaatggtg

SEQ ID NO: 513281 - DNA, 100 bp, Homo sapiens
aacctgaaaaattcaagaagttgaaaaacgcttttcacgtcacctggagagatgcacaggctggaagtgatggagagagtattggaaactgtcccttttg

SEQ ID NO: 513282 - DNA, 80 bp, Homo sapiens
acctgcggccaattcggtggaacgaggacgcggactgcgaaggcagtgatgtcttggcattgcccattttcaagcaggaa

SEQ ID NO: 513283 - DNA, 75 bp, Homo sapiens
gagaacttcaggaacctgctgtcagtggctccagaaagcagtggggcctgagatcaccaagacagacctggtccc

SEQ ID NO: 513284 - DNA, 107 bp, Homo sapiens
ggcgtttagagcaacagatcgtggatctgaaagtgacaagcattttagaaaggtcagatgtaccaacagtaccagcaacaggccggctatggtgcacagcagccgca

SEQ ID NO: 513285 - DNA, 127 bp, Homo sapiens
cgtttctctgttgtctcggtagaaggccagagtcacacacggtcctaagagctgggcaccaggaagcgaaggctggtcaaaatgcagatcttcgtgaaaacccttaccggcaagaccatcacccttg

SEQ ID NO: 513286 - DNA, 75 bp, Homo sapiens
ccccataggtcactgtgtggccatctaccactttgaaggttctgcctggagcaccgacacctcaggaagaaccag

SEQ ID NO: 513287 - DNA, 97 bp, Homo sapiens
ccagaggtggctttcgtggttgcacagtttggctaacagagatttctcccgaaggggaaaagtacaaacccttaattactggagaaaaaaaagtaca

SEQ ID NO: 513288 - DNA, 100 bp, Homo sapiens
aatctatgcaaatatgaggatggttcatatacttacatcagttgttgaaatagctcgtctgctggccctggaggaggctaccctgagtaccgatctgcag

SEQ ID NO: 513289 - DNA, 100 bp, Homo sapiens
aaagtgatattggatggatatgggagctgtggccctcagaatttaaacttaaggaaagagtgggaaagtgaggacctagaggatcaagacataatgggag

SEQ ID NO: 513290 - DNA, 83 bp, Homo sapiens
gacagtctgcatgtgcagttttcaggaacgggaggatgaaattgctactatggagtgcatcaacaatggcaagtccatctttg

SEQ ID NO: 513291 - DNA, 90 bp, Homo sapiens
ctgcgctaccggaatgtcatccagcgagtgattaggtgacaaaatatctgaacagaagaggacttaggagagatctgaactccagctgcc

SEQ ID NO: 513292 - DNA, 83 bp, Homo sapiens
cacctttcggcttctgagacggcggcagcagcggcattcagatggaaaagggatagcagtggaaataaaatcatgcatcctgt

SEQ ID NO: 513293 - DNA, 100 bp, Homo sapiens
tgaacagtgaaggatctcactcagaatcctgtccacaatctgtccagtttacaccttaccccaaagaggagtgttcagcctgggtgttcctgtagatgct

SEQ ID NO: 513294 - DNA, 75 bp, Homo sapiens
tttcttatgcttataagagtggaacagatgaaggatttgggggcagagcacttggcaggtcatgaaggggtccaa

SEQ ID NO: 513295 - DNA, 50 bp, Homo sapiens
ctggcagtgacgaggacgaagtgtccgagagaattcgtgacttagaagat

SEQ ID NO: 513296 - DNA, 75 bp, Homo sapiens
ccaaagagttgtaccgagactataaccacggtgtgctgaagataaccatctgtaatttgcagtggtgtgctgctt

SEQ ID NO: 513297 - DNA, 100 bp, Homo sapiens
gtatcactcgctcccttgatgatcttgaggctccataaaaatacagactcaccagttcctgctttgatgtgacatgtgactccccagaatacaccttgct

SEQ ID NO: 513298 - DNA, 100 bp, Homo sapiens
agagggatcttgccctcattctttgggtctgaaacactggcagtcgttggaaacaggactcaggttgtgggagacaagtagccaacagtatcataactgg

SEQ ID NO: 513299 - DNA, 100 bp, Homo sapiens
aaaacagtcgccttgcacaggcctggtttaacactcatagggagcttttggagagcaactttactttagtgggtgtaccttcagttgaatttttagaatc

SEQ ID NO: 513300 - DNA, 82 bp, Homo sapiens
cctgggcgctccggtggcggcggagtgtcaacagcatctccaccctggagcctgtgagccggtgccagcgcctgagtgagct

SEQ ID NO: 513301 - DNA, 98 bp, Homo sapiens
cgagccctaacatccagccgtccccagctcacggatccctgctgccttggtgatcccgggctgacagccagagagcacagcggctcagctcctggaga

SEQ ID NO: 513302 - DNA, 100 bp, Homo sapiens
gggagacgagaagcctgaaaagtcgcagcgagctggagccgccggagtgtccaagacaaagattttggccacaggaggagcatctcacaatagagaaatc

SEQ ID NO: 513303 - DNA, 100 bp, Homo sapiens
ggagaggagctgtggataacgggaggtgaatttccatgtcaacatagtcctggacctcctctgtcagagagagcagctttgtggaaaagatgaagaaaac

SEQ ID NO: 513304 - DNA, 100 bp, Homo sapiens
tgggaacctgaatgcctacttgcaacagggttgcaaactgtcttccagcatcctgaggttagcattacacttctcccagtggagcccatgacttctgatc

SEQ ID NO: 513305 - DNA, 82 bp, Homo sapiens
tctccggcccctccagctgccccctgtgtggcaaacctttcttgagctcagttccagggtctccctccactgctgtagtaac

SEQ ID NO: 513306 - DNA, 75 bp, Homo sapiens
ccccggcccacagtgggggtgtgcaaacccgagagaactggatctacggaatccagaggcagcattgtctccaac

SEQ ID NO: 513307 - DNA, 90 bp, Homo sapiens
tctggatctccgattgtcaagttctcgagcagcttctatcttcttggacacttaatgattgttggcaagaaatgtgctgctgatctgggc

SEQ ID NO: 513308 - DNA, 100 bp, Homo sapiens
attcggtaaccatagaccaaaagcaccaaatcagatgaaagccaaggaagggaggaatgtgtacagttcttcacgctatgatgattatgacagatacaga

SEQ ID NO: 513309 - DNA, 100 bp, Homo sapiens
agaacttaagcaacttacatcaactacagatgctagagctgggatctaaccgcatccggacgtccctggcaactgttcagaaaacccctgtcagaacgga

SEQ ID NO: 513310 - DNA, 107 bp, Homo sapiens
gtcgcaaaacttatgtgaccccgcggagacccttcgagaaatctcgtctcgaccaagagctgaagctgatcggcagtacctcccccggaacccctgtccgacgcccc

SEQ ID NO: 513311 - DNA, 50 bp, Homo sapiens
cgcacgccatgggagccgtgactgacgacggagtctcgctttgtcgccca

SEQ ID NO: 513312 - DNA, 90 bp, Homo sapiens
acaatattaaattatgaagatgtaaggaaaaaatcctacgctaacactgtcgcagtttgaaagatgccatcccgcccactttctacagac

SEQ ID NO: 513313 - DNA, 101 bp, Homo sapiens
agaaccaccagcattgccaccaccaccaccaccaccacagagtctgtggaagaggtggttcgagaggttggagcaatcactgaagaaactgaagcctgtga

SEQ ID NO: 513314 - DNA, 75 bp, Homo sapiens
gttcaagtggccctcagggcatccccgttttcgagcttgcatcgagagccactgcgagtagctgctgttatgaca

SEQ ID NO: 513315 - DNA, 120 bp, Homo sapiens
agaccgtgaccgagagcgtgaccgagagcgcgaatatcgtcatcgttagaaggccaggtgtggtgtcttacacctgtaatcccagcactgtgggaagccagggcaggtggattgcttgag

SEQ ID NO: 513316 - DNA, 83 bp, Homo sapiens
ctcagttggaagcagccgatccagcctgcggagcctgtggggcaggactatcctattaagtgtaatctcactgcttaatgagc

SEQ ID NO: 513317 - DNA, 100 bp, Homo sapiens
gccagggtcaccatcaaaatggaatgtaaccctagccaggtgaatggctcaaggactgatcctttgaaatactccagccatgactaaaagagaagcagag

SEQ ID NO: 513318 - DNA, 100 bp, Homo sapiens
tttatcaaatgtgtggaacagaaggaaactttgaaaagcaccccaaagaactgatcagggggcccatatggcttcgaggttggaaagggaatgaattgca

SEQ ID NO: 513319 - DNA, 82 bp, Homo sapiens
ggtatggttatgatgaatccgactccttcatcgataactctgaggcgccttaaccaccagaagaacctggtagagctgtctt

SEQ ID NO: 513320 - DNA, 80 bp, Homo sapiens
ctcacatgagacaaatgcgctcagcttcaattgattatgtgtgacaatccaagaagccaaccaattaagaaccgaaaata

SEQ ID NO: 513321 - DNA, 100 bp, Homo sapiens
ttcatctggaatttctggcttgaattagggaaagatttatcttttctccactcatataaaatgttttgacctgtagcagagaaccaattctggagaacag

SEQ ID NO: 513322 - DNA, 101 bp, Homo sapiens
cacccccgcagtttccaggatttcctccacctgtacctccaggcagaatattactgaagaatgatcctgttcaacctcctagtgcctctactgaattattc

SEQ ID NO: 513323 - DNA, 83 bp, Homo sapiens
cttacattgctgcatcaagaaacccaagctgctgagacaatgcagatcttcgtgaagactctgactggtaagaccatcaccct

SEQ ID NO: 513324 - DNA, 115 bp, Homo sapiens
agaaaagcgagcctcttctgataactcaggatttacttgaaatgaaaggagattccaacctacttcaggttttcctttggaatatggataaatacaccatgatacggaaactaga

SEQ ID NO: 513325 - DNA, 100 bp, Homo sapiens
cgttgtttaaaaagaatgcacattaaagccatgcccgaggatgctaaggggcaggcatacaagaattaaattctgaataagtctgcaggtaggatggaca

SEQ ID NO: 513326 - DNA, 100 bp, Homo sapiens
ccatcatagtcaactgcgtggaagagaagatctaccttctgagatatcatccttcttcagggagataaggaaaaaaagccacagggtcccggagagccag

SEQ ID NO: 513327 - DNA, 75 bp, Homo sapiens
agccacaaccaaagtcccggagatccgtgatgtaacaaggattgagcgaatcgtccaatggatgggaccccaatg

SEQ ID NO: 513328 - DNA, 100 bp, Homo sapiens
aacctccaatgctcccctttccacgtccgctttgggaagatgggggtcctgcgctcccgagagaaagtggaacagtcgtggtaaaataattaaacccctg

SEQ ID NO: 513329 - DNA, 100 bp, Homo sapiens
tggtggcgggcccgggctgcggcgtgtgcgcgcccgccagctgctccggagatacggaatcctgttcacgatgctggtatttggaccagcctgcgggttt

SEQ ID NO: 513330 - DNA, 50 bp, Homo sapiens
tggacattggtccagggactctcttcaagaatcaggaaacccaggcccaa

SEQ ID NO: 513331 - DNA, 90 bp, Homo sapiens
ctgacatggaggatgatttcatgtgcgatgatgaggaggactacgacctggtgtctgcttttggggcagagttttcatcggaggcatgca

SEQ ID NO: 513332 - DNA, 98 bp, Homo sapiens
cgcagctggctggcttcagtggaccaggagagtcccgtattctcagagtaaaagttgtttctggaattgatctcgccaaaaaggacatctttggagcc

SEQ ID NO: 513333 - DNA, 75 bp, Homo sapiens
tgaagcctgcctacagttttcacaaatctgattcccgaggaggccttgtcaccatcctacctgactgtgtgtctg

SEQ ID NO: 513334 - DNA, 98 bp, Homo sapiens
cctgttgcaccaggttcttcgaaaactgaagcagatgttgaacaacaagccagcagacttcataggaaagcaagcactgaaacagattaaagccaagg

SEQ ID NO: 513335 - DNA, 51 bp, Homo sapiens
gccaccgaatcgctgtcacgccggcagacaccattcgcttttcacccaaga

SEQ ID NO: 513336 - DNA, 100 bp, Homo sapiens
caacgccaccaattccaacctgaattctccactttaccaatacttacaggatctgggacacacagactttgaaatatgttcttctttgtcaccaaaaaca

SEQ ID NO: 513337 - DNA, 50 bp, Homo sapiens
ctgtctgtccgtggtggatctaagctcaagaaatcctggggctccaagga

SEQ ID NO: 513338 - DNA, 83 bp, Homo sapiens
tggcgctggccggatggaaatcctaatgacagtctccaaattcgcctccatctgtaccatggcttgggcactgtttaaaggaa

SEQ ID NO: 513339 - DNA, 100 bp, Homo sapiens
ggctttcagttctttggaattccattcttttccttattcttctgatgtggatccagcaatcagccatgactgcctttgcactgtccatgctctcagccca

SEQ ID NO: 513340 - DNA, 83 bp, Homo sapiens
caagcacgagggcgcgctcgagacgctcctgaggtatggcctcacaagtcttggtctacccaccatatgtttatcaaactcag

SEQ ID NO: 513341 - DNA, 98 bp, Homo sapiens
gtaaaattaaaagtcgtcttggagacaaggaagcagttctcaacaggtggagccgccaccaaaatgcagattttcgtgaaaacccttacggggaagac

SEQ ID NO: 513342 - DNA, 127 bp, Homo sapiens
cagaaggagtgcttctaccagcccatgcccctgaaggcctcgctggagatcgagtaccaagacccattccaacaatctcgtaaaacatggtggattactatgaagttctaggcgtgcagagacatgc

SEQ ID NO: 513343 - DNA, 50 bp, Homo sapiens
ctcgtggcctgcctctgcgtgcgtttttagaacttcagccataaaaatgg

SEQ ID NO: 513344 - DNA, 75 bp, Homo sapiens
cagcatccaggcctcattggacagcattcgaggctgaaggggatgctaagggagataaagcaaaggtgaaggacg

SEQ ID NO: 513345 - DNA, 100 bp, Homo sapiens
gtctctatgtgccaagcatggcattgaataccaggagaagccgctactgagggccctgctggacatcatcagattccaactccacagagtgaccagagag

SEQ ID NO: 513346 - DNA, 82 bp, Homo sapiens
caactacctgtgccacctgtgcttcaacaaaggacactacatcaaggactgcccccagacaatgcagatcttcgtgaagact

SEQ ID NO: 513347 - DNA, 82 bp, Homo sapiens
tttggattgaagccgcctctgtattacttaccaggtcagtgacttcctgtcgggccgttcgccactgacactggccttgcgt

SEQ ID NO: 513348 - DNA, 50 bp, Homo sapiens
caccggcttccgcatccaagatgaagaagattattttgcagaggatgatg

SEQ ID NO: 513349 - DNA, 83 bp, Homo sapiens
cccgctgccgtcgccgccgccaccatgcccaagagaaagggaaatcctcattgacgattcaatttgttgaaggccaatttgtg

SEQ ID NO: 513350 - DNA, 83 bp, Homo sapiens
gtcgacttcgccggagactgccagcagcccctgtcaaagggaacaggaagcagtccacggagggtgacgccctagacccacct

SEQ ID NO: 513351 - DNA, 75 bp, Homo sapiens
ggcttctttgagactgaaatggcagacgttcctgaatatgtttgttgacagcaatcaggatgctcgaagaaggtc

SEQ ID NO: 513352 - DNA, 78 bp, Homo sapiens
aaatggatagccctacacagatatttgagcatgtgttcctgatattccgagtggtgtgcatctgtttgggtaatccac

SEQ ID NO: 513353 - DNA, 75 bp, Homo sapiens
aggccctatcaggacatggagtatgaaagacggtactgtctgatgagcgtgaaaggttgtttcaccgacttccac

SEQ ID NO: 513354 - DNA, 100 bp, Homo sapiens
cttgcccagactccaatctgtgactgcttgggctttgagccagcgggttgtgctgcagctgaagggccacgtcagcgagctggaagcagatctggccgag

SEQ ID NO: 513355 - DNA, 96 bp, Homo sapiens
ttacttcttcctcaacaccagcaccgcagatgttgtcaaggtggcctaccaggaggccaggggtgtcgccatggagatcaaagacgctggccttca

SEQ ID NO: 513356 - DNA, 74 bp, Homo sapiens
aactctatcccaggaatacagctttgcattagtccaagccttatgcatttgatcgggtgttccagtcaagcaca

SEQ ID NO: 513357 - DNA, 74 bp, Homo sapiens
gtcctttcctgctgatgacgctactgctggggagactcacagagagagcaggagattcggatgggtcagatggc

SEQ ID NO: 513358 - DNA, 100 bp, Homo sapiens
gatattatgtataatggagaaatgaatgagaagattaaactattatacaggcttcatatccctccaggtcaaaatgcagatcttcgtgaaaacccttacc

SEQ ID NO: 513359 - DNA, 88 bp, Homo sapiens
gacgccccgcgccgagccggaggccgcgtggacccgaaagccgctgggaaaagtgctggagaatctggtaaaagcaccattgtgaagc

SEQ ID NO: 513360 - DNA, 124 bp, Homo sapiens
caataccaacaggctctagccaacatgcagttacaacagcatacagcatttctcccaccagatacttaactatcaggaaacatttacagatgaagaaagaagaacatctgaacacagactgagg

SEQ ID NO: 513361 - DNA, 51 bp, Homo sapiens
ccaggacccactggaagcctagaaatgatggggtcgaggatttggtctttt

SEQ ID NO: 513362 - DNA, 103 bp, Homo sapiens
ctgcgctgttcgtgctgctgggattcgcgctgctgggcacccacggagcctccggggctgacgcaaacatgcagatctttgtgaagaccctcactggcaaaac

SEQ ID NO: 513363 - DNA, 90 bp, Homo sapiens
taactataaaagacttctacatgacaggaaacccagcgtttgctggcagaaccagttcctggcatcaaagccgaaccagatgagagcaac

SEQ ID NO: 513364 - DNA, 100 bp, Homo sapiens
gcctcccaacgtgctgggattacagggtatgcggccccctacctgacagtgttcagcgagaactccatcgatgtgtttgacgtgaggagggcagaatggg

SEQ ID NO: 513365 - DNA, 100 bp, Homo sapiens
ttcaccatgtacaccacatcatctaaggtggagaaacaggtgaatgatgccgtttctaaaggtgccaccgttgtgacaggtggaaaacgacaccaacttg

SEQ ID NO: 513366 - DNA, 50 bp, Homo sapiens
atggacggtcactcagcctatggaggttcactactgtgatagacaaagtg

SEQ ID NO: 513367 - DNA, 89 bp, Homo sapiens
cccggccgccgcgctccggtacacacagggaaatcctcattgacgattcaatttgttgaaggccaatttgtggactcctacgatccaac

SEQ ID NO: 513368 - DNA, 88 bp, Homo sapiens
cgaagtgccttaacaacaattcttgactgttgggatccagcctttgaagtaaattttatggatgatgtaggtcagactctattaaact

SEQ ID NO: 513369 - DNA, 98 bp, Homo sapiens
tgaatttgggcagtcaattaacataaataggctgcttggagaaaatgatggggaaacaagagctttgcaactattggatgattatccgaaatgtttca

SEQ ID NO: 513370 - DNA, 75 bp, Homo sapiens
taagtcatttgttaccaaacggagtcttcaagaacatatgagtattcacacagtggtgtcaatatcaaaatgcca

SEQ ID NO: 513371 - DNA, 80 bp, Homo sapiens
tgtgctcggttcgcgaaagccattgctgacgaccaggaaacttggctgtaacttcaaaagaagatttgattctttatttc

SEQ ID NO: 513372 - DNA, 50 bp, Homo sapiens
caaacaccctggagacgaattcctattttcgacaatgaagccaaagacgt

SEQ ID NO: 513373 - DNA, 50 bp, Homo sapiens
ctcgcttctaactggactgcacacctgtgcacaccgatatgaggcaaggc

SEQ ID NO: 513374 - DNA, 100 bp, Homo sapiens
cggcccctggcgccgacgtcaaggtccacagggcacgcaagaccatgccgaagtccgtcgtgggcctgggtgatgaccgcttctccgagagcatcctgac

SEQ ID NO: 513375 - DNA, 100 bp, Homo sapiens
agccccaattcctacttcatggatgtgaaatgcccaggaacgactgagacggctaaaccacagtgttgccaaggaaacagcccgcaggagagcaatgctg

SEQ ID NO: 513376 - DNA, 49 bp, Homo sapiens
gcagacatcttcagccgctgccagctgtgagccgtgagctttgaggcgg

SEQ ID NO: 513377 - DNA, 90 bp, Homo sapiens
aagttccagtccccacccgacagtcgcgggcacccctacgtcgtgtggaaatccgagtaccatgacccgttgcagccatcagcagtctcc

SEQ ID NO: 513378 - DNA, 101 bp, Homo sapiens
ccacccaccatggccgcagaccagcgcccgaaggccgacacgctggccctgaggcaacggctcatcagcaaaccagtccagctacgggggcccagccagcc

SEQ ID NO: 513379 - DNA, 75 bp, Homo sapiens
gtggcggcgatggcttctctttccacctggagcagacaccattcgcttttcacccaagatgatttgatgtcttat

SEQ ID NO: 513380 - DNA, 50 bp, Homo sapiens
gattgtagccataagtggacttggagttgaccacatttggccatttccca

SEQ ID NO: 513381 - DNA, 50 bp, Homo sapiens
aaggcgaagatgcaaagtcccagccggagaattttcatccttgggccttc

SEQ ID NO: 513382 - DNA, 90 bp, Homo sapiens
cacccaggcagtccctgacgtgtcggggaggagccgggcgcggaggcatattctcaagatgcctacctgaaaggcaacgaagcttatagc

SEQ ID NO: 513383 - DNA, 100 bp, Homo sapiens
ttgaaactgacatttgatactaccttctcaccaaacacagggaatgatgagaagacagcagctgattacaagattttaggtggttcagtccttcacctgg

SEQ ID NO: 513384 - DNA, 75 bp, Homo sapiens
cgagccccttcctgagaagatcccagactgtgccctgtccacggtgcctcctgcatgtcctgctgccctgagctg

SEQ ID NO: 513385 - DNA, 90 bp, Homo sapiens
gccgcggatctcaccgccgctcaggcagtagcagccagatgaagaagcggccaacatctgcagtgggctacaagaggcctatcagccagt

SEQ ID NO: 513386 - DNA, 50 bp, Homo sapiens
agaattataggaacctggcctccctgggtatctcttccaaatgcacaatg

SEQ ID NO: 513387 - DNA, 100 bp, Homo sapiens
tggtatagcccaccagaaaggacaggacttcattgacttaactagagagaccagaccaaggacaaaagatcgcagtggactgtatgtgattgacctgaca

SEQ ID NO: 513388 - DNA, 100 bp, Homo sapiens
gctgcccacggcgtccccggtcgcgaatgtgaaagatgttgcagaagtgttccagaagtggctgaagatagaaggaaaaaagtgccactgcctatcagaa

SEQ ID NO: 513389 - DNA, 76 bp, Homo sapiens
attggagccaggcctacaccccagctcctctggtgcaagtgtggtagctattgacaacaaaatcgagcaagctatg

SEQ ID NO: 513390 - DNA, 100 bp, Homo sapiens
tgatataaatgttggtggaactaacacagctgtagaaacgtgcttacaagagctatgttcgagccctccctctgctgaagaaaatggggatcaattccat

SEQ ID NO: 513391 - DNA, 74 bp, Homo sapiens
aaggaaaaactggagagcttcatcaaaaatagtgatagctttgataaagtaattccctcctggtcccagacagt

SEQ ID NO: 513392 - DNA, 100 bp, Homo sapiens
cacaagcagatctactactcggacaagtacttcgacgaacactacgagtaccgcatgtcagtgaaaaaaccagtgaatcgccttccaaaccaggagaaaa

SEQ ID NO: 513393 - DNA, 100 bp, Homo sapiens
atgtctttctgatatctgaactggcaggagaacaaagatttgcatctattgttgctaaaagacttgagagtttgattgagggagaagtggacctcattgg

SEQ ID NO: 513394 - DNA, 109 bp, Homo sapiens
aagtgacgtggaggatcactcggtgcacctgcttttttctgcaaatcgctgggaacaagtgaaagtggagaatgaggacatgaataaagaccagatcttgctggaaaaa

SEQ ID NO: 513395 - DNA, 80 bp, Homo sapiens
cctactggacaagaatatgctgccaaaattatcaacaccaaaaagctttctgctagggttcacaggaagatgaaagacct

SEQ ID NO: 513396 - DNA, 91 bp, Homo sapiens
caggccagccaggcggaggctgaccagcagcagactcgtcccatggtggtcttccagcagaaacagttaccaagaaatgggaactaccctc

SEQ ID NO: 513397 - DNA, 75 bp, Homo sapiens
tccgggaccagatcaattctgatcaccgcactcgggccatgcaagatgccatggatcatctgcagtcattcattg

SEQ ID NO: 513398 - DNA, 75 bp, Homo sapiens
atggcgaggagtctctgtccgggggcctggctaaggaaaccctattacctccagatttgggtctcgctgtgctag

SEQ ID NO: 513399 - DNA, 74 bp, Homo sapiens
actacgtcagagctcctcatgttcttgcatggcccaagcggaagcgagagagtgagagtgaaagtgacgagact

SEQ ID NO: 513400 - DNA, 101 bp, Homo sapiens
tgctgttgtccaacagaacgacctagtatttgaatttgctagtaacgtcatggaggatgaacgacaggttgcatcataaatacaaaggactgaagttataa

SEQ ID NO: 513401 - DNA, 96 bp, Homo sapiens
caccaccatgacaccgggcacccagtctcctttcttcctgctgctgctcctcacagtgcttacagggcagagcggcttgggtaaatccaccttaat

SEQ ID NO: 513402 - DNA, 98 bp, Homo sapiens
gcagatttttaggtctttcgtggtcagtaaattccgggaaattcaacaggagctttccaggatgtacagttacccagcacgtgtacctcctcctcctc

SEQ ID NO: 513403 - DNA, 51 bp, Homo sapiens
cagaagaagctgaggatgaagaagatggaatcttgtcgattggcctggctg

SEQ ID NO: 513404 - DNA, 100 bp, Homo sapiens
gcataagagcaaagaatactattgttgccacaggcatatgtccatttggagaggccccatttcaagtgctcagtggctgctggtggctaccgaattggat

SEQ ID NO: 513405 - DNA, 101 bp, Homo sapiens
tggaacttctgcccagctctccttgtttctcttgctgccatgatgtaagaagtgcctttcacctctcaccatgattctgagccctccccagccatgtggaa

SEQ ID NO: 513406 - DNA, 83 bp, Homo sapiens
ctaaagcagcgtgcgttcagccctgggttcacttcttcaactgagatggacatgatataatctccattgagtcaaagaatggc

SEQ ID NO: 513407 - DNA, 74 bp, Homo sapiens
aggtgctgagggactccttcattggggagaactctaggacttgcatggaaaatcaggaaaatgtttccaacctg

SEQ ID NO: 513408 - DNA, 75 bp, Homo sapiens
ggcagcggcaggagagtccggccgcgacaggacggcattttgttcccaacatcacctttggtcaccctgtggtag

SEQ ID NO: 513409 - DNA, 75 bp, Homo sapiens
tacgtctgcggaagtgcagctgcctcagttcttagcgcagggagaagaaatgggtgaccgttggtgacacatccc

SEQ ID NO: 513410 - DNA, 100 bp, Homo sapiens
accccacccagacctcgttcctcaagacctacgctaccactgccatcgccatccaccgcatctcaccaacagactgtggctcctagtgatgtggactcac

SEQ ID NO: 513411 - DNA, 100 bp, Homo sapiens
gcggaggcacagagaccaaggccgcttaacctggctggttgcactggtccctggagagctactctcctctgcaaggcctaccgtgggggccacttaacca

SEQ ID NO: 513412 - DNA, 90 bp, Homo sapiens
ctaggttctgggaagatggcgaaggtctcagagctttacgatgtcacttgggaagccccccaggttcgcctaatagtcttggctacttcc

SEQ ID NO: 513413 - DNA, 141 bp, Homo sapiens
ggagctttggacaggaggtcatacagctgatactacccacccccggttacgcctgtcacataaagttagtttgcagaattactctcctatgatggcacagaaatcacaaggatctgacaaccttcaggaaggccaggaaaa

SEQ ID NO: 513414 - DNA, 75 bp, Homo sapiens
gttctgcaccatcttcaggtcctactccaggggcgctcaggaagctcttcgtgggcggtcttgactggagcacga

SEQ ID NO: 513415 - DNA, 100 bp, Homo sapiens
cggaggaaagcgggaagactcatcggagcgtgtggatttgagccgccgcattttttaaccctagatctcgcagccatggcaatgacaggctcaacacctt

SEQ ID NO: 513416 - DNA, 98 bp, Homo sapiens
gatgatgatagctatggtgtagatggaatggatctaacttcccagggggcaggcacttactgagttttgaaaagaaacttgctccagaagaatgcttt

SEQ ID NO: 513417 - DNA, 100 bp, Homo sapiens
ctactgtgcagctccagagagacgtgaaacatgtgaacactcaagtgaagcaaaagccttccatgattacgttcaaaccttgtactactcagctgatcac

SEQ ID NO: 513418 - DNA, 71 bp, Homo sapiens
cgtgatatctgaacactcctcacttcttccccaggcctctactacgtggacagtgaagggaaccggatttc

SEQ ID NO: 513419 - DNA, 51 bp, Homo sapiens
actggcagcatgtatatcttttactgaaactgttgaggagcccatggagga

SEQ ID NO: 513420 - DNA, 90 bp, Homo sapiens
cgcaaacccaaagatccccgttcctggagattctgattgaggattacattgcagtgaaggagaagtatgccaagtacctgcctcacagtg

SEQ ID NO: 513421 - DNA, 75 bp, Homo sapiens
aaagttgcatttcctcgtcgagcgcaacccaagcaatttttccagctagtcaaattacgaaagcttggacttagt

SEQ ID NO: 513422 - DNA, 82 bp, Homo sapiens
ctgctgtacaccctcaacaaacaccagcgctttggaaaggaaggcagaggaagccacggccactggaccctggcgagggttc

SEQ ID NO: 513423 - DNA, 75 bp, Homo sapiens
cacacaacccggccctggccgctgccgccctcggtctcacagggatactgggtttgggcattgcggctcccaatc

SEQ ID NO: 513424 - DNA, 87 bp, Homo sapiens
tgagcctcctcgtctggatcctcactctctccgatactttctcccaaggtgacagagttagtccttgataattgcctgtgtgtcaat

SEQ ID NO: 513425 - DNA, 100 bp, Homo sapiens
cacggcctgcaggtcacctacctgaaggacaacagcacccgtaacatcttcatctaccatgaggacgggaagtcaccacgttctgcgcttttccgagtcg

SEQ ID NO: 513426 - DNA, 96 bp, Homo sapiens
gctactacctggtgcagggcctgattgaggactgccagctggcgctgcaggacactcatgaggaccatgatacttccactgagaatacagacgagt

SEQ ID NO: 513427 - DNA, 75 bp, Homo sapiens
aatacccagactgttactacaacctcgggcgtctggttacaggaaatacaggaggcagaggaacaaataaaagac

SEQ ID NO: 513428 - DNA, 80 bp, Homo sapiens
tggcaaggtttatttacttgatgtccaggggaacatcactcagaagtttgatgtagtcaatgtgacggtggactacatta

SEQ ID NO: 513429 - DNA, 100 bp, Homo sapiens
gcgagacaaccatccgtgtggtgtccatggacagagactaccacgtggcatgttaccactgtgaggctgaaggtgatgtggccgccctcaaccgacgcat

SEQ ID NO: 513430 - DNA, 75 bp, Homo sapiens
tcagtggaaccaacccagccgaccccccagtgagggagactctgatgtggactcggagctggaggaccgtgttga

SEQ ID NO: 513431 - DNA, 100 bp, Homo sapiens
tgtcttcctgtctcaacgatacctattttctagtgctgagatcctgagacaatggaacgggaggatgaaattgctactatggagtgcatcaacaatggca

SEQ ID NO: 513432 - DNA, 75 bp, Homo sapiens
ctgcgggcccgctccgacgcggaagggctctcacctttgtgtatccttttggtgccacattgagtgtcatgaaac

SEQ ID NO: 513433 - DNA, 75 bp, Homo sapiens
ctgggggctcgtgacaagcggggcgcagactaggcaccagcatgcagagtagttatctaccttgcctgctcctat

SEQ ID NO: 513434 - DNA, 75 bp, Homo sapiens
cgcccgcgccctccgcgcgacgccagggtttccaggcctgaggtgcccgccctggccccaggagaatgaaccagc

SEQ ID NO: 513435 - DNA, 90 bp, Homo sapiens
ggagattgcagcagcgaaccaatcccaagagcgtttcccaaagtgtattctgcggaactagcacctactgtgttctcaacaccgtgccac

SEQ ID NO: 513436 - DNA, 71 bp, Homo sapiens
ggccctgagcagctttcagcactggagctgaaggccaatcttgtgcctccgaaaggcagcaggccttgtcc

SEQ ID NO: 513437 - DNA, 90 bp, Homo sapiens
aattcccagaggactttggagaccagagttctaaagttcctgttgcttcagacaatggatgagcaatcacaaggaatgcaagggccacct

SEQ ID NO: 513438 - DNA, 80 bp, Homo sapiens
aatgatgaagagaaaggcccggagactgttggatacactccagattggatatttctgctgagaaatgtaatgcgaatcag

SEQ ID NO: 513439 - DNA, 95 bp, Homo sapiens
tggccgcggtaaaagtggtagcagcggaggcgagcggagggtttcccgcggcgggtgaggcgctggtccacattcttgagtctgatgacctccac

SEQ ID NO: 513440 - DNA, 83 bp, Homo sapiens
ggagcatgtcgaccccggcccggaggaggctcatgcgggatttcaagcggggagcttttggaagagtcccagatggaagcgac

SEQ ID NO: 513441 - DNA, 74 bp, Homo sapiens
tttaaggatggtttagaaatggaaaaatgtgccataggaaaaggatacagagtagagtttcatgaacctgaaac

SEQ ID NO: 513442 - DNA, 75 bp, Homo sapiens
ggaaagcactgatttaaacatttggtcagacattttaaattgatgcctggctggctggggtactaactacaggag

SEQ ID NO: 513443 - DNA, 104 bp, Homo sapiens
ttggggagaagaggattggaggtgtcagtgttaaaggaacctctacaacgaaggtgaagccacggaagataagaggccgggaagttaaacttgtagccaccacc

SEQ ID NO: 513444 - DNA, 75 bp, Homo sapiens
atattgtgtatcccataaagtataaagaaagctctgctatgtgtcagtgtggaatccatagagctccccatggac

SEQ ID NO: 513445 - DNA, 98 bp, Homo sapiens
aagaaggccctggacacagcaatatctctgggctttcacagattcgcatatacatggccaaaggaacaactccatgttttctaaaaggcctagagaac

SEQ ID NO: 513446 - DNA, 95 bp, Homo sapiens
ctgccggcggtggactcgtcggagccgcgggcggtcagctacccaggtggatttagacaagtaacagctgctcagcttcacctgagggatccagt

SEQ ID NO: 513447 - DNA, 100 bp, Homo sapiens
gctgcagaggtacgccgaggaggttgggatcttcttcactgcctctggcatggatgaggttggatggcaagcatgtggtgtttggcaaagtgaaagaagg

SEQ ID NO: 513448 - DNA, 83 bp, Homo sapiens
caagaacaagcctctcttctttgccgacaaactttacaaatccatgaagcggagctggagtttgttcagatcatcatcatcgt

SEQ ID NO: 513449 - DNA, 88 bp, Homo sapiens
cgacctcatcagtgagctgtccctgctggaggagcgcttccggcacaacctccaagagggaaaacatttctccagattatccactcac

SEQ ID NO: 513450 - DNA, 100 bp, Homo sapiens
aggagctcgctgcctgtaccttagatttgatagcagatgctcttcgcaatatgactatgacaaagcacagaccccacaggctcctcggacactgggtcca

SEQ ID NO: 513451 - DNA, 75 bp, Homo sapiens
ggtaaagcacccggagctgtgcaaggcactgggtccacatcacgctgagcacccatgagtgtgccggcctttcag

SEQ ID NO: 513452 - DNA, 100 bp, Homo sapiens
gccatggcccagattctgccaattcgttttcaggagcatctccagctttaccaacagggacgcttatgtcaactgggcagtgaattttgtgaattggaag

SEQ ID NO: 513453 - DNA, 100 bp, Homo sapiens
tgcacgggcaaggcgtgtgcatggagctggcggagatcgaggccatccaggaaagcctgcagccctctgatggtgtcctactcttctgtcctcacagcca

SEQ ID NO: 513454 - DNA, 100 bp, Homo sapiens
gcgcagagctaccggcgggagctgggtcaccggcttgaggggctgcgtgaggcgcggaggcagcttgtcagctcatttgcagcttacatttttggtttct

SEQ ID NO: 513455 - DNA, 100 bp, Homo sapiens
ttttattcagcggcagtggtgctttcccgaatctcagaatgccgtgaaggaaatactcatgaccagccagatgtcttaaggaatgcttttgaaaagaaca

SEQ ID NO: 513456 - DNA, 80 bp, Homo sapiens
ctgctcatgtctgtgggactctgcacactcttcggcctgacgcccaccctcaatggcggaaactagacacaatgtgcgac

SEQ ID NO: 513457 - DNA, 83 bp, Homo sapiens
ctccacgcattctagactcccgaagaggttttaaaatcaaagatgggaaaatcggagaaaattgcccttccccatggccagct

SEQ ID NO: 513458 - DNA, 89 bp, Homo sapiens
ctacctctggccccgagatcagaatgccgcataagctgtggccatgactactgaagtaggctctgtgtctgaagtgaagaaggactcta

SEQ ID NO: 513459 - DNA, 74 bp, Homo sapiens
gacaatatcaatgacaaactgacggaaaaggagagagaaattggaggcatatgctggagttatcagtgcacttc

SEQ ID NO: 513460 - DNA, 100 bp, Homo sapiens
gccatggattgtgcctacagctaaaatatctgaagattccaaagttctgcagcctcaaactgttaatggccagccaagaccccttgaatcaagtcaggtg

SEQ ID NO: 513461 - DNA, 75 bp, Homo sapiens
actgtactggctattggaaggaggagattctgaagataaggagttctaggtctcgttccagatcatattctccag

SEQ ID NO: 513462 - DNA, 75 bp, Homo sapiens
tggactgagacgcagagtgtaccaggggatgctggactgcatgggaggagtggacaaccgccatccagactgtgg

SEQ ID NO: 513463 - DNA, 116 bp, Homo sapiens
ctgcagagccacgagtgtggctggtgtggcaatgaggacaaccccacactgggacgcgaccagatggggaacaaagcctcctacatccacctccagggctctgacctacggcctca

SEQ ID NO: 513464 - DNA, 100 bp, Homo sapiens
attgagacagaggccatcctgtccattgatgacgatgctcacctccgccatgacgaaatcatgtttgggttccggtattatgagacaggaagcatcaagc

SEQ ID NO: 513465 - DNA, 96 bp, Homo sapiens
aggttccagttgagagtccgagagctatttcccgcaccaatgagaatgacccggggcaccctttggagaagaaccccagcctggggtggggacgca

SEQ ID NO: 513466 - DNA, 78 bp, Homo sapiens
ggtggtgggcgccgtgaagagccttcaggcgctgggcgaggaaaatcaggaaaatgtttccaacctggtgattgagga

SEQ ID NO: 513467 - DNA, 75 bp, Homo sapiens
gaagtagatcctgacactaaggaaatgctgaagcttttgggggcagtgcccaaaggaaatgccactaaagaattc

SEQ ID NO: 513468 - DNA, 100 bp, Homo sapiens
tctaattaacaaagaaccacagaattctggacaatcaaaacttaactcctggatacagggctgtcacatggtgactgaagaacttcattccataacgttt

SEQ ID NO: 513469 - DNA, 49 bp, Homo sapiens
ctggaacagggatcgtactcgtgtgatcctgctgcggctggaccggctc

SEQ ID NO: 513470 - DNA, 75 bp, Homo sapiens
agaaaatagcaaacgatccagacggcagggagtgcatcaaaggtgtgaacacagacggagtttcgctcttgttgc

SEQ ID NO: 513471 - DNA, 100 bp, Homo sapiens
gtccctgaccttccagaacgtggtcttcaatgtcatttatcagagcgcggcggtcttcaagctctcagtgcatacattcagagggccacactggtgtgaa

SEQ ID NO: 513472 - DNA, 99 bp, Homo sapiens
tgaaaacattggaccacacaaagtcttactggagaaaatgcagaagtctccatggacgtttccctggcttaccgtgatgacgcgtttgctgagtggact

SEQ ID NO: 513473 - DNA, 90 bp, Homo sapiens
cttgggatcccccagttccaaagtgtcttaaaggacttaaagagagatctacttcagagccagcagtcccgccagaagaggctgagccac

SEQ ID NO: 513474 - DNA, 100 bp, Homo sapiens
atgccaccaatatgccagctgtcaaagccatcatatatcagtatatggaagagatagccgcaatggctgaaaatggtgataatgaaaagatggctgccct

SEQ ID NO: 513475 - DNA, 100 bp, Homo sapiens
gacgggagagtctgccggcggagaatataagaattttgataagctgaatgtaaggacaacacactatacacctcttgcatgtggttcaaatcctctgaag

SEQ ID NO: 513476 - DNA, 100 bp, Homo sapiens
atatgatcatgcgcaccttggccatgcttgataccaagtctttatgcttcattcaaatatgcaaacatccgatcaaaagaaagtattaaaaaacccacct

SEQ ID NO: 513477 - DNA, 75 bp, Homo sapiens
ggttagacttgcagatttcaatatataccagaattggttccttccattatgagcaacttgttgaatccagatgcc

SEQ ID NO: 513478 - DNA, 75 bp, Homo sapiens
gccggcctagcgtcctggaattacttcaatcaacaagtgcggaggcaagacacatcaaagcagagatgggaagtg

SEQ ID NO: 513479 - DNA, 90 bp, Homo sapiens
gatgctgctcaccatcagtgaatttaagcccacatatcaggaccgagtggccccgccagtcgtccagcatgctctgcccaccccacgccg

SEQ ID NO: 513480 - DNA, 100 bp, Homo sapiens
ccctgggcagcgagctgcaaaaatacgatgaatggattaaagcagataaaatagtaagacctgctgataaaaatgtgccaaagataaaacatcggaagaa

SEQ ID NO: 513481 - DNA, 101 bp, Homo sapiens
ggccctcgggctgcgggagccgggctaggacgccgagcggtgactccccgccgctcccgggggccgtgacggtgtgaagatgccttaagaaaaaataagag

SEQ ID NO: 513482 - DNA, 75 bp, Homo sapiens
ggcagaccgaggagtttggaccgagctatttgtcgtagatgtccagacaagccagatcaccaagatccccattct

SEQ ID NO: 513483 - DNA, 71 bp, Homo sapiens
gttcctgccgccttccaggcagagttcccgctctcttatatgcaatatgatgaggatgatgatgaaatcac

SEQ ID NO: 513484 - DNA, 86 bp, Homo sapiens
tatgccggaagctggttttcaggccacaaatgctttcacagaattaaacaaccaccatgtcgagcaaaaaggcaaagaccaagacc

SEQ ID NO: 513485 - DNA, 100 bp, Homo sapiens
ttgagtccttcaatgttccaggcttgtacattgctgtgcaggcgtgcactggggctatgaagaaaccaagacttttcttgatatcctccgtgagactcgg

SEQ ID NO: 513486 - DNA, 86 bp, Homo sapiens
ggcttactgctgatgctagactgttatggactatacaggctccaacccaagttccagtggttgtgtctcctaggaatcagcagttg

SEQ ID NO: 513487 - DNA, 82 bp, Homo sapiens
tgagctctgcccggaccgctgcatccacagggctggagcagcttcaccactggagccagccggtttgcctcggcagccaagg

SEQ ID NO: 513488 - DNA, 98 bp, Homo sapiens
gacgccagttactgcacggaaagcagcgtcaggagccatagtacctacagcagcactccagatcggaagttgcacccatcaaatgggtcagattgcca

SEQ ID NO: 513489 - DNA, 75 bp, Homo sapiens
tttaattttagggtcctttatatagaagggagagtagcggtttgctgcggtaatcatgaggataagagagccacg

SEQ ID NO: 513490 - DNA, 100 bp, Homo sapiens
ctaatctcacggatatcctctgttgggggagaagtggcacaaatacaattatgcccacctccacctcagattcccaattctcacaatatgacaaccacac

SEQ ID NO: 513491 - DNA, 114 bp, Homo sapiens
gaaagtgaagcgctacatcatagaacacattgaccttggggcctattattaccgcaaattcttctatgggaaagagagatgcaggtcagctcctccagtaccacaacttctgag

SEQ ID NO: 513492 - DNA, 83 bp, Homo sapiens
agccgctgccgccggtgatctacaccatggagaacaagcccatcgtcacctacctgcctagagctggaacgttacctccagag

SEQ ID NO: 513493 - DNA, 100 bp, Homo sapiens
cctttccagcccgtggtccttctccatattcgagatatccttggaacagaagatcttattgtggaagtgacttccaatgatgctgtgagattttatccct

SEQ ID NO: 513494 - DNA, 89 bp, Homo sapiens
gggcggggaccggcggcgctggaggagcgaggcagctgtactaggactgggaacgggcgtccgacctccgatcatgaacgggcccctgc

SEQ ID NO: 513495 - DNA, 83 bp, Homo sapiens
gacgtggcgcacctggccaaacatgtgcagctggtggctggtccacctggcagtgattcatgaggccccagcggtgctgctct

SEQ ID NO: 513496 - DNA, 55 bp, Homo sapiens
gcagccgcggatctcaccgccgctcaggggcgccctgcgtccggcagaggaggcg

SEQ ID NO: 513497 - DNA, 88 bp, Homo sapiens
cgggtcctcctagaaattccccccgaagaagactcccccacatctggagacacctatggctgccgatgaaggctcagcagagaaacag

SEQ ID NO: 513498 - DNA, 74 bp, Homo sapiens
aagaagagaggcccaagatggagacggcggcggctgtagcggcgtgacagcttatcacaccacatgggcttttt

SEQ ID NO: 513499 - DNA, 83 bp, Homo sapiens
cccttgccttgagtcagtgcgccgctctccagcccgcttgaacgatctattccagaggggagcttcaccacttcattgacggc

SEQ ID NO: 513500 - DNA, 96 bp, Homo sapiens
caagcctattgagttaacacctctgccgctgctaaaagtggttagcaggaagaagatgagccttaagtctgaacgccgaggaattcatgtggatca

SEQ ID NO: 513501 - DNA, 100 bp, Homo sapiens
gcttaaaccaagaaacagtatgtttagcaagcactgctatgaagactgagaattgtgtggccaaagggcctttatcatctgctggactcctggattggtt

SEQ ID NO: 513502 - DNA, 98 bp, Homo sapiens
ctgcctctgcctttgctggtgcagtgagagcagcttcaggaagaaggtagataatgactataatgcccttcgagaaagactcagcaccttgcctgata

SEQ ID NO: 513503 - DNA, 90 bp, Homo sapiens
aggacggggaacgacaattacccaagcaggttgagtatctggtcaatgaaaagcacatctacctgctgccaagtggtcgaatcaacgtga

SEQ ID NO: 513504 - DNA, 100 bp, Homo sapiens
gacggctcctgggaggtcatcgaaggctaccgggcccagcacagccagcaccgcacgccctgcaagggagggacaggtgcctggtgctgctcttcctaac

SEQ ID NO: 513505 - DNA, 75 bp, Homo sapiens
cagcttagcttctgtcctaaaggtttaagaattgtttaagctgcatcaatggagcacatacagggagcttggaag

SEQ ID NO: 513506 - DNA, 74 bp, Homo sapiens
aaaaggcctaagaattttggcattgggggcaagcgcgatgaagagctggttctgcccatcaactcctccctgag

SEQ ID NO: 513507 - DNA, 100 bp, Homo sapiens
tttttgggaacgtggcgagcaaaaaatgcttgagccaggcgggagacactatattcaatcgtgctaagctcctcaatgttggctttcaagaagccttgaa

SEQ ID NO: 513508 - DNA, 75 bp, Homo sapiens
gctggaaggagactggatgatagaattgacaaggagactggctttcacagaggtttgggttgggttcagttttct

SEQ ID NO: 513509 - DNA, 100 bp, Homo sapiens
ttgatcttattcacgaatctatccttcataagtgcatcaaaacaccagaacatttgttgaacacaagtgataatgttacagtgcagtgtcacacaccaag

SEQ ID NO: 513510 - DNA, 80 bp, Homo sapiens
tgttacagctgctcatgaaccacttggcaaatgcagaatacagaaactgcagccatgaccacgcacgtcaccctggaaga

SEQ ID NO: 513511 - DNA, 82 bp, Homo sapiens
gctgagtggttgtgtggtcgcgtctcggaaaccggtagcgcttgcagcatgggcaacaggtttgtctatgctggctctaact

SEQ ID NO: 513512 - DNA, 96 bp, Homo sapiens
ggccgccgtcggcagcaagaacagagagagaggtggacagatctgagagatactgaggaaagaccacagcaagattctttcattcgtctcctccta

SEQ ID NO: 513513 - DNA, 100 bp, Homo sapiens
tcattctgggtgacctgaatacagcccaccgccccattgaccactgggatgcagtcaacctggtattgttgcagcatctggcagtgagactgaggatgag

SEQ ID NO: 513514 - DNA, 80 bp, Homo sapiens
cctgcctgcccgcgcctagaccccattcagttcgagaacttgtcttggacaattgcaaatcaaatgatggaaaaattgag

SEQ ID NO: 513515 - DNA, 49 bp, Homo sapiens
ggacgccgtcatccttacggaaaaggcctgacctctcgggacacaccca

SEQ ID NO: 513516 - DNA, 75 bp, Homo sapiens
taaagtgattttttgcctttgttgattaactggacaaattcaggcctccccatggccacccatggaccagtcggc

SEQ ID NO: 513517 - DNA, 50 bp, Homo sapiens
cctccagagtggctgggattacaggcctgttaggcctgttacattaaata

SEQ ID NO: 513518 - DNA, 100 bp, Homo sapiens
atcatacctctagtcatagcataccatttatcgggctcggcgcaggcccgcggggagcgcagcccggcggaggtacctgcacatgttgttctttgtcagt

SEQ ID NO: 513519 - DNA, 96 bp, Homo sapiens
ggaaggagtacagggaagtctataagctttgcaacagaattacagagtatgatctctgcttatgataatgtcaacaaagttcgagtagctatcaag

SEQ ID NO: 513520 - DNA, 100 bp, Homo sapiens
tgagccccgaggaggcagagcacaaggagatggagtctgctcaccaggtggccagataccgcccacgtgcccccatcattgctgtgacccggaatcccca

SEQ ID NO: 513521 - DNA, 100 bp, Homo sapiens
gtccagccgcagcctcccggcggccctgcgggtctccagccagaggaaggacttcatggaggctccaggaggccagagctctactgaagcggcggcggcc

SEQ ID NO: 513522 - DNA, 75 bp, Homo sapiens
aaatctacaagatgatgcagggaggaggtgaaaggtgtagcagtcactcggcctacacccacagcatcgaccttg

SEQ ID NO: 513523 - DNA, 82 bp, Homo sapiens
cactcctggtgaccagcattcaagggttgaatgcaatgcagttacagaatttggctgcactagctgctgcagctagtgcagc

SEQ ID NO: 513524 - DNA, 100 bp, Homo sapiens
cccggttgtcctcaggcgctgtcagaatcattgatcagcgattcgagaaggtttcctactttgtatttggtgatttcaacttccggctggattccaagtc

SEQ ID NO: 513525 - DNA, 83 bp, Homo sapiens
tacacttcgactctcaaagcaataccaggatagctgttgtttcagagaaagtcagcagataagcagagagccctagaagaaac

SEQ ID NO: 513526 - DNA, 100 bp, Homo sapiens
ctctcggcggcctgatggagtaagaggggttggctgtgaatgtacaggtttgcagattccgccagcagcacagcaagctctacagatgagtggctctttg

SEQ ID NO: 513527 - DNA, 100 bp, Homo sapiens
ccgcagccccgggcacggcggaggcagcggagccctgggccatcggttaattatagaaaatgccaagtaggaaatttgccgatggtgaagtggtaagagg

SEQ ID NO: 513528 - DNA, 70 bp, Homo sapiens
tgactgaaaaggactctatgattgaaaatatggggtggcactgaatcaacaagacaagcaactcaattga

SEQ ID NO: 513529 - DNA, 100 bp, Homo sapiens
ggcgtccgcggagcagcttccccccgcgcctctcttcgcctcgcctcgggacccgcggtccccgctcttgctggcacggaatgttaacactggtgaatta

SEQ ID NO: 513530 - DNA, 88 bp, Homo sapiens
tcgatcttgctctgctgtttctgatggggattctagaagcagttcggttatacctggggtgaagttgaacaaattgctatgatgaaac

SEQ ID NO: 513531 - DNA, 80 bp, Homo sapiens
ccactgctggggtggtggttccaatgagacagggcacaccaaactccatctgtgtggacgaatgtggaacctcgctctgt

SEQ ID NO: 513532 - DNA, 100 bp, Homo sapiens
agcaccctgctgaagaggctgctccaggagcacagcggcatctttggcttcagcgtgtccccttgctgagcgagagcgagaagcggcccttcgtggagga

SEQ ID NO: 513533 - DNA, 74 bp, Homo sapiens
cccgcccaactcccagcggagagcaagttcaactttgtggggaaacttttgggtccacgtggcaattctctgaa

SEQ ID NO: 513534 - DNA, 98 bp, Homo sapiens
tccttggatacaggaaaccaacagtcacacatgtacattacaggctcgttatcggaaagagcaaacattgcttaagcaactgccttgcattccattgg

SEQ ID NO: 513535 - DNA, 50 bp, Homo sapiens
cacctgttgagctgttttccaagggaagacatgtaaggaatttgcataag

SEQ ID NO: 513536 - DNA, 111 bp, Homo sapiens
ctacacctggaggagaggaagctattgaacgtttaaagtacctgcagatgaaatggcccctcctcgatgtcccctccagcgccacagtcaaggacacgaggtcaccatctc

SEQ ID NO: 513537 - DNA, 75 bp, Homo sapiens
gccatcaccacctcggaacccagggtaacgctgtcagtctttggtgtcaactctgcccgctcagttcctccttcc

SEQ ID NO: 513538 - DNA, 100 bp, Homo sapiens
gagcaatcttgtgaactcagcacttgtcggcagcagctggaattgattcgtttacagatggagcaaatgcagctgaagaaatcaggggagaaacccctgc

SEQ ID NO: 513539 - DNA, 97 bp, Homo sapiens
atgtaacataccaagtctatgaggaacaagggaagaaggagaaagggccaacccctgaagaagcaatacagaaactgaaggagacagagaagatact

SEQ ID NO: 513540 - DNA, 90 bp, Homo sapiens
cccccgctcaatggcgactccctcaccgagtacgaagcgggcgtttgcgaagggaccagttactctccacaagaaaattcacacaaccac

SEQ ID NO: 513541 - DNA, 73 bp, Homo sapiens
gtggaatgaaaaggaagtattagaaatgagctgaagaccattcacagcttgttgaagatgcatatagactacc

SEQ ID NO: 513542 - DNA, 101 bp, Homo sapiens
taccatgaaatgattgaatctggtgttatcaacttaaaagatgccacctctaagggtgtccgcaatgttgccagtgtctgtctgcagattggctacccaac

SEQ ID NO: 513543 - DNA, 100 bp, Homo sapiens
gccaacatcgcggtgcagcgaatcaagcgggagttcaaggaggtgctgaagagcgaggagaagggagaattccacaagttggctgatgccaagatatttt

SEQ ID NO: 513544 - DNA, 75 bp, Homo sapiens
tgtttctcaggaggatggagctagttagctgtctgttgtctgtagcccaggttttataggatcacattgacaaaa

SEQ ID NO: 513545 - DNA, 110 bp, Homo sapiens
ctgccgtccttctccactttcgccagcccgtgccgcgagcgcggcctgcaggagactgattcttgctattccaaatcctcttccacgttgacagcccttcagatatttca

SEQ ID NO: 513546 - DNA, 98 bp, Homo sapiens
ctttcataagtatggagagtacttcccaggaactggggacctacgggccatcatctgtgcgatctctgcggtggacgaggtggactacaagacggctg

SEQ ID NO: 513547 - DNA, 75 bp, Homo sapiens
gaaggggcttcttccagagccaaggaggaagggttgtccggtttttggctttcacccccaaccagtgaccaaaga

SEQ ID NO: 513548 - DNA, 83 bp, Homo sapiens
aggacgagggccagctgacggagatggtgcagaagatggaggaggtcagcccaaggccaaccccactgtcactctgttcccgc

SEQ ID NO: 513549 - DNA, 100 bp, Homo sapiens
gcctcctcccgggctggcgtgcgccagaggatccgcaaagtgctgaacaggtgcttttctgctttgggccaagtagcaaaagctcgattcctgcatgaga

SEQ ID NO: 513550 - DNA, 115 bp, Homo sapiens
tgggacacctgtggctcctgggtatttggggcctctgtgggctgctcctgtgtgccgcggatcccagcacagatggcccactgcgtgaccttggttcagctgtccatttcctgtg

SEQ ID NO: 513551 - DNA, 83 bp, Homo sapiens
ctggagacggtcgtagctgcggtcgcgccgagaaagacaacctcatcagccttgaaaggtgccatccagttaggcattaccca

SEQ ID NO: 513552 - DNA, 100 bp, Homo sapiens
gggataacaggaggatttgacaacaaaatggaatgaatctgaagtctgctgcagtaaaacacagaaggctttaaaatgttttcttgcataaaattcaaaa

SEQ ID NO: 513553 - DNA, 75 bp, Homo sapiens
agaagaaccggggtattgactctgaagatgcctacccatatgtgggacagaatgaagaagcagtacgacgtctca

SEQ ID NO: 513554 - DNA, 100 bp, Homo sapiens
ccgagccgggccgcggcgccgagtcgaacggggagccgagctggagctgccgcggcgcagccaggtatgattatcgggaaatgctgcacaatgccacttt

SEQ ID NO: 513555 - DNA, 101 bp, Homo sapiens
aactaacagctcggagcaggagaggacgggactgccaagagacatgttagaaggacaacaccactgccggaactgtggccacatcttctgcaacacctgct

SEQ ID NO: 513556 - DNA, 50 bp, Homo sapiens
ctggtgcagtgcgagacgctagagggtcaaaatgcagatcttcgtgaaaa

SEQ ID NO: 513557 - DNA, 90 bp, Homo sapiens
gaagagtaccaaggctgctagtgaacagcgacgtgcttgatgaagaaatctctggaattgtggaagtggttggaagagtaaccgccaagg

SEQ ID NO: 513558 - DNA, 82 bp, Homo sapiens
cagatctctgcagttacaggaacatcgtctgcttcatggtcagcccaaggccaaccccactgtcactctgttcccgccctcc

SEQ ID NO: 513559 - DNA, 98 bp, Homo sapiens
cctggaccgctgtgtaggcacctgagttaacggacgctaagcggggtaggggaagctggtctcttgtggctcagcgccgtgcggaggttgaagcgtac

SEQ ID NO: 513560 - DNA, 60 bp, Homo sapiens
cagccacagatactattaggaggctcggttggtttagcaaaagcagctctagaagcaatt

SEQ ID NO: 513561 - DNA, 100 bp, Homo sapiens
aagctgtgcattgttggtgggattctgctcgtgttccaaatcatcgcctttctggtgggaggcttgattggggaacatttgcctaaatctttggaaggat

SEQ ID NO: 513562 - DNA, 75 bp, Homo sapiens
acttgattgatatatatgctgacgaggagttcaaccaggcatctcccctcagatggaagtcacatgtgtgcccac

SEQ ID NO: 513563 - DNA, 120 bp, Homo sapiens
ttgcagaccagttccagcttggcgtgtcccatgtttttgagtatatccgttctgagacatacaaatagatgaaatctttgacatggtaaaaccaaaggatcctttgaaaatctctcttca

SEQ ID NO: 513564 - DNA, 101 bp, Homo sapiens
aaatgaaagcatggaccatgggggagttggaccatatgaactggtccacatatagcctcagttacattagctgcttatgaatgcaattcagttaattttcc

SEQ ID NO: 513565 - DNA, 98 bp, Homo sapiens
tttggcaagagtgtacctggtccactgaaaaattcttcagattggaaaataccacaggatggagactacgagtttgacacatgttcaaagagcataat

SEQ ID NO: 513566 - DNA, 74 bp, Homo sapiens
agaagctgcagccgcacctggccaaggcatcagaagagctaacaattgctggaatgacctttacaacttttgat

SEQ ID NO: 513567 - DNA, 82 bp, Homo sapiens
gtaagatggaagatgaggaggtcgctgagagctgggaagaggcggcagacagcgggagcaatggtggaacaaagcggcaaaa

SEQ ID NO: 513568 - DNA, 75 bp, Homo sapiens
accgggttgggctgtgacgctgctgctggggtcaggtcaaaatgcagatcttcgtgaaaacccttaccggcaaga

SEQ ID NO: 513569 - DNA, 98 bp, Homo sapiens
ggatcacaaacactcagagtggaaaaagtaccatcatttgaaacaggtaggagatcaaatcattgaaatcaatggggaaagcacaagggacatgacac

SEQ ID NO: 513570 - DNA, 75 bp, Homo sapiens
gtcatttctgttccgcacaggcctgctgaactgggtgctttatataggccagagactgctgctactttgaaacgt

SEQ ID NO: 513571 - DNA, 74 bp, Homo sapiens
gccaaactgacagaaatgcgtggcatctatgccaaagtggaccggctagaggccaggtgcggtggctcatgcct

SEQ ID NO: 513572 - DNA, 105 bp, Homo sapiens
gggtccgcgcggcctccgcggagccaggtcggtaggctccacgacaaaagtcaacccttctgtaaatcacctgctgtggttatgatgctctgagttcaatacgtc

SEQ ID NO: 513573 - DNA, 101 bp, Homo sapiens
gccggcgtacatgtgaagcagcagtgggaccagcaggactcacaccacccggcaagaactgctcactacggctccctgccccagaagtcacacggccggac

SEQ ID NO: 513574 - DNA, 58 bp, Homo sapiens
gcccgcgcctacttcctgtcccactgccacaaaggtctgacctggagctgcagttcaa

SEQ ID NO: 513575 - DNA, 100 bp, Homo sapiens
ggcagacgacagagatgctgaagggtcaaggaggaggtcaagttggcctgaatggacctctccagctctggcttcctgctgagtccctcacgtttcttcc

SEQ ID NO: 513576 - DNA, 75 bp, Homo sapiens
agcaactaaggaacaaaagtaatgaagatttacacaaactttgataaacctctacttgaaaatggagaaaaaacc

SEQ ID NO: 513577 - DNA, 100 bp, Homo sapiens
cgccgccgacatgacggacaacatcccgctgcagccggtgcgccagaagaagcggatggacagcaggccccgcgccggagacggggtttcaccttgttag

SEQ ID NO: 513578 - DNA, 100 bp, Homo sapiens
gctctattatttcaaagatgaagatgaaaccaagcccttggaaagtatgcctcagactcctcccttttcagcaatgtttgacagcagtggttacaatcga

SEQ ID NO: 513579 - DNA, 90 bp, Homo sapiens
tcggactccgcggccggcccggcgcggcccagcgccctcagggacccaaccagagcctggcctgggagccaggatggccatccacaaagc

SEQ ID NO: 513580 - DNA, 75 bp, Homo sapiens
attgtcagtctaacagaatcctgtcggagttgtagccatgccctaggtggatttgccgctgcagtcaccacccct

SEQ ID NO: 513581 - DNA, 83 bp, Homo sapiens
cagaaagcaggcgaacccgcggcgcaataacggtacgacctgcaggctctgggcctggacttcctggagctgctgatgcgctt

SEQ ID NO: 513582 - DNA, 82 bp, Homo sapiens
caaaaccaacgcctggctcggagcagcagcctctgaggctgaacagcagacaggggtctcaaactccagtgccctgggccac

SEQ ID NO: 513583 - DNA, 100 bp, Homo sapiens
gcaggagtgtttgacatagacctggaccagccagaggacgcgggctctgaggatgagctggaggaggggacagcaaggccatcgtggacgggaacctgaa

SEQ ID NO: 513584 - DNA, 83 bp, Homo sapiens
taaagaggattgcactgcctccatggaaccttcagcaattgaactcccagattatttgatgcccacccttcctccattctgag

SEQ ID NO: 513585 - DNA, 99 bp, Homo sapiens
caccaccaggaccaagtgtgcaggtccctgtgcgttttattgcgacctgccggtgggaactttgtctccgagtcggagcagcatggagcggcggagcga

SEQ ID NO: 513586 - DNA, 100 bp, Homo sapiens
cccttgaaaaagacagtgacgacaaaacaccagatgatgaccctgagcaaggaaaatctgagggttaaaagagcagaaccttgtgaaagagctgaggccc

SEQ ID NO: 513587 - DNA, 98 bp, Homo sapiens
gcagcaggacactatcctggccgagggccttcacttcagacacagggctgggtgactccgtatgctccagccccagtatctccagcaccaccagcccc

SEQ ID NO: 513588 - DNA, 125 bp, Homo sapiens
ttatggagaccctgaaagacatcgtggagtattacaacgacagtaacgagccctatgagtttgtctctctggaatggctgcaaaagtggttggatgaatcaacacctaccaaacctattgataat

SEQ ID NO: 513589 - DNA, 88 bp, Homo sapiens
gtgttgctgcgagtgggacgcgcactggtcggtgccggctcaggagccgggctgcagaaccttggcctgaaaatgctacattatatca

SEQ ID NO: 513590 - DNA, 75 bp, Homo sapiens
cgcagatgctggagaagtccccttatgaccagggtatgagtattatagaacaattagaccctgtatcttttagca

SEQ ID NO: 513591 - DNA, 100 bp, Homo sapiens
ggaaaatatagtgaagtatttgaggccattaatatcaccaacaatgagagagtggttgtaaaaatcctgaagactgcttttggcttctggatgccctcct

SEQ ID NO: 513592 - DNA, 101 bp, Homo sapiens
gtaatgctgcgggccattagagatttcttctggaaaactggaaacaaggaagtggcagtttttgtctttgataaaaaactgattgacaagtatcaaaaatt

SEQ ID NO: 513593 - DNA, 106 bp, Homo sapiens
ctggcgctttctgatttcagagactctccgcaacagaaccatctcaatgaagtacctggggctgctggcaatgtccaagatcctgaagacccaccccaagtccgtg

SEQ ID NO: 513594 - DNA, 50 bp, Homo sapiens
gaggaaagctgtgaaagttctcaagcataaagatgcctatcaagtgatat

SEQ ID NO: 513595 - DNA, 100 bp, Homo sapiens
agaagtcgaggttagagggaactgggaggcactttgctgtctgcaatcgaagttgagatggccctattgaatttcttcttccctgatgaaaagccatact

SEQ ID NO: 513596 - DNA, 82 bp, Homo sapiens
aaagagctgttaacacttcctagataacggaatttctctgcaaagaatgtccaaaaattcatattcacattgatcgtatcga

SEQ ID NO: 513597 - DNA, 95 bp, Homo sapiens
ggcacgtctgcaagtccacagagaagcagtctgtgaagcagcgatacagctgggacatttttctgatgatcattgctggcatgaagctgttgcgg

SEQ ID NO: 513598 - DNA, 83 bp, Homo sapiens
cgcaacttacgggaggacggggaaaaagcggccaaagaagtgaagctgctgctactcggagcgtgaggatcatccccggagag

SEQ ID NO: 513599 - DNA, 90 bp, Homo sapiens
attgacccgaacttcgtggactcttcaccgtgtggcatttttctgaagttgttcattaagacttcccagcattcctacagatataaatag

SEQ ID NO: 513600 - DNA, 75 bp, Homo sapiens
ctacagtgtgtcccacgggaacctggccatcgcaagcctgctcctggatacggaccgaccgctcgggagctcgcc

SEQ ID NO: 513601 - DNA, 100 bp, Homo sapiens
gcggtgctggtgcagcgggttgtgaaggacatcactaacgccttcaggaggaacccacacatcagcctgagggaactggcatgatagatgaagagttcac

SEQ ID NO: 513602 - DNA, 126 bp, Homo sapiens
agactggaggctgagtgctaaactgtgtggggcgcggatgggatccagctgttagtcgggatgctcacaactgtattcctgagctggacagtgagacagccatgttttctgtctacgatggacatg

SEQ ID NO: 513603 - DNA, 97 bp, Homo sapiens
cacgagggcgcgctcgagacgctcctgaggaccgtgtttcttcgcctcgcctccctggtggtcctgctcttctctctctggaatcagatcacttgtg

SEQ ID NO: 513604 - DNA, 75 bp, Homo sapiens
gcattgacatttaattttagggtcctttatatagaagggagacaacatccatttttcaccctacatgaatccaaa

SEQ ID NO: 513605 - DNA, 90 bp, Homo sapiens
gcgatgctgacgtgcaaaagcaggagcatgcaagttgtccccttggacaaacagatcacaatcatagatagtccgagcttcatcgtatct

SEQ ID NO: 513606 - DNA, 85 bp, Homo sapiens
cccacaatgaggaatctgttcgccaggcaaccaagcgctcttccattcctatcctcctgcagtgtcgggcatcccccctatgatc

SEQ ID NO: 513607 - DNA, 100 bp, Homo sapiens
cggacgcagtgatttgctccccctcgtgcagcaacccccacacccagcaccaggaggggagaagcgggacctggagatagaagtagtcctatttcacccc

SEQ ID NO: 513608 - DNA, 74 bp, Homo sapiens
ccctgagtgtaccaccagagcgggactctgactccgaacctactgatgatagctgtcccagaaaatacttgaca

SEQ ID NO: 513609 - DNA, 83 bp, Homo sapiens
cccctcatcgagctcttcgtcaagaagtgaccggggaggtgcgtcctcatcatgggaaggaggctgtggatccgcggcagggg

SEQ ID NO: 513610 - DNA, 75 bp, Homo sapiens
agccagcctgagttgggagaagagctccagagaagtcactttgtggcatgtatgacagccatcttaaaccagatg

SEQ ID NO: 513611 - DNA, 75 bp, Homo sapiens
cgcgccgtggaccctgacggggacggtcatcatcagatttgaaatatttaaagtggatacaaaactatttcagca

SEQ ID NO: 513612 - DNA, 50 bp, Homo sapiens
ctctaatggtccggacttccgtgtagtccgaaattgaagttcagaggaag

SEQ ID NO: 513613 - DNA, 132 bp, Homo sapiens
ctccaagatgatagaatgattttaaagttatgggactacaacagcagccacaggaaccttgaactctggaagagaacttgtcattacagacccagttatcaagaaccgagagctcttcatttctgattacgt

SEQ ID NO: 513614 - DNA, 100 bp, Homo sapiens
ctgaacgcaagattcgtatcattatggcagagcccctgatctttaatctcatgaagtacgacagctacagccgcttcttaaagtctgacttgtttttaaa

SEQ ID NO: 513615 - DNA, 75 bp, Homo sapiens
gtttgtccaagttactggagccctcctctcctcagttcatggcctcccacgggaacgacgccgcgagagccaggt

SEQ ID NO: 513616 - DNA, 82 bp, Homo sapiens
ctcccactgattctgcattatgacctgcaaatccaagagacacatctttggaagataagagagcttcttcaagaccaaaaaa

SEQ ID NO: 513617 - DNA, 75 bp, Homo sapiens
ccccgagctgctctacgcgctggcgcggatggggcacggggacgagatcgggcctggggcgcccgtgtggtggag

SEQ ID NO: 513618 - DNA, 82 bp, Homo sapiens
cgccatgaacaactcgggcgccgacgagatcggaacccagcgggtgccgcttctccacccgaggcttccacctccaacgagc

SEQ ID NO: 513619 - DNA, 75 bp, Homo sapiens
caggatggctgcgttgacacgtcttatttaatccacatcataggttcatgtggatgttcacagccattacaattc

SEQ ID NO: 513620 - DNA, 74 bp, Homo sapiens
ggagcaggccaaagtgaagaagtgggtgtttcttcccgatcaagatcagagatctcagttaatcctcccacccc

SEQ ID NO: 513621 - DNA, 100 bp, Homo sapiens
aagagccagaggaggagcagctttacactgatgaagtgttagacatcgagatcaatgaacctttagatgaatttacacaccgactagatttccttcagct

SEQ ID NO: 513622 - DNA, 100 bp, Homo sapiens
ttgtgtcctgagatcaaatggcacttcattggccacctacagaaacaaaatgtcaacaaattgatggaggaagaatacaagcgattgagtgaagcactag

SEQ ID NO: 513623 - DNA, 82 bp, Homo sapiens
tttacattatacctgcaaatctggagctcatggtattgactctgaagaagaagctatggagactacaccagccaaaggaaag

SEQ ID NO: 513624 - DNA, 102 bp, Homo sapiens
gtggaggctgaggaggcggcggcggagatctggttaattggccttggtcctcacagctccaaaaagaaacaggatctcgataagctctatgagctgaagtcc

SEQ ID NO: 513625 - DNA, 75 bp, Homo sapiens
tgctgccggaaggggtcccgaagccccctgcaggaactctacaacccaatccagaatgcctaccgcaggaatggg

SEQ ID NO: 513626 - DNA, 82 bp, Homo sapiens
ccatgcccttctgcttcaaacagcttggtttatggcagctccaggacctcgcaccccgagacggacatcttacaccgccagg

SEQ ID NO: 513627 - DNA, 90 bp, Homo sapiens
gttggacaacaaaaaatgaaaacttagattgcaacagtgattcacaggtgtttccctctttgaatatttgataatgggctgcattaaaag

SEQ ID NO: 513628 - DNA, 100 bp, Homo sapiens
ctggattgtcacctttgctgcaaaaaattacggtagccatccctgccattggggctcagtattccatgtttccagcagctccagcccctaaaatgattga

SEQ ID NO: 513629 - DNA, 75 bp, Homo sapiens
ggccttccagctgtttgaccgaacaggccggagtcctgaaagtcgagcgagctccgggttttgaaaatgttggag

SEQ ID NO: 513630 - DNA, 108 bp, Homo sapiens
gatgaggtgatggcaacggccaacttcggcaagatccagatcgggatttacgtggagatcaagcgcagcgatgacagacctcggctgcccgacaactacacgcaggac

SEQ ID NO: 513631 - DNA, 76 bp, Homo sapiens
caagacaacagatgaattgtgaaagagagcagctaaggccaactcagacagtaatgccaggacaagtcatgcgggt

SEQ ID NO: 513632 - DNA, 96 bp, Homo sapiens
cggcagcatggcgtccgtgacgctgagcgaggcggagaaggtgtacatcgtgcatggcgtccaggccgaagatggtgttagtgattgcgagctgct

SEQ ID NO: 513633 - DNA, 138 bp, Homo sapiens
cttcttggatcttggaggtggtgtaaaggaagctcaagtatatcaagcattcaaattgctcacagctgatcctaagggccgttgctccagggagaactgcaaatatcttcatccacccccacatttaaaaacgcagtt

SEQ ID NO: 513634 - DNA, 75 bp, Homo sapiens
gcaaccccagatccatttacactttacactcaaatctaatccaagtgaaaatgaagaaaaggaagcacagtctca

SEQ ID NO: 513635 - DNA, 115 bp, Homo sapiens
ggctgagggagccccgcggatcgtttaggaaagccggccaggtggattctgaagagccagtctttgaggctgtcatcaactgggtgaagcatgccaagaaagagcgggaagaatc

SEQ ID NO: 513636 - DNA, 122 bp, Homo sapiens
ggacagagaagccttttccgttgccggtgccggcctagcgtcctggaattacttcaatcaaaaatatggctacacacacctttctgcaggagagctgcttcgtgatgaaaggaagaacccag

SEQ ID NO: 513637 - DNA, 100 bp, Homo sapiens
atgtgccccatggaacaccccctttctgctgacatcgccatggccacccgtgcagatgaggacggagacacagctgaaaccaccaatgggtgaggtcgtc

SEQ ID NO: 513638 - DNA, 78 bp, Homo sapiens
actacccctttgccaggttcaataagcctcctgacaaggtgatccgggcgggccccgcaggaattttatcccctcacc

SEQ ID NO: 513639 - DNA, 74 bp, Homo sapiens
atgccttcaatactacctttatttccaccataggttatatatgccgcaattttacagggtcttctgctttgctg

SEQ ID NO: 513640 - DNA, 75 bp, Homo sapiens
ctggtgaagaatgattccagcgtggggacagaggctgacatttcttgcctgagcttcagtcattgtctattcctg

SEQ ID NO: 513641 - DNA, 96 bp, Homo sapiens
ggaatatgaagagacatgagatggtggtagccaaacattcagataagccaatggacacgtcagtgttatctgaagaaggaggagagccttttcaga

SEQ ID NO: 513642 - DNA, 75 bp, Homo sapiens
gacaagttctattgcccagctgctgtggagacaggcagcccacaacaaggagacgagttgtactgctgtcacagg

SEQ ID NO: 513643 - DNA, 100 bp, Homo sapiens
acggaaacgccgaggaacccggctgaggcggcagggttggggtctgctaggtccccggaatgagttgtttgacgcagccaaataccgagtgctagctgat

SEQ ID NO: 513644 - DNA, 100 bp, Homo sapiens
attggcactgcctgagagagacgtatgagactctggcctcagacatgcagcacaacattctgaaattttttggttattgtaatgatgttgatcgggagtt

SEQ ID NO: 513645 - DNA, 75 bp, Homo sapiens
ttcaagcttagcttcgttattggctgagcagtcaggtcaattcagtgaagatatgatacccacagtgggcttcaa

SEQ ID NO: 513646 - DNA, 98 bp, Homo sapiens
cgggaactcttccaggagacgctggagtcgctgcgggtcctgggattcagccacgaggaaatcatctgtttctgcataaagaccaactcctcggaagg

SEQ ID NO: 513647 - DNA, 88 bp, Homo sapiens
cccacagcttggaggagggtcactatgtcattgggccaaagatagagattccggtacattatgcagtgcacctggtggacatatggaa

SEQ ID NO: 513648 - DNA, 100 bp, Homo sapiens
cttagccagcactcgctatccacctccaggtcggaagtctatgcgtcagtctacagctgagcatacacgacaaacgttccttcgggtacaggagaggcag

SEQ ID NO: 513649 - DNA, 118 bp, Homo sapiens
ctttgaccgagaggctgctggagctcgtgtttggacgcgtgctaagagatgccgtttgcaggcctcatctctgcttgagaatcgggggctccaggcactagaagagccggctgatcct

SEQ ID NO: 513650 - DNA, 74 bp, Homo sapiens
atcaagtggaagagattttaagtgtggcatacaagaaagcatatcgcacggatgactgccatccctgggttttg

SEQ ID NO: 513651 - DNA, 82 bp, Homo sapiens
gatccccaacggggaggccaacgtgaagaacctgggccgagccagtggcccccagaggatgagaaggaggtgatccgccggg

SEQ ID NO: 513652 - DNA, 125 bp, Homo sapiens
ggcggccctcgtcctggcggcaggagaagatcacccggaccaaggaggaggccctggagctgatcaacgttggtgtaatacggtgcccagtatgccgccaagaatgcagacagatagaccttgtg

SEQ ID NO: 513653 - DNA, 100 bp, Homo sapiens
aaaaaaggaaaccccggagagcgagagcgcgaaggaaatctggccgccgccgccgcgagcgctcccggatcccaagtgatggtggtttcctcggagggcg

SEQ ID NO: 513654 - DNA, 82 bp, Homo sapiens
ggcggaaaaggacgcaaagttctccggcgaggtgacttaagagattaaaattaatttggttgctgttggttctgaacaaata

SEQ ID NO: 513655 - DNA, 83 bp, Homo sapiens
caggagtacgtgctgcatgtctacggtggagtttgtccatatgctcaatgctaccatgtgcgccactacccgtaccatctgcg

SEQ ID NO: 513656 - DNA, 90 bp, Homo sapiens
ccgccctcagttgctgctccgacgcggaccccagtaccaagggcaagaagaggcagagctggaggagttcctgtgccctgtgaaaacacc

SEQ ID NO: 513657 - DNA, 74 bp, Homo sapiens
gcacacagaacaacaaggtgttgatgccgccggacggtggctgtgaaaaacaatatcgatgtcttctacttcag

SEQ ID NO: 513658 - DNA, 76 bp, Homo sapiens
ataaaactgtcacttcaagtacagaaaagggcttgattggtctaacttcaaacttgtggctgttaattcaaaactc

SEQ ID NO: 513659 - DNA, 50 bp, Homo sapiens
ggcgcagggcacggtgggcgcctacctgattatgattccgatgcgatgag

SEQ ID NO: 513660 - DNA, 83 bp, Homo sapiens
tcctgtcgtccgttctctcaggctcccgttcaggcgtccgacctccgatcatgaacgggcccctgcacccgcggcccctggtg

SEQ ID NO: 513661 - DNA, 75 bp, Homo sapiens
gagctctttcagcccaccgtcagcgggatcatccagcacatagcgtgagtgcatctccatccacgttggccaggc

SEQ ID NO: 513662 - DNA, 101 bp, Homo sapiens
atagcaaagaagataaagttgacagcagaggcagaggaataatgtatttgtggccttggacatgaggcagtcagtcctctgttgctgttaacataaggtca

SEQ ID NO: 513663 - DNA, 89 bp, Homo sapiens
gctgcggctcggacgccagcggacacgcgggcgaggtgtggacactgccagcggctgcagccgacttggaatgacctgggagacaaata

SEQ ID NO: 513664 - DNA, 101 bp, Homo sapiens
atgaattccgcgacgatgcgtgcagaaaagagatccagggcttcctcgattgtgccgcgagggctcagccattggaaaagaagtttgttcgagtttcagga

SEQ ID NO: 513665 - DNA, 75 bp, Homo sapiens
ggacccctactattgcaacaagactctttttgatcagaacaatgctgcaaaaaaagaagagtcagaaactgccaa

SEQ ID NO: 513666 - DNA, 82 bp, Homo sapiens
caacggcaaagttttgcagatcttcaacaagaggacccaggagaaattcgccctcaaaagatgttcgacaagcagcaggcga

SEQ ID NO: 513667 - DNA, 75 bp, Homo sapiens
cagcgccgtcccgtccgacagccaggcccgggagaagtgacatttacaaagaggaaatttgggttgatgaagaag

SEQ ID NO: 513668 - DNA, 74 bp, Homo sapiens
agaggcacggccctgggcagatgctctttcagaaactactttgcttcgcactttttcatgggaggagagaaatt

SEQ ID NO: 513669 - DNA, 74 bp, Homo sapiens
ccgggggctcggccgggccgtcccggcctgcgcagcctgagaatgtctgtaaacctgtggaggagacacagcgc

SEQ ID NO: 513670 - DNA, 90 bp, Homo sapiens
atccacagctaagacgccaggacccactggaagcctagaaatgtgagctggaagaatctctacttgtgctgcctttctcttatgtcccag

SEQ ID NO: 513671 - DNA, 100 bp, Homo sapiens
tgtggagcagcccatcgtacctcgtcctgctccgagacccaccgattatctctcctgggggacagcgtctccgtacagatgtgattcagcactgccagcg

SEQ ID NO: 513672 - DNA, 75 bp, Homo sapiens
cacatccatacccttgcaacagcagctctttccagaacatgaattccaaaaggaaagcagaaacctggaaaagaa

SEQ ID NO: 513673 - DNA, 74 bp, Homo sapiens
ccattatccccagcaaaaagctccgcaacaagatagcagggtatttctctgagcgtggtgatgcagtgactaaa

SEQ ID NO: 513674 - DNA, 75 bp, Homo sapiens
aagactacatctctgtaatccagagtatcatattcaaagcactattggaaataattatgaaaaatggaagcacgg

SEQ ID NO: 513675 - DNA, 82 bp, Homo sapiens
tgccaaccctcccaagaagttcagagagggctttaaggaagcagcggagaagtttcgaatggaatctggaatcgaacctagt

SEQ ID NO: 513676 - DNA, 75 bp, Homo sapiens
gtgaacagtacgcagtgaatgttgtgccatgctatgtgtttgatgaagagttgaggaagcatgatctcaatcctc

SEQ ID NO: 513677 - DNA, 98 bp, Homo sapiens
gtctcctgcacgtgcaactgcaaacgctctttgttccagagcatggagatcattcttcgccttcatcgccacgctgctctacattctccatgccttca

SEQ ID NO: 513678 - DNA, 80 bp, Homo sapiens
agtagcttggatccttgtgggcatgatccataatcggtttcaaggttgggggccgtcccgctcctaaggcaggaagatgg

SEQ ID NO: 513679 - DNA, 100 bp, Homo sapiens
gcatgttcttggtgaagtcggccagcctgagcaagcggaggacctacgccggcctgggtgacctcacagtgactcaagctaccacttactgttgattgtg

SEQ ID NO: 513680 - DNA, 100 bp, Homo sapiens
gatgggggcccaagtgccccgggacagtcacgactgaaatgcaactgcagaagcaacatgtgaccttttagagatgcttgtgggactgcataaagtgaag

SEQ ID NO: 513681 - DNA, 96 bp, Homo sapiens
cgcggcgcagccgagccccgagccaggagtcgccgcgcgcgcccgttcgcgctgggccaggtcagagcagcccaccatgggatggggagggggtgg

SEQ ID NO: 513682 - DNA, 109 bp, Homo sapiens
tctgtgtcaaaagagcttctctccagagtagaaagctctagaggacaaaatcccagtccttggcacaaactcaggaaatggaagccggagtctgttttttgtggggctg

SEQ ID NO: 513683 - DNA, 74 bp, Homo sapiens
ctaaaatccagatgtcatattcagattctgtaaagcctggtgcccatctaacagtgaagaaaatttttgttggt

SEQ ID NO: 513684 - DNA, 90 bp, Homo sapiens
ggatattcctcatgacattgctgtctgatgtcatttgtcagagtgaaccgctgtggtccccgagttggtgtaagaaagacaccgaaagta

SEQ ID NO: 513685 - DNA, 100 bp, Homo sapiens
cagcgtgtgcggcggcgccaaccgcctctctgtctaccggctgcagctggcccaggagtcggcccgcaggttcctagcctccagcttggtgtataatatt

SEQ ID NO: 513686 - DNA, 83 bp, Homo sapiens
ttcgcagtggtcgcttcttctccttgatggaattgtcagccacttgaagaagcaggcaggaccagcttcagtgcctctcagga

SEQ ID NO: 513687 - DNA, 83 bp, Homo sapiens
gtgcaccttcgcaagaagcaccagttcaagtggccctcagggcatccccgttttcgagaagaggagctgtgtcatcattccag

SEQ ID NO: 513688 - DNA, 82 bp, Homo sapiens
ctcctgctctgggaccggaggagacatcggcctctgcaggcttgccgaagaagggaggtcgcgtggggcaggcagtggcgct

SEQ ID NO: 513689 - DNA, 97 bp, Homo sapiens
cgggagcagccggaacgatgccggccgtgagcctcccgcccaaggagaatgcgctcttcaagcggatcttgggcacctggacgatgacggattaccg

SEQ ID NO: 513690 - DNA, 75 bp, Homo sapiens
ctaaagcagcgtgcgttcagccctggggtcccgctcccggtcccctcggaggagagcccactcccctgagagacg

SEQ ID NO: 513691 - DNA, 87 bp, Homo sapiens
ggtctattatatcatttaaaccacatggctatctaaagaggtcctcttcctgatggatgggaacaagccatgactcaggatggagaa

SEQ ID NO: 513692 - DNA, 83 bp, Homo sapiens
cgttcatcgtgtctgccatccccatctgtgtcatggagaaactccagctgggcccagagattctgcagcgggaaaatccaagg

SEQ ID NO: 513693 - DNA, 74 bp, Homo sapiens
agctcattaagagcttggaggcggcccgcgggtatggcatttcaaatatagatacaaccattgaaggaacgtca

SEQ ID NO: 513694 - DNA, 100 bp, Homo sapiens
actcctctccaccagcgccaagaggtcaccctgctgattgccttcatctgtgtgcggagctccctgtggaccaactacagcgcctacagctactttgaag

SEQ ID NO: 513695 - DNA, 90 bp, Homo sapiens
tgtggacagtgacagcgatgctgaggatcgaggaacgttgtctggtgacttaagagattaaaattaatttggttgctgttggttctgaac

SEQ ID NO: 513696 - DNA, 75 bp, Homo sapiens
gatgaactgatgaagacaaggccttccagtttggaacatgcttttcacttccactgcatctctcgctggctcaaa

SEQ ID NO: 513697 - DNA, 102 bp, Homo sapiens
tgaaattggaaatggtcttgtcacctttcaacttcgaggactggaattccgaggactacaggaatatgtggaagctgtctcttttcaacacttcatcaaaac

SEQ ID NO: 513698 - DNA, 50 bp, Homo sapiens
gacgcggagaaaaaagttctcggcttcctcagcaccttcaagcccccagc

SEQ ID NO: 513699 - DNA, 80 bp, Homo sapiens
accccgtcccgaccctggccgccccgagcggagcctggagctgaggaggatgaggacaaggaagatgatttccgagctcc

SEQ ID NO: 513700 - DNA, 100 bp, Homo sapiens
caaagatgagatttacctgtgagatgtttcatcccaacatgaaaatgcctcgtgtaaaagcagctcaagctggaagacagagctctgcaaagagacatct

SEQ ID NO: 513701 - DNA, 100 bp, Homo sapiens
catccactattttggcagcagctagagaactctttggacaggcctgtataggatctctggctgtgaccgcacagtaaaagagctgaaagagaaattcctc

SEQ ID NO: 513702 - DNA, 124 bp, Homo sapiens
gagctggagatgccaacgccgcgcggttgtaactcggccctagttacctggccagggtacgcgacaattggcggaggtgctggagaatctggtaaaagcaccattgtgaagcagatgaggatcc

SEQ ID NO: 513703 - DNA, 82 bp, Homo sapiens
gaccctgtggtggcttattactgaatatatgcagaacatgtcctgcggcccaagaatcttggacttgcacatcagaggcaac

SEQ ID NO: 513704 - DNA, 98 bp, Homo sapiens
ggaaattcgttgatgttctggtggattatggatcagatccaaatcagtagttgatgtcacttggcgatattcctgcaaacatgaagaggtgattgcca

SEQ ID NO: 513705 - DNA, 100 bp, Homo sapiens
cttttatattcatctcaaaaacaaaattctgaactcaggacttggcaaattgttaaaggaaatgggctggcaggaagacagtgaaaatgatgaaacatgt

SEQ ID NO: 513706 - DNA, 75 bp, Homo sapiens
aaaccgcgaagtcatggggctctgtcgggaagggaactgtccaggtttattgctgccgggagactacactgcaaa

SEQ ID NO: 513707 - DNA, 75 bp, Homo sapiens
gcggcggcggggggcagccgctcgcccggacccctcaggaaaacctgattggcgccctcttggcgatcttcgggc

SEQ ID NO: 513708 - DNA, 100 bp, Homo sapiens
ccgagaggccgtgcgggacgcgggcgccaggaccggccgaacgcagaggccggtctaattgaagccaacggagaactcaaggtcttcatagaccagaacc

SEQ ID NO: 513709 - DNA, 100 bp, Homo sapiens
caagttcagcccaagaaaaaggagggaaaaatatccagcaaaaccgctgctaaattgtcaactagtgctaaaagtgatcatgaagaacctcgaccacccg

SEQ ID NO: 513710 - DNA, 75 bp, Homo sapiens
ggtgattgaggacaagaccatcgagctcatgatgatatcatcaagttgaatcgaaaggaagggaagaagcagaat

SEQ ID NO: 513711 - DNA, 100 bp, Homo sapiens
tgacatttaattttagggtcctttatatagaagggagagtagtgcctttcttcctgacgtggagtgtggtgaactcagtgcattgggccaatggttcgac

SEQ ID NO: 513712 - DNA, 75 bp, Homo sapiens
gccatggcgtacgcctatctcttcaagtacatcataatcggcgacacagcaatcatttggggaagaatctacagt

SEQ ID NO: 513713 - DNA, 50 bp, Homo sapiens
atgtagtccaacccacatcagcagcctgaacacttgcctttgcagactca

SEQ ID NO: 513714 - DNA, 100 bp, Homo sapiens
caaagctttgcgcaacgccaacctcaggcgagatggtgtgatgaatgcagactctgctaccattttggctgtttggatcctcctttgaaaaagtctccta

SEQ ID NO: 513715 - DNA, 100 bp, Homo sapiens
caggtcctcaactttgaagagatcgactacaaggagatcgaggtggaagagacttgtcagcttgtgggaaagtgacatcagcgtccacccgctaaccctg

SEQ ID NO: 513716 - DNA, 101 bp, Homo sapiens
ctactaaccagagccggctctttctcgcattccaaaatatgcccggtgctatccgcccagctgctcctagaccaccatttagtactatgagaccagcttct

SEQ ID NO: 513717 - DNA, 73 bp, Homo sapiens
tggaaagatgacggatgaaaagaatgaacactgtccttcaaaacgaggttaaagcacgaattgggagctctca

SEQ ID NO: 513718 - DNA, 100 bp, Homo sapiens
cgcccgctgagcttggcgcacgggccgaccaggtctcggcgcggaagatggccggcggcgtggacggccccatcgggatcccgttccccgaccacagcag

SEQ ID NO: 513719 - DNA, 90 bp, Homo sapiens
gtgaagcatctgatgcacgttccatccggcgctcagctgggcttgagggtacagctcgcagaaagaagaaggtggtacatagaacagcca

SEQ ID NO: 513720 - DNA, 83 bp, Homo sapiens
agaagatctgggtgcccgtggaccacaggccctcgttgcccagattgtggacgaatgtggaacctcgctctgtggctgtgttc

SEQ ID NO: 513721 - DNA, 50 bp, Homo sapiens
ctcctgagtagctggaattacagatcattaaaatccgtgcccagacggaa

SEQ ID NO: 513722 - DNA, 96 bp, Homo sapiens
caagcccccgtgaagatggtgtcctggatgatctccagagccgtggtaaacctgatgtgagactctctcgaggcagtattgacagggaggatggaa

SEQ ID NO: 513723 - DNA, 75 bp, Homo sapiens
ggctgccgagggagactttaggacaagaggcgttgtttttgcatcaagcatgatggaaccatgtgtgatacctgc

SEQ ID NO: 513724 - DNA, 82 bp, Homo sapiens
gccgtgccaggcagggccggttcgtgcggaaccgccatggccgagccggcttcgatcgaacggttggaagtaagcagccttg

SEQ ID NO: 513725 - DNA, 75 bp, Homo sapiens
tttcctttgaacctaataataagcaggcttcaacggaccacaccaaaatgccatctcaaatggaacacgccatgg

SEQ ID NO: 513726 - DNA, 82 bp, Homo sapiens
ctgtccactatgtcctggtgccttttcatgacccagatatacaaccacttcctgttgtgtcacacttgcctgcagtaacatg

SEQ ID NO: 513727 - DNA, 100 bp, Homo sapiens
ctgagccagaagggcacccggtgcagccacccccgcatcacgcagccctggaggctgcccgaatttgtgccaataagtacatggtaaaaagttgtggcaa

SEQ ID NO: 513728 - DNA, 100 bp, Homo sapiens
gccggggcggtgctgaactttaagctaaatggtggagtcaatgaagaaagtagcagggatggatgtggagctgacagttgaagaaagaaacctcctatct

SEQ ID NO: 513729 - DNA, 100 bp, Homo sapiens
aattagatcccaaagattcttgaggccagtgctgctgaggaagcagatgtgcacgtagctgtggtggtgagaccaggcaacgcaggattaacagatgatg

SEQ ID NO: 513730 - DNA, 83 bp, Homo sapiens
caggtagaggatgaacaactcatcatcccgggtagaggcagacatggaaggtctttaatgtaactttaaatggttcaccaaag

SEQ ID NO: 513731 - DNA, 83 bp, Homo sapiens
gccttatggagccagcatattccagttggaatcgaagcctcttaaaatggcagatgacttggacttcgagacaggagatgcag

SEQ ID NO: 513732 - DNA, 98 bp, Homo sapiens
ggactctggaacctgcttggacccagtctcttcgccctggggatcttggccacagcctgggatggtgattgctcacaccaaagccttggacccctccc

SEQ ID NO: 513733 - DNA, 100 bp, Homo sapiens
cgggactagtggaccagctggtgaaggcagacagcgagtggcgacgataaaaagcttgtggtgaaggggggcaaaaaaaagaagcaagttctgaagttca

SEQ ID NO: 513734 - DNA, 90 bp, Homo sapiens
cagattcgcagtggtcgcttcttctccttggtttgtcaagggctatttaatgagttactagaaaatgggatttctgtgtggcctggttat

SEQ ID NO: 513735 - DNA, 96 bp, Homo sapiens
gcccagcagaatttgtatagagatgtgatgttggagaactacagaaacctggtctccctagacaaatgctgtgcttcatgaagttaaaagagaggg

SEQ ID NO: 513736 - DNA, 82 bp, Homo sapiens
gggaaccctggtcaccgtctcctcaggtgcaccccctgtggatgtgctccgggccctgaggttcccctccctccctgatggt

SEQ ID NO: 513737 - DNA, 74 bp, Homo sapiens
ctgagcttgtggcagaagggagcagcctcccgcgacgatgcccctcaacgttagcttcaccaacaggaactatg

SEQ ID NO: 513738 - DNA, 83 bp, Homo sapiens
tgcctggagcaccactgcagccagaaagcgaggggaacgcccttttgcttgtgactggcagggctgcgacaagaagttcgccc

SEQ ID NO: 513739 - DNA, 75 bp, Homo sapiens
ctgactccgagggttgggagagcgcgttggtggcgacggccgagtcagacacgttggtcgtcattgcctccgagc

SEQ ID NO: 513740 - DNA, 90 bp, Homo sapiens
gaacgctctcatccggaggcaggaccagctgcagctgctggcctcgattgggtggctctggctgccaggaagattccagccccattccgg

SEQ ID NO: 513741 - DNA, 50 bp, Homo sapiens
atgtgaaaatgaagccagaccgagctctattatcaagtcctaaattttgg

SEQ ID NO: 513742 - DNA, 76 bp, Homo sapiens
accaagtggcgaaggagccggctccaaggaagaaaacaggcagattttggcgcggcaaaagtcaaactcacagtcg

SEQ ID NO: 513743 - DNA, 75 bp, Homo sapiens
cgtggttggagagctcatctggaattttgccgatttcatgactaaccagttgaacagagtatctgccaagcccgg

SEQ ID NO: 513744 - DNA, 100 bp, Homo sapiens
ccgggatctcaggtcctcgggggcggcggccacgccaaggacgggtgtgagcgccactttgaagggcatccaacccgcggctatccatgtggaatcgctt

SEQ ID NO: 513745 - DNA, 74 bp, Homo sapiens
gggtgtacttgttggggtcagggcgttcccacagctgtgcagaacttagcgccacgcgctgctgttgctgctgc

SEQ ID NO: 513746 - DNA, 82 bp, Homo sapiens
ttcggcgacatcgaggaggccgtggtcatcaccgaccgccagacgggaaggatgcctgtggccctcggagagcacagtgtca

SEQ ID NO: 513747 - DNA, 88 bp, Homo sapiens
tgccccagtccaaccccagagcggaaggaacacaacgtcctacatcaagaaaaaagacagaagcatatcttggagatatgaaaagaac

SEQ ID NO: 513748 - DNA, 101 bp, Homo sapiens
tctcaatgggatactcaacttgattccatcaaccagtactatactggcaattgctggagaagattttgcaattgttgcttctgatactcgattgagtgaag

SEQ ID NO: 513749 - DNA, 100 bp, Homo sapiens
cgcagcgaaatcgagcctggccttgagggtccacaccgcgagggaagatgcgtgcgcccattacggaatcagtccccaatgcctggaaattcctcattgg

SEQ ID NO: 513750 - DNA, 75 bp, Homo sapiens
tgccgctgtcgtctttgcttcagccgcagtcgccactggctgcctgagaacccagcgggtgccgcttctccaccc

SEQ ID NO: 513751 - DNA, 90 bp, Homo sapiens
ggacttcgagctgattcagcgcatcggcagcggcacctacggcgacgtctacaaggtatctcattcagttgctaaacttatattagttaa

SEQ ID NO: 513752 - DNA, 100 bp, Homo sapiens
agggtgcctgggaatcggtcgcctggaggaccagtatttcccatggaggatcactgagacccagaggctgggcctggctatggccctagaacctaacacc

SEQ ID NO: 513753 - DNA, 75 bp, Homo sapiens
cgagagctcgccccgaacgggggtcttcctcctccgccgttgacaggctacccacctttctgttctgagacccct

SEQ ID NO: 513754 - DNA, 75 bp, Homo sapiens
caaggaaaaactggagagcttcatcaaaaatagtgatagctttgataactccagtgatccacaagctcagaaata

SEQ ID NO: 513755 - DNA, 97 bp, Homo sapiens
ctggcccagtacctttggtttcacagaagatctctgccaggcaaggccatcttagaggctcttgattgcggggactaactcctccgaccttcagcag

SEQ ID NO: 513756 - DNA, 51 bp, Homo sapiens
gctggagagggggcgctgagctgttggggaaaacaatgaagagtcgttata

SEQ ID NO: 513757 - DNA, 101 bp, Homo sapiens
ttcttacatgaaaaatcaaaatggtacatttaagcaattctgtggtgttcttggtcacacatttatggagtttctgaagggcagtggagattactgccagg

SEQ ID NO: 513758 - DNA, 50 bp, Homo sapiens
cttgtcgctgtggagctgttgaagttaagggaagaaagtcggaggctggc

SEQ ID NO: 513759 - DNA, 98 bp, Homo sapiens
gagcagcaggattcgatgagattgagcaagatcttactcagagatttgaaggttcgagaaatggctgctactaccttaagcggtctgctacagtgtaa

SEQ ID NO: 513760 - DNA, 75 bp, Homo sapiens
aacaagacatggaaggaaatgagggcaacttctgaagacttcaacaaggtaaagccaacaagaacgtgcagtggg

SEQ ID NO: 513761 - DNA, 75 bp, Homo sapiens
ttcatgatgaaatttctgtaaatggagttgtttaaaggctttgcccgccacctctcacacttgctgactcagaag

SEQ ID NO: 513762 - DNA, 74 bp, Homo sapiens
cagggtgcgggagagccccttgcagaagacgccgtacgagtttgccagggtttggatacctgatccagaggaag

SEQ ID NO: 513763 - DNA, 97 bp, Homo sapiens
gcattcctattacagaccgaagaagtacttttcaggcacacttggctccagtggtttgtcccaaacagtttttccagaaaggaggagtcaaggaagc

SEQ ID NO: 513764 - DNA, 98 bp, Homo sapiens
gataaatcagacagaacagttaatcctcaatttaagcctgatctaacccctagaaacagggttttttatcagcaattggacaccctttccccaaaatg

SEQ ID NO: 513765 - DNA, 75 bp, Homo sapiens
ctacaaatacagccgggtggctgactacattgtgaaggccttcatggtgaaacacctcttggagtatacccaggc

SEQ ID NO: 513766 - DNA, 98 bp, Homo sapiens
tctctgggatctttcagtagaactgcaaaactttcagccccccaaacggcctttcaaacggatgaactattcagatgctatcgtttggctaaaagaac

SEQ ID NO: 513767 - DNA, 100 bp, Homo sapiens
tatagatgcagaagagaaaagtcaggaagaaacagatgatggtgttgaagaagcacttttccagccattaactccaggctctcgagaatttgaagatgtt

SEQ ID NO: 513768 - DNA, 83 bp, Homo sapiens
atgccgaagaggatcccttgtggacatcggtagtggggacggacgcattgtgtctgctttttcaacgtgggagaaggagttgc

SEQ ID NO: 513769 - DNA, 80 bp, Homo sapiens
agaagtcactctttgggaagatcaaatcatttacctccaagtaattaatggtcacacactgtgtttacggctgttgctag

SEQ ID NO: 513770 - DNA, 78 bp, Homo sapiens
gaccgagaccgcggccgggaccgaggccatcgactacagtgacagcgccatgctccaagctcagcagctgctcctggg

SEQ ID NO: 513771 - DNA, 100 bp, Homo sapiens
cttcccctagtacaaatggtgcttctccagtgatggataaaccaccagattccaacatgccatgggaggagtacctgcctgggcagagactactaagcgg

SEQ ID NO: 513772 - DNA, 51 bp, Homo sapiens
cactcggccttcttcggggaccagggtgagaactctgtctcagtcgacggg

SEQ ID NO: 513773 - DNA, 100 bp, Homo sapiens
attcgccacttcttctctggattgaccattcctgatgggggcgtgcatattgtagggggtgaactgggtacttacactgtgaaattttatgatggagtag

SEQ ID NO: 513774 - DNA, 100 bp, Homo sapiens
gagttcgactggcgaactggaaggccacgcctcctcccgcctgccccctcagccctgtggctgggggcagagctcagaaatggtggagtcaatgaagaaa

SEQ ID NO: 513775 - DNA, 100 bp, Homo sapiens
cagtctggcaaaagcctctgctctgcctccggggacaagaaactagagcaaataaccgttttgaaatttattaattttaaagacccacagtttgctgaag

SEQ ID NO: 513776 - DNA, 100 bp, Homo sapiens
cctttcgtgctggcgccgcgacctccggatgacccgggcttcggcccccaccagagactcggggtcaggcccagccccaggcccagtggtattactgaat

SEQ ID NO: 513777 - DNA, 100 bp, Homo sapiens
cggagtggggaagacctgcgtcctttttcgtttttcggatgatgccttcaatactacctttatttccaccataggccaggagtggtggctcacacctgta

SEQ ID NO: 513778 - DNA, 100 bp, Homo sapiens
gactcagccatttactaactgtgtgaccttagcctatcaagactcttccacctgctacttctaccgagccatctgtaatcttatcaaaaagtgattctga

SEQ ID NO: 513779 - DNA, 75 bp, Homo sapiens
caggcagagcctgaggaagctgaagcagaggtttcccaggctatgacttctgccaggtcctgcagtggtttgccg

SEQ ID NO: 513780 - DNA, 98 bp, Homo sapiens
gcacagtgacctctgcatctaaaatgtggacacagacttgccaggcagcctggggcagagtgaagagaagcccgtgcctgctgcgcctgtgcccagcc

SEQ ID NO: 513781 - DNA, 100 bp, Homo sapiens
cgcagaacctccacagtcaagaggacgatgaggacggggacttggttgccttttccagtgacgaggaattgacaatggccatgtcctacgtgaaggatga

SEQ ID NO: 513782 - DNA, 90 bp, Homo sapiens
gcttgctgcaggctctggggagtcgccatgaatgtggcagatcagattgcatttcaagctgctggtggattaacagcccttgaacacatc

SEQ ID NO: 513783 - DNA, 75 bp, Homo sapiens
atcattccaaactttcagatctctcaagattcagtagggaacagagctgaatcaatttatgaagaaatgaaacag

SEQ ID NO: 513784 - DNA, 75 bp, Homo sapiens
cctgtgcgggatggaacaaaagcggaaaaactcggatgaatgcgaggtgtgctgtcaagggggacaacttctctg

SEQ ID NO: 513785 - DNA, 50 bp, Homo sapiens
tgatcctcctgcctcagcctcacagggacatggatgaagctggaaaccat

SEQ ID NO: 513786 - DNA, 90 bp, Homo sapiens
agactcctggagatcgacccgtacttgaagccctacgccgtggacttccagcgcagttgtcactcagcccagtccatcagtttctcagcc

SEQ ID NO: 513787 - DNA, 100 bp, Homo sapiens
agttccccagttctggcagattctggaaactgtacattgaagcagagggtttgtgtttagtgaatcagagggatctgcattagaacagtttgaaggtggc

SEQ ID NO: 513788 - DNA, 51 bp, Homo sapiens
gcgatctgctggcctcggcctctcaaggatgactgctcaggctgtagagga

SEQ ID NO: 513789 - DNA, 82 bp, Homo sapiens
tttggattgaagccgcctctgtattacttaccagaccatggtgaatccgggcagcagctcgcagccgcccccggtgacggcc

SEQ ID NO: 513790 - DNA, 82 bp, Homo sapiens
gcctcccggctctcgtcagcctcccgccggccgtctccttaacaccgaacaccctgcagatctgggacacggccggccagga

SEQ ID NO: 513791 - DNA, 95 bp, Homo sapiens
agggcagccagctggccaggggggcccgtctgggccagccacctggtgtccgcttcaacattgctttatggcatgtgtggtcgtttttcactcca

SEQ ID NO: 513792 - DNA, 100 bp, Homo sapiens
cctaagccttctctaattcctcaggaggttaagatttgcattgaaggccggtctaatgtaggacgccaacaaggagagcagcaagacctccaagccacac

SEQ ID NO: 513793 - DNA, 82 bp, Homo sapiens
ttaaagatgcagtacgccacggggccgctgctcaagttccagatttggtaacacgtacacagacctctcggccggaatctcc

SEQ ID NO: 513794 - DNA, 75 bp, Homo sapiens
ctgcgtcaccgccgcccccccagacaagatggacaccgcggaggaagtaagagatgctaaaaaccttgtacctat

SEQ ID NO: 513795 - DNA, 82 bp, Homo sapiens
gggacaggccacgctgtccgtccgcagtaccgacgcctgcaggacgtggcccagtggaacatcgggagcctccggaccatcc

SEQ ID NO: 513796 - DNA, 76 bp, Homo sapiens
cacctgtgctgccgtgggggagatctctgtgaacaccagacgcccctgcacctggcggtgatcacggggcagacga

SEQ ID NO: 513797 - DNA, 98 bp, Homo sapiens
cgagcgcagcaaagcgcccagcctgccgcctcgctgtccctgcggcttctgggggctaacatttccaatgatcactggccatctttggttcaagaggc

SEQ ID NO: 513798 - DNA, 100 bp, Homo sapiens
aaatagagttcacgatcctgtaactgccaaacccaagttggttggagatgtggattttgaagctgtggatttctttaaccagatcaacatgttatatgga

SEQ ID NO: 513799 - DNA, 99 bp, Homo sapiens
ctgggtgttttgctaccgtgaccgtttaggtccattcaactgcaattgaatattggagttgagcagattcgagttgtacatagagatggaagagtaatt

SEQ ID NO: 513800 - DNA, 75 bp, Homo sapiens
gacagcgaggggaacacagccctaatcacagctgcacaggcaggtgctctgtggatgtgtatagttttaaacccc

SEQ ID NO: 513801 - DNA, 100 bp, Homo sapiens
cgggcaacgacacaagaaacacaacttcagacttgcagaaaaccagtgaagggaaaattgccatctttttgagccttgtctattgaggaaccaagaacac

SEQ ID NO: 513802 - DNA, 100 bp, Homo sapiens
ccagtgggcccgacagcgcaacaggtgtcatggagaaactccagctgggcccagagattctgcagcgggaaaatccaaggcttatttatgccaggctgag

SEQ ID NO: 513803 - DNA, 80 bp, Homo sapiens
cttctagaaaagaaaggctcacggaaaatgtaagggctcaccagcatttcagcttcaggatggttgtgagtacgtgttta

SEQ ID NO: 513804 - DNA, 100 bp, Homo sapiens
gcggaggcagaggtggaggcgctttgaaaggttcgctttgtgaacagcacatggatatttgggaagggcatgtgccatgtcagccgctttgcccagtact

SEQ ID NO: 513805 - DNA, 51 bp, Homo sapiens
ggagctccggcagccgccctgctattgacctgaaaagtggttctggaaaag

SEQ ID NO: 513806 - DNA, 83 bp, Homo sapiens
gggatccagagcgccgcgcacttcgtcatgttcttcgcgccctgagaagatggcgaattagaagatggtgaaatagacgatgc

SEQ ID NO: 513807 - DNA, 130 bp, Homo sapiens
caagcccccaaggcccttcggcgggcccctgctgaaagaccggcatgccctattctgtgggcttccgcgaagtcaaaatgcagatcttcgtgaaaacccttaccggcaagaccatcacccttgaggtgga

SEQ ID NO: 513808 - DNA, 80 bp, Homo sapiens
ccgaggactcttggagtttgagcatcagagggcccctagggtctcgtacaaatctattgtcaagtacaagacagctttct

SEQ ID NO: 513809 - DNA, 75 bp, Homo sapiens
agcgtttcctcgcttgcattcagctcctctgtgtttgccgcctgggtttgcctgcaatgagatttcattctctac

SEQ ID NO: 513810 - DNA, 50 bp, Homo sapiens
cactcccggctgttcccccggaggtggtgtttgcattgctcagtcacaga

SEQ ID NO: 513811 - DNA, 83 bp, Homo sapiens
aggagcctgatccgtgccgcccgccgcccggatgggaccaccagagtgctggtgacttcagagaagataattttaatactgca

SEQ ID NO: 513812 - DNA, 100 bp, Homo sapiens
cccccagggctgcacctacctctgcaccaccttctaagtcacgtcaccatgaggtgtcttttatgaataatcaaaagcagcaaaagccaacgctatcagg

SEQ ID NO: 513813 - DNA, 101 bp, Homo sapiens
acttctctggattgggagcctttgggggattagggatcatgctgtctctgtgtgctcaggatttgacacaggacatcagcacagtatatcagatttttcct

SEQ ID NO: 513814 - DNA, 100 bp, Homo sapiens
accttattgaaacattaaatgacagttcacataagaagttcttcgatgtatctaaacttggcaccaagtatgatcaatgaactgagccatgttcaaatcc

SEQ ID NO: 513815 - DNA, 94 bp, Homo sapiens
gaacgaggcaaggagctaaagcagcgtgcgttcagccctgggatctggtggctggacccagagctgacctatggctgcgccaagcccttcgtct

SEQ ID NO: 513816 - DNA, 83 bp, Homo sapiens
cgacagagccaaaatcagagctggaacctgaggagagaggctttatcctgtggataaacgcagagtgaacgagtttggggagt

SEQ ID NO: 513817 - DNA, 82 bp, Homo sapiens
ctcaccatacaggaacagggcagacgttagcgtgagtgatcactctcaatcccggattttcgacaatgaagccaaagacgtg

SEQ ID NO: 513818 - DNA, 90 bp, Homo sapiens
ggacctcagaaaggagctctatgaactttgggaaatacactgaagagatggtgccttggcacccttgcctggaactcgttagcaactgcg

SEQ ID NO: 513819 - DNA, 100 bp, Homo sapiens
ggctgagccaccgggtgagctcaccgcccagcccaaaccaggagattgcgagggagcgatgcggtgcagcgcgatgtgaagttcatttccaatccgccct

SEQ ID NO: 513820 - DNA, 98 bp, Homo sapiens
tgtctgcctcggctgtgaagtggggaggctggcaacagttttcttcagcgcccaggatgcagccggctaaggcccgcgatgctcccagcccggtgaga

SEQ ID NO: 513821 - DNA, 85 bp, Homo sapiens
caaatgcagaagtaagaggatttatagatcagaatctcagtccaacaaaagtcaatttgctaatgaagacactgaaagtcagaaa

SEQ ID NO: 513822 - DNA, 97 bp, Homo sapiens
ggagaatgggcccattttcttggataccaaggacctactctatactctcagtggcttagatcttcttcagcagtatcgttctgctgtgtgcaaacta

SEQ ID NO: 513823 - DNA, 97 bp, Homo sapiens
ctgggcagaatcaaggcgcaggcgttcggctttgaccagacctttcagtcctatcggaaggatgatttcgttatggagttagccctgcgtagccagt

SEQ ID NO: 513824 - DNA, 82 bp, Homo sapiens
cccaataaccaggtgcttggcaaaatcgagcgggccattgggaaccctactctggaaactgtcagtcccagggcactgggga

SEQ ID NO: 513825 - DNA, 75 bp, Homo sapiens
gaagatttctggccagtggagagaggaattcctcaagacaccattccagttttaacttctagtcatggcgaatga

SEQ ID NO: 513826 - DNA, 82 bp, Homo sapiens
ttcgggacagctctctagaaactcgctctaaagacggaaccgccacagcactcaaagctcaggccccggggcctccagcggc

SEQ ID NO: 513827 - DNA, 98 bp, Homo sapiens
cagccgaggcctgtggttctgcagggcatgcaggtgcgccgggtgcccctggagatcccggaggcaagatggcccccaaccccctcctggacaccatg

SEQ ID NO: 513828 - DNA, 100 bp, Homo sapiens
cgcaggaggcggacggggcccgcagcgccgtggtggcggccgggggaggcagctccggtcaggttaccagcacatccgcatgtatgatctcaactccaat

SEQ ID NO: 513829 - DNA, 99 bp, Homo sapiens
agaaggacaaggacagaatcaccagcactggctgaaggcccacccttcctccattctgagcacataaaaaccccacactcagccagactcaacactcat

SEQ ID NO: 513830 - DNA, 74 bp, Homo sapiens
cgtgtataggttgtcaaaattcacaaggcaaggtgactttgaaagttgtggacatcggatacccaaggagacga

SEQ ID NO: 513831 - DNA, 98 bp, Homo sapiens
cgctcgctacccgggtaacgggtcccggctgtggaagctcccgcggcgccgcgatggacctcgaggaggcgatcaccggcgtaatcaacccagcgttg

SEQ ID NO: 513832 - DNA, 75 bp, Homo sapiens
gagacttctactggctgcgctcctttctggccggaggcctctactacgtggacagtgaagggaaccggatttcag

SEQ ID NO: 513833 - DNA, 100 bp, Homo sapiens
ggtgcggggagcggagccatggcctccggatcccaagtgatggtggtttcctcggagggcgagctgagtcctgcgcgactggttagcacggtggagctgg

SEQ ID NO: 513834 - DNA, 100 bp, Homo sapiens
ggagtgcgtggaggagctgtgcagccgcgaggaggcgcgggaggtgttcgagaacgaccccgagacgagtaattccctcctggtcccagacagtctaaga

SEQ ID NO: 513835 - DNA, 80 bp, Homo sapiens
tattgcgcgtggaacggctgcttttggaagaaatgcactcggtgatggaaagagagccactattctgaagaacacttggc

SEQ ID NO: 513836 - DNA, 100 bp, Homo sapiens
aactacaggaacatggtcttgctggaaagaaatgaccgcccggatgtgccactgagagccccgcgggtctcccggtgcccgaaccgccgctggggcctcg

SEQ ID NO: 513837 - DNA, 73 bp, Homo sapiens
agaaggagtcgaccctgcacctggtcctgcgtctgagaggtggagccgccaccaaaatgcagattttcgtgaa

SEQ ID NO: 513838 - DNA, 75 bp, Homo sapiens
cacacacaagatctaccacctgcagagtgcaccaattccagctggacatcactgtgaaaatgggacgggataaag

SEQ ID NO: 513839 - DNA, 75 bp, Homo sapiens
cggggacccggcccgggaccggcggcgcgcggcggccgaggccaggtgatctgtgaaaatggttcgctattcact

SEQ ID NO: 513840 - DNA, 100 bp, Homo sapiens
ttcgctctgagaggcccctcttctcctccaacccagaactggacaatctggtgtggggatattcagctttgccaggtatggcagtgatttttatagcatg

SEQ ID NO: 513841 - DNA, 96 bp, Homo sapiens
gcccctgcgactcgcgggtgtgacgttgaagatgtcggccttctgagccgactgcggtggtcaagagagacacctatggctgccgatgaaggctca

SEQ ID NO: 513842 - DNA, 100 bp, Homo sapiens
gatacttgcaaggaccaaatgtcaatttagaagagatatcaaagacacgacggtgggcactctgtcccagcggatcacaaaccaggtccatggtttgaag

SEQ ID NO: 513843 - DNA, 73 bp, Homo sapiens
gctagaagaatcagacgtgctccaggaggccagaaggaaatacgttggctggttccctgccaactacgtggag

SEQ ID NO: 513844 - DNA, 82 bp, Homo sapiens
ctgctccaggaaattcagcctcaaaaccgtcctgctgcttgctgaccaaatgttactccacaggatccgctgaacataggat

SEQ ID NO: 513845 - DNA, 50 bp, Homo sapiens
ctcagttggaagagtccagcaagacctgtcatttactccatcctttatag

SEQ ID NO: 513846 - DNA, 98 bp, Homo sapiens
tcgtgaccgagaccgtgaccgagagcgtgaccgagagcgcgaatatcgtcatcgttagaagaacccttaggagaaatcttgagagtggacagcaattg

SEQ ID NO: 513847 - DNA, 83 bp, Homo sapiens
tgagggagcaagaggtgtcggaggtctcatctttgaactactgccggagcttctgccagatgttgaaagtgtgatgaacagtg

SEQ ID NO: 513848 - DNA, 100 bp, Homo sapiens
gcgcgcgcgcgaggagttccgccccaccatctacagcaacgtgatcaaaggcattctggaatttatcagtatagcagtgggcctggtcagcattcgaggc

SEQ ID NO: 513849 - DNA, 122 bp, Homo sapiens
gtatgtgaccgaaccgatccaggcctacatcatcccatcgggagatgctcatcaggaaacctgtccagtttaagtcgtcttggtctgagatataacagactgtcagcaatacccagatcatt

SEQ ID NO: 513850 - DNA, 89 bp, Homo sapiens
cccacactcagccactgcgggcgaggagggcacaaggccaggttcccaagagctcagacccagacacttttgaaccccaaaaattcttc

SEQ ID NO: 513851 - DNA, 100 bp, Homo sapiens
gcaagagcagaggccttctctagaccttgccaagatggcacaggttcttgggtgtctctggggagtccctgggccagaccttcctccagactccagccca

SEQ ID NO: 513852 - DNA, 75 bp, Homo sapiens
gctcctcctggctgcagagtaccccaccagcgcctccagaacctgggtatcaacccagcaaacattggcttcagt

SEQ ID NO: 513853 - DNA, 74 bp, Homo sapiens
gtcacggctgcggatgctgctcaaggccaagatggacgccgagcaggatcccatacagatggggttttgccatg

SEQ ID NO: 513854 - DNA, 88 bp, Homo sapiens
accgagcgaacatatctgaaggatctcgaagttatcacttcggaaacctatgagaatatcccaggccagtcaaagatcacattcctct

SEQ ID NO: 513855 - DNA, 100 bp, Homo sapiens
cagtacatcagccttcggctcacggtcctgtgggggttaggagtgctgattcggtactgctttctgctgccgctcagagagaagaagaaggaggttcctg

SEQ ID NO: 513856 - DNA, 100 bp, Homo sapiens
agccatagtcacagtgagaaggcgacaggaaccagctcgggggccaactctgaggagtccactgcagcaggtgtcatggagaaactccagctgggcccag

SEQ ID NO: 513857 - DNA, 101 bp, Homo sapiens
agcgtgtcctgcggaaaacagagaggttccagaaatggctgcaggccaagcgcctcacgccggacctggtgcaggtattgtcttctaagaactctgaagca

SEQ ID NO: 513858 - DNA, 90 bp, Homo sapiens
gcgaggttggtcatgtgctcgggatgcaaagtattgttcctgggtgtgtctgtgagagtattgccaaaggagagcagtgaactgggaaaa

SEQ ID NO: 513859 - DNA, 90 bp, Homo sapiens
caggcagaaggaggcattggccaagaaaaagcttgtggtgaaggggggcaaaaaaaagaagcaagttctgaagttcactcttgattgcac

SEQ ID NO: 513860 - DNA, 74 bp, Homo sapiens
gagaccacagataaagtcaaacaaggcttttgggaagaatttgagaggtcaaccagaatcaagatgtctgggac

SEQ ID NO: 513861 - DNA, 73 bp, Homo sapiens
tggcccgtgctttcactatggactgtattactttggaagttatggctgcagcttcgattgccaatattgtaaa

SEQ ID NO: 513862 - DNA, 102 bp, Homo sapiens
tcatgggcaaaggacagatccaggtgaaatgacaatggatgctctgttggctcgattgaaacttctgaatccagatgaccttagagaagaaatcgtcaaagc

SEQ ID NO: 513863 - DNA, 90 bp, Homo sapiens
gccccagagacaccagcttcagtggcctgtcgttggaagagtacaagctgatcctgtccacagtttgtaactaatcctgatattgctgcc

SEQ ID NO: 513864 - DNA, 154 bp, Homo sapiens
cgaagacaacgacagcgacggctacgccgaagcactcgttccgggggtgaagcctcctgcgccggccttgcctcggagcttctttgaagggcagtctgcaccatgggactcggctaagaaagatgagaacagaatgaagaacagatacgggaat

SEQ ID NO: 513865 - DNA, 75 bp, Homo sapiens
cagctaagatgccaggaccacctggaagcctagaaatggcaccacaccaaccccgtgggcactgagtggcggtgg

SEQ ID NO: 513866 - DNA, 50 bp, Homo sapiens
cgactatattgagaaggaggtaaaggaagatgagaatgtgcctactgctc

SEQ ID NO: 513867 - DNA, 101 bp, Homo sapiens
cgaaaattagcctgccggtgtctctttatcttctgtcacaggtaaaatgtcggttccaggaccttaccaggcggccactgggccttcctcagcaccatccg

SEQ ID NO: 513868 - DNA, 74 bp, Homo sapiens
aggtcttgtagcagcgcctcctcggagaagtacagcatcggggagcccacagtgccatccaccctggcagagga

SEQ ID NO: 513869 - DNA, 75 bp, Homo sapiens
actcattatctggtgatagactgggttgtttcaatctaacagtcaaagtcatcttgcagctgtggcacacaaaac

SEQ ID NO: 513870 - DNA, 100 bp, Homo sapiens
agaaacatctcaccaatttcaaatctggtgttttcacagtcctgtgtttggtatggagagtgtggaattgcatatggggacaagaggtacaattgcgaat

SEQ ID NO: 513871 - DNA, 100 bp, Homo sapiens
actactgataactgagccaaagtggtgatgctacttgaggggaatttctgcaacccatagtcaacgattacatgccttatgtttgatcatcggccaaggt

SEQ ID NO: 513872 - DNA, 75 bp, Homo sapiens
gacgcacgggccttgtgctgtcgctgccgtggcaccccttctagaaggccctccagggaaacgaggtaagagagg

SEQ ID NO: 513873 - DNA, 100 bp, Homo sapiens
gccaccgagcgtgctgagcaaccgcagcctccgcggccgagagtgcagcgagctactgcagcactggggtgtcagttgttggtccgacccagaacgcttc

SEQ ID NO: 513874 - DNA, 90 bp, Homo sapiens
cagttctaggaaccgtgtcctttcgtcccggagattcctcctgcatggaaaaactactttcaaaagattggaaggaaaaaatggaaagac

SEQ ID NO: 513875 - DNA, 97 bp, Homo sapiens
ccgacttgccggcagaacttacgctgcgggaccccgggcactgttgctgctgcgggaggtggctttctagaagatgaccatagaggaccttccagat

SEQ ID NO: 513876 - DNA, 98 bp, Homo sapiens
gaacccgaccaacatccagaacttccagctgcccccaggctttgaagacgacccccaggctgtgctgcagacaatgaggaggtacgttcacaccttct

SEQ ID NO: 513877 - DNA, 75 bp, Homo sapiens
ccgcggtcgctccgagcggcgggccgcagaggtggccttaatttgagccccttaaaatttctggtttttgactgg

SEQ ID NO: 513878 - DNA, 75 bp, Homo sapiens
tttgacctttttgaagcctttgcaaaagcttccgatatggtatcgacatcccgtatcttagttgcagtagtgaag

SEQ ID NO: 513879 - DNA, 75 bp, Homo sapiens
aaaaagaaacttgtgaaagctttcaaaaaggaatcctcaatctggcatctggagtggtggatttacttcagttct

SEQ ID NO: 513880 - DNA, 75 bp, Homo sapiens
aagatgaccttcagtgtgctgctcaaaaacaggttcacaatggtccgtagtggaaaaaatggtgaccttcatctt

SEQ ID NO: 513881 - DNA, 100 bp, Homo sapiens
agcgggcccttggcgggggactctgagggaggagctggggacggcgaccctaggagagaacaccttccaccatgaccacctcagcaagttcccacttaaa

SEQ ID NO: 513882 - DNA, 75 bp, Homo sapiens
ctcgagggaggttcatgacaactgaggaaaaagccaaagtgggaccaggcctctctacatatgacatcgtgatca

SEQ ID NO: 513883 - DNA, 100 bp, Homo sapiens
acggatgacgtccactgccactttttcacgtacgccacaaggcagtttcccagcctggagcatcggggcaattccaaaagtcttcagatttccaaaagga

SEQ ID NO: 513884 - DNA, 98 bp, Homo sapiens
gaccacacactgggaaacatcattaaatcaatatgtgggcctcgctatggtgaaaccaaagaaaaagatattgactggggaaaacgctgcgtggataa

SEQ ID NO: 513885 - DNA, 82 bp, Homo sapiens
cctgggggcacacaggtgctggatggtacctcggggttctctcctgcccccaagctgggtaaagtgaatgccgaagacagaa

SEQ ID NO: 513886 - DNA, 75 bp, Homo sapiens
ggattgtggtcccgcctcacctggggtatggagaggaaggaagaggtggaacaatccaaagttttaatcaaagaa

SEQ ID NO: 513887 - DNA, 100 bp, Homo sapiens
tatccggagtgtgatgcagaagtaccttgcagagagaaatgaaataacctttgacaagattttcaatcagaaaattggggcaacaccctccactaaagag

SEQ ID NO: 513888 - DNA, 100 bp, Homo sapiens
tacggatcatcacctaccttttcccagacggacagagaacatggttcaaaaacaagtgcaaaggccctttatgagcacaaagttatcattgttgggctgg

SEQ ID NO: 513889 - DNA, 100 bp, Homo sapiens
gggaatttccgtcccccaccaagtccggatgctcactccaaagtctcagcagagtgtgaacatggctacgcctcttcattcccgtccatgccgagccccc

SEQ ID NO: 513890 - DNA, 75 bp, Homo sapiens
ctgtcaaagccatcatatatcagtatatggaagagacagaggagctgaaccgcgaggtggccaccaacagcgagc

SEQ ID NO: 513891 - DNA, 100 bp, Homo sapiens
ctgctgtagtcacaggagctgtagagaggaccccggtacatctgaaagccgggaaatgatcctggtggctttgagacaccttcacttcaagaacattgtc

SEQ ID NO: 513892 - DNA, 117 bp, Homo sapiens
ctcgcctcactatggcagcagcacggcacagcacgctcgacttcatgctcggcgccaaagtgagtcaaggtctcttaagtctccaagctaaacaggagtactgcctgaagccagaat

SEQ ID NO: 513893 - DNA, 95 bp, Homo sapiens
gtcggtgagcgcgtttcccgcctgagcgcaactagcggcgggtcgtgggcacctccaggacatgggcaagttttgcctcacatacgaggcctcca

SEQ ID NO: 513894 - DNA, 101 bp, Homo sapiens
ctggaaagtcggccaagaaagacaaagacccagtgaacaaatccgggggcaaggccaaaaagaagacttcacagagaatgcagttgtcttgacttcaggtc

SEQ ID NO: 513895 - DNA, 75 bp, Homo sapiens
gctcgggccatgtgcatcgagtcttgggctcgtttctctctgctccagcagtacccgcggctacgggaggagatg

SEQ ID NO: 513896 - DNA, 75 bp, Homo sapiens
cagagcccgccagaccttcctctgaaggcaaagtgacctgtgatgtggacgagtgctcactagcagaaaaaacct

SEQ ID NO: 513897 - DNA, 100 bp, Homo sapiens
cagatggccatgtacttctgggagatgatacctcttccaaatgcatgatgaagatgttctcatcaacaggacaaggcaatacagaagtggtccacacagg

SEQ ID NO: 513898 - DNA, 90 bp, Homo sapiens
gtggctttatccatatagtattttactaggtcatgaagggaagatggctgtggaaggtgttttaaagactatgaactgctgggagataag

SEQ ID NO: 513899 - DNA, 90 bp, Homo sapiens
acggagcagagtccctcacccccaccagctgtagctgaacgtctggatggtggagaagagcagctcgcaaaggatctccttcatccctct

SEQ ID NO: 513900 - DNA, 82 bp, Homo sapiens
gtgtcctggacccagctgagcgggcggtcattcgcatcgcagggactggtgattgcagctggaagtgcccatgaccgagctg

SEQ ID NO: 513901 - DNA, 98 bp, Homo sapiens
caacatcctgctagacttgttaaggtcacagtgagccgagatcatgccactccactccagcctgggtgacagagcaagactccatttcaaaaaaaaaa

SEQ ID NO: 513902 - DNA, 94 bp, Homo sapiens
gtgttaccggaacggcggcgacaagggtgttcccgaactagagtggaccaaactgcagctggaatacccagtacagttctgcttactacacttc

SEQ ID NO: 513903 - DNA, 88 bp, Homo sapiens
ctggaagggatgtcgtctcagcagtgctcgggcgcagaatcactgcagcccccctcgccctgagccagagcaccccgggtcccgccag

SEQ ID NO: 513904 - DNA, 100 bp, Homo sapiens
gtctttgtgtcctgagatcaaatggcacttcattggccacctacagaaacaaaatgtcaacaaattgatggccttgcaccagggaacgtctaaatcttcc

SEQ ID NO: 513905 - DNA, 103 bp, Homo sapiens
gacacgcctttgcacgacgctgccaacaacgggcactacaagactatctgttatagtccctgggtcaagacaacaatttttataccttcgtcgtggttcagaa

SEQ ID NO: 513906 - DNA, 100 bp, Homo sapiens
gtggcagccaaaagattgaaggaaggtgatacaatgatggggcagcaagtggccaagagaaatatggggagttgatgagcatcagaaaaaccaggacaga

SEQ ID NO: 513907 - DNA, 83 bp, Homo sapiens
aagagcaacctgaaggccccgtccaggagaaccaggtgcatcagcgcattgcggagctgaggaaagcaggtctgtggtcccag

SEQ ID NO: 513908 - DNA, 98 bp, Homo sapiens
cgggaagaaggagaacctgaaggctgcgcaggaggagtatgtcaagcgagccctgatgcggtgacctgccagcacctgccgcagccttcgtccgggag

SEQ ID NO: 513909 - DNA, 83 bp, Homo sapiens
ctcggtgctgcagacggcgagacctcctgcacagatgaagactggcccatttgcagagcactccaaccagctgtggaacatca

SEQ ID NO: 513910 - DNA, 83 bp, Homo sapiens
agacggttggcaggcaggcctgggcacttggcgaggtactcaagacaattgacgagggagatgccgatgaggtgacgaagcag

SEQ ID NO: 513911 - DNA, 95 bp, Homo sapiens
tacacaaagagggtcatctcttctattgtacctgcaggcaccttggaagttgttttcaaccatatccagcctttgccgaatacatcctatctgcc

SEQ ID NO: 513912 - DNA, 100 bp, Homo sapiens
gtcatccctggcttcatgagtgtatgattcgtctctttaatactgtatcaccttttgccatgatagcatttctttcattggacagttccttacaagggct

SEQ ID NO: 513913 - DNA, 126 bp, Homo sapiens
ccaaggagtcacggatcggattcctcagctacgaggaggcgctgaggagaggaagaaaacaggcagattttggcgcggcaaaagtcaaactcacagtcggactcccatgatgaggaggtgtcgccc

SEQ ID NO: 513914 - DNA, 96 bp, Homo sapiens
ttcgacttagccctgctccaggaatgggacctcgagtcactgtgctgaatgcaatatccatacatctccttctccgggaattcaagtaaggcatgt

SEQ ID NO: 513915 - DNA, 75 bp, Homo sapiens
acccccaggagcagaagtccttcttcgccaaatacgcctgcaggtggagttcatcaaccccatcttcgagttctc

SEQ ID NO: 513916 - DNA, 88 bp, Homo sapiens
ttactttgttatgcagaaagtgttgctccttgagggcaggacagttcttatggctttatccgttgcgtaagcacagagaggtctgcga

SEQ ID NO: 513917 - DNA, 82 bp, Homo sapiens
gaacccccaccccgagtcaaagcgctgaaatgagccccgcggcaggtactccaaagattcaggtttactcacgtcatccagc

SEQ ID NO: 513918 - DNA, 100 bp, Homo sapiens
ctataaattagccttacgtgccatgagtcgccgagatgacatggaatcattaggatatgttttgatgtattttaatagaaccagcctgccatggcaaggg

SEQ ID NO: 513919 - DNA, 97 bp, Homo sapiens
gaggaggaaccctcgcaagggcagaaggttgaagaacaggagctccaaatgagaagatgaagcaagtgttaaagaagactatagaagaagccaaagc

SEQ ID NO: 513920 - DNA, 100 bp, Homo sapiens
gggcgcggatccctgcgtcccggtgggtcatgataactgggtacgtggagttctgttccattctggggggaagtttattttgagttgtgctgatgacaag

SEQ ID NO: 513921 - DNA, 100 bp, Homo sapiens
cctctctcggagttggcaggaagccaggttgcagggtgtccgcttcctcagcggatgaccaccaggctctcatctgggacatccagcaaatgccccgagc

SEQ ID NO: 513922 - DNA, 87 bp, Homo sapiens
attacagtatccttgtcagtattcagatgaaggacagagcaactctgccaccagtacagccacagacccctttgcttctgtttttgg

SEQ ID NO: 513923 - DNA, 100 bp, Homo sapiens
aaacccagccgaagcatttaaaagagtgcacggcctggagatagagggcagggactgtggcgaggccaccgcccagtggataaccagcttcctgaagtca

SEQ ID NO: 513924 - DNA, 100 bp, Homo sapiens
ggaacagccatgcaaaggcaggggaggaagccacctcgagttcaatttcaccatttagtattgagagcacaagacgccagagacggtctgaatccccaga

SEQ ID NO: 513925 - DNA, 50 bp, Homo sapiens
cttgtcacccagcagtacactgaggcctgtgatacttgggctgtgatcct

SEQ ID NO: 513926 - DNA, 90 bp, Homo sapiens
tccctcacattagccagtgtgaagacctccgaaggaccatagcgccatcatgaccgggtcctataacaacttcttcaggatgtttgatag

SEQ ID NO: 513927 - DNA, 74 bp, Homo sapiens
aagtccaacctcaagatagcggagctgaagctgcgggaggcccccagcccctcgagtaatcctgcctgtgtctg

SEQ ID NO: 513928 - DNA, 100 bp, Homo sapiens
agcaaatgagctgatggaagatctgtttgaaactatgtgctagtgctgctgatgacagatgtactggtgtttctccaggaaaaggaccagaagtacatct

SEQ ID NO: 513929 - DNA, 100 bp, Homo sapiens
gtgggagaggatggacgagggatgcggagagaccatatatgtcattgggcagggatcagtggtgcttcatgccccacctccaaccaagatcaaacgggag

SEQ ID NO: 513930 - DNA, 100 bp, Homo sapiens
accaaagtcatgggcacagctgaatggaaagccagtaggacacgaaggtggcccgacaacaagctcaaatacgtcaccaaatggcagaggacagcaaagc

SEQ ID NO: 513931 - DNA, 75 bp, Homo sapiens
gcgtcctactttgacagctgcagggccgcggcctggaatgctatcttctttgagaagtcaaattgtcaggatcag

SEQ ID NO: 513932 - DNA, 100 bp, Homo sapiens
tcacctgcctttccagaccggagacgggcggcaagtttgaagtcgacacccagaggccagtttgtcccccttcccggaatacggggtgctttgcattcag

SEQ ID NO: 513933 - DNA, 100 bp, Homo sapiens
gcttgtgtaagcaagatttatctgaataccctagatctatcttgggatcccatggctttctttactgggctctggggccccttcacctgtgtaagcagag

SEQ ID NO: 513934 - DNA, 88 bp, Homo sapiens
tgaggacagcaatggttgtatcaactatgaagtttttggctttcacccccaaccagtgaccaaagacttgaccactcaaagtccagct

SEQ ID NO: 513935 - DNA, 100 bp, Homo sapiens
gatgattatagccaaaaatggcccagacacagaaaggtactccaaagattcaggtttactcacgtcatccagcagagaatggaaagtcaaatttcctgaa

SEQ ID NO: 513936 - DNA, 100 bp, Homo sapiens
caacctctcctcttcgtctccgccatcagctcggcagtcgcgaagcagcaaccatggttttggttatgaacaggattcggattcacgtcttgccaaccaa

SEQ ID NO: 513937 - DNA, 83 bp, Homo sapiens
cttccggcagctactcatggggatggctgacaagaacatccagtattatgagaaggacttgaaagaggagattgatattcgac

SEQ ID NO: 513938 - DNA, 100 bp, Homo sapiens
agaaattgccggtctgggagttgggggcaaggagaagatcctggaagacgtattttagcagatgaagcactcaagctgggcattctagataaagttgtaa

SEQ ID NO: 513939 - DNA, 90 bp, Homo sapiens
cgaatagttgatgccctaaatgaattcaggtttattcttcagtccaaggaagcaattcacagtcagctgttagagaagcagaaaatagca

SEQ ID NO: 513940 - DNA, 82 bp, Homo sapiens
attcagtgcaagagagttgttaatggttccaaataagtttcgctatccattctactatgagatgtgttggtatgtgttggag

SEQ ID NO: 513941 - DNA, 100 bp, Homo sapiens
ctaccactccctggcattatcaaaagatggaaaagggatagcagtggaaataaaatcatgcatcctgtttctgggaagcatatcttacaatttgttgcaa

SEQ ID NO: 513942 - DNA, 80 bp, Homo sapiens
agaaggcttcagcacagccctcacaatggttctgctccagacgagcccttaccacgttgactcactcctgcagctcagcg

SEQ ID NO: 513943 - DNA, 117 bp, Homo sapiens
ccgcgcgcacctcagccgcctcctagcggcgcggcgctcgctcctacggtcccgcggcagtgctggtggccatggttcccgtagccagaaggagttgcccacagagcccccctacac

SEQ ID NO: 513944 - DNA, 75 bp, Homo sapiens
gccgccgcgtcttcccggtctcctttcccggccgcacagggctcattggtgggcagtattacttatgggaattgc

SEQ ID NO: 513945 - DNA, 74 bp, Homo sapiens
aacggtacattacctgataaatataaatatatccagacactccgggagagcagcaaatgttcccagcaggccac

SEQ ID NO: 513946 - DNA, 80 bp, Homo sapiens
tgaacgttgtcccgcctgggattgcgagactgggagtcttggtgtgaaattgaggaattatctccaaaatggttcattga

SEQ ID NO: 513947 - DNA, 106 bp, Homo sapiens
ctgtgcagccgcgaggaggcgcgggaggtgttcgagaacgaccccgagacgggcaaagtgcacctggagctgcggctgagcgaggtcatcacagacactggggtcg

SEQ ID NO: 513948 - DNA, 75 bp, Homo sapiens
gtggaggaatttgtggctggctggatctctggtccaggagccggctgtgcacatcccaggacaggagcccctgac

SEQ ID NO: 513949 - DNA, 100 bp, Homo sapiens
gggacgggccgtgggcccccggaacgagttttcggctttgtgagaaaccttaccatcaaacacgatggccagcaacgttaccaacaagacagatcctcgc

SEQ ID NO: 513950 - DNA, 100 bp, Homo sapiens
aagacctaccggaatgatcctcttcaagatctcttgttcttccccagtgatgacttttcaatttcaactattgcagaaagtgaagattcacaggagtcag

SEQ ID NO: 513951 - DNA, 100 bp, Homo sapiens
gaccgcggtaccgcgcgccactaacaggtagaatgtaagaaagctcagccgaaagaagtcatgttcccacctgggacaagaggccgggcccggggactgc

SEQ ID NO: 513952 - DNA, 98 bp, Homo sapiens
aagaacgtgagcaagcccaggcacagccgacgccgcgggtaagactttgaccccgacgcaggcttcagtgattgccgcggatcagaagcctgagcact

SEQ ID NO: 513953 - DNA, 75 bp, Homo sapiens
ggaccagaggaactcagccctgattgcgaagtgtgtatctcatgtccaagtggatagcagagaacttgatcgaag

SEQ ID NO: 513954 - DNA, 98 bp, Homo sapiens
ccaaacctgagtttctacagaaatgagatccgcttcctgcccaacggagagaagtttgctgaggaatgccttcaagcacaaagtgatgaatgactgcc

SEQ ID NO: 513955 - DNA, 100 bp, Homo sapiens
ctcttcttagttgatgatttagttgattctctgaaggtcaaaatgcagatcttcgtgaaaacccttaccggcaagaccatcacccttgaggtggagccca

SEQ ID NO: 513956 - DNA, 100 bp, Homo sapiens
tagtatttgaatttgctagtaacgtcatggaggatgaacgacaggtgtgcaactgaggaacatggctcaagaaactaatcacagccaagtgcctatgctt

SEQ ID NO: 513957 - DNA, 83 bp, Homo sapiens
acaaactggagagagaccagacctgcaagctctttgacacacagcagttcttgtcagattctgctcagcaatcctcagatgtg

SEQ ID NO: 513958 - DNA, 100 bp, Homo sapiens
cgacatcctccaggcaatgagatttaccgcaagggcaccatctccttctttgagattgatggacgtaagaacaagatcaccgcagtgtgcaacttcttca

SEQ ID NO: 513959 - DNA, 82 bp, Homo sapiens
gtcttccgtgggcaacgtggccgacagcacaggaccctggtttgatatgtacctatctgctcgagactccgttgttctgaac

SEQ ID NO: 513960 - DNA, 74 bp, Homo sapiens
cgcagcgcctctccacactgcagacagtgtttaagaatgaaagcctcaacgcagaatcaaaatctggctgcaaa

SEQ ID NO: 513961 - DNA, 100 bp, Homo sapiens
gttcccacctgaaagtctgtttgcaaaggcaatgcgcactcaggcaccagagggcagagggggccgaaggccagagaccaggatttggctacggaggcag

SEQ ID NO: 513962 - DNA, 100 bp, Homo sapiens
gaacgcaagaacagaatgaagaaagtcagggggactgcaaaggccaatgttggtgctggcaaaaaggcaccatacaggaagattacttgagagagctgct

SEQ ID NO: 513963 - DNA, 97 bp, Homo sapiens
ccgaggggtccaccgacctcccgttagcccctgagagccgggtggaccctgaggtccttcacagcctgcagatttggccaattgggagagaaatcaa

SEQ ID NO: 513964 - DNA, 88 bp, Homo sapiens
ctgtggctctttctgctgggcctgcccttcaccctctacatggagttgctctgaaacctaccgcatgccagtgatggagtacaaaatg

SEQ ID NO: 513965 - DNA, 97 bp, Homo sapiens
gaccgtctggggaagaaggtccgcgttaaatggcacgcctatctcaggaagtggctgctgctctcagaccctgatgacttctctgctggggccagag

SEQ ID NO: 513966 - DNA, 90 bp, Homo sapiens
ctgcgggcgaggagggcacaaggccaggttcccaagagctcagatttctgaggggagcacagctctatggatcaacactttccttggcgt

SEQ ID NO: 513967 - DNA, 100 bp, Homo sapiens
catcgagtctctgcgaacattccttttaacctatgtcttacaaaggcccaactcaccaagatggaggaacagagcccatggcccacttactacatggatt

SEQ ID NO: 513968 - DNA, 98 bp, Homo sapiens
caaaggcaatggaatcaagacagttatagtcaacatggttgacgttgcaaaggcgcttaatcggcctccaacgttgcacagccagagaacaacacatc

SEQ ID NO: 513969 - DNA, 83 bp, Homo sapiens
gacgctatggcgcactggagtaccctgttcctggcaacgcaaacatgcagatctttgtgaagaccctcactggcaaaaccatc

SEQ ID NO: 513970 - DNA, 82 bp, Homo sapiens
atgaagactgcctttacttaaacatctacgtgcccacggaagatgcatgattatgatatgagggtggatgatttccttcgtc

SEQ ID NO: 513971 - DNA, 100 bp, Homo sapiens
tgatgaagaggatgatgatgaagagtttatacttcaagatggacaagaagttctatcagctgctgagaaatgatgccagatggtaactcagatatacaag

SEQ ID NO: 513972 - DNA, 141 bp, Homo sapiens
gttcgtctggtggccttttgtccctttgcctcatcccaggttgccttggaaaatgccaacgccgtgtctgaaggtcctggcctatttcactttctgcctgtggataattccgtttgcgttttttgtgtcactttcggccgg

SEQ ID NO: 513973 - DNA, 101 bp, Homo sapiens
gtaaggtttccaattatattggtgaagctaaccagtctgcgtggctcactgtcaccagacctgtggcaaaagttaagtgggcagaccaacatccacctcag

SEQ ID NO: 513974 - DNA, 90 bp, Homo sapiens
tgcctggctactgccagtgttcactcaaggaccaagggctcttcattcagtgtttggaattcaaccttattgatagaagagaacttgcac

SEQ ID NO: 513975 - DNA, 100 bp, Homo sapiens
aaaccgcgaagaaggagcgccccgggccaccgcgcaaccaagtgttgcctggtgaggcaggatggggaagcagaatagcaaactggcccctgaagtgatg

SEQ ID NO: 513976 - DNA, 100 bp, Homo sapiens
tatcaagtaatggtgcaaagcctgaagttataaagtcagcccgggttatgaagaaggctgttggccaccttatccctttcatggaaaaagaaagagaaga

SEQ ID NO: 513977 - DNA, 51 bp, Homo sapiens
aaaaatcccaaggtctgcaaagatatcatggaaatcaggacagtggcagtt

SEQ ID NO: 513978 - DNA, 114 bp, Homo sapiens
ggctatggcgccagtaagaagaaaaaagcgtccgcttccagctttgcgcaggagtacaagcgcaagctagccagagtttccctggtgcgcaaagaactcaggtcccggatccag

SEQ ID NO: 513979 - DNA, 100 bp, Homo sapiens
gagctctatttggaacaactgcagaacaagcactcagataccacaaagggtgtgggccgaagatatgctcatgtggtgttgaggaaagcagacattgacc

SEQ ID NO: 513980 - DNA, 75 bp, Homo sapiens
ctgtatgctctccaggtgcactgctataacagcaacttcccaaaaggcatgttatttgaaagcaattgagacgca

SEQ ID NO: 513981 - DNA, 100 bp, Homo sapiens
ctggctgtggcggaggagcataagaaggtggctgcgctggagcggcagatctttgacttcctgggctaccagtgggctcccatcctagccaacttcctgc

SEQ ID NO: 513982 - DNA, 98 bp, Homo sapiens
gagatgcctggcaggacaatgcattaaggattgcagagcaagagctcttgagatctgtggcctgaaaggcgctggaagcagagcctgtgagtgtggtc

SEQ ID NO: 513983 - DNA, 96 bp, Homo sapiens
ctcctcctgcaccaaagggagccgccaccgtctggtgtctaaaccgcctcgggtcagaatggcggcagtggagcatcgtcattcttcaggattgcc

SEQ ID NO: 513984 - DNA, 75 bp, Homo sapiens
ctgccgtccatgcggaagatcgtcgccacctggatgctggaggctgaccccgcactacatctacccaccagccat

SEQ ID NO: 513985 - DNA, 99 bp, Homo sapiens
ctcagaaaagccaactcgaagtcatccatggacccctgatgattccacagattctctcgggcctagccgtccttggaacccgatattcgggctgggcgg

SEQ ID NO: 513986 - DNA, 100 bp, Homo sapiens
cccagctccagtgattactcggacctacagagggtgaaacaggtagagtggaacccccagctattagaggtcccaccccaaactcagtttgattacacag

SEQ ID NO: 513987 - DNA, 100 bp, Homo sapiens
cgccttggaaacagatgaggagcctcctgatcttattggggggagtataaaggaaacttttgagaagaactttgaaagagaaacccataaaataagtgag

SEQ ID NO: 513988 - DNA, 85 bp, Homo sapiens
cctgcatatccttgggcaacccgaagaatgaaagaagaagctataaaaccccctttgaaagctctcaggagaagtgattttgcaa

SEQ ID NO: 513989 - DNA, 74 bp, Homo sapiens
ggaaaggagaggatcccggagccgatctctcgcatggatccccacagatggtacggagggatatcgggctgtcg

SEQ ID NO: 513990 - DNA, 75 bp, Homo sapiens
ccggtccccgccgcacccagcccagagtgatcagcagctggactgtgccttggacctaatgaggcgcctgcctcc

SEQ ID NO: 513991 - DNA, 50 bp, Homo sapiens
ctgggcctcccggtccgcaagcagaccattgccctcttgaacatttaccg

SEQ ID NO: 513992 - DNA, 106 bp, Homo sapiens
tgacgttgtggagatggggagcgtcctggggctgtgctccatggcgagctggaatggccaaagttttctggtcttggatgagcaacgatttgcaaaagaaattctt

SEQ ID NO: 513993 - DNA, 82 bp, Homo sapiens
cttccggccaagttggactgcagctcgcggtttcctggcttctaggtcatcatcagatttgaaatatttaaagtggatacaa

SEQ ID NO: 513994 - DNA, 101 bp, Homo sapiens
ggagcaggacttacggcagtgggggctgacagctgctactgtttgaacggtcttggatgaacagatggaagtctgctgttctgcatgaaggggaagggaac

SEQ ID NO: 513995 - DNA, 100 bp, Homo sapiens
gctgaccaattgccactggacatacttgaaacaaaataggaaaatggcagcaaactcttcaggacaaggaggctggcaggatgtacagtttttatcacag

SEQ ID NO: 513996 - DNA, 100 bp, Homo sapiens
catgggagctgctctgttgatgcttatcgattcggaggaacctgagtgcctcagtcatcgccgtcaccatccaggggggagcgcaccacctcgacctcag

SEQ ID NO: 513997 - DNA, 76 bp, Homo sapiens
ggcaccaccacagccgcccacttctggaaggttccatcccctgcaggccaccaggagaataacaacttctgctccg

SEQ ID NO: 513998 - DNA, 90 bp, Homo sapiens
ccgcagagcaacgggggcgggggcggcaagcaggtggtggaggtggatacagcagtcggagaacatctggcagagacaaatacggaccac

SEQ ID NO: 513999 - DNA, 100 bp, Homo sapiens
agcctgcgaaggtggcggcgctgctgctcgggctgctcttggaggatgctttcattggatttggaggaaatgtgatcaggcaacaagtcaaggataacgc

SEQ ID NO: 514000 - DNA, 100 bp, Homo sapiens
atagtgcgcctgcgaccacacggccggggcgctagcgttcgccttcagccaccatggggaatgggatgaacaaggactcacaccacccggcaagaactgc

SEQ ID NO: 514001 - DNA, 50 bp, Homo sapiens
gaaaatgccctcaaacgcgccaacgatctaccttctgagatatcatcctt

SEQ ID NO: 514002 - DNA, 83 bp, Homo sapiens
aggggcgggctcctggcaaggcattcgctcctgagcggaatcctgcaaagatcaatgtccgagttaccaccatggatgcagag

SEQ ID NO: 514003 - DNA, 74 bp, Homo sapiens
ggcttctgggccatctcgcatattctcaacggctcccctggcaaccactaatctgctttctatctatggatttg

SEQ ID NO: 514004 - DNA, 90 bp, Homo sapiens
ggcctttggcgggtggaggaaaatcttggggtatcgcacatttttataaaggcgccctgcgtccggcagaggaggcgagcatcccgctca

SEQ ID NO: 514005 - DNA, 93 bp, Homo sapiens
gggaaatcgtgcacttgcaggccgggcagtgcggcaaccaaatcggcgccaagatgagcagcaccagcagtaagagggctccgaccacggcaa

SEQ ID NO: 514006 - DNA, 75 bp, Homo sapiens
attttatatcacacaactgaaaacagattctgaggtgctgctagctgaggaggggatagctcctctttcttctgc

SEQ ID NO: 514007 - DNA, 75 bp, Homo sapiens
ccgcgttggggtgagaccctcacttcatccggatcttttgccagaaatgagggcatactggcctgacgtaattca

SEQ ID NO: 514008 - DNA, 90 bp, Homo sapiens
cgagaacgaagtaggccgtctcgctctgggtctccaggcccgcgaccgtccgccagtcgtcccgagggcgaagagagcctccggatcctg

SEQ ID NO: 514009 - DNA, 90 bp, Homo sapiens
atagccctcagaagaaagattctggaggaaaggtttacaagcaggccacgattgaatctctgaagaggtgacattgtgattgcaaaaagc

SEQ ID NO: 514010 - DNA, 80 bp, Homo sapiens
taatggtccggacttccgtgtgtcaaaatgcagatcttcgtgaaaacccttaccggcaagaccatcacccttgaggtgga

SEQ ID NO: 514011 - DNA, 90 bp, Homo sapiens
gcttgttcaaaggagacaagtgtcacagcctggttggaaaacccaagatatttatcattcaggctgaccggttccctgatgtgttacctg

SEQ ID NO: 514012 - DNA, 75 bp, Homo sapiens
tgttgcagatcctgattgtaggtggtgtccagctccagactgtggagttgatctctctaatgtattagatcttca

SEQ ID NO: 514013 - DNA, 74 bp, Homo sapiens
ttcgtgaccctcagcgccggtgcatgtcgatgacagagcgggatgccaccagcttgtccaaagggaagttccag

SEQ ID NO: 514014 - DNA, 74 bp, Homo sapiens
tagcctattggaggaaaacacaccaagatgggcccaaaagcacaagaactggaggtttcagaagacgaggcaga

SEQ ID NO: 514015 - DNA, 99 bp, Homo sapiens
cagatagtgcttactaccaggttgggcagacgggcaaggaggggaccgagaatcaaggcgttgagcctcaagatggagtttcgctcttgtcgcccaggc

SEQ ID NO: 514016 - DNA, 82 bp, Homo sapiens
cagcgacttccttgcagcctcttctccgggcatagaatgtcaagctaaccaggcgtccgctacttcagaagagtgtactgtc

SEQ ID NO: 514017 - DNA, 112 bp, Homo sapiens
aactacgtggagcggaagaacagcctgaagaagggctccctcgtgaagaacctgaaggacacactaggtggcataagtggaaataaactcaagctgatgcttcaaaaacgag

SEQ ID NO: 514018 - DNA, 99 bp, Homo sapiens
ctcctcttttttatccatggcaggaacaggagtacagctgtgtagtaaagatgccttctggtgaatttgcacgtatatgccgagatctcagccatattg

SEQ ID NO: 514019 - DNA, 100 bp, Homo sapiens
gtccccaggatcttcccggttcagggacctggcgatttctgagtgttccgaaagaatcttcaagagggagacatagggaaaaggaagacataaaaatcac

SEQ ID NO: 514020 - DNA, 75 bp, Homo sapiens
ggcgtttggatgattgtctctcggcggcggagtcgctctaagcgaaagacatgaggcctcagcctgaaatgaggt

SEQ ID NO: 514021 - DNA, 75 bp, Homo sapiens
ctgctgccctcaaggtcgtgcgtctgaagcctacaagaaagggatgccaagcttggatcatggccctaatcccaa

SEQ ID NO: 514022 - DNA, 96 bp, Homo sapiens
aaagatgtcatgatggagaattatggaaacctggtctcactggggaatctaagggaggaaattatcaactgtgcacaaggaaaaaaatagatatgt

SEQ ID NO: 514023 - DNA, 74 bp, Homo sapiens
atagctggggctacaggcgtgtgtcactgcgcccagccatgaagatggacctacagctaaaaaattaaagactg

SEQ ID NO: 514024 - DNA, 50 bp, Homo sapiens
ctgcattcctaccggtgtgacaggaattggagaatgatgcagcttttcag

SEQ ID NO: 514025 - DNA, 98 bp, Homo sapiens
tgctgggtccagcaaactccgcttccgattgggctaccacgccattccgagtatgagaactattccatggcagtatatcttgtaaaacagttgtcctc

SEQ ID NO: 514026 - DNA, 96 bp, Homo sapiens
ttgatggtgggtttaataagacagggctgttcatgtgaagggccagctctcaatgttgcaagaaaaaatagaccatttggagcgtttgctagctga

SEQ ID NO: 514027 - DNA, 100 bp, Homo sapiens
ccaagtcgttcttcgacaacatctcttctgaactcaagaccagggtgagaactctgtctcagtcgacgggaagtgcagtgactccacgctactgagcaac

SEQ ID NO: 514028 - DNA, 100 bp, Homo sapiens
acggttcaggctgtccagaagtaaaaggctgtgctccattgaagtgacttgtgaatcagccagtgtgatggctgcgacactggctaatggtggtttctgc

SEQ ID NO: 514029 - DNA, 100 bp, Homo sapiens
ccgctgtaaggaaacaagatggtccttaaaaccgaagaggaggacgtttttggctttcacccccaaccagtgaccaaagacttgaccactcaaagtccag

SEQ ID NO: 514030 - DNA, 74 bp, Homo sapiens
agcacaatcaacgcaaccacagaaacaagtggtacagaaaatggacccaagtggggtcaaagtgctggaaacag

SEQ ID NO: 514031 - DNA, 73 bp, Homo sapiens
ggcaaaggcactggaggattgagctaggtgggcagaaaagagcaattccaactccacagagtgaccagagaga

SEQ ID NO: 514032 - DNA, 83 bp, Homo sapiens
cacttacttctacatggtttatgaaatctgaaatcagcccgaccctgcccgccctggactggcagctgccgtcccactcaggc

SEQ ID NO: 514033 - DNA, 50 bp, Homo sapiens
aacaactacagcatttgaataatgcatctccagcaagaacaccttcagct

SEQ ID NO: 514034 - DNA, 75 bp, Homo sapiens
gaaccctggtcaccgtctcctcagcccgtggaccgggagcccgtggaccgggagccggtggtgtgccaccccgac

SEQ ID NO: 514035 - DNA, 75 bp, Homo sapiens
ggaaattaagacaacaggatcttgatggggagctaagatcgctaaagaattacctccaaagccattgtcaagacc

SEQ ID NO: 514036 - DNA, 100 bp, Homo sapiens
aagcacctgactacgaagtgctatccgtgcgagaacagctattccacgagaggatccgcgagtgtattgggaccctcacaatgatcccaatgctcagggg

SEQ ID NO: 514037 - DNA, 100 bp, Homo sapiens
agatgtttttccgggagctgcctgagccgctcttcccttacagtttctttgagcagtttgtggaagcgatcagtaaacttatgagtgctttgctgagtgg

SEQ ID NO: 514038 - DNA, 50 bp, Homo sapiens
tctggcttactttgtccacactccggcgtgaccacaggcaagtgctcagc

SEQ ID NO: 514039 - DNA, 51 bp, Homo sapiens
aaagatgttttgcctactgttgatccgggaagtcgagacaacatgagtgtg

SEQ ID NO: 514040 - DNA, 75 bp, Homo sapiens
gcagccccctgctccggaggctggtgcagggtgggattaaaaactcagcctgaatcaaaatgccctgagctgctt

SEQ ID NO: 514041 - DNA, 87 bp, Homo sapiens
aacaccactgaagcattgccaagctgttaaacgtttaatgaaagaagcggcagaattgaaagatccaacagatcattaccatgcgca

SEQ ID NO: 514042 - DNA, 95 bp, Homo sapiens
ggccttccacaccccctccgtgggtgtgtggtgagtgtggagtttgccagatccggcccggtgcctgggttccaggaggacacgctgcagttggc

SEQ ID NO: 514043 - DNA, 100 bp, Homo sapiens
gaaccagttaacagcagattgtcagatatattccgggtggtcccattcatatcagagactgcttcccagggtcacctggacctcacgcagctcatcggtg

SEQ ID NO: 514044 - DNA, 101 bp, Homo sapiens
gctggctgtgtgtgctgcaaaccgagacaagttcaccccgaagtctgccgatgccatggacaatattaccaggcagaaccaattctacgatacccaagtca

SEQ ID NO: 514045 - DNA, 100 bp, Homo sapiens
gtgaaggacaccccggggctgggcaagggcctgggatacaacagtgatgagataaggcctcggactttactgatcgaacatctaatggaaggtggaagaa

SEQ ID NO: 514046 - DNA, 104 bp, Homo sapiens
gcctaccaccttcagaagtcgacctgtggcaaatgtggctaccctgccaagcgcaagagaaagtattgtatgcaggcccagaggtagatatatggagcagtggg

SEQ ID NO: 514047 - DNA, 90 bp, Homo sapiens
tgaatttccatgtcaacatagtcctgaggtcctgggcctatgtcaagaagtgcaaaaacaacatgtgtccaaatcggggattggtgagcc

SEQ ID NO: 514048 - DNA, 80 bp, Homo sapiens
aaagaaagaagattatgtgcctgctttaaaagttttggaaatctagtcctagtattctggccgttcagagatctgcaatc

SEQ ID NO: 514049 - DNA, 100 bp, Homo sapiens
gcaagctgagcgagctgtcagagcccggggacggcgaggccctcatgtaccacacggctggaggctcccaggtgattttcacaaatcctttagaaatcgt

SEQ ID NO: 514050 - DNA, 101 bp, Homo sapiens
tgctgcaagaaggacctgtgtaactttaacgaacagcttgaaaatgaaagcgtggatacccatcaacgaagttttgatattggaattcagattggctatca

SEQ ID NO: 514051 - DNA, 74 bp, Homo sapiens
gcaacattgaacatgccttcatcctctataacaagtatatcacgaaataatgcaaaaggtgtcccaaggctcct

SEQ ID NO: 514052 - DNA, 75 bp, Homo sapiens
atgcatttcatggctatcatctacacgatcatgcggccagatgatgccaacgtggccggcaatgtccacgggggg

SEQ ID NO: 514053 - DNA, 100 bp, Homo sapiens
ttacttcttcctcaacaccagcaccgcagatgttgtcaaggtggcctaccaggaggccaggggtgtcgccatggctgtggaaaatctctgttctcacaaa

SEQ ID NO: 514054 - DNA, 100 bp, Homo sapiens
cagcacctacgtcccgctgccgtcgccgccgccaccatgcccaagagaaagctgggagtgtccactcgccttccaccagcatggcaacgtcttcacagta

SEQ ID NO: 514055 - DNA, 101 bp, Homo sapiens
cgtggtttttatcaccacacgactgggtatatttcctctctggccccgcagggtggagcccgtctgctcagggttgcaggcccagattctccactgctacc

SEQ ID NO: 514056 - DNA, 83 bp, Homo sapiens
cgcggagggaagacgccctggtgctcaccaagcaaggttttaaaatcaaagatgggaaaatcggagaaaattgcccttcccca

SEQ ID NO: 514057 - DNA, 75 bp, Homo sapiens
ctcatcacccagcagctccagctcccggaagtccagcatgtgcagtttgctgatggccgccaaagttggagttcg

SEQ ID NO: 514058 - DNA, 50 bp, Homo sapiens
ctttccaacacagatgtccaagctgccaaatgaaacgactacaaagtgcc

SEQ ID NO: 514059 - DNA, 74 bp, Homo sapiens
ttcagtgtgctgctcaaaaacagtaggtcccattagtccaccacagccaccttcagtcagtgcatggaataagc

SEQ ID NO: 514060 - DNA, 99 bp, Homo sapiens
caatgatgagaggatgtggtggtctactctgatgtcaatcttgagggctagctgccttggctgtcgaagagcttggctttgagcgatttcatgcattaa

SEQ ID NO: 514061 - DNA, 82 bp, Homo sapiens
cacttgcagcatggagtcgcccgcctcgagccagcccgccagcatgccccagtccaaaggtggcagagatgcatggcgagct

SEQ ID NO: 514062 - DNA, 82 bp, Homo sapiens
gcaagcgcaaccgtcggtgggtcggggatcggtcgcctgagaggatgatcggctgaatgtaacagaggaactaacgtccaac

SEQ ID NO: 514063 - DNA, 102 bp, Homo sapiens
ttcagatgtggtggaatatgccaaggaaaaactggagagcttcatcaaaaatagtgatagctttgataaagagaatttcccaagagatttgtgtagttatgg

SEQ ID NO: 514064 - DNA, 87 bp, Homo sapiens
taagaatggagctaactgcaatctggaagatttggtggttggttctagctattgccatggtacgtttttatatggaaaaaggaacac

SEQ ID NO: 514065 - DNA, 83 bp, Homo sapiens
ccgcaactctcagttcgagagtaaaggccggcgaccaccaggggcctgaggatgaagccaagtctgctgtgccggcccctgtc

SEQ ID NO: 514066 - DNA, 101 bp, Homo sapiens
agagatctctgctgcctgcattgaggggcattacagcagaagttctggtggtgacctctttcgatgaactgcagagaagggcctcagaagcaagagggaag

SEQ ID NO: 514067 - DNA, 100 bp, Homo sapiens
ggcagcagccgacggacactccctacgagtgggacctggacaaaaaggcttggttccccaagatttgttgggcgaatcaatatctacagtaatagtcttg

SEQ ID NO: 514068 - DNA, 81 bp, Homo sapiens
ccgggattcccagccatggcagattcctccgggcagcaggccgcggcgagtcctttgcacatgttggcaacacacgcatcc

SEQ ID NO: 514069 - DNA, 82 bp, Homo sapiens
gcggccaaaggccagtgactaccaacgtttggaccagaagatcacctctgcagcctgcacagccgggcctttggactcctgg

SEQ ID NO: 514070 - DNA, 82 bp, Homo sapiens
ctactgcaaagacaaggctaaggacttcatgcccgccagcaaagagtctcactgtcgcccaggctgcagtgcagtggtgcca

SEQ ID NO: 514071 - DNA, 74 bp, Homo sapiens
gcccagaatatggagcttcagaacaaagtacagcttctggaggaacagaatttatctgattccggagctgccat

SEQ ID NO: 514072 - DNA, 100 bp, Homo sapiens
gtcgggaagaatcgtttggtctcctgccgtgcccggtgtcatggagaaactccagctgggcccagagattctgcagcgggaaaatccaaggcttatttat

SEQ ID NO: 514073 - DNA, 122 bp, Homo sapiens
gcgacattggccaggcccagtcccgggcccagctcctagtgcaaggtgtccctggccagtgtccttccacctgtccacaagcatggggaacatcttcgccaacctcttcaagggcctttttg

SEQ ID NO: 514074 - DNA, 75 bp, Homo sapiens
cccgctgatcttccagctcccctcacccaacgtcgtgtgagcgagtgctgtgctttcatgggcctcttctttatg

SEQ ID NO: 514075 - DNA, 87 bp, Homo sapiens
tctgggagcttctcagccattttccacagatcaggttgtgcagcctgactctgaagaagctggtggtcttcaaggagctggagaagg

SEQ ID NO: 514076 - DNA, 96 bp, Homo sapiens
ttgtatcccaccagcaatgaatgagcgttccagcttctccgagtgggaatagctttgcgaaaaatgggcgcaatggccaagccagattgtatcatc

SEQ ID NO: 514077 - DNA, 100 bp, Homo sapiens
gaccttgagctccaggagttcgtctcttacgtctgcggaagtgcagctgcctcagttcttagcgcagattttcaggttctgaacacaagcccagtttctg

SEQ ID NO: 514078 - DNA, 90 bp, Homo sapiens
catgaaccggaaaacccaagaaactgctgtcgccatgcatgttgctgccaactctatccaaaacaggtgttcacggccctggcactggtg

SEQ ID NO: 514079 - DNA, 95 bp, Homo sapiens
gggaaaatggcggacgggaaggcgggagacgagaagcctgaaaagtcgcagcgagctggagccgccggagatggagatcttataacaatttttga

SEQ ID NO: 514080 - DNA, 75 bp, Homo sapiens
acaggtatccagcaatgaggacctgcttcttggacacttaatgattgttggcaagaaatgtgctgctgatctggg

SEQ ID NO: 514081 - DNA, 93 bp, Homo sapiens
tgaatcttgacaagaccatagagagttgcaaagcacaattaggttcggactaaggatcaccgctttgaaagtgtcagtcaccttatcagctac

SEQ ID NO: 514082 - DNA, 98 bp, Homo sapiens
tcggacctttcccgctggcgcgcagcctcagctagaaagaagagattttatcgacatcgaaagtaaatttgccctaaggacccctgaagacacagctg

SEQ ID NO: 514083 - DNA, 100 bp, Homo sapiens
aatgtttgaacaaactcgaagaacagctgtggaaagaagttgcaaaacactgggtgacggccacccacggactctgtcacttgctgggattcacacacgg

SEQ ID NO: 514084 - DNA, 97 bp, Homo sapiens
aggcacaacatgaacgtgagctccagaagctagagcagagagtgtctctgcgcagagcacaccttgagcagaagggctctgcgagtgacccggcggg

SEQ ID NO: 514085 - DNA, 95 bp, Homo sapiens
agttctttgtgagctggctgatctgcaagacaaagaagttggagatggaactacttcagtgatccggagttctgtaactcacttgttgtgtgcat

SEQ ID NO: 514086 - DNA, 75 bp, Homo sapiens
gggcatgtccctgcttgtcagggctgagagcgacggagccttcacgtaaatgggtccagtcatgcctcccagtaa

SEQ ID NO: 514087 - DNA, 100 bp, Homo sapiens
gtcaagtcgtgttctgatcactactgacttgttgatgttgatgcctaagaagaaccggattgccatttatgaactcctttttaaggagggagtcatggtg

SEQ ID NO: 514088 - DNA, 75 bp, Homo sapiens
gaggggagcggagcccggagcgtcgtggaaaggttaaataggattgcgaatcaggtggccattcagcggaagaag

SEQ ID NO: 514089 - DNA, 89 bp, Homo sapiens
agagctcctggaccaatgcatcttcccaccaccttaaaccactggtatgcaggtgccttgagagcttcaggggaaatggcttcagcgca

SEQ ID NO: 514090 - DNA, 90 bp, Homo sapiens
acatatttacctgaatcacatcgagccactgaaaattcagatatttgttcagtcgaatcaaggtgaagaggaaacaacaagaatttcata

SEQ ID NO: 514091 - DNA, 75 bp, Homo sapiens
caaactgactttgcagccacggagaggacgaggtggcccacacactcaccgagaaccgcgtcctgcagaactcca

SEQ ID NO: 514092 - DNA, 100 bp, Homo sapiens
tgtgcaatcctcacattcaagctgataggctgcgctaccggaatgtcatccagcgagtgattaggtgtcagctgtgatgcatgtttaaaaggaaattttc

SEQ ID NO: 514093 - DNA, 100 bp, Homo sapiens
ctcatatcttcacttggcaaactcaacaagaatgaagagcttcgaaacttgtctttgtctggccatgtgggatttgacagcctccctgaccagctggtca

SEQ ID NO: 514094 - DNA, 83 bp, Homo sapiens
ctcaggcggcaccctgtccccgaggaggggaccatgacacagagcggaaagaatgtcggagcgggccgcggatgacgtcaggg

SEQ ID NO: 514095 - DNA, 82 bp, Homo sapiens
aaagcagaaagtagatgaagatgagattcagaagatgcacatccggtgaaagacagagatcacatttcaactagattcttag

SEQ ID NO: 514096 - DNA, 104 bp, Homo sapiens
gtaaggatttcaacatgcctctgacaatctctagtcactattcctgatcagagaactccagttgcttcaacacacagtatcagtagtgcagccaccccagatcg

SEQ ID NO: 514097 - DNA, 100 bp, Homo sapiens
atccaggcgttctccgccccggagaatgcagtgcgcatggacgaggctcgggataacgcctgcaacgacatggatggcgggtgaaaaagttgagaagcca

SEQ ID NO: 514098 - DNA, 75 bp, Homo sapiens
ataatggaatgatagacttaaaatatttcccatattatgggaaaaaactgcatgattccggagtttgaatccacc

SEQ ID NO: 514099 - DNA, 100 bp, Homo sapiens
tgtggaaatgaacttcacaagttcctcatctgggacactgctggtcaggaacgggtgactacaattgcaaagtagaatttgctttgacacctgatgccag

SEQ ID NO: 514100 - DNA, 99 bp, Homo sapiens
aagcgcggccttcacacatcccagccggtgactgcagtgaggtggagccgccaccaaaatgcagattttcgtgaaaacccttacggggaagaccatcac

SEQ ID NO: 514101 - DNA, 100 bp, Homo sapiens
gtagagtcgctggagcgggcggagctgtgcgagagcctcctcacttgggtattgttgcagcatctggcagtgagactgaggatgaggacagcatggacat

SEQ ID NO: 514102 - DNA, 74 bp, Homo sapiens
ctcccgagtggctgggattacaggtgcatggaggactgcaacagaggagtgggggactgaagattggaatgaag

SEQ ID NO: 514103 - DNA, 75 bp, Homo sapiens
gatgatgtgggccatggtgtcaaggagcagcagccaagctggacagatgacctgcctctctgccacctctctggg

SEQ ID NO: 514104 - DNA, 82 bp, Homo sapiens
cgacaagccgctggcagccgcggatctcaccgccgctcaggatctggtggctggacccagagctgacctatggctgcgccaa

SEQ ID NO: 514105 - DNA, 75 bp, Homo sapiens
aaagagaattgcattatatattggaaatctaacatgggttggagcagaaagaaacgtgctcatctttgacctggg

SEQ ID NO: 514106 - DNA, 83 bp, Homo sapiens
tgagaataaggctgaacctggaacacatttatgcattgatgtggaagatgcagttacccatgcagttgttactgtaccagcct

SEQ ID NO: 514107 - DNA, 82 bp, Homo sapiens
ctaaaaaccccggagtcttcctgatccatggacccgatgaacatagacacaggtgctgggtcttcagctctaaagaggccat

SEQ ID NO: 514108 - DNA, 97 bp, Homo sapiens
ggcaacttcgcacggggcaccggcgtcattcagctgtacgagatccagcacggggacctgaagctgcttcgggagttcacagacattgggaccttcg

SEQ ID NO: 514109 - DNA, 75 bp, Homo sapiens
gcctgttctcatcaccatggcaacagactactccaaaggattcggcgggaagtatggggtgcagaaggatcggat

SEQ ID NO: 514110 - DNA, 100 bp, Homo sapiens
cgtcattgtcacctcctgtagtggagcagatcatcacctccatgaagtgcatcatggggcaggatggcaccagccttgaagaaaaagtcagcactttttg

SEQ ID NO: 514111 - DNA, 100 bp, Homo sapiens
gtccatgaccctgaaggtccaggagtacccgaccctcaaggattatggtttatggcaactatttcgtactttggagcttcctctgataccaattttggca

SEQ ID NO: 514112 - DNA, 50 bp, Homo sapiens
ctgctaacagaactggaccttttcgagtgctgcagcagctcccagtccag

SEQ ID NO: 514113 - DNA, 98 bp, Homo sapiens
aggcaacgtgttggaccttccggagcttctcagaagacagagggttttcttttgaggtaattaataatgcttgtgctactcaagccatagtgagtgtg

SEQ ID NO: 514114 - DNA, 82 bp, Homo sapiens
cctggaccttctggattacaggccaaattagcaacatatgggtgattttggaagcattcatagacccggaattgttgttgac

SEQ ID NO: 514115 - DNA, 98 bp, Homo sapiens
ggccctggacacagcaatatctctgggctttcacagacaagagaacaatgccctggacatggctccagagatccacatgacaggcccaatgtgcctca

SEQ ID NO: 514116 - DNA, 100 bp, Homo sapiens
gcgccagatagaaaacggcgagagtgggcgagaacgtccactgcgggccggcgaaagctggttttgacctgtagcagagaaccaattctggagaacagcc

SEQ ID NO: 514117 - DNA, 75 bp, Homo sapiens
tcggacgcgtcttctttcaggctgagggtttcagtgttgactggtgggctcttggagtgctcatgtttgagatga

SEQ ID NO: 514118 - DNA, 98 bp, Homo sapiens
gagcgggtccttcggagatatctacctgggtgtttccccccgggccggcctgccgtgacgatcacagccctgccgtctcaggtcacggttttggattc

SEQ ID NO: 514119 - DNA, 100 bp, Homo sapiens
ctcttttgtctgcccctattgtaagtgcagatggaacacaacagctgtgatgcagatccatccgccctagcaaaatatgttctggctttggtaaagaaag

SEQ ID NO: 514120 - DNA, 100 bp, Homo sapiens
tacaagctgaggatgctcaccaagccctgttggagactatgcaaaacaagtttatcaaggccctgccccttctggaaaacctaaccatttccgacattaa

SEQ ID NO: 514121 - DNA, 134 bp, Homo sapiens
gacattcttgggcatacgcagcccgcctggccggagctgtgggagtcctcagccccaagacccagcaggcgtctgaggtccgtagttcgtggtccttcgccggtgtccccggagcccagcggctgtggatggca

SEQ ID NO: 514122 - DNA, 82 bp, Homo sapiens
ggcatccttaccaaggaatctgcttttcaagtatgccaccaacagtgaagagaatgtgaaggctgtgtctgagactcctgca

SEQ ID NO: 514123 - DNA, 100 bp, Homo sapiens
aatgatggacttcaagaaagagacagaatggtccgagcatgcattgccattatctgtgaactagcaacaattgagtcacttcaaaaggagttcattgaag

SEQ ID NO: 514124 - DNA, 75 bp, Homo sapiens
ttcaagattgccagatatcccaggaaagtggagtgcctctttagatgtagagcctatctacacatttagggccca

SEQ ID NO: 514125 - DNA, 100 bp, Homo sapiens
gccagatgtacatcaaggcctccggcagctatgcagaggttgacggatatattcagacgttacgacacggatcaggacggctggattcaggtgtcgtacg

SEQ ID NO: 514126 - DNA, 98 bp, Homo sapiens
ggagccgctgtcctcgtccccagcggtcccgcccaacgcccgactctgccaactgagctgcatttccttcccacctaaggaagagaagtacctccagc

SEQ ID NO: 514127 - DNA, 97 bp, Homo sapiens
ggacgagacatcactggctacacatttccagcaggctgcagatacgagtggacaagaacgagcatccggcacccttgtgcatgtaccctacaatgac

SEQ ID NO: 514128 - DNA, 100 bp, Homo sapiens
ggcgtccgcgacgcagctgttcacgcttagttacatggacacagaacagtatgaagaagcagtacgagactatgaaaaagtataccagacagagaaaaca

SEQ ID NO: 514129 - DNA, 80 bp, Homo sapiens
agaagaagccaaaaacattctggggggatatgagactttctactcggaatatcctgagtgttgcgtggatgtaaaaccca

SEQ ID NO: 514130 - DNA, 75 bp, Homo sapiens
aggcctgtgacgaaggtgctaccatcgtgagagtaagtattggtaaaggttttcaaggtgtcatgaaaagatggg

SEQ ID NO: 514131 - DNA, 98 bp, Homo sapiens
gagaatttatcacaatggttgtatacaagactgatgggaaaaaagtttattacccaggaagtggttacctggaaggaaaggagctgcagaacttgatc

SEQ ID NO: 514132 - DNA, 100 bp, Homo sapiens
gggagggctggccaacttctgctacagacgactcacccgtgatgctgatgagcgagagaagtggatccatgccttagaagaaacaattcttcgacatact

SEQ ID NO: 514133 - DNA, 110 bp, Homo sapiens
cttccttctcatccttttccaccagctaaaggcaatgtgcagaatatacacaaggaagataaacctttaagtctgagtatgcctgtaattacagaagaagaagagaatga

SEQ ID NO: 514134 - DNA, 100 bp, Homo sapiens
cgagaacagagaagggagctctatagtcggagtggagaactgcaagtttcagctcaaattctcaagagcaaccttgcatcaatggaacaacaaattgttc

SEQ ID NO: 514135 - DNA, 99 bp, Homo sapiens
tttctcttttgtctgcccctattgtaagtgcagatggaacacaacagcattccatattggaagaagagatttctacacatgaaaaaaatgcctttgttt

SEQ ID NO: 514136 - DNA, 83 bp, Homo sapiens
cggccttcatcgacatcagtgaagaagatcaggtgagaagccctaccactgcaactgggacggctgcggctggaagtttgcgc

SEQ ID NO: 514137 - DNA, 75 bp, Homo sapiens
gcggggtgcgccggcagaggatccagtgttcaccatcctggccccggaagatcaggatcctcatgaccagccaaa

SEQ ID NO: 514138 - DNA, 100 bp, Homo sapiens
ggcgcgacgacggctcctgggaggtcatcgaaggctaccgggcccagcacagccagcaccgcacgccctgcaagggagattgtggtggtgccatgcagca

SEQ ID NO: 514139 - DNA, 54 bp, Homo sapiens
tgaggcctccccagccatgtggagcttcccaatatcatcaccagatgagaatat

SEQ ID NO: 514140 - DNA, 100 bp, Homo sapiens
agaggtctcggacgtggccatgaaagtactcaacagcatcgcctacaagtttgtgatggacgcctctgaccccacccagctctctgcatcctgtgtgcag

SEQ ID NO: 514141 - DNA, 101 bp, Homo sapiens
ttgcttttcctcgctggggtgtacggaactgcaagcacatgttgaccagataactgaaatggcagcagtaatgaggaaagccattgaaattgacgagcaac

SEQ ID NO: 514142 - DNA, 90 bp, Homo sapiens
gaagaagtgcccgtccacgcacagcgaggagttcctactgactatagctacttgcctgaaagcagttttattggagcagctattggcttc

SEQ ID NO: 514143 - DNA, 75 bp, Homo sapiens
aatcagcttctctcattttctttccctgcaccaactagcaggcaaggcactgacgtttcttctgctacagcctcc

SEQ ID NO: 514144 - DNA, 101 bp, Homo sapiens
agaagagctagcagccaatccggccatgctcgaagccagctctgcagctcagccaatcagtgacatcattgttcaactttgtggggaaacttttgggtcca

SEQ ID NO: 514145 - DNA, 50 bp, Homo sapiens
tggagcctttggtgttgtctggtcctgaatctgtgcctccttcccttctt

SEQ ID NO: 514146 - DNA, 74 bp, Homo sapiens
tccagtaatggtggatgaagttgttcattgtttgtcaccacaaaaaggacagtttgcctatctggggcgcctgg

SEQ ID NO: 514147 - DNA, 100 bp, Homo sapiens
ttcttccttaaaggaacagaaggccgggaaagggcctttaaacagtcttcaatgaaatttatccagtatggacttactcttacctggtgctactgtttcc

SEQ ID NO: 514148 - DNA, 100 bp, Homo sapiens
gccacgcgggcgagcggctgtgtggatgtcggcgaagccgcgggcgagactgggacagggagaaattacttgaagcttggatgtccaacccggagaactg

SEQ ID NO: 514149 - DNA, 100 bp, Homo sapiens
cctcggagcgcggtccctgtattggtctcctgctcctagaggactggtataattcaggaaaaccttgtgtgttttggctgtcaggtttctttttcactca

SEQ ID NO: 514150 - DNA, 75 bp, Homo sapiens
taaggagccatggagaaaaatggatcttaggaccattgccctcttgaacatttaccgtaaccctcaaaactcttc

SEQ ID NO: 514151 - DNA, 75 bp, Homo sapiens
tcaccctcccgagttgaaaaaacatttctcttgggaagttgtgcatctgacaggaatatagtactgtacgatatg

SEQ ID NO: 514152 - DNA, 100 bp, Homo sapiens
aagacttctctacatggcaatagatggagtgaaactaattctgaagcaagcccttatagttgtgctgcagtggtgtttcaatcacaattttagtgttcga

SEQ ID NO: 514153 - DNA, 113 bp, Homo sapiens
ggcgcgcggcgccgccacaagttgcgctgctcgcgacgaggataacaaagccattgacctttgccgattgtgttggggacgaacttcctttaggatgggaaaccgtatatgat

SEQ ID NO: 514154 - DNA, 75 bp, Homo sapiens
ccttattacgccgtctccaagatgtagctaatgaccgtggttcccactgagcacttttccagccattaactccag

SEQ ID NO: 514155 - DNA, 100 bp, Homo sapiens
ctttccaacacagatgtccaagctgccaaattggtccagaaaagggcgtggtgcacctggcgacagcggccgtcctaaacgcggtgtgggacttgtgggc

SEQ ID NO: 514156 - DNA, 73 bp, Homo sapiens
gtccttacgtgacctaaagctggagtattttgagattggagaattaagaaccgagattaagcgtagctcctga

SEQ ID NO: 514157 - DNA, 75 bp, Homo sapiens
ggcgctttacagggatgtgatgttggaaaactattgccacttcgtatctgtggatggagcagcatattgtatggg

SEQ ID NO: 514158 - DNA, 101 bp, Homo sapiens
aaaacaggatcagtaaagaaggaaaaagcagtaaagccagaggaagatatggaagaaagtagcagtgttgccatgttggtgccagatattggggaacagga

SEQ ID NO: 514159 - DNA, 128 bp, Homo sapiens
attttgaggacacttgtggagagctcgaattccagaatgatgaaattgtgtgactctgacatcattagaagcatgccagaacagactggtgaaaagtaaaccttttcacctacaaaatttcacctgca

SEQ ID NO: 514160 - DNA, 75 bp, Homo sapiens
ctttgaagatgtctgtgattatttggactgggagattactgaagatttcattgctacatatcaggccaattatgg

SEQ ID NO: 514161 - DNA, 95 bp, Homo sapiens
tacgaaaaagccctggtggagctgaaggttgcaggcgcagttgtgtagcagttgagtaatgctggttagctgttaaggtggcgtgttgcagtgca

SEQ ID NO: 514162 - DNA, 100 bp, Homo sapiens
ggccggggaccctgccagcctggacttcgcgcagtgcctggggtactacggctacagcaaggcccagcctccgttatcagcaatgatgatgactctgcca

SEQ ID NO: 514163 - DNA, 98 bp, Homo sapiens
gacagtccctggatcaccgacagcacagacagaatccctgctaccactgagatgagtgaactgagtgtggcacagaaaccagaaaaacttttggagcg

SEQ ID NO: 514164 - DNA, 82 bp, Homo sapiens
agaaaggtctctacaggtccctcctcgttagtatagtggttttgggatttgagattgacgcggtgaactctgtccagttttc

SEQ ID NO: 514165 - DNA, 83 bp, Homo sapiens
gcctttctctcagtcgtgagggaggcgtcgacggcgtgcgacctgcctagagctggaacgttacctccagagcgagccctgct

SEQ ID NO: 514166 - DNA, 98 bp, Homo sapiens
ctgggaaactcagcctgtgaccccagcgtgggtgaagataggatcaagatggccatgtggcagggagtccaatgtgctgattgctgctaacagtcagg

SEQ ID NO: 514167 - DNA, 83 bp, Homo sapiens
ggggcatcagtgatgggactgagtactggattgtccggaattcatggggtgaaccatgggttttaaaatcaaagatgggaaaa

SEQ ID NO: 514168 - DNA, 90 bp, Homo sapiens
ggatttgcttttgtcacctttgaaagcccagcagacgctaaggatgcagccagagacatgaatggaaagagctccatgaacctgcctcca

SEQ ID NO: 514169 - DNA, 90 bp, Homo sapiens
aacaatcactagcttgtccagagcatgctcatgtcttcatccagccctggagcatcttcatgatacagttaagaggaatcttgacagcgc

SEQ ID NO: 514170 - DNA, 83 bp, Homo sapiens
gtagctcacaaggacattgctaactggagtgaagtgcaaccagtggtctgaggaggcttctatggtgtttcgaaatcatgtgg

SEQ ID NO: 514171 - DNA, 100 bp, Homo sapiens
ccccgctcaatggcgactccctcaccgagtacgaagcgggcgtttgcgaaggtaaaatgtcggttccaggaccttaccaggcggccactgggccttcctc

SEQ ID NO: 514172 - DNA, 100 bp, Homo sapiens
aatacgaacggaggaccctatcatgtgaacttcaaaactgaaggcagcaggtttcaagtatgcagtggaactgatgaagaccctgatgataaaaacgcac

SEQ ID NO: 514173 - DNA, 75 bp, Homo sapiens
gacggagtctacgccatcgtggccacgcttctcatcctggacatctgctacgagttccagggagctctgtcctgg

SEQ ID NO: 514174 - DNA, 97 bp, Homo sapiens
ttggatgtcaatgatgatttttctgaggaagtaaccaaacaagaagacctcatgagagaggtaaccatgtgcgaccgaaaggccgtgatcaaaaatg

SEQ ID NO: 514175 - DNA, 100 bp, Homo sapiens
aaggaatatattactccagcccaaattagtaaagaaatgagagatgagctacatgtccgaggtgaagagtcaagtaccattggccaggatcaaacgctta

SEQ ID NO: 514176 - DNA, 88 bp, Homo sapiens
gttaccaagaggggattgatctgctcctgcaggttctgaaagtccttggatagctggggcacctctgaagatgctgacgctccttcta

SEQ ID NO: 514177 - DNA, 74 bp, Homo sapiens
gccgtccttatctcatcaaagccaggctgctttattgcaggtgctgatatcaaagtggtggacatgacaacaga

SEQ ID NO: 514178 - DNA, 100 bp, Homo sapiens
gccatgctccagctgacaacaggaggagaaacccagcagcagattcaagcagctatgggattcaagattgatgaccatggacctgcactcttgtccgaag

SEQ ID NO: 514179 - DNA, 75 bp, Homo sapiens
gaagacgtcgctgctgatggtcttcgccgatggggccttccccgagggaacccaccaagaccaacctggtcacat

SEQ ID NO: 514180 - DNA, 83 bp, Homo sapiens
cgaggacagcgcgtgcccgcgaggagccgccgcgcgcccgcgccctccgcgcgacgccagggggatatgagactttctactcg

SEQ ID NO: 514181 - DNA, 75 bp, Homo sapiens
gtttgtaggtcgtcagaaagaggatgagcacaagcctgggagatggcagtgatggaaatggcctgcccaggtgcc

SEQ ID NO: 514182 - DNA, 100 bp, Homo sapiens
gaagcgcgaagagccgttagtcatgccggtgtggtggcggcggcggagactgcgggcccgtagctgggctctgcgagattattgctcccccagagcggaa

SEQ ID NO: 514183 - DNA, 100 bp, Homo sapiens
cagacttttcagtattgtaagaccaagaagacttctctacatggcaatagatggagtgaaagcatgtacctacatcagatctaaccttgatcccagcaat

SEQ ID NO: 514184 - DNA, 100 bp, Homo sapiens
tccaaagttaatgccaagaagcagccgccagttgggatcaaatgtgagcctatggatcaagggaaacccccatcagcacctccccctgactcacaaagca

SEQ ID NO: 514185 - DNA, 100 bp, Homo sapiens
ggtggtgcctctggcagtgacgaggacgaagtgtccgaggactcacaccacccggcaagaactgctcactacggctccctgccccagaagtcacacggcc

SEQ ID NO: 514186 - DNA, 82 bp, Homo sapiens
accaaggaaaagctggcacagaccgccacgggtgagaagccctaccactgcaactgggacggctgcggctggaagtttgcgc

SEQ ID NO: 514187 - DNA, 100 bp, Homo sapiens
agcccagaattcccacgtgtactggccatggccaaggacatcctgggtgaagcagggctacactttgatgaactgaacaagctgagggtgttggacccag

SEQ ID NO: 514188 - DNA, 46 bp, Homo sapiens
gtccccgctgctgtgcattggtttttggctttcacccccaaccagt

SEQ ID NO: 514189 - DNA, 101 bp, Homo sapiens
ataaagttatccaggagccacaaagtgagtacaaaacgtttaattgtggatgtcatccggttccagccaggagagaccttgactgaaatcctagaaacacc

SEQ ID NO: 514190 - DNA, 98 bp, Homo sapiens
aaaagaccaacccttgagggaagagaattatctctaaggacagtcattttgtttactcattcagccctgttgcaggtcccaataaactcttcataagg

SEQ ID NO: 514191 - DNA, 101 bp, Homo sapiens
gttggaagcagagcggtttgagaacctccgagagattgggaaccttctgcacccttctgtacccatcagtaacgatgagactgttggcaagagtagcaaga

SEQ ID NO: 514192 - DNA, 100 bp, Homo sapiens
ccgaatcgcagggagtcgccgctggagaggggctcggcgcccggcggggactgcagattatgccaagggctttggtggccagtatggaatccagaaggac

SEQ ID NO: 514193 - DNA, 101 bp, Homo sapiens
gccttctccgaggcgcagaagtggattgagtacctggagtagaacagaaaaattattatgtctgtgttcccttgggactcattggaaattgtacagtgaca

SEQ ID NO: 514194 - DNA, 83 bp, Homo sapiens
ttggcccttgttcccccaaatgtctgactctgactctcggactgagaaacgcaaggtaccgaagtgagaaggtgacaatcagt

SEQ ID NO: 514195 - DNA, 112 bp, Homo sapiens
cgggaggatgaagttgattgactatggtctctccggctaccaggtcaaaatgcagatcttcgtgaaaacccttaccggcaagaccatcacccttgaggtggagcccagtgac

SEQ ID NO: 514196 - DNA, 75 bp, Homo sapiens
ctctcggttgcacaataaaccgacgtttagccagtggcactgctgagctatttgcaacctgtgccaagaaggata

SEQ ID NO: 514197 - DNA, 80 bp, Homo sapiens
caccatgtcagacgcagccgtagacaccagctccgaaatcaccaccaagtttgttccgatacaagcacccgtctgaggag

SEQ ID NO: 514198 - DNA, 100 bp, Homo sapiens
ggtggttacaaccgcagcagtggtggctatgaacccagaggtcgtggaggtggccgtggaggcagaggtggcatgggcccaatagtattaagaatgatga

SEQ ID NO: 514199 - DNA, 98 bp, Homo sapiens
gaaaaaaaatgaaaagagagaaattaaaggagatgaagaaaagcgtgcaatgctgcaaggagctgtacctccaaccagttcagttcctcctgttgccg

SEQ ID NO: 514200 - DNA, 100 bp, Homo sapiens
cccccgcaaggtcaacctgggagtgggaggtaacacgtacacagacctctcggccggaatctccagggatgaccagcccctccccacgcatccagataat

SEQ ID NO: 514201 - DNA, 96 bp, Homo sapiens
ctttaagacgaattaaagggagattacacagaagcaaaagccttgatagcatggatttctgtgagctcactggcaagtgtccagagaatggctggg

SEQ ID NO: 514202 - DNA, 100 bp, Homo sapiens
cccaggcgcggatggcgaggccagcagaaggatatggccctgaagccacatgagcggaaggagaagtgggagcgtcgtctcatcaagaagccccgggagt

SEQ ID NO: 514203 - DNA, 100 bp, Homo sapiens
gttttgccaggtgtttgttaccttggttggatggcaagcatgtggtgtttggcaaagtgaaagaaggcatgaatattgtggaggccatggagcgctttgg

SEQ ID NO: 514204 - DNA, 80 bp, Homo sapiens
cggctcgcggggcccggcgaagggcagcccagaccagaagagttccaccagcgatccaacgtcacactcactctacgcaa

SEQ ID NO: 514205 - DNA, 75 bp, Homo sapiens
ggcctccccagccatgtggaactattccaactccacagagtgaccagagagaggacgtggctgaagacaccaaag

SEQ ID NO: 514206 - DNA, 82 bp, Homo sapiens
ccgagaggtaccgggggtgacagctccgggaccggccgaaaggcgaggaaccgagacacctatggctgccgatgaaggctca

SEQ ID NO: 514207 - DNA, 82 bp, Homo sapiens
gcctcccgagtggctgggattacaggatactagttccacacgtgctcccgggaaaaccctgccagaaataagccgaattagc

SEQ ID NO: 514208 - DNA, 100 bp, Homo sapiens
caggaggagggtgagcggtcaagagacctccaggaagagcggctctcggctgtttgcatcgccgatagaggtggttgatttgctgagatatttttcctgg

SEQ ID NO: 514209 - DNA, 99 bp, Homo sapiens
attaccgtatgcagtcccccaggatacagggtcaaaggagagcacaaccatcgcagttggaagcccatggggcaggtgctgttgggaacacagaggaag

SEQ ID NO: 514210 - DNA, 82 bp, Homo sapiens
aaatgctggagtacctgtccctaacgttcttgatctctgtgaagattcaagtccagaacacatattacataatggagccggg

SEQ ID NO: 514211 - DNA, 100 bp, Homo sapiens
cttgtacagggacgtgatgttggagaactacaggaacctgctttctctcgatgaggataacatccctccagaagatgataccatctatgatgaagatgag

SEQ ID NO: 514212 - DNA, 100 bp, Homo sapiens
cccaacatcctgctcctgctcatggacgacgtacatgtactggacagactggggtgagacgccccggattgagcgggcagggatggatggcagcacccgg

SEQ ID NO: 514213 - DNA, 90 bp, Homo sapiens
caaggtgaagaggataatgagcatgttgttccactggctaacttaaaaccagttacccaagtgatgtctgttcctgcctggaatgctatg

SEQ ID NO: 514214 - DNA, 113 bp, Homo sapiens
cacagacctgaaggatctctcttctcatcaattgaatgagtttttagcacagacgctccagagggtggacccccaaaagtacaagggcatatttaacggattctcagttacac

SEQ ID NO: 514215 - DNA, 82 bp, Homo sapiens
cgctgcctttggcagcctaccagcactacatcctggccaaggctggtaatcctggtggacctggacctggtggtcgaggaag

SEQ ID NO: 514216 - DNA, 100 bp, Homo sapiens
gcccaggcttcttctccagccgcctccactgtagggacatcgaacctcaaaggctttgggaacgatcactgcagtgcctgtcacgggtcctcaggtcagc

SEQ ID NO: 514217 - DNA, 90 bp, Homo sapiens
cctactcttgttcgtctgagaaaactgaagtttgccataaaagttgatggagattacctttggccaaatgggcggactgttgaagtggct

SEQ ID NO: 514218 - DNA, 75 bp, Homo sapiens
gcctcccaaagagctgggattacagtctcttccagttgcgcctcttctccttggtggtcttcttaagcaacagac

SEQ ID NO: 514219 - DNA, 90 bp, Homo sapiens
ctggccgtgtggctccagagtctgaccgcctcccgcggaggggtggccgccgccgaccgtgctggagaatctggtaaaagcaccattgtg

SEQ ID NO: 514220 - DNA, 98 bp, Homo sapiens
tcgaattacagctgctagccaggaacatggactgaagtatccagcgctcattgggaatttagttaaggtggtgtcatttgtgaagaagaatgttctag

SEQ ID NO: 514221 - DNA, 75 bp, Homo sapiens
gatgcctttgttcaccgccaaccccttcgagcaagacgtggagtggagcctttcaggctggcatggagagcttaa

SEQ ID NO: 514222 - DNA, 101 bp, Homo sapiens
tggactctctgccacatcgttcggttcccacaacagcctgtaccatcttcctcatgggaccagtgaaacagctgaagcgaatgtttgagcctactcgtttg

SEQ ID NO: 514223 - DNA, 82 bp, Homo sapiens
ctgagcggcgagtttccgatttaaagctgagctgcgaggaaaatggcggcgggagcaatggctgccatccggaagaaactgg

SEQ ID NO: 514224 - DNA, 98 bp, Homo sapiens
tctggctggagcaattgcactcatcattggctttggtatttcagagaataacttgtctgactaccagtattcttggatgcagaagtgctgaagatgag

SEQ ID NO: 514225 - DNA, 75 bp, Homo sapiens
gtcctccgttagctaattaaaacatttttcagggacgtagccatccagagttggttagtctgctgctaattggaa

SEQ ID NO: 514226 - DNA, 100 bp, Homo sapiens
ggggacgagcaccatgtcgaatctgagcaaaggcacgggcagccggaaggacaccaagatgcggatccgggcctttccgaccactttacctgcattgtga

SEQ ID NO: 514227 - DNA, 75 bp, Homo sapiens
acacacccccagctcgaaccgcagcaccccagtctggatgtggatagtgaagctaagaaactattgggtttagga

SEQ ID NO: 514228 - DNA, 100 bp, Homo sapiens
gattccacccaaacttgctggtcactgggaggtgtggtacatggacggctatcacaacaaccgcttcgtacgtgagtacaagtccatggttgacttcatg

SEQ ID NO: 514229 - DNA, 74 bp, Homo sapiens
gctataaaagcacagttttaagagagatacaaagaagctgttgtagcttatgaaaatgcaaaacagtggcaaag

SEQ ID NO: 514230 - DNA, 98 bp, Homo sapiens
tgcatcccgtggccgactcttctcctgcggggtgctggagaatctggtaaaagcaccattgtgaagcagatgaggatcctgcatgttaatgggtttaa

SEQ ID NO: 514231 - DNA, 75 bp, Homo sapiens
aatggaaaatcgcttggttaaaacctgacacttttaacagtgaaaatgcctcgtgtaaaagcagctcaagctgga

SEQ ID NO: 514232 - DNA, 75 bp, Homo sapiens
tgtcaacagctacacacgtgtgcccccactggattatatgcgtcaggcaggagaagtgacttatgcagatgctca

SEQ ID NO: 514233 - DNA, 48 bp, Homo sapiens
ttgaaccaggtcatgctccaaatgtgaagccaaaaaccttccctctta

SEQ ID NO: 514234 - DNA, 138 bp, Homo sapiens
aatgaagcagccgatcatggcggatggcccccggtgcaagaggcgcaaacaagccaatcccaggaggaaaaacgtttttacagagtcaagaggatcctatgaatttcccactgggttaaaaatatgacacaatccaag

SEQ ID NO: 514235 - DNA, 98 bp, Homo sapiens
tgacaatgaaaccgggaggaaagaagacaagagagaacgcaaacagtttgaagctgaggattttggggctgaagaaccgaaactaaaatgggaacaca

SEQ ID NO: 514236 - DNA, 82 bp, Homo sapiens
cgaagcctaaattccaggaggcagcctcccgcgacgatgcccctcaacgttagcttcaccaacaggaactatgacctcgact

SEQ ID NO: 514237 - DNA, 74 bp, Homo sapiens
gaacgattgggctgagcagaggacgacatgttgcttttcgtggaggacaaattattggattccagcacagtgac

SEQ ID NO: 514238 - DNA, 98 bp, Homo sapiens
tgaaactgtgtgagaagatggcccagtttgatgagggccgcggggtgaagattgcccgtgccctggtgggcaccttcatgtcagcactggagatgcct

SEQ ID NO: 514239 - DNA, 50 bp, Homo sapiens
agaccagcctgggcaacacaatggagtctcgctttgtcacccaggctgga

SEQ ID NO: 514240 - DNA, 90 bp, Homo sapiens
cggacggccggcgggggcggcgtgcggcctagcgtctcaggtgcccgcctggctgggtgggtgagcggtgtcagctggaggacccctgtc

SEQ ID NO: 514241 - DNA, 100 bp, Homo sapiens
ctggacaaacagatatccagatgctaaaatggacccaatgaacatctgggatgacatcatcacaaatcgaattggtagggtgcccccctttttcacagag

SEQ ID NO: 514242 - DNA, 97 bp, Homo sapiens
caggctctgatgctaggcagctttatgccatgaaggtattgaagaaggccacactgaaagagccatgagaccccagatcctgctgctcctggccctg

SEQ ID NO: 514243 - DNA, 80 bp, Homo sapiens
gttcaagcgaaaacatgaccgctgagcccatgagttttcggctttgtgagaaaccttaccatcaaacacgatggccagca

SEQ ID NO: 514244 - DNA, 50 bp, Homo sapiens
gcgagccgccgacccgccgagcaaaatgatttatcagcaagactgttgaa

SEQ ID NO: 514245 - DNA, 80 bp, Homo sapiens
ctggaaggtgcgtgtggggctgggtctcggagtgggagacgtggagtgcagtccacctggaaggccgctgtggtggaagg

SEQ ID NO: 514246 - DNA, 83 bp, Homo sapiens
cgctttgatttacagcagctgcagggagaagaagtgggtgactgtgggtgacacgtccctgaggatatttaagtgggttcctg

SEQ ID NO: 514247 - DNA, 82 bp, Homo sapiens
gggcaacttcgcggtggtcaagcgggccacgcacctcgtcaccaaggccaagattgagatagagagaagcctgtattcagac

SEQ ID NO: 514248 - DNA, 97 bp, Homo sapiens
tagcatagcaacttcggatttcactctacccggagagtttcccgcttggttgaacacattggcctcaggaaggggcagcctcacctgggcatggcat

SEQ ID NO: 514249 - DNA, 50 bp, Homo sapiens
cgggactctgaggaaaagctcgcaccagcatttgacattgtgcagcaaag

SEQ ID NO: 514250 - DNA, 100 bp, Homo sapiens
gatggcagtgggggctcccgtggcaaaagagaaggaagtgctagcggtgggtgataaaagaaaatgtggctgaagttacccgaagttcagcttgcagtgt

SEQ ID NO: 514251 - DNA, 133 bp, Homo sapiens
ataattccaggtggaattgctgatagacatgggggcctcaaacgtggagatcaactcctctctgttaatggagtgagagaaaaggaacagttccgtaagctctttattggtggcttaagctttgaaaccacag

SEQ ID NO: 514252 - DNA, 76 bp, Homo sapiens
cctggagtgaggaggcgtcttcctttgcatgtcagggacccgagctgatccagaaagccaacggtctccacggctt

SEQ ID NO: 514253 - DNA, 82 bp, Homo sapiens
attacattacccaatggtggaatattgtatacctaattggcagagggggtcgatttgggaggaaaggtgtggctataaactt

SEQ ID NO: 514254 - DNA, 51 bp, Homo sapiens
ctgagactcccctaaaggccagaaaggaattatgggcccaccgtgttagtg

SEQ ID NO: 514255 - DNA, 75 bp, Homo sapiens
ggggtccggactgcgagatggaggaggggcggcgctgcggccacccggcagggtcccgggattcttgagctgtgc

SEQ ID NO: 514256 - DNA, 89 bp, Homo sapiens
gtctgagtggatggggacctgcctgctgggttctccaaaaaatgtggaatcctttgcatctatgctgagacattctcctcttacacaga

SEQ ID NO: 514257 - DNA, 100 bp, Homo sapiens
ctttaaagaaggcaaggagagaatgtatgaagaacagtcacaggacagaatcgcctaccagaggaatgacgatgatgaagaggaggcagcccgggaacgg

SEQ ID NO: 514258 - DNA, 100 bp, Homo sapiens
ggggaagttgctgcgctctgctcggtgtcgtggcctcgcagatgattatggtgacaagctgaacatggagctgagtgagaaatacaagctggacaaagag

SEQ ID NO: 514259 - DNA, 74 bp, Homo sapiens
gtggattcaggcgcttccgagcctcacctttattctctcagcacactgcaggccacatccgcatctctgacctg

SEQ ID NO: 514260 - DNA, 91 bp, Homo sapiens
ggcaagagtaacagcagcgccgtcccgtccgacagccaggcccgggagaatctttcccagggaactccgatgaagtgttccaacaaaatga

SEQ ID NO: 514261 - DNA, 50 bp, Homo sapiens
gtccgatgatgtccctgcagggaagggcatgctgttgaagcgaagtggca

SEQ ID NO: 514262 - DNA, 100 bp, Homo sapiens
gagtggaagagaaaattgtgaactaaggccccctgcccccttttcctggtgcatgtgaagttatcaaaaacaggtttggtgcacctcgatttggaggaag

SEQ ID NO: 514263 - DNA, 100 bp, Homo sapiens
agtcgttcgacctgctgctgagcagtaaaacccctgtccctgccttacccagcaagcttcccacgtttggagccccggaacagttagtggatttaaaaca

SEQ ID NO: 514264 - DNA, 117 bp, Homo sapiens
gatgaccctgtcataaagaaaattgcccttcgggaaatccgaatgctcaaggatctagtgaaaagccatttgatgtatgcggtcagagaagaagtggaggtcctcaaagagcaaatc

SEQ ID NO: 514265 - DNA, 126 bp, Homo sapiens
gccgaaggcgcccaagcagcagctgccggagcccgagtggatcggggacggagagaacacgagcccatcagatggcgttcaggaagtggcttatattcactcaaaccagaatgtaattggatcgag

SEQ ID NO: 514266 - DNA, 80 bp, Homo sapiens
ttcctggattcaatgtcatccagagcccagagcaggtacaggtttgcagattccgccagcagcacagcaagctctacaga

SEQ ID NO: 514267 - DNA, 100 bp, Homo sapiens
ccagaggaggagatcctgggatcagatgatgaggagcaagaggaccctgcggactactgcaaagcattttgaaagcgaagcagaagccgtagaatcagcg

SEQ ID NO: 514268 - DNA, 58 bp, Homo sapiens
cgcgaccagaccggcccccccgaggcatgtgggcacattccatgacagtacaggatta

SEQ ID NO: 514269 - DNA, 83 bp, Homo sapiens
cagggcactgccacattgatacaggtcagcccaaggctgccccctcggtcactctgttcccgccctcctctgaggagcttcaa

SEQ ID NO: 514270 - DNA, 82 bp, Homo sapiens
gccgaggatgataaacacccaggacaggctaccaagcagtttctcgaagagattaacaagtggacagttcagtacaatgttt

SEQ ID NO: 514271 - DNA, 75 bp, Homo sapiens
tgacgctggagaacctggcacttatgtcctccctgggtcctcgatgggcttcctggaatattggtgtgtttattt

SEQ ID NO: 514272 - DNA, 127 bp, Homo sapiens
aggaaccagcctgtgaagatgggaggctcaaacccctgcttaatgatcaggattggtgtgtcgggatctcggccgctgggctgcgttcctttgcctgcaacaggggtcaagatgagttttgcctgac

SEQ ID NO: 514273 - DNA, 83 bp, Homo sapiens
gaaagcacggggtgaaactgaccacagtgctcaccacccaccaccactgtctctgctttctatccgtcaagatgataaagtcg

SEQ ID NO: 514274 - DNA, 127 bp, Homo sapiens
ctgtctgcctccccggctgattggattcgttactgctttgcaacgcgcacctaactccagatcgggcccgggacacccagacagatgagattgtcgcactgaagaaggtgcggatggacaaggagaa

SEQ ID NO: 514275 - DNA, 100 bp, Homo sapiens
taaagatggcggcttcctagtgagtcggcggctgatttagaaggaggttcaggctacggtgagccgaagggtctgggggtggtggcatctcccctaaagg

SEQ ID NO: 514276 - DNA, 100 bp, Homo sapiens
gcccaacaggccgccctgcagcggggccggggcaccgagcccccgcgcctgccgcgcctgctcccgccccagaccttaacacgtgaacagaaagaaggag

SEQ ID NO: 514277 - DNA, 75 bp, Homo sapiens
ccgaaattgacggacaagtcttcgactacgtgaccggtaaatcgggtccttcctcgctccaacatggtctacaat

SEQ ID NO: 514278 - DNA, 97 bp, Homo sapiens
ctcggattccttatgcagagtggccgacttgggtttggacagaggagccaaaggccaaatttccactttcagcagttttatttcagctgttagcccg

SEQ ID NO: 514279 - DNA, 83 bp, Homo sapiens
gacgaggttgacgggctgggcgtggcccggccgcactatggctgtctggccgtgggcctgggcttcggggcactggcagaggt

SEQ ID NO: 514280 - DNA, 82 bp, Homo sapiens
ttttggctctgcgtgagtgtggtctacgagctgtttctcatctttatactcttccagcggggatctgatgagcttctttctt

SEQ ID NO: 514281 - DNA, 98 bp, Homo sapiens
gtttctcgagggaaaggctgctgcctcctgctctgtcctcatccccggcttaggtgctggagaatctggtaaaagcaccattgtgaagcagatgagga

SEQ ID NO: 514282 - DNA, 100 bp, Homo sapiens
tgagaaaagcgagaccgcgtgcgaggaccggaggatttgacagctaaggatattgaagaaattattgatgagctcaaggctggcaaaatcccaaaaccag

SEQ ID NO: 514283 - DNA, 100 bp, Homo sapiens
ggacgccggagaactgtgcccattacttctgcctggactgcattgtcgaatggtccaagcacctggccacattcatcatggacaagagcgaagccatcac

SEQ ID NO: 514284 - DNA, 82 bp, Homo sapiens
aactgcccagcgtgaccagtggccacctctgcagtgtcttccacaacctggctgatgttctaatcatgtcagataaagatga

SEQ ID NO: 514285 - DNA, 83 bp, Homo sapiens
ggcactcaagtcctggctcagcaagactctcgagcccatcgaccccgataacgtggtgttgtgcctgctggcggcggacgagg

SEQ ID NO: 514286 - DNA, 75 bp, Homo sapiens
cgacacaaggcagcttcccacagcaggttggacagttcacagaacactctgctccagccaaggtggtgagggcag

SEQ ID NO: 514287 - DNA, 101 bp, Homo sapiens
ccagaggacttctggcctttggcacgtcctgctccgtggtgctctatgaccccctggttcagcagctggacatggagaaccaacgctcatcacctctgtcg

SEQ ID NO: 514288 - DNA, 96 bp, Homo sapiens
ctactccatcgtgggactcagcagccttggtgctcaggtgccagatgcaaaggtggatgggcaggtggtagcactgctggtacagaatctggagcg

SEQ ID NO: 514289 - DNA, 98 bp, Homo sapiens
tctggatttatgcaggaagtgccaactctaatttcttttatgccatcacactgaccttcaacgttgggcagctgataggaagatgtcttcaggaaatg

SEQ ID NO: 514290 - DNA, 82 bp, Homo sapiens
tattaaatatacgacacatccaggagtttattggagcgcagactgatggcgcaaaggaattttgtagccaccttggctaatg

SEQ ID NO: 514291 - DNA, 100 bp, Homo sapiens
gaggtctcctccatcaactccgacctggaggtgatgctgtggagtcttcaaaaagcccgaccactctggattacaaatttacaggaggatgaaacagaag

SEQ ID NO: 514292 - DNA, 75 bp, Homo sapiens
acagaaggccgacaccctgcacctggctgtgtgccgagcttggaagaaagtgtgacccgttcgacggaacaaagg

SEQ ID NO: 514293 - DNA, 100 bp, Homo sapiens
atatttggagttcttacaacatggcagacattgacaaccctgtatgatgagattcgtcagtttcgcaaggcctgtggggaggctcatcttaaaactatat

SEQ ID NO: 514294 - DNA, 100 bp, Homo sapiens
ataatcggaatgtgatcacagagcctatttacccagaagtagtccatatggaaacatgccctgaactgtcacagaatgaaaccagcgctcttcagcgtcc

SEQ ID NO: 514295 - DNA, 83 bp, Homo sapiens
cgctctttgcatcttaactgcagcacatgattaagtaccggtacatcccgttcacacatgggaagagaaggtacagaggcaag

SEQ ID NO: 514296 - DNA, 100 bp, Homo sapiens
cctctcctggatgttgatgagaaaaccgggaactcagagtcaaagaagaaaccgtgctcagaaactagccagattgaagagatggggtcttgctatgttg

SEQ ID NO: 514297 - DNA, 106 bp, Homo sapiens
aaggagaaattcgactatggcaacaagtacaagcggcgggtgccccggtaagactttgaccccgacgcaggcttcagtgattgccgcggatcagaagcctgagcac

SEQ ID NO: 514298 - DNA, 51 bp, Homo sapiens
gtggaggaatttattttctgggtcagatttatcgaggtgtgagagtcggag

SEQ ID NO: 514299 - DNA, 83 bp, Homo sapiens
cgggagcaggagctgggcctaggtctgcgccctggtccctgagtgccagaggtggtggtgttgcttatcttctggaaccccat

SEQ ID NO: 514300 - DNA, 87 bp, Homo sapiens
ttatcatcaataccgagataaattttccaaacacctgactctgtgtgtttttaccaaccatacagcctttctgagaaaagtctacag

SEQ ID NO: 514301 - DNA, 75 bp, Homo sapiens
ctacctttcccttggtgtgctctgggtggcccagatgctactggttgcagagcttgaagtgaaaaccagagaaaa

SEQ ID NO: 514302 - DNA, 100 bp, Homo sapiens
agggcccggccgacccgcggcccgtttgcttgcctaaactggacttgaagcaatttaaactactggagatctgccattttataatatcacaattggaaag

SEQ ID NO: 514303 - DNA, 74 bp, Homo sapiens
tgcccacgtcgagcgtgcccgagacccgaggcaggcccgcaagccgtgtgagccgtcgcagccgtggcatcgtt

SEQ ID NO: 514304 - DNA, 71 bp, Homo sapiens
gccgcacagctctacactttgcctcatgcaatggcaatgaccagattgatcaccggggaacccttgatccg

SEQ ID NO: 514305 - DNA, 100 bp, Homo sapiens
cgccaggccatatcttcaaagcccgtgagagatttttcagagatgtggtatggtgtattcctgtgggcactggtgtcttctctcttctttcatgtccctg

SEQ ID NO: 514306 - DNA, 75 bp, Homo sapiens
aaggatttcagcaacaatgcctctgttcaaactcccagcagcatctggaatcaagagacccatggcatctgaggt

SEQ ID NO: 514307 - DNA, 75 bp, Homo sapiens
gcgaggttgggctgccgtgctgctcggcggcgctgagaggagctgatcacgcagtacctggctgagcttcggaac

SEQ ID NO: 514308 - DNA, 75 bp, Homo sapiens
cactgggtcaccagagtttgagagagtatttcgggcacaggatggttttagattgtcatctcaagaagctgcttc

SEQ ID NO: 514309 - DNA, 51 bp, Homo sapiens
ggccctgcagagagaaacagagtctggagcccggcactgtggtcataacag

SEQ ID NO: 514310 - DNA, 100 bp, Homo sapiens
aaacagcaccgataaccctgacctgtgtctccatgcagtaaacagacccagcagaacctgcccgtggtgagctcagccaagacttggctctccatgttcc

SEQ ID NO: 514311 - DNA, 83 bp, Homo sapiens
gcgacaccatgtcatctcccagtccgggcaagaggcggatggacacggacgtggtcaagctacatttcaacaagattcaagat

SEQ ID NO: 514312 - DNA, 90 bp, Homo sapiens
ctcctgtaacaatttacgcgccgtgtaactgtgaatctttcaaagcctacaacacagcagtcccctcaggatgagcaggaaaagctcttg

SEQ ID NO: 514313 - DNA, 101 bp, Homo sapiens
cccaggatgacagagctgaggcagagggtggcccatgagccggttgcgccacccgaggacaaggtctgccatcatggatgttctcgcagaagcaaatggca

SEQ ID NO: 514314 - DNA, 108 bp, Homo sapiens
ctctacctcctgcgaggcctcccgggctccgggaaaactacactggccagacaatgcagatcttcgtgaagactctgactggtaagaccatcaccctcgaggttgagc

SEQ ID NO: 514315 - DNA, 100 bp, Homo sapiens
caggtggcctccttggtatgccaggacccctatggtgtagccgtgggtggaactgtggggcactgcctgtgcacgggattggcagtaattggaggaagaa

SEQ ID NO: 514316 - DNA, 75 bp, Homo sapiens
ggagaacatttggcaggaacaacctcattctaaaggaaaccactgattgcttgtgtggagaaacagctattagga

SEQ ID NO: 514317 - DNA, 100 bp, Homo sapiens
tctcctctttgggcagaagggagcctttggagttggacaagaacagatagacgcttttcttaagacgctgcgcagaggcctctccttccgatgaaaagag

SEQ ID NO: 514318 - DNA, 82 bp, Homo sapiens
ttctttcacaaaccttgtgtctcaatttggctacaaaaggatgaatttttagatgtgatctactggttccgacagatcattg

SEQ ID NO: 514319 - DNA, 75 bp, Homo sapiens
actgggcggtgccggcgccggagacgatgccgttcttcaaggttactgactttttatgatgtttggtggctatga

SEQ ID NO: 514320 - DNA, 88 bp, Homo sapiens
ccgctccaacactttcctcaacatcttccgaagaaagaaggcaggggcagggaatgccaaggcaggagcgatttggcaacatgacccg

SEQ ID NO: 514321 - DNA, 82 bp, Homo sapiens
ttacttcaagcagtggattaatctgaaaaagatcaccgaagtggccttggagtacaacaactgtcatggggaccaggtggtg

SEQ ID NO: 514322 - DNA, 98 bp, Homo sapiens
tgcgccgcgtcttcctcaaggtggggttcggggggccaccgaatcgctgtcacgccggcagataaaaatgaatgccatttcccatccagtactgaagt

SEQ ID NO: 514323 - DNA, 100 bp, Homo sapiens
cggaaacagtatgctacgtcattcaagttgtaaagtggcgatatttgcttgagatcttcttagcccagagagcagtggagttgagtgaggaggcagatgt

SEQ ID NO: 514324 - DNA, 128 bp, Homo sapiens
ttaccttagtgcagtttgccttttactccatatttggcctaatagaacttcagcttattcaggacaaaaggaggaggagttaaagaggattgcactgcctccatggaaccttcagcaattgaactccc

SEQ ID NO: 514325 - DNA, 72 bp, Homo sapiens
tatattatggctccagggctgttacatgcctacccgatcaaccctgaccaccccattgtggagacgctgcgg

SEQ ID NO: 514326 - DNA, 74 bp, Homo sapiens
cttgccaaaaacctttggacagtccaatgtcaacattgcccagcaagtggaccaaactcttacccaggatctac

SEQ ID NO: 514327 - DNA, 100 bp, Homo sapiens
gtgctggtccctgcgcaaggagggactccccgtgaacaacatcttccagcagatctcccccgtggtggtccatgctgtggacggcaccgccgagaacggg

SEQ ID NO: 514328 - DNA, 100 bp, Homo sapiens
cctgggtgaggatgaacaggatgactggatagtggtcagccagctcagatttgctaatggtcgttctactgggctgattttggacagtggagccactcat

SEQ ID NO: 514329 - DNA, 74 bp, Homo sapiens
gtcaacgaaacctggcacggctcttgcttccggaacttctgggtcaaccagttcagagacctgcttcttccaat

SEQ ID NO: 514330 - DNA, 100 bp, Homo sapiens
ctcaagcaagctacaggaaaatctgtgcttgaatgttcttgggatgagctttggaacaaagtccagcaggcccaggatttggatcacatcattgctgcac

SEQ ID NO: 514331 - DNA, 82 bp, Homo sapiens
gtttcttatatgtgatgccattccagcactggactcatggaggctgagcatttattcagatcagtccaaagtgtttgtgaag

SEQ ID NO: 514332 - DNA, 75 bp, Homo sapiens
gatttgttaaggattccaagtaactcttatttggactattcttgataagaaagagctcttggagtttgctcaact

SEQ ID NO: 514333 - DNA, 83 bp, Homo sapiens
aggaggggcaactgaagacggaggtgcccaaggtcagaaggaagcaccacacagaggaaaaatgccagctgtgggacaaggag

SEQ ID NO: 514334 - DNA, 74 bp, Homo sapiens
cctatatcatgcagagaaaagagatggaaacttacttgaagaaggctaaagaattacctccaaagccattgtca

SEQ ID NO: 514335 - DNA, 100 bp, Homo sapiens
gatgctgatggtgatggagattttgatgtggatgatgccaaagttttattagagctgcctgtaacatcaccattaggtattgctgtgattaaaaacttgg

SEQ ID NO: 514336 - DNA, 100 bp, Homo sapiens
ggaactatggatcttgaccccaaggatatattattttattccaagaaagatcagggacagcacgcaagattcaagaagtatgtggggcacagtgcacatg

SEQ ID NO: 514337 - DNA, 100 bp, Homo sapiens
cagcgggcccttggcgggggactctgagggaggagctggggacggcgaccctaggagagctttaccactcctgaaggccctaaaccccgttccagatgct

SEQ ID NO: 514338 - DNA, 101 bp, Homo sapiens
tacccctttgaattaattatggctgttgcaaaagcttctcatttcagagagatgccaggatcctaagtgcctgccaaacttaccaattctaaggaataagt

SEQ ID NO: 514339 - DNA, 100 bp, Homo sapiens
cgttggatctctggcggggtgcagaactgagcccaggccacagtaccctattcacgctctgtgcttgtgccaagaaaacccgcctagtgccaagcaaccc

SEQ ID NO: 514340 - DNA, 107 bp, Homo sapiens
gctgggtcccgccagacacgccgccgccgcaggtatcctgtggtctgaggccatcttcctcgaggcaaggccccagaggaggaccaagagcgtggatgccctgaaga

SEQ ID NO: 514341 - DNA, 100 bp, Homo sapiens
acacgcccactaaagcccagaagaatgtggctaccagcgaagaccttctctgatggatgacctctgtgaagcaaatggcacttttgccatcagcttattt

SEQ ID NO: 514342 - DNA, 100 bp, Homo sapiens
ctagagctttggaaggctgaatgcactaaacatgaagagcttgaaagcgaagttcaggaagagtgacgtgaccttgtacaaggactctgacatggaggac

SEQ ID NO: 514343 - DNA, 98 bp, Homo sapiens
tattccactggattgggaaagaccatggcaggatcacagtcaccttctatatagcaccatccccaggatgcaggagccggggcagattgtggagacct

SEQ ID NO: 514344 - DNA, 83 bp, Homo sapiens
ctttgactactggggccagggaaccctggtcaccgtctcctcaggtgctttgcaagatatcaccttgtcacagcagaccccct

SEQ ID NO: 514345 - DNA, 83 bp, Homo sapiens
tttcctctgctgccgctcggtcacgcttggcgtgtgctcgcccactgatatcggtgtactccgaaaagggggagtcatctggc

SEQ ID NO: 514346 - DNA, 82 bp, Homo sapiens
ccgaaactgtcaagattggcaagcctttagaagaagccacactctctgaattaaaaactgtcctcaagagcttcctaagtca

SEQ ID NO: 514347 - DNA, 75 bp, Homo sapiens
cagcaccaagtggcacaactgcgtggtgtccctcgtggccgttcacccctccaccgtcaacccgctcgggaagca

SEQ ID NO: 514348 - DNA, 88 bp, Homo sapiens
gagagattggtgtttttgtgaggcagtgagacctaaggagtagcactgtagatgggttaaggaaaagacccctcatcgtatttgatgg

SEQ ID NO: 514349 - DNA, 75 bp, Homo sapiens
atgtttaagaacatgacgccgtcacccttcctgcgattctacttaggactgctgcagatcaatgacaaaatcgcc

SEQ ID NO: 514350 - DNA, 50 bp, Homo sapiens
caaatcttgaagcacctctccagtagaaaacccctttggtgaaacatttg

SEQ ID NO: 514351 - DNA, 98 bp, Homo sapiens
tacagcagagaccttgagggatatctttcttcactcctcttcacttcttcagtaaaattgcggagttgctctctccgggctcagtggatccattgaca

SEQ ID NO: 514352 - DNA, 74 bp, Homo sapiens
gatttgttaaggattccaagtaactcttatttggatcgaggccatcaagctacagatggtcttacaaatggaac

SEQ ID NO: 514353 - DNA, 100 bp, Homo sapiens
tgcactccagcctgggtgacagagccaagatcaaggctcgagatcttcgcgggaagaagaaggaggagctgctgaaacagctggacgacctgaaggtgga

SEQ ID NO: 514354 - DNA, 51 bp, Homo sapiens
cgccatcgttgctgccttcttcgtcaaggcatctaataggattcaggaatc

SEQ ID NO: 514355 - DNA, 50 bp, Homo sapiens
tgaggagtccaacatcaccatgcagtactgtcccactgaccaggctgctg

SEQ ID NO: 514356 - DNA, 100 bp, Homo sapiens
cgtggatcctgctcaccttgggcttggtggcctgcgtgtcggcggagtcgtatcagcagcgtcgccagcaggagaatatgcagcgccagagccgaggaga

SEQ ID NO: 514357 - DNA, 127 bp, Homo sapiens
acctgtgcctcgagaggtattaggcagtgctacaagggatcaagatcagctccaggcctgggaaagtgaaggtacatctgtcactaacgtcactgcgaccgacgctgatgacccagtttatggaaac

SEQ ID NO: 514358 - DNA, 90 bp, Homo sapiens
gccaaagaccttaggagagacgagcagccttcagggagcgtggagacagggccgttgctccagggagaactgcaaatatcttcatccacc

SEQ ID NO: 514359 - DNA, 75 bp, Homo sapiens
gcaatggacttcggtgttctgcaccctggaggagaagaggttctgctggaacaagctggtgtagatgcaagtgaa

SEQ ID NO: 514360 - DNA, 100 bp, Homo sapiens
tttcaagagagttgtgctatgatgtggcaaaaggccaaacgtaccaagaaagtcgggatcgtcggtaaatacgggacccgctatggggcctccctccgga

SEQ ID NO: 514361 - DNA, 90 bp, Homo sapiens
cagcggctgaggaggggccccagcagcccccgaaggccctatcaggacatggagtatgaaagacggtcacagggattatggacccagaac

SEQ ID NO: 514362 - DNA, 75 bp, Homo sapiens
ctatatgaacaatccgtctggatcacggatgtaggaagtggaacagcatatgccatatatgagctggctgtggct

SEQ ID NO: 514363 - DNA, 82 bp, Homo sapiens
cgcactctggagggattctggcatcagggaggctttcagccggagaagcgagtttcagctgatgactgtccaagtgcctcca

SEQ ID NO: 514364 - DNA, 96 bp, Homo sapiens
ggatttgcttttgtaacttttgatgatcatgatacagttgataaaattgttggatgttccacacccctgggtatggaaaatggaaagatagaaaac

SEQ ID NO: 514365 - DNA, 74 bp, Homo sapiens
gccaatgttggtgctggcaaaaaggcagtcttcccgtgtcccagtgagcctgctctcagcaaaaacgagctgat

SEQ ID NO: 514366 - DNA, 98 bp, Homo sapiens
ttcgggtagggactcttccaatgaggctgctggccctggattatggagcggacattgtttactgtgagatcctctggaccttctccatctacctggag

SEQ ID NO: 514367 - DNA, 74 bp, Homo sapiens
cgatatctaatattacagctggaaatagggcacagatccaggaactttccgctgtactttttgccatacagagg

SEQ ID NO: 514368 - DNA, 100 bp, Homo sapiens
gggcagagccgtgcatggggctgctccccaggacctgagcaggaacctggagttttcagaataaccaagtgctgggaattggaagtggttctacaattgt

SEQ ID NO: 514369 - DNA, 75 bp, Homo sapiens
gtgagatgtttcatcccaacaagactaaggtgtcagtatgttcttcaagctgctctgctcctgggcccaagctat

SEQ ID NO: 514370 - DNA, 99 bp, Homo sapiens
gcctcagaagactagaaggaagttcctggccattcaggtgtcatggagaaactccagctgggcccagagattctgcagcgggaaaatccaaggcttatt

SEQ ID NO: 514371 - DNA, 92 bp, Homo sapiens
tttcctgcacacaaggtcgtcctggctgcctgcagcgactacttcaggaccaattctgactccgccctgcaccagagcacaatgacgcccac

SEQ ID NO: 514372 - DNA, 100 bp, Homo sapiens
ggcacactgggctctgcagcctcatcctacagccccctaggtttggtgcacctcgatttggaggaagtagggcagggcccttatctggaaagaagtttgg

SEQ ID NO: 514373 - DNA, 76 bp, Homo sapiens
tgctgaagaggacccaccgtgggctccacgttcttacttggaaaagggaactgcctcatatctctgcatgatttcc

SEQ ID NO: 514374 - DNA, 100 bp, Homo sapiens
tttactaactagccccagtggaccaggctatcatatcatgttgcctttcattactacgttcagatctgtgcagagtcaacggttgcaggaaagtttgaag

SEQ ID NO: 514375 - DNA, 82 bp, Homo sapiens
gtttactgggcagctgttacggtgtcagttgtacccgaggcgttctcagcagcagcaagtacctgtggtggatttccaggct

SEQ ID NO: 514376 - DNA, 100 bp, Homo sapiens
ctgtgcctgcttcgtgcctggtgtgacgtctctcaggatgcctgagccggggaagaagccaggctctgtgtgctccgggatggagcaggtgtgcagaggg

SEQ ID NO: 514377 - DNA, 100 bp, Homo sapiens
atggcctgcaagacggctatggcaccgagacctatgctgatggaggaatatatgcagaacatgtcctgcggcccaagaatcttggacttgcacatcagag

SEQ ID NO: 514378 - DNA, 50 bp, Homo sapiens
ctggacaagatgaagtctttctgccagggctgtaatccccttgcacaaac

SEQ ID NO: 514379 - DNA, 90 bp, Homo sapiens
aacgcagatcagaggtagtcggacctttcccgctggcgcgcagcctcagctaggttacattgattacccacctagtacaacatcttacgg

SEQ ID NO: 514380 - DNA, 83 bp, Homo sapiens
atcgcgtaccccttcaacgccaagcagcccaccgacatggcccggaggcagcagaagagtggagactgctgcacggactctgg

SEQ ID NO: 514381 - DNA, 51 bp, Homo sapiens
cgcaaacagtttgaagctgaggattttgctatcaagaattttaatggagct

SEQ ID NO: 514382 - DNA, 83 bp, Homo sapiens
gaggaggacgaggagagccggcggcgggaggccaaggtccgcgggagagctgtggggcttggtgagtgtttcgtggcctctcg

SEQ ID NO: 514383 - DNA, 75 bp, Homo sapiens
atttgccagacattatcagactggacaggtgaatgaaaactttgccattgatttgatagcagagcagcccgtgag

SEQ ID NO: 514384 - DNA, 89 bp, Homo sapiens
gatccagacgacctcctcaacttcaagctggtcatctgtcctgatgagatggcggctgcagaggctgtgcatcacatacacctgcagaa

SEQ ID NO: 514385 - DNA, 98 bp, Homo sapiens
ctggagagcctctctacaatgctgtgggtgtgctcagtgaaggaacggcatgccagtgaaatgagggatttgccaagtcgatatgttgaaataggtat

SEQ ID NO: 514386 - DNA, 100 bp, Homo sapiens
gaacccgggagtaggagactcagaatcgaatctcttctccctccccttcttggtgtgatgaatgcagactctgctaccattttggctgtttggatcctcc

SEQ ID NO: 514387 - DNA, 78 bp, Homo sapiens
ttattttctgcttccaaaggtccagagcattcagctgtctcaaatgcagaatgtgaaaacctttgcatcttctgatag

SEQ ID NO: 514388 - DNA, 90 bp, Homo sapiens
cagccttgttagggcgtggcctgaggcttggataagtggggaatttggtgcattgatgagcaattactctctccccccacccctgcccac

SEQ ID NO: 514389 - DNA, 99 bp, Homo sapiens
gttgtcgatgccgctgaatgggctgaaggaggaggacaaagagcccctcatcgagctcttcgtcaaggcgcccaattcccagatgcctacgggaaggag

SEQ ID NO: 514390 - DNA, 100 bp, Homo sapiens
cctgcaggtggaagtgatgaaggtggctgtacttttgatgatggtccaggggcctgtgattaccaccaggatctgtatgatgactttgaatgggtgcatg

SEQ ID NO: 514391 - DNA, 108 bp, Homo sapiens
aacagataactggcaaaggtgcttcggggacattccaggatttcctgtggatccacgaaaggtgctaatagtagctggccatcacaactggattgtagctgcatatgc

SEQ ID NO: 514392 - DNA, 100 bp, Homo sapiens
agttcccaattaataatgaagcaggttgctccttgagggcaggacagttcttatggctttatccgttgcgtaagcacagagaggtctgcgaggtcaaaac

SEQ ID NO: 514393 - DNA, 100 bp, Homo sapiens
atgtcagtggaggttttgatgcttcaacatctcaggcgtgagattcaacattttggggtgaaaatcagcatagttgaacctggctacttcagaacgggaa

SEQ ID NO: 514394 - DNA, 100 bp, Homo sapiens
gccatggctgctggaagaagtctcaaaaagctcccgactagtggccataaaatgcagtaaaaacaaatccagttcccaagaagctgtacaaatgctttct

SEQ ID NO: 514395 - DNA, 75 bp, Homo sapiens
ctcagagtcggtcggggaaggccacccaggttacaggaggttccagtggcatcgggaagtgcattgctatcgagt

SEQ ID NO: 514396 - DNA, 100 bp, Homo sapiens
cacagactcagcctcaggtagatggtttccgtagatggtggctttctttggacccttgacatcaaccagttactatttgtttcatgagacccttgaacag

SEQ ID NO: 514397 - DNA, 80 bp, Homo sapiens
gatatctacagcacctatcacttgttccctccaagacaactgaatggttattcagcttctcaaggctggaaaagcgaagg

SEQ ID NO: 514398 - DNA, 90 bp, Homo sapiens
gtgctgagtcagtgtgacagtccatatgtaaccaaatattatggatcctatctgaaggattatcattggcaatggcgttcattccttacg

SEQ ID NO: 514399 - DNA, 100 bp, Homo sapiens
caaggaagtgaagaaggcgcatcactcccagctgcgcaaagcttgcgaggtggcgttagcacatcaggtccacccatctggccgggcagtaccttcttca

SEQ ID NO: 514400 - DNA, 75 bp, Homo sapiens
ccctggaatggtctggggaccaatgagatggcagcggttaacgcttggatcacgagacagggtttcaccacgttg

SEQ ID NO: 514401 - DNA, 83 bp, Homo sapiens
agaaagaggaggtcttggaagtcctggtccaaagggtgacaagggtgatgctggtcccaaaggtgctgatggctctcctggca

SEQ ID NO: 514402 - DNA, 83 bp, Homo sapiens
gcgagaaggagcgcgagcttgaacgcagcgtgattggaggtggacacaaaggaagaggcagccagacagctacttcagcgtcc

SEQ ID NO: 514403 - DNA, 98 bp, Homo sapiens
tgcagccgtccttttggatttctttttaataatgtgtgacccttcacctttgatcccctgacctgcattaccttgaactgttccccctcatcttcccg

SEQ ID NO: 514404 - DNA, 73 bp, Homo sapiens
gaagaagtggggaaaacaaggctcagacagggtgccaatgaactggctgtgcagaaagcaaaggcagaaatca

SEQ ID NO: 514405 - DNA, 89 bp, Homo sapiens
cccagagggttggaattgcagatgtgagcattcttgttatttaacacgggaaggaggtgacttcgcctgtgatggacttccagtgtgag

SEQ ID NO: 514406 - DNA, 75 bp, Homo sapiens
ggaccggagactttggggcctaactagttttcaggactctacatcctgtccttcactgtcatcatggtggggttt

SEQ ID NO: 514407 - DNA, 80 bp, Homo sapiens
cagagccacacacaccatcatggtcctggacagagcgggatgccaccagcttgtccaaagggaagttccaggagctcctg

SEQ ID NO: 514408 - DNA, 80 bp, Homo sapiens
tttaccttatcccctcaacaacttttcagtggcaacattgcagtgtcgagatggctatgaaccctgtgtaaatgaaggaa

SEQ ID NO: 514409 - DNA, 90 bp, Homo sapiens
cctacctgcggcgtcggcagctgctgctccgagagatcctacagtaaggaattgtttgaagaagttatttcaaagatgcggaaggcaggg

SEQ ID NO: 514410 - DNA, 119 bp, Homo sapiens
cagcacccggggggccagcgggtcatcgggcactacgctggagaagatgcaacgtacgtttcaggagacggcagcgaggctaccttgcatggtgtggtggacgagctggtgcggttccg

SEQ ID NO: 514411 - DNA, 74 bp, Homo sapiens
cttgatccagcggacttacggagttcctgagttggaggtagaagaagaaacccaagttcaagagatgactttag

SEQ ID NO: 514412 - DNA, 95 bp, Homo sapiens
tctagagtctggaatatttaaaaaggtacaacaaataacactgtgactccaacctcacaacctgtgcgaaagtctacctttgatgcagccagttt

SEQ ID NO: 514413 - DNA, 123 bp, Homo sapiens
ggaagaccgcgcgcagggcctgcagcgggagctggacggcgagcgcgagcggcgcgagaaaggcgtgatggtgggcatgggtcagaaggattcctatgtgggcgacgaggcccagagcaagag

SEQ ID NO: 514414 - DNA, 75 bp, Homo sapiens
gcggcggcaggcggcagaggggagatgagatccgaaatggcccataccgacagctcttccacccagagcagctca

SEQ ID NO: 514415 - DNA, 90 bp, Homo sapiens
ggacctacctccttggtcaaagctgggatgggtccttccttcagaagggaaatttctgagggtcaggaaggggaatctgtacctcactcc

SEQ ID NO: 514416 - DNA, 90 bp, Homo sapiens
gtggaggatctgcagttccgcgtggaggaggagtccatcaccaagggagacctggagtgcacgtgccggaaggacatggtcaagatctcc

SEQ ID NO: 514417 - DNA, 75 bp, Homo sapiens
cgtctccatgcccgagttcatggccaacctcaggctcaggtatccagctcacatagaagacattgactacgagga

SEQ ID NO: 514418 - DNA, 75 bp, Homo sapiens
gttaaggattccaagtaactcttatttggagcttgatcctggatagtgtttgtatgatgtgcacacgtctctgca

SEQ ID NO: 514419 - DNA, 92 bp, Homo sapiens
ctgagtggtttttcggatcatgtctggtggctccgcggattataacagtttggtgccctggttgtcagatgttggaaagcagtaggacggaa

SEQ ID NO: 514420 - DNA, 100 bp, Homo sapiens
aactgtgagatttgtggaaactacacctaccgagggcccaaagccttccagcgacactttgctgtgaagccaaaaaccttccctcttacccggggccgag

SEQ ID NO: 514421 - DNA, 96 bp, Homo sapiens
gtgattctgctgttcagcaggagaaaatttcagagctgcaaaattatcagaaaaaagccttcatgctgagtcaccaggattctcacaggcatcaag

SEQ ID NO: 514422 - DNA, 100 bp, Homo sapiens
ggctcctgggtggcatggcgctcctgctcctccaggcgctgcccagccccttgtcagccagggctgaacccccgcagagccatcatcaaccactttaacc

SEQ ID NO: 514423 - DNA, 49 bp, Homo sapiens
aagaacgggaacaaaactctgataacaccatccagtcggttttctgttg

SEQ ID NO: 514424 - DNA, 131 bp, Homo sapiens
tttctgagacccaggttggggacagtgccggaggggcctcctctgctgcagacatctgtgtgtcccggcatggatatccggaacaacctcactaggttgcatgagctggagaattgctctgtcatcgaagg

SEQ ID NO: 514425 - DNA, 75 bp, Homo sapiens
cgctgctggctgcgctctgcccggcgagtcgggctctggaggaaaagaaagtgggagattttgataagatctggc

SEQ ID NO: 514426 - DNA, 75 bp, Homo sapiens
gaagagaaaaagagaagaagatgaagaaaccagcttgatatgttgagacttccagtgtcctactattgaagcctg

SEQ ID NO: 514427 - DNA, 75 bp, Homo sapiens
cgggtcccgagcactctgtgccggagactggaaatagcaaaggctatgcatttgtggagtttgagtctgaggatg

SEQ ID NO: 514428 - DNA, 90 bp, Homo sapiens
ctcacggagctgggcgacgagctgaccctgggagacatcgacgaaattgataaagaaggtgtgattgaaccagacactgatgctcctcaa

SEQ ID NO: 514429 - DNA, 51 bp, Homo sapiens
tggtgacgctatcaactgcagagattgggttacacatcattttggaatgac

SEQ ID NO: 514430 - DNA, 100 bp, Homo sapiens
gcatggtggctcaaattgatgctaactggaacttcctggtgactgtggggatcatgttgttataatgaacacaagacacattgcattttctggaaacaaa

SEQ ID NO: 514431 - DNA, 82 bp, Homo sapiens
tgccatgttaggacattatgtaaattgtgaggattcttatgtggctagtttgcagttgtattccctgaatgactataaacca

SEQ ID NO: 514432 - DNA, 98 bp, Homo sapiens
ctggagcctcagttggaagcagccgatccagcctgcggagcctgtggggcagttcccagtgacctgacagcagaggagcgtcaagaactggagaacat

SEQ ID NO: 514433 - DNA, 90 bp, Homo sapiens
gcccttccagatacagctaccagttgtaatttagattcgagaagtggtttatcctttgactggaaaagaaaagtagctgcagtattcccc

SEQ ID NO: 514434 - DNA, 83 bp, Homo sapiens
aagacatcttaattgggcacgaaagaggtctacttccccagcaggacagcatcattctcctatatcttctagacatcactcat

SEQ ID NO: 514435 - DNA, 75 bp, Homo sapiens
cttcggtggactccttcggcagtccacccaccgccgccgcctcccaggagtccaaaactacttacctggaagacc

SEQ ID NO: 514436 - DNA, 96 bp, Homo sapiens
gcggagactgcgggcccgtagctgggctctgcgagatgggaatttcttagccataggctcacatgacaactgcatctatatatatggcgttagtga

SEQ ID NO: 514437 - DNA, 100 bp, Homo sapiens
ctcgcgggccgtgtctccggcatcatgtgtgaaatggtggagtcaatgaagaaagtagcagggatggatgtggagctgacagttgaagaaagaaacctcc

SEQ ID NO: 514438 - DNA, 76 bp, Homo sapiens
aaaaagttcttgggacaaacttcatttgtgggcagctgatgacacacttgggcagtgactttcccccaggggctgg

SEQ ID NO: 514439 - DNA, 75 bp, Homo sapiens
tggaacttctgcccagctctccttggaaccaggaattaaagcagtgaacataacaaagtctgccctcgtggtgct

SEQ ID NO: 514440 - DNA, 74 bp, Homo sapiens
acggagataaattcccggaaccgcgattcggcgtgtcaggaatactcccccagttgcaagaggcgcaggaccgt

SEQ ID NO: 514441 - DNA, 95 bp, Homo sapiens
tgatctctttttcagtagtaacctggatgatttttataatttctcagaacttcacaaagtgtttgaaagatgtatggtgatcttgaaacctccag

SEQ ID NO: 514442 - DNA, 98 bp, Homo sapiens
ggtatcgaggcggacgacgaccggctcaacaaggtggggtggaagacaacccgtgagtattacaccttcatgtgggttactttgcccattgacctaaa

SEQ ID NO: 514443 - DNA, 90 bp, Homo sapiens
ggcgcgcgggggcgacgcgcgggaacaacgcgagtcggcgcgcgggacgaagttttccaagagataacttcaccaagatgtccagtgata

SEQ ID NO: 514444 - DNA, 75 bp, Homo sapiens
ggcgaacatgcgcttttgacacattggagtgttctaagaacggaagcatctgggctggatggaatttagcatcaa

SEQ ID NO: 514445 - DNA, 100 bp, Homo sapiens
ctcggggccgggctgatacagccgcttcaccgtgcccctgcccgcgaccatggcctcctccgaggtggcgcggcacctgccaaaacctattgatgtacaa

SEQ ID NO: 514446 - DNA, 83 bp, Homo sapiens
ccgctggcagccgcggatctcaccgccgctcaggcagtacttctggaatagaaattctaaacattagcctgccgaacaactgg

SEQ ID NO: 514447 - DNA, 87 bp, Homo sapiens
aatgcctccatgaacaatctcacccaattactctgctcaggattaatgcagtatcgaatggacaagtccgaggtgatagttacagtg

SEQ ID NO: 514448 - DNA, 87 bp, Homo sapiens
tattctttacctgcttcccaatcccactgatgaggatcagcccatggagaaatgctctcatatggagacaggcaagaggtggaaatc

SEQ ID NO: 514449 - DNA, 82 bp, Homo sapiens
ctctgcaccatggctctctgcaaccagttctctgcatcaccctgtcttagaagtgatctgctcccgaatgcgctacatctcc

SEQ ID NO: 514450 - DNA, 100 bp, Homo sapiens
cgcgacctccaaggatgcccgtgagcctgttgtcggggccagagcttggggcttccttggtcgcacccaccacctgcctgcccactggtcagccttcagg

SEQ ID NO: 514451 - DNA, 75 bp, Homo sapiens
aagttaagctgaagaccgaagcaagagctggttcagatcaagacacagccatccgggtcttcgccatccccccat

SEQ ID NO: 514452 - DNA, 100 bp, Homo sapiens
gccgtgtcagtttggggcatctccgcggtccggcccggggccccgggatctcggctgtccttcctcccgctctgaacagcaacatggggtgcaaagtcct

SEQ ID NO: 514453 - DNA, 75 bp, Homo sapiens
tgatcatcctgctgggcttcgtccagatcgggaaggaacctggagaagcagatgcgccagctggccgtgatcccg

SEQ ID NO: 514454 - DNA, 74 bp, Homo sapiens
ggacactatgcaatcacccgaaagttaaacgagaagattcatcaccgctttgatggctgcctcacaaacttcac

SEQ ID NO: 514455 - DNA, 75 bp, Homo sapiens
gtttgcaccagtgacgcagccgctgcatctccgccagtccgcgcaggtgagaagccctaccactgcaactgggac

SEQ ID NO: 514456 - DNA, 51 bp, Homo sapiens
agaagtaccaggaggcgttggccaaggtacgagctcaactggaggcagtcc

SEQ ID NO: 514457 - DNA, 93 bp, Homo sapiens
aactgtaaaggcacttaaatgcacaaacccagtgatctcttattctaagagagggtctcaaaaccaaagatctcctggacttgtatcaacaca

SEQ ID NO: 514458 - DNA, 75 bp, Homo sapiens
agctttgcgcaacgccaacctcaggcgagatggtggtccagcacatcatccagcaaaatcatgtcccagagtcaa

SEQ ID NO: 514459 - DNA, 85 bp, Homo sapiens
gatggcactttccaaagtggatgcctccggggaggaaattggccttgcctctctgggtgcacctgatgaatacattgaaaagctc

SEQ ID NO: 514460 - DNA, 100 bp, Homo sapiens
atggaactgtatgccagcagcttgttgtacagatcgcagtatgtggtagggaagtgatgctgtctgaaggtgacatcctgttctcctctcttctgtcctc

SEQ ID NO: 514461 - DNA, 88 bp, Homo sapiens
ccaacatgaacctggatcgcatcggggagcaggcggaggccatgtttggagtgggagatgacctgatcagagccatcaagaaactaaa

SEQ ID NO: 514462 - DNA, 85 bp, Homo sapiens
ctagaattacctggaacttcatcatcatctacttcacaggaattgccatttgtttattcttcagtccaaggaagcaattcacagt

SEQ ID NO: 514463 - DNA, 75 bp, Homo sapiens
cagaaataaattagtgtccttaccaaaagaggaagctcttactcctcagaaatgtattcctcacatcatcgtccg

SEQ ID NO: 514464 - DNA, 137 bp, Homo sapiens
tgaaggtctccgaggctgccctgtctctccttgtcctcatccttatcattacttcggcttctcgcagccagccaaatgtggatgccaacagagagctgccactcacacagccaccttcagcccactcatctatcacc

SEQ ID NO: 514465 - DNA, 50 bp, Homo sapiens
gccgatgaagtgcagaggtttttttctgccgcttacaaacacgcagatgg

SEQ ID NO: 514466 - DNA, 90 bp, Homo sapiens
gccgaggcggtgaagccccagcgccgggccaaggccaaggccagccggactaaaacaaagctgcggttggatttctcacgatgtccagtg

SEQ ID NO: 514467 - DNA, 74 bp, Homo sapiens
tacttgaagatttgcataaagccaacattcgcaccgtcatggtcacaggtcttgtggatgagcagcagaaagtt

SEQ ID NO: 514468 - DNA, 99 bp, Homo sapiens
ggacagattgctgaccaggggcttgagagctgggttctattttccctcctcaaactgactttgcagccacggagaggaggaagaggaagaggaggaatt

SEQ ID NO: 514469 - DNA, 131 bp, Homo sapiens
gggaaatcgtgcacttgcaggccgggcagtgcggcaaccaaatcggcgccaagacagagaatggtgtgctgctgccatctcttcagtcagccctccccttcttggacctgcacgggacgccgcggctggag

SEQ ID NO: 514470 - DNA, 98 bp, Homo sapiens
gggggtgctgcagaggacacgaggcggcgggctggagacatggaccgcggcgagcaaggttcctaatgtgagaggctagacccagatcatggaggtgc

SEQ ID NO: 514471 - DNA, 82 bp, Homo sapiens
gaacttccgtgccccccaccctcaccaaggtccagctgggagctccccgacctccaggagggcaagatccaagccatcagcg

SEQ ID NO: 514472 - DNA, 100 bp, Homo sapiens
ccagcagctggcagaagaagcaacacgcaaacgagagctgaggctaatgaaaaacagatttgaacatggaattcaatccttcagatcatcctcgggccag

SEQ ID NO: 514473 - DNA, 75 bp, Homo sapiens
gcgcgaatatcgtcatcgttagaaggtcctcgaggccacacgggttaatcgaagaaagagcgcactggctttgcg

SEQ ID NO: 514474 - DNA, 80 bp, Homo sapiens
ggcgctgtccctgaatggctttggtggcatctgcctaacgttcacttcactcacgggccagcaccttctctctaaagccc

SEQ ID NO: 514475 - DNA, 100 bp, Homo sapiens
tcctgcaggcacagttgccgattacagagtacaggggctcaggtccaggtggcaggggatatgctacccaactcaactgagcgggccatcactattgctg

SEQ ID NO: 514476 - DNA, 98 bp, Homo sapiens
gcgatgggcccgtggacatgcgcacctcacacagagtgcctggtgaagaatgtgatgggatcactagcatgtctgcggagagcggccctgggacgaga

SEQ ID NO: 514477 - DNA, 99 bp, Homo sapiens
cgtctgggctcgcggcgtctccggggaaagccgtggccccgagggcggatccgaggagtgtttctcaggagctatcagaaactatcctcaccatggtag

SEQ ID NO: 514478 - DNA, 97 bp, Homo sapiens
gggaagagggggatttgatcgtggaggcatgagcagaggtgggcggggaggaggacgcggtggaatgggctggagccagacggactgctggtgtggg

SEQ ID NO: 514479 - DNA, 102 bp, Homo sapiens
caggctttgaaaaagacaccttatcacccacacccacacgtgttcaatacacctcccacctgtcctcaggcatatcaaagtctactgcttatgaaaagcaat

SEQ ID NO: 514480 - DNA, 100 bp, Homo sapiens
agccagagagagaggccaaagagcagcaccagaagctgtgggaagattttggctatggaaaggggaaatgttctaagcagagcccgtcaggagcccacgg

SEQ ID NO: 514481 - DNA, 100 bp, Homo sapiens
gtagagaggaccccggtacatctgaaagccgggaaatgctgccaaggggccaagggatgagctggggccctccttcccaatggcatctccccctggtctg

SEQ ID NO: 514482 - DNA, 50 bp, Homo sapiens
aaaacctcagcgacctgatcgacctgaaaggcctaaagaatgtatttgac

SEQ ID NO: 514483 - DNA, 122 bp, Homo sapiens
tggagatcgacccgtacttgaagccctacgccgtggacttccagcgcagattttaccaaatgttgcaagaactctggagttcttatggtagtaaaatgccggaaagaaaattctgcattgaa

SEQ ID NO: 514484 - DNA, 148 bp, Homo sapiens
ctgagaagtgtatatcaagccacaatttccatcaaaaagtgattaagcagagaatggagaagaaggttgattccaggtgctggagaatctggtaaaagcaccattgtgaagcagatgaggatcctgcatgttaatgggtttaatggag

SEQ ID NO: 514485 - DNA, 97 bp, Homo sapiens
caccttagcctcctaagtagctgggaccacaggatggagacattccctgcagtggctgagaaggtcctcaaggagttccaggtgttactgcagcaca

SEQ ID NO: 514486 - DNA, 100 bp, Homo sapiens
tgggtaggagatggagaaattccaagttcagattctccagtgtgtgttttaatagaaaagttgtcactttccaaaatgccctttagaggtgacaccgtaa

SEQ ID NO: 514487 - DNA, 83 bp, Homo sapiens
gggggttctcatccgtatgtataacatcaagaagttttcggctttgtgagaaaccttaccatcaaacacgatggccagcaacg

SEQ ID NO: 514488 - DNA, 83 bp, Homo sapiens
ggctgttagaagaattcatgctcatccggggtgatcttgatactgcagcagtaaaagtggaatttgatgaagaattcagtgga

SEQ ID NO: 514489 - DNA, 100 bp, Homo sapiens
gaaggatgttcgtactggaagtcatgaggacagagctgcagcccgatgcaacaaaggcatagaagtactgtttgcagtggctctggaacattttgtgttg

SEQ ID NO: 514490 - DNA, 106 bp, Homo sapiens
cccggttccccggcccacagtgggggtgtgcaaacccgagagaactgggttgaaatcacaaagattagacacctttttagataggtgttcttcagcaccactgaca

SEQ ID NO: 514491 - DNA, 101 bp, Homo sapiens
cccgcgcctcgctcagctccaacatggcttcaacggaccacaccaaaatgccatctcaaatggaacacgccatggaaaccatgatgtttacatttcacaaa

SEQ ID NO: 514492 - DNA, 103 bp, Homo sapiens
gagtttgagccccggaggcagagcggctgccatgatgaacccacaagatcattgagtggtcttatcttgaagaataatgtgaaagcacactttcagaacttcc

SEQ ID NO: 514493 - DNA, 130 bp, Homo sapiens
cgactcagaagattatagccttagtgaagaaggacaagaactctcagatgaagatgatgaggtgttcttgtggattggggctgaggccaatgccacggagaaggagagtgcccttgccacagcacagcag

SEQ ID NO: 514494 - DNA, 50 bp, Homo sapiens
agacagagggttttcttttgaggttaaaaggactactgactcaaactctg

SEQ ID NO: 514495 - DNA, 83 bp, Homo sapiens
ctttggatcagacttttgtgttgcagttcgggtgaggcggaaccaaccctcctggccatgggaggggccgtggtggacgaggg

SEQ ID NO: 514496 - DNA, 100 bp, Homo sapiens
aggcgatccgggcgccaccccgcggtcatcggtcaccggtcgctctcaggaacagcaggattttttatcaagcagaaatgcatcgaacaacgagaatcaa

SEQ ID NO: 514497 - DNA, 83 bp, Homo sapiens
ctgcaccaagtggcgaaggagccggctccaagatcgcaccccctccctccctggcggagcccctgaaggagctgttcaggcag

SEQ ID NO: 514498 - DNA, 87 bp, Homo sapiens
gccatggaagctgccggcagccctgcggctacggagacagtctctccatttcaaggactaaaacagtcttgcgttaagtaaaaacct

SEQ ID NO: 514499 - DNA, 83 bp, Homo sapiens
gccttagctgtgctcgcgctactctctctttctggcctggaggctatccagcgagtgtacctcacagccttctaggatctcca

SEQ ID NO: 514500 - DNA, 100 bp, Homo sapiens
gtggcttcgtcccgcggagtccaggcttcagcacgcactcctggctttaaagtttatacttgcatttgccatacctgataagccacggcatatccagatg

SEQ ID NO: 514501 - DNA, 117 bp, Homo sapiens
ccgaaagtcgcagagctgaagcagaagatcgaggacacgctatgtccttttggcttcgaggtttaccccttccagctacccaaacctctttccctgacttatcaagagagattattg

SEQ ID NO: 514502 - DNA, 100 bp, Homo sapiens
ggaagctctgcggtcatacaaccaggaggcaaaatcatcatgcatgacccctttgccatgcggcccttctttggctacaacttcggcaaatacctggccc

SEQ ID NO: 514503 - DNA, 74 bp, Homo sapiens
cgcttcaccacttacgaaatcagggtcaaggttcagcttgttggtttagatgaggagagttcagagtttatttg

SEQ ID NO: 514504 - DNA, 97 bp, Homo sapiens
cgaccggctgcgcttcctgcagctgcacaactggctggacaacagtcaccggactttgctgaggagttgaggtccctggaaccatctcccagccctg

SEQ ID NO: 514505 - DNA, 83 bp, Homo sapiens
gcgcggatggccgtaaccccgaaggaaatcgggagatacagatgacccaccaagaattactcagaaccctgtgatcaatggga

SEQ ID NO: 514506 - DNA, 100 bp, Homo sapiens
ggccgagatccaggagaaccacgacgagacctacggcgtgccctccctggaggagctgggtactgggcctaatcgctacgtgcctctttggctatgatgc

SEQ ID NO: 514507 - DNA, 90 bp, Homo sapiens
gccgcgacgcccggcccgcagggcaggcgaggccttcttgggcagctttgtggccagcgggatggggccctcggcctcgtcccatgggag

SEQ ID NO: 514508 - DNA, 100 bp, Homo sapiens
cacgagtgcgggcagcagcagccccggggcccggagaggaggagacatcacagctttcccagatcgggaggaaaaatatggaatgtgttttaccgctgac

SEQ ID NO: 514509 - DNA, 91 bp, Homo sapiens
tccactacccacaggacctggcccggcccctcttccccagcacagggggggccctcagcctcttggccttgaacgggctgttcatcttgat

SEQ ID NO: 514510 - DNA, 100 bp, Homo sapiens
cttcttctggataacactgtacaagctttcaaagtcaatgggtgctgtgcctaccagacagcctgaatcttcacagagacccacagcggtcaaacaagcc

SEQ ID NO: 514511 - DNA, 75 bp, Homo sapiens
ctgcctggcggagctcctccggctttacaccaaaagcagcaatctttaatctcatgaagtacgacagctacagcc

SEQ ID NO: 514512 - DNA, 98 bp, Homo sapiens
aaaaacgtttttcctgataactggaaagttcctcaagatggagactttgactttatcatcaatgctgtggtactgttgattttattgagtgccctggc

SEQ ID NO: 514513 - DNA, 99 bp, Homo sapiens
gccatcgtatactgtaactttaatcagttgtataaaattgacccttctactttgcagatgtgggcaaacgatctctgtcgaagtttgccttacctggga

SEQ ID NO: 514514 - DNA, 75 bp, Homo sapiens
ctcgacagagctgcagatttcctctcggagcctgagggaggcccaggtcagcccaaggccaaccccactgtcact

SEQ ID NO: 514515 - DNA, 90 bp, Homo sapiens
cagcgactcggaagattcgaggcggcgggggacaagtcggcgccccagagcggacgagccatgcctgatggagctctggacacagctgtc

SEQ ID NO: 514516 - DNA, 83 bp, Homo sapiens
ctctgggtctccaggcccgcgaccgtccgccagtcgtcccgaggggcactatggcagacaaagttaggaggcagaggccgagg

SEQ ID NO: 514517 - DNA, 82 bp, Homo sapiens
gggaacaggctccgtgcagagctgggccgacccgaaaaattcaattcgccacaatctctctctgaatcgttatttcatcaaa

SEQ ID NO: 514518 - DNA, 100 bp, Homo sapiens
gtcagcctgcgcctcctctgccacgatgacatagacactgtgaagcacctgtgtggcgactggttccccatcgaccctttggaagatcattaagtttcac

SEQ ID NO: 514519 - DNA, 75 bp, Homo sapiens
tgcttccagatcctcctagaagtagttacttggaaagtccaagaggcccaaggattgccaaggatccaagatttg

SEQ ID NO: 514520 - DNA, 80 bp, Homo sapiens
aggaggggcgagagggagccgcagctgatgtcagcatgaagactttttgcttgccctacagatgaatgaagaacagtatc

SEQ ID NO: 514521 - DNA, 75 bp, Homo sapiens
atttggcctgtgagtcgatctttttagcggaagatccatccaaaagctatgtgaaattacgagactttgtgcttg

SEQ ID NO: 514522 - DNA, 75 bp, Homo sapiens
aacgagcacaacaggagctacgaggagttggaagatgacgattcagagactgaaaaacctgaggctgatgaccca

SEQ ID NO: 514523 - DNA, 75 bp, Homo sapiens
gcggggcatcgtgtctcgaccgcgtcttctgagtcagattgcaacacctgctcggtataccgtgactttgggagg

SEQ ID NO: 514524 - DNA, 100 bp, Homo sapiens
cagaccttgaaagacaaaactggcactgattcaaattcaacagaatcctctgaaacttccacagggcatgagccagaaggagagctctaagtctgccatg

SEQ ID NO: 514525 - DNA, 49 bp, Homo sapiens
cttggagtctttgtccaggacgagacacctatggctgccgatgaaggct

SEQ ID NO: 514526 - DNA, 101 bp, Homo sapiens
tttgatgcgtcacactacgacagtgagaaaggagggccgcgatgggcctcttggaacattggtgtgttcatctgcattcgatgtgctggaatccacaggaa

SEQ ID NO: 514527 - DNA, 75 bp, Homo sapiens
gccgcctcatccaccagaagcatttccagcacatccagggacctgtgtcggcaggaccccgagtgtgagttctac

SEQ ID NO: 514528 - DNA, 75 bp, Homo sapiens
gacatttacgcggatgtcggcgaagagttcaaccagacagagctttttgtacatgccttcaaggatcaacttgtc

SEQ ID NO: 514529 - DNA, 90 bp, Homo sapiens
cttctaattacagcggcgggggcagtgcgcgcttcgggacgcaattggaaacgaattgattatggattaagtttaccacttggagaagac

SEQ ID NO: 514530 - DNA, 75 bp, Homo sapiens
ggcctaccccctggactccctggagaagcagatggaaaagtctattatcctcccagtccacaacgctgaaccgtg

SEQ ID NO: 514531 - DNA, 82 bp, Homo sapiens
ctatacctccaagtggacagtcacctttgctgctgaccctgaggacatctgctgcacaagctccgggtggataaggcagctg

SEQ ID NO: 514532 - DNA, 96 bp, Homo sapiens
cgtgcgggttggctgcctgaccacagacttcgccatgcagtctccctttcctggtgatgatgaagaggaagtttttgacagtattgtaaatgatga

SEQ ID NO: 514533 - DNA, 75 bp, Homo sapiens
actatgattaccaccaggagattgcaagagttaaacatgaagtttctggagagacagtggtatttcaagggggag

SEQ ID NO: 514534 - DNA, 75 bp, Homo sapiens
agctggctaaccagaccgtgggcaggagtgtacctcacagccttctaggatctccagagtggacaggaatctcac

SEQ ID NO: 514535 - DNA, 134 bp, Homo sapiens
tcagaagagtgagagagagctattagagattgtgaagaagaatttcgatctccgccctggggtcattgtcagtctgagcacttcaagacgacatcgcagaaggtggctcgaaaattctggtggaagaacgtgaa

SEQ ID NO: 514536 - DNA, 98 bp, Homo sapiens
catgtgtgtgcgcgcgaaggagcggaagaatggcagtgctcaaactcaccgaccaggtgatttgatgaaggctgctgcaggagagttcgcagatgatc

SEQ ID NO: 514537 - DNA, 75 bp, Homo sapiens
gagcccatggcatcatagttgtgtatgatgtgacagatcaggcagacgcgtgccatgcctaccagatcattcacc

SEQ ID NO: 514538 - DNA, 100 bp, Homo sapiens
cggatcgctgcgagtggccttgaaggcagctgctgcaggtgaagagtaggcggcggggcagagagcggcctccgagggctttgatggattctaatcttcc

SEQ ID NO: 514539 - DNA, 100 bp, Homo sapiens
gtgaaggagtgcagaggcatcacctgaaaggtcaagagacaactgcctttgaaagagagtgagtgactgtttccaaaacagcaagcatagggagagccgc

SEQ ID NO: 514540 - DNA, 90 bp, Homo sapiens
aaggcaccaagaatttgtacacatgtacaatgcccaatgcgatgctttgcatcctaaatcagcgctggataaaacaagccttagaagaag

SEQ ID NO: 514541 - DNA, 80 bp, Homo sapiens
gaaattcagagaggggaagtgatttgcctcagcttgtactatatctggggaagatgaagtagagtgctctgacaaggacg

SEQ ID NO: 514542 - DNA, 82 bp, Homo sapiens
aagagatcctggacctatgaatatccagtttgagccatcggatctaagatccaaaaggtaatctgtaagtcagatgctccaa

SEQ ID NO: 514543 - DNA, 89 bp, Homo sapiens
caaagacgtagaaagaaatcttagcagctgccttgaggtgcagtgttggggatccagagccatgtcggacctgctactactgggcctga

SEQ ID NO: 514544 - DNA, 98 bp, Homo sapiens
cgagcgccccgccatcgtcccgtgtgctcatgggagcttagaagatcccaaaagtataacccatcataaattaatccacgctgcctcagagagggtgc

SEQ ID NO: 514545 - DNA, 97 bp, Homo sapiens
tcgaccacttccagatccttcgggccattgggaagggcagctttggcaaggtgtcatggagaaactccagctgggcccagagattctgcagcgggaa

SEQ ID NO: 514546 - DNA, 75 bp, Homo sapiens
aaagatcagcgaggagcagcagcagctccagcaggcgctggctcctgctcaggttctggggctgctggtatggac

SEQ ID NO: 514547 - DNA, 123 bp, Homo sapiens
actttaaggacctttggacaaaactaaaagaatgtcatgatagagaagtacaagggcaaacttgaagataaatcttttgactccagctctttagaggatctaaagtgaccttgatggacagtg

SEQ ID NO: 514548 - DNA, 75 bp, Homo sapiens
cccgcgtccgccgattcctcctccttggtcgccgcgtccttggctggcgtgtgatctgtgaaaatggttcgctat

SEQ ID NO: 514549 - DNA, 82 bp, Homo sapiens
ggacaggatttctccgcctcagcccaacggggagctgtcgcctggttgggcccggaaatgggacgtcgcgctttctcaggga

SEQ ID NO: 514550 - DNA, 75 bp, Homo sapiens
tctccggggaaagccgtggccccgagggcggatccgaggtcatcatcagatttgaaatatttaaagtggatacaa

SEQ ID NO: 514551 - DNA, 74 bp, Homo sapiens
atcagacactaatccagctgactgacggagttttactcttgttgcccaggctggagtgcaacggcgggatctcg

SEQ ID NO: 514552 - DNA, 90 bp, Homo sapiens
ctgagaagtgtatatggggcccaagctactggtgccagaacacagagacagcagcccagtgcaatctgaccacagtggccgagaagtcgc

SEQ ID NO: 514553 - DNA, 100 bp, Homo sapiens
atttacagagcaacttgatgaaggtacacccaatagagaggtgctggagaatctggtaaaagcaccattgtgaagcagatgaggatcctgcatgttaatg

SEQ ID NO: 514554 - DNA, 75 bp, Homo sapiens
tcttcaccttttccttactcatgagccagatttgaagaacccaagtgattcagcagtgcacagcccctttacaaa

SEQ ID NO: 514555 - DNA, 100 bp, Homo sapiens
cgtcttgctgaaaactcggcttccagcgatgatctcttggtggcagaggtggggtggtggtgtttgccgtcaactcgctgttgtacctgaaccagagcgt

SEQ ID NO: 514556 - DNA, 100 bp, Homo sapiens
gctggactggcagcaaagtgaccgttggagtttaatgagaggaatatactcatcatcagtctatttagaagagataagccatcaccaaactcagaaaatg

SEQ ID NO: 514557 - DNA, 100 bp, Homo sapiens
aggaagcaagcagttcagaagagccaaggaataaacatgcaatgaacccaaaagggctgcaataggatctgtggctttggacacagcaaggtcacatgga

SEQ ID NO: 514558 - DNA, 100 bp, Homo sapiens
gccagagcctggagtctgcgaaggccgggacccggttccccggcccacagtgggggtgtgcaaacccgagagaactggagatgctcttagtgatcttgca

SEQ ID NO: 514559 - DNA, 75 bp, Homo sapiens
cttatacagctaaagccatggaaaggagcttctaagtaggacatccttagaaactcagaagttggatctgatggc

SEQ ID NO: 514560 - DNA, 100 bp, Homo sapiens
gccgccgggccctcttcgacagctacacaaatctggaacgggtggccgattactgcgagaacaactacatacaggacatggatttgattgacatactttg

SEQ ID NO: 514561 - DNA, 74 bp, Homo sapiens
tactcctggcagtgcgtcaatcagagcgtcctgtgcggttggacgtgataagtatgagcctgcagctgtttcag

SEQ ID NO: 514562 - DNA, 100 bp, Homo sapiens
acgaagaagtgcttcagcgggccaggaagcgcatccaggagagagtgaatctggaagtgaaagtggagaacaaggcgaaagtggggaggaaggagacagc

SEQ ID NO: 514563 - DNA, 100 bp, Homo sapiens
tatgaagcccttcaccaacaaagatgcctatacttgtgcaactcgtcgtcaaggtgcacatgaatgataacagcacaaagtcactgatggtggatgagcg

SEQ ID NO: 514564 - DNA, 75 bp, Homo sapiens
ttttttgacatctgtacttcaagaaaggagcacatggatgaagtatgctcctcgcagcttctaacttcagtaagg

SEQ ID NO: 514565 - DNA, 107 bp, Homo sapiens
ggaagtgaatggccccatggtgacggtggccctgtcagtggctctcttggccctcctgaaatggtgagcgagtgctgtgctttcatgggcctcttctttatgaagca

SEQ ID NO: 514566 - DNA, 87 bp, Homo sapiens
catactctgttatagataaacaaggtgttgacagctcttctaccacaagcagtgcttctccaatgcccaacagttatgatgccctgg

SEQ ID NO: 514567 - DNA, 101 bp, Homo sapiens
tggaagtttgagagaagtttaagagaagaaatggacatgattgcctaaatcagccaaacacaggataacaggaggcgcagggttcgtgggctcccatctaa

SEQ ID NO: 514568 - DNA, 73 bp, Homo sapiens
cgacatcaccaagctggaggtggacgccatcgtcaacgccgagcacgagcggctccgcaaataccactgaaga

SEQ ID NO: 514569 - DNA, 80 bp, Homo sapiens
gcgctcaagtaccacccggacaagaacccggatgagggcgagaagatggcccactgcgtgaccttggttcagctgtccat

SEQ ID NO: 514570 - DNA, 74 bp, Homo sapiens
ccccaggctctgcagcccctgctgctggttctgcccctgctgcaggagaggagagccagagaagtgacagggaa

SEQ ID NO: 514571 - DNA, 74 bp, Homo sapiens
gcaaaaagttgtgaacacacagtgtggatatgatgtcaggattcagcagcgagtgacaagcacatccaatggct

SEQ ID NO: 514572 - DNA, 75 bp, Homo sapiens
tttccacaagcgtttcccggagcacagggcagcggagatccggccatgctggagtatctgccaacatgatgaaga

SEQ ID NO: 514573 - DNA, 100 bp, Homo sapiens
tcatcaccaggctgcttactggaaactggatgcagcaaggaaataggatttaaccgctctctgcctcccagatcagggagcagagaaacatgaaggcaca

SEQ ID NO: 514574 - DNA, 99 bp, Homo sapiens
acggcgaagcagctggagaagctggccaagaaggcggagaaggactccaaggcggagcaggccaaagtgaagaaggattactacagcatcccatttccc

SEQ ID NO: 514575 - DNA, 97 bp, Homo sapiens
tcagtgtacaacgccaacattaacctgttctgtgtggtcagggggattttggcaattgcttggagcatggcagatcctgaattgttactgagctgtg

SEQ ID NO: 514576 - DNA, 98 bp, Homo sapiens
tgctgcaagggaaacctcgtgaaggagtccggcactgaacaccaccggggcccgtccacctcccgcaggttcgttccaccagtcataaaccagatgaa

SEQ ID NO: 514577 - DNA, 100 bp, Homo sapiens
cacttttgagtgcaactgccttccaggtgtcgtgaaaactacccctaaaagccaaaatgggaaaggaaaagactcatatcaacattgtcgtcattggaca

SEQ ID NO: 514578 - DNA, 90 bp, Homo sapiens
gagcttctcagtcagtcctgcctcatcccagccatgtcatcttatctacgaaatgattcagtttgaaggaagaaagtactgtgaacatga

SEQ ID NO: 514579 - DNA, 83 bp, Homo sapiens
ctctggctgtgctgcgcgacccccgcgcatgctgagcgggctttggacaccatgaactttgatgtgattaagggaaagccaat

SEQ ID NO: 514580 - DNA, 82 bp, Homo sapiens
tctccttcgacttggagtctttgtccaggacggaggtatttaactgaaaggaatatctgcttcactgttgcaaccaaaccag

SEQ ID NO: 514581 - DNA, 82 bp, Homo sapiens
cataggtcgtcatgcttatggggatcaagatgttgcttcagagtgtgaagtcaaatgcatgccaacattccagttttttaag

SEQ ID NO: 514582 - DNA, 50 bp, Homo sapiens
gccgacaacagcctggcgtccgccacgagctggaagtcgagtgtgctact

SEQ ID NO: 514583 - DNA, 96 bp, Homo sapiens
acgtgtatatcggcagtgccggtttggactggcaatccctgggacaggatgctgatatgctaactggtgatgagcaagtatggaaggaagttcaag

SEQ ID NO: 514584 - DNA, 100 bp, Homo sapiens
gaagagactgctagattccagccaggatacagatcttaaatttgtcaggtggcgcctggactctcgccctcagagggaggcccgtcccacggtctgtggc

SEQ ID NO: 514585 - DNA, 50 bp, Homo sapiens
cgacgaggagcagggcctgactgcgcaggacccagatgatgtggtaccag

SEQ ID NO: 514586 - DNA, 100 bp, Homo sapiens
ggaggctcatgcgggatttcaagcgtgaataaccctataccttccaatttgaaatcagaagcaaaaaaggctgccaaaatattaagagaattcacagaaa

SEQ ID NO: 514587 - DNA, 83 bp, Homo sapiens
agaacttatgctgactacgaatctgtgaatgaatgcatggaaggttacccatgcagttgttactgtaccagcctattttaatg

SEQ ID NO: 514588 - DNA, 75 bp, Homo sapiens
cactacagggaagtgcatcacatgtcagttagtaacaggagtatgggaaggcaaatacaacttcttctgtcaggg

SEQ ID NO: 514589 - DNA, 82 bp, Homo sapiens
attcgagtgaccgagaccgcggccgggaccgaggttcaaaaggtgatgacctatcaacagccattctcaaacagaagaaccg

SEQ ID NO: 514590 - DNA, 96 bp, Homo sapiens
cgaggctttcagttctttggaattccattcttttccttattcttctgatgtggatccaggccgccgctgcccagcagatcccgatctcccttcaca

SEQ ID NO: 514591 - DNA, 83 bp, Homo sapiens
cgttacataccctttaccttttgagtttagagctatagaagcactcctgcaatattggttcaaggagcagggacaagttacag

SEQ ID NO: 514592 - DNA, 82 bp, Homo sapiens
agtgcggcctcggctggcggcggcaccaggcttctgggaacttggcagacgcagcttagagagactcaccagcgagcgtcat

SEQ ID NO: 514593 - DNA, 50 bp, Homo sapiens
ttggtaatttagcagaacttgtgctacaaggtgagctgcctggaaatccc

SEQ ID NO: 514594 - DNA, 74 bp, Homo sapiens
gagcctcaaaatgaagatggcacatggcccaggcagaccttgcagtcaaaatttggagcaagaggtggtggtgg

SEQ ID NO: 514595 - DNA, 153 bp, Homo sapiens
ctgcccaaggtgctgagccggcgcggggtcggcgctgggctggaggcggcggagcgcgagagcttcgagcggactcagggccgtctcagtctcataaaaggggatcaggcaggaggagtttgggagaaacctgagaagggcctgatttgcagc

SEQ ID NO: 514596 - DNA, 75 bp, Homo sapiens
ccatgctcacccctgagccagttttaaagagaggcagcttccccccttgggtccaacaaacccgcgtgtgacgct

SEQ ID NO: 514597 - DNA, 90 bp, Homo sapiens
acatgggcggagttctcattccttctccagggagagtcgctgcagggtgtccgcaatgttgccagtgtctgtctgcagattggctaccca

SEQ ID NO: 514598 - DNA, 82 bp, Homo sapiens
ggattccaagtaactcttatttggcagagatcctacaagaatccaggatgatgatcccagattgccagcgcaggttggaagc

SEQ ID NO: 514599 - DNA, 90 bp, Homo sapiens
tacttgaaggatggcgaagaggtcgcgcagggcagagcggcttgggtaaatccaccttaatcaacaccctcttcaaatccaaaatcagcc

SEQ ID NO: 514600 - DNA, 90 bp, Homo sapiens
ctcctggaccaatgcatcttcccaccaccttaaaccactgatgatgtgatgccagccacttactgtgaaattgatttagataaagaaaag

SEQ ID NO: 514601 - DNA, 100 bp, Homo sapiens
gtttggcttgagagaagccaaggacccgactcagaaacccagagagaagaagaaggaggttcctgctgtgccagaaacccttaagaaaaagcgaaggaat

SEQ ID NO: 514602 - DNA, 82 bp, Homo sapiens
ccacaagggcttcctggccctctaccaaaccgtgggtgaatttgacaggcaagaagatgacattcacttagtgacattatgt

SEQ ID NO: 514603 - DNA, 82 bp, Homo sapiens
ccggctgctccgcaccccggggtcccaggaagggcggcccaggaaattcgaaatgagtcccatgactatcctcatagagtgg

SEQ ID NO: 514604 - DNA, 75 bp, Homo sapiens
gattctgaggaccagcagatggccagtcacgagaacccaggttatgaagacagtatggagtttccagaccatagt

SEQ ID NO: 514605 - DNA, 98 bp, Homo sapiens
gaggccggagcccaccaagttctgggaaggatagtgccgcaggaggcgcctgttggaaactcactttccgagctaagcgaagaaaattttgatggaaa

SEQ ID NO: 514606 - DNA, 138 bp, Homo sapiens
tctggctacctcgtggacaagtttgcagatcgggagcgcaaggtcgccctcaaggccatgatcaaaacggtgattctgggggtccacttgtctgtaatggtgtgcttcaaggtatcacatcatggggccctgagccat

SEQ ID NO: 514607 - DNA, 51 bp, Homo sapiens
tccgacagccaggcccgcgagaagaatactcccccagttgcaagaggcgca

SEQ ID NO: 514608 - DNA, 97 bp, Homo sapiens
aattcctgctgaacaaataatttttcatggcggtgccggtggtggtgtgcacattgagccccggtatagacagttcccccagctgaccagatcccag

SEQ ID NO: 514609 - DNA, 50 bp, Homo sapiens
cgaattccagaatgatgaaattgtgctaaagaattacctccaaagccatt

SEQ ID NO: 514610 - DNA, 100 bp, Homo sapiens
agattcgcagtggtcgcttcttctccttggtacatggccacctctggcctagaccaccagctgaagatctttgacttgcgagggacgtaccagcctctga

SEQ ID NO: 514611 - DNA, 100 bp, Homo sapiens
agctggacaagctttctgtcctgcgcctcagtgtcagttacctccgggtgaagagcttcttccaagggcgtctctggccgagcctctttttgtggaaaac

SEQ ID NO: 514612 - DNA, 108 bp, Homo sapiens
cgccaaccgcaaccattgacgccatgtcgggttattcgagtgaccgagaccgcggccgggaccgaggaacccagcgggtgccgcttctccacccgaggcttccacctc

SEQ ID NO: 514613 - DNA, 90 bp, Homo sapiens
tagcaagcaaatatttacatgttggttatattgtgccaccagctccagaaaagagtatagtagtctctgctggatgaaccgaatcctaac

SEQ ID NO: 514614 - DNA, 76 bp, Homo sapiens
acctgggtgaatgtactcttttcagcaaccatatcctccctcctgttgccaggtagacatagctgacattgagaat

SEQ ID NO: 514615 - DNA, 75 bp, Homo sapiens
ttcagttttggtcatcggaagtggtgccttcagcacagtttgtatctacttgaacaagaatggcagcacaggccc

SEQ ID NO: 514616 - DNA, 82 bp, Homo sapiens
acgcctttcaccattaagaggaaagcgatggaggagctgagcgctgatgagaataatgcatatactgccatgtcagattcct

SEQ ID NO: 514617 - DNA, 137 bp, Homo sapiens
gggaggagggacgagccagtggcaatgacccagacccggacgacccccattgctgagccagcggagctgcttggctacggtgttcagtatgattacttagatccccgtcagatcaccccttccttggagactcattt

SEQ ID NO: 514618 - DNA, 98 bp, Homo sapiens
cagaaagcaggcgaacccgcggcgcaataacggaaacttggatttaactggccagaagcaggtattcaaagcagagaacaatccctgggtgaccccca

SEQ ID NO: 514619 - DNA, 75 bp, Homo sapiens
ggacgctcgtgcacagatacgctagcttgtcactttctgcaaaggtttccctcagggagcctcctgctgccaggc

SEQ ID NO: 514620 - DNA, 90 bp, Homo sapiens
cagagacagtgcctgccttttcagagcgtacctgtgccactgtcaccattggaggaatcttggatttacactgggcaacgtggttggaat

SEQ ID NO: 514621 - DNA, 100 bp, Homo sapiens
ggtgaacatgccaggagagcaatgcaaaaggtcctgcaaccctggttccagtctggcaagcattgtagacctggctgctgaagactgacggggcccaggg

SEQ ID NO: 514622 - DNA, 101 bp, Homo sapiens
gtcactcctttctttgtggtcttcatttgtgaatacatagctcaaagattagaacgactccgaaaagagagacaaaaccagatcaaatgcaaaaatattca

SEQ ID NO: 514623 - DNA, 51 bp, Homo sapiens
gttaaggattccaagtaactcttatttgggtgtcaaattgagaaccaggta

SEQ ID NO: 514624 - DNA, 100 bp, Homo sapiens
ggtaaagcaggtggagcaccctttgctgagtggcctcttataccccggactgcagatggcagtcttgggcacgtccatctgtaaacctgctgagagctct

SEQ ID NO: 514625 - DNA, 100 bp, Homo sapiens
ctagaggcagcaggtgtaggagggaaagaacttgtattccaaacaggcactactgcagtcttcagttaagcaacaagtagaagctattgaaaaacagtac

SEQ ID NO: 514626 - DNA, 98 bp, Homo sapiens
aaaatctcagctattcggtcatatagagatgtcatgaaggtattgatggatatgtttcatcaagatgtagaagatattaatatattatctttaactga

SEQ ID NO: 514627 - DNA, 100 bp, Homo sapiens
cttctgctcaggagcgcctaataccacttgggcccagtcctatgcggagagactgcgtctgggtttggccgtcattcacggggaagctcagtgcacggaa

SEQ ID NO: 514628 - DNA, 100 bp, Homo sapiens
gtccaaagcagtcgtaagaagaggtcccaatcccccactctttccgccctaatggaggtctccagtttcgtggtttgagtccagccaatgacactggagc

SEQ ID NO: 514629 - DNA, 51 bp, Homo sapiens
gccttaacaagcgcacggagccctcaagttctcttggagatgttgaaatag

SEQ ID NO: 514630 - DNA, 83 bp, Homo sapiens
tgacgctggacaagctggacgttaaagggaagcgggtcgttatgaggtcatgcatttagaagattttaatgaaggtgcttcat

SEQ ID NO: 514631 - DNA, 101 bp, Homo sapiens
gtgctgaagcctttaaatgcagcatctgcgatgtgaggaaaggcacctccaccagggacaggagagagtggcaagagtacgtttatcaagcagatgagaat

SEQ ID NO: 514632 - DNA, 92 bp, Homo sapiens
tcttcagcaagaggaccgggctgggcgcgcccggccgcgacgcccgggacccagattgcgggttcaggttgctcaagaaacagatgtgagag

SEQ ID NO: 514633 - DNA, 82 bp, Homo sapiens
tactatccgtttgttcaggaaccaccagtgacagagtgaaagacccctgacaaaagacaatcatcttctgggtacatttgat

SEQ ID NO: 514634 - DNA, 101 bp, Homo sapiens
aggcgctcatggacggaagacccctggctctataagctgaattatggcagcccagtcaaggaaaatggcaaatgcacgacagcggcctcctgaacatcacc

SEQ ID NO: 514635 - DNA, 100 bp, Homo sapiens
cgccgccttgctgctgctcaaagctgctgccgccccttgggctaaaaggaccaagaatcgccttcagccctgtctggtgcatccttggcagaaagtgagg

SEQ ID NO: 514636 - DNA, 75 bp, Homo sapiens
ggcccccagcgcagtaaggcggtgagcctctccgtcactgacctgcctagagctggaacgttacctccagagcga

SEQ ID NO: 514637 - DNA, 83 bp, Homo sapiens
ctttgctacattggaacagggccgcctctcaagatcctgataacttaagtgactctctcttttccggtgatgaagaaaatgct

SEQ ID NO: 514638 - DNA, 87 bp, Homo sapiens
ggagagatgctgggcgtggcggccgggatgacccacaggccctccctatcctgaagacattagctgagagtctggcaccttttaaag

SEQ ID NO: 514639 - DNA, 100 bp, Homo sapiens
gaagatttaaggaaacttgcagagaatgaaatcactttgtgtcaaaaagaaataactcagctgaagcatcagtctctagtgatccctgaaaagttccagc

SEQ ID NO: 514640 - DNA, 75 bp, Homo sapiens
ttctgctcctctcctgggcggcggggatgggagatctcccttgagtttagaaatctggctgagaaataccaaaca

SEQ ID NO: 514641 - DNA, 75 bp, Homo sapiens
ggcccccagaagtgatcgctcagctggagaacgcggctaaagttctgatggacccagatgatgtggtaccagttg

SEQ ID NO: 514642 - DNA, 90 bp, Homo sapiens
ctgagcgggacctgcgagcagcgcgggcggcagcccgggggaagcgggttgtgagtcccggcccagcccctccacccccctgcccccccg

SEQ ID NO: 514643 - DNA, 50 bp, Homo sapiens
aaggattccaagtaactcttatttggctcccagccaacctctgataaacc

SEQ ID NO: 514644 - DNA, 75 bp, Homo sapiens
gcttccaagagaaccaatggaatggagaaggttgaaaggattgtagacaagaggaagaacaagaaaggaaaatgg

SEQ ID NO: 514645 - DNA, 100 bp, Homo sapiens
ggaaaggaaccgttctggatcagactgtaaaaggtggaatttctgaaacaagaattgagaaacgcattgtgatcacaggagatggagatattgatcatga

SEQ ID NO: 514646 - DNA, 75 bp, Homo sapiens
tgttacaagctggttcagctttagctaattacattcatttctccaggcatagaatgtcaagctaaccaggcgtcc

SEQ ID NO: 514647 - DNA, 100 bp, Homo sapiens
actgcaaaaaggaaatctgggtcagagctcgttcgaccagtcaccatggtgcctagtgttccaggaatcccaggtccttcctctccccaaccagtacagt

SEQ ID NO: 514648 - DNA, 100 bp, Homo sapiens
gaaggaatgaaattggaagctatagacccattaaatctttctacaatatgtgtcgcaaccattagaaaggtaaagaagcttgtgtaatcgcagaggaagg

SEQ ID NO: 514649 - DNA, 101 bp, Homo sapiens
ctatcgccgagttctacaacacggccgccagatcccacccttggacccccatgaaaatggaaacaatggaacaatcaaagttgagaagccaaccatgcaag

SEQ ID NO: 514650 - DNA, 90 bp, Homo sapiens
ataaatctcgcccaaacaggaaaggaacacgatgaacctattctgaagcacttgaaagatattaaagtgaagttctcagatgctggccag

SEQ ID NO: 514651 - DNA, 82 bp, Homo sapiens
ggcggcagctgggctcaccgtgactgtcacccacaatatggctcgtggacagcagaaaattcagtctcagcagaaaaatgcc

SEQ ID NO: 514652 - DNA, 83 bp, Homo sapiens
gctcgctccggaacgagacccacagcatctgcacagatcaggatcctcatgaccagccaaagagaagaagaattaggaagcat

SEQ ID NO: 514653 - DNA, 76 bp, Homo sapiens
cggggcggcagctgaggcggaggctgacgaggaggcggatcccccggcgtcagctgcccaacatgttcggcgacct

SEQ ID NO: 514654 - DNA, 100 bp, Homo sapiens
ccgacttggccttcttcaggttcccgcgggaccctgccaggtgtaattgaaaagtgatcctctcttcagagatgtcaaaaacaaacaaatccaagtctgg

SEQ ID NO: 514655 - DNA, 74 bp, Homo sapiens
ccgcagggttcggatgagaccaggaagcgttgttgacgaccatggacatcatccacgatggatttggattcatg

SEQ ID NO: 514656 - DNA, 74 bp, Homo sapiens
tccctttcatggttccatcagccgccttcatcaaatcaaacaggggctgcttgctctcggtgactacatgaatg

SEQ ID NO: 514657 - DNA, 73 bp, Homo sapiens
gaaaagaaaacagcaacacagttacatagtaaaaggaggcctaatgagaaggcaaccaaagtgcaggacatca

SEQ ID NO: 514658 - DNA, 75 bp, Homo sapiens
cactgcaggcctccgcgctcagtggtgcttctcagcttcacgggaaagggcctgctgtaccacggaaattgtgac

SEQ ID NO: 514659 - DNA, 90 bp, Homo sapiens
gagaaacagaccagagttcctccgatggccaggaaccttttagtacttccggccaaccccttcaaggagcgaatctgcagggtcttctcc

SEQ ID NO: 514660 - DNA, 83 bp, Homo sapiens
ctcgagaatacagagagaaaattgagacggagctaagagatatctgcaatgatgtactgatccagctccaggtcccacagggg

SEQ ID NO: 514661 - DNA, 83 bp, Homo sapiens
ccggcggctgctgctgctgctgacgctgctgctgcccggcctcgggtgcagggctcgcggcctggcaagaatgtacagctgac

SEQ ID NO: 514662 - DNA, 100 bp, Homo sapiens
aaactccagaagcagaaagtacagtctatgaatgagatagtccagagcaacctctttaaaaagcaaggctctggaagaggatctgaaccagaagaagcgg

SEQ ID NO: 514663 - DNA, 83 bp, Homo sapiens
ccagtgcggcatcacctcctccaagaccgtgctggtctttctcaacctcatcttctgggctgaaggtgatgtggccgccctca

SEQ ID NO: 514664 - DNA, 100 bp, Homo sapiens
aaggccttcaacaaaacaggagtcagcccgtacagcaagaccctggtcctccaaacgtctgaggattacgatgaggacctggtgcaggaagcttcatctg

SEQ ID NO: 514665 - DNA, 75 bp, Homo sapiens
acctgcttcccaatcccactgatgaggatcagcccatggctccttcactacttccgcggccgccaccacctggag

SEQ ID NO: 514666 - DNA, 87 bp, Homo sapiens
ttttggttatgctgaatttgaggacctggattccctgctcagtgccctgagtctcaatgaagagggaattcctgggagccccgagcc

SEQ ID NO: 514667 - DNA, 60 bp, Homo sapiens
cgaggagctgaacaaccccatgaagccggagcggttgcagggcacacattactcggtgca

SEQ ID NO: 514668 - DNA, 50 bp, Homo sapiens
atgaagtgcagaggtttttttctgaatcgagagctccagatcatgagaaa

SEQ ID NO: 514669 - DNA, 80 bp, Homo sapiens
ggaatggagacacggcttcccccaaggaatatacagtgtatcgcattaagttcaaggagagctttgctgagatgaacagg

SEQ ID NO: 514670 - DNA, 75 bp, Homo sapiens
atttggcgctgcagaaccagatccgggagcacgtcatctccatcgagggttattcagcttctcaaggctggaaaa

SEQ ID NO: 514671 - DNA, 111 bp, Homo sapiens
cggcacttggcagctggacaggcagagtgctgatgtgaaaaataccacgacaaaaccaccctaccgcttacaaacacgcagatggcaagaagattgatggcaggagggtcc

SEQ ID NO: 514672 - DNA, 95 bp, Homo sapiens
gtgtccgagtgcgccctgatgctggcgcagggcacggtgggcgcctacctgattattcactgaccagcgctgacctgtcagcccttcaaggcttc

SEQ ID NO: 514673 - DNA, 75 bp, Homo sapiens
atctcggacacccagcagggacagtcagaagctcacctcccgagactcaggtggagagtctggctcagcaggcaa

SEQ ID NO: 514674 - DNA, 100 bp, Homo sapiens
caaaaggaacgctatgattatgccaagaaactaaaacaagccattgctgatttgcaaaaggtgtaataatgtcctttatatcagaggtgtggaagaagag

SEQ ID NO: 514675 - DNA, 82 bp, Homo sapiens
aggcccagaaggccaagaacccccaggagcagaagtccttcttcgccaaatacgatgggcgggatccccgctgtgaacggcc

SEQ ID NO: 514676 - DNA, 100 bp, Homo sapiens
gcagatcctgagacccggacagtggcagtgaaacagggtggcctcaggctcctcatccaggagtctgtgtgggatgaagccatgagacggctgcaggagc

SEQ ID NO: 514677 - DNA, 82 bp, Homo sapiens
gtatcccatgaaaccaccaagcattattctcctaacgcaactggatgatgctcgcaacaaagctgacaatcaagaaaaggca

SEQ ID NO: 514678 - DNA, 101 bp, Homo sapiens
gtggcctccgtgggacatggagtgttccttccgctagtgatcctttgcaccctgcttggagacggacttgcttccgctttccccacaaataaaccagagaa

SEQ ID NO: 514679 - DNA, 96 bp, Homo sapiens
cgagatgtccggctgcagcagcaagtcccatcggaggacctccctgccctgtataccgagggaacagatgacaagagcacctcaaaggcagcagcc

SEQ ID NO: 514680 - DNA, 75 bp, Homo sapiens
tggagaaagagctttcaaagcatgactcagattgatggacaacttttcttaattaagcaccttttgatacttcgt

SEQ ID NO: 514681 - DNA, 100 bp, Homo sapiens
ttggtatatgatttggattttcctgccttaagaaaaaacaaaaatattgacaactttttaagcagatatggtgagaacaagaccaagattggaaagccag

SEQ ID NO: 514682 - DNA, 74 bp, Homo sapiens
cactgagggaaaatgcacactggagactagtaaccagcttctaaagaaagagacaagcctgtggcccccagcaa

SEQ ID NO: 514683 - DNA, 89 bp, Homo sapiens
cacgaattggccttattaatgatatgcttctgcagaaagccgtcattacacctgattttgaaaaaaaccactgtgttccaccatatagt

SEQ ID NO: 514684 - DNA, 99 bp, Homo sapiens
tagctgaggagctggcattggagcaagccaagaaagaatccgaagatcagaaacgattgtctacaaagcctggctctgttcccagtattttgaagtcac

SEQ ID NO: 514685 - DNA, 100 bp, Homo sapiens
tggcaagtcagttctccctcaggcctttggtttcctcacctacaagatgagagggccggaccagatggaaattcgggggatacaagaaaggtggctacaa

SEQ ID NO: 514686 - DNA, 137 bp, Homo sapiens
ctcgccgcgctcttcttcttttctctctcgtcctcgctgctgtacttcgtctatgtggcgcccggcatagaaactggcgatggaatatgagaggagccctctggaaagaaaaggacagaccctgtgctttcatgaaa

SEQ ID NO: 514687 - DNA, 100 bp, Homo sapiens
atcatgggcaaaggacagatccagatcaggatcctcatgaccagccaaagagaagaagaattaggaagcataaatcaaagaaaaaatttaaaaatcccaa

SEQ ID NO: 514688 - DNA, 80 bp, Homo sapiens
attttgggaaactcgactttggagaaaccaccgtgctggaccgcttttacaatgcagacccttcgcaggtgttacagtcg

SEQ ID NO: 514689 - DNA, 73 bp, Homo sapiens
gggagcagcacttccacagccaagtgcgggagtccacggtagttgaattcagtgaattggacaaacccagagt

SEQ ID NO: 514690 - DNA, 96 bp, Homo sapiens
ctgatccccaccgacaattcgaccccacacaaggaggatctaagcagcaaggtatggatggcagaacagaaaatatcatatgataagaagaaacaa

SEQ ID NO: 514691 - DNA, 90 bp, Homo sapiens
ggcctgcctgagcccctcgcagctccagaagtgatctacaatggctgtcccaaagcatttgaggccggcatctggtggccacagaccaag

SEQ ID NO: 514692 - DNA, 82 bp, Homo sapiens
catgaccctgaaggtccaggagtacccgaccctcaaggttaatttggagtggcccctggagtcagtttcctacaccatccga

SEQ ID NO: 514693 - DNA, 83 bp, Homo sapiens
caagactctcttcgctctttgcatcttaactgcaggtgtccctggccagtgtccttccacctgtccacaagcatggggaacat

SEQ ID NO: 514694 - DNA, 100 bp, Homo sapiens
tcaaagagatcagagaccagggctcctgtggctcctgctgggtgatgctatgagtgaagaagacatgcttcaggcagctgtgaccatgtctttagaaact

SEQ ID NO: 514695 - DNA, 78 bp, Homo sapiens
cagaagaaggaatcagttacctaacggacaagggctgcaatctgagatctgtatctgtggacctgaatgttgatccct

SEQ ID NO: 514696 - DNA, 76 bp, Homo sapiens
agtcagttagtgacagctaatcccagcataattcggcaaaggtggatgatgaagacttacaagatgaacctttaca

SEQ ID NO: 514697 - DNA, 98 bp, Homo sapiens
agcgcggtccctgtattggtctcctgctcctagagctccgtggatggccgcgtgagacgctatgacctaaggatggggcagctcttctcagactacgt

SEQ ID NO: 514698 - DNA, 75 bp, Homo sapiens
gaggaggatgacgtagtgagcgaggacctggtacaacaggatgtccagggccaggaaggaatactgggagaatct

SEQ ID NO: 514699 - DNA, 75 bp, Homo sapiens
ccggaaggggtcccgaagccccctgcaggaactctacaacccaatccaggacattgccgagaatggctgcgcccc

SEQ ID NO: 514700 - DNA, 97 bp, Homo sapiens
gcacgacatgctggcctcgctgggtcagaatggcggcagtggagcatcgtcattcttcaggattgccctactggccctacctcacagctgaaacttt

SEQ ID NO: 514701 - DNA, 99 bp, Homo sapiens
aaggctgaacaaccagatggcattattgatgacagtcttcatttagaacttgaaaagcagcgtcgtctcggagatgcagccaagaaagccatcagtaaa

SEQ ID NO: 514702 - DNA, 51 bp, Homo sapiens
atccggaggcgccagctcaaccatggcccactgcgtgaccttggttcagct

SEQ ID NO: 514703 - DNA, 82 bp, Homo sapiens
gcccctccggccagggccgggagccgggccggcctagccagcggaatcggacatgtccaaaccaccgtgttacgaagaggcg

SEQ ID NO: 514704 - DNA, 75 bp, Homo sapiens
gccaaagcctgcccagacggctcacctgtgcgggatggaacaaaaggtgtccctggccagtgtccttccacctgt

SEQ ID NO: 514705 - DNA, 82 bp, Homo sapiens
gatgagggcgcggcagtatccttggggcactgtgcagggtcaagagcaatctgaatccaaatgcaaaggagtttgttcctgg

SEQ ID NO: 514706 - DNA, 83 bp, Homo sapiens
ctgcccttcgccaaggagatcgtctctctcatcgaggcccaaaccgccaagccggtggctgctggcagcggaatcccccagat

SEQ ID NO: 514707 - DNA, 90 bp, Homo sapiens
ctcagtcccatcactccaaggagagaagaccctacagcttggggcctgggctcctctgaccatcctcattgagaaaggaaagtgagtcca

SEQ ID NO: 514708 - DNA, 82 bp, Homo sapiens
tgcctctgtcactcctggtgaccagcattcaagaaggacagaataacgggctcccagattcacaagccccaccaagaggatc

SEQ ID NO: 514709 - DNA, 100 bp, Homo sapiens
acgatagagttgtttcttccgtggcaacagccttgaggaatatggcactagatgttcgcaacaaggagctcatagctagtggcggttggcaggaacctga

SEQ ID NO: 514710 - DNA, 90 bp, Homo sapiens
aagaaagatgtggtcaaacggcaagaagtaatatatgatttgccactgtagaagagccaaggaagagaaacttcagcaggcgatagcaat

SEQ ID NO: 514711 - DNA, 83 bp, Homo sapiens
atttgcagctcattgaaggaaagcaatggtgaactagacccctggtcaggaggtggagtaactaaggatatcacagacactct

SEQ ID NO: 514712 - DNA, 73 bp, Homo sapiens
agcaatcacagagactcggagagcatcactgatgtgggaagaatatcctgatgtttatggggtcaggcggtca

SEQ ID NO: 514713 - DNA, 100 bp, Homo sapiens
tgtatatgtttactataaactggcaagaggatggcctgaagtttgggctggaagtgacaggaagatgtcacccaagcgcatagctaaaagaaggtccccc

SEQ ID NO: 514714 - DNA, 75 bp, Homo sapiens
cgacgacgaggaagaggaggtttctgaggtatcctggtcagatataggaggactggaaagtatcaaactgaagtt

SEQ ID NO: 514715 - DNA, 99 bp, Homo sapiens
accctgaaaaactggaccaaattagacagagattcccaaatgctggaaaatcctctttgctaagttgtgtttctcatgcaaaacctgcaattgcagatt

SEQ ID NO: 514716 - DNA, 132 bp, Homo sapiens
tgatgacatctatcggaacacttcatgggataatgcaggttttaaaggctatggaatacagatagagcaggcttttgatgaggccattgctgaacttgatacactgaatgaagactcatacaaagacagcac

SEQ ID NO: 514717 - DNA, 51 bp, Homo sapiens
tatggacttcatcgctttatagtccgtggcactcaggtagttggttctgac

SEQ ID NO: 514718 - DNA, 98 bp, Homo sapiens
ggagaaacaagctatgtactctagcactgacacgtttacccacttgaaacaggtgagggcatgtgctgataagttgaaaagagaaatagagctgtatg

SEQ ID NO: 514719 - DNA, 88 bp, Homo sapiens
aaacttgatcgcattatggccagcactattaagactttgtgtggacagtaatgacctcacgtttccgattgcctgctggcagaaccta

SEQ ID NO: 514720 - DNA, 74 bp, Homo sapiens
ttgcagctgccgccgccgccaccgagccgccgcttgatattcactgatggactccaaagaatcattaactcctg

SEQ ID NO: 514721 - DNA, 75 bp, Homo sapiens
tgacaaactgctgagcctgccaatgcaacagccacggaagattaagcagcacacggaccctgactactcggctgc

SEQ ID NO: 514722 - DNA, 100 bp, Homo sapiens
ggagcctccacctcatgaagtagcttcctttggaggtggctatggcaggtcttcggagagacacttacatattcaggggaaatttgtgtttggtggctgg

SEQ ID NO: 514723 - DNA, 100 bp, Homo sapiens
gggatatctttcttcactcctcttcacttcttcagtagatttcgggcagacaacttgaacaagctgaagaacctatgcagcaagacaatcggagagaaaa

SEQ ID NO: 514724 - DNA, 75 bp, Homo sapiens
ctcgacatttccacacccagacccaaagtttgcaacaatcagtcagcccctttgatgccaagaatccgttcctgg

SEQ ID NO: 514725 - DNA, 75 bp, Homo sapiens
gaaacctacctcggcagcctattcagttggagaaggaaatagttcagcagttaattgaaaatagtacaacattcc

SEQ ID NO: 514726 - DNA, 100 bp, Homo sapiens
gcggggagatgctcttcggcctagtgcgccagggcctcaagtgcgatgattccaactccacagagtgaccagagagaggacgtggctgaagacaccaaag

SEQ ID NO: 514727 - DNA, 82 bp, Homo sapiens
gccttcgtggtcctcctcgccctctgcagccggggggatatgagactttctactcggaatatcctgagtgttgcgtggatgt

SEQ ID NO: 514728 - DNA, 100 bp, Homo sapiens
tcgacggggctgaccgctctggcccagggtgaaggatatggccctgaagccacatgagcggaaggagaagtgggagcgtcgtctcatcaagaagccccgg

SEQ ID NO: 514729 - DNA, 82 bp, Homo sapiens
gaccggatcctgaggaggcagctgcggtggcagctgctgagttctcggtgaagaacaggccgcccgcctgaagaaactacaa

SEQ ID NO: 514730 - DNA, 100 bp, Homo sapiens
ttgccacaagaagctttcctcagctgagagctaccatggaggcttattctaggaggaagaagcccctccagatggtgctgttgccgaatacagaagagaa

SEQ ID NO: 514731 - DNA, 78 bp, Homo sapiens
aagcccccacgcccagccaggagcaccgccgaggactccagcacaccgaggaccctctttcccagctgcccgctcctc

SEQ ID NO: 514732 - DNA, 100 bp, Homo sapiens
gaaccctgtctctctgcagctggacctggacaggagattccagcttcaagaagtcatgatggagttccagatgaagactggcccatttgcagagcactcc

SEQ ID NO: 514733 - DNA, 90 bp, Homo sapiens
gagaagtatatgctacaggaggagaggttcaaattgcaatggaattttctacttctggtcatgcttacactgatacagggaaagcatcag

SEQ ID NO: 514734 - DNA, 101 bp, Homo sapiens
acccagggaggacaaatgcatttctagtggctacaaatgcccctcagattgctagtgcaactactgctccatcgatcccttcacatttgtctcctggttta

SEQ ID NO: 514735 - DNA, 100 bp, Homo sapiens
gccaggcgtggggcccgaacctctggctgactttggcagggcccatctggcacggcctccgcggcgcgcaggtgctggagaatctggtaaaagcaccatt

SEQ ID NO: 514736 - DNA, 100 bp, Homo sapiens
aggcggcttgggagaatgagctgcagaagatgacccgggggcaggcgatctccaacagcatctccaagcaatgttcattttactccgcccagaagacaac

SEQ ID NO: 514737 - DNA, 96 bp, Homo sapiens
gtgccattcctcaccaggaactacctcaaacaaggcttcatggaaaagactgggccaaagatccgggctcgaaatccagcatttcagccacaaact

SEQ ID NO: 514738 - DNA, 100 bp, Homo sapiens
ggaaaaggccggagaaggtgaaattctgtgtgctccctccggcgagagactttgtcagctcccgcacagtaacagattgagaatttatcacaagttgatg

SEQ ID NO: 514739 - DNA, 100 bp, Homo sapiens
ctggtctttggcttctcgactcggtcctgtttcgacagcgaacatgtcgcggcctgtcagtactatactggcaattgctggagaagattttgcaattgtt

SEQ ID NO: 514740 - DNA, 82 bp, Homo sapiens
tcttaaagaagtcagggtgcaggatgagaacaacgatgtggacttggagttcctggctaaaatgactaatggcttctctgga

SEQ ID NO: 514741 - DNA, 83 bp, Homo sapiens
ccccgcgccgacggctgctcaaacatcaggcttgtcaaaattcccaaaaatgatcccctcaatgaagttcataactttaactt

SEQ ID NO: 514742 - DNA, 75 bp, Homo sapiens
taccctaaaattagggcatgattaaggcaagtgaaccggagcaaacgacttccgatccagtctgcgctgttgcgg

SEQ ID NO: 514743 - DNA, 75 bp, Homo sapiens
tgacaaaagaagagttaaatgccctcaagtcgacaggggatgggaccctagctctaagcgaaagacatgaggcct

SEQ ID NO: 514744 - DNA, 100 bp, Homo sapiens
ctgggtcctcggtcggtacagtctctgcacctcgcgccccagcaggactcgctcagcagcagcctgaaaacttgctacaagtatctcaatcagaccagtc

SEQ ID NO: 514745 - DNA, 100 bp, Homo sapiens
aaagagaacaacctctctgaagaagtactatactggcaattgctggagaagattttgcaattgttgcttctgatactcgattgagtgaagggttttcaat

SEQ ID NO: 514746 - DNA, 101 bp, Homo sapiens
gacccagggggctggccgcttcataccctgcagcccgttctccgactatgtctacaagcgcattaaagcacggaggaagaagctgtgcaactttgttcagg

SEQ ID NO: 514747 - DNA, 75 bp, Homo sapiens
tttcagttttggtcatcggaagtggtgccttcagcacaggaaagtccatcagcttgataatggaggagaacaatg

SEQ ID NO: 514748 - DNA, 100 bp, Homo sapiens
tggacagccccgaagacgccgacctcttccactccgaggaaatcaaggaggactcagagagagtaatgataattaccggaccaaacatgggtggaaagag

SEQ ID NO: 514749 - DNA, 99 bp, Homo sapiens
caaactggaaaaatctaatctcagcagcacatcagttactacaaatgggacaggagggaggtggggaagacagggctccagctaccacaggacgggctc

SEQ ID NO: 514750 - DNA, 100 bp, Homo sapiens
cagccgcggatctcaccgccgctcagggacatggcaaccacagagagagcagcccttttctttcccccttggaggcttccagaggaattgactactatga

SEQ ID NO: 514751 - DNA, 90 bp, Homo sapiens
gattgctcctggagcagttgtatgtgtagaaagtgaaatcagaggagatgtaactatcggaatagctattcagtcagacagaaccactta

SEQ ID NO: 514752 - DNA, 83 bp, Homo sapiens
agaagatcttcgagttcaaagagaccctcggaacaaaatatttacaccagcagctccagttcataccaataaagaagatcctg

SEQ ID NO: 514753 - DNA, 50 bp, Homo sapiens
gagtttggacagattgaatccattaattctgagaataaaggattagaaac

SEQ ID NO: 514754 - DNA, 100 bp, Homo sapiens
tcgacggggctgaccgctctggcccagggtgtaagactttgaccccgacgcaggcttcagtgattgccgcggatcagaagcctgagcactttggctcgag

SEQ ID NO: 514755 - DNA, 75 bp, Homo sapiens
cagaccttcattgctctgtgtgccaccgatccctgcatgtcactgagtccaccatgctttacagaagaagacaga

SEQ ID NO: 514756 - DNA, 100 bp, Homo sapiens
gcagccaaaggatgtgccatacaaagaactcttaaagcagctgacttcccagcagcatgcgattcttattgaccttggaataagacgagttggaagaaga

SEQ ID NO: 514757 - DNA, 75 bp, Homo sapiens
tccatgagccacccctacaccatgacaacgccttacccttcgctcccagcccagatgtggaagatgtgaaatttg

SEQ ID NO: 514758 - DNA, 82 bp, Homo sapiens
atcttgacgaggctgcggtgtctgctgctattctccgagcttcgcaatgaaactaatctggattcactccctctggttgata

SEQ ID NO: 514759 - DNA, 82 bp, Homo sapiens
gactgctagagccgagcgaagctgtcaacagcatctccaccctggagcctgtgagccggtgccagcgcctgagtgagctgta

SEQ ID NO: 514760 - DNA, 100 bp, Homo sapiens
tgatcaaacttatagatattgcacgacagactgcacagggcatggaattttcagctgaactctcatctctcaacactggcaaatattcataagatctacc

SEQ ID NO: 514761 - DNA, 100 bp, Homo sapiens
ggaattgcttcgtttgccattttcttatggagaactgtccttgttgataagaaactctttaagcctccagtgttagtatttgtggactgcaaactaggag

SEQ ID NO: 514762 - DNA, 75 bp, Homo sapiens
cagagacagaagcagatggattcgtccttttagaaatgcactcggtgatggaaagagagccactattctgaagaa

SEQ ID NO: 514763 - DNA, 98 bp, Homo sapiens
atgacgccatcctgccgcagctggcgcagcccacgctcatgatcgacttcctcacccgcgcctgcgacctcggaacacctcatcaaaatgcagaagca

SEQ ID NO: 514764 - DNA, 75 bp, Homo sapiens
ctgggcggtgccggcgccggagacgatgccgttgactttgtgtcattgtatcaagattttgaaaacttttataca

SEQ ID NO: 514765 - DNA, 146 bp, Homo sapiens
gaggcccccacactcccagctgctcttctacagatgccatcaacgagcaggactctgggtggctccactgtctaagtggaatgcagtagccctctgggcctgggatattgtggttgataactgtgccatctgcaggaaccacatta

SEQ ID NO: 514766 - DNA, 82 bp, Homo sapiens
gtggccgtggaggcagaggtggcatggggtggcagtgctccttttggacttttctctaggtttggcgctaaactcttcttgt

SEQ ID NO: 514767 - DNA, 101 bp, Homo sapiens
gtggccttagctgtgctcgcgctactctctctttctggcctggaggctatccagcatcacagattctgctggccatattctctactccaaagaggatgcaa

SEQ ID NO: 514768 - DNA, 76 bp, Homo sapiens
ggcaacatcctgtcacaggccatgctctggcaaaaacattgatatcagtaaatgccattatttagtggatttggac

SEQ ID NO: 514769 - DNA, 75 bp, Homo sapiens
tatggctcaaagaaagatgattattccagaacatacatgtgcagctggcaaggagagatgctgtgtttcacggtg

SEQ ID NO: 514770 - DNA, 99 bp, Homo sapiens
caagccatcctgctgggtatactgctcaaaagagaaggccccaacttcatcacaaaggaaggtcacaatccaaggtccggctcctccgcgtcccagggc

SEQ ID NO: 514771 - DNA, 87 bp, Homo sapiens
ggaccttaaaatacccgcaacagccccttcgtcccaaaccgagacatgggtgcccggcaccgcgcccgagcccactccattcagatc

SEQ ID NO: 514772 - DNA, 75 bp, Homo sapiens
gcaaccgccccgtctgagaaacaattcctcctcgcttcaagaagatgaagaagtagagatggaggccatcagctg

SEQ ID NO: 514773 - DNA, 75 bp, Homo sapiens
cccagccacccatcaaatcagagagaaggaatccaccttcttacgctatggcagttatggcagagaacgatgtgg

SEQ ID NO: 514774 - DNA, 74 bp, Homo sapiens
agaagtgacgatggctcttttcatatcagaggaattcgatgtcttctttccgtcctgggagaggacataatgat

SEQ ID NO: 514775 - DNA, 100 bp, Homo sapiens
gtggagaaagtcgtcttccacttgcacgaaagctttcctaggccaaaaagagtgtgatgggcagtatattcctcttcccagcttgcaaggcatagccgtg

SEQ ID NO: 514776 - DNA, 73 bp, Homo sapiens
tgcaacgtcatcctccacagctaagatcccgcccaatgacccccgcatcaagaaccaagccgactgcatcccg

SEQ ID NO: 514777 - DNA, 100 bp, Homo sapiens
tgaaattttaagcgactgtgactctgctgcaagttccccagatcttgagggtggctgtgccagtgtcattgtgtcattaactactcagtgtcctcaggac

SEQ ID NO: 514778 - DNA, 80 bp, Homo sapiens
ccgctgccctcagctccgagtccagggcgaggtcagcccaaggccaaccccactgtcactctgttcccgccctcctctga

SEQ ID NO: 514779 - DNA, 73 bp, Homo sapiens
acgaggtcaggagatcgagaccatcttggctaagaaggattgacaagcccaaggccctgtctctactgctcca

SEQ ID NO: 514780 - DNA, 94 bp, Homo sapiens
cgggaaggcgggagacgagaagcctgaaaagtcgcagcgagctggagccgccggaggaactttccgctgtactttttgccatacagaggtagaa

SEQ ID NO: 514781 - DNA, 75 bp, Homo sapiens
tcggagccccctgccgtgttcacagggaggagagagaccgagcatcggggtataggaagagaggtccgaaaccca

SEQ ID NO: 514782 - DNA, 100 bp, Homo sapiens
ttattcaccatgtacacagcctgtacccttctgctcctttcctggcagcaggggtttcaatgggagggtaatcaaatgcaaagcagctgtgctatgggag

SEQ ID NO: 514783 - DNA, 97 bp, Homo sapiens
gccgcggaaccttaggcctggccctggtctccgagcgcggcgcccgggggctggagaaggccaggcagcagctgcaggaggagctccggcaggtcag

SEQ ID NO: 514784 - DNA, 90 bp, Homo sapiens
agttaaggagcttgatttgtttttggcatactacgtgcaggagcaagttggaaaatggatataccttatttgattatgatgttggactga

SEQ ID NO: 514785 - DNA, 100 bp, Homo sapiens
acccagaggttacccagcagaccatagagctgaaggaagagtgcaaagactttgtggacagctgagcagcaagtctctgctgacatcagatgattatgag

SEQ ID NO: 514786 - DNA, 100 bp, Homo sapiens
ctgccatgtcagccttcacatccctggaccagcccatgccccagggccccccacctgtgcagaaacgtgaagagggctggtgggtggtgattggagatgc

SEQ ID NO: 514787 - DNA, 98 bp, Homo sapiens
aagagtcaaccagaaagagattgggtacttaatgagccgcagcctacagcaaactcggcaactacgcaggcgcggtgcaggactgtgagcgggccatc

SEQ ID NO: 514788 - DNA, 83 bp, Homo sapiens
ggaggagagggacatgtggaccttcatgaaggagaacaagagatctcgaggacctggaagaagcagaggagccagacatggag

SEQ ID NO: 514789 - DNA, 98 bp, Homo sapiens
ttgagtctactctgtcgctcttgtgccctagcaccccgagaaccgtcagtttgagccagatggctgcaaagttggctttcacagtgcaagcctttgat

SEQ ID NO: 514790 - DNA, 115 bp, Homo sapiens
acagttgtctgcaccctgttgtggctctataagcaggtccagtgcacgtgccaacattacactgtcagggaagaagcgcagaaaactcctccagcagatccggcttgcccagaaa

SEQ ID NO: 514791 - DNA, 97 bp, Homo sapiens
gcgatcctgcctcctccacgggtgtgtcatggagaaactccagctgggcccagagattctgcagcgggaaaatccaaggcttatttatgccaggctg

SEQ ID NO: 514792 - DNA, 95 bp, Homo sapiens
aggactgggcgggggtgatgatatccgcccagacactgactggcagagtcctgatgctttgttctgtacaagctgcccaacttgaaatttctgga

SEQ ID NO: 514793 - DNA, 75 bp, Homo sapiens
tctgccgggaagcaagaggcaaagagaatcggttggtatcgaaggatgatcgcagtgatgtggagagcagctcag

SEQ ID NO: 514794 - DNA, 73 bp, Homo sapiens
cttgtagctgcatcagcccctcctcctttctcaggttccattttgataaacctgctcctgaagcagcctttga

SEQ ID NO: 514795 - DNA, 98 bp, Homo sapiens
gcagcatgtcggtggcggggctgaagaagcagttctacaaggcgagccagctggtggccgtggtcatggacgtcttcactgacccagacctgcttttg

SEQ ID NO: 514796 - DNA, 50 bp, Homo sapiens
gagactgcagctcgacaggagtggttcatctgcgttgctctaaatgggac

SEQ ID NO: 514797 - DNA, 138 bp, Homo sapiens
tccagggtgtcaggactaagagaagtcacaaaacagcagatttcccaagagcagcggaaaatgatccagtcacagagagaagaagaaggaggttcctgctgtgccagaaacccttaagaaaaagcgaaggaatttcgc

SEQ ID NO: 514798 - DNA, 100 bp, Homo sapiens
ccttcggtcgagttggacccccggatcaaggtatctgttactaaggctgaacaagaactgggatttgccatccaaacgtgctttatctctccatattcga

SEQ ID NO: 514799 - DNA, 90 bp, Homo sapiens
cttgaatgtctgccgaaatgttcaagtttaccaaaagagaggcaccgctggaacactaatgaggactgagcagggggaggaacatttaag

SEQ ID NO: 514800 - DNA, 100 bp, Homo sapiens
gttcatgggcagcaccatcgagccagaagcagtatttgtcctgggtcgacaagaagatgctgaggaatacttaggcttcattctaaatggacttcatgag

SEQ ID NO: 514801 - DNA, 83 bp, Homo sapiens
tggacaggcagagtgctgatgtgaaaaataccacgacaaaaccaccctagagggaaaacccctgatcctaaaatgaatgctag

SEQ ID NO: 514802 - DNA, 80 bp, Homo sapiens
aggagcagcccgcggcgaccaagatcaggaacctgccctgatgctgagggttggaaaagcaaaagcagatgtgtggccca

SEQ ID NO: 514803 - DNA, 51 bp, Homo sapiens
tagggtcctttatatagaagggagagtagcccctgcctgacttctcacgag

SEQ ID NO: 514804 - DNA, 96 bp, Homo sapiens
ctgcggtcgggccaaggttccgcgccgggcgtggacggtgtggggcggtcccggccccgcaggatgaagcctgctgggagcgtgaatgacatggcc

SEQ ID NO: 514805 - DNA, 89 bp, Homo sapiens
gttgtctcgtcgtcatcgtcatcttcctgtcagtctgcagctactcaggctgcctctaagaatcaaacttcactcttgggagaaccacc

SEQ ID NO: 514806 - DNA, 82 bp, Homo sapiens
gtcccatttcgcccctcgcgtccggagtccccgtggccagctgcggttggatttctcacgatgtccagtgttatctccatgt

SEQ ID NO: 514807 - DNA, 126 bp, Homo sapiens
gggtggtctgggctcagggtatggaaccggccttctttcagccaacagacattcactcatggcaagagtacagcactgcatctgctctgtagccagtgaccactcagtaggacttctaagtttgcg

SEQ ID NO: 514808 - DNA, 98 bp, Homo sapiens
aaacgtccacatgtgggtactgcattcctaccggtgtgacagccgaatatgtgggagtccatgtcctgcagtgtggcctgatgtaatcaaactaccat

SEQ ID NO: 514809 - DNA, 83 bp, Homo sapiens
cggaaacctaaaatgtgcagcttccttgagtggcgagatctgaagattgtttacaaaaggaactgtggctgcaccatctgtct

SEQ ID NO: 514810 - DNA, 97 bp, Homo sapiens
cgctggcggcgggcatcttcttcgtgaggctgctcttcgagcgagcactctgctatttggtcctgaagcagtacacagaagcagtgaaggactgcac

SEQ ID NO: 514811 - DNA, 83 bp, Homo sapiens
ccagatccggaagaacggtgaatttcccccgcaggaaggtgctcgggtcttcggggcactgggtcccatcggtccctcctcac

SEQ ID NO: 514812 - DNA, 100 bp, Homo sapiens
aaggattccaagtaactcttatttgaaatcagggtgaaatggcccacacgtgccgtggaaccatcaacctgtccaccgcgcacattgacacggaggactc

SEQ ID NO: 514813 - DNA, 51 bp, Homo sapiens
cactcacacaccgtccgcgtccaggggggcaagattcttgccaagagaatt

SEQ ID NO: 514814 - DNA, 51 bp, Homo sapiens
gttttaactacagacccagtctctgccaaaaacgtatgtttgtgggatact

SEQ ID NO: 514815 - DNA, 97 bp, Homo sapiens
attgcctttggacagtctatggatctacattataccaataacgaggtgaggcaggcgactaatcagattgtgatgaattgtgctgatattgatatta

SEQ ID NO: 514816 - DNA, 82 bp, Homo sapiens
gacggagcgcggcaggacttggctggacggcgcggccacggagaagggcgcggttttaaaatcaaagatgggaaaatcggag

SEQ ID NO: 514817 - DNA, 100 bp, Homo sapiens
ttaagaaattttatcttttgaaacacgttctgattaaccaagggagaaactcccatgtatggaatcccactgtatgatttataaacagacaatatgtgag

SEQ ID NO: 514818 - DNA, 90 bp, Homo sapiens
ctttaatcggttagacttctcaagtgcaattcaagatatccgaaggttcaattatgtggtcaaatattctaccttgtaaatactgttatt

SEQ ID NO: 514819 - DNA, 75 bp, Homo sapiens
tctgctgggcctgtgtgcctggaaaggaattgttttggcctaggatcatccaggaaggcactgatcctgaaactg

SEQ ID NO: 514820 - DNA, 97 bp, Homo sapiens
gcatgtgattggagatcacttcaataagtccttcagtgaatctacagacctattttctcaggagctcagcctggccttacttcagtgataaaaggag

SEQ ID NO: 514821 - DNA, 75 bp, Homo sapiens
gcctcgcgctggggacgttgcgtctgcagctgcggcgcgatgcagctgccatcttgctggatgagcagaacaagc

SEQ ID NO: 514822 - DNA, 50 bp, Homo sapiens
tttctggcctggaggctatccagcgtatttctggtggtcgcattcatatg

SEQ ID NO: 514823 - DNA, 116 bp, Homo sapiens
ctgacgtggagcggtacatcgcctcggtgcagggctccaccccgtcgcctcgacagacaatgcagatcttcgtgaagactctgactggtaagaccatcaccctcgaggttgagccc

SEQ ID NO: 514824 - DNA, 100 bp, Homo sapiens
ccagtgtccaaccagggctacatgccttatttaaacaggttcattttggaaaagaagcttcactgtatgaagatagaataataacaagagagaaggacat

SEQ ID NO: 514825 - DNA, 96 bp, Homo sapiens
gacgcgtttggcaacagcgagggcaaagagctggtggcctcaggtgaaaaggtgacgcagacttacgatgcaggtgcttgtatctacttctatttt

SEQ ID NO: 514826 - DNA, 85 bp, Homo sapiens
gaccctggagcctcagttggaagcagccgatccagcctgcggagcctgtggggcagtgcactggtgattgctgcggtgtttgacc

SEQ ID NO: 514827 - DNA, 100 bp, Homo sapiens
ggccgtcctcctcacggtcctcctggctgtgctcatatacacctggtctgagaaagaaccccagtttaagtttatctacttcaaccacatgaatctcgcc

SEQ ID NO: 514828 - DNA, 75 bp, Homo sapiens
aagaagtatatgcaggaaattttgtggaatggtgcttcatgccccacctccaaccaagatcaaacgggagctgca

SEQ ID NO: 514829 - DNA, 99 bp, Homo sapiens
gccactacctcctggctgccgtgaataggcagcctaaagatgtgggcaggacatcaaccctcaaagagtagcctgggtctggcttcttgtactggagaa

SEQ ID NO: 514830 - DNA, 75 bp, Homo sapiens
aaggtgtcttagaggacattaaagggccactgtttgtggaagatataatgacaatggtgctgtgtaaacccaaac

SEQ ID NO: 514831 - DNA, 73 bp, Homo sapiens
gaagaaatagaagctgaatatgctgcattagacaaacgagagtgaacagctctgcgctttttgttactgtggg

SEQ ID NO: 514832 - DNA, 95 bp, Homo sapiens
atccgggtgatgagcatgacgcacacaggagagccaggattcatgctctacatccccatagagggaaaagcttcactctgaccatcactgtcttc

SEQ ID NO: 514833 - DNA, 75 bp, Homo sapiens
gcgtgatgctgaggtgactcgactaagagaattaaccagattcgggaactggagcctctcctctgtcacagtgac

SEQ ID NO: 514834 - DNA, 73 bp, Homo sapiens
tgaggatccccagggcatacccaacaacctcatgccttatgtctcccagtggcttccggaagttcctggtcca

SEQ ID NO: 514835 - DNA, 100 bp, Homo sapiens
ctgagtcccttctaccttcggccaccctccttcctgcgggcacccagctggtttgacactggactctcagagcatttaaatcaaacggtattgagatgga

SEQ ID NO: 514836 - DNA, 75 bp, Homo sapiens
acccagagaagaggaaaactctaccggtgcaggtaaagtcagtgataaatcttttgtttgctgcatatactggag

SEQ ID NO: 514837 - DNA, 74 bp, Homo sapiens
atgaccagctttgtcacttttgaagcgctggaggtattgctgtctctaagcctcacctgataacctgtttggag

SEQ ID NO: 514838 - DNA, 100 bp, Homo sapiens
gcaggacgtgaaggggaagaggcccaccctggagtaaccctcactggagaatccagagctgtaattgggctgttctgccgtcagtatgacatcatcaagg

SEQ ID NO: 514839 - DNA, 97 bp, Homo sapiens
tcgatggcttcgtggtggaggtctggaaccagctgctaagccagaagcgcgtggcccggcgacactcagacgggacgttcaccagcgagctcagccg

SEQ ID NO: 514840 - DNA, 75 bp, Homo sapiens
ttcaaatctgccattacccattcccacagtggatgcttcaataccgccgttggacataccagatggtcgaagagc

SEQ ID NO: 514841 - DNA, 88 bp, Homo sapiens
cccgagcaccgggccctctgcgacctggggccctgggtgaagtgctccgtcgcccttgcctccagctggaaagtgaaatttcaaccac

SEQ ID NO: 514842 - DNA, 100 bp, Homo sapiens
cgatgatctcatcctgtcctgctgcctccactactgcaaagacaaggctaaggacttcatgcccgccagcaaaggtctcggcgcggaagatggccggcgg

SEQ ID NO: 514843 - DNA, 82 bp, Homo sapiens
tctggcctggaggctatccagcgacgagattgaggagctgcgggccgagatgctggagatgcgggacgtctatatggaggag

SEQ ID NO: 514844 - DNA, 83 bp, Homo sapiens
gccgcagccaggagatggttcgggcctagcggagccgggactggagaggctgacccgcggctgattgagtccctctcccagat

SEQ ID NO: 514845 - DNA, 75 bp, Homo sapiens
cgacgtccttctggaagaggcgaaactggagttgatccctgaattttattatctccctgagatgtttgtcaactt

SEQ ID NO: 514846 - DNA, 82 bp, Homo sapiens
ccagccggaggtccagagatcctgagagcccgagcgcccagcgccgcgccgggaggtactccaaagattcaggtttactcac

SEQ ID NO: 514847 - DNA, 90 bp, Homo sapiens
cgaggcagtattgacagggaggatggaagtcttcagggtccggaggaggagggggccagtgggggagcagtccattcagacattgggagc

SEQ ID NO: 514848 - DNA, 101 bp, Homo sapiens
cggcggggccgagcgcggccctgcaggcgatgtcgccgaaaccgggctgcaggcgggaatgtatacaaagactatcgcttccttgagctggcatgtgattc

SEQ ID NO: 514849 - DNA, 51 bp, Homo sapiens
tgtatatctatctgcaattcaggaaacccaagtctgatatggtgaggactt

SEQ ID NO: 514850 - DNA, 100 bp, Homo sapiens
ggggagggggcggcggcagcgggcggacggccggcgggggcggcgtgcggcctagcgtctcaggctacggggcgtggagtgctggacctgccaacaccca

SEQ ID NO: 514851 - DNA, 90 bp, Homo sapiens
aacatagttttggaactagcagatgctggcgacctatccagaatgatcaagttatctgatgatggccgctatgtcttgttatcaataagg

SEQ ID NO: 514852 - DNA, 76 bp, Homo sapiens
gtccaatacagacctcagcttccccattatttcgaggaaggaagacagtcattttgtttactcattcagccctgtt

SEQ ID NO: 514853 - DNA, 83 bp, Homo sapiens
agctggtggtcctggtctacgtcatcggggcgtctctggccgagcctctttttgtggaaaacgacagcagcagcagtggcctg

SEQ ID NO: 514854 - DNA, 90 bp, Homo sapiens
gaccgagagcgtgaccgagagcgcgaatatcgtcatcgttagaagcccgtggaacacagagcattcctaatgacagtcctgcccggggtg

SEQ ID NO: 514855 - DNA, 74 bp, Homo sapiens
agccaaggaaaaaaagcagagaggagcggggagcaatgcagaatataacaccagcaatcctgacttgttgctag

SEQ ID NO: 514856 - DNA, 98 bp, Homo sapiens
ggagagtcccgcctgaagaaacctggatctttgctagaaagagagagcccctggccacaggcccaccaccaaccccaatgcatccaaatttgcccaga

SEQ ID NO: 514857 - DNA, 74 bp, Homo sapiens
gcctgggccgccgctgctacctgcagcgccgtgtggcacgacacaaaaatcagtgctatgctggaaaatgagaa

SEQ ID NO: 514858 - DNA, 98 bp, Homo sapiens
agaattcgtccgctcccgaggctgagcagggcggggctgagtaaatgccggcttaccatctctaccatcatccgggatttggagttccatggagtgat

SEQ ID NO: 514859 - DNA, 100 bp, Homo sapiens
ctcgcctctcgcggactgcggtgtcagccgcccgagccgttccccggacacctggccaggtgtgcttcccgcacagctgcagccatggggtctgaggacc

SEQ ID NO: 514860 - DNA, 98 bp, Homo sapiens
ttcatagctgcctgtacagaaaagaaaatccccgttgtttttcgattgcaagaggctctgcgaacatcaatagatgcttatgacaactttgacaatat

SEQ ID NO: 514861 - DNA, 96 bp, Homo sapiens
ccgtgaaggcaatgatttataccatgaaatgattgaatctggtgttatcaacttaaaagatgccacctctaagactcagtgactatctcttcacgc

SEQ ID NO: 514862 - DNA, 97 bp, Homo sapiens
ggacagccgcgcgctgagggtctcggggcgggcgccgcgggacctctccgggccatgggcaatagccctctggaacaagacaattcatgtgagataa

SEQ ID NO: 514863 - DNA, 90 bp, Homo sapiens
gtagtcggacctttcccgctggcgcgcagcctcagctaggtgcttacactccagagcccctcagcagtttccggtgggctcttctctcaa

SEQ ID NO: 514864 - DNA, 75 bp, Homo sapiens
ctcaagatacgaaatgagacttttgaagtgcctttgatttctggattgtcagcagcctgctgcctccgtaccgcc

SEQ ID NO: 514865 - DNA, 100 bp, Homo sapiens
aaagaaagtggaaagaataaacacagctctgggcaacagaacttgaacactatcacctatgaagccctggccaacgtcaacattgggagcctcatctgca

SEQ ID NO: 514866 - DNA, 100 bp, Homo sapiens
tatggtttgtgaatcatccactgttgcagacatgctacatgttgttcaaaaagaatgaatccgtctcttgctcaagtgaaaattgaagaagcaaagcgag

SEQ ID NO: 514867 - DNA, 51 bp, Homo sapiens
gagagatgagcagcttctgagtccaagccttgtcatcggccagtaagtttg

SEQ ID NO: 514868 - DNA, 90 bp, Homo sapiens
ccgaagcccagggagagcaaggcgcgcggcgactccgaacactatggctatgcatcctccaacgtcagccccgccctgccgctccccacg

SEQ ID NO: 514869 - DNA, 83 bp, Homo sapiens
gcggcagcgctggactaggtggcagatatccttggaacagaagatcttattgtggaagtgacttccaatgatgctgtgagatt

SEQ ID NO: 514870 - DNA, 73 bp, Homo sapiens
cctcccctagtatggataaaattgaccgaattaacagaccagtcctatgacaatggactggcacagggagctg

SEQ ID NO: 514871 - DNA, 98 bp, Homo sapiens
ctccgggcctcaagcgatcctcccacctcagcctcccaaagcgctgaaattacagacgagtgtgaacatggctacgcctcttcattcccgtccatgcc

SEQ ID NO: 514872 - DNA, 98 bp, Homo sapiens
atgagttctggagggcatcaacatttggtcagctgtttggagacattgcagaaggctctcaaagcactgctcagcacgcaggcatgtgaggaagctgg

SEQ ID NO: 514873 - DNA, 100 bp, Homo sapiens
gtcctgctgtctctgctgctgcttctgggtcctgctgtcccccaggagaaccaagatgatttccttgatagctgccgtgccagtactctattggctgagc

SEQ ID NO: 514874 - DNA, 74 bp, Homo sapiens
tatgaacctattctggaggcaataaagttttagcctcatctggcatagattatgacataaagatctggtcacca

SEQ ID NO: 514875 - DNA, 50 bp, Homo sapiens
cgggtctgctcgggggtctacttcgaggctattgctctggccatgagccg

SEQ ID NO: 514876 - DNA, 75 bp, Homo sapiens
cggagcttctcagaagacagagggttttcttttgaggtacaccaggggttggaaaaaccacactaggcaaagaac

SEQ ID NO: 514877 - DNA, 100 bp, Homo sapiens
gcacattgtgttctgcaaaaaacaaaaaggatagcctccggcattccaggacactttcttcatgagcaacaaaccccaaagatacaaagacaagctacca

SEQ ID NO: 514878 - DNA, 100 bp, Homo sapiens
tgcctgctggcaagaatctccagtttttgacgggggccattcagcaactgggtgggcccactttccttgtggaactgtccagagtgctggcaaatccagg

SEQ ID NO: 514879 - DNA, 75 bp, Homo sapiens
ttccacctagagcattccgtctctcatcctctgccatgtggggaaatttgcagtggtgagaaaatgtataaagaa

SEQ ID NO: 514880 - DNA, 83 bp, Homo sapiens
tcacttggcctatggaaaacggggatttccaccatctgtcccagatcctgggcagtgccatcaccttctccattcgatatcag

SEQ ID NO: 514881 - DNA, 50 bp, Homo sapiens
cgacctcatccacgccatgccaggtgctggagaatctggtaaaagcacca

SEQ ID NO: 514882 - DNA, 82 bp, Homo sapiens
catccgaaaggatgatgaagttcagttgaatgcaatgataacagaaagcaagagaagtgtgagaactctgaaagaagaagtt

SEQ ID NO: 514883 - DNA, 75 bp, Homo sapiens
cagcgcgggatcccagcctcaggcgtgcgcggacggtgtgcgggccctgagcctgtgcaattatttcgagagtca

SEQ ID NO: 514884 - DNA, 50 bp, Homo sapiens
ctcacagagttagagagagggatggtggaactgaagctgcccaccttccg

SEQ ID NO: 514885 - DNA, 100 bp, Homo sapiens
ccgcgcgcccgcgccctccgcgcgacgccaggagctgacatggacccaaatcctcgggccgccctggagcgccagcagctccgccttcgggagcggcaaa

SEQ ID NO: 514886 - DNA, 75 bp, Homo sapiens
aaatacgagaagctcgccaagatcggccaaggcaccttcgggtgtgctcctgagaaaattagaagcaggcattcg

SEQ ID NO: 514887 - DNA, 100 bp, Homo sapiens
cctccaggatttgcctttgtggaattcgaagatcctagagatgcagaagatgcagtacgaggactggatggaaacgctccagggcagtgttaccagtgcc

SEQ ID NO: 514888 - DNA, 83 bp, Homo sapiens
tgactggtgacatgcagttgtccaaaagtgaaattttacgaactcagctgagatctgtatctgtggacctgaatgttgatccc

SEQ ID NO: 514889 - DNA, 100 bp, Homo sapiens
agaaagaccttgcaattctggaggcgaaactgtgtgtgtgtgcaggccacagcagcatgcccttggtgtagtcagtgccgaaaggggtctgttccttctt

SEQ ID NO: 514890 - DNA, 75 bp, Homo sapiens
atggtgggcaaactaagccgattttccggaaaaaggactatgatgccttctttgaagccagagaaaataatgcag

SEQ ID NO: 514891 - DNA, 82 bp, Homo sapiens
tagaaaccaatggctgtgcggcgtgaggtgaccagcgccatgtccagccaggtggtgggcattgagcctctctacatcaagg

SEQ ID NO: 514892 - DNA, 75 bp, Homo sapiens
ccgaaccccgcgcccgcaggacgccccagccaggtaagaagagttcctgggtcaagtggtcaccttcataaaacc

SEQ ID NO: 514893 - DNA, 74 bp, Homo sapiens
tcgttgctgcctctgtgtacgctgaggggggagggaggatgtggagcaagatgcaatagaaagttccactgatc

SEQ ID NO: 514894 - DNA, 100 bp, Homo sapiens
gccacttttgccaaagtgatgatgttggtttatcctgaagagttaaagaatatacagatgttgccacaggaatctaatctgaaatcgtacaaatggaaat

SEQ ID NO: 514895 - DNA, 98 bp, Homo sapiens
ggatccagaagctgctgcaggacaatcagaggtagtgggactgtaccgtctttgtggctcagcggcagtgaagaaagagcttcgggatgcctttgagc

SEQ ID NO: 514896 - DNA, 100 bp, Homo sapiens
cttggtttcccgcacaaggcagcaggattgcccatgaatgaacatgggtgaaatcgttggatacagttaaacacagtgggaatatcacttttgatgagat

SEQ ID NO: 514897 - DNA, 97 bp, Homo sapiens
gaaacttctgctggtgtgagtgccctcaggggttccccaggaatatcgatacaacaccaacaggtaaaatgtcggttccaggaccttaccaggcggc

SEQ ID NO: 514898 - DNA, 97 bp, Homo sapiens
gctgacttttttatccgtggagagcgactcagggacaaaatggttgttgatcattatgaaaatcctagaaacgtggggtcccttgacaagacatcta

SEQ ID NO: 514899 - DNA, 100 bp, Homo sapiens
catcatggacagtctggcaaaagcctctgctctgcctccggggacaagaaactagagcaaataaccgttttgaaattgctcttctgaaaatggattgcca

SEQ ID NO: 514900 - DNA, 50 bp, Homo sapiens
taatataccagacactgcaactggtgctggagaatctggtaaaagcacca

SEQ ID NO: 514901 - DNA, 99 bp, Homo sapiens
ctgagaagcactatggtcgtgagagtcgtcagtgccctattccttcacatgtaattcagaaattagggacagctcctgtatcacgtggaagagatagtt

SEQ ID NO: 514902 - DNA, 100 bp, Homo sapiens
gtcctggccaaggtggcaggtgactgcttggatgagaagcagtgtaagcagtgtgcaaacaaggtgttcctgcatgaagccaccgtgcgcctgatggcag

SEQ ID NO: 514903 - DNA, 50 bp, Homo sapiens
gtgtgatcggattaaagctctgcaggtgagaaaaaccagaagcttgaaga

SEQ ID NO: 514904 - DNA, 80 bp, Homo sapiens
gtcaccatgatgcctgtcactgggggcaccattaacatgatggagtacctgttgcaggacatggcccatgaacatggaca

SEQ ID NO: 514905 - DNA, 96 bp, Homo sapiens
caaaatttaaggagttatatttggctaaagaggagagtcaattctactacagaagcaaatattcatttgaaagatggctcgtcagtaaacacagcg

SEQ ID NO: 514906 - DNA, 90 bp, Homo sapiens
cggcggtcgacatgttccaggtcccggatagcgagggcggccgcgccggctccaggttgtctgcagagtgagattatggcgaagcatttt

SEQ ID NO: 514907 - DNA, 82 bp, Homo sapiens
cgagaccaaaatcaccttccatacattgactacttacacactggtgctgactgcatttgacaatgcagatcttcgtgaagac

SEQ ID NO: 514908 - DNA, 97 bp, Homo sapiens
ctggaattagctgaagaacttctgaggattggcctgtcagtttcagagaatgtgacagtgatgataacatgggtgccaaaaatacttcaataggaga

SEQ ID NO: 514909 - DNA, 90 bp, Homo sapiens
cagaggaggaatatggcgctcttaggcagccgagcggagctggaagcggacgagatatgtcttctccgactactatgaagaagcctgaaa

SEQ ID NO: 514910 - DNA, 88 bp, Homo sapiens
aaggccagtacacacacaagatctaccacctgcagaggcaatggcagcagataaaagtgacgagtggtttgccaaacacaataaaccc

SEQ ID NO: 514911 - DNA, 101 bp, Homo sapiens
tgaaaacaatgaagattatttacaatgctaccctgctttttctggtgtcctgaacctggaagttgtgctttttaaggccatcacatctggaggaatcactt

SEQ ID NO: 514912 - DNA, 100 bp, Homo sapiens
tgacattgagcttgtttcaaattcagccaaaatgaagtttaatccctttgtgacttccgaccgaagcaagaatcgcaaaaggcatttcaatgcaccttcc

SEQ ID NO: 514913 - DNA, 100 bp, Homo sapiens
agcgagctgagtggttgtgtggtcgcgtctcggaaaccggtagcgcttgcagcatgctcatcagcgatggcagtgtggtctgcgctgaagcactctggga

SEQ ID NO: 514914 - DNA, 74 bp, Homo sapiens
cgtaatcagtgacgaggtccgctacgtaaatccctttgcggcggatagggccagatttgagtgtgtgaattttt

SEQ ID NO: 514915 - DNA, 50 bp, Homo sapiens
gcctcccaaagtgctaggattacaggcatgagccaccgtgcccggcctgt

SEQ ID NO: 514916 - DNA, 50 bp, Homo sapiens
cgcctccatctgggccatggatggagtaattccctcctggtcccagacag

SEQ ID NO: 514917 - DNA, 49 bp, Homo sapiens
tgagtggcgatcacgagaacaataaggctctatgtgctgctgtagtgaa

SEQ ID NO: 514918 - DNA, 75 bp, Homo sapiens
tgccagcaggatgtcagtcttttgaggaaacaggtcctcagaatggttggaatgaccctccagctttgaacagag

SEQ ID NO: 514919 - DNA, 100 bp, Homo sapiens
agtgaattcattcttcaagaagagttttgaagtacaggaagaaggttatctggcaaaaatcctggtccctgaaggcacaagagatgtccctctaggaacc

SEQ ID NO: 514920 - DNA, 75 bp, Homo sapiens
tccatcccttccgaggcccgacttcgatgatagcatgtctccaaatcagtggcgttactcgtctccatggacaaa

SEQ ID NO: 514921 - DNA, 73 bp, Homo sapiens
gtagacccgggcagcgcttccattccgcggagctgggctggaccccaatggagaacaggtggtgtggcaggcg

SEQ ID NO: 514922 - DNA, 100 bp, Homo sapiens
cagtaacactcaagcaaagaagagttgagcacaatcaggtctcctctgagcctccggcctccataagacccaaaacagatgacacctcttcccagtcccc

SEQ ID NO: 514923 - DNA, 83 bp, Homo sapiens
actcttttcgaagcctgacttggccaccttcgggttccccatctcatgctggaaagtgatgaagcattgggcccaacaatgat

SEQ ID NO: 514924 - DNA, 101 bp, Homo sapiens
ggaggtgcagctcaacttctaccagttcctcggggtgcagcagactccatcaagaatgctggaggaagggtgtttgtccactgccaggcaggcatttcccg

SEQ ID NO: 514925 - DNA, 83 bp, Homo sapiens
gggaagttaatgtttacggcgaagtctactcaacgtttccaagtgatgatgatgatgattttgatgatgaggaagctgaagaa

SEQ ID NO: 514926 - DNA, 98 bp, Homo sapiens
gagtacggttcttgggcaagcgcctactgtgcgcccggcgccgttctacacaggaacacagcgcttttcaagtgacatgggctcgagggttggctacc

SEQ ID NO: 514927 - DNA, 96 bp, Homo sapiens
tagggaggccagcgtgtgttgaaagcttatagcttcattgcaccatgtgtggcatttgggcgctgtttggcagtgatgattgcctttctgttcagt

SEQ ID NO: 514928 - DNA, 75 bp, Homo sapiens
ccgggagccgaccagacacgaaggctgaagccgcgacgccgaagacagctacatccgatactcccagatctgtgc

SEQ ID NO: 514929 - DNA, 102 bp, Homo sapiens
aagaaatgatgcggcgacagcaggaaggattcaagggaaccttccctgatgcgctggacgcacagaacagtctctccgtgggaggagacattatggggcgtc

SEQ ID NO: 514930 - DNA, 98 bp, Homo sapiens
ggcggcaggagcgggtagtgccagctacggtccgcggctggggttccctcctccgtttctgtatccccacgagttttcggctttgtgagaaaccttac

SEQ ID NO: 514931 - DNA, 88 bp, Homo sapiens
gtgaccgagagcgtgaccgagagcgcgaatatcgtcatcgttagaagtactttggaagtgttgctgaaatcatcaggaatcatcaaca

SEQ ID NO: 514932 - DNA, 83 bp, Homo sapiens
ttgagcctctgctgaattggatgaaagataaagcccttaaggacaaggtggtggaggtggatacagcagtcggagaacatctg

SEQ ID NO: 514933 - DNA, 90 bp, Homo sapiens
ttcagaactgttctcaggactcattattttaacatttgggagaaacacagccagaaggaggagatgttaaagtaacccatcttgcaggac

SEQ ID NO: 514934 - DNA, 100 bp, Homo sapiens
gatccttcagagcctcagccactagctgcgatgcatgtgatcaagcgagacttaattcagtgcacaaatgagatgaatgtgaacatcccacagttggcag

SEQ ID NO: 514935 - DNA, 83 bp, Homo sapiens
gtttgatgatgctggaggtgaaggaaatctgagaatgaagatgacagcgagtgggaagatgtggatgatgagaagggagatag

SEQ ID NO: 514936 - DNA, 100 bp, Homo sapiens
ctcattgtccaggagatgaagacgagactttcaaagatggaatcacaaacggcgcacattggtatgatgtggaaggcaatgatgagcaagttatcctcca

SEQ ID NO: 514937 - DNA, 90 bp, Homo sapiens
gacaggtccagttgcagatacaaacttggattttttccagtctgatccttttgttggcagcaagtgaaccggagcaaacgacttccgatc

SEQ ID NO: 514938 - DNA, 115 bp, Homo sapiens
gagttgcagcctgtcaagaccttttggatcctgattcagccatccatcgttattaggttgcccccaagtttcctggcagtgtgtgatactgaggaggtgagcttgtttctggagc

SEQ ID NO: 514939 - DNA, 97 bp, Homo sapiens
ctgaacttctcaggaagcagtactattcaagaggtcaaaatgcagatcttcgtgaaaacccttaccggcaagaccatcacccttgaggtggagccca

SEQ ID NO: 514940 - DNA, 82 bp, Homo sapiens
gtctgtctgtgcaggtggtcaactgcagccgtgtattcagccttagcattttgaaagcgaagcagaagccgtagaatcagcg

SEQ ID NO: 514941 - DNA, 98 bp, Homo sapiens
cggagtcagagtggtggctacagtgaccggagctcgggcgggtcctacagagacagttatgacagttacggccgtttgagcaaggaagacattgaacg

SEQ ID NO: 514942 - DNA, 90 bp, Homo sapiens
ccacagctgcctacagaaccgtcccaaaatatggcaaagaaacctattctgaggatggatggcaagcggcggccaggcccagggcccggg

SEQ ID NO: 514943 - DNA, 75 bp, Homo sapiens
gggagccaacaaaaattgttttttctacctgttgacgtgtcaagcactaactggtgataaaagaaaatgtggctg

SEQ ID NO: 514944 - DNA, 100 bp, Homo sapiens
tcctgtatcaggtgtctgtcggtccaagctagaagcacttttcaggattagaagaggctgtgtatagaaacatacaagcttgcaaggagcttgcccaaac

SEQ ID NO: 514945 - DNA, 101 bp, Homo sapiens
gcacttcgcattttggcattgacatttaattttagggtcctttatatagaagggagagtagttattaaagagggtgtacgggagtttcttggtaaatccag

SEQ ID NO: 514946 - DNA, 82 bp, Homo sapiens
tcgccctcggggtggcagttcccgttaaccttagccacaaagtcaaaggtttttagaacttcagccataaaaatgggcagaa

SEQ ID NO: 514947 - DNA, 75 bp, Homo sapiens
ccgctttatcaaatatgcctaaggtccataacttagtggcaattgaactggcttatatcaacacaaaacatccag

SEQ ID NO: 514948 - DNA, 100 bp, Homo sapiens
cgtggttggagagctcatctggaattttgccgatttcatgactaaccagtgctgagggtaaaaagctgggattggtaggctgggtccagaacactgaccg

SEQ ID NO: 514949 - DNA, 100 bp, Homo sapiens
agctgccgaagtcagttccttgtggagccggagctgggcgcggattcgccgaggcaccgaggcactcagaggaggccaccagcccctcgggttccaagat

SEQ ID NO: 514950 - DNA, 101 bp, Homo sapiens
ggctccggcaaccgctccggcaacgccaaccgctccgctgcgcgcaggctgggctgcaggctctcggctgcagcgctggatagagaagtttttccctcatg

SEQ ID NO: 514951 - DNA, 95 bp, Homo sapiens
ataaaagttgatggagattacctttggtacataccgagcatcaaatattaaggcacccggagaacagacagtaccagccttgaaccttcagaatg

SEQ ID NO: 514952 - DNA, 76 bp, Homo sapiens
gtacatgatcccatatagggcaggacaccaaatcctactgcaagcgagtttattcctaaaggaggatcaacctcca

SEQ ID NO: 514953 - DNA, 71 bp, Homo sapiens
tcaagaatgttactaacaatctgaaatctctggaggctgcatctgaaaagagacgaggtttcaccatgttg

SEQ ID NO: 514954 - DNA, 75 bp, Homo sapiens
cacgggcctccgaagagctgccgcgacgcccggcccgcagggcagtgacaaccatgagtggaaaaaactaattat

SEQ ID NO: 514955 - DNA, 75 bp, Homo sapiens
gataaattcccggaaccgcgattcggcgtgtcagttgtgggatatgaccccagtcgtgtcttgatgactctccca

SEQ ID NO: 514956 - DNA, 50 bp, Homo sapiens
cggggttcgggcgatgctgcagggctgaccccgcactacatctacccacc

SEQ ID NO: 514957 - DNA, 71 bp, Homo sapiens
gagccgcacaaaccagggctcgccatgaagccaggtgaatacatcaagacctggaggccacggtacttcct

SEQ ID NO: 514958 - DNA, 100 bp, Homo sapiens
ttccccaactaccaccaagtcctctccatctgatcccatgaccacctccagagctaatcaggtattgatgaagatgaccctactgctgatgataccagtg

SEQ ID NO: 514959 - DNA, 90 bp, Homo sapiens
cctgtctggagcaaggaaaagatccctggaatatgaagagacacagtatggtagccacacccccagatcgtctggtagaatcaacttcct

SEQ ID NO: 514960 - DNA, 82 bp, Homo sapiens
aggaggaatatttggtccctggtcagtttctgctttgtgtaggaagaatgatgatggagacacagttgttgtggttgagaaa

SEQ ID NO: 514961 - DNA, 51 bp, Homo sapiens
tggtcccagaaacgtcactatcaagaagtacataccgagcatcaaatatta

SEQ ID NO: 514962 - DNA, 80 bp, Homo sapiens
catccgcagtcagccacctcgcgcgcgcctccaggagcaaggatggagaggctggaacatgcttaccctgctgatgaact

SEQ ID NO: 514963 - DNA, 100 bp, Homo sapiens
tgctctcgagatggcaggagtcgggagctgcggcaactgatggagaaggcatcatgacggtgatgtcagctctgtcggtggccccctccaaggcccgcga

SEQ ID NO: 514964 - DNA, 104 bp, Homo sapiens
ttcgtgtctggctctggaattgctactgctgcctctgtcactcctggtgaccagcattcaagacacgttggtcgtcattgcctccgagcccactttagccctca

SEQ ID NO: 514965 - DNA, 74 bp, Homo sapiens
gattagtgaaaagaagatgtccacgcctgttgaagttttatgtaaggtgtcacgtcttgaaattttaaatgtcc

SEQ ID NO: 514966 - DNA, 89 bp, Homo sapiens
cgctctccccgctccaagcgccgatctgggcacccgccaccagcatggacgctcgccgcgtgccgctgcagaaccttggcctgaaaatg

SEQ ID NO: 514967 - DNA, 75 bp, Homo sapiens
gtacttgcgtccgctacagtatgtcaatcgcttgccccagcacagttaacagccaggtccttgcctgctgtgcag

SEQ ID NO: 514968 - DNA, 100 bp, Homo sapiens
gccaggaggagcgcgcgggcacagggtgccgctgaccgcagcgtcaccctttacaccagaaagctggcgggcactatggggaaaaaacaaaacaagaaga

SEQ ID NO: 514969 - DNA, 100 bp, Homo sapiens
aattggaagaagaggaggctgaagtaaagaggaaggctacagatgctgcataccagggtaggagcaacggtgggaatgccctctgaggaatgcagtgatg

SEQ ID NO: 514970 - DNA, 98 bp, Homo sapiens
gcagctggaggaggctgaggaggagaggacagaggtgcctggggcaacctccaccttgacggttccagctcaaagatcctctcaagacagtatccggc

SEQ ID NO: 514971 - DNA, 90 bp, Homo sapiens
tgcgggctgagcggcgagtttccgatttaaagctgagctgcgaggaaaatggcggcgggagtaatctatgccagcaattatgacaatgtt

SEQ ID NO: 514972 - DNA, 129 bp, Homo sapiens
ccatcattgggagaaatccccactcctccaagaaccaacccccaaattggctgggacagggcttcgtgggacacatatgcaacatgcctatgatttttacaagcctgatatgctatctgaatatcctat

SEQ ID NO: 514973 - DNA, 51 bp, Homo sapiens
caggacccactggaagcctagaaatggttgatgtgatcgtgacactgggag

SEQ ID NO: 514974 - DNA, 98 bp, Homo sapiens
gaagaccattcagatgggatctttccggatcaatccagatggcagccagtcagtggtggaggttctgctccagacgagcccttaccacgttgactcac

SEQ ID NO: 514975 - DNA, 101 bp, Homo sapiens
ccatacctggcaccatagagatgctgcatccttggaataatgaaggagcaccacctgaagacaagggcaccggtgaatccaagtgtcctctgatggtcaaa

SEQ ID NO: 514976 - DNA, 100 bp, Homo sapiens
ctccagggtagcggctaccggagcgctgcagggggctgcgcctgcctgctccgccccagacctgtcggcgaaagggaagctcttcgtgggcggtcttgac

SEQ ID NO: 514977 - DNA, 100 bp, Homo sapiens
ccagagaagagtcaagggcacgagcatcggatgtgagtatgcagtgctcacaggatatacttcgaatgctcctctctcttcagccagttcttcaggatgc

SEQ ID NO: 514978 - DNA, 100 bp, Homo sapiens
tagcagagtgcccccacgttgacgtcaactggcaggacagcgaggggaacacagccctaatcacagctgcacaggcagtccacctaaacccactgtgttc

SEQ ID NO: 514979 - DNA, 100 bp, Homo sapiens
tggagaagagcttcaactctgttcacctgcttgcagaccaggtccagggaacagtcaccatccggaacatcagtgccctgtcttcaggtttgtaccagtg

SEQ ID NO: 514980 - DNA, 100 bp, Homo sapiens
ctcatccactgctcgctgcctctccaggctgctcccggcagatcggcttctcctttgtacgacccaagctctgtgccttctctggcctctattactgtga

SEQ ID NO: 514981 - DNA, 80 bp, Homo sapiens
gcacctacgtcccgctgccgtcgccgccgccaccatgcccaagagaaagggaaagcaggcaggatgggagagtcgccgat

SEQ ID NO: 514982 - DNA, 74 bp, Homo sapiens
aggagcctcggaagtcaagagactcagagtcccataggctcggcatggctgcccggggccacagctggccctgc

SEQ ID NO: 514983 - DNA, 100 bp, Homo sapiens
cgattattagctttagtgaaatgggctaataatgctggcaaagtggaaaaatgtgcgccacgagactcaaacaacttgctgggaccatcccaaaatgaca

SEQ ID NO: 514984 - DNA, 75 bp, Homo sapiens
tggtaactgacaaggaggccaggaagaaggttctcaaacaagaatggctgttgatggtgggtgtggggacactgg

SEQ ID NO: 514985 - DNA, 74 bp, Homo sapiens
tttcccatatcagagcatcacttttcctgagttaagcaataaatatgactatgaatatgatgaaaatggtgaca

SEQ ID NO: 514986 - DNA, 78 bp, Homo sapiens
cgttgatatcggtggtaacgacggcctcagcaggcggggaagatgaaagggcagttatacttaagcatgaacattgac

SEQ ID NO: 514987 - DNA, 83 bp, Homo sapiens
ctccgagcgcaaggacagcgcgaggtccgcgcagcccagcgcagccatgaagcgccgcggagccatcaacagcaagcagctca

SEQ ID NO: 514988 - DNA, 100 bp, Homo sapiens
ctcaggccagttcgtcggctgccagcaacaatcaccagtcttgctggtggatgccctccttactccccaatatatacgtcttggatagactgttggtgca

SEQ ID NO: 514989 - DNA, 80 bp, Homo sapiens
tgctgtgtttctgccggatcagatgagcagattggttagtgaagaacaagttgaaatcatcgcagaaggataaagttcgt

SEQ ID NO: 514990 - DNA, 101 bp, Homo sapiens
gcctcccaagtagctgggagtacagattcctctggaataagcagaattgcagatggattcaatggaattttctctgatcattgttacagtgtctgttctat

SEQ ID NO: 514991 - DNA, 75 bp, Homo sapiens
aagcccccagccccttccaggccctgttctcaggtctcctctgagcctccggcctccataagacccaaaacagat

SEQ ID NO: 514992 - DNA, 101 bp, Homo sapiens
atcacctcctccaagaccgtgctggtctttctcaacctcatcttctggctggccctgaaggaccctgttcatacagtgtcactgcagcagttcatctacga

SEQ ID NO: 514993 - DNA, 74 bp, Homo sapiens
ggggcagcaacagtcgcaggagatgatggagggttccccctaaaggactcaaaacgtctaatccaatggttaaa

SEQ ID NO: 514994 - DNA, 75 bp, Homo sapiens
aaacaccactgaagcattgccaagttcattcggctcctaaagaagtagcagtgtccaaggaacaagaagagaaat

SEQ ID NO: 514995 - DNA, 83 bp, Homo sapiens
cgcggccgagtccccgtacggccacccggcggggtcctgccctccggaggagcagcctcgaggctggtggttttcagagcagg

SEQ ID NO: 514996 - DNA, 98 bp, Homo sapiens
ccggggcggtgattgcagccccagacagccggcgctggctgtggtcggtgctggcggcggcgcttgggctctgtgttacctcattttgaaagtcttgg

SEQ ID NO: 514997 - DNA, 100 bp, Homo sapiens
actgcatcctctacaacccgcagtgggcccatcttccgcacgacctcagcaaggcaactatggctgtgatggcgatgaggacgacggctactgaagtgtg

SEQ ID NO: 514998 - DNA, 98 bp, Homo sapiens
ccgggacccggagaagatgtcttcgcggacggtgctggccccgggcaacgatcggaactcggacacgatgcagacagacatgctgaactatctggaag

SEQ ID NO: 514999 - DNA, 74 bp, Homo sapiens
ggtggcaggggctgcaggagcaagtgaccaggagcaggactggggacagctgacctgatctccagcttcctgct

SEQ ID NO: 515000 - DNA, 82 bp, Homo sapiens
ccgagaacgtgcgggaagagaagatcatcgagcatttcaaacggaagctcttcgtgggcggtcttgactggagcacgaccca

SEQ ID NO: 515001 - DNA, 98 bp, Homo sapiens
cagaagagagaaagaagaaaattgctggaataatgaccttgaatagaggaaatgggatatcatctggtcagagatcagatctcgctgtcatggtctgc

SEQ ID NO: 515002 - DNA, 78 bp, Homo sapiens
ccgggatatggacctcaattatagaggcatgctcacttaataaaaaaccccgcagagagagcagatttgaagcaactc

SEQ ID NO: 515003 - DNA, 75 bp, Homo sapiens
ggacttccctttggatgtagcaaggaagaaattgttcagttcttctcaggttcaacttgcctcgaaccctgtgct

SEQ ID NO: 515004 - DNA, 100 bp, Homo sapiens
ctccttccgcggccgcacggccgacttcgtcttcatgtttctcttcgggggcgtccttatgaccctgtgtgagccgctcccatccctggcagagtctaga

SEQ ID NO: 515005 - DNA, 136 bp, Homo sapiens
cagcgtacatactgaatgatctctacatctcagactactgtgtgtggattcagaaagtcaaagatggggttttgccgtgttgcccagactgatcttgagcttctgagctccagcgatcagcctacctcaacctctc

SEQ ID NO: 515006 - DNA, 80 bp, Homo sapiens
cagcagaatttgaccaacatcaccatgtcgcgggaggcagacctggactttgcaaggtttccatggatctcaatagtgcc

SEQ ID NO: 515007 - DNA, 75 bp, Homo sapiens
cgagcgagcggcgcccagcccagcgcctcggccgaacccctccgcagcaggttccactctggtgcaccctttcag

SEQ ID NO: 515008 - DNA, 97 bp, Homo sapiens
caggttttaaatcaagatttaacattccaacacataaaaattatttatccaacagctcctcccaggtgactctgacatcattagaagcatgccagaa

SEQ ID NO: 515009 - DNA, 100 bp, Homo sapiens
accggctgcagcctggcctgctggttcagaatctcccatgatgattggtgagttgagaagtgaccttgatgatgttgatccctagaggaacatgcccagc

SEQ ID NO: 515010 - DNA, 83 bp, Homo sapiens
ctgacgaggaggcggatcccccggcgtcaggacgctgctgaccggggcggtgggctccctgctcctggaatggtacggctggc

SEQ ID NO: 515011 - DNA, 100 bp, Homo sapiens
tgacttcggctggtctgtgcatgcgccctccctgaggcataaacttggaggaggcagtggagagagcatcctggtatcacagcttcagcatggactgacg

SEQ ID NO: 515012 - DNA, 100 bp, Homo sapiens
cagagatggcagtgggggctcccgtggcaaaagagaaggaagtgctagcggtggaatggtctggaacacggacctggtggagaccctggagctgcagaac

SEQ ID NO: 515013 - DNA, 100 bp, Homo sapiens
cttcaccatttacccaagccagagcacattggatccgagcagttaccaaggttcgactccagctgcaggagataatgagaagcccatgcgagtggtggat

SEQ ID NO: 515014 - DNA, 119 bp, Homo sapiens
gcacctcggggacattattgcgcgtggaacggctgcttttggaagatgccttcaattaagttgcagagttctgatggagagatatttgaagttgatgtggaaattgccaaacaatctgt

SEQ ID NO: 515015 - DNA, 100 bp, Homo sapiens
ccggctgcaatggtgtccaatcccgtgcatggcttgccctttcttccgggcacgtcctttaaggactctacggtcagcccaaggctgccccctcggtcac

SEQ ID NO: 515016 - DNA, 98 bp, Homo sapiens
aatttctttctcgctgatcgcctaacttctactgacgaagcttggaagttgcagaaggtgtagagttcggtgctcgaatgataactattgatgggaaa

SEQ ID NO: 515017 - DNA, 50 bp, Homo sapiens
ggtttctcactgtgatgatgaagcatggctcagcaacagcctcaccaagg

SEQ ID NO: 515018 - DNA, 82 bp, Homo sapiens
acatctctagataacagtctgcactttcacccgtttcaggttgcctgttcactctgatcgtagtattggaagttctggccaa

SEQ ID NO: 515019 - DNA, 95 bp, Homo sapiens
agagggtgttcgactgctagagccgagcgaagccaaattgtggctactaatttgccccctgaagatcaagatggctctggggatgactctgacaa

SEQ ID NO: 515020 - DNA, 100 bp, Homo sapiens
ctatgcccaggacctgtatgtcatcggggtccaggagggctgttctgacaggccctgatgtccctgttcgttttggcctccaaggatggttgggtggaca

SEQ ID NO: 515021 - DNA, 88 bp, Homo sapiens
atgattggctctttagctgaaatacttctgaagattgcgcagtctctttgtggagaggacttgatcattaaaggaatcagcgttcata

SEQ ID NO: 515022 - DNA, 74 bp, Homo sapiens
tccactccgtcccccgcgggtctgctctgtgtgccatggacggtaattcgccaaaatgacgaacacaaagggaa

SEQ ID NO: 515023 - DNA, 75 bp, Homo sapiens
gaagactcggaatggcaggcatctcaggacggtcgggccctggaaggaacgctctcggaattggccgcggaaacc

SEQ ID NO: 515024 - DNA, 100 bp, Homo sapiens
ctggtgtctgagtggatggggacctgcctgctgggggcagctggcattttatgctatgtgggagcctatgtcttcatcacttatgatgactatgaccact

SEQ ID NO: 515025 - DNA, 75 bp, Homo sapiens
gcagcgggggcagtcagagcggagccaagatgcgaatggggtttactgggaaactggtgctcagatcacatctcc

SEQ ID NO: 515026 - DNA, 96 bp, Homo sapiens
tgcaccccctggatggcccttcagccaacgggggcctgggcgatgacctgtgaccgcatcaagcagtcagcagctggcaccaagcgtcgggtgttt

SEQ ID NO: 515027 - DNA, 111 bp, Homo sapiens
tttgtgtggagcacacattgaatgggccaaggaaaaatcgagcagaaagaatgtctttcaggagttcctcactgaggccttgcctgtgaagctcattgggatgaattgcac

SEQ ID NO: 515028 - DNA, 74 bp, Homo sapiens
atctataccacaagcaaccacatcaaatatgctgtcaccactgggtatttgaaatatctcaccaaaaaatattt

SEQ ID NO: 515029 - DNA, 75 bp, Homo sapiens
ggcgtccgagtcaacaaccgcttcgagctggaggataagatcaatgccctcattaaagcagccggtgtaaatgtt

SEQ ID NO: 515030 - DNA, 50 bp, Homo sapiens
ccaaacctcaagtatacaattaaatggtgaccagaagtcagcagcttccc

SEQ ID NO: 515031 - DNA, 100 bp, Homo sapiens
taatggaaagtatcttggcatcaataaggagttatatatgactatatcatcatgtacatagaaaaatccaaaggattctgcaaaaaagctactagaacca

SEQ ID NO: 515032 - DNA, 100 bp, Homo sapiens
cggcaacgttgaggcagaatcaaaacctggggaaagaccttaggtattcagggacctgttgcaatgagagtggcaaaattagcaattaatcaagggatgg

SEQ ID NO: 515033 - DNA, 98 bp, Homo sapiens
ggagcgcggcaggacttggctggacggcgcggccacggagaagggcgcggcatccgagatgtttccaaatggagtgagagaacaagaaagcctctaga

SEQ ID NO: 515034 - DNA, 100 bp, Homo sapiens
taaactttcctatttatgtatggagcagcaaggtgtttggagaagagggattgaccctgaatcttgaagacgttcagcctcatgacttaggaaaagttgg

SEQ ID NO: 515035 - DNA, 82 bp, Homo sapiens
tccagtctgatccttttgttggcaacatgcaagaaagcacttcagccaagcagaagggagccagctggacgaggtgcgccag

SEQ ID NO: 515036 - DNA, 101 bp, Homo sapiens
gccagaacagcccaagatggccgacttcgatgatcgtgtgtcggatgaggagaagaccccatatcatgtgaacctcctcctggctggctatgatgagcatg

SEQ ID NO: 515037 - DNA, 96 bp, Homo sapiens
ccaggtcttcagcacccacccaccgtggtacaggcatctccttggaaacaatgccatctttgaatgtgagagataaacctagtttcagcatgtctg

SEQ ID NO: 515038 - DNA, 100 bp, Homo sapiens
cagtttttagtcagtggctcaagtgatgaagctgcctacatatggaaggtgatcagaggactgctgaaattttggccaaaaacctgcagtcagaaagagg

SEQ ID NO: 515039 - DNA, 90 bp, Homo sapiens
ctcgtggatcttctcgctcctattgatgaactcccagagggcgctgtgaagcctccagcaaacaagtatcctatcttcttttttggcacc

SEQ ID NO: 515040 - DNA, 100 bp, Homo sapiens
ctgttgtattgcaatcatggtgcagaaataccagtccccagtgagggtgtacaaatacccctttgaattaattatggctatgcagaggccaggatgtggg

SEQ ID NO: 515041 - DNA, 105 bp, Homo sapiens
gatggcaacggccaacttcggcaagatccagatcgggatttacgtggagatcaagcgcagcgatggttagcactctacgtatatgaatatctgctccatgtagga

SEQ ID NO: 515042 - DNA, 50 bp, Homo sapiens
gaatgaacaaacattgagagcaggtgctaaaatgatgtattttctggaca

SEQ ID NO: 515043 - DNA, 114 bp, Homo sapiens
cttccccaggcctgcgtccgagtctccgccgctgcgggcccgctccgacgcggaagacaatgcagatcttcgtgaagactctgactggtaagaccatcaccctcgaggttgagc

SEQ ID NO: 515044 - DNA, 75 bp, Homo sapiens
cagcagtcaagtatgtcccaaacgtctgttaatgactccagagagtaagatcagattcgtccacaaagagatggg

SEQ ID NO: 515045 - DNA, 100 bp, Homo sapiens
gccgagactggaatgttgacctgattcccaaattcctcatggctaacgtttctccacagacactacccaaagcagtccttcactacagtggcagacagac

SEQ ID NO: 515046 - DNA, 74 bp, Homo sapiens
ccagatgcaagagctgcacaagtctctccggtcagggcctttctacttacaaggaactttgttctctggcaagt

SEQ ID NO: 515047 - DNA, 100 bp, Homo sapiens
tcacgtcgcaggagcacacactggaggagagacagcgtctggagaccatcctcagtctctgtgctgaatacacaaagcctgacagtcgcttatctactgg

SEQ ID NO: 515048 - DNA, 100 bp, Homo sapiens
tggcgcctgaggttctcccattaggatttttcaagccacattcaattgataggatgaaaaaatttaagagaaggctatccctcacactccgaggaagtca

SEQ ID NO: 515049 - DNA, 83 bp, Homo sapiens
tgcagctggccaaactctgctatgacccagattttgtttactcctggcttgggggcattaggaagcactggaggctcttcggg

SEQ ID NO: 515050 - DNA, 51 bp, Homo sapiens
gtgacaagctcaaggcctgcgaggtggcatctccacagaaagcgactgtgc

SEQ ID NO: 515051 - DNA, 90 bp, Homo sapiens
cgccaaccccttcgagcaagacgtgggtgaaatgacaatggatgctctgttggctcgattgaaacttctgaatccagatgaccttagaga

SEQ ID NO: 515052 - DNA, 99 bp, Homo sapiens
ttattgtcattgcaagcactattggcagctgcagagccagatgatccacaggatgctgtagtagcaaatcaggttggtacagaggatataccctccaaa

SEQ ID NO: 515053 - DNA, 100 bp, Homo sapiens
ccgcgcgccgtggccgcgtcccactcctcaggccggggcgcacgtcggctcccacgcttagccagctcccgtttgcagaaaaaacttcagcatgtgccag

SEQ ID NO: 515054 - DNA, 75 bp, Homo sapiens
cggatggccccaggtgtaagcgcagaaagcaggcgaacccgcggcgcaataacgcttcggaaccaaaaagaagct

SEQ ID NO: 515055 - DNA, 90 bp, Homo sapiens
gcagagtttggagtatttggagcaagtgtgaagagtgccagtgctggcagcatggggtctgcatgggattactggaagaaaatgtgcccg

SEQ ID NO: 515056 - DNA, 82 bp, Homo sapiens
cgaggtggtgggactcaccgctctggccagggtgcttttggaaacatcgtgttcgacgagtgtcacaaagccaagaatgccg

SEQ ID NO: 515057 - DNA, 83 bp, Homo sapiens
caccaggagacgcaactcatcggaacttaaggcatacagaacgatggagtatatggcagaatccaccgaccgcagccctggac

SEQ ID NO: 515058 - DNA, 85 bp, Homo sapiens
agagagcgagctgagtggttgtgtggtcgcgtctcggaaaccggtagcgcttgcagcatgtcaccacgttctgcgcttttccgag

SEQ ID NO: 515059 - DNA, 100 bp, Homo sapiens
acagagtttggggacactgatatgaagtacttactatatgaggatgagaaggatttcaaggtaggtgatgctctgatgctgctgcctcttatgaattgac

SEQ ID NO: 515060 - DNA, 88 bp, Homo sapiens
ttctttcttaaaggactgatttttagaactccacatttgaggctcttgtcaggatggtgaagctgttcatcggaaacctgccccggga

SEQ ID NO: 515061 - DNA, 100 bp, Homo sapiens
ccttgcagatctattccggccacccattgatttgatgcataaaggcagctttgaaacatttggtggagaaccattgtcatatacccggttcagcctggct

SEQ ID NO: 515062 - DNA, 100 bp, Homo sapiens
aagctttttgagagagatgaggatttgcccaccctttaaacagatcaatgaactgagccatgttcaaatccctgttatgttgatgccagatgacttcaaa

SEQ ID NO: 515063 - DNA, 82 bp, Homo sapiens
gtggaattcatccttccgaggactgagatgaggacggaaaatgaaccatcgaattcaattcgtcataatctgtccctacaca

SEQ ID NO: 515064 - DNA, 90 bp, Homo sapiens
cagagcttggaaggatgcttcagctcatcttaggctgtgctgtgaactgtgaacagaagcaagatagaatgagtccatttaagtcccagg

SEQ ID NO: 515065 - DNA, 75 bp, Homo sapiens
tcctgtacagcctgcagaactggacttaagtcacaacagattatctttcatcaaggcaagttccatgagccacct

SEQ ID NO: 515066 - DNA, 106 bp, Homo sapiens
atgctggaagcactgaaattacctctcagatatgttcctaaaacatccctgagttcaccaccttggccagaagttgttctgccagacccagttgaggagaccagac

SEQ ID NO: 515067 - DNA, 82 bp, Homo sapiens
acaaacacccccaagcaacttagaatgcagcttcagcagaggctgcagggccagcagataatgaacagttggcgcgatcagg

SEQ ID NO: 515068 - DNA, 82 bp, Homo sapiens
aagcagcaatccaaaagagtctcaaggatccttcaaataacttcaggctccgccgcatgcaagagatgattgcaaggatgca

SEQ ID NO: 515069 - DNA, 90 bp, Homo sapiens
tgctgaatgaagggatgaaggaggactgctagcgtctaaggtggatagatacttctcaagacatcacacagcgtgagtcaatcaaggagg

SEQ ID NO: 515070 - DNA, 83 bp, Homo sapiens
cggacggcccggatgagtacgataccgaagcgggctgtgtgccccttctccacccagaggtcagcccaaggccaaccccactg

SEQ ID NO: 515071 - DNA, 75 bp, Homo sapiens
gaacaccttattgagaaatgggagttacagagagttaatcactgttctgaagatggtgtttgtaacaccagttat

SEQ ID NO: 515072 - DNA, 80 bp, Homo sapiens
tggatgagttccacctcattttagagtatcaagcagatcatggaagggaagtggttgctgtgtatgttactggtgcttgg

SEQ ID NO: 515073 - DNA, 89 bp, Homo sapiens
gcgtccacctgctcgtccgcagagaggcacagttgaatgctgttgatgctttgattgactccatgagcttggcaaagaaagatgagaag

SEQ ID NO: 515074 - DNA, 98 bp, Homo sapiens
aagagctgatccagtggacaaaagaggggaaactatgggagttcccaattaacaatgaagcaggtgaatctggattgggaaagtcgacattaatcaac

SEQ ID NO: 515075 - DNA, 96 bp, Homo sapiens
aagttctcaattttgaacaagctatcaaggctgcctctaagaatcaaacttcactcttgggagaaccaccaaaagaaattcggctcagtaaaaatc

SEQ ID NO: 515076 - DNA, 100 bp, Homo sapiens
actgcagcctcaacttcttgtcctcaagtgatcctcccaccttagcctcctaagtagctgggaccacagctctttcgacgtgtagcagcagctttgccgg

SEQ ID NO: 515077 - DNA, 100 bp, Homo sapiens
agctgttgcaactgttctgctgaatcctggtaattgatgtccacccgagaaatccctgcagatgttccagcctctgtctagtccagatagccacaggaag

SEQ ID NO: 515078 - DNA, 100 bp, Homo sapiens
gccgcctggacggctcgggcgctggaggctgaagccgacgtagcttctctgaacagacgcatccagctggttgaggaagagttggatcgtgcccaggagc

SEQ ID NO: 515079 - DNA, 100 bp, Homo sapiens
aaggggcattatcccgctggatgcacactgctgcgtggaggcctttggacaagcacacacaaaccacaagaaggtggctgctgacggagagagccgggag

SEQ ID NO: 515080 - DNA, 76 bp, Homo sapiens
cgcggtcgagatcgccatgcctacccctgttcgggggtcttgtctggattttggttgcctcctccaatgttcctct

SEQ ID NO: 515081 - DNA, 86 bp, Homo sapiens
cttcctcgattgtgccgcgagggctcaggtactgatgctttgggttggaaaaaattgtacacagaattttctcagccaagttctag

SEQ ID NO: 515082 - DNA, 82 bp, Homo sapiens
taaagtcttttgtgaattatttcctgaagtcgtggagtctctgctttctatccgtcaagatgataaagtcgtgtgcccgaga

SEQ ID NO: 515083 - DNA, 100 bp, Homo sapiens
cctgcctttctccaaggcatgactgacttcttgcaggcaaaaccagctctgaaaattcctcagaccaaggcctgcccaaagaaaaccaataccactgcat

SEQ ID NO: 515084 - DNA, 96 bp, Homo sapiens
cgcggcccgcgcgcagccggccgggggcagctggcattttatgctatgtgggagcctatgtcttcatcacttatgatgactatgaccacttctttg

SEQ ID NO: 515085 - DNA, 50 bp, Homo sapiens
gggagtgatgtcttccagactcggatgtacagttacccagcacgtgtacc

SEQ ID NO: 515086 - DNA, 100 bp, Homo sapiens
ccttgtggggactggaaagaggacgtggagacctttggcgacttggcctttggcgacatcttcctccacctgctcacgggcaaccttgcgctgctggccg

SEQ ID NO: 515087 - DNA, 98 bp, Homo sapiens
ggtgctggtgtacttcgtggtcaggacggtcagtttcctggcatttaacatggacacagttgatgatctcgcctttctgttgaaagcagtgaaatttc

SEQ ID NO: 515088 - DNA, 82 bp, Homo sapiens
ctcgttctcttttttgataataagagaagttgtaagactttgaccccgacgcaggcttcagtgattgccgcggatcagaagc

SEQ ID NO: 515089 - DNA, 100 bp, Homo sapiens
gaaatccaaacctatactattgcagtgattaatgcgcttttcctgaaggctcctgatgagaggaggcagatcttaccaatatatttgagtccttcctgcc

SEQ ID NO: 515090 - DNA, 74 bp, Homo sapiens
ccgaactcgatctgggggagccagggatgaacgatatcgatcaggctttcatgagaaggacaagaagccatatt

SEQ ID NO: 515091 - DNA, 73 bp, Homo sapiens
gggagaagaggaggatgcggctcgtggtggatggcatggggcgctttggcagatttttgatcaccatactgaa

SEQ ID NO: 515092 - DNA, 80 bp, Homo sapiens
aagatgctgcaaaacgtgactccccacaataaggagagctggtgacggcctccaaggccatcattgaaaaggagtaccag

SEQ ID NO: 515093 - DNA, 90 bp, Homo sapiens
acttgattttgcaaaagaagcaacaacttcagatgtggaaagaggcaaaacctgatgaattaatggattccaaattgagatgcgtatttg

SEQ ID NO: 515094 - DNA, 100 bp, Homo sapiens
gcggttcttctccagcgccctggcctccctcaccttggacacctcgcttgggtggagctaacaggacatagtatctttgacttcactcatccctgcgacc

SEQ ID NO: 515095 - DNA, 82 bp, Homo sapiens
gtcttgtagcagcgcctcctcgatccaagtattttagaacatgctcaagaggtgagcacttaacaatagaggtaagtagtcc

SEQ ID NO: 515096 - DNA, 100 bp, Homo sapiens
caccggccgcctcagccatggacgcgtccctggagaagggacctgatgcccagaaccctggacgggcagatcaccatggagaagacgcccagttacttcg

SEQ ID NO: 515097 - DNA, 74 bp, Homo sapiens
tgtgagtggaagccatgaggccaaaggcagttgtattgcctatgaaagagacaaccagcaccaagatgaagcag

SEQ ID NO: 515098 - DNA, 100 bp, Homo sapiens
atgtagccaagttcacatcaagtccagggttaagtacagaagccacgagactcaaacaacttgctgggaccatcccaaaatgacagagctctaccagtct

SEQ ID NO: 515099 - DNA, 87 bp, Homo sapiens
ccaagctgtcatcacaaaagagttgattgaaattatctctggtgctgcagctctatctgttgtcaccgaaggtcattacaagaagat

SEQ ID NO: 515100 - DNA, 100 bp, Homo sapiens
tttctatgagaagcgtatggccacagaagttgctgctgacgctctgggtgaagaatggaagggagctgagcacataacgacttacacgttcaatactcac

SEQ ID NO: 515101 - DNA, 100 bp, Homo sapiens
ggtgactgaagttcgtgctgatactggaggacttggaaggagacccacccgaggacgggtcaccatggctttggagcacctggtagtgtggcatgtccac

SEQ ID NO: 515102 - DNA, 100 bp, Homo sapiens
ttgccttgtcagccatggatatggaacagaaagactatgactcgcgcacagctctgcatgttgctgcagctgaaggttggtgggacaagtgatgttgaag

SEQ ID NO: 515103 - DNA, 100 bp, Homo sapiens
gaagacaagttctatagcctggatgaattgcatattctggacatgatagagcaggcaaaagagatttcactagcagacctccaggagaattatattgagg

SEQ ID NO: 515104 - DNA, 98 bp, Homo sapiens
tcagatgtatgatcgtgtgattgactttgatgagaacactgctctggatgatgcagaagaggagtcctttaggaagatttgctgaccatgaaagaata

SEQ ID NO: 515105 - DNA, 96 bp, Homo sapiens
cagacaatgcggacctctctgggctggctattaagttactttgacgagccagtggagttaaggagcagttctttctctagctgggatgacagttca

SEQ ID NO: 515106 - DNA, 82 bp, Homo sapiens
ctttcccctgtcattgcacccaaaaaagcaaggccttctgagactggatctgatgataataccgtagcagtaggcaggacag

SEQ ID NO: 515107 - DNA, 90 bp, Homo sapiens
gatcttccccagcagcagtggcaaccccgggggcagcagcaactgccggacgccctatcgcaagcagtgctgggcctaaaggagataaca

SEQ ID NO: 515108 - DNA, 82 bp, Homo sapiens
gaggactgactggggttctgagactccctgtcccggaccgcaggtactccaaagattcaggtttactcacgtcatccagcag

SEQ ID NO: 515109 - DNA, 98 bp, Homo sapiens
catgaccatcggcacggactccgccctgcacaggatcatcgaggtcgtcgacgccatcatgaccacggcccagagagaccccaagtttgtggagcgaa

SEQ ID NO: 515110 - DNA, 83 bp, Homo sapiens
gcctgatgctgaactctcgagggtcgcaatggaagaagagatcgccgcgctggtcattgacaatggctccggcatgtgcaaag

SEQ ID NO: 515111 - DNA, 122 bp, Homo sapiens
ccatctccacttaatgactgtctcacattggccggcaacttgttccagagtagtgaagccccgtgtcaactcactgaggcccaaggggttagggctgggtgccaacctgaccgaggcccagg

SEQ ID NO: 515112 - DNA, 74 bp, Homo sapiens
ctagggcctgcacccagcctgggtcaggcctctcacagtgactccgaaatgattcttcaaacacctaaatgaaa

SEQ ID NO: 515113 - DNA, 75 bp, Homo sapiens
ggttgttgaagaaataagaaggagaggtggaaaagcagtggccaactatgctcttcaaaatgtcacaggtggaag

SEQ ID NO: 515114 - DNA, 74 bp, Homo sapiens
gtggatcgttgttttgaaactcgtagtcgagatcgggatcggtatagacggagaaatagtcggagccgaagtcc

SEQ ID NO: 515115 - DNA, 105 bp, Homo sapiens
gcctcatccaaatgagacccttcctggagaaccgggcccagcagcactgggacaatgcagatcttcgtgaagactctgactggtaagaccatcaccctcgaggtt

SEQ ID NO: 515116 - DNA, 80 bp, Homo sapiens
atggccagctttcccccgagggtcaacgagaaagagatcgacatttctcttgggaagttgtgcatctgacaggaatatag

SEQ ID NO: 515117 - DNA, 83 bp, Homo sapiens
tcaccagtgaagccgtgacatcctgggatattctttgttgagagaaccaaaaacttttgctagaaaatcagcttttacgagag

SEQ ID NO: 515118 - DNA, 75 bp, Homo sapiens
ttctgatgatggcagcttaaagagttccaggaaatgggtcctgatgaatatgaagagatggaagaagaggaggag

SEQ ID NO: 515119 - DNA, 75 bp, Homo sapiens
agacttgaacttaatacagcaagaaagaccatcaagtttaccaaatgtggcagatcagattgcatttcaagctgc

SEQ ID NO: 515120 - DNA, 100 bp, Homo sapiens
agggatatctttcttcactcctcttcacttcttcagttcccaaagtaacgtacactgaattctgtcaaggtcggacaatgagatgggccttagcttggag

SEQ ID NO: 515121 - DNA, 100 bp, Homo sapiens
gttataagctgcactgcatggttgctgctggatgtgttgtgttcctggcttccctctggatgctgacagaaacaaggccgctttggcagagatcacggag

SEQ ID NO: 515122 - DNA, 82 bp, Homo sapiens
aacttagctcgacggggctgaccgctctggcccagggtgcctgatcctgcctgaagatggtgccactggtggctgtggtatc

SEQ ID NO: 515123 - DNA, 82 bp, Homo sapiens
tgtggggagtattcttagtagagaagctacactgcagtttgcctttctaggcctgattcttcactacctgagacgtctaaaa

SEQ ID NO: 515124 - DNA, 75 bp, Homo sapiens
caaggcaagaagaacatcccgcggatcacggatctagtgaaaagccatttgatgtatgcggtcagagaagaagtg

SEQ ID NO: 515125 - DNA, 50 bp, Homo sapiens
gctgccgaggctgttgctgttgatctgtgatgcagtcactgaacaggcag

SEQ ID NO: 515126 - DNA, 74 bp, Homo sapiens
gaaggattaattacacaaggtggaagcgccttactaaagatcacaggaagagaccaaagtataataagctactt

SEQ ID NO: 515127 - DNA, 83 bp, Homo sapiens
ccgctgtcctctgctgccagtcccctgccccgggcaaagcccatctggtccgccgagcaggtcagagtggtgctgggaacaac

SEQ ID NO: 515128 - DNA, 100 bp, Homo sapiens
gagtggaggctcaccgaggcgaaggggccaaccatgggaaaggagagtggatgggactcagtaatccatgacaaattgcctctccaagaaagtgaagaag

SEQ ID NO: 515129 - DNA, 98 bp, Homo sapiens
aaatgtataccagagctgcaaatatgttcaagatggctaaaaattggagtgatattgatgatgttaagaagttcaaaccgggttacctggaagctact

SEQ ID NO: 515130 - DNA, 75 bp, Homo sapiens
ttgttgcctccttctcaaaactcaaatactctttattcatctaagctgctgctgttcttgaagggtttttcagag

SEQ ID NO: 515131 - DNA, 82 bp, Homo sapiens
agcaaaaccaacgcctggctcggagcagcagcctctgaggccgacgcctccccccagggtcagctgcgggctcccaggccta

SEQ ID NO: 515132 - DNA, 80 bp, Homo sapiens
agctcgagagagcattacaagccagcctctgggaccgagaatggatcttctaaccaaagacggagatttaatccacagta

SEQ ID NO: 515133 - DNA, 75 bp, Homo sapiens
caggcatgccccgctacgagctggctttaatcctgaaagccatgcagcggatgaggaaaatgaggcccaaagaag

SEQ ID NO: 515134 - DNA, 98 bp, Homo sapiens
ctgctatgaatgggagaaaaattttgggaaaggaggtggagcccatgtgcaaggagagcgaccacatccacatcattgcgctggcccaggccctcagc

SEQ ID NO: 515135 - DNA, 82 bp, Homo sapiens
aaagagtcaacagcagtggcaacaggtatttatgagcctccatttcttatactactgcagtgaaccaacattggatgtgaaa

SEQ ID NO: 515136 - DNA, 83 bp, Homo sapiens
cagcctcgttgcggccatcgccctgccggaccgcgcctcaggctcccccagaacatggtccaagacaattcctgggaaagttc

SEQ ID NO: 515137 - DNA, 100 bp, Homo sapiens
gtgtgaaggacctgtgtcagcgtgctgagtaccagacggcgtgtgagcagctgggacaggaaagaccacagcaagattctttcattcgtctcctcctagc

SEQ ID NO: 515138 - DNA, 102 bp, Homo sapiens
tgccgtccttctccactttcgccagcccgtgccgcgagcgcggcctgcaggagcagcccctgtcaaagggaacaggaagcagtccacggagggtgacgccct

SEQ ID NO: 515139 - DNA, 82 bp, Homo sapiens
cttgaaaagatgatagctttagttgctcttttggttgaacagtctcgatcagaaaggctgagtttgagaaagctgcagagga

SEQ ID NO: 515140 - DNA, 74 bp, Homo sapiens
tcaccccggatttgtggcaagaagcatgctggattgtaatcagtgccggtggtggtgtgcacattgagccccgg

SEQ ID NO: 515141 - DNA, 76 bp, Homo sapiens
caactccatggacactgcaaatacctcacccttcaaagtaccagagtccaatgtgctgattgctgctaacagtcag

SEQ ID NO: 515142 - DNA, 82 bp, Homo sapiens
tgcagaaccaacgaggtggccgaatcttccttcaggatatcaagaatttacatagtacatgacgaagttaaggataaagctt

SEQ ID NO: 515143 - DNA, 75 bp, Homo sapiens
gaagcagagtggctatggtgggcaaactaagccgattttccggaaaaagattggctgataggctgaataatctcc

SEQ ID NO: 515144 - DNA, 100 bp, Homo sapiens
accttaaatgagaagagtgttcaaaattcaattacacagtaaatacggcatcatctgcatggaggatttgattcatgagatctatactgttggaaaacgc

SEQ ID NO: 515145 - DNA, 100 bp, Homo sapiens
ggggttcagcgtagactctggaccaggagaggcccgcggtgaccgaggcctgggccccggggtccaagttttctctccgaggcccgtttttctacacgag

SEQ ID NO: 515146 - DNA, 97 bp, Homo sapiens
aaaaaggacagaggctgttccctatggcaggccagtactgatgcaggcactgcaggagccctgactccacagcatgttcgagctcattcctctccag

SEQ ID NO: 515147 - DNA, 101 bp, Homo sapiens
ccatttctcctcctttgacagggacatcagtggagccttctcagacccacagtttccaacatggctagatccatcagaaactgaagccgtggagaacgctc

SEQ ID NO: 515148 - DNA, 101 bp, Homo sapiens
caacggcggtggcgcccggagcccgagtgaaagatgtcatgtatatctgcccatttatgggagcagtgagtggaaccctgacagtgacggactttaagctg

SEQ ID NO: 515149 - DNA, 78 bp, Homo sapiens
cgacttcgatgatcgtgtgtcggatgaggagaagctttgggacccccgcccctggcttctcctccatgctgtatggaa

SEQ ID NO: 515150 - DNA, 100 bp, Homo sapiens
acggtggggacatcaggctgccccgcagtaccagggagcgactgaagtgcccatgccgcttgctccggagaagcttggacgaaccttgacaggatgggtg

SEQ ID NO: 515151 - DNA, 87 bp, Homo sapiens
ggaggcgggagaggcgagctcgcgatgagtggtctcggcaggctcttcgggaaggaaacgatggaaagaactttctaaggaagactt

SEQ ID NO: 515152 - DNA, 100 bp, Homo sapiens
cgccccgggagccagagggcgggggtcctcgccgggaccctcctgtgggcccaggggaatcatattgacaggtcatgaaaatgagaccaaaagatctctg

SEQ ID NO: 515153 - DNA, 123 bp, Homo sapiens
gaacggggctcccaggacctccactaatcaccagaacaaaatgtgcaggcaccgaccgtcacgagctaacttcctggaagagctttccgtctattttcaaattctttaccgaagcctcagagg

SEQ ID NO: 515154 - DNA, 97 bp, Homo sapiens
ggcggagctgatcgagcaggcggcgcagtacaccaacgcggtgcgcgaccgggagctggacctccgggatccagagccagagctctacctcgatcct

SEQ ID NO: 515155 - DNA, 100 bp, Homo sapiens
cgatggcctactggggataacattcatgcagaacatcagctatcagaggactcctgaaacctggagagctacctgctgtataaaggctggcctgagggca

SEQ ID NO: 515156 - DNA, 100 bp, Homo sapiens
ccctttcacagctggctgtagctggccaaggagttctcgattaaagaggaaggggcagtgctcacatttctgggcaggtctcacagatttcaagcctggc

SEQ ID NO: 515157 - DNA, 75 bp, Homo sapiens
tttgtttccacaaacatgtaaggattgaaaggcttgtaatccaaagttactttgaatccagaacccttgatgtgt

SEQ ID NO: 515158 - DNA, 97 bp, Homo sapiens
ctggtgcacccccagtgggtgctcacagctgcccattgcctaaagaattgggcagatgtacagagtcagctcaggcacatagaagcagcatttgacc

SEQ ID NO: 515159 - DNA, 100 bp, Homo sapiens
atggaaaagaatatttattccaggccaaggatgagtgccggatggagtgctgtgatgtgccagccgagacactctacgacgtcctacacgacattgagta

SEQ ID NO: 515160 - DNA, 133 bp, Homo sapiens
cctggaccctgctcagagggacttgtacgtggatgtaatgttggagaactatagtaacttggtgtcactgggtgaccaaaagccagccccactgtgagttgaactctttcgtgttgaccggccactctccgtg

SEQ ID NO: 515161 - DNA, 50 bp, Homo sapiens
cggcgcgacccggggaaccggcattggaccctgatgcttggtgtgacctg

SEQ ID NO: 515162 - DNA, 74 bp, Homo sapiens
ttgaagtcttctgtgagaggacacccaaaacatgtgaggtcgacgtgttgatgcccaatgttggtgagattgtg

SEQ ID NO: 515163 - DNA, 100 bp, Homo sapiens
acgccttccagcacggcatctgctttgaggccaaggtatcatgatattagctggtttgacatcaagtcatttgtgagtcatcagatcttctcctgaaaat

SEQ ID NO: 515164 - DNA, 101 bp, Homo sapiens
agagggagccgcagctgatgtcaggaaacctgtaggaagtgtcagggactctggaaagaacataatggcctcacctgtgaagagctggctgaaaaagacga

SEQ ID NO: 515165 - DNA, 100 bp, Homo sapiens
cggacaagcacagtcttcggaagggaaagaatatggcaaagctgatgcaagatgggtttattttgatccaaccattgtgtctgtggaaattctgaccgtc

SEQ ID NO: 515166 - DNA, 100 bp, Homo sapiens
gaacgcgtgatgatggagtttgtgagggaaacctgctcccaggagttgaacgccactggcttcaccacgcggtcagacattgggcccgcccgtgatgcaa

SEQ ID NO: 515167 - DNA, 97 bp, Homo sapiens
tcaaagtctacccctcctgtcggggaggcaaggtggttttggaccagacaggcgtgtctaatgaggacaacacatgggagccagaagagaacctgga

SEQ ID NO: 515168 - DNA, 82 bp, Homo sapiens
agtacgaggcggacatgtgcgtgagctctggattaatcgaattacagctgctagccaggaacatggactgaagtatccagcg

SEQ ID NO: 515169 - DNA, 100 bp, Homo sapiens
tagtgagggcctccataactgatccaggaagactccctgagaaccccaagatcccacatggagtttgcagaaaaaacttcagcatgtgccaggaacacaa

SEQ ID NO: 515170 - DNA, 100 bp, Homo sapiens
gaccctgggcgccgcgccgcacgagcaccagcctagagccaggcgctggcgtgctggttaccacagtggtggccggaggcattaccatcctacacccctt

SEQ ID NO: 515171 - DNA, 97 bp, Homo sapiens
aataaaggaatttcttcactttttaacggaccagttcagtgctactatatcggggccacagatgatgcagccaccaaaatcatcaatgaggtatcaa

SEQ ID NO: 515172 - DNA, 75 bp, Homo sapiens
ttgtacctatgattgaaaacagtagttggtctatgacttttgaggaggcgtcgaccagaagattatgatattcat

SEQ ID NO: 515173 - DNA, 83 bp, Homo sapiens
tgataacaccctgtaacagctgagccttcacctaccaccatatccaggagatcatggtccagctgctgcggacagtgaaccgg

SEQ ID NO: 515174 - DNA, 75 bp, Homo sapiens
cagtactcttattgattcacttaagaaaactcagcctgagaatgaagaactgatgaccaccccaattttacagcc

SEQ ID NO: 515175 - DNA, 100 bp, Homo sapiens
cagcacttcctggcaatgatagatacatcagtgtgggaagccaagcagatacaacgaagcagcagttttgggaatttcgatcgttttcggaataattctt

SEQ ID NO: 515176 - DNA, 90 bp, Homo sapiens
ccacctcatcaagaagcatgatggacaggatgtttgccctcgagagttatggtgaatggttgcatggatttgaaaaaaaggcaaaagaat

SEQ ID NO: 515177 - DNA, 51 bp, Homo sapiens
ggaaggtggagccaccagcctctccttgatacttgccagaactaatacagc

SEQ ID NO: 515178 - DNA, 59 bp, Homo sapiens
tttcatgagtgttcctgtggtctctgcacctcctttctacagcccacctgaggatattg

SEQ ID NO: 515179 - DNA, 100 bp, Homo sapiens
atgggcggaaagcttgcctcaatcctgcatcccccatagttaagaaaatcatcgaaaagatgctgaacagatcacaaaatttgtccaggatagacataga

SEQ ID NO: 515180 - DNA, 98 bp, Homo sapiens
ttctcgtcggattgcccatgcacttgttgcagaaacagccaaggtgctggagaatctggtaaaagcaccattgtgaagcagatgaggatcctgcatgt

SEQ ID NO: 515181 - DNA, 100 bp, Homo sapiens
ctgcatgtccaggagaccaagtttcagatgttccagctaattgacattgcccggcagacggctcagggaatggagtttccaccgtgcacattatgaagaa

SEQ ID NO: 515182 - DNA, 101 bp, Homo sapiens
cctcgaactaaacaaattcatcccagaaatctaagaggtccgtggcactcaggtagttggttctgacatgactgtgacagttgagtttaccaatcctttaa

SEQ ID NO: 515183 - DNA, 75 bp, Homo sapiens
cggcatagcccgggagatgcagccagtttacagggggaaatttgcagtggtgagaaaatgtataaagaaagattc

SEQ ID NO: 515184 - DNA, 100 bp, Homo sapiens
ccctgaattcttttgacgacctaagtcctgactgcttgggacatgcaggacttgtatatgagtatacattgcaaattcctgagcacttgatggctcatgc

SEQ ID NO: 515185 - DNA, 97 bp, Homo sapiens
tggaggaagcccccaagcgggtcagcctggccctccagctccctgaacacggcagcaaggacatcggaagagaaggagaggaacgcgcggaggaaga

SEQ ID NO: 515186 - DNA, 74 bp, Homo sapiens
gtgtcctgtgctgaagatgtttccggaacaacagaaagagtactatactggcaattgctggagaagattttgca

SEQ ID NO: 515187 - DNA, 73 bp, Homo sapiens
agaggaggacagttcgctacacagcaatgcatcgagggtcgcggagcctcgccggccgccatgtggagctgca

SEQ ID NO: 515188 - DNA, 90 bp, Homo sapiens
cacagatttatacatactttgtttataaaacccgaaatatggatatgaaacgtattattatgccgctaccttcaagaagtaatttgcgtg

SEQ ID NO: 515189 - DNA, 100 bp, Homo sapiens
ggcagtacgggccctgcaccggtgagagcacagtaaggactattgctatggatggtacagaaggcttggttagaggccagaaagtactggattctggtgc

SEQ ID NO: 515190 - DNA, 100 bp, Homo sapiens
gaccaacttctttggcaagtggacattttactggctcaaaaatggtggagtcaatgaagaaagtagcagggatggatgtggagctgacagttgaagaaag

SEQ ID NO: 515191 - DNA, 95 bp, Homo sapiens
caggaaggctcgcctatccaggcctggcaactcttcgtcaatgaggcaattaatggatgcctcgaagttgacgtacatatatattcagaaatgtt

SEQ ID NO: 515192 - DNA, 90 bp, Homo sapiens
acttcctcagcagcaccttcaagcaggtgagcaagacgtggaaggtgattgcagaggatgaggtgctgtggtacaggctgtgccagcagg

SEQ ID NO: 515193 - DNA, 90 bp, Homo sapiens
cgacggcctgtccggcactgctgaaggatcttagtaagagccctaagaccatgaaaaagctgctgcccaagcgcaaacctgaacggaagc

SEQ ID NO: 515194 - DNA, 50 bp, Homo sapiens
gtcatccacttcgcccaacctccagtgtcagagatggctttggattcccc

SEQ ID NO: 515195 - DNA, 88 bp, Homo sapiens
gataaaaagtcctttgaaatggtgctggatgaaattagaaagtcagaactaagacatggtccgttttactatatgaagcagccactca

SEQ ID NO: 515196 - DNA, 100 bp, Homo sapiens
gtgggctctggaacaacacggtgttcatcttttctacaggtttgcagctaaaactgtgcacagtgggtcattgatgctagtcacagtggaactgaaggaa

SEQ ID NO: 515197 - DNA, 75 bp, Homo sapiens
cctcctttctcaagacaaaggggacacgtcttctgggggcccagcacgtgcttatccagttggtggcctttgcta

SEQ ID NO: 515198 - DNA, 83 bp, Homo sapiens
tgaattctccaacaatggaggccagtggctggtctcagaggctgggaggcggcagaatgcagccagaggagggcacaggctgg

SEQ ID NO: 515199 - DNA, 74 bp, Homo sapiens
ctggatccaggataacggaggctggctatggtgcagtatgatgaccaccatcccagtctgccaaggaatgagta

SEQ ID NO: 515200 - DNA, 82 bp, Homo sapiens
atctgctgccggaaggggtcccgaagccccctgcaggaactctacaacccaatccaggccctgtaactccagaacccctggc

SEQ ID NO: 515201 - DNA, 100 bp, Homo sapiens
ctgaacaaggccaacacctatgcagatgcgaattggactgcactctggatcagtttttgctggcgtcgttggagttaaaatgccccgttactgtcttttt

SEQ ID NO: 515202 - DNA, 90 bp, Homo sapiens
caaggcactcagctcaaatacacacacctgttgccattatagagctggaattaggcaaatatggacagtttctccacagacactacccaa

SEQ ID NO: 515203 - DNA, 82 bp, Homo sapiens
ccaagagaagaatctaacaaacggcaaagaacttactgattcttgaggttattcagcttctcaaggctggaaaagcgaagga

SEQ ID NO: 515204 - DNA, 75 bp, Homo sapiens
ggcgatcaaggccaagtatccgccagtcaataggaagtacgagtgtgagctgattcaccccaagagtggccgttc

SEQ ID NO: 515205 - DNA, 75 bp, Homo sapiens
atcatgtctgcgagccaggattcccgcgtctgcttctgcgctttgcctgggagaggccctggtggcctcgttcct

SEQ ID NO: 515206 - DNA, 75 bp, Homo sapiens
tgaatcaagagtgatttgttaatggttatgtaccgaaggactctaccgtgtcagcgggaataaaactgaccaaga

SEQ ID NO: 515207 - DNA, 98 bp, Homo sapiens
accgggctcagtcctgtccaacaatgtgctcatcttttgctacgggacccagacaatacgatggaatattctatgaatttcgttcttattaccttaag

SEQ ID NO: 515208 - DNA, 75 bp, Homo sapiens
attccaagtaactcttatttggttttttgcatgtctgacacccatgactccacctggaccttatggctccaccca

SEQ ID NO: 515209 - DNA, 75 bp, Homo sapiens
aacaattacaagatctggaggaatgcaggtgcaagctggcccaggccaatggttggggcgtcatggtgtctcatc

SEQ ID NO: 515210 - DNA, 83 bp, Homo sapiens
ctgagcccgcccttgatcttcgctgtggcatggcggacgaggggaagtcgtacagcggtgtcgtgaaaactacccctaaaagc

SEQ ID NO: 515211 - DNA, 83 bp, Homo sapiens
ctggatgctgcagacactgaacgaggagccagtgttactaaaagatgtaactgaactgcagatccttggtgaaatatctttca

SEQ ID NO: 515212 - DNA, 100 bp, Homo sapiens
aaatcatatagagaaagacagatggaagtctttaagaaaagaggcacagttagatgaagaaggacagtttcttgtcagaataatatatgatgactccaaa

SEQ ID NO: 515213 - DNA, 100 bp, Homo sapiens
caaccggcagcagcgctgccgccgcgtcctcagccaccgctccctcttcccacgcatcaatcctttccatataacaaaaatggattcaaagttggcatga

SEQ ID NO: 515214 - DNA, 98 bp, Homo sapiens
cgccggccgcggtggcggcgctgccgcctgaagtgcgggcgcagctggcggagctggagctggagctctcggaggagaaagtctattcgtgtgaccag

SEQ ID NO: 515215 - DNA, 85 bp, Homo sapiens
gacacgctgactttgtaggctccgccaagaggcgccgcaggagtatggaccaatatttacagtctttgctatgggaaaccgaatg

SEQ ID NO: 515216 - DNA, 100 bp, Homo sapiens
ctgaactggatcttcacagccatcacagacaccatcgcgtggaacgtgctcccccgggttggaatcgaagcctcttaaaatggcagatgacttggacttc

SEQ ID NO: 515217 - DNA, 98 bp, Homo sapiens
gggatgtgctccgcagaagcagtgaactcttggtgaggaagctccaggggactgagcctcggccctccagggctgtgggacagatgatgtctaccatg

SEQ ID NO: 515218 - DNA, 75 bp, Homo sapiens
tagggctgagtctgggaccgaggcctatatgaacccaatagcaatggcgagatcaaggggtccaatccagtcttc

SEQ ID NO: 515219 - DNA, 75 bp, Homo sapiens
accagagaacttcccagcatacctgagaatgtaggtgagctcgtgaaacaatatgaagaggagaaaatagccttt

SEQ ID NO: 515220 - DNA, 75 bp, Homo sapiens
aaggccatcaccacgcagaacgtcaacaccaagtgcatcaccatccccagacttccttgtgaaacctcctagtag

SEQ ID NO: 515221 - DNA, 99 bp, Homo sapiens
ggcggcgccatgcccgggccggagtgagtgcgcgcgggcgaaaatggcgtacatccagggttctaggatgcctcataaaggcccgtagtgtactttctg

SEQ ID NO: 515222 - DNA, 112 bp, Homo sapiens
ggaaagtttgcagaagtggaaggagcagaacgtgagggtgtaacttacaaaaagagtgcctggtgaagaatgtgatgggatcactagcatgtctgcggagagcggccctggg

SEQ ID NO: 515223 - DNA, 83 bp, Homo sapiens
gattcgcagtggtcgcttcttctccttgggtgtacaactatgagcctttgacacagctcaagaatgtcagagcaaattactat

SEQ ID NO: 515224 - DNA, 83 bp, Homo sapiens
ccccctccggcgtgttcatgcccccggggttttaaaatcaaagatgggaaaatcggagaaaattgcccttccccatggccagc

SEQ ID NO: 515225 - DNA, 97 bp, Homo sapiens
cccgcgcgcacctcagccgcctcctagcggcgcggcgctcgctcctacgggtcttactgaagtaacacaaagcttaaaaatggaaaatgaagagttt

SEQ ID NO: 515226 - DNA, 76 bp, Homo sapiens
attttgcagcactccagagcctgctcaaggttacacgcatggggagatactctggaggaagcatttgagcaatgtg

SEQ ID NO: 515227 - DNA, 103 bp, Homo sapiens
tgaatttttatttggcagatctgaagggaaagctccagatactagaattctcacactcaagaaagcaaatgaacttcttctgagcacaggcatgcccggcagt

SEQ ID NO: 515228 - DNA, 83 bp, Homo sapiens
gcggatctcaccgccgctcaggaagctccaccatgaggcgaggtggatggaggaagcgagctgaaaatgatggctgggaaaca

SEQ ID NO: 515229 - DNA, 90 bp, Homo sapiens
ctgcagcgccgtgtggcacgacacaaaaatcaggaaatctgaaatagagtactatgctatgttggctaaaactggtgtccatcactacag

SEQ ID NO: 515230 - DNA, 75 bp, Homo sapiens
ggcaggagagaggaggaggagtgcggcgcggcggccccgggaccaaggaggttggcgctgtacgtttatgagtac

SEQ ID NO: 515231 - DNA, 75 bp, Homo sapiens
gaaaatgacggttataagaccatttatttctttggagacaaaactatgccatttaattggttggggtcagataag

SEQ ID NO: 515232 - DNA, 75 bp, Homo sapiens
gattaataatgcagctgcaggctcacagggagagtcccgtattctcagagtaaaagttgtttctggaattgatct

SEQ ID NO: 515233 - DNA, 74 bp, Homo sapiens
gccgccgcttgtgctgcagccatggccagatcagaaaagggagctcaggtaccttccagagagtgagacccagc

SEQ ID NO: 515234 - DNA, 100 bp, Homo sapiens
aagctcatcatgaccttccagaattacgggcaagcgctgttcaaacccatgaagaatactcccccagttgcaagaggcgcaggaccgtggaagacttcaa

SEQ ID NO: 515235 - DNA, 100 bp, Homo sapiens
gcagtgtcttcagcgcattgctacctaccggctagccggtggagctcacgtttattcaacagacagtcattttgtttactcattcagccctgttgcaggt

SEQ ID NO: 515236 - DNA, 100 bp, Homo sapiens
ccggcctggagctcccagggccgaggacctgatcccaaccttgaagaaagtcctaaaagaaaaaatattacatatgaggaattaaggaataagaacagag

SEQ ID NO: 515237 - DNA, 98 bp, Homo sapiens
gcactgttcaacacagcaatgaccaaagcaacccctgctgtacggacagcatataaatttgattcatgcttaacaagtctagcatcatcatcacttaa

SEQ ID NO: 515238 - DNA, 100 bp, Homo sapiens
agctttttagccttagcaagaggtgtcataaacaacccctcatcagcctgccaagacaaaggaatgtatacaaagactatcgcttccttgagctggcatg

SEQ ID NO: 515239 - DNA, 75 bp, Homo sapiens
ctcatgaacagaaacacctaggaagggagaactgggggggccctcagcctcttggccttgaacgggctgttcatc

SEQ ID NO: 515240 - DNA, 101 bp, Homo sapiens
tgacttcaacactatccgatgtcaagatctgatggccacaagtaatcatcctgagactgactacaagaacaaagactgggtcttcatcaattacacgtaca

SEQ ID NO: 515241 - DNA, 87 bp, Homo sapiens
aaactagcgacctacctgaggatgatcaagcggagttcgatgcgggtctggaacagaatctgacagtgatgaatcagtaccagagct

SEQ ID NO: 515242 - DNA, 100 bp, Homo sapiens
gggcaggtcatgagtcaccatgaatgacagcccatatcaaggcggtgtattctttttgacaattcattttcctacagactaccccttcaaaccacctaag

SEQ ID NO: 515243 - DNA, 98 bp, Homo sapiens
aaagatgctgttccaggcgcacactagtctacaaggccagagctttctggaagggggcaatttgtgacacagactatatccagtacccaaactactgt

SEQ ID NO: 515244 - DNA, 100 bp, Homo sapiens
tcccttggacagtctgcaccttctcttactgctggcctgaaaggcctaaagaatgtatttgacgaagcaatattggctgccctggagcctccagaaccga

SEQ ID NO: 515245 - DNA, 98 bp, Homo sapiens
caagaatgaagccgcagaccctcgcggtattgttgtctctaaaccaaacctgatcacctgtctggagcaaggaaaaaaacctttaactatgaagaggc

SEQ ID NO: 515246 - DNA, 97 bp, Homo sapiens
cggacacgcggaaaattaaccacagcttcctgcgggaccacagctatgtgactgaaggccagcatccttcagaaaaagcatccccgaggaggaagac

SEQ ID NO: 515247 - DNA, 88 bp, Homo sapiens
acgctgctggaggaaacacctcaggacacggcctacaacaccaagaggaagctcttcgtgggcggtcttgactggagcacgacccaag

SEQ ID NO: 515248 - DNA, 74 bp, Homo sapiens
agaagacacagactaacaattttagatggtgtgaatttcaaacttccgtaatggagttagcccacagtttattg

SEQ ID NO: 515249 - DNA, 80 bp, Homo sapiens
tctgtcttcggtggactccttcggcagtccacccaccgccgccgcctcccaggggtctaatgtgatggaagagcaggacc

SEQ ID NO: 515250 - DNA, 74 bp, Homo sapiens
caaggtggcctaccaggaggccaggggtgtcgccatgattctggggagcaggtcctggtggatgtggagaccaa

SEQ ID NO: 515251 - DNA, 87 bp, Homo sapiens
aaggataagtcgaaggggaaggcgcctgaagaggacgaagattcatgatgttgctatcaaaagttgagaaattgtcagaagaaatca

SEQ ID NO: 515252 - DNA, 75 bp, Homo sapiens
aaggcaaggagagaatgtatgaagaacagtcacaggacagatggttggaatccattttcgtacccatacaaaaaa

SEQ ID NO: 515253 - DNA, 87 bp, Homo sapiens
gcgggcccgaggccggaggaacccggactccggcgtagcggacttcttaattactcaaatgactggaaaagagctctttgagatgtg

SEQ ID NO: 515254 - DNA, 100 bp, Homo sapiens
aaaagacttccattctttatcgactctggtggattacaaagctgacgagtggctgatgaagaacatggatcccctgaatgacaacatcgccacactgctc

SEQ ID NO: 515255 - DNA, 100 bp, Homo sapiens
gggcagcggcggctggcgcttcctgcgcatcgtctgcaagaccgcgaggcgagacctcttagtggtaccctgaaaacagccctgctggactacatcaaac

SEQ ID NO: 515256 - DNA, 83 bp, Homo sapiens
tcccgcgtccagcacctacgtcccgctgccgtcgccgccgccaccatgcccaagagaaagcatgtagagcgcatgaagtacag

SEQ ID NO: 515257 - DNA, 75 bp, Homo sapiens
cgtccagaagaccaagtacctgcagatcctgacctctctgatgagatggatcgcggctttgattcagcaagccac

SEQ ID NO: 515258 - DNA, 100 bp, Homo sapiens
ttgtggtgggagacagtcagtgtggaaaaactgcgctgctccatgtcttcgccaaggactgcttccccgagggtgggtatatggctgccaaggtccagaa

SEQ ID NO: 515259 - DNA, 98 bp, Homo sapiens
tcaggctgccctcaaactcctggactgaaacgatcctctcatctcagcctccaaaagtgctggcattacagccccgagtgcgagatcgagcgtcctga

SEQ ID NO: 515260 - DNA, 97 bp, Homo sapiens
ggcttcatccaggtcacgttgctagataccatcgagctggccacattctgcgtcaggacattctctctgcacaagcacttctccaccgacccagtgg

SEQ ID NO: 515261 - DNA, 98 bp, Homo sapiens
gtctctctgctgcggcgcggggaccgctgtgctctcgccattgagacccagagcagcagttctgaagagatagtgcccagccctccctcgccaccccc

SEQ ID NO: 515262 - DNA, 100 bp, Homo sapiens
gtttcttatatgtgatgccattccagcactggactcatggaggctgagcatttattcagtttaattggttggggtcagataagaagaggagtgacaatca

SEQ ID NO: 515263 - DNA, 75 bp, Homo sapiens
caagaaacgtgctgggatggcaagaagtcacctgcaccggtgcccgtgacgtacgagctgcccacactgtatagg

SEQ ID NO: 515264 - DNA, 96 bp, Homo sapiens
gagtgcttcattaccacgagataggcaatacgaaagcccaagatcatctggctgaagaacaagatggatatccaaggcaaccctaagtacagagcc

SEQ ID NO: 515265 - DNA, 82 bp, Homo sapiens
gtcctcgcttgcagttcagcgaccacggttcgtgctggccgtgggcagcgccgtctttgatgccatgttcaacgggggaatg

SEQ ID NO: 515266 - DNA, 82 bp, Homo sapiens
ccgatgcctgagccctgtgagctggaggaaaggttcgccctggtgctggcagtcatggatcaggtaatgcagtttgttgagc

SEQ ID NO: 515267 - DNA, 74 bp, Homo sapiens
caggtggtgtgtgtgtggccgcagcaagaagcagtggaagatagatgataagcctgtaaaaattgacaagtggg

SEQ ID NO: 515268 - DNA, 75 bp, Homo sapiens
gaagacgacgagtttgaagagttccctgccgaagacccaagtcttggattgaggaacaggcaatgggatcattcc

SEQ ID NO: 515269 - DNA, 75 bp, Homo sapiens
agccatggcatctaagaaatttgctgttaaaagtctccacagcctattggctcacttggacatgatgctgacttg

SEQ ID NO: 515270 - DNA, 98 bp, Homo sapiens
cgcggggagccagcgagcgcgccttcggcattggccgccgcgatgtcagctcagtgctgtgcgggccagagttgaagtattgataacaccaaggaact

SEQ ID NO: 515271 - DNA, 100 bp, Homo sapiens
caaggagaggcggcggcggcctcggctgaagaaagaaggtgggagcggagagcgcaggcgtggtcccaagctctttaaggagcccagtagtaaatcaaac

SEQ ID NO: 515272 - DNA, 76 bp, Homo sapiens
tgggagtctccgcgtcccgctcgctgggagagagttgggccggtgcacaaacagcgtggtcaagtatgagctgatg

SEQ ID NO: 515273 - DNA, 96 bp, Homo sapiens
gcaagactatgaatctctgttccaaatgctttgctggtggctgtacttttgatgatggtccaggggcctgtgattaccaccaggatctgtatgatg

SEQ ID NO: 515274 - DNA, 82 bp, Homo sapiens
tatcccatagctgtgagtggcgatcacgagaacaataaggatttaatcaaagatctcaaatcagagttaagtggaaatatgg

SEQ ID NO: 515275 - DNA, 90 bp, Homo sapiens
cgaaccttggagagaggagaacgaacatcttctggacctttgtccaggtggctctcctacctcctgctctttatcctggacctggtcatc

SEQ ID NO: 515276 - DNA, 75 bp, Homo sapiens
aggccatcacccaggtcagcaagggcacctgcgagcaagaacctcagagtgacagagccaaaagaccagtgcctc

SEQ ID NO: 515277 - DNA, 83 bp, Homo sapiens
gggccatcgtggtggatcctgttcatggacaatgcagatcttcgtgaagactctgactggtaagaccatcaccctcgaggttg

SEQ ID NO: 515278 - DNA, 75 bp, Homo sapiens
gcaccttgatcttgaacttctcagcctccagaacgcttctttgtgatattggccacagtgaagaaaaactgggct

SEQ ID NO: 515279 - DNA, 115 bp, Homo sapiens
ggttgcaacggagataaattcccggaaccgcgattcggcgtgtcaggtttggtgcacctcgatttggaggaagtagggcagggcccttatctggaaagaagtttggaaaccctgg

SEQ ID NO: 515280 - DNA, 75 bp, Homo sapiens
ccgacggcaaaggtgtcgtggtggtcattaagcggagatccgcaggttcaggagaagtggcacctggtggaggac

SEQ ID NO: 515281 - DNA, 75 bp, Homo sapiens
tggcaaccgccccgtctgagaaagagtggacccttggccactgttcagggcaaggaggggcctccacgtctgagt

SEQ ID NO: 515282 - DNA, 100 bp, Homo sapiens
catgagtggaattttagtgcctcttctgtcaggggagtgaggcagtacaagtcccagtttgaagctcaaaagatctggtatgagcataggctcatcgacg

SEQ ID NO: 515283 - DNA, 51 bp, Homo sapiens
aagatctaaggctcttgtctggtcaatgtgacggtggactacattagacca

SEQ ID NO: 515284 - DNA, 97 bp, Homo sapiens
ttgaagccgaccagaatgatagccagtccctggagctggtgcacaggttccaggtgtcatggagaaactccagctgggcccagagattctgcagcgg

SEQ ID NO: 515285 - DNA, 100 bp, Homo sapiens
ttcaggtgatgccaccaatccagacagaatgtacgaccttgttgctgttgtggttcactgtggaagataacccagcagccaactggcttcatgcgcgctc

SEQ ID NO: 515286 - DNA, 82 bp, Homo sapiens
ctcaaggacacggtctacaccgacttcgacgggcgccatgttttggaagtttgacctgcacacaagctcgcacctggacacg

SEQ ID NO: 515287 - DNA, 82 bp, Homo sapiens
agttcaacgagaatgaagccatccaatggatgcaggaaaactgggggatatgagactttctactcggaatatcctgagtgtt

SEQ ID NO: 515288 - DNA, 75 bp, Homo sapiens
catcgacatcagtgaagaagatcagtctattatcctcccagtccacaacgctgaaccgtggctggacgaatgttt

SEQ ID NO: 515289 - DNA, 83 bp, Homo sapiens
tgccagatgccccagaccacgagagcctcaagcttctccagagagaaaagttggagaagatgagggatcatgaacgaaaggaa

SEQ ID NO: 515290 - DNA, 100 bp, Homo sapiens
cgatcatggcggatggcccccggtgcaagaggcgcaaacaagccaatcccaggaggaaaaacggcttgttgattggtgctggctgtgccctctacccctt

SEQ ID NO: 515291 - DNA, 74 bp, Homo sapiens
ccagggtccctgaagagggaagacacgcggaaacagccccacaggaagccccaagtcagccgcccgctacatac

SEQ ID NO: 515292 - DNA, 83 bp, Homo sapiens
gtcccgaccctggccgccccgagcggagcctggagtctctgctttctatccgtcaagatgataaagtcgtgtgcccgagaacc

SEQ ID NO: 515293 - DNA, 100 bp, Homo sapiens
atcaagaagggcttcgtgcccaacatgcaggtggagaaatccctgcagcgcatccagaatgggcagcgcaatgccatgtacacatcccagcagagtgtgg

SEQ ID NO: 515294 - DNA, 99 bp, Homo sapiens
gggagatcccaggcggtgacagagtggagccatggctagagctacgagagtacaaggtagtgggtcgctgcctgcccacccccaaatgccacacgccgc

SEQ ID NO: 515295 - DNA, 90 bp, Homo sapiens
caggacttgacgttcctgacgaagcaggagatcctcctgccacaaggggcaccagtgcctgagccctccactcccctcctgggactctga

SEQ ID NO: 515296 - DNA, 100 bp, Homo sapiens
ttcatttgaaagcagaggctttgattaaactctcagattatgactcttcagaggaagcaattcgtacgcttgatcagagatagaatctcactatgttgac

SEQ ID NO: 515297 - DNA, 50 bp, Homo sapiens
gaaaatctccccggtgactttcaggtatccagtgaattttttgaagaagg

SEQ ID NO: 515298 - DNA, 100 bp, Homo sapiens
cccaagccccgcgttagcattcgcaagtccgtggtatggcgatttagtactgcattttgttctgttaatgaatggaaatttgctgacatcctaagcatgg

SEQ ID NO: 515299 - DNA, 91 bp, Homo sapiens
gattccaagtaactcttatttggctggatctccagaactgttctctggaggaccctggtccaaactttcatcaggcacataccactgtcat

SEQ ID NO: 515300 - DNA, 98 bp, Homo sapiens
ccaggctggagaatatggtgcagaggccctccacgatgagccttcccagcgtccccgtcttcctagaggtttctggccagtttgatgttgagttccgg

SEQ ID NO: 515301 - DNA, 100 bp, Homo sapiens
cagatcagcccctggaagcagatgaagtgagaaagatcagtctaaagaaaaggagaagaaagtgaaaaaaacaattccttcctgggctaccctttctgcc

SEQ ID NO: 515302 - DNA, 92 bp, Homo sapiens
ttcgtttttcgccgtcatgggcgcctcggccgccatggtcttcagcgattcttctgctgatcgacattgagcagtcctacatcaacacgaac

SEQ ID NO: 515303 - DNA, 100 bp, Homo sapiens
gagcattttccgcagaggcctggtcaaggtggctcagaccacaggttaatttggagtggcccctggagtcagtttcctacaccatccgaggccccaccca

SEQ ID NO: 515304 - DNA, 96 bp, Homo sapiens
ggttctaacagacaaaattgatgtacttctgcaacagatggctcatgatgccctcaatgcccctctgcacattctccgggccatatacgaactgca

SEQ ID NO: 515305 - DNA, 90 bp, Homo sapiens
gcgaccgggagctggacctccggggtacccagacagccattgtcttcatcaagcagccgtcctcccaggatgcactgcaggggcgccggg

SEQ ID NO: 515306 - DNA, 74 bp, Homo sapiens
gggcgggggcaccgagggctaccacgttctgcgggaactctccggagtcctttctgtattgttgtgattttgct

SEQ ID NO: 515307 - DNA, 75 bp, Homo sapiens
tactacctggtgcagggcctgattgaggactgccagctggcgctgcaggtggtgaaggcatttgtgatcctggcc

SEQ ID NO: 515308 - DNA, 75 bp, Homo sapiens
gctgcagaacctgtgctgcaggatcctgggcaggagcgaaggaaggcgacatgccaattcatgaacttctcagcc

SEQ ID NO: 515309 - DNA, 77 bp, Homo sapiens
gtttcttactcgggagctggctgaagatggctactctggagttgagcaattaccagctctggctgggtcgccacaac

SEQ ID NO: 515310 - DNA, 100 bp, Homo sapiens
acaggattccatggtagctgggatgttagggctcagttggaggcatctatactgtgattcagacaaaggccaaaacaacagcagatgaatggggagagaa

SEQ ID NO: 515311 - DNA, 100 bp, Homo sapiens
tctatttcttgtggatattatggctaataacacaacaagtttagggagtccatggccagaaaacttttggggattcactccttctccagttgcacagcca

SEQ ID NO: 515312 - DNA, 82 bp, Homo sapiens
gcttctaccagcccatgcccctgaaggcctcgctggagatcgagtaccaagtctcgtcagcctatctcggcccctctctttt

SEQ ID NO: 515313 - DNA, 100 bp, Homo sapiens
gtcgacatgagtgatgtggaggaaaacaacttcgagggcagatggcttttcatggcctgccactgaaaatcaagaaagaaccccacagtccatgttcaga

SEQ ID NO: 515314 - DNA, 100 bp, Homo sapiens
cgccgaggctgggctgaggcgccgcggtaccatgaggcgccggccccttcacagatgtagtcactacaaatcttaaattgcgaaatccatcggatagaaa

SEQ ID NO: 515315 - DNA, 90 bp, Homo sapiens
taaaaagagatgtggggggattctcgacctgctaacagaactggaccttttcggtaaaaagaacgtattctcatggtacttacagagctg

SEQ ID NO: 515316 - DNA, 48 bp, Homo sapiens
tgcggcaaccaaatcggcgccaagtgaaatcccattctctggctggag

SEQ ID NO: 515317 - DNA, 100 bp, Homo sapiens
gattgcctggcaggacgtgaaggggaagaggcccaccctggagtaaccctcactggagaatccagaggttatcagtgagctgaatggaaaaaacattgaa

SEQ ID NO: 515318 - DNA, 100 bp, Homo sapiens
tcaagatggatgaagacggcggcggcgagggtggtggcgtatgaccctcaatttggcgatgccttctggaacagcagcaaatacgggatggtgacgtacc

SEQ ID NO: 515319 - DNA, 95 bp, Homo sapiens
ttcctgttaaagtcatggaagccctaacattggctgaaggatcactactcttggaatcaaagataaatccaaatactgcatatcagaaacaacag

SEQ ID NO: 515320 - DNA, 100 bp, Homo sapiens
gttcgactggcgaactggaaggccacgcctcctcccgcctgccccctcagccctgtggctgggggcagagctcaggtgactgccaacagccagcccaatg

SEQ ID NO: 515321 - DNA, 100 bp, Homo sapiens
ctgtggccctgtgtcctgtaggtattgggagatccacagccaagatgccgggaccccttagaagcctagaaatgtttgaaggatgacctctaggaagaaa

SEQ ID NO: 515322 - DNA, 132 bp, Homo sapiens
gtttgtcaccaccatcgcatacagcatccggggacagctgagctggcatcagaagacctacgccttcaggaagaagtccctcctggtgaataacatctttgtggtgtcagcagcaatcctgtttggattcag

SEQ ID NO: 515323 - DNA, 87 bp, Homo sapiens
catcatgatggacttggagctgccgccgccgggactcccgtcccagcaggtgcaatggatgagcttcatagtctggatccaagaagg

SEQ ID NO: 515324 - DNA, 100 bp, Homo sapiens
ttcgcagccagcattcttggatgcaattgaccgacgggaagacacattttatgttgtctctttccgaagggacacagcattgttggttttgccatgtact

SEQ ID NO: 515325 - DNA, 75 bp, Homo sapiens
aaacgtaaagaaatgcaattgaggagtatggatgtgtccaacagccaaaaactcaagaaagtaaattgaaaattg

SEQ ID NO: 515326 - DNA, 51 bp, Homo sapiens
agggcatcaccgtgaagcagaagagatgttgatgcctaagaagaaccggat

SEQ ID NO: 515327 - DNA, 100 bp, Homo sapiens
gcaggagattggtatggaccagctgtggttgctcacattttaaggaacaacttgatacagagacaagtacaactcaatcagaaactattcagacagcggc

SEQ ID NO: 515328 - DNA, 75 bp, Homo sapiens
ggacggtgtggggcggtcccggccccgcaggcccgcgatgctcccagcccggtgagacctgcctgaatggcggga

SEQ ID NO: 515329 - DNA, 95 bp, Homo sapiens
tttgcgctacgctgagtacttgcagccctcggccaaacggccagacgccgacgtcgaccagcagagactggactcacaccacccggcaagaactg

SEQ ID NO: 515330 - DNA, 88 bp, Homo sapiens
gcctttccagcccgtggtccttctccatattcgaggcccagctcatcgcccaggccattggccaggccttcgccgccgcctacagcca

SEQ ID NO: 515331 - DNA, 131 bp, Homo sapiens
ggccggtggccgtgaggaggttgggggccctcgcggaggccgagaggcttaaggagcacttgcacctcctgcgccgccgccccccatccaaggatatgccttcaagcctccacctagacccgactttggga

SEQ ID NO: 515332 - DNA, 88 bp, Homo sapiens
agaaataccgtgccctgaggttggacgtggggaatttctcctggggctcagagtatgtatcctccactcctcgctggccaccatcctg

SEQ ID NO: 515333 - DNA, 75 bp, Homo sapiens
aagataccaccggtaactttcatcaatgaagttcattcggctcctaaagaagtagcagtgtccaaggaacaagaa

SEQ ID NO: 515334 - DNA, 90 bp, Homo sapiens
gaacaatatattcattttggcattgtgcagaggtggtttgtgatgaaaatggttccaagggctatggatttgtacactttgagacgcagg

SEQ ID NO: 515335 - DNA, 100 bp, Homo sapiens
caagagcccgccacaggggacgccagggactcgcggcaggctctgcgggccaggatgagttctaagcacagggcatggtgctgatgtgaaatgtgtagac

SEQ ID NO: 515336 - DNA, 82 bp, Homo sapiens
gtggccttagctgtgctcgcgctactctctctttctggcctggaggctatccagctttctccacagacactacccaaagcag

SEQ ID NO: 515337 - DNA, 90 bp, Homo sapiens
caatttgtgcacttttcagaaaagagaggaacactacaaactgctgtatgaagtttcccagaataaagccattattgcccgtgtcacaac

SEQ ID NO: 515338 - DNA, 76 bp, Homo sapiens
tttcccctgagcctcagcacctgcttgtttggaaggaattacatgaatgacagtcttcgaaccaatgtgtttgttc

SEQ ID NO: 515339 - DNA, 82 bp, Homo sapiens
ggagattctggggcagtatcaacggagtctccgggtctgagggaaaaggccataccaatgctggagatgcaatatatgaggt

SEQ ID NO: 515340 - DNA, 100 bp, Homo sapiens
atttggaatctgccttctactccatcgtgggactcagcagccttggtgctcaggtgccagatgcaaagagagaattccctaaattttttacattccgagc

SEQ ID NO: 515341 - DNA, 120 bp, Homo sapiens
ggggccttcgccaccacgcactgggtcgtcacggaggacgggaaaatccagcagcaggtaaaataccatgaagattttgaaaaaacaaaggggagaggctttactcccgtcgtggacgat

SEQ ID NO: 515342 - DNA, 95 bp, Homo sapiens
aagtctttccaaaaggtcaaggttcacaagttggttagtctgctgctaattggaattgctgcgtggggcattggcttcgggctgatttccagtct

SEQ ID NO: 515343 - DNA, 100 bp, Homo sapiens
aaaacgagccagtgatttacaatagagcaaggtggacccaagtggagagattgtggaactggcgaaaggtgcatgtccctggaaggagcatctctaccac

SEQ ID NO: 515344 - DNA, 75 bp, Homo sapiens
ctgggaggcacggagggtggcgaggcagattgtgtcagcagctaaggtgtgtggagctgccagtgagtcaccgtc

SEQ ID NO: 515345 - DNA, 75 bp, Homo sapiens
ctatggcagtcttcattttacgatgataaaggaaagccttggcgattttaaccgaacacaccacagccatcagca

SEQ ID NO: 515346 - DNA, 96 bp, Homo sapiens
cccgagcgcagcgttcacctttccggacaccgattgaatttagtggaagcttttgtagaagatgcagaattgaggcagactttacaagaagattta

SEQ ID NO: 515347 - DNA, 98 bp, Homo sapiens
ccacagcctcacagcagctattacagcggcatgacgggccctcagcatcccttctacaacaggatatgtcaagggttcaagatgatgaagttggtgat

SEQ ID NO: 515348 - DNA, 75 bp, Homo sapiens
atgccggttatctctgtgaatctcagggtctaaaattcccaggactccacagctttgcaccagataagcctggag

SEQ ID NO: 515349 - DNA, 75 bp, Homo sapiens
ccatgagcgtcccggccttcatcgacatcagtgaagaagatcagggtgtccgcaatgttgccagtgtctgtctgc

SEQ ID NO: 515350 - DNA, 100 bp, Homo sapiens
ggaaggtgtgtccggaggtttgcaggggtgcagtgtgtctggtcttatgaggtagacatagctgacattgagaatgaagagaaccgctactgtctattca

SEQ ID NO: 515351 - DNA, 120 bp, Homo sapiens
cttcatttctctgaacatactgccttatgggacagatcaagtggcatggtacaatgaactcttgcctccagccttccacctaccgctgccaggacctaccctggccttcctggtactcag

SEQ ID NO: 515352 - DNA, 88 bp, Homo sapiens
gccacgcagaggacgccggaacaccctggaagccgagaaatggagcgcctggaccatgctgctgagcgcctactggcacggcctccac

SEQ ID NO: 515353 - DNA, 83 bp, Homo sapiens
tggcaagactccacctcctggtgaagaaagcaaacataacaatgatgatgttatgttgatttctgtggaaagtcctaatttga

SEQ ID NO: 515354 - DNA, 100 bp, Homo sapiens
gaagcatttggcggcataccaccctgcactgtgaggtattgatgaagatgaccctactgctgatgataccagtgctgctgtaactgaagaaatgccaccc

SEQ ID NO: 515355 - DNA, 75 bp, Homo sapiens
actggtctggagggtggcatcatgcaaagaaaagtacagtccatccagcgtctcctcccctgctttgtactcgag

SEQ ID NO: 515356 - DNA, 100 bp, Homo sapiens
cgattatgtccattgttctcttggagcagctggtcatcatgatggagaatgaataatggggacgttgatctcacaagtgatcgatacagtatggtaggag

SEQ ID NO: 515357 - DNA, 100 bp, Homo sapiens
tgggcattgtggagataatcaacagtaaggatgtcaaagttcaggttgtacgtggacactataaaggtcagcaaattggcaaagtagtccaggtttacag

SEQ ID NO: 515358 - DNA, 100 bp, Homo sapiens
cctcccaggtggagtacacggcagactaactgccattggatgtccagaatcccctgtagttgataatgttgggaataagctctgcaactttctttggcat

SEQ ID NO: 515359 - DNA, 100 bp, Homo sapiens
cgccagtggtgcaaagggcgccagccctccccgcctctgcgtctttgctcccggagcgcttgaaggagctgcgggtctgaggcgcaattacagatgtacc

SEQ ID NO: 515360 - DNA, 74 bp, Homo sapiens
acagcaccccaagttctctggactcagatcctctggtttgctggttggctcccgagcagacagcaggaaagaag

SEQ ID NO: 515361 - DNA, 90 bp, Homo sapiens
ctggaagacatggccactccagtcggtgttgagcacggcgagcagtctcaggcctttagtgatgatgaggaggggataccaactggagcc

SEQ ID NO: 515362 - DNA, 100 bp, Homo sapiens
gtgttcttctctgacctgaaatacgaatgtagagaaccctctgcaggtcctggtgaacgccatcatcaacagtggtccccgggaggactccacacgcatt

SEQ ID NO: 515363 - DNA, 100 bp, Homo sapiens
gcggcggcggcggagcgggagcgggtaccgggcgcgggcagagcgcggcggcgcgggtttgtttgaagagactgtaccagagggccagggaggaggagaa

SEQ ID NO: 515364 - DNA, 101 bp, Homo sapiens
ggaggaggtgatggtggatataatggatttggaggtgatgatggatatggcagtggacgtggatttggggatggctataatgggtatggaggaggacctgg

SEQ ID NO: 515365 - DNA, 82 bp, Homo sapiens
aaagcggcttatcgaacagagccgggagttcaagaagaacactccagagatattgaaatggattccaggcgtgtgcctcgag

SEQ ID NO: 515366 - DNA, 82 bp, Homo sapiens
cttggagttcgcctcagacgcggtggagccgccggagtctgagaaggatattagaaatggctactccccagtcaattttcat

SEQ ID NO: 515367 - DNA, 95 bp, Homo sapiens
ggagtggtctctgaggcggcggcggcggcggggatcgtctccggcaactgtgccctgtccacggtgcctcctgcatgtcctgctgccctgagctg

SEQ ID NO: 515368 - DNA, 58 bp, Homo sapiens
taaatatgatgaggaaggtgacccagggatttcagtcataatcggttgtctaactgga

SEQ ID NO: 515369 - DNA, 98 bp, Homo sapiens
actcatcggagcgtgtggatttgagccgccgcattttttaaccctagatctcggaacctacaagcagcaattggcgcctattatgactttgagagccc

SEQ ID NO: 515370 - DNA, 100 bp, Homo sapiens
gttggtgataaagccaaagatactacttcagcagttttgattcagcagactccagaggtgatcaaggatgttgccttatggctgtttagcaacaggagat

SEQ ID NO: 515371 - DNA, 148 bp, Homo sapiens
caagatggtggcgcgcaggaggaagtgcgccgcgcgggacccggaggaccgtatccccagcccactgggctacgcagagctcaacctgggtgacaagtgtctggacggcgtgctgaacaacaacagctacgagtcagacatcctgaag

SEQ ID NO: 515372 - DNA, 50 bp, Homo sapiens
tttactcctacctgtgtaccgagccagatcctccccggcgtgaaggtcat

SEQ ID NO: 515373 - DNA, 100 bp, Homo sapiens
aaggctcttccctgaccattttctactgtccctgcgcgagagagaactcgatgccaccgcaacggtattggcgaaccggcaggatgaaagtgagcagtcc

SEQ ID NO: 515374 - DNA, 101 bp, Homo sapiens
ggtacttacagattcctctaggcacagtggaggtgctaaaatgatgtattttctggacaagtcaaggcaggagaaagcaattgctatagccactagactag

SEQ ID NO: 515375 - DNA, 100 bp, Homo sapiens
tttcttctcttggcaagagagctctgcatcaatgcgccggccataggtactccaaagattcaggtttactcacgtcatccagcagagaatggaaagtcaa

SEQ ID NO: 515376 - DNA, 100 bp, Homo sapiens
caccgctggaagaggctggtggacgaccggtggctgtggcgacatgtcgacctgacgctctacacgaaaagcacttggttctgcttcgagatggaaggac

SEQ ID NO: 515377 - DNA, 116 bp, Homo sapiens
gcagcccccgcgctggtgcagccaccctcgctccctctgctcttcctcccttcgctcgcaccatgaaatgagccgtcagactgctacagcattacctaccggtacctcgaagtgtc

SEQ ID NO: 515378 - DNA, 75 bp, Homo sapiens
gtaggaaggaacttggttccccctccctcagcttccgccccaaaaggagagcaagccctggaggttcactctttc

SEQ ID NO: 515379 - DNA, 98 bp, Homo sapiens
ctggaccctgcccagcagaatttgtatagagatgtgatgttggagaactacagaaacctggtctccctaggtgccgtgagcgatgtggagatgcagga

SEQ ID NO: 515380 - DNA, 97 bp, Homo sapiens
cagaaccgtgatggcttcattgacaaggaggacctgcacgacatgctggcctcgctggagtgtgaacatggctacgcctcttcattcccgtccatgc

SEQ ID NO: 515381 - DNA, 75 bp, Homo sapiens
gacagattcgcagtggtcgcttcttctccttgctttgacaattattctgccaatgttatggtagatggaaaaccg

SEQ ID NO: 515382 - DNA, 99 bp, Homo sapiens
ctgcagttaacgggaccagctctgcggaatcaggaagtgtgctgcaccactggaatgaaatctattactttgtggaacagttggctcacaaattcatca

SEQ ID NO: 515383 - DNA, 95 bp, Homo sapiens
tctgggatgagattcaatgaagtggccgcacagtatagtgaagataaagccaggcaaggggatgcagactcatctgagcgtatcattgctcccat

SEQ ID NO: 515384 - DNA, 95 bp, Homo sapiens
cttgggccgccgagctggacccggaccggttttggatcgatcctgtcctcggtaccgtgggctttgggtctggcctccacgggtgggccttcacc

SEQ ID NO: 515385 - DNA, 90 bp, Homo sapiens
gccgggacggacatgcgcgggagggcgccgcggggcagccgccgctcctccggggcgtcgaccagaagattatgatattcataacagcag

SEQ ID NO: 515386 - DNA, 80 bp, Homo sapiens
gaaagattcgggccagagacgacaacccgggcctccgagccctggtccagcgcctccctctctcagcatggacgaggaga

SEQ ID NO: 515387 - DNA, 100 bp, Homo sapiens
atgggctcatgatgaacgcatttgaagaaaattccaaggtcactgtgccgcagatgatcaagtggtagccgagtggacaatgaggaagaggaagaagagg

SEQ ID NO: 515388 - DNA, 101 bp, Homo sapiens
ggagggcaaacctgtgaacccacccgagagcaacaaagcaggcgactacagccacgtgaagataaacaggggtcacatgacgacagaagccaagagggctg

SEQ ID NO: 515389 - DNA, 96 bp, Homo sapiens
ccacatcggtcagaaaaagatttctgaaaatccagaatggcttgatgtttacatgcacattttacaactgcttactacagtggatgatggaattca

SEQ ID NO: 515390 - DNA, 74 bp, Homo sapiens
acgatgtggaacccagagatgactccagccccagccccaagggcagaggtacatgtcccagagcaagcacacgg

SEQ ID NO: 515391 - DNA, 96 bp, Homo sapiens
gataagccacccaagcttttgtatcctatggaaagtaaactgacaattcaggagacccagctgggtaccttgttatcccataactttggtatcctg

SEQ ID NO: 515392 - DNA, 100 bp, Homo sapiens
ggtcctgcatcctcagcgaggtctccacccgctcgcgctccaagctccctgcggggaagaacgtgctactgctgggtcttgcaagagcaaaatccgtccc

SEQ ID NO: 515393 - DNA, 100 bp, Homo sapiens
caagcacccgccgccggcagcttcgctggaaggttctgctccagacgagcccttaccacgttgactcactcctgcagctcagcgatgcctgccgctttca

SEQ ID NO: 515394 - DNA, 97 bp, Homo sapiens
gccgagggcttcgtggatgccctgcaccgggtccggcaggtgtcatggagaaactccagctgggcccagagattctgcagcgggaaaatccaaggct

SEQ ID NO: 515395 - DNA, 50 bp, Homo sapiens
cacaggcctctcttcacacacttggggacagtttccggatctttcagaag

SEQ ID NO: 515396 - DNA, 83 bp, Homo sapiens
ctgggggctccctggacaactccgagcagaaaggacccaggagcgataacagtaaatcaaataagatatttgtcggtggaatt

SEQ ID NO: 515397 - DNA, 75 bp, Homo sapiens
aaagaatactgtgaattatgcaagcacagatttgcttttacaccaactgacatagcccagagatacaggataagc

SEQ ID NO: 515398 - DNA, 85 bp, Homo sapiens
acgacatgatgacagctggccttttttgaaacttgtttctaaaatccaggtgtgtttccattgtagaaaacctggtcatggaatt

SEQ ID NO: 515399 - DNA, 90 bp, Homo sapiens
gccaaacacaccgtatttcatctgtagcattcaagacttcaaactgctagagttgggaagacatcactgattatgtctctggtcagtgaa

SEQ ID NO: 515400 - DNA, 100 bp, Homo sapiens
cagcaggcctttgctggacagatgaagagtgacttgtttctggatgattctaagagatctccagtctatgtgctgaagaagcagcagcccaagagcagac

SEQ ID NO: 515401 - DNA, 90 bp, Homo sapiens
gagagatcagcattccatcttaagcaaccagaggaatatcattatctcaatcaggactatacaggctccaacccaagttccagtggttgt

SEQ ID NO: 515402 - DNA, 90 bp, Homo sapiens
agtgtctcttcagggacagcagacccactggatgagggcccgaaaatggtttcagcacctgtgtcagagatgggggtctcactatgttgc

SEQ ID NO: 515403 - DNA, 75 bp, Homo sapiens
tgtctccagaaaccagcagatattcctgcgggacatagaacaggtgccacagtcgttccccatcaggaagtcctc

SEQ ID NO: 515404 - DNA, 51 bp, Homo sapiens
atgccaatgggcggccagatgcggtagagttggctttgtgggacacagctg

SEQ ID NO: 515405 - DNA, 100 bp, Homo sapiens
cgaaccttgtcaagcaagctgggatctatgagtggaaaggtgaccaagcccaaagaggagaaagatgcttctaagggcttctccagggaaagtgaccgag

SEQ ID NO: 515406 - DNA, 74 bp, Homo sapiens
ctgttttccagagctttgccaagttcagcaaatttggagatgtaatcacgtggttaaataaagaactaaatgaa

SEQ ID NO: 515407 - DNA, 90 bp, Homo sapiens
tacaggctcagtctgcggccaagactccgtcctgcaaggtgaactgtcacccctacaactcagcttgcaaccagccctggccaccagttt

SEQ ID NO: 515408 - DNA, 100 bp, Homo sapiens
tggaacgcgggcgcctgaaggagttgttgtctcggcagcgcccgcggagacgtgaagaggattttttatcaagcagaaatgcatcgaacaacgagaatca

SEQ ID NO: 515409 - DNA, 101 bp, Homo sapiens
gctcattaagagcttggaggcggcccgcgggtcaatgcatcacgtcaagaagccaaattgacagaggagtgtgatcttctcattgagatcattcagcaaag

SEQ ID NO: 515410 - DNA, 49 bp, Homo sapiens
cttaaggaagcacatatatagagctcagtatgaagatttcttagatgct

SEQ ID NO: 515411 - DNA, 100 bp, Homo sapiens
cctcgagaagctccagatggcgtcttccgtgggcaacgtggccgacagcacagtctgccatgagtcctgtgcaggttgctggggcccaacggagaagcac

SEQ ID NO: 515412 - DNA, 50 bp, Homo sapiens
atggcgacggcgaccatagctctcgacactcatgaggaccatgatacttc

SEQ ID NO: 515413 - DNA, 95 bp, Homo sapiens
agtgaccgttggagtttaatgagaggaatatactcatcatcagtctatttagaagaggtagttgatgtcacttggcgatattcctgcaaacatga

SEQ ID NO: 515414 - DNA, 98 bp, Homo sapiens
cgagacgcagctgccgcgccggggcctgagctgccgcctcctccgccgcccgaaaacccggagtgccccgcacagatggagtcttgctctcttgccca

SEQ ID NO: 515415 - DNA, 108 bp, Homo sapiens
ctaatgtctgtctggctgctgcagtgacccagaccctctcctttccctttgagaccgtgaagagaaagatgcagattagtgatgatgaaccaggttatgaccttgatt

SEQ ID NO: 515416 - DNA, 76 bp, Homo sapiens
ggcctggagtacacgctgagcttcctcacacaccagcgcttccagttcagtagatgactgtccacaacctgtacct

SEQ ID NO: 515417 - DNA, 100 bp, Homo sapiens
acaccttcccctgcctcaaggagctgtgcaccagcccccgggcaactgtactcctgatgatattggtctgtgaaaccccgtatggctgctatgttctcca

SEQ ID NO: 515418 - DNA, 73 bp, Homo sapiens
cgggaccggctgcagagacaggcgttcgaggagatcatcctgcagtagatgtctctgagttgacgggatttcc

SEQ ID NO: 515419 - DNA, 50 bp, Homo sapiens
cgggagagtagcagtgccttggaccccagtgatgcggacccaggggagcc

SEQ ID NO: 515420 - DNA, 127 bp, Homo sapiens
cccaacaccatgccgtccgccttctctgtcagctctttccccgtcagcatcccagccgtgctcacgacaatgcagatcttcgtgaagactctgactggtaagaccatcaccctcgaggttgagccca

SEQ ID NO: 515421 - DNA, 83 bp, Homo sapiens
ccgcagtgaggccaacgccgtgttcgacatcctggccgtgctgcagggcgccctgcgtccggcagaggaggcgagcatcccgc

SEQ ID NO: 515422 - DNA, 80 bp, Homo sapiens
gaagtagcaaaggcaagaaggcaacgacgttccatctgtggaaggacctaccaaccaggaagctggagaagcttcgagag

SEQ ID NO: 515423 - DNA, 100 bp, Homo sapiens
atgacggagaagatgaagacagacattcagaggggcctggtgctgcggtggaggcaatgcccagagctgtggcagccaccttgcagccgtgaagcaccag

SEQ ID NO: 515424 - DNA, 75 bp, Homo sapiens
gcggctccggggcagctccggcgggcgcacaacattctgaaattttttggttattgtaatgatgttgatcgggag

SEQ ID NO: 515425 - DNA, 75 bp, Homo sapiens
gggttcgtggataataaactcaagcagcgagtcatccagatccaaaaggtaattctggcacttggagactatatg

SEQ ID NO: 515426 - DNA, 90 bp, Homo sapiens
ccccgagaagtacttaaaaaaacattggaattctgcttatctagtgcgtcagcatttatcccgtttgccaaccattgatccgaataccag

SEQ ID NO: 515427 - DNA, 75 bp, Homo sapiens
tcgctcgacgtgttgcagcacatcctcatccgagcctttgatttgagtggacctcatcggctgccccatggtgac

SEQ ID NO: 515428 - DNA, 100 bp, Homo sapiens
aagcccggtcctggctggcgggcctacagattcctggaggagatgcggcggcggcttcccttggccaacatgtcctactacgtgagcccgcaggccgtgg

SEQ ID NO: 515429 - DNA, 82 bp, Homo sapiens
caagaacttaaacgaaaattgaacattctgactcgaccgagcgacttgtttaagtatcactgcaatgctgacactgggaaat

SEQ ID NO: 515430 - DNA, 74 bp, Homo sapiens
gggacgcgcgtacgccctgctgcttctcctggttgtcttttggaaatgcaggtttaaggacaaattatctgctt

SEQ ID NO: 515431 - DNA, 83 bp, Homo sapiens
ctgaggccccagaactatcttttcgatatccatgacgacattgaaaatgaattttttgtattcaccagatattcttatatgag

SEQ ID NO: 515432 - DNA, 101 bp, Homo sapiens
taatattggccaatcatcaagacaagccagcagctcgctcagtacaagagcagcaagatgaagagcgacgtcggcagctgagagagagagctcgtcagcta

SEQ ID NO: 515433 - DNA, 50 bp, Homo sapiens
gaccgactctggggaccctcgccgaagagcattcttgttatttaacacgg

SEQ ID NO: 515434 - DNA, 83 bp, Homo sapiens
tggacaaccaacggctcaagaatttcaagaacaaaggccgcgacttggagcaatgtgtattcctccatcatatgctgaccttg

SEQ ID NO: 515435 - DNA, 98 bp, Homo sapiens
ctgggtgttaaccctcgagtcaatcatttgtacaggttttcagctgctactaaagataatgagcataagcgttcactgaccaagactccagccagaaa

SEQ ID NO: 515436 - DNA, 98 bp, Homo sapiens
ctgggatcctacgtgcatgaagatggacgaggtcctgtacagcatcgccgagaaggggaagatggtgaaaggaatgggaggtgctatggatttagtgt

SEQ ID NO: 515437 - DNA, 100 bp, Homo sapiens
gggataaatttatgtggatcttcgctttggtgccataaagttgctgatcatctgggctgtgatccacaaacccggttctttgtccctcctaatatcaaac

SEQ ID NO: 515438 - DNA, 83 bp, Homo sapiens
ttctttctgagatttcacttccctgtcaactcttcagctcgctatcatggtgaacttacttcagattgtgcgggaccactggg

SEQ ID NO: 515439 - DNA, 49 bp, Homo sapiens
tccccacgtggccgcgaagaccggcatccacccgttttgtcaagtgtga

SEQ ID NO: 515440 - DNA, 90 bp, Homo sapiens
ggacttgtatatgagtatacattgccaatggagatcttcgtggatgatgagacgaagttgacgctgcatgggttgcagcagtactacgtg

SEQ ID NO: 515441 - DNA, 100 bp, Homo sapiens
gtgctgggtgcagatgcagtgtggctctggatagcaccttatggacaggtgtaaacgtcctactttggggcaacttgccagagatagaagagagtacaga

SEQ ID NO: 515442 - DNA, 82 bp, Homo sapiens
gaagatcctggtgtcgccatgggccgccgccccgcccgttgcaggttacgggcaggacttgagtggcttcggacagggcttc

SEQ ID NO: 515443 - DNA, 98 bp, Homo sapiens
agcatttgtgttgatgaagatgaaagagactgcagaacgactacggtcagaagatgggcagccaatggtgctcaaactcaaggactggcctcctgggg

SEQ ID NO: 515444 - DNA, 96 bp, Homo sapiens
gggcctctaggtcctggcgccccgcccccactgctgtttctcaataagcaaaaaggattcaattactggacttgtcaactctgccagtgtacgtgc

SEQ ID NO: 515445 - DNA, 98 bp, Homo sapiens
ctgtggtaggggaccccgatcatctctgagagtcctaagacatggacttgaggtgttacagggtcttgattatttacataccaagtgccgtatcatcc

SEQ ID NO: 515446 - DNA, 73 bp, Homo sapiens
tagagacagccaacaaaatattcatggttcttgagcactgctcagcacgcaggcatgtgaggaagctgggctt

SEQ ID NO: 515447 - DNA, 100 bp, Homo sapiens
caggtcgctttctacggacagacgttagggcaggcgcaggcccacagccagggagcagccaatcttcagcacacgggcgcacgtgttccaaattgaccca

SEQ ID NO: 515448 - DNA, 99 bp, Homo sapiens
gaccttggagtccagcactctgcatgtgactccccgcagcctggacagcttcctacatgccaggcatgccaggtggaatctctccatacccatccggat

SEQ ID NO: 515449 - DNA, 82 bp, Homo sapiens
gggtgccctcaatgagcacatgaccagcttagcttctgtcctaaagatatgcacttatttggccattacccagcacatgacg

SEQ ID NO: 515450 - DNA, 100 bp, Homo sapiens
aaggggccagtctggagacagtcaagatcgactagagactgctaacaggcaactatccagcagggaatacgaagggcatgaagacaaagctgcagagggg

SEQ ID NO: 515451 - DNA, 80 bp, Homo sapiens
accttccggagcttctcagaagacagagggttttcttttgaggggatttgggagcagcttgtcttacacaaggacgaagg

SEQ ID NO: 515452 - DNA, 74 bp, Homo sapiens
agatttgtttggcgtgccaagcttctctgtgaaagagcacagtacataccgagcatcaaatattaaggcacccg

SEQ ID NO: 515453 - DNA, 50 bp, Homo sapiens
gcctcccaagtagctgagattacaggtgctaagtgtggtggctcacacct

SEQ ID NO: 515454 - DNA, 100 bp, Homo sapiens
tttgtgatgatgagctgatcttaatcaaaaacctcattgatgctactcacagagacgtggatgtgctgttactgctttctaactctgcctactacgtggc

SEQ ID NO: 515455 - DNA, 50 bp, Homo sapiens
gagtgtatgattcgtctctttaatactgggatatctgcattacctccacc

SEQ ID NO: 515456 - DNA, 98 bp, Homo sapiens
gatgtgctgtgtttcttctgacaaccattgtaaattggtggtgaagcagtattttccaatttgaagattcatttgaaggtggctcctgccacctgcta

SEQ ID NO: 515457 - DNA, 97 bp, Homo sapiens
gacctttcccgctggcgcgcagcctcagctaggaggttgaatgatccctcagttgtcactccattctccagagacgacagggggcacacccctctcc

SEQ ID NO: 515458 - DNA, 76 bp, Homo sapiens
gggaacgctcacggactgtgtgtgtgacaagctggctgctgactgtgcccacgagctgcggcgccatggggtcagc

SEQ ID NO: 515459 - DNA, 75 bp, Homo sapiens
ctcagttccatccgtaaaatatgtaaaggacctccaggatatagtggctaccctgggccccaggtcagctaccca

SEQ ID NO: 515460 - DNA, 75 bp, Homo sapiens
gagacccttccggtcttcttttcaggtcaacgtattgaaacttactgttgaagacttggagaaagagagggattt

SEQ ID NO: 515461 - DNA, 83 bp, Homo sapiens
aacatgtcagcgttattgtaatgcaacaaagaatggccgagtggattctgaggaccggaggagccgccactgcccgtacctgg

SEQ ID NO: 515462 - DNA, 100 bp, Homo sapiens
cggccatttccttgatgcgcaagttcattgcctaccagttcacagacacggataaaaactggatatgcatctaaaacaagatgtaagtcactgaagattt

SEQ ID NO: 515463 - DNA, 100 bp, Homo sapiens
ctatgaacggaagcgacatttagatttaattgagatgcttgaagcaaaaaggccatgggtggtgctgttgtaggagcaagggatacaatgatgatcaagg

SEQ ID NO: 515464 - DNA, 50 bp, Homo sapiens
agatgaggaagtacaactttgaggatcccaggagggcactcatggtggtt

SEQ ID NO: 515465 - DNA, 100 bp, Homo sapiens
cccaccagttcgcccgtccccctgccccgttcacaatgctaaagaacgtgccaatggaatggagcttgatgggcgtaggatcagagttgatttctctata

SEQ ID NO: 515466 - DNA, 100 bp, Homo sapiens
tagctttgtaggagcatggcttggagcacttcctattccactggattgggaaagaccatggcagacagcaactctggaaagtggcttctaactcggcgca

SEQ ID NO: 515467 - DNA, 100 bp, Homo sapiens
gaaattgttgaagagttcaactttcccagaagttgttctaacgctgcctttgctttaaaacagtattacttgcgtagccggatcgagctgggagatgtga

SEQ ID NO: 515468 - DNA, 89 bp, Homo sapiens
actcccttggatcacagtctttgcacactcggacttcaaaactgttccagggccagtatcggagtttgcaatgcagcaagtcttggaaa

SEQ ID NO: 515469 - DNA, 74 bp, Homo sapiens
cgaactgtcaaagaggtgctgcccgctttggagaacaacaaggagcaggatgaaaactttcggaagagaaagtt

SEQ ID NO: 515470 - DNA, 117 bp, Homo sapiens
cagacgaagacagtccctggatcaccgacagcacagacagaatccctgctaccagtgtcatctttaagaaatgaaaagcgaggctcatcatatctcatctctgccccagaaggtggt

SEQ ID NO: 515471 - DNA, 100 bp, Homo sapiens
gctattcttacaaaggacaacaatattagagtaattggagagaaagcatgggattatggcaaccacagaatctcagtagtacaagttccattcagttttt

SEQ ID NO: 515472 - DNA, 125 bp, Homo sapiens
gactggaaacaatggcatttacagaaagagtcaacagcagtggcaacagtccaatatcagatggaaatgatgcggagccttcgccatgtaaacattgatcatcttcacgtgggctggtatcagtc

SEQ ID NO: 515473 - DNA, 125 bp, Homo sapiens
tgcgaccccagtcgcctggcgcaccggcttttggtgctgttactgatgtgcttccttggctttggtcaacctggactcctacacgcgggagcacaccaaggacaacctgcagagcgtcacgcggg

SEQ ID NO: 515474 - DNA, 83 bp, Homo sapiens
ctcgggggccgctctgggatcccggccaccagcaattgtccgtttggatttaggtggcgagtagaaaaagaagtaatttcagg

SEQ ID NO: 515475 - DNA, 100 bp, Homo sapiens
gactttcttttggccctaggccccttcctgcccctgtcgtcagcagaaaatggacccaagtggggtcaaagtgctggaaacagcagaggacatccaggag

SEQ ID NO: 515476 - DNA, 100 bp, Homo sapiens
ctcctacatcgacgaccacgtgcggaggaaggactcctcgctctatatagaagcccccgagcgcccacagcatgaaggaggaggccttcctccggcgccg

SEQ ID NO: 515477 - DNA, 90 bp, Homo sapiens
cgagcggaagagatagagcttcgcggagacggcggaagcggagagcaacagcgcgccggcgcattctacattctaaaggggagctcagtg

SEQ ID NO: 515478 - DNA, 75 bp, Homo sapiens
gaaatagttcctcttgataaataaacaattaacaaatactttggacaagagaactcgatgccaccgcaacggtat

SEQ ID NO: 515479 - DNA, 97 bp, Homo sapiens
aatctggtccaaacaatcatgggaatttccaaggggattcaaacttcaacagaatgtggcaaccagtgtttgaaagatgtatggtgatcttgaaacc

SEQ ID NO: 515480 - DNA, 75 bp, Homo sapiens
atcattgcaaagcagggaggagctacaaaagaccccacagctgtagagagagcaaacttgttaaacatggctaaa

SEQ ID NO: 515481 - DNA, 98 bp, Homo sapiens
tcggtgccgatcagcggaagaccaaagaggatgagaaggacgacaagcccatccgaggcatctaataggattcaggaatcaaagaatcagtgtactca

SEQ ID NO: 515482 - DNA, 100 bp, Homo sapiens
cgcgaggccacggagagctcgccttggagagcccaggagcaggggagacatgcggaatggccaaagactatgacgggtcttcctagcacatcagggacaa

SEQ ID NO: 515483 - DNA, 90 bp, Homo sapiens
gcagaccatcttcaccgaagagcagctagacaactaccaggacttgacaagtagcaccgcacctccagcaaggctgtccctcagctgcag

SEQ ID NO: 515484 - DNA, 100 bp, Homo sapiens
cggagactgcgcgcctcgcctcacagcgaaacgccgcgcactcggagccggcacggctcggcgaaactatgttccaacttcctgtcaacaatcttggcag

SEQ ID NO: 515485 - DNA, 75 bp, Homo sapiens
tcggggatggacctccagatttccttactgcctgatcctgcctgaagatggtgccactggtggctgtggtatcag

SEQ ID NO: 515486 - DNA, 50 bp, Homo sapiens
actttctggcctaacttttatcagaatctggcaatgggggcaggagctgt

SEQ ID NO: 515487 - DNA, 75 bp, Homo sapiens
gatgaccatggaccacctcctagtaagaacccagtgacttgattgtaaaaatttacagagcggaatcatatgctg

SEQ ID NO: 515488 - DNA, 101 bp, Homo sapiens
ctgtcggcagactggtgacttcacttttgagtgcaactgccttccagatgcctgtgaggagccaccaacatttgaagctatggagctcattggtaaaccaa

SEQ ID NO: 515489 - DNA, 100 bp, Homo sapiens
ctgggacgcgctacctgcctccgggcgcctgggcttcaggatgaaggaccgtctggagcagctgaaggccgaaaacgggccttactatacatcatatccc

SEQ ID NO: 515490 - DNA, 74 bp, Homo sapiens
tttcaaacagtgtcaatacaaagatactctccccaaggtccatccagaaccacccactgcatgcagagaaaaac

SEQ ID NO: 515491 - DNA, 75 bp, Homo sapiens
cgccagcctgcgaaggtggcggcgctgctgctcgggctgctcttggaggcaccagttggagatgccaggacatta

SEQ ID NO: 515492 - DNA, 50 bp, Homo sapiens
tcgaaagcctatcagcatagttaagtagacccaaatgatttgtacattgt

SEQ ID NO: 515493 - DNA, 101 bp, Homo sapiens
ccacttcagggatgccacctcccacctcagggcccccttcagccatgactcctccctacccgcagtttgagggccatgtttatgagtggactaagtgaaag

SEQ ID NO: 515494 - DNA, 82 bp, Homo sapiens
gaccgggaggctcccgggcttgcgtggtcaccaggagactaaagtccatcaaaaacatccagaaaattaccaagtctatgaa

SEQ ID NO: 515495 - DNA, 75 bp, Homo sapiens
gccgacatggctgcgctggtggagccgctggggctggagcgggccctcgagcatgttccaaactcggttcgcttg

SEQ ID NO: 515496 - DNA, 100 bp, Homo sapiens
atcaacatgctgctcaacaacggcttcagggagtcggaccagcttttcaaacaatacagcaagaaaagcctaggcttctcgagcctttggattatgagac

SEQ ID NO: 515497 - DNA, 100 bp, Homo sapiens
ccggcgtggagagccgccagggctctatcaaggggctggtgtactccagcaacttccagcatgacccatctgcctggcaccagcacctggggctgccagg

SEQ ID NO: 515498 - DNA, 100 bp, Homo sapiens
aggcgctgcgcaagcacgctgaggaggcaggtaaagtgaggaaacatgcaactgaacaggaaaaaactgaagagggattaggccctaatataaaaagcat

SEQ ID NO: 515499 - DNA, 73 bp, Homo sapiens
ttacaagcccatcatgctatggaaaaaatggaagaatttgtttgtaagctgccgcagcatgaacccctgagct

SEQ ID NO: 515500 - DNA, 90 bp, Homo sapiens
cccaactctaagtgcccacttctgaaggatgacctcgttttgatggacagacaaccttttagtcctcacggtggccactaaggagaccga

SEQ ID NO: 515501 - DNA, 112 bp, Homo sapiens
ccccgggccacccagcccgcccaactcccagcggagagcaagcaatcatttggggaagaatctacagttgctgatggacagagtggatgaaatgagccaagatatagttaaa

SEQ ID NO: 515502 - DNA, 50 bp, Homo sapiens
tgcagagcgcgcagtacctccggacattgccgagaatggctgcgccccca

SEQ ID NO: 515503 - DNA, 88 bp, Homo sapiens
tttactggagtaggtgttagtaagcccccaaatacatcaagatgtttgtactggatgaagctgacgaaatgttaagccgtggattcaa

SEQ ID NO: 515504 - DNA, 74 bp, Homo sapiens
cgatcctgtaactgccaaacccaagttggttggagatgtggattttgaagccttgttagatgacttggataaag

SEQ ID NO: 515505 - DNA, 74 bp, Homo sapiens
gcggcgccgccgggctgtggagtgatgtcttggcattgcccattttcaagcaggaagattccagccttccattg

SEQ ID NO: 515506 - DNA, 75 bp, Homo sapiens
cggagcccggctcccgcaccatggaggaggacgacagctacggttgcagtccatgagctgggaaaggaggcagtg

SEQ ID NO: 515507 - DNA, 74 bp, Homo sapiens
gaaaccactgggaggacctgggctttcagggaattcctcctgatcagcagagactgatctttgctggcaagcag

SEQ ID NO: 515508 - DNA, 75 bp, Homo sapiens
tatagcattggtaaagaacgatcgtccagtggagatgctttctgatgcagcacctgggaaactgagaattgttca

SEQ ID NO: 515509 - DNA, 101 bp, Homo sapiens
gctgccgtcgggcaactcctggcacactgctcctctttctggctttcctgctcctggtctacttccccagcaggacagcatcattctcctatatcttctag

SEQ ID NO: 515510 - DNA, 82 bp, Homo sapiens
tcagagctgaggtacttcgtgaagatggtggaagagagtgaagagcggctcacggaggagcagattgaagctcttctccaca

SEQ ID NO: 515511 - DNA, 78 bp, Homo sapiens
aaactttgtaagtggcagaacaaggatttgaagctggcagtctggttccaggtggcccgaggcagccgggatgacagc

SEQ ID NO: 515512 - DNA, 100 bp, Homo sapiens
agtacgagttgaatcattgttcaaataagccatgggaacaaggaggtcttctcctgccggggcatcctgctggcagtgaactggtttctggagcggggcc

SEQ ID NO: 515513 - DNA, 100 bp, Homo sapiens
atcttgtcattcagtggtgtcgaatgctcaagtgcaatgtcaagagctttctggatgttctctcccaggggctggcttcaggagggagcatagaaggcag

SEQ ID NO: 515514 - DNA, 80 bp, Homo sapiens
ggccacaggaaaggggccgtcggtcgccgccatgacagcgagcgaggcggaggattacaagggccagaagctagctgaac

SEQ ID NO: 515515 - DNA, 101 bp, Homo sapiens
ggaaaagagggtggaaaaagcagggaggttatgaggcttaataaagaaggccggagcctcaacagaaagctcctttagttcctcctcctccaccgccacca

SEQ ID NO: 515516 - DNA, 100 bp, Homo sapiens
caggattctggaaccgtggagacaccgagaaaccatgagtgtaaggttaccccagagtatagacaggcctggaagaaacgctggtttatcctgcggagtg

SEQ ID NO: 515517 - DNA, 80 bp, Homo sapiens
gaaaggatgatggcatttctcttttaatatctgatactcagcctgaaggaataagtcagcaacctgatccaggctttact

SEQ ID NO: 515518 - DNA, 96 bp, Homo sapiens
cgcgccgaccgcgttcctatggacagacgcacagacacctgcagtgtcttccaaggtccatgaggatgcacacttatttatccagagagtatggat

SEQ ID NO: 515519 - DNA, 97 bp, Homo sapiens
ggatcgtgaccgagaccgtgaccgagagcgtgaccgagagcgcgaatatcgtcatcgttagaaggtacgacaccgagcttctggtcaggtgatggct

SEQ ID NO: 515520 - DNA, 109 bp, Homo sapiens
ttgggggtcgagcacataacggggttcgggtgtctcgtgtgtgaacatcacaggaatactcccccagttgcaagaggcgcaggaccgtggaagacttcaacaaattctg

SEQ ID NO: 515521 - DNA, 98 bp, Homo sapiens
tcggctttcgacaccaaccccttcgcggacccagtggatgtaaaccccttccaggctgagtcatcactagagagtgggaagggcagcagcagcagaga

SEQ ID NO: 515522 - DNA, 100 bp, Homo sapiens
agagttcaaggaggccttccagctgtttgaccgaacaggtgtccccccaggagatggtgcaggagattcaccaggtgctcatggaccgggaggacacgtg

SEQ ID NO: 515523 - DNA, 75 bp, Homo sapiens
gtgagccacaatgcatcgctggaagtagccagtcaagctgaactagcagaaattccagaaggctatgtcccagaa

SEQ ID NO: 515524 - DNA, 100 bp, Homo sapiens
gggactggtctgatgaagccaactgtaccgctgctgtgacttactcgaagcctcgattggccacattttggtactacgccaaggttgagctggttcctcc

SEQ ID NO: 515525 - DNA, 96 bp, Homo sapiens
gcttgattttgtgcaggatccgtgctttgcccaaggagatggtctcattaaggagctcgaggccatgagcagatataccagcccagtgaacccagc

SEQ ID NO: 515526 - DNA, 75 bp, Homo sapiens
ttcgtgagttttctcaaatccgatatgatgctgtgaagagtaaacacacagcaagaaggaggccatcagcaaact

SEQ ID NO: 515527 - DNA, 100 bp, Homo sapiens
aagaaacaagattgaaggaaaaggaagatgcactgactagaactgaacttgaaacacttcaaaggtgaacacggccaaaggattgagtggcgaaaatgga

SEQ ID NO: 515528 - DNA, 75 bp, Homo sapiens
ggacaagatgatggagtgccacttccgattccgccaccagatggcactaggtcaaaatgcagatcttcgtgaaaa

SEQ ID NO: 515529 - DNA, 80 bp, Homo sapiens
acaatcttcaatgagtaaacatattcctctcttccgccctctctggatgagggaacagaagtggaggaaacaaaagaagc

SEQ ID NO: 515530 - DNA, 74 bp, Homo sapiens
gttcgcgtctctctgctgcggcgcggggaccgctgtgctctcggaaacccctcctggagtttccccaaagccat

SEQ ID NO: 515531 - DNA, 100 bp, Homo sapiens
ctggatgcgttcctcaagcccagcctcgccaggactaccttaagggactgagtatcattgggggctggtgaattaccatatctccgtcaagtgcagtaac

SEQ ID NO: 515532 - DNA, 100 bp, Homo sapiens
gctcagccagctcctgcgaccgccctgcgcttcgtgcaccggggcggtccgttgccaaagccaggggcccatcctgatggagctgcagacttaccgttac

SEQ ID NO: 515533 - DNA, 83 bp, Homo sapiens
gtctcgtgtgtgaacatcacagatcagtgtgcgtgtgaccaccatggatgcagagctggagtttgccatccagcccaacacca

SEQ ID NO: 515534 - DNA, 131 bp, Homo sapiens
cgagccagacagctggaggaggaacttcgaaccatggaccaggccctcaagtccctgatggcctcagaggaggagcgccctgcccacccttggagccaggcacacagtgacgactcggaggccaccagcct

SEQ ID NO: 515535 - DNA, 87 bp, Homo sapiens
aggaaggaacttggttccccctccctcagcttccgccccaaaagggcatacataatcttgctgctatgcttcgaagctgtagtctga

SEQ ID NO: 515536 - DNA, 75 bp, Homo sapiens
ttttttgagaaaggaaggaatatatcctgactgattgcagacctgttatcctaaactaggtgagtcagcttttgg

SEQ ID NO: 515537 - DNA, 82 bp, Homo sapiens
tgggagagactggaccagaccatgggcctgagcatcagatcaggcctttgtgacactaaccacaaacgatgcctacgccaaa

SEQ ID NO: 515538 - DNA, 100 bp, Homo sapiens
gaagtgcagccctcttacgcaaccaggtacaccaggggttggaaaaaccacactaggcaaagaacttgcgtcaaaatcaggactgaaatacattaatgtg

SEQ ID NO: 515539 - DNA, 90 bp, Homo sapiens
aaggaacccacgaagcttttaaaaaaacattctacccaagtctacctgggaccgaacatcatcttcagcgggctatttcagcacagcagg

SEQ ID NO: 515540 - DNA, 50 bp, Homo sapiens
cttctggaaaactggaaacaagtgatatggagaatgcagaaaacattctc

SEQ ID NO: 515541 - DNA, 75 bp, Homo sapiens
aaaaccggaagggcctgatagccgccatctgtgcagatgtggaagatgtgaaatttgtcatcaattatgactacc

SEQ ID NO: 515542 - DNA, 78 bp, Homo sapiens
gccgggaacccttgccgctgctgtcctgcgaccccaagcagtgccggtggtggtgtgcacattgagccccggtataga

SEQ ID NO: 515543 - DNA, 83 bp, Homo sapiens
cgccgaagaagcatcgttaaagtctctcttcaccctgccgtcatgtctaagtcagagacacgaagatcgattgagaagttatt

SEQ ID NO: 515544 - DNA, 75 bp, Homo sapiens
aagagattcagccagcacactcctcgcgagcaagcgtacacagactttactaaaagagtacaaagaaagggataa

SEQ ID NO: 515545 - DNA, 144 bp, Homo sapiens
aaaggggcacctcagtatcccagtgcattcccatcctcgctcccacctgtcagccttctaccccatgagaaagaccagaagagacggtccagcagacaggtgaagagaaagcgctacactgaagacctggagttcaagatttct

SEQ ID NO: 515546 - DNA, 80 bp, Homo sapiens
gactgcgccgcgtcttcctcaagtgagagggtccaagcctggtaagaatgtccagcttcaggagaatgaaatcagaggac

SEQ ID NO: 515547 - DNA, 83 bp, Homo sapiens
gccgtgccctggggctgagccctcaggatgaagccaacgcacacgatggtcaactgctggttctgcaaccaggatacgctggt

SEQ ID NO: 515548 - DNA, 101 bp, Homo sapiens
tgaatgatggtcacttcatgcctgtcctgggatttggcacctatgcgcctgcagagatattttagggcaagtgtggtggctcatgcctgtaatcccaatac

SEQ ID NO: 515549 - DNA, 99 bp, Homo sapiens
tggaattgagagccatcgctgcatggaaaccaccccgagcttggcgtgtgctaataaatgtgtcttctgttggcgacggagtctcgctctgtcgcccag

SEQ ID NO: 515550 - DNA, 97 bp, Homo sapiens
aaatgctccacctgtaagaacagaaaatcgtcttatagttgagaatttatcctcaagagtcagctggcagggttatgtggtccgaatcagtggtggg

SEQ ID NO: 515551 - DNA, 75 bp, Homo sapiens
tcgaatttcagcgtaaactgcagcatgatgttctgaagcttgaggtgcaggatatcgtcaagccaaacacagcac

SEQ ID NO: 515552 - DNA, 100 bp, Homo sapiens
gcggcctgctggccgagcgcctgcgcatcagcccggacagttctgctgacccctcgtgtagatgtgctgcagccttgggccctccccggcccacgtcctc

SEQ ID NO: 515553 - DNA, 83 bp, Homo sapiens
ctgagcccaggccacagtaccctattcacgctctgtgcttgtgccaaggcgtccactcccaggtggtccaggtgaacgactcc

SEQ ID NO: 515554 - DNA, 97 bp, Homo sapiens
cccatctgcttgctgtataagaacctggccaacaagattgtccccattgccatccagctccatgatgcgttatctgggtctggaaacccaaaccctc

SEQ ID NO: 515555 - DNA, 95 bp, Homo sapiens
cacccgggagtttgaggaggttgtgtgtgtaatgcatcttgaagaccggttgcaggagctatacttcaaaagtaaaatgctgtctgaatacctga

SEQ ID NO: 515556 - DNA, 100 bp, Homo sapiens
agcaaggaagaaaacctttgaccatgaagagaaatgagatgatagccaaaccctcagagtgtgaacatggctacgcctcttcattcccgtccatgccgag

SEQ ID NO: 515557 - DNA, 83 bp, Homo sapiens
cagctgcttccattggccagtatgaagtggtgaaggagtgtgtgcagcgggtgctggcacagatgagaagactctgaccagga

SEQ ID NO: 515558 - DNA, 76 bp, Homo sapiens
cagaggtggaggcgctttgaaaggctcaaggatgtccaatcaatggatgagctgaaagatgtctacaaccattttc

SEQ ID NO: 515559 - DNA, 100 bp, Homo sapiens
ccggaagcttgtggcgctgaaaacgaacgatgtatcggcaagcagtgtaaacggaggacttggggaaaaaggaccacatagtccatcgaagaagagtcct

SEQ ID NO: 515560 - DNA, 100 bp, Homo sapiens
gacactcatgaagtagattccaaagcagctttaataccggtggtaatcactcaaggaaaaggaattatcagagtaacaatagttcctgttactgacttga

SEQ ID NO: 515561 - DNA, 80 bp, Homo sapiens
gaccgtcagcaccaggagcagcgaggcactcatcctgcacgccggcgagtgccagcggcctgtttaaagaagaaaacccg

SEQ ID NO: 515562 - DNA, 83 bp, Homo sapiens
gtcatcaccgccatgcccaagaataaaggttttaaaatcaaagatgggaaaatcggagaaaattgcccttccccatggccagc

SEQ ID NO: 515563 - DNA, 90 bp, Homo sapiens
catactacctctggccccgagatcagaatgccggaaagcggagggaaaggccacttccaccactgagctgccccccgagtacctgaccag

SEQ ID NO: 515564 - DNA, 100 bp, Homo sapiens
agacggctcacctgtgcgggatggaacaaaaggtgctgggcctcgtgcgggtcccgctgtacacccagaaggaccgagtcggaggcttccccaacttcct

SEQ ID NO: 515565 - DNA, 76 bp, Homo sapiens
tttgaagattctacagataaatcaggaggagatgttaaagtaacccatcttgcaggacgacattgaagattggtct

SEQ ID NO: 515566 - DNA, 100 bp, Homo sapiens
cggagctgccggcggcatgatccgacacgccggggcgcccgcgcgcggggaccccacgggggcgtctctggccgagcctctttttgtggaaaacgacagc

SEQ ID NO: 515567 - DNA, 60 bp, Homo sapiens
caggacatggagtatgaaagacgatcctcttctcatgtagacggctttcttccaagtggt

SEQ ID NO: 515568 - DNA, 101 bp, Homo sapiens
aatggagctgccagagagttccagctgcctcagatcctccctggtctctcagcaggttcccagtgcccccgacaagcccctgctggtgtctccatctcctg

SEQ ID NO: 515569 - DNA, 82 bp, Homo sapiens
cggcggccacctgagtggcgcggcggtgtcaggtttggtgcacctcgatttggaggaagtagggcagggcccttatctggaa

SEQ ID NO: 515570 - DNA, 50 bp, Homo sapiens
agggagctactctcaggctgcaactgggatagatgggcagcagaagatca

SEQ ID NO: 515571 - DNA, 101 bp, Homo sapiens
attgtccgtggggcaaaaaatactttctcttcaggatctgatctgaatgctgtgaaatcactaggaactccagagagtgaacctctgtatgtgcctgtgaa

SEQ ID NO: 515572 - DNA, 88 bp, Homo sapiens
cggacgacgtgaccagaagtcccgccgcttaaagggacccacatgttgactgttacacaatgtcatctatcaagagtaaactaggttt

SEQ ID NO: 515573 - DNA, 98 bp, Homo sapiens
cagatattatcagtggaccacaacagacccagaaggtttttcttttcattagaaaccgcacatcccatgaagctgaggtcttgaagcagctggctgag

SEQ ID NO: 515574 - DNA, 90 bp, Homo sapiens
atagcaatgatcccaatttccagatgccttgttcaacagcccttagagatttgtttgattccatggataaaacttcttccagtattccac

SEQ ID NO: 515575 - DNA, 75 bp, Homo sapiens
ctcgtgcactttacacacatgagtgctgaagctgctgaaagatggcagaagaagtggtggtagtagccaaatttg

SEQ ID NO: 515576 - DNA, 80 bp, Homo sapiens
ggactctttctatctcgagatcttcgatgaggaaagaccacagcaagattctttcattcgtctcctcctagcctggggga

SEQ ID NO: 515577 - DNA, 90 bp, Homo sapiens
ggctgatggagagctgaacattactcttccagaagaggatgccccagtgaagttgtgtgactttggatttgccaagattgaccaaggtga

SEQ ID NO: 515578 - DNA, 117 bp, Homo sapiens
agggcggcggctgcggcagcaagggcggcggtggcggcggcggcagctgcagtgacatgtccagcatgaatcccgaatagcctccggtgtggctgtctctgatggtgtcatcaaggt

SEQ ID NO: 515579 - DNA, 50 bp, Homo sapiens
agaccgcggccgggaccgaggactctccagaaagagcaacagtaatggag

SEQ ID NO: 515580 - DNA, 51 bp, Homo sapiens
gaagacctcttcagacagcatcccagggcagtgttgctgcatattgcatgg

SEQ ID NO: 515581 - DNA, 100 bp, Homo sapiens
acgcagcagcactactacgacaagtgccccaagatgttcacctccacgatatttgctgtggttggattcttgggagctggatactcgtttatcatctcag

SEQ ID NO: 515582 - DNA, 51 bp, Homo sapiens
ctcagcctcctgagtagctcggattacagatcattaaaatccgtgcccaga

SEQ ID NO: 515583 - DNA, 99 bp, Homo sapiens
ttgccatcttccccaactaccaccaagtcctctccatctgatcccatgaccacctccagagctaatcaggaagaagaatttggtgttgatgattcttat

SEQ ID NO: 515584 - DNA, 112 bp, Homo sapiens
ggtcgtgctcgcttaggtggcagcacccagcccagtgccaggcatacattgggcgctcgcctcctgacaaggtgatccgggcgggccccgcaggaattttatcccctcaccg

SEQ ID NO: 515585 - DNA, 101 bp, Homo sapiens
ccgggagcggcccttagcgaccccgcccgggccccctcagcgacatctcgaatcagcgatgcacacttggcagacacaatgattggcaaagcagtggaaca

SEQ ID NO: 515586 - DNA, 100 bp, Homo sapiens
agatgtgatgttggagaactacagaaacctggtctccctagggcttcgtgggacacatatgcaacatgcctatgatttttacaagcctgatatgctatct

SEQ ID NO: 515587 - DNA, 50 bp, Homo sapiens
ctcagagcgtcctctttggagaagttggattagcttttcaaaacagaaat

SEQ ID NO: 515588 - DNA, 100 bp, Homo sapiens
ccgtgatgacgtccagggctatgccgccaagaccgtctttgaggcaggtgctccgggatcacaactgtctgcagacgctgctgcagcatctgacttcgca

SEQ ID NO: 515589 - DNA, 75 bp, Homo sapiens
gacatccaatcagagcattcaagggatggtgaaatggatgatagtcgagattaacattgatgggcaggatattag

SEQ ID NO: 515590 - DNA, 83 bp, Homo sapiens
cagtcggtgaccgcgcgactcggcgcccgcccgcggtagttagaaacaaacctgtggcaaggcaggctcctggcaaacggaag

SEQ ID NO: 515591 - DNA, 100 bp, Homo sapiens
ggcgtaaagtggtttttgcgggcaattcttcagttagatagtcctgaatctgctcagtcaatgtatagctttctgaaacaaaatccacaaaatattggtg

SEQ ID NO: 515592 - DNA, 88 bp, Homo sapiens
tatcacatcagctttggaaagtactgaggagaaacttcatgatgctgccagcaaggagctgaagtgggaatcagtacatcgagaatcc

SEQ ID NO: 515593 - DNA, 75 bp, Homo sapiens
agcgggcggagctgtgcgagagcctcctcacttgggaacccaagacagaccaggatgaggagcattgccggaaag

SEQ ID NO: 515594 - DNA, 98 bp, Homo sapiens
cttttgtaacttttgatgatcatgatacagttgataaaattgttggatggagtggttcttgttcattgtaatgcaggcgtttccagggctgctgcaat

SEQ ID NO: 515595 - DNA, 75 bp, Homo sapiens
caaggagctaaagcagcgtgcgttcagccctggggggtgagcccctccagactccgaataggagatcaagagttt

SEQ ID NO: 515596 - DNA, 90 bp, Homo sapiens
gctctttggcggctcggaggagcggctgctgctgctgctgctgctgctggtggcccctttgcagagcagcccgacggccatggaggctga

SEQ ID NO: 515597 - DNA, 50 bp, Homo sapiens
gcgcgcctttgtgcgcgcgccgaggcatgggcaagaaggacgaccccaag

SEQ ID NO: 515598 - DNA, 89 bp, Homo sapiens
ggagagaagctgaagcattgcttcaaagcatggggctaactccagaatcccccattgcttcagaggatgattccgaagaagacggagac

SEQ ID NO: 515599 - DNA, 75 bp, Homo sapiens
aaaagaggcaaatcctgtgtagctggaaatggatcagacaatggctgccaatgctcagaagaataaattcttgat

SEQ ID NO: 515600 - DNA, 124 bp, Homo sapiens
ctcatgtcctgtgaggaaggtcttgaagcccattcaactcacagatccaggaaaaatcaaacgtattagaggaatggccacggatgataccatcggggaccttaagaagctgattgcagcccaa

SEQ ID NO: 515601 - DNA, 74 bp, Homo sapiens
tgccacagatcccatcagaggcaccccagacacagttatgaagacagtatggagtttccagaccatagtagaca

SEQ ID NO: 515602 - DNA, 100 bp, Homo sapiens
cactcctgcatccaccacctgcccagtcctggcccgcacaacttccccctcgggctccactgccagatcgaacaccagggggacaagctggagatggcga

SEQ ID NO: 515603 - DNA, 75 bp, Homo sapiens
gacatatcgttggacccagaattgagcaccagtatgcatgagcgggtgaaccgaacagaaagacagtttcgatca

SEQ ID NO: 515604 - DNA, 98 bp, Homo sapiens
ggagcccaccaagttctgggaaggactttgaacatgtcggggatcgccctcagcagactcgcccaggagaggaaagcatggaggaaagaccacccatt

SEQ ID NO: 515605 - DNA, 78 bp, Homo sapiens
taacaggaatccatacaggaatccatacaggatatgaatgccacaatacgaaggattgaccagttaaccaacatctta

SEQ ID NO: 515606 - DNA, 100 bp, Homo sapiens
tggagaaggaactgttggagatgagacccttccggtcttcttttcagtagccggatcgagctgggagatgtgacaccacacaatattaaacagttgaaaa

SEQ ID NO: 515607 - DNA, 88 bp, Homo sapiens
tgcccaaccccagcagcacctcctctccctaccccctccctgaggaaattaggaacctgttggcagggaacctcaggacctgacccaa

SEQ ID NO: 515608 - DNA, 90 bp, Homo sapiens
gaagcactcgttccgggggtgaagcctcctgcgccggccttgcctcgggaagaaatgcagagtaacgtggaagtggtccacacctaccgc

SEQ ID NO: 515609 - DNA, 101 bp, Homo sapiens
cactgaggatcagattttgaagagagatatgccaccagcatttattaaagctgtaggtaaaacttgcctactgatcagttacacaaccaatgcatttcctg

SEQ ID NO: 515610 - DNA, 76 bp, Homo sapiens
gcgaagctggccaaagcctgcccagacggctcacctgtgcgggatggaacaaaagctcagggtctgagttgtgcac

SEQ ID NO: 515611 - DNA, 83 bp, Homo sapiens
gttaggatcgtctattggatgtgaaaccagagatgcccgccaacctggaatagagaggtgaaatgacaatggatgctctgttg

SEQ ID NO: 515612 - DNA, 90 bp, Homo sapiens
atcgagaggatctggtgtaccaggcgaagctggccgagcaggctgagcgatacgacggcctcacatagacggtcagccattggatcatag

SEQ ID NO: 515613 - DNA, 98 bp, Homo sapiens
accacatgaaactcaaggtccagggagtggagaaccgcatgcacgagtctctcatgctcttcgactccatctgtaacaacaagttcttcatcgatacc

SEQ ID NO: 515614 - DNA, 100 bp, Homo sapiens
gctctcaggcattaacaccatcataataagaccacagcttgccaaagagaagattgaaggatgccatatttgtacatctgtcacaccaggagagcctcag

SEQ ID NO: 515615 - DNA, 100 bp, Homo sapiens
ggggaggcgacgctaagttgctgatcgtggcgtatatttgccttccctccatgatctccaacactatccgataaagtagaagcaactgaggtaccgtgaa

SEQ ID NO: 515616 - DNA, 73 bp, Homo sapiens
gcttcttctggaagaccagccaacagaatccacgccagtacaagatcccagactggttcttgaacagacagaa

SEQ ID NO: 515617 - DNA, 75 bp, Homo sapiens
agattttgcagaacagagatgacatgccagcccagactttcatgtactgctataaccagaatttggtagaaaaag

SEQ ID NO: 515618 - DNA, 75 bp, Homo sapiens
tcgttcagcagtcatgtaactataagcagcttcggaaaggagccaatgaggatccatcatgttacacaaaatgga

SEQ ID NO: 515619 - DNA, 50 bp, Homo sapiens
ggacatcctggaagctgggaaatgcatcagaggctccttgaaatgctaga

SEQ ID NO: 515620 - DNA, 82 bp, Homo sapiens
ctcaggtcctcgggggcggcggccacgccaaggacggacgagctcatctgcgcctttgtttagaacgcttaaaagttctgat

SEQ ID NO: 515621 - DNA, 75 bp, Homo sapiens
gaagactgaaggtgtagactcagcctcactctgtacaaacagccaccgcactgtgttcctgacacgtacagcaac

SEQ ID NO: 515622 - DNA, 100 bp, Homo sapiens
ccgtgtgcagtataataacctggaacagcggagctccctgggtcctcagcagtgaggctggcctccctgcgtgacctgcccgcccagctcctggagctgt

SEQ ID NO: 515623 - DNA, 74 bp, Homo sapiens
ttaatcctcaatttaagcctgatctaacccctagaaacaggtgaagttcatccacgaccagacctccccaaacc

SEQ ID NO: 515624 - DNA, 139 bp, Homo sapiens
ccgccggctaccatgtccgcccaggcgcagatgcgggccctgctggaccagctcatgggcacggctcgggacgagacacctatggctgccgatgaaggctcagcagagaaacaggcaggagaggcccacatggctgcgg

SEQ ID NO: 515625 - DNA, 100 bp, Homo sapiens
cagagccccttacccgccgccgcggccaggccccccaacatggactgtctctgtatagtgacaaccaaggaacttacaatgtctcagaaaaatggtggga

SEQ ID NO: 515626 - DNA, 98 bp, Homo sapiens
gcatcagcaatgtggcgcacgcaattaccagctctggctgggtcgccacaacttgtttgacgacgaaaacacagcccagtttgttcatgtcagtgaga

SEQ ID NO: 515627 - DNA, 80 bp, Homo sapiens
aacccaggcccacggaggaagagccgggcagtccctggagcgggccaggtcaaaatgcagatcttcgtgaaaacccttac

SEQ ID NO: 515628 - DNA, 82 bp, Homo sapiens
cgagcgcccctccgagctggggttggacgctgccagtttgcacagcagcaggtgacttaagagattaaaattaatttggttg

SEQ ID NO: 515629 - DNA, 87 bp, Homo sapiens
cgcgcccgccgacccgcgccctgctccctctcagcacctgggcggacgggagctctcttttgggcgtggctccacggcacctgtagg

SEQ ID NO: 515630 - DNA, 50 bp, Homo sapiens
ttgagttcacactgatggtggtcgacgtccctggcaactgttcagaaaac

SEQ ID NO: 515631 - DNA, 98 bp, Homo sapiens
gcagcggcggcggcagctgtagctgcagcagcaggaactccattctccaactttaaaaatatctacatgtgccccaagtactctacatataacccaaa

SEQ ID NO: 515632 - DNA, 83 bp, Homo sapiens
tccacccaccgccgccgcctcccaggtgatgtgtccaatctagatcccaacttctcatttgaaggcaccaaactggatgtggg

SEQ ID NO: 515633 - DNA, 82 bp, Homo sapiens
agagaaggaacagttggctcaggctgtggctcgcatcaagaagatttatgaggagaaggacggggaggtttactgcatcgac

SEQ ID NO: 515634 - DNA, 49 bp, Homo sapiens
caccttgatccagcggacttacgggtccttgaattcctttgtagtcctg

SEQ ID NO: 515635 - DNA, 88 bp, Homo sapiens
atgaagagaaggtcatccagaggcttgtggagttgatccacccgagccaggatgaagatgggccagcagtttgcccagcagatgcagc

SEQ ID NO: 515636 - DNA, 75 bp, Homo sapiens
tttaaaacagatctgcgcttccagagcgcagctatcggtgctttgcagaggaggaacccgttttcactagacaag

SEQ ID NO: 515637 - DNA, 98 bp, Homo sapiens
caaatcaaagaaagccgactacagatacacatatgatgagatacagtttatgtaacttgatggaagaaaatggaattactccaaaaagacaagtgctc

SEQ ID NO: 515638 - DNA, 82 bp, Homo sapiens
ccatcgtgcagatgctgctggtgctgcaggttgacctgacagttcaagaaaaggagaaatatcttaatgtgtctcgctggtt

SEQ ID NO: 515639 - DNA, 74 bp, Homo sapiens
ctcatacagaaatctattctaagagatgccatccaccagcaatggtgaaagcagcaagcaggaggccatgcaga

SEQ ID NO: 515640 - DNA, 100 bp, Homo sapiens
ttctggcagtagcaagagcacttggttttatgaatgaagctatggctacagattccccaagaagacccagtcgttgtactggtggagttgtggttcgccc

SEQ ID NO: 515641 - DNA, 120 bp, Homo sapiens
ctcctacacagccaaccttgctgccttcctcacagtgtccaggatggacaaccccataagacaatatgaatgatgattcaagtaacttgaaagaaggcagtaaagacaatcccgaacctc

SEQ ID NO: 515642 - DNA, 74 bp, Homo sapiens
atcacaaaggagtttattttaatgggcggaaccgtggacacggtgtctgacttccagcaactgctggcctgtgc

SEQ ID NO: 515643 - DNA, 101 bp, Homo sapiens
ccagtggatgtaaaccccttccaggtactaggttttgacaagcttgcatcatgcgtgagtataagctagtcgttcttggctcaggaggcgttggaaagtct

SEQ ID NO: 515644 - DNA, 120 bp, Homo sapiens
cgactggtggccaatgcagatactaattaagtgccctaatcaaattgtgagacaggtccaagcagctcagtctgaggctaaggttgtatctcagtatcatgagctggtggtccaagctcg

SEQ ID NO: 515645 - DNA, 100 bp, Homo sapiens
cttcagcggtggcaccgggatcggttgccttgagcctgtactatactggcaattgctggagaagattttgcaattgttgcttctgatactcgattgagtg

SEQ ID NO: 515646 - DNA, 74 bp, Homo sapiens
caagaacgcgctcctccgcctgctgcccgggctggactgtgttgatcaggctggttgaactcctgggctcaagc

SEQ ID NO: 515647 - DNA, 100 bp, Homo sapiens
accaagtgattcattccaaggacaggcagcccagtctggtgtttggaatgacgacagtatgaaactccccaacttttaaatcatttgaagaaaaggtcga

SEQ ID NO: 515648 - DNA, 126 bp, Homo sapiens
tggggcttcccaagccaaagaagaggaaagagcccgtgaagatcgcggcgccggagttgcataagggagatcccagaagaatcagtgcggtttctgtggcagagcgagttgcatttgaaagaggag

SEQ ID NO: 515649 - DNA, 87 bp, Homo sapiens
aggcctgacagctctgcggctcgggccctgagatataatccacagagttcatttgcggggttcattccaagtgacacgggcagcatg

SEQ ID NO: 515650 - DNA, 98 bp, Homo sapiens
gtaggcggatcggactttgagaaagtgcaggagcaactgggaaatgatgtgccaggcttcccgtatccagcagccaccgccgcggccgcctaccgagg

SEQ ID NO: 515651 - DNA, 100 bp, Homo sapiens
cagtcatgagtcgcttcaagtttatcgagacaaataccgatactttgcttgtttgatgagagcccggtttgaagaacataagaatgaaaaggatatggcg

SEQ ID NO: 515652 - DNA, 100 bp, Homo sapiens
cttgcccactcccatggtcctgcagagaaacacgaccctcctctgagtagcatcccttgtctgcattataagaaaatgaaggacaacgaggaacgggagc

SEQ ID NO: 515653 - DNA, 74 bp, Homo sapiens
gagcattcaagccctgttcaagattgccagatatcccaggaaagtgacacatcaccttcactttgggatatgga

SEQ ID NO: 515654 - DNA, 76 bp, Homo sapiens
aaagaaaaatgaacccaaacatagacttgcaagaggaccgtttggagggagccattcacctacaggagcaggacat

SEQ ID NO: 515655 - DNA, 95 bp, Homo sapiens
acggattcatttagagctgcggaacaggacgccctctgatgtgaaaggtgtagcagtcactcggcctacacccacagcatcgaccttgtgaaccc

SEQ ID NO: 515656 - DNA, 80 bp, Homo sapiens
agaattttccacctcctgacacaacaccactcagtacaggtttgcagattccgccagcagcacagcaagctctacagatg

SEQ ID NO: 515657 - DNA, 100 bp, Homo sapiens
aatggctgtagaggaacttcagtctataataaagagatgtctctgtgacttcctggagactcacttcctagatgaggaagtgaagcttatcaagaagatg

SEQ ID NO: 515658 - DNA, 90 bp, Homo sapiens
gtgaaatggaaagtgatatcattatgcccatcatatattctcagcgacatgtcctcacctacatggaggatgcagtgtgccagctgctag

SEQ ID NO: 515659 - DNA, 98 bp, Homo sapiens
tcggggccagcgcatggggctgctgagaccgctccggacgtgcgaagcgttcgcggtgcgcgggaatgcatatcagtccacgtgggccaagcgggagt

SEQ ID NO: 515660 - DNA, 75 bp, Homo sapiens
tgcagcttatgctccaaaacgctcaaatgtcatcacttatcatgtttcaggcatatggagacaaacagggaccac

SEQ ID NO: 515661 - DNA, 74 bp, Homo sapiens
gaagagctatggtgaaacaccactgaagcattgccaaggctggagcattggatttgctaaaggagcttaagaat

SEQ ID NO: 515662 - DNA, 100 bp, Homo sapiens
caaaaggaaggtctacatgtactactggccagactttatattcagagcaccaatcaaattaagcaagcctggggaacttcgtgaggaatatgaaagcttg

SEQ ID NO: 515663 - DNA, 82 bp, Homo sapiens
gcgtcggcaagttctgtagagaaactcgggcaacctttggatgaccgagtgggagacagcagcaccagcggtggcagagacc

SEQ ID NO: 515664 - DNA, 73 bp, Homo sapiens
gagaacgcctttaagcgccggcgatgtggcgtctgtgagggggcattgtgacagctgaggacctgaacaacta

SEQ ID NO: 515665 - DNA, 51 bp, Homo sapiens
aaagtggacaaagagaggagtcaggctttaaaggagatagatgaagttggg

SEQ ID NO: 515666 - DNA, 80 bp, Homo sapiens
cgcttttgctcctcctgaagtgtctttggtccaacgttgttccagagttttgccgaattgacaagcccctgtgtcacagt

SEQ ID NO: 515667 - DNA, 100 bp, Homo sapiens
gctgatataatggccaagaggaatcagaaacctgaagttagaaaggctcaacgagaacaagctatcagtagccggatcgagctgggagatgtgacaccac

SEQ ID NO: 515668 - DNA, 101 bp, Homo sapiens
ctgagagagatgcttaaaaatcaccagttactttaatgagtggctgcagtccgagaagggatgtcctggattgttcctgtgccgctgctgtccctcctcac

SEQ ID NO: 515669 - DNA, 76 bp, Homo sapiens
tgagattccaggaggaagtactggcgaagtgctccatgatattaacctggctgcagagccaaaagtgaaccgagga

SEQ ID NO: 515670 - DNA, 75 bp, Homo sapiens
aaggtgaaggacaccccggggctgggcaagagcaaatcatggaggaagataaaaaacatggtgcactggtctccc

SEQ ID NO: 515671 - DNA, 100 bp, Homo sapiens
ccgctcctgctggactactttaataagtcctcctccatcaaagaaaatgaagttatttggatttaaagaagatccatttgtatttattcctgaagatgac

SEQ ID NO: 515672 - DNA, 119 bp, Homo sapiens
tgggcgggagccccggcgggccgcgcctggtgatcggctccttaccagctcacctctcgccgcacatgtttggagatacagatccacgggttttagaaaaacaagaattacagcagcca

SEQ ID NO: 515673 - DNA, 75 bp, Homo sapiens
aaaagaaggagggtcctctcagtgattaagacgtttgatgcaaatgatttgtatcaggggcagaattttaacaag

SEQ ID NO: 515674 - DNA, 74 bp, Homo sapiens
attccaagtaactcttatttgagaaaagaaaccttgtttattccctgtgaaaatgagaagatttctaaacagct

SEQ ID NO: 515675 - DNA, 71 bp, Homo sapiens
ccgcttcatctataaccgagtggtcttggagcatgaggaggaaatcagtacgctgaggggccaagtgggag

SEQ ID NO: 515676 - DNA, 100 bp, Homo sapiens
ccctgggccgtcgtctccggacggggccctgacacggccaccctactgcctggaggccggggagccgacgcctgatacaaactggactctcaggacaaaa

SEQ ID NO: 515677 - DNA, 75 bp, Homo sapiens
ccggcgccgctctccgagctcgatccgctgctcgcacgggagccagctgggtggatattgtacctgtggatgcat

SEQ ID NO: 515678 - DNA, 75 bp, Homo sapiens
aagtggacaagctgaacgctaatgaattcccagttcctgagcagttcaagaccctatggaacgggcagaagttgg

SEQ ID NO: 515679 - DNA, 83 bp, Homo sapiens
agatgtctgacatggaggatgatttcatgtgcgatgatgaggaggactacgacctggaatatgcactttctggttggaatttg

SEQ ID NO: 515680 - DNA, 74 bp, Homo sapiens
cagaatcctgaccttgctgcacagacactgtcacatgaacccaaagtccttcaagagggtctccttcagttgga

SEQ ID NO: 515681 - DNA, 83 bp, Homo sapiens
ccagctccgaaatcaccaccaaggcctctccatattgctgtggtgcagggtaacctgccagctgtgcaccggctggtcaacct

SEQ ID NO: 515682 - DNA, 74 bp, Homo sapiens
agctctgcacgcacctcatggagcgtgagtgcatctccatccacgttggccaggctggtgtccagattggcaat

SEQ ID NO: 515683 - DNA, 50 bp, Homo sapiens
gctgctgccgccccttgggctaaaagcggcaacctttggcactgcatcca

SEQ ID NO: 515684 - DNA, 90 bp, Homo sapiens
gccggggaggcagcgcgggatcccagcctcaggcgtgcgcggacggtgtgcgggtgggtcatgataactgggtacgtggagttctgttcc

SEQ ID NO: 515685 - DNA, 83 bp, Homo sapiens
gcccaggcccagggaccaggcggaggcgtcgcgggagcctttggggcaccacagagatgcggatggaacagattaaaagggcc

SEQ ID NO: 515686 - DNA, 101 bp, Homo sapiens
tgagttaacacctctgccgctgctaaaaggcaggatgacgcaaaacacggtgattgtgaatggagttgctatggcctctaggccatcccagcccacccacg

SEQ ID NO: 515687 - DNA, 83 bp, Homo sapiens
cgcggtggagcgggacacgaacgtgtgcctccggagccagcgtggtggccatagacaacaagatcgaacaggccatggtgagt

SEQ ID NO: 515688 - DNA, 97 bp, Homo sapiens
gtatgtggaaagagctgaagtgctcaaatctgaagatggtgtggttccaactgctcagcgtgctgccatcgttgtaggagtagagctaccagtctat

SEQ ID NO: 515689 - DNA, 127 bp, Homo sapiens
tttcttttctgttcagcttgcacgtggactgaagctgaccttcgattcatccttctcacctaacactgggtttattcttcagtccaaggaagcaattcacagtcagctgttagagaagcagaaaata

SEQ ID NO: 515690 - DNA, 75 bp, Homo sapiens
ccgcccctggtgcacacaccctcgtattctcctgcccttccccagagatgctgcccccacccccttaggcccgag

SEQ ID NO: 515691 - DNA, 98 bp, Homo sapiens
gcacagtgacggcttcagaggatcattcctggacccccgagggcctctgagtttgagacgctggctgagatcaaatgataagaattccaatttttgtt

SEQ ID NO: 515692 - DNA, 84 bp, Homo sapiens
agtggatggcgtggagatatggcgcaactgcggcgcacaatgcagatcttcgtgaagactctgactggtaagaccatcaccctc

SEQ ID NO: 515693 - DNA, 74 bp, Homo sapiens
caaacatcgatggcctactggggataacattcatgcagaacatcagaatgagatgctggaggaaggacatgagt

SEQ ID NO: 515694 - DNA, 50 bp, Homo sapiens
cccaccacagcctgcacactggagtgacctcacagtgactcaagctacca

SEQ ID NO: 515695 - DNA, 100 bp, Homo sapiens
ttttctcaggtcctgcagctgggagacggcacaggacactaaaccaggatgcagactcatctgagcgtatcattgctcccatgcgctggggcttggtccc

SEQ ID NO: 515696 - DNA, 101 bp, Homo sapiens
ctggcagatgccggctatggcgaacaggaactggatgccaactctgcccttatggaattggacaaagtcactgtatatatgccttatttcctgggtccatg

SEQ ID NO: 515697 - DNA, 100 bp, Homo sapiens
gcagctcggcaaaatgtagaccactcacaggaagcagagattccccagtgcgctggctgcaaccagcacatcctggacaagttcatcctgaaggtcctgg

SEQ ID NO: 515698 - DNA, 83 bp, Homo sapiens
cgggctctgaacacagcatcaatggcaggaggtttcctgttgagctgcttttctaacccaaactgtatgtcttgatgacacta

SEQ ID NO: 515699 - DNA, 90 bp, Homo sapiens
tcgagcagctgaacgagtgcaagcagctgtccgagtcccaggtcaagagcctctgcgagaagacccaacatgagtgaagtttcctgcaag

SEQ ID NO: 515700 - DNA, 101 bp, Homo sapiens
ttcgtactgggacgttggggagggggctgtgccgggcggagagaactcagcgaggattctgaggagtggagtcaacatatcaatggagcaagtcacagtcg

SEQ ID NO: 515701 - DNA, 90 bp, Homo sapiens
gccgctcatcgtgtggctgctggtgaaaagcttctccgagaggtcggcaaccacattgatgtgctcactggcaagtgggtggcccaggac

SEQ ID NO: 515702 - DNA, 105 bp, Homo sapiens
agcgagctgagtggttgtgtggtcgcgtctcggaaaccggtagcgcttgcagcatggcatatactagtgtctcaaaggcttcacttggccttgcagatcacagag

SEQ ID NO: 515703 - DNA, 75 bp, Homo sapiens
aaggttttattacaagctcacaatcaccattacaagcatttaggcatctaataggattcaggaatcaaagaatca

SEQ ID NO: 515704 - DNA, 100 bp, Homo sapiens
ctctttagcaatgacaggttgaaaggtgatggtggaggcctaccggcgcgacgccacctccaaagaccagctcatcagtgagctgaaagccaccaggaag

SEQ ID NO: 515705 - DNA, 88 bp, Homo sapiens
ggacagcgggctggagcctgacgagctggcggaactgttaaaaccgtataataaccacgtgaataccttgctaggatgccctgcagtc

SEQ ID NO: 515706 - DNA, 50 bp, Homo sapiens
gagggcaccccaaccctgtcggtgctatacttggtagatcagaaactcag

SEQ ID NO: 515707 - DNA, 82 bp, Homo sapiens
ctcacctgcatggacttccactatgagctgctgatgcaaggaatcccctgggctcccgtccactccactgctgaccagccca

SEQ ID NO: 515708 - DNA, 75 bp, Homo sapiens
cttgcccaaaccacgatgggaatagtcctgtgtatggaaactcacatgagtcagctcagtctagaagggtagtaa

SEQ ID NO: 515709 - DNA, 100 bp, Homo sapiens
caggggccagcaaggccctgaatgtgactgtggacgtgcagatgggcttccccaaggatttattgacattgctacttgagtgtgaacagttacctggaaa

SEQ ID NO: 515710 - DNA, 83 bp, Homo sapiens
aacaagaggacccaggagaaattcgccctcaaaggataaagtaattcctaataaagtggggacatattgtatccagtttggtt

SEQ ID NO: 515711 - DNA, 98 bp, Homo sapiens
ctcgcggccctcagggcacagcccaaggctgtcagcctcccggcccagagcagcccgacggccatggaggctgaagagacgatggaatgccttcagga

SEQ ID NO: 515712 - DNA, 76 bp, Homo sapiens
ggacctcctggtgcgcatcctgctgctggctgcccttgtctcctttgatggccaggccatgttatgggatctcaac

SEQ ID NO: 515713 - DNA, 85 bp, Homo sapiens
ctatttgcttctcccacaagttctgaagagcaaaagcacagaaatggactatcaaatgattcaagtcaatctgaaagtcccagcc

SEQ ID NO: 515714 - DNA, 75 bp, Homo sapiens
tctctctgtgtggctgtaacttacgtgtactttaccaacgagctgaagcaggttttgcacactagggaccaagaa

SEQ ID NO: 515715 - DNA, 98 bp, Homo sapiens
tcactcatcctgttagagccctgtgctgttctgtctctctataaggctttatgtacagaccgagatcttcaggaaataggaattcctttaggaccaag

SEQ ID NO: 515716 - DNA, 100 bp, Homo sapiens
ctgaagttgcctcttctggtgtcaaagcttttggacattcctgggctgggagtgtccactcgccttccaccagcatggcaacgtcttcacagtaccgcca

SEQ ID NO: 515717 - DNA, 95 bp, Homo sapiens
ccccgatggtgtcatcgaggtaagaaacggttgtggatcttgaagctttggaaaggatgccggctccaggagcagcagtggaggtcgggaacgcc

SEQ ID NO: 515718 - DNA, 88 bp, Homo sapiens
ttaaaagagaagagaggatagaagaacaacagcatagaaacagagaagagagtgacaggaagtttccgttactatggcaatgacggca

SEQ ID NO: 515719 - DNA, 75 bp, Homo sapiens
ggcgagggcgcgcggctggtgtccgccccgcccgaaaggccatccggctgtccttagagcaagccctgcctcctg

SEQ ID NO: 515720 - DNA, 82 bp, Homo sapiens
gacgggttggggatggcgtgcagcgcaaccacgagacggccttccaaggaaaggcggtctggggagagagcggcgagctggt

SEQ ID NO: 515721 - DNA, 100 bp, Homo sapiens
gagaaatccaaggacttcaagaaccacgtgatcaagtaccttgagacactcctttactcacagcagcaggtccactggtgtgtcctccccttccgagtgc

SEQ ID NO: 515722 - DNA, 82 bp, Homo sapiens
gacgtcgtgatccagaagtccagagctgaggactgcctgtttgcaggggcaacaccctccactaaagagtcaagccagccgg

SEQ ID NO: 515723 - DNA, 83 bp, Homo sapiens
ttgacacttttgggatccgatggcctgaggagcttgaatgtgacaggaaactggagcacccatcctaactgatgatgttagcc

SEQ ID NO: 515724 - DNA, 51 bp, Homo sapiens
agtggtgtgtggcacaaaatgcaacacgccccaccagcagcagtaggtatg

SEQ ID NO: 515725 - DNA, 131 bp, Homo sapiens
ttgttggggagaagaggattggaggtgtcagtgttaaaggaacctctacaacgaaggtgaagccacggaagataagaagaaacattcatggtgtctcaagagaaaaaatccaccgaatgaaagaacggtat

SEQ ID NO: 515726 - DNA, 75 bp, Homo sapiens
ctccgggccagcatccgagagcccggactggagtgatggaatggggagaagatattaaagcagtttcaaaagatg

SEQ ID NO: 515727 - DNA, 83 bp, Homo sapiens
gcttggaagtgtgagtgcgcgaagatgcgaaaggtggttttgatcaccggggctagcaggacataagcagctctatgaccaat

SEQ ID NO: 515728 - DNA, 100 bp, Homo sapiens
agactcatggaggccagattttctccaattaaccagatcttgccctggtgcagacaagacttagattttttatcaagcagaaatgcatcgaacaacgaga

SEQ ID NO: 515729 - DNA, 100 bp, Homo sapiens
tgccccatcacgacagacaaagcgtccctcaaggcccccgcgtggttcagacagacgccgcagccaggatggttgaggttgaaaggattgttgacaaaag

SEQ ID NO: 515730 - DNA, 100 bp, Homo sapiens
tcatcagtgaagatgccgttcttgagcagtctgtcatcacgctgttgaaggaggatgttcccatcttggtcagtcctatgcggatagagatgtctggaag

SEQ ID NO: 515731 - DNA, 100 bp, Homo sapiens
caagttaaacatacagtcgcctctgacaagccaggctgttcggctcttgaatcccagcgatgaaaccaggaactcactttcccgggatgccgagtctcca

SEQ ID NO: 515732 - DNA, 82 bp, Homo sapiens
aaacatgctagaattacctggaacttcatcatcatctacttcacaggaattgccattttattgactcggagacaaaaagagg

SEQ ID NO: 515733 - DNA, 109 bp, Homo sapiens
aaatttttggatgatgatggatccatttctcctattgaggagtcaaccaaaccagtccagctacgggggcccagccagccagcagctgagtgggggttacggaggcggc

SEQ ID NO: 515734 - DNA, 100 bp, Homo sapiens
aaggataagaaagaaaagagagctcaggcccaagtggagtttgcagacataggctgtggctatggtggcctgttaggaggagctgacaagcacaagtgtg

SEQ ID NO: 515735 - DNA, 98 bp, Homo sapiens
gagagcggacccagtggcctcggcgattatggacccggccgaggcggtgctgcaagagaaggcactcaagtttatggagatcatgaatcagacagata

SEQ ID NO: 515736 - DNA, 75 bp, Homo sapiens
acagcggcatctttggcttcagcgtgtcccgcgacgttgtggacgtttaccagcgggagttcctggcgctgcgcg

SEQ ID NO: 515737 - DNA, 89 bp, Homo sapiens
attgaaaggaaactggaagaaaaaagaaaagaaactgacaaaaacatttctgagatggagtcgggtggtacagttttgagtaccaactg

SEQ ID NO: 515738 - DNA, 75 bp, Homo sapiens
cgctgcactaacgcaggatccggctgccgaaggtcctcgccagttggttgaatctggcgatgtggaacccatgga

SEQ ID NO: 515739 - DNA, 82 bp, Homo sapiens
ggccccgcaggtcttcacccaggccctggagtgcatgcgcagaattcagaaggagctggcggacatcactttagaccctcca

SEQ ID NO: 515740 - DNA, 75 bp, Homo sapiens
tgacgatgacgtctaccgcagcctggaggagctggccgaatctacgcagaccccaccaagaggctggagctgtac

SEQ ID NO: 515741 - DNA, 75 bp, Homo sapiens
ggaacattgatgcgtgtgaaatgttggcagggccatccaggagagcctcctcaccagcacagaaggcctgtgccc

SEQ ID NO: 515742 - DNA, 83 bp, Homo sapiens
atcgcagttggaagcccatggggcagtcgtgagatggagaataaagaaactctcaaagggttgcacaagatggatgatcgtcc

SEQ ID NO: 515743 - DNA, 100 bp, Homo sapiens
ggccgtccagcagatggcggatgccctgcagtacctgcagaaggtctctggagacatcttcagcaggaatcaacgctgaatgtggacttggatttcaagc

SEQ ID NO: 515744 - DNA, 90 bp, Homo sapiens
acaccggagacttttggggggaaactaggtcgatggtcggcggcgcccggatgggcagctgagggctgttgataatcaggtgtatgtggc

SEQ ID NO: 515745 - DNA, 76 bp, Homo sapiens
gatcacgacctccgcagggacaagaactgcgccaagagcctctctgaactcagcctcctcccaagctccctgtggg

SEQ ID NO: 515746 - DNA, 50 bp, Homo sapiens
agctgcagccgcacctggccaaggatgctgtacccctcaaggatttaaac

SEQ ID NO: 515747 - DNA, 90 bp, Homo sapiens
cttcaattcaccttttagagcacagtgttgaacttctgaaggaggaccacatggtgacaatgcatgatgtgcttgatgctcagtggctgt

SEQ ID NO: 515748 - DNA, 102 bp, Homo sapiens
gcaaagtccaggaacagatattcaatctttacactaagcttttggagcaagaaagagtttcaggtatcttctggttgtcacagagtttcattgagtccagct

SEQ ID NO: 515749 - DNA, 88 bp, Homo sapiens
atacacctctgattttaatcagttctgcgtttgaaaggaaacccgtaccttctccaggcaaattccgttcccctgcagcaccatctcc

SEQ ID NO: 515750 - DNA, 97 bp, Homo sapiens
agctcttcgtggggcagcacaaaggtctttaactgctcatagtagtagagaaaaggtcccagtagggatggcacaatcagcgaggacaccatccgag

SEQ ID NO: 515751 - DNA, 98 bp, Homo sapiens
gtgccccggcgccacctggagagaggccgcgtcctgggcagagggaatagcatttcaaggttcagtggaggagaaccccaagagcaccaaaatggaaa

SEQ ID NO: 515752 - DNA, 85 bp, Homo sapiens
gcccaccgccggcggtgatgcggctgtgaagccctagtcggggttcaactagatatagcttcacaatctctggatcaagaaattt

SEQ ID NO: 515753 - DNA, 139 bp, Homo sapiens
aggagagttattccagtttaggaggaagatgcaagcggtttgggaccttgaacaaggcaaatatggttttgaacatggtccaagacaattcctgggaaagttcagttcttctcaagtgagggttctgacacatctgtac

SEQ ID NO: 515754 - DNA, 98 bp, Homo sapiens
gtaggctgcgttgaggatctttgctcttccatccgcctttgatcgtcttcctcttcagccatccagatatggttatcgaggaaaggactgtagagcta

SEQ ID NO: 515755 - DNA, 98 bp, Homo sapiens
ggccatctacctggacatcgatggacgcattcagaagctcagcaaaacccagcagctcagattcctgccaggcagcgggagattgaaatgaaccgaca

SEQ ID NO: 515756 - DNA, 90 bp, Homo sapiens
cgcttgagttggtcgggggcagcggcaggagaacgcccatataaatgtgaactttgtccttactcaagttctcagaagactcatctaact

SEQ ID NO: 515757 - DNA, 100 bp, Homo sapiens
gaaagaagcaccgaaggaagaaaagcactagcaacttcaaagccgacggcctgtccggcactgctgaagggtactggaagatgaaagagactatacaagg

SEQ ID NO: 515758 - DNA, 82 bp, Homo sapiens
atcccaggctgccgcggctcctgtgtgctttgaagaggttgacggatatattcagacgttacgacacggatcaggacggctg

SEQ ID NO: 515759 - DNA, 74 bp, Homo sapiens
gagctccagcagccttgttagggcgtggcctgaggcttggataagtggggtatccgttacagcactgatgtgag

SEQ ID NO: 515760 - DNA, 88 bp, Homo sapiens
ctactacatcccgcagtacaagaactggagagatgtcatttgtcagagtgaaccgctgtggtccccgagttggtgtaagaaagacacc

SEQ ID NO: 515761 - DNA, 75 bp, Homo sapiens
ccttagctgtgctcgcgctactctctctttctggcctggaggctatccagctgcctgatttgagatggggtccca

SEQ ID NO: 515762 - DNA, 129 bp, Homo sapiens
ctgaggatagtttagaaggatgcttggattgtctgcttcaagccctggctcaaaatagtgctggagaatctggtaaaagcaccattgtgaagcagatgaggatcctgcatgttaatgggtttaatggag

SEQ ID NO: 515763 - DNA, 100 bp, Homo sapiens
tcagccctgctggagaccactgagagcagcaagagactacaggaagaaaacctggtcatcaccccccggctctttgagtgttccaacaagactgggcgct

SEQ ID NO: 515764 - DNA, 83 bp, Homo sapiens
aagactttaacatgggctcttcctctagcagccagtatactttctgtcagccagaaactgcacacagccccaggaccaccctt

SEQ ID NO: 515765 - DNA, 84 bp, Homo sapiens
aagcagccgatccagcctgcggagcctgtggggcaggggagtaggttgcatctttgttgaaatgatccaaggagttgctgcttt

SEQ ID NO: 515766 - DNA, 100 bp, Homo sapiens
gggggattgtgggagtctccgcgtcccgctcgctgggagagaggatccaaggattctgtagctacaatgttgtcaagactttttcgaatgcatggcctct

SEQ ID NO: 515767 - DNA, 82 bp, Homo sapiens
ggacagctcgcggcccccgagagctctagccgtcgaggagctgcctggggacgagtctctggtaagaagagtgaaagcaaag

SEQ ID NO: 515768 - DNA, 101 bp, Homo sapiens
tcaaaaggagcggggtcgacggtccccactttcccctgagcctcagcacctgcttgtttggaaggttcgagatgtgaggatgatttctgacagaaattcaa

SEQ ID NO: 515769 - DNA, 82 bp, Homo sapiens
ttctcgtagtcctgggagcacagcagaagtgaccaagaatcgccttcagccctgtctggtgcatccttggcagaaagtgagg

SEQ ID NO: 515770 - DNA, 76 bp, Homo sapiens
agtcgtaaaaacaggtcaagtggttcagcttgttggtttagatgaggagagttcagagtttatttgcagaaacacc

SEQ ID NO: 515771 - DNA, 100 bp, Homo sapiens
cgtgagttgaggaggctcagcggaaagcgacaggaaagtttcccaggcaaggcttgcagcagacccagcagcagcagcagacggccgccttggtgcggca

SEQ ID NO: 515772 - DNA, 82 bp, Homo sapiens
agttaatgctgaagcttcattaaggaggcatttctggattaaaagtggtgggggagtccctttctccagcctttcacctaca

SEQ ID NO: 515773 - DNA, 106 bp, Homo sapiens
gttgaacagtcctgtatcaaaactgaagatggtttgaaacagcttcacaaggagtccaaaactacttacctggaagaccttccaccaccccctgagtatgaattgg

SEQ ID NO: 515774 - DNA, 99 bp, Homo sapiens
gccgctccgagtggaggcgactgggggctgaagagcgcgccgccctctcgtcccactttccagatttgatgaggcgccaagaagaacttcggaggatgg

SEQ ID NO: 515775 - DNA, 80 bp, Homo sapiens
catggagatggagcccggactcctgggggatgcagccatgtttgaccgtgagaacaaggccggcgtgaacttcagcgagt

SEQ ID NO: 515776 - DNA, 80 bp, Homo sapiens
gttcccatggttgccggctcccctctcaggacaacccagatgtgcaacaaagtgcgatgcttccccgggcgctgcctgga

SEQ ID NO: 515777 - DNA, 74 bp, Homo sapiens
ggctgcggtgtctgctgctattctccgagcttcgcaatgaacctcagtgcctacaacacccggctcttcaaaga

SEQ ID NO: 515778 - DNA, 95 bp, Homo sapiens
gtctccagcctcaatgaggtgaagatttacagcctcagctgcggcaagtcccttcctgaggtgctgggagaccgtgaagtgcaaagcagatggag

SEQ ID NO: 515779 - DNA, 75 bp, Homo sapiens
cgagaagcctgaaaagtcgcagcgagctggagccgccggagcagatataatttctacagtagaatttaatcattc

SEQ ID NO: 515780 - DNA, 100 bp, Homo sapiens
gcttgtcctggctcttgccctcatcctggttctggaatcctcagttcaagggaaatcctcattgacgattcaatttgttgaaggccaatttgtggactcc

SEQ ID NO: 515781 - DNA, 75 bp, Homo sapiens
gaagcaacatgagatggtggatgaacccacaggatgactcactggttgtgtggaaggaagtcgatttgacccggc

SEQ ID NO: 515782 - DNA, 90 bp, Homo sapiens
gaaaggaaactggaagaaaaaagaaaagaaactgacaaaaacatttctgaggttcacgcaaagaatctgctccacaagttttgcttccag

SEQ ID NO: 515783 - DNA, 80 bp, Homo sapiens
tagcagattctaatcaaaatatgcagtctcttttaccagcagacagtcggcccaatatgtcaagacctctgatcactaga

SEQ ID NO: 515784 - DNA, 80 bp, Homo sapiens
aaccggagcatggaggcgcacaacatcctcagatgatatcatcaagttgaatcgaaaggaagggaagaagcagaattttc

SEQ ID NO: 515785 - DNA, 97 bp, Homo sapiens
gctccccgaacctacggacaagacctccaccacgcagagaatccagcctggctgtacaagaagcatgatgccagcatctgcttctggtgacaacctc

SEQ ID NO: 515786 - DNA, 98 bp, Homo sapiens
gcagcttcactcgcagctctacccaacctggtcagcccgggacaactatgggatcttctctggatcaagcaatggtggtgaaaaatgtttcgcaaggg

SEQ ID NO: 515787 - DNA, 90 bp, Homo sapiens
cagtattctccatccagccacatcaacctcctcacccaacagtgcatactccttccacgttactgcagacggtcagatgcagcctgtccc

SEQ ID NO: 515788 - DNA, 75 bp, Homo sapiens
tgaccatatctgttttgaggattcattatgaacaaagaagtctcccaggaacttagtgatttggcccgtgaccct

SEQ ID NO: 515789 - DNA, 49 bp, Homo sapiens
aagataaactccttttcgccacagaaagacccttcccgaaggccccgcg

SEQ ID NO: 515790 - DNA, 101 bp, Homo sapiens
ggcggcgccgcggggaccagcgcggacggcggcgacggaggagagcagctcctcactgtcaagcacgagctgcggactgacggagtttcgctcttgttgct

SEQ ID NO: 515791 - DNA, 102 bp, Homo sapiens
cagaactgaaacaactggaaactgttttggatgatcttgaccccgagtattctgaagtctcaggaaactggaccatttaaatgtgcatggcccatgagaaag

SEQ ID NO: 515792 - DNA, 90 bp, Homo sapiens
agaagaagatggagaagaaatagttacctatgatcgagtccaacctataccttctcagggaggcaaactagaaatagctggcactgtggt

SEQ ID NO: 515793 - DNA, 74 bp, Homo sapiens
cggagaccccgcgccgacggctgctcaaacatcagggattccagacagcattggaaaagacatagaaaaggctt

SEQ ID NO: 515794 - DNA, 75 bp, Homo sapiens
gtccgtactccaccccgctccggactccgctttggaatggctcaaaccactttttccaagagataacttcaccaa

SEQ ID NO: 515795 - DNA, 82 bp, Homo sapiens
agcagtgacacggacgaggaggaggaacagaaacacgcccccaccaggtaactactccagacccccagcgtatagtggggtg

SEQ ID NO: 515796 - DNA, 82 bp, Homo sapiens
caccagttcgcccgtccccctgccccgttcacaatgaaaattgcctaagaattatgacccaaaagttaccccagatccagaa

SEQ ID NO: 515797 - DNA, 100 bp, Homo sapiens
gtagctcacaaggacattgctaactgagcatctctcagggattcttaaaataaaataagtcactgtgaatacacaaaggaaatgaaaacatatacagagt

SEQ ID NO: 515798 - DNA, 83 bp, Homo sapiens
ccggcggcggcgcgcagcgtgtcaggcggagagacccgccgccaggctgcctgctgtttcccggggagatcatgaaacgaggt

SEQ ID NO: 515799 - DNA, 100 bp, Homo sapiens
gcacatctcagccacagccagcatggccgtcccactgctggagttcctgtccaggcttcgtgggacacatatgcaacatgcctatgatttttacaagcct

SEQ ID NO: 515800 - DNA, 83 bp, Homo sapiens
ctctcgctgtgagacatgtctgagactcctgctcagtgtagcattaagagcagtcattatggcgaaccttggctgctggatgc

SEQ ID NO: 515801 - DNA, 100 bp, Homo sapiens
ccccggtgtgggggtgctccctggagttcccactggagcaggagttaagcccaaggctccaggtaacctggatgaggacatcattgcagaagagaacatc

SEQ ID NO: 515802 - DNA, 50 bp, Homo sapiens
ctggtctcgaactccggacctcaggtgatctgcccacctcagcctcccaa

SEQ ID NO: 515803 - DNA, 88 bp, Homo sapiens
cagagtggagccatggctagagaaaccaggcgatgcggaagaagctaatcttgtacttcaagaggaggaatcacgctcggaaacaatg

SEQ ID NO: 515804 - DNA, 100 bp, Homo sapiens
catctccaaggagaagaaggagatcaagtggattggtctgcccaccaactcggctcaggaatgtcagaacttagaggtggtatgcagatcttcgtgaaga

SEQ ID NO: 515805 - DNA, 100 bp, Homo sapiens
aatatacagatggaggaatcctggatccagatgatgtcttggcagatgttgttgaagataaagacaagaaatgcaatgctggattctttcacaccctgtc

SEQ ID NO: 515806 - DNA, 75 bp, Homo sapiens
gggaaggcgcctgaagaggacgaaggctctccccttgtagtatctttaattggtgcacttttacgtgattttccc

SEQ ID NO: 515807 - DNA, 75 bp, Homo sapiens
ttttccctaatacgtacctcattgtgggaggtaatttcatctgtgccaaagcctccagaggacaagccagaagat

SEQ ID NO: 515808 - DNA, 90 bp, Homo sapiens
aggagaaccaactggtcccgaaagaggtggagctcatgaaggacttcagcatttgggtccttttggcaacatccccaacatcgtggcaga

SEQ ID NO: 515809 - DNA, 98 bp, Homo sapiens
agctcatgaccaacctctcccacaaggatgtcaatttctcagaggaggagttccagaagcatgaagaatagctgaaacctttggacttcaagaaaatt

SEQ ID NO: 515810 - DNA, 96 bp, Homo sapiens
ctctacttttcaagacaccaagtgagaggccaaccagctatgtttccagtgtcctctgggtgtttccaagagcaacaagaaacgaataaatctctg

SEQ ID NO: 515811 - DNA, 100 bp, Homo sapiens
ggcggagccgctgctcgagctgctgctggattgaactcagagaagccgggggtcaacagttgtcaccgacagatggctgagattgctgtgaatgccgtcc

SEQ ID NO: 515812 - DNA, 50 bp, Homo sapiens
cattaaactcttgaaaaccagaatgaatctgaagtctgctgcagtaaaac

SEQ ID NO: 515813 - DNA, 88 bp, Homo sapiens
gcgacaagccgctggcagccgcggatctcaccgccgctcaggcacatgattaagtaccggtacatcccgttcacacatgggaagagaa

SEQ ID NO: 515814 - DNA, 75 bp, Homo sapiens
ctgcgcgtaccgcgctctttggaaacgaattctgtcgcctggttgggcccggaaatgggacgtcgcgctttctca

SEQ ID NO: 515815 - DNA, 101 bp, Homo sapiens
ttttgactcacgttcttggagttgctggtgttctatactggaagaggcatgccagaggtagagcaggtgacagagctgaatgaacctctctccaatgaaga

SEQ ID NO: 515816 - DNA, 100 bp, Homo sapiens
aagagttcgtgttcacaggacctgggaagcagcggagtagaaagagtatctttagaagatctgtataatggcaagacaaccaaactacaacttagcaaga

SEQ ID NO: 515817 - DNA, 86 bp, Homo sapiens
ggccggcatcgtctttccgtcctctgaggcgacggccgcggctgcacagacaatgcagatcttcgtgaagactctgactggtaaga

SEQ ID NO: 515818 - DNA, 107 bp, Homo sapiens
cgtcgctctgtgacctgctggcattgaatgatttatagctaagactccaggacacccctgaagccgagaaatggtggtatcacggaaaacttgacagaacgatagca

SEQ ID NO: 515819 - DNA, 100 bp, Homo sapiens
ggaaaggcttgacctaagcaacaatgatattagtaggacactgcccatctctaagataagaacctggaaaggggactctgttggccattggaaattgcag

SEQ ID NO: 515820 - DNA, 124 bp, Homo sapiens
ggcaagatctgtgctgtgcagatcctttggattgaggctgctgtgcacaggaatatggagttactggaggtgaactgtttgaagacatagtggcaagagaatactacagtgaagctgatgccag

SEQ ID NO: 515821 - DNA, 89 bp, Homo sapiens
gcctgactgccacacacctccagaatcaggtgtctgaaaataaggttcgtgatcctcgggccaattttgatcagtccctacgtgtactg

SEQ ID NO: 515822 - DNA, 97 bp, Homo sapiens
atcccaggacctaccagaatctgggggcgaatctatcagacaacctatcaattgggctgatgatgtcagtgttccagtggcttctaacaggcgttaa

SEQ ID NO: 515823 - DNA, 76 bp, Homo sapiens
tctcgacctgctaacagaactggaccttttcgacaacaagggaggtgtcacagttttccatttagatcaacaactt

SEQ ID NO: 515824 - DNA, 100 bp, Homo sapiens
ggagatcgtctctctcatcgaggcccaaaccgccaaggagccttcacgtaaatgggtccagtcatgcctcccagtaagaagccagaaagctcaggaatta

SEQ ID NO: 515825 - DNA, 100 bp, Homo sapiens
ctgcatctactacctgctggagaaaggcgcagacctcaatgccactcctggaaaaagtcagatggatctgcggaaactgcttagaaaagtcgatgtagag

SEQ ID NO: 515826 - DNA, 100 bp, Homo sapiens
tcaaccccttcctcccgtatatcagggcagctgcaatgactctccgcacggtattattgtcattgcaagcactattggcagctgcagagccagatgatcc

SEQ ID NO: 515827 - DNA, 82 bp, Homo sapiens
gctgactatgactctttgaggacactgagtcaccatgctagcactgtgcagggtgtcgtagtcattcttcagcacaattctt

SEQ ID NO: 515828 - DNA, 98 bp, Homo sapiens
ttggagtggacgtcattgccgggaacgagcgagtcgccgctgcagccctagtgactgcggcctgcatcccggtcagctccgccgaaggcgccgccaag

SEQ ID NO: 515829 - DNA, 50 bp, Homo sapiens
gacatctacaaccttcgatctcctgacgaacccctgtaaaagagcccaac

SEQ ID NO: 515830 - DNA, 82 bp, Homo sapiens
tcatggcggatggccccaggtgtaagcgcagaaagcaggcgaacccgcggcgcaataacgaattcggttccctcaaaattat

SEQ ID NO: 515831 - DNA, 95 bp, Homo sapiens
gctcattgggaatttagttaagaggccagctccaccagggcaagggtttttccctgcctgccactgtatgccgagtgtccagaacaaagcctagc

SEQ ID NO: 515832 - DNA, 100 bp, Homo sapiens
accgttccaatgatcagaggcaaaaaattaaagcagcatttaagacctcctatggcaaggttccaagaccaaagattaaattaagagaaggtaaagctgg

SEQ ID NO: 515833 - DNA, 121 bp, Homo sapiens
tagaggtccgggcttggagttcgcctcagacgcggtggagccgccggagtctgagaagttgctagtgatatctcgctaacaggaggctcagtagtacagagaatacggctgcctgatgaag

SEQ ID NO: 515834 - DNA, 75 bp, Homo sapiens
cttaccagggaggccaagcgaccacccaaagaagttgatttggagcatatgcgaacaataaaacctgaaaaacac

SEQ ID NO: 515835 - DNA, 86 bp, Homo sapiens
taaggagaaagtcctacaacagtttggcgtgcaacatggggcttgagaaagggtcctaaagagcaagcctaactcaagccattggc

SEQ ID NO: 515836 - DNA, 100 bp, Homo sapiens
cgacccaagcccgctgagcaggatgaggcacttgctctgaaatttggggactgagtacaccaaatacgatagatcagtgggatacaacaggcctttacag

SEQ ID NO: 515837 - DNA, 100 bp, Homo sapiens
gttccatgtgtgctaaatgtgttcgtgacaggtttttcgttggaatatacgttgcacatttatggcgattctgagtgtgagggcagacttctgccaggct

SEQ ID NO: 515838 - DNA, 82 bp, Homo sapiens
cgacgaggcgattgcgggggcctgggctaggcctccccatggccacccatggaccagtcggcattcacttcctcccttctgc

SEQ ID NO: 515839 - DNA, 82 bp, Homo sapiens
cgaggaggcgcgggaggtgttcgagaacgaccccgagacgatcaatgtccgagttaccaccatggatgcagagctggagttt

SEQ ID NO: 515840 - DNA, 101 bp, Homo sapiens
ccgtcctccaccgtttcctccaggacagcacctagtcgtggccggaggagtctcagagctgtcagaaaggcactaaggtaaagtcaataagaacacagact

SEQ ID NO: 515841 - DNA, 83 bp, Homo sapiens
ctgtgtgcggtgctgctgagcttggcctcggcgtcctcggctcctggtaacgtttttatccatggatgacttgcttgggtaag

SEQ ID NO: 515842 - DNA, 82 bp, Homo sapiens
cctggattggtgaaactgaatcacaggagatatttccagatggtggttgctatttcaggcccagacataatcaaatccatgt

SEQ ID NO: 515843 - DNA, 100 bp, Homo sapiens
tcgggctgaagcgactgagtccgcgatggaggtcactatcatatgacaaaggctttgccgcagttcatcttcctccctgtgtactttccatttgccttcc

SEQ ID NO: 515844 - DNA, 98 bp, Homo sapiens
tggactttggaaacatgattgcggatgatatgtctaactacgatgaagaaggcttcctgggctccctgtgcacggccctgtttgtgtcgttcgccgca

SEQ ID NO: 515845 - DNA, 100 bp, Homo sapiens
tgacgctggtttggaatcagacaccgcaatgaaaaaaggggagacactgcgaaagcaaaccgaggagagtgacagaaggaagtcaaggcaccattatgac

SEQ ID NO: 515846 - DNA, 75 bp, Homo sapiens
gcatgagagacaccgggatagagaacgggaccggcaccactgagaaagccacagcaccacaagttattgttccag

SEQ ID NO: 515847 - DNA, 96 bp, Homo sapiens
gggttctaagtgatgtccaggaaggaggaggaataatatttatggagcatatattatggaacacaggcaagtgtccagagaatggctgggatgaaa

SEQ ID NO: 515848 - DNA, 100 bp, Homo sapiens
ccagcatattttgcgagtactcaacaccaacatcgatgggcggcggaaaatagcctttgccatcactgccattaagctggccactgccccaacccaggca

SEQ ID NO: 515849 - DNA, 75 bp, Homo sapiens
gcttctcgcacagccgctggctccggaaggggctgggcacagatggggtccccgtccccctgctacgggtgcggc

SEQ ID NO: 515850 - DNA, 75 bp, Homo sapiens
tggtggaggtgttaaatgaaatcgtgagatggagaataaagaaactctcaaagggttgcacaagatggatgatcg

SEQ ID NO: 515851 - DNA, 75 bp, Homo sapiens
gctaatgacactgaaccagactttgcacctgatcgaccttcagaagatgcccttggggaagctgagcaaaaggca

SEQ ID NO: 515852 - DNA, 83 bp, Homo sapiens
atactttgtgctgggcaagagggatctaagatttcagaagaaagtggtagcttcctttccaagaacagttctgagcacaggaa

SEQ ID NO: 515853 - DNA, 97 bp, Homo sapiens
aaaccatgaaccgaagttttcacaagtctcagaccttgcgattctacgattgcagcgcagtggaagtcaagagcaaggttatgagtgccagtgagcc

SEQ ID NO: 515854 - DNA, 75 bp, Homo sapiens
caaagcgaactacatatggaggagtgtctggcatctcccctcagatggaagtcacatgtgtgcccacgcccacaa

SEQ ID NO: 515855 - DNA, 75 bp, Homo sapiens
ctaactttgcaaccattggtctgcaggacatcactttagatgatggtaaaatgatgcggtgtgtccgctgccccg

SEQ ID NO: 515856 - DNA, 75 bp, Homo sapiens
agagaggggggaaacgtttttggatgacaaaggatgggtgaccctggcagcaaccccaacaaacgccagaggcag

SEQ ID NO: 515857 - DNA, 83 bp, Homo sapiens
cggcacgtcctgttacaccaaaagtggcatgatcctttgcagaaatgactacattagagctccaaacgagaatggaagccgct

SEQ ID NO: 515858 - DNA, 115 bp, Homo sapiens
actaaactggcgggctccgtggaagcgtggccggcagcgtcccggacgaggagccttctccactcgtctgtttgctgtcctgagatttgaaagtgttatccatgagtttgatccg

SEQ ID NO: 515859 - DNA, 100 bp, Homo sapiens
gaagagtctttgtaagaccctgagacgccctcgctgcctcctggagaccctgcgcctttcagtgttatgatgtacccagctggtccaggatctggtgact

SEQ ID NO: 515860 - DNA, 83 bp, Homo sapiens
ggggaggaggatgggggctaaccagttagtggtgctcaacgtgtacgacatggttaatacaatctgttggaatgacactggag

SEQ ID NO: 515861 - DNA, 116 bp, Homo sapiens
cttcactagccccgtcggcgcggacgcttgtcgagaatgcagattcctgggtactgccagatacgagcatgctgtcaaggtcctttaattccaattttactactgtaagcagtttt

SEQ ID NO: 515862 - DNA, 74 bp, Homo sapiens
caaggaggagaccccagggcagaggccagcctggagcagttcagcatggagagcccatcagccagcctggtgct

SEQ ID NO: 515863 - DNA, 98 bp, Homo sapiens
tattttatactatggtggcaaaaaagaagacttcaagcgtttggggtgaactgtcacccctacaactcagcttgcaaccagccctggccaccagtttc

SEQ ID NO: 515864 - DNA, 83 bp, Homo sapiens
acaaaagagttgattgaaattatctctggtgctgcagctctcttaacaaacaacagttgcagttactgaaagaacggttccag

SEQ ID NO: 515865 - DNA, 101 bp, Homo sapiens
tcacctccagttattacagaggagcccatggcatcatagttgtgtatgatgtgacagatcaggtcatacagcagatggaacaaaaaaaattacaacaagga

SEQ ID NO: 515866 - DNA, 82 bp, Homo sapiens
ggcagcctagtttgcatatgagtgctgctgcagcttcccgagacatcaccttgaatctatacaaaaccagcctgcgcaccct

SEQ ID NO: 515867 - DNA, 152 bp, Homo sapiens
tgccccccgcccccaagccgcggccatggacctggcggatccggcctgccctggcccagctcaacacctgatttcgtgtaaactggagttgctggtgggcagccctgcttcctgcatggaactggagctgtatggagttgacgacaagttct

SEQ ID NO: 515868 - DNA, 100 bp, Homo sapiens
gaaactagagcaaataaccgttttgaaatttgtcctctacaagcctggtgatgcccacacaccacttacttcgtgcgcaacaacaaggaccctgttttcc

SEQ ID NO: 515869 - DNA, 75 bp, Homo sapiens
gtggccgtggaggcagaggtggcatgggaactgataaatttcaaacggaagagagtggcagcatttagaaagaat

SEQ ID NO: 515870 - DNA, 95 bp, Homo sapiens
tgacttcacactgacacagactgcagtcaccaggagactaaagtccatcaaaaacatccagaaaattaccaagtctatgaaaatggtagcggcag

SEQ ID NO: 515871 - DNA, 100 bp, Homo sapiens
tgataacaccctgtaacagctgagttttgcactgattgcaaaaataaagtcctccgagcatacaatatccttattggtgaacttgactgcagcaaagaaa

SEQ ID NO: 515872 - DNA, 90 bp, Homo sapiens
tctaaaggcttccaactcacccgacaggaaatagttgctcttttaaatgcttttggaaggttgatagatccacagactcaagtatcaagg

SEQ ID NO: 515873 - DNA, 110 bp, Homo sapiens
acagcttctcctcctatgcacaactacccaagcctacttctacctactccctgagcagcttttttagagctggctgtcttcatgtggctgatgacctatgttggtgctgt

SEQ ID NO: 515874 - DNA, 100 bp, Homo sapiens
ggcgggactgccacgtccaagcaaaccgggaaaggagaggatcccggagccggtgtgatgaatgcagactctgctaccattttggctgtttggatcctcc

SEQ ID NO: 515875 - DNA, 100 bp, Homo sapiens
tcacaggtccagggcagaggaccaacatgggcattttgtttatgagcaaggtggatggagagagaaagaaaaagccagagaggagagctggggtccacct

SEQ ID NO: 515876 - DNA, 75 bp, Homo sapiens
gagtccaagcttgtgctctttggagaactacgatgacccgcacaaaacccctgcctccccagttgtccacatcag

SEQ ID NO: 515877 - DNA, 100 bp, Homo sapiens
ttctttctcgctgatcgcctaacttctactgacgaagcttggaagttgcagaagagttcatgtctcttggcagtatcaattggctgggaaggaggtgttt

SEQ ID NO: 515878 - DNA, 87 bp, Homo sapiens
accatgctggccggggtgcagtaccccagctccatcaacctcacgctgcacctgggatgaagtggcacacactctaactgaaagcag

SEQ ID NO: 515879 - DNA, 83 bp, Homo sapiens
cagatcgacaagtccgggagctgggcggccatttaccagtgcctccggagccagcgtggtggccatagacaacaagatcgaac

SEQ ID NO: 515880 - DNA, 97 bp, Homo sapiens
acagggcaggccatgggcaagatatctcagtgttctccgctctcataggtcagtgccggtggtggtgtgcacattgagccccggtatagacagttcc

SEQ ID NO: 515881 - DNA, 82 bp, Homo sapiens
gggaagtcgaagccaagcgccgtatgggactttgggcgctgtgagcggcggcgagcagtggaagtatgcgagacttaagagc

SEQ ID NO: 515882 - DNA, 98 bp, Homo sapiens
ggacgccatcagcctttgacagaattctggcgtggacaatgaggatgaccatggccgtggagatctggggcgcctcaagaagcagaaggatcaccaca

SEQ ID NO: 515883 - DNA, 75 bp, Homo sapiens
aagttttttgtaataaagcgtccattagggtggacccccaaaagtacaagggcatatttaacggattctcagtta

SEQ ID NO: 515884 - DNA, 96 bp, Homo sapiens
tacatttcccaacacccgccaccagcaggatatgaattgtctcccacggcagcagctaacttcacacgccgaaacctggctgactgtcttcggagt

SEQ ID NO: 515885 - DNA, 89 bp, Homo sapiens
agatacgtttggatcaggagttagtgataacaggagccttcacgtaaatgggtccagtcatgcctcccagtaagaagccagaaagctca

SEQ ID NO: 515886 - DNA, 82 bp, Homo sapiens
caaagggactcactcaaaatgagacaagatcgagggcacccagaaactgctcaacaaagacctggcagagctcatcaacaag

SEQ ID NO: 515887 - DNA, 75 bp, Homo sapiens
cagcctcagtgatgtccatgaggtcgtccttggtggaaggaaccatgaactggcatctccccctcttcctcttgg

SEQ ID NO: 515888 - DNA, 101 bp, Homo sapiens
acaatcctgacttttggggtcctctggctgttgttcttttcttttccatgatatcattatatggacagtttagggctgaaggtgatgtggccgccctcaac

SEQ ID NO: 515889 - DNA, 100 bp, Homo sapiens
ctgaaatcttgcccaagtatgtccaacaagttcaggtgtcctggtcaatgaaatcctcaatcacatgaagagagcaactcagataccaagctacaaaaaa

SEQ ID NO: 515890 - DNA, 97 bp, Homo sapiens
ctgacactgcgatgttctgcaggacaattgcaccgctttagagcttccaggaggccaagcattatggcagggtgtggagagaagctcgggaccgcat

SEQ ID NO: 515891 - DNA, 100 bp, Homo sapiens
agtttctgcttcctccagagccagggtctcctatggacagaagtgcgggcaaggagctttgttcctccccgatgtcaccctcccacagcccacttgctag

SEQ ID NO: 515892 - DNA, 100 bp, Homo sapiens
tatggaccaaatccaagaccagtttaatgaccttgttatcagtgatggctcttctctggaagatcttgtggccttttcagatattaatggcaaagttcag

SEQ ID NO: 515893 - DNA, 86 bp, Homo sapiens
cgcaggccgggggcaaggggcggccgggcgcggccgggatcctgcctttcagatgattacaattgccaaggaaacaggccttggcc

SEQ ID NO: 515894 - DNA, 74 bp, Homo sapiens
tcgctagaactcagttgtgcgttgcggccagtcgccactgcttggctgcctccgggtgatgatggctgtgtgaa

SEQ ID NO: 515895 - DNA, 75 bp, Homo sapiens
ccaccggcagcagcagcaccaccggacggaggagcatattatttaatatctagaagtctagggccagaatttggt

SEQ ID NO: 515896 - DNA, 82 bp, Homo sapiens
gggcgatgggcccgtggacatgcgcacctcacacaggccggacatggtggctcacacctggaatcccagaacttcaggaggc

SEQ ID NO: 515897 - DNA, 83 bp, Homo sapiens
ggccgggcacctccgagcgcaaggacagcgcgaggtccgcgcagcccagcgcagccatgcacttccgttccggcgcccctccg

SEQ ID NO: 515898 - DNA, 98 bp, Homo sapiens
ggaaacctcgcctctgctgagaagtacaaattctgagctgtctaacccctctgaaacggaatctgagcgtaaagacgagctgagtgattggtcattgg

SEQ ID NO: 515899 - DNA, 75 bp, Homo sapiens
gctgcccgaactcccggcccgaactccagatgcagtgcaagctgtttgtctttgacaagacctcacagtcctggg

SEQ ID NO: 515900 - DNA, 75 bp, Homo sapiens
acatcacaaacagtgagctcttcattctggacagtgaggaggaatttggttctgagcgagatgagtaccgggaga

SEQ ID NO: 515901 - DNA, 97 bp, Homo sapiens
caaatggcacttcattggccacctacagaaacaaaatgtcaacaaattgatggtgtcctggtgaagacctagttcttgccggagacaattccactgc

SEQ ID NO: 515902 - DNA, 98 bp, Homo sapiens
ctccatgccaggggacatctcaggccagattacctgtccctaatactgagcagaagctggtgaatgaaacaggagatccctcagtcaaaacaaaagga

SEQ ID NO: 515903 - DNA, 99 bp, Homo sapiens
actgaagatcctggtgtcgccatgggccgccgccccgcccgttgtggacggctgcattcatcgggccgccggccccctgcttaccgacgagtgccggac

SEQ ID NO: 515904 - DNA, 100 bp, Homo sapiens
caagaggaggacagttcgctacacagcaatgcatcgagtgaaactggaacgccaagctgaagaagaacgaatacggaagcacaaagcagctgctgagaaa

SEQ ID NO: 515905 - DNA, 74 bp, Homo sapiens
ctactatgagggtcgagcagagatgagatgagcgagagccgccagacccacgtgacgctgcacgacatcgaccc

SEQ ID NO: 515906 - DNA, 100 bp, Homo sapiens
ccggaccgagcgcctcgacctcggtctgagacgaagttatacggaagcgtctcctcattgatggagatggtgctggagatgatcggagaattaatctgct

SEQ ID NO: 515907 - DNA, 50 bp, Homo sapiens
tgacagctgcaaggagttactgaagtcctgaggctttctaccaatgcagg

SEQ ID NO: 515908 - DNA, 75 bp, Homo sapiens
gcaggaagcaacacgttgctgcttttattctacagataatggtgaatctggattgggaaagtcgacattaatcaa

SEQ ID NO: 515909 - DNA, 83 bp, Homo sapiens
gtcgacgccgcaacccggggaaagcagaaagctgagcaggaggtggaacagtggaaaaaagaagccgctgcccaggaggcagg

SEQ ID NO: 515910 - DNA, 118 bp, Homo sapiens
atggccttcacaatccaagttccacaatatattgactactgccacaattccggtttgttggcatccaaagctgttggggttgatggtgctgaaaaaaaggaagactacaatgaaacag

SEQ ID NO: 515911 - DNA, 96 bp, Homo sapiens
ctcaatttaagcctgatctaacccctagaaacaggttttacttgccacatggcttgagtatagataaagatgggaattattgggtcacagacgtgg

SEQ ID NO: 515912 - DNA, 90 bp, Homo sapiens
ggctgcctcgccgcgtctcgccacgattgcttccaagtatgatcatcaggcagaagaagatcttcgcaattggatagaagaggtgacagg

SEQ ID NO: 515913 - DNA, 100 bp, Homo sapiens
ggaaatgatttgcgtgttttaagaactggtgtatatagcggagattctggagctggctggcaatgcagcgagagacaacaagaagggacgggtcacaccc

SEQ ID NO: 515914 - DNA, 100 bp, Homo sapiens
aaaaacaaaattctgaactcaggacttggcaagtggtttttccccatcatcggccacatgggcatctgcacatccacaggagtcattcgggacttcgcgg

SEQ ID NO: 515915 - DNA, 98 bp, Homo sapiens
gaagagctgccgtcgctgcagagaccccgctatggctatctgcgagtgaagagggacgagggaaaagaaacaaagccacagacgcaacttgagactcc

SEQ ID NO: 515916 - DNA, 75 bp, Homo sapiens
aatccgtcatgactctactggaacctgagatgttaatgatggcagtacagtcagctggagagatttaccagcatg

SEQ ID NO: 515917 - DNA, 82 bp, Homo sapiens
cccatccgcagcaaggacgtccgcagcagttgctctacaccctgaccttctggctcctgctgcgccagtttgtgaaagagaa

SEQ ID NO: 515918 - DNA, 75 bp, Homo sapiens
agggccccgagcccgagcgccccagcccgggtactccaaagattcaggtttactcacgtcatccagcagagaatg

SEQ ID NO: 515919 - DNA, 75 bp, Homo sapiens
gctgctcatgaaccacttggcaaaagtgctgcagcagctcccagtccagtgctaggaaacattcccccaggagat

SEQ ID NO: 515920 - DNA, 101 bp, Homo sapiens
gcggctcctcgtgctggggctctggctggcgttgctgcgctccgtggccggggagcaagcgccagtctctaacgaagtgccggagcacccatgtgtatccc

SEQ ID NO: 515921 - DNA, 98 bp, Homo sapiens
gcaccccgactgccgaggaacgagagcgcgaagctaaggtgttttcacagtcctgtgtttggtatggagagtgtggaattgcatatggggacaagagg

SEQ ID NO: 515922 - DNA, 82 bp, Homo sapiens
tttccggaagtgtatagggaaacctgggggctccctggacaactccgagcaggtcaacaacggttccagcctcagggatgag

SEQ ID NO: 515923 - DNA, 83 bp, Homo sapiens
ccgtgcgcgagtgtcgcctccacgagcgggcgctgctggatgccgagcgcctcaagcgcgagccctgggcgctgcctatggca

SEQ ID NO: 515924 - DNA, 100 bp, Homo sapiens
ctgcctcccacaagtagctccagcgccgtaagcgaggcctccttctcctacaagatttggagcaagaggtggtggtggccttcccccgaagaaatttggt

SEQ ID NO: 515925 - DNA, 100 bp, Homo sapiens
acagcttcgacttagccctgctccaggaatgggacctcgagtcactgtgaagctccaccatgaggcgaggtggatggaggaagcgagctgaaaatgatgg

SEQ ID NO: 515926 - DNA, 60 bp, Homo sapiens
tcttgatctatcaccagacctgcaaggagtagcaaagagctcctgttacaacctgtgacc

SEQ ID NO: 515927 - DNA, 98 bp, Homo sapiens
tcgacattgccgtcgacggcgagcccttgggccgcgtctcctttgagtgtacaagtccccagagtatgagtcccttggttttgagcttactgtggaga

SEQ ID NO: 515928 - DNA, 100 bp, Homo sapiens
cttcctagcttgtgccaagaggttctctccccctcctgctatggagaaggtttgtaaccaaattattggaagatctcatattctttgttgctgatgtgcc

SEQ ID NO: 515929 - DNA, 75 bp, Homo sapiens
cagaggccaaggggtggccgctgccaagcagatgtctttggtggacttgggaaagaggttgctagaagcagcaag

SEQ ID NO: 515930 - DNA, 100 bp, Homo sapiens
ccgagacgcagatgcccgggccgtggctctagcaggctccactaactggggctacgactctgatgggcagaggtcggaaaggtctgcttggaagccagac

SEQ ID NO: 515931 - DNA, 87 bp, Homo sapiens
cgcccagagtcatggcggcagcagccgctctgagggcgcctgctcagggacccagacatggagctgcgggaagaagcctggtctccg

SEQ ID NO: 515932 - DNA, 50 bp, Homo sapiens
atacgtggtgttcgatgaagctgaccggctgctttgactctcccgcgaag

SEQ ID NO: 515933 - DNA, 75 bp, Homo sapiens
cgtgaggccggcatcgtctttccgtcctctgaggcgacggccgcggctgcacagagcaaatcatggaggaagata

SEQ ID NO: 515934 - DNA, 100 bp, Homo sapiens
gctgttgttacctgggaaccctggaggggccttcctcatccgggagagccagaccaggagaggtcttgcagaaacagtccattgtgaccttcagcctgtg

SEQ ID NO: 515935 - DNA, 83 bp, Homo sapiens
attggatttgatcttccatatggataagagtaattccctcctggtcccagacagtctaagaggcacagataaacgcagaaatg

SEQ ID NO: 515936 - DNA, 98 bp, Homo sapiens
cggcctccgggtcctcctccgccttccgcttgagcttctgggaggaggggctcaccggcgcgtcccccagcaggatgacgtagctttgccaaagactt

SEQ ID NO: 515937 - DNA, 112 bp, Homo sapiens
agatgacaaaacttcaagccaaacatcaagcagaatgtgatttgcttgaagatatgaggtgcggctggaagtatttcgggcagaggagctgatggcatgtgcaggattgacc

SEQ ID NO: 515938 - DNA, 75 bp, Homo sapiens
gctactactacgtggtgcttggaaagggagccccagactctggtaaatgctctgcttcctcctgcctggatactt

SEQ ID NO: 515939 - DNA, 98 bp, Homo sapiens
aaggaggttttaaacagtataacagatgatgtgatgccagccacttactgtgaaattgatttagataaagaaaagagagatgcatttgtatatgccat

SEQ ID NO: 515940 - DNA, 97 bp, Homo sapiens
agcctctgggtttgcgctagcagcgtaaggcaccgggtcctggccatctctgacgggatcgagcacatcgggaaccttcgctgggagctggccttgt

SEQ ID NO: 515941 - DNA, 80 bp, Homo sapiens
gggtcctcgcttgcagttcagcgaccacgcaggttacgggcaggacttgagtggcttcggacagggcttctcagacccca

SEQ ID NO: 515942 - DNA, 75 bp, Homo sapiens
cagatgggatctttccggatcaatccagatggcagccagtcagtggtggagacacagctccgaattgattccttc

SEQ ID NO: 515943 - DNA, 75 bp, Homo sapiens
tcattgttatggcatgcatggagtatgaaatgggaaaggtggttattaacttggtgatgcttttggctgaaatga

SEQ ID NO: 515944 - DNA, 100 bp, Homo sapiens
cagagctttacgatgtcacttgggaaggagtatgctgtgaactgccatgtgatcacctgggagaggattatcagccactttgatatttttgcatttggac

SEQ ID NO: 515945 - DNA, 100 bp, Homo sapiens
ctcttctcctctcatgaaacccttgcttgtatttgtgaatcccaagagtggaggcaaccagccacatgaaatgaagatcacctctgcctatctacaggac

SEQ ID NO: 515946 - DNA, 83 bp, Homo sapiens
tcaccgcgctgcactacgcctttcaggacgagaaccacctggtcctaggcctacttacaagcctccagtctcaaattatccag

SEQ ID NO: 515947 - DNA, 75 bp, Homo sapiens
cgtccatgcggaagatcgtcgccacctggatgctggaggttattcagcttctcaaggctggaaaagcgaaggaag

SEQ ID NO: 515948 - DNA, 75 bp, Homo sapiens
aaaaaagctatcaaatatcagagcaaggcaagaagggctctacagattctcccctgcccctggagaaggaggagc

SEQ ID NO: 515949 - DNA, 100 bp, Homo sapiens
gggcaaggtgatccagcaaggtcggcagagcaaggggcttacgcagaaggacctggccacggaaggtgctcgggtcttcggggcactgggtcccatcggt

SEQ ID NO: 515950 - DNA, 98 bp, Homo sapiens
gcaacaaaaagaaagctgcgttaatgtttgcaaatgcagaggaagaatttttctatgaggtgtatgtggaatttgatgatcttgaatgggataaacga

SEQ ID NO: 515951 - DNA, 82 bp, Homo sapiens
cataaggattgtcctctttctacaaaaggacggcatcagaattaatgtaactacactgaaagatgatggggacatatctaaa

SEQ ID NO: 515952 - DNA, 75 bp, Homo sapiens
cctcctttgacggcatcagcaatgcgaaagatgtgacaggcctttctccatcttcaagagtgacacctcttctga

SEQ ID NO: 515953 - DNA, 100 bp, Homo sapiens
gagatcaagctggaacaggagttccgatcgacccggtaccaagaaggggagtgcccgcggcagggcccagacaaggcacgctcccagctcctgatcctgg

SEQ ID NO: 515954 - DNA, 50 bp, Homo sapiens
acgcatgtacaacgtgcgcataatgcgggctggagtgcagtggcgtgatc

SEQ ID NO: 515955 - DNA, 98 bp, Homo sapiens
gccgctcctaagcctgcacagccgcggcggcagcagcagtgagagtcaccttcaggccattcagaggaggaaagagaggggaatatgaagtcagccaa

SEQ ID NO: 515956 - DNA, 75 bp, Homo sapiens
cagtcttcatgattgaagaactcttttgtacaacacaaagaacatgccagcagaagcattcaccaactgacatgt

SEQ ID NO: 515957 - DNA, 100 bp, Homo sapiens
ctcgcgtcctttgctgggtccagacaccggtcgggaaagaggttaaagaagacacgcaagtatgatatcatcaccactccagcagagcgagtggaaatgg

SEQ ID NO: 515958 - DNA, 100 bp, Homo sapiens
gccgctgcccatggagggagtggacatcagccccaaacaggacgaaggcgtgctgaagcatttttgaaacgttggggttgttggagtggttggattttcc

SEQ ID NO: 515959 - DNA, 48 bp, Homo sapiens
tggcctcactcaaacagtaaacgagacaatacaatggtgggtgaagag

SEQ ID NO: 515960 - DNA, 100 bp, Homo sapiens
ctacttacagtcacgttactacagcatgcttgagagttcaaaccggcttgatgaagaacacaggctaattgccaggtatgcggcaaggctggcagcagag

SEQ ID NO: 515961 - DNA, 90 bp, Homo sapiens
gcttgagtatttcagcttggtacattttgttaattccggcatcctagggtagaagagcagaggatggctctgtcattgattatgaactga

SEQ ID NO: 515962 - DNA, 100 bp, Homo sapiens
ttgtatgtgatgctggagatgactcggccttcttcactgtcactgtcacaggaacgccagcgcctggagaccatcctgaacctgtgtgccgaatacagcc

SEQ ID NO: 515963 - DNA, 75 bp, Homo sapiens
tggttctgacgaggcacagcgtttcttgcaagaatgggagtgtattaaaccgcacccctacgcatctgatccggg

SEQ ID NO: 515964 - DNA, 74 bp, Homo sapiens
aagatgttcatactttggtagaaatggtagactttgtgtgaatggctattcaagtggacaagttcaactttgag

SEQ ID NO: 515965 - DNA, 100 bp, Homo sapiens
aaacaacgttctcccgcaaaacaacgcacctcttgctttttcctccaaagtatgttatgttaagtttcgtgatccatcaagtgttggcgtggcccagcat

SEQ ID NO: 515966 - DNA, 90 bp, Homo sapiens
cctcactgcagaggtgctggagctggcagggaggctgccggcgtggaccgcgggaaggcggggctggggctcggcgggaggccaccccca

SEQ ID NO: 515967 - DNA, 75 bp, Homo sapiens
aatgcctccactgactatgacctatctgacaagagcatcaaccctctgtttgaagaaggtgaagaaggagaagag

SEQ ID NO: 515968 - DNA, 100 bp, Homo sapiens
ctccggaggaaacggagcgctgccctgcagcccgagcccatcaaggtgtacggacaggtttaaccaccaaggactctgagagctggcaggtctgagtaac

SEQ ID NO: 515969 - DNA, 97 bp, Homo sapiens
ggcgtggctggcgattcgtgttcgtgagggccttttctggtatcttttggataatcctgatgttgtcagaggaaaatctgtattagatcttgggagt

SEQ ID NO: 515970 - DNA, 99 bp, Homo sapiens
agaaatttggcatctagaaatcttgctccaaaagggatggaagcttcctggcgccaggtggccggtggccgaggccgatcccggggacgggccactgcc

SEQ ID NO: 515971 - DNA, 75 bp, Homo sapiens
cgttaaagtctctcttcaccctgccgtcatgtctaagtcagagggacccgagctgatccagaaagccaacggtct

SEQ ID NO: 515972 - DNA, 82 bp, Homo sapiens
ggtcctgccgtccatgcggaagatcgtcgccacctggatgctggagggactggtgattgcagctggaagtgcccatgaccga

SEQ ID NO: 515973 - DNA, 82 bp, Homo sapiens
aaatatggaaacgactcctcggccgagctgagtgagtgacaaagcataaatcatggacaccagagaataaggtggacctcag

SEQ ID NO: 515974 - DNA, 74 bp, Homo sapiens
gcaggaagtgggaccggtgtctggcggatgcggtcgtgaagatagttcttggccaggctgactgagagatttgt

SEQ ID NO: 515975 - DNA, 73 bp, Homo sapiens
ctcaccccaccacttaaaactgtcattcgagctatcaggaacgccagccactacatctgcagctacaacaggc

SEQ ID NO: 515976 - DNA, 83 bp, Homo sapiens
ggaaccagaacccaggcccacggaggaagagccgggcagtccctggagcgggccaggaggcatacacggaatacctgaggagc

SEQ ID NO: 515977 - DNA, 75 bp, Homo sapiens
agaactttttcacttactgcaggattttcagcttcagcaagcagaaagcgtggatacccatcaacgaagttttga

SEQ ID NO: 515978 - DNA, 112 bp, Homo sapiens
atgactttgagccctaccttactggacagtcaaatcaggttcaaaatgagcctgtttggaacaacctcaggttttggaaccagtgggaccagcatgtttggcagtgcaacta

SEQ ID NO: 515979 - DNA, 97 bp, Homo sapiens
cctgtgtgagcagtctctggacaagatgaccacactccaggaatgccagtgcatcttttgcacagctcaagtctggaaaagtttgaaattccagtaa

SEQ ID NO: 515980 - DNA, 88 bp, Homo sapiens
tctaaagcccttcacagcaagacccaggaagccgcgggcaaactcagactcgaaggaagctcttcgtgggcggtcttgactggagcac

SEQ ID NO: 515981 - DNA, 82 bp, Homo sapiens
ctacacagaccttactccccttagaacagttttctggatatgccgcagaaggatccgtgccagaagcaagcctgtgagatac

SEQ ID NO: 515982 - DNA, 100 bp, Homo sapiens
aaagtggtattccaccttcctttataacactacagattaaagactttctgaatggaccaggtataatgggtctctcccaaatggcgatagaggaaggagg

SEQ ID NO: 515983 - DNA, 75 bp, Homo sapiens
gctcttccttggggccgggctgttcatctacttcaggaatcagaaagaacactcgtgaaactgctcaggccatca

SEQ ID NO: 515984 - DNA, 96 bp, Homo sapiens
cggggtagctcttcactcctcagcgcgacgtcgtgtcgagttcccaaaaagctccgcaggggctgtagggaggcctttgaactggccacaggtgac

SEQ ID NO: 515985 - DNA, 100 bp, Homo sapiens
cgcagccgctgttcccaggatggtgatccgtgtatatattgcatcttcctctggctctacagcgacttaattcagtgcacaaatgagatgaatgtgaaca

SEQ ID NO: 515986 - DNA, 82 bp, Homo sapiens
ggttcctgcgtgctacggccctgtgggcctgggagctgcctctgaggaacacgccgcagagttcctatcagactgagattgg

SEQ ID NO: 515987 - DNA, 76 bp, Homo sapiens
taatcagcaaagactgctacacattgtctggcctcacaggtggatagtggccaaagcctccaagaacctcatgtcc

SEQ ID NO: 515988 - DNA, 89 bp, Homo sapiens
tccaggcaatagctgaagaagaagaggaagtagccaaagagcaactaactgatgctgacaccaaaggcatagaatgtcaagctaaccag

SEQ ID NO: 515989 - DNA, 75 bp, Homo sapiens
ctcattccgagacacctgccgtcaggtgtgatcccctgggcccgtttgttgtcgggggagaagacttagaccctt

SEQ ID NO: 515990 - DNA, 100 bp, Homo sapiens
agccatgctcaaccctgccaacgtgcccactcacctcatggtgctctgctgcgtcttacgaacattgagctcaaggtggaagtagaaagtctgaagcggg

SEQ ID NO: 515991 - DNA, 100 bp, Homo sapiens
gcgcagcgtgtcaggcggagagacccgccgccaggagaatgcagttgaaactaattttgtggatagagaaactgttggaactgctttacaaagtatttta

SEQ ID NO: 515992 - DNA, 100 bp, Homo sapiens
ggagcgctaagctgccggggagggggcttgtacatgacagctggaatagcctccagttgaggggcttggtggtgctccttatctctaaagcagctgggcc

SEQ ID NO: 515993 - DNA, 100 bp, Homo sapiens
attggaagtacccgcatgctgcagcttatgaccatcaatatgtttgcagtacacaactcccagctgaaaggtgctggagaatctggtaaaagcaccattg

SEQ ID NO: 515994 - DNA, 108 bp, Homo sapiens
tgctaaggaagcaaaaaaggctaagcaagcatctaaaaagactgcaatggctgctgctaagaagcctaaagaaactgttccaactcttgctccaaaaactctttcagt

SEQ ID NO: 515995 - DNA, 100 bp, Homo sapiens
cttgttggggccctcttgataaaaagagatgtggggggattctcgacctgctaacagaactggaccttttcgacccaacatgagtgaagtttcctgcaag

SEQ ID NO: 515996 - DNA, 82 bp, Homo sapiens
gcaaaaatcccatctaccgcaactctcagttcgagagtaaagatctgccgacaccccaggccatcgagccccaggccatcgt

SEQ ID NO: 515997 - DNA, 75 bp, Homo sapiens
ggatcctgatgccaaagtagcttgtggtgatcatggagctcagcttggtctccatggggctggtggtgatggaat

SEQ ID NO: 515998 - DNA, 100 bp, Homo sapiens
tcgatttgaaaaaatggacaacctgctgcgggatcccaaatcggaagtgaattcggattgtttgctggaagtgcagagctgtactgttgacttaggtatt

SEQ ID NO: 515999 - DNA, 75 bp, Homo sapiens
acccaccatgatggaagacgacgggcagccccggactcttttgtcagggagccactggtgatgtggatggggcac

SEQ ID NO: 516000 - DNA, 100 bp, Homo sapiens
gaaaaatacgagaaacagatcaagcactttggtctgagagtcactggagctaccagaagcatcatggggccctggggagagccagagctcctggtgtggc

SEQ ID NO: 516001 - DNA, 100 bp, Homo sapiens
ctccaagcagcaatccaaaagagtctcaaggatccttcaaataacttcaggcttttgccaactttccaattaaaggttgacattcctgcataagcatttc

SEQ ID NO: 516002 - DNA, 82 bp, Homo sapiens
cccgccccacccgcatgctctttgtcactccccggcggcagcacgaaagtaccatcattttgaaagcgaagcagaagccgta

SEQ ID NO: 516003 - DNA, 100 bp, Homo sapiens
ctcagagatccaagtgcgcgccctggcgggtccggaccaagacttcgacccccaccacttctggcagtggagcagcttctcggactacgtgcagtgcgtc

SEQ ID NO: 516004 - DNA, 75 bp, Homo sapiens
caggcccccaactcagccatctgcggaggtcaagagcgccagtggaacatgtggatcccaggatttggctctgaa

SEQ ID NO: 516005 - DNA, 87 bp, Homo sapiens
gacagcctcaaacaggagctggagcagctcaaagagatgtgtatatctcatgattgatatggagaaactagtcatgggccaaaggtc

SEQ ID NO: 516006 - DNA, 100 bp, Homo sapiens
accaagatccggaagggaaagcctcagcagcttctcagagtggacgagcacgacttcagcatgagacccgccttcggagacagggtctcgctctgttgcc

SEQ ID NO: 516007 - DNA, 100 bp, Homo sapiens
gcgtggcagattcagttgtttgcgggcggccgggagagtagcagtgccttggaccccaggcaccgcatgcgtggggagaccaccctgtggaaccctggct

SEQ ID NO: 516008 - DNA, 82 bp, Homo sapiens
ctgttggcactttccactgttccatgcaaccacgagacagacaacatgaaccagatctacggtttcgagggtgaggtgaagg

SEQ ID NO: 516009 - DNA, 100 bp, Homo sapiens
acagacaattgttcagttgcaaaaagaaactggagccaccatcaagctgtctaagtccaaagatttttacccagtggctacagcaaaccaaacagcccag

SEQ ID NO: 516010 - DNA, 100 bp, Homo sapiens
ctcactttttgcttgcagcgtccatgaagcagtgtttgaggcacgagagcagaagaattggtgatatgggactaaagcaatttcttgatggtcctgcaag

SEQ ID NO: 516011 - DNA, 75 bp, Homo sapiens
caaaccacttctcagacaagttccatcccacctttgagtcagggagtggtacgggtatcactttccggagctggt

SEQ ID NO: 516012 - DNA, 83 bp, Homo sapiens
ggcgtcttggcccgggcagcagtggcggcagcgcccgagagagggtatcagcatggaagccatgagtgagaataaaatggtgc

SEQ ID NO: 516013 - DNA, 97 bp, Homo sapiens
cagctgctgacaaaaggcatggtgatccttcgggacaagattcgcttctatgaggatgtcagtattgaatatggtggtgaggcgtgaccctggcaac

SEQ ID NO: 516014 - DNA, 87 bp, Homo sapiens
tctgcgagccctagcgctgcggccccgcttcctggcggccgggtcccagttttcggctttgtgagaaaccttaccatcaaacacgat

SEQ ID NO: 516015 - DNA, 98 bp, Homo sapiens
agcctcttgcgaccacagccagagcctcagcaggagcctgttctcatcaccatggcaacagaggaagaagaggtggataagatgatggaacagaagat

SEQ ID NO: 516016 - DNA, 100 bp, Homo sapiens
ggaaatccaaaggcagacagtacgggctcccttcgccaaactcttcattttctctaatctcattttcagcttctgccagagccagtagcagttgggaaag

SEQ ID NO: 516017 - DNA, 90 bp, Homo sapiens
cacagttacatgtatggagaatggctggtctcctactcccagatgcatccgtgtcatcatctcaactcgaactccacctccaccttcacc

SEQ ID NO: 516018 - DNA, 82 bp, Homo sapiens
ctcacttccccggggtgtaataatgttaactgagggggggccctcagcctcttggccttgaacgggctgttcatcttgattc

SEQ ID NO: 516019 - DNA, 89 bp, Homo sapiens
gaaaacatcgtggccaacacggtcttgctgaaagccagggaaggtttgccaagatggtggataagaatatttacatcattcaaggggag

SEQ ID NO: 516020 - DNA, 76 bp, Homo sapiens
taataaaacctaccccagggtaggacggactgttcgctgtccagcagaaggagatcacacagagcccatccacgtc

SEQ ID NO: 516021 - DNA, 87 bp, Homo sapiens
ggatgatgatgatgatgactaacagagctcacaacgacctggggctgaggacaatgtcctcaatgagatcgtgagtatcttgcagcc

SEQ ID NO: 516022 - DNA, 98 bp, Homo sapiens
aactgcaagggggaagtagagagataacaaaagctgctcagagtctcaatgaacttggtccttcacagggtggtccaggtcctcagtatcctaactac

SEQ ID NO: 516023 - DNA, 73 bp, Homo sapiens
cggctttgaccgagaggctgctggagctcgtgtttggacgcgtttgatgaacttgtgaaaaaattcaaagtcg

SEQ ID NO: 516024 - DNA, 100 bp, Homo sapiens
tccccgccttcaaccggctgcaaggggatcgcctgcgcgtcccgctcgtttcgcctgagcctccaacaacaaacaaatggcagctggacaactggctgac

SEQ ID NO: 516025 - DNA, 75 bp, Homo sapiens
tgggagacctggagcagctgctcttcagccagatgctgggttatgaagacagtatggagtttccagaccatagta

SEQ ID NO: 516026 - DNA, 100 bp, Homo sapiens
agcattcctgaaatacatccaggaaagacatggagattctcttaaaaagaggaaggaacagagccacagagaaaaatgacttgctcacaacagaagagcc

SEQ ID NO: 516027 - DNA, 75 bp, Homo sapiens
acgtccactctgcgagaatgggctgtcatctggcgaaagctctacgtgagcctgccttctggtacaagatgcctg

SEQ ID NO: 516028 - DNA, 90 bp, Homo sapiens
agcgccgggcagctcgggaacatggccctggagcggctctgctcggtcctcaaaggcaggtcagctgcccctggtgaagccttacctgcg

SEQ ID NO: 516029 - DNA, 75 bp, Homo sapiens
ctccagtcgacactctcgcgcccggagtttggtgccctggttgtcagatgttggaaagcagtaggacggaacata

SEQ ID NO: 516030 - DNA, 80 bp, Homo sapiens
gatgaagccgaggtagaagaagatgaacccacagatttggatggaaaaattcgagtcaccattcttgcacggagcacaga

SEQ ID NO: 516031 - DNA, 80 bp, Homo sapiens
ctttttgccaccaatcccttcgatcaggatgttgtgatgccatctgcagttttgtgatctgcaatgattcttcccttcga

SEQ ID NO: 516032 - DNA, 96 bp, Homo sapiens
cacaagctgcaggaattaaatgcacatattgttgtatcagatccagaagatattacagtttaatcccatggaatcaatcaaattaaatcatcatga

SEQ ID NO: 516033 - DNA, 83 bp, Homo sapiens
aggaaacactctaggacggggaacgacaattacacaaccagatgttccaatattttattacagttgtgccaacaaaactacat

SEQ ID NO: 516034 - DNA, 75 bp, Homo sapiens
cgaaagttaggctggggacacttttcaacagtatggttatcatgggatattcatgctgcttttgacacaaaaacg

SEQ ID NO: 516035 - DNA, 75 bp, Homo sapiens
gttaaggattccaagtaactcttatttggtcaacaatgaagatccttttcgttcagccacatcgagctctgtcag

SEQ ID NO: 516036 - DNA, 59 bp, Homo sapiens
cagcctgcagctaggactttaataattctccctctgaagcacagaatttagatgagaat

SEQ ID NO: 516037 - DNA, 87 bp, Homo sapiens
ggtgggaaggaggccaggacctaacaacctgagagaagattacaaatttcaccacactttcagcacagaaatagcaaagttcttgaa

SEQ ID NO: 516038 - DNA, 82 bp, Homo sapiens
gcattgaagttacatcctgataaaaacccgattgctacctgttctgatgacaatacactaaaaatctggcgcttgaatagag

SEQ ID NO: 516039 - DNA, 87 bp, Homo sapiens
gatctgccctccgctcagctcgagcttccctcgtggccgacggaacaatgaaggtaaagctttccagtttgaatttagatgatcacg

SEQ ID NO: 516040 - DNA, 100 bp, Homo sapiens
aagaatattattagcacaagagcaccatactttgaggcacttttcaggattagaagaggctgtgtatagaaacatacaagcttgcaaggagcttgcccaa

SEQ ID NO: 516041 - DNA, 75 bp, Homo sapiens
agaggataataaagaacattcatttgagcatttacacagatgtggaagacatgaaagagcaagaaatagtgagca

SEQ ID NO: 516042 - DNA, 100 bp, Homo sapiens
atactcaccaagaactgtggtgtaaagcgcctgtaaaaccaggccttcaagagggaattgaaaactaaagaacctgtaatcatgagtactcttgagactg

SEQ ID NO: 516043 - DNA, 124 bp, Homo sapiens
acagaggatgacggacaagtgtttccggaagtgtatagggaaacctgggggctccctggacaactccgagcagacaatgcagatcttcgtgaagactctgactggtaagaccatcaccctcgag

SEQ ID NO: 516044 - DNA, 82 bp, Homo sapiens
agaaaaggcaacatcctgtcacaggccatgctctggcaaaaacgtggctgaatccacagaggagcctgctggttctaatcgg

SEQ ID NO: 516045 - DNA, 132 bp, Homo sapiens
tcgcgcccgggaggaaggaacgaggcaaggagctaaagcagcgtgcgttcagccctggggagccttcacgtaaatgggtccagtcatgcctcccagtaagaagccagaaagctcaggaattagtgtctccag

SEQ ID NO: 516046 - DNA, 80 bp, Homo sapiens
gccaccctgcgctgccgccgctctgaggagttaaagcggcttctacgctccggcactctgagttcatcagcaaacgccct

SEQ ID NO: 516047 - DNA, 71 bp, Homo sapiens
gtagtcaacacccacatgccaaaggatagagtcactggccagcaccaaggccaaccgcgagaagatgaccc

SEQ ID NO: 516048 - DNA, 100 bp, Homo sapiens
gaaaaagctaaggatatctttattgaagctcacctttgtctaaataaccttcctacagcaacttcccactccaggtggccagacgggagttccagaccag

SEQ ID NO: 516049 - DNA, 96 bp, Homo sapiens
acggcaacgcgcttatcagcgctatgagaactgaagaatgttctgctgactctgacctcaactttcttattcctgttgcagtgggtgtggccttgg

SEQ ID NO: 516050 - DNA, 46 bp, Homo sapiens
tccacgcaggagatccatgagaaggaatggtcctcgtccgaagtga

SEQ ID NO: 516051 - DNA, 50 bp, Homo sapiens
ctggcttctctcgtgcttatctactgggctgtttttgcagcagtgttgca

SEQ ID NO: 516052 - DNA, 100 bp, Homo sapiens
agtgcgaagaagctgcagccgcacctggccaagggaatcagagatcattgatttcttcctgggggcctctctcaaggatgaggttttgaagattatgcca

SEQ ID NO: 516053 - DNA, 100 bp, Homo sapiens
aatgcaatagaagctgtggatgaatttgcttttctggaaggttcgtttaccaagcaaaagttgggggtcgctggttcccagccgtctgcgcacacagcaa

SEQ ID NO: 516054 - DNA, 100 bp, Homo sapiens
cgagcggagcctcaggagccggcggggacgccatgcgagccagttcgtaggtgtaaagctttgaaggaaaaagatttaattagaacgtctgagtcagact

SEQ ID NO: 516055 - DNA, 90 bp, Homo sapiens
cgcgcacatgcccgccgccgccctcaacgccggaaagaccacagcaagattctttcattcgtctcctcctagcctgggggaccaggctcg

SEQ ID NO: 516056 - DNA, 50 bp, Homo sapiens
gcgaacccgcggcgcaataacgggtaacaagatgctcaactatagtgctc

SEQ ID NO: 516057 - DNA, 100 bp, Homo sapiens
ctgatgagcacagatctcttagcaaacagttcggatccagatttcatgtatgaactggtggatggagagagaaagaaaaagccagagaggagagctgggg

SEQ ID NO: 516058 - DNA, 82 bp, Homo sapiens
aaacatttgaaattaatcccagacacccgctgatcagagacatgcttcgacgaattaaggaagatgataagatcagatgggc

SEQ ID NO: 516059 - DNA, 100 bp, Homo sapiens
gacacaggactgaggaataagatggtacaagttggactgcttcccaagctcactgcactcctaggttaatacaatctgttggaatgacactggagaatat

SEQ ID NO: 516060 - DNA, 75 bp, Homo sapiens
cggaatctgtctcctgatcatcattcagaccaccatcatggcagtggagtttgacgggggcgttgtgatgggttc

SEQ ID NO: 516061 - DNA, 90 bp, Homo sapiens
ttgaagttgggcagaaagtgactccagtggtggaacccggagccaaccatttttagttacctgtcccctttcctccaacccaacggctta

SEQ ID NO: 516062 - DNA, 75 bp, Homo sapiens
atgcactgttacttaaaggaacctaaggtacaaagtgaaatcacttcagcaaacacagaagatgatgatgacgac

SEQ ID NO: 516063 - DNA, 87 bp, Homo sapiens
gagtgctctgttcacggctccatcgctgttaacgaagttatacggaagcgtctcctcattgatggagatggtgctggagatgatcgg

SEQ ID NO: 516064 - DNA, 73 bp, Homo sapiens
caaacttggtagctgagcctcagaaggtaagcggaagggtacagccaatgcccgaatgccagagaaggtcaca

SEQ ID NO: 516065 - DNA, 83 bp, Homo sapiens
gtttaaagatatcagcctgtctgactacaaagaatccacattcatctcaatggaaggatcctgccttaagtcaacttatttgt

SEQ ID NO: 516066 - DNA, 87 bp, Homo sapiens
gaacccaagaagattccgataagaaacacggtaaacctagcctttaagcaacctggaaagaggctagaacaccaaggaattagaatt

SEQ ID NO: 516067 - DNA, 50 bp, Homo sapiens
gcggcgagcagaactacggcgagcgggctactgcagcactggggtgtcag

SEQ ID NO: 516068 - DNA, 83 bp, Homo sapiens
gtgaatgccggcgagagcccgaaggggatcgggcgtggagagcccctttctgtcctgatttgtaagactccagggcctcccag

SEQ ID NO: 516069 - DNA, 99 bp, Homo sapiens
gccgcggtaatgctggtggtctgcatcaccaccggatcaacttcgacaaatagaaaaccagtagattcccagacatcgcgaagtgaatctgaaattgtg

SEQ ID NO: 516070 - DNA, 83 bp, Homo sapiens
gattcaccaaataagctatatactttggttacctatgtacctgttaccactttcaaaaacctcctgccccccgaggtctgcag

SEQ ID NO: 516071 - DNA, 96 bp, Homo sapiens
acctgtgccacctgtgcttcaacaaaggacactacatcaaggactgcccccagccggcccaggcctttgtggtgaagcggggcgtccacgtgtcag

SEQ ID NO: 516072 - DNA, 100 bp, Homo sapiens
ggtggctcaccgggcagcgtgggtgagcggcgcagcggcggcagcggagagcgagagaggggagcagattgttgtaggagataaagttgttttgatgcct

SEQ ID NO: 516073 - DNA, 74 bp, Homo sapiens
tccttcaatagtgctgaaggctttgccgacttcagccagatgtccaagggcttgtcaatgaggcagatcagatt

SEQ ID NO: 516074 - DNA, 100 bp, Homo sapiens
cgcgggttttgggccgaggcctgggttacaagcagcaagtgcgcggttggggccactgcgaggccgttttagggaaattcaactactgaggaggttacgg

SEQ ID NO: 516075 - DNA, 100 bp, Homo sapiens
ccgggcaccgaggaccagctcaatgacagatagacgatcagctgaacactctcttgaaggagttccagctaacagaggagaacactaagctccgatatct

SEQ ID NO: 516076 - DNA, 100 bp, Homo sapiens
tgtaatgctgtccgccaggccctgcaggacctgctttcggagtacatgggcaatcaaccccaaggtccaggtggaggccatcgaagggggagccctgcag

SEQ ID NO: 516077 - DNA, 76 bp, Homo sapiens
ccggcgccaaacagaacacaggagtgtggctagtcaagaatcatgtcaaccctgccatggacttcacgcagactcc

SEQ ID NO: 516078 - DNA, 50 bp, Homo sapiens
gggaaatagcaattgatgtcccaaatgattctcaaagaccaggtgcccac

SEQ ID NO: 516079 - DNA, 100 bp, Homo sapiens
actccttttccaattataataatccaagaggaatcgctgatctacctgctccaaccagcatttcccggaaacattaactctgacggtgtggtccggcacg

SEQ ID NO: 516080 - DNA, 90 bp, Homo sapiens
gccctgcagtggaacatgatgccagaaaatcaccatagcatggcctccttggggaactctaatgatccaggacaaagaagttaccctgga

SEQ ID NO: 516081 - DNA, 74 bp, Homo sapiens
gaagacccagtacagctggacgtttgccgtccactctgagagtgatttgccccggatcaaaacggagattgagg

SEQ ID NO: 516082 - DNA, 82 bp, Homo sapiens
cggccccgccagcagcactgtggaggccgtcctcggatggcactggatctttaaaacgcagtggttcctttagcaaactccg

SEQ ID NO: 516083 - DNA, 99 bp, Homo sapiens
gctgcaggtgaccccaaaaaggagaagaaatctctagactcagatgagagtgaggatgaagaagatgactaccaggatccactgaaagatggtgaggca

SEQ ID NO: 516084 - DNA, 141 bp, Homo sapiens
ggccgggtcatcgtcacctccttccagaaagccaacatgctggaccagcatcacaccgacctgatcttaaagctgatggtgagaccattctaaaaggcctccagtccattttccaggagcaggggatggcggagtcggtgc

SEQ ID NO: 516085 - DNA, 104 bp, Homo sapiens
caaggcatctcctagtattgcatcctacagatgtgctgtaaacatcaaaagaagacggtgggatcaggagatgagcacaatcattgtggagaagacagttcaag

SEQ ID NO: 516086 - DNA, 83 bp, Homo sapiens
cgcggagcccggctcccgcaccatggaggaggacgacagctacgaggttttatacacctgaaagaagagaatgtcaagacgaa

SEQ ID NO: 516087 - DNA, 73 bp, Homo sapiens
gacaccggagtttgacgaagaggtggtttttgaggcttatcaggagggcagacttcaaaagctactaaaaatg

SEQ ID NO: 516088 - DNA, 107 bp, Homo sapiens
gaggatgatgaggatgaagaagagatcgaggttgaggaggaactctgcaagcagctaaaggtggttatttaagtatttttaaaaattacatgaatatccaggtgaac

SEQ ID NO: 516089 - DNA, 75 bp, Homo sapiens
aagcacctgggcgtccccaacgggcgcatgcctgactttgacgacaggagagtgggccgtcccaggtctatgctg

SEQ ID NO: 516090 - DNA, 50 bp, Homo sapiens
cttggaaaggttcagtttcgtgacttgggacccctgattttagcaggatg

SEQ ID NO: 516091 - DNA, 98 bp, Homo sapiens
gtgggagagtacaaggccctgatgaggacccggcgtcaggatgcccgccagagctacgtgatcccgtgcatcacctggatcatgaggtcacccctctg

SEQ ID NO: 516092 - DNA, 114 bp, Homo sapiens
tggatgtggctgctgggctgaaaatactggagctcataacccctactccacagctgcctcaggagtgcaagtagctgatgaagtatgtcgcattttttatgacatgaaagttcg

SEQ ID NO: 516093 - DNA, 88 bp, Homo sapiens
ttgtattgagaacaatatagatttgcaggggccacctacagatgctcctgcagtggacacagcagaacaagtctatatctcttccctg

SEQ ID NO: 516094 - DNA, 100 bp, Homo sapiens
aggaccctcttcgcgggcgattcgcgtagcctcagggttttggccaaattgggcgagggcacaaaataaccacttaccccttctcaccgaggaagagcgg

SEQ ID NO: 516095 - DNA, 149 bp, Homo sapiens
agttactacaaatctgaagatgaaacagagtatggctgcagaggatccatctgtcttagcaaggctgtcatcacaatgccttcaattaagttgcagagttctgatggagagatatttgaagttgatgtggaaattgccaaacaatctgt

SEQ ID NO: 516096 - DNA, 100 bp, Homo sapiens
tcagccgggccttgcggtactactatgacaagggcggcgactggcggcgcgatggacctgaccgggctcctgctggacgaagaaggcaccttctccctcg

SEQ ID NO: 516097 - DNA, 100 bp, Homo sapiens
gcagatagcagagccatccttgggcactgaacctaccagatgtatttgggttggtcgtcctcccattggaactgaaactacggatcttccgacttctgga

SEQ ID NO: 516098 - DNA, 85 bp, Homo sapiens
aagaggcactgctgagggggcgcgaggggaacggaggccagagctgcggtaacctggatgaggacatcattgcagaagagaacat

SEQ ID NO: 516099 - DNA, 75 bp, Homo sapiens
cgtttgttcaggaaccaccagtgacagagaccctgatgctcccataagacagaaaatgccccttgatgatctgga

SEQ ID NO: 516100 - DNA, 95 bp, Homo sapiens
agctctagaaatgaatgtttccatctcttcagagatgaaccagttcatagccctgatgaagcaagttactctgctctcctaataaatgcaagaaa

SEQ ID NO: 516101 - DNA, 100 bp, Homo sapiens
gagccgtgagagcctcaacgtggacgtggtcaagtacgagagtggccctgacggaggggaggaaggggtccactggacggggcctgagctacaacttcac

SEQ ID NO: 516102 - DNA, 98 bp, Homo sapiens
ttcagcatggctcatattctacttcattcagaagatcaggtacacaaatgcacgcgacaggaaccaggcgaggcggtggccagcgccatgcattcctc

SEQ ID NO: 516103 - DNA, 101 bp, Homo sapiens
ggcagtatccttggggcactgtgcagggtgcctggtggtgctagctcctcccacctcagcacctgctgcatctggagcagcccaagcctcaggatggacaa

SEQ ID NO: 516104 - DNA, 82 bp, Homo sapiens
ctgcgtcccaacatccccaactggtggcagagttatgagggtgtccgcaatgttgccagtgtctgtctgcagattggctacc

SEQ ID NO: 516105 - DNA, 50 bp, Homo sapiens
ggtgaagtaacacagaaggatgtttactcctggcttgggggcattaggaa

SEQ ID NO: 516106 - DNA, 73 bp, Homo sapiens
tgaaaaatttgagaaggaggctgctgagcctcttgataggagtgggatagatatcacagattttcaggccaaa

SEQ ID NO: 516107 - DNA, 83 bp, Homo sapiens
cccagcgccagtagtgacaggggcgaacgccgccgggagactccagccggcgggcgagcaggtgccagcgccacagcccttca

SEQ ID NO: 516108 - DNA, 98 bp, Homo sapiens
aagctccaaagtccttcagcttcgactattcctactggtctcatacctcagtggtgtaaattggtccaatgtaacttgccaggcaactcagaaaaaac

SEQ ID NO: 516109 - DNA, 83 bp, Homo sapiens
ctgtttgtggctctgcagggctgtatgatgccccttggtgtggccactgcaaggctctggcccctgagtatgccaaagccgct

SEQ ID NO: 516110 - DNA, 90 bp, Homo sapiens
gagccaggaactgcgcagcctcttcgagcgccgcggacgcgtcatcgagtgtgacgtggtgaaaggccatcagcatcagcaaagccatca

SEQ ID NO: 516111 - DNA, 98 bp, Homo sapiens
agtccatgatggaggcagaggtaaacttggagagaaatgatgtgctcacgggtgccctctgaacagtcttctggtacctctctcttgcctaaagacgg

SEQ ID NO: 516112 - DNA, 83 bp, Homo sapiens
gcggaggcagaggtggaggcgctttgaaagtcattgaaattatgagactatcattcaaatggaagcattatagttcttcggaa

SEQ ID NO: 516113 - DNA, 118 bp, Homo sapiens
ctcaattacacttcgactctcaaagcaataccaggatagctgttgtttcagagaaaggaactgtggctgcaccatctgtcttcatcttcccgccatctgatgagcagttgaaatctgg

SEQ ID NO: 516114 - DNA, 90 bp, Homo sapiens
aaaacaacatctttccagaaagagattgcccctgcggaaggcccagacgtcagcgaaaggatggtcatcatcaccgggccaccggaagcc

SEQ ID NO: 516115 - DNA, 99 bp, Homo sapiens
agccctctccgtggtctgggaccgccacctgagcatctccgtggtcctgaagcagacataccaggattatgttgacaaagagaaggcaattgccaaagc

SEQ ID NO: 516116 - DNA, 74 bp, Homo sapiens
cagtgtctcccaccagagcacggaacatgaaggactttgaaaatcccaacagcatggtggtggaacaccccgag

SEQ ID NO: 516117 - DNA, 100 bp, Homo sapiens
caactggattgtagctgcatatgcccattttgctgtgtgttacagaagtgtatgctgacttgtaaagtgaagaagccagtggtgctgcgggtgttctttt

SEQ ID NO: 516118 - DNA, 90 bp, Homo sapiens
cacctttcctcaggagtcatttctgttccgcacaggcctgctgaactgggtgctttatataggagaatgtaactggtcactacatttccc

SEQ ID NO: 516119 - DNA, 50 bp, Homo sapiens
ccgggctcgggggagcgtgagttgcagccaatgttttcagttgcaccaag

SEQ ID NO: 516120 - DNA, 100 bp, Homo sapiens
gggaagatggcggagctgcgcgtgctcgtagctgtcaagagggtcatcgactacgccgtgaagtaagactttgaccccgacgcaggcttcagtgattgcc

SEQ ID NO: 516121 - DNA, 80 bp, Homo sapiens
ccaagaagggccttactccttcacagatcggtatgataagtattatcagcaacataatagttctgggcatcttcattaag

SEQ ID NO: 516122 - DNA, 100 bp, Homo sapiens
gactgaggaaccccagcgactcttttatgatgacggtcgaaccaaacccattccaaagaagggtactgtggagggctttgagcccgcagacaacaagtgt

SEQ ID NO: 516123 - DNA, 100 bp, Homo sapiens
cggcctcccagagtgttgggattacaggctgggaagagatgctgatttctgcgataaaatcagtaggtacattttttggaatgttcgctatgtgccaggc

SEQ ID NO: 516124 - DNA, 100 bp, Homo sapiens
agcccgctgccttgtggaggagttgagaaaaaccaagggcaagatgatgatgaatgaagtcctggcagcttcctgtgtcccaggccttgtagaaataaat

SEQ ID NO: 516125 - DNA, 74 bp, Homo sapiens
tcggatgagcttggcatttcccaggatgagcagctatccaagtcaaacactcttgcactcctgtaatgagcctg

SEQ ID NO: 516126 - DNA, 93 bp, Homo sapiens
tccccctctccgccccccaggaggggcgagagggagccgcagctgatgtcagggtaaatgggaagttggtagctctgaaggtgatcaggctgc

SEQ ID NO: 516127 - DNA, 75 bp, Homo sapiens
tgaactgctccgatcccactagtgagaggtggacccaagtggagagattgtggaactggcgaaaggtgcatgtcc

SEQ ID NO: 516128 - DNA, 101 bp, Homo sapiens
gaggatggaagggcaggacgaggtgtcggcgcgggagcagcacttccacagccaagtgcgggagtccacggagctgacatggacccaaatcctcgggccgc

SEQ ID NO: 516129 - DNA, 75 bp, Homo sapiens
ctgcttatggcggcgctggagagggggcgctgagctgttgggaactgaaggcagaagctagtctaatggaccaga

SEQ ID NO: 516130 - DNA, 100 bp, Homo sapiens
caactgatcctcaccccatcaaaatcactcaggtgcgcgtggaattcatggacgacacgagccgatccatcatccgcaatgtaaaaggccccgtgcgcga

SEQ ID NO: 516131 - DNA, 96 bp, Homo sapiens
ctcgcctctctacagcttcctgcccaacaccaaaactgtgttctcttggcaacagatgtggcagctcggggtctggatattcctaaagtccagcat

SEQ ID NO: 516132 - DNA, 78 bp, Homo sapiens
cagaagacaggtgatttctgcatttccgactgagttgctgatatgtgttcaagatgagtgggatgggagaaaatacct

SEQ ID NO: 516133 - DNA, 100 bp, Homo sapiens
gtcgtctgcgaccgctgccttctcgggaccctgctttctcggctgtgattcacgacaaactccaggtccccaacaccatccggaaggcatggaacgaccg

SEQ ID NO: 516134 - DNA, 50 bp, Homo sapiens
aggacactgaagatcacagactttaatgacagttcggactatcacaggaa

SEQ ID NO: 516135 - DNA, 75 bp, Homo sapiens
ctgatgcccgttccatctatgttggcaatggagctgtcaccatgcctcactcgtacccagccctttctgctgagc

SEQ ID NO: 516136 - DNA, 74 bp, Homo sapiens
ccaactgctgtgctgtgctctgtggccccctacctcccagcgccaaagataacttcacctttaaatgtcatcga

SEQ ID NO: 516137 - DNA, 75 bp, Homo sapiens
cctgtctgagtgctactttaaatttggtgtgaaggaagccggtgagaagcctcggggagcacagatggtggacaa

SEQ ID NO: 516138 - DNA, 116 bp, Homo sapiens
tagcgtctgcaccttcagaaacagtgctgaagcctttaaatgcagcatctgcgatgtgaggaaaggcacctccaccagcaccagcagacgtttttgaatcaactgagagaaattac

SEQ ID NO: 516139 - DNA, 100 bp, Homo sapiens
catgctgagctgtgccaggcaggatccagccaaggcctctccctctttgatggagaaccttgtgacctgtctttgaatataacctggtatctgaaaagcg

SEQ ID NO: 516140 - DNA, 98 bp, Homo sapiens
gctcccatccctgcagcatgaacaagcatcaacaacagcaacttgtgattggcggtgaccggatattcagttgcacatccccacatcaatgcactgcc

SEQ ID NO: 516141 - DNA, 101 bp, Homo sapiens
cattctattcatgttgctttttgatggccatggcataaggaactctatcccaggaatacagctttgcattaggcatagaatgtcaagctaaccaggcgtcc

SEQ ID NO: 516142 - DNA, 83 bp, Homo sapiens
agaagttcaacatggaccccgccaagttaccggtattgtaagaacaagccgtacccaaagtctcgcttctgccgaggtgtccc

SEQ ID NO: 516143 - DNA, 75 bp, Homo sapiens
agtacaacagcggcgtcatctgtgagaacacctgcaaaactcagcctcctcccaagctccctgtgggtcctagcc

SEQ ID NO: 516144 - DNA, 97 bp, Homo sapiens
ttccgcgttttatccccgtaccagaaaaggatacatttagtgcctcccacccagctccactaaacgggacccgtcgccatgggccgtgtgatccgtg

SEQ ID NO: 516145 - DNA, 90 bp, Homo sapiens
tcgagcagatcgacaagtccgggagctgggcggccatttaccaggagccaaaaacctgtatatcatctccgtgaaggggatcaagggacg

SEQ ID NO: 516146 - DNA, 83 bp, Homo sapiens
cgactctcggcacctggcctccagctttcgacctccttgaggcccgccgcccgcgggcccacgagtgcctgggtgaggctctg

SEQ ID NO: 516147 - DNA, 98 bp, Homo sapiens
ggatgatgatgtcatcctgacagaagtactaagaggtcaacagtatggaaggagctgtgatgtatggagtgttggctgtgctattatagaaatggctt

SEQ ID NO: 516148 - DNA, 101 bp, Homo sapiens
ggaggaagagggaagccttgagaatgccgacagcacagccatgaggaactgcctgagcaagatcaaggccatcggcgagatccaggtccagagagcatcgc

SEQ ID NO: 516149 - DNA, 128 bp, Homo sapiens
cagtacattaggaaacatgctagaattacctggaacttcatcatcatctacttcacaggaattgccatttgaatgtatcctgtcaggtataatgtcagtgaatggcaagaaagttcttcatatggatc

SEQ ID NO: 516150 - DNA, 97 bp, Homo sapiens
tgtgacctggccgatgaggaagtactgagcctgttggaggaactggcccggaaacaggaggacgctgaaggtgatgtggccgccctcaaccgacgca

SEQ ID NO: 516151 - DNA, 101 bp, Homo sapiens
cgctgacagcagccatcgaggcgagccagagcctgcagtcccacacgaaagagacatcgggaagattctgatgtggaaatggtggaagatgattcccgaaa

SEQ ID NO: 516152 - DNA, 113 bp, Homo sapiens
gttcagtcaggtggcaaaaacattgaacttgctgtcatgaggcgagatcaatccctcaagagatatactgccattggagaactggggaaagctactgatacactagattctac

SEQ ID NO: 516153 - DNA, 97 bp, Homo sapiens
cttgacccaatctgtgctactggggaacaccacctccccacccctcaaccagtctcaggcccagatgtatctacggacgctgttggaagctctgact

SEQ ID NO: 516154 - DNA, 99 bp, Homo sapiens
gaaaattgtaattgccagatatgggaaagttttcagaggaaataaggggaaaaaagttgttccatgtagacatgactggcatcagactggaggtgaagt

SEQ ID NO: 516155 - DNA, 50 bp, Homo sapiens
aagcaggaacataaactccatgttctggagtccaacctataccttctcag

SEQ ID NO: 516156 - DNA, 98 bp, Homo sapiens
tttgagcccggaagcgcagaagctggcgggaggcagcaccgggctcttgatggacttggcagccaatgaaaaggccgttcatgcagacttttttaacg

SEQ ID NO: 516157 - DNA, 50 bp, Homo sapiens
cccgcaactacctggaacctgaacacaccacagccatcagcactggaatg

SEQ ID NO: 516158 - DNA, 82 bp, Homo sapiens
cgccgctctccagcccgcttgaacggatctctctaggagctgacactcgaaccttcacgacccattcggatttttccaggac

SEQ ID NO: 516159 - DNA, 80 bp, Homo sapiens
atctacaagagcgcacctgcccgttcctatgtcctgcgattccaactccacagagtgaccagagagaggacgtggctgaa

SEQ ID NO: 516160 - DNA, 82 bp, Homo sapiens
gtgatcacagagcctatttacccagaagtagtccatatggtgggaatttgaagaatctgaagaagatccagtgacaagtatt

SEQ ID NO: 516161 - DNA, 101 bp, Homo sapiens
cctacagcagcttcggcggcggcagaggatgccgctcctacgaggactgctgtggctccaggtgctgtgtgcgggccctctccatacagaggctgtggtac

SEQ ID NO: 516162 - DNA, 82 bp, Homo sapiens
tacggagcacgagaaatacggcgtggatcaaggatctggattttgcataactggtaaaatagaagctggttatatccaaact

SEQ ID NO: 516163 - DNA, 107 bp, Homo sapiens
cgccgcatctccttcagcgcgagccaccgattgtacagagcccacacgtgtatccctgagaacaacggaggcgcggggtgcgtgtgccacctgctcatggatgacgt

SEQ ID NO: 516164 - DNA, 101 bp, Homo sapiens
tcaagaaatgctcagccttccaattttttaagaagcggatagtttctaatggtgatgaacaattggaaaaagccatggaagagattttgagagattccgag

SEQ ID NO: 516165 - DNA, 83 bp, Homo sapiens
ctaccggcggctggagacgcagagaggctatgactttgcagccgtcctggagtggttcgcggagcgtgtggaccgcatcatcc

SEQ ID NO: 516166 - DNA, 75 bp, Homo sapiens
cttgtacatggctccccattggtttttggagaaaagttcaagctttttaccttgcttcaagcacatttaattcct

SEQ ID NO: 516167 - DNA, 83 bp, Homo sapiens
cctggccttcggaacgctcctctgcattgccattgttctgagacattttgagttcgtatgaggttgtccatcgaatcctcaaa

SEQ ID NO: 516168 - DNA, 83 bp, Homo sapiens
tacacagtgttaacaatgcatccacagagtgtgacatttgtatgtgcagtatctctgtatttgaagaccctgtggatatgccc

SEQ ID NO: 516169 - DNA, 100 bp, Homo sapiens
ggacggatcaccgtacggccgaacgcgacccgaggaggcggaagagcggcgccggtgtcatggagaaactccagctgggcccagagattctgcagcggga

SEQ ID NO: 516170 - DNA, 98 bp, Homo sapiens
tttctccttgtgctggatctacagagcgaacgggagaaccctctgcttcctcagattcaactgggaaggaaaaggttgtaatgggagagttgttccta

SEQ ID NO: 516171 - DNA, 100 bp, Homo sapiens
tttagtggacggcatctttttgaaccaaattatgctgcaaatgaacttgacaagaggagtcggaagatttagagagcttctcagagcagttgaaacaaga

SEQ ID NO: 516172 - DNA, 100 bp, Homo sapiens
cgagaccgtgaccgagagcgtgaccgagagcgcgaatatcgtcatcgttagaaggtcaacctggactcctacacgcgggagcacaccaaggacaacctgc

SEQ ID NO: 516173 - DNA, 100 bp, Homo sapiens
ggacgttcggccaagggaccaaggtggaaatcaaacgttaacgtccctaaaacccgccggactttctgtaagaagtgtggcaagcaccaaccccataaag

SEQ ID NO: 516174 - DNA, 80 bp, Homo sapiens
ccagtcagggacagccgtggagagaccagggaccagtactatactggcaattgctggagaagattttgcaattgttgctt

SEQ ID NO: 516175 - DNA, 75 bp, Homo sapiens
tctacattataccaataacgaggccctggccaacgtcaacattgggagcctcatctgcaatgtaggggccggtgg

SEQ ID NO: 516176 - DNA, 90 bp, Homo sapiens
acaatttctgcagctagcaaagttttacatcagaatggtgaggttctggagaattgatgaggattatccagtgcaagttgcacctttgag

SEQ ID NO: 516177 - DNA, 100 bp, Homo sapiens
gacgctccgcagcccgcccgccagccggcccgccggccgccgcaggtggtgatgatgtccagcaactctgtgaagcaggagaagaggagtttttggaaat

SEQ ID NO: 516178 - DNA, 90 bp, Homo sapiens
atggagctcgagaacatcgtagcgaacacggtgctactcaaggcccgggaaggaggatgtcctcaacacccagtgtggctacgacgtccg

SEQ ID NO: 516179 - DNA, 80 bp, Homo sapiens
gctcggcgaatattgcagtctttagagaagatgtcaagccctttagcggcggatctcctcctcctttccagcagtgagcc

SEQ ID NO: 516180 - DNA, 100 bp, Homo sapiens
gagcaggcggcccagctgcggaacctgccgcctaaggacgacaagaagaagaaggacgctggaaagtcggccaagaaagacaaagacccagtgaacaaat

SEQ ID NO: 516181 - DNA, 98 bp, Homo sapiens
gacctcgggggacagctccaagggggaagataagcaggatcgcaacaaggagaagaaagaagcgctgagcaagtcttctcacaagactttcaggatta

SEQ ID NO: 516182 - DNA, 101 bp, Homo sapiens
acagtcaagatagttcttcagtaggttcaaactctttagaagatggccagaccttggggaccaagaaaagcagcagtggatgaaactcagtttaagaagat

SEQ ID NO: 516183 - DNA, 82 bp, Homo sapiens
gagatggtgcagaagatggaggagaaccttcgagatctgcggtctggggtctggttgaaagatggcggccctcactaccctg

SEQ ID NO: 516184 - DNA, 80 bp, Homo sapiens
ccgtcgcacccaccatgatggaagacgacgggcagccccggactctaacccagcgggtgccgcttctccacccgaggctt

SEQ ID NO: 516185 - DNA, 74 bp, Homo sapiens
ccacggaggagccaggtccctgtctgagccagaagagagaagggcacagttacctaagtatcaacgtaatcttc

SEQ ID NO: 516186 - DNA, 75 bp, Homo sapiens
cggggcagcgcaccggcaggcggatggactttctggccgagaccagccagtggagctgctgaatcctgcccgcgt

SEQ ID NO: 516187 - DNA, 75 bp, Homo sapiens
tatgggtcgaccattccaaaaaaatcgttgccattgccccaaatggagccttacagttggcaagtccaggcacag

SEQ ID NO: 516188 - DNA, 83 bp, Homo sapiens
ggccctcggcagcgatggcactgaaggactacgcgctagagaaggacaatgcagatcttcgtgaagactctgactggtaagac

SEQ ID NO: 516189 - DNA, 98 bp, Homo sapiens
acagaaaggagtcactgccttctaacgaaagggcagtacagactttggcaggtgtccgcaaatatggtaaagattttcaagctattgcagatgtaatt

SEQ ID NO: 516190 - DNA, 74 bp, Homo sapiens
agatgtacagacacaagcgggccaacaaatagcctgagcggtgcatccccgttcctgggcgagaccaagcagga

SEQ ID NO: 516191 - DNA, 99 bp, Homo sapiens
acatgatgtggttccagaggcacgaggagcccaagaccatcactgacgagtttgagcagtctcggaagggtgctgacctggaccgggagaagaaggctg

SEQ ID NO: 516192 - DNA, 75 bp, Homo sapiens
ctcttcctcctggccagcctcctgggcgcgggaaacccagcgtttgctggcagaaccagttcctggcatcaaagc

SEQ ID NO: 516193 - DNA, 82 bp, Homo sapiens
aatcttcaatgagtaaacatattcctggacccagacatggagctgcgggaagaagcctggtctccggggccgctggattctg

SEQ ID NO: 516194 - DNA, 83 bp, Homo sapiens
caacatgcctcaccctcatctatatcctttggcagctcacaggaataaaggttggggagactacacctgacaaacttttcact

SEQ ID NO: 516195 - DNA, 97 bp, Homo sapiens
ccgcgccgcatggaggccggctgaggagcgccgctgcctcgcctcggagttccccttggccattctcaggggctgggaatgctactgtgcttaccct

SEQ ID NO: 516196 - DNA, 100 bp, Homo sapiens
cagcaggcccgagcccaccgcgccgggccccggacgccgcgcggaaaaggcagttatacttaagcatgaacattgacgacaaactggaaggattgtttct

SEQ ID NO: 516197 - DNA, 100 bp, Homo sapiens
tagcgatctatattccctttccagaagatgattccaacgccaccaattccaacctgaatgtcgtactctcaggaggctccaccatgttcagggatttcgg

SEQ ID NO: 516198 - DNA, 100 bp, Homo sapiens
ctgagatggagctgcgccgaggccagatcctctggttccggggcctgaaccgtatccagactcagaatgaactctggaagcccagccagggacaatgcac

SEQ ID NO: 516199 - DNA, 100 bp, Homo sapiens
tgccagtgtttccacaatggaaccaattgttttacagtctgttccacatgatcattgtaataagggggtccactggacggggcctgagctacaacttcac

SEQ ID NO: 516200 - DNA, 98 bp, Homo sapiens
agaaccggcacggcctcgtgcccttcgccttcgtgcgcttcgaggacccccggaagagagaagggcacagttacctaagtatcaacgtaatcttcctc

SEQ ID NO: 516201 - DNA, 51 bp, Homo sapiens
tctccttctggtgtggggcccgagctgacatgggctcattgctccttctcc

SEQ ID NO: 516202 - DNA, 99 bp, Homo sapiens
gcagcatgtcaatgaccagaaagaccaggaaggaaaatcacctcggcagtgtttgaaggaaggatactgcaactctttgaagtacgcattttttgagtg

SEQ ID NO: 516203 - DNA, 90 bp, Homo sapiens
agcagccaatccggccatgctcgaagccagctctgcagctcagccaatcagtgacatcattgatcaaatgatgccgtttggaaaaatttc

SEQ ID NO: 516204 - DNA, 100 bp, Homo sapiens
ggaagaatggcagtgctcaaactcaccgaccagttttcataccttggtcctgaccctgtccataagctgctcacactggtggtggatgatggcattcaac

SEQ ID NO: 516205 - DNA, 98 bp, Homo sapiens
agagaggcgagcaccgggaaggggagcgtggggccgctgatatatttttgccatcatggatcagtttggagatatattagaaggtgaagtggaccatt

SEQ ID NO: 516206 - DNA, 100 bp, Homo sapiens
cagcccgcccgaccccgtcccgaccctggccgccccgagcggagcctggagggccaattcctgtccccccagcagcatggcatcgtgtgctgaaccctct

SEQ ID NO: 516207 - DNA, 100 bp, Homo sapiens
agtggcgctttcagtcctgtctgtacttacttgaacagagggaggagatcagaggctatgaccagggccagagcactcagatctcagtcagaggagtctg

SEQ ID NO: 516208 - DNA, 90 bp, Homo sapiens
ccatggggaaccacttctggatcaagcagtgcattgagccctctgggatgagtctgatgacagtaactcagaaattgaggctgctttacg

SEQ ID NO: 516209 - DNA, 51 bp, Homo sapiens
ctgatcttaggggaacaaatagttactgtaaaatggggaaaggagaaattt

SEQ ID NO: 516210 - DNA, 90 bp, Homo sapiens
cgacagtggcggcggcgccatggcagggcttgcagatcaggatcctcatgaccagccaaagagaagaagaattaggaagcataaatcaaa

SEQ ID NO: 516211 - DNA, 90 bp, Homo sapiens
caaagaacaaattgcagttgtttgagtgttatagttttgccgctggactcttccctcccttcccccaccccatcaggatgatatgagact

SEQ ID NO: 516212 - DNA, 50 bp, Homo sapiens
gtacatctgaaagccgggaaatgcactttgtcagcgagcgtaaatatgac

SEQ ID NO: 516213 - DNA, 100 bp, Homo sapiens
caacacctttggaggaggggtgtttctggccacgtgcttcaacgctctgctgcccgctgtgagggaaaagatgctggagcacccacctacatgtatgagt

SEQ ID NO: 516214 - DNA, 90 bp, Homo sapiens
acctgtcgggtagaaacctcagtgaagctataaggaagaccagatggatgagaaactaatggaacctctgaaatatgctgaacaacttcc

SEQ ID NO: 516215 - DNA, 75 bp, Homo sapiens
gtggacatctgccacatgctggttcagtgtaaacaggaacatcgataagtagtgtaaaaacttgcacaatgaaat

SEQ ID NO: 516216 - DNA, 75 bp, Homo sapiens
atgtcttctgcttccgatataagatccaggccaaaggcctccccatggccacccatggaccagtcggcattcact

SEQ ID NO: 516217 - DNA, 82 bp, Homo sapiens
caataccttcaggaacattctggctttggcgctcacttctctcccaggcttctcacggcattcagcagcagcgttgctgtaa

SEQ ID NO: 516218 - DNA, 100 bp, Homo sapiens
agctgcatgacggtgtcctgtcctcggcagcgctaccctgccaactgcacggtgcgggaccacgtccactgcttggccctgttcaccatgggcggcaacg

SEQ ID NO: 516219 - DNA, 50 bp, Homo sapiens
gggagattctgctcacggaactgcaggttcttccaggttggaaagagaat

SEQ ID NO: 516220 - DNA, 100 bp, Homo sapiens
gctgccgccgccagggtctgcagggcctgggccgccgctgctacctgcagcgccgtgtggcacgacacaaaaatcaggctggtgtgcagtggtgcgacca

SEQ ID NO: 516221 - DNA, 82 bp, Homo sapiens
ccgtgcgggacgcgggcgccaggaccggccgaacgcagagaataccctctaccatctgctttggtcagggtgccgctcgagg

SEQ ID NO: 516222 - DNA, 75 bp, Homo sapiens
gtggagaggtcggctcggaaggaaaagatgagaattctccagccaacttctgggattctaagaacaggggtgtga

SEQ ID NO: 516223 - DNA, 75 bp, Homo sapiens
ccctggtggacgtgcacccagaggaccaggcggcggtggtgttcccactgatgaagagcaggcgactgggttgga

SEQ ID NO: 516224 - DNA, 98 bp, Homo sapiens
gggcgctgggccgggtttcggcttcggccacagggccgagatggacgaaaaaatgtggttccttgtgttctctctgtaaatggggacctagaccgagg

SEQ ID NO: 516225 - DNA, 101 bp, Homo sapiens
tgtgaggacgcggcagcccgtggagtcggctgagggaaaagcgaggcaaggcaggcggatgcctgtgaggagccaccaacatttgaagctatggagctcat

SEQ ID NO: 516226 - DNA, 121 bp, Homo sapiens
gctgtttctctcaccgttcccctgcttggagccatgatgctgctggaatctcctatagatccacagcctctcagaaactggcgatggaatatgagaggagccctctggaaagaaaaggaca

SEQ ID NO: 516227 - DNA, 51 bp, Homo sapiens
gggagccccgggagccgcacggtctatcagatcatcaaaactctcagaaaa

SEQ ID NO: 516228 - DNA, 74 bp, Homo sapiens
tcctgtagaggaggctggagattccacccaaatcctcttctccaagaagatcctgtttgaccaaactcagagat

SEQ ID NO: 516229 - DNA, 82 bp, Homo sapiens
cccagggagccagtttatgtatgttgtagacacaagaccaaagcaagatggattctggatatactctgagtattgtaacaac

SEQ ID NO: 516230 - DNA, 100 bp, Homo sapiens
aggacttcatccacgcctttcagccaaatgccagactgattgtcatgctcagggaccctgtggagagacctgcctagagctggaacgttacctccagagc

SEQ ID NO: 516231 - DNA, 101 bp, Homo sapiens
gcagccctggtggacatggtgaatgacggcgtggaggacctccgctgcaaatacatctccctcatctacaccaactatcccatggaggtgtttgtggacga

SEQ ID NO: 516232 - DNA, 100 bp, Homo sapiens
acattttcttcgcagattgagaatacacccatcctgtgtccttttcatttgcaaccagtgcctgaggacatggcttgcagtgtggcaggcataacttctg

SEQ ID NO: 516233 - DNA, 89 bp, Homo sapiens
ccgagttgccgccggagaggagtggcctcgcccgcttggaagcacaagcctatgcagacgacaacagtttgctgttcatggagacatca

SEQ ID NO: 516234 - DNA, 88 bp, Homo sapiens
gccggcccgcctccctggccggggcgcagttcggaggttcagtggccggaggctgggagacccagtacatgtgctgctcggctgccgc

SEQ ID NO: 516235 - DNA, 75 bp, Homo sapiens
tgttttaatgattcttccatatgtggcaattgtccaagaaaaggctgaccggttccctgatgtgttacctgcttc

SEQ ID NO: 516236 - DNA, 100 bp, Homo sapiens
gccacctgctgtcgggccagctgcccacggatcgtggctattttgaagagctgatcaccatgttggaagcagcactgggacttgagcgagctcacatggg

SEQ ID NO: 516237 - DNA, 80 bp, Homo sapiens
atgggctgcagaagaactagagaaggaccaagcaaagccatggactttgcctcccgggccaaactggcagttcaaaaact

SEQ ID NO: 516238 - DNA, 100 bp, Homo sapiens
tccaggtagacatggaggccgtcggggagacgctgtggtgtgactggggcaggaccatcagcttctcacctggggcgggtgggttctgcaccaccctccc

SEQ ID NO: 516239 - DNA, 97 bp, Homo sapiens
aatggtctcatcaaggtgaacgggcggcccctggagatgattgagccgcgcacgctacagtacaagtgctactatatcggggccacagatgatgcag

SEQ ID NO: 516240 - DNA, 92 bp, Homo sapiens
tgcaaactcaacttgctgggccggtgcaactattcgcagtccgagcggtatctcagatgaagacatcatcaacattactcttcctactggag

SEQ ID NO: 516241 - DNA, 74 bp, Homo sapiens
cacgctgtctctccccgccagttgcgggactgcgagaactacatcactctcctggagaggcggagtgaggggct

SEQ ID NO: 516242 - DNA, 83 bp, Homo sapiens
gtcggcgcgggagcagcacttccacagccaagtgcgggagtccacggacatgtatgatgagctgatgatgatcattggctccc

SEQ ID NO: 516243 - DNA, 74 bp, Homo sapiens
ggaagatttactttcgaagctataaggtgtccgcaatgttgccagtgtctgtctgcagattggctacccaactg

SEQ ID NO: 516244 - DNA, 100 bp, Homo sapiens
gttgattttggcctttcaagaatattgaagaacagtgaagagctccgagaaattatgggtacccctgaatatgtggtgcacacacccagaagctatgtcc

SEQ ID NO: 516245 - DNA, 100 bp, Homo sapiens
tcctaaaagcactactggtagaagttccaaatctaaagaggaactcgtaacattcagggatgtggccatagaattctcccctgaagagtggaaatgtctg

SEQ ID NO: 516246 - DNA, 95 bp, Homo sapiens
accaaggctggctcctcaagaaagaagcccgcagggccccggaccccggcttccaggagcgcttcttccagcagcgtctggaccacttcaacttc

SEQ ID NO: 516247 - DNA, 80 bp, Homo sapiens
gctggtgcagccaccctcgctccctctgctcttcctcccttcgctcgcaccatgaagtcccgggcccagagcccggccag

SEQ ID NO: 516248 - DNA, 83 bp, Homo sapiens
ccgctctgcgttttgttttcccctcggcactaggcagcggaggagcccgaccgacccgaacatccagtcatggataaaaatga

SEQ ID NO: 516249 - DNA, 90 bp, Homo sapiens
agtccttgaatggattgatgacaaagctcagccagacgtccaggatcccaccccttgcaaaagaccaggccgtggaagccatgttcccac

SEQ ID NO: 516250 - DNA, 90 bp, Homo sapiens
gtcctagctaaacttcgccaactccgctgcctttgccgccaccatgcccaaaacggctgacacaggcaagaatttagtcacgctccccaa

SEQ ID NO: 516251 - DNA, 100 bp, Homo sapiens
gagaattggaagctaaagctaccaaagacgtagaaagaaatcttagcaggtggtttcagacaccctcacaggttttctaccatgcagcaactgaacatgg

SEQ ID NO: 516252 - DNA, 82 bp, Homo sapiens
cgcgcctgaagtcggcgtgggcgtttgaggaagctggcaaaacaccgaattgctcataaaccgcattccaaaccaaaaactt

SEQ ID NO: 516253 - DNA, 83 bp, Homo sapiens
caggcccgcgccgccaccatgatgatttcacaaaagttcatcttcattgcagatacctgcctttctttctaggttgtatctcc

SEQ ID NO: 516254 - DNA, 74 bp, Homo sapiens
tttacttgctgtcagctgcggagggtggtggccttgtccatgtcacctgtggatgacactttcatttctgggtc

SEQ ID NO: 516255 - DNA, 75 bp, Homo sapiens
gcggtggcagtcagcagccggcagcagcagcggaatgattacggacctgaagccaaagaacaagatgcgctagtg

SEQ ID NO: 516256 - DNA, 100 bp, Homo sapiens
tccccggggccgcgggatgagccagaaatacccgcagcccaaagggcagaagaagaagaagatcgtcaagtacggcatgggtggcctcatcatcctcttc

SEQ ID NO: 516257 - DNA, 90 bp, Homo sapiens
aagacctgtaggaggatattcttcatgaagactagccctgcttgcaacttccacgtgcagtcctccgcaatgctgccagagcggcagcta

SEQ ID NO: 516258 - DNA, 74 bp, Homo sapiens
gctgcaggaggccaaggacggcgttctggatctcaaagcgtctctggatggtcgtcagatccgtgtggatcatg

SEQ ID NO: 516259 - DNA, 75 bp, Homo sapiens
ggaaggtgcgcgagctggtggacaaagcctgttttcactcattagctcctgaggtaaacaaattgaaaaaatgag

SEQ ID NO: 516260 - DNA, 98 bp, Homo sapiens
catctccaaggtggcacgcgtggcggcggccgaggagagcaccgggaaagcctctattagaggatttcctacaatcaagatatttcagaaaggcgagt

SEQ ID NO: 516261 - DNA, 88 bp, Homo sapiens
gcttgagcacctgaccaaaaagatgctgtatgacatggaaaatccacctgctgacgaatactttggctgaagaaatgtcaacaattgg

SEQ ID NO: 516262 - DNA, 100 bp, Homo sapiens
cgagaccggattgcctcaaggatgtcatatctatgagtaccgcgagagcaacaaccctgtgtgtccaaatgctgggagaacatcaccccttggatgaatt

SEQ ID NO: 516263 - DNA, 75 bp, Homo sapiens
gaggcaccatcgggctgctctatgtgtttggacagagtatccggtctaaagtggagttgtcagtctgggatcagc

SEQ ID NO: 516264 - DNA, 90 bp, Homo sapiens
ctaaagtcgcacctgcggacgcacacaggtctcggcgcggaagatggccggcggcgtggacggccccatcgggatcccgttccccgacca

SEQ ID NO: 516265 - DNA, 75 bp, Homo sapiens
tccaaagctgggaatcctattttttattatgttgcacggagtgaagcgtgacattcaggaaaacgatgaagaggc

SEQ ID NO: 516266 - DNA, 96 bp, Homo sapiens
ttaaccctcagcctcagagtcagatgcaggggcctggtctggtgcagcgattccggccggacttcaaacgcaagtttgcagacttctttgaagatg

SEQ ID NO: 516267 - DNA, 75 bp, Homo sapiens
atacatccaggaaagacatggagattctcttaaaaagagaaagcatgggattatggcaaccacagaatctcagta

SEQ ID NO: 516268 - DNA, 75 bp, Homo sapiens
tctttgaatctcgtcctgactgtctaccccaggggatcccaacaagccctcaggattcagaagtgttaaagctcc

SEQ ID NO: 516269 - DNA, 46 bp, Homo sapiens
gctgtctcagcagtctacagcacggaacagcatatgccatatatga

SEQ ID NO: 516270 - DNA, 100 bp, Homo sapiens
tcaaacccaacaacacgcaaccagccggagcggttgcagggcacacattactcggtgcagtcggacatctggagcatgggcctgtccctggtggagctgg

SEQ ID NO: 516271 - DNA, 74 bp, Homo sapiens
gcggattcgccgaggcaccgaggcactcagaggaggcgttcccgttgcccgctctctcccggaagcagaggacg

SEQ ID NO: 516272 - DNA, 98 bp, Homo sapiens
tcctgggaaaaatggggaagctggctgttcgctgctatgaatctctaatcttaaaagctgaaggaaaagtggagtctgatttcttttgtcaattaggt

SEQ ID NO: 516273 - DNA, 75 bp, Homo sapiens
cgcgtctccgcgttcccagcccgggtccccgcgttcacagccccagcgcaggttccttcaatggtgccttagctg

SEQ ID NO: 516274 - DNA, 90 bp, Homo sapiens
gatggacctgttgaactatcagtacttggacaagatgaacaacaatatcggcattctgtgctacgaagaattcagaaggagctggcggac

SEQ ID NO: 516275 - DNA, 75 bp, Homo sapiens
gttgagagacagaggcaccccggacagagacgtgaagcactgaatggactttgaacatgtcggggatcgccctca

SEQ ID NO: 516276 - DNA, 75 bp, Homo sapiens
ccgagaccgcggccgggaccgaggtcaggatggctaaaggtgaccccaagaaaccaaagggcaagatgtccgctt

SEQ ID NO: 516277 - DNA, 83 bp, Homo sapiens
cccagatgcccaccgggatggagaaggaggaggaatcgcaaattgtggctactaatttgccccctgaagatcaagatggctct

SEQ ID NO: 516278 - DNA, 96 bp, Homo sapiens
gttcttgtgaggctgagggtctgggtcaccacgttctgcgcttttccgagtcggacatatgagcagcgtggagctggatgatgaacttttggaccc

SEQ ID NO: 516279 - DNA, 90 bp, Homo sapiens
ctcacgggatcccgaggctgaagaaatagaagctgaatatgctgcattagacaaacgagagattagtgggatggtttggccatgaactca

SEQ ID NO: 516280 - DNA, 100 bp, Homo sapiens
caagaccgacctcaaccccgacaacctgcaggatgaccattctgccccccttggagaaactgcggctgctgctggagaagctgagcaggttccatgccaa

SEQ ID NO: 516281 - DNA, 102 bp, Homo sapiens
catcgtggtggaggcggcctctctggcagcagacatcagccacgcatctgaccttgttgctcgggttcatgacgctctcgatattcctgtgcagaaacctgg

SEQ ID NO: 516282 - DNA, 100 bp, Homo sapiens
cccagctgaaatggactggcccccttgagcctgtcccaagccctggtgccaggtgtccatccccgtgctgagctcatttagaggcgagttttgaggaggt

SEQ ID NO: 516283 - DNA, 50 bp, Homo sapiens
acccacggagcctccggggctggtctgaaggggcgtctcgattacctgag

SEQ ID NO: 516284 - DNA, 100 bp, Homo sapiens
gcatcgtggaggccacctctaggcttaagaccttcaacttgatcccggctgttgggcaattgaaggaacagactaaaaatcgtgtcctggaaggaaacta

SEQ ID NO: 516285 - DNA, 98 bp, Homo sapiens
accaggactacagtaaggctgaaatcattgaagtgcttggagtgcagaactgaaagagatctgaacagaattaagacgaacgagctttcacaattgca

SEQ ID NO: 516286 - DNA, 100 bp, Homo sapiens
tcccgaggtcatcttgaattggatgcgctacacgcagacggacacgatgaggcgagtggtacgacagagcaagtttcggcatgtatttgggcaagcggtg

SEQ ID NO: 516287 - DNA, 90 bp, Homo sapiens
gcacgaggggccttcgccaccacgcactgggtcgtcacggaggacgggaaaatccagcagcagttataggtgcacagcgaaggagaagcc

SEQ ID NO: 516288 - DNA, 100 bp, Homo sapiens
ccctgcatcctaagactcgaaggcagcacaggacctggaaaaattacatggtgagcccatcactttctgtgaggagagttttgtaaagcaccgctcaagc

SEQ ID NO: 516289 - DNA, 100 bp, Homo sapiens
gtggtgatgcaagaagtttctaggaaaggccggacaccagatccggcactccacccagagcctctttgagtacatgaagggcattcagagcgacccgcag

SEQ ID NO: 516290 - DNA, 100 bp, Homo sapiens
cacataacaagcagcagtgaggacaccaaagcactcactgaaaatgaccgagacagccagtcgccgttgaggaatcctctgttgtcaacatcgagacccc

SEQ ID NO: 516291 - DNA, 51 bp, Homo sapiens
gagaaatccagagttgtctttcaaggattccttgccgctggtgaaatcgat

SEQ ID NO: 516292 - DNA, 97 bp, Homo sapiens
gaggcagcagtggcagtccatcgaggggaccaaactctccatcacccaggatcaagaagctactctagaagtcggagcagaggatggtacagcagag

SEQ ID NO: 516293 - DNA, 90 bp, Homo sapiens
ctaaacccagatgccgaagggaatccatttgatcattttagtgctggagaatctggtacactggagccccatattttgcagcaatctcag

SEQ ID NO: 516294 - DNA, 82 bp, Homo sapiens
aaaacatcgagacgctgcagaacgcgggcagttgtgaaaaacttcaggacaaaaatgtttcatttaaggacttgtgctgcta

SEQ ID NO: 516295 - DNA, 74 bp, Homo sapiens
tcggcagcaagaacagagagagaggtggacagatctgagagatactgaggcatttccggagagttcttttgaag

SEQ ID NO: 516296 - DNA, 74 bp, Homo sapiens
gcggcgcggcggccccgggaccaaggaggagctctgtgtgtcgtctgagcagtcgcgagaagatttccctccag

SEQ ID NO: 516297 - DNA, 100 bp, Homo sapiens
aacgaggcggatctacgctgcatggccgtgccgcccaagtatcgtcacatgcaaaccttctacagtttcatggatttgaatgtgaacatctgttccctgg

SEQ ID NO: 516298 - DNA, 89 bp, Homo sapiens
tcccatcctcgctcccacctgtcagccttctaccccatgagaaagaccaggatgacgctgtcagtatagaaagtggtacaaacactgaa

SEQ ID NO: 516299 - DNA, 101 bp, Homo sapiens
acagtcgccaactgatgtctacaggagttccatctggaatatgacaaattagaagaacggcctcacctgccatccaccttcaactacaaccctgctcagca

SEQ ID NO: 516300 - DNA, 100 bp, Homo sapiens
atgcgggccaatatcacagccatccgcagagtccggaagacagacaataatcgcattgctagggtcgagctgtgcagttttagcgggtacaagatctacc

SEQ ID NO: 516301 - DNA, 83 bp, Homo sapiens
gctgtctgggcttcatagcattcgcctactccgtgaaggtgatgtgtccaatctagatcccaacttctcatttgaaggcacca

SEQ ID NO: 516302 - DNA, 100 bp, Homo sapiens
ccatacttcccccattgatgttttaatcttgacaacggatggatgttatgctatgattcttctgcacagtcagtatcctcgggagttcgtgcaccatctc

SEQ ID NO: 516303 - DNA, 90 bp, Homo sapiens
ctataccatctcttgttgatggtcgcccaagtccagccccacgacgcagtgccgactccccgccgtgcccccagcccggcccgggttgcg

SEQ ID NO: 516304 - DNA, 75 bp, Homo sapiens
atttgcaatccccttatgccataattgcttgccttttgtcactgctccgaataaatttgaagctctggctgctca

SEQ ID NO: 516305 - DNA, 90 bp, Homo sapiens
ctaaagtctgagagagggaagtcgcctctgtgctcgtgagtgcatggggtataaggacgtggccgctttggagagtcagcctttattagg

SEQ ID NO: 516306 - DNA, 83 bp, Homo sapiens
ctttaagatatgtgcaggatcaagttgcggcaccttttcagctcagcaaactgaaacttcaggccaaattcaaggagttgctg

SEQ ID NO: 516307 - DNA, 100 bp, Homo sapiens
ccttgtctcgctcgggagcggaaacagcggcagccagaggcatttgttgctatcggggactacaatggccacgtcggtctgggtgttaagtgctccaagg

SEQ ID NO: 516308 - DNA, 100 bp, Homo sapiens
ggctgaaattgagaaattggggcagaagtatcgagtggctctaagaaaggagaatcacttgaacccaggaggaggaggttgtggtgagccgagattgcgc

SEQ ID NO: 516309 - DNA, 90 bp, Homo sapiens
ccgcagccccccaacatcctgctcctgctcatggacgacgtgatggtaatgcccgaaggagcagacacggtgtccaggcccagtcccgac

SEQ ID NO: 516310 - DNA, 75 bp, Homo sapiens
agtttgccggccccagggcccaggtacctgcaccagtcaggggccctgaccatggaggccctggaggacccttcc

SEQ ID NO: 516311 - DNA, 100 bp, Homo sapiens
gtggtggcttgtggtgcggcctcaccatacaggaacagggcagacgttagcgtgagtgatcactctcaatcccggaagccagacctgccgcccccaccca

SEQ ID NO: 516312 - DNA, 74 bp, Homo sapiens
gagtgcctggcagatgagctcatcaatgctgccaagggctccacctgtgccttcacggaatgtatcctccgaag

SEQ ID NO: 516313 - DNA, 80 bp, Homo sapiens
atggtcagtgccgtttaacctttattgtggtggagtccaccccgctgtggttaaacactttaagatgagaaaaattgatc

SEQ ID NO: 516314 - DNA, 87 bp, Homo sapiens
taccagcaccataggacagccaagcaccaacaccatgggcatacataatcttgctgctatgcttcgaagctgtagtctgaatcaacc

SEQ ID NO: 516315 - DNA, 74 bp, Homo sapiens
aagactggagtccctgatggaattatgcagtttattaagttatggatgtacaagcattcgagaggcttctgggg

SEQ ID NO: 516316 - DNA, 50 bp, Homo sapiens
ctcacacttcagaatagagaaggtatatgaatgacctaaaggtacaaata

SEQ ID NO: 516317 - DNA, 100 bp, Homo sapiens
tgcttctccttttcatgagtgttcctgtggtctctgcacctcctttctatgtgacagacaggaagctgactatggaagaagaggaggccaagaggatagc

SEQ ID NO: 516318 - DNA, 50 bp, Homo sapiens
aaccaacggaggaaaagctaattggctctgtgtgctccgggatggagcag

SEQ ID NO: 516319 - DNA, 100 bp, Homo sapiens
tgtgcacaaatgaagatgtttccagccctgcctcggcggaccaaaggaacgagatgctggaggagggccaagaatatgctgtcatgctgtacacctggag

SEQ ID NO: 516320 - DNA, 90 bp, Homo sapiens
gcttcacgacagaaaagctttatggaaactgcaatggatgttggcatcacccagccaatgcctgtctgattcccatctgttctctgtatg

SEQ ID NO: 516321 - DNA, 88 bp, Homo sapiens
ggcaacgcgcttatcagcgctatgagaattaatcagctgtgttcagcgaatacttatgaacagaaggctccagcagcagtacaatcag

SEQ ID NO: 516322 - DNA, 50 bp, Homo sapiens
ggagatcaccaagtttgaggagcacggcagaagtgatagttcaagtaaga

SEQ ID NO: 516323 - DNA, 75 bp, Homo sapiens
agcgaacgccagggaccctgtgcaggcctgctcctccgtttgcaaggaaattgaacttagctcattaagggaagc

SEQ ID NO: 516324 - DNA, 90 bp, Homo sapiens
aagcccgtggaacaattcatcttaccagagcttttctgggagaagaggctacaaggacttagtgcatcagatgtaacagaacaaattata

SEQ ID NO: 516325 - DNA, 110 bp, Homo sapiens
ttgtaagtgaaaaaggggaagaaagagaatattgttcagttgattatgccagccagatgcagcctgggttactaggtgtctttcagaagctgattgcatccaaagcaaat

SEQ ID NO: 516326 - DNA, 50 bp, Homo sapiens
caagaacaagtccaagactccagagatgagatcctgttggaaagcaactg

SEQ ID NO: 516327 - DNA, 100 bp, Homo sapiens
gcacatatcaacacagatatgatcaagaatgctgcagccaatgtccttcgggaaacatggttaatctataaacacacaaagctgctaaagaagattgacc

SEQ ID NO: 516328 - DNA, 51 bp, Homo sapiens
agttggctgtgcagatccagaagccgaattaagaaagtggtttccatctac

SEQ ID NO: 516329 - DNA, 78 bp, Homo sapiens
agtgggtgtaatacatcatgaactgcaggagctaagcttgtctgctggatccctgcagctggagcgcaaaaggagaga

SEQ ID NO: 516330 - DNA, 75 bp, Homo sapiens
ccaatttctctattttgcaccagacctagtctttaatgaggccggtgcataaacttctcccgagttccatctcag

SEQ ID NO: 516331 - DNA, 102 bp, Homo sapiens
gctgacctcgcccacgcccagcagcagcagcaacaggaaataaagtctttgcttttgctttttggaggtcagtttgccagcagtcaagaaacttatggaaag

SEQ ID NO: 516332 - DNA, 111 bp, Homo sapiens
gcggaagattctggggacacagaggatgagctgaggagggtggcatggcagcgagcacagacatggctgggctggaggagagcttccgcaagtttgccatccatggtgacc

SEQ ID NO: 516333 - DNA, 140 bp, Homo sapiens
ggaacagccaggaggcgtttattaggggggcggggggaaagagccccagcaccgcccctcctggaagaaggaagagatccaacctcatggggaccaagtttacagtttatgaccgtggcatctgccccatgaagggccgg

SEQ ID NO: 516334 - DNA, 82 bp, Homo sapiens
aggagatcggcctcagcccccgcaaggatggcctttcctaccagatacctgaaaaaagcggcagtctgcaacccagaagagg

SEQ ID NO: 516335 - DNA, 100 bp, Homo sapiens
cgccatgtccagcgctcggacccccctacccacgctgaacgagagggacacggagcaggacctccacaaaaagtactcgtacatccgcaagaccaggcct

SEQ ID NO: 516336 - DNA, 83 bp, Homo sapiens
cgagacctcacctgcatggacttccactatgagccacacccactcgcccgggtctatggccacggtcggagagtggtcctgtg

SEQ ID NO: 516337 - DNA, 100 bp, Homo sapiens
ctgctcaaggagcagaagtacgaccggcagctgaggtgcaggctgccccatggatgccacacgtggcagcggggagaaaagaagtgattcggtccctgcc

SEQ ID NO: 516338 - DNA, 83 bp, Homo sapiens
tctgacctggctgtcctgcgggagcctgtgcctgctgggcctggagtactcgggtactttgagttcagtggctcaccccagcc

SEQ ID NO: 516339 - DNA, 100 bp, Homo sapiens
cggaggcggcggcggcgagcggttccttgtgggctaggtcaccatcagaaaagctaagtttgctgtatagtgaggatcaggagatctgatcctgattgca

SEQ ID NO: 516340 - DNA, 90 bp, Homo sapiens
ctgggctacggactatgggcgaatagctctgaccacccggcgaagctgtgtgactggctacgtgttaatgaaagctattttaagccatcc

SEQ ID NO: 516341 - DNA, 101 bp, Homo sapiens
gcgactacatggcccaggaggacgactgggaccgggacctgctgctggacccggcctgggagaagcagcagcgcaagttaatatgatcctctgttgaagca

SEQ ID NO: 516342 - DNA, 132 bp, Homo sapiens
ccagaccctggagcctcagttggaagcagccgatccagcctgcggagcctgtggggcagcagcctcgtcttacagcgtgactgcaaagaaaaagacttttgttttgcaaaagaaaagcagctcggtgactcc

SEQ ID NO: 516343 - DNA, 90 bp, Homo sapiens
tggctgagggactcacagctgatgacctgctgctcgtgctgatctcaggcttgatggtgtcaggctatgctgtgactggggctgtcctgg

SEQ ID NO: 516344 - DNA, 100 bp, Homo sapiens
cgaacatgagaatgaatcgaaacatgaagaactggcagatcctctgccttgtcaatgttagtcacaatggtgtgagtgaatcagaactgatggaactcta

SEQ ID NO: 516345 - DNA, 100 bp, Homo sapiens
ctgtgtctgggccagggggctgacatctgggcctacatcttgcagcatgtgcacagtcagaggatcttagtaagagccctaagaccatgaaaaagctgct

SEQ ID NO: 516346 - DNA, 90 bp, Homo sapiens
acaatcccgggcatgggcggcaactctttgatgtactactataatgggaaagcgaatttcgctaaggagtttgtgatcagtgatcggaag

SEQ ID NO: 516347 - DNA, 100 bp, Homo sapiens
ggcaccggggccgtggggctcatggctgctaccctcgggtgtgatgaatgcagactctgctaccattttggctgtttggatcctcctttgaaaaagtctc

SEQ ID NO: 516348 - DNA, 75 bp, Homo sapiens
cctgccatgaccactgtggagaacaaatccaagattagcacagaaagacgcttctggggccagcttatggttccc

SEQ ID NO: 516349 - DNA, 75 bp, Homo sapiens
tgaaaaagaacttgccaaaatcaacacattttattcagacaccaaatggattgcttctgactccgagtccactgc

SEQ ID NO: 516350 - DNA, 83 bp, Homo sapiens
tggtttaatatctgattgggacaacattcagacccatttccagtcatgagagactggggcttaccaaactcaaaggccggcag

SEQ ID NO: 516351 - DNA, 82 bp, Homo sapiens
gaagaacttaagaaacacaacaaaaaagatgattgttggatatgcataagagagagacatctccccatacatttcaattaga

SEQ ID NO: 516352 - DNA, 90 bp, Homo sapiens
ggagaaggatgctgccgagatgctgggcgccaagatcaaggccacctccaccacaaccgaaagtatcatctcagggaaacttaattcctg

SEQ ID NO: 516353 - DNA, 90 bp, Homo sapiens
ggttgttcaactactagatgactttaaaatatcaggagttaatggaacaccgacgaagcggagcaggtgtgggtgtgggagtacgagacg

SEQ ID NO: 516354 - DNA, 71 bp, Homo sapiens
ccgttgttggtcgagctggcgggtcccgcgggccaggccgtggaggaattgagttcttctcagactttatc

SEQ ID NO: 516355 - DNA, 100 bp, Homo sapiens
tgattgaggacaagaccatcgagctcatggtttgggccccatggtatccctgtgacagtatttcccaaaagggaatataaggataaaccagaagccatgc

SEQ ID NO: 516356 - DNA, 50 bp, Homo sapiens
caacaccacaataatccacagccaaggagcatttcctccctctgctattt

SEQ ID NO: 516357 - DNA, 109 bp, Homo sapiens
tcaccaacttcctcttcttcgggcccctgggattcagcttcttcttcaacatgctcttcgtctatacacagaatgggattttacatatgctggacagaaataagagaat

SEQ ID NO: 516358 - DNA, 98 bp, Homo sapiens
attacaggagtcctccacttgccactggccgtgctggtatagaggactctaagaagtggggcatgctgtttctggtgaaccagctgtttaaaatctac

SEQ ID NO: 516359 - DNA, 71 bp, Homo sapiens
tcggcgctcacctaagccgcagggagatacacccaactgggagatgtgccgtttgggggtgctaaagctgg

SEQ ID NO: 516360 - DNA, 100 bp, Homo sapiens
gcccatatgggggttctggagagcggggtgtggggcaatactgaacactgcgcagcttgcagaggtctcctggcagccctcattaggaattctgtctggc

SEQ ID NO: 516361 - DNA, 89 bp, Homo sapiens
ctgcttccattggccagtatgaagtggtgaaggagtgtgtgcagcggaggccactgtctgcagctcccgtgaagatgtccactccagac

SEQ ID NO: 516362 - DNA, 100 bp, Homo sapiens
caagaggccattgaccgcttcaatgttatggctgattgtcctcacacaattggtgttgaatttggtacaagaataatcgaagttagtggccaaaaaataa

SEQ ID NO: 516363 - DNA, 75 bp, Homo sapiens
gccgctctccatcaaacaattcctggacttcgaacctctgtattactggcaacagactgaagatgatttgacagt

SEQ ID NO: 516364 - DNA, 75 bp, Homo sapiens
cttttatattcatctcaaaaacaaaattctgaactcaggacttggcaatgtgtgctgtatttatggagtttaaag

SEQ ID NO: 516365 - DNA, 100 bp, Homo sapiens
caaaagccaagaggaggacagttcgctacacagcaatgcatcgagttctttatagctccaagctctacagattcttcaaatatattgagaatagggatgt

SEQ ID NO: 516366 - DNA, 123 bp, Homo sapiens
tgctggtgaccagcgtcacgctgctggtggcccgggtcttccagaaggctgtagaccagagtatcgagaagattagtgatgatgaaccaggttatgaccttgatttattttgcatacctaatc

SEQ ID NO: 516367 - DNA, 96 bp, Homo sapiens
cgaggtcttcgggaattccagcgagggttgaaatcacaaagattagacacctttttagataggtgttcttcagcaccactgacaacacggttctga

SEQ ID NO: 516368 - DNA, 98 bp, Homo sapiens
cagggggacacagccatcctcagcatttaaatcaaacggtattgagatggattgggttatgaaacataatggtccaaatgacgctagtgatgggacag

SEQ ID NO: 516369 - DNA, 100 bp, Homo sapiens
tcagagttcaaggaggccttccagctgtttgaccgaacagatttacactgactgggccaaccactacctagcaaaatcaggccacaagcggctgatcaag

SEQ ID NO: 516370 - DNA, 96 bp, Homo sapiens
gggaggggttcttgccattccaggcacttctgcgtctgccagcccatctgctccatgcccagagttgcatgctgagaatttgaaaaatgaagatga

SEQ ID NO: 516371 - DNA, 80 bp, Homo sapiens
ctctacttcacagcaggattcatcacaggttctggacgtggcatgaggagcgcttcctctacatgctcatggagtatgtg

SEQ ID NO: 516372 - DNA, 111 bp, Homo sapiens
aatgccatccagagctgtgcctcccagcaccacagtccttctgcagtccctcgtccagccacccccaggtacaggtttgcagattccgccagcagcacagcaagctctaca

SEQ ID NO: 516373 - DNA, 99 bp, Homo sapiens
gtgaccggatattcagttgcacatccccacatcaatgcactgccaatgaatgtgagcatttgatccgccatatgttggtgttagatcccaataagcgcc

SEQ ID NO: 516374 - DNA, 89 bp, Homo sapiens
tataggcgcagtatattctcacagaagggaatctggaaaaattgcaatcaaaacatcatttctctaagaaaattttgggtaaccgaagt

SEQ ID NO: 516375 - DNA, 82 bp, Homo sapiens
cagtcagcgtcagagactgaggaggacacagtgtccgtatctaaaaaggaggaaatctgagaatgaagatgacagcgagtgg

SEQ ID NO: 516376 - DNA, 97 bp, Homo sapiens
atgcccctggggagacacatgcacaagacatccccaaagctccagagatagatccagtagagtgtttggtggcagataactctgtaacagtggcttg

SEQ ID NO: 516377 - DNA, 76 bp, Homo sapiens
tcatggggaaaatctccccggtgactttcagattgagaggatccagaatccagatctctggaatagctaccaggca

SEQ ID NO: 516378 - DNA, 50 bp, Homo sapiens
gaatgtgttagagaaactgatactgcattttgaaagcgaagcagaagccg

SEQ ID NO: 516379 - DNA, 51 bp, Homo sapiens
gtgaagacctccgaaggaccatagagtaacagttacccctcaatgagcgac

SEQ ID NO: 516380 - DNA, 59 bp, Homo sapiens
aaatcgggctgaagcgactgagtccgcgatggaggttatcttatgatgaggcttttgct

SEQ ID NO: 516381 - DNA, 90 bp, Homo sapiens
ggcagggcagccagctggccaggggggcccgtctgggccagccacctggtgtccggcagtgaaaaagcagtctggctcccgaggtccacc

SEQ ID NO: 516382 - DNA, 100 bp, Homo sapiens
gtgaaatcagataaacttaggcgtatttgggagcccacatacacggacagtatgatttggtgaaatgcctggctcctattcgagaccccaagaccgagca

SEQ ID NO: 516383 - DNA, 82 bp, Homo sapiens
ccccggcggccgcggtaatgctggtggtctgcatcaccaccggatcaacttcgacaaatacttccggaagttcaacattctg

SEQ ID NO: 516384 - DNA, 100 bp, Homo sapiens
cctcgccccagagacaccagcttcagtggcctgtcgttggaagagtacaagctgatcctgtccacaggccctcgggaccaaggatcacgtcatgactccg

SEQ ID NO: 516385 - DNA, 90 bp, Homo sapiens
cagctgcagaaaattttctagttttggggagacaattacaaacatgttttatcaatgcagctaagatttctgcatgaatccccagacagt

SEQ ID NO: 516386 - DNA, 73 bp, Homo sapiens
ttcggttattgtcatccattgtggaagagctttatgctgaaaaggtggccactagaggtctgtgtgccattgc

SEQ ID NO: 516387 - DNA, 82 bp, Homo sapiens
aggggttcctggtcatacaccagtactaccaaggacagcttttttcctgcaagataaccatgatgactacacagacttctac

SEQ ID NO: 516388 - DNA, 100 bp, Homo sapiens
agcaaacggaagacacttaaagtgatttggagcaagaggtggtggtggccttcccccgaagaaatttggtaatcctggggagcgtttgcgtaaaaaaaag

SEQ ID NO: 516389 - DNA, 82 bp, Homo sapiens
tggctctaagatctgaatgttgtgaccactaatttggaacagatggagtcggataactgttcaggaggagatgatgactgga

SEQ ID NO: 516390 - DNA, 82 bp, Homo sapiens
gcttcctccagacctctcggcgcgggctgtctgtccccagaccccagagcacgtccggcaccaccatgactgggctgttgaa

SEQ ID NO: 516391 - DNA, 85 bp, Homo sapiens
gagactggagtcgaaggccgtgaggtgtcatcaatcttacagaagaagtgctgtgggtcaaagtgaatataaacatgaatggtta

SEQ ID NO: 516392 - DNA, 75 bp, Homo sapiens
cagctgctgagttctcggtgaagcttctttatgaaaaaggcatcagcctcagggcctccttcatcttcatctctg

SEQ ID NO: 516393 - DNA, 96 bp, Homo sapiens
gtggagggcggcagtggggccgggcgcttggacctgcccccaggtttcatgttcaaggtacaattggtcatgtagctcatgggaaatccacagtcg

SEQ ID NO: 516394 - DNA, 75 bp, Homo sapiens
cacatactatccgtttgttcaggaaccaccagtgacagagtgtcccagatgacctggcactgggcttggagctga

SEQ ID NO: 516395 - DNA, 90 bp, Homo sapiens
aacatggcggagctgacggtggaggttcgcggctctaacggggctttctacaagttaagctcaaatcttcgtcatgtgagagtatttgaa

SEQ ID NO: 516396 - DNA, 90 bp, Homo sapiens
actgaaacgatcctctcatctcagcctccaaaagtgctggcattacaggacccagccttgatgcccacttgggaggcagaaagcaccggc

SEQ ID NO: 516397 - DNA, 100 bp, Homo sapiens
gcagcaaggagaacattctcagagccaactaaaatgttgatgggcgaagtgatgagagaagctgccttttcactagctgaagccaagttcacagcaggtg

SEQ ID NO: 516398 - DNA, 82 bp, Homo sapiens
tgactattaagaccatgttggaagtgtaaacaggaacatcgataagtagtgtaaaaacttgcacaatgaaatccgaagccaa

SEQ ID NO: 516399 - DNA, 80 bp, Homo sapiens
ggaaattcgttgatgttctggtggattatggatcagatccaaatcagctgtctgtccccagaccccagagcacgtccggc

SEQ ID NO: 516400 - DNA, 90 bp, Homo sapiens
cggaggagtcagtcagaggggcgagcaggagcgattccgtcgccaaacaggtcgcccctcagtctccactagagacaggactgaccagtt

SEQ ID NO: 516401 - DNA, 82 bp, Homo sapiens
ggagcgcaaggtcgccctcaaggccatgatcaaaaccgccggcatcggccgcacaggcaccatcattgtcatcgacatgctc

SEQ ID NO: 516402 - DNA, 50 bp, Homo sapiens
cttgcaacagtggccgcacgcataggtactactgagcgagtgtgcttgat

SEQ ID NO: 516403 - DNA, 142 bp, Homo sapiens
cggatctggacacccagcggtctgacatcgcgacgctgctcaaaacctcgctccggaaaggggacacctgacattgctacaagtggttggtgtggtctctgtggctgtggccgtgattccttggatcgcaatacccttggtt

SEQ ID NO: 516404 - DNA, 75 bp, Homo sapiens
attagttcagtgcagtgtctgacttgtgacaggctgcagggaagtcaacatttgtgaatatccttaaacaattgt

SEQ ID NO: 516405 - DNA, 74 bp, Homo sapiens
acaaaagatgaatgcaaggaaaaggagggctcgtggtcccaagaagcatctgaagcgggtggcagctccaaagc

SEQ ID NO: 516406 - DNA, 75 bp, Homo sapiens
ctgcagtgagccctgtttttgccaccacactccagcttggctaagatatcaacatggactagggactccagactt

SEQ ID NO: 516407 - DNA, 75 bp, Homo sapiens
cagatatcttgaaaagctgccagaaaggcaagccaaaattccttccggatagaatatgatacctttggtgaacta

SEQ ID NO: 516408 - DNA, 71 bp, Homo sapiens
gccgagtcactactgcctgcctgcctgcctgctacggatggggacccagacacgccaaagcctgtgagctt

SEQ ID NO: 516409 - DNA, 83 bp, Homo sapiens
atgatgttgtaacagtgactgcgggagatacagatgacccaccaagaattactcagaaccctgtgatcaatgggaatgtggcc

SEQ ID NO: 516410 - DNA, 100 bp, Homo sapiens
gaagaacagttggatagactcatgcaacaattacaagatctggaggaatgcagatactctccccaggcgctttatgagccctgtactcaggatattgtga

SEQ ID NO: 516411 - DNA, 100 bp, Homo sapiens
cgaatgccacctggtttataacaaaaggaaggatcagaatgttctctctccagtcaactgctggaatctcctcttaaaccaggtgaagcgggaaagcagg

SEQ ID NO: 516412 - DNA, 90 bp, Homo sapiens
tcttgctatcgacaaattgaagccaagctcctgaaagaggcagtagagtcccagaggatgtgtgagctgatgaagcagcaagagacccac

SEQ ID NO: 516413 - DNA, 100 bp, Homo sapiens
gaaggacctagggctgcctacagaagcgtacatttcagtggaagaagtccatgatgcactaactgtgacatctatgaccttttttatcatcgcacaagcc

SEQ ID NO: 516414 - DNA, 100 bp, Homo sapiens
gaagcaacaacctctcctcttcgtctccgccatcagctcggcagtcgcgaagcagcaaccatgccgtgttgaaatccttgtctcctgtagacccagtgga

SEQ ID NO: 516415 - DNA, 100 bp, Homo sapiens
ttttgaaggtgcaagatactatataaaccctgccaaggtaaccctgctggggtcagttatcttcacattccagcacacccagcatctggcaatatcaaag

SEQ ID NO: 516416 - DNA, 95 bp, Homo sapiens
tggcccagttagcgtgtctctacaaaaaggtgcatataccactggaatgggtaccacagaccatgtcatcgtcctggcgtccacgaaccgagctg

SEQ ID NO: 516417 - DNA, 100 bp, Homo sapiens
gaacactgccggggcccaaccacaagacgactcaataggaggaaggacctaaagtgatccagacttctgcggctaatttttcactaaataatagcaaaaa

SEQ ID NO: 516418 - DNA, 115 bp, Homo sapiens
cgcagcgaagattctgcccatcatgtttccttccttgtaccgcaactcaaagacccattggaacaacctatgtgcttcccaagctgtatgtgaagctacattactgtgtgagttg

SEQ ID NO: 516419 - DNA, 100 bp, Homo sapiens
ttgtgaacagttccagatgccggatctgtgtgctgaagagatcgctattattcttggaatctgctatcagttgagggatttgcagttgataaaatggctg

SEQ ID NO: 516420 - DNA, 100 bp, Homo sapiens
ctatatctacatccgaggggaattctacaatgaggcctccaatctgcaggcaatggatcacttggagtcctttattgctgaatgtgatcggagaactgag

SEQ ID NO: 516421 - DNA, 74 bp, Homo sapiens
ttcacctcatcccagccatgatggaagttcatttaagtcaccagacacagctaaagaacgtgccaatggaatgg

SEQ ID NO: 516422 - DNA, 50 bp, Homo sapiens
gttgcaaactctggaaaaaaacttgggcctatatgaacccaatagcaatg

SEQ ID NO: 516423 - DNA, 100 bp, Homo sapiens
aaggcacaggaatatccatgtcggcttgtagagagattgcaggcagccattctacaaaagtggaagctgtggtcagaactctgatgaaaatacagcttag

SEQ ID NO: 516424 - DNA, 101 bp, Homo sapiens
aggactttcaccgaatgaaacagagtcaagatctctactgtttcagctcattattgactacttagctgagttcaattccacaccagctgtctttacaatga

SEQ ID NO: 516425 - DNA, 90 bp, Homo sapiens
ctgtgttgtatgagcagctcaagagggagaagctgagagtacacaaggccagggaagaaggagaaagggccaacccctgaagaagcaata

SEQ ID NO: 516426 - DNA, 75 bp, Homo sapiens
tgcagtggaaggtttcaatgacagcttaagaaagttcgtcgctgcttcctgtgctccaggagaggacatctcctg

SEQ ID NO: 516427 - DNA, 96 bp, Homo sapiens
gcaaggaccccctccggctcaagtgtgtcaagcaagaaaatgatgcatcctgttgccagcagtaatccagctttctgtgggcctggcaagccttcc

SEQ ID NO: 516428 - DNA, 82 bp, Homo sapiens
cgaacctgcctggctagccggcgacttgagtgacgatgcagtgctggagttcgtgggtgacgggatctataacaacaccatg

SEQ ID NO: 516429 - DNA, 101 bp, Homo sapiens
gagtgcagccggtgacccggcgagaggcggcgccgctcccaagatgtcgcagacggccatgtccgaaacctacgtctcaaaccatgaattatgtgggacag

SEQ ID NO: 516430 - DNA, 73 bp, Homo sapiens
tccgttctgagacatacaaatagaattatccagactgccttgccactagatgaatggaagacaatgatttgaa

SEQ ID NO: 516431 - DNA, 100 bp, Homo sapiens
ttttgagactgagcactcccagctggacgtgatggagcaggttcgggaggccttgaggaaagcagagaaggagctagaatctcacagctcatggtatgct

SEQ ID NO: 516432 - DNA, 98 bp, Homo sapiens
cgcggctgggcgttcatctaccacgctttcgtatcataaggcctatgggttttctgccccaaaagaccaacaagtagtcacagcagtagagtaccaag

SEQ ID NO: 516433 - DNA, 82 bp, Homo sapiens
gaggagctgtgcagccgcgaggaggcgcgggaggtgttcgagaacgaccccgagacgaacatgaaaggctcccggagcagcg

SEQ ID NO: 516434 - DNA, 75 bp, Homo sapiens
aaagtactctgctggattagaattacttagcaggttgacaatggtctccaggatggtctctaccatgctatctgg

SEQ ID NO: 516435 - DNA, 50 bp, Homo sapiens
tttgtggatagctgcaaactgtgatatgagagttgtggactggggcaacc

SEQ ID NO: 516436 - DNA, 100 bp, Homo sapiens
cctcaagtcgacaggggatgggaccctagatcacatccctgctcaaggacaatgagcgcatccagtccacccagactgtcgcccccaacgatgaagacag

SEQ ID NO: 516437 - DNA, 82 bp, Homo sapiens
gaatatcgagagcgtcatgaacccgagctatagagaaaggagatgaggggaggtcatcaaggcttgggacattgccatagcc

SEQ ID NO: 516438 - DNA, 112 bp, Homo sapiens
tgctgcaccgacctcgacgtcttgcctgtgtcccacttgttcgcggcctataggttttaaaatcaaagatgggaaaatcggagaaaattgcccttccccatggccagcttgt

SEQ ID NO: 516439 - DNA, 101 bp, Homo sapiens
cgcgcgtgtgtgagcgcgccggaccaagcgggcccagaagcgggtgtggacactgccagcggctgcagccgacttggaatgacctgggagacaaatacaac

SEQ ID NO: 516440 - DNA, 100 bp, Homo sapiens
cgacgttattctgatctcaccaccctggtggcctttccctccagctctgtctatcctaccaaggtaaaggcgacacaggaggagaaccgggagctgagga

SEQ ID NO: 516441 - DNA, 75 bp, Homo sapiens
ttggaccgagccgatcgccgcggggcagttcgggccggctgtcctggcgcggtgattgaaatctctgaatatcga

SEQ ID NO: 516442 - DNA, 100 bp, Homo sapiens
aggtaagaggtttgggactgccccggcaactccagggtgtctggtccacgacctatcctaggcgccatgcaaaaaagaaattcctgtgtttaactttacc

SEQ ID NO: 516443 - DNA, 82 bp, Homo sapiens
tcgtctctgagtgccagtcacccaatggtgggcaagtggctggagaaacaagaacagtattctaccttgtaaatactgttat

SEQ ID NO: 516444 - DNA, 51 bp, Homo sapiens
caccagtggaagatgatcacatcccaggccatcatctctcagcaaggtgac

SEQ ID NO: 516445 - DNA, 97 bp, Homo sapiens
cccaccggtccccaacgcatcatgccagggagccaagcgtcctgcccggccacgagccaaactcaggctgtaccttgagcagctcaagcaactggtg

SEQ ID NO: 516446 - DNA, 83 bp, Homo sapiens
gacgttttccggagggattccatcataggctctgacgcccgctctgcggcttcggtgtttgaacaggccacagtccaggagcg

SEQ ID NO: 516447 - DNA, 95 bp, Homo sapiens
cccaagaagagcaggaaatggccaaaccccagaaatacaggtatcaggatgaagatacacctcctcaagagcatatttccccacaaatcacaaat

SEQ ID NO: 516448 - DNA, 98 bp, Homo sapiens
agatatgcaagtctgtgaattatttcctttcctggatgaaaatgttgtctcctttctaaattctctgccgatttgggaaaaagcaaacttgactttac

SEQ ID NO: 516449 - DNA, 82 bp, Homo sapiens
tttggcgctgcagaaccagatccgggagcacgtcatctccatcgagggcgtcacaatgtagcagggaccccaggcgtcgtgc

SEQ ID NO: 516450 - DNA, 100 bp, Homo sapiens
gttggatttttcaaaagagtaaaccaggaatgaccatacctgaagaagacgctgatgtgggacaaggcagtaaatattgcctcgtggcaattgggagact

SEQ ID NO: 516451 - DNA, 82 bp, Homo sapiens
ttggagggcgcggggactgcaaccctaatcagtccaaaagaaactcttccttcaaaacctgtgaagaaagagaaggaacaga

SEQ ID NO: 516452 - DNA, 82 bp, Homo sapiens
agacaaatgcgctcagcttcaattgacttagaaatggctgttgcgtattggaaattagtgttatctggaaggtttaaatttt

SEQ ID NO: 516453 - DNA, 99 bp, Homo sapiens
atccctgtctgtggtacagctggaggccaagcagaaggcccggaagaaagaggagcggcagagcctgctggagtttatgtggccgaggcagacaagtgg

SEQ ID NO: 516454 - DNA, 74 bp, Homo sapiens
gcggatctcagaaggccagttcaaaggctccttctcctgaaaaagccgaggaggagagtgagaggcttctgagg

SEQ ID NO: 516455 - DNA, 100 bp, Homo sapiens
tatgttcttcaacgatgacatgcatgaaaggcacctttttcatggagtgataatgaaaggagcagcagccgcattaatatcccagagagagcaagtggac

SEQ ID NO: 516456 - DNA, 75 bp, Homo sapiens
gataatcctgtctgtcgactgccagatatcaacatggcaggagagcccaaaccatacagaccaaaacctggaaac

SEQ ID NO: 516457 - DNA, 75 bp, Homo sapiens
gatggaagttcatttaagtcaccagacacatttcctagaggaagttctggcttctggactgcacagccgaagcaa

SEQ ID NO: 516458 - DNA, 80 bp, Homo sapiens
gatttctatagaatgtttgcgattgctgctttagggagagtcccgtattctcagagtaaaagttgtttctggaattgatc

SEQ ID NO: 516459 - DNA, 100 bp, Homo sapiens
atgtgccacgccgcccaggagacccctctgctgcaccacttcatggggccgctacctggtggcgctgggccacgcgtaccacccggaggagtttgtgtgt

SEQ ID NO: 516460 - DNA, 90 bp, Homo sapiens
ggacacagcaatatctctgggctttcacagaacccttaggagaaatcttgagagtggacagcaattgtgaagatcgccagagagttctgt

SEQ ID NO: 516461 - DNA, 99 bp, Homo sapiens
ctgggaaatccatagctaagatgccaggaccccctgaaagcctagacatgggagtagattctgctatcttggcctcacagcccttcctgttgattacaa

SEQ ID NO: 516462 - DNA, 100 bp, Homo sapiens
gtcaccatgggggctgtgctgggtgtcttctccctcgccagctggggtggagagattcaaccagttagcgtgaaagttggagataaagttcttctcccag

SEQ ID NO: 516463 - DNA, 116 bp, Homo sapiens
aaagagactgttcaaaccactgaggatcagattttgaagagagatatgccaccagcatttattaagcagcacacttctgcttttgttccttcatcaggacgaatttactcttttgg

SEQ ID NO: 516464 - DNA, 100 bp, Homo sapiens
agcgggtcttgggtcctccgagagcagcagcgggatcgcttacacctgagacgaactacagaacagcacgtaccagaggtggaagtccaagtcaaacgca

SEQ ID NO: 516465 - DNA, 100 bp, Homo sapiens
ggcccttcgagcagagcctgatgggctgtttgacgctggcagcctgctatcaattatattgatagtaaatttgaggactacctaaatgcagaatcgcgag

SEQ ID NO: 516466 - DNA, 75 bp, Homo sapiens
ttgcgatggcgcagaaaccccgttgacaaggcactgctttttcatgacggaaattcgaaatgagtcccatgacta

SEQ ID NO: 516467 - DNA, 75 bp, Homo sapiens
acaggtgctaaagagagcagtaccctgatggagtcccttgcaggaactctgcgaccttcaagtcgtttgaggacc

SEQ ID NO: 516468 - DNA, 83 bp, Homo sapiens
gcgtggaccacatagacatttacgcggatgtcggcgaagagttcaaccaggaagctcttcgtgggcggtcttgactggagcac

SEQ ID NO: 516469 - DNA, 120 bp, Homo sapiens
gtgcagtggcacctgcgcgaagctggccaaagcctgcccagacggctcacctgtgcgggatggaacaaaagtcattgaagactctccggaattcagatttgaaaccatatattatcttca

SEQ ID NO: 516470 - DNA, 82 bp, Homo sapiens
atctgtcttcggtggactccttcggcagtccacccaccgccgccgcctcccaggtacggacattgctgcaggagaagaggtt

SEQ ID NO: 516471 - DNA, 87 bp, Homo sapiens
tcagtgcccgctttgttcagctgcagcatggagagatagataaacggacaaaaaacttggactttcgccgaaagtgggacaaagatg

SEQ ID NO: 516472 - DNA, 100 bp, Homo sapiens
gtctaacttggaatctactcattggctagaacatattaaggattattacagtggtggctactatcctgcacaggacccggccctggtccccccccaggaa

SEQ ID NO: 516473 - DNA, 83 bp, Homo sapiens
ctttatcctggtcatcttctatttccaaagaaccttccctgtatactgtcaaagccatcctgattctggacaatgatggagat

SEQ ID NO: 516474 - DNA, 50 bp, Homo sapiens
ggtgaatttccatgtcaacatagtcctgcagagagagatcatcattgcct

SEQ ID NO: 516475 - DNA, 100 bp, Homo sapiens
atctgcaaaagttgcacaaatacctaataaccagaacagaaagaaatgttgcagtatatggtatatgtctcgagtccacggtatgcaccctaaagagacc

SEQ ID NO: 516476 - DNA, 100 bp, Homo sapiens
aaattttgctactgtcagatggattgactatggaaaagttgccaaattgatacccagaaagcggtactctagaaatgaatgtcaaggatcttagaccacg

SEQ ID NO: 516477 - DNA, 121 bp, Homo sapiens
cagcctgtgctgggaggctgtttgcagaggcaatgtttgccatgaaagtctatggagcttaccttctaaggcgatgccagtccctccactccagaggagaacgaaaccacgacaaccagcg

SEQ ID NO: 516478 - DNA, 96 bp, Homo sapiens
aagaacttaaagctgaagcagcagtccactaaggtggaaggtaaccacctgctgttccaacaagtgcccatggttgaaattgacgggatgaagttg

SEQ ID NO: 516479 - DNA, 83 bp, Homo sapiens
ggctctcattccctatggggaccagaggctgaagcccaagcacacgcccttatctccagaggccagagcttccatccacccag

SEQ ID NO: 516480 - DNA, 100 bp, Homo sapiens
cgggcaggagcctggcgaggatgcaccttcccctgccttggaaagagggagaggagcgcgtgaagcagaaggacctgggggatggcgtgtatggcttcga

SEQ ID NO: 516481 - DNA, 82 bp, Homo sapiens
tcgccgtcatgggcgcctcggccgccatggtcttcagcgcaattctgtggtgttcttggtcacacatttatggagtttctga

SEQ ID NO: 516482 - DNA, 100 bp, Homo sapiens
tgaagaaattagtaagcagcaccccaaagcaattacacccagaagattacctttgactcttgtcccaggtggtttacatcttggagaaaaaacattctcg

SEQ ID NO: 516483 - DNA, 100 bp, Homo sapiens
gtgggaagaagatttgtaaagaaaactcttagggtctcacttgtcacccaggctggagtgcagtggcacaaacatgggtcactgcagcctcgactcctgg

SEQ ID NO: 516484 - DNA, 83 bp, Homo sapiens
aaggaacgaggcaaggagctaaagcagcgtgcgttcagccctggggccaccagcttgggctccccacggagggcagcaagtgg

SEQ ID NO: 516485 - DNA, 83 bp, Homo sapiens
gccgcgaaccgcagtatcatgctggccaagaagatcatcattaaggacggaggcacgattatgatgcatcattatcacagaag

SEQ ID NO: 516486 - DNA, 99 bp, Homo sapiens
cgggccaggacagtggcggccaggccgggacacgaagtccccaggcgactacgtccccaaggagcacatcctgcaggtcctgggcatctctgcggaggt

SEQ ID NO: 516487 - DNA, 88 bp, Homo sapiens
cggggagggggcgccgcgccgcgggggccatggcggagccaggaagccgggagtccgagacccgggcgcatattaaatttcctattga

SEQ ID NO: 516488 - DNA, 75 bp, Homo sapiens
atcacacacaaaaaatgacagaaatgttgaatgttcctttgaggactggaatgtcacgtggaataccagcaaccc

SEQ ID NO: 516489 - DNA, 80 bp, Homo sapiens
ccggccttcatcgacatcagtgaagaagatcagaaaccaaggtgtatgttggtaacctgggaactggcgctggcaaagga

SEQ ID NO: 516490 - DNA, 100 bp, Homo sapiens
tgagcggctgagtcctgagcagctggaggagatggaggtgcagcgccggccctggttagtgaagtacggggacagcggggagcagattgccggcttcgtg

SEQ ID NO: 516491 - DNA, 75 bp, Homo sapiens
gttaacagcctatgggtgaaatttggctttcattcatgaatgagaccaacatatgctactccaaaagttctagaa

SEQ ID NO: 516492 - DNA, 111 bp, Homo sapiens
atggtctacaagactctcttcgctctttgcatcttaactgcagacctgcctagagctggaacgttacctccagagcgagccctgctatgtttcagcctcagaaatcaaatt

SEQ ID NO: 516493 - DNA, 75 bp, Homo sapiens
agttggagaaggaacgagagaaggaaattagtgatgatgaggcaggaggaagagcgcaggcgccgtgaagaagag

SEQ ID NO: 516494 - DNA, 75 bp, Homo sapiens
caagttgaaaatggacgagtaatcgcctgctttgattcattgaaagtcccgtgggagtagggctgaatgaactga

SEQ ID NO: 516495 - DNA, 96 bp, Homo sapiens
gaagcgccgtgatgaggagctcatctaccacaaagtgacggcagccgagctgcagatccccttggaaaggacttccagaactgaccaatgagaatg

SEQ ID NO: 516496 - DNA, 90 bp, Homo sapiens
gggaagttatacgtaatgattactttggaagtgttgctgaaatcatcaggaatcatcaacatagtcctttggttcttattgacagtcaga

SEQ ID NO: 516497 - DNA, 98 bp, Homo sapiens
caaaaataaccccatctaccaattccatatagaaaagactgggccgttactgattgagctacgaggaccaagagcaagttgatgatttgaacctcact

SEQ ID NO: 516498 - DNA, 87 bp, Homo sapiens
gcaagatggcactcaacatgaacaactacaaaggctatgaaaagaagccctattgtaatgcgatgcatcatctgcagacatcagaaa

SEQ ID NO: 516499 - DNA, 100 bp, Homo sapiens
tctgctgcaaggaactgatagcttatggttctccattgtgatgaaagcacatggtacagatggaaggactggagctttgtggacaaagatgagaaggccc

SEQ ID NO: 516500 - DNA, 75 bp, Homo sapiens
tgatgatttagttgattctctgaaggtaacagcatcagagaagacaaagggagcaacttcccctggacagaaggc

SEQ ID NO: 516501 - DNA, 101 bp, Homo sapiens
tacagctggttcttgaagctgctggatattccaacctcagttattcaaagactccatcaccagagagaaagtcagattgtcactttggggagtcctctgcc

SEQ ID NO: 516502 - DNA, 75 bp, Homo sapiens
gaagtatttggggagaatgactgaggagccattgatgtgtgctcctcctgctggaccctccagccccgggcctca

SEQ ID NO: 516503 - DNA, 98 bp, Homo sapiens
tgggggtcacacggattggacaccaggagcttgtgttggaggctgtggaccttctctgtgcactggttcagaggacagttttggagaaggagatgcgt

SEQ ID NO: 516504 - DNA, 75 bp, Homo sapiens
ccaccttaggtcccctcacccggctggagggcatcaagcaagtgaaactgggcagccctgactatgtcaaccgcg

SEQ ID NO: 516505 - DNA, 101 bp, Homo sapiens
gatctcagcgctcaccgacttctctgggatcgcttacacctgagacgaactacagaacagcacgtaccagaggtggaagtccaagtcaaacgcagaaggac

SEQ ID NO: 516506 - DNA, 100 bp, Homo sapiens
tccctgtcccatcgcaaacccaaagatccccgttcctggagattctgattgaggctcagaaaaaatgtctgaatcagacttcccccatttctgctcccaa

SEQ ID NO: 516507 - DNA, 85 bp, Homo sapiens
agacttcaagatgttctctgatgagattttgttatcattgacaagaaaggtgcgggcattctatgtgaacgtgctgaatgaggaa

SEQ ID NO: 516508 - DNA, 88 bp, Homo sapiens
tcatgctcctactatccatttcaactacagatactttgaagtagaagaagctgatggcaatgtctacttcgatctgaagtctagagga

SEQ ID NO: 516509 - DNA, 85 bp, Homo sapiens
aggaatcacgctcggaaacaatgggagaacgtatttaccgggcagtcaaagatctattcctacatgagcccgaacaaatgctctg

SEQ ID NO: 516510 - DNA, 98 bp, Homo sapiens
gggtggataccgtcaagctggccaagcacaaagagcttgctccctacgatgagaactggttctacacgcgagctgattggaccagaccctgaattctt

SEQ ID NO: 516511 - DNA, 90 bp, Homo sapiens
ctttcatggagttcacagaagagtcgaggaggctgtagaaaatctctgttcttacaagatttctgcaaacttgtacaaacagctgagaca

SEQ ID NO: 516512 - DNA, 100 bp, Homo sapiens
ccaaaatacaaatgcacagtgtctctagacttcatcagagctattgcaagttggcagagccatggaactacagaaggcgcgccaccctaagcacttatcc

SEQ ID NO: 516513 - DNA, 82 bp, Homo sapiens
gttaccttctgcctcagtgccagagtccatgacaattacaattctgtggtgttcttggtcacacatttatggagtttctgaa

SEQ ID NO: 516514 - DNA, 76 bp, Homo sapiens
aacgctttttgcatacaagcaggaaaatgagatgttatccagggtggttctcttcccaaagtggaagccaaattca

SEQ ID NO: 516515 - DNA, 100 bp, Homo sapiens
tccccggctgccgccgccgccgcctcggccgaccagggacctgcccgcctgcggctgctccggtgctaatcctccatctggaattgaagatgaaactgct

SEQ ID NO: 516516 - DNA, 75 bp, Homo sapiens
ctctgctaatcatcatttttatactatctaagtttatgcctaagacctatgccagatttactggtgctccactga

SEQ ID NO: 516517 - DNA, 88 bp, Homo sapiens
tgaacttaatacagcaagaaagaccatcaagtttaccagaatctcagcaaatgcttggaagacttattccagaaaaacagatactcaa

SEQ ID NO: 516518 - DNA, 75 bp, Homo sapiens
ggcttctgctcaccaacagatgaagacagatgcaccaacgagaccatcatcaaagaggggatgctgaccaaacag

SEQ ID NO: 516519 - DNA, 100 bp, Homo sapiens
cagcagtcaagcagcaacatttatgtcgccaggctaaagaacgtgccaatggaatggagcttgatgggcgtaggatcagagttgatttctctataacaaa

SEQ ID NO: 516520 - DNA, 90 bp, Homo sapiens
gccgggagcagagcgaaccgcaccggcccgagcggagcgccgcacgttcccaaccgcgaggccaggtgagcacctgcggatctgtcccca

SEQ ID NO: 516521 - DNA, 100 bp, Homo sapiens
gtctcaacgtcatgaagggctgcttggcaaatcaggctgacctcgacacagagtggaatctgtttatagggtgctttcatgtatcatcattccacttgag

SEQ ID NO: 516522 - DNA, 100 bp, Homo sapiens
ttgtggaaatcaaactgttcaaaggccctaaagggccggtgggaaagtcagcaggatgtatcccaaaccacagtttccagaggaatagctcctgcccccg

SEQ ID NO: 516523 - DNA, 101 bp, Homo sapiens
attttgggaaactcgactttggagaaaccaccgtgctggaccgcttttacaatgcaggttgcaaaagcttctcatttcagagagatgccaggatcctaagt

SEQ ID NO: 516524 - DNA, 100 bp, Homo sapiens
cctgtccttactccctctttaagattgcgtacccactgcagagtgctgaagacggggtagccacgagctactgcttcttgggatacctttctcatgctat

SEQ ID NO: 516525 - DNA, 75 bp, Homo sapiens
gttgacctcactcaatatattctgcagataatggcatcagctgctaaggaatttaaaatggacaacttttcacct

SEQ ID NO: 516526 - DNA, 50 bp, Homo sapiens
ctgtgactacagtgacccaaatcagaacaaaatccagtctcatagcagag

SEQ ID NO: 516527 - DNA, 111 bp, Homo sapiens
tctggtttctgagggtttcacagtcaaagccatgatgaaaaactcagtcgcagaaggagaagacagcctgaagaagatgcagctgatggagcttgcgattctgaatggcac

SEQ ID NO: 516528 - DNA, 76 bp, Homo sapiens
ccgcattaggattaggacaagaggaagatatagaatcaccttgggattctgagataattttccccagatggcccat

SEQ ID NO: 516529 - DNA, 75 bp, Homo sapiens
aaatatcctcggaagagcgctcccaggagaaacaaggtgtacagcaagctgtgattcctgggaaaactaaaaaag

SEQ ID NO: 516530 - DNA, 100 bp, Homo sapiens
ctcggcccgcggcggcgcgctcacccgccccgttcagatacgtaggtaacctttccagagatgtgacagaagtccttatacttcagttgttcagtcagat

SEQ ID NO: 516531 - DNA, 75 bp, Homo sapiens
cagcgagccctcggagtttgtgcgacttccagaatatggcgccggtggtcctgagccgagatcaccatgacgtga

SEQ ID NO: 516532 - DNA, 100 bp, Homo sapiens
ccgtgcctgaggtcctactgcacagcgaaggggctgccagcagcagcgtctgcaagaccaagctccacgaagatctctgtgagaagaggacggctgccac

SEQ ID NO: 516533 - DNA, 100 bp, Homo sapiens
cagatcatgtcagagagagagcttggttaacttgggagaaagtttcatctgtggatggagtattggcgtccctgagggcctccatcctcgctcgggactg

SEQ ID NO: 516534 - DNA, 75 bp, Homo sapiens
tgtgggcatttgtggtgagggaaccgagtctgtgcaaagcctcctgcttggagccatgctcactggtcctcctgg

SEQ ID NO: 516535 - DNA, 82 bp, Homo sapiens
gaggcaaggagctaaagcagcgtgcgttcagccctggggagcatattaatgaaaagtgccataaactgaaaaaccaaacatg

SEQ ID NO: 516536 - DNA, 96 bp, Homo sapiens
gttgctgagccgggagcgctgactggcccggctgggcaggaataaacgactggaggaagtgaaaagagaagaaagagaattactggaggctcagtc

SEQ ID NO: 516537 - DNA, 97 bp, Homo sapiens
tgcttagcattcgagagaacaaaattaaacaactacctgctgaaattggctctgattgtactttctccacaagcttcagcatggcagtatctctcac

SEQ ID NO: 516538 - DNA, 100 bp, Homo sapiens
aggaactcatcgcagagaccatctgccattcagctgctgcagagtgaacttttccaaaattctggaaattggtatcctgaggtgcggcaccactgtccca

SEQ ID NO: 516539 - DNA, 100 bp, Homo sapiens
cctcggtgccgatcagcggaagaccaaagaggatgagaaggacgacaagcccatccgaggagaataaaggcagccccgttgatgactgaaaatgacaaag

SEQ ID NO: 516540 - DNA, 51 bp, Homo sapiens
cgagcccgcggggcagctaccgctcgttcgatcctttggtacagaagacag

SEQ ID NO: 516541 - DNA, 100 bp, Homo sapiens
gagtgaggtggccggttcttggtgggatctgagcagagctcgtccgcatggtgctgaatggctgaggaccttcccagtctccccagagtccgtgcctttc

SEQ ID NO: 516542 - DNA, 83 bp, Homo sapiens
taactacctggcattgccttttgttgagatccagacatttaatgtggatgcaccatgccagaccgtggaagatttaacgaatg

SEQ ID NO: 516543 - DNA, 80 bp, Homo sapiens
agaacatcacccagcgcggcaacgtcgccaagacctcgacttcccaagtaagaagcggaagaggagccgctggaaccaag

SEQ ID NO: 516544 - DNA, 51 bp, Homo sapiens
gacaagcaacaacaatcatagctgggaaatcctcattgacgattcaatttg

SEQ ID NO: 516545 - DNA, 75 bp, Homo sapiens
cctatgtggacgttggcactgggaagacgttggacctctcgaacaaccagctgagcgagatccctgcagagcttg

SEQ ID NO: 516546 - DNA, 98 bp, Homo sapiens
gaaaacactcgtagtgaagaaaaccttgaatcctgtgtataacgaaatactgcgggaagctgcagtaaaggaagatgaagaagaagtttcagataagg

SEQ ID NO: 516547 - DNA, 83 bp, Homo sapiens
agggaccaaggtggaaatcaaacttaagctcaaatcttcgtcatgtgagagtatttgaaatggacatagatgatgaatgggag

SEQ ID NO: 516548 - DNA, 87 bp, Homo sapiens
ctcatcatcaaggatcaggaccgcaagtcccgtcttatgggacttgaggccctcaagagcagcccgacggccatggaggctgaagag

SEQ ID NO: 516549 - DNA, 113 bp, Homo sapiens
cgccgagaggccgtgcgggacgcgggcgccaggaccggccgaacgcagagaacccagtgacttgattgtaaaaatttacagagcggaatcatatgctggtctccaagagttta

SEQ ID NO: 516550 - DNA, 50 bp, Homo sapiens
attatttgttcagaatacttcattgagtttaaaattggtggtgaatggtg

SEQ ID NO: 516551 - DNA, 74 bp, Homo sapiens
cccagggctgggagctctgcagtccttgaagtcagaatggcggcagcggagcatcgtcattcttcaggattgcc

SEQ ID NO: 516552 - DNA, 110 bp, Homo sapiens
agacaaacagcccgcccgaccccgtcccgaccctggccgccccgagcggagcctggagaacaccttccaccatgaccacctcagcaagttcccacttaaataaaggcatc

SEQ ID NO: 516553 - DNA, 96 bp, Homo sapiens
tttactcctacctgtgtaccgagccaggacccttgaacatctgtgaagaaatgactattctgcatggaggcttcttgctggccgagcagctgttcc

SEQ ID NO: 516554 - DNA, 82 bp, Homo sapiens
cggtgcgttccggccctcccccaacagcttctcccccgcggtcgccggagccggcccagctgagagccagcctggaggttac

SEQ ID NO: 516555 - DNA, 100 bp, Homo sapiens
cttgaagcagcaattgcccttaaaacatcatccctgccctggatcggcctggagccagtgcccaagtacggtttgcaggattcctggttttcaagcctga

SEQ ID NO: 516556 - DNA, 75 bp, Homo sapiens
gccctggagcggctctgctcggtcctcaaagttggaatcaactggactcggccttagtagtagtagactaagaac

SEQ ID NO: 516557 - DNA, 76 bp, Homo sapiens
ggagaaaacagcaggcacccaagcgggcggcaggttcgaagtcaacaataccattcttcacccagagatcgttgag

SEQ ID NO: 516558 - DNA, 96 bp, Homo sapiens
tgagaagccttccgctattcagcagagagctattattccctgtattaaagatgacaagagcacctcaaaggcagcagcctcaaggagcagccatgg

SEQ ID NO: 516559 - DNA, 152 bp, Homo sapiens
ccgctgcgcgcggagcccgagcccggagcggccgacgcccgcctcggcgcgcacatcccgcggggcccggccgggtgggaagcgccgccgagctgctatggacttccctggagccaaggtcattgttccccagctgaagggcagggtgcagc

SEQ ID NO: 516560 - DNA, 75 bp, Homo sapiens
gtcggcgcctcattcgggtggagctgagccggagacaggacttgcaccttcgagatcccctgtgtttacccagct

SEQ ID NO: 516561 - DNA, 104 bp, Homo sapiens
ctggggaggtcctccatgcgcagtcatgagtcgcttcaagtttatcggtgggaccagggagattggatctgctctcaccaggatgtgcatgaggcacagaagca

SEQ ID NO: 516562 - DNA, 75 bp, Homo sapiens
gccaacagtgttaagtataatgggccatgtttatgagtggactaagtgaaagcaaacaaacccatgtacacctga

SEQ ID NO: 516563 - DNA, 100 bp, Homo sapiens
atttcctgaagatgtttacagtgcagtcttatcgaaggatgtgcatgaaggacagcctcttctcaatggtcctaggcctacttacaagcctccagtctca

SEQ ID NO: 516564 - DNA, 100 bp, Homo sapiens
ccagcgttctcttttcccatcatagagtgactgttttgcagttcaggcccatgaagttcatcagaaaattctggcaactgatgttagttccaaaaataca

SEQ ID NO: 516565 - DNA, 100 bp, Homo sapiens
cgtcttccgctttcttaaggtctggttgtctgcattcaaaagagcattctattaaagctaccttaatttggcgcttatttttcttaatcatgtttctgac

SEQ ID NO: 516566 - DNA, 124 bp, Homo sapiens
aaagtaggagcaggcacctggccaggcttggaagaaaaagactgtagatccaaaatgatacgcaacacagtcactcctggcggcaaaccaaacaaaaccagagtcatctggggaaaagtaactc

SEQ ID NO: 516567 - DNA, 75 bp, Homo sapiens
gttggagaactacagaaacctggtctccctaggtccttgtacaagccatcaaggaggcaaaggagcagcacccag

SEQ ID NO: 516568 - DNA, 100 bp, Homo sapiens
gttttacttcagtggtatgagccaatgcagaaattcatgttgataaaggaccgtgacaaacactcatcgttgggtggggctctagtgcagtccgttggtg

SEQ ID NO: 516569 - DNA, 98 bp, Homo sapiens
catgtggtggtgaaaaatgaccctgaactggaccagcaggatgtacagttacccagcacgtgtacctcctcctcctcctattgctcgggctgtagtgc

SEQ ID NO: 516570 - DNA, 75 bp, Homo sapiens
caacctcagaggacaacgaagtgttcggcctctccttccgatgaaaagagaaaggaagaatggactacagccacc

SEQ ID NO: 516571 - DNA, 78 bp, Homo sapiens
gaatgtggacaaacctctccgcatcattggggatccttacaaagtgcagactgactttatggcctttcaccaagaaca

SEQ ID NO: 516572 - DNA, 100 bp, Homo sapiens
gaccctctcagagtcttggtctcaatgtccacaacatgaccccagctacctccccaataggtgcatcaggtttcctgggagaaggtggcttaaggctgag

SEQ ID NO: 516573 - DNA, 95 bp, Homo sapiens
accttgattctgttgcagaccacccaagggcaagcagctctggccatctcccacttgccggaggattttctgccgtctcttggcaaaaatggcaa

SEQ ID NO: 516574 - DNA, 100 bp, Homo sapiens
ctggattcaagtcccaggagtcctgaccagagagcaggttgacaatggtctccaggatggtctctaccatgctatctggcctactgttttggctggcatc

SEQ ID NO: 516575 - DNA, 101 bp, Homo sapiens
tagtctatccaccacctgtggatcccaagaagctgattgattctttagacaaaatgcattgatcactacaccaaacaatgtgtggaaaatgcagatttgcc

SEQ ID NO: 516576 - DNA, 83 bp, Homo sapiens
aaaggccagtgactaccaacgtttggaccagaaggtatttgaagaattattgcttgatgcagattggagcataaatgctggaa

SEQ ID NO: 516577 - DNA, 75 bp, Homo sapiens
agaacattgatgatcagcaccaaaatctcaggagaaatccaagttttccaaagaaattagaccattttcttcgtg

SEQ ID NO: 516578 - DNA, 133 bp, Homo sapiens
tgcctggcccggtgatgctcgacagcctggactctgcaacacctgtcaactccatctgcagtgttcaaggtctgctgagaacagacccagtccctgaggaaggagaagatgttgctgccacgatcagtgccac

SEQ ID NO: 516579 - DNA, 101 bp, Homo sapiens
agaagactttgaattctaacgacgagccgtgttgaaacttcttttccagaagatcagctgccatgttacttgactcacaccaaccctagagtggatgagat

SEQ ID NO: 516580 - DNA, 50 bp, Homo sapiens
cactaatacagctcagagaaggctggtgggcttgtcgctgtcttatgccc

SEQ ID NO: 516581 - DNA, 82 bp, Homo sapiens
tcttgccctcatcctggttctggaatcctcagttcaagggtgttcctgaaaagccccatagtgattgagtcttcaaaaccac

SEQ ID NO: 516582 - DNA, 90 bp, Homo sapiens
ctttgaaatctcgacccaagaaaaagaagaattcagatgatgctccatggagtcctaaaggattttttatcaagcagaaatgcatcgaac

SEQ ID NO: 516583 - DNA, 83 bp, Homo sapiens
gaaaaatatagttctgcaccaaatgcagttgccttcacaagaagattcaatcatggaaaacaaagtgcatgatgaagtcttca

SEQ ID NO: 516584 - DNA, 122 bp, Homo sapiens
ttccactgatatctcaaaaggtgatctggacaaaggaacaggtatctcaggaaaggaaacagattcattgtctgtctgaggatgagttaagttcttctacaagttcaactgataagtcagat

SEQ ID NO: 516585 - DNA, 99 bp, Homo sapiens
taaacccaaaggaaagaaaaccaaagatatgaaaaaacctgtcagagtacctgctgaaccacaaacaatggagagttacaatgcaggagttaaacatta

SEQ ID NO: 516586 - DNA, 101 bp, Homo sapiens
gtggaattcgcgaagctgccaaagccttagacaagtctgtttctgtcgactgtggaccacttatgtgcgatccgtggaccacttgcgtgcgatctgtcggc

SEQ ID NO: 516587 - DNA, 101 bp, Homo sapiens
cttgtggccctgggaggaagccatggactctaccaagtctgaacccctgaagggatcaccagagatatttggagttcttacaacatggcagacattgacaa

SEQ ID NO: 516588 - DNA, 89 bp, Homo sapiens
agacaaaatgtggtaaaacccattgataatccaccgcatcctggatcaactgtaatgagagatccaaacaccaagcgctccaggggctt

SEQ ID NO: 516589 - DNA, 100 bp, Homo sapiens
atctggatggtcacttactgagcagtaatctatgccagcaattatgacaatgttagcagaccatgcagctcgtcagctgcttgatttcagccaaaaactg

SEQ ID NO: 516590 - DNA, 83 bp, Homo sapiens
cgcgtgcgcggacatggcctcaaacggatgatcggctgaatgtaacagaggaactaacgtccaacgacaagacgaggattctc

SEQ ID NO: 516591 - DNA, 75 bp, Homo sapiens
caagaatatgctgccaaaattatcaacaccaaaaagctttctgctagggcagaaacagtcctgctccagctgtaa

SEQ ID NO: 516592 - DNA, 103 bp, Homo sapiens
cgcgcagggcctgcagcgggagctggacggcgagcgcgagcggcgcgagaaagtatttctgggaaaagccagcttctgtttgcactggtcttcacaactcgtt

SEQ ID NO: 516593 - DNA, 71 bp, Homo sapiens
ccaccgccctctggccgttgcctcaccggaaatgggcaagttcatgaaacctgggaaggtggtgcttgtcc

SEQ ID NO: 516594 - DNA, 75 bp, Homo sapiens
gtcgtccgaggcccagagatgaccccttatgaagatcaggatcctcatgaccagccaaagagaagaagaattagg

SEQ ID NO: 516595 - DNA, 89 bp, Homo sapiens
caaggtgtacttcatctacgagaggaggaagacaatctgtctctgctgaccgcactgctggaagaaaatgagtcagccttggattgtaa

SEQ ID NO: 516596 - DNA, 83 bp, Homo sapiens
ggcttcagtgaacatggaccctgccctcatgttcaggactcgcctcctgacaaggtgatccgggcgggccccgcaggaatttt

SEQ ID NO: 516597 - DNA, 100 bp, Homo sapiens
ttgtattcactgataatgagacctttgctggaggtgtccatcctgctattgctctgagggagtatcgaaaggtaaaaccacctcagctaattgattatct

SEQ ID NO: 516598 - DNA, 75 bp, Homo sapiens
ctgacagaactggttcagcggagaataacatatcttcagctttggggccatttggatcacacgatgttttttcaa

SEQ ID NO: 516599 - DNA, 100 bp, Homo sapiens
acctcccggcgccgggacgcttcttctccctgccaaggtaaccctgctggggtcagttatcttcacattccagcacacccagcatctggcaatatcaaag

SEQ ID NO: 516600 - DNA, 75 bp, Homo sapiens
agcccagctcaacgtcgtcgcaccagcaattaccagctctggctgggtcgccacaacttgtttgacgacgaaaac

SEQ ID NO: 516601 - DNA, 82 bp, Homo sapiens
aaaaaggaggccaaagactttggatctgctggaggaaggaaaggccacggttccctgcctggcagaaaaacttaccagcgag

SEQ ID NO: 516602 - DNA, 100 bp, Homo sapiens
aaggattccagcagattttggcaggtggatcttcttgttccaaccaaagtgactggcatcattacacaaggagctaaagattttggtcatgtacagtttg

SEQ ID NO: 516603 - DNA, 74 bp, Homo sapiens
ggttattagagaaagagaaaggatttctaagcaggaactccccagtggctagaagtgaccccaggattttttta

SEQ ID NO: 516604 - DNA, 99 bp, Homo sapiens
ggaaaaacactagagacagacggctggcagggtggttctcttcccaaagtggaagccaaattcatcaattatgtgaagaattgcttccggatgactgac

SEQ ID NO: 516605 - DNA, 82 bp, Homo sapiens
ggacaagcaggtctaccgggccacgcaccgcctgctgctgctggcccccaaatacatcaagatgtttgtactggatgaagct

SEQ ID NO: 516606 - DNA, 100 bp, Homo sapiens
caagggatggccggctcctctccaccgtcatccgtgccttggacacaccgaggtgctggcccagcagggggagtacagtgaggccatccccatcctgagg

SEQ ID NO: 516607 - DNA, 100 bp, Homo sapiens
tggcattacgcaggccagcaactcccagctcaatgcaatggtggaatacatgttggtatcttttgatcatgaaaataaaaaagtccggttggtcctgtct

SEQ ID NO: 516608 - DNA, 50 bp, Homo sapiens
tttatcgaacttgtcaatgaaggaaggaatccaaccacccaggtcaaaca

SEQ ID NO: 516609 - DNA, 74 bp, Homo sapiens
tggcatcagcagacccatttcctcagggagaccagtgtaaatttgatcatgatgcagagatagaaaagaaaaag

SEQ ID NO: 516610 - DNA, 100 bp, Homo sapiens
atggaggcacctgtcggcagactggtgacttcacttttgagtgcaactgccttccagatggctattcatatgaaaaggaagcaatggaaaattggatcag

SEQ ID NO: 516611 - DNA, 83 bp, Homo sapiens
gccgcggagccggcgctgagaggggctgcggccggagcgggcggctgagacaaaggcgacgatgatgataattccgaagaagg

SEQ ID NO: 516612 - DNA, 75 bp, Homo sapiens
tcttggaaaacttggaacatgaagacacttttgtatatctatctgcaattcaggcattgtcgtggaagttctccg

SEQ ID NO: 516613 - DNA, 75 bp, Homo sapiens
aggaccaacatgggcattttgtttatgagcaaggtgggatgttgagcactacagacctcacagtgccaaatggag

SEQ ID NO: 516614 - DNA, 100 bp, Homo sapiens
gtaaacttcataaccagctatccgggttcatcctacatttttgtgcaagagagatcatgatgcagccgtccttttggatttctttttaataatgtgtgac

SEQ ID NO: 516615 - DNA, 100 bp, Homo sapiens
aaggattccaagtaactcttatttgggctacactgatgaacctgtttctaagatcctgtgtcaagtggaagatgggacagttgtacagctagatcgctgg

SEQ ID NO: 516616 - DNA, 112 bp, Homo sapiens
cgcgtcctcagacgcagcgtctagtccctggccatagctccgccgctgcccgcgtgagtgcatctccatccacgttggccaggctggtgtccagattggcaatgcctgctgg

SEQ ID NO: 516617 - DNA, 100 bp, Homo sapiens
cgtcaggggttgcaggtgtgtgggaggcccctgagatgctcatgcccttggattaaacccctgcagtgctggaagaagaggactctgcactgcctgccac

SEQ ID NO: 516618 - DNA, 100 bp, Homo sapiens
aagcttgaaatgctacatttccaaggtggttatcactaggctaaaactggacaaagaccgcaaaaagatcctcgaacggaaagccaaatctcgccaagta

SEQ ID NO: 516619 - DNA, 90 bp, Homo sapiens
aactaggacacctagattctttgtgactgtcatgtggcatgggtctctgcccaagctcgtaatgagactatagcaaggcggctgtgggac

SEQ ID NO: 516620 - DNA, 100 bp, Homo sapiens
ttgctaagtggcttgcttgagttgacacagggagctccaggactcaccctcagttaatgttggagaagattgtccagtgtttgatggactctttgagttt

SEQ ID NO: 516621 - DNA, 75 bp, Homo sapiens
taggcgcgcggggcccgccatggctgcgtcggagctctacacaaagattgccatcacgaaagccaaagtggattt

SEQ ID NO: 516622 - DNA, 74 bp, Homo sapiens
aagaaggcaacgacgttccatctgtggaaggacctaccaaccagagagagcaggagattcggatgggtcagatg

SEQ ID NO: 516623 - DNA, 111 bp, Homo sapiens
cacagatggaaccagaaaagatacgaggctctaggagagattctgtttctggcgtctgcatacgcaagtccccaactcgctgaggagagctgttcagctatggctgctgtc

SEQ ID NO: 516624 - DNA, 83 bp, Homo sapiens
cgcggattcgccgaggcaccgaggcactcagaggaggcataatggttatgaaagcttctgtagatgatgacgattcaggatgg

SEQ ID NO: 516625 - DNA, 75 bp, Homo sapiens
gtggagcagataactgcagtggttttctaggagtgcggccaaaggggagggatgctgtgcacactgtggaaggct

SEQ ID NO: 516626 - DNA, 75 bp, Homo sapiens
ccaaaggagccagcctggacgatctcattgacagctgcattcaatcttttggcccctccagccagcgtcaggtgc

SEQ ID NO: 516627 - DNA, 88 bp, Homo sapiens
cacggtcagggcgtgacgtcgggaggagggcaggccgacgcccccaacccatccctcatcccagagactgatgccgtgggtgtgactg

SEQ ID NO: 516628 - DNA, 100 bp, Homo sapiens
gactcaactgaactcctccagcctccagaaagtgacaaaaggtgagacactcacctagaacagtgccgtgctgctgctgggaagttgctttacacaacac

SEQ ID NO: 516629 - DNA, 83 bp, Homo sapiens
ctggaagagtcttgtgatttgggagacaggtggcaagtgggatgatactggtcatggctttctttctcatcacctacaccttt

SEQ ID NO: 516630 - DNA, 82 bp, Homo sapiens
gtggtgtccagccggatccagcatctctccaccatcgactacgtggaggacgctatcatggtgaacttacttcagattgtgc

SEQ ID NO: 516631 - DNA, 74 bp, Homo sapiens
gtgtctgcctccttttgcttcagctgctcatgcctcactcaggttctatgaatttgaatgctgtgtgtgtcgcg

SEQ ID NO: 516632 - DNA, 83 bp, Homo sapiens
ccagtcccaggacgtggcgcgggtctccagtgcttcagtttgcctgagaatacagatcaacccacagaacaaagcggatttcc

SEQ ID NO: 516633 - DNA, 78 bp, Homo sapiens
aataaccaggtgcttggcaaaatcgagcgggccattggggatcctcttggtgtatgacatcaccaaccgctggtcctt

SEQ ID NO: 516634 - DNA, 75 bp, Homo sapiens
gtttaatgactttggtgccctcaacatctctcagagacgaaaggttggtgatgaaaaagacatcctgccaccgaa

SEQ ID NO: 516635 - DNA, 75 bp, Homo sapiens
ggcccccctggcgtcactggtgtccggggcttccgagtggacctgccaatcaagtcggcccgctaccgtggccag

SEQ ID NO: 516636 - DNA, 100 bp, Homo sapiens
caggatggactatcattactcctccaacaccaatcatcccagacgattgcgagcaccttatccgaaggatgttggtcctagacccatccaaacggctaac

SEQ ID NO: 516637 - DNA, 83 bp, Homo sapiens
tagatagagccaaacaatcttttcaagaggttcaagcagttcttctcactgacattttagttttccttcaagaaaaagaccag

SEQ ID NO: 516638 - DNA, 90 bp, Homo sapiens
cagcacacagaagccgagacgtttctacagcagtataatcactacaaatccaatgtggagattttcaaattgcaaccaaataaacccagc

SEQ ID NO: 516639 - DNA, 75 bp, Homo sapiens
gaaaatggtgcctgctgaccttctggagttattggctagtaagaaagatgtccagggtgctgcagaaggacgcgg

SEQ ID NO: 516640 - DNA, 83 bp, Homo sapiens
cgacaaatccctggcccgggtgacccacgcggaggccgtcaagaccatacagtcaatttaagaagtaggaatggctggccggg

SEQ ID NO: 516641 - DNA, 82 bp, Homo sapiens
cctgaaggatgggactgaagggggatcatctagaagacaatgcagatcttcgtgaagactctgactggtaagaccatcaccc

SEQ ID NO: 516642 - DNA, 101 bp, Homo sapiens
caaagcctgcccagacggctcacctgtgcgggatggaacaaaaggtgtttccccccgggccggcctgccgtgacgatcacagccctgccgtctcaggtcac

SEQ ID NO: 516643 - DNA, 101 bp, Homo sapiens
cctgaggagtccccgctgcttggctactgcagcactggggtgtcagttgttggtccgacccagaacgcttcagttctgctctgcaaggatatataataact

SEQ ID NO: 516644 - DNA, 82 bp, Homo sapiens
ggggcacggatgtccagatctacatctgcaaacaatggacggagattcttcactttacagaaaccctgaagctgttacagcg

SEQ ID NO: 516645 - DNA, 95 bp, Homo sapiens
tcggctcagtggggaggccttcgactggctgcttggggagattgagtccaagttcaaccaagccattgaacatgtttgacaagctgaaccgtgat

SEQ ID NO: 516646 - DNA, 100 bp, Homo sapiens
cagcctcccgagtggctgggattacagcgcaatgtccctgctcttctctcgatgcaactctatcgtcacagtcaagaaaaataagagacacatggctgag

SEQ ID NO: 516647 - DNA, 75 bp, Homo sapiens
gatctggtgtaccaggcgaagctggccgagcaggctgagcgatacgacggcctgccttgctctgccaggaaccat

SEQ ID NO: 516648 - DNA, 82 bp, Homo sapiens
cccgggtccccgcgttcacagccccagcgcaggcacaattctgtcttctcttgaactgcataactgagaactctgcaaattc

SEQ ID NO: 516649 - DNA, 75 bp, Homo sapiens
ggcctgccccgccggagcagcatcatcaaggctcgtgaagaagaaatgactgcaaaagtaagggacctgcagact

SEQ ID NO: 516650 - DNA, 100 bp, Homo sapiens
ctgggggtgcgcgcctgcgacctgcccgcctggttaatcagctgtgttcagcgaatacttatgaacagaaggctccagcagcagtacaatcagcagcaac

SEQ ID NO: 516651 - DNA, 82 bp, Homo sapiens
cagcctgcggagcctgtggggcaggaatcccttggcaccatgtcctgtgtgcattataaattttcctctaaactcaactatg

SEQ ID NO: 516652 - DNA, 98 bp, Homo sapiens
gtggaccttagtgatcaggtggcacctactgacattgaagaagggatgagagtggggcatgttggagacttgggcaatgtgactgctgacaaagatgg

SEQ ID NO: 516653 - DNA, 76 bp, Homo sapiens
gcagtggtcgcttcttctccttggctggaactcagatcagcctggcagatttaccattttccagtgaggttttcac

SEQ ID NO: 516654 - DNA, 101 bp, Homo sapiens
tccgcctgtagatgacccacagagtggagaactgccttctgaaaggtggaatcctactcagaatgtgaggtatggcgactacccgaagctccctgaccgct

SEQ ID NO: 516655 - DNA, 108 bp, Homo sapiens
ggcagctccattatcctccttgatgaaagagctcccagccagcactggccactccagagcctcctccccaggcagctcgaaactgtttggtaaacgatcaaggagttg

SEQ ID NO: 516656 - DNA, 100 bp, Homo sapiens
tcggatcaccggcgtgccccaccatgtcagacgcagccgtagacaccagctccgaaatcaccaccaagatctctgttgaggagctggcgcggaatctggt

SEQ ID NO: 516657 - DNA, 100 bp, Homo sapiens
ggcagaacaacaagaggcaggacttccggcagctactcatggggatggctgacaagaacatccagtattatgagaaggtgagagaacgccgagccgtcgc

SEQ ID NO: 516658 - DNA, 99 bp, Homo sapiens
gtttcggtcatctaaaggaggttttaaacagtataacagctggctggcggggacctggcaggtctactggaggccctgtctgacatgggcctagaggag

SEQ ID NO: 516659 - DNA, 50 bp, Homo sapiens
ctcagcgctcgcccctgctcatggtggagccagggcaagatttactgctt

SEQ ID NO: 516660 - DNA, 83 bp, Homo sapiens
cccgcttccatgcggttcgggtccaagatgatgccgcccatatagttgcaaggaagccccgtgtgttttgatatacattcctg

SEQ ID NO: 516661 - DNA, 82 bp, Homo sapiens
aggaaactgggtcccttgaagaatctacagatgagtctgagtgctctccacctgcctgaagcaagaacagctcttttagagg

SEQ ID NO: 516662 - DNA, 83 bp, Homo sapiens
ccgagacgcggcgcgcacgctccggcctgcgaagaagaaaggagggcgcgggctaatgaccgagaatacaatgagaaattcca

SEQ ID NO: 516663 - DNA, 75 bp, Homo sapiens
ccttcagcatcatgcagccgccgccgaggaagtacggcaagaagaagctgaaatacctgccctacaatcaccagc

SEQ ID NO: 516664 - DNA, 100 bp, Homo sapiens
agggtcaactgtgactgtttcaggaatcggatataacatcatccgggtacccatggccagctgtgacttctccatccgcacctacacctatgcagacacc

SEQ ID NO: 516665 - DNA, 100 bp, Homo sapiens
accagttggatggacactgaaggaatcaagacagcggaatcagacaggccaggagtggtggctcacacctgtaatcccagctctgggaggccaaggccag

SEQ ID NO: 516666 - DNA, 95 bp, Homo sapiens
cagaggctcccgggctggactcaggcttctcagcttagaccatgctcagcctccaagcagccttgtcatcgacaaagaatctgaagtttacaaga

SEQ ID NO: 516667 - DNA, 100 bp, Homo sapiens
gtggcatctgcggccatggcggcgactactgccaaccccggccccaaggcccagaagaaatttaagcgtcttatgctgcatcggataaagtgggatgaac

SEQ ID NO: 516668 - DNA, 50 bp, Homo sapiens
ctgacctgtaaatcatcctttagattccagaggggtgactaccatattga

SEQ ID NO: 516669 - DNA, 82 bp, Homo sapiens
cacgaagttctcgcgagagtcgtctcctcgataccaagtggtgtgacaagaatgactgtctccctggtggttattgtttttg

SEQ ID NO: 516670 - DNA, 83 bp, Homo sapiens
cccgtccagaagcctgtaggaaagcggaagcggcctggcaggggaaggatcgagacaatgcagatcttcgtgaagactctgac

SEQ ID NO: 516671 - DNA, 82 bp, Homo sapiens
ttaagagtggcctaagaggctgctgcactgaaatgttcatctctaacaagtatttagtgaaacgacagagcagagactatga

SEQ ID NO: 516672 - DNA, 83 bp, Homo sapiens
caagatatactactaactttgaaatggaataaggtcaaaatgcagatcttcgtgaaaacccttaccggcaagaccatcaccct

SEQ ID NO: 516673 - DNA, 82 bp, Homo sapiens
tgggagagaggtacctctccttttccctctccctttccctaaggcgagaaccactgtctctgatcaacgtgcggaagaggaa

SEQ ID NO: 516674 - DNA, 90 bp, Homo sapiens
ccggatcaatccagatggcagccagtcagtggtggaggtgctgagcccccggaccgacattggtgtatatgggagtggcaaaaataggag

SEQ ID NO: 516675 - DNA, 97 bp, Homo sapiens
tccaactcaacctctgttccagcttggcaggattccgatgcaacaccatgcaaaaccccgaaacagctgctttgccgtccgtccactgggaaccgag

SEQ ID NO: 516676 - DNA, 75 bp, Homo sapiens
gcggccgaggacgcagccaacagggctgccagtgcatctgaatctgccctccagttcctcctcttcgtccctcag

SEQ ID NO: 516677 - DNA, 98 bp, Homo sapiens
gccctgaaagatcgagcagaggcctatttgatagaggaaatgtatgatgaaggccacggcacatgttcctgtggtcgctgtgtttgtgagagaggatg

SEQ ID NO: 516678 - DNA, 99 bp, Homo sapiens
aaaggattttaggagagtggaaaatgcttatcacatggaagcagagaaagagcttaattcccgagatggagcttgggaaagaatatgtggcgagaggga

SEQ ID NO: 516679 - DNA, 100 bp, Homo sapiens
cgaagttctaaccctcctgctcgatctcagagctcagacacagagcagcagtcccctacaagttccgatgaagttaaattccgtcaagatttaatgaata

SEQ ID NO: 516680 - DNA, 80 bp, Homo sapiens
ggatgatcaagcggagttcgatgcgggtttcttgaattcctctgagctttctggacttccagctgggcctgacagagaag

SEQ ID NO: 516681 - DNA, 100 bp, Homo sapiens
tgtatcaagtaatggtgcaaagcctgaaaacactatgtggctgccgtgtaagagtggaactgtcgaatggtgaaaaaagaagtagaaatcgtggcccacc

SEQ ID NO: 516682 - DNA, 113 bp, Homo sapiens
gcggtgcgcaagcgcaaccgtcggtgggtcggggatcggtcgcctgagagattgctcatttagaaagtggatgtgtgggataacatgtccaatgtgtccgaggagagaagaaa

SEQ ID NO: 516683 - DNA, 75 bp, Homo sapiens
ggcccgagcgcgccccaagcccgggcgccaccgctgccacctccgcgagactgtgccctgtccacggtgcctcct

SEQ ID NO: 516684 - DNA, 75 bp, Homo sapiens
cacagaggaggccagggaagctctagaggcgttttttggccaagggggtttccaggcctgaggtgcccgccctgg

SEQ ID NO: 516685 - DNA, 109 bp, Homo sapiens
cgcgcagggcctgcagcgggagctggacggcgagcgcgagcggcgcgagaaagttgggttaacggcatggagaacagtcaccccccccaccaccaccaccagcagcccc

SEQ ID NO: 516686 - DNA, 82 bp, Homo sapiens
gggtaaaagtagagaaggatcaaggacggatgatgaagtagtacagaggcatgttggagacttgggcaatgtgactgctgac

SEQ ID NO: 516687 - DNA, 82 bp, Homo sapiens
gccagaagacaaagtcaattccatgacatttttattccttccccaagtctggaagaacaatcaaatgatgggaagaaagatg

SEQ ID NO: 516688 - DNA, 100 bp, Homo sapiens
agctatgcatgctgcttttgatgtctgacaacgtggatcgttgttttgaaacgtgaatatgcaggttttgatgagacgcagccaacagctgaatctggtg

SEQ ID NO: 516689 - DNA, 74 bp, Homo sapiens
tctcttcagaacagagccaatggcttggaatgaggtatctttaggtggtgttgatcttacagtccgggtgctca

SEQ ID NO: 516690 - DNA, 50 bp, Homo sapiens
gagagtggaaccaacggattcaaggccagcgatctgtacatgagacccag

SEQ ID NO: 516691 - DNA, 100 bp, Homo sapiens
aggaggaaggaaattgaacccataagaatggagtgggatacagaaggcaacgccggaagtcggtgcagcccacctcagaggagcgcatccccaagaccat

SEQ ID NO: 516692 - DNA, 80 bp, Homo sapiens
atgcaatgtcacttacaacattaatcagatactgcatttaagggagtttgagcctttgctgaagccacacgtggctgtga

SEQ ID NO: 516693 - DNA, 50 bp, Homo sapiens
gccacatcattcggaaagccgacagtctttcccagggaactccgatgaag

SEQ ID NO: 516694 - DNA, 75 bp, Homo sapiens
atttcctgcgctgttccacctcattcaacttcagattgacgagatgcctgaggctgccgtgaaatcaacagccaa

SEQ ID NO: 516695 - DNA, 100 bp, Homo sapiens
gccagagtgaccaggctgaccagcaccagccctgatccaggaacgtcagtaatccaggtgacagcttcagatgcagatgaccccacttatggaaatagcg

SEQ ID NO: 516696 - DNA, 75 bp, Homo sapiens
tctacctgcaccctggagccgtggtgtttgggcggcctatatcaatgatgtcaaacggctgaaacctggctactt

SEQ ID NO: 516697 - DNA, 82 bp, Homo sapiens
ttgcgtcctgcactgaaaggaaatgacggattttgagccttcacgtaaatgggtccagtcatgcctcccagtaagaagccag

SEQ ID NO: 516698 - DNA, 56 bp, Homo sapiens
agggaggtccccacaaccacgccattgctgaccctggctgggcatccatcagcagg

SEQ ID NO: 516699 - DNA, 75 bp, Homo sapiens
gacaattcctcaagtggacttggccatgattggttgcgcggatcaagaagatcatgcagacggacgaagagattg

SEQ ID NO: 516700 - DNA, 100 bp, Homo sapiens
ggccatcacccaggtcagcaagggcacctgcgagcaagcagagagactttcaagcagctggctggatgttcgtcatattgaaaagtatgtagaccaaggt

SEQ ID NO: 516701 - DNA, 50 bp, Homo sapiens
gaaatccacactgttctcaagaagattgcattcatggcttctctggcaac

SEQ ID NO: 516702 - DNA, 100 bp, Homo sapiens
cagccggaggatgagtcgagagggctgagcggagagtgtggtcctcggcggctggaggtaaagagaaatgtgtatgaccttacaagtatccccgttcgcc

SEQ ID NO: 516703 - DNA, 83 bp, Homo sapiens
cagccgcaccatgccgctcctaagcctgcacagccgcggcggcagcagcagtgagaggatcccatgacagattctgttgtcac

SEQ ID NO: 516704 - DNA, 87 bp, Homo sapiens
agcctgccgtacttctgattttgaaacacctgggtctgggcttcccgggcgagcggtgggtcctggcagtcagtaacttttgaaagg

SEQ ID NO: 516705 - DNA, 99 bp, Homo sapiens
tttaatgaattcctaagccttccatgggggcttatttggcctccccaggatggactggagcatcagtagtgcccgggtttatcacaggacagatactca

SEQ ID NO: 516706 - DNA, 98 bp, Homo sapiens
tcaaagctgcacggcagtctgtttatgagataatgtacaacggccagccaattaccaaaatggcctgtggggctgaattcagtatgataatggactgc

SEQ ID NO: 516707 - DNA, 100 bp, Homo sapiens
gcatttacatgacagaaatcacctatgtttacagcgacaggacatccataaaaattcatcagagagcattttactactgagctgcaaaggtaggaaaaat

SEQ ID NO: 516708 - DNA, 89 bp, Homo sapiens
cttcaaaacaactggaatatttagcaaggattcaaggctttcaggttatgaagttcatggaatggaaaaaataccagaagatggaccag

SEQ ID NO: 516709 - DNA, 82 bp, Homo sapiens
aacctcaaagcatggctaagagtgttcagtagaaatgggagttcatgatcaagtgttgcccacaccaaatgcttcatccaga

SEQ ID NO: 516710 - DNA, 75 bp, Homo sapiens
aaggattccaagtaactcttatttgaagcaaaacggacaagtcggtttttaagtggcattatcaactttattcac

SEQ ID NO: 516711 - DNA, 82 bp, Homo sapiens
tacctaccaatcgtgaaaactatattcacaggcaaatcctgatcctaactgttgtcttggagtatttgggctgagcttgtac

SEQ ID NO: 516712 - DNA, 100 bp, Homo sapiens
gacttattagatgaccctaattcagaaaagaagaagaagagggatactcccatgctgccaaagttcgaagcattcagcaaacaatggcaaggcagagcca

SEQ ID NO: 516713 - DNA, 75 bp, Homo sapiens
cctgtgaccacccctgaagaaattgcacagtatgatccatttgctgagcacagacctccaaagattgcagaccgg

SEQ ID NO: 516714 - DNA, 75 bp, Homo sapiens
caaggatagcacaacccctttgagtcacggccccttcacagatgtagtcactacaaatcttaaattgcgaaatcc

SEQ ID NO: 516715 - DNA, 50 bp, Homo sapiens
aaacaatgagtcatctgatagctcatcaaattcataatgcactgaaagga

SEQ ID NO: 516716 - DNA, 101 bp, Homo sapiens
gtgtatactctacaatctaagaaggatttcagcaaatttggagcaggtatggaaatttcatcgataagctaagactcttcaccaggggaggatccggtgga

SEQ ID NO: 516717 - DNA, 82 bp, Homo sapiens
cctcgacccagggcccgcgggccaggagagcgctcggcggcgggagatacagatgacccaccaagaattactcagaaccctg

SEQ ID NO: 516718 - DNA, 88 bp, Homo sapiens
gacaagaagctcacccaggaacaagtatctgacagatatcgcatcacaattggcaataaaacctgtgtgtttgagaaggaaaatgacc

SEQ ID NO: 516719 - DNA, 73 bp, Homo sapiens
attctaatttgaaccatgtttggattgaagccgcctctgtattacttaccagatcctatagcaatggaactca

SEQ ID NO: 516720 - DNA, 74 bp, Homo sapiens
ttttagggtcctttatatagaagggagagtaggcgatatgaaaggtgaggtctatccatttggcatcgttggga

SEQ ID NO: 516721 - DNA, 50 bp, Homo sapiens
tgaacatggagccatgccagaacagccaaatgatttctcagtatcactaa

SEQ ID NO: 516722 - DNA, 96 bp, Homo sapiens
cagcgggagctggacggcgagcgcgagcggcgcgagaaagctccctggggaagggaatgcagggttgctggggctgggcccagaagcagcagcacc

SEQ ID NO: 516723 - DNA, 82 bp, Homo sapiens
cttcggcacaagggcccaactggaattccacttacggatgccacagggcccagtgggctccgggtcctgccccagggctacg

SEQ ID NO: 516724 - DNA, 100 bp, Homo sapiens
gcgccggtgacgtccctcccgctggtcaccactccggcaccagggattgtcaatgaggcagatcagattccgatttgacgggcaaccaatcaatgaaaca

SEQ ID NO: 516725 - DNA, 100 bp, Homo sapiens
ggccgcgattttctgcaggccccacgagtgggaggtgctgagccgctcagcaaatgaagctcgtgaccgagaacctgaaggaggaaccaatggaaagcgg

SEQ ID NO: 516726 - DNA, 100 bp, Homo sapiens
ctaatctcacggatatcctctgttgggggagaaggactaaaccactttaaaggcaaatgcttccacagcagggactataaagaaccaggtgtattcaatg

SEQ ID NO: 516727 - DNA, 100 bp, Homo sapiens
gcactggctgctggtcaaggcttcagtgtggagtaattgacactttcgagcaccctggaggagaagaggttctgctggaacaagctggtgtagatgcaag

SEQ ID NO: 516728 - DNA, 74 bp, Homo sapiens
tagaccttaaaggagctccaccaaaggtctcgtacctctcagagaggagctgatcacgcagtacctggctgagc

SEQ ID NO: 516729 - DNA, 78 bp, Homo sapiens
cggcaagaactggattcgtggcgccacaagctcattcactgtgtagatccagaagcagcaaggtctagcaattccaaa

SEQ ID NO: 516730 - DNA, 101 bp, Homo sapiens
cagtggagagtacaggtgccagacaaacctctccaccctcagtgacccggtgcagctagaagtccatatcgaatacagattctgttcatcttgctctgaaa

SEQ ID NO: 516731 - DNA, 90 bp, Homo sapiens
cctgcgtcatgtccagagtctggagccggaccccggcacgcccgggagtgagcggacaggtgctgttgggaacacagaggaagtgactgg

SEQ ID NO: 516732 - DNA, 100 bp, Homo sapiens
cttccctggtcgaacagttttttctaatggctattcaagctctctatcaatatcagctcacatcattgaaaagataattttgaagacatgttttgctgaa

SEQ ID NO: 516733 - DNA, 100 bp, Homo sapiens
ctgcctaagccaactcgaaaaagccgtacaaaaaataagcaaaagcgtcccaggagatgcatgttcctggtcattcgggatttataggcaatgaagaagc

SEQ ID NO: 516734 - DNA, 83 bp, Homo sapiens
ctaatttgaaccatgtttggattgaagccgcctctgtattacttaccagatgcctgaggaaacccagacccaagaccaaccga

SEQ ID NO: 516735 - DNA, 97 bp, Homo sapiens
ggagaagaacctctcataccctcgggacgtaccaaggccagttcaccaacggcatgcgccatggctacggagtacgccagagcgtgccctacgggat

SEQ ID NO: 516736 - DNA, 100 bp, Homo sapiens
aagaccttctcttgccaggccctgccctccgagggcttcagtctggagccgcccagagattttgagaagagggggaaaaaggaagtttgtcctgtcctgg

SEQ ID NO: 516737 - DNA, 97 bp, Homo sapiens
ggtgtttttctcaggtgaaaggagcagtagatgatgatgtagcagaaggttttaaaaagttgcagaaagaagaaaggaaagggaaagaaaagtgttc

SEQ ID NO: 516738 - DNA, 51 bp, Homo sapiens
cgggcccttgaagtcttcaagcagcgttctgcggggagtgtctccagccct

SEQ ID NO: 516739 - DNA, 126 bp, Homo sapiens
gttcaacttccaggatgagactcccacaaccaacttcgacaccttccctgccgccatcctcactgtcttccaggtcatactccctgtcacaaactccagctgaactaacttggaggaggatcttcc

SEQ ID NO: 516740 - DNA, 90 bp, Homo sapiens
gatccacagctaagacgccaggacccactggaagcctagaaatggatcaacactctgtggtaggccagaacacaggccccagtccaagtc

SEQ ID NO: 516741 - DNA, 98 bp, Homo sapiens
tggagacatcaatgtatttcttaccaaaagacactttcagatgtttctttctcagcaaaatagaggagaagcttacccctcttccagaagataatagt

SEQ ID NO: 516742 - DNA, 83 bp, Homo sapiens
gcgtctccgcgttcccagcccgggtccccgcgttcacagccccagcgcaggtggtgatgatgtccagcaactctgtgaagcag

SEQ ID NO: 516743 - DNA, 100 bp, Homo sapiens
ttcctttccgacttagtcctcgggaagaagtttcagactacaagattgttccccattttggagatgaagaaactgagactcaaagcagctgagtgacctt

SEQ ID NO: 516744 - DNA, 50 bp, Homo sapiens
gcatgggctacaaggaaaacgaccggaacatgaacattttgcagtactgc

SEQ ID NO: 516745 - DNA, 95 bp, Homo sapiens
tgacgaaattgaaattacctccgagggaaacaagaaaacatcaaagaggtctagcaaagaaaagagtctgccgcctgcagcaacagggcctggag

SEQ ID NO: 516746 - DNA, 75 bp, Homo sapiens
ccgatgaagtgcagaggtttttttctgggaacacagccgcacccgggtctgtgccagctgtggttggcagtgccc

SEQ ID NO: 516747 - DNA, 93 bp, Homo sapiens
agggagccgtgggcgctcggtgcccgggccgggcaggtagagttggctttgtgggacacagctgggcaggaagattatgatcgcctgaggccc

SEQ ID NO: 516748 - DNA, 126 bp, Homo sapiens
ggggctttcgcccgggtcctcctagaaattccccccgaagaagactcccccacatctggcaattctgtggtgttcttggtcacacatttatggagtttctgaagggcagtggagattactgccagg

SEQ ID NO: 516749 - DNA, 75 bp, Homo sapiens
aagaaacgtcaggctcctgatccgaatttggtgtttcctgaggttataggcgggtgtttgaggagtacatgcggg

SEQ ID NO: 516750 - DNA, 98 bp, Homo sapiens
aggatttgcttttgtaacttttgatgatcatgatacagttgataaaattgttggcataaaggcaacacaagtggtcaggctcagctactctggttcct

SEQ ID NO: 516751 - DNA, 83 bp, Homo sapiens
ccgcaccaagaaccaaccctgccagcacctggaccttggacattcagacttcagaatggctaaagtaaataatgccagcctga

SEQ ID NO: 516752 - DNA, 75 bp, Homo sapiens
tttaggatatctactcagtgctgaatgtacagatagttctgccccagagacaagtatgaataccacagacaacgg

SEQ ID NO: 516753 - DNA, 76 bp, Homo sapiens
ccagggacgtcttggagaacaagttgctcccgttgagaagaggctgagacccgtgctgaatttgcagagagaacgg

SEQ ID NO: 516754 - DNA, 75 bp, Homo sapiens
ggaaggatcttcagacaggattcttgaactggaccaggagctcataaaagctgtcctgcatctccagtatggaat

SEQ ID NO: 516755 - DNA, 100 bp, Homo sapiens
aatgttgtcagaagtagggagtaggcactagtcacctaagataaggagctggattctgcccaagctatatgttctcctttcagccaagacctttcaccag

SEQ ID NO: 516756 - DNA, 100 bp, Homo sapiens
tggttccgcacggccagagcttccagaatggctatgccggcatcttccatttccaggcctccccatggccacccatggaccagtcggcattcacttcctc

SEQ ID NO: 516757 - DNA, 83 bp, Homo sapiens
caggctgcggggcgcggagtcgggagataccagcgggcaagcagaaaacaagaggctcaagaggggcagcccccgcatagagg

SEQ ID NO: 516758 - DNA, 100 bp, Homo sapiens
caacagacattttgctgctgctacaaagttctcctgaaaagaaagctgaacattcatctataaatcaagaaaatggcactgcaaaccctatcaagaacgg

SEQ ID NO: 516759 - DNA, 100 bp, Homo sapiens
tcaacttctgaaatttacagaaacaaactacatctcagggagcctgtggtgctgaccgacacaaatcttgtgtatcctgccctgaaatgggaccttgaat

SEQ ID NO: 516760 - DNA, 80 bp, Homo sapiens
cgtcagcactgactttcagctatggaatcggtttttcgttggaatatacgttgcacatttatggcgattctgagtgtgag

SEQ ID NO: 516761 - DNA, 75 bp, Homo sapiens
gcagatgttgatcactgaaaatgatttatgcaagtttaaggcctccccatggccacccatggaccagtcggcatt

SEQ ID NO: 516762 - DNA, 75 bp, Homo sapiens
gcaaagtgtccccggcaagaagttaatagaagatgaaattgcaaccattcttaaatctacattgaaaggactaga

SEQ ID NO: 516763 - DNA, 100 bp, Homo sapiens
cgcgccggaccaagcgggcccagaagcgggagacagtgtttcacaaaatgattttccttctgaagctcccatctccttgaatctttctcataacatctgc

SEQ ID NO: 516764 - DNA, 101 bp, Homo sapiens
agccaattatgttaacagagaggcaggcagtatgacacctaagtcgccctccactgacatctttgatatgattccattttctccaatatcacaccagtctt

SEQ ID NO: 516765 - DNA, 82 bp, Homo sapiens
tgaatatgccagggccaccccgaaaccctgagggtgatgaaaactggcttggcaactcttgtgaaatttcatagatctcgtc

SEQ ID NO: 516766 - DNA, 110 bp, Homo sapiens
gagacaatggactcagaaaatgcaaatagtgacatggataaaggacagacagagatttgggattagaatctaccttaatatcgtcaaaacctcagtctcattcactgagt

SEQ ID NO: 516767 - DNA, 100 bp, Homo sapiens
cctatttgcacaccatccaggagtcagtttattactggaaagatctagtgaaaagccatttgatgtatgcggtcagagaagaagtggaggtcctcaaaga

SEQ ID NO: 516768 - DNA, 75 bp, Homo sapiens
cggaaggcttcaaaggctgtcgcaaggaggaaggactctgaagacctactgggtgagcaaaggcagtgcctttag

SEQ ID NO: 516769 - DNA, 82 bp, Homo sapiens
cagtggcggcgcgtaggaggcgaaagtcctacctccatctccgtgggccccagcaccagccgacggcccgcagcctcccaaa

SEQ ID NO: 516770 - DNA, 100 bp, Homo sapiens
gctacaacctgaagagtccggaacttccaatactatgttgaattggaatggagagagagggcatccttgtcttgtgctggttttcaaacgaaatatagaa

SEQ ID NO: 516771 - DNA, 96 bp, Homo sapiens
tgctgtgcagagaggtggcaccttccagatggggggtagcagcagccataacaggtcctgttcgtcattgccaaattcctgacttgcctgtggatg

SEQ ID NO: 516772 - DNA, 100 bp, Homo sapiens
ggattatcgtagcaaggtgctcttctgggacaacgcgtacgagttcaacctcagcgctctgaagccccccagggcccgtcagtggcctgaggagatggtt

SEQ ID NO: 516773 - DNA, 100 bp, Homo sapiens
agtggaacagaggagctttctgtcggcctgcttagcaacagtggtgcagggatcgatttgcttagtggtataatacctgaactctgtcagaaatatccag

SEQ ID NO: 516774 - DNA, 50 bp, Homo sapiens
acaggatccggagctggagcccccaggtcggcaccatgcgccctgcagcc

SEQ ID NO: 516775 - DNA, 89 bp, Homo sapiens
cggcgcggcagcggagggacggcagtctcgcgcgatgaagatctccttcaacgacaaaagcctgcagaccacatttgagtacccttccg

SEQ ID NO: 516776 - DNA, 83 bp, Homo sapiens
ccggcacttccggccggcggcggctgctccgggtgagcaggacaatgcagatcttcgtgaagactctgactggtaagaccatc

SEQ ID NO: 516777 - DNA, 90 bp, Homo sapiens
gaaacatgaaaacatcgtggccctgtacgacttccagctggagccagacggactgctggtgtgggtcctggcaggcgccctggggctcag

SEQ ID NO: 516778 - DNA, 73 bp, Homo sapiens
caggcctccgcttctccggcctccctgctcttaccgggagggatctgaaacttgcccacccttcgggatattg

SEQ ID NO: 516779 - DNA, 117 bp, Homo sapiens
gccagacctatggcaatgggtccaagtgcgaccttaatgggaggccccgggaggccgaggttcggctggagaagcgactggaggagtggttggggaggacattgcctggcagtgact

SEQ ID NO: 516780 - DNA, 83 bp, Homo sapiens
tgagcaaccgcagcctccgcggccgagagtgcagcgaaatgccagaggattcaacatgagcatacctatgcctgggcatccag

SEQ ID NO: 516781 - DNA, 75 bp, Homo sapiens
tccaggagctgctgcgcacgaccggcgcctcggacaccttcgagggttgggctgaaacacttttccaggaaatct

SEQ ID NO: 516782 - DNA, 82 bp, Homo sapiens
ggcttcaggctctcagggggcatagacttcaaccagcctttggtcatcaccagggttgcgaggggcggtgttgaagaatgtg

SEQ ID NO: 516783 - DNA, 82 bp, Homo sapiens
tttaaaagacagtcctcgtcagcactgactttcagctatggaatcgatcaacaggcggtccttcgggtcggagtggacatcg

SEQ ID NO: 516784 - DNA, 87 bp, Homo sapiens
cagttcaagtggttctcctgcctcagcctcccgagtagctgagattacagctcaaatcccagccttctatatggacacaagtcattt

SEQ ID NO: 516785 - DNA, 74 bp, Homo sapiens
agagaaaccaaaaagatagaatggactttgaattttctcccaaactggttggcttgactggcacgagagaagag

SEQ ID NO: 516786 - DNA, 82 bp, Homo sapiens
caggatgtctacaaaattggtgggtggttctcttcccaaagtggaagccaaattcatcaattatgtgaagaattgcttccgg

SEQ ID NO: 516787 - DNA, 50 bp, Homo sapiens
aaattcatttgcagataggccagggaacgggtatggcaatccccgaaact

SEQ ID NO: 516788 - DNA, 100 bp, Homo sapiens
ctttcttccagcttctgctgtccttctttgtggagagcaagagtgaagttcccagaccctacgccccgctgtcaggcagcccgccgatcagatggaggag

SEQ ID NO: 516789 - DNA, 73 bp, Homo sapiens
cctgccattgatattgatgcacagagaatggatcttggagaatgtctgaaagtccatgacctggctttaagag

SEQ ID NO: 516790 - DNA, 99 bp, Homo sapiens
cagtcagtactcttattgattcacttaagaaaactcagcctgagaatgatgttttactgtgcctggctaactatagtcgagggggtgatggtcctatgt

SEQ ID NO: 516791 - DNA, 82 bp, Homo sapiens
cgctgacaggggggcctggccgcgcagccggtgttaagtgtgatgcttccataatacatttggatgctgtcagctaagttca

SEQ ID NO: 516792 - DNA, 82 bp, Homo sapiens
cctaagcctgcacagccgcggcggcagcagcagtgagaggtgatggtaatgcccgaaggagcagacacggtgtccaggccca

SEQ ID NO: 516793 - DNA, 75 bp, Homo sapiens
ccagccgcaatgccattaccagttcctacagctccactcgaggcatctcacagagcctggcagagagcaggtgtg

SEQ ID NO: 516794 - DNA, 90 bp, Homo sapiens
gggcgcggacacgcgcggacacacacgtgcgggacacgccctcccccgacggcggcgctaacctctcgctgtgatgcagatccatccgcc

SEQ ID NO: 516795 - DNA, 100 bp, Homo sapiens
gaaacaatcgtggctacaaaaatcaatctcagggctacaaccagtggcagcagggtgatggatagaatgacagaagatgctcttcgcttgaatctgttga

SEQ ID NO: 516796 - DNA, 100 bp, Homo sapiens
atgatctcatcagagttgtttatagtgatcttcatcctcagagggaaacattcactgcacagaaccggatttgcgcaagcaggtagcgccgctgctgaag

SEQ ID NO: 516797 - DNA, 100 bp, Homo sapiens
agtggctggtgcccatcgggcgctgcatgtgcaaagcaggcttcgaggccgttgagaatggcaccgtctgccgagggtcctatccttcccccaaagctgg

SEQ ID NO: 516798 - DNA, 73 bp, Homo sapiens
cagctctgagccttccacatcagaagtccacagagatcagtgaaaatgcctcgtgtaaaagcagctcaagctg

SEQ ID NO: 516799 - DNA, 100 bp, Homo sapiens
aactatggaaaaagatcgaggtggagcctatggaaatagagcaattttccagattattcaaagtatcaggatgggcatgtgaagtgactgaccttaagat

SEQ ID NO: 516800 - DNA, 75 bp, Homo sapiens
cagccggccaccgccgagacccagcacatcgccgaccaggttttgggatttgagattgacgcggtgaactctgtc

SEQ ID NO: 516801 - DNA, 100 bp, Homo sapiens
tggactcatggaggctgagcatttattcaggaagttgcagtgaaggaacagttaacaggaaaaggaaagttgagcaggaggagtatcagttctccaaatg

SEQ ID NO: 516802 - DNA, 88 bp, Homo sapiens
acctgcatgtactgggggattcgcagggaggatgtcgggacaccccggaagctgggaaatggtgtgagatgcacaatgcgaaacctag

SEQ ID NO: 516803 - DNA, 100 bp, Homo sapiens
gtgagcgcagccactcaggctggtcctgggggtggggctgtaggggaaagtgctaaagccgctgaggatgtttcgtctgaactcactttctgctttggca

SEQ ID NO: 516804 - DNA, 75 bp, Homo sapiens
ccgaggctcctgcgctcccgcgccgcgctcccctcgcccgcccgggccgccagattcttcagcttgtctctaacc

SEQ ID NO: 516805 - DNA, 75 bp, Homo sapiens
catatatcccagatttctgtggcagaagatgatgatgaaagtgacctagatgtgaaggctggtggaggctgtgta

SEQ ID NO: 516806 - DNA, 75 bp, Homo sapiens
gaagcgggtcctggtgaccggcggtgctggtttcatatgcacagtctctgacatcagctctcctgggaccctcca

SEQ ID NO: 516807 - DNA, 50 bp, Homo sapiens
gagcagcaagtcagggagcttaaggtccctccttgtggtccatttctggg

SEQ ID NO: 516808 - DNA, 100 bp, Homo sapiens
tacatgatttaaacaagagatttccacagaaggaaaatttctaccttgaaccgtatctgaaagaggttattcgggaaagaaaagaaagagaagaatgggc

SEQ ID NO: 516809 - DNA, 82 bp, Homo sapiens
gcggaggcagcaccgaggaagcatttatgaccttctacagtgagggtgaagagggaacagaaatctttgccccctgactttg

SEQ ID NO: 516810 - DNA, 124 bp, Homo sapiens
gggacccagaccctggagcctcagttggaagcagccgatccagcctgcggagcctgtggggcagatcagtcgcatcgaatacattcattcaaagaacttcatccaccgggatgtgaagccagac

SEQ ID NO: 516811 - DNA, 82 bp, Homo sapiens
cagcaactgaggcagcggcaggctcaggtgcagccgctgtaagactttgaccccgacgcaggcttcagtgattgccgcggat

SEQ ID NO: 516812 - DNA, 100 bp, Homo sapiens
gtcccggggccgacccggcccgtagtgtggaagcagcttcagtggtttgagtccagccaatgacactggagccaaaaagaagaaaaagaaacaaaaaaag

SEQ ID NO: 516813 - DNA, 51 bp, Homo sapiens
cgttttaattgactatgacaccaaaaggctactgcagcactggggtgtcag

SEQ ID NO: 516814 - DNA, 98 bp, Homo sapiens
tcggagcgctgtcgcggccatgtctgccaggtggtcattagggagacgctgttgcggcagctggagacgaaccagctggacatggacgccacgctgga

SEQ ID NO: 516815 - DNA, 90 bp, Homo sapiens
gcccctgtgaggaggtgatcaaaaacctcagcctggaggccattcagctgtgcgaccgggacggtactactgagcgagtgtgcttgatcc

SEQ ID NO: 516816 - DNA, 83 bp, Homo sapiens
atacgactgaccctggagctgaaggccaggttttgcagtggtctgaggtgctggaaacgtgcgtagcaacagtaggccgagta

SEQ ID NO: 516817 - DNA, 101 bp, Homo sapiens
tgagcgtcaaaattatccgaaaccgcctcactggaatttacatagtacatgacgaagttaaggataaagcttttgaactagaactcagctgggttggtgaa

SEQ ID NO: 516818 - DNA, 89 bp, Homo sapiens
atgcatggtgtggggttggtgtgattagcttcgcagtctggaaagctttaggagttcacagtatgttcctgcagcagccagctgtatcc

SEQ ID NO: 516819 - DNA, 83 bp, Homo sapiens
tgcagcgggagctggacggcgagcgcgagcggcgcgagaaaagaggaggttcagatgagcccctgctgacttgagagagacag

SEQ ID NO: 516820 - DNA, 75 bp, Homo sapiens
gtgggcgctcggtgcccgggccgggcagggtatttgaagtataccatacaactgttttgaaaatccagcgtggac

SEQ ID NO: 516821 - DNA, 100 bp, Homo sapiens
gcaggagctcagctctgagttggccgagcaggagctccgcgtggcccagacagagtttgaccggcaagcagaagtgacccgtctcttgctggagggaatc

SEQ ID NO: 516822 - DNA, 73 bp, Homo sapiens
accctgccaaatacatcagcttgtaggagacagagtttgtctttgtcagcgccacgtgagacacctacaacga

SEQ ID NO: 516823 - DNA, 90 bp, Homo sapiens
acaaggaagtgaaacaccaatgcagtgctgcaggtggagaaattttcagcctgtgtttacctgagttggctgaaatggtttctgaaaatg

SEQ ID NO: 516824 - DNA, 90 bp, Homo sapiens
gtcagaaagaagccaaggaatttgccaagaaggtacaagagctgcagaaaagcaatcaggttctggagaaggagaagaaacgtaagaagc

SEQ ID NO: 516825 - DNA, 74 bp, Homo sapiens
gccgatccagcctgcggagcctgtggggcagggaacggcaggagcagctgatgggatatcggaagagagggccg

SEQ ID NO: 516826 - DNA, 100 bp, Homo sapiens
ctttgtccccttgctggctgcccctcaggacccctgctacgtggagaaaacctcggataaggctttggaagatcgggtatgggaactcttgcaggaagca

SEQ ID NO: 516827 - DNA, 82 bp, Homo sapiens
catgccggcccggcggctgctgctgctgctgacgctgctgctgcccggcctcggggttttaaaatcaaagatgggaaaatcg

SEQ ID NO: 516828 - DNA, 82 bp, Homo sapiens
ccctcgcgagccatccagaacgagatcagctccctcaaaggcccctggccccaacatggcccgtcgctctcagagctcctcg

SEQ ID NO: 516829 - DNA, 74 bp, Homo sapiens
cgaagaaagaagaggaacagaagtggaaatggtggttgtgtcaaaccgattggtgacatctccatgctgtattg

SEQ ID NO: 516830 - DNA, 100 bp, Homo sapiens
catccccttgctggacagtggctgtgatgtgaatcccgatggagcggcccgaggaaggcaagcagtcgccgccgccgcagccctggggacggctcctgcg

SEQ ID NO: 516831 - DNA, 100 bp, Homo sapiens
ggcgattccagagagcggcggaaaggataagcctcgacttagaagctaccgagttaccctaagaaagaagaggactgtcagaaggacgtagaaggcacgg

SEQ ID NO: 516832 - DNA, 83 bp, Homo sapiens
ggtgccagaggccctggagatgaagcatcatgcactatcctgttgggagcatcctcacctccaagacactgtttgggcctgag

SEQ ID NO: 516833 - DNA, 83 bp, Homo sapiens
ggcgccatcaccgagcgcttgatgtgcgcggagagcaatcgccgggacagctgcaagagcctggcagagagcaggtgtgtgat

SEQ ID NO: 516834 - DNA, 75 bp, Homo sapiens
ctgaggtccagatgaaagagaagtttctggtcactccccaggattatgcgcgggaactctaatgatccaggacaa

SEQ ID NO: 516835 - DNA, 112 bp, Homo sapiens
caatggcgctgtcgtgtacccttaacaggtatctgctcctcatggcgcaggagcatctggagttccgcctgccggtccatctgaactgtttactgtttgttcatcgattagc

SEQ ID NO: 516836 - DNA, 100 bp, Homo sapiens
ctcttggcttcaggttctgatgatgcaaaaggatgaatttcatcctttcatcgaagcacttctgccccacgtccgagcctttgcctacacatggttcaac

SEQ ID NO: 516837 - DNA, 88 bp, Homo sapiens
gtcgcctccttgcccgtgaccgtcgctagaactcagttgtgcgttgcggccagtcgccactgctgtcccagtagggatggcacaatca

SEQ ID NO: 516838 - DNA, 100 bp, Homo sapiens
gccgcagctgcgggtccgggattcccagccatggcagattcctccgggcagcagggtttggtgcacctcgatttggaggaagtagggcagggcccttatc

SEQ ID NO: 516839 - DNA, 103 bp, Homo sapiens
tggagttcctcctggggaacccgttcagcacaccagtggggcagtgcctcggtcaaaatgcagatcttcgtgaaaacccttaccggcaagaccatcacccttg

SEQ ID NO: 516840 - DNA, 101 bp, Homo sapiens
cttcagaccatggaaccagcattgcccatgccccctgtggaggagctggatgtcatgttcagtgaactggtggacccagatgatgtggtaccagttggcca

SEQ ID NO: 516841 - DNA, 75 bp, Homo sapiens
cgccatgaacaactcgggcgccgacgagatcgggtgcacattcaggttcccgagcacaaacatcaagataacgtt

SEQ ID NO: 516842 - DNA, 96 bp, Homo sapiens
taagtggaccccgcagccagtgccgccctgtgcttgcagcctccttgaccaggcaaagccaaagctaattgagccactcgactatgaaaatgtcat

SEQ ID NO: 516843 - DNA, 100 bp, Homo sapiens
ggatcggggacggagagaacacgagcccatcagctgtccgtacctggcggtgaaaatcacccctgccatccctgcagtcgctggcatcctgttcttcttt

SEQ ID NO: 516844 - DNA, 50 bp, Homo sapiens
acattgtggagaaacgggtcttggcaaaacccgcctagtgccaagcaacc

SEQ ID NO: 516845 - DNA, 75 bp, Homo sapiens
ggagcccacagaatgctcagaattaagtgaatttgtgtctagggtaaagcatcaagtcgaatatttgggtctgaa

SEQ ID NO: 516846 - DNA, 50 bp, Homo sapiens
cactccccaggatacctcgttaagcgtgaaaattgagctaccaacacaac

SEQ ID NO: 516847 - DNA, 89 bp, Homo sapiens
cacagttagacctctgtgaggatgaagatgtatctgaaattttatgctttggatccttcattcccaaggatgaatttgttaactcggac

SEQ ID NO: 516848 - DNA, 100 bp, Homo sapiens
acaggtgaatttaaaggagcagccctggtgtcacctatcagtaaaagggtgaatcaccaggattttcaactgagaaatttaagaataattgaacctaacg

SEQ ID NO: 516849 - DNA, 100 bp, Homo sapiens
ctacgcgagatgttcaccatccatgcctacgtgggcttcaccatggacaagctggtgcagaacattgcgcggcaggtgtcatggagaaactccagctggg

SEQ ID NO: 516850 - DNA, 95 bp, Homo sapiens
tggctgtccttcctcggctccgtagcctgacactccatgggaaccccatggaggaagagaaagggtatagattttgtggaagtataatactttgt

SEQ ID NO: 516851 - DNA, 49 bp, Homo sapiens
agaaattactgtctcaagtgatacggtgatggcatcagctgagaaggga

SEQ ID NO: 516852 - DNA, 75 bp, Homo sapiens
tactccatctcattcattgtacaggaattgaatgatctggcacgggaccctccagcacagtgttcagcaggtcct

SEQ ID NO: 516853 - DNA, 83 bp, Homo sapiens
catcggcctctgcaggcttgccgaagaagggagatggggtcgaggatttggtcttttgggttccatttttggaaaggatggtg

SEQ ID NO: 516854 - DNA, 100 bp, Homo sapiens
caggggcggaggcggaggcagaggtggaggcgctttgaaaggtgtcatggagaaactccagctgggcccagagattctgcagcgggaaaatccaaggctt

SEQ ID NO: 516855 - DNA, 100 bp, Homo sapiens
aaggtcaccatggatgggcgagtcaacgggggcctcaacctctccagagccattgtctgtaagtacactgttcacgaccagtgtgccatgaaagccctgc

SEQ ID NO: 516856 - DNA, 90 bp, Homo sapiens
tggagcaagggaaggagccctggatggttgtgagggaagagacaggaagatggtgcccagagtgcacatttggccatgatcgataccctc

SEQ ID NO: 516857 - DNA, 93 bp, Homo sapiens
agttttaccgtgacaagaagtacgaggaagtgaggtgagaagccctaccactgcaactgggacggctgcggctggaagtttgcgcgctcagac

SEQ ID NO: 516858 - DNA, 89 bp, Homo sapiens
ggctccggagcagcgaggtgtgcgctgactgcagcgggccgggaaggatctgagtctctccctgcggagacagccctgaagaactcctg

SEQ ID NO: 516859 - DNA, 82 bp, Homo sapiens
gcgggtcccggggtgcgagcagcgcacttccggggagcttttggaagagtcccagatggaagcgaccaggctccggcagaag

SEQ ID NO: 516860 - DNA, 98 bp, Homo sapiens
accgtggacatgttccacatcctcacgaagcaggtccagaagcccttcctcagaccggttcaaaccttgtactactcagctgatcacaagctgcttga

SEQ ID NO: 516861 - DNA, 100 bp, Homo sapiens
tgctggccaaatttgaagagaatgcgcccgcacagtccatcggcatacggagacagtattaaaggtggaagaaggtccatatctttttctgtgggtgctt

SEQ ID NO: 516862 - DNA, 80 bp, Homo sapiens
ggctggacctacatgcttcctgctgtggctgtctcggaacccgtggtcctccgcttcatatagttcatttaaagccccca

SEQ ID NO: 516863 - DNA, 80 bp, Homo sapiens
cctaggaatctgcctgataatcgattgcattggcaatgagacaggaggagatgaccgccgggttctgctatggcacatgg

SEQ ID NO: 516864 - DNA, 100 bp, Homo sapiens
ctgacttacactgaactggtactggatgatcaaggtcagctggtccacatgaacaggcttccaggaggaaatgaggtggaagatgaaactgttttacata

SEQ ID NO: 516865 - DNA, 74 bp, Homo sapiens
tggagcaattgaagctgactactaaggagaataagaataactgaagtgaagtgatggactccgatttggagagt

SEQ ID NO: 516866 - DNA, 99 bp, Homo sapiens
atccggtcttagaatacattccagaaaatgtatcaaggaatacggttggacagaatgaactgaagattacaagtgatcaagtgataaattcaggattga

SEQ ID NO: 516867 - DNA, 80 bp, Homo sapiens
gttttgccggaggagcccctcaggccatcaacaggcggtccttcgggtcggagtggacatcggatggtggcctggaagag

SEQ ID NO: 516868 - DNA, 96 bp, Homo sapiens
aaggaaacgggactaaactggcgggctccgtggaagcgtggccggcagcgtcccggacgaggaggagtctgctacaccatttttgatttgggcttc

SEQ ID NO: 516869 - DNA, 83 bp, Homo sapiens
gggctttcgcccgggtcctcctagaaattccccccgaagaagactcccccacatctgggttttgagcaaaattttggactgtg

SEQ ID NO: 516870 - DNA, 75 bp, Homo sapiens
gccctgcagtacctgcagaaggtctctggagacatcttcagcagcttttcacccttccctacaggccggggtttg

SEQ ID NO: 516871 - DNA, 100 bp, Homo sapiens
tccaaacccctttggccctgtatcaggagcacaggacaaggagcatccaagatacctgatcccagaactttgcaaacagttttaccatttaggctgggtc

SEQ ID NO: 516872 - DNA, 74 bp, Homo sapiens
cacctgcagctctgctgagagagtgcaagccgtgggcagccaacagagcagtcagcagagcagccacgatgatg

SEQ ID NO: 516873 - DNA, 82 bp, Homo sapiens
agagagcaagcagggaaagagagcgccaggtgcttagcagattactcttgtctctgctgctcctgggaaagtgatttgtgaa

SEQ ID NO: 516874 - DNA, 100 bp, Homo sapiens
ttcttcaaaggcttctttggaaaataattccagatacgcttactgacatggtgaatcaaatgacagaaaaagtaggcttggttcacgggctgccttacgt

SEQ ID NO: 516875 - DNA, 100 bp, Homo sapiens
ctctgagctatgacaagagaggaaacaaaaagttaaacaagcaagcctgccataagtgagaagatccccataccgagtgtgcctacgttccagccgtcta

SEQ ID NO: 516876 - DNA, 82 bp, Homo sapiens
ccaagaaccttctggccaaggtgattcagattgcaacgtcatcctccacagctaaggtaaaataccatgaagattttgaaaa

SEQ ID NO: 516877 - DNA, 97 bp, Homo sapiens
aaacacctgaaggtgaagaacatcatccagtggcagacactgaaaataatgagaaggcaaccaaagtgcaggacatcaaaaacaacctgaaagaggc

SEQ ID NO: 516878 - DNA, 100 bp, Homo sapiens
acctcatcccctggatgggggaccacaagatcctcatcgacagcaaccatgtccaagggacctgcagttggtattgatcttggcaccacctactcttgtg

SEQ ID NO: 516879 - DNA, 80 bp, Homo sapiens
cattgctgcctggaccgtccgtgtctgtgaaagccgccaccggcacggccaggccagcatggtggaccacttacttccag

SEQ ID NO: 516880 - DNA, 98 bp, Homo sapiens
cccttttcctaactatgctgactctggcgctggtcaagtcacaggacaccgaagaaaccatcacgtacacggtgggcccatctggggcagggaagagc

SEQ ID NO: 516881 - DNA, 83 bp, Homo sapiens
cagaccttcattgctctgtgtgccaccgctctacagtctgctggagaggatcaacccggaccacagcttccctgtcaggtgag

SEQ ID NO: 516882 - DNA, 89 bp, Homo sapiens
cagatgctggcgacctatccagaatgatcaaggatgctgatatgctaactggtgatgagcaagtatggaaggaagttcaagaatccctg

SEQ ID NO: 516883 - DNA, 100 bp, Homo sapiens
gtcagagcgagcttcggagaagcagtggtgggttccatgtgatggtggagtaggaggcaggtctccgcggcaaatttagcgatcaacccagcggccttgc

SEQ ID NO: 516884 - DNA, 100 bp, Homo sapiens
acaaaatcagaggcatactttataggagtaaacatggaagtactaacttcattccagaacaatttttggatgacttcattgatcttgttatctggggcca

SEQ ID NO: 516885 - DNA, 100 bp, Homo sapiens
tgaaaaacagaatggaaaagagtcttctgcttattccactaagctcaacaaatttcctgtatttaatattaatgatgacttgaatgatctgtgtaccagt

SEQ ID NO: 516886 - DNA, 98 bp, Homo sapiens
cgaaggactctatccaacctattatatgctcctgtgacgtttgatgacatcactgtgtacttactccaggaggaatgggtgctgctgagccagcaaca

SEQ ID NO: 516887 - DNA, 98 bp, Homo sapiens
gtggacaattcccgagatcttgggagcccaggctaccagagcacctgtccctcggccgcctggtacagctcccactctcagcaggtgacactcgcggc

SEQ ID NO: 516888 - DNA, 100 bp, Homo sapiens
gggacacggcaggagaatcgagctgggggagtggcccaggatcccggcccacagccgtggaagggctcctcgaactcctatgccattaagaagaaggacg

SEQ ID NO: 516889 - DNA, 90 bp, Homo sapiens
gacaacaagtactgcgccgactgcgaggccaaagctcaaatagctataactgtaccaaagacatggaagaaaccaaaagatcggacccga

SEQ ID NO: 516890 - DNA, 101 bp, Homo sapiens
gagctgagcttcaaaaggggggacatcctcaagcagcgtcaccctttacaccagaaagctggcgggcactatggggaaaaaacaaaacaagaagaaagtgg

SEQ ID NO: 516891 - DNA, 50 bp, Homo sapiens
gtgcaggaggtgctgaaggccaggtaatcattaccaaatgaggaggaaag

SEQ ID NO: 516892 - DNA, 51 bp, Homo sapiens
gaactgggtgctttatatagggtcctgggaactccaacaagggagcaaatc

SEQ ID NO: 516893 - DNA, 73 bp, Homo sapiens
accagcctggacaaaggagagaatgggactctcaggtaacagagattcaaaggtaccttcagaaggaaagaaa

SEQ ID NO: 516894 - DNA, 50 bp, Homo sapiens
gccgccgctgccgcttccaccacagtccaagccttatgcatttgatcggg

SEQ ID NO: 516895 - DNA, 100 bp, Homo sapiens
gcaaaccgagcgatcatgtcgcacaaacaaatttactattcggacaaatacgacgacgaggagtttgagtatcggtgtctcccagtctgctaaagcccta

SEQ ID NO: 516896 - DNA, 75 bp, Homo sapiens
gagtcagtcattttactgtcaagacatttcttcggcattctgcaacaggtccacgctgcttttatgagctgtaac

SEQ ID NO: 516897 - DNA, 75 bp, Homo sapiens
gaaatgggcatacaacaattcagatggctccggactatgaccacttgactctgatgcagaaggtggaggtgtttg

SEQ ID NO: 516898 - DNA, 82 bp, Homo sapiens
gcagcaacaacagagagcacgtggtgtcgtgaaaactacccctaaaagccaaaatgggaaaggaaaagactcatatcaacat

SEQ ID NO: 516899 - DNA, 100 bp, Homo sapiens
ggctgacccctcttcatcgtgctgctgcctcccgaaacgagagctcgtccgcatggtgctgaatggctgaggaccttcccagtctccccagagtccgtgc

SEQ ID NO: 516900 - DNA, 76 bp, Homo sapiens
gggacaccgcacagccgggaaatgggtttagatgtagattctctggtcattgagcatatccaagtgaacaaagcac

SEQ ID NO: 516901 - DNA, 76 bp, Homo sapiens
cgggggggaagtgactgggcggtgccggcgccggagacgatgccgttatccctcatccacctacatcaggcaactg

SEQ ID NO: 516902 - DNA, 89 bp, Homo sapiens
gggcagagcaaagactccagtaacactcaagcaaagaagagttgagcacaatcagttcaggcccatgaagttcatcagaaaattctggc

SEQ ID NO: 516903 - DNA, 101 bp, Homo sapiens
tctggtaacttgggaatcaattgacatctatggaacttctgttatggttcagaattaaacaaccaccatgtcgagcaaaaaggcaaagaccaagaccacca

SEQ ID NO: 516904 - DNA, 100 bp, Homo sapiens
cagcccatggcttacgctgcacttccatcccacggtcagcaacttgagttggtggaaccaagtggctggattcatgttcccttaactgacaatcataaga

SEQ ID NO: 516905 - DNA, 50 bp, Homo sapiens
cagcctgtgtgcactggtctcagtgactacctgtttaagctgcttttgat

SEQ ID NO: 516906 - DNA, 90 bp, Homo sapiens
gcgccttctcctccgccggtcccatacggtggtacatgccagagtcctgctctcccggcccttgtccgtccaccagcccctcctttgcaa

SEQ ID NO: 516907 - DNA, 75 bp, Homo sapiens
cacagctggatgtttgcgacatcccagagagcttccagagaaattatctcattcaaagctagtgcaactttatgg

SEQ ID NO: 516908 - DNA, 90 bp, Homo sapiens
agaagctggtgttgatcaacaaatcaggttcaaatctgaacatcaatgatgtactagggaactactcattgactcttgttgatgcattgg

SEQ ID NO: 516909 - DNA, 83 bp, Homo sapiens
cctttatgatgatctgcttccacttaattaatagtcagcagcaaggacaagatggagtaaaagtccagcaagctactatagct

SEQ ID NO: 516910 - DNA, 100 bp, Homo sapiens
accttatttctctgctgagtgtccagatcctccaaagacagatctgtggaagcatcagttcacagcagtaatgcacactgtacagataagacaattgaag

SEQ ID NO: 516911 - DNA, 75 bp, Homo sapiens
aggcctgccgttggctatagcaaatgccccaggctttcctcggagacgggtggcatggggagcagctagaacaat

SEQ ID NO: 516912 - DNA, 96 bp, Homo sapiens
cagatgtgaataaaactgaccatagccagagaacagccctccatcttgcagcccagaaggttgaaatcacaaagattagacacctttttagatagg

SEQ ID NO: 516913 - DNA, 87 bp, Homo sapiens
gcggccgaagcgtggggcgcgcgtgcggaggaccaggcgcggcgcggctgcggctgaggatacaagaccctcctgaaaggaatttcc

SEQ ID NO: 516914 - DNA, 82 bp, Homo sapiens
gagaatggcttgtgaaatcatgcctctgcaaaggagagccttgaacttaggaattcttcgagatcctggatcagaaatcgaa

SEQ ID NO: 516915 - DNA, 82 bp, Homo sapiens
caaacacccgttcttctggagcctagagaagcagctccagttcttccaggcatccagcaagatgaggacatctatgaggaag

SEQ ID NO: 516916 - DNA, 75 bp, Homo sapiens
ttctgttttgcctgaatacatgatttaaacaagagatttccacagaaggctactgaaagcattaaaatgctggtg

SEQ ID NO: 516917 - DNA, 100 bp, Homo sapiens
aaatgggtttccagatagacttgcgtctacagaacaaacagaggagtgtgctgaaaaacaaggccaaattgaacgagtcattaaggaaaaaaaagcagtg

SEQ ID NO: 516918 - DNA, 50 bp, Homo sapiens
ggatcctacatgtgccatagggtccctctgctggctccggttctgcgagg

SEQ ID NO: 516919 - DNA, 98 bp, Homo sapiens
ccttccaaagtgctgggattataggtatcatttctgtgagaagtgtttcaatgagatccaaggggagagcgtttctttgggggatgacccttcccagc

SEQ ID NO: 516920 - DNA, 48 bp, Homo sapiens
agaccaggatccacccgaggaagatgatatcatcaagttgaatcgaaa

SEQ ID NO: 516921 - DNA, 83 bp, Homo sapiens
gccgaccgagaacgcagcatccacgacaatgcagatcttcgtgaagactctgactggtaagaccatcaccctcgaggttgagc

SEQ ID NO: 516922 - DNA, 83 bp, Homo sapiens
cctggctaagcaaaaccctgcagaacggctgcctaatttacagcaaccatgagaaaatatatcgctatcgtctcctatgagca

SEQ ID NO: 516923 - DNA, 100 bp, Homo sapiens
atcggggccgcactgtggtattcgccggcacgcgaagtggccgcatccgcaagaatgtggccccgtcccagagcaccacccgagacatcaggagcccatc

SEQ ID NO: 516924 - DNA, 75 bp, Homo sapiens
gattcgcagtggtcgcttcttctccttgggaaattaaagagggtgctttactgttgccctgaaattttcaccatg

SEQ ID NO: 516925 - DNA, 76 bp, Homo sapiens
cagagctcattgaaagattggagcaggttgtacatcctggagacctgaagaattctgttgaagtcgcactgaacaa

SEQ ID NO: 516926 - DNA, 106 bp, Homo sapiens
agcgatggcttcagacagcatatttgagtcatttccttcgtacccacagtgcttcatgagagtttaagctatgaagaaggacatccctcacactctgaaacagatc

SEQ ID NO: 516927 - DNA, 80 bp, Homo sapiens
gccgtcgcggagccgcgcagccctcggagcacgtttggtgccctggttgtcagatgttggaaagcagtaggacggaacat

SEQ ID NO: 516928 - DNA, 83 bp, Homo sapiens
gggtggtccaaaagagatgccagtttgcagagaaattccaggaggtgaaagaagctgccaagatagccaaagacaagacgcag

SEQ ID NO: 516929 - DNA, 100 bp, Homo sapiens
tgaatagttctactccttctacaggtgtgtatggtgctgttgggaacacagaggaagtgactggctgggggttcagggaaagctccgtagaagagggaac

SEQ ID NO: 516930 - DNA, 100 bp, Homo sapiens
aaatatggtgtgaaggttggcctgacaaattatgctgcagcatattgtactggcctgctgctggcccgcagggccggtctaattgaagccaacggagaac

SEQ ID NO: 516931 - DNA, 75 bp, Homo sapiens
acagatgcgggccaccacacctggctgtacaaactttaaaattcgtagtcgagatcgggatcggtatagacggag

SEQ ID NO: 516932 - DNA, 50 bp, Homo sapiens
ggcaaggccggtgtgtttatctgcaagctgctggaggaggtgaagtggca

SEQ ID NO: 516933 - DNA, 74 bp, Homo sapiens
ctgtgctgtgtatgaagaggcagtgaagactctgccaacaggaaacacttcaagttgaagaagatgatcgacct

SEQ ID NO: 516934 - DNA, 73 bp, Homo sapiens
aaaaacaagacaaaatctacttcatggctgggtccagcagaaaagaggctattcaagatctctggcagtggag

SEQ ID NO: 516935 - DNA, 51 bp, Homo sapiens
gacaaacagagatatcatttgtcagacagccctgcacctggcagccatcct

SEQ ID NO: 516936 - DNA, 97 bp, Homo sapiens
gtgcagggaccactcacttggcagcagttccataaaatggcaggacggggaacctacggcattggaatggatacttgtgtcattcctttgaggcacg

SEQ ID NO: 516937 - DNA, 82 bp, Homo sapiens
cctcaacaaacaccagcgctttggcgtgagtgcatctccatccacgttggccaggctggtgtccagattggcaatgcctgct

SEQ ID NO: 516938 - DNA, 89 bp, Homo sapiens
agggatgataattgggcctccaagacagaagatggctgtgccacccacgtatgccgatcttggcaaatctgccagggatgtcttcacca

SEQ ID NO: 516939 - DNA, 97 bp, Homo sapiens
aggcgtgagcccccaagatttcacgtactatactggcaattgctggagaagattttgcaattgttgcttctgatactcgattgagtgaagggttttc

SEQ ID NO: 516940 - DNA, 82 bp, Homo sapiens
gtgaacaaagagaagatcacaccactcacgctcaagtccctggctatcttcttcagtgactgctccatccatggtagcccca

SEQ ID NO: 516941 - DNA, 82 bp, Homo sapiens
tccgcttctgctgcctgccgggcgggctccggtggccgagacaagaggagcagcagcggcaccgcccctcaccctggagggt

SEQ ID NO: 516942 - DNA, 51 bp, Homo sapiens
cgtggatgccctgcaccgggtccggcagttctgggaaatgccagtgcaaag

SEQ ID NO: 516943 - DNA, 83 bp, Homo sapiens
agttacttcctgtctagagttgtagcttccacctgtgtcaaaccagaagagaagtaaaattcaacaaaaatttatgtgtggag

SEQ ID NO: 516944 - DNA, 73 bp, Homo sapiens
tgggttctctcttatgattggatgagattgtggggaacctgggtgaaggcacctttggcaaggtggtggagtg

SEQ ID NO: 516945 - DNA, 75 bp, Homo sapiens
ggaatattcccatctcctgcctcctaatagctttgagggtgaacctgccgctgctcaccctgagccagcccctgc

SEQ ID NO: 516946 - DNA, 99 bp, Homo sapiens
ctgcagcgggagctggacggcgagcgcgagcggcgcgagaaaccgcttacaaacacgcagatggcaagaagattgatggcaggagggtccttgtggacg

SEQ ID NO: 516947 - DNA, 88 bp, Homo sapiens
ggcgggcggcggcgcgcggacccaggcgcggatggcgaggccagcagaacgtcaagtctgagttggagatggcccaggaagacctgtc

SEQ ID NO: 516948 - DNA, 89 bp, Homo sapiens
actgttcctgattgtgacattgtgcaagtgttaaattgtgtgccttttgttcctgaagaaagagggaacactgaaaggttttgaccaga

SEQ ID NO: 516949 - DNA, 75 bp, Homo sapiens
ttgacatttaattttagggtcctttatatagaagggagagtaggtgaagattgtccccagtggatggtccctatc

SEQ ID NO: 516950 - DNA, 100 bp, Homo sapiens
ctgccggggcccaaccacaagacgactcaataggaggaagggacacagcaggtcaggagagattcaacagcattacctcagcttattacagaagtgccaa

SEQ ID NO: 516951 - DNA, 75 bp, Homo sapiens
cacctactcgtgctcgggcaagctgctggagagggagatcaaggcgtattatgcggagtgtcacggcgtcatcta

SEQ ID NO: 516952 - DNA, 100 bp, Homo sapiens
cccacggaggccatgggcgacccagcccccgcccgcagcctggacgacatcgacctgtccgccctgcgggactcacaccacccggcaagaactgctcact

SEQ ID NO: 516953 - DNA, 75 bp, Homo sapiens
atttgagattgaagagcttaataggaaatattgggcagttgcattacctgtctacctccttattgctatagtaat

SEQ ID NO: 516954 - DNA, 75 bp, Homo sapiens
cacctagtcgtggccggaggagtctcagagctgtcagaaagatgcctttgaagatgagaaacccccaaagaagag

SEQ ID NO: 516955 - DNA, 96 bp, Homo sapiens
agtgacccagtcagtgcccttcagttaaagaccaccaggagcacacttgtcatccatgcctggcttattatatcatctctattgttgctgttcttt

SEQ ID NO: 516956 - DNA, 100 bp, Homo sapiens
accgtaccttggctgtccctccttggattgagtaccagcatcacaagcctcctttcaccaactgtttgattgcatcgaggtctatgcccctggcttcaag

SEQ ID NO: 516957 - DNA, 75 bp, Homo sapiens
gacagacggggtgagcctcttcttgtgtctggagattctgaggacttgccatgaggtgttgaagccttgtttcac

SEQ ID NO: 516958 - DNA, 95 bp, Homo sapiens
ttacaatgctaccctgctttttctggtgtcctgaacctggaagttgtgctttttaaggaaactttgatccaaaagccatgaataatttttatgac

SEQ ID NO: 516959 - DNA, 86 bp, Homo sapiens
atgcctgcccgtggaggaaagcggcgttccgggtcgggaaagaggttaaagaagacacgcaagtatgatatcatcaccactccagc

SEQ ID NO: 516960 - DNA, 85 bp, Homo sapiens
cgccagtaagaacgaggaggatgaaggactgggatcagatccagacaatagactccttgctcaggaaaggtggctttaaagctcc

SEQ ID NO: 516961 - DNA, 85 bp, Homo sapiens
ctatttgttagtagcatagagaccaatgctattagttcgttacaccaagaaagtaccccaagtgtcaactccaactcttgtagag

SEQ ID NO: 516962 - DNA, 100 bp, Homo sapiens
aaaggaccagacaaatcaaattagtggttttgtgaataccagggcctggtgaagcacacaggaggctgccactgtggagcagttcgttttgaagtttggg

SEQ ID NO: 516963 - DNA, 74 bp, Homo sapiens
acaggaaaatcatattatagatggagtaaaggatgctgaaaacgccattcaacagatgggtggccagtggcttg

SEQ ID NO: 516964 - DNA, 80 bp, Homo sapiens
ctcgcatccactcagaggaaggagtttggggacaccggggagggctgggaggtggctctcgggggctggtccatgggcgg

SEQ ID NO: 516965 - DNA, 75 bp, Homo sapiens
agagggaagacacgcggaaacagaaacaccacaaccccagacccagacccagcaactggaaggaacggatgggcc

SEQ ID NO: 516966 - DNA, 89 bp, Homo sapiens
tgaccagcaggcttaccttgttcaaagaggtatcatatgtttcttacaaagtggaggtttgtggcagccctgcatggagcaagtctgtc

SEQ ID NO: 516967 - DNA, 100 bp, Homo sapiens
tgcagttggatggcggtgactgcgtgatggccctattgaatttcttcttccctgatgaaaagccatactctgaagaagaaagtaggcgtgttcgccgcaa

SEQ ID NO: 516968 - DNA, 83 bp, Homo sapiens
cgcggccaggccccccaacatggactgtctctgtatagtgacaaccaagggaagatcagttttcctgccatccaggctgctcc

SEQ ID NO: 516969 - DNA, 100 bp, Homo sapiens
ccctagcaccccgagaaccgtcagtttgagccagatgggtcctcactgagcagcgagtcgtcccccgtgtcctctccggccaccaaccacagctcccccg

SEQ ID NO: 516970 - DNA, 97 bp, Homo sapiens
ttctgaactcaggacttggcaaccatgctgcggatggtctcagcagttctccagtttggcaacattgccttgaagagagaacggaacaccgatcaag

SEQ ID NO: 516971 - DNA, 96 bp, Homo sapiens
tctggacttggatgcctgcaaagcgaggctgaagaaggccaaggctgcagaagccaaagccacgaggggacagggagctccagcccgagagcctat

SEQ ID NO: 516972 - DNA, 75 bp, Homo sapiens
acaacaaagaatactgaatggctcttctaacaggacagagcgggatgccaccagcttgtccaaagggaagttcca

SEQ ID NO: 516973 - DNA, 75 bp, Homo sapiens
gcaggaagagctgcagtctttgtgggacaaggtggcagtagagaagagcatcacagaagttgctcaggagctgac

SEQ ID NO: 516974 - DNA, 98 bp, Homo sapiens
aaactacccattttcttttttggaactcatgagacatcaacttccagccagacccagccaggcacaggctgggtccagttctgacctgagcacggttt

SEQ ID NO: 516975 - DNA, 97 bp, Homo sapiens
cttggatttggctacacacttatagatcttctgcactgtttacaggcacaggttatgatgtgattgctcaagcccaatctgggactgggaaaacggc

SEQ ID NO: 516976 - DNA, 100 bp, Homo sapiens
gctctggcctggccgacgaggctgccgaagacagtggtgaggagggcgcccctgaacctgcaccaggtttctacagaagaaggcttgagtcttgcccaag

SEQ ID NO: 516977 - DNA, 51 bp, Homo sapiens
gtttttagccttttaacattcaaggattagaaggacagaataacgggctcc

SEQ ID NO: 516978 - DNA, 98 bp, Homo sapiens
ccgggtcatctccagatgctagggttatgggtgatcagcttgaaattcagctaaccgagcagctacggtccctcatccccaacgaggatgtgagaaag

SEQ ID NO: 516979 - DNA, 83 bp, Homo sapiens
ctcggggatctggctcaggcccacatacagcaacttagcgaagctgccggtgaagatgttgatattcactgatggactccaaa

SEQ ID NO: 516980 - DNA, 82 bp, Homo sapiens
taggccgggccctgccagggagcaagtctgcatcgcagaggccagggtgtcgtgaaaactacccctaaaagccaaaatggga

SEQ ID NO: 516981 - DNA, 90 bp, Homo sapiens
ctttcagaagccgaagaggaaagtctagtactcaataaaggctactgtgtgaagacattcacaggacacagagaatgggtacgtatggta

SEQ ID NO: 516982 - DNA, 83 bp, Homo sapiens
ctatgagaaggcactggtggattgtgagtgggctctcaaggttcgagaaatggctgctactaccttaagcggtctgctacagt

SEQ ID NO: 516983 - DNA, 100 bp, Homo sapiens
gtctggtgccggcgtttgggctacggttgttgttggcgactgtgcttcaagcggtgaattttgtggtatgccagcttgttgctctgtttgctgctttctg

SEQ ID NO: 516984 - DNA, 76 bp, Homo sapiens
cacctctcacaacgatgctgaggaccagtttgagccatcatatgtcaggaagggatgagaccatgcagcctgcgaa

SEQ ID NO: 516985 - DNA, 74 bp, Homo sapiens
cggcgaaaggagctggtgcctgtgcaagttgttgagtaaaagcagcgcatccagaggtacttgtttcctggcct

SEQ ID NO: 516986 - DNA, 82 bp, Homo sapiens
tggaataaaaacagagtccgatgaaaggaatgggtctgggaccttaacagggagccatgagtctttcaggatccgactggct

SEQ ID NO: 516987 - DNA, 83 bp, Homo sapiens
tcgacctgctaacagaactggaccttttcggtactttgacccagccaacggcaagttcagcaagtcagccaccagccccgaag

SEQ ID NO: 516988 - DNA, 98 bp, Homo sapiens
gcccgcgctgcagccggagacccggagaaaggtgggcctttggagtgacgctgtgggaactcatgactctgggccagactccctacgtggacattgac

SEQ ID NO: 516989 - DNA, 83 bp, Homo sapiens
cttcagccgaggccgccgccgcctctccttgctgcagccatggacacagcccgttcttcgccgagcagctgaccgcattccag

SEQ ID NO: 516990 - DNA, 75 bp, Homo sapiens
ggaaactcaaggccaatctcaggttgagacatggtgctggagaatctggtaaaagcaccattgtgaagcagatga

SEQ ID NO: 516991 - DNA, 98 bp, Homo sapiens
aagtacttgtggcagttgtggtcagtttcgctttgattgctaccctggtatatgcacttttcaggaaatgcttccagactgcacacttttacttagag

SEQ ID NO: 516992 - DNA, 91 bp, Homo sapiens
cccgtgtgcaaatggaggtcgttgcacccagctgccctcccgggaggctgcctgcctagctgtaggtaaaacttgcctactgatcagttac

SEQ ID NO: 516993 - DNA, 98 bp, Homo sapiens
cgatgccacgggagatggaaccaaggagaaaccatttaaaacaggtctaaaggaggagatgttaaagtaacccatcttgcaggacgacattgaagatt

SEQ ID NO: 516994 - DNA, 83 bp, Homo sapiens
ccggcggggcgcaccacagagaccggcttcaatatcttcacccagcatggtgttttggggaacgagtttagtatattaaaatc

SEQ ID NO: 516995 - DNA, 96 bp, Homo sapiens
gctggccgtgatcaaacactgcaaggaccccctccggctcaagtgtgtcaagcaagtttcagctcctggcatcagctctattcaaatctggttcag

SEQ ID NO: 516996 - DNA, 90 bp, Homo sapiens
ctcctggatgaatccaagttaacccttaccacccagcagcagggcatcaagaatgaagagcttcgaaacttgtctttgtctggccatgtg

SEQ ID NO: 516997 - DNA, 97 bp, Homo sapiens
gggaacgagcgagtcgccgctgcagccctagtgactgcggcctgcatcccgcctgagcggtgcatccccgttcctgggcgagaccaagcaggagacg

SEQ ID NO: 516998 - DNA, 100 bp, Homo sapiens
gggaaaagtggcactgaggctctggaacttctgcccagctctccttgagaagttgatgacgcctgagatgttttcagaaatcctctgtgacgatctggat

SEQ ID NO: 516999 - DNA, 98 bp, Homo sapiens
tcacattcaagctgataggctgcgctaccggaatgtcatccagcgagtgattaggctaaagaacgtgccaatggaatggagcttgatgggcgtaggat

SEQ ID NO: 517000 - DNA, 82 bp, Homo sapiens
cctgaagaaagttgtgaaggaggattttgtgtggatgagggctcggctacagcaagaagtagaggagcagctcaaaaagaaa

SEQ ID NO: 517001 - DNA, 98 bp, Homo sapiens
tggttgctcccagagtctatagcagagatctggacccaagactctggactcccggctttgggctggcagtttactatcaatgtgagcacggacatgcg

SEQ ID NO: 517002 - DNA, 100 bp, Homo sapiens
gtggaacatggctagcaggaatgcttactgttgcgtggttcgttattaacaggctctttggtgtaacgggaaactgcgctgcctgtagtaagctcatccc

SEQ ID NO: 517003 - DNA, 112 bp, Homo sapiens
gatttaacgaatggggttgtgatggcccaggttcttcaaaagatttagagatgtttatgattacttccgagctgtcctgcagcgtgatgaaagaagtgaacgagcttttaag

SEQ ID NO: 517004 - DNA, 75 bp, Homo sapiens
cacttcaccttcatcagaactgtatgaaaatgaaagtcttcagaatggaaggaagtcaactgaatttccaagaaa

SEQ ID NO: 517005 - DNA, 50 bp, Homo sapiens
tggagaactgccccaaggatttgcaagactggatgttgaatttgttctct

SEQ ID NO: 517006 - DNA, 90 bp, Homo sapiens
tgcgctgcagtcagaggccacctctttctttgtgggccggatgggtccttgagttgctgtccccggcataggtccatctctgcagaagcc

SEQ ID NO: 517007 - DNA, 90 bp, Homo sapiens
tagccgctgctgtcttcgtgggaggcgccgtgagttcgccgctggtggctccggccgcggcccatggagcccgccggcccggcccccggc

SEQ ID NO: 517008 - DNA, 90 bp, Homo sapiens
ctccctccctgaggagtacttcacaccagctccttcccctggcgatcagagctcagatagaaaaggagggagttacactcaggctgcaag

SEQ ID NO: 517009 - DNA, 51 bp, Homo sapiens
gatgcactggataactatgttattcgaggaacagcatatgccatatatgag

SEQ ID NO: 517010 - DNA, 100 bp, Homo sapiens
ttaaggaactggaagtacctcattttcaccatgagcttgtatatgaacttgtggagagactccagagcaaatacgagcaccaagtggcataatcacaagc

SEQ ID NO: 517011 - DNA, 88 bp, Homo sapiens
cgggtacggcggccccgcgcagcccccggccgcagcgcaggcagcccagcagggcgccctgcgtccggcagaggaggcgagcatcccg

SEQ ID NO: 517012 - DNA, 74 bp, Homo sapiens
cggagttcgggggatggcacagaatgggcagcccactcacccagtgtacaacattggaccagacaaggtgatcc

SEQ ID NO: 517013 - DNA, 74 bp, Homo sapiens
aaagatggcggcagggaccagcagttactgggaagggcttatttcaaaacctttgtccctcagttccaggaggc

SEQ ID NO: 517014 - DNA, 83 bp, Homo sapiens
aaagaaatggaagattggattgcagcattaaagactgtgcagaacagggagcactttgaggagcttactccacgggaacagcc

SEQ ID NO: 517015 - DNA, 98 bp, Homo sapiens
ctgacggcggagctgatcgagcaggcggcgcagtacaccaacgcggtgcgcgaccgggagctggacctccggggcatgctgcagacagacctttccgt

SEQ ID NO: 517016 - DNA, 75 bp, Homo sapiens
acccccaaggagtcctcttcaggacctcagaggggctatcaacagcaggacgcccatgaattcatgcgctacctt

SEQ ID NO: 517017 - DNA, 83 bp, Homo sapiens
ccggaatctaaaaagccctcagtaccagagacagaagcagatggattcgtccttttaggtactccaaagattcaggtttactc

SEQ ID NO: 517018 - DNA, 98 bp, Homo sapiens
gcctctctacagcttcctgcccaacaccaaaagtagttgtcctgggaacccctgcagaagaagatggtggtggcaaaattgatttaattgaagcaggg

SEQ ID NO: 517019 - DNA, 100 bp, Homo sapiens
cgggcacccctgtccagaaagtcctcaacccccaagactgccactcgaggcccgtcggaaaagtccaacctgatcgtggtccagagaggtcacagcccac

SEQ ID NO: 517020 - DNA, 99 bp, Homo sapiens
ctcttccagataccatttggctttcggctgtgcaggaattttgcccctggactctgaagaccctggactttgtgaagttgttagagtacatgagcatta

SEQ ID NO: 517021 - DNA, 82 bp, Homo sapiens
tgagttgtccgcgaggccccgcgctcaagccgccttctcctgccgaagctgccagtaactcagattctagccatgaaggtca

SEQ ID NO: 517022 - DNA, 80 bp, Homo sapiens
acgaacactctaattgcctcctgatagcacacagaaagtgccggtggtggtgtgcacattgagccccggtatagacagtt

SEQ ID NO: 517023 - DNA, 90 bp, Homo sapiens
cgcagtggtcgcttcttctccttggtgttcatgaagtctgtgaagctggagtgggtgcaagacaacatcagggcagcccaagatctgtgc

SEQ ID NO: 517024 - DNA, 100 bp, Homo sapiens
gttgttctcagctacttgggactcctctctcaagagaagctgcaagagcaacatctttcctcaccccaagagaaatccaagaccagtgacttatcaattc

SEQ ID NO: 517025 - DNA, 100 bp, Homo sapiens
cagaaagagcccagaacattcccccagtgacctgggagctgtcatttccctcctgctctggggacgacagctttttgcactgtactcaggcaatgatgtc

SEQ ID NO: 517026 - DNA, 99 bp, Homo sapiens
agcgtccaccggcggctccgcaagaagtaccgagaaggtggttcagaatctggggagccttatattccaggtgtctttttcagacagtttctacctgta

SEQ ID NO: 517027 - DNA, 75 bp, Homo sapiens
gcaagcaagtttaatcagacctgctcacacttcagaatagagaaggtccagtgcacgtgccaacattacactgtc

SEQ ID NO: 517028 - DNA, 146 bp, Homo sapiens
ggatccgcagctacggaccccgcgaccggatgcgcgaccgctacgacgccttctgcttcacctccgcgctggcggcctgcagcatggcccagctgttcctgcccctgctggcagccctggtcctggcccaggctcctgcagcttta

SEQ ID NO: 517029 - DNA, 100 bp, Homo sapiens
ctggtgatctggactgactgtgatagagaaggcgaaaacatcgggtttgagattatccacgtgtgtaaggctggaataaatgatggtgctgcagctgtcg

SEQ ID NO: 517030 - DNA, 75 bp, Homo sapiens
cagatgtctgacagccctgtgtgacaccaagataagtaacgcaatctttggcagccagacactacctaactccaa

SEQ ID NO: 517031 - DNA, 95 bp, Homo sapiens
ggccttcgcgtctgcccggccaagaggcaaaggggaggttacgcagcaaaccatccagaagccatcccaggcctcaggacctgagttctccgacg

SEQ ID NO: 517032 - DNA, 100 bp, Homo sapiens
ctagaacaagaagaagaggagaggaaaaaggaagagagcactgcagccagtgaaaccactgagctttccgggccctcctgcagatccgggcggtgcggaa

SEQ ID NO: 517033 - DNA, 75 bp, Homo sapiens
atcgcggagtcccaatgaaacgggcagccatggccctccacagcccgcaggggagaagcccgaggaagattgacc

SEQ ID NO: 517034 - DNA, 75 bp, Homo sapiens
agaaaacagcaggcacccaagcgggcggcagtatctccagatgaaatggccactgcttgatgtccaggcagggag

SEQ ID NO: 517035 - DNA, 96 bp, Homo sapiens
cgccgacatcaattacgccaatgtggacggactcactgccctgcaccagatgccttcaattaagttgcagagttctgatggagagatatttgaagt

SEQ ID NO: 517036 - DNA, 83 bp, Homo sapiens
caccctcatctatatcctttggcagctcacagggaaatcctcattgacgattcaatttgttgaaggccaatttgtggactcct

SEQ ID NO: 517037 - DNA, 82 bp, Homo sapiens
ggcccagggaccaggcggaggcgtcgcgggagcctttggggcaccacagagatgcgggtttttagaacttcagccataaaaa

SEQ ID NO: 517038 - DNA, 100 bp, Homo sapiens
atgagaggatgtggtggtctactctgatgtcaatcttgagggctagctggcccccaagaggaccctttccaagtccccagctgggggccctgtgtagacc

SEQ ID NO: 517039 - DNA, 51 bp, Homo sapiens
gaagggtgtttggggtgtgttttacaaaggacgactgggtttggattcaga

SEQ ID NO: 517040 - DNA, 101 bp, Homo sapiens
aacttcatgtcctggatgtggcagggaacaggactctgtctactagtgacgatgtcgaagacagggaaaatgaaaagggtcgccttgaagaagcctacgag

SEQ ID NO: 517041 - DNA, 98 bp, Homo sapiens
ggaaggtgcggggagcggagccatggcctccgtctattgcgtctgcagacatggatttcaaccagctggaggcattcttgactgctcaaaccaaaaag

SEQ ID NO: 517042 - DNA, 100 bp, Homo sapiens
aactagccctcctactgatgaacagttgaacatgaagaatactggaaagttgctatgttttgatgacagatttgaagatctggaagaggcaaatccattc

SEQ ID NO: 517043 - DNA, 73 bp, Homo sapiens
cgacatgttgcttttcgtggaggtttctaagcatgaattgaggaacagaagaagcagagcagatgatcggagc

SEQ ID NO: 517044 - DNA, 50 bp, Homo sapiens
aaaaaaggcacctgctgctaagattgatgactacagcatggttcgatttt

SEQ ID NO: 517045 - DNA, 83 bp, Homo sapiens
caggcatcagtcaggcagatgtttgtcgactggaatgggaaccgcggggaaaggcgaatgggtgcttttgaatgtgttcgtaa

SEQ ID NO: 517046 - DNA, 76 bp, Homo sapiens
ctcgtggaagatttagaaagagagcctggaagacctagatcttcggacaaaagactgtgttgtcaaatgttcagga

SEQ ID NO: 517047 - DNA, 107 bp, Homo sapiens
atctggtgatagccttggttctgaagatcgtgatcttctttacaggtgtgatgaatgcagactctgctaccattttggctgtttggatcctcctttgaaaaagtctc

SEQ ID NO: 517048 - DNA, 90 bp, Homo sapiens
agcagagagtctacctgcccgacgcgttcgtggagaggagcagcggttgctgttggaggagtgcagttcgacatgatgcgcgcctgcaac

SEQ ID NO: 517049 - DNA, 88 bp, Homo sapiens
gaaactcctgggccgcgtgaaggccttcgataggcaaccacgagacagacaacatgaaccagatctacggtttcgagggtgaggtgaa

SEQ ID NO: 517050 - DNA, 100 bp, Homo sapiens
gaaaaggctttgagaaattttgagtcctcgagtgaatgggcggatctcatatcttcacttggcaaactcaacaagtccaagtggtaagaagttcagaagc

SEQ ID NO: 517051 - DNA, 100 bp, Homo sapiens
gctgttaacatcagacaacgtaatcagcaacccttctgtggggctcaattttggaaatcttggaagtacttcaactccagcaactacatctgctccttca

SEQ ID NO: 517052 - DNA, 101 bp, Homo sapiens
gctgacatggccaccaacacacgtggaatatgcactttctggttggaatttgaataacatgcctgtcctggaacagtctgttcttgcacatattaatgtgg

SEQ ID NO: 517053 - DNA, 50 bp, Homo sapiens
cttatgctgatatacatccaatgagggtgagcagtaggtcatccagtccc

SEQ ID NO: 517054 - DNA, 51 bp, Homo sapiens
gggagacagatgcgaggcggcggtcagtacctgatggagggcagctacaac

SEQ ID NO: 517055 - DNA, 92 bp, Homo sapiens
gctgggttcgttttattcagcggcagtggtgctttcccgaatctcagaatgccaagttggtgagatggcaaagcagtatatagagaaaagtc

SEQ ID NO: 517056 - DNA, 75 bp, Homo sapiens
ttatgaaccagtgtatcccaaaacaaatcacctgctgcagtaacagaaccagagacaaataaatttgatagtacc

SEQ ID NO: 517057 - DNA, 75 bp, Homo sapiens
ggccgatcctcgcgtgagacagatcaagatcaagaccggcgtggtgaagcggtcccaggaacagcatggctccag

SEQ ID NO: 517058 - DNA, 83 bp, Homo sapiens
caaagttttgcagatcttcaacaagaggacccaggagaaattcgccctcaaaggacctcaggatggaaaccagcagcctgcac

SEQ ID NO: 517059 - DNA, 95 bp, Homo sapiens
cagtacctggggaacccacaggagtcgctggatagactgcacaaggtgaagactgtctgcagcaaggtctctaattaacagaagatggcaaagcc

SEQ ID NO: 517060 - DNA, 100 bp, Homo sapiens
ggactgagctgttgagttagagccaacatgagtgagggaatgtttaattcagccttggaagtggccaaatttgaaggtgctgtgattcgaactgtcagtg

SEQ ID NO: 517061 - DNA, 51 bp, Homo sapiens
cacccccaccagctgggcctcgggaactgcatagccacccatgaatccaat

SEQ ID NO: 517062 - DNA, 90 bp, Homo sapiens
gaacagaaaaagaggatacctctgcgatcccgggtcatctccagatgctagggttatgggacaggcgacactaacaggtgaagatctcgg

SEQ ID NO: 517063 - DNA, 98 bp, Homo sapiens
gcattctccagggaaaggatgacatatttttggacctgaaacagaaattctggaacacctatatgatttaaggaccatagtacagctatggatactga

SEQ ID NO: 517064 - DNA, 101 bp, Homo sapiens
ccagtccttcagccactacagtatcgtgggacagaagctgttctttatagctccaagctctacagattcttcaaatatattgagaatagggatgttgcaaa

SEQ ID NO: 517065 - DNA, 75 bp, Homo sapiens
tgaatctgaacccagaagtggaagggacgctaattcgggtacccattccccatactatactggcaattgctggag

SEQ ID NO: 517066 - DNA, 75 bp, Homo sapiens
cgagaaccaatcagcagccgcgttagacctgtcaccatggcccaccgatttccagccctcacccaggagcagaag

SEQ ID NO: 517067 - DNA, 100 bp, Homo sapiens
ggaagagaagatgaaggaagactgtctgccgagttctcacgtgcccatcagtgacagcaagtccattcagaagttatctgtgctacaattgcatttggaa

SEQ ID NO: 517068 - DNA, 100 bp, Homo sapiens
cgccggcgctcccttgtcacgcctcgggaagcgcgcacctgccaagcaggacaaaactttcggtttgaagaataagaaaggagcaaagcaacagaagttt

SEQ ID NO: 517069 - DNA, 75 bp, Homo sapiens
tcattggccacctacagaaacaaaatgtcaacaaattgatgggtgtgagcgccactttgaagggcatccaacccg

SEQ ID NO: 517070 - DNA, 100 bp, Homo sapiens
caaccagataaactggtggtagtttggaccagaagaagccgaaggaagtcttctaaggggtcaggcccagccccaggcccagtggtattactgaattcac

SEQ ID NO: 517071 - DNA, 100 bp, Homo sapiens
cggagctagacttcctgagccacaacttgcagaaggatgatcggctgaatgtaacagaggaactaacgtccaacgacaagacgaggattctcaacgtcca

SEQ ID NO: 517072 - DNA, 99 bp, Homo sapiens
ctctgggttttggagacttagagaatccattggactcttctgctggcgtctttctgaatgctgatggggacttggtgatacaaactggactctcaggac

SEQ ID NO: 517073 - DNA, 100 bp, Homo sapiens
tgaccgagagcgcgaatatcgtcatcgttagaaggacttcagaaatgggcttgggaaccagctgagttcaggatcccacacctctgctgcatctcagtgt

SEQ ID NO: 517074 - DNA, 107 bp, Homo sapiens
cggctgcgctgttcgtgctgctgggattcgcgctgctgggcacccacggagcctccggggctggtaagtaaggaggtctctgtaccatggctcgtacaaagcagact

SEQ ID NO: 517075 - DNA, 90 bp, Homo sapiens
ctttgatcgtcttcctcttcagccatccaggtggcagggcccagccccgaaccagacaagggacccctcaaggagcttcattctagcagg

SEQ ID NO: 517076 - DNA, 82 bp, Homo sapiens
ggaagtgggggttatggtgggaggagccgatactgagcttcttcctatttgccatggactgcaaaattcaaaatggggctca

SEQ ID NO: 517077 - DNA, 100 bp, Homo sapiens
gccgcctcggccgaccagggacctgcccgcctgcggctgctccgggattacaaggcagaggaagacccagcaaaatttaaatctatcaaaacaggccgag

SEQ ID NO: 517078 - DNA, 75 bp, Homo sapiens
tcaccatccagctgctggcagatgcccagcagggacgacaggcaatccaggacttcgcaggtgagcagtaacgga

SEQ ID NO: 517079 - DNA, 102 bp, Homo sapiens
ggcccacagtgggggtgtgcaaacccgagagaactgggggcaagattcttgccaagagaattaatgtgcgtattgagcacattaagcactctaagagccgag

SEQ ID NO: 517080 - DNA, 100 bp, Homo sapiens
gctgaataaagctgttttggaactgtcaggtacctcaaagcaactggcaagggaactgaatttttcagtggatgaaatcaatcaaatacgtgtggaaaat

SEQ ID NO: 517081 - DNA, 82 bp, Homo sapiens
gaaatcataacattggaaagaagagaatttgcgccaaatcttaaaggcagaccacgcaaaaagaaaccatgcccacaaagaa

SEQ ID NO: 517082 - DNA, 100 bp, Homo sapiens
ggaatcctcctacctttgtgaatatgactatgtgaaggtgatcggacaatgtaaggtaatagctacaagacattcccatgaatctcaggacctcagagtg

SEQ ID NO: 517083 - DNA, 75 bp, Homo sapiens
tctcgttccagttccagagaacgttcgagatctcgtgggtcgaaatcaaggtggtgaagcagtattttccaattt

SEQ ID NO: 517084 - DNA, 75 bp, Homo sapiens
ggagcaggccatcacctgggcaaggttctgcggcatgaggaatttgaagaaggctgcaaagctgcctgtaatggg

SEQ ID NO: 517085 - DNA, 82 bp, Homo sapiens
cgccatcttgtgggagcaaaaccaacgcctggctcggagcagcagcctctgaggcaagtgaaccggagcaaacgacttccga

SEQ ID NO: 517086 - DNA, 75 bp, Homo sapiens
gctaccatggcccaggtggccggcgcggcgttgtcccaggcgggttggtgaaaggtgtagcagtcactcggccta

SEQ ID NO: 517087 - DNA, 90 bp, Homo sapiens
agaagctccaggatattatgaagttataaggttccccatgggctcccgtcttcgtcaggaagattttccacctcgcattgttgaacaccc

SEQ ID NO: 517088 - DNA, 98 bp, Homo sapiens
tcaattgttctgctgagggttaccctgtacctaccatcgtgtggaaattctctaaagcaactttcatcctttgaaacgtgtgctgaaaaagaagaatc

SEQ ID NO: 517089 - DNA, 82 bp, Homo sapiens
ctagaaactcgctctaaagacggaaccgccacagcactcaagttgattcttcaccacactgaaaccattaggaaaaatcctt

SEQ ID NO: 517090 - DNA, 99 bp, Homo sapiens
agttgttgagcagagggaaagggataggagaaggatgtggactgcagtgctgcagtgccagttgggagctgaaagtgccgacagcattggtgccgtgtt

SEQ ID NO: 517091 - DNA, 95 bp, Homo sapiens
agcagctcgggcaaggatggtggaggcgagaacactgaggagttataagttctgtggaactcccactggatgcagatgtacagaccagtaatcta

SEQ ID NO: 517092 - DNA, 83 bp, Homo sapiens
gggcgtcggacctgcacgagctgtctggtgaccgggctggtccacaagtgggcatggaccaaagacgacgtgatcctccacgt

SEQ ID NO: 517093 - DNA, 97 bp, Homo sapiens
tgctgccagacccaaaaatacaccagctccaaaaccactcgcatctgagcctgccgatgacactgcaactttcatcctttgaaacgtgtgctgaaaa

SEQ ID NO: 517094 - DNA, 75 bp, Homo sapiens
cgcgctgagggcgcccagctgctattgtggacgatgaaaggctctctgcagaggagatggatgagaggaggcggc

SEQ ID NO: 517095 - DNA, 98 bp, Homo sapiens
aagaacacaagaaggagaaggaccgggaaaagtccaagcatagcaacagtccgtagttcgtggtccttcgccggtgtccccggagcccagcggctgtg

SEQ ID NO: 517096 - DNA, 90 bp, Homo sapiens
caaaccggcagctaaagtagactcgccgtcaaagaagaaaggtggcaaatacagtgttcagttcaagttgcccgacgtgtatggtgtatt

SEQ ID NO: 517097 - DNA, 100 bp, Homo sapiens
catccgaggctggggtctctgcatctttttaccttttgtgctgagccaactcgagccaggctgcaaaaaggctccatctggcctgagcaccctgccccag

SEQ ID NO: 517098 - DNA, 101 bp, Homo sapiens
ggagagggggcgctgagctgttggggtccttggcccttgccagacattagcaccatgagcttcgtggcatacgaggagctgatcaaggagggtgacacggc

SEQ ID NO: 517099 - DNA, 50 bp, Homo sapiens
gatttctgatgatgaagcagaagatctacggaatccagaggcagcattgt

SEQ ID NO: 517100 - DNA, 75 bp, Homo sapiens
cgtctccggctgcacagcgctcagtgtgagccactgccccatgttgtgttgatgccaatctgccatgctagcctg

SEQ ID NO: 517101 - DNA, 75 bp, Homo sapiens
aaatcaaaccgaaaatgtgtatatagtaacggcacagccaacaagatgaacggagctttggatcactcagaccaa

SEQ ID NO: 517102 - DNA, 100 bp, Homo sapiens
gagaaacacagggcaccaactatgaagactctcagggcgcgatttaagaagacagaggtcacggtctagatcacattctcgatccagaggaaggcgatac

SEQ ID NO: 517103 - DNA, 88 bp, Homo sapiens
tctacctttcacatgtatgtccagcctgtagtccatccacagcttaccccattctgtacagagcatggtgaggacaccttcaaccggg

SEQ ID NO: 517104 - DNA, 74 bp, Homo sapiens
ttgtatgtgtagaaagtgaaatcagaggagatgtaactatcggggctgatggaactccacatggtattgccagc

SEQ ID NO: 517105 - DNA, 100 bp, Homo sapiens
aactacgtggagcggaagaacagcctgaagaagggctccctcgtgaagaacctgaaggacacactagctgtgattgggttattatacccctgcattgaca

SEQ ID NO: 517106 - DNA, 83 bp, Homo sapiens
catctgtaggcctccttgaaaccggtgttctaagaacggaagcatctgggctggatggaatttagcatcaagcagagtcccct

SEQ ID NO: 517107 - DNA, 90 bp, Homo sapiens
gacctaactgcaccagtagcttttctgagaatacttgctgaaaaggaagttttctggaatgggtgtggtggctcacgtctgtaatcccag

SEQ ID NO: 517108 - DNA, 73 bp, Homo sapiens
cagctccagttcaaaagcctacaaaatctgagactgtcattgcttttataagtagagacggggtttcgccgtg

SEQ ID NO: 517109 - DNA, 82 bp, Homo sapiens
taagcgcagaaagcaggcgaacccgcggcgcaataacggaggaagaaggcacctacgatcaaactctggagttccgtagggg

SEQ ID NO: 517110 - DNA, 50 bp, Homo sapiens
ttggacgccggcggagacgcgggcgagggtctcccttgatctgagaatgg

SEQ ID NO: 517111 - DNA, 83 bp, Homo sapiens
agctgtccagaagtttactattttgatagatgttactttgctgaaaatagaactgttgatattcactgatggactccaaagaa

SEQ ID NO: 517112 - DNA, 83 bp, Homo sapiens
agatgaccggggtgtgccggggggaaaggggcagcatgatggtctgagatggaggaaacggctcagagagaacttaggtcctt

SEQ ID NO: 517113 - DNA, 100 bp, Homo sapiens
cctcccgggtagctgggactacagtaatgtgtgtggctggtattggacttgttgtattattcttcagttggatgctctctatttttagatctaaatatca

SEQ ID NO: 517114 - DNA, 49 bp, Homo sapiens
tgtgggctggtgtgtggaactgctggtggaggccattgtcttgccaatg

SEQ ID NO: 517115 - DNA, 100 bp, Homo sapiens
tcgtcaaaaaatattcacagttcataaactttcctatttatgtatggagcagcaaggatgatgggctctcagagcggcagtctgtctttgctatattacg

SEQ ID NO: 517116 - DNA, 100 bp, Homo sapiens
agagaggctatgtgaaggctgggctctggactccagaggcagtgatagaacacccagacgcagctcgagctaatccaagatatggggttccatgtcattt

SEQ ID NO: 517117 - DNA, 96 bp, Homo sapiens
atttcagtgtcctccttagctctgcagtggttataaactgttttcaccttcaagattcttgagagataactacacataccctttgccatagtggga

SEQ ID NO: 517118 - DNA, 87 bp, Homo sapiens
cattgcccccatgcgctccttggtgcaggagatggtgggcagctttggaaagctttagtgcagccgtcattatccatgacaccggaa

SEQ ID NO: 517119 - DNA, 98 bp, Homo sapiens
ggatacttgctgcaaatgctcgtgctacctgccctggccctgctcagcgccagcggcactggctccgccgcccaagtaccttccactggaagaatctc

SEQ ID NO: 517120 - DNA, 75 bp, Homo sapiens
cacgcggaggcggcggggagccgcgcgcggcaggagatgttggcacacctgaaaccatggccccaaccattgtgg

SEQ ID NO: 517121 - DNA, 90 bp, Homo sapiens
agcttacccagcttaaagagctccacattcaggggaaccgcctcaccgttctgcccccagaactagatgttcgaagaagaacaatttatg

SEQ ID NO: 517122 - DNA, 99 bp, Homo sapiens
actggcatgccaagcccctcacgctcagggaggtcgaggctgttttggagtcagcggaagatcaccaaggccagggagtggttccaccgcactgtgaag

SEQ ID NO: 517123 - DNA, 82 bp, Homo sapiens
agaaagccaaacgaggagaggaattgaagacctggaagcgctcatagcccatttccagacactcgatgccaagaggactcag

SEQ ID NO: 517124 - DNA, 98 bp, Homo sapiens
gaggccactggcgtcacctgctatgcagcccacccagtgtttcacttcaagcccactacggtggtgacaagctgccagccgaagaatccaagagaact

SEQ ID NO: 517125 - DNA, 128 bp, Homo sapiens
caaggaaaaactggagagcttcatcaaaaatagtgatagctttgataaagcttactcacatagcatattggtatatcaaaatgaaatgcaaggaaccaaaaataacataattgaaggcagtaaaagtg

SEQ ID NO: 517126 - DNA, 82 bp, Homo sapiens
caagttggaggagaacctccccatcctgcagcagcccacggagaagaaaactgtcgctgaaaagcaggagaagagaaatcag

SEQ ID NO: 517127 - DNA, 82 bp, Homo sapiens
cctccaagtgttcctcgaagggactacgcttcagattgatcgtgtcctgtgctgaagatgtttccggaacaacagaaagagg

SEQ ID NO: 517128 - DNA, 100 bp, Homo sapiens
ccttcgacgggcacaacctcaagttccgagagaaatatggggacgtcttcacggtacacctgggaccgaggcccgtggtcatgctgtgtggagtagaggc

SEQ ID NO: 517129 - DNA, 96 bp, Homo sapiens
gtcagagaatactatgctactaaggggagtaggttgcatctttgttgaaatgatccaaggagttgctgcttttccaggaatgaaagacattcagga

SEQ ID NO: 517130 - DNA, 82 bp, Homo sapiens
gatgtacaggaagtggaaagagagcaaggggaaggatcgggagtacacagacatcatccgacctggaatggccaaatatcaa

SEQ ID NO: 517131 - DNA, 98 bp, Homo sapiens
tggaattagacaagccaatcagcactaaccctgtccatgccgttgatgtggtgctacgacatctgccctccatgaaagatgggatctccctatgttgc

SEQ ID NO: 517132 - DNA, 98 bp, Homo sapiens
tgcgaggagccggcgcggtcgcagtctccacggcgcaggcccacggtagcgcagccgctctgagaaatgcactcggtgatggaaagagagccactatt

SEQ ID NO: 517133 - DNA, 73 bp, Homo sapiens
tgctacaaccacccacccttccgagacatgaagaaagttaaaggcattaggatttcctgaaggacttgtgata

SEQ ID NO: 517134 - DNA, 102 bp, Homo sapiens
gaatatgctaaacttttggccaagagaatgaaggaggcaagtgaggcctatctggttggcctttttgaagacaccaacctgtgtgctatccatgccaaacgt

SEQ ID NO: 517135 - DNA, 100 bp, Homo sapiens
cctgctcagagggacttgtacgtggatgtaatgttggagaactatagtaacttggtgtcactggtttcttaaacaattaggtctacatcctaactggcaa

SEQ ID NO: 517136 - DNA, 75 bp, Homo sapiens
cggccctgggagctggaggaaccgcggaaaggcctatgctccagaattctattatgatacctacaatccagtatg

SEQ ID NO: 517137 - DNA, 82 bp, Homo sapiens
tcgtggtgctggaatttaacccagcttccaaaaggtggttctcttcccaaagtggaagccaaattcatcaattatgtgaaga

SEQ ID NO: 517138 - DNA, 117 bp, Homo sapiens
cagatatctatgatcgaaagaacatgccaagatgtatctactgtatccatgcactcaggtacctgtctgaccttcatgcgtctggtgaccctgcttggcaatgcattggagcccaac

SEQ ID NO: 517139 - DNA, 99 bp, Homo sapiens
ccgacaccatctggaggaggcgttgccgtgaggtgctgctcacggccgtgaactgctacagcgtgaaggccgccacccgggtccaggatgcctttgccg

SEQ ID NO: 517140 - DNA, 100 bp, Homo sapiens
attggcggtgaccggatattcagttgcacatccccacatcaatgcactgccaatggtcaagctgaactagcagaaattccagaaggctatgtcccagaac

SEQ ID NO: 517141 - DNA, 75 bp, Homo sapiens
cacttcctggacccaggaagggagagtcttcttccaagcctcaagtactacagccttccagcagccttcccagac

SEQ ID NO: 517142 - DNA, 75 bp, Homo sapiens
tcatacaccagtactaccaaggacagcttttttcctgcaaggttccagcaacagatagaaatgctttaagttcac

SEQ ID NO: 517143 - DNA, 75 bp, Homo sapiens
gcggccggagcgggcggctgagacaaaggcgacgggcacacgtgtttcacgttgacaggtttgcttgggacgcta

SEQ ID NO: 517144 - DNA, 77 bp, Homo sapiens
tggaacttcaccttgtgatcgtgaattgagtgatctacagcgcgatccacctgctcactgttcagctggacctgtgg

SEQ ID NO: 517145 - DNA, 82 bp, Homo sapiens
ggaccccaggctgctgatcgccttccagaacaggtttggtgcacctcgatttggaggaagtagggcagggcccttatctgga

SEQ ID NO: 517146 - DNA, 100 bp, Homo sapiens
cctcatgtcagggactgtgttcagacctacatccgtgagtggctaatcgtgaaccggaagagagaagtttgctgaggaatgccttcaagcacaaagtgat

SEQ ID NO: 517147 - DNA, 100 bp, Homo sapiens
cgccctttcttggcccttgttcccccaaatgtctgactctgactctcggactgagaaacgcaagatatttggagttcttacaacatggcagacattgaca

SEQ ID NO: 517148 - DNA, 101 bp, Homo sapiens
ccctctgcagcctctctgacaagtgaagactggactttatgagtataaagtctttggtgttctggaggactgctcaccaactctactggcagacatctata

SEQ ID NO: 517149 - DNA, 80 bp, Homo sapiens
gatttctcctgaatttggaaactatttcaactggatgatgctcgcaacaaagctgacaatcaagaaaaggcaatacttaa

SEQ ID NO: 517150 - DNA, 91 bp, Homo sapiens
atgggtttgtatggacaggcttgtccatctgtaacttcattaagattcaaccctatgaaaagataaaggccaggggcttgcctgataatat

SEQ ID NO: 517151 - DNA, 140 bp, Homo sapiens
ccgcgaaggatgcagagagagcgatcaacacgctgaacggcttgaggctccagtcaaaaaccattaaggtgggcaaacgcagaggcgggaacaaactagccctcaagacgggaatagtagccaagaagcagaagacggag

SEQ ID NO: 517152 - DNA, 99 bp, Homo sapiens
gtctgcgaaggccgggacccggttccccggcccacagtgggggtgtgcaaacccgagagaactgggttctgatctacaatggccaactggacatcatcg

SEQ ID NO: 517153 - DNA, 96 bp, Homo sapiens
gcggcggctgcggcgcgcgcgagccgagtgtgagcggaaaggggcccggcgtctgcctcgagactgaagaccggaaacatgccctgaactgtcaca

SEQ ID NO: 517154 - DNA, 98 bp, Homo sapiens
cggctactgccgcttcagttctcccggtgtggccacgagtcggagccagccccagtgcctgctgagccgtttgacaacactacctacaagaacctgca

SEQ ID NO: 517155 - DNA, 75 bp, Homo sapiens
gctcagggctcccactgattctacattacggtgctgctgttttttcaaacgaaggaaaaggaaaaccatacagcg

SEQ ID NO: 517156 - DNA, 75 bp, Homo sapiens
agcgtccgggtcttcatcagcgccaaccctgaagaggggcttctgaacaatgccagggatacaagtgtcatggat

SEQ ID NO: 517157 - DNA, 100 bp, Homo sapiens
cgctaggcagcttcagccggaccggggcaggaagatcccaacagtttgcgccataaatataactttatcgcggacgtggtggagaagatcgcccctgccg

SEQ ID NO: 517158 - DNA, 100 bp, Homo sapiens
tgggcatctattacattccaaactgtaagagtaaatgggtccagtaattggaatgactccagataagagagctgaaaccccaggagctgaaaagattgca

SEQ ID NO: 517159 - DNA, 74 bp, Homo sapiens
gtcgcagttcttgtttgtggatcgctgtgatcgtcacttgtaacgtgcctagtgttgggagcctagcagatcca

SEQ ID NO: 517160 - DNA, 100 bp, Homo sapiens
ctgagctgaaatcctaaaggccgcggagtcggcggtgttgtaggtagcggtaccttgagtggcaacagaagctgcacacatacatgtaagagaagcaaaa

SEQ ID NO: 517161 - DNA, 83 bp, Homo sapiens
gatttattcccaagaactacatccgcgtcaagccccatccgagtgtggccatctggggccgtgtggtatttgccactcaggag

SEQ ID NO: 517162 - DNA, 90 bp, Homo sapiens
cagctctgaaaaactcttcaacactgttattgtaaacaaagctggagaagaagcaggcgctccctccattccagccacagatcacagacg

SEQ ID NO: 517163 - DNA, 82 bp, Homo sapiens
gaaccgcccgcaggcccgtcgcagctccattaatgcaactaccattacactaagaatgtttctccatcccagagagatgaag

SEQ ID NO: 517164 - DNA, 90 bp, Homo sapiens
gtctggctgagatgcttgaagaccttcatatttcccaagatgccactggtgaagaaggttttgagagtattttagaagggctttatggac

SEQ ID NO: 517165 - DNA, 96 bp, Homo sapiens
aaaaagaaggagacttcagaaaggagggtctcattctgtcgcacaggttggcgtgcagtggtgtgatctcagctcattgcaacctctgcctcccgg

SEQ ID NO: 517166 - DNA, 100 bp, Homo sapiens
agaagatcgaggacacgctatgtccttttggcttcgaggtttaccccttccagcatcgccctgagcaactggtggtttgtggcccacctgacagacctgc

SEQ ID NO: 517167 - DNA, 83 bp, Homo sapiens
tgttcgcctgctcaacgccactcatcagattggctgccagtgttgctggaggagccagtatgagtcagatttcagaagcactg

SEQ ID NO: 517168 - DNA, 80 bp, Homo sapiens
gaagcataatgacattgtggacagtgacagcgatgctgaggatcgaggaacgttgtctgacaaagatcattccactcagc

SEQ ID NO: 517169 - DNA, 75 bp, Homo sapiens
gaatctgctaccaaaatcactagtaggtgatttcaaatcggagaagtccaacggggagctaagtgaatctcctgg

SEQ ID NO: 517170 - DNA, 50 bp, Homo sapiens
cagaaattctggaacacctatatggtagatgacaaggtgaatttccattt

SEQ ID NO: 517171 - DNA, 100 bp, Homo sapiens
tcgtcctggagcacctgcagctggcgcctctgcagtggggcctcctgatcacttgccacgtggcacgcatccctctgccagccggatacagagaagagat

SEQ ID NO: 517172 - DNA, 80 bp, Homo sapiens
ttatcccgactgcaaatcgacccagtaatggcagaaactctgcagatgagtcaagacctagaggatcaagacataatggg

SEQ ID NO: 517173 - DNA, 80 bp, Homo sapiens
cggtcaggctggacgtgcacgcagcccggcgggaggataaagaccaccacggtaattttttctgcaggatgaattaagag

SEQ ID NO: 517174 - DNA, 90 bp, Homo sapiens
aagaaaacaagtcatttagcgctatggaagatgaccagaggactagacctgaagtttcaaagctccgggaagcagtttgttcgctatata

SEQ ID NO: 517175 - DNA, 82 bp, Homo sapiens
cagtctttgcacactcggacttcaaaactgttccagggccagtatcggagtttgagatcctgaaggagctagacgagtgcta

SEQ ID NO: 517176 - DNA, 90 bp, Homo sapiens
ctgacccatttcagatggagaatacagactgctacctccccgatgccttcaaaattatgactcaaagacatcttcatttgattgtacacc

SEQ ID NO: 517177 - DNA, 96 bp, Homo sapiens
aggcacggacaacatcaccgtgaggcagggggacacagccatcctcaggaagatgagaatgtgcctactgctcctgatcctccaagtcaacattta

SEQ ID NO: 517178 - DNA, 75 bp, Homo sapiens
tggacacgtcccagctctctctgggcatctggaaagctgacatagcccagagatacaggataagcaaatacccaa

SEQ ID NO: 517179 - DNA, 90 bp, Homo sapiens
gcaccgcagatgttgtcaaggtggcctaccaggaggccaggggtgtcgccatggtccaggtgcaggtacagcagtctccgcaacaggtct

SEQ ID NO: 517180 - DNA, 101 bp, Homo sapiens
attgttccgtgctgttcctgagtgtcaactatctgggggggacattcccaggcaacttcagttcatttatgcagaaggaaatatttgagcagccagagtct

SEQ ID NO: 517181 - DNA, 88 bp, Homo sapiens
tggaataggtgtatcaagtaatggtgcaaagcctgaagtaaagcttgagagcaactttgcctccattgtgtttgccatcatggtgttg

SEQ ID NO: 517182 - DNA, 100 bp, Homo sapiens
ggagctggccagcgagagccagggctccaaagaactcggtcgggcccctcggggccgcgtggccaatcagatcccccctgagatcctgaagaaccctcag

SEQ ID NO: 517183 - DNA, 82 bp, Homo sapiens
ctcaatatctgtcttcggtggactccttcggcagtccacccaccgccgccgcctcccaggctcccccccaaccaagcggcag

SEQ ID NO: 517184 - DNA, 82 bp, Homo sapiens
gttggtcacttgaaccttgggaatattgaggaggcaaaaccttcaactgaggacttgggggataagaaggaaggtgaatata

SEQ ID NO: 517185 - DNA, 75 bp, Homo sapiens
ctgagcctcctgaagcgggccaaggtgcacatcaagccctgggcgctgcctatggcacagccaagagcggtaccg

SEQ ID NO: 517186 - DNA, 96 bp, Homo sapiens
gaactcaggcgcctcttcttagttgatgatttagttgattctctgaagttcctgctcattttccacaaggccgcggcaggggagctgcaggaggac

SEQ ID NO: 517187 - DNA, 100 bp, Homo sapiens
cttaaaagaaacaaaacaatcagtgtggataagaaatattcagcttgctcaagactgcagtgcagatgacgacaacttccttgtgcccatagcggtggga

SEQ ID NO: 517188 - DNA, 87 bp, Homo sapiens
cacaaatgaaaaccccctggagacgaggaacattgccttcttttcaaccaattgtgttgaagacaatgtgccctgtgtgtctagatc

SEQ ID NO: 517189 - DNA, 83 bp, Homo sapiens
ggagaagcagcgcatcagccgagtgcacctggaagtggtcccatgttcaaaccaaccacagtggctgtagatgaagaaggtgg

SEQ ID NO: 517190 - DNA, 75 bp, Homo sapiens
tacgttagagagactgaaaagacatctaatttcattgctcggcagaggccagtaatagtagccatgagtctcgta

SEQ ID NO: 517191 - DNA, 100 bp, Homo sapiens
tgccggtcgaccccagccagcgcagcgacggggcgctgcctggcccaggcgcacacggaagtggattatctactatctagatccatctgttctgtccggc

SEQ ID NO: 517192 - DNA, 82 bp, Homo sapiens
ccttcatttctctgaacatactgccttatgggacagatcaactatgcagttatcacatgggaagtgttatccagaaaacagc

SEQ ID NO: 517193 - DNA, 100 bp, Homo sapiens
ggacaaggctagaagaatcttagagctttctggatccagttcagaggattcagagaaggtggctatggcggttccagcagcagcagtagctatggcagtg

SEQ ID NO: 517194 - DNA, 100 bp, Homo sapiens
tcttccccacacaatatatggtgagcaagagtctgatccaggtgaacactcattctggaaactgatcgctttacccaaagttggccttatagccttcgtc

SEQ ID NO: 517195 - DNA, 90 bp, Homo sapiens
cgcgacgctgctcaaaacctcgctccggaaaggggacacctgaggaagaacttgtcgcttttcctaagcattagtttgttaattttctgg

SEQ ID NO: 517196 - DNA, 100 bp, Homo sapiens
ctcagcctcccgagcagctgggactacaggtgcccgccaccacacccagggggggccctcagcctcttggccttgaacgggctgttcatcttgattcaca

SEQ ID NO: 517197 - DNA, 100 bp, Homo sapiens
aacactctgaaaagatggctaaattaggtcacctttggctcttcagagatgcagggacacacgatgggcttctggttaaccaaactgaattatttgtgcc

SEQ ID NO: 517198 - DNA, 99 bp, Homo sapiens
gctggtggcctcaggtgaaaaggctccttcacctaccaaacgcaaagaccgctcagatgagaagtccaaggatcgctcaaaagataaaggggccaccaa

SEQ ID NO: 517199 - DNA, 108 bp, Homo sapiens
atctggtgaaattgccggcaagagggagttaaggacattccaggcagaggcaagggaaataaatgcccggcttgatgctgtatcggaagttctccattcagaatctag

SEQ ID NO: 517200 - DNA, 99 bp, Homo sapiens
gccagccactcgcccctggcctcgcgggccgtgtctccggcatcatgtgtggttcgttggggagaaaagggctccacagaagaaggtgctaagttggaa

SEQ ID NO: 517201 - DNA, 83 bp, Homo sapiens
ctgcgcgctgctcctcgccctcaagttcacctgcagtttgtgtttaaggagaaactaacaatgaaaacggcctcgttgacgga

SEQ ID NO: 517202 - DNA, 75 bp, Homo sapiens
tcgctccggagccgctgcacatttcgaaactctataaaacaggtcgggagatgcaggagaggatcatggacctgc

SEQ ID NO: 517203 - DNA, 100 bp, Homo sapiens
gtgaaaatagcaaacaatccaggtggcagggagtgcatcaaaggtgtgaacgcagggatctttgacattcagggatgtggctgtagaattctctcaggag

SEQ ID NO: 517204 - DNA, 74 bp, Homo sapiens
tgaatatcaagaggaggagttgttgaaatttaagatccgcattgaagacccaccccgcagaaagcacatggtat

SEQ ID NO: 517205 - DNA, 71 bp, Homo sapiens
gttagttacttcctgtctagagttgtagcttccacctgggtaagcttgatgattaccaggaacgaatgaac

SEQ ID NO: 517206 - DNA, 100 bp, Homo sapiens
ctcccgagtggctgggactacaggaacttctgcactatttaatcggtaccctgctcctcctcatcgcctccattgtggcagcttccaagagttacaacca

SEQ ID NO: 517207 - DNA, 100 bp, Homo sapiens
cagaaagccgcctcttggtttgcgtcctgcactgaaaggaaatgacggattttgtctctcaggcagctgcagagcttcaacagtactgtatgcagaatgc

SEQ ID NO: 517208 - DNA, 100 bp, Homo sapiens
tgacgccatgtcgggttattcgagtgaccgagaccgcggccgggaccgagggacgagattgaggagctgcgggccgagatgctggagatgcgggacgtct

SEQ ID NO: 517209 - DNA, 50 bp, Homo sapiens
gtgctctgtggccccctacctcccaggtgtatgatgatggcaaacacgtg

SEQ ID NO: 517210 - DNA, 95 bp, Homo sapiens
cccgcgtccagcacctacgtcccgctgccgtcgccgccgccaccatgcccaagagaaagggaacggcaggagcagctgatgggatatcggaagag

SEQ ID NO: 517211 - DNA, 82 bp, Homo sapiens
aggactggaattgatttgggaacaactggtcgtcttcagttaatggcaagacttgcagaggcccaggcagaaggggatgagg

SEQ ID NO: 517212 - DNA, 82 bp, Homo sapiens
aaaggcaacatcctgtcacaggccatgctctggcaaaaacgtctctttaatgtggggaacaagctgctggtaagcctggact

SEQ ID NO: 517213 - DNA, 100 bp, Homo sapiens
atctcattgaagcttggaattacatagctggaaaggatcttacagctgagtcagtgctgattctctcaaatagagcttgaaggataaatcttcatttttg

SEQ ID NO: 517214 - DNA, 83 bp, Homo sapiens
agaaggttcagttggcaaaccagatatatgacttggttgttgatcattatgaaaatcctagaaacgtggggtcccttgacaag

SEQ ID NO: 517215 - DNA, 74 bp, Homo sapiens
gctcgctgggagagaggtacctctccttttccctctccctttccctaaggtctacaactcgaacaaagacagcc

SEQ ID NO: 517216 - DNA, 83 bp, Homo sapiens
caccgctgtcccgcggcctggagtacaacgaggtcaacgtcaccctggacctgggccagctgtttgcagacaaggtcccaaag

SEQ ID NO: 517217 - DNA, 100 bp, Homo sapiens
ctcagattccctgaagctctgctgccccgcaggcaccttcgggccctcctgccttcgtagtgggcagcagtcagtgacaggtgtaacctctgtggatgac

SEQ ID NO: 517218 - DNA, 82 bp, Homo sapiens
gttgaagagcctagcgacgaggagccggctttgagcaggaagtgggaaaactcttgcctttgccatcccaatgattcatgcg

SEQ ID NO: 517219 - DNA, 100 bp, Homo sapiens
ccactttctgggcacgtgaggttgggccttggccgcctgagcccttgagttggtcacttgaaccttgggaatattgagtgggtaaacctcacaagtgcaa

SEQ ID NO: 517220 - DNA, 101 bp, Homo sapiens
ggcgtctccgccggctactgccgcttcagttctcccggtgtggccacgagtcgggtacccactgatggtaatgctggcctgctggctgaaccccagattgc

SEQ ID NO: 517221 - DNA, 83 bp, Homo sapiens
atctcttcgttcttcctggaacacttactatactaacacagagcgctggccgcgcgccgaacccgagtccggcggcaccgacg

SEQ ID NO: 517222 - DNA, 75 bp, Homo sapiens
gctgtctactggaacagcagcaaccccaggttctgaatgatgactgacgcgggtttgggtgatacccctcacagc

SEQ ID NO: 517223 - DNA, 100 bp, Homo sapiens
cgaccggttcgtcgcctccttgcccgtgaccgtcgctagaactcagttgtgcgttgcggccagtcgccactgctggacaggagagagtggcaagagtacg

SEQ ID NO: 517224 - DNA, 50 bp, Homo sapiens
ctgaggaggaaactctggcagagccattgggtacgagggattccagcaat

SEQ ID NO: 517225 - DNA, 82 bp, Homo sapiens
ttgctctctgtccctgagatcttgctggagacagggctactcagtccctctttgccaggtgcggctctatgagtggacaaca

SEQ ID NO: 517226 - DNA, 101 bp, Homo sapiens
catctataacctccttgaaaaactgggatacatggatctggcctcaagactggtggtcctcagaatggttggaatgaccctccagctttgaacagagtacc

SEQ ID NO: 517227 - DNA, 78 bp, Homo sapiens
gatgatgaacaggttccgaaagtggctctacaaacccaaggagccttcacgtaaatgggtccagtcatgcctcccagt

SEQ ID NO: 517228 - DNA, 89 bp, Homo sapiens
ctcgaattagcaaaggaaacttttgatcccaaactgatcttccaggctagccttgcaaatgctcagattttgattcccaccaatcaggc

SEQ ID NO: 517229 - DNA, 100 bp, Homo sapiens
gtctagaggtccgtctgaccgcggcgtcgggacctggtttccgggcatgagctgagagcaccacgccgaggccacgaggaagaagattccctccttaata

SEQ ID NO: 517230 - DNA, 83 bp, Homo sapiens
cttcaatagtgctgaaggctttgccgacttcagccagatgtccaagacaatgcagatcttcgtgaagactctgactggtaaga

SEQ ID NO: 517231 - DNA, 90 bp, Homo sapiens
cttctctgctgccattgaaagctgtaacaagctaccggctctcccgggtcattgagccaccagctgcctcctgccccagctccccacgca

SEQ ID NO: 517232 - DNA, 80 bp, Homo sapiens
gccagagcccccttgctggattatatctacaggcggagcgggcactggacacaatgaactttgagatgctcaaaggccag

SEQ ID NO: 517233 - DNA, 75 bp, Homo sapiens
tgctgcaatcgcttgggagagctcctgggccacccctcctttcaggtcaaggagaactacgatgacccgcacaaa

SEQ ID NO: 517234 - DNA, 88 bp, Homo sapiens
atagtgaccactgggcacccattcattatgcatgctggcctatatgaacccaatagcaatggcgagatcaaggggtccaatccagtct

SEQ ID NO: 517235 - DNA, 82 bp, Homo sapiens
acaaggcagcccgcacgatatcatcagaataggtaaaatgtcggttccaggaccttaccaggcggccactgggccttcctca

SEQ ID NO: 517236 - DNA, 75 bp, Homo sapiens
ggagcggcacgagcaaaggccctgaaacaggagggagcgcggtggatccataaagaacccagccaacccgcagag

SEQ ID NO: 517237 - DNA, 75 bp, Homo sapiens
gtggaattcgcgaagctgccaaagccttagacaaggtggagagattcaaccagttagcgtgaaagttggagataa

SEQ ID NO: 517238 - DNA, 100 bp, Homo sapiens
ccggaagacaccgtgttgcttctcctcaacgccatccacttccaggggctccccagaccccgacagcacaggggcgctggtggaggaggaggatcctttc

SEQ ID NO: 517239 - DNA, 139 bp, Homo sapiens
cgcgcctcggctgcctgcccggcggtctccgggtcctcgtccagaccggccaccggagcttgacctcctgcatcgaccaactggaattatggatttgtgttcatcaatggacgtaaccttgggcgatattggaatattg

SEQ ID NO: 517240 - DNA, 100 bp, Homo sapiens
gacatcctggaagctgggaaatggttcaagtgaccttgatccttcgatgatattggacactggagagatcattgatacaggatctgattatgaagatcag

SEQ ID NO: 517241 - DNA, 74 bp, Homo sapiens
cggcacgggagcatggcagccaacgtctcggggagcccacctacgatgcagaattccagcacttcttgagagga

SEQ ID NO: 517242 - DNA, 71 bp, Homo sapiens
gcccgggctgttggagagccacggccgtgcccacgaggagctcaagcacttcgaagccaaaatcgagaagc

SEQ ID NO: 517243 - DNA, 50 bp, Homo sapiens
gcataatccaccatcaatatatctggagtttaattggttggggtcagata

SEQ ID NO: 517244 - DNA, 100 bp, Homo sapiens
cgcgggcaaggaagtgctgctggaagacaagttggatggcttgaggactggtactaaaaggaaacgtgactgggaggccattgccagcagaatggaggat

SEQ ID NO: 517245 - DNA, 98 bp, Homo sapiens
gcaaattgacacccgtgccgcgctggtggagaagcgccttcgctatctcatggacacaggtgtactgagtggggaagaatgtaagaaacagttgatta

SEQ ID NO: 517246 - DNA, 75 bp, Homo sapiens
agaattcagaagaaacaaaagtgccaccgaagaggttgaaggcattcaaggtggccctcttggatgtgttccggg

SEQ ID NO: 517247 - DNA, 98 bp, Homo sapiens
ctcgccgtccccgccatgctgtctctagactttttggacgatgtgcggcggatgaacaagcggcagcttcagtatcagacacagcacagcagccatct

SEQ ID NO: 517248 - DNA, 76 bp, Homo sapiens
gcggcggaggcgcatggcggcgaggtggtgtgcggaaggtggaaacttgatttgttgtgacttttgccataatgct

SEQ ID NO: 517249 - DNA, 88 bp, Homo sapiens
ggaagctggcgtactccggcagcgaaagcggtgcagacgggaggaagaattcacagatggattcagtggaaaagacaacaaatagaag

SEQ ID NO: 517250 - DNA, 140 bp, Homo sapiens
caagattattgtctttgctgacaatgtgtttgccctaaaggaatatgccattcgactgaacaatgcaatcaaactgaggccgaaggaaggggagacatactttgatgttgtggctgtcgttgaccctgtcaccagagaag

SEQ ID NO: 517251 - DNA, 75 bp, Homo sapiens
cattgcttaactggagcaactgaggacttggcagatgaacttgctcttgttgatgtcatcgaagacaaattgaag

SEQ ID NO: 517252 - DNA, 96 bp, Homo sapiens
caaacccagcagctattccgcatgcagcagaagatattcaaggagatgaccgatggatgtctcagggcagctgcaatgactctccgcacggtatta

SEQ ID NO: 517253 - DNA, 101 bp, Homo sapiens
gccacatgaaagttttcagcctcatccagcaggcggtgacccgctaccggaaggccatcgccaaggtgctggagaatctggtaaaagcaccattgtgaagc

SEQ ID NO: 517254 - DNA, 155 bp, Homo sapiens
gccacagctcaaacgttgaaacacccacagactgccaagtgggacaactttctggcttttgaaaggctccttcttcagaggatgatgtggacctggaagccctggtgaacgatatgaatgcatccctggagagcctgtactcggcctgcagcatg

SEQ ID NO: 517255 - DNA, 100 bp, Homo sapiens
tccaaataagcggcataaagcaattgagaattcaggcgtggaagacattttggtgaagccaaaggcagatgtcaagaggcaacgtatcattgaagaatcc

SEQ ID NO: 517256 - DNA, 98 bp, Homo sapiens
tttgagattggcttttttcgttgactatcctgcccctgagatccacccaagttgtgttgctgatcatctgggctgtgatccacaaacccggttctttg

SEQ ID NO: 517257 - DNA, 82 bp, Homo sapiens
acatgtcccaacattacatcccagcttcttctcatatcggtaattccactcaggccactgtgagggatgcagttgttggaag

SEQ ID NO: 517258 - DNA, 75 bp, Homo sapiens
atgacagcatcggagtcttgcaggctaattcccaagcgaaggcttgtcaaatctcttgaagatctttgctcccag

SEQ ID NO: 517259 - DNA, 82 bp, Homo sapiens
gagacccgctacaacctgaagagtccggatcacactcacaaatttggtgtcagttaatgagaggttggtgtacacacctcat

SEQ ID NO: 517260 - DNA, 75 bp, Homo sapiens
ctgtgaccttggagctgttttaaaagttaggcaagatctggtcaaagagtgtcctgccatacttcgtagctacaa

SEQ ID NO: 517261 - DNA, 98 bp, Homo sapiens
gctattagagattgtgaagaagaatttcgatctccgccctggggtcattgtcagatatatttttgccatcatggatcagtttggagatatattagaag

SEQ ID NO: 517262 - DNA, 100 bp, Homo sapiens
ctcgaaactggagaccatgcaaacagctgagagtgaaagattactgacagccctgtcctaggagcacaacgtccgagaaatgctcagcttgactgctcca

SEQ ID NO: 517263 - DNA, 83 bp, Homo sapiens
ccaagctcgtggcctgcctctgcgtgccattttgaaagcgaagcagaagccgtagaatcagcggcgagcctgttgaaagaacc

SEQ ID NO: 517264 - DNA, 89 bp, Homo sapiens
accaagagatgaactctgtcctggctgaactgtcctgggccctggagtctctgaacaagaaggatataggagagatcaagtcttatgga

SEQ ID NO: 517265 - DNA, 75 bp, Homo sapiens
ctggggctgtggagagcgacccgtggccttgtgtttcaggtcatcatcagatttgaaatatttaaagtggataca

SEQ ID NO: 517266 - DNA, 100 bp, Homo sapiens
gtgctgtctgtcttgaaatttacctaccctacattattccaagggtgctggagaatctggtaaaagcaccattgtgaagcagatgaggatcctgcatgtt

SEQ ID NO: 517267 - DNA, 97 bp, Homo sapiens
ataaggcagatatatttaagtgagccagttttaaagaagcggtctcatcatgctcattggctggtcgcaagggaaacaactcctgagtatgttcacg

SEQ ID NO: 517268 - DNA, 100 bp, Homo sapiens
cagccaagatggtgaagcagatcgagagcaaggaggaggaagccaagaatctggtgagcgaagccatcgcagctggcatcttcaacgacctgggctccgg

SEQ ID NO: 517269 - DNA, 99 bp, Homo sapiens
gaagacatacaccatgggggaggccagtgtggggtgtccgcaatgttgccagtgtctgtctgcagattggctacccaactgttgcatcagtaccccatt

SEQ ID NO: 517270 - DNA, 147 bp, Homo sapiens
cttttatccagctctaaactttatttcctcccagaagacactccccagggcagaaatagcgaccatggcgagtcctattttgtaacggattatgatccaaccattgaagattcttacacaaagcagtgtgtgatagatgacagagca

SEQ ID NO: 517271 - DNA, 97 bp, Homo sapiens
gggtggggaacatgtctgagtcggagctcggcaggaagtgggaccggtgtctggcggatgcggtcgtgaagatagtagagacggggtttgaccgtgt

SEQ ID NO: 517272 - DNA, 82 bp, Homo sapiens
tgtccaacagaacgacctagtatttgaatttgctagtaacgtcatggaggatgaacgacagagctccaaacgagaatggaag

SEQ ID NO: 517273 - DNA, 97 bp, Homo sapiens
ttgtggagccggagctgggcgcggattcgccgaggcaccgaggcactcagaggaggagggtgaggacaaaatcttcttaatcaacaagcttcactcc

SEQ ID NO: 517274 - DNA, 100 bp, Homo sapiens
accccaacgaggtgtgggagatcgtgggcgagctgggcgacggcgccttcggcaaggtttacaaggtgaccaatgctcaggacttcggggctcaaggagt

SEQ ID NO: 517275 - DNA, 75 bp, Homo sapiens
gggatgagattggcctggatgcagctgcccttcctggacagtcttgtgaaaatgccattgtgtgctggaaacctg

SEQ ID NO: 517276 - DNA, 85 bp, Homo sapiens
cggtacaactgtcctcaccagccctcgcctcccgagtcactgcagccaacccttcagcaagtttttttgaagaagcaggatgctg

SEQ ID NO: 517277 - DNA, 100 bp, Homo sapiens
ctggaaaatatctgttaacagactgcttttacacctaccaatgtacaggaaagggaagcacagtttggaacaacagcagagatatatgcctatcgagaag

SEQ ID NO: 517278 - DNA, 90 bp, Homo sapiens
gaaatcctgaagttccctcacattagccagtgtgaagacctccgaaggaccataggcacgtctgagaatggtggatgtggtggagaaaga

SEQ ID NO: 517279 - DNA, 105 bp, Homo sapiens
tctccttagatgactctgagattgaagacagccttacagaagctttggagcaaattaagataattagctcatcttcattttctgaacgcctgaaagtagtagatg

SEQ ID NO: 517280 - DNA, 98 bp, Homo sapiens
gtggtgcacacgccctgcatcgagcagctggagaagtgctgaacaaggacatcgcggcctgccgcactgccaccatcacgggcacactgaagcggccg

SEQ ID NO: 517281 - DNA, 83 bp, Homo sapiens
tgcaagaaccgctacgacaaggacaagcccgtttctttccacaagaggccactgtctgcagctcccgtgaagatgtccactcc

SEQ ID NO: 517282 - DNA, 74 bp, Homo sapiens
cctatctatggtgcagatattaatgggagcatatatgatgaggtaagaatgattgatgttggctgatattggag

SEQ ID NO: 517283 - DNA, 96 bp, Homo sapiens
ggtcatgatgatgatattctctgcctaactattcatcctttgaaagactacgtggcaacaggccagggtgaagttgaacaaattgctatgatgaaa

SEQ ID NO: 517284 - DNA, 125 bp, Homo sapiens
atcgaactctgtcctgaggcacaagtcaaaatagatcgttacactcagcagatgagaatcaaatgttttgctgttccctttttccacatgctaatgaatggctaaaaaattgcacgacacctgag

SEQ ID NO: 517285 - DNA, 98 bp, Homo sapiens
gaagatacagtgactttgatttgcttaacaacagcttacagaaaggcttcccaactgatgcaactcttgatgacataaaagaatggttagaagataaa

SEQ ID NO: 517286 - DNA, 95 bp, Homo sapiens
ttttatattcatctcaaaaacaaaattctgaactcaggacttggcaagacacatgacggaagtgtgtatttttgggccactccacggcaggtccc

SEQ ID NO: 517287 - DNA, 100 bp, Homo sapiens
aggtagaacatggaggatcgtcaggctctaaacaaaattctgatgagctcacagtgcctgcactttaccccagtagccctgaagtgtgggccccgtaccc

SEQ ID NO: 517288 - DNA, 82 bp, Homo sapiens
aagtgggatcacctatgaagatagtatggtggaggaccagctgtcaaccatctgtacatttgtcatacttgccaaattgagg

SEQ ID NO: 517289 - DNA, 100 bp, Homo sapiens
catttccaagtacattctcaggtggagacctttttttgctccactcaagcctgttagaatcaccatggaatacagctccagtgggaaggccactggagaa

SEQ ID NO: 517290 - DNA, 100 bp, Homo sapiens
ccttgtttggactctctgctcctctagaagatttcacagcaatgctggactgcagtgactatgttctagtcaggtggcttcacccacatcttcactgaag

SEQ ID NO: 517291 - DNA, 104 bp, Homo sapiens
gtggactacaccaccattgtgtttagcaatgaaaccttgtgagtttccagaaattcaacatggacatctatattatgagaatacgcgtagaccatactttccag

SEQ ID NO: 517292 - DNA, 50 bp, Homo sapiens
cagggagccaagcgtcctgcccggccgtcgcaatggaagaagagatcgcc

SEQ ID NO: 517293 - DNA, 75 bp, Homo sapiens
gggcgctgtgcatccacactggacgcgagctgcgctgcaagaggctgggaggcggcagaatgcagccagaggagg

SEQ ID NO: 517294 - DNA, 90 bp, Homo sapiens
cgggatattctcttctgtgctgtcaagggtttccaatacttatctacaggaatcgccatgaccccagctctgagggaggcaacagcaaag

SEQ ID NO: 517295 - DNA, 74 bp, Homo sapiens
ccccgacgatagcgaggtcacctttgcattgcactcagactgacagacttcaaggatgcagctgctactaccgg

SEQ ID NO: 517296 - DNA, 75 bp, Homo sapiens
tgcctcccagctgtttggatcacagagaggcagaggtggaggagacactgaagcgactgcagagccagaagggag

SEQ ID NO: 517297 - DNA, 75 bp, Homo sapiens
agaagatttctggccagtggagagaggaattcctcaagacaccattccagggcgtctctggccgagcctcttttt

SEQ ID NO: 517298 - DNA, 100 bp, Homo sapiens
aggacacagagaccaagaacgctgtgctggagcacatggaggaactgcaggagcaagtggcgctgcctgagaatctcttatacacctccaaaaggcccaa

SEQ ID NO: 517299 - DNA, 100 bp, Homo sapiens
aacacactggaaacaaacagtatttctactggaaaaaccattttcagttaaagcaggaggagatgttaaagtaacccatcttgcaggacgacattgaaga

SEQ ID NO: 517300 - DNA, 83 bp, Homo sapiens
gtgtgacgtttctggctggcaatcggatgctggcccagcaggcagtcaagagaacacgagaccaatggtgtggcaaagagtga

SEQ ID NO: 517301 - DNA, 97 bp, Homo sapiens
ccaggagctggagcaggaggaaggactcacccttgcccaggtggagccgccaccaaaatgcagattttcgtgaaaacccttacggggaagaccatca

SEQ ID NO: 517302 - DNA, 100 bp, Homo sapiens
ttcccggctctgccctcttggccgaagtgcccgctgccgggcgcgggcctcagggtcccgggattcttgagctgtgcccagctgacgagcttttgaagat

SEQ ID NO: 517303 - DNA, 100 bp, Homo sapiens
aggaatgcagcagagaggactcgccatcgtggccttggctgtctgtgcggccctacatgcctcagaaggaatcctatgaggatggttgtgaggattatcc

SEQ ID NO: 517304 - DNA, 100 bp, Homo sapiens
gtcagcagggggccagctcaggacacacagacccagctggaactcgagatcctgcatattttgatgaaaattggctaaacagaatcaaaactgaagtagg

SEQ ID NO: 517305 - DNA, 74 bp, Homo sapiens
gcggagaccctcgaagtgcgcaaacttgacactcaccctgaccggttccagcaacagatagaaatgctttaagt

SEQ ID NO: 517306 - DNA, 82 bp, Homo sapiens
gctttgtggacgctggcaacgcattcaagaaagccgacccccaagaatccacattcatctcaatggaaggatcctgccttaa

SEQ ID NO: 517307 - DNA, 71 bp, Homo sapiens
agacttcagggattacataaacctgtgtaccatgcactgaatgacacaggctgtcctagcagccagtcagt

SEQ ID NO: 517308 - DNA, 75 bp, Homo sapiens
tatttttctggccaaggaaagctcaggaaggtctaagaagagccacaagaagagccggagagggaatgagtaatg

SEQ ID NO: 517309 - DNA, 95 bp, Homo sapiens
ggaggtgcccaaggtcagaaggaagcaccacacagaggaatcccttggcaccatgtcctgtgtgcattataaattttcctctaaactcaactatg

SEQ ID NO: 517310 - DNA, 73 bp, Homo sapiens
ggcatccatctcaggacatgttctgggcaattgaaggaacagactaaaaatcgtgtcctggaaggaaactaca

SEQ ID NO: 517311 - DNA, 50 bp, Homo sapiens
gggagggagccatgaagcattacgaggtacaccaggggttggaaaaacca

SEQ ID NO: 517312 - DNA, 100 bp, Homo sapiens
tccacttcgtttagttgcgctccatggacagatcaacgaacctggacattgaggagctcaaggtgccagcgagatttcagattcctgtaaacctctaaag

SEQ ID NO: 517313 - DNA, 101 bp, Homo sapiens
gaaaaaacctgagaacttcctgatctctctcgctgtgagacatgtctgagactcctgctcagtgtagcattaaggtaagtaaggaggtctctgtaccatgg

SEQ ID NO: 517314 - DNA, 100 bp, Homo sapiens
gctcaggaacgactggccacggccctgcagaagctggaggaggcagaaaaagctgcagatgagagtgagagggcaacgggcatgaggaggtagttgcatg

SEQ ID NO: 517315 - DNA, 82 bp, Homo sapiens
aggccgcctggggtagcggcggcgggagtcctggcgctctgcaggctgaagctcagggccctgtctgctctgtggactcaac

SEQ ID NO: 517316 - DNA, 89 bp, Homo sapiens
atttggcccagctgtgttgagcttttcatggattatcttacgtagataagacactgcaacagaatgggtaccacagaccatgtcatcgt

SEQ ID NO: 517317 - DNA, 82 bp, Homo sapiens
cttcctgatccgggagagtgagagctccccaggggagttctctgtgtctgtgaagttgaggcctctggtgtctacgcagcca

SEQ ID NO: 517318 - DNA, 75 bp, Homo sapiens
ggcaggctgggcacgaggaccatgctgggccggagcctccgagaagaaagggggctgtatacagctttgatccag

SEQ ID NO: 517319 - DNA, 100 bp, Homo sapiens
gctgagcagcctaaaggaggagttggccctgtgtcaggtttcttgagtacaggcgatcaggctgcaaaggggaactatggactccttgatctcatacaag

SEQ ID NO: 517320 - DNA, 50 bp, Homo sapiens
accttgggggagccttaaacaacaggatgttggcaaaggatgaactgatg

SEQ ID NO: 517321 - DNA, 100 bp, Homo sapiens
ctgggggtcatcgacagctgcaaggaggccgtcaccttcaaggccgtcagacaagtgagaagcgccaccttcaagtgaacgtcaccaacccagtacagtg

SEQ ID NO: 517322 - DNA, 90 bp, Homo sapiens
aaatctcaaggaaaagtattgcaagcaacagtagtcgctgttggatcgggttctaaaggaaagctgactcctgagttctcacaacgcttg

SEQ ID NO: 517323 - DNA, 87 bp, Homo sapiens
atgggcacccgcgacgacgagtacgactacctctttaaagcaatggctgccatccggaagaaactggtgattgttggtgatggagcc

SEQ ID NO: 517324 - DNA, 82 bp, Homo sapiens
ggtcccggcggagatccagtgggaagagccggcggctgcccgggccaaattgtggctactaatttgccccctgaagatcaag

SEQ ID NO: 517325 - DNA, 73 bp, Homo sapiens
gtctggcaggaggtttttgatgataaagcaaagaaacctgctcctccaaagccagagcccaagcctaaaaagg

SEQ ID NO: 517326 - DNA, 101 bp, Homo sapiens
gcctcatttactgaacagtggacagatggttatgcttttcagaatcttatcaaggaaatcctcattgacgattcaatttgttgaaggccaatttgtggact

SEQ ID NO: 517327 - DNA, 100 bp, Homo sapiens
caggactcatccgacagcataggctcctcacagaaagcccacgggatcctagcacggcgcccatcttacaggagaactctcttcagaggtcgaagacgac

SEQ ID NO: 517328 - DNA, 87 bp, Homo sapiens
caggtccacccatctggccgggcagtaccttcttcaagagaaatggagcccttctccaaggctgatcagctgaccgaagaacagatt

SEQ ID NO: 517329 - DNA, 100 bp, Homo sapiens
aagatgccagatgtgggagacacgccaaagctcccaagagctccactggttcaacagcctctcctccagtttcgaccccagtcacaggacacaagagaat

SEQ ID NO: 517330 - DNA, 90 bp, Homo sapiens
agaactgagcccaggccacagtaccctattcacgctctgtgcttgtgccaaggaatttacaagctcaggctcagccaacactgagaccac

SEQ ID NO: 517331 - DNA, 90 bp, Homo sapiens
tctttgataataaagatgacattgccagttttgtcaaagggaaggtaaaggtaacatctgccggcacctgctgccccgggtccagtgccc

SEQ ID NO: 517332 - DNA, 82 bp, Homo sapiens
tactacaaccagagcgaggccggttttggctacgggcctccacctccaccgccagatcagtttgcccctccgggggttcctc

SEQ ID NO: 517333 - DNA, 100 bp, Homo sapiens
actactgtggagcctctctgatcagcagcaggtggctattatctgcagctcactgctttgctaagctacggaaaaacctgcgagccctggtggttgtcca

SEQ ID NO: 517334 - DNA, 100 bp, Homo sapiens
cagcagaaagaacagaggcgacggctagaagaggttgccaacttggcctgttccatctcaaataatgaagaaggtgtaaagcttgttcgaatgtctgcaa

SEQ ID NO: 517335 - DNA, 73 bp, Homo sapiens
cgtcgcgagctgcgcgagttcctggacaagtgcgcaggaagcaagccagaggacctaatgaacatgcagcact

SEQ ID NO: 517336 - DNA, 82 bp, Homo sapiens
ggccaagaggcaaaggggaggttacgcagcaaaccatccagaaggccaccagcttgggctccccacggagggcagcaagtgg

SEQ ID NO: 517337 - DNA, 51 bp, Homo sapiens
gggaccagccctggcttggaagaggagatgttaaagtaacccatcttgcag

SEQ ID NO: 517338 - DNA, 90 bp, Homo sapiens
ccttcgcaagaagcaccagttcaagtggccctcagggcatccccgttttcgtgatgtaaattggagtcaaccaggtgaaaagaagttaac

SEQ ID NO: 517339 - DNA, 100 bp, Homo sapiens
cagtaccaaaaacgtcaacaacagttttacgcctatacggttcagacatccgagagcatgaccccaactgccacttcagagacttatttgaaagctttgg

SEQ ID NO: 517340 - DNA, 105 bp, Homo sapiens
atctccaaagactggatggtatgggctgtctggagtttgatgaggagcgagcccagggtcagttaaatgaaagcatggaccatgggggagttggaccatatgaac

SEQ ID NO: 517341 - DNA, 83 bp, Homo sapiens
cacgagcagatcctggtcctcgatccgcccacagacctcaaattcaaagctgaaggctatgcagcctttcaggaagatagctc

SEQ ID NO: 517342 - DNA, 95 bp, Homo sapiens
accggctgccgcctgctccccggaaaagggcactcgtctccgtgggtgtggcggagcgcgcggtgcatgttggggttagacttggaggaactcga

SEQ ID NO: 517343 - DNA, 75 bp, Homo sapiens
gctgcctgggcagctgccagcccctggagagctgaggagaaggcagagcccccccaggctatgaatgccctgatg

SEQ ID NO: 517344 - DNA, 90 bp, Homo sapiens
cgcaggcagcaactgaggcagcggcaggctcaggtgcagccgctggctgccattggacctgtcaagtgcctgagtcatgtgataatgggc

SEQ ID NO: 517345 - DNA, 100 bp, Homo sapiens
acactggactccctggacatgctgccagcagtgaagggaataagtcttcagtccagaaacaatatagatgtgatgtgtgtgattatacaagtacaacata

SEQ ID NO: 517346 - DNA, 83 bp, Homo sapiens
gtctaggaccgcttcccccgagccagcaggttcgagaacttgtcttggacaattgcaaatcaaatgatggaaaaattgagggc

SEQ ID NO: 517347 - DNA, 54 bp, Homo sapiens
ttgacacgtcttatttaatccacatcatagctgaccaggtgtatggagaccagg

SEQ ID NO: 517348 - DNA, 74 bp, Homo sapiens
aaagtgttagaaacagtagtggagaatcaagaacacttcagttatggaagatcaaaatgaagatgagtccccaa

SEQ ID NO: 517349 - DNA, 98 bp, Homo sapiens
tgatttgcaacccttccgggaagccatagctctgcatgttaagatccttctattctacgtaatattttatggctgcctggctggcatcttcatcggaa

SEQ ID NO: 517350 - DNA, 75 bp, Homo sapiens
actcaatattgcacacctcatatgggaggctacagaatccagaagtcagatttcagcaacaactggaacaactca

SEQ ID NO: 517351 - DNA, 100 bp, Homo sapiens
ttgactctgccagctcattgaactcagataatcttgatgcaggctggtgcttgagttcagcctcctgtcttatgcttttggcaaatttcctaccgttgtt

SEQ ID NO: 517352 - DNA, 97 bp, Homo sapiens
ggaagctggagccacctgcgggctcccagccaacctctgataaaccctcccagcggccatcagagagcacaaattgtagccctacccggaaaaggtc

SEQ ID NO: 517353 - DNA, 100 bp, Homo sapiens
agtatctggtgaagtggaaaggatggcccccaaagtctctaattaacagaagatggcaaagcccagccacagcagctatgtccttcagcagctaaacaac

SEQ ID NO: 517354 - DNA, 138 bp, Homo sapiens
ttttgtggtttatacttacaacaaggaagggactttaatcactgaccatcccaatatacagtcaggtcaattcagtgaagatatgatacccacagtgggcttcaacatgaggaaggtaactaaaggtaacgtcacaat

SEQ ID NO: 517355 - DNA, 51 bp, Homo sapiens
agaagaccaaaccatcccacggctccaagagtccgaaattgaagttcagag

SEQ ID NO: 517356 - DNA, 98 bp, Homo sapiens
gaagggctaccagcgccgctggttcgtgctgggcaatggtttgctctcttactacagtgtaaacaggaacatcgataagtagtgtaaaaacttgcaca

SEQ ID NO: 517357 - DNA, 75 bp, Homo sapiens
acatcattgtgcaccagttcaccaaggtctctagcatcaattcacgctttgccaaagtacacatcctgtatgtgg

SEQ ID NO: 517358 - DNA, 74 bp, Homo sapiens
ctggagaggttaaagagacccgttcagagtcctacagtggcagatatcaatgatgtcaaacggctgaaacctgg

SEQ ID NO: 517359 - DNA, 100 bp, Homo sapiens
atctggaattgcctctagagtggactgtgttgggaagttcttcacttgaagctattgtggacgatgaaaggctctctgcagaggagatggatgagaggag

SEQ ID NO: 517360 - DNA, 75 bp, Homo sapiens
cagctgctcagaagcaccactggaaactcaggtgctccagctgctgctcctgcccctgcctcagtcccacagata

SEQ ID NO: 517361 - DNA, 100 bp, Homo sapiens
cgtgtgatgcagctcttcggcctggttaacacccttctggccaatgacccaacatctcttcggaaaaacctcaggtgcggcggcagcacatggagcgttg

SEQ ID NO: 517362 - DNA, 75 bp, Homo sapiens
cggatacttctgaagaacaaattaaagaatattttggagcctttggagagggttatgtggtccgaatcagtggtg

SEQ ID NO: 517363 - DNA, 101 bp, Homo sapiens
cgcctgtcacgaagccaaagctggactcggcagcgtacaaggtttcagttcttcagtctacaaaggactcttctaaaaggatatgtgttgctaatacccat

SEQ ID NO: 517364 - DNA, 83 bp, Homo sapiens
atcaaatctactactgttcatggcagatgatgataattccgaagaaggcttccacactattcattcaggaaggcatgaatatg

SEQ ID NO: 517365 - DNA, 98 bp, Homo sapiens
aaggtcgccctcaaggccatgatcaaaacatctttgtggagttcacctctgtgtttgactgccagaaagccatgcagggcctgacgggccgcaagttc

SEQ ID NO: 517366 - DNA, 80 bp, Homo sapiens
caaagtcgaatatcatgctggtggctctacccagaattcaattaaagtggctcaggtcttgatttcccagttaaagatgt

SEQ ID NO: 517367 - DNA, 51 bp, Homo sapiens
cgctggcaaaagcgacgggagcaggtttccgagacactaaagcgttttgca

SEQ ID NO: 517368 - DNA, 50 bp, Homo sapiens
cccagggccaggcgccgctcagaacgatacattccaccgttgatctgggg

SEQ ID NO: 517369 - DNA, 96 bp, Homo sapiens
cttccccgcagcatggaggacgatgcaccagtgatctacgggctggagttccagcggagctggagttcgcccaaatcatcatcatcgtcgtggtgg

SEQ ID NO: 517370 - DNA, 100 bp, Homo sapiens
cgagatggaatgtgtagacagtctttcacgggacatgtctcagatatcaatgctgtcagtgtggagccgccaccaaaatgcagattttcgtgaaaaccct

SEQ ID NO: 517371 - DNA, 88 bp, Homo sapiens
gggaatgtcgacgaggagctgaggtgtgatgaatgcagactctgctaccattttggctgtttggatcctcctttgaaaaagtctccta

SEQ ID NO: 517372 - DNA, 100 bp, Homo sapiens
ggaacaccaatggaccaaaatgaacacagtcactggggccctggagatgtacaaggatgattggaacaaagtgtcggaacatgttggaagtcgtactcag

SEQ ID NO: 517373 - DNA, 98 bp, Homo sapiens
ccgccccctaaagcggaaccggatcaccgagggcatttacggcagtggaagatagatgataagcctgtaaaaattgacaagtgggatggatcagctgt

SEQ ID NO: 517374 - DNA, 100 bp, Homo sapiens
cggggatagtgtcatcggttcggtaaagtttctgttctctggcaggatgacgcaaaacacggtgattgtgaatggagttgctatggcctctaggccatcc

SEQ ID NO: 517375 - DNA, 75 bp, Homo sapiens
gctggagcccaactgataatccttgaacatgtatttagcgtggactacaatgatgaactggatatcttggtgagc

SEQ ID NO: 517376 - DNA, 73 bp, Homo sapiens
ggattctctggcgcttttggcatgactcagaagaggtgctggcagataaaacgtcactgtgcagagcctttta

SEQ ID NO: 517377 - DNA, 50 bp, Homo sapiens
aggacattccaggcagaggcaagatacgaccatatgtgggatgtttggta

SEQ ID NO: 517378 - DNA, 50 bp, Homo sapiens
gtctcaggcctttagtgatgatgaatgtgacagtgatgataacatgggtg

SEQ ID NO: 517379 - DNA, 82 bp, Homo sapiens
tgtggagaagaccccggcgctggtgaacggtgtgagttcttgatacgaatgaaaggccaagagtttgttgatgagattcaag

SEQ ID NO: 517380 - DNA, 74 bp, Homo sapiens
ccgcgaggtcgtgttcccgaacaggaccgtataatagacgctggccccaaaggaaactactctcgatttatgaa

SEQ ID NO: 517381 - DNA, 75 bp, Homo sapiens
tcactgcctctggcatggatgaggtcctgggaactccaacaagggagcaaatcagagaaatgaacccaaactaca

SEQ ID NO: 517382 - DNA, 97 bp, Homo sapiens
tggaagttcgcaaacagcacaggccatcaaatgcagaattcacaagatccaatcccttgtccttaaaagcttcgggctttgtattccatgtatcttc

SEQ ID NO: 517383 - DNA, 83 bp, Homo sapiens
cagaagcccattatggctgtaactggagatgacacagatcgtcagtatttaaacagatcacatcatgcgtgagtacaagctag

SEQ ID NO: 517384 - DNA, 75 bp, Homo sapiens
ggccggagcgcgaatgtcgtgctcaccctgcctccttcccgccgccccctggggggcaagattcttgccaagaga

SEQ ID NO: 517385 - DNA, 75 bp, Homo sapiens
gttcgacggccttgccctgctccacagcttcaccatcagagacgaaaataaagcagttggagtgatgaagtcggg

SEQ ID NO: 517386 - DNA, 98 bp, Homo sapiens
gtcccatcggaggacctccctgccctgtataccgagggaacagccggaaaactcaaatatatgtgaggtgtgcaacaaatggggacggctgttctgct

SEQ ID NO: 517387 - DNA, 50 bp, Homo sapiens
gtcatctccagatgctagggttatggttaacaagcacaagccctggctgg

SEQ ID NO: 517388 - DNA, 100 bp, Homo sapiens
aaagggaccaagctgaagaaggtgaccaacattaatgatcggagtgctcccatcctcgagagcgatgacaacctatgcaacactccccatttacctcctt

SEQ ID NO: 517389 - DNA, 75 bp, Homo sapiens
tgcctgccgcctggtggaggctgtgctctcaggagagggctacttctacaagtccgaacagccagtccagcaaaa

SEQ ID NO: 517390 - DNA, 100 bp, Homo sapiens
ctaccggaggcgggacatctccagcaccctcatcgccctggccgacaagcacgcaagtgatgcaacacccgtctgaaggtggccaggtgctgagcctctg

SEQ ID NO: 517391 - DNA, 100 bp, Homo sapiens
gtactggaagaacttaacttttgtggcacctatctatggtgcagatattaatgggagcatatatgatgaggtaaatgaattggtggatgccagagatgtc

SEQ ID NO: 517392 - DNA, 100 bp, Homo sapiens
gctattgtgaaggagggttggctgcacaaacgagggagatccgcaacgtggagctgctgaagctgcgctttggcgaggccccaatgcacttctgtgaagt

SEQ ID NO: 517393 - DNA, 82 bp, Homo sapiens
cggatatcacctttgccactgacattgcagagctgtgggctgtgttccacaagttcaaagcttcctgcctgacacagctcac

SEQ ID NO: 517394 - DNA, 80 bp, Homo sapiens
agatcgatttgtctcaatgaaggttgatttcatcagactaaaaagttacaggaccaggtggatgcaacccttattcctat

SEQ ID NO: 517395 - DNA, 100 bp, Homo sapiens
gctgccctcttgcgcgcgggaagcagcaccaagttcacggccaacgccttggcactagggtgtgcctacaggggttgtggaaggagacgctgcccccggt

SEQ ID NO: 517396 - DNA, 75 bp, Homo sapiens
agcagtcgaattttgtaaaagaggtccagaggagaccatcactcagcaaggacgaacgccaaggacagtaactga

SEQ ID NO: 517397 - DNA, 76 bp, Homo sapiens
gggacaccctggaagccaggaaatgatgcgatatggtagagcgcttcggtgaaagtaaagacagtagtcattgtgg

SEQ ID NO: 517398 - DNA, 90 bp, Homo sapiens
ctcgctgctgtgcccatctatcagcaggctccgggctgaagattgcttctcttctctcctccaaggccacggcgtatgcctccgaggacg

SEQ ID NO: 517399 - DNA, 100 bp, Homo sapiens
ggcgagtttccgatttaaagctgagctgcgaggaaaatggcggcgggagctacaggccaaatttgagcaccttaagagacttcaccaagaagagagaatg

SEQ ID NO: 517400 - DNA, 88 bp, Homo sapiens
ccaagctgcaaagctgggagagactggaccagaccatgggcctgagcatcagggctccttcacctaccaaacgcaaagaccgctcaga

SEQ ID NO: 517401 - DNA, 100 bp, Homo sapiens
cagacccgtagttcctattgattcatcagattttgcattggatattcgcatgcctggggttacacctaaacagtacctggagtagaacagaaaaattatt

SEQ ID NO: 517402 - DNA, 101 bp, Homo sapiens
cggccttcgggtcgggcgtctccgccggctactgccgcttcagttctcccggtgtggccacgagtcgggcattatccaattggtttgctatttgatcttct

SEQ ID NO: 517403 - DNA, 75 bp, Homo sapiens
cctctaccatacaggcactatattgcaataatgacgctctgctgttgcccgtattcaggagttcttcagacggag

SEQ ID NO: 517404 - DNA, 75 bp, Homo sapiens
ggatttagataaactcaacatcgacagcattatccaacggctgctggaagacacgatgaggcgagtggtacgaca

SEQ ID NO: 517405 - DNA, 100 bp, Homo sapiens
caagtgttggcggatggaagggaggagactcctgaccctcagaatggatcccaggatgctggtatcctgcatagatttcaggtacatcactgatgtcctg

SEQ ID NO: 517406 - DNA, 90 bp, Homo sapiens
acgtgcacccagaggaccaggcggcggtagcaattgtggtattaggaaacaaaatcgacctttctgagcagagacaagtggacgctgaag

SEQ ID NO: 517407 - DNA, 98 bp, Homo sapiens
acacagctcagaacagttggatcttgctcagtctctgtcagaggaagatcccttggagcggttggttccccgaggcgtacgtgaaggctctggaggag

SEQ ID NO: 517408 - DNA, 83 bp, Homo sapiens
tctgagccgactgcggtggtcaagaggacctcagcagccatgtcgaagccccatagtgaagccgggactgccttcattcagac

SEQ ID NO: 517409 - DNA, 74 bp, Homo sapiens
gaccactagacccacagctgttaaagcaacagtttcaccagtgatcattaaagaatgggcagcttacaaaggaa

SEQ ID NO: 517410 - DNA, 98 bp, Homo sapiens
gcctctgggagcagaagggaggctccaagacctcatcaacaattaaggttaacgtccctaaaacccgccggactttctgtaagaagtgtggcaagcac

SEQ ID NO: 517411 - DNA, 100 bp, Homo sapiens
cgctggccgggggcgcgggcggcggcgccggcaggaagcagaagatggctgtgccacccacgtatgccgatcttggcaaatctgccagggatgtcttcac

SEQ ID NO: 517412 - DNA, 83 bp, Homo sapiens
ccaagaaccaaccctgccagcacctggaccttggacattcagacttcagaatgataacgaaggaggcccaacttcattcaata

SEQ ID NO: 517413 - DNA, 100 bp, Homo sapiens
ttccaaggaagaatttcctctgaagcaccggctactatgtgggcatgtgccttgcggcttcagaaaagcggctccacgccctcagccaggcccctgaggc

SEQ ID NO: 517414 - DNA, 87 bp, Homo sapiens
agaaaattggcaaagctgtggaagactccaagccctactgggaggcacggagggtggcgaggcagtcttgctctgttgcccaggctg

SEQ ID NO: 517415 - DNA, 75 bp, Homo sapiens
ggcgtcctgcaagctctcccagatgggctacctcaggatcgcaatgttcatggctcccgctcagatggcatatcc

SEQ ID NO: 517416 - DNA, 100 bp, Homo sapiens
gctgcaaaatggttccattcgccaggagacgctcctgagagaagggcgcgcgcggcacagggagaactaatgccgacgtgatgaccgccctgtcccaggg

SEQ ID NO: 517417 - DNA, 75 bp, Homo sapiens
ttgtctgtacgcttcacccgaacagttggaaggatctgagtatgatgccaagatctgatgagacgacaggaagaa

SEQ ID NO: 517418 - DNA, 100 bp, Homo sapiens
cagacctggtcacctgtctggagcaaagaaaagagccctacaatgtgaagatacataagatcgtagccagacccccagatttggagtctctctacctttg

SEQ ID NO: 517419 - DNA, 98 bp, Homo sapiens
aggatccctgcttgctggagaatgacccagatgtcccaggtgcaggagctcttccatgaggcagcccagcagacctgatggccaaaagaaaggaagaa

SEQ ID NO: 517420 - DNA, 100 bp, Homo sapiens
atctttcctctaaagtcaaactgttacagccaagttctacttctgaatctatggatcaactactaaacaaaaatagagagggagaaaaatcaagagattt

SEQ ID NO: 517421 - DNA, 101 bp, Homo sapiens
gaggacgccggaacaccctggaagccgagaaatggctgaccccgcactacatctacccaccagccatcgtgcagcccagcgtggtgatcccagccgcccct

SEQ ID NO: 517422 - DNA, 101 bp, Homo sapiens
ttgaatcaagctgcaaagtaactaggctcatgcacaattagttcgagaagttgatgtggagaaggtgtctgcttttgagaatccatatgtagatgcaataa

SEQ ID NO: 517423 - DNA, 75 bp, Homo sapiens
cataataaccatctatcgggaagagggcattctaggatttttcgcttacgttatgatgatgaagtgaagcgggtg

SEQ ID NO: 517424 - DNA, 75 bp, Homo sapiens
atcgtctttccgtcctctgaggcgacggccgcggctgcacagggatctgcaaagacttggagaacttcaatctga

SEQ ID NO: 517425 - DNA, 100 bp, Homo sapiens
tccttctttttagagatcgttttgatggatatatcttccttgacagcaaagaacagtaaatgtcctgagggaacaaaacccatgctgatatttgctggcg

SEQ ID NO: 517426 - DNA, 75 bp, Homo sapiens
cgggactccggacctccaggaggttgtctgcattcaaaagagcattctattaaagctaccttaatttggcgctta

SEQ ID NO: 517427 - DNA, 100 bp, Homo sapiens
acattcttgcagctgcctacaaattcaagagtgaccagggatggacaatctctatgggaagcagaaggcaaggaccccggtcattttaggtagaaacaac

SEQ ID NO: 517428 - DNA, 126 bp, Homo sapiens
ctcgacctctggttctacttcacactgcagaactgggttctggactttgggcgtcccattgccatgttatttctcaaactctgaggctgcggagttcacacattgaaatctgtcatctttttcaga

SEQ ID NO: 517429 - DNA, 98 bp, Homo sapiens
caaaagagttgattgaaattatctctggtgctgcagctctagtaaccagagagcacagagaaatgctggtgaaactggccaaacagaacaccaacaag

SEQ ID NO: 517430 - DNA, 100 bp, Homo sapiens
atagccttcgacccaagcaacatgccacctggcattgaggccagtcctgacaaaatgcttcaggcttaacagcattgcgcagtgatgaagtgattgattt

SEQ ID NO: 517431 - DNA, 98 bp, Homo sapiens
cgggatcgagctgagaatagggacggccccaagcatcccagccatcactcttccacctgctccttagagaagggaagatgagtgagtcgagctcgaag

SEQ ID NO: 517432 - DNA, 51 bp, Homo sapiens
aaaggcgctccgtcatggggatccagacggatggcacatttcctagaggca

SEQ ID NO: 517433 - DNA, 51 bp, Homo sapiens
catcccagagttcattaagaagggaagaacagtgattattgagcagagttg

SEQ ID NO: 517434 - DNA, 74 bp, Homo sapiens
agagaagcagtgaaggagtgcagaggcatcacctgaaagcaatggctgccatccggaagaaactggtgattgtt

SEQ ID NO: 517435 - DNA, 96 bp, Homo sapiens
cgacggccggcccagttccacgcacccagcgagcccaagcgccttctccgcaccagggacacggccaacacggtgaaggaaaagttcgggaggaag

SEQ ID NO: 517436 - DNA, 83 bp, Homo sapiens
aaggaacttggttccccctccctcagcttccgccccaaaagtgtatgggtttcgacagaccatgatgaaattgagaatgtggc

SEQ ID NO: 517437 - DNA, 80 bp, Homo sapiens
attgaaattacctccgagggaaacaagaaaacatcaaagaggtctagcaaagaaaaatatggctcaggagactaaccaga

SEQ ID NO: 517438 - DNA, 100 bp, Homo sapiens
cagggctcccactgattctacattacgcctgggagctcccatcgaccatggcagtcctactttgacttgatcttggtggatgcacggaaaccactctttt

SEQ ID NO: 517439 - DNA, 50 bp, Homo sapiens
ctggcactggccaaggagattgatggtggatgcttccaaaagcatcgaag

SEQ ID NO: 517440 - DNA, 90 bp, Homo sapiens
tggcaggtgcccaaatccaaggggcaaaggaagtgctggcttctgatttggtggtcaaaatacttggatgatattgatgatgagatggac

SEQ ID NO: 517441 - DNA, 100 bp, Homo sapiens
atgatgcctatgatgccaacgtgtccttcaatgtttcccgggagctcttcttcatcaacatgtggcagaaggcactacctggcagcaccatctaaacctg

SEQ ID NO: 517442 - DNA, 90 bp, Homo sapiens
gcatggccagggacccccagcgctttgtggtcatccagttgtgtgacttcattgagacacattacctgaatgagcaggtgaaagccatca

SEQ ID NO: 517443 - DNA, 99 bp, Homo sapiens
gacagcacagccatgaggaactgcctgagcaagatcaaggccatcggcgagggtctaaaattcccaggactccacagctttgcaccagataagcctgga

SEQ ID NO: 517444 - DNA, 96 bp, Homo sapiens
agacccaaggcccccgagtgagcgcgggcgccgagacatccggctccgggttcgagcagagtactgcgagcatgggccagccttggagcagggcgt

SEQ ID NO: 517445 - DNA, 95 bp, Homo sapiens
caatgtttacatcaagaattttggagaagacatggatgatgagcgccttaaggatctctttggcaagtttgaaaaggatgcgcctccacttagca

SEQ ID NO: 517446 - DNA, 100 bp, Homo sapiens
ttgttgagaaattggatcttacacttgaaatacagactgttggggaacaagaggaattttctacttctggtcatgcttacactgatacagggaaagcatc

SEQ ID NO: 517447 - DNA, 50 bp, Homo sapiens
tgagtctccccagaagaggaagtttgagctctgccagtgccggccgggag

SEQ ID NO: 517448 - DNA, 75 bp, Homo sapiens
ggcgctgactcccctcacttggaaaccgggctgtgggtcggcccaaggggaagctgggcccggcctccgcggtga

SEQ ID NO: 517449 - DNA, 74 bp, Homo sapiens
ctaagagatatctgcaatgatgtactgctgtcaccactgactaaagaagagaaaactgcggcagagcaattcaa

SEQ ID NO: 517450 - DNA, 137 bp, Homo sapiens
aagcgctggtggcgggcccgggctgcggcgtgtgcgcgcccgccagctgctccggagatacgatttaggtcgatctcgagaactacagtatgtatacgtggataacaacattcacctgaaaggcttgccatcttatc

SEQ ID NO: 517451 - DNA, 100 bp, Homo sapiens
agaagatagaggcagaactgcaggacatctgcaatgatgttctggtggtggaagatggatatgaattttttgctaaacgacagttggtaaccttattttc

SEQ ID NO: 517452 - DNA, 82 bp, Homo sapiens
ccaggacgagaggatgcggagcccgcagaacctccacagtcaagaggacgaattcagaaggagctggcggacatcactttag

SEQ ID NO: 517453 - DNA, 100 bp, Homo sapiens
atcatggcggatggccccaggtgtaagcgcagaaagcaggcgaacccgcggcgcaataacggcacttcaggtggcaagacagctccttcttcagcagcaa

SEQ ID NO: 517454 - DNA, 100 bp, Homo sapiens
cgcgccttggagtccggagtaacttggccaggctggccccgagcggaactggagaaagctgagggtctggtccgagagcaggaggctgggctgctgcagt

SEQ ID NO: 517455 - DNA, 80 bp, Homo sapiens
caagcatcccattacagatagaagagacaggggcaagtgtccgagtggtgaatcagctacttacagagatggatggtctg

SEQ ID NO: 517456 - DNA, 80 bp, Homo sapiens
tttagagcctggctactcacagttgaagcctgattgcaggtgaaagaaaagatgttgtcccggttaagagtagtttccac

SEQ ID NO: 517457 - DNA, 100 bp, Homo sapiens
taagaattaaaagatgatgagaaataaggacaaaagccaagaggaggacagttcgctacacagcaatgcatcgaggtcagacatatttccaacatttggg

SEQ ID NO: 517458 - DNA, 83 bp, Homo sapiens
gcagtcctaccatgtcagccttcccagtagctgggaccacaggttatcaatactctggctgaccatcatcatcgtgggactga

SEQ ID NO: 517459 - DNA, 75 bp, Homo sapiens
cttctgcaaagacaggaggagtgggccctttgtgggtgagcttgtcggccacagactgctacattgtgcatgaga

SEQ ID NO: 517460 - DNA, 74 bp, Homo sapiens
tgaggcgtttctgtacatggattatctgatttcctccttcttcacccctgaaaccatatccaaagaagccccca

SEQ ID NO: 517461 - DNA, 88 bp, Homo sapiens
tacaatgaatccttcagcttcaaagttccccaagaagaactggaaaatgccagcctagtgtttacagaagctccaccatgaggcgagg

SEQ ID NO: 517462 - DNA, 100 bp, Homo sapiens
gaggaaaggccaggagaagaggaacagctgtaattctgcccccattgagcccctacttcaagtactccgtcatgatcaacaaggccacgccctacaacta

SEQ ID NO: 517463 - DNA, 75 bp, Homo sapiens
gaagaaccattgttagtgaacgtggacaaagctgttgtctcagggagcacagaacttttacaaagttgatcacag

SEQ ID NO: 517464 - DNA, 82 bp, Homo sapiens
gaagatcgcaccgcggacgcccgctgagcttggcgcacgggccgaccagctcctgtccaaatatgacccccagaaggaggca

SEQ ID NO: 517465 - DNA, 75 bp, Homo sapiens
cgtactgatcactacatcatggaaatttgcgagaatccccgatttatcattgatggagccaacagaactgacatc

SEQ ID NO: 517466 - DNA, 75 bp, Homo sapiens
catccttgtaatgcgactagcaaccaaggaacaagagatgcaagagtgtactatatttgtcaggatacgaatcag

SEQ ID NO: 517467 - DNA, 87 bp, Homo sapiens
gacatcatcatcaagagggagatggtgtcccaatacttgtacacctccaaggctaaatggaatctatttggaatttgcagaagcaag

SEQ ID NO: 517468 - DNA, 88 bp, Homo sapiens
gtggtatgataccagcaactggtctattatatcatttaaaccacatggctatctaaagagcaaagaatggctcaagaagtactgacac

SEQ ID NO: 517469 - DNA, 98 bp, Homo sapiens
gactttaaaatatcaggagttaatggaacacatattgaccagtggaataaggtaattgaacaactaggaacaccatgtccagaattcatgaagaaatt

SEQ ID NO: 517470 - DNA, 75 bp, Homo sapiens
gctacacttcgatggacctgttgaaaaaaatctgggaggttgaacttattaatattgtagggaatggaagtgaac

SEQ ID NO: 517471 - DNA, 82 bp, Homo sapiens
gccgatccgccgcccgtccacacccgccgccagattgaccctgctacgggaatggttatgaatctggctgatctcaaaaaat

SEQ ID NO: 517472 - DNA, 100 bp, Homo sapiens
gaatcgccttcagccctgtctggtgcatccttggcagaaagtgaggaggaaaacacccccattaaagaatcttcaagagggagacatagggaaaaggaag

SEQ ID NO: 517473 - DNA, 112 bp, Homo sapiens
agcaaagggtcctggaaggaaagaatgaagaggccctgcaaggtaccgaggagaaggcattgtatatgggacactagaggaggtgtgggactgtgtgaagccagctgttgga

SEQ ID NO: 517474 - DNA, 98 bp, Homo sapiens
attggagaagcagcagacagccaataaggtggaaattgagaaaattcgggtttctaagcatgaattgaggaacagaagaagcagagcagatgatcgga

SEQ ID NO: 517475 - DNA, 80 bp, Homo sapiens
cttcgctgtggtgaagctggggcggcaccggatcaccaagacggaggtcatcatcagatttgaaatatttaaagtggata

SEQ ID NO: 517476 - DNA, 100 bp, Homo sapiens
tgattgcctaaatcagccaaacacaggcctgcctagggtagttaaaagacgagtgaatgctctcaaaaacctgcaagttaaatgtgcacagatagaagcc

SEQ ID NO: 517477 - DNA, 88 bp, Homo sapiens
gcctttgtcaggaaatctgcaagcccggaagtttcagaaggccctcaggaaagcagagagcttgaagaaatgtctctctgtcatggaa

SEQ ID NO: 517478 - DNA, 90 bp, Homo sapiens
aaaactggaaatcccaaagcctcgaatggctgccactcagaaacttgttaaagacattattggaccttctggaccctgcacggtggcgga

SEQ ID NO: 517479 - DNA, 82 bp, Homo sapiens
accctcgcggccgtgggcagcggctgccgcgcctgtctgcccgagggaggatgccaagtttgtggaggaacggagaaagcag

SEQ ID NO: 517480 - DNA, 75 bp, Homo sapiens
catacataacatgggaattgtgcaccgagatctgaagctgaacatctccttcccagccactggctgccagaaact

SEQ ID NO: 517481 - DNA, 75 bp, Homo sapiens
cctactacccaggccactacccacccaacattgactgcacatggaacattgaggcagcctggcatcctcgctaca

SEQ ID NO: 517482 - DNA, 76 bp, Homo sapiens
acaggagaacagactgaaaaaatgtggcagcgcctgaaaggaatgtgggtcaccaccacaaccagttgtaccagct

SEQ ID NO: 517483 - DNA, 128 bp, Homo sapiens
ctgccttgtaattcttaatcagcctttggacaactattttcgtcatctttggaacaaagatttctctatgaatcatcatcaagaactctgggagaacttttgaattcataaccaagccaacatctcca

SEQ ID NO: 517484 - DNA, 83 bp, Homo sapiens
tggacagtctcagggacaccatgtagagaattttggtctcgattcaggtggtggaagatggatatgaattttttgctaaacga

SEQ ID NO: 517485 - DNA, 100 bp, Homo sapiens
gttcaggctacggtgagccgaagcgtgccctggacttcagggagagcagggaagctgagccccacccgctgtgggagtacccatgccgcagcctctccga

SEQ ID NO: 517486 - DNA, 101 bp, Homo sapiens
gctgaagcaagcacgaaaaatgctaacaacagcttcacggcaatccctattcaacagaggaaaatgggtcaacttgcttctggaattagatcatcacttct

SEQ ID NO: 517487 - DNA, 80 bp, Homo sapiens
acgtggacatgtcaacagtggacgctgacaccgtcactgagctggcccagggtgtccgcaatgttgccagtgtctgtctg

SEQ ID NO: 517488 - DNA, 100 bp, Homo sapiens
ctccgcaccctgcccggcttcctcatcgtggccgagatcggtcgagtggtggaaaatatctcgaagcgatgcggtggattcctgaggaagctcagcttgc

SEQ ID NO: 517489 - DNA, 100 bp, Homo sapiens
ggaagcaggactcggggcacttgggtctgctgtgcacgtgctgcagaactccatagacagcctcactttgtgctcgggggcctgtcccaaggcctcgagc

SEQ ID NO: 517490 - DNA, 80 bp, Homo sapiens
aaagcggtgcagacgggaggaagggagtgcatccgccccaacccttttccccctcgtctcctgtgagaattccccgtcgg

SEQ ID NO: 517491 - DNA, 90 bp, Homo sapiens
cagagcactccccccaagtctcctcagtgaaaaccaaaacctcggatcaattctcagctggtggcacaacaagtggcacaacagtatgcc

SEQ ID NO: 517492 - DNA, 82 bp, Homo sapiens
aacgaaaacaacttgtatgtcttcacaaggatcagatgatgaacagatactctctctcccacagattcgattgaatagacta

SEQ ID NO: 517493 - DNA, 100 bp, Homo sapiens
atcctcgcgtgagacagatcaagatcaagaccggcgtggtgaagcggccaagaataaggagacgggtgctttggctgcggccaaagtcattgaaaccaag

SEQ ID NO: 517494 - DNA, 100 bp, Homo sapiens
gggaatgatattcagtggtgtttttctcaggtgaaaggagcagtagatgatgatgtagcagaaggtggtccgtactgagaagaacagtttgaacaaccga

SEQ ID NO: 517495 - DNA, 105 bp, Homo sapiens
ggggcttgagagctgggttctattttccctcctcaaactgactttgcagccacggagaggttgaaatcacaaagattagacacctttttagataggtgttcttca

SEQ ID NO: 517496 - DNA, 100 bp, Homo sapiens
gatggaagtggcccaagggtctcccttctcggtgaacgttcagctgctgcaggaccacggggaaattgccaagattaaacagagtttcgacctggaggag

SEQ ID NO: 517497 - DNA, 75 bp, Homo sapiens
gcacctcccacgcagtcttcccgacatcttccatgagtattggcatactccacacatctgtaccattcttgagtg

SEQ ID NO: 517498 - DNA, 75 bp, Homo sapiens
cagtgacatcagaaaatgtgtccagagattacaagagacttgcagccaatacaggaagcaaacagcgtagtcgcc

SEQ ID NO: 517499 - DNA, 90 bp, Homo sapiens
cagcagaatttgtatagagatgtgatgttggagaactacagaaacctggtctccctaggcagaagctcctcctggggtagagacagatct

SEQ ID NO: 517500 - DNA, 74 bp, Homo sapiens
cgacaggactacatggatgccatggctgagaagctctttagtcaagagacggtgatgaagtttgtgccgcggta

SEQ ID NO: 517501 - DNA, 50 bp, Homo sapiens
attcgcagtggtcgcttcttctccttggtgtcagctgtgatgcatgttta

SEQ ID NO: 517502 - DNA, 100 bp, Homo sapiens
tgaatcttcaacctgtcaaagccttcttaattatgtctgagaaaaggatccagatgaagaaatggccaaaatcgacaggacggcgagggaccagtgtggg

SEQ ID NO: 517503 - DNA, 75 bp, Homo sapiens
aaggattccaagtaactcttatttggtatctcgggggagctttgtgccttgatggatcaagttcatcatatgcag

SEQ ID NO: 517504 - DNA, 100 bp, Homo sapiens
gccgccgccgccgccatcatgagggaaatcgtgcacttgcaggccgggcagtgcggcaaccaaatcggcgccaagcctctactcaatagtccccccagct

SEQ ID NO: 517505 - DNA, 82 bp, Homo sapiens
ggacccgcactgacagcgggaggcagagggaggaacctggacgccggaagccgggaaatgttggcaaacatgaattgactgg

SEQ ID NO: 517506 - DNA, 97 bp, Homo sapiens
gtggaccgcgcctggccggggccgaggacaccgcggccgcccgggcctgcgggaagcgatggagcccgggaagggctatggttctgatggtctaaag

SEQ ID NO: 517507 - DNA, 100 bp, Homo sapiens
cggggtgtacgaaagagaaacccggagggcgccggggccagctgcgggccgtccagcggctgtgccacttctacagcgccgtcatgcccagcgaggccca

SEQ ID NO: 517508 - DNA, 75 bp, Homo sapiens
agcgtggccggcagcgtcccggacgaggaggctaaagaattacctccaaagccattgtcaagaccacagcagtca

SEQ ID NO: 517509 - DNA, 75 bp, Homo sapiens
gcgggctgctgctccagagggcggaggcagcctggcatcctcgctacaacctcattgttgtgggccgatacccag

SEQ ID NO: 517510 - DNA, 50 bp, Homo sapiens
gtcggtgtttggagaaaaggactcaggacaccatgtaaaattgaacctag

SEQ ID NO: 517511 - DNA, 100 bp, Homo sapiens
agatttcatggaggtggtcctgggcaagcttgaccctcagaagggtgtccagacctccagacctagaaagggcagagaacttggaaatctgagtttgaac

SEQ ID NO: 517512 - DNA, 75 bp, Homo sapiens
ggatcttccagcctctgcctcccgaagtgctgtattacagggtttttaatgaccacaacaagcaagcatgcagct

SEQ ID NO: 517513 - DNA, 99 bp, Homo sapiens
ggcgccgccctgcgtggagccgccgccggccacccgggccatgcggaccctcagttggaagcacaccctgggcctggtgaccatggacgtggagctggc

SEQ ID NO: 517514 - DNA, 50 bp, Homo sapiens
cctgccgccccattatgatgatgtcgagtctcaggaggaggtctgcgatt

SEQ ID NO: 517515 - DNA, 75 bp, Homo sapiens
agcaccgaggccaggagaaagggaacgtccaatggagatcttcgtggatgatgagacgaagttgacgctgcatgg

SEQ ID NO: 517516 - DNA, 82 bp, Homo sapiens
ggaaaccaaggggcagacccaaaaaactgactcaccccacacagaccgcgtttctctccagtgtcgacctacacactcactg

SEQ ID NO: 517517 - DNA, 99 bp, Homo sapiens
tactcagagtttgaaggttgtgaccaaaagaggctccgttagcagacttgaagaaagagaagcagaactgaagaaggaatataatgcattacatcaaag

SEQ ID NO: 517518 - DNA, 144 bp, Homo sapiens
ccgctaatcagatgggagtatctgccaaacgtagaccaaaggctcagcccacaactcttgtcctaccacctcagttcccgttggtgaccaggggcaagaactgctctgttgcaagatggcactattgacacaaactcaagggtc

SEQ ID NO: 517519 - DNA, 100 bp, Homo sapiens
gacgaaagactcctgctgaaagaagacagcactctgaaagcagctggaatcgatatggacatttctggaattacagagccccctctacattgagcacaag

SEQ ID NO: 517520 - DNA, 98 bp, Homo sapiens
ccagctgctcctccgtcttctcaggagaccagctggtccaacgtgctggagaatctggtaaaagcaccattgtgaagcagatgaggatcctgcatgtt

SEQ ID NO: 517521 - DNA, 126 bp, Homo sapiens
tgacaatgggcagaacgaattcagtgatatcattaagtccagatctgaagaaagctgtggtgattcgtcacttgtataatgaagataatgttgacatttctgaggatacattaagtccaataacag

SEQ ID NO: 517522 - DNA, 96 bp, Homo sapiens
aattttccacctcctgacacaacaccactcaaatatactgatgataatgctctgattcctaagaattcttctgtaattgttagaagaattcctatt

SEQ ID NO: 517523 - DNA, 100 bp, Homo sapiens
cttcctggtttacctggcactcctggacaggatggattgccagggcttcctggcccgaaaggagagcctccaagaaatatttttcttcatggccctgatc

SEQ ID NO: 517524 - DNA, 100 bp, Homo sapiens
caggacacggcctacaacaccaagagctgtcgcctggttgggcccggaaatgggacgtcgcgctttctcagggagcgtagaagcagccagggcctctcca

SEQ ID NO: 517525 - DNA, 74 bp, Homo sapiens
ctcgccagtcttggggacagtgtcagcaaagcagtagtgctggaacctggacactcaacgtattgtggaaaatg

SEQ ID NO: 517526 - DNA, 80 bp, Homo sapiens
cagccatggcagattcctccgggcagcagggttttaaaatcaaagatgggaaaatcggagaaaattgcccttccccatgg

SEQ ID NO: 517527 - DNA, 75 bp, Homo sapiens
cgccgaacgacaggacgttggggcggcctggctccctcaggaggaagatgaaggctcgtgctcccccacctcctg

SEQ ID NO: 517528 - DNA, 75 bp, Homo sapiens
atgcccctgaaggcctcgctggagatcgagtaccaagtgagtgttgtgcaagattctgtcaacatttctggccag

SEQ ID NO: 517529 - DNA, 96 bp, Homo sapiens
gtcaccgccacgtcgcggacatggttgaagatgacagcgatgcagagacctatggagaagagaatgatgaacagggaaattattctaaaagaaaga

SEQ ID NO: 517530 - DNA, 82 bp, Homo sapiens
ccagcatcctgggacccccacggagaccaagccgtcatgacaacagtgcaagagtcaaattgactttatcagctttaatcga

SEQ ID NO: 517531 - DNA, 108 bp, Homo sapiens
aaggcgaggccccgggggcgggccggggtcaccacgcctgccccagggaaccgcacagatcagacctattgtgaccgcctggtgcaggacacgcctttcctgacaggc

SEQ ID NO: 517532 - DNA, 82 bp, Homo sapiens
ctcaacttattcccttcaattcaagtaacaggtcaatacttctgcgaaggctctgtagtctgatgggaactgtattcttgct

SEQ ID NO: 517533 - DNA, 98 bp, Homo sapiens
catgctagctgtgggaaccctctggaacaagaaagtggcttcacataccttcctgaggctttcatggaggctggcataccaaatatgccccaacagcg

SEQ ID NO: 517534 - DNA, 75 bp, Homo sapiens
cggcccggcccggctcgacgccaatgggttttaaaatcaaagatgggaaaatcggagaaaattgcccttccccat

SEQ ID NO: 517535 - DNA, 82 bp, Homo sapiens
gttgcctatcagaagtcaattcaaaggacctgcccccagagagaagtggcagaatttagtgacatttggaagcttttcaaac

SEQ ID NO: 517536 - DNA, 98 bp, Homo sapiens
ctgccccccacttctcacttgcacaccacgggatactcctcctgaggctccggatgatcctaattatctcatggctaatgaacgcatgaacctcatga

SEQ ID NO: 517537 - DNA, 100 bp, Homo sapiens
cctgctctgggacacacctccattggatttaaaagacagtcctcgtcagcactgactttcagctatggaatcggtgtctcgaaataatgatgtgtggcag

SEQ ID NO: 517538 - DNA, 90 bp, Homo sapiens
cccttcgacctgcgctccgcgctctggcgctacggtctggccgtcggctgcggcgccatcgagacggggtctgactgtgttacccaggct

SEQ ID NO: 517539 - DNA, 75 bp, Homo sapiens
gcctcttctagcaatggaatactgttctggaggagatctccgaaagtttaattggttggggtcagataagaagag

SEQ ID NO: 517540 - DNA, 51 bp, Homo sapiens
cgcacctcgacagagacgactggcttttatcttgagaacatggtgtctgga

SEQ ID NO: 517541 - DNA, 75 bp, Homo sapiens
gggcttcggcccccaccagagactcgagatgtggtctgaagctattaaaatcctgaaaggggagtatgctgtccg

SEQ ID NO: 517542 - DNA, 82 bp, Homo sapiens
ctgaacctggtgttttagaggataccttggtcccagagtcatcatgaagggacaaactctgcctgggcgagtccttttcctg

SEQ ID NO: 517543 - DNA, 83 bp, Homo sapiens
ctcaagagaaagtggctgatgaaatttcattcaggggatggcattcctactgtatttgtggcagtggcaggcagaagtaatgg

SEQ ID NO: 517544 - DNA, 90 bp, Homo sapiens
taatttcagtgactgaattaaaaggtgtcaagaagctcagaatggtgatctgtgaaaatggttcgctattcacttgacccggagaacccc

SEQ ID NO: 517545 - DNA, 78 bp, Homo sapiens
actgctgagcgactatattgagaaggaggtaaaggacactcatgaggaccatgatacttccactgagaatacagacga

SEQ ID NO: 517546 - DNA, 80 bp, Homo sapiens
cgcctggcgattaccggtctcaccatggagcggaaaggaagccagttgagggaagttctccatgaatgtacgtcacaatg

SEQ ID NO: 517547 - DNA, 100 bp, Homo sapiens
tgctaaaatgaatctgagcaatatggaatattttgtgccacacacaaaaagtgcatacatagagacgtgaagccagaaaatatcctcatcacgaaacatt

SEQ ID NO: 517548 - DNA, 75 bp, Homo sapiens
cctttatcctggtcatcttctatttccaaaggatagctgggagtatggccaccctgctccacgatgcggtaatga

SEQ ID NO: 517549 - DNA, 100 bp, Homo sapiens
cgactgcagccgacgccgttcaaaggaacgagggaaatcctcattgacgattcaatttgttgaaggccaatttgtggactcctacgatccaaccatagaa

SEQ ID NO: 517550 - DNA, 74 bp, Homo sapiens
aaagaagaagaagagggatactcccatgctgccaaaggtctgttgcggttctcccacttttccataagcagaac

SEQ ID NO: 517551 - DNA, 51 bp, Homo sapiens
gccaacagagagaagatgactcagctgattgccatcgcaacaggagggcgg

SEQ ID NO: 517552 - DNA, 50 bp, Homo sapiens
cttcactttgacactgctacaaaaggtgtcgtcggggaattcacaagtgc

SEQ ID NO: 517553 - DNA, 75 bp, Homo sapiens
cgagcgcggcccgggcgccatcgagccttggcggcggacgtgcaggaggaggccactgagggatcccaagaagag

SEQ ID NO: 517554 - DNA, 100 bp, Homo sapiens
cttcgcccagttccctgcatcctaagactcgaaggcagcacaggacctggaaaaattacattgttatagttttgccgctggactcttccctcccttcccc

SEQ ID NO: 517555 - DNA, 75 bp, Homo sapiens
ggagcgagcagccatggatgccgtttgtgccaaagtggacgctgccaacaggcctatggaggctccagtcatgct

SEQ ID NO: 517556 - DNA, 98 bp, Homo sapiens
agcaccgggaagacctccaggctgaccccttgagcagcagtcagcacaggtgccaagtcctgccctgccaacttcttggcagctgccgacgacaaact

SEQ ID NO: 517557 - DNA, 90 bp, Homo sapiens
agcaatctcagctctcaaagtgcaattctgtggtgttcttggtcacacatttatggagtttctgaagggcagtggagattactgccaggc

SEQ ID NO: 517558 - DNA, 97 bp, Homo sapiens
atgaaggcatgccaatttatcgtagaccatatgaaaagggtcgcctaatcatcgaatttaaggatgaagcctgctgggagcgtgaatgacatggccc

SEQ ID NO: 517559 - DNA, 83 bp, Homo sapiens
cccaacatatagtgaccattgttcaccatgttaaagttggattggatgctgctggcaagacaaccattctgtataaactgaag

SEQ ID NO: 517560 - DNA, 101 bp, Homo sapiens
agaggcttctgaaggtcctgaggacaccccagacattagaccagctcccactcaccaaccctgagcattttggcactccagtcataggaaagaaaacaaat

SEQ ID NO: 517561 - DNA, 75 bp, Homo sapiens
cttcatgtgtctgtggcagtcttgtaaaaactttaccactcctgaaggccctaaaccccgttccagatgctctga

SEQ ID NO: 517562 - DNA, 97 bp, Homo sapiens
ctccagtaagggagggcaagaagatatgaacctgagccttcagtcaagaccctccagcttgcctactgtccttcatctacttggattcagttccaag

SEQ ID NO: 517563 - DNA, 113 bp, Homo sapiens
ccagcatctttgggcagccattgagattatacggaaccagaagcagattgccaacattgaccgtattacaaagaattgagtgatctacagcgcgatccacctgctcactgttc

SEQ ID NO: 517564 - DNA, 100 bp, Homo sapiens
gaacgatgttggactcatagtcactgccagaaagaggaaggtgcatccagttcctcatgctcggaaacctactgtggactttatcctgagtcagaaccag

SEQ ID NO: 517565 - DNA, 99 bp, Homo sapiens
ggtgaagcggccccagcactcccagctgcgcagggcctgccaggtggcgctcgggtcaccgggagcaagaagtccaccaagaggaccaaatccatcaac

SEQ ID NO: 517566 - DNA, 100 bp, Homo sapiens
aacccttacctggggagacagggggcatgtgctctgtgtacctgaaggacagtgagaaggttgtcagcatttccagtgagcacctggagcctatcacccc

SEQ ID NO: 517567 - DNA, 100 bp, Homo sapiens
aaaatatcttcgtgcttccatgactaacttggtcaaggagagggaaaaaggggcaatgtgcaagtgaaaatcgagtctggaaaaggggcttctacagggg

SEQ ID NO: 517568 - DNA, 75 bp, Homo sapiens
ctggccactcctccctccgtccacctgtcacttcgggtagctgggaggccaggcacctattcagtgggaggagcg

SEQ ID NO: 517569 - DNA, 90 bp, Homo sapiens
tcaagttgcaatgcaaaactctggctcatattcaatttctcagtttcaatccagaatgatcaggagagaagtttgctgaggaatgccttc

SEQ ID NO: 517570 - DNA, 75 bp, Homo sapiens
agaaagagtggtagccacggaatccttaatgacagcccatatcaaggcggtgtattctttttgacaattcatttt

SEQ ID NO: 517571 - DNA, 78 bp, Homo sapiens
aagaagattgttgcaaacccagaggacaccagatccctggaggctcgaaggtggatccatgctgtgctgacgcctgtg

SEQ ID NO: 517572 - DNA, 75 bp, Homo sapiens
caagacttaaggatgttttatgaaaaaaacaggagcttaatgcctagatgcagaggccaggatgtgggcccagcc

SEQ ID NO: 517573 - DNA, 75 bp, Homo sapiens
ttttgaccgctttctccagtggaagtggttggaaagacttgctacatttgtgatgaacaaggaagagaaagcaaa

SEQ ID NO: 517574 - DNA, 75 bp, Homo sapiens
ttcagatccaacgaggaggaggaaggcgtgtgctgtggagctctgagctcttcaccctgacctatggtgccctgg

SEQ ID NO: 517575 - DNA, 99 bp, Homo sapiens
ctcatcatcagtctatttagaagagcaatgcttggaagaggatatcagtcattaaaagtgtattttcgagtcgatctcttctctatgtgggtaatagac

SEQ ID NO: 517576 - DNA, 100 bp, Homo sapiens
ctggccggggccgactggcagctcctagtggagacctcgggcatcagcatctaccggctgctggacaagagatgaatgtcaagatgctggactttgagac

SEQ ID NO: 517577 - DNA, 100 bp, Homo sapiens
cttcgacagagccaccaagctggagcaggagttcacagagtgcttctcagatatgaaacacaggcctccttgtcaggcccctacttaacctccgtgatgg

SEQ ID NO: 517578 - DNA, 100 bp, Homo sapiens
tcgagttccggcccggccacgagtattactacatctggtttctatgttgcactgagactggtggcctgtgcacagagtggccatgaagttaccttgagca

SEQ ID NO: 517579 - DNA, 75 bp, Homo sapiens
cagcggtcacctacccccagcaccacctccagcccctgcgcctcgtggaagatagatgataagcctgtaaaaatt

SEQ ID NO: 517580 - DNA, 75 bp, Homo sapiens
tgtggtgatgacagaatcagcttttgcggcttatgacccctacgcttatcccagcgactatgatatgcacacagg

SEQ ID NO: 517581 - DNA, 100 bp, Homo sapiens
gcaatcaaaggagacatgtctcctgggaagagcctcccacaacctcaaagatgtcaccaccatcaggacaagtgtaacctttaagctaaatgaaggcaag

SEQ ID NO: 517582 - DNA, 75 bp, Homo sapiens
gagcaggatctgcagaagacgcagggctcaaggaactaagcgtcttgtagaaggaactattaatccaggagaaac

SEQ ID NO: 517583 - DNA, 75 bp, Homo sapiens
ttcgccttcgccctttccacctcgcggcagttcgtgggtaattccagaattgattggccataccattgtcactgt

SEQ ID NO: 517584 - DNA, 83 bp, Homo sapiens
agcccttgcgcctgcctctccaggatgtctacaaaattggtggatctcgaggacctggaagaagcagaggagccagacatgga

SEQ ID NO: 517585 - DNA, 75 bp, Homo sapiens
gatcagaggccctgtgatgatcgtgtcaggtgtatgtggaatttgatgatcttgaatgggataaacgagagtggg

SEQ ID NO: 517586 - DNA, 98 bp, Homo sapiens
catttggaattttcgtatacgtggattctagaggggtgacagcgaaactctattatcctcccagtccacaacgctgaaccgtggctggacgaatgttt

SEQ ID NO: 517587 - DNA, 100 bp, Homo sapiens
cccggatgagtacgataccgaagcgggctgtgtgccccttctccacccagagctgctgatgcaaggaatcccctgggctcccgtccactccactgctgac

SEQ ID NO: 517588 - DNA, 100 bp, Homo sapiens
ggaagggccggcccgcctccctggccggggcgcagttcggaggttcagctgtcgcctggttgggcccggaaatgggacgtcgcgctttctcagggagcgt

SEQ ID NO: 517589 - DNA, 87 bp, Homo sapiens
atgttgcagatgttttacttcaagcaggggctgatttagaaggaggaagaggagcgaaggcggcgtgaagaggaagaaagagaacgt

SEQ ID NO: 517590 - DNA, 75 bp, Homo sapiens
gggaaggcgattggcatcgatctctccatcccttccgaggcccgacttcgcttagaccatgctcagcctccaagc

SEQ ID NO: 517591 - DNA, 75 bp, Homo sapiens
ttgcgctgctctaatggtccggacttccgtgtgattttttatcaagcagaaatgcatcgaacaacgagaatcaag

SEQ ID NO: 517592 - DNA, 75 bp, Homo sapiens
cttttaccccttctcaagaaaccacaacaccattgggaccagggaatgatgagaagacagcagctgattacaaga

SEQ ID NO: 517593 - DNA, 100 bp, Homo sapiens
ggaacagctccggtctacagctcccagcgtgagcgacgcagaagacgggtgatttctgcatttccatctgaggactttgctgctatttgagcacagtgat

SEQ ID NO: 517594 - DNA, 50 bp, Homo sapiens
gaaaagatctgcaaaattttctcaaggcaaaaatctccagccctacagag

SEQ ID NO: 517595 - DNA, 75 bp, Homo sapiens
cttcattggccacctacagaaacaaaatgtcaacaaattgatggcggacaaggcaaaatctcagcaagttcggac

SEQ ID NO: 517596 - DNA, 59 bp, Homo sapiens
tagacgctgcggcccggcccggcgggatgcttgtgaccacaccagaaaaatgggatgta

SEQ ID NO: 517597 - DNA, 98 bp, Homo sapiens
ggttctcgaaggcccgcggcgccccgtgctgcaggtccagacatcatctggtctccctgaacctgaaatcacaccatggatgattttgagcgtcgcag

SEQ ID NO: 517598 - DNA, 99 bp, Homo sapiens
gcccagctgcctgcccccggaggtgcccacgcagctgcctggacaagtgaaatgcacatctgaacagagacaggcatgggaaggaggcccaaaagcgac

SEQ ID NO: 517599 - DNA, 82 bp, Homo sapiens
aaagaggagtccatgatggaggcagaggtaaacttggagagaaggaccctctattgtcccaggcctgtgttggctgcctgga

SEQ ID NO: 517600 - DNA, 75 bp, Homo sapiens
taatgcacgttggactacagaagagcagcttctcgccgtacaaggacgactgggtttggattcagaagaggatta

SEQ ID NO: 517601 - DNA, 75 bp, Homo sapiens
ccaagggacaatggtcaccgtctcttcagtctctcatcacttttgtgaacaagcacctgaacaagctgaatttgg

SEQ ID NO: 517602 - DNA, 100 bp, Homo sapiens
cgaggttgtttgcaacgaccgtctggggaagaaggtccgcgttaaatgaaaagcacaatagtgaggctattatttcgcttctatgagcctcaaaagggta

SEQ ID NO: 517603 - DNA, 75 bp, Homo sapiens
taaggtgtacctcttcgacaacagcgtcatcttgagcgggtgtttcccattaaacactaccaggacaaaatcagg

SEQ ID NO: 517604 - DNA, 100 bp, Homo sapiens
ctgaaactaaaagatgtcacaaaggaaaacgaggaaagtcccaggatgactactgtgtcaagtgccactgattaatgaacttgaatcagcaatacatcag

SEQ ID NO: 517605 - DNA, 100 bp, Homo sapiens
gcaagttccccaccagccacttttctgaacatccagacaacaaagctgccctcggagcgatatctgaagtggctctgatgcctttgccacactcctcgca

SEQ ID NO: 517606 - DNA, 100 bp, Homo sapiens
gctccagtgagtccagctcctctgacagcgaagactccgaaacaggccatcagcatcagcaaagccatcaacacccaggaggcccccgtgaaggagaagc

SEQ ID NO: 517607 - DNA, 98 bp, Homo sapiens
tcctcctggggaacccgttcagcacaccagtggggcagtgcctcggcgaccatggccttgctgggtaagcgctgtgacgtccccaccaacggctgcgg

SEQ ID NO: 517608 - DNA, 74 bp, Homo sapiens
aggaaccttttagtacttccgatcttcagtgtctattggatttttccaagagaaagtttgtaaaattccttaca

SEQ ID NO: 517609 - DNA, 100 bp, Homo sapiens
tcggtttcagttggagttggaatttgtgcaatgtttagccaacccaaattaccttaattgtgccaatgggtcatgtttggttagaaggtgacaatctaca

SEQ ID NO: 517610 - DNA, 103 bp, Homo sapiens
atttgttaaggattccaagtaactcttatttgggaatgggtactgttcaaaaaggaatgccccacaagtgttaccatggcaaaactggaagagtctacaatgt

SEQ ID NO: 517611 - DNA, 91 bp, Homo sapiens
agctggcgcagcccacgctcatgatcgacttcctcacccgcgcctgcgacctcgggggtccactggacggggcctgagctacaacttcacc

SEQ ID NO: 517612 - DNA, 100 bp, Homo sapiens
accagttattgaatatcaagaggaggagttgttggtcacagaaacatccagccatgacatatatgaagaggctgaggctgacaacgaagaaagcgacaag

SEQ ID NO: 517613 - DNA, 75 bp, Homo sapiens
cagagcctcagtttgtgcaggacaccgacatggaacagggactcactgggggccaagaagcttgagagaagaaaa

SEQ ID NO: 517614 - DNA, 88 bp, Homo sapiens
ctgaaggaaacaaaaccaaaggccgaagtacaagatctaaggctcttgtctggggttgtagaaggtgatttagctgccatagaagcat

SEQ ID NO: 517615 - DNA, 99 bp, Homo sapiens
ttggctgttggaaattgcagagtaatgcctcagggccaattcctgtccccccagcagcatggcatcgtgtgctgaaccctctgagccctctgccccact

SEQ ID NO: 517616 - DNA, 75 bp, Homo sapiens
aacgcgagaaagagcgcgagcgcgagaaggagcgcgagcttgaacgcagcgtgagagcaaagtcccagaacccac

SEQ ID NO: 517617 - DNA, 100 bp, Homo sapiens
gaacaacgcgagtcggcgcgcgggacgaaggacgctgtgcagagctgcaagtccgtatcactgaggctgtggccacagccactgagcagagagagctgat

SEQ ID NO: 517618 - DNA, 90 bp, Homo sapiens
cggatcaggagccgccgccgccatatcaggctgattcaccccaagagtggccgttcctaccacgaggagttcaaccctccaaaagagccc

SEQ ID NO: 517619 - DNA, 83 bp, Homo sapiens
ggacagctctctagaaactcgctctaaagacggaaccgccacagcactcaagaatggcatcaccagctgccggatgcggactg

SEQ ID NO: 517620 - DNA, 94 bp, Homo sapiens
aggtttcttggaatttgtggaggattttattcaggttcctaggaatctcgttgagtggcagaatttagtgacatttggaagcttttcaaacatg

SEQ ID NO: 517621 - DNA, 90 bp, Homo sapiens
gccggcaacggctccctctcgggcgactggtaccgcaggaaccaggacagataggcatggacccttcaagtggacagcttgtgtcaggag

SEQ ID NO: 517622 - DNA, 97 bp, Homo sapiens
gaaatcctccgcccatttatgttgggtcttctccaactctgaagttgcatccaagaattgatgcccggagagctgatgaaaaccttggaatgcttct

SEQ ID NO: 517623 - DNA, 75 bp, Homo sapiens
ccatcattgatgtggtgcgatcggttacagattatgccattgccaggcgcatagtagatttgcattcaagaattg

SEQ ID NO: 517624 - DNA, 74 bp, Homo sapiens
aggtgaaccacgccgtggaggagtccagagcctaaggaccagactttgaaaatgattaaaattttaagtggtga

SEQ ID NO: 517625 - DNA, 88 bp, Homo sapiens
agggaaagggataggagaaggatgtggactgcagtgctgcagtgccagtgacagacatcacacctccagtgcaatccctgttcctaag

SEQ ID NO: 517626 - DNA, 83 bp, Homo sapiens
agacgctgccagcatcgccgccgccaggtgccatcgcctgcaggattctttattcagctctgacagtggcttcagcaactacc

SEQ ID NO: 517627 - DNA, 100 bp, Homo sapiens
agccccacagaccatggtcatgccagggcttaaagaagacatgtgtgaccatggaccaggaacgcccacgctctgacctcagcataaacaacagaaatga

SEQ ID NO: 517628 - DNA, 75 bp, Homo sapiens
ccttgcagaagacgccgtacgaggaattatccagactgccttgccactagatgaatggaagacaatgatttgaac

SEQ ID NO: 517629 - DNA, 99 bp, Homo sapiens
agggcatcaccgtgaagcagaagaggttgttcctcagatccctgtgaagagtggtggtccccatggggcaggggtcctcggtgagtggctgacctcctc

SEQ ID NO: 517630 - DNA, 100 bp, Homo sapiens
caagggacaggaagcgtctgagaaatttctgaataaattggcagaagaacgcagacagaagaaggaaacttaagatgtgcaaggagatttaatgatttca

SEQ ID NO: 517631 - DNA, 75 bp, Homo sapiens
cggatcatggccgcagccgctctggggcaggtgctttgcaagatatcaccttgtcacagcagaccccctccactt

SEQ ID NO: 517632 - DNA, 90 bp, Homo sapiens
aaagaacggcagtttgaatcggtgctgaacagctggaggagcaccggaattcacagaagcagatgaagctcctacagaaaaagcagagcc

SEQ ID NO: 517633 - DNA, 100 bp, Homo sapiens
ctgagaagagaagtggagcaccaggagactgcctatgaccagagggtggcatccttctgcaccctgacagatatgcagcatgggcaggacctggaagggg

SEQ ID NO: 517634 - DNA, 80 bp, Homo sapiens
agaagaccaagtacctgcagatcctgacctctctgatgagatggatcggtgtcgtgaaaactacccctaaaagccaaaat

SEQ ID NO: 517635 - DNA, 100 bp, Homo sapiens
gctttggttggagagaaggcttgttatcaatccatcagtagctatggtggtcagatcttttatttggggacaaaaatcatggagtgcatcggatcctttc

SEQ ID NO: 517636 - DNA, 74 bp, Homo sapiens
taacatccagaagatcacacagtgttggctgtgtggtctttgaggatgtgtttgtatacttctctcgggaagaa

SEQ ID NO: 517637 - DNA, 75 bp, Homo sapiens
gcgaatccacaacaacagggtggggcgccagcggatgcagtggtgcagtatgacgtggagctgattgcactaatc

SEQ ID NO: 517638 - DNA, 95 bp, Homo sapiens
ggttttgagaggggaagatggggacaaagccgctccacctcccatgtcggcacagtttggctgggatcactcgcttcacaaaaggaaaagacttc

SEQ ID NO: 517639 - DNA, 100 bp, Homo sapiens
aaagacagaagccttgacttctggaagaagaactttggcatcagctacctgggccgggaccggctaggacaggaagtttacctctcacttctatctgact

SEQ ID NO: 517640 - DNA, 75 bp, Homo sapiens
tcatcagccatgctccagacagtgtggttccagaaaccaccatcatgggttcgggtcccatagaccccaaagaac

SEQ ID NO: 517641 - DNA, 100 bp, Homo sapiens
ctgatgtagaaaccaaaaaaccagaggttgcttcctgggtgcactttgataatttgaaaggtgggatgctatggaatatgatgagaagctggcccgtttc

SEQ ID NO: 517642 - DNA, 101 bp, Homo sapiens
gcgcgggacggctctgtaggaaggaacttggttccccctccctcagcttccgccccaaaaggaaaacaatgaagagtcgttatatggaactctatgacctt

SEQ ID NO: 517643 - DNA, 78 bp, Homo sapiens
agaagtgatttctgcaaaggatgtcccaacaggaggaatcttccagctccggcaggttgttcctcaaagtcattcaag

SEQ ID NO: 517644 - DNA, 75 bp, Homo sapiens
aaaaagacgaaagaagaagaagagcaaagggccttctgcaggcagctgtgcctcctgctgaatgcggagaacatc

SEQ ID NO: 517645 - DNA, 75 bp, Homo sapiens
accggctgctttggaagaaacatgctgtaggccctccctatcctgaagacattagctgagagtctggcacctttt

SEQ ID NO: 517646 - DNA, 100 bp, Homo sapiens
agaccgtaagctccctggagcagggaccttatcccagcgtctaccgcggcgcccgtcacctagaatacctcaatagcattctccagcatgccaaggattt

SEQ ID NO: 517647 - DNA, 50 bp, Homo sapiens
gtctttgactggaacatgctgaaattcgaactgtgaatggctagaagaag

SEQ ID NO: 517648 - DNA, 50 bp, Homo sapiens
ctcaagctctcttaagagattatgctaaaagaccagcttcaggacaaaac

SEQ ID NO: 517649 - DNA, 75 bp, Homo sapiens
ccgcgtctccgcgttcccagcccgggtccccgcgttcacagccccagcgcagggatcgcttacacctgagacgaa

SEQ ID NO: 517650 - DNA, 100 bp, Homo sapiens
cttgacgccttagataacagccatcctattgaaggcaagtgtccagagaatggctgggatgaaagtacacttgaactctttttacatgaacttgcaatca

SEQ ID NO: 517651 - DNA, 99 bp, Homo sapiens
tgaagctcaccgacagtgccctgagggccttcgagagctaccgcgccagacaggttttaaaatcaaagatgggaaaatcggagaaaattgcccttcccc

SEQ ID NO: 517652 - DNA, 100 bp, Homo sapiens
ctccagcacagtgttcagcaggtcctgttggagatgatagcttttattgagatggagacaagagaagatgcaatggcaatggttgaccattgtttgaaaa

SEQ ID NO: 517653 - DNA, 101 bp, Homo sapiens
aaagcccacagagcagtgcttgctgctttttctaactatttcaagatgatatttattcaccaaacaagggagctcaaagaggcccatgaagcagaactcag

SEQ ID NO: 517654 - DNA, 100 bp, Homo sapiens
agcagcagctgggcattgctgaggatctcaaggaccgggctgcagaggggcgagcatcctccaatctaggtgcagcccatccagcccacaccaaccgtgc

SEQ ID NO: 517655 - DNA, 98 bp, Homo sapiens
ctggagtctgcgaaggccgggacccggttccccggcccacagtgggggtgtgcaaacccgagagaactggttctttaaggaaaaacagtagtgctctg

SEQ ID NO: 517656 - DNA, 73 bp, Homo sapiens
ttggcggtccctgtgacctgtggagacacggccagatctgccctccaacccaacatgagtgaagtttcctgca

SEQ ID NO: 517657 - DNA, 80 bp, Homo sapiens
agacaacgccttaacccaaggaagtgactcaaactgtgagaacttcaggtcctactgctctgttggctcatgaaataggt

SEQ ID NO: 517658 - DNA, 94 bp, Homo sapiens
gccgacttttgtaacaaatatttgcggtttcagcctcaacccagaggaatcgttactctttcagcacccagtcagcttgaagagtttcaaatgg

SEQ ID NO: 517659 - DNA, 121 bp, Homo sapiens
ctccgtggccttagctgtgctcgcgctactctctctttctggcctggaggctatccagcgccagaagcggactcctagaagaggggagcagcaaggatggaatgacagccgtgggccggag

SEQ ID NO: 517660 - DNA, 90 bp, Homo sapiens
ttttcattgttccactggacgctcatcagagggaagatctttttcctcaattggggactgcagccttcagatgcccaccggacccgctgc

SEQ ID NO: 517661 - DNA, 100 bp, Homo sapiens
gggtatcaccgccctacacatcaaactccgggccacaggaggaaatagctggccatgcagttcatcagccagtacagccctgaggacatcgtcacggcgc

SEQ ID NO: 517662 - DNA, 100 bp, Homo sapiens
acgagacggagctcctggcccccgaggaggagcagaggatcaatgcggttcaagaatcgattccagcgaaaagaggcacagttagatgaagaaggacagt

SEQ ID NO: 517663 - DNA, 100 bp, Homo sapiens
cccaaatcccggaaactccagcgtgtctccagccgtggtgggcagtgtcaaaccgggaaatgcttatagctcaaaacagctccttggaatttaagctaca

SEQ ID NO: 517664 - DNA, 90 bp, Homo sapiens
gaattttggcatcaaggacaaacccaccttcatcaaagggcttggttctacagccattgggatccagacatcagagggtgtgtgcctagc

SEQ ID NO: 517665 - DNA, 74 bp, Homo sapiens
attttctgccgctggacgcaaggctgatgtttcagacaccgcaggaaatgggcttaatagtgatcgcggcccgg

SEQ ID NO: 517666 - DNA, 99 bp, Homo sapiens
tccttctcacaactgctatgtttgtagggggctgtgtggcttttatcctggataacaccatcccagtaagagttccctatttcattgatttgaaaaaac

SEQ ID NO: 517667 - DNA, 75 bp, Homo sapiens
agcaataccgcagagagcgagagcacgaattccagagcaagcagcaggcgaaaccaccatcatgggttcgggtcc

SEQ ID NO: 517668 - DNA, 89 bp, Homo sapiens
ttacgtggccggaatcattcccttggctgttaatttctcagagaagtctgtcaagttgatgaacagattgagaggcaacatcaggatga

SEQ ID NO: 517669 - DNA, 75 bp, Homo sapiens
gcaggaccgacggcagacccagcagccagagagtgaaagggacatgagagatggctttagaagaaaaagtttcta

SEQ ID NO: 517670 - DNA, 99 bp, Homo sapiens
tggaggaggaccgggaagccttaaggaaggaagcagagcgccaggcattagcgcagctcgagaaggccaaggtatgacaacgaatttggctacagcaac

SEQ ID NO: 517671 - DNA, 101 bp, Homo sapiens
gaccaccctgggcacagcaggcatcggagctctaagcgaaagacatgaggcctcagcctgaaatgaggttgttttgaggtcatctgatttctgactagaag

SEQ ID NO: 517672 - DNA, 100 bp, Homo sapiens
ccgccggaacccgcaggaggacttcgagctgattcagcgcatcggcagcggcacctacggcgacgtctacaagagtttgccagatccggcccggtgcctg

SEQ ID NO: 517673 - DNA, 98 bp, Homo sapiens
agagacccacagatttggatgtagatacgttagccagtttacttagtccacaaggcgattacaatttccagtcccctaaccacagacctgactgcaga

SEQ ID NO: 517674 - DNA, 50 bp, Homo sapiens
gtggggagtttcatcctagcgggtcctctcaaactgtgagtaactaagtg

SEQ ID NO: 517675 - DNA, 50 bp, Homo sapiens
gggagccccgggagccgcacggtggatgaaaatactaggaaaagtttatt

SEQ ID NO: 517676 - DNA, 100 bp, Homo sapiens
tccccccgcgcctctcttcgcctcgcctcgggacccgcggtccccgctcttgctgatctttgaaccaccagctccaggagaaggcaactccagtcagaac

SEQ ID NO: 517677 - DNA, 90 bp, Homo sapiens
agaccattcagatgggatctttccggatcaatccagatggcagccagtcagtggtggaggcagagaaaatcctgaaggagcaagagcggc

SEQ ID NO: 517678 - DNA, 76 bp, Homo sapiens
caaatgagatgaaccatcttcctgcacacagccaaagtctgcaaaggaaaagagcactggttgccattggtaccca

SEQ ID NO: 517679 - DNA, 82 bp, Homo sapiens
aaaacaaaatcaaccgggaccccagcttttcagaactgcagggaaacagccatcatgagttccaaagaactactggttcaga

SEQ ID NO: 517680 - DNA, 83 bp, Homo sapiens
tggctgccgtccccgctgctgtgcattggacctgcctagagctggaacgttacctccagagcgagccctgctatgtttcagcc

SEQ ID NO: 517681 - DNA, 100 bp, Homo sapiens
tttgtgaaccaattaaataccaagtaccgggattccttgccccagttgagtattgggaaagggtcgttgtggtgcatagacccagagtatagacaaaatc

SEQ ID NO: 517682 - DNA, 100 bp, Homo sapiens
cacctgctgcgtccacaacgtcatcatcgggaagctgtggatagagcagtatgggacagtggagattttaaaccacaggccctcgggaccaaggatcacg

SEQ ID NO: 517683 - DNA, 100 bp, Homo sapiens
agagcactagtgtctagaaggcactaagggttgaaatcacaaagattagacacctttttagataggtgttcttcagcaccactgacaacacggttctgac

SEQ ID NO: 517684 - DNA, 83 bp, Homo sapiens
tgatgaagttcgagcactaatatttaagaaagaagatgttaactttcagaagcctattagtaatggtcttcctccaacaccta

SEQ ID NO: 517685 - DNA, 100 bp, Homo sapiens
aatgccagcactgcgggggccgcttcagccaagttctatagaaattttagagtattcatcagatagtgaaaaagaagatgatttggaaaatgtcctactc

SEQ ID NO: 517686 - DNA, 100 bp, Homo sapiens
cagaggtttgacgcaatcctgaaggcagcgcagtcagccaatatttctgtgcggggggcaattgaaggaacagactaaaaatcgtgtcctggaaggaaac

SEQ ID NO: 517687 - DNA, 74 bp, Homo sapiens
aagctgatttgggaaggaagccaccagctatcccaataaggcacctgaatggacagaagaggacctcagccaac

SEQ ID NO: 517688 - DNA, 90 bp, Homo sapiens
ccgagaggtgctctacgaaatctttcgctccctacacaccctggttggacagcaccctttgacaatgataatgctcttctctggagacct

SEQ ID NO: 517689 - DNA, 100 bp, Homo sapiens
ctgagaagggagacgacgctgctgggtccgctgagcggggcgacccgagtattggtaaaggttttcaaggtgtcatgaaaagatggggatttaaaggcca

SEQ ID NO: 517690 - DNA, 100 bp, Homo sapiens
agacagtcgacgcgctcaccggctgggtgggttcgagcaactaccgggtccaggtgcaggtacagcagtctccgcaacaggtctcggctcagctctcccc

SEQ ID NO: 517691 - DNA, 75 bp, Homo sapiens
agcatggtttacggcatggagattttcagaggtacagccagcagaaaactgagcttccggtcacagagaacgtgc

SEQ ID NO: 517692 - DNA, 90 bp, Homo sapiens
ttctgctttcggggatgcagctggccaagctgatccgacagagaaaggtgctggagaatctggtaaaagcaccattgtgaagcagatgag

SEQ ID NO: 517693 - DNA, 75 bp, Homo sapiens
tgacatcatctctgtgcactgataataaccctgcagtgtattatgcgtcagggtgcagcatcgcgaagtttccag

SEQ ID NO: 517694 - DNA, 97 bp, Homo sapiens
cttgggcccctgtgaacctggaactagcgtcaaccttgaaggcatcgtgtggcaggaaacagaagatgggaaagaccatgtttgtagatttattggc

SEQ ID NO: 517695 - DNA, 100 bp, Homo sapiens
ccgcgccgcctcctgctcagatacctgttcccggccctcctgcttcacggaaactggccaagaagcggaaagagaccatgagcagcacccgacaggagat

SEQ ID NO: 517696 - DNA, 100 bp, Homo sapiens
gaaacccagcttgatacgttggagtacctggccgtagtcgatgctcctcccctggacctccggttcaacccctcgggctacctcttgctggcttcagaaa

SEQ ID NO: 517697 - DNA, 98 bp, Homo sapiens
gacaaaagaaccattgaaaaatttgagaaggaggctgctgagataaaggagatgggtgagatgcatagggaactcaatgcataactatataatttgaa

SEQ ID NO: 517698 - DNA, 100 bp, Homo sapiens
gaggtgatgatgaacacccagcccatggaggagatcggcctcagcccccgcaaggatggcctttcctaccaggctggctttgctacagctgaccactcca

SEQ ID NO: 517699 - DNA, 50 bp, Homo sapiens
ttcgcctgcagctgctcaccgcgtgtgaaggcaaagaagaatgctgctcc

SEQ ID NO: 517700 - DNA, 75 bp, Homo sapiens
ggagagctgatcccatgttctcctgccctgaagcagatgtcatttgtcagagtgaaccgctgtggtccccgagtt

SEQ ID NO: 517701 - DNA, 74 bp, Homo sapiens
gaaaacattttgactttggctgggcacagaagttgggcctcattgggcctccaccacctccactgtcatcagat

SEQ ID NO: 517702 - DNA, 82 bp, Homo sapiens
attgcctgtccatctatggaacaggtttggtgcacctcgatttggaggaagtagggcagggcccttatctggaaagaagttt

SEQ ID NO: 517703 - DNA, 100 bp, Homo sapiens
cacaatttatcattgaataagtgttttaagaaagtggacaaagagaggagtcagtgttcctttctgccgaaattctccattcatatagaaaccaagtatg

SEQ ID NO: 517704 - DNA, 100 bp, Homo sapiens
cgggccgaccgggcgcaccgaccatggcctccaaatgccccaagtgcgacaagaccgtgtacttcgacctcctgccccccgaggtctgcagtctcctgaa

SEQ ID NO: 517705 - DNA, 75 bp, Homo sapiens
ctcatcccctgctccgcccaaggggaccctcctcctgttgtctcttggaccaagatggcttggaaagatgtgaga

SEQ ID NO: 517706 - DNA, 98 bp, Homo sapiens
tctgcttttccagaaactgtgccaggatcacgatccagctccaggtcccacaggggctcttcttccccacgaaaaagatcttattcaagttcatcatc

SEQ ID NO: 517707 - DNA, 90 bp, Homo sapiens
gctcgatgtgcctcctggtgaagacaaggggggatatgtgatcaaagcatcagaagaaccatccgggtatggctgaaaagagacagtggt

SEQ ID NO: 517708 - DNA, 58 bp, Homo sapiens
aagcagctatgggattcaagattgatgttctcacaggtctgacccaacaagtagcact

SEQ ID NO: 517709 - DNA, 75 bp, Homo sapiens
cagcaggttgggagatggcaaagacatcttctggtcagagatacttcttaaaattaagcctgatcaagatgacaa

SEQ ID NO: 517710 - DNA, 100 bp, Homo sapiens
acgaagattcgaaaagccacttgaagaaaagggtgaaggaggcgaattttcagttgatagctgcccaaactccaaaatgatggtagagaattgaccaaga

SEQ ID NO: 517711 - DNA, 75 bp, Homo sapiens
ggacacagcctcgctggaggcagtttctgcgaccgtggcagccatgtattacagctactacatgctaccggacgg

SEQ ID NO: 517712 - DNA, 82 bp, Homo sapiens
gcctcatttagtgaacatccaattcagtttgctgctttgtggtgcacaagcggtgccatgaatttgtcacattctcctgccc

SEQ ID NO: 517713 - DNA, 100 bp, Homo sapiens
cgcttccccatggggctggcctgcggcgcctgggcgctctgagattctggatgaaattgaagaacataacatcaaaatctatcacttacctgatgcagaa

SEQ ID NO: 517714 - DNA, 75 bp, Homo sapiens
acgcctggcctcactcaaacagtaaacgagatcgaccttcagaagatgcccttggggaagctgagcaaaaggcag

SEQ ID NO: 517715 - DNA, 75 bp, Homo sapiens
gggacactcttggtcatggcaacggaggcacagtctacaatttgggcttcctgtagacacccttttcctgcgcaa

SEQ ID NO: 517716 - DNA, 138 bp, Homo sapiens
aagagcaaagctacttccattccagaaagatggcatcatttttgccctcaaaagaaatggcaggtgtgctccatcctctggtctccccattacaaggagctcatctcaggccatggctttgcacagaaccagctagtt

SEQ ID NO: 517717 - DNA, 90 bp, Homo sapiens
ctgtacccactaaagcagtgccatctcctgggagatggattaccgggccttggtgcatgagcgagatgaggcagcctatggggagctcag

SEQ ID NO: 517718 - DNA, 83 bp, Homo sapiens
ctcgactcttggcgccaccgcctcatgcactgtaaaaagcttgtggtgaaggggggcaaaaaaaagaagcaagttctgaagtt

SEQ ID NO: 517719 - DNA, 75 bp, Homo sapiens
ggagcgctgcggagcgaacctcacctttccagggcgcaaggaattgaatgatctggcacgggaccctccagcaca

SEQ ID NO: 517720 - DNA, 98 bp, Homo sapiens
gcggatcgccgcgctcagcgacaaacaacccccgcctctcctggactcttttcaagaccagtctccatctccagcctccttcaagcttgaggctgaag

SEQ ID NO: 517721 - DNA, 100 bp, Homo sapiens
gagacctgagacgtggcgctccctctctgccggcctcggcttcaggtaaaataccatgaagattttgaaaaaacaaaggggagaggctttactcccgtcg

SEQ ID NO: 517722 - DNA, 75 bp, Homo sapiens
cgccccctctagaagtttctgaggaacaggcaaacataaatggccgtgtgttagctcagtgtaacattgatgagc

SEQ ID NO: 517723 - DNA, 97 bp, Homo sapiens
gaccccaggagccggcgcccccgccctgtaggtatctgaaaactgaagagtggagaatatgttcagcagggaacaagaggattcttttagaaataag

SEQ ID NO: 517724 - DNA, 80 bp, Homo sapiens
aagtggactgtccggggccgggctcaggagcagagataaagccaccaatccttccaaccgccaggaggactgggaataca

SEQ ID NO: 517725 - DNA, 98 bp, Homo sapiens
gaacaccttcttcagcttccttcgacgcaaaacagactttttcattggaggagaagaagggatggcagagaagggctgcccaggagctgcaggacaag

SEQ ID NO: 517726 - DNA, 100 bp, Homo sapiens
ctggttctgaggacatggggaccacagtcaatggagatgtgtttcagacagcatcgcacagaattattttaaaaaaaagcagtgatccaagcaattgaat

SEQ ID NO: 517727 - DNA, 75 bp, Homo sapiens
ccaagtacgctgcccagctggacgtcaagagaaccagtgaccttccgggatgtggctgtggactttacccaggag

SEQ ID NO: 517728 - DNA, 74 bp, Homo sapiens
gggtgccgtggcatgtcgatttgtccttcactacaggactatcagacttggcttgaccttagagaatttgaaac

SEQ ID NO: 517729 - DNA, 100 bp, Homo sapiens
ggaaggctggtatctttcagagtgtaaagtaatcttggaatataaaggtgaggtttatacatggggcgacaatgatgagggacaactgggagacggaacc

SEQ ID NO: 517730 - DNA, 80 bp, Homo sapiens
gagatttgctcaatgcattgaagtcagtcattaatgaccctatcttaccctgaaagaagcagatcccagttcaaaagtag

SEQ ID NO: 517731 - DNA, 133 bp, Homo sapiens
ggagaccaaacctgtgataacctgtctcaaaaccctcctcatcatctactccttcgtcttctggagtcaagggtccagagaaggaggagaagttgagacaggcggtcaagcaggtgctgaagtgtgatgtgac

SEQ ID NO: 517732 - DNA, 76 bp, Homo sapiens
cactccggagactcgcggttgctacgcgcaccatggctggaggttcctctcctggctgaaatttatggtatagaag

SEQ ID NO: 517733 - DNA, 100 bp, Homo sapiens
cactgaagtagaacagcaaagagatttaacgtcacagtttttgaagaccaagatggtgtcctcagaccgaagccaactttcctttctgcccacagaagct

SEQ ID NO: 517734 - DNA, 80 bp, Homo sapiens
ggtgtggcccgacgactgtgacgaggacgaggaggcagccacggggcccctggatgtggcaaaatctggcaaaggcagag

SEQ ID NO: 517735 - DNA, 100 bp, Homo sapiens
ccgcctgccccggtgcgcagacagagctattccagcaccagcagagcattcgcaacgacaggcgcctcctctgccaaccggtttgtcagcatcggacccc

SEQ ID NO: 517736 - DNA, 83 bp, Homo sapiens
cagaggcccagcacccacagggccctcatggcgtgcggccgggggatatgagactttctactcggaatatcctgagtgttgcg

SEQ ID NO: 517737 - DNA, 90 bp, Homo sapiens
ccaagtatggcaacatgacagaggaccatgtgatgcacctgctccagaacgtaggcgttcccggtccacatcccgggagagagaacgcag

SEQ ID NO: 517738 - DNA, 74 bp, Homo sapiens
agaccagacctgcaagctctttgacacacagcagttcttgtcaggaactacacggtggtgaacacagagaaggg

SEQ ID NO: 517739 - DNA, 98 bp, Homo sapiens
ctgcctgaatggcgggaagtgtgaagcggccaatggcacggaggcctgcgttttgtttcgacgccggaccgcgtaagagacgatgatgttgggcacgg

SEQ ID NO: 517740 - DNA, 75 bp, Homo sapiens
cgcagatgttgtcaaggtggcctaccaggaggccaggggtgtcgccatggaacttgatgggaaacctgcttctcc

SEQ ID NO: 517741 - DNA, 90 bp, Homo sapiens
tggatttgacacctgaatatttgttccccctgaagagagaagggcacagttacctaagtatcaacgtaatcttcctcggccaggacaggc

SEQ ID NO: 517742 - DNA, 100 bp, Homo sapiens
gccgtcttctttatgatccccacctgggttctggtggacctctcggctttcctggtcagcagcgacttgattcccactggaaattcgttgtatgaatctt

SEQ ID NO: 517743 - DNA, 80 bp, Homo sapiens
cctccttcccagccgcgcggcttcctccagacctctcggcgcgggtgatgtgtccaatctagatcccaacttctcatttg

SEQ ID NO: 517744 - DNA, 94 bp, Homo sapiens
cttgtataaaataggctgagatatagtgactgtaagctgtgatctcagtatacaaagagactaaggtgtcagtatgttcttcaagctgctctgc

SEQ ID NO: 517745 - DNA, 100 bp, Homo sapiens
aaggagtgtactcacaagtattctcatttttcaatgagagtcagtcagtgagtcattaaggaagtttcctgctctacgaaacgcactcttttgccttgaa

SEQ ID NO: 517746 - DNA, 50 bp, Homo sapiens
cagaggtggaggcgctttgaaaggtgtgacgtttctccagatacttcatg

SEQ ID NO: 517747 - DNA, 83 bp, Homo sapiens
gcaggaggaggtggcggcggcgggaagatctcttttgaaacagatggtcaccatgtttagatattagcagtcccgtatgtgca

SEQ ID NO: 517748 - DNA, 99 bp, Homo sapiens
ggtttatatcaatgaagtccgagtcatacccccaggagtaagagcccatagcagtctgccagacaatagagcatatggcttgaagtacatctggattcc

SEQ ID NO: 517749 - DNA, 98 bp, Homo sapiens
gattgaggctgctgtgcacaggaatatggcaattaatggatgcctcgaagttgacgtacatatatattcagaaatgttttgccacctgagacctatga

SEQ ID NO: 517750 - DNA, 82 bp, Homo sapiens
ttgccctgtctcctcgcagatgaggcaccgcatcagcctgctcaaccctttaaatttacaatttccgaatcctgtgatcgga

SEQ ID NO: 517751 - DNA, 105 bp, Homo sapiens
aaaacgctgatactaacctcttattcagaatgtcccaacagaagctaaatttggatttggctgggcttcggaaagaaaaagaagatttactaaagaaattggagt

SEQ ID NO: 517752 - DNA, 148 bp, Homo sapiens
gaatacatatgctgtgagctggtttaaaggcaaagaattaaacctggtgtttggacttcaacttagcatggctagaattcactatcctgaggagcgacatgtggttgaacgccatggacgggacacaagcggaccaaggaaagagtgg

SEQ ID NO: 517753 - DNA, 101 bp, Homo sapiens
agcaggagtgctgccagaaatttgaacaactttccgaatctgcaaaagaaggatcaggtcatccagctgatgaacgcgatcttcagcaagaagaactttga

SEQ ID NO: 517754 - DNA, 75 bp, Homo sapiens
ggagtccctgtgtgggcagctggagccttcaggaggaagtggtgaagttgactgagaaatgccttaataatgtca

SEQ ID NO: 517755 - DNA, 51 bp, Homo sapiens
cttggatccaggagaacggcggctggaaacgggctgtaaaggcagaaaacc

SEQ ID NO: 517756 - DNA, 75 bp, Homo sapiens
tcaacaaggttctggacaagatgaagtctttctgccagggctggggagcagaataccaccgccaggatgttacta

SEQ ID NO: 517757 - DNA, 90 bp, Homo sapiens
aaccaggacagaaatcattatcttagccaccaggcatttcagaagatggacacaaagaagaaggaggaacagttgaagcttctcaaggag

SEQ ID NO: 517758 - DNA, 75 bp, Homo sapiens
ctgtctccattactttgaacttttgaaggatatctatagagaaatggggtttggtcactatgaagaagaagaaag

SEQ ID NO: 517759 - DNA, 98 bp, Homo sapiens
ggaaatcagatgactggacttgtagatactaacggttctgaagcggacatggcagggaggtttaatagacatggataagaagtccactcacagaaatc

SEQ ID NO: 517760 - DNA, 75 bp, Homo sapiens
agttcctgcctccagctgccaggggggacagccagccagcagcaggagggaataactcaagtcacctgtactgga

SEQ ID NO: 517761 - DNA, 83 bp, Homo sapiens
cggggccgctggattctgaggaccagcagatggccagtcacgagaacccagtggaatgcagtagccctctgggcctgggatat

SEQ ID NO: 517762 - DNA, 100 bp, Homo sapiens
cgggaggagccttaacaagcgcacggagccctcaaggcatttggctttatgtcccgagttgccctacaagcagagaagatgaatcatcacccagaatggt

SEQ ID NO: 517763 - DNA, 120 bp, Homo sapiens
acttctgaggctttctatcctccatgctgctcactagaaaaggggctgtgaactattttgctggaggagcttgccaacagcgatcccaagttagccctcactggagttcctatagtacag

SEQ ID NO: 517764 - DNA, 74 bp, Homo sapiens
agggaaccctggtcaccgtctcctcagctccacagcacctgttgccttcattagcagcttttcctcctcttccc

SEQ ID NO: 517765 - DNA, 83 bp, Homo sapiens
cgggcctccaaggaacttaagcaaagcctggcgctggccaacaatagcaccctcaccattggcaccatcgatgagatccagaa

SEQ ID NO: 517766 - DNA, 98 bp, Homo sapiens
gtgcctcccagcaccacagtccttctgcagtccctcgtccagccacccccagggtttggtaaaggctccagtgtggtggcctatgaaggacaatcctg

SEQ ID NO: 517767 - DNA, 99 bp, Homo sapiens
cagacagcatatttgagtcatttccttcgtacccacagtgcttcatgagagctccagaaactaaaacgatcactttctttcaagaccaagagtttacgg

SEQ ID NO: 517768 - DNA, 50 bp, Homo sapiens
aagctttcctaggccaaaaagaggcatcttgacagcagtagcaatgagcg

SEQ ID NO: 517769 - DNA, 98 bp, Homo sapiens
cctgctaatgctcatctgaaggacttggatgaagaaatctttgatgatgatgacttttaccaccagatcatgtttcaggcatatggagacaaacaggg

SEQ ID NO: 517770 - DNA, 90 bp, Homo sapiens
ggccgacaacctggccatccagcttgctattcttcttgatgaactatcttctactaaacattgggcatctatgcacgtttcagaccacag

SEQ ID NO: 517771 - DNA, 78 bp, Homo sapiens
ggagacggcaagggttggatttttcaaaagagtaaaccaggattggattcagcatcaaaatacatctactcatattga

SEQ ID NO: 517772 - DNA, 83 bp, Homo sapiens
cagcaagcaactttgagctgcacgttgcacaagctggtgctcaagaccgaatcggctgggcttttggcctaggattagaaagg

SEQ ID NO: 517773 - DNA, 83 bp, Homo sapiens
ggaaggcgtgggcgacccggtgtgtggcgcgcccagagccccgcgtttcagccctagggaagataacgaaggaggcccaactt

SEQ ID NO: 517774 - DNA, 108 bp, Homo sapiens
cgcgagagggggaaaagcgagcgatcgagcgagcgcgcgcgcgaaaactccgggcagccaccccacgtcatgctgcagcgccgcagagatcatggctgtcctcttttt

SEQ ID NO: 517775 - DNA, 88 bp, Homo sapiens
acctccgtgggccacctcatagccctgtatgatgagattcgtcagtttcgcaaggcctgtggggaggctcatcttaaaactatattag

SEQ ID NO: 517776 - DNA, 100 bp, Homo sapiens
cccgcgctgcgcatccccgcggacgccacagcgctgaatcagagatcattgatttcttcctgggggcctctctcaaggatgaggttttgaagattatgcc

SEQ ID NO: 517777 - DNA, 100 bp, Homo sapiens
gtggaatgcaagtctgccgatgaagatgtcattaaggtcacatgtgccaatttaacgaacggtggaaagtcagaacttctgaaatcaggaagcagcaaat

SEQ ID NO: 517778 - DNA, 80 bp, Homo sapiens
ctctggaccaacttgaccgtctactggaaatctgaatgctgttatcacctgcaagctttcttcctggtggcagatgacat

SEQ ID NO: 517779 - DNA, 82 bp, Homo sapiens
aagagatcagtcattacaatagcaacttctgttgataagttggagcatatcatgtcccgagtgggaaaatattagctgtaaa

SEQ ID NO: 517780 - DNA, 50 bp, Homo sapiens
tcttaacacctacctgattctggcatacaattccaactccacagagtgac

SEQ ID NO: 517781 - DNA, 100 bp, Homo sapiens
gtgctgctgagcttggcctcggcgtcctcggagggcccttgccttgtccacaccatcactggagatttgctgagagcccttgaaggaccagaaaactgct

SEQ ID NO: 517782 - DNA, 75 bp, Homo sapiens
gaactgtacacctattggaacccttaagacacgatgaggcgagtggtacgacagagcaagtttcggcatgtattt

SEQ ID NO: 517783 - DNA, 103 bp, Homo sapiens
ggctgtttggaaagacccaggagaagccgcccaaagaactggattggattcagcatcaaaatacatctactcatattgagagctgtcgacagttacgtcaaca

SEQ ID NO: 517784 - DNA, 100 bp, Homo sapiens
gctggtgcagccaccctcgctccctctgctcttcctcccttcgctcgcaccatgcagttggaattgatcacaccttttcagttgtacttcaatcctgaat

SEQ ID NO: 517785 - DNA, 100 bp, Homo sapiens
ccctcataagctatgcagtcatgcagatcagtatgtgcaaaaagaataatcctcctctgaagtcacggagcttctcacttgcatctagtagtaattctcc

SEQ ID NO: 517786 - DNA, 75 bp, Homo sapiens
gaaggtgatggcggccatcgagaaagtgcggaaatgctgaccacagtggccgagaagtcgcgcgtgctgcagctg

SEQ ID NO: 517787 - DNA, 90 bp, Homo sapiens
ctctcagcgccgctcccagccacagcctcccgcgcctcgctcagctccaacatgacatgtcatgctgcccaaggacatagccaagctggt

SEQ ID NO: 517788 - DNA, 74 bp, Homo sapiens
gaatttgtggctggctggatctctgacgaaggggaggaccaggctggcgatgaagatgaagatgatgaatggga

SEQ ID NO: 517789 - DNA, 100 bp, Homo sapiens
catttttctccccatccttggacaagcgcctcaaactcatttttcttcagcctccaaagcctctgtcttcactcagcactctgagggatggaaattggag

SEQ ID NO: 517790 - DNA, 100 bp, Homo sapiens
ctccgccagttaagaggaaaaaggtagctacagcaagctgggtagcaggcagatccaaaggatatcatgaagtttccagggcctttggaaaaccagagat

SEQ ID NO: 517791 - DNA, 100 bp, Homo sapiens
accagtacattaggaaacatgctagaattacctggaacttcatcatcatctacttcacaggaattgccatttatttagtacctcaagacaaactcttatg

SEQ ID NO: 517792 - DNA, 84 bp, Homo sapiens
accggggccggaggcggcgcgccctgcaagagggagtgcatccgccccaacccttttccccctcgtctcctgtgagaattcccc

SEQ ID NO: 517793 - DNA, 75 bp, Homo sapiens
acgcctacttctataaagtcatccagcagcaacaactccaggcccagcatttatcacatggacatggtctccccg

SEQ ID NO: 517794 - DNA, 50 bp, Homo sapiens
ttgcctttgtattcaaggagaaggtgtatttatgggacccacaaatatac

SEQ ID NO: 517795 - DNA, 75 bp, Homo sapiens
ctacaaccagtggcagcagggtattaaatctcttgatgaacagtgtgtggttggcaaaatttccaagcactggac

SEQ ID NO: 517796 - DNA, 90 bp, Homo sapiens
ggggccgcggccggaccgagcgcctcgacctcggtctgaggtttaccgacaagactgtgaaactttcgggatggtggtgaaaatgctgat

SEQ ID NO: 517797 - DNA, 100 bp, Homo sapiens
taaccgtccaggaatgagaggaggccatcagatggttattgatgttcaaacagagcgacgaaggtcctgaaccagaggctgaggaatcagacctggacag

SEQ ID NO: 517798 - DNA, 100 bp, Homo sapiens
gctagctgaaataacccttgatcctcctcctaattgcaggctctttggtgtaacgggaaactgcgctgcctgtagtaagctcatccctgcctttgagatg

SEQ ID NO: 517799 - DNA, 100 bp, Homo sapiens
cccatctcaccccccaagcggatactggtcttctcgtcggattgcccatgcacttgttgcagaaacagccaagatgagattgtggggaacctgggtgaag

SEQ ID NO: 517800 - DNA, 74 bp, Homo sapiens
gagtgaccaggctgaccagcaccagccctgatccaggtaagagggactttgaacatgtcggggatcgccctcag

SEQ ID NO: 517801 - DNA, 100 bp, Homo sapiens
tgcttggaattctgcccactctgcggagttagcagtcacgacctccagcacaggtattatagctgcaaatgtccttgtattctgtttatggagagtacct

SEQ ID NO: 517802 - DNA, 90 bp, Homo sapiens
atcataatgaacatcatgatttccccaacattcctggaaaaagtcttccactggttcaattcaactcagacttcataagaaagccaaagc

SEQ ID NO: 517803 - DNA, 98 bp, Homo sapiens
gttatattatttgtggtgtacttctgggaccttcaggactaaatagtattaaggcgtggtgtccctcgtggccgttcacccctccaccgtcaacccgc

SEQ ID NO: 517804 - DNA, 101 bp, Homo sapiens
tgctttgcaacgctaattagactcatgccacttgaggtggatccataaagaacccagccaacccgcagagggaggggaggggctgagctgtgaggagagcg

SEQ ID NO: 517805 - DNA, 75 bp, Homo sapiens
cccggactcatacagagattgaaatgttccttagaaaggagcagcagctggtgagagagtgtaaggaggtcctga

SEQ ID NO: 517806 - DNA, 75 bp, Homo sapiens
cagcggctggaggagcggacgggccccgcggggcccgagggcaaggagcaggattggccatttgatgatggagct

SEQ ID NO: 517807 - DNA, 99 bp, Homo sapiens
gcctttttccgctgtaaataattaagaagaccaagtagcatccaaggtagcagcagcagcagcagcagcagcagcagcagcagcagcagcagcagcagc

SEQ ID NO: 517808 - DNA, 97 bp, Homo sapiens
gttttcctttgaaccaaaaatccgatcacctcgaagatttattggcagcccacgaacacctgtcaggtgggagctgctatttctatgacgtacatca

SEQ ID NO: 517809 - DNA, 100 bp, Homo sapiens
cctactgaccccacctgagcacctggagggactatgcagccatcgtcttctttgctaacaaccgctttgagacagggaagaaaaaactgcagtatctgag

SEQ ID NO: 517810 - DNA, 101 bp, Homo sapiens
ctggggccctgggtgaagtgctccgtcgcccttgcctccagagttttccgtctgatgaaggttggccatttgcaaagtatcttggagcttgtggaagaatg

SEQ ID NO: 517811 - DNA, 98 bp, Homo sapiens
aaaggacaaacaagtgaaatacttcatacattacagtggttggaataaaaaggggacttgatctcatcttcatgccaggccttgggtttgacaaacat

SEQ ID NO: 517812 - DNA, 101 bp, Homo sapiens
tgcttcccattgctgcaggtgaagaagaacgctggggcttgcagtcatgtctacagatcttgaagaagtggttagcagcattttgaatgtcaaaattccag

SEQ ID NO: 517813 - DNA, 100 bp, Homo sapiens
gatctgccacagcttcagcatcgagctgctgttatcccaccaatgaatgtcacaggtagactaatggttggcctacgttggtggaatcacattgatgaag

SEQ ID NO: 517814 - DNA, 101 bp, Homo sapiens
aagatcctggagacgcggctggacaacgacaagctggtgaagacacacaacctgctgaccaccaggaactatatctttggataccacccccatggtatcat

SEQ ID NO: 517815 - DNA, 139 bp, Homo sapiens
actgctcgcaggtggactcggtccgtggcttcggaggcaagtttggtgtccagatggacagagttgatcagggatcatagacggtatttctatgtaaacgaacagtcgggcgagtctcagtgggagtttccagatggtg

SEQ ID NO: 517816 - DNA, 75 bp, Homo sapiens
gctcaagatggcgtgcttgttggagaccccaatccgcatgagcgtcctttcggttggaatgttgcatcagcaggt

SEQ ID NO: 517817 - DNA, 100 bp, Homo sapiens
ccggaaatatggcctcaatatgtgccgccagtgtttccgtcagtacgcgaaggatatcggtttcattaagatgatgtcagttcatacagactgtattgtg

SEQ ID NO: 517818 - DNA, 101 bp, Homo sapiens
tgacaatttgcacttagtgaaagactggagaactgtgaatgaaggaccgtataatagacgctggccccaaaggaaactactctcgatttatgaatcacagc

SEQ ID NO: 517819 - DNA, 100 bp, Homo sapiens
cgggaaatggccgctgtgtggttgcaacggagataaattcccggaaccgcgattcggcgtgtcagttccctgtgtctctggtggtttgcctaaacctgca

SEQ ID NO: 517820 - DNA, 83 bp, Homo sapiens
ctctggctctggctgtgcgcgctggcgctgagcctgcagccggccctgccgcacatggattaattgatgtatgttgagtttat

SEQ ID NO: 517821 - DNA, 82 bp, Homo sapiens
ccagtgtaaaggaacggagagaaatcctcagtgaacttgggaagtgtgttgctggaaaaggacttgaaagaggagattgata

SEQ ID NO: 517822 - DNA, 75 bp, Homo sapiens
ttgggaatctgcgtcagaagtcactcgcagtcccgtcagcccagatgaagatctccttcaacgacaaaagcctgc

SEQ ID NO: 517823 - DNA, 75 bp, Homo sapiens
ggtccgcgcccggagcgccccgccgcgcacacccgtggaccgggagcccgtggaccgggagccggtggtgtgcca

SEQ ID NO: 517824 - DNA, 100 bp, Homo sapiens
actgcgacgttcacagaggaacactgccggggcccaaccacaagacgactcaataggaggaaggttcagccgtctgtatatctccccagatacctgaaac

SEQ ID NO: 517825 - DNA, 82 bp, Homo sapiens
tccatagcctctgttcgttttcactgcaggaccaggcacgaaagatggcaatggttatatcagtgcagcagaactacgtcac

SEQ ID NO: 517826 - DNA, 100 bp, Homo sapiens
ccatcaccctccttgcagcctcccccagaaagcaatgataattcccaggacagtcagtctggtactaacaatgcagaccaagatcactccatggatgaaa

SEQ ID NO: 517827 - DNA, 100 bp, Homo sapiens
ctcatttggataaagaccaagaagtgggattactggattatatggcagttgcagtggtgcagaatggctgacctcagtcttgcagatgcattaacagaac

SEQ ID NO: 517828 - DNA, 100 bp, Homo sapiens
cctccacacagtgcggcagcccccacttgtacccacatgttccttcgaacaagaacaacctcaggaatttgctgacacaatatcttccgcctggtgctgg

SEQ ID NO: 517829 - DNA, 90 bp, Homo sapiens
ggcccgggaacggcgcgggtggtagaggaggagccgcgggctcggtctctagcatcaattcacgctttgccaaagtacacatcctgtatg

SEQ ID NO: 517830 - DNA, 98 bp, Homo sapiens
cccacaatagggtatcatttttacgggccttctggagatgcttccgaactgtgggcaaaaatggcgatgagtgtgggtcagagagccaaactgactat

SEQ ID NO: 517831 - DNA, 106 bp, Homo sapiens
taagaagaaggcggaaggcggcggaggcggcggtcgccccggggctccggcggcggccgcttacaaacacgcagatggcaagaagattgatggcaggagggtcctt

SEQ ID NO: 517832 - DNA, 100 bp, Homo sapiens
cctctccgtccatggccccagatgacacttcagatgaacaggaagcggtgcaggaggttcctagagttgttcagaatcctccaaaaccagtcatgaccac

SEQ ID NO: 517833 - DNA, 101 bp, Homo sapiens
caagaacaagtcagtgaatatttgggtgtgacctcctttaaaaggaaatatccaggattcttacagaagcagagattgatgctcaccttgttgctctagca

SEQ ID NO: 517834 - DNA, 75 bp, Homo sapiens
aggaggaggatgatgatgatgattcaaaggcatttgttgctatcggggactacaatggccacgtcggtctgggtg

SEQ ID NO: 517835 - DNA, 75 bp, Homo sapiens
ttcgagcactaatatttaagaaagaagatgttaactttcagaaattgaagccaaggaagcttgtgattggctacg

SEQ ID NO: 517836 - DNA, 100 bp, Homo sapiens
caccatgtcaatgtgaaccccaacttctcatttcaggtatgctgctgaaagtgggaatcctctacattggtgggcagctggtgaccagtggggctgtaag

SEQ ID NO: 517837 - DNA, 50 bp, Homo sapiens
cctagccaatggagcattcatgcccaaaattatatccagatcgagagaca

SEQ ID NO: 517838 - DNA, 100 bp, Homo sapiens
tccggaattggttccttccagtggattcttggtctcgctgacttcaagaatgaagccacggactgtcgcgcatccataccccagtttaccaattccccca

SEQ ID NO: 517839 - DNA, 82 bp, Homo sapiens
agatcaagaagctcattaagagcttggaggcggcccgcgggttgacatcatggacatatgtgagtccatcctggagaggaag

SEQ ID NO: 517840 - DNA, 98 bp, Homo sapiens
ttgacctctcaatgaaagtgttgaaacaggatgggaaatattttacacaggaccctgatgctcccataagacagaaaatgccccttgatgatctggat

SEQ ID NO: 517841 - DNA, 96 bp, Homo sapiens
gaactctatagattctgctggtatacagctacatccaggagagaatgctgacagtcctgcagctgctgataaagatgatagttcagaagacatttc

SEQ ID NO: 517842 - DNA, 90 bp, Homo sapiens
ggtcattctgccctttcttgggctgtgttcacggcctgagacctgggaggaagctggagaaaagatgccctctgaatctttgtgtttggc

SEQ ID NO: 517843 - DNA, 100 bp, Homo sapiens
atgaagaggacattcgcaatgccatcatggccatccgccggaaccgcgtggccctgaaggatggcagtggcagcaccatgatgcaaaccaagaccttctc

SEQ ID NO: 517844 - DNA, 75 bp, Homo sapiens
atttttctgcaatggaattaaatggccaaaacatccagtcatggataaaaatgagctggttcagaaggccaaact

SEQ ID NO: 517845 - DNA, 100 bp, Homo sapiens
gccatggccgccgccgatgccgagagaaagcaattgagctgcgtctggcaaaaattgaccatactgcaattcacccacatttacttgacatgaagattgg

SEQ ID NO: 517846 - DNA, 75 bp, Homo sapiens
tcgcagtctccccaggtccgcccagcagccgcgcttcagccagctgttaggcaattttcttcagtggtatggcat

SEQ ID NO: 517847 - DNA, 74 bp, Homo sapiens
accgcagatgttgtcaaggtggcctaccaggaggccaggggtgtcgccatgagacgagttgtactgctgtcaca

SEQ ID NO: 517848 - DNA, 100 bp, Homo sapiens
ggcagggcccgaggggccgacccgcagcgtccctggtctctccagccctcactcggaaccgcacgatctggccatgcactgattgagcagtggaatcccg

SEQ ID NO: 517849 - DNA, 100 bp, Homo sapiens
ggctactgccccctgggtgcaaagatgctgtgtgctgtggacccacctggggttcatggagtgggccacggggcccagccctaagcactgctgcgcccag

SEQ ID NO: 517850 - DNA, 98 bp, Homo sapiens
attccagggagataactttcgtatcacaaaagcagatgctgctgaattctggagaaagttttttggagacaagtagttgtgtcaactaacatagcaga

SEQ ID NO: 517851 - DNA, 80 bp, Homo sapiens
aagaatggggtaaatttcttcacaccaaaaataaggtgcggtcttgctctgttgcctaggctggagtacagtggtatgag

SEQ ID NO: 517852 - DNA, 75 bp, Homo sapiens
acggctgtgtgctggcagtgtgggacacctgcttggaggacttaaacaggcacaatcaaaaccatctcagtcaga

SEQ ID NO: 517853 - DNA, 82 bp, Homo sapiens
tgggacaatgggttcagacaaaaggttttcttggagcagaagaaaatgttaaaaagtggccttaacatagcccactttaaac

SEQ ID NO: 517854 - DNA, 97 bp, Homo sapiens
agcgttggagaggtgttaccggaacggcggcgacaagggtgttcccgaactagagtggggagtaccccacttggctgctacaagaagctgattgaat

SEQ ID NO: 517855 - DNA, 87 bp, Homo sapiens
atcatcgagctaaaatatcgtgttggcctgtatgtggaatcagagggaaaacgctcataattaacctgccaggtagcaagaaaggat

SEQ ID NO: 517856 - DNA, 89 bp, Homo sapiens
catttggggaccagagatggacggtcactcagcctatggagtttcaccagtgatcattaaagaatgggcagcttacaaaggaaagtctc

SEQ ID NO: 517857 - DNA, 100 bp, Homo sapiens
ggtgatgacatgggacttggaaaaacagtacagatccctctctgggcgcattgttggaggtgtgtggtggttctttaccctgatcataatctcctcctac

SEQ ID NO: 517858 - DNA, 100 bp, Homo sapiens
gcaaggaagcctggttcagcaggtggccctaaggttggagaccatggcaaaagttataaccaccgtactgaagttccctgatgatcagactcagaaaatt

SEQ ID NO: 517859 - DNA, 51 bp, Homo sapiens
cctgaggaccccagagggattcttaaaatccttgcacgtttgatgactgcc

SEQ ID NO: 517860 - DNA, 100 bp, Homo sapiens
tagacggtggcttgttgcagatcctgattgtaggtggtgtccagctccagactgtggttataggatattccaagataaatgcatgaatactaccttgacg

SEQ ID NO: 517861 - DNA, 100 bp, Homo sapiens
cgtctctgcagcccgcgggtaactgggccgttgccgccgtccgcgctcggcccccgcggagagacgcaaacatgcagatctttgtgaagaccctcactgg

SEQ ID NO: 517862 - DNA, 90 bp, Homo sapiens
agccggtggcatggggataatcggacaatacaactctccacccttttttatggtgttcattgaggatgtcagcagggagtttgtggagga

SEQ ID NO: 517863 - DNA, 75 bp, Homo sapiens
cagcaccacctttttggggaagatttacctagctgccaggtacaagaaaattccccaggacacagagctggtttg

SEQ ID NO: 517864 - DNA, 100 bp, Homo sapiens
tacaatctaagaaggatttcagcaaatttggagcaggagggagacgtggtgggcggtccttcctgtgacacgacccttgagtgacagttctatttgattg

SEQ ID NO: 517865 - DNA, 97 bp, Homo sapiens
aacaaggggaacagaaccaaccaggctttacaggcattcctgcatcgcatccggcagaacgtggccgactcagtggagaagggcctcacggaggaga

SEQ ID NO: 517866 - DNA, 98 bp, Homo sapiens
gaagaggtgccggacccgatgagctcgggagtccaccatcgctctgcaagccgcagggaagtcgagacaacatgagtgtgattttgatctgttttcca

SEQ ID NO: 517867 - DNA, 100 bp, Homo sapiens
aaacgcagtgctggctcggctgaacagtgagctccagcagcagctcaaggcacggaatgttaacactggtgaattagcagcaattaaagtaataaaattg

SEQ ID NO: 517868 - DNA, 80 bp, Homo sapiens
ctggagttgaaagagctcttcattcctgagtctcctgtaccactgagaatagccgtgcaaggttataaacgcaaaagatg

SEQ ID NO: 517869 - DNA, 90 bp, Homo sapiens
gagggcatgctcctcaggctggaagagttttgcagcctggctgacctgatttatcagtcctggctagacaagtccacaccctacacggct

SEQ ID NO: 517870 - DNA, 75 bp, Homo sapiens
gagagattctgggagccaaacactccattgggatcctagctggtttttaggatgatcgaagaacgccccacacat

SEQ ID NO: 517871 - DNA, 100 bp, Homo sapiens
agcgtggtggggcagcagaagctccagagcccagacttgcagccaagacaatgcaaactccagtgaacattcccgtgcctgtgctccggctgccccgggg

SEQ ID NO: 517872 - DNA, 82 bp, Homo sapiens
cgagcccagcgtcaacttcctcaagtcgcccaaagtgagtgtgtccgcttgaaaccaactgacatacagcccgacatcttca

SEQ ID NO: 517873 - DNA, 80 bp, Homo sapiens
aggacctctcgccaagggccccaatgagtggcacacagtctactatcaccgacagaggatgtactgagtaaagatgctgg

SEQ ID NO: 517874 - DNA, 50 bp, Homo sapiens
catatggacaatgaatctgcaaagggtctccaactgaattccttgaagag

SEQ ID NO: 517875 - DNA, 85 bp, Homo sapiens
atgcatggtgtggggttggtgtgattagcttcgcagtctggaaagctttaggagttcacagtgtggaacggcacatgtgtgatgg

SEQ ID NO: 517876 - DNA, 74 bp, Homo sapiens
cagcctggctctgaagtggaattatgtgcttcaaacaggttgaaagctaaacaaccgatgtgtccgtgccaaaa

SEQ ID NO: 517877 - DNA, 82 bp, Homo sapiens
caaagagatctttctgagagagctcatttcaaattcatcagatacaatgcagatcttcgtgaagactctgactggtaagacc

SEQ ID NO: 517878 - DNA, 90 bp, Homo sapiens
tacgggagaaaaccgggcgcaaggcccaactggaaggcattattgcaccaaagaagtgataatttccacatgattaatttccaacaagac

SEQ ID NO: 517879 - DNA, 101 bp, Homo sapiens
aacaccatgccgtccgccttctctgtcagctctttccccgtcagcatcccagccgtgctcacgaggctgtggccaggccagctgggctcggggagcgccag

SEQ ID NO: 517880 - DNA, 100 bp, Homo sapiens
ccggcaaggccatcggcgtgctgaccagcggcggggatgctcaagctagaagaaccacacctcttttggaatatattaaaaatagaaaattagaaaagca

SEQ ID NO: 517881 - DNA, 75 bp, Homo sapiens
ctcggagcaacgagcgcagcgccggtcgcccctcagtctccactagagacaggactgaccagttgctcttccttc

SEQ ID NO: 517882 - DNA, 100 bp, Homo sapiens
gtccgcaccggcaccatcctgctcggcgtctggtatctgaaagtactgaaatcccaccttatgtgatgaagtgtccgagcaatggtttgtgtagcaggct

SEQ ID NO: 517883 - DNA, 100 bp, Homo sapiens
cggtcgccatcagacccgcgaaggccaggtcagagcagcccaccatgggatggggagggggtggaggctgcaccccgcgcccacccatccaccagcagcc

SEQ ID NO: 517884 - DNA, 95 bp, Homo sapiens
tgaacttctcaggaagcagtactattcaagagatatctcccggggccaattcagcatctctacctggccatcctaacaaggtgatttgtgaaagg

SEQ ID NO: 517885 - DNA, 100 bp, Homo sapiens
ggaaacagtggcatggttcgtgccaaattccgaagcaatcttcctgctaaggccattggacacagaatccgagtgtattctttgaaactggagaaaggag

SEQ ID NO: 517886 - DNA, 100 bp, Homo sapiens
caagaagatcatcaagcgcaagcacaccctaccgaattacaagatcagtggatgaggatcgcagtacggaacctgaccgattgcaggtgtttcacaagag

SEQ ID NO: 517887 - DNA, 99 bp, Homo sapiens
tgccgcctcgctgtccctgcggcttctgggggttctaaggcccagcagctactacaaggattgcaagccagtgatgaaagtcaacagcttcaggcagtt

SEQ ID NO: 517888 - DNA, 100 bp, Homo sapiens
ttggaatatcgaattcgtcagcaaacagacatttacaaacagatacgtgctaataagagtgcttgtgatttcacgtatttttgctgaactcgtaaaagag

SEQ ID NO: 517889 - DNA, 75 bp, Homo sapiens
cccagaaataaaagcatcagagagacgaacagctgtggccattgcaggttggatggcaagcatgtggtgtttggc
